United States Patent Application Publication US 2019/0136230 A1 - sequence listing, part 2

SEQ ID NO: 21737 - RNA, 20 nt, Artificial Sequence
  Synthetic oligonucleotide: Ptpn6-201
auacaaacuccguaccuuac

SEQ ID NO: 21738 - RNA, 20 nt, Artificial Sequence
  Synthetic oligonucleotide: Ptpn6-412
ucuucuugaaaugcuccacc

SEQ ID NO: 21739 - RNA, 20 nt, Artificial Sequence
  Synthetic oligonucleotide: Ptpn6-2661
caccaagggugaggggcacc

SEQ ID NO: 21740 - RNA, 20 nt, Artificial Sequence
  Synthetic oligonucleotide: Ptpn6-2662
uguacuugccccccugcacc

SEQ ID NO: 21741 - RNA, 20 nt, Artificial Sequence
  Synthetic oligonucleotide: Ptpn6-150
cuucgacagccucacggacc

SEQ ID NO: 21742 - RNA, 20 nt, Artificial Sequence
  Synthetic oligonucleotide: Ptpn6-397
ggcauugauguagucggacc

SEQ ID NO: 21743 - RNA, 20 nt, Artificial Sequence
  Synthetic oligonucleotide: Ptpn6-2663
ggaagggggggcgcccuacc

SEQ ID NO: 21744 - RNA, 20 nt, Artificial Sequence
  Synthetic oligonucleotide: Ptpn6-390
ccguggccuccagacaaccc

SEQ ID NO: 21745 - RNA, 20 nt, Artificial Sequence
  Synthetic oligonucleotide: Ptpn6-2664
ccacuguguagcguccaccc

SEQ ID NO: 21746 - RNA, 20 nt, Artificial Sequence
  Synthetic oligonucleotide: Ptpn6-2665
auucuccccugugagcaccc

SEQ ID NO: 21747 - RNA, 20 nt, Artificial Sequence
  Synthetic oligonucleotide: Ptpn6-398
gcauugauguagucggaccc

SEQ ID NO: 21748 - RNA, 20 nt, Artificial Sequence
  Synthetic oligonucleotide: Ptpn6-366
aggaagcugaggacaccccc

SEQ ID NO: 21749 - RNA, 20 nt, Artificial Sequence
  Synthetic oligonucleotide: Ptpn6-2666
ggccuaauuuggcucccccc

SEQ ID NO: 21750 - RNA, 20 nt, Artificial Sequence
  Synthetic oligonucleotide: Ptpn6-2667
ggacauagggucagugcccc

SEQ ID NO: 21751 - RNA, 20 nt, Artificial Sequence
  Synthetic oligonucleotide: Ptpn6-179
gacgggacaguaacaucccc

SEQ ID NO: 21752 - RNA, 20 nt, Artificial Sequence
  Synthetic oligonucleotide: Ptpn6-178
ggacgggacaguaacauccc

SEQ ID NO: 21753 - RNA, 20 nt, Artificial Sequence
  Synthetic oligonucleotide: Ptpn6-180
uaagaccuacaucgccagcc

SEQ ID NO: 21754 - RNA, 20 nt, Artificial Sequence
  Synthetic oligonucleotide: Ptpn6-208
caugggguccccagugagcc

SEQ ID NO: 21755 - RNA, 20 nt, Artificial Sequence
  Synthetic oligonucleotide: Ptpn6-2668
agucaaaccucagguccgcc

SEQ ID NO: 21756 - RNA, 20 nt, Artificial Sequence
  Synthetic oligonucleotide: Ptpn6-2669
ccgagagguggagaaaggcc

SEQ ID NO: 21757 - RNA, 20 nt, Artificial Sequence
  Synthetic oligonucleotide: Ptpn6-2670
aggugguucgcagaagggcc

SEQ ID NO: 21758 - RNA, 20 nt, Artificial Sequence
  Synthetic oligonucleotide: Ptpn6-2671
ggugcgugcagagcagggcc

SEQ ID NO: 21759 - RNA, 20 nt, Artificial Sequence
  Synthetic oligonucleotide: Ptpn6-2672
uggcccugacugccacugcc

SEQ ID NO: 21760 - RNA, 20 nt, Artificial Sequence
  Synthetic oligonucleotide: Ptpn6-349
uguucccguacuccgacucc

SEQ ID NO: 21761 - RNA, 20 nt, Artificial Sequence
  Synthetic oligonucleotide: Ptpn6-2673
aucucccgaaucaggucucc

SEQ ID NO: 21762 - RNA, 20 nt, Artificial Sequence
  Synthetic oligonucleotide: Ptpn6-357
ggaugucaaugucacagucc

SEQ ID NO: 21763 - RNA, 20 nt, Artificial Sequence
  Synthetic oligonucleotide: Ptpn6-364
gccgcugguugaucuggucc

SEQ ID NO: 21764 - RNA, 20 nt, Artificial Sequence
  Synthetic oligonucleotide: Ptpn6-212
uggggguguccucagcuucc

SEQ ID NO: 21765 - RNA, 20 nt, Artificial Sequence
  Synthetic oligonucleotide: Ptpn6-161
guuggaacugaacaagaagc

SEQ ID NO: 21766 - RNA, 20 nt, Artificial Sequence
  Synthetic oligonucleotide: Ptpn6-228
ugaaaccacuaagaagaagc

SEQ ID NO: 21767 - RNA, 20 nt, Artificial Sequence
  Synthetic oligonucleotide: Ptpn6-2674
aucucagaguuugcagaagc

SEQ ID NO: 21768 - RNA, 20 nt, Artificial Sequence
  Synthetic oligonucleotide: Ptpn6-2675
ggccacucacauuguccagc

SEQ ID NO: 21769 - RNA, 20 nt, Artificial Sequence
  Synthetic oligonucleotide: Ptpn6-395
ucucaucagggccuagcagc

SEQ ID NO: 21770 - RNA, 20 nt, Artificial Sequence
  Synthetic oligonucleotide: Ptpn6-2676
ccugcaggugcgugcagagc

SEQ ID NO: 21771 - RNA, 20 nt, Artificial Sequence
  Synthetic oligonucleotide: Ptpn6-204
ggcauuaccaguaccugagc

SEQ ID NO: 21772 - RNA, 20 nt, Artificial Sequence
  Synthetic oligonucleotide: Ptpn6-215
caggaaagucugccucacgc

SEQ ID NO: 21773 - RNA, 20 nt, Artificial Sequence
  Synthetic oligonucleotide: Ptpn6-405
gccgcugcccuuccagacgc

SEQ ID NO: 21774 - RNA, 20 nt, Artificial Sequence
  Synthetic oligonucleotide: Ptpn6-202
uaccuuacaggucuccccgc

SEQ ID NO: 21775 - RNA, 20 nt, Artificial Sequence
  Synthetic oligonucleotide: Ptpn6-2677
ggggugccaucagaggccgc

SEQ ID NO: 21776 - RNA, 20 nt, Artificial Sequence
  Synthetic oligonucleotide: Ptpn6-2678
gcccaccccugaccugccgc

SEQ ID NO: 21777 - RNA, 20 nt, Artificial Sequence
  Synthetic oligonucleotide: Ptpn6-362
gaggcagacuuuccugccgc

SEQ ID NO: 21778 - RNA, 20 nt, Artificial Sequence
  Synthetic oligonucleotide: Ptpn6-192
cccgagagguggagaaaggc

SEQ ID NO: 21779 - RNA, 20 nt, Artificial Sequence
  Synthetic oligonucleotide: Ptpn6-164
uccgaggauacagccaaggc

SEQ ID NO: 21780 - RNA, 20 nt, Artificial Sequence
  Synthetic oligonucleotide: Ptpn6-2679
ggugcaugguggggaccggc

SEQ ID NO: 21781 - RNA, 20 nt, Artificial Sequence
  Synthetic oligonucleotide: Ptpn6-214
ggaccagaucaaccagcggc

SEQ ID NO: 21782 - RNA, 20 nt, Artificial Sequence
  Synthetic oligonucleotide: Ptpn6-2680
cgccuuugucuaccugcggc

SEQ ID NO: 21783 - RNA, 20 nt, Artificial Sequence
  Synthetic oligonucleotide: Ptpn6-2681
augguggggaccggcagggc

SEQ ID NO: 21784 - RNA, 20 nt, Artificial Sequence
  Synthetic oligonucleotide: Ptpn6-344
gcaugggcauucuucauggc

SEQ ID NO: 21785 - RNA, 20 nt, Artificial Sequence
  Synthetic oligonucleotide: Ptpn6-391
ggccuccagacaacccuggc

SEQ ID NO: 21786 - RNA, 20 nt, Artificial Sequence
  Synthetic oligonucleotide: Ptpn6-188
cuucuggcagauggcguggc

SEQ ID NO: 21787 - RNA, 20 nt, Artificial Sequence
  Synthetic oligonucleotide: Ptpn6-360
ggugccugugcggccgaugc

SEQ ID NO: 21788 - RNA, 20 nt, Artificial Sequence
  Synthetic oligonucleotide: Ptpn6-199
ccuacucugugaccaacugc

SEQ ID NO: 21789 - RNA, 20 nt, Artificial Sequence
  Synthetic oligonucleotide: Ptpn6-2682
ggcccaucaucgugcacugc

SEQ ID NO: 21790 - RNA, 20 nt, Artificial Sequence
  Synthetic oligonucleotide: Ptpn6-2683
ccugcucugcacgcaccugc

SEQ ID NO: 21791 - RNA, 20 nt, Artificial Sequence
  Synthetic oligonucleotide: Ptpn6-400
uguuacugucccgucccugc

SEQ ID NO: 21792 - RNA, 20 nt, Artificial Sequence
  Synthetic oligonucleotide: Ptpn6-174
ccacagccgagugauccugc

SEQ ID NO: 21793 - RNA, 20 nt, Artificial Sequence
  Synthetic oligonucleotide: Ptpn6-2684
gaagaagcuggagguccugc

SEQ ID NO: 21794 - RNA, 20 nt, Artificial Sequence
  Synthetic oligonucleotide: Ptpn6-2685
cacucacuuggacgaggugc

SEQ ID NO: 21795 - RNA, 20 nt, Artificial Sequence
  Synthetic oligonucleotide: Ptpn6-221
gaagaccauccagauggugc

SEQ ID NO: 21796 - RNA, 20 nt, Artificial Sequence
  Synthetic oligonucleotide: Ptpn6-339
cccucuuguucuuagugugc

SEQ ID NO: 21797 - RNA, 20 nt, Artificial Sequence
  Synthetic oligonucleotide: Ptpn6-375
aaugccagaucucccgaauc

SEQ ID NO: 21798 - RNA, 20 nt, Artificial Sequence
  Synthetic oligonucleotide: Ptpn6-354
agcgcugcgcccgcaccauc

SEQ ID NO: 21799 - RNA, 20 nt, Artificial Sequence
  Synthetic oligonucleotide: Ptpn6-393
uaggucuuagcguucucauc

SEQ ID NO: 21800 - RNA, 20 nt, Artificial Sequence
  Synthetic oligonucleotide: Ptpn6-203
gagaccugauucgggagauc

SEQ ID NO: 21801 - RNA, 20 nt, Artificial Sequence
  Synthetic oligonucleotide: Ptpn6-363
uuuccugccgcugguugauc

SEQ ID NO: 21802 - RNA, 20 nt, Artificial Sequence
  Synthetic oligonucleotide: Ptpn6-2686
guggggggcagucaaaccuc

SEQ ID NO: 21803 - RNA, 20 nt, Artificial Sequence
  Synthetic oligonucleotide: Ptpn6-383
gcacgcugcaugcccaccuc

SEQ ID NO: 21804 - RNA, 20 nt, Artificial Sequence
  Synthetic oligonucleotide: Ptpn6-157
acggggauugaggaggccuc

SEQ ID NO: 21805 - RNA, 20 nt, Artificial Sequence
  Synthetic oligonucleotide: Ptpn6-2687
aagugagcggugcuguccuc

SEQ ID NO: 21806 - RNA, 20 nt, Artificial Sequence
  Synthetic oligonucleotide: Ptpn6-373
ccccauggucgggccagcuc

SEQ ID NO: 21807 - RNA, 20 nt, Artificial Sequence
  Synthetic oligonucleotide: Ptpn6-223
auggugcgggcgcagcgcuc

SEQ ID NO: 21808 - RNA, 20 nt, Artificial Sequence
  Synthetic oligonucleotide: Ptpn6-386
ccggccuuucuccaccucuc

SEQ ID NO: 21809 - RNA, 20 nt, Artificial Sequence
  Synthetic oligonucleotide: Ptpn6-2688
gaucucccgaaucaggucuc

SEQ ID NO: 21810 - RNA, 20 nt, Artificial Sequence
  Synthetic oligonucleotide: Ptpn6-404
cgguucuugcccuuguucuc

SEQ ID NO: 21811 - RNA, 20 nt, Artificial Sequence
  Synthetic oligonucleotide: Ptpn6-168
gaagaacuugcaccagcguc

SEQ ID NO: 21812 - RNA, 20 nt, Artificial Sequence
  Synthetic oligonucleotide: Ptpn6-2689
uugucuaccugcggcagguc

SEQ ID NO: 21813 - RNA, 20 nt, Artificial Sequence
  Synthetic oligonucleotide: Ptpn6-372
ucacuggggaccccaugguc

SEQ ID NO: 21814 - RNA, 20 nt, Artificial Sequence
  Synthetic oligonucleotide: Ptpn6-182
caucgccagccaggguuguc

SEQ ID NO: 21815 - RNA, 20 nt, Artificial Sequence
  Synthetic oligonucleotide: Ptpn6-2690
ugcccccggagaccugauuc

SEQ ID NO: 21816 - RNA, 20 nt, Artificial Sequence
  Synthetic oligonucleotide: Ptpn6-185
aggccacggucaaugacuuc

SEQ ID NO: 21817 - RNA, 20 nt, Artificial Sequence
  Synthetic oligonucleotide: Ptpn6-165
auacagccaaggcuggcuuc

SEQ ID NO: 21818 - RNA, 20 nt, Artificial Sequence
  Synthetic oligonucleotide: Ptpn6-356
gcaccaucuggauggucuuc

SEQ ID NO: 21819 - RNA, 20 nt, Artificial Sequence
  Synthetic oligonucleotide: Ptpn6-233
accugcacacuaagaacaag

SEQ ID NO: 21820 - RNA, 20 nt, Artificial Sequence
  Synthetic oligonucleotide: Ptpn6-240
agagcaaggguucccucaag

SEQ ID NO: 21821 - RNA, 20 nt, Artificial Sequence
  Synthetic oligonucleotide: Ptpn6-2691
ccaggguggacgcuacacag

SEQ ID NO: 21822 - RNA, 20 nt, Artificial Sequence
  Synthetic oligonucleotide: Ptpn6-2692
ggcagccugggugcucacag

SEQ ID NO: 21823 - RNA, 20 nt, Artificial Sequence
  Synthetic oligonucleotide: Ptpn6-213
uccuggaccagaucaaccag

SEQ ID NO: 21824 - RNA, 20 nt, Artificial Sequence
  Synthetic oligonucleotide: Ptpn6-2693
gggccacucacauuguccag

SEQ ID NO: 21825 - RNA, 20 nt, Artificial Sequence
  Synthetic oligonucleotide: Ptpn6-236
aggagaaagugaagaagcag

SEQ ID NO: 21826 - RNA, 20 nt, Artificial Sequence
  Synthetic oligonucleotide: Ptpn6-171
accagcgucuggaagggcag

SEQ ID NO: 21827 - RNA, 20 nt, Artificial Sequence
  Synthetic oligonucleotide: Ptpn6-2694
aaagacgggggugccaucag

SEQ ID NO: 21828 - RNA, 20 nt, Artificial Sequence
  Synthetic oligonucleotide: Ptpn6-2695
gucuaccugcggcaggucag

SEQ ID NO: 21829 - RNA, 20 nt, Artificial Sequence
  Synthetic oligonucleotide: Ptpn6-189
caucgucaugaccacccgag

SEQ ID NO: 21830 - RNA, 20 nt, Artificial Sequence
  Synthetic oligonucleotide: Ptpn6-2696
ccgcaccucguccaagugag

SEQ ID NO: 21831 - RNA, 20 nt, Artificial Sequence
  Synthetic oligonucleotide: Ptpn6-2697
uucccucaagaggaagugag

SEQ ID NO: 21832 - RNA, 20 nt, Artificial Sequence
  Synthetic oligonucleotide: Ptpn6-2698
acaucuccaccaagggugag

SEQ ID NO: 21833 - RNA, 20 nt, Artificial Sequence
  Synthetic oligonucleotide: Ptpn6-2699
uccccgcuggacaaugugag

SEQ ID NO: 21834 - RNA, 20 nt, Artificial Sequence
  Synthetic oligonucleotide: Ptpn6-403
aggggagaauguucuuguag

SEQ ID NO: 21835 - RNA, 20 nt, Artificial Sequence
  Synthetic oligonucleotide: Ptpn6-350
gaccuccagcuucuucuuag

SEQ ID NO: 21836 - RNA, 20 nt, Artificial Sequence
  Synthetic oligonucleotide: Ptpn6-2700
ggucagcagugugggccacg

SEQ ID NO: 21837 - RNA, 20 nt, Artificial Sequence
  Synthetic oligonucleotide: Ptpn6-2701
agcaaccguacuaugccacg

SEQ ID NO: 21838 - RNA, 20 nt, Artificial Sequence
  Synthetic oligonucleotide: Ptpn6-154
uggagcauuucaagaagacg

SEQ ID NO: 21839 - RNA, 20 nt, Artificial Sequence
  Synthetic oligonucleotide: Ptpn6-2702
cagggccacucacuuggacg

SEQ ID NO: 21840 - RNA, 20 nt, Artificial Sequence
  Synthetic oligonucleotide: Ptpn6-227
gcaguacaaguucaucuacg

SEQ ID NO: 21841 - RNA, 20 nt, Artificial Sequence
  Synthetic oligonucleotide: Ptpn6-389
cugccagaagucauugaccg

SEQ ID NO: 21842 - RNA, 20 nt, Artificial Sequence
  Synthetic oligonucleotide: Ptpn6-399
cauugauguagucggacccg

SEQ ID NO: 21843 - RNA, 20 nt, Artificial Sequence
  Synthetic oligonucleotide: Ptpn6-193
augcgucccauacuggcccg

SEQ ID NO: 21844 - RNA, 20 nt, Artificial Sequence
  Synthetic oligonucleotide: Ptpn6-2703
ucucccgaaucaggucuccg

SEQ ID NO: 21845 - RNA, 20 nt, Artificial Sequence
  Synthetic oligonucleotide: Ptpn6-162
gaacaagaagcaggaguccg

SEQ ID NO: 21846 - RNA, 20 nt, Artificial Sequence
  Synthetic oligonucleotide: Ptpn6-2704
gccacucacauuguccagcg

SEQ ID NO: 21847 - RNA, 20 nt, Artificial Sequence
  Synthetic oligonucleotide: Ptpn6-187
augacuucuggcagauggcg

SEQ ID NO: 21848 - RNA, 20 nt, Artificial Sequence
  Synthetic oligonucleotide: Ptpn6-200
cuacucugugaccaacugcg

SEQ ID NO: 21849 - RNA, 20 nt, Artificial Sequence
  Synthetic oligonucleotide: Ptpn6-409
gucagccgcauucacccucg

SEQ ID NO: 21850 - RNA, 20 nt, Artificial Sequence
  Synthetic oligonucleotide: Ptpn6-2705
gggcaaguacagacacaagg

SEQ ID NO: 21851 - RNA, 20 nt, Artificial Sequence
  Synthetic oligonucleotide: Ptpn6-2706
gcagagggacagugggaagg

SEQ ID NO: 21852 - RNA, 20 nt, Artificial Sequence
  Synthetic oligonucleotide: Ptpn6-2707
ugucaaugucacaguccagg

SEQ ID NO: 21853 - RNA, 20 nt, Artificial Sequence
  Synthetic oligonucleotide: Ptpn6-2708
ucagaguuugcagaagcagg

SEQ ID NO: 21854 - RNA, 20 nt, Artificial Sequence
  Synthetic oligonucleotide: Ptpn6-2709
ugagcggugcuguccucagg

SEQ ID NO: 21855 - RNA, 20 nt, Artificial Sequence
  Synthetic oligonucleotide: Ptpn6-190
cgucaugaccacccgagagg

SEQ ID NO: 21856 - RNA, 20 nt, Artificial Sequence
  Synthetic oligonucleotide: Ptpn6-194
cgucccauacuggcccgagg

SEQ ID NO: 21857 - RNA, 20 nt, Artificial Sequence
  Synthetic oligonucleotide: Ptpn6-156
caagaagacggggauugagg

SEQ ID NO: 21858 - RNA, 20 nt, Artificial Sequence
  Synthetic oligonucleotide: Ptpn6-226
cucgggcauggugcagacgg

SEQ ID NO: 21859 - RNA, 20 nt, Artificial Sequence
  Synthetic oligonucleotide: Ptpn6-2710
gccugugcggccgaugccgg

SEQ ID NO: 21860 - RNA, 20 nt, Artificial Sequence
  Synthetic oligonucleotide: Ptpn6-2711
cucccgaaucaggucuccgg

SEQ ID NO: 21861 - RNA, 20 nt, Artificial Sequence
  Synthetic oligonucleotide: Ptpn6-2712
uaauuuggcuccccccaggg

SEQ ID NO: 21862 - RNA, 20 nt, Artificial Sequence
  Synthetic oligonucleotide: Ptpn6-235
gcacacuaagaacaagaggg

SEQ ID NO: 21863 - RNA, 20 nt, Artificial Sequence
  Synthetic oligonucleotide: Ptpn6-2713
ucacuuggacgaggugcggg

SEQ ID NO: 21864 - RNA, 20 nt, Artificial Sequence
  Synthetic oligonucleotide: Ptpn6-387
gccuuucuccaccucucggg

SEQ ID NO: 21865 - RNA, 20 nt, Artificial Sequence
  Synthetic oligonucleotide: Ptpn6-2714
uaccugcggcaggucagggg

SEQ ID NO: 21866 - RNA, 20 nt, Artificial Sequence
  Synthetic oligonucleotide: Ptpn6-2715
cagagcagggccuggggggg

SEQ ID NO: 21867 - RNA, 20 nt, Artificial Sequence
  Synthetic oligonucleotide: Ptpn6-2716
gcagagcagggccugggggg

SEQ ID NO: 21868 - RNA, 20 nt, Artificial Sequence
  Synthetic oligonucleotide: Ptpn6-2717
ugcagagcagggccuggggg

SEQ ID NO: 21869 - RNA, 20 nt, Artificial Sequence
  Synthetic oligonucleotide: Ptpn6-2718
ggcaccuggggguuuggggg

SEQ ID NO: 21870 - RNA, 20 nt, Artificial Sequence
  Synthetic oligonucleotide: Ptpn6-2719
gugcagagcagggccugggg

SEQ ID NO: 21871 - RNA, 20 nt, Artificial Sequence
  Synthetic oligonucleotide: Ptpn6-2720
uguguagcguccacccuggg

SEQ ID NO: 21872 - RNA, 20 nt, Artificial Sequence
  Synthetic oligonucleotide: Ptpn6-2721
cgugcagagcagggccuggg

SEQ ID NO: 21873 - RNA, 20 nt, Artificial Sequence
  Synthetic oligonucleotide: Ptpn6-167
agccaaggcuggcuucuggg

SEQ ID NO: 21874 - RNA, 20 nt, Artificial Sequence
  Synthetic oligonucleotide: Ptpn6-147
gguggacgcuacacaguggg

SEQ ID NO: 21875 - RNA, 20 nt, Artificial Sequence
  Synthetic oligonucleotide: Ptpn6-2722
agcagugugggccacguggg

SEQ ID NO: 21876 - RNA, 20 nt, Artificial Sequence
  Synthetic oligonucleotide: Ptpn6-2723
ugcaaacucugagauguggg

SEQ ID NO: 21877 - RNA, 20 nt, Artificial Sequence
  Synthetic oligonucleotide: Ptpn6-2724
gaggaguuugaggugcaugg

SEQ ID NO: 21878 - RNA, 20 nt, Artificial Sequence
  Synthetic oligonucleotide: Ptpn6-2725
caagggugaggggcaccugg

SEQ ID NO: 21879 - RNA, 20 nt, Artificial Sequence
  Synthetic oligonucleotide: Ptpn6-151
cgacagccucacggaccugg

SEQ ID NO: 21880 - RNA, 20 nt, Artificial Sequence
  Synthetic oligonucleotide: Ptpn6-2726
cuguguagcguccacccugg

SEQ ID NO: 21881 - RNA, 20 nt, Artificial Sequence
  Synthetic oligonucleotide: Ptpn6-211
gggguccccagugagccugg

SEQ ID NO: 21882 - RNA, 20 nt, Artificial Sequence
  Synthetic oligonucleotide: Ptpn6-2727
gcgugcagagcagggccugg

SEQ ID NO: 21883 - RNA, 20 nt, Artificial Sequence
  Synthetic oligonucleotide: Ptpn6-229
aaccacuaagaagaagcugg

SEQ ID NO: 21884 - RNA, 20 nt, Artificial Sequence
  Synthetic oligonucleotide: Ptpn6-347
ugggcauucuucauggcugg

SEQ ID NO: 21885 - RNA, 20 nt, Artificial Sequence
  Synthetic oligonucleotide: Ptpn6-183
cgccagccaggguugucugg

SEQ ID NO: 21886 - RNA, 20 nt, Artificial Sequence
  Synthetic oligonucleotide: Ptpn6-2728
caggugccccucacccuugg

SEQ ID NO: 21887 - RNA, 20 nt, Artificial Sequence
  Synthetic oligonucleotide: Ptpn6-2729
aggggcaccuggggguuugg

SEQ ID NO: 21888 - RNA, 20 nt, Artificial Sequence
  Synthetic oligonucleotide: Ptpn6-159
cuaugccacgagggugaaug

SEQ ID NO: 21889 - RNA, 20 nt, Artificial Sequence
  Synthetic oligonucleotide: Ptpn6-207
ccugagcuggcccgaccaug

SEQ ID NO: 21890 - RNA, 20 nt, Artificial Sequence
  Synthetic oligonucleotide: Ptpn6-2730
cuucugcaaacucugagaug

SEQ ID NO: 21891 - RNA, 20 nt, Artificial Sequence
  Synthetic oligonucleotide: Ptpn6-2731
gggagggucggguggggaug

SEQ ID NO: 21892 - RNA, 20 nt, Artificial Sequence
  Synthetic oligonucleotide: Ptpn6-198
cccuacucugugaccaacug

SEQ ID NO: 21893 - RNA, 20 nt, Artificial Sequence
  Synthetic oligonucleotide: Ptpn6-369
ggacacccccaggcucacug

SEQ ID NO: 21894 - RNA, 20 nt, Artificial Sequence
  Synthetic oligonucleotide: Ptpn6-2732
ccaagggugaggggcaccug

SEQ ID NO: 21895 - RNA, 20 nt, Artificial Sequence
  Synthetic oligonucleotide: Ptpn6-2733
ucacaguccaggcggaccug

SEQ ID NO: 21896 - RNA, 20 nt, Artificial Sequence
  Synthetic oligonucleotide: Ptpn6-158
caggcgccuuugucuaccug

SEQ ID NO: 21897 - RNA, 20 nt, Artificial Sequence
  Synthetic oligonucleotide: Ptpn6-2734
acuguguagcguccacccug

SEQ ID NO: 21898 - RNA, 20 nt, Artificial Sequence
  Synthetic oligonucleotide: Ptpn6-210
ugggguccccagugagccug

SEQ ID NO: 21899 - RNA, 20 nt, Artificial Sequence
  Synthetic oligonucleotide: Ptpn6-411
cagguagacaaaggcgccug

SEQ ID NO: 21900 - RNA, 20 nt, Artificial Sequence
  Synthetic oligonucleotide: Ptpn6-2735
ugcgugcagagcagggccug

SEQ ID NO: 21901 - RNA, 20 nt, Artificial Sequence
  Synthetic oligonucleotide: Ptpn6-365
ugaucugguccaggaagcug

SEQ ID NO: 21902 - RNA, 20 nt, Artificial Sequence
  Synthetic oligonucleotide: Ptpn6-402
ccugcaggaucacucggcug

SEQ ID NO: 21903 - RNA, 20 nt, Artificial Sequence
  Synthetic oligonucleotide: Ptpn6-2736
gguggggaccggcagggcug

SEQ ID NO: 21904 - RNA, 20 nt, Artificial Sequence
  Synthetic oligonucleotide: Ptpn6-346
augggcauucuucauggcug

SEQ ID NO: 21905 - RNA, 20 nt, Artificial Sequence
  Synthetic oligonucleotide: Ptpn6-2737
cuacaucaaggucagcagug

SEQ ID NO: 21906 - RNA, 20 nt, Artificial Sequence
  Synthetic oligonucleotide: Ptpn6-413
aaugcuccaccagguccgug

SEQ ID NO: 21907 - RNA, 20 nt, Artificial Sequence
  Synthetic oligonucleotide: Ptpn6-361
acgaugaugggcccugcgug

SEQ ID NO: 21908 - RNA, 20 nt, Artificial Sequence
  Synthetic oligonucleotide: Ptpn6-2738
aucaucgugcacugcaggug

SEQ ID NO: 21909 - RNA, 20 nt, Artificial Sequence
  Synthetic oligonucleotide: Ptpn6-2739
ccacucacuuggacgaggug

SEQ ID NO: 21910 - RNA, 20 nt, Artificial Sequence
  Synthetic oligonucleotide: Ptpn6-2740
gaacaucuccaccaagggug

SEQ ID NO: 21911 - RNA, 20 nt, Artificial Sequence
  Synthetic oligonucleotide: Ptpn6-2741
uggaaagggagggucgggug

SEQ ID NO: 21912 - RNA, 20 nt, Artificial Sequence
  Synthetic oligonucleotide: Ptpn6-2742
caaacucugagaugugggug

SEQ ID NO: 21913 - RNA, 20 nt, Artificial Sequence
  Synthetic oligonucleotide: Ptpn6-2743
ggaguuugaggugcauggug

SEQ ID NO: 21914 - RNA, 20 nt, Artificial Sequence
  Synthetic oligonucleotide: Ptpn6-220
agaagaccauccagauggug

SEQ ID NO: 21915 - RNA, 20 nt, Artificial Sequence
  Synthetic oligonucleotide: Ptpn6-359
ugacaaugauggugccugug

SEQ ID NO: 21916 - RNA, 20 nt, Artificial Sequence
  Synthetic oligonucleotide: Ptpn6-155
uuucaagaagacggggauug

SEQ ID NO: 21917 - RNA, 20 nt, Artificial Sequence
  Synthetic oligonucleotide: Ptpn6-2744
gcaccgcucacuuccucuug

SEQ ID NO: 21918 - RNA, 20 nt, Artificial Sequence
  Synthetic oligonucleotide: Ptpn6-2745
uggcuucugggaggaguuug

SEQ ID NO: 21919 - RNA, 20 nt, Artificial Sequence
  Synthetic oligonucleotide: Ptpn6-2746
gaggggcaccuggggguuug

SEQ ID NO: 21920 - RNA, 20 nt, Artificial Sequence
  Synthetic oligonucleotide: Ptpn6-2747
agggccuagcagcugguuug

SEQ ID NO: 21921 - RNA, 20 nt, Artificial Sequence
  Synthetic oligonucleotide: Ptpn6-206
accugagcuggcccgaccau

SEQ ID NO: 21922 - RNA, 20 nt, Artificial Sequence
  Synthetic oligonucleotide: Ptpn6-2748
ccaucagaggccgccggcau

SEQ ID NO: 21923 - RNA, 20 nt, Artificial Sequence
  Synthetic oligonucleotide: Ptpn6-342
ggugcgggaggccuuggcau

SEQ ID NO: 21924 - RNA, 20 nt, Artificial Sequence
  Synthetic oligonucleotide: Ptpn6-348
auucuucauggcugggggau

SEQ ID NO: 21925 - RNA, 20 nt, Artificial Sequence
  Synthetic oligonucleotide: Ptpn6-2749
caccugcagugcacgaugau

SEQ ID NO: 21926 - RNA, 20 nt, Artificial Sequence
  Synthetic oligonucleotide: Ptpn6-385
ugcccaccucgggccaguau

SEQ ID NO: 21927 - RNA, 20 nt, Artificial Sequence
  Synthetic oligonucleotide: Ptpn6-197
ugggcaugcagcgugcuuau

SEQ ID NO: 21928 - RNA, 20 nt, Artificial Sequence
  Synthetic oligonucleotide: Ptpn6-352
cuuagugguuucaaugaacu

SEQ ID NO: 21929 - RNA, 20 nt, Artificial Sequence
  Synthetic oligonucleotide: Ptpn6-408
ucuuguucaguuccaacacu

SEQ ID NO: 21930 - RNA, 20 nt, Artificial Sequence
  Synthetic oligonucleotide: Ptpn6-401
cccgucccugcaggaucacu

SEQ ID NO: 21931 - RNA, 20 nt, Artificial Sequence
  Synthetic oligonucleotide: Ptpn6-2750
ggcagucagggccacucacu

SEQ ID NO: 21932 - RNA, 20 nt, Artificial Sequence
  Synthetic oligonucleotide: Ptpn6-368
aggacacccccaggcucacu

SEQ ID NO: 21933 - RNA, 20 nt, Artificial Sequence
  Synthetic oligonucleotide: Ptpn6-382
agcacgcugcaugcccaccu

SEQ ID NO: 21934 - RNA, 20 nt, Artificial Sequence
  Synthetic oligonucleotide: Ptpn6-2751
accaagggugaggggcaccu

SEQ ID NO: 21935 - RNA, 20 nt, Artificial Sequence
  Synthetic oligonucleotide: Ptpn6-2752
cacuguguagcguccacccu

SEQ ID NO: 21936 - RNA, 20 nt, Artificial Sequence
  Synthetic oligonucleotide: Ptpn6-2753
ccccaggugccccucacccu

SEQ ID NO: 21937 - RNA, 20 nt, Artificial Sequence
  Synthetic oligonucleotide: Ptpn6-406
cuccucccagaagccagccu

SEQ ID NO: 21938 - RNA, 20 nt, Artificial Sequence
  Synthetic oligonucleotide: Ptpn6-2754
cugggugaauggggcagccu

SEQ ID NO: 21939 - RNA, 20 nt, Artificial Sequence
  Synthetic oligonucleotide: Ptpn6-209
augggguccccagugagccu

SEQ ID NO: 21940 - RNA, 20 nt, Artificial Sequence
  Synthetic oligonucleotide: Ptpn6-340
ggacgaggugcgggaggccu

SEQ ID NO: 21941 - RNA, 20 nt, Artificial Sequence
  Synthetic oligonucleotide: Ptpn6-2755
gugcgugcagagcagggccu

SEQ ID NO: 21942 - RNA, 20 nt, Artificial Sequence
  Synthetic oligonucleotide: Ptpn6-407
gccagccuuggcuguauccu

SEQ ID NO: 21943 - RNA, 20 nt, Artificial Sequence
  Synthetic oligonucleotide: Ptpn6-2756
gggcacugacccuauguccu

SEQ ID NO: 21944 - RNA, 20 nt, Artificial Sequence
  Synthetic oligonucleotide: Ptpn6-222
gauggugcgggcgcagcgcu

SEQ ID NO: 21945 - RNA, 20 nt, Artificial Sequence
  Synthetic oligonucleotide: Ptpn6-2757
ugguggggaccggcagggcu

SEQ ID NO: 21946 - RNA, 20 nt, Artificial Sequence
  Synthetic oligonucleotide: Ptpn6-345
caugggcauucuucauggcu

SEQ ID NO: 21947 - RNA, 20 nt, Artificial Sequence
  Synthetic oligonucleotide: Ptpn6-2758
cgcaccccaaaccagcugcu

SEQ ID NO: 21948 - RNA, 20 nt, Artificial Sequence
  Synthetic oligonucleotide: Ptpn6-2759
cccggccuuucuccaccucu

SEQ ID NO: 21949 - RNA, 20 nt, Artificial Sequence
  Synthetic oligonucleotide: Ptpn6-166
uacagccaaggcuggcuucu

SEQ ID NO: 21950 - RNA, 20 nt, Artificial Sequence
  Synthetic oligonucleotide: Ptpn6-2760
caggguggacgcuacacagu

SEQ ID NO: 21951 - RNA, 20 nt, Artificial Sequence
  Synthetic oligonucleotide: Ptpn6-379
ugugucaugcuccccgcagu

SEQ ID NO: 21952 - RNA, 20 nt, Artificial Sequence
  Synthetic oligonucleotide: Ptpn6-380
cccgcaguuggucacagagu

SEQ ID NO: 21953 - RNA, 20 nt, Artificial Sequence
  Synthetic oligonucleotide: Ptpn6-2761
uucgcagaagggccaggagu

SEQ ID NO: 21954 - RNA, 20 nt, Artificial Sequence
  Synthetic oligonucleotide: Ptpn6-396
guaguuggcauugauguagu

SEQ ID NO: 21955 - RNA, 20 nt, Artificial Sequence
  Synthetic oligonucleotide: Ptpn6-2762
acugcugaccuugauguagu

SEQ ID NO: 21956 - RNA, 20 nt, Artificial Sequence
  Synthetic oligonucleotide: Ptpn6-2763
gucagcagugugggccacgu

SEQ ID NO: 21957 - RNA, 20 nt, Artificial Sequence
  Synthetic oligonucleotide: Ptpn6-195
gucccauacuggcccgaggu

SEQ ID NO: 21958 - RNA, 20 nt, Artificial Sequence
  Synthetic oligonucleotide: Ptpn6-2764
gagguggagaaaggccgggu

SEQ ID NO: 21959 - RNA, 20 nt, Artificial Sequence
  Synthetic oligonucleotide: Ptpn6-2765
cuggaaagggagggucgggu

SEQ ID NO: 21960 - RNA, 20 nt, Artificial Sequence
  Synthetic oligonucleotide: Ptpn6-2766
accugcggcaggucaggggu

SEQ ID NO: 21961 - RNA, 20 nt, Artificial Sequence
  Synthetic oligonucleotide: Ptpn6-2767
gcaccuggggguuugggggu

SEQ ID NO: 21962 - RNA, 20 nt, Artificial Sequence
  Synthetic oligonucleotide: Ptpn6-2768
gcaaacucugagaugugggu

SEQ ID NO: 21963 - RNA, 20 nt, Artificial Sequence
  Synthetic oligonucleotide: Ptpn6-371
cucacuggggaccccauggu

SEQ ID NO: 21964 - RNA, 20 nt, Artificial Sequence
  Synthetic oligonucleotide: Ptpn6-2769
aggaguuugaggugcauggu

SEQ ID NO: 21965 - RNA, 20 nt, Artificial Sequence
  Synthetic oligonucleotide: Ptpn6-2770
uucugcaaacucugagaugu

SEQ ID NO: 21966 - RNA, 20 nt, Artificial Sequence
  Synthetic oligonucleotide: Ptpn6-392
acaacccuggcuggcgaugu

SEQ ID NO: 21967 - RNA, 20 nt, Artificial Sequence
  Synthetic oligonucleotide: Ptpn6-2771
uacaucaaggucagcagugu

SEQ ID NO: 21968 - RNA, 20 nt, Artificial Sequence
  Synthetic oligonucleotide: Ptpn6-160
ugacauugagaaccgagugu

SEQ ID NO: 21969 - RNA, 20 nt, Artificial Sequence
  Synthetic oligonucleotide: Ptpn6-2772
acccuggggggagccaaauu

SEQ ID NO: 21970 - RNA, 20 nt, Artificial Sequence
  Synthetic oligonucleotide: Ptpn6-2773
gugcccccggagaccugauu

SEQ ID NO: 21971 - RNA, 20 nt, Artificial Sequence
  Synthetic oligonucleotide: Ptpn6-378
uaagguacggaguuuguauu

SEQ ID NO: 21972 - RNA, 20 nt, Artificial Sequence
  Synthetic oligonucleotide: Ptpn6-2774
gugaggggcaccuggggguu

SEQ ID NO: 21973 - RNA, 20 nt, Artificial Sequence
  Synthetic oligonucleotide: Ptpn6-2775
ucagggccuagcagcugguu

SEQ ID NO: 21974 - RNA, 20 nt, Artificial Sequence
  Synthetic oligonucleotide: Ptpn6-148
acgcuacacagugggugguu

SEQ ID NO: 21975 - RNA, 20 nt, Artificial Sequence
  Synthetic oligonucleotide: Ptpn6-2776
ugaggggcaccuggggguuu

SEQ ID NO: 21976 - RNA, 20 nt, Artificial Sequence
  Synthetic oligonucleotide: Ptpn6-2777
cagggccuagcagcugguuu

SEQ ID NO: 21977 - RNA, 18 nt, Artificial Sequence
  Synthetic oligonucleotide: Ptpn6-2778
ugggaucggagcaguuca

SEQ ID NO: 21978 - RNA, 19 nt, Artificial Sequence
  Synthetic oligonucleotide: Ptpn6-2779
gugggaucggagcaguuca

SEQ ID NO: 21979 - RNA, 20 nt, Artificial Sequence
  Synthetic oligonucleotide: Ptpn6-584
agugggaucggagcaguuca

SEQ ID NO: 21980 - RNA, 21 nt, Artificial Sequence
  Synthetic oligonucleotide: Ptpn6-2780
uagugggaucggagcaguuca

SEQ ID NO: 21981 - RNA, 22 nt, Artificial Sequence
  Synthetic oligonucleotide: Ptpn6-2781
cuagugggaucggagcaguuca

SEQ ID NO: 21982 - RNA, 23 nt, Artificial Sequence
  Synthetic oligonucleotide: Ptpn6-2782
acuagugggaucggagcaguuca

SEQ ID NO: 21983 - RNA, 24 nt, Artificial Sequence
  Synthetic oligonucleotide: Ptpn6-2783
cacuagugggaucggagcaguuca

SEQ ID NO: 21984 - RNA, 21 nt, Artificial Sequence
  Synthetic oligonucleotide: Ptpn6-2784
cauacaggucauagaaauccc

SEQ ID NO: 21985 - RNA, 22 nt, Artificial Sequence
  Synthetic oligonucleotide: Ptpn6-2785
ccauacaggucauagaaauccc

SEQ ID NO: 21986 - RNA, 23 nt, Artificial Sequence
  Synthetic oligonucleotide: Ptpn6-2786
uccauacaggucauagaaauccc

SEQ ID NO: 21987 - RNA, 24 nt, Artificial Sequence
  Synthetic oligonucleotide: Ptpn6-2787
cuccauacaggucauagaaauccc

SEQ ID NO: 21988 - RNA, 21 nt, Artificial Sequence
  Synthetic oligonucleotide: Ptpn6-2788
gcaguucagcggguacuugag

SEQ ID NO: 21989 - RNA, 22 nt, Artificial Sequence
  Synthetic oligonucleotide: Ptpn6-2789
agcaguucagcggguacuugag

SEQ ID NO: 21990 - RNA, 23 nt, Artificial Sequence
  Synthetic oligonucleotide: Ptpn6-2790
gagcaguucagcggguacuugag

SEQ ID NO: 21991 - RNA, 24 nt, Artificial Sequence
  Synthetic oligonucleotide: Ptpn6-2791
ggagcaguucagcggguacuugag

SEQ ID NO: 21992 - RNA, 18 nt, Artificial Sequence
  Synthetic oligonucleotide: Ptpn6-2792
gacaccucggcccuugag

SEQ ID NO: 21993 - RNA, 19 nt, Artificial Sequence
  Synthetic oligonucleotide: Ptpn6-2793
ggacaccucggcccuugag

SEQ ID NO: 21994 - RNA, 20 nt, Artificial Sequence
  Synthetic oligonucleotide: Ptpn6-601
uggacaccucggcccuugag

SEQ ID NO: 21995 - RNA, 21 nt, Artificial Sequence
  Synthetic oligonucleotide: Ptpn6-2794
ggagcccucaccucucacuag

SEQ ID NO: 21996 - RNA, 22 nt, Artificial Sequence
  Synthetic oligonucleotide: Ptpn6-2795
cggagcccucaccucucacuag

SEQ ID NO: 21997 - RNA, 23 nt, Artificial Sequence
  Synthetic oligonucleotide: Ptpn6-2796
gcggagcccucaccucucacuag

SEQ ID NO: 21998 - RNA, 24 nt, Artificial Sequence
  Synthetic oligonucleotide: Ptpn6-2797
ugcggagcccucaccucucacuag

SEQ ID NO: 21999 - RNA, 21 nt, Artificial Sequence
  Synthetic oligonucleotide: Ptpn6-2798
cccugaguucuggauccgaau

SEQ ID NO: 22000 - RNA, 22 nt, Artificial Sequence
  Synthetic oligonucleotide: Ptpn6-2799
ccccugaguucuggauccgaau

SEQ ID NO: 22001 - RNA, 23 nt, Artificial Sequence
  Synthetic oligonucleotide: Ptpn6-2800
uccccugaguucuggauccgaau

SEQ ID NO: 22002 - RNA, 24 nt, Artificial Sequence
  Synthetic oligonucleotide: Ptpn6-2801
auccccugaguucuggauccgaau

SEQ ID NO: 22003 - RNA, 21 nt, Artificial Sequence
  Synthetic oligonucleotide: Ptpn6-2802
gaaauccccugaguucuggau

SEQ ID NO: 22004 - RNA, 22 nt, Artificial Sequence
  Synthetic oligonucleotide: Ptpn6-2803
agaaauccccugaguucuggau

SEQ ID NO: 22005 - RNA, 23 nt, Artificial Sequence
  Synthetic oligonucleotide: Ptpn6-2804
uagaaauccccugaguucuggau

SEQ ID NO: 22006 - RNA, 24 nt, Artificial Sequence
  Synthetic oligonucleotide: Ptpn6-2805
auagaaauccccugaguucuggau

SEQ ID NO: 22007 - RNA, 18 nt, Artificial Sequence
  Synthetic oligonucleotide: Ptpn6-2806
cucgcacaugaccuugau

SEQ ID NO: 22008 - RNA, 19 nt, Artificial Sequence
  Synthetic oligonucleotide: Ptpn6-2807
ccucgcacaugaccuugau

SEQ ID NO: 22009 - RNA, 20 nt, Artificial Sequence
  Synthetic oligonucleotide: Ptpn6-2808
accucgcacaugaccuugau

SEQ ID NO: 22010 - RNA, 21 nt, Artificial Sequence
  Synthetic oligonucleotide: Ptpn6-2809
uaccucgcacaugaccuugau

SEQ ID NO: 22011 - RNA, 22 nt, Artificial Sequence
  Synthetic oligonucleotide: Ptpn6-2810
uuaccucgcacaugaccuugau

SEQ ID NO: 22012 - RNA, 23 nt, Artificial Sequence
  Synthetic oligonucleotide: Ptpn6-2811
cuuaccucgcacaugaccuugau

SEQ ID NO: 22013 - RNA, 24 nt, Artificial Sequence
  Synthetic oligonucleotide: Ptpn6-2812
ccuuaccucgcacaugaccuugau

SEQ ID NO: 22014 - RNA, 18 nt, Artificial Sequence
  Synthetic oligonucleotide: Ptpn6-2813
guacuccaccagcucugu

SEQ ID NO: 22015 - RNA, 19 nt, Artificial Sequence
  Synthetic oligonucleotide: Ptpn6-2814
aguacuccaccagcucugu

SEQ ID NO: 22016 - RNA, 20 nt, Artificial Sequence
  Synthetic oligonucleotide: Ptpn6-589
uaguacuccaccagcucugu

SEQ ID NO: 22017 - RNA, 21 nt, Artificial Sequence
  Synthetic oligonucleotide: Ptpn6-2815
guaguacuccaccagcucugu

SEQ ID NO: 22018 - RNA, 22 nt, Artificial Sequence
  Synthetic oligonucleotide: Ptpn6-2816
uguaguacuccaccagcucugu

SEQ ID NO: 22019 - RNA, 23 nt, Artificial Sequence
  Synthetic oligonucleotide: Ptpn6-2817
guguaguacuccaccagcucugu

SEQ ID NO: 22020 - RNA, 24 nt, Artificial Sequence
  Synthetic oligonucleotide: Ptpn6-2818
aguguaguacuccaccagcucugu

SEQ ID NO: 22021 - RNA, 18 nt, Artificial Sequence
  Synthetic oligonucleotide: Ptpn6-2819
auagaaauccccugaguu

SEQ ID NO: 22022 - RNA, 19 nt, Artificial Sequence
  Synthetic oligonucleotide: Ptpn6-2820
cauagaaauccccugaguu

SEQ ID NO: 22023 - RNA, 20 nt, Artificial Sequence
  Synthetic oligonucleotide: Ptpn6-592
ucauagaaauccccugaguu

SEQ ID NO: 22024 - RNA, 21 nt, Artificial Sequence
  Synthetic oligonucleotide: Ptpn6-2821
gucauagaaauccccugaguu

SEQ ID NO: 22025 - RNA, 22 nt, Artificial Sequence
  Synthetic oligonucleotide: Ptpn6-2822
ggucauagaaauccccugaguu

SEQ ID NO: 22026 - RNA, 23 nt, Artificial Sequence
  Synthetic oligonucleotide: Ptpn6-2823
aggucauagaaauccccugaguu

SEQ ID NO: 22027 - RNA, 24 nt, Artificial Sequence
  Synthetic oligonucleotide: Ptpn6-2824
caggucauagaaauccccugaguu

SEQ ID NO: 22028 - RNA, 18 nt, Artificial Sequence
  Synthetic oligonucleotide: Ptpn6-2825
auucggauccagaacuca

SEQ ID NO: 22029 - RNA, 19 nt, Artificial Sequence
  Synthetic oligonucleotide: Ptpn6-2826
uauucggauccagaacuca

SEQ ID NO: 22030 - RNA, 20 nt, Artificial Sequence
  Synthetic oligonucleotide: Ptpn6-96
auauucggauccagaacuca

SEQ ID NO: 22031 - RNA, 21 nt, Artificial Sequence
  Synthetic oligonucleotide: Ptpn6-2827
cauauucggauccagaacuca

SEQ ID NO: 22032 - RNA, 22 nt, Artificial Sequence
  Synthetic oligonucleotide: Ptpn6-2828
ccauauucggauccagaacuca

SEQ ID NO: 22033 - RNA, 23 nt, Artificial Sequence
  Synthetic oligonucleotide: Ptpn6-2829
cccauauucggauccagaacuca

SEQ ID NO: 22034 - RNA, 24 nt, Artificial Sequence
  Synthetic oligonucleotide: Ptpn6-2830
acccauauucggauccagaacuca

SEQ ID NO: 22035 - RNA, 18 nt, Artificial Sequence
  Synthetic oligonucleotide: Ptpn6-2831
cggcccagucgcaagaac

SEQ ID NO: 22036 - RNA, 19 nt, Artificial Sequence
  Synthetic oligonucleotide: Ptpn6-2832
ucggcccagucgcaagaac

SEQ ID NO: 22037 - RNA, 20 nt, Artificial Sequence
  Synthetic oligonucleotide: Ptpn6-510
cucggcccagucgcaagaac

SEQ ID NO: 22038 - RNA, 21 nt, Artificial Sequence
  Synthetic oligonucleotide: Ptpn6-2833
gcucggcccagucgcaagaac

SEQ ID NO: 22039 - RNA, 22 nt, Artificial Sequence
  Synthetic oligonucleotide: Ptpn6-2834
ggcucggcccagucgcaagaac

SEQ ID NO: 22040 - RNA, 23 nt, Artificial Sequence
  Synthetic oligonucleotide: Ptpn6-2835
uggcucggcccagucgcaagaac

SEQ ID NO: 22041 - RNA, 24 nt, Artificial Sequence
  Synthetic oligonucleotide: Ptpn6-2836
cuggcucggcccagucgcaagaac

SEQ ID NO: 22042 - RNA, 21 nt, Artificial Sequence
  Synthetic oligonucleotide: Ptpn6-2837
ccuacagagagaugcuguccc

SEQ ID NO: 22043 - RNA, 22 nt, Artificial Sequence
  Synthetic oligonucleotide: Ptpn6-2838
cccuacagagagaugcuguccc

SEQ ID NO: 22044 - RNA, 23 nt, Artificial Sequence
  Synthetic oligonucleotide: Ptpn6-2839
ucccuacagagagaugcuguccc

SEQ ID NO: 22045 - RNA, 24 nt, Artificial Sequence
  Synthetic oligonucleotide: Ptpn6-2840
cucccuacagagagaugcuguccc

SEQ ID NO: 22046 - RNA, 18 nt, Artificial Sequence
  Synthetic oligonucleotide: Ptpn6-2841
gaguacuacacucagcag

SEQ ID NO: 22047 - RNA, 19 nt, Artificial Sequence
  Synthetic oligonucleotide: Ptpn6-2842
ggaguacuacacucagcag

SEQ ID NO: 22048 - RNA, 20 nt, Artificial Sequence
  Synthetic oligonucleotide: Ptpn6-525
uggaguacuacacucagcag

SEQ ID NO: 22049 - RNA, 21 nt, Artificial Sequence
  Synthetic oligonucleotide: Ptpn6-2843
guggaguacuacacucagcag

SEQ ID NO: 22050 - RNA, 22 nt, Artificial Sequence
  Synthetic oligonucleotide: Ptpn6-2844
gguggaguacuacacucagcag

SEQ ID NO: 22051 - RNA, 23 nt, Artificial Sequence
  Synthetic oligonucleotide: Ptpn6-2845
ugguggaguacuacacucagcag

SEQ ID NO: 22052 - RNA, 24 nt, Artificial Sequence
  Synthetic oligonucleotide: Ptpn6-2846
cugguggaguacuacacucagcag

SEQ ID NO: 22053 - RNA, 18 nt, Artificial Sequence
  Synthetic oligonucleotide: Ptpn6-2847
caccgagaccucaguggg

SEQ ID NO: 22054 - RNA, 19 nt, Artificial Sequence
  Synthetic oligonucleotide: Ptpn6-2848
ucaccgagaccucaguggg

SEQ ID NO: 22055 - RNA, 20 nt, Artificial Sequence
  Synthetic oligonucleotide: Ptpn6-505
uucaccgagaccucaguggg

SEQ ID NO: 22056 - RNA, 18 nt, Artificial Sequence
  Synthetic oligonucleotide: Ptpn6-2849
cgacucugacagagcugg

SEQ ID NO: 22057 - RNA, 19 nt, Artificial Sequence
  Synthetic oligonucleotide: Ptpn6-2850
gcgacucugacagagcugg

SEQ ID NO: 22058 - RNA, 20 nt, Artificial Sequence
  Synthetic oligonucleotide: Ptpn6-100
ugcgacucugacagagcugg

SEQ ID NO: 22059 - RNA, 21 nt, Artificial Sequence
  Synthetic oligonucleotide: Ptpn6-2851
uugcgacucugacagagcugg

SEQ ID NO: 22060 - RNA, 22 nt, Artificial Sequence
  Synthetic oligonucleotide: Ptpn6-2852
uuugcgacucugacagagcugg

SEQ ID NO: 22061 - RNA, 23 nt, Artificial Sequence
  Synthetic oligonucleotide: Ptpn6-2853
guuugcgacucugacagagcugg

SEQ ID NO: 22062 - RNA, 24 nt, Artificial Sequence
  Synthetic oligonucleotide: Ptpn6-2854
aguuugcgacucugacagagcugg

SEQ ID NO: 22063 - RNA, 18 nt, Artificial Sequence
  Synthetic oligonucleotide: Ptpn6-2855
ggaucaggugacccauau

SEQ ID NO: 22064 - RNA, 19 nt, Artificial Sequence
  Synthetic oligonucleotide: Ptpn6-2856
gggaucaggugacccauau

SEQ ID NO: 22065 - RNA, 20 nt, Artificial Sequence
  Synthetic oligonucleotide: Ptpn6-503
ggggaucaggugacccauau

SEQ ID NO: 22066 - RNA, 21 nt, Artificial Sequence
  Synthetic oligonucleotide: Ptpn6-2857
gggggaucaggugacccauau

SEQ ID NO: 22067 - RNA, 22 nt, Artificial Sequence
  Synthetic oligonucleotide: Ptpn6-2858
ugggggaucaggugacccauau

SEQ ID NO: 22068 - RNA, 23 nt, Artificial Sequence
  Synthetic oligonucleotide: Ptpn6-2859
gugggggaucaggugacccauau

SEQ ID NO: 22069 - RNA, 24 nt, Artificial Sequence
  Synthetic oligonucleotide: Ptpn6-2860
ggugggggaucaggugacccauau

SEQ ID NO: 22070 - RNA, 21 nt, Artificial Sequence
  Synthetic oligonucleotide: Ptpn6-2861
ggcuggcccaggcuccccgcu

SEQ ID NO: 22071 - RNA, 22 nt, Artificial Sequence
  Synthetic oligonucleotide: Ptpn6-2862
aggcuggcccaggcuccccgcu

SEQ ID NO: 22072 - RNA, 23 nt, Artificial Sequence
  Synthetic oligonucleotide: Ptpn6-2863
aaggcuggcccaggcuccccgcu

SEQ ID NO: 22073 - RNA, 24 nt, Artificial Sequence
  Synthetic oligonucleotide: Ptpn6-2864
caaggcuggcccaggcuccccgcu

SEQ ID NO: 22074 - RNA, 21 nt, Artificial Sequence
  Synthetic oligonucleotide: Ptpn6-2865
gaaggcagcgucagggaaggu

SEQ ID NO: 22075 - RNA, 22 nt, Artificial Sequence
  Synthetic oligonucleotide: Ptpn6-2866
agaaggcagcgucagggaaggu

SEQ ID NO: 22076 - RNA, 23 nt, Artificial Sequence
  Synthetic oligonucleotide: Ptpn6-2867
gagaaggcagcgucagggaaggu

SEQ ID NO: 22077 - RNA, 24 nt, Artificial Sequence
  Synthetic oligonucleotide: Ptpn6-2868
agagaaggcagcgucagggaaggu

SEQ ID NO: 22078 - RNA, 18 nt, Artificial Sequence
  Synthetic oligonucleotide: Ptpn6-2869
acaggucauagaaauccc

SEQ ID NO: 22079 - RNA, 19 nt, Artificial Sequence
  Synthetic oligonucleotide: Ptpn6-2870
uacaggucauagaaauccc

SEQ ID NO: 22080 - RNA, 20 nt, Artificial Sequence
  Synthetic oligonucleotide: Ptpn6-591
auacaggucauagaaauccc

SEQ ID NO: 22081 - RNA, 18 nt, Artificial Sequence
  Synthetic oligonucleotide: Ptpn6-2871
guucagcggguacuugag

SEQ ID NO: 22082 - RNA, 19 nt, Artificial Sequence
  Synthetic oligonucleotide: Ptpn6-2872
aguucagcggguacuugag

SEQ ID NO: 22083 - RNA, 20 nt, Artificial Sequence
  Synthetic oligonucleotide: Ptpn6-586
caguucagcggguacuugag

SEQ ID NO: 22084 - RNA, 21 nt, Artificial Sequence
  Synthetic oligonucleotide: Ptpn6-2873
guggacaccucggcccuugag

SEQ ID NO: 22085 - RNA, 22 nt, Artificial Sequence
  Synthetic oligonucleotide: Ptpn6-2874
cguggacaccucggcccuugag

SEQ ID NO: 22086 - RNA, 23 nt, Artificial Sequence
  Synthetic oligonucleotide: Ptpn6-2875
ccguggacaccucggcccuugag

SEQ ID NO: 22087 - RNA, 24 nt, Artificial Sequence
  Synthetic oligonucleotide: Ptpn6-2876
accguggacaccucggcccuugag

SEQ ID NO: 22088 - RNA, 18 nt, Artificial Sequence
  Synthetic oligonucleotide: Ptpn6-2877
gcccucaccucucacuag

SEQ ID NO: 22089 - RNA, 19 nt, Artificial Sequence
  Synthetic oligonucleotide: Ptpn6-2878
agcccucaccucucacuag

SEQ ID NO: 22090 - RNA, 20 nt, Artificial Sequence
  Synthetic oligonucleotide: Ptpn6-2462
gagcccucaccucucacuag

SEQ ID NO: 22091 - RNA, 18 nt, Artificial Sequence
  Synthetic oligonucleotide: Ptpn6-2879
cugcaggacacccugcug

SEQ ID NO: 22092 - RNA, 19 nt, Artificial Sequence
  Synthetic oligonucleotide: Ptpn6-2880
ccugcaggacacccugcug

SEQ ID NO: 22093 - RNA, 20 nt, Artificial Sequence
  Synthetic oligonucleotide: Ptpn6-588
uccugcaggacacccugcug

SEQ ID NO: 22094 - RNA, 21 nt, Artificial Sequence
  Synthetic oligonucleotide: Ptpn6-2881
guccugcaggacacccugcug

SEQ ID NO: 22095 - RNA, 22 nt, Artificial Sequence
  Synthetic oligonucleotide: Ptpn6-2882
gguccugcaggacacccugcug

SEQ ID NO: 22096 - RNA, 23 nt, Artificial Sequence
  Synthetic oligonucleotide: Ptpn6-2883
cgguccugcaggacacccugcug

SEQ ID NO: 22097 - RNA, 24 nt, Artificial Sequence
  Synthetic oligonucleotide: Ptpn6-2884
gcgguccugcaggacacccugcug

SEQ ID NO: 22098 - RNA, 18 nt, Artificial Sequence
  Synthetic oligonucleotide: Ptpn6-2885
ugaguucuggauccgaau

SEQ ID NO: 22099 - RNA, 19 nt, Artificial Sequence
  Synthetic oligonucleotide: Ptpn6-2886
cugaguucuggauccgaau

SEQ ID NO: 22100 - RNA, 20 nt, Artificial Sequence
  Synthetic oligonucleotide: Ptpn6-594
ccugaguucuggauccgaau

SEQ ID NO: 22101 - RNA, 18 nt, Artificial Sequence
  Synthetic oligonucleotide: Ptpn6-2887
auccccugaguucuggau

SEQ ID NO: 22102 - RNA, 19 nt, Artificial Sequence
  Synthetic oligonucleotide: Ptpn6-2888
aauccccugaguucuggau

SEQ ID NO: 22103 - RNA, 20 nt, Artificial Sequence
  Synthetic oligonucleotide: Ptpn6-593
aaauccccugaguucuggau

SEQ ID NO: 22104 - RNA, 18 nt, Artificial Sequence
  Synthetic oligonucleotide: Ptpn6-2889
acagagagaugcuguccc

SEQ ID NO: 22105 - RNA, 19 nt, Artificial Sequence
  Synthetic oligonucleotide: Ptpn6-2890
uacagagagaugcuguccc

SEQ ID NO: 22106 - RNA, 20 nt, Artificial Sequence
  Synthetic oligonucleotide: Ptpn6-1690
cuacagagagaugcuguccc

SEQ ID NO: 22107 - RNA, 21 nt, Artificial Sequence
  Synthetic oligonucleotide: Ptpn6-2891
uuucaccgagaccucaguggg

SEQ ID NO: 22108 - RNA, 22 nt, Artificial Sequence
  Synthetic oligonucleotide: Ptpn6-2892
guuucaccgagaccucaguggg

SEQ ID NO: 22109 - RNA, 23 nt, Artificial Sequence
  Synthetic oligonucleotide: Ptpn6-2893
gguuucaccgagaccucaguggg

SEQ ID NO: 22110 - RNA, 24 nt, Artificial Sequence
  Synthetic oligonucleotide: Ptpn6-2894
ugguuucaccgagaccucaguggg

SEQ ID NO: 22111 - RNA, 18 nt, Artificial Sequence
  Synthetic oligonucleotide: Ptpn6-2895
ucaccgccuggugcccug

SEQ ID NO: 22112 - RNA, 19 nt, Artificial Sequence
  Synthetic oligonucleotide: Ptpn6-2896
cucaccgccuggugcccug

SEQ ID NO: 22113 - RNA, 20 nt, Artificial Sequence
  Synthetic oligonucleotide: Ptpn6-2897
ccucaccgccuggugcccug

SEQ ID NO: 22114 - RNA, 21 nt, Artificial Sequence
  Synthetic oligonucleotide: Ptpn6-2898
gccucaccgccuggugcccug

SEQ ID NO: 22115 - RNA, 22 nt, Artificial Sequence
  Synthetic oligonucleotide: Ptpn6-2899
ggccucaccgccuggugcccug

SEQ ID NO: 22116 - RNA, 23 nt, Artificial Sequence
  Synthetic oligonucleotide: Ptpn6-2900
uggccucaccgccuggugcccug

SEQ ID NO: 22117 - RNA, 24 nt, Artificial Sequence
  Synthetic oligonucleotide: Ptpn6-2901
cuggccucaccgccuggugcccug

SEQ ID NO: 22118 - RNA, 18 nt, Artificial Sequence
  Synthetic oligonucleotide: Ptpn6-2902
cuggugcccugcagggug

SEQ ID NO: 22119 - RNA, 19 nt, Artificial Sequence
  Synthetic oligonucleotide: Ptpn6-2903
ccuggugcccugcagggug

SEQ ID NO: 22120 - RNA, 20 nt, Artificial Sequence
  Synthetic oligonucleotide: Ptpn6-2476
gccuggugcccugcagggug

SEQ ID NO: 22121 - RNA, 21 nt, Artificial Sequence
  Synthetic oligonucleotide: Ptpn6-2904
cgccuggugcccugcagggug

SEQ ID NO: 22122 - RNA, 22 nt, Artificial Sequence
  Synthetic oligonucleotide: Ptpn6-2905
ccgccuggugcccugcagggug

SEQ ID NO: 22123 - RNA, 23 nt, Artificial Sequence
  Synthetic oligonucleotide: Ptpn6-2906
accgccuggugcccugcagggug

SEQ ID NO: 22124 - RNA, 24 nt, Artificial Sequence
  Synthetic oligonucleotide: Ptpn6-2907
caccgccuggugcccugcagggug

SEQ ID NO: 22125 - RNA, 18 nt, Artificial Sequence
  Synthetic oligonucleotide: Ptpn6-2908
guaagucccgggcaccau

SEQ ID NO: 22126 - RNA, 19 nt, Artificial Sequence
  Synthetic oligonucleotide: Ptpn6-2909
gguaagucccgggcaccau

SEQ ID NO: 22127 - RNA, 20 nt, Artificial Sequence
  Synthetic oligonucleotide: Ptpn6-954
ggguaagucccgggcaccau

SEQ ID NO: 22128 - RNA, 21 nt, Artificial Sequence
  Synthetic oligonucleotide: Ptpn6-2910
uggguaagucccgggcaccau

SEQ ID NO: 22129 - RNA, 22 nt, Artificial Sequence
  Synthetic oligonucleotide: Ptpn6-2911
guggguaagucccgggcaccau

SEQ ID NO: 22130 - RNA, 23 nt, Artificial Sequence
  Synthetic oligonucleotide: Ptpn6-2912
cguggguaagucccgggcaccau

SEQ ID NO: 22131 - RNA, 24 nt, Artificial Sequence
  Synthetic oligonucleotide: Ptpn6-2913
ccguggguaagucccgggcaccau

SEQ ID NO: 22132 - RNA, 18 nt, Artificial Sequence
  Synthetic oligonucleotide: Ptpn6-2914
uggcccaggcuccccgcu

SEQ ID NO: 22133 - RNA, 19 nt, Artificial Sequence
  Synthetic oligonucleotide: Ptpn6-2915
cuggcccaggcuccccgcu

SEQ ID NO: 22134 - RNA, 20 nt, Artificial Sequence
  Synthetic oligonucleotide: Ptpn6-539
gcuggcccaggcuccccgcu

SEQ ID NO: 22135 - RNA, 18 nt, Artificial Sequence
  Synthetic oligonucleotide: Ptpn6-2916
ggcagcgucagggaaggu

SEQ ID NO: 22136 - RNA, 19 nt, Artificial Sequence
  Synthetic oligonucleotide: Ptpn6-2917
aggcagcgucagggaaggu

SEQ ID NO: 22137 - RNA, 20 nt, Artificial Sequence
  Synthetic oligonucleotide: Ptpn6-2918
aaggcagcgucagggaaggu

SEQ ID NO: 22138 - RNA, 18 nt, Artificial Sequence
  Synthetic oligonucleotide: Ptpn6-2919
gugcccgggacuuaccca

SEQ ID NO: 22139 - RNA, 19 nt, Artificial Sequence
  Synthetic oligonucleotide: Ptpn6-2920
ggugcccgggacuuaccca

SEQ ID NO: 22140 - RNA, 20 nt, Artificial Sequence
  Synthetic oligonucleotide: Ptpn6-995
uggugcccgggacuuaccca

SEQ ID NO: 22141 - RNA, 21 nt, Artificial Sequence
  Synthetic oligonucleotide: Ptpn6-2921
auggugcccgggacuuaccca

SEQ ID NO: 22142 - RNA, 22 nt, Artificial Sequence
  Synthetic oligonucleotide: Ptpn6-2922
gauggugcccgggacuuaccca

SEQ ID NO: 22143 - RNA, 23 nt, Artificial Sequence
  Synthetic oligonucleotide: Ptpn6-2923
cgauggugcccgggacuuaccca

SEQ ID NO: 22144 - RNA, 24 nt, Artificial Sequence
  Synthetic oligonucleotide: Ptpn6-2924
ccgauggugcccgggacuuaccca

SEQ ID NO: 22145 - RNA, 18 nt, Artificial Sequence
  Synthetic oligonucleotide: Ptpn6-2925
gucucugcauccagccca

SEQ ID NO: 22146 - RNA, 19 nt, Artificial Sequence
  Synthetic oligonucleotide: Ptpn6-2926
ggucucugcauccagccca

SEQ ID NO: 22147 - RNA, 20 nt, Artificial Sequence
  Synthetic oligonucleotide: Ptpn6-602
gggucucugcauccagccca

SEQ ID NO: 22148 - RNA, 21 nt, Artificial Sequence
  Synthetic oligonucleotide: Ptpn6-2927
agggucucugcauccagccca

SEQ ID NO: 22149 - RNA, 22 nt, Artificial Sequence
  Synthetic oligonucleotide: Ptpn6-2928
cagggucucugcauccagccca

SEQ ID NO: 22150 - RNA, 23 nt, Artificial Sequence
  Synthetic oligonucleotide: Ptpn6-2929
gcagggucucugcauccagccca

SEQ ID NO: 22151 - RNA, 24 nt, Artificial Sequence
  Synthetic oligonucleotide: Ptpn6-2930
agcagggucucugcauccagccca

SEQ ID NO: 22152 - RNA, 18 nt, Artificial Sequence
  Synthetic oligonucleotide: Ptpn6-2931
ugggcuggucacugagca

SEQ ID NO: 22153 - RNA, 19 nt, Artificial Sequence
  Synthetic oligonucleotide: Ptpn6-2932
uugggcuggucacugagca

SEQ ID NO: 22154 - RNA, 20 nt, Artificial Sequence
  Synthetic oligonucleotide: Ptpn6-579
cuugggcuggucacugagca

SEQ ID NO: 22155 - RNA, 21 nt, Artificial Sequence
  Synthetic oligonucleotide: Ptpn6-2933
ccuugggcuggucacugagca

SEQ ID NO: 22156 - RNA, 22 nt, Artificial Sequence
  Synthetic oligonucleotide: Ptpn6-2934
gccuugggcuggucacugagca

SEQ ID NO: 22157 - RNA, 23 nt, Artificial Sequence
  Synthetic oligonucleotide: Ptpn6-2935
agccuugggcuggucacugagca

SEQ ID NO: 22158 - RNA, 24 nt, Artificial Sequence
  Synthetic oligonucleotide: Ptpn6-2936
cagccuugggcuggucacugagca

SEQ ID NO: 22159 - RNA, 18 nt, Artificial Sequence
  Synthetic oligonucleotide: Ptpn6-2937
ggcggcccaggcagggca

SEQ ID NO: 22160 - RNA, 19 nt, Artificial Sequence
  Synthetic oligonucleotide: Ptpn6-2938
gggcggcccaggcagggca

SEQ ID NO: 22161 - RNA, 20 nt, Artificial Sequence
  Synthetic oligonucleotide: Ptpn6-2939
ugggcggcccaggcagggca

SEQ ID NO: 22162 - RNA, 21 nt, Artificial Sequence
  Synthetic oligonucleotide: Ptpn6-2940
cugggcggcccaggcagggca

SEQ ID NO: 22163 - RNA, 22 nt, Artificial Sequence
  Synthetic oligonucleotide: Ptpn6-2941
ccugggcggcccaggcagggca

SEQ ID NO: 22164 - RNA, 23 nt, Artificial Sequence
  Synthetic oligonucleotide: Ptpn6-2942
accugggcggcccaggcagggca

SEQ ID NO: 22165 - RNA, 24 nt, Artificial Sequence
  Synthetic oligonucleotide: Ptpn6-2943
caccugggcggcccaggcagggca

SEQ ID NO: 22166 - RNA, 18 nt, Artificial Sequence
  Synthetic oligonucleotide: Ptpn6-2944
uccccuccauacagguca

SEQ ID NO: 22167 - RNA, 19 nt, Artificial Sequence
  Synthetic oligonucleotide: Ptpn6-2945
cuccccuccauacagguca

SEQ ID NO: 22168 - RNA, 20 nt, Artificial Sequence
  Synthetic oligonucleotide: Ptpn6-590
ucuccccuccauacagguca

SEQ ID NO: 22169 - RNA, 21 nt, Artificial Sequence
  Synthetic oligonucleotide: Ptpn6-2946
uucuccccuccauacagguca

SEQ ID NO: 22170 - RNA, 22 nt, Artificial Sequence
  Synthetic oligonucleotide: Ptpn6-2947
cuucuccccuccauacagguca

SEQ ID NO: 22171 - RNA, 23 nt, Artificial Sequence
  Synthetic oligonucleotide: Ptpn6-2948
acuucuccccuccauacagguca

SEQ ID NO: 22172 - RNA, 24 nt, Artificial Sequence
  Synthetic oligonucleotide: Ptpn6-2949
aacuucuccccuccauacagguca

SEQ ID NO: 22173 - RNA, 18 nt, Artificial Sequence
  Synthetic oligonucleotide: Ptpn6-2950
ccagccuugggcugguca

SEQ ID NO: 22174 - RNA, 19 nt, Artificial Sequence
  Synthetic oligonucleotide: Ptpn6-2951
gccagccuugggcugguca

SEQ ID NO: 22175 - RNA, 20 nt, Artificial Sequence
  Synthetic oligonucleotide: Ptpn6-578
ggccagccuugggcugguca

SEQ ID NO: 22176 - RNA, 21 nt, Artificial Sequence
  Synthetic oligonucleotide: Ptpn6-2952
gggccagccuugggcugguca

SEQ ID NO: 22177 - RNA, 22 nt, Artificial Sequence
  Synthetic oligonucleotide: Ptpn6-2953
ugggccagccuugggcugguca

SEQ ID NO: 22178 - RNA, 23 nt, Artificial Sequence
  Synthetic oligonucleotide: Ptpn6-2954
cugggccagccuugggcugguca

SEQ ID NO: 22179 - RNA, 24 nt, Artificial Sequence
  Synthetic oligonucleotide: Ptpn6-2955
ccugggccagccuugggcugguca

SEQ ID NO: 22180 - RNA, 18 nt, Artificial Sequence
  Synthetic oligonucleotide: Ptpn6-2956
ccaccuaccugacggaga

SEQ ID NO: 22181 - RNA, 19 nt, Artificial Sequence
  Synthetic oligonucleotide: Ptpn6-2957
cccaccuaccugacggaga

SEQ ID NO: 22182 - RNA, 20 nt, Artificial Sequence
  Synthetic oligonucleotide: Ptpn6-2958
gcccaccuaccugacggaga

SEQ ID NO: 22183 - RNA, 21 nt, Artificial Sequence
  Synthetic oligonucleotide: Ptpn6-2959
ggcccaccuaccugacggaga

SEQ ID NO: 22184 - RNA, 22 nt, Artificial Sequence
  Synthetic oligonucleotide: Ptpn6-2960
gggcccaccuaccugacggaga

SEQ ID NO: 22185 - RNA, 23 nt, Artificial Sequence
  Synthetic oligonucleotide: Ptpn6-2961
ggggcccaccuaccugacggaga

SEQ ID NO: 22186 - RNA, 24 nt, Artificial Sequence
  Synthetic oligonucleotide: Ptpn6-2962
gggggcccaccuaccugacggaga

SEQ ID NO: 22187 - RNA, 18 nt, Artificial Sequence
  Synthetic oligonucleotide: Ptpn6-2963
ucacccugguucuugcga

SEQ ID NO: 22188 - RNA, 19 nt, Artificial Sequence
  Synthetic oligonucleotide: Ptpn6-2964
gucacccugguucuugcga

SEQ ID NO: 22189 - RNA, 20 nt, Artificial Sequence
  Synthetic oligonucleotide: Ptpn6-595
agucacccugguucuugcga

SEQ ID NO: 22190 - RNA, 21 nt, Artificial Sequence
  Synthetic oligonucleotide: Ptpn6-2965
aagucacccugguucuugcga

SEQ ID NO: 22191 - RNA, 22 nt, Artificial Sequence
  Synthetic oligonucleotide: Ptpn6-2966
gaagucacccugguucuugcga

SEQ ID NO: 22192 - RNA, 23 nt, Artificial Sequence
  Synthetic oligonucleotide: Ptpn6-2967
agaagucacccugguucuugcga

SEQ ID NO: 22193 - RNA, 24 nt, Artificial Sequence
  Synthetic oligonucleotide: Ptpn6-2968
gagaagucacccugguucuugcga

SEQ ID NO: 22194 - RNA, 18 nt, Artificial Sequence
  Synthetic oligonucleotide: Ptpn6-2969
agcaucucucuguaggga

SEQ ID NO: 22195 - RNA, 19 nt, Artificial Sequence
  Synthetic oligonucleotide: Ptpn6-2970
cagcaucucucuguaggga

SEQ ID NO: 22196 - RNA, 20 nt, Artificial Sequence
  Synthetic oligonucleotide: Ptpn6-1215
acagcaucucucuguaggga

SEQ ID NO: 22197 - RNA, 21 nt, Artificial Sequence
  Synthetic oligonucleotide: Ptpn6-2971
gacagcaucucucuguaggga

SEQ ID NO: 22198 - RNA, 22 nt, Artificial Sequence
  Synthetic oligonucleotide: Ptpn6-2972
ggacagcaucucucuguaggga

SEQ ID NO: 22199 - RNA, 23 nt, Artificial Sequence
  Synthetic oligonucleotide: Ptpn6-2973
gggacagcaucucucuguaggga

SEQ ID NO: 22200 - RNA, 24 nt, Artificial Sequence
  Synthetic oligonucleotide: Ptpn6-2974
cgggacagcaucucucuguaggga

SEQ ID NO: 22201 - RNA, 18 nt, Artificial Sequence
  Synthetic oligonucleotide: Ptpn6-2975
caccucucacuaguggga

SEQ ID NO: 22202 - RNA, 19 nt, Artificial Sequence
  Synthetic oligonucleotide: Ptpn6-2976
ucaccucucacuaguggga

SEQ ID NO: 22203 - RNA, 20 nt, Artificial Sequence
  Synthetic oligonucleotide: Ptpn6-2977
cucaccucucacuaguggga

SEQ ID NO: 22204 - RNA, 21 nt, Artificial Sequence
  Synthetic oligonucleotide: Ptpn6-2978
ccucaccucucacuaguggga

SEQ ID NO: 22205 - RNA, 22 nt, Artificial Sequence
  Synthetic oligonucleotide: Ptpn6-2979
cccucaccucucacuaguggga

SEQ ID NO: 22206 - RNA, 23 nt, Artificial Sequence
  Synthetic oligonucleotide: Ptpn6-2980
gcccucaccucucacuaguggga

SEQ ID NO: 22207 - RNA, 24 nt, Artificial Sequence
  Synthetic oligonucleotide: Ptpn6-2981
agcccucaccucucacuaguggga

SEQ ID NO: 22208 - RNA, 18 nt, Artificial Sequence
  Synthetic oligonucleotide: Ptpn6-2982
gggggcccaccuaccuga

SEQ ID NO: 22209 - RNA, 19 nt, Artificial Sequence
  Synthetic oligonucleotide: Ptpn6-2983
ggggggcccaccuaccuga

SEQ ID NO: 22210 - RNA, 20 nt, Artificial Sequence
  Synthetic oligonucleotide: Ptpn6-2446
cggggggcccaccuaccuga

SEQ ID NO: 22211 - RNA, 21 nt, Artificial Sequence
  Synthetic oligonucleotide: Ptpn6-2984
gcggggggcccaccuaccuga

SEQ ID NO: 22212 - RNA, 22 nt, Artificial Sequence
  Synthetic oligonucleotide: Ptpn6-2985
ugcggggggcccaccuaccuga

SEQ ID NO: 22213 - RNA, 23 nt, Artificial Sequence
  Synthetic oligonucleotide: Ptpn6-2986
uugcggggggcccaccuaccuga

SEQ ID NO: 22214 - RNA, 24 nt, Artificial Sequence
  Synthetic oligonucleotide: Ptpn6-2987
guugcggggggcccaccuaccuga

SEQ ID NO: 22215 - RNA, 18 nt, Artificial Sequence
  Synthetic oligonucleotide: Ptpn6-2988
ugaugugggugacccuga

SEQ ID NO: 22216 - RNA, 19 nt, Artificial Sequence
  Synthetic oligonucleotide: Ptpn6-2989
uugaugugggugacccuga

SEQ ID NO: 22217 - RNA, 20 nt, Artificial Sequence
  Synthetic oligonucleotide: Ptpn6-2990
cuugaugugggugacccuga

SEQ ID NO: 22218 - RNA, 21 nt, Artificial Sequence
  Synthetic oligonucleotide: Ptpn6-2991
ccuugaugugggugacccuga

SEQ ID NO: 22219 - RNA, 22 nt, Artificial Sequence
  Synthetic oligonucleotide: Ptpn6-2992
accuugaugugggugacccuga

SEQ ID NO: 22220 - RNA, 23 nt, Artificial Sequence
  Synthetic oligonucleotide: Ptpn6-2993
gaccuugaugugggugacccuga

SEQ ID NO: 22221 - RNA, 24 nt, Artificial Sequence
  Synthetic oligonucleotide: Ptpn6-2994
ugaccuugaugugggugacccuga

SEQ ID NO: 22222 - RNA, 18 nt, Artificial Sequence
  Synthetic oligonucleotide: Ptpn6-2995
agcccucaccucucacua

SEQ ID NO: 22223 - RNA, 19 nt, Artificial Sequence
  Synthetic oligonucleotide: Ptpn6-2996
gagcccucaccucucacua

SEQ ID NO: 22224 - RNA, 20 nt, Artificial Sequence
  Synthetic oligonucleotide: Ptpn6-2997
ggagcccucaccucucacua

SEQ ID NO: 22225 - RNA, 21 nt, Artificial Sequence
  Synthetic oligonucleotide: Ptpn6-2998
cggagcccucaccucucacua

SEQ ID NO: 22226 - RNA, 22 nt, Artificial Sequence
  Synthetic oligonucleotide: Ptpn6-2999
gcggagcccucaccucucacua

SEQ ID NO: 22227 - RNA, 23 nt, Artificial Sequence
  Synthetic oligonucleotide: Ptpn6-3000
ugcggagcccucaccucucacua

SEQ ID NO: 22228 - RNA, 24 nt, Artificial Sequence
  Synthetic oligonucleotide: Ptpn6-3001
gugcggagcccucaccucucacua

SEQ ID NO: 22229 - RNA, 18 nt, Artificial Sequence
  Synthetic oligonucleotide: Ptpn6-3002
ggacagcaucucucugua

SEQ ID NO: 22230 - RNA, 19 nt, Artificial Sequence
  Synthetic oligonucleotide: Ptpn6-3003
gggacagcaucucucugua

SEQ ID NO: 22231 - RNA, 20 nt, Artificial Sequence
  Synthetic oligonucleotide: Ptpn6-987
cgggacagcaucucucugua

SEQ ID NO: 22232 - RNA, 21 nt, Artificial Sequence
  Synthetic oligonucleotide: Ptpn6-3004
acgggacagcaucucucugua

SEQ ID NO: 22233 - RNA, 22 nt, Artificial Sequence
  Synthetic oligonucleotide: Ptpn6-3005
cacgggacagcaucucucugua

SEQ ID NO: 22234 - RNA, 23 nt, Artificial Sequence
  Synthetic oligonucleotide: Ptpn6-3006
ccacgggacagcaucucucugua

SEQ ID NO: 22235 - RNA, 24 nt, Artificial Sequence
  Synthetic oligonucleotide: Ptpn6-3007
cccacgggacagcaucucucugua

SEQ ID NO: 22236 - RNA, 18 nt, Artificial Sequence
  Synthetic oligonucleotide: Ptpn6-3008
aggucucggugaaaccac

SEQ ID NO: 22237 - RNA, 19 nt, Artificial Sequence
  Synthetic oligonucleotide: Ptpn6-3009
gaggucucggugaaaccac

SEQ ID NO: 22238 - RNA, 20 nt, Artificial Sequence
  Synthetic oligonucleotide: Ptpn6-3010
ugaggucucggugaaaccac

SEQ ID NO: 22239 - RNA, 21 nt, Artificial Sequence
  Synthetic oligonucleotide: Ptpn6-3011
cugaggucucggugaaaccac

SEQ ID NO: 22240 - RNA, 22 nt, Artificial Sequence
  Synthetic oligonucleotide: Ptpn6-3012
acugaggucucggugaaaccac

SEQ ID NO: 22241 - RNA, 23 nt, Artificial Sequence
  Synthetic oligonucleotide: Ptpn6-3013
cacugaggucucggugaaaccac

SEQ ID NO: 22242 - RNA, 24 nt, Artificial Sequence
  Synthetic oligonucleotide: Ptpn6-3014
ccacugaggucucggugaaaccac

SEQ ID NO: 22243 - RNA, 18 nt, Artificial Sequence
  Synthetic oligonucleotide: Ptpn6-3015
gcugaggcucucacgcac

SEQ ID NO: 22244 - RNA, 19 nt, Artificial Sequence
  Synthetic oligonucleotide: Ptpn6-3016
ggcugaggcucucacgcac

SEQ ID NO: 22245 - RNA, 20 nt, Artificial Sequence
  Synthetic oligonucleotide: Ptpn6-582
uggcugaggcucucacgcac

SEQ ID NO: 22246 - RNA, 21 nt, Artificial Sequence
  Synthetic oligonucleotide: Ptpn6-3017
cuggcugaggcucucacgcac

SEQ ID NO: 22247 - RNA, 22 nt, Artificial Sequence
  Synthetic oligonucleotide: Ptpn6-3018
gcuggcugaggcucucacgcac

SEQ ID NO: 22248 - RNA, 23 nt, Artificial Sequence
  Synthetic oligonucleotide: Ptpn6-3019
ggcuggcugaggcucucacgcac

SEQ ID NO: 22249 - RNA, 24 nt, Artificial Sequence
  Synthetic oligonucleotide: Ptpn6-3020
aggcuggcugaggcucucacgcac

SEQ ID NO: 22250 - RNA, 18 nt, Artificial Sequence
  Synthetic oligonucleotide: Ptpn6-3021
gagcaguucagcggguac

SEQ ID NO: 22251 - RNA, 19 nt, Artificial Sequence
  Synthetic oligonucleotide: Ptpn6-3022
ggagcaguucagcggguac

SEQ ID NO: 22252 - RNA, 20 nt, Artificial Sequence
  Synthetic oligonucleotide: Ptpn6-585
cggagcaguucagcggguac

SEQ ID NO: 22253 - RNA, 21 nt, Artificial Sequence
  Synthetic oligonucleotide: Ptpn6-3023
ucggagcaguucagcggguac

SEQ ID NO: 22254 - RNA, 22 nt, Artificial Sequence
  Synthetic oligonucleotide: Ptpn6-3024
aucggagcaguucagcggguac

SEQ ID NO: 22255 - RNA, 23 nt, Artificial Sequence
  Synthetic oligonucleotide: Ptpn6-3025
gaucggagcaguucagcggguac

SEQ ID NO: 22256 - RNA, 24 nt, Artificial Sequence
  Synthetic oligonucleotide: Ptpn6-3026
ggaucggagcaguucagcggguac

SEQ ID NO: 22257 - RNA, 18 nt, Artificial Sequence
  Synthetic oligonucleotide: Ptpn6-3027
accuugaugugggugacc

SEQ ID NO: 22258 - RNA, 19 nt, Artificial Sequence
  Synthetic oligonucleotide: Ptpn6-3028
gaccuugaugugggugacc

SEQ ID NO: 22259 - RNA, 20 nt, Artificial Sequence
  Synthetic oligonucleotide: Ptpn6-3029
ugaccuugaugugggugacc

SEQ ID NO: 22260 - RNA, 21 nt, Artificial Sequence
  Synthetic oligonucleotide: Ptpn6-3030
augaccuugaugugggugacc

SEQ ID NO: 22261 - RNA, 22 nt, Artificial Sequence
  Synthetic oligonucleotide: Ptpn6-3031
caugaccuugaugugggugacc

SEQ ID NO: 22262 - RNA, 23 nt, Artificial Sequence
  Synthetic oligonucleotide: Ptpn6-3032
acaugaccuugaugugggugacc

SEQ ID NO: 22263 - RNA, 24 nt, Artificial Sequence
  Synthetic oligonucleotide: Ptpn6-3033
cacaugaccuugaugugggugacc

SEQ ID NO: 22264 - RNA, 18 nt, Artificial Sequence
  Synthetic oligonucleotide: Ptpn6-3034
ccgagccaggaagcuacc

SEQ ID NO: 22265 - RNA, 19 nt, Artificial Sequence
  Synthetic oligonucleotide: Ptpn6-3035
gccgagccaggaagcuacc

SEQ ID NO: 22266 - RNA, 20 nt, Artificial Sequence
  Synthetic oligonucleotide: Ptpn6-599
ggccgagccaggaagcuacc

SEQ ID NO: 22267 - RNA, 21 nt, Artificial Sequence
  Synthetic oligonucleotide: Ptpn6-3036
gggccgagccaggaagcuacc

SEQ ID NO: 22268 - RNA, 22 nt, Artificial Sequence
  Synthetic oligonucleotide: Ptpn6-3037
ugggccgagccaggaagcuacc

SEQ ID NO: 22269 - RNA, 23 nt, Artificial Sequence
  Synthetic oligonucleotide: Ptpn6-3038
cugggccgagccaggaagcuacc

SEQ ID NO: 22270 - RNA, 24 nt, Artificial Sequence
  Synthetic oligonucleotide: Ptpn6-3039
acugggccgagccaggaagcuacc

SEQ ID NO: 22271 - RNA, 18 nt, Artificial Sequence
  Synthetic oligonucleotide: Ptpn6-3040
ggugcccgggacuuaccc

SEQ ID NO: 22272 - RNA, 19 nt, Artificial Sequence
  Synthetic oligonucleotide: Ptpn6-3041
uggugcccgggacuuaccc

SEQ ID NO: 22273 - RNA, 20 nt, Artificial Sequence
  Synthetic oligonucleotide: Ptpn6-1861
auggugcccgggacuuaccc

SEQ ID NO: 22274 - RNA, 21 nt, Artificial Sequence
  Synthetic oligonucleotide: Ptpn6-3042
gauggugcccgggacuuaccc

SEQ ID NO: 22275 - RNA, 22 nt, Artificial Sequence
  Synthetic oligonucleotide: Ptpn6-3043
cgauggugcccgggacuuaccc

SEQ ID NO: 22276 - RNA, 23 nt, Artificial Sequence
  Synthetic oligonucleotide: Ptpn6-3044
ccgauggugcccgggacuuaccc

SEQ ID NO: 22277 - RNA, 24 nt, Artificial Sequence
  Synthetic oligonucleotide: Ptpn6-3045
cccgauggugcccgggacuuaccc

SEQ ID NO: 22278 - RNA, 18 nt, Artificial Sequence
  Synthetic oligonucleotide: Ptpn6-3046
ccguggacaccucggccc

SEQ ID NO: 22279 - RNA, 19 nt, Artificial Sequence
  Synthetic oligonucleotide: Ptpn6-3047
accguggacaccucggccc

SEQ ID NO: 22280 - RNA, 20 nt, Artificial Sequence
  Synthetic oligonucleotide: Ptpn6-600
uaccguggacaccucggccc

SEQ ID NO: 22281 - RNA, 21 nt, Artificial Sequence
  Synthetic oligonucleotide: Ptpn6-3048
cuaccguggacaccucggccc

SEQ ID NO: 22282 - RNA, 22 nt, Artificial Sequence
  Synthetic oligonucleotide: Ptpn6-3049
gcuaccguggacaccucggccc

SEQ ID NO: 22283 - RNA, 23 nt, Artificial Sequence
  Synthetic oligonucleotide: Ptpn6-3050
agcuaccguggacaccucggccc

SEQ ID NO: 22284 - RNA, 24 nt, Artificial Sequence
  Synthetic oligonucleotide: Ptpn6-3051
aagcuaccguggacaccucggccc

SEQ ID NO: 22285 - RNA, 18 nt, Artificial Sequence
  Synthetic oligonucleotide: Ptpn6-3052
ggggagccugggccagcc

SEQ ID NO: 22286 - RNA, 19 nt, Artificial Sequence
  Synthetic oligonucleotide: Ptpn6-3053
cggggagccugggccagcc

SEQ ID NO: 22287 - RNA, 20 nt, Artificial Sequence
  Synthetic oligonucleotide: Ptpn6-577
gcggggagccugggccagcc

SEQ ID NO: 22288 - RNA, 21 nt, Artificial Sequence
  Synthetic oligonucleotide: Ptpn6-3054
agcggggagccugggccagcc

SEQ ID NO: 22289 - RNA, 22 nt, Artificial Sequence
  Synthetic oligonucleotide: Ptpn6-3055
gagcggggagccugggccagcc

SEQ ID NO: 22290 - RNA, 23 nt, Artificial Sequence
  Synthetic oligonucleotide: Ptpn6-3056
ugagcggggagccugggccagcc

SEQ ID NO: 22291 - RNA, 24 nt, Artificial Sequence
  Synthetic oligonucleotide: Ptpn6-3057
cugagcggggagccugggccagcc

SEQ ID NO: 22292 - RNA, 18 nt, Artificial Sequence
  Synthetic oligonucleotide: Ptpn6-3058
uugcgacugggccgagcc

SEQ ID NO: 22293 - RNA, 19 nt, Artificial Sequence
  Synthetic oligonucleotide: Ptpn6-3059
cuugcgacugggccgagcc

SEQ ID NO: 22294 - RNA, 20 nt, Artificial Sequence
  Synthetic oligonucleotide: Ptpn6-28
ucuugcgacugggccgagcc

SEQ ID NO: 22295 - RNA, 21 nt, Artificial Sequence
  Synthetic oligonucleotide: Ptpn6-3060
uucuugcgacugggccgagcc

SEQ ID NO: 22296 - RNA, 22 nt, Artificial Sequence
  Synthetic oligonucleotide: Ptpn6-3061
guucuugcgacugggccgagcc

SEQ ID NO: 22297 - RNA, 23 nt, Artificial Sequence
  Synthetic oligonucleotide: Ptpn6-3062
gguucuugcgacugggccgagcc

SEQ ID NO: 22298 - RNA, 24 nt, Artificial Sequence
  Synthetic oligonucleotide: Ptpn6-3063
ugguucuugcgacugggccgagcc

SEQ ID NO: 22299 - RNA, 18 nt, Artificial Sequence
  Synthetic oligonucleotide: Ptpn6-3064
ugggaccccgauggugcc

SEQ ID NO: 22300 - RNA, 19 nt, Artificial Sequence
  Synthetic oligonucleotide: Ptpn6-3065
cugggaccccgauggugcc

SEQ ID NO: 22301 - RNA, 20 nt, Artificial Sequence
  Synthetic oligonucleotide: Ptpn6-1187
acugggaccccgauggugcc

SEQ ID NO: 22302 - RNA, 18 nt, Artificial Sequence
  Synthetic oligonucleotide: Ptpn6-3066
ucacugagcacagaaagc

SEQ ID NO: 22303 - RNA, 19 nt, Artificial Sequence
  Synthetic oligonucleotide: Ptpn6-3067
gucacugagcacagaaagc

SEQ ID NO: 22304 - RNA, 20 nt, Artificial Sequence
  Synthetic oligonucleotide: Ptpn6-580
ggucacugagcacagaaagc

SEQ ID NO: 22305 - RNA, 21 nt, Artificial Sequence
  Synthetic oligonucleotide: Ptpn6-3068
uggucacugagcacagaaagc

SEQ ID NO: 22306 - RNA, 22 nt, Artificial Sequence
  Synthetic oligonucleotide: Ptpn6-3069
cuggucacugagcacagaaagc

SEQ ID NO: 22307 - RNA, 23 nt, Artificial Sequence
  Synthetic oligonucleotide: Ptpn6-3070
gcuggucacugagcacagaaagc

SEQ ID NO: 22308 - RNA, 24 nt, Artificial Sequence
  Synthetic oligonucleotide: Ptpn6-3071
ggcuggucacugagcacagaaagc

SEQ ID NO: 22309 - RNA, 18 nt, Artificial Sequence
  Synthetic oligonucleotide: Ptpn6-3072
accuaccugacggagagc

SEQ ID NO: 22310 - RNA, 19 nt, Artificial Sequence
  Synthetic oligonucleotide: Ptpn6-3073
caccuaccugacggagagc

SEQ ID NO: 22311 - RNA, 20 nt, Artificial Sequence
  Synthetic oligonucleotide: Ptpn6-3074
ccaccuaccugacggagagc

SEQ ID NO: 22312 - RNA, 21 nt, Artificial Sequence
  Synthetic oligonucleotide: Ptpn6-3075
cccaccuaccugacggagagc

SEQ ID NO: 22313 - RNA, 22 nt, Artificial Sequence
  Synthetic oligonucleotide: Ptpn6-3076
gcccaccuaccugacggagagc

SEQ ID NO: 22314 - RNA, 23 nt, Artificial Sequence
  Synthetic oligonucleotide: Ptpn6-3077
ggcccaccuaccugacggagagc

SEQ ID NO: 22315 - RNA, 24 nt, Artificial Sequence
  Synthetic oligonucleotide: Ptpn6-3078
gggcccaccuaccugacggagagc

SEQ ID NO: 22316 - RNA, 18 nt, Artificial Sequence
  Synthetic oligonucleotide: Ptpn6-3079
cuugcgacugggccgagc

SEQ ID NO: 22317 - RNA, 19 nt, Artificial Sequence
  Synthetic oligonucleotide: Ptpn6-3080
ucuugcgacugggccgagc

SEQ ID NO: 22318 - RNA, 20 nt, Artificial Sequence
  Synthetic oligonucleotide: Ptpn6-597
uucuugcgacugggccgagc

SEQ ID NO: 22319 - RNA, 21 nt, Artificial Sequence
  Synthetic oligonucleotide: Ptpn6-3081
guucuugcgacugggccgagc

SEQ ID NO: 22320 - RNA, 22 nt, Artificial Sequence
  Synthetic oligonucleotide: Ptpn6-3082
gguucuugcgacugggccgagc

SEQ ID NO: 22321 - RNA, 23 nt, Artificial Sequence
  Synthetic oligonucleotide: Ptpn6-3083
ugguucuugcgacugggccgagc

SEQ ID NO: 22322 - RNA, 24 nt, Artificial Sequence
  Synthetic oligonucleotide: Ptpn6-3084
cugguucuugcgacugggccgagc

SEQ ID NO: 22323 - RNA, 18 nt, Artificial Sequence
  Synthetic oligonucleotide: Ptpn6-3085
ugacccugagcggggagc

SEQ ID NO: 22324 - RNA, 19 nt, Artificial Sequence
  Synthetic oligonucleotide: Ptpn6-3086
gugacccugagcggggagc

SEQ ID NO: 22325 - RNA, 20 nt, Artificial Sequence
  Synthetic oligonucleotide: Ptpn6-3087
ggugacccugagcggggagc

SEQ ID NO: 22326 - RNA, 21 nt, Artificial Sequence
  Synthetic oligonucleotide: Ptpn6-3088
gggugacccugagcggggagc

SEQ ID NO: 22327 - RNA, 22 nt, Artificial Sequence
  Synthetic oligonucleotide: Ptpn6-3089
ugggugacccugagcggggagc

SEQ ID NO: 22328 - RNA, 23 nt, Artificial Sequence
  Synthetic oligonucleotide: Ptpn6-3090
gugggugacccugagcggggagc

SEQ ID NO: 22329 - RNA, 24 nt, Artificial Sequence
  Synthetic oligonucleotide: Ptpn6-3091
ugugggugacccugagcggggagc

SEQ ID NO: 22330 - RNA, 18 nt, Artificial Sequence
  Synthetic oligonucleotide: Ptpn6-3092
augugggugacccugagc

SEQ ID NO: 22331 - RNA, 19 nt, Artificial Sequence
  Synthetic oligonucleotide: Ptpn6-3093
gaugugggugacccugagc

SEQ ID NO: 22332 - RNA, 20 nt, Artificial Sequence
  Synthetic oligonucleotide: Ptpn6-2454
ugaugugggugacccugagc

SEQ ID NO: 22333 - RNA, 21 nt, Artificial Sequence
  Synthetic oligonucleotide: Ptpn6-3094
uugaugugggugacccugagc

SEQ ID NO: 22334 - RNA, 22 nt, Artificial Sequence
  Synthetic oligonucleotide: Ptpn6-3095
cuugaugugggugacccugagc

SEQ ID NO: 22335 - RNA, 23 nt, Artificial Sequence
  Synthetic oligonucleotide: Ptpn6-3096
ccuugaugugggugacccugagc

SEQ ID NO: 22336 - RNA, 24 nt, Artificial Sequence
  Synthetic oligonucleotide: Ptpn6-3097
accuugaugugggugacccugagc

SEQ ID NO: 22337 - RNA, 18 nt, Artificial Sequence
  Synthetic oligonucleotide: Ptpn6-3098
ucacgcacaagaaacguc

SEQ ID NO: 22338 - RNA, 19 nt, Artificial Sequence
  Synthetic oligonucleotide: Ptpn6-3099
cucacgcacaagaaacguc

SEQ ID NO: 22339 - RNA, 20 nt, Artificial Sequence
  Synthetic oligonucleotide: Ptpn6-583
ucucacgcacaagaaacguc

SEQ ID NO: 22340 - RNA, 21 nt, Artificial Sequence
  Synthetic oligonucleotide: Ptpn6-3100
cucucacgcacaagaaacguc

SEQ ID NO: 22341 - RNA, 22 nt, Artificial Sequence
  Synthetic oligonucleotide: Ptpn6-3101
gcucucacgcacaagaaacguc

SEQ ID NO: 22342 - RNA, 23 nt, Artificial Sequence
  Synthetic oligonucleotide: Ptpn6-3102
ggcucucacgcacaagaaacguc

SEQ ID NO: 22343 - RNA, 24 nt, Artificial Sequence
  Synthetic oligonucleotide: Ptpn6-3103
aggcucucacgcacaagaaacguc

SEQ ID NO: 22344 - RNA, 18 nt, Artificial Sequence
  Synthetic oligonucleotide: Ptpn6-3104
gcaucucucuguagggag

SEQ ID NO: 22345 - RNA, 19 nt, Artificial Sequence
  Synthetic oligonucleotide: Ptpn6-3105
agcaucucucuguagggag

SEQ ID NO: 22346 - RNA, 20 nt, Artificial Sequence
  Synthetic oligonucleotide: Ptpn6-1228
cagcaucucucuguagggag

SEQ ID NO: 22347 - RNA, 21 nt, Artificial Sequence
  Synthetic oligonucleotide: Ptpn6-3106
acagcaucucucuguagggag

SEQ ID NO: 22348 - RNA, 22 nt, Artificial Sequence
  Synthetic oligonucleotide: Ptpn6-3107
gacagcaucucucuguagggag

SEQ ID NO: 22349 - RNA, 23 nt, Artificial Sequence
  Synthetic oligonucleotide: Ptpn6-3108
ggacagcaucucucuguagggag

SEQ ID NO: 22350 - RNA, 24 nt, Artificial Sequence
  Synthetic oligonucleotide: Ptpn6-3109
gggacagcaucucucuguagggag

SEQ ID NO: 22351 - RNA, 18 nt, Artificial Sequence
  Synthetic oligonucleotide: Ptpn6-3110
gaugugggugacccugag

SEQ ID NO: 22352 - RNA, 19 nt, Artificial Sequence
  Synthetic oligonucleotide: Ptpn6-3111
ugaugugggugacccugag

SEQ ID NO: 22353 - RNA, 20 nt, Artificial Sequence
  Synthetic oligonucleotide: Ptpn6-2461
uugaugugggugacccugag

SEQ ID NO: 22354 - RNA, 21 nt, Artificial Sequence
  Synthetic oligonucleotide: Ptpn6-3112
cuugaugugggugacccugag

SEQ ID NO: 22355 - RNA, 22 nt, Artificial Sequence
  Synthetic oligonucleotide: Ptpn6-3113
ccuugaugugggugacccugag

SEQ ID NO: 22356 - RNA, 23 nt, Artificial Sequence
  Synthetic oligonucleotide: Ptpn6-3114
accuugaugugggugacccugag

SEQ ID NO: 22357 - RNA, 24 nt, Artificial Sequence
  Synthetic oligonucleotide: Ptpn6-3115
gaccuugaugugggugacccugag

SEQ ID NO: 22358 - RNA, 18 nt, Artificial Sequence
  Synthetic oligonucleotide: Ptpn6-3116
gggcccaccuaccugacg

SEQ ID NO: 22359 - RNA, 19 nt, Artificial Sequence
  Synthetic oligonucleotide: Ptpn6-3117
ggggcccaccuaccugacg

SEQ ID NO: 22360 - RNA, 20 nt, Artificial Sequence
  Synthetic oligonucleotide: Ptpn6-3118
gggggcccaccuaccugacg

SEQ ID NO: 22361 - RNA, 21 nt, Artificial Sequence
  Synthetic oligonucleotide: Ptpn6-3119
ggggggcccaccuaccugacg

SEQ ID NO: 22362 - RNA, 22 nt, Artificial Sequence
  Synthetic oligonucleotide: Ptpn6-3120
cggggggcccaccuaccugacg

SEQ ID NO: 22363 - RNA, 23 nt, Artificial Sequence
  Synthetic oligonucleotide: Ptpn6-3121
gcggggggcccaccuaccugacg

SEQ ID NO: 22364 - RNA, 24 nt, Artificial Sequence
  Synthetic oligonucleotide: Ptpn6-3122
ugcggggggcccaccuaccugacg

SEQ ID NO: 22365 - RNA, 18 nt, Artificial Sequence
  Synthetic oligonucleotide: Ptpn6-3123
ugugggugacccugagcg

SEQ ID NO: 22366 - RNA, 19 nt, Artificial Sequence
  Synthetic oligonucleotide: Ptpn6-3124
augugggugacccugagcg

SEQ ID NO: 22367 - RNA, 20 nt, Artificial Sequence
  Synthetic oligonucleotide: Ptpn6-2463
gaugugggugacccugagcg

SEQ ID NO: 22368 - RNA, 21 nt, Artificial Sequence
  Synthetic oligonucleotide: Ptpn6-3125
ugaugugggugacccugagcg

SEQ ID NO: 22369 - RNA, 22 nt, Artificial Sequence
  Synthetic oligonucleotide: Ptpn6-3126
uugaugugggugacccugagcg

SEQ ID NO: 22370 - RNA, 23 nt, Artificial Sequence
  Synthetic oligonucleotide: Ptpn6-3127
cuugaugugggugacccugagcg

SEQ ID NO: 22371 - RNA, 24 nt, Artificial Sequence
  Synthetic oligonucleotide: Ptpn6-3128
ccuugaugugggugacccugagcg

SEQ ID NO: 22372 - RNA, 18 nt, Artificial Sequence
  Synthetic oligonucleotide: Ptpn6-3129
ccugcagggcaccaggcg

SEQ ID NO: 22373 - RNA, 19 nt, Artificial Sequence
  Synthetic oligonucleotide: Ptpn6-3130
cccugcagggcaccaggcg

SEQ ID NO: 22374 - RNA, 20 nt, Artificial Sequence
  Synthetic oligonucleotide: Ptpn6-3131
acccugcagggcaccaggcg

SEQ ID NO: 22375 - RNA, 21 nt, Artificial Sequence
  Synthetic oligonucleotide: Ptpn6-3132
cacccugcagggcaccaggcg

SEQ ID NO: 22376 - RNA, 22 nt, Artificial Sequence
  Synthetic oligonucleotide: Ptpn6-3133
ccacccugcagggcaccaggcg

SEQ ID NO: 22377 - RNA, 23 nt, Artificial Sequence
  Synthetic oligonucleotide: Ptpn6-3134
cccacccugcagggcaccaggcg

SEQ ID NO: 22378 - RNA, 24 nt, Artificial Sequence
  Synthetic oligonucleotide: Ptpn6-3135
ccccacccugcagggcaccaggcg

SEQ ID NO: 22379 - RNA, 18 nt, Artificial Sequence
  Synthetic oligonucleotide: Ptpn6-3136
cagcccacugaggucucg

SEQ ID NO: 22380 - RNA, 19 nt, Artificial Sequence
  Synthetic oligonucleotide: Ptpn6-3137
ccagcccacugaggucucg

SEQ ID NO: 22381 - RNA, 20 nt, Artificial Sequence
  Synthetic oligonucleotide: Ptpn6-603
uccagcccacugaggucucg

SEQ ID NO: 22382 - RNA, 21 nt, Artificial Sequence
  Synthetic oligonucleotide: Ptpn6-3138
auccagcccacugaggucucg

SEQ ID NO: 22383 - RNA, 22 nt, Artificial Sequence
  Synthetic oligonucleotide: Ptpn6-3139
cauccagcccacugaggucucg

SEQ ID NO: 22384 - RNA, 23 nt, Artificial Sequence
  Synthetic oligonucleotide: Ptpn6-3140
gcauccagcccacugaggucucg

SEQ ID NO: 22385 - RNA, 24 nt, Artificial Sequence
  Synthetic oligonucleotide: Ptpn6-3141
ugcauccagcccacugaggucucg

SEQ ID NO: 22386 - RNA, 18 nt, Artificial Sequence
  Synthetic oligonucleotide: Ptpn6-3142
ccaccugggcggcccagg

SEQ ID NO: 22387 - RNA, 19 nt, Artificial Sequence
  Synthetic oligonucleotide: Ptpn6-3143
accaccugggcggcccagg

SEQ ID NO: 22388 - RNA, 20 nt, Artificial Sequence
  Synthetic oligonucleotide: Ptpn6-3144
aaccaccugggcggcccagg

SEQ ID NO: 22389 - RNA, 21 nt, Artificial Sequence
  Synthetic oligonucleotide: Ptpn6-3145
aaaccaccugggcggcccagg

SEQ ID NO: 22390 - RNA, 22 nt, Artificial Sequence
  Synthetic oligonucleotide: Ptpn6-3146
gaaaccaccugggcggcccagg

SEQ ID NO: 22391 - RNA, 23 nt, Artificial Sequence
  Synthetic oligonucleotide: Ptpn6-3147
ugaaaccaccugggcggcccagg

SEQ ID NO: 22392 - RNA, 24 nt, Artificial Sequence
  Synthetic oligonucleotide: Ptpn6-3148
gugaaaccaccugggcggcccagg

SEQ ID NO: 22393 - RNA, 18 nt, Artificial Sequence
  Synthetic oligonucleotide: Ptpn6-3149
caucucucuguagggagg

SEQ ID NO: 22394 - RNA, 19 nt, Artificial Sequence
  Synthetic oligonucleotide: Ptpn6-3150
gcaucucucuguagggagg

SEQ ID NO: 22395 - RNA, 20 nt, Artificial Sequence
  Synthetic oligonucleotide: Ptpn6-1222
agcaucucucuguagggagg

SEQ ID NO: 22396 - RNA, 21 nt, Artificial Sequence
  Synthetic oligonucleotide: Ptpn6-3151
cagcaucucucuguagggagg

SEQ ID NO: 22397 - RNA, 22 nt, Artificial Sequence
  Synthetic oligonucleotide: Ptpn6-3152
acagcaucucucuguagggagg

SEQ ID NO: 22398 - RNA, 23 nt, Artificial Sequence
  Synthetic oligonucleotide: Ptpn6-3153
gacagcaucucucuguagggagg

SEQ ID NO: 22399 - RNA, 24 nt, Artificial Sequence
  Synthetic oligonucleotide: Ptpn6-3154
ggacagcaucucucuguagggagg

SEQ ID NO: 22400 - RNA, 18 nt, Artificial Sequence
  Synthetic oligonucleotide: Ptpn6-3155
acagcaucucucuguagg

SEQ ID NO: 22401 - RNA, 19 nt, Artificial Sequence
  Synthetic oligonucleotide: Ptpn6-3156
gacagcaucucucuguagg

SEQ ID NO: 22402 - RNA, 20 nt, Artificial Sequence
  Synthetic oligonucleotide: Ptpn6-1866
ggacagcaucucucuguagg

SEQ ID NO: 22403 - RNA, 21 nt, Artificial Sequence
  Synthetic oligonucleotide: Ptpn6-3157
gggacagcaucucucuguagg

SEQ ID NO: 22404 - RNA, 22 nt, Artificial Sequence
  Synthetic oligonucleotide: Ptpn6-3158
cgggacagcaucucucuguagg

SEQ ID NO: 22405 - RNA, 23 nt, Artificial Sequence
  Synthetic oligonucleotide: Ptpn6-3159
acgggacagcaucucucuguagg

SEQ ID NO: 22406 - RNA, 24 nt, Artificial Sequence
  Synthetic oligonucleotide: Ptpn6-3160
cacgggacagcaucucucuguagg

SEQ ID NO: 22407 - RNA, 18 nt, Artificial Sequence
  Synthetic oligonucleotide: Ptpn6-3161
cagcaucucucuguaggg

SEQ ID NO: 22408 - RNA, 19 nt, Artificial Sequence
  Synthetic oligonucleotide: Ptpn6-3162
acagcaucucucuguaggg

SEQ ID NO: 22409 - RNA, 20 nt, Artificial Sequence
  Synthetic oligonucleotide: Ptpn6-1043
gacagcaucucucuguaggg

SEQ ID NO: 22410 - RNA, 21 nt, Artificial Sequence
  Synthetic oligonucleotide: Ptpn6-3163
ggacagcaucucucuguaggg

SEQ ID NO: 22411 - RNA, 22 nt, Artificial Sequence
  Synthetic oligonucleotide: Ptpn6-3164
gggacagcaucucucuguaggg

SEQ ID NO: 22412 - RNA, 23 nt, Artificial Sequence
  Synthetic oligonucleotide: Ptpn6-3165
cgggacagcaucucucuguaggg

SEQ ID NO: 22413 - RNA, 24 nt, Artificial Sequence
  Synthetic oligonucleotide: Ptpn6-3166
acgggacagcaucucucuguaggg

SEQ ID NO: 22414 - RNA, 18 nt, Artificial Sequence
  Synthetic oligonucleotide: Ptpn6-3167
cugguucuugcgacuggg

SEQ ID NO: 22415 - RNA, 19 nt, Artificial Sequence
  Synthetic oligonucleotide: Ptpn6-3168
ccugguucuugcgacuggg

SEQ ID NO: 22416 - RNA, 20 nt, Artificial Sequence
  Synthetic oligonucleotide: Ptpn6-596
cccugguucuugcgacuggg

SEQ ID NO: 22417 - RNA, 21 nt, Artificial Sequence
  Synthetic oligonucleotide: Ptpn6-3169
acccugguucuugcgacuggg

SEQ ID NO: 22418 - RNA, 22 nt, Artificial Sequence
  Synthetic oligonucleotide: Ptpn6-3170
cacccugguucuugcgacuggg

SEQ ID NO: 22419 - RNA, 23 nt, Artificial Sequence
  Synthetic oligonucleotide: Ptpn6-3171
ucacccugguucuugcgacuggg

SEQ ID NO: 22420 - RNA, 24 nt, Artificial Sequence
  Synthetic oligonucleotide: Ptpn6-3172
gucacccugguucuugcgacuggg

SEQ ID NO: 22421 - RNA, 18 nt, Artificial Sequence
  Synthetic oligonucleotide: Ptpn6-3173
acgaagucuccaggcugg

SEQ ID NO: 22422 - RNA, 19 nt, Artificial Sequence
  Synthetic oligonucleotide: Ptpn6-3174
cacgaagucuccaggcugg

SEQ ID NO: 22423 - RNA, 20 nt, Artificial Sequence
  Synthetic oligonucleotide: Ptpn6-581
gcacgaagucuccaggcugg

SEQ ID NO: 22424 - RNA, 21 nt, Artificial Sequence
  Synthetic oligonucleotide: Ptpn6-3175
agcacgaagucuccaggcugg

SEQ ID NO: 22425 - RNA, 22 nt, Artificial Sequence
  Synthetic oligonucleotide: Ptpn6-3176
aagcacgaagucuccaggcugg

SEQ ID NO: 22426 - RNA, 23 nt, Artificial Sequence
  Synthetic oligonucleotide: Ptpn6-3177
aaagcacgaagucuccaggcugg

SEQ ID NO: 22427 - RNA, 24 nt, Artificial Sequence
  Synthetic oligonucleotide: Ptpn6-3178
gaaagcacgaagucuccaggcugg

SEQ ID NO: 22428 - RNA, 18 nt, Artificial Sequence
  Synthetic oligonucleotide: Ptpn6-3179
ggggggcccaccuaccug

SEQ ID NO: 22429 - RNA, 19 nt, Artificial Sequence
  Synthetic oligonucleotide: Ptpn6-3180
cggggggcccaccuaccug

SEQ ID NO: 22430 - RNA, 20 nt, Artificial Sequence
  Synthetic oligonucleotide: Ptpn6-3181
gcggggggcccaccuaccug

SEQ ID NO: 22431 - RNA, 21 nt, Artificial Sequence
  Synthetic oligonucleotide: Ptpn6-3182
ugcggggggcccaccuaccug

SEQ ID NO: 22432 - RNA, 22 nt, Artificial Sequence
  Synthetic oligonucleotide: Ptpn6-3183
uugcggggggcccaccuaccug

SEQ ID NO: 22433 - RNA, 23 nt, Artificial Sequence
  Synthetic oligonucleotide: Ptpn6-3184
guugcggggggcccaccuaccug

SEQ ID NO: 22434 - RNA, 24 nt, Artificial Sequence
  Synthetic oligonucleotide: Ptpn6-3185
gguugcggggggcccaccuaccug

SEQ ID NO: 22435 - RNA, 18 nt, Artificial Sequence
  Synthetic oligonucleotide: Ptpn6-3186
accugaucccccacccug

SEQ ID NO: 22436 - RNA, 19 nt, Artificial Sequence
  Synthetic oligonucleotide: Ptpn6-3187
caccugaucccccacccug

SEQ ID NO: 22437 - RNA, 20 nt, Artificial Sequence
  Synthetic oligonucleotide: Ptpn6-3188
ucaccugaucccccacccug

SEQ ID NO: 22438 - RNA, 21 nt, Artificial Sequence
  Synthetic oligonucleotide: Ptpn6-3189
gucaccugaucccccacccug

SEQ ID NO: 22439 - RNA, 22 nt, Artificial Sequence
  Synthetic oligonucleotide: Ptpn6-3190
ggucaccugaucccccacccug

SEQ ID NO: 22440 - RNA, 23 nt, Artificial Sequence
  Synthetic oligonucleotide: Ptpn6-3191
gggucaccugaucccccacccug

SEQ ID NO: 22441 - RNA, 24 nt, Artificial Sequence
  Synthetic oligonucleotide: Ptpn6-3192
ugggucaccugaucccccacccug

SEQ ID NO: 22442 - RNA, 18 nt, Artificial Sequence
  Synthetic oligonucleotide: Ptpn6-3193
ggugccgucgcgguccug

SEQ ID NO: 22443 - RNA, 19 nt, Artificial Sequence
  Synthetic oligonucleotide: Ptpn6-3194
uggugccgucgcgguccug

SEQ ID NO: 22444 - RNA, 20 nt, Artificial Sequence
  Synthetic oligonucleotide: Ptpn6-587
auggugccgucgcgguccug

SEQ ID NO: 22445 - RNA, 21 nt, Artificial Sequence
  Synthetic oligonucleotide: Ptpn6-3195
gauggugccgucgcgguccug

SEQ ID NO: 22446 - RNA, 22 nt, Artificial Sequence
  Synthetic oligonucleotide: Ptpn6-3196
ugauggugccgucgcgguccug

SEQ ID NO: 22447 - RNA, 23 nt, Artificial Sequence
  Synthetic oligonucleotide: Ptpn6-3197
augauggugccgucgcgguccug

SEQ ID NO: 22448 - RNA, 24 nt, Artificial Sequence
  Synthetic oligonucleotide: Ptpn6-3198
gaugauggugccgucgcgguccug

SEQ ID NO: 22449 - RNA, 18 nt, Artificial Sequence
  Synthetic oligonucleotide: Ptpn6-3199
cgggacagcaucucucug

SEQ ID NO: 22450 - RNA, 19 nt, Artificial Sequence
  Synthetic oligonucleotide: Ptpn6-3200
acgggacagcaucucucug

SEQ ID NO: 22451 - RNA, 20 nt, Artificial Sequence
  Synthetic oligonucleotide: Ptpn6-1863
cacgggacagcaucucucug

SEQ ID NO: 22452 - RNA, 21 nt, Artificial Sequence
  Synthetic oligonucleotide: Ptpn6-3201
ccacgggacagcaucucucug

SEQ ID NO: 22453 - RNA, 22 nt, Artificial Sequence
  Synthetic oligonucleotide: Ptpn6-3202
cccacgggacagcaucucucug

SEQ ID NO: 22454 - RNA, 23 nt, Artificial Sequence
  Synthetic oligonucleotide: Ptpn6-3203
acccacgggacagcaucucucug

SEQ ID NO: 22455 - RNA, 24 nt, Artificial Sequence
  Synthetic oligonucleotide: Ptpn6-3204
uacccacgggacagcaucucucug

SEQ ID NO: 22456 - RNA, 18 nt, Artificial Sequence
  Synthetic oligonucleotide: Ptpn6-3205
ggcccaggcagggcagug

SEQ ID NO: 22457 - RNA, 19 nt, Artificial Sequence
  Synthetic oligonucleotide: Ptpn6-3206
cggcccaggcagggcagug

SEQ ID NO: 22458 - RNA, 20 nt, Artificial Sequence
  Synthetic oligonucleotide: Ptpn6-2473
gcggcccaggcagggcagug

SEQ ID NO: 22459 - RNA, 21 nt, Artificial Sequence
  Synthetic oligonucleotide: Ptpn6-3207
ggcggcccaggcagggcagug

SEQ ID NO: 22460 - RNA, 22 nt, Artificial Sequence
  Synthetic oligonucleotide: Ptpn6-3208
gggcggcccaggcagggcagug

SEQ ID NO: 22461 - RNA, 23 nt, Artificial Sequence
  Synthetic oligonucleotide: Ptpn6-3209
ugggcggcccaggcagggcagug

SEQ ID NO: 22462 - RNA, 24 nt, Artificial Sequence
  Synthetic oligonucleotide: Ptpn6-3210
cugggcggcccaggcagggcagug

SEQ ID NO: 22463 - RNA, 18 nt, Artificial Sequence
  Synthetic oligonucleotide: Ptpn6-3211
accucucacuagugggau

SEQ ID NO: 22464 - RNA, 19 nt, Artificial Sequence
  Synthetic oligonucleotide: Ptpn6-3212
caccucucacuagugggau

SEQ ID NO: 22465 - RNA, 20 nt, Artificial Sequence
  Synthetic oligonucleotide: Ptpn6-2477
ucaccucucacuagugggau

SEQ ID NO: 22466 - RNA, 21 nt, Artificial Sequence
  Synthetic oligonucleotide: Ptpn6-3213
cucaccucucacuagugggau

SEQ ID NO: 22467 - RNA, 22 nt, Artificial Sequence
  Synthetic oligonucleotide: Ptpn6-3214
ccucaccucucacuagugggau

SEQ ID NO: 22468 - RNA, 23 nt, Artificial Sequence
  Synthetic oligonucleotide: Ptpn6-3215
cccucaccucucacuagugggau

SEQ ID NO: 22469 - RNA, 24 nt, Artificial Sequence
  Synthetic oligonucleotide: Ptpn6-3216
gcccucaccucucacuagugggau

SEQ ID NO: 22470 - RNA, 18 nt, Artificial Sequence
  Synthetic oligonucleotide: Ptpn6-3217
cggcccaggcagggcagu

SEQ ID NO: 22471 - RNA, 19 nt, Artificial Sequence
  Synthetic oligonucleotide: Ptpn6-3218
gcggcccaggcagggcagu

SEQ ID NO: 22472 - RNA, 20 nt, Artificial Sequence
  Synthetic oligonucleotide: Ptpn6-3219
ggcggcccaggcagggcagu

SEQ ID NO: 22473 - RNA, 21 nt, Artificial Sequence
  Synthetic oligonucleotide: Ptpn6-3220
gggcggcccaggcagggcagu

SEQ ID NO: 22474 - RNA, 22 nt, Artificial Sequence
  Synthetic oligonucleotide: Ptpn6-3221
ugggcggcccaggcagggcagu

SEQ ID NO: 22475 - RNA, 23 nt, Artificial Sequence
  Synthetic oligonucleotide: Ptpn6-3222
cugggcggcccaggcagggcagu

SEQ ID NO: 22476 - RNA, 24 nt, Artificial Sequence
  Synthetic oligonucleotide: Ptpn6-3223
ccugggcggcccaggcagggcagu

SEQ ID NO: 22477 - RNA, 18 nt, Artificial Sequence
  Synthetic oligonucleotide: Ptpn6-3224
gggacagcaucucucugu

SEQ ID NO: 22478 - RNA, 19 nt, Artificial Sequence
  Synthetic oligonucleotide: Ptpn6-3225
cgggacagcaucucucugu

SEQ ID NO: 22479 - RNA, 20 nt, Artificial Sequence
  Synthetic oligonucleotide: Ptpn6-1190
acgggacagcaucucucugu

SEQ ID NO: 22480 - RNA, 21 nt, Artificial Sequence
  Synthetic oligonucleotide: Ptpn6-3226
cacgggacagcaucucucugu

SEQ ID NO: 22481 - RNA, 22 nt, Artificial Sequence
  Synthetic oligonucleotide: Ptpn6-3227
ccacgggacagcaucucucugu

SEQ ID NO: 22482 - RNA, 23 nt, Artificial Sequence
  Synthetic oligonucleotide: Ptpn6-3228
cccacgggacagcaucucucugu

SEQ ID NO: 22483 - RNA, 24 nt, Artificial Sequence
  Synthetic oligonucleotide: Ptpn6-3229
acccacgggacagcaucucucugu

SEQ ID NO: 22484 - RNA, 18 nt, Artificial Sequence
  Synthetic oligonucleotide: Ptpn6-3230
ggcuucccccucccuaca

SEQ ID NO: 22485 - RNA, 19 nt, Artificial Sequence
  Synthetic oligonucleotide: Ptpn6-3231
uggcuucccccucccuaca

SEQ ID NO: 22486 - RNA, 20 nt, Artificial Sequence
  Synthetic oligonucleotide: Ptpn6-1689
guggcuucccccucccuaca

SEQ ID NO: 22487 - RNA, 21 nt, Artificial Sequence
  Synthetic oligonucleotide: Ptpn6-3232
cguggcuucccccucccuaca

SEQ ID NO: 22488 - RNA, 22 nt, Artificial Sequence
  Synthetic oligonucleotide: Ptpn6-3233
ccguggcuucccccucccuaca

SEQ ID NO: 22489 - RNA, 23 nt, Artificial Sequence
  Synthetic oligonucleotide: Ptpn6-3234
gccguggcuucccccucccuaca

SEQ ID NO: 22490 - RNA, 24 nt, Artificial Sequence
  Synthetic oligonucleotide: Ptpn6-3235
ugccguggcuucccccucccuaca

SEQ ID NO: 22491 - RNA, 18 nt, Artificial Sequence
  Synthetic oligonucleotide: Ptpn6-3236
gguaagucccgggcacca

SEQ ID NO: 22492 - RNA, 19 nt, Artificial Sequence
  Synthetic oligonucleotide: Ptpn6-3237
ggguaagucccgggcacca

SEQ ID NO: 22493 - RNA, 20 nt, Artificial Sequence
  Synthetic oligonucleotide: Ptpn6-1692
uggguaagucccgggcacca

SEQ ID NO: 22494 - RNA, 21 nt, Artificial Sequence
  Synthetic oligonucleotide: Ptpn6-3238
guggguaagucccgggcacca

SEQ ID NO: 22495 - RNA, 22 nt, Artificial Sequence
  Synthetic oligonucleotide: Ptpn6-3239
cguggguaagucccgggcacca

SEQ ID NO: 22496 - RNA, 23 nt, Artificial Sequence
  Synthetic oligonucleotide: Ptpn6-3240
ccguggguaagucccgggcacca

SEQ ID NO: 22497 - RNA, 24 nt, Artificial Sequence
  Synthetic oligonucleotide: Ptpn6-3241
cccguggguaagucccgggcacca

SEQ ID NO: 22498 - RNA, 18 nt, Artificial Sequence
  Synthetic oligonucleotide: Ptpn6-3242
gguuucaccgagaccuca

SEQ ID NO: 22499 - RNA, 19 nt, Artificial Sequence
  Synthetic oligonucleotide: Ptpn6-3243
ugguuucaccgagaccuca

SEQ ID NO: 22500 - RNA, 20 nt, Artificial Sequence
  Synthetic oligonucleotide: Ptpn6-504
gugguuucaccgagaccuca

SEQ ID NO: 22501 - RNA, 21 nt, Artificial Sequence
  Synthetic oligonucleotide: Ptpn6-3244
ggugguuucaccgagaccuca

SEQ ID NO: 22502 - RNA, 22 nt, Artificial Sequence
  Synthetic oligonucleotide: Ptpn6-3245
aggugguuucaccgagaccuca

SEQ ID NO: 22503 - RNA, 23 nt, Artificial Sequence
  Synthetic oligonucleotide: Ptpn6-3246
caggugguuucaccgagaccuca

SEQ ID NO: 22504 - RNA, 24 nt, Artificial Sequence
  Synthetic oligonucleotide: Ptpn6-3247
ccaggugguuucaccgagaccuca

SEQ ID NO: 22505 - RNA, 18 nt, Artificial Sequence
  Synthetic oligonucleotide: Ptpn6-3248
gccgcccaggugguuuca

SEQ ID NO: 22506 - RNA, 19 nt, Artificial Sequence
  Synthetic oligonucleotide: Ptpn6-3249
ggccgcccaggugguuuca

SEQ ID NO: 22507 - RNA, 20 nt, Artificial Sequence
  Synthetic oligonucleotide: Ptpn6-3250
gggccgcccaggugguuuca

SEQ ID NO: 22508 - RNA, 21 nt, Artificial Sequence
  Synthetic oligonucleotide: Ptpn6-3251
ugggccgcccaggugguuuca

SEQ ID NO: 22509 - RNA, 22 nt, Artificial Sequence
  Synthetic oligonucleotide: Ptpn6-3252
cugggccgcccaggugguuuca

SEQ ID NO: 22510 - RNA, 23 nt, Artificial Sequence
  Synthetic oligonucleotide: Ptpn6-3253
ccugggccgcccaggugguuuca

SEQ ID NO: 22511 - RNA, 24 nt, Artificial Sequence
  Synthetic oligonucleotide: Ptpn6-3254
gccugggccgcccaggugguuuca

SEQ ID NO: 22512 - RNA, 18 nt, Artificial Sequence
  Synthetic oligonucleotide: Ptpn6-3255
uucuaugaccuguaugga

SEQ ID NO: 22513 - RNA, 19 nt, Artificial Sequence
  Synthetic oligonucleotide: Ptpn6-3256
uuucuaugaccuguaugga

SEQ ID NO: 22514 - RNA, 20 nt, Artificial Sequence
  Synthetic oligonucleotide: Ptpn6-98
auuucuaugaccuguaugga

SEQ ID NO: 22515 - RNA, 21 nt, Artificial Sequence
  Synthetic oligonucleotide: Ptpn6-3257
gauuucuaugaccuguaugga

SEQ ID NO: 22516 - RNA, 22 nt, Artificial Sequence
  Synthetic oligonucleotide: Ptpn6-3258
ggauuucuaugaccuguaugga

SEQ ID NO: 22517 - RNA, 23 nt, Artificial Sequence
  Synthetic oligonucleotide: Ptpn6-3259
gggauuucuaugaccuguaugga

SEQ ID NO: 22518 - RNA, 24 nt, Artificial Sequence
  Synthetic oligonucleotide: Ptpn6-3260
ggggauuucuaugaccuguaugga

SEQ ID NO: 22519 - RNA, 18 nt, Artificial Sequence
  Synthetic oligonucleotide: Ptpn6-3261
agaaguuugcgacucuga

SEQ ID NO: 22520 - RNA, 19 nt, Artificial Sequence
  Synthetic oligonucleotide: Ptpn6-3262
gagaaguuugcgacucuga

SEQ ID NO: 22521 - RNA, 20 nt, Artificial Sequence
  Synthetic oligonucleotide: Ptpn6-522
ggagaaguuugcgacucuga

SEQ ID NO: 22522 - RNA, 21 nt, Artificial Sequence
  Synthetic oligonucleotide: Ptpn6-3263
gggagaaguuugcgacucuga

SEQ ID NO: 22523 - RNA, 22 nt, Artificial Sequence
  Synthetic oligonucleotide: Ptpn6-3264
ggggagaaguuugcgacucuga

SEQ ID NO: 22524 - RNA, 23 nt, Artificial Sequence
  Synthetic oligonucleotide: Ptpn6-3265
aggggagaaguuugcgacucuga

SEQ ID NO: 22525 - RNA, 24 nt, Artificial Sequence
  Synthetic oligonucleotide: Ptpn6-3266
gaggggagaaguuugcgacucuga

SEQ ID NO: 22526 - RNA, 18 nt, Artificial Sequence
  Synthetic oligonucleotide: Ptpn6-3267
acugcuccgaucccacua

SEQ ID NO: 22527 - RNA, 19 nt, Artificial Sequence
  Synthetic oligonucleotide: Ptpn6-3268
aacugcuccgaucccacua

SEQ ID NO: 22528 - RNA, 20 nt, Artificial Sequence
  Synthetic oligonucleotide: Ptpn6-528
gaacugcuccgaucccacua

SEQ ID NO: 22529 - RNA, 21 nt, Artificial Sequence
  Synthetic oligonucleotide: Ptpn6-3269
ugaacugcuccgaucccacua

SEQ ID NO: 22530 - RNA, 22 nt, Artificial Sequence
  Synthetic oligonucleotide: Ptpn6-3270
cugaacugcuccgaucccacua

SEQ ID NO: 22531 - RNA, 23 nt, Artificial Sequence
  Synthetic oligonucleotide: Ptpn6-3271
gcugaacugcuccgaucccacua

SEQ ID NO: 22532 - RNA, 24 nt, Artificial Sequence
  Synthetic oligonucleotide: Ptpn6-3272
cgcugaacugcuccgaucccacua

SEQ ID NO: 22533 - RNA, 18 nt, Artificial Sequence
  Synthetic oligonucleotide: Ptpn6-3273
guggcuucccccucccua

SEQ ID NO: 22534 - RNA, 19 nt, Artificial Sequence
  Synthetic oligonucleotide: Ptpn6-3274
cguggcuucccccucccua

SEQ ID NO: 22535 - RNA, 20 nt, Artificial Sequence
  Synthetic oligonucleotide: Ptpn6-1688
ccguggcuucccccucccua

SEQ ID NO: 22536 - RNA, 18 nt, Artificial Sequence
  Synthetic oligonucleotide: Ptpn6-3275
ggauuucuaugaccugua

SEQ ID NO: 22537 - RNA, 19 nt, Artificial Sequence
  Synthetic oligonucleotide: Ptpn6-3276
gggauuucuaugaccugua

SEQ ID NO: 22538 - RNA, 20 nt, Artificial Sequence
  Synthetic oligonucleotide: Ptpn6-59
ggggauuucuaugaccugua

SEQ ID NO: 22539 - RNA, 21 nt, Artificial Sequence
  Synthetic oligonucleotide: Ptpn6-3277
aggggauuucuaugaccugua

SEQ ID NO: 22540 - RNA, 22 nt, Artificial Sequence
  Synthetic oligonucleotide: Ptpn6-3278
caggggauuucuaugaccugua

SEQ ID NO: 22541 - RNA, 23 nt, Artificial Sequence
  Synthetic oligonucleotide: Ptpn6-3279
ucaggggauuucuaugaccugua

SEQ ID NO: 22542 - RNA, 24 nt, Artificial Sequence
  Synthetic oligonucleotide: Ptpn6-3280
cucaggggauuucuaugaccugua

SEQ ID NO: 22543 - RNA, 18 nt, Artificial Sequence
  Synthetic oligonucleotide: Ptpn6-3281
ggugggccccccgcaacc

SEQ ID NO: 22544 - RNA, 19 nt, Artificial Sequence
  Synthetic oligonucleotide: Ptpn6-3282
aggugggccccccgcaacc

SEQ ID NO: 22545 - RNA, 20 nt, Artificial Sequence
  Synthetic oligonucleotide: Ptpn6-3283
uaggugggccccccgcaacc

SEQ ID NO: 22546 - RNA, 21 nt, Artificial Sequence
  Synthetic oligonucleotide: Ptpn6-3284
guaggugggccccccgcaacc

SEQ ID NO: 22547 - RNA, 22 nt, Artificial Sequence
  Synthetic oligonucleotide: Ptpn6-3285
gguaggugggccccccgcaacc

SEQ ID NO: 22548 - RNA, 23 nt, Artificial Sequence
  Synthetic oligonucleotide: Ptpn6-3286
agguaggugggccccccgcaacc

SEQ ID NO: 22549 - RNA, 24 nt, Artificial Sequence
  Synthetic oligonucleotide: Ptpn6-3287
cagguaggugggccccccgcaacc

SEQ ID NO: 22550 - RNA, 18 nt, Artificial Sequence
  Synthetic oligonucleotide: Ptpn6-3288
ugagagccucagccagcc

SEQ ID NO: 22551 - RNA, 19 nt, Artificial Sequence
  Synthetic oligonucleotide: Ptpn6-3289
gugagagccucagccagcc

SEQ ID NO: 22552 - RNA, 20 nt, Artificial Sequence
  Synthetic oligonucleotide: Ptpn6-107
cgugagagccucagccagcc

SEQ ID NO: 22553 - RNA, 21 nt, Artificial Sequence
  Synthetic oligonucleotide: Ptpn6-3290
gcgugagagccucagccagcc

SEQ ID NO: 22554 - RNA, 22 nt, Artificial Sequence
  Synthetic oligonucleotide: Ptpn6-3291
ugcgugagagccucagccagcc

SEQ ID NO: 22555 - RNA, 23 nt, Artificial Sequence
  Synthetic oligonucleotide: Ptpn6-3292
gugcgugagagccucagccagcc

SEQ ID NO: 22556 - RNA, 24 nt, Artificial Sequence
  Synthetic oligonucleotide: Ptpn6-3293
ugugcgugagagccucagccagcc

SEQ ID NO: 22557 - RNA, 18 nt, Artificial Sequence
  Synthetic oligonucleotide: Ptpn6-3294
gcaggccaagggcgagcc

SEQ ID NO: 22558 - RNA, 19 nt, Artificial Sequence
  Synthetic oligonucleotide: Ptpn6-3295
ugcaggccaagggcgagcc

SEQ ID NO: 22559 - RNA, 20 nt, Artificial Sequence
  Synthetic oligonucleotide: Ptpn6-534
cugcaggccaagggcgagcc

SEQ ID NO: 22560 - RNA, 21 nt, Artificial Sequence
  Synthetic oligonucleotide: Ptpn6-3296
gcugcaggccaagggcgagcc

SEQ ID NO: 22561 - RNA, 22 nt, Artificial Sequence
  Synthetic oligonucleotide: Ptpn6-3297
ugcugcaggccaagggcgagcc

SEQ ID NO: 22562 - RNA, 23 nt, Artificial Sequence
  Synthetic oligonucleotide: Ptpn6-3298
cugcugcaggccaagggcgagcc

SEQ ID NO: 22563 - RNA, 24 nt, Artificial Sequence
  Synthetic oligonucleotide: Ptpn6-3299
gcugcugcaggccaagggcgagcc

SEQ ID NO: 22564 - RNA, 18 nt, Artificial Sequence
  Synthetic oligonucleotide: Ptpn6-3300
gagacgcugcugcaggcc

SEQ ID NO: 22565 - RNA, 19 nt, Artificial Sequence
  Synthetic oligonucleotide: Ptpn6-3301
agagacgcugcugcaggcc

SEQ ID NO: 22566 - RNA, 20 nt, Artificial Sequence
  Synthetic oligonucleotide: Ptpn6-532
cagagacgcugcugcaggcc

SEQ ID NO: 22567 - RNA, 21 nt, Artificial Sequence
  Synthetic oligonucleotide: Ptpn6-3302
gcagagacgcugcugcaggcc

SEQ ID NO: 22568 - RNA, 22 nt, Artificial Sequence
  Synthetic oligonucleotide: Ptpn6-3303
ggcagagacgcugcugcaggcc

SEQ ID NO: 22569 - RNA, 23 nt, Artificial Sequence
  Synthetic oligonucleotide: Ptpn6-3304
aggcagagacgcugcugcaggcc

SEQ ID NO: 22570 - RNA, 24 nt, Artificial Sequence
  Synthetic oligonucleotide: Ptpn6-3305
caggcagagacgcugcugcaggcc

SEQ ID NO: 22571 - RNA, 18 nt, Artificial Sequence
  Synthetic oligonucleotide: Ptpn6-3306
gugagagccucagccagc

SEQ ID NO: 22572 - RNA, 19 nt, Artificial Sequence
  Synthetic oligonucleotide: Ptpn6-3307
cgugagagccucagccagc

SEQ ID NO: 22573 - RNA, 20 nt, Artificial Sequence
  Synthetic oligonucleotide: Ptpn6-537
gcgugagagccucagccagc

SEQ ID NO: 22574 - RNA, 21 nt, Artificial Sequence
  Synthetic oligonucleotide: Ptpn6-3308
ugcgugagagccucagccagc

SEQ ID NO: 22575 - RNA, 22 nt, Artificial Sequence
  Synthetic oligonucleotide: Ptpn6-3309
gugcgugagagccucagccagc

SEQ ID NO: 22576 - RNA, 23 nt, Artificial Sequence
  Synthetic oligonucleotide: Ptpn6-3310
ugugcgugagagccucagccagc

SEQ ID NO: 22577 - RNA, 24 nt, Artificial Sequence
  Synthetic oligonucleotide: Ptpn6-3311
uugugcgugagagccucagccagc

SEQ ID NO: 22578 - RNA, 18 nt, Artificial Sequence
  Synthetic oligonucleotide: Ptpn6-3312
cuggcucggcccagucgc

SEQ ID NO: 22579 - RNA, 19 nt, Artificial Sequence
  Synthetic oligonucleotide: Ptpn6-3313
ccuggcucggcccagucgc

SEQ ID NO: 22580 - RNA, 20 nt, Artificial Sequence
  Synthetic oligonucleotide: Ptpn6-509
uccuggcucggcccagucgc

SEQ ID NO: 22581 - RNA, 21 nt, Artificial Sequence
  Synthetic oligonucleotide: Ptpn6-3314
uuccuggcucggcccagucgc

SEQ ID NO: 22582 - RNA, 22 nt, Artificial Sequence
  Synthetic oligonucleotide: Ptpn6-3315
cuuccuggcucggcccagucgc

SEQ ID NO: 22583 - RNA, 23 nt, Artificial Sequence
  Synthetic oligonucleotide: Ptpn6-3316
gcuuccuggcucggcccagucgc

SEQ ID NO: 22584 - RNA, 24 nt, Artificial Sequence
  Synthetic oligonucleotide: Ptpn6-3317
agcuuccuggcucggcccagucgc

SEQ ID NO: 22585 - RNA, 18 nt, Artificial Sequence
  Synthetic oligonucleotide: Ptpn6-3318
guaaggcagccaggcggc

SEQ ID NO: 22586 - RNA, 19 nt, Artificial Sequence
  Synthetic oligonucleotide: Ptpn6-3319
gguaaggcagccaggcggc

SEQ ID NO: 22587 - RNA, 20 nt, Artificial Sequence
  Synthetic oligonucleotide: Ptpn6-2456
agguaaggcagccaggcggc

SEQ ID NO: 22588 - RNA, 21 nt, Artificial Sequence
  Synthetic oligonucleotide: Ptpn6-3320
gagguaaggcagccaggcggc

SEQ ID NO: 22589 - RNA, 22 nt, Artificial Sequence
  Synthetic oligonucleotide: Ptpn6-3321
cgagguaaggcagccaggcggc

SEQ ID NO: 22590 - RNA, 23 nt, Artificial Sequence
  Synthetic oligonucleotide: Ptpn6-3322
gcgagguaaggcagccaggcggc

SEQ ID NO: 22591 - RNA, 24 nt, Artificial Sequence
  Synthetic oligonucleotide: Ptpn6-3323
ugcgagguaaggcagccaggcggc

SEQ ID NO: 22592 - RNA, 18 nt, Artificial Sequence
  Synthetic oligonucleotide: Ptpn6-3324
ccuggacguuucuugugc

SEQ ID NO: 22593 - RNA, 19 nt, Artificial Sequence
  Synthetic oligonucleotide: Ptpn6-3325
cccuggacguuucuugugc

SEQ ID NO: 22594 - RNA, 20 nt, Artificial Sequence
  Synthetic oligonucleotide: Ptpn6-535
gcccuggacguuucuugugc

SEQ ID NO: 22595 - RNA, 21 nt, Artificial Sequence
  Synthetic oligonucleotide: Ptpn6-3326
agcccuggacguuucuugugc

SEQ ID NO: 22596 - RNA, 22 nt, Artificial Sequence
  Synthetic oligonucleotide: Ptpn6-3327
gagcccuggacguuucuugugc

SEQ ID NO: 22597 - RNA, 23 nt, Artificial Sequence
  Synthetic oligonucleotide: Ptpn6-3328
cgagcccuggacguuucuugugc

SEQ ID NO: 22598 - RNA, 24 nt, Artificial Sequence
  Synthetic oligonucleotide: Ptpn6-3329
gcgagcccuggacguuucuugugc

SEQ ID NO: 22599 - RNA, 18 nt, Artificial Sequence
  Synthetic oligonucleotide: Ptpn6-3330
gugacccauauucggauc

SEQ ID NO: 22600 - RNA, 19 nt, Artificial Sequence
  Synthetic oligonucleotide: Ptpn6-3331
ggugacccauauucggauc

SEQ ID NO: 22601 - RNA, 20 nt, Artificial Sequence
  Synthetic oligonucleotide: Ptpn6-511
aggugacccauauucggauc

SEQ ID NO: 22602 - RNA, 21 nt, Artificial Sequence
  Synthetic oligonucleotide: Ptpn6-3332
caggugacccauauucggauc

SEQ ID NO: 22603 - RNA, 22 nt, Artificial Sequence
  Synthetic oligonucleotide: Ptpn6-3333
ucaggugacccauauucggauc

SEQ ID NO: 22604 - RNA, 23 nt, Artificial Sequence
  Synthetic oligonucleotide: Ptpn6-3334
aucaggugacccauauucggauc

SEQ ID NO: 22605 - RNA, 24 nt, Artificial Sequence
  Synthetic oligonucleotide: Ptpn6-3335
gaucaggugacccauauucggauc

SEQ ID NO: 22606 - RNA, 18 nt, Artificial Sequence
  Synthetic oligonucleotide: Ptpn6-3336
uauucggauccagaacuc

SEQ ID NO: 22607 - RNA, 19 nt, Artificial Sequence
  Synthetic oligonucleotide: Ptpn6-3337
auauucggauccagaacuc

SEQ ID NO: 22608 - RNA, 20 nt, Artificial Sequence
  Synthetic oligonucleotide: Ptpn6-95
cauauucggauccagaacuc

SEQ ID NO: 22609 - RNA, 21 nt, Artificial Sequence
  Synthetic oligonucleotide: Ptpn6-3338
ccauauucggauccagaacuc

SEQ ID NO: 22610 - RNA, 22 nt, Artificial Sequence
  Synthetic oligonucleotide: Ptpn6-3339
cccauauucggauccagaacuc

SEQ ID NO: 22611 - RNA, 23 nt, Artificial Sequence
  Synthetic oligonucleotide: Ptpn6-3340
acccauauucggauccagaacuc

SEQ ID NO: 22612 - RNA, 24 nt, Artificial Sequence
  Synthetic oligonucleotide: Ptpn6-3341
gacccauauucggauccagaacuc

SEQ ID NO: 22613 - RNA, 18 nt, Artificial Sequence
  Synthetic oligonucleotide: Ptpn6-3342
gaugcagagacccugcuc

SEQ ID NO: 22614 - RNA, 19 nt, Artificial Sequence
  Synthetic oligonucleotide: Ptpn6-3343
ggaugcagagacccugcuc

SEQ ID NO: 22615 - RNA, 20 nt, Artificial Sequence
  Synthetic oligonucleotide: Ptpn6-507
uggaugcagagacccugcuc

SEQ ID NO: 22616 - RNA, 21 nt, Artificial Sequence
  Synthetic oligonucleotide: Ptpn6-3344
cuggaugcagagacccugcuc

SEQ ID NO: 22617 - RNA, 22 nt, Artificial Sequence
  Synthetic oligonucleotide: Ptpn6-3345
gcuggaugcagagacccugcuc

SEQ ID NO: 22618 - RNA, 23 nt, Artificial Sequence
  Synthetic oligonucleotide: Ptpn6-3346
ggcuggaugcagagacccugcuc

SEQ ID NO: 22619 - RNA, 24 nt, Artificial Sequence
  Synthetic oligonucleotide: Ptpn6-3347
gggcuggaugcagagacccugcuc

SEQ ID NO: 22620 - RNA, 18 nt, Artificial Sequence
  Synthetic oligonucleotide: Ptpn6-3348
cugucccguggguaaguc

SEQ ID NO: 22621 - RNA, 19 nt, Artificial Sequence
  Synthetic oligonucleotide: Ptpn6-3349
gcugucccguggguaaguc

SEQ ID NO: 22622 - RNA, 20 nt, Artificial Sequence
  Synthetic oligonucleotide: Ptpn6-1691
ugcugucccguggguaaguc

SEQ ID NO: 22623 - RNA, 21 nt, Artificial Sequence
  Synthetic oligonucleotide: Ptpn6-3350
augcugucccguggguaaguc

SEQ ID NO: 22624 - RNA, 22 nt, Artificial Sequence
  Synthetic oligonucleotide: Ptpn6-3351
gaugcugucccguggguaaguc

SEQ ID NO: 22625 - RNA, 23 nt, Artificial Sequence
  Synthetic oligonucleotide: Ptpn6-3352
agaugcugucccguggguaaguc

SEQ ID NO: 22626 - RNA, 24 nt, Artificial Sequence
  Synthetic oligonucleotide: Ptpn6-3353
gagaugcugucccguggguaaguc

SEQ ID NO: 22627 - RNA, 18 nt, Artificial Sequence
  Synthetic oligonucleotide: Ptpn6-3354
cgaucccacuagugagag

SEQ ID NO: 22628 - RNA, 19 nt, Artificial Sequence
  Synthetic oligonucleotide: Ptpn6-3355
ccgaucccacuagugagag

SEQ ID NO: 22629 - RNA, 20 nt, Artificial Sequence
  Synthetic oligonucleotide: Ptpn6-3356
uccgaucccacuagugagag

SEQ ID NO: 22630 - RNA, 21 nt, Artificial Sequence
  Synthetic oligonucleotide: Ptpn6-3357
cuccgaucccacuagugagag

SEQ ID NO: 22631 - RNA, 22 nt, Artificial Sequence
  Synthetic oligonucleotide: Ptpn6-3358
gcuccgaucccacuagugagag

SEQ ID NO: 22632 - RNA, 23 nt, Artificial Sequence
  Synthetic oligonucleotide: Ptpn6-3359
ugcuccgaucccacuagugagag

SEQ ID NO: 22633 - RNA, 24 nt, Artificial Sequence
  Synthetic oligonucleotide: Ptpn6-3360
cugcuccgaucccacuagugagag

SEQ ID NO: 22634 - RNA, 18 nt, Artificial Sequence
  Synthetic oligonucleotide: Ptpn6-3361
ucuaugaccuguauggag

SEQ ID NO: 22635 - RNA, 19 nt, Artificial Sequence
  Synthetic oligonucleotide: Ptpn6-3362
uucuaugaccuguauggag

SEQ ID NO: 22636 - RNA, 20 nt, Artificial Sequence
  Synthetic oligonucleotide: Ptpn6-99
uuucuaugaccuguauggag

SEQ ID NO: 22637 - RNA, 21 nt, Artificial Sequence
  Synthetic oligonucleotide: Ptpn6-3363
auuucuaugaccuguauggag

SEQ ID NO: 22638 - RNA, 22 nt, Artificial Sequence
  Synthetic oligonucleotide: Ptpn6-3364
gauuucuaugaccuguauggag

SEQ ID NO: 22639 - RNA, 23 nt, Artificial Sequence
  Synthetic oligonucleotide: Ptpn6-3365
ggauuucuaugaccuguauggag

SEQ ID NO: 22640 - RNA, 24 nt, Artificial Sequence
  Synthetic oligonucleotide: Ptpn6-3366
gggauuucuaugaccuguauggag

SEQ ID NO: 22641 - RNA, 18 nt, Artificial Sequence
  Synthetic oligonucleotide: Ptpn6-3367
ucgcucuccgucagguag

SEQ ID NO: 22642 - RNA, 19 nt, Artificial Sequence
  Synthetic oligonucleotide: Ptpn6-3368
cucgcucuccgucagguag

SEQ ID NO: 22643 - RNA, 20 nt, Artificial Sequence
  Synthetic oligonucleotide: Ptpn6-3369
ucucgcucuccgucagguag

SEQ ID NO: 22644 - RNA, 21 nt, Artificial Sequence
  Synthetic oligonucleotide: Ptpn6-3370
uucucgcucuccgucagguag

SEQ ID NO: 22645 - RNA, 22 nt, Artificial Sequence
  Synthetic oligonucleotide: Ptpn6-3371
cuucucgcucuccgucagguag

SEQ ID NO: 22646 - RNA, 23 nt, Artificial Sequence
  Synthetic oligonucleotide: Ptpn6-3372
acuucucgcucuccgucagguag

SEQ ID NO: 22647 - RNA, 24 nt, Artificial Sequence
  Synthetic oligonucleotide: Ptpn6-3373
gacuucucgcucuccgucagguag

SEQ ID NO: 22648 - RNA, 18 nt, Artificial Sequence
  Synthetic oligonucleotide: Ptpn6-3374
auccaccucaaguacccg

SEQ ID NO: 22649 - RNA, 19 nt, Artificial Sequence
  Synthetic oligonucleotide: Ptpn6-3375
cauccaccucaaguacccg

SEQ ID NO: 22650 - RNA, 20 nt, Artificial Sequence
  Synthetic oligonucleotide: Ptpn6-527
ucauccaccucaaguacccg

SEQ ID NO: 22651 - RNA, 21 nt, Artificial Sequence
  Synthetic oligonucleotide: Ptpn6-3376
aucauccaccucaaguacccg

SEQ ID NO: 22652 - RNA, 22 nt, Artificial Sequence
  Synthetic oligonucleotide: Ptpn6-3377
caucauccaccucaaguacccg

SEQ ID NO: 22653 - RNA, 23 nt, Artificial Sequence
  Synthetic oligonucleotide: Ptpn6-3378
ccaucauccaccucaaguacccg

SEQ ID NO: 22654 - RNA, 24 nt, Artificial Sequence
  Synthetic oligonucleotide: Ptpn6-3379
accaucauccaccucaaguacccg

SEQ ID NO: 22655 - RNA, 18 nt, Artificial Sequence
  Synthetic oligonucleotide: Ptpn6-3380
agguaaggcagccaggcg

SEQ ID NO: 22656 - RNA, 19 nt, Artificial Sequence
  Synthetic oligonucleotide: Ptpn6-3381
gagguaaggcagccaggcg

SEQ ID NO: 22657 - RNA, 20 nt, Artificial Sequence
  Synthetic oligonucleotide: Ptpn6-3382
cgagguaaggcagccaggcg

SEQ ID NO: 22658 - RNA, 21 nt, Artificial Sequence
  Synthetic oligonucleotide: Ptpn6-3383
gcgagguaaggcagccaggcg

SEQ ID NO: 22659 - RNA, 22 nt, Artificial Sequence
  Synthetic oligonucleotide: Ptpn6-3384
ugcgagguaaggcagccaggcg

SEQ ID NO: 22660 - RNA, 23 nt, Artificial Sequence
  Synthetic oligonucleotide: Ptpn6-3385
gugcgagguaaggcagccaggcg

SEQ ID NO: 22661 - RNA, 24 nt, Artificial Sequence
  Synthetic oligonucleotide: Ptpn6-3386
ugugcgagguaaggcagccaggcg

SEQ ID NO: 22662 - RNA, 18 nt, Artificial Sequence
  Synthetic oligonucleotide: Ptpn6-3387
uaaggcagccaggcggcg

SEQ ID NO: 22663 - RNA, 19 nt, Artificial Sequence
  Synthetic oligonucleotide: Ptpn6-3388
guaaggcagccaggcggcg

SEQ ID NO: 22664 - RNA, 20 nt, Artificial Sequence
  Synthetic oligonucleotide: Ptpn6-2464
gguaaggcagccaggcggcg

SEQ ID NO: 22665 - RNA, 21 nt, Artificial Sequence
  Synthetic oligonucleotide: Ptpn6-3389
agguaaggcagccaggcggcg

SEQ ID NO: 22666 - RNA, 22 nt, Artificial Sequence
  Synthetic oligonucleotide: Ptpn6-3390
gagguaaggcagccaggcggcg

SEQ ID NO: 22667 - RNA, 23 nt, Artificial Sequence
  Synthetic oligonucleotide: Ptpn6-3391
cgagguaaggcagccaggcggcg

SEQ ID NO: 22668 - RNA, 24 nt, Artificial Sequence
  Synthetic oligonucleotide: Ptpn6-3392
gcgagguaaggcagccaggcggcg

SEQ ID NO: 22669 - RNA, 18 nt, Artificial Sequence
  Synthetic oligonucleotide: Ptpn6-3393
cgcugcugcaggccaagg

SEQ ID NO: 22670 - RNA, 19 nt, Artificial Sequence
  Synthetic oligonucleotide: Ptpn6-3394
acgcugcugcaggccaagg

SEQ ID NO: 22671 - RNA, 20 nt, Artificial Sequence
  Synthetic oligonucleotide: Ptpn6-533
gacgcugcugcaggccaagg

SEQ ID NO: 22672 - RNA, 21 nt, Artificial Sequence
  Synthetic oligonucleotide: Ptpn6-3395
agacgcugcugcaggccaagg

SEQ ID NO: 22673 - RNA, 22 nt, Artificial Sequence
  Synthetic oligonucleotide: Ptpn6-3396
gagacgcugcugcaggccaagg

SEQ ID NO: 22674 - RNA, 23 nt, Artificial Sequence
  Synthetic oligonucleotide: Ptpn6-3397
agagacgcugcugcaggccaagg

SEQ ID NO: 22675 - RNA, 24 nt, Artificial Sequence
  Synthetic oligonucleotide: Ptpn6-3398
cagagacgcugcugcaggccaagg

SEQ ID NO: 22676 - RNA, 18 nt, Artificial Sequence
  Synthetic oligonucleotide: Ptpn6-3399
acaugucuggcgggcagg

SEQ ID NO: 22677 - RNA, 19 nt, Artificial Sequence
  Synthetic oligonucleotide: Ptpn6-3400
cacaugucuggcgggcagg

SEQ ID NO: 22678 - RNA, 20 nt, Artificial Sequence
  Synthetic oligonucleotide: Ptpn6-531
ccacaugucuggcgggcagg

SEQ ID NO: 22679 - RNA, 21 nt, Artificial Sequence
  Synthetic oligonucleotide: Ptpn6-3401
gccacaugucuggcgggcagg

SEQ ID NO: 22680 - RNA, 22 nt, Artificial Sequence
  Synthetic oligonucleotide: Ptpn6-3402
ggccacaugucuggcgggcagg

SEQ ID NO: 22681 - RNA, 23 nt, Artificial Sequence
  Synthetic oligonucleotide: Ptpn6-3403
uggccacaugucuggcgggcagg

SEQ ID NO: 22682 - RNA, 24 nt, Artificial Sequence
  Synthetic oligonucleotide: Ptpn6-3404
auggccacaugucuggcgggcagg

SEQ ID NO: 22683 - RNA, 18 nt, Artificial Sequence
  Synthetic oligonucleotide: Ptpn6-3405
cgccuggugcccugcagg

SEQ ID NO: 22684 - RNA, 19 nt, Artificial Sequence
  Synthetic oligonucleotide: Ptpn6-3406
ccgccuggugcccugcagg

SEQ ID NO: 22685 - RNA, 20 nt, Artificial Sequence
  Synthetic oligonucleotide: Ptpn6-3407
accgccuggugcccugcagg

SEQ ID NO: 22686 - RNA, 21 nt, Artificial Sequence
  Synthetic oligonucleotide: Ptpn6-3408
caccgccuggugcccugcagg

SEQ ID NO: 22687 - RNA, 22 nt, Artificial Sequence
  Synthetic oligonucleotide: Ptpn6-3409
ucaccgccuggugcccugcagg

SEQ ID NO: 22688 - RNA, 23 nt, Artificial Sequence
  Synthetic oligonucleotide: Ptpn6-3410
cucaccgccuggugcccugcagg

SEQ ID NO: 22689 - RNA, 24 nt, Artificial Sequence
  Synthetic oligonucleotide: Ptpn6-3411
ccucaccgccuggugcccugcagg

SEQ ID NO: 22690 - RNA, 18 nt, Artificial Sequence
  Synthetic oligonucleotide: Ptpn6-3412
gguaaggcagccaggcgg

SEQ ID NO: 22691 - RNA, 19 nt, Artificial Sequence
  Synthetic oligonucleotide: Ptpn6-3413
agguaaggcagccaggcgg

SEQ ID NO: 22692 - RNA, 20 nt, Artificial Sequence
  Synthetic oligonucleotide: Ptpn6-2469
gagguaaggcagccaggcgg

SEQ ID NO: 22693 - RNA, 21 nt, Artificial Sequence
  Synthetic oligonucleotide: Ptpn6-3414
cgagguaaggcagccaggcgg

SEQ ID NO: 22694 - RNA, 22 nt, Artificial Sequence
  Synthetic oligonucleotide: Ptpn6-3415
gcgagguaaggcagccaggcgg

SEQ ID NO: 22695 - RNA, 23 nt, Artificial Sequence
  Synthetic oligonucleotide: Ptpn6-3416
ugcgagguaaggcagccaggcgg

SEQ ID NO: 22696 - RNA, 24 nt, Artificial Sequence
  Synthetic oligonucleotide: Ptpn6-3417
gugcgagguaaggcagccaggcgg

SEQ ID NO: 22697 - RNA, 18 nt, Artificial Sequence
  Synthetic oligonucleotide: Ptpn6-3418
aaggcagccaggcggcgg

SEQ ID NO: 22698 - RNA, 19 nt, Artificial Sequence
  Synthetic oligonucleotide: Ptpn6-3419
uaaggcagccaggcggcgg

SEQ ID NO: 22699 - RNA, 20 nt, Artificial Sequence
  Synthetic oligonucleotide: Ptpn6-2470
guaaggcagccaggcggcgg

SEQ ID NO: 22700 - RNA, 21 nt, Artificial Sequence
  Synthetic oligonucleotide: Ptpn6-3420
gguaaggcagccaggcggcgg

SEQ ID NO: 22701 - RNA, 22 nt, Artificial Sequence
  Synthetic oligonucleotide: Ptpn6-3421
agguaaggcagccaggcggcgg

SEQ ID NO: 22702 - RNA, 23 nt, Artificial Sequence
  Synthetic oligonucleotide: Ptpn6-3422
gagguaaggcagccaggcggcgg

SEQ ID NO: 22703 - RNA, 24 nt, Artificial Sequence
  Synthetic oligonucleotide: Ptpn6-3423
cgagguaaggcagccaggcggcgg

SEQ ID NO: 22704 - RNA, 18 nt, Artificial Sequence
  Synthetic oligonucleotide: Ptpn6-3424
agagacccugcucaaggg

SEQ ID NO: 22705 - RNA, 19 nt, Artificial Sequence
  Synthetic oligonucleotide: Ptpn6-3425
cagagacccugcucaaggg

SEQ ID NO: 22706 - RNA, 20 nt, Artificial Sequence
  Synthetic oligonucleotide: Ptpn6-508
gcagagacccugcucaaggg

SEQ ID NO: 22707 - RNA, 21 nt, Artificial Sequence
  Synthetic oligonucleotide: Ptpn6-3426
ugcagagacccugcucaaggg

SEQ ID NO: 22708 - RNA, 22 nt, Artificial Sequence
  Synthetic oligonucleotide: Ptpn6-3427
augcagagacccugcucaaggg

SEQ ID NO: 22709 - RNA, 23 nt, Artificial Sequence
  Synthetic oligonucleotide: Ptpn6-3428
gaugcagagacccugcucaaggg

SEQ ID NO: 22710 - RNA, 24 nt, Artificial Sequence
  Synthetic oligonucleotide: Ptpn6-3429
ggaugcagagacccugcucaaggg

SEQ ID NO: 22711 - RNA, 18 nt, Artificial Sequence
  Synthetic oligonucleotide: Ptpn6-3430
gccuggugcccugcaggg

SEQ ID NO: 22712 - RNA, 19 nt, Artificial Sequence
  Synthetic oligonucleotide: Ptpn6-3431
cgccuggugcccugcaggg

SEQ ID NO: 22713 - RNA, 20 nt, Artificial Sequence
  Synthetic oligonucleotide: Ptpn6-2471
ccgccuggugcccugcaggg

SEQ ID NO: 22714 - RNA, 21 nt, Artificial Sequence
  Synthetic oligonucleotide: Ptpn6-3432
accgccuggugcccugcaggg

SEQ ID NO: 22715 - RNA, 22 nt, Artificial Sequence
  Synthetic oligonucleotide: Ptpn6-3433
caccgccuggugcccugcaggg

SEQ ID NO: 22716 - RNA, 23 nt, Artificial Sequence
  Synthetic oligonucleotide: Ptpn6-3434
ucaccgccuggugcccugcaggg

SEQ ID NO: 22717 - RNA, 24 nt, Artificial Sequence
  Synthetic oligonucleotide: Ptpn6-3435
cucaccgccuggugcccugcaggg

SEQ ID NO: 22718 - RNA, 18 nt, Artificial Sequence
  Synthetic oligonucleotide: Ptpn6-3436
uaugaccuguauggaggg

SEQ ID NO: 22719 - RNA, 19 nt, Artificial Sequence
  Synthetic oligonucleotide: Ptpn6-3437
cuaugaccuguauggaggg

SEQ ID NO: 22720 - RNA, 20 nt, Artificial Sequence
  Synthetic oligonucleotide: Ptpn6-521
ucuaugaccuguauggaggg

SEQ ID NO: 22721 - RNA, 21 nt, Artificial Sequence
  Synthetic oligonucleotide: Ptpn6-3438
uucuaugaccuguauggaggg

SEQ ID NO: 22722 - RNA, 22 nt, Artificial Sequence
  Synthetic oligonucleotide: Ptpn6-3439
uuucuaugaccuguauggaggg

SEQ ID NO: 22723 - RNA, 23 nt, Artificial Sequence
  Synthetic oligonucleotide: Ptpn6-3440
auuucuaugaccuguauggaggg

SEQ ID NO: 22724 - RNA, 24 nt, Artificial Sequence
  Synthetic oligonucleotide: Ptpn6-3441
gauuucuaugaccuguauggaggg

SEQ ID NO: 22725 - RNA, 18 nt, Artificial Sequence
  Synthetic oligonucleotide: Ptpn6-3442
uuucuaugaccuguaugg

SEQ ID NO: 22726 - RNA, 19 nt, Artificial Sequence
  Synthetic oligonucleotide: Ptpn6-3443
auuucuaugaccuguaugg

SEQ ID NO: 22727 - RNA, 20 nt, Artificial Sequence
  Synthetic oligonucleotide: Ptpn6-63
gauuucuaugaccuguaugg

SEQ ID NO: 22728 - RNA, 21 nt, Artificial Sequence
  Synthetic oligonucleotide: Ptpn6-3444
ggauuucuaugaccuguaugg

SEQ ID NO: 22729 - RNA, 22 nt, Artificial Sequence
  Synthetic oligonucleotide: Ptpn6-3445
gggauuucuaugaccuguaugg

SEQ ID NO: 22730 - RNA, 23 nt, Artificial Sequence
  Synthetic oligonucleotide: Ptpn6-3446
ggggauuucuaugaccuguaugg

SEQ ID NO: 22731 - RNA, 24 nt, Artificial Sequence
  Synthetic oligonucleotide: Ptpn6-3447
aggggauuucuaugaccuguaugg

SEQ ID NO: 22732 - RNA, 18 nt, Artificial Sequence
  Synthetic oligonucleotide: Ptpn6-3448
accucagugggcuggaug

SEQ ID NO: 22733 - RNA, 19 nt, Artificial Sequence
  Synthetic oligonucleotide: Ptpn6-3449
gaccucagugggcuggaug

SEQ ID NO: 22734 - RNA, 20 nt, Artificial Sequence
  Synthetic oligonucleotide: Ptpn6-506
agaccucagugggcuggaug

SEQ ID NO: 22735 - RNA, 21 nt, Artificial Sequence
  Synthetic oligonucleotide: Ptpn6-3450
gagaccucagugggcuggaug

SEQ ID NO: 22736 - RNA, 22 nt, Artificial Sequence
  Synthetic oligonucleotide: Ptpn6-3451
cgagaccucagugggcuggaug

SEQ ID NO: 22737 - RNA, 23 nt, Artificial Sequence
  Synthetic oligonucleotide: Ptpn6-3452
ccgagaccucagugggcuggaug

SEQ ID NO: 22738 - RNA, 24 nt, Artificial Sequence
  Synthetic oligonucleotide: Ptpn6-3453
accgagaccucagugggcuggaug

SEQ ID NO: 22739 - RNA, 18 nt, Artificial Sequence
  Synthetic oligonucleotide: Ptpn6-3454
auuucuaugaccuguaug

SEQ ID NO: 22740 - RNA, 19 nt, Artificial Sequence
  Synthetic oligonucleotide: Ptpn6-3455
gauuucuaugaccuguaug

SEQ ID NO: 22741 - RNA, 20 nt, Artificial Sequence
  Synthetic oligonucleotide: Ptpn6-517
ggauuucuaugaccuguaug

SEQ ID NO: 22742 - RNA, 21 nt, Artificial Sequence
  Synthetic oligonucleotide: Ptpn6-3456
gggauuucuaugaccuguaug

SEQ ID NO: 22743 - RNA, 22 nt, Artificial Sequence
  Synthetic oligonucleotide: Ptpn6-3457
ggggauuucuaugaccuguaug

SEQ ID NO: 22744 - RNA, 23 nt, Artificial Sequence
  Synthetic oligonucleotide: Ptpn6-3458
aggggauuucuaugaccuguaug

SEQ ID NO: 22745 - RNA, 24 nt, Artificial Sequence
  Synthetic oligonucleotide: Ptpn6-3459
caggggauuucuaugaccuguaug

SEQ ID NO: 22746 - RNA, 18 nt, Artificial Sequence
  Synthetic oligonucleotide: Ptpn6-3460
cagcagcaggguguccug

SEQ ID NO: 22747 - RNA, 19 nt, Artificial Sequence
  Synthetic oligonucleotide: Ptpn6-3461
ucagcagcaggguguccug

SEQ ID NO: 22748 - RNA, 20 nt, Artificial Sequence
  Synthetic oligonucleotide: Ptpn6-526
cucagcagcaggguguccug

SEQ ID NO: 22749 - RNA, 21 nt, Artificial Sequence
  Synthetic oligonucleotide: Ptpn6-3462
acucagcagcaggguguccug

SEQ ID NO: 22750 - RNA, 22 nt, Artificial Sequence
  Synthetic oligonucleotide: Ptpn6-3463
cacucagcagcaggguguccug

SEQ ID NO: 22751 - RNA, 23 nt, Artificial Sequence
  Synthetic oligonucleotide: Ptpn6-3464
acacucagcagcaggguguccug

SEQ ID NO: 22752 - RNA, 24 nt, Artificial Sequence
  Synthetic oligonucleotide: Ptpn6-3465
uacacucagcagcaggguguccug

SEQ ID NO: 22753 - RNA, 18 nt, Artificial Sequence
  Synthetic oligonucleotide: Ptpn6-3466
gcgacucugacagagcug

SEQ ID NO: 22754 - RNA, 19 nt, Artificial Sequence
  Synthetic oligonucleotide: Ptpn6-3467
ugcgacucugacagagcug

SEQ ID NO: 22755 - RNA, 20 nt, Artificial Sequence
  Synthetic oligonucleotide: Ptpn6-523
uugcgacucugacagagcug

SEQ ID NO: 22756 - RNA, 21 nt, Artificial Sequence
  Synthetic oligonucleotide: Ptpn6-3468
uuugcgacucugacagagcug

SEQ ID NO: 22757 - RNA, 22 nt, Artificial Sequence
  Synthetic oligonucleotide: Ptpn6-3469
guuugcgacucugacagagcug

SEQ ID NO: 22758 - RNA, 23 nt, Artificial Sequence
  Synthetic oligonucleotide: Ptpn6-3470
aguuugcgacucugacagagcug

SEQ ID NO: 22759 - RNA, 24 nt, Artificial Sequence
  Synthetic oligonucleotide: Ptpn6-3471
aaguuugcgacucugacagagcug

SEQ ID NO: 22760 - RNA, 18 nt, Artificial Sequence
  Synthetic oligonucleotide: Ptpn6-3472
accauggccacaugucug

SEQ ID NO: 22761 - RNA, 19 nt, Artificial Sequence
  Synthetic oligonucleotide: Ptpn6-3473
uaccauggccacaugucug

SEQ ID NO: 22762 - RNA, 20 nt, Artificial Sequence
  Synthetic oligonucleotide: Ptpn6-530
guaccauggccacaugucug

SEQ ID NO: 22763 - RNA, 21 nt, Artificial Sequence
  Synthetic oligonucleotide: Ptpn6-3474
gguaccauggccacaugucug

SEQ ID NO: 22764 - RNA, 22 nt, Artificial Sequence
  Synthetic oligonucleotide: Ptpn6-3475
ugguaccauggccacaugucug

SEQ ID NO: 22765 - RNA, 23 nt, Artificial Sequence
  Synthetic oligonucleotide: Ptpn6-3476
gugguaccauggccacaugucug

SEQ ID NO: 22766 - RNA, 24 nt, Artificial Sequence
  Synthetic oligonucleotide: Ptpn6-3477
agugguaccauggccacaugucug

SEQ ID NO: 22767 - RNA, 18 nt, Artificial Sequence
  Synthetic oligonucleotide: Ptpn6-3478
auauucggauccagaacu

SEQ ID NO: 22768 - RNA, 19 nt, Artificial Sequence
  Synthetic oligonucleotide: Ptpn6-3479
cauauucggauccagaacu

SEQ ID NO: 22769 - RNA, 20 nt, Artificial Sequence
  Synthetic oligonucleotide: Ptpn6-512
ccauauucggauccagaacu

SEQ ID NO: 22770 - RNA, 21 nt, Artificial Sequence
  Synthetic oligonucleotide: Ptpn6-3480
cccauauucggauccagaacu

SEQ ID NO: 22771 - RNA, 22 nt, Artificial Sequence
  Synthetic oligonucleotide: Ptpn6-3481
acccauauucggauccagaacu

SEQ ID NO: 22772 - RNA, 23 nt, Artificial Sequence
  Synthetic oligonucleotide: Ptpn6-3482
gacccauauucggauccagaacu

SEQ ID NO: 22773 - RNA, 24 nt, Artificial Sequence
  Synthetic oligonucleotide: Ptpn6-3483
ugacccauauucggauccagaacu

SEQ ID NO: 22774 - RNA, 18 nt, Artificial Sequence
  Synthetic oligonucleotide: Ptpn6-3484
ugcuccgaucccacuagu

SEQ ID NO: 22775 - RNA, 19 nt, Artificial Sequence
  Synthetic oligonucleotide: Ptpn6-3485
cugcuccgaucccacuagu

SEQ ID NO: 22776 - RNA, 20 nt, Artificial Sequence
  Synthetic oligonucleotide: Ptpn6-529
acugcuccgaucccacuagu

SEQ ID NO: 22777 - RNA, 21 nt, Artificial Sequence
  Synthetic oligonucleotide: Ptpn6-3486
aacugcuccgaucccacuagu

SEQ ID NO: 22778 - RNA, 22 nt, Artificial Sequence
  Synthetic oligonucleotide: Ptpn6-3487
gaacugcuccgaucccacuagu

SEQ ID NO: 22779 - RNA, 23 nt, Artificial Sequence
  Synthetic oligonucleotide: Ptpn6-3488
ugaacugcuccgaucccacuagu

SEQ ID NO: 22780 - RNA, 24 nt, Artificial Sequence
  Synthetic oligonucleotide: Ptpn6-3489
cugaacugcuccgaucccacuagu

SEQ ID NO: 22781 - RNA, 18 nt, Artificial Sequence
  Synthetic oligonucleotide: Ptpn6-3490
uggacguuucuugugcgu

SEQ ID NO: 22782 - RNA, 19 nt, Artificial Sequence
  Synthetic oligonucleotide: Ptpn6-3491
cuggacguuucuugugcgu

SEQ ID NO: 22783 - RNA, 20 nt, Artificial Sequence
  Synthetic oligonucleotide: Ptpn6-536
ccuggacguuucuugugcgu

SEQ ID NO: 22784 - RNA, 21 nt, Artificial Sequence
  Synthetic oligonucleotide: Ptpn6-3492
cccuggacguuucuugugcgu

SEQ ID NO: 22785 - RNA, 22 nt, Artificial Sequence
  Synthetic oligonucleotide: Ptpn6-3493
gcccuggacguuucuugugcgu

SEQ ID NO: 22786 - RNA, 23 nt, Artificial Sequence
  Synthetic oligonucleotide: Ptpn6-3494
agcccuggacguuucuugugcgu

SEQ ID NO: 22787 - RNA, 24 nt, Artificial Sequence
  Synthetic oligonucleotide: Ptpn6-3495
gagcccuggacguuucuugugcgu

SEQ ID NO: 22788 - RNA, 18 nt, Artificial Sequence
  Synthetic oligonucleotide: Ptpn6-3496
aucccacuagugagaggu

SEQ ID NO: 22789 - RNA, 19 nt, Artificial Sequence
  Synthetic oligonucleotide: Ptpn6-3497
gaucccacuagugagaggu

SEQ ID NO: 22790 - RNA, 20 nt, Artificial Sequence
  Synthetic oligonucleotide: Ptpn6-3498
cgaucccacuagugagaggu

SEQ ID NO: 22791 - RNA, 21 nt, Artificial Sequence
  Synthetic oligonucleotide: Ptpn6-3499
ccgaucccacuagugagaggu

SEQ ID NO: 22792 - RNA, 22 nt, Artificial Sequence
  Synthetic oligonucleotide: Ptpn6-3500
uccgaucccacuagugagaggu

SEQ ID NO: 22793 - RNA, 23 nt, Artificial Sequence
  Synthetic oligonucleotide: Ptpn6-3501
cuccgaucccacuagugagaggu

SEQ ID NO: 22794 - RNA, 24 nt, Artificial Sequence
  Synthetic oligonucleotide: Ptpn6-3502
gcuccgaucccacuagugagaggu

SEQ ID NO: 22795 - RNA, 18 nt, Artificial Sequence
  Synthetic oligonucleotide: Ptpn6-3503
ccuggugcccugcagggu

SEQ ID NO: 22796 - RNA, 19 nt, Artificial Sequence
  Synthetic oligonucleotide: Ptpn6-3504
gccuggugcccugcagggu

SEQ ID NO: 22797 - RNA, 20 nt, Artificial Sequence
  Synthetic oligonucleotide: Ptpn6-2480
cgccuggugcccugcagggu

SEQ ID NO: 22798 - RNA, 21 nt, Artificial Sequence
  Synthetic oligonucleotide: Ptpn6-3505
ccgccuggugcccugcagggu

SEQ ID NO: 22799 - RNA, 22 nt, Artificial Sequence
  Synthetic oligonucleotide: Ptpn6-3506
accgccuggugcccugcagggu

SEQ ID NO: 22800 - RNA, 23 nt, Artificial Sequence
  Synthetic oligonucleotide: Ptpn6-3507
caccgccuggugcccugcagggu

SEQ ID NO: 22801 - RNA, 24 nt, Artificial Sequence
  Synthetic oligonucleotide: Ptpn6-3508
ucaccgccuggugcccugcagggu

SEQ ID NO: 22802 - RNA, 18 nt, Artificial Sequence
  Synthetic oligonucleotide: Ptpn6-3509
cccacaucaaggucaugu

SEQ ID NO: 22803 - RNA, 19 nt, Artificial Sequence
  Synthetic oligonucleotide: Ptpn6-3510
acccacaucaaggucaugu

SEQ ID NO: 22804 - RNA, 20 nt, Artificial Sequence
  Synthetic oligonucleotide: Ptpn6-3511
cacccacaucaaggucaugu

SEQ ID NO: 22805 - RNA, 21 nt, Artificial Sequence
  Synthetic oligonucleotide: Ptpn6-3512
ucacccacaucaaggucaugu

SEQ ID NO: 22806 - RNA, 22 nt, Artificial Sequence
  Synthetic oligonucleotide: Ptpn6-3513
gucacccacaucaaggucaugu

SEQ ID NO: 22807 - RNA, 23 nt, Artificial Sequence
  Synthetic oligonucleotide: Ptpn6-3514
ggucacccacaucaaggucaugu

SEQ ID NO: 22808 - RNA, 24 nt, Artificial Sequence
  Synthetic oligonucleotide: Ptpn6-3515
gggucacccacaucaaggucaugu

SEQ ID NO: 22809 - RNA, 18 nt, Artificial Sequence
  Synthetic oligonucleotide: Ptpn6-3516
gggauuucuaugaccugu

SEQ ID NO: 22810 - RNA, 19 nt, Artificial Sequence
  Synthetic oligonucleotide: Ptpn6-3517
ggggauuucuaugaccugu

SEQ ID NO: 22811 - RNA, 20 nt, Artificial Sequence
  Synthetic oligonucleotide: Ptpn6-515
aggggauuucuaugaccugu

SEQ ID NO: 22812 - RNA, 21 nt, Artificial Sequence
  Synthetic oligonucleotide: Ptpn6-3518
caggggauuucuaugaccugu

SEQ ID NO: 22813 - RNA, 22 nt, Artificial Sequence
  Synthetic oligonucleotide: Ptpn6-3519
ucaggggauuucuaugaccugu

SEQ ID NO: 22814 - RNA, 23 nt, Artificial Sequence
  Synthetic oligonucleotide: Ptpn6-3520
cucaggggauuucuaugaccugu

SEQ ID NO: 22815 - RNA, 24 nt, Artificial Sequence
  Synthetic oligonucleotide: Ptpn6-3521
acucaggggauuucuaugaccugu

SEQ ID NO: 22816 - RNA, 18 nt, Artificial Sequence
  Synthetic oligonucleotide: Ptpn6-3522
gcuccccgcaguugguca

SEQ ID NO: 22817 - RNA, 19 nt, Artificial Sequence
  Synthetic oligonucleotide: Ptpn6-3523
ugcuccccgcaguugguca

SEQ ID NO: 22818 - RNA, 20 nt, Artificial Sequence
  Synthetic oligonucleotide: Ptpn6-884
augcuccccgcaguugguca

SEQ ID NO: 22819 - RNA, 21 nt, Artificial Sequence
  Synthetic oligonucleotide: Ptpn6-3524
caugcuccccgcaguugguca

SEQ ID NO: 22820 - RNA, 22 nt, Artificial Sequence
  Synthetic oligonucleotide: Ptpn6-3525
ucaugcuccccgcaguugguca

SEQ ID NO: 22821 - RNA, 23 nt, Artificial Sequence
  Synthetic oligonucleotide: Ptpn6-3526
gucaugcuccccgcaguugguca

SEQ ID NO: 22822 - RNA, 24 nt, Artificial Sequence
  Synthetic oligonucleotide: Ptpn6-3527
ugucaugcuccccgcaguugguca

SEQ ID NO: 22823 - RNA, 18 nt, Artificial Sequence
  Synthetic oligonucleotide: Ptpn6-3528
ggggagaccuguaaggua

SEQ ID NO: 22824 - RNA, 19 nt, Artificial Sequence
  Synthetic oligonucleotide: Ptpn6-3529
cggggagaccuguaaggua

SEQ ID NO: 22825 - RNA, 20 nt, Artificial Sequence
  Synthetic oligonucleotide: Ptpn6-377
gcggggagaccuguaaggua

SEQ ID NO: 22826 - RNA, 21 nt, Artificial Sequence
  Synthetic oligonucleotide: Ptpn6-3530
agcggggagaccuguaaggua

SEQ ID NO: 22827 - RNA, 22 nt, Artificial Sequence
  Synthetic oligonucleotide: Ptpn6-3531
cagcggggagaccuguaaggua

SEQ ID NO: 22828 - RNA, 23 nt, Artificial Sequence
  Synthetic oligonucleotide: Ptpn6-3532
ccagcggggagaccuguaaggua

SEQ ID NO: 22829 - RNA, 24 nt, Artificial Sequence
  Synthetic oligonucleotide: Ptpn6-3533
uccagcggggagaccuguaaggua

SEQ ID NO: 22830 - RNA, 18 nt, Artificial Sequence
  Synthetic oligonucleotide: Ptpn6-3534
auugauguagucggaccc

SEQ ID NO: 22831 - RNA, 19 nt, Artificial Sequence
  Synthetic oligonucleotide: Ptpn6-3535
cauugauguagucggaccc

SEQ ID NO: 22832 - RNA, 20 nt, Artificial Sequence
  Synthetic oligonucleotide: Ptpn6-398
gcauugauguagucggaccc

SEQ ID NO: 22833 - RNA, 21 nt, Artificial Sequence
  Synthetic oligonucleotide: Ptpn6-3536
ggcauugauguagucggaccc

SEQ ID NO: 22834 - RNA, 22 nt, Artificial Sequence
  Synthetic oligonucleotide: Ptpn6-3537
uggcauugauguagucggaccc

SEQ ID NO: 22835 - RNA, 23 nt, Artificial Sequence
  Synthetic oligonucleotide: Ptpn6-3538
uuggcauugauguagucggaccc

SEQ ID NO: 22836 - RNA, 24 nt, Artificial Sequence
  Synthetic oligonucleotide: Ptpn6-3539
guuggcauugauguagucggaccc

SEQ ID NO: 22837 - RNA, 18 nt, Artificial Sequence
  Synthetic oligonucleotide: Ptpn6-3540
ccggccuuucuccaccuc

SEQ ID NO: 22838 - RNA, 19 nt, Artificial Sequence
  Synthetic oligonucleotide: Ptpn6-3541
cccggccuuucuccaccuc

SEQ ID NO: 22839 - RNA, 20 nt, Artificial Sequence
  Synthetic oligonucleotide: Ptpn6-3542
acccggccuuucuccaccuc

SEQ ID NO: 22840 - RNA, 21 nt, Artificial Sequence
  Synthetic oligonucleotide: Ptpn6-3543
uacccggccuuucuccaccuc

SEQ ID NO: 22841 - RNA, 22 nt, Artificial Sequence
  Synthetic oligonucleotide: Ptpn6-3544
cuacccggccuuucuccaccuc

SEQ ID NO: 22842 - RNA, 23 nt, Artificial Sequence
  Synthetic oligonucleotide: Ptpn6-3545
ccuacccggccuuucuccaccuc

SEQ ID NO: 22843 - RNA, 24 nt, Artificial Sequence
  Synthetic oligonucleotide: Ptpn6-3546
cccuacccggccuuucuccaccuc

SEQ ID NO: 22844 - RNA, 18 nt, Artificial Sequence
  Synthetic oligonucleotide: Ptpn6-3547
cugguaaugccagaucuc

SEQ ID NO: 22845 - RNA, 19 nt, Artificial Sequence
  Synthetic oligonucleotide: Ptpn6-3548
acugguaaugccagaucuc

SEQ ID NO: 22846 - RNA, 20 nt, Artificial Sequence
  Synthetic oligonucleotide: Ptpn6-881
uacugguaaugccagaucuc

SEQ ID NO: 22847 - RNA, 21 nt, Artificial Sequence
  Synthetic oligonucleotide: Ptpn6-3549
guacugguaaugccagaucuc

SEQ ID NO: 22848 - RNA, 22 nt, Artificial Sequence
  Synthetic oligonucleotide: Ptpn6-3550
gguacugguaaugccagaucuc

SEQ ID NO: 22849 - RNA, 23 nt, Artificial Sequence
  Synthetic oligonucleotide: Ptpn6-3551
agguacugguaaugccagaucuc

SEQ ID NO: 22850 - RNA, 24 nt, Artificial Sequence
  Synthetic oligonucleotide: Ptpn6-3552
cagguacugguaaugccagaucuc

SEQ ID NO: 22851 - RNA, 18 nt, Artificial Sequence
  Synthetic oligonucleotide: Ptpn6-3553
gccugggugcucacaggg

SEQ ID NO: 22852 - RNA, 19 nt, Artificial Sequence
  Synthetic oligonucleotide: Ptpn6-3554
agccugggugcucacaggg

SEQ ID NO: 22853 - RNA, 20 nt, Artificial Sequence
  Synthetic oligonucleotide: Ptpn6-3555
cagccugggugcucacaggg

SEQ ID NO: 22854 - RNA, 21 nt, Artificial Sequence
  Synthetic oligonucleotide: Ptpn6-3556
gcagccugggugcucacaggg

SEQ ID NO: 22855 - RNA, 22 nt, Artificial Sequence
  Synthetic oligonucleotide: Ptpn6-3557
ggcagccugggugcucacaggg

SEQ ID NO: 22856 - RNA, 23 nt, Artificial Sequence
  Synthetic oligonucleotide: Ptpn6-3558
gggcagccugggugcucacaggg

SEQ ID NO: 22857 - RNA, 24 nt, Artificial Sequence
  Synthetic oligonucleotide: Ptpn6-3559
ggggcagccugggugcucacaggg

SEQ ID NO: 22858 - RNA, 18 nt, Artificial Sequence
  Synthetic oligonucleotide: Ptpn6-3560
guuacugucccgucccug

SEQ ID NO: 22859 - RNA, 19 nt, Artificial Sequence
  Synthetic oligonucleotide: Ptpn6-3561
uguuacugucccgucccug

SEQ ID NO: 22860 - RNA, 20 nt, Artificial Sequence
  Synthetic oligonucleotide: Ptpn6-896
auguuacugucccgucccug

SEQ ID NO: 22861 - RNA, 21 nt, Artificial Sequence
  Synthetic oligonucleotide: Ptpn6-3562
gauguuacugucccgucccug

SEQ ID NO: 22862 - RNA, 22 nt, Artificial Sequence
  Synthetic oligonucleotide: Ptpn6-3563
ggauguuacugucccgucccug

SEQ ID NO: 22863 - RNA, 23 nt, Artificial Sequence
  Synthetic oligonucleotide: Ptpn6-3564
gggauguuacugucccgucccug

SEQ ID NO: 22864 - RNA, 24 nt, Artificial Sequence
  Synthetic oligonucleotide: Ptpn6-3565
ggggauguuacugucccgucccug

SEQ ID NO: 22865 - RNA, 18 nt, Artificial Sequence
  Synthetic oligonucleotide: Ptpn6-3566
gggcauucuucauggcug

SEQ ID NO: 22866 - RNA, 19 nt, Artificial Sequence
  Synthetic oligonucleotide: Ptpn6-3567
ugggcauucuucauggcug

SEQ ID NO: 22867 - RNA, 20 nt, Artificial Sequence
  Synthetic oligonucleotide: Ptpn6-346
augggcauucuucauggcug

SEQ ID NO: 22868 - RNA, 21 nt, Artificial Sequence
  Synthetic oligonucleotide: Ptpn6-3568
caugggcauucuucauggcug

SEQ ID NO: 22869 - RNA, 22 nt, Artificial Sequence
  Synthetic oligonucleotide: Ptpn6-3569
gcaugggcauucuucauggcug

SEQ ID NO: 22870 - RNA, 23 nt, Artificial Sequence
  Synthetic oligonucleotide: Ptpn6-3570
ggcaugggcauucuucauggcug

SEQ ID NO: 22871 - RNA, 24 nt, Artificial Sequence
  Synthetic oligonucleotide: Ptpn6-3571
uggcaugggcauucuucauggcug

SEQ ID NO: 22872 - RNA, 18 nt, Artificial Sequence
  Synthetic oligonucleotide: Ptpn6-3572
gcgcugcgcccgcaccau

SEQ ID NO: 22873 - RNA, 19 nt, Artificial Sequence
  Synthetic oligonucleotide: Ptpn6-3573
agcgcugcgcccgcaccau

SEQ ID NO: 22874 - RNA, 20 nt, Artificial Sequence
  Synthetic oligonucleotide: Ptpn6-869
gagcgcugcgcccgcaccau

SEQ ID NO: 22875 - RNA, 21 nt, Artificial Sequence
  Synthetic oligonucleotide: Ptpn6-3574
cgagcgcugcgcccgcaccau

SEQ ID NO: 22876 - RNA, 22 nt, Artificial Sequence
  Synthetic oligonucleotide: Ptpn6-3575
ccgagcgcugcgcccgcaccau

SEQ ID NO: 22877 - RNA, 23 nt, Artificial Sequence
  Synthetic oligonucleotide: Ptpn6-3576
cccgagcgcugcgcccgcaccau

SEQ ID NO: 22878 - RNA, 24 nt, Artificial Sequence
  Synthetic oligonucleotide: Ptpn6-3577
gcccgagcgcugcgcccgcaccau

SEQ ID NO: 22879 - RNA, 18 nt, Artificial Sequence
  Synthetic oligonucleotide: Ptpn6-3578
uucugcaaacucugagau

SEQ ID NO: 22880 - RNA, 19 nt, Artificial Sequence
  Synthetic oligonucleotide: Ptpn6-3579
cuucugcaaacucugagau

SEQ ID NO: 22881 - RNA, 20 nt, Artificial Sequence
  Synthetic oligonucleotide: Ptpn6-3580
gcuucugcaaacucugagau

SEQ ID NO: 22882 - RNA, 21 nt, Artificial Sequence
  Synthetic oligonucleotide: Ptpn6-3581
ugcuucugcaaacucugagau

SEQ ID NO: 22883 - RNA, 22 nt, Artificial Sequence
  Synthetic oligonucleotide: Ptpn6-3582
cugcuucugcaaacucugagau

SEQ ID NO: 22884 - RNA, 23 nt, Artificial Sequence
  Synthetic oligonucleotide: Ptpn6-3583
ccugcuucugcaaacucugagau

SEQ ID NO: 22885 - RNA, 24 nt, Artificial Sequence
  Synthetic oligonucleotide: Ptpn6-3584
uccugcuucugcaaacucugagau

SEQ ID NO: 22886 - RNA, 18 nt, Artificial Sequence
  Synthetic oligonucleotide: Ptpn6-3585
caccaucuggauggucuu

SEQ ID NO: 22887 - RNA, 19 nt, Artificial Sequence
  Synthetic oligonucleotide: Ptpn6-3586
gcaccaucuggauggucuu

SEQ ID NO: 22888 - RNA, 20 nt, Artificial Sequence
  Synthetic oligonucleotide: Ptpn6-870
cgcaccaucuggauggucuu

SEQ ID NO: 22889 - RNA, 21 nt, Artificial Sequence
  Synthetic oligonucleotide: Ptpn6-3587
ccgcaccaucuggauggucuu

SEQ ID NO: 22890 - RNA, 22 nt, Artificial Sequence
  Synthetic oligonucleotide: Ptpn6-3588
cccgcaccaucuggauggucuu

SEQ ID NO: 22891 - RNA, 23 nt, Artificial Sequence
  Synthetic oligonucleotide: Ptpn6-3589
gcccgcaccaucuggauggucuu

SEQ ID NO: 22892 - RNA, 24 nt, Artificial Sequence
  Synthetic oligonucleotide: Ptpn6-3590
cgcccgcaccaucuggauggucuu

SEQ ID NO: 22893 - RNA, 18 nt, Artificial Sequence
  Synthetic oligonucleotide: Ptpn6-3591
agggccuagcagcugguu

SEQ ID NO: 22894 - RNA, 19 nt, Artificial Sequence
  Synthetic oligonucleotide: Ptpn6-3592
cagggccuagcagcugguu

SEQ ID NO: 22895 - RNA, 20 nt, Artificial Sequence
  Synthetic oligonucleotide: Ptpn6-2775
ucagggccuagcagcugguu

SEQ ID NO: 22896 - RNA, 21 nt, Artificial Sequence
  Synthetic oligonucleotide: Ptpn6-3593
aucagggccuagcagcugguu

SEQ ID NO: 22897 - RNA, 22 nt, Artificial Sequence
  Synthetic oligonucleotide: Ptpn6-3594
caucagggccuagcagcugguu

SEQ ID NO: 22898 - RNA, 23 nt, Artificial Sequence
  Synthetic oligonucleotide: Ptpn6-3595
ucaucagggccuagcagcugguu

SEQ ID NO: 22899 - RNA, 24 nt, Artificial Sequence
  Synthetic oligonucleotide: Ptpn6-3596
cucaucagggccuagcagcugguu

SEQ ID NO: 22900 - RNA, 18 nt, Artificial Sequence
  Synthetic oligonucleotide: Ptpn6-3597
gcggggagcaugacacaa

SEQ ID NO: 22901 - RNA, 19 nt, Artificial Sequence
  Synthetic oligonucleotide: Ptpn6-3598
ugcggggagcaugacacaa

SEQ ID NO: 22902 - RNA, 20 nt, Artificial Sequence
  Synthetic oligonucleotide: Ptpn6-693
cugcggggagcaugacacaa

SEQ ID NO: 22903 - RNA, 21 nt, Artificial Sequence
  Synthetic oligonucleotide: Ptpn6-3599
acugcggggagcaugacacaa

SEQ ID NO: 22904 - RNA, 22 nt, Artificial Sequence
  Synthetic oligonucleotide: Ptpn6-3600
aacugcggggagcaugacacaa

SEQ ID NO: 22905 - RNA, 23 nt, Artificial Sequence
  Synthetic oligonucleotide: Ptpn6-3601
caacugcggggagcaugacacaa

SEQ ID NO: 22906 - RNA, 24 nt, Artificial Sequence
  Synthetic oligonucleotide: Ptpn6-3602
ccaacugcggggagcaugacacaa

SEQ ID NO: 22907 - RNA, 18 nt, Artificial Sequence
  Synthetic oligonucleotide: Ptpn6-3603
cucccgcaccucguccaa

SEQ ID NO: 22908 - RNA, 19 nt, Artificial Sequence
  Synthetic oligonucleotide: Ptpn6-3604
ccucccgcaccucguccaa

SEQ ID NO: 22909 - RNA, 20 nt, Artificial Sequence
  Synthetic oligonucleotide: Ptpn6-3605
gccucccgcaccucguccaa

SEQ ID NO: 22910 - RNA, 21 nt, Artificial Sequence
  Synthetic oligonucleotide: Ptpn6-3606
ggccucccgcaccucguccaa

SEQ ID NO: 22911 - RNA, 22 nt, Artificial Sequence
  Synthetic oligonucleotide: Ptpn6-3607
aggccucccgcaccucguccaa

SEQ ID NO: 22912 - RNA, 23 nt, Artificial Sequence
  Synthetic oligonucleotide: Ptpn6-3608
aaggccucccgcaccucguccaa

SEQ ID NO: 22913 - RNA, 24 nt, Artificial Sequence
  Synthetic oligonucleotide: Ptpn6-3609
caaggccucccgcaccucguccaa

SEQ ID NO: 22914 - RNA, 18 nt, Artificial Sequence
  Synthetic oligonucleotide: Ptpn6-3610
ugcggcugacauugagaa

SEQ ID NO: 22915 - RNA, 19 nt, Artificial Sequence
  Synthetic oligonucleotide: Ptpn6-3611
augcggcugacauugagaa

SEQ ID NO: 22916 - RNA, 20 nt, Artificial Sequence
  Synthetic oligonucleotide: Ptpn6-645
aaugcggcugacauugagaa

SEQ ID NO: 22917 - RNA, 21 nt, Artificial Sequence
  Synthetic oligonucleotide: Ptpn6-3612
gaaugcggcugacauugagaa

SEQ ID NO: 22918 - RNA, 22 nt, Artificial Sequence
  Synthetic oligonucleotide: Ptpn6-3613
ugaaugcggcugacauugagaa

SEQ ID NO: 22919 - RNA, 23 nt, Artificial Sequence
  Synthetic oligonucleotide: Ptpn6-3614
gugaaugcggcugacauugagaa

SEQ ID NO: 22920 - RNA, 24 nt, Artificial Sequence
  Synthetic oligonucleotide: Ptpn6-3615
ggugaaugcggcugacauugagaa

SEQ ID NO: 22921 - RNA, 18 nt, Artificial Sequence
  Synthetic oligonucleotide: Ptpn6-3616
caggguggacgcuacaca

SEQ ID NO: 22922 - RNA, 19 nt, Artificial Sequence
  Synthetic oligonucleotide: Ptpn6-3617
ccaggguggacgcuacaca

SEQ ID NO: 22923 - RNA, 20 nt, Artificial Sequence
  Synthetic oligonucleotide: Ptpn6-3618
cccaggguggacgcuacaca

SEQ ID NO: 22924 - RNA, 21 nt, Artificial Sequence
  Synthetic oligonucleotide: Ptpn6-3619
ccccaggguggacgcuacaca

SEQ ID NO: 22925 - RNA, 22 nt, Artificial Sequence
  Synthetic oligonucleotide: Ptpn6-3620
cccccaggguggacgcuacaca

SEQ ID NO: 22926 - RNA, 23 nt, Artificial Sequence
  Synthetic oligonucleotide: Ptpn6-3621
ccccccaggguggacgcuacaca

SEQ ID NO: 22927 - RNA, 24 nt, Artificial Sequence
  Synthetic oligonucleotide: Ptpn6-3622
uccccccaggguggacgcuacaca

SEQ ID NO: 22928 - RNA, 18 nt, Artificial Sequence
  Synthetic oligonucleotide: Ptpn6-3623
ccugagcuggcccgacca

SEQ ID NO: 22929 - RNA, 19 nt, Artificial Sequence
  Synthetic oligonucleotide: Ptpn6-3624
accugagcuggcccgacca

SEQ ID NO: 22930 - RNA, 20 nt, Artificial Sequence
  Synthetic oligonucleotide: Ptpn6-205
uaccugagcuggcccgacca

SEQ ID NO: 22931 - RNA, 21 nt, Artificial Sequence
  Synthetic oligonucleotide: Ptpn6-3625
guaccugagcuggcccgacca

SEQ ID NO: 22932 - RNA, 22 nt, Artificial Sequence
  Synthetic oligonucleotide: Ptpn6-3626
aguaccugagcuggcccgacca

SEQ ID NO: 22933 - RNA, 23 nt, Artificial Sequence
  Synthetic oligonucleotide: Ptpn6-3627
caguaccugagcuggcccgacca

SEQ ID NO: 22934 - RNA, 24 nt, Artificial Sequence
  Synthetic oligonucleotide: Ptpn6-3628
ccaguaccugagcuggcccgacca

SEQ ID NO: 22935 - RNA, 18 nt, Artificial Sequence
  Synthetic oligonucleotide: Ptpn6-3629
gcaaccguacuaugccac

SEQ ID NO: 22936 - RNA, 19 nt, Artificial Sequence
  Synthetic oligonucleotide: Ptpn6-3630
agcaaccguacuaugccac

SEQ ID NO: 22937 - RNA, 20 nt, Artificial Sequence
  Synthetic oligonucleotide: Ptpn6-3631
cagcaaccguacuaugccac

SEQ ID NO: 22938 - RNA, 21 nt, Artificial Sequence
  Synthetic oligonucleotide: Ptpn6-3632
ucagcaaccguacuaugccac

SEQ ID NO: 22939 - RNA, 22 nt, Artificial Sequence
  Synthetic oligonucleotide: Ptpn6-3633
gucagcaaccguacuaugccac

SEQ ID NO: 22940 - RNA, 23 nt, Artificial Sequence
  Synthetic oligonucleotide: Ptpn6-3634
agucagcaaccguacuaugccac

SEQ ID NO: 22941 - RNA, 24 nt, Artificial Sequence
  Synthetic oligonucleotide: Ptpn6-3635
aagucagcaaccguacuaugccac

SEQ ID NO: 22942 - RNA, 18 nt, Artificial Sequence
  Synthetic oligonucleotide: Ptpn6-3636
ggagcauuucaagaagac

SEQ ID NO: 22943 - RNA, 19 nt, Artificial Sequence
  Synthetic oligonucleotide: Ptpn6-3637
uggagcauuucaagaagac

SEQ ID NO: 22944 - RNA, 20 nt, Artificial Sequence
  Synthetic oligonucleotide: Ptpn6-153
guggagcauuucaagaagac

SEQ ID NO: 22945 - RNA, 21 nt, Artificial Sequence
  Synthetic oligonucleotide: Ptpn6-3638
gguggagcauuucaagaagac

SEQ ID NO: 22946 - RNA, 22 nt, Artificial Sequence
  Synthetic oligonucleotide: Ptpn6-3639
ugguggagcauuucaagaagac

SEQ ID NO: 22947 - RNA, 23 nt, Artificial Sequence
  Synthetic oligonucleotide: Ptpn6-3640
cugguggagcauuucaagaagac

SEQ ID NO: 22948 - RNA, 24 nt, Artificial Sequence
  Synthetic oligonucleotide: Ptpn6-3641
ccugguggagcauuucaagaagac

SEQ ID NO: 22949 - RNA, 18 nt, Artificial Sequence
  Synthetic oligonucleotide: Ptpn6-3642
auggagaacaucuccacc

SEQ ID NO: 22950 - RNA, 19 nt, Artificial Sequence
  Synthetic oligonucleotide: Ptpn6-3643
cauggagaacaucuccacc

SEQ ID NO: 22951 - RNA, 20 nt, Artificial Sequence
  Synthetic oligonucleotide: Ptpn6-3644
ucauggagaacaucuccacc

SEQ ID NO: 22952 - RNA, 21 nt, Artificial Sequence
  Synthetic oligonucleotide: Ptpn6-3645
cucauggagaacaucuccacc

SEQ ID NO: 22953 - RNA, 22 nt, Artificial Sequence
  Synthetic oligonucleotide: Ptpn6-3646
gcucauggagaacaucuccacc

SEQ ID NO: 22954 - RNA, 23 nt, Artificial Sequence
  Synthetic oligonucleotide: Ptpn6-3647
ugcucauggagaacaucuccacc

SEQ ID NO: 22955 - RNA, 24 nt, Artificial Sequence
  Synthetic oligonucleotide: Ptpn6-3648
augcucauggagaacaucuccacc

SEQ ID NO: 22956 - RNA, 18 nt, Artificial Sequence
  Synthetic oligonucleotide: Ptpn6-3649
gccuaauuuggcuccccc

SEQ ID NO: 22957 - RNA, 19 nt, Artificial Sequence
  Synthetic oligonucleotide: Ptpn6-3650
ggccuaauuuggcuccccc

SEQ ID NO: 22958 - RNA, 20 nt, Artificial Sequence
  Synthetic oligonucleotide: Ptpn6-3651
uggccuaauuuggcuccccc

SEQ ID NO: 22959 - RNA, 21 nt, Artificial Sequence
  Synthetic oligonucleotide: Ptpn6-3652
auggccuaauuuggcuccccc

SEQ ID NO: 22960 - RNA, 22 nt, Artificial Sequence
  Synthetic oligonucleotide: Ptpn6-3653
aauggccuaauuuggcuccccc

SEQ ID NO: 22961 - RNA, 23 nt, Artificial Sequence
  Synthetic oligonucleotide: Ptpn6-3654
gaauggccuaauuuggcuccccc

SEQ ID NO: 22962 - RNA, 24 nt, Artificial Sequence
  Synthetic oligonucleotide: Ptpn6-3655
ugaauggccuaauuuggcuccccc

SEQ ID NO: 22963 - RNA, 18 nt, Artificial Sequence
  Synthetic oligonucleotide: Ptpn6-3656
gugguucgcagaagggcc

SEQ ID NO: 22964 - RNA, 19 nt, Artificial Sequence
  Synthetic oligonucleotide: Ptpn6-3657
ggugguucgcagaagggcc

SEQ ID NO: 22965 - RNA, 20 nt, Artificial Sequence
  Synthetic oligonucleotide: Ptpn6-2670
aggugguucgcagaagggcc

SEQ ID NO: 22966 - RNA, 21 nt, Artificial Sequence
  Synthetic oligonucleotide: Ptpn6-3658
aaggugguucgcagaagggcc

SEQ ID NO: 22967 - RNA, 22 nt, Artificial Sequence
  Synthetic oligonucleotide: Ptpn6-3659
gaaggugguucgcagaagggcc

SEQ ID NO: 22968 - RNA, 23 nt, Artificial Sequence
  Synthetic oligonucleotide: Ptpn6-3660
ggaaggugguucgcagaagggcc

SEQ ID NO: 22969 - RNA, 24 nt, Artificial Sequence
  Synthetic oligonucleotide: Ptpn6-3661
gggaaggugguucgcagaagggcc

SEQ ID NO: 22970 - RNA, 18 nt, Artificial Sequence
  Synthetic oligonucleotide: Ptpn6-3662
gacgggacaguaacaucc

SEQ ID NO: 22971 - RNA, 19 nt, Artificial Sequence
  Synthetic oligonucleotide: Ptpn6-3663
ggacgggacaguaacaucc

SEQ ID NO: 22972 - RNA, 20 nt, Artificial Sequence
  Synthetic oligonucleotide: Ptpn6-673
gggacgggacaguaacaucc

SEQ ID NO: 22973 - RNA, 21 nt, Artificial Sequence
  Synthetic oligonucleotide: Ptpn6-3664
agggacgggacaguaacaucc

SEQ ID NO: 22974 - RNA, 22 nt, Artificial Sequence
  Synthetic oligonucleotide: Ptpn6-3665
cagggacgggacaguaacaucc

SEQ ID NO: 22975 - RNA, 23 nt, Artificial Sequence
  Synthetic oligonucleotide: Ptpn6-3666
gcagggacgggacaguaacaucc

SEQ ID NO: 22976 - RNA, 24 nt, Artificial Sequence
  Synthetic oligonucleotide: Ptpn6-3667
ugcagggacgggacaguaacaucc

SEQ ID NO: 22977 - RNA, 18 nt, Artificial Sequence
  Synthetic oligonucleotide: Ptpn6-3668
aacaagaagcaggagucc

SEQ ID NO: 22978 - RNA, 19 nt, Artificial Sequence
  Synthetic oligonucleotide: Ptpn6-3669
gaacaagaagcaggagucc

SEQ ID NO: 22979 - RNA, 20 nt, Artificial Sequence
  Synthetic oligonucleotide: Ptpn6-653
ugaacaagaagcaggagucc

SEQ ID NO: 22980 - RNA, 21 nt, Artificial Sequence
  Synthetic oligonucleotide: Ptpn6-3670
cugaacaagaagcaggagucc

SEQ ID NO: 22981 - RNA, 22 nt, Artificial Sequence
  Synthetic oligonucleotide: Ptpn6-3671
acugaacaagaagcaggagucc

SEQ ID NO: 22982 - RNA, 23 nt, Artificial Sequence
  Synthetic oligonucleotide: Ptpn6-3672
aacugaacaagaagcaggagucc

SEQ ID NO: 22983 - RNA, 24 nt, Artificial Sequence
  Synthetic oligonucleotide: Ptpn6-3673
gaacugaacaagaagcaggagucc

SEQ ID NO: 22984 - RNA, 18 nt, Artificial Sequence
  Synthetic oligonucleotide: Ptpn6-3674
uggaacugaacaagaagc

SEQ ID NO: 22985 - RNA, 19 nt, Artificial Sequence
  Synthetic oligonucleotide: Ptpn6-3675
uuggaacugaacaagaagc

SEQ ID NO: 22986 - RNA, 20 nt, Artificial Sequence
  Synthetic oligonucleotide: Ptpn6-161
guuggaacugaacaagaagc

SEQ ID NO: 22987 - RNA, 21 nt, Artificial Sequence
  Synthetic oligonucleotide: Ptpn6-3676
uguuggaacugaacaagaagc

SEQ ID NO: 22988 - RNA, 22 nt, Artificial Sequence
  Synthetic oligonucleotide: Ptpn6-3677
guguuggaacugaacaagaagc

SEQ ID NO: 22989 - RNA, 23 nt, Artificial Sequence
  Synthetic oligonucleotide: Ptpn6-3678
aguguuggaacugaacaagaagc

SEQ ID NO: 22990 - RNA, 24 nt, Artificial Sequence
  Synthetic oligonucleotide: Ptpn6-3679
gaguguuggaacugaacaagaagc

SEQ ID NO: 22991 - RNA, 18 nt, Artificial Sequence
  Synthetic oligonucleotide: Ptpn6-3680
aagaccuacaucgccagc

SEQ ID NO: 22992 - RNA, 19 nt, Artificial Sequence
  Synthetic oligonucleotide: Ptpn6-3681
uaagaccuacaucgccagc

SEQ ID NO: 22993 - RNA, 20 nt, Artificial Sequence
  Synthetic oligonucleotide: Ptpn6-675
cuaagaccuacaucgccagc

SEQ ID NO: 22994 - RNA, 21 nt, Artificial Sequence
  Synthetic oligonucleotide: Ptpn6-3682
gcuaagaccuacaucgccagc

SEQ ID NO: 22995 - RNA, 22 nt, Artificial Sequence
  Synthetic oligonucleotide: Ptpn6-3683
cgcuaagaccuacaucgccagc

SEQ ID NO: 22996 - RNA, 23 nt, Artificial Sequence
  Synthetic oligonucleotide: Ptpn6-3684
acgcuaagaccuacaucgccagc

SEQ ID NO: 22997 - RNA, 24 nt, Artificial Sequence
  Synthetic oligonucleotide: Ptpn6-3685
aacgcuaagaccuacaucgccagc

SEQ ID NO: 22998 - RNA, 18 nt, Artificial Sequence
  Synthetic oligonucleotide: Ptpn6-3686
gcagacaaggagaagagc

SEQ ID NO: 22999 - RNA, 19 nt, Artificial Sequence
  Synthetic oligonucleotide: Ptpn6-3687
agcagacaaggagaagagc

SEQ ID NO: 23000 - RNA, 20 nt, Artificial Sequence
  Synthetic oligonucleotide: Ptpn6-738
cagcagacaaggagaagagc

SEQ ID NO: 23001 - RNA, 21 nt, Artificial Sequence
  Synthetic oligonucleotide: Ptpn6-3688
ucagcagacaaggagaagagc

SEQ ID NO: 23002 - RNA, 22 nt, Artificial Sequence
  Synthetic oligonucleotide: Ptpn6-3689
gucagcagacaaggagaagagc

SEQ ID NO: 23003 - RNA, 23 nt, Artificial Sequence
  Synthetic oligonucleotide: Ptpn6-3690
ggucagcagacaaggagaagagc

SEQ ID NO: 23004 - RNA, 24 nt, Artificial Sequence
  Synthetic oligonucleotide: Ptpn6-3691
cggucagcagacaaggagaagagc

SEQ ID NO: 23005 - RNA, 18 nt, Artificial Sequence
  Synthetic oligonucleotide: Ptpn6-3692
gucuaccugcggcagguc

SEQ ID NO: 23006 - RNA, 19 nt, Artificial Sequence
  Synthetic oligonucleotide: Ptpn6-3693
ugucuaccugcggcagguc

SEQ ID NO: 23007 - RNA, 20 nt, Artificial Sequence
  Synthetic oligonucleotide: Ptpn6-2689
uugucuaccugcggcagguc

SEQ ID NO: 23008 - RNA, 21 nt, Artificial Sequence
  Synthetic oligonucleotide: Ptpn6-3694
uuugucuaccugcggcagguc

SEQ ID NO: 23009 - RNA, 22 nt, Artificial Sequence
  Synthetic oligonucleotide: Ptpn6-3695
cuuugucuaccugcggcagguc

SEQ ID NO: 23010 - RNA, 23 nt, Artificial Sequence
  Synthetic oligonucleotide: Ptpn6-3696
ccuuugucuaccugcggcagguc

SEQ ID NO: 23011 - RNA, 24 nt, Artificial Sequence
  Synthetic oligonucleotide: Ptpn6-3697
gccuuugucuaccugcggcagguc

SEQ ID NO: 23012 - RNA, 18 nt, Artificial Sequence
  Synthetic oligonucleotide: Ptpn6-3698
ggcaaguacagacacaag

SEQ ID NO: 23013 - RNA, 19 nt, Artificial Sequence
  Synthetic oligonucleotide: Ptpn6-3699
gggcaaguacagacacaag

SEQ ID NO: 23014 - RNA, 20 nt, Artificial Sequence
  Synthetic oligonucleotide: Ptpn6-3700
ggggcaaguacagacacaag

SEQ ID NO: 23015 - RNA, 21 nt, Artificial Sequence
  Synthetic oligonucleotide: Ptpn6-3701
gggggcaaguacagacacaag

SEQ ID NO: 23016 - RNA, 22 nt, Artificial Sequence
  Synthetic oligonucleotide: Ptpn6-3702
ggggggcaaguacagacacaag

SEQ ID NO: 23017 - RNA, 23 nt, Artificial Sequence
  Synthetic oligonucleotide: Ptpn6-3703
aggggggcaaguacagacacaag

SEQ ID NO: 23018 - RNA, 24 nt, Artificial Sequence
  Synthetic oligonucleotide: Ptpn6-3704
caggggggcaaguacagacacaag

SEQ ID NO: 23019 - RNA, 18 nt, Artificial Sequence
  Synthetic oligonucleotide: Ptpn6-3705
cgagaugguugaccacag

SEQ ID NO: 23020 - RNA, 19 nt, Artificial Sequence
  Synthetic oligonucleotide: Ptpn6-3706
gcgagaugguugaccacag

SEQ ID NO: 23021 - RNA, 20 nt, Artificial Sequence
  Synthetic oligonucleotide: Ptpn6-3707
ggcgagaugguugaccacag

SEQ ID NO: 23022 - RNA, 21 nt, Artificial Sequence
  Synthetic oligonucleotide: Ptpn6-3708
aggcgagaugguugaccacag

SEQ ID NO: 23023 - RNA, 22 nt, Artificial Sequence
  Synthetic oligonucleotide: Ptpn6-3709
gaggcgagaugguugaccacag

SEQ ID NO: 23024 - RNA, 23 nt, Artificial Sequence
  Synthetic oligonucleotide: Ptpn6-3710
ggaggcgagaugguugaccacag

SEQ ID NO: 23025 - RNA, 24 nt, Artificial Sequence
  Synthetic oligonucleotide: Ptpn6-3711
aggaggcgagaugguugaccacag

SEQ ID NO: 23026 - RNA, 18 nt, Artificial Sequence
  Synthetic oligonucleotide: Ptpn6-3712
ccgagagguggagaaagg

SEQ ID NO: 23027 - RNA, 19 nt, Artificial Sequence
  Synthetic oligonucleotide: Ptpn6-3713
cccgagagguggagaaagg

SEQ ID NO: 23028 - RNA, 20 nt, Artificial Sequence
  Synthetic oligonucleotide: Ptpn6-3714
acccgagagguggagaaagg

SEQ ID NO: 23029 - RNA, 21 nt, Artificial Sequence
  Synthetic oligonucleotide: Ptpn6-3715
cacccgagagguggagaaagg

SEQ ID NO: 23030 - RNA, 22 nt, Artificial Sequence
  Synthetic oligonucleotide: Ptpn6-3716
ccacccgagagguggagaaagg

SEQ ID NO: 23031 - RNA, 23 nt, Artificial Sequence
  Synthetic oligonucleotide: Ptpn6-3717
accacccgagagguggagaaagg

SEQ ID NO: 23032 - RNA, 24 nt, Artificial Sequence
  Synthetic oligonucleotide: Ptpn6-3718
gaccacccgagagguggagaaagg

SEQ ID NO: 23033 - RNA, 18 nt, Artificial Sequence
  Synthetic oligonucleotide: Ptpn6-3719
ccguacuaugccacgagg

SEQ ID NO: 23034 - RNA, 19 nt, Artificial Sequence
  Synthetic oligonucleotide: Ptpn6-3720
accguacuaugccacgagg

SEQ ID NO: 23035 - RNA, 20 nt, Artificial Sequence
  Synthetic oligonucleotide: Ptpn6-3721
aaccguacuaugccacgagg

SEQ ID NO: 23036 - RNA, 21 nt, Artificial Sequence
  Synthetic oligonucleotide: Ptpn6-3722
caaccguacuaugccacgagg

SEQ ID NO: 23037 - RNA, 22 nt, Artificial Sequence
  Synthetic oligonucleotide: Ptpn6-3723
gcaaccguacuaugccacgagg

SEQ ID NO: 23038 - RNA, 23 nt, Artificial Sequence
  Synthetic oligonucleotide: Ptpn6-3724
agcaaccguacuaugccacgagg

SEQ ID NO: 23039 - RNA, 24 nt, Artificial Sequence
  Synthetic oligonucleotide: Ptpn6-3725
cagcaaccguacuaugccacgagg

SEQ ID NO: 23040 - RNA, 18 nt, Artificial Sequence
  Synthetic oligonucleotide: Ptpn6-3726
ccaaggcuggcuucuggg

SEQ ID NO: 23041 - RNA, 19 nt, Artificial Sequence
  Synthetic oligonucleotide: Ptpn6-3727
gccaaggcuggcuucuggg

SEQ ID NO: 23042 - RNA, 20 nt, Artificial Sequence
  Synthetic oligonucleotide: Ptpn6-167
agccaaggcuggcuucuggg

SEQ ID NO: 23043 - RNA, 21 nt, Artificial Sequence
  Synthetic oligonucleotide: Ptpn6-3728
cagccaaggcuggcuucuggg

SEQ ID NO: 23044 - RNA, 22 nt, Artificial Sequence
  Synthetic oligonucleotide: Ptpn6-3729
acagccaaggcuggcuucuggg

SEQ ID NO: 23045 - RNA, 23 nt, Artificial Sequence
  Synthetic oligonucleotide: Ptpn6-3730
uacagccaaggcuggcuucuggg

SEQ ID NO: 23046 - RNA, 24 nt, Artificial Sequence
  Synthetic oligonucleotide: Ptpn6-3731
auacagccaaggcuggcuucuggg

SEQ ID NO: 23047 - RNA, 18 nt, Artificial Sequence
  Synthetic oligonucleotide: Ptpn6-3732
accuaucccccagccaug

SEQ ID NO: 23048 - RNA, 19 nt, Artificial Sequence
  Synthetic oligonucleotide: Ptpn6-3733
caccuaucccccagccaug

SEQ ID NO: 23049 - RNA, 20 nt, Artificial Sequence
  Synthetic oligonucleotide: Ptpn6-723
ucaccuaucccccagccaug

SEQ ID NO: 23050 - RNA, 21 nt, Artificial Sequence
  Synthetic oligonucleotide: Ptpn6-3734
aucaccuaucccccagccaug

SEQ ID NO: 23051 - RNA, 22 nt, Artificial Sequence
  Synthetic oligonucleotide: Ptpn6-3735
caucaccuaucccccagccaug

SEQ ID NO: 23052 - RNA, 23 nt, Artificial Sequence
  Synthetic oligonucleotide: Ptpn6-3736
acaucaccuaucccccagccaug

SEQ ID NO: 23053 - RNA, 24 nt, Artificial Sequence
  Synthetic oligonucleotide: Ptpn6-3737
aacaucaccuaucccccagccaug

SEQ ID NO: 23054 - RNA, 18 nt, Artificial Sequence
  Synthetic oligonucleotide: Ptpn6-3738
gucuccccgcuggacaau

SEQ ID NO: 23055 - RNA, 19 nt, Artificial Sequence
  Synthetic oligonucleotide: Ptpn6-3739
ggucuccccgcuggacaau

SEQ ID NO: 23056 - RNA, 20 nt, Artificial Sequence
  Synthetic oligonucleotide: Ptpn6-3740
aggucuccccgcuggacaau

SEQ ID NO: 23057 - RNA, 21 nt, Artificial Sequence
  Synthetic oligonucleotide: Ptpn6-3741
caggucuccccgcuggacaau

SEQ ID NO: 23058 - RNA, 22 nt, Artificial Sequence
  Synthetic oligonucleotide: Ptpn6-3742
acaggucuccccgcuggacaau

SEQ ID NO: 23059 - RNA, 23 nt, Artificial Sequence
  Synthetic oligonucleotide: Ptpn6-3743
uacaggucuccccgcuggacaau

SEQ ID NO: 23060 - RNA, 24 nt, Artificial Sequence
  Synthetic oligonucleotide: Ptpn6-3744
uuacaggucuccccgcuggacaau

SEQ ID NO: 23061 - RNA, 18 nt, Artificial Sequence
  Synthetic oligonucleotide: Ptpn6-3745
caagggugaggggcaccu

SEQ ID NO: 23062 - RNA, 19 nt, Artificial Sequence
  Synthetic oligonucleotide: Ptpn6-3746
ccaagggugaggggcaccu

SEQ ID NO: 23063 - RNA, 20 nt, Artificial Sequence
  Synthetic oligonucleotide: Ptpn6-2751
accaagggugaggggcaccu

SEQ ID NO: 23064 - RNA, 21 nt, Artificial Sequence
  Synthetic oligonucleotide: Ptpn6-3747
caccaagggugaggggcaccu

SEQ ID NO: 23065 - RNA, 22 nt, Artificial Sequence
  Synthetic oligonucleotide: Ptpn6-3748
ccaccaagggugaggggcaccu

SEQ ID NO: 23066 - RNA, 23 nt, Artificial Sequence
  Synthetic oligonucleotide: Ptpn6-3749
uccaccaagggugaggggcaccu

SEQ ID NO: 23067 - RNA, 24 nt, Artificial Sequence
  Synthetic oligonucleotide: Ptpn6-3750
cuccaccaagggugaggggcaccu

SEQ ID NO: 23068 - RNA, 18 nt, Artificial Sequence
  Synthetic oligonucleotide: Ptpn6-3751
gggguccccagugagccu

SEQ ID NO: 23069 - RNA, 19 nt, Artificial Sequence
  Synthetic oligonucleotide: Ptpn6-3752
ugggguccccagugagccu

SEQ ID NO: 23070 - RNA, 20 nt, Artificial Sequence
  Synthetic oligonucleotide: Ptpn6-209
augggguccccagugagccu

SEQ ID NO: 23071 - RNA, 21 nt, Artificial Sequence
  Synthetic oligonucleotide: Ptpn6-3753
caugggguccccagugagccu

SEQ ID NO: 23072 - RNA, 22 nt, Artificial Sequence
  Synthetic oligonucleotide: Ptpn6-3754
ccaugggguccccagugagccu

SEQ ID NO: 23073 - RNA, 23 nt, Artificial Sequence
  Synthetic oligonucleotide: Ptpn6-3755
accaugggguccccagugagccu

SEQ ID NO: 23074 - RNA, 24 nt, Artificial Sequence
  Synthetic oligonucleotide: Ptpn6-3756
gaccaugggguccccagugagccu

SEQ ID NO: 23075 - RNA, 18 nt, Artificial Sequence
  Synthetic oligonucleotide: Ptpn6-3757
auuuccccacccacaucu

SEQ ID NO: 23076 - RNA, 19 nt, Artificial Sequence
  Synthetic oligonucleotide: Ptpn6-3758
cauuuccccacccacaucu

SEQ ID NO: 23077 - RNA, 20 nt, Artificial Sequence
  Synthetic oligonucleotide: Ptpn6-3759
ucauuuccccacccacaucu

SEQ ID NO: 23078 - RNA, 21 nt, Artificial Sequence
  Synthetic oligonucleotide: Ptpn6-3760
cucauuuccccacccacaucu

SEQ ID NO: 23079 - RNA, 22 nt, Artificial Sequence
  Synthetic oligonucleotide: Ptpn6-3761
gcucauuuccccacccacaucu

SEQ ID NO: 23080 - RNA, 23 nt, Artificial Sequence
  Synthetic oligonucleotide: Ptpn6-3762
ugcucauuuccccacccacaucu

SEQ ID NO: 23081 - RNA, 24 nt, Artificial Sequence
  Synthetic oligonucleotide: Ptpn6-3763
augcucauuuccccacccacaucu

SEQ ID NO: 23082 - RNA, 18 nt, Artificial Sequence
  Synthetic oligonucleotide: Ptpn6-3764
cgcagaagggccaggagu

SEQ ID NO: 23083 - RNA, 19 nt, Artificial Sequence
  Synthetic oligonucleotide: Ptpn6-3765
ucgcagaagggccaggagu

SEQ ID NO: 23084 - RNA, 20 nt, Artificial Sequence
  Synthetic oligonucleotide: Ptpn6-2761
uucgcagaagggccaggagu

SEQ ID NO: 23085 - RNA, 21 nt, Artificial Sequence
  Synthetic oligonucleotide: Ptpn6-3766
guucgcagaagggccaggagu

SEQ ID NO: 23086 - RNA, 22 nt, Artificial Sequence
  Synthetic oligonucleotide: Ptpn6-3767
gguucgcagaagggccaggagu

SEQ ID NO: 23087 - RNA, 23 nt, Artificial Sequence
  Synthetic oligonucleotide: Ptpn6-3768
ugguucgcagaagggccaggagu

SEQ ID NO: 23088 - RNA, 24 nt, Artificial Sequence
  Synthetic oligonucleotide: Ptpn6-3769
gugguucgcagaagggccaggagu

SEQ ID NO: 23089 - RNA, 18 nt, Artificial Sequence
  Synthetic oligonucleotide: Ptpn6-3770
ucaucgugcacugcaggu

SEQ ID NO: 23090 - RNA, 19 nt, Artificial Sequence
  Synthetic oligonucleotide: Ptpn6-3771
aucaucgugcacugcaggu

SEQ ID NO: 23091 - RNA, 20 nt, Artificial Sequence
  Synthetic oligonucleotide: Ptpn6-3772
caucaucgugcacugcaggu

SEQ ID NO: 23092 - RNA, 21 nt, Artificial Sequence
  Synthetic oligonucleotide: Ptpn6-3773
ccaucaucgugcacugcaggu

SEQ ID NO: 23093 - RNA, 22 nt, Artificial Sequence
  Synthetic oligonucleotide: Ptpn6-3774
cccaucaucgugcacugcaggu

SEQ ID NO: 23094 - RNA, 23 nt, Artificial Sequence
  Synthetic oligonucleotide: Ptpn6-3775
gcccaucaucgugcacugcaggu

SEQ ID NO: 23095 - RNA, 24 nt, Artificial Sequence
  Synthetic oligonucleotide: Ptpn6-3776
ggcccaucaucgugcacugcaggu

SEQ ID NO: 23096 - RNA, 18 nt, Artificial Sequence
  Synthetic oligonucleotide: Ptpn6-3777
ggaaagggagggucgggu

SEQ ID NO: 23097 - RNA, 19 nt, Artificial Sequence
  Synthetic oligonucleotide: Ptpn6-3778
uggaaagggagggucgggu

SEQ ID NO: 23098 - RNA, 20 nt, Artificial Sequence
  Synthetic oligonucleotide: Ptpn6-2765
cuggaaagggagggucgggu

SEQ ID NO: 23099 - RNA, 18 nt, Artificial Sequence
  Synthetic oligonucleotide: Ptpn6-3779
aggggcaccuggggguuu

SEQ ID NO: 23100 - RNA, 19 nt, Artificial Sequence
  Synthetic oligonucleotide: Ptpn6-3780
gaggggcaccuggggguuu

SEQ ID NO: 23101 - RNA, 20 nt, Artificial Sequence
  Synthetic oligonucleotide: Ptpn6-2776
ugaggggcaccuggggguuu

SEQ ID NO: 23102 - RNA, 21 nt, Artificial Sequence
  Synthetic oligonucleotide: Ptpn6-3781
gugaggggcaccuggggguuu

SEQ ID NO: 23103 - RNA, 22 nt, Artificial Sequence
  Synthetic oligonucleotide: Ptpn6-3782
ggugaggggcaccuggggguuu

SEQ ID NO: 23104 - RNA, 23 nt, Artificial Sequence
  Synthetic oligonucleotide: Ptpn6-3783
gggugaggggcaccuggggguuu

SEQ ID NO: 23105 - RNA, 24 nt, Artificial Sequence
  Synthetic oligonucleotide: Ptpn6-3784
agggugaggggcaccuggggguuu

SEQ ID NO: 23106 - RNA, 18 nt, Artificial Sequence
  Synthetic oligonucleotide: Ptpn6-3785
ugagauguggguggggaa

SEQ ID NO: 23107 - RNA, 19 nt, Artificial Sequence
  Synthetic oligonucleotide: Ptpn6-3786
cugagauguggguggggaa

SEQ ID NO: 23108 - RNA, 20 nt, Artificial Sequence
  Synthetic oligonucleotide: Ptpn6-3787
ucugagauguggguggggaa

SEQ ID NO: 23109 - RNA, 21 nt, Artificial Sequence
  Synthetic oligonucleotide: Ptpn6-3788
cucugagauguggguggggaa

SEQ ID NO: 23110 - RNA, 22 nt, Artificial Sequence
  Synthetic oligonucleotide: Ptpn6-3789
acucugagauguggguggggaa

SEQ ID NO: 23111 - RNA, 23 nt, Artificial Sequence
  Synthetic oligonucleotide: Ptpn6-3790
aacucugagauguggguggggaa

SEQ ID NO: 23112 - RNA, 24 nt, Artificial Sequence
  Synthetic oligonucleotide: Ptpn6-3791
aaacucugagauguggguggggaa

SEQ ID NO: 23113 - RNA, 18 nt, Artificial Sequence
  Synthetic oligonucleotide: Ptpn6-3792
cuuagugguuucaaugaa

SEQ ID NO: 23114 - RNA, 19 nt, Artificial Sequence
  Synthetic oligonucleotide: Ptpn6-3793
ucuuagugguuucaaugaa

SEQ ID NO: 23115 - RNA, 20 nt, Artificial Sequence
  Synthetic oligonucleotide: Ptpn6-866
uucuuagugguuucaaugaa

SEQ ID NO: 23116 - RNA, 21 nt, Artificial Sequence
  Synthetic oligonucleotide: Ptpn6-3794
cuucuuagugguuucaaugaa

SEQ ID NO: 23117 - RNA, 22 nt, Artificial Sequence
  Synthetic oligonucleotide: Ptpn6-3795
ucuucuuagugguuucaaugaa

SEQ ID NO: 23118 - RNA, 23 nt, Artificial Sequence
  Synthetic oligonucleotide: Ptpn6-3796
uucuucuuagugguuucaaugaa

SEQ ID NO: 23119 - RNA, 24 nt, Artificial Sequence
  Synthetic oligonucleotide: Ptpn6-3797
cuucuucuuagugguuucaaugaa

SEQ ID NO: 23120 - RNA, 18 nt, Artificial Sequence
  Synthetic oligonucleotide: Ptpn6-3798
gcagccugggugcucaca

SEQ ID NO: 23121 - RNA, 19 nt, Artificial Sequence
  Synthetic oligonucleotide: Ptpn6-3799
ggcagccugggugcucaca

SEQ ID NO: 23122 - RNA, 20 nt, Artificial Sequence
  Synthetic oligonucleotide: Ptpn6-2639
gggcagccugggugcucaca

SEQ ID NO: 23123 - RNA, 21 nt, Artificial Sequence
  Synthetic oligonucleotide: Ptpn6-3800
ggggcagccugggugcucaca

SEQ ID NO: 23124 - RNA, 22 nt, Artificial Sequence
  Synthetic oligonucleotide: Ptpn6-3801
uggggcagccugggugcucaca

SEQ ID NO: 23125 - RNA, 23 nt, Artificial Sequence
  Synthetic oligonucleotide: Ptpn6-3802
auggggcagccugggugcucaca

SEQ ID NO: 23126 - RNA, 24 nt, Artificial Sequence
  Synthetic oligonucleotide: Ptpn6-3803
aauggggcagccugggugcucaca

SEQ ID NO: 23127 - RNA, 18 nt, Artificial Sequence
  Synthetic oligonucleotide: Ptpn6-3804
ggccacucacauugucca

SEQ ID NO: 23128 - RNA, 19 nt, Artificial Sequence
  Synthetic oligonucleotide: Ptpn6-3805
gggccacucacauugucca

SEQ ID NO: 23129 - RNA, 20 nt, Artificial Sequence
  Synthetic oligonucleotide: Ptpn6-3806
ggggccacucacauugucca

SEQ ID NO: 23130 - RNA, 21 nt, Artificial Sequence
  Synthetic oligonucleotide: Ptpn6-3807
gggggccacucacauugucca

SEQ ID NO: 23131 - RNA, 22 nt, Artificial Sequence
  Synthetic oligonucleotide: Ptpn6-3808
ugggggccacucacauugucca

SEQ ID NO: 23132 - RNA, 23 nt, Artificial Sequence
  Synthetic oligonucleotide: Ptpn6-3809
gugggggccacucacauugucca

SEQ ID NO: 23133 - RNA, 24 nt, Artificial Sequence
  Synthetic oligonucleotide: Ptpn6-3810
cgugggggccacucacauugucca

SEQ ID NO: 23134 - RNA, 18 nt, Artificial Sequence
  Synthetic oligonucleotide: Ptpn6-3811
aggacacccccaggcuca

SEQ ID NO: 23135 - RNA, 19 nt, Artificial Sequence
  Synthetic oligonucleotide: Ptpn6-3812
gaggacacccccaggcuca

SEQ ID NO: 23136 - RNA, 20 nt, Artificial Sequence
  Synthetic oligonucleotide: Ptpn6-877
ugaggacacccccaggcuca

SEQ ID NO: 23137 - RNA, 21 nt, Artificial Sequence
  Synthetic oligonucleotide: Ptpn6-3813
cugaggacacccccaggcuca

SEQ ID NO: 23138 - RNA, 22 nt, Artificial Sequence
  Synthetic oligonucleotide: Ptpn6-3814
gcugaggacacccccaggcuca

SEQ ID NO: 23139 - RNA, 23 nt, Artificial Sequence
  Synthetic oligonucleotide: Ptpn6-3815
agcugaggacacccccaggcuca

SEQ ID NO: 23140 - RNA, 24 nt, Artificial Sequence
  Synthetic oligonucleotide: Ptpn6-3816
aagcugaggacacccccaggcuca

SEQ ID NO: 23141 - RNA, 18 nt, Artificial Sequence
  Synthetic oligonucleotide: Ptpn6-3817
gggcagccugggugcuca

SEQ ID NO: 23142 - RNA, 19 nt, Artificial Sequence
  Synthetic oligonucleotide: Ptpn6-3818
ggggcagccugggugcuca

SEQ ID NO: 23143 - RNA, 20 nt, Artificial Sequence
  Synthetic oligonucleotide: Ptpn6-3819
uggggcagccugggugcuca

SEQ ID NO: 23144 - RNA, 21 nt, Artificial Sequence
  Synthetic oligonucleotide: Ptpn6-3820
auggggcagccugggugcuca

SEQ ID NO: 23145 - RNA, 22 nt, Artificial Sequence
  Synthetic oligonucleotide: Ptpn6-3821
aauggggcagccugggugcuca

SEQ ID NO: 23146 - RNA, 23 nt, Artificial Sequence
  Synthetic oligonucleotide: Ptpn6-3822
gaauggggcagccugggugcuca

SEQ ID NO: 23147 - RNA, 24 nt, Artificial Sequence
  Synthetic oligonucleotide: Ptpn6-3823
ugaauggggcagccugggugcuca

SEQ ID NO: 23148 - RNA, 18 nt, Artificial Sequence
  Synthetic oligonucleotide: Ptpn6-3824
uucuucuuagugguuuca

SEQ ID NO: 23149 - RNA, 19 nt, Artificial Sequence
  Synthetic oligonucleotide: Ptpn6-3825
cuucuucuuagugguuuca

SEQ ID NO: 23150 - RNA, 20 nt, Artificial Sequence
  Synthetic oligonucleotide: Ptpn6-865
gcuucuucuuagugguuuca

SEQ ID NO: 23151 - RNA, 21 nt, Artificial Sequence
  Synthetic oligonucleotide: Ptpn6-3826
agcuucuucuuagugguuuca

SEQ ID NO: 23152 - RNA, 22 nt, Artificial Sequence
  Synthetic oligonucleotide: Ptpn6-3827
cagcuucuucuuagugguuuca

SEQ ID NO: 23153 - RNA, 23 nt, Artificial Sequence
  Synthetic oligonucleotide: Ptpn6-3828
ccagcuucuucuuagugguuuca

SEQ ID NO: 23154 - RNA, 24 nt, Artificial Sequence
  Synthetic oligonucleotide: Ptpn6-3829
uccagcuucuucuuagugguuuca

SEQ ID NO: 23155 - RNA, 18 nt, Artificial Sequence
  Synthetic oligonucleotide: Ptpn6-3830
ccgcucacuuccucuuga

SEQ ID NO: 23156 - RNA, 19 nt, Artificial Sequence
  Synthetic oligonucleotide: Ptpn6-3831
accgcucacuuccucuuga

SEQ ID NO: 23157 - RNA, 20 nt, Artificial Sequence
  Synthetic oligonucleotide: Ptpn6-2655
caccgcucacuuccucuuga

SEQ ID NO: 23158 - RNA, 21 nt, Artificial Sequence
  Synthetic oligonucleotide: Ptpn6-3832
gcaccgcucacuuccucuuga

SEQ ID NO: 23159 - RNA, 22 nt, Artificial Sequence
  Synthetic oligonucleotide: Ptpn6-3833
agcaccgcucacuuccucuuga

SEQ ID NO: 23160 - RNA, 23 nt, Artificial Sequence
  Synthetic oligonucleotide: Ptpn6-3834
cagcaccgcucacuuccucuuga

SEQ ID NO: 23161 - RNA, 24 nt, Artificial Sequence
  Synthetic oligonucleotide: Ptpn6-3835
acagcaccgcucacuuccucuuga

SEQ ID NO: 23162 - RNA, 18 nt, Artificial Sequence
  Synthetic oligonucleotide: Ptpn6-3836
gcccaccucgggccagua

SEQ ID NO: 23163 - RNA, 19 nt, Artificial Sequence
  Synthetic oligonucleotide: Ptpn6-3837
ugcccaccucgggccagua

SEQ ID NO: 23164 - RNA, 20 nt, Artificial Sequence
  Synthetic oligonucleotide: Ptpn6-384
augcccaccucgggccagua

SEQ ID NO: 23165 - RNA, 21 nt, Artificial Sequence
  Synthetic oligonucleotide: Ptpn6-3838
caugcccaccucgggccagua

SEQ ID NO: 23166 - RNA, 22 nt, Artificial Sequence
  Synthetic oligonucleotide: Ptpn6-3839
gcaugcccaccucgggccagua

SEQ ID NO: 23167 - RNA, 23 nt, Artificial Sequence
  Synthetic oligonucleotide: Ptpn6-3840
ugcaugcccaccucgggccagua

SEQ ID NO: 23168 - RNA, 24 nt, Artificial Sequence
  Synthetic oligonucleotide: Ptpn6-3841
cugcaugcccaccucgggccagua

SEQ ID NO: 23169 - RNA, 18 nt, Artificial Sequence
  Synthetic oligonucleotide: Ptpn6-3842
gcagucagggccacucac

SEQ ID NO: 23170 - RNA, 19 nt, Artificial Sequence
  Synthetic oligonucleotide: Ptpn6-3843
ggcagucagggccacucac

SEQ ID NO: 23171 - RNA, 20 nt, Artificial Sequence
  Synthetic oligonucleotide: Ptpn6-3844
uggcagucagggccacucac

SEQ ID NO: 23172 - RNA, 21 nt, Artificial Sequence
  Synthetic oligonucleotide: Ptpn6-3845
guggcagucagggccacucac

SEQ ID NO: 23173 - RNA, 22 nt, Artificial Sequence
  Synthetic oligonucleotide: Ptpn6-3846
aguggcagucagggccacucac

SEQ ID NO: 23174 - RNA, 23 nt, Artificial Sequence
  Synthetic oligonucleotide: Ptpn6-3847
caguggcagucagggccacucac

SEQ ID NO: 23175 - RNA, 24 nt, Artificial Sequence
  Synthetic oligonucleotide: Ptpn6-3848
gcaguggcagucagggccacucac

SEQ ID NO: 23176 - RNA, 18 nt, Artificial Sequence
  Synthetic oligonucleotide: Ptpn6-3849
ggacacccccaggcucac

SEQ ID NO: 23177 - RNA, 19 nt, Artificial Sequence
  Synthetic oligonucleotide: Ptpn6-3850
aggacacccccaggcucac

SEQ ID NO: 23178 - RNA, 20 nt, Artificial Sequence
  Synthetic oligonucleotide: Ptpn6-367
gaggacacccccaggcucac

SEQ ID NO: 23179 - RNA, 21 nt, Artificial Sequence
  Synthetic oligonucleotide: Ptpn6-3851
ugaggacacccccaggcucac

SEQ ID NO: 23180 - RNA, 22 nt, Artificial Sequence
  Synthetic oligonucleotide: Ptpn6-3852
cugaggacacccccaggcucac

SEQ ID NO: 23181 - RNA, 23 nt, Artificial Sequence
  Synthetic oligonucleotide: Ptpn6-3853
gcugaggacacccccaggcucac

SEQ ID NO: 23182 - RNA, 24 nt, Artificial Sequence
  Synthetic oligonucleotide: Ptpn6-3854
agcugaggacacccccaggcucac

SEQ ID NO: 23183 - RNA, 18 nt, Artificial Sequence
  Synthetic oligonucleotide: Ptpn6-3855
ggcagccugggugcucac

SEQ ID NO: 23184 - RNA, 19 nt, Artificial Sequence
  Synthetic oligonucleotide: Ptpn6-3856
gggcagccugggugcucac

SEQ ID NO: 23185 - RNA, 20 nt, Artificial Sequence
  Synthetic oligonucleotide: Ptpn6-2658
ggggcagccugggugcucac

SEQ ID NO: 23186 - RNA, 21 nt, Artificial Sequence
  Synthetic oligonucleotide: Ptpn6-3857
uggggcagccugggugcucac

SEQ ID NO: 23187 - RNA, 22 nt, Artificial Sequence
  Synthetic oligonucleotide: Ptpn6-3858
auggggcagccugggugcucac

SEQ ID NO: 23188 - RNA, 23 nt, Artificial Sequence
  Synthetic oligonucleotide: Ptpn6-3859
aauggggcagccugggugcucac

SEQ ID NO: 23189 - RNA, 24 nt, Artificial Sequence
  Synthetic oligonucleotide: Ptpn6-3860
gaauggggcagccugggugcucac

SEQ ID NO: 23190 - RNA, 18 nt, Artificial Sequence
  Synthetic oligonucleotide: Ptpn6-3861
gucacaguccaggcggac

SEQ ID NO: 23191 - RNA, 19 nt, Artificial Sequence
  Synthetic oligonucleotide: Ptpn6-3862
ugucacaguccaggcggac

SEQ ID NO: 23192 - RNA, 20 nt, Artificial Sequence
  Synthetic oligonucleotide: Ptpn6-3863
augucacaguccaggcggac

SEQ ID NO: 23193 - RNA, 21 nt, Artificial Sequence
  Synthetic oligonucleotide: Ptpn6-3864
aaugucacaguccaggcggac

SEQ ID NO: 23194 - RNA, 22 nt, Artificial Sequence
  Synthetic oligonucleotide: Ptpn6-3865
caaugucacaguccaggcggac

SEQ ID NO: 23195 - RNA, 23 nt, Artificial Sequence
  Synthetic oligonucleotide: Ptpn6-3866
ucaaugucacaguccaggcggac

SEQ ID NO: 23196 - RNA, 24 nt, Artificial Sequence
  Synthetic oligonucleotide: Ptpn6-3867
gucaaugucacaguccaggcggac

SEQ ID NO: 23197 - RNA, 18 nt, Artificial Sequence
  Synthetic oligonucleotide: Ptpn6-3868
gcauugauguagucggac

SEQ ID NO: 23198 - RNA, 19 nt, Artificial Sequence
  Synthetic oligonucleotide: Ptpn6-3869
ggcauugauguagucggac

SEQ ID NO: 23199 - RNA, 20 nt, Artificial Sequence
  Synthetic oligonucleotide: Ptpn6-893
uggcauugauguagucggac

SEQ ID NO: 23200 - RNA, 21 nt, Artificial Sequence
  Synthetic oligonucleotide: Ptpn6-3870
uuggcauugauguagucggac

SEQ ID NO: 23201 - RNA, 22 nt, Artificial Sequence
  Synthetic oligonucleotide: Ptpn6-3871
guuggcauugauguagucggac

SEQ ID NO: 23202 - RNA, 23 nt, Artificial Sequence
  Synthetic oligonucleotide: Ptpn6-3872
aguuggcauugauguagucggac

SEQ ID NO: 23203 - RNA, 24 nt, Artificial Sequence
  Synthetic oligonucleotide: Ptpn6-3873
uaguuggcauugauguagucggac

SEQ ID NO: 23204 - RNA, 18 nt, Artificial Sequence
  Synthetic oligonucleotide: Ptpn6-3874
gcacgcugcaugcccacc

SEQ ID NO: 23205 - RNA, 19 nt, Artificial Sequence
  Synthetic oligonucleotide: Ptpn6-3875
agcacgcugcaugcccacc

SEQ ID NO: 23206 - RNA, 20 nt, Artificial Sequence
  Synthetic oligonucleotide: Ptpn6-886
aagcacgcugcaugcccacc

SEQ ID NO: 23207 - RNA, 21 nt, Artificial Sequence
  Synthetic oligonucleotide: Ptpn6-3876
uaagcacgcugcaugcccacc

SEQ ID NO: 23208 - RNA, 22 nt, Artificial Sequence
  Synthetic oligonucleotide: Ptpn6-3877
auaagcacgcugcaugcccacc

SEQ ID NO: 23209 - RNA, 23 nt, Artificial Sequence
  Synthetic oligonucleotide: Ptpn6-3878
cauaagcacgcugcaugcccacc

SEQ ID NO: 23210 - RNA, 24 nt, Artificial Sequence
  Synthetic oligonucleotide: Ptpn6-3879
ccauaagcacgcugcaugcccacc

SEQ ID NO: 23211 - RNA, 18 nt, Artificial Sequence
  Synthetic oligonucleotide: Ptpn6-3880
cacuguguagcguccacc

SEQ ID NO: 23212 - RNA, 19 nt, Artificial Sequence
  Synthetic oligonucleotide: Ptpn6-3881
ccacuguguagcguccacc

SEQ ID NO: 23213 - RNA, 20 nt, Artificial Sequence
  Synthetic oligonucleotide: Ptpn6-3882
cccacuguguagcguccacc

SEQ ID NO: 23214 - RNA, 21 nt, Artificial Sequence
  Synthetic oligonucleotide: Ptpn6-3883
acccacuguguagcguccacc

SEQ ID NO: 23215 - RNA, 22 nt, Artificial Sequence
  Synthetic oligonucleotide: Ptpn6-3884
cacccacuguguagcguccacc

SEQ ID NO: 23216 - RNA, 23 nt, Artificial Sequence
  Synthetic oligonucleotide: Ptpn6-3885
ccacccacuguguagcguccacc

SEQ ID NO: 23217 - RNA, 24 nt, Artificial Sequence
  Synthetic oligonucleotide: Ptpn6-3886
accacccacuguguagcguccacc

SEQ ID NO: 23218 - RNA, 18 nt, Artificial Sequence
  Synthetic oligonucleotide: Ptpn6-3887
cauugauguagucggacc

SEQ ID NO: 23219 - RNA, 19 nt, Artificial Sequence
  Synthetic oligonucleotide: Ptpn6-3888
gcauugauguagucggacc

SEQ ID NO: 23220 - RNA, 20 nt, Artificial Sequence
  Synthetic oligonucleotide: Ptpn6-397
ggcauugauguagucggacc

SEQ ID NO: 23221 - RNA, 21 nt, Artificial Sequence
  Synthetic oligonucleotide: Ptpn6-3889
uggcauugauguagucggacc

SEQ ID NO: 23222 - RNA, 22 nt, Artificial Sequence
  Synthetic oligonucleotide: Ptpn6-3890
uuggcauugauguagucggacc

SEQ ID NO: 23223 - RNA, 23 nt, Artificial Sequence
  Synthetic oligonucleotide: Ptpn6-3891
guuggcauugauguagucggacc

SEQ ID NO: 23224 - RNA, 24 nt, Artificial Sequence
  Synthetic oligonucleotide: Ptpn6-3892
aguuggcauugauguagucggacc

SEQ ID NO: 23225 - RNA, 18 nt, Artificial Sequence
  Synthetic oligonucleotide: Ptpn6-3893
acuguguagcguccaccc

SEQ ID NO: 23226 - RNA, 19 nt, Artificial Sequence
  Synthetic oligonucleotide: Ptpn6-3894
cacuguguagcguccaccc

SEQ ID NO: 23227 - RNA, 20 nt, Artificial Sequence
  Synthetic oligonucleotide: Ptpn6-2664
ccacuguguagcguccaccc

SEQ ID NO: 23228 - RNA, 21 nt, Artificial Sequence
  Synthetic oligonucleotide: Ptpn6-3895
cccacuguguagcguccaccc

SEQ ID NO: 23229 - RNA, 22 nt, Artificial Sequence
  Synthetic oligonucleotide: Ptpn6-3896
acccacuguguagcguccaccc

SEQ ID NO: 23230 - RNA, 23 nt, Artificial Sequence
  Synthetic oligonucleotide: Ptpn6-3897
cacccacuguguagcguccaccc

SEQ ID NO: 23231 - RNA, 24 nt, Artificial Sequence
  Synthetic oligonucleotide: Ptpn6-3898
ccacccacuguguagcguccaccc

SEQ ID NO: 23232 - RNA, 18 nt, Artificial Sequence
  Synthetic oligonucleotide: Ptpn6-3899
ccagccuuggcuguaucc

SEQ ID NO: 23233 - RNA, 19 nt, Artificial Sequence
  Synthetic oligonucleotide: Ptpn6-3900
gccagccuuggcuguaucc

SEQ ID NO: 23234 - RNA, 20 nt, Artificial Sequence
  Synthetic oligonucleotide: Ptpn6-897
agccagccuuggcuguaucc

SEQ ID NO: 23235 - RNA, 21 nt, Artificial Sequence
  Synthetic oligonucleotide: Ptpn6-3901
aagccagccuuggcuguaucc

SEQ ID NO: 23236 - RNA, 22 nt, Artificial Sequence
  Synthetic oligonucleotide: Ptpn6-3902
gaagccagccuuggcuguaucc

SEQ ID NO: 23237 - RNA, 23 nt, Artificial Sequence
  Synthetic oligonucleotide: Ptpn6-3903
agaagccagccuuggcuguaucc

SEQ ID NO: 23238 - RNA, 24 nt, Artificial Sequence
  Synthetic oligonucleotide: Ptpn6-3904
cagaagccagccuuggcuguaucc

SEQ ID NO: 23239 - RNA, 18 nt, Artificial Sequence
  Synthetic oligonucleotide: Ptpn6-3905
ugcaccucaaacuccucc

SEQ ID NO: 23240 - RNA, 19 nt, Artificial Sequence
  Synthetic oligonucleotide: Ptpn6-3906
augcaccucaaacuccucc

SEQ ID NO: 23241 - RNA, 20 nt, Artificial Sequence
  Synthetic oligonucleotide: Ptpn6-3907
caugcaccucaaacuccucc

SEQ ID NO: 23242 - RNA, 21 nt, Artificial Sequence
  Synthetic oligonucleotide: Ptpn6-3908
ccaugcaccucaaacuccucc

SEQ ID NO: 23243 - RNA, 22 nt, Artificial Sequence
  Synthetic oligonucleotide: Ptpn6-3909
accaugcaccucaaacuccucc

SEQ ID NO: 23244 - RNA, 23 nt, Artificial Sequence
  Synthetic oligonucleotide: Ptpn6-3910
caccaugcaccucaaacuccucc

SEQ ID NO: 23245 - RNA, 24 nt, Artificial Sequence
  Synthetic oligonucleotide: Ptpn6-3911
ccaccaugcaccucaaacuccucc

SEQ ID NO: 23246 - RNA, 18 nt, Artificial Sequence
  Synthetic oligonucleotide: Ptpn6-3912
cucccgaaucaggucucc

SEQ ID NO: 23247 - RNA, 19 nt, Artificial Sequence
  Synthetic oligonucleotide: Ptpn6-3913
ucucccgaaucaggucucc

SEQ ID NO: 23248 - RNA, 20 nt, Artificial Sequence
  Synthetic oligonucleotide: Ptpn6-2673
aucucccgaaucaggucucc

SEQ ID NO: 23249 - RNA, 21 nt, Artificial Sequence
  Synthetic oligonucleotide: Ptpn6-3914
gaucucccgaaucaggucucc

SEQ ID NO: 23250 - RNA, 22 nt, Artificial Sequence
  Synthetic oligonucleotide: Ptpn6-3915
agaucucccgaaucaggucucc

SEQ ID NO: 23251 - RNA, 23 nt, Artificial Sequence
  Synthetic oligonucleotide: Ptpn6-3916
cagaucucccgaaucaggucucc

SEQ ID NO: 23252 - RNA, 24 nt, Artificial Sequence
  Synthetic oligonucleotide: Ptpn6-3917
ccagaucucccgaaucaggucucc

SEQ ID NO: 23253 - RNA, 18 nt, Artificial Sequence
  Synthetic oligonucleotide: Ptpn6-3918
uugguggagauguucucc

SEQ ID NO: 23254 - RNA, 19 nt, Artificial Sequence
  Synthetic oligonucleotide: Ptpn6-3919
cuugguggagauguucucc

SEQ ID NO: 23255 - RNA, 20 nt, Artificial Sequence
  Synthetic oligonucleotide: Ptpn6-871
ccuugguggagauguucucc

SEQ ID NO: 23256 - RNA, 21 nt, Artificial Sequence
  Synthetic oligonucleotide: Ptpn6-3920
cccuugguggagauguucucc

SEQ ID NO: 23257 - RNA, 22 nt, Artificial Sequence
  Synthetic oligonucleotide: Ptpn6-3921
acccuugguggagauguucucc

SEQ ID NO: 23258 - RNA, 23 nt, Artificial Sequence
  Synthetic oligonucleotide: Ptpn6-3922
cacccuugguggagauguucucc

SEQ ID NO: 23259 - RNA, 24 nt, Artificial Sequence
  Synthetic oligonucleotide: Ptpn6-3923
ucacccuugguggagauguucucc

SEQ ID NO: 23260 - RNA, 18 nt, Artificial Sequence
  Synthetic oligonucleotide: Ptpn6-3924
aaaugcuccaccaggucc

SEQ ID NO: 23261 - RNA, 19 nt, Artificial Sequence
  Synthetic oligonucleotide: Ptpn6-3925
gaaaugcuccaccaggucc

SEQ ID NO: 23262 - RNA, 20 nt, Artificial Sequence
  Synthetic oligonucleotide: Ptpn6-900
ugaaaugcuccaccaggucc

SEQ ID NO: 23263 - RNA, 21 nt, Artificial Sequence
  Synthetic oligonucleotide: Ptpn6-3926
uugaaaugcuccaccaggucc

SEQ ID NO: 23264 - RNA, 22 nt, Artificial Sequence
  Synthetic oligonucleotide: Ptpn6-3927
cuugaaaugcuccaccaggucc

SEQ ID NO: 23265 - RNA, 23 nt, Artificial Sequence
  Synthetic oligonucleotide: Ptpn6-3928
ucuugaaaugcuccaccaggucc

SEQ ID NO: 23266 - RNA, 24 nt, Artificial Sequence
  Synthetic oligonucleotide: Ptpn6-3929
uucuugaaaugcuccaccaggucc

SEQ ID NO: 23267 - RNA, 18 nt, Artificial Sequence
  Synthetic oligonucleotide: Ptpn6-3930
cgcugguugaucuggucc

SEQ ID NO: 23268 - RNA, 19 nt, Artificial Sequence
  Synthetic oligonucleotide: Ptpn6-3931
ccgcugguugaucuggucc

SEQ ID NO: 23269 - RNA, 20 nt, Artificial Sequence
  Synthetic oligonucleotide: Ptpn6-364
gccgcugguugaucuggucc

SEQ ID NO: 23270 - RNA, 21 nt, Artificial Sequence
  Synthetic oligonucleotide: Ptpn6-3932
ugccgcugguugaucuggucc

SEQ ID NO: 23271 - RNA, 22 nt, Artificial Sequence
  Synthetic oligonucleotide: Ptpn6-3933
cugccgcugguugaucuggucc

SEQ ID NO: 23272 - RNA, 23 nt, Artificial Sequence
  Synthetic oligonucleotide: Ptpn6-3934
ccugccgcugguugaucuggucc

SEQ ID NO: 23273 - RNA, 24 nt, Artificial Sequence
  Synthetic oligonucleotide: Ptpn6-3935
uccugccgcugguugaucuggucc

SEQ ID NO: 23274 - RNA, 18 nt, Artificial Sequence
  Synthetic oligonucleotide: Ptpn6-3936
ccacucacauuguccagc

SEQ ID NO: 23275 - RNA, 19 nt, Artificial Sequence
  Synthetic oligonucleotide: Ptpn6-3937
gccacucacauuguccagc

SEQ ID NO: 23276 - RNA, 20 nt, Artificial Sequence
  Synthetic oligonucleotide: Ptpn6-2675
ggccacucacauuguccagc

SEQ ID NO: 23277 - RNA, 21 nt, Artificial Sequence
  Synthetic oligonucleotide: Ptpn6-3938
gggccacucacauuguccagc

SEQ ID NO: 23278 - RNA, 22 nt, Artificial Sequence
  Synthetic oligonucleotide: Ptpn6-3939
ggggccacucacauuguccagc

SEQ ID NO: 23279 - RNA, 23 nt, Artificial Sequence
  Synthetic oligonucleotide: Ptpn6-3940
gggggccacucacauuguccagc

SEQ ID NO: 23280 - RNA, 24 nt, Artificial Sequence
  Synthetic oligonucleotide: Ptpn6-3941
ugggggccacucacauuguccagc

SEQ ID NO: 23281 - RNA, 18 nt, Artificial Sequence
  Synthetic oligonucleotide: Ptpn6-3942
gcagguagacaaaggcgc

SEQ ID NO: 23282 - RNA, 19 nt, Artificial Sequence
  Synthetic oligonucleotide: Ptpn6-3943
cgcagguagacaaaggcgc

SEQ ID NO: 23283 - RNA, 20 nt, Artificial Sequence
  Synthetic oligonucleotide: Ptpn6-898
ccgcagguagacaaaggcgc

SEQ ID NO: 23284 - RNA, 21 nt, Artificial Sequence
  Synthetic oligonucleotide: Ptpn6-3944
gccgcagguagacaaaggcgc

SEQ ID NO: 23285 - RNA, 22 nt, Artificial Sequence
  Synthetic oligonucleotide: Ptpn6-3945
ugccgcagguagacaaaggcgc

SEQ ID NO: 23286 - RNA, 23 nt, Artificial Sequence
  Synthetic oligonucleotide: Ptpn6-3946
cugccgcagguagacaaaggcgc

SEQ ID NO: 23287 - RNA, 24 nt, Artificial Sequence
  Synthetic oligonucleotide: Ptpn6-3947
ccugccgcagguagacaaaggcgc

SEQ ID NO: 23288 - RNA, 18 nt, Artificial Sequence
  Synthetic oligonucleotide: Ptpn6-3948
augggcauucuucauggc

SEQ ID NO: 23289 - RNA, 19 nt, Artificial Sequence
  Synthetic oligonucleotide: Ptpn6-3949
caugggcauucuucauggc

SEQ ID NO: 23290 - RNA, 20 nt, Artificial Sequence
  Synthetic oligonucleotide: Ptpn6-344
gcaugggcauucuucauggc

SEQ ID NO: 23291 - RNA, 21 nt, Artificial Sequence
  Synthetic oligonucleotide: Ptpn6-3950
ggcaugggcauucuucauggc

SEQ ID NO: 23292 - RNA, 22 nt, Artificial Sequence
  Synthetic oligonucleotide: Ptpn6-3951
uggcaugggcauucuucauggc

SEQ ID NO: 23293 - RNA, 23 nt, Artificial Sequence
  Synthetic oligonucleotide: Ptpn6-3952
uuggcaugggcauucuucauggc

SEQ ID NO: 23294 - RNA, 24 nt, Artificial Sequence
  Synthetic oligonucleotide: Ptpn6-3953
cuuggcaugggcauucuucauggc

SEQ ID NO: 23295 - RNA, 18 nt, Artificial Sequence
  Synthetic oligonucleotide: Ptpn6-3954
ggugcgggaggccuuggc

SEQ ID NO: 23296 - RNA, 19 nt, Artificial Sequence
  Synthetic oligonucleotide: Ptpn6-3955
aggugcgggaggccuuggc

SEQ ID NO: 23297 - RNA, 20 nt, Artificial Sequence
  Synthetic oligonucleotide: Ptpn6-860
gaggugcgggaggccuuggc

SEQ ID NO: 23298 - RNA, 21 nt, Artificial Sequence
  Synthetic oligonucleotide: Ptpn6-3956
cgaggugcgggaggccuuggc

SEQ ID NO: 23299 - RNA, 22 nt, Artificial Sequence
  Synthetic oligonucleotide: Ptpn6-3957
acgaggugcgggaggccuuggc

SEQ ID NO: 23300 - RNA, 23 nt, Artificial Sequence
  Synthetic oligonucleotide: Ptpn6-3958
gacgaggugcgggaggccuuggc

SEQ ID NO: 23301 - RNA, 24 nt, Artificial Sequence
  Synthetic oligonucleotide: Ptpn6-3959
ggacgaggugcgggaggccuuggc

SEQ ID NO: 23302 - RNA, 18 nt, Artificial Sequence
  Synthetic oligonucleotide: Ptpn6-3960
ccuccgucugcaccaugc

SEQ ID NO: 23303 - RNA, 19 nt, Artificial Sequence
  Synthetic oligonucleotide: Ptpn6-3961
gccuccgucugcaccaugc

SEQ ID NO: 23304 - RNA, 20 nt, Artificial Sequence
  Synthetic oligonucleotide: Ptpn6-868
cgccuccgucugcaccaugc

SEQ ID NO: 23305 - RNA, 21 nt, Artificial Sequence
  Synthetic oligonucleotide: Ptpn6-3962
gcgccuccgucugcaccaugc

SEQ ID NO: 23306 - RNA, 22 nt, Artificial Sequence
  Synthetic oligonucleotide: Ptpn6-3963
ugcgccuccgucugcaccaugc

SEQ ID NO: 23307 - RNA, 23 nt, Artificial Sequence
  Synthetic oligonucleotide: Ptpn6-3964
cugcgccuccgucugcaccaugc

SEQ ID NO: 23308 - RNA, 24 nt, Artificial Sequence
  Synthetic oligonucleotide: Ptpn6-3965
acugcgccuccgucugcaccaugc

SEQ ID NO: 23309 - RNA, 18 nt, Artificial Sequence
  Synthetic oligonucleotide: Ptpn6-3966
cacgaugaugggcccugc

SEQ ID NO: 23310 - RNA, 19 nt, Artificial Sequence
  Synthetic oligonucleotide: Ptpn6-3967
gcacgaugaugggcccugc

SEQ ID NO: 23311 - RNA, 20 nt, Artificial Sequence
  Synthetic oligonucleotide: Ptpn6-872
ugcacgaugaugggcccugc

SEQ ID NO: 23312 - RNA, 21 nt, Artificial Sequence
  Synthetic oligonucleotide: Ptpn6-3968
gugcacgaugaugggcccugc

SEQ ID NO: 23313 - RNA, 22 nt, Artificial Sequence
  Synthetic oligonucleotide: Ptpn6-3969
agugcacgaugaugggcccugc

SEQ ID NO: 23314 - RNA, 23 nt, Artificial Sequence
  Synthetic oligonucleotide: Ptpn6-3970
cagugcacgaugaugggcccugc

SEQ ID NO: 23315 - RNA, 24 nt, Artificial Sequence
  Synthetic oligonucleotide: Ptpn6-3971
gcagugcacgaugaugggcccugc

SEQ ID NO: 23316 - RNA, 18 nt, Artificial Sequence
  Synthetic oligonucleotide: Ptpn6-3972
uccugccacgccaucugc

SEQ ID NO: 23317 - RNA, 19 nt, Artificial Sequence
  Synthetic oligonucleotide: Ptpn6-3973
cuccugccacgccaucugc

SEQ ID NO: 23318 - RNA, 20 nt, Artificial Sequence
  Synthetic oligonucleotide: Ptpn6-890
ucuccugccacgccaucugc

SEQ ID NO: 23319 - RNA, 21 nt, Artificial Sequence
  Synthetic oligonucleotide: Ptpn6-3974
uucuccugccacgccaucugc

SEQ ID NO: 23320 - RNA, 22 nt, Artificial Sequence
  Synthetic oligonucleotide: Ptpn6-3975
guucuccugccacgccaucugc

SEQ ID NO: 23321 - RNA, 23 nt, Artificial Sequence
  Synthetic oligonucleotide: Ptpn6-3976
uguucuccugccacgccaucugc

SEQ ID NO: 23322 - RNA, 24 nt, Artificial Sequence
  Synthetic oligonucleotide: Ptpn6-3977
cuguucuccugccacgccaucugc

SEQ ID NO: 23323 - RNA, 18 nt, Artificial Sequence
  Synthetic oligonucleotide: Ptpn6-3978
cucacuuggacgaggugc

SEQ ID NO: 23324 - RNA, 19 nt, Artificial Sequence
  Synthetic oligonucleotide: Ptpn6-3979
acucacuuggacgaggugc

SEQ ID NO: 23325 - RNA, 20 nt, Artificial Sequence
  Synthetic oligonucleotide: Ptpn6-2685
cacucacuuggacgaggugc

SEQ ID NO: 23326 - RNA, 21 nt, Artificial Sequence
  Synthetic oligonucleotide: Ptpn6-3980
ccacucacuuggacgaggugc

SEQ ID NO: 23327 - RNA, 22 nt, Artificial Sequence
  Synthetic oligonucleotide: Ptpn6-3981
gccacucacuuggacgaggugc

SEQ ID NO: 23328 - RNA, 23 nt, Artificial Sequence
  Synthetic oligonucleotide: Ptpn6-3982
ggccacucacuuggacgaggugc

SEQ ID NO: 23329 - RNA, 24 nt, Artificial Sequence
  Synthetic oligonucleotide: Ptpn6-3983
gggccacucacuuggacgaggugc

SEQ ID NO: 23330 - RNA, 18 nt, Artificial Sequence
  Synthetic oligonucleotide: Ptpn6-3984
agcaccgcucacuuccuc

SEQ ID NO: 23331 - RNA, 19 nt, Artificial Sequence
  Synthetic oligonucleotide: Ptpn6-3985
cagcaccgcucacuuccuc

SEQ ID NO: 23332 - RNA, 20 nt, Artificial Sequence
  Synthetic oligonucleotide: Ptpn6-3986
acagcaccgcucacuuccuc

SEQ ID NO: 23333 - RNA, 21 nt, Artificial Sequence
  Synthetic oligonucleotide: Ptpn6-3987
gacagcaccgcucacuuccuc

SEQ ID NO: 23334 - RNA, 22 nt, Artificial Sequence
  Synthetic oligonucleotide: Ptpn6-3988
ggacagcaccgcucacuuccuc

SEQ ID NO: 23335 - RNA, 23 nt, Artificial Sequence
  Synthetic oligonucleotide: Ptpn6-3989
aggacagcaccgcucacuuccuc

SEQ ID NO: 23336 - RNA, 24 nt, Artificial Sequence
  Synthetic oligonucleotide: Ptpn6-3990
gaggacagcaccgcucacuuccuc

SEQ ID NO: 23337 - RNA, 18 nt, Artificial Sequence
  Synthetic oligonucleotide: Ptpn6-3991
ucucccgaaucaggucuc

SEQ ID NO: 23338 - RNA, 19 nt, Artificial Sequence
  Synthetic oligonucleotide: Ptpn6-3992
aucucccgaaucaggucuc

SEQ ID NO: 23339 - RNA, 20 nt, Artificial Sequence
  Synthetic oligonucleotide: Ptpn6-2688
gaucucccgaaucaggucuc

SEQ ID NO: 23340 - RNA, 21 nt, Artificial Sequence
  Synthetic oligonucleotide: Ptpn6-3993
agaucucccgaaucaggucuc

SEQ ID NO: 23341 - RNA, 22 nt, Artificial Sequence
  Synthetic oligonucleotide: Ptpn6-3994
cagaucucccgaaucaggucuc

SEQ ID NO: 23342 - RNA, 23 nt, Artificial Sequence
  Synthetic oligonucleotide: Ptpn6-3995
ccagaucucccgaaucaggucuc

SEQ ID NO: 23343 - RNA, 24 nt, Artificial Sequence
  Synthetic oligonucleotide: Ptpn6-3996
gccagaucucccgaaucaggucuc

SEQ ID NO: 23344 - RNA, 18 nt, Artificial Sequence
  Synthetic oligonucleotide: Ptpn6-3997
ccgcugguugaucugguc

SEQ ID NO: 23345 - RNA, 19 nt, Artificial Sequence
  Synthetic oligonucleotide: Ptpn6-3998
gccgcugguugaucugguc

SEQ ID NO: 23346 - RNA, 20 nt, Artificial Sequence
  Synthetic oligonucleotide: Ptpn6-873
ugccgcugguugaucugguc

SEQ ID NO: 23347 - RNA, 21 nt, Artificial Sequence
  Synthetic oligonucleotide: Ptpn6-3999
cugccgcugguugaucugguc

SEQ ID NO: 23348 - RNA, 22 nt, Artificial Sequence
  Synthetic oligonucleotide: Ptpn6-4000
ccugccgcugguugaucugguc

SEQ ID NO: 23349 - RNA, 23 nt, Artificial Sequence
  Synthetic oligonucleotide: Ptpn6-4001
uccugccgcugguugaucugguc

SEQ ID NO: 23350 - RNA, 24 nt, Artificial Sequence
  Synthetic oligonucleotide: Ptpn6-4002
uuccugccgcugguugaucugguc

SEQ ID NO: 23351 - RNA, 18 nt, Artificial Sequence
  Synthetic oligonucleotide: Ptpn6-4003
uccucaauccccgucuuc

SEQ ID NO: 23352 - RNA, 19 nt, Artificial Sequence
  Synthetic oligonucleotide: Ptpn6-4004
cuccucaauccccgucuuc

SEQ ID NO: 23353 - RNA, 20 nt, Artificial Sequence
  Synthetic oligonucleotide: Ptpn6-899
ccuccucaauccccgucuuc

SEQ ID NO: 23354 - RNA, 21 nt, Artificial Sequence
  Synthetic oligonucleotide: Ptpn6-4005
gccuccucaauccccgucuuc

SEQ ID NO: 23355 - RNA, 22 nt, Artificial Sequence
  Synthetic oligonucleotide: Ptpn6-4006
ggccuccucaauccccgucuuc

SEQ ID NO: 23356 - RNA, 23 nt, Artificial Sequence
  Synthetic oligonucleotide: Ptpn6-4007
aggccuccucaauccccgucuuc

SEQ ID NO: 23357 - RNA, 24 nt, Artificial Sequence
  Synthetic oligonucleotide: Ptpn6-4008
gaggccuccucaauccccgucuuc

SEQ ID NO: 23358 - RNA, 18 nt, Artificial Sequence
  Synthetic oligonucleotide: Ptpn6-4009
uugaucugguccaggaag

SEQ ID NO: 23359 - RNA, 19 nt, Artificial Sequence
  Synthetic oligonucleotide: Ptpn6-4010
guugaucugguccaggaag

SEQ ID NO: 23360 - RNA, 20 nt, Artificial Sequence
  Synthetic oligonucleotide: Ptpn6-875
gguugaucugguccaggaag

SEQ ID NO: 23361 - RNA, 21 nt, Artificial Sequence
  Synthetic oligonucleotide: Ptpn6-4011
ugguugaucugguccaggaag

SEQ ID NO: 23362 - RNA, 22 nt, Artificial Sequence
  Synthetic oligonucleotide: Ptpn6-4012
cugguugaucugguccaggaag

SEQ ID NO: 23363 - RNA, 23 nt, Artificial Sequence
  Synthetic oligonucleotide: Ptpn6-4013
gcugguugaucugguccaggaag

SEQ ID NO: 23364 - RNA, 24 nt, Artificial Sequence
  Synthetic oligonucleotide: Ptpn6-4014
cgcugguugaucugguccaggaag

SEQ ID NO: 23365 - RNA, 18 nt, Artificial Sequence
  Synthetic oligonucleotide: Ptpn6-4015
cagccugggugcucacag

SEQ ID NO: 23366 - RNA, 19 nt, Artificial Sequence
  Synthetic oligonucleotide: Ptpn6-4016
gcagccugggugcucacag

SEQ ID NO: 23367 - RNA, 20 nt, Artificial Sequence
  Synthetic oligonucleotide: Ptpn6-2692
ggcagccugggugcucacag

SEQ ID NO: 23368 - RNA, 21 nt, Artificial Sequence
  Synthetic oligonucleotide: Ptpn6-4017
gggcagccugggugcucacag

SEQ ID NO: 23369 - RNA, 22 nt, Artificial Sequence
  Synthetic oligonucleotide: Ptpn6-4018
ggggcagccugggugcucacag

SEQ ID NO: 23370 - RNA, 23 nt, Artificial Sequence
  Synthetic oligonucleotide: Ptpn6-4019
uggggcagccugggugcucacag

SEQ ID NO: 23371 - RNA, 24 nt, Artificial Sequence
  Synthetic oligonucleotide: Ptpn6-4020
auggggcagccugggugcucacag

SEQ ID NO: 23372 - RNA, 18 nt, Artificial Sequence
  Synthetic oligonucleotide: Ptpn6-4021
gucaaugucacaguccag

SEQ ID NO: 23373 - RNA, 19 nt, Artificial Sequence
  Synthetic oligonucleotide: Ptpn6-4022
ugucaaugucacaguccag

SEQ ID NO: 23374 - RNA, 20 nt, Artificial Sequence
  Synthetic oligonucleotide: Ptpn6-4023
augucaaugucacaguccag

SEQ ID NO: 23375 - RNA, 21 nt, Artificial Sequence
  Synthetic oligonucleotide: Ptpn6-4024
gaugucaaugucacaguccag

SEQ ID NO: 23376 - RNA, 22 nt, Artificial Sequence
  Synthetic oligonucleotide: Ptpn6-4025
ggaugucaaugucacaguccag

SEQ ID NO: 23377 - RNA, 23 nt, Artificial Sequence
  Synthetic oligonucleotide: Ptpn6-4026
uggaugucaaugucacaguccag

SEQ ID NO: 23378 - RNA, 24 nt, Artificial Sequence
  Synthetic oligonucleotide: Ptpn6-4027
cuggaugucaaugucacaguccag

SEQ ID NO: 23379 - RNA, 18 nt, Artificial Sequence
  Synthetic oligonucleotide: Ptpn6-4028
gccacucacauuguccag

SEQ ID NO: 23380 - RNA, 19 nt, Artificial Sequence
  Synthetic oligonucleotide: Ptpn6-4029
ggccacucacauuguccag

SEQ ID NO: 23381 - RNA, 20 nt, Artificial Sequence
  Synthetic oligonucleotide: Ptpn6-2693
gggccacucacauuguccag

SEQ ID NO: 23382 - RNA, 21 nt, Artificial Sequence
  Synthetic oligonucleotide: Ptpn6-4030
ggggccacucacauuguccag

SEQ ID NO: 23383 - RNA, 22 nt, Artificial Sequence
  Synthetic oligonucleotide: Ptpn6-4031
gggggccacucacauuguccag

SEQ ID NO: 23384 - RNA, 23 nt, Artificial Sequence
  Synthetic oligonucleotide: Ptpn6-4032
ugggggccacucacauuguccag

SEQ ID NO: 23385 - RNA, 24 nt, Artificial Sequence
  Synthetic oligonucleotide: Ptpn6-4033
gugggggccacucacauuguccag

SEQ ID NO: 23386 - RNA, 18 nt, Artificial Sequence
  Synthetic oligonucleotide: Ptpn6-4034
ccgcaguuggucacagag

SEQ ID NO: 23387 - RNA, 19 nt, Artificial Sequence
  Synthetic oligonucleotide: Ptpn6-4035
cccgcaguuggucacagag

SEQ ID NO: 23388 - RNA, 20 nt, Artificial Sequence
  Synthetic oligonucleotide: Ptpn6-885
ccccgcaguuggucacagag

SEQ ID NO: 23389 - RNA, 21 nt, Artificial Sequence
  Synthetic oligonucleotide: Ptpn6-4036
uccccgcaguuggucacagag

SEQ ID NO: 23390 - RNA, 22 nt, Artificial Sequence
  Synthetic oligonucleotide: Ptpn6-4037
cuccccgcaguuggucacagag

SEQ ID NO: 23391 - RNA, 23 nt, Artificial Sequence
  Synthetic oligonucleotide: Ptpn6-4038
gcuccccgcaguuggucacagag

SEQ ID NO: 23392 - RNA, 24 nt, Artificial Sequence
  Synthetic oligonucleotide: Ptpn6-4039
ugcuccccgcaguuggucacagag

SEQ ID NO: 23393 - RNA, 18 nt, Artificial Sequence
  Synthetic oligonucleotide: Ptpn6-4040
ugggcgauggccacguag

SEQ ID NO: 23394 - RNA, 19 nt, Artificial Sequence
  Synthetic oligonucleotide: Ptpn6-4041
cugggcgauggccacguag

SEQ ID NO: 23395 - RNA, 20 nt, Artificial Sequence
  Synthetic oligonucleotide: Ptpn6-867
acugggcgauggccacguag

SEQ ID NO: 23396 - RNA, 21 nt, Artificial Sequence
  Synthetic oligonucleotide: Ptpn6-4042
aacugggcgauggccacguag

SEQ ID NO: 23397 - RNA, 22 nt, Artificial Sequence
  Synthetic oligonucleotide: Ptpn6-4043
gaacugggcgauggccacguag

SEQ ID NO: 23398 - RNA, 23 nt, Artificial Sequence
  Synthetic oligonucleotide: Ptpn6-4044
ugaacugggcgauggccacguag

SEQ ID NO: 23399 - RNA, 24 nt, Artificial Sequence
  Synthetic oligonucleotide: Ptpn6-4045
augaacugggcgauggccacguag

SEQ ID NO: 23400 - RNA, 18 nt, Artificial Sequence
  Synthetic oligonucleotide: Ptpn6-4046
uaguuggcauugauguag

SEQ ID NO: 23401 - RNA, 19 nt, Artificial Sequence
  Synthetic oligonucleotide: Ptpn6-4047
guaguuggcauugauguag

SEQ ID NO: 23402 - RNA, 20 nt, Artificial Sequence
  Synthetic oligonucleotide: Ptpn6-892
uguaguuggcauugauguag

SEQ ID NO: 23403 - RNA, 21 nt, Artificial Sequence
  Synthetic oligonucleotide: Ptpn6-4048
auguaguuggcauugauguag

SEQ ID NO: 23404 - RNA, 22 nt, Artificial Sequence
  Synthetic oligonucleotide: Ptpn6-4049
gauguaguuggcauugauguag

SEQ ID NO: 23405 - RNA, 23 nt, Artificial Sequence
  Synthetic oligonucleotide: Ptpn6-4050
ugauguaguuggcauugauguag

SEQ ID NO: 23406 - RNA, 24 nt, Artificial Sequence
  Synthetic oligonucleotide: Ptpn6-4051
uugauguaguuggcauugauguag

SEQ ID NO: 23407 - RNA, 18 nt, Artificial Sequence
  Synthetic oligonucleotide: Ptpn6-4052
cacucacauuguccagcg

SEQ ID NO: 23408 - RNA, 19 nt, Artificial Sequence
  Synthetic oligonucleotide: Ptpn6-4053
ccacucacauuguccagcg

SEQ ID NO: 23409 - RNA, 20 nt, Artificial Sequence
  Synthetic oligonucleotide: Ptpn6-2704
gccacucacauuguccagcg

SEQ ID NO: 23410 - RNA, 21 nt, Artificial Sequence
  Synthetic oligonucleotide: Ptpn6-4054
ggccacucacauuguccagcg

SEQ ID NO: 23411 - RNA, 22 nt, Artificial Sequence
  Synthetic oligonucleotide: Ptpn6-4055
gggccacucacauuguccagcg

SEQ ID NO: 23412 - RNA, 23 nt, Artificial Sequence
  Synthetic oligonucleotide: Ptpn6-4056
ggggccacucacauuguccagcg

SEQ ID NO: 23413 - RNA, 24 nt, Artificial Sequence
  Synthetic oligonucleotide: Ptpn6-4057
gggggccacucacauuguccagcg

SEQ ID NO: 23414 - RNA, 18 nt, Artificial Sequence
  Synthetic oligonucleotide: Ptpn6-4058
uguagcguccacccuggg

SEQ ID NO: 23415 - RNA, 19 nt, Artificial Sequence
  Synthetic oligonucleotide: Ptpn6-4059
guguagcguccacccuggg

SEQ ID NO: 23416 - RNA, 20 nt, Artificial Sequence
  Synthetic oligonucleotide: Ptpn6-2720
uguguagcguccacccuggg

SEQ ID NO: 23417 - RNA, 21 nt, Artificial Sequence
  Synthetic oligonucleotide: Ptpn6-4060
cuguguagcguccacccuggg

SEQ ID NO: 23418 - RNA, 22 nt, Artificial Sequence
  Synthetic oligonucleotide: Ptpn6-4061
acuguguagcguccacccuggg

SEQ ID NO: 23419 - RNA, 23 nt, Artificial Sequence
  Synthetic oligonucleotide: Ptpn6-4062
cacuguguagcguccacccuggg

SEQ ID NO: 23420 - RNA, 24 nt, Artificial Sequence
  Synthetic oligonucleotide: Ptpn6-4063
ccacuguguagcguccacccuggg

SEQ ID NO: 23421 - RNA, 18 nt, Artificial Sequence
  Synthetic oligonucleotide: Ptpn6-4064
caaacucugagauguggg

SEQ ID NO: 23422 - RNA, 19 nt, Artificial Sequence
  Synthetic oligonucleotide: Ptpn6-4065
gcaaacucugagauguggg

SEQ ID NO: 23423 - RNA, 20 nt, Artificial Sequence
  Synthetic oligonucleotide: Ptpn6-2723
ugcaaacucugagauguggg

SEQ ID NO: 23424 - RNA, 21 nt, Artificial Sequence
  Synthetic oligonucleotide: Ptpn6-4066
cugcaaacucugagauguggg

SEQ ID NO: 23425 - RNA, 22 nt, Artificial Sequence
  Synthetic oligonucleotide: Ptpn6-4067
ucugcaaacucugagauguggg

SEQ ID NO: 23426 - RNA, 23 nt, Artificial Sequence
  Synthetic oligonucleotide: Ptpn6-4068
uucugcaaacucugagauguggg

SEQ ID NO: 23427 - RNA, 24 nt, Artificial Sequence
  Synthetic oligonucleotide: Ptpn6-4069
cuucugcaaacucugagauguggg

SEQ ID NO: 23428 - RNA, 18 nt, Artificial Sequence
  Synthetic oligonucleotide: Ptpn6-4070
ucacuggggaccccaugg

SEQ ID NO: 23429 - RNA, 19 nt, Artificial Sequence
  Synthetic oligonucleotide: Ptpn6-4071
cucacuggggaccccaugg

SEQ ID NO: 23430 - RNA, 20 nt, Artificial Sequence
  Synthetic oligonucleotide: Ptpn6-880
gcucacuggggaccccaugg

SEQ ID NO: 23431 - RNA, 21 nt, Artificial Sequence
  Synthetic oligonucleotide: Ptpn6-4072
ggcucacuggggaccccaugg

SEQ ID NO: 23432 - RNA, 22 nt, Artificial Sequence
  Synthetic oligonucleotide: Ptpn6-4073
aggcucacuggggaccccaugg

SEQ ID NO: 23433 - RNA, 23 nt, Artificial Sequence
  Synthetic oligonucleotide: Ptpn6-4074
caggcucacuggggaccccaugg

SEQ ID NO: 23434 - RNA, 24 nt, Artificial Sequence
  Synthetic oligonucleotide: Ptpn6-4075
ccaggcucacuggggaccccaugg

SEQ ID NO: 23435 - RNA, 18 nt, Artificial Sequence
  Synthetic oligonucleotide: Ptpn6-4076
caugggcauucuucaugg

SEQ ID NO: 23436 - RNA, 19 nt, Artificial Sequence
  Synthetic oligonucleotide: Ptpn6-4077
gcaugggcauucuucaugg

SEQ ID NO: 23437 - RNA, 20 nt, Artificial Sequence
  Synthetic oligonucleotide: Ptpn6-861
ggcaugggcauucuucaugg

SEQ ID NO: 23438 - RNA, 21 nt, Artificial Sequence
  Synthetic oligonucleotide: Ptpn6-4078
uggcaugggcauucuucaugg

SEQ ID NO: 23439 - RNA, 22 nt, Artificial Sequence
  Synthetic oligonucleotide: Ptpn6-4079
uuggcaugggcauucuucaugg

SEQ ID NO: 23440 - RNA, 23 nt, Artificial Sequence
  Synthetic oligonucleotide: Ptpn6-4080
cuuggcaugggcauucuucaugg

SEQ ID NO: 23441 - RNA, 24 nt, Artificial Sequence
  Synthetic oligonucleotide: Ptpn6-4081
ccuuggcaugggcauucuucaugg

SEQ ID NO: 23442 - RNA, 18 nt, Artificial Sequence
  Synthetic oligonucleotide: Ptpn6-4082
guguagcguccacccugg

SEQ ID NO: 23443 - RNA, 19 nt, Artificial Sequence
  Synthetic oligonucleotide: Ptpn6-4083
uguguagcguccacccugg

SEQ ID NO: 23444 - RNA, 20 nt, Artificial Sequence
  Synthetic oligonucleotide: Ptpn6-2726
cuguguagcguccacccugg

SEQ ID NO: 23445 - RNA, 21 nt, Artificial Sequence
  Synthetic oligonucleotide: Ptpn6-4084
acuguguagcguccacccugg

SEQ ID NO: 23446 - RNA, 22 nt, Artificial Sequence
  Synthetic oligonucleotide: Ptpn6-4085
cacuguguagcguccacccugg

SEQ ID NO: 23447 - RNA, 23 nt, Artificial Sequence
  Synthetic oligonucleotide: Ptpn6-4086
ccacuguguagcguccacccugg

SEQ ID NO: 23448 - RNA, 24 nt, Artificial Sequence
  Synthetic oligonucleotide: Ptpn6-4087
cccacuguguagcguccacccugg

SEQ ID NO: 23449 - RNA, 18 nt, Artificial Sequence
  Synthetic oligonucleotide: Ptpn6-4088
gcaaacucugagaugugg

SEQ ID NO: 23450 - RNA, 19 nt, Artificial Sequence
  Synthetic oligonucleotide: Ptpn6-4089
ugcaaacucugagaugugg

SEQ ID NO: 23451 - RNA, 20 nt, Artificial Sequence
  Synthetic oligonucleotide: Ptpn6-4090
cugcaaacucugagaugugg

SEQ ID NO: 23452 - RNA, 21 nt, Artificial Sequence
  Synthetic oligonucleotide: Ptpn6-4091
ucugcaaacucugagaugugg

SEQ ID NO: 23453 - RNA, 22 nt, Artificial Sequence
  Synthetic oligonucleotide: Ptpn6-4092
uucugcaaacucugagaugugg

SEQ ID NO: 23454 - RNA, 23 nt, Artificial Sequence
  Synthetic oligonucleotide: Ptpn6-4093
cuucugcaaacucugagaugugg

SEQ ID NO: 23455 - RNA, 24 nt, Artificial Sequence
  Synthetic oligonucleotide: Ptpn6-4094
gcuucugcaaacucugagaugugg

SEQ ID NO: 23456 - RNA, 18 nt, Artificial Sequence
  Synthetic oligonucleotide: Ptpn6-4095
ucagggccacucacuugg

SEQ ID NO: 23457 - RNA, 19 nt, Artificial Sequence
  Synthetic oligonucleotide: Ptpn6-4096
gucagggccacucacuugg

SEQ ID NO: 23458 - RNA, 20 nt, Artificial Sequence
  Synthetic oligonucleotide: Ptpn6-4097
agucagggccacucacuugg

SEQ ID NO: 23459 - RNA, 21 nt, Artificial Sequence
  Synthetic oligonucleotide: Ptpn6-4098
cagucagggccacucacuugg

SEQ ID NO: 23460 - RNA, 22 nt, Artificial Sequence
  Synthetic oligonucleotide: Ptpn6-4099
gcagucagggccacucacuugg

SEQ ID NO: 23461 - RNA, 23 nt, Artificial Sequence
  Synthetic oligonucleotide: Ptpn6-4100
ggcagucagggccacucacuugg

SEQ ID NO: 23462 - RNA, 24 nt, Artificial Sequence
  Synthetic oligonucleotide: Ptpn6-4101
uggcagucagggccacucacuugg

SEQ ID NO: 23463 - RNA, 18 nt, Artificial Sequence
  Synthetic oligonucleotide: Ptpn6-4102
ggugccccucacccuugg

SEQ ID NO: 23464 - RNA, 19 nt, Artificial Sequence
  Synthetic oligonucleotide: Ptpn6-4103
aggugccccucacccuugg

SEQ ID NO: 23465 - RNA, 20 nt, Artificial Sequence
  Synthetic oligonucleotide: Ptpn6-2728
caggugccccucacccuugg

SEQ ID NO: 23466 - RNA, 21 nt, Artificial Sequence
  Synthetic oligonucleotide: Ptpn6-4104
ccaggugccccucacccuugg

SEQ ID NO: 23467 - RNA, 22 nt, Artificial Sequence
  Synthetic oligonucleotide: Ptpn6-4105
cccaggugccccucacccuugg

SEQ ID NO: 23468 - RNA, 23 nt, Artificial Sequence
  Synthetic oligonucleotide: Ptpn6-4106
ccccaggugccccucacccuugg

SEQ ID NO: 23469 - RNA, 24 nt, Artificial Sequence
  Synthetic oligonucleotide: Ptpn6-4107
cccccaggugccccucacccuugg

SEQ ID NO: 23470 - RNA, 18 nt, Artificial Sequence
  Synthetic oligonucleotide: Ptpn6-4108
caccugcagugcacgaug

SEQ ID NO: 23471 - RNA, 19 nt, Artificial Sequence
  Synthetic oligonucleotide: Ptpn6-4109
ucaccugcagugcacgaug

SEQ ID NO: 23472 - RNA, 20 nt, Artificial Sequence
  Synthetic oligonucleotide: Ptpn6-4110
cucaccugcagugcacgaug

SEQ ID NO: 23473 - RNA, 21 nt, Artificial Sequence
  Synthetic oligonucleotide: Ptpn6-4111
ccucaccugcagugcacgaug

SEQ ID NO: 23474 - RNA, 22 nt, Artificial Sequence
  Synthetic oligonucleotide: Ptpn6-4112
uccucaccugcagugcacgaug

SEQ ID NO: 23475 - RNA, 23 nt, Artificial Sequence
  Synthetic oligonucleotide: Ptpn6-4113
auccucaccugcagugcacgaug

SEQ ID NO: 23476 - RNA, 24 nt, Artificial Sequence
  Synthetic oligonucleotide: Ptpn6-4114
cauccucaccugcagugcacgaug

SEQ ID NO: 23477 - RNA, 18 nt, Artificial Sequence
  Synthetic oligonucleotide: Ptpn6-4115
cugcucugcacgcaccug

SEQ ID NO: 23478 - RNA, 19 nt, Artificial Sequence
  Synthetic oligonucleotide: Ptpn6-4116
ccugcucugcacgcaccug

SEQ ID NO: 23479 - RNA, 20 nt, Artificial Sequence
  Synthetic oligonucleotide: Ptpn6-4117
cccugcucugcacgcaccug

SEQ ID NO: 23480 - RNA, 21 nt, Artificial Sequence
  Synthetic oligonucleotide: Ptpn6-4118
gcccugcucugcacgcaccug

SEQ ID NO: 23481 - RNA, 22 nt, Artificial Sequence
  Synthetic oligonucleotide: Ptpn6-4119
ggcccugcucugcacgcaccug

SEQ ID NO: 23482 - RNA, 23 nt, Artificial Sequence
  Synthetic oligonucleotide: Ptpn6-4120
aggcccugcucugcacgcaccug

SEQ ID NO: 23483 - RNA, 24 nt, Artificial Sequence
  Synthetic oligonucleotide: Ptpn6-4121
caggcccugcucugcacgcaccug

SEQ ID NO: 23484 - RNA, 18 nt, Artificial Sequence
  Synthetic oligonucleotide: Ptpn6-4122
uguguagcguccacccug

SEQ ID NO: 23485 - RNA, 19 nt, Artificial Sequence
  Synthetic oligonucleotide: Ptpn6-4123
cuguguagcguccacccug

SEQ ID NO: 23486 - RNA, 20 nt, Artificial Sequence
  Synthetic oligonucleotide: Ptpn6-2734
acuguguagcguccacccug

SEQ ID NO: 23487 - RNA, 21 nt, Artificial Sequence
  Synthetic oligonucleotide: Ptpn6-4124
cacuguguagcguccacccug

SEQ ID NO: 23488 - RNA, 22 nt, Artificial Sequence
  Synthetic oligonucleotide: Ptpn6-4125
ccacuguguagcguccacccug

SEQ ID NO: 23489 - RNA, 23 nt, Artificial Sequence
  Synthetic oligonucleotide: Ptpn6-4126
cccacuguguagcguccacccug

SEQ ID NO: 23490 - RNA, 24 nt, Artificial Sequence
  Synthetic oligonucleotide: Ptpn6-4127
acccacuguguagcguccacccug

SEQ ID NO: 23491 - RNA, 18 nt, Artificial Sequence
  Synthetic oligonucleotide: Ptpn6-4128
accagguccgugaggcug

SEQ ID NO: 23492 - RNA, 19 nt, Artificial Sequence
  Synthetic oligonucleotide: Ptpn6-4129
caccagguccgugaggcug

SEQ ID NO: 23493 - RNA, 20 nt, Artificial Sequence
  Synthetic oligonucleotide: Ptpn6-901
ccaccagguccgugaggcug

SEQ ID NO: 23494 - RNA, 21 nt, Artificial Sequence
  Synthetic oligonucleotide: Ptpn6-4130
uccaccagguccgugaggcug

SEQ ID NO: 23495 - RNA, 22 nt, Artificial Sequence
  Synthetic oligonucleotide: Ptpn6-4131
cuccaccagguccgugaggcug

SEQ ID NO: 23496 - RNA, 23 nt, Artificial Sequence
  Synthetic oligonucleotide: Ptpn6-4132
gcuccaccagguccgugaggcug

SEQ ID NO: 23497 - RNA, 24 nt, Artificial Sequence
  Synthetic oligonucleotide: Ptpn6-4133
ugcuccaccagguccgugaggcug

SEQ ID NO: 23498 - RNA, 18 nt, Artificial Sequence
  Synthetic oligonucleotide: Ptpn6-4134
acucacuuggacgaggug

SEQ ID NO: 23499 - RNA, 19 nt, Artificial Sequence
  Synthetic oligonucleotide: Ptpn6-4135
cacucacuuggacgaggug

SEQ ID NO: 23500 - RNA, 20 nt, Artificial Sequence
  Synthetic oligonucleotide: Ptpn6-2739
ccacucacuuggacgaggug

SEQ ID NO: 23501 - RNA, 21 nt, Artificial Sequence
  Synthetic oligonucleotide: Ptpn6-4136
gccacucacuuggacgaggug

SEQ ID NO: 23502 - RNA, 22 nt, Artificial Sequence
  Synthetic oligonucleotide: Ptpn6-4137
ggccacucacuuggacgaggug

SEQ ID NO: 23503 - RNA, 23 nt, Artificial Sequence
  Synthetic oligonucleotide: Ptpn6-4138
gggccacucacuuggacgaggug

SEQ ID NO: 23504 - RNA, 24 nt, Artificial Sequence
  Synthetic oligonucleotide: Ptpn6-4139
agggccacucacuuggacgaggug

SEQ ID NO: 23505 - RNA, 18 nt, Artificial Sequence
  Synthetic oligonucleotide: Ptpn6-4140
aacucugagaugugggug

SEQ ID NO: 23506 - RNA, 19 nt, Artificial Sequence
  Synthetic oligonucleotide: Ptpn6-4141
aaacucugagaugugggug

SEQ ID NO: 23507 - RNA, 20 nt, Artificial Sequence
  Synthetic oligonucleotide: Ptpn6-2742
caaacucugagaugugggug

SEQ ID NO: 23508 - RNA, 21 nt, Artificial Sequence
  Synthetic oligonucleotide: Ptpn6-4142
gcaaacucugagaugugggug

SEQ ID NO: 23509 - RNA, 22 nt, Artificial Sequence
  Synthetic oligonucleotide: Ptpn6-4143
ugcaaacucugagaugugggug

SEQ ID NO: 23510 - RNA, 23 nt, Artificial Sequence
  Synthetic oligonucleotide: Ptpn6-4144
cugcaaacucugagaugugggug

SEQ ID NO: 23511 - RNA, 24 nt, Artificial Sequence
  Synthetic oligonucleotide: Ptpn6-4145
ucugcaaacucugagaugugggug

SEQ ID NO: 23512 - RNA, 18 nt, Artificial Sequence
  Synthetic oligonucleotide: Ptpn6-4146
aggugccccucacccuug

SEQ ID NO: 23513 - RNA, 19 nt, Artificial Sequence
  Synthetic oligonucleotide: Ptpn6-4147
caggugccccucacccuug

SEQ ID NO: 23514 - RNA, 20 nt, Artificial Sequence
  Synthetic oligonucleotide: Ptpn6-4148
ccaggugccccucacccuug

SEQ ID NO: 23515 - RNA, 21 nt, Artificial Sequence
  Synthetic oligonucleotide: Ptpn6-4149
cccaggugccccucacccuug

SEQ ID NO: 23516 - RNA, 22 nt, Artificial Sequence
  Synthetic oligonucleotide: Ptpn6-4150
ccccaggugccccucacccuug

SEQ ID NO: 23517 - RNA, 23 nt, Artificial Sequence
  Synthetic oligonucleotide: Ptpn6-4151
cccccaggugccccucacccuug

SEQ ID NO: 23518 - RNA, 24 nt, Artificial Sequence
  Synthetic oligonucleotide: Ptpn6-4152
acccccaggugccccucacccuug

SEQ ID NO: 23519 - RNA, 18 nt, Artificial Sequence
  Synthetic oligonucleotide: Ptpn6-4153
accgcucacuuccucuug

SEQ ID NO: 23520 - RNA, 19 nt, Artificial Sequence
  Synthetic oligonucleotide: Ptpn6-4154
caccgcucacuuccucuug

SEQ ID NO: 23521 - RNA, 20 nt, Artificial Sequence
  Synthetic oligonucleotide: Ptpn6-2744
gcaccgcucacuuccucuug

SEQ ID NO: 23522 - RNA, 21 nt, Artificial Sequence
  Synthetic oligonucleotide: Ptpn6-4155
agcaccgcucacuuccucuug

SEQ ID NO: 23523 - RNA, 22 nt, Artificial Sequence
  Synthetic oligonucleotide: Ptpn6-4156
cagcaccgcucacuuccucuug

SEQ ID NO: 23524 - RNA, 23 nt, Artificial Sequence
  Synthetic oligonucleotide: Ptpn6-4157
acagcaccgcucacuuccucuug

SEQ ID NO: 23525 - RNA, 24 nt, Artificial Sequence
  Synthetic oligonucleotide: Ptpn6-4158
gacagcaccgcucacuuccucuug

SEQ ID NO: 23526 - RNA, 18 nt, Artificial Sequence
  Synthetic oligonucleotide: Ptpn6-4159
aggucuuagcguucucau

SEQ ID NO: 23527 - RNA, 19 nt, Artificial Sequence
  Synthetic oligonucleotide: Ptpn6-4160
uaggucuuagcguucucau

SEQ ID NO: 23528 - RNA, 20 nt, Artificial Sequence
  Synthetic oligonucleotide: Ptpn6-891
guaggucuuagcguucucau

SEQ ID NO: 23529 - RNA, 21 nt, Artificial Sequence
  Synthetic oligonucleotide: Ptpn6-4161
uguaggucuuagcguucucau

SEQ ID NO: 23530 - RNA, 22 nt, Artificial Sequence
  Synthetic oligonucleotide: Ptpn6-4162
auguaggucuuagcguucucau

SEQ ID NO: 23531 - RNA, 23 nt, Artificial Sequence
  Synthetic oligonucleotide: Ptpn6-4163
gauguaggucuuagcguucucau

SEQ ID NO: 23532 - RNA, 24 nt, Artificial Sequence
  Synthetic oligonucleotide: Ptpn6-4164
cgauguaggucuuagcguucucau

SEQ ID NO: 23533 - RNA, 18 nt, Artificial Sequence
  Synthetic oligonucleotide: Ptpn6-4165
cuccugcuucugcaaacu

SEQ ID NO: 23534 - RNA, 19 nt, Artificial Sequence
  Synthetic oligonucleotide: Ptpn6-4166
ccuccugcuucugcaaacu

SEQ ID NO: 23535 - RNA, 20 nt, Artificial Sequence
  Synthetic oligonucleotide: Ptpn6-4167
accuccugcuucugcaaacu

SEQ ID NO: 23536 - RNA, 21 nt, Artificial Sequence
  Synthetic oligonucleotide: Ptpn6-4168
caccuccugcuucugcaaacu

SEQ ID NO: 23537 - RNA, 22 nt, Artificial Sequence
  Synthetic oligonucleotide: Ptpn6-4169
ucaccuccugcuucugcaaacu

SEQ ID NO: 23538 - RNA, 23 nt, Artificial Sequence
  Synthetic oligonucleotide: Ptpn6-4170
uucaccuccugcuucugcaaacu

SEQ ID NO: 23539 - RNA, 24 nt, Artificial Sequence
  Synthetic oligonucleotide: Ptpn6-4171
cuucaccuccugcuucugcaaacu

SEQ ID NO: 23540 - RNA, 18 nt, Artificial Sequence
  Synthetic oligonucleotide: Ptpn6-4172
gacacccccaggcucacu

SEQ ID NO: 23541 - RNA, 19 nt, Artificial Sequence
  Synthetic oligonucleotide: Ptpn6-4173
ggacacccccaggcucacu

SEQ ID NO: 23542 - RNA, 20 nt, Artificial Sequence
  Synthetic oligonucleotide: Ptpn6-368
aggacacccccaggcucacu

SEQ ID NO: 23543 - RNA, 21 nt, Artificial Sequence
  Synthetic oligonucleotide: Ptpn6-4174
gaggacacccccaggcucacu

SEQ ID NO: 23544 - RNA, 22 nt, Artificial Sequence
  Synthetic oligonucleotide: Ptpn6-4175
ugaggacacccccaggcucacu

SEQ ID NO: 23545 - RNA, 23 nt, Artificial Sequence
  Synthetic oligonucleotide: Ptpn6-4176
cugaggacacccccaggcucacu

SEQ ID NO: 23546 - RNA, 24 nt, Artificial Sequence
  Synthetic oligonucleotide: Ptpn6-4177
gcugaggacacccccaggcucacu

SEQ ID NO: 23547 - RNA, 18 nt, Artificial Sequence
  Synthetic oligonucleotide: Ptpn6-4178
cuguguagcguccacccu

SEQ ID NO: 23548 - RNA, 19 nt, Artificial Sequence
  Synthetic oligonucleotide: Ptpn6-4179
acuguguagcguccacccu

SEQ ID NO: 23549 - RNA, 20 nt, Artificial Sequence
  Synthetic oligonucleotide: Ptpn6-2752
cacuguguagcguccacccu

SEQ ID NO: 23550 - RNA, 21 nt, Artificial Sequence
  Synthetic oligonucleotide: Ptpn6-4180
ccacuguguagcguccacccu

SEQ ID NO: 23551 - RNA, 22 nt, Artificial Sequence
  Synthetic oligonucleotide: Ptpn6-4181
cccacuguguagcguccacccu

SEQ ID NO: 23552 - RNA, 23 nt, Artificial Sequence
  Synthetic oligonucleotide: Ptpn6-4182
acccacuguguagcguccacccu

SEQ ID NO: 23553 - RNA, 24 nt, Artificial Sequence
  Synthetic oligonucleotide: Ptpn6-4183
cacccacuguguagcguccacccu

SEQ ID NO: 23554 - RNA, 18 nt, Artificial Sequence
  Synthetic oligonucleotide: Ptpn6-4184
gaucugguccaggaagcu

SEQ ID NO: 23555 - RNA, 19 nt, Artificial Sequence
  Synthetic oligonucleotide: Ptpn6-4185
ugaucugguccaggaagcu

SEQ ID NO: 23556 - RNA, 20 nt, Artificial Sequence
  Synthetic oligonucleotide: Ptpn6-876
uugaucugguccaggaagcu

SEQ ID NO: 23557 - RNA, 21 nt, Artificial Sequence
  Synthetic oligonucleotide: Ptpn6-4186
guugaucugguccaggaagcu

SEQ ID NO: 23558 - RNA, 22 nt, Artificial Sequence
  Synthetic oligonucleotide: Ptpn6-4187
gguugaucugguccaggaagcu

SEQ ID NO: 23559 - RNA, 23 nt, Artificial Sequence
  Synthetic oligonucleotide: Ptpn6-4188
ugguugaucugguccaggaagcu

SEQ ID NO: 23560 - RNA, 24 nt, Artificial Sequence
  Synthetic oligonucleotide: Ptpn6-4189
cugguugaucugguccaggaagcu

SEQ ID NO: 23561 - RNA, 18 nt, Artificial Sequence
  Synthetic oligonucleotide: Ptpn6-4190
ugggcauucuucauggcu

SEQ ID NO: 23562 - RNA, 19 nt, Artificial Sequence
  Synthetic oligonucleotide: Ptpn6-4191
augggcauucuucauggcu

SEQ ID NO: 23563 - RNA, 20 nt, Artificial Sequence
  Synthetic oligonucleotide: Ptpn6-345
caugggcauucuucauggcu

SEQ ID NO: 23564 - RNA, 21 nt, Artificial Sequence
  Synthetic oligonucleotide: Ptpn6-4192
gcaugggcauucuucauggcu

SEQ ID NO: 23565 - RNA, 22 nt, Artificial Sequence
  Synthetic oligonucleotide: Ptpn6-4193
ggcaugggcauucuucauggcu

SEQ ID NO: 23566 - RNA, 23 nt, Artificial Sequence
  Synthetic oligonucleotide: Ptpn6-4194
uggcaugggcauucuucauggcu

SEQ ID NO: 23567 - RNA, 24 nt, Artificial Sequence
  Synthetic oligonucleotide: Ptpn6-4195
uuggcaugggcauucuucauggcu

SEQ ID NO: 23568 - RNA, 18 nt, Artificial Sequence
  Synthetic oligonucleotide: Ptpn6-4196
aucucccgaaucaggucu

SEQ ID NO: 23569 - RNA, 19 nt, Artificial Sequence
  Synthetic oligonucleotide: Ptpn6-4197
gaucucccgaaucaggucu

SEQ ID NO: 23570 - RNA, 20 nt, Artificial Sequence
  Synthetic oligonucleotide: Ptpn6-4198
agaucucccgaaucaggucu

SEQ ID NO: 23571 - RNA, 21 nt, Artificial Sequence
  Synthetic oligonucleotide: Ptpn6-4199
cagaucucccgaaucaggucu

SEQ ID NO: 23572 - RNA, 22 nt, Artificial Sequence
  Synthetic oligonucleotide: Ptpn6-4200
ccagaucucccgaaucaggucu

SEQ ID NO: 23573 - RNA, 23 nt, Artificial Sequence
  Synthetic oligonucleotide: Ptpn6-4201
gccagaucucccgaaucaggucu

SEQ ID NO: 23574 - RNA, 24 nt, Artificial Sequence
  Synthetic oligonucleotide: Ptpn6-4202
ugccagaucucccgaaucaggucu

SEQ ID NO: 23575 - RNA, 18 nt, Artificial Sequence
  Synthetic oligonucleotide: Ptpn6-4203
ccgacuccuggcccuucu

SEQ ID NO: 23576 - RNA, 19 nt, Artificial Sequence
  Synthetic oligonucleotide: Ptpn6-4204
uccgacuccuggcccuucu

SEQ ID NO: 23577 - RNA, 20 nt, Artificial Sequence
  Synthetic oligonucleotide: Ptpn6-4205
cuccgacuccuggcccuucu

SEQ ID NO: 23578 - RNA, 21 nt, Artificial Sequence
  Synthetic oligonucleotide: Ptpn6-4206
acuccgacuccuggcccuucu

SEQ ID NO: 23579 - RNA, 22 nt, Artificial Sequence
  Synthetic oligonucleotide: Ptpn6-4207
uacuccgacuccuggcccuucu

SEQ ID NO: 23580 - RNA, 23 nt, Artificial Sequence
  Synthetic oligonucleotide: Ptpn6-4208
guacuccgacuccuggcccuucu

SEQ ID NO: 23581 - RNA, 24 nt, Artificial Sequence
  Synthetic oligonucleotide: Ptpn6-4209
cguacuccgacuccuggcccuucu

SEQ ID NO: 23582 - RNA, 18 nt, Artificial Sequence
  Synthetic oligonucleotide: Ptpn6-4210
ugcccaccucgggccagu

SEQ ID NO: 23583 - RNA, 19 nt, Artificial Sequence
  Synthetic oligonucleotide: Ptpn6-4211
augcccaccucgggccagu

SEQ ID NO: 23584 - RNA, 20 nt, Artificial Sequence
  Synthetic oligonucleotide: Ptpn6-887
caugcccaccucgggccagu

SEQ ID NO: 23585 - RNA, 21 nt, Artificial Sequence
  Synthetic oligonucleotide: Ptpn6-4212
gcaugcccaccucgggccagu

SEQ ID NO: 23586 - RNA, 22 nt, Artificial Sequence
  Synthetic oligonucleotide: Ptpn6-4213
ugcaugcccaccucgggccagu

SEQ ID NO: 23587 - RNA, 23 nt, Artificial Sequence
  Synthetic oligonucleotide: Ptpn6-4214
cugcaugcccaccucgggccagu

SEQ ID NO: 23588 - RNA, 24 nt, Artificial Sequence
  Synthetic oligonucleotide: Ptpn6-4215
gcugcaugcccaccucgggccagu

SEQ ID NO: 23589 - RNA, 18 nt, Artificial Sequence
  Synthetic oligonucleotide: Ptpn6-4216
cggggagaccuguaaggu

SEQ ID NO: 23590 - RNA, 19 nt, Artificial Sequence
  Synthetic oligonucleotide: Ptpn6-4217
gcggggagaccuguaaggu

SEQ ID NO: 23591 - RNA, 20 nt, Artificial Sequence
  Synthetic oligonucleotide: Ptpn6-882
agcggggagaccuguaaggu

SEQ ID NO: 23592 - RNA, 21 nt, Artificial Sequence
  Synthetic oligonucleotide: Ptpn6-4218
cagcggggagaccuguaaggu

SEQ ID NO: 23593 - RNA, 22 nt, Artificial Sequence
  Synthetic oligonucleotide: Ptpn6-4219
ccagcggggagaccuguaaggu

SEQ ID NO: 23594 - RNA, 23 nt, Artificial Sequence
  Synthetic oligonucleotide: Ptpn6-4220
uccagcggggagaccuguaaggu

SEQ ID NO: 23595 - RNA, 24 nt, Artificial Sequence
  Synthetic oligonucleotide: Ptpn6-4221
guccagcggggagaccuguaaggu

SEQ ID NO: 23596 - RNA, 18 nt, Artificial Sequence
  Synthetic oligonucleotide: Ptpn6-4222
cacucacuuggacgaggu

SEQ ID NO: 23597 - RNA, 19 nt, Artificial Sequence
  Synthetic oligonucleotide: Ptpn6-4223
ccacucacuuggacgaggu

SEQ ID NO: 23598 - RNA, 20 nt, Artificial Sequence
  Synthetic oligonucleotide: Ptpn6-4224
gccacucacuuggacgaggu

SEQ ID NO: 23599 - RNA, 21 nt, Artificial Sequence
  Synthetic oligonucleotide: Ptpn6-4225
ggccacucacuuggacgaggu

SEQ ID NO: 23600 - RNA, 22 nt, Artificial Sequence
  Synthetic oligonucleotide: Ptpn6-4226
gggccacucacuuggacgaggu

SEQ ID NO: 23601 - RNA, 23 nt, Artificial Sequence
  Synthetic oligonucleotide: Ptpn6-4227
agggccacucacuuggacgaggu

SEQ ID NO: 23602 - RNA, 24 nt, Artificial Sequence
  Synthetic oligonucleotide: Ptpn6-4228
cagggccacucacuuggacgaggu

SEQ ID NO: 23603 - RNA, 18 nt, Artificial Sequence
  Synthetic oligonucleotide: Ptpn6-4229
aaacucugagaugugggu

SEQ ID NO: 23604 - RNA, 19 nt, Artificial Sequence
  Synthetic oligonucleotide: Ptpn6-4230
caaacucugagaugugggu

SEQ ID NO: 23605 - RNA, 20 nt, Artificial Sequence
  Synthetic oligonucleotide: Ptpn6-2768
gcaaacucugagaugugggu

SEQ ID NO: 23606 - RNA, 21 nt, Artificial Sequence
  Synthetic oligonucleotide: Ptpn6-4231
ugcaaacucugagaugugggu

SEQ ID NO: 23607 - RNA, 22 nt, Artificial Sequence
  Synthetic oligonucleotide: Ptpn6-4232
cugcaaacucugagaugugggu

SEQ ID NO: 23608 - RNA, 23 nt, Artificial Sequence
  Synthetic oligonucleotide: Ptpn6-4233
ucugcaaacucugagaugugggu

SEQ ID NO: 23609 - RNA, 24 nt, Artificial Sequence
  Synthetic oligonucleotide: Ptpn6-4234
uucugcaaacucugagaugugggu

SEQ ID NO: 23610 - RNA, 18 nt, Artificial Sequence
  Synthetic oligonucleotide: Ptpn6-4235
cagggccuagcagcuggu

SEQ ID NO: 23611 - RNA, 19 nt, Artificial Sequence
  Synthetic oligonucleotide: Ptpn6-4236
ucagggccuagcagcuggu

SEQ ID NO: 23612 - RNA, 20 nt, Artificial Sequence
  Synthetic oligonucleotide: Ptpn6-4237
aucagggccuagcagcuggu

SEQ ID NO: 23613 - RNA, 21 nt, Artificial Sequence
  Synthetic oligonucleotide: Ptpn6-4238
caucagggccuagcagcuggu

SEQ ID NO: 23614 - RNA, 22 nt, Artificial Sequence
  Synthetic oligonucleotide: Ptpn6-4239
ucaucagggccuagcagcuggu

SEQ ID NO: 23615 - RNA, 23 nt, Artificial Sequence
  Synthetic oligonucleotide: Ptpn6-4240
cucaucagggccuagcagcuggu

SEQ ID NO: 23616 - RNA, 24 nt, Artificial Sequence
  Synthetic oligonucleotide: Ptpn6-4241
ucucaucagggccuagcagcuggu

SEQ ID NO: 23617 - RNA, 18 nt, Artificial Sequence
  Synthetic oligonucleotide: Ptpn6-4242
caccgcucacuuccucuu

SEQ ID NO: 23618 - RNA, 19 nt, Artificial Sequence
  Synthetic oligonucleotide: Ptpn6-4243
gcaccgcucacuuccucuu

SEQ ID NO: 23619 - RNA, 20 nt, Artificial Sequence
  Synthetic oligonucleotide: Ptpn6-4244
agcaccgcucacuuccucuu

SEQ ID NO: 23620 - RNA, 21 nt, Artificial Sequence
  Synthetic oligonucleotide: Ptpn6-4245
cagcaccgcucacuuccucuu

SEQ ID NO: 23621 - RNA, 22 nt, Artificial Sequence
  Synthetic oligonucleotide: Ptpn6-4246
acagcaccgcucacuuccucuu

SEQ ID NO: 23622 - RNA, 23 nt, Artificial Sequence
  Synthetic oligonucleotide: Ptpn6-4247
gacagcaccgcucacuuccucuu

SEQ ID NO: 23623 - RNA, 24 nt, Artificial Sequence
  Synthetic oligonucleotide: Ptpn6-4248
ggacagcaccgcucacuuccucuu

SEQ ID NO: 23624 - RNA, 18 nt, Artificial Sequence
  Synthetic oligonucleotide: Ptpn6-4249
aacaagagggaggagaaa

SEQ ID NO: 23625 - RNA, 19 nt, Artificial Sequence
  Synthetic oligonucleotide: Ptpn6-4250
gaacaagagggaggagaaa

SEQ ID NO: 23626 - RNA, 20 nt, Artificial Sequence
  Synthetic oligonucleotide: Ptpn6-732
agaacaagagggaggagaaa

SEQ ID NO: 23627 - RNA, 21 nt, Artificial Sequence
  Synthetic oligonucleotide: Ptpn6-4251
aagaacaagagggaggagaaa

SEQ ID NO: 23628 - RNA, 22 nt, Artificial Sequence
  Synthetic oligonucleotide: Ptpn6-4252
uaagaacaagagggaggagaaa

SEQ ID NO: 23629 - RNA, 23 nt, Artificial Sequence
  Synthetic oligonucleotide: Ptpn6-4253
cuaagaacaagagggaggagaaa

SEQ ID NO: 23630 - RNA, 24 nt, Artificial Sequence
  Synthetic oligonucleotide: Ptpn6-4254
acuaagaacaagagggaggagaaa

SEQ ID NO: 23631 - RNA, 18 nt, Artificial Sequence
  Synthetic oligonucleotide: Ptpn6-4255
ccugcacacuaagaacaa

SEQ ID NO: 23632 - RNA, 19 nt, Artificial Sequence
  Synthetic oligonucleotide: Ptpn6-4256
accugcacacuaagaacaa

SEQ ID NO: 23633 - RNA, 20 nt, Artificial Sequence
  Synthetic oligonucleotide: Ptpn6-726
aaccugcacacuaagaacaa

SEQ ID NO: 23634 - RNA, 21 nt, Artificial Sequence
  Synthetic oligonucleotide: Ptpn6-4257
gaaccugcacacuaagaacaa

SEQ ID NO: 23635 - RNA, 22 nt, Artificial Sequence
  Synthetic oligonucleotide: Ptpn6-4258
agaaccugcacacuaagaacaa

SEQ ID NO: 23636 - RNA, 23 nt, Artificial Sequence
  Synthetic oligonucleotide: Ptpn6-4259
gagaaccugcacacuaagaacaa

SEQ ID NO: 23637 - RNA, 24 nt, Artificial Sequence
  Synthetic oligonucleotide: Ptpn6-4260
ugagaaccugcacacuaagaacaa

SEQ ID NO: 23638 - RNA, 18 nt, Artificial Sequence
  Synthetic oligonucleotide: Ptpn6-4261
gagcaaggguucccucaa

SEQ ID NO: 23639 - RNA, 19 nt, Artificial Sequence
  Synthetic oligonucleotide: Ptpn6-4262
agagcaaggguucccucaa

SEQ ID NO: 23640 - RNA, 20 nt, Artificial Sequence
  Synthetic oligonucleotide: Ptpn6-740
aagagcaaggguucccucaa

SEQ ID NO: 23641 - RNA, 21 nt, Artificial Sequence
  Synthetic oligonucleotide: Ptpn6-4263
gaagagcaaggguucccucaa

SEQ ID NO: 23642 - RNA, 22 nt, Artificial Sequence
  Synthetic oligonucleotide: Ptpn6-4264
agaagagcaaggguucccucaa

SEQ ID NO: 23643 - RNA, 23 nt, Artificial Sequence
  Synthetic oligonucleotide: Ptpn6-4265
gagaagagcaaggguucccucaa

SEQ ID NO: 23644 - RNA, 24 nt, Artificial Sequence
  Synthetic oligonucleotide: Ptpn6-4266
ggagaagagcaaggguucccucaa

SEQ ID NO: 23645 - RNA, 18 nt, Artificial Sequence
  Synthetic oligonucleotide: Ptpn6-4267
ggguucccucaagaggaa

SEQ ID NO: 23646 - RNA, 19 nt, Artificial Sequence
  Synthetic oligonucleotide: Ptpn6-4268
aggguucccucaagaggaa

SEQ ID NO: 23647 - RNA, 20 nt, Artificial Sequence
  Synthetic oligonucleotide: Ptpn6-4269
aaggguucccucaagaggaa

SEQ ID NO: 23648 - RNA, 21 nt, Artificial Sequence
  Synthetic oligonucleotide: Ptpn6-4270
caaggguucccucaagaggaa

SEQ ID NO: 23649 - RNA, 22 nt, Artificial Sequence
  Synthetic oligonucleotide: Ptpn6-4271
gcaaggguucccucaagaggaa

SEQ ID NO: 23650 - RNA, 23 nt, Artificial Sequence
  Synthetic oligonucleotide: Ptpn6-4272
agcaaggguucccucaagaggaa

SEQ ID NO: 23651 - RNA, 24 nt, Artificial Sequence
  Synthetic oligonucleotide: Ptpn6-4273
gagcaaggguucccucaagaggaa

SEQ ID NO: 23652 - RNA, 18 nt, Artificial Sequence
  Synthetic oligonucleotide: Ptpn6-4274
gagaaccgaguguuggaa

SEQ ID NO: 23653 - RNA, 19 nt, Artificial Sequence
  Synthetic oligonucleotide: Ptpn6-4275
ugagaaccgaguguuggaa

SEQ ID NO: 23654 - RNA, 20 nt, Artificial Sequence
  Synthetic oligonucleotide: Ptpn6-648
uugagaaccgaguguuggaa

SEQ ID NO: 23655 - RNA, 21 nt, Artificial Sequence
  Synthetic oligonucleotide: Ptpn6-4276
auugagaaccgaguguuggaa

SEQ ID NO: 23656 - RNA, 22 nt, Artificial Sequence
  Synthetic oligonucleotide: Ptpn6-4277
cauugagaaccgaguguuggaa

SEQ ID NO: 23657 - RNA, 23 nt, Artificial Sequence
  Synthetic oligonucleotide: Ptpn6-4278
acauugagaaccgaguguuggaa

SEQ ID NO: 23658 - RNA, 24 nt, Artificial Sequence
  Synthetic oligonucleotide: Ptpn6-4279
gacauugagaaccgaguguuggaa

SEQ ID NO: 23659 - RNA, 18 nt, Artificial Sequence
  Synthetic oligonucleotide: Ptpn6-4280
ggggcaaguacagacaca

SEQ ID NO: 23660 - RNA, 19 nt, Artificial Sequence
  Synthetic oligonucleotide: Ptpn6-4281
gggggcaaguacagacaca

SEQ ID NO: 23661 - RNA, 20 nt, Artificial Sequence
  Synthetic oligonucleotide: Ptpn6-2638
ggggggcaaguacagacaca

SEQ ID NO: 23662 - RNA, 21 nt, Artificial Sequence
  Synthetic oligonucleotide: Ptpn6-4282
aggggggcaaguacagacaca

SEQ ID NO: 23663 - RNA, 22 nt, Artificial Sequence
  Synthetic oligonucleotide: Ptpn6-4283
caggggggcaaguacagacaca

SEQ ID NO: 23664 - RNA, 23 nt, Artificial Sequence
  Synthetic oligonucleotide: Ptpn6-4284
gcaggggggcaaguacagacaca

SEQ ID NO: 23665 - RNA, 24 nt, Artificial Sequence
  Synthetic oligonucleotide: Ptpn6-4285
ugcaggggggcaaguacagacaca

SEQ ID NO: 23666 - RNA, 18 nt, Artificial Sequence
  Synthetic oligonucleotide: Ptpn6-4286
agcagcggucagcagaca

SEQ ID NO: 23667 - RNA, 19 nt, Artificial Sequence
  Synthetic oligonucleotide: Ptpn6-4287
aagcagcggucagcagaca

SEQ ID NO: 23668 - RNA, 20 nt, Artificial Sequence
  Synthetic oligonucleotide: Ptpn6-237
gaagcagcggucagcagaca

SEQ ID NO: 23669 - RNA, 21 nt, Artificial Sequence
  Synthetic oligonucleotide: Ptpn6-4288
agaagcagcggucagcagaca

SEQ ID NO: 23670 - RNA, 22 nt, Artificial Sequence
  Synthetic oligonucleotide: Ptpn6-4289
aagaagcagcggucagcagaca

SEQ ID NO: 23671 - RNA, 23 nt, Artificial Sequence
  Synthetic oligonucleotide: Ptpn6-4290
gaagaagcagcggucagcagaca

SEQ ID NO: 23672 - RNA, 24 nt, Artificial Sequence
  Synthetic oligonucleotide: Ptpn6-4291
ugaagaagcagcggucagcagaca

SEQ ID NO: 23673 - RNA, 18 nt, Artificial Sequence
  Synthetic oligonucleotide: Ptpn6-4292
gggugaaugcggcugaca

SEQ ID NO: 23674 - RNA, 19 nt, Artificial Sequence
  Synthetic oligonucleotide: Ptpn6-4293
agggugaaugcggcugaca

SEQ ID NO: 23675 - RNA, 20 nt, Artificial Sequence
  Synthetic oligonucleotide: Ptpn6-643
gagggugaaugcggcugaca

SEQ ID NO: 23676 - RNA, 21 nt, Artificial Sequence
  Synthetic oligonucleotide: Ptpn6-4294
cgagggugaaugcggcugaca

SEQ ID NO: 23677 - RNA, 22 nt, Artificial Sequence
  Synthetic oligonucleotide: Ptpn6-4295
acgagggugaaugcggcugaca

SEQ ID NO: 23678 - RNA, 23 nt, Artificial Sequence
  Synthetic oligonucleotide: Ptpn6-4296
cacgagggugaaugcggcugaca

SEQ ID NO: 23679 - RNA, 24 nt, Artificial Sequence
  Synthetic oligonucleotide: Ptpn6-4297
ccacgagggugaaugcggcugaca

SEQ ID NO: 23680 - RNA, 18 nt, Artificial Sequence
  Synthetic oligonucleotide: Ptpn6-4298
ccgaccauggggucccca

SEQ ID NO: 23681 - RNA, 19 nt, Artificial Sequence
  Synthetic oligonucleotide: Ptpn6-4299
cccgaccauggggucccca

SEQ ID NO: 23682 - RNA, 20 nt, Artificial Sequence
  Synthetic oligonucleotide: Ptpn6-698
gcccgaccauggggucccca

SEQ ID NO: 23683 - RNA, 21 nt, Artificial Sequence
  Synthetic oligonucleotide: Ptpn6-4300
ggcccgaccauggggucccca

SEQ ID NO: 23684 - RNA, 22 nt, Artificial Sequence
  Synthetic oligonucleotide: Ptpn6-4301
uggcccgaccauggggucccca

SEQ ID NO: 23685 - RNA, 23 nt, Artificial Sequence
  Synthetic oligonucleotide: Ptpn6-4302
cuggcccgaccauggggucccca

SEQ ID NO: 23686 - RNA, 24 nt, Artificial Sequence
  Synthetic oligonucleotide: Ptpn6-4303
gcuggcccgaccauggggucccca

SEQ ID NO: 23687 - RNA, 18 nt, Artificial Sequence
  Synthetic oligonucleotide: Ptpn6-4304
cuggaagggcagcggcca

SEQ ID NO: 23688 - RNA, 19 nt, Artificial Sequence
  Synthetic oligonucleotide: Ptpn6-4305
ucuggaagggcagcggcca

SEQ ID NO: 23689 - RNA, 20 nt, Artificial Sequence
  Synthetic oligonucleotide: Ptpn6-665
gucuggaagggcagcggcca

SEQ ID NO: 23690 - RNA, 21 nt, Artificial Sequence
  Synthetic oligonucleotide: Ptpn6-4306
cgucuggaagggcagcggcca

SEQ ID NO: 23691 - RNA, 22 nt, Artificial Sequence
  Synthetic oligonucleotide: Ptpn6-4307
gcgucuggaagggcagcggcca

SEQ ID NO: 23692 - RNA, 23 nt, Artificial Sequence
  Synthetic oligonucleotide: Ptpn6-4308
agcgucuggaagggcagcggcca

SEQ ID NO: 23693 - RNA, 24 nt, Artificial Sequence
  Synthetic oligonucleotide: Ptpn6-4309
cagcgucuggaagggcagcggcca

SEQ ID NO: 23694 - RNA, 18 nt, Artificial Sequence
  Synthetic oligonucleotide: Ptpn6-4310
uugucaucgacaugcuca

SEQ ID NO: 23695 - RNA, 19 nt, Artificial Sequence
  Synthetic oligonucleotide: Ptpn6-4311
auugucaucgacaugcuca

SEQ ID NO: 23696 - RNA, 20 nt, Artificial Sequence
  Synthetic oligonucleotide: Ptpn6-217
cauugucaucgacaugcuca

SEQ ID NO: 23697 - RNA, 21 nt, Artificial Sequence
  Synthetic oligonucleotide: Ptpn6-4312
ucauugucaucgacaugcuca

SEQ ID NO: 23698 - RNA, 22 nt, Artificial Sequence
  Synthetic oligonucleotide: Ptpn6-4313
aucauugucaucgacaugcuca

SEQ ID NO: 23699 - RNA, 23 nt, Artificial Sequence
  Synthetic oligonucleotide: Ptpn6-4314
caucauugucaucgacaugcuca

SEQ ID NO: 23700 - RNA, 24 nt, Artificial Sequence
  Synthetic oligonucleotide: Ptpn6-4315
ccaucauugucaucgacaugcuca

SEQ ID NO: 23701 - RNA, 18 nt, Artificial Sequence
  Synthetic oligonucleotide: Ptpn6-4316
uggccaucgcccaguuca

SEQ ID NO: 23702 - RNA, 19 nt, Artificial Sequence
  Synthetic oligonucleotide: Ptpn6-4317
guggccaucgcccaguuca

SEQ ID NO: 23703 - RNA, 20 nt, Artificial Sequence
  Synthetic oligonucleotide: Ptpn6-714
cguggccaucgcccaguuca

SEQ ID NO: 23704 - RNA, 21 nt, Artificial Sequence
  Synthetic oligonucleotide: Ptpn6-4318
acguggccaucgcccaguuca

SEQ ID NO: 23705 - RNA, 22 nt, Artificial Sequence
  Synthetic oligonucleotide: Ptpn6-4319
uacguggccaucgcccaguuca

SEQ ID NO: 23706 - RNA, 23 nt, Artificial Sequence
  Synthetic oligonucleotide: Ptpn6-4320
cuacguggccaucgcccaguuca

SEQ ID NO: 23707 - RNA, 24 nt, Artificial Sequence
  Synthetic oligonucleotide: Ptpn6-4321
ucuacguggccaucgcccaguuca

SEQ ID NO: 23708 - RNA, 18 nt, Artificial Sequence
  Synthetic oligonucleotide: Ptpn6-4322
ugcacacuaagaacaaga

SEQ ID NO: 23709 - RNA, 19 nt, Artificial Sequence
  Synthetic oligonucleotide: Ptpn6-4323
cugcacacuaagaacaaga

SEQ ID NO: 23710 - RNA, 20 nt, Artificial Sequence
  Synthetic oligonucleotide: Ptpn6-234
ccugcacacuaagaacaaga

SEQ ID NO: 23711 - RNA, 21 nt, Artificial Sequence
  Synthetic oligonucleotide: Ptpn6-4324
accugcacacuaagaacaaga

SEQ ID NO: 23712 - RNA, 22 nt, Artificial Sequence
  Synthetic oligonucleotide: Ptpn6-4325
aaccugcacacuaagaacaaga

SEQ ID NO: 23713 - RNA, 23 nt, Artificial Sequence
  Synthetic oligonucleotide: Ptpn6-4326
gaaccugcacacuaagaacaaga

SEQ ID NO: 23714 - RNA, 24 nt, Artificial Sequence
  Synthetic oligonucleotide: Ptpn6-4327
agaaccugcacacuaagaacaaga

SEQ ID NO: 23715 - RNA, 18 nt, Artificial Sequence
  Synthetic oligonucleotide: Ptpn6-4328
uggagcauuucaagaaga

SEQ ID NO: 23716 - RNA, 19 nt, Artificial Sequence
  Synthetic oligonucleotide: Ptpn6-4329
guggagcauuucaagaaga

SEQ ID NO: 23717 - RNA, 20 nt, Artificial Sequence
  Synthetic oligonucleotide: Ptpn6-152
gguggagcauuucaagaaga

SEQ ID NO: 23718 - RNA, 21 nt, Artificial Sequence
  Synthetic oligonucleotide: Ptpn6-4330
ugguggagcauuucaagaaga

SEQ ID NO: 23719 - RNA, 22 nt, Artificial Sequence
  Synthetic oligonucleotide: Ptpn6-4331
cugguggagcauuucaagaaga

SEQ ID NO: 23720 - RNA, 23 nt, Artificial Sequence
  Synthetic oligonucleotide: Ptpn6-4332
ccugguggagcauuucaagaaga

SEQ ID NO: 23721 - RNA, 24 nt, Artificial Sequence
  Synthetic oligonucleotide: Ptpn6-4333
accugguggagcauuucaagaaga

SEQ ID NO: 23722 - RNA, 18 nt, Artificial Sequence
  Synthetic oligonucleotide: Ptpn6-4334
gcucgggcauggugcaga

SEQ ID NO: 23723 - RNA, 19 nt, Artificial Sequence
  Synthetic oligonucleotide: Ptpn6-4335
cgcucgggcauggugcaga

SEQ ID NO: 23724 - RNA, 20 nt, Artificial Sequence
  Synthetic oligonucleotide: Ptpn6-225
gcgcucgggcauggugcaga

SEQ ID NO: 23725 - RNA, 21 nt, Artificial Sequence
  Synthetic oligonucleotide: Ptpn6-4336
agcgcucgggcauggugcaga

SEQ ID NO: 23726 - RNA, 22 nt, Artificial Sequence
  Synthetic oligonucleotide: Ptpn6-4337
cagcgcucgggcauggugcaga

SEQ ID NO: 23727 - RNA, 23 nt, Artificial Sequence
  Synthetic oligonucleotide: Ptpn6-4338
gcagcgcucgggcauggugcaga

SEQ ID NO: 23728 - RNA, 24 nt, Artificial Sequence
  Synthetic oligonucleotide: Ptpn6-4339
cgcagcgcucgggcauggugcaga

SEQ ID NO: 23729 - RNA, 18 nt, Artificial Sequence
  Synthetic oligonucleotide: Ptpn6-4340
cgagugauccugcaggga

SEQ ID NO: 23730 - RNA, 19 nt, Artificial Sequence
  Synthetic oligonucleotide: Ptpn6-4341
ccgagugauccugcaggga

SEQ ID NO: 23731 - RNA, 20 nt, Artificial Sequence
  Synthetic oligonucleotide: Ptpn6-176
gccgagugauccugcaggga

SEQ ID NO: 23732 - RNA, 21 nt, Artificial Sequence
  Synthetic oligonucleotide: Ptpn6-4342
agccgagugauccugcaggga

SEQ ID NO: 23733 - RNA, 22 nt, Artificial Sequence
  Synthetic oligonucleotide: Ptpn6-4343
cagccgagugauccugcaggga

SEQ ID NO: 23734 - RNA, 23 nt, Artificial Sequence
  Synthetic oligonucleotide: Ptpn6-4344
acagccgagugauccugcaggga

SEQ ID NO: 23735 - RNA, 24 nt, Artificial Sequence
  Synthetic oligonucleotide: Ptpn6-4345
cacagccgagugauccugcaggga

SEQ ID NO: 23736 - RNA, 18 nt, Artificial Sequence
  Synthetic oligonucleotide: Ptpn6-4346
auuucaagaagacgggga

SEQ ID NO: 23737 - RNA, 19 nt, Artificial Sequence
  Synthetic oligonucleotide: Ptpn6-4347
cauuucaagaagacgggga

SEQ ID NO: 23738 - RNA, 20 nt, Artificial Sequence
  Synthetic oligonucleotide: Ptpn6-642
gcauuucaagaagacgggga

SEQ ID NO: 23739 - RNA, 21 nt, Artificial Sequence
  Synthetic oligonucleotide: Ptpn6-4348
agcauuucaagaagacgggga

SEQ ID NO: 23740 - RNA, 22 nt, Artificial Sequence
  Synthetic oligonucleotide: Ptpn6-4349
gagcauuucaagaagacgggga

SEQ ID NO: 23741 - RNA, 23 nt, Artificial Sequence
  Synthetic oligonucleotide: Ptpn6-4350
ggagcauuucaagaagacgggga

SEQ ID NO: 23742 - RNA, 24 nt, Artificial Sequence
  Synthetic oligonucleotide: Ptpn6-4351
uggagcauuucaagaagacgggga

SEQ ID NO: 23743 - RNA, 18 nt, Artificial Sequence
  Synthetic oligonucleotide: Ptpn6-4352
gggccaggagucggagua

SEQ ID NO: 23744 - RNA, 19 nt, Artificial Sequence
  Synthetic oligonucleotide: Ptpn6-4353
agggccaggagucggagua

SEQ ID NO: 23745 - RNA, 20 nt, Artificial Sequence
  Synthetic oligonucleotide: Ptpn6-230
aagggccaggagucggagua

SEQ ID NO: 23746 - RNA, 21 nt, Artificial Sequence
  Synthetic oligonucleotide: Ptpn6-4354
gaagggccaggagucggagua

SEQ ID NO: 23747 - RNA, 22 nt, Artificial Sequence
  Synthetic oligonucleotide: Ptpn6-4355
agaagggccaggagucggagua

SEQ ID NO: 23748 - RNA, 23 nt, Artificial Sequence
  Synthetic oligonucleotide: Ptpn6-4356
cagaagggccaggagucggagua

SEQ ID NO: 23749 - RNA, 24 nt, Artificial Sequence
  Synthetic oligonucleotide: Ptpn6-4357
gcagaagggccaggagucggagua

SEQ ID NO: 23750 - RNA, 18 nt, Artificial Sequence
  Synthetic oligonucleotide: Ptpn6-4358
aaccugcacacuaagaac

SEQ ID NO: 23751 - RNA, 19 nt, Artificial Sequence
  Synthetic oligonucleotide: Ptpn6-4359
gaaccugcacacuaagaac

SEQ ID NO: 23752 - RNA, 20 nt, Artificial Sequence
  Synthetic oligonucleotide: Ptpn6-725
agaaccugcacacuaagaac

SEQ ID NO: 23753 - RNA, 21 nt, Artificial Sequence
  Synthetic oligonucleotide: Ptpn6-4360
gagaaccugcacacuaagaac

SEQ ID NO: 23754 - RNA, 22 nt, Artificial Sequence
  Synthetic oligonucleotide: Ptpn6-4361
ugagaaccugcacacuaagaac

SEQ ID NO: 23755 - RNA, 23 nt, Artificial Sequence
  Synthetic oligonucleotide: Ptpn6-4362
augagaaccugcacacuaagaac

SEQ ID NO: 23756 - RNA, 24 nt, Artificial Sequence
  Synthetic oligonucleotide: Ptpn6-4363
uaugagaaccugcacacuaagaac

SEQ ID NO: 23757 - RNA, 18 nt, Artificial Sequence
  Synthetic oligonucleotide: Ptpn6-4364
gggcagcggccagagaac

SEQ ID NO: 23758 - RNA, 19 nt, Artificial Sequence
  Synthetic oligonucleotide: Ptpn6-4365
agggcagcggccagagaac

SEQ ID NO: 23759 - RNA, 20 nt, Artificial Sequence
  Synthetic oligonucleotide: Ptpn6-666
aagggcagcggccagagaac

SEQ ID NO: 23760 - RNA, 21 nt, Artificial Sequence
  Synthetic oligonucleotide: Ptpn6-4366
gaagggcagcggccagagaac

SEQ ID NO: 23761 - RNA, 22 nt, Artificial Sequence
  Synthetic oligonucleotide: Ptpn6-4367
ggaagggcagcggccagagaac

SEQ ID NO: 23762 - RNA, 23 nt, Artificial Sequence
  Synthetic oligonucleotide: Ptpn6-4368
uggaagggcagcggccagagaac

SEQ ID NO: 23763 - RNA, 24 nt, Artificial Sequence
  Synthetic oligonucleotide: Ptpn6-4369
cuggaagggcagcggccagagaac

SEQ ID NO: 23764 - RNA, 18 nt, Artificial Sequence
  Synthetic oligonucleotide: Ptpn6-4370
cgaguguuggaacugaac

SEQ ID NO: 23765 - RNA, 19 nt, Artificial Sequence
  Synthetic oligonucleotide: Ptpn6-4371
ccgaguguuggaacugaac

SEQ ID NO: 23766 - RNA, 20 nt, Artificial Sequence
  Synthetic oligonucleotide: Ptpn6-649
accgaguguuggaacugaac

SEQ ID NO: 23767 - RNA, 21 nt, Artificial Sequence
  Synthetic oligonucleotide: Ptpn6-4372
aaccgaguguuggaacugaac

SEQ ID NO: 23768 - RNA, 22 nt, Artificial Sequence
  Synthetic oligonucleotide: Ptpn6-4373
gaaccgaguguuggaacugaac

SEQ ID NO: 23769 - RNA, 23 nt, Artificial Sequence
  Synthetic oligonucleotide: Ptpn6-4374
agaaccgaguguuggaacugaac

SEQ ID NO: 23770 - RNA, 24 nt, Artificial Sequence
  Synthetic oligonucleotide: Ptpn6-4375
gagaaccgaguguuggaacugaac

SEQ ID NO: 23771 - RNA, 18 nt, Artificial Sequence
  Synthetic oligonucleotide: Ptpn6-4376
gggggcaaguacagacac

SEQ ID NO: 23772 - RNA, 19 nt, Artificial Sequence
  Synthetic oligonucleotide: Ptpn6-4377
ggggggcaaguacagacac

SEQ ID NO: 23773 - RNA, 20 nt, Artificial Sequence
  Synthetic oligonucleotide: Ptpn6-4378
aggggggcaaguacagacac

SEQ ID NO: 23774 - RNA, 21 nt, Artificial Sequence
  Synthetic oligonucleotide: Ptpn6-4379
caggggggcaaguacagacac

SEQ ID NO: 23775 - RNA, 22 nt, Artificial Sequence
  Synthetic oligonucleotide: Ptpn6-4380
gcaggggggcaaguacagacac

SEQ ID NO: 23776 - RNA, 23 nt, Artificial Sequence
  Synthetic oligonucleotide: Ptpn6-4381
ugcaggggggcaaguacagacac

SEQ ID NO: 23777 - RNA, 24 nt, Artificial Sequence
  Synthetic oligonucleotide: Ptpn6-4382
gugcaggggggcaaguacagacac

SEQ ID NO: 23778 - RNA, 18 nt, Artificial Sequence
  Synthetic oligonucleotide: Ptpn6-4383
ugucaucgucaugaccac

SEQ ID NO: 23779 - RNA, 19 nt, Artificial Sequence
  Synthetic oligonucleotide: Ptpn6-4384
gugucaucgucaugaccac

SEQ ID NO: 23780 - RNA, 20 nt, Artificial Sequence
  Synthetic oligonucleotide: Ptpn6-681
cgugucaucgucaugaccac

SEQ ID NO: 23781 - RNA, 21 nt, Artificial Sequence
  Synthetic oligonucleotide: Ptpn6-4385
ccgugucaucgucaugaccac

SEQ ID NO: 23782 - RNA, 22 nt, Artificial Sequence
  Synthetic oligonucleotide: Ptpn6-4386
gccgugucaucgucaugaccac

SEQ ID NO: 23783 - RNA, 23 nt, Artificial Sequence
  Synthetic oligonucleotide: Ptpn6-4387
agccgugucaucgucaugaccac

SEQ ID NO: 23784 - RNA, 24 nt, Artificial Sequence
  Synthetic oligonucleotide: Ptpn6-4388
cagccgugucaucgucaugaccac

SEQ ID NO: 23785 - RNA, 18 nt, Artificial Sequence
  Synthetic oligonucleotide: Ptpn6-4389
gucagcagugugggccac

SEQ ID NO: 23786 - RNA, 19 nt, Artificial Sequence
  Synthetic oligonucleotide: Ptpn6-4390
ggucagcagugugggccac

SEQ ID NO: 23787 - RNA, 20 nt, Artificial Sequence
  Synthetic oligonucleotide: Ptpn6-4391
aggucagcagugugggccac

SEQ ID NO: 23788 - RNA, 21 nt, Artificial Sequence
  Synthetic oligonucleotide: Ptpn6-4392
aaggucagcagugugggccac

SEQ ID NO: 23789 - RNA, 22 nt, Artificial Sequence
  Synthetic oligonucleotide: Ptpn6-4393
caaggucagcagugugggccac

SEQ ID NO: 23790 - RNA, 23 nt, Artificial Sequence
  Synthetic oligonucleotide: Ptpn6-4394
ucaaggucagcagugugggccac

SEQ ID NO: 23791 - RNA, 24 nt, Artificial Sequence
  Synthetic oligonucleotide: Ptpn6-4395
aucaaggucagcagugugggccac

SEQ ID NO: 23792 - RNA, 18 nt, Artificial Sequence
  Synthetic oligonucleotide: Ptpn6-4396
accaagggugaggggcac

SEQ ID NO: 23793 - RNA, 19 nt, Artificial Sequence
  Synthetic oligonucleotide: Ptpn6-4397
caccaagggugaggggcac

SEQ ID NO: 23794 - RNA, 20 nt, Artificial Sequence
  Synthetic oligonucleotide: Ptpn6-4398
ccaccaagggugaggggcac

SEQ ID NO: 23795 - RNA, 21 nt, Artificial Sequence
  Synthetic oligonucleotide: Ptpn6-4399
uccaccaagggugaggggcac

SEQ ID NO: 23796 - RNA, 22 nt, Artificial Sequence
  Synthetic oligonucleotide: Ptpn6-4400
cuccaccaagggugaggggcac

SEQ ID NO: 23797 - RNA, 23 nt, Artificial Sequence
  Synthetic oligonucleotide: Ptpn6-4401
ucuccaccaagggugaggggcac

SEQ ID NO: 23798 - RNA, 24 nt, Artificial Sequence
  Synthetic oligonucleotide: Ptpn6-4402
aucuccaccaagggugaggggcac

SEQ ID NO: 23799 - RNA, 18 nt, Artificial Sequence
  Synthetic oligonucleotide: Ptpn6-4403
aagcagcggucagcagac

SEQ ID NO: 23800 - RNA, 19 nt, Artificial Sequence
  Synthetic oligonucleotide: Ptpn6-4404
gaagcagcggucagcagac

SEQ ID NO: 23801 - RNA, 20 nt, Artificial Sequence
  Synthetic oligonucleotide: Ptpn6-734
agaagcagcggucagcagac

SEQ ID NO: 23802 - RNA, 21 nt, Artificial Sequence
  Synthetic oligonucleotide: Ptpn6-4405
aagaagcagcggucagcagac

SEQ ID NO: 23803 - RNA, 22 nt, Artificial Sequence
  Synthetic oligonucleotide: Ptpn6-4406
gaagaagcagcggucagcagac

SEQ ID NO: 23804 - RNA, 23 nt, Artificial Sequence
  Synthetic oligonucleotide: Ptpn6-4407
ugaagaagcagcggucagcagac

SEQ ID NO: 23805 - RNA, 24 nt, Artificial Sequence
  Synthetic oligonucleotide: Ptpn6-4408
gugaagaagcagcggucagcagac

SEQ ID NO: 23806 - RNA, 18 nt, Artificial Sequence
  Synthetic oligonucleotide: Ptpn6-4409
aagggcaagaaccgcuac

SEQ ID NO: 23807 - RNA, 19 nt, Artificial Sequence
  Synthetic oligonucleotide: Ptpn6-4410
caagggcaagaaccgcuac

SEQ ID NO: 23808 - RNA, 20 nt, Artificial Sequence
  Synthetic oligonucleotide: Ptpn6-668
acaagggcaagaaccgcuac

SEQ ID NO: 23809 - RNA, 21 nt, Artificial Sequence
  Synthetic oligonucleotide: Ptpn6-4411
aacaagggcaagaaccgcuac

SEQ ID NO: 23810 - RNA, 22 nt, Artificial Sequence
  Synthetic oligonucleotide: Ptpn6-4412
gaacaagggcaagaaccgcuac

SEQ ID NO: 23811 - RNA, 23 nt, Artificial Sequence
  Synthetic oligonucleotide: Ptpn6-4413
agaacaagggcaagaaccgcuac

SEQ ID NO: 23812 - RNA, 24 nt, Artificial Sequence
  Synthetic oligonucleotide: Ptpn6-4414
gagaacaagggcaagaaccgcuac

SEQ ID NO: 23813 - RNA, 18 nt, Artificial Sequence
  Synthetic oligonucleotide: Ptpn6-4415
aucuggcauuaccaguac

SEQ ID NO: 23814 - RNA, 19 nt, Artificial Sequence
  Synthetic oligonucleotide: Ptpn6-4416
gaucuggcauuaccaguac

SEQ ID NO: 23815 - RNA, 20 nt, Artificial Sequence
  Synthetic oligonucleotide: Ptpn6-695
agaucuggcauuaccaguac

SEQ ID NO: 23816 - RNA, 21 nt, Artificial Sequence
  Synthetic oligonucleotide: Ptpn6-4417
gagaucuggcauuaccaguac

SEQ ID NO: 23817 - RNA, 22 nt, Artificial Sequence
  Synthetic oligonucleotide: Ptpn6-4418
ggagaucuggcauuaccaguac

SEQ ID NO: 23818 - RNA, 23 nt, Artificial Sequence
  Synthetic oligonucleotide: Ptpn6-4419
gggagaucuggcauuaccaguac

SEQ ID NO: 23819 - RNA, 24 nt, Artificial Sequence
  Synthetic oligonucleotide: Ptpn6-4420
cgggagaucuggcauuaccaguac

SEQ ID NO: 23820 - RNA, 18 nt, Artificial Sequence
  Synthetic oligonucleotide: Ptpn6-4421
ggccaggagucggaguac

SEQ ID NO: 23821 - RNA, 19 nt, Artificial Sequence
  Synthetic oligonucleotide: Ptpn6-4422
gggccaggagucggaguac

SEQ ID NO: 23822 - RNA, 20 nt, Artificial Sequence
  Synthetic oligonucleotide: Ptpn6-231
agggccaggagucggaguac

SEQ ID NO: 23823 - RNA, 21 nt, Artificial Sequence
  Synthetic oligonucleotide: Ptpn6-4423
aagggccaggagucggaguac

SEQ ID NO: 23824 - RNA, 22 nt, Artificial Sequence
  Synthetic oligonucleotide: Ptpn6-4424
gaagggccaggagucggaguac

SEQ ID NO: 23825 - RNA, 23 nt, Artificial Sequence
  Synthetic oligonucleotide: Ptpn6-4425
agaagggccaggagucggaguac

SEQ ID NO: 23826 - RNA, 24 nt, Artificial Sequence
  Synthetic oligonucleotide: Ptpn6-4426
cagaagggccaggagucggaguac

SEQ ID NO: 23827 - RNA, 18 nt, Artificial Sequence
  Synthetic oligonucleotide: Ptpn6-4427
ccaagggugaggggcacc

SEQ ID NO: 23828 - RNA, 19 nt, Artificial Sequence
  Synthetic oligonucleotide: Ptpn6-4428
accaagggugaggggcacc

SEQ ID NO: 23829 - RNA, 20 nt, Artificial Sequence
  Synthetic oligonucleotide: Ptpn6-2661
caccaagggugaggggcacc

SEQ ID NO: 23830 - RNA, 21 nt, Artificial Sequence
  Synthetic oligonucleotide: Ptpn6-4429
ccaccaagggugaggggcacc

SEQ ID NO: 23831 - RNA, 22 nt, Artificial Sequence
  Synthetic oligonucleotide: Ptpn6-4430
uccaccaagggugaggggcacc

SEQ ID NO: 23832 - RNA, 23 nt, Artificial Sequence
  Synthetic oligonucleotide: Ptpn6-4431
cuccaccaagggugaggggcacc

SEQ ID NO: 23833 - RNA, 24 nt, Artificial Sequence
  Synthetic oligonucleotide: Ptpn6-4432
ucuccaccaagggugaggggcacc

SEQ ID NO: 23834 - RNA, 18 nt, Artificial Sequence
  Synthetic oligonucleotide: Ptpn6-4433
accugagcuggcccgacc

SEQ ID NO: 23835 - RNA, 19 nt, Artificial Sequence
  Synthetic oligonucleotide: Ptpn6-4434
uaccugagcuggcccgacc

SEQ ID NO: 23836 - RNA, 20 nt, Artificial Sequence
  Synthetic oligonucleotide: Ptpn6-696
guaccugagcuggcccgacc

SEQ ID NO: 23837 - RNA, 21 nt, Artificial Sequence
  Synthetic oligonucleotide: Ptpn6-4435
aguaccugagcuggcccgacc

SEQ ID NO: 23838 - RNA, 22 nt, Artificial Sequence
  Synthetic oligonucleotide: Ptpn6-4436
caguaccugagcuggcccgacc

SEQ ID NO: 23839 - RNA, 23 nt, Artificial Sequence
  Synthetic oligonucleotide: Ptpn6-4437
ccaguaccugagcuggcccgacc

SEQ ID NO: 23840 - RNA, 24 nt, Artificial Sequence
  Synthetic oligonucleotide: Ptpn6-4438
accaguaccugagcuggcccgacc

SEQ ID NO: 23841 - RNA, 18 nt, Artificial Sequence
  Synthetic oligonucleotide: Ptpn6-4439
ucaucgucaugaccaccc

SEQ ID NO: 23842 - RNA, 19 nt, Artificial Sequence
  Synthetic oligonucleotide: Ptpn6-4440
gucaucgucaugaccaccc

SEQ ID NO: 23843 - RNA, 20 nt, Artificial Sequence
  Synthetic oligonucleotide: Ptpn6-682
ugucaucgucaugaccaccc

SEQ ID NO: 23844 - RNA, 21 nt, Artificial Sequence
  Synthetic oligonucleotide: Ptpn6-4441
gugucaucgucaugaccaccc

SEQ ID NO: 23845 - RNA, 22 nt, Artificial Sequence
  Synthetic oligonucleotide: Ptpn6-4442
cgugucaucgucaugaccaccc

SEQ ID NO: 23846 - RNA, 23 nt, Artificial Sequence
  Synthetic oligonucleotide: Ptpn6-4443
ccgugucaucgucaugaccaccc

SEQ ID NO: 23847 - RNA, 24 nt, Artificial Sequence
  Synthetic oligonucleotide: Ptpn6-4444
gccgugucaucgucaugaccaccc

SEQ ID NO: 23848 - RNA, 18 nt, Artificial Sequence
  Synthetic oligonucleotide: Ptpn6-4445
acauagggucagugcccc

SEQ ID NO: 23849 - RNA, 19 nt, Artificial Sequence
  Synthetic oligonucleotide: Ptpn6-4446
gacauagggucagugcccc

SEQ ID NO: 23850 - RNA, 20 nt, Artificial Sequence
  Synthetic oligonucleotide: Ptpn6-2667
ggacauagggucagugcccc

SEQ ID NO: 23851 - RNA, 21 nt, Artificial Sequence
  Synthetic oligonucleotide: Ptpn6-4447
aggacauagggucagugcccc

SEQ ID NO: 23852 - RNA, 22 nt, Artificial Sequence
  Synthetic oligonucleotide: Ptpn6-4448
gaggacauagggucagugcccc

SEQ ID NO: 23853 - RNA, 23 nt, Artificial Sequence
  Synthetic oligonucleotide: Ptpn6-4449
cgaggacauagggucagugcccc

SEQ ID NO: 23854 - RNA, 24 nt, Artificial Sequence
  Synthetic oligonucleotide: Ptpn6-4450
ccgaggacauagggucagugcccc

SEQ ID NO: 23855 - RNA, 18 nt, Artificial Sequence
  Synthetic oligonucleotide: Ptpn6-4451
gacauagggucagugccc

SEQ ID NO: 23856 - RNA, 19 nt, Artificial Sequence
  Synthetic oligonucleotide: Ptpn6-4452
ggacauagggucagugccc

SEQ ID NO: 23857 - RNA, 20 nt, Artificial Sequence
  Synthetic oligonucleotide: Ptpn6-4453
aggacauagggucagugccc

SEQ ID NO: 23858 - RNA, 21 nt, Artificial Sequence
  Synthetic oligonucleotide: Ptpn6-4454
gaggacauagggucagugccc

SEQ ID NO: 23859 - RNA, 22 nt, Artificial Sequence
  Synthetic oligonucleotide: Ptpn6-4455
cgaggacauagggucagugccc

SEQ ID NO: 23860 - RNA, 23 nt, Artificial Sequence
  Synthetic oligonucleotide: Ptpn6-4456
ccgaggacauagggucagugccc

SEQ ID NO: 23861 - RNA, 24 nt, Artificial Sequence
  Synthetic oligonucleotide: Ptpn6-4457
gccgaggacauagggucagugccc

SEQ ID NO: 23862 - RNA, 18 nt, Artificial Sequence
  Synthetic oligonucleotide: Ptpn6-4458
aucaccuaucccccagcc

SEQ ID NO: 23863 - RNA, 19 nt, Artificial Sequence
  Synthetic oligonucleotide: Ptpn6-4459
caucaccuaucccccagcc

SEQ ID NO: 23864 - RNA, 20 nt, Artificial Sequence
  Synthetic oligonucleotide: Ptpn6-722
acaucaccuaucccccagcc

SEQ ID NO: 23865 - RNA, 21 nt, Artificial Sequence
  Synthetic oligonucleotide: Ptpn6-4460
aacaucaccuaucccccagcc

SEQ ID NO: 23866 - RNA, 22 nt, Artificial Sequence
  Synthetic oligonucleotide: Ptpn6-4461
gaacaucaccuaucccccagcc

SEQ ID NO: 23867 - RNA, 23 nt, Artificial Sequence
  Synthetic oligonucleotide: Ptpn6-4462
ggaacaucaccuaucccccagcc

SEQ ID NO: 23868 - RNA, 24 nt, Artificial Sequence
  Synthetic oligonucleotide: Ptpn6-4463
gggaacaucaccuaucccccagcc

SEQ ID NO: 23869 - RNA, 18 nt, Artificial Sequence
  Synthetic oligonucleotide: Ptpn6-4464
ugggguccccagugagcc

SEQ ID NO: 23870 - RNA, 19 nt, Artificial Sequence
  Synthetic oligonucleotide: Ptpn6-4465
augggguccccagugagcc

SEQ ID NO: 23871 - RNA, 20 nt, Artificial Sequence
  Synthetic oligonucleotide: Ptpn6-208
caugggguccccagugagcc

SEQ ID NO: 23872 - RNA, 21 nt, Artificial Sequence
  Synthetic oligonucleotide: Ptpn6-4466
ccaugggguccccagugagcc

SEQ ID NO: 23873 - RNA, 22 nt, Artificial Sequence
  Synthetic oligonucleotide: Ptpn6-4467
accaugggguccccagugagcc

SEQ ID NO: 23874 - RNA, 23 nt, Artificial Sequence
  Synthetic oligonucleotide: Ptpn6-4468
gaccaugggguccccagugagcc

SEQ ID NO: 23875 - RNA, 24 nt, Artificial Sequence
  Synthetic oligonucleotide: Ptpn6-4469
cgaccaugggguccccagugagcc

SEQ ID NO: 23876 - RNA, 18 nt, Artificial Sequence
  Synthetic oligonucleotide: Ptpn6-4470
ugcgugcagagcagggcc

SEQ ID NO: 23877 - RNA, 19 nt, Artificial Sequence
  Synthetic oligonucleotide: Ptpn6-4471
gugcgugcagagcagggcc

SEQ ID NO: 23878 - RNA, 20 nt, Artificial Sequence
  Synthetic oligonucleotide: Ptpn6-2671
ggugcgugcagagcagggcc

SEQ ID NO: 23879 - RNA, 21 nt, Artificial Sequence
  Synthetic oligonucleotide: Ptpn6-4472
aggugcgugcagagcagggcc

SEQ ID NO: 23880 - RNA, 22 nt, Artificial Sequence
  Synthetic oligonucleotide: Ptpn6-4473
caggugcgugcagagcagggcc

SEQ ID NO: 23881 - RNA, 23 nt, Artificial Sequence
  Synthetic oligonucleotide: Ptpn6-4474
gcaggugcgugcagagcagggcc

SEQ ID NO: 23882 - RNA, 24 nt, Artificial Sequence
  Synthetic oligonucleotide: Ptpn6-4475
ugcaggugcgugcagagcagggcc

SEQ ID NO: 23883 - RNA, 18 nt, Artificial Sequence
  Synthetic oligonucleotide: Ptpn6-4476
cagcaaccguacuaugcc

SEQ ID NO: 23884 - RNA, 19 nt, Artificial Sequence
  Synthetic oligonucleotide: Ptpn6-4477
ucagcaaccguacuaugcc

SEQ ID NO: 23885 - RNA, 20 nt, Artificial Sequence
  Synthetic oligonucleotide: Ptpn6-4478
gucagcaaccguacuaugcc

SEQ ID NO: 23886 - RNA, 21 nt, Artificial Sequence
  Synthetic oligonucleotide: Ptpn6-4479
agucagcaaccguacuaugcc

SEQ ID NO: 23887 - RNA, 22 nt, Artificial Sequence
  Synthetic oligonucleotide: Ptpn6-4480
aagucagcaaccguacuaugcc

SEQ ID NO: 23888 - RNA, 23 nt, Artificial Sequence
  Synthetic oligonucleotide: Ptpn6-4481
gaagucagcaaccguacuaugcc

SEQ ID NO: 23889 - RNA, 24 nt, Artificial Sequence
  Synthetic oligonucleotide: Ptpn6-4482
agaagucagcaaccguacuaugcc

SEQ ID NO: 23890 - RNA, 18 nt, Artificial Sequence
  Synthetic oligonucleotide: Ptpn6-4483
aaaccacuaagaagaagc

SEQ ID NO: 23891 - RNA, 19 nt, Artificial Sequence
  Synthetic oligonucleotide: Ptpn6-4484
gaaaccacuaagaagaagc

SEQ ID NO: 23892 - RNA, 20 nt, Artificial Sequence
  Synthetic oligonucleotide: Ptpn6-228
ugaaaccacuaagaagaagc

SEQ ID NO: 23893 - RNA, 21 nt, Artificial Sequence
  Synthetic oligonucleotide: Ptpn6-4485
uugaaaccacuaagaagaagc

SEQ ID NO: 23894 - RNA, 22 nt, Artificial Sequence
  Synthetic oligonucleotide: Ptpn6-4486
auugaaaccacuaagaagaagc

SEQ ID NO: 23895 - RNA, 23 nt, Artificial Sequence
  Synthetic oligonucleotide: Ptpn6-4487
cauugaaaccacuaagaagaagc

SEQ ID NO: 23896 - RNA, 24 nt, Artificial Sequence
  Synthetic oligonucleotide: Ptpn6-4488
ucauugaaaccacuaagaagaagc

SEQ ID NO: 23897 - RNA, 18 nt, Artificial Sequence
  Synthetic oligonucleotide: Ptpn6-4489
cucagaguuugcagaagc

SEQ ID NO: 23898 - RNA, 19 nt, Artificial Sequence
  Synthetic oligonucleotide: Ptpn6-4490
ucucagaguuugcagaagc

SEQ ID NO: 23899 - RNA, 20 nt, Artificial Sequence
  Synthetic oligonucleotide: Ptpn6-2674
aucucagaguuugcagaagc

SEQ ID NO: 23900 - RNA, 21 nt, Artificial Sequence
  Synthetic oligonucleotide: Ptpn6-4491
caucucagaguuugcagaagc

SEQ ID NO: 23901 - RNA, 22 nt, Artificial Sequence
  Synthetic oligonucleotide: Ptpn6-4492
acaucucagaguuugcagaagc

SEQ ID NO: 23902 - RNA, 23 nt, Artificial Sequence
  Synthetic oligonucleotide: Ptpn6-4493
cacaucucagaguuugcagaagc

SEQ ID NO: 23903 - RNA, 24 nt, Artificial Sequence
  Synthetic oligonucleotide: Ptpn6-4494
ccacaucucagaguuugcagaagc

SEQ ID NO: 23904 - RNA, 18 nt, Artificial Sequence
  Synthetic oligonucleotide: Ptpn6-4495
augggguccccagugagc

SEQ ID NO: 23905 - RNA, 19 nt, Artificial Sequence
  Synthetic oligonucleotide: Ptpn6-4496
caugggguccccagugagc

SEQ ID NO: 23906 - RNA, 20 nt, Artificial Sequence
  Synthetic oligonucleotide: Ptpn6-699
ccaugggguccccagugagc

SEQ ID NO: 23907 - RNA, 21 nt, Artificial Sequence
  Synthetic oligonucleotide: Ptpn6-4497
accaugggguccccagugagc

SEQ ID NO: 23908 - RNA, 22 nt, Artificial Sequence
  Synthetic oligonucleotide: Ptpn6-4498
gaccaugggguccccagugagc

SEQ ID NO: 23909 - RNA, 23 nt, Artificial Sequence
  Synthetic oligonucleotide: Ptpn6-4499
cgaccaugggguccccagugagc

SEQ ID NO: 23910 - RNA, 24 nt, Artificial Sequence
  Synthetic oligonucleotide: Ptpn6-4500
ccgaccaugggguccccagugagc

SEQ ID NO: 23911 - RNA, 18 nt, Artificial Sequence
  Synthetic oligonucleotide: Ptpn6-4501
gucaaaccucagguccgc

SEQ ID NO: 23912 - RNA, 19 nt, Artificial Sequence
  Synthetic oligonucleotide: Ptpn6-4502
agucaaaccucagguccgc

SEQ ID NO: 23913 - RNA, 20 nt, Artificial Sequence
  Synthetic oligonucleotide: Ptpn6-4503
cagucaaaccucagguccgc

SEQ ID NO: 23914 - RNA, 21 nt, Artificial Sequence
  Synthetic oligonucleotide: Ptpn6-4504
gcagucaaaccucagguccgc

SEQ ID NO: 23915 - RNA, 22 nt, Artificial Sequence
  Synthetic oligonucleotide: Ptpn6-4505
ggcagucaaaccucagguccgc

SEQ ID NO: 23916 - RNA, 23 nt, Artificial Sequence
  Synthetic oligonucleotide: Ptpn6-4506
gggcagucaaaccucagguccgc

SEQ ID NO: 23917 - RNA, 24 nt, Artificial Sequence
  Synthetic oligonucleotide: Ptpn6-4507
ggggcagucaaaccucagguccgc

SEQ ID NO: 23918 - RNA, 18 nt, Artificial Sequence
  Synthetic oligonucleotide: Ptpn6-4508
auggugcgggcgcagcgc

SEQ ID NO: 23919 - RNA, 19 nt, Artificial Sequence
  Synthetic oligonucleotide: Ptpn6-4509
gauggugcgggcgcagcgc

SEQ ID NO: 23920 - RNA, 20 nt, Artificial Sequence
  Synthetic oligonucleotide: Ptpn6-711
agauggugcgggcgcagcgc

SEQ ID NO: 23921 - RNA, 21 nt, Artificial Sequence
  Synthetic oligonucleotide: Ptpn6-4510
cagauggugcgggcgcagcgc

SEQ ID NO: 23922 - RNA, 22 nt, Artificial Sequence
  Synthetic oligonucleotide: Ptpn6-4511
ccagauggugcgggcgcagcgc

SEQ ID NO: 23923 - RNA, 23 nt, Artificial Sequence
  Synthetic oligonucleotide: Ptpn6-4512
uccagauggugcgggcgcagcgc

SEQ ID NO: 23924 - RNA, 24 nt, Artificial Sequence
  Synthetic oligonucleotide: Ptpn6-4513
auccagauggugcgggcgcagcgc

SEQ ID NO: 23925 - RNA, 18 nt, Artificial Sequence
  Synthetic oligonucleotide: Ptpn6-4514
accagaucaaccagcggc

SEQ ID NO: 23926 - RNA, 19 nt, Artificial Sequence
  Synthetic oligonucleotide: Ptpn6-4515
gaccagaucaaccagcggc

SEQ ID NO: 23927 - RNA, 20 nt, Artificial Sequence
  Synthetic oligonucleotide: Ptpn6-214
ggaccagaucaaccagcggc

SEQ ID NO: 23928 - RNA, 21 nt, Artificial Sequence
  Synthetic oligonucleotide: Ptpn6-4516
uggaccagaucaaccagcggc

SEQ ID NO: 23929 - RNA, 22 nt, Artificial Sequence
  Synthetic oligonucleotide: Ptpn6-4517
cuggaccagaucaaccagcggc

SEQ ID NO: 23930 - RNA, 23 nt, Artificial Sequence
  Synthetic oligonucleotide: Ptpn6-4518
ccuggaccagaucaaccagcggc

SEQ ID NO: 23931 - RNA, 24 nt, Artificial Sequence
  Synthetic oligonucleotide: Ptpn6-4519
uccuggaccagaucaaccagcggc

SEQ ID NO: 23932 - RNA, 18 nt, Artificial Sequence
  Synthetic oligonucleotide: Ptpn6-4520
gucuggaagggcagcggc

SEQ ID NO: 23933 - RNA, 19 nt, Artificial Sequence
  Synthetic oligonucleotide: Ptpn6-4521
cgucuggaagggcagcggc

SEQ ID NO: 23934 - RNA, 20 nt, Artificial Sequence
  Synthetic oligonucleotide: Ptpn6-664
gcgucuggaagggcagcggc

SEQ ID NO: 23935 - RNA, 21 nt, Artificial Sequence
  Synthetic oligonucleotide: Ptpn6-4522
agcgucuggaagggcagcggc

SEQ ID NO: 23936 - RNA, 22 nt, Artificial Sequence
  Synthetic oligonucleotide: Ptpn6-4523
cagcgucuggaagggcagcggc

SEQ ID NO: 23937 - RNA, 23 nt, Artificial Sequence
  Synthetic oligonucleotide: Ptpn6-4524
ccagcgucuggaagggcagcggc

SEQ ID NO: 23938 - RNA, 24 nt, Artificial Sequence
  Synthetic oligonucleotide: Ptpn6-4525
accagcgucuggaagggcagcggc

SEQ ID NO: 23939 - RNA, 18 nt, Artificial Sequence
  Synthetic oligonucleotide: Ptpn6-4526
cggccagagaacaagggc

SEQ ID NO: 23940 - RNA, 19 nt, Artificial Sequence
  Synthetic oligonucleotide: Ptpn6-4527
gcggccagagaacaagggc

SEQ ID NO: 23941 - RNA, 20 nt, Artificial Sequence
  Synthetic oligonucleotide: Ptpn6-667
agcggccagagaacaagggc

SEQ ID NO: 23942 - RNA, 21 nt, Artificial Sequence
  Synthetic oligonucleotide: Ptpn6-4528
cagcggccagagaacaagggc

SEQ ID NO: 23943 - RNA, 22 nt, Artificial Sequence
  Synthetic oligonucleotide: Ptpn6-4529
gcagcggccagagaacaagggc

SEQ ID NO: 23944 - RNA, 23 nt, Artificial Sequence
  Synthetic oligonucleotide: Ptpn6-4530
ggcagcggccagagaacaagggc

SEQ ID NO: 23945 - RNA, 24 nt, Artificial Sequence
  Synthetic oligonucleotide: Ptpn6-4531
gggcagcggccagagaacaagggc

SEQ ID NO: 23946 - RNA, 18 nt, Artificial Sequence
  Synthetic oligonucleotide: Ptpn6-4532
ggugguucgcagaagggc

SEQ ID NO: 23947 - RNA, 19 nt, Artificial Sequence
  Synthetic oligonucleotide: Ptpn6-4533
aggugguucgcagaagggc

SEQ ID NO: 23948 - RNA, 20 nt, Artificial Sequence
  Synthetic oligonucleotide: Ptpn6-4534
aaggugguucgcagaagggc

SEQ ID NO: 23949 - RNA, 21 nt, Artificial Sequence
  Synthetic oligonucleotide: Ptpn6-4535
gaaggugguucgcagaagggc

SEQ ID NO: 23950 - RNA, 22 nt, Artificial Sequence
  Synthetic oligonucleotide: Ptpn6-4536
ggaaggugguucgcagaagggc

SEQ ID NO: 23951 - RNA, 23 nt, Artificial Sequence
  Synthetic oligonucleotide: Ptpn6-4537
gggaaggugguucgcagaagggc

SEQ ID NO: 23952 - RNA, 24 nt, Artificial Sequence
  Synthetic oligonucleotide: Ptpn6-4538
ugggaaggugguucgcagaagggc

SEQ ID NO: 23953 - RNA, 18 nt, Artificial Sequence
  Synthetic oligonucleotide: Ptpn6-4539
gugcgugcagagcagggc

SEQ ID NO: 23954 - RNA, 19 nt, Artificial Sequence
  Synthetic oligonucleotide: Ptpn6-4540
ggugcgugcagagcagggc

SEQ ID NO: 23955 - RNA, 20 nt, Artificial Sequence
  Synthetic oligonucleotide: Ptpn6-4541
aggugcgugcagagcagggc

SEQ ID NO: 23956 - RNA, 21 nt, Artificial Sequence
  Synthetic oligonucleotide: Ptpn6-4542
caggugcgugcagagcagggc

SEQ ID NO: 23957 - RNA, 22 nt, Artificial Sequence
  Synthetic oligonucleotide: Ptpn6-4543
gcaggugcgugcagagcagggc

SEQ ID NO: 23958 - RNA, 23 nt, Artificial Sequence
  Synthetic oligonucleotide: Ptpn6-4544
ugcaggugcgugcagagcagggc

SEQ ID NO: 23959 - RNA, 24 nt, Artificial Sequence
  Synthetic oligonucleotide: Ptpn6-4545
cugcaggugcgugcagagcagggc

SEQ ID NO: 23960 - RNA, 18 nt, Artificial Sequence
  Synthetic oligonucleotide: Ptpn6-4546
gguggggaccggcagggc

SEQ ID NO: 23961 - RNA, 19 nt, Artificial Sequence
  Synthetic oligonucleotide: Ptpn6-4547
ugguggggaccggcagggc

SEQ ID NO: 23962 - RNA, 20 nt, Artificial Sequence
  Synthetic oligonucleotide: Ptpn6-2681
augguggggaccggcagggc

SEQ ID NO: 23963 - RNA, 21 nt, Artificial Sequence
  Synthetic oligonucleotide: Ptpn6-4548
caugguggggaccggcagggc

SEQ ID NO: 23964 - RNA, 22 nt, Artificial Sequence
  Synthetic oligonucleotide: Ptpn6-4549
gcaugguggggaccggcagggc

SEQ ID NO: 23965 - RNA, 23 nt, Artificial Sequence
  Synthetic oligonucleotide: Ptpn6-4550
ugcaugguggggaccggcagggc

SEQ ID NO: 23966 - RNA, 24 nt, Artificial Sequence
  Synthetic oligonucleotide: Ptpn6-4551
gugcaugguggggaccggcagggc

SEQ ID NO: 23967 - RNA, 18 nt, Artificial Sequence
  Synthetic oligonucleotide: Ptpn6-4552
aaugcgucccauacuggc

SEQ ID NO: 23968 - RNA, 19 nt, Artificial Sequence
  Synthetic oligonucleotide: Ptpn6-4553
aaaugcgucccauacuggc

SEQ ID NO: 23969 - RNA, 20 nt, Artificial Sequence
  Synthetic oligonucleotide: Ptpn6-686
caaaugcgucccauacuggc

SEQ ID NO: 23970 - RNA, 21 nt, Artificial Sequence
  Synthetic oligonucleotide: Ptpn6-4554
acaaaugcgucccauacuggc

SEQ ID NO: 23971 - RNA, 22 nt, Artificial Sequence
  Synthetic oligonucleotide: Ptpn6-4555
aacaaaugcgucccauacuggc

SEQ ID NO: 23972 - RNA, 23 nt, Artificial Sequence
  Synthetic oligonucleotide: Ptpn6-4556
gaacaaaugcgucccauacuggc

SEQ ID NO: 23973 - RNA, 24 nt, Artificial Sequence
  Synthetic oligonucleotide: Ptpn6-4557
ggaacaaaugcgucccauacuggc

SEQ ID NO: 23974 - RNA, 18 nt, Artificial Sequence
  Synthetic oligonucleotide: Ptpn6-4558
ucuggcagauggcguggc

SEQ ID NO: 23975 - RNA, 19 nt, Artificial Sequence
  Synthetic oligonucleotide: Ptpn6-4559
uucuggcagauggcguggc

SEQ ID NO: 23976 - RNA, 20 nt, Artificial Sequence
  Synthetic oligonucleotide: Ptpn6-188
cuucuggcagauggcguggc

SEQ ID NO: 23977 - RNA, 21 nt, Artificial Sequence
  Synthetic oligonucleotide: Ptpn6-4560
acuucuggcagauggcguggc

SEQ ID NO: 23978 - RNA, 22 nt, Artificial Sequence
  Synthetic oligonucleotide: Ptpn6-4561
gacuucuggcagauggcguggc

SEQ ID NO: 23979 - RNA, 23 nt, Artificial Sequence
  Synthetic oligonucleotide: Ptpn6-4562
ugacuucuggcagauggcguggc

SEQ ID NO: 23980 - RNA, 24 nt, Artificial Sequence
  Synthetic oligonucleotide: Ptpn6-4563
augacuucuggcagauggcguggc

SEQ ID NO: 23981 - RNA, 18 nt, Artificial Sequence
  Synthetic oligonucleotide: Ptpn6-4564
uacucugugaccaacugc

SEQ ID NO: 23982 - RNA, 19 nt, Artificial Sequence
  Synthetic oligonucleotide: Ptpn6-4565
cuacucugugaccaacugc

SEQ ID NO: 23983 - RNA, 20 nt, Artificial Sequence
  Synthetic oligonucleotide: Ptpn6-199
ccuacucugugaccaacugc

SEQ ID NO: 23984 - RNA, 21 nt, Artificial Sequence
  Synthetic oligonucleotide: Ptpn6-4566
cccuacucugugaccaacugc

SEQ ID NO: 23985 - RNA, 22 nt, Artificial Sequence
  Synthetic oligonucleotide: Ptpn6-4567
gcccuacucugugaccaacugc

SEQ ID NO: 23986 - RNA, 23 nt, Artificial Sequence
  Synthetic oligonucleotide: Ptpn6-4568
ggcccuacucugugaccaacugc

SEQ ID NO: 23987 - RNA, 24 nt, Artificial Sequence
  Synthetic oligonucleotide: Ptpn6-4569
gggcccuacucugugaccaacugc

SEQ ID NO: 23988 - RNA, 18 nt, Artificial Sequence
  Synthetic oligonucleotide: Ptpn6-4570
acagccgagugauccugc

SEQ ID NO: 23989 - RNA, 19 nt, Artificial Sequence
  Synthetic oligonucleotide: Ptpn6-4571
cacagccgagugauccugc

SEQ ID NO: 23990 - RNA, 20 nt, Artificial Sequence
  Synthetic oligonucleotide: Ptpn6-174
ccacagccgagugauccugc

SEQ ID NO: 23991 - RNA, 21 nt, Artificial Sequence
  Synthetic oligonucleotide: Ptpn6-4572
accacagccgagugauccugc

SEQ ID NO: 23992 - RNA, 22 nt, Artificial Sequence
  Synthetic oligonucleotide: Ptpn6-4573
gaccacagccgagugauccugc

SEQ ID NO: 23993 - RNA, 23 nt, Artificial Sequence
  Synthetic oligonucleotide: Ptpn6-4574
ugaccacagccgagugauccugc

SEQ ID NO: 23994 - RNA, 24 nt, Artificial Sequence
  Synthetic oligonucleotide: Ptpn6-4575
uugaccacagccgagugauccugc

SEQ ID NO: 23995 - RNA, 18 nt, Artificial Sequence
  Synthetic oligonucleotide: Ptpn6-4576
gacugugacauugacauc

SEQ ID NO: 23996 - RNA, 19 nt, Artificial Sequence
  Synthetic oligonucleotide: Ptpn6-4577
ggacugugacauugacauc

SEQ ID NO: 23997 - RNA, 20 nt, Artificial Sequence
  Synthetic oligonucleotide: Ptpn6-709
uggacugugacauugacauc

SEQ ID NO: 23998 - RNA, 21 nt, Artificial Sequence
  Synthetic oligonucleotide: Ptpn6-4578
cuggacugugacauugacauc

SEQ ID NO: 23999 - RNA, 22 nt, Artificial Sequence
  Synthetic oligonucleotide: Ptpn6-4579
ccuggacugugacauugacauc

SEQ ID NO: 24000 - RNA, 23 nt, Artificial Sequence
  Synthetic oligonucleotide: Ptpn6-4580
gccuggacugugacauugacauc

SEQ ID NO: 24001 - RNA, 24 nt, Artificial Sequence
  Synthetic oligonucleotide: Ptpn6-4581
cgccuggacugugacauugacauc

SEQ ID NO: 24002 - RNA, 18 nt, Artificial Sequence
  Synthetic oligonucleotide: Ptpn6-4582
aagagcaaggguucccuc

SEQ ID NO: 24003 - RNA, 19 nt, Artificial Sequence
  Synthetic oligonucleotide: Ptpn6-4583
gaagagcaaggguucccuc

SEQ ID NO: 24004 - RNA, 20 nt, Artificial Sequence
  Synthetic oligonucleotide: Ptpn6-739
agaagagcaaggguucccuc

SEQ ID NO: 24005 - RNA, 21 nt, Artificial Sequence
  Synthetic oligonucleotide: Ptpn6-4584
gagaagagcaaggguucccuc

SEQ ID NO: 24006 - RNA, 22 nt, Artificial Sequence
  Synthetic oligonucleotide: Ptpn6-4585
ggagaagagcaaggguucccuc

SEQ ID NO: 24007 - RNA, 23 nt, Artificial Sequence
  Synthetic oligonucleotide: Ptpn6-4586
aggagaagagcaaggguucccuc

SEQ ID NO: 24008 - RNA, 24 nt, Artificial Sequence
  Synthetic oligonucleotide: Ptpn6-4587
aaggagaagagcaaggguucccuc

SEQ ID NO: 24009 - RNA, 18 nt, Artificial Sequence
  Synthetic oligonucleotide: Ptpn6-4588
gagaccuucgacagccuc

SEQ ID NO: 24010 - RNA, 19 nt, Artificial Sequence
  Synthetic oligonucleotide: Ptpn6-4589
ggagaccuucgacagccuc

SEQ ID NO: 24011 - RNA, 20 nt, Artificial Sequence
  Synthetic oligonucleotide: Ptpn6-631
uggagaccuucgacagccuc

SEQ ID NO: 24012 - RNA, 21 nt, Artificial Sequence
  Synthetic oligonucleotide: Ptpn6-4590
uuggagaccuucgacagccuc

SEQ ID NO: 24013 - RNA, 22 nt, Artificial Sequence
  Synthetic oligonucleotide: Ptpn6-4591
uuuggagaccuucgacagccuc

SEQ ID NO: 24014 - RNA, 23 nt, Artificial Sequence
  Synthetic oligonucleotide: Ptpn6-4592
guuuggagaccuucgacagccuc

SEQ ID NO: 24015 - RNA, 24 nt, Artificial Sequence
  Synthetic oligonucleotide: Ptpn6-4593
gguuuggagaccuucgacagccuc

SEQ ID NO: 24016 - RNA, 18 nt, Artificial Sequence
  Synthetic oligonucleotide: Ptpn6-4594
auugucaucgacaugcuc

SEQ ID NO: 24017 - RNA, 19 nt, Artificial Sequence
  Synthetic oligonucleotide: Ptpn6-4595
cauugucaucgacaugcuc

SEQ ID NO: 24018 - RNA, 20 nt, Artificial Sequence
  Synthetic oligonucleotide: Ptpn6-706
ucauugucaucgacaugcuc

SEQ ID NO: 24019 - RNA, 21 nt, Artificial Sequence
  Synthetic oligonucleotide: Ptpn6-4596
aucauugucaucgacaugcuc

SEQ ID NO: 24020 - RNA, 22 nt, Artificial Sequence
  Synthetic oligonucleotide: Ptpn6-4597
caucauugucaucgacaugcuc

SEQ ID NO: 24021 - RNA, 23 nt, Artificial Sequence
  Synthetic oligonucleotide: Ptpn6-4598
ccaucauugucaucgacaugcuc

SEQ ID NO: 24022 - RNA, 24 nt, Artificial Sequence
  Synthetic oligonucleotide: Ptpn6-4599
accaucauugucaucgacaugcuc

SEQ ID NO: 24023 - RNA, 18 nt, Artificial Sequence
  Synthetic oligonucleotide: Ptpn6-4600
agaacuugcaccagcguc

SEQ ID NO: 24024 - RNA, 19 nt, Artificial Sequence
  Synthetic oligonucleotide: Ptpn6-4601
aagaacuugcaccagcguc

SEQ ID NO: 24025 - RNA, 20 nt, Artificial Sequence
  Synthetic oligonucleotide: Ptpn6-168
gaagaacuugcaccagcguc

SEQ ID NO: 24026 - RNA, 21 nt, Artificial Sequence
  Synthetic oligonucleotide: Ptpn6-4602
ugaagaacuugcaccagcguc

SEQ ID NO: 24027 - RNA, 22 nt, Artificial Sequence
  Synthetic oligonucleotide: Ptpn6-4603
gugaagaacuugcaccagcguc

SEQ ID NO: 24028 - RNA, 23 nt, Artificial Sequence
  Synthetic oligonucleotide: Ptpn6-4604
ggugaagaacuugcaccagcguc

SEQ ID NO: 24029 - RNA, 24 nt, Artificial Sequence
  Synthetic oligonucleotide: Ptpn6-4605
aggugaagaacuugcaccagcguc

SEQ ID NO: 24030 - RNA, 18 nt, Artificial Sequence
  Synthetic oligonucleotide: Ptpn6-4606
ucgccagccaggguuguc

SEQ ID NO: 24031 - RNA, 19 nt, Artificial Sequence
  Synthetic oligonucleotide: Ptpn6-4607
aucgccagccaggguuguc

SEQ ID NO: 24032 - RNA, 20 nt, Artificial Sequence
  Synthetic oligonucleotide: Ptpn6-182
caucgccagccaggguuguc

SEQ ID NO: 24033 - RNA, 21 nt, Artificial Sequence
  Synthetic oligonucleotide: Ptpn6-4608
acaucgccagccaggguuguc

SEQ ID NO: 24034 - RNA, 22 nt, Artificial Sequence
  Synthetic oligonucleotide: Ptpn6-4609
uacaucgccagccaggguuguc

SEQ ID NO: 24035 - RNA, 23 nt, Artificial Sequence
  Synthetic oligonucleotide: Ptpn6-4610
cuacaucgccagccaggguuguc

SEQ ID NO: 24036 - RNA, 24 nt, Artificial Sequence
  Synthetic oligonucleotide: Ptpn6-4611
ccuacaucgccagccaggguuguc

SEQ ID NO: 24037 - RNA, 18 nt, Artificial Sequence
  Synthetic oligonucleotide: Ptpn6-4612
cccccggagaccugauuc

SEQ ID NO: 24038 - RNA, 19 nt, Artificial Sequence
  Synthetic oligonucleotide: Ptpn6-4613
gcccccggagaccugauuc

SEQ ID NO: 24039 - RNA, 20 nt, Artificial Sequence
  Synthetic oligonucleotide: Ptpn6-2690
ugcccccggagaccugauuc

SEQ ID NO: 24040 - RNA, 21 nt, Artificial Sequence
  Synthetic oligonucleotide: Ptpn6-4614
gugcccccggagaccugauuc

SEQ ID NO: 24041 - RNA, 22 nt, Artificial Sequence
  Synthetic oligonucleotide: Ptpn6-4615
agugcccccggagaccugauuc

SEQ ID NO: 24042 - RNA, 23 nt, Artificial Sequence
  Synthetic oligonucleotide: Ptpn6-4616
cagugcccccggagaccugauuc

SEQ ID NO: 24043 - RNA, 24 nt, Artificial Sequence
  Synthetic oligonucleotide: Ptpn6-4617
ucagugcccccggagaccugauuc

SEQ ID NO: 24044 - RNA, 18 nt, Artificial Sequence
  Synthetic oligonucleotide: Ptpn6-4618
ggggguguccucagcuuc

SEQ ID NO: 24045 - RNA, 19 nt, Artificial Sequence
  Synthetic oligonucleotide: Ptpn6-4619
uggggguguccucagcuuc

SEQ ID NO: 24046 - RNA, 20 nt, Artificial Sequence
  Synthetic oligonucleotide: Ptpn6-702
cuggggguguccucagcuuc

SEQ ID NO: 24047 - RNA, 21 nt, Artificial Sequence
  Synthetic oligonucleotide: Ptpn6-4620
ccuggggguguccucagcuuc

SEQ ID NO: 24048 - RNA, 22 nt, Artificial Sequence
  Synthetic oligonucleotide: Ptpn6-4621
gccuggggguguccucagcuuc

SEQ ID NO: 24049 - RNA, 23 nt, Artificial Sequence
  Synthetic oligonucleotide: Ptpn6-4622
agccuggggguguccucagcuuc

SEQ ID NO: 24050 - RNA, 24 nt, Artificial Sequence
  Synthetic oligonucleotide: Ptpn6-4623
gagccuggggguguccucagcuuc

SEQ ID NO: 24051 - RNA, 18 nt, Artificial Sequence
  Synthetic oligonucleotide: Ptpn6-4624
acagccaaggcuggcuuc

SEQ ID NO: 24052 - RNA, 19 nt, Artificial Sequence
  Synthetic oligonucleotide: Ptpn6-4625
uacagccaaggcuggcuuc

SEQ ID NO: 24053 - RNA, 20 nt, Artificial Sequence
  Synthetic oligonucleotide: Ptpn6-165
auacagccaaggcuggcuuc

SEQ ID NO: 24054 - RNA, 21 nt, Artificial Sequence
  Synthetic oligonucleotide: Ptpn6-4626
gauacagccaaggcuggcuuc

SEQ ID NO: 24055 - RNA, 22 nt, Artificial Sequence
  Synthetic oligonucleotide: Ptpn6-4627
ggauacagccaaggcuggcuuc

SEQ ID NO: 24056 - RNA, 23 nt, Artificial Sequence
  Synthetic oligonucleotide: Ptpn6-4628
aggauacagccaaggcuggcuuc

SEQ ID NO: 24057 - RNA, 24 nt, Artificial Sequence
  Synthetic oligonucleotide: Ptpn6-4629
gaggauacagccaaggcuggcuuc

SEQ ID NO: 24058 - RNA, 18 nt, Artificial Sequence
  Synthetic oligonucleotide: Ptpn6-4630
gaccugguggagcauuuc

SEQ ID NO: 24059 - RNA, 19 nt, Artificial Sequence
  Synthetic oligonucleotide: Ptpn6-4631
ggaccugguggagcauuuc

SEQ ID NO: 24060 - RNA, 20 nt, Artificial Sequence
  Synthetic oligonucleotide: Ptpn6-638
cggaccugguggagcauuuc

SEQ ID NO: 24061 - RNA, 21 nt, Artificial Sequence
  Synthetic oligonucleotide: Ptpn6-4632
acggaccugguggagcauuuc

SEQ ID NO: 24062 - RNA, 22 nt, Artificial Sequence
  Synthetic oligonucleotide: Ptpn6-4633
cacggaccugguggagcauuuc

SEQ ID NO: 24063 - RNA, 23 nt, Artificial Sequence
  Synthetic oligonucleotide: Ptpn6-4634
ucacggaccugguggagcauuuc

SEQ ID NO: 24064 - RNA, 24 nt, Artificial Sequence
  Synthetic oligonucleotide: Ptpn6-4635
cucacggaccugguggagcauuuc

SEQ ID NO: 24065 - RNA, 18 nt, Artificial Sequence
  Synthetic oligonucleotide: Ptpn6-4636
cugcacacuaagaacaag

SEQ ID NO: 24066 - RNA, 19 nt, Artificial Sequence
  Synthetic oligonucleotide: Ptpn6-4637
ccugcacacuaagaacaag

SEQ ID NO: 24067 - RNA, 20 nt, Artificial Sequence
  Synthetic oligonucleotide: Ptpn6-233
accugcacacuaagaacaag

SEQ ID NO: 24068 - RNA, 21 nt, Artificial Sequence
  Synthetic oligonucleotide: Ptpn6-4638
aaccugcacacuaagaacaag

SEQ ID NO: 24069 - RNA, 22 nt, Artificial Sequence
  Synthetic oligonucleotide: Ptpn6-4639
gaaccugcacacuaagaacaag

SEQ ID NO: 24070 - RNA, 23 nt, Artificial Sequence
  Synthetic oligonucleotide: Ptpn6-4640
agaaccugcacacuaagaacaag

SEQ ID NO: 24071 - RNA, 24 nt, Artificial Sequence
  Synthetic oligonucleotide: Ptpn6-4641
gagaaccugcacacuaagaacaag

SEQ ID NO: 24072 - RNA, 18 nt, Artificial Sequence
  Synthetic oligonucleotide: Ptpn6-4642
cagcggucagcagacaag

SEQ ID NO: 24073 - RNA, 19 nt, Artificial Sequence
  Synthetic oligonucleotide: Ptpn6-4643
gcagcggucagcagacaag

SEQ ID NO: 24074 - RNA, 20 nt, Artificial Sequence
  Synthetic oligonucleotide: Ptpn6-736
agcagcggucagcagacaag

SEQ ID NO: 24075 - RNA, 21 nt, Artificial Sequence
  Synthetic oligonucleotide: Ptpn6-4644
aagcagcggucagcagacaag

SEQ ID NO: 24076 - RNA, 22 nt, Artificial Sequence
  Synthetic oligonucleotide: Ptpn6-4645
gaagcagcggucagcagacaag

SEQ ID NO: 24077 - RNA, 23 nt, Artificial Sequence
  Synthetic oligonucleotide: Ptpn6-4646
agaagcagcggucagcagacaag

SEQ ID NO: 24078 - RNA, 24 nt, Artificial Sequence
  Synthetic oligonucleotide: Ptpn6-4647
aagaagcagcggucagcagacaag

SEQ ID NO: 24079 - RNA, 18 nt, Artificial Sequence
  Synthetic oligonucleotide: Ptpn6-4648
agcaaggguucccucaag

SEQ ID NO: 24080 - RNA, 19 nt, Artificial Sequence
  Synthetic oligonucleotide: Ptpn6-4649
gagcaaggguucccucaag

SEQ ID NO: 24081 - RNA, 20 nt, Artificial Sequence
  Synthetic oligonucleotide: Ptpn6-240
agagcaaggguucccucaag

SEQ ID NO: 24082 - RNA, 21 nt, Artificial Sequence
  Synthetic oligonucleotide: Ptpn6-4650
aagagcaaggguucccucaag

SEQ ID NO: 24083 - RNA, 22 nt, Artificial Sequence
  Synthetic oligonucleotide: Ptpn6-4651
gaagagcaaggguucccucaag

SEQ ID NO: 24084 - RNA, 23 nt, Artificial Sequence
  Synthetic oligonucleotide: Ptpn6-4652
agaagagcaaggguucccucaag

SEQ ID NO: 24085 - RNA, 24 nt, Artificial Sequence
  Synthetic oligonucleotide: Ptpn6-4653
gagaagagcaaggguucccucaag

SEQ ID NO: 24086 - RNA, 18 nt, Artificial Sequence
  Synthetic oligonucleotide: Ptpn6-4654
uuggaacugaacaagaag

SEQ ID NO: 24087 - RNA, 19 nt, Artificial Sequence
  Synthetic oligonucleotide: Ptpn6-4655
guuggaacugaacaagaag

SEQ ID NO: 24088 - RNA, 20 nt, Artificial Sequence
  Synthetic oligonucleotide: Ptpn6-650
uguuggaacugaacaagaag

SEQ ID NO: 24089 - RNA, 21 nt, Artificial Sequence
  Synthetic oligonucleotide: Ptpn6-4656
guguuggaacugaacaagaag

SEQ ID NO: 24090 - RNA, 22 nt, Artificial Sequence
  Synthetic oligonucleotide: Ptpn6-4657
aguguuggaacugaacaagaag

SEQ ID NO: 24091 - RNA, 23 nt, Artificial Sequence
  Synthetic oligonucleotide: Ptpn6-4658
gaguguuggaacugaacaagaag

SEQ ID NO: 24092 - RNA, 24 nt, Artificial Sequence
  Synthetic oligonucleotide: Ptpn6-4659
cgaguguuggaacugaacaagaag

SEQ ID NO: 24093 - RNA, 18 nt, Artificial Sequence
  Synthetic oligonucleotide: Ptpn6-4660
guggagcauuucaagaag

SEQ ID NO: 24094 - RNA, 19 nt, Artificial Sequence
  Synthetic oligonucleotide: Ptpn6-4661
gguggagcauuucaagaag

SEQ ID NO: 24095 - RNA, 20 nt, Artificial Sequence
  Synthetic oligonucleotide: Ptpn6-639
ugguggagcauuucaagaag

SEQ ID NO: 24096 - RNA, 21 nt, Artificial Sequence
  Synthetic oligonucleotide: Ptpn6-4662
cugguggagcauuucaagaag

SEQ ID NO: 24097 - RNA, 22 nt, Artificial Sequence
  Synthetic oligonucleotide: Ptpn6-4663
ccugguggagcauuucaagaag

SEQ ID NO: 24098 - RNA, 23 nt, Artificial Sequence
  Synthetic oligonucleotide: Ptpn6-4664
accugguggagcauuucaagaag

SEQ ID NO: 24099 - RNA, 24 nt, Artificial Sequence
  Synthetic oligonucleotide: Ptpn6-4665
gaccugguggagcauuucaagaag

SEQ ID NO: 24100 - RNA, 18 nt, Artificial Sequence
  Synthetic oligonucleotide: Ptpn6-4666
gaaaccacuaagaagaag

SEQ ID NO: 24101 - RNA, 19 nt, Artificial Sequence
  Synthetic oligonucleotide: Ptpn6-4667
ugaaaccacuaagaagaag

SEQ ID NO: 24102 - RNA, 20 nt, Artificial Sequence
  Synthetic oligonucleotide: Ptpn6-717
uugaaaccacuaagaagaag

SEQ ID NO: 24103 - RNA, 21 nt, Artificial Sequence
  Synthetic oligonucleotide: Ptpn6-4668
auugaaaccacuaagaagaag

SEQ ID NO: 24104 - RNA, 22 nt, Artificial Sequence
  Synthetic oligonucleotide: Ptpn6-4669
cauugaaaccacuaagaagaag

SEQ ID NO: 24105 - RNA, 23 nt, Artificial Sequence
  Synthetic oligonucleotide: Ptpn6-4670
ucauugaaaccacuaagaagaag

SEQ ID NO: 24106 - RNA, 24 nt, Artificial Sequence
  Synthetic oligonucleotide: Ptpn6-4671
uucauugaaaccacuaagaagaag

SEQ ID NO: 24107 - RNA, 18 nt, Artificial Sequence
  Synthetic oligonucleotide: Ptpn6-4672
ucucagaguuugcagaag

SEQ ID NO: 24108 - RNA, 19 nt, Artificial Sequence
  Synthetic oligonucleotide: Ptpn6-4673
aucucagaguuugcagaag

SEQ ID NO: 24109 - RNA, 20 nt, Artificial Sequence
  Synthetic oligonucleotide: Ptpn6-4674
caucucagaguuugcagaag

SEQ ID NO: 24110 - RNA, 21 nt, Artificial Sequence
  Synthetic oligonucleotide: Ptpn6-4675
acaucucagaguuugcagaag

SEQ ID NO: 24111 - RNA, 22 nt, Artificial Sequence
  Synthetic oligonucleotide: Ptpn6-4676
cacaucucagaguuugcagaag

SEQ ID NO: 24112 - RNA, 23 nt, Artificial Sequence
  Synthetic oligonucleotide: Ptpn6-4677
ccacaucucagaguuugcagaag

SEQ ID NO: 24113 - RNA, 24 nt, Artificial Sequence
  Synthetic oligonucleotide: Ptpn6-4678
cccacaucucagaguuugcagaag

SEQ ID NO: 24114 - RNA, 18 nt, Artificial Sequence
  Synthetic oligonucleotide: Ptpn6-4679
uucauugaaaccacuaag

SEQ ID NO: 24115 - RNA, 19 nt, Artificial Sequence
  Synthetic oligonucleotide: Ptpn6-4680
guucauugaaaccacuaag

SEQ ID NO: 24116 - RNA, 20 nt, Artificial Sequence
  Synthetic oligonucleotide: Ptpn6-716
aguucauugaaaccacuaag

SEQ ID NO: 24117 - RNA, 21 nt, Artificial Sequence
  Synthetic oligonucleotide: Ptpn6-4681
caguucauugaaaccacuaag

SEQ ID NO: 24118 - RNA, 22 nt, Artificial Sequence
  Synthetic oligonucleotide: Ptpn6-4682
ccaguucauugaaaccacuaag

SEQ ID NO: 24119 - RNA, 23 nt, Artificial Sequence
  Synthetic oligonucleotide: Ptpn6-4683
cccaguucauugaaaccacuaag

SEQ ID NO: 24120 - RNA, 24 nt, Artificial Sequence
  Synthetic oligonucleotide: Ptpn6-4684
gcccaguucauugaaaccacuaag

SEQ ID NO: 24121 - RNA, 18 nt, Artificial Sequence
  Synthetic oligonucleotide: Ptpn6-4685
ugggaaggugguucgcag

SEQ ID NO: 24122 - RNA, 19 nt, Artificial Sequence
  Synthetic oligonucleotide: Ptpn6-4686
gugggaaggugguucgcag

SEQ ID NO: 24123 - RNA, 20 nt, Artificial Sequence
  Synthetic oligonucleotide: Ptpn6-4687
agugggaaggugguucgcag

SEQ ID NO: 24124 - RNA, 21 nt, Artificial Sequence
  Synthetic oligonucleotide: Ptpn6-4688
cagugggaaggugguucgcag

SEQ ID NO: 24125 - RNA, 22 nt, Artificial Sequence
  Synthetic oligonucleotide: Ptpn6-4689
acagugggaaggugguucgcag

SEQ ID NO: 24126 - RNA, 23 nt, Artificial Sequence
  Synthetic oligonucleotide: Ptpn6-4690
gacagugggaaggugguucgcag

SEQ ID NO: 24127 - RNA, 24 nt, Artificial Sequence
  Synthetic oligonucleotide: Ptpn6-4691
ggacagugggaaggugguucgcag

SEQ ID NO: 24128 - RNA, 18 nt, Artificial Sequence
  Synthetic oligonucleotide: Ptpn6-4692
uggcagauggcguggcag

SEQ ID NO: 24129 - RNA, 19 nt, Artificial Sequence
  Synthetic oligonucleotide: Ptpn6-4693
cuggcagauggcguggcag

SEQ ID NO: 24130 - RNA, 20 nt, Artificial Sequence
  Synthetic oligonucleotide: Ptpn6-680
ucuggcagauggcguggcag

SEQ ID NO: 24131 - RNA, 21 nt, Artificial Sequence
  Synthetic oligonucleotide: Ptpn6-4694
uucuggcagauggcguggcag

SEQ ID NO: 24132 - RNA, 22 nt, Artificial Sequence
  Synthetic oligonucleotide: Ptpn6-4695
cuucuggcagauggcguggcag

SEQ ID NO: 24133 - RNA, 23 nt, Artificial Sequence
  Synthetic oligonucleotide: Ptpn6-4696
acuucuggcagauggcguggcag

SEQ ID NO: 24134 - RNA, 24 nt, Artificial Sequence
  Synthetic oligonucleotide: Ptpn6-4697
gacuucuggcagauggcguggcag

SEQ ID NO: 24135 - RNA, 18 nt, Artificial Sequence
  Synthetic oligonucleotide: Ptpn6-4698
caucaucgugcacugcag

SEQ ID NO: 24136 - RNA, 19 nt, Artificial Sequence
  Synthetic oligonucleotide: Ptpn6-4699
ccaucaucgugcacugcag

SEQ ID NO: 24137 - RNA, 20 nt, Artificial Sequence
  Synthetic oligonucleotide: Ptpn6-4700
cccaucaucgugcacugcag

SEQ ID NO: 24138 - RNA, 21 nt, Artificial Sequence
  Synthetic oligonucleotide: Ptpn6-4701
gcccaucaucgugcacugcag

SEQ ID NO: 24139 - RNA, 22 nt, Artificial Sequence
  Synthetic oligonucleotide: Ptpn6-4702
ggcccaucaucgugcacugcag

SEQ ID NO: 24140 - RNA, 23 nt, Artificial Sequence
  Synthetic oligonucleotide: Ptpn6-4703
gggcccaucaucgugcacugcag

SEQ ID NO: 24141 - RNA, 24 nt, Artificial Sequence
  Synthetic oligonucleotide: Ptpn6-4704
agggcccaucaucgugcacugcag

SEQ ID NO: 24142 - RNA, 18 nt, Artificial Sequence
  Synthetic oligonucleotide: Ptpn6-4705
cgcucgggcauggugcag

SEQ ID NO: 24143 - RNA, 19 nt, Artificial Sequence
  Synthetic oligonucleotide: Ptpn6-4706
gcgcucgggcauggugcag

SEQ ID NO: 24144 - RNA, 20 nt, Artificial Sequence
  Synthetic oligonucleotide: Ptpn6-712
agcgcucgggcauggugcag

SEQ ID NO: 24145 - RNA, 21 nt, Artificial Sequence
  Synthetic oligonucleotide: Ptpn6-4707
cagcgcucgggcauggugcag

SEQ ID NO: 24146 - RNA, 22 nt, Artificial Sequence
  Synthetic oligonucleotide: Ptpn6-4708
gcagcgcucgggcauggugcag

SEQ ID NO: 24147 - RNA, 23 nt, Artificial Sequence
  Synthetic oligonucleotide: Ptpn6-4709
cgcagcgcucgggcauggugcag

SEQ ID NO: 24148 - RNA, 24 nt, Artificial Sequence
  Synthetic oligonucleotide: Ptpn6-4710
gcgcagcgcucgggcauggugcag

SEQ ID NO: 24149 - RNA, 18 nt, Artificial Sequence
  Synthetic oligonucleotide: Ptpn6-4711
cugcaggugcgugcagag

SEQ ID NO: 24150 - RNA, 19 nt, Artificial Sequence
  Synthetic oligonucleotide: Ptpn6-4712
ccugcaggugcgugcagag

SEQ ID NO: 24151 - RNA, 20 nt, Artificial Sequence
  Synthetic oligonucleotide: Ptpn6-4713
uccugcaggugcgugcagag

SEQ ID NO: 24152 - RNA, 21 nt, Artificial Sequence
  Synthetic oligonucleotide: Ptpn6-4714
guccugcaggugcgugcagag

SEQ ID NO: 24153 - RNA, 22 nt, Artificial Sequence
  Synthetic oligonucleotide: Ptpn6-4715
gguccugcaggugcgugcagag

SEQ ID NO: 24154 - RNA, 23 nt, Artificial Sequence
  Synthetic oligonucleotide: Ptpn6-4716
agguccugcaggugcgugcagag

SEQ ID NO: 24155 - RNA, 24 nt, Artificial Sequence
  Synthetic oligonucleotide: Ptpn6-4717
gagguccugcaggugcgugcagag

SEQ ID NO: 24156 - RNA, 18 nt, Artificial Sequence
  Synthetic oligonucleotide: Ptpn6-4718
gucaugaccacccgagag

SEQ ID NO: 24157 - RNA, 19 nt, Artificial Sequence
  Synthetic oligonucleotide: Ptpn6-4719
cgucaugaccacccgagag

SEQ ID NO: 24158 - RNA, 20 nt, Artificial Sequence
  Synthetic oligonucleotide: Ptpn6-683
ucgucaugaccacccgagag

SEQ ID NO: 24159 - RNA, 21 nt, Artificial Sequence
  Synthetic oligonucleotide: Ptpn6-4720
aucgucaugaccacccgagag

SEQ ID NO: 24160 - RNA, 22 nt, Artificial Sequence
  Synthetic oligonucleotide: Ptpn6-4721
caucgucaugaccacccgagag

SEQ ID NO: 24161 - RNA, 23 nt, Artificial Sequence
  Synthetic oligonucleotide: Ptpn6-4722
ucaucgucaugaccacccgagag

SEQ ID NO: 24162 - RNA, 24 nt, Artificial Sequence
  Synthetic oligonucleotide: Ptpn6-4723
gucaucgucaugaccacccgagag

SEQ ID NO: 24163 - RNA, 18 nt, Artificial Sequence
  Synthetic oligonucleotide: Ptpn6-4724
gucccauacuggcccgag

SEQ ID NO: 24164 - RNA, 19 nt, Artificial Sequence
  Synthetic oligonucleotide: Ptpn6-4725
cgucccauacuggcccgag

SEQ ID NO: 24165 - RNA, 20 nt, Artificial Sequence
  Synthetic oligonucleotide: Ptpn6-687
gcgucccauacuggcccgag

SEQ ID NO: 24166 - RNA, 21 nt, Artificial Sequence
  Synthetic oligonucleotide: Ptpn6-4726
ugcgucccauacuggcccgag

SEQ ID NO: 24167 - RNA, 22 nt, Artificial Sequence
  Synthetic oligonucleotide: Ptpn6-4727
augcgucccauacuggcccgag

SEQ ID NO: 24168 - RNA, 23 nt, Artificial Sequence
  Synthetic oligonucleotide: Ptpn6-4728
aaugcgucccauacuggcccgag

SEQ ID NO: 24169 - RNA, 24 nt, Artificial Sequence
  Synthetic oligonucleotide: Ptpn6-4729
aaaugcgucccauacuggcccgag

SEQ ID NO: 24170 - RNA, 18 nt, Artificial Sequence
  Synthetic oligonucleotide: Ptpn6-4730
cggucagcagacaaggag

SEQ ID NO: 24171 - RNA, 19 nt, Artificial Sequence
  Synthetic oligonucleotide: Ptpn6-4731
gcggucagcagacaaggag

SEQ ID NO: 24172 - RNA, 20 nt, Artificial Sequence
  Synthetic oligonucleotide: Ptpn6-737
agcggucagcagacaaggag

SEQ ID NO: 24173 - RNA, 21 nt, Artificial Sequence
  Synthetic oligonucleotide: Ptpn6-4732
cagcggucagcagacaaggag

SEQ ID NO: 24174 - RNA, 22 nt, Artificial Sequence
  Synthetic oligonucleotide: Ptpn6-4733
gcagcggucagcagacaaggag

SEQ ID NO: 24175 - RNA, 23 nt, Artificial Sequence
  Synthetic oligonucleotide: Ptpn6-4734
agcagcggucagcagacaaggag

SEQ ID NO: 24176 - RNA, 24 nt, Artificial Sequence
  Synthetic oligonucleotide: Ptpn6-4735
aagcagcggucagcagacaaggag

SEQ ID NO: 24177 - RNA, 18 nt, Artificial Sequence
  Synthetic oligonucleotide: Ptpn6-4736
ucgcagaagggccaggag

SEQ ID NO: 24178 - RNA, 19 nt, Artificial Sequence
  Synthetic oligonucleotide: Ptpn6-4737
uucgcagaagggccaggag

SEQ ID NO: 24179 - RNA, 20 nt, Artificial Sequence
  Synthetic oligonucleotide: Ptpn6-4738
guucgcagaagggccaggag

SEQ ID NO: 24180 - RNA, 21 nt, Artificial Sequence
  Synthetic oligonucleotide: Ptpn6-4739
gguucgcagaagggccaggag

SEQ ID NO: 24181 - RNA, 22 nt, Artificial Sequence
  Synthetic oligonucleotide: Ptpn6-4740
ugguucgcagaagggccaggag

SEQ ID NO: 24182 - RNA, 23 nt, Artificial Sequence
  Synthetic oligonucleotide: Ptpn6-4741
gugguucgcagaagggccaggag

SEQ ID NO: 24183 - RNA, 24 nt, Artificial Sequence
  Synthetic oligonucleotide: Ptpn6-4742
ggugguucgcagaagggccaggag

SEQ ID NO: 24184 - RNA, 18 nt, Artificial Sequence
  Synthetic oligonucleotide: Ptpn6-4743
aguuugcagaagcaggag

SEQ ID NO: 24185 - RNA, 19 nt, Artificial Sequence
  Synthetic oligonucleotide: Ptpn6-4744
gaguuugcagaagcaggag

SEQ ID NO: 24186 - RNA, 20 nt, Artificial Sequence
  Synthetic oligonucleotide: Ptpn6-4745
agaguuugcagaagcaggag

SEQ ID NO: 24187 - RNA, 21 nt, Artificial Sequence
  Synthetic oligonucleotide: Ptpn6-4746
cagaguuugcagaagcaggag

SEQ ID NO: 24188 - RNA, 22 nt, Artificial Sequence
  Synthetic oligonucleotide: Ptpn6-4747
ucagaguuugcagaagcaggag

SEQ ID NO: 24189 - RNA, 23 nt, Artificial Sequence
  Synthetic oligonucleotide: Ptpn6-4748
cucagaguuugcagaagcaggag

SEQ ID NO: 24190 - RNA, 24 nt, Artificial Sequence
  Synthetic oligonucleotide: Ptpn6-4749
ucucagaguuugcagaagcaggag

SEQ ID NO: 24191 - RNA, 18 nt, Artificial Sequence
  Synthetic oligonucleotide: Ptpn6-4750
ggagugggcggagaggag

SEQ ID NO: 24192 - RNA, 19 nt, Artificial Sequence
  Synthetic oligonucleotide: Ptpn6-4751
gggagugggcggagaggag

SEQ ID NO: 24193 - RNA, 20 nt, Artificial Sequence
  Synthetic oligonucleotide: Ptpn6-4752
ugggagugggcggagaggag

SEQ ID NO: 24194 - RNA, 18 nt, Artificial Sequence
  Synthetic oligonucleotide: Ptpn6-4753
acuaagaacaagagggag

SEQ ID NO: 24195 - RNA, 19 nt, Artificial Sequence
  Synthetic oligonucleotide: Ptpn6-4754
cacuaagaacaagagggag

SEQ ID NO: 24196 - RNA, 20 nt, Artificial Sequence
  Synthetic oligonucleotide: Ptpn6-731
acacuaagaacaagagggag

SEQ ID NO: 24197 - RNA, 21 nt, Artificial Sequence
  Synthetic oligonucleotide: Ptpn6-4755
cacacuaagaacaagagggag

SEQ ID NO: 24198 - RNA, 22 nt, Artificial Sequence
  Synthetic oligonucleotide: Ptpn6-4756
gcacacuaagaacaagagggag

SEQ ID NO: 24199 - RNA, 23 nt, Artificial Sequence
  Synthetic oligonucleotide: Ptpn6-4757
ugcacacuaagaacaagagggag

SEQ ID NO: 24200 - RNA, 24 nt, Artificial Sequence
  Synthetic oligonucleotide: Ptpn6-4758
cugcacacuaagaacaagagggag

SEQ ID NO: 24201 - RNA, 18 nt, Artificial Sequence
  Synthetic oligonucleotide: Ptpn6-4759
gugugggccacgugggag

SEQ ID NO: 24202 - RNA, 19 nt, Artificial Sequence
  Synthetic oligonucleotide: Ptpn6-4760
agugugggccacgugggag

SEQ ID NO: 24203 - RNA, 20 nt, Artificial Sequence
  Synthetic oligonucleotide: Ptpn6-4761
cagugugggccacgugggag

SEQ ID NO: 24204 - RNA, 21 nt, Artificial Sequence
  Synthetic oligonucleotide: Ptpn6-4762
gcagugugggccacgugggag

SEQ ID NO: 24205 - RNA, 22 nt, Artificial Sequence
  Synthetic oligonucleotide: Ptpn6-4763
agcagugugggccacgugggag

SEQ ID NO: 24206 - RNA, 23 nt, Artificial Sequence
  Synthetic oligonucleotide: Ptpn6-4764
cagcagugugggccacgugggag

SEQ ID NO: 24207 - RNA, 24 nt, Artificial Sequence
  Synthetic oligonucleotide: Ptpn6-4765
ucagcagugugggccacgugggag

SEQ ID NO: 24208 - RNA, 18 nt, Artificial Sequence
  Synthetic oligonucleotide: Ptpn6-4766
ucagcagugugggccacg

SEQ ID NO: 24209 - RNA, 19 nt, Artificial Sequence
  Synthetic oligonucleotide: Ptpn6-4767
gucagcagugugggccacg

SEQ ID NO: 24210 - RNA, 20 nt, Artificial Sequence
  Synthetic oligonucleotide: Ptpn6-2700
ggucagcagugugggccacg

SEQ ID NO: 24211 - RNA, 21 nt, Artificial Sequence
  Synthetic oligonucleotide: Ptpn6-4768
aggucagcagugugggccacg

SEQ ID NO: 24212 - RNA, 22 nt, Artificial Sequence
  Synthetic oligonucleotide: Ptpn6-4769
aaggucagcagugugggccacg

SEQ ID NO: 24213 - RNA, 23 nt, Artificial Sequence
  Synthetic oligonucleotide: Ptpn6-4770
caaggucagcagugugggccacg

SEQ ID NO: 24214 - RNA, 24 nt, Artificial Sequence
  Synthetic oligonucleotide: Ptpn6-4771
ucaaggucagcagugugggccacg

SEQ ID NO: 24215 - RNA, 18 nt, Artificial Sequence
  Synthetic oligonucleotide: Ptpn6-4772
aggaaagucugccucacg

SEQ ID NO: 24216 - RNA, 19 nt, Artificial Sequence
  Synthetic oligonucleotide: Ptpn6-4773
caggaaagucugccucacg

SEQ ID NO: 24217 - RNA, 20 nt, Artificial Sequence
  Synthetic oligonucleotide: Ptpn6-705
gcaggaaagucugccucacg

SEQ ID NO: 24218 - RNA, 21 nt, Artificial Sequence
  Synthetic oligonucleotide: Ptpn6-4774
ggcaggaaagucugccucacg

SEQ ID NO: 24219 - RNA, 22 nt, Artificial Sequence
  Synthetic oligonucleotide: Ptpn6-4775
cggcaggaaagucugccucacg

SEQ ID NO: 24220 - RNA, 23 nt, Artificial Sequence
  Synthetic oligonucleotide: Ptpn6-4776
gcggcaggaaagucugccucacg

SEQ ID NO: 24221 - RNA, 24 nt, Artificial Sequence
  Synthetic oligonucleotide: Ptpn6-4777
agcggcaggaaagucugccucacg

SEQ ID NO: 24222 - RNA, 18 nt, Artificial Sequence
  Synthetic oligonucleotide: Ptpn6-4778
accuuacaggucuccccg

SEQ ID NO: 24223 - RNA, 19 nt, Artificial Sequence
  Synthetic oligonucleotide: Ptpn6-4779
uaccuuacaggucuccccg

SEQ ID NO: 24224 - RNA, 20 nt, Artificial Sequence
  Synthetic oligonucleotide: Ptpn6-694
guaccuuacaggucuccccg

SEQ ID NO: 24225 - RNA, 21 nt, Artificial Sequence
  Synthetic oligonucleotide: Ptpn6-4780
cguaccuuacaggucuccccg

SEQ ID NO: 24226 - RNA, 22 nt, Artificial Sequence
  Synthetic oligonucleotide: Ptpn6-4781
ccguaccuuacaggucuccccg

SEQ ID NO: 24227 - RNA, 23 nt, Artificial Sequence
  Synthetic oligonucleotide: Ptpn6-4782
uccguaccuuacaggucuccccg

SEQ ID NO: 24228 - RNA, 24 nt, Artificial Sequence
  Synthetic oligonucleotide: Ptpn6-4783
cuccguaccuuacaggucuccccg

SEQ ID NO: 24229 - RNA, 18 nt, Artificial Sequence
  Synthetic oligonucleotide: Ptpn6-4784
acucugugaccaacugcg

SEQ ID NO: 24230 - RNA, 19 nt, Artificial Sequence
  Synthetic oligonucleotide: Ptpn6-4785
uacucugugaccaacugcg

SEQ ID NO: 24231 - RNA, 20 nt, Artificial Sequence
  Synthetic oligonucleotide: Ptpn6-200
cuacucugugaccaacugcg

SEQ ID NO: 24232 - RNA, 21 nt, Artificial Sequence
  Synthetic oligonucleotide: Ptpn6-4786
ccuacucugugaccaacugcg

SEQ ID NO: 24233 - RNA, 22 nt, Artificial Sequence
  Synthetic oligonucleotide: Ptpn6-4787
cccuacucugugaccaacugcg

SEQ ID NO: 24234 - RNA, 23 nt, Artificial Sequence
  Synthetic oligonucleotide: Ptpn6-4788
gcccuacucugugaccaacugcg

SEQ ID NO: 24235 - RNA, 24 nt, Artificial Sequence
  Synthetic oligonucleotide: Ptpn6-4789
ggcccuacucugugaccaacugcg

SEQ ID NO: 24236 - RNA, 18 nt, Artificial Sequence
  Synthetic oligonucleotide: Ptpn6-4790
cagugggaaggugguucg

SEQ ID NO: 24237 - RNA, 19 nt, Artificial Sequence
  Synthetic oligonucleotide: Ptpn6-4791
acagugggaaggugguucg

SEQ ID NO: 24238 - RNA, 20 nt, Artificial Sequence
  Synthetic oligonucleotide: Ptpn6-4792
gacagugggaaggugguucg

SEQ ID NO: 24239 - RNA, 21 nt, Artificial Sequence
  Synthetic oligonucleotide: Ptpn6-4793
ggacagugggaaggugguucg

SEQ ID NO: 24240 - RNA, 22 nt, Artificial Sequence
  Synthetic oligonucleotide: Ptpn6-4794
gggacagugggaaggugguucg

SEQ ID NO: 24241 - RNA, 23 nt, Artificial Sequence
  Synthetic oligonucleotide: Ptpn6-4795
agggacagugggaaggugguucg

SEQ ID NO: 24242 - RNA, 24 nt, Artificial Sequence
  Synthetic oligonucleotide: Ptpn6-4796
gagggacagugggaaggugguucg

SEQ ID NO: 24243 - RNA, 18 nt, Artificial Sequence
  Synthetic oligonucleotide: Ptpn6-4797
agaacaucuccaccaagg

SEQ ID NO: 24244 - RNA, 19 nt, Artificial Sequence
  Synthetic oligonucleotide: Ptpn6-4798
gagaacaucuccaccaagg

SEQ ID NO: 24245 - RNA, 20 nt, Artificial Sequence
  Synthetic oligonucleotide: Ptpn6-4799
ggagaacaucuccaccaagg

SEQ ID NO: 24246 - RNA, 21 nt, Artificial Sequence
  Synthetic oligonucleotide: Ptpn6-4800
uggagaacaucuccaccaagg

SEQ ID NO: 24247 - RNA, 22 nt, Artificial Sequence
  Synthetic oligonucleotide: Ptpn6-4801
auggagaacaucuccaccaagg

SEQ ID NO: 24248 - RNA, 23 nt, Artificial Sequence
  Synthetic oligonucleotide: Ptpn6-4802
cauggagaacaucuccaccaagg

SEQ ID NO: 24249 - RNA, 24 nt, Artificial Sequence
  Synthetic oligonucleotide: Ptpn6-4803
ucauggagaacaucuccaccaagg

SEQ ID NO: 24250 - RNA, 18 nt, Artificial Sequence
  Synthetic oligonucleotide: Ptpn6-4804
aauuuggcuccccccagg

SEQ ID NO: 24251 - RNA, 19 nt, Artificial Sequence
  Synthetic oligonucleotide: Ptpn6-4805
uaauuuggcuccccccagg

SEQ ID NO: 24252 - RNA, 20 nt, Artificial Sequence
  Synthetic oligonucleotide: Ptpn6-4806
cuaauuuggcuccccccagg

SEQ ID NO: 24253 - RNA, 21 nt, Artificial Sequence
  Synthetic oligonucleotide: Ptpn6-4807
ccuaauuuggcuccccccagg

SEQ ID NO: 24254 - RNA, 22 nt, Artificial Sequence
  Synthetic oligonucleotide: Ptpn6-4808
gccuaauuuggcuccccccagg

SEQ ID NO: 24255 - RNA, 23 nt, Artificial Sequence
  Synthetic oligonucleotide: Ptpn6-4809
ggccuaauuuggcuccccccagg

SEQ ID NO: 24256 - RNA, 24 nt, Artificial Sequence
  Synthetic oligonucleotide: Ptpn6-4810
uggccuaauuuggcuccccccagg

SEQ ID NO: 24257 - RNA, 18 nt, Artificial Sequence
  Synthetic oligonucleotide: Ptpn6-4811
cacacuaagaacaagagg

SEQ ID NO: 24258 - RNA, 19 nt, Artificial Sequence
  Synthetic oligonucleotide: Ptpn6-4812
gcacacuaagaacaagagg

SEQ ID NO: 24259 - RNA, 20 nt, Artificial Sequence
  Synthetic oligonucleotide: Ptpn6-729
ugcacacuaagaacaagagg

SEQ ID NO: 24260 - RNA, 21 nt, Artificial Sequence
  Synthetic oligonucleotide: Ptpn6-4813
cugcacacuaagaacaagagg

SEQ ID NO: 24261 - RNA, 22 nt, Artificial Sequence
  Synthetic oligonucleotide: Ptpn6-4814
ccugcacacuaagaacaagagg

SEQ ID NO: 24262 - RNA, 23 nt, Artificial Sequence
  Synthetic oligonucleotide: Ptpn6-4815
accugcacacuaagaacaagagg

SEQ ID NO: 24263 - RNA, 24 nt, Artificial Sequence
  Synthetic oligonucleotide: Ptpn6-4816
aaccugcacacuaagaacaagagg

SEQ ID NO: 24264 - RNA, 18 nt, Artificial Sequence
  Synthetic oligonucleotide: Ptpn6-4817
ucaugaccacccgagagg

SEQ ID NO: 24265 - RNA, 19 nt, Artificial Sequence
  Synthetic oligonucleotide: Ptpn6-4818
gucaugaccacccgagagg

SEQ ID NO: 24266 - RNA, 20 nt, Artificial Sequence
  Synthetic oligonucleotide: Ptpn6-190
cgucaugaccacccgagagg

SEQ ID NO: 24267 - RNA, 21 nt, Artificial Sequence
  Synthetic oligonucleotide: Ptpn6-4819
ucgucaugaccacccgagagg

SEQ ID NO: 24268 - RNA, 22 nt, Artificial Sequence
  Synthetic oligonucleotide: Ptpn6-4820
aucgucaugaccacccgagagg

SEQ ID NO: 24269 - RNA, 23 nt, Artificial Sequence
  Synthetic oligonucleotide: Ptpn6-4821
caucgucaugaccacccgagagg

SEQ ID NO: 24270 - RNA, 24 nt, Artificial Sequence
  Synthetic oligonucleotide: Ptpn6-4822
ucaucgucaugaccacccgagagg

SEQ ID NO: 24271 - RNA, 18 nt, Artificial Sequence
  Synthetic oligonucleotide: Ptpn6-4823
gugcaugguggggaccgg

SEQ ID NO: 24272 - RNA, 19 nt, Artificial Sequence
  Synthetic oligonucleotide: Ptpn6-4824
ggugcaugguggggaccgg

SEQ ID NO: 24273 - RNA, 20 nt, Artificial Sequence
  Synthetic oligonucleotide: Ptpn6-4825
aggugcaugguggggaccgg

SEQ ID NO: 24274 - RNA, 21 nt, Artificial Sequence
  Synthetic oligonucleotide: Ptpn6-4826
gaggugcaugguggggaccgg

SEQ ID NO: 24275 - RNA, 22 nt, Artificial Sequence
  Synthetic oligonucleotide: Ptpn6-4827
ugaggugcaugguggggaccgg

SEQ ID NO: 24276 - RNA, 23 nt, Artificial Sequence
  Synthetic oligonucleotide: Ptpn6-4828
uugaggugcaugguggggaccgg

SEQ ID NO: 24277 - RNA, 24 nt, Artificial Sequence
  Synthetic oligonucleotide: Ptpn6-4829
uuugaggugcaugguggggaccgg

SEQ ID NO: 24278 - RNA, 18 nt, Artificial Sequence
  Synthetic oligonucleotide: Ptpn6-4830
gaccagaucaaccagcgg

SEQ ID NO: 24279 - RNA, 19 nt, Artificial Sequence
  Synthetic oligonucleotide: Ptpn6-4831
ggaccagaucaaccagcgg

SEQ ID NO: 24280 - RNA, 20 nt, Artificial Sequence
  Synthetic oligonucleotide: Ptpn6-703
uggaccagaucaaccagcgg

SEQ ID NO: 24281 - RNA, 21 nt, Artificial Sequence
  Synthetic oligonucleotide: Ptpn6-4832
cuggaccagaucaaccagcgg

SEQ ID NO: 24282 - RNA, 22 nt, Artificial Sequence
  Synthetic oligonucleotide: Ptpn6-4833
ccuggaccagaucaaccagcgg

SEQ ID NO: 24283 - RNA, 23 nt, Artificial Sequence
  Synthetic oligonucleotide: Ptpn6-4834
uccuggaccagaucaaccagcgg

SEQ ID NO: 24284 - RNA, 24 nt, Artificial Sequence
  Synthetic oligonucleotide: Ptpn6-4835
uuccuggaccagaucaaccagcgg

SEQ ID NO: 24285 - RNA, 18 nt, Artificial Sequence
  Synthetic oligonucleotide: Ptpn6-4836
ugguggggaccggcaggg

SEQ ID NO: 24286 - RNA, 19 nt, Artificial Sequence
  Synthetic oligonucleotide: Ptpn6-4837
augguggggaccggcaggg

SEQ ID NO: 24287 - RNA, 20 nt, Artificial Sequence
  Synthetic oligonucleotide: Ptpn6-4838
caugguggggaccggcaggg

SEQ ID NO: 24288 - RNA, 21 nt, Artificial Sequence
  Synthetic oligonucleotide: Ptpn6-4839
gcaugguggggaccggcaggg

SEQ ID NO: 24289 - RNA, 22 nt, Artificial Sequence
  Synthetic oligonucleotide: Ptpn6-4840
ugcaugguggggaccggcaggg

SEQ ID NO: 24290 - RNA, 23 nt, Artificial Sequence
  Synthetic oligonucleotide: Ptpn6-4841
gugcaugguggggaccggcaggg

SEQ ID NO: 24291 - RNA, 24 nt, Artificial Sequence
  Synthetic oligonucleotide: Ptpn6-4842
ggugcaugguggggaccggcaggg

SEQ ID NO: 24292 - RNA, 18 nt, Artificial Sequence
  Synthetic oligonucleotide: Ptpn6-4843
ccgagugauccugcaggg

SEQ ID NO: 24293 - RNA, 19 nt, Artificial Sequence
  Synthetic oligonucleotide: Ptpn6-4844
gccgagugauccugcaggg

SEQ ID NO: 24294 - RNA, 20 nt, Artificial Sequence
  Synthetic oligonucleotide: Ptpn6-671
agccgagugauccugcaggg

SEQ ID NO: 24295 - RNA, 21 nt, Artificial Sequence
  Synthetic oligonucleotide: Ptpn6-4845
cagccgagugauccugcaggg

SEQ ID NO: 24296 - RNA, 22 nt, Artificial Sequence
  Synthetic oligonucleotide: Ptpn6-4846
acagccgagugauccugcaggg

SEQ ID NO: 24297 - RNA, 23 nt, Artificial Sequence
  Synthetic oligonucleotide: Ptpn6-4847
cacagccgagugauccugcaggg

SEQ ID NO: 24298 - RNA, 24 nt, Artificial Sequence
  Synthetic oligonucleotide: Ptpn6-4848
ccacagccgagugauccugcaggg

SEQ ID NO: 24299 - RNA, 18 nt, Artificial Sequence
  Synthetic oligonucleotide: Ptpn6-4849
accugcggcaggucaggg

SEQ ID NO: 24300 - RNA, 19 nt, Artificial Sequence
  Synthetic oligonucleotide: Ptpn6-4850
uaccugcggcaggucaggg

SEQ ID NO: 24301 - RNA, 20 nt, Artificial Sequence
  Synthetic oligonucleotide: Ptpn6-4851
cuaccugcggcaggucaggg

SEQ ID NO: 24302 - RNA, 21 nt, Artificial Sequence
  Synthetic oligonucleotide: Ptpn6-4852
ucuaccugcggcaggucaggg

SEQ ID NO: 24303 - RNA, 22 nt, Artificial Sequence
  Synthetic oligonucleotide: Ptpn6-4853
gucuaccugcggcaggucaggg

SEQ ID NO: 24304 - RNA, 23 nt, Artificial Sequence
  Synthetic oligonucleotide: Ptpn6-4854
ugucuaccugcggcaggucaggg

SEQ ID NO: 24305 - RNA, 24 nt, Artificial Sequence
  Synthetic oligonucleotide: Ptpn6-4855
uugucuaccugcggcaggucaggg

SEQ ID NO: 24306 - RNA, 18 nt, Artificial Sequence
  Synthetic oligonucleotide: Ptpn6-4856
acacuaagaacaagaggg

SEQ ID NO: 24307 - RNA, 19 nt, Artificial Sequence
  Synthetic oligonucleotide: Ptpn6-4857
cacacuaagaacaagaggg

SEQ ID NO: 24308 - RNA, 20 nt, Artificial Sequence
  Synthetic oligonucleotide: Ptpn6-235
gcacacuaagaacaagaggg

SEQ ID NO: 24309 - RNA, 21 nt, Artificial Sequence
  Synthetic oligonucleotide: Ptpn6-4858
ugcacacuaagaacaagaggg

SEQ ID NO: 24310 - RNA, 22 nt, Artificial Sequence
  Synthetic oligonucleotide: Ptpn6-4859
cugcacacuaagaacaagaggg

SEQ ID NO: 24311 - RNA, 23 nt, Artificial Sequence
  Synthetic oligonucleotide: Ptpn6-4860
ccugcacacuaagaacaagaggg

SEQ ID NO: 24312 - RNA, 24 nt, Artificial Sequence
  Synthetic oligonucleotide: Ptpn6-4861
accugcacacuaagaacaagaggg

SEQ ID NO: 24313 - RNA, 18 nt, Artificial Sequence
  Synthetic oligonucleotide: Ptpn6-4862
agguggagaaaggccggg

SEQ ID NO: 24314 - RNA, 19 nt, Artificial Sequence
  Synthetic oligonucleotide: Ptpn6-4863
gagguggagaaaggccggg

SEQ ID NO: 24315 - RNA, 20 nt, Artificial Sequence
  Synthetic oligonucleotide: Ptpn6-4864
agagguggagaaaggccggg

SEQ ID NO: 24316 - RNA, 21 nt, Artificial Sequence
  Synthetic oligonucleotide: Ptpn6-4865
gagagguggagaaaggccggg

SEQ ID NO: 24317 - RNA, 22 nt, Artificial Sequence
  Synthetic oligonucleotide: Ptpn6-4866
cgagagguggagaaaggccggg

SEQ ID NO: 24318 - RNA, 23 nt, Artificial Sequence
  Synthetic oligonucleotide: Ptpn6-4867
ccgagagguggagaaaggccggg

SEQ ID NO: 24319 - RNA, 24 nt, Artificial Sequence
  Synthetic oligonucleotide: Ptpn6-4868
cccgagagguggagaaaggccggg

SEQ ID NO: 24320 - RNA, 18 nt, Artificial Sequence
  Synthetic oligonucleotide: Ptpn6-4869
cagagcagggccuggggg

SEQ ID NO: 24321 - RNA, 19 nt, Artificial Sequence
  Synthetic oligonucleotide: Ptpn6-4870
gcagagcagggccuggggg

SEQ ID NO: 24322 - RNA, 20 nt, Artificial Sequence
  Synthetic oligonucleotide: Ptpn6-2717
ugcagagcagggccuggggg

SEQ ID NO: 24323 - RNA, 21 nt, Artificial Sequence
  Synthetic oligonucleotide: Ptpn6-4871
gugcagagcagggccuggggg

SEQ ID NO: 24324 - RNA, 22 nt, Artificial Sequence
  Synthetic oligonucleotide: Ptpn6-4872
cgugcagagcagggccuggggg

SEQ ID NO: 24325 - RNA, 23 nt, Artificial Sequence
  Synthetic oligonucleotide: Ptpn6-4873
gcgugcagagcagggccuggggg

SEQ ID NO: 24326 - RNA, 24 nt, Artificial Sequence
  Synthetic oligonucleotide: Ptpn6-4874
ugcgugcagagcagggccuggggg

SEQ ID NO: 24327 - RNA, 18 nt, Artificial Sequence
  Synthetic oligonucleotide: Ptpn6-4875
gcagagcagggccugggg

SEQ ID NO: 24328 - RNA, 19 nt, Artificial Sequence
  Synthetic oligonucleotide: Ptpn6-4876
ugcagagcagggccugggg

SEQ ID NO: 24329 - RNA, 20 nt, Artificial Sequence
  Synthetic oligonucleotide: Ptpn6-2719
gugcagagcagggccugggg

SEQ ID NO: 24330 - RNA, 21 nt, Artificial Sequence
  Synthetic oligonucleotide: Ptpn6-4877
cgugcagagcagggccugggg

SEQ ID NO: 24331 - RNA, 22 nt, Artificial Sequence
  Synthetic oligonucleotide: Ptpn6-4878
gcgugcagagcagggccugggg

SEQ ID NO: 24332 - RNA, 23 nt, Artificial Sequence
  Synthetic oligonucleotide: Ptpn6-4879
ugcgugcagagcagggccugggg

SEQ ID NO: 24333 - RNA, 24 nt, Artificial Sequence
  Synthetic oligonucleotide: Ptpn6-4880
gugcgugcagagcagggccugggg

SEQ ID NO: 24334 - RNA, 18 nt, Artificial Sequence
  Synthetic oligonucleotide: Ptpn6-4881
agggagggucgggugggg

SEQ ID NO: 24335 - RNA, 19 nt, Artificial Sequence
  Synthetic oligonucleotide: Ptpn6-4882
aagggagggucgggugggg

SEQ ID NO: 24336 - RNA, 20 nt, Artificial Sequence
  Synthetic oligonucleotide: Ptpn6-4883
aaagggagggucgggugggg

SEQ ID NO: 24337 - RNA, 21 nt, Artificial Sequence
  Synthetic oligonucleotide: Ptpn6-4884
gaaagggagggucgggugggg

SEQ ID NO: 24338 - RNA, 22 nt, Artificial Sequence
  Synthetic oligonucleotide: Ptpn6-4885
ggaaagggagggucgggugggg

SEQ ID NO: 24339 - RNA, 23 nt, Artificial Sequence
  Synthetic oligonucleotide: Ptpn6-4886
uggaaagggagggucgggugggg

SEQ ID NO: 24340 - RNA, 24 nt, Artificial Sequence
  Synthetic oligonucleotide: Ptpn6-4887
cuggaaagggagggucgggugggg

SEQ ID NO: 24341 - RNA, 18 nt, Artificial Sequence
  Synthetic oligonucleotide: Ptpn6-4888
gcaccuggggguuugggg

SEQ ID NO: 24342 - RNA, 19 nt, Artificial Sequence
  Synthetic oligonucleotide: Ptpn6-4889
ggcaccuggggguuugggg

SEQ ID NO: 24343 - RNA, 20 nt, Artificial Sequence
  Synthetic oligonucleotide: Ptpn6-4890
gggcaccuggggguuugggg

SEQ ID NO: 24344 - RNA, 21 nt, Artificial Sequence
  Synthetic oligonucleotide: Ptpn6-4891
ggggcaccuggggguuugggg

SEQ ID NO: 24345 - RNA, 22 nt, Artificial Sequence
  Synthetic oligonucleotide: Ptpn6-4892
aggggcaccuggggguuugggg

SEQ ID NO: 24346 - RNA, 23 nt, Artificial Sequence
  Synthetic oligonucleotide: Ptpn6-4893
gaggggcaccuggggguuugggg

SEQ ID NO: 24347 - RNA, 24 nt, Artificial Sequence
  Synthetic oligonucleotide: Ptpn6-4894
ugaggggcaccuggggguuugggg

SEQ ID NO: 24348 - RNA, 18 nt, Artificial Sequence
  Synthetic oligonucleotide: Ptpn6-4895
ugcagagcagggccuggg

SEQ ID NO: 24349 - RNA, 19 nt, Artificial Sequence
  Synthetic oligonucleotide: Ptpn6-4896
gugcagagcagggccuggg

SEQ ID NO: 24350 - RNA, 20 nt, Artificial Sequence
  Synthetic oligonucleotide: Ptpn6-2721
cgugcagagcagggccuggg

SEQ ID NO: 24351 - RNA, 21 nt, Artificial Sequence
  Synthetic oligonucleotide: Ptpn6-4897
gcgugcagagcagggccuggg

SEQ ID NO: 24352 - RNA, 22 nt, Artificial Sequence
  Synthetic oligonucleotide: Ptpn6-4898
ugcgugcagagcagggccuggg

SEQ ID NO: 24353 - RNA, 23 nt, Artificial Sequence
  Synthetic oligonucleotide: Ptpn6-4899
gugcgugcagagcagggccuggg

SEQ ID NO: 24354 - RNA, 24 nt, Artificial Sequence
  Synthetic oligonucleotide: Ptpn6-4900
ggugcgugcagagcagggccuggg

SEQ ID NO: 24355 - RNA, 18 nt, Artificial Sequence
  Synthetic oligonucleotide: Ptpn6-4901
cagugugggccacguggg

SEQ ID NO: 24356 - RNA, 19 nt, Artificial Sequence
  Synthetic oligonucleotide: Ptpn6-4902
gcagugugggccacguggg

SEQ ID NO: 24357 - RNA, 20 nt, Artificial Sequence
  Synthetic oligonucleotide: Ptpn6-2722
agcagugugggccacguggg

SEQ ID NO: 24358 - RNA, 21 nt, Artificial Sequence
  Synthetic oligonucleotide: Ptpn6-4903
cagcagugugggccacguggg

SEQ ID NO: 24359 - RNA, 22 nt, Artificial Sequence
  Synthetic oligonucleotide: Ptpn6-4904
ucagcagugugggccacguggg

SEQ ID NO: 24360 - RNA, 23 nt, Artificial Sequence
  Synthetic oligonucleotide: Ptpn6-4905
gucagcagugugggccacguggg

SEQ ID NO: 24361 - RNA, 24 nt, Artificial Sequence
  Synthetic oligonucleotide: Ptpn6-4906
ggucagcagugugggccacguggg

SEQ ID NO: 24362 - RNA, 18 nt, Artificial Sequence
  Synthetic oligonucleotide: Ptpn6-4907
ggaguuugaggugcaugg

SEQ ID NO: 24363 - RNA, 19 nt, Artificial Sequence
  Synthetic oligonucleotide: Ptpn6-4908
aggaguuugaggugcaugg

SEQ ID NO: 24364 - RNA, 20 nt, Artificial Sequence
  Synthetic oligonucleotide: Ptpn6-2724
gaggaguuugaggugcaugg

SEQ ID NO: 24365 - RNA, 21 nt, Artificial Sequence
  Synthetic oligonucleotide: Ptpn6-4909
ggaggaguuugaggugcaugg

SEQ ID NO: 24366 - RNA, 22 nt, Artificial Sequence
  Synthetic oligonucleotide: Ptpn6-4910
gggaggaguuugaggugcaugg

SEQ ID NO: 24367 - RNA, 23 nt, Artificial Sequence
  Synthetic oligonucleotide: Ptpn6-4911
ugggaggaguuugaggugcaugg

SEQ ID NO: 24368 - RNA, 24 nt, Artificial Sequence
  Synthetic oligonucleotide: Ptpn6-4912
cugggaggaguuugaggugcaugg

SEQ ID NO: 24369 - RNA, 18 nt, Artificial Sequence
  Synthetic oligonucleotide: Ptpn6-4913
acagccucacggaccugg

SEQ ID NO: 24370 - RNA, 19 nt, Artificial Sequence
  Synthetic oligonucleotide: Ptpn6-4914
gacagccucacggaccugg

SEQ ID NO: 24371 - RNA, 20 nt, Artificial Sequence
  Synthetic oligonucleotide: Ptpn6-151
cgacagccucacggaccugg

SEQ ID NO: 24372 - RNA, 21 nt, Artificial Sequence
  Synthetic oligonucleotide: Ptpn6-4915
ucgacagccucacggaccugg

SEQ ID NO: 24373 - RNA, 22 nt, Artificial Sequence
  Synthetic oligonucleotide: Ptpn6-4916
uucgacagccucacggaccugg

SEQ ID NO: 24374 - RNA, 23 nt, Artificial Sequence
  Synthetic oligonucleotide: Ptpn6-4917
cuucgacagccucacggaccugg

SEQ ID NO: 24375 - RNA, 24 nt, Artificial Sequence
  Synthetic oligonucleotide: Ptpn6-4918
ccuucgacagccucacggaccugg

SEQ ID NO: 24376 - RNA, 18 nt, Artificial Sequence
  Synthetic oligonucleotide: Ptpn6-4919
gugcagagcagggccugg

SEQ ID NO: 24377 - RNA, 19 nt, Artificial Sequence
  Synthetic oligonucleotide: Ptpn6-4920
cgugcagagcagggccugg

SEQ ID NO: 24378 - RNA, 20 nt, Artificial Sequence
  Synthetic oligonucleotide: Ptpn6-2727
gcgugcagagcagggccugg

SEQ ID NO: 24379 - RNA, 21 nt, Artificial Sequence
  Synthetic oligonucleotide: Ptpn6-4921
ugcgugcagagcagggccugg

SEQ ID NO: 24380 - RNA, 22 nt, Artificial Sequence
  Synthetic oligonucleotide: Ptpn6-4922
gugcgugcagagcagggccugg

SEQ ID NO: 24381 - RNA, 23 nt, Artificial Sequence
  Synthetic oligonucleotide: Ptpn6-4923
ggugcgugcagagcagggccugg

SEQ ID NO: 24382 - RNA, 24 nt, Artificial Sequence
  Synthetic oligonucleotide: Ptpn6-4924
aggugcgugcagagcagggccugg

SEQ ID NO: 24383 - RNA, 18 nt, Artificial Sequence
  Synthetic oligonucleotide: Ptpn6-4925
acuugcaccagcgucugg

SEQ ID NO: 24384 - RNA, 19 nt, Artificial Sequence
  Synthetic oligonucleotide: Ptpn6-4926
aacuugcaccagcgucugg

SEQ ID NO: 24385 - RNA, 20 nt, Artificial Sequence
  Synthetic oligonucleotide: Ptpn6-663
gaacuugcaccagcgucugg

SEQ ID NO: 24386 - RNA, 21 nt, Artificial Sequence
  Synthetic oligonucleotide: Ptpn6-4927
agaacuugcaccagcgucugg

SEQ ID NO: 24387 - RNA, 22 nt, Artificial Sequence
  Synthetic oligonucleotide: Ptpn6-4928
aagaacuugcaccagcgucugg

SEQ ID NO: 24388 - RNA, 23 nt, Artificial Sequence
  Synthetic oligonucleotide: Ptpn6-4929
gaagaacuugcaccagcgucugg

SEQ ID NO: 24389 - RNA, 24 nt, Artificial Sequence
  Synthetic oligonucleotide: Ptpn6-4930
ugaagaacuugcaccagcgucugg

SEQ ID NO: 24390 - RNA, 18 nt, Artificial Sequence
  Synthetic oligonucleotide: Ptpn6-4931
gccaaggcuggcuucugg

SEQ ID NO: 24391 - RNA, 19 nt, Artificial Sequence
  Synthetic oligonucleotide: Ptpn6-4932
agccaaggcuggcuucugg

SEQ ID NO: 24392 - RNA, 20 nt, Artificial Sequence
  Synthetic oligonucleotide: Ptpn6-657
cagccaaggcuggcuucugg

SEQ ID NO: 24393 - RNA, 21 nt, Artificial Sequence
  Synthetic oligonucleotide: Ptpn6-4933
acagccaaggcuggcuucugg

SEQ ID NO: 24394 - RNA, 22 nt, Artificial Sequence
  Synthetic oligonucleotide: Ptpn6-4934
uacagccaaggcuggcuucugg

SEQ ID NO: 24395 - RNA, 23 nt, Artificial Sequence
  Synthetic oligonucleotide: Ptpn6-4935
auacagccaaggcuggcuucugg

SEQ ID NO: 24396 - RNA, 24 nt, Artificial Sequence
  Synthetic oligonucleotide: Ptpn6-4936
gauacagccaaggcuggcuucugg

SEQ ID NO: 24397 - RNA, 18 nt, Artificial Sequence
  Synthetic oligonucleotide: Ptpn6-4937
gcagugugggccacgugg

SEQ ID NO: 24398 - RNA, 19 nt, Artificial Sequence
  Synthetic oligonucleotide: Ptpn6-4938
agcagugugggccacgugg

SEQ ID NO: 24399 - RNA, 20 nt, Artificial Sequence
  Synthetic oligonucleotide: Ptpn6-4939
cagcagugugggccacgugg

SEQ ID NO: 24400 - RNA, 21 nt, Artificial Sequence
  Synthetic oligonucleotide: Ptpn6-4940
ucagcagugugggccacgugg

SEQ ID NO: 24401 - RNA, 22 nt, Artificial Sequence
  Synthetic oligonucleotide: Ptpn6-4941
gucagcagugugggccacgugg

SEQ ID NO: 24402 - RNA, 23 nt, Artificial Sequence
  Synthetic oligonucleotide: Ptpn6-4942
ggucagcagugugggccacgugg

SEQ ID NO: 24403 - RNA, 24 nt, Artificial Sequence
  Synthetic oligonucleotide: Ptpn6-4943
aggucagcagugugggccacgugg

SEQ ID NO: 24404 - RNA, 18 nt, Artificial Sequence
  Synthetic oligonucleotide: Ptpn6-4944
uucuggcagauggcgugg

SEQ ID NO: 24405 - RNA, 19 nt, Artificial Sequence
  Synthetic oligonucleotide: Ptpn6-4945
cuucuggcagauggcgugg

SEQ ID NO: 24406 - RNA, 20 nt, Artificial Sequence
  Synthetic oligonucleotide: Ptpn6-678
acuucuggcagauggcgugg

SEQ ID NO: 24407 - RNA, 21 nt, Artificial Sequence
  Synthetic oligonucleotide: Ptpn6-4946
gacuucuggcagauggcgugg

SEQ ID NO: 24408 - RNA, 22 nt, Artificial Sequence
  Synthetic oligonucleotide: Ptpn6-4947
ugacuucuggcagauggcgugg

SEQ ID NO: 24409 - RNA, 23 nt, Artificial Sequence
  Synthetic oligonucleotide: Ptpn6-4948
augacuucuggcagauggcgugg

SEQ ID NO: 24410 - RNA, 24 nt, Artificial Sequence
  Synthetic oligonucleotide: Ptpn6-4949
aaugacuucuggcagauggcgugg

SEQ ID NO: 24411 - RNA, 18 nt, Artificial Sequence
  Synthetic oligonucleotide: Ptpn6-4950
aggaguuugaggugcaug

SEQ ID NO: 24412 - RNA, 19 nt, Artificial Sequence
  Synthetic oligonucleotide: Ptpn6-4951
gaggaguuugaggugcaug

SEQ ID NO: 24413 - RNA, 20 nt, Artificial Sequence
  Synthetic oligonucleotide: Ptpn6-4952
ggaggaguuugaggugcaug

SEQ ID NO: 24414 - RNA, 21 nt, Artificial Sequence
  Synthetic oligonucleotide: Ptpn6-4953
gggaggaguuugaggugcaug

SEQ ID NO: 24415 - RNA, 22 nt, Artificial Sequence
  Synthetic oligonucleotide: Ptpn6-4954
ugggaggaguuugaggugcaug

SEQ ID NO: 24416 - RNA, 23 nt, Artificial Sequence
  Synthetic oligonucleotide: Ptpn6-4955
cugggaggaguuugaggugcaug

SEQ ID NO: 24417 - RNA, 24 nt, Artificial Sequence
  Synthetic oligonucleotide: Ptpn6-4956
ucugggaggaguuugaggugcaug

SEQ ID NO: 24418 - RNA, 18 nt, Artificial Sequence
  Synthetic oligonucleotide: Ptpn6-4957
gucaucgacaugcucaug

SEQ ID NO: 24419 - RNA, 19 nt, Artificial Sequence
  Synthetic oligonucleotide: Ptpn6-4958
ugucaucgacaugcucaug

SEQ ID NO: 24420 - RNA, 20 nt, Artificial Sequence
  Synthetic oligonucleotide: Ptpn6-708
uugucaucgacaugcucaug

SEQ ID NO: 24421 - RNA, 21 nt, Artificial Sequence
  Synthetic oligonucleotide: Ptpn6-4959
auugucaucgacaugcucaug

SEQ ID NO: 24422 - RNA, 22 nt, Artificial Sequence
  Synthetic oligonucleotide: Ptpn6-4960
cauugucaucgacaugcucaug

SEQ ID NO: 24423 - RNA, 23 nt, Artificial Sequence
  Synthetic oligonucleotide: Ptpn6-4961
ucauugucaucgacaugcucaug

SEQ ID NO: 24424 - RNA, 24 nt, Artificial Sequence
  Synthetic oligonucleotide: Ptpn6-4962
aucauugucaucgacaugcucaug

SEQ ID NO: 24425 - RNA, 18 nt, Artificial Sequence
  Synthetic oligonucleotide: Ptpn6-4963
gagggucggguggggaug

SEQ ID NO: 24426 - RNA, 19 nt, Artificial Sequence
  Synthetic oligonucleotide: Ptpn6-4964
ggagggucggguggggaug

SEQ ID NO: 24427 - RNA, 20 nt, Artificial Sequence
  Synthetic oligonucleotide: Ptpn6-2731
gggagggucggguggggaug

SEQ ID NO: 24428 - RNA, 21 nt, Artificial Sequence
  Synthetic oligonucleotide: Ptpn6-4965
agggagggucggguggggaug

SEQ ID NO: 24429 - RNA, 22 nt, Artificial Sequence
  Synthetic oligonucleotide: Ptpn6-4966
aagggagggucggguggggaug

SEQ ID NO: 24430 - RNA, 23 nt, Artificial Sequence
  Synthetic oligonucleotide: Ptpn6-4967
aaagggagggucggguggggaug

SEQ ID NO: 24431 - RNA, 24 nt, Artificial Sequence
  Synthetic oligonucleotide: Ptpn6-4968
gaaagggagggucggguggggaug

SEQ ID NO: 24432 - RNA, 18 nt, Artificial Sequence
  Synthetic oligonucleotide: Ptpn6-4969
cuacucugugaccaacug

SEQ ID NO: 24433 - RNA, 19 nt, Artificial Sequence
  Synthetic oligonucleotide: Ptpn6-4970
ccuacucugugaccaacug

SEQ ID NO: 24434 - RNA, 20 nt, Artificial Sequence
  Synthetic oligonucleotide: Ptpn6-198
cccuacucugugaccaacug

SEQ ID NO: 24435 - RNA, 21 nt, Artificial Sequence
  Synthetic oligonucleotide: Ptpn6-4971
gcccuacucugugaccaacug

SEQ ID NO: 24436 - RNA, 22 nt, Artificial Sequence
  Synthetic oligonucleotide: Ptpn6-4972
ggcccuacucugugaccaacug

SEQ ID NO: 24437 - RNA, 23 nt, Artificial Sequence
  Synthetic oligonucleotide: Ptpn6-4973
gggcccuacucugugaccaacug

SEQ ID NO: 24438 - RNA, 24 nt, Artificial Sequence
  Synthetic oligonucleotide: Ptpn6-4974
ugggcccuacucugugaccaacug

SEQ ID NO: 24439 - RNA, 18 nt, Artificial Sequence
  Synthetic oligonucleotide: Ptpn6-4975
gacagccucacggaccug

SEQ ID NO: 24440 - RNA, 19 nt, Artificial Sequence
  Synthetic oligonucleotide: Ptpn6-4976
cgacagccucacggaccug

SEQ ID NO: 24441 - RNA, 20 nt, Artificial Sequence
  Synthetic oligonucleotide: Ptpn6-636
ucgacagccucacggaccug

SEQ ID NO: 24442 - RNA, 21 nt, Artificial Sequence
  Synthetic oligonucleotide: Ptpn6-4977
uucgacagccucacggaccug

SEQ ID NO: 24443 - RNA, 22 nt, Artificial Sequence
  Synthetic oligonucleotide: Ptpn6-4978
cuucgacagccucacggaccug

SEQ ID NO: 24444 - RNA, 23 nt, Artificial Sequence
  Synthetic oligonucleotide: Ptpn6-4979
ccuucgacagccucacggaccug

SEQ ID NO: 24445 - RNA, 24 nt, Artificial Sequence
  Synthetic oligonucleotide: Ptpn6-4980
accuucgacagccucacggaccug

SEQ ID NO: 24446 - RNA, 18 nt, Artificial Sequence
  Synthetic oligonucleotide: Ptpn6-4981
accagcugcuaggcccug

SEQ ID NO: 24447 - RNA, 19 nt, Artificial Sequence
  Synthetic oligonucleotide: Ptpn6-4982
aaccagcugcuaggcccug

SEQ ID NO: 24448 - RNA, 20 nt, Artificial Sequence
  Synthetic oligonucleotide: Ptpn6-4983
aaaccagcugcuaggcccug

SEQ ID NO: 24449 - RNA, 21 nt, Artificial Sequence
  Synthetic oligonucleotide: Ptpn6-4984
caaaccagcugcuaggcccug

SEQ ID NO: 24450 - RNA, 22 nt, Artificial Sequence
  Synthetic oligonucleotide: Ptpn6-4985
ccaaaccagcugcuaggcccug

SEQ ID NO: 24451 - RNA, 23 nt, Artificial Sequence
  Synthetic oligonucleotide: Ptpn6-4986
cccaaaccagcugcuaggcccug

SEQ ID NO: 24452 - RNA, 24 nt, Artificial Sequence
  Synthetic oligonucleotide: Ptpn6-4987
ccccaaaccagcugcuaggcccug

SEQ ID NO: 24453 - RNA, 18 nt, Artificial Sequence
  Synthetic oligonucleotide: Ptpn6-4988
cgugcagagcagggccug

SEQ ID NO: 24454 - RNA, 19 nt, Artificial Sequence
  Synthetic oligonucleotide: Ptpn6-4989
gcgugcagagcagggccug

SEQ ID NO: 24455 - RNA, 20 nt, Artificial Sequence
  Synthetic oligonucleotide: Ptpn6-2735
ugcgugcagagcagggccug

SEQ ID NO: 24456 - RNA, 21 nt, Artificial Sequence
  Synthetic oligonucleotide: Ptpn6-4990
gugcgugcagagcagggccug

SEQ ID NO: 24457 - RNA, 22 nt, Artificial Sequence
  Synthetic oligonucleotide: Ptpn6-4991
ggugcgugcagagcagggccug

SEQ ID NO: 24458 - RNA, 23 nt, Artificial Sequence
  Synthetic oligonucleotide: Ptpn6-4992
aggugcgugcagagcagggccug

SEQ ID NO: 24459 - RNA, 24 nt, Artificial Sequence
  Synthetic oligonucleotide: Ptpn6-4993
caggugcgugcagagcagggccug

SEQ ID NO: 24460 - RNA, 18 nt, Artificial Sequence
  Synthetic oligonucleotide: Ptpn6-4994
cacagccgagugauccug

SEQ ID NO: 24461 - RNA, 19 nt, Artificial Sequence
  Synthetic oligonucleotide: Ptpn6-4995
ccacagccgagugauccug

SEQ ID NO: 24462 - RNA, 20 nt, Artificial Sequence
  Synthetic oligonucleotide: Ptpn6-669
accacagccgagugauccug

SEQ ID NO: 24463 - RNA, 21 nt, Artificial Sequence
  Synthetic oligonucleotide: Ptpn6-4996
gaccacagccgagugauccug

SEQ ID NO: 24464 - RNA, 22 nt, Artificial Sequence
  Synthetic oligonucleotide: Ptpn6-4997
ugaccacagccgagugauccug

SEQ ID NO: 24465 - RNA, 23 nt, Artificial Sequence
  Synthetic oligonucleotide: Ptpn6-4998
uugaccacagccgagugauccug

SEQ ID NO: 24466 - RNA, 24 nt, Artificial Sequence
  Synthetic oligonucleotide: Ptpn6-4999
guugaccacagccgagugauccug

SEQ ID NO: 24467 - RNA, 18 nt, Artificial Sequence
  Synthetic oligonucleotide: Ptpn6-5000
aagagggaggagaaagug

SEQ ID NO: 24468 - RNA, 19 nt, Artificial Sequence
  Synthetic oligonucleotide: Ptpn6-5001
caagagggaggagaaagug

SEQ ID NO: 24469 - RNA, 20 nt, Artificial Sequence
  Synthetic oligonucleotide: Ptpn6-733
acaagagggaggagaaagug

SEQ ID NO: 24470 - RNA, 21 nt, Artificial Sequence
  Synthetic oligonucleotide: Ptpn6-5002
aacaagagggaggagaaagug

SEQ ID NO: 24471 - RNA, 22 nt, Artificial Sequence
  Synthetic oligonucleotide: Ptpn6-5003
gaacaagagggaggagaaagug

SEQ ID NO: 24472 - RNA, 23 nt, Artificial Sequence
  Synthetic oligonucleotide: Ptpn6-5004
agaacaagagggaggagaaagug

SEQ ID NO: 24473 - RNA, 24 nt, Artificial Sequence
  Synthetic oligonucleotide: Ptpn6-5005
aagaacaagagggaggagaaagug

SEQ ID NO: 24474 - RNA, 18 nt, Artificial Sequence
  Synthetic oligonucleotide: Ptpn6-5006
gacauugagaaccgagug

SEQ ID NO: 24475 - RNA, 19 nt, Artificial Sequence
  Synthetic oligonucleotide: Ptpn6-5007
ugacauugagaaccgagug

SEQ ID NO: 24476 - RNA, 20 nt, Artificial Sequence
  Synthetic oligonucleotide: Ptpn6-646
cugacauugagaaccgagug

SEQ ID NO: 24477 - RNA, 21 nt, Artificial Sequence
  Synthetic oligonucleotide: Ptpn6-5008
gcugacauugagaaccgagug

SEQ ID NO: 24478 - RNA, 22 nt, Artificial Sequence
  Synthetic oligonucleotide: Ptpn6-5009
ggcugacauugagaaccgagug

SEQ ID NO: 24479 - RNA, 23 nt, Artificial Sequence
  Synthetic oligonucleotide: Ptpn6-5010
cggcugacauugagaaccgagug

SEQ ID NO: 24480 - RNA, 24 nt, Artificial Sequence
  Synthetic oligonucleotide: Ptpn6-5011
gcggcugacauugagaaccgagug

SEQ ID NO: 24481 - RNA, 18 nt, Artificial Sequence
  Synthetic oligonucleotide: Ptpn6-5012
agguccugcaggugcgug

SEQ ID NO: 24482 - RNA, 19 nt, Artificial Sequence
  Synthetic oligonucleotide: Ptpn6-5013
gagguccugcaggugcgug

SEQ ID NO: 24483 - RNA, 20 nt, Artificial Sequence
  Synthetic oligonucleotide: Ptpn6-5014
ggagguccugcaggugcgug

SEQ ID NO: 24484 - RNA, 21 nt, Artificial Sequence
  Synthetic oligonucleotide: Ptpn6-5015
uggagguccugcaggugcgug

SEQ ID NO: 24485 - RNA, 22 nt, Artificial Sequence
  Synthetic oligonucleotide: Ptpn6-5016
cuggagguccugcaggugcgug

SEQ ID NO: 24486 - RNA, 23 nt, Artificial Sequence
  Synthetic oligonucleotide: Ptpn6-5017
gcuggagguccugcaggugcgug

SEQ ID NO: 24487 - RNA, 24 nt, Artificial Sequence
  Synthetic oligonucleotide: Ptpn6-5018
agcuggagguccugcaggugcgug

SEQ ID NO: 24488 - RNA, 18 nt, Artificial Sequence
  Synthetic oligonucleotide: Ptpn6-5019
augaccacccgagaggug

SEQ ID NO: 24489 - RNA, 19 nt, Artificial Sequence
  Synthetic oligonucleotide: Ptpn6-5020
caugaccacccgagaggug

SEQ ID NO: 24490 - RNA, 20 nt, Artificial Sequence
  Synthetic oligonucleotide: Ptpn6-685
ucaugaccacccgagaggug

SEQ ID NO: 24491 - RNA, 21 nt, Artificial Sequence
  Synthetic oligonucleotide: Ptpn6-5021
gucaugaccacccgagaggug

SEQ ID NO: 24492 - RNA, 22 nt, Artificial Sequence
  Synthetic oligonucleotide: Ptpn6-5022
cgucaugaccacccgagaggug

SEQ ID NO: 24493 - RNA, 23 nt, Artificial Sequence
  Synthetic oligonucleotide: Ptpn6-5023
ucgucaugaccacccgagaggug

SEQ ID NO: 24494 - RNA, 24 nt, Artificial Sequence
  Synthetic oligonucleotide: Ptpn6-5024
aucgucaugaccacccgagaggug

SEQ ID NO: 24495 - RNA, 18 nt, Artificial Sequence
  Synthetic oligonucleotide: Ptpn6-5025
uugcagaagcaggaggug

SEQ ID NO: 24496 - RNA, 19 nt, Artificial Sequence
  Synthetic oligonucleotide: Ptpn6-5026
uuugcagaagcaggaggug

SEQ ID NO: 24497 - RNA, 20 nt, Artificial Sequence
  Synthetic oligonucleotide: Ptpn6-660
guuugcagaagcaggaggug

SEQ ID NO: 24498 - RNA, 21 nt, Artificial Sequence
  Synthetic oligonucleotide: Ptpn6-5027
aguuugcagaagcaggaggug

SEQ ID NO: 24499 - RNA, 22 nt, Artificial Sequence
  Synthetic oligonucleotide: Ptpn6-5028
gaguuugcagaagcaggaggug

SEQ ID NO: 24500 - RNA, 23 nt, Artificial Sequence
  Synthetic oligonucleotide: Ptpn6-5029
agaguuugcagaagcaggaggug

SEQ ID NO: 24501 - RNA, 24 nt, Artificial Sequence
  Synthetic oligonucleotide: Ptpn6-5030
cagaguuugcagaagcaggaggug

SEQ ID NO: 24502 - RNA, 18 nt, Artificial Sequence
  Synthetic oligonucleotide: Ptpn6-5031
acaucuccaccaagggug

SEQ ID NO: 24503 - RNA, 19 nt, Artificial Sequence
  Synthetic oligonucleotide: Ptpn6-5032
aacaucuccaccaagggug

SEQ ID NO: 24504 - RNA, 20 nt, Artificial Sequence
  Synthetic oligonucleotide: Ptpn6-2740
gaacaucuccaccaagggug

SEQ ID NO: 24505 - RNA, 21 nt, Artificial Sequence
  Synthetic oligonucleotide: Ptpn6-5033
agaacaucuccaccaagggug

SEQ ID NO: 24506 - RNA, 22 nt, Artificial Sequence
  Synthetic oligonucleotide: Ptpn6-5034
gagaacaucuccaccaagggug

SEQ ID NO: 24507 - RNA, 23 nt, Artificial Sequence
  Synthetic oligonucleotide: Ptpn6-5035
ggagaacaucuccaccaagggug

SEQ ID NO: 24508 - RNA, 24 nt, Artificial Sequence
  Synthetic oligonucleotide: Ptpn6-5036
uggagaacaucuccaccaagggug

SEQ ID NO: 24509 - RNA, 18 nt, Artificial Sequence
  Synthetic oligonucleotide: Ptpn6-5037
ucaagaagacggggauug

SEQ ID NO: 24510 - RNA, 19 nt, Artificial Sequence
  Synthetic oligonucleotide: Ptpn6-5038
uucaagaagacggggauug

SEQ ID NO: 24511 - RNA, 20 nt, Artificial Sequence
  Synthetic oligonucleotide: Ptpn6-155
uuucaagaagacggggauug

SEQ ID NO: 24512 - RNA, 21 nt, Artificial Sequence
  Synthetic oligonucleotide: Ptpn6-5039
auuucaagaagacggggauug

SEQ ID NO: 24513 - RNA, 22 nt, Artificial Sequence
  Synthetic oligonucleotide: Ptpn6-5040
cauuucaagaagacggggauug

SEQ ID NO: 24514 - RNA, 23 nt, Artificial Sequence
  Synthetic oligonucleotide: Ptpn6-5041
gcauuucaagaagacggggauug

SEQ ID NO: 24515 - RNA, 24 nt, Artificial Sequence
  Synthetic oligonucleotide: Ptpn6-5042
agcauuucaagaagacggggauug

SEQ ID NO: 24516 - RNA, 18 nt, Artificial Sequence
  Synthetic oligonucleotide: Ptpn6-5043
cccacaucucagaguuug

SEQ ID NO: 24517 - RNA, 19 nt, Artificial Sequence
  Synthetic oligonucleotide: Ptpn6-5044
acccacaucucagaguuug

SEQ ID NO: 24518 - RNA, 20 nt, Artificial Sequence
  Synthetic oligonucleotide: Ptpn6-5045
cacccacaucucagaguuug

SEQ ID NO: 24519 - RNA, 21 nt, Artificial Sequence
  Synthetic oligonucleotide: Ptpn6-5046
ccacccacaucucagaguuug

SEQ ID NO: 24520 - RNA, 22 nt, Artificial Sequence
  Synthetic oligonucleotide: Ptpn6-5047
cccacccacaucucagaguuug

SEQ ID NO: 24521 - RNA, 23 nt, Artificial Sequence
  Synthetic oligonucleotide: Ptpn6-5048
ccccacccacaucucagaguuug

SEQ ID NO: 24522 - RNA, 24 nt, Artificial Sequence
  Synthetic oligonucleotide: Ptpn6-5049
uccccacccacaucucagaguuug

SEQ ID NO: 24523 - RNA, 18 nt, Artificial Sequence
  Synthetic oligonucleotide: Ptpn6-5050
gaaagacgggggugccau

SEQ ID NO: 24524 - RNA, 19 nt, Artificial Sequence
  Synthetic oligonucleotide: Ptpn6-5051
ggaaagacgggggugccau

SEQ ID NO: 24525 - RNA, 20 nt, Artificial Sequence
  Synthetic oligonucleotide: Ptpn6-5052
gggaaagacgggggugccau

SEQ ID NO: 24526 - RNA, 18 nt, Artificial Sequence
  Synthetic oligonucleotide: Ptpn6-5053
ggagggucggguggggau

SEQ ID NO: 24527 - RNA, 19 nt, Artificial Sequence
  Synthetic oligonucleotide: Ptpn6-5054
gggagggucggguggggau

SEQ ID NO: 24528 - RNA, 20 nt, Artificial Sequence
  Synthetic oligonucleotide: Ptpn6-5055
agggagggucggguggggau

SEQ ID NO: 24529 - RNA, 21 nt, Artificial Sequence
  Synthetic oligonucleotide: Ptpn6-5056
aagggagggucggguggggau

SEQ ID NO: 24530 - RNA, 22 nt, Artificial Sequence
  Synthetic oligonucleotide: Ptpn6-5057
aaagggagggucggguggggau

SEQ ID NO: 24531 - RNA, 23 nt, Artificial Sequence
  Synthetic oligonucleotide: Ptpn6-5058
gaaagggagggucggguggggau

SEQ ID NO: 24532 - RNA, 24 nt, Artificial Sequence
  Synthetic oligonucleotide: Ptpn6-5059
ggaaagggagggucggguggggau

SEQ ID NO: 24533 - RNA, 18 nt, Artificial Sequence
  Synthetic oligonucleotide: Ptpn6-5060
ugcccccggagaccugau

SEQ ID NO: 24534 - RNA, 19 nt, Artificial Sequence
  Synthetic oligonucleotide: Ptpn6-5061
gugcccccggagaccugau

SEQ ID NO: 24535 - RNA, 20 nt, Artificial Sequence
  Synthetic oligonucleotide: Ptpn6-5062
agugcccccggagaccugau

SEQ ID NO: 24536 - RNA, 21 nt, Artificial Sequence
  Synthetic oligonucleotide: Ptpn6-5063
cagugcccccggagaccugau

SEQ ID NO: 24537 - RNA, 22 nt, Artificial Sequence
  Synthetic oligonucleotide: Ptpn6-5064
ucagugcccccggagaccugau

SEQ ID NO: 24538 - RNA, 23 nt, Artificial Sequence
  Synthetic oligonucleotide: Ptpn6-5065
gucagugcccccggagaccugau

SEQ ID NO: 24539 - RNA, 24 nt, Artificial Sequence
  Synthetic oligonucleotide: Ptpn6-5066
ggucagugcccccggagaccugau

SEQ ID NO: 24540 - RNA, 18 nt, Artificial Sequence
  Synthetic oligonucleotide: Ptpn6-5067
cagcugcuaggcccugau

SEQ ID NO: 24541 - RNA, 19 nt, Artificial Sequence
  Synthetic oligonucleotide: Ptpn6-5068
ccagcugcuaggcccugau

SEQ ID NO: 24542 - RNA, 20 nt, Artificial Sequence
  Synthetic oligonucleotide: Ptpn6-674
accagcugcuaggcccugau

SEQ ID NO: 24543 - RNA, 21 nt, Artificial Sequence
  Synthetic oligonucleotide: Ptpn6-5069
aaccagcugcuaggcccugau

SEQ ID NO: 24544 - RNA, 22 nt, Artificial Sequence
  Synthetic oligonucleotide: Ptpn6-5070
aaaccagcugcuaggcccugau

SEQ ID NO: 24545 - RNA, 23 nt, Artificial Sequence
  Synthetic oligonucleotide: Ptpn6-5071
caaaccagcugcuaggcccugau

SEQ ID NO: 24546 - RNA, 24 nt, Artificial Sequence
  Synthetic oligonucleotide: Ptpn6-5072
ccaaaccagcugcuaggcccugau

SEQ ID NO: 24547 - RNA, 18 nt, Artificial Sequence
  Synthetic oligonucleotide: Ptpn6-5073
cacaaggaggauguguau

SEQ ID NO: 24548 - RNA, 19 nt, Artificial Sequence
  Synthetic oligonucleotide: Ptpn6-5074
acacaaggaggauguguau

SEQ ID NO: 24549 - RNA, 20 nt, Artificial Sequence
  Synthetic oligonucleotide: Ptpn6-5075
gacacaaggaggauguguau

SEQ ID NO: 24550 - RNA, 21 nt, Artificial Sequence
  Synthetic oligonucleotide: Ptpn6-5076
agacacaaggaggauguguau

SEQ ID NO: 24551 - RNA, 22 nt, Artificial Sequence
  Synthetic oligonucleotide: Ptpn6-5077
cagacacaaggaggauguguau

SEQ ID NO: 24552 - RNA, 23 nt, Artificial Sequence
  Synthetic oligonucleotide: Ptpn6-5078
acagacacaaggaggauguguau

SEQ ID NO: 24553 - RNA, 24 nt, Artificial Sequence
  Synthetic oligonucleotide: Ptpn6-5079
uacagacacaaggaggauguguau

SEQ ID NO: 24554 - RNA, 18 nt, Artificial Sequence
  Synthetic oligonucleotide: Ptpn6-5080
ccuacucugugaccaacu

SEQ ID NO: 24555 - RNA, 19 nt, Artificial Sequence
  Synthetic oligonucleotide: Ptpn6-5081
cccuacucugugaccaacu

SEQ ID NO: 24556 - RNA, 20 nt, Artificial Sequence
  Synthetic oligonucleotide: Ptpn6-689
gcccuacucugugaccaacu

SEQ ID NO: 24557 - RNA, 21 nt, Artificial Sequence
  Synthetic oligonucleotide: Ptpn6-5082
ggcccuacucugugaccaacu

SEQ ID NO: 24558 - RNA, 22 nt, Artificial Sequence
  Synthetic oligonucleotide: Ptpn6-5083
gggcccuacucugugaccaacu

SEQ ID NO: 24559 - RNA, 23 nt, Artificial Sequence
  Synthetic oligonucleotide: Ptpn6-5084
ugggcccuacucugugaccaacu

SEQ ID NO: 24560 - RNA, 24 nt, Artificial Sequence
  Synthetic oligonucleotide: Ptpn6-5085
augggcccuacucugugaccaacu

SEQ ID NO: 24561 - RNA, 18 nt, Artificial Sequence
  Synthetic oligonucleotide: Ptpn6-5086
uaugagaaccugcacacu

SEQ ID NO: 24562 - RNA, 19 nt, Artificial Sequence
  Synthetic oligonucleotide: Ptpn6-5087
guaugagaaccugcacacu

SEQ ID NO: 24563 - RNA, 20 nt, Artificial Sequence
  Synthetic oligonucleotide: Ptpn6-724
uguaugagaaccugcacacu

SEQ ID NO: 24564 - RNA, 21 nt, Artificial Sequence
  Synthetic oligonucleotide: Ptpn6-5088
guguaugagaaccugcacacu

SEQ ID NO: 24565 - RNA, 22 nt, Artificial Sequence
  Synthetic oligonucleotide: Ptpn6-5089
uguguaugagaaccugcacacu

SEQ ID NO: 24566 - RNA, 23 nt, Artificial Sequence
  Synthetic oligonucleotide: Ptpn6-5090
auguguaugagaaccugcacacu

SEQ ID NO: 24567 - RNA, 24 nt, Artificial Sequence
  Synthetic oligonucleotide: Ptpn6-5091
gauguguaugagaaccugcacacu

SEQ ID NO: 24568 - RNA, 18 nt, Artificial Sequence
  Synthetic oligonucleotide: Ptpn6-5092
caguucauugaaaccacu

SEQ ID NO: 24569 - RNA, 19 nt, Artificial Sequence
  Synthetic oligonucleotide: Ptpn6-5093
ccaguucauugaaaccacu

SEQ ID NO: 24570 - RNA, 20 nt, Artificial Sequence
  Synthetic oligonucleotide: Ptpn6-715
cccaguucauugaaaccacu

SEQ ID NO: 24571 - RNA, 21 nt, Artificial Sequence
  Synthetic oligonucleotide: Ptpn6-5094
gcccaguucauugaaaccacu

SEQ ID NO: 24572 - RNA, 22 nt, Artificial Sequence
  Synthetic oligonucleotide: Ptpn6-5095
cgcccaguucauugaaaccacu

SEQ ID NO: 24573 - RNA, 23 nt, Artificial Sequence
  Synthetic oligonucleotide: Ptpn6-5096
ucgcccaguucauugaaaccacu

SEQ ID NO: 24574 - RNA, 24 nt, Artificial Sequence
  Synthetic oligonucleotide: Ptpn6-5097
aucgcccaguucauugaaaccacu

SEQ ID NO: 24575 - RNA, 18 nt, Artificial Sequence
  Synthetic oligonucleotide: Ptpn6-5098
acaagaacauucuccccu

SEQ ID NO: 24576 - RNA, 19 nt, Artificial Sequence
  Synthetic oligonucleotide: Ptpn6-5099
uacaagaacauucuccccu

SEQ ID NO: 24577 - RNA, 20 nt, Artificial Sequence
  Synthetic oligonucleotide: Ptpn6-5100
cuacaagaacauucuccccu

SEQ ID NO: 24578 - RNA, 21 nt, Artificial Sequence
  Synthetic oligonucleotide: Ptpn6-5101
gcuacaagaacauucuccccu

SEQ ID NO: 24579 - RNA, 22 nt, Artificial Sequence
  Synthetic oligonucleotide: Ptpn6-5102
cgcuacaagaacauucuccccu

SEQ ID NO: 24580 - RNA, 23 nt, Artificial Sequence
  Synthetic oligonucleotide: Ptpn6-5103
ccgcuacaagaacauucuccccu

SEQ ID NO: 24581 - RNA, 24 nt, Artificial Sequence
  Synthetic oligonucleotide: Ptpn6-5104
accgcuacaagaacauucuccccu

SEQ ID NO: 24582 - RNA, 18 nt, Artificial Sequence
  Synthetic oligonucleotide: Ptpn6-5105
gcgugcagagcagggccu

SEQ ID NO: 24583 - RNA, 19 nt, Artificial Sequence
  Synthetic oligonucleotide: Ptpn6-5106
ugcgugcagagcagggccu

SEQ ID NO: 24584 - RNA, 20 nt, Artificial Sequence
  Synthetic oligonucleotide: Ptpn6-2755
gugcgugcagagcagggccu

SEQ ID NO: 24585 - RNA, 21 nt, Artificial Sequence
  Synthetic oligonucleotide: Ptpn6-5107
ggugcgugcagagcagggccu

SEQ ID NO: 24586 - RNA, 22 nt, Artificial Sequence
  Synthetic oligonucleotide: Ptpn6-5108
aggugcgugcagagcagggccu

SEQ ID NO: 24587 - RNA, 23 nt, Artificial Sequence
  Synthetic oligonucleotide: Ptpn6-5109
caggugcgugcagagcagggccu

SEQ ID NO: 24588 - RNA, 24 nt, Artificial Sequence
  Synthetic oligonucleotide: Ptpn6-5110
gcaggugcgugcagagcagggccu

SEQ ID NO: 24589 - RNA, 18 nt, Artificial Sequence
  Synthetic oligonucleotide: Ptpn6-5111
cagccaaggcuggcuucu

SEQ ID NO: 24590 - RNA, 19 nt, Artificial Sequence
  Synthetic oligonucleotide: Ptpn6-5112
acagccaaggcuggcuucu

SEQ ID NO: 24591 - RNA, 20 nt, Artificial Sequence
  Synthetic oligonucleotide: Ptpn6-166
uacagccaaggcuggcuucu

SEQ ID NO: 24592 - RNA, 21 nt, Artificial Sequence
  Synthetic oligonucleotide: Ptpn6-5113
auacagccaaggcuggcuucu

SEQ ID NO: 24593 - RNA, 22 nt, Artificial Sequence
  Synthetic oligonucleotide: Ptpn6-5114
gauacagccaaggcuggcuucu

SEQ ID NO: 24594 - RNA, 23 nt, Artificial Sequence
  Synthetic oligonucleotide: Ptpn6-5115
ggauacagccaaggcuggcuucu

SEQ ID NO: 24595 - RNA, 24 nt, Artificial Sequence
  Synthetic oligonucleotide: Ptpn6-5116
aggauacagccaaggcuggcuucu

SEQ ID NO: 24596 - RNA, 18 nt, Artificial Sequence
  Synthetic oligonucleotide: Ptpn6-5117
uacaucaaggucagcagu

SEQ ID NO: 24597 - RNA, 19 nt, Artificial Sequence
  Synthetic oligonucleotide: Ptpn6-5118
cuacaucaaggucagcagu

SEQ ID NO: 24598 - RNA, 20 nt, Artificial Sequence
  Synthetic oligonucleotide: Ptpn6-5119
acuacaucaaggucagcagu

SEQ ID NO: 24599 - RNA, 21 nt, Artificial Sequence
  Synthetic oligonucleotide: Ptpn6-5120
aacuacaucaaggucagcagu

SEQ ID NO: 24600 - RNA, 22 nt, Artificial Sequence
  Synthetic oligonucleotide: Ptpn6-5121
caacuacaucaaggucagcagu

SEQ ID NO: 24601 - RNA, 23 nt, Artificial Sequence
  Synthetic oligonucleotide: Ptpn6-5122
ccaacuacaucaaggucagcagu

SEQ ID NO: 24602 - RNA, 24 nt, Artificial Sequence
  Synthetic oligonucleotide: Ptpn6-5123
gccaacuacaucaaggucagcagu

SEQ ID NO: 24603 - RNA, 18 nt, Artificial Sequence
  Synthetic oligonucleotide: Ptpn6-5124
ugaacaagaagcaggagu

SEQ ID NO: 24604 - RNA, 19 nt, Artificial Sequence
  Synthetic oligonucleotide: Ptpn6-5125
cugaacaagaagcaggagu

SEQ ID NO: 24605 - RNA, 20 nt, Artificial Sequence
  Synthetic oligonucleotide: Ptpn6-652
acugaacaagaagcaggagu

SEQ ID NO: 24606 - RNA, 21 nt, Artificial Sequence
  Synthetic oligonucleotide: Ptpn6-5126
aacugaacaagaagcaggagu

SEQ ID NO: 24607 - RNA, 22 nt, Artificial Sequence
  Synthetic oligonucleotide: Ptpn6-5127
gaacugaacaagaagcaggagu

SEQ ID NO: 24608 - RNA, 23 nt, Artificial Sequence
  Synthetic oligonucleotide: Ptpn6-5128
ggaacugaacaagaagcaggagu

SEQ ID NO: 24609 - RNA, 24 nt, Artificial Sequence
  Synthetic oligonucleotide: Ptpn6-5129
uggaacugaacaagaagcaggagu

SEQ ID NO: 24610 - RNA, 18 nt, Artificial Sequence
  Synthetic oligonucleotide: Ptpn6-5130
cuggcuucugggaggagu

SEQ ID NO: 24611 - RNA, 19 nt, Artificial Sequence
  Synthetic oligonucleotide: Ptpn6-5131
gcuggcuucugggaggagu

SEQ ID NO: 24612 - RNA, 20 nt, Artificial Sequence
  Synthetic oligonucleotide: Ptpn6-659
ggcuggcuucugggaggagu

SEQ ID NO: 24613 - RNA, 21 nt, Artificial Sequence
  Synthetic oligonucleotide: Ptpn6-5132
aggcuggcuucugggaggagu

SEQ ID NO: 24614 - RNA, 22 nt, Artificial Sequence
  Synthetic oligonucleotide: Ptpn6-5133
aaggcuggcuucugggaggagu

SEQ ID NO: 24615 - RNA, 23 nt, Artificial Sequence
  Synthetic oligonucleotide: Ptpn6-5134
caaggcuggcuucugggaggagu

SEQ ID NO: 24616 - RNA, 24 nt, Artificial Sequence
  Synthetic oligonucleotide: Ptpn6-5135
ccaaggcuggcuucugggaggagu

SEQ ID NO: 24617 - RNA, 18 nt, Artificial Sequence
  Synthetic oligonucleotide: Ptpn6-5136
agggccaggagucggagu

SEQ ID NO: 24618 - RNA, 19 nt, Artificial Sequence
  Synthetic oligonucleotide: Ptpn6-5137
aagggccaggagucggagu

SEQ ID NO: 24619 - RNA, 20 nt, Artificial Sequence
  Synthetic oligonucleotide: Ptpn6-719
gaagggccaggagucggagu

SEQ ID NO: 24620 - RNA, 21 nt, Artificial Sequence
  Synthetic oligonucleotide: Ptpn6-5138
agaagggccaggagucggagu

SEQ ID NO: 24621 - RNA, 22 nt, Artificial Sequence
  Synthetic oligonucleotide: Ptpn6-5139
cagaagggccaggagucggagu

SEQ ID NO: 24622 - RNA, 23 nt, Artificial Sequence
  Synthetic oligonucleotide: Ptpn6-5140
gcagaagggccaggagucggagu

SEQ ID NO: 24623 - RNA, 24 nt, Artificial Sequence
  Synthetic oligonucleotide: Ptpn6-5141
cgcagaagggccaggagucggagu

SEQ ID NO: 24624 - RNA, 18 nt, Artificial Sequence
  Synthetic oligonucleotide: Ptpn6-5142
cagcagugugggccacgu

SEQ ID NO: 24625 - RNA, 19 nt, Artificial Sequence
  Synthetic oligonucleotide: Ptpn6-5143
ucagcagugugggccacgu

SEQ ID NO: 24626 - RNA, 20 nt, Artificial Sequence
  Synthetic oligonucleotide: Ptpn6-2763
gucagcagugugggccacgu

SEQ ID NO: 24627 - RNA, 21 nt, Artificial Sequence
  Synthetic oligonucleotide: Ptpn6-5144
ggucagcagugugggccacgu

SEQ ID NO: 24628 - RNA, 22 nt, Artificial Sequence
  Synthetic oligonucleotide: Ptpn6-5145
aggucagcagugugggccacgu

SEQ ID NO: 24629 - RNA, 23 nt, Artificial Sequence
  Synthetic oligonucleotide: Ptpn6-5146
aaggucagcagugugggccacgu

SEQ ID NO: 24630 - RNA, 24 nt, Artificial Sequence
  Synthetic oligonucleotide: Ptpn6-5147
caaggucagcagugugggccacgu

SEQ ID NO: 24631 - RNA, 18 nt, Artificial Sequence
  Synthetic oligonucleotide: Ptpn6-5148
aagaacuugcaccagcgu

SEQ ID NO: 24632 - RNA, 19 nt, Artificial Sequence
  Synthetic oligonucleotide: Ptpn6-5149
gaagaacuugcaccagcgu

SEQ ID NO: 24633 - RNA, 20 nt, Artificial Sequence
  Synthetic oligonucleotide: Ptpn6-661
ugaagaacuugcaccagcgu

SEQ ID NO: 24634 - RNA, 21 nt, Artificial Sequence
  Synthetic oligonucleotide: Ptpn6-5150
gugaagaacuugcaccagcgu

SEQ ID NO: 24635 - RNA, 22 nt, Artificial Sequence
  Synthetic oligonucleotide: Ptpn6-5151
ggugaagaacuugcaccagcgu

SEQ ID NO: 24636 - RNA, 23 nt, Artificial Sequence
  Synthetic oligonucleotide: Ptpn6-5152
aggugaagaacuugcaccagcgu

SEQ ID NO: 24637 - RNA, 24 nt, Artificial Sequence
  Synthetic oligonucleotide: Ptpn6-5153
gaggugaagaacuugcaccagcgu

SEQ ID NO: 24638 - RNA, 18 nt, Artificial Sequence
  Synthetic oligonucleotide: Ptpn6-5154
ugucuaccugcggcaggu

SEQ ID NO: 24639 - RNA, 19 nt, Artificial Sequence
  Synthetic oligonucleotide: Ptpn6-5155
uugucuaccugcggcaggu

SEQ ID NO: 24640 - RNA, 20 nt, Artificial Sequence
  Synthetic oligonucleotide: Ptpn6-5156
uuugucuaccugcggcaggu

SEQ ID NO: 24641 - RNA, 21 nt, Artificial Sequence
  Synthetic oligonucleotide: Ptpn6-5157
cuuugucuaccugcggcaggu

SEQ ID NO: 24642 - RNA, 22 nt, Artificial Sequence
  Synthetic oligonucleotide: Ptpn6-5158
ccuuugucuaccugcggcaggu

SEQ ID NO: 24643 - RNA, 23 nt, Artificial Sequence
  Synthetic oligonucleotide: Ptpn6-5159
gccuuugucuaccugcggcaggu

SEQ ID NO: 24644 - RNA, 24 nt, Artificial Sequence
  Synthetic oligonucleotide: Ptpn6-5160
cgccuuugucuaccugcggcaggu

SEQ ID NO: 24645 - RNA, 18 nt, Artificial Sequence
  Synthetic oligonucleotide: Ptpn6-5161
aacaucuccaccaagggu

SEQ ID NO: 24646 - RNA, 19 nt, Artificial Sequence
  Synthetic oligonucleotide: Ptpn6-5162
gaacaucuccaccaagggu

SEQ ID NO: 24647 - RNA, 20 nt, Artificial Sequence
  Synthetic oligonucleotide: Ptpn6-5163
agaacaucuccaccaagggu

SEQ ID NO: 24648 - RNA, 21 nt, Artificial Sequence
  Synthetic oligonucleotide: Ptpn6-5164
gagaacaucuccaccaagggu

SEQ ID NO: 24649 - RNA, 22 nt, Artificial Sequence
  Synthetic oligonucleotide: Ptpn6-5165
ggagaacaucuccaccaagggu

SEQ ID NO: 24650 - RNA, 23 nt, Artificial Sequence
  Synthetic oligonucleotide: Ptpn6-5166
uggagaacaucuccaccaagggu

SEQ ID NO: 24651 - RNA, 24 nt, Artificial Sequence
  Synthetic oligonucleotide: Ptpn6-5167
auggagaacaucuccaccaagggu

SEQ ID NO: 24652 - RNA, 18 nt, Artificial Sequence
  Synthetic oligonucleotide: Ptpn6-5168
ugaggggcaccugggggu

SEQ ID NO: 24653 - RNA, 19 nt, Artificial Sequence
  Synthetic oligonucleotide: Ptpn6-5169
gugaggggcaccugggggu

SEQ ID NO: 24654 - RNA, 20 nt, Artificial Sequence
  Synthetic oligonucleotide: Ptpn6-5170
ggugaggggcaccugggggu

SEQ ID NO: 24655 - RNA, 21 nt, Artificial Sequence
  Synthetic oligonucleotide: Ptpn6-5171
gggugaggggcaccugggggu

SEQ ID NO: 24656 - RNA, 22 nt, Artificial Sequence
  Synthetic oligonucleotide: Ptpn6-5172
agggugaggggcaccugggggu

SEQ ID NO: 24657 - RNA, 23 nt, Artificial Sequence
  Synthetic oligonucleotide: Ptpn6-5173
aagggugaggggcaccugggggu

SEQ ID NO: 24658 - RNA, 24 nt, Artificial Sequence
  Synthetic oligonucleotide: Ptpn6-5174
caagggugaggggcaccugggggu

SEQ ID NO: 24659 - RNA, 18 nt, Artificial Sequence
  Synthetic oligonucleotide: Ptpn6-5175
gaguuugaggugcauggu

SEQ ID NO: 24660 - RNA, 19 nt, Artificial Sequence
  Synthetic oligonucleotide: Ptpn6-5176
ggaguuugaggugcauggu

SEQ ID NO: 24661 - RNA, 20 nt, Artificial Sequence
  Synthetic oligonucleotide: Ptpn6-2769
aggaguuugaggugcauggu

SEQ ID NO: 24662 - RNA, 21 nt, Artificial Sequence
  Synthetic oligonucleotide: Ptpn6-5177
gaggaguuugaggugcauggu

SEQ ID NO: 24663 - RNA, 22 nt, Artificial Sequence
  Synthetic oligonucleotide: Ptpn6-5178
ggaggaguuugaggugcauggu

SEQ ID NO: 24664 - RNA, 23 nt, Artificial Sequence
  Synthetic oligonucleotide: Ptpn6-5179
gggaggaguuugaggugcauggu

SEQ ID NO: 24665 - RNA, 24 nt, Artificial Sequence
  Synthetic oligonucleotide: Ptpn6-5180
ugggaggaguuugaggugcauggu

SEQ ID NO: 24666 - RNA, 18 nt, Artificial Sequence
  Synthetic oligonucleotide: Ptpn6-5181
gaagaccauccagauggu

SEQ ID NO: 24667 - RNA, 19 nt, Artificial Sequence
  Synthetic oligonucleotide: Ptpn6-5182
agaagaccauccagauggu

SEQ ID NO: 24668 - RNA, 20 nt, Artificial Sequence
  Synthetic oligonucleotide: Ptpn6-710
cagaagaccauccagauggu

SEQ ID NO: 24669 - RNA, 21 nt, Artificial Sequence
  Synthetic oligonucleotide: Ptpn6-5183
ccagaagaccauccagauggu

SEQ ID NO: 24670 - RNA, 22 nt, Artificial Sequence
  Synthetic oligonucleotide: Ptpn6-5184
uccagaagaccauccagauggu

SEQ ID NO: 24671 - RNA, 23 nt, Artificial Sequence
  Synthetic oligonucleotide: Ptpn6-5185
auccagaagaccauccagauggu

SEQ ID NO: 24672 - RNA, 24 nt, Artificial Sequence
  Synthetic oligonucleotide: Ptpn6-5186
cauccagaagaccauccagauggu

SEQ ID NO: 24673 - RNA, 18 nt, Artificial Sequence
  Synthetic oligonucleotide: Ptpn6-5187
cgcuacacaguggguggu

SEQ ID NO: 24674 - RNA, 19 nt, Artificial Sequence
  Synthetic oligonucleotide: Ptpn6-5188
acgcuacacaguggguggu

SEQ ID NO: 24675 - RNA, 20 nt, Artificial Sequence
  Synthetic oligonucleotide: Ptpn6-634
gacgcuacacaguggguggu

SEQ ID NO: 24676 - RNA, 21 nt, Artificial Sequence
  Synthetic oligonucleotide: Ptpn6-5189
ggacgcuacacaguggguggu

SEQ ID NO: 24677 - RNA, 22 nt, Artificial Sequence
  Synthetic oligonucleotide: Ptpn6-5190
uggacgcuacacaguggguggu

SEQ ID NO: 24678 - RNA, 23 nt, Artificial Sequence
  Synthetic oligonucleotide: Ptpn6-5191
guggacgcuacacaguggguggu

SEQ ID NO: 24679 - RNA, 24 nt, Artificial Sequence
  Synthetic oligonucleotide: Ptpn6-5192
gguggacgcuacacaguggguggu

SEQ ID NO: 24680 - RNA, 18 nt, Artificial Sequence
  Synthetic oligonucleotide: Ptpn6-5193
acauugagaaccgagugu

SEQ ID NO: 24681 - RNA, 19 nt, Artificial Sequence
  Synthetic oligonucleotide: Ptpn6-5194
gacauugagaaccgagugu

SEQ ID NO: 24682 - RNA, 20 nt, Artificial Sequence
  Synthetic oligonucleotide: Ptpn6-160
ugacauugagaaccgagugu

SEQ ID NO: 24683 - RNA, 21 nt, Artificial Sequence
  Synthetic oligonucleotide: Ptpn6-5195
cugacauugagaaccgagugu

SEQ ID NO: 24684 - RNA, 22 nt, Artificial Sequence
  Synthetic oligonucleotide: Ptpn6-5196
gcugacauugagaaccgagugu

SEQ ID NO: 24685 - RNA, 23 nt, Artificial Sequence
  Synthetic oligonucleotide: Ptpn6-5197
ggcugacauugagaaccgagugu

SEQ ID NO: 24686 - RNA, 24 nt, Artificial Sequence
  Synthetic oligonucleotide: Ptpn6-5198
cggcugacauugagaaccgagugu

SEQ ID NO: 24687 - RNA, 18 nt, Artificial Sequence
  Synthetic oligonucleotide: Ptpn6-5199
gacacaaggaggaugugu

SEQ ID NO: 24688 - RNA, 19 nt, Artificial Sequence
  Synthetic oligonucleotide: Ptpn6-5200
agacacaaggaggaugugu

SEQ ID NO: 24689 - RNA, 20 nt, Artificial Sequence
  Synthetic oligonucleotide: Ptpn6-5201
cagacacaaggaggaugugu

SEQ ID NO: 24690 - RNA, 21 nt, Artificial Sequence
  Synthetic oligonucleotide: Ptpn6-5202
acagacacaaggaggaugugu

SEQ ID NO: 24691 - RNA, 22 nt, Artificial Sequence
  Synthetic oligonucleotide: Ptpn6-5203
uacagacacaaggaggaugugu

SEQ ID NO: 24692 - RNA, 23 nt, Artificial Sequence
  Synthetic oligonucleotide: Ptpn6-5204
guacagacacaaggaggaugugu

SEQ ID NO: 24693 - RNA, 24 nt, Artificial Sequence
  Synthetic oligonucleotide: Ptpn6-5205
aguacagacacaaggaggaugugu

SEQ ID NO: 24694 - RNA, 18 nt, Artificial Sequence
  Synthetic oligonucleotide: Ptpn6-5206
aucgccagccaggguugu

SEQ ID NO: 24695 - RNA, 19 nt, Artificial Sequence
  Synthetic oligonucleotide: Ptpn6-5207
caucgccagccaggguugu

SEQ ID NO: 24696 - RNA, 20 nt, Artificial Sequence
  Synthetic oligonucleotide: Ptpn6-676
acaucgccagccaggguugu

SEQ ID NO: 24697 - RNA, 21 nt, Artificial Sequence
  Synthetic oligonucleotide: Ptpn6-5208
uacaucgccagccaggguugu

SEQ ID NO: 24698 - RNA, 22 nt, Artificial Sequence
  Synthetic oligonucleotide: Ptpn6-5209
cuacaucgccagccaggguugu

SEQ ID NO: 24699 - RNA, 23 nt, Artificial Sequence
  Synthetic oligonucleotide: Ptpn6-5210
ccuacaucgccagccaggguugu

SEQ ID NO: 24700 - RNA, 24 nt, Artificial Sequence
  Synthetic oligonucleotide: Ptpn6-5211
accuacaucgccagccaggguugu

SEQ ID NO: 24701 - RNA, 18 nt, Artificial Sequence
  Synthetic oligonucleotide: Ptpn6-5212
gugaaugcggcugacauu

SEQ ID NO: 24702 - RNA, 19 nt, Artificial Sequence
  Synthetic oligonucleotide: Ptpn6-5213
ggugaaugcggcugacauu

SEQ ID NO: 24703 - RNA, 20 nt, Artificial Sequence
  Synthetic oligonucleotide: Ptpn6-644
gggugaaugcggcugacauu

SEQ ID NO: 24704 - RNA, 21 nt, Artificial Sequence
  Synthetic oligonucleotide: Ptpn6-5214
agggugaaugcggcugacauu

SEQ ID NO: 24705 - RNA, 22 nt, Artificial Sequence
  Synthetic oligonucleotide: Ptpn6-5215
gagggugaaugcggcugacauu

SEQ ID NO: 24706 - RNA, 23 nt, Artificial Sequence
  Synthetic oligonucleotide: Ptpn6-5216
cgagggugaaugcggcugacauu

SEQ ID NO: 24707 - RNA, 24 nt, Artificial Sequence
  Synthetic oligonucleotide: Ptpn6-5217
acgagggugaaugcggcugacauu

SEQ ID NO: 24708 - RNA, 18 nt, Artificial Sequence
  Synthetic oligonucleotide: Ptpn6-5218
uucaagaagacggggauu

SEQ ID NO: 24709 - RNA, 19 nt, Artificial Sequence
  Synthetic oligonucleotide: Ptpn6-5219
uuucaagaagacggggauu

SEQ ID NO: 24710 - RNA, 20 nt, Artificial Sequence
  Synthetic oligonucleotide: Ptpn6-632
auuucaagaagacggggauu

SEQ ID NO: 24711 - RNA, 21 nt, Artificial Sequence
  Synthetic oligonucleotide: Ptpn6-5220
cauuucaagaagacggggauu

SEQ ID NO: 24712 - RNA, 22 nt, Artificial Sequence
  Synthetic oligonucleotide: Ptpn6-5221
gcauuucaagaagacggggauu

SEQ ID NO: 24713 - RNA, 23 nt, Artificial Sequence
  Synthetic oligonucleotide: Ptpn6-5222
agcauuucaagaagacggggauu

SEQ ID NO: 24714 - RNA, 24 nt, Artificial Sequence
  Synthetic oligonucleotide: Ptpn6-5223
gagcauuucaagaagacggggauu

SEQ ID NO: 24715 - RNA, 18 nt, Artificial Sequence
  Synthetic oligonucleotide: Ptpn6-5224
gcccccggagaccugauu

SEQ ID NO: 24716 - RNA, 19 nt, Artificial Sequence
  Synthetic oligonucleotide: Ptpn6-5225
ugcccccggagaccugauu

SEQ ID NO: 24717 - RNA, 20 nt, Artificial Sequence
  Synthetic oligonucleotide: Ptpn6-2773
gugcccccggagaccugauu

SEQ ID NO: 24718 - RNA, 21 nt, Artificial Sequence
  Synthetic oligonucleotide: Ptpn6-5226
agugcccccggagaccugauu

SEQ ID NO: 24719 - RNA, 22 nt, Artificial Sequence
  Synthetic oligonucleotide: Ptpn6-5227
cagugcccccggagaccugauu

SEQ ID NO: 24720 - RNA, 23 nt, Artificial Sequence
  Synthetic oligonucleotide: Ptpn6-5228
ucagugcccccggagaccugauu

SEQ ID NO: 24721 - RNA, 24 nt, Artificial Sequence
  Synthetic oligonucleotide: Ptpn6-5229
gucagugcccccggagaccugauu

SEQ ID NO: 24722 - RNA, 18 nt, Artificial Sequence
  Synthetic oligonucleotide: Ptpn6-5230
uacagccaaggcuggcuu

SEQ ID NO: 24723 - RNA, 19 nt, Artificial Sequence
  Synthetic oligonucleotide: Ptpn6-5231
auacagccaaggcuggcuu

SEQ ID NO: 24724 - RNA, 20 nt, Artificial Sequence
  Synthetic oligonucleotide: Ptpn6-654
gauacagccaaggcuggcuu

SEQ ID NO: 24725 - RNA, 21 nt, Artificial Sequence
  Synthetic oligonucleotide: Ptpn6-5232
ggauacagccaaggcuggcuu

SEQ ID NO: 24726 - RNA, 22 nt, Artificial Sequence
  Synthetic oligonucleotide: Ptpn6-5233
aggauacagccaaggcuggcuu

SEQ ID NO: 24727 - RNA, 23 nt, Artificial Sequence
  Synthetic oligonucleotide: Ptpn6-5234
gaggauacagccaaggcuggcuu

SEQ ID NO: 24728 - RNA, 24 nt, Artificial Sequence
  Synthetic oligonucleotide: Ptpn6-5235
cgaggauacagccaaggcuggcuu

SEQ ID NO: 24729 - RNA, 18 nt, Artificial Sequence
  Synthetic oligonucleotide: Ptpn6-5236
ugggcaugcagcgugcuu

SEQ ID NO: 24730 - RNA, 19 nt, Artificial Sequence
  Synthetic oligonucleotide: Ptpn6-5237
gugggcaugcagcgugcuu

SEQ ID NO: 24731 - RNA, 20 nt, Artificial Sequence
  Synthetic oligonucleotide: Ptpn6-688
ggugggcaugcagcgugcuu

SEQ ID NO: 24732 - RNA, 21 nt, Artificial Sequence
  Synthetic oligonucleotide: Ptpn6-5238
aggugggcaugcagcgugcuu

SEQ ID NO: 24733 - RNA, 22 nt, Artificial Sequence
  Synthetic oligonucleotide: Ptpn6-5239
gaggugggcaugcagcgugcuu

SEQ ID NO: 24734 - RNA, 23 nt, Artificial Sequence
  Synthetic oligonucleotide: Ptpn6-5240
cgaggugggcaugcagcgugcuu

SEQ ID NO: 24735 - RNA, 24 nt, Artificial Sequence
  Synthetic oligonucleotide: Ptpn6-5241
ccgaggugggcaugcagcgugcuu

SEQ ID NO: 24736 - RNA, 18 nt, Artificial Sequence
  Synthetic oligonucleotide: Ptpn6-5242
gaggggcaccuggggguu

SEQ ID NO: 24737 - RNA, 19 nt, Artificial Sequence
  Synthetic oligonucleotide: Ptpn6-5243
ugaggggcaccuggggguu

SEQ ID NO: 24738 - RNA, 20 nt, Artificial Sequence
  Synthetic oligonucleotide: Ptpn6-2774
gugaggggcaccuggggguu

SEQ ID NO: 24739 - RNA, 21 nt, Artificial Sequence
  Synthetic oligonucleotide: Ptpn6-5244
ggugaggggcaccuggggguu

SEQ ID NO: 24740 - RNA, 22 nt, Artificial Sequence
  Synthetic oligonucleotide: Ptpn6-5245
gggugaggggcaccuggggguu

SEQ ID NO: 24741 - RNA, 23 nt, Artificial Sequence
  Synthetic oligonucleotide: Ptpn6-5246
agggugaggggcaccuggggguu

SEQ ID NO: 24742 - RNA, 24 nt, Artificial Sequence
  Synthetic oligonucleotide: Ptpn6-5247
aagggugaggggcaccuggggguu

SEQ ID NO: 24743 - RNA, 18 nt, Artificial Sequence
  Synthetic oligonucleotide: Ptpn6-5248
gcuacacagugggugguu

SEQ ID NO: 24744 - RNA, 19 nt, Artificial Sequence
  Synthetic oligonucleotide: Ptpn6-5249
cgcuacacagugggugguu

SEQ ID NO: 24745 - RNA, 20 nt, Artificial Sequence
  Synthetic oligonucleotide: Ptpn6-148
acgcuacacagugggugguu

SEQ ID NO: 24746 - RNA, 21 nt, Artificial Sequence
  Synthetic oligonucleotide: Ptpn6-5250
gacgcuacacagugggugguu

SEQ ID NO: 24747 - RNA, 22 nt, Artificial Sequence
  Synthetic oligonucleotide: Ptpn6-5251
ggacgcuacacagugggugguu

SEQ ID NO: 24748 - RNA, 23 nt, Artificial Sequence
  Synthetic oligonucleotide: Ptpn6-5252
uggacgcuacacagugggugguu

SEQ ID NO: 24749 - RNA, 24 nt, Artificial Sequence
  Synthetic oligonucleotide: Ptpn6-5253
guggacgcuacacagugggugguu

SEQ ID NO: 24750 - RNA, 17 nt, Artificial Sequence
  Synthetic oligonucleotide: Ptpn6-5254
agggccgagguguccac

SEQ ID NO: 24751 - RNA, 17 nt, Artificial Sequence
  Synthetic oligonucleotide: Ptpn6-36
auucggauccagaacuc

SEQ ID NO: 24752 - RNA, 17 nt, Artificial Sequence
  Synthetic oligonucleotide: Ptpn6-5255
cagccagccuggagacu

SEQ ID NO: 24753 - RNA, 20 nt, Artificial Sequence
  Synthetic oligonucleotide: Ptpn6-5256
ucaagggccgagguguccac

SEQ ID NO: 24754 - RNA, 20 nt, Artificial Sequence
  Synthetic oligonucleotide: Ptpn6-95
cauauucggauccagaacuc

SEQ ID NO: 24755 - RNA, 20 nt, Artificial Sequence
  Synthetic oligonucleotide: Ptpn6-5257
ccucagccagccuggagacu

SEQ ID NO: 24756 - RNA, 17 nt, Artificial Sequence
  Synthetic oligonucleotide: Ptpn6-5258
cccgaggugggcaugca

SEQ ID NO: 24757 - RNA, 17 nt, Artificial Sequence
  Synthetic oligonucleotide: Ptpn6-247
ggagcauuucaagaaga

SEQ ID NO: 24758 - RNA, 17 nt, Artificial Sequence
  Synthetic oligonucleotide: Ptpn6-5259
uggcuguauccucggac

SEQ ID NO: 24759 - RNA, 17 nt, Artificial Sequence
  Synthetic oligonucleotide: Ptpn6-5260
ucuccuugucugcugac

SEQ ID NO: 24760 - RNA, 17 nt, Artificial Sequence
  Synthetic oligonucleotide: Ptpn6-5261
ggugcaaguucuucacc

SEQ ID NO: 24761 - RNA, 17 nt, Artificial Sequence
  Synthetic oligonucleotide: Ptpn6-5262
cacgcaccugcaggacc

SEQ ID NO: 24762 - RNA, 17 nt, Artificial Sequence
  Synthetic oligonucleotide: Ptpn6-5263
ggcacugacccuauguc

SEQ ID NO: 24763 - RNA, 17 nt, Artificial Sequence
  Synthetic oligonucleotide: Ptpn6-5264
gugagccuggggguguc

SEQ ID NO: 24764 - RNA, 17 nt, Artificial Sequence
  Synthetic oligonucleotide: Ptpn6-5265
ccgaggauacagccaag

SEQ ID NO: 24765 - RNA, 17 nt, Artificial Sequence
  Synthetic oligonucleotide: Ptpn6-5266
ggucagugcccccggag

SEQ ID NO: 24766 - RNA, 17 nt, Artificial Sequence
  Synthetic oligonucleotide: Ptpn6-5267
guuuggggugcgucucu

SEQ ID NO: 24767 - RNA, 20 nt, Artificial Sequence
  Synthetic oligonucleotide: Ptpn6-5268
uggcccgaggugggcaugca

SEQ ID NO: 24768 - RNA, 20 nt, Artificial Sequence
  Synthetic oligonucleotide: Ptpn6-152
gguggagcauuucaagaaga

SEQ ID NO: 24769 - RNA, 20 nt, Artificial Sequence
  Synthetic oligonucleotide: Ptpn6-5269
ccuuggcuguauccucggac

SEQ ID NO: 24770 - RNA, 20 nt, Artificial Sequence
  Synthetic oligonucleotide: Ptpn6-5270
ucuucuccuugucugcugac

SEQ ID NO: 24771 - RNA, 20 nt, Artificial Sequence
  Synthetic oligonucleotide: Ptpn6-5271
gcuggugcaaguucuucacc

SEQ ID NO: 24772 - RNA, 20 nt, Artificial Sequence
  Synthetic oligonucleotide: Ptpn6-5272
cugcacgcaccugcaggacc

SEQ ID NO: 24773 - RNA, 20 nt, Artificial Sequence
  Synthetic oligonucleotide: Ptpn6-5273
gggggcacugacccuauguc

SEQ ID NO: 24774 - RNA, 20 nt, Artificial Sequence
  Synthetic oligonucleotide: Ptpn6-5274
ccagugagccuggggguguc

SEQ ID NO: 24775 - RNA, 20 nt, Artificial Sequence
  Synthetic oligonucleotide: Ptpn6-5275
aguccgaggauacagccaag

SEQ ID NO: 24776 - RNA, 20 nt, Artificial Sequence
  Synthetic oligonucleotide: Ptpn6-5276
uagggucagugcccccggag

SEQ ID NO: 24777 - RNA, 20 nt, Artificial Sequence
  Synthetic oligonucleotide: Ptpn6-5277
cugguuuggggugcgucucu

SEQ ID NO: 24778 - RNA, 17 nt, Artificial Sequence
  Synthetic oligonucleotide: Ptpn6-1001
cguaggcggaaaccaaa

SEQ ID NO: 24779 - RNA, 17 nt, Artificial Sequence
  Synthetic oligonucleotide: Ptpn6-999
ccguaggcggaaaccaa

SEQ ID NO: 24780 - RNA, 17 nt, Artificial Sequence
  Synthetic oligonucleotide: Ptpn6-1086
gcccgggacuuacccac

SEQ ID NO: 24781 - RNA, 17 nt, Artificial Sequence
  Synthetic oligonucleotide: Ptpn6-998
agcgguucuuccucacc

SEQ ID NO: 24782 - RNA, 17 nt, Artificial Sequence
  Synthetic oligonucleotide: Ptpn6-1087
ggaccccgauggugccc

SEQ ID NO: 24783 - RNA, 17 nt, Artificial Sequence
  Synthetic oligonucleotide: Ptpn6-1258
ucccguggguaaguccc

SEQ ID NO: 24784 - RNA, 17 nt, Artificial Sequence
  Synthetic oligonucleotide: Ptpn6-1330
caaagcgggaguacagc

SEQ ID NO: 24785 - RNA, 17 nt, Artificial Sequence
  Synthetic oligonucleotide: Ptpn6-1338
ccacggcagagggccgc

SEQ ID NO: 24786 - RNA, 17 nt, Artificial Sequence
  Synthetic oligonucleotide: Ptpn6-1067
gugcacagcugugccgc

SEQ ID NO: 24787 - RNA, 17 nt, Artificial Sequence
  Synthetic oligonucleotide: Ptpn6-968
ggaccggaaacaggcgc

SEQ ID NO: 24788 - RNA, 17 nt, Artificial Sequence
  Synthetic oligonucleotide: Ptpn6-1331
caagcugacagagcggc

SEQ ID NO: 24789 - RNA, 17 nt, Artificial Sequence
  Synthetic oligonucleotide: Ptpn6-1261
aagucccgggcaccauc

SEQ ID NO: 24790 - RNA, 17 nt, Artificial Sequence
  Synthetic oligonucleotide: Ptpn6-1263
ccgcugugggcggucuc

SEQ ID NO: 24791 - RNA, 17 nt, Artificial Sequence
  Synthetic oligonucleotide: Ptpn6-1327
ucacaccuugcgggaag

SEQ ID NO: 24792 - RNA, 17 nt, Artificial Sequence
  Synthetic oligonucleotide: Ptpn6-1325
cccgagaccgcccacag

SEQ ID NO: 24793 - RNA, 17 nt, Artificial Sequence
  Synthetic oligonucleotide: Ptpn6-963
gguuuccgccuacggag

SEQ ID NO: 24794 - RNA, 17 nt, Artificial Sequence
  Synthetic oligonucleotide: Ptpn6-965
ggaaaccucuccguagg

SEQ ID NO: 24795 - RNA, 17 nt, Artificial Sequence
  Synthetic oligonucleotide: Ptpn6-1319
ucaagcugacagagcgg

SEQ ID NO: 24796 - RNA, 17 nt, Artificial Sequence
  Synthetic oligonucleotide: Ptpn6-1063
gcuguacucccgcuuug

SEQ ID NO: 24797 - RNA, 17 nt, Artificial Sequence
  Synthetic oligonucleotide: Ptpn6-1066
ggagagguuucccccau

SEQ ID NO: 24798 - RNA, 17 nt, Artificial Sequence
  Synthetic oligonucleotide: Ptpn6-1596
agguaggguuaggcccu

SEQ ID NO: 24799 - RNA, 17 nt, Artificial Sequence
  Synthetic oligonucleotide: Ptpn6-1002
cucacguucacacacgu

SEQ ID NO: 24800 - RNA, 17 nt, Artificial Sequence
  Synthetic oligonucleotide: Ptpn6-1081
gcggcgggguauugggu

SEQ ID NO: 24801 - RNA, 17 nt, Artificial Sequence
  Synthetic oligonucleotide: Ptpn6-1320
cagagcggcgggguauu

SEQ ID NO: 24802 - RNA, 20 nt, Artificial Sequence
  Synthetic oligonucleotide: Ptpn6-982
cuccguaggcggaaaccaaa

SEQ ID NO: 24803 - RNA, 20 nt, Artificial Sequence
  Synthetic oligonucleotide: Ptpn6-981
ucuccguaggcggaaaccaa

SEQ ID NO: 24804 - RNA, 20 nt, Artificial Sequence
  Synthetic oligonucleotide: Ptpn6-962
guccucacaccuugcgggaa

SEQ ID NO: 24805 - RNA, 20 nt, Artificial Sequence
  Synthetic oligonucleotide: Ptpn6-1517
cucaaccugccccgggggaa

SEQ ID NO: 24806 - RNA, 20 nt, Artificial Sequence
  Synthetic oligonucleotide: Ptpn6-1033
gagguguugugagcuaccca

SEQ ID NO: 24807 - RNA, 20 nt, Artificial Sequence
  Synthetic oligonucleotide: Ptpn6-1140
acucccgcuuuggggcugca

SEQ ID NO: 24808 - RNA, 20 nt, Artificial Sequence
  Synthetic oligonucleotide: Ptpn6-1532
uaggcccagccaggaccaua

SEQ ID NO: 24809 - RNA, 20 nt, Artificial Sequence
  Synthetic oligonucleotide: Ptpn6-953
ggcccuuugguuuccgccua

SEQ ID NO: 24810 - RNA, 20 nt, Artificial Sequence
  Synthetic oligonucleotide: Ptpn6-1041
gagcggcgggguauugggua

SEQ ID NO: 24811 - RNA, 20 nt, Artificial Sequence
  Synthetic oligonucleotide: Ptpn6-984
aguucauagggaccggaaac

SEQ ID NO: 24812 - RNA, 20 nt, Artificial Sequence
  Synthetic oligonucleotide: Ptpn6-1025
ggugcccgggacuuacccac

SEQ ID NO: 24813 - RNA, 20 nt, Artificial Sequence
  Synthetic oligonucleotide: Ptpn6-972
ccgcaaggugugaggacccc

SEQ ID NO: 24814 - RNA, 20 nt, Artificial Sequence
  Synthetic oligonucleotide: Ptpn6-1197
cugggaccccgauggugccc

SEQ ID NO: 24815 - RNA, 20 nt, Artificial Sequence
  Synthetic oligonucleotide: Ptpn6-973
cugucccguggguaaguccc

SEQ ID NO: 24816 - RNA, 20 nt, Artificial Sequence
  Synthetic oligonucleotide: Ptpn6-1187
acugggaccccgauggugcc

SEQ ID NO: 24817 - RNA, 20 nt, Artificial Sequence
  Synthetic oligonucleotide: Ptpn6-1028
gaacagauacacacuugucc

SEQ ID NO: 24818 - RNA, 20 nt, Artificial Sequence
  Synthetic oligonucleotide: Ptpn6-1010
gaaggcggcccuggaccagc

SEQ ID NO: 24819 - RNA, 20 nt, Artificial Sequence
  Synthetic oligonucleotide: Ptpn6-991
aagccacggcagagggccgc

SEQ ID NO: 24820 - RNA, 20 nt, Artificial Sequence
  Synthetic oligonucleotide: Ptpn6-1141
acugugcacagcugugccgc

SEQ ID NO: 24821 - RNA, 20 nt, Artificial Sequence
  Synthetic oligonucleotide: Ptpn6-985
uagggaccggaaacaggcgc

SEQ ID NO: 24822 - RNA, 20 nt, Artificial Sequence
  Synthetic oligonucleotide: Ptpn6-1024
gcucaagcugacagagcggc

SEQ ID NO: 24823 - RNA, 20 nt, Artificial Sequence
  Synthetic oligonucleotide: Ptpn6-1217
ugccaggccaauggcacugc

SEQ ID NO: 24824 - RNA, 20 nt, Artificial Sequence
  Synthetic oligonucleotide: Ptpn6-988
uggcccgagaccgcccacag

SEQ ID NO: 24825 - RNA, 20 nt, Artificial Sequence
  Synthetic oligonucleotide: Ptpn6-969
uuugguuuccgccuacggag

SEQ ID NO: 24826 - RNA, 20 nt, Artificial Sequence
  Synthetic oligonucleotide: Ptpn6-989
agcggcgggguauuggguag

SEQ ID NO: 24827 - RNA, 20 nt, Artificial Sequence
  Synthetic oligonucleotide: Ptpn6-1151
uacagagagaugcugucccg

SEQ ID NO: 24828 - RNA, 20 nt, Artificial Sequence
  Synthetic oligonucleotide: Ptpn6-1203
agaggagcaugagugagccg

SEQ ID NO: 24829 - RNA, 20 nt, Artificial Sequence
  Synthetic oligonucleotide: Ptpn6-1218
cucaagcugacagagcggcg

SEQ ID NO: 24830 - RNA, 20 nt, Artificial Sequence
  Synthetic oligonucleotide: Ptpn6-1150
uggccuggcaggcaggaucg

SEQ ID NO: 24831 - RNA, 20 nt, Artificial Sequence
  Synthetic oligonucleotide: Ptpn6-957
gggggaaaccucuccguagg

SEQ ID NO: 24832 - RNA, 20 nt, Artificial Sequence
  Synthetic oligonucleotide: Ptpn6-1526
ucagguaggguuaggcccug

SEQ ID NO: 24833 - RNA, 20 nt, Artificial Sequence
  Synthetic oligonucleotide: Ptpn6-990
ccggggguccucacaccuug

SEQ ID NO: 24834 - RNA, 20 nt, Artificial Sequence
  Synthetic oligonucleotide: Ptpn6-1525
cucagguaggguuaggcccu

SEQ ID NO: 24835 - RNA, 20 nt, Artificial Sequence
  Synthetic oligonucleotide: Ptpn6-961
gcacucacguucacacacgu

SEQ ID NO: 24836 - RNA, 20 nt, Artificial Sequence
  Synthetic oligonucleotide: Ptpn6-992
aaugggggaaaccucuccgu

SEQ ID NO: 24837 - RNA, 20 nt, Artificial Sequence
  Synthetic oligonucleotide: Ptpn6-1409
ggucccucagcgcccugggu

SEQ ID NO: 24838 - RNA, 20 nt, Artificial Sequence
  Synthetic oligonucleotide: Ptpn6-980
agagcggcgggguauugggu

SEQ ID NO: 24839 - RNA, 20 nt, Artificial Sequence
  Synthetic oligonucleotide: Ptpn6-1190
acgggacagcaucucucugu

SEQ ID NO: 24840 - RNA, 20 nt, Artificial Sequence
  Synthetic oligonucleotide: Ptpn6-978
ugacagagcggcgggguauu

SEQ ID NO: 24841 - RNA, 20 nt, Artificial Sequence
  Synthetic oligonucleotide: Ptpn6-1003
ggcuguuagggauuuuccuu

SEQ ID NO: 24842 - RNA, 17 nt, Artificial Sequence
  Synthetic oligonucleotide: Ptpn6-1342
uaauagucuccaggaaa

SEQ ID NO: 24843 - RNA, 17 nt, Artificial Sequence
  Synthetic oligonucleotide: Ptpn6-1358
ugaggaagagcaaccaa

SEQ ID NO: 24844 - RNA, 17 nt, Artificial Sequence
  Synthetic oligonucleotide: Ptpn6-1367
ccugccugccaggccaa

SEQ ID NO: 24845 - RNA, 17 nt, Artificial Sequence
  Synthetic oligonucleotide: Ptpn6-1374
uggaaguagaaaugcaa

SEQ ID NO: 24846 - RNA, 17 nt, Artificial Sequence
  Synthetic oligonucleotide: Ptpn6-1345
cucacaccuugcgggaa

SEQ ID NO: 24847 - RNA, 17 nt, Artificial Sequence
  Synthetic oligonucleotide: Ptpn6-1588
aaccugccccgggggaa

SEQ ID NO: 24848 - RNA, 17 nt, Artificial Sequence
  Synthetic oligonucleotide: Ptpn6-5278
gugggugggccugcaca

SEQ ID NO: 24849 - RNA, 17 nt, Artificial Sequence
  Synthetic oligonucleotide: Ptpn6-5279
gcaggcccacccaccca

SEQ ID NO: 24850 - RNA, 17 nt, Artificial Sequence
  Synthetic oligonucleotide: Ptpn6-1085
guguugugagcuaccca

SEQ ID NO: 24851 - RNA, 17 nt, Artificial Sequence
  Synthetic oligonucleotide: Ptpn6-1322
ugcccgggacuuaccca

SEQ ID NO: 24852 - RNA, 17 nt, Artificial Sequence
  Synthetic oligonucleotide: Ptpn6-1456
ggccuaacccugcccca

SEQ ID NO: 24853 - RNA, 17 nt, Artificial Sequence
  Synthetic oligonucleotide: Ptpn6-1377
uagggagggggaagcca

SEQ ID NO: 24854 - RNA, 17 nt, Artificial Sequence
  Synthetic oligonucleotide: Ptpn6-1302
uugcucuuccucagcca

SEQ ID NO: 24855 - RNA, 17 nt, Artificial Sequence
  Synthetic oligonucleotide: Ptpn6-1285
uggagacuauuagucca

SEQ ID NO: 24856 - RNA, 17 nt, Artificial Sequence
  Synthetic oligonucleotide: Ptpn6-1102
gcccgccugcuggucca

SEQ ID NO: 24857 - RNA, 17 nt, Artificial Sequence
  Synthetic oligonucleotide: Ptpn6-1339
agauacacacuugucca

SEQ ID NO: 24858 - RNA, 17 nt, Artificial Sequence
  Synthetic oligonucleotide: Ptpn6-1264
aacuuccccuucccgca

SEQ ID NO: 24859 - RNA, 17 nt, Artificial Sequence
  Synthetic oligonucleotide: Ptpn6-1383
cacggcagagggccgca

SEQ ID NO: 24860 - RNA, 17 nt, Artificial Sequence
  Synthetic oligonucleotide: Ptpn6-966
gaccggaaacaggcgca

SEQ ID NO: 24861 - RNA, 17 nt, Artificial Sequence
  Synthetic oligonucleotide: Ptpn6-1599
gguuaggcccuggggca

SEQ ID NO: 24862 - RNA, 17 nt, Artificial Sequence
  Synthetic oligonucleotide: Ptpn6-1341
aggccaauggcacugca

SEQ ID NO: 24863 - RNA, 17 nt, Artificial Sequence
  Synthetic oligonucleotide: Ptpn6-1267
cccgcuuuggggcugca

SEQ ID NO: 24864 - RNA, 17 nt, Artificial Sequence
  Synthetic oligonucleotide: Ptpn6-1606
uagggaggagcuguuca

SEQ ID NO: 24865 - RNA, 17 nt, Artificial Sequence
  Synthetic oligonucleotide: Ptpn6-1126
ggggaaaauguuaaaga

SEQ ID NO: 24866 - RNA, 17 nt, Artificial Sequence
  Synthetic oligonucleotide: Ptpn6-1133
ggggaagccacggcaga

SEQ ID NO: 24867 - RNA, 17 nt, Artificial Sequence
  Synthetic oligonucleotide: Ptpn6-1120
gcccaguuccucagaga

SEQ ID NO: 24868 - RNA, 17 nt, Artificial Sequence
  Synthetic oligonucleotide: Ptpn6-1101
ggagacugggaccccga

SEQ ID NO: 24869 - RNA, 17 nt, Artificial Sequence
  Synthetic oligonucleotide: Ptpn6-1314
aguuuuggagggaggga

SEQ ID NO: 24870 - RNA, 17 nt, Artificial Sequence
  Synthetic oligonucleotide: Ptpn6-1307
uguuaguuuuggaggga

SEQ ID NO: 24871 - RNA, 17 nt, Artificial Sequence
  Synthetic oligonucleotide: Ptpn6-1105
gcaucucucuguaggga

SEQ ID NO: 24872 - RNA, 17 nt, Artificial Sequence
  Synthetic oligonucleotide: Ptpn6-1337
ccucacaccuugcggga

SEQ ID NO: 24873 - RNA, 17 nt, Artificial Sequence
  Synthetic oligonucleotide: Ptpn6-1609
ggagcuguucaggggga

SEQ ID NO: 24874 - RNA, 17 nt, Artificial Sequence
  Synthetic oligonucleotide: Ptpn6-1587
caaccugccccggggga

SEQ ID NO: 24875 - RNA, 17 nt, Artificial Sequence
  Synthetic oligonucleotide: Ptpn6-1296
ccuccucucccggggga

SEQ ID NO: 24876 - RNA, 17 nt, Artificial Sequence
  Synthetic oligonucleotide: Ptpn6-1282
cuccuguuaguuuugga

SEQ ID NO: 24877 - RNA, 17 nt, Artificial Sequence
  Synthetic oligonucleotide: Ptpn6-1582
cccacccagggcgcuga

SEQ ID NO: 24878 - RNA, 17 nt, Artificial Sequence
  Synthetic oligonucleotide: Ptpn6-1603
gcccagccaggaccaua

SEQ ID NO: 24879 - RNA, 17 nt, Artificial Sequence
  Synthetic oligonucleotide: Ptpn6-1110
ggaaggggaaguucaua

SEQ ID NO: 24880 - RNA, 17 nt, Artificial Sequence
  Synthetic oligonucleotide: Ptpn6-1451
ugaacagcuccucccua

SEQ ID NO: 24881 - RNA, 17 nt, Artificial Sequence
  Synthetic oligonucleotide: Ptpn6-997
ccuuugguuuccgccua

SEQ ID NO: 24882 - RNA, 17 nt, Artificial Sequence
  Synthetic oligonucleotide: Ptpn6-1103
ggaaaccaaagggccua

SEQ ID NO: 24883 - RNA, 17 nt, Artificial Sequence
  Synthetic oligonucleotide: Ptpn6-1593
gggaggagccucaggua

SEQ ID NO: 24884 - RNA, 17 nt, Artificial Sequence
  Synthetic oligonucleotide: Ptpn6-1000
cggcgggguauugggua

SEQ ID NO: 24885 - RNA, 17 nt, Artificial Sequence
  Synthetic oligonucleotide: Ptpn6-1113
gacagcaucucucugua

SEQ ID NO: 24886 - RNA, 17 nt, Artificial Sequence
  Synthetic oligonucleotide: Ptpn6-1069
gaggaacugggcuguua

SEQ ID NO: 24887 - RNA, 17 nt, Artificial Sequence
  Synthetic oligonucleotide: Ptpn6-1317
ucauagggaccggaaac

SEQ ID NO: 24888 - RNA, 17 nt, Artificial Sequence
  Synthetic oligonucleotide: Ptpn6-1299
cuccuucucugaggaac

SEQ ID NO: 24889 - RNA, 17 nt, Artificial Sequence
  Synthetic oligonucleotide: Ptpn6-1336
cucccuccaaaacuaac

SEQ ID NO: 24890 - RNA, 17 nt, Artificial Sequence
  Synthetic oligonucleotide: Ptpn6-5280
ggugggugggccugcac

SEQ ID NO: 24891 - RNA, 17 nt, Artificial Sequence
  Synthetic oligonucleotide: Ptpn6-1359
caaaacuaacaggagac

SEQ ID NO: 24892 - RNA, 17 nt, Artificial Sequence
  Synthetic oligonucleotide: Ptpn6-1118
gucuccaggaaaaggac

SEQ ID NO: 24893 - RNA, 17 nt, Artificial Sequence
  Synthetic oligonucleotide: Ptpn6-1099
gggaaguucauagggac

SEQ ID NO: 24894 - RNA, 17 nt, Artificial Sequence
  Synthetic oligonucleotide: Ptpn6-1089
gagcuacccagggggac

SEQ ID NO: 24895 - RNA, 17 nt, Artificial Sequence
  Synthetic oligonucleotide: Ptpn6-1129
ggagaggaggagccacc

SEQ ID NO: 24896 - RNA, 17 nt, Artificial Sequence
  Synthetic oligonucleotide: Ptpn6-1386
ccaccuggagcuccacc

SEQ ID NO: 24897 - RNA, 17 nt, Artificial Sequence
  Synthetic oligonucleotide: Ptpn6-1106
ggguaggggaacagacc

SEQ ID NO: 24898 - RNA, 17 nt, Artificial Sequence
  Synthetic oligonucleotide: Ptpn6-1343
acugcagggacaaaccc

SEQ ID NO: 24899 - RNA, 17 nt, Artificial Sequence
  Synthetic oligonucleotide: Ptpn6-1350
agaccaggaaguaaccc

SEQ ID NO: 24900 - RNA, 17 nt, Artificial Sequence
  Synthetic oligonucleotide: Ptpn6-5281
ugcaggcccacccaccc

SEQ ID NO: 24901 - RNA, 17 nt, Artificial Sequence
  Synthetic oligonucleotide: Ptpn6-1083
gguguugugagcuaccc

SEQ ID NO: 24902 - RNA, 17 nt, Artificial Sequence
  Synthetic oligonucleotide: Ptpn6-1291
caaggugugaggacccc

SEQ ID NO: 24903 - RNA, 17 nt, Artificial Sequence
  Synthetic oligonucleotide: Ptpn6-1270
cuuaggaccuguccccc

SEQ ID NO: 24904 - RNA, 17 nt, Artificial Sequence
  Synthetic oligonucleotide: Ptpn6-1459
gcuccuccccuuccccc

SEQ ID NO: 24905 - RNA, 17 nt, Artificial Sequence
  Synthetic oligonucleotide: Ptpn6-1364
cagggccgccuuccccc

SEQ ID NO: 24906 - RNA, 17 nt, Artificial Sequence
  Synthetic oligonucleotide: Ptpn6-1584
gccucucaaccugcccc

SEQ ID NO: 24907 - RNA, 17 nt, Artificial Sequence
  Synthetic oligonucleotide: Ptpn6-1455
gggccuaacccugcccc

SEQ ID NO: 24908 - RNA, 17 nt, Artificial Sequence
  Synthetic oligonucleotide: Ptpn6-1458
ggcuccuccccuucccc

SEQ ID NO: 24909 - RNA, 17 nt, Artificial Sequence
  Synthetic oligonucleotide: Ptpn6-1379
ccagggccgccuucccc

SEQ ID NO: 24910 - RNA, 17 nt, Artificial Sequence
  Synthetic oligonucleotide: Ptpn6-1292
ucuuuaacauuuucccc

SEQ ID NO: 24911 - RNA, 17 nt, Artificial Sequence
  Synthetic oligonucleotide: Ptpn6-1466
ugggucccucagcgccc

SEQ ID NO: 24912 - RNA, 17 nt, Artificial Sequence
  Synthetic oligonucleotide: Ptpn6-1595
cagguaggguuaggccc

SEQ ID NO: 24913 - RNA, 17 nt, Artificial Sequence
  Synthetic oligonucleotide: Ptpn6-1303
ccgggggaaggcggccc

SEQ ID NO: 24914 - RNA, 17 nt, Artificial Sequence
  Synthetic oligonucleotide: Ptpn6-1583
agccucucaaccugccc

SEQ ID NO: 24915 - RNA, 17 nt, Artificial Sequence
  Synthetic oligonucleotide: Ptpn6-1080
guggcuccuccucuccc

SEQ ID NO: 24916 - RNA, 17 nt, Artificial Sequence
  Synthetic oligonucleotide: Ptpn6-1134
gcacaguggcccaagcc

SEQ ID NO: 24917 - RNA, 17 nt, Artificial Sequence
  Synthetic oligonucleotide: Ptpn6-1601
caggguuaggcccagcc

SEQ ID NO: 24918 - RNA, 17 nt, Artificial Sequence
  Synthetic oligonucleotide: Ptpn6-1071
guugcucuuccucagcc

SEQ ID NO: 24919 - RNA, 17 nt, Artificial Sequence
  Synthetic oligonucleotide: Ptpn6-1372
aggagcaugagugagcc

SEQ ID NO: 24920 - RNA, 17 nt, Artificial Sequence
  Synthetic oligonucleotide: Ptpn6-1287
cugcagugccauuggcc

SEQ ID NO: 24921 - RNA, 17 nt, Artificial Sequence
  Synthetic oligonucleotide: Ptpn6-1346
ccucgauccugccugcc

SEQ ID NO: 24922 - RNA, 17 nt, Artificial Sequence
  Synthetic oligonucleotide: Ptpn6-1088
gggaccccgauggugcc

SEQ ID NO: 24923 - RNA, 17 nt, Artificial Sequence
  Synthetic oligonucleotide: Ptpn6-1078
gcuccagguggagcucc

SEQ ID NO: 24924 - RNA, 17 nt, Artificial Sequence
  Synthetic oligonucleotide: Ptpn6-1309
cugucagcuugagcucc

SEQ ID NO: 24925 - RNA, 17 nt, Artificial Sequence
  Synthetic oligonucleotide: Ptpn6-1075
gguggcuccuccucucc

SEQ ID NO: 24926 - RNA, 17 nt, Artificial Sequence
  Synthetic oligonucleotide: Ptpn6-1321
cuggacuaauagucucc

SEQ ID NO: 24927 - RNA, 17 nt, Artificial Sequence
  Synthetic oligonucleotide: Ptpn6-964
gucccguggguaagucc

SEQ ID NO: 24928 - RNA, 17 nt, Artificial Sequence
  Synthetic oligonucleotide: Ptpn6-1272
cuggagacuauuagucc

SEQ ID NO: 24929 - RNA, 17 nt, Artificial Sequence
  Synthetic oligonucleotide: Ptpn6-1452
gcuccucccuauggucc

SEQ ID NO: 24930 - RNA, 17 nt, Artificial Sequence
  Synthetic oligonucleotide: Ptpn6-1111
ggcccgccugcuggucc

SEQ ID NO: 24931 - RNA, 17 nt, Artificial Sequence
  Synthetic oligonucleotide: Ptpn6-1332
cagauacacacuugucc

SEQ ID NO: 24932 - RNA, 17 nt, Artificial Sequence
  Synthetic oligonucleotide: Ptpn6-1283
cagccaggguuacuucc

SEQ ID NO: 24933 - RNA, 17 nt, Artificial Sequence
  Synthetic oligonucleotide: Ptpn6-1298
cccaccuguccuuuucc

SEQ ID NO: 24934 - RNA, 17 nt, Artificial Sequence
  Synthetic oligonucleotide: Ptpn6-1376
cccugcagccccaaagc

SEQ ID NO: 24935 - RNA, 17 nt, Artificial Sequence
  Synthetic oligonucleotide: Ptpn6-1388
aagcaggaggcagaagc

SEQ ID NO: 24936 - RNA, 17 nt, Artificial Sequence
  Synthetic oligonucleotide: Ptpn6-1315
uggggcugcagggaagc

SEQ ID NO: 24937 - RNA, 17 nt, Artificial Sequence
  Synthetic oligonucleotide: Ptpn6-1096
ggggacagguccuaagc

SEQ ID NO: 24938 - RNA, 17 nt, Artificial Sequence
  Synthetic oligonucleotide: Ptpn6-1073
ggcggcccuggaccagc

SEQ ID NO: 24939 - RNA, 17 nt, Artificial Sequence
  Synthetic oligonucleotide: Ptpn6-1116
gaggagcaugagugagc

SEQ ID NO: 24940 - RNA, 17 nt, Artificial Sequence
  Synthetic oligonucleotide: Ptpn6-1076
gcccuggaccagcaggc

SEQ ID NO: 24941 - RNA, 17 nt, Artificial Sequence
  Synthetic oligonucleotide: Ptpn6-1284
ccauuggccuggcaggc

SEQ ID NO: 24942 - RNA, 17 nt, Artificial Sequence
  Synthetic oligonucleotide: Ptpn6-1385
agcaggagcccagaggc

SEQ ID NO: 24943 - RNA, 17 nt, Artificial Sequence
  Synthetic oligonucleotide: Ptpn6-1463
ggggcagguugagaggc

SEQ ID NO: 24944 - RNA, 17 nt, Artificial Sequence
  Synthetic oligonucleotide: Ptpn6-1461
uccccuucccccggggc

SEQ ID NO: 24945 - RNA, 17 nt, Artificial Sequence
  Synthetic oligonucleotide: Ptpn6-1132
gacagguggggcggggc

SEQ ID NO: 24946 - RNA, 17 nt, Artificial Sequence
  Synthetic oligonucleotide: Ptpn6-1378
agagggccgcagggggc

SEQ ID NO: 24947 - RNA, 17 nt, Artificial Sequence
  Synthetic oligonucleotide: Ptpn6-1598
ggguuaggcccuggggc

SEQ ID NO: 24948 - RNA, 17 nt, Artificial Sequence
  Synthetic oligonucleotide: Ptpn6-1380
aaaaggacagguggggc

SEQ ID NO: 24949 - RNA, 17 nt, Artificial Sequence
  Synthetic oligonucleotide: Ptpn6-1277
agugccauuggccuggc

SEQ ID NO: 24950 - RNA, 17 nt, Artificial Sequence
  Synthetic oligonucleotide: Ptpn6-1453
cucccuaugguccuggc

SEQ ID NO: 24951 - RNA, 17 nt, Artificial Sequence
  Synthetic oligonucleotide: Ptpn6-1348
caggccaauggcacugc

SEQ ID NO: 24952 - RNA, 17 nt, Artificial Sequence
  Synthetic oligonucleotide: Ptpn6-1356
acagcaggcccgccugc

SEQ ID NO: 24953 - RNA, 17 nt, Artificial Sequence
  Synthetic oligonucleotide: Ptpn6-1312
ucccgcuuuggggcugc

SEQ ID NO: 24954 - RNA, 17 nt, Artificial Sequence
  Synthetic oligonucleotide: Ptpn6-5282
ggagguacccccugugc

SEQ ID NO: 24955 - RNA, 17 nt, Artificial Sequence
  Synthetic oligonucleotide: Ptpn6-1093
ggguccucacaccuugc

SEQ ID NO: 24956 - RNA, 17 nt, Artificial Sequence
  Synthetic oligonucleotide: Ptpn6-1308
uuucuacuuccagccuc

SEQ ID NO: 24957 - RNA, 17 nt, Artificial Sequence
  Synthetic oligonucleotide: Ptpn6-1591
ggaaggggaggagccuc

SEQ ID NO: 24958 - RNA, 17 nt, Artificial Sequence
  Synthetic oligonucleotide: Ptpn6-1605
auagggaggagcuguuc

SEQ ID NO: 24959 - RNA, 17 nt, Artificial Sequence
  Synthetic oligonucleotide: Ptpn6-1265
ugcccugcgccuguuuc

SEQ ID NO: 24960 - RNA, 17 nt, Artificial Sequence
  Synthetic oligonucleotide: Ptpn6-1369
ucccugcagccccaaag

SEQ ID NO: 24961 - RNA, 17 nt, Artificial Sequence
  Synthetic oligonucleotide: Ptpn6-1373
aggggaaaauguuaaag

SEQ ID NO: 24962 - RNA, 17 nt, Artificial Sequence
  Synthetic oligonucleotide: Ptpn6-1294
caggaucgaggaggaag

SEQ ID NO: 24963 - RNA, 17 nt, Artificial Sequence
  Synthetic oligonucleotide: Ptpn6-1589
accugccccgggggaag

SEQ ID NO: 24964 - RNA, 17 nt, Artificial Sequence
  Synthetic oligonucleotide: Ptpn6-5283
ugggugggccugcacag

SEQ ID NO: 24965 - RNA, 17 nt, Artificial Sequence
  Synthetic oligonucleotide: Ptpn6-1130
ggcacagcugugcacag

SEQ ID NO: 24966 - RNA, 17 nt, Artificial Sequence
  Synthetic oligonucleotide: Ptpn6-1354
uguugugagcuacccag

SEQ ID NO: 24967 - RNA, 17 nt, Artificial Sequence
  Synthetic oligonucleotide: Ptpn6-1381
cagaagcaggagcccag

SEQ ID NO: 24968 - RNA, 17 nt, Artificial Sequence
  Synthetic oligonucleotide: Ptpn6-1127
gggcggggcugagccag

SEQ ID NO: 24969 - RNA, 17 nt, Artificial Sequence
  Synthetic oligonucleotide: Ptpn6-1082
gauacacacuuguccag

SEQ ID NO: 24970 - RNA, 17 nt, Artificial Sequence
  Synthetic oligonucleotide: Ptpn6-1335
acggcagagggccgcag

SEQ ID NO: 24971 - RNA, 17 nt, Artificial Sequence
  Synthetic oligonucleotide: Ptpn6-1114
gggggaagccacggcag

SEQ ID NO: 24972 - RNA, 17 nt, Artificial Sequence
  Synthetic oligonucleotide: Ptpn6-1361
aaacaggcgcagggcag

SEQ ID NO: 24973 - RNA, 17 nt, Artificial Sequence
  Synthetic oligonucleotide: Ptpn6-1344
uguuaaagagggggcag

SEQ ID NO: 24974 - RNA, 17 nt, Artificial Sequence
  Synthetic oligonucleotide: Ptpn6-1607
agggaggagcuguucag

SEQ ID NO: 24975 - RNA, 17 nt, Artificial Sequence
  Synthetic oligonucleotide: Ptpn6-1119
gggaaaauguuaaagag

SEQ ID NO: 24976 - RNA, 17 nt, Artificial Sequence
  Synthetic oligonucleotide: Ptpn6-1349
agcucaagcugacagag

SEQ ID NO: 24977 - RNA, 17 nt, Artificial Sequence
  Synthetic oligonucleotide: Ptpn6-1357
caucucucuguagggag

SEQ ID NO: 24978 - RNA, 17 nt, Artificial Sequence
  Synthetic oligonucleotide: Ptpn6-1333
ccgccuucccccgggag

SEQ ID NO: 24979 - RNA, 17 nt, Artificial Sequence
  Synthetic oligonucleotide: Ptpn6-1464
agguugagaggcuggag

SEQ ID NO: 24980 - RNA, 17 nt, Artificial Sequence
  Synthetic oligonucleotide: Ptpn6-1276
aguggcugauuacugag

SEQ ID NO: 24981 - RNA, 17 nt, Artificial Sequence
  Synthetic oligonucleotide: Ptpn6-1462
ccccggggcagguugag

SEQ ID NO: 24982 - RNA, 17 nt, Artificial Sequence
  Synthetic oligonucleotide: Ptpn6-1084
ggcgggguauuggguag

SEQ ID NO: 24983 - RNA, 17 nt, Artificial Sequence
  Synthetic oligonucleotide: Ptpn6-1460
cuccuccccuucccccg

SEQ ID NO: 24984 - RNA, 17 nt, Artificial Sequence
  Synthetic oligonucleotide: Ptpn6-1585
ccucucaaccugccccg

SEQ ID NO: 24985 - RNA, 17 nt, Artificial Sequence
  Synthetic oligonucleotide: Ptpn6-1293
uggcuccuccucucccg

SEQ ID NO: 24986 - RNA, 17 nt, Artificial Sequence
  Synthetic oligonucleotide: Ptpn6-1281
agagagaugcugucccg

SEQ ID NO: 24987 - RNA, 17 nt, Artificial Sequence
  Synthetic oligonucleotide: Ptpn6-1092
ggagcaugagugagccg

SEQ ID NO: 24988 - RNA, 17 nt, Artificial Sequence
  Synthetic oligonucleotide: Ptpn6-1268
ccugcggcccucugccg

SEQ ID NO: 24989 - RNA, 17 nt, Artificial Sequence
  Synthetic oligonucleotide: Ptpn6-1324
aagcugacagagcggcg

SEQ ID NO: 24990 - RNA, 17 nt, Artificial Sequence
  Synthetic oligonucleotide: Ptpn6-1128
gagggccgcagggggcg

SEQ ID NO: 24991 - RNA, 17 nt, Artificial Sequence
  Synthetic oligonucleotide: Ptpn6-1375
aaaggacagguggggcg

SEQ ID NO: 24992 - RNA, 17 nt, Artificial Sequence
  Synthetic oligonucleotide: Ptpn6-1259
agucccgggcaccaucg

SEQ ID NO: 24993 - RNA, 17 nt, Artificial Sequence
  Synthetic oligonucleotide: Ptpn6-1288
ccuggcaggcaggaucg

SEQ ID NO: 24994 - RNA, 17 nt, Artificial Sequence
  Synthetic oligonucleotide: Ptpn6-1365
caguuccucagagaagg

SEQ ID NO: 24995 - RNA, 17 nt, Artificial Sequence
  Synthetic oligonucleotide: Ptpn6-1297
ccucucccgggggaagg

SEQ ID NO: 24996 - RNA, 17 nt, Artificial Sequence
  Synthetic oligonucleotide: Ptpn6-5284
gggugggccugcacagg

SEQ ID NO: 24997 - RNA, 17 nt, Artificial Sequence
  Synthetic oligonucleotide: Ptpn6-1371
uccaggaaaaggacagg

SEQ ID NO: 24998 - RNA, 17 nt, Artificial Sequence
  Synthetic oligonucleotide: Ptpn6-1100
guugugagcuacccagg

SEQ ID NO: 24999 - RNA, 17 nt, Artificial Sequence
  Synthetic oligonucleotide: Ptpn6-1313
ccagguggagcuccagg

SEQ ID NO: 25000 - RNA, 17 nt, Artificial Sequence
  Synthetic oligonucleotide: Ptpn6-1290
ucagcuugagcuccagg

SEQ ID NO: 25001 - RNA, 17 nt, Artificial Sequence
  Synthetic oligonucleotide: Ptpn6-1091
gacagguccuaagcagg

SEQ ID NO: 25002 - RNA, 17 nt, Artificial Sequence
  Synthetic oligonucleotide: Ptpn6-1079
ggcccuggaccagcagg

SEQ ID NO: 25003 - RNA, 17 nt, Artificial Sequence
  Synthetic oligonucleotide: Ptpn6-1353
cggcagagggccgcagg

SEQ ID NO: 25004 - RNA, 17 nt, Artificial Sequence
  Synthetic oligonucleotide: Ptpn6-1608
gggaggagcuguucagg

SEQ ID NO: 25005 - RNA, 17 nt, Artificial Sequence
  Synthetic oligonucleotide: Ptpn6-1122
ggaaaauguuaaagagg

SEQ ID NO: 25006 - RNA, 17 nt, Artificial Sequence
  Synthetic oligonucleotide: Ptpn6-1352
ccuucccccgggagagg

SEQ ID NO: 25007 - RNA, 17 nt, Artificial Sequence
  Synthetic oligonucleotide: Ptpn6-1072
ggcaggcaggaucgagg

SEQ ID NO: 25008 - RNA, 17 nt, Artificial Sequence
  Synthetic oligonucleotide: Ptpn6-1351
aucucucuguagggagg

SEQ ID NO: 25009 - RNA, 17 nt, Artificial Sequence
  Synthetic oligonucleotide: Ptpn6-1586
cucucaaccugccccgg

SEQ ID NO: 25010 - RNA, 17 nt, Artificial Sequence
  Synthetic oligonucleotide: Ptpn6-1074
ggcuccuccucucccgg

SEQ ID NO: 25011 - RNA, 17 nt, Artificial Sequence
  Synthetic oligonucleotide: Ptpn6-1097
gagcaugagugagccgg

SEQ ID NO: 25012 - RNA, 17 nt, Artificial Sequence
  Synthetic oligonucleotide: Ptpn6-1310
uaguuuuggagggaggg

SEQ ID NO: 25013 - RNA, 17 nt, Artificial Sequence
  Synthetic oligonucleotide: Ptpn6-1278
cuguuaguuuuggaggg

SEQ ID NO: 25014 - RNA, 17 nt, Artificial Sequence
  Synthetic oligonucleotide: Ptpn6-1604
cagccaggaccauaggg

SEQ ID NO: 25015 - RNA, 17 nt, Artificial Sequence
  Synthetic oligonucleotide: Ptpn6-1347
agcaucucucuguaggg

SEQ ID NO: 25016 - RNA, 17 nt, Artificial Sequence
  Synthetic oligonucleotide: Ptpn6-1590
ugccccgggggaagggg

SEQ ID NO: 25017 - RNA, 17 nt, Artificial Sequence
  Synthetic oligonucleotide: Ptpn6-1363
cagagggccgcaggggg

SEQ ID NO: 25018 - RNA, 17 nt, Artificial Sequence
  Synthetic oligonucleotide: Ptpn6-1131
gaaaaggacaggugggg

SEQ ID NO: 25019 - RNA, 17 nt, Artificial Sequence
  Synthetic oligonucleotide: Ptpn6-1468
ucccucagcgcccuggg

SEQ ID NO: 25020 - RNA, 17 nt, Artificial Sequence
  Synthetic oligonucleotide: Ptpn6-1470
ucagcgcccuggguggg

SEQ ID NO: 25021 - RNA, 17 nt, Artificial Sequence
  Synthetic oligonucleotide: Ptpn6-1274
aagcuggccgcuguggg

SEQ ID NO: 25022 - RNA, 17 nt, Artificial Sequence
  Synthetic oligonucleotide: Ptpn6-1104
ggaagagcaaccaaugg

SEQ ID NO: 25023 - RNA, 17 nt, Artificial Sequence
  Synthetic oligonucleotide: Ptpn6-1279
ucuccuguuaguuuugg

SEQ ID NO: 25024 - RNA, 17 nt, Artificial Sequence
  Synthetic oligonucleotide: Ptpn6-1355
aggaagagcaaccaaug

SEQ ID NO: 25025 - RNA, 17 nt, Artificial Sequence
  Synthetic oligonucleotide: Ptpn6-1457
gggccuaacccuaccug

SEQ ID NO: 25026 - RNA, 17 nt, Artificial Sequence
  Synthetic oligonucleotide: Ptpn6-1304
cucagccccgcccccug

SEQ ID NO: 25027 - RNA, 17 nt, Artificial Sequence
  Synthetic oligonucleotide: Ptpn6-1597
gguaggguuaggcccug

SEQ ID NO: 25028 - RNA, 17 nt, Artificial Sequence
  Synthetic oligonucleotide: Ptpn6-1295
agggaagcuggccgcug

SEQ ID NO: 25029 - RNA, 17 nt, Artificial Sequence
  Synthetic oligonucleotide: Ptpn6-1581
acccacccagggcgcug

SEQ ID NO: 25030 - RNA, 17 nt, Artificial Sequence
  Synthetic oligonucleotide: Ptpn6-1108
ggaaguaacccuggcug

SEQ ID NO: 25031 - RNA, 17 nt, Artificial Sequence
  Synthetic oligonucleotide: Ptpn6-1070
ggguaccuccuucucug

SEQ ID NO: 25032 - RNA, 17 nt, Artificial Sequence
  Synthetic oligonucleotide: Ptpn6-1382
caggaaaaggacaggug

SEQ ID NO: 25033 - RNA, 17 nt, Artificial Sequence
  Synthetic oligonucleotide: Ptpn6-1121
guggcccaagccaggug

SEQ ID NO: 25034 - RNA, 17 nt, Artificial Sequence
  Synthetic oligonucleotide: Ptpn6-1266
ccuucccgcaaggugug

SEQ ID NO: 25035 - RNA, 17 nt, Artificial Sequence
  Synthetic oligonucleotide: Ptpn6-1098
gggguccucacaccuug

SEQ ID NO: 25036 - RNA, 17 nt, Artificial Sequence
  Synthetic oligonucleotide: Ptpn6-1334
ucugacugcuauguuug

SEQ ID NO: 25037 - RNA, 17 nt, Artificial Sequence
  Synthetic oligonucleotide: Ptpn6-1107
gaggaagagcaaccaau

SEQ ID NO: 25038 - RNA, 17 nt, Artificial Sequence
  Synthetic oligonucleotide: Ptpn6-1260
uaagucccgggcaccau

SEQ ID NO: 25039 - RNA, 17 nt, Artificial Sequence
  Synthetic oligonucleotide: Ptpn6-1602
ggcccagccaggaccau

SEQ ID NO: 25040 - RNA, 17 nt, Artificial Sequence
  Synthetic oligonucleotide: Ptpn6-1280
ugucccugcagugccau

SEQ ID NO: 25041 - RNA, 17 nt, Artificial Sequence
  Synthetic oligonucleotide: Ptpn6-1115
gggaaggggaaguucau

SEQ ID NO: 25042 - RNA, 17 nt, Artificial Sequence
  Synthetic oligonucleotide: Ptpn6-1318
acagagcggcgggguau

SEQ ID NO: 25043 - RNA, 17 nt, Artificial Sequence
  Synthetic oligonucleotide: Ptpn6-1300
uccuucucugaggaacu

SEQ ID NO: 25044 - RNA, 17 nt, Artificial Sequence
  Synthetic oligonucleotide: Ptpn6-1360
aaaacuaacaggagacu

SEQ ID NO: 25045 - RNA, 17 nt, Artificial Sequence
  Synthetic oligonucleotide: Ptpn6-1257
uuaggaccugucccccu

SEQ ID NO: 25046 - RNA, 17 nt, Artificial Sequence
  Synthetic oligonucleotide: Ptpn6-1467
gggucccucagcgcccu

SEQ ID NO: 25047 - RNA, 17 nt, Artificial Sequence
  Synthetic oligonucleotide: Ptpn6-1301
uucuuccucaccuggcu

SEQ ID NO: 25048 - RNA, 17 nt, Artificial Sequence
  Synthetic oligonucleotide: Ptpn6-1454
ucccuaugguccuggcu

SEQ ID NO: 25049 - RNA, 17 nt, Artificial Sequence
  Synthetic oligonucleotide: Ptpn6-1306
uucuacuuccagccucu

SEQ ID NO: 25050 - RNA, 17 nt, Artificial Sequence
  Synthetic oligonucleotide: Ptpn6-1064
gccgcugugggcggucu

SEQ ID NO: 25051 - RNA, 17 nt, Artificial Sequence
  Synthetic oligonucleotide: Ptpn6-1465
gguugagaggcuggagu

SEQ ID NO: 25052 - RNA, 17 nt, Artificial Sequence
  Synthetic oligonucleotide: Ptpn6-1065
gagagaugcugucccgu

SEQ ID NO: 25053 - RNA, 17 nt, Artificial Sequence
  Synthetic oligonucleotide: Ptpn6-967
gggggaaaccucuccgu

SEQ ID NO: 25054 - RNA, 17 nt, Artificial Sequence
  Synthetic oligonucleotide: Ptpn6-1368
ccaggaaaaggacaggu

SEQ ID NO: 25055 - RNA, 17 nt, Artificial Sequence
  Synthetic oligonucleotide: Ptpn6-1592
ggggaggagccucaggu

SEQ ID NO: 25056 - RNA, 17 nt, Artificial Sequence
  Synthetic oligonucleotide: Ptpn6-1469
cccucagcgcccugggu

SEQ ID NO: 25057 - RNA, 17 nt, Artificial Sequence
  Synthetic oligonucleotide: Ptpn6-1471
cagcgcccugggugggu

SEQ ID NO: 25058 - RNA, 17 nt, Artificial Sequence
  Synthetic oligonucleotide: Ptpn6-1068
gggaagcuggccgcugu

SEQ ID NO: 25059 - RNA, 17 nt, Artificial Sequence
  Synthetic oligonucleotide: Ptpn6-1112
ggacagcaucucucugu

SEQ ID NO: 25060 - RNA, 17 nt, Artificial Sequence
  Synthetic oligonucleotide: Ptpn6-1271
auuuuccuuaggcccuu

SEQ ID NO: 25061 - RNA, 17 nt, Artificial Sequence
  Synthetic oligonucleotide: Ptpn6-1275
uguuagggauuuuccuu

SEQ ID NO: 25062 - RNA, 17 nt, Artificial Sequence
  Synthetic oligonucleotide: Ptpn6-1316
cugcuguacucccgcuu

SEQ ID NO: 25063 - RNA, 17 nt, Artificial Sequence
  Synthetic oligonucleotide: Ptpn6-1305
ucuuccucaccuggcuu

SEQ ID NO: 25064 - RNA, 17 nt, Artificial Sequence
  Synthetic oligonucleotide: Ptpn6-1077
gcuucugccuccugcuu

SEQ ID NO: 25065 - RNA, 17 nt, Artificial Sequence
  Synthetic oligonucleotide: Ptpn6-1600
ggcccuggggcaggguu

SEQ ID NO: 25066 - RNA, 17 nt, Artificial Sequence
  Synthetic oligonucleotide: Ptpn6-1594
gagccucagguaggguu

SEQ ID NO: 25067 - RNA, 17 nt, Artificial Sequence
  Synthetic oligonucleotide: Ptpn6-1289
ugaggaacugggcuguu

SEQ ID NO: 25068 - RNA, 17 nt, Artificial Sequence
  Synthetic oligonucleotide: Ptpn6-996
ugcuguacucccgcuuu

SEQ ID NO: 25069 - RNA, 17 nt, Artificial Sequence
  Synthetic oligonucleotide: Ptpn6-1311
cagucuccuguuaguuu

SEQ ID NO: 25070 - RNA, 20 nt, Artificial Sequence
  Synthetic oligonucleotide: Ptpn6-1038
gacuaauagucuccaggaaa

SEQ ID NO: 25071 - RNA, 20 nt, Artificial Sequence
  Synthetic oligonucleotide: Ptpn6-1039
ggcugaggaagagcaaccaa

SEQ ID NO: 25072 - RNA, 20 nt, Artificial Sequence
  Synthetic oligonucleotide: Ptpn6-1037
gauccugccugccaggccaa

SEQ ID NO: 25073 - RNA, 20 nt, Artificial Sequence
  Synthetic oligonucleotide: Ptpn6-1054
ggcuggaaguagaaaugcaa

SEQ ID NO: 25074 - RNA, 20 nt, Artificial Sequence
  Synthetic oligonucleotide: Ptpn6-5285
ugggugggugggccugcaca

SEQ ID NO: 25075 - RNA, 20 nt, Artificial Sequence
  Synthetic oligonucleotide: Ptpn6-5286
ugugcaggcccacccaccca

SEQ ID NO: 25076 - RNA, 20 nt, Artificial Sequence
  Synthetic oligonucleotide: Ptpn6-995
uggugcccgggacuuaccca

SEQ ID NO: 25077 - RNA, 20 nt, Artificial Sequence
  Synthetic oligonucleotide: Ptpn6-1396
cugggccuaacccugcccca

SEQ ID NO: 25078 - RNA, 20 nt, Artificial Sequence
  Synthetic oligonucleotide: Ptpn6-1245
cuguagggagggggaagcca

SEQ ID NO: 25079 - RNA, 20 nt, Artificial Sequence
  Synthetic oligonucleotide: Ptpn6-1162
ugguugcucuuccucagcca

SEQ ID NO: 25080 - RNA, 20 nt, Artificial Sequence
  Synthetic oligonucleotide: Ptpn6-1144
uccuggagacuauuagucca

SEQ ID NO: 25081 - RNA, 20 nt, Artificial Sequence
  Synthetic oligonucleotide: Ptpn6-1226
caggcccgccugcuggucca

SEQ ID NO: 25082 - RNA, 20 nt, Artificial Sequence
  Synthetic oligonucleotide: Ptpn6-1210
aacagauacacacuugucca

SEQ ID NO: 25083 - RNA, 20 nt, Artificial Sequence
  Synthetic oligonucleotide: Ptpn6-1159
augaacuuccccuucccgca

SEQ ID NO: 25084 - RNA, 20 nt, Artificial Sequence
  Synthetic oligonucleotide: Ptpn6-1216
agccacggcagagggccgca

SEQ ID NO: 25085 - RNA, 20 nt, Artificial Sequence
  Synthetic oligonucleotide: Ptpn6-994
agggaccggaaacaggcgca

SEQ ID NO: 25086 - RNA, 20 nt, Artificial Sequence
  Synthetic oligonucleotide: Ptpn6-1528
uaggguuaggcccuggggca

SEQ ID NO: 25087 - RNA, 20 nt, Artificial Sequence
  Synthetic oligonucleotide: Ptpn6-1046
gccaggccaauggcacugca

SEQ ID NO: 25088 - RNA, 20 nt, Artificial Sequence
  Synthetic oligonucleotide: Ptpn6-1535
ccauagggaggagcuguuca

SEQ ID NO: 25089 - RNA, 20 nt, Artificial Sequence
  Synthetic oligonucleotide: Ptpn6-1227
ccaggggaaaauguuaaaga

SEQ ID NO: 25090 - RNA, 20 nt, Artificial Sequence
  Synthetic oligonucleotide: Ptpn6-1053
gagggggaagccacggcaga

SEQ ID NO: 25091 - RNA, 20 nt, Artificial Sequence
  Synthetic oligonucleotide: Ptpn6-1230
acagcccaguuccucagaga

SEQ ID NO: 25092 - RNA, 20 nt, Artificial Sequence
  Synthetic oligonucleotide: Ptpn6-1204
acaggagacugggaccccga

SEQ ID NO: 25093 - RNA, 20 nt, Artificial Sequence
  Synthetic oligonucleotide: Ptpn6-1022
guuaguuuuggagggaggga

SEQ ID NO: 25094 - RNA, 20 nt, Artificial Sequence
  Synthetic oligonucleotide: Ptpn6-1146
uccuguuaguuuuggaggga

SEQ ID NO: 25095 - RNA, 20 nt, Artificial Sequence
  Synthetic oligonucleotide: Ptpn6-1215
acagcaucucucuguaggga

SEQ ID NO: 25096 - RNA, 20 nt, Artificial Sequence
  Synthetic oligonucleotide: Ptpn6-958
gguccucacaccuugcggga

SEQ ID NO: 25097 - RNA, 20 nt, Artificial Sequence
  Synthetic oligonucleotide: Ptpn6-1538
ggaggagcuguucaggggga

SEQ ID NO: 25098 - RNA, 20 nt, Artificial Sequence
  Synthetic oligonucleotide: Ptpn6-1516
ucucaaccugccccggggga

SEQ ID NO: 25099 - RNA, 20 nt, Artificial Sequence
  Synthetic oligonucleotide: Ptpn6-1018
gcuccuccucucccggggga

SEQ ID NO: 25100 - RNA, 20 nt, Artificial Sequence
  Synthetic oligonucleotide: Ptpn6-1158
agucuccuguuaguuuugga

SEQ ID NO: 25101 - RNA, 20 nt, Artificial Sequence
  Synthetic oligonucleotide: Ptpn6-1511
ccacccacccagggcgcuga

SEQ ID NO: 25102 - RNA, 20 nt, Artificial Sequence
  Synthetic oligonucleotide: Ptpn6-1023
gcgggaaggggaaguucaua

SEQ ID NO: 25103 - RNA, 20 nt, Artificial Sequence
  Synthetic oligonucleotide: Ptpn6-1391
cccugaacagcuccucccua

SEQ ID NO: 25104 - RNA, 20 nt, Artificial Sequence
  Synthetic oligonucleotide: Ptpn6-959
ggcggaaaccaaagggccua

SEQ ID NO: 25105 - RNA, 20 nt, Artificial Sequence
  Synthetic oligonucleotide: Ptpn6-1522
aaggggaggagccucaggua

SEQ ID NO: 25106 - RNA, 20 nt, Artificial Sequence
  Synthetic oligonucleotide: Ptpn6-987
cgggacagcaucucucugua

SEQ ID NO: 25107 - RNA, 20 nt, Artificial Sequence
  Synthetic oligonucleotide: Ptpn6-1156
ucugaggaacugggcuguua

SEQ ID NO: 25108 - RNA, 20 nt, Artificial Sequence
  Synthetic oligonucleotide: Ptpn6-1168
uaccuccuucucugaggaac

SEQ ID NO: 25109 - RNA, 20 nt, Artificial Sequence
  Synthetic oligonucleotide: Ptpn6-1208
ucccucccuccaaaacuaac

SEQ ID NO: 25110 - RNA, 20 nt, Artificial Sequence
  Synthetic oligonucleotide: Ptpn6-5287
cugggugggugggccugcac

SEQ ID NO: 25111 - RNA, 20 nt, Artificial Sequence
  Synthetic oligonucleotide: Ptpn6-1225
cuccaaaacuaacaggagac

SEQ ID NO: 25112 - RNA, 20 nt, Artificial Sequence
  Synthetic oligonucleotide: Ptpn6-1223
auagucuccaggaaaaggac

SEQ ID NO: 25113 - RNA, 20 nt, Artificial Sequence
  Synthetic oligonucleotide: Ptpn6-1199
aaggggaaguucauagggac

SEQ ID NO: 25114 - RNA, 20 nt, Artificial Sequence
  Synthetic oligonucleotide: Ptpn6-1206
ugugagcuacccagggggac

SEQ ID NO: 25115 - RNA, 20 nt, Artificial Sequence
  Synthetic oligonucleotide: Ptpn6-1238
ccgggagaggaggagccacc

SEQ ID NO: 25116 - RNA, 20 nt, Artificial Sequence
  Synthetic oligonucleotide: Ptpn6-1055
gagccaccuggagcuccacc

SEQ ID NO: 25117 - RNA, 20 nt, Artificial Sequence
  Synthetic oligonucleotide: Ptpn6-976
cugagcgguucuuccucacc

SEQ ID NO: 25118 - RNA, 20 nt, Artificial Sequence
  Synthetic oligonucleotide: Ptpn6-1192
auuggguaggggaacagacc

SEQ ID NO: 25119 - RNA, 20 nt, Artificial Sequence
  Synthetic oligonucleotide: Ptpn6-1048
ggcacugcagggacaaaccc

SEQ ID NO: 25120 - RNA, 20 nt, Artificial Sequence
  Synthetic oligonucleotide: Ptpn6-1202
aacagaccaggaaguaaccc

SEQ ID NO: 25121 - RNA, 20 nt, Artificial Sequence
  Synthetic oligonucleotide: Ptpn6-5288
cugugcaggcccacccaccc

SEQ ID NO: 25122 - RNA, 20 nt, Artificial Sequence
  Synthetic oligonucleotide: Ptpn6-993
ugagguguugugagcuaccc

SEQ ID NO: 25123 - RNA, 20 nt, Artificial Sequence
  Synthetic oligonucleotide: Ptpn6-1147
cugcuuaggaccuguccccc

SEQ ID NO: 25124 - RNA, 20 nt, Artificial Sequence
  Synthetic oligonucleotide: Ptpn6-1399
gaggcuccuccccuuccccc

SEQ ID NO: 25125 - RNA, 20 nt, Artificial Sequence
  Synthetic oligonucleotide: Ptpn6-1051
guccagggccgccuuccccc

SEQ ID NO: 25126 - RNA, 20 nt, Artificial Sequence
  Synthetic oligonucleotide: Ptpn6-1513
ccagccucucaaccugcccc

SEQ ID NO: 25127 - RNA, 20 nt, Artificial Sequence
  Synthetic oligonucleotide: Ptpn6-1395
gcugggccuaacccugcccc

SEQ ID NO: 25128 - RNA, 20 nt, Artificial Sequence
  Synthetic oligonucleotide: Ptpn6-1398
ugaggcuccuccccuucccc

SEQ ID NO: 25129 - RNA, 20 nt, Artificial Sequence
  Synthetic oligonucleotide: Ptpn6-1052
gguccagggccgccuucccc

SEQ ID NO: 25130 - RNA, 20 nt, Artificial Sequence
  Synthetic oligonucleotide: Ptpn6-1167
cccucuuuaacauuuucccc

SEQ ID NO: 25131 - RNA, 20 nt, Artificial Sequence
  Synthetic oligonucleotide: Ptpn6-1406
gagugggucccucagcgccc

SEQ ID NO: 25132 - RNA, 20 nt, Artificial Sequence
  Synthetic oligonucleotide: Ptpn6-1524
ccucagguaggguuaggccc

SEQ ID NO: 25133 - RNA, 20 nt, Artificial Sequence
  Synthetic oligonucleotide: Ptpn6-1171
cucccgggggaaggcggccc

SEQ ID NO: 25134 - RNA, 20 nt, Artificial Sequence
  Synthetic oligonucleotide: Ptpn6-1512
uccagccucucaaccugccc

SEQ ID NO: 25135 - RNA, 20 nt, Artificial Sequence
  Synthetic oligonucleotide: Ptpn6-1181
cagguggcuccuccucuccc

SEQ ID NO: 25136 - RNA, 20 nt, Artificial Sequence
  Synthetic oligonucleotide: Ptpn6-1247
ugugcacaguggcccaagcc

SEQ ID NO: 25137 - RNA, 20 nt, Artificial Sequence
  Synthetic oligonucleotide: Ptpn6-1530
gggcaggguuaggcccagcc

SEQ ID NO: 25138 - RNA, 20 nt, Artificial Sequence
  Synthetic oligonucleotide: Ptpn6-1148
uugguugcucuuccucagcc

SEQ ID NO: 25139 - RNA, 20 nt, Artificial Sequence
  Synthetic oligonucleotide: Ptpn6-1237
cagaggagcaugagugagcc

SEQ ID NO: 25140 - RNA, 20 nt, Artificial Sequence
  Synthetic oligonucleotide: Ptpn6-1175
ucccugcagugccauuggcc

SEQ ID NO: 25141 - RNA, 20 nt, Artificial Sequence
  Synthetic oligonucleotide: Ptpn6-1205
ccuccucgauccugccugcc

SEQ ID NO: 25142 - RNA, 20 nt, Artificial Sequence
  Synthetic oligonucleotide: Ptpn6-1177
ugagcuccagguggagcucc

SEQ ID NO: 25143 - RNA, 20 nt, Artificial Sequence
  Synthetic oligonucleotide: Ptpn6-1009
gcucugucagcuugagcucc

SEQ ID NO: 25144 - RNA, 20 nt, Artificial Sequence
  Synthetic oligonucleotide: Ptpn6-1182
ccagguggcuccuccucucc

SEQ ID NO: 25145 - RNA, 20 nt, Artificial Sequence
  Synthetic oligonucleotide: Ptpn6-986
acccuggacuaauagucucc

SEQ ID NO: 25146 - RNA, 20 nt, Artificial Sequence
  Synthetic oligonucleotide: Ptpn6-1007
gcugucccguggguaagucc

SEQ ID NO: 25147 - RNA, 20 nt, Artificial Sequence
  Synthetic oligonucleotide: Ptpn6-1138
uuccuggagacuauuagucc

SEQ ID NO: 25148 - RNA, 20 nt, Artificial Sequence
  Synthetic oligonucleotide: Ptpn6-1392
acagcuccucccuauggucc

SEQ ID NO: 25149 - RNA, 20 nt, Artificial Sequence
  Synthetic oligonucleotide: Ptpn6-1050
gcaggcccgccugcuggucc

SEQ ID NO: 25150 - RNA, 20 nt, Artificial Sequence
  Synthetic oligonucleotide: Ptpn6-1154
ccucagccaggguuacuucc

SEQ ID NO: 25151 - RNA, 20 nt, Artificial Sequence
  Synthetic oligonucleotide: Ptpn6-1170
cgccccaccuguccuuuucc

SEQ ID NO: 25152 - RNA, 20 nt, Artificial Sequence
  Synthetic oligonucleotide: Ptpn6-1242
cuucccugcagccccaaagc

SEQ ID NO: 25153 - RNA, 20 nt, Artificial Sequence
  Synthetic oligonucleotide: Ptpn6-1256
ccuaagcaggaggcagaagc

SEQ ID NO: 25154 - RNA, 20 nt, Artificial Sequence
  Synthetic oligonucleotide: Ptpn6-1183
cuuuggggcugcagggaagc

SEQ ID NO: 25155 - RNA, 20 nt, Artificial Sequence
  Synthetic oligonucleotide: Ptpn6-1196
cagggggacagguccuaagc

SEQ ID NO: 25156 - RNA, 20 nt, Artificial Sequence
  Synthetic oligonucleotide: Ptpn6-1191
ccccaaagcgggaguacagc

SEQ ID NO: 25157 - RNA, 20 nt, Artificial Sequence
  Synthetic oligonucleotide: Ptpn6-1034
gcagaggagcaugagugagc

SEQ ID NO: 25158 - RNA, 20 nt, Artificial Sequence
  Synthetic oligonucleotide: Ptpn6-1014
gcggcccuggaccagcaggc

SEQ ID NO: 25159 - RNA, 20 nt, Artificial Sequence
  Synthetic oligonucleotide: Ptpn6-1012
gugccauuggccuggcaggc

SEQ ID NO: 25160 - RNA, 20 nt, Artificial Sequence
  Synthetic oligonucleotide: Ptpn6-1248
agaagcaggagcccagaggc

SEQ ID NO: 25161 - RNA, 20 nt, Artificial Sequence
  Synthetic oligonucleotide: Ptpn6-1403
cccggggcagguugagaggc

SEQ ID NO: 25162 - RNA, 20 nt, Artificial Sequence
  Synthetic oligonucleotide: Ptpn6-1401
uccuccccuucccccggggc

SEQ ID NO: 25163 - RNA, 20 nt, Artificial Sequence
  Synthetic oligonucleotide: Ptpn6-1246
aaggacagguggggcggggc

SEQ ID NO: 25164 - RNA, 20 nt, Artificial Sequence
  Synthetic oligonucleotide: Ptpn6-1060
ggcagagggccgcagggggc

SEQ ID NO: 25165 - RNA, 20 nt, Artificial Sequence
  Synthetic oligonucleotide: Ptpn6-1527
guaggguuaggcccuggggc

SEQ ID NO: 25166 - RNA, 20 nt, Artificial Sequence
  Synthetic oligonucleotide: Ptpn6-1251
aggaaaaggacagguggggc

SEQ ID NO: 25167 - RNA, 20 nt, Artificial Sequence
  Synthetic oligonucleotide: Ptpn6-1163
ugcagugccauuggccuggc

SEQ ID NO: 25168 - RNA, 20 nt, Artificial Sequence
  Synthetic oligonucleotide: Ptpn6-1393
cuccucccuaugguccuggc

SEQ ID NO: 25169 - RNA, 20 nt, Artificial Sequence
  Synthetic oligonucleotide: Ptpn6-1193
aguacagcaggcccgccugc

SEQ ID NO: 25170 - RNA, 20 nt, Artificial Sequence
  Synthetic oligonucleotide: Ptpn6-970
uacucccgcuuuggggcugc

SEQ ID NO: 25171 - RNA, 20 nt, Artificial Sequence
  Synthetic oligonucleotide: Ptpn6-5289
gaaggagguacccccugugc

SEQ ID NO: 25172 - RNA, 20 nt, Artificial Sequence
  Synthetic oligonucleotide: Ptpn6-1185
cggggguccucacaccuugc

SEQ ID NO: 25173 - RNA, 20 nt, Artificial Sequence
  Synthetic oligonucleotide: Ptpn6-955
gguaagucccgggcaccauc

SEQ ID NO: 25174 - RNA, 20 nt, Artificial Sequence
  Synthetic oligonucleotide: Ptpn6-1019
gcauuucuacuuccagccuc

SEQ ID NO: 25175 - RNA, 20 nt, Artificial Sequence
  Synthetic oligonucleotide: Ptpn6-1520
gggggaaggggaggagccuc

SEQ ID NO: 25176 - RNA, 20 nt, Artificial Sequence
  Synthetic oligonucleotide: Ptpn6-1149
uggccgcugugggcggucuc

SEQ ID NO: 25177 - RNA, 20 nt, Artificial Sequence
  Synthetic oligonucleotide: Ptpn6-1534
accauagggaggagcuguuc

SEQ ID NO: 25178 - RNA, 20 nt, Artificial Sequence
  Synthetic oligonucleotide: Ptpn6-1137
cgcugcccugcgccuguuuc

SEQ ID NO: 25179 - RNA, 20 nt, Artificial Sequence
  Synthetic oligonucleotide: Ptpn6-1049
gcuucccugcagccccaaag

SEQ ID NO: 25180 - RNA, 20 nt, Artificial Sequence
  Synthetic oligonucleotide: Ptpn6-1236
uccaggggaaaauguuaaag

SEQ ID NO: 25181 - RNA, 20 nt, Artificial Sequence
  Synthetic oligonucleotide: Ptpn6-1179
aggcaggaucgaggaggaag

SEQ ID NO: 25182 - RNA, 20 nt, Artificial Sequence
  Synthetic oligonucleotide: Ptpn6-1186
uccucacaccuugcgggaag

SEQ ID NO: 25183 - RNA, 20 nt, Artificial Sequence
  Synthetic oligonucleotide: Ptpn6-1518
ucaaccugccccgggggaag

SEQ ID NO: 25184 - RNA, 20 nt, Artificial Sequence
  Synthetic oligonucleotide: Ptpn6-5290
gggugggugggccugcacag

SEQ ID NO: 25185 - RNA, 20 nt, Artificial Sequence
  Synthetic oligonucleotide: Ptpn6-1240
agcggcacagcugugcacag

SEQ ID NO: 25186 - RNA, 20 nt, Artificial Sequence
  Synthetic oligonucleotide: Ptpn6-1194
agguguugugagcuacccag

SEQ ID NO: 25187 - RNA, 20 nt, Artificial Sequence
  Synthetic oligonucleotide: Ptpn6-1255
aggcagaagcaggagcccag

SEQ ID NO: 25188 - RNA, 20 nt, Artificial Sequence
  Synthetic oligonucleotide: Ptpn6-1253
agggggcggggcugagccag

SEQ ID NO: 25189 - RNA, 20 nt, Artificial Sequence
  Synthetic oligonucleotide: Ptpn6-1207
acagauacacacuuguccag

SEQ ID NO: 25190 - RNA, 20 nt, Artificial Sequence
  Synthetic oligonucleotide: Ptpn6-1035
gccacggcagagggccgcag

SEQ ID NO: 25191 - RNA, 20 nt, Artificial Sequence
  Synthetic oligonucleotide: Ptpn6-1057
ggagggggaagccacggcag

SEQ ID NO: 25192 - RNA, 20 nt, Artificial Sequence
  Synthetic oligonucleotide: Ptpn6-1219
cggaaacaggcgcagggcag

SEQ ID NO: 25193 - RNA, 20 nt, Artificial Sequence
  Synthetic oligonucleotide: Ptpn6-1224
aaauguuaaagagggggcag

SEQ ID NO: 25194 - RNA, 20 nt, Artificial Sequence
  Synthetic oligonucleotide: Ptpn6-1536
cauagggaggagcuguucag

SEQ ID NO: 25195 - RNA, 20 nt, Artificial Sequence
  Synthetic oligonucleotide: Ptpn6-1232
caggggaaaauguuaaagag

SEQ ID NO: 25196 - RNA, 20 nt, Artificial Sequence
  Synthetic oligonucleotide: Ptpn6-1220
uggagcucaagcugacagag

SEQ ID NO: 25197 - RNA, 20 nt, Artificial Sequence
  Synthetic oligonucleotide: Ptpn6-1228
cagcaucucucuguagggag

SEQ ID NO: 25198 - RNA, 20 nt, Artificial Sequence
  Synthetic oligonucleotide: Ptpn6-1026
gggccgccuucccccgggag

SEQ ID NO: 25199 - RNA, 20 nt, Artificial Sequence
  Synthetic oligonucleotide: Ptpn6-1404
ggcagguugagaggcuggag

SEQ ID NO: 25200 - RNA, 20 nt, Artificial Sequence
  Synthetic oligonucleotide: Ptpn6-1016
ggaaguggcugauuacugag

SEQ ID NO: 25201 - RNA, 20 nt, Artificial Sequence
  Synthetic oligonucleotide: Ptpn6-1402
uucccccggggcagguugag

SEQ ID NO: 25202 - RNA, 20 nt, Artificial Sequence
  Synthetic oligonucleotide: Ptpn6-1400
aggcuccuccccuucccccg

SEQ ID NO: 25203 - RNA, 20 nt, Artificial Sequence
  Synthetic oligonucleotide: Ptpn6-1514
cagccucucaaccugccccg

SEQ ID NO: 25204 - RNA, 20 nt, Artificial Sequence
  Synthetic oligonucleotide: Ptpn6-1169
agguggcuccuccucucccg

SEQ ID NO: 25205 - RNA, 20 nt, Artificial Sequence
  Synthetic oligonucleotide: Ptpn6-1160
cccccugcggcccucugccg

SEQ ID NO: 25206 - RNA, 20 nt, Artificial Sequence
  Synthetic oligonucleotide: Ptpn6-1056
gcagagggccgcagggggcg

SEQ ID NO: 25207 - RNA, 20 nt, Artificial Sequence
  Synthetic oligonucleotide: Ptpn6-1059
ggaaaaggacagguggggcg

SEQ ID NO: 25208 - RNA, 20 nt, Artificial Sequence
  Synthetic oligonucleotide: Ptpn6-1005
guaagucccgggcaccaucg

SEQ ID NO: 25209 - RNA, 20 nt, Artificial Sequence
  Synthetic oligonucleotide: Ptpn6-1045
gcccaguuccucagagaagg

SEQ ID NO: 25210 - RNA, 20 nt, Artificial Sequence
  Synthetic oligonucleotide: Ptpn6-1164
ccuccucucccgggggaagg

SEQ ID NO: 25211 - RNA, 20 nt, Artificial Sequence
  Synthetic oligonucleotide: Ptpn6-5291
ggugggugggccugcacagg

SEQ ID NO: 25212 - RNA, 20 nt, Artificial Sequence
  Synthetic oligonucleotide: Ptpn6-1047
gucuccaggaaaaggacagg

SEQ ID NO: 25213 - RNA, 20 nt, Artificial Sequence
  Synthetic oligonucleotide: Ptpn6-1042
gguguugugagcuacccagg

SEQ ID NO: 25214 - RNA, 20 nt, Artificial Sequence
  Synthetic oligonucleotide: Ptpn6-1021
gcuccagguggagcuccagg

SEQ ID NO: 25215 - RNA, 20 nt, Artificial Sequence
  Synthetic oligonucleotide: Ptpn6-1173
cugucagcuugagcuccagg

SEQ ID NO: 25216 - RNA, 20 nt, Artificial Sequence
  Synthetic oligonucleotide: Ptpn6-1027
ggggacagguccuaagcagg

SEQ ID NO: 25217 - RNA, 20 nt, Artificial Sequence
  Synthetic oligonucleotide: Ptpn6-1020
ggcggcccuggaccagcagg

SEQ ID NO: 25218 - RNA, 20 nt, Artificial Sequence
  Synthetic oligonucleotide: Ptpn6-1198
ccacggcagagggccgcagg

SEQ ID NO: 25219 - RNA, 20 nt, Artificial Sequence
  Synthetic oligonucleotide: Ptpn6-1537
auagggaggagcuguucagg

SEQ ID NO: 25220 - RNA, 20 nt, Artificial Sequence
  Synthetic oligonucleotide: Ptpn6-1233
aggggaaaauguuaaagagg

SEQ ID NO: 25221 - RNA, 20 nt, Artificial Sequence
  Synthetic oligonucleotide: Ptpn6-1201
ccgccuucccccgggagagg

SEQ ID NO: 25222 - RNA, 20 nt, Artificial Sequence
  Synthetic oligonucleotide: Ptpn6-1152
ccuggcaggcaggaucgagg

SEQ ID NO: 25223 - RNA, 20 nt, Artificial Sequence
  Synthetic oligonucleotide: Ptpn6-1222
agcaucucucuguagggagg

SEQ ID NO: 25224 - RNA, 20 nt, Artificial Sequence
  Synthetic oligonucleotide: Ptpn6-1515
agccucucaaccugccccgg

SEQ ID NO: 25225 - RNA, 20 nt, Artificial Sequence
  Synthetic oligonucleotide: Ptpn6-1017
gguggcuccuccucucccgg

SEQ ID NO: 25226 - RNA, 20 nt, Artificial Sequence
  Synthetic oligonucleotide: Ptpn6-1036
gaggagcaugagugagccgg

SEQ ID NO: 25227 - RNA, 20 nt, Artificial Sequence
  Synthetic oligonucleotide: Ptpn6-1188
agcucaagcugacagagcgg

SEQ ID NO: 25228 - RNA, 20 nt, Artificial Sequence
  Synthetic oligonucleotide: Ptpn6-1178
uguuaguuuuggagggaggg

SEQ ID NO: 25229 - RNA, 20 nt, Artificial Sequence
  Synthetic oligonucleotide: Ptpn6-1161
cuccuguuaguuuuggaggg

SEQ ID NO: 25230 - RNA, 20 nt, Artificial Sequence
  Synthetic oligonucleotide: Ptpn6-1533
gcccagccaggaccauaggg

SEQ ID NO: 25231 - RNA, 20 nt, Artificial Sequence
  Synthetic oligonucleotide: Ptpn6-1043
gacagcaucucucuguaggg

SEQ ID NO: 25232 - RNA, 20 nt, Artificial Sequence
  Synthetic oligonucleotide: Ptpn6-1519
accugccccgggggaagggg

SEQ ID NO: 25233 - RNA, 20 nt, Artificial Sequence
  Synthetic oligonucleotide: Ptpn6-1234
cggcagagggccgcaggggg

SEQ ID NO: 25234 - RNA, 20 nt, Artificial Sequence
  Synthetic oligonucleotide: Ptpn6-1252
caggaaaaggacaggugggg

SEQ ID NO: 25235 - RNA, 20 nt, Artificial Sequence
  Synthetic oligonucleotide: Ptpn6-1408
gggucccucagcgcccuggg

SEQ ID NO: 25236 - RNA, 20 nt, Artificial Sequence
  Synthetic oligonucleotide: Ptpn6-1410
cccucagcgcccuggguggg

SEQ ID NO: 25237 - RNA, 20 nt, Artificial Sequence
  Synthetic oligonucleotide: Ptpn6-1015
gggaagcuggccgcuguggg

SEQ ID NO: 25238 - RNA, 20 nt, Artificial Sequence
  Synthetic oligonucleotide: Ptpn6-1221
ugaggaagagcaaccaaugg

SEQ ID NO: 25239 - RNA, 20 nt, Artificial Sequence
  Synthetic oligonucleotide: Ptpn6-1145
cagucuccuguuaguuuugg

SEQ ID NO: 25240 - RNA, 20 nt, Artificial Sequence
  Synthetic oligonucleotide: Ptpn6-1239
cugaggaagagcaaccaaug

SEQ ID NO: 25241 - RNA, 20 nt, Artificial Sequence
  Synthetic oligonucleotide: Ptpn6-1397
ccagggccuaacccuaccug

SEQ ID NO: 25242 - RNA, 20 nt, Artificial Sequence
  Synthetic oligonucleotide: Ptpn6-1176
uggcucagccccgcccccug

SEQ ID NO: 25243 - RNA, 20 nt, Artificial Sequence
  Synthetic oligonucleotide: Ptpn6-1166
ugcagggaagcuggccgcug

SEQ ID NO: 25244 - RNA, 20 nt, Artificial Sequence
  Synthetic oligonucleotide: Ptpn6-1510
cccacccacccagggcgcug

SEQ ID NO: 25245 - RNA, 20 nt, Artificial Sequence
  Synthetic oligonucleotide: Ptpn6-1231
ccaggaaguaacccuggcug

SEQ ID NO: 25246 - RNA, 20 nt, Artificial Sequence
  Synthetic oligonucleotide: Ptpn6-1655
aggggguaccuccuucucug

SEQ ID NO: 25247 - RNA, 20 nt, Artificial Sequence
  Synthetic oligonucleotide: Ptpn6-1243
cuccaggaaaaggacaggug

SEQ ID NO: 25248 - RNA, 20 nt, Artificial Sequence
  Synthetic oligonucleotide: Ptpn6-1235
acaguggcccaagccaggug

SEQ ID NO: 25249 - RNA, 20 nt, Artificial Sequence
  Synthetic oligonucleotide: Ptpn6-1142
uccccuucccgcaaggugug

SEQ ID NO: 25250 - RNA, 20 nt, Artificial Sequence
  Synthetic oligonucleotide: Ptpn6-1155
ccugcuguacucccgcuuug

SEQ ID NO: 25251 - RNA, 20 nt, Artificial Sequence
  Synthetic oligonucleotide: Ptpn6-1029
gcugaggaagagcaaccaau

SEQ ID NO: 25252 - RNA, 20 nt, Artificial Sequence
  Synthetic oligonucleotide: Ptpn6-954
ggguaagucccgggcaccau

SEQ ID NO: 25253 - RNA, 20 nt, Artificial Sequence
  Synthetic oligonucleotide: Ptpn6-1531
uuaggcccagccaggaccau

SEQ ID NO: 25254 - RNA, 20 nt, Artificial Sequence
  Synthetic oligonucleotide: Ptpn6-1136
uacggagagguuucccccau

SEQ ID NO: 25255 - RNA, 20 nt, Artificial Sequence
  Synthetic oligonucleotide: Ptpn6-1006
guuugucccugcagugccau

SEQ ID NO: 25256 - RNA, 20 nt, Artificial Sequence
  Synthetic oligonucleotide: Ptpn6-1211
ugcgggaaggggaaguucau

SEQ ID NO: 25257 - RNA, 20 nt, Artificial Sequence
  Synthetic oligonucleotide: Ptpn6-1195
cugacagagcggcgggguau

SEQ ID NO: 25258 - RNA, 20 nt, Artificial Sequence
  Synthetic oligonucleotide: Ptpn6-1172
accuccuucucugaggaacu

SEQ ID NO: 25259 - RNA, 20 nt, Artificial Sequence
  Synthetic oligonucleotide: Ptpn6-1200
uccaaaacuaacaggagacu

SEQ ID NO: 25260 - RNA, 20 nt, Artificial Sequence
  Synthetic oligonucleotide: Ptpn6-975
ugcuuaggaccugucccccu

SEQ ID NO: 25261 - RNA, 20 nt, Artificial Sequence
  Synthetic oligonucleotide: Ptpn6-1407
agugggucccucagcgcccu

SEQ ID NO: 25262 - RNA, 20 nt, Artificial Sequence
  Synthetic oligonucleotide: Ptpn6-1157
cgguucuuccucaccuggcu

SEQ ID NO: 25263 - RNA, 20 nt, Artificial Sequence
  Synthetic oligonucleotide: Ptpn6-1394
uccucccuaugguccuggcu

SEQ ID NO: 25264 - RNA, 20 nt, Artificial Sequence
  Synthetic oligonucleotide: Ptpn6-1174
cauuucuacuuccagccucu

SEQ ID NO: 25265 - RNA, 20 nt, Artificial Sequence
  Synthetic oligonucleotide: Ptpn6-974
cuggccgcugugggcggucu

SEQ ID NO: 25266 - RNA, 20 nt, Artificial Sequence
  Synthetic oligonucleotide: Ptpn6-1405
gcagguugagaggcuggagu

SEQ ID NO: 25267 - RNA, 20 nt, Artificial Sequence
  Synthetic oligonucleotide: Ptpn6-971
acagagagaugcugucccgu

SEQ ID NO: 25268 - RNA, 20 nt, Artificial Sequence
  Synthetic oligonucleotide: Ptpn6-1212
ucuccaggaaaaggacaggu

SEQ ID NO: 25269 - RNA, 20 nt, Artificial Sequence
  Synthetic oligonucleotide: Ptpn6-1521
gaaggggaggagccucaggu

SEQ ID NO: 25270 - RNA, 20 nt, Artificial Sequence
  Synthetic oligonucleotide: Ptpn6-1411
ccucagcgcccugggugggu

SEQ ID NO: 25271 - RNA, 20 nt, Artificial Sequence
  Synthetic oligonucleotide: Ptpn6-1008
gcagggaagcuggccgcugu

SEQ ID NO: 25272 - RNA, 20 nt, Artificial Sequence
  Synthetic oligonucleotide: Ptpn6-1004
gggauuuuccuuaggcccuu

SEQ ID NO: 25273 - RNA, 20 nt, Artificial Sequence
  Synthetic oligonucleotide: Ptpn6-1011
ggccugcuguacucccgcuu

SEQ ID NO: 25274 - RNA, 20 nt, Artificial Sequence
  Synthetic oligonucleotide: Ptpn6-1013
gguucuuccucaccuggcuu

SEQ ID NO: 25275 - RNA, 20 nt, Artificial Sequence
  Synthetic oligonucleotide: Ptpn6-1184
ccugcuucugccuccugcuu

SEQ ID NO: 25276 - RNA, 20 nt, Artificial Sequence
  Synthetic oligonucleotide: Ptpn6-1529
uuaggcccuggggcaggguu

SEQ ID NO: 25277 - RNA, 20 nt, Artificial Sequence
  Synthetic oligonucleotide: Ptpn6-1523
gaggagccucagguaggguu

SEQ ID NO: 25278 - RNA, 20 nt, Artificial Sequence
  Synthetic oligonucleotide: Ptpn6-1165
cucugaggaacugggcuguu

SEQ ID NO: 25279 - RNA, 20 nt, Artificial Sequence
  Synthetic oligonucleotide: Ptpn6-956
gccugcuguacucccgcuuu

SEQ ID NO: 25280 - RNA, 20 nt, Artificial Sequence
  Synthetic oligonucleotide: Ptpn6-1143
ucccagucuccuguuaguuu

SEQ ID NO: 25281 - RNA, 17 nt, Artificial Sequence
  Synthetic oligonucleotide: Ptpn6-1123
gaaugaugcaggggaaa

SEQ ID NO: 25282 - RNA, 17 nt, Artificial Sequence
  Synthetic oligonucleotide: Ptpn6-1362
ugaaugaugcaggggaa

SEQ ID NO: 25283 - RNA, 17 nt, Artificial Sequence
  Synthetic oligonucleotide: Ptpn6-1135
ggggaaagggaagugaa

SEQ ID NO: 25284 - RNA, 17 nt, Artificial Sequence
  Synthetic oligonucleotide: Ptpn6-1473
agugaacaagacagaca

SEQ ID NO: 25285 - RNA, 17 nt, Artificial Sequence
  Synthetic oligonucleotide: Ptpn6-1637
uauuuuuuguagagaca

SEQ ID NO: 25286 - RNA, 17 nt, Artificial Sequence
  Synthetic oligonucleotide: Ptpn6-1624
gcaagagacugacacca

SEQ ID NO: 25287 - RNA, 17 nt, Artificial Sequence
  Synthetic oligonucleotide: Ptpn6-1647
accacuacacccggcca

SEQ ID NO: 25288 - RNA, 17 nt, Artificial Sequence
  Synthetic oligonucleotide: Ptpn6-1125
guugaaugaaugaugca

SEQ ID NO: 25289 - RNA, 17 nt, Artificial Sequence
  Synthetic oligonucleotide: Ptpn6-1617
aaaggcagagggaauca

SEQ ID NO: 25290 - RNA, 17 nt, Artificial Sequence
  Synthetic oligonucleotide: Ptpn6-1474
cauggucucugcucuca

SEQ ID NO: 25291 - RNA, 17 nt, Artificial Sequence
  Synthetic oligonucleotide: Ptpn6-1389
aaaggaaacaaagaaga

SEQ ID NO: 25292 - RNA, 17 nt, Artificial Sequence
  Synthetic oligonucleotide: Ptpn6-1619
aaucagggaaggagaga

SEQ ID NO: 25293 - RNA, 17 nt, Artificial Sequence
  Synthetic oligonucleotide: Ptpn6-1618
gcagagggaaucaggga

SEQ ID NO: 25294 - RNA, 17 nt, Artificial Sequence
  Synthetic oligonucleotide: Ptpn6-1109
guuggcuggacguggga

SEQ ID NO: 25295 - RNA, 17 nt, Artificial Sequence
  Synthetic oligonucleotide: Ptpn6-1495
uccugugguuccagcua

SEQ ID NO: 25296 - RNA, 17 nt, Artificial Sequence
  Synthetic oligonucleotide: Ptpn6-1497
cagcuauggagaggcua

SEQ ID NO: 25297 - RNA, 17 nt, Artificial Sequence
  Synthetic oligonucleotide: Ptpn6-1286
ugcaucauucauucaac

SEQ ID NO: 25298 - RNA, 17 nt, Artificial Sequence
  Synthetic oligonucleotide: Ptpn6-1635
uccauagcuggaaccac

SEQ ID NO: 25299 - RNA, 17 nt, Artificial Sequence
  Synthetic oligonucleotide: Ptpn6-1651
ggucuguaaccucccac

SEQ ID NO: 25300 - RNA, 17 nt, Artificial Sequence
  Synthetic oligonucleotide: Ptpn6-1645
cacagugcugggaucac

SEQ ID NO: 25301 - RNA, 17 nt, Artificial Sequence
  Synthetic oligonucleotide: Ptpn6-1636
uuauuuuuuguagagac

SEQ ID NO: 25302 - RNA, 17 nt, Artificial Sequence
  Synthetic oligonucleotide: Ptpn6-1472
uaagaugcugguaauac

SEQ ID NO: 25303 - RNA, 17 nt, Artificial Sequence
  Synthetic oligonucleotide: Ptpn6-1646
gugugaaccacuacacc

SEQ ID NO: 25304 - RNA, 17 nt, Artificial Sequence
  Synthetic oligonucleotide: Ptpn6-5292
gcaucuuaaacagcacc

SEQ ID NO: 25305 - RNA, 17 nt, Artificial Sequence
  Synthetic oligonucleotide: Ptpn6-5293
agcaucuauuaugcacc

SEQ ID NO: 25306 - RNA, 17 nt, Artificial Sequence
  Synthetic oligonucleotide: Ptpn6-1488
gaggauugcuugagccc

SEQ ID NO: 25307 - RNA, 17 nt, Artificial Sequence
  Synthetic oligonucleotide: Ptpn6-1489
ggaguuugagaccagcc

SEQ ID NO: 25308 - RNA, 17 nt, Artificial Sequence
  Synthetic oligonucleotide: Ptpn6-1639
gucucacuauauuggcc

SEQ ID NO: 25309 - RNA, 17 nt, Artificial Sequence
  Synthetic oligonucleotide: Ptpn6-1481
aauagacagccuuggcc

SEQ ID NO: 25310 - RNA, 17 nt, Artificial Sequence
  Synthetic oligonucleotide: Ptpn6-1641
ggcuggucucaaacucc

SEQ ID NO: 25311 - RNA, 17 nt, Artificial Sequence
  Synthetic oligonucleotide: Ptpn6-1450
auucccucugccuuucc

SEQ ID NO: 25312 - RNA, 17 nt, Artificial Sequence
  Synthetic oligonucleotide: Ptpn6-1634
cuuagccucuccauagc

SEQ ID NO: 25313 - RNA, 17 nt, Artificial Sequence
  Synthetic oligonucleotide: Ptpn6-1490
aaaaauaagaaauuagc

SEQ ID NO: 25314 - RNA, 17 nt, Artificial Sequence
  Synthetic oligonucleotide: Ptpn6-1323
cgugggagggccuucgc

SEQ ID NO: 25315 - RNA, 17 nt, Artificial Sequence
  Synthetic oligonucleotide: Ptpn6-1640
cacuauauuggccaggc

SEQ ID NO: 25316 - RNA, 17 nt, Artificial Sequence
  Synthetic oligonucleotide: Ptpn6-1480
aaauagacagccuuggc

SEQ ID NO: 25317 - RNA, 17 nt, Artificial Sequence
  Synthetic oligonucleotide: Ptpn6-1329
agugcggagaaguuggc

SEQ ID NO: 25318 - RNA, 17 nt, Artificial Sequence
  Synthetic oligonucleotide: Ptpn6-5294
ggugcuguuuaagaugc

SEQ ID NO: 25319 - RNA, 17 nt, Artificial Sequence
  Synthetic oligonucleotide: Ptpn6-1384
uguugaaugaaugaugc

SEQ ID NO: 25320 - RNA, 17 nt, Artificial Sequence
  Synthetic oligonucleotide: Ptpn6-1643
ucagccucccacagugc

SEQ ID NO: 25321 - RNA, 17 nt, Artificial Sequence
  Synthetic oligonucleotide: Ptpn6-1616
gaaaggcagagggaauc

SEQ ID NO: 25322 - RNA, 17 nt, Artificial Sequence
  Synthetic oligonucleotide: Ptpn6-1623
gagagauggggguuguc

SEQ ID NO: 25323 - RNA, 17 nt, Artificial Sequence
  Synthetic oligonucleotide: Ptpn6-1475
cggagcuuacauuccag

SEQ ID NO: 25324 - RNA, 17 nt, Artificial Sequence
  Synthetic oligonucleotide: Ptpn6-1370
uugaaugaaugaugcag

SEQ ID NO: 25325 - RNA, 17 nt, Artificial Sequence
  Synthetic oligonucleotide: Ptpn6-1487
ugggaggcugaggcgag

SEQ ID NO: 25326 - RNA, 17 nt, Artificial Sequence
  Synthetic oligonucleotide: Ptpn6-1496
ugguuccagcuauggag

SEQ ID NO: 25327 - RNA, 17 nt, Artificial Sequence
  Synthetic oligonucleotide: Ptpn6-1482
gccuuggccggguguag

SEQ ID NO: 25328 - RNA, 17 nt, Artificial Sequence
  Synthetic oligonucleotide: Ptpn6-1124
gagaaguuggcuggacg

SEQ ID NO: 25329 - RNA, 17 nt, Artificial Sequence
  Synthetic oligonucleotide: Ptpn6-1326
acgugggagggccuucg

SEQ ID NO: 25330 - RNA, 17 nt, Artificial Sequence
  Synthetic oligonucleotide: Ptpn6-1090
gggagggccuucgcggg

SEQ ID NO: 25331 - RNA, 17 nt, Artificial Sequence
  Synthetic oligonucleotide: Ptpn6-1477
gcuuacauuccaguggg

SEQ ID NO: 25332 - RNA, 17 nt, Artificial Sequence
  Synthetic oligonucleotide: Ptpn6-1340
aguuggcuggacguggg

SEQ ID NO: 25333 - RNA, 17 nt, Artificial Sequence
  Synthetic oligonucleotide: Ptpn6-1485
gaucccagcacuguggg

SEQ ID NO: 25334 - RNA, 17 nt, Artificial Sequence
  Synthetic oligonucleotide: Ptpn6-1622
cagggaaggagagaugg

SEQ ID NO: 25335 - RNA, 17 nt, Artificial Sequence
  Synthetic oligonucleotide: Ptpn6-1493
aaauuagcugggugugg

SEQ ID NO: 25336 - RNA, 17 nt, Artificial Sequence
  Synthetic oligonucleotide: Ptpn6-1621
ucagggaaggagagaug

SEQ ID NO: 25337 - RNA, 17 nt, Artificial Sequence
  Synthetic oligonucleotide: Ptpn6-1483
cugugaucccagcacug

SEQ ID NO: 25338 - RNA, 17 nt, Artificial Sequence
  Synthetic oligonucleotide: Ptpn6-1494
ugguggcacacguccug

SEQ ID NO: 25339 - RNA, 17 nt, Artificial Sequence
  Synthetic oligonucleotide: Ptpn6-1486
agcacugugggaggcug

SEQ ID NO: 25340 - RNA, 17 nt, Artificial Sequence
  Synthetic oligonucleotide: Ptpn6-1366
ucugauguugggaagug

SEQ ID NO: 25341 - RNA, 17 nt, Artificial Sequence
  Synthetic oligonucleotide: Ptpn6-1492
aagaaauuagcugggug

SEQ ID NO: 25342 - RNA, 17 nt, Artificial Sequence
  Synthetic oligonucleotide: Ptpn6-5295
uuggugucagucucuug

SEQ ID NO: 25343 - RNA, 17 nt, Artificial Sequence
  Synthetic oligonucleotide: Ptpn6-1478
caaauaacccaauaaau

SEQ ID NO: 25344 - RNA, 17 nt, Artificial Sequence
  Synthetic oligonucleotide: Ptpn6-1387
aaggaaacaaagaagau

SEQ ID NO: 25345 - RNA, 17 nt, Artificial Sequence
  Synthetic oligonucleotide: Ptpn6-1620
aucagggaaggagagau

SEQ ID NO: 25346 - RNA, 17 nt, Artificial Sequence
  Synthetic oligonucleotide: Ptpn6-1638
acagggucucacuauau

SEQ ID NO: 25347 - RNA, 17 nt, Artificial Sequence
  Synthetic oligonucleotide: Ptpn6-1648
gcaaugauccaauuuau

SEQ ID NO: 25348 - RNA, 17 nt, Artificial Sequence
  Synthetic oligonucleotide: Ptpn6-1479
cagaaaauagacagccu

SEQ ID NO: 25349 - RNA, 17 nt, Artificial Sequence
  Synthetic oligonucleotide: Ptpn6-1642
gcuggucucaaacuccu

SEQ ID NO: 25350 - RNA, 17 nt, Artificial Sequence
  Synthetic oligonucleotide: Ptpn6-1491
aaaauaagaaauuagcu

SEQ ID NO: 25351 - RNA, 17 nt, Artificial Sequence
  Synthetic oligonucleotide: Ptpn6-1644
cagccucccacagugcu

SEQ ID NO: 25352 - RNA, 17 nt, Artificial Sequence
  Synthetic oligonucleotide: Ptpn6-1117
gggaagugcggagaagu

SEQ ID NO: 25353 - RNA, 17 nt, Artificial Sequence
  Synthetic oligonucleotide: Ptpn6-1476
ggagcuuacauuccagu

SEQ ID NO: 25354 - RNA, 17 nt, Artificial Sequence
  Synthetic oligonucleotide: Ptpn6-1328
agaaguuggcuggacgu

SEQ ID NO: 25355 - RNA, 17 nt, Artificial Sequence
  Synthetic oligonucleotide: Ptpn6-1094
ggaccaaagucugaugu

SEQ ID NO: 25356 - RNA, 17 nt, Artificial Sequence
  Synthetic oligonucleotide: Ptpn6-1484
ugugaucccagcacugu

SEQ ID NO: 25357 - RNA, 17 nt, Artificial Sequence
  Synthetic oligonucleotide: Ptpn6-1649
caaugauccaauuuauu

SEQ ID NO: 25358 - RNA, 17 nt, Artificial Sequence
  Synthetic oligonucleotide: Ptpn6-1273
uucccaacaucagacuu

SEQ ID NO: 25359 - RNA, 17 nt, Artificial Sequence
  Synthetic oligonucleotide: Ptpn6-1095
gaccaaagucugauguu

SEQ ID NO: 25360 - RNA, 17 nt, Artificial Sequence
  Synthetic oligonucleotide: Ptpn6-1650
uuauuggguuauuuguu

SEQ ID NO: 25361 - RNA, 20 nt, Artificial Sequence
  Synthetic oligonucleotide: Ptpn6-1244
aaugaaugaugcaggggaaa

SEQ ID NO: 25362 - RNA, 20 nt, Artificial Sequence
  Synthetic oligonucleotide: Ptpn6-1058
gaaugaaugaugcaggggaa

SEQ ID NO: 25363 - RNA, 20 nt, Artificial Sequence
  Synthetic oligonucleotide: Ptpn6-1062
gcaggggaaagggaagugaa

SEQ ID NO: 25364 - RNA, 20 nt, Artificial Sequence
  Synthetic oligonucleotide: Ptpn6-1413
uggagugaacaagacagaca

SEQ ID NO: 25365 - RNA, 20 nt, Artificial Sequence
  Synthetic oligonucleotide: Ptpn6-1566
ucuuauuuuuuguagagaca

SEQ ID NO: 25366 - RNA, 20 nt, Artificial Sequence
  Synthetic oligonucleotide: Ptpn6-1553
uccgcaagagacugacacca

SEQ ID NO: 25367 - RNA, 20 nt, Artificial Sequence
  Synthetic oligonucleotide: Ptpn6-1576
ugaaccacuacacccggcca

SEQ ID NO: 25368 - RNA, 20 nt, Artificial Sequence
  Synthetic oligonucleotide: Ptpn6-1250
ccuguugaaugaaugaugca

SEQ ID NO: 25369 - RNA, 20 nt, Artificial Sequence
  Synthetic oligonucleotide: Ptpn6-1546
uggaaaggcagagggaauca

SEQ ID NO: 25370 - RNA, 20 nt, Artificial Sequence
  Synthetic oligonucleotide: Ptpn6-1414
agacauggucucugcucuca

SEQ ID NO: 25371 - RNA, 20 nt, Artificial Sequence
  Synthetic oligonucleotide: Ptpn6-1061
gugaaaggaaacaaagaaga

SEQ ID NO: 25372 - RNA, 20 nt, Artificial Sequence
  Synthetic oligonucleotide: Ptpn6-1548
gggaaucagggaaggagaga

SEQ ID NO: 25373 - RNA, 20 nt, Artificial Sequence
  Synthetic oligonucleotide: Ptpn6-1547
aaggcagagggaaucaggga

SEQ ID NO: 25374 - RNA, 20 nt, Artificial Sequence
  Synthetic oligonucleotide: Ptpn6-1044
gaaguuggcuggacguggga

SEQ ID NO: 25375 - RNA, 20 nt, Artificial Sequence
  Synthetic oligonucleotide: Ptpn6-1435
acguccugugguuccagcua

SEQ ID NO: 25376 - RNA, 20 nt, Artificial Sequence
  Synthetic oligonucleotide: Ptpn6-1437
uuccagcuauggagaggcua

SEQ ID NO: 25377 - RNA, 20 nt, Artificial Sequence
  Synthetic oligonucleotide: Ptpn6-1180
cccugcaucauucauucaac

SEQ ID NO: 25378 - RNA, 20 nt, Artificial Sequence
  Synthetic oligonucleotide: Ptpn6-1564
cucuccauagcuggaaccac

SEQ ID NO: 25379 - RNA, 20 nt, Artificial Sequence
  Synthetic oligonucleotide: Ptpn6-1580
uucggucuguaaccucccac

SEQ ID NO: 25380 - RNA, 20 nt, Artificial Sequence
  Synthetic oligonucleotide: Ptpn6-1574
ucccacagugcugggaucac

SEQ ID NO: 25381 - RNA, 20 nt, Artificial Sequence
  Synthetic oligonucleotide: Ptpn6-1565
uucuuauuuuuuguagagac

SEQ ID NO: 25382 - RNA, 20 nt, Artificial Sequence
  Synthetic oligonucleotide: Ptpn6-1412
guuuaagaugcugguaauac

SEQ ID NO: 25383 - RNA, 20 nt, Artificial Sequence
  Synthetic oligonucleotide: Ptpn6-1575
caggugugaaccacuacacc

SEQ ID NO: 25384 - RNA, 20 nt, Artificial Sequence
  Synthetic oligonucleotide: Ptpn6-5296
ccagcaucuuaaacagcacc

SEQ ID NO: 25385 - RNA, 20 nt, Artificial Sequence
  Synthetic oligonucleotide: Ptpn6-5297
uugagcaucuauuaugcacc

SEQ ID NO: 25386 - RNA, 20 nt, Artificial Sequence
  Synthetic oligonucleotide: Ptpn6-1428
cgagaggauugcuugagccc

SEQ ID NO: 25387 - RNA, 20 nt, Artificial Sequence
  Synthetic oligonucleotide: Ptpn6-1429
ccaggaguuugagaccagcc

SEQ ID NO: 25388 - RNA, 20 nt, Artificial Sequence
  Synthetic oligonucleotide: Ptpn6-1568
agggucucacuauauuggcc

SEQ ID NO: 25389 - RNA, 20 nt, Artificial Sequence
  Synthetic oligonucleotide: Ptpn6-1421
gaaaauagacagccuuggcc

SEQ ID NO: 25390 - RNA, 20 nt, Artificial Sequence
  Synthetic oligonucleotide: Ptpn6-1570
ccaggcuggucucaaacucc

SEQ ID NO: 25391 - RNA, 20 nt, Artificial Sequence
  Synthetic oligonucleotide: Ptpn6-1390
cugauucccucugccuuucc

SEQ ID NO: 25392 - RNA, 20 nt, Artificial Sequence
  Synthetic oligonucleotide: Ptpn6-1563
caccuuagccucuccauagc

SEQ ID NO: 25393 - RNA, 20 nt, Artificial Sequence
  Synthetic oligonucleotide: Ptpn6-1430
acaaaaaauaagaaauuagc

SEQ ID NO: 25394 - RNA, 20 nt, Artificial Sequence
  Synthetic oligonucleotide: Ptpn6-960
ggacgugggagggccuucgc

SEQ ID NO: 25395 - RNA, 20 nt, Artificial Sequence
  Synthetic oligonucleotide: Ptpn6-1569
ucucacuauauuggccaggc

SEQ ID NO: 25396 - RNA, 20 nt, Artificial Sequence
  Synthetic oligonucleotide: Ptpn6-1420
agaaaauagacagccuuggc

SEQ ID NO: 25397 - RNA, 20 nt, Artificial Sequence
  Synthetic oligonucleotide: Ptpn6-1032
ggaagugcggagaaguuggc

SEQ ID NO: 25398 - RNA, 20 nt, Artificial Sequence
  Synthetic oligonucleotide: Ptpn6-5298
ccaggugcuguuuaagaugc

SEQ ID NO: 25399 - RNA, 20 nt, Artificial Sequence
  Synthetic oligonucleotide: Ptpn6-1249
accuguugaaugaaugaugc

SEQ ID NO: 25400 - RNA, 20 nt, Artificial Sequence
  Synthetic oligonucleotide: Ptpn6-1572
gccucagccucccacagugc

SEQ ID NO: 25401 - RNA, 20 nt, Artificial Sequence
  Synthetic oligonucleotide: Ptpn6-1545
cuggaaaggcagagggaauc

SEQ ID NO: 25402 - RNA, 20 nt, Artificial Sequence
  Synthetic oligonucleotide: Ptpn6-1552
aaggagagauggggguuguc

SEQ ID NO: 25403 - RNA, 20 nt, Artificial Sequence
  Synthetic oligonucleotide: Ptpn6-1415
ucacggagcuuacauuccag

SEQ ID NO: 25404 - RNA, 20 nt, Artificial Sequence
  Synthetic oligonucleotide: Ptpn6-1241
cuguugaaugaaugaugcag

SEQ ID NO: 25405 - RNA, 20 nt, Artificial Sequence
  Synthetic oligonucleotide: Ptpn6-1427
cugugggaggcugaggcgag

SEQ ID NO: 25406 - RNA, 20 nt, Artificial Sequence
  Synthetic oligonucleotide: Ptpn6-1436
cugugguuccagcuauggag

SEQ ID NO: 25407 - RNA, 20 nt, Artificial Sequence
  Synthetic oligonucleotide: Ptpn6-1422
acagccuuggccggguguag

SEQ ID NO: 25408 - RNA, 20 nt, Artificial Sequence
  Synthetic oligonucleotide: Ptpn6-1030
gcggagaaguuggcuggacg

SEQ ID NO: 25409 - RNA, 20 nt, Artificial Sequence
  Synthetic oligonucleotide: Ptpn6-1189
uggacgugggagggccuucg

SEQ ID NO: 25410 - RNA, 20 nt, Artificial Sequence
  Synthetic oligonucleotide: Ptpn6-1229
cgugggagggccuucgcggg

SEQ ID NO: 25411 - RNA, 20 nt, Artificial Sequence
  Synthetic oligonucleotide: Ptpn6-1417
ggagcuuacauuccaguggg

SEQ ID NO: 25412 - RNA, 20 nt, Artificial Sequence
  Synthetic oligonucleotide: Ptpn6-1209
agaaguuggcuggacguggg

SEQ ID NO: 25413 - RNA, 20 nt, Artificial Sequence
  Synthetic oligonucleotide: Ptpn6-1425
ugugaucccagcacuguggg

SEQ ID NO: 25414 - RNA, 20 nt, Artificial Sequence
  Synthetic oligonucleotide: Ptpn6-1551
aaucagggaaggagagaugg

SEQ ID NO: 25415 - RNA, 20 nt, Artificial Sequence
  Synthetic oligonucleotide: Ptpn6-1433
aagaaauuagcugggugugg

SEQ ID NO: 25416 - RNA, 20 nt, Artificial Sequence
  Synthetic oligonucleotide: Ptpn6-1550
gaaucagggaaggagagaug

SEQ ID NO: 25417 - RNA, 20 nt, Artificial Sequence
  Synthetic oligonucleotide: Ptpn6-1423
caccugugaucccagcacug

SEQ ID NO: 25418 - RNA, 20 nt, Artificial Sequence
  Synthetic oligonucleotide: Ptpn6-1434
gugugguggcacacguccug

SEQ ID NO: 25419 - RNA, 20 nt, Artificial Sequence
  Synthetic oligonucleotide: Ptpn6-1426
cccagcacugugggaggcug

SEQ ID NO: 25420 - RNA, 20 nt, Artificial Sequence
  Synthetic oligonucleotide: Ptpn6-1213
aagucugauguugggaagug

SEQ ID NO: 25421 - RNA, 20 nt, Artificial Sequence
  Synthetic oligonucleotide: Ptpn6-1432
aauaagaaauuagcugggug

SEQ ID NO: 25422 - RNA, 20 nt, Artificial Sequence
  Synthetic oligonucleotide: Ptpn6-1418
gaacaaauaacccaauaaau

SEQ ID NO: 25423 - RNA, 20 nt, Artificial Sequence
  Synthetic oligonucleotide: Ptpn6-1254
ugaaaggaaacaaagaagau

SEQ ID NO: 25424 - RNA, 20 nt, Artificial Sequence
  Synthetic oligonucleotide: Ptpn6-1549
ggaaucagggaaggagagau

SEQ ID NO: 25425 - RNA, 20 nt, Artificial Sequence
  Synthetic oligonucleotide: Ptpn6-1567
gagacagggucucacuauau

SEQ ID NO: 25426 - RNA, 20 nt, Artificial Sequence
  Synthetic oligonucleotide: Ptpn6-1577
ucugcaaugauccaauuuau

SEQ ID NO: 25427 - RNA, 20 nt, Artificial Sequence
  Synthetic oligonucleotide: Ptpn6-1419
acgcagaaaauagacagccu

SEQ ID NO: 25428 - RNA, 20 nt, Artificial Sequence
  Synthetic oligonucleotide: Ptpn6-1571
caggcuggucucaaacuccu

SEQ ID NO: 25429 - RNA, 20 nt, Artificial Sequence
  Synthetic oligonucleotide: Ptpn6-1431
caaaaaauaagaaauuagcu

SEQ ID NO: 25430 - RNA, 20 nt, Artificial Sequence
  Synthetic oligonucleotide: Ptpn6-1573
ccucagccucccacagugcu

SEQ ID NO: 25431 - RNA, 20 nt, Artificial Sequence
  Synthetic oligonucleotide: Ptpn6-1031
guugggaagugcggagaagu

SEQ ID NO: 25432 - RNA, 20 nt, Artificial Sequence
  Synthetic oligonucleotide: Ptpn6-1416
cacggagcuuacauuccagu

SEQ ID NO: 25433 - RNA, 20 nt, Artificial Sequence
  Synthetic oligonucleotide: Ptpn6-1214
cggagaaguuggcuggacgu

SEQ ID NO: 25434 - RNA, 20 nt, Artificial Sequence
  Synthetic oligonucleotide: Ptpn6-983
augggaccaaagucugaugu

SEQ ID NO: 25435 - RNA, 20 nt, Artificial Sequence
  Synthetic oligonucleotide: Ptpn6-1424
accugugaucccagcacugu

SEQ ID NO: 25436 - RNA, 20 nt, Artificial Sequence
  Synthetic oligonucleotide: Ptpn6-1578
cugcaaugauccaauuuauu

SEQ ID NO: 25437 - RNA, 20 nt, Artificial Sequence
  Synthetic oligonucleotide: Ptpn6-1153
cacuucccaacaucagacuu

SEQ ID NO: 25438 - RNA, 20 nt, Artificial Sequence
  Synthetic oligonucleotide: Ptpn6-979
ugggaccaaagucugauguu

SEQ ID NO: 25439 - RNA, 20 nt, Artificial Sequence
  Synthetic oligonucleotide: Ptpn6-1579
aauuuauuggguuauuuguu

SEQ ID NO: 25440 - RNA, 18 nt, Artificial Sequence
  Synthetic oligonucleotide: Ptpn6-5299
ugacagagcggcggggua

SEQ ID NO: 25441 - RNA, 19 nt, Artificial Sequence
  Synthetic oligonucleotide: Ptpn6-5300
cugacagagcggcggggua

SEQ ID NO: 25442 - RNA, 20 nt, Artificial Sequence
  Synthetic oligonucleotide: Ptpn6-1913
gcugacagagcggcggggua

SEQ ID NO: 25443 - RNA, 21 nt, Artificial Sequence
  Synthetic oligonucleotide: Ptpn6-5301
agcugacagagcggcggggua

SEQ ID NO: 25444 - RNA, 22 nt, Artificial Sequence
  Synthetic oligonucleotide: Ptpn6-5302
aagcugacagagcggcggggua

SEQ ID NO: 25445 - RNA, 23 nt, Artificial Sequence
  Synthetic oligonucleotide: Ptpn6-5303
caagcugacagagcggcggggua

SEQ ID NO: 25446 - RNA, 24 nt, Artificial Sequence
  Synthetic oligonucleotide: Ptpn6-5304
ucaagcugacagagcggcggggua

SEQ ID NO: 25447 - RNA, 21 nt, Artificial Sequence
  Synthetic oligonucleotide: Ptpn6-5305
gcagaggagcaugagugagcc

SEQ ID NO: 25448 - RNA, 22 nt, Artificial Sequence
  Synthetic oligonucleotide: Ptpn6-5306
ggcagaggagcaugagugagcc

SEQ ID NO: 25449 - RNA, 23 nt, Artificial Sequence
  Synthetic oligonucleotide: Ptpn6-5307
gggcagaggagcaugagugagcc

SEQ ID NO: 25450 - RNA, 24 nt, Artificial Sequence
  Synthetic oligonucleotide: Ptpn6-5308
ggggcagaggagcaugagugagcc

SEQ ID NO: 25451 - RNA, 21 nt, Artificial Sequence
  Synthetic oligonucleotide: Ptpn6-5309
gcuucccugcagccccaaagc

SEQ ID NO: 25452 - RNA, 22 nt, Artificial Sequence
  Synthetic oligonucleotide: Ptpn6-5310
agcuucccugcagccccaaagc

SEQ ID NO: 25453 - RNA, 23 nt, Artificial Sequence
  Synthetic oligonucleotide: Ptpn6-5311
cagcuucccugcagccccaaagc

SEQ ID NO: 25454 - RNA, 24 nt, Artificial Sequence
  Synthetic oligonucleotide: Ptpn6-5312
ccagcuucccugcagccccaaagc

SEQ ID NO: 25455 - RNA, 21 nt, Artificial Sequence
  Synthetic oligonucleotide: Ptpn6-5313
uuaaagagggggcagaggagc

SEQ ID NO: 25456 - RNA, 22 nt, Artificial Sequence
  Synthetic oligonucleotide: Ptpn6-5314
guuaaagagggggcagaggagc

SEQ ID NO: 25457 - RNA, 23 nt, Artificial Sequence
  Synthetic oligonucleotide: Ptpn6-5315
uguuaaagagggggcagaggagc

SEQ ID NO: 25458 - RNA, 24 nt, Artificial Sequence
  Synthetic oligonucleotide: Ptpn6-5316
auguuaaagagggggcagaggagc

SEQ ID NO: 25459 - RNA, 21 nt, Artificial Sequence
  Synthetic oligonucleotide: Ptpn6-5317
ccauagggaggagcuguucag

SEQ ID NO: 25460 - RNA, 22 nt, Artificial Sequence
  Synthetic oligonucleotide: Ptpn6-5318
accauagggaggagcuguucag

SEQ ID NO: 25461 - RNA, 23 nt, Artificial Sequence
  Synthetic oligonucleotide: Ptpn6-5319
gaccauagggaggagcuguucag

SEQ ID NO: 25462 - RNA, 24 nt, Artificial Sequence
  Synthetic oligonucleotide: Ptpn6-5320
ggaccauagggaggagcuguucag

SEQ ID NO: 25463 - RNA, 21 nt, Artificial Sequence
  Synthetic oligonucleotide: Ptpn6-5321
gagcucaagcugacagagcgg

SEQ ID NO: 25464 - RNA, 22 nt, Artificial Sequence
  Synthetic oligonucleotide: Ptpn6-5322
ggagcucaagcugacagagcgg

SEQ ID NO: 25465 - RNA, 23 nt, Artificial Sequence
  Synthetic oligonucleotide: Ptpn6-5323
uggagcucaagcugacagagcgg

SEQ ID NO: 25466 - RNA, 24 nt, Artificial Sequence
  Synthetic oligonucleotide: Ptpn6-5324
cuggagcucaagcugacagagcgg

SEQ ID NO: 25467 - RNA, 18 nt, Artificial Sequence
  Synthetic oligonucleotide: Ptpn6-5325
acucacguucacacacgu

SEQ ID NO: 25468 - RNA, 19 nt, Artificial Sequence
  Synthetic oligonucleotide: Ptpn6-5326
cacucacguucacacacgu

SEQ ID NO: 25469 - RNA, 20 nt, Artificial Sequence
  Synthetic oligonucleotide: Ptpn6-961
gcacucacguucacacacgu

SEQ ID NO: 25470 - RNA, 21 nt, Artificial Sequence
  Synthetic oligonucleotide: Ptpn6-5327
cgcacucacguucacacacgu

SEQ ID NO: 25471 - RNA, 22 nt, Artificial Sequence
  Synthetic oligonucleotide: Ptpn6-5328
ucgcacucacguucacacacgu

SEQ ID NO: 25472 - RNA, 23 nt, Artificial Sequence
  Synthetic oligonucleotide: Ptpn6-5329
aucgcacucacguucacacacgu

SEQ ID NO: 25473 - RNA, 24 nt, Artificial Sequence
  Synthetic oligonucleotide: Ptpn6-5330
gaucgcacucacguucacacacgu

SEQ ID NO: 25474 - RNA, 21 nt, Artificial Sequence
  Synthetic oligonucleotide: Ptpn6-5331
ggggcagguugagaggcugga

SEQ ID NO: 25475 - RNA, 22 nt, Artificial Sequence
  Synthetic oligonucleotide: Ptpn6-5332
cggggcagguugagaggcugga

SEQ ID NO: 25476 - RNA, 23 nt, Artificial Sequence
  Synthetic oligonucleotide: Ptpn6-5333
ccggggcagguugagaggcugga

SEQ ID NO: 25477 - RNA, 24 nt, Artificial Sequence
  Synthetic oligonucleotide: Ptpn6-5334
cccggggcagguugagaggcugga

SEQ ID NO: 25478 - RNA, 18 nt, Artificial Sequence
  Synthetic oligonucleotide: Ptpn6-5335
acuccgacgugugugaac

SEQ ID NO: 25479 - RNA, 19 nt, Artificial Sequence
  Synthetic oligonucleotide: Ptpn6-5336
cacuccgacgugugugaac

SEQ ID NO: 25480 - RNA, 20 nt, Artificial Sequence
  Synthetic oligonucleotide: Ptpn6-1704
ucacuccgacgugugugaac

SEQ ID NO: 25481 - RNA, 21 nt, Artificial Sequence
  Synthetic oligonucleotide: Ptpn6-5337
cucacuccgacgugugugaac

SEQ ID NO: 25482 - RNA, 22 nt, Artificial Sequence
  Synthetic oligonucleotide: Ptpn6-5338
gcucacuccgacgugugugaac

SEQ ID NO: 25483 - RNA, 23 nt, Artificial Sequence
  Synthetic oligonucleotide: Ptpn6-5339
ugcucacuccgacgugugugaac

SEQ ID NO: 25484 - RNA, 24 nt, Artificial Sequence
  Synthetic oligonucleotide: Ptpn6-5340
augcucacuccgacgugugugaac

SEQ ID NO: 25485 - RNA, 21 nt, Artificial Sequence
  Synthetic oligonucleotide: Ptpn6-5341
uccugcuuaggaccugucccc

SEQ ID NO: 25486 - RNA, 22 nt, Artificial Sequence
  Synthetic oligonucleotide: Ptpn6-5342
cuccugcuuaggaccugucccc

SEQ ID NO: 25487 - RNA, 23 nt, Artificial Sequence
  Synthetic oligonucleotide: Ptpn6-5343
ccuccugcuuaggaccugucccc

SEQ ID NO: 25488 - RNA, 24 nt, Artificial Sequence
  Synthetic oligonucleotide: Ptpn6-5344
gccuccugcuuaggaccugucccc

SEQ ID NO: 25489 - RNA, 21 nt, Artificial Sequence
  Synthetic oligonucleotide: Ptpn6-2837
ccuacagagagaugcuguccc

SEQ ID NO: 25490 - RNA, 22 nt, Artificial Sequence
  Synthetic oligonucleotide: Ptpn6-2838
cccuacagagagaugcuguccc

SEQ ID NO: 25491 - RNA, 23 nt, Artificial Sequence
  Synthetic oligonucleotide: Ptpn6-2839
ucccuacagagagaugcuguccc

SEQ ID NO: 25492 - RNA, 24 nt, Artificial Sequence
  Synthetic oligonucleotide: Ptpn6-2840
cucccuacagagagaugcuguccc

SEQ ID NO: 25493 - RNA, 18 nt, Artificial Sequence
  Synthetic oligonucleotide: Ptpn6-5345
agugggucccucagcgcc

SEQ ID NO: 25494 - RNA, 19 nt, Artificial Sequence
  Synthetic oligonucleotide: Ptpn6-5346
gagugggucccucagcgcc

SEQ ID NO: 25495 - RNA, 20 nt, Artificial Sequence
  Synthetic oligonucleotide: Ptpn6-2239
ggagugggucccucagcgcc

SEQ ID NO: 25496 - RNA, 21 nt, Artificial Sequence
  Synthetic oligonucleotide: Ptpn6-5347
uggagugggucccucagcgcc

SEQ ID NO: 25497 - RNA, 22 nt, Artificial Sequence
  Synthetic oligonucleotide: Ptpn6-5348
cuggagugggucccucagcgcc

SEQ ID NO: 25498 - RNA, 23 nt, Artificial Sequence
  Synthetic oligonucleotide: Ptpn6-5349
gcuggagugggucccucagcgcc

SEQ ID NO: 25499 - RNA, 24 nt, Artificial Sequence
  Synthetic oligonucleotide: Ptpn6-5350
ggcuggagugggucccucagcgcc

SEQ ID NO: 25500 - RNA, 21 nt, Artificial Sequence
  Synthetic oligonucleotide: Ptpn6-5351
cauugguugcucuuccucagc

SEQ ID NO: 25501 - RNA, 22 nt, Artificial Sequence
  Synthetic oligonucleotide: Ptpn6-5352
ccauugguugcucuuccucagc

SEQ ID NO: 25502 - RNA, 23 nt, Artificial Sequence
  Synthetic oligonucleotide: Ptpn6-5353
cccauugguugcucuuccucagc

SEQ ID NO: 25503 - RNA, 24 nt, Artificial Sequence
  Synthetic oligonucleotide: Ptpn6-5354
ccccauugguugcucuuccucagc

SEQ ID NO: 25504 - RNA, 18 nt, Artificial Sequence
  Synthetic oligonucleotide: Ptpn6-5355
uccuggagacuauuaguc

SEQ ID NO: 25505 - RNA, 19 nt, Artificial Sequence
  Synthetic oligonucleotide: Ptpn6-5356
uuccuggagacuauuaguc

SEQ ID NO: 25506 - RNA, 20 nt, Artificial Sequence
  Synthetic oligonucleotide: Ptpn6-1679
uuuccuggagacuauuaguc

SEQ ID NO: 25507 - RNA, 21 nt, Artificial Sequence
  Synthetic oligonucleotide: Ptpn6-5357
uuuuccuggagacuauuaguc

SEQ ID NO: 25508 - RNA, 22 nt, Artificial Sequence
  Synthetic oligonucleotide: Ptpn6-5358
cuuuuccuggagacuauuaguc

SEQ ID NO: 25509 - RNA, 23 nt, Artificial Sequence
  Synthetic oligonucleotide: Ptpn6-5359
ccuuuuccuggagacuauuaguc

SEQ ID NO: 25510 - RNA, 24 nt, Artificial Sequence
  Synthetic oligonucleotide: Ptpn6-5360
uccuuuuccuggagacuauuaguc

SEQ ID NO: 25511 - RNA, 21 nt, Artificial Sequence
  Synthetic oligonucleotide: Ptpn6-5361
cagugccauuggccuggcagg

SEQ ID NO: 25512 - RNA, 22 nt, Artificial Sequence
  Synthetic oligonucleotide: Ptpn6-5362
gcagugccauuggccuggcagg

SEQ ID NO: 25513 - RNA, 23 nt, Artificial Sequence
  Synthetic oligonucleotide: Ptpn6-5363
ugcagugccauuggccuggcagg

SEQ ID NO: 25514 - RNA, 24 nt, Artificial Sequence
  Synthetic oligonucleotide: Ptpn6-5364
cugcagugccauuggccuggcagg

SEQ ID NO: 25515 - RNA, 18 nt, Artificial Sequence
  Synthetic oligonucleotide: Ptpn6-5365
ggucccucagcgcccugg

SEQ ID NO: 25516 - RNA, 19 nt, Artificial Sequence
  Synthetic oligonucleotide: Ptpn6-5366
gggucccucagcgcccugg

SEQ ID NO: 25517 - RNA, 20 nt, Artificial Sequence
  Synthetic oligonucleotide: Ptpn6-2227
ugggucccucagcgcccugg

SEQ ID NO: 25518 - RNA, 21 nt, Artificial Sequence
  Synthetic oligonucleotide: Ptpn6-5367
gugggucccucagcgcccugg

SEQ ID NO: 25519 - RNA, 22 nt, Artificial Sequence
  Synthetic oligonucleotide: Ptpn6-5368
agugggucccucagcgcccugg

SEQ ID NO: 25520 - RNA, 23 nt, Artificial Sequence
  Synthetic oligonucleotide: Ptpn6-5369
gagugggucccucagcgcccugg

SEQ ID NO: 25521 - RNA, 24 nt, Artificial Sequence
  Synthetic oligonucleotide: Ptpn6-5370
ggagugggucccucagcgcccugg

SEQ ID NO: 25522 - RNA, 18 nt, Artificial Sequence
  Synthetic oligonucleotide: Ptpn6-5371
gaggagcaugagugagcc

SEQ ID NO: 25523 - RNA, 19 nt, Artificial Sequence
  Synthetic oligonucleotide: Ptpn6-5372
agaggagcaugagugagcc

SEQ ID NO: 25524 - RNA, 20 nt, Artificial Sequence
  Synthetic oligonucleotide: Ptpn6-1237
cagaggagcaugagugagcc

SEQ ID NO: 25525 - RNA, 18 nt, Artificial Sequence
  Synthetic oligonucleotide: Ptpn6-5373
ucccugcagccccaaagc

SEQ ID NO: 25526 - RNA, 19 nt, Artificial Sequence
  Synthetic oligonucleotide: Ptpn6-5374
uucccugcagccccaaagc

SEQ ID NO: 25527 - RNA, 20 nt, Artificial Sequence
  Synthetic oligonucleotide: Ptpn6-1242
cuucccugcagccccaaagc

SEQ ID NO: 25528 - RNA, 18 nt, Artificial Sequence
  Synthetic oligonucleotide: Ptpn6-5375
aagagggggcagaggagc

SEQ ID NO: 25529 - RNA, 19 nt, Artificial Sequence
  Synthetic oligonucleotide: Ptpn6-5376
aaagagggggcagaggagc

SEQ ID NO: 25530 - RNA, 20 nt, Artificial Sequence
  Synthetic oligonucleotide: Ptpn6-1835
uaaagagggggcagaggagc

SEQ ID NO: 25531 - RNA, 18 nt, Artificial Sequence
  Synthetic oligonucleotide: Ptpn6-5377
uagggaggagcuguucag

SEQ ID NO: 25532 - RNA, 19 nt, Artificial Sequence
  Synthetic oligonucleotide: Ptpn6-5378
auagggaggagcuguucag

SEQ ID NO: 25533 - RNA, 20 nt, Artificial Sequence
  Synthetic oligonucleotide: Ptpn6-1536
cauagggaggagcuguucag

SEQ ID NO: 25534 - RNA, 18 nt, Artificial Sequence
  Synthetic oligonucleotide: Ptpn6-5379
aaggggaggagccucagg

SEQ ID NO: 25535 - RNA, 19 nt, Artificial Sequence
  Synthetic oligonucleotide: Ptpn6-5380
gaaggggaggagccucagg

SEQ ID NO: 25536 - RNA, 20 nt, Artificial Sequence
  Synthetic oligonucleotide: Ptpn6-2278
ggaaggggaggagccucagg

SEQ ID NO: 25537 - RNA, 21 nt, Artificial Sequence
  Synthetic oligonucleotide: Ptpn6-5381
gggaaggggaggagccucagg

SEQ ID NO: 25538 - RNA, 22 nt, Artificial Sequence
  Synthetic oligonucleotide: Ptpn6-5382
ggggaaggggaggagccucagg

SEQ ID NO: 25539 - RNA, 23 nt, Artificial Sequence
  Synthetic oligonucleotide: Ptpn6-5383
gggggaaggggaggagccucagg

SEQ ID NO: 25540 - RNA, 24 nt, Artificial Sequence
  Synthetic oligonucleotide: Ptpn6-5384
cgggggaaggggaggagccucagg

SEQ ID NO: 25541 - RNA, 18 nt, Artificial Sequence
  Synthetic oligonucleotide: Ptpn6-5385
cucaagcugacagagcgg

SEQ ID NO: 25542 - RNA, 19 nt, Artificial Sequence
  Synthetic oligonucleotide: Ptpn6-5386
gcucaagcugacagagcgg

SEQ ID NO: 25543 - RNA, 20 nt, Artificial Sequence
  Synthetic oligonucleotide: Ptpn6-1188
agcucaagcugacagagcgg

SEQ ID NO: 25544 - RNA, 18 nt, Artificial Sequence
  Synthetic oligonucleotide: Ptpn6-5387
uaggguuaggcccugggg

SEQ ID NO: 25545 - RNA, 19 nt, Artificial Sequence
  Synthetic oligonucleotide: Ptpn6-5388
guaggguuaggcccugggg

SEQ ID NO: 25546 - RNA, 20 nt, Artificial Sequence
  Synthetic oligonucleotide: Ptpn6-2280
gguaggguuaggcccugggg

SEQ ID NO: 25547 - RNA, 21 nt, Artificial Sequence
  Synthetic oligonucleotide: Ptpn6-5389
agguaggguuaggcccugggg

SEQ ID NO: 25548 - RNA, 22 nt, Artificial Sequence
  Synthetic oligonucleotide: Ptpn6-5390
cagguaggguuaggcccugggg

SEQ ID NO: 25549 - RNA, 23 nt, Artificial Sequence
  Synthetic oligonucleotide: Ptpn6-5391
ucagguaggguuaggcccugggg

SEQ ID NO: 25550 - RNA, 24 nt, Artificial Sequence
  Synthetic oligonucleotide: Ptpn6-5392
cucagguaggguuaggcccugggg

SEQ ID NO: 25551 - RNA, 18 nt, Artificial Sequence
  Synthetic oligonucleotide: Ptpn6-5393
ggugggugggccugcaca

SEQ ID NO: 25552 - RNA, 19 nt, Artificial Sequence
  Synthetic oligonucleotide: Ptpn6-5394
gggugggugggccugcaca

SEQ ID NO: 25553 - RNA, 20 nt, Artificial Sequence
  Synthetic oligonucleotide: Ptpn6-5285
ugggugggugggccugcaca

SEQ ID NO: 25554 - RNA, 21 nt, Artificial Sequence
  Synthetic oligonucleotide: Ptpn6-5395
cugggugggugggccugcaca

SEQ ID NO: 25555 - RNA, 22 nt, Artificial Sequence
  Synthetic oligonucleotide: Ptpn6-5396
ccugggugggugggccugcaca

SEQ ID NO: 25556 - RNA, 23 nt, Artificial Sequence
  Synthetic oligonucleotide: Ptpn6-5397
cccugggugggugggccugcaca

SEQ ID NO: 25557 - RNA, 24 nt, Artificial Sequence
  Synthetic oligonucleotide: Ptpn6-5398
gcccugggugggugggccugcaca

SEQ ID NO: 25558 - RNA, 18 nt, Artificial Sequence
  Synthetic oligonucleotide: Ptpn6-5399
gcagguugagaggcugga

SEQ ID NO: 25559 - RNA, 19 nt, Artificial Sequence
  Synthetic oligonucleotide: Ptpn6-5400
ggcagguugagaggcugga

SEQ ID NO: 25560 - RNA, 20 nt, Artificial Sequence
  Synthetic oligonucleotide: Ptpn6-2238
gggcagguugagaggcugga

SEQ ID NO: 25561 - RNA, 18 nt, Artificial Sequence
  Synthetic oligonucleotide: Ptpn6-5401
ugcuuaggaccugucccc

SEQ ID NO: 25562 - RNA, 19 nt, Artificial Sequence
  Synthetic oligonucleotide: Ptpn6-5402
cugcuuaggaccugucccc

SEQ ID NO: 25563 - RNA, 20 nt, Artificial Sequence
  Synthetic oligonucleotide: Ptpn6-1711
ccugcuuaggaccugucccc

SEQ ID NO: 25564 - RNA, 18 nt, Artificial Sequence
  Synthetic oligonucleotide: Ptpn6-2889
acagagagaugcuguccc

SEQ ID NO: 25565 - RNA, 19 nt, Artificial Sequence
  Synthetic oligonucleotide: Ptpn6-2890
uacagagagaugcuguccc

SEQ ID NO: 25566 - RNA, 20 nt, Artificial Sequence
  Synthetic oligonucleotide: Ptpn6-1690
cuacagagagaugcuguccc

SEQ ID NO: 25567 - RNA, 18 nt, Artificial Sequence
  Synthetic oligonucleotide: Ptpn6-5403
ugguugcucuuccucagc

SEQ ID NO: 25568 - RNA, 19 nt, Artificial Sequence
  Synthetic oligonucleotide: Ptpn6-5404
uugguugcucuuccucagc

SEQ ID NO: 25569 - RNA, 20 nt, Artificial Sequence
  Synthetic oligonucleotide: Ptpn6-1662
auugguugcucuuccucagc

SEQ ID NO: 25570 - RNA, 18 nt, Artificial Sequence
  Synthetic oligonucleotide: Ptpn6-5405
cggggcagguugagaggc

SEQ ID NO: 25571 - RNA, 19 nt, Artificial Sequence
  Synthetic oligonucleotide: Ptpn6-5406
ccggggcagguugagaggc

SEQ ID NO: 25572 - RNA, 20 nt, Artificial Sequence
  Synthetic oligonucleotide: Ptpn6-1403
cccggggcagguugagaggc

SEQ ID NO: 25573 - RNA, 21 nt, Artificial Sequence
  Synthetic oligonucleotide: Ptpn6-5407
ccccggggcagguugagaggc

SEQ ID NO: 25574 - RNA, 22 nt, Artificial Sequence
  Synthetic oligonucleotide: Ptpn6-5408
cccccggggcagguugagaggc

SEQ ID NO: 25575 - RNA, 23 nt, Artificial Sequence
  Synthetic oligonucleotide: Ptpn6-5409
ucccccggggcagguugagaggc

SEQ ID NO: 25576 - RNA, 24 nt, Artificial Sequence
  Synthetic oligonucleotide: Ptpn6-5410
uucccccggggcagguugagaggc

SEQ ID NO: 25577 - RNA, 18 nt, Artificial Sequence
  Synthetic oligonucleotide: Ptpn6-5411
ugccauuggccuggcagg

SEQ ID NO: 25578 - RNA, 19 nt, Artificial Sequence
  Synthetic oligonucleotide: Ptpn6-5412
gugccauuggccuggcagg

SEQ ID NO: 25579 - RNA, 20 nt, Artificial Sequence
  Synthetic oligonucleotide: Ptpn6-1680
agugccauuggccuggcagg

SEQ ID NO: 25580 - RNA, 18 nt, Artificial Sequence
  Synthetic oligonucleotide: Ptpn6-2908
guaagucccgggcaccau

SEQ ID NO: 25581 - RNA, 19 nt, Artificial Sequence
  Synthetic oligonucleotide: Ptpn6-2909
gguaagucccgggcaccau

SEQ ID NO: 25582 - RNA, 20 nt, Artificial Sequence
  Synthetic oligonucleotide: Ptpn6-954
ggguaagucccgggcaccau

SEQ ID NO: 25583 - RNA, 21 nt, Artificial Sequence
  Synthetic oligonucleotide: Ptpn6-2910
uggguaagucccgggcaccau

SEQ ID NO: 25584 - RNA, 22 nt, Artificial Sequence
  Synthetic oligonucleotide: Ptpn6-2911
guggguaagucccgggcaccau

SEQ ID NO: 25585 - RNA, 23 nt, Artificial Sequence
  Synthetic oligonucleotide: Ptpn6-2912
cguggguaagucccgggcaccau

SEQ ID NO: 25586 - RNA, 24 nt, Artificial Sequence
  Synthetic oligonucleotide: Ptpn6-2913
ccguggguaagucccgggcaccau

SEQ ID NO: 25587 - RNA, 18 nt, Artificial Sequence
  Synthetic oligonucleotide: Ptpn6-5413
cugaggaacugggcuguu

SEQ ID NO: 25588 - RNA, 19 nt, Artificial Sequence
  Synthetic oligonucleotide: Ptpn6-5414
ucugaggaacugggcuguu

SEQ ID NO: 25589 - RNA, 20 nt, Artificial Sequence
  Synthetic oligonucleotide: Ptpn6-1165
cucugaggaacugggcuguu

SEQ ID NO: 25590 - RNA, 21 nt, Artificial Sequence
  Synthetic oligonucleotide: Ptpn6-5415
ucucugaggaacugggcuguu

SEQ ID NO: 25591 - RNA, 22 nt, Artificial Sequence
  Synthetic oligonucleotide: Ptpn6-5416
uucucugaggaacugggcuguu

SEQ ID NO: 25592 - RNA, 23 nt, Artificial Sequence
  Synthetic oligonucleotide: Ptpn6-5417
cuucucugaggaacugggcuguu

SEQ ID NO: 25593 - RNA, 24 nt, Artificial Sequence
  Synthetic oligonucleotide: Ptpn6-5418
ccuucucugaggaacugggcuguu

SEQ ID NO: 25594 - RNA, 18 nt, Artificial Sequence
  Synthetic oligonucleotide: Ptpn6-5419
cuucccugcagccccaaa

SEQ ID NO: 25595 - RNA, 19 nt, Artificial Sequence
  Synthetic oligonucleotide: Ptpn6-5420
gcuucccugcagccccaaa

SEQ ID NO: 25596 - RNA, 20 nt, Artificial Sequence
  Synthetic oligonucleotide: Ptpn6-1894
agcuucccugcagccccaaa

SEQ ID NO: 25597 - RNA, 21 nt, Artificial Sequence
  Synthetic oligonucleotide: Ptpn6-5421
cagcuucccugcagccccaaa

SEQ ID NO: 25598 - RNA, 22 nt, Artificial Sequence
  Synthetic oligonucleotide: Ptpn6-5422
ccagcuucccugcagccccaaa

SEQ ID NO: 25599 - RNA, 23 nt, Artificial Sequence
  Synthetic oligonucleotide: Ptpn6-5423
gccagcuucccugcagccccaaa

SEQ ID NO: 25600 - RNA, 24 nt, Artificial Sequence
  Synthetic oligonucleotide: Ptpn6-5424
ggccagcuucccugcagccccaaa

SEQ ID NO: 25601 - RNA, 18 nt, Artificial Sequence
  Synthetic oligonucleotide: Ptpn6-5425
ccaggggaaaauguuaaa

SEQ ID NO: 25602 - RNA, 19 nt, Artificial Sequence
  Synthetic oligonucleotide: Ptpn6-5426
uccaggggaaaauguuaaa

SEQ ID NO: 25603 - RNA, 20 nt, Artificial Sequence
  Synthetic oligonucleotide: Ptpn6-1829
guccaggggaaaauguuaaa

SEQ ID NO: 25604 - RNA, 21 nt, Artificial Sequence
  Synthetic oligonucleotide: Ptpn6-5427
uguccaggggaaaauguuaaa

SEQ ID NO: 25605 - RNA, 22 nt, Artificial Sequence
  Synthetic oligonucleotide: Ptpn6-5428
uuguccaggggaaaauguuaaa

SEQ ID NO: 25606 - RNA, 23 nt, Artificial Sequence
  Synthetic oligonucleotide: Ptpn6-5429
cuuguccaggggaaaauguuaaa

SEQ ID NO: 25607 - RNA, 24 nt, Artificial Sequence
  Synthetic oligonucleotide: Ptpn6-5430
acuuguccaggggaaaauguuaaa

SEQ ID NO: 25608 - RNA, 18 nt, Artificial Sequence
  Synthetic oligonucleotide: Ptpn6-5431
cugaggaagagcaaccaa

SEQ ID NO: 25609 - RNA, 19 nt, Artificial Sequence
  Synthetic oligonucleotide: Ptpn6-5432
gcugaggaagagcaaccaa

SEQ ID NO: 25610 - RNA, 20 nt, Artificial Sequence
  Synthetic oligonucleotide: Ptpn6-1039
ggcugaggaagagcaaccaa

SEQ ID NO: 25611 - RNA, 21 nt, Artificial Sequence
  Synthetic oligonucleotide: Ptpn6-5433
uggcugaggaagagcaaccaa

SEQ ID NO: 25612 - RNA, 22 nt, Artificial Sequence
  Synthetic oligonucleotide: Ptpn6-5434
cuggcugaggaagagcaaccaa

SEQ ID NO: 25613 - RNA, 23 nt, Artificial Sequence
  Synthetic oligonucleotide: Ptpn6-5435
ccuggcugaggaagagcaaccaa

SEQ ID NO: 25614 - RNA, 24 nt, Artificial Sequence
  Synthetic oligonucleotide: Ptpn6-5436
cccuggcugaggaagagcaaccaa

SEQ ID NO: 25615 - RNA, 18 nt, Artificial Sequence
  Synthetic oligonucleotide: Ptpn6-5437
cuggaaguagaaaugcaa

SEQ ID NO: 25616 - RNA, 19 nt, Artificial Sequence
  Synthetic oligonucleotide: Ptpn6-5438
gcuggaaguagaaaugcaa

SEQ ID NO: 25617 - RNA, 20 nt, Artificial Sequence
  Synthetic oligonucleotide: Ptpn6-1054
ggcuggaaguagaaaugcaa

SEQ ID NO: 25618 - RNA, 21 nt, Artificial Sequence
  Synthetic oligonucleotide: Ptpn6-5439
aggcuggaaguagaaaugcaa

SEQ ID NO: 25619 - RNA, 22 nt, Artificial Sequence
  Synthetic oligonucleotide: Ptpn6-5440
gaggcuggaaguagaaaugcaa

SEQ ID NO: 25620 - RNA, 23 nt, Artificial Sequence
  Synthetic oligonucleotide: Ptpn6-5441
agaggcuggaaguagaaaugcaa

SEQ ID NO: 25621 - RNA, 24 nt, Artificial Sequence
  Synthetic oligonucleotide: Ptpn6-5442
cagaggcuggaaguagaaaugcaa

SEQ ID NO: 25622 - RNA, 18 nt, Artificial Sequence
  Synthetic oligonucleotide: Ptpn6-5443
acuaauagucuccaggaa

SEQ ID NO: 25623 - RNA, 19 nt, Artificial Sequence
  Synthetic oligonucleotide: Ptpn6-5444
gacuaauagucuccaggaa

SEQ ID NO: 25624 - RNA, 20 nt, Artificial Sequence
  Synthetic oligonucleotide: Ptpn6-1888
ggacuaauagucuccaggaa

SEQ ID NO: 25625 - RNA, 21 nt, Artificial Sequence
  Synthetic oligonucleotide: Ptpn6-5445
uggacuaauagucuccaggaa

SEQ ID NO: 25626 - RNA, 22 nt, Artificial Sequence
  Synthetic oligonucleotide: Ptpn6-5446
cuggacuaauagucuccaggaa

SEQ ID NO: 25627 - RNA, 23 nt, Artificial Sequence
  Synthetic oligonucleotide: Ptpn6-5447
ccuggacuaauagucuccaggaa

SEQ ID NO: 25628 - RNA, 24 nt, Artificial Sequence
  Synthetic oligonucleotide: Ptpn6-5448
cccuggacuaauagucuccaggaa

SEQ ID NO: 25629 - RNA, 18 nt, Artificial Sequence
  Synthetic oligonucleotide: Ptpn6-5449
ccucacaccuugcgggaa

SEQ ID NO: 25630 - RNA, 19 nt, Artificial Sequence
  Synthetic oligonucleotide: Ptpn6-5450
uccucacaccuugcgggaa

SEQ ID NO: 25631 - RNA, 20 nt, Artificial Sequence
  Synthetic oligonucleotide: Ptpn6-962
guccucacaccuugcgggaa

SEQ ID NO: 25632 - RNA, 21 nt, Artificial Sequence
  Synthetic oligonucleotide: Ptpn6-5451
gguccucacaccuugcgggaa

SEQ ID NO: 25633 - RNA, 22 nt, Artificial Sequence
  Synthetic oligonucleotide: Ptpn6-5452
ggguccucacaccuugcgggaa

SEQ ID NO: 25634 - RNA, 23 nt, Artificial Sequence
  Synthetic oligonucleotide: Ptpn6-5453
gggguccucacaccuugcgggaa

SEQ ID NO: 25635 - RNA, 24 nt, Artificial Sequence
  Synthetic oligonucleotide: Ptpn6-5454
ggggguccucacaccuugcgggaa

SEQ ID NO: 25636 - RNA, 18 nt, Artificial Sequence
  Synthetic oligonucleotide: Ptpn6-5455
caaccugccccgggggaa

SEQ ID NO: 25637 - RNA, 19 nt, Artificial Sequence
  Synthetic oligonucleotide: Ptpn6-5456
ucaaccugccccgggggaa

SEQ ID NO: 25638 - RNA, 20 nt, Artificial Sequence
  Synthetic oligonucleotide: Ptpn6-1517
cucaaccugccccgggggaa

SEQ ID NO: 25639 - RNA, 21 nt, Artificial Sequence
  Synthetic oligonucleotide: Ptpn6-5457
ucucaaccugccccgggggaa

SEQ ID NO: 25640 - RNA, 22 nt, Artificial Sequence
  Synthetic oligonucleotide: Ptpn6-5458
cucucaaccugccccgggggaa

SEQ ID NO: 25641 - RNA, 23 nt, Artificial Sequence
  Synthetic oligonucleotide: Ptpn6-5459
ccucucaaccugccccgggggaa

SEQ ID NO: 25642 - RNA, 24 nt, Artificial Sequence
  Synthetic oligonucleotide: Ptpn6-5460
gccucucaaccugccccgggggaa

SEQ ID NO: 25643 - RNA, 18 nt, Artificial Sequence
  Synthetic oligonucleotide: Ptpn6-5461
cccucccuccaaaacuaa

SEQ ID NO: 25644 - RNA, 19 nt, Artificial Sequence
  Synthetic oligonucleotide: Ptpn6-5462
ucccucccuccaaaacuaa

SEQ ID NO: 25645 - RNA, 20 nt, Artificial Sequence
  Synthetic oligonucleotide: Ptpn6-1855
cucccucccuccaaaacuaa

SEQ ID NO: 25646 - RNA, 21 nt, Artificial Sequence
  Synthetic oligonucleotide: Ptpn6-5463
ccucccucccuccaaaacuaa

SEQ ID NO: 25647 - RNA, 22 nt, Artificial Sequence
  Synthetic oligonucleotide: Ptpn6-5464
cccucccucccuccaaaacuaa

SEQ ID NO: 25648 - RNA, 23 nt, Artificial Sequence
  Synthetic oligonucleotide: Ptpn6-5465
gcccucccucccuccaaaacuaa

SEQ ID NO: 25649 - RNA, 24 nt, Artificial Sequence
  Synthetic oligonucleotide: Ptpn6-5466
agcccucccucccuccaaaacuaa

SEQ ID NO: 25650 - RNA, 18 nt, Artificial Sequence
  Synthetic oligonucleotide: Ptpn6-5467
cuccguaggcggaaacca

SEQ ID NO: 25651 - RNA, 19 nt, Artificial Sequence
  Synthetic oligonucleotide: Ptpn6-5468
ucuccguaggcggaaacca

SEQ ID NO: 25652 - RNA, 20 nt, Artificial Sequence
  Synthetic oligonucleotide: Ptpn6-1931
cucuccguaggcggaaacca

SEQ ID NO: 25653 - RNA, 21 nt, Artificial Sequence
  Synthetic oligonucleotide: Ptpn6-5469
ccucuccguaggcggaaacca

SEQ ID NO: 25654 - RNA, 22 nt, Artificial Sequence
  Synthetic oligonucleotide: Ptpn6-5470
accucuccguaggcggaaacca

SEQ ID NO: 25655 - RNA, 23 nt, Artificial Sequence
  Synthetic oligonucleotide: Ptpn6-5471
aaccucuccguaggcggaaacca

SEQ ID NO: 25656 - RNA, 24 nt, Artificial Sequence
  Synthetic oligonucleotide: Ptpn6-5472
aaaccucuccguaggcggaaacca

SEQ ID NO: 25657 - RNA, 18 nt, Artificial Sequence
  Synthetic oligonucleotide: Ptpn6-5473
gcugaggaagagcaacca

SEQ ID NO: 25658 - RNA, 19 nt, Artificial Sequence
  Synthetic oligonucleotide: Ptpn6-5474
ggcugaggaagagcaacca

SEQ ID NO: 25659 - RNA, 20 nt, Artificial Sequence
  Synthetic oligonucleotide: Ptpn6-1924
uggcugaggaagagcaacca

SEQ ID NO: 25660 - RNA, 21 nt, Artificial Sequence
  Synthetic oligonucleotide: Ptpn6-5475
cuggcugaggaagagcaacca

SEQ ID NO: 25661 - RNA, 22 nt, Artificial Sequence
  Synthetic oligonucleotide: Ptpn6-5476
ccuggcugaggaagagcaacca

SEQ ID NO: 25662 - RNA, 23 nt, Artificial Sequence
  Synthetic oligonucleotide: Ptpn6-5477
cccuggcugaggaagagcaacca

SEQ ID NO: 25663 - RNA, 24 nt, Artificial Sequence
  Synthetic oligonucleotide: Ptpn6-5478
acccuggcugaggaagagcaacca

SEQ ID NO: 25664 - RNA, 18 nt, Artificial Sequence
  Synthetic oligonucleotide: Ptpn6-5479
uaggcccagccaggacca

SEQ ID NO: 25665 - RNA, 19 nt, Artificial Sequence
  Synthetic oligonucleotide: Ptpn6-5480
uuaggcccagccaggacca

SEQ ID NO: 25666 - RNA, 20 nt, Artificial Sequence
  Synthetic oligonucleotide: Ptpn6-2281
guuaggcccagccaggacca

SEQ ID NO: 25667 - RNA, 21 nt, Artificial Sequence
  Synthetic oligonucleotide: Ptpn6-5481
gguuaggcccagccaggacca

SEQ ID NO: 25668 - RNA, 22 nt, Artificial Sequence
  Synthetic oligonucleotide: Ptpn6-5482
ggguuaggcccagccaggacca

SEQ ID NO: 25669 - RNA, 23 nt, Artificial Sequence
  Synthetic oligonucleotide: Ptpn6-5483
aggguuaggcccagccaggacca

SEQ ID NO: 25670 - RNA, 24 nt, Artificial Sequence
  Synthetic oligonucleotide: Ptpn6-5484
caggguuaggcccagccaggacca

SEQ ID NO: 25671 - RNA, 18 nt, Artificial Sequence
  Synthetic oligonucleotide: Ptpn6-5485
gguguugugagcuaccca

SEQ ID NO: 25672 - RNA, 19 nt, Artificial Sequence
  Synthetic oligonucleotide: Ptpn6-5486
agguguugugagcuaccca

SEQ ID NO: 25673 - RNA, 20 nt, Artificial Sequence
  Synthetic oligonucleotide: Ptpn6-1033
gagguguugugagcuaccca

SEQ ID NO: 25674 - RNA, 21 nt, Artificial Sequence
  Synthetic oligonucleotide: Ptpn6-5487
ugagguguugugagcuaccca

SEQ ID NO: 25675 - RNA, 22 nt, Artificial Sequence
  Synthetic oligonucleotide: Ptpn6-5488
uugagguguugugagcuaccca

SEQ ID NO: 25676 - RNA, 23 nt, Artificial Sequence
  Synthetic oligonucleotide: Ptpn6-5489
uuugagguguugugagcuaccca

SEQ ID NO: 25677 - RNA, 24 nt, Artificial Sequence
  Synthetic oligonucleotide: Ptpn6-5490
guuugagguguugugagcuaccca

SEQ ID NO: 25678 - RNA, 18 nt, Artificial Sequence
  Synthetic oligonucleotide: Ptpn6-2919
gugcccgggacuuaccca

SEQ ID NO: 25679 - RNA, 19 nt, Artificial Sequence
  Synthetic oligonucleotide: Ptpn6-2920
ggugcccgggacuuaccca

SEQ ID NO: 25680 - RNA, 20 nt, Artificial Sequence
  Synthetic oligonucleotide: Ptpn6-995
uggugcccgggacuuaccca

SEQ ID NO: 25681 - RNA, 21 nt, Artificial Sequence
  Synthetic oligonucleotide: Ptpn6-2921
auggugcccgggacuuaccca

SEQ ID NO: 25682 - RNA, 22 nt, Artificial Sequence
  Synthetic oligonucleotide: Ptpn6-2922
gauggugcccgggacuuaccca

SEQ ID NO: 25683 - RNA, 23 nt, Artificial Sequence
  Synthetic oligonucleotide: Ptpn6-2923
cgauggugcccgggacuuaccca

SEQ ID NO: 25684 - RNA, 24 nt, Artificial Sequence
  Synthetic oligonucleotide: Ptpn6-2924
ccgauggugcccgggacuuaccca

SEQ ID NO: 25685 - RNA, 18 nt, Artificial Sequence
  Synthetic oligonucleotide: Ptpn6-5491
cagauacacacuugucca

SEQ ID NO: 25686 - RNA, 19 nt, Artificial Sequence
  Synthetic oligonucleotide: Ptpn6-5492
acagauacacacuugucca

SEQ ID NO: 25687 - RNA, 20 nt, Artificial Sequence
  Synthetic oligonucleotide: Ptpn6-1210
aacagauacacacuugucca

SEQ ID NO: 25688 - RNA, 21 nt, Artificial Sequence
  Synthetic oligonucleotide: Ptpn6-5493
gaacagauacacacuugucca

SEQ ID NO: 25689 - RNA, 22 nt, Artificial Sequence
  Synthetic oligonucleotide: Ptpn6-5494
agaacagauacacacuugucca

SEQ ID NO: 25690 - RNA, 23 nt, Artificial Sequence
  Synthetic oligonucleotide: Ptpn6-5495
gagaacagauacacacuugucca

SEQ ID NO: 25691 - RNA, 24 nt, Artificial Sequence
  Synthetic oligonucleotide: Ptpn6-5496
agagaacagauacacacuugucca

SEQ ID NO: 25692 - RNA, 18 nt, Artificial Sequence
  Synthetic oligonucleotide: Ptpn6-5497
ccacggcagagggccgca

SEQ ID NO: 25693 - RNA, 19 nt, Artificial Sequence
  Synthetic oligonucleotide: Ptpn6-5498
gccacggcagagggccgca

SEQ ID NO: 25694 - RNA, 20 nt, Artificial Sequence
  Synthetic oligonucleotide: Ptpn6-1216
agccacggcagagggccgca

SEQ ID NO: 25695 - RNA, 21 nt, Artificial Sequence
  Synthetic oligonucleotide: Ptpn6-5499
aagccacggcagagggccgca

SEQ ID NO: 25696 - RNA, 22 nt, Artificial Sequence
  Synthetic oligonucleotide: Ptpn6-5500
gaagccacggcagagggccgca

SEQ ID NO: 25697 - RNA, 23 nt, Artificial Sequence
  Synthetic oligonucleotide: Ptpn6-5501
ggaagccacggcagagggccgca

SEQ ID NO: 25698 - RNA, 24 nt, Artificial Sequence
  Synthetic oligonucleotide: Ptpn6-5502
gggaagccacggcagagggccgca

SEQ ID NO: 25699 - RNA, 18 nt, Artificial Sequence
  Synthetic oligonucleotide: Ptpn6-5503
gagggggaagccacggca

SEQ ID NO: 25700 - RNA, 19 nt, Artificial Sequence
  Synthetic oligonucleotide: Ptpn6-5504
ggagggggaagccacggca

SEQ ID NO: 25701 - RNA, 20 nt, Artificial Sequence
  Synthetic oligonucleotide: Ptpn6-1872
gggagggggaagccacggca

SEQ ID NO: 25702 - RNA, 21 nt, Artificial Sequence
  Synthetic oligonucleotide: Ptpn6-5505
agggagggggaagccacggca

SEQ ID NO: 25703 - RNA, 22 nt, Artificial Sequence
  Synthetic oligonucleotide: Ptpn6-5506
uagggagggggaagccacggca

SEQ ID NO: 25704 - RNA, 23 nt, Artificial Sequence
  Synthetic oligonucleotide: Ptpn6-5507
guagggagggggaagccacggca

SEQ ID NO: 25705 - RNA, 24 nt, Artificial Sequence
  Synthetic oligonucleotide: Ptpn6-5508
uguagggagggggaagccacggca

SEQ ID NO: 25706 - RNA, 18 nt, Artificial Sequence
  Synthetic oligonucleotide: Ptpn6-5509
aauguuaaagagggggca

SEQ ID NO: 25707 - RNA, 19 nt, Artificial Sequence
  Synthetic oligonucleotide: Ptpn6-5510
aaauguuaaagagggggca

SEQ ID NO: 25708 - RNA, 20 nt, Artificial Sequence
  Synthetic oligonucleotide: Ptpn6-1833
aaaauguuaaagagggggca

SEQ ID NO: 25709 - RNA, 21 nt, Artificial Sequence
  Synthetic oligonucleotide: Ptpn6-5511
gaaaauguuaaagagggggca

SEQ ID NO: 25710 - RNA, 22 nt, Artificial Sequence
  Synthetic oligonucleotide: Ptpn6-5512
ggaaaauguuaaagagggggca

SEQ ID NO: 25711 - RNA, 23 nt, Artificial Sequence
  Synthetic oligonucleotide: Ptpn6-5513
gggaaaauguuaaagagggggca

SEQ ID NO: 25712 - RNA, 24 nt, Artificial Sequence
  Synthetic oligonucleotide: Ptpn6-5514
ggggaaaauguuaaagagggggca

SEQ ID NO: 25713 - RNA, 18 nt, Artificial Sequence
  Synthetic oligonucleotide: Ptpn6-5515
gcuggaaguagaaaugca

SEQ ID NO: 25714 - RNA, 19 nt, Artificial Sequence
  Synthetic oligonucleotide: Ptpn6-5516
ggcuggaaguagaaaugca

SEQ ID NO: 25715 - RNA, 20 nt, Artificial Sequence
  Synthetic oligonucleotide: Ptpn6-1820
aggcuggaaguagaaaugca

SEQ ID NO: 25716 - RNA, 21 nt, Artificial Sequence
  Synthetic oligonucleotide: Ptpn6-5517
gaggcuggaaguagaaaugca

SEQ ID NO: 25717 - RNA, 22 nt, Artificial Sequence
  Synthetic oligonucleotide: Ptpn6-5518
agaggcuggaaguagaaaugca

SEQ ID NO: 25718 - RNA, 23 nt, Artificial Sequence
  Synthetic oligonucleotide: Ptpn6-5519
cagaggcuggaaguagaaaugca

SEQ ID NO: 25719 - RNA, 24 nt, Artificial Sequence
  Synthetic oligonucleotide: Ptpn6-5520
ccagaggcuggaaguagaaaugca

SEQ ID NO: 25720 - RNA, 18 nt, Artificial Sequence
  Synthetic oligonucleotide: Ptpn6-5521
uaacagcccaguuccuca

SEQ ID NO: 25721 - RNA, 19 nt, Artificial Sequence
  Synthetic oligonucleotide: Ptpn6-5522
cuaacagcccaguuccuca

SEQ ID NO: 25722 - RNA, 20 nt, Artificial Sequence
  Synthetic oligonucleotide: Ptpn6-1935
ccuaacagcccaguuccuca

SEQ ID NO: 25723 - RNA, 21 nt, Artificial Sequence
  Synthetic oligonucleotide: Ptpn6-5523
cccuaacagcccaguuccuca

SEQ ID NO: 25724 - RNA, 22 nt, Artificial Sequence
  Synthetic oligonucleotide: Ptpn6-5524
ucccuaacagcccaguuccuca

SEQ ID NO: 25725 - RNA, 23 nt, Artificial Sequence
  Synthetic oligonucleotide: Ptpn6-5525
aucccuaacagcccaguuccuca

SEQ ID NO: 25726 - RNA, 24 nt, Artificial Sequence
  Synthetic oligonucleotide: Ptpn6-5526
aaucccuaacagcccaguuccuca

SEQ ID NO: 25727 - RNA, 18 nt, Artificial Sequence
  Synthetic oligonucleotide: Ptpn6-5527
gcgggaaggggaaguuca

SEQ ID NO: 25728 - RNA, 19 nt, Artificial Sequence
  Synthetic oligonucleotide: Ptpn6-5528
ugcgggaaggggaaguuca

SEQ ID NO: 25729 - RNA, 20 nt, Artificial Sequence
  Synthetic oligonucleotide: Ptpn6-1847
uugcgggaaggggaaguuca

SEQ ID NO: 25730 - RNA, 21 nt, Artificial Sequence
  Synthetic oligonucleotide: Ptpn6-5529
cuugcgggaaggggaaguuca

SEQ ID NO: 25731 - RNA, 22 nt, Artificial Sequence
  Synthetic oligonucleotide: Ptpn6-5530
ccuugcgggaaggggaaguuca

SEQ ID NO: 25732 - RNA, 23 nt, Artificial Sequence
  Synthetic oligonucleotide: Ptpn6-5531
accuugcgggaaggggaaguuca

SEQ ID NO: 25733 - RNA, 24 nt, Artificial Sequence
  Synthetic oligonucleotide: Ptpn6-5532
caccuugcgggaaggggaaguuca

SEQ ID NO: 25734 - RNA, 18 nt, Artificial Sequence
  Synthetic oligonucleotide: Ptpn6-5533
auagggaggagcuguuca

SEQ ID NO: 25735 - RNA, 19 nt, Artificial Sequence
  Synthetic oligonucleotide: Ptpn6-5534
cauagggaggagcuguuca

SEQ ID NO: 25736 - RNA, 20 nt, Artificial Sequence
  Synthetic oligonucleotide: Ptpn6-1535
ccauagggaggagcuguuca

SEQ ID NO: 25737 - RNA, 21 nt, Artificial Sequence
  Synthetic oligonucleotide: Ptpn6-5535
accauagggaggagcuguuca

SEQ ID NO: 25738 - RNA, 22 nt, Artificial Sequence
  Synthetic oligonucleotide: Ptpn6-5536
gaccauagggaggagcuguuca

SEQ ID NO: 25739 - RNA, 23 nt, Artificial Sequence
  Synthetic oligonucleotide: Ptpn6-5537
ggaccauagggaggagcuguuca

SEQ ID NO: 25740 - RNA, 24 nt, Artificial Sequence
  Synthetic oligonucleotide: Ptpn6-5538
aggaccauagggaggagcuguuca

SEQ ID NO: 25741 - RNA, 18 nt, Artificial Sequence
  Synthetic oligonucleotide: Ptpn6-5539
aggggaaaauguuaaaga

SEQ ID NO: 25742 - RNA, 19 nt, Artificial Sequence
  Synthetic oligonucleotide: Ptpn6-5540
caggggaaaauguuaaaga

SEQ ID NO: 25743 - RNA, 20 nt, Artificial Sequence
  Synthetic oligonucleotide: Ptpn6-1227
ccaggggaaaauguuaaaga

SEQ ID NO: 25744 - RNA, 21 nt, Artificial Sequence
  Synthetic oligonucleotide: Ptpn6-5541
uccaggggaaaauguuaaaga

SEQ ID NO: 25745 - RNA, 22 nt, Artificial Sequence
  Synthetic oligonucleotide: Ptpn6-5542
guccaggggaaaauguuaaaga

SEQ ID NO: 25746 - RNA, 23 nt, Artificial Sequence
  Synthetic oligonucleotide: Ptpn6-5543
uguccaggggaaaauguuaaaga

SEQ ID NO: 25747 - RNA, 24 nt, Artificial Sequence
  Synthetic oligonucleotide: Ptpn6-5544
uuguccaggggaaaauguuaaaga

SEQ ID NO: 25748 - RNA, 18 nt, Artificial Sequence
  Synthetic oligonucleotide: Ptpn6-5545
agcccaguuccucagaga

SEQ ID NO: 25749 - RNA, 19 nt, Artificial Sequence
  Synthetic oligonucleotide: Ptpn6-5546
cagcccaguuccucagaga

SEQ ID NO: 25750 - RNA, 20 nt, Artificial Sequence
  Synthetic oligonucleotide: Ptpn6-1230
acagcccaguuccucagaga

SEQ ID NO: 25751 - RNA, 21 nt, Artificial Sequence
  Synthetic oligonucleotide: Ptpn6-5547
aacagcccaguuccucagaga

SEQ ID NO: 25752 - RNA, 22 nt, Artificial Sequence
  Synthetic oligonucleotide: Ptpn6-5548
uaacagcccaguuccucagaga

SEQ ID NO: 25753 - RNA, 23 nt, Artificial Sequence
  Synthetic oligonucleotide: Ptpn6-5549
cuaacagcccaguuccucagaga

SEQ ID NO: 25754 - RNA, 24 nt, Artificial Sequence
  Synthetic oligonucleotide: Ptpn6-5550
ccuaacagcccaguuccucagaga

SEQ ID NO: 25755 - RNA, 18 nt, Artificial Sequence
  Synthetic oligonucleotide: Ptpn6-5551
uccaaaacuaacaggaga

SEQ ID NO: 25756 - RNA, 19 nt, Artificial Sequence
  Synthetic oligonucleotide: Ptpn6-5552
cuccaaaacuaacaggaga

SEQ ID NO: 25757 - RNA, 20 nt, Artificial Sequence
  Synthetic oligonucleotide: Ptpn6-1857
ccuccaaaacuaacaggaga

SEQ ID NO: 25758 - RNA, 21 nt, Artificial Sequence
  Synthetic oligonucleotide: Ptpn6-5553
cccuccaaaacuaacaggaga

SEQ ID NO: 25759 - RNA, 22 nt, Artificial Sequence
  Synthetic oligonucleotide: Ptpn6-5554
ucccuccaaaacuaacaggaga

SEQ ID NO: 25760 - RNA, 23 nt, Artificial Sequence
  Synthetic oligonucleotide: Ptpn6-5555
cucccuccaaaacuaacaggaga

SEQ ID NO: 25761 - RNA, 24 nt, Artificial Sequence
  Synthetic oligonucleotide: Ptpn6-5556
ccucccuccaaaacuaacaggaga

SEQ ID NO: 25762 - RNA, 18 nt, Artificial Sequence
  Synthetic oligonucleotide: Ptpn6-5557
acguucacacacgucgga

SEQ ID NO: 25763 - RNA, 19 nt, Artificial Sequence
  Synthetic oligonucleotide: Ptpn6-5558
cacguucacacacgucgga

SEQ ID NO: 25764 - RNA, 20 nt, Artificial Sequence
  Synthetic oligonucleotide: Ptpn6-1854
ucacguucacacacgucgga

SEQ ID NO: 25765 - RNA, 21 nt, Artificial Sequence
  Synthetic oligonucleotide: Ptpn6-5559
cucacguucacacacgucgga

SEQ ID NO: 25766 - RNA, 22 nt, Artificial Sequence
  Synthetic oligonucleotide: Ptpn6-5560
acucacguucacacacgucgga

SEQ ID NO: 25767 - RNA, 23 nt, Artificial Sequence
  Synthetic oligonucleotide: Ptpn6-5561
cacucacguucacacacgucgga

SEQ ID NO: 25768 - RNA, 24 nt, Artificial Sequence
  Synthetic oligonucleotide: Ptpn6-5562
gcacucacguucacacacgucgga

SEQ ID NO: 25769 - RNA, 18 nt, Artificial Sequence
  Synthetic oligonucleotide: Ptpn6-5563
aggggaaguucauaggga

SEQ ID NO: 25770 - RNA, 19 nt, Artificial Sequence
  Synthetic oligonucleotide: Ptpn6-5564
aaggggaaguucauaggga

SEQ ID NO: 25771 - RNA, 20 nt, Artificial Sequence
  Synthetic oligonucleotide: Ptpn6-1849
gaaggggaaguucauaggga

SEQ ID NO: 25772 - RNA, 21 nt, Artificial Sequence
  Synthetic oligonucleotide: Ptpn6-5565
ggaaggggaaguucauaggga

SEQ ID NO: 25773 - RNA, 22 nt, Artificial Sequence
  Synthetic oligonucleotide: Ptpn6-5566
gggaaggggaaguucauaggga

SEQ ID NO: 25774 - RNA, 23 nt, Artificial Sequence
  Synthetic oligonucleotide: Ptpn6-5567
cgggaaggggaaguucauaggga

SEQ ID NO: 25775 - RNA, 24 nt, Artificial Sequence
  Synthetic oligonucleotide: Ptpn6-5568
gcgggaaggggaaguucauaggga

SEQ ID NO: 25776 - RNA, 18 nt, Artificial Sequence
  Synthetic oligonucleotide: Ptpn6-2969
agcaucucucuguaggga

SEQ ID NO: 25777 - RNA, 19 nt, Artificial Sequence
  Synthetic oligonucleotide: Ptpn6-2970
cagcaucucucuguaggga

SEQ ID NO: 25778 - RNA, 20 nt, Artificial Sequence
  Synthetic oligonucleotide: Ptpn6-1215
acagcaucucucuguaggga

SEQ ID NO: 25779 - RNA, 21 nt, Artificial Sequence
  Synthetic oligonucleotide: Ptpn6-2971
gacagcaucucucuguaggga

SEQ ID NO: 25780 - RNA, 22 nt, Artificial Sequence
  Synthetic oligonucleotide: Ptpn6-2972
ggacagcaucucucuguaggga

SEQ ID NO: 25781 - RNA, 23 nt, Artificial Sequence
  Synthetic oligonucleotide: Ptpn6-2973
gggacagcaucucucuguaggga

SEQ ID NO: 25782 - RNA, 24 nt, Artificial Sequence
  Synthetic oligonucleotide: Ptpn6-2974
cgggacagcaucucucuguaggga

SEQ ID NO: 25783 - RNA, 18 nt, Artificial Sequence
  Synthetic oligonucleotide: Ptpn6-5569
ggccgccuucccccggga

SEQ ID NO: 25784 - RNA, 19 nt, Artificial Sequence
  Synthetic oligonucleotide: Ptpn6-5570
gggccgccuucccccggga

SEQ ID NO: 25785 - RNA, 20 nt, Artificial Sequence
  Synthetic oligonucleotide: Ptpn6-1902
agggccgccuucccccggga

SEQ ID NO: 25786 - RNA, 21 nt, Artificial Sequence
  Synthetic oligonucleotide: Ptpn6-5571
cagggccgccuucccccggga

SEQ ID NO: 25787 - RNA, 22 nt, Artificial Sequence
  Synthetic oligonucleotide: Ptpn6-5572
ccagggccgccuucccccggga

SEQ ID NO: 25788 - RNA, 23 nt, Artificial Sequence
  Synthetic oligonucleotide: Ptpn6-5573
uccagggccgccuucccccggga

SEQ ID NO: 25789 - RNA, 24 nt, Artificial Sequence
  Synthetic oligonucleotide: Ptpn6-5574
guccagggccgccuucccccggga

SEQ ID NO: 25790 - RNA, 18 nt, Artificial Sequence
  Synthetic oligonucleotide: Ptpn6-5575
uccucacaccuugcggga

SEQ ID NO: 25791 - RNA, 19 nt, Artificial Sequence
  Synthetic oligonucleotide: Ptpn6-5576
guccucacaccuugcggga

SEQ ID NO: 25792 - RNA, 20 nt, Artificial Sequence
  Synthetic oligonucleotide: Ptpn6-958
gguccucacaccuugcggga

SEQ ID NO: 25793 - RNA, 21 nt, Artificial Sequence
  Synthetic oligonucleotide: Ptpn6-5577
ggguccucacaccuugcggga

SEQ ID NO: 25794 - RNA, 22 nt, Artificial Sequence
  Synthetic oligonucleotide: Ptpn6-5578
gggguccucacaccuugcggga

SEQ ID NO: 25795 - RNA, 23 nt, Artificial Sequence
  Synthetic oligonucleotide: Ptpn6-5579
ggggguccucacaccuugcggga

SEQ ID NO: 25796 - RNA, 24 nt, Artificial Sequence
  Synthetic oligonucleotide: Ptpn6-5580
cggggguccucacaccuugcggga

SEQ ID NO: 25797 - RNA, 18 nt, Artificial Sequence
  Synthetic oligonucleotide: Ptpn6-5581
ucaaccugccccggggga

SEQ ID NO: 25798 - RNA, 19 nt, Artificial Sequence
  Synthetic oligonucleotide: Ptpn6-5582
cucaaccugccccggggga

SEQ ID NO: 25799 - RNA, 20 nt, Artificial Sequence
  Synthetic oligonucleotide: Ptpn6-1516
ucucaaccugccccggggga

SEQ ID NO: 25800 - RNA, 21 nt, Artificial Sequence
  Synthetic oligonucleotide: Ptpn6-5583
cucucaaccugccccggggga

SEQ ID NO: 25801 - RNA, 22 nt, Artificial Sequence
  Synthetic oligonucleotide: Ptpn6-5584
ccucucaaccugccccggggga

SEQ ID NO: 25802 - RNA, 23 nt, Artificial Sequence
  Synthetic oligonucleotide: Ptpn6-5585
gccucucaaccugccccggggga

SEQ ID NO: 25803 - RNA, 24 nt, Artificial Sequence
  Synthetic oligonucleotide: Ptpn6-5586
agccucucaaccugccccggggga

SEQ ID NO: 25804 - RNA, 18 nt, Artificial Sequence
  Synthetic oligonucleotide: Ptpn6-5587
aaguagaaaugcaaugga

SEQ ID NO: 25805 - RNA, 19 nt, Artificial Sequence
  Synthetic oligonucleotide: Ptpn6-5588
gaaguagaaaugcaaugga

SEQ ID NO: 25806 - RNA, 20 nt, Artificial Sequence
  Synthetic oligonucleotide: Ptpn6-1823
ggaaguagaaaugcaaugga

SEQ ID NO: 25807 - RNA, 21 nt, Artificial Sequence
  Synthetic oligonucleotide: Ptpn6-5589
uggaaguagaaaugcaaugga

SEQ ID NO: 25808 - RNA, 22 nt, Artificial Sequence
  Synthetic oligonucleotide: Ptpn6-5590
cuggaaguagaaaugcaaugga

SEQ ID NO: 25809 - RNA, 23 nt, Artificial Sequence
  Synthetic oligonucleotide: Ptpn6-5591
gcuggaaguagaaaugcaaugga

SEQ ID NO: 25810 - RNA, 24 nt, Artificial Sequence
  Synthetic oligonucleotide: Ptpn6-5592
ggcuggaaguagaaaugcaaugga

SEQ ID NO: 25811 - RNA, 18 nt, Artificial Sequence
  Synthetic oligonucleotide: Ptpn6-5593
gggggcagaggagcauga

SEQ ID NO: 25812 - RNA, 19 nt, Artificial Sequence
  Synthetic oligonucleotide: Ptpn6-5594
agggggcagaggagcauga

SEQ ID NO: 25813 - RNA, 20 nt, Artificial Sequence
  Synthetic oligonucleotide: Ptpn6-1836
gagggggcagaggagcauga

SEQ ID NO: 25814 - RNA, 21 nt, Artificial Sequence
  Synthetic oligonucleotide: Ptpn6-5595
agagggggcagaggagcauga

SEQ ID NO: 25815 - RNA, 22 nt, Artificial Sequence
  Synthetic oligonucleotide: Ptpn6-5596
aagagggggcagaggagcauga

SEQ ID NO: 25816 - RNA, 23 nt, Artificial Sequence
  Synthetic oligonucleotide: Ptpn6-5597
aaagagggggcagaggagcauga

SEQ ID NO: 25817 - RNA, 24 nt, Artificial Sequence
  Synthetic oligonucleotide: Ptpn6-5598
uaaagagggggcagaggagcauga

SEQ ID NO: 25818 - RNA, 18 nt, Artificial Sequence
  Synthetic oligonucleotide: Ptpn6-5599
accuggagcucaagcuga

SEQ ID NO: 25819 - RNA, 19 nt, Artificial Sequence
  Synthetic oligonucleotide: Ptpn6-5600
caccuggagcucaagcuga

SEQ ID NO: 25820 - RNA, 20 nt, Artificial Sequence
  Synthetic oligonucleotide: Ptpn6-1910
ccaccuggagcucaagcuga

SEQ ID NO: 25821 - RNA, 21 nt, Artificial Sequence
  Synthetic oligonucleotide: Ptpn6-5601
uccaccuggagcucaagcuga

SEQ ID NO: 25822 - RNA, 22 nt, Artificial Sequence
  Synthetic oligonucleotide: Ptpn6-5602
cuccaccuggagcucaagcuga

SEQ ID NO: 25823 - RNA, 23 nt, Artificial Sequence
  Synthetic oligonucleotide: Ptpn6-5603
gcuccaccuggagcucaagcuga

SEQ ID NO: 25824 - RNA, 24 nt, Artificial Sequence
  Synthetic oligonucleotide: Ptpn6-5604
agcuccaccuggagcucaagcuga

SEQ ID NO: 25825 - RNA, 18 nt, Artificial Sequence
  Synthetic oligonucleotide: Ptpn6-5605
ggcccagccaggaccaua

SEQ ID NO: 25826 - RNA, 19 nt, Artificial Sequence
  Synthetic oligonucleotide: Ptpn6-5606
aggcccagccaggaccaua

SEQ ID NO: 25827 - RNA, 20 nt, Artificial Sequence
  Synthetic oligonucleotide: Ptpn6-1532
uaggcccagccaggaccaua

SEQ ID NO: 25828 - RNA, 21 nt, Artificial Sequence
  Synthetic oligonucleotide: Ptpn6-5607
uuaggcccagccaggaccaua

SEQ ID NO: 25829 - RNA, 22 nt, Artificial Sequence
  Synthetic oligonucleotide: Ptpn6-5608
guuaggcccagccaggaccaua

SEQ ID NO: 25830 - RNA, 23 nt, Artificial Sequence
  Synthetic oligonucleotide: Ptpn6-5609
gguuaggcccagccaggaccaua

SEQ ID NO: 25831 - RNA, 24 nt, Artificial Sequence
  Synthetic oligonucleotide: Ptpn6-5610
ggguuaggcccagccaggaccaua

SEQ ID NO: 25832 - RNA, 18 nt, Artificial Sequence
  Synthetic oligonucleotide: Ptpn6-5611
cggaaaccaaagggccua

SEQ ID NO: 25833 - RNA, 19 nt, Artificial Sequence
  Synthetic oligonucleotide: Ptpn6-5612
gcggaaaccaaagggccua

SEQ ID NO: 25834 - RNA, 20 nt, Artificial Sequence
  Synthetic oligonucleotide: Ptpn6-959
ggcggaaaccaaagggccua

SEQ ID NO: 25835 - RNA, 21 nt, Artificial Sequence
  Synthetic oligonucleotide: Ptpn6-5613
aggcggaaaccaaagggccua

SEQ ID NO: 25836 - RNA, 22 nt, Artificial Sequence
  Synthetic oligonucleotide: Ptpn6-5614
uaggcggaaaccaaagggccua

SEQ ID NO: 25837 - RNA, 23 nt, Artificial Sequence
  Synthetic oligonucleotide: Ptpn6-5615
guaggcggaaaccaaagggccua

SEQ ID NO: 25838 - RNA, 24 nt, Artificial Sequence
  Synthetic oligonucleotide: Ptpn6-5616
cguaggcggaaaccaaagggccua

SEQ ID NO: 25839 - RNA, 18 nt, Artificial Sequence
  Synthetic oligonucleotide: Ptpn6-5617
gcggcgggguauugggua

SEQ ID NO: 25840 - RNA, 19 nt, Artificial Sequence
  Synthetic oligonucleotide: Ptpn6-5618
agcggcgggguauugggua

SEQ ID NO: 25841 - RNA, 20 nt, Artificial Sequence
  Synthetic oligonucleotide: Ptpn6-1041
gagcggcgggguauugggua

SEQ ID NO: 25842 - RNA, 21 nt, Artificial Sequence
  Synthetic oligonucleotide: Ptpn6-5619
agagcggcgggguauugggua

SEQ ID NO: 25843 - RNA, 22 nt, Artificial Sequence
  Synthetic oligonucleotide: Ptpn6-5620
cagagcggcgggguauugggua

SEQ ID NO: 25844 - RNA, 23 nt, Artificial Sequence
  Synthetic oligonucleotide: Ptpn6-5621
acagagcggcgggguauugggua

SEQ ID NO: 25845 - RNA, 24 nt, Artificial Sequence
  Synthetic oligonucleotide: Ptpn6-5622
gacagagcggcgggguauugggua

SEQ ID NO: 25846 - RNA, 18 nt, Artificial Sequence
  Synthetic oligonucleotide: Ptpn6-3002
ggacagcaucucucugua

SEQ ID NO: 25847 - RNA, 19 nt, Artificial Sequence
  Synthetic oligonucleotide: Ptpn6-3003
gggacagcaucucucugua

SEQ ID NO: 25848 - RNA, 20 nt, Artificial Sequence
  Synthetic oligonucleotide: Ptpn6-987
cgggacagcaucucucugua

SEQ ID NO: 25849 - RNA, 21 nt, Artificial Sequence
  Synthetic oligonucleotide: Ptpn6-3004
acgggacagcaucucucugua

SEQ ID NO: 25850 - RNA, 22 nt, Artificial Sequence
  Synthetic oligonucleotide: Ptpn6-3005
cacgggacagcaucucucugua

SEQ ID NO: 25851 - RNA, 23 nt, Artificial Sequence
  Synthetic oligonucleotide: Ptpn6-3006
ccacgggacagcaucucucugua

SEQ ID NO: 25852 - RNA, 24 nt, Artificial Sequence
  Synthetic oligonucleotide: Ptpn6-3007
cccacgggacagcaucucucugua

SEQ ID NO: 25853 - RNA, 18 nt, Artificial Sequence
  Synthetic oligonucleotide: Ptpn6-5623
guccaggggaaaauguua

SEQ ID NO: 25854 - RNA, 19 nt, Artificial Sequence
  Synthetic oligonucleotide: Ptpn6-5624
uguccaggggaaaauguua

SEQ ID NO: 25855 - RNA, 20 nt, Artificial Sequence
  Synthetic oligonucleotide: Ptpn6-1828
uuguccaggggaaaauguua

SEQ ID NO: 25856 - RNA, 21 nt, Artificial Sequence
  Synthetic oligonucleotide: Ptpn6-5625
cuuguccaggggaaaauguua

SEQ ID NO: 25857 - RNA, 22 nt, Artificial Sequence
  Synthetic oligonucleotide: Ptpn6-5626
acuuguccaggggaaaauguua

SEQ ID NO: 25858 - RNA, 23 nt, Artificial Sequence
  Synthetic oligonucleotide: Ptpn6-5627
cacuuguccaggggaaaauguua

SEQ ID NO: 25859 - RNA, 24 nt, Artificial Sequence
  Synthetic oligonucleotide: Ptpn6-5628
acacuuguccaggggaaaauguua

SEQ ID NO: 25860 - RNA, 18 nt, Artificial Sequence
  Synthetic oligonucleotide: Ptpn6-5629
ccucccuccaaaacuaac

SEQ ID NO: 25861 - RNA, 19 nt, Artificial Sequence
  Synthetic oligonucleotide: Ptpn6-5630
cccucccuccaaaacuaac

SEQ ID NO: 25862 - RNA, 20 nt, Artificial Sequence
  Synthetic oligonucleotide: Ptpn6-1208
ucccucccuccaaaacuaac

SEQ ID NO: 25863 - RNA, 21 nt, Artificial Sequence
  Synthetic oligonucleotide: Ptpn6-5631
cucccucccuccaaaacuaac

SEQ ID NO: 25864 - RNA, 22 nt, Artificial Sequence
  Synthetic oligonucleotide: Ptpn6-5632
ccucccucccuccaaaacuaac

SEQ ID NO: 25865 - RNA, 23 nt, Artificial Sequence
  Synthetic oligonucleotide: Ptpn6-5633
cccucccucccuccaaaacuaac

SEQ ID NO: 25866 - RNA, 24 nt, Artificial Sequence
  Synthetic oligonucleotide: Ptpn6-5634
gcccucccucccuccaaaacuaac

SEQ ID NO: 25867 - RNA, 18 nt, Artificial Sequence
  Synthetic oligonucleotide: Ptpn6-5635
cgggagaggaggagccac

SEQ ID NO: 25868 - RNA, 19 nt, Artificial Sequence
  Synthetic oligonucleotide: Ptpn6-5636
ccgggagaggaggagccac

SEQ ID NO: 25869 - RNA, 20 nt, Artificial Sequence
  Synthetic oligonucleotide: Ptpn6-1906
cccgggagaggaggagccac

SEQ ID NO: 25870 - RNA, 21 nt, Artificial Sequence
  Synthetic oligonucleotide: Ptpn6-5637
ccccgggagaggaggagccac

SEQ ID NO: 25871 - RNA, 22 nt, Artificial Sequence
  Synthetic oligonucleotide: Ptpn6-5638
cccccgggagaggaggagccac

SEQ ID NO: 25872 - RNA, 23 nt, Artificial Sequence
  Synthetic oligonucleotide: Ptpn6-5639
ucccccgggagaggaggagccac

SEQ ID NO: 25873 - RNA, 24 nt, Artificial Sequence
  Synthetic oligonucleotide: Ptpn6-5640
uucccccgggagaggaggagccac

SEQ ID NO: 25874 - RNA, 18 nt, Artificial Sequence
  Synthetic oligonucleotide: Ptpn6-5641
agccaccuggagcuccac

SEQ ID NO: 25875 - RNA, 19 nt, Artificial Sequence
  Synthetic oligonucleotide: Ptpn6-5642
gagccaccuggagcuccac

SEQ ID NO: 25876 - RNA, 20 nt, Artificial Sequence
  Synthetic oligonucleotide: Ptpn6-1908
ggagccaccuggagcuccac

SEQ ID NO: 25877 - RNA, 21 nt, Artificial Sequence
  Synthetic oligonucleotide: Ptpn6-5643
aggagccaccuggagcuccac

SEQ ID NO: 25878 - RNA, 22 nt, Artificial Sequence
  Synthetic oligonucleotide: Ptpn6-5644
gaggagccaccuggagcuccac

SEQ ID NO: 25879 - RNA, 23 nt, Artificial Sequence
  Synthetic oligonucleotide: Ptpn6-5645
ggaggagccaccuggagcuccac

SEQ ID NO: 25880 - RNA, 24 nt, Artificial Sequence
  Synthetic oligonucleotide: Ptpn6-5646
aggaggagccaccuggagcuccac

SEQ ID NO: 25881 - RNA, 18 nt, Artificial Sequence
  Synthetic oligonucleotide: Ptpn6-5647
uuggguaggggaacagac

SEQ ID NO: 25882 - RNA, 19 nt, Artificial Sequence
  Synthetic oligonucleotide: Ptpn6-5648
auuggguaggggaacagac

SEQ ID NO: 25883 - RNA, 20 nt, Artificial Sequence
  Synthetic oligonucleotide: Ptpn6-1918
uauuggguaggggaacagac

SEQ ID NO: 25884 - RNA, 21 nt, Artificial Sequence
  Synthetic oligonucleotide: Ptpn6-5649
guauuggguaggggaacagac

SEQ ID NO: 25885 - RNA, 22 nt, Artificial Sequence
  Synthetic oligonucleotide: Ptpn6-5650
gguauuggguaggggaacagac

SEQ ID NO: 25886 - RNA, 23 nt, Artificial Sequence
  Synthetic oligonucleotide: Ptpn6-5651
ggguauuggguaggggaacagac

SEQ ID NO: 25887 - RNA, 24 nt, Artificial Sequence
  Synthetic oligonucleotide: Ptpn6-5652
gggguauuggguaggggaacagac

SEQ ID NO: 25888 - RNA, 18 nt, Artificial Sequence
  Synthetic oligonucleotide: Ptpn6-5653
ccaaaacuaacaggagac

SEQ ID NO: 25889 - RNA, 19 nt, Artificial Sequence
  Synthetic oligonucleotide: Ptpn6-5654
uccaaaacuaacaggagac

SEQ ID NO: 25890 - RNA, 20 nt, Artificial Sequence
  Synthetic oligonucleotide: Ptpn6-1225
cuccaaaacuaacaggagac

SEQ ID NO: 25891 - RNA, 21 nt, Artificial Sequence
  Synthetic oligonucleotide: Ptpn6-5655
ccuccaaaacuaacaggagac

SEQ ID NO: 25892 - RNA, 22 nt, Artificial Sequence
  Synthetic oligonucleotide: Ptpn6-5656
cccuccaaaacuaacaggagac

SEQ ID NO: 25893 - RNA, 23 nt, Artificial Sequence
  Synthetic oligonucleotide: Ptpn6-5657
ucccuccaaaacuaacaggagac

SEQ ID NO: 25894 - RNA, 24 nt, Artificial Sequence
  Synthetic oligonucleotide: Ptpn6-5658
cucccuccaaaacuaacaggagac

SEQ ID NO: 25895 - RNA, 18 nt, Artificial Sequence
  Synthetic oligonucleotide: Ptpn6-5659
ggggaaguucauagggac

SEQ ID NO: 25896 - RNA, 19 nt, Artificial Sequence
  Synthetic oligonucleotide: Ptpn6-5660
aggggaaguucauagggac

SEQ ID NO: 25897 - RNA, 20 nt, Artificial Sequence
  Synthetic oligonucleotide: Ptpn6-1199
aaggggaaguucauagggac

SEQ ID NO: 25898 - RNA, 21 nt, Artificial Sequence
  Synthetic oligonucleotide: Ptpn6-5661
gaaggggaaguucauagggac

SEQ ID NO: 25899 - RNA, 22 nt, Artificial Sequence
  Synthetic oligonucleotide: Ptpn6-5662
ggaaggggaaguucauagggac

SEQ ID NO: 25900 - RNA, 23 nt, Artificial Sequence
  Synthetic oligonucleotide: Ptpn6-5663
gggaaggggaaguucauagggac

SEQ ID NO: 25901 - RNA, 24 nt, Artificial Sequence
  Synthetic oligonucleotide: Ptpn6-5664
cgggaaggggaaguucauagggac

SEQ ID NO: 25902 - RNA, 18 nt, Artificial Sequence
  Synthetic oligonucleotide: Ptpn6-5665
gcacugcagggacaaacc

SEQ ID NO: 25903 - RNA, 19 nt, Artificial Sequence
  Synthetic oligonucleotide: Ptpn6-5666
ggcacugcagggacaaacc

SEQ ID NO: 25904 - RNA, 20 nt, Artificial Sequence
  Synthetic oligonucleotide: Ptpn6-1885
uggcacugcagggacaaacc

SEQ ID NO: 25905 - RNA, 21 nt, Artificial Sequence
  Synthetic oligonucleotide: Ptpn6-5667
auggcacugcagggacaaacc

SEQ ID NO: 25906 - RNA, 22 nt, Artificial Sequence
  Synthetic oligonucleotide: Ptpn6-5668
aauggcacugcagggacaaacc

SEQ ID NO: 25907 - RNA, 23 nt, Artificial Sequence
  Synthetic oligonucleotide: Ptpn6-5669
caauggcacugcagggacaaacc

SEQ ID NO: 25908 - RNA, 24 nt, Artificial Sequence
  Synthetic oligonucleotide: Ptpn6-5670
ccaauggcacugcagggacaaacc

SEQ ID NO: 25909 - RNA, 18 nt, Artificial Sequence
  Synthetic oligonucleotide: Ptpn6-5671
ugugcaggcccacccacc

SEQ ID NO: 25910 - RNA, 19 nt, Artificial Sequence
  Synthetic oligonucleotide: Ptpn6-5672
cugugcaggcccacccacc

SEQ ID NO: 25911 - RNA, 20 nt, Artificial Sequence
  Synthetic oligonucleotide: Ptpn6-5673
ccugugcaggcccacccacc

SEQ ID NO: 25912 - RNA, 21 nt, Artificial Sequence
  Synthetic oligonucleotide: Ptpn6-5674
cccugugcaggcccacccacc

SEQ ID NO: 25913 - RNA, 22 nt, Artificial Sequence
  Synthetic oligonucleotide: Ptpn6-5675
ccccugugcaggcccacccacc

SEQ ID NO: 25914 - RNA, 23 nt, Artificial Sequence
  Synthetic oligonucleotide: Ptpn6-5676
cccccugugcaggcccacccacc

SEQ ID NO: 25915 - RNA, 24 nt, Artificial Sequence
  Synthetic oligonucleotide: Ptpn6-5677
acccccugugcaggcccacccacc

SEQ ID NO: 25916 - RNA, 18 nt, Artificial Sequence
  Synthetic oligonucleotide: Ptpn6-5678
gggagaggaggagccacc

SEQ ID NO: 25917 - RNA, 19 nt, Artificial Sequence
  Synthetic oligonucleotide: Ptpn6-5679
cgggagaggaggagccacc

SEQ ID NO: 25918 - RNA, 20 nt, Artificial Sequence
  Synthetic oligonucleotide: Ptpn6-1238
ccgggagaggaggagccacc

SEQ ID NO: 25919 - RNA, 21 nt, Artificial Sequence
  Synthetic oligonucleotide: Ptpn6-5680
cccgggagaggaggagccacc

SEQ ID NO: 25920 - RNA, 22 nt, Artificial Sequence
  Synthetic oligonucleotide: Ptpn6-5681
ccccgggagaggaggagccacc

SEQ ID NO: 25921 - RNA, 23 nt, Artificial Sequence
  Synthetic oligonucleotide: Ptpn6-5682
cccccgggagaggaggagccacc

SEQ ID NO: 25922 - RNA, 24 nt, Artificial Sequence
  Synthetic oligonucleotide: Ptpn6-5683
ucccccgggagaggaggagccacc

SEQ ID NO: 25923 - RNA, 18 nt, Artificial Sequence
  Synthetic oligonucleotide: Ptpn6-5684
gccaccuggagcuccacc

SEQ ID NO: 25924 - RNA, 19 nt, Artificial Sequence
  Synthetic oligonucleotide: Ptpn6-5685
agccaccuggagcuccacc

SEQ ID NO: 25925 - RNA, 20 nt, Artificial Sequence
  Synthetic oligonucleotide: Ptpn6-1055
gagccaccuggagcuccacc

SEQ ID NO: 25926 - RNA, 21 nt, Artificial Sequence
  Synthetic oligonucleotide: Ptpn6-5686
ggagccaccuggagcuccacc

SEQ ID NO: 25927 - RNA, 22 nt, Artificial Sequence
  Synthetic oligonucleotide: Ptpn6-5687
aggagccaccuggagcuccacc

SEQ ID NO: 25928 - RNA, 23 nt, Artificial Sequence
  Synthetic oligonucleotide: Ptpn6-5688
gaggagccaccuggagcuccacc

SEQ ID NO: 25929 - RNA, 24 nt, Artificial Sequence
  Synthetic oligonucleotide: Ptpn6-5689
ggaggagccaccuggagcuccacc

SEQ ID NO: 25930 - RNA, 18 nt, Artificial Sequence
  Synthetic oligonucleotide: Ptpn6-5690
uggguaggggaacagacc

SEQ ID NO: 25931 - RNA, 19 nt, Artificial Sequence
  Synthetic oligonucleotide: Ptpn6-5691
uuggguaggggaacagacc

SEQ ID NO: 25932 - RNA, 20 nt, Artificial Sequence
  Synthetic oligonucleotide: Ptpn6-1192
auuggguaggggaacagacc

SEQ ID NO: 25933 - RNA, 21 nt, Artificial Sequence
  Synthetic oligonucleotide: Ptpn6-5692
uauuggguaggggaacagacc

SEQ ID NO: 25934 - RNA, 22 nt, Artificial Sequence
  Synthetic oligonucleotide: Ptpn6-5693
guauuggguaggggaacagacc

SEQ ID NO: 25935 - RNA, 23 nt, Artificial Sequence
  Synthetic oligonucleotide: Ptpn6-5694
gguauuggguaggggaacagacc

SEQ ID NO: 25936 - RNA, 24 nt, Artificial Sequence
  Synthetic oligonucleotide: Ptpn6-5695
ggguauuggguaggggaacagacc

SEQ ID NO: 25937 - RNA, 18 nt, Artificial Sequence
  Synthetic oligonucleotide: Ptpn6-5696
gagguguugugagcuacc

SEQ ID NO: 25938 - RNA, 19 nt, Artificial Sequence
  Synthetic oligonucleotide: Ptpn6-5697
ugagguguugugagcuacc

SEQ ID NO: 25939 - RNA, 20 nt, Artificial Sequence
  Synthetic oligonucleotide: Ptpn6-1808
uugagguguugugagcuacc

SEQ ID NO: 25940 - RNA, 21 nt, Artificial Sequence
  Synthetic oligonucleotide: Ptpn6-5698
uuugagguguugugagcuacc

SEQ ID NO: 25941 - RNA, 22 nt, Artificial Sequence
  Synthetic oligonucleotide: Ptpn6-5699
guuugagguguugugagcuacc

SEQ ID NO: 25942 - RNA, 23 nt, Artificial Sequence
  Synthetic oligonucleotide: Ptpn6-5700
uguuugagguguugugagcuacc

SEQ ID NO: 25943 - RNA, 24 nt, Artificial Sequence
  Synthetic oligonucleotide: Ptpn6-5701
auguuugagguguugugagcuacc

SEQ ID NO: 25944 - RNA, 18 nt, Artificial Sequence
  Synthetic oligonucleotide: Ptpn6-5702
agguguugugagcuaccc

SEQ ID NO: 25945 - RNA, 19 nt, Artificial Sequence
  Synthetic oligonucleotide: Ptpn6-5703
gagguguugugagcuaccc

SEQ ID NO: 25946 - RNA, 20 nt, Artificial Sequence
  Synthetic oligonucleotide: Ptpn6-993
ugagguguugugagcuaccc

SEQ ID NO: 25947 - RNA, 21 nt, Artificial Sequence
  Synthetic oligonucleotide: Ptpn6-5704
uugagguguugugagcuaccc

SEQ ID NO: 25948 - RNA, 22 nt, Artificial Sequence
  Synthetic oligonucleotide: Ptpn6-5705
uuugagguguugugagcuaccc

SEQ ID NO: 25949 - RNA, 23 nt, Artificial Sequence
  Synthetic oligonucleotide: Ptpn6-5706
guuugagguguugugagcuaccc

SEQ ID NO: 25950 - RNA, 24 nt, Artificial Sequence
  Synthetic oligonucleotide: Ptpn6-5707
uguuugagguguugugagcuaccc

SEQ ID NO: 25951 - RNA, 18 nt, Artificial Sequence
  Synthetic oligonucleotide: Ptpn6-3040
ggugcccgggacuuaccc

SEQ ID NO: 25952 - RNA, 19 nt, Artificial Sequence
  Synthetic oligonucleotide: Ptpn6-3041
uggugcccgggacuuaccc

SEQ ID NO: 25953 - RNA, 20 nt, Artificial Sequence
  Synthetic oligonucleotide: Ptpn6-1861
auggugcccgggacuuaccc

SEQ ID NO: 25954 - RNA, 21 nt, Artificial Sequence
  Synthetic oligonucleotide: Ptpn6-3042
gauggugcccgggacuuaccc

SEQ ID NO: 25955 - RNA, 22 nt, Artificial Sequence
  Synthetic oligonucleotide: Ptpn6-3043
cgauggugcccgggacuuaccc

SEQ ID NO: 25956 - RNA, 23 nt, Artificial Sequence
  Synthetic oligonucleotide: Ptpn6-3044
ccgauggugcccgggacuuaccc

SEQ ID NO: 25957 - RNA, 24 nt, Artificial Sequence
  Synthetic oligonucleotide: Ptpn6-3045
cccgauggugcccgggacuuaccc

SEQ ID NO: 25958 - RNA, 18 nt, Artificial Sequence
  Synthetic oligonucleotide: Ptpn6-5708
ccagggccgccuuccccc

SEQ ID NO: 25959 - RNA, 19 nt, Artificial Sequence
  Synthetic oligonucleotide: Ptpn6-5709
uccagggccgccuuccccc

SEQ ID NO: 25960 - RNA, 20 nt, Artificial Sequence
  Synthetic oligonucleotide: Ptpn6-1051
guccagggccgccuuccccc

SEQ ID NO: 25961 - RNA, 21 nt, Artificial Sequence
  Synthetic oligonucleotide: Ptpn6-5710
gguccagggccgccuuccccc

SEQ ID NO: 25962 - RNA, 22 nt, Artificial Sequence
  Synthetic oligonucleotide: Ptpn6-5711
ugguccagggccgccuuccccc

SEQ ID NO: 25963 - RNA, 23 nt, Artificial Sequence
  Synthetic oligonucleotide: Ptpn6-5712
cugguccagggccgccuuccccc

SEQ ID NO: 25964 - RNA, 24 nt, Artificial Sequence
  Synthetic oligonucleotide: Ptpn6-5713
gcugguccagggccgccuuccccc

SEQ ID NO: 25965 - RNA, 18 nt, Artificial Sequence
  Synthetic oligonucleotide: Ptpn6-5714
agccucucaaccugcccc

SEQ ID NO: 25966 - RNA, 19 nt, Artificial Sequence
  Synthetic oligonucleotide: Ptpn6-5715
cagccucucaaccugcccc

SEQ ID NO: 25967 - RNA, 20 nt, Artificial Sequence
  Synthetic oligonucleotide: Ptpn6-1513
ccagccucucaaccugcccc

SEQ ID NO: 25968 - RNA, 21 nt, Artificial Sequence
  Synthetic oligonucleotide: Ptpn6-5716
uccagccucucaaccugcccc

SEQ ID NO: 25969 - RNA, 22 nt, Artificial Sequence
  Synthetic oligonucleotide: Ptpn6-5717
cuccagccucucaaccugcccc

SEQ ID NO: 25970 - RNA, 23 nt, Artificial Sequence
  Synthetic oligonucleotide: Ptpn6-5718
acuccagccucucaaccugcccc

SEQ ID NO: 25971 - RNA, 24 nt, Artificial Sequence
  Synthetic oligonucleotide: Ptpn6-5719
cacuccagccucucaaccugcccc

SEQ ID NO: 25972 - RNA, 18 nt, Artificial Sequence
  Synthetic oligonucleotide: Ptpn6-5720
uccagggccgccuucccc

SEQ ID NO: 25973 - RNA, 19 nt, Artificial Sequence
  Synthetic oligonucleotide: Ptpn6-5721
guccagggccgccuucccc

SEQ ID NO: 25974 - RNA, 20 nt, Artificial Sequence
  Synthetic oligonucleotide: Ptpn6-1052
gguccagggccgccuucccc

SEQ ID NO: 25975 - RNA, 21 nt, Artificial Sequence
  Synthetic oligonucleotide: Ptpn6-5722
ugguccagggccgccuucccc

SEQ ID NO: 25976 - RNA, 22 nt, Artificial Sequence
  Synthetic oligonucleotide: Ptpn6-5723
cugguccagggccgccuucccc

SEQ ID NO: 25977 - RNA, 23 nt, Artificial Sequence
  Synthetic oligonucleotide: Ptpn6-5724
gcugguccagggccgccuucccc

SEQ ID NO: 25978 - RNA, 24 nt, Artificial Sequence
  Synthetic oligonucleotide: Ptpn6-5725
ugcugguccagggccgccuucccc

SEQ ID NO: 25979 - RNA, 18 nt, Artificial Sequence
  Synthetic oligonucleotide: Ptpn6-5726
ucagguaggguuaggccc

SEQ ID NO: 25980 - RNA, 19 nt, Artificial Sequence
  Synthetic oligonucleotide: Ptpn6-5727
cucagguaggguuaggccc

SEQ ID NO: 25981 - RNA, 20 nt, Artificial Sequence
  Synthetic oligonucleotide: Ptpn6-1524
ccucagguaggguuaggccc

SEQ ID NO: 25982 - RNA, 21 nt, Artificial Sequence
  Synthetic oligonucleotide: Ptpn6-5728
gccucagguaggguuaggccc

SEQ ID NO: 25983 - RNA, 22 nt, Artificial Sequence
  Synthetic oligonucleotide: Ptpn6-5729
agccucagguaggguuaggccc

SEQ ID NO: 25984 - RNA, 23 nt, Artificial Sequence
  Synthetic oligonucleotide: Ptpn6-5730
gagccucagguaggguuaggccc

SEQ ID NO: 25985 - RNA, 24 nt, Artificial Sequence
  Synthetic oligonucleotide: Ptpn6-5731
ggagccucagguaggguuaggccc

SEQ ID NO: 25986 - RNA, 18 nt, Artificial Sequence
  Synthetic oligonucleotide: Ptpn6-5732
cagccucucaaccugccc

SEQ ID NO: 25987 - RNA, 19 nt, Artificial Sequence
  Synthetic oligonucleotide: Ptpn6-5733
ccagccucucaaccugccc

SEQ ID NO: 25988 - RNA, 20 nt, Artificial Sequence
  Synthetic oligonucleotide: Ptpn6-1512
uccagccucucaaccugccc

SEQ ID NO: 25989 - RNA, 21 nt, Artificial Sequence
  Synthetic oligonucleotide: Ptpn6-5734
cuccagccucucaaccugccc

SEQ ID NO: 25990 - RNA, 22 nt, Artificial Sequence
  Synthetic oligonucleotide: Ptpn6-5735
acuccagccucucaaccugccc

SEQ ID NO: 25991 - RNA, 23 nt, Artificial Sequence
  Synthetic oligonucleotide: Ptpn6-5736
cacuccagccucucaaccugccc

SEQ ID NO: 25992 - RNA, 24 nt, Artificial Sequence
  Synthetic oligonucleotide: Ptpn6-5737
ccacuccagccucucaaccugccc

SEQ ID NO: 25993 - RNA, 18 nt, Artificial Sequence
  Synthetic oligonucleotide: Ptpn6-5738
guccagggccgccuuccc

SEQ ID NO: 25994 - RNA, 19 nt, Artificial Sequence
  Synthetic oligonucleotide: Ptpn6-5739
gguccagggccgccuuccc

SEQ ID NO: 25995 - RNA, 20 nt, Artificial Sequence
  Synthetic oligonucleotide: Ptpn6-1898
ugguccagggccgccuuccc

SEQ ID NO: 25996 - RNA, 21 nt, Artificial Sequence
  Synthetic oligonucleotide: Ptpn6-5740
cugguccagggccgccuuccc

SEQ ID NO: 25997 - RNA, 22 nt, Artificial Sequence
  Synthetic oligonucleotide: Ptpn6-5741
gcugguccagggccgccuuccc

SEQ ID NO: 25998 - RNA, 23 nt, Artificial Sequence
  Synthetic oligonucleotide: Ptpn6-5742
ugcugguccagggccgccuuccc

SEQ ID NO: 25999 - RNA, 24 nt, Artificial Sequence
  Synthetic oligonucleotide: Ptpn6-5743
cugcugguccagggccgccuuccc

SEQ ID NO: 26000 - RNA, 18 nt, Artificial Sequence
  Synthetic oligonucleotide: Ptpn6-5744
gaggcagaagcaggagcc

SEQ ID NO: 26001 - RNA, 19 nt, Artificial Sequence
  Synthetic oligonucleotide: Ptpn6-5745
ggaggcagaagcaggagcc

SEQ ID NO: 26002 - RNA, 20 nt, Artificial Sequence
  Synthetic oligonucleotide: Ptpn6-1816
aggaggcagaagcaggagcc

SEQ ID NO: 26003 - RNA, 21 nt, Artificial Sequence
  Synthetic oligonucleotide: Ptpn6-5746
caggaggcagaagcaggagcc

SEQ ID NO: 26004 - RNA, 22 nt, Artificial Sequence
  Synthetic oligonucleotide: Ptpn6-5747
gcaggaggcagaagcaggagcc

SEQ ID NO: 26005 - RNA, 23 nt, Artificial Sequence
  Synthetic oligonucleotide: Ptpn6-5748
agcaggaggcagaagcaggagcc

SEQ ID NO: 26006 - RNA, 24 nt, Artificial Sequence
  Synthetic oligonucleotide: Ptpn6-5749
aagcaggaggcagaagcaggagcc

SEQ ID NO: 26007 - RNA, 18 nt, Artificial Sequence
  Synthetic oligonucleotide: Ptpn6-5750
cucagguaggguuaggcc

SEQ ID NO: 26008 - RNA, 19 nt, Artificial Sequence
  Synthetic oligonucleotide: Ptpn6-5751
ccucagguaggguuaggcc

SEQ ID NO: 26009 - RNA, 20 nt, Artificial Sequence
  Synthetic oligonucleotide: Ptpn6-2261
gccucagguaggguuaggcc

SEQ ID NO: 26010 - RNA, 21 nt, Artificial Sequence
  Synthetic oligonucleotide: Ptpn6-5752
agccucagguaggguuaggcc

SEQ ID NO: 26011 - RNA, 22 nt, Artificial Sequence
  Synthetic oligonucleotide: Ptpn6-5753
gagccucagguaggguuaggcc

SEQ ID NO: 26012 - RNA, 23 nt, Artificial Sequence
  Synthetic oligonucleotide: Ptpn6-5754
ggagccucagguaggguuaggcc

SEQ ID NO: 26013 - RNA, 24 nt, Artificial Sequence
  Synthetic oligonucleotide: Ptpn6-5755
aggagccucagguaggguuaggcc

SEQ ID NO: 26014 - RNA, 18 nt, Artificial Sequence
  Synthetic oligonucleotide: Ptpn6-5756
ccagccucucaaccugcc

SEQ ID NO: 26015 - RNA, 19 nt, Artificial Sequence
  Synthetic oligonucleotide: Ptpn6-5757
uccagccucucaaccugcc

SEQ ID NO: 26016 - RNA, 20 nt, Artificial Sequence
  Synthetic oligonucleotide: Ptpn6-2267
cuccagccucucaaccugcc

SEQ ID NO: 26017 - RNA, 21 nt, Artificial Sequence
  Synthetic oligonucleotide: Ptpn6-5758
acuccagccucucaaccugcc

SEQ ID NO: 26018 - RNA, 22 nt, Artificial Sequence
  Synthetic oligonucleotide: Ptpn6-5759
cacuccagccucucaaccugcc

SEQ ID NO: 26019 - RNA, 23 nt, Artificial Sequence
  Synthetic oligonucleotide: Ptpn6-5760
ccacuccagccucucaaccugcc

SEQ ID NO: 26020 - RNA, 24 nt, Artificial Sequence
  Synthetic oligonucleotide: Ptpn6-5761
cccacuccagccucucaaccugcc

SEQ ID NO: 26021 - RNA, 18 nt, Artificial Sequence
  Synthetic oligonucleotide: Ptpn6-3064
ugggaccccgauggugcc

SEQ ID NO: 26022 - RNA, 19 nt, Artificial Sequence
  Synthetic oligonucleotide: Ptpn6-3065
cugggaccccgauggugcc

SEQ ID NO: 26023 - RNA, 20 nt, Artificial Sequence
  Synthetic oligonucleotide: Ptpn6-1187
acugggaccccgauggugcc

SEQ ID NO: 26024 - RNA, 21 nt, Artificial Sequence
  Synthetic oligonucleotide: Ptpn6-5762
gacugggaccccgauggugcc

SEQ ID NO: 26025 - RNA, 22 nt, Artificial Sequence
  Synthetic oligonucleotide: Ptpn6-5763
agacugggaccccgauggugcc

SEQ ID NO: 26026 - RNA, 23 nt, Artificial Sequence
  Synthetic oligonucleotide: Ptpn6-5764
gagacugggaccccgauggugcc

SEQ ID NO: 26027 - RNA, 24 nt, Artificial Sequence
  Synthetic oligonucleotide: Ptpn6-5765
ggagacugggaccccgauggugcc

SEQ ID NO: 26028 - RNA, 18 nt, Artificial Sequence
  Synthetic oligonucleotide: Ptpn6-5766
ccuggacuaauagucucc

SEQ ID NO: 26029 - RNA, 19 nt, Artificial Sequence
  Synthetic oligonucleotide: Ptpn6-5767
cccuggacuaauagucucc

SEQ ID NO: 26030 - RNA, 20 nt, Artificial Sequence
  Synthetic oligonucleotide: Ptpn6-986
acccuggacuaauagucucc

SEQ ID NO: 26031 - RNA, 21 nt, Artificial Sequence
  Synthetic oligonucleotide: Ptpn6-5768
aacccuggacuaauagucucc

SEQ ID NO: 26032 - RNA, 22 nt, Artificial Sequence
  Synthetic oligonucleotide: Ptpn6-5769
aaacccuggacuaauagucucc

SEQ ID NO: 26033 - RNA, 23 nt, Artificial Sequence
  Synthetic oligonucleotide: Ptpn6-5770
caaacccuggacuaauagucucc

SEQ ID NO: 26034 - RNA, 24 nt, Artificial Sequence
  Synthetic oligonucleotide: Ptpn6-5771
acaaacccuggacuaauagucucc

SEQ ID NO: 26035 - RNA, 18 nt, Artificial Sequence
  Synthetic oligonucleotide: Ptpn6-5772
acagauacacacuugucc

SEQ ID NO: 26036 - RNA, 19 nt, Artificial Sequence
  Synthetic oligonucleotide: Ptpn6-5773
aacagauacacacuugucc

SEQ ID NO: 26037 - RNA, 20 nt, Artificial Sequence
  Synthetic oligonucleotide: Ptpn6-1028
gaacagauacacacuugucc

SEQ ID NO: 26038 - RNA, 21 nt, Artificial Sequence
  Synthetic oligonucleotide: Ptpn6-5774
agaacagauacacacuugucc

SEQ ID NO: 26039 - RNA, 22 nt, Artificial Sequence
  Synthetic oligonucleotide: Ptpn6-5775
gagaacagauacacacuugucc

SEQ ID NO: 26040 - RNA, 23 nt, Artificial Sequence
  Synthetic oligonucleotide: Ptpn6-5776
agagaacagauacacacuugucc

SEQ ID NO: 26041 - RNA, 24 nt, Artificial Sequence
  Synthetic oligonucleotide: Ptpn6-5777
gagagaacagauacacacuugucc

SEQ ID NO: 26042 - RNA, 18 nt, Artificial Sequence
  Synthetic oligonucleotide: Ptpn6-5778
uaagcaggaggcagaagc

SEQ ID NO: 26043 - RNA, 19 nt, Artificial Sequence
  Synthetic oligonucleotide: Ptpn6-5779
cuaagcaggaggcagaagc

SEQ ID NO: 26044 - RNA, 20 nt, Artificial Sequence
  Synthetic oligonucleotide: Ptpn6-1256
ccuaagcaggaggcagaagc

SEQ ID NO: 26045 - RNA, 21 nt, Artificial Sequence
  Synthetic oligonucleotide: Ptpn6-5780
uccuaagcaggaggcagaagc

SEQ ID NO: 26046 - RNA, 22 nt, Artificial Sequence
  Synthetic oligonucleotide: Ptpn6-5781
guccuaagcaggaggcagaagc

SEQ ID NO: 26047 - RNA, 23 nt, Artificial Sequence
  Synthetic oligonucleotide: Ptpn6-5782
gguccuaagcaggaggcagaagc

SEQ ID NO: 26048 - RNA, 24 nt, Artificial Sequence
  Synthetic oligonucleotide: Ptpn6-5783
agguccuaagcaggaggcagaagc

SEQ ID NO: 26049 - RNA, 18 nt, Artificial Sequence
  Synthetic oligonucleotide: Ptpn6-5784
gggggacagguccuaagc

SEQ ID NO: 26050 - RNA, 19 nt, Artificial Sequence
  Synthetic oligonucleotide: Ptpn6-5785
agggggacagguccuaagc

SEQ ID NO: 26051 - RNA, 20 nt, Artificial Sequence
  Synthetic oligonucleotide: Ptpn6-1196
cagggggacagguccuaagc

SEQ ID NO: 26052 - RNA, 21 nt, Artificial Sequence
  Synthetic oligonucleotide: Ptpn6-5786
ccagggggacagguccuaagc

SEQ ID NO: 26053 - RNA, 22 nt, Artificial Sequence
  Synthetic oligonucleotide: Ptpn6-5787
cccagggggacagguccuaagc

SEQ ID NO: 26054 - RNA, 23 nt, Artificial Sequence
  Synthetic oligonucleotide: Ptpn6-5788
acccagggggacagguccuaagc

SEQ ID NO: 26055 - RNA, 24 nt, Artificial Sequence
  Synthetic oligonucleotide: Ptpn6-5789
uacccagggggacagguccuaagc

SEQ ID NO: 26056 - RNA, 18 nt, Artificial Sequence
  Synthetic oligonucleotide: Ptpn6-5790
ggcaggguuaggcccagc

SEQ ID NO: 26057 - RNA, 19 nt, Artificial Sequence
  Synthetic oligonucleotide: Ptpn6-5791
gggcaggguuaggcccagc

SEQ ID NO: 26058 - RNA, 20 nt, Artificial Sequence
  Synthetic oligonucleotide: Ptpn6-2262
ggggcaggguuaggcccagc

SEQ ID NO: 26059 - RNA, 21 nt, Artificial Sequence
  Synthetic oligonucleotide: Ptpn6-5792
uggggcaggguuaggcccagc

SEQ ID NO: 26060 - RNA, 22 nt, Artificial Sequence
  Synthetic oligonucleotide: Ptpn6-5793
cuggggcaggguuaggcccagc

SEQ ID NO: 26061 - RNA, 23 nt, Artificial Sequence
  Synthetic oligonucleotide: Ptpn6-5794
ccuggggcaggguuaggcccagc

SEQ ID NO: 26062 - RNA, 24 nt, Artificial Sequence
  Synthetic oligonucleotide: Ptpn6-5795
cccuggggcaggguuaggcccagc

SEQ ID NO: 26063 - RNA, 18 nt, Artificial Sequence
  Synthetic oligonucleotide: Ptpn6-5796
agaggagcaugagugagc

SEQ ID NO: 26064 - RNA, 19 nt, Artificial Sequence
  Synthetic oligonucleotide: Ptpn6-5797
cagaggagcaugagugagc

SEQ ID NO: 26065 - RNA, 20 nt, Artificial Sequence
  Synthetic oligonucleotide: Ptpn6-1034
gcagaggagcaugagugagc

SEQ ID NO: 26066 - RNA, 21 nt, Artificial Sequence
  Synthetic oligonucleotide: Ptpn6-5798
ggcagaggagcaugagugagc

SEQ ID NO: 26067 - RNA, 22 nt, Artificial Sequence
  Synthetic oligonucleotide: Ptpn6-5799
gggcagaggagcaugagugagc

SEQ ID NO: 26068 - RNA, 23 nt, Artificial Sequence
  Synthetic oligonucleotide: Ptpn6-5800
ggggcagaggagcaugagugagc

SEQ ID NO: 26069 - RNA, 24 nt, Artificial Sequence
  Synthetic oligonucleotide: Ptpn6-5801
gggggcagaggagcaugagugagc

SEQ ID NO: 26070 - RNA, 18 nt, Artificial Sequence
  Synthetic oligonucleotide: Ptpn6-5802
gccacggcagagggccgc

SEQ ID NO: 26071 - RNA, 19 nt, Artificial Sequence
  Synthetic oligonucleotide: Ptpn6-5803
agccacggcagagggccgc

SEQ ID NO: 26072 - RNA, 20 nt, Artificial Sequence
  Synthetic oligonucleotide: Ptpn6-991
aagccacggcagagggccgc

SEQ ID NO: 26073 - RNA, 21 nt, Artificial Sequence
  Synthetic oligonucleotide: Ptpn6-5804
gaagccacggcagagggccgc

SEQ ID NO: 26074 - RNA, 22 nt, Artificial Sequence
  Synthetic oligonucleotide: Ptpn6-5805
ggaagccacggcagagggccgc

SEQ ID NO: 26075 - RNA, 23 nt, Artificial Sequence
  Synthetic oligonucleotide: Ptpn6-5806
gggaagccacggcagagggccgc

SEQ ID NO: 26076 - RNA, 24 nt, Artificial Sequence
  Synthetic oligonucleotide: Ptpn6-5807
ggggaagccacggcagagggccgc

SEQ ID NO: 26077 - RNA, 18 nt, Artificial Sequence
  Synthetic oligonucleotide: Ptpn6-5808
aagcaggagcccagaggc

SEQ ID NO: 26078 - RNA, 19 nt, Artificial Sequence
  Synthetic oligonucleotide: Ptpn6-5809
gaagcaggagcccagaggc

SEQ ID NO: 26079 - RNA, 20 nt, Artificial Sequence
  Synthetic oligonucleotide: Ptpn6-1248
agaagcaggagcccagaggc

SEQ ID NO: 26080 - RNA, 21 nt, Artificial Sequence
  Synthetic oligonucleotide: Ptpn6-5810
cagaagcaggagcccagaggc

SEQ ID NO: 26081 - RNA, 22 nt, Artificial Sequence
  Synthetic oligonucleotide: Ptpn6-5811
gcagaagcaggagcccagaggc

SEQ ID NO: 26082 - RNA, 23 nt, Artificial Sequence
  Synthetic oligonucleotide: Ptpn6-5812
ggcagaagcaggagcccagaggc

SEQ ID NO: 26083 - RNA, 24 nt, Artificial Sequence
  Synthetic oligonucleotide: Ptpn6-5813
aggcagaagcaggagcccagaggc

SEQ ID NO: 26084 - RNA, 18 nt, Artificial Sequence
  Synthetic oligonucleotide: Ptpn6-5814
agguggggcggggcuggc

SEQ ID NO: 26085 - RNA, 19 nt, Artificial Sequence
  Synthetic oligonucleotide: Ptpn6-5815
cagguggggcggggcuggc

SEQ ID NO: 26086 - RNA, 20 nt, Artificial Sequence
  Synthetic oligonucleotide: Ptpn6-1893
acagguggggcggggcuggc

SEQ ID NO: 26087 - RNA, 21 nt, Artificial Sequence
  Synthetic oligonucleotide: Ptpn6-5816
gacagguggggcggggcuggc

SEQ ID NO: 26088 - RNA, 22 nt, Artificial Sequence
  Synthetic oligonucleotide: Ptpn6-5817
ggacagguggggcggggcuggc

SEQ ID NO: 26089 - RNA, 23 nt, Artificial Sequence
  Synthetic oligonucleotide: Ptpn6-5818
aggacagguggggcggggcuggc

SEQ ID NO: 26090 - RNA, 24 nt, Artificial Sequence
  Synthetic oligonucleotide: Ptpn6-5819
aaggacagguggggcggggcuggc

SEQ ID NO: 26091 - RNA, 18 nt, Artificial Sequence
  Synthetic oligonucleotide: Ptpn6-5820
ccaggccaauggcacugc

SEQ ID NO: 26092 - RNA, 19 nt, Artificial Sequence
  Synthetic oligonucleotide: Ptpn6-5821
gccaggccaauggcacugc

SEQ ID NO: 26093 - RNA, 20 nt, Artificial Sequence
  Synthetic oligonucleotide: Ptpn6-1217
ugccaggccaauggcacugc

SEQ ID NO: 26094 - RNA, 21 nt, Artificial Sequence
  Synthetic oligonucleotide: Ptpn6-5822
cugccaggccaauggcacugc

SEQ ID NO: 26095 - RNA, 22 nt, Artificial Sequence
  Synthetic oligonucleotide: Ptpn6-5823
ccugccaggccaauggcacugc

SEQ ID NO: 26096 - RNA, 23 nt, Artificial Sequence
  Synthetic oligonucleotide: Ptpn6-5824
gccugccaggccaauggcacugc

SEQ ID NO: 26097 - RNA, 24 nt, Artificial Sequence
  Synthetic oligonucleotide: Ptpn6-5825
ugccugccaggccaauggcacugc

SEQ ID NO: 26098 - RNA, 18 nt, Artificial Sequence
  Synthetic oligonucleotide: Ptpn6-5826
cugggaccccgauggugc

SEQ ID NO: 26099 - RNA, 19 nt, Artificial Sequence
  Synthetic oligonucleotide: Ptpn6-5827
acugggaccccgauggugc

SEQ ID NO: 26100 - RNA, 20 nt, Artificial Sequence
  Synthetic oligonucleotide: Ptpn6-1859
gacugggaccccgauggugc

SEQ ID NO: 26101 - RNA, 21 nt, Artificial Sequence
  Synthetic oligonucleotide: Ptpn6-5828
agacugggaccccgauggugc

SEQ ID NO: 26102 - RNA, 22 nt, Artificial Sequence
  Synthetic oligonucleotide: Ptpn6-5829
gagacugggaccccgauggugc

SEQ ID NO: 26103 - RNA, 23 nt, Artificial Sequence
  Synthetic oligonucleotide: Ptpn6-5830
ggagacugggaccccgauggugc

SEQ ID NO: 26104 - RNA, 24 nt, Artificial Sequence
  Synthetic oligonucleotide: Ptpn6-5831
aggagacugggaccccgauggugc

SEQ ID NO: 26105 - RNA, 18 nt, Artificial Sequence
  Synthetic oligonucleotide: Ptpn6-5832
gggguccucacaccuugc

SEQ ID NO: 26106 - RNA, 19 nt, Artificial Sequence
  Synthetic oligonucleotide: Ptpn6-5833
ggggguccucacaccuugc

SEQ ID NO: 26107 - RNA, 20 nt, Artificial Sequence
  Synthetic oligonucleotide: Ptpn6-1185
cggggguccucacaccuugc

SEQ ID NO: 26108 - RNA, 21 nt, Artificial Sequence
  Synthetic oligonucleotide: Ptpn6-5834
ccggggguccucacaccuugc

SEQ ID NO: 26109 - RNA, 22 nt, Artificial Sequence
  Synthetic oligonucleotide: Ptpn6-5835
gccggggguccucacaccuugc

SEQ ID NO: 26110 - RNA, 23 nt, Artificial Sequence
  Synthetic oligonucleotide: Ptpn6-5836
agccggggguccucacaccuugc

SEQ ID NO: 26111 - RNA, 24 nt, Artificial Sequence
  Synthetic oligonucleotide: Ptpn6-5837
gagccggggguccucacaccuugc

SEQ ID NO: 26112 - RNA, 18 nt, Artificial Sequence
  Synthetic oligonucleotide: Ptpn6-5838
cccuggacuaauagucuc

SEQ ID NO: 26113 - RNA, 19 nt, Artificial Sequence
  Synthetic oligonucleotide: Ptpn6-5839
acccuggacuaauagucuc

SEQ ID NO: 26114 - RNA, 20 nt, Artificial Sequence
  Synthetic oligonucleotide: Ptpn6-1886
aacccuggacuaauagucuc

SEQ ID NO: 26115 - RNA, 21 nt, Artificial Sequence
  Synthetic oligonucleotide: Ptpn6-5840
aaacccuggacuaauagucuc

SEQ ID NO: 26116 - RNA, 22 nt, Artificial Sequence
  Synthetic oligonucleotide: Ptpn6-5841
caaacccuggacuaauagucuc

SEQ ID NO: 26117 - RNA, 23 nt, Artificial Sequence
  Synthetic oligonucleotide: Ptpn6-5842
acaaacccuggacuaauagucuc

SEQ ID NO: 26118 - RNA, 24 nt, Artificial Sequence
  Synthetic oligonucleotide: Ptpn6-5843
gacaaacccuggacuaauagucuc

SEQ ID NO: 26119 - RNA, 18 nt, Artificial Sequence
  Synthetic oligonucleotide: Ptpn6-5844
caggcccgccugcugguc

SEQ ID NO: 26120 - RNA, 19 nt, Artificial Sequence
  Synthetic oligonucleotide: Ptpn6-5845
gcaggcccgccugcugguc

SEQ ID NO: 26121 - RNA, 20 nt, Artificial Sequence
  Synthetic oligonucleotide: Ptpn6-1897
agcaggcccgccugcugguc

SEQ ID NO: 26122 - RNA, 21 nt, Artificial Sequence
  Synthetic oligonucleotide: Ptpn6-5846
cagcaggcccgccugcugguc

SEQ ID NO: 26123 - RNA, 22 nt, Artificial Sequence
  Synthetic oligonucleotide: Ptpn6-5847
acagcaggcccgccugcugguc

SEQ ID NO: 26124 - RNA, 23 nt, Artificial Sequence
  Synthetic oligonucleotide: Ptpn6-5848
uacagcaggcccgccugcugguc

SEQ ID NO: 26125 - RNA, 24 nt, Artificial Sequence
  Synthetic oligonucleotide: Ptpn6-5849
guacagcaggcccgccugcugguc

SEQ ID NO: 26126 - RNA, 18 nt, Artificial Sequence
  Synthetic oligonucleotide: Ptpn6-5850
aacagauacacacuuguc

SEQ ID NO: 26127 - RNA, 19 nt, Artificial Sequence
  Synthetic oligonucleotide: Ptpn6-5851
gaacagauacacacuuguc

SEQ ID NO: 26128 - RNA, 20 nt, Artificial Sequence
  Synthetic oligonucleotide: Ptpn6-1824
agaacagauacacacuuguc

SEQ ID NO: 26129 - RNA, 21 nt, Artificial Sequence
  Synthetic oligonucleotide: Ptpn6-5852
gagaacagauacacacuuguc

SEQ ID NO: 26130 - RNA, 22 nt, Artificial Sequence
  Synthetic oligonucleotide: Ptpn6-5853
agagaacagauacacacuuguc

SEQ ID NO: 26131 - RNA, 23 nt, Artificial Sequence
  Synthetic oligonucleotide: Ptpn6-5854
gagagaacagauacacacuuguc

SEQ ID NO: 26132 - RNA, 24 nt, Artificial Sequence
  Synthetic oligonucleotide: Ptpn6-5855
ggagagaacagauacacacuuguc

SEQ ID NO: 26133 - RNA, 18 nt, Artificial Sequence
  Synthetic oligonucleotide: Ptpn6-5856
cauagggaggagcuguuc

SEQ ID NO: 26134 - RNA, 19 nt, Artificial Sequence
  Synthetic oligonucleotide: Ptpn6-5857
ccauagggaggagcuguuc

SEQ ID NO: 26135 - RNA, 20 nt, Artificial Sequence
  Synthetic oligonucleotide: Ptpn6-1534
accauagggaggagcuguuc

SEQ ID NO: 26136 - RNA, 21 nt, Artificial Sequence
  Synthetic oligonucleotide: Ptpn6-5858
gaccauagggaggagcuguuc

SEQ ID NO: 26137 - RNA, 22 nt, Artificial Sequence
  Synthetic oligonucleotide: Ptpn6-5859
ggaccauagggaggagcuguuc

SEQ ID NO: 26138 - RNA, 23 nt, Artificial Sequence
  Synthetic oligonucleotide: Ptpn6-5860
aggaccauagggaggagcuguuc

SEQ ID NO: 26139 - RNA, 24 nt, Artificial Sequence
  Synthetic oligonucleotide: Ptpn6-5861
caggaccauagggaggagcuguuc

SEQ ID NO: 26140 - RNA, 18 nt, Artificial Sequence
  Synthetic oligonucleotide: Ptpn6-5862
uucccugcagccccaaag

SEQ ID NO: 26141 - RNA, 19 nt, Artificial Sequence
  Synthetic oligonucleotide: Ptpn6-5863
cuucccugcagccccaaag

SEQ ID NO: 26142 - RNA, 20 nt, Artificial Sequence
  Synthetic oligonucleotide: Ptpn6-1049
gcuucccugcagccccaaag

SEQ ID NO: 26143 - RNA, 21 nt, Artificial Sequence
  Synthetic oligonucleotide: Ptpn6-5864
agcuucccugcagccccaaag

SEQ ID NO: 26144 - RNA, 22 nt, Artificial Sequence
  Synthetic oligonucleotide: Ptpn6-5865
cagcuucccugcagccccaaag

SEQ ID NO: 26145 - RNA, 23 nt, Artificial Sequence
  Synthetic oligonucleotide: Ptpn6-5866
ccagcuucccugcagccccaaag

SEQ ID NO: 26146 - RNA, 24 nt, Artificial Sequence
  Synthetic oligonucleotide: Ptpn6-5867
gccagcuucccugcagccccaaag

SEQ ID NO: 26147 - RNA, 18 nt, Artificial Sequence
  Synthetic oligonucleotide: Ptpn6-5868
caggggaaaauguuaaag

SEQ ID NO: 26148 - RNA, 19 nt, Artificial Sequence
  Synthetic oligonucleotide: Ptpn6-5869
ccaggggaaaauguuaaag

SEQ ID NO: 26149 - RNA, 20 nt, Artificial Sequence
  Synthetic oligonucleotide: Ptpn6-1236
uccaggggaaaauguuaaag

SEQ ID NO: 26150 - RNA, 21 nt, Artificial Sequence
  Synthetic oligonucleotide: Ptpn6-5870
guccaggggaaaauguuaaag

SEQ ID NO: 26151 - RNA, 22 nt, Artificial Sequence
  Synthetic oligonucleotide: Ptpn6-5871
uguccaggggaaaauguuaaag

SEQ ID NO: 26152 - RNA, 23 nt, Artificial Sequence
  Synthetic oligonucleotide: Ptpn6-5872
uuguccaggggaaaauguuaaag

SEQ ID NO: 26153 - RNA, 24 nt, Artificial Sequence
  Synthetic oligonucleotide: Ptpn6-5873
cuuguccaggggaaaauguuaaag

SEQ ID NO: 26154 - RNA, 18 nt, Artificial Sequence
  Synthetic oligonucleotide: Ptpn6-5874
cuaagcaggaggcagaag

SEQ ID NO: 26155 - RNA, 19 nt, Artificial Sequence
  Synthetic oligonucleotide: Ptpn6-5875
ccuaagcaggaggcagaag

SEQ ID NO: 26156 - RNA, 20 nt, Artificial Sequence
  Synthetic oligonucleotide: Ptpn6-1814
uccuaagcaggaggcagaag

SEQ ID NO: 26157 - RNA, 21 nt, Artificial Sequence
  Synthetic oligonucleotide: Ptpn6-5876
guccuaagcaggaggcagaag

SEQ ID NO: 26158 - RNA, 22 nt, Artificial Sequence
  Synthetic oligonucleotide: Ptpn6-5877
gguccuaagcaggaggcagaag

SEQ ID NO: 26159 - RNA, 23 nt, Artificial Sequence
  Synthetic oligonucleotide: Ptpn6-5878
agguccuaagcaggaggcagaag

SEQ ID NO: 26160 - RNA, 24 nt, Artificial Sequence
  Synthetic oligonucleotide: Ptpn6-5879
cagguccuaagcaggaggcagaag

SEQ ID NO: 26161 - RNA, 18 nt, Artificial Sequence
  Synthetic oligonucleotide: Ptpn6-5880
cucacaccuugcgggaag

SEQ ID NO: 26162 - RNA, 19 nt, Artificial Sequence
  Synthetic oligonucleotide: Ptpn6-5881
ccucacaccuugcgggaag

SEQ ID NO: 26163 - RNA, 20 nt, Artificial Sequence
  Synthetic oligonucleotide: Ptpn6-1186
uccucacaccuugcgggaag

SEQ ID NO: 26164 - RNA, 21 nt, Artificial Sequence
  Synthetic oligonucleotide: Ptpn6-5882
guccucacaccuugcgggaag

SEQ ID NO: 26165 - RNA, 22 nt, Artificial Sequence
  Synthetic oligonucleotide: Ptpn6-5883
gguccucacaccuugcgggaag

SEQ ID NO: 26166 - RNA, 23 nt, Artificial Sequence
  Synthetic oligonucleotide: Ptpn6-5884
ggguccucacaccuugcgggaag

SEQ ID NO: 26167 - RNA, 24 nt, Artificial Sequence
  Synthetic oligonucleotide: Ptpn6-5885
gggguccucacaccuugcgggaag

SEQ ID NO: 26168 - RNA, 18 nt, Artificial Sequence
  Synthetic oligonucleotide: Ptpn6-5886
aaccugccccgggggaag

SEQ ID NO: 26169 - RNA, 19 nt, Artificial Sequence
  Synthetic oligonucleotide: Ptpn6-5887
caaccugccccgggggaag

SEQ ID NO: 26170 - RNA, 20 nt, Artificial Sequence
  Synthetic oligonucleotide: Ptpn6-1518
ucaaccugccccgggggaag

SEQ ID NO: 26171 - RNA, 21 nt, Artificial Sequence
  Synthetic oligonucleotide: Ptpn6-5888
cucaaccugccccgggggaag

SEQ ID NO: 26172 - RNA, 22 nt, Artificial Sequence
  Synthetic oligonucleotide: Ptpn6-5889
ucucaaccugccccgggggaag

SEQ ID NO: 26173 - RNA, 23 nt, Artificial Sequence
  Synthetic oligonucleotide: Ptpn6-5890
cucucaaccugccccgggggaag

SEQ ID NO: 26174 - RNA, 24 nt, Artificial Sequence
  Synthetic oligonucleotide: Ptpn6-5891
ccucucaaccugccccgggggaag

SEQ ID NO: 26175 - RNA, 18 nt, Artificial Sequence
  Synthetic oligonucleotide: Ptpn6-5892
gagcccagaggcuggaag

SEQ ID NO: 26176 - RNA, 19 nt, Artificial Sequence
  Synthetic oligonucleotide: Ptpn6-5893
ggagcccagaggcuggaag

SEQ ID NO: 26177 - RNA, 20 nt, Artificial Sequence
  Synthetic oligonucleotide: Ptpn6-1819
aggagcccagaggcuggaag

SEQ ID NO: 26178 - RNA, 21 nt, Artificial Sequence
  Synthetic oligonucleotide: Ptpn6-5894
caggagcccagaggcuggaag

SEQ ID NO: 26179 - RNA, 22 nt, Artificial Sequence
  Synthetic oligonucleotide: Ptpn6-5895
gcaggagcccagaggcuggaag

SEQ ID NO: 26180 - RNA, 23 nt, Artificial Sequence
  Synthetic oligonucleotide: Ptpn6-5896
agcaggagcccagaggcuggaag

SEQ ID NO: 26181 - RNA, 24 nt, Artificial Sequence
  Synthetic oligonucleotide: Ptpn6-5897
aagcaggagcccagaggcuggaag

SEQ ID NO: 26182 - RNA, 18 nt, Artificial Sequence
  Synthetic oligonucleotide: Ptpn6-5898
agggggacagguccuaag

SEQ ID NO: 26183 - RNA, 19 nt, Artificial Sequence
  Synthetic oligonucleotide: Ptpn6-5899
cagggggacagguccuaag

SEQ ID NO: 26184 - RNA, 20 nt, Artificial Sequence
  Synthetic oligonucleotide: Ptpn6-1782
ccagggggacagguccuaag

SEQ ID NO: 26185 - RNA, 21 nt, Artificial Sequence
  Synthetic oligonucleotide: Ptpn6-5900
cccagggggacagguccuaag

SEQ ID NO: 26186 - RNA, 22 nt, Artificial Sequence
  Synthetic oligonucleotide: Ptpn6-5901
acccagggggacagguccuaag

SEQ ID NO: 26187 - RNA, 23 nt, Artificial Sequence
  Synthetic oligonucleotide: Ptpn6-5902
uacccagggggacagguccuaag

SEQ ID NO: 26188 - RNA, 24 nt, Artificial Sequence
  Synthetic oligonucleotide: Ptpn6-5903
cuacccagggggacagguccuaag

SEQ ID NO: 26189 - RNA, 18 nt, Artificial Sequence
  Synthetic oligonucleotide: Ptpn6-5904
ucuccaggaaaaggacag

SEQ ID NO: 26190 - RNA, 19 nt, Artificial Sequence
  Synthetic oligonucleotide: Ptpn6-5905
gucuccaggaaaaggacag

SEQ ID NO: 26191 - RNA, 20 nt, Artificial Sequence
  Synthetic oligonucleotide: Ptpn6-1889
agucuccaggaaaaggacag

SEQ ID NO: 26192 - RNA, 21 nt, Artificial Sequence
  Synthetic oligonucleotide: Ptpn6-5906
uagucuccaggaaaaggacag

SEQ ID NO: 26193 - RNA, 22 nt, Artificial Sequence
  Synthetic oligonucleotide: Ptpn6-5907
auagucuccaggaaaaggacag

SEQ ID NO: 26194 - RNA, 23 nt, Artificial Sequence
  Synthetic oligonucleotide: Ptpn6-5908
aauagucuccaggaaaaggacag

SEQ ID NO: 26195 - RNA, 24 nt, Artificial Sequence
  Synthetic oligonucleotide: Ptpn6-5909
uaauagucuccaggaaaaggacag

SEQ ID NO: 26196 - RNA, 18 nt, Artificial Sequence
  Synthetic oligonucleotide: Ptpn6-5910
guguugugagcuacccag

SEQ ID NO: 26197 - RNA, 19 nt, Artificial Sequence
  Synthetic oligonucleotide: Ptpn6-5911
gguguugugagcuacccag

SEQ ID NO: 26198 - RNA, 20 nt, Artificial Sequence
  Synthetic oligonucleotide: Ptpn6-1194
agguguugugagcuacccag

SEQ ID NO: 26199 - RNA, 21 nt, Artificial Sequence
  Synthetic oligonucleotide: Ptpn6-5912
gagguguugugagcuacccag

SEQ ID NO: 26200 - RNA, 22 nt, Artificial Sequence
  Synthetic oligonucleotide: Ptpn6-5913
ugagguguugugagcuacccag

SEQ ID NO: 26201 - RNA, 23 nt, Artificial Sequence
  Synthetic oligonucleotide: Ptpn6-5914
uugagguguugugagcuacccag

SEQ ID NO: 26202 - RNA, 24 nt, Artificial Sequence
  Synthetic oligonucleotide: Ptpn6-5915
uuugagguguugugagcuacccag

SEQ ID NO: 26203 - RNA, 18 nt, Artificial Sequence
  Synthetic oligonucleotide: Ptpn6-5916
cacaguggcccaagccag

SEQ ID NO: 26204 - RNA, 19 nt, Artificial Sequence
  Synthetic oligonucleotide: Ptpn6-5917
gcacaguggcccaagccag

SEQ ID NO: 26205 - RNA, 20 nt, Artificial Sequence
  Synthetic oligonucleotide: Ptpn6-1879
ugcacaguggcccaagccag

SEQ ID NO: 26206 - RNA, 21 nt, Artificial Sequence
  Synthetic oligonucleotide: Ptpn6-5918
gugcacaguggcccaagccag

SEQ ID NO: 26207 - RNA, 22 nt, Artificial Sequence
  Synthetic oligonucleotide: Ptpn6-5919
ugugcacaguggcccaagccag

SEQ ID NO: 26208 - RNA, 23 nt, Artificial Sequence
  Synthetic oligonucleotide: Ptpn6-5920
cugugcacaguggcccaagccag

SEQ ID NO: 26209 - RNA, 24 nt, Artificial Sequence
  Synthetic oligonucleotide: Ptpn6-5921
gcugugcacaguggcccaagccag

SEQ ID NO: 26210 - RNA, 18 nt, Artificial Sequence
  Synthetic oligonucleotide: Ptpn6-5922
agauacacacuuguccag

SEQ ID NO: 26211 - RNA, 19 nt, Artificial Sequence
  Synthetic oligonucleotide: Ptpn6-5923
cagauacacacuuguccag

SEQ ID NO: 26212 - RNA, 20 nt, Artificial Sequence
  Synthetic oligonucleotide: Ptpn6-1207
acagauacacacuuguccag

SEQ ID NO: 26213 - RNA, 21 nt, Artificial Sequence
  Synthetic oligonucleotide: Ptpn6-5924
aacagauacacacuuguccag

SEQ ID NO: 26214 - RNA, 22 nt, Artificial Sequence
  Synthetic oligonucleotide: Ptpn6-5925
gaacagauacacacuuguccag

SEQ ID NO: 26215 - RNA, 23 nt, Artificial Sequence
  Synthetic oligonucleotide: Ptpn6-5926
agaacagauacacacuuguccag

SEQ ID NO: 26216 - RNA, 24 nt, Artificial Sequence
  Synthetic oligonucleotide: Ptpn6-5927
gagaacagauacacacuuguccag

SEQ ID NO: 26217 - RNA, 18 nt, Artificial Sequence
  Synthetic oligonucleotide: Ptpn6-5928
auguuaaagagggggcag

SEQ ID NO: 26218 - RNA, 19 nt, Artificial Sequence
  Synthetic oligonucleotide: Ptpn6-5929
aauguuaaagagggggcag

SEQ ID NO: 26219 - RNA, 20 nt, Artificial Sequence
  Synthetic oligonucleotide: Ptpn6-1224
aaauguuaaagagggggcag

SEQ ID NO: 26220 - RNA, 21 nt, Artificial Sequence
  Synthetic oligonucleotide: Ptpn6-5930
aaaauguuaaagagggggcag

SEQ ID NO: 26221 - RNA, 22 nt, Artificial Sequence
  Synthetic oligonucleotide: Ptpn6-5931
gaaaauguuaaagagggggcag

SEQ ID NO: 26222 - RNA, 23 nt, Artificial Sequence
  Synthetic oligonucleotide: Ptpn6-5932
ggaaaauguuaaagagggggcag

SEQ ID NO: 26223 - RNA, 24 nt, Artificial Sequence
  Synthetic oligonucleotide: Ptpn6-5933
gggaaaauguuaaagagggggcag

SEQ ID NO: 26224 - RNA, 18 nt, Artificial Sequence
  Synthetic oligonucleotide: Ptpn6-5934
cagcccaguuccucagag

SEQ ID NO: 26225 - RNA, 19 nt, Artificial Sequence
  Synthetic oligonucleotide: Ptpn6-5935
acagcccaguuccucagag

SEQ ID NO: 26226 - RNA, 20 nt, Artificial Sequence
  Synthetic oligonucleotide: Ptpn6-1936
aacagcccaguuccucagag

SEQ ID NO: 26227 - RNA, 21 nt, Artificial Sequence
  Synthetic oligonucleotide: Ptpn6-5936
uaacagcccaguuccucagag

SEQ ID NO: 26228 - RNA, 22 nt, Artificial Sequence
  Synthetic oligonucleotide: Ptpn6-5937
cuaacagcccaguuccucagag

SEQ ID NO: 26229 - RNA, 23 nt, Artificial Sequence
  Synthetic oligonucleotide: Ptpn6-5938
ccuaacagcccaguuccucagag

SEQ ID NO: 26230 - RNA, 24 nt, Artificial Sequence
  Synthetic oligonucleotide: Ptpn6-5939
cccuaacagcccaguuccucagag

SEQ ID NO: 26231 - RNA, 18 nt, Artificial Sequence
  Synthetic oligonucleotide: Ptpn6-5940
cgccuucccccgggagag

SEQ ID NO: 26232 - RNA, 19 nt, Artificial Sequence
  Synthetic oligonucleotide: Ptpn6-5941
ccgccuucccccgggagag

SEQ ID NO: 26233 - RNA, 20 nt, Artificial Sequence
  Synthetic oligonucleotide: Ptpn6-1904
gccgccuucccccgggagag

SEQ ID NO: 26234 - RNA, 21 nt, Artificial Sequence
  Synthetic oligonucleotide: Ptpn6-5942
ggccgccuucccccgggagag

SEQ ID NO: 26235 - RNA, 22 nt, Artificial Sequence
  Synthetic oligonucleotide: Ptpn6-5943
gggccgccuucccccgggagag

SEQ ID NO: 26236 - RNA, 23 nt, Artificial Sequence
  Synthetic oligonucleotide: Ptpn6-5944
agggccgccuucccccgggagag

SEQ ID NO: 26237 - RNA, 24 nt, Artificial Sequence
  Synthetic oligonucleotide: Ptpn6-5945
cagggccgccuucccccgggagag

SEQ ID NO: 26238 - RNA, 18 nt, Artificial Sequence
  Synthetic oligonucleotide: Ptpn6-3104
gcaucucucuguagggag

SEQ ID NO: 26239 - RNA, 19 nt, Artificial Sequence
  Synthetic oligonucleotide: Ptpn6-3105
agcaucucucuguagggag

SEQ ID NO: 26240 - RNA, 20 nt, Artificial Sequence
  Synthetic oligonucleotide: Ptpn6-1228
cagcaucucucuguagggag

SEQ ID NO: 26241 - RNA, 21 nt, Artificial Sequence
  Synthetic oligonucleotide: Ptpn6-3106
acagcaucucucuguagggag

SEQ ID NO: 26242 - RNA, 22 nt, Artificial Sequence
  Synthetic oligonucleotide: Ptpn6-3107
gacagcaucucucuguagggag

SEQ ID NO: 26243 - RNA, 23 nt, Artificial Sequence
  Synthetic oligonucleotide: Ptpn6-3108
ggacagcaucucucuguagggag

SEQ ID NO: 26244 - RNA, 24 nt, Artificial Sequence
  Synthetic oligonucleotide: Ptpn6-3109
gggacagcaucucucuguagggag

SEQ ID NO: 26245 - RNA, 18 nt, Artificial Sequence
  Synthetic oligonucleotide: Ptpn6-5946
gccgccuucccccgggag

SEQ ID NO: 26246 - RNA, 19 nt, Artificial Sequence
  Synthetic oligonucleotide: Ptpn6-5947
ggccgccuucccccgggag

SEQ ID NO: 26247 - RNA, 20 nt, Artificial Sequence
  Synthetic oligonucleotide: Ptpn6-1026
gggccgccuucccccgggag

SEQ ID NO: 26248 - RNA, 21 nt, Artificial Sequence
  Synthetic oligonucleotide: Ptpn6-5948
agggccgccuucccccgggag

SEQ ID NO: 26249 - RNA, 22 nt, Artificial Sequence
  Synthetic oligonucleotide: Ptpn6-5949
cagggccgccuucccccgggag

SEQ ID NO: 26250 - RNA, 23 nt, Artificial Sequence
  Synthetic oligonucleotide: Ptpn6-5950
ccagggccgccuucccccgggag

SEQ ID NO: 26251 - RNA, 24 nt, Artificial Sequence
  Synthetic oligonucleotide: Ptpn6-5951
uccagggccgccuucccccgggag

SEQ ID NO: 26252 - RNA, 18 nt, Artificial Sequence
  Synthetic oligonucleotide: Ptpn6-5952
cagaggagcaugagugag

SEQ ID NO: 26253 - RNA, 19 nt, Artificial Sequence
  Synthetic oligonucleotide: Ptpn6-5953
gcagaggagcaugagugag

SEQ ID NO: 26254 - RNA, 20 nt, Artificial Sequence
  Synthetic oligonucleotide: Ptpn6-1837
ggcagaggagcaugagugag

SEQ ID NO: 26255 - RNA, 21 nt, Artificial Sequence
  Synthetic oligonucleotide: Ptpn6-5954
gggcagaggagcaugagugag

SEQ ID NO: 26256 - RNA, 22 nt, Artificial Sequence
  Synthetic oligonucleotide: Ptpn6-5955
ggggcagaggagcaugagugag

SEQ ID NO: 26257 - RNA, 23 nt, Artificial Sequence
  Synthetic oligonucleotide: Ptpn6-5956
gggggcagaggagcaugagugag

SEQ ID NO: 26258 - RNA, 24 nt, Artificial Sequence
  Synthetic oligonucleotide: Ptpn6-5957
agggggcagaggagcaugagugag

SEQ ID NO: 26259 - RNA, 18 nt, Artificial Sequence
  Synthetic oligonucleotide: Ptpn6-5958
ggggaaaccucuccguag

SEQ ID NO: 26260 - RNA, 19 nt, Artificial Sequence
  Synthetic oligonucleotide: Ptpn6-5959
gggggaaaccucuccguag

SEQ ID NO: 26261 - RNA, 20 nt, Artificial Sequence
  Synthetic oligonucleotide: Ptpn6-1929
ugggggaaaccucuccguag

SEQ ID NO: 26262 - RNA, 21 nt, Artificial Sequence
  Synthetic oligonucleotide: Ptpn6-5960
augggggaaaccucuccguag

SEQ ID NO: 26263 - RNA, 22 nt, Artificial Sequence
  Synthetic oligonucleotide: Ptpn6-5961
aaugggggaaaccucuccguag

SEQ ID NO: 26264 - RNA, 23 nt, Artificial Sequence
  Synthetic oligonucleotide: Ptpn6-5962
caaugggggaaaccucuccguag

SEQ ID NO: 26265 - RNA, 24 nt, Artificial Sequence
  Synthetic oligonucleotide: Ptpn6-5963
ccaaugggggaaaccucuccguag

SEQ ID NO: 26266 - RNA, 18 nt, Artificial Sequence
  Synthetic oligonucleotide: Ptpn6-5964
cggcgggguauuggguag

SEQ ID NO: 26267 - RNA, 19 nt, Artificial Sequence
  Synthetic oligonucleotide: Ptpn6-5965
gcggcgggguauuggguag

SEQ ID NO: 26268 - RNA, 20 nt, Artificial Sequence
  Synthetic oligonucleotide: Ptpn6-989
agcggcgggguauuggguag

SEQ ID NO: 26269 - RNA, 21 nt, Artificial Sequence
  Synthetic oligonucleotide: Ptpn6-5966
gagcggcgggguauuggguag

SEQ ID NO: 26270 - RNA, 22 nt, Artificial Sequence
  Synthetic oligonucleotide: Ptpn6-5967
agagcggcgggguauuggguag

SEQ ID NO: 26271 - RNA, 23 nt, Artificial Sequence
  Synthetic oligonucleotide: Ptpn6-5968
cagagcggcgggguauuggguag

SEQ ID NO: 26272 - RNA, 24 nt, Artificial Sequence
  Synthetic oligonucleotide: Ptpn6-5969
acagagcggcgggguauuggguag

SEQ ID NO: 26273 - RNA, 18 nt, Artificial Sequence
  Synthetic oligonucleotide: Ptpn6-5970
cacucacguucacacacg

SEQ ID NO: 26274 - RNA, 19 nt, Artificial Sequence
  Synthetic oligonucleotide: Ptpn6-5971
gcacucacguucacacacg

SEQ ID NO: 26275 - RNA, 20 nt, Artificial Sequence
  Synthetic oligonucleotide: Ptpn6-1852
cgcacucacguucacacacg

SEQ ID NO: 26276 - RNA, 21 nt, Artificial Sequence
  Synthetic oligonucleotide: Ptpn6-5972
ucgcacucacguucacacacg

SEQ ID NO: 26277 - RNA, 22 nt, Artificial Sequence
  Synthetic oligonucleotide: Ptpn6-5973
aucgcacucacguucacacacg

SEQ ID NO: 26278 - RNA, 23 nt, Artificial Sequence
  Synthetic oligonucleotide: Ptpn6-5974
gaucgcacucacguucacacacg

SEQ ID NO: 26279 - RNA, 24 nt, Artificial Sequence
  Synthetic oligonucleotide: Ptpn6-5975
agaucgcacucacguucacacacg

SEQ ID NO: 26280 - RNA, 18 nt, Artificial Sequence
  Synthetic oligonucleotide: Ptpn6-5976
gccucucaaccugccccg

SEQ ID NO: 26281 - RNA, 19 nt, Artificial Sequence
  Synthetic oligonucleotide: Ptpn6-5977
agccucucaaccugccccg

SEQ ID NO: 26282 - RNA, 20 nt, Artificial Sequence
  Synthetic oligonucleotide: Ptpn6-1514
cagccucucaaccugccccg

SEQ ID NO: 26283 - RNA, 21 nt, Artificial Sequence
  Synthetic oligonucleotide: Ptpn6-5978
ccagccucucaaccugccccg

SEQ ID NO: 26284 - RNA, 22 nt, Artificial Sequence
  Synthetic oligonucleotide: Ptpn6-5979
uccagccucucaaccugccccg

SEQ ID NO: 26285 - RNA, 23 nt, Artificial Sequence
  Synthetic oligonucleotide: Ptpn6-5980
cuccagccucucaaccugccccg

SEQ ID NO: 26286 - RNA, 24 nt, Artificial Sequence
  Synthetic oligonucleotide: Ptpn6-5981
acuccagccucucaaccugccccg

SEQ ID NO: 26287 - RNA, 18 nt, Artificial Sequence
  Synthetic oligonucleotide: Ptpn6-5982
agccacggcagagggccg

SEQ ID NO: 26288 - RNA, 19 nt, Artificial Sequence
  Synthetic oligonucleotide: Ptpn6-5983
aagccacggcagagggccg

SEQ ID NO: 26289 - RNA, 20 nt, Artificial Sequence
  Synthetic oligonucleotide: Ptpn6-1873
gaagccacggcagagggccg

SEQ ID NO: 26290 - RNA, 21 nt, Artificial Sequence
  Synthetic oligonucleotide: Ptpn6-5984
ggaagccacggcagagggccg

SEQ ID NO: 26291 - RNA, 22 nt, Artificial Sequence
  Synthetic oligonucleotide: Ptpn6-5985
gggaagccacggcagagggccg

SEQ ID NO: 26292 - RNA, 23 nt, Artificial Sequence
  Synthetic oligonucleotide: Ptpn6-5986
ggggaagccacggcagagggccg

SEQ ID NO: 26293 - RNA, 24 nt, Artificial Sequence
  Synthetic oligonucleotide: Ptpn6-5987
gggggaagccacggcagagggccg

SEQ ID NO: 26294 - RNA, 18 nt, Artificial Sequence
  Synthetic oligonucleotide: Ptpn6-5988
gcucaagcugacagagcg

SEQ ID NO: 26295 - RNA, 19 nt, Artificial Sequence
  Synthetic oligonucleotide: Ptpn6-5989
agcucaagcugacagagcg

SEQ ID NO: 26296 - RNA, 20 nt, Artificial Sequence
  Synthetic oligonucleotide: Ptpn6-1911
gagcucaagcugacagagcg

SEQ ID NO: 26297 - RNA, 21 nt, Artificial Sequence
  Synthetic oligonucleotide: Ptpn6-5990
ggagcucaagcugacagagcg

SEQ ID NO: 26298 - RNA, 22 nt, Artificial Sequence
  Synthetic oligonucleotide: Ptpn6-5991
uggagcucaagcugacagagcg

SEQ ID NO: 26299 - RNA, 23 nt, Artificial Sequence
  Synthetic oligonucleotide: Ptpn6-5992
cuggagcucaagcugacagagcg

SEQ ID NO: 26300 - RNA, 24 nt, Artificial Sequence
  Synthetic oligonucleotide: Ptpn6-5993
ccuggagcucaagcugacagagcg

SEQ ID NO: 26301 - RNA, 18 nt, Artificial Sequence
  Synthetic oligonucleotide: Ptpn6-5994
agggaccggaaacaggcg

SEQ ID NO: 26302 - RNA, 19 nt, Artificial Sequence
  Synthetic oligonucleotide: Ptpn6-5995
uagggaccggaaacaggcg

SEQ ID NO: 26303 - RNA, 20 nt, Artificial Sequence
  Synthetic oligonucleotide: Ptpn6-1851
auagggaccggaaacaggcg

SEQ ID NO: 26304 - RNA, 21 nt, Artificial Sequence
  Synthetic oligonucleotide: Ptpn6-5996
cauagggaccggaaacaggcg

SEQ ID NO: 26305 - RNA, 22 nt, Artificial Sequence
  Synthetic oligonucleotide: Ptpn6-5997
ucauagggaccggaaacaggcg

SEQ ID NO: 26306 - RNA, 23 nt, Artificial Sequence
  Synthetic oligonucleotide: Ptpn6-5998
uucauagggaccggaaacaggcg

SEQ ID NO: 26307 - RNA, 24 nt, Artificial Sequence
  Synthetic oligonucleotide: Ptpn6-5999
guucauagggaccggaaacaggcg

SEQ ID NO: 26308 - RNA, 18 nt, Artificial Sequence
  Synthetic oligonucleotide: Ptpn6-6000
gcccacccacccagggcg

SEQ ID NO: 26309 - RNA, 19 nt, Artificial Sequence
  Synthetic oligonucleotide: Ptpn6-6001
ggcccacccacccagggcg

SEQ ID NO: 26310 - RNA, 20 nt, Artificial Sequence
  Synthetic oligonucleotide: Ptpn6-2265
aggcccacccacccagggcg

SEQ ID NO: 26311 - RNA, 21 nt, Artificial Sequence
  Synthetic oligonucleotide: Ptpn6-6002
caggcccacccacccagggcg

SEQ ID NO: 26312 - RNA, 22 nt, Artificial Sequence
  Synthetic oligonucleotide: Ptpn6-6003
gcaggcccacccacccagggcg

SEQ ID NO: 26313 - RNA, 23 nt, Artificial Sequence
  Synthetic oligonucleotide: Ptpn6-6004
ugcaggcccacccacccagggcg

SEQ ID NO: 26314 - RNA, 24 nt, Artificial Sequence
  Synthetic oligonucleotide: Ptpn6-6005
gugcaggcccacccacccagggcg

SEQ ID NO: 26315 - RNA, 18 nt, Artificial Sequence
  Synthetic oligonucleotide: Ptpn6-6006
cuccaggaaaaggacagg

SEQ ID NO: 26316 - RNA, 19 nt, Artificial Sequence
  Synthetic oligonucleotide: Ptpn6-6007
ucuccaggaaaaggacagg

SEQ ID NO: 26317 - RNA, 20 nt, Artificial Sequence
  Synthetic oligonucleotide: Ptpn6-1047
gucuccaggaaaaggacagg

SEQ ID NO: 26318 - RNA, 21 nt, Artificial Sequence
  Synthetic oligonucleotide: Ptpn6-6008
agucuccaggaaaaggacagg

SEQ ID NO: 26319 - RNA, 22 nt, Artificial Sequence
  Synthetic oligonucleotide: Ptpn6-6009
uagucuccaggaaaaggacagg

SEQ ID NO: 26320 - RNA, 23 nt, Artificial Sequence
  Synthetic oligonucleotide: Ptpn6-6010
auagucuccaggaaaaggacagg

SEQ ID NO: 26321 - RNA, 24 nt, Artificial Sequence
  Synthetic oligonucleotide: Ptpn6-6011
aauagucuccaggaaaaggacagg

SEQ ID NO: 26322 - RNA, 18 nt, Artificial Sequence
  Synthetic oligonucleotide: Ptpn6-6012
gaagcaggagcccagagg

SEQ ID NO: 26323 - RNA, 19 nt, Artificial Sequence
  Synthetic oligonucleotide: Ptpn6-6013
agaagcaggagcccagagg

SEQ ID NO: 26324 - RNA, 20 nt, Artificial Sequence
  Synthetic oligonucleotide: Ptpn6-1817
cagaagcaggagcccagagg

SEQ ID NO: 26325 - RNA, 21 nt, Artificial Sequence
  Synthetic oligonucleotide: Ptpn6-6014
gcagaagcaggagcccagagg

SEQ ID NO: 26326 - RNA, 22 nt, Artificial Sequence
  Synthetic oligonucleotide: Ptpn6-6015
ggcagaagcaggagcccagagg

SEQ ID NO: 26327 - RNA, 23 nt, Artificial Sequence
  Synthetic oligonucleotide: Ptpn6-6016
aggcagaagcaggagcccagagg

SEQ ID NO: 26328 - RNA, 24 nt, Artificial Sequence
  Synthetic oligonucleotide: Ptpn6-6017
gaggcagaagcaggagcccagagg

SEQ ID NO: 26329 - RNA, 18 nt, Artificial Sequence
  Synthetic oligonucleotide: Ptpn6-6018
gccuucccccgggagagg

SEQ ID NO: 26330 - RNA, 19 nt, Artificial Sequence
  Synthetic oligonucleotide: Ptpn6-6019
cgccuucccccgggagagg

SEQ ID NO: 26331 - RNA, 20 nt, Artificial Sequence
  Synthetic oligonucleotide: Ptpn6-1201
ccgccuucccccgggagagg

SEQ ID NO: 26332 - RNA, 21 nt, Artificial Sequence
  Synthetic oligonucleotide: Ptpn6-6020
gccgccuucccccgggagagg

SEQ ID NO: 26333 - RNA, 22 nt, Artificial Sequence
  Synthetic oligonucleotide: Ptpn6-6021
ggccgccuucccccgggagagg

SEQ ID NO: 26334 - RNA, 23 nt, Artificial Sequence
  Synthetic oligonucleotide: Ptpn6-6022
gggccgccuucccccgggagagg

SEQ ID NO: 26335 - RNA, 24 nt, Artificial Sequence
  Synthetic oligonucleotide: Ptpn6-6023
agggccgccuucccccgggagagg

SEQ ID NO: 26336 - RNA, 18 nt, Artificial Sequence
  Synthetic oligonucleotide: Ptpn6-6024
cagguccuaagcaggagg

SEQ ID NO: 26337 - RNA, 19 nt, Artificial Sequence
  Synthetic oligonucleotide: Ptpn6-6025
acagguccuaagcaggagg

SEQ ID NO: 26338 - RNA, 20 nt, Artificial Sequence
  Synthetic oligonucleotide: Ptpn6-1813
gacagguccuaagcaggagg

SEQ ID NO: 26339 - RNA, 21 nt, Artificial Sequence
  Synthetic oligonucleotide: Ptpn6-6026
ggacagguccuaagcaggagg

SEQ ID NO: 26340 - RNA, 22 nt, Artificial Sequence
  Synthetic oligonucleotide: Ptpn6-6027
gggacagguccuaagcaggagg

SEQ ID NO: 26341 - RNA, 23 nt, Artificial Sequence
  Synthetic oligonucleotide: Ptpn6-6028
ggggacagguccuaagcaggagg

SEQ ID NO: 26342 - RNA, 24 nt, Artificial Sequence
  Synthetic oligonucleotide: Ptpn6-6029
gggggacagguccuaagcaggagg

SEQ ID NO: 26343 - RNA, 18 nt, Artificial Sequence
  Synthetic oligonucleotide: Ptpn6-3149
caucucucuguagggagg

SEQ ID NO: 26344 - RNA, 19 nt, Artificial Sequence
  Synthetic oligonucleotide: Ptpn6-3150
gcaucucucuguagggagg

SEQ ID NO: 26345 - RNA, 20 nt, Artificial Sequence
  Synthetic oligonucleotide: Ptpn6-1222
agcaucucucuguagggagg

SEQ ID NO: 26346 - RNA, 21 nt, Artificial Sequence
  Synthetic oligonucleotide: Ptpn6-3151
cagcaucucucuguagggagg

SEQ ID NO: 26347 - RNA, 22 nt, Artificial Sequence
  Synthetic oligonucleotide: Ptpn6-3152
acagcaucucucuguagggagg

SEQ ID NO: 26348 - RNA, 23 nt, Artificial Sequence
  Synthetic oligonucleotide: Ptpn6-3153
gacagcaucucucuguagggagg

SEQ ID NO: 26349 - RNA, 24 nt, Artificial Sequence
  Synthetic oligonucleotide: Ptpn6-3154
ggacagcaucucucuguagggagg

SEQ ID NO: 26350 - RNA, 18 nt, Artificial Sequence
  Synthetic oligonucleotide: Ptpn6-6030
aaguaacccuggcugagg

SEQ ID NO: 26351 - RNA, 19 nt, Artificial Sequence
  Synthetic oligonucleotide: Ptpn6-6031
gaaguaacccuggcugagg

SEQ ID NO: 26352 - RNA, 20 nt, Artificial Sequence
  Synthetic oligonucleotide: Ptpn6-1923
ggaaguaacccuggcugagg

SEQ ID NO: 26353 - RNA, 21 nt, Artificial Sequence
  Synthetic oligonucleotide: Ptpn6-6032
aggaaguaacccuggcugagg

SEQ ID NO: 26354 - RNA, 22 nt, Artificial Sequence
  Synthetic oligonucleotide: Ptpn6-6033
caggaaguaacccuggcugagg

SEQ ID NO: 26355 - RNA, 23 nt, Artificial Sequence
  Synthetic oligonucleotide: Ptpn6-6034
ccaggaaguaacccuggcugagg

SEQ ID NO: 26356 - RNA, 24 nt, Artificial Sequence
  Synthetic oligonucleotide: Ptpn6-6035
accaggaaguaacccuggcugagg

SEQ ID NO: 26357 - RNA, 18 nt, Artificial Sequence
  Synthetic oligonucleotide: Ptpn6-6036
ggcccaagccaggugagg

SEQ ID NO: 26358 - RNA, 19 nt, Artificial Sequence
  Synthetic oligonucleotide: Ptpn6-6037
uggcccaagccaggugagg

SEQ ID NO: 26359 - RNA, 20 nt, Artificial Sequence
  Synthetic oligonucleotide: Ptpn6-1882
guggcccaagccaggugagg

SEQ ID NO: 26360 - RNA, 21 nt, Artificial Sequence
  Synthetic oligonucleotide: Ptpn6-6038
aguggcccaagccaggugagg

SEQ ID NO: 26361 - RNA, 22 nt, Artificial Sequence
  Synthetic oligonucleotide: Ptpn6-6039
caguggcccaagccaggugagg

SEQ ID NO: 26362 - RNA, 23 nt, Artificial Sequence
  Synthetic oligonucleotide: Ptpn6-6040
acaguggcccaagccaggugagg

SEQ ID NO: 26363 - RNA, 24 nt, Artificial Sequence
  Synthetic oligonucleotide: Ptpn6-6041
cacaguggcccaagccaggugagg

SEQ ID NO: 26364 - RNA, 18 nt, Artificial Sequence
  Synthetic oligonucleotide: Ptpn6-6042
cccagccaggaccauagg

SEQ ID NO: 26365 - RNA, 19 nt, Artificial Sequence
  Synthetic oligonucleotide: Ptpn6-6043
gcccagccaggaccauagg

SEQ ID NO: 26366 - RNA, 20 nt, Artificial Sequence
  Synthetic oligonucleotide: Ptpn6-2284
ggcccagccaggaccauagg

SEQ ID NO: 26367 - RNA, 21 nt, Artificial Sequence
  Synthetic oligonucleotide: Ptpn6-6044
aggcccagccaggaccauagg

SEQ ID NO: 26368 - RNA, 22 nt, Artificial Sequence
  Synthetic oligonucleotide: Ptpn6-6045
uaggcccagccaggaccauagg

SEQ ID NO: 26369 - RNA, 23 nt, Artificial Sequence
  Synthetic oligonucleotide: Ptpn6-6046
uuaggcccagccaggaccauagg

SEQ ID NO: 26370 - RNA, 24 nt, Artificial Sequence
  Synthetic oligonucleotide: Ptpn6-6047
guuaggcccagccaggaccauagg

SEQ ID NO: 26371 - RNA, 18 nt, Artificial Sequence
  Synthetic oligonucleotide: Ptpn6-6048
gggaaaccucuccguagg

SEQ ID NO: 26372 - RNA, 19 nt, Artificial Sequence
  Synthetic oligonucleotide: Ptpn6-6049
ggggaaaccucuccguagg

SEQ ID NO: 26373 - RNA, 20 nt, Artificial Sequence
  Synthetic oligonucleotide: Ptpn6-957
gggggaaaccucuccguagg

SEQ ID NO: 26374 - RNA, 21 nt, Artificial Sequence
  Synthetic oligonucleotide: Ptpn6-6050
ugggggaaaccucuccguagg

SEQ ID NO: 26375 - RNA, 22 nt, Artificial Sequence
  Synthetic oligonucleotide: Ptpn6-6051
augggggaaaccucuccguagg

SEQ ID NO: 26376 - RNA, 23 nt, Artificial Sequence
  Synthetic oligonucleotide: Ptpn6-6052
aaugggggaaaccucuccguagg

SEQ ID NO: 26377 - RNA, 24 nt, Artificial Sequence
  Synthetic oligonucleotide: Ptpn6-6053
caaugggggaaaccucuccguagg

SEQ ID NO: 26378 - RNA, 18 nt, Artificial Sequence
  Synthetic oligonucleotide: Ptpn6-3155
acagcaucucucuguagg

SEQ ID NO: 26379 - RNA, 19 nt, Artificial Sequence
  Synthetic oligonucleotide: Ptpn6-3156
gacagcaucucucuguagg

SEQ ID NO: 26380 - RNA, 20 nt, Artificial Sequence
  Synthetic oligonucleotide: Ptpn6-1866
ggacagcaucucucuguagg

SEQ ID NO: 26381 - RNA, 21 nt, Artificial Sequence
  Synthetic oligonucleotide: Ptpn6-3157
gggacagcaucucucuguagg

SEQ ID NO: 26382 - RNA, 22 nt, Artificial Sequence
  Synthetic oligonucleotide: Ptpn6-3158
cgggacagcaucucucuguagg

SEQ ID NO: 26383 - RNA, 23 nt, Artificial Sequence
  Synthetic oligonucleotide: Ptpn6-3159
acgggacagcaucucucuguagg

SEQ ID NO: 26384 - RNA, 24 nt, Artificial Sequence
  Synthetic oligonucleotide: Ptpn6-3160
cacgggacagcaucucucuguagg

SEQ ID NO: 26385 - RNA, 18 nt, Artificial Sequence
  Synthetic oligonucleotide: Ptpn6-6054
gggagggggaagccacgg

SEQ ID NO: 26386 - RNA, 19 nt, Artificial Sequence
  Synthetic oligonucleotide: Ptpn6-6055
agggagggggaagccacgg

SEQ ID NO: 26387 - RNA, 20 nt, Artificial Sequence
  Synthetic oligonucleotide: Ptpn6-1871
uagggagggggaagccacgg

SEQ ID NO: 26388 - RNA, 21 nt, Artificial Sequence
  Synthetic oligonucleotide: Ptpn6-6056
guagggagggggaagccacgg

SEQ ID NO: 26389 - RNA, 22 nt, Artificial Sequence
  Synthetic oligonucleotide: Ptpn6-6057
uguagggagggggaagccacgg

SEQ ID NO: 26390 - RNA, 23 nt, Artificial Sequence
  Synthetic oligonucleotide: Ptpn6-6058
cuguagggagggggaagccacgg

SEQ ID NO: 26391 - RNA, 24 nt, Artificial Sequence
  Synthetic oligonucleotide: Ptpn6-6059
ucuguagggagggggaagccacgg

SEQ ID NO: 26392 - RNA, 18 nt, Artificial Sequence
  Synthetic oligonucleotide: Ptpn6-6060
agggccgccuucccccgg

SEQ ID NO: 26393 - RNA, 19 nt, Artificial Sequence
  Synthetic oligonucleotide: Ptpn6-6061
cagggccgccuucccccgg

SEQ ID NO: 26394 - RNA, 20 nt, Artificial Sequence
  Synthetic oligonucleotide: Ptpn6-1901
ccagggccgccuucccccgg

SEQ ID NO: 26395 - RNA, 21 nt, Artificial Sequence
  Synthetic oligonucleotide: Ptpn6-6062
uccagggccgccuucccccgg

SEQ ID NO: 26396 - RNA, 22 nt, Artificial Sequence
  Synthetic oligonucleotide: Ptpn6-6063
guccagggccgccuucccccgg

SEQ ID NO: 26397 - RNA, 23 nt, Artificial Sequence
  Synthetic oligonucleotide: Ptpn6-6064
gguccagggccgccuucccccgg

SEQ ID NO: 26398 - RNA, 24 nt, Artificial Sequence
  Synthetic oligonucleotide: Ptpn6-6065
ugguccagggccgccuucccccgg

SEQ ID NO: 26399 - RNA, 18 nt, Artificial Sequence
  Synthetic oligonucleotide: Ptpn6-6066
ccucucaaccugccccgg

SEQ ID NO: 26400 - RNA, 19 nt, Artificial Sequence
  Synthetic oligonucleotide: Ptpn6-6067
gccucucaaccugccccgg

SEQ ID NO: 26401 - RNA, 20 nt, Artificial Sequence
  Synthetic oligonucleotide: Ptpn6-1515
agccucucaaccugccccgg

SEQ ID NO: 26402 - RNA, 21 nt, Artificial Sequence
  Synthetic oligonucleotide: Ptpn6-6068
cagccucucaaccugccccgg

SEQ ID NO: 26403 - RNA, 22 nt, Artificial Sequence
  Synthetic oligonucleotide: Ptpn6-6069
ccagccucucaaccugccccgg

SEQ ID NO: 26404 - RNA, 23 nt, Artificial Sequence
  Synthetic oligonucleotide: Ptpn6-6070
uccagccucucaaccugccccgg

SEQ ID NO: 26405 - RNA, 24 nt, Artificial Sequence
  Synthetic oligonucleotide: Ptpn6-6071
cuccagccucucaaccugccccgg

SEQ ID NO: 26406 - RNA, 18 nt, Artificial Sequence
  Synthetic oligonucleotide: Ptpn6-6072
ccugccccgggggaaggg

SEQ ID NO: 26407 - RNA, 19 nt, Artificial Sequence
  Synthetic oligonucleotide: Ptpn6-6073
accugccccgggggaaggg

SEQ ID NO: 26408 - RNA, 20 nt, Artificial Sequence
  Synthetic oligonucleotide: Ptpn6-2276
aaccugccccgggggaaggg

SEQ ID NO: 26409 - RNA, 21 nt, Artificial Sequence
  Synthetic oligonucleotide: Ptpn6-6074
caaccugccccgggggaaggg

SEQ ID NO: 26410 - RNA, 22 nt, Artificial Sequence
  Synthetic oligonucleotide: Ptpn6-6075
ucaaccugccccgggggaaggg

SEQ ID NO: 26411 - RNA, 23 nt, Artificial Sequence
  Synthetic oligonucleotide: Ptpn6-6076
cucaaccugccccgggggaaggg

SEQ ID NO: 26412 - RNA, 24 nt, Artificial Sequence
  Synthetic oligonucleotide: Ptpn6-6077
ucucaaccugccccgggggaaggg

SEQ ID NO: 26413 - RNA, 18 nt, Artificial Sequence
  Synthetic oligonucleotide: Ptpn6-6078
ccagccaggaccauaggg

SEQ ID NO: 26414 - RNA, 19 nt, Artificial Sequence
  Synthetic oligonucleotide: Ptpn6-6079
cccagccaggaccauaggg

SEQ ID NO: 26415 - RNA, 20 nt, Artificial Sequence
  Synthetic oligonucleotide: Ptpn6-1533
gcccagccaggaccauaggg

SEQ ID NO: 26416 - RNA, 21 nt, Artificial Sequence
  Synthetic oligonucleotide: Ptpn6-6080
ggcccagccaggaccauaggg

SEQ ID NO: 26417 - RNA, 22 nt, Artificial Sequence
  Synthetic oligonucleotide: Ptpn6-6081
aggcccagccaggaccauaggg

SEQ ID NO: 26418 - RNA, 23 nt, Artificial Sequence
  Synthetic oligonucleotide: Ptpn6-6082
uaggcccagccaggaccauaggg

SEQ ID NO: 26419 - RNA, 24 nt, Artificial Sequence
  Synthetic oligonucleotide: Ptpn6-6083
uuaggcccagccaggaccauaggg

SEQ ID NO: 26420 - RNA, 18 nt, Artificial Sequence
  Synthetic oligonucleotide: Ptpn6-3161
cagcaucucucuguaggg

SEQ ID NO: 26421 - RNA, 19 nt, Artificial Sequence
  Synthetic oligonucleotide: Ptpn6-3162
acagcaucucucuguaggg

SEQ ID NO: 26422 - RNA, 20 nt, Artificial Sequence
  Synthetic oligonucleotide: Ptpn6-1043
gacagcaucucucuguaggg

SEQ ID NO: 26423 - RNA, 21 nt, Artificial Sequence
  Synthetic oligonucleotide: Ptpn6-3163
ggacagcaucucucuguaggg

SEQ ID NO: 26424 - RNA, 22 nt, Artificial Sequence
  Synthetic oligonucleotide: Ptpn6-3164
gggacagcaucucucuguaggg

SEQ ID NO: 26425 - RNA, 23 nt, Artificial Sequence
  Synthetic oligonucleotide: Ptpn6-3165
cgggacagcaucucucuguaggg

SEQ ID NO: 26426 - RNA, 24 nt, Artificial Sequence
  Synthetic oligonucleotide: Ptpn6-3166
acgggacagcaucucucuguaggg

SEQ ID NO: 26427 - RNA, 18 nt, Artificial Sequence
  Synthetic oligonucleotide: Ptpn6-6084
guccucacaccuugcggg

SEQ ID NO: 26428 - RNA, 19 nt, Artificial Sequence
  Synthetic oligonucleotide: Ptpn6-6085
gguccucacaccuugcggg

SEQ ID NO: 26429 - RNA, 20 nt, Artificial Sequence
  Synthetic oligonucleotide: Ptpn6-1843
ggguccucacaccuugcggg

SEQ ID NO: 26430 - RNA, 21 nt, Artificial Sequence
  Synthetic oligonucleotide: Ptpn6-6086
gggguccucacaccuugcggg

SEQ ID NO: 26431 - RNA, 22 nt, Artificial Sequence
  Synthetic oligonucleotide: Ptpn6-6087
ggggguccucacaccuugcggg

SEQ ID NO: 26432 - RNA, 23 nt, Artificial Sequence
  Synthetic oligonucleotide: Ptpn6-6088
cggggguccucacaccuugcggg

SEQ ID NO: 26433 - RNA, 24 nt, Artificial Sequence
  Synthetic oligonucleotide: Ptpn6-6089
ccggggguccucacaccuugcggg

SEQ ID NO: 26434 - RNA, 18 nt, Artificial Sequence
  Synthetic oligonucleotide: Ptpn6-6090
cugccccgggggaagggg

SEQ ID NO: 26435 - RNA, 19 nt, Artificial Sequence
  Synthetic oligonucleotide: Ptpn6-6091
ccugccccgggggaagggg

SEQ ID NO: 26436 - RNA, 20 nt, Artificial Sequence
  Synthetic oligonucleotide: Ptpn6-1519
accugccccgggggaagggg

SEQ ID NO: 26437 - RNA, 21 nt, Artificial Sequence
  Synthetic oligonucleotide: Ptpn6-6092
aaccugccccgggggaagggg

SEQ ID NO: 26438 - RNA, 22 nt, Artificial Sequence
  Synthetic oligonucleotide: Ptpn6-6093
caaccugccccgggggaagggg

SEQ ID NO: 26439 - RNA, 23 nt, Artificial Sequence
  Synthetic oligonucleotide: Ptpn6-6094
ucaaccugccccgggggaagggg

SEQ ID NO: 26440 - RNA, 24 nt, Artificial Sequence
  Synthetic oligonucleotide: Ptpn6-6095
cucaaccugccccgggggaagggg

SEQ ID NO: 26441 - RNA, 18 nt, Artificial Sequence
  Synthetic oligonucleotide: Ptpn6-6096
ggcagagggccgcagggg

SEQ ID NO: 26442 - RNA, 19 nt, Artificial Sequence
  Synthetic oligonucleotide: Ptpn6-6097
cggcagagggccgcagggg

SEQ ID NO: 26443 - RNA, 20 nt, Artificial Sequence
  Synthetic oligonucleotide: Ptpn6-1876
acggcagagggccgcagggg

SEQ ID NO: 26444 - RNA, 21 nt, Artificial Sequence
  Synthetic oligonucleotide: Ptpn6-6098
cacggcagagggccgcagggg

SEQ ID NO: 26445 - RNA, 22 nt, Artificial Sequence
  Synthetic oligonucleotide: Ptpn6-6099
ccacggcagagggccgcagggg

SEQ ID NO: 26446 - RNA, 23 nt, Artificial Sequence
  Synthetic oligonucleotide: Ptpn6-6100
gccacggcagagggccgcagggg

SEQ ID NO: 26447 - RNA, 24 nt, Artificial Sequence
  Synthetic oligonucleotide: Ptpn6-6101
agccacggcagagggccgcagggg

SEQ ID NO: 26448 - RNA, 18 nt, Artificial Sequence
  Synthetic oligonucleotide: Ptpn6-6102
gggccgcagggggcgggg

SEQ ID NO: 26449 - RNA, 19 nt, Artificial Sequence
  Synthetic oligonucleotide: Ptpn6-6103
agggccgcagggggcgggg

SEQ ID NO: 26450 - RNA, 20 nt, Artificial Sequence
  Synthetic oligonucleotide: Ptpn6-1878
gagggccgcagggggcgggg

SEQ ID NO: 26451 - RNA, 21 nt, Artificial Sequence
  Synthetic oligonucleotide: Ptpn6-6104
agagggccgcagggggcgggg

SEQ ID NO: 26452 - RNA, 22 nt, Artificial Sequence
  Synthetic oligonucleotide: Ptpn6-6105
cagagggccgcagggggcgggg

SEQ ID NO: 26453 - RNA, 23 nt, Artificial Sequence
  Synthetic oligonucleotide: Ptpn6-6106
gcagagggccgcagggggcgggg

SEQ ID NO: 26454 - RNA, 24 nt, Artificial Sequence
  Synthetic oligonucleotide: Ptpn6-6107
ggcagagggccgcagggggcgggg

SEQ ID NO: 26455 - RNA, 18 nt, Artificial Sequence
  Synthetic oligonucleotide: Ptpn6-6108
gcagagggccgcaggggg

SEQ ID NO: 26456 - RNA, 19 nt, Artificial Sequence
  Synthetic oligonucleotide: Ptpn6-6109
ggcagagggccgcaggggg

SEQ ID NO: 26457 - RNA, 20 nt, Artificial Sequence
  Synthetic oligonucleotide: Ptpn6-1234
cggcagagggccgcaggggg

SEQ ID NO: 26458 - RNA, 21 nt, Artificial Sequence
  Synthetic oligonucleotide: Ptpn6-6110
acggcagagggccgcaggggg

SEQ ID NO: 26459 - RNA, 22 nt, Artificial Sequence
  Synthetic oligonucleotide: Ptpn6-6111
cacggcagagggccgcaggggg

SEQ ID NO: 26460 - RNA, 23 nt, Artificial Sequence
  Synthetic oligonucleotide: Ptpn6-6112
ccacggcagagggccgcaggggg

SEQ ID NO: 26461 - RNA, 24 nt, Artificial Sequence
  Synthetic oligonucleotide: Ptpn6-6113
gccacggcagagggccgcaggggg

SEQ ID NO: 26462 - RNA, 18 nt, Artificial Sequence
  Synthetic oligonucleotide: Ptpn6-6114
aaaauguuaaagaggggg

SEQ ID NO: 26463 - RNA, 19 nt, Artificial Sequence
  Synthetic oligonucleotide: Ptpn6-6115
gaaaauguuaaagaggggg

SEQ ID NO: 26464 - RNA, 20 nt, Artificial Sequence
  Synthetic oligonucleotide: Ptpn6-1832
ggaaaauguuaaagaggggg

SEQ ID NO: 26465 - RNA, 21 nt, Artificial Sequence
  Synthetic oligonucleotide: Ptpn6-6116
gggaaaauguuaaagaggggg

SEQ ID NO: 26466 - RNA, 22 nt, Artificial Sequence
  Synthetic oligonucleotide: Ptpn6-6117
ggggaaaauguuaaagaggggg

SEQ ID NO: 26467 - RNA, 23 nt, Artificial Sequence
  Synthetic oligonucleotide: Ptpn6-6118
aggggaaaauguuaaagaggggg

SEQ ID NO: 26468 - RNA, 24 nt, Artificial Sequence
  Synthetic oligonucleotide: Ptpn6-6119
caggggaaaauguuaaagaggggg

SEQ ID NO: 26469 - RNA, 18 nt, Artificial Sequence
  Synthetic oligonucleotide: Ptpn6-6120
cucaaccugccccggggg

SEQ ID NO: 26470 - RNA, 19 nt, Artificial Sequence
  Synthetic oligonucleotide: Ptpn6-6121
ucucaaccugccccggggg

SEQ ID NO: 26471 - RNA, 20 nt, Artificial Sequence
  Synthetic oligonucleotide: Ptpn6-2272
cucucaaccugccccggggg

SEQ ID NO: 26472 - RNA, 21 nt, Artificial Sequence
  Synthetic oligonucleotide: Ptpn6-6122
ccucucaaccugccccggggg

SEQ ID NO: 26473 - RNA, 22 nt, Artificial Sequence
  Synthetic oligonucleotide: Ptpn6-6123
gccucucaaccugccccggggg

SEQ ID NO: 26474 - RNA, 23 nt, Artificial Sequence
  Synthetic oligonucleotide: Ptpn6-6124
agccucucaaccugccccggggg

SEQ ID NO: 26475 - RNA, 24 nt, Artificial Sequence
  Synthetic oligonucleotide: Ptpn6-6125
cagccucucaaccugccccggggg

SEQ ID NO: 26476 - RNA, 18 nt, Artificial Sequence
  Synthetic oligonucleotide: Ptpn6-6126
ggaaaaggacaggugggg

SEQ ID NO: 26477 - RNA, 19 nt, Artificial Sequence
  Synthetic oligonucleotide: Ptpn6-6127
aggaaaaggacaggugggg

SEQ ID NO: 26478 - RNA, 20 nt, Artificial Sequence
  Synthetic oligonucleotide: Ptpn6-1252
caggaaaaggacaggugggg

SEQ ID NO: 26479 - RNA, 21 nt, Artificial Sequence
  Synthetic oligonucleotide: Ptpn6-6128
ccaggaaaaggacaggugggg

SEQ ID NO: 26480 - RNA, 22 nt, Artificial Sequence
  Synthetic oligonucleotide: Ptpn6-6129
uccaggaaaaggacaggugggg

SEQ ID NO: 26481 - RNA, 23 nt, Artificial Sequence
  Synthetic oligonucleotide: Ptpn6-6130
cuccaggaaaaggacaggugggg

SEQ ID NO: 26482 - RNA, 24 nt, Artificial Sequence
  Synthetic oligonucleotide: Ptpn6-6131
ucuccaggaaaaggacaggugggg

SEQ ID NO: 26483 - RNA, 18 nt, Artificial Sequence
  Synthetic oligonucleotide: Ptpn6-6132
aggaaaaggacagguggg

SEQ ID NO: 26484 - RNA, 19 nt, Artificial Sequence
  Synthetic oligonucleotide: Ptpn6-6133
caggaaaaggacagguggg

SEQ ID NO: 26485 - RNA, 20 nt, Artificial Sequence
  Synthetic oligonucleotide: Ptpn6-1891
ccaggaaaaggacagguggg

SEQ ID NO: 26486 - RNA, 21 nt, Artificial Sequence
  Synthetic oligonucleotide: Ptpn6-6134
uccaggaaaaggacagguggg

SEQ ID NO: 26487 - RNA, 22 nt, Artificial Sequence
  Synthetic oligonucleotide: Ptpn6-6135
cuccaggaaaaggacagguggg

SEQ ID NO: 26488 - RNA, 23 nt, Artificial Sequence
  Synthetic oligonucleotide: Ptpn6-6136
ucuccaggaaaaggacagguggg

SEQ ID NO: 26489 - RNA, 24 nt, Artificial Sequence
  Synthetic oligonucleotide: Ptpn6-6137
gucuccaggaaaaggacagguggg

SEQ ID NO: 26490 - RNA, 18 nt, Artificial Sequence
  Synthetic oligonucleotide: Ptpn6-6138
gagcggcgggguauuggg

SEQ ID NO: 26491 - RNA, 19 nt, Artificial Sequence
  Synthetic oligonucleotide: Ptpn6-6139
agagcggcgggguauuggg

SEQ ID NO: 26492 - RNA, 20 nt, Artificial Sequence
  Synthetic oligonucleotide: Ptpn6-1914
cagagcggcgggguauuggg

SEQ ID NO: 26493 - RNA, 21 nt, Artificial Sequence
  Synthetic oligonucleotide: Ptpn6-6140
acagagcggcgggguauuggg

SEQ ID NO: 26494 - RNA, 22 nt, Artificial Sequence
  Synthetic oligonucleotide: Ptpn6-6141
gacagagcggcgggguauuggg

SEQ ID NO: 26495 - RNA, 23 nt, Artificial Sequence
  Synthetic oligonucleotide: Ptpn6-6142
ugacagagcggcgggguauuggg

SEQ ID NO: 26496 - RNA, 24 nt, Artificial Sequence
  Synthetic oligonucleotide: Ptpn6-6143
cugacagagcggcgggguauuggg

SEQ ID NO: 26497 - RNA, 18 nt, Artificial Sequence
  Synthetic oligonucleotide: Ptpn6-6144
aggaagagcaaccaaugg

SEQ ID NO: 26498 - RNA, 19 nt, Artificial Sequence
  Synthetic oligonucleotide: Ptpn6-6145
gaggaagagcaaccaaugg

SEQ ID NO: 26499 - RNA, 20 nt, Artificial Sequence
  Synthetic oligonucleotide: Ptpn6-1221
ugaggaagagcaaccaaugg

SEQ ID NO: 26500 - RNA, 21 nt, Artificial Sequence
  Synthetic oligonucleotide: Ptpn6-6146
cugaggaagagcaaccaaugg

SEQ ID NO: 26501 - RNA, 22 nt, Artificial Sequence
  Synthetic oligonucleotide: Ptpn6-6147
gcugaggaagagcaaccaaugg

SEQ ID NO: 26502 - RNA, 23 nt, Artificial Sequence
  Synthetic oligonucleotide: Ptpn6-6148
ggcugaggaagagcaaccaaugg

SEQ ID NO: 26503 - RNA, 24 nt, Artificial Sequence
  Synthetic oligonucleotide: Ptpn6-6149
uggcugaggaagagcaaccaaugg

SEQ ID NO: 26504 - RNA, 18 nt, Artificial Sequence
  Synthetic oligonucleotide: Ptpn6-6150
accaggaaguaacccugg

SEQ ID NO: 26505 - RNA, 19 nt, Artificial Sequence
  Synthetic oligonucleotide: Ptpn6-6151
gaccaggaaguaacccugg

SEQ ID NO: 26506 - RNA, 20 nt, Artificial Sequence
  Synthetic oligonucleotide: Ptpn6-1920
agaccaggaaguaacccugg

SEQ ID NO: 26507 - RNA, 21 nt, Artificial Sequence
  Synthetic oligonucleotide: Ptpn6-6152
cagaccaggaaguaacccugg

SEQ ID NO: 26508 - RNA, 22 nt, Artificial Sequence
  Synthetic oligonucleotide: Ptpn6-6153
acagaccaggaaguaacccugg

SEQ ID NO: 26509 - RNA, 23 nt, Artificial Sequence
  Synthetic oligonucleotide: Ptpn6-6154
aacagaccaggaaguaacccugg

SEQ ID NO: 26510 - RNA, 24 nt, Artificial Sequence
  Synthetic oligonucleotide: Ptpn6-6155
gaacagaccaggaaguaacccugg

SEQ ID NO: 26511 - RNA, 18 nt, Artificial Sequence
  Synthetic oligonucleotide: Ptpn6-6156
gaggaagagcaaccaaug

SEQ ID NO: 26512 - RNA, 19 nt, Artificial Sequence
  Synthetic oligonucleotide: Ptpn6-6157
ugaggaagagcaaccaaug

SEQ ID NO: 26513 - RNA, 20 nt, Artificial Sequence
  Synthetic oligonucleotide: Ptpn6-1239
cugaggaagagcaaccaaug

SEQ ID NO: 26514 - RNA, 21 nt, Artificial Sequence
  Synthetic oligonucleotide: Ptpn6-6158
gcugaggaagagcaaccaaug

SEQ ID NO: 26515 - RNA, 22 nt, Artificial Sequence
  Synthetic oligonucleotide: Ptpn6-6159
ggcugaggaagagcaaccaaug

SEQ ID NO: 26516 - RNA, 23 nt, Artificial Sequence
  Synthetic oligonucleotide: Ptpn6-6160
uggcugaggaagagcaaccaaug

SEQ ID NO: 26517 - RNA, 24 nt, Artificial Sequence
  Synthetic oligonucleotide: Ptpn6-6161
cuggcugaggaagagcaaccaaug

SEQ ID NO: 26518 - RNA, 18 nt, Artificial Sequence
  Synthetic oligonucleotide: Ptpn6-6162
ggaaguagaaaugcaaug

SEQ ID NO: 26519 - RNA, 19 nt, Artificial Sequence
  Synthetic oligonucleotide: Ptpn6-6163
uggaaguagaaaugcaaug

SEQ ID NO: 26520 - RNA, 20 nt, Artificial Sequence
  Synthetic oligonucleotide: Ptpn6-1822
cuggaaguagaaaugcaaug

SEQ ID NO: 26521 - RNA, 21 nt, Artificial Sequence
  Synthetic oligonucleotide: Ptpn6-6164
gcuggaaguagaaaugcaaug

SEQ ID NO: 26522 - RNA, 22 nt, Artificial Sequence
  Synthetic oligonucleotide: Ptpn6-6165
ggcuggaaguagaaaugcaaug

SEQ ID NO: 26523 - RNA, 23 nt, Artificial Sequence
  Synthetic oligonucleotide: Ptpn6-6166
aggcuggaaguagaaaugcaaug

SEQ ID NO: 26524 - RNA, 24 nt, Artificial Sequence
  Synthetic oligonucleotide: Ptpn6-6167
gaggcuggaaguagaaaugcaaug

SEQ ID NO: 26525 - RNA, 18 nt, Artificial Sequence
  Synthetic oligonucleotide: Ptpn6-6168
gccaggccaauggcacug

SEQ ID NO: 26526 - RNA, 19 nt, Artificial Sequence
  Synthetic oligonucleotide: Ptpn6-6169
ugccaggccaauggcacug

SEQ ID NO: 26527 - RNA, 20 nt, Artificial Sequence
  Synthetic oligonucleotide: Ptpn6-1883
cugccaggccaauggcacug

SEQ ID NO: 26528 - RNA, 21 nt, Artificial Sequence
  Synthetic oligonucleotide: Ptpn6-6170
ccugccaggccaauggcacug

SEQ ID NO: 26529 - RNA, 22 nt, Artificial Sequence
  Synthetic oligonucleotide: Ptpn6-6171
gccugccaggccaauggcacug

SEQ ID NO: 26530 - RNA, 23 nt, Artificial Sequence
  Synthetic oligonucleotide: Ptpn6-6172
ugccugccaggccaauggcacug

SEQ ID NO: 26531 - RNA, 24 nt, Artificial Sequence
  Synthetic oligonucleotide: Ptpn6-6173
cugccugccaggccaauggcacug

SEQ ID NO: 26532 - RNA, 18 nt, Artificial Sequence
  Synthetic oligonucleotide: Ptpn6-6174
cacccacccagggcgcug

SEQ ID NO: 26533 - RNA, 19 nt, Artificial Sequence
  Synthetic oligonucleotide: Ptpn6-6175
ccacccacccagggcgcug

SEQ ID NO: 26534 - RNA, 20 nt, Artificial Sequence
  Synthetic oligonucleotide: Ptpn6-1510
cccacccacccagggcgcug

SEQ ID NO: 26535 - RNA, 21 nt, Artificial Sequence
  Synthetic oligonucleotide: Ptpn6-6176
gcccacccacccagggcgcug

SEQ ID NO: 26536 - RNA, 22 nt, Artificial Sequence
  Synthetic oligonucleotide: Ptpn6-6177
ggcccacccacccagggcgcug

SEQ ID NO: 26537 - RNA, 23 nt, Artificial Sequence
  Synthetic oligonucleotide: Ptpn6-6178
aggcccacccacccagggcgcug

SEQ ID NO: 26538 - RNA, 24 nt, Artificial Sequence
  Synthetic oligonucleotide: Ptpn6-6179
caggcccacccacccagggcgcug

SEQ ID NO: 26539 - RNA, 18 nt, Artificial Sequence
  Synthetic oligonucleotide: Ptpn6-6180
aggaaguaacccuggcug

SEQ ID NO: 26540 - RNA, 19 nt, Artificial Sequence
  Synthetic oligonucleotide: Ptpn6-6181
caggaaguaacccuggcug

SEQ ID NO: 26541 - RNA, 20 nt, Artificial Sequence
  Synthetic oligonucleotide: Ptpn6-1231
ccaggaaguaacccuggcug

SEQ ID NO: 26542 - RNA, 21 nt, Artificial Sequence
  Synthetic oligonucleotide: Ptpn6-6182
accaggaaguaacccuggcug

SEQ ID NO: 26543 - RNA, 22 nt, Artificial Sequence
  Synthetic oligonucleotide: Ptpn6-6183
gaccaggaaguaacccuggcug

SEQ ID NO: 26544 - RNA, 23 nt, Artificial Sequence
  Synthetic oligonucleotide: Ptpn6-6184
agaccaggaaguaacccuggcug

SEQ ID NO: 26545 - RNA, 24 nt, Artificial Sequence
  Synthetic oligonucleotide: Ptpn6-6185
cagaccaggaaguaacccuggcug

SEQ ID NO: 26546 - RNA, 18 nt, Artificial Sequence
  Synthetic oligonucleotide: Ptpn6-3199
cgggacagcaucucucug

SEQ ID NO: 26547 - RNA, 19 nt, Artificial Sequence
  Synthetic oligonucleotide: Ptpn6-3200
acgggacagcaucucucug

SEQ ID NO: 26548 - RNA, 20 nt, Artificial Sequence
  Synthetic oligonucleotide: Ptpn6-1863
cacgggacagcaucucucug

SEQ ID NO: 26549 - RNA, 21 nt, Artificial Sequence
  Synthetic oligonucleotide: Ptpn6-3201
ccacgggacagcaucucucug

SEQ ID NO: 26550 - RNA, 22 nt, Artificial Sequence
  Synthetic oligonucleotide: Ptpn6-3202
cccacgggacagcaucucucug

SEQ ID NO: 26551 - RNA, 23 nt, Artificial Sequence
  Synthetic oligonucleotide: Ptpn6-3203
acccacgggacagcaucucucug

SEQ ID NO: 26552 - RNA, 24 nt, Artificial Sequence
  Synthetic oligonucleotide: Ptpn6-3204
uacccacgggacagcaucucucug

SEQ ID NO: 26553 - RNA, 18 nt, Artificial Sequence
  Synthetic oligonucleotide: Ptpn6-6186
aguggcccaagccaggug

SEQ ID NO: 26554 - RNA, 19 nt, Artificial Sequence
  Synthetic oligonucleotide: Ptpn6-6187
caguggcccaagccaggug

SEQ ID NO: 26555 - RNA, 20 nt, Artificial Sequence
  Synthetic oligonucleotide: Ptpn6-1235
acaguggcccaagccaggug

SEQ ID NO: 26556 - RNA, 21 nt, Artificial Sequence
  Synthetic oligonucleotide: Ptpn6-6188
cacaguggcccaagccaggug

SEQ ID NO: 26557 - RNA, 22 nt, Artificial Sequence
  Synthetic oligonucleotide: Ptpn6-6189
gcacaguggcccaagccaggug

SEQ ID NO: 26558 - RNA, 23 nt, Artificial Sequence
  Synthetic oligonucleotide: Ptpn6-6190
ugcacaguggcccaagccaggug

SEQ ID NO: 26559 - RNA, 24 nt, Artificial Sequence
  Synthetic oligonucleotide: Ptpn6-6191
gugcacaguggcccaagccaggug

SEQ ID NO: 26560 - RNA, 18 nt, Artificial Sequence
  Synthetic oligonucleotide: Ptpn6-6192
ggggguccucacaccuug

SEQ ID NO: 26561 - RNA, 19 nt, Artificial Sequence
  Synthetic oligonucleotide: Ptpn6-6193
cggggguccucacaccuug

SEQ ID NO: 26562 - RNA, 20 nt, Artificial Sequence
  Synthetic oligonucleotide: Ptpn6-990
ccggggguccucacaccuug

SEQ ID NO: 26563 - RNA, 21 nt, Artificial Sequence
  Synthetic oligonucleotide: Ptpn6-6194
gccggggguccucacaccuug

SEQ ID NO: 26564 - RNA, 22 nt, Artificial Sequence
  Synthetic oligonucleotide: Ptpn6-6195
agccggggguccucacaccuug

SEQ ID NO: 26565 - RNA, 23 nt, Artificial Sequence
  Synthetic oligonucleotide: Ptpn6-6196
gagccggggguccucacaccuug

SEQ ID NO: 26566 - RNA, 24 nt, Artificial Sequence
  Synthetic oligonucleotide: Ptpn6-6197
ugagccggggguccucacaccuug

SEQ ID NO: 26567 - RNA, 18 nt, Artificial Sequence
  Synthetic oligonucleotide: Ptpn6-6198
ugaggaagagcaaccaau

SEQ ID NO: 26568 - RNA, 19 nt, Artificial Sequence
  Synthetic oligonucleotide: Ptpn6-6199
cugaggaagagcaaccaau

SEQ ID NO: 26569 - RNA, 20 nt, Artificial Sequence
  Synthetic oligonucleotide: Ptpn6-1029
gcugaggaagagcaaccaau

SEQ ID NO: 26570 - RNA, 21 nt, Artificial Sequence
  Synthetic oligonucleotide: Ptpn6-6200
ggcugaggaagagcaaccaau

SEQ ID NO: 26571 - RNA, 22 nt, Artificial Sequence
  Synthetic oligonucleotide: Ptpn6-6201
uggcugaggaagagcaaccaau

SEQ ID NO: 26572 - RNA, 23 nt, Artificial Sequence
  Synthetic oligonucleotide: Ptpn6-6202
cuggcugaggaagagcaaccaau

SEQ ID NO: 26573 - RNA, 24 nt, Artificial Sequence
  Synthetic oligonucleotide: Ptpn6-6203
ccuggcugaggaagagcaaccaau

SEQ ID NO: 26574 - RNA, 18 nt, Artificial Sequence
  Synthetic oligonucleotide: Ptpn6-6204
aggcccagccaggaccau

SEQ ID NO: 26575 - RNA, 19 nt, Artificial Sequence
  Synthetic oligonucleotide: Ptpn6-6205
uaggcccagccaggaccau

SEQ ID NO: 26576 - RNA, 20 nt, Artificial Sequence
  Synthetic oligonucleotide: Ptpn6-1531
uuaggcccagccaggaccau

SEQ ID NO: 26577 - RNA, 21 nt, Artificial Sequence
  Synthetic oligonucleotide: Ptpn6-6206
guuaggcccagccaggaccau

SEQ ID NO: 26578 - RNA, 22 nt, Artificial Sequence
  Synthetic oligonucleotide: Ptpn6-6207
gguuaggcccagccaggaccau

SEQ ID NO: 26579 - RNA, 23 nt, Artificial Sequence
  Synthetic oligonucleotide: Ptpn6-6208
ggguuaggcccagccaggaccau

SEQ ID NO: 26580 - RNA, 24 nt, Artificial Sequence
  Synthetic oligonucleotide: Ptpn6-6209
aggguuaggcccagccaggaccau

SEQ ID NO: 26581 - RNA, 18 nt, Artificial Sequence
  Synthetic oligonucleotide: Ptpn6-6210
cgggaaggggaaguucau

SEQ ID NO: 26582 - RNA, 19 nt, Artificial Sequence
  Synthetic oligonucleotide: Ptpn6-6211
gcgggaaggggaaguucau

SEQ ID NO: 26583 - RNA, 20 nt, Artificial Sequence
  Synthetic oligonucleotide: Ptpn6-1211
ugcgggaaggggaaguucau

SEQ ID NO: 26584 - RNA, 21 nt, Artificial Sequence
  Synthetic oligonucleotide: Ptpn6-6212
uugcgggaaggggaaguucau

SEQ ID NO: 26585 - RNA, 22 nt, Artificial Sequence
  Synthetic oligonucleotide: Ptpn6-6213
cuugcgggaaggggaaguucau

SEQ ID NO: 26586 - RNA, 23 nt, Artificial Sequence
  Synthetic oligonucleotide: Ptpn6-6214
ccuugcgggaaggggaaguucau

SEQ ID NO: 26587 - RNA, 24 nt, Artificial Sequence
  Synthetic oligonucleotide: Ptpn6-6215
accuugcgggaaggggaaguucau

SEQ ID NO: 26588 - RNA, 18 nt, Artificial Sequence
  Synthetic oligonucleotide: Ptpn6-6216
gcggaaaccaaagggccu

SEQ ID NO: 26589 - RNA, 19 nt, Artificial Sequence
  Synthetic oligonucleotide: Ptpn6-6217
ggcggaaaccaaagggccu

SEQ ID NO: 26590 - RNA, 20 nt, Artificial Sequence
  Synthetic oligonucleotide: Ptpn6-1932
aggcggaaaccaaagggccu

SEQ ID NO: 26591 - RNA, 21 nt, Artificial Sequence
  Synthetic oligonucleotide: Ptpn6-6218
uaggcggaaaccaaagggccu

SEQ ID NO: 26592 - RNA, 22 nt, Artificial Sequence
  Synthetic oligonucleotide: Ptpn6-6219
guaggcggaaaccaaagggccu

SEQ ID NO: 26593 - RNA, 23 nt, Artificial Sequence
  Synthetic oligonucleotide: Ptpn6-6220
cguaggcggaaaccaaagggccu

SEQ ID NO: 26594 - RNA, 24 nt, Artificial Sequence
  Synthetic oligonucleotide: Ptpn6-6221
ccguaggcggaaaccaaagggccu

SEQ ID NO: 26595 - RNA, 18 nt, Artificial Sequence
  Synthetic oligonucleotide: Ptpn6-6222
ccuaacagcccaguuccu

SEQ ID NO: 26596 - RNA, 19 nt, Artificial Sequence
  Synthetic oligonucleotide: Ptpn6-6223
cccuaacagcccaguuccu

SEQ ID NO: 26597 - RNA, 20 nt, Artificial Sequence
  Synthetic oligonucleotide: Ptpn6-1934
ucccuaacagcccaguuccu

SEQ ID NO: 26598 - RNA, 21 nt, Artificial Sequence
  Synthetic oligonucleotide: Ptpn6-6224
aucccuaacagcccaguuccu

SEQ ID NO: 26599 - RNA, 22 nt, Artificial Sequence
  Synthetic oligonucleotide: Ptpn6-6225
aaucccuaacagcccaguuccu

SEQ ID NO: 26600 - RNA, 23 nt, Artificial Sequence
  Synthetic oligonucleotide: Ptpn6-6226
aaaucccuaacagcccaguuccu

SEQ ID NO: 26601 - RNA, 24 nt, Artificial Sequence
  Synthetic oligonucleotide: Ptpn6-6227
aaaaucccuaacagcccaguuccu

SEQ ID NO: 26602 - RNA, 18 nt, Artificial Sequence
  Synthetic oligonucleotide: Ptpn6-6228
ccacccacccagggcgcu

SEQ ID NO: 26603 - RNA, 19 nt, Artificial Sequence
  Synthetic oligonucleotide: Ptpn6-6229
cccacccacccagggcgcu

SEQ ID NO: 26604 - RNA, 20 nt, Artificial Sequence
  Synthetic oligonucleotide: Ptpn6-2266
gcccacccacccagggcgcu

SEQ ID NO: 26605 - RNA, 21 nt, Artificial Sequence
  Synthetic oligonucleotide: Ptpn6-6230
ggcccacccacccagggcgcu

SEQ ID NO: 26606 - RNA, 22 nt, Artificial Sequence
  Synthetic oligonucleotide: Ptpn6-6231
aggcccacccacccagggcgcu

SEQ ID NO: 26607 - RNA, 23 nt, Artificial Sequence
  Synthetic oligonucleotide: Ptpn6-6232
caggcccacccacccagggcgcu

SEQ ID NO: 26608 - RNA, 24 nt, Artificial Sequence
  Synthetic oligonucleotide: Ptpn6-6233
gcaggcccacccacccagggcgcu

SEQ ID NO: 26609 - RNA, 18 nt, Artificial Sequence
  Synthetic oligonucleotide: Ptpn6-6234
caggaaguaacccuggcu

SEQ ID NO: 26610 - RNA, 19 nt, Artificial Sequence
  Synthetic oligonucleotide: Ptpn6-6235
ccaggaaguaacccuggcu

SEQ ID NO: 26611 - RNA, 20 nt, Artificial Sequence
  Synthetic oligonucleotide: Ptpn6-1921
accaggaaguaacccuggcu

SEQ ID NO: 26612 - RNA, 21 nt, Artificial Sequence
  Synthetic oligonucleotide: Ptpn6-6236
gaccaggaaguaacccuggcu

SEQ ID NO: 26613 - RNA, 22 nt, Artificial Sequence
  Synthetic oligonucleotide: Ptpn6-6237
agaccaggaaguaacccuggcu

SEQ ID NO: 26614 - RNA, 23 nt, Artificial Sequence
  Synthetic oligonucleotide: Ptpn6-6238
cagaccaggaaguaacccuggcu

SEQ ID NO: 26615 - RNA, 24 nt, Artificial Sequence
  Synthetic oligonucleotide: Ptpn6-6239
acagaccaggaaguaacccuggcu

SEQ ID NO: 26616 - RNA, 18 nt, Artificial Sequence
  Synthetic oligonucleotide: Ptpn6-6240
caguggcccaagccaggu

SEQ ID NO: 26617 - RNA, 19 nt, Artificial Sequence
  Synthetic oligonucleotide: Ptpn6-6241
acaguggcccaagccaggu

SEQ ID NO: 26618 - RNA, 20 nt, Artificial Sequence
  Synthetic oligonucleotide: Ptpn6-1880
cacaguggcccaagccaggu

SEQ ID NO: 26619 - RNA, 21 nt, Artificial Sequence
  Synthetic oligonucleotide: Ptpn6-6242
gcacaguggcccaagccaggu

SEQ ID NO: 26620 - RNA, 22 nt, Artificial Sequence
  Synthetic oligonucleotide: Ptpn6-6243
ugcacaguggcccaagccaggu

SEQ ID NO: 26621 - RNA, 23 nt, Artificial Sequence
  Synthetic oligonucleotide: Ptpn6-6244
gugcacaguggcccaagccaggu

SEQ ID NO: 26622 - RNA, 24 nt, Artificial Sequence
  Synthetic oligonucleotide: Ptpn6-6245
ugugcacaguggcccaagccaggu

SEQ ID NO: 26623 - RNA, 18 nt, Artificial Sequence
  Synthetic oligonucleotide: Ptpn6-6246
agcggcgggguauugggu

SEQ ID NO: 26624 - RNA, 19 nt, Artificial Sequence
  Synthetic oligonucleotide: Ptpn6-6247
gagcggcgggguauugggu

SEQ ID NO: 26625 - RNA, 20 nt, Artificial Sequence
  Synthetic oligonucleotide: Ptpn6-980
agagcggcgggguauugggu

SEQ ID NO: 26626 - RNA, 21 nt, Artificial Sequence
  Synthetic oligonucleotide: Ptpn6-6248
cagagcggcgggguauugggu

SEQ ID NO: 26627 - RNA, 22 nt, Artificial Sequence
  Synthetic oligonucleotide: Ptpn6-6249
acagagcggcgggguauugggu

SEQ ID NO: 26628 - RNA, 23 nt, Artificial Sequence
  Synthetic oligonucleotide: Ptpn6-6250
gacagagcggcgggguauugggu

SEQ ID NO: 26629 - RNA, 24 nt, Artificial Sequence
  Synthetic oligonucleotide: Ptpn6-6251
ugacagagcggcgggguauugggu

SEQ ID NO: 26630 - RNA, 18 nt, Artificial Sequence
  Synthetic oligonucleotide: Ptpn6-3224
gggacagcaucucucugu

SEQ ID NO: 26631 - RNA, 19 nt, Artificial Sequence
  Synthetic oligonucleotide: Ptpn6-3225
cgggacagcaucucucugu

SEQ ID NO: 26632 - RNA, 20 nt, Artificial Sequence
  Synthetic oligonucleotide: Ptpn6-1190
acgggacagcaucucucugu

SEQ ID NO: 26633 - RNA, 21 nt, Artificial Sequence
  Synthetic oligonucleotide: Ptpn6-3226
cacgggacagcaucucucugu

SEQ ID NO: 26634 - RNA, 22 nt, Artificial Sequence
  Synthetic oligonucleotide: Ptpn6-3227
ccacgggacagcaucucucugu

SEQ ID NO: 26635 - RNA, 23 nt, Artificial Sequence
  Synthetic oligonucleotide: Ptpn6-3228
cccacgggacagcaucucucugu

SEQ ID NO: 26636 - RNA, 24 nt, Artificial Sequence
  Synthetic oligonucleotide: Ptpn6-3229
acccacgggacagcaucucucugu

SEQ ID NO: 26637 - RNA, 18 nt, Artificial Sequence
  Synthetic oligonucleotide: Ptpn6-6252
cggggguccucacaccuu

SEQ ID NO: 26638 - RNA, 19 nt, Artificial Sequence
  Synthetic oligonucleotide: Ptpn6-6253
ccggggguccucacaccuu

SEQ ID NO: 26639 - RNA, 20 nt, Artificial Sequence
  Synthetic oligonucleotide: Ptpn6-1840
gccggggguccucacaccuu

SEQ ID NO: 26640 - RNA, 21 nt, Artificial Sequence
  Synthetic oligonucleotide: Ptpn6-6254
agccggggguccucacaccuu

SEQ ID NO: 26641 - RNA, 22 nt, Artificial Sequence
  Synthetic oligonucleotide: Ptpn6-6255
gagccggggguccucacaccuu

SEQ ID NO: 26642 - RNA, 23 nt, Artificial Sequence
  Synthetic oligonucleotide: Ptpn6-6256
ugagccggggguccucacaccuu

SEQ ID NO: 26643 - RNA, 24 nt, Artificial Sequence
  Synthetic oligonucleotide: Ptpn6-6257
gugagccggggguccucacaccuu

SEQ ID NO: 26644 - RNA, 18 nt, Artificial Sequence
  Synthetic oligonucleotide: Ptpn6-6258
ccauagggaggagcuguu

SEQ ID NO: 26645 - RNA, 19 nt, Artificial Sequence
  Synthetic oligonucleotide: Ptpn6-6259
accauagggaggagcuguu

SEQ ID NO: 26646 - RNA, 20 nt, Artificial Sequence
  Synthetic oligonucleotide: Ptpn6-2286
gaccauagggaggagcuguu

SEQ ID NO: 26647 - RNA, 21 nt, Artificial Sequence
  Synthetic oligonucleotide: Ptpn6-6260
ggaccauagggaggagcuguu

SEQ ID NO: 26648 - RNA, 22 nt, Artificial Sequence
  Synthetic oligonucleotide: Ptpn6-6261
aggaccauagggaggagcuguu

SEQ ID NO: 26649 - RNA, 23 nt, Artificial Sequence
  Synthetic oligonucleotide: Ptpn6-6262
caggaccauagggaggagcuguu

SEQ ID NO: 26650 - RNA, 24 nt, Artificial Sequence
  Synthetic oligonucleotide: Ptpn6-6263
ccaggaccauagggaggagcuguu

SEQ ID NO: 26651 - RNA, 18 nt, Artificial Sequence
  Synthetic oligonucleotide: Ptpn6-6264
ugcuauguuugagguguu

SEQ ID NO: 26652 - RNA, 19 nt, Artificial Sequence
  Synthetic oligonucleotide: Ptpn6-6265
cugcuauguuugagguguu

SEQ ID NO: 26653 - RNA, 20 nt, Artificial Sequence
  Synthetic oligonucleotide: Ptpn6-1780
acugcuauguuugagguguu

SEQ ID NO: 26654 - RNA, 21 nt, Artificial Sequence
  Synthetic oligonucleotide: Ptpn6-6266
gacugcuauguuugagguguu

SEQ ID NO: 26655 - RNA, 22 nt, Artificial Sequence
  Synthetic oligonucleotide: Ptpn6-6267
ugacugcuauguuugagguguu

SEQ ID NO: 26656 - RNA, 23 nt, Artificial Sequence
  Synthetic oligonucleotide: Ptpn6-6268
cugacugcuauguuugagguguu

SEQ ID NO: 26657 - RNA, 24 nt, Artificial Sequence
  Synthetic oligonucleotide: Ptpn6-6269
ucugacugcuauguuugagguguu

SEQ ID NO: 26658 - RNA, 18 nt, Artificial Sequence
  Synthetic oligonucleotide: Ptpn6-6270
accuccuucucugaggaa

SEQ ID NO: 26659 - RNA, 19 nt, Artificial Sequence
  Synthetic oligonucleotide: Ptpn6-6271
uaccuccuucucugaggaa

SEQ ID NO: 26660 - RNA, 20 nt, Artificial Sequence
  Synthetic oligonucleotide: Ptpn6-1656
guaccuccuucucugaggaa

SEQ ID NO: 26661 - RNA, 21 nt, Artificial Sequence
  Synthetic oligonucleotide: Ptpn6-6272
gguaccuccuucucugaggaa

SEQ ID NO: 26662 - RNA, 22 nt, Artificial Sequence
  Synthetic oligonucleotide: Ptpn6-6273
ggguaccuccuucucugaggaa

SEQ ID NO: 26663 - RNA, 23 nt, Artificial Sequence
  Synthetic oligonucleotide: Ptpn6-6274
gggguaccuccuucucugaggaa

SEQ ID NO: 26664 - RNA, 24 nt, Artificial Sequence
  Synthetic oligonucleotide: Ptpn6-6275
ggggguaccuccuucucugaggaa

SEQ ID NO: 26665 - RNA, 18 nt, Artificial Sequence
  Synthetic oligonucleotide: Ptpn6-3230
ggcuucccccucccuaca

SEQ ID NO: 26666 - RNA, 19 nt, Artificial Sequence
  Synthetic oligonucleotide: Ptpn6-3231
uggcuucccccucccuaca

SEQ ID NO: 26667 - RNA, 20 nt, Artificial Sequence
  Synthetic oligonucleotide: Ptpn6-1689
guggcuucccccucccuaca

SEQ ID NO: 26668 - RNA, 21 nt, Artificial Sequence
  Synthetic oligonucleotide: Ptpn6-3232
cguggcuucccccucccuaca

SEQ ID NO: 26669 - RNA, 22 nt, Artificial Sequence
  Synthetic oligonucleotide: Ptpn6-3233
ccguggcuucccccucccuaca

SEQ ID NO: 26670 - RNA, 23 nt, Artificial Sequence
  Synthetic oligonucleotide: Ptpn6-3234
gccguggcuucccccucccuaca

SEQ ID NO: 26671 - RNA, 24 nt, Artificial Sequence
  Synthetic oligonucleotide: Ptpn6-3235
ugccguggcuucccccucccuaca

SEQ ID NO: 26672 - RNA, 18 nt, Artificial Sequence
  Synthetic oligonucleotide: Ptpn6-3236
gguaagucccgggcacca

SEQ ID NO: 26673 - RNA, 19 nt, Artificial Sequence
  Synthetic oligonucleotide: Ptpn6-3237
ggguaagucccgggcacca

SEQ ID NO: 26674 - RNA, 20 nt, Artificial Sequence
  Synthetic oligonucleotide: Ptpn6-1692
uggguaagucccgggcacca

SEQ ID NO: 26675 - RNA, 21 nt, Artificial Sequence
  Synthetic oligonucleotide: Ptpn6-3238
guggguaagucccgggcacca

SEQ ID NO: 26676 - RNA, 22 nt, Artificial Sequence
  Synthetic oligonucleotide: Ptpn6-3239
cguggguaagucccgggcacca

SEQ ID NO: 26677 - RNA, 23 nt, Artificial Sequence
  Synthetic oligonucleotide: Ptpn6-3240
ccguggguaagucccgggcacca

SEQ ID NO: 26678 - RNA, 24 nt, Artificial Sequence
  Synthetic oligonucleotide: Ptpn6-3241
cccguggguaagucccgggcacca

SEQ ID NO: 26679 - RNA, 18 nt, Artificial Sequence
  Synthetic oligonucleotide: Ptpn6-6276
ugggugggugggccugca

SEQ ID NO: 26680 - RNA, 19 nt, Artificial Sequence
  Synthetic oligonucleotide: Ptpn6-6277
cugggugggugggccugca

SEQ ID NO: 26681 - RNA, 20 nt, Artificial Sequence
  Synthetic oligonucleotide: Ptpn6-6278
ccugggugggugggccugca

SEQ ID NO: 26682 - RNA, 21 nt, Artificial Sequence
  Synthetic oligonucleotide: Ptpn6-6279
cccugggugggugggccugca

SEQ ID NO: 26683 - RNA, 22 nt, Artificial Sequence
  Synthetic oligonucleotide: Ptpn6-6280
gcccugggugggugggccugca

SEQ ID NO: 26684 - RNA, 23 nt, Artificial Sequence
  Synthetic oligonucleotide: Ptpn6-6281
cgcccugggugggugggccugca

SEQ ID NO: 26685 - RNA, 24 nt, Artificial Sequence
  Synthetic oligonucleotide: Ptpn6-6282
gcgcccugggugggugggccugca

SEQ ID NO: 26686 - RNA, 18 nt, Artificial Sequence
  Synthetic oligonucleotide: Ptpn6-6283
ucccgcuuuggggcugca

SEQ ID NO: 26687 - RNA, 19 nt, Artificial Sequence
  Synthetic oligonucleotide: Ptpn6-6284
cucccgcuuuggggcugca

SEQ ID NO: 26688 - RNA, 20 nt, Artificial Sequence
  Synthetic oligonucleotide: Ptpn6-1140
acucccgcuuuggggcugca

SEQ ID NO: 26689 - RNA, 21 nt, Artificial Sequence
  Synthetic oligonucleotide: Ptpn6-6285
uacucccgcuuuggggcugca

SEQ ID NO: 26690 - RNA, 22 nt, Artificial Sequence
  Synthetic oligonucleotide: Ptpn6-6286
guacucccgcuuuggggcugca

SEQ ID NO: 26691 - RNA, 23 nt, Artificial Sequence
  Synthetic oligonucleotide: Ptpn6-6287
uguacucccgcuuuggggcugca

SEQ ID NO: 26692 - RNA, 24 nt, Artificial Sequence
  Synthetic oligonucleotide: Ptpn6-6288
cuguacucccgcuuuggggcugca

SEQ ID NO: 26693 - RNA, 18 nt, Artificial Sequence
  Synthetic oligonucleotide: Ptpn6-6289
uuggccuggcaggcagga

SEQ ID NO: 26694 - RNA, 19 nt, Artificial Sequence
  Synthetic oligonucleotide: Ptpn6-6290
auuggccuggcaggcagga

SEQ ID NO: 26695 - RNA, 20 nt, Artificial Sequence
  Synthetic oligonucleotide: Ptpn6-1681
cauuggccuggcaggcagga

SEQ ID NO: 26696 - RNA, 21 nt, Artificial Sequence
  Synthetic oligonucleotide: Ptpn6-6291
ccauuggccuggcaggcagga

SEQ ID NO: 26697 - RNA, 22 nt, Artificial Sequence
  Synthetic oligonucleotide: Ptpn6-6292
gccauuggccuggcaggcagga

SEQ ID NO: 26698 - RNA, 23 nt, Artificial Sequence
  Synthetic oligonucleotide: Ptpn6-6293
ugccauuggccuggcaggcagga

SEQ ID NO: 26699 - RNA, 24 nt, Artificial Sequence
  Synthetic oligonucleotide: Ptpn6-6294
gugccauuggccuggcaggcagga

SEQ ID NO: 26700 - RNA, 18 nt, Artificial Sequence
  Synthetic oligonucleotide: Ptpn6-6295
cuguuaguuuuggaggga

SEQ ID NO: 26701 - RNA, 19 nt, Artificial Sequence
  Synthetic oligonucleotide: Ptpn6-6296
ccuguuaguuuuggaggga

SEQ ID NO: 26702 - RNA, 20 nt, Artificial Sequence
  Synthetic oligonucleotide: Ptpn6-1146
uccuguuaguuuuggaggga

SEQ ID NO: 26703 - RNA, 21 nt, Artificial Sequence
  Synthetic oligonucleotide: Ptpn6-6297
cuccuguuaguuuuggaggga

SEQ ID NO: 26704 - RNA, 22 nt, Artificial Sequence
  Synthetic oligonucleotide: Ptpn6-6298
ucuccuguuaguuuuggaggga

SEQ ID NO: 26705 - RNA, 23 nt, Artificial Sequence
  Synthetic oligonucleotide: Ptpn6-6299
gucuccuguuaguuuuggaggga

SEQ ID NO: 26706 - RNA, 24 nt, Artificial Sequence
  Synthetic oligonucleotide: Ptpn6-6300
agucuccuguuaguuuuggaggga

SEQ ID NO: 26707 - RNA, 18 nt, Artificial Sequence
  Synthetic oligonucleotide: Ptpn6-6301
ucuccuguuaguuuugga

SEQ ID NO: 26708 - RNA, 19 nt, Artificial Sequence
  Synthetic oligonucleotide: Ptpn6-6302
gucuccuguuaguuuugga

SEQ ID NO: 26709 - RNA, 20 nt, Artificial Sequence
  Synthetic oligonucleotide: Ptpn6-1158
agucuccuguuaguuuugga

SEQ ID NO: 26710 - RNA, 21 nt, Artificial Sequence
  Synthetic oligonucleotide: Ptpn6-6303
cagucuccuguuaguuuugga

SEQ ID NO: 26711 - RNA, 22 nt, Artificial Sequence
  Synthetic oligonucleotide: Ptpn6-6304
ccagucuccuguuaguuuugga

SEQ ID NO: 26712 - RNA, 23 nt, Artificial Sequence
  Synthetic oligonucleotide: Ptpn6-6305
cccagucuccuguuaguuuugga

SEQ ID NO: 26713 - RNA, 24 nt, Artificial Sequence
  Synthetic oligonucleotide: Ptpn6-6306
ucccagucuccuguuaguuuugga

SEQ ID NO: 26714 - RNA, 18 nt, Artificial Sequence
  Synthetic oligonucleotide: Ptpn6-3273
guggcuucccccucccua

SEQ ID NO: 26715 - RNA, 19 nt, Artificial Sequence
  Synthetic oligonucleotide: Ptpn6-3274
cguggcuucccccucccua

SEQ ID NO: 26716 - RNA, 20 nt, Artificial Sequence
  Synthetic oligonucleotide: Ptpn6-1688
ccguggcuucccccucccua

SEQ ID NO: 26717 - RNA, 21 nt, Artificial Sequence
  Synthetic oligonucleotide: Ptpn6-6307
gccguggcuucccccucccua

SEQ ID NO: 26718 - RNA, 22 nt, Artificial Sequence
  Synthetic oligonucleotide: Ptpn6-6308
ugccguggcuucccccucccua

SEQ ID NO: 26719 - RNA, 23 nt, Artificial Sequence
  Synthetic oligonucleotide: Ptpn6-6309
cugccguggcuucccccucccua

SEQ ID NO: 26720 - RNA, 24 nt, Artificial Sequence
  Synthetic oligonucleotide: Ptpn6-6310
ucugccguggcuucccccucccua

SEQ ID NO: 26721 - RNA, 18 nt, Artificial Sequence
  Synthetic oligonucleotide: Ptpn6-6311
cccuuugguuuccgccua

SEQ ID NO: 26722 - RNA, 19 nt, Artificial Sequence
  Synthetic oligonucleotide: Ptpn6-6312
gcccuuugguuuccgccua

SEQ ID NO: 26723 - RNA, 20 nt, Artificial Sequence
  Synthetic oligonucleotide: Ptpn6-953
ggcccuuugguuuccgccua

SEQ ID NO: 26724 - RNA, 21 nt, Artificial Sequence
  Synthetic oligonucleotide: Ptpn6-6313
aggcccuuugguuuccgccua

SEQ ID NO: 26725 - RNA, 22 nt, Artificial Sequence
  Synthetic oligonucleotide: Ptpn6-6314
uaggcccuuugguuuccgccua

SEQ ID NO: 26726 - RNA, 23 nt, Artificial Sequence
  Synthetic oligonucleotide: Ptpn6-6315
uuaggcccuuugguuuccgccua

SEQ ID NO: 26727 - RNA, 24 nt, Artificial Sequence
  Synthetic oligonucleotide: Ptpn6-6316
cuuaggcccuuugguuuccgccua

SEQ ID NO: 26728 - RNA, 18 nt, Artificial Sequence
  Synthetic oligonucleotide: Ptpn6-6317
ggaggaaguggcugauua

SEQ ID NO: 26729 - RNA, 19 nt, Artificial Sequence
  Synthetic oligonucleotide: Ptpn6-6318
aggaggaaguggcugauua

SEQ ID NO: 26730 - RNA, 20 nt, Artificial Sequence
  Synthetic oligonucleotide: Ptpn6-1686
gaggaggaaguggcugauua

SEQ ID NO: 26731 - RNA, 21 nt, Artificial Sequence
  Synthetic oligonucleotide: Ptpn6-6319
cgaggaggaaguggcugauua

SEQ ID NO: 26732 - RNA, 22 nt, Artificial Sequence
  Synthetic oligonucleotide: Ptpn6-6320
ucgaggaggaaguggcugauua

SEQ ID NO: 26733 - RNA, 23 nt, Artificial Sequence
  Synthetic oligonucleotide: Ptpn6-6321
aucgaggaggaaguggcugauua

SEQ ID NO: 26734 - RNA, 24 nt, Artificial Sequence
  Synthetic oligonucleotide: Ptpn6-6322
gaucgaggaggaaguggcugauua

SEQ ID NO: 26735 - RNA, 18 nt, Artificial Sequence
  Synthetic oligonucleotide: Ptpn6-6323
gggugggugggccugcac

SEQ ID NO: 26736 - RNA, 19 nt, Artificial Sequence
  Synthetic oligonucleotide: Ptpn6-6324
ugggugggugggccugcac

SEQ ID NO: 26737 - RNA, 20 nt, Artificial Sequence
  Synthetic oligonucleotide: Ptpn6-5287
cugggugggugggccugcac

SEQ ID NO: 26738 - RNA, 21 nt, Artificial Sequence
  Synthetic oligonucleotide: Ptpn6-6325
ccugggugggugggccugcac

SEQ ID NO: 26739 - RNA, 22 nt, Artificial Sequence
  Synthetic oligonucleotide: Ptpn6-6326
cccugggugggugggccugcac

SEQ ID NO: 26740 - RNA, 23 nt, Artificial Sequence
  Synthetic oligonucleotide: Ptpn6-6327
gcccugggugggugggccugcac

SEQ ID NO: 26741 - RNA, 24 nt, Artificial Sequence
  Synthetic oligonucleotide: Ptpn6-6328
cgcccugggugggugggccugcac

SEQ ID NO: 26742 - RNA, 18 nt, Artificial Sequence
  Synthetic oligonucleotide: Ptpn6-6329
cccagggccuaacccuac

SEQ ID NO: 26743 - RNA, 19 nt, Artificial Sequence
  Synthetic oligonucleotide: Ptpn6-6330
ccccagggccuaacccuac

SEQ ID NO: 26744 - RNA, 20 nt, Artificial Sequence
  Synthetic oligonucleotide: Ptpn6-2233
gccccagggccuaacccuac

SEQ ID NO: 26745 - RNA, 21 nt, Artificial Sequence
  Synthetic oligonucleotide: Ptpn6-6331
ugccccagggccuaacccuac

SEQ ID NO: 26746 - RNA, 22 nt, Artificial Sequence
  Synthetic oligonucleotide: Ptpn6-6332
cugccccagggccuaacccuac

SEQ ID NO: 26747 - RNA, 23 nt, Artificial Sequence
  Synthetic oligonucleotide: Ptpn6-6333
ccugccccagggccuaacccuac

SEQ ID NO: 26748 - RNA, 24 nt, Artificial Sequence
  Synthetic oligonucleotide: Ptpn6-6334
cccugccccagggccuaacccuac

SEQ ID NO: 26749 - RNA, 18 nt, Artificial Sequence
  Synthetic oligonucleotide: Ptpn6-6335
aggcuccuccccuucccc

SEQ ID NO: 26750 - RNA, 19 nt, Artificial Sequence
  Synthetic oligonucleotide: Ptpn6-6336
gaggcuccuccccuucccc

SEQ ID NO: 26751 - RNA, 20 nt, Artificial Sequence
  Synthetic oligonucleotide: Ptpn6-1398
ugaggcuccuccccuucccc

SEQ ID NO: 26752 - RNA, 21 nt, Artificial Sequence
  Synthetic oligonucleotide: Ptpn6-6337
cugaggcuccuccccuucccc

SEQ ID NO: 26753 - RNA, 22 nt, Artificial Sequence
  Synthetic oligonucleotide: Ptpn6-6338
ccugaggcuccuccccuucccc

SEQ ID NO: 26754 - RNA, 23 nt, Artificial Sequence
  Synthetic oligonucleotide: Ptpn6-6339
accugaggcuccuccccuucccc

SEQ ID NO: 26755 - RNA, 24 nt, Artificial Sequence
  Synthetic oligonucleotide: Ptpn6-6340
uaccugaggcuccuccccuucccc

SEQ ID NO: 26756 - RNA, 18 nt, Artificial Sequence
  Synthetic oligonucleotide: Ptpn6-6341
cugggccuaacccugccc

SEQ ID NO: 26757 - RNA, 19 nt, Artificial Sequence
  Synthetic oligonucleotide: Ptpn6-6342
gcugggccuaacccugccc

SEQ ID NO: 26758 - RNA, 20 nt, Artificial Sequence
  Synthetic oligonucleotide: Ptpn6-2232
ggcugggccuaacccugccc

SEQ ID NO: 26759 - RNA, 21 nt, Artificial Sequence
  Synthetic oligonucleotide: Ptpn6-6343
uggcugggccuaacccugccc

SEQ ID NO: 26760 - RNA, 22 nt, Artificial Sequence
  Synthetic oligonucleotide: Ptpn6-6344
cuggcugggccuaacccugccc

SEQ ID NO: 26761 - RNA, 23 nt, Artificial Sequence
  Synthetic oligonucleotide: Ptpn6-6345
ccuggcugggccuaacccugccc

SEQ ID NO: 26762 - RNA, 24 nt, Artificial Sequence
  Synthetic oligonucleotide: Ptpn6-6346
uccuggcugggccuaacccugccc

SEQ ID NO: 26763 - RNA, 18 nt, Artificial Sequence
  Synthetic oligonucleotide: Ptpn6-6347
gguggcuccuccucuccc

SEQ ID NO: 26764 - RNA, 19 nt, Artificial Sequence
  Synthetic oligonucleotide: Ptpn6-6348
agguggcuccuccucuccc

SEQ ID NO: 26765 - RNA, 20 nt, Artificial Sequence
  Synthetic oligonucleotide: Ptpn6-1181
cagguggcuccuccucuccc

SEQ ID NO: 26766 - RNA, 21 nt, Artificial Sequence
  Synthetic oligonucleotide: Ptpn6-6349
ccagguggcuccuccucuccc

SEQ ID NO: 26767 - RNA, 22 nt, Artificial Sequence
  Synthetic oligonucleotide: Ptpn6-6350
uccagguggcuccuccucuccc

SEQ ID NO: 26768 - RNA, 23 nt, Artificial Sequence
  Synthetic oligonucleotide: Ptpn6-6351
cuccagguggcuccuccucuccc

SEQ ID NO: 26769 - RNA, 24 nt, Artificial Sequence
  Synthetic oligonucleotide: Ptpn6-6352
gcuccagguggcuccuccucuccc

SEQ ID NO: 26770 - RNA, 18 nt, Artificial Sequence
  Synthetic oligonucleotide: Ptpn6-6353
gaggcuccuccccuuccc

SEQ ID NO: 26771 - RNA, 19 nt, Artificial Sequence
  Synthetic oligonucleotide: Ptpn6-6354
ugaggcuccuccccuuccc

SEQ ID NO: 26772 - RNA, 20 nt, Artificial Sequence
  Synthetic oligonucleotide: Ptpn6-2234
cugaggcuccuccccuuccc

SEQ ID NO: 26773 - RNA, 21 nt, Artificial Sequence
  Synthetic oligonucleotide: Ptpn6-6355
ccugaggcuccuccccuuccc

SEQ ID NO: 26774 - RNA, 22 nt, Artificial Sequence
  Synthetic oligonucleotide: Ptpn6-6356
accugaggcuccuccccuuccc

SEQ ID NO: 26775 - RNA, 23 nt, Artificial Sequence
  Synthetic oligonucleotide: Ptpn6-6357
uaccugaggcuccuccccuuccc

SEQ ID NO: 26776 - RNA, 24 nt, Artificial Sequence
  Synthetic oligonucleotide: Ptpn6-6358
cuaccugaggcuccuccccuuccc

SEQ ID NO: 26777 - RNA, 18 nt, Artificial Sequence
  Synthetic oligonucleotide: Ptpn6-6359
ccucuuuaacauuuuccc

SEQ ID NO: 26778 - RNA, 19 nt, Artificial Sequence
  Synthetic oligonucleotide: Ptpn6-6360
cccucuuuaacauuuuccc

SEQ ID NO: 26779 - RNA, 20 nt, Artificial Sequence
  Synthetic oligonucleotide: Ptpn6-1708
ccccucuuuaacauuuuccc

SEQ ID NO: 26780 - RNA, 21 nt, Artificial Sequence
  Synthetic oligonucleotide: Ptpn6-6361
cccccucuuuaacauuuuccc

SEQ ID NO: 26781 - RNA, 22 nt, Artificial Sequence
  Synthetic oligonucleotide: Ptpn6-6362
gcccccucuuuaacauuuuccc

SEQ ID NO: 26782 - RNA, 23 nt, Artificial Sequence
  Synthetic oligonucleotide: Ptpn6-6363
ugcccccucuuuaacauuuuccc

SEQ ID NO: 26783 - RNA, 24 nt, Artificial Sequence
  Synthetic oligonucleotide: Ptpn6-6364
cugcccccucuuuaacauuuuccc

SEQ ID NO: 26784 - RNA, 18 nt, Artificial Sequence
  Synthetic oligonucleotide: Ptpn6-6365
ucccgggggaaggcggcc

SEQ ID NO: 26785 - RNA, 19 nt, Artificial Sequence
  Synthetic oligonucleotide: Ptpn6-6366
cucccgggggaaggcggcc

SEQ ID NO: 26786 - RNA, 20 nt, Artificial Sequence
  Synthetic oligonucleotide: Ptpn6-1668
ucucccgggggaaggcggcc

SEQ ID NO: 26787 - RNA, 21 nt, Artificial Sequence
  Synthetic oligonucleotide: Ptpn6-6367
cucucccgggggaaggcggcc

SEQ ID NO: 26788 - RNA, 22 nt, Artificial Sequence
  Synthetic oligonucleotide: Ptpn6-6368
ccucucccgggggaaggcggcc

SEQ ID NO: 26789 - RNA, 23 nt, Artificial Sequence
  Synthetic oligonucleotide: Ptpn6-6369
uccucucccgggggaaggcggcc

SEQ ID NO: 26790 - RNA, 24 nt, Artificial Sequence
  Synthetic oligonucleotide: Ptpn6-6370
cuccucucccgggggaaggcggcc

SEQ ID NO: 26791 - RNA, 18 nt, Artificial Sequence
  Synthetic oligonucleotide: Ptpn6-6371
agguggcuccuccucucc

SEQ ID NO: 26792 - RNA, 19 nt, Artificial Sequence
  Synthetic oligonucleotide: Ptpn6-6372
cagguggcuccuccucucc

SEQ ID NO: 26793 - RNA, 20 nt, Artificial Sequence
  Synthetic oligonucleotide: Ptpn6-1182
ccagguggcuccuccucucc

SEQ ID NO: 26794 - RNA, 21 nt, Artificial Sequence
  Synthetic oligonucleotide: Ptpn6-6373
uccagguggcuccuccucucc

SEQ ID NO: 26795 - RNA, 22 nt, Artificial Sequence
  Synthetic oligonucleotide: Ptpn6-6374
cuccagguggcuccuccucucc

SEQ ID NO: 26796 - RNA, 23 nt, Artificial Sequence
  Synthetic oligonucleotide: Ptpn6-6375
gcuccagguggcuccuccucucc

SEQ ID NO: 26797 - RNA, 24 nt, Artificial Sequence
  Synthetic oligonucleotide: Ptpn6-6376
agcuccagguggcuccuccucucc

SEQ ID NO: 26798 - RNA, 18 nt, Artificial Sequence
  Synthetic oligonucleotide: Ptpn6-6377
ccccaccuguccuuuucc

SEQ ID NO: 26799 - RNA, 19 nt, Artificial Sequence
  Synthetic oligonucleotide: Ptpn6-6378
gccccaccuguccuuuucc

SEQ ID NO: 26800 - RNA, 20 nt, Artificial Sequence
  Synthetic oligonucleotide: Ptpn6-1170
cgccccaccuguccuuuucc

SEQ ID NO: 26801 - RNA, 21 nt, Artificial Sequence
  Synthetic oligonucleotide: Ptpn6-6379
ccgccccaccuguccuuuucc

SEQ ID NO: 26802 - RNA, 22 nt, Artificial Sequence
  Synthetic oligonucleotide: Ptpn6-6380
cccgccccaccuguccuuuucc

SEQ ID NO: 26803 - RNA, 23 nt, Artificial Sequence
  Synthetic oligonucleotide: Ptpn6-6381
ccccgccccaccuguccuuuucc

SEQ ID NO: 26804 - RNA, 24 nt, Artificial Sequence
  Synthetic oligonucleotide: Ptpn6-6382
gccccgccccaccuguccuuuucc

SEQ ID NO: 26805 - RNA, 18 nt, Artificial Sequence
  Synthetic oligonucleotide: Ptpn6-6383
ccccgccgcucugucagc

SEQ ID NO: 26806 - RNA, 19 nt, Artificial Sequence
  Synthetic oligonucleotide: Ptpn6-6384
accccgccgcucugucagc

SEQ ID NO: 26807 - RNA, 20 nt, Artificial Sequence
  Synthetic oligonucleotide: Ptpn6-1663
uaccccgccgcucugucagc

SEQ ID NO: 26808 - RNA, 21 nt, Artificial Sequence
  Synthetic oligonucleotide: Ptpn6-6385
auaccccgccgcucugucagc

SEQ ID NO: 26809 - RNA, 22 nt, Artificial Sequence
  Synthetic oligonucleotide: Ptpn6-6386
aauaccccgccgcucugucagc

SEQ ID NO: 26810 - RNA, 23 nt, Artificial Sequence
  Synthetic oligonucleotide: Ptpn6-6387
caauaccccgccgcucugucagc

SEQ ID NO: 26811 - RNA, 24 nt, Artificial Sequence
  Synthetic oligonucleotide: Ptpn6-6388
ccaauaccccgccgcucugucagc

SEQ ID NO: 26812 - RNA, 18 nt, Artificial Sequence
  Synthetic oligonucleotide: Ptpn6-6389
gguucuuccucaccuggc

SEQ ID NO: 26813 - RNA, 19 nt, Artificial Sequence
  Synthetic oligonucleotide: Ptpn6-6390
cgguucuuccucaccuggc

SEQ ID NO: 26814 - RNA, 20 nt, Artificial Sequence
  Synthetic oligonucleotide: Ptpn6-1687
gcgguucuuccucaccuggc

SEQ ID NO: 26815 - RNA, 21 nt, Artificial Sequence
  Synthetic oligonucleotide: Ptpn6-6391
agcgguucuuccucaccuggc

SEQ ID NO: 26816 - RNA, 22 nt, Artificial Sequence
  Synthetic oligonucleotide: Ptpn6-6392
gagcgguucuuccucaccuggc

SEQ ID NO: 26817 - RNA, 23 nt, Artificial Sequence
  Synthetic oligonucleotide: Ptpn6-6393
ugagcgguucuuccucaccuggc

SEQ ID NO: 26818 - RNA, 24 nt, Artificial Sequence
  Synthetic oligonucleotide: Ptpn6-6394
cugagcgguucuuccucaccuggc

SEQ ID NO: 26819 - RNA, 18 nt, Artificial Sequence
  Synthetic oligonucleotide: Ptpn6-6395
cucccgcuuuggggcugc

SEQ ID NO: 26820 - RNA, 19 nt, Artificial Sequence
  Synthetic oligonucleotide: Ptpn6-6396
acucccgcuuuggggcugc

SEQ ID NO: 26821 - RNA, 20 nt, Artificial Sequence
  Synthetic oligonucleotide: Ptpn6-970
uacucccgcuuuggggcugc

SEQ ID NO: 26822 - RNA, 21 nt, Artificial Sequence
  Synthetic oligonucleotide: Ptpn6-6397
guacucccgcuuuggggcugc

SEQ ID NO: 26823 - RNA, 22 nt, Artificial Sequence
  Synthetic oligonucleotide: Ptpn6-6398
uguacucccgcuuuggggcugc

SEQ ID NO: 26824 - RNA, 23 nt, Artificial Sequence
  Synthetic oligonucleotide: Ptpn6-6399
cuguacucccgcuuuggggcugc

SEQ ID NO: 26825 - RNA, 24 nt, Artificial Sequence
  Synthetic oligonucleotide: Ptpn6-6400
gcuguacucccgcuuuggggcugc

SEQ ID NO: 26826 - RNA, 18 nt, Artificial Sequence
  Synthetic oligonucleotide: Ptpn6-6401
ggccuggcaggcaggauc

SEQ ID NO: 26827 - RNA, 19 nt, Artificial Sequence
  Synthetic oligonucleotide: Ptpn6-6402
uggccuggcaggcaggauc

SEQ ID NO: 26828 - RNA, 20 nt, Artificial Sequence
  Synthetic oligonucleotide: Ptpn6-1682
uuggccuggcaggcaggauc

SEQ ID NO: 26829 - RNA, 21 nt, Artificial Sequence
  Synthetic oligonucleotide: Ptpn6-6403
auuggccuggcaggcaggauc

SEQ ID NO: 26830 - RNA, 22 nt, Artificial Sequence
  Synthetic oligonucleotide: Ptpn6-6404
cauuggccuggcaggcaggauc

SEQ ID NO: 26831 - RNA, 23 nt, Artificial Sequence
  Synthetic oligonucleotide: Ptpn6-6405
ccauuggccuggcaggcaggauc

SEQ ID NO: 26832 - RNA, 24 nt, Artificial Sequence
  Synthetic oligonucleotide: Ptpn6-6406
gccauuggccuggcaggcaggauc

SEQ ID NO: 26833 - RNA, 18 nt, Artificial Sequence
  Synthetic oligonucleotide: Ptpn6-6407
cagguggcuccuccucuc

SEQ ID NO: 26834 - RNA, 19 nt, Artificial Sequence
  Synthetic oligonucleotide: Ptpn6-6408
ccagguggcuccuccucuc

SEQ ID NO: 26835 - RNA, 20 nt, Artificial Sequence
  Synthetic oligonucleotide: Ptpn6-1666
uccagguggcuccuccucuc

SEQ ID NO: 26836 - RNA, 21 nt, Artificial Sequence
  Synthetic oligonucleotide: Ptpn6-6409
cuccagguggcuccuccucuc

SEQ ID NO: 26837 - RNA, 22 nt, Artificial Sequence
  Synthetic oligonucleotide: Ptpn6-6410
gcuccagguggcuccuccucuc

SEQ ID NO: 26838 - RNA, 23 nt, Artificial Sequence
  Synthetic oligonucleotide: Ptpn6-6411
agcuccagguggcuccuccucuc

SEQ ID NO: 26839 - RNA, 24 nt, Artificial Sequence
  Synthetic oligonucleotide: Ptpn6-6412
gagcuccagguggcuccuccucuc

SEQ ID NO: 26840 - RNA, 18 nt, Artificial Sequence
  Synthetic oligonucleotide: Ptpn6-3348
cugucccguggguaaguc

SEQ ID NO: 26841 - RNA, 19 nt, Artificial Sequence
  Synthetic oligonucleotide: Ptpn6-3349
gcugucccguggguaaguc

SEQ ID NO: 26842 - RNA, 20 nt, Artificial Sequence
  Synthetic oligonucleotide: Ptpn6-1691
ugcugucccguggguaaguc

SEQ ID NO: 26843 - RNA, 21 nt, Artificial Sequence
  Synthetic oligonucleotide: Ptpn6-3350
augcugucccguggguaaguc

SEQ ID NO: 26844 - RNA, 22 nt, Artificial Sequence
  Synthetic oligonucleotide: Ptpn6-3351
gaugcugucccguggguaaguc

SEQ ID NO: 26845 - RNA, 23 nt, Artificial Sequence
  Synthetic oligonucleotide: Ptpn6-3352
agaugcugucccguggguaaguc

SEQ ID NO: 26846 - RNA, 24 nt, Artificial Sequence
  Synthetic oligonucleotide: Ptpn6-3353
gagaugcugucccguggguaaguc

SEQ ID NO: 26847 - RNA, 18 nt, Artificial Sequence
  Synthetic oligonucleotide: Ptpn6-6413
uggccgcugugggcgguc

SEQ ID NO: 26848 - RNA, 19 nt, Artificial Sequence
  Synthetic oligonucleotide: Ptpn6-6414
cuggccgcugugggcgguc

SEQ ID NO: 26849 - RNA, 20 nt, Artificial Sequence
  Synthetic oligonucleotide: Ptpn6-1676
gcuggccgcugugggcgguc

SEQ ID NO: 26850 - RNA, 21 nt, Artificial Sequence
  Synthetic oligonucleotide: Ptpn6-6415
agcuggccgcugugggcgguc

SEQ ID NO: 26851 - RNA, 22 nt, Artificial Sequence
  Synthetic oligonucleotide: Ptpn6-6416
aagcuggccgcugugggcgguc

SEQ ID NO: 26852 - RNA, 23 nt, Artificial Sequence
  Synthetic oligonucleotide: Ptpn6-6417
gaagcuggccgcugugggcgguc

SEQ ID NO: 26853 - RNA, 24 nt, Artificial Sequence
  Synthetic oligonucleotide: Ptpn6-6418
ggaagcuggccgcugugggcgguc

SEQ ID NO: 26854 - RNA, 18 nt, Artificial Sequence
  Synthetic oligonucleotide: Ptpn6-6419
gccccaccuguccuuuuc

SEQ ID NO: 26855 - RNA, 19 nt, Artificial Sequence
  Synthetic oligonucleotide: Ptpn6-6420
cgccccaccuguccuuuuc

SEQ ID NO: 26856 - RNA, 20 nt, Artificial Sequence
  Synthetic oligonucleotide: Ptpn6-1677
ccgccccaccuguccuuuuc

SEQ ID NO: 26857 - RNA, 21 nt, Artificial Sequence
  Synthetic oligonucleotide: Ptpn6-6421
cccgccccaccuguccuuuuc

SEQ ID NO: 26858 - RNA, 22 nt, Artificial Sequence
  Synthetic oligonucleotide: Ptpn6-6422
ccccgccccaccuguccuuuuc

SEQ ID NO: 26859 - RNA, 23 nt, Artificial Sequence
  Synthetic oligonucleotide: Ptpn6-6423
gccccgccccaccuguccuuuuc

SEQ ID NO: 26860 - RNA, 24 nt, Artificial Sequence
  Synthetic oligonucleotide: Ptpn6-6424
agccccgccccaccuguccuuuuc

SEQ ID NO: 26861 - RNA, 18 nt, Artificial Sequence
  Synthetic oligonucleotide: Ptpn6-6425
ugucagcuugagcuccag

SEQ ID NO: 26862 - RNA, 19 nt, Artificial Sequence
  Synthetic oligonucleotide: Ptpn6-6426
cugucagcuugagcuccag

SEQ ID NO: 26863 - RNA, 20 nt, Artificial Sequence
  Synthetic oligonucleotide: Ptpn6-1664
ucugucagcuugagcuccag

SEQ ID NO: 26864 - RNA, 21 nt, Artificial Sequence
  Synthetic oligonucleotide: Ptpn6-6427
cucugucagcuugagcuccag

SEQ ID NO: 26865 - RNA, 22 nt, Artificial Sequence
  Synthetic oligonucleotide: Ptpn6-6428
gcucugucagcuugagcuccag

SEQ ID NO: 26866 - RNA, 23 nt, Artificial Sequence
  Synthetic oligonucleotide: Ptpn6-6429
cgcucugucagcuugagcuccag

SEQ ID NO: 26867 - RNA, 24 nt, Artificial Sequence
  Synthetic oligonucleotide: Ptpn6-6430
ccgcucugucagcuugagcuccag

SEQ ID NO: 26868 - RNA, 18 nt, Artificial Sequence
  Synthetic oligonucleotide: Ptpn6-6431
gcggcccuggaccagcag

SEQ ID NO: 26869 - RNA, 19 nt, Artificial Sequence
  Synthetic oligonucleotide: Ptpn6-6432
ggcggcccuggaccagcag

SEQ ID NO: 26870 - RNA, 20 nt, Artificial Sequence
  Synthetic oligonucleotide: Ptpn6-1669
aggcggcccuggaccagcag

SEQ ID NO: 26871 - RNA, 21 nt, Artificial Sequence
  Synthetic oligonucleotide: Ptpn6-6433
aaggcggcccuggaccagcag

SEQ ID NO: 26872 - RNA, 22 nt, Artificial Sequence
  Synthetic oligonucleotide: Ptpn6-6434
gaaggcggcccuggaccagcag

SEQ ID NO: 26873 - RNA, 23 nt, Artificial Sequence
  Synthetic oligonucleotide: Ptpn6-6435
ggaaggcggcccuggaccagcag

SEQ ID NO: 26874 - RNA, 24 nt, Artificial Sequence
  Synthetic oligonucleotide: Ptpn6-6436
gggaaggcggcccuggaccagcag

SEQ ID NO: 26875 - RNA, 18 nt, Artificial Sequence
  Synthetic oligonucleotide: Ptpn6-6437
cuggcaggcaggaucgag

SEQ ID NO: 26876 - RNA, 19 nt, Artificial Sequence
  Synthetic oligonucleotide: Ptpn6-6438
ccuggcaggcaggaucgag

SEQ ID NO: 26877 - RNA, 20 nt, Artificial Sequence
  Synthetic oligonucleotide: Ptpn6-1684
gccuggcaggcaggaucgag

SEQ ID NO: 26878 - RNA, 21 nt, Artificial Sequence
  Synthetic oligonucleotide: Ptpn6-6439
ggccuggcaggcaggaucgag

SEQ ID NO: 26879 - RNA, 22 nt, Artificial Sequence
  Synthetic oligonucleotide: Ptpn6-6440
uggccuggcaggcaggaucgag

SEQ ID NO: 26880 - RNA, 23 nt, Artificial Sequence
  Synthetic oligonucleotide: Ptpn6-6441
uuggccuggcaggcaggaucgag

SEQ ID NO: 26881 - RNA, 24 nt, Artificial Sequence
  Synthetic oligonucleotide: Ptpn6-6442
auuggccuggcaggcaggaucgag

SEQ ID NO: 26882 - RNA, 18 nt, Artificial Sequence
  Synthetic oligonucleotide: Ptpn6-6443
cuuugguuuccgccuacg

SEQ ID NO: 26883 - RNA, 19 nt, Artificial Sequence
  Synthetic oligonucleotide: Ptpn6-6444
ccuuugguuuccgccuacg

SEQ ID NO: 26884 - RNA, 20 nt, Artificial Sequence
  Synthetic oligonucleotide: Ptpn6-1661
cccuuugguuuccgccuacg

SEQ ID NO: 26885 - RNA, 21 nt, Artificial Sequence
  Synthetic oligonucleotide: Ptpn6-6445
gcccuuugguuuccgccuacg

SEQ ID NO: 26886 - RNA, 22 nt, Artificial Sequence
  Synthetic oligonucleotide: Ptpn6-6446
ggcccuuugguuuccgccuacg

SEQ ID NO: 26887 - RNA, 23 nt, Artificial Sequence
  Synthetic oligonucleotide: Ptpn6-6447
aggcccuuugguuuccgccuacg

SEQ ID NO: 26888 - RNA, 24 nt, Artificial Sequence
  Synthetic oligonucleotide: Ptpn6-6448
uaggcccuuugguuuccgccuacg

SEQ ID NO: 26889 - RNA, 18 nt, Artificial Sequence
  Synthetic oligonucleotide: Ptpn6-6449
guggcuccuccucucccg

SEQ ID NO: 26890 - RNA, 19 nt, Artificial Sequence
  Synthetic oligonucleotide: Ptpn6-6450
gguggcuccuccucucccg

SEQ ID NO: 26891 - RNA, 20 nt, Artificial Sequence
  Synthetic oligonucleotide: Ptpn6-1169
agguggcuccuccucucccg

SEQ ID NO: 26892 - RNA, 21 nt, Artificial Sequence
  Synthetic oligonucleotide: Ptpn6-6451
cagguggcuccuccucucccg

SEQ ID NO: 26893 - RNA, 22 nt, Artificial Sequence
  Synthetic oligonucleotide: Ptpn6-6452
ccagguggcuccuccucucccg

SEQ ID NO: 26894 - RNA, 23 nt, Artificial Sequence
  Synthetic oligonucleotide: Ptpn6-6453
uccagguggcuccuccucucccg

SEQ ID NO: 26895 - RNA, 24 nt, Artificial Sequence
  Synthetic oligonucleotide: Ptpn6-6454
cuccagguggcuccuccucucccg

SEQ ID NO: 26896 - RNA, 18 nt, Artificial Sequence
  Synthetic oligonucleotide: Ptpn6-6455
gccuggcaggcaggaucg

SEQ ID NO: 26897 - RNA, 19 nt, Artificial Sequence
  Synthetic oligonucleotide: Ptpn6-6456
ggccuggcaggcaggaucg

SEQ ID NO: 26898 - RNA, 20 nt, Artificial Sequence
  Synthetic oligonucleotide: Ptpn6-1150
uggccuggcaggcaggaucg

SEQ ID NO: 26899 - RNA, 21 nt, Artificial Sequence
  Synthetic oligonucleotide: Ptpn6-6457
uuggccuggcaggcaggaucg

SEQ ID NO: 26900 - RNA, 22 nt, Artificial Sequence
  Synthetic oligonucleotide: Ptpn6-6458
auuggccuggcaggcaggaucg

SEQ ID NO: 26901 - RNA, 23 nt, Artificial Sequence
  Synthetic oligonucleotide: Ptpn6-6459
cauuggccuggcaggcaggaucg

SEQ ID NO: 26902 - RNA, 24 nt, Artificial Sequence
  Synthetic oligonucleotide: Ptpn6-6460
ccauuggccuggcaggcaggaucg

SEQ ID NO: 26903 - RNA, 18 nt, Artificial Sequence
  Synthetic oligonucleotide: Ptpn6-6461
gucagcuugagcuccagg

SEQ ID NO: 26904 - RNA, 19 nt, Artificial Sequence
  Synthetic oligonucleotide: Ptpn6-6462
ugucagcuugagcuccagg

SEQ ID NO: 26905 - RNA, 20 nt, Artificial Sequence
  Synthetic oligonucleotide: Ptpn6-1173
cugucagcuugagcuccagg

SEQ ID NO: 26906 - RNA, 21 nt, Artificial Sequence
  Synthetic oligonucleotide: Ptpn6-6463
ucugucagcuugagcuccagg

SEQ ID NO: 26907 - RNA, 22 nt, Artificial Sequence
  Synthetic oligonucleotide: Ptpn6-6464
cucugucagcuugagcuccagg

SEQ ID NO: 26908 - RNA, 23 nt, Artificial Sequence
  Synthetic oligonucleotide: Ptpn6-6465
gcucugucagcuugagcuccagg

SEQ ID NO: 26909 - RNA, 24 nt, Artificial Sequence
  Synthetic oligonucleotide: Ptpn6-6466
cgcucugucagcuugagcuccagg

SEQ ID NO: 26910 - RNA, 18 nt, Artificial Sequence
  Synthetic oligonucleotide: Ptpn6-6467
cccuucccccggggcagg

SEQ ID NO: 26911 - RNA, 19 nt, Artificial Sequence
  Synthetic oligonucleotide: Ptpn6-6468
ccccuucccccggggcagg

SEQ ID NO: 26912 - RNA, 20 nt, Artificial Sequence
  Synthetic oligonucleotide: Ptpn6-2228
uccccuucccccggggcagg

SEQ ID NO: 26913 - RNA, 21 nt, Artificial Sequence
  Synthetic oligonucleotide: Ptpn6-6469
cuccccuucccccggggcagg

SEQ ID NO: 26914 - RNA, 22 nt, Artificial Sequence
  Synthetic oligonucleotide: Ptpn6-6470
ccuccccuucccccggggcagg

SEQ ID NO: 26915 - RNA, 23 nt, Artificial Sequence
  Synthetic oligonucleotide: Ptpn6-6471
uccuccccuucccccggggcagg

SEQ ID NO: 26916 - RNA, 24 nt, Artificial Sequence
  Synthetic oligonucleotide: Ptpn6-6472
cuccuccccuucccccggggcagg

SEQ ID NO: 26917 - RNA, 18 nt, Artificial Sequence
  Synthetic oligonucleotide: Ptpn6-6473
ccggggcagguugagagg

SEQ ID NO: 26918 - RNA, 19 nt, Artificial Sequence
  Synthetic oligonucleotide: Ptpn6-6474
cccggggcagguugagagg

SEQ ID NO: 26919 - RNA, 20 nt, Artificial Sequence
  Synthetic oligonucleotide: Ptpn6-2236
ccccggggcagguugagagg

SEQ ID NO: 26920 - RNA, 21 nt, Artificial Sequence
  Synthetic oligonucleotide: Ptpn6-6475
cccccggggcagguugagagg

SEQ ID NO: 26921 - RNA, 22 nt, Artificial Sequence
  Synthetic oligonucleotide: Ptpn6-6476
ucccccggggcagguugagagg

SEQ ID NO: 26922 - RNA, 23 nt, Artificial Sequence
  Synthetic oligonucleotide: Ptpn6-6477
uucccccggggcagguugagagg

SEQ ID NO: 26923 - RNA, 24 nt, Artificial Sequence
  Synthetic oligonucleotide: Ptpn6-6478
cuucccccggggcagguugagagg

SEQ ID NO: 26924 - RNA, 18 nt, Artificial Sequence
  Synthetic oligonucleotide: Ptpn6-6479
uggcaggcaggaucgagg

SEQ ID NO: 26925 - RNA, 19 nt, Artificial Sequence
  Synthetic oligonucleotide: Ptpn6-6480
cuggcaggcaggaucgagg

SEQ ID NO: 26926 - RNA, 20 nt, Artificial Sequence
  Synthetic oligonucleotide: Ptpn6-1152
ccuggcaggcaggaucgagg

SEQ ID NO: 26927 - RNA, 21 nt, Artificial Sequence
  Synthetic oligonucleotide: Ptpn6-6481
gccuggcaggcaggaucgagg

SEQ ID NO: 26928 - RNA, 22 nt, Artificial Sequence
  Synthetic oligonucleotide: Ptpn6-6482
ggccuggcaggcaggaucgagg

SEQ ID NO: 26929 - RNA, 23 nt, Artificial Sequence
  Synthetic oligonucleotide: Ptpn6-6483
uggccuggcaggcaggaucgagg

SEQ ID NO: 26930 - RNA, 24 nt, Artificial Sequence
  Synthetic oligonucleotide: Ptpn6-6484
uuggccuggcaggcaggaucgagg

SEQ ID NO: 26931 - RNA, 18 nt, Artificial Sequence
  Synthetic oligonucleotide: Ptpn6-6485
guuaguuuuggagggagg

SEQ ID NO: 26932 - RNA, 19 nt, Artificial Sequence
  Synthetic oligonucleotide: Ptpn6-6486
uguuaguuuuggagggagg

SEQ ID NO: 26933 - RNA, 20 nt, Artificial Sequence
  Synthetic oligonucleotide: Ptpn6-1702
cuguuaguuuuggagggagg

SEQ ID NO: 26934 - RNA, 21 nt, Artificial Sequence
  Synthetic oligonucleotide: Ptpn6-6487
ccuguuaguuuuggagggagg

SEQ ID NO: 26935 - RNA, 22 nt, Artificial Sequence
  Synthetic oligonucleotide: Ptpn6-6488
uccuguuaguuuuggagggagg

SEQ ID NO: 26936 - RNA, 23 nt, Artificial Sequence
  Synthetic oligonucleotide: Ptpn6-6489
cuccuguuaguuuuggagggagg

SEQ ID NO: 26937 - RNA, 24 nt, Artificial Sequence
  Synthetic oligonucleotide: Ptpn6-6490
ucuccuguuaguuuuggagggagg

SEQ ID NO: 26938 - RNA, 18 nt, Artificial Sequence
  Synthetic oligonucleotide: Ptpn6-6491
uccuguuaguuuuggagg

SEQ ID NO: 26939 - RNA, 19 nt, Artificial Sequence
  Synthetic oligonucleotide: Ptpn6-6492
cuccuguuaguuuuggagg

SEQ ID NO: 26940 - RNA, 20 nt, Artificial Sequence
  Synthetic oligonucleotide: Ptpn6-1699
ucuccuguuaguuuuggagg

SEQ ID NO: 26941 - RNA, 21 nt, Artificial Sequence
  Synthetic oligonucleotide: Ptpn6-6493
gucuccuguuaguuuuggagg

SEQ ID NO: 26942 - RNA, 22 nt, Artificial Sequence
  Synthetic oligonucleotide: Ptpn6-6494
agucuccuguuaguuuuggagg

SEQ ID NO: 26943 - RNA, 23 nt, Artificial Sequence
  Synthetic oligonucleotide: Ptpn6-6495
cagucuccuguuaguuuuggagg

SEQ ID NO: 26944 - RNA, 24 nt, Artificial Sequence
  Synthetic oligonucleotide: Ptpn6-6496
ccagucuccuguuaguuuuggagg

SEQ ID NO: 26945 - RNA, 18 nt, Artificial Sequence
  Synthetic oligonucleotide: Ptpn6-6497
uggcuccuccucucccgg

SEQ ID NO: 26946 - RNA, 19 nt, Artificial Sequence
  Synthetic oligonucleotide: Ptpn6-6498
guggcuccuccucucccgg

SEQ ID NO: 26947 - RNA, 20 nt, Artificial Sequence
  Synthetic oligonucleotide: Ptpn6-1017
gguggcuccuccucucccgg

SEQ ID NO: 26948 - RNA, 21 nt, Artificial Sequence
  Synthetic oligonucleotide: Ptpn6-6499
agguggcuccuccucucccgg

SEQ ID NO: 26949 - RNA, 22 nt, Artificial Sequence
  Synthetic oligonucleotide: Ptpn6-6500
cagguggcuccuccucucccgg

SEQ ID NO: 26950 - RNA, 23 nt, Artificial Sequence
  Synthetic oligonucleotide: Ptpn6-6501
ccagguggcuccuccucucccgg

SEQ ID NO: 26951 - RNA, 24 nt, Artificial Sequence
  Synthetic oligonucleotide: Ptpn6-6502
uccagguggcuccuccucucccgg

SEQ ID NO: 26952 - RNA, 18 nt, Artificial Sequence
  Synthetic oligonucleotide: Ptpn6-6503
ccuguuaguuuuggaggg

SEQ ID NO: 26953 - RNA, 19 nt, Artificial Sequence
  Synthetic oligonucleotide: Ptpn6-6504
uccuguuaguuuuggaggg

SEQ ID NO: 26954 - RNA, 20 nt, Artificial Sequence
  Synthetic oligonucleotide: Ptpn6-1161
cuccuguuaguuuuggaggg

SEQ ID NO: 26955 - RNA, 21 nt, Artificial Sequence
  Synthetic oligonucleotide: Ptpn6-6505
ucuccuguuaguuuuggaggg

SEQ ID NO: 26956 - RNA, 22 nt, Artificial Sequence
  Synthetic oligonucleotide: Ptpn6-6506
gucuccuguuaguuuuggaggg

SEQ ID NO: 26957 - RNA, 23 nt, Artificial Sequence
  Synthetic oligonucleotide: Ptpn6-6507
agucuccuguuaguuuuggaggg

SEQ ID NO: 26958 - RNA, 24 nt, Artificial Sequence
  Synthetic oligonucleotide: Ptpn6-6508
cagucuccuguuaguuuuggaggg

SEQ ID NO: 26959 - RNA, 18 nt, Artificial Sequence
  Synthetic oligonucleotide: Ptpn6-6509
uccucccuaugguccugg

SEQ ID NO: 26960 - RNA, 19 nt, Artificial Sequence
  Synthetic oligonucleotide: Ptpn6-6510
cuccucccuaugguccugg

SEQ ID NO: 26961 - RNA, 20 nt, Artificial Sequence
  Synthetic oligonucleotide: Ptpn6-2231
gcuccucccuaugguccugg

SEQ ID NO: 26962 - RNA, 21 nt, Artificial Sequence
  Synthetic oligonucleotide: Ptpn6-6511
agcuccucccuaugguccugg

SEQ ID NO: 26963 - RNA, 22 nt, Artificial Sequence
  Synthetic oligonucleotide: Ptpn6-6512
cagcuccucccuaugguccugg

SEQ ID NO: 26964 - RNA, 23 nt, Artificial Sequence
  Synthetic oligonucleotide: Ptpn6-6513
acagcuccucccuaugguccugg

SEQ ID NO: 26965 - RNA, 24 nt, Artificial Sequence
  Synthetic oligonucleotide: Ptpn6-6514
aacagcuccucccuaugguccugg

SEQ ID NO: 26966 - RNA, 18 nt, Artificial Sequence
  Synthetic oligonucleotide: Ptpn6-6515
ccucagcgcccugggugg

SEQ ID NO: 26967 - RNA, 19 nt, Artificial Sequence
  Synthetic oligonucleotide: Ptpn6-6516
cccucagcgcccugggugg

SEQ ID NO: 26968 - RNA, 20 nt, Artificial Sequence
  Synthetic oligonucleotide: Ptpn6-2240
ucccucagcgcccugggugg

SEQ ID NO: 26969 - RNA, 21 nt, Artificial Sequence
  Synthetic oligonucleotide: Ptpn6-6517
gucccucagcgcccugggugg

SEQ ID NO: 26970 - RNA, 22 nt, Artificial Sequence
  Synthetic oligonucleotide: Ptpn6-6518
ggucccucagcgcccugggugg

SEQ ID NO: 26971 - RNA, 23 nt, Artificial Sequence
  Synthetic oligonucleotide: Ptpn6-6519
gggucccucagcgcccugggugg

SEQ ID NO: 26972 - RNA, 24 nt, Artificial Sequence
  Synthetic oligonucleotide: Ptpn6-6520
ugggucccucagcgcccugggugg

SEQ ID NO: 26973 - RNA, 18 nt, Artificial Sequence
  Synthetic oligonucleotide: Ptpn6-6521
gucuccuguuaguuuugg

SEQ ID NO: 26974 - RNA, 19 nt, Artificial Sequence
  Synthetic oligonucleotide: Ptpn6-6522
agucuccuguuaguuuugg

SEQ ID NO: 26975 - RNA, 20 nt, Artificial Sequence
  Synthetic oligonucleotide: Ptpn6-1145
cagucuccuguuaguuuugg

SEQ ID NO: 26976 - RNA, 21 nt, Artificial Sequence
  Synthetic oligonucleotide: Ptpn6-6523
ccagucuccuguuaguuuugg

SEQ ID NO: 26977 - RNA, 22 nt, Artificial Sequence
  Synthetic oligonucleotide: Ptpn6-6524
cccagucuccuguuaguuuugg

SEQ ID NO: 26978 - RNA, 23 nt, Artificial Sequence
  Synthetic oligonucleotide: Ptpn6-6525
ucccagucuccuguuaguuuugg

SEQ ID NO: 26979 - RNA, 24 nt, Artificial Sequence
  Synthetic oligonucleotide: Ptpn6-6526
gucccagucuccuguuaguuuugg

SEQ ID NO: 26980 - RNA, 18 nt, Artificial Sequence
  Synthetic oligonucleotide: Ptpn6-6527
acucccgcuuuggggcug

SEQ ID NO: 26981 - RNA, 19 nt, Artificial Sequence
  Synthetic oligonucleotide: Ptpn6-6528
uacucccgcuuuggggcug

SEQ ID NO: 26982 - RNA, 20 nt, Artificial Sequence
  Synthetic oligonucleotide: Ptpn6-1672
guacucccgcuuuggggcug

SEQ ID NO: 26983 - RNA, 21 nt, Artificial Sequence
  Synthetic oligonucleotide: Ptpn6-6529
uguacucccgcuuuggggcug

SEQ ID NO: 26984 - RNA, 22 nt, Artificial Sequence
  Synthetic oligonucleotide: Ptpn6-6530
cuguacucccgcuuuggggcug

SEQ ID NO: 26985 - RNA, 23 nt, Artificial Sequence
  Synthetic oligonucleotide: Ptpn6-6531
gcuguacucccgcuuuggggcug

SEQ ID NO: 26986 - RNA, 24 nt, Artificial Sequence
  Synthetic oligonucleotide: Ptpn6-6532
ugcuguacucccgcuuuggggcug

SEQ ID NO: 26987 - RNA, 18 nt, Artificial Sequence
  Synthetic oligonucleotide: Ptpn6-6533
gggguaccuccuucucug

SEQ ID NO: 26988 - RNA, 19 nt, Artificial Sequence
  Synthetic oligonucleotide: Ptpn6-6534
ggggguaccuccuucucug

SEQ ID NO: 26989 - RNA, 20 nt, Artificial Sequence
  Synthetic oligonucleotide: Ptpn6-1655
aggggguaccuccuucucug

SEQ ID NO: 26990 - RNA, 21 nt, Artificial Sequence
  Synthetic oligonucleotide: Ptpn6-6535
caggggguaccuccuucucug

SEQ ID NO: 26991 - RNA, 22 nt, Artificial Sequence
  Synthetic oligonucleotide: Ptpn6-6536
acaggggguaccuccuucucug

SEQ ID NO: 26992 - RNA, 23 nt, Artificial Sequence
  Synthetic oligonucleotide: Ptpn6-6537
cacaggggguaccuccuucucug

SEQ ID NO: 26993 - RNA, 24 nt, Artificial Sequence
  Synthetic oligonucleotide: Ptpn6-6538
gcacaggggguaccuccuucucug

SEQ ID NO: 26994 - RNA, 18 nt, Artificial Sequence
  Synthetic oligonucleotide: Ptpn6-6539
agucuccuguuaguuuug

SEQ ID NO: 26995 - RNA, 19 nt, Artificial Sequence
  Synthetic oligonucleotide: Ptpn6-6540
cagucuccuguuaguuuug

SEQ ID NO: 26996 - RNA, 20 nt, Artificial Sequence
  Synthetic oligonucleotide: Ptpn6-1696
ccagucuccuguuaguuuug

SEQ ID NO: 26997 - RNA, 21 nt, Artificial Sequence
  Synthetic oligonucleotide: Ptpn6-6541
cccagucuccuguuaguuuug

SEQ ID NO: 26998 - RNA, 22 nt, Artificial Sequence
  Synthetic oligonucleotide: Ptpn6-6542
ucccagucuccuguuaguuuug

SEQ ID NO: 26999 - RNA, 23 nt, Artificial Sequence
  Synthetic oligonucleotide: Ptpn6-6543
gucccagucuccuguuaguuuug

SEQ ID NO: 27000 - RNA, 24 nt, Artificial Sequence
  Synthetic oligonucleotide: Ptpn6-6544
ggucccagucuccuguuaguuuug

SEQ ID NO: 27001 - RNA, 18 nt, Artificial Sequence
  Synthetic oligonucleotide: Ptpn6-6545
cgccuguuuccggucccu

SEQ ID NO: 27002 - RNA, 19 nt, Artificial Sequence
  Synthetic oligonucleotide: Ptpn6-6546
gcgccuguuuccggucccu

SEQ ID NO: 27003 - RNA, 20 nt, Artificial Sequence
  Synthetic oligonucleotide: Ptpn6-1705
ugcgccuguuuccggucccu

SEQ ID NO: 27004 - RNA, 21 nt, Artificial Sequence
  Synthetic oligonucleotide: Ptpn6-6547
cugcgccuguuuccggucccu

SEQ ID NO: 27005 - RNA, 22 nt, Artificial Sequence
  Synthetic oligonucleotide: Ptpn6-6548
ccugcgccuguuuccggucccu

SEQ ID NO: 27006 - RNA, 23 nt, Artificial Sequence
  Synthetic oligonucleotide: Ptpn6-6549
cccugcgccuguuuccggucccu

SEQ ID NO: 27007 - RNA, 24 nt, Artificial Sequence
  Synthetic oligonucleotide: Ptpn6-6550
gcccugcgccuguuuccggucccu

SEQ ID NO: 27008 - RNA, 18 nt, Artificial Sequence
  Synthetic oligonucleotide: Ptpn6-6551
cauuucuacuuccagccu

SEQ ID NO: 27009 - RNA, 19 nt, Artificial Sequence
  Synthetic oligonucleotide: Ptpn6-6552
gcauuucuacuuccagccu

SEQ ID NO: 27010 - RNA, 20 nt, Artificial Sequence
  Synthetic oligonucleotide: Ptpn6-1709
ugcauuucuacuuccagccu

SEQ ID NO: 27011 - RNA, 21 nt, Artificial Sequence
  Synthetic oligonucleotide: Ptpn6-6553
uugcauuucuacuuccagccu

SEQ ID NO: 27012 - RNA, 22 nt, Artificial Sequence
  Synthetic oligonucleotide: Ptpn6-6554
auugcauuucuacuuccagccu

SEQ ID NO: 27013 - RNA, 23 nt, Artificial Sequence
  Synthetic oligonucleotide: Ptpn6-6555
cauugcauuucuacuuccagccu

SEQ ID NO: 27014 - RNA, 24 nt, Artificial Sequence
  Synthetic oligonucleotide: Ptpn6-6556
ccauugcauuucuacuuccagccu

SEQ ID NO: 27015 - RNA, 18 nt, Artificial Sequence
  Synthetic oligonucleotide: Ptpn6-6557
gcccuuugguuuccgccu

SEQ ID NO: 27016 - RNA, 19 nt, Artificial Sequence
  Synthetic oligonucleotide: Ptpn6-6558
ggcccuuugguuuccgccu

SEQ ID NO: 27017 - RNA, 20 nt, Artificial Sequence
  Synthetic oligonucleotide: Ptpn6-1659
aggcccuuugguuuccgccu

SEQ ID NO: 27018 - RNA, 21 nt, Artificial Sequence
  Synthetic oligonucleotide: Ptpn6-6559
uaggcccuuugguuuccgccu

SEQ ID NO: 27019 - RNA, 22 nt, Artificial Sequence
  Synthetic oligonucleotide: Ptpn6-6560
uuaggcccuuugguuuccgccu

SEQ ID NO: 27020 - RNA, 23 nt, Artificial Sequence
  Synthetic oligonucleotide: Ptpn6-6561
cuuaggcccuuugguuuccgccu

SEQ ID NO: 27021 - RNA, 24 nt, Artificial Sequence
  Synthetic oligonucleotide: Ptpn6-6562
ccuuaggcccuuugguuuccgccu

SEQ ID NO: 27022 - RNA, 18 nt, Artificial Sequence
  Synthetic oligonucleotide: Ptpn6-6563
gccugcuguacucccgcu

SEQ ID NO: 27023 - RNA, 19 nt, Artificial Sequence
  Synthetic oligonucleotide: Ptpn6-6564
ggccugcuguacucccgcu

SEQ ID NO: 27024 - RNA, 20 nt, Artificial Sequence
  Synthetic oligonucleotide: Ptpn6-1670
gggccugcuguacucccgcu

SEQ ID NO: 27025 - RNA, 21 nt, Artificial Sequence
  Synthetic oligonucleotide: Ptpn6-6565
cgggccugcuguacucccgcu

SEQ ID NO: 27026 - RNA, 22 nt, Artificial Sequence
  Synthetic oligonucleotide: Ptpn6-6566
gcgggccugcuguacucccgcu

SEQ ID NO: 27027 - RNA, 23 nt, Artificial Sequence
  Synthetic oligonucleotide: Ptpn6-6567
ggcgggccugcuguacucccgcu

SEQ ID NO: 27028 - RNA, 24 nt, Artificial Sequence
  Synthetic oligonucleotide: Ptpn6-6568
aggcgggccugcuguacucccgcu

SEQ ID NO: 27029 - RNA, 18 nt, Artificial Sequence
  Synthetic oligonucleotide: Ptpn6-6569
gcagggaagcuggccgcu

SEQ ID NO: 27030 - RNA, 19 nt, Artificial Sequence
  Synthetic oligonucleotide: Ptpn6-6570
ugcagggaagcuggccgcu

SEQ ID NO: 27031 - RNA, 20 nt, Artificial Sequence
  Synthetic oligonucleotide: Ptpn6-1675
cugcagggaagcuggccgcu

SEQ ID NO: 27032 - RNA, 21 nt, Artificial Sequence
  Synthetic oligonucleotide: Ptpn6-6571
gcugcagggaagcuggccgcu

SEQ ID NO: 27033 - RNA, 22 nt, Artificial Sequence
  Synthetic oligonucleotide: Ptpn6-6572
ggcugcagggaagcuggccgcu

SEQ ID NO: 27034 - RNA, 23 nt, Artificial Sequence
  Synthetic oligonucleotide: Ptpn6-6573
gggcugcagggaagcuggccgcu

SEQ ID NO: 27035 - RNA, 24 nt, Artificial Sequence
  Synthetic oligonucleotide: Ptpn6-6574
ggggcugcagggaagcuggccgcu

SEQ ID NO: 27036 - RNA, 18 nt, Artificial Sequence
  Synthetic oligonucleotide: Ptpn6-6575
cugcuucugccuccugcu

SEQ ID NO: 27037 - RNA, 19 nt, Artificial Sequence
  Synthetic oligonucleotide: Ptpn6-6576
ccugcuucugccuccugcu

SEQ ID NO: 27038 - RNA, 20 nt, Artificial Sequence
  Synthetic oligonucleotide: Ptpn6-1710
uccugcuucugccuccugcu

SEQ ID NO: 27039 - RNA, 21 nt, Artificial Sequence
  Synthetic oligonucleotide: Ptpn6-6577
cuccugcuucugccuccugcu

SEQ ID NO: 27040 - RNA, 22 nt, Artificial Sequence
  Synthetic oligonucleotide: Ptpn6-6578
gcuccugcuucugccuccugcu

SEQ ID NO: 27041 - RNA, 23 nt, Artificial Sequence
  Synthetic oligonucleotide: Ptpn6-6579
ggcuccugcuucugccuccugcu

SEQ ID NO: 27042 - RNA, 24 nt, Artificial Sequence
  Synthetic oligonucleotide: Ptpn6-6580
gggcuccugcuucugccuccugcu

SEQ ID NO: 27043 - RNA, 18 nt, Artificial Sequence
  Synthetic oligonucleotide: Ptpn6-6581
ggggguaccuccuucucu

SEQ ID NO: 27044 - RNA, 19 nt, Artificial Sequence
  Synthetic oligonucleotide: Ptpn6-6582
aggggguaccuccuucucu

SEQ ID NO: 27045 - RNA, 20 nt, Artificial Sequence
  Synthetic oligonucleotide: Ptpn6-6583
caggggguaccuccuucucu

SEQ ID NO: 27046 - RNA, 21 nt, Artificial Sequence
  Synthetic oligonucleotide: Ptpn6-6584
acaggggguaccuccuucucu

SEQ ID NO: 27047 - RNA, 22 nt, Artificial Sequence
  Synthetic oligonucleotide: Ptpn6-6585
cacaggggguaccuccuucucu

SEQ ID NO: 27048 - RNA, 23 nt, Artificial Sequence
  Synthetic oligonucleotide: Ptpn6-6586
gcacaggggguaccuccuucucu

SEQ ID NO: 27049 - RNA, 24 nt, Artificial Sequence
  Synthetic oligonucleotide: Ptpn6-6587
ugcacaggggguaccuccuucucu

SEQ ID NO: 27050 - RNA, 18 nt, Artificial Sequence
  Synthetic oligonucleotide: Ptpn6-6588
caggggguaccuccuucu

SEQ ID NO: 27051 - RNA, 19 nt, Artificial Sequence
  Synthetic oligonucleotide: Ptpn6-6589
acaggggguaccuccuucu

SEQ ID NO: 27052 - RNA, 20 nt, Artificial Sequence
  Synthetic oligonucleotide: Ptpn6-6590
cacaggggguaccuccuucu

SEQ ID NO: 27053 - RNA, 21 nt, Artificial Sequence
  Synthetic oligonucleotide: Ptpn6-6591
gcacaggggguaccuccuucu

SEQ ID NO: 27054 - RNA, 22 nt, Artificial Sequence
  Synthetic oligonucleotide: Ptpn6-6592
ugcacaggggguaccuccuucu

SEQ ID NO: 27055 - RNA, 23 nt, Artificial Sequence
  Synthetic oligonucleotide: Ptpn6-6593
cugcacaggggguaccuccuucu

SEQ ID NO: 27056 - RNA, 24 nt, Artificial Sequence
  Synthetic oligonucleotide: Ptpn6-6594
ccugcacaggggguaccuccuucu

SEQ ID NO: 27057 - RNA, 18 nt, Artificial Sequence
  Synthetic oligonucleotide: Ptpn6-6595
caccucaaacauagcagu

SEQ ID NO: 27058 - RNA, 19 nt, Artificial Sequence
  Synthetic oligonucleotide: Ptpn6-6596
acaccucaaacauagcagu

SEQ ID NO: 27059 - RNA, 20 nt, Artificial Sequence
  Synthetic oligonucleotide: Ptpn6-1712
aacaccucaaacauagcagu

SEQ ID NO: 27060 - RNA, 21 nt, Artificial Sequence
  Synthetic oligonucleotide: Ptpn6-6597
caacaccucaaacauagcagu

SEQ ID NO: 27061 - RNA, 22 nt, Artificial Sequence
  Synthetic oligonucleotide: Ptpn6-6598
acaacaccucaaacauagcagu

SEQ ID NO: 27062 - RNA, 23 nt, Artificial Sequence
  Synthetic oligonucleotide: Ptpn6-6599
cacaacaccucaaacauagcagu

SEQ ID NO: 27063 - RNA, 24 nt, Artificial Sequence
  Synthetic oligonucleotide: Ptpn6-6600
ucacaacaccucaaacauagcagu

SEQ ID NO: 27064 - RNA, 18 nt, Artificial Sequence
  Synthetic oligonucleotide: Ptpn6-6601
uuccccuucccgcaaggu

SEQ ID NO: 27065 - RNA, 19 nt, Artificial Sequence
  Synthetic oligonucleotide: Ptpn6-6602
cuuccccuucccgcaaggu

SEQ ID NO: 27066 - RNA, 20 nt, Artificial Sequence
  Synthetic oligonucleotide: Ptpn6-1706
acuuccccuucccgcaaggu

SEQ ID NO: 27067 - RNA, 21 nt, Artificial Sequence
  Synthetic oligonucleotide: Ptpn6-6603
aacuuccccuucccgcaaggu

SEQ ID NO: 27068 - RNA, 22 nt, Artificial Sequence
  Synthetic oligonucleotide: Ptpn6-6604
gaacuuccccuucccgcaaggu

SEQ ID NO: 27069 - RNA, 23 nt, Artificial Sequence
  Synthetic oligonucleotide: Ptpn6-6605
ugaacuuccccuucccgcaaggu

SEQ ID NO: 27070 - RNA, 24 nt, Artificial Sequence
  Synthetic oligonucleotide: Ptpn6-6606
augaacuuccccuucccgcaaggu

SEQ ID NO: 27071 - RNA, 18 nt, Artificial Sequence
  Synthetic oligonucleotide: Ptpn6-6607
ucugaggaacugggcugu

SEQ ID NO: 27072 - RNA, 19 nt, Artificial Sequence
  Synthetic oligonucleotide: Ptpn6-6608
cucugaggaacugggcugu

SEQ ID NO: 27073 - RNA, 20 nt, Artificial Sequence
  Synthetic oligonucleotide: Ptpn6-1657
ucucugaggaacugggcugu

SEQ ID NO: 27074 - RNA, 21 nt, Artificial Sequence
  Synthetic oligonucleotide: Ptpn6-6609
uucucugaggaacugggcugu

SEQ ID NO: 27075 - RNA, 22 nt, Artificial Sequence
  Synthetic oligonucleotide: Ptpn6-6610
cuucucugaggaacugggcugu

SEQ ID NO: 27076 - RNA, 23 nt, Artificial Sequence
  Synthetic oligonucleotide: Ptpn6-6611
ccuucucugaggaacugggcugu

SEQ ID NO: 27077 - RNA, 24 nt, Artificial Sequence
  Synthetic oligonucleotide: Ptpn6-6612
uccuucucugaggaacugggcugu

SEQ ID NO: 27078 - RNA, 18 nt, Artificial Sequence
  Synthetic oligonucleotide: Ptpn6-6613
augcucacuccgacgugu

SEQ ID NO: 27079 - RNA, 19 nt, Artificial Sequence
  Synthetic oligonucleotide: Ptpn6-6614
gaugcucacuccgacgugu

SEQ ID NO: 27080 - RNA, 20 nt, Artificial Sequence
  Synthetic oligonucleotide: Ptpn6-1703
ugaugcucacuccgacgugu

SEQ ID NO: 27081 - RNA, 21 nt, Artificial Sequence
  Synthetic oligonucleotide: Ptpn6-6615
uugaugcucacuccgacgugu

SEQ ID NO: 27082 - RNA, 22 nt, Artificial Sequence
  Synthetic oligonucleotide: Ptpn6-6616
guugaugcucacuccgacgugu

SEQ ID NO: 27083 - RNA, 23 nt, Artificial Sequence
  Synthetic oligonucleotide: Ptpn6-6617
uguugaugcucacuccgacgugu

SEQ ID NO: 27084 - RNA, 24 nt, Artificial Sequence
  Synthetic oligonucleotide: Ptpn6-6618
uuguugaugcucacuccgacgugu

SEQ ID NO: 27085 - RNA, 18 nt, Artificial Sequence
  Synthetic oligonucleotide: Ptpn6-6619
ccccuucccgcaaggugu

SEQ ID NO: 27086 - RNA, 19 nt, Artificial Sequence
  Synthetic oligonucleotide: Ptpn6-6620
uccccuucccgcaaggugu

SEQ ID NO: 27087 - RNA, 20 nt, Artificial Sequence
  Synthetic oligonucleotide: Ptpn6-1707
uuccccuucccgcaaggugu

SEQ ID NO: 27088 - RNA, 21 nt, Artificial Sequence
  Synthetic oligonucleotide: Ptpn6-6621
cuuccccuucccgcaaggugu

SEQ ID NO: 27089 - RNA, 22 nt, Artificial Sequence
  Synthetic oligonucleotide: Ptpn6-6622
acuuccccuucccgcaaggugu

SEQ ID NO: 27090 - RNA, 23 nt, Artificial Sequence
  Synthetic oligonucleotide: Ptpn6-6623
aacuuccccuucccgcaaggugu

SEQ ID NO: 27091 - RNA, 24 nt, Artificial Sequence
  Synthetic oligonucleotide: Ptpn6-6624
gaacuuccccuucccgcaaggugu

SEQ ID NO: 27092 - RNA, 18 nt, Artificial Sequence
  Synthetic oligonucleotide: Ptpn6-6625
ccugcuguacucccgcuu

SEQ ID NO: 27093 - RNA, 19 nt, Artificial Sequence
  Synthetic oligonucleotide: Ptpn6-6626
gccugcuguacucccgcuu

SEQ ID NO: 27094 - RNA, 20 nt, Artificial Sequence
  Synthetic oligonucleotide: Ptpn6-1011
ggccugcuguacucccgcuu

SEQ ID NO: 27095 - RNA, 21 nt, Artificial Sequence
  Synthetic oligonucleotide: Ptpn6-6627
gggccugcuguacucccgcuu

SEQ ID NO: 27096 - RNA, 22 nt, Artificial Sequence
  Synthetic oligonucleotide: Ptpn6-6628
cgggccugcuguacucccgcuu

SEQ ID NO: 27097 - RNA, 23 nt, Artificial Sequence
  Synthetic oligonucleotide: Ptpn6-6629
gcgggccugcuguacucccgcuu

SEQ ID NO: 27098 - RNA, 24 nt, Artificial Sequence
  Synthetic oligonucleotide: Ptpn6-6630
ggcgggccugcuguacucccgcuu

SEQ ID NO: 27099 - RNA, 18 nt, Artificial Sequence
  Synthetic oligonucleotide: Ptpn6-6631
cccagucuccuguuaguu

SEQ ID NO: 27100 - RNA, 19 nt, Artificial Sequence
  Synthetic oligonucleotide: Ptpn6-6632
ucccagucuccuguuaguu

SEQ ID NO: 27101 - RNA, 20 nt, Artificial Sequence
  Synthetic oligonucleotide: Ptpn6-1694
gucccagucuccuguuaguu

SEQ ID NO: 27102 - RNA, 21 nt, Artificial Sequence
  Synthetic oligonucleotide: Ptpn6-6633
ggucccagucuccuguuaguu

SEQ ID NO: 27103 - RNA, 22 nt, Artificial Sequence
  Synthetic oligonucleotide: Ptpn6-6634
gggucccagucuccuguuaguu

SEQ ID NO: 27104 - RNA, 23 nt, Artificial Sequence
  Synthetic oligonucleotide: Ptpn6-6635
ggggucccagucuccuguuaguu

SEQ ID NO: 27105 - RNA, 24 nt, Artificial Sequence
  Synthetic oligonucleotide: Ptpn6-6636
cggggucccagucuccuguuaguu

SEQ ID NO: 27106 - RNA, 18 nt, Artificial Sequence
  Synthetic oligonucleotide: Ptpn6-6637
cuucccccggggcagguu

SEQ ID NO: 27107 - RNA, 19 nt, Artificial Sequence
  Synthetic oligonucleotide: Ptpn6-6638
ccuucccccggggcagguu

SEQ ID NO: 27108 - RNA, 20 nt, Artificial Sequence
  Synthetic oligonucleotide: Ptpn6-2229
cccuucccccggggcagguu

SEQ ID NO: 27109 - RNA, 21 nt, Artificial Sequence
  Synthetic oligonucleotide: Ptpn6-6639
ccccuucccccggggcagguu

SEQ ID NO: 27110 - RNA, 22 nt, Artificial Sequence
  Synthetic oligonucleotide: Ptpn6-6640
uccccuucccccggggcagguu

SEQ ID NO: 27111 - RNA, 23 nt, Artificial Sequence
  Synthetic oligonucleotide: Ptpn6-6641
cuccccuucccccggggcagguu

SEQ ID NO: 27112 - RNA, 24 nt, Artificial Sequence
  Synthetic oligonucleotide: Ptpn6-6642
ccuccccuucccccggggcagguu

SEQ ID NO: 27113 - RNA, 18 nt, Artificial Sequence
  Synthetic oligonucleotide: Ptpn6-6643
ccagucuccuguuaguuu

SEQ ID NO: 27114 - RNA, 19 nt, Artificial Sequence
  Synthetic oligonucleotide: Ptpn6-6644
cccagucuccuguuaguuu

SEQ ID NO: 27115 - RNA, 20 nt, Artificial Sequence
  Synthetic oligonucleotide: Ptpn6-1143
ucccagucuccuguuaguuu

SEQ ID NO: 27116 - RNA, 21 nt, Artificial Sequence
  Synthetic oligonucleotide: Ptpn6-6645
gucccagucuccuguuaguuu

SEQ ID NO: 27117 - RNA, 22 nt, Artificial Sequence
  Synthetic oligonucleotide: Ptpn6-6646
ggucccagucuccuguuaguuu

SEQ ID NO: 27118 - RNA, 23 nt, Artificial Sequence
  Synthetic oligonucleotide: Ptpn6-6647
gggucccagucuccuguuaguuu

SEQ ID NO: 27119 - RNA, 24 nt, Artificial Sequence
  Synthetic oligonucleotide: Ptpn6-6648
ggggucccagucuccuguuaguuu

SEQ ID NO: 27120 - RNA, 18 nt, Artificial Sequence
  Synthetic oligonucleotide: Ptpn6-6649
ucuuauuuuuuguagaga

SEQ ID NO: 27121 - RNA, 19 nt, Artificial Sequence
  Synthetic oligonucleotide: Ptpn6-6650
uucuuauuuuuuguagaga

SEQ ID NO: 27122 - RNA, 20 nt, Artificial Sequence
  Synthetic oligonucleotide: Ptpn6-2196
uuucuuauuuuuuguagaga

SEQ ID NO: 27123 - RNA, 21 nt, Artificial Sequence
  Synthetic oligonucleotide: Ptpn6-6651
auuucuuauuuuuuguagaga

SEQ ID NO: 27124 - RNA, 22 nt, Artificial Sequence
  Synthetic oligonucleotide: Ptpn6-6652
aauuucuuauuuuuuguagaga

SEQ ID NO: 27125 - RNA, 23 nt, Artificial Sequence
  Synthetic oligonucleotide: Ptpn6-6653
uaauuucuuauuuuuuguagaga

SEQ ID NO: 27126 - RNA, 24 nt, Artificial Sequence
  Synthetic oligonucleotide: Ptpn6-6654
cuaauuucuuauuuuuuguagaga

SEQ ID NO: 27127 - RNA, 18 nt, Artificial Sequence
  Synthetic oligonucleotide: Ptpn6-6655
ucaacacguaccuguuga

SEQ ID NO: 27128 - RNA, 19 nt, Artificial Sequence
  Synthetic oligonucleotide: Ptpn6-6656
cucaacacguaccuguuga

SEQ ID NO: 27129 - RNA, 20 nt, Artificial Sequence
  Synthetic oligonucleotide: Ptpn6-1784
gcucaacacguaccuguuga

SEQ ID NO: 27130 - RNA, 21 nt, Artificial Sequence
  Synthetic oligonucleotide: Ptpn6-6657
ugcucaacacguaccuguuga

SEQ ID NO: 27131 - RNA, 22 nt, Artificial Sequence
  Synthetic oligonucleotide: Ptpn6-6658
augcucaacacguaccuguuga

SEQ ID NO: 27132 - RNA, 23 nt, Artificial Sequence
  Synthetic oligonucleotide: Ptpn6-6659
gaugcucaacacguaccuguuga

SEQ ID NO: 27133 - RNA, 24 nt, Artificial Sequence
  Synthetic oligonucleotide: Ptpn6-6660
agaugcucaacacguaccuguuga

SEQ ID NO: 27134 - RNA, 18 nt, Artificial Sequence
  Synthetic oligonucleotide: Ptpn6-6661
cugcaaugauccaauuua

SEQ ID NO: 27135 - RNA, 19 nt, Artificial Sequence
  Synthetic oligonucleotide: Ptpn6-6662
ucugcaaugauccaauuua

SEQ ID NO: 27136 - RNA, 20 nt, Artificial Sequence
  Synthetic oligonucleotide: Ptpn6-2203
aucugcaaugauccaauuua

SEQ ID NO: 27137 - RNA, 21 nt, Artificial Sequence
  Synthetic oligonucleotide: Ptpn6-6663
aaucugcaaugauccaauuua

SEQ ID NO: 27138 - RNA, 22 nt, Artificial Sequence
  Synthetic oligonucleotide: Ptpn6-6664
gaaucugcaaugauccaauuua

SEQ ID NO: 27139 - RNA, 23 nt, Artificial Sequence
  Synthetic oligonucleotide: Ptpn6-6665
agaaucugcaaugauccaauuua

SEQ ID NO: 27140 - RNA, 24 nt, Artificial Sequence
  Synthetic oligonucleotide: Ptpn6-6666
gagaaucugcaaugauccaauuua

SEQ ID NO: 27141 - RNA, 18 nt, Artificial Sequence
  Synthetic oligonucleotide: Ptpn6-6667
cggucuguaaccucccac

SEQ ID NO: 27142 - RNA, 19 nt, Artificial Sequence
  Synthetic oligonucleotide: Ptpn6-6668
ucggucuguaaccucccac

SEQ ID NO: 27143 - RNA, 20 nt, Artificial Sequence
  Synthetic oligonucleotide: Ptpn6-1580
uucggucuguaaccucccac

SEQ ID NO: 27144 - RNA, 21 nt, Artificial Sequence
  Synthetic oligonucleotide: Ptpn6-6669
guucggucuguaaccucccac

SEQ ID NO: 27145 - RNA, 22 nt, Artificial Sequence
  Synthetic oligonucleotide: Ptpn6-6670
uguucggucuguaaccucccac

SEQ ID NO: 27146 - RNA, 23 nt, Artificial Sequence
  Synthetic oligonucleotide: Ptpn6-6671
uuguucggucuguaaccucccac

SEQ ID NO: 27147 - RNA, 24 nt, Artificial Sequence
  Synthetic oligonucleotide: Ptpn6-6672
uuuguucggucuguaaccucccac

SEQ ID NO: 27148 - RNA, 18 nt, Artificial Sequence
  Synthetic oligonucleotide: Ptpn6-6673
cucagccucccacagugc

SEQ ID NO: 27149 - RNA, 19 nt, Artificial Sequence
  Synthetic oligonucleotide: Ptpn6-6674
ccucagccucccacagugc

SEQ ID NO: 27150 - RNA, 20 nt, Artificial Sequence
  Synthetic oligonucleotide: Ptpn6-1572
gccucagccucccacagugc

SEQ ID NO: 27151 - RNA, 21 nt, Artificial Sequence
  Synthetic oligonucleotide: Ptpn6-6675
cgccucagccucccacagugc

SEQ ID NO: 27152 - RNA, 22 nt, Artificial Sequence
  Synthetic oligonucleotide: Ptpn6-6676
ucgccucagccucccacagugc

SEQ ID NO: 27153 - RNA, 23 nt, Artificial Sequence
  Synthetic oligonucleotide: Ptpn6-6677
cucgccucagccucccacagugc

SEQ ID NO: 27154 - RNA, 24 nt, Artificial Sequence
  Synthetic oligonucleotide: Ptpn6-6678
ucucgccucagccucccacagugc

SEQ ID NO: 27155 - RNA, 18 nt, Artificial Sequence
  Synthetic oligonucleotide: Ptpn6-6679
ggacgugggagggccuuc

SEQ ID NO: 27156 - RNA, 19 nt, Artificial Sequence
  Synthetic oligonucleotide: Ptpn6-6680
uggacgugggagggccuuc

SEQ ID NO: 27157 - RNA, 20 nt, Artificial Sequence
  Synthetic oligonucleotide: Ptpn6-1806
cuggacgugggagggccuuc

SEQ ID NO: 27158 - RNA, 21 nt, Artificial Sequence
  Synthetic oligonucleotide: Ptpn6-6681
gcuggacgugggagggccuuc

SEQ ID NO: 27159 - RNA, 22 nt, Artificial Sequence
  Synthetic oligonucleotide: Ptpn6-6682
ggcuggacgugggagggccuuc

SEQ ID NO: 27160 - RNA, 23 nt, Artificial Sequence
  Synthetic oligonucleotide: Ptpn6-6683
uggcuggacgugggagggccuuc

SEQ ID NO: 27161 - RNA, 24 nt, Artificial Sequence
  Synthetic oligonucleotide: Ptpn6-6684
uuggcuggacgugggagggccuuc

SEQ ID NO: 27162 - RNA, 18 nt, Artificial Sequence
  Synthetic oligonucleotide: Ptpn6-6685
augcucaacacguaccug

SEQ ID NO: 27163 - RNA, 19 nt, Artificial Sequence
  Synthetic oligonucleotide: Ptpn6-6686
gaugcucaacacguaccug

SEQ ID NO: 27164 - RNA, 20 nt, Artificial Sequence
  Synthetic oligonucleotide: Ptpn6-1783
agaugcucaacacguaccug

SEQ ID NO: 27165 - RNA, 21 nt, Artificial Sequence
  Synthetic oligonucleotide: Ptpn6-6687
uagaugcucaacacguaccug

SEQ ID NO: 27166 - RNA, 22 nt, Artificial Sequence
  Synthetic oligonucleotide: Ptpn6-6688
auagaugcucaacacguaccug

SEQ ID NO: 27167 - RNA, 23 nt, Artificial Sequence
  Synthetic oligonucleotide: Ptpn6-6689
aauagaugcucaacacguaccug

SEQ ID NO: 27168 - RNA, 24 nt, Artificial Sequence
  Synthetic oligonucleotide: Ptpn6-6690
uaauagaugcucaacacguaccug

SEQ ID NO: 27169 - RNA, 18 nt, Artificial Sequence
  Synthetic oligonucleotide: Ptpn6-6691
uuucugcguaauacuucu

SEQ ID NO: 27170 - RNA, 19 nt, Artificial Sequence
  Synthetic oligonucleotide: Ptpn6-6692
uuuucugcguaauacuucu

SEQ ID NO: 27171 - RNA, 20 nt, Artificial Sequence
  Synthetic oligonucleotide: Ptpn6-2202
auuuucugcguaauacuucu

SEQ ID NO: 27172 - RNA, 21 nt, Artificial Sequence
  Synthetic oligonucleotide: Ptpn6-6693
uauuuucugcguaauacuucu

SEQ ID NO: 27173 - RNA, 22 nt, Artificial Sequence
  Synthetic oligonucleotide: Ptpn6-6694
cuauuuucugcguaauacuucu

SEQ ID NO: 27174 - RNA, 23 nt, Artificial Sequence
  Synthetic oligonucleotide: Ptpn6-6695
ucuauuuucugcguaauacuucu

SEQ ID NO: 27175 - RNA, 24 nt, Artificial Sequence
  Synthetic oligonucleotide: Ptpn6-6696
gucuauuuucugcguaauacuucu

SEQ ID NO: 27176 - RNA, 18 nt, Artificial Sequence
  Synthetic oligonucleotide: Ptpn6-6697
aacaaauaacccaauaaa

SEQ ID NO: 27177 - RNA, 19 nt, Artificial Sequence
  Synthetic oligonucleotide: Ptpn6-6698
gaacaaauaacccaauaaa

SEQ ID NO: 27178 - RNA, 20 nt, Artificial Sequence
  Synthetic oligonucleotide: Ptpn6-2106
cgaacaaauaacccaauaaa

SEQ ID NO: 27179 - RNA, 21 nt, Artificial Sequence
  Synthetic oligonucleotide: Ptpn6-6699
ccgaacaaauaacccaauaaa

SEQ ID NO: 27180 - RNA, 22 nt, Artificial Sequence
  Synthetic oligonucleotide: Ptpn6-6700
accgaacaaauaacccaauaaa

SEQ ID NO: 27181 - RNA, 23 nt, Artificial Sequence
  Synthetic oligonucleotide: Ptpn6-6701
gaccgaacaaauaacccaauaaa

SEQ ID NO: 27182 - RNA, 24 nt, Artificial Sequence
  Synthetic oligonucleotide: Ptpn6-6702
agaccgaacaaauaacccaauaaa

SEQ ID NO: 27183 - RNA, 18 nt, Artificial Sequence
  Synthetic oligonucleotide: Ptpn6-6703
ugugggaggcugaggcga

SEQ ID NO: 27184 - RNA, 19 nt, Artificial Sequence
  Synthetic oligonucleotide: Ptpn6-6704
cugugggaggcugaggcga

SEQ ID NO: 27185 - RNA, 20 nt, Artificial Sequence
  Synthetic oligonucleotide: Ptpn6-2116
acugugggaggcugaggcga

SEQ ID NO: 27186 - RNA, 21 nt, Artificial Sequence
  Synthetic oligonucleotide: Ptpn6-6705
cacugugggaggcugaggcga

SEQ ID NO: 27187 - RNA, 22 nt, Artificial Sequence
  Synthetic oligonucleotide: Ptpn6-6706
gcacugugggaggcugaggcga

SEQ ID NO: 27188 - RNA, 23 nt, Artificial Sequence
  Synthetic oligonucleotide: Ptpn6-6707
agcacugugggaggcugaggcga

SEQ ID NO: 27189 - RNA, 24 nt, Artificial Sequence
  Synthetic oligonucleotide: Ptpn6-6708
cagcacugugggaggcugaggcga

SEQ ID NO: 27190 - RNA, 18 nt, Artificial Sequence
  Synthetic oligonucleotide: Ptpn6-6709
uuaagaugcugguaauac

SEQ ID NO: 27191 - RNA, 19 nt, Artificial Sequence
  Synthetic oligonucleotide: Ptpn6-6710
uuuaagaugcugguaauac

SEQ ID NO: 27192 - RNA, 20 nt, Artificial Sequence
  Synthetic oligonucleotide: Ptpn6-1412
guuuaagaugcugguaauac

SEQ ID NO: 27193 - RNA, 21 nt, Artificial Sequence
  Synthetic oligonucleotide: Ptpn6-6711
uguuuaagaugcugguaauac

SEQ ID NO: 27194 - RNA, 22 nt, Artificial Sequence
  Synthetic oligonucleotide: Ptpn6-6712
cuguuuaagaugcugguaauac

SEQ ID NO: 27195 - RNA, 23 nt, Artificial Sequence
  Synthetic oligonucleotide: Ptpn6-6713
gcuguuuaagaugcugguaauac

SEQ ID NO: 27196 - RNA, 24 nt, Artificial Sequence
  Synthetic oligonucleotide: Ptpn6-6714
ugcuguuuaagaugcugguaauac

SEQ ID NO: 27197 - RNA, 18 nt, Artificial Sequence
  Synthetic oligonucleotide: Ptpn6-6715
agaggauugcuugagccc

SEQ ID NO: 27198 - RNA, 19 nt, Artificial Sequence
  Synthetic oligonucleotide: Ptpn6-6716
gagaggauugcuugagccc

SEQ ID NO: 27199 - RNA, 20 nt, Artificial Sequence
  Synthetic oligonucleotide: Ptpn6-1428
cgagaggauugcuugagccc

SEQ ID NO: 27200 - RNA, 21 nt, Artificial Sequence
  Synthetic oligonucleotide: Ptpn6-6717
gcgagaggauugcuugagccc

SEQ ID NO: 27201 - RNA, 22 nt, Artificial Sequence
  Synthetic oligonucleotide: Ptpn6-6718
ggcgagaggauugcuugagccc

SEQ ID NO: 27202 - RNA, 23 nt, Artificial Sequence
  Synthetic oligonucleotide: Ptpn6-6719
aggcgagaggauugcuugagccc

SEQ ID NO: 27203 - RNA, 24 nt, Artificial Sequence
  Synthetic oligonucleotide: Ptpn6-6720
gaggcgagaggauugcuugagccc

SEQ ID NO: 27204 - RNA, 18 nt, Artificial Sequence
  Synthetic oligonucleotide: Ptpn6-6721
caaaaaauaagaaauuag

SEQ ID NO: 27205 - RNA, 19 nt, Artificial Sequence
  Synthetic oligonucleotide: Ptpn6-6722
acaaaaaauaagaaauuag

SEQ ID NO: 27206 - RNA, 20 nt, Artificial Sequence
  Synthetic oligonucleotide: Ptpn6-2123
uacaaaaaauaagaaauuag

SEQ ID NO: 27207 - RNA, 21 nt, Artificial Sequence
  Synthetic oligonucleotide: Ptpn6-6723
cuacaaaaaauaagaaauuag

SEQ ID NO: 27208 - RNA, 22 nt, Artificial Sequence
  Synthetic oligonucleotide: Ptpn6-6724
ucuacaaaaaauaagaaauuag

SEQ ID NO: 27209 - RNA, 23 nt, Artificial Sequence
  Synthetic oligonucleotide: Ptpn6-6725
cucuacaaaaaauaagaaauuag

SEQ ID NO: 27210 - RNA, 24 nt, Artificial Sequence
  Synthetic oligonucleotide: Ptpn6-6726
ucucuacaaaaaauaagaaauuag

SEQ ID NO: 27211 - RNA, 18 nt, Artificial Sequence
  Synthetic oligonucleotide: Ptpn6-6727
gaaaauagacagccuugg

SEQ ID NO: 27212 - RNA, 19 nt, Artificial Sequence
  Synthetic oligonucleotide: Ptpn6-6728
agaaaauagacagccuugg

SEQ ID NO: 27213 - RNA, 20 nt, Artificial Sequence
  Synthetic oligonucleotide: Ptpn6-2109
cagaaaauagacagccuugg

SEQ ID NO: 27214 - RNA, 21 nt, Artificial Sequence
  Synthetic oligonucleotide: Ptpn6-6729
gcagaaaauagacagccuugg

SEQ ID NO: 27215 - RNA, 22 nt, Artificial Sequence
  Synthetic oligonucleotide: Ptpn6-6730
cgcagaaaauagacagccuugg

SEQ ID NO: 27216 - RNA, 23 nt, Artificial Sequence
  Synthetic oligonucleotide: Ptpn6-6731
acgcagaaaauagacagccuugg

SEQ ID NO: 27217 - RNA, 24 nt, Artificial Sequence
  Synthetic oligonucleotide: Ptpn6-6732
uacgcagaaaauagacagccuugg

SEQ ID NO: 27218 - RNA, 18 nt, Artificial Sequence
  Synthetic oligonucleotide: Ptpn6-6733
aaucagggaaggagagau

SEQ ID NO: 27219 - RNA, 19 nt, Artificial Sequence
  Synthetic oligonucleotide: Ptpn6-6734
gaaucagggaaggagagau

SEQ ID NO: 27220 - RNA, 20 nt, Artificial Sequence
  Synthetic oligonucleotide: Ptpn6-1549
ggaaucagggaaggagagau

SEQ ID NO: 27221 - RNA, 21 nt, Artificial Sequence
  Synthetic oligonucleotide: Ptpn6-6735
gggaaucagggaaggagagau

SEQ ID NO: 27222 - RNA, 22 nt, Artificial Sequence
  Synthetic oligonucleotide: Ptpn6-6736
agggaaucagggaaggagagau

SEQ ID NO: 27223 - RNA, 23 nt, Artificial Sequence
  Synthetic oligonucleotide: Ptpn6-6737
gagggaaucagggaaggagagau

SEQ ID NO: 27224 - RNA, 24 nt, Artificial Sequence
  Synthetic oligonucleotide: Ptpn6-6738
agagggaaucagggaaggagagau

SEQ ID NO: 27225 - RNA, 18 nt, Artificial Sequence
  Synthetic oligonucleotide: Ptpn6-6739
ugaaugaugcaggggaaa

SEQ ID NO: 27226 - RNA, 19 nt, Artificial Sequence
  Synthetic oligonucleotide: Ptpn6-6740
augaaugaugcaggggaaa

SEQ ID NO: 27227 - RNA, 20 nt, Artificial Sequence
  Synthetic oligonucleotide: Ptpn6-1244
aaugaaugaugcaggggaaa

SEQ ID NO: 27228 - RNA, 21 nt, Artificial Sequence
  Synthetic oligonucleotide: Ptpn6-6741
gaaugaaugaugcaggggaaa

SEQ ID NO: 27229 - RNA, 22 nt, Artificial Sequence
  Synthetic oligonucleotide: Ptpn6-6742
ugaaugaaugaugcaggggaaa

SEQ ID NO: 27230 - RNA, 23 nt, Artificial Sequence
  Synthetic oligonucleotide: Ptpn6-6743
uugaaugaaugaugcaggggaaa

SEQ ID NO: 27231 - RNA, 24 nt, Artificial Sequence
  Synthetic oligonucleotide: Ptpn6-6744
guugaaugaaugaugcaggggaaa

SEQ ID NO: 27232 - RNA, 18 nt, Artificial Sequence
  Synthetic oligonucleotide: Ptpn6-6745
gaugcaggggaaagggaa

SEQ ID NO: 27233 - RNA, 19 nt, Artificial Sequence
  Synthetic oligonucleotide: Ptpn6-6746
ugaugcaggggaaagggaa

SEQ ID NO: 27234 - RNA, 20 nt, Artificial Sequence
  Synthetic oligonucleotide: Ptpn6-1791
augaugcaggggaaagggaa

SEQ ID NO: 27235 - RNA, 21 nt, Artificial Sequence
  Synthetic oligonucleotide: Ptpn6-6747
aaugaugcaggggaaagggaa

SEQ ID NO: 27236 - RNA, 22 nt, Artificial Sequence
  Synthetic oligonucleotide: Ptpn6-6748
gaaugaugcaggggaaagggaa

SEQ ID NO: 27237 - RNA, 23 nt, Artificial Sequence
  Synthetic oligonucleotide: Ptpn6-6749
ugaaugaugcaggggaaagggaa

SEQ ID NO: 27238 - RNA, 24 nt, Artificial Sequence
  Synthetic oligonucleotide: Ptpn6-6750
augaaugaugcaggggaaagggaa

SEQ ID NO: 27239 - RNA, 18 nt, Artificial Sequence
  Synthetic oligonucleotide: Ptpn6-6751
augaaugaugcaggggaa

SEQ ID NO: 27240 - RNA, 19 nt, Artificial Sequence
  Synthetic oligonucleotide: Ptpn6-6752
aaugaaugaugcaggggaa

SEQ ID NO: 27241 - RNA, 20 nt, Artificial Sequence
  Synthetic oligonucleotide: Ptpn6-1058
gaaugaaugaugcaggggaa

SEQ ID NO: 27242 - RNA, 21 nt, Artificial Sequence
  Synthetic oligonucleotide: Ptpn6-6753
ugaaugaaugaugcaggggaa

SEQ ID NO: 27243 - RNA, 22 nt, Artificial Sequence
  Synthetic oligonucleotide: Ptpn6-6754
uugaaugaaugaugcaggggaa

SEQ ID NO: 27244 - RNA, 23 nt, Artificial Sequence
  Synthetic oligonucleotide: Ptpn6-6755
guugaaugaaugaugcaggggaa

SEQ ID NO: 27245 - RNA, 24 nt, Artificial Sequence
  Synthetic oligonucleotide: Ptpn6-6756
uguugaaugaaugaugcaggggaa

SEQ ID NO: 27246 - RNA, 18 nt, Artificial Sequence
  Synthetic oligonucleotide: Ptpn6-6757
aggggaaagggaagugaa

SEQ ID NO: 27247 - RNA, 19 nt, Artificial Sequence
  Synthetic oligonucleotide: Ptpn6-6758
caggggaaagggaagugaa

SEQ ID NO: 27248 - RNA, 20 nt, Artificial Sequence
  Synthetic oligonucleotide: Ptpn6-1062
gcaggggaaagggaagugaa

SEQ ID NO: 27249 - RNA, 21 nt, Artificial Sequence
  Synthetic oligonucleotide: Ptpn6-6759
ugcaggggaaagggaagugaa

SEQ ID NO: 27250 - RNA, 22 nt, Artificial Sequence
  Synthetic oligonucleotide: Ptpn6-6760
augcaggggaaagggaagugaa

SEQ ID NO: 27251 - RNA, 23 nt, Artificial Sequence
  Synthetic oligonucleotide: Ptpn6-6761
gaugcaggggaaagggaagugaa

SEQ ID NO: 27252 - RNA, 24 nt, Artificial Sequence
  Synthetic oligonucleotide: Ptpn6-6762
ugaugcaggggaaagggaagugaa

SEQ ID NO: 27253 - RNA, 18 nt, Artificial Sequence
  Synthetic oligonucleotide: Ptpn6-6763
gggaagugaaaggaaaca

SEQ ID NO: 27254 - RNA, 19 nt, Artificial Sequence
  Synthetic oligonucleotide: Ptpn6-6764
agggaagugaaaggaaaca

SEQ ID NO: 27255 - RNA, 20 nt, Artificial Sequence
  Synthetic oligonucleotide: Ptpn6-1794
aagggaagugaaaggaaaca

SEQ ID NO: 27256 - RNA, 21 nt, Artificial Sequence
  Synthetic oligonucleotide: Ptpn6-6765
aaagggaagugaaaggaaaca

SEQ ID NO: 27257 - RNA, 22 nt, Artificial Sequence
  Synthetic oligonucleotide: Ptpn6-6766
gaaagggaagugaaaggaaaca

SEQ ID NO: 27258 - RNA, 23 nt, Artificial Sequence
  Synthetic oligonucleotide: Ptpn6-6767
ggaaagggaagugaaaggaaaca

SEQ ID NO: 27259 - RNA, 24 nt, Artificial Sequence
  Synthetic oligonucleotide: Ptpn6-6768
gggaaagggaagugaaaggaaaca

SEQ ID NO: 27260 - RNA, 18 nt, Artificial Sequence
  Synthetic oligonucleotide: Ptpn6-6769
ucuccauagcuggaacca

SEQ ID NO: 27261 - RNA, 19 nt, Artificial Sequence
  Synthetic oligonucleotide: Ptpn6-6770
cucuccauagcuggaacca

SEQ ID NO: 27262 - RNA, 20 nt, Artificial Sequence
  Synthetic oligonucleotide: Ptpn6-2194
ccucuccauagcuggaacca

SEQ ID NO: 27263 - RNA, 21 nt, Artificial Sequence
  Synthetic oligonucleotide: Ptpn6-6771
gccucuccauagcuggaacca

SEQ ID NO: 27264 - RNA, 22 nt, Artificial Sequence
  Synthetic oligonucleotide: Ptpn6-6772
agccucuccauagcuggaacca

SEQ ID NO: 27265 - RNA, 23 nt, Artificial Sequence
  Synthetic oligonucleotide: Ptpn6-6773
uagccucuccauagcuggaacca

SEQ ID NO: 27266 - RNA, 24 nt, Artificial Sequence
  Synthetic oligonucleotide: Ptpn6-6774
uuagccucuccauagcuggaacca

SEQ ID NO: 27267 - RNA, 18 nt, Artificial Sequence
  Synthetic oligonucleotide: Ptpn6-6775
ucggucuguaaccuccca

SEQ ID NO: 27268 - RNA, 19 nt, Artificial Sequence
  Synthetic oligonucleotide: Ptpn6-6776
uucggucuguaaccuccca

SEQ ID NO: 27269 - RNA, 20 nt, Artificial Sequence
  Synthetic oligonucleotide: Ptpn6-2204
guucggucuguaaccuccca

SEQ ID NO: 27270 - RNA, 21 nt, Artificial Sequence
  Synthetic oligonucleotide: Ptpn6-6777
uguucggucuguaaccuccca

SEQ ID NO: 27271 - RNA, 22 nt, Artificial Sequence
  Synthetic oligonucleotide: Ptpn6-6778
uuguucggucuguaaccuccca

SEQ ID NO: 27272 - RNA, 23 nt, Artificial Sequence
  Synthetic oligonucleotide: Ptpn6-6779
uuuguucggucuguaaccuccca

SEQ ID NO: 27273 - RNA, 24 nt, Artificial Sequence
  Synthetic oligonucleotide: Ptpn6-6780
auuuguucggucuguaaccuccca

SEQ ID NO: 27274 - RNA, 18 nt, Artificial Sequence
  Synthetic oligonucleotide: Ptpn6-6781
uguugaaugaaugaugca

SEQ ID NO: 27275 - RNA, 19 nt, Artificial Sequence
  Synthetic oligonucleotide: Ptpn6-6782
cuguugaaugaaugaugca

SEQ ID NO: 27276 - RNA, 20 nt, Artificial Sequence
  Synthetic oligonucleotide: Ptpn6-1250
ccuguugaaugaaugaugca

SEQ ID NO: 27277 - RNA, 21 nt, Artificial Sequence
  Synthetic oligonucleotide: Ptpn6-6783
accuguugaaugaaugaugca

SEQ ID NO: 27278 - RNA, 22 nt, Artificial Sequence
  Synthetic oligonucleotide: Ptpn6-6784
uaccuguugaaugaaugaugca

SEQ ID NO: 27279 - RNA, 23 nt, Artificial Sequence
  Synthetic oligonucleotide: Ptpn6-6785
guaccuguugaaugaaugaugca

SEQ ID NO: 27280 - RNA, 24 nt, Artificial Sequence
  Synthetic oligonucleotide: Ptpn6-6786
cguaccuguugaaugaaugaugca

SEQ ID NO: 27281 - RNA, 18 nt, Artificial Sequence
  Synthetic oligonucleotide: Ptpn6-6787
gaaaggaaacaaagaaga

SEQ ID NO: 27282 - RNA, 19 nt, Artificial Sequence
  Synthetic oligonucleotide: Ptpn6-6788
ugaaaggaaacaaagaaga

SEQ ID NO: 27283 - RNA, 20 nt, Artificial Sequence
  Synthetic oligonucleotide: Ptpn6-1061
gugaaaggaaacaaagaaga

SEQ ID NO: 27284 - RNA, 21 nt, Artificial Sequence
  Synthetic oligonucleotide: Ptpn6-6789
agugaaaggaaacaaagaaga

SEQ ID NO: 27285 - RNA, 22 nt, Artificial Sequence
  Synthetic oligonucleotide: Ptpn6-6790
aagugaaaggaaacaaagaaga

SEQ ID NO: 27286 - RNA, 23 nt, Artificial Sequence
  Synthetic oligonucleotide: Ptpn6-6791
gaagugaaaggaaacaaagaaga

SEQ ID NO: 27287 - RNA, 24 nt, Artificial Sequence
  Synthetic oligonucleotide: Ptpn6-6792
ggaagugaaaggaaacaaagaaga

SEQ ID NO: 27288 - RNA, 18 nt, Artificial Sequence
  Synthetic oligonucleotide: Ptpn6-6793
aaugaaugaugcagggga

SEQ ID NO: 27289 - RNA, 19 nt, Artificial Sequence
  Synthetic oligonucleotide: Ptpn6-6794
gaaugaaugaugcagggga

SEQ ID NO: 27290 - RNA, 20 nt, Artificial Sequence
  Synthetic oligonucleotide: Ptpn6-1788
ugaaugaaugaugcagggga

SEQ ID NO: 27291 - RNA, 21 nt, Artificial Sequence
  Synthetic oligonucleotide: Ptpn6-6795
uugaaugaaugaugcagggga

SEQ ID NO: 27292 - RNA, 22 nt, Artificial Sequence
  Synthetic oligonucleotide: Ptpn6-6796
guugaaugaaugaugcagggga

SEQ ID NO: 27293 - RNA, 23 nt, Artificial Sequence
  Synthetic oligonucleotide: Ptpn6-6797
uguugaaugaaugaugcagggga

SEQ ID NO: 27294 - RNA, 24 nt, Artificial Sequence
  Synthetic oligonucleotide: Ptpn6-6798
cuguugaaugaaugaugcagggga

SEQ ID NO: 27295 - RNA, 18 nt, Artificial Sequence
  Synthetic oligonucleotide: Ptpn6-6799
caggggaaagggaaguga

SEQ ID NO: 27296 - RNA, 19 nt, Artificial Sequence
  Synthetic oligonucleotide: Ptpn6-6800
gcaggggaaagggaaguga

SEQ ID NO: 27297 - RNA, 20 nt, Artificial Sequence
  Synthetic oligonucleotide: Ptpn6-1792
ugcaggggaaagggaaguga

SEQ ID NO: 27298 - RNA, 21 nt, Artificial Sequence
  Synthetic oligonucleotide: Ptpn6-6801
augcaggggaaagggaaguga

SEQ ID NO: 27299 - RNA, 22 nt, Artificial Sequence
  Synthetic oligonucleotide: Ptpn6-6802
gaugcaggggaaagggaaguga

SEQ ID NO: 27300 - RNA, 23 nt, Artificial Sequence
  Synthetic oligonucleotide: Ptpn6-6803
ugaugcaggggaaagggaaguga

SEQ ID NO: 27301 - RNA, 24 nt, Artificial Sequence
  Synthetic oligonucleotide: Ptpn6-6804
augaugcaggggaaagggaaguga

SEQ ID NO: 27302 - RNA, 18 nt, Artificial Sequence
  Synthetic oligonucleotide: Ptpn6-6805
cggagaaguuggcuggac

SEQ ID NO: 27303 - RNA, 19 nt, Artificial Sequence
  Synthetic oligonucleotide: Ptpn6-6806
gcggagaaguuggcuggac

SEQ ID NO: 27304 - RNA, 20 nt, Artificial Sequence
  Synthetic oligonucleotide: Ptpn6-1803
ugcggagaaguuggcuggac

SEQ ID NO: 27305 - RNA, 21 nt, Artificial Sequence
  Synthetic oligonucleotide: Ptpn6-6807
gugcggagaaguuggcuggac

SEQ ID NO: 27306 - RNA, 22 nt, Artificial Sequence
  Synthetic oligonucleotide: Ptpn6-6808
agugcggagaaguuggcuggac

SEQ ID NO: 27307 - RNA, 23 nt, Artificial Sequence
  Synthetic oligonucleotide: Ptpn6-6809
aagugcggagaaguuggcuggac

SEQ ID NO: 27308 - RNA, 24 nt, Artificial Sequence
  Synthetic oligonucleotide: Ptpn6-6810
gaagugcggagaaguuggcuggac

SEQ ID NO: 27309 - RNA, 18 nt, Artificial Sequence
  Synthetic oligonucleotide: Ptpn6-6811
cacuggaauguaagcucc

SEQ ID NO: 27310 - RNA, 19 nt, Artificial Sequence
  Synthetic oligonucleotide: Ptpn6-6812
ccacuggaauguaagcucc

SEQ ID NO: 27311 - RNA, 20 nt, Artificial Sequence
  Synthetic oligonucleotide: Ptpn6-2206
cccacuggaauguaagcucc

SEQ ID NO: 27312 - RNA, 21 nt, Artificial Sequence
  Synthetic oligonucleotide: Ptpn6-6813
ucccacuggaauguaagcucc

SEQ ID NO: 27313 - RNA, 22 nt, Artificial Sequence
  Synthetic oligonucleotide: Ptpn6-6814
cucccacuggaauguaagcucc

SEQ ID NO: 27314 - RNA, 23 nt, Artificial Sequence
  Synthetic oligonucleotide: Ptpn6-6815
ccucccacuggaauguaagcucc

SEQ ID NO: 27315 - RNA, 24 nt, Artificial Sequence
  Synthetic oligonucleotide: Ptpn6-6816
accucccacuggaauguaagcucc

SEQ ID NO: 27316 - RNA, 18 nt, Artificial Sequence
  Synthetic oligonucleotide: Ptpn6-6817
ccuuagccucuccauagc

SEQ ID NO: 27317 - RNA, 19 nt, Artificial Sequence
  Synthetic oligonucleotide: Ptpn6-6818
accuuagccucuccauagc

SEQ ID NO: 27318 - RNA, 20 nt, Artificial Sequence
  Synthetic oligonucleotide: Ptpn6-1563
caccuuagccucuccauagc

SEQ ID NO: 27319 - RNA, 18 nt, Artificial Sequence
  Synthetic oligonucleotide: Ptpn6-6819
cuguugaaugaaugaugc

SEQ ID NO: 27320 - RNA, 19 nt, Artificial Sequence
  Synthetic oligonucleotide: Ptpn6-6820
ccuguugaaugaaugaugc

SEQ ID NO: 27321 - RNA, 20 nt, Artificial Sequence
  Synthetic oligonucleotide: Ptpn6-1249
accuguugaaugaaugaugc

SEQ ID NO: 27322 - RNA, 21 nt, Artificial Sequence
  Synthetic oligonucleotide: Ptpn6-6821
uaccuguugaaugaaugaugc

SEQ ID NO: 27323 - RNA, 22 nt, Artificial Sequence
  Synthetic oligonucleotide: Ptpn6-6822
guaccuguugaaugaaugaugc

SEQ ID NO: 27324 - RNA, 23 nt, Artificial Sequence
  Synthetic oligonucleotide: Ptpn6-6823
cguaccuguugaaugaaugaugc

SEQ ID NO: 27325 - RNA, 24 nt, Artificial Sequence
  Synthetic oligonucleotide: Ptpn6-6824
acguaccuguugaaugaaugaugc

SEQ ID NO: 27326 - RNA, 18 nt, Artificial Sequence
  Synthetic oligonucleotide: Ptpn6-6825
caggcuggucucaaacuc

SEQ ID NO: 27327 - RNA, 19 nt, Artificial Sequence
  Synthetic oligonucleotide: Ptpn6-6826
ccaggcuggucucaaacuc

SEQ ID NO: 27328 - RNA, 20 nt, Artificial Sequence
  Synthetic oligonucleotide: Ptpn6-2197
gccaggcuggucucaaacuc

SEQ ID NO: 27329 - RNA, 21 nt, Artificial Sequence
  Synthetic oligonucleotide: Ptpn6-6827
ggccaggcuggucucaaacuc

SEQ ID NO: 27330 - RNA, 22 nt, Artificial Sequence
  Synthetic oligonucleotide: Ptpn6-6828
uggccaggcuggucucaaacuc

SEQ ID NO: 27331 - RNA, 23 nt, Artificial Sequence
  Synthetic oligonucleotide: Ptpn6-6829
uuggccaggcuggucucaaacuc

SEQ ID NO: 27332 - RNA, 24 nt, Artificial Sequence
  Synthetic oligonucleotide: Ptpn6-6830
auuggccaggcuggucucaaacuc

SEQ ID NO: 27333 - RNA, 18 nt, Artificial Sequence
  Synthetic oligonucleotide: Ptpn6-6831
ugaaaggaaacaaagaag

SEQ ID NO: 27334 - RNA, 19 nt, Artificial Sequence
  Synthetic oligonucleotide: Ptpn6-6832
gugaaaggaaacaaagaag

SEQ ID NO: 27335 - RNA, 20 nt, Artificial Sequence
  Synthetic oligonucleotide: Ptpn6-1795
agugaaaggaaacaaagaag

SEQ ID NO: 27336 - RNA, 21 nt, Artificial Sequence
  Synthetic oligonucleotide: Ptpn6-6833
aagugaaaggaaacaaagaag

SEQ ID NO: 27337 - RNA, 22 nt, Artificial Sequence
  Synthetic oligonucleotide: Ptpn6-6834
gaagugaaaggaaacaaagaag

SEQ ID NO: 27338 - RNA, 23 nt, Artificial Sequence
  Synthetic oligonucleotide: Ptpn6-6835
ggaagugaaaggaaacaaagaag

SEQ ID NO: 27339 - RNA, 24 nt, Artificial Sequence
  Synthetic oligonucleotide: Ptpn6-6836
gggaagugaaaggaaacaaagaag

SEQ ID NO: 27340 - RNA, 18 nt, Artificial Sequence
  Synthetic oligonucleotide: Ptpn6-6837
guugaaugaaugaugcag

SEQ ID NO: 27341 - RNA, 19 nt, Artificial Sequence
  Synthetic oligonucleotide: Ptpn6-6838
uguugaaugaaugaugcag

SEQ ID NO: 27342 - RNA, 20 nt, Artificial Sequence
  Synthetic oligonucleotide: Ptpn6-1241
cuguugaaugaaugaugcag

SEQ ID NO: 27343 - RNA, 21 nt, Artificial Sequence
  Synthetic oligonucleotide: Ptpn6-6839
ccuguugaaugaaugaugcag

SEQ ID NO: 27344 - RNA, 22 nt, Artificial Sequence
  Synthetic oligonucleotide: Ptpn6-6840
accuguugaaugaaugaugcag

SEQ ID NO: 27345 - RNA, 23 nt, Artificial Sequence
  Synthetic oligonucleotide: Ptpn6-6841
uaccuguugaaugaaugaugcag

SEQ ID NO: 27346 - RNA, 24 nt, Artificial Sequence
  Synthetic oligonucleotide: Ptpn6-6842
guaccuguugaaugaaugaugcag

SEQ ID NO: 27347 - RNA, 18 nt, Artificial Sequence
  Synthetic oligonucleotide: Ptpn6-6843
auguaagcuccgugagag

SEQ ID NO: 27348 - RNA, 19 nt, Artificial Sequence
  Synthetic oligonucleotide: Ptpn6-6844
aauguaagcuccgugagag

SEQ ID NO: 27349 - RNA, 20 nt, Artificial Sequence
  Synthetic oligonucleotide: Ptpn6-2208
gaauguaagcuccgugagag

SEQ ID NO: 27350 - RNA, 21 nt, Artificial Sequence
  Synthetic oligonucleotide: Ptpn6-6845
ggaauguaagcuccgugagag

SEQ ID NO: 27351 - RNA, 22 nt, Artificial Sequence
  Synthetic oligonucleotide: Ptpn6-6846
uggaauguaagcuccgugagag

SEQ ID NO: 27352 - RNA, 23 nt, Artificial Sequence
  Synthetic oligonucleotide: Ptpn6-6847
cuggaauguaagcuccgugagag

SEQ ID NO: 27353 - RNA, 24 nt, Artificial Sequence
  Synthetic oligonucleotide: Ptpn6-6848
acuggaauguaagcuccgugagag

SEQ ID NO: 27354 - RNA, 18 nt, Artificial Sequence
  Synthetic oligonucleotide: Ptpn6-6849
accuuagccucuccauag

SEQ ID NO: 27355 - RNA, 19 nt, Artificial Sequence
  Synthetic oligonucleotide: Ptpn6-6850
caccuuagccucuccauag

SEQ ID NO: 27356 - RNA, 20 nt, Artificial Sequence
  Synthetic oligonucleotide: Ptpn6-2192
ucaccuuagccucuccauag

SEQ ID NO: 27357 - RNA, 18 nt, Artificial Sequence
  Synthetic oligonucleotide: Ptpn6-6851
ggagaaguuggcuggacg

SEQ ID NO: 27358 - RNA, 19 nt, Artificial Sequence
  Synthetic oligonucleotide: Ptpn6-6852
cggagaaguuggcuggacg

SEQ ID NO: 27359 - RNA, 20 nt, Artificial Sequence
  Synthetic oligonucleotide: Ptpn6-1030
gcggagaaguuggcuggacg

SEQ ID NO: 27360 - RNA, 21 nt, Artificial Sequence
  Synthetic oligonucleotide: Ptpn6-6853
ugcggagaaguuggcuggacg

SEQ ID NO: 27361 - RNA, 22 nt, Artificial Sequence
  Synthetic oligonucleotide: Ptpn6-6854
gugcggagaaguuggcuggacg

SEQ ID NO: 27362 - RNA, 23 nt, Artificial Sequence
  Synthetic oligonucleotide: Ptpn6-6855
agugcggagaaguuggcuggacg

SEQ ID NO: 27363 - RNA, 24 nt, Artificial Sequence
  Synthetic oligonucleotide: Ptpn6-6856
aagugcggagaaguuggcuggacg

SEQ ID NO: 27364 - RNA, 18 nt, Artificial Sequence
  Synthetic oligonucleotide: Ptpn6-6857
cugauguugggaagugcg

SEQ ID NO: 27365 - RNA, 19 nt, Artificial Sequence
  Synthetic oligonucleotide: Ptpn6-6858
ucugauguugggaagugcg

SEQ ID NO: 27366 - RNA, 20 nt, Artificial Sequence
  Synthetic oligonucleotide: Ptpn6-1801
gucugauguugggaagugcg

SEQ ID NO: 27367 - RNA, 21 nt, Artificial Sequence
  Synthetic oligonucleotide: Ptpn6-6859
agucugauguugggaagugcg

SEQ ID NO: 27368 - RNA, 22 nt, Artificial Sequence
  Synthetic oligonucleotide: Ptpn6-6860
aagucugauguugggaagugcg

SEQ ID NO: 27369 - RNA, 23 nt, Artificial Sequence
  Synthetic oligonucleotide: Ptpn6-6861
aaagucugauguugggaagugcg

SEQ ID NO: 27370 - RNA, 24 nt, Artificial Sequence
  Synthetic oligonucleotide: Ptpn6-6862
caaagucugauguugggaagugcg

SEQ ID NO: 27371 - RNA, 18 nt, Artificial Sequence
  Synthetic oligonucleotide: Ptpn6-6863
gaaguuggcuggacgugg

SEQ ID NO: 27372 - RNA, 19 nt, Artificial Sequence
  Synthetic oligonucleotide: Ptpn6-6864
agaaguuggcuggacgugg

SEQ ID NO: 27373 - RNA, 20 nt, Artificial Sequence
  Synthetic oligonucleotide: Ptpn6-1779
gagaaguuggcuggacgugg

SEQ ID NO: 27374 - RNA, 21 nt, Artificial Sequence
  Synthetic oligonucleotide: Ptpn6-6865
ggagaaguuggcuggacgugg

SEQ ID NO: 27375 - RNA, 22 nt, Artificial Sequence
  Synthetic oligonucleotide: Ptpn6-6866
cggagaaguuggcuggacgugg

SEQ ID NO: 27376 - RNA, 23 nt, Artificial Sequence
  Synthetic oligonucleotide: Ptpn6-6867
gcggagaaguuggcuggacgugg

SEQ ID NO: 27377 - RNA, 24 nt, Artificial Sequence
  Synthetic oligonucleotide: Ptpn6-6868
ugcggagaaguuggcuggacgugg

SEQ ID NO: 27378 - RNA, 18 nt, Artificial Sequence
  Synthetic oligonucleotide: Ptpn6-6869
gaagugcggagaaguugg

SEQ ID NO: 27379 - RNA, 19 nt, Artificial Sequence
  Synthetic oligonucleotide: Ptpn6-6870
ggaagugcggagaaguugg

SEQ ID NO: 27380 - RNA, 20 nt, Artificial Sequence
  Synthetic oligonucleotide: Ptpn6-1802
gggaagugcggagaaguugg

SEQ ID NO: 27381 - RNA, 21 nt, Artificial Sequence
  Synthetic oligonucleotide: Ptpn6-6871
ugggaagugcggagaaguugg

SEQ ID NO: 27382 - RNA, 22 nt, Artificial Sequence
  Synthetic oligonucleotide: Ptpn6-6872
uugggaagugcggagaaguugg

SEQ ID NO: 27383 - RNA, 23 nt, Artificial Sequence
  Synthetic oligonucleotide: Ptpn6-6873
guugggaagugcggagaaguugg

SEQ ID NO: 27384 - RNA, 24 nt, Artificial Sequence
  Synthetic oligonucleotide: Ptpn6-6874
uguugggaagugcggagaaguugg

SEQ ID NO: 27385 - RNA, 18 nt, Artificial Sequence
  Synthetic oligonucleotide: Ptpn6-6875
ccuguugaaugaaugaug

SEQ ID NO: 27386 - RNA, 19 nt, Artificial Sequence
  Synthetic oligonucleotide: Ptpn6-6876
accuguugaaugaaugaug

SEQ ID NO: 27387 - RNA, 20 nt, Artificial Sequence
  Synthetic oligonucleotide: Ptpn6-1781
uaccuguugaaugaaugaug

SEQ ID NO: 27388 - RNA, 21 nt, Artificial Sequence
  Synthetic oligonucleotide: Ptpn6-6877
guaccuguugaaugaaugaug

SEQ ID NO: 27389 - RNA, 22 nt, Artificial Sequence
  Synthetic oligonucleotide: Ptpn6-6878
cguaccuguugaaugaaugaug

SEQ ID NO: 27390 - RNA, 23 nt, Artificial Sequence
  Synthetic oligonucleotide: Ptpn6-6879
acguaccuguugaaugaaugaug

SEQ ID NO: 27391 - RNA, 24 nt, Artificial Sequence
  Synthetic oligonucleotide: Ptpn6-6880
cacguaccuguugaaugaaugaug

SEQ ID NO: 27392 - RNA, 18 nt, Artificial Sequence
  Synthetic oligonucleotide: Ptpn6-6881
ugggaccaaagucugaug

SEQ ID NO: 27393 - RNA, 19 nt, Artificial Sequence
  Synthetic oligonucleotide: Ptpn6-6882
augggaccaaagucugaug

SEQ ID NO: 27394 - RNA, 20 nt, Artificial Sequence
  Synthetic oligonucleotide: Ptpn6-1797
gaugggaccaaagucugaug

SEQ ID NO: 27395 - RNA, 21 nt, Artificial Sequence
  Synthetic oligonucleotide: Ptpn6-6883
agaugggaccaaagucugaug

SEQ ID NO: 27396 - RNA, 22 nt, Artificial Sequence
  Synthetic oligonucleotide: Ptpn6-6884
aagaugggaccaaagucugaug

SEQ ID NO: 27397 - RNA, 23 nt, Artificial Sequence
  Synthetic oligonucleotide: Ptpn6-6885
gaagaugggaccaaagucugaug

SEQ ID NO: 27398 - RNA, 24 nt, Artificial Sequence
  Synthetic oligonucleotide: Ptpn6-6886
agaagaugggaccaaagucugaug

SEQ ID NO: 27399 - RNA, 18 nt, Artificial Sequence
  Synthetic oligonucleotide: Ptpn6-6887
gucugauguugggaagug

SEQ ID NO: 27400 - RNA, 19 nt, Artificial Sequence
  Synthetic oligonucleotide: Ptpn6-6888
agucugauguugggaagug

SEQ ID NO: 27401 - RNA, 20 nt, Artificial Sequence
  Synthetic oligonucleotide: Ptpn6-1213
aagucugauguugggaagug

SEQ ID NO: 27402 - RNA, 21 nt, Artificial Sequence
  Synthetic oligonucleotide: Ptpn6-6889
aaagucugauguugggaagug

SEQ ID NO: 27403 - RNA, 22 nt, Artificial Sequence
  Synthetic oligonucleotide: Ptpn6-6890
caaagucugauguugggaagug

SEQ ID NO: 27404 - RNA, 23 nt, Artificial Sequence
  Synthetic oligonucleotide: Ptpn6-6891
ccaaagucugauguugggaagug

SEQ ID NO: 27405 - RNA, 24 nt, Artificial Sequence
  Synthetic oligonucleotide: Ptpn6-6892
accaaagucugauguugggaagug

SEQ ID NO: 27406 - RNA, 18 nt, Artificial Sequence
  Synthetic oligonucleotide: Ptpn6-6893
ccucagccucccacagug

SEQ ID NO: 27407 - RNA, 19 nt, Artificial Sequence
  Synthetic oligonucleotide: Ptpn6-6894
gccucagccucccacagug

SEQ ID NO: 27408 - RNA, 20 nt, Artificial Sequence
  Synthetic oligonucleotide: Ptpn6-2198
cgccucagccucccacagug

SEQ ID NO: 27409 - RNA, 21 nt, Artificial Sequence
  Synthetic oligonucleotide: Ptpn6-6895
ucgccucagccucccacagug

SEQ ID NO: 27410 - RNA, 22 nt, Artificial Sequence
  Synthetic oligonucleotide: Ptpn6-6896
cucgccucagccucccacagug

SEQ ID NO: 27411 - RNA, 23 nt, Artificial Sequence
  Synthetic oligonucleotide: Ptpn6-6897
ucucgccucagccucccacagug

SEQ ID NO: 27412 - RNA, 24 nt, Artificial Sequence
  Synthetic oligonucleotide: Ptpn6-6898
cucucgccucagccucccacagug

SEQ ID NO: 27413 - RNA, 18 nt, Artificial Sequence
  Synthetic oligonucleotide: Ptpn6-6899
cuaauuucuuauuuuuug

SEQ ID NO: 27414 - RNA, 19 nt, Artificial Sequence
  Synthetic oligonucleotide: Ptpn6-6900
gcuaauuucuuauuuuuug

SEQ ID NO: 27415 - RNA, 20 nt, Artificial Sequence
  Synthetic oligonucleotide: Ptpn6-2195
agcuaauuucuuauuuuuug

SEQ ID NO: 27416 - RNA, 21 nt, Artificial Sequence
  Synthetic oligonucleotide: Ptpn6-6901
cagcuaauuucuuauuuuuug

SEQ ID NO: 27417 - RNA, 22 nt, Artificial Sequence
  Synthetic oligonucleotide: Ptpn6-6902
ccagcuaauuucuuauuuuuug

SEQ ID NO: 27418 - RNA, 23 nt, Artificial Sequence
  Synthetic oligonucleotide: Ptpn6-6903
cccagcuaauuucuuauuuuuug

SEQ ID NO: 27419 - RNA, 24 nt, Artificial Sequence
  Synthetic oligonucleotide: Ptpn6-6904
acccagcuaauuucuuauuuuuug

SEQ ID NO: 27420 - RNA, 18 nt, Artificial Sequence
  Synthetic oligonucleotide: Ptpn6-6905
agucugauguugggaagu

SEQ ID NO: 27421 - RNA, 19 nt, Artificial Sequence
  Synthetic oligonucleotide: Ptpn6-6906
aagucugauguugggaagu

SEQ ID NO: 27422 - RNA, 20 nt, Artificial Sequence
  Synthetic oligonucleotide: Ptpn6-1778
aaagucugauguugggaagu

SEQ ID NO: 27423 - RNA, 21 nt, Artificial Sequence
  Synthetic oligonucleotide: Ptpn6-6907
caaagucugauguugggaagu

SEQ ID NO: 27424 - RNA, 22 nt, Artificial Sequence
  Synthetic oligonucleotide: Ptpn6-6908
ccaaagucugauguugggaagu

SEQ ID NO: 27425 - RNA, 23 nt, Artificial Sequence
  Synthetic oligonucleotide: Ptpn6-6909
accaaagucugauguugggaagu

SEQ ID NO: 27426 - RNA, 24 nt, Artificial Sequence
  Synthetic oligonucleotide: Ptpn6-6910
gaccaaagucugauguugggaagu

SEQ ID NO: 27427 - RNA, 18 nt, Artificial Sequence
  Synthetic oligonucleotide: Ptpn6-6911
gagaaguuggcuggacgu

SEQ ID NO: 27428 - RNA, 19 nt, Artificial Sequence
  Synthetic oligonucleotide: Ptpn6-6912
ggagaaguuggcuggacgu

SEQ ID NO: 27429 - RNA, 20 nt, Artificial Sequence
  Synthetic oligonucleotide: Ptpn6-1214
cggagaaguuggcuggacgu

SEQ ID NO: 27430 - RNA, 21 nt, Artificial Sequence
  Synthetic oligonucleotide: Ptpn6-6913
gcggagaaguuggcuggacgu

SEQ ID NO: 27431 - RNA, 22 nt, Artificial Sequence
  Synthetic oligonucleotide: Ptpn6-6914
ugcggagaaguuggcuggacgu

SEQ ID NO: 27432 - RNA, 23 nt, Artificial Sequence
  Synthetic oligonucleotide: Ptpn6-6915
gugcggagaaguuggcuggacgu

SEQ ID NO: 27433 - RNA, 24 nt, Artificial Sequence
  Synthetic oligonucleotide: Ptpn6-6916
agugcggagaaguuggcuggacgu

SEQ ID NO: 27434 - RNA, 18 nt, Artificial Sequence
  Synthetic oligonucleotide: Ptpn6-6917
cuggaauguaagcuccgu

SEQ ID NO: 27435 - RNA, 19 nt, Artificial Sequence
  Synthetic oligonucleotide: Ptpn6-6918
acuggaauguaagcuccgu

SEQ ID NO: 27436 - RNA, 20 nt, Artificial Sequence
  Synthetic oligonucleotide: Ptpn6-2207
cacuggaauguaagcuccgu

SEQ ID NO: 27437 - RNA, 21 nt, Artificial Sequence
  Synthetic oligonucleotide: Ptpn6-6919
ccacuggaauguaagcuccgu

SEQ ID NO: 27438 - RNA, 22 nt, Artificial Sequence
  Synthetic oligonucleotide: Ptpn6-6920
cccacuggaauguaagcuccgu

SEQ ID NO: 27439 - RNA, 23 nt, Artificial Sequence
  Synthetic oligonucleotide: Ptpn6-6921
ucccacuggaauguaagcuccgu

SEQ ID NO: 27440 - RNA, 24 nt, Artificial Sequence
  Synthetic oligonucleotide: Ptpn6-6922
cucccacuggaauguaagcuccgu

SEQ ID NO: 27441 - RNA, 18 nt, Artificial Sequence
  Synthetic oligonucleotide: Ptpn6-6923
agugcugggaucacaggu

SEQ ID NO: 27442 - RNA, 19 nt, Artificial Sequence
  Synthetic oligonucleotide: Ptpn6-6924
cagugcugggaucacaggu

SEQ ID NO: 27443 - RNA, 20 nt, Artificial Sequence
  Synthetic oligonucleotide: Ptpn6-2200
acagugcugggaucacaggu

SEQ ID NO: 27444 - RNA, 21 nt, Artificial Sequence
  Synthetic oligonucleotide: Ptpn6-6925
cacagugcugggaucacaggu

SEQ ID NO: 27445 - RNA, 22 nt, Artificial Sequence
  Synthetic oligonucleotide: Ptpn6-6926
ccacagugcugggaucacaggu

SEQ ID NO: 27446 - RNA, 23 nt, Artificial Sequence
  Synthetic oligonucleotide: Ptpn6-6927
cccacagugcugggaucacaggu

SEQ ID NO: 27447 - RNA, 24 nt, Artificial Sequence
  Synthetic oligonucleotide: Ptpn6-6928
ucccacagugcugggaucacaggu

SEQ ID NO: 27448 - RNA, 18 nt, Artificial Sequence
  Synthetic oligonucleotide: Ptpn6-6929
gggaccaaagucugaugu

SEQ ID NO: 27449 - RNA, 19 nt, Artificial Sequence
  Synthetic oligonucleotide: Ptpn6-6930
ugggaccaaagucugaugu

SEQ ID NO: 27450 - RNA, 20 nt, Artificial Sequence
  Synthetic oligonucleotide: Ptpn6-983
augggaccaaagucugaugu

SEQ ID NO: 27451 - RNA, 21 nt, Artificial Sequence
  Synthetic oligonucleotide: Ptpn6-6931
gaugggaccaaagucugaugu

SEQ ID NO: 27452 - RNA, 22 nt, Artificial Sequence
  Synthetic oligonucleotide: Ptpn6-6932
agaugggaccaaagucugaugu

SEQ ID NO: 27453 - RNA, 23 nt, Artificial Sequence
  Synthetic oligonucleotide: Ptpn6-6933
aagaugggaccaaagucugaugu

SEQ ID NO: 27454 - RNA, 24 nt, Artificial Sequence
  Synthetic oligonucleotide: Ptpn6-6934
gaagaugggaccaaagucugaugu

SEQ ID NO: 27455 - RNA, 18 nt, Artificial Sequence
  Synthetic oligonucleotide: Ptpn6-6935
auuuucugcguaauacuu

SEQ ID NO: 27456 - RNA, 19 nt, Artificial Sequence
  Synthetic oligonucleotide: Ptpn6-6936
uauuuucugcguaauacuu

SEQ ID NO: 27457 - RNA, 20 nt, Artificial Sequence
  Synthetic oligonucleotide: Ptpn6-2201
cuauuuucugcguaauacuu

SEQ ID NO: 27458 - RNA, 21 nt, Artificial Sequence
  Synthetic oligonucleotide: Ptpn6-6937
ucuauuuucugcguaauacuu

SEQ ID NO: 27459 - RNA, 22 nt, Artificial Sequence
  Synthetic oligonucleotide: Ptpn6-6938
gucuauuuucugcguaauacuu

SEQ ID NO: 27460 - RNA, 23 nt, Artificial Sequence
  Synthetic oligonucleotide: Ptpn6-6939
ugucuauuuucugcguaauacuu

SEQ ID NO: 27461 - RNA, 24 nt, Artificial Sequence
  Synthetic oligonucleotide: Ptpn6-6940
cugucuauuuucugcguaauacuu

SEQ ID NO: 27462 - RNA, 18 nt, Artificial Sequence
  Synthetic oligonucleotide: Ptpn6-6941
ggaccaaagucugauguu

SEQ ID NO: 27463 - RNA, 19 nt, Artificial Sequence
  Synthetic oligonucleotide: Ptpn6-6942
gggaccaaagucugauguu

SEQ ID NO: 27464 - RNA, 20 nt, Artificial Sequence
  Synthetic oligonucleotide: Ptpn6-979
ugggaccaaagucugauguu

SEQ ID NO: 27465 - RNA, 21 nt, Artificial Sequence
  Synthetic oligonucleotide: Ptpn6-6943
augggaccaaagucugauguu

SEQ ID NO: 27466 - RNA, 22 nt, Artificial Sequence
  Synthetic oligonucleotide: Ptpn6-6944
gaugggaccaaagucugauguu

SEQ ID NO: 27467 - RNA, 23 nt, Artificial Sequence
  Synthetic oligonucleotide: Ptpn6-6945
agaugggaccaaagucugauguu

SEQ ID NO: 27468 - RNA, 24 nt, Artificial Sequence
  Synthetic oligonucleotide: Ptpn6-6946
aagaugggaccaaagucugauguu

SEQ ID NO: 27469 - RNA, 18 nt, Artificial Sequence
  Synthetic oligonucleotide: Ptpn6-6947
cacggagcuuacauucca

SEQ ID NO: 27470 - RNA, 19 nt, Artificial Sequence
  Synthetic oligonucleotide: Ptpn6-6948
ucacggagcuuacauucca

SEQ ID NO: 27471 - RNA, 20 nt, Artificial Sequence
  Synthetic oligonucleotide: Ptpn6-2102
cucacggagcuuacauucca

SEQ ID NO: 27472 - RNA, 21 nt, Artificial Sequence
  Synthetic oligonucleotide: Ptpn6-6949
ucucacggagcuuacauucca

SEQ ID NO: 27473 - RNA, 22 nt, Artificial Sequence
  Synthetic oligonucleotide: Ptpn6-6950
cucucacggagcuuacauucca

SEQ ID NO: 27474 - RNA, 23 nt, Artificial Sequence
  Synthetic oligonucleotide: Ptpn6-6951
gcucucacggagcuuacauucca

SEQ ID NO: 27475 - RNA, 24 nt, Artificial Sequence
  Synthetic oligonucleotide: Ptpn6-6952
ugcucucacggagcuuacauucca

SEQ ID NO: 27476 - RNA, 18 nt, Artificial Sequence
  Synthetic oligonucleotide: Ptpn6-6953
gaaaggcagagggaauca

SEQ ID NO: 27477 - RNA, 19 nt, Artificial Sequence
  Synthetic oligonucleotide: Ptpn6-6954
ggaaaggcagagggaauca

SEQ ID NO: 27478 - RNA, 20 nt, Artificial Sequence
  Synthetic oligonucleotide: Ptpn6-1546
uggaaaggcagagggaauca

SEQ ID NO: 27479 - RNA, 21 nt, Artificial Sequence
  Synthetic oligonucleotide: Ptpn6-6955
cuggaaaggcagagggaauca

SEQ ID NO: 27480 - RNA, 22 nt, Artificial Sequence
  Synthetic oligonucleotide: Ptpn6-6956
ccuggaaaggcagagggaauca

SEQ ID NO: 27481 - RNA, 23 nt, Artificial Sequence
  Synthetic oligonucleotide: Ptpn6-6957
gccuggaaaggcagagggaauca

SEQ ID NO: 27482 - RNA, 24 nt, Artificial Sequence
  Synthetic oligonucleotide: Ptpn6-6958
ggccuggaaaggcagagggaauca

SEQ ID NO: 27483 - RNA, 18 nt, Artificial Sequence
  Synthetic oligonucleotide: Ptpn6-6959
acauggucucugcucuca

SEQ ID NO: 27484 - RNA, 19 nt, Artificial Sequence
  Synthetic oligonucleotide: Ptpn6-6960
gacauggucucugcucuca

SEQ ID NO: 27485 - RNA, 20 nt, Artificial Sequence
  Synthetic oligonucleotide: Ptpn6-1414
agacauggucucugcucuca

SEQ ID NO: 27486 - RNA, 21 nt, Artificial Sequence
  Synthetic oligonucleotide: Ptpn6-6961
cagacauggucucugcucuca

SEQ ID NO: 27487 - RNA, 22 nt, Artificial Sequence
  Synthetic oligonucleotide: Ptpn6-6962
acagacauggucucugcucuca

SEQ ID NO: 27488 - RNA, 23 nt, Artificial Sequence
  Synthetic oligonucleotide: Ptpn6-6963
gacagacauggucucugcucuca

SEQ ID NO: 27489 - RNA, 24 nt, Artificial Sequence
  Synthetic oligonucleotide: Ptpn6-6964
agacagacauggucucugcucuca

SEQ ID NO: 27490 - RNA, 18 nt, Artificial Sequence
  Synthetic oligonucleotide: Ptpn6-6965
ccagugggagguuacaga

SEQ ID NO: 27491 - RNA, 19 nt, Artificial Sequence
  Synthetic oligonucleotide: Ptpn6-6966
uccagugggagguuacaga

SEQ ID NO: 27492 - RNA, 20 nt, Artificial Sequence
  Synthetic oligonucleotide: Ptpn6-2105
uuccagugggagguuacaga

SEQ ID NO: 27493 - RNA, 21 nt, Artificial Sequence
  Synthetic oligonucleotide: Ptpn6-6967
auuccagugggagguuacaga

SEQ ID NO: 27494 - RNA, 22 nt, Artificial Sequence
  Synthetic oligonucleotide: Ptpn6-6968
cauuccagugggagguuacaga

SEQ ID NO: 27495 - RNA, 23 nt, Artificial Sequence
  Synthetic oligonucleotide: Ptpn6-6969
acauuccagugggagguuacaga

SEQ ID NO: 27496 - RNA, 24 nt, Artificial Sequence
  Synthetic oligonucleotide: Ptpn6-6970
uacauuccagugggagguuacaga

SEQ ID NO: 27497 - RNA, 18 nt, Artificial Sequence
  Synthetic oligonucleotide: Ptpn6-6971
gaaucagggaaggagaga

SEQ ID NO: 27498 - RNA, 19 nt, Artificial Sequence
  Synthetic oligonucleotide: Ptpn6-6972
ggaaucagggaaggagaga

SEQ ID NO: 27499 - RNA, 20 nt, Artificial Sequence
  Synthetic oligonucleotide: Ptpn6-1548
gggaaucagggaaggagaga

SEQ ID NO: 27500 - RNA, 21 nt, Artificial Sequence
  Synthetic oligonucleotide: Ptpn6-6973
agggaaucagggaaggagaga

SEQ ID NO: 27501 - RNA, 22 nt, Artificial Sequence
  Synthetic oligonucleotide: Ptpn6-6974
gagggaaucagggaaggagaga

SEQ ID NO: 27502 - RNA, 23 nt, Artificial Sequence
  Synthetic oligonucleotide: Ptpn6-6975
agagggaaucagggaaggagaga

SEQ ID NO: 27503 - RNA, 24 nt, Artificial Sequence
  Synthetic oligonucleotide: Ptpn6-6976
cagagggaaucagggaaggagaga

SEQ ID NO: 27504 - RNA, 18 nt, Artificial Sequence
  Synthetic oligonucleotide: Ptpn6-6977
ggcagagggaaucaggga

SEQ ID NO: 27505 - RNA, 19 nt, Artificial Sequence
  Synthetic oligonucleotide: Ptpn6-6978
aggcagagggaaucaggga

SEQ ID NO: 27506 - RNA, 20 nt, Artificial Sequence
  Synthetic oligonucleotide: Ptpn6-1547
aaggcagagggaaucaggga

SEQ ID NO: 27507 - RNA, 21 nt, Artificial Sequence
  Synthetic oligonucleotide: Ptpn6-6979
aaaggcagagggaaucaggga

SEQ ID NO: 27508 - RNA, 22 nt, Artificial Sequence
  Synthetic oligonucleotide: Ptpn6-6980
gaaaggcagagggaaucaggga

SEQ ID NO: 27509 - RNA, 23 nt, Artificial Sequence
  Synthetic oligonucleotide: Ptpn6-6981
ggaaaggcagagggaaucaggga

SEQ ID NO: 27510 - RNA, 24 nt, Artificial Sequence
  Synthetic oligonucleotide: Ptpn6-6982
uggaaaggcagagggaaucaggga

SEQ ID NO: 27511 - RNA, 18 nt, Artificial Sequence
  Synthetic oligonucleotide: Ptpn6-6983
gaugcugguaauacugga

SEQ ID NO: 27512 - RNA, 19 nt, Artificial Sequence
  Synthetic oligonucleotide: Ptpn6-6984
agaugcugguaauacugga

SEQ ID NO: 27513 - RNA, 20 nt, Artificial Sequence
  Synthetic oligonucleotide: Ptpn6-2099
aagaugcugguaauacugga

SEQ ID NO: 27514 - RNA, 21 nt, Artificial Sequence
  Synthetic oligonucleotide: Ptpn6-6985
uaagaugcugguaauacugga

SEQ ID NO: 27515 - RNA, 22 nt, Artificial Sequence
  Synthetic oligonucleotide: Ptpn6-6986
uuaagaugcugguaauacugga

SEQ ID NO: 27516 - RNA, 23 nt, Artificial Sequence
  Synthetic oligonucleotide: Ptpn6-6987
uuuaagaugcugguaauacugga

SEQ ID NO: 27517 - RNA, 24 nt, Artificial Sequence
  Synthetic oligonucleotide: Ptpn6-6988
guuuaagaugcugguaauacugga

SEQ ID NO: 27518 - RNA, 18 nt, Artificial Sequence
  Synthetic oligonucleotide: Ptpn6-6989
uuuaagaugcugguaaua

SEQ ID NO: 27519 - RNA, 19 nt, Artificial Sequence
  Synthetic oligonucleotide: Ptpn6-6990
guuuaagaugcugguaaua

SEQ ID NO: 27520 - RNA, 20 nt, Artificial Sequence
  Synthetic oligonucleotide: Ptpn6-6991
uguuuaagaugcugguaaua

SEQ ID NO: 27521 - RNA, 21 nt, Artificial Sequence
  Synthetic oligonucleotide: Ptpn6-6992
cuguuuaagaugcugguaaua

SEQ ID NO: 27522 - RNA, 22 nt, Artificial Sequence
  Synthetic oligonucleotide: Ptpn6-6993
gcuguuuaagaugcugguaaua

SEQ ID NO: 27523 - RNA, 23 nt, Artificial Sequence
  Synthetic oligonucleotide: Ptpn6-6994
ugcuguuuaagaugcugguaaua

SEQ ID NO: 27524 - RNA, 24 nt, Artificial Sequence
  Synthetic oligonucleotide: Ptpn6-6995
gugcuguuuaagaugcugguaaua

SEQ ID NO: 27525 - RNA, 18 nt, Artificial Sequence
  Synthetic oligonucleotide: Ptpn6-6996
accagccuggccaauaua

SEQ ID NO: 27526 - RNA, 19 nt, Artificial Sequence
  Synthetic oligonucleotide: Ptpn6-6997
gaccagccuggccaauaua

SEQ ID NO: 27527 - RNA, 20 nt, Artificial Sequence
  Synthetic oligonucleotide: Ptpn6-2121
agaccagccuggccaauaua

SEQ ID NO: 27528 - RNA, 21 nt, Artificial Sequence
  Synthetic oligonucleotide: Ptpn6-6998
gagaccagccuggccaauaua

SEQ ID NO: 27529 - RNA, 22 nt, Artificial Sequence
  Synthetic oligonucleotide: Ptpn6-6999
ugagaccagccuggccaauaua

SEQ ID NO: 27530 - RNA, 23 nt, Artificial Sequence
  Synthetic oligonucleotide: Ptpn6-7000
uugagaccagccuggccaauaua

SEQ ID NO: 27531 - RNA, 24 nt, Artificial Sequence
  Synthetic oligonucleotide: Ptpn6-7001
uuugagaccagccuggccaauaua

SEQ ID NO: 27532 - RNA, 18 nt, Artificial Sequence
  Synthetic oligonucleotide: Ptpn6-7002
guccugugguuccagcua

SEQ ID NO: 27533 - RNA, 19 nt, Artificial Sequence
  Synthetic oligonucleotide: Ptpn6-7003
cguccugugguuccagcua

SEQ ID NO: 27534 - RNA, 20 nt, Artificial Sequence
  Synthetic oligonucleotide: Ptpn6-1435
acguccugugguuccagcua

SEQ ID NO: 27535 - RNA, 21 nt, Artificial Sequence
  Synthetic oligonucleotide: Ptpn6-7004
cacguccugugguuccagcua

SEQ ID NO: 27536 - RNA, 22 nt, Artificial Sequence
  Synthetic oligonucleotide: Ptpn6-7005
acacguccugugguuccagcua

SEQ ID NO: 27537 - RNA, 23 nt, Artificial Sequence
  Synthetic oligonucleotide: Ptpn6-7006
cacacguccugugguuccagcua

SEQ ID NO: 27538 - RNA, 24 nt, Artificial Sequence
  Synthetic oligonucleotide: Ptpn6-7007
gcacacguccugugguuccagcua

SEQ ID NO: 27539 - RNA, 18 nt, Artificial Sequence
  Synthetic oligonucleotide: Ptpn6-7008
gagaggauugcuugagcc

SEQ ID NO: 27540 - RNA, 19 nt, Artificial Sequence
  Synthetic oligonucleotide: Ptpn6-7009
cgagaggauugcuugagcc

SEQ ID NO: 27541 - RNA, 20 nt, Artificial Sequence
  Synthetic oligonucleotide: Ptpn6-2118
gcgagaggauugcuugagcc

SEQ ID NO: 27542 - RNA, 21 nt, Artificial Sequence
  Synthetic oligonucleotide: Ptpn6-7010
ggcgagaggauugcuugagcc

SEQ ID NO: 27543 - RNA, 22 nt, Artificial Sequence
  Synthetic oligonucleotide: Ptpn6-7011
aggcgagaggauugcuugagcc

SEQ ID NO: 27544 - RNA, 23 nt, Artificial Sequence
  Synthetic oligonucleotide: Ptpn6-7012
gaggcgagaggauugcuugagcc

SEQ ID NO: 27545 - RNA, 24 nt, Artificial Sequence
  Synthetic oligonucleotide: Ptpn6-7013
ugaggcgagaggauugcuugagcc

SEQ ID NO: 27546 - RNA, 18 nt, Artificial Sequence
  Synthetic oligonucleotide: Ptpn6-7014
ggggguugucagguccgc

SEQ ID NO: 27547 - RNA, 19 nt, Artificial Sequence
  Synthetic oligonucleotide: Ptpn6-7015
uggggguugucagguccgc

SEQ ID NO: 27548 - RNA, 20 nt, Artificial Sequence
  Synthetic oligonucleotide: Ptpn6-2300
auggggguugucagguccgc

SEQ ID NO: 27549 - RNA, 21 nt, Artificial Sequence
  Synthetic oligonucleotide: Ptpn6-7016
gauggggguugucagguccgc

SEQ ID NO: 27550 - RNA, 22 nt, Artificial Sequence
  Synthetic oligonucleotide: Ptpn6-7017
agauggggguugucagguccgc

SEQ ID NO: 27551 - RNA, 23 nt, Artificial Sequence
  Synthetic oligonucleotide: Ptpn6-7018
gagauggggguugucagguccgc

SEQ ID NO: 27552 - RNA, 24 nt, Artificial Sequence
  Synthetic oligonucleotide: Ptpn6-7019
agagauggggguugucagguccgc

SEQ ID NO: 27553 - RNA, 18 nt, Artificial Sequence
  Synthetic oligonucleotide: Ptpn6-7020
acugugggaggcugaggc

SEQ ID NO: 27554 - RNA, 19 nt, Artificial Sequence
  Synthetic oligonucleotide: Ptpn6-7021
cacugugggaggcugaggc

SEQ ID NO: 27555 - RNA, 20 nt, Artificial Sequence
  Synthetic oligonucleotide: Ptpn6-2115
gcacugugggaggcugaggc

SEQ ID NO: 27556 - RNA, 21 nt, Artificial Sequence
  Synthetic oligonucleotide: Ptpn6-7022
agcacugugggaggcugaggc

SEQ ID NO: 27557 - RNA, 22 nt, Artificial Sequence
  Synthetic oligonucleotide: Ptpn6-7023
cagcacugugggaggcugaggc

SEQ ID NO: 27558 - RNA, 23 nt, Artificial Sequence
  Synthetic oligonucleotide: Ptpn6-7024
ccagcacugugggaggcugaggc

SEQ ID NO: 27559 - RNA, 24 nt, Artificial Sequence
  Synthetic oligonucleotide: Ptpn6-7025
cccagcacugugggaggcugaggc

SEQ ID NO: 27560 - RNA, 18 nt, Artificial Sequence
  Synthetic oligonucleotide: Ptpn6-7026
cugaggcgagaggauugc

SEQ ID NO: 27561 - RNA, 19 nt, Artificial Sequence
  Synthetic oligonucleotide: Ptpn6-7027
gcugaggcgagaggauugc

SEQ ID NO: 27562 - RNA, 20 nt, Artificial Sequence
  Synthetic oligonucleotide: Ptpn6-2117
ggcugaggcgagaggauugc

SEQ ID NO: 27563 - RNA, 21 nt, Artificial Sequence
  Synthetic oligonucleotide: Ptpn6-7028
aggcugaggcgagaggauugc

SEQ ID NO: 27564 - RNA, 22 nt, Artificial Sequence
  Synthetic oligonucleotide: Ptpn6-7029
gaggcugaggcgagaggauugc

SEQ ID NO: 27565 - RNA, 23 nt, Artificial Sequence
  Synthetic oligonucleotide: Ptpn6-7030
ggaggcugaggcgagaggauugc

SEQ ID NO: 27566 - RNA, 24 nt, Artificial Sequence
  Synthetic oligonucleotide: Ptpn6-7031
gggaggcugaggcgagaggauugc

SEQ ID NO: 27567 - RNA, 18 nt, Artificial Sequence
  Synthetic oligonucleotide: Ptpn6-7032
ggaaaggcagagggaauc

SEQ ID NO: 27568 - RNA, 19 nt, Artificial Sequence
  Synthetic oligonucleotide: Ptpn6-7033
uggaaaggcagagggaauc

SEQ ID NO: 27569 - RNA, 20 nt, Artificial Sequence
  Synthetic oligonucleotide: Ptpn6-1545
cuggaaaggcagagggaauc

SEQ ID NO: 27570 - RNA, 18 nt, Artificial Sequence
  Synthetic oligonucleotide: Ptpn6-7034
gacauggucucugcucuc

SEQ ID NO: 27571 - RNA, 19 nt, Artificial Sequence
  Synthetic oligonucleotide: Ptpn6-7035
agacauggucucugcucuc

SEQ ID NO: 27572 - RNA, 20 nt, Artificial Sequence
  Synthetic oligonucleotide: Ptpn6-2100
cagacauggucucugcucuc

SEQ ID NO: 27573 - RNA, 21 nt, Artificial Sequence
  Synthetic oligonucleotide: Ptpn6-7036
acagacauggucucugcucuc

SEQ ID NO: 27574 - RNA, 22 nt, Artificial Sequence
  Synthetic oligonucleotide: Ptpn6-7037
gacagacauggucucugcucuc

SEQ ID NO: 27575 - RNA, 23 nt, Artificial Sequence
  Synthetic oligonucleotide: Ptpn6-7038
agacagacauggucucugcucuc

SEQ ID NO: 27576 - RNA, 24 nt, Artificial Sequence
  Synthetic oligonucleotide: Ptpn6-7039
aagacagacauggucucugcucuc

SEQ ID NO: 27577 - RNA, 18 nt, Artificial Sequence
  Synthetic oligonucleotide: Ptpn6-7040
cagagggaaucagggaag

SEQ ID NO: 27578 - RNA, 19 nt, Artificial Sequence
  Synthetic oligonucleotide: Ptpn6-7041
gcagagggaaucagggaag

SEQ ID NO: 27579 - RNA, 20 nt, Artificial Sequence
  Synthetic oligonucleotide: Ptpn6-2296
ggcagagggaaucagggaag

SEQ ID NO: 27580 - RNA, 21 nt, Artificial Sequence
  Synthetic oligonucleotide: Ptpn6-7042
aggcagagggaaucagggaag

SEQ ID NO: 27581 - RNA, 22 nt, Artificial Sequence
  Synthetic oligonucleotide: Ptpn6-7043
aaggcagagggaaucagggaag

SEQ ID NO: 27582 - RNA, 23 nt, Artificial Sequence
  Synthetic oligonucleotide: Ptpn6-7044
aaaggcagagggaaucagggaag

SEQ ID NO: 27583 - RNA, 24 nt, Artificial Sequence
  Synthetic oligonucleotide: Ptpn6-7045
gaaaggcagagggaaucagggaag

SEQ ID NO: 27584 - RNA, 18 nt, Artificial Sequence
  Synthetic oligonucleotide: Ptpn6-7046
acggagcuuacauuccag

SEQ ID NO: 27585 - RNA, 19 nt, Artificial Sequence
  Synthetic oligonucleotide: Ptpn6-7047
cacggagcuuacauuccag

SEQ ID NO: 27586 - RNA, 20 nt, Artificial Sequence
  Synthetic oligonucleotide: Ptpn6-1415
ucacggagcuuacauuccag

SEQ ID NO: 27587 - RNA, 21 nt, Artificial Sequence
  Synthetic oligonucleotide: Ptpn6-7048
cucacggagcuuacauuccag

SEQ ID NO: 27588 - RNA, 22 nt, Artificial Sequence
  Synthetic oligonucleotide: Ptpn6-7049
ucucacggagcuuacauuccag

SEQ ID NO: 27589 - RNA, 23 nt, Artificial Sequence
  Synthetic oligonucleotide: Ptpn6-7050
cucucacggagcuuacauuccag

SEQ ID NO: 27590 - RNA, 24 nt, Artificial Sequence
  Synthetic oligonucleotide: Ptpn6-7051
gcucucacggagcuuacauuccag

SEQ ID NO: 27591 - RNA, 18 nt, Artificial Sequence
  Synthetic oligonucleotide: Ptpn6-7052
ggaaucagggaaggagag

SEQ ID NO: 27592 - RNA, 19 nt, Artificial Sequence
  Synthetic oligonucleotide: Ptpn6-7053
gggaaucagggaaggagag

SEQ ID NO: 27593 - RNA, 20 nt, Artificial Sequence
  Synthetic oligonucleotide: Ptpn6-2297
agggaaucagggaaggagag

SEQ ID NO: 27594 - RNA, 21 nt, Artificial Sequence
  Synthetic oligonucleotide: Ptpn6-7054
gagggaaucagggaaggagag

SEQ ID NO: 27595 - RNA, 22 nt, Artificial Sequence
  Synthetic oligonucleotide: Ptpn6-7055
agagggaaucagggaaggagag

SEQ ID NO: 27596 - RNA, 23 nt, Artificial Sequence
  Synthetic oligonucleotide: Ptpn6-7056
cagagggaaucagggaaggagag

SEQ ID NO: 27597 - RNA, 24 nt, Artificial Sequence
  Synthetic oligonucleotide: Ptpn6-7057
gcagagggaaucagggaaggagag

SEQ ID NO: 27598 - RNA, 18 nt, Artificial Sequence
  Synthetic oligonucleotide: Ptpn6-7058
gcacugugggaggcugag

SEQ ID NO: 27599 - RNA, 19 nt, Artificial Sequence
  Synthetic oligonucleotide: Ptpn6-7059
agcacugugggaggcugag

SEQ ID NO: 27600 - RNA, 20 nt, Artificial Sequence
  Synthetic oligonucleotide: Ptpn6-2114
cagcacugugggaggcugag

SEQ ID NO: 27601 - RNA, 21 nt, Artificial Sequence
  Synthetic oligonucleotide: Ptpn6-7060
ccagcacugugggaggcugag

SEQ ID NO: 27602 - RNA, 22 nt, Artificial Sequence
  Synthetic oligonucleotide: Ptpn6-7061
cccagcacugugggaggcugag

SEQ ID NO: 27603 - RNA, 23 nt, Artificial Sequence
  Synthetic oligonucleotide: Ptpn6-7062
ucccagcacugugggaggcugag

SEQ ID NO: 27604 - RNA, 24 nt, Artificial Sequence
  Synthetic oligonucleotide: Ptpn6-7063
aucccagcacugugggaggcugag

SEQ ID NO: 27605 - RNA, 18 nt, Artificial Sequence
  Synthetic oligonucleotide: Ptpn6-7064
auucucagaaguauuacg

SEQ ID NO: 27606 - RNA, 19 nt, Artificial Sequence
  Synthetic oligonucleotide: Ptpn6-7065
gauucucagaaguauuacg

SEQ ID NO: 27607 - RNA, 20 nt, Artificial Sequence
  Synthetic oligonucleotide: Ptpn6-2108
agauucucagaaguauuacg

SEQ ID NO: 27608 - RNA, 21 nt, Artificial Sequence
  Synthetic oligonucleotide: Ptpn6-7066
cagauucucagaaguauuacg

SEQ ID NO: 27609 - RNA, 22 nt, Artificial Sequence
  Synthetic oligonucleotide: Ptpn6-7067
gcagauucucagaaguauuacg

SEQ ID NO: 27610 - RNA, 23 nt, Artificial Sequence
  Synthetic oligonucleotide: Ptpn6-7068
ugcagauucucagaaguauuacg

SEQ ID NO: 27611 - RNA, 24 nt, Artificial Sequence
  Synthetic oligonucleotide: Ptpn6-7069
uugcagauucucagaaguauuacg

SEQ ID NO: 27612 - RNA, 18 nt, Artificial Sequence
  Synthetic oligonucleotide: Ptpn6-7070
ucccagcacugugggagg

SEQ ID NO: 27613 - RNA, 19 nt, Artificial Sequence
  Synthetic oligonucleotide: Ptpn6-7071
aucccagcacugugggagg

SEQ ID NO: 27614 - RNA, 20 nt, Artificial Sequence
  Synthetic oligonucleotide: Ptpn6-2113
gaucccagcacugugggagg

SEQ ID NO: 27615 - RNA, 21 nt, Artificial Sequence
  Synthetic oligonucleotide: Ptpn6-7072
ugaucccagcacugugggagg

SEQ ID NO: 27616 - RNA, 22 nt, Artificial Sequence
  Synthetic oligonucleotide: Ptpn6-7073
gugaucccagcacugugggagg

SEQ ID NO: 27617 - RNA, 23 nt, Artificial Sequence
  Synthetic oligonucleotide: Ptpn6-7074
ugugaucccagcacugugggagg

SEQ ID NO: 27618 - RNA, 24 nt, Artificial Sequence
  Synthetic oligonucleotide: Ptpn6-7075
cugugaucccagcacugugggagg

SEQ ID NO: 27619 - RNA, 18 nt, Artificial Sequence
  Synthetic oligonucleotide: Ptpn6-7076
aggcagagggaaucaggg

SEQ ID NO: 27620 - RNA, 19 nt, Artificial Sequence
  Synthetic oligonucleotide: Ptpn6-7077
aaggcagagggaaucaggg

SEQ ID NO: 27621 - RNA, 20 nt, Artificial Sequence
  Synthetic oligonucleotide: Ptpn6-2259
aaaggcagagggaaucaggg

SEQ ID NO: 27622 - RNA, 21 nt, Artificial Sequence
  Synthetic oligonucleotide: Ptpn6-7078
gaaaggcagagggaaucaggg

SEQ ID NO: 27623 - RNA, 22 nt, Artificial Sequence
  Synthetic oligonucleotide: Ptpn6-7079
ggaaaggcagagggaaucaggg

SEQ ID NO: 27624 - RNA, 23 nt, Artificial Sequence
  Synthetic oligonucleotide: Ptpn6-7080
uggaaaggcagagggaaucaggg

SEQ ID NO: 27625 - RNA, 24 nt, Artificial Sequence
  Synthetic oligonucleotide: Ptpn6-7081
cuggaaaggcagagggaaucaggg

SEQ ID NO: 27626 - RNA, 18 nt, Artificial Sequence
  Synthetic oligonucleotide: Ptpn6-7082
ccugugguuccagcuaug

SEQ ID NO: 27627 - RNA, 19 nt, Artificial Sequence
  Synthetic oligonucleotide: Ptpn6-7083
uccugugguuccagcuaug

SEQ ID NO: 27628 - RNA, 20 nt, Artificial Sequence
  Synthetic oligonucleotide: Ptpn6-2126
guccugugguuccagcuaug

SEQ ID NO: 27629 - RNA, 21 nt, Artificial Sequence
  Synthetic oligonucleotide: Ptpn6-7084
cguccugugguuccagcuaug

SEQ ID NO: 27630 - RNA, 22 nt, Artificial Sequence
  Synthetic oligonucleotide: Ptpn6-7085
acguccugugguuccagcuaug

SEQ ID NO: 27631 - RNA, 23 nt, Artificial Sequence
  Synthetic oligonucleotide: Ptpn6-7086
cacguccugugguuccagcuaug

SEQ ID NO: 27632 - RNA, 24 nt, Artificial Sequence
  Synthetic oligonucleotide: Ptpn6-7087
acacguccugugguuccagcuaug

SEQ ID NO: 27633 - RNA, 18 nt, Artificial Sequence
  Synthetic oligonucleotide: Ptpn6-7088
ccugugaucccagcacug

SEQ ID NO: 27634 - RNA, 19 nt, Artificial Sequence
  Synthetic oligonucleotide: Ptpn6-7089
accugugaucccagcacug

SEQ ID NO: 27635 - RNA, 20 nt, Artificial Sequence
  Synthetic oligonucleotide: Ptpn6-1423
caccugugaucccagcacug

SEQ ID NO: 27636 - RNA, 21 nt, Artificial Sequence
  Synthetic oligonucleotide: Ptpn6-7090
acaccugugaucccagcacug

SEQ ID NO: 27637 - RNA, 22 nt, Artificial Sequence
  Synthetic oligonucleotide: Ptpn6-7091
cacaccugugaucccagcacug

SEQ ID NO: 27638 - RNA, 23 nt, Artificial Sequence
  Synthetic oligonucleotide: Ptpn6-7092
ucacaccugugaucccagcacug

SEQ ID NO: 27639 - RNA, 24 nt, Artificial Sequence
  Synthetic oligonucleotide: Ptpn6-7093
uucacaccugugaucccagcacug

SEQ ID NO: 27640 - RNA, 18 nt, Artificial Sequence
  Synthetic oligonucleotide: Ptpn6-7094
ucauucaacagguacgug

SEQ ID NO: 27641 - RNA, 19 nt, Artificial Sequence
  Synthetic oligonucleotide: Ptpn6-7095
uucauucaacagguacgug

SEQ ID NO: 27642 - RNA, 20 nt, Artificial Sequence
  Synthetic oligonucleotide: Ptpn6-1714
auucauucaacagguacgug

SEQ ID NO: 27643 - RNA, 21 nt, Artificial Sequence
  Synthetic oligonucleotide: Ptpn6-7096
cauucauucaacagguacgug

SEQ ID NO: 27644 - RNA, 22 nt, Artificial Sequence
  Synthetic oligonucleotide: Ptpn6-7097
ucauucauucaacagguacgug

SEQ ID NO: 27645 - RNA, 23 nt, Artificial Sequence
  Synthetic oligonucleotide: Ptpn6-7098
aucauucauucaacagguacgug

SEQ ID NO: 27646 - RNA, 24 nt, Artificial Sequence
  Synthetic oligonucleotide: Ptpn6-7099
caucauucauucaacagguacgug

SEQ ID NO: 27647 - RNA, 18 nt, Artificial Sequence
  Synthetic oligonucleotide: Ptpn6-7100
ccugucucuacaaaaaau

SEQ ID NO: 27648 - RNA, 19 nt, Artificial Sequence
  Synthetic oligonucleotide: Ptpn6-7101
cccugucucuacaaaaaau

SEQ ID NO: 27649 - RNA, 20 nt, Artificial Sequence
  Synthetic oligonucleotide: Ptpn6-2122
acccugucucuacaaaaaau

SEQ ID NO: 27650 - RNA, 21 nt, Artificial Sequence
  Synthetic oligonucleotide: Ptpn6-7102
gacccugucucuacaaaaaau

SEQ ID NO: 27651 - RNA, 22 nt, Artificial Sequence
  Synthetic oligonucleotide: Ptpn6-7103
agacccugucucuacaaaaaau

SEQ ID NO: 27652 - RNA, 23 nt, Artificial Sequence
  Synthetic oligonucleotide: Ptpn6-7104
gagacccugucucuacaaaaaau

SEQ ID NO: 27653 - RNA, 24 nt, Artificial Sequence
  Synthetic oligonucleotide: Ptpn6-7105
ugagacccugucucuacaaaaaau

SEQ ID NO: 27654 - RNA, 18 nt, Artificial Sequence
  Synthetic oligonucleotide: Ptpn6-7106
uggaaaggcagagggaau

SEQ ID NO: 27655 - RNA, 19 nt, Artificial Sequence
  Synthetic oligonucleotide: Ptpn6-7107
cuggaaaggcagagggaau

SEQ ID NO: 27656 - RNA, 20 nt, Artificial Sequence
  Synthetic oligonucleotide: Ptpn6-2294
ccuggaaaggcagagggaau

SEQ ID NO: 27657 - RNA, 18 nt, Artificial Sequence
  Synthetic oligonucleotide: Ptpn6-7108
accugugaucccagcacu

SEQ ID NO: 27658 - RNA, 19 nt, Artificial Sequence
  Synthetic oligonucleotide: Ptpn6-7109
caccugugaucccagcacu

SEQ ID NO: 27659 - RNA, 20 nt, Artificial Sequence
  Synthetic oligonucleotide: Ptpn6-2110
acaccugugaucccagcacu

SEQ ID NO: 27660 - RNA, 21 nt, Artificial Sequence
  Synthetic oligonucleotide: Ptpn6-7110
cacaccugugaucccagcacu

SEQ ID NO: 27661 - RNA, 22 nt, Artificial Sequence
  Synthetic oligonucleotide: Ptpn6-7111
ucacaccugugaucccagcacu

SEQ ID NO: 27662 - RNA, 23 nt, Artificial Sequence
  Synthetic oligonucleotide: Ptpn6-7112
uucacaccugugaucccagcacu

SEQ ID NO: 27663 - RNA, 24 nt, Artificial Sequence
  Synthetic oligonucleotide: Ptpn6-7113
guucacaccugugaucccagcacu

SEQ ID NO: 27664 - RNA, 18 nt, Artificial Sequence
  Synthetic oligonucleotide: Ptpn6-7114
cguccugugguuccagcu

SEQ ID NO: 27665 - RNA, 19 nt, Artificial Sequence
  Synthetic oligonucleotide: Ptpn6-7115
acguccugugguuccagcu

SEQ ID NO: 27666 - RNA, 20 nt, Artificial Sequence
  Synthetic oligonucleotide: Ptpn6-2124
cacguccugugguuccagcu

SEQ ID NO: 27667 - RNA, 21 nt, Artificial Sequence
  Synthetic oligonucleotide: Ptpn6-7116
acacguccugugguuccagcu

SEQ ID NO: 27668 - RNA, 22 nt, Artificial Sequence
  Synthetic oligonucleotide: Ptpn6-7117
cacacguccugugguuccagcu

SEQ ID NO: 27669 - RNA, 23 nt, Artificial Sequence
  Synthetic oligonucleotide: Ptpn6-7118
gcacacguccugugguuccagcu

SEQ ID NO: 27670 - RNA, 24 nt, Artificial Sequence
  Synthetic oligonucleotide: Ptpn6-7119
ggcacacguccugugguuccagcu

SEQ ID NO: 27671 - RNA, 18 nt, Artificial Sequence
  Synthetic oligonucleotide: Ptpn6-7120
uggaucauugcagauucu

SEQ ID NO: 27672 - RNA, 19 nt, Artificial Sequence
  Synthetic oligonucleotide: Ptpn6-7121
uuggaucauugcagauucu

SEQ ID NO: 27673 - RNA, 20 nt, Artificial Sequence
  Synthetic oligonucleotide: Ptpn6-2107
auuggaucauugcagauucu

SEQ ID NO: 27674 - RNA, 21 nt, Artificial Sequence
  Synthetic oligonucleotide: Ptpn6-7122
aauuggaucauugcagauucu

SEQ ID NO: 27675 - RNA, 22 nt, Artificial Sequence
  Synthetic oligonucleotide: Ptpn6-7123
aaauuggaucauugcagauucu

SEQ ID NO: 27676 - RNA, 23 nt, Artificial Sequence
  Synthetic oligonucleotide: Ptpn6-7124
uaaauuggaucauugcagauucu

SEQ ID NO: 27677 - RNA, 24 nt, Artificial Sequence
  Synthetic oligonucleotide: Ptpn6-7125
auaaauuggaucauugcagauucu

SEQ ID NO: 27678 - RNA, 18 nt, Artificial Sequence
  Synthetic oligonucleotide: Ptpn6-7126
cggagcuuacauuccagu

SEQ ID NO: 27679 - RNA, 19 nt, Artificial Sequence
  Synthetic oligonucleotide: Ptpn6-7127
acggagcuuacauuccagu

SEQ ID NO: 27680 - RNA, 20 nt, Artificial Sequence
  Synthetic oligonucleotide: Ptpn6-1416
cacggagcuuacauuccagu

SEQ ID NO: 27681 - RNA, 21 nt, Artificial Sequence
  Synthetic oligonucleotide: Ptpn6-7128
ucacggagcuuacauuccagu

SEQ ID NO: 27682 - RNA, 22 nt, Artificial Sequence
  Synthetic oligonucleotide: Ptpn6-7129
cucacggagcuuacauuccagu

SEQ ID NO: 27683 - RNA, 23 nt, Artificial Sequence
  Synthetic oligonucleotide: Ptpn6-7130
ucucacggagcuuacauuccagu

SEQ ID NO: 27684 - RNA, 24 nt, Artificial Sequence
  Synthetic oligonucleotide: Ptpn6-7131
cucucacggagcuuacauuccagu

SEQ ID NO: 27685 - RNA, 18 nt, Artificial Sequence
  Synthetic oligonucleotide: Ptpn6-7132
uugcuugagcccaggagu

SEQ ID NO: 27686 - RNA, 19 nt, Artificial Sequence
  Synthetic oligonucleotide: Ptpn6-7133
auugcuugagcccaggagu

SEQ ID NO: 27687 - RNA, 20 nt, Artificial Sequence
  Synthetic oligonucleotide: Ptpn6-2120
gauugcuugagcccaggagu

SEQ ID NO: 27688 - RNA, 21 nt, Artificial Sequence
  Synthetic oligonucleotide: Ptpn6-7134
ggauugcuugagcccaggagu

SEQ ID NO: 27689 - RNA, 22 nt, Artificial Sequence
  Synthetic oligonucleotide: Ptpn6-7135
aggauugcuugagcccaggagu

SEQ ID NO: 27690 - RNA, 23 nt, Artificial Sequence
  Synthetic oligonucleotide: Ptpn6-7136
gaggauugcuugagcccaggagu

SEQ ID NO: 27691 - RNA, 24 nt, Artificial Sequence
  Synthetic oligonucleotide: Ptpn6-7137
agaggauugcuugagcccaggagu

SEQ ID NO: 27692 - RNA, 18 nt, Artificial Sequence
  Synthetic oligonucleotide: Ptpn6-7138
cugugaucccagcacugu

SEQ ID NO: 27693 - RNA, 19 nt, Artificial Sequence
  Synthetic oligonucleotide: Ptpn6-7139
ccugugaucccagcacugu

SEQ ID NO: 27694 - RNA, 20 nt, Artificial Sequence
  Synthetic oligonucleotide: Ptpn6-1424
accugugaucccagcacugu

SEQ ID NO: 27695 - RNA, 21 nt, Artificial Sequence
  Synthetic oligonucleotide: Ptpn6-7140
caccugugaucccagcacugu

SEQ ID NO: 27696 - RNA, 22 nt, Artificial Sequence
  Synthetic oligonucleotide: Ptpn6-7141
acaccugugaucccagcacugu

SEQ ID NO: 27697 - RNA, 23 nt, Artificial Sequence
  Synthetic oligonucleotide: Ptpn6-7142
cacaccugugaucccagcacugu

SEQ ID NO: 27698 - RNA, 24 nt, Artificial Sequence
  Synthetic oligonucleotide: Ptpn6-7143
ucacaccugugaucccagcacugu

SEQ ID NO: 27699 - RNA, 17 nt, Artificial Sequence
  Synthetic oligonucleotide: Ptpn6-7144
ugagcgguucuuccuca

SEQ ID NO: 27700 - RNA, 17 nt, Artificial Sequence
  Synthetic oligonucleotide: Ptpn6-7145
aggcgggccugcuguac

SEQ ID NO: 27701 - RNA, 17 nt, Artificial Sequence
  Synthetic oligonucleotide: Ptpn6-7146
gggcuccugcuucugcc

SEQ ID NO: 27702 - RNA, 17 nt, Artificial Sequence
  Synthetic oligonucleotide: Ptpn6-7147
ccccugcggcccucugc

SEQ ID NO: 27703 - RNA, 17 nt, Artificial Sequence
  Synthetic oligonucleotide: Ptpn6-7148
cgagaccgcccacagcg

SEQ ID NO: 27704 - RNA, 17 nt, Artificial Sequence
  Synthetic oligonucleotide: Ptpn6-1765
uuaguuuuggagggagg

SEQ ID NO: 27705 - RNA, 17 nt, Artificial Sequence
  Synthetic oligonucleotide: Ptpn6-7149
caauaccccgccgcucu

SEQ ID NO: 27706 - RNA, 17 nt, Artificial Sequence
  Synthetic oligonucleotide: Ptpn6-2350
aggaucgaggaggaagu

SEQ ID NO: 27707 - RNA, 20 nt, Artificial Sequence
  Synthetic oligonucleotide: Ptpn6-7150
uacugagcgguucuuccuca

SEQ ID NO: 27708 - RNA, 20 nt, Artificial Sequence
  Synthetic oligonucleotide: Ptpn6-7151
agcaggcgggccugcuguac

SEQ ID NO: 27709 - RNA, 20 nt, Artificial Sequence
  Synthetic oligonucleotide: Ptpn6-7152
ucugggcuccugcuucugcc

SEQ ID NO: 27710 - RNA, 20 nt, Artificial Sequence
  Synthetic oligonucleotide: Ptpn6-7153
ucuacuuccagccucugggc

SEQ ID NO: 27711 - RNA, 20 nt, Artificial Sequence
  Synthetic oligonucleotide: Ptpn6-7154
cgcccccugcggcccucugc

SEQ ID NO: 27712 - RNA, 20 nt, Artificial Sequence
  Synthetic oligonucleotide: Ptpn6-7155
gcccgagaccgcccacagcg

SEQ ID NO: 27713 - RNA, 20 nt, Artificial Sequence
  Synthetic oligonucleotide: Ptpn6-1702
cuguuaguuuuggagggagg

SEQ ID NO: 27714 - RNA, 20 nt, Artificial Sequence
  Synthetic oligonucleotide: Ptpn6-7156
acccaauaccccgccgcucu

SEQ ID NO: 27715 - RNA, 20 nt, Artificial Sequence
  Synthetic oligonucleotide: Ptpn6-1657
ucucugaggaacugggcugu

SEQ ID NO: 27716 - RNA, 17 nt, Artificial Sequence
  Synthetic oligonucleotide: Ptpn6-7157
acuuccagccucugggc

SEQ ID NO: 27717 - RNA, 17 nt, Artificial Sequence
  Synthetic oligonucleotide: Ptpn6-1720
cugaggaacugggcugu

SEQ ID NO: 27718 - RNA, 20 nt, Artificial Sequence
  Synthetic oligonucleotide: Ptpn6-2348
ggcaggaucgaggaggaagu

SEQ ID NO: 27719 - RNA, 17 nt, Artificial Sequence
  Synthetic oligonucleotide: Ptpn6-1474
cauggucucugcucuca

SEQ ID NO: 27720 - RNA, 17 nt, Artificial Sequence
  Synthetic oligonucleotide: Ptpn6-7158
ggaggcugaggcgagag

SEQ ID NO: 27721 - RNA, 17 nt, Artificial Sequence
  Synthetic oligonucleotide: Ptpn6-2359
ugugggaggcugaggcg

SEQ ID NO: 27722 - RNA, 17 nt, Artificial Sequence
  Synthetic oligonucleotide: Ptpn6-2358
ccaauaaauuggaucau

SEQ ID NO: 27723 - RNA, 17 nt, Artificial Sequence
  Synthetic oligonucleotide: Ptpn6-2361
aacccccaucucuccuu

SEQ ID NO: 27724 - RNA, 20 nt, Artificial Sequence
  Synthetic oligonucleotide: Ptpn6-1414
agacauggucucugcucuca

SEQ ID NO: 27725 - RNA, 20 nt, Artificial Sequence
  Synthetic oligonucleotide: Ptpn6-7159
gugggaggcugaggcgagag

SEQ ID NO: 27726 - RNA, 20 nt, Artificial Sequence
  Synthetic oligonucleotide: Ptpn6-2356
cacugugggaggcugaggcg

SEQ ID NO: 27727 - RNA, 20 nt, Artificial Sequence
  Synthetic oligonucleotide: Ptpn6-2355
aacccaauaaauuggaucau

SEQ ID NO: 27728 - RNA, 20 nt, Artificial Sequence
  Synthetic oligonucleotide: Ptpn6-2360
gacaacccccaucucuccuu

SEQ ID NO: 27729 - RNA, 17 nt, Artificial Sequence
  Synthetic oligonucleotide: FAS-84
ugcgugcccugccaaga

SEQ ID NO: 27730 - RNA, 20 nt, Artificial Sequence
  Synthetic oligonucleotide: FAS-13
gugacugacaucaacuccaa

SEQ ID NO: 27731 - RNA, 20 nt, Artificial Sequence
  Synthetic oligonucleotide: FAS-57
gcuagggacugcacagucaa

SEQ ID NO: 27732 - RNA, 20 nt, Artificial Sequence
  Synthetic oligonucleotide: FAS-61
acugcgugcccugccaagaa

SEQ ID NO: 27733 - RNA, 20 nt, Artificial Sequence
  Synthetic oligonucleotide: FAS-22
guguaacauaccuggaggac

SEQ ID NO: 27734 - RNA, 20 nt, Artificial Sequence
  Synthetic oligonucleotide: FAS-659
ggauugcucaacaaccaugc

SEQ ID NO: 27735 - RNA, 20 nt, Artificial Sequence
  Synthetic oligonucleotide: FAS-333
uacaucugcacuugguauuc

SEQ ID NO: 27736 - RNA, 20 nt, Artificial Sequence
  Synthetic oligonucleotide: FAS-665
ugagcccucuccugcccggg

SEQ ID NO: 27737 - RNA, 20 nt, Artificial Sequence
  Synthetic oligonucleotide: FAS-332
guuugguuuacaucugcacu

SEQ ID NO: 27738 - RNA, 20 nt, Artificial Sequence
  Synthetic oligonucleotide: FAS-28
uggaguugaugucagucacu

SEQ ID NO: 27739 - RNA, 20 nt, Artificial Sequence
  Synthetic oligonucleotide: FAS-334
acaucugcacuugguauucu

SEQ ID NO: 27740 - RNA, 20 nt, Artificial Sequence
  Synthetic oligonucleotide: FAS-66
caaucuacaucuucugcauu

SEQ ID NO: 27741 - RNA, 20 nt, Artificial Sequence
  Synthetic oligonucleotide: FAS-30
cacuugggcauuaacacuuu

SEQ ID NO: 27742 - RNA, 17 nt, Artificial Sequence
  Synthetic oligonucleotide: FAS-91
ugcauuuggaagaaaaa

SEQ ID NO: 27743 - RNA, 17 nt, Artificial Sequence
  Synthetic oligonucleotide: FAS-98
accugcccaaggaaaaa

SEQ ID NO: 27744 - RNA, 17 nt, Artificial Sequence
  Synthetic oligonucleotide: FAS-33
acugacaucaacuccaa

SEQ ID NO: 27745 - RNA, 17 nt, Artificial Sequence
  Synthetic oligonucleotide: FAS-359
aaacuuacuuggugcaa

SEQ ID NO: 27746 - RNA, 17 nt, Artificial Sequence
  Synthetic oligonucleotide: FAS-81
agggacugcacagucaa

SEQ ID NO: 27747 - RNA, 17 nt, Artificial Sequence
  Synthetic oligonucleotide: FAS-85
gcgugcccugccaagaa

SEQ ID NO: 27748 - RNA, 17 nt, Artificial Sequence
  Synthetic oligonucleotide: FAS-78
uuccuugggcaggugaa

SEQ ID NO: 27749 - RNA, 17 nt, Artificial Sequence
  Synthetic oligonucleotide: FAS-280
uuuucuagaugugaaca

SEQ ID NO: 27750 - RNA, 17 nt, Artificial Sequence
  Synthetic oligonucleotide: FAS-88
uugugugaugaaggaca

SEQ ID NO: 27751 - RNA, 17 nt, Artificial Sequence
  Synthetic oligonucleotide: FAS-43
aacauaccuggaggaca

SEQ ID NO: 27752 - RNA, 17 nt, Artificial Sequence
  Synthetic oligonucleotide: FAS-97
uuccuuucaccugccca

SEQ ID NO: 27753 - RNA, 17 nt, Artificial Sequence
  Synthetic oligonucleotide: FAS-32
gacugacaucaacucca

SEQ ID NO: 27754 - RNA, 17 nt, Artificial Sequence
  Synthetic oligonucleotide: FAS-10
gguccagaugcccagca

SEQ ID NO: 27755 - RNA, 17 nt, Artificial Sequence
  Synthetic oligonucleotide: FAS-95
uccuucccuucuuggca

SEQ ID NO: 27756 - RNA, 17 nt, Artificial Sequence
  Synthetic oligonucleotide: FAS-358
aaaacuuacuuggugca

SEQ ID NO: 27757 - RNA, 17 nt, Artificial Sequence
  Synthetic oligonucleotide: FAS-281
ugaacauggaaucauca

SEQ ID NO: 27758 - RNA, 17 nt, Artificial Sequence
  Synthetic oligonucleotide: FAS-887
uccacccgggcaggaga

SEQ ID NO: 27759 - RNA, 17 nt, Artificial Sequence
  Synthetic oligonucleotide: FAS-283
accaagugcaaagagga

SEQ ID NO: 27760 - RNA, 17 nt, Artificial Sequence
  Synthetic oligonucleotide: FAS-9
gcucaccagagguagga

SEQ ID NO: 27761 - RNA, 17 nt, Artificial Sequence
  Synthetic oligonucleotide: FAS-86
gcccugccaagaaggga

SEQ ID NO: 27762 - RNA, 17 nt, Artificial Sequence
  Synthetic oligonucleotide: FAS-37
gagacucagaacuugga

SEQ ID NO: 27763 - RNA, 17 nt, Artificial Sequence
  Synthetic oligonucleotide: FAS-38
gaaggccugcaucauga

SEQ ID NO: 27764 - RNA, 17 nt, Artificial Sequence
  Synthetic oligonucleotide: FAS-87
uguagauugugugauga

SEQ ID NO: 27765 - RNA, 17 nt, Artificial Sequence
  Synthetic oligonucleotide: FAS-80
aggugaaaggaaagcua

SEQ ID NO: 27766 - RNA, 17 nt, Artificial Sequence
  Synthetic oligonucleotide: FAS-44
cuggaggacagggcuua

SEQ ID NO: 27767 - RNA, 17 nt, Artificial Sequence
  Synthetic oligonucleotide: FAS-284
agguaauuauuuuuuua

SEQ ID NO: 27768 - RNA, 17 nt, Artificial Sequence
  Synthetic oligonucleotide: FAS-42
uaacauaccuggaggac

SEQ ID NO: 27769 - RNA, 17 nt, Artificial Sequence
  Synthetic oligonucleotide: FAS-356
ucuagaaaaaaaaauac

SEQ ID NO: 27770 - RNA, 17 nt, Artificial Sequence
  Synthetic oligonucleotide: FAS-31
ucaugcuuuuauuuuac

SEQ ID NO: 27771 - RNA, 17 nt, Artificial Sequence
  Synthetic oligonucleotide: FAS-279
uggaaauaaacugcacc

SEQ ID NO: 27772 - RNA, 17 nt, Artificial Sequence
  Synthetic oligonucleotide: FAS-40
guuuuguguaacauacc

SEQ ID NO: 27773 - RNA, 17 nt, Artificial Sequence
  Synthetic oligonucleotide: FAS-855
ugagcccucuccugccc

SEQ ID NO: 27774 - RNA, 17 nt, Artificial Sequence
  Synthetic oligonucleotide: FAS-854
gugagcccucuccugcc

SEQ ID NO: 27775 - RNA, 17 nt, Artificial Sequence
  Synthetic oligonucleotide: FAS-39
cauaagcccuguccucc

SEQ ID NO: 27776 - RNA, 17 nt, Artificial Sequence
  Synthetic oligonucleotide: FAS-365
cuugguauucugggucc

SEQ ID NO: 27777 - RNA, 17 nt, Artificial Sequence
  Synthetic oligonucleotide: FAS-77
uccuuuuuuccuugggc

SEQ ID NO: 27778 - RNA, 17 nt, Artificial Sequence
  Synthetic oligonucleotide: FAS-94
cuccuucccuucuuggc

SEQ ID NO: 27779 - RNA, 17 nt, Artificial Sequence
  Synthetic oligonucleotide: FAS-850
uugcucaacaaccaugc

SEQ ID NO: 27780 - RNA, 17 nt, Artificial Sequence
  Synthetic oligonucleotide: FAS-46
auuggccaucaugaugc

SEQ ID NO: 27781 - RNA, 17 nt, Artificial Sequence
  Synthetic oligonucleotide: FAS-355
uuugcacuugguguugc

SEQ ID NO: 27782 - RNA, 17 nt, Artificial Sequence
  Synthetic oligonucleotide: FAS-6
caaccaugcugggcauc

SEQ ID NO: 27783 - RNA, 17 nt, Artificial Sequence
  Synthetic oligonucleotide: FAS-7
cuggacccuccuaccuc

SEQ ID NO: 27784 - RNA, 17 nt, Artificial Sequence
  Synthetic oligonucleotide: FAS-96
uggcagggcacgcaguc

SEQ ID NO: 27785 - RNA, 17 nt, Artificial Sequence
  Synthetic oligonucleotide: FAS-364
acuugguauucuggguc

SEQ ID NO: 27786 - RNA, 17 nt, Artificial Sequence
  Synthetic oligonucleotide: FAS-362
aucugcacuugguauuc

SEQ ID NO: 27787 - RNA, 17 nt, Artificial Sequence
  Synthetic oligonucleotide: FAS-282
caacaccaagugcaaag

SEQ ID NO: 27788 - RNA, 17 nt, Artificial Sequence
  Synthetic oligonucleotide: FAS-89
uaaaaugcaauugaaag

SEQ ID NO: 27789 - RNA, 17 nt, Artificial Sequence
  Synthetic oligonucleotide: FAS-278
uuuucuaggcuuagaag

SEQ ID NO: 27790 - RNA, 17 nt, Artificial Sequence
  Synthetic oligonucleotide: FAS-888
aggagagggcucaccag

SEQ ID NO: 27791 - RNA, 17 nt, Artificial Sequence
  Synthetic oligonucleotide: FAS-886
cuccacccgggcaggag

SEQ ID NO: 27792 - RNA, 17 nt, Artificial Sequence
  Synthetic oligonucleotide: FAS-8
ggcucaccagagguagg

SEQ ID NO: 27793 - RNA, 17 nt, Artificial Sequence
  Synthetic oligonucleotide: FAS-856
gcccucuccugcccggg

SEQ ID NO: 27794 - RNA, 17 nt, Artificial Sequence
  Synthetic oligonucleotide: FAS-41
uuguguaacauaccugg

SEQ ID NO: 27795 - RNA, 17 nt, Artificial Sequence
  Synthetic oligonucleotide: FAS-857
cucuccugcccgggugg

SEQ ID NO: 27796 - RNA, 17 nt, Artificial Sequence
  Synthetic oligonucleotide: FAS-83
ggacugcacagucaaug

SEQ ID NO: 27797 - RNA, 17 nt, Artificial Sequence
  Synthetic oligonucleotide: FAS-35
ccaagggauuggaauug

SEQ ID NO: 27798 - RNA, 17 nt, Artificial Sequence
  Synthetic oligonucleotide: FAS-92
gcauuuggaagaaaaau

SEQ ID NO: 27799 - RNA, 17 nt, Artificial Sequence
  Synthetic oligonucleotide: FAS-82
gggacugcacagucaau

SEQ ID NO: 27800 - RNA, 17 nt, Artificial Sequence
  Synthetic oligonucleotide: FAS-45
agggcuuauggcagaau

SEQ ID NO: 27801 - RNA, 17 nt, Artificial Sequence
  Synthetic oligonucleotide: FAS-34
caucaacuccaagggau

SEQ ID NO: 27802 - RNA, 17 nt, Artificial Sequence
  Synthetic oligonucleotide: FAS-36
aguugagacucagaacu

SEQ ID NO: 27803 - RNA, 17 nt, Artificial Sequence
  Synthetic oligonucleotide: FAS-361
ugguuuacaucugcacu

SEQ ID NO: 27804 - RNA, 17 nt, Artificial Sequence
  Synthetic oligonucleotide: FAS-354
accuuccucuuugcacu

SEQ ID NO: 27805 - RNA, 17 nt, Artificial Sequence
  Synthetic oligonucleotide: FAS-48
aguugaugucagucacu

SEQ ID NO: 27806 - RNA, 17 nt, Artificial Sequence
  Synthetic oligonucleotide: FAS-357
aaagacuaaaacuuacu

SEQ ID NO: 27807 - RNA, 17 nt, Artificial Sequence
  Synthetic oligonucleotide: FAS-47
ccucaauuccaaucccu

SEQ ID NO: 27808 - RNA, 17 nt, Artificial Sequence
  Synthetic oligonucleotide: FAS-75
cuugcuccuuuuuuccu

SEQ ID NO: 27809 - RNA, 17 nt, Artificial Sequence
  Synthetic oligonucleotide: FAS-79
caggugaaaggaaagcu

SEQ ID NO: 27810 - RNA, 17 nt, Artificial Sequence
  Synthetic oligonucleotide: FAS-851
ugcucaacaaccaugcu

SEQ ID NO: 27811 - RNA, 17 nt, Artificial Sequence
  Synthetic oligonucleotide: FAS-363
ucugcacuugguauucu

SEQ ID NO: 27812 - RNA, 17 nt, Artificial Sequence
  Synthetic oligonucleotide: FAS-93
uguacuccuucccuucu

SEQ ID NO: 27813 - RNA, 17 nt, Artificial Sequence
  Synthetic oligonucleotide: FAS-277
uuccaaacugauuuucu

SEQ ID NO: 27814 - RNA, 17 nt, Artificial Sequence
  Synthetic oligonucleotide: FAS-115
gagggcucaccagaggu

SEQ ID NO: 27815 - RNA, 17 nt, Artificial Sequence
  Synthetic oligonucleotide: FAS-90
ucuacaucuucugcauu

SEQ ID NO: 27816 - RNA, 17 nt, Artificial Sequence
  Synthetic oligonucleotide: FAS-49
guugaugucagucacuu

SEQ ID NO: 27817 - RNA, 17 nt, Artificial Sequence
  Synthetic oligonucleotide: FAS-76
uugcuccuuuuuuccuu

SEQ ID NO: 27818 - RNA, 17 nt, Artificial Sequence
  Synthetic oligonucleotide: FAS-360
gaguuacaaaaaaaguu

SEQ ID NO: 27819 - RNA, 17 nt, Artificial Sequence
  Synthetic oligonucleotide: FAS-366
agccuagaaaaucaguu

SEQ ID NO: 27820 - RNA, 17 nt, Artificial Sequence
  Synthetic oligonucleotide: FAS-50
uugggcauuaacacuuu

SEQ ID NO: 27821 - RNA, 20 nt, Artificial Sequence
  Synthetic oligonucleotide: FAS-67
uucugcauuuggaagaaaaa

SEQ ID NO: 27822 - RNA, 20 nt, Artificial Sequence
  Synthetic oligonucleotide: FAS-74
uucaccugcccaaggaaaaa

SEQ ID NO: 27823 - RNA, 20 nt, Artificial Sequence
  Synthetic oligonucleotide: FAS-330
cuaaaacuuacuuggugcaa

SEQ ID NO: 27824 - RNA, 20 nt, Artificial Sequence
  Synthetic oligonucleotide: FAS-54
uuuuuccuugggcaggugaa

SEQ ID NO: 27825 - RNA, 20 nt, Artificial Sequence
  Synthetic oligonucleotide: FAS-248
uuuuuuucuagaugugaaca

SEQ ID NO: 27826 - RNA, 20 nt, Artificial Sequence
  Synthetic oligonucleotide: FAS-64
agauugugugaugaaggaca

SEQ ID NO: 27827 - RNA, 20 nt, Artificial Sequence
  Synthetic oligonucleotide: FAS-23
uguaacauaccuggaggaca

SEQ ID NO: 27828 - RNA, 20 nt, Artificial Sequence
  Synthetic oligonucleotide: FAS-73
gcuuuccuuucaccugccca

SEQ ID NO: 27829 - RNA, 20 nt, Artificial Sequence
  Synthetic oligonucleotide: FAS-12
agugacugacaucaacucca

SEQ ID NO: 27830 - RNA, 20 nt, Artificial Sequence
  Synthetic oligonucleotide: FAS-5
gaggguccagaugcccagca

SEQ ID NO: 27831 - RNA, 20 nt, Artificial Sequence
  Synthetic oligonucleotide: FAS-71
uacuccuucccuucuuggca

SEQ ID NO: 27832 - RNA, 20 nt, Artificial Sequence
  Synthetic oligonucleotide: FAS-329
acuaaaacuuacuuggugca

SEQ ID NO: 27833 - RNA, 20 nt, Artificial Sequence
  Synthetic oligonucleotide: FAS-249
augugaacauggaaucauca

SEQ ID NO: 27834 - RNA, 20 nt, Artificial Sequence
  Synthetic oligonucleotide: FAS-60
gacugcgugcccugccaaga

SEQ ID NO: 27835 - RNA, 20 nt, Artificial Sequence
  Synthetic oligonucleotide: FAS-696
gccuccacccgggcaggaga

SEQ ID NO: 27836 - RNA, 20 nt, Artificial Sequence
  Synthetic oligonucleotide: FAS-251
aacaccaagugcaaagagga

SEQ ID NO: 27837 - RNA, 20 nt, Artificial Sequence
  Synthetic oligonucleotide: FAS-4
agggcucaccagagguagga

SEQ ID NO: 27838 - RNA, 20 nt, Artificial Sequence
  Synthetic oligonucleotide: FAS-62
cgugcccugccaagaaggga

SEQ ID NO: 27839 - RNA, 20 nt, Artificial Sequence
  Synthetic oligonucleotide: FAS-17
guugagacucagaacuugga

SEQ ID NO: 27840 - RNA, 20 nt, Artificial Sequence
  Synthetic oligonucleotide: FAS-18
uuggaaggccugcaucauga

SEQ ID NO: 27841 - RNA, 20 nt, Artificial Sequence
  Synthetic oligonucleotide: FAS-63
agauguagauugugugauga

SEQ ID NO: 27842 - RNA, 20 nt, Artificial Sequence
  Synthetic oligonucleotide: FAS-56
ggcaggugaaaggaaagcua

SEQ ID NO: 27843 - RNA, 20 nt, Artificial Sequence
  Synthetic oligonucleotide: FAS-24
uaccuggaggacagggcuua

SEQ ID NO: 27844 - RNA, 20 nt, Artificial Sequence
  Synthetic oligonucleotide: FAS-252
ggaagguaauuauuuuuuua

SEQ ID NO: 27845 - RNA, 20 nt, Artificial Sequence
  Synthetic oligonucleotide: FAS-327
acaucuagaaaaaaaaauac

SEQ ID NO: 27846 - RNA, 20 nt, Artificial Sequence
  Synthetic oligonucleotide: FAS-11
ucuucaugcuuuuauuuuac

SEQ ID NO: 27847 - RNA, 20 nt, Artificial Sequence
  Synthetic oligonucleotide: FAS-247
aaguggaaauaaacugcacc

SEQ ID NO: 27848 - RNA, 20 nt, Artificial Sequence
  Synthetic oligonucleotide: FAS-20
gauguuuuguguaacauacc

SEQ ID NO: 27849 - RNA, 20 nt, Artificial Sequence
  Synthetic oligonucleotide: FAS-664
uggugagcccucuccugccc

SEQ ID NO: 27850 - RNA, 20 nt, Artificial Sequence
  Synthetic oligonucleotide: FAS-663
cuggugagcccucuccugcc

SEQ ID NO: 27851 - RNA, 20 nt, Artificial Sequence
  Synthetic oligonucleotide: FAS-19
ugccauaagcccuguccucc

SEQ ID NO: 27852 - RNA, 20 nt, Artificial Sequence
  Synthetic oligonucleotide: FAS-336
gcacuugguauucugggucc

SEQ ID NO: 27853 - RNA, 20 nt, Artificial Sequence
  Synthetic oligonucleotide: FAS-53
ugcuccuuuuuuccuugggc

SEQ ID NO: 27854 - RNA, 20 nt, Artificial Sequence
  Synthetic oligonucleotide: FAS-70
guacuccuucccuucuuggc

SEQ ID NO: 27855 - RNA, 20 nt, Artificial Sequence
  Synthetic oligonucleotide: FAS-26
agaauuggccaucaugaugc

SEQ ID NO: 27856 - RNA, 20 nt, Artificial Sequence
  Synthetic oligonucleotide: FAS-326
cucuuugcacuugguguugc

SEQ ID NO: 27857 - RNA, 20 nt, Artificial Sequence
  Synthetic oligonucleotide: FAS-1
caacaaccaugcugggcauc

SEQ ID NO: 27858 - RNA, 20 nt, Artificial Sequence
  Synthetic oligonucleotide: FAS-2
caucuggacccuccuaccuc

SEQ ID NO: 27859 - RNA, 20 nt, Artificial Sequence
  Synthetic oligonucleotide: FAS-72
ucuuggcagggcacgcaguc

SEQ ID NO: 27860 - RNA, 20 nt, Artificial Sequence
  Synthetic oligonucleotide: FAS-335
ugcacuugguauucuggguc

SEQ ID NO: 27861 - RNA, 20 nt, Artificial Sequence
  Synthetic oligonucleotide: FAS-250
cagcaacaccaagugcaaag

SEQ ID NO: 27862 - RNA, 20 nt, Artificial Sequence
  Synthetic oligonucleotide: FAS-65
ucuuaaaaugcaauugaaag

SEQ ID NO: 27863 - RNA, 20 nt, Artificial Sequence
  Synthetic oligonucleotide: FAS-246
ugauuuucuaggcuuagaag

SEQ ID NO: 27864 - RNA, 20 nt, Artificial Sequence
  Synthetic oligonucleotide: FAS-697
ggcaggagagggcucaccag

SEQ ID NO: 27865 - RNA, 20 nt, Artificial Sequence
  Synthetic oligonucleotide: FAS-695
agccuccacccgggcaggag

SEQ ID NO: 27866 - RNA, 20 nt, Artificial Sequence
  Synthetic oligonucleotide: FAS-3
gagggcucaccagagguagg

SEQ ID NO: 27867 - RNA, 20 nt, Artificial Sequence
  Synthetic oligonucleotide: FAS-21
guuuuguguaacauaccugg

SEQ ID NO: 27868 - RNA, 20 nt, Artificial Sequence
  Synthetic oligonucleotide: FAS-666
gcccucuccugcccgggugg

SEQ ID NO: 27869 - RNA, 20 nt, Artificial Sequence
  Synthetic oligonucleotide: FAS-59
uagggacugcacagucaaug

SEQ ID NO: 27870 - RNA, 20 nt, Artificial Sequence
  Synthetic oligonucleotide: FAS-15
acuccaagggauuggaauug

SEQ ID NO: 27871 - RNA, 20 nt, Artificial Sequence
  Synthetic oligonucleotide: FAS-68
ucugcauuuggaagaaaaau

SEQ ID NO: 27872 - RNA, 20 nt, Artificial Sequence
  Synthetic oligonucleotide: FAS-58
cuagggacugcacagucaau

SEQ ID NO: 27873 - RNA, 20 nt, Artificial Sequence
  Synthetic oligonucleotide: FAS-25
gacagggcuuauggcagaau

SEQ ID NO: 27874 - RNA, 20 nt, Artificial Sequence
  Synthetic oligonucleotide: FAS-14
ugacaucaacuccaagggau

SEQ ID NO: 27875 - RNA, 20 nt, Artificial Sequence
  Synthetic oligonucleotide: FAS-16
uacaguugagacucagaacu

SEQ ID NO: 27876 - RNA, 20 nt, Artificial Sequence
  Synthetic oligonucleotide: FAS-325
auuaccuuccucuuugcacu

SEQ ID NO: 27877 - RNA, 20 nt, Artificial Sequence
  Synthetic oligonucleotide: FAS-328
gagaaagacuaaaacuuacu

SEQ ID NO: 27878 - RNA, 20 nt, Artificial Sequence
  Synthetic oligonucleotide: FAS-27
cuuccucaauuccaaucccu

SEQ ID NO: 27879 - RNA, 20 nt, Artificial Sequence
  Synthetic oligonucleotide: FAS-51
acacuugcuccuuuuuuccu

SEQ ID NO: 27880 - RNA, 20 nt, Artificial Sequence
  Synthetic oligonucleotide: FAS-55
gggcaggugaaaggaaagcu

SEQ ID NO: 27881 - RNA, 20 nt, Artificial Sequence
  Synthetic oligonucleotide: FAS-660
gauugcucaacaaccaugcu

SEQ ID NO: 27882 - RNA, 20 nt, Artificial Sequence
  Synthetic oligonucleotide: FAS-69
cuguguacuccuucccuucu

SEQ ID NO: 27883 - RNA, 20 nt, Artificial Sequence
  Synthetic oligonucleotide: FAS-245
aguuuccaaacugauuuucu

SEQ ID NO: 27884 - RNA, 20 nt, Artificial Sequence
  Synthetic oligonucleotide: FAS-105
ggagagggcucaccagaggu

SEQ ID NO: 27885 - RNA, 20 nt, Artificial Sequence
  Synthetic oligonucleotide: FAS-29
ggaguugaugucagucacuu

SEQ ID NO: 27886 - RNA, 20 nt, Artificial Sequence
  Synthetic oligonucleotide: FAS-52
cacuugcuccuuuuuuccuu

SEQ ID NO: 27887 - RNA, 20 nt, Artificial Sequence
  Synthetic oligonucleotide: FAS-331
guagaguuacaaaaaaaguu

SEQ ID NO: 27888 - RNA, 20 nt, Artificial Sequence
  Synthetic oligonucleotide: FAS-337
cuaagccuagaaaaucaguu

SEQ ID NO: 27889 - RNA, 17 nt, Artificial Sequence
  Synthetic oligonucleotide: FAS-344
uccuagaaagcaaaaaa

SEQ ID NO: 27890 - RNA, 17 nt, Artificial Sequence
  Synthetic oligonucleotide: FAS-304
ggcuuuguucgaaagaa

SEQ ID NO: 27891 - RNA, 17 nt, Artificial Sequence
  Synthetic oligonucleotide: FAS-294
augcagaaagcacagaa

SEQ ID NO: 27892 - RNA, 17 nt, Artificial Sequence
  Synthetic oligonucleotide: FAS-293
ucuuucagugaagagaa

SEQ ID NO: 27893 - RNA, 17 nt, Artificial Sequence
  Synthetic oligonucleotide: FAS-303
acacuaagucaaguuaa

SEQ ID NO: 27894 - RNA, 17 nt, Artificial Sequence
  Synthetic oligonucleotide: FAS-295
cacagaaaggaaaacca

SEQ ID NO: 27895 - RNA, 17 nt, Artificial Sequence
  Synthetic oligonucleotide: FAS-307
ucagacuaucauccuca

SEQ ID NO: 27896 - RNA, 17 nt, Artificial Sequence
  Synthetic oligonucleotide: FAS-306
aauuggcaucaacuuca

SEQ ID NO: 27897 - RNA, 17 nt, Artificial Sequence
  Synthetic oligonucleotide: FAS-301
aauaaauuuaucuggua

SEQ ID NO: 27898 - RNA, 17 nt, Artificial Sequence
  Synthetic oligonucleotide: FAS-285
ccaauguuccaaccuac

SEQ ID NO: 27899 - RNA, 17 nt, Artificial Sequence
  Synthetic oligonucleotide: FAS-345
ccuauuucaauaccuac

SEQ ID NO: 27900 - RNA, 17 nt, Artificial Sequence
  Synthetic oligonucleotide: FAS-302
uauaucaccacuauugc

SEQ ID NO: 27901 - RNA, 17 nt, Artificial Sequence
  Synthetic oligonucleotide: FAS-350
ccaccccaaguuagauc

SEQ ID NO: 27902 - RNA, 17 nt, Artificial Sequence
  Synthetic oligonucleotide: FAS-300
guggcaauaaauuuauc

SEQ ID NO: 27903 - RNA, 17 nt, Artificial Sequence
  Synthetic oligonucleotide: FAS-299
ugcuuucuaggaaacag

SEQ ID NO: 27904 - RNA, 17 nt, Artificial Sequence
  Synthetic oligonucleotide: FAS-343
caugacuccagcaauag

SEQ ID NO: 27905 - RNA, 17 nt, Artificial Sequence
  Synthetic oligonucleotide: FAS-348
uuaccccaaacaauuag

SEQ ID NO: 27906 - RNA, 17 nt, Artificial Sequence
  Synthetic oligonucleotide: FAS-289
ccagaucuaacuugggg

SEQ ID NO: 27907 - RNA, 17 nt, Artificial Sequence
  Synthetic oligonucleotide: FAS-288
gauccagaucuaacuug

SEQ ID NO: 27908 - RNA, 17 nt, Artificial Sequence
  Synthetic oligonucleotide: FAS-339
cacuaguaauguccuug

SEQ ID NO: 27909 - RNA, 17 nt, Artificial Sequence
  Synthetic oligonucleotide: FAS-292
auuccacuaauuguuug

SEQ ID NO: 27910 - RNA, 17 nt, Artificial Sequence
  Synthetic oligonucleotide: FAS-297
ccuguagguauugaaau

SEQ ID NO: 27911 - RNA, 17 nt, Artificial Sequence
  Synthetic oligonucleotide: FAS-349
caaacaauuaguggaau

SEQ ID NO: 27912 - RNA, 17 nt, Artificial Sequence
  Synthetic oligonucleotide: FAS-305
uucaacugcuucguaau

SEQ ID NO: 27913 - RNA, 17 nt, Artificial Sequence
  Synthetic oligonucleotide: FAS-353
ccuguagguuggaacau

SEQ ID NO: 27914 - RNA, 17 nt, Artificial Sequence
  Synthetic oligonucleotide: FAS-340
ugcaagaguacaaagau

SEQ ID NO: 27915 - RNA, 17 nt, Artificial Sequence
  Synthetic oligonucleotide: FAS-286
aggauccagaucuaacu

SEQ ID NO: 27916 - RNA, 17 nt, Artificial Sequence
  Synthetic oligonucleotide: FAS-347
gagauucaugagaaccu

SEQ ID NO: 27917 - RNA, 17 nt, Artificial Sequence
  Synthetic oligonucleotide: FAS-308
aaaugaaauccaaagcu

SEQ ID NO: 27918 - RNA, 17 nt, Artificial Sequence
  Synthetic oligonucleotide: FAS-341
ucuguucugcugugucu

SEQ ID NO: 27919 - RNA, 17 nt, Artificial Sequence
  Synthetic oligonucleotide: FAS-298
uccauuuuuugcuuucu

SEQ ID NO: 27920 - RNA, 17 nt, Artificial Sequence
  Synthetic oligonucleotide: FAS-346
ccuacaggauuuaaagu

SEQ ID NO: 27921 - RNA, 17 nt, Artificial Sequence
  Synthetic oligonucleotide: FAS-352
aucuggauccuguaggu

SEQ ID NO: 27922 - RNA, 17 nt, Artificial Sequence
  Synthetic oligonucleotide: FAS-296
ccaacuuuaaauccugu

SEQ ID NO: 27923 - RNA, 17 nt, Artificial Sequence
  Synthetic oligonucleotide: FAS-351
uuagaucuggauccugu

SEQ ID NO: 27924 - RNA, 17 nt, Artificial Sequence
  Synthetic oligonucleotide: FAS-287
ggauccagaucuaacuu

SEQ ID NO: 27925 - RNA, 17 nt, Artificial Sequence
  Synthetic oligonucleotide: FAS-338
cacucuagaccaagcuu

SEQ ID NO: 27926 - RNA, 17 nt, Artificial Sequence
  Synthetic oligonucleotide: FAS-290
caauuccacuaauuguu

SEQ ID NO: 27927 - RNA, 17 nt, Artificial Sequence
  Synthetic oligonucleotide: FAS-342
cuugaucucaucuauuu

SEQ ID NO: 27928 - RNA, 17 nt, Artificial Sequence
  Synthetic oligonucleotide: FAS-291
aauuccacuaauuguuu

SEQ ID NO: 27929 - RNA, 20 nt, Artificial Sequence
  Synthetic oligonucleotide: FAS-315
guuuccuagaaagcaaaaaa

SEQ ID NO: 27930 - RNA, 20 nt, Artificial Sequence
  Synthetic oligonucleotide: FAS-272
aaaggcuuuguucgaaagaa

SEQ ID NO: 27931 - RNA, 20 nt, Artificial Sequence
  Synthetic oligonucleotide: FAS-262
aacaugcagaaagcacagaa

SEQ ID NO: 27932 - RNA, 20 nt, Artificial Sequence
  Synthetic oligonucleotide: FAS-261
uguucuuucagugaagagaa

SEQ ID NO: 27933 - RNA, 20 nt, Artificial Sequence
  Synthetic oligonucleotide: FAS-271
augacacuaagucaaguuaa

SEQ ID NO: 27934 - RNA, 20 nt, Artificial Sequence
  Synthetic oligonucleotide: FAS-263
aagcacagaaaggaaaacca

SEQ ID NO: 27935 - RNA, 20 nt, Artificial Sequence
  Synthetic oligonucleotide: FAS-275
aauucagacuaucauccuca

SEQ ID NO: 27936 - RNA, 20 nt, Artificial Sequence
  Synthetic oligonucleotide: FAS-274
cguaauuggcaucaacuuca

SEQ ID NO: 27937 - RNA, 20 nt, Artificial Sequence
  Synthetic oligonucleotide: FAS-269
ggcaauaaauuuaucuggua

SEQ ID NO: 27938 - RNA, 20 nt, Artificial Sequence
  Synthetic oligonucleotide: FAS-253
uguccaauguuccaaccuac

SEQ ID NO: 27939 - RNA, 20 nt, Artificial Sequence
  Synthetic oligonucleotide: FAS-316
auaccuauuucaauaccuac

SEQ ID NO: 27940 - RNA, 20 nt, Artificial Sequence
  Synthetic oligonucleotide: FAS-270
aaauauaucaccacuauugc

SEQ ID NO: 27941 - RNA, 20 nt, Artificial Sequence
  Synthetic oligonucleotide: FAS-321
aagccaccccaaguuagauc

SEQ ID NO: 27942 - RNA, 20 nt, Artificial Sequence
  Synthetic oligonucleotide: FAS-268
acaguggcaauaaauuuauc

SEQ ID NO: 27943 - RNA, 20 nt, Artificial Sequence
  Synthetic oligonucleotide: FAS-267
uuuugcuuucuaggaaacag

SEQ ID NO: 27944 - RNA, 20 nt, Artificial Sequence
  Synthetic oligonucleotide: FAS-314
ugucaugacuccagcaauag

SEQ ID NO: 27945 - RNA, 20 nt, Artificial Sequence
  Synthetic oligonucleotide: FAS-319
aacuuaccccaaacaauuag

SEQ ID NO: 27946 - RNA, 20 nt, Artificial Sequence
  Synthetic oligonucleotide: FAS-257
gauccagaucuaacuugggg

SEQ ID NO: 27947 - RNA, 20 nt, Artificial Sequence
  Synthetic oligonucleotide: FAS-256
caggauccagaucuaacuug

SEQ ID NO: 27948 - RNA, 20 nt, Artificial Sequence
  Synthetic oligonucleotide: FAS-310
agucacuaguaauguccuug

SEQ ID NO: 27949 - RNA, 20 nt, Artificial Sequence
  Synthetic oligonucleotide: FAS-260
ccaauuccacuaauuguuug

SEQ ID NO: 27950 - RNA, 20 nt, Artificial Sequence
  Synthetic oligonucleotide: FAS-265
aauccuguagguauugaaau

SEQ ID NO: 27951 - RNA, 20 nt, Artificial Sequence
  Synthetic oligonucleotide: FAS-320
ccccaaacaauuaguggaau

SEQ ID NO: 27952 - RNA, 20 nt, Artificial Sequence
  Synthetic oligonucleotide: FAS-273
aaguucaacugcuucguaau

SEQ ID NO: 27953 - RNA, 20 nt, Artificial Sequence
  Synthetic oligonucleotide: FAS-324
gauccuguagguuggaacau

SEQ ID NO: 27954 - RNA, 20 nt, Artificial Sequence
  Synthetic oligonucleotide: FAS-311
cucugcaagaguacaaagau

SEQ ID NO: 27955 - RNA, 20 nt, Artificial Sequence
  Synthetic oligonucleotide: FAS-254
uacaggauccagaucuaacu

SEQ ID NO: 27956 - RNA, 20 nt, Artificial Sequence
  Synthetic oligonucleotide: FAS-318
uuggagauucaugagaaccu

SEQ ID NO: 27957 - RNA, 20 nt, Artificial Sequence
  Synthetic oligonucleotide: FAS-276
cagaaaugaaauccaaagcu

SEQ ID NO: 27958 - RNA, 20 nt, Artificial Sequence
  Synthetic oligonucleotide: FAS-312
cuuucuguucugcugugucu

SEQ ID NO: 27959 - RNA, 20 nt, Artificial Sequence
  Synthetic oligonucleotide: FAS-266
gcuuccauuuuuugcuuucu

SEQ ID NO: 27960 - RNA, 20 nt, Artificial Sequence
  Synthetic oligonucleotide: FAS-317
auaccuacaggauuuaaagu

SEQ ID NO: 27961 - RNA, 20 nt, Artificial Sequence
  Synthetic oligonucleotide: FAS-323
uagaucuggauccuguaggu

SEQ ID NO: 27962 - RNA, 20 nt, Artificial Sequence
  Synthetic oligonucleotide: FAS-264
ucuccaacuuuaaauccugu

SEQ ID NO: 27963 - RNA, 20 nt, Artificial Sequence
  Synthetic oligonucleotide: FAS-322
aaguuagaucuggauccugu

SEQ ID NO: 27964 - RNA, 20 nt, Artificial Sequence
  Synthetic oligonucleotide: FAS-255
acaggauccagaucuaacuu

SEQ ID NO: 27965 - RNA, 20 nt, Artificial Sequence
  Synthetic oligonucleotide: FAS-309
uuucacucuagaccaagcuu

SEQ ID NO: 27966 - RNA, 20 nt, Artificial Sequence
  Synthetic oligonucleotide: FAS-258
ugccaauuccacuaauuguu

SEQ ID NO: 27967 - RNA, 20 nt, Artificial Sequence
  Synthetic oligonucleotide: FAS-313
auucuugaucucaucuauuu

SEQ ID NO: 27968 - RNA, 20 nt, Artificial Sequence
  Synthetic oligonucleotide: FAS-259
gccaauuccacuaauuguuu

SEQ ID NO: 27969 - RNA, 21 nt, Artificial Sequence
  Synthetic oligonucleotide: FAS-2121
ccuguaaaauaaaagcaugaa

SEQ ID NO: 27970 - RNA, 22 nt, Artificial Sequence
  Synthetic oligonucleotide: FAS-2122
accuguaaaauaaaagcaugaa

SEQ ID NO: 27971 - RNA, 23 nt, Artificial Sequence
  Synthetic oligonucleotide: FAS-2123
aaccuguaaaauaaaagcaugaa

SEQ ID NO: 27972 - RNA, 24 nt, Artificial Sequence
  Synthetic oligonucleotide: FAS-2124
gaaccuguaaaauaaaagcaugaa

SEQ ID NO: 27973 - RNA, 21 nt, Artificial Sequence
  Synthetic oligonucleotide: FAS-2125
agacuaaaacuuacuuggugc

SEQ ID NO: 27974 - RNA, 22 nt, Artificial Sequence
  Synthetic oligonucleotide: FAS-2126
aagacuaaaacuuacuuggugc

SEQ ID NO: 27975 - RNA, 23 nt, Artificial Sequence
  Synthetic oligonucleotide: FAS-2127
aaagacuaaaacuuacuuggugc

SEQ ID NO: 27976 - RNA, 24 nt, Artificial Sequence
  Synthetic oligonucleotide: FAS-2128
gaaagacuaaaacuuacuuggugc

SEQ ID NO: 27977 - RNA, 21 nt, Artificial Sequence
  Synthetic oligonucleotide: FAS-2129
gagagggcucaccagagguag

SEQ ID NO: 27978 - RNA, 22 nt, Artificial Sequence
  Synthetic oligonucleotide: FAS-2130
ggagagggcucaccagagguag

SEQ ID NO: 27979 - RNA, 23 nt, Artificial Sequence
  Synthetic oligonucleotide: FAS-2131
aggagagggcucaccagagguag

SEQ ID NO: 27980 - RNA, 24 nt, Artificial Sequence
  Synthetic oligonucleotide: FAS-2132
caggagagggcucaccagagguag

SEQ ID NO: 27981 - RNA, 18 nt, Artificial Sequence
  Synthetic oligonucleotide: FAS-2133
uugcacuugguguugcug

SEQ ID NO: 27982 - RNA, 19 nt, Artificial Sequence
  Synthetic oligonucleotide: FAS-2134
uuugcacuugguguugcug

SEQ ID NO: 27983 - RNA, 20 nt, Artificial Sequence
  Synthetic oligonucleotide: FAS-520
cuuugcacuugguguugcug

SEQ ID NO: 27984 - RNA, 21 nt, Artificial Sequence
  Synthetic oligonucleotide: FAS-2135
ucuuugcacuugguguugcug

SEQ ID NO: 27985 - RNA, 22 nt, Artificial Sequence
  Synthetic oligonucleotide: FAS-2136
cucuuugcacuugguguugcug

SEQ ID NO: 27986 - RNA, 23 nt, Artificial Sequence
  Synthetic oligonucleotide: FAS-2137
ccucuuugcacuugguguugcug

SEQ ID NO: 27987 - RNA, 24 nt, Artificial Sequence
  Synthetic oligonucleotide: FAS-2138
uccucuuugcacuugguguugcug

SEQ ID NO: 27988 - RNA, 21 nt, Artificial Sequence
  Synthetic oligonucleotide: FAS-2139
ucuuccucaauuccaaucccu

SEQ ID NO: 27989 - RNA, 22 nt, Artificial Sequence
  Synthetic oligonucleotide: FAS-2140
gucuuccucaauuccaaucccu

SEQ ID NO: 27990 - RNA, 23 nt, Artificial Sequence
  Synthetic oligonucleotide: FAS-2141
agucuuccucaauuccaaucccu

SEQ ID NO: 27991 - RNA, 24 nt, Artificial Sequence
  Synthetic oligonucleotide: FAS-2142
cagucuuccucaauuccaaucccu

SEQ ID NO: 27992 - RNA, 21 nt, Artificial Sequence
  Synthetic oligonucleotide: FAS-2143
ucugcacuugguauucugggu

SEQ ID NO: 27993 - RNA, 22 nt, Artificial Sequence
  Synthetic oligonucleotide: FAS-2144
aucugcacuugguauucugggu

SEQ ID NO: 27994 - RNA, 23 nt, Artificial Sequence
  Synthetic oligonucleotide: FAS-2145
caucugcacuugguauucugggu

SEQ ID NO: 27995 - RNA, 24 nt, Artificial Sequence
  Synthetic oligonucleotide: FAS-2146
acaucugcacuugguauucugggu

SEQ ID NO: 27996 - RNA, 21 nt, Artificial Sequence
  Synthetic oligonucleotide: FAS-2147
augaugcaggccuuccaaguu

SEQ ID NO: 27997 - RNA, 22 nt, Artificial Sequence
  Synthetic oligonucleotide: FAS-2148
caugaugcaggccuuccaaguu

SEQ ID NO: 27998 - RNA, 23 nt, Artificial Sequence
  Synthetic oligonucleotide: FAS-2149
ucaugaugcaggccuuccaaguu

SEQ ID NO: 27999 - RNA, 24 nt, Artificial Sequence
  Synthetic oligonucleotide: FAS-2150
aucaugaugcaggccuuccaaguu

SEQ ID NO: 28000 - RNA, 18 nt, Artificial Sequence
  Synthetic oligonucleotide: FAS-2151
ugacugacaucaacucca

SEQ ID NO: 28001 - RNA, 19 nt, Artificial Sequence
  Synthetic oligonucleotide: FAS-2152
gugacugacaucaacucca

SEQ ID NO: 28002 - RNA, 20 nt, Artificial Sequence
  Synthetic oligonucleotide: FAS-12
agugacugacaucaacucca

SEQ ID NO: 28003 - RNA, 21 nt, Artificial Sequence
  Synthetic oligonucleotide: FAS-2153
aagugacugacaucaacucca

SEQ ID NO: 28004 - RNA, 22 nt, Artificial Sequence
  Synthetic oligonucleotide: FAS-2154
caagugacugacaucaacucca

SEQ ID NO: 28005 - RNA, 23 nt, Artificial Sequence
  Synthetic oligonucleotide: FAS-2155
ccaagugacugacaucaacucca

SEQ ID NO: 28006 - RNA, 24 nt, Artificial Sequence
  Synthetic oligonucleotide: FAS-2156
cccaagugacugacaucaacucca

SEQ ID NO: 28007 - RNA, 21 nt, Artificial Sequence
  Synthetic oligonucleotide: FAS-2157
gaugugaacauggaaucauca

SEQ ID NO: 28008 - RNA, 22 nt, Artificial Sequence
  Synthetic oligonucleotide: FAS-2158
agaugugaacauggaaucauca

SEQ ID NO: 28009 - RNA, 23 nt, Artificial Sequence
  Synthetic oligonucleotide: FAS-2159
uagaugugaacauggaaucauca

SEQ ID NO: 28010 - RNA, 24 nt, Artificial Sequence
  Synthetic oligonucleotide: FAS-2160
cuagaugugaacauggaaucauca

SEQ ID NO: 28011 - RNA, 21 nt, Artificial Sequence
  Synthetic oligonucleotide: FAS-2161
gcgugcccugccaagaaggga

SEQ ID NO: 28012 - RNA, 22 nt, Artificial Sequence
  Synthetic oligonucleotide: FAS-2162
ugcgugcccugccaagaaggga

SEQ ID NO: 28013 - RNA, 23 nt, Artificial Sequence
  Synthetic oligonucleotide: FAS-2163
cugcgugcccugccaagaaggga

SEQ ID NO: 28014 - RNA, 24 nt, Artificial Sequence
  Synthetic oligonucleotide: FAS-2164
acugcgugcccugccaagaaggga

SEQ ID NO: 28015 - RNA, 21 nt, Artificial Sequence
  Synthetic oligonucleotide: FAS-2165
gaaauaaacugcacccggacc

SEQ ID NO: 28016 - RNA, 22 nt, Artificial Sequence
  Synthetic oligonucleotide: FAS-2166
ggaaauaaacugcacccggacc

SEQ ID NO: 28017 - RNA, 23 nt, Artificial Sequence
  Synthetic oligonucleotide: FAS-2167
uggaaauaaacugcacccggacc

SEQ ID NO: 28018 - RNA, 24 nt, Artificial Sequence
  Synthetic oligonucleotide: FAS-2168
guggaaauaaacugcacccggacc

SEQ ID NO: 28019 - RNA, 21 nt, Artificial Sequence
  Synthetic oligonucleotide: FAS-2169
cucuggugagcccucuccugc

SEQ ID NO: 28020 - RNA, 22 nt, Artificial Sequence
  Synthetic oligonucleotide: FAS-2170
ccucuggugagcccucuccugc

SEQ ID NO: 28021 - RNA, 23 nt, Artificial Sequence
  Synthetic oligonucleotide: FAS-2171
accucuggugagcccucuccugc

SEQ ID NO: 28022 - RNA, 24 nt, Artificial Sequence
  Synthetic oligonucleotide: FAS-2172
uaccucuggugagcccucuccugc

SEQ ID NO: 28023 - RNA, 21 nt, Artificial Sequence
  Synthetic oligonucleotide: FAS-2173
gcuagggacugcacagucaau

SEQ ID NO: 28024 - RNA, 22 nt, Artificial Sequence
  Synthetic oligonucleotide: FAS-2174
agcuagggacugcacagucaau

SEQ ID NO: 28025 - RNA, 23 nt, Artificial Sequence
  Synthetic oligonucleotide: FAS-2175
aagcuagggacugcacagucaau

SEQ ID NO: 28026 - RNA, 24 nt, Artificial Sequence
  Synthetic oligonucleotide: FAS-2176
aaagcuagggacugcacagucaau

SEQ ID NO: 28027 - RNA, 21 nt, Artificial Sequence
  Synthetic oligonucleotide: FAS-2177
cugacaucaacuccaagggau

SEQ ID NO: 28028 - RNA, 22 nt, Artificial Sequence
  Synthetic oligonucleotide: FAS-2178
acugacaucaacuccaagggau

SEQ ID NO: 28029 - RNA, 23 nt, Artificial Sequence
  Synthetic oligonucleotide: FAS-2179
gacugacaucaacuccaagggau

SEQ ID NO: 28030 - RNA, 24 nt, Artificial Sequence
  Synthetic oligonucleotide: FAS-2180
ugacugacaucaacuccaagggau

SEQ ID NO: 28031 - RNA, 21 nt, Artificial Sequence
  Synthetic oligonucleotide: FAS-2181
uugugugaugaaggacauggu

SEQ ID NO: 28032 - RNA, 22 nt, Artificial Sequence
  Synthetic oligonucleotide: FAS-2182
auugugugaugaaggacauggu

SEQ ID NO: 28033 - RNA, 23 nt, Artificial Sequence
  Synthetic oligonucleotide: FAS-2183
gauugugugaugaaggacauggu

SEQ ID NO: 28034 - RNA, 24 nt, Artificial Sequence
  Synthetic oligonucleotide: FAS-2184
agauugugugaugaaggacauggu

SEQ ID NO: 28035 - RNA, 18 nt, Artificial Sequence
  Synthetic oligonucleotide: FAS-2185
guaaaauaaaagcaugaa

SEQ ID NO: 28036 - RNA, 19 nt, Artificial Sequence
  Synthetic oligonucleotide: FAS-2186
uguaaaauaaaagcaugaa

SEQ ID NO: 28037 - RNA, 20 nt, Artificial Sequence
  Synthetic oligonucleotide: FAS-160
cuguaaaauaaaagcaugaa

SEQ ID NO: 28038 - RNA, 18 nt, Artificial Sequence
  Synthetic oligonucleotide: FAS-2187
cuaaaacuuacuuggugc

SEQ ID NO: 28039 - RNA, 19 nt, Artificial Sequence
  Synthetic oligonucleotide: FAS-2188
acuaaaacuuacuuggugc

SEQ ID NO: 28040 - RNA, 20 nt, Artificial Sequence
  Synthetic oligonucleotide: FAS-525
gacuaaaacuuacuuggugc

SEQ ID NO: 28041 - RNA, 18 nt, Artificial Sequence
  Synthetic oligonucleotide: FAS-2189
cacaguguucacauacag

SEQ ID NO: 28042 - RNA, 19 nt, Artificial Sequence
  Synthetic oligonucleotide: FAS-2190
ucacaguguucacauacag

SEQ ID NO: 28043 - RNA, 20 nt, Artificial Sequence
  Synthetic oligonucleotide: FAS-526
gucacaguguucacauacag

SEQ ID NO: 28044 - RNA, 21 nt, Artificial Sequence
  Synthetic oligonucleotide: FAS-2191
ggucacaguguucacauacag

SEQ ID NO: 28045 - RNA, 22 nt, Artificial Sequence
  Synthetic oligonucleotide: FAS-2192
gggucacaguguucacauacag

SEQ ID NO: 28046 - RNA, 23 nt, Artificial Sequence
  Synthetic oligonucleotide: FAS-2193
agggucacaguguucacauacag

SEQ ID NO: 28047 - RNA, 24 nt, Artificial Sequence
  Synthetic oligonucleotide: FAS-2194
aagggucacaguguucacauacag

SEQ ID NO: 28048 - RNA, 18 nt, Artificial Sequence
  Synthetic oligonucleotide: FAS-2195
agggcucaccagagguag

SEQ ID NO: 28049 - RNA, 19 nt, Artificial Sequence
  Synthetic oligonucleotide: FAS-2196
gagggcucaccagagguag

SEQ ID NO: 28050 - RNA, 20 nt, Artificial Sequence
  Synthetic oligonucleotide: FAS-106
agagggcucaccagagguag

SEQ ID NO: 28051 - RNA, 18 nt, Artificial Sequence
  Synthetic oligonucleotide: FAS-2197
ggaggacagggcuuaugg

SEQ ID NO: 28052 - RNA, 19 nt, Artificial Sequence
  Synthetic oligonucleotide: FAS-2198
uggaggacagggcuuaugg

SEQ ID NO: 28053 - RNA, 20 nt, Artificial Sequence
  Synthetic oligonucleotide: FAS-151
cuggaggacagggcuuaugg

SEQ ID NO: 28054 - RNA, 21 nt, Artificial Sequence
  Synthetic oligonucleotide: FAS-2199
ccuggaggacagggcuuaugg

SEQ ID NO: 28055 - RNA, 22 nt, Artificial Sequence
  Synthetic oligonucleotide: FAS-2200
accuggaggacagggcuuaugg

SEQ ID NO: 28056 - RNA, 23 nt, Artificial Sequence
  Synthetic oligonucleotide: FAS-2201
uaccuggaggacagggcuuaugg

SEQ ID NO: 28057 - RNA, 24 nt, Artificial Sequence
  Synthetic oligonucleotide: FAS-2202
auaccuggaggacagggcuuaugg

SEQ ID NO: 28058 - RNA, 18 nt, Artificial Sequence
  Synthetic oligonucleotide: FAS-2203
uccucaauuccaaucccu

SEQ ID NO: 28059 - RNA, 19 nt, Artificial Sequence
  Synthetic oligonucleotide: FAS-2204
uuccucaauuccaaucccu

SEQ ID NO: 28060 - RNA, 20 nt, Artificial Sequence
  Synthetic oligonucleotide: FAS-27
cuuccucaauuccaaucccu

SEQ ID NO: 28061 - RNA, 18 nt, Artificial Sequence
  Synthetic oligonucleotide: FAS-2205
gcacuugguauucugggu

SEQ ID NO: 28062 - RNA, 19 nt, Artificial Sequence
  Synthetic oligonucleotide: FAS-2206
ugcacuugguauucugggu

SEQ ID NO: 28063 - RNA, 20 nt, Artificial Sequence
  Synthetic oligonucleotide: FAS-528
cugcacuugguauucugggu

SEQ ID NO: 28064 - RNA, 18 nt, Artificial Sequence
  Synthetic oligonucleotide: FAS-2207
acaucugcacuugguauu

SEQ ID NO: 28065 - RNA, 19 nt, Artificial Sequence
  Synthetic oligonucleotide: FAS-2208
uacaucugcacuugguauu

SEQ ID NO: 28066 - RNA, 20 nt, Artificial Sequence
  Synthetic oligonucleotide: FAS-527
uuacaucugcacuugguauu

SEQ ID NO: 28067 - RNA, 21 nt, Artificial Sequence
  Synthetic oligonucleotide: FAS-2209
uuuacaucugcacuugguauu

SEQ ID NO: 28068 - RNA, 22 nt, Artificial Sequence
  Synthetic oligonucleotide: FAS-2210
guuuacaucugcacuugguauu

SEQ ID NO: 28069 - RNA, 23 nt, Artificial Sequence
  Synthetic oligonucleotide: FAS-2211
gguuuacaucugcacuugguauu

SEQ ID NO: 28070 - RNA, 24 nt, Artificial Sequence
  Synthetic oligonucleotide: FAS-2212
ugguuuacaucugcacuugguauu

SEQ ID NO: 28071 - RNA, 18 nt, Artificial Sequence
  Synthetic oligonucleotide: FAS-2213
augcaggccuuccaaguu

SEQ ID NO: 28072 - RNA, 19 nt, Artificial Sequence
  Synthetic oligonucleotide: FAS-2214
gaugcaggccuuccaaguu

SEQ ID NO: 28073 - RNA, 20 nt, Artificial Sequence
  Synthetic oligonucleotide: FAS-152
ugaugcaggccuuccaaguu

SEQ ID NO: 28074 - RNA, 18 nt, Artificial Sequence
  Synthetic oligonucleotide: FAS-2215
uuuuucuagaugugaaca

SEQ ID NO: 28075 - RNA, 19 nt, Artificial Sequence
  Synthetic oligonucleotide: FAS-2216
uuuuuucuagaugugaaca

SEQ ID NO: 28076 - RNA, 20 nt, Artificial Sequence
  Synthetic oligonucleotide: FAS-248
uuuuuuucuagaugugaaca

SEQ ID NO: 28077 - RNA, 21 nt, Artificial Sequence
  Synthetic oligonucleotide: FAS-2217
uuuuuuuucuagaugugaaca

SEQ ID NO: 28078 - RNA, 22 nt, Artificial Sequence
  Synthetic oligonucleotide: FAS-2218
uuuuuuuuucuagaugugaaca

SEQ ID NO: 28079 - RNA, 23 nt, Artificial Sequence
  Synthetic oligonucleotide: FAS-2219
auuuuuuuuucuagaugugaaca

SEQ ID NO: 28080 - RNA, 24 nt, Artificial Sequence
  Synthetic oligonucleotide: FAS-2220
uauuuuuuuuucuagaugugaaca

SEQ ID NO: 28081 - RNA, 18 nt, Artificial Sequence
  Synthetic oligonucleotide: FAS-2221
gugaacauggaaucauca

SEQ ID NO: 28082 - RNA, 19 nt, Artificial Sequence
  Synthetic oligonucleotide: FAS-2222
ugugaacauggaaucauca

SEQ ID NO: 28083 - RNA, 20 nt, Artificial Sequence
  Synthetic oligonucleotide: FAS-249
augugaacauggaaucauca

SEQ ID NO: 28084 - RNA, 18 nt, Artificial Sequence
  Synthetic oligonucleotide: FAS-2223
ugcccugccaagaaggga

SEQ ID NO: 28085 - RNA, 19 nt, Artificial Sequence
  Synthetic oligonucleotide: FAS-2224
gugcccugccaagaaggga

SEQ ID NO: 28086 - RNA, 20 nt, Artificial Sequence
  Synthetic oligonucleotide: FAS-62
cgugcccugccaagaaggga

SEQ ID NO: 28087 - RNA, 18 nt, Artificial Sequence
  Synthetic oligonucleotide: FAS-2225
auaaacugcacccggacc

SEQ ID NO: 28088 - RNA, 19 nt, Artificial Sequence
  Synthetic oligonucleotide: FAS-2226
aauaaacugcacccggacc

SEQ ID NO: 28089 - RNA, 20 nt, Artificial Sequence
  Synthetic oligonucleotide: FAS-371
aaauaaacugcacccggacc

SEQ ID NO: 28090 - RNA, 18 nt, Artificial Sequence
  Synthetic oligonucleotide: FAS-2227
uggugagcccucuccugc

SEQ ID NO: 28091 - RNA, 19 nt, Artificial Sequence
  Synthetic oligonucleotide: FAS-2228
cuggugagcccucuccugc

SEQ ID NO: 28092 - RNA, 20 nt, Artificial Sequence
  Synthetic oligonucleotide: FAS-1051
ucuggugagcccucuccugc

SEQ ID NO: 28093 - RNA, 18 nt, Artificial Sequence
  Synthetic oligonucleotide: FAS-2229
agggacugcacagucaau

SEQ ID NO: 28094 - RNA, 19 nt, Artificial Sequence
  Synthetic oligonucleotide: FAS-2230
uagggacugcacagucaau

SEQ ID NO: 28095 - RNA, 20 nt, Artificial Sequence
  Synthetic oligonucleotide: FAS-58
cuagggacugcacagucaau

SEQ ID NO: 28096 - RNA, 18 nt, Artificial Sequence
  Synthetic oligonucleotide: FAS-2231
acaucaacuccaagggau

SEQ ID NO: 28097 - RNA, 19 nt, Artificial Sequence
  Synthetic oligonucleotide: FAS-2232
gacaucaacuccaagggau

SEQ ID NO: 28098 - RNA, 20 nt, Artificial Sequence
  Synthetic oligonucleotide: FAS-14
ugacaucaacuccaagggau

SEQ ID NO: 28099 - RNA, 18 nt, Artificial Sequence
  Synthetic oligonucleotide: FAS-2233
ugugaugaaggacauggu

SEQ ID NO: 28100 - RNA, 19 nt, Artificial Sequence
  Synthetic oligonucleotide: FAS-2234
gugugaugaaggacauggu

SEQ ID NO: 28101 - RNA, 20 nt, Artificial Sequence
  Synthetic oligonucleotide: FAS-194
ugugugaugaaggacauggu

SEQ ID NO: 28102 - RNA, 18 nt, Artificial Sequence
  Synthetic oligonucleotide: FAS-2235
caccugcccaaggaaaaa

SEQ ID NO: 28103 - RNA, 19 nt, Artificial Sequence
  Synthetic oligonucleotide: FAS-2236
ucaccugcccaaggaaaaa

SEQ ID NO: 28104 - RNA, 20 nt, Artificial Sequence
  Synthetic oligonucleotide: FAS-74
uucaccugcccaaggaaaaa

SEQ ID NO: 28105 - RNA, 21 nt, Artificial Sequence
  Synthetic oligonucleotide: FAS-2237
uuucaccugcccaaggaaaaa

SEQ ID NO: 28106 - RNA, 22 nt, Artificial Sequence
  Synthetic oligonucleotide: FAS-2238
cuuucaccugcccaaggaaaaa

SEQ ID NO: 28107 - RNA, 23 nt, Artificial Sequence
  Synthetic oligonucleotide: FAS-2239
ccuuucaccugcccaaggaaaaa

SEQ ID NO: 28108 - RNA, 24 nt, Artificial Sequence
  Synthetic oligonucleotide: FAS-2240
uccuuucaccugcccaaggaaaaa

SEQ ID NO: 28109 - RNA, 18 nt, Artificial Sequence
  Synthetic oligonucleotide: FAS-2241
ucugcauuuggaagaaaa

SEQ ID NO: 28110 - RNA, 19 nt, Artificial Sequence
  Synthetic oligonucleotide: FAS-2242
uucugcauuuggaagaaaa

SEQ ID NO: 28111 - RNA, 20 nt, Artificial Sequence
  Synthetic oligonucleotide: FAS-222
cuucugcauuuggaagaaaa

SEQ ID NO: 28112 - RNA, 21 nt, Artificial Sequence
  Synthetic oligonucleotide: FAS-2243
ucuucugcauuuggaagaaaa

SEQ ID NO: 28113 - RNA, 22 nt, Artificial Sequence
  Synthetic oligonucleotide: FAS-2244
aucuucugcauuuggaagaaaa

SEQ ID NO: 28114 - RNA, 23 nt, Artificial Sequence
  Synthetic oligonucleotide: FAS-2245
caucuucugcauuuggaagaaaa

SEQ ID NO: 28115 - RNA, 24 nt, Artificial Sequence
  Synthetic oligonucleotide: FAS-2246
acaucuucugcauuuggaagaaaa

SEQ ID NO: 28116 - RNA, 18 nt, Artificial Sequence
  Synthetic oligonucleotide: FAS-2247
ucaccugcccaaggaaaa

SEQ ID NO: 28117 - RNA, 19 nt, Artificial Sequence
  Synthetic oligonucleotide: FAS-2248
uucaccugcccaaggaaaa

SEQ ID NO: 28118 - RNA, 20 nt, Artificial Sequence
  Synthetic oligonucleotide: FAS-226
uuucaccugcccaaggaaaa

SEQ ID NO: 28119 - RNA, 21 nt, Artificial Sequence
  Synthetic oligonucleotide: FAS-2249
cuuucaccugcccaaggaaaa

SEQ ID NO: 28120 - RNA, 22 nt, Artificial Sequence
  Synthetic oligonucleotide: FAS-2250
ccuuucaccugcccaaggaaaa

SEQ ID NO: 28121 - RNA, 23 nt, Artificial Sequence
  Synthetic oligonucleotide: FAS-2251
uccuuucaccugcccaaggaaaa

SEQ ID NO: 28122 - RNA, 24 nt, Artificial Sequence
  Synthetic oligonucleotide: FAS-2252
uuccuuucaccugcccaaggaaaa

SEQ ID NO: 28123 - RNA, 18 nt, Artificial Sequence
  Synthetic oligonucleotide: FAS-2253
guugagcaauccuccgaa

SEQ ID NO: 28124 - RNA, 19 nt, Artificial Sequence
  Synthetic oligonucleotide: FAS-2254
uguugagcaauccuccgaa

SEQ ID NO: 28125 - RNA, 20 nt, Artificial Sequence
  Synthetic oligonucleotide: FAS-1172
uuguugagcaauccuccgaa

SEQ ID NO: 28126 - RNA, 21 nt, Artificial Sequence
  Synthetic oligonucleotide: FAS-2255
guuguugagcaauccuccgaa

SEQ ID NO: 28127 - RNA, 22 nt, Artificial Sequence
  Synthetic oligonucleotide: FAS-2256
gguuguugagcaauccuccgaa

SEQ ID NO: 28128 - RNA, 23 nt, Artificial Sequence
  Synthetic oligonucleotide: FAS-2257
ugguuguugagcaauccuccgaa

SEQ ID NO: 28129 - RNA, 24 nt, Artificial Sequence
  Synthetic oligonucleotide: FAS-2258
augguuguugagcaauccuccgaa

SEQ ID NO: 28130 - RNA, 18 nt, Artificial Sequence
  Synthetic oligonucleotide: FAS-2259
uuuccuuucaccugccca

SEQ ID NO: 28131 - RNA, 19 nt, Artificial Sequence
  Synthetic oligonucleotide: FAS-2260
cuuuccuuucaccugccca

SEQ ID NO: 28132 - RNA, 20 nt, Artificial Sequence
  Synthetic oligonucleotide: FAS-73
gcuuuccuuucaccugccca

SEQ ID NO: 28133 - RNA, 21 nt, Artificial Sequence
  Synthetic oligonucleotide: FAS-2261
agcuuuccuuucaccugccca

SEQ ID NO: 28134 - RNA, 22 nt, Artificial Sequence
  Synthetic oligonucleotide: FAS-2262
uagcuuuccuuucaccugccca

SEQ ID NO: 28135 - RNA, 23 nt, Artificial Sequence
  Synthetic oligonucleotide: FAS-2263
cuagcuuuccuuucaccugccca

SEQ ID NO: 28136 - RNA, 24 nt, Artificial Sequence
  Synthetic oligonucleotide: FAS-2264
ccuagcuuuccuuucaccugccca

SEQ ID NO: 28137 - RNA, 18 nt, Artificial Sequence
  Synthetic oligonucleotide: FAS-2265
gccuccacccgggcagga

SEQ ID NO: 28138 - RNA, 19 nt, Artificial Sequence
  Synthetic oligonucleotide: FAS-2266
agccuccacccgggcagga

SEQ ID NO: 28139 - RNA, 20 nt, Artificial Sequence
  Synthetic oligonucleotide: FAS-1165
aagccuccacccgggcagga

SEQ ID NO: 28140 - RNA, 18 nt, Artificial Sequence
  Synthetic oligonucleotide: FAS-2267
uguaacauaccuggagga

SEQ ID NO: 28141 - RNA, 19 nt, Artificial Sequence
  Synthetic oligonucleotide: FAS-2268
guguaacauaccuggagga

SEQ ID NO: 28142 - RNA, 20 nt, Artificial Sequence
  Synthetic oligonucleotide: FAS-150
uguguaacauaccuggagga

SEQ ID NO: 28143 - RNA, 21 nt, Artificial Sequence
  Synthetic oligonucleotide: FAS-2269
uuguguaacauaccuggagga

SEQ ID NO: 28144 - RNA, 22 nt, Artificial Sequence
  Synthetic oligonucleotide: FAS-2270
uuuguguaacauaccuggagga

SEQ ID NO: 28145 - RNA, 23 nt, Artificial Sequence
  Synthetic oligonucleotide: FAS-2271
uuuuguguaacauaccuggagga

SEQ ID NO: 28146 - RNA, 24 nt, Artificial Sequence
  Synthetic oligonucleotide: FAS-2272
guuuuguguaacauaccuggagga

SEQ ID NO: 28147 - RNA, 18 nt, Artificial Sequence
  Synthetic oligonucleotide: FAS-2273
caucuagaaaaaaaaaua

SEQ ID NO: 28148 - RNA, 19 nt, Artificial Sequence
  Synthetic oligonucleotide: FAS-2274
acaucuagaaaaaaaaaua

SEQ ID NO: 28149 - RNA, 20 nt, Artificial Sequence
  Synthetic oligonucleotide: FAS-522
cacaucuagaaaaaaaaaua

SEQ ID NO: 28150 - RNA, 21 nt, Artificial Sequence
  Synthetic oligonucleotide: FAS-2275
ucacaucuagaaaaaaaaaua

SEQ ID NO: 28151 - RNA, 22 nt, Artificial Sequence
  Synthetic oligonucleotide: FAS-2276
uucacaucuagaaaaaaaaaua

SEQ ID NO: 28152 - RNA, 23 nt, Artificial Sequence
  Synthetic oligonucleotide: FAS-2277
guucacaucuagaaaaaaaaaua

SEQ ID NO: 28153 - RNA, 24 nt, Artificial Sequence
  Synthetic oligonucleotide: FAS-2278
uguucacaucuagaaaaaaaaaua

SEQ ID NO: 28154 - RNA, 18 nt, Artificial Sequence
  Synthetic oligonucleotide: FAS-2279
gggcaggagagggcucac

SEQ ID NO: 28155 - RNA, 19 nt, Artificial Sequence
  Synthetic oligonucleotide: FAS-2280
cgggcaggagagggcucac

SEQ ID NO: 28156 - RNA, 20 nt, Artificial Sequence
  Synthetic oligonucleotide: FAS-103
ccgggcaggagagggcucac

SEQ ID NO: 28157 - RNA, 21 nt, Artificial Sequence
  Synthetic oligonucleotide: FAS-2281
cccgggcaggagagggcucac

SEQ ID NO: 28158 - RNA, 22 nt, Artificial Sequence
  Synthetic oligonucleotide: FAS-2282
acccgggcaggagagggcucac

SEQ ID NO: 28159 - RNA, 23 nt, Artificial Sequence
  Synthetic oligonucleotide: FAS-2283
cacccgggcaggagagggcucac

SEQ ID NO: 28160 - RNA, 24 nt, Artificial Sequence
  Synthetic oligonucleotide: FAS-2284
ccacccgggcaggagagggcucac

SEQ ID NO: 28161 - RNA, 18 nt, Artificial Sequence
  Synthetic oligonucleotide: FAS-2285
ggaguugaugucagucac

SEQ ID NO: 28162 - RNA, 19 nt, Artificial Sequence
  Synthetic oligonucleotide: FAS-2286
uggaguugaugucagucac

SEQ ID NO: 28163 - RNA, 20 nt, Artificial Sequence
  Synthetic oligonucleotide: FAS-155
uuggaguugaugucagucac

SEQ ID NO: 28164 - RNA, 21 nt, Artificial Sequence
  Synthetic oligonucleotide: FAS-2287
cuuggaguugaugucagucac

SEQ ID NO: 28165 - RNA, 22 nt, Artificial Sequence
  Synthetic oligonucleotide: FAS-2288
ccuuggaguugaugucagucac

SEQ ID NO: 28166 - RNA, 23 nt, Artificial Sequence
  Synthetic oligonucleotide: FAS-2289
cccuuggaguugaugucagucac

SEQ ID NO: 28167 - RNA, 24 nt, Artificial Sequence
  Synthetic oligonucleotide: FAS-2290
ucccuuggaguugaugucagucac

SEQ ID NO: 28168 - RNA, 18 nt, Artificial Sequence
  Synthetic oligonucleotide: FAS-2291
aucuagaaaaaaaaauac

SEQ ID NO: 28169 - RNA, 19 nt, Artificial Sequence
  Synthetic oligonucleotide: FAS-2292
caucuagaaaaaaaaauac

SEQ ID NO: 28170 - RNA, 20 nt, Artificial Sequence
  Synthetic oligonucleotide: FAS-327
acaucuagaaaaaaaaauac

SEQ ID NO: 28171 - RNA, 21 nt, Artificial Sequence
  Synthetic oligonucleotide: FAS-2293
cacaucuagaaaaaaaaauac

SEQ ID NO: 28172 - RNA, 22 nt, Artificial Sequence
  Synthetic oligonucleotide: FAS-2294
ucacaucuagaaaaaaaaauac

SEQ ID NO: 28173 - RNA, 23 nt, Artificial Sequence
  Synthetic oligonucleotide: FAS-2295
uucacaucuagaaaaaaaaauac

SEQ ID NO: 28174 - RNA, 24 nt, Artificial Sequence
  Synthetic oligonucleotide: FAS-2296
guucacaucuagaaaaaaaaauac

SEQ ID NO: 28175 - RNA, 18 nt, Artificial Sequence
  Synthetic oligonucleotide: FAS-2297
auguuuuguguaacauac

SEQ ID NO: 28176 - RNA, 19 nt, Artificial Sequence
  Synthetic oligonucleotide: FAS-2298
gauguuuuguguaacauac

SEQ ID NO: 28177 - RNA, 20 nt, Artificial Sequence
  Synthetic oligonucleotide: FAS-147
ggauguuuuguguaacauac

SEQ ID NO: 28178 - RNA, 21 nt, Artificial Sequence
  Synthetic oligonucleotide: FAS-2299
uggauguuuuguguaacauac

SEQ ID NO: 28179 - RNA, 22 nt, Artificial Sequence
  Synthetic oligonucleotide: FAS-2300
cuggauguuuuguguaacauac

SEQ ID NO: 28180 - RNA, 23 nt, Artificial Sequence
  Synthetic oligonucleotide: FAS-2301
ucuggauguuuuguguaacauac

SEQ ID NO: 28181 - RNA, 24 nt, Artificial Sequence
  Synthetic oligonucleotide: FAS-2302
cucuggauguuuuguguaacauac

SEQ ID NO: 28182 - RNA, 18 nt, Artificial Sequence
  Synthetic oligonucleotide: FAS-2303
uguuuuguguaacauacc

SEQ ID NO: 28183 - RNA, 19 nt, Artificial Sequence
  Synthetic oligonucleotide: FAS-2304
auguuuuguguaacauacc

SEQ ID NO: 28184 - RNA, 20 nt, Artificial Sequence
  Synthetic oligonucleotide: FAS-20
gauguuuuguguaacauacc

SEQ ID NO: 28185 - RNA, 21 nt, Artificial Sequence
  Synthetic oligonucleotide: FAS-2305
ggauguuuuguguaacauacc

SEQ ID NO: 28186 - RNA, 22 nt, Artificial Sequence
  Synthetic oligonucleotide: FAS-2306
uggauguuuuguguaacauacc

SEQ ID NO: 28187 - RNA, 23 nt, Artificial Sequence
  Synthetic oligonucleotide: FAS-2307
cuggauguuuuguguaacauacc

SEQ ID NO: 28188 - RNA, 24 nt, Artificial Sequence
  Synthetic oligonucleotide: FAS-2308
ucuggauguuuuguguaacauacc

SEQ ID NO: 28189 - RNA, 18 nt, Artificial Sequence
  Synthetic oligonucleotide: FAS-2309
cuuuccuuucaccugccc

SEQ ID NO: 28190 - RNA, 19 nt, Artificial Sequence
  Synthetic oligonucleotide: FAS-2310
gcuuuccuuucaccugccc

SEQ ID NO: 28191 - RNA, 20 nt, Artificial Sequence
  Synthetic oligonucleotide: FAS-224
agcuuuccuuucaccugccc

SEQ ID NO: 28192 - RNA, 21 nt, Artificial Sequence
  Synthetic oligonucleotide: FAS-2311
uagcuuuccuuucaccugccc

SEQ ID NO: 28193 - RNA, 22 nt, Artificial Sequence
  Synthetic oligonucleotide: FAS-2312
cuagcuuuccuuucaccugccc

SEQ ID NO: 28194 - RNA, 23 nt, Artificial Sequence
  Synthetic oligonucleotide: FAS-2313
ccuagcuuuccuuucaccugccc

SEQ ID NO: 28195 - RNA, 24 nt, Artificial Sequence
  Synthetic oligonucleotide: FAS-2314
cccuagcuuuccuuucaccugccc

SEQ ID NO: 28196 - RNA, 18 nt, Artificial Sequence
  Synthetic oligonucleotide: FAS-2315
uuccucaauuccaauccc

SEQ ID NO: 28197 - RNA, 19 nt, Artificial Sequence
  Synthetic oligonucleotide: FAS-2316
cuuccucaauuccaauccc

SEQ ID NO: 28198 - RNA, 20 nt, Artificial Sequence
  Synthetic oligonucleotide: FAS-153
ucuuccucaauuccaauccc

SEQ ID NO: 28199 - RNA, 21 nt, Artificial Sequence
  Synthetic oligonucleotide: FAS-2317
gucuuccucaauuccaauccc

SEQ ID NO: 28200 - RNA, 22 nt, Artificial Sequence
  Synthetic oligonucleotide: FAS-2318
agucuuccucaauuccaauccc

SEQ ID NO: 28201 - RNA, 23 nt, Artificial Sequence
  Synthetic oligonucleotide: FAS-2319
cagucuuccucaauuccaauccc

SEQ ID NO: 28202 - RNA, 24 nt, Artificial Sequence
  Synthetic oligonucleotide: FAS-2320
acagucuuccucaauuccaauccc

SEQ ID NO: 28203 - RNA, 18 nt, Artificial Sequence
  Synthetic oligonucleotide: FAS-2321
uauuuccacuucuaagcc

SEQ ID NO: 28204 - RNA, 19 nt, Artificial Sequence
  Synthetic oligonucleotide: FAS-2322
uuauuuccacuucuaagcc

SEQ ID NO: 28205 - RNA, 20 nt, Artificial Sequence
  Synthetic oligonucleotide: FAS-529
uuuauuuccacuucuaagcc

SEQ ID NO: 28206 - RNA, 21 nt, Artificial Sequence
  Synthetic oligonucleotide: FAS-2323
guuuauuuccacuucuaagcc

SEQ ID NO: 28207 - RNA, 22 nt, Artificial Sequence
  Synthetic oligonucleotide: FAS-2324
aguuuauuuccacuucuaagcc

SEQ ID NO: 28208 - RNA, 23 nt, Artificial Sequence
  Synthetic oligonucleotide: FAS-2325
caguuuauuuccacuucuaagcc

SEQ ID NO: 28209 - RNA, 24 nt, Artificial Sequence
  Synthetic oligonucleotide: FAS-2326
gcaguuuauuuccacuucuaagcc

SEQ ID NO: 28210 - RNA, 18 nt, Artificial Sequence
  Synthetic oligonucleotide: FAS-2327
aaccuguaaaauaaaagc

SEQ ID NO: 28211 - RNA, 19 nt, Artificial Sequence
  Synthetic oligonucleotide: FAS-2328
gaaccuguaaaauaaaagc

SEQ ID NO: 28212 - RNA, 20 nt, Artificial Sequence
  Synthetic oligonucleotide: FAS-158
agaaccuguaaaauaaaagc

SEQ ID NO: 28213 - RNA, 21 nt, Artificial Sequence
  Synthetic oligonucleotide: FAS-2329
aagaaccuguaaaauaaaagc

SEQ ID NO: 28214 - RNA, 22 nt, Artificial Sequence
  Synthetic oligonucleotide: FAS-2330
uaagaaccuguaaaauaaaagc

SEQ ID NO: 28215 - RNA, 23 nt, Artificial Sequence
  Synthetic oligonucleotide: FAS-2331
guaagaaccuguaaaauaaaagc

SEQ ID NO: 28216 - RNA, 24 nt, Artificial Sequence
  Synthetic oligonucleotide: FAS-2332
cguaagaaccuguaaaauaaaagc

SEQ ID NO: 28217 - RNA, 18 nt, Artificial Sequence
  Synthetic oligonucleotide: FAS-2333
ugauuccauguucacauc

SEQ ID NO: 28218 - RNA, 19 nt, Artificial Sequence
  Synthetic oligonucleotide: FAS-2334
augauuccauguucacauc

SEQ ID NO: 28219 - RNA, 20 nt, Artificial Sequence
  Synthetic oligonucleotide: FAS-521
gaugauuccauguucacauc

SEQ ID NO: 28220 - RNA, 21 nt, Artificial Sequence
  Synthetic oligonucleotide: FAS-2335
ugaugauuccauguucacauc

SEQ ID NO: 28221 - RNA, 22 nt, Artificial Sequence
  Synthetic oligonucleotide: FAS-2336
uugaugauuccauguucacauc

SEQ ID NO: 28222 - RNA, 23 nt, Artificial Sequence
  Synthetic oligonucleotide: FAS-2337
cuugaugauuccauguucacauc

SEQ ID NO: 28223 - RNA, 24 nt, Artificial Sequence
  Synthetic oligonucleotide: FAS-2338
ccuugaugauuccauguucacauc

SEQ ID NO: 28224 - RNA, 18 nt, Artificial Sequence
  Synthetic oligonucleotide: FAS-2339
cuagaaaaaaaaauacag

SEQ ID NO: 28225 - RNA, 19 nt, Artificial Sequence
  Synthetic oligonucleotide: FAS-2340
ucuagaaaaaaaaauacag

SEQ ID NO: 28226 - RNA, 20 nt, Artificial Sequence
  Synthetic oligonucleotide: FAS-524
aucuagaaaaaaaaauacag

SEQ ID NO: 28227 - RNA, 21 nt, Artificial Sequence
  Synthetic oligonucleotide: FAS-2341
caucuagaaaaaaaaauacag

SEQ ID NO: 28228 - RNA, 22 nt, Artificial Sequence
  Synthetic oligonucleotide: FAS-2342
acaucuagaaaaaaaaauacag

SEQ ID NO: 28229 - RNA, 23 nt, Artificial Sequence
  Synthetic oligonucleotide: FAS-2343
cacaucuagaaaaaaaaauacag

SEQ ID NO: 28230 - RNA, 24 nt, Artificial Sequence
  Synthetic oligonucleotide: FAS-2344
ucacaucuagaaaaaaaaauacag

SEQ ID NO: 28231 - RNA, 18 nt, Artificial Sequence
  Synthetic oligonucleotide: FAS-2345
gagagggcucaccagagg

SEQ ID NO: 28232 - RNA, 19 nt, Artificial Sequence
  Synthetic oligonucleotide: FAS-2346
ggagagggcucaccagagg

SEQ ID NO: 28233 - RNA, 20 nt, Artificial Sequence
  Synthetic oligonucleotide: FAS-104
aggagagggcucaccagagg

SEQ ID NO: 28234 - RNA, 21 nt, Artificial Sequence
  Synthetic oligonucleotide: FAS-2347
caggagagggcucaccagagg

SEQ ID NO: 28235 - RNA, 22 nt, Artificial Sequence
  Synthetic oligonucleotide: FAS-2348
gcaggagagggcucaccagagg

SEQ ID NO: 28236 - RNA, 23 nt, Artificial Sequence
  Synthetic oligonucleotide: FAS-2349
ggcaggagagggcucaccagagg

SEQ ID NO: 28237 - RNA, 24 nt, Artificial Sequence
  Synthetic oligonucleotide: FAS-2350
gggcaggagagggcucaccagagg

SEQ ID NO: 28238 - RNA, 18 nt, Artificial Sequence
  Synthetic oligonucleotide: FAS-2351
uacuccuucccuucuugg

SEQ ID NO: 28239 - RNA, 19 nt, Artificial Sequence
  Synthetic oligonucleotide: FAS-2352
guacuccuucccuucuugg

SEQ ID NO: 28240 - RNA, 20 nt, Artificial Sequence
  Synthetic oligonucleotide: FAS-223
uguacuccuucccuucuugg

SEQ ID NO: 28241 - RNA, 21 nt, Artificial Sequence
  Synthetic oligonucleotide: FAS-2353
guguacuccuucccuucuugg

SEQ ID NO: 28242 - RNA, 22 nt, Artificial Sequence
  Synthetic oligonucleotide: FAS-2354
uguguacuccuucccuucuugg

SEQ ID NO: 28243 - RNA, 23 nt, Artificial Sequence
  Synthetic oligonucleotide: FAS-2355
cuguguacuccuucccuucuugg

SEQ ID NO: 28244 - RNA, 24 nt, Artificial Sequence
  Synthetic oligonucleotide: FAS-2356
ucuguguacuccuucccuucuugg

SEQ ID NO: 28245 - RNA, 18 nt, Artificial Sequence
  Synthetic oligonucleotide: FAS-2357
uacaucuucugcauuugg

SEQ ID NO: 28246 - RNA, 19 nt, Artificial Sequence
  Synthetic oligonucleotide: FAS-2358
cuacaucuucugcauuugg

SEQ ID NO: 28247 - RNA, 20 nt, Artificial Sequence
  Synthetic oligonucleotide: FAS-221
ucuacaucuucugcauuugg

SEQ ID NO: 28248 - RNA, 21 nt, Artificial Sequence
  Synthetic oligonucleotide: FAS-2359
aucuacaucuucugcauuugg

SEQ ID NO: 28249 - RNA, 22 nt, Artificial Sequence
  Synthetic oligonucleotide: FAS-2360
aaucuacaucuucugcauuugg

SEQ ID NO: 28250 - RNA, 23 nt, Artificial Sequence
  Synthetic oligonucleotide: FAS-2361
caaucuacaucuucugcauuugg

SEQ ID NO: 28251 - RNA, 24 nt, Artificial Sequence
  Synthetic oligonucleotide: FAS-2362
acaaucuacaucuucugcauuugg

SEQ ID NO: 28252 - RNA, 18 nt, Artificial Sequence
  Synthetic oligonucleotide: FAS-2363
cuguaaaauaaaagcaug

SEQ ID NO: 28253 - RNA, 19 nt, Artificial Sequence
  Synthetic oligonucleotide: FAS-2364
ccuguaaaauaaaagcaug

SEQ ID NO: 28254 - RNA, 20 nt, Artificial Sequence
  Synthetic oligonucleotide: FAS-159
accuguaaaauaaaagcaug

SEQ ID NO: 28255 - RNA, 21 nt, Artificial Sequence
  Synthetic oligonucleotide: FAS-2365
aaccuguaaaauaaaagcaug

SEQ ID NO: 28256 - RNA, 22 nt, Artificial Sequence
  Synthetic oligonucleotide: FAS-2366
gaaccuguaaaauaaaagcaug

SEQ ID NO: 28257 - RNA, 23 nt, Artificial Sequence
  Synthetic oligonucleotide: FAS-2367
agaaccuguaaaauaaaagcaug

SEQ ID NO: 28258 - RNA, 24 nt, Artificial Sequence
  Synthetic oligonucleotide: FAS-2368
aagaaccuguaaaauaaaagcaug

SEQ ID NO: 28259 - RNA, 18 nt, Artificial Sequence
  Synthetic oligonucleotide: FAS-2369
uuuuguguaacauaccug

SEQ ID NO: 28260 - RNA, 19 nt, Artificial Sequence
  Synthetic oligonucleotide: FAS-2370
guuuuguguaacauaccug

SEQ ID NO: 28261 - RNA, 20 nt, Artificial Sequence
  Synthetic oligonucleotide: FAS-149
uguuuuguguaacauaccug

SEQ ID NO: 28262 - RNA, 21 nt, Artificial Sequence
  Synthetic oligonucleotide: FAS-2371
auguuuuguguaacauaccug

SEQ ID NO: 28263 - RNA, 22 nt, Artificial Sequence
  Synthetic oligonucleotide: FAS-2372
gauguuuuguguaacauaccug

SEQ ID NO: 28264 - RNA, 23 nt, Artificial Sequence
  Synthetic oligonucleotide: FAS-2373
ggauguuuuguguaacauaccug

SEQ ID NO: 28265 - RNA, 24 nt, Artificial Sequence
  Synthetic oligonucleotide: FAS-2374
uggauguuuuguguaacauaccug

SEQ ID NO: 28266 - RNA, 18 nt, Artificial Sequence
  Synthetic oligonucleotide: FAS-2375
agaugcccagcaugguug

SEQ ID NO: 28267 - RNA, 19 nt, Artificial Sequence
  Synthetic oligonucleotide: FAS-2376
cagaugcccagcaugguug

SEQ ID NO: 28268 - RNA, 20 nt, Artificial Sequence
  Synthetic oligonucleotide: FAS-107
ccagaugcccagcaugguug

SEQ ID NO: 28269 - RNA, 21 nt, Artificial Sequence
  Synthetic oligonucleotide: FAS-2377
uccagaugcccagcaugguug

SEQ ID NO: 28270 - RNA, 22 nt, Artificial Sequence
  Synthetic oligonucleotide: FAS-2378
guccagaugcccagcaugguug

SEQ ID NO: 28271 - RNA, 23 nt, Artificial Sequence
  Synthetic oligonucleotide: FAS-2379
gguccagaugcccagcaugguug

SEQ ID NO: 28272 - RNA, 24 nt, Artificial Sequence
  Synthetic oligonucleotide: FAS-2380
ggguccagaugcccagcaugguug

SEQ ID NO: 28273 - RNA, 18 nt, Artificial Sequence
  Synthetic oligonucleotide: FAS-2381
aaucuacaucuucugcau

SEQ ID NO: 28274 - RNA, 19 nt, Artificial Sequence
  Synthetic oligonucleotide: FAS-2382
caaucuacaucuucugcau

SEQ ID NO: 28275 - RNA, 20 nt, Artificial Sequence
  Synthetic oligonucleotide: FAS-219
acaaucuacaucuucugcau

SEQ ID NO: 28276 - RNA, 21 nt, Artificial Sequence
  Synthetic oligonucleotide: FAS-2383
cacaaucuacaucuucugcau

SEQ ID NO: 28277 - RNA, 22 nt, Artificial Sequence
  Synthetic oligonucleotide: FAS-2384
acacaaucuacaucuucugcau

SEQ ID NO: 28278 - RNA, 23 nt, Artificial Sequence
  Synthetic oligonucleotide: FAS-2385
cacacaaucuacaucuucugcau

SEQ ID NO: 28279 - RNA, 24 nt, Artificial Sequence
  Synthetic oligonucleotide: FAS-2386
ucacacaaucuacaucuucugcau

SEQ ID NO: 28280 - RNA, 18 nt, Artificial Sequence
  Synthetic oligonucleotide: FAS-2387
ugguuguugagcaauccu

SEQ ID NO: 28281 - RNA, 19 nt, Artificial Sequence
  Synthetic oligonucleotide: FAS-2388
augguuguugagcaauccu

SEQ ID NO: 28282 - RNA, 20 nt, Artificial Sequence
  Synthetic oligonucleotide: FAS-1171
caugguuguugagcaauccu

SEQ ID NO: 28283 - RNA, 21 nt, Artificial Sequence
  Synthetic oligonucleotide: FAS-2389
gcaugguuguugagcaauccu

SEQ ID NO: 28284 - RNA, 22 nt, Artificial Sequence
  Synthetic oligonucleotide: FAS-2390
agcaugguuguugagcaauccu

SEQ ID NO: 28285 - RNA, 23 nt, Artificial Sequence
  Synthetic oligonucleotide: FAS-2391
cagcaugguuguugagcaauccu

SEQ ID NO: 28286 - RNA, 24 nt, Artificial Sequence
  Synthetic oligonucleotide: FAS-2392
ccagcaugguuguugagcaauccu

SEQ ID NO: 28287 - RNA, 18 nt, Artificial Sequence
  Synthetic oligonucleotide: FAS-2393
uaagccuagaaaaucagu

SEQ ID NO: 28288 - RNA, 19 nt, Artificial Sequence
  Synthetic oligonucleotide: FAS-2394
cuaagccuagaaaaucagu

SEQ ID NO: 28289 - RNA, 20 nt, Artificial Sequence
  Synthetic oligonucleotide: FAS-530
ucuaagccuagaaaaucagu

SEQ ID NO: 28290 - RNA, 21 nt, Artificial Sequence
  Synthetic oligonucleotide: FAS-2395
uucuaagccuagaaaaucagu

SEQ ID NO: 28291 - RNA, 22 nt, Artificial Sequence
  Synthetic oligonucleotide: FAS-2396
cuucuaagccuagaaaaucagu

SEQ ID NO: 28292 - RNA, 23 nt, Artificial Sequence
  Synthetic oligonucleotide: FAS-2397
acuucuaagccuagaaaaucagu

SEQ ID NO: 28293 - RNA, 24 nt, Artificial Sequence
  Synthetic oligonucleotide: FAS-2398
cacuucuaagccuagaaaaucagu

SEQ ID NO: 28294 - RNA, 18 nt, Artificial Sequence
  Synthetic oligonucleotide: FAS-2399
uaaucuagcaacagacgu

SEQ ID NO: 28295 - RNA, 19 nt, Artificial Sequence
  Synthetic oligonucleotide: FAS-2400
auaaucuagcaacagacgu

SEQ ID NO: 28296 - RNA, 20 nt, Artificial Sequence
  Synthetic oligonucleotide: FAS-157
gauaaucuagcaacagacgu

SEQ ID NO: 28297 - RNA, 21 nt, Artificial Sequence
  Synthetic oligonucleotide: FAS-2401
cgauaaucuagcaacagacgu

SEQ ID NO: 28298 - RNA, 22 nt, Artificial Sequence
  Synthetic oligonucleotide: FAS-2402
acgauaaucuagcaacagacgu

SEQ ID NO: 28299 - RNA, 23 nt, Artificial Sequence
  Synthetic oligonucleotide: FAS-2403
gacgauaaucuagcaacagacgu

SEQ ID NO: 28300 - RNA, 24 nt, Artificial Sequence
  Synthetic oligonucleotide: FAS-2404
ggacgauaaucuagcaacagacgu

SEQ ID NO: 28301 - RNA, 18 nt, Artificial Sequence
  Synthetic oligonucleotide: FAS-2405
agagggcucaccagaggu

SEQ ID NO: 28302 - RNA, 19 nt, Artificial Sequence
  Synthetic oligonucleotide: FAS-2406
gagagggcucaccagaggu

SEQ ID NO: 28303 - RNA, 20 nt, Artificial Sequence
  Synthetic oligonucleotide: FAS-105
ggagagggcucaccagaggu

SEQ ID NO: 28304 - RNA, 21 nt, Artificial Sequence
  Synthetic oligonucleotide: FAS-2407
aggagagggcucaccagaggu

SEQ ID NO: 28305 - RNA, 22 nt, Artificial Sequence
  Synthetic oligonucleotide: FAS-2408
caggagagggcucaccagaggu

SEQ ID NO: 28306 - RNA, 23 nt, Artificial Sequence
  Synthetic oligonucleotide: FAS-2409
gcaggagagggcucaccagaggu

SEQ ID NO: 28307 - RNA, 24 nt, Artificial Sequence
  Synthetic oligonucleotide: FAS-2410
ggcaggagagggcucaccagaggu

SEQ ID NO: 28308 - RNA, 18 nt, Artificial Sequence
  Synthetic oligonucleotide: FAS-2411
aucuacaucuucugcauu

SEQ ID NO: 28309 - RNA, 19 nt, Artificial Sequence
  Synthetic oligonucleotide: FAS-2412
aaucuacaucuucugcauu

SEQ ID NO: 28310 - RNA, 20 nt, Artificial Sequence
  Synthetic oligonucleotide: FAS-66
caaucuacaucuucugcauu

SEQ ID NO: 28311 - RNA, 21 nt, Artificial Sequence
  Synthetic oligonucleotide: FAS-2413
acaaucuacaucuucugcauu

SEQ ID NO: 28312 - RNA, 22 nt, Artificial Sequence
  Synthetic oligonucleotide: FAS-2414
cacaaucuacaucuucugcauu

SEQ ID NO: 28313 - RNA, 23 nt, Artificial Sequence
  Synthetic oligonucleotide: FAS-2415
acacaaucuacaucuucugcauu

SEQ ID NO: 28314 - RNA, 24 nt, Artificial Sequence
  Synthetic oligonucleotide: FAS-2416
cacacaaucuacaucuucugcauu

SEQ ID NO: 28315 - RNA, 18 nt, Artificial Sequence
  Synthetic oligonucleotide: FAS-2417
acuugggcauuaacacuu

SEQ ID NO: 28316 - RNA, 19 nt, Artificial Sequence
  Synthetic oligonucleotide: FAS-2418
cacuugggcauuaacacuu

SEQ ID NO: 28317 - RNA, 20 nt, Artificial Sequence
  Synthetic oligonucleotide: FAS-156
ucacuugggcauuaacacuu

SEQ ID NO: 28318 - RNA, 21 nt, Artificial Sequence
  Synthetic oligonucleotide: FAS-2419
gucacuugggcauuaacacuu

SEQ ID NO: 28319 - RNA, 22 nt, Artificial Sequence
  Synthetic oligonucleotide: FAS-2420
agucacuugggcauuaacacuu

SEQ ID NO: 28320 - RNA, 23 nt, Artificial Sequence
  Synthetic oligonucleotide: FAS-2421
cagucacuugggcauuaacacuu

SEQ ID NO: 28321 - RNA, 24 nt, Artificial Sequence
  Synthetic oligonucleotide: FAS-2422
ucagucacuugggcauuaacacuu

SEQ ID NO: 28322 - RNA, 18 nt, Artificial Sequence
  Synthetic oligonucleotide: FAS-2423
aagccuagaaaaucaguu

SEQ ID NO: 28323 - RNA, 19 nt, Artificial Sequence
  Synthetic oligonucleotide: FAS-2424
uaagccuagaaaaucaguu

SEQ ID NO: 28324 - RNA, 20 nt, Artificial Sequence
  Synthetic oligonucleotide: FAS-337
cuaagccuagaaaaucaguu

SEQ ID NO: 28325 - RNA, 21 nt, Artificial Sequence
  Synthetic oligonucleotide: FAS-2425
ucuaagccuagaaaaucaguu

SEQ ID NO: 28326 - RNA, 22 nt, Artificial Sequence
  Synthetic oligonucleotide: FAS-2426
uucuaagccuagaaaaucaguu

SEQ ID NO: 28327 - RNA, 23 nt, Artificial Sequence
  Synthetic oligonucleotide: FAS-2427
cuucuaagccuagaaaaucaguu

SEQ ID NO: 28328 - RNA, 24 nt, Artificial Sequence
  Synthetic oligonucleotide: FAS-2428
acuucuaagccuagaaaaucaguu

SEQ ID NO: 28329 - RNA, 18 nt, Artificial Sequence
  Synthetic oligonucleotide: FAS-2429
agcaacaccaagugcaaa

SEQ ID NO: 28330 - RNA, 19 nt, Artificial Sequence
  Synthetic oligonucleotide: FAS-2430
cagcaacaccaagugcaaa

SEQ ID NO: 28331 - RNA, 20 nt, Artificial Sequence
  Synthetic oligonucleotide: FAS-379
ccagcaacaccaagugcaaa

SEQ ID NO: 28332 - RNA, 21 nt, Artificial Sequence
  Synthetic oligonucleotide: FAS-2431
accagcaacaccaagugcaaa

SEQ ID NO: 28333 - RNA, 22 nt, Artificial Sequence
  Synthetic oligonucleotide: FAS-2432
caccagcaacaccaagugcaaa

SEQ ID NO: 28334 - RNA, 23 nt, Artificial Sequence
  Synthetic oligonucleotide: FAS-2433
ucaccagcaacaccaagugcaaa

SEQ ID NO: 28335 - RNA, 24 nt, Artificial Sequence
  Synthetic oligonucleotide: FAS-2434
cucaccagcaacaccaagugcaaa

SEQ ID NO: 28336 - RNA, 18 nt, Artificial Sequence
  Synthetic oligonucleotide: FAS-2435
aagagucuuaaaaugcaa

SEQ ID NO: 28337 - RNA, 19 nt, Artificial Sequence
  Synthetic oligonucleotide: FAS-2436
uaagagucuuaaaaugcaa

SEQ ID NO: 28338 - RNA, 20 nt, Artificial Sequence
  Synthetic oligonucleotide: FAS-195
guaagagucuuaaaaugcaa

SEQ ID NO: 28339 - RNA, 21 nt, Artificial Sequence
  Synthetic oligonucleotide: FAS-2437
gguaagagucuuaaaaugcaa

SEQ ID NO: 28340 - RNA, 22 nt, Artificial Sequence
  Synthetic oligonucleotide: FAS-2438
ugguaagagucuuaaaaugcaa

SEQ ID NO: 28341 - RNA, 23 nt, Artificial Sequence
  Synthetic oligonucleotide: FAS-2439
augguaagagucuuaaaaugcaa

SEQ ID NO: 28342 - RNA, 24 nt, Artificial Sequence
  Synthetic oligonucleotide: FAS-2440
caugguaagagucuuaaaaugcaa

SEQ ID NO: 28343 - RNA, 18 nt, Artificial Sequence
  Synthetic oligonucleotide: FAS-2441
uagggacugcacagucaa

SEQ ID NO: 28344 - RNA, 19 nt, Artificial Sequence
  Synthetic oligonucleotide: FAS-2442
cuagggacugcacagucaa

SEQ ID NO: 28345 - RNA, 20 nt, Artificial Sequence
  Synthetic oligonucleotide: FAS-57
gcuagggacugcacagucaa

SEQ ID NO: 28346 - RNA, 21 nt, Artificial Sequence
  Synthetic oligonucleotide: FAS-2443
agcuagggacugcacagucaa

SEQ ID NO: 28347 - RNA, 22 nt, Artificial Sequence
  Synthetic oligonucleotide: FAS-2444
aagcuagggacugcacagucaa

SEQ ID NO: 28348 - RNA, 23 nt, Artificial Sequence
  Synthetic oligonucleotide: FAS-2445
aaagcuagggacugcacagucaa

SEQ ID NO: 28349 - RNA, 24 nt, Artificial Sequence
  Synthetic oligonucleotide: FAS-2446
gaaagcuagggacugcacagucaa

SEQ ID NO: 28350 - RNA, 18 nt, Artificial Sequence
  Synthetic oligonucleotide: FAS-2447
ugcgugcccugccaagaa

SEQ ID NO: 28351 - RNA, 19 nt, Artificial Sequence
  Synthetic oligonucleotide: FAS-2448
cugcgugcccugccaagaa

SEQ ID NO: 28352 - RNA, 20 nt, Artificial Sequence
  Synthetic oligonucleotide: FAS-61
acugcgugcccugccaagaa

SEQ ID NO: 28353 - RNA, 21 nt, Artificial Sequence
  Synthetic oligonucleotide: FAS-2449
gacugcgugcccugccaagaa

SEQ ID NO: 28354 - RNA, 22 nt, Artificial Sequence
  Synthetic oligonucleotide: FAS-2450
agacugcgugcccugccaagaa

SEQ ID NO: 28355 - RNA, 23 nt, Artificial Sequence
  Synthetic oligonucleotide: FAS-2451
cagacugcgugcccugccaagaa

SEQ ID NO: 28356 - RNA, 24 nt, Artificial Sequence
  Synthetic oligonucleotide: FAS-2452
ccagacugcgugcccugccaagaa

SEQ ID NO: 28357 - RNA, 18 nt, Artificial Sequence
  Synthetic oligonucleotide: FAS-2453
gauuuucuaggcuuagaa

SEQ ID NO: 28358 - RNA, 19 nt, Artificial Sequence
  Synthetic oligonucleotide: FAS-2454
ugauuuucuaggcuuagaa

SEQ ID NO: 28359 - RNA, 20 nt, Artificial Sequence
  Synthetic oligonucleotide: FAS-368
cugauuuucuaggcuuagaa

SEQ ID NO: 28360 - RNA, 21 nt, Artificial Sequence
  Synthetic oligonucleotide: FAS-2455
acugauuuucuaggcuuagaa

SEQ ID NO: 28361 - RNA, 22 nt, Artificial Sequence
  Synthetic oligonucleotide: FAS-2456
aacugauuuucuaggcuuagaa

SEQ ID NO: 28362 - RNA, 23 nt, Artificial Sequence
  Synthetic oligonucleotide: FAS-2457
aaacugauuuucuaggcuuagaa

SEQ ID NO: 28363 - RNA, 24 nt, Artificial Sequence
  Synthetic oligonucleotide: FAS-2458
caaacugauuuucuaggcuuagaa

SEQ ID NO: 28364 - RNA, 18 nt, Artificial Sequence
  Synthetic oligonucleotide: FAS-2459
aacuccaagggauuggaa

SEQ ID NO: 28365 - RNA, 19 nt, Artificial Sequence
  Synthetic oligonucleotide: FAS-2460
caacuccaagggauuggaa

SEQ ID NO: 28366 - RNA, 20 nt, Artificial Sequence
  Synthetic oligonucleotide: FAS-127
ucaacuccaagggauuggaa

SEQ ID NO: 28367 - RNA, 21 nt, Artificial Sequence
  Synthetic oligonucleotide: FAS-2461
aucaacuccaagggauuggaa

SEQ ID NO: 28368 - RNA, 22 nt, Artificial Sequence
  Synthetic oligonucleotide: FAS-2462
caucaacuccaagggauuggaa

SEQ ID NO: 28369 - RNA, 23 nt, Artificial Sequence
  Synthetic oligonucleotide: FAS-2463
acaucaacuccaagggauuggaa

SEQ ID NO: 28370 - RNA, 24 nt, Artificial Sequence
  Synthetic oligonucleotide: FAS-2464
gacaucaacuccaagggauuggaa

SEQ ID NO: 28371 - RNA, 18 nt, Artificial Sequence
  Synthetic oligonucleotide: FAS-2465
uuuccuugggcaggugaa

SEQ ID NO: 28372 - RNA, 19 nt, Artificial Sequence
  Synthetic oligonucleotide: FAS-2466
uuuuccuugggcaggugaa

SEQ ID NO: 28373 - RNA, 20 nt, Artificial Sequence
  Synthetic oligonucleotide: FAS-54
uuuuuccuugggcaggugaa

SEQ ID NO: 28374 - RNA, 21 nt, Artificial Sequence
  Synthetic oligonucleotide: FAS-2467
uuuuuuccuugggcaggugaa

SEQ ID NO: 28375 - RNA, 22 nt, Artificial Sequence
  Synthetic oligonucleotide: FAS-2468
cuuuuuuccuugggcaggugaa

SEQ ID NO: 28376 - RNA, 23 nt, Artificial Sequence
  Synthetic oligonucleotide: FAS-2469
ccuuuuuuccuugggcaggugaa

SEQ ID NO: 28377 - RNA, 24 nt, Artificial Sequence
  Synthetic oligonucleotide: FAS-2470
uccuuuuuuccuugggcaggugaa

SEQ ID NO: 28378 - RNA, 18 nt, Artificial Sequence
  Synthetic oligonucleotide: FAS-2471
ccagcaacaccaagugca

SEQ ID NO: 28379 - RNA, 19 nt, Artificial Sequence
  Synthetic oligonucleotide: FAS-2472
accagcaacaccaagugca

SEQ ID NO: 28380 - RNA, 20 nt, Artificial Sequence
  Synthetic oligonucleotide: FAS-378
caccagcaacaccaagugca

SEQ ID NO: 28381 - RNA, 21 nt, Artificial Sequence
  Synthetic oligonucleotide: FAS-2473
ucaccagcaacaccaagugca

SEQ ID NO: 28382 - RNA, 22 nt, Artificial Sequence
  Synthetic oligonucleotide: FAS-2474
cucaccagcaacaccaagugca

SEQ ID NO: 28383 - RNA, 23 nt, Artificial Sequence
  Synthetic oligonucleotide: FAS-2475
acucaccagcaacaccaagugca

SEQ ID NO: 28384 - RNA, 24 nt, Artificial Sequence
  Synthetic oligonucleotide: FAS-2476
cacucaccagcaacaccaagugca

SEQ ID NO: 28385 - RNA, 18 nt, Artificial Sequence
  Synthetic oligonucleotide: FAS-2477
cuagggacugcacaguca

SEQ ID NO: 28386 - RNA, 19 nt, Artificial Sequence
  Synthetic oligonucleotide: FAS-2478
gcuagggacugcacaguca

SEQ ID NO: 28387 - RNA, 20 nt, Artificial Sequence
  Synthetic oligonucleotide: FAS-181
agcuagggacugcacaguca

SEQ ID NO: 28388 - RNA, 21 nt, Artificial Sequence
  Synthetic oligonucleotide: FAS-2479
aagcuagggacugcacaguca

SEQ ID NO: 28389 - RNA, 22 nt, Artificial Sequence
  Synthetic oligonucleotide: FAS-2480
aaagcuagggacugcacaguca

SEQ ID NO: 28390 - RNA, 23 nt, Artificial Sequence
  Synthetic oligonucleotide: FAS-2481
gaaagcuagggacugcacaguca

SEQ ID NO: 28391 - RNA, 24 nt, Artificial Sequence
  Synthetic oligonucleotide: FAS-2482
ggaaagcuagggacugcacaguca

SEQ ID NO: 28392 - RNA, 18 nt, Artificial Sequence
  Synthetic oligonucleotide: FAS-2483
cugcgugcccugccaaga

SEQ ID NO: 28393 - RNA, 19 nt, Artificial Sequence
  Synthetic oligonucleotide: FAS-2484
acugcgugcccugccaaga

SEQ ID NO: 28394 - RNA, 20 nt, Artificial Sequence
  Synthetic oligonucleotide: FAS-60
gacugcgugcccugccaaga

SEQ ID NO: 28395 - RNA, 21 nt, Artificial Sequence
  Synthetic oligonucleotide: FAS-2485
agacugcgugcccugccaaga

SEQ ID NO: 28396 - RNA, 22 nt, Artificial Sequence
  Synthetic oligonucleotide: FAS-2486
cagacugcgugcccugccaaga

SEQ ID NO: 28397 - RNA, 23 nt, Artificial Sequence
  Synthetic oligonucleotide: FAS-2487
ccagacugcgugcccugccaaga

SEQ ID NO: 28398 - RNA, 24 nt, Artificial Sequence
  Synthetic oligonucleotide: FAS-2488
accagacugcgugcccugccaaga

SEQ ID NO: 28399 - RNA, 18 nt, Artificial Sequence
  Synthetic oligonucleotide: FAS-2489
gacaucaacuccaaggga

SEQ ID NO: 28400 - RNA, 19 nt, Artificial Sequence
  Synthetic oligonucleotide: FAS-2490
ugacaucaacuccaaggga

SEQ ID NO: 28401 - RNA, 20 nt, Artificial Sequence
  Synthetic oligonucleotide: FAS-125
cugacaucaacuccaaggga

SEQ ID NO: 28402 - RNA, 21 nt, Artificial Sequence
  Synthetic oligonucleotide: FAS-2491
acugacaucaacuccaaggga

SEQ ID NO: 28403 - RNA, 22 nt, Artificial Sequence
  Synthetic oligonucleotide: FAS-2492
gacugacaucaacuccaaggga

SEQ ID NO: 28404 - RNA, 23 nt, Artificial Sequence
  Synthetic oligonucleotide: FAS-2493
ugacugacaucaacuccaaggga

SEQ ID NO: 28405 - RNA, 24 nt, Artificial Sequence
  Synthetic oligonucleotide: FAS-2494
gugacugacaucaacuccaaggga

SEQ ID NO: 28406 - RNA, 18 nt, Artificial Sequence
  Synthetic oligonucleotide: FAS-2495
uuuuccuugggcagguga

SEQ ID NO: 28407 - RNA, 19 nt, Artificial Sequence
  Synthetic oligonucleotide: FAS-2496
uuuuuccuugggcagguga

SEQ ID NO: 28408 - RNA, 20 nt, Artificial Sequence
  Synthetic oligonucleotide: FAS-177
uuuuuuccuugggcagguga

SEQ ID NO: 28409 - RNA, 21 nt, Artificial Sequence
  Synthetic oligonucleotide: FAS-2497
cuuuuuuccuugggcagguga

SEQ ID NO: 28410 - RNA, 22 nt, Artificial Sequence
  Synthetic oligonucleotide: FAS-2498
ccuuuuuuccuugggcagguga

SEQ ID NO: 28411 - RNA, 23 nt, Artificial Sequence
  Synthetic oligonucleotide: FAS-2499
uccuuuuuuccuugggcagguga

SEQ ID NO: 28412 - RNA, 24 nt, Artificial Sequence
  Synthetic oligonucleotide: FAS-2500
cuccuuuuuuccuugggcagguga

SEQ ID NO: 28413 - RNA, 18 nt, Artificial Sequence
  Synthetic oligonucleotide: FAS-2501
gucuuaaaaugcaauuga

SEQ ID NO: 28414 - RNA, 19 nt, Artificial Sequence
  Synthetic oligonucleotide: FAS-2502
agucuuaaaaugcaauuga

SEQ ID NO: 28415 - RNA, 20 nt, Artificial Sequence
  Synthetic oligonucleotide: FAS-196
gagucuuaaaaugcaauuga

SEQ ID NO: 28416 - RNA, 21 nt, Artificial Sequence
  Synthetic oligonucleotide: FAS-2503
agagucuuaaaaugcaauuga

SEQ ID NO: 28417 - RNA, 22 nt, Artificial Sequence
  Synthetic oligonucleotide: FAS-2504
aagagucuuaaaaugcaauuga

SEQ ID NO: 28418 - RNA, 23 nt, Artificial Sequence
  Synthetic oligonucleotide: FAS-2505
uaagagucuuaaaaugcaauuga

SEQ ID NO: 28419 - RNA, 24 nt, Artificial Sequence
  Synthetic oligonucleotide: FAS-2506
guaagagucuuaaaaugcaauuga

SEQ ID NO: 28420 - RNA, 18 nt, Artificial Sequence
  Synthetic oligonucleotide: FAS-2507
acaguugagacucagaac

SEQ ID NO: 28421 - RNA, 19 nt, Artificial Sequence
  Synthetic oligonucleotide: FAS-2508
uacaguugagacucagaac

SEQ ID NO: 28422 - RNA, 20 nt, Artificial Sequence
  Synthetic oligonucleotide: FAS-132
cuacaguugagacucagaac

SEQ ID NO: 28423 - RNA, 21 nt, Artificial Sequence
  Synthetic oligonucleotide: FAS-2509
acuacaguugagacucagaac

SEQ ID NO: 28424 - RNA, 22 nt, Artificial Sequence
  Synthetic oligonucleotide: FAS-2510
uacuacaguugagacucagaac

SEQ ID NO: 28425 - RNA, 23 nt, Artificial Sequence
  Synthetic oligonucleotide: FAS-2511
uuacuacaguugagacucagaac

SEQ ID NO: 28426 - RNA, 24 nt, Artificial Sequence
  Synthetic oligonucleotide: FAS-2512
guuacuacaguugagacucagaac

SEQ ID NO: 28427 - RNA, 18 nt, Artificial Sequence
  Synthetic oligonucleotide: FAS-2513
uuuuuucuagaugugaac

SEQ ID NO: 28428 - RNA, 19 nt, Artificial Sequence
  Synthetic oligonucleotide: FAS-2514
uuuuuuucuagaugugaac

SEQ ID NO: 28429 - RNA, 20 nt, Artificial Sequence
  Synthetic oligonucleotide: FAS-374
uuuuuuuucuagaugugaac

SEQ ID NO: 28430 - RNA, 21 nt, Artificial Sequence
  Synthetic oligonucleotide: FAS-2515
uuuuuuuuucuagaugugaac

SEQ ID NO: 28431 - RNA, 22 nt, Artificial Sequence
  Synthetic oligonucleotide: FAS-2516
auuuuuuuuucuagaugugaac

SEQ ID NO: 28432 - RNA, 23 nt, Artificial Sequence
  Synthetic oligonucleotide: FAS-2517
uauuuuuuuuucuagaugugaac

SEQ ID NO: 28433 - RNA, 24 nt, Artificial Sequence
  Synthetic oligonucleotide: FAS-2518
guauuuuuuuuucuagaugugaac

SEQ ID NO: 28434 - RNA, 18 nt, Artificial Sequence
  Synthetic oligonucleotide: FAS-2519
aguggaaauaaacugcac

SEQ ID NO: 28435 - RNA, 19 nt, Artificial Sequence
  Synthetic oligonucleotide: FAS-2520
aaguggaaauaaacugcac

SEQ ID NO: 28436 - RNA, 20 nt, Artificial Sequence
  Synthetic oligonucleotide: FAS-370
gaaguggaaauaaacugcac

SEQ ID NO: 28437 - RNA, 21 nt, Artificial Sequence
  Synthetic oligonucleotide: FAS-2521
agaaguggaaauaaacugcac

SEQ ID NO: 28438 - RNA, 22 nt, Artificial Sequence
  Synthetic oligonucleotide: FAS-2522
uagaaguggaaauaaacugcac

SEQ ID NO: 28439 - RNA, 23 nt, Artificial Sequence
  Synthetic oligonucleotide: FAS-2523
uuagaaguggaaauaaacugcac

SEQ ID NO: 28440 - RNA, 24 nt, Artificial Sequence
  Synthetic oligonucleotide: FAS-2524
cuuagaaguggaaauaaacugcac

SEQ ID NO: 28441 - RNA, 18 nt, Artificial Sequence
  Synthetic oligonucleotide: FAS-2525
cagacugcgugcccugcc

SEQ ID NO: 28442 - RNA, 19 nt, Artificial Sequence
  Synthetic oligonucleotide: FAS-2526
ccagacugcgugcccugcc

SEQ ID NO: 28443 - RNA, 20 nt, Artificial Sequence
  Synthetic oligonucleotide: FAS-185
accagacugcgugcccugcc

SEQ ID NO: 28444 - RNA, 21 nt, Artificial Sequence
  Synthetic oligonucleotide: FAS-2527
aaccagacugcgugcccugcc

SEQ ID NO: 28445 - RNA, 22 nt, Artificial Sequence
  Synthetic oligonucleotide: FAS-2528
gaaccagacugcgugcccugcc

SEQ ID NO: 28446 - RNA, 23 nt, Artificial Sequence
  Synthetic oligonucleotide: FAS-2529
ugaaccagacugcgugcccugcc

SEQ ID NO: 28447 - RNA, 24 nt, Artificial Sequence
  Synthetic oligonucleotide: FAS-2530
augaaccagacugcgugcccugcc

SEQ ID NO: 28448 - RNA, 18 nt, Artificial Sequence
  Synthetic oligonucleotide: FAS-2531
gugacugacaucaacucc

SEQ ID NO: 28449 - RNA, 19 nt, Artificial Sequence
  Synthetic oligonucleotide: FAS-2532
agugacugacaucaacucc

SEQ ID NO: 28450 - RNA, 20 nt, Artificial Sequence
  Synthetic oligonucleotide: FAS-123
aagugacugacaucaacucc

SEQ ID NO: 28451 - RNA, 21 nt, Artificial Sequence
  Synthetic oligonucleotide: FAS-2533
caagugacugacaucaacucc

SEQ ID NO: 28452 - RNA, 22 nt, Artificial Sequence
  Synthetic oligonucleotide: FAS-2534
ccaagugacugacaucaacucc

SEQ ID NO: 28453 - RNA, 23 nt, Artificial Sequence
  Synthetic oligonucleotide: FAS-2535
cccaagugacugacaucaacucc

SEQ ID NO: 28454 - RNA, 24 nt, Artificial Sequence
  Synthetic oligonucleotide: FAS-2536
gcccaagugacugacaucaacucc

SEQ ID NO: 28455 - RNA, 18 nt, Artificial Sequence
  Synthetic oligonucleotide: FAS-2537
cacuugcuccuuuuuucc

SEQ ID NO: 28456 - RNA, 19 nt, Artificial Sequence
  Synthetic oligonucleotide: FAS-2538
acacuugcuccuuuuuucc

SEQ ID NO: 28457 - RNA, 20 nt, Artificial Sequence
  Synthetic oligonucleotide: FAS-175
aacacuugcuccuuuuuucc

SEQ ID NO: 28458 - RNA, 18 nt, Artificial Sequence
  Synthetic oligonucleotide: FAS-2539
ggcaggugaaaggaaagc

SEQ ID NO: 28459 - RNA, 19 nt, Artificial Sequence
  Synthetic oligonucleotide: FAS-2540
gggcaggugaaaggaaagc

SEQ ID NO: 28460 - RNA, 20 nt, Artificial Sequence
  Synthetic oligonucleotide: FAS-179
ugggcaggugaaaggaaagc

SEQ ID NO: 28461 - RNA, 21 nt, Artificial Sequence
  Synthetic oligonucleotide: FAS-2541
uugggcaggugaaaggaaagc

SEQ ID NO: 28462 - RNA, 22 nt, Artificial Sequence
  Synthetic oligonucleotide: FAS-2542
cuugggcaggugaaaggaaagc

SEQ ID NO: 28463 - RNA, 23 nt, Artificial Sequence
  Synthetic oligonucleotide: FAS-2543
ccuugggcaggugaaaggaaagc

SEQ ID NO: 28464 - RNA, 24 nt, Artificial Sequence
  Synthetic oligonucleotide: FAS-2544
uccuugggcaggugaaaggaaagc

SEQ ID NO: 28465 - RNA, 18 nt, Artificial Sequence
  Synthetic oligonucleotide: FAS-2545
uauguuacacaaaacauc

SEQ ID NO: 28466 - RNA, 19 nt, Artificial Sequence
  Synthetic oligonucleotide: FAS-2546
guauguuacacaaaacauc

SEQ ID NO: 28467 - RNA, 20 nt, Artificial Sequence
  Synthetic oligonucleotide: FAS-134
gguauguuacacaaaacauc

SEQ ID NO: 28468 - RNA, 21 nt, Artificial Sequence
  Synthetic oligonucleotide: FAS-2547
agguauguuacacaaaacauc

SEQ ID NO: 28469 - RNA, 22 nt, Artificial Sequence
  Synthetic oligonucleotide: FAS-2548
cagguauguuacacaaaacauc

SEQ ID NO: 28470 - RNA, 23 nt, Artificial Sequence
  Synthetic oligonucleotide: FAS-2549
ccagguauguuacacaaaacauc

SEQ ID NO: 28471 - RNA, 24 nt, Artificial Sequence
  Synthetic oligonucleotide: FAS-2550
uccagguauguuacacaaaacauc

SEQ ID NO: 28472 - RNA, 18 nt, Artificial Sequence
  Synthetic oligonucleotide: FAS-2551
ugugaacauggaaucauc

SEQ ID NO: 28473 - RNA, 19 nt, Artificial Sequence
  Synthetic oligonucleotide: FAS-2552
augugaacauggaaucauc

SEQ ID NO: 28474 - RNA, 20 nt, Artificial Sequence
  Synthetic oligonucleotide: FAS-376
gaugugaacauggaaucauc

SEQ ID NO: 28475 - RNA, 21 nt, Artificial Sequence
  Synthetic oligonucleotide: FAS-2553
agaugugaacauggaaucauc

SEQ ID NO: 28476 - RNA, 22 nt, Artificial Sequence
  Synthetic oligonucleotide: FAS-2554
uagaugugaacauggaaucauc

SEQ ID NO: 28477 - RNA, 23 nt, Artificial Sequence
  Synthetic oligonucleotide: FAS-2555
cuagaugugaacauggaaucauc

SEQ ID NO: 28478 - RNA, 24 nt, Artificial Sequence
  Synthetic oligonucleotide: FAS-2556
ucuagaugugaacauggaaucauc

SEQ ID NO: 28479 - RNA, 18 nt, Artificial Sequence
  Synthetic oligonucleotide: FAS-2557
gcaacaccaagugcaaag

SEQ ID NO: 28480 - RNA, 19 nt, Artificial Sequence
  Synthetic oligonucleotide: FAS-2558
agcaacaccaagugcaaag

SEQ ID NO: 28481 - RNA, 20 nt, Artificial Sequence
  Synthetic oligonucleotide: FAS-250
cagcaacaccaagugcaaag

SEQ ID NO: 28482 - RNA, 21 nt, Artificial Sequence
  Synthetic oligonucleotide: FAS-2559
ccagcaacaccaagugcaaag

SEQ ID NO: 28483 - RNA, 22 nt, Artificial Sequence
  Synthetic oligonucleotide: FAS-2560
accagcaacaccaagugcaaag

SEQ ID NO: 28484 - RNA, 23 nt, Artificial Sequence
  Synthetic oligonucleotide: FAS-2561
caccagcaacaccaagugcaaag

SEQ ID NO: 28485 - RNA, 24 nt, Artificial Sequence
  Synthetic oligonucleotide: FAS-2562
ucaccagcaacaccaagugcaaag

SEQ ID NO: 28486 - RNA, 18 nt, Artificial Sequence
  Synthetic oligonucleotide: FAS-2563
acugcgugcccugccaag

SEQ ID NO: 28487 - RNA, 19 nt, Artificial Sequence
  Synthetic oligonucleotide: FAS-2564
gacugcgugcccugccaag

SEQ ID NO: 28488 - RNA, 20 nt, Artificial Sequence
  Synthetic oligonucleotide: FAS-186
agacugcgugcccugccaag

SEQ ID NO: 28489 - RNA, 21 nt, Artificial Sequence
  Synthetic oligonucleotide: FAS-2565
cagacugcgugcccugccaag

SEQ ID NO: 28490 - RNA, 22 nt, Artificial Sequence
  Synthetic oligonucleotide: FAS-2566
ccagacugcgugcccugccaag

SEQ ID NO: 28491 - RNA, 23 nt, Artificial Sequence
  Synthetic oligonucleotide: FAS-2567
accagacugcgugcccugccaag

SEQ ID NO: 28492 - RNA, 24 nt, Artificial Sequence
  Synthetic oligonucleotide: FAS-2568
aaccagacugcgugcccugccaag

SEQ ID NO: 28493 - RNA, 18 nt, Artificial Sequence
  Synthetic oligonucleotide: FAS-2569
auuuucuaggcuuagaag

SEQ ID NO: 28494 - RNA, 19 nt, Artificial Sequence
  Synthetic oligonucleotide: FAS-2570
gauuuucuaggcuuagaag

SEQ ID NO: 28495 - RNA, 20 nt, Artificial Sequence
  Synthetic oligonucleotide: FAS-246
ugauuuucuaggcuuagaag

SEQ ID NO: 28496 - RNA, 21 nt, Artificial Sequence
  Synthetic oligonucleotide: FAS-2571
cugauuuucuaggcuuagaag

SEQ ID NO: 28497 - RNA, 22 nt, Artificial Sequence
  Synthetic oligonucleotide: FAS-2572
acugauuuucuaggcuuagaag

SEQ ID NO: 28498 - RNA, 23 nt, Artificial Sequence
  Synthetic oligonucleotide: FAS-2573
aacugauuuucuaggcuuagaag

SEQ ID NO: 28499 - RNA, 24 nt, Artificial Sequence
  Synthetic oligonucleotide: FAS-2574
aaacugauuuucuaggcuuagaag

SEQ ID NO: 28500 - RNA, 18 nt, Artificial Sequence
  Synthetic oligonucleotide: FAS-2575
ggaagacuguuacuacag

SEQ ID NO: 28501 - RNA, 19 nt, Artificial Sequence
  Synthetic oligonucleotide: FAS-2576
aggaagacuguuacuacag

SEQ ID NO: 28502 - RNA, 20 nt, Artificial Sequence
  Synthetic oligonucleotide: FAS-130
gaggaagacuguuacuacag

SEQ ID NO: 28503 - RNA, 21 nt, Artificial Sequence
  Synthetic oligonucleotide: FAS-2577
ugaggaagacuguuacuacag

SEQ ID NO: 28504 - RNA, 22 nt, Artificial Sequence
  Synthetic oligonucleotide: FAS-2578
uugaggaagacuguuacuacag

SEQ ID NO: 28505 - RNA, 23 nt, Artificial Sequence
  Synthetic oligonucleotide: FAS-2579
auugaggaagacuguuacuacag

SEQ ID NO: 28506 - RNA, 24 nt, Artificial Sequence
  Synthetic oligonucleotide: FAS-2580
aauugaggaagacuguuacuacag

SEQ ID NO: 28507 - RNA, 18 nt, Artificial Sequence
  Synthetic oligonucleotide: FAS-2581
ccuuuuuuccuugggcag

SEQ ID NO: 28508 - RNA, 19 nt, Artificial Sequence
  Synthetic oligonucleotide: FAS-2582
uccuuuuuuccuugggcag

SEQ ID NO: 28509 - RNA, 20 nt, Artificial Sequence
  Synthetic oligonucleotide: FAS-176
cuccuuuuuuccuugggcag

SEQ ID NO: 28510 - RNA, 21 nt, Artificial Sequence
  Synthetic oligonucleotide: FAS-2583
gcuccuuuuuuccuugggcag

SEQ ID NO: 28511 - RNA, 22 nt, Artificial Sequence
  Synthetic oligonucleotide: FAS-2584
ugcuccuuuuuuccuugggcag

SEQ ID NO: 28512 - RNA, 23 nt, Artificial Sequence
  Synthetic oligonucleotide: FAS-2585
uugcuccuuuuuuccuugggcag

SEQ ID NO: 28513 - RNA, 24 nt, Artificial Sequence
  Synthetic oligonucleotide: FAS-2586
cuugcuccuuuuuuccuugggcag

SEQ ID NO: 28514 - RNA, 18 nt, Artificial Sequence
  Synthetic oligonucleotide: FAS-2587
gagcccucuccugcccgg

SEQ ID NO: 28515 - RNA, 19 nt, Artificial Sequence
  Synthetic oligonucleotide: FAS-2588
ugagcccucuccugcccgg

SEQ ID NO: 28516 - RNA, 20 nt, Artificial Sequence
  Synthetic oligonucleotide: FAS-1052
gugagcccucuccugcccgg

SEQ ID NO: 28517 - RNA, 21 nt, Artificial Sequence
  Synthetic oligonucleotide: FAS-2589
ggugagcccucuccugcccgg

SEQ ID NO: 28518 - RNA, 22 nt, Artificial Sequence
  Synthetic oligonucleotide: FAS-2590
uggugagcccucuccugcccgg

SEQ ID NO: 28519 - RNA, 23 nt, Artificial Sequence
  Synthetic oligonucleotide: FAS-2591
cuggugagcccucuccugcccgg

SEQ ID NO: 28520 - RNA, 24 nt, Artificial Sequence
  Synthetic oligonucleotide: FAS-2592
ucuggugagcccucuccugcccgg

SEQ ID NO: 28521 - RNA, 18 nt, Artificial Sequence
  Synthetic oligonucleotide: FAS-2593
gugcccugccaagaaggg

SEQ ID NO: 28522 - RNA, 19 nt, Artificial Sequence
  Synthetic oligonucleotide: FAS-2594
cgugcccugccaagaaggg

SEQ ID NO: 28523 - RNA, 20 nt, Artificial Sequence
  Synthetic oligonucleotide: FAS-189
gcgugcccugccaagaaggg

SEQ ID NO: 28524 - RNA, 21 nt, Artificial Sequence
  Synthetic oligonucleotide: FAS-2595
ugcgugcccugccaagaaggg

SEQ ID NO: 28525 - RNA, 22 nt, Artificial Sequence
  Synthetic oligonucleotide: FAS-2596
cugcgugcccugccaagaaggg

SEQ ID NO: 28526 - RNA, 23 nt, Artificial Sequence
  Synthetic oligonucleotide: FAS-2597
acugcgugcccugccaagaaggg

SEQ ID NO: 28527 - RNA, 24 nt, Artificial Sequence
  Synthetic oligonucleotide: FAS-2598
gacugcgugcccugccaagaaggg

SEQ ID NO: 28528 - RNA, 18 nt, Artificial Sequence
  Synthetic oligonucleotide: FAS-2599
agcccucuccugcccggg

SEQ ID NO: 28529 - RNA, 19 nt, Artificial Sequence
  Synthetic oligonucleotide: FAS-2600
gagcccucuccugcccggg

SEQ ID NO: 28530 - RNA, 20 nt, Artificial Sequence
  Synthetic oligonucleotide: FAS-665
ugagcccucuccugcccggg

SEQ ID NO: 28531 - RNA, 21 nt, Artificial Sequence
  Synthetic oligonucleotide: FAS-2601
gugagcccucuccugcccggg

SEQ ID NO: 28532 - RNA, 22 nt, Artificial Sequence
  Synthetic oligonucleotide: FAS-2602
ggugagcccucuccugcccggg

SEQ ID NO: 28533 - RNA, 23 nt, Artificial Sequence
  Synthetic oligonucleotide: FAS-2603
uggugagcccucuccugcccggg

SEQ ID NO: 28534 - RNA, 24 nt, Artificial Sequence
  Synthetic oligonucleotide: FAS-2604
cuggugagcccucuccugcccggg

SEQ ID NO: 28535 - RNA, 18 nt, Artificial Sequence
  Synthetic oligonucleotide: FAS-2605
acugcacagucaaugggg

SEQ ID NO: 28536 - RNA, 19 nt, Artificial Sequence
  Synthetic oligonucleotide: FAS-2606
gacugcacagucaaugggg

SEQ ID NO: 28537 - RNA, 20 nt, Artificial Sequence
  Synthetic oligonucleotide: FAS-184
ggacugcacagucaaugggg

SEQ ID NO: 28538 - RNA, 21 nt, Artificial Sequence
  Synthetic oligonucleotide: FAS-2607
gggacugcacagucaaugggg

SEQ ID NO: 28539 - RNA, 22 nt, Artificial Sequence
  Synthetic oligonucleotide: FAS-2608
agggacugcacagucaaugggg

SEQ ID NO: 28540 - RNA, 23 nt, Artificial Sequence
  Synthetic oligonucleotide: FAS-2609
uagggacugcacagucaaugggg

SEQ ID NO: 28541 - RNA, 24 nt, Artificial Sequence
  Synthetic oligonucleotide: FAS-2610
cuagggacugcacagucaaugggg

SEQ ID NO: 28542 - RNA, 18 nt, Artificial Sequence
  Synthetic oligonucleotide: FAS-2611
ccauuuuucuuccaaaug

SEQ ID NO: 28543 - RNA, 19 nt, Artificial Sequence
  Synthetic oligonucleotide: FAS-2612
cccauuuuucuuccaaaug

SEQ ID NO: 28544 - RNA, 20 nt, Artificial Sequence
  Synthetic oligonucleotide: FAS-191
gcccauuuuucuuccaaaug

SEQ ID NO: 28545 - RNA, 21 nt, Artificial Sequence
  Synthetic oligonucleotide: FAS-2613
agcccauuuuucuuccaaaug

SEQ ID NO: 28546 - RNA, 22 nt, Artificial Sequence
  Synthetic oligonucleotide: FAS-2614
aagcccauuuuucuuccaaaug

SEQ ID NO: 28547 - RNA, 23 nt, Artificial Sequence
  Synthetic oligonucleotide: FAS-2615
aaagcccauuuuucuuccaaaug

SEQ ID NO: 28548 - RNA, 24 nt, Artificial Sequence
  Synthetic oligonucleotide: FAS-2616
caaagcccauuuuucuuccaaaug

SEQ ID NO: 28549 - RNA, 18 nt, Artificial Sequence
  Synthetic oligonucleotide: FAS-2617
gauugcucaacaaccaug

SEQ ID NO: 28550 - RNA, 19 nt, Artificial Sequence
  Synthetic oligonucleotide: FAS-2618
ggauugcucaacaaccaug

SEQ ID NO: 28551 - RNA, 20 nt, Artificial Sequence
  Synthetic oligonucleotide: FAS-1048
aggauugcucaacaaccaug

SEQ ID NO: 28552 - RNA, 21 nt, Artificial Sequence
  Synthetic oligonucleotide: FAS-2619
gaggauugcucaacaaccaug

SEQ ID NO: 28553 - RNA, 22 nt, Artificial Sequence
  Synthetic oligonucleotide: FAS-2620
ggaggauugcucaacaaccaug

SEQ ID NO: 28554 - RNA, 23 nt, Artificial Sequence
  Synthetic oligonucleotide: FAS-2621
cggaggauugcucaacaaccaug

SEQ ID NO: 28555 - RNA, 24 nt, Artificial Sequence
  Synthetic oligonucleotide: FAS-2622
ucggaggauugcucaacaaccaug

SEQ ID NO: 28556 - RNA, 18 nt, Artificial Sequence
  Synthetic oligonucleotide: FAS-2623
gauguagauugugugaug

SEQ ID NO: 28557 - RNA, 19 nt, Artificial Sequence
  Synthetic oligonucleotide: FAS-2624
agauguagauugugugaug

SEQ ID NO: 28558 - RNA, 20 nt, Artificial Sequence
  Synthetic oligonucleotide: FAS-193
aagauguagauugugugaug

SEQ ID NO: 28559 - RNA, 21 nt, Artificial Sequence
  Synthetic oligonucleotide: FAS-2625
gaagauguagauugugugaug

SEQ ID NO: 28560 - RNA, 22 nt, Artificial Sequence
  Synthetic oligonucleotide: FAS-2626
agaagauguagauugugugaug

SEQ ID NO: 28561 - RNA, 23 nt, Artificial Sequence
  Synthetic oligonucleotide: FAS-2627
cagaagauguagauugugugaug

SEQ ID NO: 28562 - RNA, 24 nt, Artificial Sequence
  Synthetic oligonucleotide: FAS-2628
gcagaagauguagauugugugaug

SEQ ID NO: 28563 - RNA, 18 nt, Artificial Sequence
  Synthetic oligonucleotide: FAS-2629
uggacccuccuaccucug

SEQ ID NO: 28564 - RNA, 19 nt, Artificial Sequence
  Synthetic oligonucleotide: FAS-2630
cuggacccuccuaccucug

SEQ ID NO: 28565 - RNA, 20 nt, Artificial Sequence
  Synthetic oligonucleotide: FAS-100
ucuggacccuccuaccucug

SEQ ID NO: 28566 - RNA, 21 nt, Artificial Sequence
  Synthetic oligonucleotide: FAS-2631
aucuggacccuccuaccucug

SEQ ID NO: 28567 - RNA, 22 nt, Artificial Sequence
  Synthetic oligonucleotide: FAS-2632
caucuggacccuccuaccucug

SEQ ID NO: 28568 - RNA, 23 nt, Artificial Sequence
  Synthetic oligonucleotide: FAS-2633
gcaucuggacccuccuaccucug

SEQ ID NO: 28569 - RNA, 24 nt, Artificial Sequence
  Synthetic oligonucleotide: FAS-2634
ggcaucuggacccuccuaccucug

SEQ ID NO: 28570 - RNA, 18 nt, Artificial Sequence
  Synthetic oligonucleotide: FAS-2635
gaagauguagauugugug

SEQ ID NO: 28571 - RNA, 19 nt, Artificial Sequence
  Synthetic oligonucleotide: FAS-2636
agaagauguagauugugug

SEQ ID NO: 28572 - RNA, 20 nt, Artificial Sequence
  Synthetic oligonucleotide: FAS-192
cagaagauguagauugugug

SEQ ID NO: 28573 - RNA, 21 nt, Artificial Sequence
  Synthetic oligonucleotide: FAS-2637
gcagaagauguagauugugug

SEQ ID NO: 28574 - RNA, 22 nt, Artificial Sequence
  Synthetic oligonucleotide: FAS-2638
ugcagaagauguagauugugug

SEQ ID NO: 28575 - RNA, 23 nt, Artificial Sequence
  Synthetic oligonucleotide: FAS-2639
augcagaagauguagauugugug

SEQ ID NO: 28576 - RNA, 24 nt, Artificial Sequence
  Synthetic oligonucleotide: FAS-2640
aaugcagaagauguagauugugug

SEQ ID NO: 28577 - RNA, 18 nt, Artificial Sequence
  Synthetic oligonucleotide: FAS-2641
uccaagggauuggaauug

SEQ ID NO: 28578 - RNA, 19 nt, Artificial Sequence
  Synthetic oligonucleotide: FAS-2642
cuccaagggauuggaauug

SEQ ID NO: 28579 - RNA, 20 nt, Artificial Sequence
  Synthetic oligonucleotide: FAS-15
acuccaagggauuggaauug

SEQ ID NO: 28580 - RNA, 21 nt, Artificial Sequence
  Synthetic oligonucleotide: FAS-2643
aacuccaagggauuggaauug

SEQ ID NO: 28581 - RNA, 22 nt, Artificial Sequence
  Synthetic oligonucleotide: FAS-2644
caacuccaagggauuggaauug

SEQ ID NO: 28582 - RNA, 23 nt, Artificial Sequence
  Synthetic oligonucleotide: FAS-2645
ucaacuccaagggauuggaauug

SEQ ID NO: 28583 - RNA, 24 nt, Artificial Sequence
  Synthetic oligonucleotide: FAS-2646
aucaacuccaagggauuggaauug

SEQ ID NO: 28584 - RNA, 18 nt, Artificial Sequence
  Synthetic oligonucleotide: FAS-2647
aacaaccaugcugggcau

SEQ ID NO: 28585 - RNA, 19 nt, Artificial Sequence
  Synthetic oligonucleotide: FAS-2648
caacaaccaugcugggcau

SEQ ID NO: 28586 - RNA, 20 nt, Artificial Sequence
  Synthetic oligonucleotide: FAS-99
ucaacaaccaugcugggcau

SEQ ID NO: 28587 - RNA, 21 nt, Artificial Sequence
  Synthetic oligonucleotide: FAS-2649
cucaacaaccaugcugggcau

SEQ ID NO: 28588 - RNA, 22 nt, Artificial Sequence
  Synthetic oligonucleotide: FAS-2650
gcucaacaaccaugcugggcau

SEQ ID NO: 28589 - RNA, 23 nt, Artificial Sequence
  Synthetic oligonucleotide: FAS-2651
ugcucaacaaccaugcugggcau

SEQ ID NO: 28590 - RNA, 24 nt, Artificial Sequence
  Synthetic oligonucleotide: FAS-2652
uugcucaacaaccaugcugggcau

SEQ ID NO: 28591 - RNA, 18 nt, Artificial Sequence
  Synthetic oligonucleotide: FAS-2653
guauuuuuuuuucuagau

SEQ ID NO: 28592 - RNA, 19 nt, Artificial Sequence
  Synthetic oligonucleotide: FAS-2654
uguauuuuuuuuucuagau

SEQ ID NO: 28593 - RNA, 20 nt, Artificial Sequence
  Synthetic oligonucleotide: FAS-373
cuguauuuuuuuuucuagau

SEQ ID NO: 28594 - RNA, 21 nt, Artificial Sequence
  Synthetic oligonucleotide: FAS-2655
ccuguauuuuuuuuucuagau

SEQ ID NO: 28595 - RNA, 22 nt, Artificial Sequence
  Synthetic oligonucleotide: FAS-2656
uccuguauuuuuuuuucuagau

SEQ ID NO: 28596 - RNA, 23 nt, Artificial Sequence
  Synthetic oligonucleotide: FAS-2657
cuccuguauuuuuuuuucuagau

SEQ ID NO: 28597 - RNA, 24 nt, Artificial Sequence
  Synthetic oligonucleotide: FAS-2658
ucuccuguauuuuuuuuucuagau

SEQ ID NO: 28598 - RNA, 18 nt, Artificial Sequence
  Synthetic oligonucleotide: FAS-2659
uuuguaacucuacuguau

SEQ ID NO: 28599 - RNA, 19 nt, Artificial Sequence
  Synthetic oligonucleotide: FAS-2660
uuuuguaacucuacuguau

SEQ ID NO: 28600 - RNA, 20 nt, Artificial Sequence
  Synthetic oligonucleotide: FAS-372
uuuuuguaacucuacuguau

SEQ ID NO: 28601 - RNA, 21 nt, Artificial Sequence
  Synthetic oligonucleotide: FAS-2661
uuuuuuguaacucuacuguau

SEQ ID NO: 28602 - RNA, 22 nt, Artificial Sequence
  Synthetic oligonucleotide: FAS-2662
uuuuuuuguaacucuacuguau

SEQ ID NO: 28603 - RNA, 23 nt, Artificial Sequence
  Synthetic oligonucleotide: FAS-2663
cuuuuuuuguaacucuacuguau

SEQ ID NO: 28604 - RNA, 24 nt, Artificial Sequence
  Synthetic oligonucleotide: FAS-2664
acuuuuuuuguaacucuacuguau

SEQ ID NO: 28605 - RNA, 18 nt, Artificial Sequence
  Synthetic oligonucleotide: FAS-2665
caguugagacucagaacu

SEQ ID NO: 28606 - RNA, 19 nt, Artificial Sequence
  Synthetic oligonucleotide: FAS-2666
acaguugagacucagaacu

SEQ ID NO: 28607 - RNA, 20 nt, Artificial Sequence
  Synthetic oligonucleotide: FAS-16
uacaguugagacucagaacu

SEQ ID NO: 28608 - RNA, 21 nt, Artificial Sequence
  Synthetic oligonucleotide: FAS-2667
cuacaguugagacucagaacu

SEQ ID NO: 28609 - RNA, 22 nt, Artificial Sequence
  Synthetic oligonucleotide: FAS-2668
acuacaguugagacucagaacu

SEQ ID NO: 28610 - RNA, 23 nt, Artificial Sequence
  Synthetic oligonucleotide: FAS-2669
uacuacaguugagacucagaacu

SEQ ID NO: 28611 - RNA, 24 nt, Artificial Sequence
  Synthetic oligonucleotide: FAS-2670
uuacuacaguugagacucagaacu

SEQ ID NO: 28612 - RNA, 18 nt, Artificial Sequence
  Synthetic oligonucleotide: FAS-2671
guuacuacaguugagacu

SEQ ID NO: 28613 - RNA, 19 nt, Artificial Sequence
  Synthetic oligonucleotide: FAS-2672
uguuacuacaguugagacu

SEQ ID NO: 28614 - RNA, 20 nt, Artificial Sequence
  Synthetic oligonucleotide: FAS-131
cuguuacuacaguugagacu

SEQ ID NO: 28615 - RNA, 21 nt, Artificial Sequence
  Synthetic oligonucleotide: FAS-2673
acuguuacuacaguugagacu

SEQ ID NO: 28616 - RNA, 22 nt, Artificial Sequence
  Synthetic oligonucleotide: FAS-2674
gacuguuacuacaguugagacu

SEQ ID NO: 28617 - RNA, 23 nt, Artificial Sequence
  Synthetic oligonucleotide: FAS-2675
agacuguuacuacaguugagacu

SEQ ID NO: 28618 - RNA, 24 nt, Artificial Sequence
  Synthetic oligonucleotide: FAS-2676
aagacuguuacuacaguugagacu

SEQ ID NO: 28619 - RNA, 18 nt, Artificial Sequence
  Synthetic oligonucleotide: FAS-2677
gcaggugaaaggaaagcu

SEQ ID NO: 28620 - RNA, 19 nt, Artificial Sequence
  Synthetic oligonucleotide: FAS-2678
ggcaggugaaaggaaagcu

SEQ ID NO: 28621 - RNA, 20 nt, Artificial Sequence
  Synthetic oligonucleotide: FAS-55
gggcaggugaaaggaaagcu

SEQ ID NO: 28622 - RNA, 21 nt, Artificial Sequence
  Synthetic oligonucleotide: FAS-2679
ugggcaggugaaaggaaagcu

SEQ ID NO: 28623 - RNA, 22 nt, Artificial Sequence
  Synthetic oligonucleotide: FAS-2680
uugggcaggugaaaggaaagcu

SEQ ID NO: 28624 - RNA, 23 nt, Artificial Sequence
  Synthetic oligonucleotide: FAS-2681
cuugggcaggugaaaggaaagcu

SEQ ID NO: 28625 - RNA, 24 nt, Artificial Sequence
  Synthetic oligonucleotide: FAS-2682
ccuugggcaggugaaaggaaagcu

SEQ ID NO: 28626 - RNA, 18 nt, Artificial Sequence
  Synthetic oligonucleotide: FAS-2683
aaacugauuuucuaggcu

SEQ ID NO: 28627 - RNA, 19 nt, Artificial Sequence
  Synthetic oligonucleotide: FAS-2684
caaacugauuuucuaggcu

SEQ ID NO: 28628 - RNA, 20 nt, Artificial Sequence
  Synthetic oligonucleotide: FAS-367
ccaaacugauuuucuaggcu

SEQ ID NO: 28629 - RNA, 21 nt, Artificial Sequence
  Synthetic oligonucleotide: FAS-2685
uccaaacugauuuucuaggcu

SEQ ID NO: 28630 - RNA, 22 nt, Artificial Sequence
  Synthetic oligonucleotide: FAS-2686
uuccaaacugauuuucuaggcu

SEQ ID NO: 28631 - RNA, 23 nt, Artificial Sequence
  Synthetic oligonucleotide: FAS-2687
uuuccaaacugauuuucuaggcu

SEQ ID NO: 28632 - RNA, 24 nt, Artificial Sequence
  Synthetic oligonucleotide: FAS-2688
guuuccaaacugauuuucuaggcu

SEQ ID NO: 28633 - RNA, 18 nt, Artificial Sequence
  Synthetic oligonucleotide: FAS-2689
cuccaagggauuggaauu

SEQ ID NO: 28634 - RNA, 19 nt, Artificial Sequence
  Synthetic oligonucleotide: FAS-2690
acuccaagggauuggaauu

SEQ ID NO: 28635 - RNA, 20 nt, Artificial Sequence
  Synthetic oligonucleotide: FAS-128
aacuccaagggauuggaauu

SEQ ID NO: 28636 - RNA, 21 nt, Artificial Sequence
  Synthetic oligonucleotide: FAS-2691
caacuccaagggauuggaauu

SEQ ID NO: 28637 - RNA, 22 nt, Artificial Sequence
  Synthetic oligonucleotide: FAS-2692
ucaacuccaagggauuggaauu

SEQ ID NO: 28638 - RNA, 23 nt, Artificial Sequence
  Synthetic oligonucleotide: FAS-2693
aucaacuccaagggauuggaauu

SEQ ID NO: 28639 - RNA, 24 nt, Artificial Sequence
  Synthetic oligonucleotide: FAS-2694
caucaacuccaagggauuggaauu

SEQ ID NO: 28640 - RNA, 18 nt, Artificial Sequence
  Synthetic oligonucleotide: FAS-2695
uaccuauuucaauaccua

SEQ ID NO: 28641 - RNA, 19 nt, Artificial Sequence
  Synthetic oligonucleotide: FAS-2696
auaccuauuucaauaccua

SEQ ID NO: 28642 - RNA, 20 nt, Artificial Sequence
  Synthetic oligonucleotide: FAS-503
gauaccuauuucaauaccua

SEQ ID NO: 28643 - RNA, 21 nt, Artificial Sequence
  Synthetic oligonucleotide: FAS-2697
ugauaccuauuucaauaccua

SEQ ID NO: 28644 - RNA, 22 nt, Artificial Sequence
  Synthetic oligonucleotide: FAS-2698
cugauaccuauuucaauaccua

SEQ ID NO: 28645 - RNA, 23 nt, Artificial Sequence
  Synthetic oligonucleotide: FAS-2699
gcugauaccuauuucaauaccua

SEQ ID NO: 28646 - RNA, 24 nt, Artificial Sequence
  Synthetic oligonucleotide: FAS-2700
agcugauaccuauuucaauaccua

SEQ ID NO: 28647 - RNA, 18 nt, Artificial Sequence
  Synthetic oligonucleotide: FAS-2701
agucugaauuuucucugc

SEQ ID NO: 28648 - RNA, 19 nt, Artificial Sequence
  Synthetic oligonucleotide: FAS-2702
uagucugaauuuucucugc

SEQ ID NO: 28649 - RNA, 20 nt, Artificial Sequence
  Synthetic oligonucleotide: FAS-488
auagucugaauuuucucugc

SEQ ID NO: 28650 - RNA, 21 nt, Artificial Sequence
  Synthetic oligonucleotide: FAS-2703
gauagucugaauuuucucugc

SEQ ID NO: 28651 - RNA, 22 nt, Artificial Sequence
  Synthetic oligonucleotide: FAS-2704
ugauagucugaauuuucucugc

SEQ ID NO: 28652 - RNA, 23 nt, Artificial Sequence
  Synthetic oligonucleotide: FAS-2705
augauagucugaauuuucucugc

SEQ ID NO: 28653 - RNA, 24 nt, Artificial Sequence
  Synthetic oligonucleotide: FAS-2706
gaugauagucugaauuuucucugc

SEQ ID NO: 28654 - RNA, 18 nt, Artificial Sequence
  Synthetic oligonucleotide: FAS-2707
cuuaccccaaacaauuag

SEQ ID NO: 28655 - RNA, 19 nt, Artificial Sequence
  Synthetic oligonucleotide: FAS-2708
acuuaccccaaacaauuag

SEQ ID NO: 28656 - RNA, 20 nt, Artificial Sequence
  Synthetic oligonucleotide: FAS-319
aacuuaccccaaacaauuag

SEQ ID NO: 28657 - RNA, 21 nt, Artificial Sequence
  Synthetic oligonucleotide: FAS-2709
gaacuuaccccaaacaauuag

SEQ ID NO: 28658 - RNA, 22 nt, Artificial Sequence
  Synthetic oligonucleotide: FAS-2710
agaacuuaccccaaacaauuag

SEQ ID NO: 28659 - RNA, 23 nt, Artificial Sequence
  Synthetic oligonucleotide: FAS-2711
aagaacuuaccccaaacaauuag

SEQ ID NO: 28660 - RNA, 24 nt, Artificial Sequence
  Synthetic oligonucleotide: FAS-2712
caagaacuuaccccaaacaauuag

SEQ ID NO: 28661 - RNA, 18 nt, Artificial Sequence
  Synthetic oligonucleotide: FAS-2713
agccaccccaaguuagau

SEQ ID NO: 28662 - RNA, 19 nt, Artificial Sequence
  Synthetic oligonucleotide: FAS-2714
aagccaccccaaguuagau

SEQ ID NO: 28663 - RNA, 20 nt, Artificial Sequence
  Synthetic oligonucleotide: FAS-516
aaagccaccccaaguuagau

SEQ ID NO: 28664 - RNA, 21 nt, Artificial Sequence
  Synthetic oligonucleotide: FAS-2715
caaagccaccccaaguuagau

SEQ ID NO: 28665 - RNA, 22 nt, Artificial Sequence
  Synthetic oligonucleotide: FAS-2716
acaaagccaccccaaguuagau

SEQ ID NO: 28666 - RNA, 23 nt, Artificial Sequence
  Synthetic oligonucleotide: FAS-2717
gacaaagccaccccaaguuagau

SEQ ID NO: 28667 - RNA, 24 nt, Artificial Sequence
  Synthetic oligonucleotide: FAS-2718
agacaaagccaccccaaguuagau

SEQ ID NO: 28668 - RNA, 18 nt, Artificial Sequence
  Synthetic oligonucleotide: FAS-2719
uucacucuagaccaagcu

SEQ ID NO: 28669 - RNA, 19 nt, Artificial Sequence
  Synthetic oligonucleotide: FAS-2720
uuucacucuagaccaagcu

SEQ ID NO: 28670 - RNA, 20 nt, Artificial Sequence
  Synthetic oligonucleotide: FAS-481
uuuucacucuagaccaagcu

SEQ ID NO: 28671 - RNA, 21 nt, Artificial Sequence
  Synthetic oligonucleotide: FAS-2721
uuuuucacucuagaccaagcu

SEQ ID NO: 28672 - RNA, 22 nt, Artificial Sequence
  Synthetic oligonucleotide: FAS-2722
guuuuucacucuagaccaagcu

SEQ ID NO: 28673 - RNA, 23 nt, Artificial Sequence
  Synthetic oligonucleotide: FAS-2723
uguuuuucacucuagaccaagcu

SEQ ID NO: 28674 - RNA, 24 nt, Artificial Sequence
  Synthetic oligonucleotide: FAS-2724
uuguuuuucacucuagaccaagcu

SEQ ID NO: 28675 - RNA, 18 nt, Artificial Sequence
  Synthetic oligonucleotide: FAS-2725
ggauuucauuucugaagu

SEQ ID NO: 28676 - RNA, 19 nt, Artificial Sequence
  Synthetic oligonucleotide: FAS-2726
uggauuucauuucugaagu

SEQ ID NO: 28677 - RNA, 20 nt, Artificial Sequence
  Synthetic oligonucleotide: FAS-483
uuggauuucauuucugaagu

SEQ ID NO: 28678 - RNA, 21 nt, Artificial Sequence
  Synthetic oligonucleotide: FAS-2727
uuuggauuucauuucugaagu

SEQ ID NO: 28679 - RNA, 22 nt, Artificial Sequence
  Synthetic oligonucleotide: FAS-2728
cuuuggauuucauuucugaagu

SEQ ID NO: 28680 - RNA, 23 nt, Artificial Sequence
  Synthetic oligonucleotide: FAS-2729
gcuuuggauuucauuucugaagu

SEQ ID NO: 28681 - RNA, 24 nt, Artificial Sequence
  Synthetic oligonucleotide: FAS-2730
agcuuuggauuucauuucugaagu

SEQ ID NO: 28682 - RNA, 18 nt, Artificial Sequence
  Synthetic oligonucleotide: FAS-2731
guccuugaggaugauagu

SEQ ID NO: 28683 - RNA, 19 nt, Artificial Sequence
  Synthetic oligonucleotide: FAS-2732
uguccuugaggaugauagu

SEQ ID NO: 28684 - RNA, 20 nt, Artificial Sequence
  Synthetic oligonucleotide: FAS-487
auguccuugaggaugauagu

SEQ ID NO: 28685 - RNA, 21 nt, Artificial Sequence
  Synthetic oligonucleotide: FAS-2733
aauguccuugaggaugauagu

SEQ ID NO: 28686 - RNA, 22 nt, Artificial Sequence
  Synthetic oligonucleotide: FAS-2734
uaauguccuugaggaugauagu

SEQ ID NO: 28687 - RNA, 23 nt, Artificial Sequence
  Synthetic oligonucleotide: FAS-2735
guaauguccuugaggaugauagu

SEQ ID NO: 28688 - RNA, 24 nt, Artificial Sequence
  Synthetic oligonucleotide: FAS-2736
aguaauguccuugaggaugauagu

SEQ ID NO: 28689 - RNA, 18 nt, Artificial Sequence
  Synthetic oligonucleotide: FAS-2737
gucacuaguaauguccuu

SEQ ID NO: 28690 - RNA, 19 nt, Artificial Sequence
  Synthetic oligonucleotide: FAS-2738
agucacuaguaauguccuu

SEQ ID NO: 28691 - RNA, 20 nt, Artificial Sequence
  Synthetic oligonucleotide: FAS-486
gagucacuaguaauguccuu

SEQ ID NO: 28692 - RNA, 21 nt, Artificial Sequence
  Synthetic oligonucleotide: FAS-2739
ugagucacuaguaauguccuu

SEQ ID NO: 28693 - RNA, 22 nt, Artificial Sequence
  Synthetic oligonucleotide: FAS-2740
cugagucacuaguaauguccuu

SEQ ID NO: 28694 - RNA, 23 nt, Artificial Sequence
  Synthetic oligonucleotide: FAS-2741
ucugagucacuaguaauguccuu

SEQ ID NO: 28695 - RNA, 24 nt, Artificial Sequence
  Synthetic oligonucleotide: FAS-2742
uucugagucacuaguaauguccuu

SEQ ID NO: 28696 - RNA, 18 nt, Artificial Sequence
  Synthetic oligonucleotide: FAS-2743
uucugaaguuugaauuuu

SEQ ID NO: 28697 - RNA, 19 nt, Artificial Sequence
  Synthetic oligonucleotide: FAS-2744
uuucugaaguuugaauuuu

SEQ ID NO: 28698 - RNA, 20 nt, Artificial Sequence
  Synthetic oligonucleotide: FAS-484
auuucugaaguuugaauuuu

SEQ ID NO: 28699 - RNA, 21 nt, Artificial Sequence
  Synthetic oligonucleotide: FAS-2745
cauuucugaaguuugaauuuu

SEQ ID NO: 28700 - RNA, 22 nt, Artificial Sequence
  Synthetic oligonucleotide: FAS-2746
ucauuucugaaguuugaauuuu

SEQ ID NO: 28701 - RNA, 23 nt, Artificial Sequence
  Synthetic oligonucleotide: FAS-2747
uucauuucugaaguuugaauuuu

SEQ ID NO: 28702 - RNA, 24 nt, Artificial Sequence
  Synthetic oligonucleotide: FAS-2748
uuucauuucugaaguuugaauuuu

SEQ ID NO: 28703 - RNA, 18 nt, Artificial Sequence
  Synthetic oligonucleotide: FAS-2749
guuaaaggcuuuguucga

SEQ ID NO: 28704 - RNA, 19 nt, Artificial Sequence
  Synthetic oligonucleotide: FAS-2750
aguuaaaggcuuuguucga

SEQ ID NO: 28705 - RNA, 20 nt, Artificial Sequence
  Synthetic oligonucleotide: FAS-405
aaguuaaaggcuuuguucga

SEQ ID NO: 28706 - RNA, 21 nt, Artificial Sequence
  Synthetic oligonucleotide: FAS-2751
caaguuaaaggcuuuguucga

SEQ ID NO: 28707 - RNA, 22 nt, Artificial Sequence
  Synthetic oligonucleotide: FAS-2752
ucaaguuaaaggcuuuguucga

SEQ ID NO: 28708 - RNA, 23 nt, Artificial Sequence
  Synthetic oligonucleotide: FAS-2753
gucaaguuaaaggcuuuguucga

SEQ ID NO: 28709 - RNA, 24 nt, Artificial Sequence
  Synthetic oligonucleotide: FAS-2754
agucaaguuaaaggcuuuguucga

SEQ ID NO: 28710 - RNA, 18 nt, Artificial Sequence
  Synthetic oligonucleotide: FAS-2755
guccaauguuccaaccua

SEQ ID NO: 28711 - RNA, 19 nt, Artificial Sequence
  Synthetic oligonucleotide: FAS-2756
uguccaauguuccaaccua

SEQ ID NO: 28712 - RNA, 20 nt, Artificial Sequence
  Synthetic oligonucleotide: FAS-381
auguccaauguuccaaccua

SEQ ID NO: 28713 - RNA, 21 nt, Artificial Sequence
  Synthetic oligonucleotide: FAS-2757
aauguccaauguuccaaccua

SEQ ID NO: 28714 - RNA, 22 nt, Artificial Sequence
  Synthetic oligonucleotide: FAS-2758
aaauguccaauguuccaaccua

SEQ ID NO: 28715 - RNA, 23 nt, Artificial Sequence
  Synthetic oligonucleotide: FAS-2759
aaaauguccaauguuccaaccua

SEQ ID NO: 28716 - RNA, 24 nt, Artificial Sequence
  Synthetic oligonucleotide: FAS-2760
uaaaauguccaauguuccaaccua

SEQ ID NO: 28717 - RNA, 18 nt, Artificial Sequence
  Synthetic oligonucleotide: FAS-2761
uauuuuucagauguugac

SEQ ID NO: 28718 - RNA, 19 nt, Artificial Sequence
  Synthetic oligonucleotide: FAS-2762
cuauuuuucagauguugac

SEQ ID NO: 28719 - RNA, 20 nt, Artificial Sequence
  Synthetic oligonucleotide: FAS-401
ucuauuuuucagauguugac

SEQ ID NO: 28720 - RNA, 21 nt, Artificial Sequence
  Synthetic oligonucleotide: FAS-2763
uucuauuuuucagauguugac

SEQ ID NO: 28721 - RNA, 22 nt, Artificial Sequence
  Synthetic oligonucleotide: FAS-2764
uuucuauuuuucagauguugac

SEQ ID NO: 28722 - RNA, 23 nt, Artificial Sequence
  Synthetic oligonucleotide: FAS-2765
uuuucuauuuuucagauguugac

SEQ ID NO: 28723 - RNA, 24 nt, Artificial Sequence
  Synthetic oligonucleotide: FAS-2766
auuuucuauuuuucagauguugac

SEQ ID NO: 28724 - RNA, 18 nt, Artificial Sequence
  Synthetic oligonucleotide: FAS-2767
auauaucaccacuauugc

SEQ ID NO: 28725 - RNA, 19 nt, Artificial Sequence
  Synthetic oligonucleotide: FAS-2768
aauauaucaccacuauugc

SEQ ID NO: 28726 - RNA, 20 nt, Artificial Sequence
  Synthetic oligonucleotide: FAS-270
aaauauaucaccacuauugc

SEQ ID NO: 28727 - RNA, 21 nt, Artificial Sequence
  Synthetic oligonucleotide: FAS-2769
uaaauauaucaccacuauugc

SEQ ID NO: 28728 - RNA, 22 nt, Artificial Sequence
  Synthetic oligonucleotide: FAS-2770
guaaauauaucaccacuauugc

SEQ ID NO: 28729 - RNA, 23 nt, Artificial Sequence
  Synthetic oligonucleotide: FAS-2771
aguaaauauaucaccacuauugc

SEQ ID NO: 28730 - RNA, 24 nt, Artificial Sequence
  Synthetic oligonucleotide: FAS-2772
gaguaaauauaucaccacuauugc

SEQ ID NO: 28731 - RNA, 18 nt, Artificial Sequence
  Synthetic oligonucleotide: FAS-2773
gccaaaauagaugagauc

SEQ ID NO: 28732 - RNA, 19 nt, Artificial Sequence
  Synthetic oligonucleotide: FAS-2774
agccaaaauagaugagauc

SEQ ID NO: 28733 - RNA, 20 nt, Artificial Sequence
  Synthetic oligonucleotide: FAS-408
aagccaaaauagaugagauc

SEQ ID NO: 28734 - RNA, 21 nt, Artificial Sequence
  Synthetic oligonucleotide: FAS-2775
gaagccaaaauagaugagauc

SEQ ID NO: 28735 - RNA, 22 nt, Artificial Sequence
  Synthetic oligonucleotide: FAS-2776
ugaagccaaaauagaugagauc

SEQ ID NO: 28736 - RNA, 23 nt, Artificial Sequence
  Synthetic oligonucleotide: FAS-2777
augaagccaaaauagaugagauc

SEQ ID NO: 28737 - RNA, 24 nt, Artificial Sequence
  Synthetic oligonucleotide: FAS-2778
aaugaagccaaaauagaugagauc

SEQ ID NO: 28738 - RNA, 18 nt, Artificial Sequence
  Synthetic oligonucleotide: FAS-2779
aggaaaaccaagguucuc

SEQ ID NO: 28739 - RNA, 19 nt, Artificial Sequence
  Synthetic oligonucleotide: FAS-2780
aaggaaaaccaagguucuc

SEQ ID NO: 28740 - RNA, 20 nt, Artificial Sequence
  Synthetic oligonucleotide: FAS-396
aaaggaaaaccaagguucuc

SEQ ID NO: 28741 - RNA, 21 nt, Artificial Sequence
  Synthetic oligonucleotide: FAS-2781
gaaaggaaaaccaagguucuc

SEQ ID NO: 28742 - RNA, 22 nt, Artificial Sequence
  Synthetic oligonucleotide: FAS-2782
agaaaggaaaaccaagguucuc

SEQ ID NO: 28743 - RNA, 23 nt, Artificial Sequence
  Synthetic oligonucleotide: FAS-2783
cagaaaggaaaaccaagguucuc

SEQ ID NO: 28744 - RNA, 24 nt, Artificial Sequence
  Synthetic oligonucleotide: FAS-2784
acagaaaggaaaaccaagguucuc

SEQ ID NO: 28745 - RNA, 18 nt, Artificial Sequence
  Synthetic oligonucleotide: FAS-2785
gaaauccaaagcuugguc

SEQ ID NO: 28746 - RNA, 19 nt, Artificial Sequence
  Synthetic oligonucleotide: FAS-2786
ugaaauccaaagcuugguc

SEQ ID NO: 28747 - RNA, 20 nt, Artificial Sequence
  Synthetic oligonucleotide: FAS-421
augaaauccaaagcuugguc

SEQ ID NO: 28748 - RNA, 21 nt, Artificial Sequence
  Synthetic oligonucleotide: FAS-2787
aaugaaauccaaagcuugguc

SEQ ID NO: 28749 - RNA, 22 nt, Artificial Sequence
  Synthetic oligonucleotide: FAS-2788
aaaugaaauccaaagcuugguc

SEQ ID NO: 28750 - RNA, 23 nt, Artificial Sequence
  Synthetic oligonucleotide: FAS-2789
gaaaugaaauccaaagcuugguc

SEQ ID NO: 28751 - RNA, 24 nt, Artificial Sequence
  Synthetic oligonucleotide: FAS-2790
agaaaugaaauccaaagcuugguc

SEQ ID NO: 28752 - RNA, 18 nt, Artificial Sequence
  Synthetic oligonucleotide: FAS-2791
caggauccagaucuaacu

SEQ ID NO: 28753 - RNA, 19 nt, Artificial Sequence
  Synthetic oligonucleotide: FAS-2792
acaggauccagaucuaacu

SEQ ID NO: 28754 - RNA, 20 nt, Artificial Sequence
  Synthetic oligonucleotide: FAS-254
uacaggauccagaucuaacu

SEQ ID NO: 28755 - RNA, 21 nt, Artificial Sequence
  Synthetic oligonucleotide: FAS-2793
cuacaggauccagaucuaacu

SEQ ID NO: 28756 - RNA, 22 nt, Artificial Sequence
  Synthetic oligonucleotide: FAS-2794
ccuacaggauccagaucuaacu

SEQ ID NO: 28757 - RNA, 23 nt, Artificial Sequence
  Synthetic oligonucleotide: FAS-2795
accuacaggauccagaucuaacu

SEQ ID NO: 28758 - RNA, 24 nt, Artificial Sequence
  Synthetic oligonucleotide: FAS-2796
aaccuacaggauccagaucuaacu

SEQ ID NO: 28759 - RNA, 18 nt, Artificial Sequence
  Synthetic oligonucleotide: FAS-2797
aaaacaacaaauucaguu

SEQ ID NO: 28760 - RNA, 19 nt, Artificial Sequence
  Synthetic oligonucleotide: FAS-2798
aaaaacaacaaauucaguu

SEQ ID NO: 28761 - RNA, 20 nt, Artificial Sequence
  Synthetic oligonucleotide: FAS-423
gaaaaacaacaaauucaguu

SEQ ID NO: 28762 - RNA, 21 nt, Artificial Sequence
  Synthetic oligonucleotide: FAS-2799
ugaaaaacaacaaauucaguu

SEQ ID NO: 28763 - RNA, 22 nt, Artificial Sequence
  Synthetic oligonucleotide: FAS-2800
gugaaaaacaacaaauucaguu

SEQ ID NO: 28764 - RNA, 23 nt, Artificial Sequence
  Synthetic oligonucleotide: FAS-2801
agugaaaaacaacaaauucaguu

SEQ ID NO: 28765 - RNA, 24 nt, Artificial Sequence
  Synthetic oligonucleotide: FAS-2802
gagugaaaaacaacaaauucaguu

SEQ ID NO: 28766 - RNA, 18 nt, Artificial Sequence
  Synthetic oligonucleotide: FAS-2803
ccaauuccacuaauuguu

SEQ ID NO: 28767 - RNA, 19 nt, Artificial Sequence
  Synthetic oligonucleotide: FAS-2804
gccaauuccacuaauuguu

SEQ ID NO: 28768 - RNA, 20 nt, Artificial Sequence
  Synthetic oligonucleotide: FAS-258
ugccaauuccacuaauuguu

SEQ ID NO: 28769 - RNA, 21 nt, Artificial Sequence
  Synthetic oligonucleotide: FAS-2805
uugccaauuccacuaauuguu

SEQ ID NO: 28770 - RNA, 22 nt, Artificial Sequence
  Synthetic oligonucleotide: FAS-2806
uuugccaauuccacuaauuguu

SEQ ID NO: 28771 - RNA, 23 nt, Artificial Sequence
  Synthetic oligonucleotide: FAS-2807
uuuugccaauuccacuaauuguu

SEQ ID NO: 28772 - RNA, 24 nt, Artificial Sequence
  Synthetic oligonucleotide: FAS-2808
cuuuugccaauuccacuaauuguu

SEQ ID NO: 28773 - RNA, 18 nt, Artificial Sequence
  Synthetic oligonucleotide: FAS-2809
uuccuagaaagcaaaaaa

SEQ ID NO: 28774 - RNA, 19 nt, Artificial Sequence
  Synthetic oligonucleotide: FAS-2810
uuuccuagaaagcaaaaaa

SEQ ID NO: 28775 - RNA, 20 nt, Artificial Sequence
  Synthetic oligonucleotide: FAS-315
guuuccuagaaagcaaaaaa

SEQ ID NO: 28776 - RNA, 21 nt, Artificial Sequence
  Synthetic oligonucleotide: FAS-2811
uguuuccuagaaagcaaaaaa

SEQ ID NO: 28777 - RNA, 22 nt, Artificial Sequence
  Synthetic oligonucleotide: FAS-2812
cuguuuccuagaaagcaaaaaa

SEQ ID NO: 28778 - RNA, 23 nt, Artificial Sequence
  Synthetic oligonucleotide: FAS-2813
acuguuuccuagaaagcaaaaaa

SEQ ID NO: 28779 - RNA, 24 nt, Artificial Sequence
  Synthetic oligonucleotide: FAS-2814
cacuguuuccuagaaagcaaaaaa

SEQ ID NO: 28780 - RNA, 18 nt, Artificial Sequence
  Synthetic oligonucleotide: FAS-2815
uuuccuagaaagcaaaaa

SEQ ID NO: 28781 - RNA, 19 nt, Artificial Sequence
  Synthetic oligonucleotide: FAS-2816
guuuccuagaaagcaaaaa

SEQ ID NO: 28782 - RNA, 20 nt, Artificial Sequence
  Synthetic oligonucleotide: FAS-499
uguuuccuagaaagcaaaaa

SEQ ID NO: 28783 - RNA, 21 nt, Artificial Sequence
  Synthetic oligonucleotide: FAS-2817
cuguuuccuagaaagcaaaaa

SEQ ID NO: 28784 - RNA, 22 nt, Artificial Sequence
  Synthetic oligonucleotide: FAS-2818
acuguuuccuagaaagcaaaaa

SEQ ID NO: 28785 - RNA, 23 nt, Artificial Sequence
  Synthetic oligonucleotide: FAS-2819
cacuguuuccuagaaagcaaaaa

SEQ ID NO: 28786 - RNA, 24 nt, Artificial Sequence
  Synthetic oligonucleotide: FAS-2820
ccacuguuuccuagaaagcaaaaa

SEQ ID NO: 28787 - RNA, 18 nt, Artificial Sequence
  Synthetic oligonucleotide: FAS-2821
aagucaacaucugaaaaa

SEQ ID NO: 28788 - RNA, 19 nt, Artificial Sequence
  Synthetic oligonucleotide: FAS-2822
caagucaacaucugaaaaa

SEQ ID NO: 28789 - RNA, 20 nt, Artificial Sequence
  Synthetic oligonucleotide: FAS-496
ucaagucaacaucugaaaaa

SEQ ID NO: 28790 - RNA, 21 nt, Artificial Sequence
  Synthetic oligonucleotide: FAS-2823
cucaagucaacaucugaaaaa

SEQ ID NO: 28791 - RNA, 22 nt, Artificial Sequence
  Synthetic oligonucleotide: FAS-2824
acucaagucaacaucugaaaaa

SEQ ID NO: 28792 - RNA, 23 nt, Artificial Sequence
  Synthetic oligonucleotide: FAS-2825
uacucaagucaacaucugaaaaa

SEQ ID NO: 28793 - RNA, 24 nt, Artificial Sequence
  Synthetic oligonucleotide: FAS-2826
uuacucaagucaacaucugaaaaa

SEQ ID NO: 28794 - RNA, 18 nt, Artificial Sequence
  Synthetic oligonucleotide: FAS-2827
aauuaguggaauuggcaa

SEQ ID NO: 28795 - RNA, 19 nt, Artificial Sequence
  Synthetic oligonucleotide: FAS-2828
caauuaguggaauuggcaa

SEQ ID NO: 28796 - RNA, 20 nt, Artificial Sequence
  Synthetic oligonucleotide: FAS-514
acaauuaguggaauuggcaa

SEQ ID NO: 28797 - RNA, 21 nt, Artificial Sequence
  Synthetic oligonucleotide: FAS-2829
aacaauuaguggaauuggcaa

SEQ ID NO: 28798 - RNA, 22 nt, Artificial Sequence
  Synthetic oligonucleotide: FAS-2830
aaacaauuaguggaauuggcaa

SEQ ID NO: 28799 - RNA, 23 nt, Artificial Sequence
  Synthetic oligonucleotide: FAS-2831
caaacaauuaguggaauuggcaa

SEQ ID NO: 28800 - RNA, 24 nt, Artificial Sequence
  Synthetic oligonucleotide: FAS-2832
ccaaacaauuaguggaauuggcaa

SEQ ID NO: 28801 - RNA, 18 nt, Artificial Sequence
  Synthetic oligonucleotide: FAS-2833
cucuucacugaaagaaca

SEQ ID NO: 28802 - RNA, 19 nt, Artificial Sequence
  Synthetic oligonucleotide: FAS-2834
ucucuucacugaaagaaca

SEQ ID NO: 28803 - RNA, 20 nt, Artificial Sequence
  Synthetic oligonucleotide: FAS-510
uucucuucacugaaagaaca

SEQ ID NO: 28804 - RNA, 21 nt, Artificial Sequence
  Synthetic oligonucleotide: FAS-2835
uuucucuucacugaaagaaca

SEQ ID NO: 28805 - RNA, 22 nt, Artificial Sequence
  Synthetic oligonucleotide: FAS-2836
cuuucucuucacugaaagaaca

SEQ ID NO: 28806 - RNA, 23 nt, Artificial Sequence
  Synthetic oligonucleotide: FAS-2837
ccuuucucuucacugaaagaaca

SEQ ID NO: 28807 - RNA, 24 nt, Artificial Sequence
  Synthetic oligonucleotide: FAS-2838
uccuuucucuucacugaaagaaca

SEQ ID NO: 28808 - RNA, 18 nt, Artificial Sequence
  Synthetic oligonucleotide: FAS-2839
auccuguagguuggaaca

SEQ ID NO: 28809 - RNA, 19 nt, Artificial Sequence
  Synthetic oligonucleotide: FAS-2840
gauccuguagguuggaaca

SEQ ID NO: 28810 - RNA, 20 nt, Artificial Sequence
  Synthetic oligonucleotide: FAS-519
ggauccuguagguuggaaca

SEQ ID NO: 28811 - RNA, 21 nt, Artificial Sequence
  Synthetic oligonucleotide: FAS-2841
uggauccuguagguuggaaca

SEQ ID NO: 28812 - RNA, 22 nt, Artificial Sequence
  Synthetic oligonucleotide: FAS-2842
cuggauccuguagguuggaaca

SEQ ID NO: 28813 - RNA, 23 nt, Artificial Sequence
  Synthetic oligonucleotide: FAS-2843
ucuggauccuguagguuggaaca

SEQ ID NO: 28814 - RNA, 24 nt, Artificial Sequence
  Synthetic oligonucleotide: FAS-2844
aucuggauccuguagguuggaaca

SEQ ID NO: 28815 - RNA, 18 nt, Artificial Sequence
  Synthetic oligonucleotide: FAS-2845
aagcaaaaaauggaagca

SEQ ID NO: 28816 - RNA, 19 nt, Artificial Sequence
  Synthetic oligonucleotide: FAS-2846
aaagcaaaaaauggaagca

SEQ ID NO: 28817 - RNA, 20 nt, Artificial Sequence
  Synthetic oligonucleotide: FAS-502
gaaagcaaaaaauggaagca

SEQ ID NO: 28818 - RNA, 21 nt, Artificial Sequence
  Synthetic oligonucleotide: FAS-2847
agaaagcaaaaaauggaagca

SEQ ID NO: 28819 - RNA, 22 nt, Artificial Sequence
  Synthetic oligonucleotide: FAS-2848
uagaaagcaaaaaauggaagca

SEQ ID NO: 28820 - RNA, 23 nt, Artificial Sequence
  Synthetic oligonucleotide: FAS-2849
cuagaaagcaaaaaauggaagca

SEQ ID NO: 28821 - RNA, 24 nt, Artificial Sequence
  Synthetic oligonucleotide: FAS-2850
ccuagaaagcaaaaaauggaagca

SEQ ID NO: 28822 - RNA, 18 nt, Artificial Sequence
  Synthetic oligonucleotide: FAS-2851
guacuuccuuucucuuca

SEQ ID NO: 28823 - RNA, 19 nt, Artificial Sequence
  Synthetic oligonucleotide: FAS-2852
uguacuuccuuucucuuca

SEQ ID NO: 28824 - RNA, 20 nt, Artificial Sequence
  Synthetic oligonucleotide: FAS-508
cuguacuuccuuucucuuca

SEQ ID NO: 28825 - RNA, 21 nt, Artificial Sequence
  Synthetic oligonucleotide: FAS-2853
ucuguacuuccuuucucuuca

SEQ ID NO: 28826 - RNA, 22 nt, Artificial Sequence
  Synthetic oligonucleotide: FAS-2854
uucuguacuuccuuucucuuca

SEQ ID NO: 28827 - RNA, 23 nt, Artificial Sequence
  Synthetic oligonucleotide: FAS-2855
uuucuguacuuccuuucucuuca

SEQ ID NO: 28828 - RNA, 24 nt, Artificial Sequence
  Synthetic oligonucleotide: FAS-2856
uuuucuguacuuccuuucucuuca

SEQ ID NO: 28829 - RNA, 18 nt, Artificial Sequence
  Synthetic oligonucleotide: FAS-2857
uuccuuucucuucacuga

SEQ ID NO: 28830 - RNA, 19 nt, Artificial Sequence
  Synthetic oligonucleotide: FAS-2858
cuuccuuucucuucacuga

SEQ ID NO: 28831 - RNA, 20 nt, Artificial Sequence
  Synthetic oligonucleotide: FAS-509
acuuccuuucucuucacuga

SEQ ID NO: 28832 - RNA, 21 nt, Artificial Sequence
  Synthetic oligonucleotide: FAS-2859
uacuuccuuucucuucacuga

SEQ ID NO: 28833 - RNA, 22 nt, Artificial Sequence
  Synthetic oligonucleotide: FAS-2860
guacuuccuuucucuucacuga

SEQ ID NO: 28834 - RNA, 23 nt, Artificial Sequence
  Synthetic oligonucleotide: FAS-2861
uguacuuccuuucucuucacuga

SEQ ID NO: 28835 - RNA, 24 nt, Artificial Sequence
  Synthetic oligonucleotide: FAS-2862
cuguacuuccuuucucuucacuga

SEQ ID NO: 28836 - RNA, 18 nt, Artificial Sequence
  Synthetic oligonucleotide: FAS-2863
acuuaccccaaacaauua

SEQ ID NO: 28837 - RNA, 19 nt, Artificial Sequence
  Synthetic oligonucleotide: FAS-2864
aacuuaccccaaacaauua

SEQ ID NO: 28838 - RNA, 20 nt, Artificial Sequence
  Synthetic oligonucleotide: FAS-512
gaacuuaccccaaacaauua

SEQ ID NO: 28839 - RNA, 21 nt, Artificial Sequence
  Synthetic oligonucleotide: FAS-2865
agaacuuaccccaaacaauua

SEQ ID NO: 28840 - RNA, 22 nt, Artificial Sequence
  Synthetic oligonucleotide: FAS-2866
aagaacuuaccccaaacaauua

SEQ ID NO: 28841 - RNA, 23 nt, Artificial Sequence
  Synthetic oligonucleotide: FAS-2867
caagaacuuaccccaaacaauua

SEQ ID NO: 28842 - RNA, 24 nt, Artificial Sequence
  Synthetic oligonucleotide: FAS-2868
gcaagaacuuaccccaaacaauua

SEQ ID NO: 28843 - RNA, 18 nt, Artificial Sequence
  Synthetic oligonucleotide: FAS-2869
gagucacuaguaaugucc

SEQ ID NO: 28844 - RNA, 19 nt, Artificial Sequence
  Synthetic oligonucleotide: FAS-2870
ugagucacuaguaaugucc

SEQ ID NO: 28845 - RNA, 20 nt, Artificial Sequence
  Synthetic oligonucleotide: FAS-485
cugagucacuaguaaugucc

SEQ ID NO: 28846 - RNA, 21 nt, Artificial Sequence
  Synthetic oligonucleotide: FAS-2871
ucugagucacuaguaaugucc

SEQ ID NO: 28847 - RNA, 22 nt, Artificial Sequence
  Synthetic oligonucleotide: FAS-2872
uucugagucacuaguaaugucc

SEQ ID NO: 28848 - RNA, 23 nt, Artificial Sequence
  Synthetic oligonucleotide: FAS-2873
uuucugagucacuaguaaugucc

SEQ ID NO: 28849 - RNA, 24 nt, Artificial Sequence
  Synthetic oligonucleotide: FAS-2874
uuuucugagucacuaguaaugucc

SEQ ID NO: 28850 - RNA, 18 nt, Artificial Sequence
  Synthetic oligonucleotide: FAS-2875
auacgcuucuuucuuucc

SEQ ID NO: 28851 - RNA, 19 nt, Artificial Sequence
  Synthetic oligonucleotide: FAS-2876
cauacgcuucuuucuuucc

SEQ ID NO: 28852 - RNA, 20 nt, Artificial Sequence
  Synthetic oligonucleotide: FAS-490
ucauacgcuucuuucuuucc

SEQ ID NO: 28853 - RNA, 21 nt, Artificial Sequence
  Synthetic oligonucleotide: FAS-2877
gucauacgcuucuuucuuucc

SEQ ID NO: 28854 - RNA, 22 nt, Artificial Sequence
  Synthetic oligonucleotide: FAS-2878
ugucauacgcuucuuucuuucc

SEQ ID NO: 28855 - RNA, 23 nt, Artificial Sequence
  Synthetic oligonucleotide: FAS-2879
gugucauacgcuucuuucuuucc

SEQ ID NO: 28856 - RNA, 24 nt, Artificial Sequence
  Synthetic oligonucleotide: FAS-2880
ugugucauacgcuucuuucuuucc

SEQ ID NO: 28857 - RNA, 18 nt, Artificial Sequence
  Synthetic oligonucleotide: FAS-2881
uuuauugccacuguuucc

SEQ ID NO: 28858 - RNA, 19 nt, Artificial Sequence
  Synthetic oligonucleotide: FAS-2882
auuuauugccacuguuucc

SEQ ID NO: 28859 - RNA, 20 nt, Artificial Sequence
  Synthetic oligonucleotide: FAS-498
aauuuauugccacuguuucc

SEQ ID NO: 28860 - RNA, 21 nt, Artificial Sequence
  Synthetic oligonucleotide: FAS-2883
aaauuuauugccacuguuucc

SEQ ID NO: 28861 - RNA, 22 nt, Artificial Sequence
  Synthetic oligonucleotide: FAS-2884
uaaauuuauugccacuguuucc

SEQ ID NO: 28862 - RNA, 23 nt, Artificial Sequence
  Synthetic oligonucleotide: FAS-2885
auaaauuuauugccacuguuucc

SEQ ID NO: 28863 - RNA, 24 nt, Artificial Sequence
  Synthetic oligonucleotide: FAS-2886
gauaaauuuauugccacuguuucc

SEQ ID NO: 28864 - RNA, 18 nt, Artificial Sequence
  Synthetic oligonucleotide: FAS-2887
cugcaguuugaacaaagc

SEQ ID NO: 28865 - RNA, 19 nt, Artificial Sequence
  Synthetic oligonucleotide: FAS-2888
ucugcaguuugaacaaagc

SEQ ID NO: 28866 - RNA, 20 nt, Artificial Sequence
  Synthetic oligonucleotide: FAS-511
aucugcaguuugaacaaagc

SEQ ID NO: 28867 - RNA, 18 nt, Artificial Sequence
  Synthetic oligonucleotide: FAS-2889
uuucuguucugcuguguc

SEQ ID NO: 28868 - RNA, 19 nt, Artificial Sequence
  Synthetic oligonucleotide: FAS-2890
cuuucuguucugcuguguc

SEQ ID NO: 28869 - RNA, 20 nt, Artificial Sequence
  Synthetic oligonucleotide: FAS-493
acuuucuguucugcuguguc

SEQ ID NO: 28870 - RNA, 21 nt, Artificial Sequence
  Synthetic oligonucleotide: FAS-2891
aacuuucuguucugcuguguc

SEQ ID NO: 28871 - RNA, 22 nt, Artificial Sequence
  Synthetic oligonucleotide: FAS-2892
gaacuuucuguucugcuguguc

SEQ ID NO: 28872 - RNA, 23 nt, Artificial Sequence
  Synthetic oligonucleotide: FAS-2893
ugaacuuucuguucugcuguguc

SEQ ID NO: 28873 - RNA, 24 nt, Artificial Sequence
  Synthetic oligonucleotide: FAS-2894
uugaacuuucuguucugcuguguc

SEQ ID NO: 28874 - RNA, 18 nt, Artificial Sequence
  Synthetic oligonucleotide: FAS-2895
auuuaaaguuggagauuc

SEQ ID NO: 28875 - RNA, 19 nt, Artificial Sequence
  Synthetic oligonucleotide: FAS-2896
gauuuaaaguuggagauuc

SEQ ID NO: 28876 - RNA, 20 nt, Artificial Sequence
  Synthetic oligonucleotide: FAS-506
ggauuuaaaguuggagauuc

SEQ ID NO: 28877 - RNA, 21 nt, Artificial Sequence
  Synthetic oligonucleotide: FAS-2897
aggauuuaaaguuggagauuc

SEQ ID NO: 28878 - RNA, 22 nt, Artificial Sequence
  Synthetic oligonucleotide: FAS-2898
caggauuuaaaguuggagauuc

SEQ ID NO: 28879 - RNA, 23 nt, Artificial Sequence
  Synthetic oligonucleotide: FAS-2899
acaggauuuaaaguuggagauuc

SEQ ID NO: 28880 - RNA, 24 nt, Artificial Sequence
  Synthetic oligonucleotide: FAS-2900
uacaggauuuaaaguuggagauuc

SEQ ID NO: 28881 - RNA, 18 nt, Artificial Sequence
  Synthetic oligonucleotide: FAS-2901
uaguggaauuggcaaaag

SEQ ID NO: 28882 - RNA, 19 nt, Artificial Sequence
  Synthetic oligonucleotide: FAS-2902
uuaguggaauuggcaaaag

SEQ ID NO: 28883 - RNA, 20 nt, Artificial Sequence
  Synthetic oligonucleotide: FAS-515
auuaguggaauuggcaaaag

SEQ ID NO: 28884 - RNA, 21 nt, Artificial Sequence
  Synthetic oligonucleotide: FAS-2903
aauuaguggaauuggcaaaag

SEQ ID NO: 28885 - RNA, 22 nt, Artificial Sequence
  Synthetic oligonucleotide: FAS-2904
caauuaguggaauuggcaaaag

SEQ ID NO: 28886 - RNA, 23 nt, Artificial Sequence
  Synthetic oligonucleotide: FAS-2905
acaauuaguggaauuggcaaaag

SEQ ID NO: 28887 - RNA, 24 nt, Artificial Sequence
  Synthetic oligonucleotide: FAS-2906
aacaauuaguggaauuggcaaaag

SEQ ID NO: 28888 - RNA, 18 nt, Artificial Sequence
  Synthetic oligonucleotide: FAS-2907
uaccuacaggauuuaaag

SEQ ID NO: 28889 - RNA, 19 nt, Artificial Sequence
  Synthetic oligonucleotide: FAS-2908
auaccuacaggauuuaaag

SEQ ID NO: 28890 - RNA, 20 nt, Artificial Sequence
  Synthetic oligonucleotide: FAS-504
aauaccuacaggauuuaaag

SEQ ID NO: 28891 - RNA, 21 nt, Artificial Sequence
  Synthetic oligonucleotide: FAS-2909
caauaccuacaggauuuaaag

SEQ ID NO: 28892 - RNA, 22 nt, Artificial Sequence
  Synthetic oligonucleotide: FAS-2910
ucaauaccuacaggauuuaaag

SEQ ID NO: 28893 - RNA, 23 nt, Artificial Sequence
  Synthetic oligonucleotide: FAS-2911
uucaauaccuacaggauuuaaag

SEQ ID NO: 28894 - RNA, 24 nt, Artificial Sequence
  Synthetic oligonucleotide: FAS-2912
uuucaauaccuacaggauuuaaag

SEQ ID NO: 28895 - RNA, 18 nt, Artificial Sequence
  Synthetic oligonucleotide: FAS-2913
gaaagcaaaaaauggaag

SEQ ID NO: 28896 - RNA, 19 nt, Artificial Sequence
  Synthetic oligonucleotide: FAS-2914
agaaagcaaaaaauggaag

SEQ ID NO: 28897 - RNA, 20 nt, Artificial Sequence
  Synthetic oligonucleotide: FAS-501
uagaaagcaaaaaauggaag

SEQ ID NO: 28898 - RNA, 21 nt, Artificial Sequence
  Synthetic oligonucleotide: FAS-2915
cuagaaagcaaaaaauggaag

SEQ ID NO: 28899 - RNA, 22 nt, Artificial Sequence
  Synthetic oligonucleotide: FAS-2916
ccuagaaagcaaaaaauggaag

SEQ ID NO: 28900 - RNA, 23 nt, Artificial Sequence
  Synthetic oligonucleotide: FAS-2917
uccuagaaagcaaaaaauggaag

SEQ ID NO: 28901 - RNA, 24 nt, Artificial Sequence
  Synthetic oligonucleotide: FAS-2918
uuccuagaaagcaaaaaauggaag

SEQ ID NO: 28902 - RNA, 18 nt, Artificial Sequence
  Synthetic oligonucleotide: FAS-2919
augccaauuacgaagcag

SEQ ID NO: 28903 - RNA, 19 nt, Artificial Sequence
  Synthetic oligonucleotide: FAS-2920
gaugccaauuacgaagcag

SEQ ID NO: 28904 - RNA, 20 nt, Artificial Sequence
  Synthetic oligonucleotide: FAS-492
ugaugccaauuacgaagcag

SEQ ID NO: 28905 - RNA, 21 nt, Artificial Sequence
  Synthetic oligonucleotide: FAS-2921
uugaugccaauuacgaagcag

SEQ ID NO: 28906 - RNA, 22 nt, Artificial Sequence
  Synthetic oligonucleotide: FAS-2922
guugaugccaauuacgaagcag

SEQ ID NO: 28907 - RNA, 23 nt, Artificial Sequence
  Synthetic oligonucleotide: FAS-2923
aguugaugccaauuacgaagcag

SEQ ID NO: 28908 - RNA, 24 nt, Artificial Sequence
  Synthetic oligonucleotide: FAS-2924
aaguugaugccaauuacgaagcag

SEQ ID NO: 28909 - RNA, 18 nt, Artificial Sequence
  Synthetic oligonucleotide: FAS-2925
agaucuggauccuguagg

SEQ ID NO: 28910 - RNA, 19 nt, Artificial Sequence
  Synthetic oligonucleotide: FAS-2926
uagaucuggauccuguagg

SEQ ID NO: 28911 - RNA, 20 nt, Artificial Sequence
  Synthetic oligonucleotide: FAS-517
uuagaucuggauccuguagg

SEQ ID NO: 28912 - RNA, 21 nt, Artificial Sequence
  Synthetic oligonucleotide: FAS-2927
guuagaucuggauccuguagg

SEQ ID NO: 28913 - RNA, 22 nt, Artificial Sequence
  Synthetic oligonucleotide: FAS-2928
aguuagaucuggauccuguagg

SEQ ID NO: 28914 - RNA, 23 nt, Artificial Sequence
  Synthetic oligonucleotide: FAS-2929
aaguuagaucuggauccuguagg

SEQ ID NO: 28915 - RNA, 24 nt, Artificial Sequence
  Synthetic oligonucleotide: FAS-2930
caaguuagaucuggauccuguagg

SEQ ID NO: 28916 - RNA, 18 nt, Artificial Sequence
  Synthetic oligonucleotide: FAS-2931
auuuacucaagucaacau

SEQ ID NO: 28917 - RNA, 19 nt, Artificial Sequence
  Synthetic oligonucleotide: FAS-2932
uauuuacucaagucaacau

SEQ ID NO: 28918 - RNA, 20 nt, Artificial Sequence
  Synthetic oligonucleotide: FAS-495
auauuuacucaagucaacau

SEQ ID NO: 28919 - RNA, 21 nt, Artificial Sequence
  Synthetic oligonucleotide: FAS-2933
uauauuuacucaagucaacau

SEQ ID NO: 28920 - RNA, 22 nt, Artificial Sequence
  Synthetic oligonucleotide: FAS-2934
auauauuuacucaagucaacau

SEQ ID NO: 28921 - RNA, 23 nt, Artificial Sequence
  Synthetic oligonucleotide: FAS-2935
gauauauuuacucaagucaacau

SEQ ID NO: 28922 - RNA, 24 nt, Artificial Sequence
  Synthetic oligonucleotide: FAS-2936
ugauauauuuacucaagucaacau

SEQ ID NO: 28923 - RNA, 18 nt, Artificial Sequence
  Synthetic oligonucleotide: FAS-2937
uuaaaguuggagauucau

SEQ ID NO: 28924 - RNA, 19 nt, Artificial Sequence
  Synthetic oligonucleotide: FAS-2938
uuuaaaguuggagauucau

SEQ ID NO: 28925 - RNA, 20 nt, Artificial Sequence
  Synthetic oligonucleotide: FAS-507
auuuaaaguuggagauucau

SEQ ID NO: 28926 - RNA, 21 nt, Artificial Sequence
  Synthetic oligonucleotide: FAS-2939
gauuuaaaguuggagauucau

SEQ ID NO: 28927 - RNA, 22 nt, Artificial Sequence
  Synthetic oligonucleotide: FAS-2940
ggauuuaaaguuggagauucau

SEQ ID NO: 28928 - RNA, 23 nt, Artificial Sequence
  Synthetic oligonucleotide: FAS-2941
aggauuuaaaguuggagauucau

SEQ ID NO: 28929 - RNA, 24 nt, Artificial Sequence
  Synthetic oligonucleotide: FAS-2942
caggauuuaaaguuggagauucau

SEQ ID NO: 28930 - RNA, 18 nt, Artificial Sequence
  Synthetic oligonucleotide: FAS-2943
accuacaggauuuaaagu

SEQ ID NO: 28931 - RNA, 19 nt, Artificial Sequence
  Synthetic oligonucleotide: FAS-2944
uaccuacaggauuuaaagu

SEQ ID NO: 28932 - RNA, 20 nt, Artificial Sequence
  Synthetic oligonucleotide: FAS-317
auaccuacaggauuuaaagu

SEQ ID NO: 28933 - RNA, 21 nt, Artificial Sequence
  Synthetic oligonucleotide: FAS-2945
aauaccuacaggauuuaaagu

SEQ ID NO: 28934 - RNA, 22 nt, Artificial Sequence
  Synthetic oligonucleotide: FAS-2946
caauaccuacaggauuuaaagu

SEQ ID NO: 28935 - RNA, 23 nt, Artificial Sequence
  Synthetic oligonucleotide: FAS-2947
ucaauaccuacaggauuuaaagu

SEQ ID NO: 28936 - RNA, 24 nt, Artificial Sequence
  Synthetic oligonucleotide: FAS-2948
uucaauaccuacaggauuuaaagu

SEQ ID NO: 28937 - RNA, 18 nt, Artificial Sequence
  Synthetic oligonucleotide: FAS-2949
ugaaaaauagaaaauagu

SEQ ID NO: 28938 - RNA, 19 nt, Artificial Sequence
  Synthetic oligonucleotide: FAS-2950
cugaaaaauagaaaauagu

SEQ ID NO: 28939 - RNA, 20 nt, Artificial Sequence
  Synthetic oligonucleotide: FAS-497
ucugaaaaauagaaaauagu

SEQ ID NO: 28940 - RNA, 21 nt, Artificial Sequence
  Synthetic oligonucleotide: FAS-2951
aucugaaaaauagaaaauagu

SEQ ID NO: 28941 - RNA, 22 nt, Artificial Sequence
  Synthetic oligonucleotide: FAS-2952
caucugaaaaauagaaaauagu

SEQ ID NO: 28942 - RNA, 23 nt, Artificial Sequence
  Synthetic oligonucleotide: FAS-2953
acaucugaaaaauagaaaauagu

SEQ ID NO: 28943 - RNA, 24 nt, Artificial Sequence
  Synthetic oligonucleotide: FAS-2954
aacaucugaaaaauagaaaauagu

SEQ ID NO: 28944 - RNA, 18 nt, Artificial Sequence
  Synthetic oligonucleotide: FAS-2955
gaucuggauccuguaggu

SEQ ID NO: 28945 - RNA, 19 nt, Artificial Sequence
  Synthetic oligonucleotide: FAS-2956
agaucuggauccuguaggu

SEQ ID NO: 28946 - RNA, 20 nt, Artificial Sequence
  Synthetic oligonucleotide: FAS-323
uagaucuggauccuguaggu

SEQ ID NO: 28947 - RNA, 21 nt, Artificial Sequence
  Synthetic oligonucleotide: FAS-2957
uuagaucuggauccuguaggu

SEQ ID NO: 28948 - RNA, 22 nt, Artificial Sequence
  Synthetic oligonucleotide: FAS-2958
guuagaucuggauccuguaggu

SEQ ID NO: 28949 - RNA, 23 nt, Artificial Sequence
  Synthetic oligonucleotide: FAS-2959
aguuagaucuggauccuguaggu

SEQ ID NO: 28950 - RNA, 24 nt, Artificial Sequence
  Synthetic oligonucleotide: FAS-2960
aaguuagaucuggauccuguaggu

SEQ ID NO: 28951 - RNA, 18 nt, Artificial Sequence
  Synthetic oligonucleotide: FAS-2961
augaaguugaugccaauu

SEQ ID NO: 28952 - RNA, 19 nt, Artificial Sequence
  Synthetic oligonucleotide: FAS-2962
caugaaguugaugccaauu

SEQ ID NO: 28953 - RNA, 20 nt, Artificial Sequence
  Synthetic oligonucleotide: FAS-491
ccaugaaguugaugccaauu

SEQ ID NO: 28954 - RNA, 21 nt, Artificial Sequence
  Synthetic oligonucleotide: FAS-2963
uccaugaaguugaugccaauu

SEQ ID NO: 28955 - RNA, 22 nt, Artificial Sequence
  Synthetic oligonucleotide: FAS-2964
uuccaugaaguugaugccaauu

SEQ ID NO: 28956 - RNA, 23 nt, Artificial Sequence
  Synthetic oligonucleotide: FAS-2965
uuuccaugaaguugaugccaauu

SEQ ID NO: 28957 - RNA, 24 nt, Artificial Sequence
  Synthetic oligonucleotide: FAS-2966
cuuuccaugaaguugaugccaauu

SEQ ID NO: 28958 - RNA, 18 nt, Artificial Sequence
  Synthetic oligonucleotide: FAS-2967
uucauugacaccauucuu

SEQ ID NO: 28959 - RNA, 19 nt, Artificial Sequence
  Synthetic oligonucleotide: FAS-2968
cuucauugacaccauucuu

SEQ ID NO: 28960 - RNA, 20 nt, Artificial Sequence
  Synthetic oligonucleotide: FAS-494
gcuucauugacaccauucuu

SEQ ID NO: 28961 - RNA, 21 nt, Artificial Sequence
  Synthetic oligonucleotide: FAS-2969
ggcuucauugacaccauucuu

SEQ ID NO: 28962 - RNA, 22 nt, Artificial Sequence
  Synthetic oligonucleotide: FAS-2970
uggcuucauugacaccauucuu

SEQ ID NO: 28963 - RNA, 23 nt, Artificial Sequence
  Synthetic oligonucleotide: FAS-2971
uuggcuucauugacaccauucuu

SEQ ID NO: 28964 - RNA, 24 nt, Artificial Sequence
  Synthetic oligonucleotide: FAS-2972
uuuggcuucauugacaccauucuu

SEQ ID NO: 28965 - RNA, 18 nt, Artificial Sequence
  Synthetic oligonucleotide: FAS-2973
aagcuuuggauuucauuu

SEQ ID NO: 28966 - RNA, 19 nt, Artificial Sequence
  Synthetic oligonucleotide: FAS-2974
caagcuuuggauuucauuu

SEQ ID NO: 28967 - RNA, 20 nt, Artificial Sequence
  Synthetic oligonucleotide: FAS-482
ccaagcuuuggauuucauuu

SEQ ID NO: 28968 - RNA, 21 nt, Artificial Sequence
  Synthetic oligonucleotide: FAS-2975
accaagcuuuggauuucauuu

SEQ ID NO: 28969 - RNA, 22 nt, Artificial Sequence
  Synthetic oligonucleotide: FAS-2976
gaccaagcuuuggauuucauuu

SEQ ID NO: 28970 - RNA, 23 nt, Artificial Sequence
  Synthetic oligonucleotide: FAS-2977
agaccaagcuuuggauuucauuu

SEQ ID NO: 28971 - RNA, 24 nt, Artificial Sequence
  Synthetic oligonucleotide: FAS-2978
uagaccaagcuuuggauuucauuu

SEQ ID NO: 28972 - RNA, 18 nt, Artificial Sequence
  Synthetic oligonucleotide: FAS-2979
guacaaagauuggcuuuu

SEQ ID NO: 28973 - RNA, 19 nt, Artificial Sequence
  Synthetic oligonucleotide: FAS-2980
aguacaaagauuggcuuuu

SEQ ID NO: 28974 - RNA, 20 nt, Artificial Sequence
  Synthetic oligonucleotide: FAS-489
gaguacaaagauuggcuuuu

SEQ ID NO: 28975 - RNA, 21 nt, Artificial Sequence
  Synthetic oligonucleotide: FAS-2981
agaguacaaagauuggcuuuu

SEQ ID NO: 28976 - RNA, 22 nt, Artificial Sequence
  Synthetic oligonucleotide: FAS-2982
aagaguacaaagauuggcuuuu

SEQ ID NO: 28977 - RNA, 23 nt, Artificial Sequence
  Synthetic oligonucleotide: FAS-2983
caagaguacaaagauuggcuuuu

SEQ ID NO: 28978 - RNA, 24 nt, Artificial Sequence
  Synthetic oligonucleotide: FAS-2984
gcaagaguacaaagauuggcuuuu

SEQ ID NO: 28979 - RNA, 18 nt, Artificial Sequence
  Synthetic oligonucleotide: FAS-2985
caugcagaaagcacagaa

SEQ ID NO: 28980 - RNA, 19 nt, Artificial Sequence
  Synthetic oligonucleotide: FAS-2986
acaugcagaaagcacagaa

SEQ ID NO: 28981 - RNA, 20 nt, Artificial Sequence
  Synthetic oligonucleotide: FAS-262
aacaugcagaaagcacagaa

SEQ ID NO: 28982 - RNA, 21 nt, Artificial Sequence
  Synthetic oligonucleotide: FAS-2987
aaacaugcagaaagcacagaa

SEQ ID NO: 28983 - RNA, 22 nt, Artificial Sequence
  Synthetic oligonucleotide: FAS-2988
aaaacaugcagaaagcacagaa

SEQ ID NO: 28984 - RNA, 23 nt, Artificial Sequence
  Synthetic oligonucleotide: FAS-2989
gaaaacaugcagaaagcacagaa

SEQ ID NO: 28985 - RNA, 24 nt, Artificial Sequence
  Synthetic oligonucleotide: FAS-2990
agaaaacaugcagaaagcacagaa

SEQ ID NO: 28986 - RNA, 18 nt, Artificial Sequence
  Synthetic oligonucleotide: FAS-2991
guccaagacacagcagaa

SEQ ID NO: 28987 - RNA, 19 nt, Artificial Sequence
  Synthetic oligonucleotide: FAS-2992
uguccaagacacagcagaa

SEQ ID NO: 28988 - RNA, 20 nt, Artificial Sequence
  Synthetic oligonucleotide: FAS-410
auguccaagacacagcagaa

SEQ ID NO: 28989 - RNA, 21 nt, Artificial Sequence
  Synthetic oligonucleotide: FAS-2993
aauguccaagacacagcagaa

SEQ ID NO: 28990 - RNA, 22 nt, Artificial Sequence
  Synthetic oligonucleotide: FAS-2994
caauguccaagacacagcagaa

SEQ ID NO: 28991 - RNA, 23 nt, Artificial Sequence
  Synthetic oligonucleotide: FAS-2995
acaauguccaagacacagcagaa

SEQ ID NO: 28992 - RNA, 24 nt, Artificial Sequence
  Synthetic oligonucleotide: FAS-2996
gacaauguccaagacacagcagaa

SEQ ID NO: 28993 - RNA, 18 nt, Artificial Sequence
  Synthetic oligonucleotide: FAS-2997
aaaauucaaacuucagaa

SEQ ID NO: 28994 - RNA, 19 nt, Artificial Sequence
  Synthetic oligonucleotide: FAS-2998
gaaaauucaaacuucagaa

SEQ ID NO: 28995 - RNA, 20 nt, Artificial Sequence
  Synthetic oligonucleotide: FAS-420
agaaaauucaaacuucagaa

SEQ ID NO: 28996 - RNA, 21 nt, Artificial Sequence
  Synthetic oligonucleotide: FAS-2999
cagaaaauucaaacuucagaa

SEQ ID NO: 28997 - RNA, 22 nt, Artificial Sequence
  Synthetic oligonucleotide: FAS-3000
ucagaaaauucaaacuucagaa

SEQ ID NO: 28998 - RNA, 23 nt, Artificial Sequence
  Synthetic oligonucleotide: FAS-3001
cucagaaaauucaaacuucagaa

SEQ ID NO: 28999 - RNA, 24 nt, Artificial Sequence
  Synthetic oligonucleotide: FAS-3002
acucagaaaauucaaacuucagaa

SEQ ID NO: 29000 - RNA, 18 nt, Artificial Sequence
  Synthetic oligonucleotide: FAS-3003
uucuuucagugaagagaa

SEQ ID NO: 29001 - RNA, 19 nt, Artificial Sequence
  Synthetic oligonucleotide: FAS-3004
guucuuucagugaagagaa

SEQ ID NO: 29002 - RNA, 20 nt, Artificial Sequence
  Synthetic oligonucleotide: FAS-261
uguucuuucagugaagagaa

SEQ ID NO: 29003 - RNA, 21 nt, Artificial Sequence
  Synthetic oligonucleotide: FAS-3005
uuguucuuucagugaagagaa

SEQ ID NO: 29004 - RNA, 22 nt, Artificial Sequence
  Synthetic oligonucleotide: FAS-3006
uuuguucuuucagugaagagaa

SEQ ID NO: 29005 - RNA, 23 nt, Artificial Sequence
  Synthetic oligonucleotide: FAS-3007
cuuuguucuuucagugaagagaa

SEQ ID NO: 29006 - RNA, 24 nt, Artificial Sequence
  Synthetic oligonucleotide: FAS-3008
ucuuuguucuuucagugaagagaa

SEQ ID NO: 29007 - RNA, 18 nt, Artificial Sequence
  Synthetic oligonucleotide: FAS-3009
cuuuguucuuucagugaa

SEQ ID NO: 29008 - RNA, 19 nt, Artificial Sequence
  Synthetic oligonucleotide: FAS-3010
ucuuuguucuuucagugaa

SEQ ID NO: 29009 - RNA, 20 nt, Artificial Sequence
  Synthetic oligonucleotide: FAS-388
uucuuuguucuuucagugaa

SEQ ID NO: 29010 - RNA, 21 nt, Artificial Sequence
  Synthetic oligonucleotide: FAS-3011
uuucuuuguucuuucagugaa

SEQ ID NO: 29011 - RNA, 22 nt, Artificial Sequence
  Synthetic oligonucleotide: FAS-3012
auuucuuuguucuuucagugaa

SEQ ID NO: 29012 - RNA, 23 nt, Artificial Sequence
  Synthetic oligonucleotide: FAS-3013
aauuucuuuguucuuucagugaa

SEQ ID NO: 29013 - RNA, 24 nt, Artificial Sequence
  Synthetic oligonucleotide: FAS-3014
aaauuucuuuguucuuucagugaa

SEQ ID NO: 29014 - RNA, 18 nt, Artificial Sequence
  Synthetic oligonucleotide: FAS-3015
gaaaacaugcagaaagca

SEQ ID NO: 29015 - RNA, 19 nt, Artificial Sequence
  Synthetic oligonucleotide: FAS-3016
agaaaacaugcagaaagca

SEQ ID NO: 29016 - RNA, 20 nt, Artificial Sequence
  Synthetic oligonucleotide: FAS-393
cagaaaacaugcagaaagca

SEQ ID NO: 29017 - RNA, 21 nt, Artificial Sequence
  Synthetic oligonucleotide: FAS-3017
acagaaaacaugcagaaagca

SEQ ID NO: 29018 - RNA, 22 nt, Artificial Sequence
  Synthetic oligonucleotide: FAS-3018
uacagaaaacaugcagaaagca

SEQ ID NO: 29019 - RNA, 23 nt, Artificial Sequence
  Synthetic oligonucleotide: FAS-3019
guacagaaaacaugcagaaagca

SEQ ID NO: 29020 - RNA, 24 nt, Artificial Sequence
  Synthetic oligonucleotide: FAS-3020
aguacagaaaacaugcagaaagca

SEQ ID NO: 29021 - RNA, 18 nt, Artificial Sequence
  Synthetic oligonucleotide: FAS-3021
aaucuuuguacucuugca

SEQ ID NO: 29022 - RNA, 19 nt, Artificial Sequence
  Synthetic oligonucleotide: FAS-3022
caaucuuuguacucuugca

SEQ ID NO: 29023 - RNA, 20 nt, Artificial Sequence
  Synthetic oligonucleotide: FAS-416
ccaaucuuuguacucuugca

SEQ ID NO: 29024 - RNA, 21 nt, Artificial Sequence
  Synthetic oligonucleotide: FAS-3023
gccaaucuuuguacucuugca

SEQ ID NO: 29025 - RNA, 22 nt, Artificial Sequence
  Synthetic oligonucleotide: FAS-3024
agccaaucuuuguacucuugca

SEQ ID NO: 29026 - RNA, 23 nt, Artificial Sequence
  Synthetic oligonucleotide: FAS-3025
aagccaaucuuuguacucuugca

SEQ ID NO: 29027 - RNA, 24 nt, Artificial Sequence
  Synthetic oligonucleotide: FAS-3026
aaagccaaucuuuguacucuugca

SEQ ID NO: 29028 - RNA, 18 nt, Artificial Sequence
  Synthetic oligonucleotide: FAS-3027
uucgaaagaaugguguca

SEQ ID NO: 29029 - RNA, 19 nt, Artificial Sequence
  Synthetic oligonucleotide: FAS-3028
guucgaaagaaugguguca

SEQ ID NO: 29030 - RNA, 20 nt, Artificial Sequence
  Synthetic oligonucleotide: FAS-406
uguucgaaagaaugguguca

SEQ ID NO: 29031 - RNA, 21 nt, Artificial Sequence
  Synthetic oligonucleotide: FAS-3029
uuguucgaaagaaugguguca

SEQ ID NO: 29032 - RNA, 22 nt, Artificial Sequence
  Synthetic oligonucleotide: FAS-3030
uuuguucgaaagaaugguguca

SEQ ID NO: 29033 - RNA, 23 nt, Artificial Sequence
  Synthetic oligonucleotide: FAS-3031
cuuuguucgaaagaaugguguca

SEQ ID NO: 29034 - RNA, 24 nt, Artificial Sequence
  Synthetic oligonucleotide: FAS-3032
gcuuuguucgaaagaaugguguca

SEQ ID NO: 29035 - RNA, 18 nt, Artificial Sequence
  Synthetic oligonucleotide: FAS-3033
uaauuggcaucaacuuca

SEQ ID NO: 29036 - RNA, 19 nt, Artificial Sequence
  Synthetic oligonucleotide: FAS-3034
guaauuggcaucaacuuca

SEQ ID NO: 29037 - RNA, 20 nt, Artificial Sequence
  Synthetic oligonucleotide: FAS-274
cguaauuggcaucaacuuca

SEQ ID NO: 29038 - RNA, 21 nt, Artificial Sequence
  Synthetic oligonucleotide: FAS-3035
ucguaauuggcaucaacuuca

SEQ ID NO: 29039 - RNA, 22 nt, Artificial Sequence
  Synthetic oligonucleotide: FAS-3036
uucguaauuggcaucaacuuca

SEQ ID NO: 29040 - RNA, 23 nt, Artificial Sequence
  Synthetic oligonucleotide: FAS-3037
cuucguaauuggcaucaacuuca

SEQ ID NO: 29041 - RNA, 24 nt, Artificial Sequence
  Synthetic oligonucleotide: FAS-3038
gcuucguaauuggcaucaacuuca

SEQ ID NO: 29042 - RNA, 18 nt, Artificial Sequence
  Synthetic oligonucleotide: FAS-3039
uuuuaucauuuuauuuca

SEQ ID NO: 29043 - RNA, 19 nt, Artificial Sequence
  Synthetic oligonucleotide: FAS-3040
cuuuuaucauuuuauuuca

SEQ ID NO: 29044 - RNA, 20 nt, Artificial Sequence
  Synthetic oligonucleotide: FAS-400
gcuuuuaucauuuuauuuca

SEQ ID NO: 29045 - RNA, 21 nt, Artificial Sequence
  Synthetic oligonucleotide: FAS-3041
ggcuuuuaucauuuuauuuca

SEQ ID NO: 29046 - RNA, 22 nt, Artificial Sequence
  Synthetic oligonucleotide: FAS-3042
aggcuuuuaucauuuuauuuca

SEQ ID NO: 29047 - RNA, 23 nt, Artificial Sequence
  Synthetic oligonucleotide: FAS-3043
aaggcuuuuaucauuuuauuuca

SEQ ID NO: 29048 - RNA, 24 nt, Artificial Sequence
  Synthetic oligonucleotide: FAS-3044
uaaggcuuuuaucauuuuauuuca

SEQ ID NO: 29049 - RNA, 18 nt, Artificial Sequence
  Synthetic oligonucleotide: FAS-3045
aauuucuuuguucuuuca

SEQ ID NO: 29050 - RNA, 19 nt, Artificial Sequence
  Synthetic oligonucleotide: FAS-3046
aaauuucuuuguucuuuca

SEQ ID NO: 29051 - RNA, 20 nt, Artificial Sequence
  Synthetic oligonucleotide: FAS-386
aaaauuucuuuguucuuuca

SEQ ID NO: 29052 - RNA, 21 nt, Artificial Sequence
  Synthetic oligonucleotide: FAS-3047
uaaaauuucuuuguucuuuca

SEQ ID NO: 29053 - RNA, 22 nt, Artificial Sequence
  Synthetic oligonucleotide: FAS-3048
auaaaauuucuuuguucuuuca

SEQ ID NO: 29054 - RNA, 23 nt, Artificial Sequence
  Synthetic oligonucleotide: FAS-3049
gauaaaauuucuuuguucuuuca

SEQ ID NO: 29055 - RNA, 24 nt, Artificial Sequence
  Synthetic oligonucleotide: FAS-3050
ugauaaaauuucuuuguucuuuca

SEQ ID NO: 29056 - RNA, 18 nt, Artificial Sequence
  Synthetic oligonucleotide: FAS-3051
aucaacuucauggaaaga

SEQ ID NO: 29057 - RNA, 19 nt, Artificial Sequence
  Synthetic oligonucleotide: FAS-3052
caucaacuucauggaaaga

SEQ ID NO: 29058 - RNA, 20 nt, Artificial Sequence
  Synthetic oligonucleotide: FAS-414
gcaucaacuucauggaaaga

SEQ ID NO: 29059 - RNA, 21 nt, Artificial Sequence
  Synthetic oligonucleotide: FAS-3053
ggcaucaacuucauggaaaga

SEQ ID NO: 29060 - RNA, 22 nt, Artificial Sequence
  Synthetic oligonucleotide: FAS-3054
uggcaucaacuucauggaaaga

SEQ ID NO: 29061 - RNA, 23 nt, Artificial Sequence
  Synthetic oligonucleotide: FAS-3055
uuggcaucaacuucauggaaaga

SEQ ID NO: 29062 - RNA, 24 nt, Artificial Sequence
  Synthetic oligonucleotide: FAS-3056
auuggcaucaacuucauggaaaga

SEQ ID NO: 29063 - RNA, 18 nt, Artificial Sequence
  Synthetic oligonucleotide: FAS-3057
acaugcagaaagcacaga

SEQ ID NO: 29064 - RNA, 19 nt, Artificial Sequence
  Synthetic oligonucleotide: FAS-3058
aacaugcagaaagcacaga

SEQ ID NO: 29065 - RNA, 20 nt, Artificial Sequence
  Synthetic oligonucleotide: FAS-394
aaacaugcagaaagcacaga

SEQ ID NO: 29066 - RNA, 21 nt, Artificial Sequence
  Synthetic oligonucleotide: FAS-3059
aaaacaugcagaaagcacaga

SEQ ID NO: 29067 - RNA, 22 nt, Artificial Sequence
  Synthetic oligonucleotide: FAS-3060
gaaaacaugcagaaagcacaga

SEQ ID NO: 29068 - RNA, 23 nt, Artificial Sequence
  Synthetic oligonucleotide: FAS-3061
agaaaacaugcagaaagcacaga

SEQ ID NO: 29069 - RNA, 24 nt, Artificial Sequence
  Synthetic oligonucleotide: FAS-3062
cagaaaacaugcagaaagcacaga

SEQ ID NO: 29070 - RNA, 18 nt, Artificial Sequence
  Synthetic oligonucleotide: FAS-3063
guucuuucagugaagaga

SEQ ID NO: 29071 - RNA, 19 nt, Artificial Sequence
  Synthetic oligonucleotide: FAS-3064
uguucuuucagugaagaga

SEQ ID NO: 29072 - RNA, 20 nt, Artificial Sequence
  Synthetic oligonucleotide: FAS-389
uuguucuuucagugaagaga

SEQ ID NO: 29073 - RNA, 21 nt, Artificial Sequence
  Synthetic oligonucleotide: FAS-3065
uuuguucuuucagugaagaga

SEQ ID NO: 29074 - RNA, 22 nt, Artificial Sequence
  Synthetic oligonucleotide: FAS-3066
cuuuguucuuucagugaagaga

SEQ ID NO: 29075 - RNA, 23 nt, Artificial Sequence
  Synthetic oligonucleotide: FAS-3067
ucuuuguucuuucagugaagaga

SEQ ID NO: 29076 - RNA, 24 nt, Artificial Sequence
  Synthetic oligonucleotide: FAS-3068
uucuuuguucuuucagugaagaga

SEQ ID NO: 29077 - RNA, 18 nt, Artificial Sequence
  Synthetic oligonucleotide: FAS-3069
uccaaagcuuggucuaga

SEQ ID NO: 29078 - RNA, 19 nt, Artificial Sequence
  Synthetic oligonucleotide: FAS-3070
auccaaagcuuggucuaga

SEQ ID NO: 29079 - RNA, 20 nt, Artificial Sequence
  Synthetic oligonucleotide: FAS-422
aauccaaagcuuggucuaga

SEQ ID NO: 29080 - RNA, 21 nt, Artificial Sequence
  Synthetic oligonucleotide: FAS-3071
aaauccaaagcuuggucuaga

SEQ ID NO: 29081 - RNA, 22 nt, Artificial Sequence
  Synthetic oligonucleotide: FAS-3072
gaaauccaaagcuuggucuaga

SEQ ID NO: 29082 - RNA, 23 nt, Artificial Sequence
  Synthetic oligonucleotide: FAS-3073
ugaaauccaaagcuuggucuaga

SEQ ID NO: 29083 - RNA, 24 nt, Artificial Sequence
  Synthetic oligonucleotide: FAS-3074
augaaauccaaagcuuggucuaga

SEQ ID NO: 29084 - RNA, 18 nt, Artificial Sequence
  Synthetic oligonucleotide: FAS-3075
uggcaucaacuucaugga

SEQ ID NO: 29085 - RNA, 19 nt, Artificial Sequence
  Synthetic oligonucleotide: FAS-3076
uuggcaucaacuucaugga

SEQ ID NO: 29086 - RNA, 20 nt, Artificial Sequence
  Synthetic oligonucleotide: FAS-413
auuggcaucaacuucaugga

SEQ ID NO: 29087 - RNA, 21 nt, Artificial Sequence
  Synthetic oligonucleotide: FAS-3077
aauuggcaucaacuucaugga

SEQ ID NO: 29088 - RNA, 22 nt, Artificial Sequence
  Synthetic oligonucleotide: FAS-3078
uaauuggcaucaacuucaugga

SEQ ID NO: 29089 - RNA, 23 nt, Artificial Sequence
  Synthetic oligonucleotide: FAS-3079
guaauuggcaucaacuucaugga

SEQ ID NO: 29090 - RNA, 24 nt, Artificial Sequence
  Synthetic oligonucleotide: FAS-3080
cguaauuggcaucaacuucaugga

SEQ ID NO: 29091 - RNA, 18 nt, Artificial Sequence
  Synthetic oligonucleotide: FAS-3081
gugaagagaaaggaagua

SEQ ID NO: 29092 - RNA, 19 nt, Artificial Sequence
  Synthetic oligonucleotide: FAS-3082
agugaagagaaaggaagua

SEQ ID NO: 29093 - RNA, 20 nt, Artificial Sequence
  Synthetic oligonucleotide: FAS-391
cagugaagagaaaggaagua

SEQ ID NO: 29094 - RNA, 21 nt, Artificial Sequence
  Synthetic oligonucleotide: FAS-3083
ucagugaagagaaaggaagua

SEQ ID NO: 29095 - RNA, 22 nt, Artificial Sequence
  Synthetic oligonucleotide: FAS-3084
uucagugaagagaaaggaagua

SEQ ID NO: 29096 - RNA, 23 nt, Artificial Sequence
  Synthetic oligonucleotide: FAS-3085
uuucagugaagagaaaggaagua

SEQ ID NO: 29097 - RNA, 24 nt, Artificial Sequence
  Synthetic oligonucleotide: FAS-3086
cuuucagugaagagaaaggaagua

SEQ ID NO: 29098 - RNA, 18 nt, Artificial Sequence
  Synthetic oligonucleotide: FAS-3087
cuuuaaauccuguaggua

SEQ ID NO: 29099 - RNA, 19 nt, Artificial Sequence
  Synthetic oligonucleotide: FAS-3088
acuuuaaauccuguaggua

SEQ ID NO: 29100 - RNA, 20 nt, Artificial Sequence
  Synthetic oligonucleotide: FAS-397
aacuuuaaauccuguaggua

SEQ ID NO: 29101 - RNA, 21 nt, Artificial Sequence
  Synthetic oligonucleotide: FAS-3089
caacuuuaaauccuguaggua

SEQ ID NO: 29102 - RNA, 22 nt, Artificial Sequence
  Synthetic oligonucleotide: FAS-3090
ccaacuuuaaauccuguaggua

SEQ ID NO: 29103 - RNA, 23 nt, Artificial Sequence
  Synthetic oligonucleotide: FAS-3091
uccaacuuuaaauccuguaggua

SEQ ID NO: 29104 - RNA, 24 nt, Artificial Sequence
  Synthetic oligonucleotide: FAS-3092
cuccaacuuuaaauccuguaggua

SEQ ID NO: 29105 - RNA, 18 nt, Artificial Sequence
  Synthetic oligonucleotide: FAS-3093
acaggauccagaucuaac

SEQ ID NO: 29106 - RNA, 19 nt, Artificial Sequence
  Synthetic oligonucleotide: FAS-3094
uacaggauccagaucuaac

SEQ ID NO: 29107 - RNA, 20 nt, Artificial Sequence
  Synthetic oligonucleotide: FAS-382
cuacaggauccagaucuaac

SEQ ID NO: 29108 - RNA, 21 nt, Artificial Sequence
  Synthetic oligonucleotide: FAS-3095
ccuacaggauccagaucuaac

SEQ ID NO: 29109 - RNA, 22 nt, Artificial Sequence
  Synthetic oligonucleotide: FAS-3096
accuacaggauccagaucuaac

SEQ ID NO: 29110 - RNA, 23 nt, Artificial Sequence
  Synthetic oligonucleotide: FAS-3097
aaccuacaggauccagaucuaac

SEQ ID NO: 29111 - RNA, 24 nt, Artificial Sequence
  Synthetic oligonucleotide: FAS-3098
caaccuacaggauccagaucuaac

SEQ ID NO: 29112 - RNA, 18 nt, Artificial Sequence
  Synthetic oligonucleotide: FAS-3099
auucagacuaucauccuc

SEQ ID NO: 29113 - RNA, 19 nt, Artificial Sequence
  Synthetic oligonucleotide: FAS-3100
aauucagacuaucauccuc

SEQ ID NO: 29114 - RNA, 20 nt, Artificial Sequence
  Synthetic oligonucleotide: FAS-417
aaauucagacuaucauccuc

SEQ ID NO: 29115 - RNA, 21 nt, Artificial Sequence
  Synthetic oligonucleotide: FAS-3101
aaaauucagacuaucauccuc

SEQ ID NO: 29116 - RNA, 22 nt, Artificial Sequence
  Synthetic oligonucleotide: FAS-3102
gaaaauucagacuaucauccuc

SEQ ID NO: 29117 - RNA, 23 nt, Artificial Sequence
  Synthetic oligonucleotide: FAS-3103
agaaaauucagacuaucauccuc

SEQ ID NO: 29118 - RNA, 24 nt, Artificial Sequence
  Synthetic oligonucleotide: FAS-3104
gagaaaauucagacuaucauccuc

SEQ ID NO: 29119 - RNA, 18 nt, Artificial Sequence
  Synthetic oligonucleotide: FAS-3105
guaauuggcaucaacuuc

SEQ ID NO: 29120 - RNA, 19 nt, Artificial Sequence
  Synthetic oligonucleotide: FAS-3106
cguaauuggcaucaacuuc

SEQ ID NO: 29121 - RNA, 20 nt, Artificial Sequence
  Synthetic oligonucleotide: FAS-411
ucguaauuggcaucaacuuc

SEQ ID NO: 29122 - RNA, 21 nt, Artificial Sequence
  Synthetic oligonucleotide: FAS-3107
uucguaauuggcaucaacuuc

SEQ ID NO: 29123 - RNA, 22 nt, Artificial Sequence
  Synthetic oligonucleotide: FAS-3108
cuucguaauuggcaucaacuuc

SEQ ID NO: 29124 - RNA, 23 nt, Artificial Sequence
  Synthetic oligonucleotide: FAS-3109
gcuucguaauuggcaucaacuuc

SEQ ID NO: 29125 - RNA, 24 nt, Artificial Sequence
  Synthetic oligonucleotide: FAS-3110
ugcuucguaauuggcaucaacuuc

SEQ ID NO: 29126 - RNA, 18 nt, Artificial Sequence
  Synthetic oligonucleotide: FAS-3111
cuuccauuuuuugcuuuc

SEQ ID NO: 29127 - RNA, 19 nt, Artificial Sequence
  Synthetic oligonucleotide: FAS-3112
gcuuccauuuuuugcuuuc

SEQ ID NO: 29128 - RNA, 20 nt, Artificial Sequence
  Synthetic oligonucleotide: FAS-398
ugcuuccauuuuuugcuuuc

SEQ ID NO: 29129 - RNA, 21 nt, Artificial Sequence
  Synthetic oligonucleotide: FAS-3113
cugcuuccauuuuuugcuuuc

SEQ ID NO: 29130 - RNA, 22 nt, Artificial Sequence
  Synthetic oligonucleotide: FAS-3114
ucugcuuccauuuuuugcuuuc

SEQ ID NO: 29131 - RNA, 23 nt, Artificial Sequence
  Synthetic oligonucleotide: FAS-3115
cucugcuuccauuuuuugcuuuc

SEQ ID NO: 29132 - RNA, 24 nt, Artificial Sequence
  Synthetic oligonucleotide: FAS-3116
ucucugcuuccauuuuuugcuuuc

SEQ ID NO: 29133 - RNA, 18 nt, Artificial Sequence
  Synthetic oligonucleotide: FAS-3117
acaauguccaagacacag

SEQ ID NO: 29134 - RNA, 19 nt, Artificial Sequence
  Synthetic oligonucleotide: FAS-3118
gacaauguccaagacacag

SEQ ID NO: 29135 - RNA, 20 nt, Artificial Sequence
  Synthetic oligonucleotide: FAS-409
ugacaauguccaagacacag

SEQ ID NO: 29136 - RNA, 21 nt, Artificial Sequence
  Synthetic oligonucleotide: FAS-3119
augacaauguccaagacacag

SEQ ID NO: 29137 - RNA, 22 nt, Artificial Sequence
  Synthetic oligonucleotide: FAS-3120
aaugacaauguccaagacacag

SEQ ID NO: 29138 - RNA, 23 nt, Artificial Sequence
  Synthetic oligonucleotide: FAS-3121
gaaugacaauguccaagacacag

SEQ ID NO: 29139 - RNA, 24 nt, Artificial Sequence
  Synthetic oligonucleotide: FAS-3122
agaaugacaauguccaagacacag

SEQ ID NO: 29140 - RNA, 18 nt, Artificial Sequence
  Synthetic oligonucleotide: FAS-3123
ucaaugaagccaaaauag

SEQ ID NO: 29141 - RNA, 19 nt, Artificial Sequence
  Synthetic oligonucleotide: FAS-3124
gucaaugaagccaaaauag

SEQ ID NO: 29142 - RNA, 20 nt, Artificial Sequence
  Synthetic oligonucleotide: FAS-407
ugucaaugaagccaaaauag

SEQ ID NO: 29143 - RNA, 21 nt, Artificial Sequence
  Synthetic oligonucleotide: FAS-3125
gugucaaugaagccaaaauag

SEQ ID NO: 29144 - RNA, 22 nt, Artificial Sequence
  Synthetic oligonucleotide: FAS-3126
ggugucaaugaagccaaaauag

SEQ ID NO: 29145 - RNA, 23 nt, Artificial Sequence
  Synthetic oligonucleotide: FAS-3127
uggugucaaugaagccaaaauag

SEQ ID NO: 29146 - RNA, 24 nt, Artificial Sequence
  Synthetic oligonucleotide: FAS-3128
auggugucaaugaagccaaaauag

SEQ ID NO: 29147 - RNA, 18 nt, Artificial Sequence
  Synthetic oligonucleotide: FAS-3129
ggaaguacagaaaacaug

SEQ ID NO: 29148 - RNA, 19 nt, Artificial Sequence
  Synthetic oligonucleotide: FAS-3130
aggaaguacagaaaacaug

SEQ ID NO: 29149 - RNA, 20 nt, Artificial Sequence
  Synthetic oligonucleotide: FAS-392
aaggaaguacagaaaacaug

SEQ ID NO: 29150 - RNA, 21 nt, Artificial Sequence
  Synthetic oligonucleotide: FAS-3131
aaaggaaguacagaaaacaug

SEQ ID NO: 29151 - RNA, 22 nt, Artificial Sequence
  Synthetic oligonucleotide: FAS-3132
gaaaggaaguacagaaaacaug

SEQ ID NO: 29152 - RNA, 23 nt, Artificial Sequence
  Synthetic oligonucleotide: FAS-3133
agaaaggaaguacagaaaacaug

SEQ ID NO: 29153 - RNA, 24 nt, Artificial Sequence
  Synthetic oligonucleotide: FAS-3134
gagaaaggaaguacagaaaacaug

SEQ ID NO: 29154 - RNA, 18 nt, Artificial Sequence
  Synthetic oligonucleotide: FAS-3135
uucuuuguucuuucagug

SEQ ID NO: 29155 - RNA, 19 nt, Artificial Sequence
  Synthetic oligonucleotide: FAS-3136
uuucuuuguucuuucagug

SEQ ID NO: 29156 - RNA, 20 nt, Artificial Sequence
  Synthetic oligonucleotide: FAS-387
auuucuuuguucuuucagug

SEQ ID NO: 29157 - RNA, 21 nt, Artificial Sequence
  Synthetic oligonucleotide: FAS-3137
aauuucuuuguucuuucagug

SEQ ID NO: 29158 - RNA, 22 nt, Artificial Sequence
  Synthetic oligonucleotide: FAS-3138
aaauuucuuuguucuuucagug

SEQ ID NO: 29159 - RNA, 23 nt, Artificial Sequence
  Synthetic oligonucleotide: FAS-3139
aaaauuucuuuguucuuucagug

SEQ ID NO: 29160 - RNA, 24 nt, Artificial Sequence
  Synthetic oligonucleotide: FAS-3140
uaaaauuucuuuguucuuucagug

SEQ ID NO: 29161 - RNA, 18 nt, Artificial Sequence
  Synthetic oligonucleotide: FAS-3141
aauauaucaccacuauug

SEQ ID NO: 29162 - RNA, 19 nt, Artificial Sequence
  Synthetic oligonucleotide: FAS-3142
aaauauaucaccacuauug

SEQ ID NO: 29163 - RNA, 20 nt, Artificial Sequence
  Synthetic oligonucleotide: FAS-402
uaaauauaucaccacuauug

SEQ ID NO: 29164 - RNA, 21 nt, Artificial Sequence
  Synthetic oligonucleotide: FAS-3143
guaaauauaucaccacuauug

SEQ ID NO: 29165 - RNA, 22 nt, Artificial Sequence
  Synthetic oligonucleotide: FAS-3144
aguaaauauaucaccacuauug

SEQ ID NO: 29166 - RNA, 23 nt, Artificial Sequence
  Synthetic oligonucleotide: FAS-3145
gaguaaauauaucaccacuauug

SEQ ID NO: 29167 - RNA, 24 nt, Artificial Sequence
  Synthetic oligonucleotide: FAS-3146
ugaguaaauauaucaccacuauug

SEQ ID NO: 29168 - RNA, 18 nt, Artificial Sequence
  Synthetic oligonucleotide: FAS-3147
ccaaucuuuguacucuug

SEQ ID NO: 29169 - RNA, 19 nt, Artificial Sequence
  Synthetic oligonucleotide: FAS-3148
gccaaucuuuguacucuug

SEQ ID NO: 29170 - RNA, 20 nt, Artificial Sequence
  Synthetic oligonucleotide: FAS-415
agccaaucuuuguacucuug

SEQ ID NO: 29171 - RNA, 21 nt, Artificial Sequence
  Synthetic oligonucleotide: FAS-3149
aagccaaucuuuguacucuug

SEQ ID NO: 29172 - RNA, 22 nt, Artificial Sequence
  Synthetic oligonucleotide: FAS-3150
aaagccaaucuuuguacucuug

SEQ ID NO: 29173 - RNA, 23 nt, Artificial Sequence
  Synthetic oligonucleotide: FAS-3151
aaaagccaaucuuuguacucuug

SEQ ID NO: 29174 - RNA, 24 nt, Artificial Sequence
  Synthetic oligonucleotide: FAS-3152
aaaaagccaaucuuuguacucuug

SEQ ID NO: 29175 - RNA, 18 nt, Artificial Sequence
  Synthetic oligonucleotide: FAS-3153
aggacauuacuagugacu

SEQ ID NO: 29176 - RNA, 19 nt, Artificial Sequence
  Synthetic oligonucleotide: FAS-3154
aaggacauuacuagugacu

SEQ ID NO: 29177 - RNA, 20 nt, Artificial Sequence
  Synthetic oligonucleotide: FAS-418
caaggacauuacuagugacu

SEQ ID NO: 29178 - RNA, 21 nt, Artificial Sequence
  Synthetic oligonucleotide: FAS-3155
ucaaggacauuacuagugacu

SEQ ID NO: 29179 - RNA, 22 nt, Artificial Sequence
  Synthetic oligonucleotide: FAS-3156
cucaaggacauuacuagugacu

SEQ ID NO: 29180 - RNA, 23 nt, Artificial Sequence
  Synthetic oligonucleotide: FAS-3157
ccucaaggacauuacuagugacu

SEQ ID NO: 29181 - RNA, 24 nt, Artificial Sequence
  Synthetic oligonucleotide: FAS-3158
uccucaaggacauuacuagugacu

SEQ ID NO: 29182 - RNA, 18 nt, Artificial Sequence
  Synthetic oligonucleotide: FAS-3159
uuccauuuuuugcuuucu

SEQ ID NO: 29183 - RNA, 19 nt, Artificial Sequence
  Synthetic oligonucleotide: FAS-3160
cuuccauuuuuugcuuucu

SEQ ID NO: 29184 - RNA, 20 nt, Artificial Sequence
  Synthetic oligonucleotide: FAS-266
gcuuccauuuuuugcuuucu

SEQ ID NO: 29185 - RNA, 21 nt, Artificial Sequence
  Synthetic oligonucleotide: FAS-3161
ugcuuccauuuuuugcuuucu

SEQ ID NO: 29186 - RNA, 22 nt, Artificial Sequence
  Synthetic oligonucleotide: FAS-3162
cugcuuccauuuuuugcuuucu

SEQ ID NO: 29187 - RNA, 23 nt, Artificial Sequence
  Synthetic oligonucleotide: FAS-3163
ucugcuuccauuuuuugcuuucu

SEQ ID NO: 29188 - RNA, 24 nt, Artificial Sequence
  Synthetic oligonucleotide: FAS-3164
cucugcuuccauuuuuugcuuucu

SEQ ID NO: 29189 - RNA, 18 nt, Artificial Sequence
  Synthetic oligonucleotide: FAS-3165
gccaauuccacuaauugu

SEQ ID NO: 29190 - RNA, 19 nt, Artificial Sequence
  Synthetic oligonucleotide: FAS-3166
ugccaauuccacuaauugu

SEQ ID NO: 29191 - RNA, 20 nt, Artificial Sequence
  Synthetic oligonucleotide: FAS-384
uugccaauuccacuaauugu

SEQ ID NO: 29192 - RNA, 21 nt, Artificial Sequence
  Synthetic oligonucleotide: FAS-3167
uuugccaauuccacuaauugu

SEQ ID NO: 29193 - RNA, 22 nt, Artificial Sequence
  Synthetic oligonucleotide: FAS-3168
uuuugccaauuccacuaauugu

SEQ ID NO: 29194 - RNA, 23 nt, Artificial Sequence
  Synthetic oligonucleotide: FAS-3169
cuuuugccaauuccacuaauugu

SEQ ID NO: 29195 - RNA, 24 nt, Artificial Sequence
  Synthetic oligonucleotide: FAS-3170
ucuuuugccaauuccacuaauugu

SEQ ID NO: 29196 - RNA, 18 nt, Artificial Sequence
  Synthetic oligonucleotide: FAS-3171
ucaaguuaaaggcuuugu

SEQ ID NO: 29197 - RNA, 19 nt, Artificial Sequence
  Synthetic oligonucleotide: FAS-3172
gucaaguuaaaggcuuugu

SEQ ID NO: 29198 - RNA, 20 nt, Artificial Sequence
  Synthetic oligonucleotide: FAS-404
agucaaguuaaaggcuuugu

SEQ ID NO: 29199 - RNA, 21 nt, Artificial Sequence
  Synthetic oligonucleotide: FAS-3173
aagucaaguuaaaggcuuugu

SEQ ID NO: 29200 - RNA, 22 nt, Artificial Sequence
  Synthetic oligonucleotide: FAS-3174
uaagucaaguuaaaggcuuugu

SEQ ID NO: 29201 - RNA, 23 nt, Artificial Sequence
  Synthetic oligonucleotide: FAS-3175
cuaagucaaguuaaaggcuuugu

SEQ ID NO: 29202 - RNA, 24 nt, Artificial Sequence
  Synthetic oligonucleotide: FAS-3176
acuaagucaaguuaaaggcuuugu

SEQ ID NO: 29203 - RNA, 18 nt, Artificial Sequence
  Synthetic oligonucleotide: FAS-3177
cucagaaaauucaaacuu

SEQ ID NO: 29204 - RNA, 19 nt, Artificial Sequence
  Synthetic oligonucleotide: FAS-3178
acucagaaaauucaaacuu

SEQ ID NO: 29205 - RNA, 20 nt, Artificial Sequence
  Synthetic oligonucleotide: FAS-419
gacucagaaaauucaaacuu

SEQ ID NO: 29206 - RNA, 21 nt, Artificial Sequence
  Synthetic oligonucleotide: FAS-3179
ugacucagaaaauucaaacuu

SEQ ID NO: 29207 - RNA, 22 nt, Artificial Sequence
  Synthetic oligonucleotide: FAS-3180
gugacucagaaaauucaaacuu

SEQ ID NO: 29208 - RNA, 23 nt, Artificial Sequence
  Synthetic oligonucleotide: FAS-3181
agugacucagaaaauucaaacuu

SEQ ID NO: 29209 - RNA, 24 nt, Artificial Sequence
  Synthetic oligonucleotide: FAS-3182
uagugacucagaaaauucaaacuu

SEQ ID NO: 29210 - RNA, 17 nt, Artificial Sequence
  Synthetic oligonucleotide: FAS-231
cugcauuuggaagaaaa

SEQ ID NO: 29211 - RNA, 17 nt, Artificial Sequence
  Synthetic oligonucleotide: FAS-164
guaacauaccuggagga

SEQ ID NO: 29212 - RNA, 17 nt, Artificial Sequence
  Synthetic oligonucleotide: FAS-135
ugacugacaucaacucc

SEQ ID NO: 29213 - RNA, 17 nt, Artificial Sequence
  Synthetic oligonucleotide: FAS-146
auguuacacaaaacauc

SEQ ID NO: 29214 - RNA, 17 nt, Artificial Sequence
  Synthetic oligonucleotide: FAS-3183
ccauugacugugcaguc

SEQ ID NO: 29215 - RNA, 17 nt, Artificial Sequence
  Synthetic oligonucleotide: FAS-596
ggugagugugcauuccu

SEQ ID NO: 29216 - RNA, 17 nt, Artificial Sequence
  Synthetic oligonucleotide: FAS-3184
cccucuccugcccgggu

SEQ ID NO: 29217 - RNA, 17 nt, Artificial Sequence
  Synthetic oligonucleotide: FAS-240
agguucuuacgucuguu

SEQ ID NO: 29218 - RNA, 17 nt, Artificial Sequence
  Synthetic oligonucleotide: FAS-585
aguaaguuuuagucuuu

SEQ ID NO: 29219 - RNA, 17 nt, Artificial Sequence
  Synthetic oligonucleotide: FAS-3185
guuuccaaacugauuuu

SEQ ID NO: 29220 - RNA, 20 nt, Artificial Sequence
  Synthetic oligonucleotide: FAS-222
cuucugcauuuggaagaaaa

SEQ ID NO: 29221 - RNA, 20 nt, Artificial Sequence
  Synthetic oligonucleotide: FAS-150
uguguaacauaccuggagga

SEQ ID NO: 29222 - RNA, 20 nt, Artificial Sequence
  Synthetic oligonucleotide: FAS-123
aagugacugacaucaacucc

SEQ ID NO: 29223 - RNA, 20 nt, Artificial Sequence
  Synthetic oligonucleotide: FAS-134
gguauguuacacaaaacauc

SEQ ID NO: 29224 - RNA, 20 nt, Artificial Sequence
  Synthetic oligonucleotide: FAS-3186
uccccauugacugugcaguc

SEQ ID NO: 29225 - RNA, 20 nt, Artificial Sequence
  Synthetic oligonucleotide: FAS-591
gcuggugagugugcauuccu

SEQ ID NO: 29226 - RNA, 20 nt, Artificial Sequence
  Synthetic oligonucleotide: FAS-3187
gagcccucuccugcccgggu

SEQ ID NO: 29227 - RNA, 20 nt, Artificial Sequence
  Synthetic oligonucleotide: FAS-237
uacagguucuuacgucuguu

SEQ ID NO: 29228 - RNA, 20 nt, Artificial Sequence
  Synthetic oligonucleotide: FAS-583
ccaaguaaguuuuagucuuu

SEQ ID NO: 29229 - RNA, 20 nt, Artificial Sequence
  Synthetic oligonucleotide: FAS-3188
auaguuuccaaacugauuuu

SEQ ID NO: 29230 - RNA, 17 nt, Artificial Sequence
  Synthetic oligonucleotide: FAS-244
cuuccaaaugcagaaga

SEQ ID NO: 29231 - RNA, 20 nt, Artificial Sequence
  Synthetic oligonucleotide: FAS-243
uuucuuccaaaugcagaaga

SEQ ID NO: 29232 - RNA, 17 nt, Artificial Sequence
  Synthetic oligonucleotide: FAS-586
gaaagaagcguaugaca

SEQ ID NO: 29233 - RNA, 17 nt, Artificial Sequence
  Synthetic oligonucleotide: FAS-3189
uuguuuuucacucuaga

SEQ ID NO: 29234 - RNA, 17 nt, Artificial Sequence
  Synthetic oligonucleotide: FAS-593
uuuucucugcaagagua

SEQ ID NO: 29235 - RNA, 17 nt, Artificial Sequence
  Synthetic oligonucleotide: FAS-592
uucacucuagaccaagc

SEQ ID NO: 29236 - RNA, 17 nt, Artificial Sequence
  Synthetic oligonucleotide: FAS-3190
acuucagaaaugaaauc

SEQ ID NO: 29237 - RNA, 17 nt, Artificial Sequence
  Synthetic oligonucleotide: FAS-3191
ucuuuaaucaauguguc

SEQ ID NO: 29238 - RNA, 17 nt, Artificial Sequence
  Synthetic oligonucleotide: FAS-3192
agcagaacagaaaguuc

SEQ ID NO: 29239 - RNA, 17 nt, Artificial Sequence
  Synthetic oligonucleotide: FAS-3193
ucugcaagaguacaaag

SEQ ID NO: 29240 - RNA, 17 nt, Artificial Sequence
  Synthetic oligonucleotide: FAS-3194
gcaauaaauuuaucugg

SEQ ID NO: 29241 - RNA, 17 nt, Artificial Sequence
  Synthetic oligonucleotide: FAS-3195
auccagaucuaacuugg

SEQ ID NO: 29242 - RNA, 17 nt, Artificial Sequence
  Synthetic oligonucleotide: FAS-3196
uucuugaucucaucuau

SEQ ID NO: 29243 - RNA, 17 nt, Artificial Sequence
  Synthetic oligonucleotide: FAS-594
uaccuauuucaauaccu

SEQ ID NO: 29244 - RNA, 17 nt, Artificial Sequence
  Synthetic oligonucleotide: FAS-346
ccuacaggauuuaaagu

SEQ ID NO: 29245 - RNA, 17 nt, Artificial Sequence
  Synthetic oligonucleotide: FAS-3197
aauuguuugggguaagu

SEQ ID NO: 29246 - RNA, 17 nt, Artificial Sequence
  Synthetic oligonucleotide: FAS-3198
uagguauugaaauaggu

SEQ ID NO: 29247 - RNA, 17 nt, Artificial Sequence
  Synthetic oligonucleotide: FAS-3199
cuuucucugcuuccauu

SEQ ID NO: 29248 - RNA, 17 nt, Artificial Sequence
  Synthetic oligonucleotide: FAS-3200
ugacacuaagucaaguu

SEQ ID NO: 29249 - RNA, 17 nt, Artificial Sequence
  Synthetic oligonucleotide: FAS-3201
aaccuugguuuuccuuu

SEQ ID NO: 29250 - RNA, 20 nt, Artificial Sequence
  Synthetic oligonucleotide: FAS-584
aaagaaagaagcguaugaca

SEQ ID NO: 29251 - RNA, 20 nt, Artificial Sequence
  Synthetic oligonucleotide: FAS-3202
uuguuguuuuucacucuaga

SEQ ID NO: 29252 - RNA, 20 nt, Artificial Sequence
  Synthetic oligonucleotide: FAS-588
gaauuuucucugcaagagua

SEQ ID NO: 29253 - RNA, 20 nt, Artificial Sequence
  Synthetic oligonucleotide: FAS-587
uuuuucacucuagaccaagc

SEQ ID NO: 29254 - RNA, 20 nt, Artificial Sequence
  Synthetic oligonucleotide: FAS-3203
caaacuucagaaaugaaauc

SEQ ID NO: 29255 - RNA, 20 nt, Artificial Sequence
  Synthetic oligonucleotide: FAS-3204
agaucuuuaaucaauguguc

SEQ ID NO: 29256 - RNA, 20 nt, Artificial Sequence
  Synthetic oligonucleotide: FAS-3205
cacagcagaacagaaaguuc

SEQ ID NO: 29257 - RNA, 20 nt, Artificial Sequence
  Synthetic oligonucleotide: FAS-3206
uucucugcaagaguacaaag

SEQ ID NO: 29258 - RNA, 20 nt, Artificial Sequence
  Synthetic oligonucleotide: FAS-3207
guggcaauaaauuuaucugg

SEQ ID NO: 29259 - RNA, 20 nt, Artificial Sequence
  Synthetic oligonucleotide: FAS-3208
aggauccagaucuaacuugg

SEQ ID NO: 29260 - RNA, 20 nt, Artificial Sequence
  Synthetic oligonucleotide: FAS-3209
ucauucuugaucucaucuau

SEQ ID NO: 29261 - RNA, 20 nt, Artificial Sequence
  Synthetic oligonucleotide: FAS-589
ugauaccuauuucaauaccu

SEQ ID NO: 29262 - RNA, 20 nt, Artificial Sequence
  Synthetic oligonucleotide: FAS-317
auaccuacaggauuuaaagu

SEQ ID NO: 29263 - RNA, 20 nt, Artificial Sequence
  Synthetic oligonucleotide: FAS-3210
acuaauuguuugggguaagu

SEQ ID NO: 29264 - RNA, 20 nt, Artificial Sequence
  Synthetic oligonucleotide: FAS-3211
cuguagguauugaaauaggu

SEQ ID NO: 29265 - RNA, 20 nt, Artificial Sequence
  Synthetic oligonucleotide: FAS-3212
ucaugacacuaagucaaguu

SEQ ID NO: 29266 - RNA, 20 nt, Artificial Sequence
  Synthetic oligonucleotide: FAS-3213
gagaaccuugguuuuccuuu

SEQ ID NO: 29267 - RNA, 17 nt, Artificial Sequence
  Synthetic oligonucleotide: FAS-938
aggguucguugcacaaa

SEQ ID NO: 29268 - RNA, 17 nt, Artificial Sequence
  Synthetic oligonucleotide: FAS-880
uauccccgggacuaaga

SEQ ID NO: 29269 - RNA, 17 nt, Artificial Sequence
  Synthetic oligonucleotide: FAS-929
cugcgcgcggguaggga

SEQ ID NO: 29270 - RNA, 17 nt, Artificial Sequence
  Synthetic oligonucleotide: FAS-844
gguggacccgcucagua

SEQ ID NO: 29271 - RNA, 17 nt, Artificial Sequence
  Synthetic oligonucleotide: FAS-820
gcgcaagagugacacac

SEQ ID NO: 29272 - RNA, 17 nt, Artificial Sequence
  Synthetic oligonucleotide: FAS-881
auccccgggacuaagac

SEQ ID NO: 29273 - RNA, 17 nt, Artificial Sequence
  Synthetic oligonucleotide: FAS-917
cucgcuggggaacgccc

SEQ ID NO: 29274 - RNA, 17 nt, Artificial Sequence
  Synthetic oligonucleotide: FAS-916
ccucgcuggggaacgcc

SEQ ID NO: 29275 - RNA, 17 nt, Artificial Sequence
  Synthetic oligonucleotide: FAS-947
gugaggaccucgagagc

SEQ ID NO: 29276 - RNA, 17 nt, Artificial Sequence
  Synthetic oligonucleotide: FAS-894
ccaacuccguacugagc

SEQ ID NO: 29277 - RNA, 17 nt, Artificial Sequence
  Synthetic oligonucleotide: FAS-896
cggguccaccaacccgc

SEQ ID NO: 29278 - RNA, 17 nt, Artificial Sequence
  Synthetic oligonucleotide: FAS-925
caacuuggccugcgcgc

SEQ ID NO: 29279 - RNA, 17 nt, Artificial Sequence
  Synthetic oligonucleotide: FAS-868
caaaguggggcgggcgc

SEQ ID NO: 29280 - RNA, 17 nt, Artificial Sequence
  Synthetic oligonucleotide: FAS-828
uuuacgagugacuuggc

SEQ ID NO: 29281 - RNA, 17 nt, Artificial Sequence
  Synthetic oligonucleotide: FAS-930
ugcgcgcggguagggag

SEQ ID NO: 29282 - RNA, 17 nt, Artificial Sequence
  Synthetic oligonucleotide: FAS-893
cccaacuccguacugag

SEQ ID NO: 29283 - RNA, 17 nt, Artificial Sequence
  Synthetic oligonucleotide: FAS-882
uccccgggacuaagacg

SEQ ID NO: 29284 - RNA, 17 nt, Artificial Sequence
  Synthetic oligonucleotide: FAS-895
gcggguccaccaacccg

SEQ ID NO: 29285 - RNA, 17 nt, Artificial Sequence
  Synthetic oligonucleotide: FAS-860
accccgucuuagucccg

SEQ ID NO: 29286 - RNA, 17 nt, Artificial Sequence
  Synthetic oligonucleotide: FAS-924
gcaacuuggccugcgcg

SEQ ID NO: 29287 - RNA, 17 nt, Artificial Sequence
  Synthetic oligonucleotide: FAS-907
cucacgaaaagccccgg

SEQ ID NO: 29288 - RNA, 17 nt, Artificial Sequence
  Synthetic oligonucleotide: FAS-872
cgcgugcgggauugcgg

SEQ ID NO: 29289 - RNA, 17 nt, Artificial Sequence
  Synthetic oligonucleotide: FAS-871
ggacgcgugcgggauug

SEQ ID NO: 29290 - RNA, 17 nt, Artificial Sequence
  Synthetic oligonucleotide: FAS-847
cgcucaguacggaguug

SEQ ID NO: 29291 - RNA, 17 nt, Artificial Sequence
  Synthetic oligonucleotide: FAS-920
ggggaacgcccggguug

SEQ ID NO: 29292 - RNA, 17 nt, Artificial Sequence
  Synthetic oligonucleotide: FAS-939
ggguucguugcacaaau

SEQ ID NO: 29293 - RNA, 17 nt, Artificial Sequence
  Synthetic oligonucleotide: FAS-972
uacagauguugcgccau

SEQ ID NO: 29294 - RNA, 17 nt, Artificial Sequence
  Synthetic oligonucleotide: FAS-861
gucuuagucccggggau

SEQ ID NO: 29295 - RNA, 17 nt, Artificial Sequence
  Synthetic oligonucleotide: FAS-827
gcgguuuacgagugacu

SEQ ID NO: 29296 - RNA, 17 nt, Artificial Sequence
  Synthetic oligonucleotide: FAS-967
uugcggggcauuugacu

SEQ ID NO: 29297 - RNA, 17 nt, Artificial Sequence
  Synthetic oligonucleotide: FAS-877
ggcgcacgcgggcaccu

SEQ ID NO: 29298 - RNA, 17 nt, Artificial Sequence
  Synthetic oligonucleotide: FAS-822
uguucaaagacgcuucu

SEQ ID NO: 29299 - RNA, 17 nt, Artificial Sequence
  Synthetic oligonucleotide: FAS-863
ccggggauaggcaaagu

SEQ ID NO: 29300 - RNA, 17 nt, Artificial Sequence
  Synthetic oligonucleotide: FAS-845
cccgcucaguacggagu

SEQ ID NO: 29301 - RNA, 17 nt, Artificial Sequence
  Synthetic oligonucleotide: FAS-926
uuggccugcgcgcgggu

SEQ ID NO: 29302 - RNA, 17 nt, Artificial Sequence
  Synthetic oligonucleotide: FAS-791
gcuggggcuaugcgauu

SEQ ID NO: 29303 - RNA, 17 nt, Artificial Sequence
  Synthetic oligonucleotide: FAS-846
ccgcucaguacggaguu

SEQ ID NO: 29304 - RNA, 20 nt, Artificial Sequence
  Synthetic oligonucleotide: FAS-784
gcgccauagggcucugaaaa

SEQ ID NO: 29305 - RNA, 20 nt, Artificial Sequence
  Synthetic oligonucleotide: FAS-747
gucaggguucguugcacaaa

SEQ ID NO: 29306 - RNA, 20 nt, Artificial Sequence
  Synthetic oligonucleotide: FAS-783
ugcgccauagggcucugaaa

SEQ ID NO: 29307 - RNA, 20 nt, Artificial Sequence
  Synthetic oligonucleotide: FAS-757
cggccuccugcccuuucuaa

SEQ ID NO: 29308 - RNA, 20 nt, Artificial Sequence
  Synthetic oligonucleotide: FAS-607
gugacuccagcaauuagcca

SEQ ID NO: 29309 - RNA, 20 nt, Artificial Sequence
  Synthetic oligonucleotide: FAS-689
gccuauccccgggacuaaga

SEQ ID NO: 29310 - RNA, 20 nt, Artificial Sequence
  Synthetic oligonucleotide: FAS-786
cauagggcucugaaaaggga

SEQ ID NO: 29311 - RNA, 20 nt, Artificial Sequence
  Synthetic oligonucleotide: FAS-634
aagacgcuucuggggaguga

SEQ ID NO: 29312 - RNA, 20 nt, Artificial Sequence
  Synthetic oligonucleotide: FAS-653
guugguggacccgcucagua

SEQ ID NO: 29313 - RNA, 20 nt, Artificial Sequence
  Synthetic oligonucleotide: FAS-736
acuuggccugcgcgcgggua

SEQ ID NO: 29314 - RNA, 20 nt, Artificial Sequence
  Synthetic oligonucleotide: FAS-629
cucgcgcaagagugacacac

SEQ ID NO: 29315 - RNA, 20 nt, Artificial Sequence
  Synthetic oligonucleotide: FAS-690
ccuauccccgggacuaagac

SEQ ID NO: 29316 - RNA, 20 nt, Artificial Sequence
  Synthetic oligonucleotide: FAS-620
cugcaggaacgccccgggac

SEQ ID NO: 29317 - RNA, 20 nt, Artificial Sequence
  Synthetic oligonucleotide: FAS-775
agacuugcggggcauuugac

SEQ ID NO: 29318 - RNA, 20 nt, Artificial Sequence
  Synthetic oligonucleotide: FAS-769
cagagguccugccuggguac

SEQ ID NO: 29319 - RNA, 20 nt, Artificial Sequence
  Synthetic oligonucleotide: FAS-758
gcuucugcuguaguucaacc

SEQ ID NO: 29320 - RNA, 20 nt, Artificial Sequence
  Synthetic oligonucleotide: FAS-692
agacgggguaagccuccacc

SEQ ID NO: 29321 - RNA, 20 nt, Artificial Sequence
  Synthetic oligonucleotide: FAS-693
gacgggguaagccuccaccc

SEQ ID NO: 29322 - RNA, 20 nt, Artificial Sequence
  Synthetic oligonucleotide: FAS-619
agccacugcaggaacgcccc

SEQ ID NO: 29323 - RNA, 20 nt, Artificial Sequence
  Synthetic oligonucleotide: FAS-715
gacgagcucacgaaaagccc

SEQ ID NO: 29324 - RNA, 20 nt, Artificial Sequence
  Synthetic oligonucleotide: FAS-687
cgccccacuuugccuauccc

SEQ ID NO: 29325 - RNA, 20 nt, Artificial Sequence
  Synthetic oligonucleotide: FAS-668
gcuuaccccgucuuaguccc

SEQ ID NO: 29326 - RNA, 20 nt, Artificial Sequence
  Synthetic oligonucleotide: FAS-667
ggcuuaccccgucuuagucc

SEQ ID NO: 29327 - RNA, 20 nt, Artificial Sequence
  Synthetic oligonucleotide: FAS-703
uccccaacuccguacugagc

SEQ ID NO: 29328 - RNA, 20 nt, Artificial Sequence
  Synthetic oligonucleotide: FAS-705
gagcggguccaccaacccgc

SEQ ID NO: 29329 - RNA, 20 nt, Artificial Sequence
  Synthetic oligonucleotide: FAS-637
cgguuuacgagugacuuggc

SEQ ID NO: 29330 - RNA, 20 nt, Artificial Sequence
  Synthetic oligonucleotide: FAS-659
ggauugcucaacaaccaugc

SEQ ID NO: 29331 - RNA, 20 nt, Artificial Sequence
  Synthetic oligonucleotide: FAS-717
cacgaaaagccccggugguc

SEQ ID NO: 29332 - RNA, 20 nt, Artificial Sequence
  Synthetic oligonucleotide: FAS-754
guggcuggcaugcucacuuc

SEQ ID NO: 29333 - RNA, 20 nt, Artificial Sequence
  Synthetic oligonucleotide: FAS-630
cagguguucaaagacgcuuc

SEQ ID NO: 29334 - RNA, 20 nt, Artificial Sequence
  Synthetic oligonucleotide: FAS-779
gagaggcucacagacguuuc

SEQ ID NO: 29335 - RNA, 20 nt, Artificial Sequence
  Synthetic oligonucleotide: FAS-671
agucccggggauaggcaaag

SEQ ID NO: 29336 - RNA, 20 nt, Artificial Sequence
  Synthetic oligonucleotide: FAS-766
gaauggagcucagagcgcag

SEQ ID NO: 29337 - RNA, 20 nt, Artificial Sequence
  Synthetic oligonucleotide: FAS-691
cuauccccgggacuaagacg

SEQ ID NO: 29338 - RNA, 20 nt, Artificial Sequence
  Synthetic oligonucleotide: FAS-704
ugagcggguccaccaacccg

SEQ ID NO: 29339 - RNA, 20 nt, Artificial Sequence
  Synthetic oligonucleotide: FAS-669
cuuaccccgucuuagucccg

SEQ ID NO: 29340 - RNA, 20 nt, Artificial Sequence
  Synthetic oligonucleotide: FAS-625
aacccgggcguuccccagcg

SEQ ID NO: 29341 - RNA, 20 nt, Artificial Sequence
  Synthetic oligonucleotide: FAS-733
ucagcaacuuggccugcgcg

SEQ ID NO: 29342 - RNA, 20 nt, Artificial Sequence
  Synthetic oligonucleotide: FAS-718
gaaaagccccgguggucagg

SEQ ID NO: 29343 - RNA, 20 nt, Artificial Sequence
  Synthetic oligonucleotide: FAS-716
gagcucacgaaaagccccgg

SEQ ID NO: 29344 - RNA, 20 nt, Artificial Sequence
  Synthetic oligonucleotide: FAS-681
ggacgcgugcgggauugcgg

SEQ ID NO: 29345 - RNA, 20 nt, Artificial Sequence
  Synthetic oligonucleotide: FAS-665
ugagcccucuccugcccggg

SEQ ID NO: 29346 - RNA, 20 nt, Artificial Sequence
  Synthetic oligonucleotide: FAS-633
aaagacgcuucuggggagug

SEQ ID NO: 29347 - RNA, 20 nt, Artificial Sequence
  Synthetic oligonucleotide: FAS-680
gcgggacgcgugcgggauug

SEQ ID NO: 29348 - RNA, 20 nt, Artificial Sequence
  Synthetic oligonucleotide: FAS-656
acccgcucaguacggaguug

SEQ ID NO: 29349 - RNA, 20 nt, Artificial Sequence
  Synthetic oligonucleotide: FAS-748
ucaggguucguugcacaaau

SEQ ID NO: 29350 - RNA, 20 nt, Artificial Sequence
  Synthetic oligonucleotide: FAS-781
aaguacagauguugcgccau

SEQ ID NO: 29351 - RNA, 20 nt, Artificial Sequence
  Synthetic oligonucleotide: FAS-720
gccccgguggucaggaggau

SEQ ID NO: 29352 - RNA, 20 nt, Artificial Sequence
  Synthetic oligonucleotide: FAS-670
cccgucuuagucccggggau

SEQ ID NO: 29353 - RNA, 20 nt, Artificial Sequence
  Synthetic oligonucleotide: FAS-732
gcuccauugauucagcaacu

SEQ ID NO: 29354 - RNA, 20 nt, Artificial Sequence
  Synthetic oligonucleotide: FAS-636
gaagcgguuuacgagugacu

SEQ ID NO: 29355 - RNA, 20 nt, Artificial Sequence
  Synthetic oligonucleotide: FAS-686
agcggcgcacgcgggcaccu

SEQ ID NO: 29356 - RNA, 20 nt, Artificial Sequence
  Synthetic oligonucleotide: FAS-708
gagaagaggcagcuccgccu

SEQ ID NO: 29357 - RNA, 20 nt, Artificial Sequence
  Synthetic oligonucleotide: FAS-723
gaugggaaggaagccucgcu

SEQ ID NO: 29358 - RNA, 20 nt, Artificial Sequence
  Synthetic oligonucleotide: FAS-672
gucccggggauaggcaaagu

SEQ ID NO: 29359 - RNA, 20 nt, Artificial Sequence
  Synthetic oligonucleotide: FAS-654
ggacccgcucaguacggagu

SEQ ID NO: 29360 - RNA, 20 nt, Artificial Sequence
  Synthetic oligonucleotide: FAS-727
ucgcuggggaacgcccgggu

SEQ ID NO: 29361 - RNA, 20 nt, Artificial Sequence
  Synthetic oligonucleotide: FAS-735
aacuuggccugcgcgcgggu

SEQ ID NO: 29362 - RNA, 20 nt, Artificial Sequence
  Synthetic oligonucleotide: FAS-600
auagcuggggcuaugcgauu

SEQ ID NO: 29363 - RNA, 20 nt, Artificial Sequence
  Synthetic oligonucleotide: FAS-655
gacccgcucaguacggaguu

SEQ ID NO: 29364 - RNA, 17 nt, Artificial Sequence
  Synthetic oligonucleotide: FAS-975
ccauagggcucugaaaa

SEQ ID NO: 29365 - RNA, 17 nt, Artificial Sequence
  Synthetic oligonucleotide: FAS-803
gcagaagccuuuagaaa

SEQ ID NO: 29366 - RNA, 17 nt, Artificial Sequence
  Synthetic oligonucleotide: FAS-974
gccauagggcucugaaa

SEQ ID NO: 29367 - RNA, 17 nt, Artificial Sequence
  Synthetic oligonucleotide: FAS-813
ccaaguugcugaaucaa

SEQ ID NO: 29368 - RNA, 17 nt, Artificial Sequence
  Synthetic oligonucleotide: FAS-956
gaggucuugaaggagaa

SEQ ID NO: 29369 - RNA, 17 nt, Artificial Sequence
  Synthetic oligonucleotide: FAS-802
agcagaagccuuuagaa

SEQ ID NO: 29370 - RNA, 17 nt, Artificial Sequence
  Synthetic oligonucleotide: FAS-971
cacagacguuucuggaa

SEQ ID NO: 29371 - RNA, 17 nt, Artificial Sequence
  Synthetic oligonucleotide: FAS-793
ugagaaauaaaaacuaa

SEQ ID NO: 29372 - RNA, 17 nt, Artificial Sequence
  Synthetic oligonucleotide: FAS-948
ccuccugcccuuucuaa

SEQ ID NO: 29373 - RNA, 17 nt, Artificial Sequence
  Synthetic oligonucleotide: FAS-797
auguugcagccacaaca

SEQ ID NO: 29374 - RNA, 17 nt, Artificial Sequence
  Synthetic oligonucleotide: FAS-901
cuccgccugggcagcca

SEQ ID NO: 29375 - RNA, 17 nt, Artificial Sequence
  Synthetic oligonucleotide: FAS-798
acuccagcaauuagcca

SEQ ID NO: 29376 - RNA, 17 nt, Artificial Sequence
  Synthetic oligonucleotide: FAS-10
gguccagaugcccagca

SEQ ID NO: 29377 - RNA, 17 nt, Artificial Sequence
  Synthetic oligonucleotide: FAS-835
aggggcgggcacuggca

SEQ ID NO: 29378 - RNA, 17 nt, Artificial Sequence
  Synthetic oligonucleotide: FAS-830
acuuggcuggagccuca

SEQ ID NO: 29379 - RNA, 17 nt, Artificial Sequence
  Synthetic oligonucleotide: FAS-904
agccagggcuggccuca

SEQ ID NO: 29380 - RNA, 17 nt, Artificial Sequence
  Synthetic oligonucleotide: FAS-933
gggagggggagaaguca

SEQ ID NO: 29381 - RNA, 17 nt, Artificial Sequence
  Synthetic oligonucleotide: FAS-937
gggugaggaaggaguca

SEQ ID NO: 29382 - RNA, 17 nt, Artificial Sequence
  Synthetic oligonucleotide: FAS-887
uccacccgggcaggaga

SEQ ID NO: 29383 - RNA, 17 nt, Artificial Sequence
  Synthetic oligonucleotide: FAS-910
cccgguggucaggagga

SEQ ID NO: 29384 - RNA, 17 nt, Artificial Sequence
  Synthetic oligonucleotide: FAS-935
agaagucagggugagga

SEQ ID NO: 29385 - RNA, 17 nt, Artificial Sequence
  Synthetic oligonucleotide: FAS-9
gcucaccagagguagga

SEQ ID NO: 29386 - RNA, 17 nt, Artificial Sequence
  Synthetic oligonucleotide: FAS-977
agggcucugaaaaggga

SEQ ID NO: 29387 - RNA, 17 nt, Artificial Sequence
  Synthetic oligonucleotide: FAS-922
aacgcccggguugggga

SEQ ID NO: 29388 - RNA, 17 nt, Artificial Sequence
  Synthetic oligonucleotide: FAS-912
uggucaggaggauggga

SEQ ID NO: 29389 - RNA, 17 nt, Artificial Sequence
  Synthetic oligonucleotide: FAS-825
acgcuucuggggaguga

SEQ ID NO: 29390 - RNA, 17 nt, Artificial Sequence
  Synthetic oligonucleotide: FAS-955
aguuggggaggucuuga

SEQ ID NO: 29391 - RNA, 17 nt, Artificial Sequence
  Synthetic oligonucleotide: FAS-973
acagauguugcgccaua

SEQ ID NO: 29392 - RNA, 17 nt, Artificial Sequence
  Synthetic oligonucleotide: FAS-796
aucuguacuuuuucaua

SEQ ID NO: 29393 - RNA, 17 nt, Artificial Sequence
  Synthetic oligonucleotide: FAS-792
uugagaaauaaaaacua

SEQ ID NO: 29394 - RNA, 17 nt, Artificial Sequence
  Synthetic oligonucleotide: FAS-795
cccuuuucagagcccua

SEQ ID NO: 29395 - RNA, 17 nt, Artificial Sequence
  Synthetic oligonucleotide: FAS-927
uggccugcgcgcgggua

SEQ ID NO: 29396 - RNA, 17 nt, Artificial Sequence
  Synthetic oligonucleotide: FAS-817
cccauccuccugaccac

SEQ ID NO: 29397 - RNA, 17 nt, Artificial Sequence
  Synthetic oligonucleotide: FAS-834
gccucaggggcgggcac

SEQ ID NO: 29398 - RNA, 17 nt, Artificial Sequence
  Synthetic oligonucleotide: FAS-811
caggaacgccccgggac

SEQ ID NO: 29399 - RNA, 17 nt, Artificial Sequence
  Synthetic oligonucleotide: FAS-966
cuugcggggcauuugac

SEQ ID NO: 29400 - RNA, 17 nt, Artificial Sequence
  Synthetic oligonucleotide: FAS-960
agguccugccuggguac

SEQ ID NO: 29401 - RNA, 17 nt, Artificial Sequence
  Synthetic oligonucleotide: FAS-814
uggagcccuccccaacc

SEQ ID NO: 29402 - RNA, 17 nt, Artificial Sequence
  Synthetic oligonucleotide: FAS-949
ucugcuguaguucaacc

SEQ ID NO: 29403 - RNA, 17 nt, Artificial Sequence
  Synthetic oligonucleotide: FAS-818
ccauccuccugaccacc

SEQ ID NO: 29404 - RNA, 17 nt, Artificial Sequence
  Synthetic oligonucleotide: FAS-883
cgggguaagccuccacc

SEQ ID NO: 29405 - RNA, 17 nt, Artificial Sequence
  Synthetic oligonucleotide: FAS-876
cggcgcacgcgggcacc

SEQ ID NO: 29406 - RNA, 17 nt, Artificial Sequence
  Synthetic oligonucleotide: FAS-815
ggagcccuccccaaccc

SEQ ID NO: 29407 - RNA, 17 nt, Artificial Sequence
  Synthetic oligonucleotide: FAS-884
gggguaagccuccaccc

SEQ ID NO: 29408 - RNA, 17 nt, Artificial Sequence
  Synthetic oligonucleotide: FAS-799
ccaaggcuccuguaccc

SEQ ID NO: 29409 - RNA, 17 nt, Artificial Sequence
  Synthetic oligonucleotide: FAS-810
cacugcaggaacgcccc

SEQ ID NO: 29410 - RNA, 17 nt, Artificial Sequence
  Synthetic oligonucleotide: FAS-879
ccacuuugccuaucccc

SEQ ID NO: 29411 - RNA, 17 nt, Artificial Sequence
  Synthetic oligonucleotide: FAS-906
gagcucacgaaaagccc

SEQ ID NO: 29412 - RNA, 17 nt, Artificial Sequence
  Synthetic oligonucleotide: FAS-837
cacccugaggccagccc

SEQ ID NO: 29413 - RNA, 17 nt, Artificial Sequence
  Synthetic oligonucleotide: FAS-809
ccacugcaggaacgccc

SEQ ID NO: 29414 - RNA, 17 nt, Artificial Sequence
  Synthetic oligonucleotide: FAS-855
ugagcccucuccugccc

SEQ ID NO: 29415 - RNA, 17 nt, Artificial Sequence
  Synthetic oligonucleotide: FAS-838
gccagcccuggcugccc

SEQ ID NO: 29416 - RNA, 17 nt, Artificial Sequence
  Synthetic oligonucleotide: FAS-878
cccacuuugccuauccc

SEQ ID NO: 29417 - RNA, 17 nt, Artificial Sequence
  Synthetic oligonucleotide: FAS-859
uaccccgucuuaguccc

SEQ ID NO: 29418 - RNA, 17 nt, Artificial Sequence
  Synthetic oligonucleotide: FAS-941
augggcauuccuguccc

SEQ ID NO: 29419 - RNA, 17 nt, Artificial Sequence
  Synthetic oligonucleotide: FAS-801
gaccuccccaacuuccc

SEQ ID NO: 29420 - RNA, 17 nt, Artificial Sequence
  Synthetic oligonucleotide: FAS-900
gcuccgccugggcagcc

SEQ ID NO: 29421 - RNA, 17 nt, Artificial Sequence
  Synthetic oligonucleotide: FAS-898
gaagaggcagcuccgcc

SEQ ID NO: 29422 - RNA, 17 nt, Artificial Sequence
  Synthetic oligonucleotide: FAS-854
gugagcccucuccugcc

SEQ ID NO: 29423 - RNA, 17 nt, Artificial Sequence
  Synthetic oligonucleotide: FAS-958
agcgcagagguccugcc

SEQ ID NO: 29424 - RNA, 17 nt, Artificial Sequence
  Synthetic oligonucleotide: FAS-858
uuaccccgucuuagucc

SEQ ID NO: 29425 - RNA, 17 nt, Artificial Sequence
  Synthetic oligonucleotide: FAS-940
aaugggcauuccugucc

SEQ ID NO: 29426 - RNA, 17 nt, Artificial Sequence
  Synthetic oligonucleotide: FAS-788
ugaauguuuaauauagc

SEQ ID NO: 29427 - RNA, 17 nt, Artificial Sequence
  Synthetic oligonucleotide: FAS-875
gcggcagcggcgcacgc

SEQ ID NO: 29428 - RNA, 17 nt, Artificial Sequence
  Synthetic oligonucleotide: FAS-841
gcugccucuucucccgc

SEQ ID NO: 29429 - RNA, 17 nt, Artificial Sequence
  Synthetic oligonucleotide: FAS-812
ccucccuacccgcgcgc

SEQ ID NO: 29430 - RNA, 17 nt, Artificial Sequence
  Synthetic oligonucleotide: FAS-913
ugggaaggaagccucgc

SEQ ID NO: 29431 - RNA, 17 nt, Artificial Sequence
  Synthetic oligonucleotide: FAS-800
ggcuccuguacccaggc

SEQ ID NO: 29432 - RNA, 17 nt, Artificial Sequence
  Synthetic oligonucleotide: FAS-806
uagaaagggcaggaggc

SEQ ID NO: 29433 - RNA, 17 nt, Artificial Sequence
  Synthetic oligonucleotide: FAS-804
aagccuuuagaaagggc

SEQ ID NO: 29434 - RNA, 17 nt, Artificial Sequence
  Synthetic oligonucleotide: FAS-902
gccugggcagccagggc

SEQ ID NO: 29435 - RNA, 17 nt, Artificial Sequence
  Synthetic oligonucleotide: FAS-885
uaagccuccacccgggc

SEQ ID NO: 29436 - RNA, 17 nt, Artificial Sequence
  Synthetic oligonucleotide: FAS-833
gcuggagccucaggggc

SEQ ID NO: 29437 - RNA, 17 nt, Artificial Sequence
  Synthetic oligonucleotide: FAS-866
gauaggcaaaguggggc

SEQ ID NO: 29438 - RNA, 17 nt, Artificial Sequence
  Synthetic oligonucleotide: FAS-944
ggcguuccugcaguggc

SEQ ID NO: 29439 - RNA, 17 nt, Artificial Sequence
  Synthetic oligonucleotide: FAS-850
uugcucaacaaccaugc

SEQ ID NO: 29440 - RNA, 17 nt, Artificial Sequence
  Synthetic oligonucleotide: FAS-808
agcaugccagccacugc

SEQ ID NO: 29441 - RNA, 17 nt, Artificial Sequence
  Synthetic oligonucleotide: FAS-870
gggcgcgggacgcgugc

SEQ ID NO: 29442 - RNA, 17 nt, Artificial Sequence
  Synthetic oligonucleotide: FAS-962
gagccuuggcuaauugc

SEQ ID NO: 29443 - RNA, 17 nt, Artificial Sequence
  Synthetic oligonucleotide: FAS-964
cucagagaaagacuugc

SEQ ID NO: 29444 - RNA, 17 nt, Artificial Sequence
  Synthetic oligonucleotide: FAS-6
caaccaugcugggcauc

SEQ ID NO: 29445 - RNA, 17 nt, Artificial Sequence
  Synthetic oligonucleotide: FAS-7
cuggacccuccuaccuc

SEQ ID NO: 29446 - RNA, 17 nt, Artificial Sequence
  Synthetic oligonucleotide: FAS-829
gacuuggcuggagccuc

SEQ ID NO: 29447 - RNA, 17 nt, Artificial Sequence
  Synthetic oligonucleotide: FAS-903
cagccagggcuggccuc

SEQ ID NO: 29448 - RNA, 17 nt, Artificial Sequence
  Synthetic oligonucleotide: FAS-932
agggagggggagaaguc

SEQ ID NO: 29449 - RNA, 17 nt, Artificial Sequence
  Synthetic oligonucleotide: FAS-936
agggugaggaaggaguc

SEQ ID NO: 29450 - RNA, 17 nt, Artificial Sequence
  Synthetic oligonucleotide: FAS-908
gaaaagccccggugguc

SEQ ID NO: 29451 - RNA, 17 nt, Artificial Sequence
  Synthetic oligonucleotide: FAS-945
gcuggcaugcucacuuc

SEQ ID NO: 29452 - RNA, 17 nt, Artificial Sequence
  Synthetic oligonucleotide: FAS-821
guguucaaagacgcuuc

SEQ ID NO: 29453 - RNA, 17 nt, Artificial Sequence
  Synthetic oligonucleotide: FAS-970
aggcucacagacguuuc

SEQ ID NO: 29454 - RNA, 17 nt, Artificial Sequence
  Synthetic oligonucleotide: FAS-862
cccggggauaggcaaag

SEQ ID NO: 29455 - RNA, 17 nt, Artificial Sequence
  Synthetic oligonucleotide: FAS-978
aguuuuuauuucucaag

SEQ ID NO: 29456 - RNA, 17 nt, Artificial Sequence
  Synthetic oligonucleotide: FAS-897
ccaacccgcgggagaag

SEQ ID NO: 29457 - RNA, 17 nt, Artificial Sequence
  Synthetic oligonucleotide: FAS-826
cuggggagugagggaag

SEQ ID NO: 29458 - RNA, 17 nt, Artificial Sequence
  Synthetic oligonucleotide: FAS-794
gagaaauaaaaacuaag

SEQ ID NO: 29459 - RNA, 17 nt, Artificial Sequence
  Synthetic oligonucleotide: FAS-888
aggagagggcucaccag

SEQ ID NO: 29460 - RNA, 17 nt, Artificial Sequence
  Synthetic oligonucleotide: FAS-957
uggagcucagagcgcag

SEQ ID NO: 29461 - RNA, 17 nt, Artificial Sequence
  Synthetic oligonucleotide: FAS-873
cgggauugcggcggcag

SEQ ID NO: 29462 - RNA, 17 nt, Artificial Sequence
  Synthetic oligonucleotide: FAS-943
ccggggcguuccugcag

SEQ ID NO: 29463 - RNA, 17 nt, Artificial Sequence
  Synthetic oligonucleotide: FAS-831
cuuggcuggagccucag

SEQ ID NO: 29464 - RNA, 17 nt, Artificial Sequence
  Synthetic oligonucleotide: FAS-886
cuccacccgggcaggag

SEQ ID NO: 29465 - RNA, 17 nt, Artificial Sequence
  Synthetic oligonucleotide: FAS-969
uguggcugcaacaugag

SEQ ID NO: 29466 - RNA, 17 nt, Artificial Sequence
  Synthetic oligonucleotide: FAS-874
ggcggcagcggcgcacg

SEQ ID NO: 29467 - RNA, 17 nt, Artificial Sequence
  Synthetic oligonucleotide: FAS-819
cauccuccugaccaccg

SEQ ID NO: 29468 - RNA, 17 nt, Artificial Sequence
  Synthetic oligonucleotide: FAS-840
agcugccucuucucccg

SEQ ID NO: 29469 - RNA, 17 nt, Artificial Sequence
  Synthetic oligonucleotide: FAS-942
ugggcauuccugucccg

SEQ ID NO: 29470 - RNA, 17 nt, Artificial Sequence
  Synthetic oligonucleotide: FAS-816
ccgggcguuccccagcg

SEQ ID NO: 29471 - RNA, 17 nt, Artificial Sequence
  Synthetic oligonucleotide: FAS-867
gcaaaguggggcgggcg

SEQ ID NO: 29472 - RNA, 17 nt, Artificial Sequence
  Synthetic oligonucleotide: FAS-965
ucagagaaagacuugcg

SEQ ID NO: 29473 - RNA, 17 nt, Artificial Sequence
  Synthetic oligonucleotide: FAS-807
caggaggccggcucucg

SEQ ID NO: 29474 - RNA, 17 nt, Artificial Sequence
  Synthetic oligonucleotide: FAS-839
agcccuggcugcccagg

SEQ ID NO: 29475 - RNA, 17 nt, Artificial Sequence
  Synthetic oligonucleotide: FAS-805
ccuuuagaaagggcagg

SEQ ID NO: 29476 - RNA, 17 nt, Artificial Sequence
  Synthetic oligonucleotide: FAS-909
aagccccgguggucagg

SEQ ID NO: 29477 - RNA, 17 nt, Artificial Sequence
  Synthetic oligonucleotide: FAS-931
gcgcgcggguagggagg

SEQ ID NO: 29478 - RNA, 17 nt, Artificial Sequence
  Synthetic oligonucleotide: FAS-8
ggcucaccagagguagg

SEQ ID NO: 29479 - RNA, 17 nt, Artificial Sequence
  Synthetic oligonucleotide: FAS-849
aagcucuuucacuucgg

SEQ ID NO: 29480 - RNA, 17 nt, Artificial Sequence
  Synthetic oligonucleotide: FAS-976
uagggcucugaaaaggg

SEQ ID NO: 29481 - RNA, 17 nt, Artificial Sequence
  Synthetic oligonucleotide: FAS-928
ccugcgcgcggguaggg

SEQ ID NO: 29482 - RNA, 17 nt, Artificial Sequence
  Synthetic oligonucleotide: FAS-856
gcccucuccugcccggg

SEQ ID NO: 29483 - RNA, 17 nt, Artificial Sequence
  Synthetic oligonucleotide: FAS-832
ggcuggagccucagggg

SEQ ID NO: 29484 - RNA, 17 nt, Artificial Sequence
  Synthetic oligonucleotide: FAS-865
ggauaggcaaagugggg

SEQ ID NO: 29485 - RNA, 17 nt, Artificial Sequence
  Synthetic oligonucleotide: FAS-954
aaccugggaaguugggg

SEQ ID NO: 29486 - RNA, 17 nt, Artificial Sequence
  Synthetic oligonucleotide: FAS-921
gaacgcccggguugggg

SEQ ID NO: 29487 - RNA, 17 nt, Artificial Sequence
  Synthetic oligonucleotide: FAS-857
cucuccugcccgggugg

SEQ ID NO: 29488 - RNA, 17 nt, Artificial Sequence
  Synthetic oligonucleotide: FAS-843
cuucucccgcggguugg

SEQ ID NO: 29489 - RNA, 17 nt, Artificial Sequence
  Synthetic oligonucleotide: FAS-836
gcacggaacacacccug

SEQ ID NO: 29490 - RNA, 17 nt, Artificial Sequence
  Synthetic oligonucleotide: FAS-905
gccagugcccgccccug

SEQ ID NO: 29491 - RNA, 17 nt, Artificial Sequence
  Synthetic oligonucleotide: FAS-790
aauguuuaauauagcug

SEQ ID NO: 29492 - RNA, 17 nt, Artificial Sequence
  Synthetic oligonucleotide: FAS-915
ggaaggaagccucgcug

SEQ ID NO: 29493 - RNA, 17 nt, Artificial Sequence
  Synthetic oligonucleotide: FAS-823
guucaaagacgcuucug

SEQ ID NO: 29494 - RNA, 17 nt, Artificial Sequence
  Synthetic oligonucleotide: FAS-864
cggggauaggcaaagug

SEQ ID NO: 29495 - RNA, 17 nt, Artificial Sequence
  Synthetic oligonucleotide: FAS-824
gacgcuucuggggagug

SEQ ID NO: 29496 - RNA, 17 nt, Artificial Sequence
  Synthetic oligonucleotide: FAS-869
cgggcgcgggacgcgug

SEQ ID NO: 29497 - RNA, 17 nt, Artificial Sequence
  Synthetic oligonucleotide: FAS-946
caugcucacuucaggug

SEQ ID NO: 29498 - RNA, 17 nt, Artificial Sequence
  Synthetic oligonucleotide: FAS-934
ggggagaagucagggug

SEQ ID NO: 29499 - RNA, 17 nt, Artificial Sequence
  Synthetic oligonucleotide: FAS-963
acucagagaaagacuug

SEQ ID NO: 29500 - RNA, 17 nt, Artificial Sequence
  Synthetic oligonucleotide: FAS-953
uucaaccugggaaguug

SEQ ID NO: 29501 - RNA, 17 nt, Artificial Sequence
  Synthetic oligonucleotide: FAS-968
cugggcuguccauguug

SEQ ID NO: 29502 - RNA, 17 nt, Artificial Sequence
  Synthetic oligonucleotide: FAS-911
ccgguggucaggaggau

SEQ ID NO: 29503 - RNA, 17 nt, Artificial Sequence
  Synthetic oligonucleotide: FAS-923
ccauugauucagcaacu

SEQ ID NO: 29504 - RNA, 17 nt, Artificial Sequence
  Synthetic oligonucleotide: FAS-950
cugcuguaguucaaccu

SEQ ID NO: 29505 - RNA, 17 nt, Artificial Sequence
  Synthetic oligonucleotide: FAS-961
ccuggguacaggagccu

SEQ ID NO: 29506 - RNA, 17 nt, Artificial Sequence
  Synthetic oligonucleotide: FAS-899
aagaggcagcuccgccu

SEQ ID NO: 29507 - RNA, 17 nt, Artificial Sequence
  Synthetic oligonucleotide: FAS-959
gcgcagagguccugccu

SEQ ID NO: 29508 - RNA, 17 nt, Artificial Sequence
  Synthetic oligonucleotide: FAS-789
gaauguuuaauauagcu

SEQ ID NO: 29509 - RNA, 17 nt, Artificial Sequence
  Synthetic oligonucleotide: FAS-914
gggaaggaagccucgcu

SEQ ID NO: 29510 - RNA, 17 nt, Artificial Sequence
  Synthetic oligonucleotide: FAS-851
ugcucaacaaccaugcu

SEQ ID NO: 29511 - RNA, 17 nt, Artificial Sequence
  Synthetic oligonucleotide: FAS-951
aguucaaccugggaagu

SEQ ID NO: 29512 - RNA, 17 nt, Artificial Sequence
  Synthetic oligonucleotide: FAS-115
gagggcucaccagaggu

SEQ ID NO: 29513 - RNA, 17 nt, Artificial Sequence
  Synthetic oligonucleotide: FAS-918
cuggggaacgcccgggu

SEQ ID NO: 29514 - RNA, 17 nt, Artificial Sequence
  Synthetic oligonucleotide: FAS-842
ccucuucucccgcgggu

SEQ ID NO: 29515 - RNA, 17 nt, Artificial Sequence
  Synthetic oligonucleotide: FAS-848
gggaagcucuuucacuu

SEQ ID NO: 29516 - RNA, 17 nt, Artificial Sequence
  Synthetic oligonucleotide: FAS-952
guucaaccugggaaguu

SEQ ID NO: 29517 - RNA, 17 nt, Artificial Sequence
  Synthetic oligonucleotide: FAS-919
uggggaacgcccggguu

SEQ ID NO: 29518 - RNA, 20 nt, Artificial Sequence
  Synthetic oligonucleotide: FAS-612
acagcagaagccuuuagaaa

SEQ ID NO: 29519 - RNA, 20 nt, Artificial Sequence
  Synthetic oligonucleotide: FAS-622
aggccaaguugcugaaucaa

SEQ ID NO: 29520 - RNA, 20 nt, Artificial Sequence
  Synthetic oligonucleotide: FAS-765
ggggaggucuugaaggagaa

SEQ ID NO: 29521 - RNA, 20 nt, Artificial Sequence
  Synthetic oligonucleotide: FAS-611
uacagcagaagccuuuagaa

SEQ ID NO: 29522 - RNA, 20 nt, Artificial Sequence
  Synthetic oligonucleotide: FAS-780
gcucacagacguuucuggaa

SEQ ID NO: 29523 - RNA, 20 nt, Artificial Sequence
  Synthetic oligonucleotide: FAS-602
ucuugagaaauaaaaacuaa

SEQ ID NO: 29524 - RNA, 20 nt, Artificial Sequence
  Synthetic oligonucleotide: FAS-606
cucauguugcagccacaaca

SEQ ID NO: 29525 - RNA, 20 nt, Artificial Sequence
  Synthetic oligonucleotide: FAS-710
cagcuccgccugggcagcca

SEQ ID NO: 29526 - RNA, 20 nt, Artificial Sequence
  Synthetic oligonucleotide: FAS-5
gaggguccagaugcccagca

SEQ ID NO: 29527 - RNA, 20 nt, Artificial Sequence
  Synthetic oligonucleotide: FAS-644
cucaggggcgggcacuggca

SEQ ID NO: 29528 - RNA, 20 nt, Artificial Sequence
  Synthetic oligonucleotide: FAS-639
gugacuuggcuggagccuca

SEQ ID NO: 29529 - RNA, 20 nt, Artificial Sequence
  Synthetic oligonucleotide: FAS-713
ggcagccagggcuggccuca

SEQ ID NO: 29530 - RNA, 20 nt, Artificial Sequence
  Synthetic oligonucleotide: FAS-742
guagggagggggagaaguca

SEQ ID NO: 29531 - RNA, 20 nt, Artificial Sequence
  Synthetic oligonucleotide: FAS-746
ucagggugaggaaggaguca

SEQ ID NO: 29532 - RNA, 20 nt, Artificial Sequence
  Synthetic oligonucleotide: FAS-696
gccuccacccgggcaggaga

SEQ ID NO: 29533 - RNA, 20 nt, Artificial Sequence
  Synthetic oligonucleotide: FAS-719
agccccgguggucaggagga

SEQ ID NO: 29534 - RNA, 20 nt, Artificial Sequence
  Synthetic oligonucleotide: FAS-744
gggagaagucagggugagga

SEQ ID NO: 29535 - RNA, 20 nt, Artificial Sequence
  Synthetic oligonucleotide: FAS-4
agggcucaccagagguagga

SEQ ID NO: 29536 - RNA, 20 nt, Artificial Sequence
  Synthetic oligonucleotide: FAS-738
ggccugcgcgcggguaggga

SEQ ID NO: 29537 - RNA, 20 nt, Artificial Sequence
  Synthetic oligonucleotide: FAS-731
gggaacgcccggguugggga

SEQ ID NO: 29538 - RNA, 20 nt, Artificial Sequence
  Synthetic oligonucleotide: FAS-721
cgguggucaggaggauggga

SEQ ID NO: 29539 - RNA, 20 nt, Artificial Sequence
  Synthetic oligonucleotide: FAS-764
ggaaguuggggaggucuuga

SEQ ID NO: 29540 - RNA, 20 nt, Artificial Sequence
  Synthetic oligonucleotide: FAS-782
aguacagauguugcgccaua

SEQ ID NO: 29541 - RNA, 20 nt, Artificial Sequence
  Synthetic oligonucleotide: FAS-605
aacaucuguacuuuuucaua

SEQ ID NO: 29542 - RNA, 20 nt, Artificial Sequence
  Synthetic oligonucleotide: FAS-601
cucuugagaaauaaaaacua

SEQ ID NO: 29543 - RNA, 20 nt, Artificial Sequence
  Synthetic oligonucleotide: FAS-604
ccucccuuuucagagcccua

SEQ ID NO: 29544 - RNA, 20 nt, Artificial Sequence
  Synthetic oligonucleotide: FAS-626
cuucccauccuccugaccac

SEQ ID NO: 29545 - RNA, 20 nt, Artificial Sequence
  Synthetic oligonucleotide: FAS-643
ggagccucaggggcgggcac

SEQ ID NO: 29546 - RNA, 20 nt, Artificial Sequence
  Synthetic oligonucleotide: FAS-623
caauggagcccuccccaacc

SEQ ID NO: 29547 - RNA, 20 nt, Artificial Sequence
  Synthetic oligonucleotide: FAS-627
uucccauccuccugaccacc

SEQ ID NO: 29548 - RNA, 20 nt, Artificial Sequence
  Synthetic oligonucleotide: FAS-685
cagcggcgcacgcgggcacc

SEQ ID NO: 29549 - RNA, 20 nt, Artificial Sequence
  Synthetic oligonucleotide: FAS-624
aauggagcccuccccaaccc

SEQ ID NO: 29550 - RNA, 20 nt, Artificial Sequence
  Synthetic oligonucleotide: FAS-608
uagccaaggcuccuguaccc

SEQ ID NO: 29551 - RNA, 20 nt, Artificial Sequence
  Synthetic oligonucleotide: FAS-688
gccccacuuugccuaucccc

SEQ ID NO: 29552 - RNA, 20 nt, Artificial Sequence
  Synthetic oligonucleotide: FAS-646
acacacccugaggccagccc

SEQ ID NO: 29553 - RNA, 20 nt, Artificial Sequence
  Synthetic oligonucleotide: FAS-618
cagccacugcaggaacgccc

SEQ ID NO: 29554 - RNA, 20 nt, Artificial Sequence
  Synthetic oligonucleotide: FAS-726
agccucgcuggggaacgccc

SEQ ID NO: 29555 - RNA, 20 nt, Artificial Sequence
  Synthetic oligonucleotide: FAS-664
uggugagcccucuccugccc

SEQ ID NO: 29556 - RNA, 20 nt, Artificial Sequence
  Synthetic oligonucleotide: FAS-647
gaggccagcccuggcugccc

SEQ ID NO: 29557 - RNA, 20 nt, Artificial Sequence
  Synthetic oligonucleotide: FAS-750
caaaugggcauuccuguccc

SEQ ID NO: 29558 - RNA, 20 nt, Artificial Sequence
  Synthetic oligonucleotide: FAS-610
caagaccuccccaacuuccc

SEQ ID NO: 29559 - RNA, 20 nt, Artificial Sequence
  Synthetic oligonucleotide: FAS-709
gcagcuccgccugggcagcc

SEQ ID NO: 29560 - RNA, 20 nt, Artificial Sequence
  Synthetic oligonucleotide: FAS-725
aagccucgcuggggaacgcc

SEQ ID NO: 29561 - RNA, 20 nt, Artificial Sequence
  Synthetic oligonucleotide: FAS-707
ggagaagaggcagcuccgcc

SEQ ID NO: 29562 - RNA, 20 nt, Artificial Sequence
  Synthetic oligonucleotide: FAS-663
cuggugagcccucuccugcc

SEQ ID NO: 29563 - RNA, 20 nt, Artificial Sequence
  Synthetic oligonucleotide: FAS-767
cagagcgcagagguccugcc

SEQ ID NO: 29564 - RNA, 20 nt, Artificial Sequence
  Synthetic oligonucleotide: FAS-749
acaaaugggcauuccugucc

SEQ ID NO: 29565 - RNA, 20 nt, Artificial Sequence
  Synthetic oligonucleotide: FAS-756
caggugaggaccucgagagc

SEQ ID NO: 29566 - RNA, 20 nt, Artificial Sequence
  Synthetic oligonucleotide: FAS-597
uugugaauguuuaauauagc

SEQ ID NO: 29567 - RNA, 20 nt, Artificial Sequence
  Synthetic oligonucleotide: FAS-684
gcggcggcagcggcgcacgc

SEQ ID NO: 29568 - RNA, 20 nt, Artificial Sequence
  Synthetic oligonucleotide: FAS-650
ggagcugccucuucucccgc

SEQ ID NO: 29569 - RNA, 20 nt, Artificial Sequence
  Synthetic oligonucleotide: FAS-621
cccccucccuacccgcgcgc

SEQ ID NO: 29570 - RNA, 20 nt, Artificial Sequence
  Synthetic oligonucleotide: FAS-734
cagcaacuuggccugcgcgc

SEQ ID NO: 29571 - RNA, 20 nt, Artificial Sequence
  Synthetic oligonucleotide: FAS-677
aggcaaaguggggcgggcgc

SEQ ID NO: 29572 - RNA, 20 nt, Artificial Sequence
  Synthetic oligonucleotide: FAS-722
ggaugggaaggaagccucgc

SEQ ID NO: 29573 - RNA, 20 nt, Artificial Sequence
  Synthetic oligonucleotide: FAS-609
caaggcuccuguacccaggc

SEQ ID NO: 29574 - RNA, 20 nt, Artificial Sequence
  Synthetic oligonucleotide: FAS-615
cuuuagaaagggcaggaggc

SEQ ID NO: 29575 - RNA, 20 nt, Artificial Sequence
  Synthetic oligonucleotide: FAS-613
cagaagccuuuagaaagggc

SEQ ID NO: 29576 - RNA, 20 nt, Artificial Sequence
  Synthetic oligonucleotide: FAS-711
uccgccugggcagccagggc

SEQ ID NO: 29577 - RNA, 20 nt, Artificial Sequence
  Synthetic oligonucleotide: FAS-694
ggguaagccuccacccgggc

SEQ ID NO: 29578 - RNA, 20 nt, Artificial Sequence
  Synthetic oligonucleotide: FAS-642
uuggcuggagccucaggggc

SEQ ID NO: 29579 - RNA, 20 nt, Artificial Sequence
  Synthetic oligonucleotide: FAS-675
ggggauaggcaaaguggggc

SEQ ID NO: 29580 - RNA, 20 nt, Artificial Sequence
  Synthetic oligonucleotide: FAS-753
cggggcguuccugcaguggc

SEQ ID NO: 29581 - RNA, 20 nt, Artificial Sequence
  Synthetic oligonucleotide: FAS-617
gugagcaugccagccacugc

SEQ ID NO: 29582 - RNA, 20 nt, Artificial Sequence
  Synthetic oligonucleotide: FAS-679
ggcgggcgcgggacgcgugc

SEQ ID NO: 29583 - RNA, 20 nt, Artificial Sequence
  Synthetic oligonucleotide: FAS-771
caggagccuuggcuaauugc

SEQ ID NO: 29584 - RNA, 20 nt, Artificial Sequence
  Synthetic oligonucleotide: FAS-773
ucacucagagaaagacuugc

SEQ ID NO: 29585 - RNA, 20 nt, Artificial Sequence
  Synthetic oligonucleotide: FAS-1
caacaaccaugcugggcauc

SEQ ID NO: 29586 - RNA, 20 nt, Artificial Sequence
  Synthetic oligonucleotide: FAS-2
caucuggacccuccuaccuc

SEQ ID NO: 29587 - RNA, 20 nt, Artificial Sequence
  Synthetic oligonucleotide: FAS-638
agugacuuggcuggagccuc

SEQ ID NO: 29588 - RNA, 20 nt, Artificial Sequence
  Synthetic oligonucleotide: FAS-712
gggcagccagggcuggccuc

SEQ ID NO: 29589 - RNA, 20 nt, Artificial Sequence
  Synthetic oligonucleotide: FAS-741
gguagggagggggagaaguc

SEQ ID NO: 29590 - RNA, 20 nt, Artificial Sequence
  Synthetic oligonucleotide: FAS-745
gucagggugaggaaggaguc

SEQ ID NO: 29591 - RNA, 20 nt, Artificial Sequence
  Synthetic oligonucleotide: FAS-787
cuuaguuuuuauuucucaag

SEQ ID NO: 29592 - RNA, 20 nt, Artificial Sequence
  Synthetic oligonucleotide: FAS-706
ccaccaacccgcgggagaag

SEQ ID NO: 29593 - RNA, 20 nt, Artificial Sequence
  Synthetic oligonucleotide: FAS-635
cuucuggggagugagggaag

SEQ ID NO: 29594 - RNA, 20 nt, Artificial Sequence
  Synthetic oligonucleotide: FAS-603
cuugagaaauaaaaacuaag

SEQ ID NO: 29595 - RNA, 20 nt, Artificial Sequence
  Synthetic oligonucleotide: FAS-697
ggcaggagagggcucaccag

SEQ ID NO: 29596 - RNA, 20 nt, Artificial Sequence
  Synthetic oligonucleotide: FAS-682
gugcgggauugcggcggcag

SEQ ID NO: 29597 - RNA, 20 nt, Artificial Sequence
  Synthetic oligonucleotide: FAS-752
gucccggggcguuccugcag

SEQ ID NO: 29598 - RNA, 20 nt, Artificial Sequence
  Synthetic oligonucleotide: FAS-640
ugacuuggcuggagccucag

SEQ ID NO: 29599 - RNA, 20 nt, Artificial Sequence
  Synthetic oligonucleotide: FAS-695
agccuccacccgggcaggag

SEQ ID NO: 29600 - RNA, 20 nt, Artificial Sequence
  Synthetic oligonucleotide: FAS-739
gccugcgcgcggguagggag

SEQ ID NO: 29601 - RNA, 20 nt, Artificial Sequence
  Synthetic oligonucleotide: FAS-778
uguuguggcugcaacaugag

SEQ ID NO: 29602 - RNA, 20 nt, Artificial Sequence
  Synthetic oligonucleotide: FAS-702
uuccccaacuccguacugag

SEQ ID NO: 29603 - RNA, 20 nt, Artificial Sequence
  Synthetic oligonucleotide: FAS-683
ugcggcggcagcggcgcacg

SEQ ID NO: 29604 - RNA, 20 nt, Artificial Sequence
  Synthetic oligonucleotide: FAS-628
ucccauccuccugaccaccg

SEQ ID NO: 29605 - RNA, 20 nt, Artificial Sequence
  Synthetic oligonucleotide: FAS-649
cggagcugccucuucucccg

SEQ ID NO: 29606 - RNA, 20 nt, Artificial Sequence
  Synthetic oligonucleotide: FAS-751
aaaugggcauuccugucccg

SEQ ID NO: 29607 - RNA, 20 nt, Artificial Sequence
  Synthetic oligonucleotide: FAS-676
uaggcaaaguggggcgggcg

SEQ ID NO: 29608 - RNA, 20 nt, Artificial Sequence
  Synthetic oligonucleotide: FAS-774
cacucagagaaagacuugcg

SEQ ID NO: 29609 - RNA, 20 nt, Artificial Sequence
  Synthetic oligonucleotide: FAS-616
gggcaggaggccggcucucg

SEQ ID NO: 29610 - RNA, 20 nt, Artificial Sequence
  Synthetic oligonucleotide: FAS-648
gccagcccuggcugcccagg

SEQ ID NO: 29611 - RNA, 20 nt, Artificial Sequence
  Synthetic oligonucleotide: FAS-614
aagccuuuagaaagggcagg

SEQ ID NO: 29612 - RNA, 20 nt, Artificial Sequence
  Synthetic oligonucleotide: FAS-740
ccugcgcgcggguagggagg

SEQ ID NO: 29613 - RNA, 20 nt, Artificial Sequence
  Synthetic oligonucleotide: FAS-3
gagggcucaccagagguagg

SEQ ID NO: 29614 - RNA, 20 nt, Artificial Sequence
  Synthetic oligonucleotide: FAS-658
gggaagcucuuucacuucgg

SEQ ID NO: 29615 - RNA, 20 nt, Artificial Sequence
  Synthetic oligonucleotide: FAS-785
ccauagggcucugaaaaggg

SEQ ID NO: 29616 - RNA, 20 nt, Artificial Sequence
  Synthetic oligonucleotide: FAS-737
uggccugcgcgcggguaggg

SEQ ID NO: 29617 - RNA, 20 nt, Artificial Sequence
  Synthetic oligonucleotide: FAS-641
cuuggcuggagccucagggg

SEQ ID NO: 29618 - RNA, 20 nt, Artificial Sequence
  Synthetic oligonucleotide: FAS-674
cggggauaggcaaagugggg

SEQ ID NO: 29619 - RNA, 20 nt, Artificial Sequence
  Synthetic oligonucleotide: FAS-763
uucaaccugggaaguugggg

SEQ ID NO: 29620 - RNA, 20 nt, Artificial Sequence
  Synthetic oligonucleotide: FAS-730
ggggaacgcccggguugggg

SEQ ID NO: 29621 - RNA, 20 nt, Artificial Sequence
  Synthetic oligonucleotide: FAS-666
gcccucuccugcccgggugg

SEQ ID NO: 29622 - RNA, 20 nt, Artificial Sequence
  Synthetic oligonucleotide: FAS-652
ccucuucucccgcggguugg

SEQ ID NO: 29623 - RNA, 20 nt, Artificial Sequence
  Synthetic oligonucleotide: FAS-645
cuggcacggaacacacccug

SEQ ID NO: 29624 - RNA, 20 nt, Artificial Sequence
  Synthetic oligonucleotide: FAS-714
cgugccagugcccgccccug

SEQ ID NO: 29625 - RNA, 20 nt, Artificial Sequence
  Synthetic oligonucleotide: FAS-599
gugaauguuuaauauagcug

SEQ ID NO: 29626 - RNA, 20 nt, Artificial Sequence
  Synthetic oligonucleotide: FAS-724
augggaaggaagccucgcug

SEQ ID NO: 29627 - RNA, 20 nt, Artificial Sequence
  Synthetic oligonucleotide: FAS-632
gguguucaaagacgcuucug

SEQ ID NO: 29628 - RNA, 20 nt, Artificial Sequence
  Synthetic oligonucleotide: FAS-673
ucccggggauaggcaaagug

SEQ ID NO: 29629 - RNA, 20 nt, Artificial Sequence
  Synthetic oligonucleotide: FAS-678
gggcgggcgcgggacgcgug

SEQ ID NO: 29630 - RNA, 20 nt, Artificial Sequence
  Synthetic oligonucleotide: FAS-755
uggcaugcucacuucaggug

SEQ ID NO: 29631 - RNA, 20 nt, Artificial Sequence
  Synthetic oligonucleotide: FAS-743
gagggggagaagucagggug

SEQ ID NO: 29632 - RNA, 20 nt, Artificial Sequence
  Synthetic oligonucleotide: FAS-772
gucacucagagaaagacuug

SEQ ID NO: 29633 - RNA, 20 nt, Artificial Sequence
  Synthetic oligonucleotide: FAS-762
uaguucaaccugggaaguug

SEQ ID NO: 29634 - RNA, 20 nt, Artificial Sequence
  Synthetic oligonucleotide: FAS-729
gcuggggaacgcccggguug

SEQ ID NO: 29635 - RNA, 20 nt, Artificial Sequence
  Synthetic oligonucleotide: FAS-777
ugacugggcuguccauguug

SEQ ID NO: 29636 - RNA, 20 nt, Artificial Sequence
  Synthetic oligonucleotide: FAS-776
gacuugcggggcauuugacu

SEQ ID NO: 29637 - RNA, 20 nt, Artificial Sequence
  Synthetic oligonucleotide: FAS-759
cuucugcuguaguucaaccu

SEQ ID NO: 29638 - RNA, 20 nt, Artificial Sequence
  Synthetic oligonucleotide: FAS-770
cugccuggguacaggagccu

SEQ ID NO: 29639 - RNA, 20 nt, Artificial Sequence
  Synthetic oligonucleotide: FAS-768
agagcgcagagguccugccu

SEQ ID NO: 29640 - RNA, 20 nt, Artificial Sequence
  Synthetic oligonucleotide: FAS-598
ugugaauguuuaauauagcu

SEQ ID NO: 29641 - RNA, 20 nt, Artificial Sequence
  Synthetic oligonucleotide: FAS-660
gauugcucaacaaccaugcu

SEQ ID NO: 29642 - RNA, 20 nt, Artificial Sequence
  Synthetic oligonucleotide: FAS-631
agguguucaaagacgcuucu

SEQ ID NO: 29643 - RNA, 20 nt, Artificial Sequence
  Synthetic oligonucleotide: FAS-760
uguaguucaaccugggaagu

SEQ ID NO: 29644 - RNA, 20 nt, Artificial Sequence
  Synthetic oligonucleotide: FAS-105
ggagagggcucaccagaggu

SEQ ID NO: 29645 - RNA, 20 nt, Artificial Sequence
  Synthetic oligonucleotide: FAS-651
cugccucuucucccgcgggu

SEQ ID NO: 29646 - RNA, 20 nt, Artificial Sequence
  Synthetic oligonucleotide: FAS-657
uuggggaagcucuuucacuu

SEQ ID NO: 29647 - RNA, 20 nt, Artificial Sequence
  Synthetic oligonucleotide: FAS-761
guaguucaaccugggaaguu

SEQ ID NO: 29648 - RNA, 20 nt, Artificial Sequence
  Synthetic oligonucleotide: FAS-728
cgcuggggaacgcccggguu

SEQ ID NO: 29649 - RNA, 17 nt, Artificial Sequence
  Synthetic oligonucleotide: FAS-1829
acagugggcuaagcaaa

SEQ ID NO: 29650 - RNA, 17 nt, Artificial Sequence
  Synthetic oligonucleotide: FAS-2086
cuuuuucgagaaagaaa

SEQ ID NO: 29651 - RNA, 17 nt, Artificial Sequence
  Synthetic oligonucleotide: FAS-2023
cugacaagccaagccaa

SEQ ID NO: 29652 - RNA, 17 nt, Artificial Sequence
  Synthetic oligonucleotide: FAS-1840
uugguggacgaugccaa

SEQ ID NO: 29653 - RNA, 17 nt, Artificial Sequence
  Synthetic oligonucleotide: FAS-1828
aacagugggcuaagcaa

SEQ ID NO: 29654 - RNA, 17 nt, Artificial Sequence
  Synthetic oligonucleotide: FAS-2043
cggagggcucggaagaa

SEQ ID NO: 29655 - RNA, 17 nt, Artificial Sequence
  Synthetic oligonucleotide: FAS-1835
uugaaucuaauugggaa

SEQ ID NO: 29656 - RNA, 17 nt, Artificial Sequence
  Synthetic oligonucleotide: FAS-1871
ucacuauugcuuuggaa

SEQ ID NO: 29657 - RNA, 17 nt, Artificial Sequence
  Synthetic oligonucleotide: FAS-1877
cagacuggacacacuaa

SEQ ID NO: 29658 - RNA, 17 nt, Artificial Sequence
  Synthetic oligonucleotide: FAS-1830
uauuaauguguuauuaa

SEQ ID NO: 29659 - RNA, 17 nt, Artificial Sequence
  Synthetic oligonucleotide: FAS-1816
gacagaugcaaaacaca

SEQ ID NO: 29660 - RNA, 17 nt, Artificial Sequence
  Synthetic oligonucleotide: FAS-2112
gucagcacuucgcauca

SEQ ID NO: 29661 - RNA, 17 nt, Artificial Sequence
  Synthetic oligonucleotide: FAS-2100
uuuggcuuggcuuguca

SEQ ID NO: 29662 - RNA, 17 nt, Artificial Sequence
  Synthetic oligonucleotide: FAS-1873
agcaugaauuuuacaga

SEQ ID NO: 29663 - RNA, 17 nt, Artificial Sequence
  Synthetic oligonucleotide: FAS-1820
auggaaagcccucagga

SEQ ID NO: 29664 - RNA, 17 nt, Artificial Sequence
  Synthetic oligonucleotide: FAS-2041
gcagugguuaagccgga

SEQ ID NO: 29665 - RNA, 17 nt, Artificial Sequence
  Synthetic oligonucleotide: FAS-2117
cacccgggccugaggga

SEQ ID NO: 29666 - RNA, 17 nt, Artificial Sequence
  Synthetic oligonucleotide: FAS-1834
guugaaucuaauuggga

SEQ ID NO: 29667 - RNA, 17 nt, Artificial Sequence
  Synthetic oligonucleotide: FAS-2015
gcuuuagggucgcugga

SEQ ID NO: 29668 - RNA, 17 nt, Artificial Sequence
  Synthetic oligonucleotide: FAS-1825
acugagaggaagccuga

SEQ ID NO: 29669 - RNA, 17 nt, Artificial Sequence
  Synthetic oligonucleotide: FAS-2116
ugagcacccgggccuga

SEQ ID NO: 29670 - RNA, 17 nt, Artificial Sequence
  Synthetic oligonucleotide: FAS-1886
uuagguuacccuccuga

SEQ ID NO: 29671 - RNA, 17 nt, Artificial Sequence
  Synthetic oligonucleotide: FAS-2089
agcaauaucuguucuga

SEQ ID NO: 29672 - RNA, 17 nt, Artificial Sequence
  Synthetic oligonucleotide: FAS-1817
ugcaaaacacaggguga

SEQ ID NO: 29673 - RNA, 17 nt, Artificial Sequence
  Synthetic oligonucleotide: FAS-1822
accuaaccuagauuuga

SEQ ID NO: 29674 - RNA, 17 nt, Artificial Sequence
  Synthetic oligonucleotide: FAS-2044
uucucgaaaaaguuaua

SEQ ID NO: 29675 - RNA, 17 nt, Artificial Sequence
  Synthetic oligonucleotide: FAS-2012
aagucugggaagcuuua

SEQ ID NO: 29676 - RNA, 17 nt, Artificial Sequence
  Synthetic oligonucleotide: FAS-1823
gauuugagggcccaaac

SEQ ID NO: 29677 - RNA, 17 nt, Artificial Sequence
  Synthetic oligonucleotide: FAS-2102
ccgcuccucucuccaac

SEQ ID NO: 29678 - RNA, 17 nt, Artificial Sequence
  Synthetic oligonucleotide: FAS-1815
ugacagaugcaaaacac

SEQ ID NO: 29679 - RNA, 17 nt, Artificial Sequence
  Synthetic oligonucleotide: FAS-1813
aucaacaccuacaagac

SEQ ID NO: 29680 - RNA, 17 nt, Artificial Sequence
  Synthetic oligonucleotide: FAS-1876
uggaugcaguuccagac

SEQ ID NO: 29681 - RNA, 17 nt, Artificial Sequence
  Synthetic oligonucleotide: FAS-1979
cgggaggcguuggagac

SEQ ID NO: 29682 - RNA, 17 nt, Artificial Sequence
  Synthetic oligonucleotide: FAS-2007
gggcguggggugcggac

SEQ ID NO: 29683 - RNA, 17 nt, Artificial Sequence
  Synthetic oligonucleotide: FAS-2103
cgcuccucucuccaacc

SEQ ID NO: 29684 - RNA, 17 nt, Artificial Sequence
  Synthetic oligonucleotide: FAS-2113
ccagcguucugagcacc

SEQ ID NO: 29685 - RNA, 17 nt, Artificial Sequence
  Synthetic oligonucleotide: FAS-2114
cagcguucugagcaccc

SEQ ID NO: 29686 - RNA, 17 nt, Artificial Sequence
  Synthetic oligonucleotide: FAS-2018
ucgcuggagggggaccc

SEQ ID NO: 29687 - RNA, 17 nt, Artificial Sequence
  Synthetic oligonucleotide: FAS-2119
agguccuaacagccccc

SEQ ID NO: 29688 - RNA, 17 nt, Artificial Sequence
  Synthetic oligonucleotide: FAS-2118
aagguccuaacagcccc

SEQ ID NO: 29689 - RNA, 17 nt, Artificial Sequence
  Synthetic oligonucleotide: FAS-1987
gaccuucccucaggccc

SEQ ID NO: 29690 - RNA, 17 nt, Artificial Sequence
  Synthetic oligonucleotide: FAS-1981
guuggagacuggcuccc

SEQ ID NO: 29691 - RNA, 17 nt, Artificial Sequence
  Synthetic oligonucleotide: FAS-1986
ggaccuucccucaggcc

SEQ ID NO: 29692 - RNA, 17 nt, Artificial Sequence
  Synthetic oligonucleotide: FAS-1844
uuuaaagaaaauuggcc

SEQ ID NO: 29693 - RNA, 17 nt, Artificial Sequence
  Synthetic oligonucleotide: FAS-2022
gagaggagcggaacucc

SEQ ID NO: 29694 - RNA, 17 nt, Artificial Sequence
  Synthetic oligonucleotide: FAS-1980
cguuggagacuggcucc

SEQ ID NO: 29695 - RNA, 17 nt, Artificial Sequence
  Synthetic oligonucleotide: FAS-2101
cuugucagggcuugucc

SEQ ID NO: 29696 - RNA, 17 nt, Artificial Sequence
  Synthetic oligonucleotide: FAS-2039
cgaagcagugguuaagc

SEQ ID NO: 29697 - RNA, 17 nt, Artificial Sequence
  Synthetic oligonucleotide: FAS-2110
ugccccgccugcccagc

SEQ ID NO: 29698 - RNA, 17 nt, Artificial Sequence
  Synthetic oligonucleotide: FAS-1988
ccgggugcucagaacgc

SEQ ID NO: 29699 - RNA, 17 nt, Artificial Sequence
  Synthetic oligonucleotide: FAS-1992
cgaagugcugaccccgc

SEQ ID NO: 29700 - RNA, 17 nt, Artificial Sequence
  Synthetic oligonucleotide: FAS-2092
ucucuccccgcccccgc

SEQ ID NO: 29701 - RNA, 17 nt, Artificial Sequence
  Synthetic oligonucleotide: FAS-2030
agugcgcgccgccccgc

SEQ ID NO: 29702 - RNA, 17 nt, Artificial Sequence
  Synthetic oligonucleotide: FAS-2108
uggucuccgaggagcgc

SEQ ID NO: 29703 - RNA, 17 nt, Artificial Sequence
  Synthetic oligonucleotide: FAS-2095
cacucacccacccgcgc

SEQ ID NO: 29704 - RNA, 17 nt, Artificial Sequence
  Synthetic oligonucleotide: FAS-2026
aagguccgcuccggcgc

SEQ ID NO: 29705 - RNA, 17 nt, Artificial Sequence
  Synthetic oligonucleotide: FAS-2013
ggaagcuuuagggucgc

SEQ ID NO: 29706 - RNA, 17 nt, Artificial Sequence
  Synthetic oligonucleotide: FAS-1996
gaccccgcugggcaggc

SEQ ID NO: 29707 - RNA, 17 nt, Artificial Sequence
  Synthetic oligonucleotide: FAS-2034
cgccgccccgcgggggc

SEQ ID NO: 29708 - RNA, 17 nt, Artificial Sequence
  Synthetic oligonucleotide: FAS-1994
ugcugaccccgcugggc

SEQ ID NO: 29709 - RNA, 17 nt, Artificial Sequence
  Synthetic oligonucleotide: FAS-2090
ucuguucugaaggcugc

SEQ ID NO: 29710 - RNA, 17 nt, Artificial Sequence
  Synthetic oligonucleotide: FAS-1818
ggugauggaaagcccuc

SEQ ID NO: 29711 - RNA, 17 nt, Artificial Sequence
  Synthetic oligonucleotide: FAS-2087
cguucuuccgagcccuc

SEQ ID NO: 29712 - RNA, 17 nt, Artificial Sequence
  Synthetic oligonucleotide: FAS-1985
uguuaggaccuucccuc

SEQ ID NO: 29713 - RNA, 17 nt, Artificial Sequence
  Synthetic oligonucleotide: FAS-1998
ggcaggcggggcagcuc

SEQ ID NO: 29714 - RNA, 17 nt, Artificial Sequence
  Synthetic oligonucleotide: FAS-2024
aagccaaagguccgcuc

SEQ ID NO: 29715 - RNA, 17 nt, Artificial Sequence
  Synthetic oligonucleotide: FAS-1869
guaauucuuucgugcuc

SEQ ID NO: 29716 - RNA, 17 nt, Artificial Sequence
  Synthetic oligonucleotide: FAS-2009
gaauugaagcggaaguc

SEQ ID NO: 29717 - RNA, 17 nt, Artificial Sequence
  Synthetic oligonucleotide: FAS-1841
cuuuaguguguccaguc

SEQ ID NO: 29718 - RNA, 17 nt, Artificial Sequence
  Synthetic oligonucleotide: FAS-2099
cuuuggcuuggcuuguc

SEQ ID NO: 29719 - RNA, 17 nt, Artificial Sequence
  Synthetic oligonucleotide: FAS-1842
gaacugcauccaaauuc

SEQ ID NO: 29720 - RNA, 17 nt, Artificial Sequence
  Synthetic oligonucleotide: FAS-1879
cccacuguucauccuuc

SEQ ID NO: 29721 - RNA, 17 nt, Artificial Sequence
  Synthetic oligonucleotide: FAS-1880
caguugacauuuucuuc

SEQ ID NO: 29722 - RNA, 17 nt, Artificial Sequence
  Synthetic oligonucleotide: FAS-2036
agauauugcucauuuuc

SEQ ID NO: 29723 - RNA, 17 nt, Artificial Sequence
  Synthetic oligonucleotide: FAS-2008
gcggacaggaauugaag

SEQ ID NO: 29724 - RNA, 17 nt, Artificial Sequence
  Synthetic oligonucleotide: FAS-1826
gccugaaggaugaacag

SEQ ID NO: 29725 - RNA, 17 nt, Artificial Sequence
  Synthetic oligonucleotide: FAS-2109
cugccccgccugcccag

SEQ ID NO: 29726 - RNA, 17 nt, Artificial Sequence
  Synthetic oligonucleotide: FAS-2038
agucagcaccgaagcag

SEQ ID NO: 29727 - RNA, 17 nt, Artificial Sequence
  Synthetic oligonucleotide: FAS-2106
cucaacguggagcgcag

SEQ ID NO: 29728 - RNA, 17 nt, Artificial Sequence
  Synthetic oligonucleotide: FAS-1836
uaauugggaagggagag

SEQ ID NO: 29729 - RNA, 17 nt, Artificial Sequence
  Synthetic oligonucleotide: FAS-2020
ggaccccgguuggagag

SEQ ID NO: 29730 - RNA, 17 nt, Artificial Sequence
  Synthetic oligonucleotide: FAS-2021
ccgguuggagagaggag

SEQ ID NO: 29731 - RNA, 17 nt, Artificial Sequence
  Synthetic oligonucleotide: FAS-2096
acccacccgcgccggag

SEQ ID NO: 29732 - RNA, 17 nt, Artificial Sequence
  Synthetic oligonucleotide: FAS-2016
cuuuagggucgcuggag

SEQ ID NO: 29733 - RNA, 17 nt, Artificial Sequence
  Synthetic oligonucleotide: FAS-1824
agaaaaugucaacugag

SEQ ID NO: 29734 - RNA, 17 nt, Artificial Sequence
  Synthetic oligonucleotide: FAS-2105
ccacgcccaccucaacg

SEQ ID NO: 29735 - RNA, 17 nt, Artificial Sequence
  Synthetic oligonucleotide: FAS-2104
gcuccucucuccaaccg

SEQ ID NO: 29736 - RNA, 17 nt, Artificial Sequence
  Synthetic oligonucleotide: FAS-2091
cucucuccccgcccccg

SEQ ID NO: 29737 - RNA, 17 nt, Artificial Sequence
  Synthetic oligonucleotide: FAS-2029
gagugcgcgccgccccg

SEQ ID NO: 29738 - RNA, 17 nt, Artificial Sequence
  Synthetic oligonucleotide: FAS-1982
uuggagacuggcucccg

SEQ ID NO: 29739 - RNA, 17 nt, Artificial Sequence
  Synthetic oligonucleotide: FAS-2107
gagcgcaguggucuccg

SEQ ID NO: 29740 - RNA, 17 nt, Artificial Sequence
  Synthetic oligonucleotide: FAS-2111
gccccgccugcccagcg

SEQ ID NO: 29741 - RNA, 17 nt, Artificial Sequence
  Synthetic oligonucleotide: FAS-2093
cucuccccgcccccgcg

SEQ ID NO: 29742 - RNA, 17 nt, Artificial Sequence
  Synthetic oligonucleotide: FAS-2031
gugcgcgccgccccgcg

SEQ ID NO: 29743 - RNA, 17 nt, Artificial Sequence
  Synthetic oligonucleotide: FAS-1997
accccgcugggcaggcg

SEQ ID NO: 29744 - RNA, 17 nt, Artificial Sequence
  Synthetic oligonucleotide: FAS-2025
aaagguccgcuccggcg

SEQ ID NO: 29745 - RNA, 17 nt, Artificial Sequence
  Synthetic oligonucleotide: FAS-2035
gccgccccgcgggggcg

SEQ ID NO: 29746 - RNA, 17 nt, Artificial Sequence
  Synthetic oligonucleotide: FAS-2003
ccacguugaggugggcg

SEQ ID NO: 29747 - RNA, 17 nt, Artificial Sequence
  Synthetic oligonucleotide: FAS-1995
ugaccccgcugggcagg

SEQ ID NO: 29748 - RNA, 17 nt, Artificial Sequence
  Synthetic oligonucleotide: FAS-1819
gauggaaagcccucagg

SEQ ID NO: 29749 - RNA, 17 nt, Artificial Sequence
  Synthetic oligonucleotide: FAS-2017
uuuagggucgcuggagg

SEQ ID NO: 29750 - RNA, 17 nt, Artificial Sequence
  Synthetic oligonucleotide: FAS-2001
ugcgcuccacguugagg

SEQ ID NO: 29751 - RNA, 17 nt, Artificial Sequence
  Synthetic oligonucleotide: FAS-1983
uggagacuggcucccgg

SEQ ID NO: 29752 - RNA, 17 nt, Artificial Sequence
  Synthetic oligonucleotide: FAS-2040
agcagugguuaagccgg

SEQ ID NO: 29753 - RNA, 17 nt, Artificial Sequence
  Synthetic oligonucleotide: FAS-2032
ugcgcgccgccccgcgg

SEQ ID NO: 29754 - RNA, 17 nt, Artificial Sequence
  Synthetic oligonucleotide: FAS-2027
guccgcuccggcgcggg

SEQ ID NO: 29755 - RNA, 17 nt, Artificial Sequence
  Synthetic oligonucleotide: FAS-2094
uccccgcccccgcgggg

SEQ ID NO: 29756 - RNA, 17 nt, Artificial Sequence
  Synthetic oligonucleotide: FAS-2033
gcgccgccccgcggggg

SEQ ID NO: 29757 - RNA, 17 nt, Artificial Sequence
  Synthetic oligonucleotide: FAS-2047
ucgaaaaaguuauaugg

SEQ ID NO: 29758 - RNA, 17 nt, Artificial Sequence
  Synthetic oligonucleotide: FAS-1814
aacaccuacaagacugg

SEQ ID NO: 29759 - RNA, 17 nt, Artificial Sequence
  Synthetic oligonucleotide: FAS-1989
ggugcucagaacgcugg

SEQ ID NO: 29760 - RNA, 17 nt, Artificial Sequence
  Synthetic oligonucleotide: FAS-2014
agcuuuagggucgcugg

SEQ ID NO: 29761 - RNA, 17 nt, Artificial Sequence
  Synthetic oligonucleotide: FAS-1839
ugaggugcagagcuugg

SEQ ID NO: 29762 - RNA, 17 nt, Artificial Sequence
  Synthetic oligonucleotide: FAS-2046
cucgaaaaaguuauaug

SEQ ID NO: 29763 - RNA, 17 nt, Artificial Sequence
  Synthetic oligonucleotide: FAS-2115
cugagcacccgggccug

SEQ ID NO: 29764 - RNA, 17 nt, Artificial Sequence
  Synthetic oligonucleotide: FAS-1885
guuagguuacccuccug

SEQ ID NO: 29765 - RNA, 17 nt, Artificial Sequence
  Synthetic oligonucleotide: FAS-1837
agagagguugcagagug

SEQ ID NO: 29766 - RNA, 17 nt, Artificial Sequence
  Synthetic oligonucleotide: FAS-2005
acguugaggugggcgug

SEQ ID NO: 29767 - RNA, 17 nt, Artificial Sequence
  Synthetic oligonucleotide: FAS-2006
gaggugggcguggggug

SEQ ID NO: 29768 - RNA, 17 nt, Artificial Sequence
  Synthetic oligonucleotide: FAS-2000
cacugcgcuccacguug

SEQ ID NO: 29769 - RNA, 17 nt, Artificial Sequence
  Synthetic oligonucleotide: FAS-1821
aaccuaaccuagauuug

SEQ ID NO: 29770 - RNA, 17 nt, Artificial Sequence
  Synthetic oligonucleotide: FAS-1843
uuuuuuuuaaagaaaau

SEQ ID NO: 29771 - RNA, 17 nt, Artificial Sequence
  Synthetic oligonucleotide: FAS-1832
aauggguugaaucuaau

SEQ ID NO: 29772 - RNA, 17 nt, Artificial Sequence
  Synthetic oligonucleotide: FAS-1831
auuaauguguuauuaau

SEQ ID NO: 29773 - RNA, 17 nt, Artificial Sequence
  Synthetic oligonucleotide: FAS-1888
gucuuguagguguugau

SEQ ID NO: 29774 - RNA, 17 nt, Artificial Sequence
  Synthetic oligonucleotide: FAS-2045
ucucgaaaaaguuauau

SEQ ID NO: 29775 - RNA, 17 nt, Artificial Sequence
  Synthetic oligonucleotide: FAS-1999
gcagcuccggcgcuccu

SEQ ID NO: 29776 - RNA, 17 nt, Artificial Sequence
  Synthetic oligonucleotide: FAS-1838
gagugaggugcagagcu

SEQ ID NO: 29777 - RNA, 17 nt, Artificial Sequence
  Synthetic oligonucleotide: FAS-1993
gaagugcugaccccgcu

SEQ ID NO: 29778 - RNA, 17 nt, Artificial Sequence
  Synthetic oligonucleotide: FAS-2042
gguuaagccggagggcu

SEQ ID NO: 29779 - RNA, 17 nt, Artificial Sequence
  Synthetic oligonucleotide: FAS-2098
ggagcggaccuuuggcu

SEQ ID NO: 29780 - RNA, 17 nt, Artificial Sequence
  Synthetic oligonucleotide: FAS-1883
uuugggcccucaaaucu

SEQ ID NO: 29781 - RNA, 17 nt, Artificial Sequence
  Synthetic oligonucleotide: FAS-2010
aauugaagcggaagucu

SEQ ID NO: 29782 - RNA, 17 nt, Artificial Sequence
  Synthetic oligonucleotide: FAS-1990
ggaggacuugcuuuucu

SEQ ID NO: 29783 - RNA, 17 nt, Artificial Sequence
  Synthetic oligonucleotide: FAS-1827
ccugaaggaugaacagu

SEQ ID NO: 29784 - RNA, 17 nt, Artificial Sequence
  Synthetic oligonucleotide: FAS-2037
uggcaguucucagacgu

SEQ ID NO: 29785 - RNA, 17 nt, Artificial Sequence
  Synthetic oligonucleotide: FAS-1978
gcugcugcgggaggcgu

SEQ ID NO: 29786 - RNA, 17 nt, Artificial Sequence
  Synthetic oligonucleotide: FAS-2004
cacguugaggugggcgu

SEQ ID NO: 29787 - RNA, 17 nt, Artificial Sequence
  Synthetic oligonucleotide: FAS-2002
gcgcuccacguugaggu

SEQ ID NO: 29788 - RNA, 17 nt, Artificial Sequence
  Synthetic oligonucleotide: FAS-2019
uggagggggaccccggu

SEQ ID NO: 29789 - RNA, 17 nt, Artificial Sequence
  Synthetic oligonucleotide: FAS-2028
uccgcuccggcgcgggu

SEQ ID NO: 29790 - RNA, 17 nt, Artificial Sequence
  Synthetic oligonucleotide: FAS-1887
cuuaccaccagucuugu

SEQ ID NO: 29791 - RNA, 17 nt, Artificial Sequence
  Synthetic oligonucleotide: FAS-1875
auuacugaaccugaauu

SEQ ID NO: 29792 - RNA, 17 nt, Artificial Sequence
  Synthetic oligonucleotide: FAS-1833
auggguugaaucuaauu

SEQ ID NO: 29793 - RNA, 17 nt, Artificial Sequence
  Synthetic oligonucleotide: FAS-2097
gcgccggagcggaccuu

SEQ ID NO: 29794 - RNA, 17 nt, Artificial Sequence
  Synthetic oligonucleotide: FAS-1878
agguuucaguauuccuu

SEQ ID NO: 29795 - RNA, 17 nt, Artificial Sequence
  Synthetic oligonucleotide: FAS-2088
cggcuuaaccacugcuu

SEQ ID NO: 29796 - RNA, 17 nt, Artificial Sequence
  Synthetic oligonucleotide: FAS-1870
caaagucacuauugcuu

SEQ ID NO: 29797 - RNA, 17 nt, Artificial Sequence
  Synthetic oligonucleotide: FAS-1872
aacgguagauagcucuu

SEQ ID NO: 29798 - RNA, 17 nt, Artificial Sequence
  Synthetic oligonucleotide: FAS-1991
gaggacuugcuuuucuu

SEQ ID NO: 29799 - RNA, 17 nt, Artificial Sequence
  Synthetic oligonucleotide: FAS-1884
gcccucaaaucuagguu

SEQ ID NO: 29800 - RNA, 17 nt, Artificial Sequence
  Synthetic oligonucleotide: FAS-1874
uuuacagaagguauguu

SEQ ID NO: 29801 - RNA, 17 nt, Artificial Sequence
  Synthetic oligonucleotide: FAS-1881
uucuucuggagccuguu

SEQ ID NO: 29802 - RNA, 17 nt, Artificial Sequence
  Synthetic oligonucleotide: FAS-1984
ggcucccgggggcuguu

SEQ ID NO: 29803 - RNA, 17 nt, Artificial Sequence
  Synthetic oligonucleotide: FAS-2011
gaagucugggaagcuuu

SEQ ID NO: 29804 - RNA, 17 nt, Artificial Sequence
  Synthetic oligonucleotide: FAS-1882
ucuucuggagccuguuu

SEQ ID NO: 29805 - RNA, 20 nt, Artificial Sequence
  Synthetic oligonucleotide: FAS-1795
ugaacagugggcuaagcaaa

SEQ ID NO: 29806 - RNA, 20 nt, Artificial Sequence
  Synthetic oligonucleotide: FAS-2051
uaacuuuuucgagaaagaaa

SEQ ID NO: 29807 - RNA, 20 nt, Artificial Sequence
  Synthetic oligonucleotide: FAS-1942
gcccugacaagccaagccaa

SEQ ID NO: 29808 - RNA, 20 nt, Artificial Sequence
  Synthetic oligonucleotide: FAS-1806
agcuugguggacgaugccaa

SEQ ID NO: 29809 - RNA, 20 nt, Artificial Sequence
  Synthetic oligonucleotide: FAS-1794
augaacagugggcuaagcaa

SEQ ID NO: 29810 - RNA, 20 nt, Artificial Sequence
  Synthetic oligonucleotide: FAS-1962
agccggagggcucggaagaa

SEQ ID NO: 29811 - RNA, 20 nt, Artificial Sequence
  Synthetic oligonucleotide: FAS-1801
ggguugaaucuaauugggaa

SEQ ID NO: 29812 - RNA, 20 nt, Artificial Sequence
  Synthetic oligonucleotide: FAS-1850
aagucacuauugcuuuggaa

SEQ ID NO: 29813 - RNA, 20 nt, Artificial Sequence
  Synthetic oligonucleotide: FAS-1856
uuccagacuggacacacuaa

SEQ ID NO: 29814 - RNA, 20 nt, Artificial Sequence
  Synthetic oligonucleotide: FAS-1796
gguuauuaauguguuauuaa

SEQ ID NO: 29815 - RNA, 20 nt, Artificial Sequence
  Synthetic oligonucleotide: FAS-1782
agugacagaugcaaaacaca

SEQ ID NO: 29816 - RNA, 20 nt, Artificial Sequence
  Synthetic oligonucleotide: FAS-2077
ggggucagcacuucgcauca

SEQ ID NO: 29817 - RNA, 20 nt, Artificial Sequence
  Synthetic oligonucleotide: FAS-2065
accuuuggcuuggcuuguca

SEQ ID NO: 29818 - RNA, 20 nt, Artificial Sequence
  Synthetic oligonucleotide: FAS-1852
uuuagcaugaauuuuacaga

SEQ ID NO: 29819 - RNA, 20 nt, Artificial Sequence
  Synthetic oligonucleotide: FAS-1786
gugauggaaagcccucagga

SEQ ID NO: 29820 - RNA, 20 nt, Artificial Sequence
  Synthetic oligonucleotide: FAS-1960
gaagcagugguuaagccgga

SEQ ID NO: 29821 - RNA, 20 nt, Artificial Sequence
  Synthetic oligonucleotide: FAS-2082
gagcacccgggccugaggga

SEQ ID NO: 29822 - RNA, 20 nt, Artificial Sequence
  Synthetic oligonucleotide: FAS-1800
uggguugaaucuaauuggga

SEQ ID NO: 29823 - RNA, 20 nt, Artificial Sequence
  Synthetic oligonucleotide: FAS-1934
gaagcuuuagggucgcugga

SEQ ID NO: 29824 - RNA, 20 nt, Artificial Sequence
  Synthetic oligonucleotide: FAS-1791
ucaacugagaggaagccuga

SEQ ID NO: 29825 - RNA, 20 nt, Artificial Sequence
  Synthetic oligonucleotide: FAS-2081
uucugagcacccgggccuga

SEQ ID NO: 29826 - RNA, 20 nt, Artificial Sequence
  Synthetic oligonucleotide: FAS-1865
agguuagguuacccuccuga

SEQ ID NO: 29827 - RNA, 20 nt, Artificial Sequence
  Synthetic oligonucleotide: FAS-2054
augagcaauaucuguucuga

SEQ ID NO: 29828 - RNA, 20 nt, Artificial Sequence
  Synthetic oligonucleotide: FAS-1783
agaugcaaaacacaggguga

SEQ ID NO: 29829 - RNA, 20 nt, Artificial Sequence
  Synthetic oligonucleotide: FAS-1788
guaaccuaaccuagauuuga

SEQ ID NO: 29830 - RNA, 20 nt, Artificial Sequence
  Synthetic oligonucleotide: FAS-1963
ucuuucucgaaaaaguuaua

SEQ ID NO: 29831 - RNA, 20 nt, Artificial Sequence
  Synthetic oligonucleotide: FAS-1931
cggaagucugggaagcuuua

SEQ ID NO: 29832 - RNA, 20 nt, Artificial Sequence
  Synthetic oligonucleotide: FAS-1789
cuagauuugagggcccaaac

SEQ ID NO: 29833 - RNA, 20 nt, Artificial Sequence
  Synthetic oligonucleotide: FAS-2067
guuccgcuccucucuccaac

SEQ ID NO: 29834 - RNA, 20 nt, Artificial Sequence
  Synthetic oligonucleotide: FAS-1781
cagugacagaugcaaaacac

SEQ ID NO: 29835 - RNA, 20 nt, Artificial Sequence
  Synthetic oligonucleotide: FAS-1779
ccuaucaacaccuacaagac

SEQ ID NO: 29836 - RNA, 20 nt, Artificial Sequence
  Synthetic oligonucleotide: FAS-1855
auuuggaugcaguuccagac

SEQ ID NO: 29837 - RNA, 20 nt, Artificial Sequence
  Synthetic oligonucleotide: FAS-1898
cugcgggaggcguuggagac

SEQ ID NO: 29838 - RNA, 20 nt, Artificial Sequence
  Synthetic oligonucleotide: FAS-1926
ggugggcguggggugcggac

SEQ ID NO: 29839 - RNA, 20 nt, Artificial Sequence
  Synthetic oligonucleotide: FAS-2068
uuccgcuccucucuccaacc

SEQ ID NO: 29840 - RNA, 20 nt, Artificial Sequence
  Synthetic oligonucleotide: FAS-2078
ccuccagcguucugagcacc

SEQ ID NO: 29841 - RNA, 20 nt, Artificial Sequence
  Synthetic oligonucleotide: FAS-2079
cuccagcguucugagcaccc

SEQ ID NO: 29842 - RNA, 20 nt, Artificial Sequence
  Synthetic oligonucleotide: FAS-1937
gggucgcuggagggggaccc

SEQ ID NO: 29843 - RNA, 20 nt, Artificial Sequence
  Synthetic oligonucleotide: FAS-2084
ggaagguccuaacagccccc

SEQ ID NO: 29844 - RNA, 20 nt, Artificial Sequence
  Synthetic oligonucleotide: FAS-2083
gggaagguccuaacagcccc

SEQ ID NO: 29845 - RNA, 20 nt, Artificial Sequence
  Synthetic oligonucleotide: FAS-1906
uaggaccuucccucaggccc

SEQ ID NO: 29846 - RNA, 20 nt, Artificial Sequence
  Synthetic oligonucleotide: FAS-1900
ggcguuggagacuggcuccc

SEQ ID NO: 29847 - RNA, 20 nt, Artificial Sequence
  Synthetic oligonucleotide: FAS-1905
uuaggaccuucccucaggcc

SEQ ID NO: 29848 - RNA, 20 nt, Artificial Sequence
  Synthetic oligonucleotide: FAS-1810
uuuuuuaaagaaaauuggcc

SEQ ID NO: 29849 - RNA, 20 nt, Artificial Sequence
  Synthetic oligonucleotide: FAS-1941
ggagagaggagcggaacucc

SEQ ID NO: 29850 - RNA, 20 nt, Artificial Sequence
  Synthetic oligonucleotide: FAS-1899
aggcguuggagacuggcucc

SEQ ID NO: 29851 - RNA, 20 nt, Artificial Sequence
  Synthetic oligonucleotide: FAS-2066
uggcuugucagggcuugucc

SEQ ID NO: 29852 - RNA, 20 nt, Artificial Sequence
  Synthetic oligonucleotide: FAS-1958
caccgaagcagugguuaagc

SEQ ID NO: 29853 - RNA, 20 nt, Artificial Sequence
  Synthetic oligonucleotide: FAS-2075
agcugccccgccugcccagc

SEQ ID NO: 29854 - RNA, 20 nt, Artificial Sequence
  Synthetic oligonucleotide: FAS-1907
ggcccgggugcucagaacgc

SEQ ID NO: 29855 - RNA, 20 nt, Artificial Sequence
  Synthetic oligonucleotide: FAS-1911
augcgaagugcugaccccgc

SEQ ID NO: 29856 - RNA, 20 nt, Artificial Sequence
  Synthetic oligonucleotide: FAS-2057
ggcucucuccccgcccccgc

SEQ ID NO: 29857 - RNA, 20 nt, Artificial Sequence
  Synthetic oligonucleotide: FAS-1949
gugagugcgcgccgccccgc

SEQ ID NO: 29858 - RNA, 20 nt, Artificial Sequence
  Synthetic oligonucleotide: FAS-2073
caguggucuccgaggagcgc

SEQ ID NO: 29859 - RNA, 20 nt, Artificial Sequence
  Synthetic oligonucleotide: FAS-2060
gcgcacucacccacccgcgc

SEQ ID NO: 29860 - RNA, 20 nt, Artificial Sequence
  Synthetic oligonucleotide: FAS-1945
ccaaagguccgcuccggcgc

SEQ ID NO: 29861 - RNA, 20 nt, Artificial Sequence
  Synthetic oligonucleotide: FAS-1932
cugggaagcuuuagggucgc

SEQ ID NO: 29862 - RNA, 20 nt, Artificial Sequence
  Synthetic oligonucleotide: FAS-1915
gcugaccccgcugggcaggc

SEQ ID NO: 29863 - RNA, 20 nt, Artificial Sequence
  Synthetic oligonucleotide: FAS-1953
gcgcgccgccccgcgggggc

SEQ ID NO: 29864 - RNA, 20 nt, Artificial Sequence
  Synthetic oligonucleotide: FAS-1913
aagugcugaccccgcugggc

SEQ ID NO: 29865 - RNA, 20 nt, Artificial Sequence
  Synthetic oligonucleotide: FAS-2055
auaucuguucugaaggcugc

SEQ ID NO: 29866 - RNA, 20 nt, Artificial Sequence
  Synthetic oligonucleotide: FAS-1784
cagggugauggaaagcccuc

SEQ ID NO: 29867 - RNA, 20 nt, Artificial Sequence
  Synthetic oligonucleotide: FAS-2052
ugccguucuuccgagcccuc

SEQ ID NO: 29868 - RNA, 20 nt, Artificial Sequence
  Synthetic oligonucleotide: FAS-1904
ggcuguuaggaccuucccuc

SEQ ID NO: 29869 - RNA, 20 nt, Artificial Sequence
  Synthetic oligonucleotide: FAS-1917
cugggcaggcggggcagcuc

SEQ ID NO: 29870 - RNA, 20 nt, Artificial Sequence
  Synthetic oligonucleotide: FAS-1943
gccaagccaaagguccgcuc

SEQ ID NO: 29871 - RNA, 20 nt, Artificial Sequence
  Synthetic oligonucleotide: FAS-1848
cuuguaauucuuucgugcuc

SEQ ID NO: 29872 - RNA, 20 nt, Artificial Sequence
  Synthetic oligonucleotide: FAS-1928
caggaauugaagcggaaguc

SEQ ID NO: 29873 - RNA, 20 nt, Artificial Sequence
  Synthetic oligonucleotide: FAS-1807
aaccuuuaguguguccaguc

SEQ ID NO: 29874 - RNA, 20 nt, Artificial Sequence
  Synthetic oligonucleotide: FAS-2064
gaccuuuggcuuggcuuguc

SEQ ID NO: 29875 - RNA, 20 nt, Artificial Sequence
  Synthetic oligonucleotide: FAS-1808
cuggaacugcauccaaauuc

SEQ ID NO: 29876 - RNA, 20 nt, Artificial Sequence
  Synthetic oligonucleotide: FAS-1858
uagcccacuguucauccuuc

SEQ ID NO: 29877 - RNA, 20 nt, Artificial Sequence
  Synthetic oligonucleotide: FAS-1859
ucucaguugacauuuucuuc

SEQ ID NO: 29878 - RNA, 20 nt, Artificial Sequence
  Synthetic oligonucleotide: FAS-1955
aacagauauugcucauuuuc

SEQ ID NO: 29879 - RNA, 20 nt, Artificial Sequence
  Synthetic oligonucleotide: FAS-1927
ggugcggacaggaauugaag

SEQ ID NO: 29880 - RNA, 20 nt, Artificial Sequence
  Synthetic oligonucleotide: FAS-1792
gaagccugaaggaugaacag

SEQ ID NO: 29881 - RNA, 20 nt, Artificial Sequence
  Synthetic oligonucleotide: FAS-2074
gagcugccccgccugcccag

SEQ ID NO: 29882 - RNA, 20 nt, Artificial Sequence
  Synthetic oligonucleotide: FAS-1957
auaagucagcaccgaagcag

SEQ ID NO: 29883 - RNA, 20 nt, Artificial Sequence
  Synthetic oligonucleotide: FAS-2071
caccucaacguggagcgcag

SEQ ID NO: 29884 - RNA, 20 nt, Artificial Sequence
  Synthetic oligonucleotide: FAS-1802
aucuaauugggaagggagag

SEQ ID NO: 29885 - RNA, 20 nt, Artificial Sequence
  Synthetic oligonucleotide: FAS-1939
gggggaccccgguuggagag

SEQ ID NO: 29886 - RNA, 20 nt, Artificial Sequence
  Synthetic oligonucleotide: FAS-1940
accccgguuggagagaggag

SEQ ID NO: 29887 - RNA, 20 nt, Artificial Sequence
  Synthetic oligonucleotide: FAS-2061
cucacccacccgcgccggag

SEQ ID NO: 29888 - RNA, 20 nt, Artificial Sequence
  Synthetic oligonucleotide: FAS-1935
aagcuuuagggucgcuggag

SEQ ID NO: 29889 - RNA, 20 nt, Artificial Sequence
  Synthetic oligonucleotide: FAS-1790
agaagaaaaugucaacugag

SEQ ID NO: 29890 - RNA, 20 nt, Artificial Sequence
  Synthetic oligonucleotide: FAS-2070
accccacgcccaccucaacg

SEQ ID NO: 29891 - RNA, 20 nt, Artificial Sequence
  Synthetic oligonucleotide: FAS-2069
uccgcuccucucuccaaccg

SEQ ID NO: 29892 - RNA, 20 nt, Artificial Sequence
  Synthetic oligonucleotide: FAS-2056
aggcucucuccccgcccccg

SEQ ID NO: 29893 - RNA, 20 nt, Artificial Sequence
  Synthetic oligonucleotide: FAS-1948
ggugagugcgcgccgccccg

SEQ ID NO: 29894 - RNA, 20 nt, Artificial Sequence
  Synthetic oligonucleotide: FAS-1901
gcguuggagacuggcucccg

SEQ ID NO: 29895 - RNA, 20 nt, Artificial Sequence
  Synthetic oligonucleotide: FAS-2072
guggagcgcaguggucuccg

SEQ ID NO: 29896 - RNA, 20 nt, Artificial Sequence
  Synthetic oligonucleotide: FAS-2076
gcugccccgccugcccagcg

SEQ ID NO: 29897 - RNA, 20 nt, Artificial Sequence
  Synthetic oligonucleotide: FAS-2058
gcucucuccccgcccccgcg

SEQ ID NO: 29898 - RNA, 20 nt, Artificial Sequence
  Synthetic oligonucleotide: FAS-1950
ugagugcgcgccgccccgcg

SEQ ID NO: 29899 - RNA, 20 nt, Artificial Sequence
  Synthetic oligonucleotide: FAS-1916
cugaccccgcugggcaggcg

SEQ ID NO: 29900 - RNA, 20 nt, Artificial Sequence
  Synthetic oligonucleotide: FAS-1944
gccaaagguccgcuccggcg

SEQ ID NO: 29901 - RNA, 20 nt, Artificial Sequence
  Synthetic oligonucleotide: FAS-1954
cgcgccgccccgcgggggcg

SEQ ID NO: 29902 - RNA, 20 nt, Artificial Sequence
  Synthetic oligonucleotide: FAS-1922
gcuccacguugaggugggcg

SEQ ID NO: 29903 - RNA, 20 nt, Artificial Sequence
  Synthetic oligonucleotide: FAS-1914
ugcugaccccgcugggcagg

SEQ ID NO: 29904 - RNA, 20 nt, Artificial Sequence
  Synthetic oligonucleotide: FAS-1785
ggugauggaaagcccucagg

SEQ ID NO: 29905 - RNA, 20 nt, Artificial Sequence
  Synthetic oligonucleotide: FAS-1936
agcuuuagggucgcuggagg

SEQ ID NO: 29906 - RNA, 20 nt, Artificial Sequence
  Synthetic oligonucleotide: FAS-1920
cacugcgcuccacguugagg

SEQ ID NO: 29907 - RNA, 20 nt, Artificial Sequence
  Synthetic oligonucleotide: FAS-1902
cguuggagacuggcucccgg

SEQ ID NO: 29908 - RNA, 20 nt, Artificial Sequence
  Synthetic oligonucleotide: FAS-1959
cgaagcagugguuaagccgg

SEQ ID NO: 29909 - RNA, 20 nt, Artificial Sequence
  Synthetic oligonucleotide: FAS-1951
gagugcgcgccgccccgcgg

SEQ ID NO: 29910 - RNA, 20 nt, Artificial Sequence
  Synthetic oligonucleotide: FAS-1946
aagguccgcuccggcgcggg

SEQ ID NO: 29911 - RNA, 20 nt, Artificial Sequence
  Synthetic oligonucleotide: FAS-2059
cucuccccgcccccgcgggg

SEQ ID NO: 29912 - RNA, 20 nt, Artificial Sequence
  Synthetic oligonucleotide: FAS-1952
ugcgcgccgccccgcggggg

SEQ ID NO: 29913 - RNA, 20 nt, Artificial Sequence
  Synthetic oligonucleotide: FAS-1966
uucucgaaaaaguuauaugg

SEQ ID NO: 29914 - RNA, 20 nt, Artificial Sequence
  Synthetic oligonucleotide: FAS-1780
aucaacaccuacaagacugg

SEQ ID NO: 29915 - RNA, 20 nt, Artificial Sequence
  Synthetic oligonucleotide: FAS-1908
ccgggugcucagaacgcugg

SEQ ID NO: 29916 - RNA, 20 nt, Artificial Sequence
  Synthetic oligonucleotide: FAS-1933
ggaagcuuuagggucgcugg

SEQ ID NO: 29917 - RNA, 20 nt, Artificial Sequence
  Synthetic oligonucleotide: FAS-1805
gagugaggugcagagcuugg

SEQ ID NO: 29918 - RNA, 20 nt, Artificial Sequence
  Synthetic oligonucleotide: FAS-1965
uuucucgaaaaaguuauaug

SEQ ID NO: 29919 - RNA, 20 nt, Artificial Sequence
  Synthetic oligonucleotide: FAS-2080
guucugagcacccgggccug

SEQ ID NO: 29920 - RNA, 20 nt, Artificial Sequence
  Synthetic oligonucleotide: FAS-1864
uagguuagguuacccuccug

SEQ ID NO: 29921 - RNA, 20 nt, Artificial Sequence
  Synthetic oligonucleotide: FAS-1803
gggagagagguugcagagug

SEQ ID NO: 29922 - RNA, 20 nt, Artificial Sequence
  Synthetic oligonucleotide: FAS-1924
uccacguugaggugggcgug

SEQ ID NO: 29923 - RNA, 20 nt, Artificial Sequence
  Synthetic oligonucleotide: FAS-1925
guugaggugggcguggggug

SEQ ID NO: 29924 - RNA, 20 nt, Artificial Sequence
  Synthetic oligonucleotide: FAS-1919
gaccacugcgcuccacguug

SEQ ID NO: 29925 - RNA, 20 nt, Artificial Sequence
  Synthetic oligonucleotide: FAS-1787
gguaaccuaaccuagauuug

SEQ ID NO: 29926 - RNA, 20 nt, Artificial Sequence
  Synthetic oligonucleotide: FAS-1809
gauuuuuuuuuaaagaaaau

SEQ ID NO: 29927 - RNA, 20 nt, Artificial Sequence
  Synthetic oligonucleotide: FAS-1798
auuaauggguugaaucuaau

SEQ ID NO: 29928 - RNA, 20 nt, Artificial Sequence
  Synthetic oligonucleotide: FAS-1797
guuauuaauguguuauuaau

SEQ ID NO: 29929 - RNA, 20 nt, Artificial Sequence
  Synthetic oligonucleotide: FAS-1867
ccagucuuguagguguugau

SEQ ID NO: 29930 - RNA, 20 nt, Artificial Sequence
  Synthetic oligonucleotide: FAS-1964
cuuucucgaaaaaguuauau

SEQ ID NO: 29931 - RNA, 20 nt, Artificial Sequence
  Synthetic oligonucleotide: FAS-1918
ggggcagcuccggcgcuccu

SEQ ID NO: 29932 - RNA, 20 nt, Artificial Sequence
  Synthetic oligonucleotide: FAS-1804
gcagagugaggugcagagcu

SEQ ID NO: 29933 - RNA, 20 nt, Artificial Sequence
  Synthetic oligonucleotide: FAS-1912
ugcgaagugcugaccccgcu

SEQ ID NO: 29934 - RNA, 20 nt, Artificial Sequence
  Synthetic oligonucleotide: FAS-1961
agugguuaagccggagggcu

SEQ ID NO: 29935 - RNA, 20 nt, Artificial Sequence
  Synthetic oligonucleotide: FAS-2063
gccggagcggaccuuuggcu

SEQ ID NO: 29936 - RNA, 20 nt, Artificial Sequence
  Synthetic oligonucleotide: FAS-1862
cuguuugggcccucaaaucu

SEQ ID NO: 29937 - RNA, 20 nt, Artificial Sequence
  Synthetic oligonucleotide: FAS-1929
aggaauugaagcggaagucu

SEQ ID NO: 29938 - RNA, 20 nt, Artificial Sequence
  Synthetic oligonucleotide: FAS-1909
gcuggaggacuugcuuuucu

SEQ ID NO: 29939 - RNA, 20 nt, Artificial Sequence
  Synthetic oligonucleotide: FAS-1793
aagccugaaggaugaacagu

SEQ ID NO: 29940 - RNA, 20 nt, Artificial Sequence
  Synthetic oligonucleotide: FAS-1956
uucuggcaguucucagacgu

SEQ ID NO: 29941 - RNA, 20 nt, Artificial Sequence
  Synthetic oligonucleotide: FAS-1897
cgggcugcugcgggaggcgu

SEQ ID NO: 29942 - RNA, 20 nt, Artificial Sequence
  Synthetic oligonucleotide: FAS-1923
cuccacguugaggugggcgu

SEQ ID NO: 29943 - RNA, 20 nt, Artificial Sequence
  Synthetic oligonucleotide: FAS-1921
acugcgcuccacguugaggu

SEQ ID NO: 29944 - RNA, 20 nt, Artificial Sequence
  Synthetic oligonucleotide: FAS-1938
cgcuggagggggaccccggu

SEQ ID NO: 29945 - RNA, 20 nt, Artificial Sequence
  Synthetic oligonucleotide: FAS-1947
agguccgcuccggcgcgggu

SEQ ID NO: 29946 - RNA, 20 nt, Artificial Sequence
  Synthetic oligonucleotide: FAS-1866
gcacuuaccaccagucuugu

SEQ ID NO: 29947 - RNA, 20 nt, Artificial Sequence
  Synthetic oligonucleotide: FAS-1854
aucauuacugaaccugaauu

SEQ ID NO: 29948 - RNA, 20 nt, Artificial Sequence
  Synthetic oligonucleotide: FAS-1799
uuaauggguugaaucuaauu

SEQ ID NO: 29949 - RNA, 20 nt, Artificial Sequence
  Synthetic oligonucleotide: FAS-2062
cccgcgccggagcggaccuu

SEQ ID NO: 29950 - RNA, 20 nt, Artificial Sequence
  Synthetic oligonucleotide: FAS-1857
uaaagguuucaguauuccuu

SEQ ID NO: 29951 - RNA, 20 nt, Artificial Sequence
  Synthetic oligonucleotide: FAS-2053
cuccggcuuaaccacugcuu

SEQ ID NO: 29952 - RNA, 20 nt, Artificial Sequence
  Synthetic oligonucleotide: FAS-1849
guucaaagucacuauugcuu

SEQ ID NO: 29953 - RNA, 20 nt, Artificial Sequence
  Synthetic oligonucleotide: FAS-1851
uggaacgguagauagcucuu

SEQ ID NO: 29954 - RNA, 20 nt, Artificial Sequence
  Synthetic oligonucleotide: FAS-1910
cuggaggacuugcuuuucuu

SEQ ID NO: 29955 - RNA, 20 nt, Artificial Sequence
  Synthetic oligonucleotide: FAS-1863
ugggcccucaaaucuagguu

SEQ ID NO: 29956 - RNA, 20 nt, Artificial Sequence
  Synthetic oligonucleotide: FAS-1853
aauuuuacagaagguauguu

SEQ ID NO: 29957 - RNA, 20 nt, Artificial Sequence
  Synthetic oligonucleotide: FAS-1860
auuuucuucuggagccuguu

SEQ ID NO: 29958 - RNA, 20 nt, Artificial Sequence
  Synthetic oligonucleotide: FAS-1903
acuggcucccgggggcuguu

SEQ ID NO: 29959 - RNA, 20 nt, Artificial Sequence
  Synthetic oligonucleotide: FAS-1930
gcggaagucugggaagcuuu

SEQ ID NO: 29960 - RNA, 20 nt, Artificial Sequence
  Synthetic oligonucleotide: FAS-1861
uuuucuucuggagccuguuu

SEQ ID NO: 29961 - RNA, 18 nt, Artificial Sequence
  Synthetic oligonucleotide: FAS-3214
cuauccccgggacuaaga

SEQ ID NO: 29962 - RNA, 19 nt, Artificial Sequence
  Synthetic oligonucleotide: FAS-3215
ccuauccccgggacuaaga

SEQ ID NO: 29963 - RNA, 20 nt, Artificial Sequence
  Synthetic oligonucleotide: FAS-689
gccuauccccgggacuaaga

SEQ ID NO: 29964 - RNA, 21 nt, Artificial Sequence
  Synthetic oligonucleotide: FAS-3216
ugccuauccccgggacuaaga

SEQ ID NO: 29965 - RNA, 22 nt, Artificial Sequence
  Synthetic oligonucleotide: FAS-3217
uugccuauccccgggacuaaga

SEQ ID NO: 29966 - RNA, 23 nt, Artificial Sequence
  Synthetic oligonucleotide: FAS-3218
uuugccuauccccgggacuaaga

SEQ ID NO: 29967 - RNA, 24 nt, Artificial Sequence
  Synthetic oligonucleotide: FAS-3219
cuuugccuauccccgggacuaaga

SEQ ID NO: 29968 - RNA, 18 nt, Artificial Sequence
  Synthetic oligonucleotide: FAS-3220
uccccaacuccguacuga

SEQ ID NO: 29969 - RNA, 19 nt, Artificial Sequence
  Synthetic oligonucleotide: FAS-3221
uuccccaacuccguacuga

SEQ ID NO: 29970 - RNA, 20 nt, Artificial Sequence
  Synthetic oligonucleotide: FAS-1175
cuuccccaacuccguacuga

SEQ ID NO: 29971 - RNA, 21 nt, Artificial Sequence
  Synthetic oligonucleotide: FAS-3222
gcuuccccaacuccguacuga

SEQ ID NO: 29972 - RNA, 22 nt, Artificial Sequence
  Synthetic oligonucleotide: FAS-3223
agcuuccccaacuccguacuga

SEQ ID NO: 29973 - RNA, 23 nt, Artificial Sequence
  Synthetic oligonucleotide: FAS-3224
gagcuuccccaacuccguacuga

SEQ ID NO: 29974 - RNA, 24 nt, Artificial Sequence
  Synthetic oligonucleotide: FAS-3225
agagcuuccccaacuccguacuga

SEQ ID NO: 29975 - RNA, 18 nt, Artificial Sequence
  Synthetic oligonucleotide: FAS-3226
agccucgcuggggaacgc

SEQ ID NO: 29976 - RNA, 19 nt, Artificial Sequence
  Synthetic oligonucleotide: FAS-3227
aagccucgcuggggaacgc

SEQ ID NO: 29977 - RNA, 20 nt, Artificial Sequence
  Synthetic oligonucleotide: FAS-1203
gaagccucgcuggggaacgc

SEQ ID NO: 29978 - RNA, 21 nt, Artificial Sequence
  Synthetic oligonucleotide: FAS-3228
auucagcaacuuggccugcgc

SEQ ID NO: 29979 - RNA, 22 nt, Artificial Sequence
  Synthetic oligonucleotide: FAS-3229
gauucagcaacuuggccugcgc

SEQ ID NO: 29980 - RNA, 23 nt, Artificial Sequence
  Synthetic oligonucleotide: FAS-3230
ugauucagcaacuuggccugcgc

SEQ ID NO: 29981 - RNA, 24 nt, Artificial Sequence
  Synthetic oligonucleotide: FAS-3231
uugauucagcaacuuggccugcgc

SEQ ID NO: 29982 - RNA, 21 nt, Artificial Sequence
  Synthetic oligonucleotide: FAS-3232
cucagagcgcagagguccugc

SEQ ID NO: 29983 - RNA, 22 nt, Artificial Sequence
  Synthetic oligonucleotide: FAS-3233
gcucagagcgcagagguccugc

SEQ ID NO: 29984 - RNA, 23 nt, Artificial Sequence
  Synthetic oligonucleotide: FAS-3234
agcucagagcgcagagguccugc

SEQ ID NO: 29985 - RNA, 24 nt, Artificial Sequence
  Synthetic oligonucleotide: FAS-3235
gagcucagagcgcagagguccugc

SEQ ID NO: 29986 - RNA, 18 nt, Artificial Sequence
  Synthetic oligonucleotide: FAS-3236
ggagccuuggcuaauugc

SEQ ID NO: 29987 - RNA, 19 nt, Artificial Sequence
  Synthetic oligonucleotide: FAS-3237
aggagccuuggcuaauugc

SEQ ID NO: 29988 - RNA, 20 nt, Artificial Sequence
  Synthetic oligonucleotide: FAS-771
caggagccuuggcuaauugc

SEQ ID NO: 29989 - RNA, 21 nt, Artificial Sequence
  Synthetic oligonucleotide: FAS-3238
acaggagccuuggcuaauugc

SEQ ID NO: 29990 - RNA, 22 nt, Artificial Sequence
  Synthetic oligonucleotide: FAS-3239
uacaggagccuuggcuaauugc

SEQ ID NO: 29991 - RNA, 23 nt, Artificial Sequence
  Synthetic oligonucleotide: FAS-3240
guacaggagccuuggcuaauugc

SEQ ID NO: 29992 - RNA, 24 nt, Artificial Sequence
  Synthetic oligonucleotide: FAS-3241
gguacaggagccuuggcuaauugc

SEQ ID NO: 29993 - RNA, 21 nt, Artificial Sequence
  Synthetic oligonucleotide: FAS-3242
ugagaggcucacagacguuuc

SEQ ID NO: 29994 - RNA, 22 nt, Artificial Sequence
  Synthetic oligonucleotide: FAS-3243
augagaggcucacagacguuuc

SEQ ID NO: 29995 - RNA, 23 nt, Artificial Sequence
  Synthetic oligonucleotide: FAS-3244
caugagaggcucacagacguuuc

SEQ ID NO: 29996 - RNA, 24 nt, Artificial Sequence
  Synthetic oligonucleotide: FAS-3245
acaugagaggcucacagacguuuc

SEQ ID NO: 29997 - RNA, 18 nt, Artificial Sequence
  Synthetic oligonucleotide: FAS-3246
aaaagccccgguggucag

SEQ ID NO: 29998 - RNA, 19 nt, Artificial Sequence
  Synthetic oligonucleotide: FAS-3247
gaaaagccccgguggucag

SEQ ID NO: 29999 - RNA, 20 nt, Artificial Sequence
  Synthetic oligonucleotide: FAS-1193
cgaaaagccccgguggucag

SEQ ID NO: 30000 - RNA, 21 nt, Artificial Sequence
  Synthetic oligonucleotide: FAS-3248
acgaaaagccccgguggucag

SEQ ID NO: 30001 - RNA, 22 nt, Artificial Sequence
  Synthetic oligonucleotide: FAS-3249
cacgaaaagccccgguggucag

SEQ ID NO: 30002 - RNA, 23 nt, Artificial Sequence
  Synthetic oligonucleotide: FAS-3250
ucacgaaaagccccgguggucag

SEQ ID NO: 30003 - RNA, 24 nt, Artificial Sequence
  Synthetic oligonucleotide: FAS-3251
cucacgaaaagccccgguggucag

SEQ ID NO: 30004 - RNA, 21 nt, Artificial Sequence
  Synthetic oligonucleotide: FAS-2129
gagagggcucaccagagguag

SEQ ID NO: 30005 - RNA, 22 nt, Artificial Sequence
  Synthetic oligonucleotide: FAS-2130
ggagagggcucaccagagguag

SEQ ID NO: 30006 - RNA, 23 nt, Artificial Sequence
  Synthetic oligonucleotide: FAS-2131
aggagagggcucaccagagguag

SEQ ID NO: 30007 - RNA, 24 nt, Artificial Sequence
  Synthetic oligonucleotide: FAS-2132
caggagagggcucaccagagguag

SEQ ID NO: 30008 - RNA, 21 nt, Artificial Sequence
  Synthetic oligonucleotide: FAS-3252
cggguagggagggggagaagu

SEQ ID NO: 30009 - RNA, 22 nt, Artificial Sequence
  Synthetic oligonucleotide: FAS-3253
gcggguagggagggggagaagu

SEQ ID NO: 30010 - RNA, 23 nt, Artificial Sequence
  Synthetic oligonucleotide: FAS-3254
cgcggguagggagggggagaagu

SEQ ID NO: 30011 - RNA, 24 nt, Artificial Sequence
  Synthetic oligonucleotide: FAS-3255
gcgcggguagggagggggagaagu

SEQ ID NO: 30012 - RNA, 18 nt, Artificial Sequence
  Synthetic oligonucleotide: FAS-3256
ugguggacccgcucagua

SEQ ID NO: 30013 - RNA, 19 nt, Artificial Sequence
  Synthetic oligonucleotide: FAS-3257
uugguggacccgcucagua

SEQ ID NO: 30014 - RNA, 20 nt, Artificial Sequence
  Synthetic oligonucleotide: FAS-653
guugguggacccgcucagua

SEQ ID NO: 30015 - RNA, 21 nt, Artificial Sequence
  Synthetic oligonucleotide: FAS-3258
gguugguggacccgcucagua

SEQ ID NO: 30016 - RNA, 22 nt, Artificial Sequence
  Synthetic oligonucleotide: FAS-3259
ggguugguggacccgcucagua

SEQ ID NO: 30017 - RNA, 23 nt, Artificial Sequence
  Synthetic oligonucleotide: FAS-3260
cggguugguggacccgcucagua

SEQ ID NO: 30018 - RNA, 24 nt, Artificial Sequence
  Synthetic oligonucleotide: FAS-3261
gcggguugguggacccgcucagua

SEQ ID NO: 30019 - RNA, 18 nt, Artificial Sequence
  Synthetic oligonucleotide: FAS-3262
gcaggaacgccccgggac

SEQ ID NO: 30020 - RNA, 19 nt, Artificial Sequence
  Synthetic oligonucleotide: FAS-3263
ugcaggaacgccccgggac

SEQ ID NO: 30021 - RNA, 20 nt, Artificial Sequence
  Synthetic oligonucleotide: FAS-620
cugcaggaacgccccgggac

SEQ ID NO: 30022 - RNA, 21 nt, Artificial Sequence
  Synthetic oligonucleotide: FAS-3264
acugcaggaacgccccgggac

SEQ ID NO: 30023 - RNA, 22 nt, Artificial Sequence
  Synthetic oligonucleotide: FAS-3265
cacugcaggaacgccccgggac

SEQ ID NO: 30024 - RNA, 23 nt, Artificial Sequence
  Synthetic oligonucleotide: FAS-3266
ccacugcaggaacgccccgggac

SEQ ID NO: 30025 - RNA, 24 nt, Artificial Sequence
  Synthetic oligonucleotide: FAS-3267
gccacugcaggaacgccccgggac

SEQ ID NO: 30026 - RNA, 18 nt, Artificial Sequence
  Synthetic oligonucleotide: FAS-3268
ggagcugccucuucuccc

SEQ ID NO: 30027 - RNA, 19 nt, Artificial Sequence
  Synthetic oligonucleotide: FAS-3269
cggagcugccucuucuccc

SEQ ID NO: 30028 - RNA, 20 nt, Artificial Sequence
  Synthetic oligonucleotide: FAS-1037
gcggagcugccucuucuccc

SEQ ID NO: 30029 - RNA, 21 nt, Artificial Sequence
  Synthetic oligonucleotide: FAS-3270
ggcggagcugccucuucuccc

SEQ ID NO: 30030 - RNA, 22 nt, Artificial Sequence
  Synthetic oligonucleotide: FAS-3271
aggcggagcugccucuucuccc

SEQ ID NO: 30031 - RNA, 23 nt, Artificial Sequence
  Synthetic oligonucleotide: FAS-3272
caggcggagcugccucuucuccc

SEQ ID NO: 30032 - RNA, 24 nt, Artificial Sequence
  Synthetic oligonucleotide: FAS-3273
ccaggcggagcugccucuucuccc

SEQ ID NO: 30033 - RNA, 18 nt, Artificial Sequence
  Synthetic oligonucleotide: FAS-3274
uuaccccgucuuaguccc

SEQ ID NO: 30034 - RNA, 19 nt, Artificial Sequence
  Synthetic oligonucleotide: FAS-3275
cuuaccccgucuuaguccc

SEQ ID NO: 30035 - RNA, 20 nt, Artificial Sequence
  Synthetic oligonucleotide: FAS-668
gcuuaccccgucuuaguccc

SEQ ID NO: 30036 - RNA, 21 nt, Artificial Sequence
  Synthetic oligonucleotide: FAS-3276
ggcuuaccccgucuuaguccc

SEQ ID NO: 30037 - RNA, 22 nt, Artificial Sequence
  Synthetic oligonucleotide: FAS-3277
aggcuuaccccgucuuaguccc

SEQ ID NO: 30038 - RNA, 23 nt, Artificial Sequence
  Synthetic oligonucleotide: FAS-3278
gaggcuuaccccgucuuaguccc

SEQ ID NO: 30039 - RNA, 24 nt, Artificial Sequence
  Synthetic oligonucleotide: FAS-3279
ggaggcuuaccccgucuuaguccc

SEQ ID NO: 30040 - RNA, 18 nt, Artificial Sequence
  Synthetic oligonucleotide: FAS-3280
ucgucucugaucucgcgc

SEQ ID NO: 30041 - RNA, 19 nt, Artificial Sequence
  Synthetic oligonucleotide: FAS-3281
cucgucucugaucucgcgc

SEQ ID NO: 30042 - RNA, 20 nt, Artificial Sequence
  Synthetic oligonucleotide: FAS-1017
gcucgucucugaucucgcgc

SEQ ID NO: 30043 - RNA, 21 nt, Artificial Sequence
  Synthetic oligonucleotide: FAS-3282
agcucgucucugaucucgcgc

SEQ ID NO: 30044 - RNA, 22 nt, Artificial Sequence
  Synthetic oligonucleotide: FAS-3283
gagcucgucucugaucucgcgc

SEQ ID NO: 30045 - RNA, 23 nt, Artificial Sequence
  Synthetic oligonucleotide: FAS-3284
ugagcucgucucugaucucgcgc

SEQ ID NO: 30046 - RNA, 24 nt, Artificial Sequence
  Synthetic oligonucleotide: FAS-3285
gugagcucgucucugaucucgcgc

SEQ ID NO: 30047 - RNA, 21 nt, Artificial Sequence
  Synthetic oligonucleotide: FAS-2169
cucuggugagcccucuccugc

SEQ ID NO: 30048 - RNA, 22 nt, Artificial Sequence
  Synthetic oligonucleotide: FAS-2170
ccucuggugagcccucuccugc

SEQ ID NO: 30049 - RNA, 23 nt, Artificial Sequence
  Synthetic oligonucleotide: FAS-2171
accucuggugagcccucuccugc

SEQ ID NO: 30050 - RNA, 24 nt, Artificial Sequence
  Synthetic oligonucleotide: FAS-2172
uaccucuggugagcccucuccugc

SEQ ID NO: 30051 - RNA, 21 nt, Artificial Sequence
  Synthetic oligonucleotide: FAS-3286
agguguucaaagacgcuucug

SEQ ID NO: 30052 - RNA, 22 nt, Artificial Sequence
  Synthetic oligonucleotide: FAS-3287
cagguguucaaagacgcuucug

SEQ ID NO: 30053 - RNA, 23 nt, Artificial Sequence
  Synthetic oligonucleotide: FAS-3288
acagguguucaaagacgcuucug

SEQ ID NO: 30054 - RNA, 24 nt, Artificial Sequence
  Synthetic oligonucleotide: FAS-3289
cacagguguucaaagacgcuucug

SEQ ID NO: 30055 - RNA, 21 nt, Artificial Sequence
  Synthetic oligonucleotide: FAS-3290
ggggcgggcgcgggacgcgug

SEQ ID NO: 30056 - RNA, 22 nt, Artificial Sequence
  Synthetic oligonucleotide: FAS-3291
uggggcgggcgcgggacgcgug

SEQ ID NO: 30057 - RNA, 23 nt, Artificial Sequence
  Synthetic oligonucleotide: FAS-3292
guggggcgggcgcgggacgcgug

SEQ ID NO: 30058 - RNA, 24 nt, Artificial Sequence
  Synthetic oligonucleotide: FAS-3293
aguggggcgggcgcgggacgcgug

SEQ ID NO: 30059 - RNA, 18 nt, Artificial Sequence
  Synthetic oligonucleotide: FAS-3294
cgcgcgcaggccaaguug

SEQ ID NO: 30060 - RNA, 19 nt, Artificial Sequence
  Synthetic oligonucleotide: FAS-3295
ccgcgcgcaggccaaguug

SEQ ID NO: 30061 - RNA, 20 nt, Artificial Sequence
  Synthetic oligonucleotide: FAS-1009
cccgcgcgcaggccaaguug

SEQ ID NO: 30062 - RNA, 21 nt, Artificial Sequence
  Synthetic oligonucleotide: FAS-3296
acccgcgcgcaggccaaguug

SEQ ID NO: 30063 - RNA, 22 nt, Artificial Sequence
  Synthetic oligonucleotide: FAS-3297
uacccgcgcgcaggccaaguug

SEQ ID NO: 30064 - RNA, 23 nt, Artificial Sequence
  Synthetic oligonucleotide: FAS-3298
cuacccgcgcgcaggccaaguug

SEQ ID NO: 30065 - RNA, 24 nt, Artificial Sequence
  Synthetic oligonucleotide: FAS-3299
ccuacccgcgcgcaggccaaguug

SEQ ID NO: 30066 - RNA, 18 nt, Artificial Sequence
  Synthetic oligonucleotide: FAS-3300
ugccccgcaagucuuucu

SEQ ID NO: 30067 - RNA, 19 nt, Artificial Sequence
  Synthetic oligonucleotide: FAS-3301
augccccgcaagucuuucu

SEQ ID NO: 30068 - RNA, 20 nt, Artificial Sequence
  Synthetic oligonucleotide: FAS-990
aaugccccgcaagucuuucu

SEQ ID NO: 30069 - RNA, 21 nt, Artificial Sequence
  Synthetic oligonucleotide: FAS-3302
aaaugccccgcaagucuuucu

SEQ ID NO: 30070 - RNA, 22 nt, Artificial Sequence
  Synthetic oligonucleotide: FAS-3303
caaaugccccgcaagucuuucu

SEQ ID NO: 30071 - RNA, 23 nt, Artificial Sequence
  Synthetic oligonucleotide: FAS-3304
ucaaaugccccgcaagucuuucu

SEQ ID NO: 30072 - RNA, 24 nt, Artificial Sequence
  Synthetic oligonucleotide: FAS-3305
gucaaaugccccgcaagucuuucu

SEQ ID NO: 30073 - RNA, 21 nt, Artificial Sequence
  Synthetic oligonucleotide: FAS-3306
aacgaaggacaggaaguaauu

SEQ ID NO: 30074 - RNA, 22 nt, Artificial Sequence
  Synthetic oligonucleotide: FAS-3307
uaacgaaggacaggaaguaauu

SEQ ID NO: 30075 - RNA, 23 nt, Artificial Sequence
  Synthetic oligonucleotide: FAS-3308
guaacgaaggacaggaaguaauu

SEQ ID NO: 30076 - RNA, 24 nt, Artificial Sequence
  Synthetic oligonucleotide: FAS-3309
aguaacgaaggacaggaaguaauu

SEQ ID NO: 30077 - RNA, 18 nt, Artificial Sequence
  Synthetic oligonucleotide: FAS-3310
gagugagggaagcgguuu

SEQ ID NO: 30078 - RNA, 19 nt, Artificial Sequence
  Synthetic oligonucleotide: FAS-3311
ggagugagggaagcgguuu

SEQ ID NO: 30079 - RNA, 20 nt, Artificial Sequence
  Synthetic oligonucleotide: FAS-1026
gggagugagggaagcgguuu

SEQ ID NO: 30080 - RNA, 21 nt, Artificial Sequence
  Synthetic oligonucleotide: FAS-3312
ggggagugagggaagcgguuu

SEQ ID NO: 30081 - RNA, 22 nt, Artificial Sequence
  Synthetic oligonucleotide: FAS-3313
uggggagugagggaagcgguuu

SEQ ID NO: 30082 - RNA, 23 nt, Artificial Sequence
  Synthetic oligonucleotide: FAS-3314
cuggggagugagggaagcgguuu

SEQ ID NO: 30083 - RNA, 24 nt, Artificial Sequence
  Synthetic oligonucleotide: FAS-3315
ucuggggagugagggaagcgguuu

SEQ ID NO: 30084 - RNA, 18 nt, Artificial Sequence
  Synthetic oligonucleotide: FAS-3316
gagaagucagggugagga

SEQ ID NO: 30085 - RNA, 19 nt, Artificial Sequence
  Synthetic oligonucleotide: FAS-3317
ggagaagucagggugagga

SEQ ID NO: 30086 - RNA, 20 nt, Artificial Sequence
  Synthetic oligonucleotide: FAS-744
gggagaagucagggugagga

SEQ ID NO: 30087 - RNA, 21 nt, Artificial Sequence
  Synthetic oligonucleotide: FAS-3318
ggggagaagucagggugagga

SEQ ID NO: 30088 - RNA, 22 nt, Artificial Sequence
  Synthetic oligonucleotide: FAS-3319
gggggagaagucagggugagga

SEQ ID NO: 30089 - RNA, 23 nt, Artificial Sequence
  Synthetic oligonucleotide: FAS-3320
agggggagaagucagggugagga

SEQ ID NO: 30090 - RNA, 24 nt, Artificial Sequence
  Synthetic oligonucleotide: FAS-3321
gagggggagaagucagggugagga

SEQ ID NO: 30091 - RNA, 21 nt, Artificial Sequence
  Synthetic oligonucleotide: FAS-3322
ggaagccucgcuggggaacgc

SEQ ID NO: 30092 - RNA, 22 nt, Artificial Sequence
  Synthetic oligonucleotide: FAS-3323
aggaagccucgcuggggaacgc

SEQ ID NO: 30093 - RNA, 23 nt, Artificial Sequence
  Synthetic oligonucleotide: FAS-3324
aaggaagccucgcuggggaacgc

SEQ ID NO: 30094 - RNA, 24 nt, Artificial Sequence
  Synthetic oligonucleotide: FAS-3325
gaaggaagccucgcuggggaacgc

SEQ ID NO: 30095 - RNA, 18 nt, Artificial Sequence
  Synthetic oligonucleotide: FAS-3326
cagcaacuuggccugcgc

SEQ ID NO: 30096 - RNA, 19 nt, Artificial Sequence
  Synthetic oligonucleotide: FAS-3327
ucagcaacuuggccugcgc

SEQ ID NO: 30097 - RNA, 20 nt, Artificial Sequence
  Synthetic oligonucleotide: FAS-1209
uucagcaacuuggccugcgc

SEQ ID NO: 30098 - RNA, 18 nt, Artificial Sequence
  Synthetic oligonucleotide: FAS-3328
agagcgcagagguccugc

SEQ ID NO: 30099 - RNA, 19 nt, Artificial Sequence
  Synthetic oligonucleotide: FAS-3329
cagagcgcagagguccugc

SEQ ID NO: 30100 - RNA, 20 nt, Artificial Sequence
  Synthetic oligonucleotide: FAS-1248
ucagagcgcagagguccugc

SEQ ID NO: 30101 - RNA, 18 nt, Artificial Sequence
  Synthetic oligonucleotide: FAS-3330
gaggcucacagacguuuc

SEQ ID NO: 30102 - RNA, 19 nt, Artificial Sequence
  Synthetic oligonucleotide: FAS-3331
agaggcucacagacguuuc

SEQ ID NO: 30103 - RNA, 20 nt, Artificial Sequence
  Synthetic oligonucleotide: FAS-779
gagaggcucacagacguuuc

SEQ ID NO: 30104 - RNA, 18 nt, Artificial Sequence
  Synthetic oligonucleotide: FAS-3332
guuggggaggucuugaag

SEQ ID NO: 30105 - RNA, 19 nt, Artificial Sequence
  Synthetic oligonucleotide: FAS-3333
aguuggggaggucuugaag

SEQ ID NO: 30106 - RNA, 20 nt, Artificial Sequence
  Synthetic oligonucleotide: FAS-1243
aaguuggggaggucuugaag

SEQ ID NO: 30107 - RNA, 21 nt, Artificial Sequence
  Synthetic oligonucleotide: FAS-3334
gaaguuggggaggucuugaag

SEQ ID NO: 30108 - RNA, 22 nt, Artificial Sequence
  Synthetic oligonucleotide: FAS-3335
ggaaguuggggaggucuugaag

SEQ ID NO: 30109 - RNA, 23 nt, Artificial Sequence
  Synthetic oligonucleotide: FAS-3336
gggaaguuggggaggucuugaag

SEQ ID NO: 30110 - RNA, 24 nt, Artificial Sequence
  Synthetic oligonucleotide: FAS-3337
ugggaaguuggggaggucuugaag

SEQ ID NO: 30111 - RNA, 18 nt, Artificial Sequence
  Synthetic oligonucleotide: FAS-2195
agggcucaccagagguag

SEQ ID NO: 30112 - RNA, 19 nt, Artificial Sequence
  Synthetic oligonucleotide: FAS-2196
gagggcucaccagagguag

SEQ ID NO: 30113 - RNA, 20 nt, Artificial Sequence
  Synthetic oligonucleotide: FAS-106
agagggcucaccagagguag

SEQ ID NO: 30114 - RNA, 18 nt, Artificial Sequence
  Synthetic oligonucleotide: FAS-3338
ggcagccagggcuggccu

SEQ ID NO: 30115 - RNA, 19 nt, Artificial Sequence
  Synthetic oligonucleotide: FAS-3339
gggcagccagggcuggccu

SEQ ID NO: 30116 - RNA, 20 nt, Artificial Sequence
  Synthetic oligonucleotide: FAS-1183
ugggcagccagggcuggccu

SEQ ID NO: 30117 - RNA, 21 nt, Artificial Sequence
  Synthetic oligonucleotide: FAS-3340
cugggcagccagggcuggccu

SEQ ID NO: 30118 - RNA, 22 nt, Artificial Sequence
  Synthetic oligonucleotide: FAS-3341
ccugggcagccagggcuggccu

SEQ ID NO: 30119 - RNA, 23 nt, Artificial Sequence
  Synthetic oligonucleotide: FAS-3342
gccugggcagccagggcuggccu

SEQ ID NO: 30120 - RNA, 24 nt, Artificial Sequence
  Synthetic oligonucleotide: FAS-3343
cgccugggcagccagggcuggccu

SEQ ID NO: 30121 - RNA, 18 nt, Artificial Sequence
  Synthetic oligonucleotide: FAS-3344
guagggagggggagaagu

SEQ ID NO: 30122 - RNA, 19 nt, Artificial Sequence
  Synthetic oligonucleotide: FAS-3345
gguagggagggggagaagu

SEQ ID NO: 30123 - RNA, 20 nt, Artificial Sequence
  Synthetic oligonucleotide: FAS-1219
ggguagggagggggagaagu

SEQ ID NO: 30124 - RNA, 18 nt, Artificial Sequence
  Synthetic oligonucleotide: FAS-3346
ucagggugaggaaggagu

SEQ ID NO: 30125 - RNA, 19 nt, Artificial Sequence
  Synthetic oligonucleotide: FAS-3347
gucagggugaggaaggagu

SEQ ID NO: 30126 - RNA, 20 nt, Artificial Sequence
  Synthetic oligonucleotide: FAS-1225
agucagggugaggaaggagu

SEQ ID NO: 30127 - RNA, 21 nt, Artificial Sequence
  Synthetic oligonucleotide: FAS-3348
aagucagggugaggaaggagu

SEQ ID NO: 30128 - RNA, 22 nt, Artificial Sequence
  Synthetic oligonucleotide: FAS-3349
gaagucagggugaggaaggagu

SEQ ID NO: 30129 - RNA, 23 nt, Artificial Sequence
  Synthetic oligonucleotide: FAS-3350
agaagucagggugaggaaggagu

SEQ ID NO: 30130 - RNA, 24 nt, Artificial Sequence
  Synthetic oligonucleotide: FAS-3351
gagaagucagggugaggaaggagu

SEQ ID NO: 30131 - RNA, 18 nt, Artificial Sequence
  Synthetic oligonucleotide: FAS-2227
uggugagcccucuccugc

SEQ ID NO: 30132 - RNA, 19 nt, Artificial Sequence
  Synthetic oligonucleotide: FAS-2228
cuggugagcccucuccugc

SEQ ID NO: 30133 - RNA, 20 nt, Artificial Sequence
  Synthetic oligonucleotide: FAS-1051
ucuggugagcccucuccugc

SEQ ID NO: 30134 - RNA, 18 nt, Artificial Sequence
  Synthetic oligonucleotide: FAS-3352
ggaagcucuuucacuucg

SEQ ID NO: 30135 - RNA, 19 nt, Artificial Sequence
  Synthetic oligonucleotide: FAS-3353
gggaagcucuuucacuucg

SEQ ID NO: 30136 - RNA, 20 nt, Artificial Sequence
  Synthetic oligonucleotide: FAS-1047
ggggaagcucuuucacuucg

SEQ ID NO: 30137 - RNA, 21 nt, Artificial Sequence
  Synthetic oligonucleotide: FAS-3354
uggggaagcucuuucacuucg

SEQ ID NO: 30138 - RNA, 22 nt, Artificial Sequence
  Synthetic oligonucleotide: FAS-3355
uuggggaagcucuuucacuucg

SEQ ID NO: 30139 - RNA, 23 nt, Artificial Sequence
  Synthetic oligonucleotide: FAS-3356
guuggggaagcucuuucacuucg

SEQ ID NO: 30140 - RNA, 24 nt, Artificial Sequence
  Synthetic oligonucleotide: FAS-3357
aguuggggaagcucuuucacuucg

SEQ ID NO: 30141 - RNA, 18 nt, Artificial Sequence
  Synthetic oligonucleotide: FAS-3358
uguucaaagacgcuucug

SEQ ID NO: 30142 - RNA, 19 nt, Artificial Sequence
  Synthetic oligonucleotide: FAS-3359
guguucaaagacgcuucug

SEQ ID NO: 30143 - RNA, 20 nt, Artificial Sequence
  Synthetic oligonucleotide: FAS-632
gguguucaaagacgcuucug

SEQ ID NO: 30144 - RNA, 18 nt, Artificial Sequence
  Synthetic oligonucleotide: FAS-3360
gcgggcgcgggacgcgug

SEQ ID NO: 30145 - RNA, 19 nt, Artificial Sequence
  Synthetic oligonucleotide: FAS-3361
ggcgggcgcgggacgcgug

SEQ ID NO: 30146 - RNA, 20 nt, Artificial Sequence
  Synthetic oligonucleotide: FAS-678
gggcgggcgcgggacgcgug

SEQ ID NO: 30147 - RNA, 18 nt, Artificial Sequence
  Synthetic oligonucleotide: FAS-3362
gaaggacaggaaguaauu

SEQ ID NO: 30148 - RNA, 19 nt, Artificial Sequence
  Synthetic oligonucleotide: FAS-3363
cgaaggacaggaaguaauu

SEQ ID NO: 30149 - RNA, 20 nt, Artificial Sequence
  Synthetic oligonucleotide: FAS-979
acgaaggacaggaaguaauu

SEQ ID NO: 30150 - RNA, 18 nt, Artificial Sequence
  Synthetic oligonucleotide: FAS-3364
gccauagggcucugaaaa

SEQ ID NO: 30151 - RNA, 19 nt, Artificial Sequence
  Synthetic oligonucleotide: FAS-3365
cgccauagggcucugaaaa

SEQ ID NO: 30152 - RNA, 20 nt, Artificial Sequence
  Synthetic oligonucleotide: FAS-784
gcgccauagggcucugaaaa

SEQ ID NO: 30153 - RNA, 21 nt, Artificial Sequence
  Synthetic oligonucleotide: FAS-3366
ugcgccauagggcucugaaaa

SEQ ID NO: 30154 - RNA, 22 nt, Artificial Sequence
  Synthetic oligonucleotide: FAS-3367
uugcgccauagggcucugaaaa

SEQ ID NO: 30155 - RNA, 23 nt, Artificial Sequence
  Synthetic oligonucleotide: FAS-3368
guugcgccauagggcucugaaaa

SEQ ID NO: 30156 - RNA, 24 nt, Artificial Sequence
  Synthetic oligonucleotide: FAS-3369
uguugcgccauagggcucugaaaa

SEQ ID NO: 30157 - RNA, 18 nt, Artificial Sequence
  Synthetic oligonucleotide: FAS-3370
cgccauagggcucugaaa

SEQ ID NO: 30158 - RNA, 19 nt, Artificial Sequence
  Synthetic oligonucleotide: FAS-3371
gcgccauagggcucugaaa

SEQ ID NO: 30159 - RNA, 20 nt, Artificial Sequence
  Synthetic oligonucleotide: FAS-783
ugcgccauagggcucugaaa

SEQ ID NO: 30160 - RNA, 21 nt, Artificial Sequence
  Synthetic oligonucleotide: FAS-3372
uugcgccauagggcucugaaa

SEQ ID NO: 30161 - RNA, 22 nt, Artificial Sequence
  Synthetic oligonucleotide: FAS-3373
guugcgccauagggcucugaaa

SEQ ID NO: 30162 - RNA, 23 nt, Artificial Sequence
  Synthetic oligonucleotide: FAS-3374
uguugcgccauagggcucugaaa

SEQ ID NO: 30163 - RNA, 24 nt, Artificial Sequence
  Synthetic oligonucleotide: FAS-3375
auguugcgccauagggcucugaaa

SEQ ID NO: 30164 - RNA, 18 nt, Artificial Sequence
  Synthetic oligonucleotide: FAS-3376
ucaggguucguugcacaa

SEQ ID NO: 30165 - RNA, 19 nt, Artificial Sequence
  Synthetic oligonucleotide: FAS-3377
gucaggguucguugcacaa

SEQ ID NO: 30166 - RNA, 20 nt, Artificial Sequence
  Synthetic oligonucleotide: FAS-1226
agucaggguucguugcacaa

SEQ ID NO: 30167 - RNA, 21 nt, Artificial Sequence
  Synthetic oligonucleotide: FAS-3378
gagucaggguucguugcacaa

SEQ ID NO: 30168 - RNA, 22 nt, Artificial Sequence
  Synthetic oligonucleotide: FAS-3379
ggagucaggguucguugcacaa

SEQ ID NO: 30169 - RNA, 23 nt, Artificial Sequence
  Synthetic oligonucleotide: FAS-3380
aggagucaggguucguugcacaa

SEQ ID NO: 30170 - RNA, 24 nt, Artificial Sequence
  Synthetic oligonucleotide: FAS-3381
aaggagucaggguucguugcacaa

SEQ ID NO: 30171 - RNA, 18 nt, Artificial Sequence
  Synthetic oligonucleotide: FAS-3382
uuaguuuuuauuucucaa

SEQ ID NO: 30172 - RNA, 19 nt, Artificial Sequence
  Synthetic oligonucleotide: FAS-3383
cuuaguuuuuauuucucaa

SEQ ID NO: 30173 - RNA, 20 nt, Artificial Sequence
  Synthetic oligonucleotide: FAS-1271
ccuuaguuuuuauuucucaa

SEQ ID NO: 30174 - RNA, 21 nt, Artificial Sequence
  Synthetic oligonucleotide: FAS-3384
cccuuaguuuuuauuucucaa

SEQ ID NO: 30175 - RNA, 22 nt, Artificial Sequence
  Synthetic oligonucleotide: FAS-3385
ccccuuaguuuuuauuucucaa

SEQ ID NO: 30176 - RNA, 23 nt, Artificial Sequence
  Synthetic oligonucleotide: FAS-3386
gccccuuaguuuuuauuucucaa

SEQ ID NO: 30177 - RNA, 24 nt, Artificial Sequence
  Synthetic oligonucleotide: FAS-3387
ggccccuuaguuuuuauuucucaa

SEQ ID NO: 30178 - RNA, 18 nt, Artificial Sequence
  Synthetic oligonucleotide: FAS-3388
ggaggucuugaaggagaa

SEQ ID NO: 30179 - RNA, 19 nt, Artificial Sequence
  Synthetic oligonucleotide: FAS-3389
gggaggucuugaaggagaa

SEQ ID NO: 30180 - RNA, 20 nt, Artificial Sequence
  Synthetic oligonucleotide: FAS-765
ggggaggucuugaaggagaa

SEQ ID NO: 30181 - RNA, 21 nt, Artificial Sequence
  Synthetic oligonucleotide: FAS-3390
uggggaggucuugaaggagaa

SEQ ID NO: 30182 - RNA, 22 nt, Artificial Sequence
  Synthetic oligonucleotide: FAS-3391
uuggggaggucuugaaggagaa

SEQ ID NO: 30183 - RNA, 23 nt, Artificial Sequence
  Synthetic oligonucleotide: FAS-3392
guuggggaggucuugaaggagaa

SEQ ID NO: 30184 - RNA, 24 nt, Artificial Sequence
  Synthetic oligonucleotide: FAS-3393
aguuggggaggucuugaaggagaa

SEQ ID NO: 30185 - RNA, 18 nt, Artificial Sequence
  Synthetic oligonucleotide: FAS-2253
guugagcaauccuccgaa

SEQ ID NO: 30186 - RNA, 19 nt, Artificial Sequence
  Synthetic oligonucleotide: FAS-2254
uguugagcaauccuccgaa

SEQ ID NO: 30187 - RNA, 20 nt, Artificial Sequence
  Synthetic oligonucleotide: FAS-1172
uuguugagcaauccuccgaa

SEQ ID NO: 30188 - RNA, 21 nt, Artificial Sequence
  Synthetic oligonucleotide: FAS-2255
guuguugagcaauccuccgaa

SEQ ID NO: 30189 - RNA, 22 nt, Artificial Sequence
  Synthetic oligonucleotide: FAS-2256
gguuguugagcaauccuccgaa

SEQ ID NO: 30190 - RNA, 23 nt, Artificial Sequence
  Synthetic oligonucleotide: FAS-2257
ugguuguugagcaauccuccgaa

SEQ ID NO: 30191 - RNA, 24 nt, Artificial Sequence
  Synthetic oligonucleotide: FAS-2258
augguuguugagcaauccuccgaa

SEQ ID NO: 30192 - RNA, 18 nt, Artificial Sequence
  Synthetic oligonucleotide: FAS-3394
gcgccauagggcucugaa

SEQ ID NO: 30193 - RNA, 19 nt, Artificial Sequence
  Synthetic oligonucleotide: FAS-3395
ugcgccauagggcucugaa

SEQ ID NO: 30194 - RNA, 20 nt, Artificial Sequence
  Synthetic oligonucleotide: FAS-1266
uugcgccauagggcucugaa

SEQ ID NO: 30195 - RNA, 21 nt, Artificial Sequence
  Synthetic oligonucleotide: FAS-3396
guugcgccauagggcucugaa

SEQ ID NO: 30196 - RNA, 22 nt, Artificial Sequence
  Synthetic oligonucleotide: FAS-3397
uguugcgccauagggcucugaa

SEQ ID NO: 30197 - RNA, 23 nt, Artificial Sequence
  Synthetic oligonucleotide: FAS-3398
auguugcgccauagggcucugaa

SEQ ID NO: 30198 - RNA, 24 nt, Artificial Sequence
  Synthetic oligonucleotide: FAS-3399
gauguugcgccauagggcucugaa

SEQ ID NO: 30199 - RNA, 18 nt, Artificial Sequence
  Synthetic oligonucleotide: FAS-3400
aguacagauguugcgcca

SEQ ID NO: 30200 - RNA, 19 nt, Artificial Sequence
  Synthetic oligonucleotide: FAS-3401
aaguacagauguugcgcca

SEQ ID NO: 30201 - RNA, 20 nt, Artificial Sequence
  Synthetic oligonucleotide: FAS-1264
aaaguacagauguugcgcca

SEQ ID NO: 30202 - RNA, 21 nt, Artificial Sequence
  Synthetic oligonucleotide: FAS-3402
aaaaguacagauguugcgcca

SEQ ID NO: 30203 - RNA, 22 nt, Artificial Sequence
  Synthetic oligonucleotide: FAS-3403
aaaaaguacagauguugcgcca

SEQ ID NO: 30204 - RNA, 23 nt, Artificial Sequence
  Synthetic oligonucleotide: FAS-3404
gaaaaaguacagauguugcgcca

SEQ ID NO: 30205 - RNA, 24 nt, Artificial Sequence
  Synthetic oligonucleotide: FAS-3405
ugaaaaaguacagauguugcgcca

SEQ ID NO: 30206 - RNA, 18 nt, Artificial Sequence
  Synthetic oligonucleotide: FAS-3406
aauugcuggagucacuca

SEQ ID NO: 30207 - RNA, 19 nt, Artificial Sequence
  Synthetic oligonucleotide: FAS-3407
uaauugcuggagucacuca

SEQ ID NO: 30208 - RNA, 20 nt, Artificial Sequence
  Synthetic oligonucleotide: FAS-1254
cuaauugcuggagucacuca

SEQ ID NO: 30209 - RNA, 21 nt, Artificial Sequence
  Synthetic oligonucleotide: FAS-3408
gcuaauugcuggagucacuca

SEQ ID NO: 30210 - RNA, 22 nt, Artificial Sequence
  Synthetic oligonucleotide: FAS-3409
ggcuaauugcuggagucacuca

SEQ ID NO: 30211 - RNA, 23 nt, Artificial Sequence
  Synthetic oligonucleotide: FAS-3410
uggcuaauugcuggagucacuca

SEQ ID NO: 30212 - RNA, 24 nt, Artificial Sequence
  Synthetic oligonucleotide: FAS-3411
uuggcuaauugcuggagucacuca

SEQ ID NO: 30213 - RNA, 18 nt, Artificial Sequence
  Synthetic oligonucleotide: FAS-3412
gggaggucuugaaggaga

SEQ ID NO: 30214 - RNA, 19 nt, Artificial Sequence
  Synthetic oligonucleotide: FAS-3413
ggggaggucuugaaggaga

SEQ ID NO: 30215 - RNA, 20 nt, Artificial Sequence
  Synthetic oligonucleotide: FAS-1244
uggggaggucuugaaggaga

SEQ ID NO: 30216 - RNA, 21 nt, Artificial Sequence
  Synthetic oligonucleotide: FAS-3414
uuggggaggucuugaaggaga

SEQ ID NO: 30217 - RNA, 22 nt, Artificial Sequence
  Synthetic oligonucleotide: FAS-3415
guuggggaggucuugaaggaga

SEQ ID NO: 30218 - RNA, 23 nt, Artificial Sequence
  Synthetic oligonucleotide: FAS-3416
aguuggggaggucuugaaggaga

SEQ ID NO: 30219 - RNA, 24 nt, Artificial Sequence
  Synthetic oligonucleotide: FAS-3417
aaguuggggaggucuugaaggaga

SEQ ID NO: 30220 - RNA, 18 nt, Artificial Sequence
  Synthetic oligonucleotide: FAS-2265
gccuccacccgggcagga

SEQ ID NO: 30221 - RNA, 19 nt, Artificial Sequence
  Synthetic oligonucleotide: FAS-2266
agccuccacccgggcagga

SEQ ID NO: 30222 - RNA, 20 nt, Artificial Sequence
  Synthetic oligonucleotide: FAS-1165
aagccuccacccgggcagga

SEQ ID NO: 30223 - RNA, 21 nt, Artificial Sequence
  Synthetic oligonucleotide: FAS-3418
uaagccuccacccgggcagga

SEQ ID NO: 30224 - RNA, 22 nt, Artificial Sequence
  Synthetic oligonucleotide: FAS-3419
guaagccuccacccgggcagga

SEQ ID NO: 30225 - RNA, 23 nt, Artificial Sequence
  Synthetic oligonucleotide: FAS-3420
gguaagccuccacccgggcagga

SEQ ID NO: 30226 - RNA, 24 nt, Artificial Sequence
  Synthetic oligonucleotide: FAS-3421
ggguaagccuccacccgggcagga

SEQ ID NO: 30227 - RNA, 18 nt, Artificial Sequence
  Synthetic oligonucleotide: FAS-3422
ccccgguggucaggagga

SEQ ID NO: 30228 - RNA, 19 nt, Artificial Sequence
  Synthetic oligonucleotide: FAS-3423
gccccgguggucaggagga

SEQ ID NO: 30229 - RNA, 20 nt, Artificial Sequence
  Synthetic oligonucleotide: FAS-719
agccccgguggucaggagga

SEQ ID NO: 30230 - RNA, 21 nt, Artificial Sequence
  Synthetic oligonucleotide: FAS-3424
aagccccgguggucaggagga

SEQ ID NO: 30231 - RNA, 22 nt, Artificial Sequence
  Synthetic oligonucleotide: FAS-3425
aaagccccgguggucaggagga

SEQ ID NO: 30232 - RNA, 23 nt, Artificial Sequence
  Synthetic oligonucleotide: FAS-3426
aaaagccccgguggucaggagga

SEQ ID NO: 30233 - RNA, 24 nt, Artificial Sequence
  Synthetic oligonucleotide: FAS-3427
gaaaagccccgguggucaggagga

SEQ ID NO: 30234 - RNA, 18 nt, Artificial Sequence
  Synthetic oligonucleotide: FAS-3428
ccugcgcgcggguaggga

SEQ ID NO: 30235 - RNA, 19 nt, Artificial Sequence
  Synthetic oligonucleotide: FAS-3429
gccugcgcgcggguaggga

SEQ ID NO: 30236 - RNA, 20 nt, Artificial Sequence
  Synthetic oligonucleotide: FAS-738
ggccugcgcgcggguaggga

SEQ ID NO: 30237 - RNA, 21 nt, Artificial Sequence
  Synthetic oligonucleotide: FAS-3430
uggccugcgcgcggguaggga

SEQ ID NO: 30238 - RNA, 22 nt, Artificial Sequence
  Synthetic oligonucleotide: FAS-3431
uuggccugcgcgcggguaggga

SEQ ID NO: 30239 - RNA, 23 nt, Artificial Sequence
  Synthetic oligonucleotide: FAS-3432
cuuggccugcgcgcggguaggga

SEQ ID NO: 30240 - RNA, 24 nt, Artificial Sequence
  Synthetic oligonucleotide: FAS-3433
acuuggccugcgcgcggguaggga

SEQ ID NO: 30241 - RNA, 18 nt, Artificial Sequence
  Synthetic oligonucleotide: FAS-3434
guggucaggaggauggga

SEQ ID NO: 30242 - RNA, 19 nt, Artificial Sequence
  Synthetic oligonucleotide: FAS-3435
gguggucaggaggauggga

SEQ ID NO: 30243 - RNA, 20 nt, Artificial Sequence
  Synthetic oligonucleotide: FAS-721
cgguggucaggaggauggga

SEQ ID NO: 30244 - RNA, 21 nt, Artificial Sequence
  Synthetic oligonucleotide: FAS-3436
ccgguggucaggaggauggga

SEQ ID NO: 30245 - RNA, 22 nt, Artificial Sequence
  Synthetic oligonucleotide: FAS-3437
cccgguggucaggaggauggga

SEQ ID NO: 30246 - RNA, 23 nt, Artificial Sequence
  Synthetic oligonucleotide: FAS-3438
ccccgguggucaggaggauggga

SEQ ID NO: 30247 - RNA, 24 nt, Artificial Sequence
  Synthetic oligonucleotide: FAS-3439
gccccgguggucaggaggauggga

SEQ ID NO: 30248 - RNA, 18 nt, Artificial Sequence
  Synthetic oligonucleotide: FAS-3440
cucacagacguuucugga

SEQ ID NO: 30249 - RNA, 19 nt, Artificial Sequence
  Synthetic oligonucleotide: FAS-3441
gcucacagacguuucugga

SEQ ID NO: 30250 - RNA, 20 nt, Artificial Sequence
  Synthetic oligonucleotide: FAS-1262
ggcucacagacguuucugga

SEQ ID NO: 30251 - RNA, 21 nt, Artificial Sequence
  Synthetic oligonucleotide: FAS-3442
aggcucacagacguuucugga

SEQ ID NO: 30252 - RNA, 22 nt, Artificial Sequence
  Synthetic oligonucleotide: FAS-3443
gaggcucacagacguuucugga

SEQ ID NO: 30253 - RNA, 23 nt, Artificial Sequence
  Synthetic oligonucleotide: FAS-3444
agaggcucacagacguuucugga

SEQ ID NO: 30254 - RNA, 24 nt, Artificial Sequence
  Synthetic oligonucleotide: FAS-3445
gagaggcucacagacguuucugga

SEQ ID NO: 30255 - RNA, 18 nt, Artificial Sequence
  Synthetic oligonucleotide: FAS-3446
agcaauccuccgaaguga

SEQ ID NO: 30256 - RNA, 19 nt, Artificial Sequence
  Synthetic oligonucleotide: FAS-3447
gagcaauccuccgaaguga

SEQ ID NO: 30257 - RNA, 20 nt, Artificial Sequence
  Synthetic oligonucleotide: FAS-1173
ugagcaauccuccgaaguga

SEQ ID NO: 30258 - RNA, 21 nt, Artificial Sequence
  Synthetic oligonucleotide: FAS-3448
uugagcaauccuccgaaguga

SEQ ID NO: 30259 - RNA, 22 nt, Artificial Sequence
  Synthetic oligonucleotide: FAS-3449
guugagcaauccuccgaaguga

SEQ ID NO: 30260 - RNA, 23 nt, Artificial Sequence
  Synthetic oligonucleotide: FAS-3450
uguugagcaauccuccgaaguga

SEQ ID NO: 30261 - RNA, 24 nt, Artificial Sequence
  Synthetic oligonucleotide: FAS-3451
uuguugagcaauccuccgaaguga

SEQ ID NO: 30262 - RNA, 18 nt, Artificial Sequence
  Synthetic oligonucleotide: FAS-3452
aaguuggggaggucuuga

SEQ ID NO: 30263 - RNA, 19 nt, Artificial Sequence
  Synthetic oligonucleotide: FAS-3453
gaaguuggggaggucuuga

SEQ ID NO: 30264 - RNA, 20 nt, Artificial Sequence
  Synthetic oligonucleotide: FAS-764
ggaaguuggggaggucuuga

SEQ ID NO: 30265 - RNA, 21 nt, Artificial Sequence
  Synthetic oligonucleotide: FAS-3454
gggaaguuggggaggucuuga

SEQ ID NO: 30266 - RNA, 22 nt, Artificial Sequence
  Synthetic oligonucleotide: FAS-3455
ugggaaguuggggaggucuuga

SEQ ID NO: 30267 - RNA, 23 nt, Artificial Sequence
  Synthetic oligonucleotide: FAS-3456
cugggaaguuggggaggucuuga

SEQ ID NO: 30268 - RNA, 24 nt, Artificial Sequence
  Synthetic oligonucleotide: FAS-3457
ccugggaaguuggggaggucuuga

SEQ ID NO: 30269 - RNA, 18 nt, Artificial Sequence
  Synthetic oligonucleotide: FAS-3458
gacuugcggggcauuuga

SEQ ID NO: 30270 - RNA, 19 nt, Artificial Sequence
  Synthetic oligonucleotide: FAS-3459
agacuugcggggcauuuga

SEQ ID NO: 30271 - RNA, 20 nt, Artificial Sequence
  Synthetic oligonucleotide: FAS-1257
aagacuugcggggcauuuga

SEQ ID NO: 30272 - RNA, 21 nt, Artificial Sequence
  Synthetic oligonucleotide: FAS-3460
aaagacuugcggggcauuuga

SEQ ID NO: 30273 - RNA, 22 nt, Artificial Sequence
  Synthetic oligonucleotide: FAS-3461
gaaagacuugcggggcauuuga

SEQ ID NO: 30274 - RNA, 23 nt, Artificial Sequence
  Synthetic oligonucleotide: FAS-3462
agaaagacuugcggggcauuuga

SEQ ID NO: 30275 - RNA, 24 nt, Artificial Sequence
  Synthetic oligonucleotide: FAS-3463
gagaaagacuugcggggcauuuga

SEQ ID NO: 30276 - RNA, 18 nt, Artificial Sequence
  Synthetic oligonucleotide: FAS-3464
agcuuccccaacuccgua

SEQ ID NO: 30277 - RNA, 19 nt, Artificial Sequence
  Synthetic oligonucleotide: FAS-3465
gagcuuccccaacuccgua

SEQ ID NO: 30278 - RNA, 20 nt, Artificial Sequence
  Synthetic oligonucleotide: FAS-1174
agagcuuccccaacuccgua

SEQ ID NO: 30279 - RNA, 21 nt, Artificial Sequence
  Synthetic oligonucleotide: FAS-3466
aagagcuuccccaacuccgua

SEQ ID NO: 30280 - RNA, 22 nt, Artificial Sequence
  Synthetic oligonucleotide: FAS-3467
aaagagcuuccccaacuccgua

SEQ ID NO: 30281 - RNA, 23 nt, Artificial Sequence
  Synthetic oligonucleotide: FAS-3468
gaaagagcuuccccaacuccgua

SEQ ID NO: 30282 - RNA, 24 nt, Artificial Sequence
  Synthetic oligonucleotide: FAS-3469
ugaaagagcuuccccaacuccgua

SEQ ID NO: 30283 - RNA, 18 nt, Artificial Sequence
  Synthetic oligonucleotide: FAS-3470
uuggccugcgcgcgggua

SEQ ID NO: 30284 - RNA, 19 nt, Artificial Sequence
  Synthetic oligonucleotide: FAS-3471
cuuggccugcgcgcgggua

SEQ ID NO: 30285 - RNA, 20 nt, Artificial Sequence
  Synthetic oligonucleotide: FAS-736
acuuggccugcgcgcgggua

SEQ ID NO: 30286 - RNA, 21 nt, Artificial Sequence
  Synthetic oligonucleotide: FAS-3472
aacuuggccugcgcgcgggua

SEQ ID NO: 30287 - RNA, 22 nt, Artificial Sequence
  Synthetic oligonucleotide: FAS-3473
caacuuggccugcgcgcgggua

SEQ ID NO: 30288 - RNA, 23 nt, Artificial Sequence
  Synthetic oligonucleotide: FAS-3474
gcaacuuggccugcgcgcgggua

SEQ ID NO: 30289 - RNA, 24 nt, Artificial Sequence
  Synthetic oligonucleotide: FAS-3475
agcaacuuggccugcgcgcgggua

SEQ ID NO: 30290 - RNA, 18 nt, Artificial Sequence
  Synthetic oligonucleotide: FAS-3476
agagguccugccugggua

SEQ ID NO: 30291 - RNA, 19 nt, Artificial Sequence
  Synthetic oligonucleotide: FAS-3477
cagagguccugccugggua

SEQ ID NO: 30292 - RNA, 20 nt, Artificial Sequence
  Synthetic oligonucleotide: FAS-1249
gcagagguccugccugggua

SEQ ID NO: 30293 - RNA, 21 nt, Artificial Sequence
  Synthetic oligonucleotide: FAS-3478
cgcagagguccugccugggua

SEQ ID NO: 30294 - RNA, 22 nt, Artificial Sequence
  Synthetic oligonucleotide: FAS-3479
gcgcagagguccugccugggua

SEQ ID NO: 30295 - RNA, 23 nt, Artificial Sequence
  Synthetic oligonucleotide: FAS-3480
agcgcagagguccugccugggua

SEQ ID NO: 30296 - RNA, 24 nt, Artificial Sequence
  Synthetic oligonucleotide: FAS-3481
gagcgcagagguccugccugggua

SEQ ID NO: 30297 - RNA, 18 nt, Artificial Sequence
  Synthetic oligonucleotide: FAS-3482
ccauguuguggcugcaac

SEQ ID NO: 30298 - RNA, 19 nt, Artificial Sequence
  Synthetic oligonucleotide: FAS-3483
uccauguuguggcugcaac

SEQ ID NO: 30299 - RNA, 20 nt, Artificial Sequence
  Synthetic oligonucleotide: FAS-1258
guccauguuguggcugcaac

SEQ ID NO: 30300 - RNA, 21 nt, Artificial Sequence
  Synthetic oligonucleotide: FAS-3484
uguccauguuguggcugcaac

SEQ ID NO: 30301 - RNA, 22 nt, Artificial Sequence
  Synthetic oligonucleotide: FAS-3485
cuguccauguuguggcugcaac

SEQ ID NO: 30302 - RNA, 23 nt, Artificial Sequence
  Synthetic oligonucleotide: FAS-3486
gcuguccauguuguggcugcaac

SEQ ID NO: 30303 - RNA, 24 nt, Artificial Sequence
  Synthetic oligonucleotide: FAS-3487
ggcuguccauguuguggcugcaac

SEQ ID NO: 30304 - RNA, 18 nt, Artificial Sequence
  Synthetic oligonucleotide: FAS-3488
cuucugcuguaguucaac

SEQ ID NO: 30305 - RNA, 19 nt, Artificial Sequence
  Synthetic oligonucleotide: FAS-3489
gcuucugcuguaguucaac

SEQ ID NO: 30306 - RNA, 20 nt, Artificial Sequence
  Synthetic oligonucleotide: FAS-1233
ggcuucugcuguaguucaac

SEQ ID NO: 30307 - RNA, 21 nt, Artificial Sequence
  Synthetic oligonucleotide: FAS-3490
aggcuucugcuguaguucaac

SEQ ID NO: 30308 - RNA, 22 nt, Artificial Sequence
  Synthetic oligonucleotide: FAS-3491
aaggcuucugcuguaguucaac

SEQ ID NO: 30309 - RNA, 23 nt, Artificial Sequence
  Synthetic oligonucleotide: FAS-3492
aaaggcuucugcuguaguucaac

SEQ ID NO: 30310 - RNA, 24 nt, Artificial Sequence
  Synthetic oligonucleotide: FAS-3493
uaaaggcuucugcuguaguucaac

SEQ ID NO: 30311 - RNA, 18 nt, Artificial Sequence
  Synthetic oligonucleotide: FAS-3494
gacgggguaagccuccac

SEQ ID NO: 30312 - RNA, 19 nt, Artificial Sequence
  Synthetic oligonucleotide: FAS-3495
agacgggguaagccuccac

SEQ ID NO: 30313 - RNA, 20 nt, Artificial Sequence
  Synthetic oligonucleotide: FAS-1161
aagacgggguaagccuccac

SEQ ID NO: 30314 - RNA, 21 nt, Artificial Sequence
  Synthetic oligonucleotide: FAS-3496
uaagacgggguaagccuccac

SEQ ID NO: 30315 - RNA, 22 nt, Artificial Sequence
  Synthetic oligonucleotide: FAS-3497
cuaagacgggguaagccuccac

SEQ ID NO: 30316 - RNA, 23 nt, Artificial Sequence
  Synthetic oligonucleotide: FAS-3498
acuaagacgggguaagccuccac

SEQ ID NO: 30317 - RNA, 24 nt, Artificial Sequence
  Synthetic oligonucleotide: FAS-3499
gacuaagacgggguaagccuccac

SEQ ID NO: 30318 - RNA, 18 nt, Artificial Sequence
  Synthetic oligonucleotide: FAS-2279
gggcaggagagggcucac

SEQ ID NO: 30319 - RNA, 19 nt, Artificial Sequence
  Synthetic oligonucleotide: FAS-2280
cgggcaggagagggcucac

SEQ ID NO: 30320 - RNA, 20 nt, Artificial Sequence
  Synthetic oligonucleotide: FAS-103
ccgggcaggagagggcucac

SEQ ID NO: 30321 - RNA, 21 nt, Artificial Sequence
  Synthetic oligonucleotide: FAS-2281
cccgggcaggagagggcucac

SEQ ID NO: 30322 - RNA, 22 nt, Artificial Sequence
  Synthetic oligonucleotide: FAS-2282
acccgggcaggagagggcucac

SEQ ID NO: 30323 - RNA, 23 nt, Artificial Sequence
  Synthetic oligonucleotide: FAS-2283
cacccgggcaggagagggcucac

SEQ ID NO: 30324 - RNA, 24 nt, Artificial Sequence
  Synthetic oligonucleotide: FAS-2284
ccacccgggcaggagagggcucac

SEQ ID NO: 30325 - RNA, 18 nt, Artificial Sequence
  Synthetic oligonucleotide: FAS-3500
gagguccugccuggguac

SEQ ID NO: 30326 - RNA, 19 nt, Artificial Sequence
  Synthetic oligonucleotide: FAS-3501
agagguccugccuggguac

SEQ ID NO: 30327 - RNA, 20 nt, Artificial Sequence
  Synthetic oligonucleotide: FAS-769
cagagguccugccuggguac

SEQ ID NO: 30328 - RNA, 21 nt, Artificial Sequence
  Synthetic oligonucleotide: FAS-3502
gcagagguccugccuggguac

SEQ ID NO: 30329 - RNA, 22 nt, Artificial Sequence
  Synthetic oligonucleotide: FAS-3503
cgcagagguccugccuggguac

SEQ ID NO: 30330 - RNA, 23 nt, Artificial Sequence
  Synthetic oligonucleotide: FAS-3504
gcgcagagguccugccuggguac

SEQ ID NO: 30331 - RNA, 24 nt, Artificial Sequence
  Synthetic oligonucleotide: FAS-3505
agcgcagagguccugccuggguac

SEQ ID NO: 30332 - RNA, 18 nt, Artificial Sequence
  Synthetic oligonucleotide: FAS-3506
uucugcuguaguucaacc

SEQ ID NO: 30333 - RNA, 19 nt, Artificial Sequence
  Synthetic oligonucleotide: FAS-3507
cuucugcuguaguucaacc

SEQ ID NO: 30334 - RNA, 20 nt, Artificial Sequence
  Synthetic oligonucleotide: FAS-758
gcuucugcuguaguucaacc

SEQ ID NO: 30335 - RNA, 21 nt, Artificial Sequence
  Synthetic oligonucleotide: FAS-3508
ggcuucugcuguaguucaacc

SEQ ID NO: 30336 - RNA, 22 nt, Artificial Sequence
  Synthetic oligonucleotide: FAS-3509
aggcuucugcuguaguucaacc

SEQ ID NO: 30337 - RNA, 23 nt, Artificial Sequence
  Synthetic oligonucleotide: FAS-3510
aaggcuucugcuguaguucaacc

SEQ ID NO: 30338 - RNA, 24 nt, Artificial Sequence
  Synthetic oligonucleotide: FAS-3511
aaaggcuucugcuguaguucaacc

SEQ ID NO: 30339 - RNA, 18 nt, Artificial Sequence
  Synthetic oligonucleotide: FAS-3512
ucacuucaggugaggacc

SEQ ID NO: 30340 - RNA, 19 nt, Artificial Sequence
  Synthetic oligonucleotide: FAS-3513
cucacuucaggugaggacc

SEQ ID NO: 30341 - RNA, 20 nt, Artificial Sequence
  Synthetic oligonucleotide: FAS-1231
gcucacuucaggugaggacc

SEQ ID NO: 30342 - RNA, 21 nt, Artificial Sequence
  Synthetic oligonucleotide: FAS-3514
ugcucacuucaggugaggacc

SEQ ID NO: 30343 - RNA, 22 nt, Artificial Sequence
  Synthetic oligonucleotide: FAS-3515
augcucacuucaggugaggacc

SEQ ID NO: 30344 - RNA, 23 nt, Artificial Sequence
  Synthetic oligonucleotide: FAS-3516
caugcucacuucaggugaggacc

SEQ ID NO: 30345 - RNA, 24 nt, Artificial Sequence
  Synthetic oligonucleotide: FAS-3517
gcaugcucacuucaggugaggacc

SEQ ID NO: 30346 - RNA, 18 nt, Artificial Sequence
  Synthetic oligonucleotide: FAS-3518
gagcggguccaccaaccc

SEQ ID NO: 30347 - RNA, 19 nt, Artificial Sequence
  Synthetic oligonucleotide: FAS-3519
ugagcggguccaccaaccc

SEQ ID NO: 30348 - RNA, 20 nt, Artificial Sequence
  Synthetic oligonucleotide: FAS-1176
cugagcggguccaccaaccc

SEQ ID NO: 30349 - RNA, 21 nt, Artificial Sequence
  Synthetic oligonucleotide: FAS-3520
acugagcggguccaccaaccc

SEQ ID NO: 30350 - RNA, 22 nt, Artificial Sequence
  Synthetic oligonucleotide: FAS-3521
uacugagcggguccaccaaccc

SEQ ID NO: 30351 - RNA, 23 nt, Artificial Sequence
  Synthetic oligonucleotide: FAS-3522
guacugagcggguccaccaaccc

SEQ ID NO: 30352 - RNA, 24 nt, Artificial Sequence
  Synthetic oligonucleotide: FAS-3523
cguacugagcggguccaccaaccc

SEQ ID NO: 30353 - RNA, 18 nt, Artificial Sequence
  Synthetic oligonucleotide: FAS-3524
ccgugccagugcccgccc

SEQ ID NO: 30354 - RNA, 19 nt, Artificial Sequence
  Synthetic oligonucleotide: FAS-3525
uccgugccagugcccgccc

SEQ ID NO: 30355 - RNA, 20 nt, Artificial Sequence
  Synthetic oligonucleotide: FAS-1184
uuccgugccagugcccgccc

SEQ ID NO: 30356 - RNA, 21 nt, Artificial Sequence
  Synthetic oligonucleotide: FAS-3526
guuccgugccagugcccgccc

SEQ ID NO: 30357 - RNA, 22 nt, Artificial Sequence
  Synthetic oligonucleotide: FAS-3527
uguuccgugccagugcccgccc

SEQ ID NO: 30358 - RNA, 23 nt, Artificial Sequence
  Synthetic oligonucleotide: FAS-3528
guguuccgugccagugcccgccc

SEQ ID NO: 30359 - RNA, 24 nt, Artificial Sequence
  Synthetic oligonucleotide: FAS-3529
uguguuccgugccagugcccgccc

SEQ ID NO: 30360 - RNA, 18 nt, Artificial Sequence
  Synthetic oligonucleotide: FAS-3530
ccccacuuugccuauccc

SEQ ID NO: 30361 - RNA, 19 nt, Artificial Sequence
  Synthetic oligonucleotide: FAS-3531
gccccacuuugccuauccc

SEQ ID NO: 30362 - RNA, 20 nt, Artificial Sequence
  Synthetic oligonucleotide: FAS-687
cgccccacuuugccuauccc

SEQ ID NO: 30363 - RNA, 21 nt, Artificial Sequence
  Synthetic oligonucleotide: FAS-3532
ccgccccacuuugccuauccc

SEQ ID NO: 30364 - RNA, 22 nt, Artificial Sequence
  Synthetic oligonucleotide: FAS-3533
cccgccccacuuugccuauccc

SEQ ID NO: 30365 - RNA, 23 nt, Artificial Sequence
  Synthetic oligonucleotide: FAS-3534
gcccgccccacuuugccuauccc

SEQ ID NO: 30366 - RNA, 24 nt, Artificial Sequence
  Synthetic oligonucleotide: FAS-3535
cgcccgccccacuuugccuauccc

SEQ ID NO: 30367 - RNA, 18 nt, Artificial Sequence
  Synthetic oligonucleotide: FAS-3536
accgcuucccucacuccc

SEQ ID NO: 30368 - RNA, 19 nt, Artificial Sequence
  Synthetic oligonucleotide: FAS-3537
aaccgcuucccucacuccc

SEQ ID NO: 30369 - RNA, 20 nt, Artificial Sequence
  Synthetic oligonucleotide: FAS-1185
aaaccgcuucccucacuccc

SEQ ID NO: 30370 - RNA, 21 nt, Artificial Sequence
  Synthetic oligonucleotide: FAS-3538
uaaaccgcuucccucacuccc

SEQ ID NO: 30371 - RNA, 22 nt, Artificial Sequence
  Synthetic oligonucleotide: FAS-3539
guaaaccgcuucccucacuccc

SEQ ID NO: 30372 - RNA, 23 nt, Artificial Sequence
  Synthetic oligonucleotide: FAS-3540
cguaaaccgcuucccucacuccc

SEQ ID NO: 30373 - RNA, 24 nt, Artificial Sequence
  Synthetic oligonucleotide: FAS-3541
ucguaaaccgcuucccucacuccc

SEQ ID NO: 30374 - RNA, 18 nt, Artificial Sequence
  Synthetic oligonucleotide: FAS-3542
gccccacuuugccuaucc

SEQ ID NO: 30375 - RNA, 19 nt, Artificial Sequence
  Synthetic oligonucleotide: FAS-3543
cgccccacuuugccuaucc

SEQ ID NO: 30376 - RNA, 20 nt, Artificial Sequence
  Synthetic oligonucleotide: FAS-1157
ccgccccacuuugccuaucc

SEQ ID NO: 30377 - RNA, 21 nt, Artificial Sequence
  Synthetic oligonucleotide: FAS-3544
cccgccccacuuugccuaucc

SEQ ID NO: 30378 - RNA, 22 nt, Artificial Sequence
  Synthetic oligonucleotide: FAS-3545
gcccgccccacuuugccuaucc

SEQ ID NO: 30379 - RNA, 23 nt, Artificial Sequence
  Synthetic oligonucleotide: FAS-3546
cgcccgccccacuuugccuaucc

SEQ ID NO: 30380 - RNA, 24 nt, Artificial Sequence
  Synthetic oligonucleotide: FAS-3547
gcgcccgccccacuuugccuaucc

SEQ ID NO: 30381 - RNA, 18 nt, Artificial Sequence
  Synthetic oligonucleotide: FAS-3548
aaaugggcauuccugucc

SEQ ID NO: 30382 - RNA, 19 nt, Artificial Sequence
  Synthetic oligonucleotide: FAS-3549
caaaugggcauuccugucc

SEQ ID NO: 30383 - RNA, 20 nt, Artificial Sequence
  Synthetic oligonucleotide: FAS-749
acaaaugggcauuccugucc

SEQ ID NO: 30384 - RNA, 21 nt, Artificial Sequence
  Synthetic oligonucleotide: FAS-3550
cacaaaugggcauuccugucc

SEQ ID NO: 30385 - RNA, 22 nt, Artificial Sequence
  Synthetic oligonucleotide: FAS-3551
gcacaaaugggcauuccugucc

SEQ ID NO: 30386 - RNA, 23 nt, Artificial Sequence
  Synthetic oligonucleotide: FAS-3552
ugcacaaaugggcauuccugucc

SEQ ID NO: 30387 - RNA, 24 nt, Artificial Sequence
  Synthetic oligonucleotide: FAS-3553
uugcacaaaugggcauuccugucc

SEQ ID NO: 30388 - RNA, 18 nt, Artificial Sequence
  Synthetic oligonucleotide: FAS-3554
cagcuccgccugggcagc

SEQ ID NO: 30389 - RNA, 19 nt, Artificial Sequence
  Synthetic oligonucleotide: FAS-3555
gcagcuccgccugggcagc

SEQ ID NO: 30390 - RNA, 20 nt, Artificial Sequence
  Synthetic oligonucleotide: FAS-1182
ggcagcuccgccugggcagc

SEQ ID NO: 30391 - RNA, 21 nt, Artificial Sequence
  Synthetic oligonucleotide: FAS-3556
aggcagcuccgccugggcagc

SEQ ID NO: 30392 - RNA, 22 nt, Artificial Sequence
  Synthetic oligonucleotide: FAS-3557
gaggcagcuccgccugggcagc

SEQ ID NO: 30393 - RNA, 23 nt, Artificial Sequence
  Synthetic oligonucleotide: FAS-3558
agaggcagcuccgccugggcagc

SEQ ID NO: 30394 - RNA, 24 nt, Artificial Sequence
  Synthetic oligonucleotide: FAS-3559
aagaggcagcuccgccugggcagc

SEQ ID NO: 30395 - RNA, 18 nt, Artificial Sequence
  Synthetic oligonucleotide: FAS-3560
gcggguccaccaacccgc

SEQ ID NO: 30396 - RNA, 19 nt, Artificial Sequence
  Synthetic oligonucleotide: FAS-3561
agcggguccaccaacccgc

SEQ ID NO: 30397 - RNA, 20 nt, Artificial Sequence
  Synthetic oligonucleotide: FAS-705
gagcggguccaccaacccgc

SEQ ID NO: 30398 - RNA, 21 nt, Artificial Sequence
  Synthetic oligonucleotide: FAS-3562
ugagcggguccaccaacccgc

SEQ ID NO: 30399 - RNA, 22 nt, Artificial Sequence
  Synthetic oligonucleotide: FAS-3563
cugagcggguccaccaacccgc

SEQ ID NO: 30400 - RNA, 23 nt, Artificial Sequence
  Synthetic oligonucleotide: FAS-3564
acugagcggguccaccaacccgc

SEQ ID NO: 30401 - RNA, 24 nt, Artificial Sequence
  Synthetic oligonucleotide: FAS-3565
uacugagcggguccaccaacccgc

SEQ ID NO: 30402 - RNA, 18 nt, Artificial Sequence
  Synthetic oligonucleotide: FAS-3566
gagaagaggcagcuccgc

SEQ ID NO: 30403 - RNA, 19 nt, Artificial Sequence
  Synthetic oligonucleotide: FAS-3567
ggagaagaggcagcuccgc

SEQ ID NO: 30404 - RNA, 20 nt, Artificial Sequence
  Synthetic oligonucleotide: FAS-1181
gggagaagaggcagcuccgc

SEQ ID NO: 30405 - RNA, 21 nt, Artificial Sequence
  Synthetic oligonucleotide: FAS-3568
cgggagaagaggcagcuccgc

SEQ ID NO: 30406 - RNA, 22 nt, Artificial Sequence
  Synthetic oligonucleotide: FAS-3569
gcgggagaagaggcagcuccgc

SEQ ID NO: 30407 - RNA, 23 nt, Artificial Sequence
  Synthetic oligonucleotide: FAS-3570
cgcgggagaagaggcagcuccgc

SEQ ID NO: 30408 - RNA, 24 nt, Artificial Sequence
  Synthetic oligonucleotide: FAS-3571
ccgcgggagaagaggcagcuccgc

SEQ ID NO: 30409 - RNA, 18 nt, Artificial Sequence
  Synthetic oligonucleotide: FAS-3572
augggaaggaagccucgc

SEQ ID NO: 30410 - RNA, 19 nt, Artificial Sequence
  Synthetic oligonucleotide: FAS-3573
gaugggaaggaagccucgc

SEQ ID NO: 30411 - RNA, 20 nt, Artificial Sequence
  Synthetic oligonucleotide: FAS-722
ggaugggaaggaagccucgc

SEQ ID NO: 30412 - RNA, 21 nt, Artificial Sequence
  Synthetic oligonucleotide: FAS-3574
aggaugggaaggaagccucgc

SEQ ID NO: 30413 - RNA, 22 nt, Artificial Sequence
  Synthetic oligonucleotide: FAS-3575
gaggaugggaaggaagccucgc

SEQ ID NO: 30414 - RNA, 23 nt, Artificial Sequence
  Synthetic oligonucleotide: FAS-3576
ggaggaugggaaggaagccucgc

SEQ ID NO: 30415 - RNA, 24 nt, Artificial Sequence
  Synthetic oligonucleotide: FAS-3577
aggaggaugggaaggaagccucgc

SEQ ID NO: 30416 - RNA, 18 nt, Artificial Sequence
  Synthetic oligonucleotide: FAS-3578
guaagccuccacccgggc

SEQ ID NO: 30417 - RNA, 19 nt, Artificial Sequence
  Synthetic oligonucleotide: FAS-3579
gguaagccuccacccgggc

SEQ ID NO: 30418 - RNA, 20 nt, Artificial Sequence
  Synthetic oligonucleotide: FAS-694
ggguaagccuccacccgggc

SEQ ID NO: 30419 - RNA, 21 nt, Artificial Sequence
  Synthetic oligonucleotide: FAS-3580
gggguaagccuccacccgggc

SEQ ID NO: 30420 - RNA, 22 nt, Artificial Sequence
  Synthetic oligonucleotide: FAS-3581
cgggguaagccuccacccgggc

SEQ ID NO: 30421 - RNA, 23 nt, Artificial Sequence
  Synthetic oligonucleotide: FAS-3582
acgggguaagccuccacccgggc

SEQ ID NO: 30422 - RNA, 24 nt, Artificial Sequence
  Synthetic oligonucleotide: FAS-3583
gacgggguaagccuccacccgggc

SEQ ID NO: 30423 - RNA, 18 nt, Artificial Sequence
  Synthetic oligonucleotide: FAS-3584
ccugugugucacucuugc

SEQ ID NO: 30424 - RNA, 19 nt, Artificial Sequence
  Synthetic oligonucleotide: FAS-3585
accugugugucacucuugc

SEQ ID NO: 30425 - RNA, 20 nt, Artificial Sequence
  Synthetic oligonucleotide: FAS-1187
caccugugugucacucuugc

SEQ ID NO: 30426 - RNA, 21 nt, Artificial Sequence
  Synthetic oligonucleotide: FAS-3586
acaccugugugucacucuugc

SEQ ID NO: 30427 - RNA, 22 nt, Artificial Sequence
  Synthetic oligonucleotide: FAS-3587
aacaccugugugucacucuugc

SEQ ID NO: 30428 - RNA, 23 nt, Artificial Sequence
  Synthetic oligonucleotide: FAS-3588
gaacaccugugugucacucuugc

SEQ ID NO: 30429 - RNA, 24 nt, Artificial Sequence
  Synthetic oligonucleotide: FAS-3589
ugaacaccugugugucacucuugc

SEQ ID NO: 30430 - RNA, 18 nt, Artificial Sequence
  Synthetic oligonucleotide: FAS-3590
acuucaggugaggaccuc

SEQ ID NO: 30431 - RNA, 19 nt, Artificial Sequence
  Synthetic oligonucleotide: FAS-3591
cacuucaggugaggaccuc

SEQ ID NO: 30432 - RNA, 20 nt, Artificial Sequence
  Synthetic oligonucleotide: FAS-1232
ucacuucaggugaggaccuc

SEQ ID NO: 30433 - RNA, 21 nt, Artificial Sequence
  Synthetic oligonucleotide: FAS-3592
cucacuucaggugaggaccuc

SEQ ID NO: 30434 - RNA, 22 nt, Artificial Sequence
  Synthetic oligonucleotide: FAS-3593
gcucacuucaggugaggaccuc

SEQ ID NO: 30435 - RNA, 23 nt, Artificial Sequence
  Synthetic oligonucleotide: FAS-3594
ugcucacuucaggugaggaccuc

SEQ ID NO: 30436 - RNA, 24 nt, Artificial Sequence
  Synthetic oligonucleotide: FAS-3595
augcucacuucaggugaggaccuc

SEQ ID NO: 30437 - RNA, 18 nt, Artificial Sequence
  Synthetic oligonucleotide: FAS-3596
gagaucagagacgagcuc

SEQ ID NO: 30438 - RNA, 19 nt, Artificial Sequence
  Synthetic oligonucleotide: FAS-3597
cgagaucagagacgagcuc

SEQ ID NO: 30439 - RNA, 20 nt, Artificial Sequence
  Synthetic oligonucleotide: FAS-1190
gcgagaucagagacgagcuc

SEQ ID NO: 30440 - RNA, 21 nt, Artificial Sequence
  Synthetic oligonucleotide: FAS-3598
cgcgagaucagagacgagcuc

SEQ ID NO: 30441 - RNA, 22 nt, Artificial Sequence
  Synthetic oligonucleotide: FAS-3599
gcgcgagaucagagacgagcuc

SEQ ID NO: 30442 - RNA, 23 nt, Artificial Sequence
  Synthetic oligonucleotide: FAS-3600
ugcgcgagaucagagacgagcuc

SEQ ID NO: 30443 - RNA, 24 nt, Artificial Sequence
  Synthetic oligonucleotide: FAS-3601
uugcgcgagaucagagacgagcuc

SEQ ID NO: 30444 - RNA, 18 nt, Artificial Sequence
  Synthetic oligonucleotide: FAS-3602
ccuuaguuuuuauuucuc

SEQ ID NO: 30445 - RNA, 19 nt, Artificial Sequence
  Synthetic oligonucleotide: FAS-3603
cccuuaguuuuuauuucuc

SEQ ID NO: 30446 - RNA, 20 nt, Artificial Sequence
  Synthetic oligonucleotide: FAS-1270
ccccuuaguuuuuauuucuc

SEQ ID NO: 30447 - RNA, 21 nt, Artificial Sequence
  Synthetic oligonucleotide: FAS-3604
gccccuuaguuuuuauuucuc

SEQ ID NO: 30448 - RNA, 22 nt, Artificial Sequence
  Synthetic oligonucleotide: FAS-3605
ggccccuuaguuuuuauuucuc

SEQ ID NO: 30449 - RNA, 23 nt, Artificial Sequence
  Synthetic oligonucleotide: FAS-3606
gggccccuuaguuuuuauuucuc

SEQ ID NO: 30450 - RNA, 24 nt, Artificial Sequence
  Synthetic oligonucleotide: FAS-3607
agggccccuuaguuuuuauuucuc

SEQ ID NO: 30451 - RNA, 18 nt, Artificial Sequence
  Synthetic oligonucleotide: FAS-3608
ugggaaguuggggagguc

SEQ ID NO: 30452 - RNA, 19 nt, Artificial Sequence
  Synthetic oligonucleotide: FAS-3609
cugggaaguuggggagguc

SEQ ID NO: 30453 - RNA, 20 nt, Artificial Sequence
  Synthetic oligonucleotide: FAS-1240
ccugggaaguuggggagguc

SEQ ID NO: 30454 - RNA, 21 nt, Artificial Sequence
  Synthetic oligonucleotide: FAS-3610
accugggaaguuggggagguc

SEQ ID NO: 30455 - RNA, 22 nt, Artificial Sequence
  Synthetic oligonucleotide: FAS-3611
aaccugggaaguuggggagguc

SEQ ID NO: 30456 - RNA, 23 nt, Artificial Sequence
  Synthetic oligonucleotide: FAS-3612
caaccugggaaguuggggagguc

SEQ ID NO: 30457 - RNA, 24 nt, Artificial Sequence
  Synthetic oligonucleotide: FAS-3613
ucaaccugggaaguuggggagguc

SEQ ID NO: 30458 - RNA, 18 nt, Artificial Sequence
  Synthetic oligonucleotide: FAS-3614
cgaaaagccccggugguc

SEQ ID NO: 30459 - RNA, 19 nt, Artificial Sequence
  Synthetic oligonucleotide: FAS-3615
acgaaaagccccggugguc

SEQ ID NO: 30460 - RNA, 20 nt, Artificial Sequence
  Synthetic oligonucleotide: FAS-717
cacgaaaagccccggugguc

SEQ ID NO: 30461 - RNA, 21 nt, Artificial Sequence
  Synthetic oligonucleotide: FAS-3616
ucacgaaaagccccggugguc

SEQ ID NO: 30462 - RNA, 22 nt, Artificial Sequence
  Synthetic oligonucleotide: FAS-3617
cucacgaaaagccccggugguc

SEQ ID NO: 30463 - RNA, 23 nt, Artificial Sequence
  Synthetic oligonucleotide: FAS-3618
gcucacgaaaagccccggugguc

SEQ ID NO: 30464 - RNA, 24 nt, Artificial Sequence
  Synthetic oligonucleotide: FAS-3619
agcucacgaaaagccccggugguc

SEQ ID NO: 30465 - RNA, 18 nt, Artificial Sequence
  Synthetic oligonucleotide: FAS-3620
caaaugggcauuccuguc

SEQ ID NO: 30466 - RNA, 19 nt, Artificial Sequence
  Synthetic oligonucleotide: FAS-3621
acaaaugggcauuccuguc

SEQ ID NO: 30467 - RNA, 20 nt, Artificial Sequence
  Synthetic oligonucleotide: FAS-1227
cacaaaugggcauuccuguc

SEQ ID NO: 30468 - RNA, 21 nt, Artificial Sequence
  Synthetic oligonucleotide: FAS-3622
gcacaaaugggcauuccuguc

SEQ ID NO: 30469 - RNA, 22 nt, Artificial Sequence
  Synthetic oligonucleotide: FAS-3623
ugcacaaaugggcauuccuguc

SEQ ID NO: 30470 - RNA, 23 nt, Artificial Sequence
  Synthetic oligonucleotide: FAS-3624
uugcacaaaugggcauuccuguc

SEQ ID NO: 30471 - RNA, 24 nt, Artificial Sequence
  Synthetic oligonucleotide: FAS-3625
guugcacaaaugggcauuccuguc

SEQ ID NO: 30472 - RNA, 18 nt, Artificial Sequence
  Synthetic oligonucleotide: FAS-3626
uaguuuuuauuucucaag

SEQ ID NO: 30473 - RNA, 19 nt, Artificial Sequence
  Synthetic oligonucleotide: FAS-3627
uuaguuuuuauuucucaag

SEQ ID NO: 30474 - RNA, 20 nt, Artificial Sequence
  Synthetic oligonucleotide: FAS-787
cuuaguuuuuauuucucaag

SEQ ID NO: 30475 - RNA, 21 nt, Artificial Sequence
  Synthetic oligonucleotide: FAS-3628
ccuuaguuuuuauuucucaag

SEQ ID NO: 30476 - RNA, 22 nt, Artificial Sequence
  Synthetic oligonucleotide: FAS-3629
cccuuaguuuuuauuucucaag

SEQ ID NO: 30477 - RNA, 23 nt, Artificial Sequence
  Synthetic oligonucleotide: FAS-3630
ccccuuaguuuuuauuucucaag

SEQ ID NO: 30478 - RNA, 24 nt, Artificial Sequence
  Synthetic oligonucleotide: FAS-3631
gccccuuaguuuuuauuucucaag

SEQ ID NO: 30479 - RNA, 18 nt, Artificial Sequence
  Synthetic oligonucleotide: FAS-3632
guaguucaaccugggaag

SEQ ID NO: 30480 - RNA, 19 nt, Artificial Sequence
  Synthetic oligonucleotide: FAS-3633
uguaguucaaccugggaag

SEQ ID NO: 30481 - RNA, 20 nt, Artificial Sequence
  Synthetic oligonucleotide: FAS-1236
cuguaguucaaccugggaag

SEQ ID NO: 30482 - RNA, 21 nt, Artificial Sequence
  Synthetic oligonucleotide: FAS-3634
gcuguaguucaaccugggaag

SEQ ID NO: 30483 - RNA, 22 nt, Artificial Sequence
  Synthetic oligonucleotide: FAS-3635
ugcuguaguucaaccugggaag

SEQ ID NO: 30484 - RNA, 23 nt, Artificial Sequence
  Synthetic oligonucleotide: FAS-3636
cugcuguaguucaaccugggaag

SEQ ID NO: 30485 - RNA, 24 nt, Artificial Sequence
  Synthetic oligonucleotide: FAS-3637
ucugcuguaguucaaccugggaag

SEQ ID NO: 30486 - RNA, 18 nt, Artificial Sequence
  Synthetic oligonucleotide: FAS-3638
ccuauccccgggacuaag

SEQ ID NO: 30487 - RNA, 19 nt, Artificial Sequence
  Synthetic oligonucleotide: FAS-3639
gccuauccccgggacuaag

SEQ ID NO: 30488 - RNA, 20 nt, Artificial Sequence
  Synthetic oligonucleotide: FAS-1159
ugccuauccccgggacuaag

SEQ ID NO: 30489 - RNA, 21 nt, Artificial Sequence
  Synthetic oligonucleotide: FAS-3640
uugccuauccccgggacuaag

SEQ ID NO: 30490 - RNA, 22 nt, Artificial Sequence
  Synthetic oligonucleotide: FAS-3641
uuugccuauccccgggacuaag

SEQ ID NO: 30491 - RNA, 23 nt, Artificial Sequence
  Synthetic oligonucleotide: FAS-3642
cuuugccuauccccgggacuaag

SEQ ID NO: 30492 - RNA, 24 nt, Artificial Sequence
  Synthetic oligonucleotide: FAS-3643
acuuugccuauccccgggacuaag

SEQ ID NO: 30493 - RNA, 18 nt, Artificial Sequence
  Synthetic oligonucleotide: FAS-3644
aagccuccacccgggcag

SEQ ID NO: 30494 - RNA, 19 nt, Artificial Sequence
  Synthetic oligonucleotide: FAS-3645
uaagccuccacccgggcag

SEQ ID NO: 30495 - RNA, 20 nt, Artificial Sequence
  Synthetic oligonucleotide: FAS-1164
guaagccuccacccgggcag

SEQ ID NO: 30496 - RNA, 21 nt, Artificial Sequence
  Synthetic oligonucleotide: FAS-3646
gguaagccuccacccgggcag

SEQ ID NO: 30497 - RNA, 22 nt, Artificial Sequence
  Synthetic oligonucleotide: FAS-3647
ggguaagccuccacccgggcag

SEQ ID NO: 30498 - RNA, 23 nt, Artificial Sequence
  Synthetic oligonucleotide: FAS-3648
gggguaagccuccacccgggcag

SEQ ID NO: 30499 - RNA, 24 nt, Artificial Sequence
  Synthetic oligonucleotide: FAS-3649
cgggguaagccuccacccgggcag

SEQ ID NO: 30500 - RNA, 18 nt, Artificial Sequence
  Synthetic oligonucleotide: FAS-3650
cuggcaugcucacuucag

SEQ ID NO: 30501 - RNA, 19 nt, Artificial Sequence
  Synthetic oligonucleotide: FAS-3651
gcuggcaugcucacuucag

SEQ ID NO: 30502 - RNA, 20 nt, Artificial Sequence
  Synthetic oligonucleotide: FAS-1229
ggcuggcaugcucacuucag

SEQ ID NO: 30503 - RNA, 21 nt, Artificial Sequence
  Synthetic oligonucleotide: FAS-3652
uggcuggcaugcucacuucag

SEQ ID NO: 30504 - RNA, 22 nt, Artificial Sequence
  Synthetic oligonucleotide: FAS-3653
guggcuggcaugcucacuucag

SEQ ID NO: 30505 - RNA, 23 nt, Artificial Sequence
  Synthetic oligonucleotide: FAS-3654
aguggcuggcaugcucacuucag

SEQ ID NO: 30506 - RNA, 24 nt, Artificial Sequence
  Synthetic oligonucleotide: FAS-3655
caguggcuggcaugcucacuucag

SEQ ID NO: 30507 - RNA, 18 nt, Artificial Sequence
  Synthetic oligonucleotide: FAS-3656
ucuugcgcgagaucagag

SEQ ID NO: 30508 - RNA, 19 nt, Artificial Sequence
  Synthetic oligonucleotide: FAS-3657
cucuugcgcgagaucagag

SEQ ID NO: 30509 - RNA, 20 nt, Artificial Sequence
  Synthetic oligonucleotide: FAS-1189
acucuugcgcgagaucagag

SEQ ID NO: 30510 - RNA, 21 nt, Artificial Sequence
  Synthetic oligonucleotide: FAS-3658
cacucuugcgcgagaucagag

SEQ ID NO: 30511 - RNA, 22 nt, Artificial Sequence
  Synthetic oligonucleotide: FAS-3659
ucacucuugcgcgagaucagag

SEQ ID NO: 30512 - RNA, 23 nt, Artificial Sequence
  Synthetic oligonucleotide: FAS-3660
gucacucuugcgcgagaucagag

SEQ ID NO: 30513 - RNA, 24 nt, Artificial Sequence
  Synthetic oligonucleotide: FAS-3661
ugucacucuugcgcgagaucagag

SEQ ID NO: 30514 - RNA, 18 nt, Artificial Sequence
  Synthetic oligonucleotide: FAS-3662
cugcgcgcggguagggag

SEQ ID NO: 30515 - RNA, 19 nt, Artificial Sequence
  Synthetic oligonucleotide: FAS-3663
ccugcgcgcggguagggag

SEQ ID NO: 30516 - RNA, 20 nt, Artificial Sequence
  Synthetic oligonucleotide: FAS-739
gccugcgcgcggguagggag

SEQ ID NO: 30517 - RNA, 21 nt, Artificial Sequence
  Synthetic oligonucleotide: FAS-3664
ggccugcgcgcggguagggag

SEQ ID NO: 30518 - RNA, 22 nt, Artificial Sequence
  Synthetic oligonucleotide: FAS-3665
uggccugcgcgcggguagggag

SEQ ID NO: 30519 - RNA, 23 nt, Artificial Sequence
  Synthetic oligonucleotide: FAS-3666
uuggccugcgcgcggguagggag

SEQ ID NO: 30520 - RNA, 24 nt, Artificial Sequence
  Synthetic oligonucleotide: FAS-3667
cuuggccugcgcgcggguagggag

SEQ ID NO: 30521 - RNA, 18 nt, Artificial Sequence
  Synthetic oligonucleotide: FAS-3668
uccaccaacccgcgggag

SEQ ID NO: 30522 - RNA, 19 nt, Artificial Sequence
  Synthetic oligonucleotide: FAS-3669
guccaccaacccgcgggag

SEQ ID NO: 30523 - RNA, 20 nt, Artificial Sequence
  Synthetic oligonucleotide: FAS-1180
gguccaccaacccgcgggag

SEQ ID NO: 30524 - RNA, 21 nt, Artificial Sequence
  Synthetic oligonucleotide: FAS-3670
ggguccaccaacccgcgggag

SEQ ID NO: 30525 - RNA, 22 nt, Artificial Sequence
  Synthetic oligonucleotide: FAS-3671
cggguccaccaacccgcgggag

SEQ ID NO: 30526 - RNA, 23 nt, Artificial Sequence
  Synthetic oligonucleotide: FAS-3672
gcggguccaccaacccgcgggag

SEQ ID NO: 30527 - RNA, 24 nt, Artificial Sequence
  Synthetic oligonucleotide: FAS-3673
agcggguccaccaacccgcgggag

SEQ ID NO: 30528 - RNA, 18 nt, Artificial Sequence
  Synthetic oligonucleotide: FAS-3674
agcggguccaccaacccg

SEQ ID NO: 30529 - RNA, 19 nt, Artificial Sequence
  Synthetic oligonucleotide: FAS-3675
gagcggguccaccaacccg

SEQ ID NO: 30530 - RNA, 20 nt, Artificial Sequence
  Synthetic oligonucleotide: FAS-704
ugagcggguccaccaacccg

SEQ ID NO: 30531 - RNA, 21 nt, Artificial Sequence
  Synthetic oligonucleotide: FAS-3676
cugagcggguccaccaacccg

SEQ ID NO: 30532 - RNA, 22 nt, Artificial Sequence
  Synthetic oligonucleotide: FAS-3677
acugagcggguccaccaacccg

SEQ ID NO: 30533 - RNA, 23 nt, Artificial Sequence
  Synthetic oligonucleotide: FAS-3678
uacugagcggguccaccaacccg

SEQ ID NO: 30534 - RNA, 24 nt, Artificial Sequence
  Synthetic oligonucleotide: FAS-3679
guacugagcggguccaccaacccg

SEQ ID NO: 30535 - RNA, 18 nt, Artificial Sequence
  Synthetic oligonucleotide: FAS-3680
agaauggagcucagagcg

SEQ ID NO: 30536 - RNA, 19 nt, Artificial Sequence
  Synthetic oligonucleotide: FAS-3681
gagaauggagcucagagcg

SEQ ID NO: 30537 - RNA, 20 nt, Artificial Sequence
  Synthetic oligonucleotide: FAS-1247
ggagaauggagcucagagcg

SEQ ID NO: 30538 - RNA, 21 nt, Artificial Sequence
  Synthetic oligonucleotide: FAS-3682
aggagaauggagcucagagcg

SEQ ID NO: 30539 - RNA, 22 nt, Artificial Sequence
  Synthetic oligonucleotide: FAS-3683
aaggagaauggagcucagagcg

SEQ ID NO: 30540 - RNA, 23 nt, Artificial Sequence
  Synthetic oligonucleotide: FAS-3684
gaaggagaauggagcucagagcg

SEQ ID NO: 30541 - RNA, 24 nt, Artificial Sequence
  Synthetic oligonucleotide: FAS-3685
ugaaggagaauggagcucagagcg

SEQ ID NO: 30542 - RNA, 18 nt, Artificial Sequence
  Synthetic oligonucleotide: FAS-3686
gaugggaaggaagccucg

SEQ ID NO: 30543 - RNA, 19 nt, Artificial Sequence
  Synthetic oligonucleotide: FAS-3687
ggaugggaaggaagccucg

SEQ ID NO: 30544 - RNA, 20 nt, Artificial Sequence
  Synthetic oligonucleotide: FAS-1199
aggaugggaaggaagccucg

SEQ ID NO: 30545 - RNA, 21 nt, Artificial Sequence
  Synthetic oligonucleotide: FAS-3688
gaggaugggaaggaagccucg

SEQ ID NO: 30546 - RNA, 22 nt, Artificial Sequence
  Synthetic oligonucleotide: FAS-3689
ggaggaugggaaggaagccucg

SEQ ID NO: 30547 - RNA, 23 nt, Artificial Sequence
  Synthetic oligonucleotide: FAS-3690
aggaggaugggaaggaagccucg

SEQ ID NO: 30548 - RNA, 24 nt, Artificial Sequence
  Synthetic oligonucleotide: FAS-3691
caggaggaugggaaggaagccucg

SEQ ID NO: 30549 - RNA, 18 nt, Artificial Sequence
  Synthetic oligonucleotide: FAS-3692
cauagggcucugaaaagg

SEQ ID NO: 30550 - RNA, 19 nt, Artificial Sequence
  Synthetic oligonucleotide: FAS-3693
ccauagggcucugaaaagg

SEQ ID NO: 30551 - RNA, 20 nt, Artificial Sequence
  Synthetic oligonucleotide: FAS-1269
gccauagggcucugaaaagg

SEQ ID NO: 30552 - RNA, 21 nt, Artificial Sequence
  Synthetic oligonucleotide: FAS-3694
cgccauagggcucugaaaagg

SEQ ID NO: 30553 - RNA, 22 nt, Artificial Sequence
  Synthetic oligonucleotide: FAS-3695
gcgccauagggcucugaaaagg

SEQ ID NO: 30554 - RNA, 23 nt, Artificial Sequence
  Synthetic oligonucleotide: FAS-3696
ugcgccauagggcucugaaaagg

SEQ ID NO: 30555 - RNA, 24 nt, Artificial Sequence
  Synthetic oligonucleotide: FAS-3697
uugcgccauagggcucugaaaagg

SEQ ID NO: 30556 - RNA, 18 nt, Artificial Sequence
  Synthetic oligonucleotide: FAS-3698
ggagggggagaagucagg

SEQ ID NO: 30557 - RNA, 19 nt, Artificial Sequence
  Synthetic oligonucleotide: FAS-3699
gggagggggagaagucagg

SEQ ID NO: 30558 - RNA, 20 nt, Artificial Sequence
  Synthetic oligonucleotide: FAS-1220
agggagggggagaagucagg

SEQ ID NO: 30559 - RNA, 21 nt, Artificial Sequence
  Synthetic oligonucleotide: FAS-3700
uagggagggggagaagucagg

SEQ ID NO: 30560 - RNA, 22 nt, Artificial Sequence
  Synthetic oligonucleotide: FAS-3701
guagggagggggagaagucagg

SEQ ID NO: 30561 - RNA, 23 nt, Artificial Sequence
  Synthetic oligonucleotide: FAS-3702
gguagggagggggagaagucagg

SEQ ID NO: 30562 - RNA, 24 nt, Artificial Sequence
  Synthetic oligonucleotide: FAS-3703
ggguagggagggggagaagucagg

SEQ ID NO: 30563 - RNA, 18 nt, Artificial Sequence
  Synthetic oligonucleotide: FAS-2345
gagagggcucaccagagg

SEQ ID NO: 30564 - RNA, 19 nt, Artificial Sequence
  Synthetic oligonucleotide: FAS-2346
ggagagggcucaccagagg

SEQ ID NO: 30565 - RNA, 20 nt, Artificial Sequence
  Synthetic oligonucleotide: FAS-104
aggagagggcucaccagagg

SEQ ID NO: 30566 - RNA, 21 nt, Artificial Sequence
  Synthetic oligonucleotide: FAS-2347
caggagagggcucaccagagg

SEQ ID NO: 30567 - RNA, 22 nt, Artificial Sequence
  Synthetic oligonucleotide: FAS-2348
gcaggagagggcucaccagagg

SEQ ID NO: 30568 - RNA, 23 nt, Artificial Sequence
  Synthetic oligonucleotide: FAS-2349
ggcaggagagggcucaccagagg

SEQ ID NO: 30569 - RNA, 24 nt, Artificial Sequence
  Synthetic oligonucleotide: FAS-2350
gggcaggagagggcucaccagagg

SEQ ID NO: 30570 - RNA, 18 nt, Artificial Sequence
  Synthetic oligonucleotide: FAS-3704
gccccgguggucaggagg

SEQ ID NO: 30571 - RNA, 19 nt, Artificial Sequence
  Synthetic oligonucleotide: FAS-3705
agccccgguggucaggagg

SEQ ID NO: 30572 - RNA, 20 nt, Artificial Sequence
  Synthetic oligonucleotide: FAS-1194
aagccccgguggucaggagg

SEQ ID NO: 30573 - RNA, 21 nt, Artificial Sequence
  Synthetic oligonucleotide: FAS-3706
aaagccccgguggucaggagg

SEQ ID NO: 30574 - RNA, 22 nt, Artificial Sequence
  Synthetic oligonucleotide: FAS-3707
aaaagccccgguggucaggagg

SEQ ID NO: 30575 - RNA, 23 nt, Artificial Sequence
  Synthetic oligonucleotide: FAS-3708
gaaaagccccgguggucaggagg

SEQ ID NO: 30576 - RNA, 24 nt, Artificial Sequence
  Synthetic oligonucleotide: FAS-3709
cgaaaagccccgguggucaggagg

SEQ ID NO: 30577 - RNA, 18 nt, Artificial Sequence
  Synthetic oligonucleotide: FAS-3710
ugcgcgcggguagggagg

SEQ ID NO: 30578 - RNA, 19 nt, Artificial Sequence
  Synthetic oligonucleotide: FAS-3711
cugcgcgcggguagggagg

SEQ ID NO: 30579 - RNA, 20 nt, Artificial Sequence
  Synthetic oligonucleotide: FAS-740
ccugcgcgcggguagggagg

SEQ ID NO: 30580 - RNA, 21 nt, Artificial Sequence
  Synthetic oligonucleotide: FAS-3712
gccugcgcgcggguagggagg

SEQ ID NO: 30581 - RNA, 22 nt, Artificial Sequence
  Synthetic oligonucleotide: FAS-3713
ggccugcgcgcggguagggagg

SEQ ID NO: 30582 - RNA, 23 nt, Artificial Sequence
  Synthetic oligonucleotide: FAS-3714
uggccugcgcgcggguagggagg

SEQ ID NO: 30583 - RNA, 24 nt, Artificial Sequence
  Synthetic oligonucleotide: FAS-3715
uuggccugcgcgcggguagggagg

SEQ ID NO: 30584 - RNA, 18 nt, Artificial Sequence
  Synthetic oligonucleotide: FAS-3716
ggagaagucagggugagg

SEQ ID NO: 30585 - RNA, 19 nt, Artificial Sequence
  Synthetic oligonucleotide: FAS-3717
gggagaagucagggugagg

SEQ ID NO: 30586 - RNA, 20 nt, Artificial Sequence
  Synthetic oligonucleotide: FAS-1223
ggggagaagucagggugagg

SEQ ID NO: 30587 - RNA, 21 nt, Artificial Sequence
  Synthetic oligonucleotide: FAS-3718
gggggagaagucagggugagg

SEQ ID NO: 30588 - RNA, 22 nt, Artificial Sequence
  Synthetic oligonucleotide: FAS-3719
agggggagaagucagggugagg

SEQ ID NO: 30589 - RNA, 23 nt, Artificial Sequence
  Synthetic oligonucleotide: FAS-3720
gagggggagaagucagggugagg

SEQ ID NO: 30590 - RNA, 24 nt, Artificial Sequence
  Synthetic oligonucleotide: FAS-3721
ggagggggagaagucagggugagg

SEQ ID NO: 30591 - RNA, 18 nt, Artificial Sequence
  Synthetic oligonucleotide: FAS-3722
ggccugcgcgcggguagg

SEQ ID NO: 30592 - RNA, 19 nt, Artificial Sequence
  Synthetic oligonucleotide: FAS-3723
uggccugcgcgcggguagg

SEQ ID NO: 30593 - RNA, 20 nt, Artificial Sequence
  Synthetic oligonucleotide: FAS-1213
uuggccugcgcgcggguagg

SEQ ID NO: 30594 - RNA, 21 nt, Artificial Sequence
  Synthetic oligonucleotide: FAS-3724
cuuggccugcgcgcggguagg

SEQ ID NO: 30595 - RNA, 22 nt, Artificial Sequence
  Synthetic oligonucleotide: FAS-3725
acuuggccugcgcgcggguagg

SEQ ID NO: 30596 - RNA, 23 nt, Artificial Sequence
  Synthetic oligonucleotide: FAS-3726
aacuuggccugcgcgcggguagg

SEQ ID NO: 30597 - RNA, 24 nt, Artificial Sequence
  Synthetic oligonucleotide: FAS-3727
caacuuggccugcgcgcggguagg

SEQ ID NO: 30598 - RNA, 18 nt, Artificial Sequence
  Synthetic oligonucleotide: FAS-3728
ggguccaccaacccgcgg

SEQ ID NO: 30599 - RNA, 19 nt, Artificial Sequence
  Synthetic oligonucleotide: FAS-3729
cggguccaccaacccgcgg

SEQ ID NO: 30600 - RNA, 20 nt, Artificial Sequence
  Synthetic oligonucleotide: FAS-1179
gcggguccaccaacccgcgg

SEQ ID NO: 30601 - RNA, 21 nt, Artificial Sequence
  Synthetic oligonucleotide: FAS-3730
agcggguccaccaacccgcgg

SEQ ID NO: 30602 - RNA, 22 nt, Artificial Sequence
  Synthetic oligonucleotide: FAS-3731
gagcggguccaccaacccgcgg

SEQ ID NO: 30603 - RNA, 23 nt, Artificial Sequence
  Synthetic oligonucleotide: FAS-3732
ugagcggguccaccaacccgcgg

SEQ ID NO: 30604 - RNA, 24 nt, Artificial Sequence
  Synthetic oligonucleotide: FAS-3733
cugagcggguccaccaacccgcgg

SEQ ID NO: 30605 - RNA, 18 nt, Artificial Sequence
  Synthetic oligonucleotide: FAS-3734
gccugcgcgcggguaggg

SEQ ID NO: 30606 - RNA, 19 nt, Artificial Sequence
  Synthetic oligonucleotide: FAS-3735
ggccugcgcgcggguaggg

SEQ ID NO: 30607 - RNA, 20 nt, Artificial Sequence
  Synthetic oligonucleotide: FAS-737
uggccugcgcgcggguaggg

SEQ ID NO: 30608 - RNA, 21 nt, Artificial Sequence
  Synthetic oligonucleotide: FAS-3736
uuggccugcgcgcggguaggg

SEQ ID NO: 30609 - RNA, 22 nt, Artificial Sequence
  Synthetic oligonucleotide: FAS-3737
cuuggccugcgcgcggguaggg

SEQ ID NO: 30610 - RNA, 23 nt, Artificial Sequence
  Synthetic oligonucleotide: FAS-3738
acuuggccugcgcgcggguaggg

SEQ ID NO: 30611 - RNA, 24 nt, Artificial Sequence
  Synthetic oligonucleotide: FAS-3739
aacuuggccugcgcgcggguaggg

SEQ ID NO: 30612 - RNA, 18 nt, Artificial Sequence
  Synthetic oligonucleotide: FAS-3740
gguaagccuccacccggg

SEQ ID NO: 30613 - RNA, 19 nt, Artificial Sequence
  Synthetic oligonucleotide: FAS-3741
ggguaagccuccacccggg

SEQ ID NO: 30614 - RNA, 20 nt, Artificial Sequence
  Synthetic oligonucleotide: FAS-1162
gggguaagccuccacccggg

SEQ ID NO: 30615 - RNA, 21 nt, Artificial Sequence
  Synthetic oligonucleotide: FAS-3742
cgggguaagccuccacccggg

SEQ ID NO: 30616 - RNA, 22 nt, Artificial Sequence
  Synthetic oligonucleotide: FAS-3743
acgggguaagccuccacccggg

SEQ ID NO: 30617 - RNA, 23 nt, Artificial Sequence
  Synthetic oligonucleotide: FAS-3744
gacgggguaagccuccacccggg

SEQ ID NO: 30618 - RNA, 24 nt, Artificial Sequence
  Synthetic oligonucleotide: FAS-3745
agacgggguaagccuccacccggg

SEQ ID NO: 30619 - RNA, 18 nt, Artificial Sequence
  Synthetic oligonucleotide: FAS-3746
cgcuggggaacgcccggg

SEQ ID NO: 30620 - RNA, 19 nt, Artificial Sequence
  Synthetic oligonucleotide: FAS-3747
ucgcuggggaacgcccggg

SEQ ID NO: 30621 - RNA, 20 nt, Artificial Sequence
  Synthetic oligonucleotide: FAS-1204
cucgcuggggaacgcccggg

SEQ ID NO: 30622 - RNA, 21 nt, Artificial Sequence
  Synthetic oligonucleotide: FAS-3748
ccucgcuggggaacgcccggg

SEQ ID NO: 30623 - RNA, 22 nt, Artificial Sequence
  Synthetic oligonucleotide: FAS-3749
gccucgcuggggaacgcccggg

SEQ ID NO: 30624 - RNA, 23 nt, Artificial Sequence
  Synthetic oligonucleotide: FAS-3750
agccucgcuggggaacgcccggg

SEQ ID NO: 30625 - RNA, 24 nt, Artificial Sequence
  Synthetic oligonucleotide: FAS-3751
aagccucgcuggggaacgcccggg

SEQ ID NO: 30626 - RNA, 18 nt, Artificial Sequence
  Synthetic oligonucleotide: FAS-3752
acuuggccugcgcgcggg

SEQ ID NO: 30627 - RNA, 19 nt, Artificial Sequence
  Synthetic oligonucleotide: FAS-3753
aacuuggccugcgcgcggg

SEQ ID NO: 30628 - RNA, 20 nt, Artificial Sequence
  Synthetic oligonucleotide: FAS-1210
caacuuggccugcgcgcggg

SEQ ID NO: 30629 - RNA, 21 nt, Artificial Sequence
  Synthetic oligonucleotide: FAS-3754
gcaacuuggccugcgcgcggg

SEQ ID NO: 30630 - RNA, 22 nt, Artificial Sequence
  Synthetic oligonucleotide: FAS-3755
agcaacuuggccugcgcgcggg

SEQ ID NO: 30631 - RNA, 23 nt, Artificial Sequence
  Synthetic oligonucleotide: FAS-3756
cagcaacuuggccugcgcgcggg

SEQ ID NO: 30632 - RNA, 24 nt, Artificial Sequence
  Synthetic oligonucleotide: FAS-3757
ucagcaacuuggccugcgcgcggg

SEQ ID NO: 30633 - RNA, 18 nt, Artificial Sequence
  Synthetic oligonucleotide: FAS-3758
cgcgcggguagggagggg

SEQ ID NO: 30634 - RNA, 19 nt, Artificial Sequence
  Synthetic oligonucleotide: FAS-3759
gcgcgcggguagggagggg

SEQ ID NO: 30635 - RNA, 20 nt, Artificial Sequence
  Synthetic oligonucleotide: FAS-1218
ugcgcgcggguagggagggg

SEQ ID NO: 30636 - RNA, 21 nt, Artificial Sequence
  Synthetic oligonucleotide: FAS-3760
cugcgcgcggguagggagggg

SEQ ID NO: 30637 - RNA, 22 nt, Artificial Sequence
  Synthetic oligonucleotide: FAS-3761
ccugcgcgcggguagggagggg

SEQ ID NO: 30638 - RNA, 23 nt, Artificial Sequence
  Synthetic oligonucleotide: FAS-3762
gccugcgcgcggguagggagggg

SEQ ID NO: 30639 - RNA, 24 nt, Artificial Sequence
  Synthetic oligonucleotide: FAS-3763
ggccugcgcgcggguagggagggg

SEQ ID NO: 30640 - RNA, 18 nt, Artificial Sequence
  Synthetic oligonucleotide: FAS-3764
gguggucaggaggauggg

SEQ ID NO: 30641 - RNA, 19 nt, Artificial Sequence
  Synthetic oligonucleotide: FAS-3765
cgguggucaggaggauggg

SEQ ID NO: 30642 - RNA, 20 nt, Artificial Sequence
  Synthetic oligonucleotide: FAS-1197
ccgguggucaggaggauggg

SEQ ID NO: 30643 - RNA, 21 nt, Artificial Sequence
  Synthetic oligonucleotide: FAS-3766
cccgguggucaggaggauggg

SEQ ID NO: 30644 - RNA, 22 nt, Artificial Sequence
  Synthetic oligonucleotide: FAS-3767
ccccgguggucaggaggauggg

SEQ ID NO: 30645 - RNA, 23 nt, Artificial Sequence
  Synthetic oligonucleotide: FAS-3768
gccccgguggucaggaggauggg

SEQ ID NO: 30646 - RNA, 24 nt, Artificial Sequence
  Synthetic oligonucleotide: FAS-3769
agccccgguggucaggaggauggg

SEQ ID NO: 30647 - RNA, 18 nt, Artificial Sequence
  Synthetic oligonucleotide: FAS-3770
gggaacgcccggguuggg

SEQ ID NO: 30648 - RNA, 19 nt, Artificial Sequence
  Synthetic oligonucleotide: FAS-3771
ggggaacgcccggguuggg

SEQ ID NO: 30649 - RNA, 20 nt, Artificial Sequence
  Synthetic oligonucleotide: FAS-1208
uggggaacgcccggguuggg

SEQ ID NO: 30650 - RNA, 21 nt, Artificial Sequence
  Synthetic oligonucleotide: FAS-3772
cuggggaacgcccggguuggg

SEQ ID NO: 30651 - RNA, 22 nt, Artificial Sequence
  Synthetic oligonucleotide: FAS-3773
gcuggggaacgcccggguuggg

SEQ ID NO: 30652 - RNA, 23 nt, Artificial Sequence
  Synthetic oligonucleotide: FAS-3774
cgcuggggaacgcccggguuggg

SEQ ID NO: 30653 - RNA, 24 nt, Artificial Sequence
  Synthetic oligonucleotide: FAS-3775
ucgcuggggaacgcccggguuggg

SEQ ID NO: 30654 - RNA, 18 nt, Artificial Sequence
  Synthetic oligonucleotide: FAS-3776
gggaaggaagccucgcug

SEQ ID NO: 30655 - RNA, 19 nt, Artificial Sequence
  Synthetic oligonucleotide: FAS-3777
ugggaaggaagccucgcug

SEQ ID NO: 30656 - RNA, 20 nt, Artificial Sequence
  Synthetic oligonucleotide: FAS-724
augggaaggaagccucgcug

SEQ ID NO: 30657 - RNA, 21 nt, Artificial Sequence
  Synthetic oligonucleotide: FAS-3778
gaugggaaggaagccucgcug

SEQ ID NO: 30658 - RNA, 22 nt, Artificial Sequence
  Synthetic oligonucleotide: FAS-3779
ggaugggaaggaagccucgcug

SEQ ID NO: 30659 - RNA, 23 nt, Artificial Sequence
  Synthetic oligonucleotide: FAS-3780
aggaugggaaggaagccucgcug

SEQ ID NO: 30660 - RNA, 24 nt, Artificial Sequence
  Synthetic oligonucleotide: FAS-3781
gaggaugggaaggaagccucgcug

SEQ ID NO: 30661 - RNA, 18 nt, Artificial Sequence
  Synthetic oligonucleotide: FAS-3782
gggggagaagucagggug

SEQ ID NO: 30662 - RNA, 19 nt, Artificial Sequence
  Synthetic oligonucleotide: FAS-3783
agggggagaagucagggug

SEQ ID NO: 30663 - RNA, 20 nt, Artificial Sequence
  Synthetic oligonucleotide: FAS-743
gagggggagaagucagggug

SEQ ID NO: 30664 - RNA, 21 nt, Artificial Sequence
  Synthetic oligonucleotide: FAS-3784
ggagggggagaagucagggug

SEQ ID NO: 30665 - RNA, 22 nt, Artificial Sequence
  Synthetic oligonucleotide: FAS-3785
gggagggggagaagucagggug

SEQ ID NO: 30666 - RNA, 23 nt, Artificial Sequence
  Synthetic oligonucleotide: FAS-3786
agggagggggagaagucagggug

SEQ ID NO: 30667 - RNA, 24 nt, Artificial Sequence
  Synthetic oligonucleotide: FAS-3787
uagggagggggagaagucagggug

SEQ ID NO: 30668 - RNA, 18 nt, Artificial Sequence
  Synthetic oligonucleotide: FAS-3788
aggagccuuggcuaauug

SEQ ID NO: 30669 - RNA, 19 nt, Artificial Sequence
  Synthetic oligonucleotide: FAS-3789
caggagccuuggcuaauug

SEQ ID NO: 30670 - RNA, 20 nt, Artificial Sequence
  Synthetic oligonucleotide: FAS-1251
acaggagccuuggcuaauug

SEQ ID NO: 30671 - RNA, 21 nt, Artificial Sequence
  Synthetic oligonucleotide: FAS-3790
uacaggagccuuggcuaauug

SEQ ID NO: 30672 - RNA, 22 nt, Artificial Sequence
  Synthetic oligonucleotide: FAS-3791
guacaggagccuuggcuaauug

SEQ ID NO: 30673 - RNA, 23 nt, Artificial Sequence
  Synthetic oligonucleotide: FAS-3792
gguacaggagccuuggcuaauug

SEQ ID NO: 30674 - RNA, 24 nt, Artificial Sequence
  Synthetic oligonucleotide: FAS-3793
ggguacaggagccuuggcuaauug

SEQ ID NO: 30675 - RNA, 18 nt, Artificial Sequence
  Synthetic oligonucleotide: FAS-3794
cacucagagaaagacuug

SEQ ID NO: 30676 - RNA, 19 nt, Artificial Sequence
  Synthetic oligonucleotide: FAS-3795
ucacucagagaaagacuug

SEQ ID NO: 30677 - RNA, 20 nt, Artificial Sequence
  Synthetic oligonucleotide: FAS-772
gucacucagagaaagacuug

SEQ ID NO: 30678 - RNA, 21 nt, Artificial Sequence
  Synthetic oligonucleotide: FAS-3796
agucacucagagaaagacuug

SEQ ID NO: 30679 - RNA, 22 nt, Artificial Sequence
  Synthetic oligonucleotide: FAS-3797
gagucacucagagaaagacuug

SEQ ID NO: 30680 - RNA, 23 nt, Artificial Sequence
  Synthetic oligonucleotide: FAS-3798
ggagucacucagagaaagacuug

SEQ ID NO: 30681 - RNA, 24 nt, Artificial Sequence
  Synthetic oligonucleotide: FAS-3799
uggagucacucagagaaagacuug

SEQ ID NO: 30682 - RNA, 18 nt, Artificial Sequence
  Synthetic oligonucleotide: FAS-3800
gaaguuggggaggucuug

SEQ ID NO: 30683 - RNA, 19 nt, Artificial Sequence
  Synthetic oligonucleotide: FAS-3801
ggaaguuggggaggucuug

SEQ ID NO: 30684 - RNA, 20 nt, Artificial Sequence
  Synthetic oligonucleotide: FAS-1241
gggaaguuggggaggucuug

SEQ ID NO: 30685 - RNA, 21 nt, Artificial Sequence
  Synthetic oligonucleotide: FAS-3802
ugggaaguuggggaggucuug

SEQ ID NO: 30686 - RNA, 22 nt, Artificial Sequence
  Synthetic oligonucleotide: FAS-3803
cugggaaguuggggaggucuug

SEQ ID NO: 30687 - RNA, 23 nt, Artificial Sequence
  Synthetic oligonucleotide: FAS-3804
ccugggaaguuggggaggucuug

SEQ ID NO: 30688 - RNA, 24 nt, Artificial Sequence
  Synthetic oligonucleotide: FAS-3805
accugggaaguuggggaggucuug

SEQ ID NO: 30689 - RNA, 18 nt, Artificial Sequence
  Synthetic oligonucleotide: FAS-3806
guucaaccugggaaguug

SEQ ID NO: 30690 - RNA, 19 nt, Artificial Sequence
  Synthetic oligonucleotide: FAS-3807
aguucaaccugggaaguug

SEQ ID NO: 30691 - RNA, 20 nt, Artificial Sequence
  Synthetic oligonucleotide: FAS-762
uaguucaaccugggaaguug

SEQ ID NO: 30692 - RNA, 21 nt, Artificial Sequence
  Synthetic oligonucleotide: FAS-3808
guaguucaaccugggaaguug

SEQ ID NO: 30693 - RNA, 22 nt, Artificial Sequence
  Synthetic oligonucleotide: FAS-3809
uguaguucaaccugggaaguug

SEQ ID NO: 30694 - RNA, 23 nt, Artificial Sequence
  Synthetic oligonucleotide: FAS-3810
cuguaguucaaccugggaaguug

SEQ ID NO: 30695 - RNA, 24 nt, Artificial Sequence
  Synthetic oligonucleotide: FAS-3811
gcuguaguucaaccugggaaguug

SEQ ID NO: 30696 - RNA, 18 nt, Artificial Sequence
  Synthetic oligonucleotide: FAS-3812
uggggaacgcccggguug

SEQ ID NO: 30697 - RNA, 19 nt, Artificial Sequence
  Synthetic oligonucleotide: FAS-3813
cuggggaacgcccggguug

SEQ ID NO: 30698 - RNA, 20 nt, Artificial Sequence
  Synthetic oligonucleotide: FAS-729
gcuggggaacgcccggguug

SEQ ID NO: 30699 - RNA, 21 nt, Artificial Sequence
  Synthetic oligonucleotide: FAS-3814
cgcuggggaacgcccggguug

SEQ ID NO: 30700 - RNA, 22 nt, Artificial Sequence
  Synthetic oligonucleotide: FAS-3815
ucgcuggggaacgcccggguug

SEQ ID NO: 30701 - RNA, 23 nt, Artificial Sequence
  Synthetic oligonucleotide: FAS-3816
cucgcuggggaacgcccggguug

SEQ ID NO: 30702 - RNA, 24 nt, Artificial Sequence
  Synthetic oligonucleotide: FAS-3817
ccucgcuggggaacgcccggguug

SEQ ID NO: 30703 - RNA, 18 nt, Artificial Sequence
  Synthetic oligonucleotide: FAS-2375
agaugcccagcaugguug

SEQ ID NO: 30704 - RNA, 19 nt, Artificial Sequence
  Synthetic oligonucleotide: FAS-2376
cagaugcccagcaugguug

SEQ ID NO: 30705 - RNA, 20 nt, Artificial Sequence
  Synthetic oligonucleotide: FAS-107
ccagaugcccagcaugguug

SEQ ID NO: 30706 - RNA, 21 nt, Artificial Sequence
  Synthetic oligonucleotide: FAS-2377
uccagaugcccagcaugguug

SEQ ID NO: 30707 - RNA, 22 nt, Artificial Sequence
  Synthetic oligonucleotide: FAS-2378
guccagaugcccagcaugguug

SEQ ID NO: 30708 - RNA, 23 nt, Artificial Sequence
  Synthetic oligonucleotide: FAS-2379
gguccagaugcccagcaugguug

SEQ ID NO: 30709 - RNA, 24 nt, Artificial Sequence
  Synthetic oligonucleotide: FAS-2380
ggguccagaugcccagcaugguug

SEQ ID NO: 30710 - RNA, 18 nt, Artificial Sequence
  Synthetic oligonucleotide: FAS-3818
auguuguggcugcaacau

SEQ ID NO: 30711 - RNA, 19 nt, Artificial Sequence
  Synthetic oligonucleotide: FAS-3819
cauguuguggcugcaacau

SEQ ID NO: 30712 - RNA, 20 nt, Artificial Sequence
  Synthetic oligonucleotide: FAS-1259
ccauguuguggcugcaacau

SEQ ID NO: 30713 - RNA, 21 nt, Artificial Sequence
  Synthetic oligonucleotide: FAS-3820
uccauguuguggcugcaacau

SEQ ID NO: 30714 - RNA, 22 nt, Artificial Sequence
  Synthetic oligonucleotide: FAS-3821
guccauguuguggcugcaacau

SEQ ID NO: 30715 - RNA, 23 nt, Artificial Sequence
  Synthetic oligonucleotide: FAS-3822
uguccauguuguggcugcaacau

SEQ ID NO: 30716 - RNA, 24 nt, Artificial Sequence
  Synthetic oligonucleotide: FAS-3823
cuguccauguuguggcugcaacau

SEQ ID NO: 30717 - RNA, 18 nt, Artificial Sequence
  Synthetic oligonucleotide: FAS-3824
gaauggacaguuaaccau

SEQ ID NO: 30718 - RNA, 19 nt, Artificial Sequence
  Synthetic oligonucleotide: FAS-3825
ggaauggacaguuaaccau

SEQ ID NO: 30719 - RNA, 20 nt, Artificial Sequence
  Synthetic oligonucleotide: FAS-1263
uggaauggacaguuaaccau

SEQ ID NO: 30720 - RNA, 21 nt, Artificial Sequence
  Synthetic oligonucleotide: FAS-3826
cuggaauggacaguuaaccau

SEQ ID NO: 30721 - RNA, 22 nt, Artificial Sequence
  Synthetic oligonucleotide: FAS-3827
ucuggaauggacaguuaaccau

SEQ ID NO: 30722 - RNA, 23 nt, Artificial Sequence
  Synthetic oligonucleotide: FAS-3828
uucuggaauggacaguuaaccau

SEQ ID NO: 30723 - RNA, 24 nt, Artificial Sequence
  Synthetic oligonucleotide: FAS-3829
uuucuggaauggacaguuaaccau

SEQ ID NO: 30724 - RNA, 18 nt, Artificial Sequence
  Synthetic oligonucleotide: FAS-3830
gucacucuugcgcgagau

SEQ ID NO: 30725 - RNA, 19 nt, Artificial Sequence
  Synthetic oligonucleotide: FAS-3831
ugucacucuugcgcgagau

SEQ ID NO: 30726 - RNA, 20 nt, Artificial Sequence
  Synthetic oligonucleotide: FAS-1188
gugucacucuugcgcgagau

SEQ ID NO: 30727 - RNA, 21 nt, Artificial Sequence
  Synthetic oligonucleotide: FAS-3832
ugugucacucuugcgcgagau

SEQ ID NO: 30728 - RNA, 22 nt, Artificial Sequence
  Synthetic oligonucleotide: FAS-3833
gugugucacucuugcgcgagau

SEQ ID NO: 30729 - RNA, 23 nt, Artificial Sequence
  Synthetic oligonucleotide: FAS-3834
ugugugucacucuugcgcgagau

SEQ ID NO: 30730 - RNA, 24 nt, Artificial Sequence
  Synthetic oligonucleotide: FAS-3835
cugugugucacucuugcgcgagau

SEQ ID NO: 30731 - RNA, 18 nt, Artificial Sequence
  Synthetic oligonucleotide: FAS-3836
cccgguggucaggaggau

SEQ ID NO: 30732 - RNA, 19 nt, Artificial Sequence
  Synthetic oligonucleotide: FAS-3837
ccccgguggucaggaggau

SEQ ID NO: 30733 - RNA, 20 nt, Artificial Sequence
  Synthetic oligonucleotide: FAS-720
gccccgguggucaggaggau

SEQ ID NO: 30734 - RNA, 21 nt, Artificial Sequence
  Synthetic oligonucleotide: FAS-3838
agccccgguggucaggaggau

SEQ ID NO: 30735 - RNA, 22 nt, Artificial Sequence
  Synthetic oligonucleotide: FAS-3839
aagccccgguggucaggaggau

SEQ ID NO: 30736 - RNA, 23 nt, Artificial Sequence
  Synthetic oligonucleotide: FAS-3840
aaagccccgguggucaggaggau

SEQ ID NO: 30737 - RNA, 24 nt, Artificial Sequence
  Synthetic oligonucleotide: FAS-3841
aaaagccccgguggucaggaggau

SEQ ID NO: 30738 - RNA, 18 nt, Artificial Sequence
  Synthetic oligonucleotide: FAS-3842
cuaauugcuggagucacu

SEQ ID NO: 30739 - RNA, 19 nt, Artificial Sequence
  Synthetic oligonucleotide: FAS-3843
gcuaauugcuggagucacu

SEQ ID NO: 30740 - RNA, 20 nt, Artificial Sequence
  Synthetic oligonucleotide: FAS-1253
ggcuaauugcuggagucacu

SEQ ID NO: 30741 - RNA, 21 nt, Artificial Sequence
  Synthetic oligonucleotide: FAS-3844
uggcuaauugcuggagucacu

SEQ ID NO: 30742 - RNA, 22 nt, Artificial Sequence
  Synthetic oligonucleotide: FAS-3845
uuggcuaauugcuggagucacu

SEQ ID NO: 30743 - RNA, 23 nt, Artificial Sequence
  Synthetic oligonucleotide: FAS-3846
cuuggcuaauugcuggagucacu

SEQ ID NO: 30744 - RNA, 24 nt, Artificial Sequence
  Synthetic oligonucleotide: FAS-3847
ccuuggcuaauugcuggagucacu

SEQ ID NO: 30745 - RNA, 18 nt, Artificial Sequence
  Synthetic oligonucleotide: FAS-3848
ucugcuguaguucaaccu

SEQ ID NO: 30746 - RNA, 19 nt, Artificial Sequence
  Synthetic oligonucleotide: FAS-3849
uucugcuguaguucaaccu

SEQ ID NO: 30747 - RNA, 20 nt, Artificial Sequence
  Synthetic oligonucleotide: FAS-759
cuucugcuguaguucaaccu

SEQ ID NO: 30748 - RNA, 21 nt, Artificial Sequence
  Synthetic oligonucleotide: FAS-3850
gcuucugcuguaguucaaccu

SEQ ID NO: 30749 - RNA, 22 nt, Artificial Sequence
  Synthetic oligonucleotide: FAS-3851
ggcuucugcuguaguucaaccu

SEQ ID NO: 30750 - RNA, 23 nt, Artificial Sequence
  Synthetic oligonucleotide: FAS-3852
aggcuucugcuguaguucaaccu

SEQ ID NO: 30751 - RNA, 24 nt, Artificial Sequence
  Synthetic oligonucleotide: FAS-3853
aaggcuucugcuguaguucaaccu

SEQ ID NO: 30752 - RNA, 18 nt, Artificial Sequence
  Synthetic oligonucleotide: FAS-2387
ugguuguugagcaauccu

SEQ ID NO: 30753 - RNA, 19 nt, Artificial Sequence
  Synthetic oligonucleotide: FAS-2388
augguuguugagcaauccu

SEQ ID NO: 30754 - RNA, 20 nt, Artificial Sequence
  Synthetic oligonucleotide: FAS-1171
caugguuguugagcaauccu

SEQ ID NO: 30755 - RNA, 21 nt, Artificial Sequence
  Synthetic oligonucleotide: FAS-2389
gcaugguuguugagcaauccu

SEQ ID NO: 30756 - RNA, 22 nt, Artificial Sequence
  Synthetic oligonucleotide: FAS-2390
agcaugguuguugagcaauccu

SEQ ID NO: 30757 - RNA, 23 nt, Artificial Sequence
  Synthetic oligonucleotide: FAS-2391
cagcaugguuguugagcaauccu

SEQ ID NO: 30758 - RNA, 24 nt, Artificial Sequence
  Synthetic oligonucleotide: FAS-2392
ccagcaugguuguugagcaauccu

SEQ ID NO: 30759 - RNA, 18 nt, Artificial Sequence
  Synthetic oligonucleotide: FAS-3854
uugaaggagaauggagcu

SEQ ID NO: 30760 - RNA, 19 nt, Artificial Sequence
  Synthetic oligonucleotide: FAS-3855
cuugaaggagaauggagcu

SEQ ID NO: 30761 - RNA, 20 nt, Artificial Sequence
  Synthetic oligonucleotide: FAS-1246
ucuugaaggagaauggagcu

SEQ ID NO: 30762 - RNA, 21 nt, Artificial Sequence
  Synthetic oligonucleotide: FAS-3856
gucuugaaggagaauggagcu

SEQ ID NO: 30763 - RNA, 22 nt, Artificial Sequence
  Synthetic oligonucleotide: FAS-3857
ggucuugaaggagaauggagcu

SEQ ID NO: 30764 - RNA, 23 nt, Artificial Sequence
  Synthetic oligonucleotide: FAS-3858
aggucuugaaggagaauggagcu

SEQ ID NO: 30765 - RNA, 24 nt, Artificial Sequence
  Synthetic oligonucleotide: FAS-3859
gaggucuugaaggagaauggagcu

SEQ ID NO: 30766 - RNA, 18 nt, Artificial Sequence
  Synthetic oligonucleotide: FAS-3860
ugggaaggaagccucgcu

SEQ ID NO: 30767 - RNA, 19 nt, Artificial Sequence
  Synthetic oligonucleotide: FAS-3861
augggaaggaagccucgcu

SEQ ID NO: 30768 - RNA, 20 nt, Artificial Sequence
  Synthetic oligonucleotide: FAS-723
gaugggaaggaagccucgcu

SEQ ID NO: 30769 - RNA, 21 nt, Artificial Sequence
  Synthetic oligonucleotide: FAS-3862
ggaugggaaggaagccucgcu

SEQ ID NO: 30770 - RNA, 22 nt, Artificial Sequence
  Synthetic oligonucleotide: FAS-3863
aggaugggaaggaagccucgcu

SEQ ID NO: 30771 - RNA, 23 nt, Artificial Sequence
  Synthetic oligonucleotide: FAS-3864
gaggaugggaaggaagccucgcu

SEQ ID NO: 30772 - RNA, 24 nt, Artificial Sequence
  Synthetic oligonucleotide: FAS-3865
ggaggaugggaaggaagccucgcu

SEQ ID NO: 30773 - RNA, 18 nt, Artificial Sequence
  Synthetic oligonucleotide: FAS-3866
auguugcgccauagggcu

SEQ ID NO: 30774 - RNA, 19 nt, Artificial Sequence
  Synthetic oligonucleotide: FAS-3867
gauguugcgccauagggcu

SEQ ID NO: 30775 - RNA, 20 nt, Artificial Sequence
  Synthetic oligonucleotide: FAS-1265
agauguugcgccauagggcu

SEQ ID NO: 30776 - RNA, 21 nt, Artificial Sequence
  Synthetic oligonucleotide: FAS-3868
cagauguugcgccauagggcu

SEQ ID NO: 30777 - RNA, 22 nt, Artificial Sequence
  Synthetic oligonucleotide: FAS-3869
acagauguugcgccauagggcu

SEQ ID NO: 30778 - RNA, 23 nt, Artificial Sequence
  Synthetic oligonucleotide: FAS-3870
uacagauguugcgccauagggcu

SEQ ID NO: 30779 - RNA, 24 nt, Artificial Sequence
  Synthetic oligonucleotide: FAS-3871
guacagauguugcgccauagggcu

SEQ ID NO: 30780 - RNA, 18 nt, Artificial Sequence
  Synthetic oligonucleotide: FAS-3872
cacuccccagaagcgucu

SEQ ID NO: 30781 - RNA, 19 nt, Artificial Sequence
  Synthetic oligonucleotide: FAS-3873
ucacuccccagaagcgucu

SEQ ID NO: 30782 - RNA, 20 nt, Artificial Sequence
  Synthetic oligonucleotide: FAS-1186
cucacuccccagaagcgucu

SEQ ID NO: 30783 - RNA, 21 nt, Artificial Sequence
  Synthetic oligonucleotide: FAS-3874
ccucacuccccagaagcgucu

SEQ ID NO: 30784 - RNA, 22 nt, Artificial Sequence
  Synthetic oligonucleotide: FAS-3875
cccucacuccccagaagcgucu

SEQ ID NO: 30785 - RNA, 23 nt, Artificial Sequence
  Synthetic oligonucleotide: FAS-3876
ucccucacuccccagaagcgucu

SEQ ID NO: 30786 - RNA, 24 nt, Artificial Sequence
  Synthetic oligonucleotide: FAS-3877
uucccucacuccccagaagcgucu

SEQ ID NO: 30787 - RNA, 18 nt, Artificial Sequence
  Synthetic oligonucleotide: FAS-3878
uaguucaaccugggaagu

SEQ ID NO: 30788 - RNA, 19 nt, Artificial Sequence
  Synthetic oligonucleotide: FAS-3879
guaguucaaccugggaagu

SEQ ID NO: 30789 - RNA, 20 nt, Artificial Sequence
  Synthetic oligonucleotide: FAS-760
uguaguucaaccugggaagu

SEQ ID NO: 30790 - RNA, 21 nt, Artificial Sequence
  Synthetic oligonucleotide: FAS-3880
cuguaguucaaccugggaagu

SEQ ID NO: 30791 - RNA, 22 nt, Artificial Sequence
  Synthetic oligonucleotide: FAS-3881
gcuguaguucaaccugggaagu

SEQ ID NO: 30792 - RNA, 23 nt, Artificial Sequence
  Synthetic oligonucleotide: FAS-3882
ugcuguaguucaaccugggaagu

SEQ ID NO: 30793 - RNA, 24 nt, Artificial Sequence
  Synthetic oligonucleotide: FAS-3883
cugcuguaguucaaccugggaagu

SEQ ID NO: 30794 - RNA, 18 nt, Artificial Sequence
  Synthetic oligonucleotide: FAS-3884
ggcaugcucacuucaggu

SEQ ID NO: 30795 - RNA, 19 nt, Artificial Sequence
  Synthetic oligonucleotide: FAS-3885
uggcaugcucacuucaggu

SEQ ID NO: 30796 - RNA, 20 nt, Artificial Sequence
  Synthetic oligonucleotide: FAS-1230
cuggcaugcucacuucaggu

SEQ ID NO: 30797 - RNA, 21 nt, Artificial Sequence
  Synthetic oligonucleotide: FAS-3886
gcuggcaugcucacuucaggu

SEQ ID NO: 30798 - RNA, 22 nt, Artificial Sequence
  Synthetic oligonucleotide: FAS-3887
ggcuggcaugcucacuucaggu

SEQ ID NO: 30799 - RNA, 23 nt, Artificial Sequence
  Synthetic oligonucleotide: FAS-3888
uggcuggcaugcucacuucaggu

SEQ ID NO: 30800 - RNA, 24 nt, Artificial Sequence
  Synthetic oligonucleotide: FAS-3889
guggcuggcaugcucacuucaggu

SEQ ID NO: 30801 - RNA, 18 nt, Artificial Sequence
  Synthetic oligonucleotide: FAS-2405
agagggcucaccagaggu

SEQ ID NO: 30802 - RNA, 19 nt, Artificial Sequence
  Synthetic oligonucleotide: FAS-2406
gagagggcucaccagaggu

SEQ ID NO: 30803 - RNA, 20 nt, Artificial Sequence
  Synthetic oligonucleotide: FAS-105
ggagagggcucaccagaggu

SEQ ID NO: 30804 - RNA, 21 nt, Artificial Sequence
  Synthetic oligonucleotide: FAS-2407
aggagagggcucaccagaggu

SEQ ID NO: 30805 - RNA, 22 nt, Artificial Sequence
  Synthetic oligonucleotide: FAS-2408
caggagagggcucaccagaggu

SEQ ID NO: 30806 - RNA, 23 nt, Artificial Sequence
  Synthetic oligonucleotide: FAS-2409
gcaggagagggcucaccagaggu

SEQ ID NO: 30807 - RNA, 24 nt, Artificial Sequence
  Synthetic oligonucleotide: FAS-2410
ggcaggagagggcucaccagaggu

SEQ ID NO: 30808 - RNA, 18 nt, Artificial Sequence
  Synthetic oligonucleotide: FAS-3890
agggggagaagucagggu

SEQ ID NO: 30809 - RNA, 19 nt, Artificial Sequence
  Synthetic oligonucleotide: FAS-3891
gagggggagaagucagggu

SEQ ID NO: 30810 - RNA, 20 nt, Artificial Sequence
  Synthetic oligonucleotide: FAS-1221
ggagggggagaagucagggu

SEQ ID NO: 30811 - RNA, 21 nt, Artificial Sequence
  Synthetic oligonucleotide: FAS-3892
gggagggggagaagucagggu

SEQ ID NO: 30812 - RNA, 22 nt, Artificial Sequence
  Synthetic oligonucleotide: FAS-3893
agggagggggagaagucagggu

SEQ ID NO: 30813 - RNA, 23 nt, Artificial Sequence
  Synthetic oligonucleotide: FAS-3894
uagggagggggagaagucagggu

SEQ ID NO: 30814 - RNA, 24 nt, Artificial Sequence
  Synthetic oligonucleotide: FAS-3895
guagggagggggagaagucagggu

SEQ ID NO: 30815 - RNA, 18 nt, Artificial Sequence
  Synthetic oligonucleotide: FAS-3896
gcuggggaacgcccgggu

SEQ ID NO: 30816 - RNA, 19 nt, Artificial Sequence
  Synthetic oligonucleotide: FAS-3897
cgcuggggaacgcccgggu

SEQ ID NO: 30817 - RNA, 20 nt, Artificial Sequence
  Synthetic oligonucleotide: FAS-727
ucgcuggggaacgcccgggu

SEQ ID NO: 30818 - RNA, 21 nt, Artificial Sequence
  Synthetic oligonucleotide: FAS-3898
cucgcuggggaacgcccgggu

SEQ ID NO: 30819 - RNA, 22 nt, Artificial Sequence
  Synthetic oligonucleotide: FAS-3899
ccucgcuggggaacgcccgggu

SEQ ID NO: 30820 - RNA, 23 nt, Artificial Sequence
  Synthetic oligonucleotide: FAS-3900
gccucgcuggggaacgcccgggu

SEQ ID NO: 30821 - RNA, 24 nt, Artificial Sequence
  Synthetic oligonucleotide: FAS-3901
agccucgcuggggaacgcccgggu

SEQ ID NO: 30822 - RNA, 18 nt, Artificial Sequence
  Synthetic oligonucleotide: FAS-3902
cuuggccugcgcgcgggu

SEQ ID NO: 30823 - RNA, 19 nt, Artificial Sequence
  Synthetic oligonucleotide: FAS-3903
acuuggccugcgcgcgggu

SEQ ID NO: 30824 - RNA, 20 nt, Artificial Sequence
  Synthetic oligonucleotide: FAS-735
aacuuggccugcgcgcgggu

SEQ ID NO: 30825 - RNA, 21 nt, Artificial Sequence
  Synthetic oligonucleotide: FAS-3904
caacuuggccugcgcgcgggu

SEQ ID NO: 30826 - RNA, 22 nt, Artificial Sequence
  Synthetic oligonucleotide: FAS-3905
gcaacuuggccugcgcgcgggu

SEQ ID NO: 30827 - RNA, 23 nt, Artificial Sequence
  Synthetic oligonucleotide: FAS-3906
agcaacuuggccugcgcgcgggu

SEQ ID NO: 30828 - RNA, 24 nt, Artificial Sequence
  Synthetic oligonucleotide: FAS-3907
cagcaacuuggccugcgcgcgggu

SEQ ID NO: 30829 - RNA, 18 nt, Artificial Sequence
  Synthetic oligonucleotide: FAS-3908
acgaaaagccccgguggu

SEQ ID NO: 30830 - RNA, 19 nt, Artificial Sequence
  Synthetic oligonucleotide: FAS-3909
cacgaaaagccccgguggu

SEQ ID NO: 30831 - RNA, 20 nt, Artificial Sequence
  Synthetic oligonucleotide: FAS-1191
ucacgaaaagccccgguggu

SEQ ID NO: 30832 - RNA, 21 nt, Artificial Sequence
  Synthetic oligonucleotide: FAS-3910
cucacgaaaagccccgguggu

SEQ ID NO: 30833 - RNA, 22 nt, Artificial Sequence
  Synthetic oligonucleotide: FAS-3911
gcucacgaaaagccccgguggu

SEQ ID NO: 30834 - RNA, 23 nt, Artificial Sequence
  Synthetic oligonucleotide: FAS-3912
agcucacgaaaagccccgguggu

SEQ ID NO: 30835 - RNA, 24 nt, Artificial Sequence
  Synthetic oligonucleotide: FAS-3913
gagcucacgaaaagccccgguggu

SEQ ID NO: 30836 - RNA, 18 nt, Artificial Sequence
  Synthetic oligonucleotide: FAS-3914
ucacucagagaaagacuu

SEQ ID NO: 30837 - RNA, 19 nt, Artificial Sequence
  Synthetic oligonucleotide: FAS-3915
gucacucagagaaagacuu

SEQ ID NO: 30838 - RNA, 20 nt, Artificial Sequence
  Synthetic oligonucleotide: FAS-1255
agucacucagagaaagacuu

SEQ ID NO: 30839 - RNA, 21 nt, Artificial Sequence
  Synthetic oligonucleotide: FAS-3916
gagucacucagagaaagacuu

SEQ ID NO: 30840 - RNA, 22 nt, Artificial Sequence
  Synthetic oligonucleotide: FAS-3917
ggagucacucagagaaagacuu

SEQ ID NO: 30841 - RNA, 23 nt, Artificial Sequence
  Synthetic oligonucleotide: FAS-3918
uggagucacucagagaaagacuu

SEQ ID NO: 30842 - RNA, 24 nt, Artificial Sequence
  Synthetic oligonucleotide: FAS-3919
cuggagucacucagagaaagacuu

SEQ ID NO: 30843 - RNA, 18 nt, Artificial Sequence
  Synthetic oligonucleotide: FAS-3920
aguucaaccugggaaguu

SEQ ID NO: 30844 - RNA, 19 nt, Artificial Sequence
  Synthetic oligonucleotide: FAS-3921
uaguucaaccugggaaguu

SEQ ID NO: 30845 - RNA, 20 nt, Artificial Sequence
  Synthetic oligonucleotide: FAS-761
guaguucaaccugggaaguu

SEQ ID NO: 30846 - RNA, 21 nt, Artificial Sequence
  Synthetic oligonucleotide: FAS-3922
uguaguucaaccugggaaguu

SEQ ID NO: 30847 - RNA, 22 nt, Artificial Sequence
  Synthetic oligonucleotide: FAS-3923
cuguaguucaaccugggaaguu

SEQ ID NO: 30848 - RNA, 23 nt, Artificial Sequence
  Synthetic oligonucleotide: FAS-3924
gcuguaguucaaccugggaaguu

SEQ ID NO: 30849 - RNA, 24 nt, Artificial Sequence
  Synthetic oligonucleotide: FAS-3925
ugcuguaguucaaccugggaaguu

SEQ ID NO: 30850 - RNA, 18 nt, Artificial Sequence
  Synthetic oligonucleotide: FAS-3926
cuggggaacgcccggguu

SEQ ID NO: 30851 - RNA, 19 nt, Artificial Sequence
  Synthetic oligonucleotide: FAS-3927
gcuggggaacgcccggguu

SEQ ID NO: 30852 - RNA, 20 nt, Artificial Sequence
  Synthetic oligonucleotide: FAS-728
cgcuggggaacgcccggguu

SEQ ID NO: 30853 - RNA, 21 nt, Artificial Sequence
  Synthetic oligonucleotide: FAS-3928
ucgcuggggaacgcccggguu

SEQ ID NO: 30854 - RNA, 22 nt, Artificial Sequence
  Synthetic oligonucleotide: FAS-3929
cucgcuggggaacgcccggguu

SEQ ID NO: 30855 - RNA, 23 nt, Artificial Sequence
  Synthetic oligonucleotide: FAS-3930
ccucgcuggggaacgcccggguu

SEQ ID NO: 30856 - RNA, 24 nt, Artificial Sequence
  Synthetic oligonucleotide: FAS-3931
gccucgcuggggaacgcccggguu

SEQ ID NO: 30857 - RNA, 18 nt, Artificial Sequence
  Synthetic oligonucleotide: FAS-3932
agaggcucacagacguuu

SEQ ID NO: 30858 - RNA, 19 nt, Artificial Sequence
  Synthetic oligonucleotide: FAS-3933
gagaggcucacagacguuu

SEQ ID NO: 30859 - RNA, 20 nt, Artificial Sequence
  Synthetic oligonucleotide: FAS-1260
ugagaggcucacagacguuu

SEQ ID NO: 30860 - RNA, 21 nt, Artificial Sequence
  Synthetic oligonucleotide: FAS-3934
augagaggcucacagacguuu

SEQ ID NO: 30861 - RNA, 22 nt, Artificial Sequence
  Synthetic oligonucleotide: FAS-3935
caugagaggcucacagacguuu

SEQ ID NO: 30862 - RNA, 23 nt, Artificial Sequence
  Synthetic oligonucleotide: FAS-3936
acaugagaggcucacagacguuu

SEQ ID NO: 30863 - RNA, 24 nt, Artificial Sequence
  Synthetic oligonucleotide: FAS-3937
aacaugagaggcucacagacguuu

SEQ ID NO: 30864 - RNA, 18 nt, Artificial Sequence
  Synthetic oligonucleotide: FAS-3938
gucccggggauaggcaaa

SEQ ID NO: 30865 - RNA, 19 nt, Artificial Sequence
  Synthetic oligonucleotide: FAS-3939
agucccggggauaggcaaa

SEQ ID NO: 30866 - RNA, 20 nt, Artificial Sequence
  Synthetic oligonucleotide: FAS-1057
uagucccggggauaggcaaa

SEQ ID NO: 30867 - RNA, 21 nt, Artificial Sequence
  Synthetic oligonucleotide: FAS-3940
uuagucccggggauaggcaaa

SEQ ID NO: 30868 - RNA, 22 nt, Artificial Sequence
  Synthetic oligonucleotide: FAS-3941
cuuagucccggggauaggcaaa

SEQ ID NO: 30869 - RNA, 23 nt, Artificial Sequence
  Synthetic oligonucleotide: FAS-3942
ucuuagucccggggauaggcaaa

SEQ ID NO: 30870 - RNA, 24 nt, Artificial Sequence
  Synthetic oligonucleotide: FAS-3943
gucuuagucccggggauaggcaaa

SEQ ID NO: 30871 - RNA, 18 nt, Artificial Sequence
  Synthetic oligonucleotide: FAS-3944
gccaaguugcugaaucaa

SEQ ID NO: 30872 - RNA, 19 nt, Artificial Sequence
  Synthetic oligonucleotide: FAS-3945
ggccaaguugcugaaucaa

SEQ ID NO: 30873 - RNA, 20 nt, Artificial Sequence
  Synthetic oligonucleotide: FAS-622
aggccaaguugcugaaucaa

SEQ ID NO: 30874 - RNA, 21 nt, Artificial Sequence
  Synthetic oligonucleotide: FAS-3946
caggccaaguugcugaaucaa

SEQ ID NO: 30875 - RNA, 22 nt, Artificial Sequence
  Synthetic oligonucleotide: FAS-3947
gcaggccaaguugcugaaucaa

SEQ ID NO: 30876 - RNA, 23 nt, Artificial Sequence
  Synthetic oligonucleotide: FAS-3948
cgcaggccaaguugcugaaucaa

SEQ ID NO: 30877 - RNA, 24 nt, Artificial Sequence
  Synthetic oligonucleotide: FAS-3949
gcgcaggccaaguugcugaaucaa

SEQ ID NO: 30878 - RNA, 18 nt, Artificial Sequence
  Synthetic oligonucleotide: FAS-3950
ucgagguccucaccugaa

SEQ ID NO: 30879 - RNA, 19 nt, Artificial Sequence
  Synthetic oligonucleotide: FAS-3951
cucgagguccucaccugaa

SEQ ID NO: 30880 - RNA, 20 nt, Artificial Sequence
  Synthetic oligonucleotide: FAS-1001
ucucgagguccucaccugaa

SEQ ID NO: 30881 - RNA, 21 nt, Artificial Sequence
  Synthetic oligonucleotide: FAS-3952
cucucgagguccucaccugaa

SEQ ID NO: 30882 - RNA, 22 nt, Artificial Sequence
  Synthetic oligonucleotide: FAS-3953
gcucucgagguccucaccugaa

SEQ ID NO: 30883 - RNA, 23 nt, Artificial Sequence
  Synthetic oligonucleotide: FAS-3954
ggcucucgagguccucaccugaa

SEQ ID NO: 30884 - RNA, 24 nt, Artificial Sequence
  Synthetic oligonucleotide: FAS-3955
cggcucucgagguccucaccugaa

SEQ ID NO: 30885 - RNA, 18 nt, Artificial Sequence
  Synthetic oligonucleotide: FAS-3956
uucccauccuccugacca

SEQ ID NO: 30886 - RNA, 19 nt, Artificial Sequence
  Synthetic oligonucleotide: FAS-3957
cuucccauccuccugacca

SEQ ID NO: 30887 - RNA, 20 nt, Artificial Sequence
  Synthetic oligonucleotide: FAS-1014
ccuucccauccuccugacca

SEQ ID NO: 30888 - RNA, 21 nt, Artificial Sequence
  Synthetic oligonucleotide: FAS-3958
uccuucccauccuccugacca

SEQ ID NO: 30889 - RNA, 22 nt, Artificial Sequence
  Synthetic oligonucleotide: FAS-3959
uuccuucccauccuccugacca

SEQ ID NO: 30890 - RNA, 23 nt, Artificial Sequence
  Synthetic oligonucleotide: FAS-3960
cuuccuucccauccuccugacca

SEQ ID NO: 30891 - RNA, 24 nt, Artificial Sequence
  Synthetic oligonucleotide: FAS-3961
gcuuccuucccauccuccugacca

SEQ ID NO: 30892 - RNA, 18 nt, Artificial Sequence
  Synthetic oligonucleotide: FAS-3962
caacccgggcguucccca

SEQ ID NO: 30893 - RNA, 19 nt, Artificial Sequence
  Synthetic oligonucleotide: FAS-3963
ccaacccgggcguucccca

SEQ ID NO: 30894 - RNA, 20 nt, Artificial Sequence
  Synthetic oligonucleotide: FAS-1013
cccaacccgggcguucccca

SEQ ID NO: 30895 - RNA, 21 nt, Artificial Sequence
  Synthetic oligonucleotide: FAS-3964
ccccaacccgggcguucccca

SEQ ID NO: 30896 - RNA, 22 nt, Artificial Sequence
  Synthetic oligonucleotide: FAS-3965
uccccaacccgggcguucccca

SEQ ID NO: 30897 - RNA, 23 nt, Artificial Sequence
  Synthetic oligonucleotide: FAS-3966
cuccccaacccgggcguucccca

SEQ ID NO: 30898 - RNA, 24 nt, Artificial Sequence
  Synthetic oligonucleotide: FAS-3967
ccuccccaacccgggcguucccca

SEQ ID NO: 30899 - RNA, 18 nt, Artificial Sequence
  Synthetic oligonucleotide: FAS-3968
caggggcgggcacuggca

SEQ ID NO: 30900 - RNA, 19 nt, Artificial Sequence
  Synthetic oligonucleotide: FAS-3969
ucaggggcgggcacuggca

SEQ ID NO: 30901 - RNA, 20 nt, Artificial Sequence
  Synthetic oligonucleotide: FAS-644
cucaggggcgggcacuggca

SEQ ID NO: 30902 - RNA, 21 nt, Artificial Sequence
  Synthetic oligonucleotide: FAS-3970
ccucaggggcgggcacuggca

SEQ ID NO: 30903 - RNA, 22 nt, Artificial Sequence
  Synthetic oligonucleotide: FAS-3971
gccucaggggcgggcacuggca

SEQ ID NO: 30904 - RNA, 23 nt, Artificial Sequence
  Synthetic oligonucleotide: FAS-3972
agccucaggggcgggcacuggca

SEQ ID NO: 30905 - RNA, 24 nt, Artificial Sequence
  Synthetic oligonucleotide: FAS-3973
gagccucaggggcgggcacuggca

SEQ ID NO: 30906 - RNA, 18 nt, Artificial Sequence
  Synthetic oligonucleotide: FAS-3974
ggaaugcccauuugugca

SEQ ID NO: 30907 - RNA, 19 nt, Artificial Sequence
  Synthetic oligonucleotide: FAS-3975
aggaaugcccauuugugca

SEQ ID NO: 30908 - RNA, 20 nt, Artificial Sequence
  Synthetic oligonucleotide: FAS-1008
caggaaugcccauuugugca

SEQ ID NO: 30909 - RNA, 21 nt, Artificial Sequence
  Synthetic oligonucleotide: FAS-3976
acaggaaugcccauuugugca

SEQ ID NO: 30910 - RNA, 22 nt, Artificial Sequence
  Synthetic oligonucleotide: FAS-3977
gacaggaaugcccauuugugca

SEQ ID NO: 30911 - RNA, 23 nt, Artificial Sequence
  Synthetic oligonucleotide: FAS-3978
ggacaggaaugcccauuugugca

SEQ ID NO: 30912 - RNA, 24 nt, Artificial Sequence
  Synthetic oligonucleotide: FAS-3979
gggacaggaaugcccauuugugca

SEQ ID NO: 30913 - RNA, 18 nt, Artificial Sequence
  Synthetic oligonucleotide: FAS-3980
ggccaaguugcugaauca

SEQ ID NO: 30914 - RNA, 19 nt, Artificial Sequence
  Synthetic oligonucleotide: FAS-3981
aggccaaguugcugaauca

SEQ ID NO: 30915 - RNA, 20 nt, Artificial Sequence
  Synthetic oligonucleotide: FAS-1010
caggccaaguugcugaauca

SEQ ID NO: 30916 - RNA, 21 nt, Artificial Sequence
  Synthetic oligonucleotide: FAS-3982
gcaggccaaguugcugaauca

SEQ ID NO: 30917 - RNA, 22 nt, Artificial Sequence
  Synthetic oligonucleotide: FAS-3983
cgcaggccaaguugcugaauca

SEQ ID NO: 30918 - RNA, 23 nt, Artificial Sequence
  Synthetic oligonucleotide: FAS-3984
gcgcaggccaaguugcugaauca

SEQ ID NO: 30919 - RNA, 24 nt, Artificial Sequence
  Synthetic oligonucleotide: FAS-3985
cgcgcaggccaaguugcugaauca

SEQ ID NO: 30920 - RNA, 18 nt, Artificial Sequence
  Synthetic oligonucleotide: FAS-3986
acagcagaagccuuuaga

SEQ ID NO: 30921 - RNA, 19 nt, Artificial Sequence
  Synthetic oligonucleotide: FAS-3987
uacagcagaagccuuuaga

SEQ ID NO: 30922 - RNA, 20 nt, Artificial Sequence
  Synthetic oligonucleotide: FAS-996
cuacagcagaagccuuuaga

SEQ ID NO: 30923 - RNA, 21 nt, Artificial Sequence
  Synthetic oligonucleotide: FAS-3988
acuacagcagaagccuuuaga

SEQ ID NO: 30924 - RNA, 22 nt, Artificial Sequence
  Synthetic oligonucleotide: FAS-3989
aacuacagcagaagccuuuaga

SEQ ID NO: 30925 - RNA, 23 nt, Artificial Sequence
  Synthetic oligonucleotide: FAS-3990
gaacuacagcagaagccuuuaga

SEQ ID NO: 30926 - RNA, 24 nt, Artificial Sequence
  Synthetic oligonucleotide: FAS-3991
ugaacuacagcagaagccuuuaga

SEQ ID NO: 30927 - RNA, 18 nt, Artificial Sequence
  Synthetic oligonucleotide: FAS-3992
ugcaggaacgccccggga

SEQ ID NO: 30928 - RNA, 19 nt, Artificial Sequence
  Synthetic oligonucleotide: FAS-3993
cugcaggaacgccccggga

SEQ ID NO: 30929 - RNA, 20 nt, Artificial Sequence
  Synthetic oligonucleotide: FAS-1006
acugcaggaacgccccggga

SEQ ID NO: 30930 - RNA, 21 nt, Artificial Sequence
  Synthetic oligonucleotide: FAS-3994
cacugcaggaacgccccggga

SEQ ID NO: 30931 - RNA, 22 nt, Artificial Sequence
  Synthetic oligonucleotide: FAS-3995
ccacugcaggaacgccccggga

SEQ ID NO: 30932 - RNA, 23 nt, Artificial Sequence
  Synthetic oligonucleotide: FAS-3996
gccacugcaggaacgccccggga

SEQ ID NO: 30933 - RNA, 24 nt, Artificial Sequence
  Synthetic oligonucleotide: FAS-3997
agccacugcaggaacgccccggga

SEQ ID NO: 30934 - RNA, 18 nt, Artificial Sequence
  Synthetic oligonucleotide: FAS-3998
caaagacgcuucugggga

SEQ ID NO: 30935 - RNA, 19 nt, Artificial Sequence
  Synthetic oligonucleotide: FAS-3999
ucaaagacgcuucugggga

SEQ ID NO: 30936 - RNA, 20 nt, Artificial Sequence
  Synthetic oligonucleotide: FAS-1022
uucaaagacgcuucugggga

SEQ ID NO: 30937 - RNA, 21 nt, Artificial Sequence
  Synthetic oligonucleotide: FAS-4000
guucaaagacgcuucugggga

SEQ ID NO: 30938 - RNA, 22 nt, Artificial Sequence
  Synthetic oligonucleotide: FAS-4001
uguucaaagacgcuucugggga

SEQ ID NO: 30939 - RNA, 23 nt, Artificial Sequence
  Synthetic oligonucleotide: FAS-4002
guguucaaagacgcuucugggga

SEQ ID NO: 30940 - RNA, 24 nt, Artificial Sequence
  Synthetic oligonucleotide: FAS-4003
gguguucaaagacgcuucugggga

SEQ ID NO: 30941 - RNA, 18 nt, Artificial Sequence
  Synthetic oligonucleotide: FAS-4004
gacgcuucuggggaguga

SEQ ID NO: 30942 - RNA, 19 nt, Artificial Sequence
  Synthetic oligonucleotide: FAS-4005
agacgcuucuggggaguga

SEQ ID NO: 30943 - RNA, 20 nt, Artificial Sequence
  Synthetic oligonucleotide: FAS-634
aagacgcuucuggggaguga

SEQ ID NO: 30944 - RNA, 21 nt, Artificial Sequence
  Synthetic oligonucleotide: FAS-4006
aaagacgcuucuggggaguga

SEQ ID NO: 30945 - RNA, 22 nt, Artificial Sequence
  Synthetic oligonucleotide: FAS-4007
caaagacgcuucuggggaguga

SEQ ID NO: 30946 - RNA, 23 nt, Artificial Sequence
  Synthetic oligonucleotide: FAS-4008
ucaaagacgcuucuggggaguga

SEQ ID NO: 30947 - RNA, 24 nt, Artificial Sequence
  Synthetic oligonucleotide: FAS-4009
uucaaagacgcuucuggggaguga

SEQ ID NO: 30948 - RNA, 18 nt, Artificial Sequence
  Synthetic oligonucleotide: FAS-4010
cuugagaaauaaaaacua

SEQ ID NO: 30949 - RNA, 19 nt, Artificial Sequence
  Synthetic oligonucleotide: FAS-4011
ucuugagaaauaaaaacua

SEQ ID NO: 30950 - RNA, 20 nt, Artificial Sequence
  Synthetic oligonucleotide: FAS-601
cucuugagaaauaaaaacua

SEQ ID NO: 30951 - RNA, 21 nt, Artificial Sequence
  Synthetic oligonucleotide: FAS-4012
ccucuugagaaauaaaaacua

SEQ ID NO: 30952 - RNA, 22 nt, Artificial Sequence
  Synthetic oligonucleotide: FAS-4013
uccucuugagaaauaaaaacua

SEQ ID NO: 30953 - RNA, 23 nt, Artificial Sequence
  Synthetic oligonucleotide: FAS-4014
uuccucuugagaaauaaaaacua

SEQ ID NO: 30954 - RNA, 24 nt, Artificial Sequence
  Synthetic oligonucleotide: FAS-4015
uuuccucuugagaaauaaaaacua

SEQ ID NO: 30955 - RNA, 18 nt, Artificial Sequence
  Synthetic oligonucleotide: FAS-4016
ucauguugcagccacaac

SEQ ID NO: 30956 - RNA, 19 nt, Artificial Sequence
  Synthetic oligonucleotide: FAS-4017
cucauguugcagccacaac

SEQ ID NO: 30957 - RNA, 20 nt, Artificial Sequence
  Synthetic oligonucleotide: FAS-989
ucucauguugcagccacaac

SEQ ID NO: 30958 - RNA, 21 nt, Artificial Sequence
  Synthetic oligonucleotide: FAS-4018
cucucauguugcagccacaac

SEQ ID NO: 30959 - RNA, 22 nt, Artificial Sequence
  Synthetic oligonucleotide: FAS-4019
ccucucauguugcagccacaac

SEQ ID NO: 30960 - RNA, 23 nt, Artificial Sequence
  Synthetic oligonucleotide: FAS-4020
gccucucauguugcagccacaac

SEQ ID NO: 30961 - RNA, 24 nt, Artificial Sequence
  Synthetic oligonucleotide: FAS-4021
agccucucauguugcagccacaac

SEQ ID NO: 30962 - RNA, 18 nt, Artificial Sequence
  Synthetic oligonucleotide: FAS-4022
aauggagcccuccccaac

SEQ ID NO: 30963 - RNA, 19 nt, Artificial Sequence
  Synthetic oligonucleotide: FAS-4023
caauggagcccuccccaac

SEQ ID NO: 30964 - RNA, 20 nt, Artificial Sequence
  Synthetic oligonucleotide: FAS-1012
ucaauggagcccuccccaac

SEQ ID NO: 30965 - RNA, 21 nt, Artificial Sequence
  Synthetic oligonucleotide: FAS-4024
aucaauggagcccuccccaac

SEQ ID NO: 30966 - RNA, 22 nt, Artificial Sequence
  Synthetic oligonucleotide: FAS-4025
aaucaauggagcccuccccaac

SEQ ID NO: 30967 - RNA, 23 nt, Artificial Sequence
  Synthetic oligonucleotide: FAS-4026
gaaucaauggagcccuccccaac

SEQ ID NO: 30968 - RNA, 24 nt, Artificial Sequence
  Synthetic oligonucleotide: FAS-4027
ugaaucaauggagcccuccccaac

SEQ ID NO: 30969 - RNA, 18 nt, Artificial Sequence
  Synthetic oligonucleotide: FAS-4028
ucccauccuccugaccac

SEQ ID NO: 30970 - RNA, 19 nt, Artificial Sequence
  Synthetic oligonucleotide: FAS-4029
uucccauccuccugaccac

SEQ ID NO: 30971 - RNA, 20 nt, Artificial Sequence
  Synthetic oligonucleotide: FAS-626
cuucccauccuccugaccac

SEQ ID NO: 30972 - RNA, 21 nt, Artificial Sequence
  Synthetic oligonucleotide: FAS-4030
ccuucccauccuccugaccac

SEQ ID NO: 30973 - RNA, 22 nt, Artificial Sequence
  Synthetic oligonucleotide: FAS-4031
uccuucccauccuccugaccac

SEQ ID NO: 30974 - RNA, 23 nt, Artificial Sequence
  Synthetic oligonucleotide: FAS-4032
uuccuucccauccuccugaccac

SEQ ID NO: 30975 - RNA, 24 nt, Artificial Sequence
  Synthetic oligonucleotide: FAS-4033
cuuccuucccauccuccugaccac

SEQ ID NO: 30976 - RNA, 18 nt, Artificial Sequence
  Synthetic oligonucleotide: FAS-4034
gcggcggcagcggcgcac

SEQ ID NO: 30977 - RNA, 19 nt, Artificial Sequence
  Synthetic oligonucleotide: FAS-4035
ugcggcggcagcggcgcac

SEQ ID NO: 30978 - RNA, 20 nt, Artificial Sequence
  Synthetic oligonucleotide: FAS-1064
uugcggcggcagcggcgcac

SEQ ID NO: 30979 - RNA, 21 nt, Artificial Sequence
  Synthetic oligonucleotide: FAS-4036
auugcggcggcagcggcgcac

SEQ ID NO: 30980 - RNA, 22 nt, Artificial Sequence
  Synthetic oligonucleotide: FAS-4037
gauugcggcggcagcggcgcac

SEQ ID NO: 30981 - RNA, 23 nt, Artificial Sequence
  Synthetic oligonucleotide: FAS-4038
ggauugcggcggcagcggcgcac

SEQ ID NO: 30982 - RNA, 24 nt, Artificial Sequence
  Synthetic oligonucleotide: FAS-4039
gggauugcggcggcagcggcgcac

SEQ ID NO: 30983 - RNA, 18 nt, Artificial Sequence
  Synthetic oligonucleotide: FAS-4040
agcggcgcacgcgggcac

SEQ ID NO: 30984 - RNA, 19 nt, Artificial Sequence
  Synthetic oligonucleotide: FAS-4041
cagcggcgcacgcgggcac

SEQ ID NO: 30985 - RNA, 20 nt, Artificial Sequence
  Synthetic oligonucleotide: FAS-1065
gcagcggcgcacgcgggcac

SEQ ID NO: 30986 - RNA, 21 nt, Artificial Sequence
  Synthetic oligonucleotide: FAS-4042
ggcagcggcgcacgcgggcac

SEQ ID NO: 30987 - RNA, 22 nt, Artificial Sequence
  Synthetic oligonucleotide: FAS-4043
cggcagcggcgcacgcgggcac

SEQ ID NO: 30988 - RNA, 23 nt, Artificial Sequence
  Synthetic oligonucleotide: FAS-4044
gcggcagcggcgcacgcgggcac

SEQ ID NO: 30989 - RNA, 24 nt, Artificial Sequence
  Synthetic oligonucleotide: FAS-4045
ggcggcagcggcgcacgcgggcac

SEQ ID NO: 30990 - RNA, 18 nt, Artificial Sequence
  Synthetic oligonucleotide: FAS-4046
ggcucucgagguccucac

SEQ ID NO: 30991 - RNA, 19 nt, Artificial Sequence
  Synthetic oligonucleotide: FAS-4047
cggcucucgagguccucac

SEQ ID NO: 30992 - RNA, 20 nt, Artificial Sequence
  Synthetic oligonucleotide: FAS-1000
ccggcucucgagguccucac

SEQ ID NO: 30993 - RNA, 21 nt, Artificial Sequence
  Synthetic oligonucleotide: FAS-4048
gccggcucucgagguccucac

SEQ ID NO: 30994 - RNA, 22 nt, Artificial Sequence
  Synthetic oligonucleotide: FAS-4049
ggccggcucucgagguccucac

SEQ ID NO: 30995 - RNA, 23 nt, Artificial Sequence
  Synthetic oligonucleotide: FAS-4050
aggccggcucucgagguccucac

SEQ ID NO: 30996 - RNA, 24 nt, Artificial Sequence
  Synthetic oligonucleotide: FAS-4051
gaggccggcucucgagguccucac

SEQ ID NO: 30997 - RNA, 18 nt, Artificial Sequence
  Synthetic oligonucleotide: FAS-4052
acuggcacggaacacacc

SEQ ID NO: 30998 - RNA, 19 nt, Artificial Sequence
  Synthetic oligonucleotide: FAS-4053
cacuggcacggaacacacc

SEQ ID NO: 30999 - RNA, 20 nt, Artificial Sequence
  Synthetic oligonucleotide: FAS-1034
gcacuggcacggaacacacc

SEQ ID NO: 31000 - RNA, 21 nt, Artificial Sequence
  Synthetic oligonucleotide: FAS-4054
ggcacuggcacggaacacacc

SEQ ID NO: 31001 - RNA, 22 nt, Artificial Sequence
  Synthetic oligonucleotide: FAS-4055
gggcacuggcacggaacacacc

SEQ ID NO: 31002 - RNA, 23 nt, Artificial Sequence
  Synthetic oligonucleotide: FAS-4056
cgggcacuggcacggaacacacc

SEQ ID NO: 31003 - RNA, 24 nt, Artificial Sequence
  Synthetic oligonucleotide: FAS-4057
gcgggcacuggcacggaacacacc

SEQ ID NO: 31004 - RNA, 18 nt, Artificial Sequence
  Synthetic oligonucleotide: FAS-4058
gcggcgcacgcgggcacc

SEQ ID NO: 31005 - RNA, 19 nt, Artificial Sequence
  Synthetic oligonucleotide: FAS-4059
agcggcgcacgcgggcacc

SEQ ID NO: 31006 - RNA, 20 nt, Artificial Sequence
  Synthetic oligonucleotide: FAS-685
cagcggcgcacgcgggcacc

SEQ ID NO: 31007 - RNA, 21 nt, Artificial Sequence
  Synthetic oligonucleotide: FAS-4060
gcagcggcgcacgcgggcacc

SEQ ID NO: 31008 - RNA, 22 nt, Artificial Sequence
  Synthetic oligonucleotide: FAS-4061
ggcagcggcgcacgcgggcacc

SEQ ID NO: 31009 - RNA, 23 nt, Artificial Sequence
  Synthetic oligonucleotide: FAS-4062
cggcagcggcgcacgcgggcacc

SEQ ID NO: 31010 - RNA, 24 nt, Artificial Sequence
  Synthetic oligonucleotide: FAS-4063
gcggcagcggcgcacgcgggcacc

SEQ ID NO: 31011 - RNA, 18 nt, Artificial Sequence
  Synthetic oligonucleotide: FAS-4064
gccacugcaggaacgccc

SEQ ID NO: 31012 - RNA, 19 nt, Artificial Sequence
  Synthetic oligonucleotide: FAS-4065
agccacugcaggaacgccc

SEQ ID NO: 31013 - RNA, 20 nt, Artificial Sequence
  Synthetic oligonucleotide: FAS-618
cagccacugcaggaacgccc

SEQ ID NO: 31014 - RNA, 21 nt, Artificial Sequence
  Synthetic oligonucleotide: FAS-4066
ccagccacugcaggaacgccc

SEQ ID NO: 31015 - RNA, 22 nt, Artificial Sequence
  Synthetic oligonucleotide: FAS-4067
gccagccacugcaggaacgccc

SEQ ID NO: 31016 - RNA, 23 nt, Artificial Sequence
  Synthetic oligonucleotide: FAS-4068
ugccagccacugcaggaacgccc

SEQ ID NO: 31017 - RNA, 24 nt, Artificial Sequence
  Synthetic oligonucleotide: FAS-4069
augccagccacugcaggaacgccc

SEQ ID NO: 31018 - RNA, 18 nt, Artificial Sequence
  Synthetic oligonucleotide: FAS-4070
agccacugcaggaacgcc

SEQ ID NO: 31019 - RNA, 19 nt, Artificial Sequence
  Synthetic oligonucleotide: FAS-4071
cagccacugcaggaacgcc

SEQ ID NO: 31020 - RNA, 20 nt, Artificial Sequence
  Synthetic oligonucleotide: FAS-1004
ccagccacugcaggaacgcc

SEQ ID NO: 31021 - RNA, 21 nt, Artificial Sequence
  Synthetic oligonucleotide: FAS-4072
gccagccacugcaggaacgcc

SEQ ID NO: 31022 - RNA, 22 nt, Artificial Sequence
  Synthetic oligonucleotide: FAS-4073
ugccagccacugcaggaacgcc

SEQ ID NO: 31023 - RNA, 23 nt, Artificial Sequence
  Synthetic oligonucleotide: FAS-4074
augccagccacugcaggaacgcc

SEQ ID NO: 31024 - RNA, 24 nt, Artificial Sequence
  Synthetic oligonucleotide: FAS-4075
caugccagccacugcaggaacgcc

SEQ ID NO: 31025 - RNA, 18 nt, Artificial Sequence
  Synthetic oligonucleotide: FAS-4076
cuuaccccgucuuagucc

SEQ ID NO: 31026 - RNA, 19 nt, Artificial Sequence
  Synthetic oligonucleotide: FAS-4077
gcuuaccccgucuuagucc

SEQ ID NO: 31027 - RNA, 20 nt, Artificial Sequence
  Synthetic oligonucleotide: FAS-667
ggcuuaccccgucuuagucc

SEQ ID NO: 31028 - RNA, 21 nt, Artificial Sequence
  Synthetic oligonucleotide: FAS-4078
aggcuuaccccgucuuagucc

SEQ ID NO: 31029 - RNA, 22 nt, Artificial Sequence
  Synthetic oligonucleotide: FAS-4079
gaggcuuaccccgucuuagucc

SEQ ID NO: 31030 - RNA, 23 nt, Artificial Sequence
  Synthetic oligonucleotide: FAS-4080
ggaggcuuaccccgucuuagucc

SEQ ID NO: 31031 - RNA, 24 nt, Artificial Sequence
  Synthetic oligonucleotide: FAS-4081
uggaggcuuaccccgucuuagucc

SEQ ID NO: 31032 - RNA, 18 nt, Artificial Sequence
  Synthetic oligonucleotide: FAS-4082
gugaauguuuaauauagc

SEQ ID NO: 31033 - RNA, 19 nt, Artificial Sequence
  Synthetic oligonucleotide: FAS-4083
ugugaauguuuaauauagc

SEQ ID NO: 31034 - RNA, 20 nt, Artificial Sequence
  Synthetic oligonucleotide: FAS-597
uugugaauguuuaauauagc

SEQ ID NO: 31035 - RNA, 21 nt, Artificial Sequence
  Synthetic oligonucleotide: FAS-4084
auugugaauguuuaauauagc

SEQ ID NO: 31036 - RNA, 22 nt, Artificial Sequence
  Synthetic oligonucleotide: FAS-4085
aauugugaauguuuaauauagc

SEQ ID NO: 31037 - RNA, 23 nt, Artificial Sequence
  Synthetic oligonucleotide: FAS-4086
uaauugugaauguuuaauauagc

SEQ ID NO: 31038 - RNA, 24 nt, Artificial Sequence
  Synthetic oligonucleotide: FAS-4087
guaauugugaauguuuaauauagc

SEQ ID NO: 31039 - RNA, 18 nt, Artificial Sequence
  Synthetic oligonucleotide: FAS-4088
gaagccuuuagaaagggc

SEQ ID NO: 31040 - RNA, 19 nt, Artificial Sequence
  Synthetic oligonucleotide: FAS-4089
agaagccuuuagaaagggc

SEQ ID NO: 31041 - RNA, 20 nt, Artificial Sequence
  Synthetic oligonucleotide: FAS-613
cagaagccuuuagaaagggc

SEQ ID NO: 31042 - RNA, 21 nt, Artificial Sequence
  Synthetic oligonucleotide: FAS-4090
gcagaagccuuuagaaagggc

SEQ ID NO: 31043 - RNA, 22 nt, Artificial Sequence
  Synthetic oligonucleotide: FAS-4091
agcagaagccuuuagaaagggc

SEQ ID NO: 31044 - RNA, 23 nt, Artificial Sequence
  Synthetic oligonucleotide: FAS-4092
cagcagaagccuuuagaaagggc

SEQ ID NO: 31045 - RNA, 24 nt, Artificial Sequence
  Synthetic oligonucleotide: FAS-4093
acagcagaagccuuuagaaagggc

SEQ ID NO: 31046 - RNA, 18 nt, Artificial Sequence
  Synthetic oligonucleotide: FAS-4094
aggcaaaguggggcgggc

SEQ ID NO: 31047 - RNA, 19 nt, Artificial Sequence
  Synthetic oligonucleotide: FAS-4095
uaggcaaaguggggcgggc

SEQ ID NO: 31048 - RNA, 20 nt, Artificial Sequence
  Synthetic oligonucleotide: FAS-1060
auaggcaaaguggggcgggc

SEQ ID NO: 31049 - RNA, 21 nt, Artificial Sequence
  Synthetic oligonucleotide: FAS-4096
gauaggcaaaguggggcgggc

SEQ ID NO: 31050 - RNA, 22 nt, Artificial Sequence
  Synthetic oligonucleotide: FAS-4097
ggauaggcaaaguggggcgggc

SEQ ID NO: 31051 - RNA, 23 nt, Artificial Sequence
  Synthetic oligonucleotide: FAS-4098
gggauaggcaaaguggggcgggc

SEQ ID NO: 31052 - RNA, 24 nt, Artificial Sequence
  Synthetic oligonucleotide: FAS-4099
ggggauaggcaaaguggggcgggc

SEQ ID NO: 31053 - RNA, 18 nt, Artificial Sequence
  Synthetic oligonucleotide: FAS-4100
ucaggggcgggcacuggc

SEQ ID NO: 31054 - RNA, 19 nt, Artificial Sequence
  Synthetic oligonucleotide: FAS-4101
cucaggggcgggcacuggc

SEQ ID NO: 31055 - RNA, 20 nt, Artificial Sequence
  Synthetic oligonucleotide: FAS-1032
ccucaggggcgggcacuggc

SEQ ID NO: 31056 - RNA, 21 nt, Artificial Sequence
  Synthetic oligonucleotide: FAS-4102
gccucaggggcgggcacuggc

SEQ ID NO: 31057 - RNA, 22 nt, Artificial Sequence
  Synthetic oligonucleotide: FAS-4103
agccucaggggcgggcacuggc

SEQ ID NO: 31058 - RNA, 23 nt, Artificial Sequence
  Synthetic oligonucleotide: FAS-4104
gagccucaggggcgggcacuggc

SEQ ID NO: 31059 - RNA, 24 nt, Artificial Sequence
  Synthetic oligonucleotide: FAS-4105
ggagccucaggggcgggcacuggc

SEQ ID NO: 31060 - RNA, 18 nt, Artificial Sequence
  Synthetic oligonucleotide: FAS-4106
guuuacgagugacuuggc

SEQ ID NO: 31061 - RNA, 19 nt, Artificial Sequence
  Synthetic oligonucleotide: FAS-4107
gguuuacgagugacuuggc

SEQ ID NO: 31062 - RNA, 20 nt, Artificial Sequence
  Synthetic oligonucleotide: FAS-637
cgguuuacgagugacuuggc

SEQ ID NO: 31063 - RNA, 21 nt, Artificial Sequence
  Synthetic oligonucleotide: FAS-4108
gcgguuuacgagugacuuggc

SEQ ID NO: 31064 - RNA, 22 nt, Artificial Sequence
  Synthetic oligonucleotide: FAS-4109
agcgguuuacgagugacuuggc

SEQ ID NO: 31065 - RNA, 23 nt, Artificial Sequence
  Synthetic oligonucleotide: FAS-4110
aagcgguuuacgagugacuuggc

SEQ ID NO: 31066 - RNA, 24 nt, Artificial Sequence
  Synthetic oligonucleotide: FAS-4111
gaagcgguuuacgagugacuuggc

SEQ ID NO: 31067 - RNA, 18 nt, Artificial Sequence
  Synthetic oligonucleotide: FAS-4112
gagcaugccagccacugc

SEQ ID NO: 31068 - RNA, 19 nt, Artificial Sequence
  Synthetic oligonucleotide: FAS-4113
ugagcaugccagccacugc

SEQ ID NO: 31069 - RNA, 20 nt, Artificial Sequence
  Synthetic oligonucleotide: FAS-617
gugagcaugccagccacugc

SEQ ID NO: 31070 - RNA, 21 nt, Artificial Sequence
  Synthetic oligonucleotide: FAS-4114
agugagcaugccagccacugc

SEQ ID NO: 31071 - RNA, 22 nt, Artificial Sequence
  Synthetic oligonucleotide: FAS-4115
aagugagcaugccagccacugc

SEQ ID NO: 31072 - RNA, 23 nt, Artificial Sequence
  Synthetic oligonucleotide: FAS-4116
gaagugagcaugccagccacugc

SEQ ID NO: 31073 - RNA, 24 nt, Artificial Sequence
  Synthetic oligonucleotide: FAS-4117
ugaagugagcaugccagccacugc

SEQ ID NO: 31074 - RNA, 18 nt, Artificial Sequence
  Synthetic oligonucleotide: FAS-4118
ugacuuggcuggagccuc

SEQ ID NO: 31075 - RNA, 19 nt, Artificial Sequence
  Synthetic oligonucleotide: FAS-4119
gugacuuggcuggagccuc

SEQ ID NO: 31076 - RNA, 20 nt, Artificial Sequence
  Synthetic oligonucleotide: FAS-638
agugacuuggcuggagccuc

SEQ ID NO: 31077 - RNA, 21 nt, Artificial Sequence
  Synthetic oligonucleotide: FAS-4120
gagugacuuggcuggagccuc

SEQ ID NO: 31078 - RNA, 22 nt, Artificial Sequence
  Synthetic oligonucleotide: FAS-4121
cgagugacuuggcuggagccuc

SEQ ID NO: 31079 - RNA, 23 nt, Artificial Sequence
  Synthetic oligonucleotide: FAS-4122
acgagugacuuggcuggagccuc

SEQ ID NO: 31080 - RNA, 24 nt, Artificial Sequence
  Synthetic oligonucleotide: FAS-4123
uacgagugacuuggcuggagccuc

SEQ ID NO: 31081 - RNA, 18 nt, Artificial Sequence
  Synthetic oligonucleotide: FAS-4124
guuagcuuuguuuuccuc

SEQ ID NO: 31082 - RNA, 19 nt, Artificial Sequence
  Synthetic oligonucleotide: FAS-4125
uguuagcuuuguuuuccuc

SEQ ID NO: 31083 - RNA, 20 nt, Artificial Sequence
  Synthetic oligonucleotide: FAS-982
uuguuagcuuuguuuuccuc

SEQ ID NO: 31084 - RNA, 21 nt, Artificial Sequence
  Synthetic oligonucleotide: FAS-4126
guuguuagcuuuguuuuccuc

SEQ ID NO: 31085 - RNA, 22 nt, Artificial Sequence
  Synthetic oligonucleotide: FAS-4127
aguuguuagcuuuguuuuccuc

SEQ ID NO: 31086 - RNA, 23 nt, Artificial Sequence
  Synthetic oligonucleotide: FAS-4128
aaguuguuagcuuuguuuuccuc

SEQ ID NO: 31087 - RNA, 24 nt, Artificial Sequence
  Synthetic oligonucleotide: FAS-4129
uaaguuguuagcuuuguuuuccuc

SEQ ID NO: 31088 - RNA, 18 nt, Artificial Sequence
  Synthetic oligonucleotide: FAS-4130
agggcaggaggccggcuc

SEQ ID NO: 31089 - RNA, 19 nt, Artificial Sequence
  Synthetic oligonucleotide: FAS-4131
aagggcaggaggccggcuc

SEQ ID NO: 31090 - RNA, 20 nt, Artificial Sequence
  Synthetic oligonucleotide: FAS-999
aaagggcaggaggccggcuc

SEQ ID NO: 31091 - RNA, 21 nt, Artificial Sequence
  Synthetic oligonucleotide: FAS-4132
gaaagggcaggaggccggcuc

SEQ ID NO: 31092 - RNA, 22 nt, Artificial Sequence
  Synthetic oligonucleotide: FAS-4133
agaaagggcaggaggccggcuc

SEQ ID NO: 31093 - RNA, 23 nt, Artificial Sequence
  Synthetic oligonucleotide: FAS-4134
uagaaagggcaggaggccggcuc

SEQ ID NO: 31094 - RNA, 24 nt, Artificial Sequence
  Synthetic oligonucleotide: FAS-4135
uuagaaagggcaggaggccggcuc

SEQ ID NO: 31095 - RNA, 18 nt, Artificial Sequence
  Synthetic oligonucleotide: FAS-4136
gcuuaccccgucuuaguc

SEQ ID NO: 31096 - RNA, 19 nt, Artificial Sequence
  Synthetic oligonucleotide: FAS-4137
ggcuuaccccgucuuaguc

SEQ ID NO: 31097 - RNA, 20 nt, Artificial Sequence
  Synthetic oligonucleotide: FAS-1054
aggcuuaccccgucuuaguc

SEQ ID NO: 31098 - RNA, 21 nt, Artificial Sequence
  Synthetic oligonucleotide: FAS-4138
gaggcuuaccccgucuuaguc

SEQ ID NO: 31099 - RNA, 22 nt, Artificial Sequence
  Synthetic oligonucleotide: FAS-4139
ggaggcuuaccccgucuuaguc

SEQ ID NO: 31100 - RNA, 23 nt, Artificial Sequence
  Synthetic oligonucleotide: FAS-4140
uggaggcuuaccccgucuuaguc

SEQ ID NO: 31101 - RNA, 24 nt, Artificial Sequence
  Synthetic oligonucleotide: FAS-4141
guggaggcuuaccccgucuuaguc

SEQ ID NO: 31102 - RNA, 18 nt, Artificial Sequence
  Synthetic oligonucleotide: FAS-4142
augguuaacuguccauuc

SEQ ID NO: 31103 - RNA, 19 nt, Artificial Sequence
  Synthetic oligonucleotide: FAS-4143
uaugguuaacuguccauuc

SEQ ID NO: 31104 - RNA, 20 nt, Artificial Sequence
  Synthetic oligonucleotide: FAS-987
auaugguuaacuguccauuc

SEQ ID NO: 31105 - RNA, 21 nt, Artificial Sequence
  Synthetic oligonucleotide: FAS-4144
cauaugguuaacuguccauuc

SEQ ID NO: 31106 - RNA, 22 nt, Artificial Sequence
  Synthetic oligonucleotide: FAS-4145
ucauaugguuaacuguccauuc

SEQ ID NO: 31107 - RNA, 23 nt, Artificial Sequence
  Synthetic oligonucleotide: FAS-4146
uucauaugguuaacuguccauuc

SEQ ID NO: 31108 - RNA, 24 nt, Artificial Sequence
  Synthetic oligonucleotide: FAS-4147
uuucauaugguuaacuguccauuc

SEQ ID NO: 31109 - RNA, 18 nt, Artificial Sequence
  Synthetic oligonucleotide: FAS-4148
gguguucaaagacgcuuc

SEQ ID NO: 31110 - RNA, 19 nt, Artificial Sequence
  Synthetic oligonucleotide: FAS-4149
agguguucaaagacgcuuc

SEQ ID NO: 31111 - RNA, 20 nt, Artificial Sequence
  Synthetic oligonucleotide: FAS-630
cagguguucaaagacgcuuc

SEQ ID NO: 31112 - RNA, 21 nt, Artificial Sequence
  Synthetic oligonucleotide: FAS-4150
acagguguucaaagacgcuuc

SEQ ID NO: 31113 - RNA, 22 nt, Artificial Sequence
  Synthetic oligonucleotide: FAS-4151
cacagguguucaaagacgcuuc

SEQ ID NO: 31114 - RNA, 23 nt, Artificial Sequence
  Synthetic oligonucleotide: FAS-4152
acacagguguucaaagacgcuuc

SEQ ID NO: 31115 - RNA, 24 nt, Artificial Sequence
  Synthetic oligonucleotide: FAS-4153
cacacagguguucaaagacgcuuc

SEQ ID NO: 31116 - RNA, 18 nt, Artificial Sequence
  Synthetic oligonucleotide: FAS-4154
ugaccaccggggcuuuuc

SEQ ID NO: 31117 - RNA, 19 nt, Artificial Sequence
  Synthetic oligonucleotide: FAS-4155
cugaccaccggggcuuuuc

SEQ ID NO: 31118 - RNA, 20 nt, Artificial Sequence
  Synthetic oligonucleotide: FAS-1016
ccugaccaccggggcuuuuc

SEQ ID NO: 31119 - RNA, 21 nt, Artificial Sequence
  Synthetic oligonucleotide: FAS-4156
uccugaccaccggggcuuuuc

SEQ ID NO: 31120 - RNA, 22 nt, Artificial Sequence
  Synthetic oligonucleotide: FAS-4157
cuccugaccaccggggcuuuuc

SEQ ID NO: 31121 - RNA, 23 nt, Artificial Sequence
  Synthetic oligonucleotide: FAS-4158
ccuccugaccaccggggcuuuuc

SEQ ID NO: 31122 - RNA, 24 nt, Artificial Sequence
  Synthetic oligonucleotide: FAS-4159
uccuccugaccaccggggcuuuuc

SEQ ID NO: 31123 - RNA, 18 nt, Artificial Sequence
  Synthetic oligonucleotide: FAS-4160
ucccggggauaggcaaag

SEQ ID NO: 31124 - RNA, 19 nt, Artificial Sequence
  Synthetic oligonucleotide: FAS-4161
gucccggggauaggcaaag

SEQ ID NO: 31125 - RNA, 20 nt, Artificial Sequence
  Synthetic oligonucleotide: FAS-671
agucccggggauaggcaaag

SEQ ID NO: 31126 - RNA, 21 nt, Artificial Sequence
  Synthetic oligonucleotide: FAS-4162
uagucccggggauaggcaaag

SEQ ID NO: 31127 - RNA, 22 nt, Artificial Sequence
  Synthetic oligonucleotide: FAS-4163
uuagucccggggauaggcaaag

SEQ ID NO: 31128 - RNA, 23 nt, Artificial Sequence
  Synthetic oligonucleotide: FAS-4164
cuuagucccggggauaggcaaag

SEQ ID NO: 31129 - RNA, 24 nt, Artificial Sequence
  Synthetic oligonucleotide: FAS-4165
ucuuagucccggggauaggcaaag

SEQ ID NO: 31130 - RNA, 18 nt, Artificial Sequence
  Synthetic oligonucleotide: FAS-4166
ucccagguugaacuacag

SEQ ID NO: 31131 - RNA, 19 nt, Artificial Sequence
  Synthetic oligonucleotide: FAS-4167
uucccagguugaacuacag

SEQ ID NO: 31132 - RNA, 20 nt, Artificial Sequence
  Synthetic oligonucleotide: FAS-994
cuucccagguugaacuacag

SEQ ID NO: 31133 - RNA, 21 nt, Artificial Sequence
  Synthetic oligonucleotide: FAS-4168
acuucccagguugaacuacag

SEQ ID NO: 31134 - RNA, 22 nt, Artificial Sequence
  Synthetic oligonucleotide: FAS-4169
aacuucccagguugaacuacag

SEQ ID NO: 31135 - RNA, 23 nt, Artificial Sequence
  Synthetic oligonucleotide: FAS-4170
caacuucccagguugaacuacag

SEQ ID NO: 31136 - RNA, 24 nt, Artificial Sequence
  Synthetic oligonucleotide: FAS-4171
ccaacuucccagguugaacuacag

SEQ ID NO: 31137 - RNA, 18 nt, Artificial Sequence
  Synthetic oligonucleotide: FAS-4172
ccagcccuggcugcccag

SEQ ID NO: 31138 - RNA, 19 nt, Artificial Sequence
  Synthetic oligonucleotide: FAS-4173
gccagcccuggcugcccag

SEQ ID NO: 31139 - RNA, 20 nt, Artificial Sequence
  Synthetic oligonucleotide: FAS-1035
ggccagcccuggcugcccag

SEQ ID NO: 31140 - RNA, 21 nt, Artificial Sequence
  Synthetic oligonucleotide: FAS-4174
aggccagcccuggcugcccag

SEQ ID NO: 31141 - RNA, 22 nt, Artificial Sequence
  Synthetic oligonucleotide: FAS-4175
gaggccagcccuggcugcccag

SEQ ID NO: 31142 - RNA, 23 nt, Artificial Sequence
  Synthetic oligonucleotide: FAS-4176
ugaggccagcccuggcugcccag

SEQ ID NO: 31143 - RNA, 24 nt, Artificial Sequence
  Synthetic oligonucleotide: FAS-4177
cugaggccagcccuggcugcccag

SEQ ID NO: 31144 - RNA, 18 nt, Artificial Sequence
  Synthetic oligonucleotide: FAS-4178
gacccgcucaguacggag

SEQ ID NO: 31145 - RNA, 19 nt, Artificial Sequence
  Synthetic oligonucleotide: FAS-4179
ggacccgcucaguacggag

SEQ ID NO: 31146 - RNA, 20 nt, Artificial Sequence
  Synthetic oligonucleotide: FAS-1041
uggacccgcucaguacggag

SEQ ID NO: 31147 - RNA, 21 nt, Artificial Sequence
  Synthetic oligonucleotide: FAS-4180
guggacccgcucaguacggag

SEQ ID NO: 31148 - RNA, 22 nt, Artificial Sequence
  Synthetic oligonucleotide: FAS-4181
gguggacccgcucaguacggag

SEQ ID NO: 31149 - RNA, 23 nt, Artificial Sequence
  Synthetic oligonucleotide: FAS-4182
ugguggacccgcucaguacggag

SEQ ID NO: 31150 - RNA, 24 nt, Artificial Sequence
  Synthetic oligonucleotide: FAS-4183
uugguggacccgcucaguacggag

SEQ ID NO: 31151 - RNA, 18 nt, Artificial Sequence
  Synthetic oligonucleotide: FAS-4184
ugugaauguuuaauauag

SEQ ID NO: 31152 - RNA, 19 nt, Artificial Sequence
  Synthetic oligonucleotide: FAS-4185
uugugaauguuuaauauag

SEQ ID NO: 31153 - RNA, 20 nt, Artificial Sequence
  Synthetic oligonucleotide: FAS-980
auugugaauguuuaauauag

SEQ ID NO: 31154 - RNA, 21 nt, Artificial Sequence
  Synthetic oligonucleotide: FAS-4186
aauugugaauguuuaauauag

SEQ ID NO: 31155 - RNA, 22 nt, Artificial Sequence
  Synthetic oligonucleotide: FAS-4187
uaauugugaauguuuaauauag

SEQ ID NO: 31156 - RNA, 23 nt, Artificial Sequence
  Synthetic oligonucleotide: FAS-4188
guaauugugaauguuuaauauag

SEQ ID NO: 31157 - RNA, 24 nt, Artificial Sequence
  Synthetic oligonucleotide: FAS-4189
aguaauugugaauguuuaauauag

SEQ ID NO: 31158 - RNA, 18 nt, Artificial Sequence
  Synthetic oligonucleotide: FAS-4190
ggcaaaguggggcgggcg

SEQ ID NO: 31159 - RNA, 19 nt, Artificial Sequence
  Synthetic oligonucleotide: FAS-4191
aggcaaaguggggcgggcg

SEQ ID NO: 31160 - RNA, 20 nt, Artificial Sequence
  Synthetic oligonucleotide: FAS-676
uaggcaaaguggggcgggcg

SEQ ID NO: 31161 - RNA, 21 nt, Artificial Sequence
  Synthetic oligonucleotide: FAS-4192
auaggcaaaguggggcgggcg

SEQ ID NO: 31162 - RNA, 22 nt, Artificial Sequence
  Synthetic oligonucleotide: FAS-4193
gauaggcaaaguggggcgggcg

SEQ ID NO: 31163 - RNA, 23 nt, Artificial Sequence
  Synthetic oligonucleotide: FAS-4194
ggauaggcaaaguggggcgggcg

SEQ ID NO: 31164 - RNA, 24 nt, Artificial Sequence
  Synthetic oligonucleotide: FAS-4195
gggauaggcaaaguggggcgggcg

SEQ ID NO: 31165 - RNA, 18 nt, Artificial Sequence
  Synthetic oligonucleotide: FAS-4196
aaggcuccuguacccagg

SEQ ID NO: 31166 - RNA, 19 nt, Artificial Sequence
  Synthetic oligonucleotide: FAS-4197
caaggcuccuguacccagg

SEQ ID NO: 31167 - RNA, 20 nt, Artificial Sequence
  Synthetic oligonucleotide: FAS-991
ccaaggcuccuguacccagg

SEQ ID NO: 31168 - RNA, 21 nt, Artificial Sequence
  Synthetic oligonucleotide: FAS-4198
gccaaggcuccuguacccagg

SEQ ID NO: 31169 - RNA, 22 nt, Artificial Sequence
  Synthetic oligonucleotide: FAS-4199
agccaaggcuccuguacccagg

SEQ ID NO: 31170 - RNA, 23 nt, Artificial Sequence
  Synthetic oligonucleotide: FAS-4200
uagccaaggcuccuguacccagg

SEQ ID NO: 31171 - RNA, 24 nt, Artificial Sequence
  Synthetic oligonucleotide: FAS-4201
uuagccaaggcuccuguacccagg

SEQ ID NO: 31172 - RNA, 18 nt, Artificial Sequence
  Synthetic oligonucleotide: FAS-4202
cagcccuggcugcccagg

SEQ ID NO: 31173 - RNA, 19 nt, Artificial Sequence
  Synthetic oligonucleotide: FAS-4203
ccagcccuggcugcccagg

SEQ ID NO: 31174 - RNA, 20 nt, Artificial Sequence
  Synthetic oligonucleotide: FAS-648
gccagcccuggcugcccagg

SEQ ID NO: 31175 - RNA, 21 nt, Artificial Sequence
  Synthetic oligonucleotide: FAS-4204
ggccagcccuggcugcccagg

SEQ ID NO: 31176 - RNA, 22 nt, Artificial Sequence
  Synthetic oligonucleotide: FAS-4205
aggccagcccuggcugcccagg

SEQ ID NO: 31177 - RNA, 23 nt, Artificial Sequence
  Synthetic oligonucleotide: FAS-4206
gaggccagcccuggcugcccagg

SEQ ID NO: 31178 - RNA, 24 nt, Artificial Sequence
  Synthetic oligonucleotide: FAS-4207
ugaggccagcccuggcugcccagg

SEQ ID NO: 31179 - RNA, 18 nt, Artificial Sequence
  Synthetic oligonucleotide: FAS-4208
ccuccccaacuucccagg

SEQ ID NO: 31180 - RNA, 19 nt, Artificial Sequence
  Synthetic oligonucleotide: FAS-4209
accuccccaacuucccagg

SEQ ID NO: 31181 - RNA, 20 nt, Artificial Sequence
  Synthetic oligonucleotide: FAS-993
gaccuccccaacuucccagg

SEQ ID NO: 31182 - RNA, 21 nt, Artificial Sequence
  Synthetic oligonucleotide: FAS-4210
agaccuccccaacuucccagg

SEQ ID NO: 31183 - RNA, 22 nt, Artificial Sequence
  Synthetic oligonucleotide: FAS-4211
aagaccuccccaacuucccagg

SEQ ID NO: 31184 - RNA, 23 nt, Artificial Sequence
  Synthetic oligonucleotide: FAS-4212
caagaccuccccaacuucccagg

SEQ ID NO: 31185 - RNA, 24 nt, Artificial Sequence
  Synthetic oligonucleotide: FAS-4213
ucaagaccuccccaacuucccagg

SEQ ID NO: 31186 - RNA, 18 nt, Artificial Sequence
  Synthetic oligonucleotide: FAS-2587
gagcccucuccugcccgg

SEQ ID NO: 31187 - RNA, 19 nt, Artificial Sequence
  Synthetic oligonucleotide: FAS-2588
ugagcccucuccugcccgg

SEQ ID NO: 31188 - RNA, 20 nt, Artificial Sequence
  Synthetic oligonucleotide: FAS-1052
gugagcccucuccugcccgg

SEQ ID NO: 31189 - RNA, 21 nt, Artificial Sequence
  Synthetic oligonucleotide: FAS-2589
ggugagcccucuccugcccgg

SEQ ID NO: 31190 - RNA, 22 nt, Artificial Sequence
  Synthetic oligonucleotide: FAS-2590
uggugagcccucuccugcccgg

SEQ ID NO: 31191 - RNA, 23 nt, Artificial Sequence
  Synthetic oligonucleotide: FAS-2591
cuggugagcccucuccugcccgg

SEQ ID NO: 31192 - RNA, 24 nt, Artificial Sequence
  Synthetic oligonucleotide: FAS-2592
ucuggugagcccucuccugcccgg

SEQ ID NO: 31193 - RNA, 18 nt, Artificial Sequence
  Synthetic oligonucleotide: FAS-4214
agaagccuuuagaaaggg

SEQ ID NO: 31194 - RNA, 19 nt, Artificial Sequence
  Synthetic oligonucleotide: FAS-4215
cagaagccuuuagaaaggg

SEQ ID NO: 31195 - RNA, 20 nt, Artificial Sequence
  Synthetic oligonucleotide: FAS-997
gcagaagccuuuagaaaggg

SEQ ID NO: 31196 - RNA, 21 nt, Artificial Sequence
  Synthetic oligonucleotide: FAS-4216
agcagaagccuuuagaaaggg

SEQ ID NO: 31197 - RNA, 22 nt, Artificial Sequence
  Synthetic oligonucleotide: FAS-4217
cagcagaagccuuuagaaaggg

SEQ ID NO: 31198 - RNA, 23 nt, Artificial Sequence
  Synthetic oligonucleotide: FAS-4218
acagcagaagccuuuagaaaggg

SEQ ID NO: 31199 - RNA, 24 nt, Artificial Sequence
  Synthetic oligonucleotide: FAS-4219
uacagcagaagccuuuagaaaggg

SEQ ID NO: 31200 - RNA, 18 nt, Artificial Sequence
  Synthetic oligonucleotide: FAS-4220
uuggcuggagccucaggg

SEQ ID NO: 31201 - RNA, 19 nt, Artificial Sequence
  Synthetic oligonucleotide: FAS-4221
cuuggcuggagccucaggg

SEQ ID NO: 31202 - RNA, 20 nt, Artificial Sequence
  Synthetic oligonucleotide: FAS-1031
acuuggcuggagccucaggg

SEQ ID NO: 31203 - RNA, 21 nt, Artificial Sequence
  Synthetic oligonucleotide: FAS-4222
gacuuggcuggagccucaggg

SEQ ID NO: 31204 - RNA, 22 nt, Artificial Sequence
  Synthetic oligonucleotide: FAS-4223
ugacuuggcuggagccucaggg

SEQ ID NO: 31205 - RNA, 23 nt, Artificial Sequence
  Synthetic oligonucleotide: FAS-4224
gugacuuggcuggagccucaggg

SEQ ID NO: 31206 - RNA, 24 nt, Artificial Sequence
  Synthetic oligonucleotide: FAS-4225
agugacuuggcuggagccucaggg

SEQ ID NO: 31207 - RNA, 18 nt, Artificial Sequence
  Synthetic oligonucleotide: FAS-2599
agcccucuccugcccggg

SEQ ID NO: 31208 - RNA, 19 nt, Artificial Sequence
  Synthetic oligonucleotide: FAS-2600
gagcccucuccugcccggg

SEQ ID NO: 31209 - RNA, 20 nt, Artificial Sequence
  Synthetic oligonucleotide: FAS-665
ugagcccucuccugcccggg

SEQ ID NO: 31210 - RNA, 21 nt, Artificial Sequence
  Synthetic oligonucleotide: FAS-2601
gugagcccucuccugcccggg

SEQ ID NO: 31211 - RNA, 22 nt, Artificial Sequence
  Synthetic oligonucleotide: FAS-2602
ggugagcccucuccugcccggg

SEQ ID NO: 31212 - RNA, 23 nt, Artificial Sequence
  Synthetic oligonucleotide: FAS-2603
uggugagcccucuccugcccggg

SEQ ID NO: 31213 - RNA, 24 nt, Artificial Sequence
  Synthetic oligonucleotide: FAS-2604
cuggugagcccucuccugcccggg

SEQ ID NO: 31214 - RNA, 18 nt, Artificial Sequence
  Synthetic oligonucleotide: FAS-4226
ggggauaggcaaaguggg

SEQ ID NO: 31215 - RNA, 19 nt, Artificial Sequence
  Synthetic oligonucleotide: FAS-4227
cggggauaggcaaaguggg

SEQ ID NO: 31216 - RNA, 20 nt, Artificial Sequence
  Synthetic oligonucleotide: FAS-1059
ccggggauaggcaaaguggg

SEQ ID NO: 31217 - RNA, 21 nt, Artificial Sequence
  Synthetic oligonucleotide: FAS-4228
cccggggauaggcaaaguggg

SEQ ID NO: 31218 - RNA, 22 nt, Artificial Sequence
  Synthetic oligonucleotide: FAS-4229
ucccggggauaggcaaaguggg

SEQ ID NO: 31219 - RNA, 23 nt, Artificial Sequence
  Synthetic oligonucleotide: FAS-4230
gucccggggauaggcaaaguggg

SEQ ID NO: 31220 - RNA, 24 nt, Artificial Sequence
  Synthetic oligonucleotide: FAS-4231
agucccggggauaggcaaaguggg

SEQ ID NO: 31221 - RNA, 18 nt, Artificial Sequence
  Synthetic oligonucleotide: FAS-4232
gguuuacgagugacuugg

SEQ ID NO: 31222 - RNA, 19 nt, Artificial Sequence
  Synthetic oligonucleotide: FAS-4233
cgguuuacgagugacuugg

SEQ ID NO: 31223 - RNA, 20 nt, Artificial Sequence
  Synthetic oligonucleotide: FAS-1027
gcgguuuacgagugacuugg

SEQ ID NO: 31224 - RNA, 21 nt, Artificial Sequence
  Synthetic oligonucleotide: FAS-4234
agcgguuuacgagugacuugg

SEQ ID NO: 31225 - RNA, 22 nt, Artificial Sequence
  Synthetic oligonucleotide: FAS-4235
aagcgguuuacgagugacuugg

SEQ ID NO: 31226 - RNA, 23 nt, Artificial Sequence
  Synthetic oligonucleotide: FAS-4236
gaagcgguuuacgagugacuugg

SEQ ID NO: 31227 - RNA, 24 nt, Artificial Sequence
  Synthetic oligonucleotide: FAS-4237
ggaagcgguuuacgagugacuugg

SEQ ID NO: 31228 - RNA, 18 nt, Artificial Sequence
  Synthetic oligonucleotide: FAS-2617
gauugcucaacaaccaug

SEQ ID NO: 31229 - RNA, 19 nt, Artificial Sequence
  Synthetic oligonucleotide: FAS-2618
ggauugcucaacaaccaug

SEQ ID NO: 31230 - RNA, 20 nt, Artificial Sequence
  Synthetic oligonucleotide: FAS-1048
aggauugcucaacaaccaug

SEQ ID NO: 31231 - RNA, 21 nt, Artificial Sequence
  Synthetic oligonucleotide: FAS-2619
gaggauugcucaacaaccaug

SEQ ID NO: 31232 - RNA, 22 nt, Artificial Sequence
  Synthetic oligonucleotide: FAS-2620
ggaggauugcucaacaaccaug

SEQ ID NO: 31233 - RNA, 23 nt, Artificial Sequence
  Synthetic oligonucleotide: FAS-2621
cggaggauugcucaacaaccaug

SEQ ID NO: 31234 - RNA, 24 nt, Artificial Sequence
  Synthetic oligonucleotide: FAS-2622
ucggaggauugcucaacaaccaug

SEQ ID NO: 31235 - RNA, 18 nt, Artificial Sequence
  Synthetic oligonucleotide: FAS-4238
ugagcaugccagccacug

SEQ ID NO: 31236 - RNA, 19 nt, Artificial Sequence
  Synthetic oligonucleotide: FAS-4239
gugagcaugccagccacug

SEQ ID NO: 31237 - RNA, 20 nt, Artificial Sequence
  Synthetic oligonucleotide: FAS-1002
agugagcaugccagccacug

SEQ ID NO: 31238 - RNA, 21 nt, Artificial Sequence
  Synthetic oligonucleotide: FAS-4240
aagugagcaugccagccacug

SEQ ID NO: 31239 - RNA, 22 nt, Artificial Sequence
  Synthetic oligonucleotide: FAS-4241
gaagugagcaugccagccacug

SEQ ID NO: 31240 - RNA, 23 nt, Artificial Sequence
  Synthetic oligonucleotide: FAS-4242
ugaagugagcaugccagccacug

SEQ ID NO: 31241 - RNA, 24 nt, Artificial Sequence
  Synthetic oligonucleotide: FAS-4243
cugaagugagcaugccagccacug

SEQ ID NO: 31242 - RNA, 18 nt, Artificial Sequence
  Synthetic oligonucleotide: FAS-2629
uggacccuccuaccucug

SEQ ID NO: 31243 - RNA, 19 nt, Artificial Sequence
  Synthetic oligonucleotide: FAS-2630
cuggacccuccuaccucug

SEQ ID NO: 31244 - RNA, 20 nt, Artificial Sequence
  Synthetic oligonucleotide: FAS-100
ucuggacccuccuaccucug

SEQ ID NO: 31245 - RNA, 21 nt, Artificial Sequence
  Synthetic oligonucleotide: FAS-2631
aucuggacccuccuaccucug

SEQ ID NO: 31246 - RNA, 22 nt, Artificial Sequence
  Synthetic oligonucleotide: FAS-2632
caucuggacccuccuaccucug

SEQ ID NO: 31247 - RNA, 23 nt, Artificial Sequence
  Synthetic oligonucleotide: FAS-2633
gcaucuggacccuccuaccucug

SEQ ID NO: 31248 - RNA, 24 nt, Artificial Sequence
  Synthetic oligonucleotide: FAS-2634
ggcaucuggacccuccuaccucug

SEQ ID NO: 31249 - RNA, 18 nt, Artificial Sequence
  Synthetic oligonucleotide: FAS-4244
agacgcuucuggggagug

SEQ ID NO: 31250 - RNA, 19 nt, Artificial Sequence
  Synthetic oligonucleotide: FAS-4245
aagacgcuucuggggagug

SEQ ID NO: 31251 - RNA, 20 nt, Artificial Sequence
  Synthetic oligonucleotide: FAS-633
aaagacgcuucuggggagug

SEQ ID NO: 31252 - RNA, 21 nt, Artificial Sequence
  Synthetic oligonucleotide: FAS-4246
caaagacgcuucuggggagug

SEQ ID NO: 31253 - RNA, 22 nt, Artificial Sequence
  Synthetic oligonucleotide: FAS-4247
ucaaagacgcuucuggggagug

SEQ ID NO: 31254 - RNA, 23 nt, Artificial Sequence
  Synthetic oligonucleotide: FAS-4248
uucaaagacgcuucuggggagug

SEQ ID NO: 31255 - RNA, 24 nt, Artificial Sequence
  Synthetic oligonucleotide: FAS-4249
guucaaagacgcuucuggggagug

SEQ ID NO: 31256 - RNA, 18 nt, Artificial Sequence
  Synthetic oligonucleotide: FAS-4250
ccgcucaguacggaguug

SEQ ID NO: 31257 - RNA, 19 nt, Artificial Sequence
  Synthetic oligonucleotide: FAS-4251
cccgcucaguacggaguug

SEQ ID NO: 31258 - RNA, 20 nt, Artificial Sequence
  Synthetic oligonucleotide: FAS-656
acccgcucaguacggaguug

SEQ ID NO: 31259 - RNA, 21 nt, Artificial Sequence
  Synthetic oligonucleotide: FAS-4252
gacccgcucaguacggaguug

SEQ ID NO: 31260 - RNA, 22 nt, Artificial Sequence
  Synthetic oligonucleotide: FAS-4253
ggacccgcucaguacggaguug

SEQ ID NO: 31261 - RNA, 23 nt, Artificial Sequence
  Synthetic oligonucleotide: FAS-4254
uggacccgcucaguacggaguug

SEQ ID NO: 31262 - RNA, 24 nt, Artificial Sequence
  Synthetic oligonucleotide: FAS-4255
guggacccgcucaguacggaguug

SEQ ID NO: 31263 - RNA, 18 nt, Artificial Sequence
  Synthetic oligonucleotide: FAS-4256
cucuucucccgcggguug

SEQ ID NO: 31264 - RNA, 19 nt, Artificial Sequence
  Synthetic oligonucleotide: FAS-4257
ccucuucucccgcggguug

SEQ ID NO: 31265 - RNA, 20 nt, Artificial Sequence
  Synthetic oligonucleotide: FAS-1038
gccucuucucccgcggguug

SEQ ID NO: 31266 - RNA, 21 nt, Artificial Sequence
  Synthetic oligonucleotide: FAS-4258
ugccucuucucccgcggguug

SEQ ID NO: 31267 - RNA, 22 nt, Artificial Sequence
  Synthetic oligonucleotide: FAS-4259
cugccucuucucccgcggguug

SEQ ID NO: 31268 - RNA, 23 nt, Artificial Sequence
  Synthetic oligonucleotide: FAS-4260
gcugccucuucucccgcggguug

SEQ ID NO: 31269 - RNA, 24 nt, Artificial Sequence
  Synthetic oligonucleotide: FAS-4261
agcugccucuucucccgcggguug

SEQ ID NO: 31270 - RNA, 18 nt, Artificial Sequence
  Synthetic oligonucleotide: FAS-2647
aacaaccaugcugggcau

SEQ ID NO: 31271 - RNA, 19 nt, Artificial Sequence
  Synthetic oligonucleotide: FAS-2648
caacaaccaugcugggcau

SEQ ID NO: 31272 - RNA, 20 nt, Artificial Sequence
  Synthetic oligonucleotide: FAS-99
ucaacaaccaugcugggcau

SEQ ID NO: 31273 - RNA, 21 nt, Artificial Sequence
  Synthetic oligonucleotide: FAS-2649
cucaacaaccaugcugggcau

SEQ ID NO: 31274 - RNA, 22 nt, Artificial Sequence
  Synthetic oligonucleotide: FAS-2650
gcucaacaaccaugcugggcau

SEQ ID NO: 31275 - RNA, 23 nt, Artificial Sequence
  Synthetic oligonucleotide: FAS-2651
ugcucaacaaccaugcugggcau

SEQ ID NO: 31276 - RNA, 24 nt, Artificial Sequence
  Synthetic oligonucleotide: FAS-2652
uugcucaacaaccaugcugggcau

SEQ ID NO: 31277 - RNA, 18 nt, Artificial Sequence
  Synthetic oligonucleotide: FAS-4262
ucuugagaaauaaaaacu

SEQ ID NO: 31278 - RNA, 19 nt, Artificial Sequence
  Synthetic oligonucleotide: FAS-4263
cucuugagaaauaaaaacu

SEQ ID NO: 31279 - RNA, 20 nt, Artificial Sequence
  Synthetic oligonucleotide: FAS-984
ccucuugagaaauaaaaacu

SEQ ID NO: 31280 - RNA, 21 nt, Artificial Sequence
  Synthetic oligonucleotide: FAS-4264
uccucuugagaaauaaaaacu

SEQ ID NO: 31281 - RNA, 22 nt, Artificial Sequence
  Synthetic oligonucleotide: FAS-4265
uuccucuugagaaauaaaaacu

SEQ ID NO: 31282 - RNA, 23 nt, Artificial Sequence
  Synthetic oligonucleotide: FAS-4266
uuuccucuugagaaauaaaaacu

SEQ ID NO: 31283 - RNA, 24 nt, Artificial Sequence
  Synthetic oligonucleotide: FAS-4267
uuuuccucuugagaaauaaaaacu

SEQ ID NO: 31284 - RNA, 18 nt, Artificial Sequence
  Synthetic oligonucleotide: FAS-4268
uggggaagcucuuucacu

SEQ ID NO: 31285 - RNA, 19 nt, Artificial Sequence
  Synthetic oligonucleotide: FAS-4269
uuggggaagcucuuucacu

SEQ ID NO: 31286 - RNA, 20 nt, Artificial Sequence
  Synthetic oligonucleotide: FAS-1045
guuggggaagcucuuucacu

SEQ ID NO: 31287 - RNA, 21 nt, Artificial Sequence
  Synthetic oligonucleotide: FAS-4270
aguuggggaagcucuuucacu

SEQ ID NO: 31288 - RNA, 22 nt, Artificial Sequence
  Synthetic oligonucleotide: FAS-4271
gaguuggggaagcucuuucacu

SEQ ID NO: 31289 - RNA, 23 nt, Artificial Sequence
  Synthetic oligonucleotide: FAS-4272
ggaguuggggaagcucuuucacu

SEQ ID NO: 31290 - RNA, 24 nt, Artificial Sequence
  Synthetic oligonucleotide: FAS-4273
cggaguuggggaagcucuuucacu

SEQ ID NO: 31291 - RNA, 18 nt, Artificial Sequence
  Synthetic oligonucleotide: FAS-4274
cggcgcacgcgggcaccu

SEQ ID NO: 31292 - RNA, 19 nt, Artificial Sequence
  Synthetic oligonucleotide: FAS-4275
gcggcgcacgcgggcaccu

SEQ ID NO: 31293 - RNA, 20 nt, Artificial Sequence
  Synthetic oligonucleotide: FAS-686
agcggcgcacgcgggcaccu

SEQ ID NO: 31294 - RNA, 21 nt, Artificial Sequence
  Synthetic oligonucleotide: FAS-4276
cagcggcgcacgcgggcaccu

SEQ ID NO: 31295 - RNA, 22 nt, Artificial Sequence
  Synthetic oligonucleotide: FAS-4277
gcagcggcgcacgcgggcaccu

SEQ ID NO: 31296 - RNA, 23 nt, Artificial Sequence
  Synthetic oligonucleotide: FAS-4278
ggcagcggcgcacgcgggcaccu

SEQ ID NO: 31297 - RNA, 24 nt, Artificial Sequence
  Synthetic oligonucleotide: FAS-4279
cggcagcggcgcacgcgggcaccu

SEQ ID NO: 31298 - RNA, 18 nt, Artificial Sequence
  Synthetic oligonucleotide: FAS-4280
gugacuuggcuggagccu

SEQ ID NO: 31299 - RNA, 19 nt, Artificial Sequence
  Synthetic oligonucleotide: FAS-4281
agugacuuggcuggagccu

SEQ ID NO: 31300 - RNA, 20 nt, Artificial Sequence
  Synthetic oligonucleotide: FAS-1029
gagugacuuggcuggagccu

SEQ ID NO: 31301 - RNA, 21 nt, Artificial Sequence
  Synthetic oligonucleotide: FAS-4282
cgagugacuuggcuggagccu

SEQ ID NO: 31302 - RNA, 22 nt, Artificial Sequence
  Synthetic oligonucleotide: FAS-4283
acgagugacuuggcuggagccu

SEQ ID NO: 31303 - RNA, 23 nt, Artificial Sequence
  Synthetic oligonucleotide: FAS-4284
uacgagugacuuggcuggagccu

SEQ ID NO: 31304 - RNA, 24 nt, Artificial Sequence
  Synthetic oligonucleotide: FAS-4285
uuacgagugacuuggcuggagccu

SEQ ID NO: 31305 - RNA, 18 nt, Artificial Sequence
  Synthetic oligonucleotide: FAS-4286
aggcaggaccucugcgcu

SEQ ID NO: 31306 - RNA, 19 nt, Artificial Sequence
  Synthetic oligonucleotide: FAS-4287
caggcaggaccucugcgcu

SEQ ID NO: 31307 - RNA, 20 nt, Artificial Sequence
  Synthetic oligonucleotide: FAS-992
ccaggcaggaccucugcgcu

SEQ ID NO: 31308 - RNA, 21 nt, Artificial Sequence
  Synthetic oligonucleotide: FAS-4288
cccaggcaggaccucugcgcu

SEQ ID NO: 31309 - RNA, 22 nt, Artificial Sequence
  Synthetic oligonucleotide: FAS-4289
acccaggcaggaccucugcgcu

SEQ ID NO: 31310 - RNA, 23 nt, Artificial Sequence
  Synthetic oligonucleotide: FAS-4290
uacccaggcaggaccucugcgcu

SEQ ID NO: 31311 - RNA, 24 nt, Artificial Sequence
  Synthetic oligonucleotide: FAS-4291
guacccaggcaggaccucugcgcu

SEQ ID NO: 31312 - RNA, 18 nt, Artificial Sequence
  Synthetic oligonucleotide: FAS-4292
uccauuccagaaacgucu

SEQ ID NO: 31313 - RNA, 19 nt, Artificial Sequence
  Synthetic oligonucleotide: FAS-4293
guccauuccagaaacgucu

SEQ ID NO: 31314 - RNA, 20 nt, Artificial Sequence
  Synthetic oligonucleotide: FAS-988
uguccauuccagaaacgucu

SEQ ID NO: 31315 - RNA, 21 nt, Artificial Sequence
  Synthetic oligonucleotide: FAS-4294
cuguccauuccagaaacgucu

SEQ ID NO: 31316 - RNA, 22 nt, Artificial Sequence
  Synthetic oligonucleotide: FAS-4295
acuguccauuccagaaacgucu

SEQ ID NO: 31317 - RNA, 23 nt, Artificial Sequence
  Synthetic oligonucleotide: FAS-4296
aacuguccauuccagaaacgucu

SEQ ID NO: 31318 - RNA, 24 nt, Artificial Sequence
  Synthetic oligonucleotide: FAS-4297
uaacuguccauuccagaaacgucu

SEQ ID NO: 31319 - RNA, 18 nt, Artificial Sequence
  Synthetic oligonucleotide: FAS-4298
guguucaaagacgcuucu

SEQ ID NO: 31320 - RNA, 19 nt, Artificial Sequence
  Synthetic oligonucleotide: FAS-4299
gguguucaaagacgcuucu

SEQ ID NO: 31321 - RNA, 20 nt, Artificial Sequence
  Synthetic oligonucleotide: FAS-631
agguguucaaagacgcuucu

SEQ ID NO: 31322 - RNA, 21 nt, Artificial Sequence
  Synthetic oligonucleotide: FAS-4300
cagguguucaaagacgcuucu

SEQ ID NO: 31323 - RNA, 22 nt, Artificial Sequence
  Synthetic oligonucleotide: FAS-4301
acagguguucaaagacgcuucu

SEQ ID NO: 31324 - RNA, 23 nt, Artificial Sequence
  Synthetic oligonucleotide: FAS-4302
cacagguguucaaagacgcuucu

SEQ ID NO: 31325 - RNA, 24 nt, Artificial Sequence
  Synthetic oligonucleotide: FAS-4303
acacagguguucaaagacgcuucu

SEQ ID NO: 31326 - RNA, 18 nt, Artificial Sequence
  Synthetic oligonucleotide: FAS-4304
uugguggacccgcucagu

SEQ ID NO: 31327 - RNA, 19 nt, Artificial Sequence
  Synthetic oligonucleotide: FAS-4305
guugguggacccgcucagu

SEQ ID NO: 31328 - RNA, 20 nt, Artificial Sequence
  Synthetic oligonucleotide: FAS-1039
gguugguggacccgcucagu

SEQ ID NO: 31329 - RNA, 21 nt, Artificial Sequence
  Synthetic oligonucleotide: FAS-4306
ggguugguggacccgcucagu

SEQ ID NO: 31330 - RNA, 22 nt, Artificial Sequence
  Synthetic oligonucleotide: FAS-4307
cggguugguggacccgcucagu

SEQ ID NO: 31331 - RNA, 23 nt, Artificial Sequence
  Synthetic oligonucleotide: FAS-4308
gcggguugguggacccgcucagu

SEQ ID NO: 31332 - RNA, 24 nt, Artificial Sequence
  Synthetic oligonucleotide: FAS-4309
cgcggguugguggacccgcucagu

SEQ ID NO: 31333 - RNA, 18 nt, Artificial Sequence
  Synthetic oligonucleotide: FAS-4310
acccgcucaguacggagu

SEQ ID NO: 31334 - RNA, 19 nt, Artificial Sequence
  Synthetic oligonucleotide: FAS-4311
gacccgcucaguacggagu

SEQ ID NO: 31335 - RNA, 20 nt, Artificial Sequence
  Synthetic oligonucleotide: FAS-654
ggacccgcucaguacggagu

SEQ ID NO: 31336 - RNA, 21 nt, Artificial Sequence
  Synthetic oligonucleotide: FAS-4312
uggacccgcucaguacggagu

SEQ ID NO: 31337 - RNA, 22 nt, Artificial Sequence
  Synthetic oligonucleotide: FAS-4313
guggacccgcucaguacggagu

SEQ ID NO: 31338 - RNA, 23 nt, Artificial Sequence
  Synthetic oligonucleotide: FAS-4314
gguggacccgcucaguacggagu

SEQ ID NO: 31339 - RNA, 24 nt, Artificial Sequence
  Synthetic oligonucleotide: FAS-4315
ugguggacccgcucaguacggagu

SEQ ID NO: 31340 - RNA, 18 nt, Artificial Sequence
  Synthetic oligonucleotide: FAS-4316
aagacgcuucuggggagu

SEQ ID NO: 31341 - RNA, 19 nt, Artificial Sequence
  Synthetic oligonucleotide: FAS-4317
aaagacgcuucuggggagu

SEQ ID NO: 31342 - RNA, 20 nt, Artificial Sequence
  Synthetic oligonucleotide: FAS-1023
caaagacgcuucuggggagu

SEQ ID NO: 31343 - RNA, 21 nt, Artificial Sequence
  Synthetic oligonucleotide: FAS-4318
ucaaagacgcuucuggggagu

SEQ ID NO: 31344 - RNA, 22 nt, Artificial Sequence
  Synthetic oligonucleotide: FAS-4319
uucaaagacgcuucuggggagu

SEQ ID NO: 31345 - RNA, 23 nt, Artificial Sequence
  Synthetic oligonucleotide: FAS-4320
guucaaagacgcuucuggggagu

SEQ ID NO: 31346 - RNA, 24 nt, Artificial Sequence
  Synthetic oligonucleotide: FAS-4321
uguucaaagacgcuucuggggagu

SEQ ID NO: 31347 - RNA, 18 nt, Artificial Sequence
  Synthetic oligonucleotide: FAS-4322
ggcgggcgcgggacgcgu

SEQ ID NO: 31348 - RNA, 19 nt, Artificial Sequence
  Synthetic oligonucleotide: FAS-4323
gggcgggcgcgggacgcgu

SEQ ID NO: 31349 - RNA, 20 nt, Artificial Sequence
  Synthetic oligonucleotide: FAS-1062
ggggcgggcgcgggacgcgu

SEQ ID NO: 31350 - RNA, 21 nt, Artificial Sequence
  Synthetic oligonucleotide: FAS-4324
uggggcgggcgcgggacgcgu

SEQ ID NO: 31351 - RNA, 22 nt, Artificial Sequence
  Synthetic oligonucleotide: FAS-4325
guggggcgggcgcgggacgcgu

SEQ ID NO: 31352 - RNA, 23 nt, Artificial Sequence
  Synthetic oligonucleotide: FAS-4326
aguggggcgggcgcgggacgcgu

SEQ ID NO: 31353 - RNA, 24 nt, Artificial Sequence
  Synthetic oligonucleotide: FAS-4327
aaguggggcgggcgcgggacgcgu

SEQ ID NO: 31354 - RNA, 18 nt, Artificial Sequence
  Synthetic oligonucleotide: FAS-4328
ggggaagcucuuucacuu

SEQ ID NO: 31355 - RNA, 19 nt, Artificial Sequence
  Synthetic oligonucleotide: FAS-4329
uggggaagcucuuucacuu

SEQ ID NO: 31356 - RNA, 20 nt, Artificial Sequence
  Synthetic oligonucleotide: FAS-657
uuggggaagcucuuucacuu

SEQ ID NO: 31357 - RNA, 21 nt, Artificial Sequence
  Synthetic oligonucleotide: FAS-4330
guuggggaagcucuuucacuu

SEQ ID NO: 31358 - RNA, 22 nt, Artificial Sequence
  Synthetic oligonucleotide: FAS-4331
aguuggggaagcucuuucacuu

SEQ ID NO: 31359 - RNA, 23 nt, Artificial Sequence
  Synthetic oligonucleotide: FAS-4332
gaguuggggaagcucuuucacuu

SEQ ID NO: 31360 - RNA, 24 nt, Artificial Sequence
  Synthetic oligonucleotide: FAS-4333
ggaguuggggaagcucuuucacuu

SEQ ID NO: 31361 - RNA, 18 nt, Artificial Sequence
  Synthetic oligonucleotide: FAS-4334
aacuacagcagaagccuu

SEQ ID NO: 31362 - RNA, 19 nt, Artificial Sequence
  Synthetic oligonucleotide: FAS-4335
gaacuacagcagaagccuu

SEQ ID NO: 31363 - RNA, 20 nt, Artificial Sequence
  Synthetic oligonucleotide: FAS-995
ugaacuacagcagaagccuu

SEQ ID NO: 31364 - RNA, 21 nt, Artificial Sequence
  Synthetic oligonucleotide: FAS-4336
uugaacuacagcagaagccuu

SEQ ID NO: 31365 - RNA, 22 nt, Artificial Sequence
  Synthetic oligonucleotide: FAS-4337
guugaacuacagcagaagccuu

SEQ ID NO: 31366 - RNA, 23 nt, Artificial Sequence
  Synthetic oligonucleotide: FAS-4338
gguugaacuacagcagaagccuu

SEQ ID NO: 31367 - RNA, 24 nt, Artificial Sequence
  Synthetic oligonucleotide: FAS-4339
agguugaacuacagcagaagccuu

SEQ ID NO: 31368 - RNA, 18 nt, Artificial Sequence
  Synthetic oligonucleotide: FAS-4340
agguguucaaagacgcuu

SEQ ID NO: 31369 - RNA, 19 nt, Artificial Sequence
  Synthetic oligonucleotide: FAS-4341
cagguguucaaagacgcuu

SEQ ID NO: 31370 - RNA, 20 nt, Artificial Sequence
  Synthetic oligonucleotide: FAS-1018
acagguguucaaagacgcuu

SEQ ID NO: 31371 - RNA, 21 nt, Artificial Sequence
  Synthetic oligonucleotide: FAS-4342
cacagguguucaaagacgcuu

SEQ ID NO: 31372 - RNA, 22 nt, Artificial Sequence
  Synthetic oligonucleotide: FAS-4343
acacagguguucaaagacgcuu

SEQ ID NO: 31373 - RNA, 23 nt, Artificial Sequence
  Synthetic oligonucleotide: FAS-4344
cacacagguguucaaagacgcuu

SEQ ID NO: 31374 - RNA, 24 nt, Artificial Sequence
  Synthetic oligonucleotide: FAS-4345
acacacagguguucaaagacgcuu

SEQ ID NO: 31375 - RNA, 18 nt, Artificial Sequence
  Synthetic oligonucleotide: FAS-4346
uagcuuuguuuuccucuu

SEQ ID NO: 31376 - RNA, 19 nt, Artificial Sequence
  Synthetic oligonucleotide: FAS-4347
uuagcuuuguuuuccucuu

SEQ ID NO: 31377 - RNA, 20 nt, Artificial Sequence
  Synthetic oligonucleotide: FAS-983
guuagcuuuguuuuccucuu

SEQ ID NO: 31378 - RNA, 21 nt, Artificial Sequence
  Synthetic oligonucleotide: FAS-4348
uguuagcuuuguuuuccucuu

SEQ ID NO: 31379 - RNA, 22 nt, Artificial Sequence
  Synthetic oligonucleotide: FAS-4349
uuguuagcuuuguuuuccucuu

SEQ ID NO: 31380 - RNA, 23 nt, Artificial Sequence
  Synthetic oligonucleotide: FAS-4350
guuguuagcuuuguuuuccucuu

SEQ ID NO: 31381 - RNA, 24 nt, Artificial Sequence
  Synthetic oligonucleotide: FAS-4351
aguuguuagcuuuguuuuccucuu

SEQ ID NO: 31382 - RNA, 18 nt, Artificial Sequence
  Synthetic oligonucleotide: FAS-4352
cccgcucaguacggaguu

SEQ ID NO: 31383 - RNA, 19 nt, Artificial Sequence
  Synthetic oligonucleotide: FAS-4353
acccgcucaguacggaguu

SEQ ID NO: 31384 - RNA, 20 nt, Artificial Sequence
  Synthetic oligonucleotide: FAS-655
gacccgcucaguacggaguu

SEQ ID NO: 31385 - RNA, 21 nt, Artificial Sequence
  Synthetic oligonucleotide: FAS-4354
ggacccgcucaguacggaguu

SEQ ID NO: 31386 - RNA, 22 nt, Artificial Sequence
  Synthetic oligonucleotide: FAS-4355
uggacccgcucaguacggaguu

SEQ ID NO: 31387 - RNA, 23 nt, Artificial Sequence
  Synthetic oligonucleotide: FAS-4356
guggacccgcucaguacggaguu

SEQ ID NO: 31388 - RNA, 24 nt, Artificial Sequence
  Synthetic oligonucleotide: FAS-4357
gguggacccgcucaguacggaguu

SEQ ID NO: 31389 - RNA, 18 nt, Artificial Sequence
  Synthetic oligonucleotide: FAS-4358
uaaggggcccucccuuuu

SEQ ID NO: 31390 - RNA, 19 nt, Artificial Sequence
  Synthetic oligonucleotide: FAS-4359
cuaaggggcccucccuuuu

SEQ ID NO: 31391 - RNA, 20 nt, Artificial Sequence
  Synthetic oligonucleotide: FAS-986
acuaaggggcccucccuuuu

SEQ ID NO: 31392 - RNA, 21 nt, Artificial Sequence
  Synthetic oligonucleotide: FAS-4360
aacuaaggggcccucccuuuu

SEQ ID NO: 31393 - RNA, 22 nt, Artificial Sequence
  Synthetic oligonucleotide: FAS-4361
aaacuaaggggcccucccuuuu

SEQ ID NO: 31394 - RNA, 23 nt, Artificial Sequence
  Synthetic oligonucleotide: FAS-4362
aaaacuaaggggcccucccuuuu

SEQ ID NO: 31395 - RNA, 24 nt, Artificial Sequence
  Synthetic oligonucleotide: FAS-4363
aaaaacuaaggggcccucccuuuu

SEQ ID NO: 31396 - RNA, 18 nt, Artificial Sequence
  Synthetic oligonucleotide: FAS-4364
cuugguggacgaugccaa

SEQ ID NO: 31397 - RNA, 19 nt, Artificial Sequence
  Synthetic oligonucleotide: FAS-4365
gcuugguggacgaugccaa

SEQ ID NO: 31398 - RNA, 20 nt, Artificial Sequence
  Synthetic oligonucleotide: FAS-1806
agcuugguggacgaugccaa

SEQ ID NO: 31399 - RNA, 21 nt, Artificial Sequence
  Synthetic oligonucleotide: FAS-4366
gagcuugguggacgaugccaa

SEQ ID NO: 31400 - RNA, 22 nt, Artificial Sequence
  Synthetic oligonucleotide: FAS-4367
agagcuugguggacgaugccaa

SEQ ID NO: 31401 - RNA, 23 nt, Artificial Sequence
  Synthetic oligonucleotide: FAS-4368
cagagcuugguggacgaugccaa

SEQ ID NO: 31402 - RNA, 24 nt, Artificial Sequence
  Synthetic oligonucleotide: FAS-4369
gcagagcuugguggacgaugccaa

SEQ ID NO: 31403 - RNA, 18 nt, Artificial Sequence
  Synthetic oligonucleotide: FAS-4370
agugacagaugcaaaaca

SEQ ID NO: 31404 - RNA, 19 nt, Artificial Sequence
  Synthetic oligonucleotide: FAS-4371
cagugacagaugcaaaaca

SEQ ID NO: 31405 - RNA, 20 nt, Artificial Sequence
  Synthetic oligonucleotide: FAS-1389
gcagugacagaugcaaaaca

SEQ ID NO: 31406 - RNA, 21 nt, Artificial Sequence
  Synthetic oligonucleotide: FAS-4372
ugcagugacagaugcaaaaca

SEQ ID NO: 31407 - RNA, 22 nt, Artificial Sequence
  Synthetic oligonucleotide: FAS-4373
gugcagugacagaugcaaaaca

SEQ ID NO: 31408 - RNA, 23 nt, Artificial Sequence
  Synthetic oligonucleotide: FAS-4374
agugcagugacagaugcaaaaca

SEQ ID NO: 31409 - RNA, 24 nt, Artificial Sequence
  Synthetic oligonucleotide: FAS-4375
aagugcagugacagaugcaaaaca

SEQ ID NO: 31410 - RNA, 18 nt, Artificial Sequence
  Synthetic oligonucleotide: FAS-4376
ugaacagugggcuaagca

SEQ ID NO: 31411 - RNA, 19 nt, Artificial Sequence
  Synthetic oligonucleotide: FAS-4377
augaacagugggcuaagca

SEQ ID NO: 31412 - RNA, 20 nt, Artificial Sequence
  Synthetic oligonucleotide: FAS-1407
gaugaacagugggcuaagca

SEQ ID NO: 31413 - RNA, 21 nt, Artificial Sequence
  Synthetic oligonucleotide: FAS-4378
ggaugaacagugggcuaagca

SEQ ID NO: 31414 - RNA, 22 nt, Artificial Sequence
  Synthetic oligonucleotide: FAS-4379
aggaugaacagugggcuaagca

SEQ ID NO: 31415 - RNA, 23 nt, Artificial Sequence
  Synthetic oligonucleotide: FAS-4380
aaggaugaacagugggcuaagca

SEQ ID NO: 31416 - RNA, 24 nt, Artificial Sequence
  Synthetic oligonucleotide: FAS-4381
gaaggaugaacagugggcuaagca

SEQ ID NO: 31417 - RNA, 18 nt, Artificial Sequence
  Synthetic oligonucleotide: FAS-4382
guguucaccagagcacga

SEQ ID NO: 31418 - RNA, 19 nt, Artificial Sequence
  Synthetic oligonucleotide: FAS-4383
aguguucaccagagcacga

SEQ ID NO: 31419 - RNA, 20 nt, Artificial Sequence
  Synthetic oligonucleotide: FAS-1431
caguguucaccagagcacga

SEQ ID NO: 31420 - RNA, 21 nt, Artificial Sequence
  Synthetic oligonucleotide: FAS-4384
acaguguucaccagagcacga

SEQ ID NO: 31421 - RNA, 22 nt, Artificial Sequence
  Synthetic oligonucleotide: FAS-4385
aacaguguucaccagagcacga

SEQ ID NO: 31422 - RNA, 23 nt, Artificial Sequence
  Synthetic oligonucleotide: FAS-4386
gaacaguguucaccagagcacga

SEQ ID NO: 31423 - RNA, 24 nt, Artificial Sequence
  Synthetic oligonucleotide: FAS-4387
ugaacaguguucaccagagcacga

SEQ ID NO: 31424 - RNA, 18 nt, Artificial Sequence
  Synthetic oligonucleotide: FAS-4388
guuauuaauguguuauua

SEQ ID NO: 31425 - RNA, 19 nt, Artificial Sequence
  Synthetic oligonucleotide: FAS-4389
gguuauuaauguguuauua

SEQ ID NO: 31426 - RNA, 20 nt, Artificial Sequence
  Synthetic oligonucleotide: FAS-1408
ggguuauuaauguguuauua

SEQ ID NO: 31427 - RNA, 21 nt, Artificial Sequence
  Synthetic oligonucleotide: FAS-4390
aggguuauuaauguguuauua

SEQ ID NO: 31428 - RNA, 22 nt, Artificial Sequence
  Synthetic oligonucleotide: FAS-4391
aaggguuauuaauguguuauua

SEQ ID NO: 31429 - RNA, 23 nt, Artificial Sequence
  Synthetic oligonucleotide: FAS-4392
aaaggguuauuaauguguuauua

SEQ ID NO: 31430 - RNA, 24 nt, Artificial Sequence
  Synthetic oligonucleotide: FAS-4393
caaaggguuauuaauguguuauua

SEQ ID NO: 31431 - RNA, 18 nt, Artificial Sequence
  Synthetic oligonucleotide: FAS-4394
uccgcuccucucuccaac

SEQ ID NO: 31432 - RNA, 19 nt, Artificial Sequence
  Synthetic oligonucleotide: FAS-4395
uuccgcuccucucuccaac

SEQ ID NO: 31433 - RNA, 20 nt, Artificial Sequence
  Synthetic oligonucleotide: FAS-2067
guuccgcuccucucuccaac

SEQ ID NO: 31434 - RNA, 21 nt, Artificial Sequence
  Synthetic oligonucleotide: FAS-4396
aguuccgcuccucucuccaac

SEQ ID NO: 31435 - RNA, 22 nt, Artificial Sequence
  Synthetic oligonucleotide: FAS-4397
gaguuccgcuccucucuccaac

SEQ ID NO: 31436 - RNA, 23 nt, Artificial Sequence
  Synthetic oligonucleotide: FAS-4398
ggaguuccgcuccucucuccaac

SEQ ID NO: 31437 - RNA, 24 nt, Artificial Sequence
  Synthetic oligonucleotide: FAS-4399
aggaguuccgcuccucucuccaac

SEQ ID NO: 31438 - RNA, 18 nt, Artificial Sequence
  Synthetic oligonucleotide: FAS-4400
gcuugucagggcuugucc

SEQ ID NO: 31439 - RNA, 19 nt, Artificial Sequence
  Synthetic oligonucleotide: FAS-4401
ggcuugucagggcuugucc

SEQ ID NO: 31440 - RNA, 20 nt, Artificial Sequence
  Synthetic oligonucleotide: FAS-2066
uggcuugucagggcuugucc

SEQ ID NO: 31441 - RNA, 21 nt, Artificial Sequence
  Synthetic oligonucleotide: FAS-4402
uuggcuugucagggcuugucc

SEQ ID NO: 31442 - RNA, 22 nt, Artificial Sequence
  Synthetic oligonucleotide: FAS-4403
cuuggcuugucagggcuugucc

SEQ ID NO: 31443 - RNA, 23 nt, Artificial Sequence
  Synthetic oligonucleotide: FAS-4404
gcuuggcuugucagggcuugucc

SEQ ID NO: 31444 - RNA, 24 nt, Artificial Sequence
  Synthetic oligonucleotide: FAS-4405
ggcuuggcuugucagggcuugucc

SEQ ID NO: 31445 - RNA, 18 nt, Artificial Sequence
  Synthetic oligonucleotide: FAS-4406
gcugccccgccugcccag

SEQ ID NO: 31446 - RNA, 19 nt, Artificial Sequence
  Synthetic oligonucleotide: FAS-4407
agcugccccgccugcccag

SEQ ID NO: 31447 - RNA, 20 nt, Artificial Sequence
  Synthetic oligonucleotide: FAS-2074
gagcugccccgccugcccag

SEQ ID NO: 31448 - RNA, 21 nt, Artificial Sequence
  Synthetic oligonucleotide: FAS-4408
ggagcugccccgccugcccag

SEQ ID NO: 31449 - RNA, 22 nt, Artificial Sequence
  Synthetic oligonucleotide: FAS-4409
cggagcugccccgccugcccag

SEQ ID NO: 31450 - RNA, 23 nt, Artificial Sequence
  Synthetic oligonucleotide: FAS-4410
ccggagcugccccgccugcccag

SEQ ID NO: 31451 - RNA, 24 nt, Artificial Sequence
  Synthetic oligonucleotide: FAS-4411
gccggagcugccccgccugcccag

SEQ ID NO: 31452 - RNA, 18 nt, Artificial Sequence
  Synthetic oligonucleotide: FAS-4412
gugauggaaagcccucag

SEQ ID NO: 31453 - RNA, 19 nt, Artificial Sequence
  Synthetic oligonucleotide: FAS-4413
ggugauggaaagcccucag

SEQ ID NO: 31454 - RNA, 20 nt, Artificial Sequence
  Synthetic oligonucleotide: FAS-1394
gggugauggaaagcccucag

SEQ ID NO: 31455 - RNA, 21 nt, Artificial Sequence
  Synthetic oligonucleotide: FAS-4414
agggugauggaaagcccucag

SEQ ID NO: 31456 - RNA, 22 nt, Artificial Sequence
  Synthetic oligonucleotide: FAS-4415
cagggugauggaaagcccucag

SEQ ID NO: 31457 - RNA, 23 nt, Artificial Sequence
  Synthetic oligonucleotide: FAS-4416
acagggugauggaaagcccucag

SEQ ID NO: 31458 - RNA, 24 nt, Artificial Sequence
  Synthetic oligonucleotide: FAS-4417
cacagggugauggaaagcccucag

SEQ ID NO: 31459 - RNA, 18 nt, Artificial Sequence
  Synthetic oligonucleotide: FAS-4418
uaauguguuauuaauggg

SEQ ID NO: 31460 - RNA, 19 nt, Artificial Sequence
  Synthetic oligonucleotide: FAS-4419
uuaauguguuauuaauggg

SEQ ID NO: 31461 - RNA, 20 nt, Artificial Sequence
  Synthetic oligonucleotide: FAS-1409
auuaauguguuauuaauggg

SEQ ID NO: 31462 - RNA, 21 nt, Artificial Sequence
  Synthetic oligonucleotide: FAS-4420
uauuaauguguuauuaauggg

SEQ ID NO: 31463 - RNA, 22 nt, Artificial Sequence
  Synthetic oligonucleotide: FAS-4421
uuauuaauguguuauuaauggg

SEQ ID NO: 31464 - RNA, 23 nt, Artificial Sequence
  Synthetic oligonucleotide: FAS-4422
guuauuaauguguuauuaauggg

SEQ ID NO: 31465 - RNA, 24 nt, Artificial Sequence
  Synthetic oligonucleotide: FAS-4423
gguuauuaauguguuauuaauggg

SEQ ID NO: 31466 - RNA, 18 nt, Artificial Sequence
  Synthetic oligonucleotide: FAS-4424
caacugagaggaagccug

SEQ ID NO: 31467 - RNA, 19 nt, Artificial Sequence
  Synthetic oligonucleotide: FAS-4425
ucaacugagaggaagccug

SEQ ID NO: 31468 - RNA, 20 nt, Artificial Sequence
  Synthetic oligonucleotide: FAS-1404
gucaacugagaggaagccug

SEQ ID NO: 31469 - RNA, 21 nt, Artificial Sequence
  Synthetic oligonucleotide: FAS-4426
ugucaacugagaggaagccug

SEQ ID NO: 31470 - RNA, 22 nt, Artificial Sequence
  Synthetic oligonucleotide: FAS-4427
augucaacugagaggaagccug

SEQ ID NO: 31471 - RNA, 23 nt, Artificial Sequence
  Synthetic oligonucleotide: FAS-4428
aaugucaacugagaggaagccug

SEQ ID NO: 31472 - RNA, 24 nt, Artificial Sequence
  Synthetic oligonucleotide: FAS-4429
aaaugucaacugagaggaagccug

SEQ ID NO: 31473 - RNA, 18 nt, Artificial Sequence
  Synthetic oligonucleotide: FAS-4430
gggaagggagagagguug

SEQ ID NO: 31474 - RNA, 19 nt, Artificial Sequence
  Synthetic oligonucleotide: FAS-4431
ugggaagggagagagguug

SEQ ID NO: 31475 - RNA, 20 nt, Artificial Sequence
  Synthetic oligonucleotide: FAS-1418
uugggaagggagagagguug

SEQ ID NO: 31476 - RNA, 21 nt, Artificial Sequence
  Synthetic oligonucleotide: FAS-4432
auugggaagggagagagguug

SEQ ID NO: 31477 - RNA, 22 nt, Artificial Sequence
  Synthetic oligonucleotide: FAS-4433
aauugggaagggagagagguug

SEQ ID NO: 31478 - RNA, 23 nt, Artificial Sequence
  Synthetic oligonucleotide: FAS-4434
uaauugggaagggagagagguug

SEQ ID NO: 31479 - RNA, 24 nt, Artificial Sequence
  Synthetic oligonucleotide: FAS-4435
cuaauugggaagggagagagguug

SEQ ID NO: 31480 - RNA, 18 nt, Artificial Sequence
  Synthetic oligonucleotide: FAS-4436
augacaucauuacugaac

SEQ ID NO: 31481 - RNA, 19 nt, Artificial Sequence
  Synthetic oligonucleotide: FAS-4437
aaugacaucauuacugaac

SEQ ID NO: 31482 - RNA, 20 nt, Artificial Sequence
  Synthetic oligonucleotide: FAS-1500
uaaugacaucauuacugaac

SEQ ID NO: 31483 - RNA, 21 nt, Artificial Sequence
  Synthetic oligonucleotide: FAS-4438
auaaugacaucauuacugaac

SEQ ID NO: 31484 - RNA, 22 nt, Artificial Sequence
  Synthetic oligonucleotide: FAS-4439
gauaaugacaucauuacugaac

SEQ ID NO: 31485 - RNA, 23 nt, Artificial Sequence
  Synthetic oligonucleotide: FAS-4440
ggauaaugacaucauuacugaac

SEQ ID NO: 31486 - RNA, 24 nt, Artificial Sequence
  Synthetic oligonucleotide: FAS-4441
uggauaaugacaucauuacugaac

SEQ ID NO: 31487 - RNA, 18 nt, Artificial Sequence
  Synthetic oligonucleotide: FAS-4442
ugggcguggggugcggac

SEQ ID NO: 31488 - RNA, 19 nt, Artificial Sequence
  Synthetic oligonucleotide: FAS-4443
gugggcguggggugcggac

SEQ ID NO: 31489 - RNA, 20 nt, Artificial Sequence
  Synthetic oligonucleotide: FAS-1926
ggugggcguggggugcggac

SEQ ID NO: 31490 - RNA, 21 nt, Artificial Sequence
  Synthetic oligonucleotide: FAS-4444
aggugggcguggggugcggac

SEQ ID NO: 31491 - RNA, 22 nt, Artificial Sequence
  Synthetic oligonucleotide: FAS-4445
gaggugggcguggggugcggac

SEQ ID NO: 31492 - RNA, 23 nt, Artificial Sequence
  Synthetic oligonucleotide: FAS-4446
ugaggugggcguggggugcggac

SEQ ID NO: 31493 - RNA, 24 nt, Artificial Sequence
  Synthetic oligonucleotide: FAS-4447
uugaggugggcguggggugcggac

SEQ ID NO: 31494 - RNA, 18 nt, Artificial Sequence
  Synthetic oligonucleotide: FAS-4448
gcucuuagguaguuuagc

SEQ ID NO: 31495 - RNA, 19 nt, Artificial Sequence
  Synthetic oligonucleotide: FAS-4449
agcucuuagguaguuuagc

SEQ ID NO: 31496 - RNA, 20 nt, Artificial Sequence
  Synthetic oligonucleotide: FAS-1496
uagcucuuagguaguuuagc

SEQ ID NO: 31497 - RNA, 21 nt, Artificial Sequence
  Synthetic oligonucleotide: FAS-4450
auagcucuuagguaguuuagc

SEQ ID NO: 31498 - RNA, 22 nt, Artificial Sequence
  Synthetic oligonucleotide: FAS-4451
gauagcucuuagguaguuuagc

SEQ ID NO: 31499 - RNA, 23 nt, Artificial Sequence
  Synthetic oligonucleotide: FAS-4452
agauagcucuuagguaguuuagc

SEQ ID NO: 31500 - RNA, 24 nt, Artificial Sequence
  Synthetic oligonucleotide: FAS-4453
uagauagcucuuagguaguuuagc

SEQ ID NO: 31501 - RNA, 18 nt, Artificial Sequence
  Synthetic oligonucleotide: FAS-4454
uaggaccuucccucaggc

SEQ ID NO: 31502 - RNA, 19 nt, Artificial Sequence
  Synthetic oligonucleotide: FAS-4455
uuaggaccuucccucaggc

SEQ ID NO: 31503 - RNA, 20 nt, Artificial Sequence
  Synthetic oligonucleotide: FAS-1536
guuaggaccuucccucaggc

SEQ ID NO: 31504 - RNA, 21 nt, Artificial Sequence
  Synthetic oligonucleotide: FAS-4456
uguuaggaccuucccucaggc

SEQ ID NO: 31505 - RNA, 22 nt, Artificial Sequence
  Synthetic oligonucleotide: FAS-4457
cuguuaggaccuucccucaggc

SEQ ID NO: 31506 - RNA, 23 nt, Artificial Sequence
  Synthetic oligonucleotide: FAS-4458
gcuguuaggaccuucccucaggc

SEQ ID NO: 31507 - RNA, 24 nt, Artificial Sequence
  Synthetic oligonucleotide: FAS-4459
ggcuguuaggaccuucccucaggc

SEQ ID NO: 31508 - RNA, 18 nt, Artificial Sequence
  Synthetic oligonucleotide: FAS-4460
ccaaagguccgcuccggc

SEQ ID NO: 31509 - RNA, 19 nt, Artificial Sequence
  Synthetic oligonucleotide: FAS-4461
gccaaagguccgcuccggc

SEQ ID NO: 31510 - RNA, 20 nt, Artificial Sequence
  Synthetic oligonucleotide: FAS-1577
agccaaagguccgcuccggc

SEQ ID NO: 31511 - RNA, 21 nt, Artificial Sequence
  Synthetic oligonucleotide: FAS-4462
aagccaaagguccgcuccggc

SEQ ID NO: 31512 - RNA, 22 nt, Artificial Sequence
  Synthetic oligonucleotide: FAS-4463
caagccaaagguccgcuccggc

SEQ ID NO: 31513 - RNA, 23 nt, Artificial Sequence
  Synthetic oligonucleotide: FAS-4464
ccaagccaaagguccgcuccggc

SEQ ID NO: 31514 - RNA, 24 nt, Artificial Sequence
  Synthetic oligonucleotide: FAS-4465
gccaagccaaagguccgcuccggc

SEQ ID NO: 31515 - RNA, 18 nt, Artificial Sequence
  Synthetic oligonucleotide: FAS-4466
uccacguugaggugggcg

SEQ ID NO: 31516 - RNA, 19 nt, Artificial Sequence
  Synthetic oligonucleotide: FAS-4467
cuccacguugaggugggcg

SEQ ID NO: 31517 - RNA, 20 nt, Artificial Sequence
  Synthetic oligonucleotide: FAS-1922
gcuccacguugaggugggcg

SEQ ID NO: 31518 - RNA, 21 nt, Artificial Sequence
  Synthetic oligonucleotide: FAS-4468
cgcuccacguugaggugggcg

SEQ ID NO: 31519 - RNA, 22 nt, Artificial Sequence
  Synthetic oligonucleotide: FAS-4469
gcgcuccacguugaggugggcg

SEQ ID NO: 31520 - RNA, 23 nt, Artificial Sequence
  Synthetic oligonucleotide: FAS-4470
ugcgcuccacguugaggugggcg

SEQ ID NO: 31521 - RNA, 24 nt, Artificial Sequence
  Synthetic oligonucleotide: FAS-4471
cugcgcuccacguugaggugggcg

SEQ ID NO: 31522 - RNA, 18 nt, Artificial Sequence
  Synthetic oligonucleotide: FAS-4472
agguccgcuccggcgcgg

SEQ ID NO: 31523 - RNA, 19 nt, Artificial Sequence
  Synthetic oligonucleotide: FAS-4473
aagguccgcuccggcgcgg

SEQ ID NO: 31524 - RNA, 20 nt, Artificial Sequence
  Synthetic oligonucleotide: FAS-1578
aaagguccgcuccggcgcgg

SEQ ID NO: 31525 - RNA, 21 nt, Artificial Sequence
  Synthetic oligonucleotide: FAS-4474
caaagguccgcuccggcgcgg

SEQ ID NO: 31526 - RNA, 22 nt, Artificial Sequence
  Synthetic oligonucleotide: FAS-4475
ccaaagguccgcuccggcgcgg

SEQ ID NO: 31527 - RNA, 23 nt, Artificial Sequence
  Synthetic oligonucleotide: FAS-4476
gccaaagguccgcuccggcgcgg

SEQ ID NO: 31528 - RNA, 24 nt, Artificial Sequence
  Synthetic oligonucleotide: FAS-4477
agccaaagguccgcuccggcgcgg

SEQ ID NO: 31529 - RNA, 18 nt, Artificial Sequence
  Synthetic oligonucleotide: FAS-4478
ccgcuccggcgcgggugg

SEQ ID NO: 31530 - RNA, 19 nt, Artificial Sequence
  Synthetic oligonucleotide: FAS-4479
uccgcuccggcgcgggugg

SEQ ID NO: 31531 - RNA, 20 nt, Artificial Sequence
  Synthetic oligonucleotide: FAS-1579
guccgcuccggcgcgggugg

SEQ ID NO: 31532 - RNA, 21 nt, Artificial Sequence
  Synthetic oligonucleotide: FAS-4480
gguccgcuccggcgcgggugg

SEQ ID NO: 31533 - RNA, 22 nt, Artificial Sequence
  Synthetic oligonucleotide: FAS-4481
agguccgcuccggcgcgggugg

SEQ ID NO: 31534 - RNA, 23 nt, Artificial Sequence
  Synthetic oligonucleotide: FAS-4482
aagguccgcuccggcgcgggugg

SEQ ID NO: 31535 - RNA, 24 nt, Artificial Sequence
  Synthetic oligonucleotide: FAS-4483
aaagguccgcuccggcgcgggugg

SEQ ID NO: 31536 - RNA, 18 nt, Artificial Sequence
  Synthetic oligonucleotide: FAS-4484
ucauuacugaaccugaau

SEQ ID NO: 31537 - RNA, 19 nt, Artificial Sequence
  Synthetic oligonucleotide: FAS-4485
aucauuacugaaccugaau

SEQ ID NO: 31538 - RNA, 20 nt, Artificial Sequence
  Synthetic oligonucleotide: FAS-1501
caucauuacugaaccugaau

SEQ ID NO: 31539 - RNA, 21 nt, Artificial Sequence
  Synthetic oligonucleotide: FAS-4486
acaucauuacugaaccugaau

SEQ ID NO: 31540 - RNA, 22 nt, Artificial Sequence
  Synthetic oligonucleotide: FAS-4487
gacaucauuacugaaccugaau

SEQ ID NO: 31541 - RNA, 23 nt, Artificial Sequence
  Synthetic oligonucleotide: FAS-4488
ugacaucauuacugaaccugaau

SEQ ID NO: 31542 - RNA, 24 nt, Artificial Sequence
  Synthetic oligonucleotide: FAS-4489
augacaucauuacugaaccugaau

SEQ ID NO: 31543 - RNA, 18 nt, Artificial Sequence
  Synthetic oligonucleotide: FAS-4490
auuuuacagaagguaugu

SEQ ID NO: 31544 - RNA, 19 nt, Artificial Sequence
  Synthetic oligonucleotide: FAS-4491
aauuuuacagaagguaugu

SEQ ID NO: 31545 - RNA, 20 nt, Artificial Sequence
  Synthetic oligonucleotide: FAS-1498
gaauuuuacagaagguaugu

SEQ ID NO: 31546 - RNA, 21 nt, Artificial Sequence
  Synthetic oligonucleotide: FAS-4492
ugaauuuuacagaagguaugu

SEQ ID NO: 31547 - RNA, 22 nt, Artificial Sequence
  Synthetic oligonucleotide: FAS-4493
augaauuuuacagaagguaugu

SEQ ID NO: 31548 - RNA, 23 nt, Artificial Sequence
  Synthetic oligonucleotide: FAS-4494
caugaauuuuacagaagguaugu

SEQ ID NO: 31549 - RNA, 24 nt, Artificial Sequence
  Synthetic oligonucleotide: FAS-4495
gcaugaauuuuacagaagguaugu

SEQ ID NO: 31550 - RNA, 18 nt, Artificial Sequence
  Synthetic oligonucleotide: FAS-4496
cggaagucugggaagcuu

SEQ ID NO: 31551 - RNA, 19 nt, Artificial Sequence
  Synthetic oligonucleotide: FAS-4497
gcggaagucugggaagcuu

SEQ ID NO: 31552 - RNA, 20 nt, Artificial Sequence
  Synthetic oligonucleotide: FAS-1561
agcggaagucugggaagcuu

SEQ ID NO: 31553 - RNA, 21 nt, Artificial Sequence
  Synthetic oligonucleotide: FAS-4498
aagcggaagucugggaagcuu

SEQ ID NO: 31554 - RNA, 22 nt, Artificial Sequence
  Synthetic oligonucleotide: FAS-4499
gaagcggaagucugggaagcuu

SEQ ID NO: 31555 - RNA, 23 nt, Artificial Sequence
  Synthetic oligonucleotide: FAS-4500
ugaagcggaagucugggaagcuu

SEQ ID NO: 31556 - RNA, 24 nt, Artificial Sequence
  Synthetic oligonucleotide: FAS-4501
uugaagcggaagucugggaagcuu

SEQ ID NO: 31557 - RNA, 18 nt, Artificial Sequence
  Synthetic oligonucleotide: FAS-4502
ucugagaacugccagaaa

SEQ ID NO: 31558 - RNA, 19 nt, Artificial Sequence
  Synthetic oligonucleotide: FAS-4503
gucugagaacugccagaaa

SEQ ID NO: 31559 - RNA, 20 nt, Artificial Sequence
  Synthetic oligonucleotide: FAS-1698
cgucugagaacugccagaaa

SEQ ID NO: 31560 - RNA, 21 nt, Artificial Sequence
  Synthetic oligonucleotide: FAS-4504
acgucugagaacugccagaaa

SEQ ID NO: 31561 - RNA, 22 nt, Artificial Sequence
  Synthetic oligonucleotide: FAS-4505
uacgucugagaacugccagaaa

SEQ ID NO: 31562 - RNA, 23 nt, Artificial Sequence
  Synthetic oligonucleotide: FAS-4506
cuacgucugagaacugccagaaa

SEQ ID NO: 31563 - RNA, 24 nt, Artificial Sequence
  Synthetic oligonucleotide: FAS-4507
ccuacgucugagaacugccagaaa

SEQ ID NO: 31564 - RNA, 18 nt, Artificial Sequence
  Synthetic oligonucleotide: FAS-4508
uuccgcuccucucuccaa

SEQ ID NO: 31565 - RNA, 19 nt, Artificial Sequence
  Synthetic oligonucleotide: FAS-4509
guuccgcuccucucuccaa

SEQ ID NO: 31566 - RNA, 20 nt, Artificial Sequence
  Synthetic oligonucleotide: FAS-1708
aguuccgcuccucucuccaa

SEQ ID NO: 31567 - RNA, 21 nt, Artificial Sequence
  Synthetic oligonucleotide: FAS-4510
gaguuccgcuccucucuccaa

SEQ ID NO: 31568 - RNA, 22 nt, Artificial Sequence
  Synthetic oligonucleotide: FAS-4511
ggaguuccgcuccucucuccaa

SEQ ID NO: 31569 - RNA, 23 nt, Artificial Sequence
  Synthetic oligonucleotide: FAS-4512
aggaguuccgcuccucucuccaa

SEQ ID NO: 31570 - RNA, 24 nt, Artificial Sequence
  Synthetic oligonucleotide: FAS-4513
caggaguuccgcuccucucuccaa

SEQ ID NO: 31571 - RNA, 18 nt, Artificial Sequence
  Synthetic oligonucleotide: FAS-4514
uccagaagaaaaugucaa

SEQ ID NO: 31572 - RNA, 19 nt, Artificial Sequence
  Synthetic oligonucleotide: FAS-4515
cuccagaagaaaaugucaa

SEQ ID NO: 31573 - RNA, 20 nt, Artificial Sequence
  Synthetic oligonucleotide: FAS-1399
gcuccagaagaaaaugucaa

SEQ ID NO: 31574 - RNA, 21 nt, Artificial Sequence
  Synthetic oligonucleotide: FAS-4516
ggcuccagaagaaaaugucaa

SEQ ID NO: 31575 - RNA, 22 nt, Artificial Sequence
  Synthetic oligonucleotide: FAS-4517
aggcuccagaagaaaaugucaa

SEQ ID NO: 31576 - RNA, 23 nt, Artificial Sequence
  Synthetic oligonucleotide: FAS-4518
caggcuccagaagaaaaugucaa

SEQ ID NO: 31577 - RNA, 24 nt, Artificial Sequence
  Synthetic oligonucleotide: FAS-4519
acaggcuccagaagaaaaugucaa

SEQ ID NO: 31578 - RNA, 18 nt, Artificial Sequence
  Synthetic oligonucleotide: FAS-4520
guugaaucuaauugggaa

SEQ ID NO: 31579 - RNA, 19 nt, Artificial Sequence
  Synthetic oligonucleotide: FAS-4521
gguugaaucuaauugggaa

SEQ ID NO: 31580 - RNA, 20 nt, Artificial Sequence
  Synthetic oligonucleotide: FAS-1801
ggguugaaucuaauugggaa

SEQ ID NO: 31581 - RNA, 21 nt, Artificial Sequence
  Synthetic oligonucleotide: FAS-4522
uggguugaaucuaauugggaa

SEQ ID NO: 31582 - RNA, 22 nt, Artificial Sequence
  Synthetic oligonucleotide: FAS-4523
auggguugaaucuaauugggaa

SEQ ID NO: 31583 - RNA, 23 nt, Artificial Sequence
  Synthetic oligonucleotide: FAS-4524
aauggguugaaucuaauugggaa

SEQ ID NO: 31584 - RNA, 24 nt, Artificial Sequence
  Synthetic oligonucleotide: FAS-4525
uaauggguugaaucuaauugggaa

SEQ ID NO: 31585 - RNA, 18 nt, Artificial Sequence
  Synthetic oligonucleotide: FAS-4526
uuaauggguugaaucuaa

SEQ ID NO: 31586 - RNA, 19 nt, Artificial Sequence
  Synthetic oligonucleotide: FAS-4527
auuaauggguugaaucuaa

SEQ ID NO: 31587 - RNA, 20 nt, Artificial Sequence
  Synthetic oligonucleotide: FAS-1410
uauuaauggguugaaucuaa

SEQ ID NO: 31588 - RNA, 21 nt, Artificial Sequence
  Synthetic oligonucleotide: FAS-4528
uuauuaauggguugaaucuaa

SEQ ID NO: 31589 - RNA, 22 nt, Artificial Sequence
  Synthetic oligonucleotide: FAS-4529
guuauuaauggguugaaucuaa

SEQ ID NO: 31590 - RNA, 23 nt, Artificial Sequence
  Synthetic oligonucleotide: FAS-4530
uguuauuaauggguugaaucuaa

SEQ ID NO: 31591 - RNA, 24 nt, Artificial Sequence
  Synthetic oligonucleotide: FAS-4531
guguuauuaauggguugaaucuaa

SEQ ID NO: 31592 - RNA, 18 nt, Artificial Sequence
  Synthetic oligonucleotide: FAS-4532
aagccugaaggaugaaca

SEQ ID NO: 31593 - RNA, 19 nt, Artificial Sequence
  Synthetic oligonucleotide: FAS-4533
gaagccugaaggaugaaca

SEQ ID NO: 31594 - RNA, 20 nt, Artificial Sequence
  Synthetic oligonucleotide: FAS-1406
ggaagccugaaggaugaaca

SEQ ID NO: 31595 - RNA, 21 nt, Artificial Sequence
  Synthetic oligonucleotide: FAS-4534
aggaagccugaaggaugaaca

SEQ ID NO: 31596 - RNA, 22 nt, Artificial Sequence
  Synthetic oligonucleotide: FAS-4535
gaggaagccugaaggaugaaca

SEQ ID NO: 31597 - RNA, 23 nt, Artificial Sequence
  Synthetic oligonucleotide: FAS-4536
agaggaagccugaaggaugaaca

SEQ ID NO: 31598 - RNA, 24 nt, Artificial Sequence
  Synthetic oligonucleotide: FAS-4537
gagaggaagccugaaggaugaaca

SEQ ID NO: 31599 - RNA, 18 nt, Artificial Sequence
  Synthetic oligonucleotide: FAS-4538
agcugccccgccugccca

SEQ ID NO: 31600 - RNA, 19 nt, Artificial Sequence
  Synthetic oligonucleotide: FAS-4539
gagcugccccgccugccca

SEQ ID NO: 31601 - RNA, 20 nt, Artificial Sequence
  Synthetic oligonucleotide: FAS-1717
ggagcugccccgccugccca

SEQ ID NO: 31602 - RNA, 21 nt, Artificial Sequence
  Synthetic oligonucleotide: FAS-4540
cggagcugccccgccugccca

SEQ ID NO: 31603 - RNA, 22 nt, Artificial Sequence
  Synthetic oligonucleotide: FAS-4541
ccggagcugccccgccugccca

SEQ ID NO: 31604 - RNA, 23 nt, Artificial Sequence
  Synthetic oligonucleotide: FAS-4542
gccggagcugccccgccugccca

SEQ ID NO: 31605 - RNA, 24 nt, Artificial Sequence
  Synthetic oligonucleotide: FAS-4543
cgccggagcugccccgccugccca

SEQ ID NO: 31606 - RNA, 18 nt, Artificial Sequence
  Synthetic oligonucleotide: FAS-4544
gcuugguggacgaugcca

SEQ ID NO: 31607 - RNA, 19 nt, Artificial Sequence
  Synthetic oligonucleotide: FAS-4545
agcuugguggacgaugcca

SEQ ID NO: 31608 - RNA, 20 nt, Artificial Sequence
  Synthetic oligonucleotide: FAS-1422
gagcuugguggacgaugcca

SEQ ID NO: 31609 - RNA, 21 nt, Artificial Sequence
  Synthetic oligonucleotide: FAS-4546
agagcuugguggacgaugcca

SEQ ID NO: 31610 - RNA, 22 nt, Artificial Sequence
  Synthetic oligonucleotide: FAS-4547
cagagcuugguggacgaugcca

SEQ ID NO: 31611 - RNA, 23 nt, Artificial Sequence
  Synthetic oligonucleotide: FAS-4548
gcagagcuugguggacgaugcca

SEQ ID NO: 31612 - RNA, 24 nt, Artificial Sequence
  Synthetic oligonucleotide: FAS-4549
ugcagagcuugguggacgaugcca

SEQ ID NO: 31613 - RNA, 18 nt, Artificial Sequence
  Synthetic oligonucleotide: FAS-4550
agggagagagguugcaga

SEQ ID NO: 31614 - RNA, 19 nt, Artificial Sequence
  Synthetic oligonucleotide: FAS-4551
aagggagagagguugcaga

SEQ ID NO: 31615 - RNA, 20 nt, Artificial Sequence
  Synthetic oligonucleotide: FAS-1419
gaagggagagagguugcaga

SEQ ID NO: 31616 - RNA, 21 nt, Artificial Sequence
  Synthetic oligonucleotide: FAS-4552
ggaagggagagagguugcaga

SEQ ID NO: 31617 - RNA, 22 nt, Artificial Sequence
  Synthetic oligonucleotide: FAS-4553
gggaagggagagagguugcaga

SEQ ID NO: 31618 - RNA, 23 nt, Artificial Sequence
  Synthetic oligonucleotide: FAS-4554
ugggaagggagagagguugcaga

SEQ ID NO: 31619 - RNA, 24 nt, Artificial Sequence
  Synthetic oligonucleotide: FAS-4555
uugggaagggagagagguugcaga

SEQ ID NO: 31620 - RNA, 18 nt, Artificial Sequence
  Synthetic oligonucleotide: FAS-4556
cauauaacuuuuucgaga

SEQ ID NO: 31621 - RNA, 19 nt, Artificial Sequence
  Synthetic oligonucleotide: FAS-4557
ccauauaacuuuuucgaga

SEQ ID NO: 31622 - RNA, 20 nt, Artificial Sequence
  Synthetic oligonucleotide: FAS-1693
cccauauaacuuuuucgaga

SEQ ID NO: 31623 - RNA, 18 nt, Artificial Sequence
  Synthetic oligonucleotide: FAS-4558
ucacccacccgcgccgga

SEQ ID NO: 31624 - RNA, 19 nt, Artificial Sequence
  Synthetic oligonucleotide: FAS-4559
cucacccacccgcgccgga

SEQ ID NO: 31625 - RNA, 20 nt, Artificial Sequence
  Synthetic oligonucleotide: FAS-1704
acucacccacccgcgccgga

SEQ ID NO: 31626 - RNA, 21 nt, Artificial Sequence
  Synthetic oligonucleotide: FAS-4560
cacucacccacccgcgccgga

SEQ ID NO: 31627 - RNA, 22 nt, Artificial Sequence
  Synthetic oligonucleotide: FAS-4561
gcacucacccacccgcgccgga

SEQ ID NO: 31628 - RNA, 23 nt, Artificial Sequence
  Synthetic oligonucleotide: FAS-4562
cgcacucacccacccgcgccgga

SEQ ID NO: 31629 - RNA, 24 nt, Artificial Sequence
  Synthetic oligonucleotide: FAS-4563
gcgcacucacccacccgcgccgga

SEQ ID NO: 31630 - RNA, 18 nt, Artificial Sequence
  Synthetic oligonucleotide: FAS-4564
aaucuaauugggaaggga

SEQ ID NO: 31631 - RNA, 19 nt, Artificial Sequence
  Synthetic oligonucleotide: FAS-4565
gaaucuaauugggaaggga

SEQ ID NO: 31632 - RNA, 20 nt, Artificial Sequence
  Synthetic oligonucleotide: FAS-1417
ugaaucuaauugggaaggga

SEQ ID NO: 31633 - RNA, 21 nt, Artificial Sequence
  Synthetic oligonucleotide: FAS-4566
uugaaucuaauugggaaggga

SEQ ID NO: 31634 - RNA, 22 nt, Artificial Sequence
  Synthetic oligonucleotide: FAS-4567
guugaaucuaauugggaaggga

SEQ ID NO: 31635 - RNA, 23 nt, Artificial Sequence
  Synthetic oligonucleotide: FAS-4568
gguugaaucuaauugggaaggga

SEQ ID NO: 31636 - RNA, 24 nt, Artificial Sequence
  Synthetic oligonucleotide: FAS-4569
ggguugaaucuaauugggaaggga

SEQ ID NO: 31637 - RNA, 18 nt, Artificial Sequence
  Synthetic oligonucleotide: FAS-4570
gguugaaucuaauuggga

SEQ ID NO: 31638 - RNA, 19 nt, Artificial Sequence
  Synthetic oligonucleotide: FAS-4571
ggguugaaucuaauuggga

SEQ ID NO: 31639 - RNA, 20 nt, Artificial Sequence
  Synthetic oligonucleotide: FAS-1800
uggguugaaucuaauuggga

SEQ ID NO: 31640 - RNA, 21 nt, Artificial Sequence
  Synthetic oligonucleotide: FAS-4572
auggguugaaucuaauuggga

SEQ ID NO: 31641 - RNA, 22 nt, Artificial Sequence
  Synthetic oligonucleotide: FAS-4573
aauggguugaaucuaauuggga

SEQ ID NO: 31642 - RNA, 23 nt, Artificial Sequence
  Synthetic oligonucleotide: FAS-4574
uaauggguugaaucuaauuggga

SEQ ID NO: 31643 - RNA, 24 nt, Artificial Sequence
  Synthetic oligonucleotide: FAS-4575
uuaauggguugaaucuaauuggga

SEQ ID NO: 31644 - RNA, 18 nt, Artificial Sequence
  Synthetic oligonucleotide: FAS-4576
gaagaaaaugucaacuga

SEQ ID NO: 31645 - RNA, 19 nt, Artificial Sequence
  Synthetic oligonucleotide: FAS-4577
agaagaaaaugucaacuga

SEQ ID NO: 31646 - RNA, 20 nt, Artificial Sequence
  Synthetic oligonucleotide: FAS-1401
cagaagaaaaugucaacuga

SEQ ID NO: 31647 - RNA, 21 nt, Artificial Sequence
  Synthetic oligonucleotide: FAS-4578
ccagaagaaaaugucaacuga

SEQ ID NO: 31648 - RNA, 22 nt, Artificial Sequence
  Synthetic oligonucleotide: FAS-4579
uccagaagaaaaugucaacuga

SEQ ID NO: 31649 - RNA, 23 nt, Artificial Sequence
  Synthetic oligonucleotide: FAS-4580
cuccagaagaaaaugucaacuga

SEQ ID NO: 31650 - RNA, 24 nt, Artificial Sequence
  Synthetic oligonucleotide: FAS-4581
gcuccagaagaaaaugucaacuga

SEQ ID NO: 31651 - RNA, 18 nt, Artificial Sequence
  Synthetic oligonucleotide: FAS-4582
cugagcacccgggccuga

SEQ ID NO: 31652 - RNA, 19 nt, Artificial Sequence
  Synthetic oligonucleotide: FAS-4583
ucugagcacccgggccuga

SEQ ID NO: 31653 - RNA, 20 nt, Artificial Sequence
  Synthetic oligonucleotide: FAS-2081
uucugagcacccgggccuga

SEQ ID NO: 31654 - RNA, 21 nt, Artificial Sequence
  Synthetic oligonucleotide: FAS-4584
guucugagcacccgggccuga

SEQ ID NO: 31655 - RNA, 22 nt, Artificial Sequence
  Synthetic oligonucleotide: FAS-4585
cguucugagcacccgggccuga

SEQ ID NO: 31656 - RNA, 23 nt, Artificial Sequence
  Synthetic oligonucleotide: FAS-4586
gcguucugagcacccgggccuga

SEQ ID NO: 31657 - RNA, 24 nt, Artificial Sequence
  Synthetic oligonucleotide: FAS-4587
agcguucugagcacccgggccuga

SEQ ID NO: 31658 - RNA, 18 nt, Artificial Sequence
  Synthetic oligonucleotide: FAS-4588
augcaaaacacaggguga

SEQ ID NO: 31659 - RNA, 19 nt, Artificial Sequence
  Synthetic oligonucleotide: FAS-4589
gaugcaaaacacaggguga

SEQ ID NO: 31660 - RNA, 20 nt, Artificial Sequence
  Synthetic oligonucleotide: FAS-1783
agaugcaaaacacaggguga

SEQ ID NO: 31661 - RNA, 21 nt, Artificial Sequence
  Synthetic oligonucleotide: FAS-4590
cagaugcaaaacacaggguga

SEQ ID NO: 31662 - RNA, 22 nt, Artificial Sequence
  Synthetic oligonucleotide: FAS-4591
acagaugcaaaacacaggguga

SEQ ID NO: 31663 - RNA, 23 nt, Artificial Sequence
  Synthetic oligonucleotide: FAS-4592
gacagaugcaaaacacaggguga

SEQ ID NO: 31664 - RNA, 24 nt, Artificial Sequence
  Synthetic oligonucleotide: FAS-4593
ugacagaugcaaaacacaggguga

SEQ ID NO: 31665 - RNA, 18 nt, Artificial Sequence
  Synthetic oligonucleotide: FAS-4594
gacgaugccaaaggaaua

SEQ ID NO: 31666 - RNA, 19 nt, Artificial Sequence
  Synthetic oligonucleotide: FAS-4595
ggacgaugccaaaggaaua

SEQ ID NO: 31667 - RNA, 20 nt, Artificial Sequence
  Synthetic oligonucleotide: FAS-1424
uggacgaugccaaaggaaua

SEQ ID NO: 31668 - RNA, 21 nt, Artificial Sequence
  Synthetic oligonucleotide: FAS-4596
guggacgaugccaaaggaaua

SEQ ID NO: 31669 - RNA, 22 nt, Artificial Sequence
  Synthetic oligonucleotide: FAS-4597
gguggacgaugccaaaggaaua

SEQ ID NO: 31670 - RNA, 23 nt, Artificial Sequence
  Synthetic oligonucleotide: FAS-4598
ugguggacgaugccaaaggaaua

SEQ ID NO: 31671 - RNA, 24 nt, Artificial Sequence
  Synthetic oligonucleotide: FAS-4599
uugguggacgaugccaaaggaaua

SEQ ID NO: 31672 - RNA, 18 nt, Artificial Sequence
  Synthetic oligonucleotide: FAS-4600
uuacaagauuuuuuuuua

SEQ ID NO: 31673 - RNA, 19 nt, Artificial Sequence
  Synthetic oligonucleotide: FAS-4601
auuacaagauuuuuuuuua

SEQ ID NO: 31674 - RNA, 20 nt, Artificial Sequence
  Synthetic oligonucleotide: FAS-1432
aauuacaagauuuuuuuuua

SEQ ID NO: 31675 - RNA, 21 nt, Artificial Sequence
  Synthetic oligonucleotide: FAS-4602
gaauuacaagauuuuuuuuua

SEQ ID NO: 31676 - RNA, 22 nt, Artificial Sequence
  Synthetic oligonucleotide: FAS-4603
agaauuacaagauuuuuuuuua

SEQ ID NO: 31677 - RNA, 23 nt, Artificial Sequence
  Synthetic oligonucleotide: FAS-4604
aagaauuacaagauuuuuuuuua

SEQ ID NO: 31678 - RNA, 24 nt, Artificial Sequence
  Synthetic oligonucleotide: FAS-4605
aaagaauuacaagauuuuuuuuua

SEQ ID NO: 31679 - RNA, 18 nt, Artificial Sequence
  Synthetic oligonucleotide: FAS-4606
ccccacgcccaccucaac

SEQ ID NO: 31680 - RNA, 19 nt, Artificial Sequence
  Synthetic oligonucleotide: FAS-4607
accccacgcccaccucaac

SEQ ID NO: 31681 - RNA, 20 nt, Artificial Sequence
  Synthetic oligonucleotide: FAS-1710
caccccacgcccaccucaac

SEQ ID NO: 31682 - RNA, 21 nt, Artificial Sequence
  Synthetic oligonucleotide: FAS-4608
gcaccccacgcccaccucaac

SEQ ID NO: 31683 - RNA, 22 nt, Artificial Sequence
  Synthetic oligonucleotide: FAS-4609
cgcaccccacgcccaccucaac

SEQ ID NO: 31684 - RNA, 23 nt, Artificial Sequence
  Synthetic oligonucleotide: FAS-4610
ccgcaccccacgcccaccucaac

SEQ ID NO: 31685 - RNA, 24 nt, Artificial Sequence
  Synthetic oligonucleotide: FAS-4611
uccgcaccccacgcccaccucaac

SEQ ID NO: 31686 - RNA, 18 nt, Artificial Sequence
  Synthetic oligonucleotide: FAS-4612
cuccagcguucugagcac

SEQ ID NO: 31687 - RNA, 19 nt, Artificial Sequence
  Synthetic oligonucleotide: FAS-4613
ccuccagcguucugagcac

SEQ ID NO: 31688 - RNA, 20 nt, Artificial Sequence
  Synthetic oligonucleotide: FAS-1721
uccuccagcguucugagcac

SEQ ID NO: 31689 - RNA, 21 nt, Artificial Sequence
  Synthetic oligonucleotide: FAS-4614
guccuccagcguucugagcac

SEQ ID NO: 31690 - RNA, 22 nt, Artificial Sequence
  Synthetic oligonucleotide: FAS-4615
aguccuccagcguucugagcac

SEQ ID NO: 31691 - RNA, 23 nt, Artificial Sequence
  Synthetic oligonucleotide: FAS-4616
aaguccuccagcguucugagcac

SEQ ID NO: 31692 - RNA, 24 nt, Artificial Sequence
  Synthetic oligonucleotide: FAS-4617
caaguccuccagcguucugagcac

SEQ ID NO: 31693 - RNA, 18 nt, Artificial Sequence
  Synthetic oligonucleotide: FAS-4618
acuuugaacaguguucac

SEQ ID NO: 31694 - RNA, 19 nt, Artificial Sequence
  Synthetic oligonucleotide: FAS-4619
gacuuugaacaguguucac

SEQ ID NO: 31695 - RNA, 20 nt, Artificial Sequence
  Synthetic oligonucleotide: FAS-1429
ugacuuugaacaguguucac

SEQ ID NO: 31696 - RNA, 21 nt, Artificial Sequence
  Synthetic oligonucleotide: FAS-4620
gugacuuugaacaguguucac

SEQ ID NO: 31697 - RNA, 22 nt, Artificial Sequence
  Synthetic oligonucleotide: FAS-4621
agugacuuugaacaguguucac

SEQ ID NO: 31698 - RNA, 23 nt, Artificial Sequence
  Synthetic oligonucleotide: FAS-4622
uagugacuuugaacaguguucac

SEQ ID NO: 31699 - RNA, 24 nt, Artificial Sequence
  Synthetic oligonucleotide: FAS-4623
auagugacuuugaacaguguucac

SEQ ID NO: 31700 - RNA, 18 nt, Artificial Sequence
  Synthetic oligonucleotide: FAS-4624
aagguccuaacagccccc

SEQ ID NO: 31701 - RNA, 19 nt, Artificial Sequence
  Synthetic oligonucleotide: FAS-4625
gaagguccuaacagccccc

SEQ ID NO: 31702 - RNA, 20 nt, Artificial Sequence
  Synthetic oligonucleotide: FAS-2084
ggaagguccuaacagccccc

SEQ ID NO: 31703 - RNA, 21 nt, Artificial Sequence
  Synthetic oligonucleotide: FAS-4626
gggaagguccuaacagccccc

SEQ ID NO: 31704 - RNA, 22 nt, Artificial Sequence
  Synthetic oligonucleotide: FAS-4627
agggaagguccuaacagccccc

SEQ ID NO: 31705 - RNA, 23 nt, Artificial Sequence
  Synthetic oligonucleotide: FAS-4628
gagggaagguccuaacagccccc

SEQ ID NO: 31706 - RNA, 24 nt, Artificial Sequence
  Synthetic oligonucleotide: FAS-4629
ugagggaagguccuaacagccccc

SEQ ID NO: 31707 - RNA, 18 nt, Artificial Sequence
  Synthetic oligonucleotide: FAS-4630
ggcucucuccccgccccc

SEQ ID NO: 31708 - RNA, 19 nt, Artificial Sequence
  Synthetic oligonucleotide: FAS-4631
aggcucucuccccgccccc

SEQ ID NO: 31709 - RNA, 20 nt, Artificial Sequence
  Synthetic oligonucleotide: FAS-1700
caggcucucuccccgccccc

SEQ ID NO: 31710 - RNA, 21 nt, Artificial Sequence
  Synthetic oligonucleotide: FAS-4632
gcaggcucucuccccgccccc

SEQ ID NO: 31711 - RNA, 22 nt, Artificial Sequence
  Synthetic oligonucleotide: FAS-4633
ugcaggcucucuccccgccccc

SEQ ID NO: 31712 - RNA, 23 nt, Artificial Sequence
  Synthetic oligonucleotide: FAS-4634
cugcaggcucucuccccgccccc

SEQ ID NO: 31713 - RNA, 24 nt, Artificial Sequence
  Synthetic oligonucleotide: FAS-4635
gcugcaggcucucuccccgccccc

SEQ ID NO: 31714 - RNA, 18 nt, Artificial Sequence
  Synthetic oligonucleotide: FAS-4636
gaagguccuaacagcccc

SEQ ID NO: 31715 - RNA, 19 nt, Artificial Sequence
  Synthetic oligonucleotide: FAS-4637
ggaagguccuaacagcccc

SEQ ID NO: 31716 - RNA, 20 nt, Artificial Sequence
  Synthetic oligonucleotide: FAS-2083
gggaagguccuaacagcccc

SEQ ID NO: 31717 - RNA, 21 nt, Artificial Sequence
  Synthetic oligonucleotide: FAS-4638
agggaagguccuaacagcccc

SEQ ID NO: 31718 - RNA, 22 nt, Artificial Sequence
  Synthetic oligonucleotide: FAS-4639
gagggaagguccuaacagcccc

SEQ ID NO: 31719 - RNA, 23 nt, Artificial Sequence
  Synthetic oligonucleotide: FAS-4640
ugagggaagguccuaacagcccc

SEQ ID NO: 31720 - RNA, 24 nt, Artificial Sequence
  Synthetic oligonucleotide: FAS-4641
cugagggaagguccuaacagcccc

SEQ ID NO: 31721 - RNA, 18 nt, Artificial Sequence
  Synthetic oligonucleotide: FAS-4642
ggaagguccuaacagccc

SEQ ID NO: 31722 - RNA, 19 nt, Artificial Sequence
  Synthetic oligonucleotide: FAS-4643
gggaagguccuaacagccc

SEQ ID NO: 31723 - RNA, 20 nt, Artificial Sequence
  Synthetic oligonucleotide: FAS-1726
agggaagguccuaacagccc

SEQ ID NO: 31724 - RNA, 21 nt, Artificial Sequence
  Synthetic oligonucleotide: FAS-4644
gagggaagguccuaacagccc

SEQ ID NO: 31725 - RNA, 22 nt, Artificial Sequence
  Synthetic oligonucleotide: FAS-4645
ugagggaagguccuaacagccc

SEQ ID NO: 31726 - RNA, 23 nt, Artificial Sequence
  Synthetic oligonucleotide: FAS-4646
cugagggaagguccuaacagccc

SEQ ID NO: 31727 - RNA, 24 nt, Artificial Sequence
  Synthetic oligonucleotide: FAS-4647
ccugagggaagguccuaacagccc

SEQ ID NO: 31728 - RNA, 18 nt, Artificial Sequence
  Synthetic oligonucleotide: FAS-4648
cacuucgcaucaaggccc

SEQ ID NO: 31729 - RNA, 19 nt, Artificial Sequence
  Synthetic oligonucleotide: FAS-4649
gcacuucgcaucaaggccc

SEQ ID NO: 31730 - RNA, 20 nt, Artificial Sequence
  Synthetic oligonucleotide: FAS-1719
agcacuucgcaucaaggccc

SEQ ID NO: 31731 - RNA, 21 nt, Artificial Sequence
  Synthetic oligonucleotide: FAS-4650
cagcacuucgcaucaaggccc

SEQ ID NO: 31732 - RNA, 22 nt, Artificial Sequence
  Synthetic oligonucleotide: FAS-4651
ucagcacuucgcaucaaggccc

SEQ ID NO: 31733 - RNA, 23 nt, Artificial Sequence
  Synthetic oligonucleotide: FAS-4652
gucagcacuucgcaucaaggccc

SEQ ID NO: 31734 - RNA, 24 nt, Artificial Sequence
  Synthetic oligonucleotide: FAS-4653
ggucagcacuucgcaucaaggccc

SEQ ID NO: 31735 - RNA, 18 nt, Artificial Sequence
  Synthetic oligonucleotide: FAS-4654
uuuuaaagaaaauuggcc

SEQ ID NO: 31736 - RNA, 19 nt, Artificial Sequence
  Synthetic oligonucleotide: FAS-4655
uuuuuaaagaaaauuggcc

SEQ ID NO: 31737 - RNA, 20 nt, Artificial Sequence
  Synthetic oligonucleotide: FAS-1810
uuuuuuaaagaaaauuggcc

SEQ ID NO: 31738 - RNA, 21 nt, Artificial Sequence
  Synthetic oligonucleotide: FAS-4656
uuuuuuuaaagaaaauuggcc

SEQ ID NO: 31739 - RNA, 22 nt, Artificial Sequence
  Synthetic oligonucleotide: FAS-4657
uuuuuuuuaaagaaaauuggcc

SEQ ID NO: 31740 - RNA, 23 nt, Artificial Sequence
  Synthetic oligonucleotide: FAS-4658
uuuuuuuuuaaagaaaauuggcc

SEQ ID NO: 31741 - RNA, 24 nt, Artificial Sequence
  Synthetic oligonucleotide: FAS-4659
auuuuuuuuuaaagaaaauuggcc

SEQ ID NO: 31742 - RNA, 18 nt, Artificial Sequence
  Synthetic oligonucleotide: FAS-4660
uggagcgcaguggucucc

SEQ ID NO: 31743 - RNA, 19 nt, Artificial Sequence
  Synthetic oligonucleotide: FAS-4661
guggagcgcaguggucucc

SEQ ID NO: 31744 - RNA, 20 nt, Artificial Sequence
  Synthetic oligonucleotide: FAS-1713
cguggagcgcaguggucucc

SEQ ID NO: 31745 - RNA, 21 nt, Artificial Sequence
  Synthetic oligonucleotide: FAS-4662
acguggagcgcaguggucucc

SEQ ID NO: 31746 - RNA, 22 nt, Artificial Sequence
  Synthetic oligonucleotide: FAS-4663
aacguggagcgcaguggucucc

SEQ ID NO: 31747 - RNA, 23 nt, Artificial Sequence
  Synthetic oligonucleotide: FAS-4664
caacguggagcgcaguggucucc

SEQ ID NO: 31748 - RNA, 24 nt, Artificial Sequence
  Synthetic oligonucleotide: FAS-4665
ucaacguggagcgcaguggucucc

SEQ ID NO: 31749 - RNA, 18 nt, Artificial Sequence
  Synthetic oligonucleotide: FAS-4666
ugucaacugagaggaagc

SEQ ID NO: 31750 - RNA, 19 nt, Artificial Sequence
  Synthetic oligonucleotide: FAS-4667
augucaacugagaggaagc

SEQ ID NO: 31751 - RNA, 20 nt, Artificial Sequence
  Synthetic oligonucleotide: FAS-1403
aaugucaacugagaggaagc

SEQ ID NO: 31752 - RNA, 21 nt, Artificial Sequence
  Synthetic oligonucleotide: FAS-4668
aaaugucaacugagaggaagc

SEQ ID NO: 31753 - RNA, 22 nt, Artificial Sequence
  Synthetic oligonucleotide: FAS-4669
aaaaugucaacugagaggaagc

SEQ ID NO: 31754 - RNA, 23 nt, Artificial Sequence
  Synthetic oligonucleotide: FAS-4670
gaaaaugucaacugagaggaagc

SEQ ID NO: 31755 - RNA, 24 nt, Artificial Sequence
  Synthetic oligonucleotide: FAS-4671
agaaaaugucaacugagaggaagc

SEQ ID NO: 31756 - RNA, 18 nt, Artificial Sequence
  Synthetic oligonucleotide: FAS-4672
aacaguguucaccagagc

SEQ ID NO: 31757 - RNA, 19 nt, Artificial Sequence
  Synthetic oligonucleotide: FAS-4673
gaacaguguucaccagagc

SEQ ID NO: 31758 - RNA, 20 nt, Artificial Sequence
  Synthetic oligonucleotide: FAS-1430
ugaacaguguucaccagagc

SEQ ID NO: 31759 - RNA, 21 nt, Artificial Sequence
  Synthetic oligonucleotide: FAS-4674
uugaacaguguucaccagagc

SEQ ID NO: 31760 - RNA, 22 nt, Artificial Sequence
  Synthetic oligonucleotide: FAS-4675
uuugaacaguguucaccagagc

SEQ ID NO: 31761 - RNA, 23 nt, Artificial Sequence
  Synthetic oligonucleotide: FAS-4676
cuuugaacaguguucaccagagc

SEQ ID NO: 31762 - RNA, 24 nt, Artificial Sequence
  Synthetic oligonucleotide: FAS-4677
acuuugaacaguguucaccagagc

SEQ ID NO: 31763 - RNA, 18 nt, Artificial Sequence
  Synthetic oligonucleotide: FAS-4678
guggucuccgaggagcgc

SEQ ID NO: 31764 - RNA, 19 nt, Artificial Sequence
  Synthetic oligonucleotide: FAS-4679
aguggucuccgaggagcgc

SEQ ID NO: 31765 - RNA, 20 nt, Artificial Sequence
  Synthetic oligonucleotide: FAS-2073
caguggucuccgaggagcgc

SEQ ID NO: 31766 - RNA, 21 nt, Artificial Sequence
  Synthetic oligonucleotide: FAS-4680
gcaguggucuccgaggagcgc

SEQ ID NO: 31767 - RNA, 22 nt, Artificial Sequence
  Synthetic oligonucleotide: FAS-4681
cgcaguggucuccgaggagcgc

SEQ ID NO: 31768 - RNA, 23 nt, Artificial Sequence
  Synthetic oligonucleotide: FAS-4682
gcgcaguggucuccgaggagcgc

SEQ ID NO: 31769 - RNA, 24 nt, Artificial Sequence
  Synthetic oligonucleotide: FAS-4683
agcgcaguggucuccgaggagcgc

SEQ ID NO: 31770 - RNA, 18 nt, Artificial Sequence
  Synthetic oligonucleotide: FAS-4684
gcacucacccacccgcgc

SEQ ID NO: 31771 - RNA, 19 nt, Artificial Sequence
  Synthetic oligonucleotide: FAS-4685
cgcacucacccacccgcgc

SEQ ID NO: 31772 - RNA, 20 nt, Artificial Sequence
  Synthetic oligonucleotide: FAS-2060
gcgcacucacccacccgcgc

SEQ ID NO: 31773 - RNA, 21 nt, Artificial Sequence
  Synthetic oligonucleotide: FAS-4686
cgcgcacucacccacccgcgc

SEQ ID NO: 31774 - RNA, 22 nt, Artificial Sequence
  Synthetic oligonucleotide: FAS-4687
gcgcgcacucacccacccgcgc

SEQ ID NO: 31775 - RNA, 23 nt, Artificial Sequence
  Synthetic oligonucleotide: FAS-4688
ggcgcgcacucacccacccgcgc

SEQ ID NO: 31776 - RNA, 24 nt, Artificial Sequence
  Synthetic oligonucleotide: FAS-4689
cggcgcgcacucacccacccgcgc

SEQ ID NO: 31777 - RNA, 18 nt, Artificial Sequence
  Synthetic oligonucleotide: FAS-4690
cguucugagcacccgggc

SEQ ID NO: 31778 - RNA, 19 nt, Artificial Sequence
  Synthetic oligonucleotide: FAS-4691
gcguucugagcacccgggc

SEQ ID NO: 31779 - RNA, 20 nt, Artificial Sequence
  Synthetic oligonucleotide: FAS-1722
agcguucugagcacccgggc

SEQ ID NO: 31780 - RNA, 21 nt, Artificial Sequence
  Synthetic oligonucleotide: FAS-4692
cagcguucugagcacccgggc

SEQ ID NO: 31781 - RNA, 22 nt, Artificial Sequence
  Synthetic oligonucleotide: FAS-4693
ccagcguucugagcacccgggc

SEQ ID NO: 31782 - RNA, 23 nt, Artificial Sequence
  Synthetic oligonucleotide: FAS-4694
uccagcguucugagcacccgggc

SEQ ID NO: 31783 - RNA, 24 nt, Artificial Sequence
  Synthetic oligonucleotide: FAS-4695
cuccagcguucugagcacccgggc

SEQ ID NO: 31784 - RNA, 18 nt, Artificial Sequence
  Synthetic oligonucleotide: FAS-4696
uuuuuaaagaaaauuggc

SEQ ID NO: 31785 - RNA, 19 nt, Artificial Sequence
  Synthetic oligonucleotide: FAS-4697
uuuuuuaaagaaaauuggc

SEQ ID NO: 31786 - RNA, 20 nt, Artificial Sequence
  Synthetic oligonucleotide: FAS-1433
uuuuuuuaaagaaaauuggc

SEQ ID NO: 31787 - RNA, 21 nt, Artificial Sequence
  Synthetic oligonucleotide: FAS-4698
uuuuuuuuaaagaaaauuggc

SEQ ID NO: 31788 - RNA, 22 nt, Artificial Sequence
  Synthetic oligonucleotide: FAS-4699
uuuuuuuuuaaagaaaauuggc

SEQ ID NO: 31789 - RNA, 23 nt, Artificial Sequence
  Synthetic oligonucleotide: FAS-4700
auuuuuuuuuaaagaaaauuggc

SEQ ID NO: 31790 - RNA, 24 nt, Artificial Sequence
  Synthetic oligonucleotide: FAS-4701
gauuuuuuuuuaaagaaaauuggc

SEQ ID NO: 31791 - RNA, 18 nt, Artificial Sequence
  Synthetic oligonucleotide: FAS-4702
ccuacgucugagaacugc

SEQ ID NO: 31792 - RNA, 19 nt, Artificial Sequence
  Synthetic oligonucleotide: FAS-4703
uccuacgucugagaacugc

SEQ ID NO: 31793 - RNA, 20 nt, Artificial Sequence
  Synthetic oligonucleotide: FAS-1697
uuccuacgucugagaacugc

SEQ ID NO: 31794 - RNA, 21 nt, Artificial Sequence
  Synthetic oligonucleotide: FAS-4704
uuuccuacgucugagaacugc

SEQ ID NO: 31795 - RNA, 22 nt, Artificial Sequence
  Synthetic oligonucleotide: FAS-4705
auuuccuacgucugagaacugc

SEQ ID NO: 31796 - RNA, 23 nt, Artificial Sequence
  Synthetic oligonucleotide: FAS-4706
uauuuccuacgucugagaacugc

SEQ ID NO: 31797 - RNA, 24 nt, Artificial Sequence
  Synthetic oligonucleotide: FAS-4707
uuauuuccuacgucugagaacugc

SEQ ID NO: 31798 - RNA, 18 nt, Artificial Sequence
  Synthetic oligonucleotide: FAS-4708
gggugauggaaagcccuc

SEQ ID NO: 31799 - RNA, 19 nt, Artificial Sequence
  Synthetic oligonucleotide: FAS-4709
agggugauggaaagcccuc

SEQ ID NO: 31800 - RNA, 20 nt, Artificial Sequence
  Synthetic oligonucleotide: FAS-1784
cagggugauggaaagcccuc

SEQ ID NO: 31801 - RNA, 21 nt, Artificial Sequence
  Synthetic oligonucleotide: FAS-4710
acagggugauggaaagcccuc

SEQ ID NO: 31802 - RNA, 22 nt, Artificial Sequence
  Synthetic oligonucleotide: FAS-4711
cacagggugauggaaagcccuc

SEQ ID NO: 31803 - RNA, 23 nt, Artificial Sequence
  Synthetic oligonucleotide: FAS-4712
acacagggugauggaaagcccuc

SEQ ID NO: 31804 - RNA, 24 nt, Artificial Sequence
  Synthetic oligonucleotide: FAS-4713
aacacagggugauggaaagcccuc

SEQ ID NO: 31805 - RNA, 18 nt, Artificial Sequence
  Synthetic oligonucleotide: FAS-4714
gagggcccaaacaggcuc

SEQ ID NO: 31806 - RNA, 19 nt, Artificial Sequence
  Synthetic oligonucleotide: FAS-4715
ugagggcccaaacaggcuc

SEQ ID NO: 31807 - RNA, 20 nt, Artificial Sequence
  Synthetic oligonucleotide: FAS-1397
uugagggcccaaacaggcuc

SEQ ID NO: 31808 - RNA, 21 nt, Artificial Sequence
  Synthetic oligonucleotide: FAS-4716
uuugagggcccaaacaggcuc

SEQ ID NO: 31809 - RNA, 22 nt, Artificial Sequence
  Synthetic oligonucleotide: FAS-4717
auuugagggcccaaacaggcuc

SEQ ID NO: 31810 - RNA, 23 nt, Artificial Sequence
  Synthetic oligonucleotide: FAS-4718
gauuugagggcccaaacaggcuc

SEQ ID NO: 31811 - RNA, 24 nt, Artificial Sequence
  Synthetic oligonucleotide: FAS-4719
agauuugagggcccaaacaggcuc

SEQ ID NO: 31812 - RNA, 18 nt, Artificial Sequence
  Synthetic oligonucleotide: FAS-4720
ccuuuaguguguccaguc

SEQ ID NO: 31813 - RNA, 19 nt, Artificial Sequence
  Synthetic oligonucleotide: FAS-4721
accuuuaguguguccaguc

SEQ ID NO: 31814 - RNA, 20 nt, Artificial Sequence
  Synthetic oligonucleotide: FAS-1807
aaccuuuaguguguccaguc

SEQ ID NO: 31815 - RNA, 21 nt, Artificial Sequence
  Synthetic oligonucleotide: FAS-4722
aaaccuuuaguguguccaguc

SEQ ID NO: 31816 - RNA, 22 nt, Artificial Sequence
  Synthetic oligonucleotide: FAS-4723
gaaaccuuuaguguguccaguc

SEQ ID NO: 31817 - RNA, 23 nt, Artificial Sequence
  Synthetic oligonucleotide: FAS-4724
ugaaaccuuuaguguguccaguc

SEQ ID NO: 31818 - RNA, 24 nt, Artificial Sequence
  Synthetic oligonucleotide: FAS-4725
cugaaaccuuuaguguguccaguc

SEQ ID NO: 31819 - RNA, 18 nt, Artificial Sequence
  Synthetic oligonucleotide: FAS-4726
ggcuugucagggcuuguc

SEQ ID NO: 31820 - RNA, 19 nt, Artificial Sequence
  Synthetic oligonucleotide: FAS-4727
uggcuugucagggcuuguc

SEQ ID NO: 31821 - RNA, 20 nt, Artificial Sequence
  Synthetic oligonucleotide: FAS-1706
uuggcuugucagggcuuguc

SEQ ID NO: 31822 - RNA, 21 nt, Artificial Sequence
  Synthetic oligonucleotide: FAS-4728
cuuggcuugucagggcuuguc

SEQ ID NO: 31823 - RNA, 22 nt, Artificial Sequence
  Synthetic oligonucleotide: FAS-4729
gcuuggcuugucagggcuuguc

SEQ ID NO: 31824 - RNA, 23 nt, Artificial Sequence
  Synthetic oligonucleotide: FAS-4730
ggcuuggcuugucagggcuuguc

SEQ ID NO: 31825 - RNA, 24 nt, Artificial Sequence
  Synthetic oligonucleotide: FAS-4731
uggcuuggcuugucagggcuuguc

SEQ ID NO: 31826 - RNA, 18 nt, Artificial Sequence
  Synthetic oligonucleotide: FAS-4732
ggcccaaacaggcuccag

SEQ ID NO: 31827 - RNA, 19 nt, Artificial Sequence
  Synthetic oligonucleotide: FAS-4733
gggcccaaacaggcuccag

SEQ ID NO: 31828 - RNA, 20 nt, Artificial Sequence
  Synthetic oligonucleotide: FAS-1398
agggcccaaacaggcuccag

SEQ ID NO: 31829 - RNA, 21 nt, Artificial Sequence
  Synthetic oligonucleotide: FAS-4734
gagggcccaaacaggcuccag

SEQ ID NO: 31830 - RNA, 22 nt, Artificial Sequence
  Synthetic oligonucleotide: FAS-4735
ugagggcccaaacaggcuccag

SEQ ID NO: 31831 - RNA, 23 nt, Artificial Sequence
  Synthetic oligonucleotide: FAS-4736
uugagggcccaaacaggcuccag

SEQ ID NO: 31832 - RNA, 24 nt, Artificial Sequence
  Synthetic oligonucleotide: FAS-4737
uuugagggcccaaacaggcuccag

SEQ ID NO: 31833 - RNA, 18 nt, Artificial Sequence
  Synthetic oligonucleotide: FAS-4738
aagaaaaugucaacugag

SEQ ID NO: 31834 - RNA, 19 nt, Artificial Sequence
  Synthetic oligonucleotide: FAS-4739
gaagaaaaugucaacugag

SEQ ID NO: 31835 - RNA, 20 nt, Artificial Sequence
  Synthetic oligonucleotide: FAS-1790
agaagaaaaugucaacugag

SEQ ID NO: 31836 - RNA, 21 nt, Artificial Sequence
  Synthetic oligonucleotide: FAS-4740
cagaagaaaaugucaacugag

SEQ ID NO: 31837 - RNA, 22 nt, Artificial Sequence
  Synthetic oligonucleotide: FAS-4741
ccagaagaaaaugucaacugag

SEQ ID NO: 31838 - RNA, 23 nt, Artificial Sequence
  Synthetic oligonucleotide: FAS-4742
uccagaagaaaaugucaacugag

SEQ ID NO: 31839 - RNA, 24 nt, Artificial Sequence
  Synthetic oligonucleotide: FAS-4743
cuccagaagaaaaugucaacugag

SEQ ID NO: 31840 - RNA, 18 nt, Artificial Sequence
  Synthetic oligonucleotide: FAS-4744
cccacgcccaccucaacg

SEQ ID NO: 31841 - RNA, 19 nt, Artificial Sequence
  Synthetic oligonucleotide: FAS-4745
ccccacgcccaccucaacg

SEQ ID NO: 31842 - RNA, 20 nt, Artificial Sequence
  Synthetic oligonucleotide: FAS-2070
accccacgcccaccucaacg

SEQ ID NO: 31843 - RNA, 21 nt, Artificial Sequence
  Synthetic oligonucleotide: FAS-4746
caccccacgcccaccucaacg

SEQ ID NO: 31844 - RNA, 22 nt, Artificial Sequence
  Synthetic oligonucleotide: FAS-4747
gcaccccacgcccaccucaacg

SEQ ID NO: 31845 - RNA, 23 nt, Artificial Sequence
  Synthetic oligonucleotide: FAS-4748
cgcaccccacgcccaccucaacg

SEQ ID NO: 31846 - RNA, 24 nt, Artificial Sequence
  Synthetic oligonucleotide: FAS-4749
ccgcaccccacgcccaccucaacg

SEQ ID NO: 31847 - RNA, 18 nt, Artificial Sequence
  Synthetic oligonucleotide: FAS-4750
gcucucuccccgcccccg

SEQ ID NO: 31848 - RNA, 19 nt, Artificial Sequence
  Synthetic oligonucleotide: FAS-4751
ggcucucuccccgcccccg

SEQ ID NO: 31849 - RNA, 20 nt, Artificial Sequence
  Synthetic oligonucleotide: FAS-2056
aggcucucuccccgcccccg

SEQ ID NO: 31850 - RNA, 21 nt, Artificial Sequence
  Synthetic oligonucleotide: FAS-4752
caggcucucuccccgcccccg

SEQ ID NO: 31851 - RNA, 22 nt, Artificial Sequence
  Synthetic oligonucleotide: FAS-4753
gcaggcucucuccccgcccccg

SEQ ID NO: 31852 - RNA, 23 nt, Artificial Sequence
  Synthetic oligonucleotide: FAS-4754
ugcaggcucucuccccgcccccg

SEQ ID NO: 31853 - RNA, 24 nt, Artificial Sequence
  Synthetic oligonucleotide: FAS-4755
cugcaggcucucuccccgcccccg

SEQ ID NO: 31854 - RNA, 18 nt, Artificial Sequence
  Synthetic oligonucleotide: FAS-4756
ggagcgcaguggucuccg

SEQ ID NO: 31855 - RNA, 19 nt, Artificial Sequence
  Synthetic oligonucleotide: FAS-4757
uggagcgcaguggucuccg

SEQ ID NO: 31856 - RNA, 20 nt, Artificial Sequence
  Synthetic oligonucleotide: FAS-2072
guggagcgcaguggucuccg

SEQ ID NO: 31857 - RNA, 21 nt, Artificial Sequence
  Synthetic oligonucleotide: FAS-4758
cguggagcgcaguggucuccg

SEQ ID NO: 31858 - RNA, 22 nt, Artificial Sequence
  Synthetic oligonucleotide: FAS-4759
acguggagcgcaguggucuccg

SEQ ID NO: 31859 - RNA, 23 nt, Artificial Sequence
  Synthetic oligonucleotide: FAS-4760
aacguggagcgcaguggucuccg

SEQ ID NO: 31860 - RNA, 24 nt, Artificial Sequence
  Synthetic oligonucleotide: FAS-4761
caacguggagcgcaguggucuccg

SEQ ID NO: 31861 - RNA, 18 nt, Artificial Sequence
  Synthetic oligonucleotide: FAS-4762
aguggucuccgaggagcg

SEQ ID NO: 31862 - RNA, 19 nt, Artificial Sequence
  Synthetic oligonucleotide: FAS-4763
caguggucuccgaggagcg

SEQ ID NO: 31863 - RNA, 20 nt, Artificial Sequence
  Synthetic oligonucleotide: FAS-1715
gcaguggucuccgaggagcg

SEQ ID NO: 31864 - RNA, 21 nt, Artificial Sequence
  Synthetic oligonucleotide: FAS-4764
cgcaguggucuccgaggagcg

SEQ ID NO: 31865 - RNA, 22 nt, Artificial Sequence
  Synthetic oligonucleotide: FAS-4765
gcgcaguggucuccgaggagcg

SEQ ID NO: 31866 - RNA, 23 nt, Artificial Sequence
  Synthetic oligonucleotide: FAS-4766
agcgcaguggucuccgaggagcg

SEQ ID NO: 31867 - RNA, 24 nt, Artificial Sequence
  Synthetic oligonucleotide: FAS-4767
gagcgcaguggucuccgaggagcg

SEQ ID NO: 31868 - RNA, 18 nt, Artificial Sequence
  Synthetic oligonucleotide: FAS-4768
cgcacucacccacccgcg

SEQ ID NO: 31869 - RNA, 19 nt, Artificial Sequence
  Synthetic oligonucleotide: FAS-4769
gcgcacucacccacccgcg

SEQ ID NO: 31870 - RNA, 20 nt, Artificial Sequence
  Synthetic oligonucleotide: FAS-1702
cgcgcacucacccacccgcg

SEQ ID NO: 31871 - RNA, 21 nt, Artificial Sequence
  Synthetic oligonucleotide: FAS-4770
gcgcgcacucacccacccgcg

SEQ ID NO: 31872 - RNA, 22 nt, Artificial Sequence
  Synthetic oligonucleotide: FAS-4771
ggcgcgcacucacccacccgcg

SEQ ID NO: 31873 - RNA, 23 nt, Artificial Sequence
  Synthetic oligonucleotide: FAS-4772
cggcgcgcacucacccacccgcg

SEQ ID NO: 31874 - RNA, 24 nt, Artificial Sequence
  Synthetic oligonucleotide: FAS-4773
gcggcgcgcacucacccacccgcg

SEQ ID NO: 31875 - RNA, 18 nt, Artificial Sequence
  Synthetic oligonucleotide: FAS-4774
ugaaucuaauugggaagg

SEQ ID NO: 31876 - RNA, 19 nt, Artificial Sequence
  Synthetic oligonucleotide: FAS-4775
uugaaucuaauugggaagg

SEQ ID NO: 31877 - RNA, 20 nt, Artificial Sequence
  Synthetic oligonucleotide: FAS-1416
guugaaucuaauugggaagg

SEQ ID NO: 31878 - RNA, 21 nt, Artificial Sequence
  Synthetic oligonucleotide: FAS-4776
gguugaaucuaauugggaagg

SEQ ID NO: 31879 - RNA, 22 nt, Artificial Sequence
  Synthetic oligonucleotide: FAS-4777
ggguugaaucuaauugggaagg

SEQ ID NO: 31880 - RNA, 23 nt, Artificial Sequence
  Synthetic oligonucleotide: FAS-4778
uggguugaaucuaauugggaagg

SEQ ID NO: 31881 - RNA, 24 nt, Artificial Sequence
  Synthetic oligonucleotide: FAS-4779
auggguugaaucuaauugggaagg

SEQ ID NO: 31882 - RNA, 18 nt, Artificial Sequence
  Synthetic oligonucleotide: FAS-4780
ugagaggaagccugaagg

SEQ ID NO: 31883 - RNA, 19 nt, Artificial Sequence
  Synthetic oligonucleotide: FAS-4781
cugagaggaagccugaagg

SEQ ID NO: 31884 - RNA, 20 nt, Artificial Sequence
  Synthetic oligonucleotide: FAS-1405
acugagaggaagccugaagg

SEQ ID NO: 31885 - RNA, 21 nt, Artificial Sequence
  Synthetic oligonucleotide: FAS-4782
aacugagaggaagccugaagg

SEQ ID NO: 31886 - RNA, 22 nt, Artificial Sequence
  Synthetic oligonucleotide: FAS-4783
caacugagaggaagccugaagg

SEQ ID NO: 31887 - RNA, 23 nt, Artificial Sequence
  Synthetic oligonucleotide: FAS-4784
ucaacugagaggaagccugaagg

SEQ ID NO: 31888 - RNA, 24 nt, Artificial Sequence
  Synthetic oligonucleotide: FAS-4785
gucaacugagaggaagccugaagg

SEQ ID NO: 31889 - RNA, 18 nt, Artificial Sequence
  Synthetic oligonucleotide: FAS-4786
ggguugaaucuaauuggg

SEQ ID NO: 31890 - RNA, 19 nt, Artificial Sequence
  Synthetic oligonucleotide: FAS-4787
uggguugaaucuaauuggg

SEQ ID NO: 31891 - RNA, 20 nt, Artificial Sequence
  Synthetic oligonucleotide: FAS-1413
auggguugaaucuaauuggg

SEQ ID NO: 31892 - RNA, 21 nt, Artificial Sequence
  Synthetic oligonucleotide: FAS-4788
aauggguugaaucuaauuggg

SEQ ID NO: 31893 - RNA, 22 nt, Artificial Sequence
  Synthetic oligonucleotide: FAS-4789
uaauggguugaaucuaauuggg

SEQ ID NO: 31894 - RNA, 23 nt, Artificial Sequence
  Synthetic oligonucleotide: FAS-4790
uuaauggguugaaucuaauuggg

SEQ ID NO: 31895 - RNA, 24 nt, Artificial Sequence
  Synthetic oligonucleotide: FAS-4791
auuaauggguugaaucuaauuggg

SEQ ID NO: 31896 - RNA, 18 nt, Artificial Sequence
  Synthetic oligonucleotide: FAS-4792
ucugagcacccgggccug

SEQ ID NO: 31897 - RNA, 19 nt, Artificial Sequence
  Synthetic oligonucleotide: FAS-4793
uucugagcacccgggccug

SEQ ID NO: 31898 - RNA, 20 nt, Artificial Sequence
  Synthetic oligonucleotide: FAS-2080
guucugagcacccgggccug

SEQ ID NO: 31899 - RNA, 21 nt, Artificial Sequence
  Synthetic oligonucleotide: FAS-4794
cguucugagcacccgggccug

SEQ ID NO: 31900 - RNA, 22 nt, Artificial Sequence
  Synthetic oligonucleotide: FAS-4795
gcguucugagcacccgggccug

SEQ ID NO: 31901 - RNA, 23 nt, Artificial Sequence
  Synthetic oligonucleotide: FAS-4796
agcguucugagcacccgggccug

SEQ ID NO: 31902 - RNA, 24 nt, Artificial Sequence
  Synthetic oligonucleotide: FAS-4797
cagcguucugagcacccgggccug

SEQ ID NO: 31903 - RNA, 18 nt, Artificial Sequence
  Synthetic oligonucleotide: FAS-4798
agguugcagagugaggug

SEQ ID NO: 31904 - RNA, 19 nt, Artificial Sequence
  Synthetic oligonucleotide: FAS-4799
gagguugcagagugaggug

SEQ ID NO: 31905 - RNA, 20 nt, Artificial Sequence
  Synthetic oligonucleotide: FAS-1420
agagguugcagagugaggug

SEQ ID NO: 31906 - RNA, 21 nt, Artificial Sequence
  Synthetic oligonucleotide: FAS-4800
gagagguugcagagugaggug

SEQ ID NO: 31907 - RNA, 22 nt, Artificial Sequence
  Synthetic oligonucleotide: FAS-4801
agagagguugcagagugaggug

SEQ ID NO: 31908 - RNA, 23 nt, Artificial Sequence
  Synthetic oligonucleotide: FAS-4802
gagagagguugcagagugaggug

SEQ ID NO: 31909 - RNA, 24 nt, Artificial Sequence
  Synthetic oligonucleotide: FAS-4803
ggagagagguugcagagugaggug

SEQ ID NO: 31910 - RNA, 18 nt, Artificial Sequence
  Synthetic oligonucleotide: FAS-4804
gaugcaaaacacagggug

SEQ ID NO: 31911 - RNA, 19 nt, Artificial Sequence
  Synthetic oligonucleotide: FAS-4805
agaugcaaaacacagggug

SEQ ID NO: 31912 - RNA, 20 nt, Artificial Sequence
  Synthetic oligonucleotide: FAS-1390
cagaugcaaaacacagggug

SEQ ID NO: 31913 - RNA, 21 nt, Artificial Sequence
  Synthetic oligonucleotide: FAS-4806
acagaugcaaaacacagggug

SEQ ID NO: 31914 - RNA, 22 nt, Artificial Sequence
  Synthetic oligonucleotide: FAS-4807
gacagaugcaaaacacagggug

SEQ ID NO: 31915 - RNA, 23 nt, Artificial Sequence
  Synthetic oligonucleotide: FAS-4808
ugacagaugcaaaacacagggug

SEQ ID NO: 31916 - RNA, 24 nt, Artificial Sequence
  Synthetic oligonucleotide: FAS-4809
gugacagaugcaaaacacagggug

SEQ ID NO: 31917 - RNA, 18 nt, Artificial Sequence
  Synthetic oligonucleotide: FAS-4810
agugaggugcagagcuug

SEQ ID NO: 31918 - RNA, 19 nt, Artificial Sequence
  Synthetic oligonucleotide: FAS-4811
gagugaggugcagagcuug

SEQ ID NO: 31919 - RNA, 20 nt, Artificial Sequence
  Synthetic oligonucleotide: FAS-1421
agagugaggugcagagcuug

SEQ ID NO: 31920 - RNA, 21 nt, Artificial Sequence
  Synthetic oligonucleotide: FAS-4812
cagagugaggugcagagcuug

SEQ ID NO: 31921 - RNA, 22 nt, Artificial Sequence
  Synthetic oligonucleotide: FAS-4813
gcagagugaggugcagagcuug

SEQ ID NO: 31922 - RNA, 23 nt, Artificial Sequence
  Synthetic oligonucleotide: FAS-4814
ugcagagugaggugcagagcuug

SEQ ID NO: 31923 - RNA, 24 nt, Artificial Sequence
  Synthetic oligonucleotide: FAS-4815
uugcagagugaggugcagagcuug

SEQ ID NO: 31924 - RNA, 18 nt, Artificial Sequence
  Synthetic oligonucleotide: FAS-4816
uaauggguugaaucuaau

SEQ ID NO: 31925 - RNA, 19 nt, Artificial Sequence
  Synthetic oligonucleotide: FAS-4817
uuaauggguugaaucuaau

SEQ ID NO: 31926 - RNA, 20 nt, Artificial Sequence
  Synthetic oligonucleotide: FAS-1798
auuaauggguugaaucuaau

SEQ ID NO: 31927 - RNA, 21 nt, Artificial Sequence
  Synthetic oligonucleotide: FAS-4818
uauuaauggguugaaucuaau

SEQ ID NO: 31928 - RNA, 22 nt, Artificial Sequence
  Synthetic oligonucleotide: FAS-4819
uuauuaauggguugaaucuaau

SEQ ID NO: 31929 - RNA, 23 nt, Artificial Sequence
  Synthetic oligonucleotide: FAS-4820
guuauuaauggguugaaucuaau

SEQ ID NO: 31930 - RNA, 24 nt, Artificial Sequence
  Synthetic oligonucleotide: FAS-4821
uguuauuaauggguugaaucuaau

SEQ ID NO: 31931 - RNA, 18 nt, Artificial Sequence
  Synthetic oligonucleotide: FAS-4822
ggguaaccuaaccuagau

SEQ ID NO: 31932 - RNA, 19 nt, Artificial Sequence
  Synthetic oligonucleotide: FAS-4823
aggguaaccuaaccuagau

SEQ ID NO: 31933 - RNA, 20 nt, Artificial Sequence
  Synthetic oligonucleotide: FAS-1395
gaggguaaccuaaccuagau

SEQ ID NO: 31934 - RNA, 21 nt, Artificial Sequence
  Synthetic oligonucleotide: FAS-4824
ggaggguaaccuaaccuagau

SEQ ID NO: 31935 - RNA, 22 nt, Artificial Sequence
  Synthetic oligonucleotide: FAS-4825
aggaggguaaccuaaccuagau

SEQ ID NO: 31936 - RNA, 23 nt, Artificial Sequence
  Synthetic oligonucleotide: FAS-4826
caggaggguaaccuaaccuagau

SEQ ID NO: 31937 - RNA, 24 nt, Artificial Sequence
  Synthetic oligonucleotide: FAS-4827
ucaggaggguaaccuaaccuagau

SEQ ID NO: 31938 - RNA, 18 nt, Artificial Sequence
  Synthetic oligonucleotide: FAS-4828
cagaagaaaaugucaacu

SEQ ID NO: 31939 - RNA, 19 nt, Artificial Sequence
  Synthetic oligonucleotide: FAS-4829
ccagaagaaaaugucaacu

SEQ ID NO: 31940 - RNA, 20 nt, Artificial Sequence
  Synthetic oligonucleotide: FAS-1400
uccagaagaaaaugucaacu

SEQ ID NO: 31941 - RNA, 21 nt, Artificial Sequence
  Synthetic oligonucleotide: FAS-4830
cuccagaagaaaaugucaacu

SEQ ID NO: 31942 - RNA, 22 nt, Artificial Sequence
  Synthetic oligonucleotide: FAS-4831
gcuccagaagaaaaugucaacu

SEQ ID NO: 31943 - RNA, 23 nt, Artificial Sequence
  Synthetic oligonucleotide: FAS-4832
ggcuccagaagaaaaugucaacu

SEQ ID NO: 31944 - RNA, 24 nt, Artificial Sequence
  Synthetic oligonucleotide: FAS-4833
aggcuccagaagaaaaugucaacu

SEQ ID NO: 31945 - RNA, 18 nt, Artificial Sequence
  Synthetic oligonucleotide: FAS-4834
uccaaagcaauagugacu

SEQ ID NO: 31946 - RNA, 19 nt, Artificial Sequence
  Synthetic oligonucleotide: FAS-4835
uuccaaagcaauagugacu

SEQ ID NO: 31947 - RNA, 20 nt, Artificial Sequence
  Synthetic oligonucleotide: FAS-1428
guuccaaagcaauagugacu

SEQ ID NO: 31948 - RNA, 21 nt, Artificial Sequence
  Synthetic oligonucleotide: FAS-4836
cguuccaaagcaauagugacu

SEQ ID NO: 31949 - RNA, 22 nt, Artificial Sequence
  Synthetic oligonucleotide: FAS-4837
ccguuccaaagcaauagugacu

SEQ ID NO: 31950 - RNA, 23 nt, Artificial Sequence
  Synthetic oligonucleotide: FAS-4838
accguuccaaagcaauagugacu

SEQ ID NO: 31951 - RNA, 24 nt, Artificial Sequence
  Synthetic oligonucleotide: FAS-4839
uaccguuccaaagcaauagugacu

SEQ ID NO: 31952 - RNA, 18 nt, Artificial Sequence
  Synthetic oligonucleotide: FAS-4840
auucaugcuaaacuaccu

SEQ ID NO: 31953 - RNA, 19 nt, Artificial Sequence
  Synthetic oligonucleotide: FAS-4841
aauucaugcuaaacuaccu

SEQ ID NO: 31954 - RNA, 20 nt, Artificial Sequence
  Synthetic oligonucleotide: FAS-1427
aaauucaugcuaaacuaccu

SEQ ID NO: 31955 - RNA, 21 nt, Artificial Sequence
  Synthetic oligonucleotide: FAS-4842
aaaauucaugcuaaacuaccu

SEQ ID NO: 31956 - RNA, 22 nt, Artificial Sequence
  Synthetic oligonucleotide: FAS-4843
uaaaauucaugcuaaacuaccu

SEQ ID NO: 31957 - RNA, 23 nt, Artificial Sequence
  Synthetic oligonucleotide: FAS-4844
guaaaauucaugcuaaacuaccu

SEQ ID NO: 31958 - RNA, 24 nt, Artificial Sequence
  Synthetic oligonucleotide: FAS-4845
uguaaaauucaugcuaaacuaccu

SEQ ID NO: 31959 - RNA, 18 nt, Artificial Sequence
  Synthetic oligonucleotide: FAS-4846
agggugauggaaagcccu

SEQ ID NO: 31960 - RNA, 19 nt, Artificial Sequence
  Synthetic oligonucleotide: FAS-4847
cagggugauggaaagcccu

SEQ ID NO: 31961 - RNA, 20 nt, Artificial Sequence
  Synthetic oligonucleotide: FAS-1392
acagggugauggaaagcccu

SEQ ID NO: 31962 - RNA, 21 nt, Artificial Sequence
  Synthetic oligonucleotide: FAS-4848
cacagggugauggaaagcccu

SEQ ID NO: 31963 - RNA, 22 nt, Artificial Sequence
  Synthetic oligonucleotide: FAS-4849
acacagggugauggaaagcccu

SEQ ID NO: 31964 - RNA, 23 nt, Artificial Sequence
  Synthetic oligonucleotide: FAS-4850
aacacagggugauggaaagcccu

SEQ ID NO: 31965 - RNA, 24 nt, Artificial Sequence
  Synthetic oligonucleotide: FAS-4851
aaacacagggugauggaaagcccu

SEQ ID NO: 31966 - RNA, 18 nt, Artificial Sequence
  Synthetic oligonucleotide: FAS-4852
uucugagcacccgggccu

SEQ ID NO: 31967 - RNA, 19 nt, Artificial Sequence
  Synthetic oligonucleotide: FAS-4853
guucugagcacccgggccu

SEQ ID NO: 31968 - RNA, 20 nt, Artificial Sequence
  Synthetic oligonucleotide: FAS-1723
cguucugagcacccgggccu

SEQ ID NO: 31969 - RNA, 21 nt, Artificial Sequence
  Synthetic oligonucleotide: FAS-4854
gcguucugagcacccgggccu

SEQ ID NO: 31970 - RNA, 22 nt, Artificial Sequence
  Synthetic oligonucleotide: FAS-4855
agcguucugagcacccgggccu

SEQ ID NO: 31971 - RNA, 23 nt, Artificial Sequence
  Synthetic oligonucleotide: FAS-4856
cagcguucugagcacccgggccu

SEQ ID NO: 31972 - RNA, 24 nt, Artificial Sequence
  Synthetic oligonucleotide: FAS-4857
ccagcguucugagcacccgggccu

SEQ ID NO: 31973 - RNA, 18 nt, Artificial Sequence
  Synthetic oligonucleotide: FAS-4858
gacuuauuuccuacgucu

SEQ ID NO: 31974 - RNA, 19 nt, Artificial Sequence
  Synthetic oligonucleotide: FAS-4859
ugacuuauuuccuacgucu

SEQ ID NO: 31975 - RNA, 20 nt, Artificial Sequence
  Synthetic oligonucleotide: FAS-1696
cugacuuauuuccuacgucu

SEQ ID NO: 31976 - RNA, 21 nt, Artificial Sequence
  Synthetic oligonucleotide: FAS-4860
gcugacuuauuuccuacgucu

SEQ ID NO: 31977 - RNA, 22 nt, Artificial Sequence
  Synthetic oligonucleotide: FAS-4861
ugcugacuuauuuccuacgucu

SEQ ID NO: 31978 - RNA, 23 nt, Artificial Sequence
  Synthetic oligonucleotide: FAS-4862
gugcugacuuauuuccuacgucu

SEQ ID NO: 31979 - RNA, 24 nt, Artificial Sequence
  Synthetic oligonucleotide: FAS-4863
ggugcugacuuauuuccuacgucu

SEQ ID NO: 31980 - RNA, 18 nt, Artificial Sequence
  Synthetic oligonucleotide: FAS-4864
cguggagcgcaguggucu

SEQ ID NO: 31981 - RNA, 19 nt, Artificial Sequence
  Synthetic oligonucleotide: FAS-4865
acguggagcgcaguggucu

SEQ ID NO: 31982 - RNA, 20 nt, Artificial Sequence
  Synthetic oligonucleotide: FAS-1712
aacguggagcgcaguggucu

SEQ ID NO: 31983 - RNA, 21 nt, Artificial Sequence
  Synthetic oligonucleotide: FAS-4866
caacguggagcgcaguggucu

SEQ ID NO: 31984 - RNA, 22 nt, Artificial Sequence
  Synthetic oligonucleotide: FAS-4867
ucaacguggagcgcaguggucu

SEQ ID NO: 31985 - RNA, 23 nt, Artificial Sequence
  Synthetic oligonucleotide: FAS-4868
cucaacguggagcgcaguggucu

SEQ ID NO: 31986 - RNA, 24 nt, Artificial Sequence
  Synthetic oligonucleotide: FAS-4869
ccucaacguggagcgcaguggucu

SEQ ID NO: 31987 - RNA, 18 nt, Artificial Sequence
  Synthetic oligonucleotide: FAS-4870
accuuuaguguguccagu

SEQ ID NO: 31988 - RNA, 19 nt, Artificial Sequence
  Synthetic oligonucleotide: FAS-4871
aaccuuuaguguguccagu

SEQ ID NO: 31989 - RNA, 20 nt, Artificial Sequence
  Synthetic oligonucleotide: FAS-1425
aaaccuuuaguguguccagu

SEQ ID NO: 31990 - RNA, 21 nt, Artificial Sequence
  Synthetic oligonucleotide: FAS-4872
gaaaccuuuaguguguccagu

SEQ ID NO: 31991 - RNA, 22 nt, Artificial Sequence
  Synthetic oligonucleotide: FAS-4873
ugaaaccuuuaguguguccagu

SEQ ID NO: 31992 - RNA, 23 nt, Artificial Sequence
  Synthetic oligonucleotide: FAS-4874
cugaaaccuuuaguguguccagu

SEQ ID NO: 31993 - RNA, 24 nt, Artificial Sequence
  Synthetic oligonucleotide: FAS-4875
acugaaaccuuuaguguguccagu

SEQ ID NO: 31994 - RNA, 18 nt, Artificial Sequence
  Synthetic oligonucleotide: FAS-4876
cugacuuauuuccuacgu

SEQ ID NO: 31995 - RNA, 19 nt, Artificial Sequence
  Synthetic oligonucleotide: FAS-4877
gcugacuuauuuccuacgu

SEQ ID NO: 31996 - RNA, 20 nt, Artificial Sequence
  Synthetic oligonucleotide: FAS-1695
ugcugacuuauuuccuacgu

SEQ ID NO: 31997 - RNA, 21 nt, Artificial Sequence
  Synthetic oligonucleotide: FAS-4878
gugcugacuuauuuccuacgu

SEQ ID NO: 31998 - RNA, 22 nt, Artificial Sequence
  Synthetic oligonucleotide: FAS-4879
ggugcugacuuauuuccuacgu

SEQ ID NO: 31999 - RNA, 23 nt, Artificial Sequence
  Synthetic oligonucleotide: FAS-4880
cggugcugacuuauuuccuacgu

SEQ ID NO: 32000 - RNA, 24 nt, Artificial Sequence
  Synthetic oligonucleotide: FAS-4881
ucggugcugacuuauuuccuacgu

SEQ ID NO: 32001 - RNA, 18 nt, Artificial Sequence
  Synthetic oligonucleotide: FAS-4882
accuuuggcuuggcuugu

SEQ ID NO: 32002 - RNA, 19 nt, Artificial Sequence
  Synthetic oligonucleotide: FAS-4883
gaccuuuggcuuggcuugu

SEQ ID NO: 32003 - RNA, 20 nt, Artificial Sequence
  Synthetic oligonucleotide: FAS-1705
ggaccuuuggcuuggcuugu

SEQ ID NO: 32004 - RNA, 21 nt, Artificial Sequence
  Synthetic oligonucleotide: FAS-4884
cggaccuuuggcuuggcuugu

SEQ ID NO: 32005 - RNA, 22 nt, Artificial Sequence
  Synthetic oligonucleotide: FAS-4885
gcggaccuuuggcuuggcuugu

SEQ ID NO: 32006 - RNA, 23 nt, Artificial Sequence
  Synthetic oligonucleotide: FAS-4886
agcggaccuuuggcuuggcuugu

SEQ ID NO: 32007 - RNA, 24 nt, Artificial Sequence
  Synthetic oligonucleotide: FAS-4887
gagcggaccuuuggcuuggcuugu

SEQ ID NO: 32008 - RNA, 18 nt, Artificial Sequence
  Synthetic oligonucleotide: FAS-4888
aauggguugaaucuaauu

SEQ ID NO: 32009 - RNA, 19 nt, Artificial Sequence
  Synthetic oligonucleotide: FAS-4889
uaauggguugaaucuaauu

SEQ ID NO: 32010 - RNA, 20 nt, Artificial Sequence
  Synthetic oligonucleotide: FAS-1799
uuaauggguugaaucuaauu

SEQ ID NO: 32011 - RNA, 21 nt, Artificial Sequence
  Synthetic oligonucleotide: FAS-4890
auuaauggguugaaucuaauu

SEQ ID NO: 32012 - RNA, 22 nt, Artificial Sequence
  Synthetic oligonucleotide: FAS-4891
uauuaauggguugaaucuaauu

SEQ ID NO: 32013 - RNA, 23 nt, Artificial Sequence
  Synthetic oligonucleotide: FAS-4892
uuauuaauggguugaaucuaauu

SEQ ID NO: 32014 - RNA, 24 nt, Artificial Sequence
  Synthetic oligonucleotide: FAS-4893
guuauuaauggguugaaucuaauu

SEQ ID NO: 32015 - RNA, 18 nt, Artificial Sequence
  Synthetic oligonucleotide: FAS-4894
agaaaaggugccguucuu

SEQ ID NO: 32016 - RNA, 19 nt, Artificial Sequence
  Synthetic oligonucleotide: FAS-4895
aagaaaaggugccguucuu

SEQ ID NO: 32017 - RNA, 20 nt, Artificial Sequence
  Synthetic oligonucleotide: FAS-1694
aaagaaaaggugccguucuu

SEQ ID NO: 32018 - RNA, 21 nt, Artificial Sequence
  Synthetic oligonucleotide: FAS-4896
gaaagaaaaggugccguucuu

SEQ ID NO: 32019 - RNA, 22 nt, Artificial Sequence
  Synthetic oligonucleotide: FAS-4897
agaaagaaaaggugccguucuu

SEQ ID NO: 32020 - RNA, 23 nt, Artificial Sequence
  Synthetic oligonucleotide: FAS-4898
gagaaagaaaaggugccguucuu

SEQ ID NO: 32021 - RNA, 24 nt, Artificial Sequence
  Synthetic oligonucleotide: FAS-4899
cgagaaagaaaaggugccguucuu

SEQ ID NO: 32022 - RNA, 18 nt, Artificial Sequence
  Synthetic oligonucleotide: FAS-4900
agcaaguccuccagcguu

SEQ ID NO: 32023 - RNA, 19 nt, Artificial Sequence
  Synthetic oligonucleotide: FAS-4901
aagcaaguccuccagcguu

SEQ ID NO: 32024 - RNA, 20 nt, Artificial Sequence
  Synthetic oligonucleotide: FAS-1720
aaagcaaguccuccagcguu

SEQ ID NO: 32025 - RNA, 21 nt, Artificial Sequence
  Synthetic oligonucleotide: FAS-4902
aaaagcaaguccuccagcguu

SEQ ID NO: 32026 - RNA, 22 nt, Artificial Sequence
  Synthetic oligonucleotide: FAS-4903
gaaaagcaaguccuccagcguu

SEQ ID NO: 32027 - RNA, 23 nt, Artificial Sequence
  Synthetic oligonucleotide: FAS-4904
agaaaagcaaguccuccagcguu

SEQ ID NO: 32028 - RNA, 24 nt, Artificial Sequence
  Synthetic oligonucleotide: FAS-4905
aagaaaagcaaguccuccagcguu

SEQ ID NO: 32029 - RNA, 18 nt, Artificial Sequence
  Synthetic oligonucleotide: FAS-4906
aaaugagcaauaucuguu

SEQ ID NO: 32030 - RNA, 19 nt, Artificial Sequence
  Synthetic oligonucleotide: FAS-4907
aaaaugagcaauaucuguu

SEQ ID NO: 32031 - RNA, 20 nt, Artificial Sequence
  Synthetic oligonucleotide: FAS-1699
gaaaaugagcaauaucuguu

SEQ ID NO: 32032 - RNA, 21 nt, Artificial Sequence
  Synthetic oligonucleotide: FAS-4908
agaaaaugagcaauaucuguu

SEQ ID NO: 32033 - RNA, 22 nt, Artificial Sequence
  Synthetic oligonucleotide: FAS-4909
cagaaaaugagcaauaucuguu

SEQ ID NO: 32034 - RNA, 23 nt, Artificial Sequence
  Synthetic oligonucleotide: FAS-4910
ccagaaaaugagcaauaucuguu

SEQ ID NO: 32035 - RNA, 24 nt, Artificial Sequence
  Synthetic oligonucleotide: FAS-4911
gccagaaaaugagcaauaucuguu

SEQ ID NO: 32036 - RNA, 18 nt, Artificial Sequence
  Synthetic oligonucleotide: FAS-4912
guaaccuaaccuagauuu

SEQ ID NO: 32037 - RNA, 19 nt, Artificial Sequence
  Synthetic oligonucleotide: FAS-4913
gguaaccuaaccuagauuu

SEQ ID NO: 32038 - RNA, 20 nt, Artificial Sequence
  Synthetic oligonucleotide: FAS-1396
ggguaaccuaaccuagauuu

SEQ ID NO: 32039 - RNA, 21 nt, Artificial Sequence
  Synthetic oligonucleotide: FAS-4914
aggguaaccuaaccuagauuu

SEQ ID NO: 32040 - RNA, 22 nt, Artificial Sequence
  Synthetic oligonucleotide: FAS-4915
gaggguaaccuaaccuagauuu

SEQ ID NO: 32041 - RNA, 23 nt, Artificial Sequence
  Synthetic oligonucleotide: FAS-4916
ggaggguaaccuaaccuagauuu

SEQ ID NO: 32042 - RNA, 24 nt, Artificial Sequence
  Synthetic oligonucleotide: FAS-4917
aggaggguaaccuaaccuagauuu

SEQ ID NO: 32043 - RNA, 18 nt, Artificial Sequence
  Synthetic oligonucleotide: FAS-4918
guggggugcggacaggaa

SEQ ID NO: 32044 - RNA, 19 nt, Artificial Sequence
  Synthetic oligonucleotide: FAS-4919
cguggggugcggacaggaa

SEQ ID NO: 32045 - RNA, 20 nt, Artificial Sequence
  Synthetic oligonucleotide: FAS-1555
gcguggggugcggacaggaa

SEQ ID NO: 32046 - RNA, 21 nt, Artificial Sequence
  Synthetic oligonucleotide: FAS-4920
ggcguggggugcggacaggaa

SEQ ID NO: 32047 - RNA, 22 nt, Artificial Sequence
  Synthetic oligonucleotide: FAS-4921
gggcguggggugcggacaggaa

SEQ ID NO: 32048 - RNA, 23 nt, Artificial Sequence
  Synthetic oligonucleotide: FAS-4922
ugggcguggggugcggacaggaa

SEQ ID NO: 32049 - RNA, 24 nt, Artificial Sequence
  Synthetic oligonucleotide: FAS-4923
gugggcguggggugcggacaggaa

SEQ ID NO: 32050 - RNA, 18 nt, Artificial Sequence
  Synthetic oligonucleotide: FAS-4924
gugcggacaggaauugaa

SEQ ID NO: 32051 - RNA, 19 nt, Artificial Sequence
  Synthetic oligonucleotide: FAS-4925
ggugcggacaggaauugaa

SEQ ID NO: 32052 - RNA, 20 nt, Artificial Sequence
  Synthetic oligonucleotide: FAS-1556
gggugcggacaggaauugaa

SEQ ID NO: 32053 - RNA, 21 nt, Artificial Sequence
  Synthetic oligonucleotide: FAS-4926
ggggugcggacaggaauugaa

SEQ ID NO: 32054 - RNA, 22 nt, Artificial Sequence
  Synthetic oligonucleotide: FAS-4927
uggggugcggacaggaauugaa

SEQ ID NO: 32055 - RNA, 23 nt, Artificial Sequence
  Synthetic oligonucleotide: FAS-4928
guggggugcggacaggaauugaa

SEQ ID NO: 32056 - RNA, 24 nt, Artificial Sequence
  Synthetic oligonucleotide: FAS-4929
cguggggugcggacaggaauugaa

SEQ ID NO: 32057 - RNA, 18 nt, Artificial Sequence
  Synthetic oligonucleotide: FAS-4930
guaggaaauaagucagca

SEQ ID NO: 32058 - RNA, 19 nt, Artificial Sequence
  Synthetic oligonucleotide: FAS-4931
cguaggaaauaagucagca

SEQ ID NO: 32059 - RNA, 20 nt, Artificial Sequence
  Synthetic oligonucleotide: FAS-1592
acguaggaaauaagucagca

SEQ ID NO: 32060 - RNA, 21 nt, Artificial Sequence
  Synthetic oligonucleotide: FAS-4932
gacguaggaaauaagucagca

SEQ ID NO: 32061 - RNA, 22 nt, Artificial Sequence
  Synthetic oligonucleotide: FAS-4933
agacguaggaaauaagucagca

SEQ ID NO: 32062 - RNA, 23 nt, Artificial Sequence
  Synthetic oligonucleotide: FAS-4934
cagacguaggaaauaagucagca

SEQ ID NO: 32063 - RNA, 24 nt, Artificial Sequence
  Synthetic oligonucleotide: FAS-4935
ucagacguaggaaauaagucagca

SEQ ID NO: 32064 - RNA, 18 nt, Artificial Sequence
  Synthetic oligonucleotide: FAS-4936
uuuggaugcaguuccaga

SEQ ID NO: 32065 - RNA, 19 nt, Artificial Sequence
  Synthetic oligonucleotide: FAS-4937
auuuggaugcaguuccaga

SEQ ID NO: 32066 - RNA, 20 nt, Artificial Sequence
  Synthetic oligonucleotide: FAS-1502
aauuuggaugcaguuccaga

SEQ ID NO: 32067 - RNA, 21 nt, Artificial Sequence
  Synthetic oligonucleotide: FAS-4938
gaauuuggaugcaguuccaga

SEQ ID NO: 32068 - RNA, 22 nt, Artificial Sequence
  Synthetic oligonucleotide: FAS-4939
ugaauuuggaugcaguuccaga

SEQ ID NO: 32069 - RNA, 23 nt, Artificial Sequence
  Synthetic oligonucleotide: FAS-4940
cugaauuuggaugcaguuccaga

SEQ ID NO: 32070 - RNA, 24 nt, Artificial Sequence
  Synthetic oligonucleotide: FAS-4941
ccugaauuuggaugcaguuccaga

SEQ ID NO: 32071 - RNA, 18 nt, Artificial Sequence
  Synthetic oligonucleotide: FAS-4942
ggggaccccgguuggaga

SEQ ID NO: 32072 - RNA, 19 nt, Artificial Sequence
  Synthetic oligonucleotide: FAS-4943
gggggaccccgguuggaga

SEQ ID NO: 32073 - RNA, 20 nt, Artificial Sequence
  Synthetic oligonucleotide: FAS-1572
agggggaccccgguuggaga

SEQ ID NO: 32074 - RNA, 21 nt, Artificial Sequence
  Synthetic oligonucleotide: FAS-4944
gagggggaccccgguuggaga

SEQ ID NO: 32075 - RNA, 22 nt, Artificial Sequence
  Synthetic oligonucleotide: FAS-4945
ggagggggaccccgguuggaga

SEQ ID NO: 32076 - RNA, 23 nt, Artificial Sequence
  Synthetic oligonucleotide: FAS-4946
uggagggggaccccgguuggaga

SEQ ID NO: 32077 - RNA, 24 nt, Artificial Sequence
  Synthetic oligonucleotide: FAS-4947
cuggagggggaccccgguuggaga

SEQ ID NO: 32078 - RNA, 18 nt, Artificial Sequence
  Synthetic oligonucleotide: FAS-4948
ccccgguuggagagagga

SEQ ID NO: 32079 - RNA, 19 nt, Artificial Sequence
  Synthetic oligonucleotide: FAS-4949
accccgguuggagagagga

SEQ ID NO: 32080 - RNA, 20 nt, Artificial Sequence
  Synthetic oligonucleotide: FAS-1574
gaccccgguuggagagagga

SEQ ID NO: 32081 - RNA, 21 nt, Artificial Sequence
  Synthetic oligonucleotide: FAS-4950
ggaccccgguuggagagagga

SEQ ID NO: 32082 - RNA, 22 nt, Artificial Sequence
  Synthetic oligonucleotide: FAS-4951
gggaccccgguuggagagagga

SEQ ID NO: 32083 - RNA, 23 nt, Artificial Sequence
  Synthetic oligonucleotide: FAS-4952
ggggaccccgguuggagagagga

SEQ ID NO: 32084 - RNA, 24 nt, Artificial Sequence
  Synthetic oligonucleotide: FAS-4953
gggggaccccgguuggagagagga

SEQ ID NO: 32085 - RNA, 18 nt, Artificial Sequence
  Synthetic oligonucleotide: FAS-4954
gugggcguggggugcgga

SEQ ID NO: 32086 - RNA, 19 nt, Artificial Sequence
  Synthetic oligonucleotide: FAS-4955
ggugggcguggggugcgga

SEQ ID NO: 32087 - RNA, 20 nt, Artificial Sequence
  Synthetic oligonucleotide: FAS-1553
aggugggcguggggugcgga

SEQ ID NO: 32088 - RNA, 21 nt, Artificial Sequence
  Synthetic oligonucleotide: FAS-4956
gaggugggcguggggugcgga

SEQ ID NO: 32089 - RNA, 22 nt, Artificial Sequence
  Synthetic oligonucleotide: FAS-4957
ugaggugggcguggggugcgga

SEQ ID NO: 32090 - RNA, 23 nt, Artificial Sequence
  Synthetic oligonucleotide: FAS-4958
uugaggugggcguggggugcgga

SEQ ID NO: 32091 - RNA, 24 nt, Artificial Sequence
  Synthetic oligonucleotide: FAS-4959
guugaggugggcguggggugcgga

SEQ ID NO: 32092 - RNA, 18 nt, Artificial Sequence
  Synthetic oligonucleotide: FAS-4960
gccccgcgggggcgggga

SEQ ID NO: 32093 - RNA, 19 nt, Artificial Sequence
  Synthetic oligonucleotide: FAS-4961
cgccccgcgggggcgggga

SEQ ID NO: 32094 - RNA, 20 nt, Artificial Sequence
  Synthetic oligonucleotide: FAS-1588
ccgccccgcgggggcgggga

SEQ ID NO: 32095 - RNA, 21 nt, Artificial Sequence
  Synthetic oligonucleotide: FAS-4962
gccgccccgcgggggcgggga

SEQ ID NO: 32096 - RNA, 22 nt, Artificial Sequence
  Synthetic oligonucleotide: FAS-4963
cgccgccccgcgggggcgggga

SEQ ID NO: 32097 - RNA, 23 nt, Artificial Sequence
  Synthetic oligonucleotide: FAS-4964
gcgccgccccgcgggggcgggga

SEQ ID NO: 32098 - RNA, 24 nt, Artificial Sequence
  Synthetic oligonucleotide: FAS-4965
cgcgccgccccgcgggggcgggga

SEQ ID NO: 32099 - RNA, 18 nt, Artificial Sequence
  Synthetic oligonucleotide: FAS-4966
agcuuuagggucgcugga

SEQ ID NO: 32100 - RNA, 19 nt, Artificial Sequence
  Synthetic oligonucleotide: FAS-4967
aagcuuuagggucgcugga

SEQ ID NO: 32101 - RNA, 20 nt, Artificial Sequence
  Synthetic oligonucleotide: FAS-1934
gaagcuuuagggucgcugga

SEQ ID NO: 32102 - RNA, 21 nt, Artificial Sequence
  Synthetic oligonucleotide: FAS-4968
ggaagcuuuagggucgcugga

SEQ ID NO: 32103 - RNA, 22 nt, Artificial Sequence
  Synthetic oligonucleotide: FAS-4969
gggaagcuuuagggucgcugga

SEQ ID NO: 32104 - RNA, 23 nt, Artificial Sequence
  Synthetic oligonucleotide: FAS-4970
ugggaagcuuuagggucgcugga

SEQ ID NO: 32105 - RNA, 24 nt, Artificial Sequence
  Synthetic oligonucleotide: FAS-4971
cugggaagcuuuagggucgcugga

SEQ ID NO: 32106 - RNA, 18 nt, Artificial Sequence
  Synthetic oligonucleotide: FAS-4972
agggggaccccgguugga

SEQ ID NO: 32107 - RNA, 19 nt, Artificial Sequence
  Synthetic oligonucleotide: FAS-4973
gagggggaccccgguugga

SEQ ID NO: 32108 - RNA, 20 nt, Artificial Sequence
  Synthetic oligonucleotide: FAS-1571
ggagggggaccccgguugga

SEQ ID NO: 32109 - RNA, 21 nt, Artificial Sequence
  Synthetic oligonucleotide: FAS-4974
uggagggggaccccgguugga

SEQ ID NO: 32110 - RNA, 22 nt, Artificial Sequence
  Synthetic oligonucleotide: FAS-4975
cuggagggggaccccgguugga

SEQ ID NO: 32111 - RNA, 23 nt, Artificial Sequence
  Synthetic oligonucleotide: FAS-4976
gcuggagggggaccccgguugga

SEQ ID NO: 32112 - RNA, 24 nt, Artificial Sequence
  Synthetic oligonucleotide: FAS-4977
cgcuggagggggaccccgguugga

SEQ ID NO: 32113 - RNA, 18 nt, Artificial Sequence
  Synthetic oligonucleotide: FAS-4978
uuucucgaaaaaguuaua

SEQ ID NO: 32114 - RNA, 19 nt, Artificial Sequence
  Synthetic oligonucleotide: FAS-4979
cuuucucgaaaaaguuaua

SEQ ID NO: 32115 - RNA, 20 nt, Artificial Sequence
  Synthetic oligonucleotide: FAS-1963
ucuuucucgaaaaaguuaua

SEQ ID NO: 32116 - RNA, 21 nt, Artificial Sequence
  Synthetic oligonucleotide: FAS-4980
uucuuucucgaaaaaguuaua

SEQ ID NO: 32117 - RNA, 22 nt, Artificial Sequence
  Synthetic oligonucleotide: FAS-4981
uuucuuucucgaaaaaguuaua

SEQ ID NO: 32118 - RNA, 23 nt, Artificial Sequence
  Synthetic oligonucleotide: FAS-4982
uuuucuuucucgaaaaaguuaua

SEQ ID NO: 32119 - RNA, 24 nt, Artificial Sequence
  Synthetic oligonucleotide: FAS-4983
cuuuucuuucucgaaaaaguuaua

SEQ ID NO: 32120 - RNA, 18 nt, Artificial Sequence
  Synthetic oligonucleotide: FAS-4984
uggauaaugacaucauua

SEQ ID NO: 32121 - RNA, 19 nt, Artificial Sequence
  Synthetic oligonucleotide: FAS-4985
uuggauaaugacaucauua

SEQ ID NO: 32122 - RNA, 20 nt, Artificial Sequence
  Synthetic oligonucleotide: FAS-1499
uuuggauaaugacaucauua

SEQ ID NO: 32123 - RNA, 21 nt, Artificial Sequence
  Synthetic oligonucleotide: FAS-4986
guuuggauaaugacaucauua

SEQ ID NO: 32124 - RNA, 22 nt, Artificial Sequence
  Synthetic oligonucleotide: FAS-4987
uguuuggauaaugacaucauua

SEQ ID NO: 32125 - RNA, 23 nt, Artificial Sequence
  Synthetic oligonucleotide: FAS-4988
auguuuggauaaugacaucauua

SEQ ID NO: 32126 - RNA, 24 nt, Artificial Sequence
  Synthetic oligonucleotide: FAS-4989
uauguuuggauaaugacaucauua

SEQ ID NO: 32127 - RNA, 18 nt, Artificial Sequence
  Synthetic oligonucleotide: FAS-4990
aguuuagcaugaauuuua

SEQ ID NO: 32128 - RNA, 19 nt, Artificial Sequence
  Synthetic oligonucleotide: FAS-4991
uaguuuagcaugaauuuua

SEQ ID NO: 32129 - RNA, 20 nt, Artificial Sequence
  Synthetic oligonucleotide: FAS-1497
guaguuuagcaugaauuuua

SEQ ID NO: 32130 - RNA, 21 nt, Artificial Sequence
  Synthetic oligonucleotide: FAS-4992
gguaguuuagcaugaauuuua

SEQ ID NO: 32131 - RNA, 22 nt, Artificial Sequence
  Synthetic oligonucleotide: FAS-4993
agguaguuuagcaugaauuuua

SEQ ID NO: 32132 - RNA, 23 nt, Artificial Sequence
  Synthetic oligonucleotide: FAS-4994
uagguaguuuagcaugaauuuua

SEQ ID NO: 32133 - RNA, 24 nt, Artificial Sequence
  Synthetic oligonucleotide: FAS-4995
uuagguaguuuagcaugaauuuua

SEQ ID NO: 32134 - RNA, 18 nt, Artificial Sequence
  Synthetic oligonucleotide: FAS-4996
gugagugcgcgccgcccc

SEQ ID NO: 32135 - RNA, 19 nt, Artificial Sequence
  Synthetic oligonucleotide: FAS-4997
ggugagugcgcgccgcccc

SEQ ID NO: 32136 - RNA, 20 nt, Artificial Sequence
  Synthetic oligonucleotide: FAS-1580
gggugagugcgcgccgcccc

SEQ ID NO: 32137 - RNA, 21 nt, Artificial Sequence
  Synthetic oligonucleotide: FAS-4998
ugggugagugcgcgccgcccc

SEQ ID NO: 32138 - RNA, 22 nt, Artificial Sequence
  Synthetic oligonucleotide: FAS-4999
gugggugagugcgcgccgcccc

SEQ ID NO: 32139 - RNA, 23 nt, Artificial Sequence
  Synthetic oligonucleotide: FAS-5000
ggugggugagugcgcgccgcccc

SEQ ID NO: 32140 - RNA, 24 nt, Artificial Sequence
  Synthetic oligonucleotide: FAS-5001
gggugggugagugcgcgccgcccc

SEQ ID NO: 32141 - RNA, 18 nt, Artificial Sequence
  Synthetic oligonucleotide: FAS-5002
cguuggagacuggcuccc

SEQ ID NO: 32142 - RNA, 19 nt, Artificial Sequence
  Synthetic oligonucleotide: FAS-5003
gcguuggagacuggcuccc

SEQ ID NO: 32143 - RNA, 20 nt, Artificial Sequence
  Synthetic oligonucleotide: FAS-1900
ggcguuggagacuggcuccc

SEQ ID NO: 32144 - RNA, 21 nt, Artificial Sequence
  Synthetic oligonucleotide: FAS-5004
aggcguuggagacuggcuccc

SEQ ID NO: 32145 - RNA, 22 nt, Artificial Sequence
  Synthetic oligonucleotide: FAS-5005
gaggcguuggagacuggcuccc

SEQ ID NO: 32146 - RNA, 23 nt, Artificial Sequence
  Synthetic oligonucleotide: FAS-5006
ggaggcguuggagacuggcuccc

SEQ ID NO: 32147 - RNA, 24 nt, Artificial Sequence
  Synthetic oligonucleotide: FAS-5007
gggaggcguuggagacuggcuccc

SEQ ID NO: 32148 - RNA, 18 nt, Artificial Sequence
  Synthetic oligonucleotide: FAS-5008
gggcagcuccggcgcucc

SEQ ID NO: 32149 - RNA, 19 nt, Artificial Sequence
  Synthetic oligonucleotide: FAS-5009
ggggcagcuccggcgcucc

SEQ ID NO: 32150 - RNA, 20 nt, Artificial Sequence
  Synthetic oligonucleotide: FAS-1546
cggggcagcuccggcgcucc

SEQ ID NO: 32151 - RNA, 21 nt, Artificial Sequence
  Synthetic oligonucleotide: FAS-5010
gcggggcagcuccggcgcucc

SEQ ID NO: 32152 - RNA, 22 nt, Artificial Sequence
  Synthetic oligonucleotide: FAS-5011
ggcggggcagcuccggcgcucc

SEQ ID NO: 32153 - RNA, 23 nt, Artificial Sequence
  Synthetic oligonucleotide: FAS-5012
aggcggggcagcuccggcgcucc

SEQ ID NO: 32154 - RNA, 24 nt, Artificial Sequence
  Synthetic oligonucleotide: FAS-5013
caggcggggcagcuccggcgcucc

SEQ ID NO: 32155 - RNA, 18 nt, Artificial Sequence
  Synthetic oligonucleotide: FAS-5014
gcguuggagacuggcucc

SEQ ID NO: 32156 - RNA, 19 nt, Artificial Sequence
  Synthetic oligonucleotide: FAS-5015
ggcguuggagacuggcucc

SEQ ID NO: 32157 - RNA, 20 nt, Artificial Sequence
  Synthetic oligonucleotide: FAS-1899
aggcguuggagacuggcucc

SEQ ID NO: 32158 - RNA, 21 nt, Artificial Sequence
  Synthetic oligonucleotide: FAS-5016
gaggcguuggagacuggcucc

SEQ ID NO: 32159 - RNA, 22 nt, Artificial Sequence
  Synthetic oligonucleotide: FAS-5017
ggaggcguuggagacuggcucc

SEQ ID NO: 32160 - RNA, 23 nt, Artificial Sequence
  Synthetic oligonucleotide: FAS-5018
gggaggcguuggagacuggcucc

SEQ ID NO: 32161 - RNA, 24 nt, Artificial Sequence
  Synthetic oligonucleotide: FAS-5019
cgggaggcguuggagacuggcucc

SEQ ID NO: 32162 - RNA, 18 nt, Artificial Sequence
  Synthetic oligonucleotide: FAS-5020
ccgaagcagugguuaagc

SEQ ID NO: 32163 - RNA, 19 nt, Artificial Sequence
  Synthetic oligonucleotide: FAS-5021
accgaagcagugguuaagc

SEQ ID NO: 32164 - RNA, 20 nt, Artificial Sequence
  Synthetic oligonucleotide: FAS-1958
caccgaagcagugguuaagc

SEQ ID NO: 32165 - RNA, 21 nt, Artificial Sequence
  Synthetic oligonucleotide: FAS-5022
gcaccgaagcagugguuaagc

SEQ ID NO: 32166 - RNA, 22 nt, Artificial Sequence
  Synthetic oligonucleotide: FAS-5023
agcaccgaagcagugguuaagc

SEQ ID NO: 32167 - RNA, 23 nt, Artificial Sequence
  Synthetic oligonucleotide: FAS-5024
cagcaccgaagcagugguuaagc

SEQ ID NO: 32168 - RNA, 24 nt, Artificial Sequence
  Synthetic oligonucleotide: FAS-5025
ucagcaccgaagcagugguuaagc

SEQ ID NO: 32169 - RNA, 18 nt, Artificial Sequence
  Synthetic oligonucleotide: FAS-5026
cccgggugcucagaacgc

SEQ ID NO: 32170 - RNA, 19 nt, Artificial Sequence
  Synthetic oligonucleotide: FAS-5027
gcccgggugcucagaacgc

SEQ ID NO: 32171 - RNA, 20 nt, Artificial Sequence
  Synthetic oligonucleotide: FAS-1907
ggcccgggugcucagaacgc

SEQ ID NO: 32172 - RNA, 21 nt, Artificial Sequence
  Synthetic oligonucleotide: FAS-5028
aggcccgggugcucagaacgc

SEQ ID NO: 32173 - RNA, 22 nt, Artificial Sequence
  Synthetic oligonucleotide: FAS-5029
caggcccgggugcucagaacgc

SEQ ID NO: 32174 - RNA, 23 nt, Artificial Sequence
  Synthetic oligonucleotide: FAS-5030
ucaggcccgggugcucagaacgc

SEQ ID NO: 32175 - RNA, 24 nt, Artificial Sequence
  Synthetic oligonucleotide: FAS-5031
cucaggcccgggugcucagaacgc

SEQ ID NO: 32176 - RNA, 18 nt, Artificial Sequence
  Synthetic oligonucleotide: FAS-5032
gagugcgcgccgccccgc

SEQ ID NO: 32177 - RNA, 19 nt, Artificial Sequence
  Synthetic oligonucleotide: FAS-5033
ugagugcgcgccgccccgc

SEQ ID NO: 32178 - RNA, 20 nt, Artificial Sequence
  Synthetic oligonucleotide: FAS-1949
gugagugcgcgccgccccgc

SEQ ID NO: 32179 - RNA, 21 nt, Artificial Sequence
  Synthetic oligonucleotide: FAS-5034
ggugagugcgcgccgccccgc

SEQ ID NO: 32180 - RNA, 22 nt, Artificial Sequence
  Synthetic oligonucleotide: FAS-5035
gggugagugcgcgccgccccgc

SEQ ID NO: 32181 - RNA, 23 nt, Artificial Sequence
  Synthetic oligonucleotide: FAS-5036
ugggugagugcgcgccgccccgc

SEQ ID NO: 32182 - RNA, 24 nt, Artificial Sequence
  Synthetic oligonucleotide: FAS-5037
gugggugagugcgcgccgccccgc

SEQ ID NO: 32183 - RNA, 18 nt, Artificial Sequence
  Synthetic oligonucleotide: FAS-5038
gggaagcuuuagggucgc

SEQ ID NO: 32184 - RNA, 19 nt, Artificial Sequence
  Synthetic oligonucleotide: FAS-5039
ugggaagcuuuagggucgc

SEQ ID NO: 32185 - RNA, 20 nt, Artificial Sequence
  Synthetic oligonucleotide: FAS-1932
cugggaagcuuuagggucgc

SEQ ID NO: 32186 - RNA, 21 nt, Artificial Sequence
  Synthetic oligonucleotide: FAS-5040
ucugggaagcuuuagggucgc

SEQ ID NO: 32187 - RNA, 22 nt, Artificial Sequence
  Synthetic oligonucleotide: FAS-5041
gucugggaagcuuuagggucgc

SEQ ID NO: 32188 - RNA, 23 nt, Artificial Sequence
  Synthetic oligonucleotide: FAS-5042
agucugggaagcuuuagggucgc

SEQ ID NO: 32189 - RNA, 24 nt, Artificial Sequence
  Synthetic oligonucleotide: FAS-5043
aagucugggaagcuuuagggucgc

SEQ ID NO: 32190 - RNA, 18 nt, Artificial Sequence
  Synthetic oligonucleotide: FAS-5044
gugguuaagccggagggc

SEQ ID NO: 32191 - RNA, 19 nt, Artificial Sequence
  Synthetic oligonucleotide: FAS-5045
agugguuaagccggagggc

SEQ ID NO: 32192 - RNA, 20 nt, Artificial Sequence
  Synthetic oligonucleotide: FAS-1596
cagugguuaagccggagggc

SEQ ID NO: 32193 - RNA, 21 nt, Artificial Sequence
  Synthetic oligonucleotide: FAS-5046
gcagugguuaagccggagggc

SEQ ID NO: 32194 - RNA, 22 nt, Artificial Sequence
  Synthetic oligonucleotide: FAS-5047
agcagugguuaagccggagggc

SEQ ID NO: 32195 - RNA, 23 nt, Artificial Sequence
  Synthetic oligonucleotide: FAS-5048
aagcagugguuaagccggagggc

SEQ ID NO: 32196 - RNA, 24 nt, Artificial Sequence
  Synthetic oligonucleotide: FAS-5049
gaagcagugguuaagccggagggc

SEQ ID NO: 32197 - RNA, 18 nt, Artificial Sequence
  Synthetic oligonucleotide: FAS-5050
gcgccgccccgcgggggc

SEQ ID NO: 32198 - RNA, 19 nt, Artificial Sequence
  Synthetic oligonucleotide: FAS-5051
cgcgccgccccgcgggggc

SEQ ID NO: 32199 - RNA, 20 nt, Artificial Sequence
  Synthetic oligonucleotide: FAS-1953
gcgcgccgccccgcgggggc

SEQ ID NO: 32200 - RNA, 21 nt, Artificial Sequence
  Synthetic oligonucleotide: FAS-5052
ugcgcgccgccccgcgggggc

SEQ ID NO: 32201 - RNA, 22 nt, Artificial Sequence
  Synthetic oligonucleotide: FAS-5053
gugcgcgccgccccgcgggggc

SEQ ID NO: 32202 - RNA, 23 nt, Artificial Sequence
  Synthetic oligonucleotide: FAS-5054
agugcgcgccgccccgcgggggc

SEQ ID NO: 32203 - RNA, 24 nt, Artificial Sequence
  Synthetic oligonucleotide: FAS-5055
gagugcgcgccgccccgcgggggc

SEQ ID NO: 32204 - RNA, 18 nt, Artificial Sequence
  Synthetic oligonucleotide: FAS-5056
cuccacguugaggugggc

SEQ ID NO: 32205 - RNA, 19 nt, Artificial Sequence
  Synthetic oligonucleotide: FAS-5057
gcuccacguugaggugggc

SEQ ID NO: 32206 - RNA, 20 nt, Artificial Sequence
  Synthetic oligonucleotide: FAS-1550
cgcuccacguugaggugggc

SEQ ID NO: 32207 - RNA, 21 nt, Artificial Sequence
  Synthetic oligonucleotide: FAS-5058
gcgcuccacguugaggugggc

SEQ ID NO: 32208 - RNA, 22 nt, Artificial Sequence
  Synthetic oligonucleotide: FAS-5059
ugcgcuccacguugaggugggc

SEQ ID NO: 32209 - RNA, 23 nt, Artificial Sequence
  Synthetic oligonucleotide: FAS-5060
cugcgcuccacguugaggugggc

SEQ ID NO: 32210 - RNA, 24 nt, Artificial Sequence
  Synthetic oligonucleotide: FAS-5061
acugcgcuccacguugaggugggc

SEQ ID NO: 32211 - RNA, 18 nt, Artificial Sequence
  Synthetic oligonucleotide: FAS-5062
gagagaggagcggaacuc

SEQ ID NO: 32212 - RNA, 19 nt, Artificial Sequence
  Synthetic oligonucleotide: FAS-5063
ggagagaggagcggaacuc

SEQ ID NO: 32213 - RNA, 20 nt, Artificial Sequence
  Synthetic oligonucleotide: FAS-1576
uggagagaggagcggaacuc

SEQ ID NO: 32214 - RNA, 21 nt, Artificial Sequence
  Synthetic oligonucleotide: FAS-5064
uuggagagaggagcggaacuc

SEQ ID NO: 32215 - RNA, 22 nt, Artificial Sequence
  Synthetic oligonucleotide: FAS-5065
guuggagagaggagcggaacuc

SEQ ID NO: 32216 - RNA, 23 nt, Artificial Sequence
  Synthetic oligonucleotide: FAS-5066
gguuggagagaggagcggaacuc

SEQ ID NO: 32217 - RNA, 24 nt, Artificial Sequence
  Synthetic oligonucleotide: FAS-5067
cgguuggagagaggagcggaacuc

SEQ ID NO: 32218 - RNA, 18 nt, Artificial Sequence
  Synthetic oligonucleotide: FAS-5068
cuagguuagguuacccuc

SEQ ID NO: 32219 - RNA, 19 nt, Artificial Sequence
  Synthetic oligonucleotide: FAS-5069
ucuagguuagguuacccuc

SEQ ID NO: 32220 - RNA, 20 nt, Artificial Sequence
  Synthetic oligonucleotide: FAS-1506
aucuagguuagguuacccuc

SEQ ID NO: 32221 - RNA, 21 nt, Artificial Sequence
  Synthetic oligonucleotide: FAS-5070
aaucuagguuagguuacccuc

SEQ ID NO: 32222 - RNA, 22 nt, Artificial Sequence
  Synthetic oligonucleotide: FAS-5071
aaaucuagguuagguuacccuc

SEQ ID NO: 32223 - RNA, 23 nt, Artificial Sequence
  Synthetic oligonucleotide: FAS-5072
caaaucuagguuagguuacccuc

SEQ ID NO: 32224 - RNA, 24 nt, Artificial Sequence
  Synthetic oligonucleotide: FAS-5073
ucaaaucuagguuagguuacccuc

SEQ ID NO: 32225 - RNA, 18 nt, Artificial Sequence
  Synthetic oligonucleotide: FAS-5074
ggcguuggagacuggcuc

SEQ ID NO: 32226 - RNA, 19 nt, Artificial Sequence
  Synthetic oligonucleotide: FAS-5075
aggcguuggagacuggcuc

SEQ ID NO: 32227 - RNA, 20 nt, Artificial Sequence
  Synthetic oligonucleotide: FAS-1532
gaggcguuggagacuggcuc

SEQ ID NO: 32228 - RNA, 21 nt, Artificial Sequence
  Synthetic oligonucleotide: FAS-5076
ggaggcguuggagacuggcuc

SEQ ID NO: 32229 - RNA, 22 nt, Artificial Sequence
  Synthetic oligonucleotide: FAS-5077
gggaggcguuggagacuggcuc

SEQ ID NO: 32230 - RNA, 23 nt, Artificial Sequence
  Synthetic oligonucleotide: FAS-5078
cgggaggcguuggagacuggcuc

SEQ ID NO: 32231 - RNA, 24 nt, Artificial Sequence
  Synthetic oligonucleotide: FAS-5079
gcgggaggcguuggagacuggcuc

SEQ ID NO: 32232 - RNA, 18 nt, Artificial Sequence
  Synthetic oligonucleotide: FAS-5080
ggaauugaagcggaaguc

SEQ ID NO: 32233 - RNA, 19 nt, Artificial Sequence
  Synthetic oligonucleotide: FAS-5081
aggaauugaagcggaaguc

SEQ ID NO: 32234 - RNA, 20 nt, Artificial Sequence
  Synthetic oligonucleotide: FAS-1928
caggaauugaagcggaaguc

SEQ ID NO: 32235 - RNA, 21 nt, Artificial Sequence
  Synthetic oligonucleotide: FAS-5082
acaggaauugaagcggaaguc

SEQ ID NO: 32236 - RNA, 22 nt, Artificial Sequence
  Synthetic oligonucleotide: FAS-5083
gacaggaauugaagcggaaguc

SEQ ID NO: 32237 - RNA, 23 nt, Artificial Sequence
  Synthetic oligonucleotide: FAS-5084
ggacaggaauugaagcggaaguc

SEQ ID NO: 32238 - RNA, 24 nt, Artificial Sequence
  Synthetic oligonucleotide: FAS-5085
cggacaggaauugaagcggaaguc

SEQ ID NO: 32239 - RNA, 18 nt, Artificial Sequence
  Synthetic oligonucleotide: FAS-5086
ucaguugacauuuucuuc

SEQ ID NO: 32240 - RNA, 19 nt, Artificial Sequence
  Synthetic oligonucleotide: FAS-5087
cucaguugacauuuucuuc

SEQ ID NO: 32241 - RNA, 20 nt, Artificial Sequence
  Synthetic oligonucleotide: FAS-1859
ucucaguugacauuuucuuc

SEQ ID NO: 32242 - RNA, 21 nt, Artificial Sequence
  Synthetic oligonucleotide: FAS-5088
cucucaguugacauuuucuuc

SEQ ID NO: 32243 - RNA, 22 nt, Artificial Sequence
  Synthetic oligonucleotide: FAS-5089
ccucucaguugacauuuucuuc

SEQ ID NO: 32244 - RNA, 23 nt, Artificial Sequence
  Synthetic oligonucleotide: FAS-5090
uccucucaguugacauuuucuuc

SEQ ID NO: 32245 - RNA, 24 nt, Artificial Sequence
  Synthetic oligonucleotide: FAS-5091
uuccucucaguugacauuuucuuc

SEQ ID NO: 32246 - RNA, 18 nt, Artificial Sequence
  Synthetic oligonucleotide: FAS-5092
aacggcaccuuuucuuuc

SEQ ID NO: 32247 - RNA, 19 nt, Artificial Sequence
  Synthetic oligonucleotide: FAS-5093
gaacggcaccuuuucuuuc

SEQ ID NO: 32248 - RNA, 20 nt, Artificial Sequence
  Synthetic oligonucleotide: FAS-1599
agaacggcaccuuuucuuuc

SEQ ID NO: 32249 - RNA, 21 nt, Artificial Sequence
  Synthetic oligonucleotide: FAS-5094
aagaacggcaccuuuucuuuc

SEQ ID NO: 32250 - RNA, 22 nt, Artificial Sequence
  Synthetic oligonucleotide: FAS-5095
gaagaacggcaccuuuucuuuc

SEQ ID NO: 32251 - RNA, 23 nt, Artificial Sequence
  Synthetic oligonucleotide: FAS-5096
ggaagaacggcaccuuuucuuuc

SEQ ID NO: 32252 - RNA, 24 nt, Artificial Sequence
  Synthetic oligonucleotide: FAS-5097
cggaagaacggcaccuuuucuuuc

SEQ ID NO: 32253 - RNA, 18 nt, Artificial Sequence
  Synthetic oligonucleotide: FAS-5098
cuggaggacuugcuuuuc

SEQ ID NO: 32254 - RNA, 19 nt, Artificial Sequence
  Synthetic oligonucleotide: FAS-5099
gcuggaggacuugcuuuuc

SEQ ID NO: 32255 - RNA, 20 nt, Artificial Sequence
  Synthetic oligonucleotide: FAS-1541
cgcuggaggacuugcuuuuc

SEQ ID NO: 32256 - RNA, 21 nt, Artificial Sequence
  Synthetic oligonucleotide: FAS-5100
acgcuggaggacuugcuuuuc

SEQ ID NO: 32257 - RNA, 22 nt, Artificial Sequence
  Synthetic oligonucleotide: FAS-5101
aacgcuggaggacuugcuuuuc

SEQ ID NO: 32258 - RNA, 23 nt, Artificial Sequence
  Synthetic oligonucleotide: FAS-5102
gaacgcuggaggacuugcuuuuc

SEQ ID NO: 32259 - RNA, 24 nt, Artificial Sequence
  Synthetic oligonucleotide: FAS-5103
agaacgcuggaggacuugcuuuuc

SEQ ID NO: 32260 - RNA, 18 nt, Artificial Sequence
  Synthetic oligonucleotide: FAS-5104
ugcggacaggaauugaag

SEQ ID NO: 32261 - RNA, 19 nt, Artificial Sequence
  Synthetic oligonucleotide: FAS-5105
gugcggacaggaauugaag

SEQ ID NO: 32262 - RNA, 20 nt, Artificial Sequence
  Synthetic oligonucleotide: FAS-1927
ggugcggacaggaauugaag

SEQ ID NO: 32263 - RNA, 21 nt, Artificial Sequence
  Synthetic oligonucleotide: FAS-5106
gggugcggacaggaauugaag

SEQ ID NO: 32264 - RNA, 22 nt, Artificial Sequence
  Synthetic oligonucleotide: FAS-5107
ggggugcggacaggaauugaag

SEQ ID NO: 32265 - RNA, 23 nt, Artificial Sequence
  Synthetic oligonucleotide: FAS-5108
uggggugcggacaggaauugaag

SEQ ID NO: 32266 - RNA, 24 nt, Artificial Sequence
  Synthetic oligonucleotide: FAS-5109
guggggugcggacaggaauugaag

SEQ ID NO: 32267 - RNA, 18 nt, Artificial Sequence
  Synthetic oligonucleotide: FAS-5110
accgaagcagugguuaag

SEQ ID NO: 32268 - RNA, 19 nt, Artificial Sequence
  Synthetic oligonucleotide: FAS-5111
caccgaagcagugguuaag

SEQ ID NO: 32269 - RNA, 20 nt, Artificial Sequence
  Synthetic oligonucleotide: FAS-1593
gcaccgaagcagugguuaag

SEQ ID NO: 32270 - RNA, 21 nt, Artificial Sequence
  Synthetic oligonucleotide: FAS-5112
agcaccgaagcagugguuaag

SEQ ID NO: 32271 - RNA, 22 nt, Artificial Sequence
  Synthetic oligonucleotide: FAS-5113
cagcaccgaagcagugguuaag

SEQ ID NO: 32272 - RNA, 23 nt, Artificial Sequence
  Synthetic oligonucleotide: FAS-5114
ucagcaccgaagcagugguuaag

SEQ ID NO: 32273 - RNA, 24 nt, Artificial Sequence
  Synthetic oligonucleotide: FAS-5115
gucagcaccgaagcagugguuaag

SEQ ID NO: 32274 - RNA, 18 nt, Artificial Sequence
  Synthetic oligonucleotide: FAS-5116
gcugaccccgcugggcag

SEQ ID NO: 32275 - RNA, 19 nt, Artificial Sequence
  Synthetic oligonucleotide: FAS-5117
ugcugaccccgcugggcag

SEQ ID NO: 32276 - RNA, 20 nt, Artificial Sequence
  Synthetic oligonucleotide: FAS-1544
gugcugaccccgcugggcag

SEQ ID NO: 32277 - RNA, 21 nt, Artificial Sequence
  Synthetic oligonucleotide: FAS-5118
agugcugaccccgcugggcag

SEQ ID NO: 32278 - RNA, 22 nt, Artificial Sequence
  Synthetic oligonucleotide: FAS-5119
aagugcugaccccgcugggcag

SEQ ID NO: 32279 - RNA, 23 nt, Artificial Sequence
  Synthetic oligonucleotide: FAS-5120
gaagugcugaccccgcugggcag

SEQ ID NO: 32280 - RNA, 24 nt, Artificial Sequence
  Synthetic oligonucleotide: FAS-5121
cgaagugcugaccccgcugggcag

SEQ ID NO: 32281 - RNA, 18 nt, Artificial Sequence
  Synthetic oligonucleotide: FAS-5122
gggaccccgguuggagag

SEQ ID NO: 32282 - RNA, 19 nt, Artificial Sequence
  Synthetic oligonucleotide: FAS-5123
ggggaccccgguuggagag

SEQ ID NO: 32283 - RNA, 20 nt, Artificial Sequence
  Synthetic oligonucleotide: FAS-1939
gggggaccccgguuggagag

SEQ ID NO: 32284 - RNA, 21 nt, Artificial Sequence
  Synthetic oligonucleotide: FAS-5124
agggggaccccgguuggagag

SEQ ID NO: 32285 - RNA, 22 nt, Artificial Sequence
  Synthetic oligonucleotide: FAS-5125
gagggggaccccgguuggagag

SEQ ID NO: 32286 - RNA, 23 nt, Artificial Sequence
  Synthetic oligonucleotide: FAS-5126
ggagggggaccccgguuggagag

SEQ ID NO: 32287 - RNA, 24 nt, Artificial Sequence
  Synthetic oligonucleotide: FAS-5127
uggagggggaccccgguuggagag

SEQ ID NO: 32288 - RNA, 18 nt, Artificial Sequence
  Synthetic oligonucleotide: FAS-5128
cccgguuggagagaggag

SEQ ID NO: 32289 - RNA, 19 nt, Artificial Sequence
  Synthetic oligonucleotide: FAS-5129
ccccgguuggagagaggag

SEQ ID NO: 32290 - RNA, 20 nt, Artificial Sequence
  Synthetic oligonucleotide: FAS-1940
accccgguuggagagaggag

SEQ ID NO: 32291 - RNA, 21 nt, Artificial Sequence
  Synthetic oligonucleotide: FAS-5130
gaccccgguuggagagaggag

SEQ ID NO: 32292 - RNA, 22 nt, Artificial Sequence
  Synthetic oligonucleotide: FAS-5131
ggaccccgguuggagagaggag

SEQ ID NO: 32293 - RNA, 23 nt, Artificial Sequence
  Synthetic oligonucleotide: FAS-5132
gggaccccgguuggagagaggag

SEQ ID NO: 32294 - RNA, 24 nt, Artificial Sequence
  Synthetic oligonucleotide: FAS-5133
ggggaccccgguuggagagaggag

SEQ ID NO: 32295 - RNA, 18 nt, Artificial Sequence
  Synthetic oligonucleotide: FAS-5134
gcuuuagggucgcuggag

SEQ ID NO: 32296 - RNA, 19 nt, Artificial Sequence
  Synthetic oligonucleotide: FAS-5135
agcuuuagggucgcuggag

SEQ ID NO: 32297 - RNA, 20 nt, Artificial Sequence
  Synthetic oligonucleotide: FAS-1935
aagcuuuagggucgcuggag

SEQ ID NO: 32298 - RNA, 21 nt, Artificial Sequence
  Synthetic oligonucleotide: FAS-5136
gaagcuuuagggucgcuggag

SEQ ID NO: 32299 - RNA, 22 nt, Artificial Sequence
  Synthetic oligonucleotide: FAS-5137
ggaagcuuuagggucgcuggag

SEQ ID NO: 32300 - RNA, 23 nt, Artificial Sequence
  Synthetic oligonucleotide: FAS-5138
gggaagcuuuagggucgcuggag

SEQ ID NO: 32301 - RNA, 24 nt, Artificial Sequence
  Synthetic oligonucleotide: FAS-5139
ugggaagcuuuagggucgcuggag

SEQ ID NO: 32302 - RNA, 18 nt, Artificial Sequence
  Synthetic oligonucleotide: FAS-5140
acugcgcuccacguugag

SEQ ID NO: 32303 - RNA, 19 nt, Artificial Sequence
  Synthetic oligonucleotide: FAS-5141
cacugcgcuccacguugag

SEQ ID NO: 32304 - RNA, 20 nt, Artificial Sequence
  Synthetic oligonucleotide: FAS-1549
ccacugcgcuccacguugag

SEQ ID NO: 32305 - RNA, 21 nt, Artificial Sequence
  Synthetic oligonucleotide: FAS-5142
accacugcgcuccacguugag

SEQ ID NO: 32306 - RNA, 22 nt, Artificial Sequence
  Synthetic oligonucleotide: FAS-5143
gaccacugcgcuccacguugag

SEQ ID NO: 32307 - RNA, 23 nt, Artificial Sequence
  Synthetic oligonucleotide: FAS-5144
agaccacugcgcuccacguugag

SEQ ID NO: 32308 - RNA, 24 nt, Artificial Sequence
  Synthetic oligonucleotide: FAS-5145
gagaccacugcgcuccacguugag

SEQ ID NO: 32309 - RNA, 18 nt, Artificial Sequence
  Synthetic oligonucleotide: FAS-5146
gcccgggugcucagaacg

SEQ ID NO: 32310 - RNA, 19 nt, Artificial Sequence
  Synthetic oligonucleotide: FAS-5147
ggcccgggugcucagaacg

SEQ ID NO: 32311 - RNA, 20 nt, Artificial Sequence
  Synthetic oligonucleotide: FAS-1538
aggcccgggugcucagaacg

SEQ ID NO: 32312 - RNA, 21 nt, Artificial Sequence
  Synthetic oligonucleotide: FAS-5148
caggcccgggugcucagaacg

SEQ ID NO: 32313 - RNA, 22 nt, Artificial Sequence
  Synthetic oligonucleotide: FAS-5149
ucaggcccgggugcucagaacg

SEQ ID NO: 32314 - RNA, 23 nt, Artificial Sequence
  Synthetic oligonucleotide: FAS-5150
cucaggcccgggugcucagaacg

SEQ ID NO: 32315 - RNA, 24 nt, Artificial Sequence
  Synthetic oligonucleotide: FAS-5151
ccucaggcccgggugcucagaacg

SEQ ID NO: 32316 - RNA, 18 nt, Artificial Sequence
  Synthetic oligonucleotide: FAS-5152
agaccacugcgcuccacg

SEQ ID NO: 32317 - RNA, 19 nt, Artificial Sequence
  Synthetic oligonucleotide: FAS-5153
gagaccacugcgcuccacg

SEQ ID NO: 32318 - RNA, 20 nt, Artificial Sequence
  Synthetic oligonucleotide: FAS-1548
ggagaccacugcgcuccacg

SEQ ID NO: 32319 - RNA, 21 nt, Artificial Sequence
  Synthetic oligonucleotide: FAS-5154
cggagaccacugcgcuccacg

SEQ ID NO: 32320 - RNA, 22 nt, Artificial Sequence
  Synthetic oligonucleotide: FAS-5155
ucggagaccacugcgcuccacg

SEQ ID NO: 32321 - RNA, 23 nt, Artificial Sequence
  Synthetic oligonucleotide: FAS-5156
cucggagaccacugcgcuccacg

SEQ ID NO: 32322 - RNA, 24 nt, Artificial Sequence
  Synthetic oligonucleotide: FAS-5157
ccucggagaccacugcgcuccacg

SEQ ID NO: 32323 - RNA, 18 nt, Artificial Sequence
  Synthetic oligonucleotide: FAS-5158
ucuggcaguucucagacg

SEQ ID NO: 32324 - RNA, 19 nt, Artificial Sequence
  Synthetic oligonucleotide: FAS-5159
uucuggcaguucucagacg

SEQ ID NO: 32325 - RNA, 20 nt, Artificial Sequence
  Synthetic oligonucleotide: FAS-1590
uuucuggcaguucucagacg

SEQ ID NO: 32326 - RNA, 21 nt, Artificial Sequence
  Synthetic oligonucleotide: FAS-5160
uuuucuggcaguucucagacg

SEQ ID NO: 32327 - RNA, 22 nt, Artificial Sequence
  Synthetic oligonucleotide: FAS-5161
auuuucuggcaguucucagacg

SEQ ID NO: 32328 - RNA, 23 nt, Artificial Sequence
  Synthetic oligonucleotide: FAS-5162
cauuuucuggcaguucucagacg

SEQ ID NO: 32329 - RNA, 24 nt, Artificial Sequence
  Synthetic oligonucleotide: FAS-5163
ucauuuucuggcaguucucagacg

SEQ ID NO: 32330 - RNA, 18 nt, Artificial Sequence
  Synthetic oligonucleotide: FAS-5164
ugcgaagugcugaccccg

SEQ ID NO: 32331 - RNA, 19 nt, Artificial Sequence
  Synthetic oligonucleotide: FAS-5165
augcgaagugcugaccccg

SEQ ID NO: 32332 - RNA, 20 nt, Artificial Sequence
  Synthetic oligonucleotide: FAS-1543
gaugcgaagugcugaccccg

SEQ ID NO: 32333 - RNA, 21 nt, Artificial Sequence
  Synthetic oligonucleotide: FAS-5166
ugaugcgaagugcugaccccg

SEQ ID NO: 32334 - RNA, 22 nt, Artificial Sequence
  Synthetic oligonucleotide: FAS-5167
uugaugcgaagugcugaccccg

SEQ ID NO: 32335 - RNA, 23 nt, Artificial Sequence
  Synthetic oligonucleotide: FAS-5168
cuugaugcgaagugcugaccccg

SEQ ID NO: 32336 - RNA, 24 nt, Artificial Sequence
  Synthetic oligonucleotide: FAS-5169
ccuugaugcgaagugcugaccccg

SEQ ID NO: 32337 - RNA, 18 nt, Artificial Sequence
  Synthetic oligonucleotide: FAS-5170
ugagugcgcgccgccccg

SEQ ID NO: 32338 - RNA, 19 nt, Artificial Sequence
  Synthetic oligonucleotide: FAS-5171
gugagugcgcgccgccccg

SEQ ID NO: 32339 - RNA, 20 nt, Artificial Sequence
  Synthetic oligonucleotide: FAS-1948
ggugagugcgcgccgccccg

SEQ ID NO: 32340 - RNA, 21 nt, Artificial Sequence
  Synthetic oligonucleotide: FAS-5172
gggugagugcgcgccgccccg

SEQ ID NO: 32341 - RNA, 22 nt, Artificial Sequence
  Synthetic oligonucleotide: FAS-5173
ugggugagugcgcgccgccccg

SEQ ID NO: 32342 - RNA, 23 nt, Artificial Sequence
  Synthetic oligonucleotide: FAS-5174
gugggugagugcgcgccgccccg

SEQ ID NO: 32343 - RNA, 24 nt, Artificial Sequence
  Synthetic oligonucleotide: FAS-5175
ggugggugagugcgcgccgccccg

SEQ ID NO: 32344 - RNA, 18 nt, Artificial Sequence
  Synthetic oligonucleotide: FAS-5176
gaagcagugguuaagccg

SEQ ID NO: 32345 - RNA, 19 nt, Artificial Sequence
  Synthetic oligonucleotide: FAS-5177
cgaagcagugguuaagccg

SEQ ID NO: 32346 - RNA, 20 nt, Artificial Sequence
  Synthetic oligonucleotide: FAS-1595
ccgaagcagugguuaagccg

SEQ ID NO: 32347 - RNA, 21 nt, Artificial Sequence
  Synthetic oligonucleotide: FAS-5178
accgaagcagugguuaagccg

SEQ ID NO: 32348 - RNA, 22 nt, Artificial Sequence
  Synthetic oligonucleotide: FAS-5179
caccgaagcagugguuaagccg

SEQ ID NO: 32349 - RNA, 23 nt, Artificial Sequence
  Synthetic oligonucleotide: FAS-5180
gcaccgaagcagugguuaagccg

SEQ ID NO: 32350 - RNA, 24 nt, Artificial Sequence
  Synthetic oligonucleotide: FAS-5181
agcaccgaagcagugguuaagccg

SEQ ID NO: 32351 - RNA, 18 nt, Artificial Sequence
  Synthetic oligonucleotide: FAS-5182
gggcugcugcgggaggcg

SEQ ID NO: 32352 - RNA, 19 nt, Artificial Sequence
  Synthetic oligonucleotide: FAS-5183
cgggcugcugcgggaggcg

SEQ ID NO: 32353 - RNA, 20 nt, Artificial Sequence
  Synthetic oligonucleotide: FAS-1530
gcgggcugcugcgggaggcg

SEQ ID NO: 32354 - RNA, 18 nt, Artificial Sequence
  Synthetic oligonucleotide: FAS-5184
cgccgccccgcgggggcg

SEQ ID NO: 32355 - RNA, 19 nt, Artificial Sequence
  Synthetic oligonucleotide: FAS-5185
gcgccgccccgcgggggcg

SEQ ID NO: 32356 - RNA, 20 nt, Artificial Sequence
  Synthetic oligonucleotide: FAS-1954
cgcgccgccccgcgggggcg

SEQ ID NO: 32357 - RNA, 21 nt, Artificial Sequence
  Synthetic oligonucleotide: FAS-5186
gcgcgccgccccgcgggggcg

SEQ ID NO: 32358 - RNA, 22 nt, Artificial Sequence
  Synthetic oligonucleotide: FAS-5187
ugcgcgccgccccgcgggggcg

SEQ ID NO: 32359 - RNA, 23 nt, Artificial Sequence
  Synthetic oligonucleotide: FAS-5188
gugcgcgccgccccgcgggggcg

SEQ ID NO: 32360 - RNA, 24 nt, Artificial Sequence
  Synthetic oligonucleotide: FAS-5189
agugcgcgccgccccgcgggggcg

SEQ ID NO: 32361 - RNA, 18 nt, Artificial Sequence
  Synthetic oligonucleotide: FAS-5190
ugggaagcuuuagggucg

SEQ ID NO: 32362 - RNA, 19 nt, Artificial Sequence
  Synthetic oligonucleotide: FAS-5191
cugggaagcuuuagggucg

SEQ ID NO: 32363 - RNA, 20 nt, Artificial Sequence
  Synthetic oligonucleotide: FAS-1562
ucugggaagcuuuagggucg

SEQ ID NO: 32364 - RNA, 21 nt, Artificial Sequence
  Synthetic oligonucleotide: FAS-5192
gucugggaagcuuuagggucg

SEQ ID NO: 32365 - RNA, 22 nt, Artificial Sequence
  Synthetic oligonucleotide: FAS-5193
agucugggaagcuuuagggucg

SEQ ID NO: 32366 - RNA, 23 nt, Artificial Sequence
  Synthetic oligonucleotide: FAS-5194
aagucugggaagcuuuagggucg

SEQ ID NO: 32367 - RNA, 24 nt, Artificial Sequence
  Synthetic oligonucleotide: FAS-5195
gaagucugggaagcuuuagggucg

SEQ ID NO: 32368 - RNA, 18 nt, Artificial Sequence
  Synthetic oligonucleotide: FAS-5196
cugaccccgcugggcagg

SEQ ID NO: 32369 - RNA, 19 nt, Artificial Sequence
  Synthetic oligonucleotide: FAS-5197
gcugaccccgcugggcagg

SEQ ID NO: 32370 - RNA, 20 nt, Artificial Sequence
  Synthetic oligonucleotide: FAS-1914
ugcugaccccgcugggcagg

SEQ ID NO: 32371 - RNA, 21 nt, Artificial Sequence
  Synthetic oligonucleotide: FAS-5198
gugcugaccccgcugggcagg

SEQ ID NO: 32372 - RNA, 22 nt, Artificial Sequence
  Synthetic oligonucleotide: FAS-5199
agugcugaccccgcugggcagg

SEQ ID NO: 32373 - RNA, 23 nt, Artificial Sequence
  Synthetic oligonucleotide: FAS-5200
aagugcugaccccgcugggcagg

SEQ ID NO: 32374 - RNA, 24 nt, Artificial Sequence
  Synthetic oligonucleotide: FAS-5201
gaagugcugaccccgcugggcagg

SEQ ID NO: 32375 - RNA, 18 nt, Artificial Sequence
  Synthetic oligonucleotide: FAS-5202
gcuggagggggaccccgg

SEQ ID NO: 32376 - RNA, 19 nt, Artificial Sequence
  Synthetic oligonucleotide: FAS-5203
cgcuggagggggaccccgg

SEQ ID NO: 32377 - RNA, 20 nt, Artificial Sequence
  Synthetic oligonucleotide: FAS-1568
ucgcuggagggggaccccgg

SEQ ID NO: 32378 - RNA, 21 nt, Artificial Sequence
  Synthetic oligonucleotide: FAS-5204
gucgcuggagggggaccccgg

SEQ ID NO: 32379 - RNA, 22 nt, Artificial Sequence
  Synthetic oligonucleotide: FAS-5205
ggucgcuggagggggaccccgg

SEQ ID NO: 32380 - RNA, 23 nt, Artificial Sequence
  Synthetic oligonucleotide: FAS-5206
gggucgcuggagggggaccccgg

SEQ ID NO: 32381 - RNA, 24 nt, Artificial Sequence
  Synthetic oligonucleotide: FAS-5207
agggucgcuggagggggaccccgg

SEQ ID NO: 32382 - RNA, 18 nt, Artificial Sequence
  Synthetic oligonucleotide: FAS-5208
uuaagccggagggcucgg

SEQ ID NO: 32383 - RNA, 19 nt, Artificial Sequence
  Synthetic oligonucleotide: FAS-5209
guuaagccggagggcucgg

SEQ ID NO: 32384 - RNA, 20 nt, Artificial Sequence
  Synthetic oligonucleotide: FAS-1598
gguuaagccggagggcucgg

SEQ ID NO: 32385 - RNA, 21 nt, Artificial Sequence
  Synthetic oligonucleotide: FAS-5210
ugguuaagccggagggcucgg

SEQ ID NO: 32386 - RNA, 22 nt, Artificial Sequence
  Synthetic oligonucleotide: FAS-5211
gugguuaagccggagggcucgg

SEQ ID NO: 32387 - RNA, 23 nt, Artificial Sequence
  Synthetic oligonucleotide: FAS-5212
agugguuaagccggagggcucgg

SEQ ID NO: 32388 - RNA, 24 nt, Artificial Sequence
  Synthetic oligonucleotide: FAS-5213
cagugguuaagccggagggcucgg

SEQ ID NO: 32389 - RNA, 18 nt, Artificial Sequence
  Synthetic oligonucleotide: FAS-5214
ccgccccgcgggggcggg

SEQ ID NO: 32390 - RNA, 19 nt, Artificial Sequence
  Synthetic oligonucleotide: FAS-5215
gccgccccgcgggggcggg

SEQ ID NO: 32391 - RNA, 20 nt, Artificial Sequence
  Synthetic oligonucleotide: FAS-1587
cgccgccccgcgggggcggg

SEQ ID NO: 32392 - RNA, 21 nt, Artificial Sequence
  Synthetic oligonucleotide: FAS-5216
gcgccgccccgcgggggcggg

SEQ ID NO: 32393 - RNA, 22 nt, Artificial Sequence
  Synthetic oligonucleotide: FAS-5217
cgcgccgccccgcgggggcggg

SEQ ID NO: 32394 - RNA, 23 nt, Artificial Sequence
  Synthetic oligonucleotide: FAS-5218
gcgcgccgccccgcgggggcggg

SEQ ID NO: 32395 - RNA, 24 nt, Artificial Sequence
  Synthetic oligonucleotide: FAS-5219
ugcgcgccgccccgcgggggcggg

SEQ ID NO: 32396 - RNA, 18 nt, Artificial Sequence
  Synthetic oligonucleotide: FAS-5220
gcgcgccgccccgcgggg

SEQ ID NO: 32397 - RNA, 19 nt, Artificial Sequence
  Synthetic oligonucleotide: FAS-5221
ugcgcgccgccccgcgggg

SEQ ID NO: 32398 - RNA, 20 nt, Artificial Sequence
  Synthetic oligonucleotide: FAS-1583
gugcgcgccgccccgcgggg

SEQ ID NO: 32399 - RNA, 21 nt, Artificial Sequence
  Synthetic oligonucleotide: FAS-5222
agugcgcgccgccccgcgggg

SEQ ID NO: 32400 - RNA, 22 nt, Artificial Sequence
  Synthetic oligonucleotide: FAS-5223
gagugcgcgccgccccgcgggg

SEQ ID NO: 32401 - RNA, 23 nt, Artificial Sequence
  Synthetic oligonucleotide: FAS-5224
ugagugcgcgccgccccgcgggg

SEQ ID NO: 32402 - RNA, 24 nt, Artificial Sequence
  Synthetic oligonucleotide: FAS-5225
gugagugcgcgccgccccgcgggg

SEQ ID NO: 32403 - RNA, 18 nt, Artificial Sequence
  Synthetic oligonucleotide: FAS-5226
cgcgccgccccgcggggg

SEQ ID NO: 32404 - RNA, 19 nt, Artificial Sequence
  Synthetic oligonucleotide: FAS-5227
gcgcgccgccccgcggggg

SEQ ID NO: 32405 - RNA, 20 nt, Artificial Sequence
  Synthetic oligonucleotide: FAS-1952
ugcgcgccgccccgcggggg

SEQ ID NO: 32406 - RNA, 21 nt, Artificial Sequence
  Synthetic oligonucleotide: FAS-5228
gugcgcgccgccccgcggggg

SEQ ID NO: 32407 - RNA, 22 nt, Artificial Sequence
  Synthetic oligonucleotide: FAS-5229
agugcgcgccgccccgcggggg

SEQ ID NO: 32408 - RNA, 23 nt, Artificial Sequence
  Synthetic oligonucleotide: FAS-5230
gagugcgcgccgccccgcggggg

SEQ ID NO: 32409 - RNA, 24 nt, Artificial Sequence
  Synthetic oligonucleotide: FAS-5231
ugagugcgcgccgccccgcggggg

SEQ ID NO: 32410 - RNA, 18 nt, Artificial Sequence
  Synthetic oligonucleotide: FAS-5232
aagcuuuagggucgcugg

SEQ ID NO: 32411 - RNA, 19 nt, Artificial Sequence
  Synthetic oligonucleotide: FAS-5233
gaagcuuuagggucgcugg

SEQ ID NO: 32412 - RNA, 20 nt, Artificial Sequence
  Synthetic oligonucleotide: FAS-1933
ggaagcuuuagggucgcugg

SEQ ID NO: 32413 - RNA, 21 nt, Artificial Sequence
  Synthetic oligonucleotide: FAS-5234
gggaagcuuuagggucgcugg

SEQ ID NO: 32414 - RNA, 22 nt, Artificial Sequence
  Synthetic oligonucleotide: FAS-5235
ugggaagcuuuagggucgcugg

SEQ ID NO: 32415 - RNA, 23 nt, Artificial Sequence
  Synthetic oligonucleotide: FAS-5236
cugggaagcuuuagggucgcugg

SEQ ID NO: 32416 - RNA, 24 nt, Artificial Sequence
  Synthetic oligonucleotide: FAS-5237
ucugggaagcuuuagggucgcugg

SEQ ID NO: 32417 - RNA, 18 nt, Artificial Sequence
  Synthetic oligonucleotide: FAS-5238
cgggugcucagaacgcug

SEQ ID NO: 32418 - RNA, 19 nt, Artificial Sequence
  Synthetic oligonucleotide: FAS-5239
ccgggugcucagaacgcug

SEQ ID NO: 32419 - RNA, 20 nt, Artificial Sequence
  Synthetic oligonucleotide: FAS-1540
cccgggugcucagaacgcug

SEQ ID NO: 32420 - RNA, 21 nt, Artificial Sequence
  Synthetic oligonucleotide: FAS-5240
gcccgggugcucagaacgcug

SEQ ID NO: 32421 - RNA, 22 nt, Artificial Sequence
  Synthetic oligonucleotide: FAS-5241
ggcccgggugcucagaacgcug

SEQ ID NO: 32422 - RNA, 23 nt, Artificial Sequence
  Synthetic oligonucleotide: FAS-5242
aggcccgggugcucagaacgcug

SEQ ID NO: 32423 - RNA, 24 nt, Artificial Sequence
  Synthetic oligonucleotide: FAS-5243
caggcccgggugcucagaacgcug

SEQ ID NO: 32424 - RNA, 18 nt, Artificial Sequence
  Synthetic oligonucleotide: FAS-5244
gaagcuuuagggucgcug

SEQ ID NO: 32425 - RNA, 19 nt, Artificial Sequence
  Synthetic oligonucleotide: FAS-5245
ggaagcuuuagggucgcug

SEQ ID NO: 32426 - RNA, 20 nt, Artificial Sequence
  Synthetic oligonucleotide: FAS-1564
gggaagcuuuagggucgcug

SEQ ID NO: 32427 - RNA, 21 nt, Artificial Sequence
  Synthetic oligonucleotide: FAS-5246
ugggaagcuuuagggucgcug

SEQ ID NO: 32428 - RNA, 22 nt, Artificial Sequence
  Synthetic oligonucleotide: FAS-5247
cugggaagcuuuagggucgcug

SEQ ID NO: 32429 - RNA, 23 nt, Artificial Sequence
  Synthetic oligonucleotide: FAS-5248
ucugggaagcuuuagggucgcug

SEQ ID NO: 32430 - RNA, 24 nt, Artificial Sequence
  Synthetic oligonucleotide: FAS-5249
gucugggaagcuuuagggucgcug

SEQ ID NO: 32431 - RNA, 18 nt, Artificial Sequence
  Synthetic oligonucleotide: FAS-5250
uaauucuuucgugcucug

SEQ ID NO: 32432 - RNA, 19 nt, Artificial Sequence
  Synthetic oligonucleotide: FAS-5251
guaauucuuucgugcucug

SEQ ID NO: 32433 - RNA, 20 nt, Artificial Sequence
  Synthetic oligonucleotide: FAS-1493
uguaauucuuucgugcucug

SEQ ID NO: 32434 - RNA, 21 nt, Artificial Sequence
  Synthetic oligonucleotide: FAS-5252
uuguaauucuuucgugcucug

SEQ ID NO: 32435 - RNA, 22 nt, Artificial Sequence
  Synthetic oligonucleotide: FAS-5253
cuuguaauucuuucgugcucug

SEQ ID NO: 32436 - RNA, 23 nt, Artificial Sequence
  Synthetic oligonucleotide: FAS-5254
ucuuguaauucuuucgugcucug

SEQ ID NO: 32437 - RNA, 24 nt, Artificial Sequence
  Synthetic oligonucleotide: FAS-5255
aucuuguaauucuuucgugcucug

SEQ ID NO: 32438 - RNA, 18 nt, Artificial Sequence
  Synthetic oligonucleotide: FAS-5256
ggagggggaccccgguug

SEQ ID NO: 32439 - RNA, 19 nt, Artificial Sequence
  Synthetic oligonucleotide: FAS-5257
uggagggggaccccgguug

SEQ ID NO: 32440 - RNA, 20 nt, Artificial Sequence
  Synthetic oligonucleotide: FAS-1570
cuggagggggaccccgguug

SEQ ID NO: 32441 - RNA, 21 nt, Artificial Sequence
  Synthetic oligonucleotide: FAS-5258
gcuggagggggaccccgguug

SEQ ID NO: 32442 - RNA, 22 nt, Artificial Sequence
  Synthetic oligonucleotide: FAS-5259
cgcuggagggggaccccgguug

SEQ ID NO: 32443 - RNA, 23 nt, Artificial Sequence
  Synthetic oligonucleotide: FAS-5260
ucgcuggagggggaccccgguug

SEQ ID NO: 32444 - RNA, 24 nt, Artificial Sequence
  Synthetic oligonucleotide: FAS-5261
gucgcuggagggggaccccgguug

SEQ ID NO: 32445 - RNA, 18 nt, Artificial Sequence
  Synthetic oligonucleotide: FAS-5262
cuuuucuugggccuugau

SEQ ID NO: 32446 - RNA, 19 nt, Artificial Sequence
  Synthetic oligonucleotide: FAS-5263
gcuuuucuugggccuugau

SEQ ID NO: 32447 - RNA, 20 nt, Artificial Sequence
  Synthetic oligonucleotide: FAS-1542
ugcuuuucuugggccuugau

SEQ ID NO: 32448 - RNA, 21 nt, Artificial Sequence
  Synthetic oligonucleotide: FAS-5264
uugcuuuucuugggccuugau

SEQ ID NO: 32449 - RNA, 22 nt, Artificial Sequence
  Synthetic oligonucleotide: FAS-5265
cuugcuuuucuugggccuugau

SEQ ID NO: 32450 - RNA, 23 nt, Artificial Sequence
  Synthetic oligonucleotide: FAS-5266
acuugcuuuucuugggccuugau

SEQ ID NO: 32451 - RNA, 24 nt, Artificial Sequence
  Synthetic oligonucleotide: FAS-5267
gacuugcuuuucuugggccuugau

SEQ ID NO: 32452 - RNA, 18 nt, Artificial Sequence
  Synthetic oligonucleotide: FAS-5268
uucucgaaaaaguuauau

SEQ ID NO: 32453 - RNA, 19 nt, Artificial Sequence
  Synthetic oligonucleotide: FAS-5269
uuucucgaaaaaguuauau

SEQ ID NO: 32454 - RNA, 20 nt, Artificial Sequence
  Synthetic oligonucleotide: FAS-1964
cuuucucgaaaaaguuauau

SEQ ID NO: 32455 - RNA, 21 nt, Artificial Sequence
  Synthetic oligonucleotide: FAS-5270
ucuuucucgaaaaaguuauau

SEQ ID NO: 32456 - RNA, 22 nt, Artificial Sequence
  Synthetic oligonucleotide: FAS-5271
uucuuucucgaaaaaguuauau

SEQ ID NO: 32457 - RNA, 23 nt, Artificial Sequence
  Synthetic oligonucleotide: FAS-5272
uuucuuucucgaaaaaguuauau

SEQ ID NO: 32458 - RNA, 24 nt, Artificial Sequence
  Synthetic oligonucleotide: FAS-5273
uuuucuuucucgaaaaaguuauau

SEQ ID NO: 32459 - RNA, 18 nt, Artificial Sequence
  Synthetic oligonucleotide: FAS-5274
cuuucucgaaaaaguuau

SEQ ID NO: 32460 - RNA, 19 nt, Artificial Sequence
  Synthetic oligonucleotide: FAS-5275
ucuuucucgaaaaaguuau

SEQ ID NO: 32461 - RNA, 20 nt, Artificial Sequence
  Synthetic oligonucleotide: FAS-1600
uucuuucucgaaaaaguuau

SEQ ID NO: 32462 - RNA, 21 nt, Artificial Sequence
  Synthetic oligonucleotide: FAS-5276
uuucuuucucgaaaaaguuau

SEQ ID NO: 32463 - RNA, 22 nt, Artificial Sequence
  Synthetic oligonucleotide: FAS-5277
uuuucuuucucgaaaaaguuau

SEQ ID NO: 32464 - RNA, 23 nt, Artificial Sequence
  Synthetic oligonucleotide: FAS-5278
cuuuucuuucucgaaaaaguuau

SEQ ID NO: 32465 - RNA, 24 nt, Artificial Sequence
  Synthetic oligonucleotide: FAS-5279
ccuuuucuuucucgaaaaaguuau

SEQ ID NO: 32466 - RNA, 18 nt, Artificial Sequence
  Synthetic oligonucleotide: FAS-5280
agguuagguuacccuccu

SEQ ID NO: 32467 - RNA, 19 nt, Artificial Sequence
  Synthetic oligonucleotide: FAS-5281
uagguuagguuacccuccu

SEQ ID NO: 32468 - RNA, 20 nt, Artificial Sequence
  Synthetic oligonucleotide: FAS-1507
cuagguuagguuacccuccu

SEQ ID NO: 32469 - RNA, 21 nt, Artificial Sequence
  Synthetic oligonucleotide: FAS-5282
ucuagguuagguuacccuccu

SEQ ID NO: 32470 - RNA, 22 nt, Artificial Sequence
  Synthetic oligonucleotide: FAS-5283
aucuagguuagguuacccuccu

SEQ ID NO: 32471 - RNA, 23 nt, Artificial Sequence
  Synthetic oligonucleotide: FAS-5284
aaucuagguuagguuacccuccu

SEQ ID NO: 32472 - RNA, 24 nt, Artificial Sequence
  Synthetic oligonucleotide: FAS-5285
aaaucuagguuagguuacccuccu

SEQ ID NO: 32473 - RNA, 18 nt, Artificial Sequence
  Synthetic oligonucleotide: FAS-5286
ggcagcuccggcgcuccu

SEQ ID NO: 32474 - RNA, 19 nt, Artificial Sequence
  Synthetic oligonucleotide: FAS-5287
gggcagcuccggcgcuccu

SEQ ID NO: 32475 - RNA, 20 nt, Artificial Sequence
  Synthetic oligonucleotide: FAS-1918
ggggcagcuccggcgcuccu

SEQ ID NO: 32476 - RNA, 21 nt, Artificial Sequence
  Synthetic oligonucleotide: FAS-5288
cggggcagcuccggcgcuccu

SEQ ID NO: 32477 - RNA, 22 nt, Artificial Sequence
  Synthetic oligonucleotide: FAS-5289
gcggggcagcuccggcgcuccu

SEQ ID NO: 32478 - RNA, 23 nt, Artificial Sequence
  Synthetic oligonucleotide: FAS-5290
ggcggggcagcuccggcgcuccu

SEQ ID NO: 32479 - RNA, 24 nt, Artificial Sequence
  Synthetic oligonucleotide: FAS-5291
aggcggggcagcuccggcgcuccu

SEQ ID NO: 32480 - RNA, 18 nt, Artificial Sequence
  Synthetic oligonucleotide: FAS-5292
ugguuaagccggagggcu

SEQ ID NO: 32481 - RNA, 19 nt, Artificial Sequence
  Synthetic oligonucleotide: FAS-5293
gugguuaagccggagggcu

SEQ ID NO: 32482 - RNA, 20 nt, Artificial Sequence
  Synthetic oligonucleotide: FAS-1961
agugguuaagccggagggcu

SEQ ID NO: 32483 - RNA, 21 nt, Artificial Sequence
  Synthetic oligonucleotide: FAS-5294
cagugguuaagccggagggcu

SEQ ID NO: 32484 - RNA, 22 nt, Artificial Sequence
  Synthetic oligonucleotide: FAS-5295
gcagugguuaagccggagggcu

SEQ ID NO: 32485 - RNA, 23 nt, Artificial Sequence
  Synthetic oligonucleotide: FAS-5296
agcagugguuaagccggagggcu

SEQ ID NO: 32486 - RNA, 24 nt, Artificial Sequence
  Synthetic oligonucleotide: FAS-5297
aagcagugguuaagccggagggcu

SEQ ID NO: 32487 - RNA, 18 nt, Artificial Sequence
  Synthetic oligonucleotide: FAS-5298
cccucaggcccgggugcu

SEQ ID NO: 32488 - RNA, 19 nt, Artificial Sequence
  Synthetic oligonucleotide: FAS-5299
ucccucaggcccgggugcu

SEQ ID NO: 32489 - RNA, 20 nt, Artificial Sequence
  Synthetic oligonucleotide: FAS-1537
uucccucaggcccgggugcu

SEQ ID NO: 32490 - RNA, 21 nt, Artificial Sequence
  Synthetic oligonucleotide: FAS-5300
cuucccucaggcccgggugcu

SEQ ID NO: 32491 - RNA, 22 nt, Artificial Sequence
  Synthetic oligonucleotide: FAS-5301
ccuucccucaggcccgggugcu

SEQ ID NO: 32492 - RNA, 23 nt, Artificial Sequence
  Synthetic oligonucleotide: FAS-5302
accuucccucaggcccgggugcu

SEQ ID NO: 32493 - RNA, 24 nt, Artificial Sequence
  Synthetic oligonucleotide: FAS-5303
gaccuucccucaggcccgggugcu

SEQ ID NO: 32494 - RNA, 18 nt, Artificial Sequence
  Synthetic oligonucleotide: FAS-5304
uucaaagucacuauugcu

SEQ ID NO: 32495 - RNA, 19 nt, Artificial Sequence
  Synthetic oligonucleotide: FAS-5305
guucaaagucacuauugcu

SEQ ID NO: 32496 - RNA, 20 nt, Artificial Sequence
  Synthetic oligonucleotide: FAS-1494
uguucaaagucacuauugcu

SEQ ID NO: 32497 - RNA, 21 nt, Artificial Sequence
  Synthetic oligonucleotide: FAS-5306
cuguucaaagucacuauugcu

SEQ ID NO: 32498 - RNA, 22 nt, Artificial Sequence
  Synthetic oligonucleotide: FAS-5307
acuguucaaagucacuauugcu

SEQ ID NO: 32499 - RNA, 23 nt, Artificial Sequence
  Synthetic oligonucleotide: FAS-5308
cacuguucaaagucacuauugcu

SEQ ID NO: 32500 - RNA, 24 nt, Artificial Sequence
  Synthetic oligonucleotide: FAS-5309
acacuguucaaagucacuauugcu

SEQ ID NO: 32501 - RNA, 18 nt, Artificial Sequence
  Synthetic oligonucleotide: FAS-5310
gaauugaagcggaagucu

SEQ ID NO: 32502 - RNA, 19 nt, Artificial Sequence
  Synthetic oligonucleotide: FAS-5311
ggaauugaagcggaagucu

SEQ ID NO: 32503 - RNA, 20 nt, Artificial Sequence
  Synthetic oligonucleotide: FAS-1929
aggaauugaagcggaagucu

SEQ ID NO: 32504 - RNA, 21 nt, Artificial Sequence
  Synthetic oligonucleotide: FAS-5312
caggaauugaagcggaagucu

SEQ ID NO: 32505 - RNA, 22 nt, Artificial Sequence
  Synthetic oligonucleotide: FAS-5313
acaggaauugaagcggaagucu

SEQ ID NO: 32506 - RNA, 23 nt, Artificial Sequence
  Synthetic oligonucleotide: FAS-5314
gacaggaauugaagcggaagucu

SEQ ID NO: 32507 - RNA, 24 nt, Artificial Sequence
  Synthetic oligonucleotide: FAS-5315
ggacaggaauugaagcggaagucu

SEQ ID NO: 32508 - RNA, 18 nt, Artificial Sequence
  Synthetic oligonucleotide: FAS-5316
aggaauugaagcggaagu

SEQ ID NO: 32509 - RNA, 19 nt, Artificial Sequence
  Synthetic oligonucleotide: FAS-5317
caggaauugaagcggaagu

SEQ ID NO: 32510 - RNA, 20 nt, Artificial Sequence
  Synthetic oligonucleotide: FAS-1558
acaggaauugaagcggaagu

SEQ ID NO: 32511 - RNA, 21 nt, Artificial Sequence
  Synthetic oligonucleotide: FAS-5318
gacaggaauugaagcggaagu

SEQ ID NO: 32512 - RNA, 22 nt, Artificial Sequence
  Synthetic oligonucleotide: FAS-5319
ggacaggaauugaagcggaagu

SEQ ID NO: 32513 - RNA, 23 nt, Artificial Sequence
  Synthetic oligonucleotide: FAS-5320
cggacaggaauugaagcggaagu

SEQ ID NO: 32514 - RNA, 24 nt, Artificial Sequence
  Synthetic oligonucleotide: FAS-5321
gcggacaggaauugaagcggaagu

SEQ ID NO: 32515 - RNA, 18 nt, Artificial Sequence
  Synthetic oligonucleotide: FAS-5322
cuggcaguucucagacgu

SEQ ID NO: 32516 - RNA, 19 nt, Artificial Sequence
  Synthetic oligonucleotide: FAS-5323
ucuggcaguucucagacgu

SEQ ID NO: 32517 - RNA, 20 nt, Artificial Sequence
  Synthetic oligonucleotide: FAS-1956
uucuggcaguucucagacgu

SEQ ID NO: 32518 - RNA, 21 nt, Artificial Sequence
  Synthetic oligonucleotide: FAS-5324
uuucuggcaguucucagacgu

SEQ ID NO: 32519 - RNA, 22 nt, Artificial Sequence
  Synthetic oligonucleotide: FAS-5325
uuuucuggcaguucucagacgu

SEQ ID NO: 32520 - RNA, 23 nt, Artificial Sequence
  Synthetic oligonucleotide: FAS-5326
auuuucuggcaguucucagacgu

SEQ ID NO: 32521 - RNA, 24 nt, Artificial Sequence
  Synthetic oligonucleotide: FAS-5327
cauuuucuggcaguucucagacgu

SEQ ID NO: 32522 - RNA, 18 nt, Artificial Sequence
  Synthetic oligonucleotide: FAS-5328
ggcugcugcgggaggcgu

SEQ ID NO: 32523 - RNA, 19 nt, Artificial Sequence
  Synthetic oligonucleotide: FAS-5329
gggcugcugcgggaggcgu

SEQ ID NO: 32524 - RNA, 20 nt, Artificial Sequence
  Synthetic oligonucleotide: FAS-1897
cgggcugcugcgggaggcgu

SEQ ID NO: 32525 - RNA, 18 nt, Artificial Sequence
  Synthetic oligonucleotide: FAS-5330
cuggagggggaccccggu

SEQ ID NO: 32526 - RNA, 19 nt, Artificial Sequence
  Synthetic oligonucleotide: FAS-5331
gcuggagggggaccccggu

SEQ ID NO: 32527 - RNA, 20 nt, Artificial Sequence
  Synthetic oligonucleotide: FAS-1938
cgcuggagggggaccccggu

SEQ ID NO: 32528 - RNA, 21 nt, Artificial Sequence
  Synthetic oligonucleotide: FAS-5332
ucgcuggagggggaccccggu

SEQ ID NO: 32529 - RNA, 22 nt, Artificial Sequence
  Synthetic oligonucleotide: FAS-5333
gucgcuggagggggaccccggu

SEQ ID NO: 32530 - RNA, 23 nt, Artificial Sequence
  Synthetic oligonucleotide: FAS-5334
ggucgcuggagggggaccccggu

SEQ ID NO: 32531 - RNA, 24 nt, Artificial Sequence
  Synthetic oligonucleotide: FAS-5335
gggucgcuggagggggaccccggu

SEQ ID NO: 32532 - RNA, 18 nt, Artificial Sequence
  Synthetic oligonucleotide: FAS-5336
uugaggugggcguggggu

SEQ ID NO: 32533 - RNA, 19 nt, Artificial Sequence
  Synthetic oligonucleotide: FAS-5337
guugaggugggcguggggu

SEQ ID NO: 32534 - RNA, 20 nt, Artificial Sequence
  Synthetic oligonucleotide: FAS-1552
cguugaggugggcguggggu

SEQ ID NO: 32535 - RNA, 21 nt, Artificial Sequence
  Synthetic oligonucleotide: FAS-5338
acguugaggugggcguggggu

SEQ ID NO: 32536 - RNA, 22 nt, Artificial Sequence
  Synthetic oligonucleotide: FAS-5339
cacguugaggugggcguggggu

SEQ ID NO: 32537 - RNA, 23 nt, Artificial Sequence
  Synthetic oligonucleotide: FAS-5340
ccacguugaggugggcguggggu

SEQ ID NO: 32538 - RNA, 24 nt, Artificial Sequence
  Synthetic oligonucleotide: FAS-5341
uccacguugaggugggcguggggu

SEQ ID NO: 32539 - RNA, 18 nt, Artificial Sequence
  Synthetic oligonucleotide: FAS-5342
uuuucuucuggagccugu

SEQ ID NO: 32540 - RNA, 19 nt, Artificial Sequence
  Synthetic oligonucleotide: FAS-5343
auuuucuucuggagccugu

SEQ ID NO: 32541 - RNA, 20 nt, Artificial Sequence
  Synthetic oligonucleotide: FAS-1505
cauuuucuucuggagccugu

SEQ ID NO: 32542 - RNA, 21 nt, Artificial Sequence
  Synthetic oligonucleotide: FAS-5344
acauuuucuucuggagccugu

SEQ ID NO: 32543 - RNA, 22 nt, Artificial Sequence
  Synthetic oligonucleotide: FAS-5345
gacauuuucuucuggagccugu

SEQ ID NO: 32544 - RNA, 23 nt, Artificial Sequence
  Synthetic oligonucleotide: FAS-5346
ugacauuuucuucuggagccugu

SEQ ID NO: 32545 - RNA, 24 nt, Artificial Sequence
  Synthetic oligonucleotide: FAS-5347
uugacauuuucuucuggagccugu

SEQ ID NO: 32546 - RNA, 18 nt, Artificial Sequence
  Synthetic oligonucleotide: FAS-5348
cuggcucccgggggcugu

SEQ ID NO: 32547 - RNA, 19 nt, Artificial Sequence
  Synthetic oligonucleotide: FAS-5349
acuggcucccgggggcugu

SEQ ID NO: 32548 - RNA, 20 nt, Artificial Sequence
  Synthetic oligonucleotide: FAS-1535
gacuggcucccgggggcugu

SEQ ID NO: 32549 - RNA, 21 nt, Artificial Sequence
  Synthetic oligonucleotide: FAS-5350
agacuggcucccgggggcugu

SEQ ID NO: 32550 - RNA, 22 nt, Artificial Sequence
  Synthetic oligonucleotide: FAS-5351
gagacuggcucccgggggcugu

SEQ ID NO: 32551 - RNA, 23 nt, Artificial Sequence
  Synthetic oligonucleotide: FAS-5352
ggagacuggcucccgggggcugu

SEQ ID NO: 32552 - RNA, 24 nt, Artificial Sequence
  Synthetic oligonucleotide: FAS-5353
uggagacuggcucccgggggcugu

SEQ ID NO: 32553 - RNA, 18 nt, Artificial Sequence
  Synthetic oligonucleotide: FAS-5354
gagagagccugcagccuu

SEQ ID NO: 32554 - RNA, 19 nt, Artificial Sequence
  Synthetic oligonucleotide: FAS-5355
ggagagagccugcagccuu

SEQ ID NO: 32555 - RNA, 20 nt, Artificial Sequence
  Synthetic oligonucleotide: FAS-1589
gggagagagccugcagccuu

SEQ ID NO: 32556 - RNA, 21 nt, Artificial Sequence
  Synthetic oligonucleotide: FAS-5356
ggggagagagccugcagccuu

SEQ ID NO: 32557 - RNA, 22 nt, Artificial Sequence
  Synthetic oligonucleotide: FAS-5357
cggggagagagccugcagccuu

SEQ ID NO: 32558 - RNA, 23 nt, Artificial Sequence
  Synthetic oligonucleotide: FAS-5358
gcggggagagagccugcagccuu

SEQ ID NO: 32559 - RNA, 24 nt, Artificial Sequence
  Synthetic oligonucleotide: FAS-5359
ggcggggagagagccugcagccuu

SEQ ID NO: 32560 - RNA, 18 nt, Artificial Sequence
  Synthetic oligonucleotide: FAS-5360
ucaaagucacuauugcuu

SEQ ID NO: 32561 - RNA, 19 nt, Artificial Sequence
  Synthetic oligonucleotide: FAS-5361
uucaaagucacuauugcuu

SEQ ID NO: 32562 - RNA, 20 nt, Artificial Sequence
  Synthetic oligonucleotide: FAS-1849
guucaaagucacuauugcuu

SEQ ID NO: 32563 - RNA, 21 nt, Artificial Sequence
  Synthetic oligonucleotide: FAS-5362
uguucaaagucacuauugcuu

SEQ ID NO: 32564 - RNA, 22 nt, Artificial Sequence
  Synthetic oligonucleotide: FAS-5363
cuguucaaagucacuauugcuu

SEQ ID NO: 32565 - RNA, 23 nt, Artificial Sequence
  Synthetic oligonucleotide: FAS-5364
acuguucaaagucacuauugcuu

SEQ ID NO: 32566 - RNA, 24 nt, Artificial Sequence
  Synthetic oligonucleotide: FAS-5365
cacuguucaaagucacuauugcuu

SEQ ID NO: 32567 - RNA, 18 nt, Artificial Sequence
  Synthetic oligonucleotide: FAS-5366
cucaguugacauuuucuu

SEQ ID NO: 32568 - RNA, 19 nt, Artificial Sequence
  Synthetic oligonucleotide: FAS-5367
ucucaguugacauuuucuu

SEQ ID NO: 32569 - RNA, 20 nt, Artificial Sequence
  Synthetic oligonucleotide: FAS-1503
cucucaguugacauuuucuu

SEQ ID NO: 32570 - RNA, 21 nt, Artificial Sequence
  Synthetic oligonucleotide: FAS-5368
ccucucaguugacauuuucuu

SEQ ID NO: 32571 - RNA, 22 nt, Artificial Sequence
  Synthetic oligonucleotide: FAS-5369
uccucucaguugacauuuucuu

SEQ ID NO: 32572 - RNA, 23 nt, Artificial Sequence
  Synthetic oligonucleotide: FAS-5370
uuccucucaguugacauuuucuu

SEQ ID NO: 32573 - RNA, 24 nt, Artificial Sequence
  Synthetic oligonucleotide: FAS-5371
cuuccucucaguugacauuuucuu

SEQ ID NO: 32574 - RNA, 17 nt, Artificial Sequence
  Synthetic oligonucleotide: FAS-5372
gacacacagguguucaa

SEQ ID NO: 32575 - RNA, 17 nt, Artificial Sequence
  Synthetic oligonucleotide: FAS-5373
uagcuggggcuaugcga

SEQ ID NO: 32576 - RNA, 17 nt, Artificial Sequence
  Synthetic oligonucleotide: FAS-1289
gcaauccuccgaaguga

SEQ ID NO: 32577 - RNA, 17 nt, Artificial Sequence
  Synthetic oligonucleotide: FAS-5374
cagccaagucacucgua

SEQ ID NO: 32578 - RNA, 17 nt, Artificial Sequence
  Synthetic oligonucleotide: FAS-817
cccauccuccugaccac

SEQ ID NO: 32579 - RNA, 17 nt, Artificial Sequence
  Synthetic oligonucleotide: FAS-1772
cggguuggggagggcuc

SEQ ID NO: 32580 - RNA, 17 nt, Artificial Sequence
  Synthetic oligonucleotide: FAS-5375
acccgggcguuccccag

SEQ ID NO: 32581 - RNA, 17 nt, Artificial Sequence
  Synthetic oligonucleotide: FAS-1768
uuaauauagcuggggcu

SEQ ID NO: 32582 - RNA, 17 nt, Artificial Sequence
  Synthetic oligonucleotide: FAS-5376
ggccuccugcccuuucu

SEQ ID NO: 32583 - RNA, 17 nt, Artificial Sequence
  Synthetic oligonucleotide: FAS-1151
gcgggcgcgggacgcgu

SEQ ID NO: 32584 - RNA, 17 nt, Artificial Sequence
  Synthetic oligonucleotide: FAS-3184
cccucuccugcccgggu

SEQ ID NO: 32585 - RNA, 17 nt, Artificial Sequence
  Synthetic oligonucleotide: FAS-5377
gcgauuuggcuuaaguu

SEQ ID NO: 32586 - RNA, 20 nt, Artificial Sequence
  Synthetic oligonucleotide: FAS-5378
agugacacacagguguucaa

SEQ ID NO: 32587 - RNA, 20 nt, Artificial Sequence
  Synthetic oligonucleotide: FAS-5379
auauagcuggggcuaugcga

SEQ ID NO: 32588 - RNA, 20 nt, Artificial Sequence
  Synthetic oligonucleotide: FAS-1173
ugagcaauccuccgaaguga

SEQ ID NO: 32589 - RNA, 20 nt, Artificial Sequence
  Synthetic oligonucleotide: FAS-5380
cuccagccaagucacucgua

SEQ ID NO: 32590 - RNA, 20 nt, Artificial Sequence
  Synthetic oligonucleotide: FAS-626
cuucccauccuccugaccac

SEQ ID NO: 32591 - RNA, 20 nt, Artificial Sequence
  Synthetic oligonucleotide: FAS-1771
gcccggguuggggagggcuc

SEQ ID NO: 32592 - RNA, 20 nt, Artificial Sequence
  Synthetic oligonucleotide: FAS-5381
ccaacccgggcguuccccag

SEQ ID NO: 32593 - RNA, 20 nt, Artificial Sequence
  Synthetic oligonucleotide: FAS-1765
uguuuaauauagcuggggcu

SEQ ID NO: 32594 - RNA, 20 nt, Artificial Sequence
  Synthetic oligonucleotide: FAS-5382
gccggccuccugcccuuucu

SEQ ID NO: 32595 - RNA, 20 nt, Artificial Sequence
  Synthetic oligonucleotide: FAS-1062
ggggcgggcgcgggacgcgu

SEQ ID NO: 32596 - RNA, 20 nt, Artificial Sequence
  Synthetic oligonucleotide: FAS-3187
gagcccucuccugcccgggu

SEQ ID NO: 32597 - RNA, 20 nt, Artificial Sequence
  Synthetic oligonucleotide: FAS-5383
uaugcgauuuggcuuaaguu

SEQ ID NO: 32598 - RNA, 17 nt, Artificial Sequence
  Synthetic oligonucleotide: FAS-1769
ggaagcucuuucacuuc

SEQ ID NO: 32599 - RNA, 20 nt, Artificial Sequence
  Synthetic oligonucleotide: FAS-1766
uggggaagcucuuucacuuc

SEQ ID NO: 32600 - RNA, 17 nt, Artificial Sequence
  Synthetic oligonucleotide: FAS-1775
ucaggaggguaaccuaa

SEQ ID NO: 32601 - RNA, 17 nt, Artificial Sequence
  Synthetic oligonucleotide: FAS-1778
accucucucccuuccca

SEQ ID NO: 32602 - RNA, 17 nt, Artificial Sequence
  Synthetic oligonucleotide: FAS-5384
gagcccuccggcuuaac

SEQ ID NO: 32603 - RNA, 17 nt, Artificial Sequence
  Synthetic oligonucleotide: FAS-5385
acacuguucaaagucac

SEQ ID NO: 32604 - RNA, 17 nt, Artificial Sequence
  Synthetic oligonucleotide: FAS-5386
ccuaaagcuucccagac

SEQ ID NO: 32605 - RNA, 17 nt, Artificial Sequence
  Synthetic oligonucleotide: FAS-5387
auaacacauuaauaacc

SEQ ID NO: 32606 - RNA, 17 nt, Artificial Sequence
  Synthetic oligonucleotide: FAS-5388
ccgcgccggagcggacc

SEQ ID NO: 32607 - RNA, 17 nt, Artificial Sequence
  Synthetic oligonucleotide: FAS-5389
ucccccuccagcgaccc

SEQ ID NO: 32608 - RNA, 17 nt, Artificial Sequence
  Synthetic oligonucleotide: FAS-5390
gccguucuuccgagccc

SEQ ID NO: 32609 - RNA, 17 nt, Artificial Sequence
  Synthetic oligonucleotide: FAS-5391
gcucagaacgcuggagg

SEQ ID NO: 32610 - RNA, 17 nt, Artificial Sequence
  Synthetic oligonucleotide: FAS-5392
ccggagcggaccuuugg

SEQ ID NO: 32611 - RNA, 17 nt, Artificial Sequence
  Synthetic oligonucleotide: FAS-5393
auugaagcggaagucug

SEQ ID NO: 32612 - RNA, 17 nt, Artificial Sequence
  Synthetic oligonucleotide: FAS-1472
gguugcagagugaggug

SEQ ID NO: 32613 - RNA, 17 nt, Artificial Sequence
  Synthetic oligonucleotide: FAS-5394
cagucuuguagguguug

SEQ ID NO: 32614 - RNA, 17 nt, Artificial Sequence
  Synthetic oligonucleotide: FAS-5395
agcccacuguucauccu

SEQ ID NO: 32615 - RNA, 17 nt, Artificial Sequence
  Synthetic oligonucleotide: FAS-1522
gguuagguuacccuccu

SEQ ID NO: 32616 - RNA, 17 nt, Artificial Sequence
  Synthetic oligonucleotide: FAS-1741
ccuuuggcuuggcuugu

SEQ ID NO: 32617 - RNA, 17 nt, Artificial Sequence
  Synthetic oligonucleotide: FAS-1776
cagagcacgaaagaauu

SEQ ID NO: 32618 - RNA, 20 nt, Artificial Sequence
  Synthetic oligonucleotide: FAS-1773
cccucaggaggguaaccuaa

SEQ ID NO: 32619 - RNA, 20 nt, Artificial Sequence
  Synthetic oligonucleotide: FAS-1777
gcaaccucucucccuuccca

SEQ ID NO: 32620 - RNA, 20 nt, Artificial Sequence
  Synthetic oligonucleotide: FAS-5396
uccgagcccuccggcuuaac

SEQ ID NO: 32621 - RNA, 20 nt, Artificial Sequence
  Synthetic oligonucleotide: FAS-5397
ugaacacuguucaaagucac

SEQ ID NO: 32622 - RNA, 20 nt, Artificial Sequence
  Synthetic oligonucleotide: FAS-5398
gacccuaaagcuucccagac

SEQ ID NO: 32623 - RNA, 20 nt, Artificial Sequence
  Synthetic oligonucleotide: FAS-5399
uuaauaacacauuaauaacc

SEQ ID NO: 32624 - RNA, 20 nt, Artificial Sequence
  Synthetic oligonucleotide: FAS-5400
cacccgcgccggagcggacc

SEQ ID NO: 32625 - RNA, 20 nt, Artificial Sequence
  Synthetic oligonucleotide: FAS-5401
gggucccccuccagcgaccc

SEQ ID NO: 32626 - RNA, 20 nt, Artificial Sequence
  Synthetic oligonucleotide: FAS-5402
ggugccguucuuccgagccc

SEQ ID NO: 32627 - RNA, 20 nt, Artificial Sequence
  Synthetic oligonucleotide: FAS-5403
ggugcucagaacgcuggagg

SEQ ID NO: 32628 - RNA, 20 nt, Artificial Sequence
  Synthetic oligonucleotide: FAS-5404
gcgccggagcggaccuuugg

SEQ ID NO: 32629 - RNA, 20 nt, Artificial Sequence
  Synthetic oligonucleotide: FAS-5405
ggaauugaagcggaagucug

SEQ ID NO: 32630 - RNA, 20 nt, Artificial Sequence
  Synthetic oligonucleotide: FAS-1420
agagguugcagagugaggug

SEQ ID NO: 32631 - RNA, 20 nt, Artificial Sequence
  Synthetic oligonucleotide: FAS-5406
caccagucuuguagguguug

SEQ ID NO: 32632 - RNA, 20 nt, Artificial Sequence
  Synthetic oligonucleotide: FAS-5407
cuuagcccacuguucauccu

SEQ ID NO: 32633 - RNA, 20 nt, Artificial Sequence
  Synthetic oligonucleotide: FAS-1507
cuagguuagguuacccuccu

SEQ ID NO: 32634 - RNA, 20 nt, Artificial Sequence
  Synthetic oligonucleotide: FAS-1705
ggaccuuuggcuuggcuugu

SEQ ID NO: 32635 - RNA, 20 nt, Artificial Sequence
  Synthetic oligonucleotide: FAS-1774
caccagagcacgaaagaauu

SEQ ID NO: 32636 - RNA, 17 nt, Artificial Sequence
  Synthetic oligonucleotide: CBLB-2522
cugcggcagcuugcuua

SEQ ID NO: 32637 - RNA, 17 nt, Artificial Sequence
  Synthetic oligonucleotide: CBLB-2523
aagcugccgcagaucgc

SEQ ID NO: 32638 - RNA, 17 nt, Artificial Sequence
  Synthetic oligonucleotide: CBLB-2524
ugcggcagcuugcuuag

SEQ ID NO: 32639 - RNA, 17 nt, Artificial Sequence
  Synthetic oligonucleotide: CBLB-2525
aaaauucgaccuuuucg

SEQ ID NO: 32640 - RNA, 17 nt, Artificial Sequence
  Synthetic oligonucleotide: CBLB-2526
gcggcagcuugcuuagg

SEQ ID NO: 32641 - RNA, 17 nt, Artificial Sequence
  Synthetic oligonucleotide: CBLB-2527
ccgaaaaggucgaauuu

SEQ ID NO: 32642 - RNA, 17 nt, Artificial Sequence
  Synthetic oligonucleotide: CBLB-2528
cgaaaaggucgaauuuu

SEQ ID NO: 32643 - RNA, 20 nt, Artificial Sequence
  Synthetic oligonucleotide: CBLB-2529
cccguuuugacuuuuucaua

SEQ ID NO: 32644 - RNA, 20 nt, Artificial Sequence
  Synthetic oligonucleotide: CBLB-2530
gaucugcggcagcuugcuua

SEQ ID NO: 32645 - RNA, 20 nt, Artificial Sequence
  Synthetic oligonucleotide: CBLB-2531
ggauuuccuccucgaccacc

SEQ ID NO: 32646 - RNA, 20 nt, Artificial Sequence
  Synthetic oligonucleotide: CBLB-2532
agcaagcugccgcagaucgc

SEQ ID NO: 32647 - RNA, 20 nt, Artificial Sequence
  Synthetic oligonucleotide: CBLB-2533
cguaaaugcugauauguauc

SEQ ID NO: 32648 - RNA, 20 nt, Artificial Sequence
  Synthetic oligonucleotide: CBLB-2534
ggguauuauugaugcuauuc

SEQ ID NO: 32649 - RNA, 20 nt, Artificial Sequence
  Synthetic oligonucleotide: CBLB-2535
aucugcggcagcuugcuuag

SEQ ID NO: 32650 - RNA, 20 nt, Artificial Sequence
  Synthetic oligonucleotide: CBLB-2536
ggcagaaacccugguggucg

SEQ ID NO: 32651 - RNA, 20 nt, Artificial Sequence
  Synthetic oligonucleotide: CBLB-2537
cgaucugcggcagcuugcuu

SEQ ID NO: 32652 - RNA, 20 nt, Artificial Sequence
  Synthetic oligonucleotide: CBLB-2538
uacccaaaauucgaccuuuu

SEQ ID NO: 32653 - RNA, 17 nt, Artificial Sequence
  Synthetic oligonucleotide: CBLB-2539
uuaugaaaaagucaaaa

SEQ ID NO: 32654 - RNA, 17 nt, Artificial Sequence
  Synthetic oligonucleotide: CBLB-2540
ggaggaaauccccgaaa

SEQ ID NO: 32655 - RNA, 17 nt, Artificial Sequence
  Synthetic oligonucleotide: CBLB-2541
aauuuuaguucuuuaaa

SEQ ID NO: 32656 - RNA, 17 nt, Artificial Sequence
  Synthetic oligonucleotide: CBLB-2542
auggcaaacucaaugaa

SEQ ID NO: 32657 - RNA, 17 nt, Artificial Sequence
  Synthetic oligonucleotide: CBLB-2543
uuccuccucgaccacca

SEQ ID NO: 32658 - RNA, 17 nt, Artificial Sequence
  Synthetic oligonucleotide: CBLB-2544
cuuccaagucuucucca

SEQ ID NO: 32659 - RNA, 17 nt, Artificial Sequence
  Synthetic oligonucleotide: CBLB-2545
acucuuuaaagaaggca

SEQ ID NO: 32660 - RNA, 17 nt, Artificial Sequence
  Synthetic oligonucleotide: CBLB-2546
gaagacuuggaagcuca

SEQ ID NO: 32661 - RNA, 17 nt, Artificial Sequence
  Synthetic oligonucleotide: CBLB-2547
auaagacucuuuaaaga

SEQ ID NO: 32662 - RNA, 17 nt, Artificial Sequence
  Synthetic oligonucleotide: CBLB-2548
agaacuaaaauuccaga

SEQ ID NO: 32663 - RNA, 17 nt, Artificial Sequence
  Synthetic oligonucleotide: CBLB-2549
guuuugacuuuuucaua

SEQ ID NO: 32664 - RNA, 17 nt, Artificial Sequence
  Synthetic oligonucleotide: CBLB-2550
aaaauaucaaguauaua

SEQ ID NO: 32665 - RNA, 17 nt, Artificial Sequence
  Synthetic oligonucleotide: CBLB-2551
uaugaaaaagucaaaac

SEQ ID NO: 32666 - RNA, 17 nt, Artificial Sequence
  Synthetic oligonucleotide: CBLB-2552
guaugaagaacagucac

SEQ ID NO: 32667 - RNA, 17 nt, Artificial Sequence
  Synthetic oligonucleotide: CBLB-2553
aagaacagucacaggac

SEQ ID NO: 32668 - RNA, 17 nt, Artificial Sequence
  Synthetic oligonucleotide: CBLB-2554
uuuccuccucgaccacc

SEQ ID NO: 32669 - RNA, 17 nt, Artificial Sequence
  Synthetic oligonucleotide: CBLB-2555
augaauggcagaaaccc

SEQ ID NO: 32670 - RNA, 17 nt, Artificial Sequence
  Synthetic oligonucleotide: CBLB-2556
ucauugaguuugccauc

SEQ ID NO: 32671 - RNA, 17 nt, Artificial Sequence
  Synthetic oligonucleotide: CBLB-2557
aaaugcugauauguauc

SEQ ID NO: 32672 - RNA, 17 nt, Artificial Sequence
  Synthetic oligonucleotide: CBLB-2558
uauuauugaugcuauuc

SEQ ID NO: 32673 - RNA, 17 nt, Artificial Sequence
  Synthetic oligonucleotide: CBLB-2559
ugaguugggcaaguuuc

SEQ ID NO: 32674 - RNA, 17 nt, Artificial Sequence
  Synthetic oligonucleotide: CBLB-2560
caaaauucgaccuuuuc

SEQ ID NO: 32675 - RNA, 17 nt, Artificial Sequence
  Synthetic oligonucleotide: CBLB-2561
gaagcucauggacaaag

SEQ ID NO: 32676 - RNA, 17 nt, Artificial Sequence
  Synthetic oligonucleotide: CBLB-2562
cgcagaucgcaggaccg

SEQ ID NO: 32677 - RNA, 17 nt, Artificial Sequence
  Synthetic oligonucleotide: CBLB-2563
agaaacccugguggucg

SEQ ID NO: 32678 - RNA, 17 nt, Artificial Sequence
  Synthetic oligonucleotide: CBLB-2564
aacccugguggucgagg

SEQ ID NO: 32679 - RNA, 17 nt, Artificial Sequence
  Synthetic oligonucleotide: CBLB-2565
auaucaaguauauaugg

SEQ ID NO: 32680 - RNA, 17 nt, Artificial Sequence
  Synthetic oligonucleotide: CBLB-2566
aauggcagaaacccugg

SEQ ID NO: 32681 - RNA, 17 nt, Artificial Sequence
  Synthetic oligonucleotide: CBLB-2567
cacgguccugcgaucug

SEQ ID NO: 32682 - RNA, 17 nt, Artificial Sequence
  Synthetic oligonucleotide: CBLB-2568
ggaccguggagaagacu

SEQ ID NO: 32683 - RNA, 17 nt, Artificial Sequence
  Synthetic oligonucleotide: CBLB-2569
gcuauucaggaugcagu

SEQ ID NO: 32684 - RNA, 17 nt, Artificial Sequence
  Synthetic oligonucleotide: CBLB-2570
acucauucucacugagu

SEQ ID NO: 32685 - RNA, 17 nt, Artificial Sequence
  Synthetic oligonucleotide: CBLB-2571
uaucaaguauauauggu

SEQ ID NO: 32686 - RNA, 17 nt, Artificial Sequence
  Synthetic oligonucleotide: CBLB-2572
ucugcggcagcuugcuu

SEQ ID NO: 32687 - RNA, 17 nt, Artificial Sequence
  Synthetic oligonucleotide: CBLB-2573
auuuuucaacugaaguu

SEQ ID NO: 32688 - RNA, 17 nt, Artificial Sequence
  Synthetic oligonucleotide: CBLB-2574
cucauucucacugaguu

SEQ ID NO: 32689 - RNA, 17 nt, Artificial Sequence
  Synthetic oligonucleotide: CBLB-2575
acugaaguuugggauuu

SEQ ID NO: 32690 - RNA, 17 nt, Artificial Sequence
  Synthetic oligonucleotide: CBLB-2576
uuuuucaacugaaguuu

SEQ ID NO: 32691 - RNA, 17 nt, Artificial Sequence
  Synthetic oligonucleotide: CBLB-2577
gaauauuucagauguuu

SEQ ID NO: 32692 - RNA, 17 nt, Artificial Sequence
  Synthetic oligonucleotide: CBLB-2578
ccaaaauucgaccuuuu

SEQ ID NO: 32693 - RNA, 17 nt, Artificial Sequence
  Synthetic oligonucleotide: CBLB-2579
uuuuuaucuuuguuuuu

SEQ ID NO: 32694 - RNA, 20 nt, Artificial Sequence
  Synthetic oligonucleotide: CBLB-2580
gccuuaugaaaaagucaaaa

SEQ ID NO: 32695 - RNA, 20 nt, Artificial Sequence
  Synthetic oligonucleotide: CBLB-2581
cgaggaggaaauccccgaaa

SEQ ID NO: 32696 - RNA, 20 nt, Artificial Sequence
  Synthetic oligonucleotide: CBLB-2582
uggaauuuuaguucuuuaaa

SEQ ID NO: 32697 - RNA, 20 nt, Artificial Sequence
  Synthetic oligonucleotide: CBLB-2583
cagauggcaaacucaaugaa

SEQ ID NO: 32698 - RNA, 20 nt, Artificial Sequence
  Synthetic oligonucleotide: CBLB-2584
gauuuccuccucgaccacca

SEQ ID NO: 32699 - RNA, 20 nt, Artificial Sequence
  Synthetic oligonucleotide: CBLB-2585
gagcuuccaagucuucucca

SEQ ID NO: 32700 - RNA, 20 nt, Artificial Sequence
  Synthetic oligonucleotide: CBLB-2586
aagacucuuuaaagaaggca

SEQ ID NO: 32701 - RNA, 20 nt, Artificial Sequence
  Synthetic oligonucleotide: CBLB-2587
ggagaagacuuggaagcuca

SEQ ID NO: 32702 - RNA, 20 nt, Artificial Sequence
  Synthetic oligonucleotide: CBLB-2588
gcaauaagacucuuuaaaga

SEQ ID NO: 32703 - RNA, 20 nt, Artificial Sequence
  Synthetic oligonucleotide: CBLB-2589
uaaagaacuaaaauuccaga

SEQ ID NO: 32704 - RNA, 20 nt, Artificial Sequence
  Synthetic oligonucleotide: CBLB-2590
ggcaaaauaucaaguauaua

SEQ ID NO: 32705 - RNA, 20 nt, Artificial Sequence
  Synthetic oligonucleotide: CBLB-2591
ccuuaugaaaaagucaaaac

SEQ ID NO: 32706 - RNA, 20 nt, Artificial Sequence
  Synthetic oligonucleotide: CBLB-2592
aauguaugaagaacagucac

SEQ ID NO: 32707 - RNA, 20 nt, Artificial Sequence
  Synthetic oligonucleotide: CBLB-2593
augaagaacagucacaggac

SEQ ID NO: 32708 - RNA, 20 nt, Artificial Sequence
  Synthetic oligonucleotide: CBLB-2594
ucaaugaauggcagaaaccc

SEQ ID NO: 32709 - RNA, 20 nt, Artificial Sequence
  Synthetic oligonucleotide: CBLB-2595
cauucauugaguuugccauc

SEQ ID NO: 32710 - RNA, 20 nt, Artificial Sequence
  Synthetic oligonucleotide: CBLB-2596
cacugaguugggcaaguuuc

SEQ ID NO: 32711 - RNA, 20 nt, Artificial Sequence
  Synthetic oligonucleotide: CBLB-2597
acccaaaauucgaccuuuuc

SEQ ID NO: 32712 - RNA, 20 nt, Artificial Sequence
  Synthetic oligonucleotide: CBLB-2598
uuggaagcucauggacaaag

SEQ ID NO: 32713 - RNA, 20 nt, Artificial Sequence
  Synthetic oligonucleotide: CBLB-2599
ugccgcagaucgcaggaccg

SEQ ID NO: 32714 - RNA, 20 nt, Artificial Sequence
  Synthetic oligonucleotide: CBLB-2600
cccaaaauucgaccuuuucg

SEQ ID NO: 32715 - RNA, 20 nt, Artificial Sequence
  Synthetic oligonucleotide: CBLB-2601
agaaacccugguggucgagg

SEQ ID NO: 32716 - RNA, 20 nt, Artificial Sequence
  Synthetic oligonucleotide: CBLB-2602
ucugcggcagcuugcuuagg

SEQ ID NO: 32717 - RNA, 20 nt, Artificial Sequence
  Synthetic oligonucleotide: CBLB-2603
aaaauaucaaguauauaugg

SEQ ID NO: 32718 - RNA, 20 nt, Artificial Sequence
  Synthetic oligonucleotide: CBLB-2604
augaauggcagaaacccugg

SEQ ID NO: 32719 - RNA, 20 nt, Artificial Sequence
  Synthetic oligonucleotide: CBLB-2605
cuccacgguccugcgaucug

SEQ ID NO: 32720 - RNA, 20 nt, Artificial Sequence
  Synthetic oligonucleotide: CBLB-2606
gcaggaccguggagaagacu

SEQ ID NO: 32721 - RNA, 20 nt, Artificial Sequence
  Synthetic oligonucleotide: CBLB-2607
gaugcuauucaggaugcagu

SEQ ID NO: 32722 - RNA, 20 nt, Artificial Sequence
  Synthetic oligonucleotide: CBLB-2608
aguacucauucucacugagu

SEQ ID NO: 32723 - RNA, 20 nt, Artificial Sequence
  Synthetic oligonucleotide: CBLB-2609
aaauaucaaguauauauggu

SEQ ID NO: 32724 - RNA, 20 nt, Artificial Sequence
  Synthetic oligonucleotide: CBLB-2610
gcuauuuuucaacugaaguu

SEQ ID NO: 32725 - RNA, 20 nt, Artificial Sequence
  Synthetic oligonucleotide: CBLB-2611
guacucauucucacugaguu

SEQ ID NO: 32726 - RNA, 20 nt, Artificial Sequence
  Synthetic oligonucleotide: CBLB-2612
uccccgaaaaggucgaauuu

SEQ ID NO: 32727 - RNA, 20 nt, Artificial Sequence
  Synthetic oligonucleotide: CBLB-2613
ucaacugaaguuugggauuu

SEQ ID NO: 32728 - RNA, 20 nt, Artificial Sequence
  Synthetic oligonucleotide: CBLB-2614
cuauuuuucaacugaaguuu

SEQ ID NO: 32729 - RNA, 20 nt, Artificial Sequence
  Synthetic oligonucleotide: CBLB-2615
gaagaauauuucagauguuu

SEQ ID NO: 32730 - RNA, 20 nt, Artificial Sequence
  Synthetic oligonucleotide: CBLB-2616
ccccgaaaaggucgaauuuu

SEQ ID NO: 32731 - RNA, 20 nt, Artificial Sequence
  Synthetic oligonucleotide: CBLB-2617
uuauuuuuaucuuuguuuuu

SEQ ID NO: 32732 - RNA, 17 nt, Artificial Sequence
  Synthetic oligonucleotide: CBLB-2618
ugcaagguggaaaaaaa

SEQ ID NO: 32733 - RNA, 17 nt, Artificial Sequence
  Synthetic oligonucleotide: CBLB-2619
gugcaagguggaaaaaa

SEQ ID NO: 32734 - RNA, 17 nt, Artificial Sequence
  Synthetic oligonucleotide: CBLB-2620
aacuguagacaccaaaa

SEQ ID NO: 32735 - RNA, 17 nt, Artificial Sequence
  Synthetic oligonucleotide: CBLB-2621
cuugcuagaucaacaaa

SEQ ID NO: 32736 - RNA, 17 nt, Artificial Sequence
  Synthetic oligonucleotide: CBLB-2622
agcaucggcaugccaaa

SEQ ID NO: 32737 - RNA, 17 nt, Artificial Sequence
  Synthetic oligonucleotide: CBLB-2623
ucaucucuuggaucaaa

SEQ ID NO: 32738 - RNA, 17 nt, Artificial Sequence
  Synthetic oligonucleotide: CBLB-2624
uuucacaacgacagaaa

SEQ ID NO: 32739 - RNA, 17 nt, Artificial Sequence
  Synthetic oligonucleotide: CBLB-2625
auuguaaguaugagaaa

SEQ ID NO: 32740 - RNA, 17 nt, Artificial Sequence
  Synthetic oligonucleotide: CBLB-2626
ugaauuauauugugaaa

SEQ ID NO: 32741 - RNA, 17 nt, Artificial Sequence
  Synthetic oligonucleotide: CBLB-2627
ugucguugugaaauaaa

SEQ ID NO: 32742 - RNA, 17 nt, Artificial Sequence
  Synthetic oligonucleotide: CBLB-2628
uuaagcauauauuuaaa

SEQ ID NO: 32743 - RNA, 17 nt, Artificial Sequence
  Synthetic oligonucleotide: CBLB-2629
acuugcuagaucaacaa

SEQ ID NO: 32744 - RNA, 17 nt, Artificial Sequence
  Synthetic oligonucleotide: CBLB-2630
uucgucuguaggcacaa

SEQ ID NO: 32745 - RNA, 17 nt, Artificial Sequence
  Synthetic oligonucleotide: CBLB-2631
cccaacggguucaccaa

SEQ ID NO: 32746 - RNA, 17 nt, Artificial Sequence
  Synthetic oligonucleotide: CBLB-2632
ucccuguggcagcccaa

SEQ ID NO: 32747 - RNA, 17 nt, Artificial Sequence
  Synthetic oligonucleotide: CBLB-2633
aaagcaaucuuucccaa

SEQ ID NO: 32748 - RNA, 17 nt, Artificial Sequence
  Synthetic oligonucleotide: CBLB-2634
cccagucacauagccaa

SEQ ID NO: 32749 - RNA, 17 nt, Artificial Sequence
  Synthetic oligonucleotide: CBLB-2635
uagcaucggcaugccaa

SEQ ID NO: 32750 - RNA, 17 nt, Artificial Sequence
  Synthetic oligonucleotide: CBLB-2636
uuucaggucuuuuccaa

SEQ ID NO: 32751 - RNA, 17 nt, Artificial Sequence
  Synthetic oligonucleotide: CBLB-2637
cucuggccuggaagcaa

SEQ ID NO: 32752 - RNA, 17 nt, Artificial Sequence
  Synthetic oligonucleotide: CBLB-2638
cuucuagcaggaggcaa

SEQ ID NO: 32753 - RNA, 17 nt, Artificial Sequence
  Synthetic oligonucleotide: CBLB-2639
cuuucuucucugggcaa

SEQ ID NO: 32754 - RNA, 17 nt, Artificial Sequence
  Synthetic oligonucleotide: CBLB-2640
uucaucucuuggaucaa

SEQ ID NO: 32755 - RNA, 17 nt, Artificial Sequence
  Synthetic oligonucleotide: CBLB-2641
gcgaguucaaaugucaa

SEQ ID NO: 32756 - RNA, 17 nt, Artificial Sequence
  Synthetic oligonucleotide: CBLB-2642
ucucuucaccucuucaa

SEQ ID NO: 32757 - RNA, 17 nt, Artificial Sequence
  Synthetic oligonucleotide: CBLB-2643
caccugcauuuaaagaa

SEQ ID NO: 32758 - RNA, 17 nt, Artificial Sequence
  Synthetic oligonucleotide: CBLB-2644
auuucacaacgacagaa

SEQ ID NO: 32759 - RNA, 17 nt, Artificial Sequence
  Synthetic oligonucleotide: CBLB-2645
cuggaucuaauucagaa

SEQ ID NO: 32760 - RNA, 17 nt, Artificial Sequence
  Synthetic oligonucleotide: CBLB-2646
guuggcaaacguccgaa

SEQ ID NO: 32761 - RNA, 17 nt, Artificial Sequence
  Synthetic oligonucleotide: CBLB-2647
ggucacuguaugcugaa

SEQ ID NO: 32762 - RNA, 17 nt, Artificial Sequence
  Synthetic oligonucleotide: CBLB-2648
aucagggcuugaaauaa

SEQ ID NO: 32763 - RNA, 17 nt, Artificial Sequence
  Synthetic oligonucleotide: CBLB-2649
caugugacugaagauaa

SEQ ID NO: 32764 - RNA, 17 nt, Artificial Sequence
  Synthetic oligonucleotide: CBLB-2650
uuuaggucuugugauaa

SEQ ID NO: 32765 - RNA, 17 nt, Artificial Sequence
  Synthetic oligonucleotide: CBLB-2651
uaaagguuucaaccuaa

SEQ ID NO: 32766 - RNA, 17 nt, Artificial Sequence
  Synthetic oligonucleotide: CBLB-2652
auuaucacaagaccuaa

SEQ ID NO: 32767 - RNA, 17 nt, Artificial Sequence
  Synthetic oligonucleotide: CBLB-2653
gaaagagaauuugcuaa

SEQ ID NO: 32768 - RNA, 17 nt, Artificial Sequence
  Synthetic oligonucleotide: CBLB-2654
accuuagcuccuucuaa

SEQ ID NO: 32769 - RNA, 17 nt, Artificial Sequence
  Synthetic oligonucleotide: CBLB-2655
ggccuggcaggugguaa

SEQ ID NO: 32770 - RNA, 17 nt, Artificial Sequence
  Synthetic oligonucleotide: CBLB-2656
ggaggaggaucucuuaa

SEQ ID NO: 32771 - RNA, 17 nt, Artificial Sequence
  Synthetic oligonucleotide: CBLB-2657
cuuaagcauauauuuaa

SEQ ID NO: 32772 - RNA, 17 nt, Artificial Sequence
  Synthetic oligonucleotide: CBLB-2658
guucaaaacuuuuuuaa

SEQ ID NO: 32773 - RNA, 17 nt, Artificial Sequence
  Synthetic oligonucleotide: CBLB-2659
agguaaaacuagaaaca

SEQ ID NO: 32774 - RNA, 17 nt, Artificial Sequence
  Synthetic oligonucleotide: CBLB-2660
gugaauucagggaaaca

SEQ ID NO: 32775 - RNA, 17 nt, Artificial Sequence
  Synthetic oligonucleotide: CBLB-2661
uauaaucauuagcaaca

SEQ ID NO: 32776 - RNA, 17 nt, Artificial Sequence
  Synthetic oligonucleotide: CBLB-2662
augcugaauggaacaca

SEQ ID NO: 32777 - RNA, 17 nt, Artificial Sequence
  Synthetic oligonucleotide: CBLB-2663
cacaucaaaugcccaca

SEQ ID NO: 32778 - RNA, 17 nt, Artificial Sequence
  Synthetic oligonucleotide: CBLB-2664
cccguugggcugccaca

SEQ ID NO: 32779 - RNA, 17 nt, Artificial Sequence
  Synthetic oligonucleotide: CBLB-2665
uuucgucuguaggcaca

SEQ ID NO: 32780 - RNA, 17 nt, Artificial Sequence
  Synthetic oligonucleotide: CBLB-2666
gacacauccagguuaca

SEQ ID NO: 32781 - RNA, 17 nt, Artificial Sequence
  Synthetic oligonucleotide: CBLB-2667
gaccaguacaccuacca

SEQ ID NO: 32782 - RNA, 17 nt, Artificial Sequence
  Synthetic oligonucleotide: CBLB-2668
acagaacuaucguacca

SEQ ID NO: 32783 - RNA, 17 nt, Artificial Sequence
  Synthetic oligonucleotide: CBLB-937
caccacagaaaacccca

SEQ ID NO: 32784 - RNA, 17 nt, Artificial Sequence
  Synthetic oligonucleotide: CBLB-2669
cgcaaaauagagcccca

SEQ ID NO: 32785 - RNA, 17 nt, Artificial Sequence
  Synthetic oligonucleotide: CBLB-2670
augccgccucaggccca

SEQ ID NO: 32786 - RNA, 17 nt, Artificial Sequence
  Synthetic oligonucleotide: CBLB-2671
cccaauggucaauucca

SEQ ID NO: 32787 - RNA, 17 nt, Artificial Sequence
  Synthetic oligonucleotide: CBLB-2672
cauauucuucacuucca

SEQ ID NO: 32788 - RNA, 17 nt, Artificial Sequence
  Synthetic oligonucleotide: CBLB-2673
ugucugaauacuuucca

SEQ ID NO: 32789 - RNA, 17 nt, Artificial Sequence
  Synthetic oligonucleotide: CBLB-2674
cgggacaauccaaagca

SEQ ID NO: 32790 - RNA, 17 nt, Artificial Sequence
  Synthetic oligonucleotide: CBLB-2675
caaugccucuugaagca

SEQ ID NO: 32791 - RNA, 17 nt, Artificial Sequence
  Synthetic oligonucleotide: CBLB-2676
ccugauugauggcagca

SEQ ID NO: 32792 - RNA, 17 nt, Artificial Sequence
  Synthetic oligonucleotide: CBLB-2677
auccaggcgaggaggca

SEQ ID NO: 32793 - RNA, 17 nt, Artificial Sequence
  Synthetic oligonucleotide: CBLB-2678
ccucuugccuuacggca

SEQ ID NO: 32794 - RNA, 17 nt, Artificial Sequence
  Synthetic oligonucleotide: CBLB-2679
gcuuucuucucugggca

SEQ ID NO: 32795 - RNA, 17 nt, Artificial Sequence
  Synthetic oligonucleotide: CBLB-2680
ggcaggugguaauggca

SEQ ID NO: 32796 - RNA, 17 nt, Artificial Sequence
  Synthetic oligonucleotide: CBLB-2681
aacaaauagaaaaugca

SEQ ID NO: 32797 - RNA, 17 nt, Artificial Sequence
  Synthetic oligonucleotide: CBLB-2682
uguuuucucaccaugca

SEQ ID NO: 32798 - RNA, 17 nt, Artificial Sequence
  Synthetic oligonucleotide: CBLB-2683
cucccccaccuccugca

SEQ ID NO: 32799 - RNA, 17 nt, Artificial Sequence
  Synthetic oligonucleotide: CBLB-2684
uacgauaguucugugca

SEQ ID NO: 32800 - RNA, 17 nt, Artificial Sequence
  Synthetic oligonucleotide: CBLB-2685
uuagucuucuccuugca

SEQ ID NO: 32801 - RNA, 17 nt, Artificial Sequence
  Synthetic oligonucleotide: CBLB-2686
cuucuaaaggcaaauca

SEQ ID NO: 32802 - RNA, 17 nt, Artificial Sequence
  Synthetic oligonucleotide: CBLB-2687
ccugcugccaucaauca

SEQ ID NO: 32803 - RNA, 17 nt, Artificial Sequence
  Synthetic oligonucleotide: CBLB-2688
caaccgauucaucauca

SEQ ID NO: 32804 - RNA, 17 nt, Artificial Sequence
  Synthetic oligonucleotide: CBLB-2689
aaaaauugcaaaacuca

SEQ ID NO: 32805 - RNA, 17 nt, Artificial Sequence
  Synthetic oligonucleotide: CBLB-2690
aauauaugcuuaaguca

SEQ ID NO: 32806 - RNA, 17 nt, Artificial Sequence
  Synthetic oligonucleotide: CBLB-2691
uaggagucggaugguca

SEQ ID NO: 32807 - RNA, 17 nt, Artificial Sequence
  Synthetic oligonucleotide: CBLB-2692
agaugguugugaauuca

SEQ ID NO: 32808 - RNA, 17 nt, Artificial Sequence
  Synthetic oligonucleotide: CBLB-2693
gauuucuucucugaaga

SEQ ID NO: 32809 - RNA, 17 nt, Artificial Sequence
  Synthetic oligonucleotide: CBLB-2694
uuaaaaaucuacacaga

SEQ ID NO: 32810 - RNA, 17 nt, Artificial Sequence
  Synthetic oligonucleotide: CBLB-2695
agaagaucauaaucaga

SEQ ID NO: 32811 - RNA, 17 nt, Artificial Sequence
  Synthetic oligonucleotide: CBLB-2696
gggggaggugggagaga

SEQ ID NO: 32812 - RNA, 17 nt, Artificial Sequence
  Synthetic oligonucleotide: CBLB-2697
gcaaaacucaugggaga

SEQ ID NO: 32813 - RNA, 17 nt, Artificial Sequence
  Synthetic oligonucleotide: CBLB-2698
acauuaugacaaugaga

SEQ ID NO: 32814 - RNA, 17 nt, Artificial Sequence
  Synthetic oligonucleotide: CBLB-2699
cuuugccuccugcuaga

SEQ ID NO: 32815 - RNA, 17 nt, Artificial Sequence
  Synthetic oligonucleotide: CBLB-2700
caugauuugccuuuaga

SEQ ID NO: 32816 - RNA, 17 nt, Artificial Sequence
  Synthetic oligonucleotide: CBLB-2701
ucccaaacacaucccga

SEQ ID NO: 32817 - RNA, 17 nt, Artificial Sequence
  Synthetic oligonucleotide: CBLB-2702
cuuuaugcuagggagga

SEQ ID NO: 32818 - RNA, 17 nt, Artificial Sequence
  Synthetic oligonucleotide: CBLB-2703
cuggaauuuggggagga

SEQ ID NO: 32819 - RNA, 17 nt, Artificial Sequence
  Synthetic oligonucleotide: CBLB-2704
guggggauacuggagga

SEQ ID NO: 32820 - RNA, 17 nt, Artificial Sequence
  Synthetic oligonucleotide: CBLB-2705
agauccuguccugagga

SEQ ID NO: 32821 - RNA, 17 nt, Artificial Sequence
  Synthetic oligonucleotide: CBLB-2706
ucuuccuucagguagga

SEQ ID NO: 32822 - RNA, 17 nt, Artificial Sequence
  Synthetic oligonucleotide: CBLB-2707
auagcaccaaacccgga

SEQ ID NO: 32823 - RNA, 17 nt, Artificial Sequence
  Synthetic oligonucleotide: CBLB-2708
uuuguuuaggagucgga

SEQ ID NO: 32824 - RNA, 17 nt, Artificial Sequence
  Synthetic oligonucleotide: CBLB-2709
auugauggcagcaggga

SEQ ID NO: 32825 - RNA, 17 nt, Artificial Sequence
  Synthetic oligonucleotide: CBLB-2710
ggauacuggaggaggga

SEQ ID NO: 32826 - RNA, 17 nt, Artificial Sequence
  Synthetic oligonucleotide: CBLB-2711
ugggagagauggaggga

SEQ ID NO: 32827 - RNA, 17 nt, Artificial Sequence
  Synthetic oligonucleotide: CBLB-2712
ugucgacuccuagggga

SEQ ID NO: 32828 - RNA, 17 nt, Artificial Sequence
  Synthetic oligonucleotide: CBLB-2713
ggcuaugugacugggga

SEQ ID NO: 32829 - RNA, 17 nt, Artificial Sequence
  Synthetic oligonucleotide: CBLB-2714
guucaaaugucaaugga

SEQ ID NO: 32830 - RNA, 17 nt, Artificial Sequence
  Synthetic oligonucleotide: CBLB-2715
gguuucaaccuaaugga

SEQ ID NO: 32831 - RNA, 17 nt, Artificial Sequence
  Synthetic oligonucleotide: CBLB-2716
gaggugggagagaugga

SEQ ID NO: 32832 - RNA, 17 nt, Artificial Sequence
  Synthetic oligonucleotide: CBLB-2717
auuggcgggucucugga

SEQ ID NO: 32833 - RNA, 17 nt, Artificial Sequence
  Synthetic oligonucleotide: CBLB-2718
aacucaccugaacauga

SEQ ID NO: 32834 - RNA, 17 nt, Artificial Sequence
  Synthetic oligonucleotide: CBLB-2719
gcacgcuuuccacauga

SEQ ID NO: 32835 - RNA, 17 nt, Artificial Sequence
  Synthetic oligonucleotide: CBLB-2720
ucugguggaccucauga

SEQ ID NO: 32836 - RNA, 17 nt, Artificial Sequence
  Synthetic oligonucleotide: CBLB-2721
uuugauccaagagauga

SEQ ID NO: 32837 - RNA, 17 nt, Artificial Sequence
  Synthetic oligonucleotide: CBLB-2722
gaaacagggugggauga

SEQ ID NO: 32838 - RNA, 17 nt, Artificial Sequence
  Synthetic oligonucleotide: CBLB-2723
uuuucccuccuaccuga

SEQ ID NO: 32839 - RNA, 17 nt, Artificial Sequence
  Synthetic oligonucleotide: CBLB-2724
aguuaucuuuauccuga

SEQ ID NO: 32840 - RNA, 17 nt, Artificial Sequence
  Synthetic oligonucleotide: CBLB-2725
uuucaagcccugauuga

SEQ ID NO: 32841 - RNA, 17 nt, Artificial Sequence
  Synthetic oligonucleotide: CBLB-2726
aaucagggcuugaaaua

SEQ ID NO: 32842 - RNA, 17 nt, Artificial Sequence
  Synthetic oligonucleotide: CBLB-2727
gcaugugacugaagaua

SEQ ID NO: 32843 - RNA, 17 nt, Artificial Sequence
  Synthetic oligonucleotide: CBLB-2728
ccuguguaacuuuuaua

SEQ ID NO: 32844 - RNA, 17 nt, Artificial Sequence
  Synthetic oligonucleotide: CBLB-2729
ugggaugucgacuccua

SEQ ID NO: 32845 - RNA, 17 nt, Artificial Sequence
  Synthetic oligonucleotide: CBLB-2730
gccuuuagaaggagcua

SEQ ID NO: 32846 - RNA, 17 nt, Artificial Sequence
  Synthetic oligonucleotide: CBLB-2731
aaacucacuuuaugcua

SEQ ID NO: 32847 - RNA, 17 nt, Artificial Sequence
  Synthetic oligonucleotide: CBLB-2732
auucugggcuaucucua

SEQ ID NO: 32848 - RNA, 17 nt, Artificial Sequence
  Synthetic oligonucleotide: CBLB-2733
ccuguucgguaagagua

SEQ ID NO: 32849 - RNA, 17 nt, Artificial Sequence
  Synthetic oligonucleotide: CBLB-2734
auaccugccaugccgua

SEQ ID NO: 32850 - RNA, 17 nt, Artificial Sequence
  Synthetic oligonucleotide: CBLB-2735
uaaaaguuacacaggua

SEQ ID NO: 32851 - RNA, 17 nt, Artificial Sequence
  Synthetic oligonucleotide: CBLB-2736
gggcuuguuaugaggua

SEQ ID NO: 32852 - RNA, 17 nt, Artificial Sequence
  Synthetic oligonucleotide: CBLB-2737
aaagggguccacgauua

SEQ ID NO: 32853 - RNA, 17 nt, Artificial Sequence
  Synthetic oligonucleotide: CBLB-2738
gugcaccucuugccuua

SEQ ID NO: 32854 - RNA, 17 nt, Artificial Sequence
  Synthetic oligonucleotide: CBLB-2739
uggaggaggaucucuua

SEQ ID NO: 32855 - RNA, 17 nt, Artificial Sequence
  Synthetic oligonucleotide: CBLB-2740
aaacauggguuuaguua

SEQ ID NO: 32856 - RNA, 17 nt, Artificial Sequence
  Synthetic oligonucleotide: CBLB-2741
ugcgcggucgugguuua

SEQ ID NO: 32857 - RNA, 17 nt, Artificial Sequence
  Synthetic oligonucleotide: CBLB-2742
ugugaauucagggaaac

SEQ ID NO: 32858 - RNA, 17 nt, Artificial Sequence
  Synthetic oligonucleotide: CBLB-2743
cccuguggcagcccaac

SEQ ID NO: 32859 - RNA, 17 nt, Artificial Sequence
  Synthetic oligonucleotide: CBLB-2744
augguucuucacucaac

SEQ ID NO: 32860 - RNA, 17 nt, Artificial Sequence
  Synthetic oligonucleotide: CBLB-2745
ccauacucuuaccgaac

SEQ ID NO: 32861 - RNA, 17 nt, Artificial Sequence
  Synthetic oligonucleotide: CBLB-2746
gggaggagggugguaac

SEQ ID NO: 32862 - RNA, 17 nt, Artificial Sequence
  Synthetic oligonucleotide: CBLB-2747
aucgagugcaacuuaac

SEQ ID NO: 32863 - RNA, 17 nt, Artificial Sequence
  Synthetic oligonucleotide: CBLB-2748
uauaauccugauuuaac

SEQ ID NO: 32864 - RNA, 17 nt, Artificial Sequence
  Synthetic oligonucleotide: CBLB-2749
ccauauaaaaguuacac

SEQ ID NO: 32865 - RNA, 17 nt, Artificial Sequence
  Synthetic oligonucleotide: CBLB-2750
acccguugggcugccac

SEQ ID NO: 32866 - RNA, 17 nt, Artificial Sequence
  Synthetic oligonucleotide: CBLB-2751
uguuuccgcauaagcac

SEQ ID NO: 32867 - RNA, 17 nt, Artificial Sequence
  Synthetic oligonucleotide: CBLB-2752
uccaggcgaggaggcac

SEQ ID NO: 32868 - RNA, 17 nt, Artificial Sequence
  Synthetic oligonucleotide: CBLB-2753
gcaggugguaauggcac

SEQ ID NO: 32869 - RNA, 17 nt, Artificial Sequence
  Synthetic oligonucleotide: CBLB-2754
aacuaacagaacaucac

SEQ ID NO: 32870 - RNA, 17 nt, Artificial Sequence
  Synthetic oligonucleotide: CBLB-2755
cuacacagaugguucac

SEQ ID NO: 32871 - RNA, 17 nt, Artificial Sequence
  Synthetic oligonucleotide: CBLB-2756
ccggccauccucaggac

SEQ ID NO: 32872 - RNA, 17 nt, Artificial Sequence
  Synthetic oligonucleotide: CBLB-2757
uguucuagugcacugac

SEQ ID NO: 32873 - RNA, 17 nt, Artificial Sequence
  Synthetic oligonucleotide: CBLB-2758
gauccuggugaugugac

SEQ ID NO: 32874 - RNA, 17 nt, Artificial Sequence
  Synthetic oligonucleotide: CBLB-2759
gccauuggcuaugugac

SEQ ID NO: 32875 - RNA, 17 nt, Artificial Sequence
  Synthetic oligonucleotide: CBLB-2760
uuuagacguggggauac

SEQ ID NO: 32876 - RNA, 17 nt, Artificial Sequence
  Synthetic oligonucleotide: CBLB-2761
ugaggauggccggcuac

SEQ ID NO: 32877 - RNA, 17 nt, Artificial Sequence
  Synthetic oligonucleotide: CBLB-2762
ucaucaucuuccucuac

SEQ ID NO: 32878 - RNA, 17 nt, Artificial Sequence
  Synthetic oligonucleotide: CBLB-2763
uccccugguagguguac

SEQ ID NO: 32879 - RNA, 17 nt, Artificial Sequence
  Synthetic oligonucleotide: CBLB-2764
gagggcucuccaaaacc

SEQ ID NO: 32880 - RNA, 17 nt, Artificial Sequence
  Synthetic oligonucleotide: CBLB-2765
aaauauagcaccaaacc

SEQ ID NO: 32881 - RNA, 17 nt, Artificial Sequence
  Synthetic oligonucleotide: CBLB-2766
agaaaugccauguaacc

SEQ ID NO: 32882 - RNA, 17 nt, Artificial Sequence
  Synthetic oligonucleotide: CBLB-2767
aaugaugcugcaacacc

SEQ ID NO: 32883 - RNA, 17 nt, Artificial Sequence
  Synthetic oligonucleotide: CBLB-2768
ucaccagucacaucacc

SEQ ID NO: 32884 - RNA, 17 nt, Artificial Sequence
  Synthetic oligonucleotide: CBLB-2769
guuuugacauuuucacc

SEQ ID NO: 32885 - RNA, 17 nt, Artificial Sequence
  Synthetic oligonucleotide: CBLB-2770
ggaccaguacaccuacc

SEQ ID NO: 32886 - RNA, 17 nt, Artificial Sequence
  Synthetic oligonucleotide: CBLB-2771
ccugcuagaagguuacc

SEQ ID NO: 32887 - RNA, 17 nt, Artificial Sequence
  Synthetic oligonucleotide: CBLB-2772
aauuugauauuuuuacc

SEQ ID NO: 32888 - RNA, 17 nt, Artificial Sequence
  Synthetic oligonucleotide: CBLB-2773
uuggauuuuuuuucccc

SEQ ID NO: 32889 - RNA, 17 nt, Artificial Sequence
  Synthetic oligonucleotide: CBLB-2774
aauaugauguuccuccc

SEQ ID NO: 32890 - RNA, 17 nt, Artificial Sequence
  Synthetic oligonucleotide: CBLB-2775
uacgaaaguuaucuccc

SEQ ID NO: 32891 - RNA, 17 nt, Artificial Sequence
  Synthetic oligonucleotide: CBLB-1323
aggaggaggagaaagcc

SEQ ID NO: 32892 - RNA, 17 nt, Artificial Sequence
  Synthetic oligonucleotide: CBLB-2776
acuuaccugaaacagcc

SEQ ID NO: 32893 - RNA, 17 nt, Artificial Sequence
  Synthetic oligonucleotide: CBLB-2777
ggccggcuacuggagcc

SEQ ID NO: 32894 - RNA, 17 nt, Artificial Sequence
  Synthetic oligonucleotide: CBLB-2778
acccgugccuccucgcc

SEQ ID NO: 32895 - RNA, 17 nt, Artificial Sequence
  Synthetic oligonucleotide: CBLB-2779
gucccgaguuggaggcc

SEQ ID NO: 32896 - RNA, 17 nt, Artificial Sequence
  Synthetic oligonucleotide: CBLB-2780
ccagauuagcucuggcc

SEQ ID NO: 32897 - RNA, 17 nt, Artificial Sequence
  Synthetic oligonucleotide: CBLB-2781
ugccauuaccaccugcc

SEQ ID NO: 32898 - RNA, 17 nt, Artificial Sequence
  Synthetic oligonucleotide: CBLB-2782
auaaugucgaaguugcc

SEQ ID NO: 32899 - RNA, 17 nt, Artificial Sequence
  Synthetic oligonucleotide: CBLB-2783
uuagcugugacacaucc

SEQ ID NO: 32900 - RNA, 17 nt, Artificial Sequence
  Synthetic oligonucleotide: CBLB-2784
cuuucugaauuagaucc

SEQ ID NO: 32901 - RNA, 17 nt, Artificial Sequence
  Synthetic oligonucleotide: CBLB-2785
gcaaggggagaggaucc

SEQ ID NO: 32902 - RNA, 17 nt, Artificial Sequence
  Synthetic oligonucleotide: CBLB-2786
gaacauucaaaaccucc

SEQ ID NO: 32903 - RNA, 17 nt, Artificial Sequence
  Synthetic oligonucleotide: CBLB-2787
caagagaugaaggcucc

SEQ ID NO: 32904 - RNA, 17 nt, Artificial Sequence
  Synthetic oligonucleotide: CBLB-2788
uucucggaggaugcucc

SEQ ID NO: 32905 - RNA, 17 nt, Artificial Sequence
  Synthetic oligonucleotide: CBLB-2789
ccuccuccccaaauucc

SEQ ID NO: 32906 - RNA, 17 nt, Artificial Sequence
  Synthetic oligonucleotide: CBLB-2790
ucccaauggucaauucc

SEQ ID NO: 32907 - RNA, 17 nt, Artificial Sequence
  Synthetic oligonucleotide: CBLB-2791
gaacucgcugugauucc

SEQ ID NO: 32908 - RNA, 17 nt, Artificial Sequence
  Synthetic oligonucleotide: CBLB-2792
aaaaagucuuaccuucc

SEQ ID NO: 32909 - RNA, 17 nt, Artificial Sequence
  Synthetic oligonucleotide: CBLB-2793
uuagagccauugcuucc

SEQ ID NO: 32910 - RNA, 17 nt, Artificial Sequence
  Synthetic oligonucleotide: CBLB-2794
auaauucauauuguucc

SEQ ID NO: 32911 - RNA, 17 nt, Artificial Sequence
  Synthetic oligonucleotide: CBLB-1324
gaggaggaggagaaagc

SEQ ID NO: 32912 - RNA, 17 nt, Artificial Sequence
  Synthetic oligonucleotide: CBLB-2795
cccugauugauggcagc

SEQ ID NO: 32913 - RNA, 17 nt, Artificial Sequence
  Synthetic oligonucleotide: CBLB-2796
ccugguaaccuucuagc

SEQ ID NO: 32914 - RNA, 17 nt, Artificial Sequence
  Synthetic oligonucleotide: CBLB-2797
cuccuggcuccaguagc

SEQ ID NO: 32915 - RNA, 17 nt, Artificial Sequence
  Synthetic oligonucleotide: CBLB-2798
cuaaaccacgaccgcgc

SEQ ID NO: 32916 - RNA, 17 nt, Artificial Sequence
  Synthetic oligonucleotide: CBLB-2799
uugccuuacggcauggc

SEQ ID NO: 32917 - RNA, 17 nt, Artificial Sequence
  Synthetic oligonucleotide: CBLB-2800
ccuguccugaggauggc

SEQ ID NO: 32918 - RNA, 17 nt, Artificial Sequence
  Synthetic oligonucleotide: CBLB-2801
cgaguuggaggccuggc

SEQ ID NO: 32919 - RNA, 17 nt, Artificial Sequence
  Synthetic oligonucleotide: CBLB-2802
gguuuagggggucuggc

SEQ ID NO: 32920 - RNA, 17 nt, Artificial Sequence
  Synthetic oligonucleotide: CBLB-2803
gaggaggcacggguggc

SEQ ID NO: 32921 - RNA, 17 nt, Artificial Sequence
  Synthetic oligonucleotide: CBLB-2804
cuucaagaggcauuggc

SEQ ID NO: 32922 - RNA, 17 nt, Artificial Sequence
  Synthetic oligonucleotide: CBLB-2805
gaccuuucuuuaaaugc

SEQ ID NO: 32923 - RNA, 17 nt, Artificial Sequence
  Synthetic oligonucleotide: CBLB-2806
uaucuucagucacaugc

SEQ ID NO: 32924 - RNA, 17 nt, Artificial Sequence
  Synthetic oligonucleotide: CBLB-2807
aagggaggagguggugc

SEQ ID NO: 32925 - RNA, 17 nt, Artificial Sequence
  Synthetic oligonucleotide: CBLB-2808
augagacuaugccuugc

SEQ ID NO: 32926 - RNA, 17 nt, Artificial Sequence
  Synthetic oligonucleotide: CBLB-2809
cauaauccaguuaaauc

SEQ ID NO: 32927 - RNA, 17 nt, Artificial Sequence
  Synthetic oligonucleotide: CBLB-2810
cccugcugccaucaauc

SEQ ID NO: 32928 - RNA, 17 nt, Artificial Sequence
  Synthetic oligonucleotide: CBLB-2811
ccaggccagagcuaauc

SEQ ID NO: 32929 - RNA, 17 nt, Artificial Sequence
  Synthetic oligonucleotide: CBLB-2812
uuauaacuccucccauc

SEQ ID NO: 32930 - RNA, 17 nt, Artificial Sequence
  Synthetic oligonucleotide: CBLB-2813
ggcuuagaugugggauc

SEQ ID NO: 32931 - RNA, 17 nt, Artificial Sequence
  Synthetic oligonucleotide: CBLB-2814
ugccaggccuccaacuc

SEQ ID NO: 32932 - RNA, 17 nt, Artificial Sequence
  Synthetic oligonucleotide: CBLB-2815
ugaagcauggugcccuc

SEQ ID NO: 32933 - RNA, 17 nt, Artificial Sequence
  Synthetic oligonucleotide: CBLB-2816
uuuuccaaugccgccuc

SEQ ID NO: 32934 - RNA, 17 nt, Artificial Sequence
  Synthetic oligonucleotide: CBLB-2817
aguagccggccauccuc

SEQ ID NO: 32935 - RNA, 17 nt, Artificial Sequence
  Synthetic oligonucleotide: CBLB-2818
guccaccagauuagcuc

SEQ ID NO: 32936 - RNA, 17 nt, Artificial Sequence
  Synthetic oligonucleotide: CBLB-2819
auucucggaggaugcuc

SEQ ID NO: 32937 - RNA, 17 nt, Artificial Sequence
  Synthetic oligonucleotide: CBLB-2820
aggcauuggcgggucuc

SEQ ID NO: 32938 - RNA, 17 nt, Artificial Sequence
  Synthetic oligonucleotide: CBLB-2821
gcuguggcuuucuucuc

SEQ ID NO: 32939 - RNA, 17 nt, Artificial Sequence
  Synthetic oligonucleotide: CBLB-2822
aaauauaugcuuaaguc

SEQ ID NO: 32940 - RNA, 17 nt, Artificial Sequence
  Synthetic oligonucleotide: CBLB-2823
ucgugguuuaggggguc

SEQ ID NO: 32941 - RNA, 17 nt, Artificial Sequence
  Synthetic oligonucleotide: CBLB-2824
gggaucuggaguggguc

SEQ ID NO: 32942 - RNA, 17 nt, Artificial Sequence
  Synthetic oligonucleotide: CBLB-2825
uuaggagucggaugguc

SEQ ID NO: 32943 - RNA, 17 nt, Artificial Sequence
  Synthetic oligonucleotide: CBLB-2826
cuacucagucuauuguc

SEQ ID NO: 32944 - RNA, 17 nt, Artificial Sequence
  Synthetic oligonucleotide: CBLB-2827
cagaugcugcugaauuc

SEQ ID NO: 32945 - RNA, 17 nt, Artificial Sequence
  Synthetic oligonucleotide: CBLB-2828
gagaugguugugaauuc

SEQ ID NO: 32946 - RNA, 17 nt, Artificial Sequence
  Synthetic oligonucleotide: CBLB-2829
caacuucgacauuauuc

SEQ ID NO: 32947 - RNA, 17 nt, Artificial Sequence
  Synthetic oligonucleotide: CBLB-2830
uaaaaagucuuaccuuc

SEQ ID NO: 32948 - RNA, 17 nt, Artificial Sequence
  Synthetic oligonucleotide: CBLB-2831
cuuuuucuucuuccuuc

SEQ ID NO: 32949 - RNA, 17 nt, Artificial Sequence
  Synthetic oligonucleotide: CBLB-2832
uuuggugucuacaguuc

SEQ ID NO: 32950 - RNA, 17 nt, Artificial Sequence
  Synthetic oligonucleotide: CBLB-2833
cagcuuccuucauguuc

SEQ ID NO: 32951 - RNA, 17 nt, Artificial Sequence
  Synthetic oligonucleotide: CBLB-2834
uuucuguggugaauuuc

SEQ ID NO: 32952 - RNA, 17 nt, Artificial Sequence
  Synthetic oligonucleotide: CBLB-2835
caauuugauuuacuuuc

SEQ ID NO: 32953 - RNA, 17 nt, Artificial Sequence
  Synthetic oligonucleotide: CBLB-2836
auugguggaggucuuuc

SEQ ID NO: 32954 - RNA, 17 nt, Artificial Sequence
  Synthetic oligonucleotide: CBLB-2837
uuuuaccaggcuguuuc

SEQ ID NO: 32955 - RNA, 17 nt, Artificial Sequence
  Synthetic oligonucleotide: CBLB-2838
uuugcagcuauauuuuc

SEQ ID NO: 32956 - RNA, 17 nt, Artificial Sequence
  Synthetic oligonucleotide: CBLB-2839
cuuacagagcugaaaag

SEQ ID NO: 32957 - RNA, 17 nt, Artificial Sequence
  Synthetic oligonucleotide: CBLB-2840
gcaucggcaugccaaag

SEQ ID NO: 32958 - RNA, 17 nt, Artificial Sequence
  Synthetic oligonucleotide: CBLB-2841
caucucuuggaucaaag

SEQ ID NO: 32959 - RNA, 17 nt, Artificial Sequence
  Synthetic oligonucleotide: CBLB-2842
uuuguugaucuagcaag

SEQ ID NO: 32960 - RNA, 17 nt, Artificial Sequence
  Synthetic oligonucleotide: CBLB-2843
ccaugccguaaggcaag

SEQ ID NO: 32961 - RNA, 17 nt, Artificial Sequence
  Synthetic oligonucleotide: CBLB-2844
uuucuucucugggcaag

SEQ ID NO: 32962 - RNA, 17 nt, Artificial Sequence
  Synthetic oligonucleotide: CBLB-2845
gggcaccaugcuucaag

SEQ ID NO: 32963 - RNA, 17 nt, Artificial Sequence
  Synthetic oligonucleotide: CBLB-2846
ggguuaugccuuugaag

SEQ ID NO: 32964 - RNA, 17 nt, Artificial Sequence
  Synthetic oligonucleotide: CBLB-2847
gcacucgauugggacag

SEQ ID NO: 32965 - RNA, 17 nt, Artificial Sequence
  Synthetic oligonucleotide: CBLB-2848
accaguacaccuaccag

SEQ ID NO: 32966 - RNA, 17 nt, Artificial Sequence
  Synthetic oligonucleotide: CBLB-2849
gagaagaucauaaucag

SEQ ID NO: 32967 - RNA, 17 nt, Artificial Sequence
  Synthetic oligonucleotide: CBLB-2850
uaauggcacgggaucag

SEQ ID NO: 32968 - RNA, 17 nt, Artificial Sequence
  Synthetic oligonucleotide: CBLB-2851
uggaaggcacaguagag

SEQ ID NO: 32969 - RNA, 17 nt, Artificial Sequence
  Synthetic oligonucleotide: CBLB-2852
ucucugggcaaggggag

SEQ ID NO: 32970 - RNA, 17 nt, Artificial Sequence
  Synthetic oligonucleotide: CBLB-2853
ugcaaaacucaugggag

SEQ ID NO: 32971 - RNA, 17 nt, Artificial Sequence
  Synthetic oligonucleotide: CBLB-2854
ggagguggugcugggag

SEQ ID NO: 32972 - RNA, 17 nt, Artificial Sequence
  Synthetic oligonucleotide: CBLB-2855
agaugugggaucuggag

SEQ ID NO: 32973 - RNA, 17 nt, Artificial Sequence
  Synthetic oligonucleotide: CBLB-2856
gggaugucgacuccuag

SEQ ID NO: 32974 - RNA, 17 nt, Artificial Sequence
  Synthetic oligonucleotide: CBLB-2857
ucaaaaacaucuccuag

SEQ ID NO: 32975 - RNA, 17 nt, Artificial Sequence
  Synthetic oligonucleotide: CBLB-2858
aacaagagacccaguag

SEQ ID NO: 32976 - RNA, 17 nt, Artificial Sequence
  Synthetic oligonucleotide: CBLB-2859
gcgcggucgugguuuag

SEQ ID NO: 32977 - RNA, 17 nt, Artificial Sequence
  Synthetic oligonucleotide: CBLB-2860
ugcuauagauuuagacg

SEQ ID NO: 32978 - RNA, 17 nt, Artificial Sequence
  Synthetic oligonucleotide: CBLB-2861
gucccaaacacaucccg

SEQ ID NO: 32979 - RNA, 17 nt, Artificial Sequence
  Synthetic oligonucleotide: CBLB-1322
ggaggaggagaaagccg

SEQ ID NO: 32980 - RNA, 17 nt, Artificial Sequence
  Synthetic oligonucleotide: CBLB-2862
ugaauuagauccaggcg

SEQ ID NO: 32981 - RNA, 17 nt, Artificial Sequence
  Synthetic oligonucleotide: CBLB-2863
ucuggugcaguccugcg

SEQ ID NO: 32982 - RNA, 17 nt, Artificial Sequence
  Synthetic oligonucleotide: CBLB-2864
aacugagcccauaaucg

SEQ ID NO: 32983 - RNA, 17 nt, Artificial Sequence
  Synthetic oligonucleotide: CBLB-2865
gcaguccugcgcggucg

SEQ ID NO: 32984 - RNA, 17 nt, Artificial Sequence
  Synthetic oligonucleotide: CBLB-2866
gauaguucugugcaagg

SEQ ID NO: 32985 - RNA, 17 nt, Artificial Sequence
  Synthetic oligonucleotide: CBLB-2867
uacucuuaccgaacagg

SEQ ID NO: 32986 - RNA, 17 nt, Artificial Sequence
  Synthetic oligonucleotide: CBLB-2868
cggcuacuggagccagg

SEQ ID NO: 32987 - RNA, 17 nt, Artificial Sequence
  Synthetic oligonucleotide: CBLB-2869
gguaaccuucuagcagg

SEQ ID NO: 32988 - RNA, 17 nt, Artificial Sequence
  Synthetic oligonucleotide: CBLB-2870
guuggaggccuggcagg

SEQ ID NO: 32989 - RNA, 17 nt, Artificial Sequence
  Synthetic oligonucleotide: CBLB-2871
agacuaugccuugcagg

SEQ ID NO: 32990 - RNA, 17 nt, Artificial Sequence
  Synthetic oligonucleotide: CBLB-2872
gguggaggucuuucagg

SEQ ID NO: 32991 - RNA, 17 nt, Artificial Sequence
  Synthetic oligonucleotide: CBLB-2873
auuagauccaggcgagg

SEQ ID NO: 32992 - RNA, 17 nt, Artificial Sequence
  Synthetic oligonucleotide: CBLB-2874
cuaugccuugcaggagg

SEQ ID NO: 32993 - RNA, 17 nt, Artificial Sequence
  Synthetic oligonucleotide: CBLB-2875
ucucuuaagggaggagg

SEQ ID NO: 32994 - RNA, 17 nt, Artificial Sequence
  Synthetic oligonucleotide: CBLB-2876
gugguaacuggaggagg

SEQ ID NO: 32995 - RNA, 17 nt, Artificial Sequence
  Synthetic oligonucleotide: CBLB-2877
ggaucucuuaagggagg

SEQ ID NO: 32996 - RNA, 17 nt, Artificial Sequence
  Synthetic oligonucleotide: CBLB-2878
acuuuaugcuagggagg

SEQ ID NO: 32997 - RNA, 17 nt, Artificial Sequence
  Synthetic oligonucleotide: CBLB-2879
gcaggaggugggggagg

SEQ ID NO: 32998 - RNA, 17 nt, Artificial Sequence
  Synthetic oligonucleotide: CBLB-2880
ccuggaauuuggggagg

SEQ ID NO: 32999 - RNA, 17 nt, Artificial Sequence
  Synthetic oligonucleotide: CBLB-2881
agggugguaacuggagg

SEQ ID NO: 33000 - RNA, 17 nt, Artificial Sequence
  Synthetic oligonucleotide: CBLB-2882
cguggggauacuggagg

SEQ ID NO: 33001 - RNA, 17 nt, Artificial Sequence
  Synthetic oligonucleotide: CBLB-2883
ucagguggcgguggagg

SEQ ID NO: 33002 - RNA, 17 nt, Artificial Sequence
  Synthetic oligonucleotide: CBLB-2884
accccaugggccugagg

SEQ ID NO: 33003 - RNA, 17 nt, Artificial Sequence
  Synthetic oligonucleotide: CBLB-2885
uucuuccuucagguagg

SEQ ID NO: 33004 - RNA, 17 nt, Artificial Sequence
  Synthetic oligonucleotide: CBLB-2886
cgcggucgugguuuagg

SEQ ID NO: 33005 - RNA, 17 nt, Artificial Sequence
  Synthetic oligonucleotide: CBLB-2887
ggucuuucagguggcgg

SEQ ID NO: 33006 - RNA, 17 nt, Artificial Sequence
  Synthetic oligonucleotide: CBLB-2888
ggaaggcaaauucucgg

SEQ ID NO: 33007 - RNA, 17 nt, Artificial Sequence
  Synthetic oligonucleotide: CBLB-2889
ggaggaucucuuaaggg

SEQ ID NO: 33008 - RNA, 17 nt, Artificial Sequence
  Synthetic oligonucleotide: CBLB-2890
aauucagggaaacaggg

SEQ ID NO: 33009 - RNA, 17 nt, Artificial Sequence
  Synthetic oligonucleotide: CBLB-2891
uaugcuagggaggaggg

SEQ ID NO: 33010 - RNA, 17 nt, Artificial Sequence
  Synthetic oligonucleotide: CBLB-2892
gugggagagauggaggg

SEQ ID NO: 33011 - RNA, 17 nt, Artificial Sequence
  Synthetic oligonucleotide: CBLB-2893
cucacuuuaugcuaggg

SEQ ID NO: 33012 - RNA, 17 nt, Artificial Sequence
  Synthetic oligonucleotide: CBLB-1271
aggcgaggaggcacggg

SEQ ID NO: 33013 - RNA, 17 nt, Artificial Sequence
  Synthetic oligonucleotide: CBLB-2894
augucgacuccuagggg

SEQ ID NO: 33014 - RNA, 17 nt, Artificial Sequence
  Synthetic oligonucleotide: CBLB-1321
ggaggagaaagccgggg

SEQ ID NO: 33015 - RNA, 17 nt, Artificial Sequence
  Synthetic oligonucleotide: CBLB-2895
cuugcaggagguggggg

SEQ ID NO: 33016 - RNA, 17 nt, Artificial Sequence
  Synthetic oligonucleotide: CBLB-2896
guuccuggaauuugggg

SEQ ID NO: 33017 - RNA, 17 nt, Artificial Sequence
  Synthetic oligonucleotide: CBLB-2897
aucuuuauccugauggg

SEQ ID NO: 33018 - RNA, 17 nt, Artificial Sequence
  Synthetic oligonucleotide: CBLB-2898
agguuucaaccuaaugg

SEQ ID NO: 33019 - RNA, 17 nt, Artificial Sequence
  Synthetic oligonucleotide: CBLB-2899
ggaggugggagagaugg

SEQ ID NO: 33020 - RNA, 17 nt, Artificial Sequence
  Synthetic oligonucleotide: CBLB-2900
aggagggugguaacugg

SEQ ID NO: 33021 - RNA, 17 nt, Artificial Sequence
  Synthetic oligonucleotide: CBLB-2901
agacguggggauacugg

SEQ ID NO: 33022 - RNA, 17 nt, Artificial Sequence
  Synthetic oligonucleotide: CBLB-2902
ggccagagcuaaucugg

SEQ ID NO: 33023 - RNA, 17 nt, Artificial Sequence
  Synthetic oligonucleotide: CBLB-2903
cucagucuauugucugg

SEQ ID NO: 33024 - RNA, 17 nt, Artificial Sequence
  Synthetic oligonucleotide: CBLB-2904
ggaggucuuucaggugg

SEQ ID NO: 33025 - RNA, 17 nt, Artificial Sequence
  Synthetic oligonucleotide: CBLB-2905
ugccuugcaggaggugg

SEQ ID NO: 33026 - RNA, 17 nt, Artificial Sequence
  Synthetic oligonucleotide: CBLB-2906
cuuucagguggcggugg

SEQ ID NO: 33027 - RNA, 17 nt, Artificial Sequence
  Synthetic oligonucleotide: CBLB-2907
ucuggugggauuggugg

SEQ ID NO: 33028 - RNA, 17 nt, Artificial Sequence
  Synthetic oligonucleotide: CBLB-2908
gcuucaagaggcauugg

SEQ ID NO: 33029 - RNA, 17 nt, Artificial Sequence
  Synthetic oligonucleotide: CBLB-2909
uugucuggugggauugg

SEQ ID NO: 33030 - RNA, 17 nt, Artificial Sequence
  Synthetic oligonucleotide: CBLB-2910
ggauugucccgaguugg

SEQ ID NO: 33031 - RNA, 17 nt, Artificial Sequence
  Synthetic oligonucleotide: CBLB-2911
gccgccucaggcccaug

SEQ ID NO: 33032 - RNA, 17 nt, Artificial Sequence
  Synthetic oligonucleotide: CBLB-2912
uagacacauccaucaug

SEQ ID NO: 33033 - RNA, 17 nt, Artificial Sequence
  Synthetic oligonucleotide: CBLB-2913
acuuuuauauggucaug

SEQ ID NO: 33034 - RNA, 17 nt, Artificial Sequence
  Synthetic oligonucleotide: CBLB-2914
cagacagugccuucaug

SEQ ID NO: 33035 - RNA, 17 nt, Artificial Sequence
  Synthetic oligonucleotide: CBLB-2915
gguggcaggcuuagaug

SEQ ID NO: 33036 - RNA, 17 nt, Artificial Sequence
  Synthetic oligonucleotide: CBLB-2916
cugacccagugcuuaug

SEQ ID NO: 33037 - RNA, 17 nt, Artificial Sequence
  Synthetic oligonucleotide: CBLB-2917
aauaagggcuuguuaug

SEQ ID NO: 33038 - RNA, 17 nt, Artificial Sequence
  Synthetic oligonucleotide: CBLB-2918
cauuggcuaugugacug

SEQ ID NO: 33039 - RNA, 17 nt, Artificial Sequence
  Synthetic oligonucleotide: CBLB-2919
auaguuagaucucccug

SEQ ID NO: 33040 - RNA, 17 nt, Artificial Sequence
  Synthetic oligonucleotide: CBLB-2920
aaaaccccaugggccug

SEQ ID NO: 33041 - RNA, 17 nt, Artificial Sequence
  Synthetic oligonucleotide: CBLB-2921
aaaaagauccuguccug

SEQ ID NO: 33042 - RNA, 17 nt, Artificial Sequence
  Synthetic oligonucleotide: CBLB-2922
aaucauuuuuauagcug

SEQ ID NO: 33043 - RNA, 17 nt, Artificial Sequence
  Synthetic oligonucleotide: CBLB-2923
uggagugggucaggcug

SEQ ID NO: 33044 - RNA, 17 nt, Artificial Sequence
  Synthetic oligonucleotide: CBLB-2924
gcccaugggguuuucug

SEQ ID NO: 33045 - RNA, 17 nt, Artificial Sequence
  Synthetic oligonucleotide: CBLB-2925
cuauagauuuagacgug

SEQ ID NO: 33046 - RNA, 17 nt, Artificial Sequence
  Synthetic oligonucleotide: CBLB-2926
cgacgaugaugaucgug

SEQ ID NO: 33047 - RNA, 17 nt, Artificial Sequence
  Synthetic oligonucleotide: CBLB-2927
augccuugcaggaggug

SEQ ID NO: 33048 - RNA, 17 nt, Artificial Sequence
  Synthetic oligonucleotide: CBLB-2928
gucaagauugagccuug

SEQ ID NO: 33049 - RNA, 17 nt, Artificial Sequence
  Synthetic oligonucleotide: CBLB-2929
uuuauuuuuuagccuug

SEQ ID NO: 33050 - RNA, 17 nt, Artificial Sequence
  Synthetic oligonucleotide: CBLB-2930
ugggacuaaucagcuug

SEQ ID NO: 33051 - RNA, 17 nt, Artificial Sequence
  Synthetic oligonucleotide: CBLB-2931
auuguuccuggaauuug

SEQ ID NO: 33052 - RNA, 17 nt, Artificial Sequence
  Synthetic oligonucleotide: CBLB-2932
cuuggggcucuauuuug

SEQ ID NO: 33053 - RNA, 17 nt, Artificial Sequence
  Synthetic oligonucleotide: CBLB-2933
gaauuauauugugaaau

SEQ ID NO: 33054 - RNA, 17 nt, Artificial Sequence
  Synthetic oligonucleotide: CBLB-2934
gcucuauuuugcggaau

SEQ ID NO: 33055 - RNA, 17 nt, Artificial Sequence
  Synthetic oligonucleotide: CBLB-2935
aguccuugaugaugaau

SEQ ID NO: 33056 - RNA, 17 nt, Artificial Sequence
  Synthetic oligonucleotide: CBLB-2936
gguaaaacuagaaacau

SEQ ID NO: 33057 - RNA, 17 nt, Artificial Sequence
  Synthetic oligonucleotide: CBLB-2937
acuuccaaggugaccau

SEQ ID NO: 33058 - RNA, 17 nt, Artificial Sequence
  Synthetic oligonucleotide: CBLB-2938
ucccuggaauugaccau

SEQ ID NO: 33059 - RNA, 17 nt, Artificial Sequence
  Synthetic oligonucleotide: CBLB-2939
accacagaaaaccccau

SEQ ID NO: 33060 - RNA, 17 nt, Artificial Sequence
  Synthetic oligonucleotide: CBLB-2940
ugccgccucaggcccau

SEQ ID NO: 33061 - RNA, 17 nt, Artificial Sequence
  Synthetic oligonucleotide: CBLB-2941
uugggacagugggccau

SEQ ID NO: 33062 - RNA, 17 nt, Artificial Sequence
  Synthetic oligonucleotide: CBLB-2942
ucguccaagucuagcau

SEQ ID NO: 33063 - RNA, 17 nt, Artificial Sequence
  Synthetic oligonucleotide: CBLB-2943
caugcuucaagaggcau

SEQ ID NO: 33064 - RNA, 17 nt, Artificial Sequence
  Synthetic oligonucleotide: CBLB-2944
ugggccugaggcggcau

SEQ ID NO: 33065 - RNA, 17 nt, Artificial Sequence
  Synthetic oligonucleotide: CBLB-2945
aaaauugcaaaacucau

SEQ ID NO: 33066 - RNA, 17 nt, Artificial Sequence
  Synthetic oligonucleotide: CBLB-2946
guuaaguugcacucgau

SEQ ID NO: 33067 - RNA, 17 nt, Artificial Sequence
  Synthetic oligonucleotide: CBLB-2947
gcuaugugacuggggau

SEQ ID NO: 33068 - RNA, 17 nt, Artificial Sequence
  Synthetic oligonucleotide: CBLB-2948
cuauugucuggugggau

SEQ ID NO: 33069 - RNA, 17 nt, Artificial Sequence
  Synthetic oligonucleotide: CBLB-2949
auagaaaaugcauggau

SEQ ID NO: 33070 - RNA, 17 nt, Artificial Sequence
  Synthetic oligonucleotide: CBLB-2950
guuaucuuuauccugau

SEQ ID NO: 33071 - RNA, 17 nt, Artificial Sequence
  Synthetic oligonucleotide: CBLB-2951
cuguucgguaagaguau

SEQ ID NO: 33072 - RNA, 17 nt, Artificial Sequence
  Synthetic oligonucleotide: CBLB-2952
aagggguccacgauuau

SEQ ID NO: 33073 - RNA, 17 nt, Artificial Sequence
  Synthetic oligonucleotide: CBLB-2953
cugccaggccuccaacu

SEQ ID NO: 33074 - RNA, 17 nt, Artificial Sequence
  Synthetic oligonucleotide: CBLB-2954
caggaggcaaaggaacu

SEQ ID NO: 33075 - RNA, 17 nt, Artificial Sequence
  Synthetic oligonucleotide: CBLB-2955
guuuccgcauaagcacu

SEQ ID NO: 33076 - RNA, 17 nt, Artificial Sequence
  Synthetic oligonucleotide: CBLB-2956
caugccgaugcuagacu

SEQ ID NO: 33077 - RNA, 17 nt, Artificial Sequence
  Synthetic oligonucleotide: CBLB-2957
ccauuggcuaugugacu

SEQ ID NO: 33078 - RNA, 17 nt, Artificial Sequence
  Synthetic oligonucleotide: CBLB-2958
caucaucuuccucuacu

SEQ ID NO: 33079 - RNA, 17 nt, Artificial Sequence
  Synthetic oligonucleotide: CBLB-2959
uuuuccaauggucaccu

SEQ ID NO: 33080 - RNA, 17 nt, Artificial Sequence
  Synthetic oligonucleotide: CBLB-2960
uuggagagcccuccccu

SEQ ID NO: 33081 - RNA, 17 nt, Artificial Sequence
  Synthetic oligonucleotide: CBLB-2961
uugaagcauggugcccu

SEQ ID NO: 33082 - RNA, 17 nt, Artificial Sequence
  Synthetic oligonucleotide: CBLB-2962
uuuuuauuuuuuagccu

SEQ ID NO: 33083 - RNA, 17 nt, Artificial Sequence
  Synthetic oligonucleotide: CBLB-2963
gugggaugucgacuccu

SEQ ID NO: 33084 - RNA, 17 nt, Artificial Sequence
  Synthetic oligonucleotide: CBLB-2964
aaaacucacuuuaugcu

SEQ ID NO: 33085 - RNA, 17 nt, Artificial Sequence
  Synthetic oligonucleotide: CBLB-2965
agggaggagguggugcu

SEQ ID NO: 33086 - RNA, 17 nt, Artificial Sequence
  Synthetic oligonucleotide: CBLB-2966
guuuuguguuauccucu

SEQ ID NO: 33087 - RNA, 17 nt, Artificial Sequence
  Synthetic oligonucleotide: CBLB-2967
cuggagccuucaucucu

SEQ ID NO: 33088 - RNA, 17 nt, Artificial Sequence
  Synthetic oligonucleotide: CBLB-2968
cuguggcuuucuucucu

SEQ ID NO: 33089 - RNA, 17 nt, Artificial Sequence
  Synthetic oligonucleotide: CBLB-2969
gagggaaggcaaauucu

SEQ ID NO: 33090 - RNA, 17 nt, Artificial Sequence
  Synthetic oligonucleotide: CBLB-2970
aacuucgacauuauucu

SEQ ID NO: 33091 - RNA, 17 nt, Artificial Sequence
  Synthetic oligonucleotide: CBLB-2971
guaugagaaauggaagu

SEQ ID NO: 33092 - RNA, 17 nt, Artificial Sequence
  Synthetic oligonucleotide: CBLB-2972
cacucgauugggacagu

SEQ ID NO: 33093 - RNA, 17 nt, Artificial Sequence
  Synthetic oligonucleotide: CBLB-2973
ggaaggcacaguagagu

SEQ ID NO: 33094 - RNA, 17 nt, Artificial Sequence
  Synthetic oligonucleotide: CBLB-2974
uuuggauugucccgagu

SEQ ID NO: 33095 - RNA, 17 nt, Artificial Sequence
  Synthetic oligonucleotide: CBLB-2975
ucuauuuguuuaggagu

SEQ ID NO: 33096 - RNA, 17 nt, Artificial Sequence
  Synthetic oligonucleotide: CBLB-2976
gaugugggaucuggagu

SEQ ID NO: 33097 - RNA, 17 nt, Artificial Sequence
  Synthetic oligonucleotide: CBLB-2977
uucauguucaggugagu

SEQ ID NO: 33098 - RNA, 17 nt, Artificial Sequence
  Synthetic oligonucleotide: CBLB-2978
gcuauagauuuagacgu

SEQ ID NO: 33099 - RNA, 17 nt, Artificial Sequence
  Synthetic oligonucleotide: CBLB-2979
accuuuggugaacccgu

SEQ ID NO: 33100 - RNA, 17 nt, Artificial Sequence
  Synthetic oligonucleotide: CBLB-2980
uucuucuuccuucaggu

SEQ ID NO: 33101 - RNA, 17 nt, Artificial Sequence
  Synthetic oligonucleotide: CBLB-2981
uaugccuugcaggaggu

SEQ ID NO: 33102 - RNA, 17 nt, Artificial Sequence
  Synthetic oligonucleotide: CBLB-2982
caggaggugggggaggu

SEQ ID NO: 33103 - RNA, 17 nt, Artificial Sequence
  Synthetic oligonucleotide: CBLB-2983
cuugaugaugaaucggu

SEQ ID NO: 33104 - RNA, 17 nt, Artificial Sequence
  Synthetic oligonucleotide: CBLB-2984
auucagggaaacagggu

SEQ ID NO: 33105 - RNA, 17 nt, Artificial Sequence
  Synthetic oligonucleotide: CBLB-2985
auuuuuuuuccccuggu

SEQ ID NO: 33106 - RNA, 17 nt, Artificial Sequence
  Synthetic oligonucleotide: CBLB-2986
ucagucuauugucuggu

SEQ ID NO: 33107 - RNA, 17 nt, Artificial Sequence
  Synthetic oligonucleotide: CBLB-2987
guggcaggcuuagaugu

SEQ ID NO: 33108 - RNA, 17 nt, Artificial Sequence
  Synthetic oligonucleotide: CBLB-2988
ugugagauuucgucugu

SEQ ID NO: 33109 - RNA, 17 nt, Artificial Sequence
  Synthetic oligonucleotide: CBLB-2989
auauggucaugaggugu

SEQ ID NO: 33110 - RNA, 17 nt, Artificial Sequence
  Synthetic oligonucleotide: CBLB-2990
ucaagauugagccuugu

SEQ ID NO: 33111 - RNA, 17 nt, Artificial Sequence
  Synthetic oligonucleotide: CBLB-2991
gggacuaaucagcuugu

SEQ ID NO: 33112 - RNA, 17 nt, Artificial Sequence
  Synthetic oligonucleotide: CBLB-2992
auauuguuccuggaauu

SEQ ID NO: 33113 - RNA, 17 nt, Artificial Sequence
  Synthetic oligonucleotide: CBLB-2993
gugaguuuuguugaauu

SEQ ID NO: 33114 - RNA, 17 nt, Artificial Sequence
  Synthetic oligonucleotide: CBLB-2994
cccuggaauugaccauu

SEQ ID NO: 33115 - RNA, 17 nt, Artificial Sequence
  Synthetic oligonucleotide: CBLB-2995
cuucucaucccuccauu

SEQ ID NO: 33116 - RNA, 17 nt, Artificial Sequence
  Synthetic oligonucleotide: CBLB-2996
uuaaguugcacucgauu

SEQ ID NO: 33117 - RNA, 17 nt, Artificial Sequence
  Synthetic oligonucleotide: CBLB-2997
uaaaauugaucuaccuu

SEQ ID NO: 33118 - RNA, 17 nt, Artificial Sequence
  Synthetic oligonucleotide: CBLB-2998
agcaucauugaccccuu

SEQ ID NO: 33119 - RNA, 17 nt, Artificial Sequence
  Synthetic oligonucleotide: CBLB-2999
uuuuauuuuuuagccuu

SEQ ID NO: 33120 - RNA, 17 nt, Artificial Sequence
  Synthetic oligonucleotide: CBLB-3000
agugaagaaccaugcuu

SEQ ID NO: 33121 - RNA, 17 nt, Artificial Sequence
  Synthetic oligonucleotide: CBLB-3001
ccuuuggugaacccguu

SEQ ID NO: 33122 - RNA, 17 nt, Artificial Sequence
  Synthetic oligonucleotide: CBLB-3002
gucuuaccuuccggguu

SEQ ID NO: 33123 - RNA, 17 nt, Artificial Sequence
  Synthetic oligonucleotide: CBLB-3003
auguaaaaccuccuguu

SEQ ID NO: 33124 - RNA, 17 nt, Artificial Sequence
  Synthetic oligonucleotide: CBLB-3004
ugcccucgggauguguu

SEQ ID NO: 33125 - RNA, 17 nt, Artificial Sequence
  Synthetic oligonucleotide: CBLB-3005
uauuguuccuggaauuu

SEQ ID NO: 33126 - RNA, 17 nt, Artificial Sequence
  Synthetic oligonucleotide: CBLB-3006
uuucuaguuuuaccuuu

SEQ ID NO: 33127 - RNA, 17 nt, Artificial Sequence
  Synthetic oligonucleotide: CBLB-3007
acucugaacuguccuuu

SEQ ID NO: 33128 - RNA, 17 nt, Artificial Sequence
  Synthetic oligonucleotide: CBLB-3008
gcugugauuccagguuu

SEQ ID NO: 33129 - RNA, 17 nt, Artificial Sequence
  Synthetic oligonucleotide: CBLB-3009
cugcgcggucgugguuu

SEQ ID NO: 33130 - RNA, 17 nt, Artificial Sequence
  Synthetic oligonucleotide: CBLB-3010
gcccucgggauguguuu

SEQ ID NO: 33131 - RNA, 17 nt, Artificial Sequence
  Synthetic oligonucleotide: CBLB-3011
gcauuuucuauuuguuu

SEQ ID NO: 33132 - RNA, 17 nt, Artificial Sequence
  Synthetic oligonucleotide: CBLB-3012
uucuggagaaaguuuuu

SEQ ID NO: 33133 - RNA, 20 nt, Artificial Sequence
  Synthetic oligonucleotide: CBLB-3013
cugugcaagguggaaaaaaa

SEQ ID NO: 33134 - RNA, 20 nt, Artificial Sequence
  Synthetic oligonucleotide: CBLB-3014
ucugugcaagguggaaaaaa

SEQ ID NO: 33135 - RNA, 20 nt, Artificial Sequence
  Synthetic oligonucleotide: CBLB-3015
cagaacuguagacaccaaaa

SEQ ID NO: 33136 - RNA, 20 nt, Artificial Sequence
  Synthetic oligonucleotide: CBLB-3016
ccacuugcuagaucaacaaa

SEQ ID NO: 33137 - RNA, 20 nt, Artificial Sequence
  Synthetic oligonucleotide: CBLB-3017
ucuagcaucggcaugccaaa

SEQ ID NO: 33138 - RNA, 20 nt, Artificial Sequence
  Synthetic oligonucleotide: CBLB-3018
ccuucaucucuuggaucaaa

SEQ ID NO: 33139 - RNA, 20 nt, Artificial Sequence
  Synthetic oligonucleotide: CBLB-3019
uuauuucacaacgacagaaa

SEQ ID NO: 33140 - RNA, 20 nt, Artificial Sequence
  Synthetic oligonucleotide: CBLB-3020
aggauuguaaguaugagaaa

SEQ ID NO: 33141 - RNA, 20 nt, Artificial Sequence
  Synthetic oligonucleotide: CBLB-3021
auaugaauuauauugugaaa

SEQ ID NO: 33142 - RNA, 20 nt, Artificial Sequence
  Synthetic oligonucleotide: CBLB-3022
uucugucguugugaaauaaa

SEQ ID NO: 33143 - RNA, 20 nt, Artificial Sequence
  Synthetic oligonucleotide: CBLB-3023
gacuuaagcauauauuuaaa

SEQ ID NO: 33144 - RNA, 20 nt, Artificial Sequence
  Synthetic oligonucleotide: CBLB-3024
gccacuugcuagaucaacaa

SEQ ID NO: 33145 - RNA, 20 nt, Artificial Sequence
  Synthetic oligonucleotide: CBLB-3025
gauuucgucuguaggcacaa

SEQ ID NO: 33146 - RNA, 20 nt, Artificial Sequence
  Synthetic oligonucleotide: CBLB-3026
cagcccaacggguucaccaa

SEQ ID NO: 33147 - RNA, 20 nt, Artificial Sequence
  Synthetic oligonucleotide: CBLB-3027
aucucccuguggcagcccaa

SEQ ID NO: 33148 - RNA, 20 nt, Artificial Sequence
  Synthetic oligonucleotide: CBLB-3028
aucaaagcaaucuuucccaa

SEQ ID NO: 33149 - RNA, 20 nt, Artificial Sequence
  Synthetic oligonucleotide: CBLB-3029
auccccagucacauagccaa

SEQ ID NO: 33150 - RNA, 20 nt, Artificial Sequence
  Synthetic oligonucleotide: CBLB-3030
gucuagcaucggcaugccaa

SEQ ID NO: 33151 - RNA, 20 nt, Artificial Sequence
  Synthetic oligonucleotide: CBLB-3031
uacuuucaggucuuuuccaa

SEQ ID NO: 33152 - RNA, 20 nt, Artificial Sequence
  Synthetic oligonucleotide: CBLB-3032
uagcucuggccuggaagcaa

SEQ ID NO: 33153 - RNA, 20 nt, Artificial Sequence
  Synthetic oligonucleotide: CBLB-3033
aaccuucuagcaggaggcaa

SEQ ID NO: 33154 - RNA, 20 nt, Artificial Sequence
  Synthetic oligonucleotide: CBLB-3034
uggcuuucuucucugggcaa

SEQ ID NO: 33155 - RNA, 20 nt, Artificial Sequence
  Synthetic oligonucleotide: CBLB-3035
gccuucaucucuuggaucaa

SEQ ID NO: 33156 - RNA, 20 nt, Artificial Sequence
  Synthetic oligonucleotide: CBLB-3036
acagcgaguucaaaugucaa

SEQ ID NO: 33157 - RNA, 20 nt, Artificial Sequence
  Synthetic oligonucleotide: CBLB-3037
ggcucucuucaccucuucaa

SEQ ID NO: 33158 - RNA, 20 nt, Artificial Sequence
  Synthetic oligonucleotide: CBLB-3038
cuucaccugcauuuaaagaa

SEQ ID NO: 33159 - RNA, 20 nt, Artificial Sequence
  Synthetic oligonucleotide: CBLB-3039
uuuauuucacaacgacagaa

SEQ ID NO: 33160 - RNA, 20 nt, Artificial Sequence
  Synthetic oligonucleotide: CBLB-3040
cgccuggaucuaauucagaa

SEQ ID NO: 33161 - RNA, 20 nt, Artificial Sequence
  Synthetic oligonucleotide: CBLB-3041
ucgguuggcaaacguccgaa

SEQ ID NO: 33162 - RNA, 20 nt, Artificial Sequence
  Synthetic oligonucleotide: CBLB-3042
aauggucacuguaugcugaa

SEQ ID NO: 33163 - RNA, 20 nt, Artificial Sequence
  Synthetic oligonucleotide: CBLB-3043
ucaaucagggcuugaaauaa

SEQ ID NO: 33164 - RNA, 20 nt, Artificial Sequence
  Synthetic oligonucleotide: CBLB-3044
cagcaugugacugaagauaa

SEQ ID NO: 33165 - RNA, 20 nt, Artificial Sequence
  Synthetic oligonucleotide: CBLB-3045
uccuuuaggucuugugauaa

SEQ ID NO: 33166 - RNA, 20 nt, Artificial Sequence
  Synthetic oligonucleotide: CBLB-3046
uuuuaaagguuucaaccuaa

SEQ ID NO: 33167 - RNA, 20 nt, Artificial Sequence
  Synthetic oligonucleotide: CBLB-3047
accauuaucacaagaccuaa

SEQ ID NO: 33168 - RNA, 20 nt, Artificial Sequence
  Synthetic oligonucleotide: CBLB-3048
ucugaaagagaauuugcuaa

SEQ ID NO: 33169 - RNA, 20 nt, Artificial Sequence
  Synthetic oligonucleotide: CBLB-3049
cuuaccuuagcuccuucuaa

SEQ ID NO: 33170 - RNA, 20 nt, Artificial Sequence
  Synthetic oligonucleotide: CBLB-3050
ggaggccuggcaggugguaa

SEQ ID NO: 33171 - RNA, 20 nt, Artificial Sequence
  Synthetic oligonucleotide: CBLB-3051
gguggaggaggaucucuuaa

SEQ ID NO: 33172 - RNA, 20 nt, Artificial Sequence
  Synthetic oligonucleotide: CBLB-3052
ugacuuaagcauauauuuaa

SEQ ID NO: 33173 - RNA, 20 nt, Artificial Sequence
  Synthetic oligonucleotide: CBLB-3053
guuguucaaaacuuuuuuaa

SEQ ID NO: 33174 - RNA, 20 nt, Artificial Sequence
  Synthetic oligonucleotide: CBLB-3054
gaaagguaaaacuagaaaca

SEQ ID NO: 33175 - RNA, 20 nt, Artificial Sequence
  Synthetic oligonucleotide: CBLB-3055
guugugaauucagggaaaca

SEQ ID NO: 33176 - RNA, 20 nt, Artificial Sequence
  Synthetic oligonucleotide: CBLB-3056
agguauaaucauuagcaaca

SEQ ID NO: 33177 - RNA, 20 nt, Artificial Sequence
  Synthetic oligonucleotide: CBLB-3057
uguaugcugaauggaacaca

SEQ ID NO: 33178 - RNA, 20 nt, Artificial Sequence
  Synthetic oligonucleotide: CBLB-3058
gugcacaucaaaugcccaca

SEQ ID NO: 33179 - RNA, 20 nt, Artificial Sequence
  Synthetic oligonucleotide: CBLB-3059
gaacccguugggcugccaca

SEQ ID NO: 33180 - RNA, 20 nt, Artificial Sequence
  Synthetic oligonucleotide: CBLB-3060
agauuucgucuguaggcaca

SEQ ID NO: 33181 - RNA, 20 nt, Artificial Sequence
  Synthetic oligonucleotide: CBLB-3061
ugugacacauccagguuaca

SEQ ID NO: 33182 - RNA, 20 nt, Artificial Sequence
  Synthetic oligonucleotide: CBLB-3062
acggaccaguacaccuacca

SEQ ID NO: 33183 - RNA, 20 nt, Artificial Sequence
  Synthetic oligonucleotide: CBLB-3063
ugcacagaacuaucguacca

SEQ ID NO: 33184 - RNA, 20 nt, Artificial Sequence
  Synthetic oligonucleotide: CBLB-3064
auucaccacagaaaacccca

SEQ ID NO: 33185 - RNA, 20 nt, Artificial Sequence
  Synthetic oligonucleotide: CBLB-3065
uuccgcaaaauagagcccca

SEQ ID NO: 33186 - RNA, 20 nt, Artificial Sequence
  Synthetic oligonucleotide: CBLB-3066
ccaaugccgccucaggccca

SEQ ID NO: 33187 - RNA, 20 nt, Artificial Sequence
  Synthetic oligonucleotide: CBLB-3067
uuucccaauggucaauucca

SEQ ID NO: 33188 - RNA, 20 nt, Artificial Sequence
  Synthetic oligonucleotide: CBLB-3068
caucauauucuucacuucca

SEQ ID NO: 33189 - RNA, 20 nt, Artificial Sequence
  Synthetic oligonucleotide: CBLB-3069
cacugucugaauacuuucca

SEQ ID NO: 33190 - RNA, 20 nt, Artificial Sequence
  Synthetic oligonucleotide: CBLB-3070
acucgggacaauccaaagca

SEQ ID NO: 33191 - RNA, 20 nt, Artificial Sequence
  Synthetic oligonucleotide: CBLB-3071
cgccaaugccucuugaagca

SEQ ID NO: 33192 - RNA, 20 nt, Artificial Sequence
  Synthetic oligonucleotide: CBLB-3072
agcccugauugauggcagca

SEQ ID NO: 33193 - RNA, 20 nt, Artificial Sequence
  Synthetic oligonucleotide: CBLB-3073
uagauccaggcgaggaggca

SEQ ID NO: 33194 - RNA, 20 nt, Artificial Sequence
  Synthetic oligonucleotide: CBLB-3074
gcaccucuugccuuacggca

SEQ ID NO: 33195 - RNA, 20 nt, Artificial Sequence
  Synthetic oligonucleotide: CBLB-3075
guggcuuucuucucugggca

SEQ ID NO: 33196 - RNA, 20 nt, Artificial Sequence
  Synthetic oligonucleotide: CBLB-3076
ccuggcaggugguaauggca

SEQ ID NO: 33197 - RNA, 20 nt, Artificial Sequence
  Synthetic oligonucleotide: CBLB-3077
cuaaacaaauagaaaaugca

SEQ ID NO: 33198 - RNA, 20 nt, Artificial Sequence
  Synthetic oligonucleotide: CBLB-3078
ucuuguuuucucaccaugca

SEQ ID NO: 33199 - RNA, 20 nt, Artificial Sequence
  Synthetic oligonucleotide: CBLB-3079
caccucccccaccuccugca

SEQ ID NO: 33200 - RNA, 20 nt, Artificial Sequence
  Synthetic oligonucleotide: CBLB-3080
ugguacgauaguucugugca

SEQ ID NO: 33201 - RNA, 20 nt, Artificial Sequence
  Synthetic oligonucleotide: CBLB-3081
ucuuuagucuucuccuugca

SEQ ID NO: 33202 - RNA, 20 nt, Artificial Sequence
  Synthetic oligonucleotide: CBLB-3082
cuccuucuaaaggcaaauca

SEQ ID NO: 33203 - RNA, 20 nt, Artificial Sequence
  Synthetic oligonucleotide: CBLB-3083
uucccugcugccaucaauca

SEQ ID NO: 33204 - RNA, 20 nt, Artificial Sequence
  Synthetic oligonucleotide: CBLB-3084
ugccaaccgauucaucauca

SEQ ID NO: 33205 - RNA, 20 nt, Artificial Sequence
  Synthetic oligonucleotide: CBLB-3085
ugcaaaaauugcaaaacuca

SEQ ID NO: 33206 - RNA, 20 nt, Artificial Sequence
  Synthetic oligonucleotide: CBLB-3086
uuaaauauaugcuuaaguca

SEQ ID NO: 33207 - RNA, 20 nt, Artificial Sequence
  Synthetic oligonucleotide: CBLB-3087
guuuaggagucggaugguca

SEQ ID NO: 33208 - RNA, 20 nt, Artificial Sequence
  Synthetic oligonucleotide: CBLB-3088
augagaugguugugaauuca

SEQ ID NO: 33209 - RNA, 20 nt, Artificial Sequence
  Synthetic oligonucleotide: CBLB-3089
uuugauuucuucucugaaga

SEQ ID NO: 33210 - RNA, 20 nt, Artificial Sequence
  Synthetic oligonucleotide: CBLB-3090
ucuuuaaaaaucuacacaga

SEQ ID NO: 33211 - RNA, 20 nt, Artificial Sequence
  Synthetic oligonucleotide: CBLB-3091
augagaagaucauaaucaga

SEQ ID NO: 33212 - RNA, 20 nt, Artificial Sequence
  Synthetic oligonucleotide: CBLB-3092
ggugggggaggugggagaga

SEQ ID NO: 33213 - RNA, 20 nt, Artificial Sequence
  Synthetic oligonucleotide: CBLB-3093
auugcaaaacucaugggaga

SEQ ID NO: 33214 - RNA, 20 nt, Artificial Sequence
  Synthetic oligonucleotide: CBLB-3094
uuuacauuaugacaaugaga

SEQ ID NO: 33215 - RNA, 20 nt, Artificial Sequence
  Synthetic oligonucleotide: CBLB-3095
uuccuuugccuccugcuaga

SEQ ID NO: 33216 - RNA, 20 nt, Artificial Sequence
  Synthetic oligonucleotide: CBLB-3096
cgccaugauuugccuuuaga

SEQ ID NO: 33217 - RNA, 20 nt, Artificial Sequence
  Synthetic oligonucleotide: CBLB-3097
uagucccaaacacaucccga

SEQ ID NO: 33218 - RNA, 20 nt, Artificial Sequence
  Synthetic oligonucleotide: CBLB-3098
ucacuuuaugcuagggagga

SEQ ID NO: 33219 - RNA, 20 nt, Artificial Sequence
  Synthetic oligonucleotide: CBLB-3099
uuccuggaauuuggggagga

SEQ ID NO: 33220 - RNA, 20 nt, Artificial Sequence
  Synthetic oligonucleotide: CBLB-3100
gacguggggauacuggagga

SEQ ID NO: 33221 - RNA, 20 nt, Artificial Sequence
  Synthetic oligonucleotide: CBLB-3101
aaaagauccuguccugagga

SEQ ID NO: 33222 - RNA, 20 nt, Artificial Sequence
  Synthetic oligonucleotide: CBLB-3102
ucuucuuccuucagguagga

SEQ ID NO: 33223 - RNA, 20 nt, Artificial Sequence
  Synthetic oligonucleotide: CBLB-3103
aauauagcaccaaacccgga

SEQ ID NO: 33224 - RNA, 20 nt, Artificial Sequence
  Synthetic oligonucleotide: CBLB-3104
cuauuuguuuaggagucgga

SEQ ID NO: 33225 - RNA, 20 nt, Artificial Sequence
  Synthetic oligonucleotide: CBLB-3105
cugauugauggcagcaggga

SEQ ID NO: 33226 - RNA, 20 nt, Artificial Sequence
  Synthetic oligonucleotide: CBLB-3106
uggggauacuggaggaggga

SEQ ID NO: 33227 - RNA, 20 nt, Artificial Sequence
  Synthetic oligonucleotide: CBLB-3107
aggugggagagauggaggga

SEQ ID NO: 33228 - RNA, 20 nt, Artificial Sequence
  Synthetic oligonucleotide: CBLB-3108
ggaugucgacuccuagggga

SEQ ID NO: 33229 - RNA, 20 nt, Artificial Sequence
  Synthetic oligonucleotide: CBLB-3109
auuggcuaugugacugggga

SEQ ID NO: 33230 - RNA, 20 nt, Artificial Sequence
  Synthetic oligonucleotide: CBLB-3110
cgaguucaaaugucaaugga

SEQ ID NO: 33231 - RNA, 20 nt, Artificial Sequence
  Synthetic oligonucleotide: CBLB-3111
aaagguuucaaccuaaugga

SEQ ID NO: 33232 - RNA, 20 nt, Artificial Sequence
  Synthetic oligonucleotide: CBLB-3112
ggggaggugggagagaugga

SEQ ID NO: 33233 - RNA, 20 nt, Artificial Sequence
  Synthetic oligonucleotide: CBLB-3113
ggcauuggcgggucucugga

SEQ ID NO: 33234 - RNA, 20 nt, Artificial Sequence
  Synthetic oligonucleotide: CBLB-3114
gccaacucaccugaacauga

SEQ ID NO: 33235 - RNA, 20 nt, Artificial Sequence
  Synthetic oligonucleotide: CBLB-3115
aaggcacgcuuuccacauga

SEQ ID NO: 33236 - RNA, 20 nt, Artificial Sequence
  Synthetic oligonucleotide: CBLB-3116
uaaucugguggaccucauga

SEQ ID NO: 33237 - RNA, 20 nt, Artificial Sequence
  Synthetic oligonucleotide: CBLB-3117
cccuuugauccaagagauga

SEQ ID NO: 33238 - RNA, 20 nt, Artificial Sequence
  Synthetic oligonucleotide: CBLB-3118
agggaaacagggugggauga

SEQ ID NO: 33239 - RNA, 20 nt, Artificial Sequence
  Synthetic oligonucleotide: CBLB-3119
ggcuuuucccuccuaccuga

SEQ ID NO: 33240 - RNA, 20 nt, Artificial Sequence
  Synthetic oligonucleotide: CBLB-3120
uucaguuaucuuuauccuga

SEQ ID NO: 33241 - RNA, 20 nt, Artificial Sequence
  Synthetic oligonucleotide: CBLB-3121
uuauuucaagcccugauuga

SEQ ID NO: 33242 - RNA, 20 nt, Artificial Sequence
  Synthetic oligonucleotide: CBLB-3122
aucaaucagggcuugaaaua

SEQ ID NO: 33243 - RNA, 20 nt, Artificial Sequence
  Synthetic oligonucleotide: CBLB-3123
ccagcaugugacugaagaua

SEQ ID NO: 33244 - RNA, 20 nt, Artificial Sequence
  Synthetic oligonucleotide: CBLB-3124
uuaccuguguaacuuuuaua

SEQ ID NO: 33245 - RNA, 20 nt, Artificial Sequence
  Synthetic oligonucleotide: CBLB-3125
uugugggaugucgacuccua

SEQ ID NO: 33246 - RNA, 20 nt, Artificial Sequence
  Synthetic oligonucleotide: CBLB-3126
uuugccuuuagaaggagcua

SEQ ID NO: 33247 - RNA, 20 nt, Artificial Sequence
  Synthetic oligonucleotide: CBLB-3127
acaaaacucacuuuaugcua

SEQ ID NO: 33248 - RNA, 20 nt, Artificial Sequence
  Synthetic oligonucleotide: CBLB-3128
auuauucugggcuaucucua

SEQ ID NO: 33249 - RNA, 20 nt, Artificial Sequence
  Synthetic oligonucleotide: CBLB-3129
ccuccuguucgguaagagua

SEQ ID NO: 33250 - RNA, 20 nt, Artificial Sequence
  Synthetic oligonucleotide: CBLB-3130
auuauaccugccaugccgua

SEQ ID NO: 33251 - RNA, 20 nt, Artificial Sequence
  Synthetic oligonucleotide: CBLB-3131
auauaaaaguuacacaggua

SEQ ID NO: 33252 - RNA, 20 nt, Artificial Sequence
  Synthetic oligonucleotide: CBLB-3132
uaagggcuuguuaugaggua

SEQ ID NO: 33253 - RNA, 20 nt, Artificial Sequence
  Synthetic oligonucleotide: CBLB-3133
aucaaagggguccacgauua

SEQ ID NO: 33254 - RNA, 20 nt, Artificial Sequence
  Synthetic oligonucleotide: CBLB-3134
gaugugcaccucuugccuua

SEQ ID NO: 33255 - RNA, 20 nt, Artificial Sequence
  Synthetic oligonucleotide: CBLB-3135
cgguggaggaggaucucuua

SEQ ID NO: 33256 - RNA, 20 nt, Artificial Sequence
  Synthetic oligonucleotide: CBLB-3136
uagaaacauggguuuaguua

SEQ ID NO: 33257 - RNA, 20 nt, Artificial Sequence
  Synthetic oligonucleotide: CBLB-3137
uccugcgcggucgugguuua

SEQ ID NO: 33258 - RNA, 20 nt, Artificial Sequence
  Synthetic oligonucleotide: CBLB-3138
gguugugaauucagggaaac

SEQ ID NO: 33259 - RNA, 20 nt, Artificial Sequence
  Synthetic oligonucleotide: CBLB-3139
ucucccuguggcagcccaac

SEQ ID NO: 33260 - RNA, 20 nt, Artificial Sequence
  Synthetic oligonucleotide: CBLB-3140
agcaugguucuucacucaac

SEQ ID NO: 33261 - RNA, 20 nt, Artificial Sequence
  Synthetic oligonucleotide: CBLB-3141
ugcccauacucuuaccgaac

SEQ ID NO: 33262 - RNA, 20 nt, Artificial Sequence
  Synthetic oligonucleotide: CBLB-3142
cuagggaggagggugguaac

SEQ ID NO: 33263 - RNA, 20 nt, Artificial Sequence
  Synthetic oligonucleotide: CBLB-3143
ccaaucgagugcaacuuaac

SEQ ID NO: 33264 - RNA, 20 nt, Artificial Sequence
  Synthetic oligonucleotide: CBLB-3144
aguuauaauccugauuuaac

SEQ ID NO: 33265 - RNA, 20 nt, Artificial Sequence
  Synthetic oligonucleotide: CBLB-3145
ugaccauauaaaaguuacac

SEQ ID NO: 33266 - RNA, 20 nt, Artificial Sequence
  Synthetic oligonucleotide: CBLB-3146
ugaacccguugggcugccac

SEQ ID NO: 33267 - RNA, 20 nt, Artificial Sequence
  Synthetic oligonucleotide: CBLB-3147
cuguguuuccgcauaagcac

SEQ ID NO: 33268 - RNA, 20 nt, Artificial Sequence
  Synthetic oligonucleotide: CBLB-3148
agauccaggcgaggaggcac

SEQ ID NO: 33269 - RNA, 20 nt, Artificial Sequence
  Synthetic oligonucleotide: CBLB-3149
cuggcaggugguaauggcac

SEQ ID NO: 33270 - RNA, 20 nt, Artificial Sequence
  Synthetic oligonucleotide: CBLB-3150
caaaacuaacagaacaucac

SEQ ID NO: 33271 - RNA, 20 nt, Artificial Sequence
  Synthetic oligonucleotide: CBLB-3151
aaucuacacagaugguucac

SEQ ID NO: 33272 - RNA, 20 nt, Artificial Sequence
  Synthetic oligonucleotide: CBLB-3152
uagccggccauccucaggac

SEQ ID NO: 33273 - RNA, 20 nt, Artificial Sequence
  Synthetic oligonucleotide: CBLB-3153
uucuguucuagugcacugac

SEQ ID NO: 33274 - RNA, 20 nt, Artificial Sequence
  Synthetic oligonucleotide: CBLB-3154
gaggauccuggugaugugac

SEQ ID NO: 33275 - RNA, 20 nt, Artificial Sequence
  Synthetic oligonucleotide: CBLB-3155
ugggccauuggcuaugugac

SEQ ID NO: 33276 - RNA, 20 nt, Artificial Sequence
  Synthetic oligonucleotide: CBLB-3156
agauuuagacguggggauac

SEQ ID NO: 33277 - RNA, 20 nt, Artificial Sequence
  Synthetic oligonucleotide: CBLB-3157
uccugaggauggccggcuac

SEQ ID NO: 33278 - RNA, 20 nt, Artificial Sequence
  Synthetic oligonucleotide: CBLB-3158
ucaucaucaucuuccucuac

SEQ ID NO: 33279 - RNA, 20 nt, Artificial Sequence
  Synthetic oligonucleotide: CBLB-3159
uuuuccccugguagguguac

SEQ ID NO: 33280 - RNA, 20 nt, Artificial Sequence
  Synthetic oligonucleotide: CBLB-3160
ggggagggcucuccaaaacc

SEQ ID NO: 33281 - RNA, 20 nt, Artificial Sequence
  Synthetic oligonucleotide: CBLB-3161
cagaaauauagcaccaaacc

SEQ ID NO: 33282 - RNA, 20 nt, Artificial Sequence
  Synthetic oligonucleotide: CBLB-3162
gugagaaaugccauguaacc

SEQ ID NO: 33283 - RNA, 20 nt, Artificial Sequence
  Synthetic oligonucleotide: CBLB-3163
gucaaugaugcugcaacacc

SEQ ID NO: 33284 - RNA, 20 nt, Artificial Sequence
  Synthetic oligonucleotide: CBLB-3164
aacucaccagucacaucacc

SEQ ID NO: 33285 - RNA, 20 nt, Artificial Sequence
  Synthetic oligonucleotide: CBLB-3165
uuaguuuugacauuuucacc

SEQ ID NO: 33286 - RNA, 20 nt, Artificial Sequence
  Synthetic oligonucleotide: CBLB-3166
aacggaccaguacaccuacc

SEQ ID NO: 33287 - RNA, 20 nt, Artificial Sequence
  Synthetic oligonucleotide: CBLB-3167
ccuccugcuagaagguuacc

SEQ ID NO: 33288 - RNA, 20 nt, Artificial Sequence
  Synthetic oligonucleotide: CBLB-3168
uugaauuugauauuuuuacc

SEQ ID NO: 33289 - RNA, 20 nt, Artificial Sequence
  Synthetic oligonucleotide: CBLB-3169
agauuggauuuuuuuucccc

SEQ ID NO: 33290 - RNA, 20 nt, Artificial Sequence
  Synthetic oligonucleotide: CBLB-3170
aagaauaugauguuccuccc

SEQ ID NO: 33291 - RNA, 20 nt, Artificial Sequence
  Synthetic oligonucleotide: CBLB-3171
ugauacgaaaguuaucuccc

SEQ ID NO: 33292 - RNA, 20 nt, Artificial Sequence
  Synthetic oligonucleotide: CBLB-3172
uggaggaggaggagaaagcc

SEQ ID NO: 33293 - RNA, 20 nt, Artificial Sequence
  Synthetic oligonucleotide: CBLB-3173
uaaacuuaccugaaacagcc

SEQ ID NO: 33294 - RNA, 20 nt, Artificial Sequence
  Synthetic oligonucleotide: CBLB-3174
gauggccggcuacuggagcc

SEQ ID NO: 33295 - RNA, 20 nt, Artificial Sequence
  Synthetic oligonucleotide: CBLB-3175
gccacccgugccuccucgcc

SEQ ID NO: 33296 - RNA, 20 nt, Artificial Sequence
  Synthetic oligonucleotide: CBLB-3176
auugucccgaguuggaggcc

SEQ ID NO: 33297 - RNA, 20 nt, Artificial Sequence
  Synthetic oligonucleotide: CBLB-3177
ccaccagauuagcucuggcc

SEQ ID NO: 33298 - RNA, 20 nt, Artificial Sequence
  Synthetic oligonucleotide: CBLB-3178
ccgugccauuaccaccugcc

SEQ ID NO: 33299 - RNA, 20 nt, Artificial Sequence
  Synthetic oligonucleotide: CBLB-3179
agaauaaugucgaaguugcc

SEQ ID NO: 33300 - RNA, 20 nt, Artificial Sequence
  Synthetic oligonucleotide: CBLB-3180
uucuuagcugugacacaucc

SEQ ID NO: 33301 - RNA, 20 nt, Artificial Sequence
  Synthetic oligonucleotide: CBLB-3181
ugccuuucugaauuagaucc

SEQ ID NO: 33302 - RNA, 20 nt, Artificial Sequence
  Synthetic oligonucleotide: CBLB-3182
ugggcaaggggagaggaucc

SEQ ID NO: 33303 - RNA, 20 nt, Artificial Sequence
  Synthetic oligonucleotide: CBLB-3183
auugaacauucaaaaccucc

SEQ ID NO: 33304 - RNA, 20 nt, Artificial Sequence
  Synthetic oligonucleotide: CBLB-3184
auccaagagaugaaggcucc

SEQ ID NO: 33305 - RNA, 20 nt, Artificial Sequence
  Synthetic oligonucleotide: CBLB-3185
aaauucucggaggaugcucc

SEQ ID NO: 33306 - RNA, 20 nt, Artificial Sequence
  Synthetic oligonucleotide: CBLB-3186
cucccuccuccccaaauucc

SEQ ID NO: 33307 - RNA, 20 nt, Artificial Sequence
  Synthetic oligonucleotide: CBLB-3187
cuuucccaauggucaauucc

SEQ ID NO: 33308 - RNA, 20 nt, Artificial Sequence
  Synthetic oligonucleotide: CBLB-3188
uuugaacucgcugugauucc

SEQ ID NO: 33309 - RNA, 20 nt, Artificial Sequence
  Synthetic oligonucleotide: CBLB-3189
gcuaaaaagucuuaccuucc

SEQ ID NO: 33310 - RNA, 20 nt, Artificial Sequence
  Synthetic oligonucleotide: CBLB-3190
auuuuagagccauugcuucc

SEQ ID NO: 33311 - RNA, 20 nt, Artificial Sequence
  Synthetic oligonucleotide: CBLB-3191
aauauaauucauauuguucc

SEQ ID NO: 33312 - RNA, 20 nt, Artificial Sequence
  Synthetic oligonucleotide: CBLB-3192
cuggaggaggaggagaaagc

SEQ ID NO: 33313 - RNA, 20 nt, Artificial Sequence
  Synthetic oligonucleotide: CBLB-3193
aagcccugauugauggcagc

SEQ ID NO: 33314 - RNA, 20 nt, Artificial Sequence
  Synthetic oligonucleotide: CBLB-3194
ucaccugguaaccuucuagc

SEQ ID NO: 33315 - RNA, 20 nt, Artificial Sequence
  Synthetic oligonucleotide: CBLB-3195
aaccuccuggcuccaguagc

SEQ ID NO: 33316 - RNA, 20 nt, Artificial Sequence
  Synthetic oligonucleotide: CBLB-3196
ccccuaaaccacgaccgcgc

SEQ ID NO: 33317 - RNA, 20 nt, Artificial Sequence
  Synthetic oligonucleotide: CBLB-3197
cucuugccuuacggcauggc

SEQ ID NO: 33318 - RNA, 20 nt, Artificial Sequence
  Synthetic oligonucleotide: CBLB-3198
gauccuguccugaggauggc

SEQ ID NO: 33319 - RNA, 20 nt, Artificial Sequence
  Synthetic oligonucleotide: CBLB-3199
ucccgaguuggaggccuggc

SEQ ID NO: 33320 - RNA, 20 nt, Artificial Sequence
  Synthetic oligonucleotide: CBLB-3200
cgugguuuagggggucuggc

SEQ ID NO: 33321 - RNA, 20 nt, Artificial Sequence
  Synthetic oligonucleotide: CBLB-3201
ggcgaggaggcacggguggc

SEQ ID NO: 33322 - RNA, 20 nt, Artificial Sequence
  Synthetic oligonucleotide: CBLB-3202
augcuucaagaggcauuggc

SEQ ID NO: 33323 - RNA, 20 nt, Artificial Sequence
  Synthetic oligonucleotide: CBLB-3203
aucgaccuuucuuuaaaugc

SEQ ID NO: 33324 - RNA, 20 nt, Artificial Sequence
  Synthetic oligonucleotide: CBLB-3204
ccuuaucuucagucacaugc

SEQ ID NO: 33325 - RNA, 20 nt, Artificial Sequence
  Synthetic oligonucleotide: CBLB-3205
cuuaagggaggagguggugc

SEQ ID NO: 33326 - RNA, 20 nt, Artificial Sequence
  Synthetic oligonucleotide: CBLB-3206
ucaaugagacuaugccuugc

SEQ ID NO: 33327 - RNA, 20 nt, Artificial Sequence
  Synthetic oligonucleotide: CBLB-3207
ucacauaauccaguuaaauc

SEQ ID NO: 33328 - RNA, 20 nt, Artificial Sequence
  Synthetic oligonucleotide: CBLB-3208
cuucccugcugccaucaauc

SEQ ID NO: 33329 - RNA, 20 nt, Artificial Sequence
  Synthetic oligonucleotide: CBLB-3209
cuuccaggccagagcuaauc

SEQ ID NO: 33330 - RNA, 20 nt, Artificial Sequence
  Synthetic oligonucleotide: CBLB-3210
ggauuauaacuccucccauc

SEQ ID NO: 33331 - RNA, 20 nt, Artificial Sequence
  Synthetic oligonucleotide: CBLB-3211
gcaggcuuagaugugggauc

SEQ ID NO: 33332 - RNA, 20 nt, Artificial Sequence
  Synthetic oligonucleotide: CBLB-3212
accugccaggccuccaacuc

SEQ ID NO: 33333 - RNA, 20 nt, Artificial Sequence
  Synthetic oligonucleotide: CBLB-3213
ucuugaagcauggugcccuc

SEQ ID NO: 33334 - RNA, 20 nt, Artificial Sequence
  Synthetic oligonucleotide: CBLB-3214
acauuuuccaaugccgccuc

SEQ ID NO: 33335 - RNA, 20 nt, Artificial Sequence
  Synthetic oligonucleotide: CBLB-3215
uccaguagccggccauccuc

SEQ ID NO: 33336 - RNA, 20 nt, Artificial Sequence
  Synthetic oligonucleotide: CBLB-3216
gagguccaccagauuagcuc

SEQ ID NO: 33337 - RNA, 20 nt, Artificial Sequence
  Synthetic oligonucleotide: CBLB-3217
caaauucucggaggaugcuc

SEQ ID NO: 33338 - RNA, 20 nt, Artificial Sequence
  Synthetic oligonucleotide: CBLB-3218
aagaggcauuggcgggucuc

SEQ ID NO: 33339 - RNA, 20 nt, Artificial Sequence
  Synthetic oligonucleotide: CBLB-3219
caggcuguggcuuucuucuc

SEQ ID NO: 33340 - RNA, 20 nt, Artificial Sequence
  Synthetic oligonucleotide: CBLB-3220
uuuaaauauaugcuuaaguc

SEQ ID NO: 33341 - RNA, 20 nt, Artificial Sequence
  Synthetic oligonucleotide: CBLB-3221
cggucgugguuuaggggguc

SEQ ID NO: 33342 - RNA, 20 nt, Artificial Sequence
  Synthetic oligonucleotide: CBLB-3222
ugugggaucuggaguggguc

SEQ ID NO: 33343 - RNA, 20 nt, Artificial Sequence
  Synthetic oligonucleotide: CBLB-3223
uguuuaggagucggaugguc

SEQ ID NO: 33344 - RNA, 20 nt, Artificial Sequence
  Synthetic oligonucleotide: CBLB-3224
ugucuacucagucuauuguc

SEQ ID NO: 33345 - RNA, 20 nt, Artificial Sequence
  Synthetic oligonucleotide: CBLB-3225
aagcagaugcugcugaauuc

SEQ ID NO: 33346 - RNA, 20 nt, Artificial Sequence
  Synthetic oligonucleotide: CBLB-3226
aaugagaugguugugaauuc

SEQ ID NO: 33347 - RNA, 20 nt, Artificial Sequence
  Synthetic oligonucleotide: CBLB-3227
gggcaacuucgacauuauuc

SEQ ID NO: 33348 - RNA, 20 nt, Artificial Sequence
  Synthetic oligonucleotide: CBLB-3228
ugcuaaaaagucuuaccuuc

SEQ ID NO: 33349 - RNA, 20 nt, Artificial Sequence
  Synthetic oligonucleotide: CBLB-3229
gaucuuuuucuucuuccuuc

SEQ ID NO: 33350 - RNA, 20 nt, Artificial Sequence
  Synthetic oligonucleotide: CBLB-3230
cauuuuggugucuacaguuc

SEQ ID NO: 33351 - RNA, 20 nt, Artificial Sequence
  Synthetic oligonucleotide: CBLB-3231
gaucagcuuccuucauguuc

SEQ ID NO: 33352 - RNA, 20 nt, Artificial Sequence
  Synthetic oligonucleotide: CBLB-3232
gguuuucuguggugaauuuc

SEQ ID NO: 33353 - RNA, 20 nt, Artificial Sequence
  Synthetic oligonucleotide: CBLB-3233
uaacaauuugauuuacuuuc

SEQ ID NO: 33354 - RNA, 20 nt, Artificial Sequence
  Synthetic oligonucleotide: CBLB-3234
gggauugguggaggucuuuc

SEQ ID NO: 33355 - RNA, 20 nt, Artificial Sequence
  Synthetic oligonucleotide: CBLB-3235
uauuuuuaccaggcuguuuc

SEQ ID NO: 33356 - RNA, 20 nt, Artificial Sequence
  Synthetic oligonucleotide: CBLB-3236
uguuuugcagcuauauuuuc

SEQ ID NO: 33357 - RNA, 20 nt, Artificial Sequence
  Synthetic oligonucleotide: CBLB-3237
aaucuuacagagcugaaaag

SEQ ID NO: 33358 - RNA, 20 nt, Artificial Sequence
  Synthetic oligonucleotide: CBLB-3238
cuagcaucggcaugccaaag

SEQ ID NO: 33359 - RNA, 20 nt, Artificial Sequence
  Synthetic oligonucleotide: CBLB-3239
cuucaucucuuggaucaaag

SEQ ID NO: 33360 - RNA, 20 nt, Artificial Sequence
  Synthetic oligonucleotide: CBLB-3240
cccuuuguugaucuagcaag

SEQ ID NO: 33361 - RNA, 20 nt, Artificial Sequence
  Synthetic oligonucleotide: CBLB-3241
cugccaugccguaaggcaag

SEQ ID NO: 33362 - RNA, 20 nt, Artificial Sequence
  Synthetic oligonucleotide: CBLB-3242
ggcuuucuucucugggcaag

SEQ ID NO: 33363 - RNA, 20 nt, Artificial Sequence
  Synthetic oligonucleotide: CBLB-3243
cgagggcaccaugcuucaag

SEQ ID NO: 33364 - RNA, 20 nt, Artificial Sequence
  Synthetic oligonucleotide: CBLB-3244
agaggguuaugccuuugaag

SEQ ID NO: 33365 - RNA, 20 nt, Artificial Sequence
  Synthetic oligonucleotide: CBLB-3245
guugcacucgauugggacag

SEQ ID NO: 33366 - RNA, 20 nt, Artificial Sequence
  Synthetic oligonucleotide: CBLB-3246
cggaccaguacaccuaccag

SEQ ID NO: 33367 - RNA, 20 nt, Artificial Sequence
  Synthetic oligonucleotide: CBLB-3247
gaugagaagaucauaaucag

SEQ ID NO: 33368 - RNA, 20 nt, Artificial Sequence
  Synthetic oligonucleotide: CBLB-3248
ugguaauggcacgggaucag

SEQ ID NO: 33369 - RNA, 20 nt, Artificial Sequence
  Synthetic oligonucleotide: CBLB-3249
caauggaaggcacaguagag

SEQ ID NO: 33370 - RNA, 20 nt, Artificial Sequence
  Synthetic oligonucleotide: CBLB-3250
ucuucucugggcaaggggag

SEQ ID NO: 33371 - RNA, 20 nt, Artificial Sequence
  Synthetic oligonucleotide: CBLB-3251
aauugcaaaacucaugggag

SEQ ID NO: 33372 - RNA, 20 nt, Artificial Sequence
  Synthetic oligonucleotide: CBLB-3252
ggaggagguggugcugggag

SEQ ID NO: 33373 - RNA, 20 nt, Artificial Sequence
  Synthetic oligonucleotide: CBLB-3253
cuuagaugugggaucuggag

SEQ ID NO: 33374 - RNA, 20 nt, Artificial Sequence
  Synthetic oligonucleotide: CBLB-3254
ugugggaugucgacuccuag

SEQ ID NO: 33375 - RNA, 20 nt, Artificial Sequence
  Synthetic oligonucleotide: CBLB-3255
gaaucaaaaacaucuccuag

SEQ ID NO: 33376 - RNA, 20 nt, Artificial Sequence
  Synthetic oligonucleotide: CBLB-3256
gaaaacaagagacccaguag

SEQ ID NO: 33377 - RNA, 20 nt, Artificial Sequence
  Synthetic oligonucleotide: CBLB-3257
ccugcgcggucgugguuuag

SEQ ID NO: 33378 - RNA, 20 nt, Artificial Sequence
  Synthetic oligonucleotide: CBLB-3258
ggcugcuauagauuuagacg

SEQ ID NO: 33379 - RNA, 20 nt, Artificial Sequence
  Synthetic oligonucleotide: CBLB-3259
uuagucccaaacacaucccg

SEQ ID NO: 33380 - RNA, 20 nt, Artificial Sequence
  Synthetic oligonucleotide: CBLB-1080
ggaggaggaggagaaagccg

SEQ ID NO: 33381 - RNA, 20 nt, Artificial Sequence
  Synthetic oligonucleotide: CBLB-3260
uucugaauuagauccaggcg

SEQ ID NO: 33382 - RNA, 20 nt, Artificial Sequence
  Synthetic oligonucleotide: CBLB-3261
auuucuggugcaguccugcg

SEQ ID NO: 33383 - RNA, 20 nt, Artificial Sequence
  Synthetic oligonucleotide: CBLB-3262
aggaacugagcccauaaucg

SEQ ID NO: 33384 - RNA, 20 nt, Artificial Sequence
  Synthetic oligonucleotide: CBLB-3263
ggugcaguccugcgcggucg

SEQ ID NO: 33385 - RNA, 20 nt, Artificial Sequence
  Synthetic oligonucleotide: CBLB-3264
uacgauaguucugugcaagg

SEQ ID NO: 33386 - RNA, 20 nt, Artificial Sequence
  Synthetic oligonucleotide: CBLB-3265
ccauacucuuaccgaacagg

SEQ ID NO: 33387 - RNA, 20 nt, Artificial Sequence
  Synthetic oligonucleotide: CBLB-3266
ggccggcuacuggagccagg

SEQ ID NO: 33388 - RNA, 20 nt, Artificial Sequence
  Synthetic oligonucleotide: CBLB-3267
ccugguaaccuucuagcagg

SEQ ID NO: 33389 - RNA, 20 nt, Artificial Sequence
  Synthetic oligonucleotide: CBLB-3268
cgaguuggaggccuggcagg

SEQ ID NO: 33390 - RNA, 20 nt, Artificial Sequence
  Synthetic oligonucleotide: CBLB-3269
augagacuaugccuugcagg

SEQ ID NO: 33391 - RNA, 20 nt, Artificial Sequence
  Synthetic oligonucleotide: CBLB-3270
auugguggaggucuuucagg

SEQ ID NO: 33392 - RNA, 20 nt, Artificial Sequence
  Synthetic oligonucleotide: CBLB-3271
ugaauuagauccaggcgagg

SEQ ID NO: 33393 - RNA, 20 nt, Artificial Sequence
  Synthetic oligonucleotide: CBLB-3272
agacuaugccuugcaggagg

SEQ ID NO: 33394 - RNA, 20 nt, Artificial Sequence
  Synthetic oligonucleotide: CBLB-3273
ggaucucuuaagggaggagg

SEQ ID NO: 33395 - RNA, 20 nt, Artificial Sequence
  Synthetic oligonucleotide: CBLB-3274
agggugguaacuggaggagg

SEQ ID NO: 33396 - RNA, 20 nt, Artificial Sequence
  Synthetic oligonucleotide: CBLB-3275
ggaggaucucuuaagggagg

SEQ ID NO: 33397 - RNA, 20 nt, Artificial Sequence
  Synthetic oligonucleotide: CBLB-3276
cucacuuuaugcuagggagg

SEQ ID NO: 33398 - RNA, 20 nt, Artificial Sequence
  Synthetic oligonucleotide: CBLB-3277
cuugcaggaggugggggagg

SEQ ID NO: 33399 - RNA, 20 nt, Artificial Sequence
  Synthetic oligonucleotide: CBLB-3278
guuccuggaauuuggggagg

SEQ ID NO: 33400 - RNA, 20 nt, Artificial Sequence
  Synthetic oligonucleotide: CBLB-3279
aggagggugguaacuggagg

SEQ ID NO: 33401 - RNA, 20 nt, Artificial Sequence
  Synthetic oligonucleotide: CBLB-3280
agacguggggauacuggagg

SEQ ID NO: 33402 - RNA, 20 nt, Artificial Sequence
  Synthetic oligonucleotide: CBLB-3281
cuuucagguggcgguggagg

SEQ ID NO: 33403 - RNA, 20 nt, Artificial Sequence
  Synthetic oligonucleotide: CBLB-3282
aaaaccccaugggccugagg

SEQ ID NO: 33404 - RNA, 20 nt, Artificial Sequence
  Synthetic oligonucleotide: CBLB-3283
uucuucuuccuucagguagg

SEQ ID NO: 33405 - RNA, 20 nt, Artificial Sequence
  Synthetic oligonucleotide: CBLB-3284
cugcgcggucgugguuuagg

SEQ ID NO: 33406 - RNA, 20 nt, Artificial Sequence
  Synthetic oligonucleotide: CBLB-3285
ggaggucuuucagguggcgg

SEQ ID NO: 33407 - RNA, 20 nt, Artificial Sequence
  Synthetic oligonucleotide: CBLB-3286
gagggaaggcaaauucucgg

SEQ ID NO: 33408 - RNA, 20 nt, Artificial Sequence
  Synthetic oligonucleotide: CBLB-3287
ggaggaggaucucuuaaggg

SEQ ID NO: 33409 - RNA, 20 nt, Artificial Sequence
  Synthetic oligonucleotide: CBLB-3288
gugaauucagggaaacaggg

SEQ ID NO: 33410 - RNA, 20 nt, Artificial Sequence
  Synthetic oligonucleotide: CBLB-3289
cuuuaugcuagggaggaggg

SEQ ID NO: 33411 - RNA, 20 nt, Artificial Sequence
  Synthetic oligonucleotide: CBLB-3290
gaggugggagagauggaggg

SEQ ID NO: 33412 - RNA, 20 nt, Artificial Sequence
  Synthetic oligonucleotide: CBLB-3291
aaacucacuuuaugcuaggg

SEQ ID NO: 33413 - RNA, 20 nt, Artificial Sequence
  Synthetic oligonucleotide: CBLB-3292
uccaggcgaggaggcacggg

SEQ ID NO: 33414 - RNA, 20 nt, Artificial Sequence
  Synthetic oligonucleotide: CBLB-3293
gggaugucgacuccuagggg

SEQ ID NO: 33415 - RNA, 20 nt, Artificial Sequence
  Synthetic oligonucleotide: CBLB-1079
ggaggaggagaaagccgggg

SEQ ID NO: 33416 - RNA, 20 nt, Artificial Sequence
  Synthetic oligonucleotide: CBLB-3294
ugccuugcaggagguggggg

SEQ ID NO: 33417 - RNA, 20 nt, Artificial Sequence
  Synthetic oligonucleotide: CBLB-3295
auuguuccuggaauuugggg

SEQ ID NO: 33418 - RNA, 20 nt, Artificial Sequence
  Synthetic oligonucleotide: CBLB-3296
guuaucuuuauccugauggg

SEQ ID NO: 33419 - RNA, 20 nt, Artificial Sequence
  Synthetic oligonucleotide: CBLB-3297
uaaagguuucaaccuaaugg

SEQ ID NO: 33420 - RNA, 20 nt, Artificial Sequence
  Synthetic oligonucleotide: CBLB-3298
gggggaggugggagagaugg

SEQ ID NO: 33421 - RNA, 20 nt, Artificial Sequence
  Synthetic oligonucleotide: CBLB-3299
gggaggagggugguaacugg

SEQ ID NO: 33422 - RNA, 20 nt, Artificial Sequence
  Synthetic oligonucleotide: CBLB-3300
uuuagacguggggauacugg

SEQ ID NO: 33423 - RNA, 20 nt, Artificial Sequence
  Synthetic oligonucleotide: CBLB-3301
ccaggccagagcuaaucugg

SEQ ID NO: 33424 - RNA, 20 nt, Artificial Sequence
  Synthetic oligonucleotide: CBLB-3302
cuacucagucuauugucugg

SEQ ID NO: 33425 - RNA, 20 nt, Artificial Sequence
  Synthetic oligonucleotide: CBLB-3303
gguggaggucuuucaggugg

SEQ ID NO: 33426 - RNA, 20 nt, Artificial Sequence
  Synthetic oligonucleotide: CBLB-3304
cuaugccuugcaggaggugg

SEQ ID NO: 33427 - RNA, 20 nt, Artificial Sequence
  Synthetic oligonucleotide: CBLB-3305
ggucuuucagguggcggugg

SEQ ID NO: 33428 - RNA, 20 nt, Artificial Sequence
  Synthetic oligonucleotide: CBLB-3306
uugucuggugggauuggugg

SEQ ID NO: 33429 - RNA, 20 nt, Artificial Sequence
  Synthetic oligonucleotide: CBLB-3307
caugcuucaagaggcauugg

SEQ ID NO: 33430 - RNA, 20 nt, Artificial Sequence
  Synthetic oligonucleotide: CBLB-3308
cuauugucuggugggauugg

SEQ ID NO: 33431 - RNA, 20 nt, Artificial Sequence
  Synthetic oligonucleotide: CBLB-3309
uuuggauugucccgaguugg

SEQ ID NO: 33432 - RNA, 20 nt, Artificial Sequence
  Synthetic oligonucleotide: CBLB-3310
aaugccgccucaggcccaug

SEQ ID NO: 33433 - RNA, 20 nt, Artificial Sequence
  Synthetic oligonucleotide: CBLB-3311
gaguagacacauccaucaug

SEQ ID NO: 33434 - RNA, 20 nt, Artificial Sequence
  Synthetic oligonucleotide: CBLB-3312
guaacuuuuauauggucaug

SEQ ID NO: 33435 - RNA, 20 nt, Artificial Sequence
  Synthetic oligonucleotide: CBLB-3313
auucagacagugccuucaug

SEQ ID NO: 33436 - RNA, 20 nt, Artificial Sequence
  Synthetic oligonucleotide: CBLB-3314
acggguggcaggcuuagaug

SEQ ID NO: 33437 - RNA, 20 nt, Artificial Sequence
  Synthetic oligonucleotide: CBLB-3315
gcucugacccagugcuuaug

SEQ ID NO: 33438 - RNA, 20 nt, Artificial Sequence
  Synthetic oligonucleotide: CBLB-3316
ugaaauaagggcuuguuaug

SEQ ID NO: 33439 - RNA, 20 nt, Artificial Sequence
  Synthetic oligonucleotide: CBLB-3317
ggccauuggcuaugugacug

SEQ ID NO: 33440 - RNA, 20 nt, Artificial Sequence
  Synthetic oligonucleotide: CBLB-3318
ggcauaguuagaucucccug

SEQ ID NO: 33441 - RNA, 20 nt, Artificial Sequence
  Synthetic oligonucleotide: CBLB-3319
cagaaaaccccaugggccug

SEQ ID NO: 33442 - RNA, 20 nt, Artificial Sequence
  Synthetic oligonucleotide: CBLB-3320
aagaaaaagauccuguccug

SEQ ID NO: 33443 - RNA, 20 nt, Artificial Sequence
  Synthetic oligonucleotide: CBLB-3321
aaaaaucauuuuuauagcug

SEQ ID NO: 33444 - RNA, 20 nt, Artificial Sequence
  Synthetic oligonucleotide: CBLB-3322
aucuggagugggucaggcug

SEQ ID NO: 33445 - RNA, 20 nt, Artificial Sequence
  Synthetic oligonucleotide: CBLB-3323
caggcccaugggguuuucug

SEQ ID NO: 33446 - RNA, 20 nt, Artificial Sequence
  Synthetic oligonucleotide: CBLB-3324
cugcuauagauuuagacgug

SEQ ID NO: 33447 - RNA, 20 nt, Artificial Sequence
  Synthetic oligonucleotide: CBLB-3325
ggacgacgaugaugaucgug

SEQ ID NO: 33448 - RNA, 20 nt, Artificial Sequence
  Synthetic oligonucleotide: CBLB-3326
acuaugccuugcaggaggug

SEQ ID NO: 33449 - RNA, 20 nt, Artificial Sequence
  Synthetic oligonucleotide: CBLB-3327
gaugucaagauugagccuug

SEQ ID NO: 33450 - RNA, 20 nt, Artificial Sequence
  Synthetic oligonucleotide: CBLB-3328
uuuuuuauuuuuuagccuug

SEQ ID NO: 33451 - RNA, 20 nt, Artificial Sequence
  Synthetic oligonucleotide: CBLB-3329
guuugggacuaaucagcuug

SEQ ID NO: 33452 - RNA, 20 nt, Artificial Sequence
  Synthetic oligonucleotide: CBLB-3330
cauauuguuccuggaauuug

SEQ ID NO: 33453 - RNA, 20 nt, Artificial Sequence
  Synthetic oligonucleotide: CBLB-3331
agccuuggggcucuauuuug

SEQ ID NO: 33454 - RNA, 20 nt, Artificial Sequence
  Synthetic oligonucleotide: CBLB-3332
uaugaauuauauugugaaau

SEQ ID NO: 33455 - RNA, 20 nt, Artificial Sequence
  Synthetic oligonucleotide: CBLB-3333
ggggcucuauuuugcggaau

SEQ ID NO: 33456 - RNA, 20 nt, Artificial Sequence
  Synthetic oligonucleotide: CBLB-3334
aggaguccuugaugaugaau

SEQ ID NO: 33457 - RNA, 20 nt, Artificial Sequence
  Synthetic oligonucleotide: CBLB-3335
aaagguaaaacuagaaacau

SEQ ID NO: 33458 - RNA, 20 nt, Artificial Sequence
  Synthetic oligonucleotide: CBLB-3336
uucacuuccaaggugaccau

SEQ ID NO: 33459 - RNA, 20 nt, Artificial Sequence
  Synthetic oligonucleotide: CBLB-3337
aucucccuggaauugaccau

SEQ ID NO: 33460 - RNA, 20 nt, Artificial Sequence
  Synthetic oligonucleotide: CBLB-3338
uucaccacagaaaaccccau

SEQ ID NO: 33461 - RNA, 20 nt, Artificial Sequence
  Synthetic oligonucleotide: CBLB-3339
caaugccgccucaggcccau

SEQ ID NO: 33462 - RNA, 20 nt, Artificial Sequence
  Synthetic oligonucleotide: CBLB-3340
cgauugggacagugggccau

SEQ ID NO: 33463 - RNA, 20 nt, Artificial Sequence
  Synthetic oligonucleotide: CBLB-3341
ucgucguccaagucuagcau

SEQ ID NO: 33464 - RNA, 20 nt, Artificial Sequence
  Synthetic oligonucleotide: CBLB-3342
caccaugcuucaagaggcau

SEQ ID NO: 33465 - RNA, 20 nt, Artificial Sequence
  Synthetic oligonucleotide: CBLB-3343
ccaugggccugaggcggcau

SEQ ID NO: 33466 - RNA, 20 nt, Artificial Sequence
  Synthetic oligonucleotide: CBLB-3344
gcaaaaauugcaaaacucau

SEQ ID NO: 33467 - RNA, 20 nt, Artificial Sequence
  Synthetic oligonucleotide: CBLB-3345
ccgguuaaguugcacucgau

SEQ ID NO: 33468 - RNA, 20 nt, Artificial Sequence
  Synthetic oligonucleotide: CBLB-3346
uuggcuaugugacuggggau

SEQ ID NO: 33469 - RNA, 20 nt, Artificial Sequence
  Synthetic oligonucleotide: CBLB-3347
agucuauugucuggugggau

SEQ ID NO: 33470 - RNA, 20 nt, Artificial Sequence
  Synthetic oligonucleotide: CBLB-3348
caaauagaaaaugcauggau

SEQ ID NO: 33471 - RNA, 20 nt, Artificial Sequence
  Synthetic oligonucleotide: CBLB-3349
ucaguuaucuuuauccugau

SEQ ID NO: 33472 - RNA, 20 nt, Artificial Sequence
  Synthetic oligonucleotide: CBLB-3350
cuccuguucgguaagaguau

SEQ ID NO: 33473 - RNA, 20 nt, Artificial Sequence
  Synthetic oligonucleotide: CBLB-3351
ucaaagggguccacgauuau

SEQ ID NO: 33474 - RNA, 20 nt, Artificial Sequence
  Synthetic oligonucleotide: CBLB-3352
caccugccaggccuccaacu

SEQ ID NO: 33475 - RNA, 20 nt, Artificial Sequence
  Synthetic oligonucleotide: CBLB-3353
uagcaggaggcaaaggaacu

SEQ ID NO: 33476 - RNA, 20 nt, Artificial Sequence
  Synthetic oligonucleotide: CBLB-3354
uguguuuccgcauaagcacu

SEQ ID NO: 33477 - RNA, 20 nt, Artificial Sequence
  Synthetic oligonucleotide: CBLB-3355
uggcaugccgaugcuagacu

SEQ ID NO: 33478 - RNA, 20 nt, Artificial Sequence
  Synthetic oligonucleotide: CBLB-3356
gggccauuggcuaugugacu

SEQ ID NO: 33479 - RNA, 20 nt, Artificial Sequence
  Synthetic oligonucleotide: CBLB-3357
caucaucaucuuccucuacu

SEQ ID NO: 33480 - RNA, 20 nt, Artificial Sequence
  Synthetic oligonucleotide: CBLB-3358
gucuuuuccaauggucaccu

SEQ ID NO: 33481 - RNA, 20 nt, Artificial Sequence
  Synthetic oligonucleotide: CBLB-3359
guuuuggagagcccuccccu

SEQ ID NO: 33482 - RNA, 20 nt, Artificial Sequence
  Synthetic oligonucleotide: CBLB-3360
cucuugaagcauggugcccu

SEQ ID NO: 33483 - RNA, 20 nt, Artificial Sequence
  Synthetic oligonucleotide: CBLB-3361
auuuuuuuauuuuuuagccu

SEQ ID NO: 33484 - RNA, 20 nt, Artificial Sequence
  Synthetic oligonucleotide: CBLB-3362
cuugugggaugucgacuccu

SEQ ID NO: 33485 - RNA, 20 nt, Artificial Sequence
  Synthetic oligonucleotide: CBLB-3363
aacaaaacucacuuuaugcu

SEQ ID NO: 33486 - RNA, 20 nt, Artificial Sequence
  Synthetic oligonucleotide: CBLB-3364
uuaagggaggagguggugcu

SEQ ID NO: 33487 - RNA, 20 nt, Artificial Sequence
  Synthetic oligonucleotide: CBLB-3365
aagguuuuguguuauccucu

SEQ ID NO: 33488 - RNA, 20 nt, Artificial Sequence
  Synthetic oligonucleotide: CBLB-3366
caccuggagccuucaucucu

SEQ ID NO: 33489 - RNA, 20 nt, Artificial Sequence
  Synthetic oligonucleotide: CBLB-3367
aggcuguggcuuucuucucu

SEQ ID NO: 33490 - RNA, 20 nt, Artificial Sequence
  Synthetic oligonucleotide: CBLB-3368
gaggagggaaggcaaauucu

SEQ ID NO: 33491 - RNA, 20 nt, Artificial Sequence
  Synthetic oligonucleotide: CBLB-3369
ggcaacuucgacauuauucu

SEQ ID NO: 33492 - RNA, 20 nt, Artificial Sequence
  Synthetic oligonucleotide: CBLB-3370
uaaguaugagaaauggaagu

SEQ ID NO: 33493 - RNA, 20 nt, Artificial Sequence
  Synthetic oligonucleotide: CBLB-3371
uugcacucgauugggacagu

SEQ ID NO: 33494 - RNA, 20 nt, Artificial Sequence
  Synthetic oligonucleotide: CBLB-3372
aauggaaggcacaguagagu

SEQ ID NO: 33495 - RNA, 20 nt, Artificial Sequence
  Synthetic oligonucleotide: CBLB-3373
ugcuuuggauugucccgagu

SEQ ID NO: 33496 - RNA, 20 nt, Artificial Sequence
  Synthetic oligonucleotide: CBLB-3374
uuuucuauuuguuuaggagu

SEQ ID NO: 33497 - RNA, 20 nt, Artificial Sequence
  Synthetic oligonucleotide: CBLB-3375
uuagaugugggaucuggagu

SEQ ID NO: 33498 - RNA, 20 nt, Artificial Sequence
  Synthetic oligonucleotide: CBLB-3376
uccuucauguucaggugagu

SEQ ID NO: 33499 - RNA, 20 nt, Artificial Sequence
  Synthetic oligonucleotide: CBLB-3377
gcugcuauagauuuagacgu

SEQ ID NO: 33500 - RNA, 20 nt, Artificial Sequence
  Synthetic oligonucleotide: CBLB-3378
ucuaccuuuggugaacccgu

SEQ ID NO: 33501 - RNA, 20 nt, Artificial Sequence
  Synthetic oligonucleotide: CBLB-3379
uuuuucuucuuccuucaggu

SEQ ID NO: 33502 - RNA, 20 nt, Artificial Sequence
  Synthetic oligonucleotide: CBLB-3380
gacuaugccuugcaggaggu

SEQ ID NO: 33503 - RNA, 20 nt, Artificial Sequence
  Synthetic oligonucleotide: CBLB-3381
uugcaggaggugggggaggu

SEQ ID NO: 33504 - RNA, 20 nt, Artificial Sequence
  Synthetic oligonucleotide: CBLB-3382
guccuugaugaugaaucggu

SEQ ID NO: 33505 - RNA, 20 nt, Artificial Sequence
  Synthetic oligonucleotide: CBLB-3383
ugaauucagggaaacagggu

SEQ ID NO: 33506 - RNA, 20 nt, Artificial Sequence
  Synthetic oligonucleotide: CBLB-3384
uggauuuuuuuuccccuggu

SEQ ID NO: 33507 - RNA, 20 nt, Artificial Sequence
  Synthetic oligonucleotide: CBLB-3385
uacucagucuauugucuggu

SEQ ID NO: 33508 - RNA, 20 nt, Artificial Sequence
  Synthetic oligonucleotide: CBLB-3386
cggguggcaggcuuagaugu

SEQ ID NO: 33509 - RNA, 20 nt, Artificial Sequence
  Synthetic oligonucleotide: CBLB-3387
uuuugugagauuucgucugu

SEQ ID NO: 33510 - RNA, 20 nt, Artificial Sequence
  Synthetic oligonucleotide: CBLB-3388
uuuauauggucaugaggugu

SEQ ID NO: 33511 - RNA, 20 nt, Artificial Sequence
  Synthetic oligonucleotide: CBLB-3389
augucaagauugagccuugu

SEQ ID NO: 33512 - RNA, 20 nt, Artificial Sequence
  Synthetic oligonucleotide: CBLB-3390
uuugggacuaaucagcuugu

SEQ ID NO: 33513 - RNA, 20 nt, Artificial Sequence
  Synthetic oligonucleotide: CBLB-3391
uucauauuguuccuggaauu

SEQ ID NO: 33514 - RNA, 20 nt, Artificial Sequence
  Synthetic oligonucleotide: CBLB-3392
aaagugaguuuuguugaauu

SEQ ID NO: 33515 - RNA, 20 nt, Artificial Sequence
  Synthetic oligonucleotide: CBLB-3393
ucucccuggaauugaccauu

SEQ ID NO: 33516 - RNA, 20 nt, Artificial Sequence
  Synthetic oligonucleotide: CBLB-3394
gaucuucucaucccuccauu

SEQ ID NO: 33517 - RNA, 20 nt, Artificial Sequence
  Synthetic oligonucleotide: CBLB-3395
cgguuaaguugcacucgauu

SEQ ID NO: 33518 - RNA, 20 nt, Artificial Sequence
  Synthetic oligonucleotide: CBLB-3396
uaauaaaauugaucuaccuu

SEQ ID NO: 33519 - RNA, 20 nt, Artificial Sequence
  Synthetic oligonucleotide: CBLB-3397
ugcagcaucauugaccccuu

SEQ ID NO: 33520 - RNA, 20 nt, Artificial Sequence
  Synthetic oligonucleotide: CBLB-3398
uuuuuuuauuuuuuagccuu

SEQ ID NO: 33521 - RNA, 20 nt, Artificial Sequence
  Synthetic oligonucleotide: CBLB-3399
uugagugaagaaccaugcuu

SEQ ID NO: 33522 - RNA, 20 nt, Artificial Sequence
  Synthetic oligonucleotide: CBLB-3400
cuaccuuuggugaacccguu

SEQ ID NO: 33523 - RNA, 20 nt, Artificial Sequence
  Synthetic oligonucleotide: CBLB-3401
aaagucuuaccuuccggguu

SEQ ID NO: 33524 - RNA, 20 nt, Artificial Sequence
  Synthetic oligonucleotide: CBLB-3402
auaauguaaaaccuccuguu

SEQ ID NO: 33525 - RNA, 20 nt, Artificial Sequence
  Synthetic oligonucleotide: CBLB-3403
uggugcccucgggauguguu

SEQ ID NO: 33526 - RNA, 20 nt, Artificial Sequence
  Synthetic oligonucleotide: CBLB-3404
ucauauuguuccuggaauuu

SEQ ID NO: 33527 - RNA, 20 nt, Artificial Sequence
  Synthetic oligonucleotide: CBLB-3405
auguuucuaguuuuaccuuu

SEQ ID NO: 33528 - RNA, 20 nt, Artificial Sequence
  Synthetic oligonucleotide: CBLB-3406
uuuacucugaacuguccuuu

SEQ ID NO: 33529 - RNA, 20 nt, Artificial Sequence
  Synthetic oligonucleotide: CBLB-3407
cucgcugugauuccagguuu

SEQ ID NO: 33530 - RNA, 20 nt, Artificial Sequence
  Synthetic oligonucleotide: CBLB-3408
guccugcgcggucgugguuu

SEQ ID NO: 33531 - RNA, 20 nt, Artificial Sequence
  Synthetic oligonucleotide: CBLB-3409
ggugcccucgggauguguuu

SEQ ID NO: 33532 - RNA, 20 nt, Artificial Sequence
  Synthetic oligonucleotide: CBLB-3410
caugcauuuucuauuuguuu

SEQ ID NO: 33533 - RNA, 20 nt, Artificial Sequence
  Synthetic oligonucleotide: CBLB-3411
gaauucuggagaaaguuuuu

SEQ ID NO: 33534 - RNA, 21 nt, Artificial Sequence
  Synthetic oligonucleotide: CBLB-3412
auuuuaaaguacucauucuca

SEQ ID NO: 33535 - RNA, 22 nt, Artificial Sequence
  Synthetic oligonucleotide: CBLB-3413
gauuuuaaaguacucauucuca

SEQ ID NO: 33536 - RNA, 23 nt, Artificial Sequence
  Synthetic oligonucleotide: CBLB-3414
agauuuuaaaguacucauucuca

SEQ ID NO: 33537 - RNA, 24 nt, Artificial Sequence
  Synthetic oligonucleotide: CBLB-3415
uagauuuuaaaguacucauucuca

SEQ ID NO: 33538 - RNA, 18 nt, Artificial Sequence
  Synthetic oligonucleotide: CBLB-3416
caggguuucugccauuca

SEQ ID NO: 33539 - RNA, 19 nt, Artificial Sequence
  Synthetic oligonucleotide: CBLB-3417
ccaggguuucugccauuca

SEQ ID NO: 33540 - RNA, 20 nt, Artificial Sequence
  Synthetic oligonucleotide: CBLB-3418
accaggguuucugccauuca

SEQ ID NO: 33541 - RNA, 21 nt, Artificial Sequence
  Synthetic oligonucleotide: CBLB-3419
caccaggguuucugccauuca

SEQ ID NO: 33542 - RNA, 22 nt, Artificial Sequence
  Synthetic oligonucleotide: CBLB-3420
ccaccaggguuucugccauuca

SEQ ID NO: 33543 - RNA, 23 nt, Artificial Sequence
  Synthetic oligonucleotide: CBLB-3421
accaccaggguuucugccauuca

SEQ ID NO: 33544 - RNA, 24 nt, Artificial Sequence
  Synthetic oligonucleotide: CBLB-3422
gaccaccaggguuucugccauuca

SEQ ID NO: 33545 - RNA, 18 nt, Artificial Sequence
  Synthetic oligonucleotide: CBLB-3423
ucugcggcagcuugcuua

SEQ ID NO: 33546 - RNA, 19 nt, Artificial Sequence
  Synthetic oligonucleotide: CBLB-3424
aucugcggcagcuugcuua

SEQ ID NO: 33547 - RNA, 20 nt, Artificial Sequence
  Synthetic oligonucleotide: CBLB-2530
gaucugcggcagcuugcuua

SEQ ID NO: 33548 - RNA, 21 nt, Artificial Sequence
  Synthetic oligonucleotide: CBLB-3425
cgaucugcggcagcuugcuua

SEQ ID NO: 33549 - RNA, 22 nt, Artificial Sequence
  Synthetic oligonucleotide: CBLB-3426
gcgaucugcggcagcuugcuua

SEQ ID NO: 33550 - RNA, 23 nt, Artificial Sequence
  Synthetic oligonucleotide: CBLB-3427
ugcgaucugcggcagcuugcuua

SEQ ID NO: 33551 - RNA, 24 nt, Artificial Sequence
  Synthetic oligonucleotide: CBLB-3428
cugcgaucugcggcagcuugcuua

SEQ ID NO: 33552 - RNA, 21 nt, Artificial Sequence
  Synthetic oligonucleotide: CBLB-3429
auucucuccuugccuucuuua

SEQ ID NO: 33553 - RNA, 22 nt, Artificial Sequence
  Synthetic oligonucleotide: CBLB-3430
cauucucuccuugccuucuuua

SEQ ID NO: 33554 - RNA, 23 nt, Artificial Sequence
  Synthetic oligonucleotide: CBLB-3431
acauucucuccuugccuucuuua

SEQ ID NO: 33555 - RNA, 24 nt, Artificial Sequence
  Synthetic oligonucleotide: CBLB-3432
uacauucucuccuugccuucuuua

SEQ ID NO: 33556 - RNA, 18 nt, Artificial Sequence
  Synthetic oligonucleotide: CBLB-3433
gauuuccuccucgaccac

SEQ ID NO: 33557 - RNA, 19 nt, Artificial Sequence
  Synthetic oligonucleotide: CBLB-3434
ggauuuccuccucgaccac

SEQ ID NO: 33558 - RNA, 20 nt, Artificial Sequence
  Synthetic oligonucleotide: CBLB-3435
gggauuuccuccucgaccac

SEQ ID NO: 33559 - RNA, 21 nt, Artificial Sequence
  Synthetic oligonucleotide: CBLB-3436
ggggauuuccuccucgaccac

SEQ ID NO: 33560 - RNA, 22 nt, Artificial Sequence
  Synthetic oligonucleotide: CBLB-3437
cggggauuuccuccucgaccac

SEQ ID NO: 33561 - RNA, 23 nt, Artificial Sequence
  Synthetic oligonucleotide: CBLB-3438
ucggggauuuccuccucgaccac

SEQ ID NO: 33562 - RNA, 24 nt, Artificial Sequence
  Synthetic oligonucleotide: CBLB-3439
uucggggauuuccuccucgaccac

SEQ ID NO: 33563 - RNA, 21 nt, Artificial Sequence
  Synthetic oligonucleotide: CBLB-3440
ccauucauugaguuugccauc

SEQ ID NO: 33564 - RNA, 22 nt, Artificial Sequence
  Synthetic oligonucleotide: CBLB-3441
gccauucauugaguuugccauc

SEQ ID NO: 33565 - RNA, 23 nt, Artificial Sequence
  Synthetic oligonucleotide: CBLB-3442
ugccauucauugaguuugccauc

SEQ ID NO: 33566 - RNA, 24 nt, Artificial Sequence
  Synthetic oligonucleotide: CBLB-3443
cugccauucauugaguuugccauc

SEQ ID NO: 33567 - RNA, 21 nt, Artificial Sequence
  Synthetic oligonucleotide: CBLB-3444
cuuaggggguccaacugcauc

SEQ ID NO: 33568 - RNA, 22 nt, Artificial Sequence
  Synthetic oligonucleotide: CBLB-3445
gcuuaggggguccaacugcauc

SEQ ID NO: 33569 - RNA, 23 nt, Artificial Sequence
  Synthetic oligonucleotide: CBLB-3446
ugcuuaggggguccaacugcauc

SEQ ID NO: 33570 - RNA, 24 nt, Artificial Sequence
  Synthetic oligonucleotide: CBLB-3447
uugcuuaggggguccaacugcauc

SEQ ID NO: 33571 - RNA, 21 nt, Artificial Sequence
  Synthetic oligonucleotide: CBLB-3448
uacccaaaauucgaccuuuuc

SEQ ID NO: 33572 - RNA, 22 nt, Artificial Sequence
  Synthetic oligonucleotide: CBLB-3449
auacccaaaauucgaccuuuuc

SEQ ID NO: 33573 - RNA, 23 nt, Artificial Sequence
  Synthetic oligonucleotide: CBLB-3450
aauacccaaaauucgaccuuuuc

SEQ ID NO: 33574 - RNA, 24 nt, Artificial Sequence
  Synthetic oligonucleotide: CBLB-3451
uaauacccaaaauucgaccuuuuc

SEQ ID NO: 33575 - RNA, 21 nt, Artificial Sequence
  Synthetic oligonucleotide: CBLB-3452
ggcuauuuuucaacugaaguu

SEQ ID NO: 33576 - RNA, 22 nt, Artificial Sequence
  Synthetic oligonucleotide: CBLB-3453
gggcuauuuuucaacugaaguu

SEQ ID NO: 33577 - RNA, 23 nt, Artificial Sequence
  Synthetic oligonucleotide: CBLB-3454
ugggcuauuuuucaacugaaguu

SEQ ID NO: 33578 - RNA, 24 nt, Artificial Sequence
  Synthetic oligonucleotide: CBLB-3455
gugggcuauuuuucaacugaaguu

SEQ ID NO: 33579 - RNA, 21 nt, Artificial Sequence
  Synthetic oligonucleotide: CBLB-3456
aacuugcccaacucagugaga

SEQ ID NO: 33580 - RNA, 22 nt, Artificial Sequence
  Synthetic oligonucleotide: CBLB-3457
aaacuugcccaacucagugaga

SEQ ID NO: 33581 - RNA, 23 nt, Artificial Sequence
  Synthetic oligonucleotide: CBLB-3458
gaaacuugcccaacucagugaga

SEQ ID NO: 33582 - RNA, 24 nt, Artificial Sequence
  Synthetic oligonucleotide: CBLB-3459
agaaacuugcccaacucagugaga

SEQ ID NO: 33583 - RNA, 21 nt, Artificial Sequence
  Synthetic oligonucleotide: CBLB-3460
acucuuuaaagaaggcaagga

SEQ ID NO: 33584 - RNA, 22 nt, Artificial Sequence
  Synthetic oligonucleotide: CBLB-3461
gacucuuuaaagaaggcaagga

SEQ ID NO: 33585 - RNA, 23 nt, Artificial Sequence
  Synthetic oligonucleotide: CBLB-3462
agacucuuuaaagaaggcaagga

SEQ ID NO: 33586 - RNA, 24 nt, Artificial Sequence
  Synthetic oligonucleotide: CBLB-3463
aagacucuuuaaagaaggcaagga

SEQ ID NO: 33587 - RNA, 18 nt, Artificial Sequence
  Synthetic oligonucleotide: CBLB-3464
cagcauuuacgacuuaua

SEQ ID NO: 33588 - RNA, 19 nt, Artificial Sequence
  Synthetic oligonucleotide: CBLB-3465
ucagcauuuacgacuuaua

SEQ ID NO: 33589 - RNA, 20 nt, Artificial Sequence
  Synthetic oligonucleotide: CBLB-3466
aucagcauuuacgacuuaua

SEQ ID NO: 33590 - RNA, 21 nt, Artificial Sequence
  Synthetic oligonucleotide: CBLB-3467
uaucagcauuuacgacuuaua

SEQ ID NO: 33591 - RNA, 22 nt, Artificial Sequence
  Synthetic oligonucleotide: CBLB-3468
auaucagcauuuacgacuuaua

SEQ ID NO: 33592 - RNA, 23 nt, Artificial Sequence
  Synthetic oligonucleotide: CBLB-3469
cauaucagcauuuacgacuuaua

SEQ ID NO: 33593 - RNA, 24 nt, Artificial Sequence
  Synthetic oligonucleotide: CBLB-3470
acauaucagcauuuacgacuuaua

SEQ ID NO: 33594 - RNA, 18 nt, Artificial Sequence
  Synthetic oligonucleotide: CBLB-3471
agucacaggacagguaag

SEQ ID NO: 33595 - RNA, 19 nt, Artificial Sequence
  Synthetic oligonucleotide: CBLB-3472
cagucacaggacagguaag

SEQ ID NO: 33596 - RNA, 20 nt, Artificial Sequence
  Synthetic oligonucleotide: CBLB-3473
acagucacaggacagguaag

SEQ ID NO: 33597 - RNA, 21 nt, Artificial Sequence
  Synthetic oligonucleotide: CBLB-3474
aacagucacaggacagguaag

SEQ ID NO: 33598 - RNA, 22 nt, Artificial Sequence
  Synthetic oligonucleotide: CBLB-3475
gaacagucacaggacagguaag

SEQ ID NO: 33599 - RNA, 23 nt, Artificial Sequence
  Synthetic oligonucleotide: CBLB-3476
agaacagucacaggacagguaag

SEQ ID NO: 33600 - RNA, 24 nt, Artificial Sequence
  Synthetic oligonucleotide: CBLB-3477
aagaacagucacaggacagguaag

SEQ ID NO: 33601 - RNA, 18 nt, Artificial Sequence
  Synthetic oligonucleotide: CBLB-3478
aggaaauccccgaaaagg

SEQ ID NO: 33602 - RNA, 19 nt, Artificial Sequence
  Synthetic oligonucleotide: CBLB-3479
gaggaaauccccgaaaagg

SEQ ID NO: 33603 - RNA, 20 nt, Artificial Sequence
  Synthetic oligonucleotide: CBLB-3480
ggaggaaauccccgaaaagg

SEQ ID NO: 33604 - RNA, 21 nt, Artificial Sequence
  Synthetic oligonucleotide: CBLB-3481
aggaggaaauccccgaaaagg

SEQ ID NO: 33605 - RNA, 22 nt, Artificial Sequence
  Synthetic oligonucleotide: CBLB-3482
gaggaggaaauccccgaaaagg

SEQ ID NO: 33606 - RNA, 23 nt, Artificial Sequence
  Synthetic oligonucleotide: CBLB-3483
cgaggaggaaauccccgaaaagg

SEQ ID NO: 33607 - RNA, 24 nt, Artificial Sequence
  Synthetic oligonucleotide: CBLB-3484
ucgaggaggaaauccccgaaaagg

SEQ ID NO: 33608 - RNA, 21 nt, Artificial Sequence
  Synthetic oligonucleotide: CBLB-3485
cagaaacuugcccaacucagu

SEQ ID NO: 33609 - RNA, 22 nt, Artificial Sequence
  Synthetic oligonucleotide: CBLB-3486
ccagaaacuugcccaacucagu

SEQ ID NO: 33610 - RNA, 23 nt, Artificial Sequence
  Synthetic oligonucleotide: CBLB-3487
accagaaacuugcccaacucagu

SEQ ID NO: 33611 - RNA, 24 nt, Artificial Sequence
  Synthetic oligonucleotide: CBLB-3488
aaccagaaacuugcccaacucagu

SEQ ID NO: 33612 - RNA, 18 nt, Artificial Sequence
  Synthetic oligonucleotide: CBLB-3489
ccccgaaaaggucgaauu

SEQ ID NO: 33613 - RNA, 19 nt, Artificial Sequence
  Synthetic oligonucleotide: CBLB-3490
uccccgaaaaggucgaauu

SEQ ID NO: 33614 - RNA, 20 nt, Artificial Sequence
  Synthetic oligonucleotide: CBLB-3491
auccccgaaaaggucgaauu

SEQ ID NO: 33615 - RNA, 21 nt, Artificial Sequence
  Synthetic oligonucleotide: CBLB-3492
aauccccgaaaaggucgaauu

SEQ ID NO: 33616 - RNA, 22 nt, Artificial Sequence
  Synthetic oligonucleotide: CBLB-3493
aaauccccgaaaaggucgaauu

SEQ ID NO: 33617 - RNA, 23 nt, Artificial Sequence
  Synthetic oligonucleotide: CBLB-3494
gaaauccccgaaaaggucgaauu

SEQ ID NO: 33618 - RNA, 24 nt, Artificial Sequence
  Synthetic oligonucleotide: CBLB-3495
ggaaauccccgaaaaggucgaauu

SEQ ID NO: 33619 - RNA, 21 nt, Artificial Sequence
  Synthetic oligonucleotide: CBLB-3496
uuggguauuauugaugcuauu

SEQ ID NO: 33620 - RNA, 22 nt, Artificial Sequence
  Synthetic oligonucleotide: CBLB-3497
uuuggguauuauugaugcuauu

SEQ ID NO: 33621 - RNA, 23 nt, Artificial Sequence
  Synthetic oligonucleotide: CBLB-3498
uuuuggguauuauugaugcuauu

SEQ ID NO: 33622 - RNA, 24 nt, Artificial Sequence
  Synthetic oligonucleotide: CBLB-3499
auuuuggguauuauugaugcuauu

SEQ ID NO: 33623 - RNA, 18 nt, Artificial Sequence
  Synthetic oligonucleotide: CBLB-3500
uuaaaguacucauucuca

SEQ ID NO: 33624 - RNA, 19 nt, Artificial Sequence
  Synthetic oligonucleotide: CBLB-3501
uuuaaaguacucauucuca

SEQ ID NO: 33625 - RNA, 20 nt, Artificial Sequence
  Synthetic oligonucleotide: CBLB-3502
uuuuaaaguacucauucuca

SEQ ID NO: 33626 - RNA, 18 nt, Artificial Sequence
  Synthetic oligonucleotide: CBLB-3503
cucuccuugccuucuuua

SEQ ID NO: 33627 - RNA, 19 nt, Artificial Sequence
  Synthetic oligonucleotide: CBLB-3504
ucucuccuugccuucuuua

SEQ ID NO: 33628 - RNA, 20 nt, Artificial Sequence
  Synthetic oligonucleotide: CBLB-3505
uucucuccuugccuucuuua

SEQ ID NO: 33629 - RNA, 18 nt, Artificial Sequence
  Synthetic oligonucleotide: CBLB-3506
uucauugaguuugccauc

SEQ ID NO: 33630 - RNA, 19 nt, Artificial Sequence
  Synthetic oligonucleotide: CBLB-3507
auucauugaguuugccauc

SEQ ID NO: 33631 - RNA, 20 nt, Artificial Sequence
  Synthetic oligonucleotide: CBLB-2595
cauucauugaguuugccauc

SEQ ID NO: 33632 - RNA, 18 nt, Artificial Sequence
  Synthetic oligonucleotide: CBLB-3508
aggggguccaacugcauc

SEQ ID NO: 33633 - RNA, 19 nt, Artificial Sequence
  Synthetic oligonucleotide: CBLB-3509
uaggggguccaacugcauc

SEQ ID NO: 33634 - RNA, 20 nt, Artificial Sequence
  Synthetic oligonucleotide: CBLB-3510
uuaggggguccaacugcauc

SEQ ID NO: 33635 - RNA, 18 nt, Artificial Sequence
  Synthetic oligonucleotide: CBLB-3511
ccaaaauucgaccuuuuc

SEQ ID NO: 33636 - RNA, 19 nt, Artificial Sequence
  Synthetic oligonucleotide: CBLB-3512
cccaaaauucgaccuuuuc

SEQ ID NO: 33637 - RNA, 20 nt, Artificial Sequence
  Synthetic oligonucleotide: CBLB-2597
acccaaaauucgaccuuuuc

SEQ ID NO: 33638 - RNA, 18 nt, Artificial Sequence
  Synthetic oligonucleotide: CBLB-3513
uauuuuucaacugaaguu

SEQ ID NO: 33639 - RNA, 19 nt, Artificial Sequence
  Synthetic oligonucleotide: CBLB-3514
cuauuuuucaacugaaguu

SEQ ID NO: 33640 - RNA, 20 nt, Artificial Sequence
  Synthetic oligonucleotide: CBLB-2610
gcuauuuuucaacugaaguu

SEQ ID NO: 33641 - RNA, 18 nt, Artificial Sequence
  Synthetic oligonucleotide: CBLB-3515
uuccagauggcaaacuca

SEQ ID NO: 33642 - RNA, 19 nt, Artificial Sequence
  Synthetic oligonucleotide: CBLB-3516
auuccagauggcaaacuca

SEQ ID NO: 33643 - RNA, 20 nt, Artificial Sequence
  Synthetic oligonucleotide: CBLB-3517
aauuccagauggcaaacuca

SEQ ID NO: 33644 - RNA, 21 nt, Artificial Sequence
  Synthetic oligonucleotide: CBLB-3518
aaauuccagauggcaaacuca

SEQ ID NO: 33645 - RNA, 22 nt, Artificial Sequence
  Synthetic oligonucleotide: CBLB-3519
aaaauuccagauggcaaacuca

SEQ ID NO: 33646 - RNA, 23 nt, Artificial Sequence
  Synthetic oligonucleotide: CBLB-3520
uaaaauuccagauggcaaacuca

SEQ ID NO: 33647 - RNA, 24 nt, Artificial Sequence
  Synthetic oligonucleotide: CBLB-3521
cuaaaauuccagauggcaaacuca

SEQ ID NO: 33648 - RNA, 18 nt, Artificial Sequence
  Synthetic oligonucleotide: CBLB-3522
uugcccaacucagugaga

SEQ ID NO: 33649 - RNA, 19 nt, Artificial Sequence
  Synthetic oligonucleotide: CBLB-3523
cuugcccaacucagugaga

SEQ ID NO: 33650 - RNA, 20 nt, Artificial Sequence
  Synthetic oligonucleotide: CBLB-3524
acuugcccaacucagugaga

SEQ ID NO: 33651 - RNA, 18 nt, Artificial Sequence
  Synthetic oligonucleotide: CBLB-3525
cuuuaaagaaggcaagga

SEQ ID NO: 33652 - RNA, 19 nt, Artificial Sequence
  Synthetic oligonucleotide: CBLB-3526
ucuuuaaagaaggcaagga

SEQ ID NO: 33653 - RNA, 20 nt, Artificial Sequence
  Synthetic oligonucleotide: CBLB-3527
cucuuuaaagaaggcaagga

SEQ ID NO: 33654 - RNA, 18 nt, Artificial Sequence
  Synthetic oligonucleotide: CBLB-3528
aaacuugcccaacucagu

SEQ ID NO: 33655 - RNA, 19 nt, Artificial Sequence
  Synthetic oligonucleotide: CBLB-3529
gaaacuugcccaacucagu

SEQ ID NO: 33656 - RNA, 20 nt, Artificial Sequence
  Synthetic oligonucleotide: CBLB-3530
agaaacuugcccaacucagu

SEQ ID NO: 33657 - RNA, 18 nt, Artificial Sequence
  Synthetic oligonucleotide: CBLB-3531
gguauuauugaugcuauu

SEQ ID NO: 33658 - RNA, 19 nt, Artificial Sequence
  Synthetic oligonucleotide: CBLB-3532
ggguauuauugaugcuauu

SEQ ID NO: 33659 - RNA, 20 nt, Artificial Sequence
  Synthetic oligonucleotide: CBLB-3533
uggguauuauugaugcuauu

SEQ ID NO: 33660 - RNA, 18 nt, Artificial Sequence
  Synthetic oligonucleotide: CBLB-3534
uggugggcuauuuuucaa

SEQ ID NO: 33661 - RNA, 19 nt, Artificial Sequence
  Synthetic oligonucleotide: CBLB-3535
auggugggcuauuuuucaa

SEQ ID NO: 33662 - RNA, 20 nt, Artificial Sequence
  Synthetic oligonucleotide: CBLB-3536
uauggugggcuauuuuucaa

SEQ ID NO: 33663 - RNA, 21 nt, Artificial Sequence
  Synthetic oligonucleotide: CBLB-3537
auauggugggcuauuuuucaa

SEQ ID NO: 33664 - RNA, 22 nt, Artificial Sequence
  Synthetic oligonucleotide: CBLB-3538
uauauggugggcuauuuuucaa

SEQ ID NO: 33665 - RNA, 23 nt, Artificial Sequence
  Synthetic oligonucleotide: CBLB-3539
auauauggugggcuauuuuucaa

SEQ ID NO: 33666 - RNA, 24 nt, Artificial Sequence
  Synthetic oligonucleotide: CBLB-3540
uauauauggugggcuauuuuucaa

SEQ ID NO: 33667 - RNA, 18 nt, Artificial Sequence
  Synthetic oligonucleotide: CBLB-3541
cgcacaggcaacgucaga

SEQ ID NO: 33668 - RNA, 19 nt, Artificial Sequence
  Synthetic oligonucleotide: CBLB-3542
ucgcacaggcaacgucaga

SEQ ID NO: 33669 - RNA, 20 nt, Artificial Sequence
  Synthetic oligonucleotide: CBLB-3543
uucgcacaggcaacgucaga

SEQ ID NO: 33670 - RNA, 18 nt, Artificial Sequence
  Synthetic oligonucleotide: CBLB-3544
gaacuuaccacuuugucc

SEQ ID NO: 33671 - RNA, 19 nt, Artificial Sequence
  Synthetic oligonucleotide: CBLB-3545
agaacuuaccacuuugucc

SEQ ID NO: 33672 - RNA, 20 nt, Artificial Sequence
  Synthetic oligonucleotide: CBLB-3546
cagaacuuaccacuuugucc

SEQ ID NO: 33673 - RNA, 21 nt, Artificial Sequence
  Synthetic oligonucleotide: CBLB-3547
acagaacuuaccacuuugucc

SEQ ID NO: 33674 - RNA, 22 nt, Artificial Sequence
  Synthetic oligonucleotide: CBLB-3548
gacagaacuuaccacuuugucc

SEQ ID NO: 33675 - RNA, 23 nt, Artificial Sequence
  Synthetic oligonucleotide: CBLB-3549
agacagaacuuaccacuuugucc

SEQ ID NO: 33676 - RNA, 24 nt, Artificial Sequence
  Synthetic oligonucleotide: CBLB-3550
cagacagaacuuaccacuuugucc

SEQ ID NO: 33677 - RNA, 18 nt, Artificial Sequence
  Synthetic oligonucleotide: CBLB-3551
guacucauucucacugag

SEQ ID NO: 33678 - RNA, 19 nt, Artificial Sequence
  Synthetic oligonucleotide: CBLB-3552
aguacucauucucacugag

SEQ ID NO: 33679 - RNA, 20 nt, Artificial Sequence
  Synthetic oligonucleotide: CBLB-3553
aaguacucauucucacugag

SEQ ID NO: 33680 - RNA, 21 nt, Artificial Sequence
  Synthetic oligonucleotide: CBLB-3554
aaaguacucauucucacugag

SEQ ID NO: 33681 - RNA, 22 nt, Artificial Sequence
  Synthetic oligonucleotide: CBLB-3555
uaaaguacucauucucacugag

SEQ ID NO: 33682 - RNA, 23 nt, Artificial Sequence
  Synthetic oligonucleotide: CBLB-3556
uuaaaguacucauucucacugag

SEQ ID NO: 33683 - RNA, 24 nt, Artificial Sequence
  Synthetic oligonucleotide: CBLB-3557
uuuaaaguacucauucucacugag

SEQ ID NO: 33684 - RNA, 18 nt, Artificial Sequence
  Synthetic oligonucleotide: CBLB-3558
aaauaucaaguauauaug

SEQ ID NO: 33685 - RNA, 19 nt, Artificial Sequence
  Synthetic oligonucleotide: CBLB-3559
aaaauaucaaguauauaug

SEQ ID NO: 33686 - RNA, 20 nt, Artificial Sequence
  Synthetic oligonucleotide: CBLB-3560
caaaauaucaaguauauaug

SEQ ID NO: 33687 - RNA, 21 nt, Artificial Sequence
  Synthetic oligonucleotide: CBLB-3561
gcaaaauaucaaguauauaug

SEQ ID NO: 33688 - RNA, 22 nt, Artificial Sequence
  Synthetic oligonucleotide: CBLB-3562
ggcaaaauaucaaguauauaug

SEQ ID NO: 33689 - RNA, 23 nt, Artificial Sequence
  Synthetic oligonucleotide: CBLB-3563
aggcaaaauaucaaguauauaug

SEQ ID NO: 33690 - RNA, 24 nt, Artificial Sequence
  Synthetic oligonucleotide: CBLB-3564
caggcaaaauaucaaguauauaug

SEQ ID NO: 33691 - RNA, 18 nt, Artificial Sequence
  Synthetic oligonucleotide: CBLB-3565
auucauugaguuugccau

SEQ ID NO: 33692 - RNA, 19 nt, Artificial Sequence
  Synthetic oligonucleotide: CBLB-3566
cauucauugaguuugccau

SEQ ID NO: 33693 - RNA, 20 nt, Artificial Sequence
  Synthetic oligonucleotide: CBLB-3567
ccauucauugaguuugccau

SEQ ID NO: 33694 - RNA, 21 nt, Artificial Sequence
  Synthetic oligonucleotide: CBLB-3568
gccauucauugaguuugccau

SEQ ID NO: 33695 - RNA, 22 nt, Artificial Sequence
  Synthetic oligonucleotide: CBLB-3569
ugccauucauugaguuugccau

SEQ ID NO: 33696 - RNA, 23 nt, Artificial Sequence
  Synthetic oligonucleotide: CBLB-3570
cugccauucauugaguuugccau

SEQ ID NO: 33697 - RNA, 24 nt, Artificial Sequence
  Synthetic oligonucleotide: CBLB-3571
ucugccauucauugaguuugccau

SEQ ID NO: 33698 - RNA, 18 nt, Artificial Sequence
  Synthetic oligonucleotide: CBLB-3572
gaucugcggcagcuugcu

SEQ ID NO: 33699 - RNA, 19 nt, Artificial Sequence
  Synthetic oligonucleotide: CBLB-3573
cgaucugcggcagcuugcu

SEQ ID NO: 33700 - RNA, 20 nt, Artificial Sequence
  Synthetic oligonucleotide: CBLB-3574
gcgaucugcggcagcuugcu

SEQ ID NO: 33701 - RNA, 21 nt, Artificial Sequence
  Synthetic oligonucleotide: CBLB-3575
ugcgaucugcggcagcuugcu

SEQ ID NO: 33702 - RNA, 22 nt, Artificial Sequence
  Synthetic oligonucleotide: CBLB-3576
cugcgaucugcggcagcuugcu

SEQ ID NO: 33703 - RNA, 23 nt, Artificial Sequence
  Synthetic oligonucleotide: CBLB-3577
ccugcgaucugcggcagcuugcu

SEQ ID NO: 33704 - RNA, 24 nt, Artificial Sequence
  Synthetic oligonucleotide: CBLB-3578
uccugcgaucugcggcagcuugcu

SEQ ID NO: 33705 - RNA, 18 nt, Artificial Sequence
  Synthetic oligonucleotide: CBLB-3579
cuauuuuucaacugaagu

SEQ ID NO: 33706 - RNA, 19 nt, Artificial Sequence
  Synthetic oligonucleotide: CBLB-3580
gcuauuuuucaacugaagu

SEQ ID NO: 33707 - RNA, 20 nt, Artificial Sequence
  Synthetic oligonucleotide: CBLB-3581
ggcuauuuuucaacugaagu

SEQ ID NO: 33708 - RNA, 21 nt, Artificial Sequence
  Synthetic oligonucleotide: CBLB-3582
gggcuauuuuucaacugaagu

SEQ ID NO: 33709 - RNA, 22 nt, Artificial Sequence
  Synthetic oligonucleotide: CBLB-3583
ugggcuauuuuucaacugaagu

SEQ ID NO: 33710 - RNA, 23 nt, Artificial Sequence
  Synthetic oligonucleotide: CBLB-3584
gugggcuauuuuucaacugaagu

SEQ ID NO: 33711 - RNA, 24 nt, Artificial Sequence
  Synthetic oligonucleotide: CBLB-3585
ggugggcuauuuuucaacugaagu

SEQ ID NO: 33712 - RNA, 18 nt, Artificial Sequence
  Synthetic oligonucleotide: CBLB-3586
aucugcggcagcuugcuu

SEQ ID NO: 33713 - RNA, 19 nt, Artificial Sequence
  Synthetic oligonucleotide: CBLB-3587
gaucugcggcagcuugcuu

SEQ ID NO: 33714 - RNA, 20 nt, Artificial Sequence
  Synthetic oligonucleotide: CBLB-2537
cgaucugcggcagcuugcuu

SEQ ID NO: 33715 - RNA, 21 nt, Artificial Sequence
  Synthetic oligonucleotide: CBLB-3588
gcgaucugcggcagcuugcuu

SEQ ID NO: 33716 - RNA, 22 nt, Artificial Sequence
  Synthetic oligonucleotide: CBLB-3589
ugcgaucugcggcagcuugcuu

SEQ ID NO: 33717 - RNA, 23 nt, Artificial Sequence
  Synthetic oligonucleotide: CBLB-3590
cugcgaucugcggcagcuugcuu

SEQ ID NO: 33718 - RNA, 24 nt, Artificial Sequence
  Synthetic oligonucleotide: CBLB-3591
ccugcgaucugcggcagcuugcuu

SEQ ID NO: 33719 - RNA, 18 nt, Artificial Sequence
  Synthetic oligonucleotide: CBLB-3592
acccaaaauucgaccuuu

SEQ ID NO: 33720 - RNA, 19 nt, Artificial Sequence
  Synthetic oligonucleotide: CBLB-3593
uacccaaaauucgaccuuu

SEQ ID NO: 33721 - RNA, 20 nt, Artificial Sequence
  Synthetic oligonucleotide: CBLB-3594
auacccaaaauucgaccuuu

SEQ ID NO: 33722 - RNA, 21 nt, Artificial Sequence
  Synthetic oligonucleotide: CBLB-3595
aauacccaaaauucgaccuuu

SEQ ID NO: 33723 - RNA, 22 nt, Artificial Sequence
  Synthetic oligonucleotide: CBLB-3596
uaauacccaaaauucgaccuuu

SEQ ID NO: 33724 - RNA, 23 nt, Artificial Sequence
  Synthetic oligonucleotide: CBLB-3597
auaauacccaaaauucgaccuuu

SEQ ID NO: 33725 - RNA, 24 nt, Artificial Sequence
  Synthetic oligonucleotide: CBLB-3598
aauaauacccaaaauucgaccuuu

SEQ ID NO: 33726 - RNA, 18 nt, Artificial Sequence
  Synthetic oligonucleotide: CBLB-3599
cccaaaauucgaccuuuu

SEQ ID NO: 33727 - RNA, 19 nt, Artificial Sequence
  Synthetic oligonucleotide: CBLB-3600
acccaaaauucgaccuuuu

SEQ ID NO: 33728 - RNA, 20 nt, Artificial Sequence
  Synthetic oligonucleotide: CBLB-2538
uacccaaaauucgaccuuuu

SEQ ID NO: 33729 - RNA, 21 nt, Artificial Sequence
  Synthetic oligonucleotide: CBLB-3601
auacccaaaauucgaccuuuu

SEQ ID NO: 33730 - RNA, 22 nt, Artificial Sequence
  Synthetic oligonucleotide: CBLB-3602
aauacccaaaauucgaccuuuu

SEQ ID NO: 33731 - RNA, 23 nt, Artificial Sequence
  Synthetic oligonucleotide: CBLB-3603
uaauacccaaaauucgaccuuuu

SEQ ID NO: 33732 - RNA, 24 nt, Artificial Sequence
  Synthetic oligonucleotide: CBLB-3604
auaauacccaaaauucgaccuuuu

SEQ ID NO: 33733 - RNA, 18 nt, Artificial Sequence
  Synthetic oligonucleotide: CBLB-3605
ccuuaugaaaaagucaaa

SEQ ID NO: 33734 - RNA, 19 nt, Artificial Sequence
  Synthetic oligonucleotide: CBLB-3606
gccuuaugaaaaagucaaa

SEQ ID NO: 33735 - RNA, 20 nt, Artificial Sequence
  Synthetic oligonucleotide: CBLB-3607
agccuuaugaaaaagucaaa

SEQ ID NO: 33736 - RNA, 21 nt, Artificial Sequence
  Synthetic oligonucleotide: CBLB-3608
uagccuuaugaaaaagucaaa

SEQ ID NO: 33737 - RNA, 22 nt, Artificial Sequence
  Synthetic oligonucleotide: CBLB-3609
auagccuuaugaaaaagucaaa

SEQ ID NO: 33738 - RNA, 23 nt, Artificial Sequence
  Synthetic oligonucleotide: CBLB-3610
gauagccuuaugaaaaagucaaa

SEQ ID NO: 33739 - RNA, 24 nt, Artificial Sequence
  Synthetic oligonucleotide: CBLB-3611
ugauagccuuaugaaaaagucaaa

SEQ ID NO: 33740 - RNA, 18 nt, Artificial Sequence
  Synthetic oligonucleotide: CBLB-3612
gacucuuuaaagaaggca

SEQ ID NO: 33741 - RNA, 19 nt, Artificial Sequence
  Synthetic oligonucleotide: CBLB-3613
agacucuuuaaagaaggca

SEQ ID NO: 33742 - RNA, 20 nt, Artificial Sequence
  Synthetic oligonucleotide: CBLB-2586
aagacucuuuaaagaaggca

SEQ ID NO: 33743 - RNA, 21 nt, Artificial Sequence
  Synthetic oligonucleotide: CBLB-3614
uaagacucuuuaaagaaggca

SEQ ID NO: 33744 - RNA, 22 nt, Artificial Sequence
  Synthetic oligonucleotide: CBLB-3615
auaagacucuuuaaagaaggca

SEQ ID NO: 33745 - RNA, 23 nt, Artificial Sequence
  Synthetic oligonucleotide: CBLB-3616
aauaagacucuuuaaagaaggca

SEQ ID NO: 33746 - RNA, 24 nt, Artificial Sequence
  Synthetic oligonucleotide: CBLB-3617
caauaagacucuuuaaagaaggca

SEQ ID NO: 33747 - RNA, 18 nt, Artificial Sequence
  Synthetic oligonucleotide: CBLB-3618
agaaacuugcccaacuca

SEQ ID NO: 33748 - RNA, 19 nt, Artificial Sequence
  Synthetic oligonucleotide: CBLB-3619
cagaaacuugcccaacuca

SEQ ID NO: 33749 - RNA, 20 nt, Artificial Sequence
  Synthetic oligonucleotide: CBLB-3620
ccagaaacuugcccaacuca

SEQ ID NO: 33750 - RNA, 21 nt, Artificial Sequence
  Synthetic oligonucleotide: CBLB-3621
accagaaacuugcccaacuca

SEQ ID NO: 33751 - RNA, 22 nt, Artificial Sequence
  Synthetic oligonucleotide: CBLB-3622
aaccagaaacuugcccaacuca

SEQ ID NO: 33752 - RNA, 23 nt, Artificial Sequence
  Synthetic oligonucleotide: CBLB-3623
caaccagaaacuugcccaacuca

SEQ ID NO: 33753 - RNA, 24 nt, Artificial Sequence
  Synthetic oligonucleotide: CBLB-3624
acaaccagaaacuugcccaacuca

SEQ ID NO: 33754 - RNA, 18 nt, Artificial Sequence
  Synthetic oligonucleotide: CBLB-3625
auguaugaagaacaguca

SEQ ID NO: 33755 - RNA, 19 nt, Artificial Sequence
  Synthetic oligonucleotide: CBLB-3626
aauguaugaagaacaguca

SEQ ID NO: 33756 - RNA, 20 nt, Artificial Sequence
  Synthetic oligonucleotide: CBLB-3627
gaauguaugaagaacaguca

SEQ ID NO: 33757 - RNA, 21 nt, Artificial Sequence
  Synthetic oligonucleotide: CBLB-3628
agaauguaugaagaacaguca

SEQ ID NO: 33758 - RNA, 22 nt, Artificial Sequence
  Synthetic oligonucleotide: CBLB-3629
gagaauguaugaagaacaguca

SEQ ID NO: 33759 - RNA, 23 nt, Artificial Sequence
  Synthetic oligonucleotide: CBLB-3630
agagaauguaugaagaacaguca

SEQ ID NO: 33760 - RNA, 24 nt, Artificial Sequence
  Synthetic oligonucleotide: CBLB-3631
gagagaauguaugaagaacaguca

SEQ ID NO: 33761 - RNA, 18 nt, Artificial Sequence
  Synthetic oligonucleotide: CBLB-3632
gggcaauaagacucuuua

SEQ ID NO: 33762 - RNA, 19 nt, Artificial Sequence
  Synthetic oligonucleotide: CBLB-3633
cgggcaauaagacucuuua

SEQ ID NO: 33763 - RNA, 20 nt, Artificial Sequence
  Synthetic oligonucleotide: CBLB-3634
acgggcaauaagacucuuua

SEQ ID NO: 33764 - RNA, 21 nt, Artificial Sequence
  Synthetic oligonucleotide: CBLB-3635
aacgggcaauaagacucuuua

SEQ ID NO: 33765 - RNA, 22 nt, Artificial Sequence
  Synthetic oligonucleotide: CBLB-3636
aaacgggcaauaagacucuuua

SEQ ID NO: 33766 - RNA, 23 nt, Artificial Sequence
  Synthetic oligonucleotide: CBLB-3637
aaaacgggcaauaagacucuuua

SEQ ID NO: 33767 - RNA, 24 nt, Artificial Sequence
  Synthetic oligonucleotide: CBLB-3638
caaaacgggcaauaagacucuuua

SEQ ID NO: 33768 - RNA, 18 nt, Artificial Sequence
  Synthetic oligonucleotide: CBLB-3639
aguaaauaugaugacaac

SEQ ID NO: 33769 - RNA, 19 nt, Artificial Sequence
  Synthetic oligonucleotide: CBLB-3640
gaguaaauaugaugacaac

SEQ ID NO: 33770 - RNA, 20 nt, Artificial Sequence
  Synthetic oligonucleotide: CBLB-3641
ugaguaaauaugaugacaac

SEQ ID NO: 33771 - RNA, 21 nt, Artificial Sequence
  Synthetic oligonucleotide: CBLB-3642
uugaguaaauaugaugacaac

SEQ ID NO: 33772 - RNA, 22 nt, Artificial Sequence
  Synthetic oligonucleotide: CBLB-3643
auugaguaaauaugaugacaac

SEQ ID NO: 33773 - RNA, 23 nt, Artificial Sequence
  Synthetic oligonucleotide: CBLB-3644
uauugaguaaauaugaugacaac

SEQ ID NO: 33774 - RNA, 24 nt, Artificial Sequence
  Synthetic oligonucleotide: CBLB-3645
auauugaguaaauaugaugacaac

SEQ ID NO: 33775 - RNA, 18 nt, Artificial Sequence
  Synthetic oligonucleotide: CBLB-3646
caggaccguggagaagac

SEQ ID NO: 33776 - RNA, 19 nt, Artificial Sequence
  Synthetic oligonucleotide: CBLB-3647
gcaggaccguggagaagac

SEQ ID NO: 33777 - RNA, 20 nt, Artificial Sequence
  Synthetic oligonucleotide: CBLB-3648
cgcaggaccguggagaagac

SEQ ID NO: 33778 - RNA, 21 nt, Artificial Sequence
  Synthetic oligonucleotide: CBLB-3649
ucgcaggaccguggagaagac

SEQ ID NO: 33779 - RNA, 22 nt, Artificial Sequence
  Synthetic oligonucleotide: CBLB-3650
aucgcaggaccguggagaagac

SEQ ID NO: 33780 - RNA, 23 nt, Artificial Sequence
  Synthetic oligonucleotide: CBLB-3651
gaucgcaggaccguggagaagac

SEQ ID NO: 33781 - RNA, 24 nt, Artificial Sequence
  Synthetic oligonucleotide: CBLB-3652
agaucgcaggaccguggagaagac

SEQ ID NO: 33782 - RNA, 18 nt, Artificial Sequence
  Synthetic oligonucleotide: CBLB-3653
gccgcagaucgcaggacc

SEQ ID NO: 33783 - RNA, 19 nt, Artificial Sequence
  Synthetic oligonucleotide: CBLB-3654
ugccgcagaucgcaggacc

SEQ ID NO: 33784 - RNA, 20 nt, Artificial Sequence
  Synthetic oligonucleotide: CBLB-3655
cugccgcagaucgcaggacc

SEQ ID NO: 33785 - RNA, 21 nt, Artificial Sequence
  Synthetic oligonucleotide: CBLB-3656
gcugccgcagaucgcaggacc

SEQ ID NO: 33786 - RNA, 22 nt, Artificial Sequence
  Synthetic oligonucleotide: CBLB-3657
agcugccgcagaucgcaggacc

SEQ ID NO: 33787 - RNA, 23 nt, Artificial Sequence
  Synthetic oligonucleotide: CBLB-3658
aagcugccgcagaucgcaggacc

SEQ ID NO: 33788 - RNA, 24 nt, Artificial Sequence
  Synthetic oligonucleotide: CBLB-3659
caagcugccgcagaucgcaggacc

SEQ ID NO: 33789 - RNA, 18 nt, Artificial Sequence
  Synthetic oligonucleotide: CBLB-3660
uggucgaggaggaaaucc

SEQ ID NO: 33790 - RNA, 19 nt, Artificial Sequence
  Synthetic oligonucleotide: CBLB-3661
guggucgaggaggaaaucc

SEQ ID NO: 33791 - RNA, 20 nt, Artificial Sequence
  Synthetic oligonucleotide: CBLB-3662
gguggucgaggaggaaaucc

SEQ ID NO: 33792 - RNA, 21 nt, Artificial Sequence
  Synthetic oligonucleotide: CBLB-3663
ugguggucgaggaggaaaucc

SEQ ID NO: 33793 - RNA, 22 nt, Artificial Sequence
  Synthetic oligonucleotide: CBLB-3664
cugguggucgaggaggaaaucc

SEQ ID NO: 33794 - RNA, 23 nt, Artificial Sequence
  Synthetic oligonucleotide: CBLB-3665
ccugguggucgaggaggaaaucc

SEQ ID NO: 33795 - RNA, 24 nt, Artificial Sequence
  Synthetic oligonucleotide: CBLB-3666
cccugguggucgaggaggaaaucc

SEQ ID NO: 33796 - RNA, 18 nt, Artificial Sequence
  Synthetic oligonucleotide: CBLB-3667
agacucuuuaaagaaggc

SEQ ID NO: 33797 - RNA, 19 nt, Artificial Sequence
  Synthetic oligonucleotide: CBLB-3668
aagacucuuuaaagaaggc

SEQ ID NO: 33798 - RNA, 20 nt, Artificial Sequence
  Synthetic oligonucleotide: CBLB-3669
uaagacucuuuaaagaaggc

SEQ ID NO: 33799 - RNA, 21 nt, Artificial Sequence
  Synthetic oligonucleotide: CBLB-3670
auaagacucuuuaaagaaggc

SEQ ID NO: 33800 - RNA, 22 nt, Artificial Sequence
  Synthetic oligonucleotide: CBLB-3671
aauaagacucuuuaaagaaggc

SEQ ID NO: 33801 - RNA, 23 nt, Artificial Sequence
  Synthetic oligonucleotide: CBLB-3672
caauaagacucuuuaaagaaggc

SEQ ID NO: 33802 - RNA, 24 nt, Artificial Sequence
  Synthetic oligonucleotide: CBLB-3673
gcaauaagacucuuuaaagaaggc

SEQ ID NO: 33803 - RNA, 18 nt, Artificial Sequence
  Synthetic oligonucleotide: CBLB-3674
gagaagacuuggaagcuc

SEQ ID NO: 33804 - RNA, 19 nt, Artificial Sequence
  Synthetic oligonucleotide: CBLB-3675
ggagaagacuuggaagcuc

SEQ ID NO: 33805 - RNA, 20 nt, Artificial Sequence
  Synthetic oligonucleotide: CBLB-3676
uggagaagacuuggaagcuc

SEQ ID NO: 33806 - RNA, 21 nt, Artificial Sequence
  Synthetic oligonucleotide: CBLB-3677
guggagaagacuuggaagcuc

SEQ ID NO: 33807 - RNA, 22 nt, Artificial Sequence
  Synthetic oligonucleotide: CBLB-3678
cguggagaagacuuggaagcuc

SEQ ID NO: 33808 - RNA, 23 nt, Artificial Sequence
  Synthetic oligonucleotide: CBLB-3679
ccguggagaagacuuggaagcuc

SEQ ID NO: 33809 - RNA, 24 nt, Artificial Sequence
  Synthetic oligonucleotide: CBLB-3680
accguggagaagacuuggaagcuc

SEQ ID NO: 33810 - RNA, 18 nt, Artificial Sequence
  Synthetic oligonucleotide: CBLB-3681
gcagaaacccuggugguc

SEQ ID NO: 33811 - RNA, 19 nt, Artificial Sequence
  Synthetic oligonucleotide: CBLB-3682
ggcagaaacccuggugguc

SEQ ID NO: 33812 - RNA, 20 nt, Artificial Sequence
  Synthetic oligonucleotide: CBLB-3683
uggcagaaacccuggugguc

SEQ ID NO: 33813 - RNA, 21 nt, Artificial Sequence
  Synthetic oligonucleotide: CBLB-3684
auggcagaaacccuggugguc

SEQ ID NO: 33814 - RNA, 22 nt, Artificial Sequence
  Synthetic oligonucleotide: CBLB-3685
aauggcagaaacccuggugguc

SEQ ID NO: 33815 - RNA, 23 nt, Artificial Sequence
  Synthetic oligonucleotide: CBLB-3686
gaauggcagaaacccuggugguc

SEQ ID NO: 33816 - RNA, 24 nt, Artificial Sequence
  Synthetic oligonucleotide: CBLB-3687
ugaauggcagaaacccuggugguc

SEQ ID NO: 33817 - RNA, 18 nt, Artificial Sequence
  Synthetic oligonucleotide: CBLB-3688
cucuuuaaagaaggcaag

SEQ ID NO: 33818 - RNA, 19 nt, Artificial Sequence
  Synthetic oligonucleotide: CBLB-3689
acucuuuaaagaaggcaag

SEQ ID NO: 33819 - RNA, 20 nt, Artificial Sequence
  Synthetic oligonucleotide: CBLB-3690
gacucuuuaaagaaggcaag

SEQ ID NO: 33820 - RNA, 21 nt, Artificial Sequence
  Synthetic oligonucleotide: CBLB-3691
agacucuuuaaagaaggcaag

SEQ ID NO: 33821 - RNA, 22 nt, Artificial Sequence
  Synthetic oligonucleotide: CBLB-3692
aagacucuuuaaagaaggcaag

SEQ ID NO: 33822 - RNA, 23 nt, Artificial Sequence
  Synthetic oligonucleotide: CBLB-3693
uaagacucuuuaaagaaggcaag

SEQ ID NO: 33823 - RNA, 24 nt, Artificial Sequence
  Synthetic oligonucleotide: CBLB-3694
auaagacucuuuaaagaaggcaag

SEQ ID NO: 33824 - RNA, 18 nt, Artificial Sequence
  Synthetic oligonucleotide: CBLB-3695
augcuauucaggaugcag

SEQ ID NO: 33825 - RNA, 19 nt, Artificial Sequence
  Synthetic oligonucleotide: CBLB-3696
gaugcuauucaggaugcag

SEQ ID NO: 33826 - RNA, 20 nt, Artificial Sequence
  Synthetic oligonucleotide: CBLB-3697
ugaugcuauucaggaugcag

SEQ ID NO: 33827 - RNA, 21 nt, Artificial Sequence
  Synthetic oligonucleotide: CBLB-3698
uugaugcuauucaggaugcag

SEQ ID NO: 33828 - RNA, 22 nt, Artificial Sequence
  Synthetic oligonucleotide: CBLB-3699
auugaugcuauucaggaugcag

SEQ ID NO: 33829 - RNA, 23 nt, Artificial Sequence
  Synthetic oligonucleotide: CBLB-3700
uauugaugcuauucaggaugcag

SEQ ID NO: 33830 - RNA, 24 nt, Artificial Sequence
  Synthetic oligonucleotide: CBLB-3701
uuauugaugcuauucaggaugcag

SEQ ID NO: 33831 - RNA, 18 nt, Artificial Sequence
  Synthetic oligonucleotide: CBLB-3702
caaaaucccaaacuucag

SEQ ID NO: 33832 - RNA, 19 nt, Artificial Sequence
  Synthetic oligonucleotide: CBLB-3703
ccaaaaucccaaacuucag

SEQ ID NO: 33833 - RNA, 20 nt, Artificial Sequence
  Synthetic oligonucleotide: CBLB-3704
gccaaaaucccaaacuucag

SEQ ID NO: 33834 - RNA, 21 nt, Artificial Sequence
  Synthetic oligonucleotide: CBLB-3705
ugccaaaaucccaaacuucag

SEQ ID NO: 33835 - RNA, 22 nt, Artificial Sequence
  Synthetic oligonucleotide: CBLB-3706
gugccaaaaucccaaacuucag

SEQ ID NO: 33836 - RNA, 23 nt, Artificial Sequence
  Synthetic oligonucleotide: CBLB-3707
ugugccaaaaucccaaacuucag

SEQ ID NO: 33837 - RNA, 24 nt, Artificial Sequence
  Synthetic oligonucleotide: CBLB-3708
cugugccaaaaucccaaacuucag

SEQ ID NO: 33838 - RNA, 18 nt, Artificial Sequence
  Synthetic oligonucleotide: CBLB-3709
gaaacccugguggucgag

SEQ ID NO: 33839 - RNA, 19 nt, Artificial Sequence
  Synthetic oligonucleotide: CBLB-3710
agaaacccugguggucgag

SEQ ID NO: 33840 - RNA, 20 nt, Artificial Sequence
  Synthetic oligonucleotide: CBLB-3711
cagaaacccugguggucgag

SEQ ID NO: 33841 - RNA, 21 nt, Artificial Sequence
  Synthetic oligonucleotide: CBLB-3712
gcagaaacccugguggucgag

SEQ ID NO: 33842 - RNA, 22 nt, Artificial Sequence
  Synthetic oligonucleotide: CBLB-3713
ggcagaaacccugguggucgag

SEQ ID NO: 33843 - RNA, 23 nt, Artificial Sequence
  Synthetic oligonucleotide: CBLB-3714
uggcagaaacccugguggucgag

SEQ ID NO: 33844 - RNA, 24 nt, Artificial Sequence
  Synthetic oligonucleotide: CBLB-3715
auggcagaaacccugguggucgag

SEQ ID NO: 33845 - RNA, 18 nt, Artificial Sequence
  Synthetic oligonucleotide: CBLB-3716
ccgcagaucgcaggaccg

SEQ ID NO: 33846 - RNA, 19 nt, Artificial Sequence
  Synthetic oligonucleotide: CBLB-3717
gccgcagaucgcaggaccg

SEQ ID NO: 33847 - RNA, 20 nt, Artificial Sequence
  Synthetic oligonucleotide: CBLB-2599
ugccgcagaucgcaggaccg

SEQ ID NO: 33848 - RNA, 21 nt, Artificial Sequence
  Synthetic oligonucleotide: CBLB-3718
cugccgcagaucgcaggaccg

SEQ ID NO: 33849 - RNA, 22 nt, Artificial Sequence
  Synthetic oligonucleotide: CBLB-3719
gcugccgcagaucgcaggaccg

SEQ ID NO: 33850 - RNA, 23 nt, Artificial Sequence
  Synthetic oligonucleotide: CBLB-3720
agcugccgcagaucgcaggaccg

SEQ ID NO: 33851 - RNA, 24 nt, Artificial Sequence
  Synthetic oligonucleotide: CBLB-3721
aagcugccgcagaucgcaggaccg

SEQ ID NO: 33852 - RNA, 18 nt, Artificial Sequence
  Synthetic oligonucleotide: CBLB-3722
gcaagcugccgcagaucg

SEQ ID NO: 33853 - RNA, 19 nt, Artificial Sequence
  Synthetic oligonucleotide: CBLB-3723
agcaagcugccgcagaucg

SEQ ID NO: 33854 - RNA, 20 nt, Artificial Sequence
  Synthetic oligonucleotide: CBLB-3724
aagcaagcugccgcagaucg

SEQ ID NO: 33855 - RNA, 21 nt, Artificial Sequence
  Synthetic oligonucleotide: CBLB-3725
uaagcaagcugccgcagaucg

SEQ ID NO: 33856 - RNA, 22 nt, Artificial Sequence
  Synthetic oligonucleotide: CBLB-3726
cuaagcaagcugccgcagaucg

SEQ ID NO: 33857 - RNA, 23 nt, Artificial Sequence
  Synthetic oligonucleotide: CBLB-3727
ccuaagcaagcugccgcagaucg

SEQ ID NO: 33858 - RNA, 24 nt, Artificial Sequence
  Synthetic oligonucleotide: CBLB-3728
cccuaagcaagcugccgcagaucg

SEQ ID NO: 33859 - RNA, 18 nt, Artificial Sequence
  Synthetic oligonucleotide: CBLB-3729
cagaaacccugguggucg

SEQ ID NO: 33860 - RNA, 19 nt, Artificial Sequence
  Synthetic oligonucleotide: CBLB-3730
gcagaaacccugguggucg

SEQ ID NO: 33861 - RNA, 20 nt, Artificial Sequence
  Synthetic oligonucleotide: CBLB-2536
ggcagaaacccugguggucg

SEQ ID NO: 33862 - RNA, 21 nt, Artificial Sequence
  Synthetic oligonucleotide: CBLB-3731
uggcagaaacccugguggucg

SEQ ID NO: 33863 - RNA, 22 nt, Artificial Sequence
  Synthetic oligonucleotide: CBLB-3732
auggcagaaacccugguggucg

SEQ ID NO: 33864 - RNA, 23 nt, Artificial Sequence
  Synthetic oligonucleotide: CBLB-3733
aauggcagaaacccugguggucg

SEQ ID NO: 33865 - RNA, 24 nt, Artificial Sequence
  Synthetic oligonucleotide: CBLB-3734
gaauggcagaaacccugguggucg

SEQ ID NO: 33866 - RNA, 18 nt, Artificial Sequence
  Synthetic oligonucleotide: CBLB-3735
aaacccugguggucgagg

SEQ ID NO: 33867 - RNA, 19 nt, Artificial Sequence
  Synthetic oligonucleotide: CBLB-3736
gaaacccugguggucgagg

SEQ ID NO: 33868 - RNA, 20 nt, Artificial Sequence
  Synthetic oligonucleotide: CBLB-2601
agaaacccugguggucgagg

SEQ ID NO: 33869 - RNA, 21 nt, Artificial Sequence
  Synthetic oligonucleotide: CBLB-3737
cagaaacccugguggucgagg

SEQ ID NO: 33870 - RNA, 22 nt, Artificial Sequence
  Synthetic oligonucleotide: CBLB-3738
gcagaaacccugguggucgagg

SEQ ID NO: 33871 - RNA, 23 nt, Artificial Sequence
  Synthetic oligonucleotide: CBLB-3739
ggcagaaacccugguggucgagg

SEQ ID NO: 33872 - RNA, 24 nt, Artificial Sequence
  Synthetic oligonucleotide: CBLB-3740
uggcagaaacccugguggucgagg

SEQ ID NO: 33873 - RNA, 18 nt, Artificial Sequence
  Synthetic oligonucleotide: CBLB-3741
ggcaaacucaaugaaugg

SEQ ID NO: 33874 - RNA, 19 nt, Artificial Sequence
  Synthetic oligonucleotide: CBLB-3742
uggcaaacucaaugaaugg

SEQ ID NO: 33875 - RNA, 20 nt, Artificial Sequence
  Synthetic oligonucleotide: CBLB-3743
auggcaaacucaaugaaugg

SEQ ID NO: 33876 - RNA, 21 nt, Artificial Sequence
  Synthetic oligonucleotide: CBLB-3744
gauggcaaacucaaugaaugg

SEQ ID NO: 33877 - RNA, 22 nt, Artificial Sequence
  Synthetic oligonucleotide: CBLB-3745
agauggcaaacucaaugaaugg

SEQ ID NO: 33878 - RNA, 23 nt, Artificial Sequence
  Synthetic oligonucleotide: CBLB-3746
cagauggcaaacucaaugaaugg

SEQ ID NO: 33879 - RNA, 24 nt, Artificial Sequence
  Synthetic oligonucleotide: CBLB-3747
ccagauggcaaacucaaugaaugg

SEQ ID NO: 33880 - RNA, 18 nt, Artificial Sequence
  Synthetic oligonucleotide: CBLB-3748
uggcagaaacccuggugg

SEQ ID NO: 33881 - RNA, 19 nt, Artificial Sequence
  Synthetic oligonucleotide: CBLB-3749
auggcagaaacccuggugg

SEQ ID NO: 33882 - RNA, 20 nt, Artificial Sequence
  Synthetic oligonucleotide: CBLB-3750
aauggcagaaacccuggugg

SEQ ID NO: 33883 - RNA, 21 nt, Artificial Sequence
  Synthetic oligonucleotide: CBLB-3751
gaauggcagaaacccuggugg

SEQ ID NO: 33884 - RNA, 22 nt, Artificial Sequence
  Synthetic oligonucleotide: CBLB-3752
ugaauggcagaaacccuggugg

SEQ ID NO: 33885 - RNA, 23 nt, Artificial Sequence
  Synthetic oligonucleotide: CBLB-3753
augaauggcagaaacccuggugg

SEQ ID NO: 33886 - RNA, 24 nt, Artificial Sequence
  Synthetic oligonucleotide: CBLB-3754
aaugaauggcagaaacccuggugg

SEQ ID NO: 33887 - RNA, 18 nt, Artificial Sequence
  Synthetic oligonucleotide: CBLB-3755
gcaaggagagaauguaug

SEQ ID NO: 33888 - RNA, 19 nt, Artificial Sequence
  Synthetic oligonucleotide: CBLB-3756
ggcaaggagagaauguaug

SEQ ID NO: 33889 - RNA, 20 nt, Artificial Sequence
  Synthetic oligonucleotide: CBLB-3757
aggcaaggagagaauguaug

SEQ ID NO: 33890 - RNA, 21 nt, Artificial Sequence
  Synthetic oligonucleotide: CBLB-3758
aaggcaaggagagaauguaug

SEQ ID NO: 33891 - RNA, 22 nt, Artificial Sequence
  Synthetic oligonucleotide: CBLB-3759
gaaggcaaggagagaauguaug

SEQ ID NO: 33892 - RNA, 23 nt, Artificial Sequence
  Synthetic oligonucleotide: CBLB-3760
agaaggcaaggagagaauguaug

SEQ ID NO: 33893 - RNA, 24 nt, Artificial Sequence
  Synthetic oligonucleotide: CBLB-3761
aagaaggcaaggagagaauguaug

SEQ ID NO: 33894 - RNA, 18 nt, Artificial Sequence
  Synthetic oligonucleotide: CBLB-3762
gcagaucgcaggaccgug

SEQ ID NO: 33895 - RNA, 19 nt, Artificial Sequence
  Synthetic oligonucleotide: CBLB-3763
cgcagaucgcaggaccgug

SEQ ID NO: 33896 - RNA, 20 nt, Artificial Sequence
  Synthetic oligonucleotide: CBLB-3764
ccgcagaucgcaggaccgug

SEQ ID NO: 33897 - RNA, 21 nt, Artificial Sequence
  Synthetic oligonucleotide: CBLB-3765
gccgcagaucgcaggaccgug

SEQ ID NO: 33898 - RNA, 22 nt, Artificial Sequence
  Synthetic oligonucleotide: CBLB-3766
ugccgcagaucgcaggaccgug

SEQ ID NO: 33899 - RNA, 23 nt, Artificial Sequence
  Synthetic oligonucleotide: CBLB-3767
cugccgcagaucgcaggaccgug

SEQ ID NO: 33900 - RNA, 24 nt, Artificial Sequence
  Synthetic oligonucleotide: CBLB-3768
gcugccgcagaucgcaggaccgug

SEQ ID NO: 33901 - RNA, 18 nt, Artificial Sequence
  Synthetic oligonucleotide: CBLB-3769
aggaccguggagaagacu

SEQ ID NO: 33902 - RNA, 19 nt, Artificial Sequence
  Synthetic oligonucleotide: CBLB-3770
caggaccguggagaagacu

SEQ ID NO: 33903 - RNA, 20 nt, Artificial Sequence
  Synthetic oligonucleotide: CBLB-2606
gcaggaccguggagaagacu

SEQ ID NO: 33904 - RNA, 21 nt, Artificial Sequence
  Synthetic oligonucleotide: CBLB-3771
cgcaggaccguggagaagacu

SEQ ID NO: 33905 - RNA, 22 nt, Artificial Sequence
  Synthetic oligonucleotide: CBLB-3772
ucgcaggaccguggagaagacu

SEQ ID NO: 33906 - RNA, 23 nt, Artificial Sequence
  Synthetic oligonucleotide: CBLB-3773
aucgcaggaccguggagaagacu

SEQ ID NO: 33907 - RNA, 24 nt, Artificial Sequence
  Synthetic oligonucleotide: CBLB-3774
gaucgcaggaccguggagaagacu

SEQ ID NO: 33908 - RNA, 18 nt, Artificial Sequence
  Synthetic oligonucleotide: CBLB-3775
aacagucacaggacaggu

SEQ ID NO: 33909 - RNA, 19 nt, Artificial Sequence
  Synthetic oligonucleotide: CBLB-3776
gaacagucacaggacaggu

SEQ ID NO: 33910 - RNA, 20 nt, Artificial Sequence
  Synthetic oligonucleotide: CBLB-3777
agaacagucacaggacaggu

SEQ ID NO: 33911 - RNA, 21 nt, Artificial Sequence
  Synthetic oligonucleotide: CBLB-3778
aagaacagucacaggacaggu

SEQ ID NO: 33912 - RNA, 22 nt, Artificial Sequence
  Synthetic oligonucleotide: CBLB-3779
gaagaacagucacaggacaggu

SEQ ID NO: 33913 - RNA, 23 nt, Artificial Sequence
  Synthetic oligonucleotide: CBLB-3780
ugaagaacagucacaggacaggu

SEQ ID NO: 33914 - RNA, 24 nt, Artificial Sequence
  Synthetic oligonucleotide: CBLB-3781
augaagaacagucacaggacaggu

SEQ ID NO: 33915 - RNA, 18 nt, Artificial Sequence
  Synthetic oligonucleotide: CBLB-3782
aaggcaaggagagaaugu

SEQ ID NO: 33916 - RNA, 19 nt, Artificial Sequence
  Synthetic oligonucleotide: CBLB-3783
gaaggcaaggagagaaugu

SEQ ID NO: 33917 - RNA, 20 nt, Artificial Sequence
  Synthetic oligonucleotide: CBLB-3784
agaaggcaaggagagaaugu

SEQ ID NO: 33918 - RNA, 21 nt, Artificial Sequence
  Synthetic oligonucleotide: CBLB-3785
aagaaggcaaggagagaaugu

SEQ ID NO: 33919 - RNA, 22 nt, Artificial Sequence
  Synthetic oligonucleotide: CBLB-3786
aaagaaggcaaggagagaaugu

SEQ ID NO: 33920 - RNA, 23 nt, Artificial Sequence
  Synthetic oligonucleotide: CBLB-3787
uaaagaaggcaaggagagaaugu

SEQ ID NO: 33921 - RNA, 24 nt, Artificial Sequence
  Synthetic oligonucleotide: CBLB-3788
uuaaagaaggcaaggagagaaugu

SEQ ID NO: 33922 - RNA, 18 nt, Artificial Sequence
  Synthetic oligonucleotide: CBLB-3789
cugucugacguugccugu

SEQ ID NO: 33923 - RNA, 19 nt, Artificial Sequence
  Synthetic oligonucleotide: CBLB-3790
ucugucugacguugccugu

SEQ ID NO: 33924 - RNA, 20 nt, Artificial Sequence
  Synthetic oligonucleotide: CBLB-3791
uucugucugacguugccugu

SEQ ID NO: 33925 - RNA, 21 nt, Artificial Sequence
  Synthetic oligonucleotide: CBLB-3792
guucugucugacguugccugu

SEQ ID NO: 33926 - RNA, 22 nt, Artificial Sequence
  Synthetic oligonucleotide: CBLB-3793
aguucugucugacguugccugu

SEQ ID NO: 33927 - RNA, 23 nt, Artificial Sequence
  Synthetic oligonucleotide: CBLB-3794
aaguucugucugacguugccugu

SEQ ID NO: 33928 - RNA, 24 nt, Artificial Sequence
  Synthetic oligonucleotide: CBLB-3795
uaaguucugucugacguugccugu

SEQ ID NO: 33929 - RNA, 18 nt, Artificial Sequence
  Synthetic oligonucleotide: CBLB-3796
aucuacauugauagccuu

SEQ ID NO: 33930 - RNA, 19 nt, Artificial Sequence
  Synthetic oligonucleotide: CBLB-3797
aaucuacauugauagccuu

SEQ ID NO: 33931 - RNA, 20 nt, Artificial Sequence
  Synthetic oligonucleotide: CBLB-3798
aaaucuacauugauagccuu

SEQ ID NO: 33932 - RNA, 21 nt, Artificial Sequence
  Synthetic oligonucleotide: CBLB-3799
aaaaucuacauugauagccuu

SEQ ID NO: 33933 - RNA, 22 nt, Artificial Sequence
  Synthetic oligonucleotide: CBLB-3800
uaaaaucuacauugauagccuu

SEQ ID NO: 33934 - RNA, 23 nt, Artificial Sequence
  Synthetic oligonucleotide: CBLB-3801
uuaaaaucuacauugauagccuu

SEQ ID NO: 33935 - RNA, 24 nt, Artificial Sequence
  Synthetic oligonucleotide: CBLB-3802
uuuaaaaucuacauugauagccuu

SEQ ID NO: 33936 - RNA, 18 nt, Artificial Sequence
  Synthetic oligonucleotide: CBLB-3803
guugugaauucagggaaa

SEQ ID NO: 33937 - RNA, 19 nt, Artificial Sequence
  Synthetic oligonucleotide: CBLB-3804
gguugugaauucagggaaa

SEQ ID NO: 33938 - RNA, 20 nt, Artificial Sequence
  Synthetic oligonucleotide: CBLB-3805
ugguugugaauucagggaaa

SEQ ID NO: 33939 - RNA, 21 nt, Artificial Sequence
  Synthetic oligonucleotide: CBLB-3806
augguugugaauucagggaaa

SEQ ID NO: 33940 - RNA, 22 nt, Artificial Sequence
  Synthetic oligonucleotide: CBLB-3807
gaugguugugaauucagggaaa

SEQ ID NO: 33941 - RNA, 23 nt, Artificial Sequence
  Synthetic oligonucleotide: CBLB-3808
agaugguugugaauucagggaaa

SEQ ID NO: 33942 - RNA, 24 nt, Artificial Sequence
  Synthetic oligonucleotide: CBLB-3809
gagaugguugugaauucagggaaa

SEQ ID NO: 33943 - RNA, 18 nt, Artificial Sequence
  Synthetic oligonucleotide: CBLB-3810
cucuuguuuucucugaaa

SEQ ID NO: 33944 - RNA, 19 nt, Artificial Sequence
  Synthetic oligonucleotide: CBLB-3811
ucucuuguuuucucugaaa

SEQ ID NO: 33945 - RNA, 20 nt, Artificial Sequence
  Synthetic oligonucleotide: CBLB-3812
gucucuuguuuucucugaaa

SEQ ID NO: 33946 - RNA, 21 nt, Artificial Sequence
  Synthetic oligonucleotide: CBLB-3813
ggucucuuguuuucucugaaa

SEQ ID NO: 33947 - RNA, 22 nt, Artificial Sequence
  Synthetic oligonucleotide: CBLB-3814
gggucucuuguuuucucugaaa

SEQ ID NO: 33948 - RNA, 23 nt, Artificial Sequence
  Synthetic oligonucleotide: CBLB-3815
ugggucucuuguuuucucugaaa

SEQ ID NO: 33949 - RNA, 24 nt, Artificial Sequence
  Synthetic oligonucleotide: CBLB-3816
cugggucucuuguuuucucugaaa

SEQ ID NO: 33950 - RNA, 18 nt, Artificial Sequence
  Synthetic oligonucleotide: CBLB-3817
cacuugcuagaucaacaa

SEQ ID NO: 33951 - RNA, 19 nt, Artificial Sequence
  Synthetic oligonucleotide: CBLB-3818
ccacuugcuagaucaacaa

SEQ ID NO: 33952 - RNA, 20 nt, Artificial Sequence
  Synthetic oligonucleotide: CBLB-3024
gccacuugcuagaucaacaa

SEQ ID NO: 33953 - RNA, 21 nt, Artificial Sequence
  Synthetic oligonucleotide: CBLB-3819
ggccacuugcuagaucaacaa

SEQ ID NO: 33954 - RNA, 22 nt, Artificial Sequence
  Synthetic oligonucleotide: CBLB-3820
uggccacuugcuagaucaacaa

SEQ ID NO: 33955 - RNA, 23 nt, Artificial Sequence
  Synthetic oligonucleotide: CBLB-3821
uuggccacuugcuagaucaacaa

SEQ ID NO: 33956 - RNA, 24 nt, Artificial Sequence
  Synthetic oligonucleotide: CBLB-3822
cuuggccacuugcuagaucaacaa

SEQ ID NO: 33957 - RNA, 18 nt, Artificial Sequence
  Synthetic oligonucleotide: CBLB-3823
aauggcccacugucccaa

SEQ ID NO: 33958 - RNA, 19 nt, Artificial Sequence
  Synthetic oligonucleotide: CBLB-3824
caauggcccacugucccaa

SEQ ID NO: 33959 - RNA, 20 nt, Artificial Sequence
  Synthetic oligonucleotide: CBLB-3825
ccaauggcccacugucccaa

SEQ ID NO: 33960 - RNA, 21 nt, Artificial Sequence
  Synthetic oligonucleotide: CBLB-3826
gccaauggcccacugucccaa

SEQ ID NO: 33961 - RNA, 22 nt, Artificial Sequence
  Synthetic oligonucleotide: CBLB-3827
agccaauggcccacugucccaa

SEQ ID NO: 33962 - RNA, 23 nt, Artificial Sequence
  Synthetic oligonucleotide: CBLB-3828
uagccaauggcccacugucccaa

SEQ ID NO: 33963 - RNA, 24 nt, Artificial Sequence
  Synthetic oligonucleotide: CBLB-3829
auagccaauggcccacugucccaa

SEQ ID NO: 33964 - RNA, 18 nt, Artificial Sequence
  Synthetic oligonucleotide: CBLB-3830
cuagcaucggcaugccaa

SEQ ID NO: 33965 - RNA, 19 nt, Artificial Sequence
  Synthetic oligonucleotide: CBLB-3831
ucuagcaucggcaugccaa

SEQ ID NO: 33966 - RNA, 20 nt, Artificial Sequence
  Synthetic oligonucleotide: CBLB-3030
gucuagcaucggcaugccaa

SEQ ID NO: 33967 - RNA, 21 nt, Artificial Sequence
  Synthetic oligonucleotide: CBLB-3832
agucuagcaucggcaugccaa

SEQ ID NO: 33968 - RNA, 22 nt, Artificial Sequence
  Synthetic oligonucleotide: CBLB-3833
aagucuagcaucggcaugccaa

SEQ ID NO: 33969 - RNA, 23 nt, Artificial Sequence
  Synthetic oligonucleotide: CBLB-3834
caagucuagcaucggcaugccaa

SEQ ID NO: 33970 - RNA, 24 nt, Artificial Sequence
  Synthetic oligonucleotide: CBLB-3835
ccaagucuagcaucggcaugccaa

SEQ ID NO: 33971 - RNA, 18 nt, Artificial Sequence
  Synthetic oligonucleotide: CBLB-3836
cuucaucucuuggaucaa

SEQ ID NO: 33972 - RNA, 19 nt, Artificial Sequence
  Synthetic oligonucleotide: CBLB-3837
ccuucaucucuuggaucaa

SEQ ID NO: 33973 - RNA, 20 nt, Artificial Sequence
  Synthetic oligonucleotide: CBLB-3035
gccuucaucucuuggaucaa

SEQ ID NO: 33974 - RNA, 21 nt, Artificial Sequence
  Synthetic oligonucleotide: CBLB-3838
agccuucaucucuuggaucaa

SEQ ID NO: 33975 - RNA, 22 nt, Artificial Sequence
  Synthetic oligonucleotide: CBLB-3839
gagccuucaucucuuggaucaa

SEQ ID NO: 33976 - RNA, 23 nt, Artificial Sequence
  Synthetic oligonucleotide: CBLB-3840
ggagccuucaucucuuggaucaa

SEQ ID NO: 33977 - RNA, 24 nt, Artificial Sequence
  Synthetic oligonucleotide: CBLB-3841
uggagccuucaucucuuggaucaa

SEQ ID NO: 33978 - RNA, 18 nt, Artificial Sequence
  Synthetic oligonucleotide: CBLB-3842
ccaucaggauaaagauaa

SEQ ID NO: 33979 - RNA, 19 nt, Artificial Sequence
  Synthetic oligonucleotide: CBLB-3843
cccaucaggauaaagauaa

SEQ ID NO: 33980 - RNA, 20 nt, Artificial Sequence
  Synthetic oligonucleotide: CBLB-3844
ucccaucaggauaaagauaa

SEQ ID NO: 33981 - RNA, 21 nt, Artificial Sequence
  Synthetic oligonucleotide: CBLB-3845
cucccaucaggauaaagauaa

SEQ ID NO: 33982 - RNA, 22 nt, Artificial Sequence
  Synthetic oligonucleotide: CBLB-3846
ccucccaucaggauaaagauaa

SEQ ID NO: 33983 - RNA, 23 nt, Artificial Sequence
  Synthetic oligonucleotide: CBLB-3847
uccucccaucaggauaaagauaa

SEQ ID NO: 33984 - RNA, 24 nt, Artificial Sequence
  Synthetic oligonucleotide: CBLB-3848
cuccucccaucaggauaaagauaa

SEQ ID NO: 33985 - RNA, 18 nt, Artificial Sequence
  Synthetic oligonucleotide: CBLB-3849
aaugccgccucaggccca

SEQ ID NO: 33986 - RNA, 19 nt, Artificial Sequence
  Synthetic oligonucleotide: CBLB-3850
caaugccgccucaggccca

SEQ ID NO: 33987 - RNA, 20 nt, Artificial Sequence
  Synthetic oligonucleotide: CBLB-3066
ccaaugccgccucaggccca

SEQ ID NO: 33988 - RNA, 21 nt, Artificial Sequence
  Synthetic oligonucleotide: CBLB-3851
uccaaugccgccucaggccca

SEQ ID NO: 33989 - RNA, 22 nt, Artificial Sequence
  Synthetic oligonucleotide: CBLB-3852
uuccaaugccgccucaggccca

SEQ ID NO: 33990 - RNA, 23 nt, Artificial Sequence
  Synthetic oligonucleotide: CBLB-3853
uuuccaaugccgccucaggccca

SEQ ID NO: 33991 - RNA, 24 nt, Artificial Sequence
  Synthetic oligonucleotide: CBLB-3854
uuuuccaaugccgccucaggccca

SEQ ID NO: 33992 - RNA, 18 nt, Artificial Sequence
  Synthetic oligonucleotide: CBLB-3855
uguguuuccgcauaagca

SEQ ID NO: 33993 - RNA, 19 nt, Artificial Sequence
  Synthetic oligonucleotide: CBLB-3856
cuguguuuccgcauaagca

SEQ ID NO: 33994 - RNA, 20 nt, Artificial Sequence
  Synthetic oligonucleotide: CBLB-3857
ucuguguuuccgcauaagca

SEQ ID NO: 33995 - RNA, 21 nt, Artificial Sequence
  Synthetic oligonucleotide: CBLB-3858
gucuguguuuccgcauaagca

SEQ ID NO: 33996 - RNA, 22 nt, Artificial Sequence
  Synthetic oligonucleotide: CBLB-3859
cgucuguguuuccgcauaagca

SEQ ID NO: 33997 - RNA, 23 nt, Artificial Sequence
  Synthetic oligonucleotide: CBLB-3860
gcgucuguguuuccgcauaagca

SEQ ID NO: 33998 - RNA, 24 nt, Artificial Sequence
  Synthetic oligonucleotide: CBLB-3861
ggcgucuguguuuccgcauaagca

SEQ ID NO: 33999 - RNA, 18 nt, Artificial Sequence
  Synthetic oligonucleotide: CBLB-3862
uggcaggugguaauggca

SEQ ID NO: 34000 - RNA, 19 nt, Artificial Sequence
  Synthetic oligonucleotide: CBLB-3863
cuggcaggugguaauggca

SEQ ID NO: 34001 - RNA, 20 nt, Artificial Sequence
  Synthetic oligonucleotide: CBLB-3076
ccuggcaggugguaauggca

SEQ ID NO: 34002 - RNA, 21 nt, Artificial Sequence
  Synthetic oligonucleotide: CBLB-3864
gccuggcaggugguaauggca

SEQ ID NO: 34003 - RNA, 22 nt, Artificial Sequence
  Synthetic oligonucleotide: CBLB-3865
ggccuggcaggugguaauggca

SEQ ID NO: 34004 - RNA, 23 nt, Artificial Sequence
  Synthetic oligonucleotide: CBLB-3866
aggccuggcaggugguaauggca

SEQ ID NO: 34005 - RNA, 24 nt, Artificial Sequence
  Synthetic oligonucleotide: CBLB-3867
gaggccuggcaggugguaauggca

SEQ ID NO: 34006 - RNA, 18 nt, Artificial Sequence
  Synthetic oligonucleotide: CBLB-3868
cuucucugggcaagggga

SEQ ID NO: 34007 - RNA, 19 nt, Artificial Sequence
  Synthetic oligonucleotide: CBLB-3869
ucuucucugggcaagggga

SEQ ID NO: 34008 - RNA, 20 nt, Artificial Sequence
  Synthetic oligonucleotide: CBLB-3870
uucuucucugggcaagggga

SEQ ID NO: 34009 - RNA, 21 nt, Artificial Sequence
  Synthetic oligonucleotide: CBLB-3871
uuucuucucugggcaagggga

SEQ ID NO: 34010 - RNA, 22 nt, Artificial Sequence
  Synthetic oligonucleotide: CBLB-3872
cuuucuucucugggcaagggga

SEQ ID NO: 34011 - RNA, 23 nt, Artificial Sequence
  Synthetic oligonucleotide: CBLB-3873
gcuuucuucucugggcaagggga

SEQ ID NO: 34012 - RNA, 24 nt, Artificial Sequence
  Synthetic oligonucleotide: CBLB-3874
ggcuuucuucucugggcaagggga

SEQ ID NO: 34013 - RNA, 18 nt, Artificial Sequence
  Synthetic oligonucleotide: CBLB-3875
uuagaugugggaucugga

SEQ ID NO: 34014 - RNA, 19 nt, Artificial Sequence
  Synthetic oligonucleotide: CBLB-3876
cuuagaugugggaucugga

SEQ ID NO: 34015 - RNA, 20 nt, Artificial Sequence
  Synthetic oligonucleotide: CBLB-3877
gcuuagaugugggaucugga

SEQ ID NO: 34016 - RNA, 21 nt, Artificial Sequence
  Synthetic oligonucleotide: CBLB-3878
ggcuuagaugugggaucugga

SEQ ID NO: 34017 - RNA, 22 nt, Artificial Sequence
  Synthetic oligonucleotide: CBLB-3879
aggcuuagaugugggaucugga

SEQ ID NO: 34018 - RNA, 23 nt, Artificial Sequence
  Synthetic oligonucleotide: CBLB-3880
caggcuuagaugugggaucugga

SEQ ID NO: 34019 - RNA, 24 nt, Artificial Sequence
  Synthetic oligonucleotide: CBLB-3881
gcaggcuuagaugugggaucugga

SEQ ID NO: 34020 - RNA, 18 nt, Artificial Sequence
  Synthetic oligonucleotide: CBLB-3882
ggaaacagggugggauga

SEQ ID NO: 34021 - RNA, 19 nt, Artificial Sequence
  Synthetic oligonucleotide: CBLB-3883
gggaaacagggugggauga

SEQ ID NO: 34022 - RNA, 20 nt, Artificial Sequence
  Synthetic oligonucleotide: CBLB-3118
agggaaacagggugggauga

SEQ ID NO: 34023 - RNA, 21 nt, Artificial Sequence
  Synthetic oligonucleotide: CBLB-3884
cagggaaacagggugggauga

SEQ ID NO: 34024 - RNA, 22 nt, Artificial Sequence
  Synthetic oligonucleotide: CBLB-3885
ucagggaaacagggugggauga

SEQ ID NO: 34025 - RNA, 23 nt, Artificial Sequence
  Synthetic oligonucleotide: CBLB-3886
uucagggaaacagggugggauga

SEQ ID NO: 34026 - RNA, 24 nt, Artificial Sequence
  Synthetic oligonucleotide: CBLB-3887
auucagggaaacagggugggauga

SEQ ID NO: 34027 - RNA, 18 nt, Artificial Sequence
  Synthetic oligonucleotide: CBLB-3888
aaucaaaaacaucuccua

SEQ ID NO: 34028 - RNA, 19 nt, Artificial Sequence
  Synthetic oligonucleotide: CBLB-3889
gaaucaaaaacaucuccua

SEQ ID NO: 34029 - RNA, 20 nt, Artificial Sequence
  Synthetic oligonucleotide: CBLB-3890
ugaaucaaaaacaucuccua

SEQ ID NO: 34030 - RNA, 21 nt, Artificial Sequence
  Synthetic oligonucleotide: CBLB-3891
cugaaucaaaaacaucuccua

SEQ ID NO: 34031 - RNA, 22 nt, Artificial Sequence
  Synthetic oligonucleotide: CBLB-3892
gcugaaucaaaaacaucuccua

SEQ ID NO: 34032 - RNA, 23 nt, Artificial Sequence
  Synthetic oligonucleotide: CBLB-3893
ggcugaaucaaaaacaucuccua

SEQ ID NO: 34033 - RNA, 24 nt, Artificial Sequence
  Synthetic oligonucleotide: CBLB-3894
aggcugaaucaaaaacaucuccua

SEQ ID NO: 34034 - RNA, 18 nt, Artificial Sequence
  Synthetic oligonucleotide: CBLB-3895
caucaucaucuuccucua

SEQ ID NO: 34035 - RNA, 19 nt, Artificial Sequence
  Synthetic oligonucleotide: CBLB-3896
ucaucaucaucuuccucua

SEQ ID NO: 34036 - RNA, 20 nt, Artificial Sequence
  Synthetic oligonucleotide: CBLB-3897
uucaucaucaucuuccucua

SEQ ID NO: 34037 - RNA, 21 nt, Artificial Sequence
  Synthetic oligonucleotide: CBLB-3898
auucaucaucaucuuccucua

SEQ ID NO: 34038 - RNA, 22 nt, Artificial Sequence
  Synthetic oligonucleotide: CBLB-3899
uauucaucaucaucuuccucua

SEQ ID NO: 34039 - RNA, 23 nt, Artificial Sequence
  Synthetic oligonucleotide: CBLB-3900
guauucaucaucaucuuccucua

SEQ ID NO: 34040 - RNA, 24 nt, Artificial Sequence
  Synthetic oligonucleotide: CBLB-3901
uguauucaucaucaucuuccucua

SEQ ID NO: 34041 - RNA, 18 nt, Artificial Sequence
  Synthetic oligonucleotide: CBLB-3902
cugcgcggucgugguuua

SEQ ID NO: 34042 - RNA, 19 nt, Artificial Sequence
  Synthetic oligonucleotide: CBLB-3903
ccugcgcggucgugguuua

SEQ ID NO: 34043 - RNA, 20 nt, Artificial Sequence
  Synthetic oligonucleotide: CBLB-3137
uccugcgcggucgugguuua

SEQ ID NO: 34044 - RNA, 21 nt, Artificial Sequence
  Synthetic oligonucleotide: CBLB-3904
guccugcgcggucgugguuua

SEQ ID NO: 34045 - RNA, 22 nt, Artificial Sequence
  Synthetic oligonucleotide: CBLB-3905
aguccugcgcggucgugguuua

SEQ ID NO: 34046 - RNA, 23 nt, Artificial Sequence
  Synthetic oligonucleotide: CBLB-3906
caguccugcgcggucgugguuua

SEQ ID NO: 34047 - RNA, 24 nt, Artificial Sequence
  Synthetic oligonucleotide: CBLB-3907
gcaguccugcgcggucgugguuua

SEQ ID NO: 34048 - RNA, 18 nt, Artificial Sequence
  Synthetic oligonucleotide: CBLB-3908
ugagaaaugccauguaac

SEQ ID NO: 34049 - RNA, 19 nt, Artificial Sequence
  Synthetic oligonucleotide: CBLB-3909
gugagaaaugccauguaac

SEQ ID NO: 34050 - RNA, 20 nt, Artificial Sequence
  Synthetic oligonucleotide: CBLB-3910
ugugagaaaugccauguaac

SEQ ID NO: 34051 - RNA, 21 nt, Artificial Sequence
  Synthetic oligonucleotide: CBLB-3911
augugagaaaugccauguaac

SEQ ID NO: 34052 - RNA, 22 nt, Artificial Sequence
  Synthetic oligonucleotide: CBLB-3912
uaugugagaaaugccauguaac

SEQ ID NO: 34053 - RNA, 23 nt, Artificial Sequence
  Synthetic oligonucleotide: CBLB-3913
auaugugagaaaugccauguaac

SEQ ID NO: 34054 - RNA, 24 nt, Artificial Sequence
  Synthetic oligonucleotide: CBLB-3914
cauaugugagaaaugccauguaac

SEQ ID NO: 34055 - RNA, 18 nt, Artificial Sequence
  Synthetic oligonucleotide: CBLB-3915
auacgaaaguuaucuccc

SEQ ID NO: 34056 - RNA, 19 nt, Artificial Sequence
  Synthetic oligonucleotide: CBLB-3916
gauacgaaaguuaucuccc

SEQ ID NO: 34057 - RNA, 20 nt, Artificial Sequence
  Synthetic oligonucleotide: CBLB-3171
ugauacgaaaguuaucuccc

SEQ ID NO: 34058 - RNA, 21 nt, Artificial Sequence
  Synthetic oligonucleotide: CBLB-3917
gugauacgaaaguuaucuccc

SEQ ID NO: 34059 - RNA, 22 nt, Artificial Sequence
  Synthetic oligonucleotide: CBLB-3918
ugugauacgaaaguuaucuccc

SEQ ID NO: 34060 - RNA, 23 nt, Artificial Sequence
  Synthetic oligonucleotide: CBLB-3919
uugugauacgaaaguuaucuccc

SEQ ID NO: 34061 - RNA, 24 nt, Artificial Sequence
  Synthetic oligonucleotide: CBLB-3920
uuugugauacgaaaguuaucuccc

SEQ ID NO: 34062 - RNA, 18 nt, Artificial Sequence
  Synthetic oligonucleotide: CBLB-3921
aaggcauaacccucuccc

SEQ ID NO: 34063 - RNA, 19 nt, Artificial Sequence
  Synthetic oligonucleotide: CBLB-3922
aaaggcauaacccucuccc

SEQ ID NO: 34064 - RNA, 20 nt, Artificial Sequence
  Synthetic oligonucleotide: CBLB-3923
caaaggcauaacccucuccc

SEQ ID NO: 34065 - RNA, 21 nt, Artificial Sequence
  Synthetic oligonucleotide: CBLB-3924
ucaaaggcauaacccucuccc

SEQ ID NO: 34066 - RNA, 22 nt, Artificial Sequence
  Synthetic oligonucleotide: CBLB-3925
uucaaaggcauaacccucuccc

SEQ ID NO: 34067 - RNA, 23 nt, Artificial Sequence
  Synthetic oligonucleotide: CBLB-3926
cuucaaaggcauaacccucuccc

SEQ ID NO: 34068 - RNA, 24 nt, Artificial Sequence
  Synthetic oligonucleotide: CBLB-3927
ucuucaaaggcauaacccucuccc

SEQ ID NO: 34069 - RNA, 18 nt, Artificial Sequence
  Synthetic oligonucleotide: CBLB-3928
uauaauucauauuguucc

SEQ ID NO: 34070 - RNA, 19 nt, Artificial Sequence
  Synthetic oligonucleotide: CBLB-3929
auauaauucauauuguucc

SEQ ID NO: 34071 - RNA, 20 nt, Artificial Sequence
  Synthetic oligonucleotide: CBLB-3191
aauauaauucauauuguucc

SEQ ID NO: 34072 - RNA, 21 nt, Artificial Sequence
  Synthetic oligonucleotide: CBLB-3930
caauauaauucauauuguucc

SEQ ID NO: 34073 - RNA, 22 nt, Artificial Sequence
  Synthetic oligonucleotide: CBLB-3931
acaauauaauucauauuguucc

SEQ ID NO: 34074 - RNA, 23 nt, Artificial Sequence
  Synthetic oligonucleotide: CBLB-3932
cacaauauaauucauauuguucc

SEQ ID NO: 34075 - RNA, 24 nt, Artificial Sequence
  Synthetic oligonucleotide: CBLB-3933
ucacaauauaauucauauuguucc

SEQ ID NO: 34076 - RNA, 18 nt, Artificial Sequence
  Synthetic oligonucleotide: CBLB-3934
agauccaggcgaggaggc

SEQ ID NO: 34077 - RNA, 19 nt, Artificial Sequence
  Synthetic oligonucleotide: CBLB-3935
uagauccaggcgaggaggc

SEQ ID NO: 34078 - RNA, 20 nt, Artificial Sequence
  Synthetic oligonucleotide: CBLB-3936
uuagauccaggcgaggaggc

SEQ ID NO: 34079 - RNA, 21 nt, Artificial Sequence
  Synthetic oligonucleotide: CBLB-3937
auuagauccaggcgaggaggc

SEQ ID NO: 34080 - RNA, 22 nt, Artificial Sequence
  Synthetic oligonucleotide: CBLB-3938
aauuagauccaggcgaggaggc

SEQ ID NO: 34081 - RNA, 23 nt, Artificial Sequence
  Synthetic oligonucleotide: CBLB-3939
gaauuagauccaggcgaggaggc

SEQ ID NO: 34082 - RNA, 24 nt, Artificial Sequence
  Synthetic oligonucleotide: CBLB-3940
ugaauuagauccaggcgaggaggc

SEQ ID NO: 34083 - RNA, 18 nt, Artificial Sequence
  Synthetic oligonucleotide: CBLB-3941
uaaacaaauagaaaaugc

SEQ ID NO: 34084 - RNA, 19 nt, Artificial Sequence
  Synthetic oligonucleotide: CBLB-3942
cuaaacaaauagaaaaugc

SEQ ID NO: 34085 - RNA, 20 nt, Artificial Sequence
  Synthetic oligonucleotide: CBLB-3943
ccuaaacaaauagaaaaugc

SEQ ID NO: 34086 - RNA, 21 nt, Artificial Sequence
  Synthetic oligonucleotide: CBLB-3944
uccuaaacaaauagaaaaugc

SEQ ID NO: 34087 - RNA, 22 nt, Artificial Sequence
  Synthetic oligonucleotide: CBLB-3945
cuccuaaacaaauagaaaaugc

SEQ ID NO: 34088 - RNA, 23 nt, Artificial Sequence
  Synthetic oligonucleotide: CBLB-3946
acuccuaaacaaauagaaaaugc

SEQ ID NO: 34089 - RNA, 24 nt, Artificial Sequence
  Synthetic oligonucleotide: CBLB-3947
gacuccuaaacaaauagaaaaugc

SEQ ID NO: 34090 - RNA, 18 nt, Artificial Sequence
  Synthetic oligonucleotide: CBLB-3948
aggcuuagaugugggauc

SEQ ID NO: 34091 - RNA, 19 nt, Artificial Sequence
  Synthetic oligonucleotide: CBLB-3949
caggcuuagaugugggauc

SEQ ID NO: 34092 - RNA, 20 nt, Artificial Sequence
  Synthetic oligonucleotide: CBLB-3211
gcaggcuuagaugugggauc

SEQ ID NO: 34093 - RNA, 21 nt, Artificial Sequence
  Synthetic oligonucleotide: CBLB-3950
ggcaggcuuagaugugggauc

SEQ ID NO: 34094 - RNA, 22 nt, Artificial Sequence
  Synthetic oligonucleotide: CBLB-3951
uggcaggcuuagaugugggauc

SEQ ID NO: 34095 - RNA, 23 nt, Artificial Sequence
  Synthetic oligonucleotide: CBLB-3952
guggcaggcuuagaugugggauc

SEQ ID NO: 34096 - RNA, 24 nt, Artificial Sequence
  Synthetic oligonucleotide: CBLB-3953
gguggcaggcuuagaugugggauc

SEQ ID NO: 34097 - RNA, 18 nt, Artificial Sequence
  Synthetic oligonucleotide: CBLB-3954
accuggagccuucaucuc

SEQ ID NO: 34098 - RNA, 19 nt, Artificial Sequence
  Synthetic oligonucleotide: CBLB-3955
caccuggagccuucaucuc

SEQ ID NO: 34099 - RNA, 20 nt, Artificial Sequence
  Synthetic oligonucleotide: CBLB-3956
acaccuggagccuucaucuc

SEQ ID NO: 34100 - RNA, 21 nt, Artificial Sequence
  Synthetic oligonucleotide: CBLB-3957
aacaccuggagccuucaucuc

SEQ ID NO: 34101 - RNA, 22 nt, Artificial Sequence
  Synthetic oligonucleotide: CBLB-3958
caacaccuggagccuucaucuc

SEQ ID NO: 34102 - RNA, 23 nt, Artificial Sequence
  Synthetic oligonucleotide: CBLB-3959
gcaacaccuggagccuucaucuc

SEQ ID NO: 34103 - RNA, 24 nt, Artificial Sequence
  Synthetic oligonucleotide: CBLB-3960
ugcaacaccuggagccuucaucuc

SEQ ID NO: 34104 - RNA, 18 nt, Artificial Sequence
  Synthetic oligonucleotide: CBLB-3961
ucuccaaaaaacuuucuc

SEQ ID NO: 34105 - RNA, 19 nt, Artificial Sequence
  Synthetic oligonucleotide: CBLB-3962
gucuccaaaaaacuuucuc

SEQ ID NO: 34106 - RNA, 20 nt, Artificial Sequence
  Synthetic oligonucleotide: CBLB-3963
ugucuccaaaaaacuuucuc

SEQ ID NO: 34107 - RNA, 21 nt, Artificial Sequence
  Synthetic oligonucleotide: CBLB-3964
uugucuccaaaaaacuuucuc

SEQ ID NO: 34108 - RNA, 22 nt, Artificial Sequence
  Synthetic oligonucleotide: CBLB-3965
cuugucuccaaaaaacuuucuc

SEQ ID NO: 34109 - RNA, 23 nt, Artificial Sequence
  Synthetic oligonucleotide: CBLB-3966
acuugucuccaaaaaacuuucuc

SEQ ID NO: 34110 - RNA, 24 nt, Artificial Sequence
  Synthetic oligonucleotide: CBLB-3967
uacuugucuccaaaaaacuuucuc

SEQ ID NO: 34111 - RNA, 18 nt, Artificial Sequence
  Synthetic oligonucleotide: CBLB-3968
uaaauauaugcuuaaguc

SEQ ID NO: 34112 - RNA, 19 nt, Artificial Sequence
  Synthetic oligonucleotide: CBLB-3969
uuaaauauaugcuuaaguc

SEQ ID NO: 34113 - RNA, 20 nt, Artificial Sequence
  Synthetic oligonucleotide: CBLB-3220
uuuaaauauaugcuuaaguc

SEQ ID NO: 34114 - RNA, 21 nt, Artificial Sequence
  Synthetic oligonucleotide: CBLB-3970
cuuuaaauauaugcuuaaguc

SEQ ID NO: 34115 - RNA, 22 nt, Artificial Sequence
  Synthetic oligonucleotide: CBLB-3971
ccuuuaaauauaugcuuaaguc

SEQ ID NO: 34116 - RNA, 23 nt, Artificial Sequence
  Synthetic oligonucleotide: CBLB-3972
cccuuuaaauauaugcuuaaguc

SEQ ID NO: 34117 - RNA, 24 nt, Artificial Sequence
  Synthetic oligonucleotide: CBLB-3973
acccuuuaaauauaugcuuaaguc

SEQ ID NO: 34118 - RNA, 18 nt, Artificial Sequence
  Synthetic oligonucleotide: CBLB-3974
accaugcuuuggauuguc

SEQ ID NO: 34119 - RNA, 19 nt, Artificial Sequence
  Synthetic oligonucleotide: CBLB-3975
aaccaugcuuuggauuguc

SEQ ID NO: 34120 - RNA, 20 nt, Artificial Sequence
  Synthetic oligonucleotide: CBLB-3976
gaaccaugcuuuggauuguc

SEQ ID NO: 34121 - RNA, 21 nt, Artificial Sequence
  Synthetic oligonucleotide: CBLB-3977
agaaccaugcuuuggauuguc

SEQ ID NO: 34122 - RNA, 22 nt, Artificial Sequence
  Synthetic oligonucleotide: CBLB-3978
aagaaccaugcuuuggauuguc

SEQ ID NO: 34123 - RNA, 23 nt, Artificial Sequence
  Synthetic oligonucleotide: CBLB-3979
gaagaaccaugcuuuggauuguc

SEQ ID NO: 34124 - RNA, 24 nt, Artificial Sequence
  Synthetic oligonucleotide: CBLB-3980
ugaagaaccaugcuuuggauuguc

SEQ ID NO: 34125 - RNA, 18 nt, Artificial Sequence
  Synthetic oligonucleotide: CBLB-3981
ucacuuuaugcuagggag

SEQ ID NO: 34126 - RNA, 19 nt, Artificial Sequence
  Synthetic oligonucleotide: CBLB-3982
cucacuuuaugcuagggag

SEQ ID NO: 34127 - RNA, 20 nt, Artificial Sequence
  Synthetic oligonucleotide: CBLB-3983
acucacuuuaugcuagggag

SEQ ID NO: 34128 - RNA, 21 nt, Artificial Sequence
  Synthetic oligonucleotide: CBLB-3984
aacucacuuuaugcuagggag

SEQ ID NO: 34129 - RNA, 22 nt, Artificial Sequence
  Synthetic oligonucleotide: CBLB-3985
aaacucacuuuaugcuagggag

SEQ ID NO: 34130 - RNA, 23 nt, Artificial Sequence
  Synthetic oligonucleotide: CBLB-3986
aaaacucacuuuaugcuagggag

SEQ ID NO: 34131 - RNA, 24 nt, Artificial Sequence
  Synthetic oligonucleotide: CBLB-3987
caaaacucacuuuaugcuagggag

SEQ ID NO: 34132 - RNA, 18 nt, Artificial Sequence
  Synthetic oligonucleotide: CBLB-3988
uuucagguggcgguggag

SEQ ID NO: 34133 - RNA, 19 nt, Artificial Sequence
  Synthetic oligonucleotide: CBLB-3989
cuuucagguggcgguggag

SEQ ID NO: 34134 - RNA, 20 nt, Artificial Sequence
  Synthetic oligonucleotide: CBLB-3990
ucuuucagguggcgguggag

SEQ ID NO: 34135 - RNA, 21 nt, Artificial Sequence
  Synthetic oligonucleotide: CBLB-3991
gucuuucagguggcgguggag

SEQ ID NO: 34136 - RNA, 22 nt, Artificial Sequence
  Synthetic oligonucleotide: CBLB-3992
ggucuuucagguggcgguggag

SEQ ID NO: 34137 - RNA, 23 nt, Artificial Sequence
  Synthetic oligonucleotide: CBLB-3993
aggucuuucagguggcgguggag

SEQ ID NO: 34138 - RNA, 24 nt, Artificial Sequence
  Synthetic oligonucleotide: CBLB-3994
gaggucuuucagguggcgguggag

SEQ ID NO: 34139 - RNA, 18 nt, Artificial Sequence
  Synthetic oligonucleotide: CBLB-3995
agggaaggcaaauucucg

SEQ ID NO: 34140 - RNA, 19 nt, Artificial Sequence
  Synthetic oligonucleotide: CBLB-3996
gagggaaggcaaauucucg

SEQ ID NO: 34141 - RNA, 20 nt, Artificial Sequence
  Synthetic oligonucleotide: CBLB-3997
ggagggaaggcaaauucucg

SEQ ID NO: 34142 - RNA, 21 nt, Artificial Sequence
  Synthetic oligonucleotide: CBLB-3998
aggagggaaggcaaauucucg

SEQ ID NO: 34143 - RNA, 22 nt, Artificial Sequence
  Synthetic oligonucleotide: CBLB-3999
gaggagggaaggcaaauucucg

SEQ ID NO: 34144 - RNA, 23 nt, Artificial Sequence
  Synthetic oligonucleotide: CBLB-4000
ggaggagggaaggcaaauucucg

SEQ ID NO: 34145 - RNA, 24 nt, Artificial Sequence
  Synthetic oligonucleotide: CBLB-4001
uggaggagggaaggcaaauucucg

SEQ ID NO: 34146 - RNA, 18 nt, Artificial Sequence
  Synthetic oligonucleotide: CBLB-4002
auggcacgggaucagagg

SEQ ID NO: 34147 - RNA, 19 nt, Artificial Sequence
  Synthetic oligonucleotide: CBLB-4003
aauggcacgggaucagagg

SEQ ID NO: 34148 - RNA, 20 nt, Artificial Sequence
  Synthetic oligonucleotide: CBLB-4004
uaauggcacgggaucagagg

SEQ ID NO: 34149 - RNA, 21 nt, Artificial Sequence
  Synthetic oligonucleotide: CBLB-4005
guaauggcacgggaucagagg

SEQ ID NO: 34150 - RNA, 22 nt, Artificial Sequence
  Synthetic oligonucleotide: CBLB-4006
gguaauggcacgggaucagagg

SEQ ID NO: 34151 - RNA, 23 nt, Artificial Sequence
  Synthetic oligonucleotide: CBLB-4007
ugguaauggcacgggaucagagg

SEQ ID NO: 34152 - RNA, 24 nt, Artificial Sequence
  Synthetic oligonucleotide: CBLB-4008
gugguaauggcacgggaucagagg

SEQ ID NO: 34153 - RNA, 18 nt, Artificial Sequence
  Synthetic oligonucleotide: CBLB-4009
gaauucagggaaacaggg

SEQ ID NO: 34154 - RNA, 19 nt, Artificial Sequence
  Synthetic oligonucleotide: CBLB-4010
ugaauucagggaaacaggg

SEQ ID NO: 34155 - RNA, 20 nt, Artificial Sequence
  Synthetic oligonucleotide: CBLB-3288
gugaauucagggaaacaggg

SEQ ID NO: 34156 - RNA, 21 nt, Artificial Sequence
  Synthetic oligonucleotide: CBLB-4011
ugugaauucagggaaacaggg

SEQ ID NO: 34157 - RNA, 22 nt, Artificial Sequence
  Synthetic oligonucleotide: CBLB-4012
uugugaauucagggaaacaggg

SEQ ID NO: 34158 - RNA, 23 nt, Artificial Sequence
  Synthetic oligonucleotide: CBLB-4013
guugugaauucagggaaacaggg

SEQ ID NO: 34159 - RNA, 24 nt, Artificial Sequence
  Synthetic oligonucleotide: CBLB-4014
gguugugaauucagggaaacaggg

SEQ ID NO: 34160 - RNA, 18 nt, Artificial Sequence
  Synthetic oligonucleotide: CBLB-4015
aagguuucaaccuaaugg

SEQ ID NO: 34161 - RNA, 19 nt, Artificial Sequence
  Synthetic oligonucleotide: CBLB-4016
aaagguuucaaccuaaugg

SEQ ID NO: 34162 - RNA, 20 nt, Artificial Sequence
  Synthetic oligonucleotide: CBLB-3297
uaaagguuucaaccuaaugg

SEQ ID NO: 34163 - RNA, 21 nt, Artificial Sequence
  Synthetic oligonucleotide: CBLB-4017
uuaaagguuucaaccuaaugg

SEQ ID NO: 34164 - RNA, 22 nt, Artificial Sequence
  Synthetic oligonucleotide: CBLB-4018
uuuaaagguuucaaccuaaugg

SEQ ID NO: 34165 - RNA, 23 nt, Artificial Sequence
  Synthetic oligonucleotide: CBLB-4019
uuuuaaagguuucaaccuaaugg

SEQ ID NO: 34166 - RNA, 24 nt, Artificial Sequence
  Synthetic oligonucleotide: CBLB-4020
uuuuuaaagguuucaaccuaaugg

SEQ ID NO: 34167 - RNA, 18 nt, Artificial Sequence
  Synthetic oligonucleotide: CBLB-4021
acucagucuauugucugg

SEQ ID NO: 34168 - RNA, 19 nt, Artificial Sequence
  Synthetic oligonucleotide: CBLB-4022
uacucagucuauugucugg

SEQ ID NO: 34169 - RNA, 20 nt, Artificial Sequence
  Synthetic oligonucleotide: CBLB-3302
cuacucagucuauugucugg

SEQ ID NO: 34170 - RNA, 21 nt, Artificial Sequence
  Synthetic oligonucleotide: CBLB-4023
ucuacucagucuauugucugg

SEQ ID NO: 34171 - RNA, 22 nt, Artificial Sequence
  Synthetic oligonucleotide: CBLB-4024
gucuacucagucuauugucugg

SEQ ID NO: 34172 - RNA, 23 nt, Artificial Sequence
  Synthetic oligonucleotide: CBLB-4025
ugucuacucagucuauugucugg

SEQ ID NO: 34173 - RNA, 24 nt, Artificial Sequence
  Synthetic oligonucleotide: CBLB-4026
gugucuacucagucuauugucugg

SEQ ID NO: 34174 - RNA, 18 nt, Artificial Sequence
  Synthetic oligonucleotide: CBLB-4027
aggcacgcuuuccacaug

SEQ ID NO: 34175 - RNA, 19 nt, Artificial Sequence
  Synthetic oligonucleotide: CBLB-4028
aaggcacgcuuuccacaug

SEQ ID NO: 34176 - RNA, 20 nt, Artificial Sequence
  Synthetic oligonucleotide: CBLB-4029
gaaggcacgcuuuccacaug

SEQ ID NO: 34177 - RNA, 21 nt, Artificial Sequence
  Synthetic oligonucleotide: CBLB-4030
ggaaggcacgcuuuccacaug

SEQ ID NO: 34178 - RNA, 22 nt, Artificial Sequence
  Synthetic oligonucleotide: CBLB-4031
uggaaggcacgcuuuccacaug

SEQ ID NO: 34179 - RNA, 23 nt, Artificial Sequence
  Synthetic oligonucleotide: CBLB-4032
cuggaaggcacgcuuuccacaug

SEQ ID NO: 34180 - RNA, 24 nt, Artificial Sequence
  Synthetic oligonucleotide: CBLB-4033
ucuggaaggcacgcuuuccacaug

SEQ ID NO: 34181 - RNA, 18 nt, Artificial Sequence
  Synthetic oligonucleotide: CBLB-4034
ggguggcaggcuuagaug

SEQ ID NO: 34182 - RNA, 19 nt, Artificial Sequence
  Synthetic oligonucleotide: CBLB-4035
cggguggcaggcuuagaug

SEQ ID NO: 34183 - RNA, 20 nt, Artificial Sequence
  Synthetic oligonucleotide: CBLB-3314
acggguggcaggcuuagaug

SEQ ID NO: 34184 - RNA, 21 nt, Artificial Sequence
  Synthetic oligonucleotide: CBLB-4036
cacggguggcaggcuuagaug

SEQ ID NO: 34185 - RNA, 22 nt, Artificial Sequence
  Synthetic oligonucleotide: CBLB-4037
gcacggguggcaggcuuagaug

SEQ ID NO: 34186 - RNA, 23 nt, Artificial Sequence
  Synthetic oligonucleotide: CBLB-4038
ggcacggguggcaggcuuagaug

SEQ ID NO: 34187 - RNA, 24 nt, Artificial Sequence
  Synthetic oligonucleotide: CBLB-4039
aggcacggguggcaggcuuagaug

SEQ ID NO: 34188 - RNA, 18 nt, Artificial Sequence
  Synthetic oligonucleotide: CBLB-4040
auccuggugaugugacug

SEQ ID NO: 34189 - RNA, 19 nt, Artificial Sequence
  Synthetic oligonucleotide: CBLB-4041
gauccuggugaugugacug

SEQ ID NO: 34190 - RNA, 20 nt, Artificial Sequence
  Synthetic oligonucleotide: CBLB-4042
ggauccuggugaugugacug

SEQ ID NO: 34191 - RNA, 21 nt, Artificial Sequence
  Synthetic oligonucleotide: CBLB-4043
aggauccuggugaugugacug

SEQ ID NO: 34192 - RNA, 22 nt, Artificial Sequence
  Synthetic oligonucleotide: CBLB-4044
gaggauccuggugaugugacug

SEQ ID NO: 34193 - RNA, 23 nt, Artificial Sequence
  Synthetic oligonucleotide: CBLB-4045
agaggauccuggugaugugacug

SEQ ID NO: 34194 - RNA, 24 nt, Artificial Sequence
  Synthetic oligonucleotide: CBLB-4046
gagaggauccuggugaugugacug

SEQ ID NO: 34195 - RNA, 18 nt, Artificial Sequence
  Synthetic oligonucleotide: CBLB-4047
uaaucagagggcguccug

SEQ ID NO: 34196 - RNA, 19 nt, Artificial Sequence
  Synthetic oligonucleotide: CBLB-4048
auaaucagagggcguccug

SEQ ID NO: 34197 - RNA, 20 nt, Artificial Sequence
  Synthetic oligonucleotide: CBLB-4049
cauaaucagagggcguccug

SEQ ID NO: 34198 - RNA, 21 nt, Artificial Sequence
  Synthetic oligonucleotide: CBLB-4050
ucauaaucagagggcguccug

SEQ ID NO: 34199 - RNA, 22 nt, Artificial Sequence
  Synthetic oligonucleotide: CBLB-4051
aucauaaucagagggcguccug

SEQ ID NO: 34200 - RNA, 23 nt, Artificial Sequence
  Synthetic oligonucleotide: CBLB-4052
gaucauaaucagagggcguccug

SEQ ID NO: 34201 - RNA, 24 nt, Artificial Sequence
  Synthetic oligonucleotide: CBLB-4053
agaucauaaucagagggcguccug

SEQ ID NO: 34202 - RNA, 18 nt, Artificial Sequence
  Synthetic oligonucleotide: CBLB-4054
cccaugggguuuucugug

SEQ ID NO: 34203 - RNA, 19 nt, Artificial Sequence
  Synthetic oligonucleotide: CBLB-4055
gcccaugggguuuucugug

SEQ ID NO: 34204 - RNA, 20 nt, Artificial Sequence
  Synthetic oligonucleotide: CBLB-4056
ggcccaugggguuuucugug

SEQ ID NO: 34205 - RNA, 21 nt, Artificial Sequence
  Synthetic oligonucleotide: CBLB-4057
aggcccaugggguuuucugug

SEQ ID NO: 34206 - RNA, 22 nt, Artificial Sequence
  Synthetic oligonucleotide: CBLB-4058
caggcccaugggguuuucugug

SEQ ID NO: 34207 - RNA, 23 nt, Artificial Sequence
  Synthetic oligonucleotide: CBLB-4059
ucaggcccaugggguuuucugug

SEQ ID NO: 34208 - RNA, 24 nt, Artificial Sequence
  Synthetic oligonucleotide: CBLB-4060
cucaggcccaugggguuuucugug

SEQ ID NO: 34209 - RNA, 18 nt, Artificial Sequence
  Synthetic oligonucleotide: CBLB-4061
augcuucaagaggcauug

SEQ ID NO: 34210 - RNA, 19 nt, Artificial Sequence
  Synthetic oligonucleotide: CBLB-4062
caugcuucaagaggcauug

SEQ ID NO: 34211 - RNA, 20 nt, Artificial Sequence
  Synthetic oligonucleotide: CBLB-4063
ccaugcuucaagaggcauug

SEQ ID NO: 34212 - RNA, 21 nt, Artificial Sequence
  Synthetic oligonucleotide: CBLB-4064
accaugcuucaagaggcauug

SEQ ID NO: 34213 - RNA, 22 nt, Artificial Sequence
  Synthetic oligonucleotide: CBLB-4065
caccaugcuucaagaggcauug

SEQ ID NO: 34214 - RNA, 23 nt, Artificial Sequence
  Synthetic oligonucleotide: CBLB-4066
gcaccaugcuucaagaggcauug

SEQ ID NO: 34215 - RNA, 24 nt, Artificial Sequence
  Synthetic oligonucleotide: CBLB-4067
ggcaccaugcuucaagaggcauug

SEQ ID NO: 34216 - RNA, 18 nt, Artificial Sequence
  Synthetic oligonucleotide: CBLB-4068
cacauaauccaguuaaau

SEQ ID NO: 34217 - RNA, 19 nt, Artificial Sequence
  Synthetic oligonucleotide: CBLB-4069
ucacauaauccaguuaaau

SEQ ID NO: 34218 - RNA, 20 nt, Artificial Sequence
  Synthetic oligonucleotide: CBLB-4070
uucacauaauccaguuaaau

SEQ ID NO: 34219 - RNA, 21 nt, Artificial Sequence
  Synthetic oligonucleotide: CBLB-4071
guucacauaauccaguuaaau

SEQ ID NO: 34220 - RNA, 22 nt, Artificial Sequence
  Synthetic oligonucleotide: CBLB-4072
gguucacauaauccaguuaaau

SEQ ID NO: 34221 - RNA, 23 nt, Artificial Sequence
  Synthetic oligonucleotide: CBLB-4073
agguucacauaauccaguuaaau

SEQ ID NO: 34222 - RNA, 24 nt, Artificial Sequence
  Synthetic oligonucleotide: CBLB-4074
uagguucacauaauccaguuaaau

SEQ ID NO: 34223 - RNA, 18 nt, Artificial Sequence
  Synthetic oligonucleotide: CBLB-4075
gauuauaacuccucccau

SEQ ID NO: 34224 - RNA, 19 nt, Artificial Sequence
  Synthetic oligonucleotide: CBLB-4076
ggauuauaacuccucccau

SEQ ID NO: 34225 - RNA, 20 nt, Artificial Sequence
  Synthetic oligonucleotide: CBLB-4077
aggauuauaacuccucccau

SEQ ID NO: 34226 - RNA, 21 nt, Artificial Sequence
  Synthetic oligonucleotide: CBLB-4078
caggauuauaacuccucccau

SEQ ID NO: 34227 - RNA, 22 nt, Artificial Sequence
  Synthetic oligonucleotide: CBLB-4079
ucaggauuauaacuccucccau

SEQ ID NO: 34228 - RNA, 23 nt, Artificial Sequence
  Synthetic oligonucleotide: CBLB-4080
aucaggauuauaacuccucccau

SEQ ID NO: 34229 - RNA, 24 nt, Artificial Sequence
  Synthetic oligonucleotide: CBLB-4081
aaucaggauuauaacuccucccau

SEQ ID NO: 34230 - RNA, 18 nt, Artificial Sequence
  Synthetic oligonucleotide: CBLB-4082
uuuggagagcccuccccu

SEQ ID NO: 34231 - RNA, 19 nt, Artificial Sequence
  Synthetic oligonucleotide: CBLB-4083
uuuuggagagcccuccccu

SEQ ID NO: 34232 - RNA, 20 nt, Artificial Sequence
  Synthetic oligonucleotide: CBLB-3359
guuuuggagagcccuccccu

SEQ ID NO: 34233 - RNA, 21 nt, Artificial Sequence
  Synthetic oligonucleotide: CBLB-4084
gguuuuggagagcccuccccu

SEQ ID NO: 34234 - RNA, 22 nt, Artificial Sequence
  Synthetic oligonucleotide: CBLB-4085
agguuuuggagagcccuccccu

SEQ ID NO: 34235 - RNA, 23 nt, Artificial Sequence
  Synthetic oligonucleotide: CBLB-4086
cagguuuuggagagcccuccccu

SEQ ID NO: 34236 - RNA, 24 nt, Artificial Sequence
  Synthetic oligonucleotide: CBLB-4087
ccagguuuuggagagcccuccccu

SEQ ID NO: 34237 - RNA, 18 nt, Artificial Sequence
  Synthetic oligonucleotide: CBLB-4088
agaaaaagauccuguccu

SEQ ID NO: 34238 - RNA, 19 nt, Artificial Sequence
  Synthetic oligonucleotide: CBLB-4089
aagaaaaagauccuguccu

SEQ ID NO: 34239 - RNA, 20 nt, Artificial Sequence
  Synthetic oligonucleotide: CBLB-4090
gaagaaaaagauccuguccu

SEQ ID NO: 34240 - RNA, 21 nt, Artificial Sequence
  Synthetic oligonucleotide: CBLB-4091
agaagaaaaagauccuguccu

SEQ ID NO: 34241 - RNA, 22 nt, Artificial Sequence
  Synthetic oligonucleotide: CBLB-4092
aagaagaaaaagauccuguccu

SEQ ID NO: 34242 - RNA, 23 nt, Artificial Sequence
  Synthetic oligonucleotide: CBLB-4093
gaagaagaaaaagauccuguccu

SEQ ID NO: 34243 - RNA, 24 nt, Artificial Sequence
  Synthetic oligonucleotide: CBLB-4094
ggaagaagaaaaagauccuguccu

SEQ ID NO: 34244 - RNA, 18 nt, Artificial Sequence
  Synthetic oligonucleotide: CBLB-4095
ugagugaagaaccaugcu

SEQ ID NO: 34245 - RNA, 19 nt, Artificial Sequence
  Synthetic oligonucleotide: CBLB-4096
uugagugaagaaccaugcu

SEQ ID NO: 34246 - RNA, 20 nt, Artificial Sequence
  Synthetic oligonucleotide: CBLB-4097
guugagugaagaaccaugcu

SEQ ID NO: 34247 - RNA, 21 nt, Artificial Sequence
  Synthetic oligonucleotide: CBLB-4098
uguugagugaagaaccaugcu

SEQ ID NO: 34248 - RNA, 22 nt, Artificial Sequence
  Synthetic oligonucleotide: CBLB-4099
cuguugagugaagaaccaugcu

SEQ ID NO: 34249 - RNA, 23 nt, Artificial Sequence
  Synthetic oligonucleotide: CBLB-4100
ccuguugagugaagaaccaugcu

SEQ ID NO: 34250 - RNA, 24 nt, Artificial Sequence
  Synthetic oligonucleotide: CBLB-4101
uccuguugagugaagaaccaugcu

SEQ ID NO: 34251 - RNA, 18 nt, Artificial Sequence
  Synthetic oligonucleotide: CBLB-4102
aagggaggagguggugcu

SEQ ID NO: 34252 - RNA, 19 nt, Artificial Sequence
  Synthetic oligonucleotide: CBLB-4103
uaagggaggagguggugcu

SEQ ID NO: 34253 - RNA, 20 nt, Artificial Sequence
  Synthetic oligonucleotide: CBLB-3364
uuaagggaggagguggugcu

SEQ ID NO: 34254 - RNA, 21 nt, Artificial Sequence
  Synthetic oligonucleotide: CBLB-4104
cuuaagggaggagguggugcu

SEQ ID NO: 34255 - RNA, 22 nt, Artificial Sequence
  Synthetic oligonucleotide: CBLB-4105
ucuuaagggaggagguggugcu

SEQ ID NO: 34256 - RNA, 23 nt, Artificial Sequence
  Synthetic oligonucleotide: CBLB-4106
cucuuaagggaggagguggugcu

SEQ ID NO: 34257 - RNA, 24 nt, Artificial Sequence
  Synthetic oligonucleotide: CBLB-4107
ucucuuaagggaggagguggugcu

SEQ ID NO: 34258 - RNA, 18 nt, Artificial Sequence
  Synthetic oligonucleotide: CBLB-4108
ugcuauagauuuagacgu

SEQ ID NO: 34259 - RNA, 19 nt, Artificial Sequence
  Synthetic oligonucleotide: CBLB-4109
cugcuauagauuuagacgu

SEQ ID NO: 34260 - RNA, 20 nt, Artificial Sequence
  Synthetic oligonucleotide: CBLB-3377
gcugcuauagauuuagacgu

SEQ ID NO: 34261 - RNA, 21 nt, Artificial Sequence
  Synthetic oligonucleotide: CBLB-4110
ggcugcuauagauuuagacgu

SEQ ID NO: 34262 - RNA, 22 nt, Artificial Sequence
  Synthetic oligonucleotide: CBLB-4111
uggcugcuauagauuuagacgu

SEQ ID NO: 34263 - RNA, 23 nt, Artificial Sequence
  Synthetic oligonucleotide: CBLB-4112
cuggcugcuauagauuuagacgu

SEQ ID NO: 34264 - RNA, 24 nt, Artificial Sequence
  Synthetic oligonucleotide: CBLB-4113
ucuggcugcuauagauuuagacgu

SEQ ID NO: 34265 - RNA, 18 nt, Artificial Sequence
  Synthetic oligonucleotide: CBLB-4114
accucaugaaggcacugu

SEQ ID NO: 34266 - RNA, 19 nt, Artificial Sequence
  Synthetic oligonucleotide: CBLB-4115
gaccucaugaaggcacugu

SEQ ID NO: 34267 - RNA, 20 nt, Artificial Sequence
  Synthetic oligonucleotide: CBLB-4116
ggaccucaugaaggcacugu

SEQ ID NO: 34268 - RNA, 21 nt, Artificial Sequence
  Synthetic oligonucleotide: CBLB-4117
uggaccucaugaaggcacugu

SEQ ID NO: 34269 - RNA, 22 nt, Artificial Sequence
  Synthetic oligonucleotide: CBLB-4118
guggaccucaugaaggcacugu

SEQ ID NO: 34270 - RNA, 23 nt, Artificial Sequence
  Synthetic oligonucleotide: CBLB-4119
gguggaccucaugaaggcacugu

SEQ ID NO: 34271 - RNA, 24 nt, Artificial Sequence
  Synthetic oligonucleotide: CBLB-4120
ugguggaccucaugaaggcacugu

SEQ ID NO: 34272 - RNA, 18 nt, Artificial Sequence
  Synthetic oligonucleotide: CBLB-4121
gcuaaaaagucuuaccuu

SEQ ID NO: 34273 - RNA, 19 nt, Artificial Sequence
  Synthetic oligonucleotide: CBLB-4122
ugcuaaaaagucuuaccuu

SEQ ID NO: 34274 - RNA, 20 nt, Artificial Sequence
  Synthetic oligonucleotide: CBLB-4123
cugcuaaaaagucuuaccuu

SEQ ID NO: 34275 - RNA, 21 nt, Artificial Sequence
  Synthetic oligonucleotide: CBLB-4124
acugcuaaaaagucuuaccuu

SEQ ID NO: 34276 - RNA, 22 nt, Artificial Sequence
  Synthetic oligonucleotide: CBLB-4125
uacugcuaaaaagucuuaccuu

SEQ ID NO: 34277 - RNA, 23 nt, Artificial Sequence
  Synthetic oligonucleotide: CBLB-4126
uuacugcuaaaaagucuuaccuu

SEQ ID NO: 34278 - RNA, 24 nt, Artificial Sequence
  Synthetic oligonucleotide: CBLB-4127
auuacugcuaaaaagucuuaccuu

SEQ ID NO: 34279 - RNA, 18 nt, Artificial Sequence
  Synthetic oligonucleotide: CBLB-4128
aagaccuaaaggacaguu

SEQ ID NO: 34280 - RNA, 19 nt, Artificial Sequence
  Synthetic oligonucleotide: CBLB-4129
caagaccuaaaggacaguu

SEQ ID NO: 34281 - RNA, 20 nt, Artificial Sequence
  Synthetic oligonucleotide: CBLB-4130
acaagaccuaaaggacaguu

SEQ ID NO: 34282 - RNA, 21 nt, Artificial Sequence
  Synthetic oligonucleotide: CBLB-4131
cacaagaccuaaaggacaguu

SEQ ID NO: 34283 - RNA, 22 nt, Artificial Sequence
  Synthetic oligonucleotide: CBLB-4132
ucacaagaccuaaaggacaguu

SEQ ID NO: 34284 - RNA, 23 nt, Artificial Sequence
  Synthetic oligonucleotide: CBLB-4133
aucacaagaccuaaaggacaguu

SEQ ID NO: 34285 - RNA, 24 nt, Artificial Sequence
  Synthetic oligonucleotide: CBLB-4134
uaucacaagaccuaaaggacaguu

SEQ ID NO: 34286 - RNA, 18 nt, Artificial Sequence
  Synthetic oligonucleotide: CBLB-4135
uacuggagccaggagguu

SEQ ID NO: 34287 - RNA, 19 nt, Artificial Sequence
  Synthetic oligonucleotide: CBLB-4136
cuacuggagccaggagguu

SEQ ID NO: 34288 - RNA, 20 nt, Artificial Sequence
  Synthetic oligonucleotide: CBLB-4137
gcuacuggagccaggagguu

SEQ ID NO: 34289 - RNA, 21 nt, Artificial Sequence
  Synthetic oligonucleotide: CBLB-4138
ggcuacuggagccaggagguu

SEQ ID NO: 34290 - RNA, 22 nt, Artificial Sequence
  Synthetic oligonucleotide: CBLB-4139
cggcuacuggagccaggagguu

SEQ ID NO: 34291 - RNA, 23 nt, Artificial Sequence
  Synthetic oligonucleotide: CBLB-4140
ccggcuacuggagccaggagguu

SEQ ID NO: 34292 - RNA, 24 nt, Artificial Sequence
  Synthetic oligonucleotide: CBLB-4141
gccggcuacuggagccaggagguu

SEQ ID NO: 34293 - RNA, 18 nt, Artificial Sequence
  Synthetic oligonucleotide: CBLB-4142
uaugacaaugagaugguu

SEQ ID NO: 34294 - RNA, 19 nt, Artificial Sequence
  Synthetic oligonucleotide: CBLB-4143
uuaugacaaugagaugguu

SEQ ID NO: 34295 - RNA, 20 nt, Artificial Sequence
  Synthetic oligonucleotide: CBLB-4144
auuaugacaaugagaugguu

SEQ ID NO: 34296 - RNA, 21 nt, Artificial Sequence
  Synthetic oligonucleotide: CBLB-4145
cauuaugacaaugagaugguu

SEQ ID NO: 34297 - RNA, 22 nt, Artificial Sequence
  Synthetic oligonucleotide: CBLB-4146
acauuaugacaaugagaugguu

SEQ ID NO: 34298 - RNA, 23 nt, Artificial Sequence
  Synthetic oligonucleotide: CBLB-4147
uacauuaugacaaugagaugguu

SEQ ID NO: 34299 - RNA, 24 nt, Artificial Sequence
  Synthetic oligonucleotide: CBLB-4148
uuacauuaugacaaugagaugguu

SEQ ID NO: 34300 - RNA, 18 nt, Artificial Sequence
  Synthetic oligonucleotide: CBLB-4149
agaucuaacuaugccuuu

SEQ ID NO: 34301 - RNA, 19 nt, Artificial Sequence
  Synthetic oligonucleotide: CBLB-4150
gagaucuaacuaugccuuu

SEQ ID NO: 34302 - RNA, 20 nt, Artificial Sequence
  Synthetic oligonucleotide: CBLB-4151
ggagaucuaacuaugccuuu

SEQ ID NO: 34303 - RNA, 21 nt, Artificial Sequence
  Synthetic oligonucleotide: CBLB-4152
gggagaucuaacuaugccuuu

SEQ ID NO: 34304 - RNA, 22 nt, Artificial Sequence
  Synthetic oligonucleotide: CBLB-4153
agggagaucuaacuaugccuuu

SEQ ID NO: 34305 - RNA, 23 nt, Artificial Sequence
  Synthetic oligonucleotide: CBLB-4154
cagggagaucuaacuaugccuuu

SEQ ID NO: 34306 - RNA, 24 nt, Artificial Sequence
  Synthetic oligonucleotide: CBLB-4155
acagggagaucuaacuaugccuuu

SEQ ID NO: 34307 - RNA, 18 nt, Artificial Sequence
  Synthetic oligonucleotide: CBLB-4156
ccuccucccuagcauaaa

SEQ ID NO: 34308 - RNA, 19 nt, Artificial Sequence
  Synthetic oligonucleotide: CBLB-4157
cccuccucccuagcauaaa

SEQ ID NO: 34309 - RNA, 20 nt, Artificial Sequence
  Synthetic oligonucleotide: CBLB-4158
acccuccucccuagcauaaa

SEQ ID NO: 34310 - RNA, 21 nt, Artificial Sequence
  Synthetic oligonucleotide: CBLB-4159
cacccuccucccuagcauaaa

SEQ ID NO: 34311 - RNA, 22 nt, Artificial Sequence
  Synthetic oligonucleotide: CBLB-4160
ccacccuccucccuagcauaaa

SEQ ID NO: 34312 - RNA, 23 nt, Artificial Sequence
  Synthetic oligonucleotide: CBLB-4161
accacccuccucccuagcauaaa

SEQ ID NO: 34313 - RNA, 24 nt, Artificial Sequence
  Synthetic oligonucleotide: CBLB-4162
uaccacccuccucccuagcauaaa

SEQ ID NO: 34314 - RNA, 18 nt, Artificial Sequence
  Synthetic oligonucleotide: CBLB-4163
guuauaauccugauuuaa

SEQ ID NO: 34315 - RNA, 19 nt, Artificial Sequence
  Synthetic oligonucleotide: CBLB-4164
aguuauaauccugauuuaa

SEQ ID NO: 34316 - RNA, 20 nt, Artificial Sequence
  Synthetic oligonucleotide: CBLB-4165
gaguuauaauccugauuuaa

SEQ ID NO: 34317 - RNA, 21 nt, Artificial Sequence
  Synthetic oligonucleotide: CBLB-4166
ggaguuauaauccugauuuaa

SEQ ID NO: 34318 - RNA, 22 nt, Artificial Sequence
  Synthetic oligonucleotide: CBLB-4167
aggaguuauaauccugauuuaa

SEQ ID NO: 34319 - RNA, 23 nt, Artificial Sequence
  Synthetic oligonucleotide: CBLB-4168
gaggaguuauaauccugauuuaa

SEQ ID NO: 34320 - RNA, 24 nt, Artificial Sequence
  Synthetic oligonucleotide: CBLB-4169
ggaggaguuauaauccugauuuaa

SEQ ID NO: 34321 - RNA, 18 nt, Artificial Sequence
  Synthetic oligonucleotide: CBLB-4170
ccaaaaccuggaaucaca

SEQ ID NO: 34322 - RNA, 19 nt, Artificial Sequence
  Synthetic oligonucleotide: CBLB-4171
uccaaaaccuggaaucaca

SEQ ID NO: 34323 - RNA, 20 nt, Artificial Sequence
  Synthetic oligonucleotide: CBLB-4172
cuccaaaaccuggaaucaca

SEQ ID NO: 34324 - RNA, 21 nt, Artificial Sequence
  Synthetic oligonucleotide: CBLB-4173
ucuccaaaaccuggaaucaca

SEQ ID NO: 34325 - RNA, 22 nt, Artificial Sequence
  Synthetic oligonucleotide: CBLB-4174
cucuccaaaaccuggaaucaca

SEQ ID NO: 34326 - RNA, 23 nt, Artificial Sequence
  Synthetic oligonucleotide: CBLB-4175
gcucuccaaaaccuggaaucaca

SEQ ID NO: 34327 - RNA, 24 nt, Artificial Sequence
  Synthetic oligonucleotide: CBLB-4176
ggcucuccaaaaccuggaaucaca

SEQ ID NO: 34328 - RNA, 18 nt, Artificial Sequence
  Synthetic oligonucleotide: CBLB-4177
ucucccuguggcagccca

SEQ ID NO: 34329 - RNA, 19 nt, Artificial Sequence
  Synthetic oligonucleotide: CBLB-4178
aucucccuguggcagccca

SEQ ID NO: 34330 - RNA, 20 nt, Artificial Sequence
  Synthetic oligonucleotide: CBLB-4179
gaucucccuguggcagccca

SEQ ID NO: 34331 - RNA, 21 nt, Artificial Sequence
  Synthetic oligonucleotide: CBLB-4180
agaucucccuguggcagccca

SEQ ID NO: 34332 - RNA, 22 nt, Artificial Sequence
  Synthetic oligonucleotide: CBLB-4181
uagaucucccuguggcagccca

SEQ ID NO: 34333 - RNA, 23 nt, Artificial Sequence
  Synthetic oligonucleotide: CBLB-4182
uuagaucucccuguggcagccca

SEQ ID NO: 34334 - RNA, 24 nt, Artificial Sequence
  Synthetic oligonucleotide: CBLB-4183
guuagaucucccuguggcagccca

SEQ ID NO: 34335 - RNA, 18 nt, Artificial Sequence
  Synthetic oligonucleotide: CBLB-4184
cucuguaagauuugugca

SEQ ID NO: 34336 - RNA, 19 nt, Artificial Sequence
  Synthetic oligonucleotide: CBLB-4185
gcucuguaagauuugugca

SEQ ID NO: 34337 - RNA, 20 nt, Artificial Sequence
  Synthetic oligonucleotide: CBLB-4186
agcucuguaagauuugugca

SEQ ID NO: 34338 - RNA, 21 nt, Artificial Sequence
  Synthetic oligonucleotide: CBLB-4187
cagcucuguaagauuugugca

SEQ ID NO: 34339 - RNA, 22 nt, Artificial Sequence
  Synthetic oligonucleotide: CBLB-4188
ucagcucuguaagauuugugca

SEQ ID NO: 34340 - RNA, 23 nt, Artificial Sequence
  Synthetic oligonucleotide: CBLB-4189
uucagcucuguaagauuugugca

SEQ ID NO: 34341 - RNA, 24 nt, Artificial Sequence
  Synthetic oligonucleotide: CBLB-4190
uuucagcucuguaagauuugugca

SEQ ID NO: 34342 - RNA, 18 nt, Artificial Sequence
  Synthetic oligonucleotide: CBLB-4191
aucccaccagacaauaga

SEQ ID NO: 34343 - RNA, 19 nt, Artificial Sequence
  Synthetic oligonucleotide: CBLB-4192
aaucccaccagacaauaga

SEQ ID NO: 34344 - RNA, 20 nt, Artificial Sequence
  Synthetic oligonucleotide: CBLB-4193
caaucccaccagacaauaga

SEQ ID NO: 34345 - RNA, 21 nt, Artificial Sequence
  Synthetic oligonucleotide: CBLB-4194
ccaaucccaccagacaauaga

SEQ ID NO: 34346 - RNA, 22 nt, Artificial Sequence
  Synthetic oligonucleotide: CBLB-4195
accaaucccaccagacaauaga

SEQ ID NO: 34347 - RNA, 23 nt, Artificial Sequence
  Synthetic oligonucleotide: CBLB-4196
caccaaucccaccagacaauaga

SEQ ID NO: 34348 - RNA, 24 nt, Artificial Sequence
  Synthetic oligonucleotide: CBLB-4197
ccaccaaucccaccagacaauaga

SEQ ID NO: 34349 - RNA, 18 nt, Artificial Sequence
  Synthetic oligonucleotide: CBLB-4198
agccggccauccucagga

SEQ ID NO: 34350 - RNA, 19 nt, Artificial Sequence
  Synthetic oligonucleotide: CBLB-4199
uagccggccauccucagga

SEQ ID NO: 34351 - RNA, 20 nt, Artificial Sequence
  Synthetic oligonucleotide: CBLB-4200
guagccggccauccucagga

SEQ ID NO: 34352 - RNA, 21 nt, Artificial Sequence
  Synthetic oligonucleotide: CBLB-4201
aguagccggccauccucagga

SEQ ID NO: 34353 - RNA, 22 nt, Artificial Sequence
  Synthetic oligonucleotide: CBLB-4202
caguagccggccauccucagga

SEQ ID NO: 34354 - RNA, 23 nt, Artificial Sequence
  Synthetic oligonucleotide: CBLB-4203
ccaguagccggccauccucagga

SEQ ID NO: 34355 - RNA, 24 nt, Artificial Sequence
  Synthetic oligonucleotide: CBLB-4204
uccaguagccggccauccucagga

SEQ ID NO: 34356 - RNA, 18 nt, Artificial Sequence
  Synthetic oligonucleotide: CBLB-4205
auugcaaaacucauggga

SEQ ID NO: 34357 - RNA, 19 nt, Artificial Sequence
  Synthetic oligonucleotide: CBLB-4206
aauugcaaaacucauggga

SEQ ID NO: 34358 - RNA, 20 nt, Artificial Sequence
  Synthetic oligonucleotide: CBLB-4207
aaauugcaaaacucauggga

SEQ ID NO: 34359 - RNA, 21 nt, Artificial Sequence
  Synthetic oligonucleotide: CBLB-4208
aaaauugcaaaacucauggga

SEQ ID NO: 34360 - RNA, 22 nt, Artificial Sequence
  Synthetic oligonucleotide: CBLB-4209
aaaaauugcaaaacucauggga

SEQ ID NO: 34361 - RNA, 23 nt, Artificial Sequence
  Synthetic oligonucleotide: CBLB-4210
caaaaauugcaaaacucauggga

SEQ ID NO: 34362 - RNA, 24 nt, Artificial Sequence
  Synthetic oligonucleotide: CBLB-4211
gcaaaaauugcaaaacucauggga

SEQ ID NO: 34363 - RNA, 18 nt, Artificial Sequence
  Synthetic oligonucleotide: CBLB-4212
auauuuaaaggguacgua

SEQ ID NO: 34364 - RNA, 19 nt, Artificial Sequence
  Synthetic oligonucleotide: CBLB-4213
uauauuuaaaggguacgua

SEQ ID NO: 34365 - RNA, 20 nt, Artificial Sequence
  Synthetic oligonucleotide: CBLB-4214
auauauuuaaaggguacgua

SEQ ID NO: 34366 - RNA, 21 nt, Artificial Sequence
  Synthetic oligonucleotide: CBLB-4215
cauauauuuaaaggguacgua

SEQ ID NO: 34367 - RNA, 22 nt, Artificial Sequence
  Synthetic oligonucleotide: CBLB-4216
gcauauauuuaaaggguacgua

SEQ ID NO: 34368 - RNA, 23 nt, Artificial Sequence
  Synthetic oligonucleotide: CBLB-4217
agcauauauuuaaaggguacgua

SEQ ID NO: 34369 - RNA, 24 nt, Artificial Sequence
  Synthetic oligonucleotide: CBLB-4218
aagcauauauuuaaaggguacgua

SEQ ID NO: 34370 - RNA, 18 nt, Artificial Sequence
  Synthetic oligonucleotide: CBLB-4219
gacuuaagcauauauuua

SEQ ID NO: 34371 - RNA, 19 nt, Artificial Sequence
  Synthetic oligonucleotide: CBLB-4220
ugacuuaagcauauauuua

SEQ ID NO: 34372 - RNA, 20 nt, Artificial Sequence
  Synthetic oligonucleotide: CBLB-4221
cugacuuaagcauauauuua

SEQ ID NO: 34373 - RNA, 21 nt, Artificial Sequence
  Synthetic oligonucleotide: CBLB-4222
ccugacuuaagcauauauuua

SEQ ID NO: 34374 - RNA, 22 nt, Artificial Sequence
  Synthetic oligonucleotide: CBLB-4223
cccugacuuaagcauauauuua

SEQ ID NO: 34375 - RNA, 23 nt, Artificial Sequence
  Synthetic oligonucleotide: CBLB-4224
ucccugacuuaagcauauauuua

SEQ ID NO: 34376 - RNA, 24 nt, Artificial Sequence
  Synthetic oligonucleotide: CBLB-4225
aucccugacuuaagcauauauuua

SEQ ID NO: 34377 - RNA, 18 nt, Artificial Sequence
  Synthetic oligonucleotide: CBLB-4226
aaagguaaaacuagaaac

SEQ ID NO: 34378 - RNA, 19 nt, Artificial Sequence
  Synthetic oligonucleotide: CBLB-4227
gaaagguaaaacuagaaac

SEQ ID NO: 34379 - RNA, 20 nt, Artificial Sequence
  Synthetic oligonucleotide: CBLB-4228
cgaaagguaaaacuagaaac

SEQ ID NO: 34380 - RNA, 21 nt, Artificial Sequence
  Synthetic oligonucleotide: CBLB-4229
ccgaaagguaaaacuagaaac

SEQ ID NO: 34381 - RNA, 22 nt, Artificial Sequence
  Synthetic oligonucleotide: CBLB-4230
uccgaaagguaaaacuagaaac

SEQ ID NO: 34382 - RNA, 23 nt, Artificial Sequence
  Synthetic oligonucleotide: CBLB-4231
guccgaaagguaaaacuagaaac

SEQ ID NO: 34383 - RNA, 24 nt, Artificial Sequence
  Synthetic oligonucleotide: CBLB-4232
cguccgaaagguaaaacuagaaac

SEQ ID NO: 34384 - RNA, 18 nt, Artificial Sequence
  Synthetic oligonucleotide: CBLB-4233
gguauaaucauuagcaac

SEQ ID NO: 34385 - RNA, 19 nt, Artificial Sequence
  Synthetic oligonucleotide: CBLB-4234
agguauaaucauuagcaac

SEQ ID NO: 34386 - RNA, 20 nt, Artificial Sequence
  Synthetic oligonucleotide: CBLB-4235
cagguauaaucauuagcaac

SEQ ID NO: 34387 - RNA, 21 nt, Artificial Sequence
  Synthetic oligonucleotide: CBLB-4236
gcagguauaaucauuagcaac

SEQ ID NO: 34388 - RNA, 22 nt, Artificial Sequence
  Synthetic oligonucleotide: CBLB-4237
ggcagguauaaucauuagcaac

SEQ ID NO: 34389 - RNA, 23 nt, Artificial Sequence
  Synthetic oligonucleotide: CBLB-4238
uggcagguauaaucauuagcaac

SEQ ID NO: 34390 - RNA, 24 nt, Artificial Sequence
  Synthetic oligonucleotide: CBLB-4239
auggcagguauaaucauuagcaac

SEQ ID NO: 34391 - RNA, 18 nt, Artificial Sequence
  Synthetic oligonucleotide: CBLB-4240
acucaccagucacaucac

SEQ ID NO: 34392 - RNA, 19 nt, Artificial Sequence
  Synthetic oligonucleotide: CBLB-4241
aacucaccagucacaucac

SEQ ID NO: 34393 - RNA, 20 nt, Artificial Sequence
  Synthetic oligonucleotide: CBLB-4242
gaacucaccagucacaucac

SEQ ID NO: 34394 - RNA, 21 nt, Artificial Sequence
  Synthetic oligonucleotide: CBLB-4243
agaacucaccagucacaucac

SEQ ID NO: 34395 - RNA, 22 nt, Artificial Sequence
  Synthetic oligonucleotide: CBLB-4244
cagaacucaccagucacaucac

SEQ ID NO: 34396 - RNA, 23 nt, Artificial Sequence
  Synthetic oligonucleotide: CBLB-4245
gcagaacucaccagucacaucac

SEQ ID NO: 34397 - RNA, 24 nt, Artificial Sequence
  Synthetic oligonucleotide: CBLB-4246
ggcagaacucaccagucacaucac

SEQ ID NO: 34398 - RNA, 18 nt, Artificial Sequence
  Synthetic oligonucleotide: CBLB-4247
ggagggcucuccaaaacc

SEQ ID NO: 34399 - RNA, 19 nt, Artificial Sequence
  Synthetic oligonucleotide: CBLB-4248
gggagggcucuccaaaacc

SEQ ID NO: 34400 - RNA, 20 nt, Artificial Sequence
  Synthetic oligonucleotide: CBLB-3160
ggggagggcucuccaaaacc

SEQ ID NO: 34401 - RNA, 21 nt, Artificial Sequence
  Synthetic oligonucleotide: CBLB-4249
aggggagggcucuccaaaacc

SEQ ID NO: 34402 - RNA, 22 nt, Artificial Sequence
  Synthetic oligonucleotide: CBLB-4250
uaggggagggcucuccaaaacc

SEQ ID NO: 34403 - RNA, 23 nt, Artificial Sequence
  Synthetic oligonucleotide: CBLB-4251
cuaggggagggcucuccaaaacc

SEQ ID NO: 34404 - RNA, 24 nt, Artificial Sequence
  Synthetic oligonucleotide: CBLB-4252
ccuaggggagggcucuccaaaacc

SEQ ID NO: 34405 - RNA, 18 nt, Artificial Sequence
  Synthetic oligonucleotide: CBLB-4253
agagccuuagagauagcc

SEQ ID NO: 34406 - RNA, 19 nt, Artificial Sequence
  Synthetic oligonucleotide: CBLB-4254
gagagccuuagagauagcc

SEQ ID NO: 34407 - RNA, 20 nt, Artificial Sequence
  Synthetic oligonucleotide: CBLB-4255
agagagccuuagagauagcc

SEQ ID NO: 34408 - RNA, 21 nt, Artificial Sequence
  Synthetic oligonucleotide: CBLB-4256
aagagagccuuagagauagcc

SEQ ID NO: 34409 - RNA, 22 nt, Artificial Sequence
  Synthetic oligonucleotide: CBLB-4257
gaagagagccuuagagauagcc

SEQ ID NO: 34410 - RNA, 23 nt, Artificial Sequence
  Synthetic oligonucleotide: CBLB-4258
ugaagagagccuuagagauagcc

SEQ ID NO: 34411 - RNA, 24 nt, Artificial Sequence
  Synthetic oligonucleotide: CBLB-4259
gugaagagagccuuagagauagcc

SEQ ID NO: 34412 - RNA, 18 nt, Artificial Sequence
  Synthetic oligonucleotide: CBLB-4260
uugcccggagcauccucc

SEQ ID NO: 34413 - RNA, 19 nt, Artificial Sequence
  Synthetic oligonucleotide: CBLB-4261
guugcccggagcauccucc

SEQ ID NO: 34414 - RNA, 20 nt, Artificial Sequence
  Synthetic oligonucleotide: CBLB-4262
aguugcccggagcauccucc

SEQ ID NO: 34415 - RNA, 21 nt, Artificial Sequence
  Synthetic oligonucleotide: CBLB-4263
aaguugcccggagcauccucc

SEQ ID NO: 34416 - RNA, 22 nt, Artificial Sequence
  Synthetic oligonucleotide: CBLB-4264
gaaguugcccggagcauccucc

SEQ ID NO: 34417 - RNA, 23 nt, Artificial Sequence
  Synthetic oligonucleotide: CBLB-4265
cgaaguugcccggagcauccucc

SEQ ID NO: 34418 - RNA, 24 nt, Artificial Sequence
  Synthetic oligonucleotide: CBLB-4266
ucgaaguugcccggagcauccucc

SEQ ID NO: 34419 - RNA, 18 nt, Artificial Sequence
  Synthetic oligonucleotide: CBLB-4267
ucaucccacccuguuucc

SEQ ID NO: 34420 - RNA, 19 nt, Artificial Sequence
  Synthetic oligonucleotide: CBLB-4268
uucaucccacccuguuucc

SEQ ID NO: 34421 - RNA, 20 nt, Artificial Sequence
  Synthetic oligonucleotide: CBLB-4269
cuucaucccacccuguuucc

SEQ ID NO: 34422 - RNA, 21 nt, Artificial Sequence
  Synthetic oligonucleotide: CBLB-4270
ccuucaucccacccuguuucc

SEQ ID NO: 34423 - RNA, 22 nt, Artificial Sequence
  Synthetic oligonucleotide: CBLB-4271
uccuucaucccacccuguuucc

SEQ ID NO: 34424 - RNA, 23 nt, Artificial Sequence
  Synthetic oligonucleotide: CBLB-4272
uuccuucaucccacccuguuucc

SEQ ID NO: 34425 - RNA, 24 nt, Artificial Sequence
  Synthetic oligonucleotide: CBLB-4273
auuccuucaucccacccuguuucc

SEQ ID NO: 34426 - RNA, 18 nt, Artificial Sequence
  Synthetic oligonucleotide: CBLB-4274
ccacccgugccuccucgc

SEQ ID NO: 34427 - RNA, 19 nt, Artificial Sequence
  Synthetic oligonucleotide: CBLB-4275
gccacccgugccuccucgc

SEQ ID NO: 34428 - RNA, 20 nt, Artificial Sequence
  Synthetic oligonucleotide: CBLB-4276
ugccacccgugccuccucgc

SEQ ID NO: 34429 - RNA, 21 nt, Artificial Sequence
  Synthetic oligonucleotide: CBLB-4277
cugccacccgugccuccucgc

SEQ ID NO: 34430 - RNA, 22 nt, Artificial Sequence
  Synthetic oligonucleotide: CBLB-4278
ccugccacccgugccuccucgc

SEQ ID NO: 34431 - RNA, 23 nt, Artificial Sequence
  Synthetic oligonucleotide: CBLB-4279
gccugccacccgugccuccucgc

SEQ ID NO: 34432 - RNA, 24 nt, Artificial Sequence
  Synthetic oligonucleotide: CBLB-4280
agccugccacccgugccuccucgc

SEQ ID NO: 34433 - RNA, 18 nt, Artificial Sequence
  Synthetic oligonucleotide: CBLB-4281
ugucaauggaaggcacag

SEQ ID NO: 34434 - RNA, 19 nt, Artificial Sequence
  Synthetic oligonucleotide: CBLB-4282
augucaauggaaggcacag

SEQ ID NO: 34435 - RNA, 20 nt, Artificial Sequence
  Synthetic oligonucleotide: CBLB-4283
aaugucaauggaaggcacag

SEQ ID NO: 34436 - RNA, 21 nt, Artificial Sequence
  Synthetic oligonucleotide: CBLB-4284
aaaugucaauggaaggcacag

SEQ ID NO: 34437 - RNA, 22 nt, Artificial Sequence
  Synthetic oligonucleotide: CBLB-4285
caaaugucaauggaaggcacag

SEQ ID NO: 34438 - RNA, 23 nt, Artificial Sequence
  Synthetic oligonucleotide: CBLB-4286
ucaaaugucaauggaaggcacag

SEQ ID NO: 34439 - RNA, 24 nt, Artificial Sequence
  Synthetic oligonucleotide: CBLB-4287
uucaaaugucaauggaaggcacag

SEQ ID NO: 34440 - RNA, 18 nt, Artificial Sequence
  Synthetic oligonucleotide: CBLB-4288
agcuuccuucauguucag

SEQ ID NO: 34441 - RNA, 19 nt, Artificial Sequence
  Synthetic oligonucleotide: CBLB-4289
cagcuuccuucauguucag

SEQ ID NO: 34442 - RNA, 20 nt, Artificial Sequence
  Synthetic oligonucleotide: CBLB-4290
ucagcuuccuucauguucag

SEQ ID NO: 34443 - RNA, 21 nt, Artificial Sequence
  Synthetic oligonucleotide: CBLB-4291
aucagcuuccuucauguucag

SEQ ID NO: 34444 - RNA, 22 nt, Artificial Sequence
  Synthetic oligonucleotide: CBLB-4292
gaucagcuuccuucauguucag

SEQ ID NO: 34445 - RNA, 23 nt, Artificial Sequence
  Synthetic oligonucleotide: CBLB-4293
ugaucagcuuccuucauguucag

SEQ ID NO: 34446 - RNA, 24 nt, Artificial Sequence
  Synthetic oligonucleotide: CBLB-4294
augaucagcuuccuucauguucag

SEQ ID NO: 34447 - RNA, 18 nt, Artificial Sequence
  Synthetic oligonucleotide: CBLB-4295
uuucuauuuguuuaggag

SEQ ID NO: 34448 - RNA, 19 nt, Artificial Sequence
  Synthetic oligonucleotide: CBLB-4296
uuuucuauuuguuuaggag

SEQ ID NO: 34449 - RNA, 20 nt, Artificial Sequence
  Synthetic oligonucleotide: CBLB-4297
auuuucuauuuguuuaggag

SEQ ID NO: 34450 - RNA, 21 nt, Artificial Sequence
  Synthetic oligonucleotide: CBLB-4298
cauuuucuauuuguuuaggag

SEQ ID NO: 34451 - RNA, 22 nt, Artificial Sequence
  Synthetic oligonucleotide: CBLB-4299
gcauuuucuauuuguuuaggag

SEQ ID NO: 34452 - RNA, 23 nt, Artificial Sequence
  Synthetic oligonucleotide: CBLB-4300
ugcauuuucuauuuguuuaggag

SEQ ID NO: 34453 - RNA, 24 nt, Artificial Sequence
  Synthetic oligonucleotide: CBLB-4301
augcauuuucuauuuguuuaggag

SEQ ID NO: 34454 - RNA, 18 nt, Artificial Sequence
  Synthetic oligonucleotide: CBLB-4302
ugauugauggcagcaggg

SEQ ID NO: 34455 - RNA, 19 nt, Artificial Sequence
  Synthetic oligonucleotide: CBLB-4303
cugauugauggcagcaggg

SEQ ID NO: 34456 - RNA, 20 nt, Artificial Sequence
  Synthetic oligonucleotide: CBLB-4304
ccugauugauggcagcaggg

SEQ ID NO: 34457 - RNA, 21 nt, Artificial Sequence
  Synthetic oligonucleotide: CBLB-4305
cccugauugauggcagcaggg

SEQ ID NO: 34458 - RNA, 22 nt, Artificial Sequence
  Synthetic oligonucleotide: CBLB-4306
gcccugauugauggcagcaggg

SEQ ID NO: 34459 - RNA, 23 nt, Artificial Sequence
  Synthetic oligonucleotide: CBLB-4307
agcccugauugauggcagcaggg

SEQ ID NO: 34460 - RNA, 24 nt, Artificial Sequence
  Synthetic oligonucleotide: CBLB-4308
aagcccugauugauggcagcaggg

SEQ ID NO: 34461 - RNA, 18 nt, Artificial Sequence
  Synthetic oligonucleotide: CBLB-4309
uaucuuuauccugauggg

SEQ ID NO: 34462 - RNA, 19 nt, Artificial Sequence
  Synthetic oligonucleotide: CBLB-4310
uuaucuuuauccugauggg

SEQ ID NO: 34463 - RNA, 20 nt, Artificial Sequence
  Synthetic oligonucleotide: CBLB-3296
guuaucuuuauccugauggg

SEQ ID NO: 34464 - RNA, 21 nt, Artificial Sequence
  Synthetic oligonucleotide: CBLB-4311
aguuaucuuuauccugauggg

SEQ ID NO: 34465 - RNA, 22 nt, Artificial Sequence
  Synthetic oligonucleotide: CBLB-4312
caguuaucuuuauccugauggg

SEQ ID NO: 34466 - RNA, 23 nt, Artificial Sequence
  Synthetic oligonucleotide: CBLB-4313
ucaguuaucuuuauccugauggg

SEQ ID NO: 34467 - RNA, 24 nt, Artificial Sequence
  Synthetic oligonucleotide: CBLB-4314
uucaguuaucuuuauccugauggg

SEQ ID NO: 34468 - RNA, 18 nt, Artificial Sequence
  Synthetic oligonucleotide: CBLB-4315
caguagaggaagaugaug

SEQ ID NO: 34469 - RNA, 19 nt, Artificial Sequence
  Synthetic oligonucleotide: CBLB-4316
ccaguagaggaagaugaug

SEQ ID NO: 34470 - RNA, 20 nt, Artificial Sequence
  Synthetic oligonucleotide: CBLB-4317
cccaguagaggaagaugaug

SEQ ID NO: 34471 - RNA, 21 nt, Artificial Sequence
  Synthetic oligonucleotide: CBLB-4318
acccaguagaggaagaugaug

SEQ ID NO: 34472 - RNA, 22 nt, Artificial Sequence
  Synthetic oligonucleotide: CBLB-4319
gacccaguagaggaagaugaug

SEQ ID NO: 34473 - RNA, 23 nt, Artificial Sequence
  Synthetic oligonucleotide: CBLB-4320
agacccaguagaggaagaugaug

SEQ ID NO: 34474 - RNA, 24 nt, Artificial Sequence
  Synthetic oligonucleotide: CBLB-4321
gagacccaguagaggaagaugaug

SEQ ID NO: 34475 - RNA, 18 nt, Artificial Sequence
  Synthetic oligonucleotide: CBLB-4322
cgugaggaguccuugaug

SEQ ID NO: 34476 - RNA, 19 nt, Artificial Sequence
  Synthetic oligonucleotide: CBLB-4323
ucgugaggaguccuugaug

SEQ ID NO: 34477 - RNA, 20 nt, Artificial Sequence
  Synthetic oligonucleotide: CBLB-4324
aucgugaggaguccuugaug

SEQ ID NO: 34478 - RNA, 21 nt, Artificial Sequence
  Synthetic oligonucleotide: CBLB-4325
gaucgugaggaguccuugaug

SEQ ID NO: 34479 - RNA, 22 nt, Artificial Sequence
  Synthetic oligonucleotide: CBLB-4326
ugaucgugaggaguccuugaug

SEQ ID NO: 34480 - RNA, 23 nt, Artificial Sequence
  Synthetic oligonucleotide: CBLB-4327
augaucgugaggaguccuugaug

SEQ ID NO: 34481 - RNA, 24 nt, Artificial Sequence
  Synthetic oligonucleotide: CBLB-4328
gaugaucgugaggaguccuugaug

SEQ ID NO: 34482 - RNA, 18 nt, Artificial Sequence
  Synthetic oligonucleotide: CBLB-4329
gauaauggucacuguaug

SEQ ID NO: 34483 - RNA, 19 nt, Artificial Sequence
  Synthetic oligonucleotide: CBLB-4330
ugauaauggucacuguaug

SEQ ID NO: 34484 - RNA, 20 nt, Artificial Sequence
  Synthetic oligonucleotide: CBLB-4331
gugauaauggucacuguaug

SEQ ID NO: 34485 - RNA, 21 nt, Artificial Sequence
  Synthetic oligonucleotide: CBLB-4332
ugugauaauggucacuguaug

SEQ ID NO: 34486 - RNA, 22 nt, Artificial Sequence
  Synthetic oligonucleotide: CBLB-4333
uugugauaauggucacuguaug

SEQ ID NO: 34487 - RNA, 23 nt, Artificial Sequence
  Synthetic oligonucleotide: CBLB-4334
cuugugauaauggucacuguaug

SEQ ID NO: 34488 - RNA, 24 nt, Artificial Sequence
  Synthetic oligonucleotide: CBLB-4335
ucuugugauaauggucacuguaug

SEQ ID NO: 34489 - RNA, 18 nt, Artificial Sequence
  Synthetic oligonucleotide: CBLB-4336
ucacaaaagcagaugcug

SEQ ID NO: 34490 - RNA, 19 nt, Artificial Sequence
  Synthetic oligonucleotide: CBLB-4337
aucacaaaagcagaugcug

SEQ ID NO: 34491 - RNA, 20 nt, Artificial Sequence
  Synthetic oligonucleotide: CBLB-4338
uaucacaaaagcagaugcug

SEQ ID NO: 34492 - RNA, 21 nt, Artificial Sequence
  Synthetic oligonucleotide: CBLB-4339
guaucacaaaagcagaugcug

SEQ ID NO: 34493 - RNA, 22 nt, Artificial Sequence
  Synthetic oligonucleotide: CBLB-4340
cguaucacaaaagcagaugcug

SEQ ID NO: 34494 - RNA, 23 nt, Artificial Sequence
  Synthetic oligonucleotide: CBLB-4341
ucguaucacaaaagcagaugcug

SEQ ID NO: 34495 - RNA, 24 nt, Artificial Sequence
  Synthetic oligonucleotide: CBLB-4342
uucguaucacaaaagcagaugcug

SEQ ID NO: 34496 - RNA, 18 nt, Artificial Sequence
  Synthetic oligonucleotide: CBLB-4343
auggucaccuuggaagug

SEQ ID NO: 34497 - RNA, 19 nt, Artificial Sequence
  Synthetic oligonucleotide: CBLB-4344
aauggucaccuuggaagug

SEQ ID NO: 34498 - RNA, 20 nt, Artificial Sequence
  Synthetic oligonucleotide: CBLB-4345
caauggucaccuuggaagug

SEQ ID NO: 34499 - RNA, 21 nt, Artificial Sequence
  Synthetic oligonucleotide: CBLB-4346
ccaauggucaccuuggaagug

SEQ ID NO: 34500 - RNA, 22 nt, Artificial Sequence
  Synthetic oligonucleotide: CBLB-4347
uccaauggucaccuuggaagug

SEQ ID NO: 34501 - RNA, 23 nt, Artificial Sequence
  Synthetic oligonucleotide: CBLB-4348
uuccaauggucaccuuggaagug

SEQ ID NO: 34502 - RNA, 24 nt, Artificial Sequence
  Synthetic oligonucleotide: CBLB-4349
uuuccaauggucaccuuggaagug

SEQ ID NO: 34503 - RNA, 18 nt, Artificial Sequence
  Synthetic oligonucleotide: CBLB-4350
acgacgaugaugaucgug

SEQ ID NO: 34504 - RNA, 19 nt, Artificial Sequence
  Synthetic oligonucleotide: CBLB-4351
gacgacgaugaugaucgug

SEQ ID NO: 34505 - RNA, 20 nt, Artificial Sequence
  Synthetic oligonucleotide: CBLB-3325
ggacgacgaugaugaucgug

SEQ ID NO: 34506 - RNA, 21 nt, Artificial Sequence
  Synthetic oligonucleotide: CBLB-4352
uggacgacgaugaugaucgug

SEQ ID NO: 34507 - RNA, 22 nt, Artificial Sequence
  Synthetic oligonucleotide: CBLB-4353
uuggacgacgaugaugaucgug

SEQ ID NO: 34508 - RNA, 23 nt, Artificial Sequence
  Synthetic oligonucleotide: CBLB-4354
cuuggacgacgaugaugaucgug

SEQ ID NO: 34509 - RNA, 24 nt, Artificial Sequence
  Synthetic oligonucleotide: CBLB-4355
acuuggacgacgaugaugaucgug

SEQ ID NO: 34510 - RNA, 18 nt, Artificial Sequence
  Synthetic oligonucleotide: CBLB-4356
uugggacuaaucagcuug

SEQ ID NO: 34511 - RNA, 19 nt, Artificial Sequence
  Synthetic oligonucleotide: CBLB-4357
uuugggacuaaucagcuug

SEQ ID NO: 34512 - RNA, 20 nt, Artificial Sequence
  Synthetic oligonucleotide: CBLB-3329
guuugggacuaaucagcuug

SEQ ID NO: 34513 - RNA, 21 nt, Artificial Sequence
  Synthetic oligonucleotide: CBLB-4358
uguuugggacuaaucagcuug

SEQ ID NO: 34514 - RNA, 22 nt, Artificial Sequence
  Synthetic oligonucleotide: CBLB-4359
guguuugggacuaaucagcuug

SEQ ID NO: 34515 - RNA, 23 nt, Artificial Sequence
  Synthetic oligonucleotide: CBLB-4360
uguguuugggacuaaucagcuug

SEQ ID NO: 34516 - RNA, 24 nt, Artificial Sequence
  Synthetic oligonucleotide: CBLB-4361
auguguuugggacuaaucagcuug

SEQ ID NO: 34517 - RNA, 18 nt, Artificial Sequence
  Synthetic oligonucleotide: CBLB-4362
ccuuggggcucuauuuug

SEQ ID NO: 34518 - RNA, 19 nt, Artificial Sequence
  Synthetic oligonucleotide: CBLB-4363
gccuuggggcucuauuuug

SEQ ID NO: 34519 - RNA, 20 nt, Artificial Sequence
  Synthetic oligonucleotide: CBLB-3331
agccuuggggcucuauuuug

SEQ ID NO: 34520 - RNA, 21 nt, Artificial Sequence
  Synthetic oligonucleotide: CBLB-4364
uagccuuggggcucuauuuug

SEQ ID NO: 34521 - RNA, 22 nt, Artificial Sequence
  Synthetic oligonucleotide: CBLB-4365
uuagccuuggggcucuauuuug

SEQ ID NO: 34522 - RNA, 23 nt, Artificial Sequence
  Synthetic oligonucleotide: CBLB-4366
uuuagccuuggggcucuauuuug

SEQ ID NO: 34523 - RNA, 24 nt, Artificial Sequence
  Synthetic oligonucleotide: CBLB-4367
uuuuagccuuggggcucuauuuug

SEQ ID NO: 34524 - RNA, 18 nt, Artificial Sequence
  Synthetic oligonucleotide: CBLB-4368
agcauaaagugaguuuug

SEQ ID NO: 34525 - RNA, 19 nt, Artificial Sequence
  Synthetic oligonucleotide: CBLB-4369
uagcauaaagugaguuuug

SEQ ID NO: 34526 - RNA, 20 nt, Artificial Sequence
  Synthetic oligonucleotide: CBLB-4370
cuagcauaaagugaguuuug

SEQ ID NO: 34527 - RNA, 21 nt, Artificial Sequence
  Synthetic oligonucleotide: CBLB-4371
ccuagcauaaagugaguuuug

SEQ ID NO: 34528 - RNA, 22 nt, Artificial Sequence
  Synthetic oligonucleotide: CBLB-4372
cccuagcauaaagugaguuuug

SEQ ID NO: 34529 - RNA, 23 nt, Artificial Sequence
  Synthetic oligonucleotide: CBLB-4373
ucccuagcauaaagugaguuuug

SEQ ID NO: 34530 - RNA, 24 nt, Artificial Sequence
  Synthetic oligonucleotide: CBLB-4374
cucccuagcauaaagugaguuuug

SEQ ID NO: 34531 - RNA, 18 nt, Artificial Sequence
  Synthetic oligonucleotide: CBLB-4375
ccaaauuccaggaacaau

SEQ ID NO: 34532 - RNA, 19 nt, Artificial Sequence
  Synthetic oligonucleotide: CBLB-4376
cccaaauuccaggaacaau

SEQ ID NO: 34533 - RNA, 20 nt, Artificial Sequence
  Synthetic oligonucleotide: CBLB-4377
ccccaaauuccaggaacaau

SEQ ID NO: 34534 - RNA, 21 nt, Artificial Sequence
  Synthetic oligonucleotide: CBLB-4378
uccccaaauuccaggaacaau

SEQ ID NO: 34535 - RNA, 22 nt, Artificial Sequence
  Synthetic oligonucleotide: CBLB-4379
cuccccaaauuccaggaacaau

SEQ ID NO: 34536 - RNA, 23 nt, Artificial Sequence
  Synthetic oligonucleotide: CBLB-4380
ccuccccaaauuccaggaacaau

SEQ ID NO: 34537 - RNA, 24 nt, Artificial Sequence
  Synthetic oligonucleotide: CBLB-4381
uccuccccaaauuccaggaacaau

SEQ ID NO: 34538 - RNA, 18 nt, Artificial Sequence
  Synthetic oligonucleotide: CBLB-4382
ggcucuauuuugcggaau

SEQ ID NO: 34539 - RNA, 19 nt, Artificial Sequence
  Synthetic oligonucleotide: CBLB-4383
gggcucuauuuugcggaau

SEQ ID NO: 34540 - RNA, 20 nt, Artificial Sequence
  Synthetic oligonucleotide: CBLB-3333
ggggcucuauuuugcggaau

SEQ ID NO: 34541 - RNA, 21 nt, Artificial Sequence
  Synthetic oligonucleotide: CBLB-4384
uggggcucuauuuugcggaau

SEQ ID NO: 34542 - RNA, 22 nt, Artificial Sequence
  Synthetic oligonucleotide: CBLB-4385
uuggggcucuauuuugcggaau

SEQ ID NO: 34543 - RNA, 23 nt, Artificial Sequence
  Synthetic oligonucleotide: CBLB-4386
cuuggggcucuauuuugcggaau

SEQ ID NO: 34544 - RNA, 24 nt, Artificial Sequence
  Synthetic oligonucleotide: CBLB-4387
ccuuggggcucuauuuugcggaau

SEQ ID NO: 34545 - RNA, 18 nt, Artificial Sequence
  Synthetic oligonucleotide: CBLB-4388
ggcuaugugacuggggau

SEQ ID NO: 34546 - RNA, 19 nt, Artificial Sequence
  Synthetic oligonucleotide: CBLB-4389
uggcuaugugacuggggau

SEQ ID NO: 34547 - RNA, 20 nt, Artificial Sequence
  Synthetic oligonucleotide: CBLB-3346
uuggcuaugugacuggggau

SEQ ID NO: 34548 - RNA, 21 nt, Artificial Sequence
  Synthetic oligonucleotide: CBLB-4390
auuggcuaugugacuggggau

SEQ ID NO: 34549 - RNA, 22 nt, Artificial Sequence
  Synthetic oligonucleotide: CBLB-4391
cauuggcuaugugacuggggau

SEQ ID NO: 34550 - RNA, 23 nt, Artificial Sequence
  Synthetic oligonucleotide: CBLB-4392
ccauuggcuaugugacuggggau

SEQ ID NO: 34551 - RNA, 24 nt, Artificial Sequence
  Synthetic oligonucleotide: CBLB-4393
gccauuggcuaugugacuggggau

SEQ ID NO: 34552 - RNA, 18 nt, Artificial Sequence
  Synthetic oligonucleotide: CBLB-4394
gccauuggcuaugugacu

SEQ ID NO: 34553 - RNA, 19 nt, Artificial Sequence
  Synthetic oligonucleotide: CBLB-4395
ggccauuggcuaugugacu

SEQ ID NO: 34554 - RNA, 20 nt, Artificial Sequence
  Synthetic oligonucleotide: CBLB-3356
gggccauuggcuaugugacu

SEQ ID NO: 34555 - RNA, 21 nt, Artificial Sequence
  Synthetic oligonucleotide: CBLB-4396
ugggccauuggcuaugugacu

SEQ ID NO: 34556 - RNA, 22 nt, Artificial Sequence
  Synthetic oligonucleotide: CBLB-4397
gugggccauuggcuaugugacu

SEQ ID NO: 34557 - RNA, 23 nt, Artificial Sequence
  Synthetic oligonucleotide: CBLB-4398
agugggccauuggcuaugugacu

SEQ ID NO: 34558 - RNA, 24 nt, Artificial Sequence
  Synthetic oligonucleotide: CBLB-4399
cagugggccauuggcuaugugacu

SEQ ID NO: 34559 - RNA, 18 nt, Artificial Sequence
  Synthetic oligonucleotide: CBLB-4400
cuugaagcauggugcccu

SEQ ID NO: 34560 - RNA, 19 nt, Artificial Sequence
  Synthetic oligonucleotide: CBLB-4401
ucuugaagcauggugcccu

SEQ ID NO: 34561 - RNA, 20 nt, Artificial Sequence
  Synthetic oligonucleotide: CBLB-3360
cucuugaagcauggugcccu

SEQ ID NO: 34562 - RNA, 21 nt, Artificial Sequence
  Synthetic oligonucleotide: CBLB-4402
ccucuugaagcauggugcccu

SEQ ID NO: 34563 - RNA, 22 nt, Artificial Sequence
  Synthetic oligonucleotide: CBLB-4403
gccucuugaagcauggugcccu

SEQ ID NO: 34564 - RNA, 23 nt, Artificial Sequence
  Synthetic oligonucleotide: CBLB-4404
ugccucuugaagcauggugcccu

SEQ ID NO: 34565 - RNA, 24 nt, Artificial Sequence
  Synthetic oligonucleotide: CBLB-4405
augccucuugaagcauggugcccu

SEQ ID NO: 34566 - RNA, 18 nt, Artificial Sequence
  Synthetic oligonucleotide: CBLB-4406
aguaugagaaauggaagu

SEQ ID NO: 34567 - RNA, 19 nt, Artificial Sequence
  Synthetic oligonucleotide: CBLB-4407
aaguaugagaaauggaagu

SEQ ID NO: 34568 - RNA, 20 nt, Artificial Sequence
  Synthetic oligonucleotide: CBLB-3370
uaaguaugagaaauggaagu

SEQ ID NO: 34569 - RNA, 21 nt, Artificial Sequence
  Synthetic oligonucleotide: CBLB-4408
guaaguaugagaaauggaagu

SEQ ID NO: 34570 - RNA, 22 nt, Artificial Sequence
  Synthetic oligonucleotide: CBLB-4409
uguaaguaugagaaauggaagu

SEQ ID NO: 34571 - RNA, 23 nt, Artificial Sequence
  Synthetic oligonucleotide: CBLB-4410
uuguaaguaugagaaauggaagu

SEQ ID NO: 34572 - RNA, 24 nt, Artificial Sequence
  Synthetic oligonucleotide: CBLB-4411
auuguaaguaugagaaauggaagu

SEQ ID NO: 34573 - RNA, 18 nt, Artificial Sequence
  Synthetic oligonucleotide: CBLB-4412
uauaaaaguuacacaggu

SEQ ID NO: 34574 - RNA, 19 nt, Artificial Sequence
  Synthetic oligonucleotide: CBLB-4413
auauaaaaguuacacaggu

SEQ ID NO: 34575 - RNA, 20 nt, Artificial Sequence
  Synthetic oligonucleotide: CBLB-4414
cauauaaaaguuacacaggu

SEQ ID NO: 34576 - RNA, 21 nt, Artificial Sequence
  Synthetic oligonucleotide: CBLB-4415
ccauauaaaaguuacacaggu

SEQ ID NO: 34577 - RNA, 22 nt, Artificial Sequence
  Synthetic oligonucleotide: CBLB-4416
accauauaaaaguuacacaggu

SEQ ID NO: 34578 - RNA, 23 nt, Artificial Sequence
  Synthetic oligonucleotide: CBLB-4417
gaccauauaaaaguuacacaggu

SEQ ID NO: 34579 - RNA, 24 nt, Artificial Sequence
  Synthetic oligonucleotide: CBLB-4418
ugaccauauaaaaguuacacaggu

SEQ ID NO: 34580 - RNA, 18 nt, Artificial Sequence
  Synthetic oligonucleotide: CBLB-4419
uaaaaccuccuguucggu

SEQ ID NO: 34581 - RNA, 19 nt, Artificial Sequence
  Synthetic oligonucleotide: CBLB-4420
guaaaaccuccuguucggu

SEQ ID NO: 34582 - RNA, 20 nt, Artificial Sequence
  Synthetic oligonucleotide: CBLB-4421
uguaaaaccuccuguucggu

SEQ ID NO: 34583 - RNA, 21 nt, Artificial Sequence
  Synthetic oligonucleotide: CBLB-4422
auguaaaaccuccuguucggu

SEQ ID NO: 34584 - RNA, 22 nt, Artificial Sequence
  Synthetic oligonucleotide: CBLB-4423
aauguaaaaccuccuguucggu

SEQ ID NO: 34585 - RNA, 23 nt, Artificial Sequence
  Synthetic oligonucleotide: CBLB-4424
uaauguaaaaccuccuguucggu

SEQ ID NO: 34586 - RNA, 24 nt, Artificial Sequence
  Synthetic oligonucleotide: CBLB-4425
auaauguaaaaccuccuguucggu

SEQ ID NO: 34587 - RNA, 18 nt, Artificial Sequence
  Synthetic oligonucleotide: CBLB-4426
augauuacauuucaguuu

SEQ ID NO: 34588 - RNA, 19 nt, Artificial Sequence
  Synthetic oligonucleotide: CBLB-4427
aaugauuacauuucaguuu

SEQ ID NO: 34589 - RNA, 20 nt, Artificial Sequence
  Synthetic oligonucleotide: CBLB-4428
caaugauuacauuucaguuu

SEQ ID NO: 34590 - RNA, 21 nt, Artificial Sequence
  Synthetic oligonucleotide: CBLB-4429
gcaaugauuacauuucaguuu

SEQ ID NO: 34591 - RNA, 22 nt, Artificial Sequence
  Synthetic oligonucleotide: CBLB-4430
ugcaaugauuacauuucaguuu

SEQ ID NO: 34592 - RNA, 23 nt, Artificial Sequence
  Synthetic oligonucleotide: CBLB-4431
uugcaaugauuacauuucaguuu

SEQ ID NO: 34593 - RNA, 24 nt, Artificial Sequence
  Synthetic oligonucleotide: CBLB-4432
cuugcaaugauuacauuucaguuu

SEQ ID NO: 34594 - RNA, 18 nt, Artificial Sequence
  Synthetic oligonucleotide: CBLB-4433
ugcauuuucuauuuguuu

SEQ ID NO: 34595 - RNA, 19 nt, Artificial Sequence
  Synthetic oligonucleotide: CBLB-4434
augcauuuucuauuuguuu

SEQ ID NO: 34596 - RNA, 20 nt, Artificial Sequence
  Synthetic oligonucleotide: CBLB-3410
caugcauuuucuauuuguuu

SEQ ID NO: 34597 - RNA, 21 nt, Artificial Sequence
  Synthetic oligonucleotide: CBLB-4435
ccaugcauuuucuauuuguuu

SEQ ID NO: 34598 - RNA, 22 nt, Artificial Sequence
  Synthetic oligonucleotide: CBLB-4436
uccaugcauuuucuauuuguuu

SEQ ID NO: 34599 - RNA, 23 nt, Artificial Sequence
  Synthetic oligonucleotide: CBLB-4437
auccaugcauuuucuauuuguuu

SEQ ID NO: 34600 - RNA, 24 nt, Artificial Sequence
  Synthetic oligonucleotide: CBLB-4438
aauccaugcauuuucuauuuguuu

SEQ ID NO: 34601 - RNA, 18 nt, Artificial Sequence
  Synthetic oligonucleotide: CBLB-4439
gugcaagguggaaaaaaa

SEQ ID NO: 34602 - RNA, 19 nt, Artificial Sequence
  Synthetic oligonucleotide: CBLB-4440
ugugcaagguggaaaaaaa

SEQ ID NO: 34603 - RNA, 20 nt, Artificial Sequence
  Synthetic oligonucleotide: CBLB-3013
cugugcaagguggaaaaaaa

SEQ ID NO: 34604 - RNA, 21 nt, Artificial Sequence
  Synthetic oligonucleotide: CBLB-4441
ucugugcaagguggaaaaaaa

SEQ ID NO: 34605 - RNA, 22 nt, Artificial Sequence
  Synthetic oligonucleotide: CBLB-4442
uucugugcaagguggaaaaaaa

SEQ ID NO: 34606 - RNA, 23 nt, Artificial Sequence
  Synthetic oligonucleotide: CBLB-4443
guucugugcaagguggaaaaaaa

SEQ ID NO: 34607 - RNA, 24 nt, Artificial Sequence
  Synthetic oligonucleotide: CBLB-4444
aguucugugcaagguggaaaaaaa

SEQ ID NO: 34608 - RNA, 18 nt, Artificial Sequence
  Synthetic oligonucleotide: CBLB-4445
uaggcacaagggaaaaaa

SEQ ID NO: 34609 - RNA, 19 nt, Artificial Sequence
  Synthetic oligonucleotide: CBLB-4446
guaggcacaagggaaaaaa

SEQ ID NO: 34610 - RNA, 20 nt, Artificial Sequence
  Synthetic oligonucleotide: CBLB-4447
uguaggcacaagggaaaaaa

SEQ ID NO: 34611 - RNA, 21 nt, Artificial Sequence
  Synthetic oligonucleotide: CBLB-4448
cuguaggcacaagggaaaaaa

SEQ ID NO: 34612 - RNA, 22 nt, Artificial Sequence
  Synthetic oligonucleotide: CBLB-4449
ucuguaggcacaagggaaaaaa

SEQ ID NO: 34613 - RNA, 23 nt, Artificial Sequence
  Synthetic oligonucleotide: CBLB-4450
gucuguaggcacaagggaaaaaa

SEQ ID NO: 34614 - RNA, 24 nt, Artificial Sequence
  Synthetic oligonucleotide: CBLB-4451
cgucuguaggcacaagggaaaaaa

SEQ ID NO: 34615 - RNA, 18 nt, Artificial Sequence
  Synthetic oligonucleotide: CBLB-4452
ugugcaagguggaaaaaa

SEQ ID NO: 34616 - RNA, 19 nt, Artificial Sequence
  Synthetic oligonucleotide: CBLB-4453
cugugcaagguggaaaaaa

SEQ ID NO: 34617 - RNA, 20 nt, Artificial Sequence
  Synthetic oligonucleotide: CBLB-3014
ucugugcaagguggaaaaaa

SEQ ID NO: 34618 - RNA, 21 nt, Artificial Sequence
  Synthetic oligonucleotide: CBLB-4454
uucugugcaagguggaaaaaa

SEQ ID NO: 34619 - RNA, 22 nt, Artificial Sequence
  Synthetic oligonucleotide: CBLB-4455
guucugugcaagguggaaaaaa

SEQ ID NO: 34620 - RNA, 23 nt, Artificial Sequence
  Synthetic oligonucleotide: CBLB-4456
aguucugugcaagguggaaaaaa

SEQ ID NO: 34621 - RNA, 24 nt, Artificial Sequence
  Synthetic oligonucleotide: CBLB-4457
uaguucugugcaagguggaaaaaa

SEQ ID NO: 34622 - RNA, 18 nt, Artificial Sequence
  Synthetic oligonucleotide: CBLB-4458
aaauaucaaauucaaaaa

SEQ ID NO: 34623 - RNA, 19 nt, Artificial Sequence
  Synthetic oligonucleotide: CBLB-4459
aaaauaucaaauucaaaaa

SEQ ID NO: 34624 - RNA, 20 nt, Artificial Sequence
  Synthetic oligonucleotide: CBLB-4460
aaaaauaucaaauucaaaaa

SEQ ID NO: 34625 - RNA, 21 nt, Artificial Sequence
  Synthetic oligonucleotide: CBLB-4461
uaaaaauaucaaauucaaaaa

SEQ ID NO: 34626 - RNA, 22 nt, Artificial Sequence
  Synthetic oligonucleotide: CBLB-4462
guaaaaauaucaaauucaaaaa

SEQ ID NO: 34627 - RNA, 23 nt, Artificial Sequence
  Synthetic oligonucleotide: CBLB-4463
gguaaaaauaucaaauucaaaaa

SEQ ID NO: 34628 - RNA, 24 nt, Artificial Sequence
  Synthetic oligonucleotide: CBLB-4464
ugguaaaaauaucaaauucaaaaa

SEQ ID NO: 34629 - RNA, 18 nt, Artificial Sequence
  Synthetic oligonucleotide: CBLB-4465
ugcacuagaacagaaaaa

SEQ ID NO: 34630 - RNA, 19 nt, Artificial Sequence
  Synthetic oligonucleotide: CBLB-4466
gugcacuagaacagaaaaa

SEQ ID NO: 34631 - RNA, 20 nt, Artificial Sequence
  Synthetic oligonucleotide: CBLB-4467
agugcacuagaacagaaaaa

SEQ ID NO: 34632 - RNA, 21 nt, Artificial Sequence
  Synthetic oligonucleotide: CBLB-4468
cagugcacuagaacagaaaaa

SEQ ID NO: 34633 - RNA, 22 nt, Artificial Sequence
  Synthetic oligonucleotide: CBLB-4469
ucagugcacuagaacagaaaaa

SEQ ID NO: 34634 - RNA, 23 nt, Artificial Sequence
  Synthetic oligonucleotide: CBLB-4470
gucagugcacuagaacagaaaaa

SEQ ID NO: 34635 - RNA, 24 nt, Artificial Sequence
  Synthetic oligonucleotide: CBLB-4471
ugucagugcacuagaacagaaaaa

SEQ ID NO: 34636 - RNA, 18 nt, Artificial Sequence
  Synthetic oligonucleotide: CBLB-4472
cugugcaagguggaaaaa

SEQ ID NO: 34637 - RNA, 19 nt, Artificial Sequence
  Synthetic oligonucleotide: CBLB-4473
ucugugcaagguggaaaaa

SEQ ID NO: 34638 - RNA, 20 nt, Artificial Sequence
  Synthetic oligonucleotide: CBLB-4474
uucugugcaagguggaaaaa

SEQ ID NO: 34639 - RNA, 21 nt, Artificial Sequence
  Synthetic oligonucleotide: CBLB-4475
guucugugcaagguggaaaaa

SEQ ID NO: 34640 - RNA, 22 nt, Artificial Sequence
  Synthetic oligonucleotide: CBLB-4476
aguucugugcaagguggaaaaa

SEQ ID NO: 34641 - RNA, 23 nt, Artificial Sequence
  Synthetic oligonucleotide: CBLB-4477
uaguucugugcaagguggaaaaa

SEQ ID NO: 34642 - RNA, 24 nt, Artificial Sequence
  Synthetic oligonucleotide: CBLB-4478
auaguucugugcaagguggaaaaa

SEQ ID NO: 34643 - RNA, 18 nt, Artificial Sequence
  Synthetic oligonucleotide: CBLB-4479
aauuccaauuccgcaaaa

SEQ ID NO: 34644 - RNA, 19 nt, Artificial Sequence
  Synthetic oligonucleotide: CBLB-4480
aaauuccaauuccgcaaaa

SEQ ID NO: 34645 - RNA, 20 nt, Artificial Sequence
  Synthetic oligonucleotide: CBLB-4481
gaaauuccaauuccgcaaaa

SEQ ID NO: 34646 - RNA, 21 nt, Artificial Sequence
  Synthetic oligonucleotide: CBLB-4482
agaaauuccaauuccgcaaaa

SEQ ID NO: 34647 - RNA, 22 nt, Artificial Sequence
  Synthetic oligonucleotide: CBLB-4483
aagaaauuccaauuccgcaaaa

SEQ ID NO: 34648 - RNA, 23 nt, Artificial Sequence
  Synthetic oligonucleotide: CBLB-4484
uaagaaauuccaauuccgcaaaa

SEQ ID NO: 34649 - RNA, 24 nt, Artificial Sequence
  Synthetic oligonucleotide: CBLB-4485
cuaagaaauuccaauuccgcaaaa

SEQ ID NO: 34650 - RNA, 18 nt, Artificial Sequence
  Synthetic oligonucleotide: CBLB-4486
aucuuacagagcugaaaa

SEQ ID NO: 34651 - RNA, 19 nt, Artificial Sequence
  Synthetic oligonucleotide: CBLB-4487
aaucuuacagagcugaaaa

SEQ ID NO: 34652 - RNA, 20 nt, Artificial Sequence
  Synthetic oligonucleotide: CBLB-4488
aaaucuuacagagcugaaaa

SEQ ID NO: 34653 - RNA, 21 nt, Artificial Sequence
  Synthetic oligonucleotide: CBLB-4489
caaaucuuacagagcugaaaa

SEQ ID NO: 34654 - RNA, 22 nt, Artificial Sequence
  Synthetic oligonucleotide: CBLB-4490
acaaaucuuacagagcugaaaa

SEQ ID NO: 34655 - RNA, 23 nt, Artificial Sequence
  Synthetic oligonucleotide: CBLB-4491
cacaaaucuuacagagcugaaaa

SEQ ID NO: 34656 - RNA, 24 nt, Artificial Sequence
  Synthetic oligonucleotide: CBLB-4492
gcacaaaucuuacagagcugaaaa

SEQ ID NO: 34657 - RNA, 18 nt, Artificial Sequence
  Synthetic oligonucleotide: CBLB-4493
auccgacuccuaaacaaa

SEQ ID NO: 34658 - RNA, 19 nt, Artificial Sequence
  Synthetic oligonucleotide: CBLB-4494
cauccgacuccuaaacaaa

SEQ ID NO: 34659 - RNA, 20 nt, Artificial Sequence
  Synthetic oligonucleotide: CBLB-4495
ccauccgacuccuaaacaaa

SEQ ID NO: 34660 - RNA, 21 nt, Artificial Sequence
  Synthetic oligonucleotide: CBLB-4496
accauccgacuccuaaacaaa

SEQ ID NO: 34661 - RNA, 22 nt, Artificial Sequence
  Synthetic oligonucleotide: CBLB-4497
gaccauccgacuccuaaacaaa

SEQ ID NO: 34662 - RNA, 23 nt, Artificial Sequence
  Synthetic oligonucleotide: CBLB-4498
ugaccauccgacuccuaaacaaa

SEQ ID NO: 34663 - RNA, 24 nt, Artificial Sequence
  Synthetic oligonucleotide: CBLB-4499
cugaccauccgacuccuaaacaaa

SEQ ID NO: 34664 - RNA, 18 nt, Artificial Sequence
  Synthetic oligonucleotide: CBLB-4500
aggagaagacuaaagaaa

SEQ ID NO: 34665 - RNA, 19 nt, Artificial Sequence
  Synthetic oligonucleotide: CBLB-4501
aaggagaagacuaaagaaa

SEQ ID NO: 34666 - RNA, 20 nt, Artificial Sequence
  Synthetic oligonucleotide: CBLB-4502
caaggagaagacuaaagaaa

SEQ ID NO: 34667 - RNA, 21 nt, Artificial Sequence
  Synthetic oligonucleotide: CBLB-4503
gcaaggagaagacuaaagaaa

SEQ ID NO: 34668 - RNA, 22 nt, Artificial Sequence
  Synthetic oligonucleotide: CBLB-4504
ugcaaggagaagacuaaagaaa

SEQ ID NO: 34669 - RNA, 23 nt, Artificial Sequence
  Synthetic oligonucleotide: CBLB-4505
augcaaggagaagacuaaagaaa

SEQ ID NO: 34670 - RNA, 24 nt, Artificial Sequence
  Synthetic oligonucleotide: CBLB-4506
caugcaaggagaagacuaaagaaa

SEQ ID NO: 34671 - RNA, 18 nt, Artificial Sequence
  Synthetic oligonucleotide: CBLB-4507
agugcacuagaacagaaa

SEQ ID NO: 34672 - RNA, 19 nt, Artificial Sequence
  Synthetic oligonucleotide: CBLB-4508
cagugcacuagaacagaaa

SEQ ID NO: 34673 - RNA, 20 nt, Artificial Sequence
  Synthetic oligonucleotide: CBLB-4509
ucagugcacuagaacagaaa

SEQ ID NO: 34674 - RNA, 21 nt, Artificial Sequence
  Synthetic oligonucleotide: CBLB-4510
gucagugcacuagaacagaaa

SEQ ID NO: 34675 - RNA, 22 nt, Artificial Sequence
  Synthetic oligonucleotide: CBLB-4511
ugucagugcacuagaacagaaa

SEQ ID NO: 34676 - RNA, 23 nt, Artificial Sequence
  Synthetic oligonucleotide: CBLB-4512
cugucagugcacuagaacagaaa

SEQ ID NO: 34677 - RNA, 24 nt, Artificial Sequence
  Synthetic oligonucleotide: CBLB-4513
ccugucagugcacuagaacagaaa

SEQ ID NO: 34678 - RNA, 18 nt, Artificial Sequence
  Synthetic oligonucleotide: CBLB-4514
aagauaacugaauuuaaa

SEQ ID NO: 34679 - RNA, 19 nt, Artificial Sequence
  Synthetic oligonucleotide: CBLB-4515
aaagauaacugaauuuaaa

SEQ ID NO: 34680 - RNA, 20 nt, Artificial Sequence
  Synthetic oligonucleotide: CBLB-4516
uaaagauaacugaauuuaaa

SEQ ID NO: 34681 - RNA, 21 nt, Artificial Sequence
  Synthetic oligonucleotide: CBLB-4517
auaaagauaacugaauuuaaa

SEQ ID NO: 34682 - RNA, 22 nt, Artificial Sequence
  Synthetic oligonucleotide: CBLB-4518
gauaaagauaacugaauuuaaa

SEQ ID NO: 34683 - RNA, 23 nt, Artificial Sequence
  Synthetic oligonucleotide: CBLB-4519
ggauaaagauaacugaauuuaaa

SEQ ID NO: 34684 - RNA, 24 nt, Artificial Sequence
  Synthetic oligonucleotide: CBLB-4520
aggauaaagauaacugaauuuaaa

SEQ ID NO: 34685 - RNA, 18 nt, Artificial Sequence
  Synthetic oligonucleotide: CBLB-4521
ucuguguagauuuuuaaa

SEQ ID NO: 34686 - RNA, 19 nt, Artificial Sequence
  Synthetic oligonucleotide: CBLB-4522
aucuguguagauuuuuaaa

SEQ ID NO: 34687 - RNA, 20 nt, Artificial Sequence
  Synthetic oligonucleotide: CBLB-4523
caucuguguagauuuuuaaa

SEQ ID NO: 34688 - RNA, 21 nt, Artificial Sequence
  Synthetic oligonucleotide: CBLB-4524
ccaucuguguagauuuuuaaa

SEQ ID NO: 34689 - RNA, 22 nt, Artificial Sequence
  Synthetic oligonucleotide: CBLB-4525
accaucuguguagauuuuuaaa

SEQ ID NO: 34690 - RNA, 23 nt, Artificial Sequence
  Synthetic oligonucleotide: CBLB-4526
aaccaucuguguagauuuuuaaa

SEQ ID NO: 34691 - RNA, 24 nt, Artificial Sequence
  Synthetic oligonucleotide: CBLB-4527
gaaccaucuguguagauuuuuaaa

SEQ ID NO: 34692 - RNA, 18 nt, Artificial Sequence
  Synthetic oligonucleotide: CBLB-4528
uuucgucuguaggcacaa

SEQ ID NO: 34693 - RNA, 19 nt, Artificial Sequence
  Synthetic oligonucleotide: CBLB-4529
auuucgucuguaggcacaa

SEQ ID NO: 34694 - RNA, 20 nt, Artificial Sequence
  Synthetic oligonucleotide: CBLB-3025
gauuucgucuguaggcacaa

SEQ ID NO: 34695 - RNA, 21 nt, Artificial Sequence
  Synthetic oligonucleotide: CBLB-4530
agauuucgucuguaggcacaa

SEQ ID NO: 34696 - RNA, 22 nt, Artificial Sequence
  Synthetic oligonucleotide: CBLB-4531
gagauuucgucuguaggcacaa

SEQ ID NO: 34697 - RNA, 23 nt, Artificial Sequence
  Synthetic oligonucleotide: CBLB-4532
ugagauuucgucuguaggcacaa

SEQ ID NO: 34698 - RNA, 24 nt, Artificial Sequence
  Synthetic oligonucleotide: CBLB-4533
gugagauuucgucuguaggcacaa

SEQ ID NO: 34699 - RNA, 18 nt, Artificial Sequence
  Synthetic oligonucleotide: CBLB-4534
ccuucuagcaggaggcaa

SEQ ID NO: 34700 - RNA, 19 nt, Artificial Sequence
  Synthetic oligonucleotide: CBLB-4535
accuucuagcaggaggcaa

SEQ ID NO: 34701 - RNA, 20 nt, Artificial Sequence
  Synthetic oligonucleotide: CBLB-3033
aaccuucuagcaggaggcaa

SEQ ID NO: 34702 - RNA, 21 nt, Artificial Sequence
  Synthetic oligonucleotide: CBLB-4536
uaaccuucuagcaggaggcaa

SEQ ID NO: 34703 - RNA, 22 nt, Artificial Sequence
  Synthetic oligonucleotide: CBLB-4537
guaaccuucuagcaggaggcaa

SEQ ID NO: 34704 - RNA, 23 nt, Artificial Sequence
  Synthetic oligonucleotide: CBLB-4538
gguaaccuucuagcaggaggcaa

SEQ ID NO: 34705 - RNA, 24 nt, Artificial Sequence
  Synthetic oligonucleotide: CBLB-4539
ugguaaccuucuagcaggaggcaa

SEQ ID NO: 34706 - RNA, 18 nt, Artificial Sequence
  Synthetic oligonucleotide: CBLB-4540
gcuuucuucucugggcaa

SEQ ID NO: 34707 - RNA, 19 nt, Artificial Sequence
  Synthetic oligonucleotide: CBLB-4541
ggcuuucuucucugggcaa

SEQ ID NO: 34708 - RNA, 20 nt, Artificial Sequence
  Synthetic oligonucleotide: CBLB-3034
uggcuuucuucucugggcaa

SEQ ID NO: 34709 - RNA, 21 nt, Artificial Sequence
  Synthetic oligonucleotide: CBLB-4542
guggcuuucuucucugggcaa

SEQ ID NO: 34710 - RNA, 22 nt, Artificial Sequence
  Synthetic oligonucleotide: CBLB-4543
uguggcuuucuucucugggcaa

SEQ ID NO: 34711 - RNA, 23 nt, Artificial Sequence
  Synthetic oligonucleotide: CBLB-4544
cuguggcuuucuucucugggcaa

SEQ ID NO: 34712 - RNA, 24 nt, Artificial Sequence
  Synthetic oligonucleotide: CBLB-4545
gcuguggcuuucuucucugggcaa

SEQ ID NO: 34713 - RNA, 18 nt, Artificial Sequence
  Synthetic oligonucleotide: CBLB-4546
aagacuaaagaaacagaa

SEQ ID NO: 34714 - RNA, 19 nt, Artificial Sequence
  Synthetic oligonucleotide: CBLB-4547
gaagacuaaagaaacagaa

SEQ ID NO: 34715 - RNA, 20 nt, Artificial Sequence
  Synthetic oligonucleotide: CBLB-4548
agaagacuaaagaaacagaa

SEQ ID NO: 34716 - RNA, 21 nt, Artificial Sequence
  Synthetic oligonucleotide: CBLB-4549
gagaagacuaaagaaacagaa

SEQ ID NO: 34717 - RNA, 22 nt, Artificial Sequence
  Synthetic oligonucleotide: CBLB-4550
ggagaagacuaaagaaacagaa

SEQ ID NO: 34718 - RNA, 23 nt, Artificial Sequence
  Synthetic oligonucleotide: CBLB-4551
aggagaagacuaaagaaacagaa

SEQ ID NO: 34719 - RNA, 24 nt, Artificial Sequence
  Synthetic oligonucleotide: CBLB-4552
aaggagaagacuaaagaaacagaa

SEQ ID NO: 34720 - RNA, 18 nt, Artificial Sequence
  Synthetic oligonucleotide: CBLB-4553
ccugucagugcacuagaa

SEQ ID NO: 34721 - RNA, 19 nt, Artificial Sequence
  Synthetic oligonucleotide: CBLB-4554
gccugucagugcacuagaa

SEQ ID NO: 34722 - RNA, 20 nt, Artificial Sequence
  Synthetic oligonucleotide: CBLB-4555
ugccugucagugcacuagaa

SEQ ID NO: 34723 - RNA, 21 nt, Artificial Sequence
  Synthetic oligonucleotide: CBLB-4556
cugccugucagugcacuagaa

SEQ ID NO: 34724 - RNA, 22 nt, Artificial Sequence
  Synthetic oligonucleotide: CBLB-4557
ucugccugucagugcacuagaa

SEQ ID NO: 34725 - RNA, 23 nt, Artificial Sequence
  Synthetic oligonucleotide: CBLB-4558
uucugccugucagugcacuagaa

SEQ ID NO: 34726 - RNA, 24 nt, Artificial Sequence
  Synthetic oligonucleotide: CBLB-4559
guucugccugucagugcacuagaa

SEQ ID NO: 34727 - RNA, 18 nt, Artificial Sequence
  Synthetic oligonucleotide: CBLB-4560
gcccauacucuuaccgaa

SEQ ID NO: 34728 - RNA, 19 nt, Artificial Sequence
  Synthetic oligonucleotide: CBLB-4561
ugcccauacucuuaccgaa

SEQ ID NO: 34729 - RNA, 20 nt, Artificial Sequence
  Synthetic oligonucleotide: CBLB-4562
cugcccauacucuuaccgaa

SEQ ID NO: 34730 - RNA, 21 nt, Artificial Sequence
  Synthetic oligonucleotide: CBLB-4563
ucugcccauacucuuaccgaa

SEQ ID NO: 34731 - RNA, 22 nt, Artificial Sequence
  Synthetic oligonucleotide: CBLB-4564
aucugcccauacucuuaccgaa

SEQ ID NO: 34732 - RNA, 23 nt, Artificial Sequence
  Synthetic oligonucleotide: CBLB-4565
aaucugcccauacucuuaccgaa

SEQ ID NO: 34733 - RNA, 24 nt, Artificial Sequence
  Synthetic oligonucleotide: CBLB-4566
aaaucugcccauacucuuaccgaa

SEQ ID NO: 34734 - RNA, 18 nt, Artificial Sequence
  Synthetic oligonucleotide: CBLB-4567
uuaaagguuucaaccuaa

SEQ ID NO: 34735 - RNA, 19 nt, Artificial Sequence
  Synthetic oligonucleotide: CBLB-4568
uuuaaagguuucaaccuaa

SEQ ID NO: 34736 - RNA, 20 nt, Artificial Sequence
  Synthetic oligonucleotide: CBLB-3046
uuuuaaagguuucaaccuaa

SEQ ID NO: 34737 - RNA, 21 nt, Artificial Sequence
  Synthetic oligonucleotide: CBLB-4569
uuuuuaaagguuucaaccuaa

SEQ ID NO: 34738 - RNA, 22 nt, Artificial Sequence
  Synthetic oligonucleotide: CBLB-4570
uuuuuuaaagguuucaaccuaa

SEQ ID NO: 34739 - RNA, 23 nt, Artificial Sequence
  Synthetic oligonucleotide: CBLB-4571
cuuuuuuaaagguuucaaccuaa

SEQ ID NO: 34740 - RNA, 24 nt, Artificial Sequence
  Synthetic oligonucleotide: CBLB-4572
acuuuuuuaaagguuucaaccuaa

SEQ ID NO: 34741 - RNA, 18 nt, Artificial Sequence
  Synthetic oligonucleotide: CBLB-4573
uagggaggagggugguaa

SEQ ID NO: 34742 - RNA, 19 nt, Artificial Sequence
  Synthetic oligonucleotide: CBLB-4574
cuagggaggagggugguaa

SEQ ID NO: 34743 - RNA, 20 nt, Artificial Sequence
  Synthetic oligonucleotide: CBLB-4575
gcuagggaggagggugguaa

SEQ ID NO: 34744 - RNA, 21 nt, Artificial Sequence
  Synthetic oligonucleotide: CBLB-4576
ugcuagggaggagggugguaa

SEQ ID NO: 34745 - RNA, 22 nt, Artificial Sequence
  Synthetic oligonucleotide: CBLB-4577
augcuagggaggagggugguaa

SEQ ID NO: 34746 - RNA, 23 nt, Artificial Sequence
  Synthetic oligonucleotide: CBLB-4578
uaugcuagggaggagggugguaa

SEQ ID NO: 34747 - RNA, 24 nt, Artificial Sequence
  Synthetic oligonucleotide: CBLB-4579
uuaugcuagggaggagggugguaa

SEQ ID NO: 34748 - RNA, 18 nt, Artificial Sequence
  Synthetic oligonucleotide: CBLB-4580
aaaaaauaaaaaaauuaa

SEQ ID NO: 34749 - RNA, 19 nt, Artificial Sequence
  Synthetic oligonucleotide: CBLB-4581
uaaaaaauaaaaaaauuaa

SEQ ID NO: 34750 - RNA, 20 nt, Artificial Sequence
  Synthetic oligonucleotide: CBLB-4582
cuaaaaaauaaaaaaauuaa

SEQ ID NO: 34751 - RNA, 21 nt, Artificial Sequence
  Synthetic oligonucleotide: CBLB-4583
gcuaaaaaauaaaaaaauuaa

SEQ ID NO: 34752 - RNA, 22 nt, Artificial Sequence
  Synthetic oligonucleotide: CBLB-4584
ggcuaaaaaauaaaaaaauuaa

SEQ ID NO: 34753 - RNA, 23 nt, Artificial Sequence
  Synthetic oligonucleotide: CBLB-4585
aggcuaaaaaauaaaaaaauuaa

SEQ ID NO: 34754 - RNA, 24 nt, Artificial Sequence
  Synthetic oligonucleotide: CBLB-4586
aaggcuaaaaaauaaaaaaauuaa

SEQ ID NO: 34755 - RNA, 18 nt, Artificial Sequence
  Synthetic oligonucleotide: CBLB-4587
caaucgagugcaacuuaa

SEQ ID NO: 34756 - RNA, 19 nt, Artificial Sequence
  Synthetic oligonucleotide: CBLB-4588
ccaaucgagugcaacuuaa

SEQ ID NO: 34757 - RNA, 20 nt, Artificial Sequence
  Synthetic oligonucleotide: CBLB-4589
cccaaucgagugcaacuuaa

SEQ ID NO: 34758 - RNA, 21 nt, Artificial Sequence
  Synthetic oligonucleotide: CBLB-4590
ucccaaucgagugcaacuuaa

SEQ ID NO: 34759 - RNA, 22 nt, Artificial Sequence
  Synthetic oligonucleotide: CBLB-4591
gucccaaucgagugcaacuuaa

SEQ ID NO: 34760 - RNA, 23 nt, Artificial Sequence
  Synthetic oligonucleotide: CBLB-4592
ugucccaaucgagugcaacuuaa

SEQ ID NO: 34761 - RNA, 24 nt, Artificial Sequence
  Synthetic oligonucleotide: CBLB-4593
cugucccaaucgagugcaacuuaa

SEQ ID NO: 34762 - RNA, 18 nt, Artificial Sequence
  Synthetic oligonucleotide: CBLB-4594
uggaggaggaucucuuaa

SEQ ID NO: 34763 - RNA, 19 nt, Artificial Sequence
  Synthetic oligonucleotide: CBLB-4595
guggaggaggaucucuuaa

SEQ ID NO: 34764 - RNA, 20 nt, Artificial Sequence
  Synthetic oligonucleotide: CBLB-3051
gguggaggaggaucucuuaa

SEQ ID NO: 34765 - RNA, 21 nt, Artificial Sequence
  Synthetic oligonucleotide: CBLB-4596
cgguggaggaggaucucuuaa

SEQ ID NO: 34766 - RNA, 22 nt, Artificial Sequence
  Synthetic oligonucleotide: CBLB-4597
gcgguggaggaggaucucuuaa

SEQ ID NO: 34767 - RNA, 23 nt, Artificial Sequence
  Synthetic oligonucleotide: CBLB-4598
ggcgguggaggaggaucucuuaa

SEQ ID NO: 34768 - RNA, 24 nt, Artificial Sequence
  Synthetic oligonucleotide: CBLB-4599
uggcgguggaggaggaucucuuaa

SEQ ID NO: 34769 - RNA, 18 nt, Artificial Sequence
  Synthetic oligonucleotide: CBLB-4600
ccacuugcuagaucaaca

SEQ ID NO: 34770 - RNA, 19 nt, Artificial Sequence
  Synthetic oligonucleotide: CBLB-4601
gccacuugcuagaucaaca

SEQ ID NO: 34771 - RNA, 20 nt, Artificial Sequence
  Synthetic oligonucleotide: CBLB-4602
ggccacuugcuagaucaaca

SEQ ID NO: 34772 - RNA, 21 nt, Artificial Sequence
  Synthetic oligonucleotide: CBLB-4603
uggccacuugcuagaucaaca

SEQ ID NO: 34773 - RNA, 22 nt, Artificial Sequence
  Synthetic oligonucleotide: CBLB-4604
uuggccacuugcuagaucaaca

SEQ ID NO: 34774 - RNA, 23 nt, Artificial Sequence
  Synthetic oligonucleotide: CBLB-4605
cuuggccacuugcuagaucaaca

SEQ ID NO: 34775 - RNA, 24 nt, Artificial Sequence
  Synthetic oligonucleotide: CBLB-4606
acuuggccacuugcuagaucaaca

SEQ ID NO: 34776 - RNA, 18 nt, Artificial Sequence
  Synthetic oligonucleotide: CBLB-4607
acccguugggcugccaca

SEQ ID NO: 34777 - RNA, 19 nt, Artificial Sequence
  Synthetic oligonucleotide: CBLB-4608
aacccguugggcugccaca

SEQ ID NO: 34778 - RNA, 20 nt, Artificial Sequence
  Synthetic oligonucleotide: CBLB-3059
gaacccguugggcugccaca

SEQ ID NO: 34779 - RNA, 21 nt, Artificial Sequence
  Synthetic oligonucleotide: CBLB-4609
ugaacccguugggcugccaca

SEQ ID NO: 34780 - RNA, 22 nt, Artificial Sequence
  Synthetic oligonucleotide: CBLB-4610
gugaacccguugggcugccaca

SEQ ID NO: 34781 - RNA, 23 nt, Artificial Sequence
  Synthetic oligonucleotide: CBLB-4611
ggugaacccguugggcugccaca

SEQ ID NO: 34782 - RNA, 24 nt, Artificial Sequence
  Synthetic oligonucleotide: CBLB-4612
uggugaacccguugggcugccaca

SEQ ID NO: 34783 - RNA, 18 nt, Artificial Sequence
  Synthetic oligonucleotide: CBLB-4613
auuucgucuguaggcaca

SEQ ID NO: 34784 - RNA, 19 nt, Artificial Sequence
  Synthetic oligonucleotide: CBLB-4614
gauuucgucuguaggcaca

SEQ ID NO: 34785 - RNA, 20 nt, Artificial Sequence
  Synthetic oligonucleotide: CBLB-3060
agauuucgucuguaggcaca

SEQ ID NO: 34786 - RNA, 21 nt, Artificial Sequence
  Synthetic oligonucleotide: CBLB-4615
gagauuucgucuguaggcaca

SEQ ID NO: 34787 - RNA, 22 nt, Artificial Sequence
  Synthetic oligonucleotide: CBLB-4616
ugagauuucgucuguaggcaca

SEQ ID NO: 34788 - RNA, 23 nt, Artificial Sequence
  Synthetic oligonucleotide: CBLB-4617
gugagauuucgucuguaggcaca

SEQ ID NO: 34789 - RNA, 24 nt, Artificial Sequence
  Synthetic oligonucleotide: CBLB-4618
ugugagauuucgucuguaggcaca

SEQ ID NO: 34790 - RNA, 18 nt, Artificial Sequence
  Synthetic oligonucleotide: CBLB-4619
agguuuuacauuaugaca

SEQ ID NO: 34791 - RNA, 19 nt, Artificial Sequence
  Synthetic oligonucleotide: CBLB-4620
gagguuuuacauuaugaca

SEQ ID NO: 34792 - RNA, 20 nt, Artificial Sequence
  Synthetic oligonucleotide: CBLB-4621
ggagguuuuacauuaugaca

SEQ ID NO: 34793 - RNA, 21 nt, Artificial Sequence
  Synthetic oligonucleotide: CBLB-4622
aggagguuuuacauuaugaca

SEQ ID NO: 34794 - RNA, 22 nt, Artificial Sequence
  Synthetic oligonucleotide: CBLB-4623
caggagguuuuacauuaugaca

SEQ ID NO: 34795 - RNA, 23 nt, Artificial Sequence
  Synthetic oligonucleotide: CBLB-4624
acaggagguuuuacauuaugaca

SEQ ID NO: 34796 - RNA, 24 nt, Artificial Sequence
  Synthetic oligonucleotide: CBLB-4625
aacaggagguuuuacauuaugaca

SEQ ID NO: 34797 - RNA, 18 nt, Artificial Sequence
  Synthetic oligonucleotide: CBLB-4626
ucacuuccaaggugacca

SEQ ID NO: 34798 - RNA, 19 nt, Artificial Sequence
  Synthetic oligonucleotide: CBLB-4627
uucacuuccaaggugacca

SEQ ID NO: 34799 - RNA, 20 nt, Artificial Sequence
  Synthetic oligonucleotide: CBLB-4628
cuucacuuccaaggugacca

SEQ ID NO: 34800 - RNA, 21 nt, Artificial Sequence
  Synthetic oligonucleotide: CBLB-4629
ucuucacuuccaaggugacca

SEQ ID NO: 34801 - RNA, 22 nt, Artificial Sequence
  Synthetic oligonucleotide: CBLB-4630
uucuucacuuccaaggugacca

SEQ ID NO: 34802 - RNA, 23 nt, Artificial Sequence
  Synthetic oligonucleotide: CBLB-4631
auucuucacuuccaaggugacca

SEQ ID NO: 34803 - RNA, 24 nt, Artificial Sequence
  Synthetic oligonucleotide: CBLB-4632
uauucuucacuuccaaggugacca

SEQ ID NO: 34804 - RNA, 18 nt, Artificial Sequence
  Synthetic oligonucleotide: CBLB-4633
ucucccuggaauugacca

SEQ ID NO: 34805 - RNA, 19 nt, Artificial Sequence
  Synthetic oligonucleotide: CBLB-4634
aucucccuggaauugacca

SEQ ID NO: 34806 - RNA, 20 nt, Artificial Sequence
  Synthetic oligonucleotide: CBLB-4635
uaucucccuggaauugacca

SEQ ID NO: 34807 - RNA, 21 nt, Artificial Sequence
  Synthetic oligonucleotide: CBLB-4636
uuaucucccuggaauugacca

SEQ ID NO: 34808 - RNA, 22 nt, Artificial Sequence
  Synthetic oligonucleotide: CBLB-4637
guuaucucccuggaauugacca

SEQ ID NO: 34809 - RNA, 23 nt, Artificial Sequence
  Synthetic oligonucleotide: CBLB-4638
aguuaucucccuggaauugacca

SEQ ID NO: 34810 - RNA, 24 nt, Artificial Sequence
  Synthetic oligonucleotide: CBLB-4639
aaguuaucucccuggaauugacca

SEQ ID NO: 34811 - RNA, 18 nt, Artificial Sequence
  Synthetic oligonucleotide: CBLB-4640
ggaccaguacaccuacca

SEQ ID NO: 34812 - RNA, 19 nt, Artificial Sequence
  Synthetic oligonucleotide: CBLB-4641
cggaccaguacaccuacca

SEQ ID NO: 34813 - RNA, 20 nt, Artificial Sequence
  Synthetic oligonucleotide: CBLB-3062
acggaccaguacaccuacca

SEQ ID NO: 34814 - RNA, 21 nt, Artificial Sequence
  Synthetic oligonucleotide: CBLB-4642
aacggaccaguacaccuacca

SEQ ID NO: 34815 - RNA, 22 nt, Artificial Sequence
  Synthetic oligonucleotide: CBLB-4643
uaacggaccaguacaccuacca

SEQ ID NO: 34816 - RNA, 23 nt, Artificial Sequence
  Synthetic oligonucleotide: CBLB-4644
cuaacggaccaguacaccuacca

SEQ ID NO: 34817 - RNA, 24 nt, Artificial Sequence
  Synthetic oligonucleotide: CBLB-4645
gcuaacggaccaguacaccuacca

SEQ ID NO: 34818 - RNA, 18 nt, Artificial Sequence
  Synthetic oligonucleotide: CBLB-4646
ucuagcaucggcaugcca

SEQ ID NO: 34819 - RNA, 19 nt, Artificial Sequence
  Synthetic oligonucleotide: CBLB-4647
gucuagcaucggcaugcca

SEQ ID NO: 34820 - RNA, 20 nt, Artificial Sequence
  Synthetic oligonucleotide: CBLB-4648
agucuagcaucggcaugcca

SEQ ID NO: 34821 - RNA, 21 nt, Artificial Sequence
  Synthetic oligonucleotide: CBLB-4649
aagucuagcaucggcaugcca

SEQ ID NO: 34822 - RNA, 22 nt, Artificial Sequence
  Synthetic oligonucleotide: CBLB-4650
caagucuagcaucggcaugcca

SEQ ID NO: 34823 - RNA, 23 nt, Artificial Sequence
  Synthetic oligonucleotide: CBLB-4651
ccaagucuagcaucggcaugcca

SEQ ID NO: 34824 - RNA, 24 nt, Artificial Sequence
  Synthetic oligonucleotide: CBLB-4652
uccaagucuagcaucggcaugcca

SEQ ID NO: 34825 - RNA, 18 nt, Artificial Sequence
  Synthetic oligonucleotide: CBLB-4653
gaacccguugggcugcca

SEQ ID NO: 34826 - RNA, 19 nt, Artificial Sequence
  Synthetic oligonucleotide: CBLB-4654
ugaacccguugggcugcca

SEQ ID NO: 34827 - RNA, 20 nt, Artificial Sequence
  Synthetic oligonucleotide: CBLB-4655
gugaacccguugggcugcca

SEQ ID NO: 34828 - RNA, 21 nt, Artificial Sequence
  Synthetic oligonucleotide: CBLB-4656
ggugaacccguugggcugcca

SEQ ID NO: 34829 - RNA, 22 nt, Artificial Sequence
  Synthetic oligonucleotide: CBLB-4657
uggugaacccguugggcugcca

SEQ ID NO: 34830 - RNA, 23 nt, Artificial Sequence
  Synthetic oligonucleotide: CBLB-4658
uuggugaacccguugggcugcca

SEQ ID NO: 34831 - RNA, 24 nt, Artificial Sequence
  Synthetic oligonucleotide: CBLB-4659
uuuggugaacccguugggcugcca

SEQ ID NO: 34832 - RNA, 18 nt, Artificial Sequence
  Synthetic oligonucleotide: CBLB-4660
accuucuagcaggaggca

SEQ ID NO: 34833 - RNA, 19 nt, Artificial Sequence
  Synthetic oligonucleotide: CBLB-4661
aaccuucuagcaggaggca

SEQ ID NO: 34834 - RNA, 20 nt, Artificial Sequence
  Synthetic oligonucleotide: CBLB-4662
uaaccuucuagcaggaggca

SEQ ID NO: 34835 - RNA, 21 nt, Artificial Sequence
  Synthetic oligonucleotide: CBLB-4663
guaaccuucuagcaggaggca

SEQ ID NO: 34836 - RNA, 22 nt, Artificial Sequence
  Synthetic oligonucleotide: CBLB-4664
gguaaccuucuagcaggaggca

SEQ ID NO: 34837 - RNA, 23 nt, Artificial Sequence
  Synthetic oligonucleotide: CBLB-4665
ugguaaccuucuagcaggaggca

SEQ ID NO: 34838 - RNA, 24 nt, Artificial Sequence
  Synthetic oligonucleotide: CBLB-4666
cugguaaccuucuagcaggaggca

SEQ ID NO: 34839 - RNA, 18 nt, Artificial Sequence
  Synthetic oligonucleotide: CBLB-4667
ggcuuucuucucugggca

SEQ ID NO: 34840 - RNA, 19 nt, Artificial Sequence
  Synthetic oligonucleotide: CBLB-4668
uggcuuucuucucugggca

SEQ ID NO: 34841 - RNA, 20 nt, Artificial Sequence
  Synthetic oligonucleotide: CBLB-3075
guggcuuucuucucugggca

SEQ ID NO: 34842 - RNA, 21 nt, Artificial Sequence
  Synthetic oligonucleotide: CBLB-4669
uguggcuuucuucucugggca

SEQ ID NO: 34843 - RNA, 22 nt, Artificial Sequence
  Synthetic oligonucleotide: CBLB-4670
cuguggcuuucuucucugggca

SEQ ID NO: 34844 - RNA, 23 nt, Artificial Sequence
  Synthetic oligonucleotide: CBLB-4671
gcuguggcuuucuucucugggca

SEQ ID NO: 34845 - RNA, 24 nt, Artificial Sequence
  Synthetic oligonucleotide: CBLB-4672
ggcuguggcuuucuucucugggca

SEQ ID NO: 34846 - RNA, 18 nt, Artificial Sequence
  Synthetic oligonucleotide: CBLB-4673
uuguuuucucaccaugca

SEQ ID NO: 34847 - RNA, 19 nt, Artificial Sequence
  Synthetic oligonucleotide: CBLB-4674
cuuguuuucucaccaugca

SEQ ID NO: 34848 - RNA, 20 nt, Artificial Sequence
  Synthetic oligonucleotide: CBLB-3078
ucuuguuuucucaccaugca

SEQ ID NO: 34849 - RNA, 21 nt, Artificial Sequence
  Synthetic oligonucleotide: CBLB-4675
aucuuguuuucucaccaugca

SEQ ID NO: 34850 - RNA, 22 nt, Artificial Sequence
  Synthetic oligonucleotide: CBLB-4676
uaucuuguuuucucaccaugca

SEQ ID NO: 34851 - RNA, 23 nt, Artificial Sequence
  Synthetic oligonucleotide: CBLB-4677
uuaucuuguuuucucaccaugca

SEQ ID NO: 34852 - RNA, 24 nt, Artificial Sequence
  Synthetic oligonucleotide: CBLB-4678
uuuaucuuguuuucucaccaugca

SEQ ID NO: 34853 - RNA, 18 nt, Artificial Sequence
  Synthetic oligonucleotide: CBLB-4679
augagaagaucauaauca

SEQ ID NO: 34854 - RNA, 19 nt, Artificial Sequence
  Synthetic oligonucleotide: CBLB-4680
gaugagaagaucauaauca

SEQ ID NO: 34855 - RNA, 20 nt, Artificial Sequence
  Synthetic oligonucleotide: CBLB-4681
ggaugagaagaucauaauca

SEQ ID NO: 34856 - RNA, 21 nt, Artificial Sequence
  Synthetic oligonucleotide: CBLB-4682
gggaugagaagaucauaauca

SEQ ID NO: 34857 - RNA, 22 nt, Artificial Sequence
  Synthetic oligonucleotide: CBLB-4683
agggaugagaagaucauaauca

SEQ ID NO: 34858 - RNA, 23 nt, Artificial Sequence
  Synthetic oligonucleotide: CBLB-4684
gagggaugagaagaucauaauca

SEQ ID NO: 34859 - RNA, 24 nt, Artificial Sequence
  Synthetic oligonucleotide: CBLB-4685
ggagggaugagaagaucauaauca

SEQ ID NO: 34860 - RNA, 18 nt, Artificial Sequence
  Synthetic oligonucleotide: CBLB-4686
ccuucaucucuuggauca

SEQ ID NO: 34861 - RNA, 19 nt, Artificial Sequence
  Synthetic oligonucleotide: CBLB-4687
gccuucaucucuuggauca

SEQ ID NO: 34862 - RNA, 20 nt, Artificial Sequence
  Synthetic oligonucleotide: CBLB-4688
agccuucaucucuuggauca

SEQ ID NO: 34863 - RNA, 21 nt, Artificial Sequence
  Synthetic oligonucleotide: CBLB-4689
gagccuucaucucuuggauca

SEQ ID NO: 34864 - RNA, 22 nt, Artificial Sequence
  Synthetic oligonucleotide: CBLB-4690
ggagccuucaucucuuggauca

SEQ ID NO: 34865 - RNA, 23 nt, Artificial Sequence
  Synthetic oligonucleotide: CBLB-4691
uggagccuucaucucuuggauca

SEQ ID NO: 34866 - RNA, 24 nt, Artificial Sequence
  Synthetic oligonucleotide: CBLB-4692
cuggagccuucaucucuuggauca

SEQ ID NO: 34867 - RNA, 18 nt, Artificial Sequence
  Synthetic oligonucleotide: CBLB-4693
gagaugguugugaauuca

SEQ ID NO: 34868 - RNA, 19 nt, Artificial Sequence
  Synthetic oligonucleotide: CBLB-4694
ugagaugguugugaauuca

SEQ ID NO: 34869 - RNA, 20 nt, Artificial Sequence
  Synthetic oligonucleotide: CBLB-3088
augagaugguugugaauuca

SEQ ID NO: 34870 - RNA, 21 nt, Artificial Sequence
  Synthetic oligonucleotide: CBLB-4695
aaugagaugguugugaauuca

SEQ ID NO: 34871 - RNA, 22 nt, Artificial Sequence
  Synthetic oligonucleotide: CBLB-4696
caaugagaugguugugaauuca

SEQ ID NO: 34872 - RNA, 23 nt, Artificial Sequence
  Synthetic oligonucleotide: CBLB-4697
acaaugagaugguugugaauuca

SEQ ID NO: 34873 - RNA, 24 nt, Artificial Sequence
  Synthetic oligonucleotide: CBLB-4698
gacaaugagaugguugugaauuca

SEQ ID NO: 34874 - RNA, 18 nt, Artificial Sequence
  Synthetic oligonucleotide: CBLB-4699
ggagguuuugaauguuca

SEQ ID NO: 34875 - RNA, 19 nt, Artificial Sequence
  Synthetic oligonucleotide: CBLB-4700
aggagguuuugaauguuca

SEQ ID NO: 34876 - RNA, 20 nt, Artificial Sequence
  Synthetic oligonucleotide: CBLB-4701
caggagguuuugaauguuca

SEQ ID NO: 34877 - RNA, 21 nt, Artificial Sequence
  Synthetic oligonucleotide: CBLB-4702
ccaggagguuuugaauguuca

SEQ ID NO: 34878 - RNA, 22 nt, Artificial Sequence
  Synthetic oligonucleotide: CBLB-4703
gccaggagguuuugaauguuca

SEQ ID NO: 34879 - RNA, 23 nt, Artificial Sequence
  Synthetic oligonucleotide: CBLB-4704
agccaggagguuuugaauguuca

SEQ ID NO: 34880 - RNA, 24 nt, Artificial Sequence
  Synthetic oligonucleotide: CBLB-4705
gagccaggagguuuugaauguuca

SEQ ID NO: 34881 - RNA, 18 nt, Artificial Sequence
  Synthetic oligonucleotide: CBLB-4706
uuauuucacaacgacaga

SEQ ID NO: 34882 - RNA, 19 nt, Artificial Sequence
  Synthetic oligonucleotide: CBLB-4707
uuuauuucacaacgacaga

SEQ ID NO: 34883 - RNA, 20 nt, Artificial Sequence
  Synthetic oligonucleotide: CBLB-4708
uuuuauuucacaacgacaga

SEQ ID NO: 34884 - RNA, 21 nt, Artificial Sequence
  Synthetic oligonucleotide: CBLB-4709
cuuuuauuucacaacgacaga

SEQ ID NO: 34885 - RNA, 22 nt, Artificial Sequence
  Synthetic oligonucleotide: CBLB-4710
ccuuuuauuucacaacgacaga

SEQ ID NO: 34886 - RNA, 23 nt, Artificial Sequence
  Synthetic oligonucleotide: CBLB-4711
uccuuuuauuucacaacgacaga

SEQ ID NO: 34887 - RNA, 24 nt, Artificial Sequence
  Synthetic oligonucleotide: CBLB-4712
uuccuuuuauuucacaacgacaga

SEQ ID NO: 34888 - RNA, 18 nt, Artificial Sequence
  Synthetic oligonucleotide: CBLB-4713
ugggggaggugggagaga

SEQ ID NO: 34889 - RNA, 19 nt, Artificial Sequence
  Synthetic oligonucleotide: CBLB-4714
gugggggaggugggagaga

SEQ ID NO: 34890 - RNA, 20 nt, Artificial Sequence
  Synthetic oligonucleotide: CBLB-3092
ggugggggaggugggagaga

SEQ ID NO: 34891 - RNA, 21 nt, Artificial Sequence
  Synthetic oligonucleotide: CBLB-4715
aggugggggaggugggagaga

SEQ ID NO: 34892 - RNA, 22 nt, Artificial Sequence
  Synthetic oligonucleotide: CBLB-4716
gaggugggggaggugggagaga

SEQ ID NO: 34893 - RNA, 23 nt, Artificial Sequence
  Synthetic oligonucleotide: CBLB-4717
ggaggugggggaggugggagaga

SEQ ID NO: 34894 - RNA, 24 nt, Artificial Sequence
  Synthetic oligonucleotide: CBLB-4718
aggaggugggggaggugggagaga

SEQ ID NO: 34895 - RNA, 18 nt, Artificial Sequence
  Synthetic oligonucleotide: CBLB-4719
ccuuuuauuucacaacga

SEQ ID NO: 34896 - RNA, 19 nt, Artificial Sequence
  Synthetic oligonucleotide: CBLB-4720
uccuuuuauuucacaacga

SEQ ID NO: 34897 - RNA, 20 nt, Artificial Sequence
  Synthetic oligonucleotide: CBLB-4721
uuccuuuuauuucacaacga

SEQ ID NO: 34898 - RNA, 21 nt, Artificial Sequence
  Synthetic oligonucleotide: CBLB-4722
guuccuuuuauuucacaacga

SEQ ID NO: 34899 - RNA, 22 nt, Artificial Sequence
  Synthetic oligonucleotide: CBLB-4723
aguuccuuuuauuucacaacga

SEQ ID NO: 34900 - RNA, 23 nt, Artificial Sequence
  Synthetic oligonucleotide: CBLB-4724
caguuccuuuuauuucacaacga

SEQ ID NO: 34901 - RNA, 24 nt, Artificial Sequence
  Synthetic oligonucleotide: CBLB-4725
ucaguuccuuuuauuucacaacga

SEQ ID NO: 34902 - RNA, 18 nt, Artificial Sequence
  Synthetic oligonucleotide: CBLB-4726
ccuggaauuuggggagga

SEQ ID NO: 34903 - RNA, 19 nt, Artificial Sequence
  Synthetic oligonucleotide: CBLB-4727
uccuggaauuuggggagga

SEQ ID NO: 34904 - RNA, 20 nt, Artificial Sequence
  Synthetic oligonucleotide: CBLB-3099
uuccuggaauuuggggagga

SEQ ID NO: 34905 - RNA, 21 nt, Artificial Sequence
  Synthetic oligonucleotide: CBLB-4728
guuccuggaauuuggggagga

SEQ ID NO: 34906 - RNA, 22 nt, Artificial Sequence
  Synthetic oligonucleotide: CBLB-4729
uguuccuggaauuuggggagga

SEQ ID NO: 34907 - RNA, 23 nt, Artificial Sequence
  Synthetic oligonucleotide: CBLB-4730
uuguuccuggaauuuggggagga

SEQ ID NO: 34908 - RNA, 24 nt, Artificial Sequence
  Synthetic oligonucleotide: CBLB-4731
auuguuccuggaauuuggggagga

SEQ ID NO: 34909 - RNA, 18 nt, Artificial Sequence
  Synthetic oligonucleotide: CBLB-4732
cguggggauacuggagga

SEQ ID NO: 34910 - RNA, 19 nt, Artificial Sequence
  Synthetic oligonucleotide: CBLB-4733
acguggggauacuggagga

SEQ ID NO: 34911 - RNA, 20 nt, Artificial Sequence
  Synthetic oligonucleotide: CBLB-3100
gacguggggauacuggagga

SEQ ID NO: 34912 - RNA, 21 nt, Artificial Sequence
  Synthetic oligonucleotide: CBLB-4734
agacguggggauacuggagga

SEQ ID NO: 34913 - RNA, 22 nt, Artificial Sequence
  Synthetic oligonucleotide: CBLB-4735
uagacguggggauacuggagga

SEQ ID NO: 34914 - RNA, 23 nt, Artificial Sequence
  Synthetic oligonucleotide: CBLB-4736
uuagacguggggauacuggagga

SEQ ID NO: 34915 - RNA, 24 nt, Artificial Sequence
  Synthetic oligonucleotide: CBLB-4737
uuuagacguggggauacuggagga

SEQ ID NO: 34916 - RNA, 18 nt, Artificial Sequence
  Synthetic oligonucleotide: CBLB-4738
ggaggugggagagaugga

SEQ ID NO: 34917 - RNA, 19 nt, Artificial Sequence
  Synthetic oligonucleotide: CBLB-4739
gggaggugggagagaugga

SEQ ID NO: 34918 - RNA, 20 nt, Artificial Sequence
  Synthetic oligonucleotide: CBLB-3112
ggggaggugggagagaugga

SEQ ID NO: 34919 - RNA, 21 nt, Artificial Sequence
  Synthetic oligonucleotide: CBLB-4740
gggggaggugggagagaugga

SEQ ID NO: 34920 - RNA, 22 nt, Artificial Sequence
  Synthetic oligonucleotide: CBLB-4741
ugggggaggugggagagaugga

SEQ ID NO: 34921 - RNA, 23 nt, Artificial Sequence
  Synthetic oligonucleotide: CBLB-4742
gugggggaggugggagagaugga

SEQ ID NO: 34922 - RNA, 24 nt, Artificial Sequence
  Synthetic oligonucleotide: CBLB-4743
ggugggggaggugggagagaugga

SEQ ID NO: 34923 - RNA, 18 nt, Artificial Sequence
  Synthetic oligonucleotide: CBLB-4744
caacucaccugaacauga

SEQ ID NO: 34924 - RNA, 19 nt, Artificial Sequence
  Synthetic oligonucleotide: CBLB-4745
ccaacucaccugaacauga

SEQ ID NO: 34925 - RNA, 20 nt, Artificial Sequence
  Synthetic oligonucleotide: CBLB-3114
gccaacucaccugaacauga

SEQ ID NO: 34926 - RNA, 21 nt, Artificial Sequence
  Synthetic oligonucleotide: CBLB-4746
agccaacucaccugaacauga

SEQ ID NO: 34927 - RNA, 22 nt, Artificial Sequence
  Synthetic oligonucleotide: CBLB-4747
uagccaacucaccugaacauga

SEQ ID NO: 34928 - RNA, 23 nt, Artificial Sequence
  Synthetic oligonucleotide: CBLB-4748
cuagccaacucaccugaacauga

SEQ ID NO: 34929 - RNA, 24 nt, Artificial Sequence
  Synthetic oligonucleotide: CBLB-4749
acuagccaacucaccugaacauga

SEQ ID NO: 34930 - RNA, 18 nt, Artificial Sequence
  Synthetic oligonucleotide: CBLB-4750
cuuuucccuccuaccuga

SEQ ID NO: 34931 - RNA, 19 nt, Artificial Sequence
  Synthetic oligonucleotide: CBLB-4751
gcuuuucccuccuaccuga

SEQ ID NO: 34932 - RNA, 20 nt, Artificial Sequence
  Synthetic oligonucleotide: CBLB-3119
ggcuuuucccuccuaccuga

SEQ ID NO: 34933 - RNA, 21 nt, Artificial Sequence
  Synthetic oligonucleotide: CBLB-4752
uggcuuuucccuccuaccuga

SEQ ID NO: 34934 - RNA, 22 nt, Artificial Sequence
  Synthetic oligonucleotide: CBLB-4753
uuggcuuuucccuccuaccuga

SEQ ID NO: 34935 - RNA, 23 nt, Artificial Sequence
  Synthetic oligonucleotide: CBLB-4754
uuuggcuuuucccuccuaccuga

SEQ ID NO: 34936 - RNA, 24 nt, Artificial Sequence
  Synthetic oligonucleotide: CBLB-4755
cuuuggcuuuucccuccuaccuga

SEQ ID NO: 34937 - RNA, 18 nt, Artificial Sequence
  Synthetic oligonucleotide: CBLB-4756
gucucuuguuuucucuga

SEQ ID NO: 34938 - RNA, 19 nt, Artificial Sequence
  Synthetic oligonucleotide: CBLB-4757
ggucucuuguuuucucuga

SEQ ID NO: 34939 - RNA, 20 nt, Artificial Sequence
  Synthetic oligonucleotide: CBLB-4758
gggucucuuguuuucucuga

SEQ ID NO: 34940 - RNA, 21 nt, Artificial Sequence
  Synthetic oligonucleotide: CBLB-4759
ugggucucuuguuuucucuga

SEQ ID NO: 34941 - RNA, 22 nt, Artificial Sequence
  Synthetic oligonucleotide: CBLB-4760
cugggucucuuguuuucucuga

SEQ ID NO: 34942 - RNA, 23 nt, Artificial Sequence
  Synthetic oligonucleotide: CBLB-4761
acugggucucuuguuuucucuga

SEQ ID NO: 34943 - RNA, 24 nt, Artificial Sequence
  Synthetic oligonucleotide: CBLB-4762
uacugggucucuuguuuucucuga

SEQ ID NO: 34944 - RNA, 18 nt, Artificial Sequence
  Synthetic oligonucleotide: CBLB-4763
auuucugccagcauguga

SEQ ID NO: 34945 - RNA, 19 nt, Artificial Sequence
  Synthetic oligonucleotide: CBLB-4764
gauuucugccagcauguga

SEQ ID NO: 34946 - RNA, 20 nt, Artificial Sequence
  Synthetic oligonucleotide: CBLB-4765
ugauuucugccagcauguga

SEQ ID NO: 34947 - RNA, 21 nt, Artificial Sequence
  Synthetic oligonucleotide: CBLB-4766
uugauuucugccagcauguga

SEQ ID NO: 34948 - RNA, 22 nt, Artificial Sequence
  Synthetic oligonucleotide: CBLB-4767
uuugauuucugccagcauguga

SEQ ID NO: 34949 - RNA, 23 nt, Artificial Sequence
  Synthetic oligonucleotide: CBLB-4768
cuuugauuucugccagcauguga

SEQ ID NO: 34950 - RNA, 24 nt, Artificial Sequence
  Synthetic oligonucleotide: CBLB-4769
gcuuugauuucugccagcauguga

SEQ ID NO: 34951 - RNA, 18 nt, Artificial Sequence
  Synthetic oligonucleotide: CBLB-4770
cagagggcguccuguuga

SEQ ID NO: 34952 - RNA, 19 nt, Artificial Sequence
  Synthetic oligonucleotide: CBLB-4771
ucagagggcguccuguuga

SEQ ID NO: 34953 - RNA, 20 nt, Artificial Sequence
  Synthetic oligonucleotide: CBLB-4772
aucagagggcguccuguuga

SEQ ID NO: 34954 - RNA, 21 nt, Artificial Sequence
  Synthetic oligonucleotide: CBLB-4773
aaucagagggcguccuguuga

SEQ ID NO: 34955 - RNA, 22 nt, Artificial Sequence
  Synthetic oligonucleotide: CBLB-4774
uaaucagagggcguccuguuga

SEQ ID NO: 34956 - RNA, 23 nt, Artificial Sequence
  Synthetic oligonucleotide: CBLB-4775
auaaucagagggcguccuguuga

SEQ ID NO: 34957 - RNA, 24 nt, Artificial Sequence
  Synthetic oligonucleotide: CBLB-4776
cauaaucagagggcguccuguuga

SEQ ID NO: 34958 - RNA, 18 nt, Artificial Sequence
  Synthetic oligonucleotide: CBLB-4777
agcaugugacugaagaua

SEQ ID NO: 34959 - RNA, 19 nt, Artificial Sequence
  Synthetic oligonucleotide: CBLB-4778
cagcaugugacugaagaua

SEQ ID NO: 34960 - RNA, 20 nt, Artificial Sequence
  Synthetic oligonucleotide: CBLB-3123
ccagcaugugacugaagaua

SEQ ID NO: 34961 - RNA, 21 nt, Artificial Sequence
  Synthetic oligonucleotide: CBLB-4779
gccagcaugugacugaagaua

SEQ ID NO: 34962 - RNA, 22 nt, Artificial Sequence
  Synthetic oligonucleotide: CBLB-4780
ugccagcaugugacugaagaua

SEQ ID NO: 34963 - RNA, 23 nt, Artificial Sequence
  Synthetic oligonucleotide: CBLB-4781
cugccagcaugugacugaagaua

SEQ ID NO: 34964 - RNA, 24 nt, Artificial Sequence
  Synthetic oligonucleotide: CBLB-4782
ucugccagcaugugacugaagaua

SEQ ID NO: 34965 - RNA, 18 nt, Artificial Sequence
  Synthetic oligonucleotide: CBLB-4783
gauuuagacguggggaua

SEQ ID NO: 34966 - RNA, 19 nt, Artificial Sequence
  Synthetic oligonucleotide: CBLB-4784
agauuuagacguggggaua

SEQ ID NO: 34967 - RNA, 20 nt, Artificial Sequence
  Synthetic oligonucleotide: CBLB-4785
uagauuuagacguggggaua

SEQ ID NO: 34968 - RNA, 21 nt, Artificial Sequence
  Synthetic oligonucleotide: CBLB-4786
auagauuuagacguggggaua

SEQ ID NO: 34969 - RNA, 22 nt, Artificial Sequence
  Synthetic oligonucleotide: CBLB-4787
uauagauuuagacguggggaua

SEQ ID NO: 34970 - RNA, 23 nt, Artificial Sequence
  Synthetic oligonucleotide: CBLB-4788
cuauagauuuagacguggggaua

SEQ ID NO: 34971 - RNA, 24 nt, Artificial Sequence
  Synthetic oligonucleotide: CBLB-4789
gcuauagauuuagacguggggaua

SEQ ID NO: 34972 - RNA, 18 nt, Artificial Sequence
  Synthetic oligonucleotide: CBLB-4790
caugcaaggagaagacua

SEQ ID NO: 34973 - RNA, 19 nt, Artificial Sequence
  Synthetic oligonucleotide: CBLB-4791
ccaugcaaggagaagacua

SEQ ID NO: 34974 - RNA, 20 nt, Artificial Sequence
  Synthetic oligonucleotide: CBLB-4792
accaugcaaggagaagacua

SEQ ID NO: 34975 - RNA, 21 nt, Artificial Sequence
  Synthetic oligonucleotide: CBLB-4793
caccaugcaaggagaagacua

SEQ ID NO: 34976 - RNA, 22 nt, Artificial Sequence
  Synthetic oligonucleotide: CBLB-4794
ucaccaugcaaggagaagacua

SEQ ID NO: 34977 - RNA, 23 nt, Artificial Sequence
  Synthetic oligonucleotide: CBLB-4795
cucaccaugcaaggagaagacua

SEQ ID NO: 34978 - RNA, 24 nt, Artificial Sequence
  Synthetic oligonucleotide: CBLB-4796
ucucaccaugcaaggagaagacua

SEQ ID NO: 34979 - RNA, 18 nt, Artificial Sequence
  Synthetic oligonucleotide: CBLB-4797
uuuaaagguuucaaccua

SEQ ID NO: 34980 - RNA, 19 nt, Artificial Sequence
  Synthetic oligonucleotide: CBLB-4798
uuuuaaagguuucaaccua

SEQ ID NO: 34981 - RNA, 20 nt, Artificial Sequence
  Synthetic oligonucleotide: CBLB-4799
uuuuuaaagguuucaaccua

SEQ ID NO: 34982 - RNA, 21 nt, Artificial Sequence
  Synthetic oligonucleotide: CBLB-4800
uuuuuuaaagguuucaaccua

SEQ ID NO: 34983 - RNA, 22 nt, Artificial Sequence
  Synthetic oligonucleotide: CBLB-4801
cuuuuuuaaagguuucaaccua

SEQ ID NO: 34984 - RNA, 23 nt, Artificial Sequence
  Synthetic oligonucleotide: CBLB-4802
acuuuuuuaaagguuucaaccua

SEQ ID NO: 34985 - RNA, 24 nt, Artificial Sequence
  Synthetic oligonucleotide: CBLB-4803
aacuuuuuuaaagguuucaaccua

SEQ ID NO: 34986 - RNA, 18 nt, Artificial Sequence
  Synthetic oligonucleotide: CBLB-4804
ccauuaucacaagaccua

SEQ ID NO: 34987 - RNA, 19 nt, Artificial Sequence
  Synthetic oligonucleotide: CBLB-4805
accauuaucacaagaccua

SEQ ID NO: 34988 - RNA, 20 nt, Artificial Sequence
  Synthetic oligonucleotide: CBLB-4806
gaccauuaucacaagaccua

SEQ ID NO: 34989 - RNA, 21 nt, Artificial Sequence
  Synthetic oligonucleotide: CBLB-4807
ugaccauuaucacaagaccua

SEQ ID NO: 34990 - RNA, 22 nt, Artificial Sequence
  Synthetic oligonucleotide: CBLB-4808
gugaccauuaucacaagaccua

SEQ ID NO: 34991 - RNA, 23 nt, Artificial Sequence
  Synthetic oligonucleotide: CBLB-4809
agugaccauuaucacaagaccua

SEQ ID NO: 34992 - RNA, 24 nt, Artificial Sequence
  Synthetic oligonucleotide: CBLB-4810
cagugaccauuaucacaagaccua

SEQ ID NO: 34993 - RNA, 18 nt, Artificial Sequence
  Synthetic oligonucleotide: CBLB-4811
ccugaggauggccggcua

SEQ ID NO: 34994 - RNA, 19 nt, Artificial Sequence
  Synthetic oligonucleotide: CBLB-4812
uccugaggauggccggcua

SEQ ID NO: 34995 - RNA, 20 nt, Artificial Sequence
  Synthetic oligonucleotide: CBLB-4813
guccugaggauggccggcua

SEQ ID NO: 34996 - RNA, 21 nt, Artificial Sequence
  Synthetic oligonucleotide: CBLB-4814
uguccugaggauggccggcua

SEQ ID NO: 34997 - RNA, 22 nt, Artificial Sequence
  Synthetic oligonucleotide: CBLB-4815
cuguccugaggauggccggcua

SEQ ID NO: 34998 - RNA, 23 nt, Artificial Sequence
  Synthetic oligonucleotide: CBLB-4816
ccuguccugaggauggccggcua

SEQ ID NO: 34999 - RNA, 24 nt, Artificial Sequence
  Synthetic oligonucleotide: CBLB-4817
uccuguccugaggauggccggcua

SEQ ID NO: 35000 - RNA, 18 nt, Artificial Sequence
  Synthetic oligonucleotide: CBLB-4818
aaaacucacuuuaugcua

SEQ ID NO: 35001 - RNA, 19 nt, Artificial Sequence
  Synthetic oligonucleotide: CBLB-4819
caaaacucacuuuaugcua

SEQ ID NO: 35002 - RNA, 20 nt, Artificial Sequence
  Synthetic oligonucleotide: CBLB-3127
acaaaacucacuuuaugcua

SEQ ID NO: 35003 - RNA, 21 nt, Artificial Sequence
  Synthetic oligonucleotide: CBLB-4820
aacaaaacucacuuuaugcua

SEQ ID NO: 35004 - RNA, 22 nt, Artificial Sequence
  Synthetic oligonucleotide: CBLB-4821
caacaaaacucacuuuaugcua

SEQ ID NO: 35005 - RNA, 23 nt, Artificial Sequence
  Synthetic oligonucleotide: CBLB-4822
ucaacaaaacucacuuuaugcua

SEQ ID NO: 35006 - RNA, 24 nt, Artificial Sequence
  Synthetic oligonucleotide: CBLB-4823
uucaacaaaacucacuuuaugcua

SEQ ID NO: 35007 - RNA, 18 nt, Artificial Sequence
  Synthetic oligonucleotide: CBLB-4824
cugaaagagaauuugcua

SEQ ID NO: 35008 - RNA, 19 nt, Artificial Sequence
  Synthetic oligonucleotide: CBLB-4825
ucugaaagagaauuugcua

SEQ ID NO: 35009 - RNA, 20 nt, Artificial Sequence
  Synthetic oligonucleotide: CBLB-4826
cucugaaagagaauuugcua

SEQ ID NO: 35010 - RNA, 21 nt, Artificial Sequence
  Synthetic oligonucleotide: CBLB-4827
ucucugaaagagaauuugcua

SEQ ID NO: 35011 - RNA, 22 nt, Artificial Sequence
  Synthetic oligonucleotide: CBLB-4828
uucucugaaagagaauuugcua

SEQ ID NO: 35012 - RNA, 23 nt, Artificial Sequence
  Synthetic oligonucleotide: CBLB-4829
uuucucugaaagagaauuugcua

SEQ ID NO: 35013 - RNA, 24 nt, Artificial Sequence
  Synthetic oligonucleotide: CBLB-4830
uuuucucugaaagagaauuugcua

SEQ ID NO: 35014 - RNA, 18 nt, Artificial Sequence
  Synthetic oligonucleotide: CBLB-4831
uucucugcacaaaucuua

SEQ ID NO: 35015 - RNA, 19 nt, Artificial Sequence
  Synthetic oligonucleotide: CBLB-4832
auucucugcacaaaucuua

SEQ ID NO: 35016 - RNA, 20 nt, Artificial Sequence
  Synthetic oligonucleotide: CBLB-4833
cauucucugcacaaaucuua

SEQ ID NO: 35017 - RNA, 21 nt, Artificial Sequence
  Synthetic oligonucleotide: CBLB-4834
ucauucucugcacaaaucuua

SEQ ID NO: 35018 - RNA, 22 nt, Artificial Sequence
  Synthetic oligonucleotide: CBLB-4835
gucauucucugcacaaaucuua

SEQ ID NO: 35019 - RNA, 23 nt, Artificial Sequence
  Synthetic oligonucleotide: CBLB-4836
ugucauucucugcacaaaucuua

SEQ ID NO: 35020 - RNA, 24 nt, Artificial Sequence
  Synthetic oligonucleotide: CBLB-4837
uugucauucucugcacaaaucuua

SEQ ID NO: 35021 - RNA, 18 nt, Artificial Sequence
  Synthetic oligonucleotide: CBLB-4838
aaucugcccauacucuua

SEQ ID NO: 35022 - RNA, 19 nt, Artificial Sequence
  Synthetic oligonucleotide: CBLB-4839
aaaucugcccauacucuua

SEQ ID NO: 35023 - RNA, 20 nt, Artificial Sequence
  Synthetic oligonucleotide: CBLB-4840
aaaaucugcccauacucuua

SEQ ID NO: 35024 - RNA, 21 nt, Artificial Sequence
  Synthetic oligonucleotide: CBLB-4841
aaaaaucugcccauacucuua

SEQ ID NO: 35025 - RNA, 22 nt, Artificial Sequence
  Synthetic oligonucleotide: CBLB-4842
caaaaaucugcccauacucuua

SEQ ID NO: 35026 - RNA, 23 nt, Artificial Sequence
  Synthetic oligonucleotide: CBLB-4843
gcaaaaaucugcccauacucuua

SEQ ID NO: 35027 - RNA, 24 nt, Artificial Sequence
  Synthetic oligonucleotide: CBLB-4844
ggcaaaaaucugcccauacucuua

SEQ ID NO: 35028 - RNA, 18 nt, Artificial Sequence
  Synthetic oligonucleotide: CBLB-4845
guggaggaggaucucuua

SEQ ID NO: 35029 - RNA, 19 nt, Artificial Sequence
  Synthetic oligonucleotide: CBLB-4846
gguggaggaggaucucuua

SEQ ID NO: 35030 - RNA, 20 nt, Artificial Sequence
  Synthetic oligonucleotide: CBLB-3135
cgguggaggaggaucucuua

SEQ ID NO: 35031 - RNA, 21 nt, Artificial Sequence
  Synthetic oligonucleotide: CBLB-4847
gcgguggaggaggaucucuua

SEQ ID NO: 35032 - RNA, 22 nt, Artificial Sequence
  Synthetic oligonucleotide: CBLB-4848
ggcgguggaggaggaucucuua

SEQ ID NO: 35033 - RNA, 23 nt, Artificial Sequence
  Synthetic oligonucleotide: CBLB-4849
uggcgguggaggaggaucucuua

SEQ ID NO: 35034 - RNA, 24 nt, Artificial Sequence
  Synthetic oligonucleotide: CBLB-4850
guggcgguggaggaggaucucuua

SEQ ID NO: 35035 - RNA, 18 nt, Artificial Sequence
  Synthetic oligonucleotide: CBLB-4851
caucuucaccugcauuua

SEQ ID NO: 35036 - RNA, 19 nt, Artificial Sequence
  Synthetic oligonucleotide: CBLB-4852
gcaucuucaccugcauuua

SEQ ID NO: 35037 - RNA, 20 nt, Artificial Sequence
  Synthetic oligonucleotide: CBLB-4853
agcaucuucaccugcauuua

SEQ ID NO: 35038 - RNA, 21 nt, Artificial Sequence
  Synthetic oligonucleotide: CBLB-4854
aagcaucuucaccugcauuua

SEQ ID NO: 35039 - RNA, 22 nt, Artificial Sequence
  Synthetic oligonucleotide: CBLB-4855
aaagcaucuucaccugcauuua

SEQ ID NO: 35040 - RNA, 23 nt, Artificial Sequence
  Synthetic oligonucleotide: CBLB-4856
aaaagcaucuucaccugcauuua

SEQ ID NO: 35041 - RNA, 24 nt, Artificial Sequence
  Synthetic oligonucleotide: CBLB-4857
caaaagcaucuucaccugcauuua

SEQ ID NO: 35042 - RNA, 18 nt, Artificial Sequence
  Synthetic oligonucleotide: CBLB-4858
caucuguguagauuuuua

SEQ ID NO: 35043 - RNA, 19 nt, Artificial Sequence
  Synthetic oligonucleotide: CBLB-4859
ccaucuguguagauuuuua

SEQ ID NO: 35044 - RNA, 20 nt, Artificial Sequence
  Synthetic oligonucleotide: CBLB-4860
accaucuguguagauuuuua

SEQ ID NO: 35045 - RNA, 21 nt, Artificial Sequence
  Synthetic oligonucleotide: CBLB-4861
aaccaucuguguagauuuuua

SEQ ID NO: 35046 - RNA, 22 nt, Artificial Sequence
  Synthetic oligonucleotide: CBLB-4862
gaaccaucuguguagauuuuua

SEQ ID NO: 35047 - RNA, 23 nt, Artificial Sequence
  Synthetic oligonucleotide: CBLB-4863
ugaaccaucuguguagauuuuua

SEQ ID NO: 35048 - RNA, 24 nt, Artificial Sequence
  Synthetic oligonucleotide: CBLB-4864
gugaaccaucuguguagauuuuua

SEQ ID NO: 35049 - RNA, 18 nt, Artificial Sequence
  Synthetic oligonucleotide: CBLB-4865
cccauacucuuaccgaac

SEQ ID NO: 35050 - RNA, 19 nt, Artificial Sequence
  Synthetic oligonucleotide: CBLB-4866
gcccauacucuuaccgaac

SEQ ID NO: 35051 - RNA, 20 nt, Artificial Sequence
  Synthetic oligonucleotide: CBLB-3141
ugcccauacucuuaccgaac

SEQ ID NO: 35052 - RNA, 21 nt, Artificial Sequence
  Synthetic oligonucleotide: CBLB-4867
cugcccauacucuuaccgaac

SEQ ID NO: 35053 - RNA, 22 nt, Artificial Sequence
  Synthetic oligonucleotide: CBLB-4868
ucugcccauacucuuaccgaac

SEQ ID NO: 35054 - RNA, 23 nt, Artificial Sequence
  Synthetic oligonucleotide: CBLB-4869
aucugcccauacucuuaccgaac

SEQ ID NO: 35055 - RNA, 24 nt, Artificial Sequence
  Synthetic oligonucleotide: CBLB-4870
aaucugcccauacucuuaccgaac

SEQ ID NO: 35056 - RNA, 18 nt, Artificial Sequence
  Synthetic oligonucleotide: CBLB-4871
uagccaacucaccugaac

SEQ ID NO: 35057 - RNA, 19 nt, Artificial Sequence
  Synthetic oligonucleotide: CBLB-4872
cuagccaacucaccugaac

SEQ ID NO: 35058 - RNA, 20 nt, Artificial Sequence
  Synthetic oligonucleotide: CBLB-4873
acuagccaacucaccugaac

SEQ ID NO: 35059 - RNA, 21 nt, Artificial Sequence
  Synthetic oligonucleotide: CBLB-4874
uacuagccaacucaccugaac

SEQ ID NO: 35060 - RNA, 22 nt, Artificial Sequence
  Synthetic oligonucleotide: CBLB-4875
uuacuagccaacucaccugaac

SEQ ID NO: 35061 - RNA, 23 nt, Artificial Sequence
  Synthetic oligonucleotide: CBLB-4876
guuacuagccaacucaccugaac

SEQ ID NO: 35062 - RNA, 24 nt, Artificial Sequence
  Synthetic oligonucleotide: CBLB-4877
uguuacuagccaacucaccugaac

SEQ ID NO: 35063 - RNA, 18 nt, Artificial Sequence
  Synthetic oligonucleotide: CBLB-4878
agggaggagggugguaac

SEQ ID NO: 35064 - RNA, 19 nt, Artificial Sequence
  Synthetic oligonucleotide: CBLB-4879
uagggaggagggugguaac

SEQ ID NO: 35065 - RNA, 20 nt, Artificial Sequence
  Synthetic oligonucleotide: CBLB-3142
cuagggaggagggugguaac

SEQ ID NO: 35066 - RNA, 21 nt, Artificial Sequence
  Synthetic oligonucleotide: CBLB-4880
gcuagggaggagggugguaac

SEQ ID NO: 35067 - RNA, 22 nt, Artificial Sequence
  Synthetic oligonucleotide: CBLB-4881
ugcuagggaggagggugguaac

SEQ ID NO: 35068 - RNA, 23 nt, Artificial Sequence
  Synthetic oligonucleotide: CBLB-4882
augcuagggaggagggugguaac

SEQ ID NO: 35069 - RNA, 24 nt, Artificial Sequence
  Synthetic oligonucleotide: CBLB-4883
uaugcuagggaggagggugguaac

SEQ ID NO: 35070 - RNA, 18 nt, Artificial Sequence
  Synthetic oligonucleotide: CBLB-4884
aaucgagugcaacuuaac

SEQ ID NO: 35071 - RNA, 19 nt, Artificial Sequence
  Synthetic oligonucleotide: CBLB-4885
caaucgagugcaacuuaac

SEQ ID NO: 35072 - RNA, 20 nt, Artificial Sequence
  Synthetic oligonucleotide: CBLB-3143
ccaaucgagugcaacuuaac

SEQ ID NO: 35073 - RNA, 21 nt, Artificial Sequence
  Synthetic oligonucleotide: CBLB-4886
cccaaucgagugcaacuuaac

SEQ ID NO: 35074 - RNA, 22 nt, Artificial Sequence
  Synthetic oligonucleotide: CBLB-4887
ucccaaucgagugcaacuuaac

SEQ ID NO: 35075 - RNA, 23 nt, Artificial Sequence
  Synthetic oligonucleotide: CBLB-4888
gucccaaucgagugcaacuuaac

SEQ ID NO: 35076 - RNA, 24 nt, Artificial Sequence
  Synthetic oligonucleotide: CBLB-4889
ugucccaaucgagugcaacuuaac

SEQ ID NO: 35077 - RNA, 18 nt, Artificial Sequence
  Synthetic oligonucleotide: CBLB-4890
ucaaugaugcugcaacac

SEQ ID NO: 35078 - RNA, 19 nt, Artificial Sequence
  Synthetic oligonucleotide: CBLB-4891
gucaaugaugcugcaacac

SEQ ID NO: 35079 - RNA, 20 nt, Artificial Sequence
  Synthetic oligonucleotide: CBLB-4892
ggucaaugaugcugcaacac

SEQ ID NO: 35080 - RNA, 21 nt, Artificial Sequence
  Synthetic oligonucleotide: CBLB-4893
gggucaaugaugcugcaacac

SEQ ID NO: 35081 - RNA, 22 nt, Artificial Sequence
  Synthetic oligonucleotide: CBLB-4894
ggggucaaugaugcugcaacac

SEQ ID NO: 35082 - RNA, 23 nt, Artificial Sequence
  Synthetic oligonucleotide: CBLB-4895
aggggucaaugaugcugcaacac

SEQ ID NO: 35083 - RNA, 24 nt, Artificial Sequence
  Synthetic oligonucleotide: CBLB-4896
aaggggucaaugaugcugcaacac

SEQ ID NO: 35084 - RNA, 18 nt, Artificial Sequence
  Synthetic oligonucleotide: CBLB-4897
aacccguugggcugccac

SEQ ID NO: 35085 - RNA, 19 nt, Artificial Sequence
  Synthetic oligonucleotide: CBLB-4898
gaacccguugggcugccac

SEQ ID NO: 35086 - RNA, 20 nt, Artificial Sequence
  Synthetic oligonucleotide: CBLB-3146
ugaacccguugggcugccac

SEQ ID NO: 35087 - RNA, 21 nt, Artificial Sequence
  Synthetic oligonucleotide: CBLB-4899
gugaacccguugggcugccac

SEQ ID NO: 35088 - RNA, 22 nt, Artificial Sequence
  Synthetic oligonucleotide: CBLB-4900
ggugaacccguugggcugccac

SEQ ID NO: 35089 - RNA, 23 nt, Artificial Sequence
  Synthetic oligonucleotide: CBLB-4901
uggugaacccguugggcugccac

SEQ ID NO: 35090 - RNA, 24 nt, Artificial Sequence
  Synthetic oligonucleotide: CBLB-4902
uuggugaacccguugggcugccac

SEQ ID NO: 35091 - RNA, 18 nt, Artificial Sequence
  Synthetic oligonucleotide: CBLB-4903
gauuucgucuguaggcac

SEQ ID NO: 35092 - RNA, 19 nt, Artificial Sequence
  Synthetic oligonucleotide: CBLB-4904
agauuucgucuguaggcac

SEQ ID NO: 35093 - RNA, 20 nt, Artificial Sequence
  Synthetic oligonucleotide: CBLB-4905
gagauuucgucuguaggcac

SEQ ID NO: 35094 - RNA, 21 nt, Artificial Sequence
  Synthetic oligonucleotide: CBLB-4906
ugagauuucgucuguaggcac

SEQ ID NO: 35095 - RNA, 22 nt, Artificial Sequence
  Synthetic oligonucleotide: CBLB-4907
gugagauuucgucuguaggcac

SEQ ID NO: 35096 - RNA, 23 nt, Artificial Sequence
  Synthetic oligonucleotide: CBLB-4908
ugugagauuucgucuguaggcac

SEQ ID NO: 35097 - RNA, 24 nt, Artificial Sequence
  Synthetic oligonucleotide: CBLB-4909
uugugagauuucgucuguaggcac

SEQ ID NO: 35098 - RNA, 18 nt, Artificial Sequence
  Synthetic oligonucleotide: CBLB-4910
uucugccugucagugcac

SEQ ID NO: 35099 - RNA, 19 nt, Artificial Sequence
  Synthetic oligonucleotide: CBLB-4911
guucugccugucagugcac

SEQ ID NO: 35100 - RNA, 20 nt, Artificial Sequence
  Synthetic oligonucleotide: CBLB-4912
aguucugccugucagugcac

SEQ ID NO: 35101 - RNA, 21 nt, Artificial Sequence
  Synthetic oligonucleotide: CBLB-4913
gaguucugccugucagugcac

SEQ ID NO: 35102 - RNA, 22 nt, Artificial Sequence
  Synthetic oligonucleotide: CBLB-4914
ugaguucugccugucagugcac

SEQ ID NO: 35103 - RNA, 23 nt, Artificial Sequence
  Synthetic oligonucleotide: CBLB-4915
gugaguucugccugucagugcac

SEQ ID NO: 35104 - RNA, 24 nt, Artificial Sequence
  Synthetic oligonucleotide: CBLB-4916
ggugaguucugccugucagugcac

SEQ ID NO: 35105 - RNA, 18 nt, Artificial Sequence
  Synthetic oligonucleotide: CBLB-4917
uguuacuagccaacucac

SEQ ID NO: 35106 - RNA, 19 nt, Artificial Sequence
  Synthetic oligonucleotide: CBLB-4918
cuguuacuagccaacucac

SEQ ID NO: 35107 - RNA, 20 nt, Artificial Sequence
  Synthetic oligonucleotide: CBLB-4919
acuguuacuagccaacucac

SEQ ID NO: 35108 - RNA, 21 nt, Artificial Sequence
  Synthetic oligonucleotide: CBLB-4920
uacuguuacuagccaacucac

SEQ ID NO: 35109 - RNA, 22 nt, Artificial Sequence
  Synthetic oligonucleotide: CBLB-4921
uuacuguuacuagccaacucac

SEQ ID NO: 35110 - RNA, 23 nt, Artificial Sequence
  Synthetic oligonucleotide: CBLB-4922
guuacuguuacuagccaacucac

SEQ ID NO: 35111 - RNA, 24 nt, Artificial Sequence
  Synthetic oligonucleotide: CBLB-4923
uguuacuguuacuagccaacucac

SEQ ID NO: 35112 - RNA, 18 nt, Artificial Sequence
  Synthetic oligonucleotide: CBLB-4924
gugaccauuggaaaagac

SEQ ID NO: 35113 - RNA, 19 nt, Artificial Sequence
  Synthetic oligonucleotide: CBLB-4925
ggugaccauuggaaaagac

SEQ ID NO: 35114 - RNA, 20 nt, Artificial Sequence
  Synthetic oligonucleotide: CBLB-4926
aggugaccauuggaaaagac

SEQ ID NO: 35115 - RNA, 21 nt, Artificial Sequence
  Synthetic oligonucleotide: CBLB-4927
aaggugaccauuggaaaagac

SEQ ID NO: 35116 - RNA, 22 nt, Artificial Sequence
  Synthetic oligonucleotide: CBLB-4928
caaggugaccauuggaaaagac

SEQ ID NO: 35117 - RNA, 23 nt, Artificial Sequence
  Synthetic oligonucleotide: CBLB-4929
ccaaggugaccauuggaaaagac

SEQ ID NO: 35118 - RNA, 24 nt, Artificial Sequence
  Synthetic oligonucleotide: CBLB-4930
uccaaggugaccauuggaaaagac

SEQ ID NO: 35119 - RNA, 18 nt, Artificial Sequence
  Synthetic oligonucleotide: CBLB-4931
gcugcuauagauuuagac

SEQ ID NO: 35120 - RNA, 19 nt, Artificial Sequence
  Synthetic oligonucleotide: CBLB-4932
ggcugcuauagauuuagac

SEQ ID NO: 35121 - RNA, 20 nt, Artificial Sequence
  Synthetic oligonucleotide: CBLB-4933
uggcugcuauagauuuagac

SEQ ID NO: 35122 - RNA, 21 nt, Artificial Sequence
  Synthetic oligonucleotide: CBLB-4934
cuggcugcuauagauuuagac

SEQ ID NO: 35123 - RNA, 22 nt, Artificial Sequence
  Synthetic oligonucleotide: CBLB-4935
ucuggcugcuauagauuuagac

SEQ ID NO: 35124 - RNA, 23 nt, Artificial Sequence
  Synthetic oligonucleotide: CBLB-4936
uucuggcugcuauagauuuagac

SEQ ID NO: 35125 - RNA, 24 nt, Artificial Sequence
  Synthetic oligonucleotide: CBLB-4937
guucuggcugcuauagauuuagac

SEQ ID NO: 35126 - RNA, 18 nt, Artificial Sequence
  Synthetic oligonucleotide: CBLB-4938
auuuagacguggggauac

SEQ ID NO: 35127 - RNA, 19 nt, Artificial Sequence
  Synthetic oligonucleotide: CBLB-4939
gauuuagacguggggauac

SEQ ID NO: 35128 - RNA, 20 nt, Artificial Sequence
  Synthetic oligonucleotide: CBLB-3156
agauuuagacguggggauac

SEQ ID NO: 35129 - RNA, 21 nt, Artificial Sequence
  Synthetic oligonucleotide: CBLB-4940
uagauuuagacguggggauac

SEQ ID NO: 35130 - RNA, 22 nt, Artificial Sequence
  Synthetic oligonucleotide: CBLB-4941
auagauuuagacguggggauac

SEQ ID NO: 35131 - RNA, 23 nt, Artificial Sequence
  Synthetic oligonucleotide: CBLB-4942
uauagauuuagacguggggauac

SEQ ID NO: 35132 - RNA, 24 nt, Artificial Sequence
  Synthetic oligonucleotide: CBLB-4943
cuauagauuuagacguggggauac

SEQ ID NO: 35133 - RNA, 18 nt, Artificial Sequence
  Synthetic oligonucleotide: CBLB-4944
acggaccaguacaccuac

SEQ ID NO: 35134 - RNA, 19 nt, Artificial Sequence
  Synthetic oligonucleotide: CBLB-4945
aacggaccaguacaccuac

SEQ ID NO: 35135 - RNA, 20 nt, Artificial Sequence
  Synthetic oligonucleotide: CBLB-4946
uaacggaccaguacaccuac

SEQ ID NO: 35136 - RNA, 21 nt, Artificial Sequence
  Synthetic oligonucleotide: CBLB-4947
cuaacggaccaguacaccuac

SEQ ID NO: 35137 - RNA, 22 nt, Artificial Sequence
  Synthetic oligonucleotide: CBLB-4948
gcuaacggaccaguacaccuac

SEQ ID NO: 35138 - RNA, 23 nt, Artificial Sequence
  Synthetic oligonucleotide: CBLB-4949
ugcuaacggaccaguacaccuac

SEQ ID NO: 35139 - RNA, 24 nt, Artificial Sequence
  Synthetic oligonucleotide: CBLB-4950
uugcuaacggaccaguacaccuac

SEQ ID NO: 35140 - RNA, 18 nt, Artificial Sequence
  Synthetic oligonucleotide: CBLB-4951
uuggcuuuucccuccuac

SEQ ID NO: 35141 - RNA, 19 nt, Artificial Sequence
  Synthetic oligonucleotide: CBLB-4952
uuuggcuuuucccuccuac

SEQ ID NO: 35142 - RNA, 20 nt, Artificial Sequence
  Synthetic oligonucleotide: CBLB-4953
cuuuggcuuuucccuccuac

SEQ ID NO: 35143 - RNA, 21 nt, Artificial Sequence
  Synthetic oligonucleotide: CBLB-4954
ucuuuggcuuuucccuccuac

SEQ ID NO: 35144 - RNA, 22 nt, Artificial Sequence
  Synthetic oligonucleotide: CBLB-4955
uucuuuggcuuuucccuccuac

SEQ ID NO: 35145 - RNA, 23 nt, Artificial Sequence
  Synthetic oligonucleotide: CBLB-4956
uuucuuuggcuuuucccuccuac

SEQ ID NO: 35146 - RNA, 24 nt, Artificial Sequence
  Synthetic oligonucleotide: CBLB-4957
uuuucuuuggcuuuucccuccuac

SEQ ID NO: 35147 - RNA, 18 nt, Artificial Sequence
  Synthetic oligonucleotide: CBLB-4958
cugaggauggccggcuac

SEQ ID NO: 35148 - RNA, 19 nt, Artificial Sequence
  Synthetic oligonucleotide: CBLB-4959
ccugaggauggccggcuac

SEQ ID NO: 35149 - RNA, 20 nt, Artificial Sequence
  Synthetic oligonucleotide: CBLB-3157
uccugaggauggccggcuac

SEQ ID NO: 35150 - RNA, 21 nt, Artificial Sequence
  Synthetic oligonucleotide: CBLB-4960
guccugaggauggccggcuac

SEQ ID NO: 35151 - RNA, 22 nt, Artificial Sequence
  Synthetic oligonucleotide: CBLB-4961
uguccugaggauggccggcuac

SEQ ID NO: 35152 - RNA, 23 nt, Artificial Sequence
  Synthetic oligonucleotide: CBLB-4962
cuguccugaggauggccggcuac

SEQ ID NO: 35153 - RNA, 24 nt, Artificial Sequence
  Synthetic oligonucleotide: CBLB-4963
ccuguccugaggauggccggcuac

SEQ ID NO: 35154 - RNA, 18 nt, Artificial Sequence
  Synthetic oligonucleotide: CBLB-4964
aagcaaguauaaacuuac

SEQ ID NO: 35155 - RNA, 19 nt, Artificial Sequence
  Synthetic oligonucleotide: CBLB-4965
uaagcaaguauaaacuuac

SEQ ID NO: 35156 - RNA, 20 nt, Artificial Sequence
  Synthetic oligonucleotide: CBLB-4966
cuaagcaaguauaaacuuac

SEQ ID NO: 35157 - RNA, 21 nt, Artificial Sequence
  Synthetic oligonucleotide: CBLB-4967
acuaagcaaguauaaacuuac

SEQ ID NO: 35158 - RNA, 22 nt, Artificial Sequence
  Synthetic oligonucleotide: CBLB-4968
gacuaagcaaguauaaacuuac

SEQ ID NO: 35159 - RNA, 23 nt, Artificial Sequence
  Synthetic oligonucleotide: CBLB-4969
agacuaagcaaguauaaacuuac

SEQ ID NO: 35160 - RNA, 24 nt, Artificial Sequence
  Synthetic oligonucleotide: CBLB-4970
uagacuaagcaaguauaaacuuac

SEQ ID NO: 35161 - RNA, 18 nt, Artificial Sequence
  Synthetic oligonucleotide: CBLB-4971
caaugaugcugcaacacc

SEQ ID NO: 35162 - RNA, 19 nt, Artificial Sequence
  Synthetic oligonucleotide: CBLB-4972
ucaaugaugcugcaacacc

SEQ ID NO: 35163 - RNA, 20 nt, Artificial Sequence
  Synthetic oligonucleotide: CBLB-3163
gucaaugaugcugcaacacc

SEQ ID NO: 35164 - RNA, 21 nt, Artificial Sequence
  Synthetic oligonucleotide: CBLB-4973
ggucaaugaugcugcaacacc

SEQ ID NO: 35165 - RNA, 22 nt, Artificial Sequence
  Synthetic oligonucleotide: CBLB-4974
gggucaaugaugcugcaacacc

SEQ ID NO: 35166 - RNA, 23 nt, Artificial Sequence
  Synthetic oligonucleotide: CBLB-4975
ggggucaaugaugcugcaacacc

SEQ ID NO: 35167 - RNA, 24 nt, Artificial Sequence
  Synthetic oligonucleotide: CBLB-4976
aggggucaaugaugcugcaacacc

SEQ ID NO: 35168 - RNA, 18 nt, Artificial Sequence
  Synthetic oligonucleotide: CBLB-4977
cggaccaguacaccuacc

SEQ ID NO: 35169 - RNA, 19 nt, Artificial Sequence
  Synthetic oligonucleotide: CBLB-4978
acggaccaguacaccuacc

SEQ ID NO: 35170 - RNA, 20 nt, Artificial Sequence
  Synthetic oligonucleotide: CBLB-3166
aacggaccaguacaccuacc

SEQ ID NO: 35171 - RNA, 21 nt, Artificial Sequence
  Synthetic oligonucleotide: CBLB-4979
uaacggaccaguacaccuacc

SEQ ID NO: 35172 - RNA, 22 nt, Artificial Sequence
  Synthetic oligonucleotide: CBLB-4980
cuaacggaccaguacaccuacc

SEQ ID NO: 35173 - RNA, 23 nt, Artificial Sequence
  Synthetic oligonucleotide: CBLB-4981
gcuaacggaccaguacaccuacc

SEQ ID NO: 35174 - RNA, 24 nt, Artificial Sequence
  Synthetic oligonucleotide: CBLB-4982
ugcuaacggaccaguacaccuacc

SEQ ID NO: 35175 - RNA, 18 nt, Artificial Sequence
  Synthetic oligonucleotide: CBLB-4983
uuuuggagagcccucccc

SEQ ID NO: 35176 - RNA, 19 nt, Artificial Sequence
  Synthetic oligonucleotide: CBLB-4984
guuuuggagagcccucccc

SEQ ID NO: 35177 - RNA, 20 nt, Artificial Sequence
  Synthetic oligonucleotide: CBLB-4985
gguuuuggagagcccucccc

SEQ ID NO: 35178 - RNA, 21 nt, Artificial Sequence
  Synthetic oligonucleotide: CBLB-4986
agguuuuggagagcccucccc

SEQ ID NO: 35179 - RNA, 22 nt, Artificial Sequence
  Synthetic oligonucleotide: CBLB-4987
cagguuuuggagagcccucccc

SEQ ID NO: 35180 - RNA, 23 nt, Artificial Sequence
  Synthetic oligonucleotide: CBLB-4988
ccagguuuuggagagcccucccc

SEQ ID NO: 35181 - RNA, 24 nt, Artificial Sequence
  Synthetic oligonucleotide: CBLB-4989
uccagguuuuggagagcccucccc

SEQ ID NO: 35182 - RNA, 18 nt, Artificial Sequence
  Synthetic oligonucleotide: CBLB-4990
caaugccgccucaggccc

SEQ ID NO: 35183 - RNA, 19 nt, Artificial Sequence
  Synthetic oligonucleotide: CBLB-4991
ccaaugccgccucaggccc

SEQ ID NO: 35184 - RNA, 20 nt, Artificial Sequence
  Synthetic oligonucleotide: CBLB-4992
uccaaugccgccucaggccc

SEQ ID NO: 35185 - RNA, 21 nt, Artificial Sequence
  Synthetic oligonucleotide: CBLB-4993
uuccaaugccgccucaggccc

SEQ ID NO: 35186 - RNA, 22 nt, Artificial Sequence
  Synthetic oligonucleotide: CBLB-4994
uuuccaaugccgccucaggccc

SEQ ID NO: 35187 - RNA, 23 nt, Artificial Sequence
  Synthetic oligonucleotide: CBLB-4995
uuuuccaaugccgccucaggccc

SEQ ID NO: 35188 - RNA, 24 nt, Artificial Sequence
  Synthetic oligonucleotide: CBLB-4996
auuuuccaaugccgccucaggccc

SEQ ID NO: 35189 - RNA, 18 nt, Artificial Sequence
  Synthetic oligonucleotide: CBLB-4997
uagucccaaacacauccc

SEQ ID NO: 35190 - RNA, 19 nt, Artificial Sequence
  Synthetic oligonucleotide: CBLB-4998
uuagucccaaacacauccc

SEQ ID NO: 35191 - RNA, 20 nt, Artificial Sequence
  Synthetic oligonucleotide: CBLB-4999
auuagucccaaacacauccc

SEQ ID NO: 35192 - RNA, 21 nt, Artificial Sequence
  Synthetic oligonucleotide: CBLB-5000
gauuagucccaaacacauccc

SEQ ID NO: 35193 - RNA, 22 nt, Artificial Sequence
  Synthetic oligonucleotide: CBLB-5001
ugauuagucccaaacacauccc

SEQ ID NO: 35194 - RNA, 23 nt, Artificial Sequence
  Synthetic oligonucleotide: CBLB-5002
cugauuagucccaaacacauccc

SEQ ID NO: 35195 - RNA, 24 nt, Artificial Sequence
  Synthetic oligonucleotide: CBLB-5003
gcugauuagucccaaacacauccc

SEQ ID NO: 35196 - RNA, 18 nt, Artificial Sequence
  Synthetic oligonucleotide: CBLB-5004
gaggaggaggagaaagcc

SEQ ID NO: 35197 - RNA, 19 nt, Artificial Sequence
  Synthetic oligonucleotide: CBLB-5005
ggaggaggaggagaaagcc

SEQ ID NO: 35198 - RNA, 20 nt, Artificial Sequence
  Synthetic oligonucleotide: CBLB-3172
uggaggaggaggagaaagcc

SEQ ID NO: 35199 - RNA, 21 nt, Artificial Sequence
  Synthetic oligonucleotide: CBLB-5006
cuggaggaggaggagaaagcc

SEQ ID NO: 35200 - RNA, 22 nt, Artificial Sequence
  Synthetic oligonucleotide: CBLB-5007
acuggaggaggaggagaaagcc

SEQ ID NO: 35201 - RNA, 23 nt, Artificial Sequence
  Synthetic oligonucleotide: CBLB-5008
aacuggaggaggaggagaaagcc

SEQ ID NO: 35202 - RNA, 24 nt, Artificial Sequence
  Synthetic oligonucleotide: CBLB-5009
uaacuggaggaggaggagaaagcc

SEQ ID NO: 35203 - RNA, 18 nt, Artificial Sequence
  Synthetic oligonucleotide: CBLB-5010
uggccggcuacuggagcc

SEQ ID NO: 35204 - RNA, 19 nt, Artificial Sequence
  Synthetic oligonucleotide: CBLB-5011
auggccggcuacuggagcc

SEQ ID NO: 35205 - RNA, 20 nt, Artificial Sequence
  Synthetic oligonucleotide: CBLB-3174
gauggccggcuacuggagcc

SEQ ID NO: 35206 - RNA, 21 nt, Artificial Sequence
  Synthetic oligonucleotide: CBLB-5012
ggauggccggcuacuggagcc

SEQ ID NO: 35207 - RNA, 22 nt, Artificial Sequence
  Synthetic oligonucleotide: CBLB-5013
aggauggccggcuacuggagcc

SEQ ID NO: 35208 - RNA, 23 nt, Artificial Sequence
  Synthetic oligonucleotide: CBLB-5014
gaggauggccggcuacuggagcc

SEQ ID NO: 35209 - RNA, 24 nt, Artificial Sequence
  Synthetic oligonucleotide: CBLB-5015
ugaggauggccggcuacuggagcc

SEQ ID NO: 35210 - RNA, 18 nt, Artificial Sequence
  Synthetic oligonucleotide: CBLB-5016
ugaaucaaaaacaucucc

SEQ ID NO: 35211 - RNA, 19 nt, Artificial Sequence
  Synthetic oligonucleotide: CBLB-5017
cugaaucaaaaacaucucc

SEQ ID NO: 35212 - RNA, 20 nt, Artificial Sequence
  Synthetic oligonucleotide: CBLB-5018
gcugaaucaaaaacaucucc

SEQ ID NO: 35213 - RNA, 21 nt, Artificial Sequence
  Synthetic oligonucleotide: CBLB-5019
ggcugaaucaaaaacaucucc

SEQ ID NO: 35214 - RNA, 22 nt, Artificial Sequence
  Synthetic oligonucleotide: CBLB-5020
aggcugaaucaaaaacaucucc

SEQ ID NO: 35215 - RNA, 23 nt, Artificial Sequence
  Synthetic oligonucleotide: CBLB-5021
gaggcugaaucaaaaacaucucc

SEQ ID NO: 35216 - RNA, 24 nt, Artificial Sequence
  Synthetic oligonucleotide: CBLB-5022
agaggcugaaucaaaaacaucucc

SEQ ID NO: 35217 - RNA, 18 nt, Artificial Sequence
  Synthetic oligonucleotide: CBLB-5023
gauacgaaaguuaucucc

SEQ ID NO: 35218 - RNA, 19 nt, Artificial Sequence
  Synthetic oligonucleotide: CBLB-5024
ugauacgaaaguuaucucc

SEQ ID NO: 35219 - RNA, 20 nt, Artificial Sequence
  Synthetic oligonucleotide: CBLB-5025
gugauacgaaaguuaucucc

SEQ ID NO: 35220 - RNA, 21 nt, Artificial Sequence
  Synthetic oligonucleotide: CBLB-5026
ugugauacgaaaguuaucucc

SEQ ID NO: 35221 - RNA, 22 nt, Artificial Sequence
  Synthetic oligonucleotide: CBLB-5027
uugugauacgaaaguuaucucc

SEQ ID NO: 35222 - RNA, 23 nt, Artificial Sequence
  Synthetic oligonucleotide: CBLB-5028
uuugugauacgaaaguuaucucc

SEQ ID NO: 35223 - RNA, 24 nt, Artificial Sequence
  Synthetic oligonucleotide: CBLB-5029
uuuugugauacgaaaguuaucucc

SEQ ID NO: 35224 - RNA, 18 nt, Artificial Sequence
  Synthetic oligonucleotide: CBLB-5030
ggaggaggaggagaaagc

SEQ ID NO: 35225 - RNA, 19 nt, Artificial Sequence
  Synthetic oligonucleotide: CBLB-5031
uggaggaggaggagaaagc

SEQ ID NO: 35226 - RNA, 20 nt, Artificial Sequence
  Synthetic oligonucleotide: CBLB-3192
cuggaggaggaggagaaagc

SEQ ID NO: 35227 - RNA, 21 nt, Artificial Sequence
  Synthetic oligonucleotide: CBLB-5032
acuggaggaggaggagaaagc

SEQ ID NO: 35228 - RNA, 22 nt, Artificial Sequence
  Synthetic oligonucleotide: CBLB-5033
aacuggaggaggaggagaaagc

SEQ ID NO: 35229 - RNA, 23 nt, Artificial Sequence
  Synthetic oligonucleotide: CBLB-5034
uaacuggaggaggaggagaaagc

SEQ ID NO: 35230 - RNA, 24 nt, Artificial Sequence
  Synthetic oligonucleotide: CBLB-5035
guaacuggaggaggaggagaaagc

SEQ ID NO: 35231 - RNA, 18 nt, Artificial Sequence
  Synthetic oligonucleotide: CBLB-5036
auggccggcuacuggagc

SEQ ID NO: 35232 - RNA, 19 nt, Artificial Sequence
  Synthetic oligonucleotide: CBLB-5037
gauggccggcuacuggagc

SEQ ID NO: 35233 - RNA, 20 nt, Artificial Sequence
  Synthetic oligonucleotide: CBLB-5038
ggauggccggcuacuggagc

SEQ ID NO: 35234 - RNA, 21 nt, Artificial Sequence
  Synthetic oligonucleotide: CBLB-5039
aggauggccggcuacuggagc

SEQ ID NO: 35235 - RNA, 22 nt, Artificial Sequence
  Synthetic oligonucleotide: CBLB-5040
gaggauggccggcuacuggagc

SEQ ID NO: 35236 - RNA, 23 nt, Artificial Sequence
  Synthetic oligonucleotide: CBLB-5041
ugaggauggccggcuacuggagc

SEQ ID NO: 35237 - RNA, 24 nt, Artificial Sequence
  Synthetic oligonucleotide: CBLB-5042
cugaggauggccggcuacuggagc

SEQ ID NO: 35238 - RNA, 18 nt, Artificial Sequence
  Synthetic oligonucleotide: CBLB-5043
accugguaaccuucuagc

SEQ ID NO: 35239 - RNA, 19 nt, Artificial Sequence
  Synthetic oligonucleotide: CBLB-5044
caccugguaaccuucuagc

SEQ ID NO: 35240 - RNA, 20 nt, Artificial Sequence
  Synthetic oligonucleotide: CBLB-3194
ucaccugguaaccuucuagc

SEQ ID NO: 35241 - RNA, 21 nt, Artificial Sequence
  Synthetic oligonucleotide: CBLB-5045
uucaccugguaaccuucuagc

SEQ ID NO: 35242 - RNA, 22 nt, Artificial Sequence
  Synthetic oligonucleotide: CBLB-5046
uuucaccugguaaccuucuagc

SEQ ID NO: 35243 - RNA, 23 nt, Artificial Sequence
  Synthetic oligonucleotide: CBLB-5047
uuuucaccugguaaccuucuagc

SEQ ID NO: 35244 - RNA, 24 nt, Artificial Sequence
  Synthetic oligonucleotide: CBLB-5048
auuuucaccugguaaccuucuagc

SEQ ID NO: 35245 - RNA, 18 nt, Artificial Sequence
  Synthetic oligonucleotide: CBLB-5049
ccugccaugccguaaggc

SEQ ID NO: 35246 - RNA, 19 nt, Artificial Sequence
  Synthetic oligonucleotide: CBLB-5050
accugccaugccguaaggc

SEQ ID NO: 35247 - RNA, 20 nt, Artificial Sequence
  Synthetic oligonucleotide: CBLB-5051
uaccugccaugccguaaggc

SEQ ID NO: 35248 - RNA, 21 nt, Artificial Sequence
  Synthetic oligonucleotide: CBLB-5052
auaccugccaugccguaaggc

SEQ ID NO: 35249 - RNA, 22 nt, Artificial Sequence
  Synthetic oligonucleotide: CBLB-5053
uauaccugccaugccguaaggc

SEQ ID NO: 35250 - RNA, 23 nt, Artificial Sequence
  Synthetic oligonucleotide: CBLB-5054
uuauaccugccaugccguaaggc

SEQ ID NO: 35251 - RNA, 24 nt, Artificial Sequence
  Synthetic oligonucleotide: CBLB-5055
auuauaccugccaugccguaaggc

SEQ ID NO: 35252 - RNA, 18 nt, Artificial Sequence
  Synthetic oligonucleotide: CBLB-5056
ucugaauuagauccaggc

SEQ ID NO: 35253 - RNA, 19 nt, Artificial Sequence
  Synthetic oligonucleotide: CBLB-5057
uucugaauuagauccaggc

SEQ ID NO: 35254 - RNA, 20 nt, Artificial Sequence
  Synthetic oligonucleotide: CBLB-5058
uuucugaauuagauccaggc

SEQ ID NO: 35255 - RNA, 21 nt, Artificial Sequence
  Synthetic oligonucleotide: CBLB-5059
cuuucugaauuagauccaggc

SEQ ID NO: 35256 - RNA, 22 nt, Artificial Sequence
  Synthetic oligonucleotide: CBLB-5060
ccuuucugaauuagauccaggc

SEQ ID NO: 35257 - RNA, 23 nt, Artificial Sequence
  Synthetic oligonucleotide: CBLB-5061
gccuuucugaauuagauccaggc

SEQ ID NO: 35258 - RNA, 24 nt, Artificial Sequence
  Synthetic oligonucleotide: CBLB-5062
ugccuuucugaauuagauccaggc

SEQ ID NO: 35259 - RNA, 18 nt, Artificial Sequence
  Synthetic oligonucleotide: CBLB-5063
gagccauugcuuccaggc

SEQ ID NO: 35260 - RNA, 19 nt, Artificial Sequence
  Synthetic oligonucleotide: CBLB-5064
agagccauugcuuccaggc

SEQ ID NO: 35261 - RNA, 20 nt, Artificial Sequence
  Synthetic oligonucleotide: CBLB-5065
uagagccauugcuuccaggc

SEQ ID NO: 35262 - RNA, 21 nt, Artificial Sequence
  Synthetic oligonucleotide: CBLB-5066
uuagagccauugcuuccaggc

SEQ ID NO: 35263 - RNA, 22 nt, Artificial Sequence
  Synthetic oligonucleotide: CBLB-5067
uuuagagccauugcuuccaggc

SEQ ID NO: 35264 - RNA, 23 nt, Artificial Sequence
  Synthetic oligonucleotide: CBLB-5068
uuuuagagccauugcuuccaggc

SEQ ID NO: 35265 - RNA, 24 nt, Artificial Sequence
  Synthetic oligonucleotide: CBLB-5069
auuuuagagccauugcuuccaggc

SEQ ID NO: 35266 - RNA, 18 nt, Artificial Sequence
  Synthetic oligonucleotide: CBLB-5070
gcugccaucaaucagggc

SEQ ID NO: 35267 - RNA, 19 nt, Artificial Sequence
  Synthetic oligonucleotide: CBLB-5071
ugcugccaucaaucagggc

SEQ ID NO: 35268 - RNA, 20 nt, Artificial Sequence
  Synthetic oligonucleotide: CBLB-5072
cugcugccaucaaucagggc

SEQ ID NO: 35269 - RNA, 21 nt, Artificial Sequence
  Synthetic oligonucleotide: CBLB-5073
ccugcugccaucaaucagggc

SEQ ID NO: 35270 - RNA, 22 nt, Artificial Sequence
  Synthetic oligonucleotide: CBLB-5074
cccugcugccaucaaucagggc

SEQ ID NO: 35271 - RNA, 23 nt, Artificial Sequence
  Synthetic oligonucleotide: CBLB-5075
ucccugcugccaucaaucagggc

SEQ ID NO: 35272 - RNA, 24 nt, Artificial Sequence
  Synthetic oligonucleotide: CBLB-5076
uucccugcugccaucaaucagggc

SEQ ID NO: 35273 - RNA, 18 nt, Artificial Sequence
  Synthetic oligonucleotide: CBLB-5077
uggcuuucuucucugggc

SEQ ID NO: 35274 - RNA, 19 nt, Artificial Sequence
  Synthetic oligonucleotide: CBLB-5078
guggcuuucuucucugggc

SEQ ID NO: 35275 - RNA, 20 nt, Artificial Sequence
  Synthetic oligonucleotide: CBLB-5079
uguggcuuucuucucugggc

SEQ ID NO: 35276 - RNA, 21 nt, Artificial Sequence
  Synthetic oligonucleotide: CBLB-5080
cuguggcuuucuucucugggc

SEQ ID NO: 35277 - RNA, 22 nt, Artificial Sequence
  Synthetic oligonucleotide: CBLB-5081
gcuguggcuuucuucucugggc

SEQ ID NO: 35278 - RNA, 23 nt, Artificial Sequence
  Synthetic oligonucleotide: CBLB-5082
ggcuguggcuuucuucucugggc

SEQ ID NO: 35279 - RNA, 24 nt, Artificial Sequence
  Synthetic oligonucleotide: CBLB-5083
aggcuguggcuuucuucucugggc

SEQ ID NO: 35280 - RNA, 18 nt, Artificial Sequence
  Synthetic oligonucleotide: CBLB-5084
cuggcaggugguaauggc

SEQ ID NO: 35281 - RNA, 19 nt, Artificial Sequence
  Synthetic oligonucleotide: CBLB-5085
ccuggcaggugguaauggc

SEQ ID NO: 35282 - RNA, 20 nt, Artificial Sequence
  Synthetic oligonucleotide: CBLB-5086
gccuggcaggugguaauggc

SEQ ID NO: 35283 - RNA, 21 nt, Artificial Sequence
  Synthetic oligonucleotide: CBLB-5087
ggccuggcaggugguaauggc

SEQ ID NO: 35284 - RNA, 22 nt, Artificial Sequence
  Synthetic oligonucleotide: CBLB-5088
aggccuggcaggugguaauggc

SEQ ID NO: 35285 - RNA, 23 nt, Artificial Sequence
  Synthetic oligonucleotide: CBLB-5089
gaggccuggcaggugguaauggc

SEQ ID NO: 35286 - RNA, 24 nt, Artificial Sequence
  Synthetic oligonucleotide: CBLB-5090
ggaggccuggcaggugguaauggc

SEQ ID NO: 35287 - RNA, 18 nt, Artificial Sequence
  Synthetic oligonucleotide: CBLB-5091
cuuguuuucucaccaugc

SEQ ID NO: 35288 - RNA, 19 nt, Artificial Sequence
  Synthetic oligonucleotide: CBLB-5092
ucuuguuuucucaccaugc

SEQ ID NO: 35289 - RNA, 20 nt, Artificial Sequence
  Synthetic oligonucleotide: CBLB-5093
aucuuguuuucucaccaugc

SEQ ID NO: 35290 - RNA, 21 nt, Artificial Sequence
  Synthetic oligonucleotide: CBLB-5094
uaucuuguuuucucaccaugc

SEQ ID NO: 35291 - RNA, 22 nt, Artificial Sequence
  Synthetic oligonucleotide: CBLB-5095
uuaucuuguuuucucaccaugc

SEQ ID NO: 35292 - RNA, 23 nt, Artificial Sequence
  Synthetic oligonucleotide: CBLB-5096
uuuaucuuguuuucucaccaugc

SEQ ID NO: 35293 - RNA, 24 nt, Artificial Sequence
  Synthetic oligonucleotide: CBLB-5097
guuuaucuuguuuucucaccaugc

SEQ ID NO: 35294 - RNA, 18 nt, Artificial Sequence
  Synthetic oligonucleotide: CBLB-5098
acaaaacucacuuuaugc

SEQ ID NO: 35295 - RNA, 19 nt, Artificial Sequence
  Synthetic oligonucleotide: CBLB-5099
aacaaaacucacuuuaugc

SEQ ID NO: 35296 - RNA, 20 nt, Artificial Sequence
  Synthetic oligonucleotide: CBLB-5100
caacaaaacucacuuuaugc

SEQ ID NO: 35297 - RNA, 21 nt, Artificial Sequence
  Synthetic oligonucleotide: CBLB-5101
ucaacaaaacucacuuuaugc

SEQ ID NO: 35298 - RNA, 22 nt, Artificial Sequence
  Synthetic oligonucleotide: CBLB-5102
uucaacaaaacucacuuuaugc

SEQ ID NO: 35299 - RNA, 23 nt, Artificial Sequence
  Synthetic oligonucleotide: CBLB-5103
auucaacaaaacucacuuuaugc

SEQ ID NO: 35300 - RNA, 24 nt, Artificial Sequence
  Synthetic oligonucleotide: CBLB-5104
aauucaacaaaacucacuuuaugc

SEQ ID NO: 35301 - RNA, 18 nt, Artificial Sequence
  Synthetic oligonucleotide: CBLB-5105
uaagggaggagguggugc

SEQ ID NO: 35302 - RNA, 19 nt, Artificial Sequence
  Synthetic oligonucleotide: CBLB-5106
uuaagggaggagguggugc

SEQ ID NO: 35303 - RNA, 20 nt, Artificial Sequence
  Synthetic oligonucleotide: CBLB-3205
cuuaagggaggagguggugc

SEQ ID NO: 35304 - RNA, 21 nt, Artificial Sequence
  Synthetic oligonucleotide: CBLB-5107
ucuuaagggaggagguggugc

SEQ ID NO: 35305 - RNA, 22 nt, Artificial Sequence
  Synthetic oligonucleotide: CBLB-5108
cucuuaagggaggagguggugc

SEQ ID NO: 35306 - RNA, 23 nt, Artificial Sequence
  Synthetic oligonucleotide: CBLB-5109
ucucuuaagggaggagguggugc

SEQ ID NO: 35307 - RNA, 24 nt, Artificial Sequence
  Synthetic oligonucleotide: CBLB-5110
aucucuuaagggaggagguggugc

SEQ ID NO: 35308 - RNA, 18 nt, Artificial Sequence
  Synthetic oligonucleotide: CBLB-5111
aaugagacuaugccuugc

SEQ ID NO: 35309 - RNA, 19 nt, Artificial Sequence
  Synthetic oligonucleotide: CBLB-5112
caaugagacuaugccuugc

SEQ ID NO: 35310 - RNA, 20 nt, Artificial Sequence
  Synthetic oligonucleotide: CBLB-3206
ucaaugagacuaugccuugc

SEQ ID NO: 35311 - RNA, 21 nt, Artificial Sequence
  Synthetic oligonucleotide: CBLB-5113
uucaaugagacuaugccuugc

SEQ ID NO: 35312 - RNA, 22 nt, Artificial Sequence
  Synthetic oligonucleotide: CBLB-5114
guucaaugagacuaugccuugc

SEQ ID NO: 35313 - RNA, 23 nt, Artificial Sequence
  Synthetic oligonucleotide: CBLB-5115
uguucaaugagacuaugccuugc

SEQ ID NO: 35314 - RNA, 24 nt, Artificial Sequence
  Synthetic oligonucleotide: CBLB-5116
auguucaaugagacuaugccuugc

SEQ ID NO: 35315 - RNA, 18 nt, Artificial Sequence
  Synthetic oligonucleotide: CBLB-5117
auuagucccaaacacauc

SEQ ID NO: 35316 - RNA, 19 nt, Artificial Sequence
  Synthetic oligonucleotide: CBLB-5118
gauuagucccaaacacauc

SEQ ID NO: 35317 - RNA, 20 nt, Artificial Sequence
  Synthetic oligonucleotide: CBLB-5119
ugauuagucccaaacacauc

SEQ ID NO: 35318 - RNA, 21 nt, Artificial Sequence
  Synthetic oligonucleotide: CBLB-5120
cugauuagucccaaacacauc

SEQ ID NO: 35319 - RNA, 22 nt, Artificial Sequence
  Synthetic oligonucleotide: CBLB-5121
gcugauuagucccaaacacauc

SEQ ID NO: 35320 - RNA, 23 nt, Artificial Sequence
  Synthetic oligonucleotide: CBLB-5122
agcugauuagucccaaacacauc

SEQ ID NO: 35321 - RNA, 24 nt, Artificial Sequence
  Synthetic oligonucleotide: CBLB-5123
aagcugauuagucccaaacacauc

SEQ ID NO: 35322 - RNA, 18 nt, Artificial Sequence
  Synthetic oligonucleotide: CBLB-5124
gccaaccgauucaucauc

SEQ ID NO: 35323 - RNA, 19 nt, Artificial Sequence
  Synthetic oligonucleotide: CBLB-5125
ugccaaccgauucaucauc

SEQ ID NO: 35324 - RNA, 20 nt, Artificial Sequence
  Synthetic oligonucleotide: CBLB-5126
uugccaaccgauucaucauc

SEQ ID NO: 35325 - RNA, 21 nt, Artificial Sequence
  Synthetic oligonucleotide: CBLB-5127
uuugccaaccgauucaucauc

SEQ ID NO: 35326 - RNA, 22 nt, Artificial Sequence
  Synthetic oligonucleotide: CBLB-5128
guuugccaaccgauucaucauc

SEQ ID NO: 35327 - RNA, 23 nt, Artificial Sequence
  Synthetic oligonucleotide: CBLB-5129
cguuugccaaccgauucaucauc

SEQ ID NO: 35328 - RNA, 24 nt, Artificial Sequence
  Synthetic oligonucleotide: CBLB-5130
acguuugccaaccgauucaucauc

SEQ ID NO: 35329 - RNA, 18 nt, Artificial Sequence
  Synthetic oligonucleotide: CBLB-5131
gcuaaucugguggaccuc

SEQ ID NO: 35330 - RNA, 19 nt, Artificial Sequence
  Synthetic oligonucleotide: CBLB-5132
agcuaaucugguggaccuc

SEQ ID NO: 35331 - RNA, 20 nt, Artificial Sequence
  Synthetic oligonucleotide: CBLB-5133
gagcuaaucugguggaccuc

SEQ ID NO: 35332 - RNA, 21 nt, Artificial Sequence
  Synthetic oligonucleotide: CBLB-5134
agagcuaaucugguggaccuc

SEQ ID NO: 35333 - RNA, 22 nt, Artificial Sequence
  Synthetic oligonucleotide: CBLB-5135
cagagcuaaucugguggaccuc

SEQ ID NO: 35334 - RNA, 23 nt, Artificial Sequence
  Synthetic oligonucleotide: CBLB-5136
ccagagcuaaucugguggaccuc

SEQ ID NO: 35335 - RNA, 24 nt, Artificial Sequence
  Synthetic oligonucleotide: CBLB-5137
gccagagcuaaucugguggaccuc

SEQ ID NO: 35336 - RNA, 18 nt, Artificial Sequence
  Synthetic oligonucleotide: CBLB-5138
gaggcauuggcgggucuc

SEQ ID NO: 35337 - RNA, 19 nt, Artificial Sequence
  Synthetic oligonucleotide: CBLB-5139
agaggcauuggcgggucuc

SEQ ID NO: 35338 - RNA, 20 nt, Artificial Sequence
  Synthetic oligonucleotide: CBLB-3218
aagaggcauuggcgggucuc

SEQ ID NO: 35339 - RNA, 21 nt, Artificial Sequence
  Synthetic oligonucleotide: CBLB-5140
caagaggcauuggcgggucuc

SEQ ID NO: 35340 - RNA, 22 nt, Artificial Sequence
  Synthetic oligonucleotide: CBLB-5141
ucaagaggcauuggcgggucuc

SEQ ID NO: 35341 - RNA, 23 nt, Artificial Sequence
  Synthetic oligonucleotide: CBLB-5142
uucaagaggcauuggcgggucuc

SEQ ID NO: 35342 - RNA, 24 nt, Artificial Sequence
  Synthetic oligonucleotide: CBLB-5143
cuucaagaggcauuggcgggucuc

SEQ ID NO: 35343 - RNA, 18 nt, Artificial Sequence
  Synthetic oligonucleotide: CBLB-5144
uguaacuuuuauaugguc

SEQ ID NO: 35344 - RNA, 19 nt, Artificial Sequence
  Synthetic oligonucleotide: CBLB-5145
guguaacuuuuauaugguc

SEQ ID NO: 35345 - RNA, 20 nt, Artificial Sequence
  Synthetic oligonucleotide: CBLB-5146
uguguaacuuuuauaugguc

SEQ ID NO: 35346 - RNA, 21 nt, Artificial Sequence
  Synthetic oligonucleotide: CBLB-5147
cuguguaacuuuuauaugguc

SEQ ID NO: 35347 - RNA, 22 nt, Artificial Sequence
  Synthetic oligonucleotide: CBLB-5148
ccuguguaacuuuuauaugguc

SEQ ID NO: 35348 - RNA, 23 nt, Artificial Sequence
  Synthetic oligonucleotide: CBLB-5149
accuguguaacuuuuauaugguc

SEQ ID NO: 35349 - RNA, 24 nt, Artificial Sequence
  Synthetic oligonucleotide: CBLB-5150
uaccuguguaacuuuuauaugguc

SEQ ID NO: 35350 - RNA, 18 nt, Artificial Sequence
  Synthetic oligonucleotide: CBLB-5151
gaagaaaaagauccuguc

SEQ ID NO: 35351 - RNA, 19 nt, Artificial Sequence
  Synthetic oligonucleotide: CBLB-5152
agaagaaaaagauccuguc

SEQ ID NO: 35352 - RNA, 20 nt, Artificial Sequence
  Synthetic oligonucleotide: CBLB-5153
aagaagaaaaagauccuguc

SEQ ID NO: 35353 - RNA, 21 nt, Artificial Sequence
  Synthetic oligonucleotide: CBLB-5154
gaagaagaaaaagauccuguc

SEQ ID NO: 35354 - RNA, 22 nt, Artificial Sequence
  Synthetic oligonucleotide: CBLB-5155
ggaagaagaaaaagauccuguc

SEQ ID NO: 35355 - RNA, 23 nt, Artificial Sequence
  Synthetic oligonucleotide: CBLB-5156
aggaagaagaaaaagauccuguc

SEQ ID NO: 35356 - RNA, 24 nt, Artificial Sequence
  Synthetic oligonucleotide: CBLB-5157
aaggaagaagaaaaagauccuguc

SEQ ID NO: 35357 - RNA, 18 nt, Artificial Sequence
  Synthetic oligonucleotide: CBLB-5158
aggagggaaggcaaauuc

SEQ ID NO: 35358 - RNA, 19 nt, Artificial Sequence
  Synthetic oligonucleotide: CBLB-5159
gaggagggaaggcaaauuc

SEQ ID NO: 35359 - RNA, 20 nt, Artificial Sequence
  Synthetic oligonucleotide: CBLB-5160
ggaggagggaaggcaaauuc

SEQ ID NO: 35360 - RNA, 21 nt, Artificial Sequence
  Synthetic oligonucleotide: CBLB-5161
uggaggagggaaggcaaauuc

SEQ ID NO: 35361 - RNA, 22 nt, Artificial Sequence
  Synthetic oligonucleotide: CBLB-5162
cuggaggagggaaggcaaauuc

SEQ ID NO: 35362 - RNA, 23 nt, Artificial Sequence
  Synthetic oligonucleotide: CBLB-5163
acuggaggagggaaggcaaauuc

SEQ ID NO: 35363 - RNA, 24 nt, Artificial Sequence
  Synthetic oligonucleotide: CBLB-5164
uacuggaggagggaaggcaaauuc

SEQ ID NO: 35364 - RNA, 18 nt, Artificial Sequence
  Synthetic oligonucleotide: CBLB-5165
ugagaugguugugaauuc

SEQ ID NO: 35365 - RNA, 19 nt, Artificial Sequence
  Synthetic oligonucleotide: CBLB-5166
augagaugguugugaauuc

SEQ ID NO: 35366 - RNA, 20 nt, Artificial Sequence
  Synthetic oligonucleotide: CBLB-3226
aaugagaugguugugaauuc

SEQ ID NO: 35367 - RNA, 21 nt, Artificial Sequence
  Synthetic oligonucleotide: CBLB-5167
caaugagaugguugugaauuc

SEQ ID NO: 35368 - RNA, 22 nt, Artificial Sequence
  Synthetic oligonucleotide: CBLB-5168
acaaugagaugguugugaauuc

SEQ ID NO: 35369 - RNA, 23 nt, Artificial Sequence
  Synthetic oligonucleotide: CBLB-5169
gacaaugagaugguugugaauuc

SEQ ID NO: 35370 - RNA, 24 nt, Artificial Sequence
  Synthetic oligonucleotide: CBLB-5170
ugacaaugagaugguugugaauuc

SEQ ID NO: 35371 - RNA, 18 nt, Artificial Sequence
  Synthetic oligonucleotide: CBLB-5171
ccgagggcaccaugcuuc

SEQ ID NO: 35372 - RNA, 19 nt, Artificial Sequence
  Synthetic oligonucleotide: CBLB-5172
cccgagggcaccaugcuuc

SEQ ID NO: 35373 - RNA, 20 nt, Artificial Sequence
  Synthetic oligonucleotide: CBLB-5173
ucccgagggcaccaugcuuc

SEQ ID NO: 35374 - RNA, 21 nt, Artificial Sequence
  Synthetic oligonucleotide: CBLB-5174
aucccgagggcaccaugcuuc

SEQ ID NO: 35375 - RNA, 22 nt, Artificial Sequence
  Synthetic oligonucleotide: CBLB-5175
caucccgagggcaccaugcuuc

SEQ ID NO: 35376 - RNA, 23 nt, Artificial Sequence
  Synthetic oligonucleotide: CBLB-5176
acaucccgagggcaccaugcuuc

SEQ ID NO: 35377 - RNA, 24 nt, Artificial Sequence
  Synthetic oligonucleotide: CBLB-5177
cacaucccgagggcaccaugcuuc

SEQ ID NO: 35378 - RNA, 18 nt, Artificial Sequence
  Synthetic oligonucleotide: CBLB-5178
auauaauucauauuguuc

SEQ ID NO: 35379 - RNA, 19 nt, Artificial Sequence
  Synthetic oligonucleotide: CBLB-5179
aauauaauucauauuguuc

SEQ ID NO: 35380 - RNA, 20 nt, Artificial Sequence
  Synthetic oligonucleotide: CBLB-5180
caauauaauucauauuguuc

SEQ ID NO: 35381 - RNA, 21 nt, Artificial Sequence
  Synthetic oligonucleotide: CBLB-5181
acaauauaauucauauuguuc

SEQ ID NO: 35382 - RNA, 22 nt, Artificial Sequence
  Synthetic oligonucleotide: CBLB-5182
cacaauauaauucauauuguuc

SEQ ID NO: 35383 - RNA, 23 nt, Artificial Sequence
  Synthetic oligonucleotide: CBLB-5183
ucacaauauaauucauauuguuc

SEQ ID NO: 35384 - RNA, 24 nt, Artificial Sequence
  Synthetic oligonucleotide: CBLB-5184
uucacaauauaauucauauuguuc

SEQ ID NO: 35385 - RNA, 18 nt, Artificial Sequence
  Synthetic oligonucleotide: CBLB-5185
ucuuacagagcugaaaag

SEQ ID NO: 35386 - RNA, 19 nt, Artificial Sequence
  Synthetic oligonucleotide: CBLB-5186
aucuuacagagcugaaaag

SEQ ID NO: 35387 - RNA, 20 nt, Artificial Sequence
  Synthetic oligonucleotide: CBLB-3237
aaucuuacagagcugaaaag

SEQ ID NO: 35388 - RNA, 21 nt, Artificial Sequence
  Synthetic oligonucleotide: CBLB-5187
aaaucuuacagagcugaaaag

SEQ ID NO: 35389 - RNA, 22 nt, Artificial Sequence
  Synthetic oligonucleotide: CBLB-5188
caaaucuuacagagcugaaaag

SEQ ID NO: 35390 - RNA, 23 nt, Artificial Sequence
  Synthetic oligonucleotide: CBLB-5189
acaaaucuuacagagcugaaaag

SEQ ID NO: 35391 - RNA, 24 nt, Artificial Sequence
  Synthetic oligonucleotide: CBLB-5190
cacaaaucuuacagagcugaaaag

SEQ ID NO: 35392 - RNA, 18 nt, Artificial Sequence
  Synthetic oligonucleotide: CBLB-5191
uggaggaggaggagaaag

SEQ ID NO: 35393 - RNA, 19 nt, Artificial Sequence
  Synthetic oligonucleotide: CBLB-5192
cuggaggaggaggagaaag

SEQ ID NO: 35394 - RNA, 20 nt, Artificial Sequence
  Synthetic oligonucleotide: CBLB-5193
acuggaggaggaggagaaag

SEQ ID NO: 35395 - RNA, 21 nt, Artificial Sequence
  Synthetic oligonucleotide: CBLB-5194
aacuggaggaggaggagaaag

SEQ ID NO: 35396 - RNA, 22 nt, Artificial Sequence
  Synthetic oligonucleotide: CBLB-5195
uaacuggaggaggaggagaaag

SEQ ID NO: 35397 - RNA, 23 nt, Artificial Sequence
  Synthetic oligonucleotide: CBLB-5196
guaacuggaggaggaggagaaag

SEQ ID NO: 35398 - RNA, 24 nt, Artificial Sequence
  Synthetic oligonucleotide: CBLB-5197
gguaacuggaggaggaggagaaag

SEQ ID NO: 35399 - RNA, 18 nt, Artificial Sequence
  Synthetic oligonucleotide: CBLB-5198
cuuucuucucugggcaag

SEQ ID NO: 35400 - RNA, 19 nt, Artificial Sequence
  Synthetic oligonucleotide: CBLB-5199
gcuuucuucucugggcaag

SEQ ID NO: 35401 - RNA, 20 nt, Artificial Sequence
  Synthetic oligonucleotide: CBLB-3242
ggcuuucuucucugggcaag

SEQ ID NO: 35402 - RNA, 21 nt, Artificial Sequence
  Synthetic oligonucleotide: CBLB-5200
uggcuuucuucucugggcaag

SEQ ID NO: 35403 - RNA, 22 nt, Artificial Sequence
  Synthetic oligonucleotide: CBLB-5201
guggcuuucuucucugggcaag

SEQ ID NO: 35404 - RNA, 23 nt, Artificial Sequence
  Synthetic oligonucleotide: CBLB-5202
uguggcuuucuucucugggcaag

SEQ ID NO: 35405 - RNA, 24 nt, Artificial Sequence
  Synthetic oligonucleotide: CBLB-5203
cuguggcuuucuucucugggcaag

SEQ ID NO: 35406 - RNA, 18 nt, Artificial Sequence
  Synthetic oligonucleotide: CBLB-5204
guuuucucaccaugcaag

SEQ ID NO: 35407 - RNA, 19 nt, Artificial Sequence
  Synthetic oligonucleotide: CBLB-5205
uguuuucucaccaugcaag

SEQ ID NO: 35408 - RNA, 20 nt, Artificial Sequence
  Synthetic oligonucleotide: CBLB-5206
uuguuuucucaccaugcaag

SEQ ID NO: 35409 - RNA, 21 nt, Artificial Sequence
  Synthetic oligonucleotide: CBLB-5207
cuuguuuucucaccaugcaag

SEQ ID NO: 35410 - RNA, 22 nt, Artificial Sequence
  Synthetic oligonucleotide: CBLB-5208
ucuuguuuucucaccaugcaag

SEQ ID NO: 35411 - RNA, 23 nt, Artificial Sequence
  Synthetic oligonucleotide: CBLB-5209
aucuuguuuucucaccaugcaag

SEQ ID NO: 35412 - RNA, 24 nt, Artificial Sequence
  Synthetic oligonucleotide: CBLB-5210
uaucuuguuuucucaccaugcaag

SEQ ID NO: 35413 - RNA, 18 nt, Artificial Sequence
  Synthetic oligonucleotide: CBLB-5211
acgauaguucugugcaag

SEQ ID NO: 35414 - RNA, 19 nt, Artificial Sequence
  Synthetic oligonucleotide: CBLB-5212
uacgauaguucugugcaag

SEQ ID NO: 35415 - RNA, 20 nt, Artificial Sequence
  Synthetic oligonucleotide: CBLB-5213
guacgauaguucugugcaag

SEQ ID NO: 35416 - RNA, 21 nt, Artificial Sequence
  Synthetic oligonucleotide: CBLB-5214
gguacgauaguucugugcaag

SEQ ID NO: 35417 - RNA, 22 nt, Artificial Sequence
  Synthetic oligonucleotide: CBLB-5215
ugguacgauaguucugugcaag

SEQ ID NO: 35418 - RNA, 23 nt, Artificial Sequence
  Synthetic oligonucleotide: CBLB-5216
augguacgauaguucugugcaag

SEQ ID NO: 35419 - RNA, 24 nt, Artificial Sequence
  Synthetic oligonucleotide: CBLB-5217
caugguacgauaguucugugcaag

SEQ ID NO: 35420 - RNA, 18 nt, Artificial Sequence
  Synthetic oligonucleotide: CBLB-5218
ccuccuaccugaaggaag

SEQ ID NO: 35421 - RNA, 19 nt, Artificial Sequence
  Synthetic oligonucleotide: CBLB-5219
cccuccuaccugaaggaag

SEQ ID NO: 35422 - RNA, 20 nt, Artificial Sequence
  Synthetic oligonucleotide: CBLB-5220
ucccuccuaccugaaggaag

SEQ ID NO: 35423 - RNA, 21 nt, Artificial Sequence
  Synthetic oligonucleotide: CBLB-5221
uucccuccuaccugaaggaag

SEQ ID NO: 35424 - RNA, 22 nt, Artificial Sequence
  Synthetic oligonucleotide: CBLB-5222
uuucccuccuaccugaaggaag

SEQ ID NO: 35425 - RNA, 23 nt, Artificial Sequence
  Synthetic oligonucleotide: CBLB-5223
uuuucccuccuaccugaaggaag

SEQ ID NO: 35426 - RNA, 24 nt, Artificial Sequence
  Synthetic oligonucleotide: CBLB-5224
cuuuucccuccuaccugaaggaag

SEQ ID NO: 35427 - RNA, 18 nt, Artificial Sequence
  Synthetic oligonucleotide: CBLB-5225
uugauuucuucucugaag

SEQ ID NO: 35428 - RNA, 19 nt, Artificial Sequence
  Synthetic oligonucleotide: CBLB-5226
uuugauuucuucucugaag

SEQ ID NO: 35429 - RNA, 20 nt, Artificial Sequence
  Synthetic oligonucleotide: CBLB-5227
guuugauuucuucucugaag

SEQ ID NO: 35430 - RNA, 21 nt, Artificial Sequence
  Synthetic oligonucleotide: CBLB-5228
uguuugauuucuucucugaag

SEQ ID NO: 35431 - RNA, 22 nt, Artificial Sequence
  Synthetic oligonucleotide: CBLB-5229
auguuugauuucuucucugaag

SEQ ID NO: 35432 - RNA, 23 nt, Artificial Sequence
  Synthetic oligonucleotide: CBLB-5230
gauguuugauuucuucucugaag

SEQ ID NO: 35433 - RNA, 24 nt, Artificial Sequence
  Synthetic oligonucleotide: CBLB-5231
ggauguuugauuucuucucugaag

SEQ ID NO: 35434 - RNA, 18 nt, Artificial Sequence
  Synthetic oligonucleotide: CBLB-5232
agaagacuaaagaaacag

SEQ ID NO: 35435 - RNA, 19 nt, Artificial Sequence
  Synthetic oligonucleotide: CBLB-5233
gagaagacuaaagaaacag

SEQ ID NO: 35436 - RNA, 20 nt, Artificial Sequence
  Synthetic oligonucleotide: CBLB-5234
ggagaagacuaaagaaacag

SEQ ID NO: 35437 - RNA, 21 nt, Artificial Sequence
  Synthetic oligonucleotide: CBLB-5235
aggagaagacuaaagaaacag

SEQ ID NO: 35438 - RNA, 22 nt, Artificial Sequence
  Synthetic oligonucleotide: CBLB-5236
aaggagaagacuaaagaaacag

SEQ ID NO: 35439 - RNA, 23 nt, Artificial Sequence
  Synthetic oligonucleotide: CBLB-5237
caaggagaagacuaaagaaacag

SEQ ID NO: 35440 - RNA, 24 nt, Artificial Sequence
  Synthetic oligonucleotide: CBLB-5238
gcaaggagaagacuaaagaaacag

SEQ ID NO: 35441 - RNA, 18 nt, Artificial Sequence
  Synthetic oligonucleotide: CBLB-5239
gaccaguacaccuaccag

SEQ ID NO: 35442 - RNA, 19 nt, Artificial Sequence
  Synthetic oligonucleotide: CBLB-5240
ggaccaguacaccuaccag

SEQ ID NO: 35443 - RNA, 20 nt, Artificial Sequence
  Synthetic oligonucleotide: CBLB-3246
cggaccaguacaccuaccag

SEQ ID NO: 35444 - RNA, 21 nt, Artificial Sequence
  Synthetic oligonucleotide: CBLB-5241
acggaccaguacaccuaccag

SEQ ID NO: 35445 - RNA, 22 nt, Artificial Sequence
  Synthetic oligonucleotide: CBLB-5242
aacggaccaguacaccuaccag

SEQ ID NO: 35446 - RNA, 23 nt, Artificial Sequence
  Synthetic oligonucleotide: CBLB-5243
uaacggaccaguacaccuaccag

SEQ ID NO: 35447 - RNA, 24 nt, Artificial Sequence
  Synthetic oligonucleotide: CBLB-5244
cuaacggaccaguacaccuaccag

SEQ ID NO: 35448 - RNA, 18 nt, Artificial Sequence
  Synthetic oligonucleotide: CBLB-5245
uuucugaauuagauccag

SEQ ID NO: 35449 - RNA, 19 nt, Artificial Sequence
  Synthetic oligonucleotide: CBLB-5246
cuuucugaauuagauccag

SEQ ID NO: 35450 - RNA, 20 nt, Artificial Sequence
  Synthetic oligonucleotide: CBLB-5247
ccuuucugaauuagauccag

SEQ ID NO: 35451 - RNA, 21 nt, Artificial Sequence
  Synthetic oligonucleotide: CBLB-5248
gccuuucugaauuagauccag

SEQ ID NO: 35452 - RNA, 22 nt, Artificial Sequence
  Synthetic oligonucleotide: CBLB-5249
ugccuuucugaauuagauccag

SEQ ID NO: 35453 - RNA, 23 nt, Artificial Sequence
  Synthetic oligonucleotide: CBLB-5250
augccuuucugaauuagauccag

SEQ ID NO: 35454 - RNA, 24 nt, Artificial Sequence
  Synthetic oligonucleotide: CBLB-5251
uaugccuuucugaauuagauccag

SEQ ID NO: 35455 - RNA, 18 nt, Artificial Sequence
  Synthetic oligonucleotide: CBLB-5252
ugcacaaaucuuacagag

SEQ ID NO: 35456 - RNA, 19 nt, Artificial Sequence
  Synthetic oligonucleotide: CBLB-5253
cugcacaaaucuuacagag

SEQ ID NO: 35457 - RNA, 20 nt, Artificial Sequence
  Synthetic oligonucleotide: CBLB-5254
ucugcacaaaucuuacagag

SEQ ID NO: 35458 - RNA, 21 nt, Artificial Sequence
  Synthetic oligonucleotide: CBLB-5255
cucugcacaaaucuuacagag

SEQ ID NO: 35459 - RNA, 22 nt, Artificial Sequence
  Synthetic oligonucleotide: CBLB-5256
ucucugcacaaaucuuacagag

SEQ ID NO: 35460 - RNA, 23 nt, Artificial Sequence
  Synthetic oligonucleotide: CBLB-5257
uucucugcacaaaucuuacagag

SEQ ID NO: 35461 - RNA, 24 nt, Artificial Sequence
  Synthetic oligonucleotide: CBLB-5258
auucucugcacaaaucuuacagag

SEQ ID NO: 35462 - RNA, 18 nt, Artificial Sequence
  Synthetic oligonucleotide: CBLB-5259
gugggggaggugggagag

SEQ ID NO: 35463 - RNA, 19 nt, Artificial Sequence
  Synthetic oligonucleotide: CBLB-5260
ggugggggaggugggagag

SEQ ID NO: 35464 - RNA, 20 nt, Artificial Sequence
  Synthetic oligonucleotide: CBLB-5261
aggugggggaggugggagag

SEQ ID NO: 35465 - RNA, 21 nt, Artificial Sequence
  Synthetic oligonucleotide: CBLB-5262
gaggugggggaggugggagag

SEQ ID NO: 35466 - RNA, 22 nt, Artificial Sequence
  Synthetic oligonucleotide: CBLB-5263
ggaggugggggaggugggagag

SEQ ID NO: 35467 - RNA, 23 nt, Artificial Sequence
  Synthetic oligonucleotide: CBLB-5264
aggaggugggggaggugggagag

SEQ ID NO: 35468 - RNA, 24 nt, Artificial Sequence
  Synthetic oligonucleotide: CBLB-5265
caggaggugggggaggugggagag

SEQ ID NO: 35469 - RNA, 18 nt, Artificial Sequence
  Synthetic oligonucleotide: CBLB-5266
gcuuuggauugucccgag

SEQ ID NO: 35470 - RNA, 19 nt, Artificial Sequence
  Synthetic oligonucleotide: CBLB-5267
ugcuuuggauugucccgag

SEQ ID NO: 35471 - RNA, 20 nt, Artificial Sequence
  Synthetic oligonucleotide: CBLB-5268
augcuuuggauugucccgag

SEQ ID NO: 35472 - RNA, 21 nt, Artificial Sequence
  Synthetic oligonucleotide: CBLB-5269
caugcuuuggauugucccgag

SEQ ID NO: 35473 - RNA, 22 nt, Artificial Sequence
  Synthetic oligonucleotide: CBLB-5270
ccaugcuuuggauugucccgag

SEQ ID NO: 35474 - RNA, 23 nt, Artificial Sequence
  Synthetic oligonucleotide: CBLB-5271
accaugcuuuggauugucccgag

SEQ ID NO: 35475 - RNA, 24 nt, Artificial Sequence
  Synthetic oligonucleotide: CBLB-5272
aaccaugcuuuggauugucccgag

SEQ ID NO: 35476 - RNA, 18 nt, Artificial Sequence
  Synthetic oligonucleotide: CBLB-5273
gacuaugccuugcaggag

SEQ ID NO: 35477 - RNA, 19 nt, Artificial Sequence
  Synthetic oligonucleotide: CBLB-5274
agacuaugccuugcaggag

SEQ ID NO: 35478 - RNA, 20 nt, Artificial Sequence
  Synthetic oligonucleotide: CBLB-5275
gagacuaugccuugcaggag

SEQ ID NO: 35479 - RNA, 21 nt, Artificial Sequence
  Synthetic oligonucleotide: CBLB-5276
ugagacuaugccuugcaggag

SEQ ID NO: 35480 - RNA, 22 nt, Artificial Sequence
  Synthetic oligonucleotide: CBLB-5277
augagacuaugccuugcaggag

SEQ ID NO: 35481 - RNA, 23 nt, Artificial Sequence
  Synthetic oligonucleotide: CBLB-5278
aaugagacuaugccuugcaggag

SEQ ID NO: 35482 - RNA, 24 nt, Artificial Sequence
  Synthetic oligonucleotide: CBLB-5279
caaugagacuaugccuugcaggag

SEQ ID NO: 35483 - RNA, 18 nt, Artificial Sequence
  Synthetic oligonucleotide: CBLB-5280
ugguaacuggaggaggag

SEQ ID NO: 35484 - RNA, 19 nt, Artificial Sequence
  Synthetic oligonucleotide: CBLB-5281
gugguaacuggaggaggag

SEQ ID NO: 35485 - RNA, 20 nt, Artificial Sequence
  Synthetic oligonucleotide: CBLB-5282
ggugguaacuggaggaggag

SEQ ID NO: 35486 - RNA, 21 nt, Artificial Sequence
  Synthetic oligonucleotide: CBLB-5283
gggugguaacuggaggaggag

SEQ ID NO: 35487 - RNA, 22 nt, Artificial Sequence
  Synthetic oligonucleotide: CBLB-5284
agggugguaacuggaggaggag

SEQ ID NO: 35488 - RNA, 23 nt, Artificial Sequence
  Synthetic oligonucleotide: CBLB-5285
gagggugguaacuggaggaggag

SEQ ID NO: 35489 - RNA, 24 nt, Artificial Sequence
  Synthetic oligonucleotide: CBLB-5286
ggagggugguaacuggaggaggag

SEQ ID NO: 35490 - RNA, 18 nt, Artificial Sequence
  Synthetic oligonucleotide: CBLB-5287
gggugguaacuggaggag

SEQ ID NO: 35491 - RNA, 19 nt, Artificial Sequence
  Synthetic oligonucleotide: CBLB-5288
agggugguaacuggaggag

SEQ ID NO: 35492 - RNA, 20 nt, Artificial Sequence
  Synthetic oligonucleotide: CBLB-5289
gagggugguaacuggaggag

SEQ ID NO: 35493 - RNA, 21 nt, Artificial Sequence
  Synthetic oligonucleotide: CBLB-5290
ggagggugguaacuggaggag

SEQ ID NO: 35494 - RNA, 22 nt, Artificial Sequence
  Synthetic oligonucleotide: CBLB-5291
aggagggugguaacuggaggag

SEQ ID NO: 35495 - RNA, 23 nt, Artificial Sequence
  Synthetic oligonucleotide: CBLB-5292
gaggagggugguaacuggaggag

SEQ ID NO: 35496 - RNA, 24 nt, Artificial Sequence
  Synthetic oligonucleotide: CBLB-5293
ggaggagggugguaacuggaggag

SEQ ID NO: 35497 - RNA, 18 nt, Artificial Sequence
  Synthetic oligonucleotide: CBLB-5294
uugcaggaggugggggag

SEQ ID NO: 35498 - RNA, 19 nt, Artificial Sequence
  Synthetic oligonucleotide: CBLB-5295
cuugcaggaggugggggag

SEQ ID NO: 35499 - RNA, 20 nt, Artificial Sequence
  Synthetic oligonucleotide: CBLB-5296
ccuugcaggaggugggggag

SEQ ID NO: 35500 - RNA, 21 nt, Artificial Sequence
  Synthetic oligonucleotide: CBLB-5297
gccuugcaggaggugggggag

SEQ ID NO: 35501 - RNA, 22 nt, Artificial Sequence
  Synthetic oligonucleotide: CBLB-5298
ugccuugcaggaggugggggag

SEQ ID NO: 35502 - RNA, 23 nt, Artificial Sequence
  Synthetic oligonucleotide: CBLB-5299
augccuugcaggaggugggggag

SEQ ID NO: 35503 - RNA, 24 nt, Artificial Sequence
  Synthetic oligonucleotide: CBLB-5300
uaugccuugcaggaggugggggag

SEQ ID NO: 35504 - RNA, 18 nt, Artificial Sequence
  Synthetic oligonucleotide: CBLB-5301
uuccuggaauuuggggag

SEQ ID NO: 35505 - RNA, 19 nt, Artificial Sequence
  Synthetic oligonucleotide: CBLB-5302
guuccuggaauuuggggag

SEQ ID NO: 35506 - RNA, 20 nt, Artificial Sequence
  Synthetic oligonucleotide: CBLB-5303
uguuccuggaauuuggggag

SEQ ID NO: 35507 - RNA, 21 nt, Artificial Sequence
  Synthetic oligonucleotide: CBLB-5304
uuguuccuggaauuuggggag

SEQ ID NO: 35508 - RNA, 22 nt, Artificial Sequence
  Synthetic oligonucleotide: CBLB-5305
auuguuccuggaauuuggggag

SEQ ID NO: 35509 - RNA, 23 nt, Artificial Sequence
  Synthetic oligonucleotide: CBLB-5306
uauuguuccuggaauuuggggag

SEQ ID NO: 35510 - RNA, 24 nt, Artificial Sequence
  Synthetic oligonucleotide: CBLB-5307
auauuguuccuggaauuuggggag

SEQ ID NO: 35511 - RNA, 18 nt, Artificial Sequence
  Synthetic oligonucleotide: CBLB-5308
ggagggugguaacuggag

SEQ ID NO: 35512 - RNA, 19 nt, Artificial Sequence
  Synthetic oligonucleotide: CBLB-5309
aggagggugguaacuggag

SEQ ID NO: 35513 - RNA, 20 nt, Artificial Sequence
  Synthetic oligonucleotide: CBLB-5310
gaggagggugguaacuggag

SEQ ID NO: 35514 - RNA, 21 nt, Artificial Sequence
  Synthetic oligonucleotide: CBLB-5311
ggaggagggugguaacuggag

SEQ ID NO: 35515 - RNA, 22 nt, Artificial Sequence
  Synthetic oligonucleotide: CBLB-5312
gggaggagggugguaacuggag

SEQ ID NO: 35516 - RNA, 23 nt, Artificial Sequence
  Synthetic oligonucleotide: CBLB-5313
agggaggagggugguaacuggag

SEQ ID NO: 35517 - RNA, 24 nt, Artificial Sequence
  Synthetic oligonucleotide: CBLB-5314
uagggaggagggugguaacuggag

SEQ ID NO: 35518 - RNA, 18 nt, Artificial Sequence
  Synthetic oligonucleotide: CBLB-5315
gacguggggauacuggag

SEQ ID NO: 35519 - RNA, 19 nt, Artificial Sequence
  Synthetic oligonucleotide: CBLB-5316
agacguggggauacuggag

SEQ ID NO: 35520 - RNA, 20 nt, Artificial Sequence
  Synthetic oligonucleotide: CBLB-5317
uagacguggggauacuggag

SEQ ID NO: 35521 - RNA, 21 nt, Artificial Sequence
  Synthetic oligonucleotide: CBLB-5318
uuagacguggggauacuggag

SEQ ID NO: 35522 - RNA, 22 nt, Artificial Sequence
  Synthetic oligonucleotide: CBLB-5319
uuuagacguggggauacuggag

SEQ ID NO: 35523 - RNA, 23 nt, Artificial Sequence
  Synthetic oligonucleotide: CBLB-5320
auuuagacguggggauacuggag

SEQ ID NO: 35524 - RNA, 24 nt, Artificial Sequence
  Synthetic oligonucleotide: CBLB-5321
gauuuagacguggggauacuggag

SEQ ID NO: 35525 - RNA, 18 nt, Artificial Sequence
  Synthetic oligonucleotide: CBLB-5322
caccugguaaccuucuag

SEQ ID NO: 35526 - RNA, 19 nt, Artificial Sequence
  Synthetic oligonucleotide: CBLB-5323
ucaccugguaaccuucuag

SEQ ID NO: 35527 - RNA, 20 nt, Artificial Sequence
  Synthetic oligonucleotide: CBLB-5324
uucaccugguaaccuucuag

SEQ ID NO: 35528 - RNA, 21 nt, Artificial Sequence
  Synthetic oligonucleotide: CBLB-5325
uuucaccugguaaccuucuag

SEQ ID NO: 35529 - RNA, 22 nt, Artificial Sequence
  Synthetic oligonucleotide: CBLB-5326
uuuucaccugguaaccuucuag

SEQ ID NO: 35530 - RNA, 23 nt, Artificial Sequence
  Synthetic oligonucleotide: CBLB-5327
auuuucaccugguaaccuucuag

SEQ ID NO: 35531 - RNA, 24 nt, Artificial Sequence
  Synthetic oligonucleotide: CBLB-5328
cauuuucaccugguaaccuucuag

SEQ ID NO: 35532 - RNA, 18 nt, Artificial Sequence
  Synthetic oligonucleotide: CBLB-5329
cugcuauagauuuagacg

SEQ ID NO: 35533 - RNA, 19 nt, Artificial Sequence
  Synthetic oligonucleotide: CBLB-5330
gcugcuauagauuuagacg

SEQ ID NO: 35534 - RNA, 20 nt, Artificial Sequence
  Synthetic oligonucleotide: CBLB-3258
ggcugcuauagauuuagacg

SEQ ID NO: 35535 - RNA, 21 nt, Artificial Sequence
  Synthetic oligonucleotide: CBLB-5331
uggcugcuauagauuuagacg

SEQ ID NO: 35536 - RNA, 22 nt, Artificial Sequence
  Synthetic oligonucleotide: CBLB-5332
cuggcugcuauagauuuagacg

SEQ ID NO: 35537 - RNA, 23 nt, Artificial Sequence
  Synthetic oligonucleotide: CBLB-5333
ucuggcugcuauagauuuagacg

SEQ ID NO: 35538 - RNA, 24 nt, Artificial Sequence
  Synthetic oligonucleotide: CBLB-5334
uucuggcugcuauagauuuagacg

SEQ ID NO: 35539 - RNA, 18 nt, Artificial Sequence
  Synthetic oligonucleotide: CBLB-5335
cuaccuuuggugaacccg

SEQ ID NO: 35540 - RNA, 19 nt, Artificial Sequence
  Synthetic oligonucleotide: CBLB-5336
ucuaccuuuggugaacccg

SEQ ID NO: 35541 - RNA, 20 nt, Artificial Sequence
  Synthetic oligonucleotide: CBLB-5337
aucuaccuuuggugaacccg

SEQ ID NO: 35542 - RNA, 21 nt, Artificial Sequence
  Synthetic oligonucleotide: CBLB-5338
gaucuaccuuuggugaacccg

SEQ ID NO: 35543 - RNA, 22 nt, Artificial Sequence
  Synthetic oligonucleotide: CBLB-5339
ugaucuaccuuuggugaacccg

SEQ ID NO: 35544 - RNA, 23 nt, Artificial Sequence
  Synthetic oligonucleotide: CBLB-5340
uugaucuaccuuuggugaacccg

SEQ ID NO: 35545 - RNA, 24 nt, Artificial Sequence
  Synthetic oligonucleotide: CBLB-5341
auugaucuaccuuuggugaacccg

SEQ ID NO: 35546 - RNA, 18 nt, Artificial Sequence
  Synthetic oligonucleotide: CBLB-5342
aggaggaggagaaagccg

SEQ ID NO: 35547 - RNA, 19 nt, Artificial Sequence
  Synthetic oligonucleotide: CBLB-5343
gaggaggaggagaaagccg

SEQ ID NO: 35548 - RNA, 20 nt, Artificial Sequence
  Synthetic oligonucleotide: CBLB-1080
ggaggaggaggagaaagccg

SEQ ID NO: 35549 - RNA, 21 nt, Artificial Sequence
  Synthetic oligonucleotide: CBLB-5344
uggaggaggaggagaaagccg

SEQ ID NO: 35550 - RNA, 22 nt, Artificial Sequence
  Synthetic oligonucleotide: CBLB-5345
cuggaggaggaggagaaagccg

SEQ ID NO: 35551 - RNA, 23 nt, Artificial Sequence
  Synthetic oligonucleotide: CBLB-5346
acuggaggaggaggagaaagccg

SEQ ID NO: 35552 - RNA, 24 nt, Artificial Sequence
  Synthetic oligonucleotide: CBLB-5347
aacuggaggaggaggagaaagccg

SEQ ID NO: 35553 - RNA, 18 nt, Artificial Sequence
  Synthetic oligonucleotide: CBLB-5348
cugaauuagauccaggcg

SEQ ID NO: 35554 - RNA, 19 nt, Artificial Sequence
  Synthetic oligonucleotide: CBLB-5349
ucugaauuagauccaggcg

SEQ ID NO: 35555 - RNA, 20 nt, Artificial Sequence
  Synthetic oligonucleotide: CBLB-3260
uucugaauuagauccaggcg

SEQ ID NO: 35556 - RNA, 21 nt, Artificial Sequence
  Synthetic oligonucleotide: CBLB-5350
uuucugaauuagauccaggcg

SEQ ID NO: 35557 - RNA, 22 nt, Artificial Sequence
  Synthetic oligonucleotide: CBLB-5351
cuuucugaauuagauccaggcg

SEQ ID NO: 35558 - RNA, 23 nt, Artificial Sequence
  Synthetic oligonucleotide: CBLB-5352
ccuuucugaauuagauccaggcg

SEQ ID NO: 35559 - RNA, 24 nt, Artificial Sequence
  Synthetic oligonucleotide: CBLB-5353
gccuuucugaauuagauccaggcg

SEQ ID NO: 35560 - RNA, 18 nt, Artificial Sequence
  Synthetic oligonucleotide: CBLB-5354
gaggucuuucagguggcg

SEQ ID NO: 35561 - RNA, 19 nt, Artificial Sequence
  Synthetic oligonucleotide: CBLB-5355
ggaggucuuucagguggcg

SEQ ID NO: 35562 - RNA, 20 nt, Artificial Sequence
  Synthetic oligonucleotide: CBLB-5356
uggaggucuuucagguggcg

SEQ ID NO: 35563 - RNA, 21 nt, Artificial Sequence
  Synthetic oligonucleotide: CBLB-5357
guggaggucuuucagguggcg

SEQ ID NO: 35564 - RNA, 22 nt, Artificial Sequence
  Synthetic oligonucleotide: CBLB-5358
gguggaggucuuucagguggcg

SEQ ID NO: 35565 - RNA, 23 nt, Artificial Sequence
  Synthetic oligonucleotide: CBLB-5359
ugguggaggucuuucagguggcg

SEQ ID NO: 35566 - RNA, 24 nt, Artificial Sequence
  Synthetic oligonucleotide: CBLB-5360
uugguggaggucuuucagguggcg

SEQ ID NO: 35567 - RNA, 18 nt, Artificial Sequence
  Synthetic oligonucleotide: CBLB-5361
cgauaguucugugcaagg

SEQ ID NO: 35568 - RNA, 19 nt, Artificial Sequence
  Synthetic oligonucleotide: CBLB-5362
acgauaguucugugcaagg

SEQ ID NO: 35569 - RNA, 20 nt, Artificial Sequence
  Synthetic oligonucleotide: CBLB-3264
uacgauaguucugugcaagg

SEQ ID NO: 35570 - RNA, 21 nt, Artificial Sequence
  Synthetic oligonucleotide: CBLB-5363
guacgauaguucugugcaagg

SEQ ID NO: 35571 - RNA, 22 nt, Artificial Sequence
  Synthetic oligonucleotide: CBLB-5364
gguacgauaguucugugcaagg

SEQ ID NO: 35572 - RNA, 23 nt, Artificial Sequence
  Synthetic oligonucleotide: CBLB-5365
ugguacgauaguucugugcaagg

SEQ ID NO: 35573 - RNA, 24 nt, Artificial Sequence
  Synthetic oligonucleotide: CBLB-5366
augguacgauaguucugugcaagg

SEQ ID NO: 35574 - RNA, 18 nt, Artificial Sequence
  Synthetic oligonucleotide: CBLB-5367
uucccuccuaccugaagg

SEQ ID NO: 35575 - RNA, 19 nt, Artificial Sequence
  Synthetic oligonucleotide: CBLB-5368
uuucccuccuaccugaagg

SEQ ID NO: 35576 - RNA, 20 nt, Artificial Sequence
  Synthetic oligonucleotide: CBLB-5369
uuuucccuccuaccugaagg

SEQ ID NO: 35577 - RNA, 21 nt, Artificial Sequence
  Synthetic oligonucleotide: CBLB-5370
cuuuucccuccuaccugaagg

SEQ ID NO: 35578 - RNA, 22 nt, Artificial Sequence
  Synthetic oligonucleotide: CBLB-5371
gcuuuucccuccuaccugaagg

SEQ ID NO: 35579 - RNA, 23 nt, Artificial Sequence
  Synthetic oligonucleotide: CBLB-5372
ggcuuuucccuccuaccugaagg

SEQ ID NO: 35580 - RNA, 24 nt, Artificial Sequence
  Synthetic oligonucleotide: CBLB-5373
uggcuuuucccuccuaccugaagg

SEQ ID NO: 35581 - RNA, 18 nt, Artificial Sequence
  Synthetic oligonucleotide: CBLB-5374
gaggaggaucucuuaagg

SEQ ID NO: 35582 - RNA, 19 nt, Artificial Sequence
  Synthetic oligonucleotide: CBLB-5375
ggaggaggaucucuuaagg

SEQ ID NO: 35583 - RNA, 20 nt, Artificial Sequence
  Synthetic oligonucleotide: CBLB-5376
uggaggaggaucucuuaagg

SEQ ID NO: 35584 - RNA, 21 nt, Artificial Sequence
  Synthetic oligonucleotide: CBLB-5377
guggaggaggaucucuuaagg

SEQ ID NO: 35585 - RNA, 22 nt, Artificial Sequence
  Synthetic oligonucleotide: CBLB-5378
gguggaggaggaucucuuaagg

SEQ ID NO: 35586 - RNA, 23 nt, Artificial Sequence
  Synthetic oligonucleotide: CBLB-5379
cgguggaggaggaucucuuaagg

SEQ ID NO: 35587 - RNA, 24 nt, Artificial Sequence
  Synthetic oligonucleotide: CBLB-5380
gcgguggaggaggaucucuuaagg

SEQ ID NO: 35588 - RNA, 18 nt, Artificial Sequence
  Synthetic oligonucleotide: CBLB-5381
ugaauucagggaaacagg

SEQ ID NO: 35589 - RNA, 19 nt, Artificial Sequence
  Synthetic oligonucleotide: CBLB-5382
gugaauucagggaaacagg

SEQ ID NO: 35590 - RNA, 20 nt, Artificial Sequence
  Synthetic oligonucleotide: CBLB-5383
ugugaauucagggaaacagg

SEQ ID NO: 35591 - RNA, 21 nt, Artificial Sequence
  Synthetic oligonucleotide: CBLB-5384
uugugaauucagggaaacagg

SEQ ID NO: 35592 - RNA, 22 nt, Artificial Sequence
  Synthetic oligonucleotide: CBLB-5385
guugugaauucagggaaacagg

SEQ ID NO: 35593 - RNA, 23 nt, Artificial Sequence
  Synthetic oligonucleotide: CBLB-5386
gguugugaauucagggaaacagg

SEQ ID NO: 35594 - RNA, 24 nt, Artificial Sequence
  Synthetic oligonucleotide: CBLB-5387
ugguugugaauucagggaaacagg

SEQ ID NO: 35595 - RNA, 18 nt, Artificial Sequence
  Synthetic oligonucleotide: CBLB-5388
acuaugccuugcaggagg

SEQ ID NO: 35596 - RNA, 19 nt, Artificial Sequence
  Synthetic oligonucleotide: CBLB-5389
gacuaugccuugcaggagg

SEQ ID NO: 35597 - RNA, 20 nt, Artificial Sequence
  Synthetic oligonucleotide: CBLB-3272
agacuaugccuugcaggagg

SEQ ID NO: 35598 - RNA, 21 nt, Artificial Sequence
  Synthetic oligonucleotide: CBLB-5390
gagacuaugccuugcaggagg

SEQ ID NO: 35599 - RNA, 22 nt, Artificial Sequence
  Synthetic oligonucleotide: CBLB-5391
ugagacuaugccuugcaggagg

SEQ ID NO: 35600 - RNA, 23 nt, Artificial Sequence
  Synthetic oligonucleotide: CBLB-5392
augagacuaugccuugcaggagg

SEQ ID NO: 35601 - RNA, 24 nt, Artificial Sequence
  Synthetic oligonucleotide: CBLB-5393
aaugagacuaugccuugcaggagg

SEQ ID NO: 35602 - RNA, 18 nt, Artificial Sequence
  Synthetic oligonucleotide: CBLB-5394
uggaauuuggggaggagg

SEQ ID NO: 35603 - RNA, 19 nt, Artificial Sequence
  Synthetic oligonucleotide: CBLB-5395
cuggaauuuggggaggagg

SEQ ID NO: 35604 - RNA, 20 nt, Artificial Sequence
  Synthetic oligonucleotide: CBLB-5396
ccuggaauuuggggaggagg

SEQ ID NO: 35605 - RNA, 21 nt, Artificial Sequence
  Synthetic oligonucleotide: CBLB-5397
uccuggaauuuggggaggagg

SEQ ID NO: 35606 - RNA, 22 nt, Artificial Sequence
  Synthetic oligonucleotide: CBLB-5398
uuccuggaauuuggggaggagg

SEQ ID NO: 35607 - RNA, 23 nt, Artificial Sequence
  Synthetic oligonucleotide: CBLB-5399
guuccuggaauuuggggaggagg

SEQ ID NO: 35608 - RNA, 24 nt, Artificial Sequence
  Synthetic oligonucleotide: CBLB-5400
uguuccuggaauuuggggaggagg

SEQ ID NO: 35609 - RNA, 18 nt, Artificial Sequence
  Synthetic oligonucleotide: CBLB-5401
ggugguaacuggaggagg

SEQ ID NO: 35610 - RNA, 19 nt, Artificial Sequence
  Synthetic oligonucleotide: CBLB-5402
gggugguaacuggaggagg

SEQ ID NO: 35611 - RNA, 20 nt, Artificial Sequence
  Synthetic oligonucleotide: CBLB-3274
agggugguaacuggaggagg

SEQ ID NO: 35612 - RNA, 21 nt, Artificial Sequence
  Synthetic oligonucleotide: CBLB-5403
gagggugguaacuggaggagg

SEQ ID NO: 35613 - RNA, 22 nt, Artificial Sequence
  Synthetic oligonucleotide: CBLB-5404
ggagggugguaacuggaggagg

SEQ ID NO: 35614 - RNA, 23 nt, Artificial Sequence
  Synthetic oligonucleotide: CBLB-5405
aggagggugguaacuggaggagg

SEQ ID NO: 35615 - RNA, 24 nt, Artificial Sequence
  Synthetic oligonucleotide: CBLB-5406
gaggagggugguaacuggaggagg

SEQ ID NO: 35616 - RNA, 18 nt, Artificial Sequence
  Synthetic oligonucleotide: CBLB-5407
ugcaggaggugggggagg

SEQ ID NO: 35617 - RNA, 19 nt, Artificial Sequence
  Synthetic oligonucleotide: CBLB-5408
uugcaggaggugggggagg

SEQ ID NO: 35618 - RNA, 20 nt, Artificial Sequence
  Synthetic oligonucleotide: CBLB-3277
cuugcaggaggugggggagg

SEQ ID NO: 35619 - RNA, 21 nt, Artificial Sequence
  Synthetic oligonucleotide: CBLB-5409
ccuugcaggaggugggggagg

SEQ ID NO: 35620 - RNA, 22 nt, Artificial Sequence
  Synthetic oligonucleotide: CBLB-5410
gccuugcaggaggugggggagg

SEQ ID NO: 35621 - RNA, 23 nt, Artificial Sequence
  Synthetic oligonucleotide: CBLB-5411
ugccuugcaggaggugggggagg

SEQ ID NO: 35622 - RNA, 24 nt, Artificial Sequence
  Synthetic oligonucleotide: CBLB-5412
augccuugcaggaggugggggagg

SEQ ID NO: 35623 - RNA, 18 nt, Artificial Sequence
  Synthetic oligonucleotide: CBLB-5413
uccuggaauuuggggagg

SEQ ID NO: 35624 - RNA, 19 nt, Artificial Sequence
  Synthetic oligonucleotide: CBLB-5414
uuccuggaauuuggggagg

SEQ ID NO: 35625 - RNA, 20 nt, Artificial Sequence
  Synthetic oligonucleotide: CBLB-3278
guuccuggaauuuggggagg

SEQ ID NO: 35626 - RNA, 21 nt, Artificial Sequence
  Synthetic oligonucleotide: CBLB-5415
uguuccuggaauuuggggagg

SEQ ID NO: 35627 - RNA, 22 nt, Artificial Sequence
  Synthetic oligonucleotide: CBLB-5416
uuguuccuggaauuuggggagg

SEQ ID NO: 35628 - RNA, 23 nt, Artificial Sequence
  Synthetic oligonucleotide: CBLB-5417
auuguuccuggaauuuggggagg

SEQ ID NO: 35629 - RNA, 24 nt, Artificial Sequence
  Synthetic oligonucleotide: CBLB-5418
uauuguuccuggaauuuggggagg

SEQ ID NO: 35630 - RNA, 18 nt, Artificial Sequence
  Synthetic oligonucleotide: CBLB-5419
aggugggagagauggagg

SEQ ID NO: 35631 - RNA, 19 nt, Artificial Sequence
  Synthetic oligonucleotide: CBLB-5420
gaggugggagagauggagg

SEQ ID NO: 35632 - RNA, 20 nt, Artificial Sequence
  Synthetic oligonucleotide: CBLB-5421
ggaggugggagagauggagg

SEQ ID NO: 35633 - RNA, 21 nt, Artificial Sequence
  Synthetic oligonucleotide: CBLB-5422
gggaggugggagagauggagg

SEQ ID NO: 35634 - RNA, 22 nt, Artificial Sequence
  Synthetic oligonucleotide: CBLB-5423
ggggaggugggagagauggagg

SEQ ID NO: 35635 - RNA, 23 nt, Artificial Sequence
  Synthetic oligonucleotide: CBLB-5424
gggggaggugggagagauggagg

SEQ ID NO: 35636 - RNA, 24 nt, Artificial Sequence
  Synthetic oligonucleotide: CBLB-5425
ugggggaggugggagagauggagg

SEQ ID NO: 35637 - RNA, 18 nt, Artificial Sequence
  Synthetic oligonucleotide: CBLB-5426
gagggugguaacuggagg

SEQ ID NO: 35638 - RNA, 19 nt, Artificial Sequence
  Synthetic oligonucleotide: CBLB-5427
ggagggugguaacuggagg

SEQ ID NO: 35639 - RNA, 20 nt, Artificial Sequence
  Synthetic oligonucleotide: CBLB-3279
aggagggugguaacuggagg

SEQ ID NO: 35640 - RNA, 21 nt, Artificial Sequence
  Synthetic oligonucleotide: CBLB-5428
gaggagggugguaacuggagg

SEQ ID NO: 35641 - RNA, 22 nt, Artificial Sequence
  Synthetic oligonucleotide: CBLB-5429
ggaggagggugguaacuggagg

SEQ ID NO: 35642 - RNA, 23 nt, Artificial Sequence
  Synthetic oligonucleotide: CBLB-5430
gggaggagggugguaacuggagg

SEQ ID NO: 35643 - RNA, 24 nt, Artificial Sequence
  Synthetic oligonucleotide: CBLB-5431
agggaggagggugguaacuggagg

SEQ ID NO: 35644 - RNA, 18 nt, Artificial Sequence
  Synthetic oligonucleotide: CBLB-5432
acguggggauacuggagg

SEQ ID NO: 35645 - RNA, 19 nt, Artificial Sequence
  Synthetic oligonucleotide: CBLB-5433
gacguggggauacuggagg

SEQ ID NO: 35646 - RNA, 20 nt, Artificial Sequence
  Synthetic oligonucleotide: CBLB-3280
agacguggggauacuggagg

SEQ ID NO: 35647 - RNA, 21 nt, Artificial Sequence
  Synthetic oligonucleotide: CBLB-5434
uagacguggggauacuggagg

SEQ ID NO: 35648 - RNA, 22 nt, Artificial Sequence
  Synthetic oligonucleotide: CBLB-5435
uuagacguggggauacuggagg

SEQ ID NO: 35649 - RNA, 23 nt, Artificial Sequence
  Synthetic oligonucleotide: CBLB-5436
uuuagacguggggauacuggagg

SEQ ID NO: 35650 - RNA, 24 nt, Artificial Sequence
  Synthetic oligonucleotide: CBLB-5437
auuuagacguggggauacuggagg

SEQ ID NO: 35651 - RNA, 18 nt, Artificial Sequence
  Synthetic oligonucleotide: CBLB-5438
aacucacuuuaugcuagg

SEQ ID NO: 35652 - RNA, 19 nt, Artificial Sequence
  Synthetic oligonucleotide: CBLB-5439
aaacucacuuuaugcuagg

SEQ ID NO: 35653 - RNA, 20 nt, Artificial Sequence
  Synthetic oligonucleotide: CBLB-5440
aaaacucacuuuaugcuagg

SEQ ID NO: 35654 - RNA, 21 nt, Artificial Sequence
  Synthetic oligonucleotide: CBLB-5441
caaaacucacuuuaugcuagg

SEQ ID NO: 35655 - RNA, 22 nt, Artificial Sequence
  Synthetic oligonucleotide: CBLB-5442
acaaaacucacuuuaugcuagg

SEQ ID NO: 35656 - RNA, 23 nt, Artificial Sequence
  Synthetic oligonucleotide: CBLB-5443
aacaaaacucacuuuaugcuagg

SEQ ID NO: 35657 - RNA, 24 nt, Artificial Sequence
  Synthetic oligonucleotide: CBLB-5444
caacaaaacucacuuuaugcuagg

SEQ ID NO: 35658 - RNA, 18 nt, Artificial Sequence
  Synthetic oligonucleotide: CBLB-5445
aggucuuucagguggcgg

SEQ ID NO: 35659 - RNA, 19 nt, Artificial Sequence
  Synthetic oligonucleotide: CBLB-5446
gaggucuuucagguggcgg

SEQ ID NO: 35660 - RNA, 20 nt, Artificial Sequence
  Synthetic oligonucleotide: CBLB-3285
ggaggucuuucagguggcgg

SEQ ID NO: 35661 - RNA, 21 nt, Artificial Sequence
  Synthetic oligonucleotide: CBLB-5447
uggaggucuuucagguggcgg

SEQ ID NO: 35662 - RNA, 22 nt, Artificial Sequence
  Synthetic oligonucleotide: CBLB-5448
guggaggucuuucagguggcgg

SEQ ID NO: 35663 - RNA, 23 nt, Artificial Sequence
  Synthetic oligonucleotide: CBLB-5449
gguggaggucuuucagguggcgg

SEQ ID NO: 35664 - RNA, 24 nt, Artificial Sequence
  Synthetic oligonucleotide: CBLB-5450
ugguggaggucuuucagguggcgg

SEQ ID NO: 35665 - RNA, 18 nt, Artificial Sequence
  Synthetic oligonucleotide: CBLB-5451
uucuucucugggcaaggg

SEQ ID NO: 35666 - RNA, 19 nt, Artificial Sequence
  Synthetic oligonucleotide: CBLB-5452
uuucuucucugggcaaggg

SEQ ID NO: 35667 - RNA, 20 nt, Artificial Sequence
  Synthetic oligonucleotide: CBLB-5453
cuuucuucucugggcaaggg

SEQ ID NO: 35668 - RNA, 21 nt, Artificial Sequence
  Synthetic oligonucleotide: CBLB-5454
gcuuucuucucugggcaaggg

SEQ ID NO: 35669 - RNA, 22 nt, Artificial Sequence
  Synthetic oligonucleotide: CBLB-5455
ggcuuucuucucugggcaaggg

SEQ ID NO: 35670 - RNA, 23 nt, Artificial Sequence
  Synthetic oligonucleotide: CBLB-5456
uggcuuucuucucugggcaaggg

SEQ ID NO: 35671 - RNA, 24 nt, Artificial Sequence
  Synthetic oligonucleotide: CBLB-5457
guggcuuucuucucugggcaaggg

SEQ ID NO: 35672 - RNA, 18 nt, Artificial Sequence
  Synthetic oligonucleotide: CBLB-5458
aggaggaucucuuaaggg

SEQ ID NO: 35673 - RNA, 19 nt, Artificial Sequence
  Synthetic oligonucleotide: CBLB-5459
gaggaggaucucuuaaggg

SEQ ID NO: 35674 - RNA, 20 nt, Artificial Sequence
  Synthetic oligonucleotide: CBLB-3287
ggaggaggaucucuuaaggg

SEQ ID NO: 35675 - RNA, 21 nt, Artificial Sequence
  Synthetic oligonucleotide: CBLB-5460
uggaggaggaucucuuaaggg

SEQ ID NO: 35676 - RNA, 22 nt, Artificial Sequence
  Synthetic oligonucleotide: CBLB-5461
guggaggaggaucucuuaaggg

SEQ ID NO: 35677 - RNA, 23 nt, Artificial Sequence
  Synthetic oligonucleotide: CBLB-5462
gguggaggaggaucucuuaaggg

SEQ ID NO: 35678 - RNA, 24 nt, Artificial Sequence
  Synthetic oligonucleotide: CBLB-5463
cgguggaggaggaucucuuaaggg

SEQ ID NO: 35679 - RNA, 18 nt, Artificial Sequence
  Synthetic oligonucleotide: CBLB-5464
uuucaaccuaauggaggg

SEQ ID NO: 35680 - RNA, 19 nt, Artificial Sequence
  Synthetic oligonucleotide: CBLB-5465
guuucaaccuaauggaggg

SEQ ID NO: 35681 - RNA, 20 nt, Artificial Sequence
  Synthetic oligonucleotide: CBLB-5466
gguuucaaccuaauggaggg

SEQ ID NO: 35682 - RNA, 21 nt, Artificial Sequence
  Synthetic oligonucleotide: CBLB-5467
agguuucaaccuaauggaggg

SEQ ID NO: 35683 - RNA, 22 nt, Artificial Sequence
  Synthetic oligonucleotide: CBLB-5468
aagguuucaaccuaauggaggg

SEQ ID NO: 35684 - RNA, 23 nt, Artificial Sequence
  Synthetic oligonucleotide: CBLB-5469
aaagguuucaaccuaauggaggg

SEQ ID NO: 35685 - RNA, 24 nt, Artificial Sequence
  Synthetic oligonucleotide: CBLB-5470
uaaagguuucaaccuaauggaggg

SEQ ID NO: 35686 - RNA, 18 nt, Artificial Sequence
  Synthetic oligonucleotide: CBLB-5471
acucacuuuaugcuaggg

SEQ ID NO: 35687 - RNA, 19 nt, Artificial Sequence
  Synthetic oligonucleotide: CBLB-5472
aacucacuuuaugcuaggg

SEQ ID NO: 35688 - RNA, 20 nt, Artificial Sequence
  Synthetic oligonucleotide: CBLB-3291
aaacucacuuuaugcuaggg

SEQ ID NO: 35689 - RNA, 21 nt, Artificial Sequence
  Synthetic oligonucleotide: CBLB-5473
aaaacucacuuuaugcuaggg

SEQ ID NO: 35690 - RNA, 22 nt, Artificial Sequence
  Synthetic oligonucleotide: CBLB-5474
caaaacucacuuuaugcuaggg

SEQ ID NO: 35691 - RNA, 23 nt, Artificial Sequence
  Synthetic oligonucleotide: CBLB-5475
acaaaacucacuuuaugcuaggg

SEQ ID NO: 35692 - RNA, 24 nt, Artificial Sequence
  Synthetic oligonucleotide: CBLB-5476
aacaaaacucacuuuaugcuaggg

SEQ ID NO: 35693 - RNA, 18 nt, Artificial Sequence
  Synthetic oligonucleotide: CBLB-5477
gaggaggagaaagccggg

SEQ ID NO: 35694 - RNA, 19 nt, Artificial Sequence
  Synthetic oligonucleotide: CBLB-5478
ggaggaggagaaagccggg

SEQ ID NO: 35695 - RNA, 20 nt, Artificial Sequence
  Synthetic oligonucleotide: CBLB-5479
aggaggaggagaaagccggg

SEQ ID NO: 35696 - RNA, 21 nt, Artificial Sequence
  Synthetic oligonucleotide: CBLB-5480
gaggaggaggagaaagccggg

SEQ ID NO: 35697 - RNA, 22 nt, Artificial Sequence
  Synthetic oligonucleotide: CBLB-5481
ggaggaggaggagaaagccggg

SEQ ID NO: 35698 - RNA, 23 nt, Artificial Sequence
  Synthetic oligonucleotide: CBLB-5482
uggaggaggaggagaaagccggg

SEQ ID NO: 35699 - RNA, 24 nt, Artificial Sequence
  Synthetic oligonucleotide: CBLB-5483
cuggaggaggaggagaaagccggg

SEQ ID NO: 35700 - RNA, 18 nt, Artificial Sequence
  Synthetic oligonucleotide: CBLB-5484
aggaggagaaagccgggg

SEQ ID NO: 35701 - RNA, 19 nt, Artificial Sequence
  Synthetic oligonucleotide: CBLB-5485
gaggaggagaaagccgggg

SEQ ID NO: 35702 - RNA, 20 nt, Artificial Sequence
  Synthetic oligonucleotide: CBLB-1079
ggaggaggagaaagccgggg

SEQ ID NO: 35703 - RNA, 21 nt, Artificial Sequence
  Synthetic oligonucleotide: CBLB-5486
aggaggaggagaaagccgggg

SEQ ID NO: 35704 - RNA, 22 nt, Artificial Sequence
  Synthetic oligonucleotide: CBLB-5487
gaggaggaggagaaagccgggg

SEQ ID NO: 35705 - RNA, 23 nt, Artificial Sequence
  Synthetic oligonucleotide: CBLB-5488
ggaggaggaggagaaagccgggg

SEQ ID NO: 35706 - RNA, 24 nt, Artificial Sequence
  Synthetic oligonucleotide: CBLB-5489
uggaggaggaggagaaagccgggg

SEQ ID NO: 35707 - RNA, 18 nt, Artificial Sequence
  Synthetic oligonucleotide: CBLB-5490
uguuccuggaauuugggg

SEQ ID NO: 35708 - RNA, 19 nt, Artificial Sequence
  Synthetic oligonucleotide: CBLB-5491
uuguuccuggaauuugggg

SEQ ID NO: 35709 - RNA, 20 nt, Artificial Sequence
  Synthetic oligonucleotide: CBLB-3295
auuguuccuggaauuugggg

SEQ ID NO: 35710 - RNA, 21 nt, Artificial Sequence
  Synthetic oligonucleotide: CBLB-5492
uauuguuccuggaauuugggg

SEQ ID NO: 35711 - RNA, 22 nt, Artificial Sequence
  Synthetic oligonucleotide: CBLB-5493
auauuguuccuggaauuugggg

SEQ ID NO: 35712 - RNA, 23 nt, Artificial Sequence
  Synthetic oligonucleotide: CBLB-5494
cauauuguuccuggaauuugggg

SEQ ID NO: 35713 - RNA, 24 nt, Artificial Sequence
  Synthetic oligonucleotide: CBLB-5495
ucauauuguuccuggaauuugggg

SEQ ID NO: 35714 - RNA, 18 nt, Artificial Sequence
  Synthetic oligonucleotide: CBLB-5496
ucagggaaacaggguggg

SEQ ID NO: 35715 - RNA, 19 nt, Artificial Sequence
  Synthetic oligonucleotide: CBLB-5497
uucagggaaacaggguggg

SEQ ID NO: 35716 - RNA, 20 nt, Artificial Sequence
  Synthetic oligonucleotide: CBLB-5498
auucagggaaacaggguggg

SEQ ID NO: 35717 - RNA, 21 nt, Artificial Sequence
  Synthetic oligonucleotide: CBLB-5499
aauucagggaaacaggguggg

SEQ ID NO: 35718 - RNA, 22 nt, Artificial Sequence
  Synthetic oligonucleotide: CBLB-5500
gaauucagggaaacaggguggg

SEQ ID NO: 35719 - RNA, 23 nt, Artificial Sequence
  Synthetic oligonucleotide: CBLB-5501
ugaauucagggaaacaggguggg

SEQ ID NO: 35720 - RNA, 24 nt, Artificial Sequence
  Synthetic oligonucleotide: CBLB-5502
gugaauucagggaaacaggguggg

SEQ ID NO: 35721 - RNA, 18 nt, Artificial Sequence
  Synthetic oligonucleotide: CBLB-5503
uuguuccuggaauuuggg

SEQ ID NO: 35722 - RNA, 19 nt, Artificial Sequence
  Synthetic oligonucleotide: CBLB-5504
auuguuccuggaauuuggg

SEQ ID NO: 35723 - RNA, 20 nt, Artificial Sequence
  Synthetic oligonucleotide: CBLB-5505
uauuguuccuggaauuuggg

SEQ ID NO: 35724 - RNA, 21 nt, Artificial Sequence
  Synthetic oligonucleotide: CBLB-5506
auauuguuccuggaauuuggg

SEQ ID NO: 35725 - RNA, 22 nt, Artificial Sequence
  Synthetic oligonucleotide: CBLB-5507
cauauuguuccuggaauuuggg

SEQ ID NO: 35726 - RNA, 23 nt, Artificial Sequence
  Synthetic oligonucleotide: CBLB-5508
ucauauuguuccuggaauuuggg

SEQ ID NO: 35727 - RNA, 24 nt, Artificial Sequence
  Synthetic oligonucleotide: CBLB-5509
uucauauuguuccuggaauuuggg

SEQ ID NO: 35728 - RNA, 18 nt, Artificial Sequence
  Synthetic oligonucleotide: CBLB-5510
gggaggugggagagaugg

SEQ ID NO: 35729 - RNA, 19 nt, Artificial Sequence
  Synthetic oligonucleotide: CBLB-5511
ggggaggugggagagaugg

SEQ ID NO: 35730 - RNA, 20 nt, Artificial Sequence
  Synthetic oligonucleotide: CBLB-3298
gggggaggugggagagaugg

SEQ ID NO: 35731 - RNA, 21 nt, Artificial Sequence
  Synthetic oligonucleotide: CBLB-5512
ugggggaggugggagagaugg

SEQ ID NO: 35732 - RNA, 22 nt, Artificial Sequence
  Synthetic oligonucleotide: CBLB-5513
gugggggaggugggagagaugg

SEQ ID NO: 35733 - RNA, 23 nt, Artificial Sequence
  Synthetic oligonucleotide: CBLB-5514
ggugggggaggugggagagaugg

SEQ ID NO: 35734 - RNA, 24 nt, Artificial Sequence
  Synthetic oligonucleotide: CBLB-5515
aggugggggaggugggagagaugg

SEQ ID NO: 35735 - RNA, 18 nt, Artificial Sequence
  Synthetic oligonucleotide: CBLB-5516
gaggagggugguaacugg

SEQ ID NO: 35736 - RNA, 19 nt, Artificial Sequence
  Synthetic oligonucleotide: CBLB-5517
ggaggagggugguaacugg

SEQ ID NO: 35737 - RNA, 20 nt, Artificial Sequence
  Synthetic oligonucleotide: CBLB-3299
gggaggagggugguaacugg

SEQ ID NO: 35738 - RNA, 21 nt, Artificial Sequence
  Synthetic oligonucleotide: CBLB-5518
agggaggagggugguaacugg

SEQ ID NO: 35739 - RNA, 22 nt, Artificial Sequence
  Synthetic oligonucleotide: CBLB-5519
uagggaggagggugguaacugg

SEQ ID NO: 35740 - RNA, 23 nt, Artificial Sequence
  Synthetic oligonucleotide: CBLB-5520
cuagggaggagggugguaacugg

SEQ ID NO: 35741 - RNA, 24 nt, Artificial Sequence
  Synthetic oligonucleotide: CBLB-5521
gcuagggaggagggugguaacugg

SEQ ID NO: 35742 - RNA, 18 nt, Artificial Sequence
  Synthetic oligonucleotide: CBLB-5522
uagacguggggauacugg

SEQ ID NO: 35743 - RNA, 19 nt, Artificial Sequence
  Synthetic oligonucleotide: CBLB-5523
uuagacguggggauacugg

SEQ ID NO: 35744 - RNA, 20 nt, Artificial Sequence
  Synthetic oligonucleotide: CBLB-3300
uuuagacguggggauacugg

SEQ ID NO: 35745 - RNA, 21 nt, Artificial Sequence
  Synthetic oligonucleotide: CBLB-5524
auuuagacguggggauacugg

SEQ ID NO: 35746 - RNA, 22 nt, Artificial Sequence
  Synthetic oligonucleotide: CBLB-5525
gauuuagacguggggauacugg

SEQ ID NO: 35747 - RNA, 23 nt, Artificial Sequence
  Synthetic oligonucleotide: CBLB-5526
agauuuagacguggggauacugg

SEQ ID NO: 35748 - RNA, 24 nt, Artificial Sequence
  Synthetic oligonucleotide: CBLB-5527
uagauuuagacguggggauacugg

SEQ ID NO: 35749 - RNA, 18 nt, Artificial Sequence
  Synthetic oligonucleotide: CBLB-5528
augccuugcaggaggugg

SEQ ID NO: 35750 - RNA, 19 nt, Artificial Sequence
  Synthetic oligonucleotide: CBLB-5529
uaugccuugcaggaggugg

SEQ ID NO: 35751 - RNA, 20 nt, Artificial Sequence
  Synthetic oligonucleotide: CBLB-3304
cuaugccuugcaggaggugg

SEQ ID NO: 35752 - RNA, 21 nt, Artificial Sequence
  Synthetic oligonucleotide: CBLB-5530
acuaugccuugcaggaggugg

SEQ ID NO: 35753 - RNA, 22 nt, Artificial Sequence
  Synthetic oligonucleotide: CBLB-5531
gacuaugccuugcaggaggugg

SEQ ID NO: 35754 - RNA, 23 nt, Artificial Sequence
  Synthetic oligonucleotide: CBLB-5532
agacuaugccuugcaggaggugg

SEQ ID NO: 35755 - RNA, 24 nt, Artificial Sequence
  Synthetic oligonucleotide: CBLB-5533
gagacuaugccuugcaggaggugg

SEQ ID NO: 35756 - RNA, 18 nt, Artificial Sequence
  Synthetic oligonucleotide: CBLB-5534
aggaggugggggaggugg

SEQ ID NO: 35757 - RNA, 19 nt, Artificial Sequence
  Synthetic oligonucleotide: CBLB-5535
caggaggugggggaggugg

SEQ ID NO: 35758 - RNA, 20 nt, Artificial Sequence
  Synthetic oligonucleotide: CBLB-5536
gcaggaggugggggaggugg

SEQ ID NO: 35759 - RNA, 21 nt, Artificial Sequence
  Synthetic oligonucleotide: CBLB-5537
ugcaggaggugggggaggugg

SEQ ID NO: 35760 - RNA, 22 nt, Artificial Sequence
  Synthetic oligonucleotide: CBLB-5538
uugcaggaggugggggaggugg

SEQ ID NO: 35761 - RNA, 23 nt, Artificial Sequence
  Synthetic oligonucleotide: CBLB-5539
cuugcaggaggugggggaggugg

SEQ ID NO: 35762 - RNA, 24 nt, Artificial Sequence
  Synthetic oligonucleotide: CBLB-5540
ccuugcaggaggugggggaggugg

SEQ ID NO: 35763 - RNA, 18 nt, Artificial Sequence
  Synthetic oligonucleotide: CBLB-5541
ucuuucagguggcggugg

SEQ ID NO: 35764 - RNA, 19 nt, Artificial Sequence
  Synthetic oligonucleotide: CBLB-5542
gucuuucagguggcggugg

SEQ ID NO: 35765 - RNA, 20 nt, Artificial Sequence
  Synthetic oligonucleotide: CBLB-3305
ggucuuucagguggcggugg

SEQ ID NO: 35766 - RNA, 21 nt, Artificial Sequence
  Synthetic oligonucleotide: CBLB-5543
aggucuuucagguggcggugg

SEQ ID NO: 35767 - RNA, 22 nt, Artificial Sequence
  Synthetic oligonucleotide: CBLB-5544
gaggucuuucagguggcggugg

SEQ ID NO: 35768 - RNA, 23 nt, Artificial Sequence
  Synthetic oligonucleotide: CBLB-5545
ggaggucuuucagguggcggugg

SEQ ID NO: 35769 - RNA, 24 nt, Artificial Sequence
  Synthetic oligonucleotide: CBLB-5546
uggaggucuuucagguggcggugg

SEQ ID NO: 35770 - RNA, 18 nt, Artificial Sequence
  Synthetic oligonucleotide: CBLB-5547
auugucuggugggauugg

SEQ ID NO: 35771 - RNA, 19 nt, Artificial Sequence
  Synthetic oligonucleotide: CBLB-5548
uauugucuggugggauugg

SEQ ID NO: 35772 - RNA, 20 nt, Artificial Sequence
  Synthetic oligonucleotide: CBLB-3308
cuauugucuggugggauugg

SEQ ID NO: 35773 - RNA, 21 nt, Artificial Sequence
  Synthetic oligonucleotide: CBLB-5549
ucuauugucuggugggauugg

SEQ ID NO: 35774 - RNA, 22 nt, Artificial Sequence
  Synthetic oligonucleotide: CBLB-5550
gucuauugucuggugggauugg

SEQ ID NO: 35775 - RNA, 23 nt, Artificial Sequence
  Synthetic oligonucleotide: CBLB-5551
agucuauugucuggugggauugg

SEQ ID NO: 35776 - RNA, 24 nt, Artificial Sequence
  Synthetic oligonucleotide: CBLB-5552
cagucuauugucuggugggauugg

SEQ ID NO: 35777 - RNA, 18 nt, Artificial Sequence
  Synthetic oligonucleotide: CBLB-5553
aaagguuucaaccuaaug

SEQ ID NO: 35778 - RNA, 19 nt, Artificial Sequence
  Synthetic oligonucleotide: CBLB-5554
uaaagguuucaaccuaaug

SEQ ID NO: 35779 - RNA, 20 nt, Artificial Sequence
  Synthetic oligonucleotide: CBLB-5555
uuaaagguuucaaccuaaug

SEQ ID NO: 35780 - RNA, 21 nt, Artificial Sequence
  Synthetic oligonucleotide: CBLB-5556
uuuaaagguuucaaccuaaug

SEQ ID NO: 35781 - RNA, 22 nt, Artificial Sequence
  Synthetic oligonucleotide: CBLB-5557
uuuuaaagguuucaaccuaaug

SEQ ID NO: 35782 - RNA, 23 nt, Artificial Sequence
  Synthetic oligonucleotide: CBLB-5558
uuuuuaaagguuucaaccuaaug

SEQ ID NO: 35783 - RNA, 24 nt, Artificial Sequence
  Synthetic oligonucleotide: CBLB-5559
uuuuuuaaagguuucaaccuaaug

SEQ ID NO: 35784 - RNA, 18 nt, Artificial Sequence
  Synthetic oligonucleotide: CBLB-5560
ccaacucaccugaacaug

SEQ ID NO: 35785 - RNA, 19 nt, Artificial Sequence
  Synthetic oligonucleotide: CBLB-5561
gccaacucaccugaacaug

SEQ ID NO: 35786 - RNA, 20 nt, Artificial Sequence
  Synthetic oligonucleotide: CBLB-5562
agccaacucaccugaacaug

SEQ ID NO: 35787 - RNA, 21 nt, Artificial Sequence
  Synthetic oligonucleotide: CBLB-5563
uagccaacucaccugaacaug

SEQ ID NO: 35788 - RNA, 22 nt, Artificial Sequence
  Synthetic oligonucleotide: CBLB-5564
cuagccaacucaccugaacaug

SEQ ID NO: 35789 - RNA, 23 nt, Artificial Sequence
  Synthetic oligonucleotide: CBLB-5565
acuagccaacucaccugaacaug

SEQ ID NO: 35790 - RNA, 24 nt, Artificial Sequence
  Synthetic oligonucleotide: CBLB-5566
uacuagccaacucaccugaacaug

SEQ ID NO: 35791 - RNA, 18 nt, Artificial Sequence
  Synthetic oligonucleotide: CBLB-5567
ggggaggugggagagaug

SEQ ID NO: 35792 - RNA, 19 nt, Artificial Sequence
  Synthetic oligonucleotide: CBLB-5568
gggggaggugggagagaug

SEQ ID NO: 35793 - RNA, 20 nt, Artificial Sequence
  Synthetic oligonucleotide: CBLB-5569
ugggggaggugggagagaug

SEQ ID NO: 35794 - RNA, 21 nt, Artificial Sequence
  Synthetic oligonucleotide: CBLB-5570
gugggggaggugggagagaug

SEQ ID NO: 35795 - RNA, 22 nt, Artificial Sequence
  Synthetic oligonucleotide: CBLB-5571
ggugggggaggugggagagaug

SEQ ID NO: 35796 - RNA, 23 nt, Artificial Sequence
  Synthetic oligonucleotide: CBLB-5572
aggugggggaggugggagagaug

SEQ ID NO: 35797 - RNA, 24 nt, Artificial Sequence
  Synthetic oligonucleotide: CBLB-5573
gaggugggggaggugggagagaug

SEQ ID NO: 35798 - RNA, 18 nt, Artificial Sequence
  Synthetic oligonucleotide: CBLB-5574
gggaaacagggugggaug

SEQ ID NO: 35799 - RNA, 19 nt, Artificial Sequence
  Synthetic oligonucleotide: CBLB-5575
agggaaacagggugggaug

SEQ ID NO: 35800 - RNA, 20 nt, Artificial Sequence
  Synthetic oligonucleotide: CBLB-5576
cagggaaacagggugggaug

SEQ ID NO: 35801 - RNA, 21 nt, Artificial Sequence
  Synthetic oligonucleotide: CBLB-5577
ucagggaaacagggugggaug

SEQ ID NO: 35802 - RNA, 22 nt, Artificial Sequence
  Synthetic oligonucleotide: CBLB-5578
uucagggaaacagggugggaug

SEQ ID NO: 35803 - RNA, 23 nt, Artificial Sequence
  Synthetic oligonucleotide: CBLB-5579
auucagggaaacagggugggaug

SEQ ID NO: 35804 - RNA, 24 nt, Artificial Sequence
  Synthetic oligonucleotide: CBLB-5580
aauucagggaaacagggugggaug

SEQ ID NO: 35805 - RNA, 18 nt, Artificial Sequence
  Synthetic oligonucleotide: CBLB-5581
ggaggagggugguaacug

SEQ ID NO: 35806 - RNA, 19 nt, Artificial Sequence
  Synthetic oligonucleotide: CBLB-5582
gggaggagggugguaacug

SEQ ID NO: 35807 - RNA, 20 nt, Artificial Sequence
  Synthetic oligonucleotide: CBLB-5583
agggaggagggugguaacug

SEQ ID NO: 35808 - RNA, 21 nt, Artificial Sequence
  Synthetic oligonucleotide: CBLB-5584
uagggaggagggugguaacug

SEQ ID NO: 35809 - RNA, 22 nt, Artificial Sequence
  Synthetic oligonucleotide: CBLB-5585
cuagggaggagggugguaacug

SEQ ID NO: 35810 - RNA, 23 nt, Artificial Sequence
  Synthetic oligonucleotide: CBLB-5586
gcuagggaggagggugguaacug

SEQ ID NO: 35811 - RNA, 24 nt, Artificial Sequence
  Synthetic oligonucleotide: CBLB-5587
ugcuagggaggagggugguaacug

SEQ ID NO: 35812 - RNA, 18 nt, Artificial Sequence
  Synthetic oligonucleotide: CBLB-5588
uuagacguggggauacug

SEQ ID NO: 35813 - RNA, 19 nt, Artificial Sequence
  Synthetic oligonucleotide: CBLB-5589
uuuagacguggggauacug

SEQ ID NO: 35814 - RNA, 20 nt, Artificial Sequence
  Synthetic oligonucleotide: CBLB-5590
auuuagacguggggauacug

SEQ ID NO: 35815 - RNA, 21 nt, Artificial Sequence
  Synthetic oligonucleotide: CBLB-5591
gauuuagacguggggauacug

SEQ ID NO: 35816 - RNA, 22 nt, Artificial Sequence
  Synthetic oligonucleotide: CBLB-5592
agauuuagacguggggauacug

SEQ ID NO: 35817 - RNA, 23 nt, Artificial Sequence
  Synthetic oligonucleotide: CBLB-5593
uagauuuagacguggggauacug

SEQ ID NO: 35818 - RNA, 24 nt, Artificial Sequence
  Synthetic oligonucleotide: CBLB-5594
auagauuuagacguggggauacug

SEQ ID NO: 35819 - RNA, 18 nt, Artificial Sequence
  Synthetic oligonucleotide: CBLB-5595
gcuuuucccuccuaccug

SEQ ID NO: 35820 - RNA, 19 nt, Artificial Sequence
  Synthetic oligonucleotide: CBLB-5596
ggcuuuucccuccuaccug

SEQ ID NO: 35821 - RNA, 20 nt, Artificial Sequence
  Synthetic oligonucleotide: CBLB-5597
uggcuuuucccuccuaccug

SEQ ID NO: 35822 - RNA, 21 nt, Artificial Sequence
  Synthetic oligonucleotide: CBLB-5598
uuggcuuuucccuccuaccug

SEQ ID NO: 35823 - RNA, 22 nt, Artificial Sequence
  Synthetic oligonucleotide: CBLB-5599
uuuggcuuuucccuccuaccug

SEQ ID NO: 35824 - RNA, 23 nt, Artificial Sequence
  Synthetic oligonucleotide: CBLB-5600
cuuuggcuuuucccuccuaccug

SEQ ID NO: 35825 - RNA, 24 nt, Artificial Sequence
  Synthetic oligonucleotide: CBLB-5601
ucuuuggcuuuucccuccuaccug

SEQ ID NO: 35826 - RNA, 18 nt, Artificial Sequence
  Synthetic oligonucleotide: CBLB-5602
caggccagagcuaaucug

SEQ ID NO: 35827 - RNA, 19 nt, Artificial Sequence
  Synthetic oligonucleotide: CBLB-5603
ccaggccagagcuaaucug

SEQ ID NO: 35828 - RNA, 20 nt, Artificial Sequence
  Synthetic oligonucleotide: CBLB-5604
uccaggccagagcuaaucug

SEQ ID NO: 35829 - RNA, 21 nt, Artificial Sequence
  Synthetic oligonucleotide: CBLB-5605
uuccaggccagagcuaaucug

SEQ ID NO: 35830 - RNA, 22 nt, Artificial Sequence
  Synthetic oligonucleotide: CBLB-5606
cuuccaggccagagcuaaucug

SEQ ID NO: 35831 - RNA, 23 nt, Artificial Sequence
  Synthetic oligonucleotide: CBLB-5607
gcuuccaggccagagcuaaucug

SEQ ID NO: 35832 - RNA, 24 nt, Artificial Sequence
  Synthetic oligonucleotide: CBLB-5608
ugcuuccaggccagagcuaaucug

SEQ ID NO: 35833 - RNA, 18 nt, Artificial Sequence
  Synthetic oligonucleotide: CBLB-5609
uacucagucuauugucug

SEQ ID NO: 35834 - RNA, 19 nt, Artificial Sequence
  Synthetic oligonucleotide: CBLB-5610
cuacucagucuauugucug

SEQ ID NO: 35835 - RNA, 20 nt, Artificial Sequence
  Synthetic oligonucleotide: CBLB-5611
ucuacucagucuauugucug

SEQ ID NO: 35836 - RNA, 21 nt, Artificial Sequence
  Synthetic oligonucleotide: CBLB-5612
gucuacucagucuauugucug

SEQ ID NO: 35837 - RNA, 22 nt, Artificial Sequence
  Synthetic oligonucleotide: CBLB-5613
ugucuacucagucuauugucug

SEQ ID NO: 35838 - RNA, 23 nt, Artificial Sequence
  Synthetic oligonucleotide: CBLB-5614
gugucuacucagucuauugucug

SEQ ID NO: 35839 - RNA, 24 nt, Artificial Sequence
  Synthetic oligonucleotide: CBLB-5615
ugugucuacucagucuauugucug

SEQ ID NO: 35840 - RNA, 18 nt, Artificial Sequence
  Synthetic oligonucleotide: CBLB-5616
agggcguccuguugagug

SEQ ID NO: 35841 - RNA, 19 nt, Artificial Sequence
  Synthetic oligonucleotide: CBLB-5617
gagggcguccuguugagug

SEQ ID NO: 35842 - RNA, 20 nt, Artificial Sequence
  Synthetic oligonucleotide: CBLB-5618
agagggcguccuguugagug

SEQ ID NO: 35843 - RNA, 21 nt, Artificial Sequence
  Synthetic oligonucleotide: CBLB-5619
cagagggcguccuguugagug

SEQ ID NO: 35844 - RNA, 22 nt, Artificial Sequence
  Synthetic oligonucleotide: CBLB-5620
ucagagggcguccuguugagug

SEQ ID NO: 35845 - RNA, 23 nt, Artificial Sequence
  Synthetic oligonucleotide: CBLB-5621
aucagagggcguccuguugagug

SEQ ID NO: 35846 - RNA, 24 nt, Artificial Sequence
  Synthetic oligonucleotide: CBLB-5622
aaucagagggcguccuguugagug

SEQ ID NO: 35847 - RNA, 18 nt, Artificial Sequence
  Synthetic oligonucleotide: CBLB-5623
uaugccuugcaggaggug

SEQ ID NO: 35848 - RNA, 19 nt, Artificial Sequence
  Synthetic oligonucleotide: CBLB-5624
cuaugccuugcaggaggug

SEQ ID NO: 35849 - RNA, 20 nt, Artificial Sequence
  Synthetic oligonucleotide: CBLB-3326
acuaugccuugcaggaggug

SEQ ID NO: 35850 - RNA, 21 nt, Artificial Sequence
  Synthetic oligonucleotide: CBLB-5625
gacuaugccuugcaggaggug

SEQ ID NO: 35851 - RNA, 22 nt, Artificial Sequence
  Synthetic oligonucleotide: CBLB-5626
agacuaugccuugcaggaggug

SEQ ID NO: 35852 - RNA, 23 nt, Artificial Sequence
  Synthetic oligonucleotide: CBLB-5627
gagacuaugccuugcaggaggug

SEQ ID NO: 35853 - RNA, 24 nt, Artificial Sequence
  Synthetic oligonucleotide: CBLB-5628
ugagacuaugccuugcaggaggug

SEQ ID NO: 35854 - RNA, 18 nt, Artificial Sequence
  Synthetic oligonucleotide: CBLB-5629
gucuuucagguggcggug

SEQ ID NO: 35855 - RNA, 19 nt, Artificial Sequence
  Synthetic oligonucleotide: CBLB-5630
ggucuuucagguggcggug

SEQ ID NO: 35856 - RNA, 20 nt, Artificial Sequence
  Synthetic oligonucleotide: CBLB-5631
aggucuuucagguggcggug

SEQ ID NO: 35857 - RNA, 21 nt, Artificial Sequence
  Synthetic oligonucleotide: CBLB-5632
gaggucuuucagguggcggug

SEQ ID NO: 35858 - RNA, 22 nt, Artificial Sequence
  Synthetic oligonucleotide: CBLB-5633
ggaggucuuucagguggcggug

SEQ ID NO: 35859 - RNA, 23 nt, Artificial Sequence
  Synthetic oligonucleotide: CBLB-5634
uggaggucuuucagguggcggug

SEQ ID NO: 35860 - RNA, 24 nt, Artificial Sequence
  Synthetic oligonucleotide: CBLB-5635
guggaggucuuucagguggcggug

SEQ ID NO: 35861 - RNA, 18 nt, Artificial Sequence
  Synthetic oligonucleotide: CBLB-5636
uuaagggaggagguggug

SEQ ID NO: 35862 - RNA, 19 nt, Artificial Sequence
  Synthetic oligonucleotide: CBLB-5637
cuuaagggaggagguggug

SEQ ID NO: 35863 - RNA, 20 nt, Artificial Sequence
  Synthetic oligonucleotide: CBLB-5638
ucuuaagggaggagguggug

SEQ ID NO: 35864 - RNA, 21 nt, Artificial Sequence
  Synthetic oligonucleotide: CBLB-5639
cucuuaagggaggagguggug

SEQ ID NO: 35865 - RNA, 22 nt, Artificial Sequence
  Synthetic oligonucleotide: CBLB-5640
ucucuuaagggaggagguggug

SEQ ID NO: 35866 - RNA, 23 nt, Artificial Sequence
  Synthetic oligonucleotide: CBLB-5641
aucucuuaagggaggagguggug

SEQ ID NO: 35867 - RNA, 24 nt, Artificial Sequence
  Synthetic oligonucleotide: CBLB-5642
gaucucuuaagggaggagguggug

SEQ ID NO: 35868 - RNA, 18 nt, Artificial Sequence
  Synthetic oligonucleotide: CBLB-5643
uauugucuggugggauug

SEQ ID NO: 35869 - RNA, 19 nt, Artificial Sequence
  Synthetic oligonucleotide: CBLB-5644
cuauugucuggugggauug

SEQ ID NO: 35870 - RNA, 20 nt, Artificial Sequence
  Synthetic oligonucleotide: CBLB-5645
ucuauugucuggugggauug

SEQ ID NO: 35871 - RNA, 21 nt, Artificial Sequence
  Synthetic oligonucleotide: CBLB-5646
gucuauugucuggugggauug

SEQ ID NO: 35872 - RNA, 22 nt, Artificial Sequence
  Synthetic oligonucleotide: CBLB-5647
agucuauugucuggugggauug

SEQ ID NO: 35873 - RNA, 23 nt, Artificial Sequence
  Synthetic oligonucleotide: CBLB-5648
cagucuauugucuggugggauug

SEQ ID NO: 35874 - RNA, 24 nt, Artificial Sequence
  Synthetic oligonucleotide: CBLB-5649
ucagucuauugucuggugggauug

SEQ ID NO: 35875 - RNA, 18 nt, Artificial Sequence
  Synthetic oligonucleotide: CBLB-5650
caaugagacuaugccuug

SEQ ID NO: 35876 - RNA, 19 nt, Artificial Sequence
  Synthetic oligonucleotide: CBLB-5651
ucaaugagacuaugccuug

SEQ ID NO: 35877 - RNA, 20 nt, Artificial Sequence
  Synthetic oligonucleotide: CBLB-5652
uucaaugagacuaugccuug

SEQ ID NO: 35878 - RNA, 21 nt, Artificial Sequence
  Synthetic oligonucleotide: CBLB-5653
guucaaugagacuaugccuug

SEQ ID NO: 35879 - RNA, 22 nt, Artificial Sequence
  Synthetic oligonucleotide: CBLB-5654
uguucaaugagacuaugccuug

SEQ ID NO: 35880 - RNA, 23 nt, Artificial Sequence
  Synthetic oligonucleotide: CBLB-5655
auguucaaugagacuaugccuug

SEQ ID NO: 35881 - RNA, 24 nt, Artificial Sequence
  Synthetic oligonucleotide: CBLB-5656
aauguucaaugagacuaugccuug

SEQ ID NO: 35882 - RNA, 18 nt, Artificial Sequence
  Synthetic oligonucleotide: CBLB-5657
uauuguuccuggaauuug

SEQ ID NO: 35883 - RNA, 19 nt, Artificial Sequence
  Synthetic oligonucleotide: CBLB-5658
auauuguuccuggaauuug

SEQ ID NO: 35884 - RNA, 20 nt, Artificial Sequence
  Synthetic oligonucleotide: CBLB-3330
cauauuguuccuggaauuug

SEQ ID NO: 35885 - RNA, 21 nt, Artificial Sequence
  Synthetic oligonucleotide: CBLB-5659
ucauauuguuccuggaauuug

SEQ ID NO: 35886 - RNA, 22 nt, Artificial Sequence
  Synthetic oligonucleotide: CBLB-5660
uucauauuguuccuggaauuug

SEQ ID NO: 35887 - RNA, 23 nt, Artificial Sequence
  Synthetic oligonucleotide: CBLB-5661
auucauauuguuccuggaauuug

SEQ ID NO: 35888 - RNA, 24 nt, Artificial Sequence
  Synthetic oligonucleotide: CBLB-5662
aauucauauuguuccuggaauuug

SEQ ID NO: 35889 - RNA, 18 nt, Artificial Sequence
  Synthetic oligonucleotide: CBLB-5663
aaaauugaucuaccuuug

SEQ ID NO: 35890 - RNA, 19 nt, Artificial Sequence
  Synthetic oligonucleotide: CBLB-5664
uaaaauugaucuaccuuug

SEQ ID NO: 35891 - RNA, 20 nt, Artificial Sequence
  Synthetic oligonucleotide: CBLB-5665
auaaaauugaucuaccuuug

SEQ ID NO: 35892 - RNA, 21 nt, Artificial Sequence
  Synthetic oligonucleotide: CBLB-5666
aauaaaauugaucuaccuuug

SEQ ID NO: 35893 - RNA, 22 nt, Artificial Sequence
  Synthetic oligonucleotide: CBLB-5667
uaauaaaauugaucuaccuuug

SEQ ID NO: 35894 - RNA, 23 nt, Artificial Sequence
  Synthetic oligonucleotide: CBLB-5668
cuaauaaaauugaucuaccuuug

SEQ ID NO: 35895 - RNA, 24 nt, Artificial Sequence
  Synthetic oligonucleotide: CBLB-5669
ucuaauaaaauugaucuaccuuug

SEQ ID NO: 35896 - RNA, 18 nt, Artificial Sequence
  Synthetic oligonucleotide: CBLB-5670
cugugauuccagguuuug

SEQ ID NO: 35897 - RNA, 19 nt, Artificial Sequence
  Synthetic oligonucleotide: CBLB-5671
gcugugauuccagguuuug

SEQ ID NO: 35898 - RNA, 20 nt, Artificial Sequence
  Synthetic oligonucleotide: CBLB-5672
cgcugugauuccagguuuug

SEQ ID NO: 35899 - RNA, 21 nt, Artificial Sequence
  Synthetic oligonucleotide: CBLB-5673
ucgcugugauuccagguuuug

SEQ ID NO: 35900 - RNA, 22 nt, Artificial Sequence
  Synthetic oligonucleotide: CBLB-5674
cucgcugugauuccagguuuug

SEQ ID NO: 35901 - RNA, 23 nt, Artificial Sequence
  Synthetic oligonucleotide: CBLB-5675
acucgcugugauuccagguuuug

SEQ ID NO: 35902 - RNA, 24 nt, Artificial Sequence
  Synthetic oligonucleotide: CBLB-5676
aacucgcugugauuccagguuuug

SEQ ID NO: 35903 - RNA, 18 nt, Artificial Sequence
  Synthetic oligonucleotide: CBLB-5677
ucaaucagggcuugaaau

SEQ ID NO: 35904 - RNA, 19 nt, Artificial Sequence
  Synthetic oligonucleotide: CBLB-5678
aucaaucagggcuugaaau

SEQ ID NO: 35905 - RNA, 20 nt, Artificial Sequence
  Synthetic oligonucleotide: CBLB-5679
caucaaucagggcuugaaau

SEQ ID NO: 35906 - RNA, 21 nt, Artificial Sequence
  Synthetic oligonucleotide: CBLB-5680
ccaucaaucagggcuugaaau

SEQ ID NO: 35907 - RNA, 22 nt, Artificial Sequence
  Synthetic oligonucleotide: CBLB-5681
gccaucaaucagggcuugaaau

SEQ ID NO: 35908 - RNA, 23 nt, Artificial Sequence
  Synthetic oligonucleotide: CBLB-5682
ugccaucaaucagggcuugaaau

SEQ ID NO: 35909 - RNA, 24 nt, Artificial Sequence
  Synthetic oligonucleotide: CBLB-5683
cugccaucaaucagggcuugaaau

SEQ ID NO: 35910 - RNA, 18 nt, Artificial Sequence
  Synthetic oligonucleotide: CBLB-5684
uucccugcugccaucaau

SEQ ID NO: 35911 - RNA, 19 nt, Artificial Sequence
  Synthetic oligonucleotide: CBLB-5685
cuucccugcugccaucaau

SEQ ID NO: 35912 - RNA, 20 nt, Artificial Sequence
  Synthetic oligonucleotide: CBLB-5686
ccuucccugcugccaucaau

SEQ ID NO: 35913 - RNA, 21 nt, Artificial Sequence
  Synthetic oligonucleotide: CBLB-5687
uccuucccugcugccaucaau

SEQ ID NO: 35914 - RNA, 22 nt, Artificial Sequence
  Synthetic oligonucleotide: CBLB-5688
auccuucccugcugccaucaau

SEQ ID NO: 35915 - RNA, 23 nt, Artificial Sequence
  Synthetic oligonucleotide: CBLB-5689
aauccuucccugcugccaucaau

SEQ ID NO: 35916 - RNA, 24 nt, Artificial Sequence
  Synthetic oligonucleotide: CBLB-5690
caauccuucccugcugccaucaau

SEQ ID NO: 35917 - RNA, 18 nt, Artificial Sequence
  Synthetic oligonucleotide: CBLB-5691
ucauauuguuccuggaau

SEQ ID NO: 35918 - RNA, 19 nt, Artificial Sequence
  Synthetic oligonucleotide: CBLB-5692
uucauauuguuccuggaau

SEQ ID NO: 35919 - RNA, 20 nt, Artificial Sequence
  Synthetic oligonucleotide: CBLB-5693
auucauauuguuccuggaau

SEQ ID NO: 35920 - RNA, 21 nt, Artificial Sequence
  Synthetic oligonucleotide: CBLB-5694
aauucauauuguuccuggaau

SEQ ID NO: 35921 - RNA, 22 nt, Artificial Sequence
  Synthetic oligonucleotide: CBLB-5695
uaauucauauuguuccuggaau

SEQ ID NO: 35922 - RNA, 23 nt, Artificial Sequence
  Synthetic oligonucleotide: CBLB-5696
auaauucauauuguuccuggaau

SEQ ID NO: 35923 - RNA, 24 nt, Artificial Sequence
  Synthetic oligonucleotide: CBLB-5697
uauaauucauauuguuccuggaau

SEQ ID NO: 35924 - RNA, 18 nt, Artificial Sequence
  Synthetic oligonucleotide: CBLB-5698
ggaugagaagaucauaau

SEQ ID NO: 35925 - RNA, 19 nt, Artificial Sequence
  Synthetic oligonucleotide: CBLB-5699
gggaugagaagaucauaau

SEQ ID NO: 35926 - RNA, 20 nt, Artificial Sequence
  Synthetic oligonucleotide: CBLB-5700
agggaugagaagaucauaau

SEQ ID NO: 35927 - RNA, 21 nt, Artificial Sequence
  Synthetic oligonucleotide: CBLB-5701
gagggaugagaagaucauaau

SEQ ID NO: 35928 - RNA, 22 nt, Artificial Sequence
  Synthetic oligonucleotide: CBLB-5702
ggagggaugagaagaucauaau

SEQ ID NO: 35929 - RNA, 23 nt, Artificial Sequence
  Synthetic oligonucleotide: CBLB-5703
uggagggaugagaagaucauaau

SEQ ID NO: 35930 - RNA, 24 nt, Artificial Sequence
  Synthetic oligonucleotide: CBLB-5704
auggagggaugagaagaucauaau

SEQ ID NO: 35931 - RNA, 18 nt, Artificial Sequence
  Synthetic oligonucleotide: CBLB-5705
aauauagcugcaaaacau

SEQ ID NO: 35932 - RNA, 19 nt, Artificial Sequence
  Synthetic oligonucleotide: CBLB-5706
aaauauagcugcaaaacau

SEQ ID NO: 35933 - RNA, 20 nt, Artificial Sequence
  Synthetic oligonucleotide: CBLB-5707
aaaauauagcugcaaaacau

SEQ ID NO: 35934 - RNA, 21 nt, Artificial Sequence
  Synthetic oligonucleotide: CBLB-5708
gaaaauauagcugcaaaacau

SEQ ID NO: 35935 - RNA, 22 nt, Artificial Sequence
  Synthetic oligonucleotide: CBLB-5709
ggaaaauauagcugcaaaacau

SEQ ID NO: 35936 - RNA, 23 nt, Artificial Sequence
  Synthetic oligonucleotide: CBLB-5710
cggaaaauauagcugcaaaacau

SEQ ID NO: 35937 - RNA, 24 nt, Artificial Sequence
  Synthetic oligonucleotide: CBLB-5711
ccggaaaauauagcugcaaaacau

SEQ ID NO: 35938 - RNA, 18 nt, Artificial Sequence
  Synthetic oligonucleotide: CBLB-5712
ugugccuuccauugacau

SEQ ID NO: 35939 - RNA, 19 nt, Artificial Sequence
  Synthetic oligonucleotide: CBLB-5713
cugugccuuccauugacau

SEQ ID NO: 35940 - RNA, 20 nt, Artificial Sequence
  Synthetic oligonucleotide: CBLB-5714
acugugccuuccauugacau

SEQ ID NO: 35941 - RNA, 21 nt, Artificial Sequence
  Synthetic oligonucleotide: CBLB-5715
uacugugccuuccauugacau

SEQ ID NO: 35942 - RNA, 22 nt, Artificial Sequence
  Synthetic oligonucleotide: CBLB-5716
cuacugugccuuccauugacau

SEQ ID NO: 35943 - RNA, 23 nt, Artificial Sequence
  Synthetic oligonucleotide: CBLB-5717
ucuacugugccuuccauugacau

SEQ ID NO: 35944 - RNA, 24 nt, Artificial Sequence
  Synthetic oligonucleotide: CBLB-5718
cucuacugugccuuccauugacau

SEQ ID NO: 35945 - RNA, 18 nt, Artificial Sequence
  Synthetic oligonucleotide: CBLB-5719
cacuuccaaggugaccau

SEQ ID NO: 35946 - RNA, 19 nt, Artificial Sequence
  Synthetic oligonucleotide: CBLB-5720
ucacuuccaaggugaccau

SEQ ID NO: 35947 - RNA, 20 nt, Artificial Sequence
  Synthetic oligonucleotide: CBLB-3336
uucacuuccaaggugaccau

SEQ ID NO: 35948 - RNA, 21 nt, Artificial Sequence
  Synthetic oligonucleotide: CBLB-5721
cuucacuuccaaggugaccau

SEQ ID NO: 35949 - RNA, 22 nt, Artificial Sequence
  Synthetic oligonucleotide: CBLB-5722
ucuucacuuccaaggugaccau

SEQ ID NO: 35950 - RNA, 23 nt, Artificial Sequence
  Synthetic oligonucleotide: CBLB-5723
uucuucacuuccaaggugaccau

SEQ ID NO: 35951 - RNA, 24 nt, Artificial Sequence
  Synthetic oligonucleotide: CBLB-5724
auucuucacuuccaaggugaccau

SEQ ID NO: 35952 - RNA, 18 nt, Artificial Sequence
  Synthetic oligonucleotide: CBLB-5725
cucccuggaauugaccau

SEQ ID NO: 35953 - RNA, 19 nt, Artificial Sequence
  Synthetic oligonucleotide: CBLB-5726
ucucccuggaauugaccau

SEQ ID NO: 35954 - RNA, 20 nt, Artificial Sequence
  Synthetic oligonucleotide: CBLB-3337
aucucccuggaauugaccau

SEQ ID NO: 35955 - RNA, 21 nt, Artificial Sequence
  Synthetic oligonucleotide: CBLB-5727
uaucucccuggaauugaccau

SEQ ID NO: 35956 - RNA, 22 nt, Artificial Sequence
  Synthetic oligonucleotide: CBLB-5728
uuaucucccuggaauugaccau

SEQ ID NO: 35957 - RNA, 23 nt, Artificial Sequence
  Synthetic oligonucleotide: CBLB-5729
guuaucucccuggaauugaccau

SEQ ID NO: 35958 - RNA, 24 nt, Artificial Sequence
  Synthetic oligonucleotide: CBLB-5730
aguuaucucccuggaauugaccau

SEQ ID NO: 35959 - RNA, 18 nt, Artificial Sequence
  Synthetic oligonucleotide: CBLB-5731
cagcaugugacugaagau

SEQ ID NO: 35960 - RNA, 19 nt, Artificial Sequence
  Synthetic oligonucleotide: CBLB-5732
ccagcaugugacugaagau

SEQ ID NO: 35961 - RNA, 20 nt, Artificial Sequence
  Synthetic oligonucleotide: CBLB-5733
gccagcaugugacugaagau

SEQ ID NO: 35962 - RNA, 21 nt, Artificial Sequence
  Synthetic oligonucleotide: CBLB-5734
ugccagcaugugacugaagau

SEQ ID NO: 35963 - RNA, 22 nt, Artificial Sequence
  Synthetic oligonucleotide: CBLB-5735
cugccagcaugugacugaagau

SEQ ID NO: 35964 - RNA, 23 nt, Artificial Sequence
  Synthetic oligonucleotide: CBLB-5736
ucugccagcaugugacugaagau

SEQ ID NO: 35965 - RNA, 24 nt, Artificial Sequence
  Synthetic oligonucleotide: CBLB-5737
uucugccagcaugugacugaagau

SEQ ID NO: 35966 - RNA, 18 nt, Artificial Sequence
  Synthetic oligonucleotide: CBLB-5738
cggguggcaggcuuagau

SEQ ID NO: 35967 - RNA, 19 nt, Artificial Sequence
  Synthetic oligonucleotide: CBLB-5739
acggguggcaggcuuagau

SEQ ID NO: 35968 - RNA, 20 nt, Artificial Sequence
  Synthetic oligonucleotide: CBLB-5740
cacggguggcaggcuuagau

SEQ ID NO: 35969 - RNA, 21 nt, Artificial Sequence
  Synthetic oligonucleotide: CBLB-5741
gcacggguggcaggcuuagau

SEQ ID NO: 35970 - RNA, 22 nt, Artificial Sequence
  Synthetic oligonucleotide: CBLB-5742
ggcacggguggcaggcuuagau

SEQ ID NO: 35971 - RNA, 23 nt, Artificial Sequence
  Synthetic oligonucleotide: CBLB-5743
aggcacggguggcaggcuuagau

SEQ ID NO: 35972 - RNA, 24 nt, Artificial Sequence
  Synthetic oligonucleotide: CBLB-5744
gaggcacggguggcaggcuuagau

SEQ ID NO: 35973 - RNA, 18 nt, Artificial Sequence
  Synthetic oligonucleotide: CBLB-5745
ucaaccuaauggagggau

SEQ ID NO: 35974 - RNA, 19 nt, Artificial Sequence
  Synthetic oligonucleotide: CBLB-5746
uucaaccuaauggagggau

SEQ ID NO: 35975 - RNA, 20 nt, Artificial Sequence
  Synthetic oligonucleotide: CBLB-5747
uuucaaccuaauggagggau

SEQ ID NO: 35976 - RNA, 21 nt, Artificial Sequence
  Synthetic oligonucleotide: CBLB-5748
guuucaaccuaauggagggau

SEQ ID NO: 35977 - RNA, 22 nt, Artificial Sequence
  Synthetic oligonucleotide: CBLB-5749
gguuucaaccuaauggagggau

SEQ ID NO: 35978 - RNA, 23 nt, Artificial Sequence
  Synthetic oligonucleotide: CBLB-5750
agguuucaaccuaauggagggau

SEQ ID NO: 35979 - RNA, 24 nt, Artificial Sequence
  Synthetic oligonucleotide: CBLB-5751
aagguuucaaccuaauggagggau

SEQ ID NO: 35980 - RNA, 18 nt, Artificial Sequence
  Synthetic oligonucleotide: CBLB-5752
gugguaauggcacgggau

SEQ ID NO: 35981 - RNA, 19 nt, Artificial Sequence
  Synthetic oligonucleotide: CBLB-5753
ggugguaauggcacgggau

SEQ ID NO: 35982 - RNA, 20 nt, Artificial Sequence
  Synthetic oligonucleotide: CBLB-5754
aggugguaauggcacgggau

SEQ ID NO: 35983 - RNA, 21 nt, Artificial Sequence
  Synthetic oligonucleotide: CBLB-5755
caggugguaauggcacgggau

SEQ ID NO: 35984 - RNA, 22 nt, Artificial Sequence
  Synthetic oligonucleotide: CBLB-5756
gcaggugguaauggcacgggau

SEQ ID NO: 35985 - RNA, 23 nt, Artificial Sequence
  Synthetic oligonucleotide: CBLB-5757
ggcaggugguaauggcacgggau

SEQ ID NO: 35986 - RNA, 24 nt, Artificial Sequence
  Synthetic oligonucleotide: CBLB-5758
uggcaggugguaauggcacgggau

SEQ ID NO: 35987 - RNA, 18 nt, Artificial Sequence
  Synthetic oligonucleotide: CBLB-5759
caggcuuagaugugggau

SEQ ID NO: 35988 - RNA, 19 nt, Artificial Sequence
  Synthetic oligonucleotide: CBLB-5760
gcaggcuuagaugugggau

SEQ ID NO: 35989 - RNA, 20 nt, Artificial Sequence
  Synthetic oligonucleotide: CBLB-5761
ggcaggcuuagaugugggau

SEQ ID NO: 35990 - RNA, 21 nt, Artificial Sequence
  Synthetic oligonucleotide: CBLB-5762
uggcaggcuuagaugugggau

SEQ ID NO: 35991 - RNA, 22 nt, Artificial Sequence
  Synthetic oligonucleotide: CBLB-5763
guggcaggcuuagaugugggau

SEQ ID NO: 35992 - RNA, 23 nt, Artificial Sequence
  Synthetic oligonucleotide: CBLB-5764
gguggcaggcuuagaugugggau

SEQ ID NO: 35993 - RNA, 24 nt, Artificial Sequence
  Synthetic oligonucleotide: CBLB-5765
ggguggcaggcuuagaugugggau

SEQ ID NO: 35994 - RNA, 18 nt, Artificial Sequence
  Synthetic oligonucleotide: CBLB-5766
agcaucugcuuuugugau

SEQ ID NO: 35995 - RNA, 19 nt, Artificial Sequence
  Synthetic oligonucleotide: CBLB-5767
cagcaucugcuuuugugau

SEQ ID NO: 35996 - RNA, 20 nt, Artificial Sequence
  Synthetic oligonucleotide: CBLB-5768
gcagcaucugcuuuugugau

SEQ ID NO: 35997 - RNA, 21 nt, Artificial Sequence
  Synthetic oligonucleotide: CBLB-5769
agcagcaucugcuuuugugau

SEQ ID NO: 35998 - RNA, 22 nt, Artificial Sequence
  Synthetic oligonucleotide: CBLB-5770
cagcagcaucugcuuuugugau

SEQ ID NO: 35999 - RNA, 23 nt, Artificial Sequence
  Synthetic oligonucleotide: CBLB-5771
ucagcagcaucugcuuuugugau

SEQ ID NO: 36000 - RNA, 24 nt, Artificial Sequence
  Synthetic oligonucleotide: CBLB-5772
uucagcagcaucugcuuuugugau

SEQ ID NO: 36001 - RNA, 18 nt, Artificial Sequence
  Synthetic oligonucleotide: CBLB-5773
gcuuuaacuucaucauau

SEQ ID NO: 36002 - RNA, 19 nt, Artificial Sequence
  Synthetic oligonucleotide: CBLB-5774
ugcuuuaacuucaucauau

SEQ ID NO: 36003 - RNA, 20 nt, Artificial Sequence
  Synthetic oligonucleotide: CBLB-5775
gugcuuuaacuucaucauau

SEQ ID NO: 36004 - RNA, 21 nt, Artificial Sequence
  Synthetic oligonucleotide: CBLB-5776
cgugcuuuaacuucaucauau

SEQ ID NO: 36005 - RNA, 22 nt, Artificial Sequence
  Synthetic oligonucleotide: CBLB-5777
ucgugcuuuaacuucaucauau

SEQ ID NO: 36006 - RNA, 23 nt, Artificial Sequence
  Synthetic oligonucleotide: CBLB-5778
gucgugcuuuaacuucaucauau

SEQ ID NO: 36007 - RNA, 24 nt, Artificial Sequence
  Synthetic oligonucleotide: CBLB-5779
agucgugcuuuaacuucaucauau

SEQ ID NO: 36008 - RNA, 18 nt, Artificial Sequence
  Synthetic oligonucleotide: CBLB-5780
ggggucuggcuggugccu

SEQ ID NO: 36009 - RNA, 19 nt, Artificial Sequence
  Synthetic oligonucleotide: CBLB-5781
gggggucuggcuggugccu

SEQ ID NO: 36010 - RNA, 20 nt, Artificial Sequence
  Synthetic oligonucleotide: CBLB-5782
agggggucuggcuggugccu

SEQ ID NO: 36011 - RNA, 21 nt, Artificial Sequence
  Synthetic oligonucleotide: CBLB-5783
uagggggucuggcuggugccu

SEQ ID NO: 36012 - RNA, 22 nt, Artificial Sequence
  Synthetic oligonucleotide: CBLB-5784
uuagggggucuggcuggugccu

SEQ ID NO: 36013 - RNA, 23 nt, Artificial Sequence
  Synthetic oligonucleotide: CBLB-5785
uuuagggggucuggcuggugccu

SEQ ID NO: 36014 - RNA, 24 nt, Artificial Sequence
  Synthetic oligonucleotide: CBLB-5786
guuuagggggucuggcuggugccu

SEQ ID NO: 36015 - RNA, 18 nt, Artificial Sequence
  Synthetic oligonucleotide: CBLB-5787
ccuggaugugucacagcu

SEQ ID NO: 36016 - RNA, 19 nt, Artificial Sequence
  Synthetic oligonucleotide: CBLB-5788
accuggaugugucacagcu

SEQ ID NO: 36017 - RNA, 20 nt, Artificial Sequence
  Synthetic oligonucleotide: CBLB-5789
aaccuggaugugucacagcu

SEQ ID NO: 36018 - RNA, 21 nt, Artificial Sequence
  Synthetic oligonucleotide: CBLB-5790
uaaccuggaugugucacagcu

SEQ ID NO: 36019 - RNA, 22 nt, Artificial Sequence
  Synthetic oligonucleotide: CBLB-5791
guaaccuggaugugucacagcu

SEQ ID NO: 36020 - RNA, 23 nt, Artificial Sequence
  Synthetic oligonucleotide: CBLB-5792
uguaaccuggaugugucacagcu

SEQ ID NO: 36021 - RNA, 24 nt, Artificial Sequence
  Synthetic oligonucleotide: CBLB-5793
auguaaccuggaugugucacagcu

SEQ ID NO: 36022 - RNA, 18 nt, Artificial Sequence
  Synthetic oligonucleotide: CBLB-5794
aaauucucggaggaugcu

SEQ ID NO: 36023 - RNA, 19 nt, Artificial Sequence
  Synthetic oligonucleotide: CBLB-5795
caaauucucggaggaugcu

SEQ ID NO: 36024 - RNA, 20 nt, Artificial Sequence
  Synthetic oligonucleotide: CBLB-5796
gcaaauucucggaggaugcu

SEQ ID NO: 36025 - RNA, 21 nt, Artificial Sequence
  Synthetic oligonucleotide: CBLB-5797
ggcaaauucucggaggaugcu

SEQ ID NO: 36026 - RNA, 22 nt, Artificial Sequence
  Synthetic oligonucleotide: CBLB-5798
aggcaaauucucggaggaugcu

SEQ ID NO: 36027 - RNA, 23 nt, Artificial Sequence
  Synthetic oligonucleotide: CBLB-5799
aaggcaaauucucggaggaugcu

SEQ ID NO: 36028 - RNA, 24 nt, Artificial Sequence
  Synthetic oligonucleotide: CBLB-5800
gaaggcaaauucucggaggaugcu

SEQ ID NO: 36029 - RNA, 18 nt, Artificial Sequence
  Synthetic oligonucleotide: CBLB-5801
caaaacucacuuuaugcu

SEQ ID NO: 36030 - RNA, 19 nt, Artificial Sequence
  Synthetic oligonucleotide: CBLB-5802
acaaaacucacuuuaugcu

SEQ ID NO: 36031 - RNA, 20 nt, Artificial Sequence
  Synthetic oligonucleotide: CBLB-3363
aacaaaacucacuuuaugcu

SEQ ID NO: 36032 - RNA, 21 nt, Artificial Sequence
  Synthetic oligonucleotide: CBLB-5803
caacaaaacucacuuuaugcu

SEQ ID NO: 36033 - RNA, 22 nt, Artificial Sequence
  Synthetic oligonucleotide: CBLB-5804
ucaacaaaacucacuuuaugcu

SEQ ID NO: 36034 - RNA, 23 nt, Artificial Sequence
  Synthetic oligonucleotide: CBLB-5805
uucaacaaaacucacuuuaugcu

SEQ ID NO: 36035 - RNA, 24 nt, Artificial Sequence
  Synthetic oligonucleotide: CBLB-5806
auucaacaaaacucacuuuaugcu

SEQ ID NO: 36036 - RNA, 18 nt, Artificial Sequence
  Synthetic oligonucleotide: CBLB-5807
agaggcauuggcgggucu

SEQ ID NO: 36037 - RNA, 19 nt, Artificial Sequence
  Synthetic oligonucleotide: CBLB-5808
aagaggcauuggcgggucu

SEQ ID NO: 36038 - RNA, 20 nt, Artificial Sequence
  Synthetic oligonucleotide: CBLB-5809
caagaggcauuggcgggucu

SEQ ID NO: 36039 - RNA, 21 nt, Artificial Sequence
  Synthetic oligonucleotide: CBLB-5810
ucaagaggcauuggcgggucu

SEQ ID NO: 36040 - RNA, 22 nt, Artificial Sequence
  Synthetic oligonucleotide: CBLB-5811
uucaagaggcauuggcgggucu

SEQ ID NO: 36041 - RNA, 23 nt, Artificial Sequence
  Synthetic oligonucleotide: CBLB-5812
cuucaagaggcauuggcgggucu

SEQ ID NO: 36042 - RNA, 24 nt, Artificial Sequence
  Synthetic oligonucleotide: CBLB-5813
gcuucaagaggcauuggcgggucu

SEQ ID NO: 36043 - RNA, 18 nt, Artificial Sequence
  Synthetic oligonucleotide: CBLB-5814
ggagggaaggcaaauucu

SEQ ID NO: 36044 - RNA, 19 nt, Artificial Sequence
  Synthetic oligonucleotide: CBLB-5815
aggagggaaggcaaauucu

SEQ ID NO: 36045 - RNA, 20 nt, Artificial Sequence
  Synthetic oligonucleotide: CBLB-3368
gaggagggaaggcaaauucu

SEQ ID NO: 36046 - RNA, 21 nt, Artificial Sequence
  Synthetic oligonucleotide: CBLB-5816
ggaggagggaaggcaaauucu

SEQ ID NO: 36047 - RNA, 22 nt, Artificial Sequence
  Synthetic oligonucleotide: CBLB-5817
uggaggagggaaggcaaauucu

SEQ ID NO: 36048 - RNA, 23 nt, Artificial Sequence
  Synthetic oligonucleotide: CBLB-5818
cuggaggagggaaggcaaauucu

SEQ ID NO: 36049 - RNA, 24 nt, Artificial Sequence
  Synthetic oligonucleotide: CBLB-5819
acuggaggagggaaggcaaauucu

SEQ ID NO: 36050 - RNA, 18 nt, Artificial Sequence
  Synthetic oligonucleotide: CBLB-5820
ggauguuugauuucuucu

SEQ ID NO: 36051 - RNA, 19 nt, Artificial Sequence
  Synthetic oligonucleotide: CBLB-5821
gggauguuugauuucuucu

SEQ ID NO: 36052 - RNA, 20 nt, Artificial Sequence
  Synthetic oligonucleotide: CBLB-5822
agggauguuugauuucuucu

SEQ ID NO: 36053 - RNA, 21 nt, Artificial Sequence
  Synthetic oligonucleotide: CBLB-5823
cagggauguuugauuucuucu

SEQ ID NO: 36054 - RNA, 22 nt, Artificial Sequence
  Synthetic oligonucleotide: CBLB-5824
ucagggauguuugauuucuucu

SEQ ID NO: 36055 - RNA, 23 nt, Artificial Sequence
  Synthetic oligonucleotide: CBLB-5825
gucagggauguuugauuucuucu

SEQ ID NO: 36056 - RNA, 24 nt, Artificial Sequence
  Synthetic oligonucleotide: CBLB-5826
agucagggauguuugauuucuucu

SEQ ID NO: 36057 - RNA, 18 nt, Artificial Sequence
  Synthetic oligonucleotide: CBLB-5827
aggcuguggcuuucuucu

SEQ ID NO: 36058 - RNA, 19 nt, Artificial Sequence
  Synthetic oligonucleotide: CBLB-5828
caggcuguggcuuucuucu

SEQ ID NO: 36059 - RNA, 20 nt, Artificial Sequence
  Synthetic oligonucleotide: CBLB-5829
ucaggcuguggcuuucuucu

SEQ ID NO: 36060 - RNA, 21 nt, Artificial Sequence
  Synthetic oligonucleotide: CBLB-5830
gucaggcuguggcuuucuucu

SEQ ID NO: 36061 - RNA, 22 nt, Artificial Sequence
  Synthetic oligonucleotide: CBLB-5831
ggucaggcuguggcuuucuucu

SEQ ID NO: 36062 - RNA, 23 nt, Artificial Sequence
  Synthetic oligonucleotide: CBLB-5832
gggucaggcuguggcuuucuucu

SEQ ID NO: 36063 - RNA, 24 nt, Artificial Sequence
  Synthetic oligonucleotide: CBLB-5833
ugggucaggcuguggcuuucuucu

SEQ ID NO: 36064 - RNA, 18 nt, Artificial Sequence
  Synthetic oligonucleotide: CBLB-5834
cugggucucuuguuuucu

SEQ ID NO: 36065 - RNA, 19 nt, Artificial Sequence
  Synthetic oligonucleotide: CBLB-5835
acugggucucuuguuuucu

SEQ ID NO: 36066 - RNA, 20 nt, Artificial Sequence
  Synthetic oligonucleotide: CBLB-5836
uacugggucucuuguuuucu

SEQ ID NO: 36067 - RNA, 21 nt, Artificial Sequence
  Synthetic oligonucleotide: CBLB-5837
cuacugggucucuuguuuucu

SEQ ID NO: 36068 - RNA, 22 nt, Artificial Sequence
  Synthetic oligonucleotide: CBLB-5838
ucuacugggucucuuguuuucu

SEQ ID NO: 36069 - RNA, 23 nt, Artificial Sequence
  Synthetic oligonucleotide: CBLB-5839
cucuacugggucucuuguuuucu

SEQ ID NO: 36070 - RNA, 24 nt, Artificial Sequence
  Synthetic oligonucleotide: CBLB-5840
ccucuacugggucucuuguuuucu

SEQ ID NO: 36071 - RNA, 18 nt, Artificial Sequence
  Synthetic oligonucleotide: CBLB-5841
uuaaauauaugcuuaagu

SEQ ID NO: 36072 - RNA, 19 nt, Artificial Sequence
  Synthetic oligonucleotide: CBLB-5842
uuuaaauauaugcuuaagu

SEQ ID NO: 36073 - RNA, 20 nt, Artificial Sequence
  Synthetic oligonucleotide: CBLB-5843
cuuuaaauauaugcuuaagu

SEQ ID NO: 36074 - RNA, 21 nt, Artificial Sequence
  Synthetic oligonucleotide: CBLB-5844
ccuuuaaauauaugcuuaagu

SEQ ID NO: 36075 - RNA, 22 nt, Artificial Sequence
  Synthetic oligonucleotide: CBLB-5845
cccuuuaaauauaugcuuaagu

SEQ ID NO: 36076 - RNA, 23 nt, Artificial Sequence
  Synthetic oligonucleotide: CBLB-5846
acccuuuaaauauaugcuuaagu

SEQ ID NO: 36077 - RNA, 24 nt, Artificial Sequence
  Synthetic oligonucleotide: CBLB-5847
uacccuuuaaauauaugcuuaagu

SEQ ID NO: 36078 - RNA, 18 nt, Artificial Sequence
  Synthetic oligonucleotide: CBLB-5848
cuuuggauugucccgagu

SEQ ID NO: 36079 - RNA, 19 nt, Artificial Sequence
  Synthetic oligonucleotide: CBLB-5849
gcuuuggauugucccgagu

SEQ ID NO: 36080 - RNA, 20 nt, Artificial Sequence
  Synthetic oligonucleotide: CBLB-3373
ugcuuuggauugucccgagu

SEQ ID NO: 36081 - RNA, 21 nt, Artificial Sequence
  Synthetic oligonucleotide: CBLB-5850
augcuuuggauugucccgagu

SEQ ID NO: 36082 - RNA, 22 nt, Artificial Sequence
  Synthetic oligonucleotide: CBLB-5851
caugcuuuggauugucccgagu

SEQ ID NO: 36083 - RNA, 23 nt, Artificial Sequence
  Synthetic oligonucleotide: CBLB-5852
ccaugcuuuggauugucccgagu

SEQ ID NO: 36084 - RNA, 24 nt, Artificial Sequence
  Synthetic oligonucleotide: CBLB-5853
accaugcuuuggauugucccgagu

SEQ ID NO: 36085 - RNA, 18 nt, Artificial Sequence
  Synthetic oligonucleotide: CBLB-5854
cuaugccuugcaggaggu

SEQ ID NO: 36086 - RNA, 19 nt, Artificial Sequence
  Synthetic oligonucleotide: CBLB-5855
acuaugccuugcaggaggu

SEQ ID NO: 36087 - RNA, 20 nt, Artificial Sequence
  Synthetic oligonucleotide: CBLB-3380
gacuaugccuugcaggaggu

SEQ ID NO: 36088 - RNA, 21 nt, Artificial Sequence
  Synthetic oligonucleotide: CBLB-5856
agacuaugccuugcaggaggu

SEQ ID NO: 36089 - RNA, 22 nt, Artificial Sequence
  Synthetic oligonucleotide: CBLB-5857
gagacuaugccuugcaggaggu

SEQ ID NO: 36090 - RNA, 23 nt, Artificial Sequence
  Synthetic oligonucleotide: CBLB-5858
ugagacuaugccuugcaggaggu

SEQ ID NO: 36091 - RNA, 24 nt, Artificial Sequence
  Synthetic oligonucleotide: CBLB-5859
augagacuaugccuugcaggaggu

SEQ ID NO: 36092 - RNA, 18 nt, Artificial Sequence
  Synthetic oligonucleotide: CBLB-5860
gcaggaggugggggaggu

SEQ ID NO: 36093 - RNA, 19 nt, Artificial Sequence
  Synthetic oligonucleotide: CBLB-5861
ugcaggaggugggggaggu

SEQ ID NO: 36094 - RNA, 20 nt, Artificial Sequence
  Synthetic oligonucleotide: CBLB-3381
uugcaggaggugggggaggu

SEQ ID NO: 36095 - RNA, 21 nt, Artificial Sequence
  Synthetic oligonucleotide: CBLB-5862
cuugcaggaggugggggaggu

SEQ ID NO: 36096 - RNA, 22 nt, Artificial Sequence
  Synthetic oligonucleotide: CBLB-5863
ccuugcaggaggugggggaggu

SEQ ID NO: 36097 - RNA, 23 nt, Artificial Sequence
  Synthetic oligonucleotide: CBLB-5864
gccuugcaggaggugggggaggu

SEQ ID NO: 36098 - RNA, 24 nt, Artificial Sequence
  Synthetic oligonucleotide: CBLB-5865
ugccuugcaggaggugggggaggu

SEQ ID NO: 36099 - RNA, 18 nt, Artificial Sequence
  Synthetic oligonucleotide: CBLB-5866
uccgcauaagcacugggu

SEQ ID NO: 36100 - RNA, 19 nt, Artificial Sequence
  Synthetic oligonucleotide: CBLB-5867
uuccgcauaagcacugggu

SEQ ID NO: 36101 - RNA, 20 nt, Artificial Sequence
  Synthetic oligonucleotide: CBLB-5868
uuuccgcauaagcacugggu

SEQ ID NO: 36102 - RNA, 21 nt, Artificial Sequence
  Synthetic oligonucleotide: CBLB-5869
guuuccgcauaagcacugggu

SEQ ID NO: 36103 - RNA, 22 nt, Artificial Sequence
  Synthetic oligonucleotide: CBLB-5870
uguuuccgcauaagcacugggu

SEQ ID NO: 36104 - RNA, 23 nt, Artificial Sequence
  Synthetic oligonucleotide: CBLB-5871
guguuuccgcauaagcacugggu

SEQ ID NO: 36105 - RNA, 24 nt, Artificial Sequence
  Synthetic oligonucleotide: CBLB-5872
uguguuuccgcauaagcacugggu

SEQ ID NO: 36106 - RNA, 18 nt, Artificial Sequence
  Synthetic oligonucleotide: CBLB-5873
uuuaacuucaucauaugu

SEQ ID NO: 36107 - RNA, 19 nt, Artificial Sequence
  Synthetic oligonucleotide: CBLB-5874
cuuuaacuucaucauaugu

SEQ ID NO: 36108 - RNA, 20 nt, Artificial Sequence
  Synthetic oligonucleotide: CBLB-5875
gcuuuaacuucaucauaugu

SEQ ID NO: 36109 - RNA, 21 nt, Artificial Sequence
  Synthetic oligonucleotide: CBLB-5876
ugcuuuaacuucaucauaugu

SEQ ID NO: 36110 - RNA, 22 nt, Artificial Sequence
  Synthetic oligonucleotide: CBLB-5877
gugcuuuaacuucaucauaugu

SEQ ID NO: 36111 - RNA, 23 nt, Artificial Sequence
  Synthetic oligonucleotide: CBLB-5878
cgugcuuuaacuucaucauaugu

SEQ ID NO: 36112 - RNA, 24 nt, Artificial Sequence
  Synthetic oligonucleotide: CBLB-5879
ucgugcuuuaacuucaucauaugu

SEQ ID NO: 36113 - RNA, 18 nt, Artificial Sequence
  Synthetic oligonucleotide: CBLB-5880
cauauuguuccuggaauu

SEQ ID NO: 36114 - RNA, 19 nt, Artificial Sequence
  Synthetic oligonucleotide: CBLB-5881
ucauauuguuccuggaauu

SEQ ID NO: 36115 - RNA, 20 nt, Artificial Sequence
  Synthetic oligonucleotide: CBLB-3391
uucauauuguuccuggaauu

SEQ ID NO: 36116 - RNA, 21 nt, Artificial Sequence
  Synthetic oligonucleotide: CBLB-5882
auucauauuguuccuggaauu

SEQ ID NO: 36117 - RNA, 22 nt, Artificial Sequence
  Synthetic oligonucleotide: CBLB-5883
aauucauauuguuccuggaauu

SEQ ID NO: 36118 - RNA, 23 nt, Artificial Sequence
  Synthetic oligonucleotide: CBLB-5884
uaauucauauuguuccuggaauu

SEQ ID NO: 36119 - RNA, 24 nt, Artificial Sequence
  Synthetic oligonucleotide: CBLB-5885
auaauucauauuguuccuggaauu

SEQ ID NO: 36120 - RNA, 18 nt, Artificial Sequence
  Synthetic oligonucleotide: CBLB-5886
augagaugguugugaauu

SEQ ID NO: 36121 - RNA, 19 nt, Artificial Sequence
  Synthetic oligonucleotide: CBLB-5887
aaugagaugguugugaauu

SEQ ID NO: 36122 - RNA, 20 nt, Artificial Sequence
  Synthetic oligonucleotide: CBLB-5888
caaugagaugguugugaauu

SEQ ID NO: 36123 - RNA, 21 nt, Artificial Sequence
  Synthetic oligonucleotide: CBLB-5889
acaaugagaugguugugaauu

SEQ ID NO: 36124 - RNA, 22 nt, Artificial Sequence
  Synthetic oligonucleotide: CBLB-5890
gacaaugagaugguugugaauu

SEQ ID NO: 36125 - RNA, 23 nt, Artificial Sequence
  Synthetic oligonucleotide: CBLB-5891
ugacaaugagaugguugugaauu

SEQ ID NO: 36126 - RNA, 24 nt, Artificial Sequence
  Synthetic oligonucleotide: CBLB-5892
augacaaugagaugguugugaauu

SEQ ID NO: 36127 - RNA, 18 nt, Artificial Sequence
  Synthetic oligonucleotide: CBLB-5893
ucccuggaauugaccauu

SEQ ID NO: 36128 - RNA, 19 nt, Artificial Sequence
  Synthetic oligonucleotide: CBLB-5894
cucccuggaauugaccauu

SEQ ID NO: 36129 - RNA, 20 nt, Artificial Sequence
  Synthetic oligonucleotide: CBLB-3393
ucucccuggaauugaccauu

SEQ ID NO: 36130 - RNA, 21 nt, Artificial Sequence
  Synthetic oligonucleotide: CBLB-5895
aucucccuggaauugaccauu

SEQ ID NO: 36131 - RNA, 22 nt, Artificial Sequence
  Synthetic oligonucleotide: CBLB-5896
uaucucccuggaauugaccauu

SEQ ID NO: 36132 - RNA, 23 nt, Artificial Sequence
  Synthetic oligonucleotide: CBLB-5897
uuaucucccuggaauugaccauu

SEQ ID NO: 36133 - RNA, 24 nt, Artificial Sequence
  Synthetic oligonucleotide: CBLB-5898
guuaucucccuggaauugaccauu

SEQ ID NO: 36134 - RNA, 18 nt, Artificial Sequence
  Synthetic oligonucleotide: CBLB-5899
ucaaagggguccacgauu

SEQ ID NO: 36135 - RNA, 19 nt, Artificial Sequence
  Synthetic oligonucleotide: CBLB-5900
aucaaagggguccacgauu

SEQ ID NO: 36136 - RNA, 20 nt, Artificial Sequence
  Synthetic oligonucleotide: CBLB-5901
gaucaaagggguccacgauu

SEQ ID NO: 36137 - RNA, 21 nt, Artificial Sequence
  Synthetic oligonucleotide: CBLB-5902
ggaucaaagggguccacgauu

SEQ ID NO: 36138 - RNA, 22 nt, Artificial Sequence
  Synthetic oligonucleotide: CBLB-5903
uggaucaaagggguccacgauu

SEQ ID NO: 36139 - RNA, 23 nt, Artificial Sequence
  Synthetic oligonucleotide: CBLB-5904
uuggaucaaagggguccacgauu

SEQ ID NO: 36140 - RNA, 24 nt, Artificial Sequence
  Synthetic oligonucleotide: CBLB-5905
cuuggaucaaagggguccacgauu

SEQ ID NO: 36141 - RNA, 18 nt, Artificial Sequence
  Synthetic oligonucleotide: CBLB-5906
ggcaacuucgacauuauu

SEQ ID NO: 36142 - RNA, 19 nt, Artificial Sequence
  Synthetic oligonucleotide: CBLB-5907
gggcaacuucgacauuauu

SEQ ID NO: 36143 - RNA, 20 nt, Artificial Sequence
  Synthetic oligonucleotide: CBLB-5908
cgggcaacuucgacauuauu

SEQ ID NO: 36144 - RNA, 21 nt, Artificial Sequence
  Synthetic oligonucleotide: CBLB-5909
ccgggcaacuucgacauuauu

SEQ ID NO: 36145 - RNA, 22 nt, Artificial Sequence
  Synthetic oligonucleotide: CBLB-5910
uccgggcaacuucgacauuauu

SEQ ID NO: 36146 - RNA, 23 nt, Artificial Sequence
  Synthetic oligonucleotide: CBLB-5911
cuccgggcaacuucgacauuauu

SEQ ID NO: 36147 - RNA, 24 nt, Artificial Sequence
  Synthetic oligonucleotide: CBLB-5912
gcuccgggcaacuucgacauuauu

SEQ ID NO: 36148 - RNA, 18 nt, Artificial Sequence
  Synthetic oligonucleotide: CBLB-5913
uguuucuaguuuuaccuu

SEQ ID NO: 36149 - RNA, 19 nt, Artificial Sequence
  Synthetic oligonucleotide: CBLB-5914
auguuucuaguuuuaccuu

SEQ ID NO: 36150 - RNA, 20 nt, Artificial Sequence
  Synthetic oligonucleotide: CBLB-5915
cauguuucuaguuuuaccuu

SEQ ID NO: 36151 - RNA, 21 nt, Artificial Sequence
  Synthetic oligonucleotide: CBLB-5916
ccauguuucuaguuuuaccuu

SEQ ID NO: 36152 - RNA, 22 nt, Artificial Sequence
  Synthetic oligonucleotide: CBLB-5917
cccauguuucuaguuuuaccuu

SEQ ID NO: 36153 - RNA, 23 nt, Artificial Sequence
  Synthetic oligonucleotide: CBLB-5918
acccauguuucuaguuuuaccuu

SEQ ID NO: 36154 - RNA, 24 nt, Artificial Sequence
  Synthetic oligonucleotide: CBLB-5919
aacccauguuucuaguuuuaccuu

SEQ ID NO: 36155 - RNA, 18 nt, Artificial Sequence
  Synthetic oligonucleotide: CBLB-5920
gguggaggaggaucucuu

SEQ ID NO: 36156 - RNA, 19 nt, Artificial Sequence
  Synthetic oligonucleotide: CBLB-5921
cgguggaggaggaucucuu

SEQ ID NO: 36157 - RNA, 20 nt, Artificial Sequence
  Synthetic oligonucleotide: CBLB-5922
gcgguggaggaggaucucuu

SEQ ID NO: 36158 - RNA, 21 nt, Artificial Sequence
  Synthetic oligonucleotide: CBLB-5923
ggcgguggaggaggaucucuu

SEQ ID NO: 36159 - RNA, 22 nt, Artificial Sequence
  Synthetic oligonucleotide: CBLB-5924
uggcgguggaggaggaucucuu

SEQ ID NO: 36160 - RNA, 23 nt, Artificial Sequence
  Synthetic oligonucleotide: CBLB-5925
guggcgguggaggaggaucucuu

SEQ ID NO: 36161 - RNA, 24 nt, Artificial Sequence
  Synthetic oligonucleotide: CBLB-5926
gguggcgguggaggaggaucucuu

SEQ ID NO: 36162 - RNA, 18 nt, Artificial Sequence
  Synthetic oligonucleotide: CBLB-5927
ucgcugugauuccagguu

SEQ ID NO: 36163 - RNA, 19 nt, Artificial Sequence
  Synthetic oligonucleotide: CBLB-5928
cucgcugugauuccagguu

SEQ ID NO: 36164 - RNA, 20 nt, Artificial Sequence
  Synthetic oligonucleotide: CBLB-5929
acucgcugugauuccagguu

SEQ ID NO: 36165 - RNA, 21 nt, Artificial Sequence
  Synthetic oligonucleotide: CBLB-5930
aacucgcugugauuccagguu

SEQ ID NO: 36166 - RNA, 22 nt, Artificial Sequence
  Synthetic oligonucleotide: CBLB-5931
gaacucgcugugauuccagguu

SEQ ID NO: 36167 - RNA, 23 nt, Artificial Sequence
  Synthetic oligonucleotide: CBLB-5932
ugaacucgcugugauuccagguu

SEQ ID NO: 36168 - RNA, 24 nt, Artificial Sequence
  Synthetic oligonucleotide: CBLB-5933
uugaacucgcugugauuccagguu

SEQ ID NO: 36169 - RNA, 18 nt, Artificial Sequence
  Synthetic oligonucleotide: CBLB-5934
uccugcgcggucgugguu

SEQ ID NO: 36170 - RNA, 19 nt, Artificial Sequence
  Synthetic oligonucleotide: CBLB-5935
guccugcgcggucgugguu

SEQ ID NO: 36171 - RNA, 20 nt, Artificial Sequence
  Synthetic oligonucleotide: CBLB-5936
aguccugcgcggucgugguu

SEQ ID NO: 36172 - RNA, 21 nt, Artificial Sequence
  Synthetic oligonucleotide: CBLB-5937
caguccugcgcggucgugguu

SEQ ID NO: 36173 - RNA, 22 nt, Artificial Sequence
  Synthetic oligonucleotide: CBLB-5938
gcaguccugcgcggucgugguu

SEQ ID NO: 36174 - RNA, 23 nt, Artificial Sequence
  Synthetic oligonucleotide: CBLB-5939
ugcaguccugcgcggucgugguu

SEQ ID NO: 36175 - RNA, 24 nt, Artificial Sequence
  Synthetic oligonucleotide: CBLB-5940
gugcaguccugcgcggucgugguu

SEQ ID NO: 36176 - RNA, 18 nt, Artificial Sequence
  Synthetic oligonucleotide: CBLB-5941
uugaaauaagggcuuguu

SEQ ID NO: 36177 - RNA, 19 nt, Artificial Sequence
  Synthetic oligonucleotide: CBLB-5942
cuugaaauaagggcuuguu

SEQ ID NO: 36178 - RNA, 20 nt, Artificial Sequence
  Synthetic oligonucleotide: CBLB-5943
gcuugaaauaagggcuuguu

SEQ ID NO: 36179 - RNA, 21 nt, Artificial Sequence
  Synthetic oligonucleotide: CBLB-5944
ggcuugaaauaagggcuuguu

SEQ ID NO: 36180 - RNA, 22 nt, Artificial Sequence
  Synthetic oligonucleotide: CBLB-5945
gggcuugaaauaagggcuuguu

SEQ ID NO: 36181 - RNA, 23 nt, Artificial Sequence
  Synthetic oligonucleotide: CBLB-5946
agggcuugaaauaagggcuuguu

SEQ ID NO: 36182 - RNA, 24 nt, Artificial Sequence
  Synthetic oligonucleotide: CBLB-5947
cagggcuugaaauaagggcuuguu

SEQ ID NO: 36183 - RNA, 18 nt, Artificial Sequence
  Synthetic oligonucleotide: CBLB-5948
auauuguuccuggaauuu

SEQ ID NO: 36184 - RNA, 19 nt, Artificial Sequence
  Synthetic oligonucleotide: CBLB-5949
cauauuguuccuggaauuu

SEQ ID NO: 36185 - RNA, 20 nt, Artificial Sequence
  Synthetic oligonucleotide: CBLB-3404
ucauauuguuccuggaauuu

SEQ ID NO: 36186 - RNA, 21 nt, Artificial Sequence
  Synthetic oligonucleotide: CBLB-5950
uucauauuguuccuggaauuu

SEQ ID NO: 36187 - RNA, 22 nt, Artificial Sequence
  Synthetic oligonucleotide: CBLB-5951
auucauauuguuccuggaauuu

SEQ ID NO: 36188 - RNA, 23 nt, Artificial Sequence
  Synthetic oligonucleotide: CBLB-5952
aauucauauuguuccuggaauuu

SEQ ID NO: 36189 - RNA, 24 nt, Artificial Sequence
  Synthetic oligonucleotide: CBLB-5953
uaauucauauuguuccuggaauuu

SEQ ID NO: 36190 - RNA, 18 nt, Artificial Sequence
  Synthetic oligonucleotide: CBLB-5954
uaaaucaauuguugauuu

SEQ ID NO: 36191 - RNA, 19 nt, Artificial Sequence
  Synthetic oligonucleotide: CBLB-5955
uuaaaucaauuguugauuu

SEQ ID NO: 36192 - RNA, 20 nt, Artificial Sequence
  Synthetic oligonucleotide: CBLB-5956
guuaaaucaauuguugauuu

SEQ ID NO: 36193 - RNA, 21 nt, Artificial Sequence
  Synthetic oligonucleotide: CBLB-5957
aguuaaaucaauuguugauuu

SEQ ID NO: 36194 - RNA, 22 nt, Artificial Sequence
  Synthetic oligonucleotide: CBLB-5958
aaguuaaaucaauuguugauuu

SEQ ID NO: 36195 - RNA, 23 nt, Artificial Sequence
  Synthetic oligonucleotide: CBLB-5959
caaguuaaaucaauuguugauuu

SEQ ID NO: 36196 - RNA, 24 nt, Artificial Sequence
  Synthetic oligonucleotide: CBLB-5960
gcaaguuaaaucaauuguugauuu

SEQ ID NO: 36197 - RNA, 18 nt, Artificial Sequence
  Synthetic oligonucleotide: CBLB-5961
cgcugugauuccagguuu

SEQ ID NO: 36198 - RNA, 19 nt, Artificial Sequence
  Synthetic oligonucleotide: CBLB-5962
ucgcugugauuccagguuu

SEQ ID NO: 36199 - RNA, 20 nt, Artificial Sequence
  Synthetic oligonucleotide: CBLB-3407
cucgcugugauuccagguuu

SEQ ID NO: 36200 - RNA, 21 nt, Artificial Sequence
  Synthetic oligonucleotide: CBLB-5963
acucgcugugauuccagguuu

SEQ ID NO: 36201 - RNA, 22 nt, Artificial Sequence
  Synthetic oligonucleotide: CBLB-5964
aacucgcugugauuccagguuu

SEQ ID NO: 36202 - RNA, 23 nt, Artificial Sequence
  Synthetic oligonucleotide: CBLB-5965
gaacucgcugugauuccagguuu

SEQ ID NO: 36203 - RNA, 24 nt, Artificial Sequence
  Synthetic oligonucleotide: CBLB-5966
ugaacucgcugugauuccagguuu

SEQ ID NO: 36204 - RNA, 18 nt, Artificial Sequence
  Synthetic oligonucleotide: CBLB-5967
ccugcgcggucgugguuu

SEQ ID NO: 36205 - RNA, 19 nt, Artificial Sequence
  Synthetic oligonucleotide: CBLB-5968
uccugcgcggucgugguuu

SEQ ID NO: 36206 - RNA, 20 nt, Artificial Sequence
  Synthetic oligonucleotide: CBLB-3408
guccugcgcggucgugguuu

SEQ ID NO: 36207 - RNA, 21 nt, Artificial Sequence
  Synthetic oligonucleotide: CBLB-5969
aguccugcgcggucgugguuu

SEQ ID NO: 36208 - RNA, 22 nt, Artificial Sequence
  Synthetic oligonucleotide: CBLB-5970
caguccugcgcggucgugguuu

SEQ ID NO: 36209 - RNA, 23 nt, Artificial Sequence
  Synthetic oligonucleotide: CBLB-5971
gcaguccugcgcggucgugguuu

SEQ ID NO: 36210 - RNA, 24 nt, Artificial Sequence
  Synthetic oligonucleotide: CBLB-5972
ugcaguccugcgcggucgugguuu

SEQ ID NO: 36211 - RNA, 18 nt, Artificial Sequence
  Synthetic oligonucleotide: CBLB-5973
aagauaagggacaguuuu

SEQ ID NO: 36212 - RNA, 19 nt, Artificial Sequence
  Synthetic oligonucleotide: CBLB-5974
gaagauaagggacaguuuu

SEQ ID NO: 36213 - RNA, 20 nt, Artificial Sequence
  Synthetic oligonucleotide: CBLB-5975
ugaagauaagggacaguuuu

SEQ ID NO: 36214 - RNA, 21 nt, Artificial Sequence
  Synthetic oligonucleotide: CBLB-5976
cugaagauaagggacaguuuu

SEQ ID NO: 36215 - RNA, 22 nt, Artificial Sequence
  Synthetic oligonucleotide: CBLB-5977
acugaagauaagggacaguuuu

SEQ ID NO: 36216 - RNA, 23 nt, Artificial Sequence
  Synthetic oligonucleotide: CBLB-5978
gacugaagauaagggacaguuuu

SEQ ID NO: 36217 - RNA, 24 nt, Artificial Sequence
  Synthetic oligonucleotide: CBLB-5979
ugacugaagauaagggacaguuuu

SEQ ID NO: 36218 - RNA, 18 nt, Artificial Sequence
  Synthetic oligonucleotide: CBLB-5980
gaacuguagacaccaaaa

SEQ ID NO: 36219 - RNA, 19 nt, Artificial Sequence
  Synthetic oligonucleotide: CBLB-5981
agaacuguagacaccaaaa

SEQ ID NO: 36220 - RNA, 20 nt, Artificial Sequence
  Synthetic oligonucleotide: CBLB-3015
cagaacuguagacaccaaaa

SEQ ID NO: 36221 - RNA, 21 nt, Artificial Sequence
  Synthetic oligonucleotide: CBLB-5982
ccagaacuguagacaccaaaa

SEQ ID NO: 36222 - RNA, 22 nt, Artificial Sequence
  Synthetic oligonucleotide: CBLB-5983
gccagaacuguagacaccaaaa

SEQ ID NO: 36223 - RNA, 23 nt, Artificial Sequence
  Synthetic oligonucleotide: CBLB-5984
agccagaacuguagacaccaaaa

SEQ ID NO: 36224 - RNA, 24 nt, Artificial Sequence
  Synthetic oligonucleotide: CBLB-5985
cagccagaacuguagacaccaaaa

SEQ ID NO: 36225 - RNA, 18 nt, Artificial Sequence
  Synthetic oligonucleotide: CBLB-5986
agaacuguagacaccaaa

SEQ ID NO: 36226 - RNA, 19 nt, Artificial Sequence
  Synthetic oligonucleotide: CBLB-5987
cagaacuguagacaccaaa

SEQ ID NO: 36227 - RNA, 20 nt, Artificial Sequence
  Synthetic oligonucleotide: CBLB-5988
ccagaacuguagacaccaaa

SEQ ID NO: 36228 - RNA, 21 nt, Artificial Sequence
  Synthetic oligonucleotide: CBLB-5989
gccagaacuguagacaccaaa

SEQ ID NO: 36229 - RNA, 22 nt, Artificial Sequence
  Synthetic oligonucleotide: CBLB-5990
agccagaacuguagacaccaaa

SEQ ID NO: 36230 - RNA, 23 nt, Artificial Sequence
  Synthetic oligonucleotide: CBLB-5991
cagccagaacuguagacaccaaa

SEQ ID NO: 36231 - RNA, 24 nt, Artificial Sequence
  Synthetic oligonucleotide: CBLB-5992
gcagccagaacuguagacaccaaa

SEQ ID NO: 36232 - RNA, 18 nt, Artificial Sequence
  Synthetic oligonucleotide: CBLB-5993
gauuguaaguaugagaaa

SEQ ID NO: 36233 - RNA, 19 nt, Artificial Sequence
  Synthetic oligonucleotide: CBLB-5994
ggauuguaaguaugagaaa

SEQ ID NO: 36234 - RNA, 20 nt, Artificial Sequence
  Synthetic oligonucleotide: CBLB-3020
aggauuguaaguaugagaaa

SEQ ID NO: 36235 - RNA, 21 nt, Artificial Sequence
  Synthetic oligonucleotide: CBLB-5995
aaggauuguaaguaugagaaa

SEQ ID NO: 36236 - RNA, 22 nt, Artificial Sequence
  Synthetic oligonucleotide: CBLB-5996
gaaggauuguaaguaugagaaa

SEQ ID NO: 36237 - RNA, 23 nt, Artificial Sequence
  Synthetic oligonucleotide: CBLB-5997
ggaaggauuguaaguaugagaaa

SEQ ID NO: 36238 - RNA, 24 nt, Artificial Sequence
  Synthetic oligonucleotide: CBLB-5998
gggaaggauuguaaguaugagaaa

SEQ ID NO: 36239 - RNA, 18 nt, Artificial Sequence
  Synthetic oligonucleotide: CBLB-5999
cugucguugugaaauaaa

SEQ ID NO: 36240 - RNA, 19 nt, Artificial Sequence
  Synthetic oligonucleotide: CBLB-6000
ucugucguugugaaauaaa

SEQ ID NO: 36241 - RNA, 20 nt, Artificial Sequence
  Synthetic oligonucleotide: CBLB-3022
uucugucguugugaaauaaa

SEQ ID NO: 36242 - RNA, 21 nt, Artificial Sequence
  Synthetic oligonucleotide: CBLB-6001
uuucugucguugugaaauaaa

SEQ ID NO: 36243 - RNA, 22 nt, Artificial Sequence
  Synthetic oligonucleotide: CBLB-6002
cuuucugucguugugaaauaaa

SEQ ID NO: 36244 - RNA, 23 nt, Artificial Sequence
  Synthetic oligonucleotide: CBLB-6003
ccuuucugucguugugaaauaaa

SEQ ID NO: 36245 - RNA, 24 nt, Artificial Sequence
  Synthetic oligonucleotide: CBLB-6004
cccuuucugucguugugaaauaaa

SEQ ID NO: 36246 - RNA, 18 nt, Artificial Sequence
  Synthetic oligonucleotide: CBLB-6005
gcaugguucuucacucaa

SEQ ID NO: 36247 - RNA, 19 nt, Artificial Sequence
  Synthetic oligonucleotide: CBLB-6006
agcaugguucuucacucaa

SEQ ID NO: 36248 - RNA, 20 nt, Artificial Sequence
  Synthetic oligonucleotide: CBLB-6007
aagcaugguucuucacucaa

SEQ ID NO: 36249 - RNA, 21 nt, Artificial Sequence
  Synthetic oligonucleotide: CBLB-6008
aaagcaugguucuucacucaa

SEQ ID NO: 36250 - RNA, 22 nt, Artificial Sequence
  Synthetic oligonucleotide: CBLB-6009
caaagcaugguucuucacucaa

SEQ ID NO: 36251 - RNA, 23 nt, Artificial Sequence
  Synthetic oligonucleotide: CBLB-6010
ccaaagcaugguucuucacucaa

SEQ ID NO: 36252 - RNA, 24 nt, Artificial Sequence
  Synthetic oligonucleotide: CBLB-6011
uccaaagcaugguucuucacucaa

SEQ ID NO: 36253 - RNA, 18 nt, Artificial Sequence
  Synthetic oligonucleotide: CBLB-6012
agcgaguucaaaugucaa

SEQ ID NO: 36254 - RNA, 19 nt, Artificial Sequence
  Synthetic oligonucleotide: CBLB-6013
cagcgaguucaaaugucaa

SEQ ID NO: 36255 - RNA, 20 nt, Artificial Sequence
  Synthetic oligonucleotide: CBLB-3036
acagcgaguucaaaugucaa

SEQ ID NO: 36256 - RNA, 21 nt, Artificial Sequence
  Synthetic oligonucleotide: CBLB-6014
cacagcgaguucaaaugucaa

SEQ ID NO: 36257 - RNA, 22 nt, Artificial Sequence
  Synthetic oligonucleotide: CBLB-6015
ucacagcgaguucaaaugucaa

SEQ ID NO: 36258 - RNA, 23 nt, Artificial Sequence
  Synthetic oligonucleotide: CBLB-6016
aucacagcgaguucaaaugucaa

SEQ ID NO: 36259 - RNA, 24 nt, Artificial Sequence
  Synthetic oligonucleotide: CBLB-6017
aaucacagcgaguucaaaugucaa

SEQ ID NO: 36260 - RNA, 18 nt, Artificial Sequence
  Synthetic oligonucleotide: CBLB-6018
ggauuguaaguaugagaa

SEQ ID NO: 36261 - RNA, 19 nt, Artificial Sequence
  Synthetic oligonucleotide: CBLB-6019
aggauuguaaguaugagaa

SEQ ID NO: 36262 - RNA, 20 nt, Artificial Sequence
  Synthetic oligonucleotide: CBLB-6020
aaggauuguaaguaugagaa

SEQ ID NO: 36263 - RNA, 21 nt, Artificial Sequence
  Synthetic oligonucleotide: CBLB-6021
gaaggauuguaaguaugagaa

SEQ ID NO: 36264 - RNA, 22 nt, Artificial Sequence
  Synthetic oligonucleotide: CBLB-6022
ggaaggauuguaaguaugagaa

SEQ ID NO: 36265 - RNA, 23 nt, Artificial Sequence
  Synthetic oligonucleotide: CBLB-6023
gggaaggauuguaaguaugagaa

SEQ ID NO: 36266 - RNA, 24 nt, Artificial Sequence
  Synthetic oligonucleotide: CBLB-6024
agggaaggauuguaaguaugagaa

SEQ ID NO: 36267 - RNA, 18 nt, Artificial Sequence
  Synthetic oligonucleotide: CBLB-6025
guugugaaauaaaaggaa

SEQ ID NO: 36268 - RNA, 19 nt, Artificial Sequence
  Synthetic oligonucleotide: CBLB-6026
cguugugaaauaaaaggaa

SEQ ID NO: 36269 - RNA, 20 nt, Artificial Sequence
  Synthetic oligonucleotide: CBLB-6027
ucguugugaaauaaaaggaa

SEQ ID NO: 36270 - RNA, 21 nt, Artificial Sequence
  Synthetic oligonucleotide: CBLB-6028
gucguugugaaauaaaaggaa

SEQ ID NO: 36271 - RNA, 22 nt, Artificial Sequence
  Synthetic oligonucleotide: CBLB-6029
ugucguugugaaauaaaaggaa

SEQ ID NO: 36272 - RNA, 23 nt, Artificial Sequence
  Synthetic oligonucleotide: CBLB-6030
cugucguugugaaauaaaaggaa

SEQ ID NO: 36273 - RNA, 24 nt, Artificial Sequence
  Synthetic oligonucleotide: CBLB-6031
ucugucguugugaaauaaaaggaa

SEQ ID NO: 36274 - RNA, 18 nt, Artificial Sequence
  Synthetic oligonucleotide: CBLB-6032
gggcucuauuuugcggaa

SEQ ID NO: 36275 - RNA, 19 nt, Artificial Sequence
  Synthetic oligonucleotide: CBLB-6033
ggggcucuauuuugcggaa

SEQ ID NO: 36276 - RNA, 20 nt, Artificial Sequence
  Synthetic oligonucleotide: CBLB-6034
uggggcucuauuuugcggaa

SEQ ID NO: 36277 - RNA, 21 nt, Artificial Sequence
  Synthetic oligonucleotide: CBLB-6035
uuggggcucuauuuugcggaa

SEQ ID NO: 36278 - RNA, 22 nt, Artificial Sequence
  Synthetic oligonucleotide: CBLB-6036
cuuggggcucuauuuugcggaa

SEQ ID NO: 36279 - RNA, 23 nt, Artificial Sequence
  Synthetic oligonucleotide: CBLB-6037
ccuuggggcucuauuuugcggaa

SEQ ID NO: 36280 - RNA, 24 nt, Artificial Sequence
  Synthetic oligonucleotide: CBLB-6038
gccuuggggcucuauuuugcggaa

SEQ ID NO: 36281 - RNA, 18 nt, Artificial Sequence
  Synthetic oligonucleotide: CBLB-6039
ccaauggucaccuuggaa

SEQ ID NO: 36282 - RNA, 19 nt, Artificial Sequence
  Synthetic oligonucleotide: CBLB-6040
uccaauggucaccuuggaa

SEQ ID NO: 36283 - RNA, 20 nt, Artificial Sequence
  Synthetic oligonucleotide: CBLB-6041
uuccaauggucaccuuggaa

SEQ ID NO: 36284 - RNA, 21 nt, Artificial Sequence
  Synthetic oligonucleotide: CBLB-6042
uuuccaauggucaccuuggaa

SEQ ID NO: 36285 - RNA, 22 nt, Artificial Sequence
  Synthetic oligonucleotide: CBLB-6043
uuuuccaauggucaccuuggaa

SEQ ID NO: 36286 - RNA, 23 nt, Artificial Sequence
  Synthetic oligonucleotide: CBLB-6044
cuuuuccaauggucaccuuggaa

SEQ ID NO: 36287 - RNA, 24 nt, Artificial Sequence
  Synthetic oligonucleotide: CBLB-6045
ucuuuuccaauggucaccuuggaa

SEQ ID NO: 36288 - RNA, 18 nt, Artificial Sequence
  Synthetic oligonucleotide: CBLB-6046
uggucacuguaugcugaa

SEQ ID NO: 36289 - RNA, 19 nt, Artificial Sequence
  Synthetic oligonucleotide: CBLB-6047
auggucacuguaugcugaa

SEQ ID NO: 36290 - RNA, 20 nt, Artificial Sequence
  Synthetic oligonucleotide: CBLB-3042
aauggucacuguaugcugaa

SEQ ID NO: 36291 - RNA, 21 nt, Artificial Sequence
  Synthetic oligonucleotide: CBLB-6048
uaauggucacuguaugcugaa

SEQ ID NO: 36292 - RNA, 22 nt, Artificial Sequence
  Synthetic oligonucleotide: CBLB-6049
auaauggucacuguaugcugaa

SEQ ID NO: 36293 - RNA, 23 nt, Artificial Sequence
  Synthetic oligonucleotide: CBLB-6050
gauaauggucacuguaugcugaa

SEQ ID NO: 36294 - RNA, 24 nt, Artificial Sequence
  Synthetic oligonucleotide: CBLB-6051
ugauaauggucacuguaugcugaa

SEQ ID NO: 36295 - RNA, 18 nt, Artificial Sequence
  Synthetic oligonucleotide: CBLB-6052
ugccuuugaagaggugaa

SEQ ID NO: 36296 - RNA, 19 nt, Artificial Sequence
  Synthetic oligonucleotide: CBLB-6053
augccuuugaagaggugaa

SEQ ID NO: 36297 - RNA, 20 nt, Artificial Sequence
  Synthetic oligonucleotide: CBLB-6054
uaugccuuugaagaggugaa

SEQ ID NO: 36298 - RNA, 21 nt, Artificial Sequence
  Synthetic oligonucleotide: CBLB-6055
uuaugccuuugaagaggugaa

SEQ ID NO: 36299 - RNA, 22 nt, Artificial Sequence
  Synthetic oligonucleotide: CBLB-6056
guuaugccuuugaagaggugaa

SEQ ID NO: 36300 - RNA, 23 nt, Artificial Sequence
  Synthetic oligonucleotide: CBLB-6057
gguuaugccuuugaagaggugaa

SEQ ID NO: 36301 - RNA, 24 nt, Artificial Sequence
  Synthetic oligonucleotide: CBLB-6058
ggguuaugccuuugaagaggugaa

SEQ ID NO: 36302 - RNA, 18 nt, Artificial Sequence
  Synthetic oligonucleotide: CBLB-6059
uaugaauuauauugugaa

SEQ ID NO: 36303 - RNA, 19 nt, Artificial Sequence
  Synthetic oligonucleotide: CBLB-6060
auaugaauuauauugugaa

SEQ ID NO: 36304 - RNA, 20 nt, Artificial Sequence
  Synthetic oligonucleotide: CBLB-6061
aauaugaauuauauugugaa

SEQ ID NO: 36305 - RNA, 21 nt, Artificial Sequence
  Synthetic oligonucleotide: CBLB-6062
caauaugaauuauauugugaa

SEQ ID NO: 36306 - RNA, 22 nt, Artificial Sequence
  Synthetic oligonucleotide: CBLB-6063
acaauaugaauuauauugugaa

SEQ ID NO: 36307 - RNA, 23 nt, Artificial Sequence
  Synthetic oligonucleotide: CBLB-6064
aacaauaugaauuauauugugaa

SEQ ID NO: 36308 - RNA, 24 nt, Artificial Sequence
  Synthetic oligonucleotide: CBLB-6065
gaacaauaugaauuauauugugaa

SEQ ID NO: 36309 - RNA, 18 nt, Artificial Sequence
  Synthetic oligonucleotide: CBLB-6066
ucugucguugugaaauaa

SEQ ID NO: 36310 - RNA, 19 nt, Artificial Sequence
  Synthetic oligonucleotide: CBLB-6067
uucugucguugugaaauaa

SEQ ID NO: 36311 - RNA, 20 nt, Artificial Sequence
  Synthetic oligonucleotide: CBLB-6068
uuucugucguugugaaauaa

SEQ ID NO: 36312 - RNA, 21 nt, Artificial Sequence
  Synthetic oligonucleotide: CBLB-6069
cuuucugucguugugaaauaa

SEQ ID NO: 36313 - RNA, 22 nt, Artificial Sequence
  Synthetic oligonucleotide: CBLB-6070
ccuuucugucguugugaaauaa

SEQ ID NO: 36314 - RNA, 23 nt, Artificial Sequence
  Synthetic oligonucleotide: CBLB-6071
cccuuucugucguugugaaauaa

SEQ ID NO: 36315 - RNA, 24 nt, Artificial Sequence
  Synthetic oligonucleotide: CBLB-6072
gcccuuucugucguugugaaauaa

SEQ ID NO: 36316 - RNA, 18 nt, Artificial Sequence
  Synthetic oligonucleotide: CBLB-6073
ugaaaaugucaaaacuaa

SEQ ID NO: 36317 - RNA, 19 nt, Artificial Sequence
  Synthetic oligonucleotide: CBLB-6074
gugaaaaugucaaaacuaa

SEQ ID NO: 36318 - RNA, 20 nt, Artificial Sequence
  Synthetic oligonucleotide: CBLB-6075
ggugaaaaugucaaaacuaa

SEQ ID NO: 36319 - RNA, 21 nt, Artificial Sequence
  Synthetic oligonucleotide: CBLB-6076
aggugaaaaugucaaaacuaa

SEQ ID NO: 36320 - RNA, 22 nt, Artificial Sequence
  Synthetic oligonucleotide: CBLB-6077
caggugaaaaugucaaaacuaa

SEQ ID NO: 36321 - RNA, 23 nt, Artificial Sequence
  Synthetic oligonucleotide: CBLB-6078
ccaggugaaaaugucaaaacuaa

SEQ ID NO: 36322 - RNA, 24 nt, Artificial Sequence
  Synthetic oligonucleotide: CBLB-6079
accaggugaaaaugucaaaacuaa

SEQ ID NO: 36323 - RNA, 18 nt, Artificial Sequence
  Synthetic oligonucleotide: CBLB-6080
uugcacucgauugggaca

SEQ ID NO: 36324 - RNA, 19 nt, Artificial Sequence
  Synthetic oligonucleotide: CBLB-6081
guugcacucgauugggaca

SEQ ID NO: 36325 - RNA, 20 nt, Artificial Sequence
  Synthetic oligonucleotide: CBLB-6082
aguugcacucgauugggaca

SEQ ID NO: 36326 - RNA, 21 nt, Artificial Sequence
  Synthetic oligonucleotide: CBLB-6083
aaguugcacucgauugggaca

SEQ ID NO: 36327 - RNA, 22 nt, Artificial Sequence
  Synthetic oligonucleotide: CBLB-6084
uaaguugcacucgauugggaca

SEQ ID NO: 36328 - RNA, 23 nt, Artificial Sequence
  Synthetic oligonucleotide: CBLB-6085
uuaaguugcacucgauugggaca

SEQ ID NO: 36329 - RNA, 24 nt, Artificial Sequence
  Synthetic oligonucleotide: CBLB-6086
guuaaguugcacucgauugggaca

SEQ ID NO: 36330 - RNA, 18 nt, Artificial Sequence
  Synthetic oligonucleotide: CBLB-6087
ugcaccagaaauucacca

SEQ ID NO: 36331 - RNA, 19 nt, Artificial Sequence
  Synthetic oligonucleotide: CBLB-6088
cugcaccagaaauucacca

SEQ ID NO: 36332 - RNA, 20 nt, Artificial Sequence
  Synthetic oligonucleotide: CBLB-6089
acugcaccagaaauucacca

SEQ ID NO: 36333 - RNA, 21 nt, Artificial Sequence
  Synthetic oligonucleotide: CBLB-6090
gacugcaccagaaauucacca

SEQ ID NO: 36334 - RNA, 22 nt, Artificial Sequence
  Synthetic oligonucleotide: CBLB-6091
ggacugcaccagaaauucacca

SEQ ID NO: 36335 - RNA, 23 nt, Artificial Sequence
  Synthetic oligonucleotide: CBLB-6092
aggacugcaccagaaauucacca

SEQ ID NO: 36336 - RNA, 24 nt, Artificial Sequence
  Synthetic oligonucleotide: CBLB-6093
caggacugcaccagaaauucacca

SEQ ID NO: 36337 - RNA, 18 nt, Artificial Sequence
  Synthetic oligonucleotide: CBLB-6094
cacagaacuaucguacca

SEQ ID NO: 36338 - RNA, 19 nt, Artificial Sequence
  Synthetic oligonucleotide: CBLB-6095
gcacagaacuaucguacca

SEQ ID NO: 36339 - RNA, 20 nt, Artificial Sequence
  Synthetic oligonucleotide: CBLB-3063
ugcacagaacuaucguacca

SEQ ID NO: 36340 - RNA, 21 nt, Artificial Sequence
  Synthetic oligonucleotide: CBLB-6096
uugcacagaacuaucguacca

SEQ ID NO: 36341 - RNA, 22 nt, Artificial Sequence
  Synthetic oligonucleotide: CBLB-6097
cuugcacagaacuaucguacca

SEQ ID NO: 36342 - RNA, 23 nt, Artificial Sequence
  Synthetic oligonucleotide: CBLB-6098
ccuugcacagaacuaucguacca

SEQ ID NO: 36343 - RNA, 24 nt, Artificial Sequence
  Synthetic oligonucleotide: CBLB-6099
accuugcacagaacuaucguacca

SEQ ID NO: 36344 - RNA, 18 nt, Artificial Sequence
  Synthetic oligonucleotide: CBLB-6100
auccucuccccuugccca

SEQ ID NO: 36345 - RNA, 19 nt, Artificial Sequence
  Synthetic oligonucleotide: CBLB-6101
gauccucuccccuugccca

SEQ ID NO: 36346 - RNA, 20 nt, Artificial Sequence
  Synthetic oligonucleotide: CBLB-6102
ggauccucuccccuugccca

SEQ ID NO: 36347 - RNA, 21 nt, Artificial Sequence
  Synthetic oligonucleotide: CBLB-6103
aggauccucuccccuugccca

SEQ ID NO: 36348 - RNA, 22 nt, Artificial Sequence
  Synthetic oligonucleotide: CBLB-6104
caggauccucuccccuugccca

SEQ ID NO: 36349 - RNA, 23 nt, Artificial Sequence
  Synthetic oligonucleotide: CBLB-6105
ccaggauccucuccccuugccca

SEQ ID NO: 36350 - RNA, 24 nt, Artificial Sequence
  Synthetic oligonucleotide: CBLB-6106
accaggauccucuccccuugccca

SEQ ID NO: 36351 - RNA, 18 nt, Artificial Sequence
  Synthetic oligonucleotide: CBLB-6107
gguaggagggaaaagcca

SEQ ID NO: 36352 - RNA, 19 nt, Artificial Sequence
  Synthetic oligonucleotide: CBLB-6108
agguaggagggaaaagcca

SEQ ID NO: 36353 - RNA, 20 nt, Artificial Sequence
  Synthetic oligonucleotide: CBLB-6109
cagguaggagggaaaagcca

SEQ ID NO: 36354 - RNA, 21 nt, Artificial Sequence
  Synthetic oligonucleotide: CBLB-6110
ucagguaggagggaaaagcca

SEQ ID NO: 36355 - RNA, 22 nt, Artificial Sequence
  Synthetic oligonucleotide: CBLB-6111
uucagguaggagggaaaagcca

SEQ ID NO: 36356 - RNA, 23 nt, Artificial Sequence
  Synthetic oligonucleotide: CBLB-6112
cuucagguaggagggaaaagcca

SEQ ID NO: 36357 - RNA, 24 nt, Artificial Sequence
  Synthetic oligonucleotide: CBLB-6113
ccuucagguaggagggaaaagcca

SEQ ID NO: 36358 - RNA, 18 nt, Artificial Sequence
  Synthetic oligonucleotide: CBLB-6114
ucccaauggucaauucca

SEQ ID NO: 36359 - RNA, 19 nt, Artificial Sequence
  Synthetic oligonucleotide: CBLB-6115
uucccaauggucaauucca

SEQ ID NO: 36360 - RNA, 20 nt, Artificial Sequence
  Synthetic oligonucleotide: CBLB-3067
uuucccaauggucaauucca

SEQ ID NO: 36361 - RNA, 21 nt, Artificial Sequence
  Synthetic oligonucleotide: CBLB-6116
cuuucccaauggucaauucca

SEQ ID NO: 36362 - RNA, 22 nt, Artificial Sequence
  Synthetic oligonucleotide: CBLB-6117
ucuuucccaauggucaauucca

SEQ ID NO: 36363 - RNA, 23 nt, Artificial Sequence
  Synthetic oligonucleotide: CBLB-6118
aucuuucccaauggucaauucca

SEQ ID NO: 36364 - RNA, 24 nt, Artificial Sequence
  Synthetic oligonucleotide: CBLB-6119
aaucuuucccaauggucaauucca

SEQ ID NO: 36365 - RNA, 18 nt, Artificial Sequence
  Synthetic oligonucleotide: CBLB-6120
cccugauugauggcagca

SEQ ID NO: 36366 - RNA, 19 nt, Artificial Sequence
  Synthetic oligonucleotide: CBLB-6121
gcccugauugauggcagca

SEQ ID NO: 36367 - RNA, 20 nt, Artificial Sequence
  Synthetic oligonucleotide: CBLB-3072
agcccugauugauggcagca

SEQ ID NO: 36368 - RNA, 21 nt, Artificial Sequence
  Synthetic oligonucleotide: CBLB-6122
aagcccugauugauggcagca

SEQ ID NO: 36369 - RNA, 22 nt, Artificial Sequence
  Synthetic oligonucleotide: CBLB-6123
caagcccugauugauggcagca

SEQ ID NO: 36370 - RNA, 23 nt, Artificial Sequence
  Synthetic oligonucleotide: CBLB-6124
ucaagcccugauugauggcagca

SEQ ID NO: 36371 - RNA, 24 nt, Artificial Sequence
  Synthetic oligonucleotide: CBLB-6125
uucaagcccugauugauggcagca

SEQ ID NO: 36372 - RNA, 18 nt, Artificial Sequence
  Synthetic oligonucleotide: CBLB-6126
caugggccugaggcggca

SEQ ID NO: 36373 - RNA, 19 nt, Artificial Sequence
  Synthetic oligonucleotide: CBLB-6127
ccaugggccugaggcggca

SEQ ID NO: 36374 - RNA, 20 nt, Artificial Sequence
  Synthetic oligonucleotide: CBLB-6128
cccaugggccugaggcggca

SEQ ID NO: 36375 - RNA, 21 nt, Artificial Sequence
  Synthetic oligonucleotide: CBLB-6129
ccccaugggccugaggcggca

SEQ ID NO: 36376 - RNA, 22 nt, Artificial Sequence
  Synthetic oligonucleotide: CBLB-6130
accccaugggccugaggcggca

SEQ ID NO: 36377 - RNA, 23 nt, Artificial Sequence
  Synthetic oligonucleotide: CBLB-6131
aaccccaugggccugaggcggca

SEQ ID NO: 36378 - RNA, 24 nt, Artificial Sequence
  Synthetic oligonucleotide: CBLB-6132
aaaccccaugggccugaggcggca

SEQ ID NO: 36379 - RNA, 18 nt, Artificial Sequence
  Synthetic oligonucleotide: CBLB-6133
cuuuuuuuccaccuugca

SEQ ID NO: 36380 - RNA, 19 nt, Artificial Sequence
  Synthetic oligonucleotide: CBLB-6134
ccuuuuuuuccaccuugca

SEQ ID NO: 36381 - RNA, 20 nt, Artificial Sequence
  Synthetic oligonucleotide: CBLB-6135
cccuuuuuuuccaccuugca

SEQ ID NO: 36382 - RNA, 21 nt, Artificial Sequence
  Synthetic oligonucleotide: CBLB-6136
ucccuuuuuuuccaccuugca

SEQ ID NO: 36383 - RNA, 22 nt, Artificial Sequence
  Synthetic oligonucleotide: CBLB-6137
uucccuuuuuuuccaccuugca

SEQ ID NO: 36384 - RNA, 23 nt, Artificial Sequence
  Synthetic oligonucleotide: CBLB-6138
uuucccuuuuuuuccaccuugca

SEQ ID NO: 36385 - RNA, 24 nt, Artificial Sequence
  Synthetic oligonucleotide: CBLB-6139
auuucccuuuuuuuccaccuugca

SEQ ID NO: 36386 - RNA, 18 nt, Artificial Sequence
  Synthetic oligonucleotide: CBLB-6140
aaaacuaacagaacauca

SEQ ID NO: 36387 - RNA, 19 nt, Artificial Sequence
  Synthetic oligonucleotide: CBLB-6141
caaaacuaacagaacauca

SEQ ID NO: 36388 - RNA, 20 nt, Artificial Sequence
  Synthetic oligonucleotide: CBLB-6142
ucaaaacuaacagaacauca

SEQ ID NO: 36389 - RNA, 21 nt, Artificial Sequence
  Synthetic oligonucleotide: CBLB-6143
gucaaaacuaacagaacauca

SEQ ID NO: 36390 - RNA, 22 nt, Artificial Sequence
  Synthetic oligonucleotide: CBLB-6144
ugucaaaacuaacagaacauca

SEQ ID NO: 36391 - RNA, 23 nt, Artificial Sequence
  Synthetic oligonucleotide: CBLB-6145
augucaaaacuaacagaacauca

SEQ ID NO: 36392 - RNA, 24 nt, Artificial Sequence
  Synthetic oligonucleotide: CBLB-6146
aaugucaaaacuaacagaacauca

SEQ ID NO: 36393 - RNA, 18 nt, Artificial Sequence
  Synthetic oligonucleotide: CBLB-6147
caaaaauugcaaaacuca

SEQ ID NO: 36394 - RNA, 19 nt, Artificial Sequence
  Synthetic oligonucleotide: CBLB-6148
gcaaaaauugcaaaacuca

SEQ ID NO: 36395 - RNA, 20 nt, Artificial Sequence
  Synthetic oligonucleotide: CBLB-3085
ugcaaaaauugcaaaacuca

SEQ ID NO: 36396 - RNA, 21 nt, Artificial Sequence
  Synthetic oligonucleotide: CBLB-6149
augcaaaaauugcaaaacuca

SEQ ID NO: 36397 - RNA, 22 nt, Artificial Sequence
  Synthetic oligonucleotide: CBLB-6150
gaugcaaaaauugcaaaacuca

SEQ ID NO: 36398 - RNA, 23 nt, Artificial Sequence
  Synthetic oligonucleotide: CBLB-6151
cgaugcaaaaauugcaaaacuca

SEQ ID NO: 36399 - RNA, 24 nt, Artificial Sequence
  Synthetic oligonucleotide: CBLB-6152
ucgaugcaaaaauugcaaaacuca

SEQ ID NO: 36400 - RNA, 18 nt, Artificial Sequence
  Synthetic oligonucleotide: CBLB-6153
cugcaaggcauagucuca

SEQ ID NO: 36401 - RNA, 19 nt, Artificial Sequence
  Synthetic oligonucleotide: CBLB-6154
ccugcaaggcauagucuca

SEQ ID NO: 36402 - RNA, 20 nt, Artificial Sequence
  Synthetic oligonucleotide: CBLB-6155
uccugcaaggcauagucuca

SEQ ID NO: 36403 - RNA, 21 nt, Artificial Sequence
  Synthetic oligonucleotide: CBLB-6156
cuccugcaaggcauagucuca

SEQ ID NO: 36404 - RNA, 22 nt, Artificial Sequence
  Synthetic oligonucleotide: CBLB-6157
ccuccugcaaggcauagucuca

SEQ ID NO: 36405 - RNA, 23 nt, Artificial Sequence
  Synthetic oligonucleotide: CBLB-6158
accuccugcaaggcauagucuca

SEQ ID NO: 36406 - RNA, 24 nt, Artificial Sequence
  Synthetic oligonucleotide: CBLB-6159
caccuccugcaaggcauagucuca

SEQ ID NO: 36407 - RNA, 18 nt, Artificial Sequence
  Synthetic oligonucleotide: CBLB-6160
cagcgaguucaaauguca

SEQ ID NO: 36408 - RNA, 19 nt, Artificial Sequence
  Synthetic oligonucleotide: CBLB-6161
acagcgaguucaaauguca

SEQ ID NO: 36409 - RNA, 20 nt, Artificial Sequence
  Synthetic oligonucleotide: CBLB-6162
cacagcgaguucaaauguca

SEQ ID NO: 36410 - RNA, 21 nt, Artificial Sequence
  Synthetic oligonucleotide: CBLB-6163
ucacagcgaguucaaauguca

SEQ ID NO: 36411 - RNA, 22 nt, Artificial Sequence
  Synthetic oligonucleotide: CBLB-6164
aucacagcgaguucaaauguca

SEQ ID NO: 36412 - RNA, 23 nt, Artificial Sequence
  Synthetic oligonucleotide: CBLB-6165
aaucacagcgaguucaaauguca

SEQ ID NO: 36413 - RNA, 24 nt, Artificial Sequence
  Synthetic oligonucleotide: CBLB-6166
gaaucacagcgaguucaaauguca

SEQ ID NO: 36414 - RNA, 18 nt, Artificial Sequence
  Synthetic oligonucleotide: CBLB-6167
acacaugguccaucuuca

SEQ ID NO: 36415 - RNA, 19 nt, Artificial Sequence
  Synthetic oligonucleotide: CBLB-6168
aacacaugguccaucuuca

SEQ ID NO: 36416 - RNA, 20 nt, Artificial Sequence
  Synthetic oligonucleotide: CBLB-6169
gaacacaugguccaucuuca

SEQ ID NO: 36417 - RNA, 21 nt, Artificial Sequence
  Synthetic oligonucleotide: CBLB-6170
ggaacacaugguccaucuuca

SEQ ID NO: 36418 - RNA, 22 nt, Artificial Sequence
  Synthetic oligonucleotide: CBLB-6171
uggaacacaugguccaucuuca

SEQ ID NO: 36419 - RNA, 23 nt, Artificial Sequence
  Synthetic oligonucleotide: CBLB-6172
auggaacacaugguccaucuuca

SEQ ID NO: 36420 - RNA, 24 nt, Artificial Sequence
  Synthetic oligonucleotide: CBLB-6173
aauggaacacaugguccaucuuca

SEQ ID NO: 36421 - RNA, 18 nt, Artificial Sequence
  Synthetic oligonucleotide: CBLB-6174
uuagcaaauucucuuuca

SEQ ID NO: 36422 - RNA, 19 nt, Artificial Sequence
  Synthetic oligonucleotide: CBLB-6175
guuagcaaauucucuuuca

SEQ ID NO: 36423 - RNA, 20 nt, Artificial Sequence
  Synthetic oligonucleotide: CBLB-6176
cguuagcaaauucucuuuca

SEQ ID NO: 36424 - RNA, 21 nt, Artificial Sequence
  Synthetic oligonucleotide: CBLB-6177
ccguuagcaaauucucuuuca

SEQ ID NO: 36425 - RNA, 22 nt, Artificial Sequence
  Synthetic oligonucleotide: CBLB-6178
uccguuagcaaauucucuuuca

SEQ ID NO: 36426 - RNA, 23 nt, Artificial Sequence
  Synthetic oligonucleotide: CBLB-6179
guccguuagcaaauucucuuuca

SEQ ID NO: 36427 - RNA, 24 nt, Artificial Sequence
  Synthetic oligonucleotide: CBLB-6180
gguccguuagcaaauucucuuuca

SEQ ID NO: 36428 - RNA, 18 nt, Artificial Sequence
  Synthetic oligonucleotide: CBLB-6181
augacaaagaugucaaga

SEQ ID NO: 36429 - RNA, 19 nt, Artificial Sequence
  Synthetic oligonucleotide: CBLB-6182
aaugacaaagaugucaaga

SEQ ID NO: 36430 - RNA, 20 nt, Artificial Sequence
  Synthetic oligonucleotide: CBLB-6183
gaaugacaaagaugucaaga

SEQ ID NO: 36431 - RNA, 21 nt, Artificial Sequence
  Synthetic oligonucleotide: CBLB-6184
agaaugacaaagaugucaaga

SEQ ID NO: 36432 - RNA, 22 nt, Artificial Sequence
  Synthetic oligonucleotide: CBLB-6185
gagaaugacaaagaugucaaga

SEQ ID NO: 36433 - RNA, 23 nt, Artificial Sequence
  Synthetic oligonucleotide: CBLB-6186
agagaaugacaaagaugucaaga

SEQ ID NO: 36434 - RNA, 24 nt, Artificial Sequence
  Synthetic oligonucleotide: CBLB-6187
cagagaaugacaaagaugucaaga

SEQ ID NO: 36435 - RNA, 18 nt, Artificial Sequence
  Synthetic oligonucleotide: CBLB-6188
aauggaaggcacaguaga

SEQ ID NO: 36436 - RNA, 19 nt, Artificial Sequence
  Synthetic oligonucleotide: CBLB-6189
caauggaaggcacaguaga

SEQ ID NO: 36437 - RNA, 20 nt, Artificial Sequence
  Synthetic oligonucleotide: CBLB-6190
ucaauggaaggcacaguaga

SEQ ID NO: 36438 - RNA, 21 nt, Artificial Sequence
  Synthetic oligonucleotide: CBLB-6191
gucaauggaaggcacaguaga

SEQ ID NO: 36439 - RNA, 22 nt, Artificial Sequence
  Synthetic oligonucleotide: CBLB-6192
ugucaauggaaggcacaguaga

SEQ ID NO: 36440 - RNA, 23 nt, Artificial Sequence
  Synthetic oligonucleotide: CBLB-6193
augucaauggaaggcacaguaga

SEQ ID NO: 36441 - RNA, 24 nt, Artificial Sequence
  Synthetic oligonucleotide: CBLB-6194
aaugucaauggaaggcacaguaga

SEQ ID NO: 36442 - RNA, 18 nt, Artificial Sequence
  Synthetic oligonucleotide: CBLB-6195
ccaugauuugccuuuaga

SEQ ID NO: 36443 - RNA, 19 nt, Artificial Sequence
  Synthetic oligonucleotide: CBLB-6196
gccaugauuugccuuuaga

SEQ ID NO: 36444 - RNA, 20 nt, Artificial Sequence
  Synthetic oligonucleotide: CBLB-3096
cgccaugauuugccuuuaga

SEQ ID NO: 36445 - RNA, 21 nt, Artificial Sequence
  Synthetic oligonucleotide: CBLB-6197
acgccaugauuugccuuuaga

SEQ ID NO: 36446 - RNA, 22 nt, Artificial Sequence
  Synthetic oligonucleotide: CBLB-6198
gacgccaugauuugccuuuaga

SEQ ID NO: 36447 - RNA, 23 nt, Artificial Sequence
  Synthetic oligonucleotide: CBLB-6199
agacgccaugauuugccuuuaga

SEQ ID NO: 36448 - RNA, 24 nt, Artificial Sequence
  Synthetic oligonucleotide: CBLB-6200
cagacgccaugauuugccuuuaga

SEQ ID NO: 36449 - RNA, 18 nt, Artificial Sequence
  Synthetic oligonucleotide: CBLB-6201
cgguuaaguugcacucga

SEQ ID NO: 36450 - RNA, 19 nt, Artificial Sequence
  Synthetic oligonucleotide: CBLB-6202
ccgguuaaguugcacucga

SEQ ID NO: 36451 - RNA, 20 nt, Artificial Sequence
  Synthetic oligonucleotide: CBLB-6203
uccgguuaaguugcacucga

SEQ ID NO: 36452 - RNA, 21 nt, Artificial Sequence
  Synthetic oligonucleotide: CBLB-6204
uuccgguuaaguugcacucga

SEQ ID NO: 36453 - RNA, 22 nt, Artificial Sequence
  Synthetic oligonucleotide: CBLB-6205
uuuccgguuaaguugcacucga

SEQ ID NO: 36454 - RNA, 23 nt, Artificial Sequence
  Synthetic oligonucleotide: CBLB-6206
uuuuccgguuaaguugcacucga

SEQ ID NO: 36455 - RNA, 24 nt, Artificial Sequence
  Synthetic oligonucleotide: CBLB-6207
auuuuccgguuaaguugcacucga

SEQ ID NO: 36456 - RNA, 18 nt, Artificial Sequence
  Synthetic oligonucleotide: CBLB-6208
uucuuccuucagguagga

SEQ ID NO: 36457 - RNA, 19 nt, Artificial Sequence
  Synthetic oligonucleotide: CBLB-6209
cuucuuccuucagguagga

SEQ ID NO: 36458 - RNA, 20 nt, Artificial Sequence
  Synthetic oligonucleotide: CBLB-3102
ucuucuuccuucagguagga

SEQ ID NO: 36459 - RNA, 21 nt, Artificial Sequence
  Synthetic oligonucleotide: CBLB-6210
uucuucuuccuucagguagga

SEQ ID NO: 36460 - RNA, 22 nt, Artificial Sequence
  Synthetic oligonucleotide: CBLB-6211
uuucuucuuccuucagguagga

SEQ ID NO: 36461 - RNA, 23 nt, Artificial Sequence
  Synthetic oligonucleotide: CBLB-6212
uuuucuucuuccuucagguagga

SEQ ID NO: 36462 - RNA, 24 nt, Artificial Sequence
  Synthetic oligonucleotide: CBLB-6213
uuuuucuucuuccuucagguagga

SEQ ID NO: 36463 - RNA, 18 nt, Artificial Sequence
  Synthetic oligonucleotide: CBLB-6214
uggcuaugugacugggga

SEQ ID NO: 36464 - RNA, 19 nt, Artificial Sequence
  Synthetic oligonucleotide: CBLB-6215
uuggcuaugugacugggga

SEQ ID NO: 36465 - RNA, 20 nt, Artificial Sequence
  Synthetic oligonucleotide: CBLB-3109
auuggcuaugugacugggga

SEQ ID NO: 36466 - RNA, 21 nt, Artificial Sequence
  Synthetic oligonucleotide: CBLB-6216
cauuggcuaugugacugggga

SEQ ID NO: 36467 - RNA, 22 nt, Artificial Sequence
  Synthetic oligonucleotide: CBLB-6217
ccauuggcuaugugacugggga

SEQ ID NO: 36468 - RNA, 23 nt, Artificial Sequence
  Synthetic oligonucleotide: CBLB-6218
gccauuggcuaugugacugggga

SEQ ID NO: 36469 - RNA, 24 nt, Artificial Sequence
  Synthetic oligonucleotide: CBLB-6219
ggccauuggcuaugugacugggga

SEQ ID NO: 36470 - RNA, 18 nt, Artificial Sequence
  Synthetic oligonucleotide: CBLB-6220
caguuaucuuuauccuga

SEQ ID NO: 36471 - RNA, 19 nt, Artificial Sequence
  Synthetic oligonucleotide: CBLB-6221
ucaguuaucuuuauccuga

SEQ ID NO: 36472 - RNA, 20 nt, Artificial Sequence
  Synthetic oligonucleotide: CBLB-3120
uucaguuaucuuuauccuga

SEQ ID NO: 36473 - RNA, 21 nt, Artificial Sequence
  Synthetic oligonucleotide: CBLB-6222
auucaguuaucuuuauccuga

SEQ ID NO: 36474 - RNA, 22 nt, Artificial Sequence
  Synthetic oligonucleotide: CBLB-6223
aauucaguuaucuuuauccuga

SEQ ID NO: 36475 - RNA, 23 nt, Artificial Sequence
  Synthetic oligonucleotide: CBLB-6224
aaauucaguuaucuuuauccuga

SEQ ID NO: 36476 - RNA, 24 nt, Artificial Sequence
  Synthetic oligonucleotide: CBLB-6225
uaaauucaguuaucuuuauccuga

SEQ ID NO: 36477 - RNA, 18 nt, Artificial Sequence
  Synthetic oligonucleotide: CBLB-6226
auggucacuguaugcuga

SEQ ID NO: 36478 - RNA, 19 nt, Artificial Sequence
  Synthetic oligonucleotide: CBLB-6227
aauggucacuguaugcuga

SEQ ID NO: 36479 - RNA, 20 nt, Artificial Sequence
  Synthetic oligonucleotide: CBLB-6228
uaauggucacuguaugcuga

SEQ ID NO: 36480 - RNA, 21 nt, Artificial Sequence
  Synthetic oligonucleotide: CBLB-6229
auaauggucacuguaugcuga

SEQ ID NO: 36481 - RNA, 22 nt, Artificial Sequence
  Synthetic oligonucleotide: CBLB-6230
gauaauggucacuguaugcuga

SEQ ID NO: 36482 - RNA, 23 nt, Artificial Sequence
  Synthetic oligonucleotide: CBLB-6231
ugauaauggucacuguaugcuga

SEQ ID NO: 36483 - RNA, 24 nt, Artificial Sequence
  Synthetic oligonucleotide: CBLB-6232
gugauaauggucacuguaugcuga

SEQ ID NO: 36484 - RNA, 18 nt, Artificial Sequence
  Synthetic oligonucleotide: CBLB-6233
gggccauuggcuauguga

SEQ ID NO: 36485 - RNA, 19 nt, Artificial Sequence
  Synthetic oligonucleotide: CBLB-6234
ugggccauuggcuauguga

SEQ ID NO: 36486 - RNA, 20 nt, Artificial Sequence
  Synthetic oligonucleotide: CBLB-6235
gugggccauuggcuauguga

SEQ ID NO: 36487 - RNA, 21 nt, Artificial Sequence
  Synthetic oligonucleotide: CBLB-6236
agugggccauuggcuauguga

SEQ ID NO: 36488 - RNA, 22 nt, Artificial Sequence
  Synthetic oligonucleotide: CBLB-6237
cagugggccauuggcuauguga

SEQ ID NO: 36489 - RNA, 23 nt, Artificial Sequence
  Synthetic oligonucleotide: CBLB-6238
acagugggccauuggcuauguga

SEQ ID NO: 36490 - RNA, 24 nt, Artificial Sequence
  Synthetic oligonucleotide: CBLB-6239
gacagugggccauuggcuauguga

SEQ ID NO: 36491 - RNA, 18 nt, Artificial Sequence
  Synthetic oligonucleotide: CBLB-6240
gaaguuaaagcacgacua

SEQ ID NO: 36492 - RNA, 19 nt, Artificial Sequence
  Synthetic oligonucleotide: CBLB-6241
ugaaguuaaagcacgacua

SEQ ID NO: 36493 - RNA, 20 nt, Artificial Sequence
  Synthetic oligonucleotide: CBLB-6242
augaaguuaaagcacgacua

SEQ ID NO: 36494 - RNA, 21 nt, Artificial Sequence
  Synthetic oligonucleotide: CBLB-6243
gaugaaguuaaagcacgacua

SEQ ID NO: 36495 - RNA, 22 nt, Artificial Sequence
  Synthetic oligonucleotide: CBLB-6244
ugaugaaguuaaagcacgacua

SEQ ID NO: 36496 - RNA, 23 nt, Artificial Sequence
  Synthetic oligonucleotide: CBLB-6245
augaugaaguuaaagcacgacua

SEQ ID NO: 36497 - RNA, 24 nt, Artificial Sequence
  Synthetic oligonucleotide: CBLB-6246
uaugaugaaguuaaagcacgacua

SEQ ID NO: 36498 - RNA, 18 nt, Artificial Sequence
  Synthetic oligonucleotide: CBLB-6247
gugggaugucgacuccua

SEQ ID NO: 36499 - RNA, 19 nt, Artificial Sequence
  Synthetic oligonucleotide: CBLB-6248
ugugggaugucgacuccua

SEQ ID NO: 36500 - RNA, 20 nt, Artificial Sequence
  Synthetic oligonucleotide: CBLB-3125
uugugggaugucgacuccua

SEQ ID NO: 36501 - RNA, 21 nt, Artificial Sequence
  Synthetic oligonucleotide: CBLB-6249
cuugugggaugucgacuccua

SEQ ID NO: 36502 - RNA, 22 nt, Artificial Sequence
  Synthetic oligonucleotide: CBLB-6250
gcuugugggaugucgacuccua

SEQ ID NO: 36503 - RNA, 23 nt, Artificial Sequence
  Synthetic oligonucleotide: CBLB-6251
agcuugugggaugucgacuccua

SEQ ID NO: 36504 - RNA, 24 nt, Artificial Sequence
  Synthetic oligonucleotide: CBLB-6252
cagcuugugggaugucgacuccua

SEQ ID NO: 36505 - RNA, 18 nt, Artificial Sequence
  Synthetic oligonucleotide: CBLB-6253
aaaacaagagacccagua

SEQ ID NO: 36506 - RNA, 19 nt, Artificial Sequence
  Synthetic oligonucleotide: CBLB-6254
gaaaacaagagacccagua

SEQ ID NO: 36507 - RNA, 20 nt, Artificial Sequence
  Synthetic oligonucleotide: CBLB-6255
agaaaacaagagacccagua

SEQ ID NO: 36508 - RNA, 21 nt, Artificial Sequence
  Synthetic oligonucleotide: CBLB-6256
gagaaaacaagagacccagua

SEQ ID NO: 36509 - RNA, 22 nt, Artificial Sequence
  Synthetic oligonucleotide: CBLB-6257
agagaaaacaagagacccagua

SEQ ID NO: 36510 - RNA, 23 nt, Artificial Sequence
  Synthetic oligonucleotide: CBLB-6258
cagagaaaacaagagacccagua

SEQ ID NO: 36511 - RNA, 24 nt, Artificial Sequence
  Synthetic oligonucleotide: CBLB-6259
ucagagaaaacaagagacccagua

SEQ ID NO: 36512 - RNA, 18 nt, Artificial Sequence
  Synthetic oligonucleotide: CBLB-6260
gggagggcucuccaaaac

SEQ ID NO: 36513 - RNA, 19 nt, Artificial Sequence
  Synthetic oligonucleotide: CBLB-6261
ggggagggcucuccaaaac

SEQ ID NO: 36514 - RNA, 20 nt, Artificial Sequence
  Synthetic oligonucleotide: CBLB-6262
aggggagggcucuccaaaac

SEQ ID NO: 36515 - RNA, 21 nt, Artificial Sequence
  Synthetic oligonucleotide: CBLB-6263
uaggggagggcucuccaaaac

SEQ ID NO: 36516 - RNA, 22 nt, Artificial Sequence
  Synthetic oligonucleotide: CBLB-6264
cuaggggagggcucuccaaaac

SEQ ID NO: 36517 - RNA, 23 nt, Artificial Sequence
  Synthetic oligonucleotide: CBLB-6265
ccuaggggagggcucuccaaaac

SEQ ID NO: 36518 - RNA, 24 nt, Artificial Sequence
  Synthetic oligonucleotide: CBLB-6266
uccuaggggagggcucuccaaaac

SEQ ID NO: 36519 - RNA, 18 nt, Artificial Sequence
  Synthetic oligonucleotide: CBLB-6267
uucucuuucagagaaaac

SEQ ID NO: 36520 - RNA, 19 nt, Artificial Sequence
  Synthetic oligonucleotide: CBLB-6268
auucucuuucagagaaaac

SEQ ID NO: 36521 - RNA, 20 nt, Artificial Sequence
  Synthetic oligonucleotide: CBLB-6269
aauucucuuucagagaaaac

SEQ ID NO: 36522 - RNA, 21 nt, Artificial Sequence
  Synthetic oligonucleotide: CBLB-6270
aaauucucuuucagagaaaac

SEQ ID NO: 36523 - RNA, 22 nt, Artificial Sequence
  Synthetic oligonucleotide: CBLB-6271
caaauucucuuucagagaaaac

SEQ ID NO: 36524 - RNA, 23 nt, Artificial Sequence
  Synthetic oligonucleotide: CBLB-6272
gcaaauucucuuucagagaaaac

SEQ ID NO: 36525 - RNA, 24 nt, Artificial Sequence
  Synthetic oligonucleotide: CBLB-6273
agcaaauucucuuucagagaaaac

SEQ ID NO: 36526 - RNA, 18 nt, Artificial Sequence
  Synthetic oligonucleotide: CBLB-6274
acguccgaaagguaaaac

SEQ ID NO: 36527 - RNA, 19 nt, Artificial Sequence
  Synthetic oligonucleotide: CBLB-6275
aacguccgaaagguaaaac

SEQ ID NO: 36528 - RNA, 20 nt, Artificial Sequence
  Synthetic oligonucleotide: CBLB-6276
aaacguccgaaagguaaaac

SEQ ID NO: 36529 - RNA, 21 nt, Artificial Sequence
  Synthetic oligonucleotide: CBLB-6277
caaacguccgaaagguaaaac

SEQ ID NO: 36530 - RNA, 22 nt, Artificial Sequence
  Synthetic oligonucleotide: CBLB-6278
gcaaacguccgaaagguaaaac

SEQ ID NO: 36531 - RNA, 23 nt, Artificial Sequence
  Synthetic oligonucleotide: CBLB-6279
ggcaaacguccgaaagguaaaac

SEQ ID NO: 36532 - RNA, 24 nt, Artificial Sequence
  Synthetic oligonucleotide: CBLB-6280
uggcaaacguccgaaagguaaaac

SEQ ID NO: 36533 - RNA, 18 nt, Artificial Sequence
  Synthetic oligonucleotide: CBLB-6281
agaaauauagcaccaaac

SEQ ID NO: 36534 - RNA, 19 nt, Artificial Sequence
  Synthetic oligonucleotide: CBLB-6282
cagaaauauagcaccaaac

SEQ ID NO: 36535 - RNA, 20 nt, Artificial Sequence
  Synthetic oligonucleotide: CBLB-6283
acagaaauauagcaccaaac

SEQ ID NO: 36536 - RNA, 21 nt, Artificial Sequence
  Synthetic oligonucleotide: CBLB-6284
uacagaaauauagcaccaaac

SEQ ID NO: 36537 - RNA, 22 nt, Artificial Sequence
  Synthetic oligonucleotide: CBLB-6285
cuacagaaauauagcaccaaac

SEQ ID NO: 36538 - RNA, 23 nt, Artificial Sequence
  Synthetic oligonucleotide: CBLB-6286
acuacagaaauauagcaccaaac

SEQ ID NO: 36539 - RNA, 24 nt, Artificial Sequence
  Synthetic oligonucleotide: CBLB-6287
gacuacagaaauauagcaccaaac

SEQ ID NO: 36540 - RNA, 18 nt, Artificial Sequence
  Synthetic oligonucleotide: CBLB-6288
accugccaggccuccaac

SEQ ID NO: 36541 - RNA, 19 nt, Artificial Sequence
  Synthetic oligonucleotide: CBLB-6289
caccugccaggccuccaac

SEQ ID NO: 36542 - RNA, 20 nt, Artificial Sequence
  Synthetic oligonucleotide: CBLB-6290
ccaccugccaggccuccaac

SEQ ID NO: 36543 - RNA, 21 nt, Artificial Sequence
  Synthetic oligonucleotide: CBLB-6291
accaccugccaggccuccaac

SEQ ID NO: 36544 - RNA, 22 nt, Artificial Sequence
  Synthetic oligonucleotide: CBLB-6292
uaccaccugccaggccuccaac

SEQ ID NO: 36545 - RNA, 23 nt, Artificial Sequence
  Synthetic oligonucleotide: CBLB-6293
uuaccaccugccaggccuccaac

SEQ ID NO: 36546 - RNA, 24 nt, Artificial Sequence
  Synthetic oligonucleotide: CBLB-6294
auuaccaccugccaggccuccaac

SEQ ID NO: 36547 - RNA, 18 nt, Artificial Sequence
  Synthetic oligonucleotide: CBLB-6295
auccuccuccaccgccac

SEQ ID NO: 36548 - RNA, 19 nt, Artificial Sequence
  Synthetic oligonucleotide: CBLB-6296
gauccuccuccaccgccac

SEQ ID NO: 36549 - RNA, 20 nt, Artificial Sequence
  Synthetic oligonucleotide: CBLB-6297
agauccuccuccaccgccac

SEQ ID NO: 36550 - RNA, 21 nt, Artificial Sequence
  Synthetic oligonucleotide: CBLB-6298
gagauccuccuccaccgccac

SEQ ID NO: 36551 - RNA, 22 nt, Artificial Sequence
  Synthetic oligonucleotide: CBLB-6299
agagauccuccuccaccgccac

SEQ ID NO: 36552 - RNA, 23 nt, Artificial Sequence
  Synthetic oligonucleotide: CBLB-6300
aagagauccuccuccaccgccac

SEQ ID NO: 36553 - RNA, 24 nt, Artificial Sequence
  Synthetic oligonucleotide: CBLB-6301
uaagagauccuccuccaccgccac

SEQ ID NO: 36554 - RNA, 18 nt, Artificial Sequence
  Synthetic oligonucleotide: CBLB-6302
gaccgcgcaggacugcac

SEQ ID NO: 36555 - RNA, 19 nt, Artificial Sequence
  Synthetic oligonucleotide: CBLB-6303
cgaccgcgcaggacugcac

SEQ ID NO: 36556 - RNA, 20 nt, Artificial Sequence
  Synthetic oligonucleotide: CBLB-6304
acgaccgcgcaggacugcac

SEQ ID NO: 36557 - RNA, 21 nt, Artificial Sequence
  Synthetic oligonucleotide: CBLB-6305
cacgaccgcgcaggacugcac

SEQ ID NO: 36558 - RNA, 22 nt, Artificial Sequence
  Synthetic oligonucleotide: CBLB-6306
ccacgaccgcgcaggacugcac

SEQ ID NO: 36559 - RNA, 23 nt, Artificial Sequence
  Synthetic oligonucleotide: CBLB-6307
accacgaccgcgcaggacugcac

SEQ ID NO: 36560 - RNA, 24 nt, Artificial Sequence
  Synthetic oligonucleotide: CBLB-6308
aaccacgaccgcgcaggacugcac

SEQ ID NO: 36561 - RNA, 18 nt, Artificial Sequence
  Synthetic oligonucleotide: CBLB-6309
ggcaugccgaugcuagac

SEQ ID NO: 36562 - RNA, 19 nt, Artificial Sequence
  Synthetic oligonucleotide: CBLB-6310
uggcaugccgaugcuagac

SEQ ID NO: 36563 - RNA, 20 nt, Artificial Sequence
  Synthetic oligonucleotide: CBLB-6311
uuggcaugccgaugcuagac

SEQ ID NO: 36564 - RNA, 21 nt, Artificial Sequence
  Synthetic oligonucleotide: CBLB-6312
uuuggcaugccgaugcuagac

SEQ ID NO: 36565 - RNA, 22 nt, Artificial Sequence
  Synthetic oligonucleotide: CBLB-6313
cuuuggcaugccgaugcuagac

SEQ ID NO: 36566 - RNA, 23 nt, Artificial Sequence
  Synthetic oligonucleotide: CBLB-6314
ccuuuggcaugccgaugcuagac

SEQ ID NO: 36567 - RNA, 24 nt, Artificial Sequence
  Synthetic oligonucleotide: CBLB-6315
cccuuuggcaugccgaugcuagac

SEQ ID NO: 36568 - RNA, 18 nt, Artificial Sequence
  Synthetic oligonucleotide: CBLB-6316
ggccauuggcuaugugac

SEQ ID NO: 36569 - RNA, 19 nt, Artificial Sequence
  Synthetic oligonucleotide: CBLB-6317
gggccauuggcuaugugac

SEQ ID NO: 36570 - RNA, 20 nt, Artificial Sequence
  Synthetic oligonucleotide: CBLB-3155
ugggccauuggcuaugugac

SEQ ID NO: 36571 - RNA, 21 nt, Artificial Sequence
  Synthetic oligonucleotide: CBLB-6318
gugggccauuggcuaugugac

SEQ ID NO: 36572 - RNA, 22 nt, Artificial Sequence
  Synthetic oligonucleotide: CBLB-6319
agugggccauuggcuaugugac

SEQ ID NO: 36573 - RNA, 23 nt, Artificial Sequence
  Synthetic oligonucleotide: CBLB-6320
cagugggccauuggcuaugugac

SEQ ID NO: 36574 - RNA, 24 nt, Artificial Sequence
  Synthetic oligonucleotide: CBLB-6321
acagugggccauuggcuaugugac

SEQ ID NO: 36575 - RNA, 18 nt, Artificial Sequence
  Synthetic oligonucleotide: CBLB-6322
gaaauauagcaccaaacc

SEQ ID NO: 36576 - RNA, 19 nt, Artificial Sequence
  Synthetic oligonucleotide: CBLB-6323
agaaauauagcaccaaacc

SEQ ID NO: 36577 - RNA, 20 nt, Artificial Sequence
  Synthetic oligonucleotide: CBLB-3161
cagaaauauagcaccaaacc

SEQ ID NO: 36578 - RNA, 21 nt, Artificial Sequence
  Synthetic oligonucleotide: CBLB-6324
acagaaauauagcaccaaacc

SEQ ID NO: 36579 - RNA, 22 nt, Artificial Sequence
  Synthetic oligonucleotide: CBLB-6325
uacagaaauauagcaccaaacc

SEQ ID NO: 36580 - RNA, 23 nt, Artificial Sequence
  Synthetic oligonucleotide: CBLB-6326
cuacagaaauauagcaccaaacc

SEQ ID NO: 36581 - RNA, 24 nt, Artificial Sequence
  Synthetic oligonucleotide: CBLB-6327
acuacagaaauauagcaccaaacc

SEQ ID NO: 36582 - RNA, 18 nt, Artificial Sequence
  Synthetic oligonucleotide: CBLB-6328
ucuuuuccaauggucacc

SEQ ID NO: 36583 - RNA, 19 nt, Artificial Sequence
  Synthetic oligonucleotide: CBLB-6329
gucuuuuccaauggucacc

SEQ ID NO: 36584 - RNA, 20 nt, Artificial Sequence
  Synthetic oligonucleotide: CBLB-6330
ggucuuuuccaauggucacc

SEQ ID NO: 36585 - RNA, 21 nt, Artificial Sequence
  Synthetic oligonucleotide: CBLB-6331
aggucuuuuccaauggucacc

SEQ ID NO: 36586 - RNA, 22 nt, Artificial Sequence
  Synthetic oligonucleotide: CBLB-6332
caggucuuuuccaauggucacc

SEQ ID NO: 36587 - RNA, 23 nt, Artificial Sequence
  Synthetic oligonucleotide: CBLB-6333
ucaggucuuuuccaauggucacc

SEQ ID NO: 36588 - RNA, 24 nt, Artificial Sequence
  Synthetic oligonucleotide: CBLB-6334
uucaggucuuuuccaauggucacc

SEQ ID NO: 36589 - RNA, 18 nt, Artificial Sequence
  Synthetic oligonucleotide: CBLB-6335
gcacagaacuaucguacc

SEQ ID NO: 36590 - RNA, 19 nt, Artificial Sequence
  Synthetic oligonucleotide: CBLB-6336
ugcacagaacuaucguacc

SEQ ID NO: 36591 - RNA, 20 nt, Artificial Sequence
  Synthetic oligonucleotide: CBLB-6337
uugcacagaacuaucguacc

SEQ ID NO: 36592 - RNA, 21 nt, Artificial Sequence
  Synthetic oligonucleotide: CBLB-6338
cuugcacagaacuaucguacc

SEQ ID NO: 36593 - RNA, 22 nt, Artificial Sequence
  Synthetic oligonucleotide: CBLB-6339
ccuugcacagaacuaucguacc

SEQ ID NO: 36594 - RNA, 23 nt, Artificial Sequence
  Synthetic oligonucleotide: CBLB-6340
accuugcacagaacuaucguacc

SEQ ID NO: 36595 - RNA, 24 nt, Artificial Sequence
  Synthetic oligonucleotide: CBLB-6341
caccuugcacagaacuaucguacc

SEQ ID NO: 36596 - RNA, 18 nt, Artificial Sequence
  Synthetic oligonucleotide: CBLB-6342
uucaccacagaaaacccc

SEQ ID NO: 36597 - RNA, 19 nt, Artificial Sequence
  Synthetic oligonucleotide: CBLB-6343
auucaccacagaaaacccc

SEQ ID NO: 36598 - RNA, 20 nt, Artificial Sequence
  Synthetic oligonucleotide: CBLB-6344
aauucaccacagaaaacccc

SEQ ID NO: 36599 - RNA, 21 nt, Artificial Sequence
  Synthetic oligonucleotide: CBLB-6345
aaauucaccacagaaaacccc

SEQ ID NO: 36600 - RNA, 22 nt, Artificial Sequence
  Synthetic oligonucleotide: CBLB-6346
gaaauucaccacagaaaacccc

SEQ ID NO: 36601 - RNA, 23 nt, Artificial Sequence
  Synthetic oligonucleotide: CBLB-6347
agaaauucaccacagaaaacccc

SEQ ID NO: 36602 - RNA, 24 nt, Artificial Sequence
  Synthetic oligonucleotide: CBLB-6348
cagaaauucaccacagaaaacccc

SEQ ID NO: 36603 - RNA, 18 nt, Artificial Sequence
  Synthetic oligonucleotide: CBLB-6349
ucuugaagcauggugccc

SEQ ID NO: 36604 - RNA, 19 nt, Artificial Sequence
  Synthetic oligonucleotide: CBLB-6350
cucuugaagcauggugccc

SEQ ID NO: 36605 - RNA, 20 nt, Artificial Sequence
  Synthetic oligonucleotide: CBLB-6351
ccucuugaagcauggugccc

SEQ ID NO: 36606 - RNA, 21 nt, Artificial Sequence
  Synthetic oligonucleotide: CBLB-6352
gccucuugaagcauggugccc

SEQ ID NO: 36607 - RNA, 22 nt, Artificial Sequence
  Synthetic oligonucleotide: CBLB-6353
ugccucuugaagcauggugccc

SEQ ID NO: 36608 - RNA, 23 nt, Artificial Sequence
  Synthetic oligonucleotide: CBLB-6354
augccucuugaagcauggugccc

SEQ ID NO: 36609 - RNA, 24 nt, Artificial Sequence
  Synthetic oligonucleotide: CBLB-6355
aaugccucuugaagcauggugccc

SEQ ID NO: 36610 - RNA, 18 nt, Artificial Sequence
  Synthetic oligonucleotide: CBLB-6356
uuuuuuuauuuuuuagcc

SEQ ID NO: 36611 - RNA, 19 nt, Artificial Sequence
  Synthetic oligonucleotide: CBLB-6357
auuuuuuuauuuuuuagcc

SEQ ID NO: 36612 - RNA, 20 nt, Artificial Sequence
  Synthetic oligonucleotide: CBLB-6358
aauuuuuuuauuuuuuagcc

SEQ ID NO: 36613 - RNA, 21 nt, Artificial Sequence
  Synthetic oligonucleotide: CBLB-6359
uaauuuuuuuauuuuuuagcc

SEQ ID NO: 36614 - RNA, 22 nt, Artificial Sequence
  Synthetic oligonucleotide: CBLB-6360
uuaauuuuuuuauuuuuuagcc

SEQ ID NO: 36615 - RNA, 23 nt, Artificial Sequence
  Synthetic oligonucleotide: CBLB-6361
uuuaauuuuuuuauuuuuuagcc

SEQ ID NO: 36616 - RNA, 24 nt, Artificial Sequence
  Synthetic oligonucleotide: CBLB-6362
uuuuaauuuuuuuauuuuuuagcc

SEQ ID NO: 36617 - RNA, 18 nt, Artificial Sequence
  Synthetic oligonucleotide: CBLB-6363
accagauuagcucuggcc

SEQ ID NO: 36618 - RNA, 19 nt, Artificial Sequence
  Synthetic oligonucleotide: CBLB-6364
caccagauuagcucuggcc

SEQ ID NO: 36619 - RNA, 20 nt, Artificial Sequence
  Synthetic oligonucleotide: CBLB-3177
ccaccagauuagcucuggcc

SEQ ID NO: 36620 - RNA, 21 nt, Artificial Sequence
  Synthetic oligonucleotide: CBLB-6365
uccaccagauuagcucuggcc

SEQ ID NO: 36621 - RNA, 22 nt, Artificial Sequence
  Synthetic oligonucleotide: CBLB-6366
guccaccagauuagcucuggcc

SEQ ID NO: 36622 - RNA, 23 nt, Artificial Sequence
  Synthetic oligonucleotide: CBLB-6367
gguccaccagauuagcucuggcc

SEQ ID NO: 36623 - RNA, 24 nt, Artificial Sequence
  Synthetic oligonucleotide: CBLB-6368
agguccaccagauuagcucuggcc

SEQ ID NO: 36624 - RNA, 18 nt, Artificial Sequence
  Synthetic oligonucleotide: CBLB-6369
ggauccucuccccuugcc

SEQ ID NO: 36625 - RNA, 19 nt, Artificial Sequence
  Synthetic oligonucleotide: CBLB-6370
aggauccucuccccuugcc

SEQ ID NO: 36626 - RNA, 20 nt, Artificial Sequence
  Synthetic oligonucleotide: CBLB-6371
caggauccucuccccuugcc

SEQ ID NO: 36627 - RNA, 21 nt, Artificial Sequence
  Synthetic oligonucleotide: CBLB-6372
ccaggauccucuccccuugcc

SEQ ID NO: 36628 - RNA, 22 nt, Artificial Sequence
  Synthetic oligonucleotide: CBLB-6373
accaggauccucuccccuugcc

SEQ ID NO: 36629 - RNA, 23 nt, Artificial Sequence
  Synthetic oligonucleotide: CBLB-6374
caccaggauccucuccccuugcc

SEQ ID NO: 36630 - RNA, 24 nt, Artificial Sequence
  Synthetic oligonucleotide: CBLB-6375
ucaccaggauccucuccccuugcc

SEQ ID NO: 36631 - RNA, 18 nt, Artificial Sequence
  Synthetic oligonucleotide: CBLB-6376
aauaaugucgaaguugcc

SEQ ID NO: 36632 - RNA, 19 nt, Artificial Sequence
  Synthetic oligonucleotide: CBLB-6377
gaauaaugucgaaguugcc

SEQ ID NO: 36633 - RNA, 20 nt, Artificial Sequence
  Synthetic oligonucleotide: CBLB-3179
agaauaaugucgaaguugcc

SEQ ID NO: 36634 - RNA, 21 nt, Artificial Sequence
  Synthetic oligonucleotide: CBLB-6378
cagaauaaugucgaaguugcc

SEQ ID NO: 36635 - RNA, 22 nt, Artificial Sequence
  Synthetic oligonucleotide: CBLB-6379
ccagaauaaugucgaaguugcc

SEQ ID NO: 36636 - RNA, 23 nt, Artificial Sequence
  Synthetic oligonucleotide: CBLB-6380
cccagaauaaugucgaaguugcc

SEQ ID NO: 36637 - RNA, 24 nt, Artificial Sequence
  Synthetic oligonucleotide: CBLB-6381
gcccagaauaaugucgaaguugcc

SEQ ID NO: 36638 - RNA, 18 nt, Artificial Sequence
  Synthetic oligonucleotide: CBLB-6382
cguggaccccuuugaucc

SEQ ID NO: 36639 - RNA, 19 nt, Artificial Sequence
  Synthetic oligonucleotide: CBLB-6383
ucguggaccccuuugaucc

SEQ ID NO: 36640 - RNA, 20 nt, Artificial Sequence
  Synthetic oligonucleotide: CBLB-6384
aucguggaccccuuugaucc

SEQ ID NO: 36641 - RNA, 21 nt, Artificial Sequence
  Synthetic oligonucleotide: CBLB-6385
aaucguggaccccuuugaucc

SEQ ID NO: 36642 - RNA, 22 nt, Artificial Sequence
  Synthetic oligonucleotide: CBLB-6386
uaaucguggaccccuuugaucc

SEQ ID NO: 36643 - RNA, 23 nt, Artificial Sequence
  Synthetic oligonucleotide: CBLB-6387
auaaucguggaccccuuugaucc

SEQ ID NO: 36644 - RNA, 24 nt, Artificial Sequence
  Synthetic oligonucleotide: CBLB-6388
cauaaucguggaccccuuugaucc

SEQ ID NO: 36645 - RNA, 18 nt, Artificial Sequence
  Synthetic oligonucleotide: CBLB-6389
uugugggaugucgacucc

SEQ ID NO: 36646 - RNA, 19 nt, Artificial Sequence
  Synthetic oligonucleotide: CBLB-6390
cuugugggaugucgacucc

SEQ ID NO: 36647 - RNA, 20 nt, Artificial Sequence
  Synthetic oligonucleotide: CBLB-6391
gcuugugggaugucgacucc

SEQ ID NO: 36648 - RNA, 21 nt, Artificial Sequence
  Synthetic oligonucleotide: CBLB-6392
agcuugugggaugucgacucc

SEQ ID NO: 36649 - RNA, 22 nt, Artificial Sequence
  Synthetic oligonucleotide: CBLB-6393
cagcuugugggaugucgacucc

SEQ ID NO: 36650 - RNA, 23 nt, Artificial Sequence
  Synthetic oligonucleotide: CBLB-6394
ucagcuugugggaugucgacucc

SEQ ID NO: 36651 - RNA, 24 nt, Artificial Sequence
  Synthetic oligonucleotide: CBLB-6395
aucagcuugugggaugucgacucc

SEQ ID NO: 36652 - RNA, 18 nt, Artificial Sequence
  Synthetic oligonucleotide: CBLB-6396
cccuccuccccaaauucc

SEQ ID NO: 36653 - RNA, 19 nt, Artificial Sequence
  Synthetic oligonucleotide: CBLB-6397
ucccuccuccccaaauucc

SEQ ID NO: 36654 - RNA, 20 nt, Artificial Sequence
  Synthetic oligonucleotide: CBLB-3186
cucccuccuccccaaauucc

SEQ ID NO: 36655 - RNA, 21 nt, Artificial Sequence
  Synthetic oligonucleotide: CBLB-6398
ucucccuccuccccaaauucc

SEQ ID NO: 36656 - RNA, 22 nt, Artificial Sequence
  Synthetic oligonucleotide: CBLB-6399
uucucccuccuccccaaauucc

SEQ ID NO: 36657 - RNA, 23 nt, Artificial Sequence
  Synthetic oligonucleotide: CBLB-6400
uuucucccuccuccccaaauucc

SEQ ID NO: 36658 - RNA, 24 nt, Artificial Sequence
  Synthetic oligonucleotide: CBLB-6401
cuuucucccuccuccccaaauucc

SEQ ID NO: 36659 - RNA, 18 nt, Artificial Sequence
  Synthetic oligonucleotide: CBLB-6402
uucccaauggucaauucc

SEQ ID NO: 36660 - RNA, 19 nt, Artificial Sequence
  Synthetic oligonucleotide: CBLB-6403
uuucccaauggucaauucc

SEQ ID NO: 36661 - RNA, 20 nt, Artificial Sequence
  Synthetic oligonucleotide: CBLB-3187
cuuucccaauggucaauucc

SEQ ID NO: 36662 - RNA, 21 nt, Artificial Sequence
  Synthetic oligonucleotide: CBLB-6404
ucuuucccaauggucaauucc

SEQ ID NO: 36663 - RNA, 22 nt, Artificial Sequence
  Synthetic oligonucleotide: CBLB-6405
aucuuucccaauggucaauucc

SEQ ID NO: 36664 - RNA, 23 nt, Artificial Sequence
  Synthetic oligonucleotide: CBLB-6406
aaucuuucccaauggucaauucc

SEQ ID NO: 36665 - RNA, 24 nt, Artificial Sequence
  Synthetic oligonucleotide: CBLB-6407
caaucuuucccaauggucaauucc

SEQ ID NO: 36666 - RNA, 18 nt, Artificial Sequence
  Synthetic oligonucleotide: CBLB-6408
aauacgcaaagcagaagc

SEQ ID NO: 36667 - RNA, 19 nt, Artificial Sequence
  Synthetic oligonucleotide: CBLB-6409
aaauacgcaaagcagaagc

SEQ ID NO: 36668 - RNA, 20 nt, Artificial Sequence
  Synthetic oligonucleotide: CBLB-6410
gaaauacgcaaagcagaagc

SEQ ID NO: 36669 - RNA, 21 nt, Artificial Sequence
  Synthetic oligonucleotide: CBLB-6411
agaaauacgcaaagcagaagc

SEQ ID NO: 36670 - RNA, 22 nt, Artificial Sequence
  Synthetic oligonucleotide: CBLB-6412
aagaaauacgcaaagcagaagc

SEQ ID NO: 36671 - RNA, 23 nt, Artificial Sequence
  Synthetic oligonucleotide: CBLB-6413
uaagaaauacgcaaagcagaagc

SEQ ID NO: 36672 - RNA, 24 nt, Artificial Sequence
  Synthetic oligonucleotide: CBLB-6414
guaagaaauacgcaaagcagaagc

SEQ ID NO: 36673 - RNA, 18 nt, Artificial Sequence
  Synthetic oligonucleotide: CBLB-6415
gucuaaaucuauagcagc

SEQ ID NO: 36674 - RNA, 19 nt, Artificial Sequence
  Synthetic oligonucleotide: CBLB-6416
cgucuaaaucuauagcagc

SEQ ID NO: 36675 - RNA, 20 nt, Artificial Sequence
  Synthetic oligonucleotide: CBLB-6417
acgucuaaaucuauagcagc

SEQ ID NO: 36676 - RNA, 21 nt, Artificial Sequence
  Synthetic oligonucleotide: CBLB-6418
cacgucuaaaucuauagcagc

SEQ ID NO: 36677 - RNA, 22 nt, Artificial Sequence
  Synthetic oligonucleotide: CBLB-6419
ccacgucuaaaucuauagcagc

SEQ ID NO: 36678 - RNA, 23 nt, Artificial Sequence
  Synthetic oligonucleotide: CBLB-6420
cccacgucuaaaucuauagcagc

SEQ ID NO: 36679 - RNA, 24 nt, Artificial Sequence
  Synthetic oligonucleotide: CBLB-6421
ccccacgucuaaaucuauagcagc

SEQ ID NO: 36680 - RNA, 18 nt, Artificial Sequence
  Synthetic oligonucleotide: CBLB-6422
gcccugauugauggcagc

SEQ ID NO: 36681 - RNA, 19 nt, Artificial Sequence
  Synthetic oligonucleotide: CBLB-6423
agcccugauugauggcagc

SEQ ID NO: 36682 - RNA, 20 nt, Artificial Sequence
  Synthetic oligonucleotide: CBLB-3193
aagcccugauugauggcagc

SEQ ID NO: 36683 - RNA, 21 nt, Artificial Sequence
  Synthetic oligonucleotide: CBLB-6424
caagcccugauugauggcagc

SEQ ID NO: 36684 - RNA, 22 nt, Artificial Sequence
  Synthetic oligonucleotide: CBLB-6425
ucaagcccugauugauggcagc

SEQ ID NO: 36685 - RNA, 23 nt, Artificial Sequence
  Synthetic oligonucleotide: CBLB-6426
uucaagcccugauugauggcagc

SEQ ID NO: 36686 - RNA, 24 nt, Artificial Sequence
  Synthetic oligonucleotide: CBLB-6427
uuucaagcccugauugauggcagc

SEQ ID NO: 36687 - RNA, 18 nt, Artificial Sequence
  Synthetic oligonucleotide: CBLB-6428
acagaaaaccccaugggc

SEQ ID NO: 36688 - RNA, 19 nt, Artificial Sequence
  Synthetic oligonucleotide: CBLB-6429
cacagaaaaccccaugggc

SEQ ID NO: 36689 - RNA, 20 nt, Artificial Sequence
  Synthetic oligonucleotide: CBLB-6430
ccacagaaaaccccaugggc

SEQ ID NO: 36690 - RNA, 21 nt, Artificial Sequence
  Synthetic oligonucleotide: CBLB-6431
accacagaaaaccccaugggc

SEQ ID NO: 36691 - RNA, 22 nt, Artificial Sequence
  Synthetic oligonucleotide: CBLB-6432
caccacagaaaaccccaugggc

SEQ ID NO: 36692 - RNA, 23 nt, Artificial Sequence
  Synthetic oligonucleotide: CBLB-6433
ucaccacagaaaaccccaugggc

SEQ ID NO: 36693 - RNA, 24 nt, Artificial Sequence
  Synthetic oligonucleotide: CBLB-6434
uucaccacagaaaaccccaugggc

SEQ ID NO: 36694 - RNA, 18 nt, Artificial Sequence
  Synthetic oligonucleotide: CBLB-6435
caccagauuagcucuggc

SEQ ID NO: 36695 - RNA, 19 nt, Artificial Sequence
  Synthetic oligonucleotide: CBLB-6436
ccaccagauuagcucuggc

SEQ ID NO: 36696 - RNA, 20 nt, Artificial Sequence
  Synthetic oligonucleotide: CBLB-6437
uccaccagauuagcucuggc

SEQ ID NO: 36697 - RNA, 21 nt, Artificial Sequence
  Synthetic oligonucleotide: CBLB-6438
guccaccagauuagcucuggc

SEQ ID NO: 36698 - RNA, 22 nt, Artificial Sequence
  Synthetic oligonucleotide: CBLB-6439
gguccaccagauuagcucuggc

SEQ ID NO: 36699 - RNA, 23 nt, Artificial Sequence
  Synthetic oligonucleotide: CBLB-6440
agguccaccagauuagcucuggc

SEQ ID NO: 36700 - RNA, 24 nt, Artificial Sequence
  Synthetic oligonucleotide: CBLB-6441
gagguccaccagauuagcucuggc

SEQ ID NO: 36701 - RNA, 18 nt, Artificial Sequence
  Synthetic oligonucleotide: CBLB-6442
aguuccuuugccuccugc

SEQ ID NO: 36702 - RNA, 19 nt, Artificial Sequence
  Synthetic oligonucleotide: CBLB-6443
aaguuccuuugccuccugc

SEQ ID NO: 36703 - RNA, 20 nt, Artificial Sequence
  Synthetic oligonucleotide: CBLB-6444
caaguuccuuugccuccugc

SEQ ID NO: 36704 - RNA, 21 nt, Artificial Sequence
  Synthetic oligonucleotide: CBLB-6445
ccaaguuccuuugccuccugc

SEQ ID NO: 36705 - RNA, 22 nt, Artificial Sequence
  Synthetic oligonucleotide: CBLB-6446
gccaaguuccuuugccuccugc

SEQ ID NO: 36706 - RNA, 23 nt, Artificial Sequence
  Synthetic oligonucleotide: CBLB-6447
ggccaaguuccuuugccuccugc

SEQ ID NO: 36707 - RNA, 24 nt, Artificial Sequence
  Synthetic oligonucleotide: CBLB-6448
uggccaaguuccuuugccuccugc

SEQ ID NO: 36708 - RNA, 18 nt, Artificial Sequence
  Synthetic oligonucleotide: CBLB-6449
acagguaaggauaauugc

SEQ ID NO: 36709 - RNA, 19 nt, Artificial Sequence
  Synthetic oligonucleotide: CBLB-6450
cacagguaaggauaauugc

SEQ ID NO: 36710 - RNA, 20 nt, Artificial Sequence
  Synthetic oligonucleotide: CBLB-6451
acacagguaaggauaauugc

SEQ ID NO: 36711 - RNA, 21 nt, Artificial Sequence
  Synthetic oligonucleotide: CBLB-6452
uacacagguaaggauaauugc

SEQ ID NO: 36712 - RNA, 22 nt, Artificial Sequence
  Synthetic oligonucleotide: CBLB-6453
uuacacagguaaggauaauugc

SEQ ID NO: 36713 - RNA, 23 nt, Artificial Sequence
  Synthetic oligonucleotide: CBLB-6454
guuacacagguaaggauaauugc

SEQ ID NO: 36714 - RNA, 24 nt, Artificial Sequence
  Synthetic oligonucleotide: CBLB-6455
aguuacacagguaaggauaauugc

SEQ ID NO: 36715 - RNA, 18 nt, Artificial Sequence
  Synthetic oligonucleotide: CBLB-6456
gaauaaugucgaaguugc

SEQ ID NO: 36716 - RNA, 19 nt, Artificial Sequence
  Synthetic oligonucleotide: CBLB-6457
agaauaaugucgaaguugc

SEQ ID NO: 36717 - RNA, 20 nt, Artificial Sequence
  Synthetic oligonucleotide: CBLB-6458
cagaauaaugucgaaguugc

SEQ ID NO: 36718 - RNA, 21 nt, Artificial Sequence
  Synthetic oligonucleotide: CBLB-6459
ccagaauaaugucgaaguugc

SEQ ID NO: 36719 - RNA, 22 nt, Artificial Sequence
  Synthetic oligonucleotide: CBLB-6460
cccagaauaaugucgaaguugc

SEQ ID NO: 36720 - RNA, 23 nt, Artificial Sequence
  Synthetic oligonucleotide: CBLB-6461
gcccagaauaaugucgaaguugc

SEQ ID NO: 36721 - RNA, 24 nt, Artificial Sequence
  Synthetic oligonucleotide: CBLB-6462
agcccagaauaaugucgaaguugc

SEQ ID NO: 36722 - RNA, 18 nt, Artificial Sequence
  Synthetic oligonucleotide: CBLB-6463
ggaacugagcccauaauc

SEQ ID NO: 36723 - RNA, 19 nt, Artificial Sequence
  Synthetic oligonucleotide: CBLB-6464
aggaacugagcccauaauc

SEQ ID NO: 36724 - RNA, 20 nt, Artificial Sequence
  Synthetic oligonucleotide: CBLB-6465
aaggaacugagcccauaauc

SEQ ID NO: 36725 - RNA, 21 nt, Artificial Sequence
  Synthetic oligonucleotide: CBLB-6466
aaaggaacugagcccauaauc

SEQ ID NO: 36726 - RNA, 22 nt, Artificial Sequence
  Synthetic oligonucleotide: CBLB-6467
aaaaggaacugagcccauaauc

SEQ ID NO: 36727 - RNA, 23 nt, Artificial Sequence
  Synthetic oligonucleotide: CBLB-6468
uaaaaggaacugagcccauaauc

SEQ ID NO: 36728 - RNA, 24 nt, Artificial Sequence
  Synthetic oligonucleotide: CBLB-6469
auaaaaggaacugagcccauaauc

SEQ ID NO: 36729 - RNA, 18 nt, Artificial Sequence
  Synthetic oligonucleotide: CBLB-6470
uggacgacgaugaugauc

SEQ ID NO: 36730 - RNA, 19 nt, Artificial Sequence
  Synthetic oligonucleotide: CBLB-6471
uuggacgacgaugaugauc

SEQ ID NO: 36731 - RNA, 20 nt, Artificial Sequence
  Synthetic oligonucleotide: CBLB-6472
cuuggacgacgaugaugauc

SEQ ID NO: 36732 - RNA, 21 nt, Artificial Sequence
  Synthetic oligonucleotide: CBLB-6473
acuuggacgacgaugaugauc

SEQ ID NO: 36733 - RNA, 22 nt, Artificial Sequence
  Synthetic oligonucleotide: CBLB-6474
gacuuggacgacgaugaugauc

SEQ ID NO: 36734 - RNA, 23 nt, Artificial Sequence
  Synthetic oligonucleotide: CBLB-6475
agacuuggacgacgaugaugauc

SEQ ID NO: 36735 - RNA, 24 nt, Artificial Sequence
  Synthetic oligonucleotide: CBLB-6476
uagacuuggacgacgaugaugauc

SEQ ID NO: 36736 - RNA, 18 nt, Artificial Sequence
  Synthetic oligonucleotide: CBLB-6477
gcaaaaauugcaaaacuc

SEQ ID NO: 36737 - RNA, 19 nt, Artificial Sequence
  Synthetic oligonucleotide: CBLB-6478
ugcaaaaauugcaaaacuc

SEQ ID NO: 36738 - RNA, 20 nt, Artificial Sequence
  Synthetic oligonucleotide: CBLB-6479
augcaaaaauugcaaaacuc

SEQ ID NO: 36739 - RNA, 21 nt, Artificial Sequence
  Synthetic oligonucleotide: CBLB-6480
gaugcaaaaauugcaaaacuc

SEQ ID NO: 36740 - RNA, 22 nt, Artificial Sequence
  Synthetic oligonucleotide: CBLB-6481
cgaugcaaaaauugcaaaacuc

SEQ ID NO: 36741 - RNA, 23 nt, Artificial Sequence
  Synthetic oligonucleotide: CBLB-6482
ucgaugcaaaaauugcaaaacuc

SEQ ID NO: 36742 - RNA, 24 nt, Artificial Sequence
  Synthetic oligonucleotide: CBLB-6483
gucgaugcaaaaauugcaaaacuc

SEQ ID NO: 36743 - RNA, 18 nt, Artificial Sequence
  Synthetic oligonucleotide: CBLB-6484
gagacccgccaaugccuc

SEQ ID NO: 36744 - RNA, 19 nt, Artificial Sequence
  Synthetic oligonucleotide: CBLB-6485
agagacccgccaaugccuc

SEQ ID NO: 36745 - RNA, 20 nt, Artificial Sequence
  Synthetic oligonucleotide: CBLB-6486
cagagacccgccaaugccuc

SEQ ID NO: 36746 - RNA, 21 nt, Artificial Sequence
  Synthetic oligonucleotide: CBLB-6487
ccagagacccgccaaugccuc

SEQ ID NO: 36747 - RNA, 22 nt, Artificial Sequence
  Synthetic oligonucleotide: CBLB-6488
uccagagacccgccaaugccuc

SEQ ID NO: 36748 - RNA, 23 nt, Artificial Sequence
  Synthetic oligonucleotide: CBLB-6489
uuccagagacccgccaaugccuc

SEQ ID NO: 36749 - RNA, 24 nt, Artificial Sequence
  Synthetic oligonucleotide: CBLB-6490
cuuccagagacccgccaaugccuc

SEQ ID NO: 36750 - RNA, 18 nt, Artificial Sequence
  Synthetic oligonucleotide: CBLB-6491
agguuuuguguuauccuc

SEQ ID NO: 36751 - RNA, 19 nt, Artificial Sequence
  Synthetic oligonucleotide: CBLB-6492
aagguuuuguguuauccuc

SEQ ID NO: 36752 - RNA, 20 nt, Artificial Sequence
  Synthetic oligonucleotide: CBLB-6493
uaagguuuuguguuauccuc

SEQ ID NO: 36753 - RNA, 21 nt, Artificial Sequence
  Synthetic oligonucleotide: CBLB-6494
uuaagguuuuguguuauccuc

SEQ ID NO: 36754 - RNA, 22 nt, Artificial Sequence
  Synthetic oligonucleotide: CBLB-6495
auuaagguuuuguguuauccuc

SEQ ID NO: 36755 - RNA, 23 nt, Artificial Sequence
  Synthetic oligonucleotide: CBLB-6496
cauuaagguuuuguguuauccuc

SEQ ID NO: 36756 - RNA, 24 nt, Artificial Sequence
  Synthetic oligonucleotide: CBLB-6497
acauuaagguuuuguguuauccuc

SEQ ID NO: 36757 - RNA, 18 nt, Artificial Sequence
  Synthetic oligonucleotide: CBLB-6498
ucccuccuccccaaauuc

SEQ ID NO: 36758 - RNA, 19 nt, Artificial Sequence
  Synthetic oligonucleotide: CBLB-6499
cucccuccuccccaaauuc

SEQ ID NO: 36759 - RNA, 20 nt, Artificial Sequence
  Synthetic oligonucleotide: CBLB-6500
ucucccuccuccccaaauuc

SEQ ID NO: 36760 - RNA, 21 nt, Artificial Sequence
  Synthetic oligonucleotide: CBLB-6501
uucucccuccuccccaaauuc

SEQ ID NO: 36761 - RNA, 22 nt, Artificial Sequence
  Synthetic oligonucleotide: CBLB-6502
uuucucccuccuccccaaauuc

SEQ ID NO: 36762 - RNA, 23 nt, Artificial Sequence
  Synthetic oligonucleotide: CBLB-6503
cuuucucccuccuccccaaauuc

SEQ ID NO: 36763 - RNA, 24 nt, Artificial Sequence
  Synthetic oligonucleotide: CBLB-6504
acuuucucccuccuccccaaauuc

SEQ ID NO: 36764 - RNA, 18 nt, Artificial Sequence
  Synthetic oligonucleotide: CBLB-6505
uuucccaauggucaauuc

SEQ ID NO: 36765 - RNA, 19 nt, Artificial Sequence
  Synthetic oligonucleotide: CBLB-6506
cuuucccaauggucaauuc

SEQ ID NO: 36766 - RNA, 20 nt, Artificial Sequence
  Synthetic oligonucleotide: CBLB-6507
ucuuucccaauggucaauuc

SEQ ID NO: 36767 - RNA, 21 nt, Artificial Sequence
  Synthetic oligonucleotide: CBLB-6508
aucuuucccaauggucaauuc

SEQ ID NO: 36768 - RNA, 22 nt, Artificial Sequence
  Synthetic oligonucleotide: CBLB-6509
aaucuuucccaauggucaauuc

SEQ ID NO: 36769 - RNA, 23 nt, Artificial Sequence
  Synthetic oligonucleotide: CBLB-6510
caaucuuucccaauggucaauuc

SEQ ID NO: 36770 - RNA, 24 nt, Artificial Sequence
  Synthetic oligonucleotide: CBLB-6511
gcaaucuuucccaauggucaauuc

SEQ ID NO: 36771 - RNA, 18 nt, Artificial Sequence
  Synthetic oligonucleotide: CBLB-6512
gcagaugcugcugaauuc

SEQ ID NO: 36772 - RNA, 19 nt, Artificial Sequence
  Synthetic oligonucleotide: CBLB-6513
agcagaugcugcugaauuc

SEQ ID NO: 36773 - RNA, 20 nt, Artificial Sequence
  Synthetic oligonucleotide: CBLB-3225
aagcagaugcugcugaauuc

SEQ ID NO: 36774 - RNA, 21 nt, Artificial Sequence
  Synthetic oligonucleotide: CBLB-6514
aaagcagaugcugcugaauuc

SEQ ID NO: 36775 - RNA, 22 nt, Artificial Sequence
  Synthetic oligonucleotide: CBLB-6515
aaaagcagaugcugcugaauuc

SEQ ID NO: 36776 - RNA, 23 nt, Artificial Sequence
  Synthetic oligonucleotide: CBLB-6516
caaaagcagaugcugcugaauuc

SEQ ID NO: 36777 - RNA, 24 nt, Artificial Sequence
  Synthetic oligonucleotide: CBLB-6517
acaaaagcagaugcugcugaauuc

SEQ ID NO: 36778 - RNA, 18 nt, Artificial Sequence
  Synthetic oligonucleotide: CBLB-6518
uauucagacagugccuuc

SEQ ID NO: 36779 - RNA, 19 nt, Artificial Sequence
  Synthetic oligonucleotide: CBLB-6519
guauucagacagugccuuc

SEQ ID NO: 36780 - RNA, 20 nt, Artificial Sequence
  Synthetic oligonucleotide: CBLB-6520
aguauucagacagugccuuc

SEQ ID NO: 36781 - RNA, 21 nt, Artificial Sequence
  Synthetic oligonucleotide: CBLB-6521
aaguauucagacagugccuuc

SEQ ID NO: 36782 - RNA, 22 nt, Artificial Sequence
  Synthetic oligonucleotide: CBLB-6522
aaaguauucagacagugccuuc

SEQ ID NO: 36783 - RNA, 23 nt, Artificial Sequence
  Synthetic oligonucleotide: CBLB-6523
gaaaguauucagacagugccuuc

SEQ ID NO: 36784 - RNA, 24 nt, Artificial Sequence
  Synthetic oligonucleotide: CBLB-6524
ggaaaguauucagacagugccuuc

SEQ ID NO: 36785 - RNA, 18 nt, Artificial Sequence
  Synthetic oligonucleotide: CBLB-6525
uguggaaagcgugccuuc

SEQ ID NO: 36786 - RNA, 19 nt, Artificial Sequence
  Synthetic oligonucleotide: CBLB-6526
auguggaaagcgugccuuc

SEQ ID NO: 36787 - RNA, 20 nt, Artificial Sequence
  Synthetic oligonucleotide: CBLB-6527
cauguggaaagcgugccuuc

SEQ ID NO: 36788 - RNA, 21 nt, Artificial Sequence
  Synthetic oligonucleotide: CBLB-6528
ucauguggaaagcgugccuuc

SEQ ID NO: 36789 - RNA, 22 nt, Artificial Sequence
  Synthetic oligonucleotide: CBLB-6529
aucauguggaaagcgugccuuc

SEQ ID NO: 36790 - RNA, 23 nt, Artificial Sequence
  Synthetic oligonucleotide: CBLB-6530
caucauguggaaagcgugccuuc

SEQ ID NO: 36791 - RNA, 24 nt, Artificial Sequence
  Synthetic oligonucleotide: CBLB-6531
ccaucauguggaaagcgugccuuc

SEQ ID NO: 36792 - RNA, 18 nt, Artificial Sequence
  Synthetic oligonucleotide: CBLB-6532
gguaagaaauacgcaaag

SEQ ID NO: 36793 - RNA, 19 nt, Artificial Sequence
  Synthetic oligonucleotide: CBLB-6533
agguaagaaauacgcaaag

SEQ ID NO: 36794 - RNA, 20 nt, Artificial Sequence
  Synthetic oligonucleotide: CBLB-6534
aagguaagaaauacgcaaag

SEQ ID NO: 36795 - RNA, 21 nt, Artificial Sequence
  Synthetic oligonucleotide: CBLB-6535
uaagguaagaaauacgcaaag

SEQ ID NO: 36796 - RNA, 22 nt, Artificial Sequence
  Synthetic oligonucleotide: CBLB-6536
cuaagguaagaaauacgcaaag

SEQ ID NO: 36797 - RNA, 23 nt, Artificial Sequence
  Synthetic oligonucleotide: CBLB-6537
gcuaagguaagaaauacgcaaag

SEQ ID NO: 36798 - RNA, 24 nt, Artificial Sequence
  Synthetic oligonucleotide: CBLB-6538
agcuaagguaagaaauacgcaaag

SEQ ID NO: 36799 - RNA, 18 nt, Artificial Sequence
  Synthetic oligonucleotide: CBLB-6539
aaguaugagaaauggaag

SEQ ID NO: 36800 - RNA, 19 nt, Artificial Sequence
  Synthetic oligonucleotide: CBLB-6540
uaaguaugagaaauggaag

SEQ ID NO: 36801 - RNA, 20 nt, Artificial Sequence
  Synthetic oligonucleotide: CBLB-6541
guaaguaugagaaauggaag

SEQ ID NO: 36802 - RNA, 21 nt, Artificial Sequence
  Synthetic oligonucleotide: CBLB-6542
uguaaguaugagaaauggaag

SEQ ID NO: 36803 - RNA, 22 nt, Artificial Sequence
  Synthetic oligonucleotide: CBLB-6543
uuguaaguaugagaaauggaag

SEQ ID NO: 36804 - RNA, 23 nt, Artificial Sequence
  Synthetic oligonucleotide: CBLB-6544
auuguaaguaugagaaauggaag

SEQ ID NO: 36805 - RNA, 24 nt, Artificial Sequence
  Synthetic oligonucleotide: CBLB-6545
gauuguaaguaugagaaauggaag

SEQ ID NO: 36806 - RNA, 18 nt, Artificial Sequence
  Synthetic oligonucleotide: CBLB-6546
uuucccuugugccuacag

SEQ ID NO: 36807 - RNA, 19 nt, Artificial Sequence
  Synthetic oligonucleotide: CBLB-6547
uuuucccuugugccuacag

SEQ ID NO: 36808 - RNA, 20 nt, Artificial Sequence
  Synthetic oligonucleotide: CBLB-6548
uuuuucccuugugccuacag

SEQ ID NO: 36809 - RNA, 21 nt, Artificial Sequence
  Synthetic oligonucleotide: CBLB-6549
uuuuuucccuugugccuacag

SEQ ID NO: 36810 - RNA, 22 nt, Artificial Sequence
  Synthetic oligonucleotide: CBLB-6550
uuuuuuucccuugugccuacag

SEQ ID NO: 36811 - RNA, 23 nt, Artificial Sequence
  Synthetic oligonucleotide: CBLB-6551
auuuuuuucccuugugccuacag

SEQ ID NO: 36812 - RNA, 24 nt, Artificial Sequence
  Synthetic oligonucleotide: CBLB-6552
cauuuuuuucccuugugccuacag

SEQ ID NO: 36813 - RNA, 18 nt, Artificial Sequence
  Synthetic oligonucleotide: CBLB-6553
cugcuagaagguuaccag

SEQ ID NO: 36814 - RNA, 19 nt, Artificial Sequence
  Synthetic oligonucleotide: CBLB-6554
ccugcuagaagguuaccag

SEQ ID NO: 36815 - RNA, 20 nt, Artificial Sequence
  Synthetic oligonucleotide: CBLB-6555
uccugcuagaagguuaccag

SEQ ID NO: 36816 - RNA, 21 nt, Artificial Sequence
  Synthetic oligonucleotide: CBLB-6556
cuccugcuagaagguuaccag

SEQ ID NO: 36817 - RNA, 22 nt, Artificial Sequence
  Synthetic oligonucleotide: CBLB-6557
ccuccugcuagaagguuaccag

SEQ ID NO: 36818 - RNA, 23 nt, Artificial Sequence
  Synthetic oligonucleotide: CBLB-6558
gccuccugcuagaagguuaccag

SEQ ID NO: 36819 - RNA, 24 nt, Artificial Sequence
  Synthetic oligonucleotide: CBLB-6559
ugccuccugcuagaagguuaccag

SEQ ID NO: 36820 - RNA, 18 nt, Artificial Sequence
  Synthetic oligonucleotide: CBLB-6560
agaaaacaagagacccag

SEQ ID NO: 36821 - RNA, 19 nt, Artificial Sequence
  Synthetic oligonucleotide: CBLB-6561
gagaaaacaagagacccag

SEQ ID NO: 36822 - RNA, 20 nt, Artificial Sequence
  Synthetic oligonucleotide: CBLB-6562
agagaaaacaagagacccag

SEQ ID NO: 36823 - RNA, 21 nt, Artificial Sequence
  Synthetic oligonucleotide: CBLB-6563
cagagaaaacaagagacccag

SEQ ID NO: 36824 - RNA, 22 nt, Artificial Sequence
  Synthetic oligonucleotide: CBLB-6564
ucagagaaaacaagagacccag

SEQ ID NO: 36825 - RNA, 23 nt, Artificial Sequence
  Synthetic oligonucleotide: CBLB-6565
uucagagaaaacaagagacccag

SEQ ID NO: 36826 - RNA, 24 nt, Artificial Sequence
  Synthetic oligonucleotide: CBLB-6566
uuucagagaaaacaagagacccag

SEQ ID NO: 36827 - RNA, 18 nt, Artificial Sequence
  Synthetic oligonucleotide: CBLB-6567
agcccugauugauggcag

SEQ ID NO: 36828 - RNA, 19 nt, Artificial Sequence
  Synthetic oligonucleotide: CBLB-6568
aagcccugauugauggcag

SEQ ID NO: 36829 - RNA, 20 nt, Artificial Sequence
  Synthetic oligonucleotide: CBLB-6569
caagcccugauugauggcag

SEQ ID NO: 36830 - RNA, 21 nt, Artificial Sequence
  Synthetic oligonucleotide: CBLB-6570
ucaagcccugauugauggcag

SEQ ID NO: 36831 - RNA, 22 nt, Artificial Sequence
  Synthetic oligonucleotide: CBLB-6571
uucaagcccugauugauggcag

SEQ ID NO: 36832 - RNA, 23 nt, Artificial Sequence
  Synthetic oligonucleotide: CBLB-6572
uuucaagcccugauugauggcag

SEQ ID NO: 36833 - RNA, 24 nt, Artificial Sequence
  Synthetic oligonucleotide: CBLB-6573
auuucaagcccugauugauggcag

SEQ ID NO: 36834 - RNA, 18 nt, Artificial Sequence
  Synthetic oligonucleotide: CBLB-6574
accuuucuuuaaaugcag

SEQ ID NO: 36835 - RNA, 19 nt, Artificial Sequence
  Synthetic oligonucleotide: CBLB-6575
gaccuuucuuuaaaugcag

SEQ ID NO: 36836 - RNA, 20 nt, Artificial Sequence
  Synthetic oligonucleotide: CBLB-6576
cgaccuuucuuuaaaugcag

SEQ ID NO: 36837 - RNA, 21 nt, Artificial Sequence
  Synthetic oligonucleotide: CBLB-6577
ucgaccuuucuuuaaaugcag

SEQ ID NO: 36838 - RNA, 22 nt, Artificial Sequence
  Synthetic oligonucleotide: CBLB-6578
aucgaccuuucuuuaaaugcag

SEQ ID NO: 36839 - RNA, 23 nt, Artificial Sequence
  Synthetic oligonucleotide: CBLB-6579
uaucgaccuuucuuuaaaugcag

SEQ ID NO: 36840 - RNA, 24 nt, Artificial Sequence
  Synthetic oligonucleotide: CBLB-6580
auaucgaccuuucuuuaaaugcag

SEQ ID NO: 36841 - RNA, 18 nt, Artificial Sequence
  Synthetic oligonucleotide: CBLB-6581
accccuuugauccaagag

SEQ ID NO: 36842 - RNA, 19 nt, Artificial Sequence
  Synthetic oligonucleotide: CBLB-6582
gaccccuuugauccaagag

SEQ ID NO: 36843 - RNA, 20 nt, Artificial Sequence
  Synthetic oligonucleotide: CBLB-6583
ggaccccuuugauccaagag

SEQ ID NO: 36844 - RNA, 21 nt, Artificial Sequence
  Synthetic oligonucleotide: CBLB-6584
uggaccccuuugauccaagag

SEQ ID NO: 36845 - RNA, 22 nt, Artificial Sequence
  Synthetic oligonucleotide: CBLB-6585
guggaccccuuugauccaagag

SEQ ID NO: 36846 - RNA, 23 nt, Artificial Sequence
  Synthetic oligonucleotide: CBLB-6586
cguggaccccuuugauccaagag

SEQ ID NO: 36847 - RNA, 24 nt, Artificial Sequence
  Synthetic oligonucleotide: CBLB-6587
ucguggaccccuuugauccaagag

SEQ ID NO: 36848 - RNA, 18 nt, Artificial Sequence
  Synthetic oligonucleotide: CBLB-6588
gguuaugccuuugaagag

SEQ ID NO: 36849 - RNA, 19 nt, Artificial Sequence
  Synthetic oligonucleotide: CBLB-6589
ggguuaugccuuugaagag

SEQ ID NO: 36850 - RNA, 20 nt, Artificial Sequence
  Synthetic oligonucleotide: CBLB-6590
aggguuaugccuuugaagag

SEQ ID NO: 36851 - RNA, 21 nt, Artificial Sequence
  Synthetic oligonucleotide: CBLB-6591
gaggguuaugccuuugaagag

SEQ ID NO: 36852 - RNA, 22 nt, Artificial Sequence
  Synthetic oligonucleotide: CBLB-6592
agaggguuaugccuuugaagag

SEQ ID NO: 36853 - RNA, 23 nt, Artificial Sequence
  Synthetic oligonucleotide: CBLB-6593
gagaggguuaugccuuugaagag

SEQ ID NO: 36854 - RNA, 24 nt, Artificial Sequence
  Synthetic oligonucleotide: CBLB-6594
ggagaggguuaugccuuugaagag

SEQ ID NO: 36855 - RNA, 18 nt, Artificial Sequence
  Synthetic oligonucleotide: CBLB-6595
cucuccccuugcccagag

SEQ ID NO: 36856 - RNA, 19 nt, Artificial Sequence
  Synthetic oligonucleotide: CBLB-6596
ccucuccccuugcccagag

SEQ ID NO: 36857 - RNA, 20 nt, Artificial Sequence
  Synthetic oligonucleotide: CBLB-6597
uccucuccccuugcccagag

SEQ ID NO: 36858 - RNA, 21 nt, Artificial Sequence
  Synthetic oligonucleotide: CBLB-6598
auccucuccccuugcccagag

SEQ ID NO: 36859 - RNA, 22 nt, Artificial Sequence
  Synthetic oligonucleotide: CBLB-6599
gauccucuccccuugcccagag

SEQ ID NO: 36860 - RNA, 23 nt, Artificial Sequence
  Synthetic oligonucleotide: CBLB-6600
ggauccucuccccuugcccagag

SEQ ID NO: 36861 - RNA, 24 nt, Artificial Sequence
  Synthetic oligonucleotide: CBLB-6601
aggauccucuccccuugcccagag

SEQ ID NO: 36862 - RNA, 18 nt, Artificial Sequence
  Synthetic oligonucleotide: CBLB-6602
caugguccaucuucagag

SEQ ID NO: 36863 - RNA, 19 nt, Artificial Sequence
  Synthetic oligonucleotide: CBLB-6603
acaugguccaucuucagag

SEQ ID NO: 36864 - RNA, 20 nt, Artificial Sequence
  Synthetic oligonucleotide: CBLB-6604
cacaugguccaucuucagag

SEQ ID NO: 36865 - RNA, 21 nt, Artificial Sequence
  Synthetic oligonucleotide: CBLB-6605
acacaugguccaucuucagag

SEQ ID NO: 36866 - RNA, 22 nt, Artificial Sequence
  Synthetic oligonucleotide: CBLB-6606
aacacaugguccaucuucagag

SEQ ID NO: 36867 - RNA, 23 nt, Artificial Sequence
  Synthetic oligonucleotide: CBLB-6607
gaacacaugguccaucuucagag

SEQ ID NO: 36868 - RNA, 24 nt, Artificial Sequence
  Synthetic oligonucleotide: CBLB-6608
ggaacacaugguccaucuucagag

SEQ ID NO: 36869 - RNA, 18 nt, Artificial Sequence
  Synthetic oligonucleotide: CBLB-6609
ugggaugucgacuccuag

SEQ ID NO: 36870 - RNA, 19 nt, Artificial Sequence
  Synthetic oligonucleotide: CBLB-6610
gugggaugucgacuccuag

SEQ ID NO: 36871 - RNA, 20 nt, Artificial Sequence
  Synthetic oligonucleotide: CBLB-3254
ugugggaugucgacuccuag

SEQ ID NO: 36872 - RNA, 21 nt, Artificial Sequence
  Synthetic oligonucleotide: CBLB-6611
uugugggaugucgacuccuag

SEQ ID NO: 36873 - RNA, 22 nt, Artificial Sequence
  Synthetic oligonucleotide: CBLB-6612
cuugugggaugucgacuccuag

SEQ ID NO: 36874 - RNA, 23 nt, Artificial Sequence
  Synthetic oligonucleotide: CBLB-6613
gcuugugggaugucgacuccuag

SEQ ID NO: 36875 - RNA, 24 nt, Artificial Sequence
  Synthetic oligonucleotide: CBLB-6614
agcuugugggaugucgacuccuag

SEQ ID NO: 36876 - RNA, 18 nt, Artificial Sequence
  Synthetic oligonucleotide: CBLB-6615
aaacaagagacccaguag

SEQ ID NO: 36877 - RNA, 19 nt, Artificial Sequence
  Synthetic oligonucleotide: CBLB-6616
aaaacaagagacccaguag

SEQ ID NO: 36878 - RNA, 20 nt, Artificial Sequence
  Synthetic oligonucleotide: CBLB-3256
gaaaacaagagacccaguag

SEQ ID NO: 36879 - RNA, 21 nt, Artificial Sequence
  Synthetic oligonucleotide: CBLB-6617
agaaaacaagagacccaguag

SEQ ID NO: 36880 - RNA, 22 nt, Artificial Sequence
  Synthetic oligonucleotide: CBLB-6618
gagaaaacaagagacccaguag

SEQ ID NO: 36881 - RNA, 23 nt, Artificial Sequence
  Synthetic oligonucleotide: CBLB-6619
agagaaaacaagagacccaguag

SEQ ID NO: 36882 - RNA, 24 nt, Artificial Sequence
  Synthetic oligonucleotide: CBLB-6620
cagagaaaacaagagacccaguag

SEQ ID NO: 36883 - RNA, 18 nt, Artificial Sequence
  Synthetic oligonucleotide: CBLB-6621
ucuucuuccuucagguag

SEQ ID NO: 36884 - RNA, 19 nt, Artificial Sequence
  Synthetic oligonucleotide: CBLB-6622
uucuucuuccuucagguag

SEQ ID NO: 36885 - RNA, 20 nt, Artificial Sequence
  Synthetic oligonucleotide: CBLB-6623
uuucuucuuccuucagguag

SEQ ID NO: 36886 - RNA, 21 nt, Artificial Sequence
  Synthetic oligonucleotide: CBLB-6624
uuuucuucuuccuucagguag

SEQ ID NO: 36887 - RNA, 22 nt, Artificial Sequence
  Synthetic oligonucleotide: CBLB-6625
uuuuucuucuuccuucagguag

SEQ ID NO: 36888 - RNA, 23 nt, Artificial Sequence
  Synthetic oligonucleotide: CBLB-6626
cuuuuucuucuuccuucagguag

SEQ ID NO: 36889 - RNA, 24 nt, Artificial Sequence
  Synthetic oligonucleotide: CBLB-6627
ucuuuuucuucuuccuucagguag

SEQ ID NO: 36890 - RNA, 18 nt, Artificial Sequence
  Synthetic oligonucleotide: CBLB-6628
gccaugauuugccuuuag

SEQ ID NO: 36891 - RNA, 19 nt, Artificial Sequence
  Synthetic oligonucleotide: CBLB-6629
cgccaugauuugccuuuag

SEQ ID NO: 36892 - RNA, 20 nt, Artificial Sequence
  Synthetic oligonucleotide: CBLB-6630
acgccaugauuugccuuuag

SEQ ID NO: 36893 - RNA, 21 nt, Artificial Sequence
  Synthetic oligonucleotide: CBLB-6631
gacgccaugauuugccuuuag

SEQ ID NO: 36894 - RNA, 22 nt, Artificial Sequence
  Synthetic oligonucleotide: CBLB-6632
agacgccaugauuugccuuuag

SEQ ID NO: 36895 - RNA, 23 nt, Artificial Sequence
  Synthetic oligonucleotide: CBLB-6633
cagacgccaugauuugccuuuag

SEQ ID NO: 36896 - RNA, 24 nt, Artificial Sequence
  Synthetic oligonucleotide: CBLB-6634
acagacgccaugauuugccuuuag

SEQ ID NO: 36897 - RNA, 18 nt, Artificial Sequence
  Synthetic oligonucleotide: CBLB-6635
cccuaaaccacgaccgcg

SEQ ID NO: 36898 - RNA, 19 nt, Artificial Sequence
  Synthetic oligonucleotide: CBLB-6636
ccccuaaaccacgaccgcg

SEQ ID NO: 36899 - RNA, 20 nt, Artificial Sequence
  Synthetic oligonucleotide: CBLB-6637
cccccuaaaccacgaccgcg

SEQ ID NO: 36900 - RNA, 21 nt, Artificial Sequence
  Synthetic oligonucleotide: CBLB-6638
acccccuaaaccacgaccgcg

SEQ ID NO: 36901 - RNA, 22 nt, Artificial Sequence
  Synthetic oligonucleotide: CBLB-6639
gacccccuaaaccacgaccgcg

SEQ ID NO: 36902 - RNA, 23 nt, Artificial Sequence
  Synthetic oligonucleotide: CBLB-6640
agacccccuaaaccacgaccgcg

SEQ ID NO: 36903 - RNA, 24 nt, Artificial Sequence
  Synthetic oligonucleotide: CBLB-6641
cagacccccuaaaccacgaccgcg

SEQ ID NO: 36904 - RNA, 18 nt, Artificial Sequence
  Synthetic oligonucleotide: CBLB-6642
uucuagugcacugacagg

SEQ ID NO: 36905 - RNA, 19 nt, Artificial Sequence
  Synthetic oligonucleotide: CBLB-6643
guucuagugcacugacagg

SEQ ID NO: 36906 - RNA, 20 nt, Artificial Sequence
  Synthetic oligonucleotide: CBLB-6644
uguucuagugcacugacagg

SEQ ID NO: 36907 - RNA, 21 nt, Artificial Sequence
  Synthetic oligonucleotide: CBLB-6645
cuguucuagugcacugacagg

SEQ ID NO: 36908 - RNA, 22 nt, Artificial Sequence
  Synthetic oligonucleotide: CBLB-6646
ucuguucuagugcacugacagg

SEQ ID NO: 36909 - RNA, 23 nt, Artificial Sequence
  Synthetic oligonucleotide: CBLB-6647
uucuguucuagugcacugacagg

SEQ ID NO: 36910 - RNA, 24 nt, Artificial Sequence
  Synthetic oligonucleotide: CBLB-6648
uuucuguucuagugcacugacagg

SEQ ID NO: 36911 - RNA, 18 nt, Artificial Sequence
  Synthetic oligonucleotide: CBLB-6649
uuuucuucuuccuucagg

SEQ ID NO: 36912 - RNA, 19 nt, Artificial Sequence
  Synthetic oligonucleotide: CBLB-6650
uuuuucuucuuccuucagg

SEQ ID NO: 36913 - RNA, 20 nt, Artificial Sequence
  Synthetic oligonucleotide: CBLB-6651
cuuuuucuucuuccuucagg

SEQ ID NO: 36914 - RNA, 21 nt, Artificial Sequence
  Synthetic oligonucleotide: CBLB-6652
ucuuuuucuucuuccuucagg

SEQ ID NO: 36915 - RNA, 22 nt, Artificial Sequence
  Synthetic oligonucleotide: CBLB-6653
aucuuuuucuucuuccuucagg

SEQ ID NO: 36916 - RNA, 23 nt, Artificial Sequence
  Synthetic oligonucleotide: CBLB-6654
gaucuuuuucuucuuccuucagg

SEQ ID NO: 36917 - RNA, 24 nt, Artificial Sequence
  Synthetic oligonucleotide: CBLB-6655
ggaucuuuuucuucuuccuucagg

SEQ ID NO: 36918 - RNA, 18 nt, Artificial Sequence
  Synthetic oligonucleotide: CBLB-6656
cuucuuccuucagguagg

SEQ ID NO: 36919 - RNA, 19 nt, Artificial Sequence
  Synthetic oligonucleotide: CBLB-6657
ucuucuuccuucagguagg

SEQ ID NO: 36920 - RNA, 20 nt, Artificial Sequence
  Synthetic oligonucleotide: CBLB-3283
uucuucuuccuucagguagg

SEQ ID NO: 36921 - RNA, 21 nt, Artificial Sequence
  Synthetic oligonucleotide: CBLB-6658
uuucuucuuccuucagguagg

SEQ ID NO: 36922 - RNA, 22 nt, Artificial Sequence
  Synthetic oligonucleotide: CBLB-6659
uuuucuucuuccuucagguagg

SEQ ID NO: 36923 - RNA, 23 nt, Artificial Sequence
  Synthetic oligonucleotide: CBLB-6660
uuuuucuucuuccuucagguagg

SEQ ID NO: 36924 - RNA, 24 nt, Artificial Sequence
  Synthetic oligonucleotide: CBLB-6661
cuuuuucuucuuccuucagguagg

SEQ ID NO: 36925 - RNA, 18 nt, Artificial Sequence
  Synthetic oligonucleotide: CBLB-6662
ucucaucccuccauuagg

SEQ ID NO: 36926 - RNA, 19 nt, Artificial Sequence
  Synthetic oligonucleotide: CBLB-6663
uucucaucccuccauuagg

SEQ ID NO: 36927 - RNA, 20 nt, Artificial Sequence
  Synthetic oligonucleotide: CBLB-6664
cuucucaucccuccauuagg

SEQ ID NO: 36928 - RNA, 21 nt, Artificial Sequence
  Synthetic oligonucleotide: CBLB-6665
ucuucucaucccuccauuagg

SEQ ID NO: 36929 - RNA, 22 nt, Artificial Sequence
  Synthetic oligonucleotide: CBLB-6666
aucuucucaucccuccauuagg

SEQ ID NO: 36930 - RNA, 23 nt, Artificial Sequence
  Synthetic oligonucleotide: CBLB-6667
gaucuucucaucccuccauuagg

SEQ ID NO: 36931 - RNA, 24 nt, Artificial Sequence
  Synthetic oligonucleotide: CBLB-6668
ugaucuucucaucccuccauuagg

SEQ ID NO: 36932 - RNA, 18 nt, Artificial Sequence
  Synthetic oligonucleotide: CBLB-6669
ggaugucgacuccuaggg

SEQ ID NO: 36933 - RNA, 19 nt, Artificial Sequence
  Synthetic oligonucleotide: CBLB-6670
gggaugucgacuccuaggg

SEQ ID NO: 36934 - RNA, 20 nt, Artificial Sequence
  Synthetic oligonucleotide: CBLB-6671
ugggaugucgacuccuaggg

SEQ ID NO: 36935 - RNA, 21 nt, Artificial Sequence
  Synthetic oligonucleotide: CBLB-6672
gugggaugucgacuccuaggg

SEQ ID NO: 36936 - RNA, 22 nt, Artificial Sequence
  Synthetic oligonucleotide: CBLB-6673
ugugggaugucgacuccuaggg

SEQ ID NO: 36937 - RNA, 23 nt, Artificial Sequence
  Synthetic oligonucleotide: CBLB-6674
uugugggaugucgacuccuaggg

SEQ ID NO: 36938 - RNA, 24 nt, Artificial Sequence
  Synthetic oligonucleotide: CBLB-6675
cuugugggaugucgacuccuaggg

SEQ ID NO: 36939 - RNA, 18 nt, Artificial Sequence
  Synthetic oligonucleotide: CBLB-6676
uuggcuaugugacugggg

SEQ ID NO: 36940 - RNA, 19 nt, Artificial Sequence
  Synthetic oligonucleotide: CBLB-6677
auuggcuaugugacugggg

SEQ ID NO: 36941 - RNA, 20 nt, Artificial Sequence
  Synthetic oligonucleotide: CBLB-6678
cauuggcuaugugacugggg

SEQ ID NO: 36942 - RNA, 21 nt, Artificial Sequence
  Synthetic oligonucleotide: CBLB-6679
ccauuggcuaugugacugggg

SEQ ID NO: 36943 - RNA, 22 nt, Artificial Sequence
  Synthetic oligonucleotide: CBLB-6680
gccauuggcuaugugacugggg

SEQ ID NO: 36944 - RNA, 23 nt, Artificial Sequence
  Synthetic oligonucleotide: CBLB-6681
ggccauuggcuaugugacugggg

SEQ ID NO: 36945 - RNA, 24 nt, Artificial Sequence
  Synthetic oligonucleotide: CBLB-6682
gggccauuggcuaugugacugggg

SEQ ID NO: 36946 - RNA, 18 nt, Artificial Sequence
  Synthetic oligonucleotide: CBLB-6683
aaauugcaaaacucaugg

SEQ ID NO: 36947 - RNA, 19 nt, Artificial Sequence
  Synthetic oligonucleotide: CBLB-6684
aaaauugcaaaacucaugg

SEQ ID NO: 36948 - RNA, 20 nt, Artificial Sequence
  Synthetic oligonucleotide: CBLB-6685
aaaaauugcaaaacucaugg

SEQ ID NO: 36949 - RNA, 21 nt, Artificial Sequence
  Synthetic oligonucleotide: CBLB-6686
caaaaauugcaaaacucaugg

SEQ ID NO: 36950 - RNA, 22 nt, Artificial Sequence
  Synthetic oligonucleotide: CBLB-6687
gcaaaaauugcaaaacucaugg

SEQ ID NO: 36951 - RNA, 23 nt, Artificial Sequence
  Synthetic oligonucleotide: CBLB-6688
ugcaaaaauugcaaaacucaugg

SEQ ID NO: 36952 - RNA, 24 nt, Artificial Sequence
  Synthetic oligonucleotide: CBLB-6689
augcaaaaauugcaaaacucaugg

SEQ ID NO: 36953 - RNA, 18 nt, Artificial Sequence
  Synthetic oligonucleotide: CBLB-6690
uuaucuuuauccugaugg

SEQ ID NO: 36954 - RNA, 19 nt, Artificial Sequence
  Synthetic oligonucleotide: CBLB-6691
guuaucuuuauccugaugg

SEQ ID NO: 36955 - RNA, 20 nt, Artificial Sequence
  Synthetic oligonucleotide: CBLB-6692
aguuaucuuuauccugaugg

SEQ ID NO: 36956 - RNA, 21 nt, Artificial Sequence
  Synthetic oligonucleotide: CBLB-6693
caguuaucuuuauccugaugg

SEQ ID NO: 36957 - RNA, 22 nt, Artificial Sequence
  Synthetic oligonucleotide: CBLB-6694
ucaguuaucuuuauccugaugg

SEQ ID NO: 36958 - RNA, 23 nt, Artificial Sequence
  Synthetic oligonucleotide: CBLB-6695
uucaguuaucuuuauccugaugg

SEQ ID NO: 36959 - RNA, 24 nt, Artificial Sequence
  Synthetic oligonucleotide: CBLB-6696
auucaguuaucuuuauccugaugg

SEQ ID NO: 36960 - RNA, 18 nt, Artificial Sequence
  Synthetic oligonucleotide: CBLB-6697
ucuucagucacaugcugg

SEQ ID NO: 36961 - RNA, 19 nt, Artificial Sequence
  Synthetic oligonucleotide: CBLB-6698
aucuucagucacaugcugg

SEQ ID NO: 36962 - RNA, 20 nt, Artificial Sequence
  Synthetic oligonucleotide: CBLB-6699
uaucuucagucacaugcugg

SEQ ID NO: 36963 - RNA, 21 nt, Artificial Sequence
  Synthetic oligonucleotide: CBLB-6700
uuaucuucagucacaugcugg

SEQ ID NO: 36964 - RNA, 22 nt, Artificial Sequence
  Synthetic oligonucleotide: CBLB-6701
cuuaucuucagucacaugcugg

SEQ ID NO: 36965 - RNA, 23 nt, Artificial Sequence
  Synthetic oligonucleotide: CBLB-6702
ccuuaucuucagucacaugcugg

SEQ ID NO: 36966 - RNA, 24 nt, Artificial Sequence
  Synthetic oligonucleotide: CBLB-6703
cccuuaucuucagucacaugcugg

SEQ ID NO: 36967 - RNA, 18 nt, Artificial Sequence
  Synthetic oligonucleotide: CBLB-6704
agauagcccagaauaaug

SEQ ID NO: 36968 - RNA, 19 nt, Artificial Sequence
  Synthetic oligonucleotide: CBLB-6705
gagauagcccagaauaaug

SEQ ID NO: 36969 - RNA, 20 nt, Artificial Sequence
  Synthetic oligonucleotide: CBLB-6706
agagauagcccagaauaaug

SEQ ID NO: 36970 - RNA, 21 nt, Artificial Sequence
  Synthetic oligonucleotide: CBLB-6707
uagagauagcccagaauaaug

SEQ ID NO: 36971 - RNA, 22 nt, Artificial Sequence
  Synthetic oligonucleotide: CBLB-6708
uuagagauagcccagaauaaug

SEQ ID NO: 36972 - RNA, 23 nt, Artificial Sequence
  Synthetic oligonucleotide: CBLB-6709
cuuagagauagcccagaauaaug

SEQ ID NO: 36973 - RNA, 24 nt, Artificial Sequence
  Synthetic oligonucleotide: CBLB-6710
ccuuagagauagcccagaauaaug

SEQ ID NO: 36974 - RNA, 18 nt, Artificial Sequence
  Synthetic oligonucleotide: CBLB-6711
uagucuucuccuugcaug

SEQ ID NO: 36975 - RNA, 19 nt, Artificial Sequence
  Synthetic oligonucleotide: CBLB-6712
uuagucuucuccuugcaug

SEQ ID NO: 36976 - RNA, 20 nt, Artificial Sequence
  Synthetic oligonucleotide: CBLB-6713
uuuagucuucuccuugcaug

SEQ ID NO: 36977 - RNA, 21 nt, Artificial Sequence
  Synthetic oligonucleotide: CBLB-6714
cuuuagucuucuccuugcaug

SEQ ID NO: 36978 - RNA, 22 nt, Artificial Sequence
  Synthetic oligonucleotide: CBLB-6715
ucuuuagucuucuccuugcaug

SEQ ID NO: 36979 - RNA, 23 nt, Artificial Sequence
  Synthetic oligonucleotide: CBLB-6716
uucuuuagucuucuccuugcaug

SEQ ID NO: 36980 - RNA, 24 nt, Artificial Sequence
  Synthetic oligonucleotide: CBLB-6717
uuucuuuagucuucuccuugcaug

SEQ ID NO: 36981 - RNA, 18 nt, Artificial Sequence
  Synthetic oligonucleotide: CBLB-6718
guagacacauccaucaug

SEQ ID NO: 36982 - RNA, 19 nt, Artificial Sequence
  Synthetic oligonucleotide: CBLB-6719
aguagacacauccaucaug

SEQ ID NO: 36983 - RNA, 20 nt, Artificial Sequence
  Synthetic oligonucleotide: CBLB-3311
gaguagacacauccaucaug

SEQ ID NO: 36984 - RNA, 21 nt, Artificial Sequence
  Synthetic oligonucleotide: CBLB-6720
ugaguagacacauccaucaug

SEQ ID NO: 36985 - RNA, 22 nt, Artificial Sequence
  Synthetic oligonucleotide: CBLB-6721
cugaguagacacauccaucaug

SEQ ID NO: 36986 - RNA, 23 nt, Artificial Sequence
  Synthetic oligonucleotide: CBLB-6722
acugaguagacacauccaucaug

SEQ ID NO: 36987 - RNA, 24 nt, Artificial Sequence
  Synthetic oligonucleotide: CBLB-6723
gacugaguagacacauccaucaug

SEQ ID NO: 36988 - RNA, 18 nt, Artificial Sequence
  Synthetic oligonucleotide: CBLB-6724
uggcauuucucacauaug

SEQ ID NO: 36989 - RNA, 19 nt, Artificial Sequence
  Synthetic oligonucleotide: CBLB-6725
auggcauuucucacauaug

SEQ ID NO: 36990 - RNA, 20 nt, Artificial Sequence
  Synthetic oligonucleotide: CBLB-6726
cauggcauuucucacauaug

SEQ ID NO: 36991 - RNA, 21 nt, Artificial Sequence
  Synthetic oligonucleotide: CBLB-6727
acauggcauuucucacauaug

SEQ ID NO: 36992 - RNA, 22 nt, Artificial Sequence
  Synthetic oligonucleotide: CBLB-6728
uacauggcauuucucacauaug

SEQ ID NO: 36993 - RNA, 23 nt, Artificial Sequence
  Synthetic oligonucleotide: CBLB-6729
uuacauggcauuucucacauaug

SEQ ID NO: 36994 - RNA, 24 nt, Artificial Sequence
  Synthetic oligonucleotide: CBLB-6730
guuacauggcauuucucacauaug

SEQ ID NO: 36995 - RNA, 18 nt, Artificial Sequence
  Synthetic oligonucleotide: CBLB-6731
ucugacccagugcuuaug

SEQ ID NO: 36996 - RNA, 19 nt, Artificial Sequence
  Synthetic oligonucleotide: CBLB-6732
cucugacccagugcuuaug

SEQ ID NO: 36997 - RNA, 20 nt, Artificial Sequence
  Synthetic oligonucleotide: CBLB-3315
gcucugacccagugcuuaug

SEQ ID NO: 36998 - RNA, 21 nt, Artificial Sequence
  Synthetic oligonucleotide: CBLB-6733
ggcucugacccagugcuuaug

SEQ ID NO: 36999 - RNA, 22 nt, Artificial Sequence
  Synthetic oligonucleotide: CBLB-6734
gggcucugacccagugcuuaug

SEQ ID NO: 37000 - RNA, 23 nt, Artificial Sequence
  Synthetic oligonucleotide: CBLB-6735
ugggcucugacccagugcuuaug

SEQ ID NO: 37001 - RNA, 24 nt, Artificial Sequence
  Synthetic oligonucleotide: CBLB-6736
gugggcucugacccagugcuuaug

SEQ ID NO: 37002 - RNA, 18 nt, Artificial Sequence
  Synthetic oligonucleotide: CBLB-6737
ucaguuaucuuuauccug

SEQ ID NO: 37003 - RNA, 19 nt, Artificial Sequence
  Synthetic oligonucleotide: CBLB-6738
uucaguuaucuuuauccug

SEQ ID NO: 37004 - RNA, 20 nt, Artificial Sequence
  Synthetic oligonucleotide: CBLB-6739
auucaguuaucuuuauccug

SEQ ID NO: 37005 - RNA, 21 nt, Artificial Sequence
  Synthetic oligonucleotide: CBLB-6740
aauucaguuaucuuuauccug

SEQ ID NO: 37006 - RNA, 22 nt, Artificial Sequence
  Synthetic oligonucleotide: CBLB-6741
aaauucaguuaucuuuauccug

SEQ ID NO: 37007 - RNA, 23 nt, Artificial Sequence
  Synthetic oligonucleotide: CBLB-6742
uaaauucaguuaucuuuauccug

SEQ ID NO: 37008 - RNA, 24 nt, Artificial Sequence
  Synthetic oligonucleotide: CBLB-6743
uuaaauucaguuaucuuuauccug

SEQ ID NO: 37009 - RNA, 18 nt, Artificial Sequence
  Synthetic oligonucleotide: CBLB-6744
agaugcugcugaauucug

SEQ ID NO: 37010 - RNA, 19 nt, Artificial Sequence
  Synthetic oligonucleotide: CBLB-6745
cagaugcugcugaauucug

SEQ ID NO: 37011 - RNA, 20 nt, Artificial Sequence
  Synthetic oligonucleotide: CBLB-6746
gcagaugcugcugaauucug

SEQ ID NO: 37012 - RNA, 21 nt, Artificial Sequence
  Synthetic oligonucleotide: CBLB-6747
agcagaugcugcugaauucug

SEQ ID NO: 37013 - RNA, 22 nt, Artificial Sequence
  Synthetic oligonucleotide: CBLB-6748
aagcagaugcugcugaauucug

SEQ ID NO: 37014 - RNA, 23 nt, Artificial Sequence
  Synthetic oligonucleotide: CBLB-6749
aaagcagaugcugcugaauucug

SEQ ID NO: 37015 - RNA, 24 nt, Artificial Sequence
  Synthetic oligonucleotide: CBLB-6750
aaaagcagaugcugcugaauucug

SEQ ID NO: 37016 - RNA, 18 nt, Artificial Sequence
  Synthetic oligonucleotide: CBLB-6751
uaugccuuugaagaggug

SEQ ID NO: 37017 - RNA, 19 nt, Artificial Sequence
  Synthetic oligonucleotide: CBLB-6752
uuaugccuuugaagaggug

SEQ ID NO: 37018 - RNA, 20 nt, Artificial Sequence
  Synthetic oligonucleotide: CBLB-6753
guuaugccuuugaagaggug

SEQ ID NO: 37019 - RNA, 21 nt, Artificial Sequence
  Synthetic oligonucleotide: CBLB-6754
gguuaugccuuugaagaggug

SEQ ID NO: 37020 - RNA, 22 nt, Artificial Sequence
  Synthetic oligonucleotide: CBLB-6755
ggguuaugccuuugaagaggug

SEQ ID NO: 37021 - RNA, 23 nt, Artificial Sequence
  Synthetic oligonucleotide: CBLB-6756
aggguuaugccuuugaagaggug

SEQ ID NO: 37022 - RNA, 24 nt, Artificial Sequence
  Synthetic oligonucleotide: CBLB-6757
gaggguuaugccuuugaagaggug

SEQ ID NO: 37023 - RNA, 18 nt, Artificial Sequence
  Synthetic oligonucleotide: CBLB-6758
agcucuguaagauuugug

SEQ ID NO: 37024 - RNA, 19 nt, Artificial Sequence
  Synthetic oligonucleotide: CBLB-6759
cagcucuguaagauuugug

SEQ ID NO: 37025 - RNA, 20 nt, Artificial Sequence
  Synthetic oligonucleotide: CBLB-6760
ucagcucuguaagauuugug

SEQ ID NO: 37026 - RNA, 21 nt, Artificial Sequence
  Synthetic oligonucleotide: CBLB-6761
uucagcucuguaagauuugug

SEQ ID NO: 37027 - RNA, 22 nt, Artificial Sequence
  Synthetic oligonucleotide: CBLB-6762
uuucagcucuguaagauuugug

SEQ ID NO: 37028 - RNA, 23 nt, Artificial Sequence
  Synthetic oligonucleotide: CBLB-6763
uuuucagcucuguaagauuugug

SEQ ID NO: 37029 - RNA, 24 nt, Artificial Sequence
  Synthetic oligonucleotide: CBLB-6764
cuuuucagcucuguaagauuugug

SEQ ID NO: 37030 - RNA, 18 nt, Artificial Sequence
  Synthetic oligonucleotide: CBLB-6765
gagaggguuaugccuuug

SEQ ID NO: 37031 - RNA, 19 nt, Artificial Sequence
  Synthetic oligonucleotide: CBLB-6766
ggagaggguuaugccuuug

SEQ ID NO: 37032 - RNA, 20 nt, Artificial Sequence
  Synthetic oligonucleotide: CBLB-6767
gggagaggguuaugccuuug

SEQ ID NO: 37033 - RNA, 21 nt, Artificial Sequence
  Synthetic oligonucleotide: CBLB-6768
ugggagaggguuaugccuuug

SEQ ID NO: 37034 - RNA, 22 nt, Artificial Sequence
  Synthetic oligonucleotide: CBLB-6769
augggagaggguuaugccuuug

SEQ ID NO: 37035 - RNA, 23 nt, Artificial Sequence
  Synthetic oligonucleotide: CBLB-6770
caugggagaggguuaugccuuug

SEQ ID NO: 37036 - RNA, 24 nt, Artificial Sequence
  Synthetic oligonucleotide: CBLB-6771
ucaugggagaggguuaugccuuug

SEQ ID NO: 37037 - RNA, 18 nt, Artificial Sequence
  Synthetic oligonucleotide: CBLB-6772
aagugaguuuuguugaau

SEQ ID NO: 37038 - RNA, 19 nt, Artificial Sequence
  Synthetic oligonucleotide: CBLB-6773
aaagugaguuuuguugaau

SEQ ID NO: 37039 - RNA, 20 nt, Artificial Sequence
  Synthetic oligonucleotide: CBLB-6774
uaaagugaguuuuguugaau

SEQ ID NO: 37040 - RNA, 21 nt, Artificial Sequence
  Synthetic oligonucleotide: CBLB-6775
auaaagugaguuuuguugaau

SEQ ID NO: 37041 - RNA, 22 nt, Artificial Sequence
  Synthetic oligonucleotide: CBLB-6776
cauaaagugaguuuuguugaau

SEQ ID NO: 37042 - RNA, 23 nt, Artificial Sequence
  Synthetic oligonucleotide: CBLB-6777
gcauaaagugaguuuuguugaau

SEQ ID NO: 37043 - RNA, 24 nt, Artificial Sequence
  Synthetic oligonucleotide: CBLB-6778
agcauaaagugaguuuuguugaau

SEQ ID NO: 37044 - RNA, 18 nt, Artificial Sequence
  Synthetic oligonucleotide: CBLB-6779
augggccugaggcggcau

SEQ ID NO: 37045 - RNA, 19 nt, Artificial Sequence
  Synthetic oligonucleotide: CBLB-6780
caugggccugaggcggcau

SEQ ID NO: 37046 - RNA, 20 nt, Artificial Sequence
  Synthetic oligonucleotide: CBLB-3343
ccaugggccugaggcggcau

SEQ ID NO: 37047 - RNA, 21 nt, Artificial Sequence
  Synthetic oligonucleotide: CBLB-6781
cccaugggccugaggcggcau

SEQ ID NO: 37048 - RNA, 22 nt, Artificial Sequence
  Synthetic oligonucleotide: CBLB-6782
ccccaugggccugaggcggcau

SEQ ID NO: 37049 - RNA, 23 nt, Artificial Sequence
  Synthetic oligonucleotide: CBLB-6783
accccaugggccugaggcggcau

SEQ ID NO: 37050 - RNA, 24 nt, Artificial Sequence
  Synthetic oligonucleotide: CBLB-6784
aaccccaugggccugaggcggcau

SEQ ID NO: 37051 - RNA, 18 nt, Artificial Sequence
  Synthetic oligonucleotide: CBLB-6785
aguagacacauccaucau

SEQ ID NO: 37052 - RNA, 19 nt, Artificial Sequence
  Synthetic oligonucleotide: CBLB-6786
gaguagacacauccaucau

SEQ ID NO: 37053 - RNA, 20 nt, Artificial Sequence
  Synthetic oligonucleotide: CBLB-6787
ugaguagacacauccaucau

SEQ ID NO: 37054 - RNA, 21 nt, Artificial Sequence
  Synthetic oligonucleotide: CBLB-6788
cugaguagacacauccaucau

SEQ ID NO: 37055 - RNA, 22 nt, Artificial Sequence
  Synthetic oligonucleotide: CBLB-6789
acugaguagacacauccaucau

SEQ ID NO: 37056 - RNA, 23 nt, Artificial Sequence
  Synthetic oligonucleotide: CBLB-6790
gacugaguagacacauccaucau

SEQ ID NO: 37057 - RNA, 24 nt, Artificial Sequence
  Synthetic oligonucleotide: CBLB-6791
agacugaguagacacauccaucau

SEQ ID NO: 37058 - RNA, 18 nt, Artificial Sequence
  Synthetic oligonucleotide: CBLB-6792
aaaaauugcaaaacucau

SEQ ID NO: 37059 - RNA, 19 nt, Artificial Sequence
  Synthetic oligonucleotide: CBLB-6793
caaaaauugcaaaacucau

SEQ ID NO: 37060 - RNA, 20 nt, Artificial Sequence
  Synthetic oligonucleotide: CBLB-3344
gcaaaaauugcaaaacucau

SEQ ID NO: 37061 - RNA, 21 nt, Artificial Sequence
  Synthetic oligonucleotide: CBLB-6794
ugcaaaaauugcaaaacucau

SEQ ID NO: 37062 - RNA, 22 nt, Artificial Sequence
  Synthetic oligonucleotide: CBLB-6795
augcaaaaauugcaaaacucau

SEQ ID NO: 37063 - RNA, 23 nt, Artificial Sequence
  Synthetic oligonucleotide: CBLB-6796
gaugcaaaaauugcaaaacucau

SEQ ID NO: 37064 - RNA, 24 nt, Artificial Sequence
  Synthetic oligonucleotide: CBLB-6797
cgaugcaaaaauugcaaaacucau

SEQ ID NO: 37065 - RNA, 18 nt, Artificial Sequence
  Synthetic oligonucleotide: CBLB-6798
gguuaaguugcacucgau

SEQ ID NO: 37066 - RNA, 19 nt, Artificial Sequence
  Synthetic oligonucleotide: CBLB-6799
cgguuaaguugcacucgau

SEQ ID NO: 37067 - RNA, 20 nt, Artificial Sequence
  Synthetic oligonucleotide: CBLB-3345
ccgguuaaguugcacucgau

SEQ ID NO: 37068 - RNA, 21 nt, Artificial Sequence
  Synthetic oligonucleotide: CBLB-6800
uccgguuaaguugcacucgau

SEQ ID NO: 37069 - RNA, 22 nt, Artificial Sequence
  Synthetic oligonucleotide: CBLB-6801
uuccgguuaaguugcacucgau

SEQ ID NO: 37070 - RNA, 23 nt, Artificial Sequence
  Synthetic oligonucleotide: CBLB-6802
uuuccgguuaaguugcacucgau

SEQ ID NO: 37071 - RNA, 24 nt, Artificial Sequence
  Synthetic oligonucleotide: CBLB-6803
uuuuccgguuaaguugcacucgau

SEQ ID NO: 37072 - RNA, 18 nt, Artificial Sequence
  Synthetic oligonucleotide: CBLB-6804
aguuaucuuuauccugau

SEQ ID NO: 37073 - RNA, 19 nt, Artificial Sequence
  Synthetic oligonucleotide: CBLB-6805
caguuaucuuuauccugau

SEQ ID NO: 37074 - RNA, 20 nt, Artificial Sequence
  Synthetic oligonucleotide: CBLB-3349
ucaguuaucuuuauccugau

SEQ ID NO: 37075 - RNA, 21 nt, Artificial Sequence
  Synthetic oligonucleotide: CBLB-6806
uucaguuaucuuuauccugau

SEQ ID NO: 37076 - RNA, 22 nt, Artificial Sequence
  Synthetic oligonucleotide: CBLB-6807
auucaguuaucuuuauccugau

SEQ ID NO: 37077 - RNA, 23 nt, Artificial Sequence
  Synthetic oligonucleotide: CBLB-6808
aauucaguuaucuuuauccugau

SEQ ID NO: 37078 - RNA, 24 nt, Artificial Sequence
  Synthetic oligonucleotide: CBLB-6809
aaauucaguuaucuuuauccugau

SEQ ID NO: 37079 - RNA, 18 nt, Artificial Sequence
  Synthetic oligonucleotide: CBLB-6810
gggaaggauuguaaguau

SEQ ID NO: 37080 - RNA, 19 nt, Artificial Sequence
  Synthetic oligonucleotide: CBLB-6811
agggaaggauuguaaguau

SEQ ID NO: 37081 - RNA, 20 nt, Artificial Sequence
  Synthetic oligonucleotide: CBLB-6812
cagggaaggauuguaaguau

SEQ ID NO: 37082 - RNA, 21 nt, Artificial Sequence
  Synthetic oligonucleotide: CBLB-6813
gcagggaaggauuguaaguau

SEQ ID NO: 37083 - RNA, 22 nt, Artificial Sequence
  Synthetic oligonucleotide: CBLB-6814
agcagggaaggauuguaaguau

SEQ ID NO: 37084 - RNA, 23 nt, Artificial Sequence
  Synthetic oligonucleotide: CBLB-6815
cagcagggaaggauuguaaguau

SEQ ID NO: 37085 - RNA, 24 nt, Artificial Sequence
  Synthetic oligonucleotide: CBLB-6816
gcagcagggaaggauuguaaguau

SEQ ID NO: 37086 - RNA, 18 nt, Artificial Sequence
  Synthetic oligonucleotide: CBLB-6817
cugauuuaacuggauuau

SEQ ID NO: 37087 - RNA, 19 nt, Artificial Sequence
  Synthetic oligonucleotide: CBLB-6818
ccugauuuaacuggauuau

SEQ ID NO: 37088 - RNA, 20 nt, Artificial Sequence
  Synthetic oligonucleotide: CBLB-6819
uccugauuuaacuggauuau

SEQ ID NO: 37089 - RNA, 21 nt, Artificial Sequence
  Synthetic oligonucleotide: CBLB-6820
auccugauuuaacuggauuau

SEQ ID NO: 37090 - RNA, 22 nt, Artificial Sequence
  Synthetic oligonucleotide: CBLB-6821
aauccugauuuaacuggauuau

SEQ ID NO: 37091 - RNA, 23 nt, Artificial Sequence
  Synthetic oligonucleotide: CBLB-6822
uaauccugauuuaacuggauuau

SEQ ID NO: 37092 - RNA, 24 nt, Artificial Sequence
  Synthetic oligonucleotide: CBLB-6823
auaauccugauuuaacuggauuau

SEQ ID NO: 37093 - RNA, 18 nt, Artificial Sequence
  Synthetic oligonucleotide: CBLB-6824
cucugacccagugcuuau

SEQ ID NO: 37094 - RNA, 19 nt, Artificial Sequence
  Synthetic oligonucleotide: CBLB-6825
gcucugacccagugcuuau

SEQ ID NO: 37095 - RNA, 20 nt, Artificial Sequence
  Synthetic oligonucleotide: CBLB-6826
ggcucugacccagugcuuau

SEQ ID NO: 37096 - RNA, 21 nt, Artificial Sequence
  Synthetic oligonucleotide: CBLB-6827
gggcucugacccagugcuuau

SEQ ID NO: 37097 - RNA, 22 nt, Artificial Sequence
  Synthetic oligonucleotide: CBLB-6828
ugggcucugacccagugcuuau

SEQ ID NO: 37098 - RNA, 23 nt, Artificial Sequence
  Synthetic oligonucleotide: CBLB-6829
gugggcucugacccagugcuuau

SEQ ID NO: 37099 - RNA, 24 nt, Artificial Sequence
  Synthetic oligonucleotide: CBLB-6830
agugggcucugacccagugcuuau

SEQ ID NO: 37100 - RNA, 18 nt, Artificial Sequence
  Synthetic oligonucleotide: CBLB-6831
aagguagaucaauuuuau

SEQ ID NO: 37101 - RNA, 19 nt, Artificial Sequence
  Synthetic oligonucleotide: CBLB-6832
aaagguagaucaauuuuau

SEQ ID NO: 37102 - RNA, 20 nt, Artificial Sequence
  Synthetic oligonucleotide: CBLB-6833
caaagguagaucaauuuuau

SEQ ID NO: 37103 - RNA, 21 nt, Artificial Sequence
  Synthetic oligonucleotide: CBLB-6834
ccaaagguagaucaauuuuau

SEQ ID NO: 37104 - RNA, 22 nt, Artificial Sequence
  Synthetic oligonucleotide: CBLB-6835
accaaagguagaucaauuuuau

SEQ ID NO: 37105 - RNA, 23 nt, Artificial Sequence
  Synthetic oligonucleotide: CBLB-6836
caccaaagguagaucaauuuuau

SEQ ID NO: 37106 - RNA, 24 nt, Artificial Sequence
  Synthetic oligonucleotide: CBLB-6837
ucaccaaagguagaucaauuuuau

SEQ ID NO: 37107 - RNA, 18 nt, Artificial Sequence
  Synthetic oligonucleotide: CBLB-6838
ccugccaggccuccaacu

SEQ ID NO: 37108 - RNA, 19 nt, Artificial Sequence
  Synthetic oligonucleotide: CBLB-6839
accugccaggccuccaacu

SEQ ID NO: 37109 - RNA, 20 nt, Artificial Sequence
  Synthetic oligonucleotide: CBLB-3352
caccugccaggccuccaacu

SEQ ID NO: 37110 - RNA, 21 nt, Artificial Sequence
  Synthetic oligonucleotide: CBLB-6840
ccaccugccaggccuccaacu

SEQ ID NO: 37111 - RNA, 22 nt, Artificial Sequence
  Synthetic oligonucleotide: CBLB-6841
accaccugccaggccuccaacu

SEQ ID NO: 37112 - RNA, 23 nt, Artificial Sequence
  Synthetic oligonucleotide: CBLB-6842
uaccaccugccaggccuccaacu

SEQ ID NO: 37113 - RNA, 24 nt, Artificial Sequence
  Synthetic oligonucleotide: CBLB-6843
uuaccaccugccaggccuccaacu

SEQ ID NO: 37114 - RNA, 18 nt, Artificial Sequence
  Synthetic oligonucleotide: CBLB-6844
cuuuuccaauggucaccu

SEQ ID NO: 37115 - RNA, 19 nt, Artificial Sequence
  Synthetic oligonucleotide: CBLB-6845
ucuuuuccaauggucaccu

SEQ ID NO: 37116 - RNA, 20 nt, Artificial Sequence
  Synthetic oligonucleotide: CBLB-3358
gucuuuuccaauggucaccu

SEQ ID NO: 37117 - RNA, 21 nt, Artificial Sequence
  Synthetic oligonucleotide: CBLB-6846
ggucuuuuccaauggucaccu

SEQ ID NO: 37118 - RNA, 22 nt, Artificial Sequence
  Synthetic oligonucleotide: CBLB-6847
aggucuuuuccaauggucaccu

SEQ ID NO: 37119 - RNA, 23 nt, Artificial Sequence
  Synthetic oligonucleotide: CBLB-6848
caggucuuuuccaauggucaccu

SEQ ID NO: 37120 - RNA, 24 nt, Artificial Sequence
  Synthetic oligonucleotide: CBLB-6849
ucaggucuuuuccaauggucaccu

SEQ ID NO: 37121 - RNA, 18 nt, Artificial Sequence
  Synthetic oligonucleotide: CBLB-6850
aagaggugaagagagccu

SEQ ID NO: 37122 - RNA, 19 nt, Artificial Sequence
  Synthetic oligonucleotide: CBLB-6851
gaagaggugaagagagccu

SEQ ID NO: 37123 - RNA, 20 nt, Artificial Sequence
  Synthetic oligonucleotide: CBLB-6852
ugaagaggugaagagagccu

SEQ ID NO: 37124 - RNA, 21 nt, Artificial Sequence
  Synthetic oligonucleotide: CBLB-6853
uugaagaggugaagagagccu

SEQ ID NO: 37125 - RNA, 22 nt, Artificial Sequence
  Synthetic oligonucleotide: CBLB-6854
uuugaagaggugaagagagccu

SEQ ID NO: 37126 - RNA, 23 nt, Artificial Sequence
  Synthetic oligonucleotide: CBLB-6855
cuuugaagaggugaagagagccu

SEQ ID NO: 37127 - RNA, 24 nt, Artificial Sequence
  Synthetic oligonucleotide: CBLB-6856
ccuuugaagaggugaagagagccu

SEQ ID NO: 37128 - RNA, 18 nt, Artificial Sequence
  Synthetic oligonucleotide: CBLB-6857
uuuuuuauuuuuuagccu

SEQ ID NO: 37129 - RNA, 19 nt, Artificial Sequence
  Synthetic oligonucleotide: CBLB-6858
uuuuuuuauuuuuuagccu

SEQ ID NO: 37130 - RNA, 20 nt, Artificial Sequence
  Synthetic oligonucleotide: CBLB-3361
auuuuuuuauuuuuuagccu

SEQ ID NO: 37131 - RNA, 21 nt, Artificial Sequence
  Synthetic oligonucleotide: CBLB-6859
aauuuuuuuauuuuuuagccu

SEQ ID NO: 37132 - RNA, 22 nt, Artificial Sequence
  Synthetic oligonucleotide: CBLB-6860
uaauuuuuuuauuuuuuagccu

SEQ ID NO: 37133 - RNA, 23 nt, Artificial Sequence
  Synthetic oligonucleotide: CBLB-6861
uuaauuuuuuuauuuuuuagccu

SEQ ID NO: 37134 - RNA, 24 nt, Artificial Sequence
  Synthetic oligonucleotide: CBLB-6862
uuuaauuuuuuuauuuuuuagccu

SEQ ID NO: 37135 - RNA, 18 nt, Artificial Sequence
  Synthetic oligonucleotide: CBLB-6863
ugggagaggguuaugccu

SEQ ID NO: 37136 - RNA, 19 nt, Artificial Sequence
  Synthetic oligonucleotide: CBLB-6864
augggagaggguuaugccu

SEQ ID NO: 37137 - RNA, 20 nt, Artificial Sequence
  Synthetic oligonucleotide: CBLB-6865
caugggagaggguuaugccu

SEQ ID NO: 37138 - RNA, 21 nt, Artificial Sequence
  Synthetic oligonucleotide: CBLB-6866
ucaugggagaggguuaugccu

SEQ ID NO: 37139 - RNA, 22 nt, Artificial Sequence
  Synthetic oligonucleotide: CBLB-6867
cucaugggagaggguuaugccu

SEQ ID NO: 37140 - RNA, 23 nt, Artificial Sequence
  Synthetic oligonucleotide: CBLB-6868
acucaugggagaggguuaugccu

SEQ ID NO: 37141 - RNA, 24 nt, Artificial Sequence
  Synthetic oligonucleotide: CBLB-6869
aacucaugggagaggguuaugccu

SEQ ID NO: 37142 - RNA, 18 nt, Artificial Sequence
  Synthetic oligonucleotide: CBLB-6870
ccaguagccggccauccu

SEQ ID NO: 37143 - RNA, 19 nt, Artificial Sequence
  Synthetic oligonucleotide: CBLB-6871
uccaguagccggccauccu

SEQ ID NO: 37144 - RNA, 20 nt, Artificial Sequence
  Synthetic oligonucleotide: CBLB-6872
cuccaguagccggccauccu

SEQ ID NO: 37145 - RNA, 21 nt, Artificial Sequence
  Synthetic oligonucleotide: CBLB-6873
gcuccaguagccggccauccu

SEQ ID NO: 37146 - RNA, 22 nt, Artificial Sequence
  Synthetic oligonucleotide: CBLB-6874
ggcuccaguagccggccauccu

SEQ ID NO: 37147 - RNA, 23 nt, Artificial Sequence
  Synthetic oligonucleotide: CBLB-6875
uggcuccaguagccggccauccu

SEQ ID NO: 37148 - RNA, 24 nt, Artificial Sequence
  Synthetic oligonucleotide: CBLB-6876
cuggcuccaguagccggccauccu

SEQ ID NO: 37149 - RNA, 18 nt, Artificial Sequence
  Synthetic oligonucleotide: CBLB-6877
aguugcccggagcauccu

SEQ ID NO: 37150 - RNA, 19 nt, Artificial Sequence
  Synthetic oligonucleotide: CBLB-6878
aaguugcccggagcauccu

SEQ ID NO: 37151 - RNA, 20 nt, Artificial Sequence
  Synthetic oligonucleotide: CBLB-6879
gaaguugcccggagcauccu

SEQ ID NO: 37152 - RNA, 21 nt, Artificial Sequence
  Synthetic oligonucleotide: CBLB-6880
cgaaguugcccggagcauccu

SEQ ID NO: 37153 - RNA, 22 nt, Artificial Sequence
  Synthetic oligonucleotide: CBLB-6881
ucgaaguugcccggagcauccu

SEQ ID NO: 37154 - RNA, 23 nt, Artificial Sequence
  Synthetic oligonucleotide: CBLB-6882
gucgaaguugcccggagcauccu

SEQ ID NO: 37155 - RNA, 24 nt, Artificial Sequence
  Synthetic oligonucleotide: CBLB-6883
ugucgaaguugcccggagcauccu

SEQ ID NO: 37156 - RNA, 18 nt, Artificial Sequence
  Synthetic oligonucleotide: CBLB-6884
ugugggaugucgacuccu

SEQ ID NO: 37157 - RNA, 19 nt, Artificial Sequence
  Synthetic oligonucleotide: CBLB-6885
uugugggaugucgacuccu

SEQ ID NO: 37158 - RNA, 20 nt, Artificial Sequence
  Synthetic oligonucleotide: CBLB-3362
cuugugggaugucgacuccu

SEQ ID NO: 37159 - RNA, 21 nt, Artificial Sequence
  Synthetic oligonucleotide: CBLB-6886
gcuugugggaugucgacuccu

SEQ ID NO: 37160 - RNA, 22 nt, Artificial Sequence
  Synthetic oligonucleotide: CBLB-6887
agcuugugggaugucgacuccu

SEQ ID NO: 37161 - RNA, 23 nt, Artificial Sequence
  Synthetic oligonucleotide: CBLB-6888
cagcuugugggaugucgacuccu

SEQ ID NO: 37162 - RNA, 24 nt, Artificial Sequence
  Synthetic oligonucleotide: CBLB-6889
ucagcuugugggaugucgacuccu

SEQ ID NO: 37163 - RNA, 18 nt, Artificial Sequence
  Synthetic oligonucleotide: CBLB-6890
aaaaucauuuuuauagcu

SEQ ID NO: 37164 - RNA, 19 nt, Artificial Sequence
  Synthetic oligonucleotide: CBLB-6891
aaaaaucauuuuuauagcu

SEQ ID NO: 37165 - RNA, 20 nt, Artificial Sequence
  Synthetic oligonucleotide: CBLB-6892
uaaaaaucauuuuuauagcu

SEQ ID NO: 37166 - RNA, 21 nt, Artificial Sequence
  Synthetic oligonucleotide: CBLB-6893
guaaaaaucauuuuuauagcu

SEQ ID NO: 37167 - RNA, 22 nt, Artificial Sequence
  Synthetic oligonucleotide: CBLB-6894
aguaaaaaucauuuuuauagcu

SEQ ID NO: 37168 - RNA, 23 nt, Artificial Sequence
  Synthetic oligonucleotide: CBLB-6895
aaguaaaaaucauuuuuauagcu

SEQ ID NO: 37169 - RNA, 24 nt, Artificial Sequence
  Synthetic oligonucleotide: CBLB-6896
uaaguaaaaaucauuuuuauagcu

SEQ ID NO: 37170 - RNA, 18 nt, Artificial Sequence
  Synthetic oligonucleotide: CBLB-6897
gguuuuguguuauccucu

SEQ ID NO: 37171 - RNA, 19 nt, Artificial Sequence
  Synthetic oligonucleotide: CBLB-6898
agguuuuguguuauccucu

SEQ ID NO: 37172 - RNA, 20 nt, Artificial Sequence
  Synthetic oligonucleotide: CBLB-3365
aagguuuuguguuauccucu

SEQ ID NO: 37173 - RNA, 21 nt, Artificial Sequence
  Synthetic oligonucleotide: CBLB-6899
uaagguuuuguguuauccucu

SEQ ID NO: 37174 - RNA, 22 nt, Artificial Sequence
  Synthetic oligonucleotide: CBLB-6900
uuaagguuuuguguuauccucu

SEQ ID NO: 37175 - RNA, 23 nt, Artificial Sequence
  Synthetic oligonucleotide: CBLB-6901
auuaagguuuuguguuauccucu

SEQ ID NO: 37176 - RNA, 24 nt, Artificial Sequence
  Synthetic oligonucleotide: CBLB-6902
cauuaagguuuuguguuauccucu

SEQ ID NO: 37177 - RNA, 18 nt, Artificial Sequence
  Synthetic oligonucleotide: CBLB-6903
cagggaaggauuguaagu

SEQ ID NO: 37178 - RNA, 19 nt, Artificial Sequence
  Synthetic oligonucleotide: CBLB-6904
gcagggaaggauuguaagu

SEQ ID NO: 37179 - RNA, 20 nt, Artificial Sequence
  Synthetic oligonucleotide: CBLB-6905
agcagggaaggauuguaagu

SEQ ID NO: 37180 - RNA, 21 nt, Artificial Sequence
  Synthetic oligonucleotide: CBLB-6906
cagcagggaaggauuguaagu

SEQ ID NO: 37181 - RNA, 22 nt, Artificial Sequence
  Synthetic oligonucleotide: CBLB-6907
gcagcagggaaggauuguaagu

SEQ ID NO: 37182 - RNA, 23 nt, Artificial Sequence
  Synthetic oligonucleotide: CBLB-6908
ggcagcagggaaggauuguaagu

SEQ ID NO: 37183 - RNA, 24 nt, Artificial Sequence
  Synthetic oligonucleotide: CBLB-6909
uggcagcagggaaggauuguaagu

SEQ ID NO: 37184 - RNA, 18 nt, Artificial Sequence
  Synthetic oligonucleotide: CBLB-6910
cuccuguucgguaagagu

SEQ ID NO: 37185 - RNA, 19 nt, Artificial Sequence
  Synthetic oligonucleotide: CBLB-6911
ccuccuguucgguaagagu

SEQ ID NO: 37186 - RNA, 20 nt, Artificial Sequence
  Synthetic oligonucleotide: CBLB-6912
accuccuguucgguaagagu

SEQ ID NO: 37187 - RNA, 21 nt, Artificial Sequence
  Synthetic oligonucleotide: CBLB-6913
aaccuccuguucgguaagagu

SEQ ID NO: 37188 - RNA, 22 nt, Artificial Sequence
  Synthetic oligonucleotide: CBLB-6914
aaaccuccuguucgguaagagu

SEQ ID NO: 37189 - RNA, 23 nt, Artificial Sequence
  Synthetic oligonucleotide: CBLB-6915
aaaaccuccuguucgguaagagu

SEQ ID NO: 37190 - RNA, 24 nt, Artificial Sequence
  Synthetic oligonucleotide: CBLB-6916
uaaaaccuccuguucgguaagagu

SEQ ID NO: 37191 - RNA, 18 nt, Artificial Sequence
  Synthetic oligonucleotide: CBLB-6917
gaaucgguuggcaaacgu

SEQ ID NO: 37192 - RNA, 19 nt, Artificial Sequence
  Synthetic oligonucleotide: CBLB-6918
ugaaucgguuggcaaacgu

SEQ ID NO: 37193 - RNA, 20 nt, Artificial Sequence
  Synthetic oligonucleotide: CBLB-6919
augaaucgguuggcaaacgu

SEQ ID NO: 37194 - RNA, 21 nt, Artificial Sequence
  Synthetic oligonucleotide: CBLB-6920
gaugaaucgguuggcaaacgu

SEQ ID NO: 37195 - RNA, 22 nt, Artificial Sequence
  Synthetic oligonucleotide: CBLB-6921
ugaugaaucgguuggcaaacgu

SEQ ID NO: 37196 - RNA, 23 nt, Artificial Sequence
  Synthetic oligonucleotide: CBLB-6922
augaugaaucgguuggcaaacgu

SEQ ID NO: 37197 - RNA, 24 nt, Artificial Sequence
  Synthetic oligonucleotide: CBLB-6923
gaugaugaaucgguuggcaaacgu

SEQ ID NO: 37198 - RNA, 18 nt, Artificial Sequence
  Synthetic oligonucleotide: CBLB-6924
gacgacgaugaugaucgu

SEQ ID NO: 37199 - RNA, 19 nt, Artificial Sequence
  Synthetic oligonucleotide: CBLB-6925
ggacgacgaugaugaucgu

SEQ ID NO: 37200 - RNA, 20 nt, Artificial Sequence
  Synthetic oligonucleotide: CBLB-6926
uggacgacgaugaugaucgu

SEQ ID NO: 37201 - RNA, 21 nt, Artificial Sequence
  Synthetic oligonucleotide: CBLB-6927
uuggacgacgaugaugaucgu

SEQ ID NO: 37202 - RNA, 22 nt, Artificial Sequence
  Synthetic oligonucleotide: CBLB-6928
cuuggacgacgaugaugaucgu

SEQ ID NO: 37203 - RNA, 23 nt, Artificial Sequence
  Synthetic oligonucleotide: CBLB-6929
acuuggacgacgaugaugaucgu

SEQ ID NO: 37204 - RNA, 24 nt, Artificial Sequence
  Synthetic oligonucleotide: CBLB-6930
gacuuggacgacgaugaugaucgu

SEQ ID NO: 37205 - RNA, 18 nt, Artificial Sequence
  Synthetic oligonucleotide: CBLB-6931
uuuagaaggagcuaaggu

SEQ ID NO: 37206 - RNA, 19 nt, Artificial Sequence
  Synthetic oligonucleotide: CBLB-6932
cuuuagaaggagcuaaggu

SEQ ID NO: 37207 - RNA, 20 nt, Artificial Sequence
  Synthetic oligonucleotide: CBLB-6933
ccuuuagaaggagcuaaggu

SEQ ID NO: 37208 - RNA, 21 nt, Artificial Sequence
  Synthetic oligonucleotide: CBLB-6934
gccuuuagaaggagcuaaggu

SEQ ID NO: 37209 - RNA, 22 nt, Artificial Sequence
  Synthetic oligonucleotide: CBLB-6935
ugccuuuagaaggagcuaaggu

SEQ ID NO: 37210 - RNA, 23 nt, Artificial Sequence
  Synthetic oligonucleotide: CBLB-6936
uugccuuuagaaggagcuaaggu

SEQ ID NO: 37211 - RNA, 24 nt, Artificial Sequence
  Synthetic oligonucleotide: CBLB-6937
uuugccuuuagaaggagcuaaggu

SEQ ID NO: 37212 - RNA, 18 nt, Artificial Sequence
  Synthetic oligonucleotide: CBLB-6938
uuucuucuuccuucaggu

SEQ ID NO: 37213 - RNA, 19 nt, Artificial Sequence
  Synthetic oligonucleotide: CBLB-6939
uuuucuucuuccuucaggu

SEQ ID NO: 37214 - RNA, 20 nt, Artificial Sequence
  Synthetic oligonucleotide: CBLB-3379
uuuuucuucuuccuucaggu

SEQ ID NO: 37215 - RNA, 21 nt, Artificial Sequence
  Synthetic oligonucleotide: CBLB-6940
cuuuuucuucuuccuucaggu

SEQ ID NO: 37216 - RNA, 22 nt, Artificial Sequence
  Synthetic oligonucleotide: CBLB-6941
ucuuuuucuucuuccuucaggu

SEQ ID NO: 37217 - RNA, 23 nt, Artificial Sequence
  Synthetic oligonucleotide: CBLB-6942
aucuuuuucuucuuccuucaggu

SEQ ID NO: 37218 - RNA, 24 nt, Artificial Sequence
  Synthetic oligonucleotide: CBLB-6943
gaucuuuuucuucuuccuucaggu

SEQ ID NO: 37219 - RNA, 18 nt, Artificial Sequence
  Synthetic oligonucleotide: CBLB-6944
gucuucuccuugcauggu

SEQ ID NO: 37220 - RNA, 19 nt, Artificial Sequence
  Synthetic oligonucleotide: CBLB-6945
agucuucuccuugcauggu

SEQ ID NO: 37221 - RNA, 20 nt, Artificial Sequence
  Synthetic oligonucleotide: CBLB-6946
uagucuucuccuugcauggu

SEQ ID NO: 37222 - RNA, 21 nt, Artificial Sequence
  Synthetic oligonucleotide: CBLB-6947
uuagucuucuccuugcauggu

SEQ ID NO: 37223 - RNA, 22 nt, Artificial Sequence
  Synthetic oligonucleotide: CBLB-6948
uuuagucuucuccuugcauggu

SEQ ID NO: 37224 - RNA, 23 nt, Artificial Sequence
  Synthetic oligonucleotide: CBLB-6949
cuuuagucuucuccuugcauggu

SEQ ID NO: 37225 - RNA, 24 nt, Artificial Sequence
  Synthetic oligonucleotide: CBLB-6950
ucuuuagucuucuccuugcauggu

SEQ ID NO: 37226 - RNA, 18 nt, Artificial Sequence
  Synthetic oligonucleotide: CBLB-6951
guuuaggagucggauggu

SEQ ID NO: 37227 - RNA, 19 nt, Artificial Sequence
  Synthetic oligonucleotide: CBLB-6952
uguuuaggagucggauggu

SEQ ID NO: 37228 - RNA, 20 nt, Artificial Sequence
  Synthetic oligonucleotide: CBLB-6953
uuguuuaggagucggauggu

SEQ ID NO: 37229 - RNA, 21 nt, Artificial Sequence
  Synthetic oligonucleotide: CBLB-6954
uuuguuuaggagucggauggu

SEQ ID NO: 37230 - RNA, 22 nt, Artificial Sequence
  Synthetic oligonucleotide: CBLB-6955
auuuguuuaggagucggauggu

SEQ ID NO: 37231 - RNA, 23 nt, Artificial Sequence
  Synthetic oligonucleotide: CBLB-6956
uauuuguuuaggagucggauggu

SEQ ID NO: 37232 - RNA, 24 nt, Artificial Sequence
  Synthetic oligonucleotide: CBLB-6957
cuauuuguuuaggagucggauggu

SEQ ID NO: 37233 - RNA, 18 nt, Artificial Sequence
  Synthetic oligonucleotide: CBLB-6958
ggugcccucgggaugugu

SEQ ID NO: 37234 - RNA, 19 nt, Artificial Sequence
  Synthetic oligonucleotide: CBLB-6959
uggugcccucgggaugugu

SEQ ID NO: 37235 - RNA, 20 nt, Artificial Sequence
  Synthetic oligonucleotide: CBLB-6960
auggugcccucgggaugugu

SEQ ID NO: 37236 - RNA, 21 nt, Artificial Sequence
  Synthetic oligonucleotide: CBLB-6961
cauggugcccucgggaugugu

SEQ ID NO: 37237 - RNA, 22 nt, Artificial Sequence
  Synthetic oligonucleotide: CBLB-6962
gcauggugcccucgggaugugu

SEQ ID NO: 37238 - RNA, 23 nt, Artificial Sequence
  Synthetic oligonucleotide: CBLB-6963
agcauggugcccucgggaugugu

SEQ ID NO: 37239 - RNA, 24 nt, Artificial Sequence
  Synthetic oligonucleotide: CBLB-6964
aagcauggugcccucgggaugugu

SEQ ID NO: 37240 - RNA, 18 nt, Artificial Sequence
  Synthetic oligonucleotide: CBLB-6965
agcagaugcugcugaauu

SEQ ID NO: 37241 - RNA, 19 nt, Artificial Sequence
  Synthetic oligonucleotide: CBLB-6966
aagcagaugcugcugaauu

SEQ ID NO: 37242 - RNA, 20 nt, Artificial Sequence
  Synthetic oligonucleotide: CBLB-6967
aaagcagaugcugcugaauu

SEQ ID NO: 37243 - RNA, 21 nt, Artificial Sequence
  Synthetic oligonucleotide: CBLB-6968
aaaagcagaugcugcugaauu

SEQ ID NO: 37244 - RNA, 22 nt, Artificial Sequence
  Synthetic oligonucleotide: CBLB-6969
caaaagcagaugcugcugaauu

SEQ ID NO: 37245 - RNA, 23 nt, Artificial Sequence
  Synthetic oligonucleotide: CBLB-6970
acaaaagcagaugcugcugaauu

SEQ ID NO: 37246 - RNA, 24 nt, Artificial Sequence
  Synthetic oligonucleotide: CBLB-6971
cacaaaagcagaugcugcugaauu

SEQ ID NO: 37247 - RNA, 18 nt, Artificial Sequence
  Synthetic oligonucleotide: CBLB-6972
agugaguuuuguugaauu

SEQ ID NO: 37248 - RNA, 19 nt, Artificial Sequence
  Synthetic oligonucleotide: CBLB-6973
aagugaguuuuguugaauu

SEQ ID NO: 37249 - RNA, 20 nt, Artificial Sequence
  Synthetic oligonucleotide: CBLB-3392
aaagugaguuuuguugaauu

SEQ ID NO: 37250 - RNA, 21 nt, Artificial Sequence
  Synthetic oligonucleotide: CBLB-6974
uaaagugaguuuuguugaauu

SEQ ID NO: 37251 - RNA, 22 nt, Artificial Sequence
  Synthetic oligonucleotide: CBLB-6975
auaaagugaguuuuguugaauu

SEQ ID NO: 37252 - RNA, 23 nt, Artificial Sequence
  Synthetic oligonucleotide: CBLB-6976
cauaaagugaguuuuguugaauu

SEQ ID NO: 37253 - RNA, 24 nt, Artificial Sequence
  Synthetic oligonucleotide: CBLB-6977
gcauaaagugaguuuuguugaauu

SEQ ID NO: 37254 - RNA, 18 nt, Artificial Sequence
  Synthetic oligonucleotide: CBLB-6978
ccucgccuggaucuaauu

SEQ ID NO: 37255 - RNA, 19 nt, Artificial Sequence
  Synthetic oligonucleotide: CBLB-6979
uccucgccuggaucuaauu

SEQ ID NO: 37256 - RNA, 20 nt, Artificial Sequence
  Synthetic oligonucleotide: CBLB-6980
cuccucgccuggaucuaauu

SEQ ID NO: 37257 - RNA, 21 nt, Artificial Sequence
  Synthetic oligonucleotide: CBLB-6981
ccuccucgccuggaucuaauu

SEQ ID NO: 37258 - RNA, 22 nt, Artificial Sequence
  Synthetic oligonucleotide: CBLB-6982
gccuccucgccuggaucuaauu

SEQ ID NO: 37259 - RNA, 23 nt, Artificial Sequence
  Synthetic oligonucleotide: CBLB-6983
ugccuccucgccuggaucuaauu

SEQ ID NO: 37260 - RNA, 24 nt, Artificial Sequence
  Synthetic oligonucleotide: CBLB-6984
gugccuccucgccuggaucuaauu

SEQ ID NO: 37261 - RNA, 18 nt, Artificial Sequence
  Synthetic oligonucleotide: CBLB-6985
aacaauaugaauuauauu

SEQ ID NO: 37262 - RNA, 19 nt, Artificial Sequence
  Synthetic oligonucleotide: CBLB-6986
gaacaauaugaauuauauu

SEQ ID NO: 37263 - RNA, 20 nt, Artificial Sequence
  Synthetic oligonucleotide: CBLB-6987
ggaacaauaugaauuauauu

SEQ ID NO: 37264 - RNA, 21 nt, Artificial Sequence
  Synthetic oligonucleotide: CBLB-6988
aggaacaauaugaauuauauu

SEQ ID NO: 37265 - RNA, 22 nt, Artificial Sequence
  Synthetic oligonucleotide: CBLB-6989
caggaacaauaugaauuauauu

SEQ ID NO: 37266 - RNA, 23 nt, Artificial Sequence
  Synthetic oligonucleotide: CBLB-6990
ccaggaacaauaugaauuauauu

SEQ ID NO: 37267 - RNA, 24 nt, Artificial Sequence
  Synthetic oligonucleotide: CBLB-6991
uccaggaacaauaugaauuauauu

SEQ ID NO: 37268 - RNA, 18 nt, Artificial Sequence
  Synthetic oligonucleotide: CBLB-6992
agcaccaccuccucccuu

SEQ ID NO: 37269 - RNA, 19 nt, Artificial Sequence
  Synthetic oligonucleotide: CBLB-6993
cagcaccaccuccucccuu

SEQ ID NO: 37270 - RNA, 20 nt, Artificial Sequence
  Synthetic oligonucleotide: CBLB-6994
ccagcaccaccuccucccuu

SEQ ID NO: 37271 - RNA, 21 nt, Artificial Sequence
  Synthetic oligonucleotide: CBLB-6995
cccagcaccaccuccucccuu

SEQ ID NO: 37272 - RNA, 22 nt, Artificial Sequence
  Synthetic oligonucleotide: CBLB-6996
ucccagcaccaccuccucccuu

SEQ ID NO: 37273 - RNA, 23 nt, Artificial Sequence
  Synthetic oligonucleotide: CBLB-6997
cucccagcaccaccuccucccuu

SEQ ID NO: 37274 - RNA, 24 nt, Artificial Sequence
  Synthetic oligonucleotide: CBLB-6998
acucccagcaccaccuccucccuu

SEQ ID NO: 37275 - RNA, 18 nt, Artificial Sequence
  Synthetic oligonucleotide: CBLB-6999
augucaagauugagccuu

SEQ ID NO: 37276 - RNA, 19 nt, Artificial Sequence
  Synthetic oligonucleotide: CBLB-7000
gaugucaagauugagccuu

SEQ ID NO: 37277 - RNA, 20 nt, Artificial Sequence
  Synthetic oligonucleotide: CBLB-7001
agaugucaagauugagccuu

SEQ ID NO: 37278 - RNA, 21 nt, Artificial Sequence
  Synthetic oligonucleotide: CBLB-7002
aagaugucaagauugagccuu

SEQ ID NO: 37279 - RNA, 22 nt, Artificial Sequence
  Synthetic oligonucleotide: CBLB-7003
aaagaugucaagauugagccuu

SEQ ID NO: 37280 - RNA, 23 nt, Artificial Sequence
  Synthetic oligonucleotide: CBLB-7004
caaagaugucaagauugagccuu

SEQ ID NO: 37281 - RNA, 24 nt, Artificial Sequence
  Synthetic oligonucleotide: CBLB-7005
acaaagaugucaagauugagccuu

SEQ ID NO: 37282 - RNA, 18 nt, Artificial Sequence
  Synthetic oligonucleotide: CBLB-7006
gacgccaugauuugccuu

SEQ ID NO: 37283 - RNA, 19 nt, Artificial Sequence
  Synthetic oligonucleotide: CBLB-7007
agacgccaugauuugccuu

SEQ ID NO: 37284 - RNA, 20 nt, Artificial Sequence
  Synthetic oligonucleotide: CBLB-7008
cagacgccaugauuugccuu

SEQ ID NO: 37285 - RNA, 21 nt, Artificial Sequence
  Synthetic oligonucleotide: CBLB-7009
acagacgccaugauuugccuu

SEQ ID NO: 37286 - RNA, 22 nt, Artificial Sequence
  Synthetic oligonucleotide: CBLB-7010
cacagacgccaugauuugccuu

SEQ ID NO: 37287 - RNA, 23 nt, Artificial Sequence
  Synthetic oligonucleotide: CBLB-7011
acacagacgccaugauuugccuu

SEQ ID NO: 37288 - RNA, 24 nt, Artificial Sequence
  Synthetic oligonucleotide: CBLB-7012
aacacagacgccaugauuugccuu

SEQ ID NO: 37289 - RNA, 18 nt, Artificial Sequence
  Synthetic oligonucleotide: CBLB-7013
uuugggacuaaucagcuu

SEQ ID NO: 37290 - RNA, 19 nt, Artificial Sequence
  Synthetic oligonucleotide: CBLB-7014
guuugggacuaaucagcuu

SEQ ID NO: 37291 - RNA, 20 nt, Artificial Sequence
  Synthetic oligonucleotide: CBLB-7015
uguuugggacuaaucagcuu

SEQ ID NO: 37292 - RNA, 21 nt, Artificial Sequence
  Synthetic oligonucleotide: CBLB-7016
guguuugggacuaaucagcuu

SEQ ID NO: 37293 - RNA, 22 nt, Artificial Sequence
  Synthetic oligonucleotide: CBLB-7017
uguguuugggacuaaucagcuu

SEQ ID NO: 37294 - RNA, 23 nt, Artificial Sequence
  Synthetic oligonucleotide: CBLB-7018
auguguuugggacuaaucagcuu

SEQ ID NO: 37295 - RNA, 24 nt, Artificial Sequence
  Synthetic oligonucleotide: CBLB-7019
gauguguuugggacuaaucagcuu

SEQ ID NO: 37296 - RNA, 18 nt, Artificial Sequence
  Synthetic oligonucleotide: CBLB-7020
gaacacaugguccaucuu

SEQ ID NO: 37297 - RNA, 19 nt, Artificial Sequence
  Synthetic oligonucleotide: CBLB-7021
ggaacacaugguccaucuu

SEQ ID NO: 37298 - RNA, 20 nt, Artificial Sequence
  Synthetic oligonucleotide: CBLB-7022
uggaacacaugguccaucuu

SEQ ID NO: 37299 - RNA, 21 nt, Artificial Sequence
  Synthetic oligonucleotide: CBLB-7023
auggaacacaugguccaucuu

SEQ ID NO: 37300 - RNA, 22 nt, Artificial Sequence
  Synthetic oligonucleotide: CBLB-7024
aauggaacacaugguccaucuu

SEQ ID NO: 37301 - RNA, 23 nt, Artificial Sequence
  Synthetic oligonucleotide: CBLB-7025
gaauggaacacaugguccaucuu

SEQ ID NO: 37302 - RNA, 24 nt, Artificial Sequence
  Synthetic oligonucleotide: CBLB-7026
ugaauggaacacaugguccaucuu

SEQ ID NO: 37303 - RNA, 18 nt, Artificial Sequence
  Synthetic oligonucleotide: CBLB-7027
gaaaccuuuaaaaaaguu

SEQ ID NO: 37304 - RNA, 19 nt, Artificial Sequence
  Synthetic oligonucleotide: CBLB-7028
ugaaaccuuuaaaaaaguu

SEQ ID NO: 37305 - RNA, 20 nt, Artificial Sequence
  Synthetic oligonucleotide: CBLB-7029
uugaaaccuuuaaaaaaguu

SEQ ID NO: 37306 - RNA, 21 nt, Artificial Sequence
  Synthetic oligonucleotide: CBLB-7030
guugaaaccuuuaaaaaaguu

SEQ ID NO: 37307 - RNA, 22 nt, Artificial Sequence
  Synthetic oligonucleotide: CBLB-7031
gguugaaaccuuuaaaaaaguu

SEQ ID NO: 37308 - RNA, 23 nt, Artificial Sequence
  Synthetic oligonucleotide: CBLB-7032
agguugaaaccuuuaaaaaaguu

SEQ ID NO: 37309 - RNA, 24 nt, Artificial Sequence
  Synthetic oligonucleotide: CBLB-7033
uagguugaaaccuuuaaaaaaguu

SEQ ID NO: 37310 - RNA, 18 nt, Artificial Sequence
  Synthetic oligonucleotide: CBLB-7034
gcugcccuuucugucguu

SEQ ID NO: 37311 - RNA, 19 nt, Artificial Sequence
  Synthetic oligonucleotide: CBLB-7035
ggcugcccuuucugucguu

SEQ ID NO: 37312 - RNA, 20 nt, Artificial Sequence
  Synthetic oligonucleotide: CBLB-7036
gggcugcccuuucugucguu

SEQ ID NO: 37313 - RNA, 21 nt, Artificial Sequence
  Synthetic oligonucleotide: CBLB-7037
agggcugcccuuucugucguu

SEQ ID NO: 37314 - RNA, 22 nt, Artificial Sequence
  Synthetic oligonucleotide: CBLB-7038
cagggcugcccuuucugucguu

SEQ ID NO: 37315 - RNA, 23 nt, Artificial Sequence
  Synthetic oligonucleotide: CBLB-7039
ucagggcugcccuuucugucguu

SEQ ID NO: 37316 - RNA, 24 nt, Artificial Sequence
  Synthetic oligonucleotide: CBLB-7040
gucagggcugcccuuucugucguu

SEQ ID NO: 37317 - RNA, 18 nt, Artificial Sequence
  Synthetic oligonucleotide: CBLB-7041
gugcccucgggauguguu

SEQ ID NO: 37318 - RNA, 19 nt, Artificial Sequence
  Synthetic oligonucleotide: CBLB-7042
ggugcccucgggauguguu

SEQ ID NO: 37319 - RNA, 20 nt, Artificial Sequence
  Synthetic oligonucleotide: CBLB-3403
uggugcccucgggauguguu

SEQ ID NO: 37320 - RNA, 21 nt, Artificial Sequence
  Synthetic oligonucleotide: CBLB-7043
auggugcccucgggauguguu

SEQ ID NO: 37321 - RNA, 22 nt, Artificial Sequence
  Synthetic oligonucleotide: CBLB-7044
cauggugcccucgggauguguu

SEQ ID NO: 37322 - RNA, 23 nt, Artificial Sequence
  Synthetic oligonucleotide: CBLB-7045
gcauggugcccucgggauguguu

SEQ ID NO: 37323 - RNA, 24 nt, Artificial Sequence
  Synthetic oligonucleotide: CBLB-7046
agcauggugcccucgggauguguu

SEQ ID NO: 37324 - RNA, 18 nt, Artificial Sequence
  Synthetic oligonucleotide: CBLB-7047
augcauuuucuauuuguu

SEQ ID NO: 37325 - RNA, 19 nt, Artificial Sequence
  Synthetic oligonucleotide: CBLB-7048
caugcauuuucuauuuguu

SEQ ID NO: 37326 - RNA, 20 nt, Artificial Sequence
  Synthetic oligonucleotide: CBLB-7049
ccaugcauuuucuauuuguu

SEQ ID NO: 37327 - RNA, 21 nt, Artificial Sequence
  Synthetic oligonucleotide: CBLB-7050
uccaugcauuuucuauuuguu

SEQ ID NO: 37328 - RNA, 22 nt, Artificial Sequence
  Synthetic oligonucleotide: CBLB-7051
auccaugcauuuucuauuuguu

SEQ ID NO: 37329 - RNA, 23 nt, Artificial Sequence
  Synthetic oligonucleotide: CBLB-7052
aauccaugcauuuucuauuuguu

SEQ ID NO: 37330 - RNA, 24 nt, Artificial Sequence
  Synthetic oligonucleotide: CBLB-7053
caauccaugcauuuucuauuuguu

SEQ ID NO: 37331 - RNA, 18 nt, Artificial Sequence
  Synthetic oligonucleotide: CBLB-7054
cguuagcaaauucucuuu

SEQ ID NO: 37332 - RNA, 19 nt, Artificial Sequence
  Synthetic oligonucleotide: CBLB-7055
ccguuagcaaauucucuuu

SEQ ID NO: 37333 - RNA, 20 nt, Artificial Sequence
  Synthetic oligonucleotide: CBLB-7056
uccguuagcaaauucucuuu

SEQ ID NO: 37334 - RNA, 21 nt, Artificial Sequence
  Synthetic oligonucleotide: CBLB-7057
guccguuagcaaauucucuuu

SEQ ID NO: 37335 - RNA, 22 nt, Artificial Sequence
  Synthetic oligonucleotide: CBLB-7058
gguccguuagcaaauucucuuu

SEQ ID NO: 37336 - RNA, 23 nt, Artificial Sequence
  Synthetic oligonucleotide: CBLB-7059
ugguccguuagcaaauucucuuu

SEQ ID NO: 37337 - RNA, 24 nt, Artificial Sequence
  Synthetic oligonucleotide: CBLB-7060
cugguccguuagcaaauucucuuu

SEQ ID NO: 37338 - RNA, 18 nt, Artificial Sequence
  Synthetic oligonucleotide: CBLB-7061
gccuuggggcucuauuuu

SEQ ID NO: 37339 - RNA, 19 nt, Artificial Sequence
  Synthetic oligonucleotide: CBLB-7062
agccuuggggcucuauuuu

SEQ ID NO: 37340 - RNA, 20 nt, Artificial Sequence
  Synthetic oligonucleotide: CBLB-7063
uagccuuggggcucuauuuu

SEQ ID NO: 37341 - RNA, 21 nt, Artificial Sequence
  Synthetic oligonucleotide: CBLB-7064
uuagccuuggggcucuauuuu

SEQ ID NO: 37342 - RNA, 22 nt, Artificial Sequence
  Synthetic oligonucleotide: CBLB-7065
uuuagccuuggggcucuauuuu

SEQ ID NO: 37343 - RNA, 23 nt, Artificial Sequence
  Synthetic oligonucleotide: CBLB-7066
uuuuagccuuggggcucuauuuu

SEQ ID NO: 37344 - RNA, 24 nt, Artificial Sequence
  Synthetic oligonucleotide: CBLB-7067
uuuuuagccuuggggcucuauuuu

SEQ ID NO: 37345 - RNA, 18 nt, Artificial Sequence
  Synthetic oligonucleotide: CBLB-7068
aauucuggagaaaguuuu

SEQ ID NO: 37346 - RNA, 19 nt, Artificial Sequence
  Synthetic oligonucleotide: CBLB-7069
gaauucuggagaaaguuuu

SEQ ID NO: 37347 - RNA, 20 nt, Artificial Sequence
  Synthetic oligonucleotide: CBLB-7070
ugaauucuggagaaaguuuu

SEQ ID NO: 37348 - RNA, 21 nt, Artificial Sequence
  Synthetic oligonucleotide: CBLB-7071
cugaauucuggagaaaguuuu

SEQ ID NO: 37349 - RNA, 22 nt, Artificial Sequence
  Synthetic oligonucleotide: CBLB-7072
gcugaauucuggagaaaguuuu

SEQ ID NO: 37350 - RNA, 23 nt, Artificial Sequence
  Synthetic oligonucleotide: CBLB-7073
ugcugaauucuggagaaaguuuu

SEQ ID NO: 37351 - RNA, 24 nt, Artificial Sequence
  Synthetic oligonucleotide: CBLB-7074
cugcugaauucuggagaaaguuuu

SEQ ID NO: 37352 - RNA, 18 nt, Artificial Sequence
  Synthetic oligonucleotide: CBLB-7075
auucuggagaaaguuuuu

SEQ ID NO: 37353 - RNA, 19 nt, Artificial Sequence
  Synthetic oligonucleotide: CBLB-7076
aauucuggagaaaguuuuu

SEQ ID NO: 37354 - RNA, 20 nt, Artificial Sequence
  Synthetic oligonucleotide: CBLB-3411
gaauucuggagaaaguuuuu

SEQ ID NO: 37355 - RNA, 21 nt, Artificial Sequence
  Synthetic oligonucleotide: CBLB-7077
ugaauucuggagaaaguuuuu

SEQ ID NO: 37356 - RNA, 22 nt, Artificial Sequence
  Synthetic oligonucleotide: CBLB-7078
cugaauucuggagaaaguuuuu

SEQ ID NO: 37357 - RNA, 23 nt, Artificial Sequence
  Synthetic oligonucleotide: CBLB-7079
gcugaauucuggagaaaguuuuu

SEQ ID NO: 37358 - RNA, 24 nt, Artificial Sequence
  Synthetic oligonucleotide: CBLB-7080
ugcugaauucuggagaaaguuuuu

SEQ ID NO: 37359 - RNA, 17 nt, Artificial Sequence
  Synthetic oligonucleotide: CBLB-7081
uccugcgaucugcggca

SEQ ID NO: 37360 - RNA, 17 nt, Artificial Sequence
  Synthetic oligonucleotide: CBLB-7082
aacuuaccacuuugucc

SEQ ID NO: 37361 - RNA, 17 nt, Artificial Sequence
  Synthetic oligonucleotide: CBLB-7083
acgguccugcgaucugc

SEQ ID NO: 37362 - RNA, 17 nt, Artificial Sequence
  Synthetic oligonucleotide: CBLB-2578
ccaaaauucgaccuuuu

SEQ ID NO: 37363 - RNA, 20 nt, Artificial Sequence
  Synthetic oligonucleotide: CBLB-7084
ggaauuuuaguucuuuaaaa

SEQ ID NO: 37364 - RNA, 20 nt, Artificial Sequence
  Synthetic oligonucleotide: CBLB-7085
cuuuuucauaaggcuaucaa

SEQ ID NO: 37365 - RNA, 20 nt, Artificial Sequence
  Synthetic oligonucleotide: CBLB-7086
cgguccugcgaucugcggca

SEQ ID NO: 37366 - RNA, 20 nt, Artificial Sequence
  Synthetic oligonucleotide: CBLB-3546
cagaacuuaccacuuugucc

SEQ ID NO: 37367 - RNA, 20 nt, Artificial Sequence
  Synthetic oligonucleotide: CBLB-7087
uccacgguccugcgaucugc

SEQ ID NO: 37368 - RNA, 20 nt, Artificial Sequence
  Synthetic oligonucleotide: CBLB-3581
ggcuauuuuucaacugaagu

SEQ ID NO: 37369 - RNA, 20 nt, Artificial Sequence
  Synthetic oligonucleotide: CBLB-2538
uacccaaaauucgaccuuuu

SEQ ID NO: 37370 - RNA, 17 nt, Artificial Sequence
  Synthetic oligonucleotide: CBLB-7088
auuuuaguucuuuaaaa

SEQ ID NO: 37371 - RNA, 17 nt, Artificial Sequence
  Synthetic oligonucleotide: CBLB-7089
uuucauaaggcuaucaa

SEQ ID NO: 37372 - RNA, 17 nt, Artificial Sequence
  Synthetic oligonucleotide: CBLB-7090
uauuuuucaacugaagu

SEQ ID NO: 37373 - RNA, 17 nt, Artificial Sequence
  Synthetic oligonucleotide: CBLB-7091
aauugaccauugggaaa

SEQ ID NO: 37374 - RNA, 17 nt, Artificial Sequence
  Synthetic oligonucleotide: CBLB-7092
cacauaauccaguuaaa

SEQ ID NO: 37375 - RNA, 17 nt, Artificial Sequence
  Synthetic oligonucleotide: CBLB-7093
uccuguugagugaagaa

SEQ ID NO: 37376 - RNA, 17 nt, Artificial Sequence
  Synthetic oligonucleotide: CBLB-7094
gaugggaggaguuauaa

SEQ ID NO: 37377 - RNA, 17 nt, Artificial Sequence
  Synthetic oligonucleotide: CBLB-7095
aaaaauaaaaaaauuaa

SEQ ID NO: 37378 - RNA, 17 nt, Artificial Sequence
  Synthetic oligonucleotide: CBLB-7096
ggagucgacaucccaca

SEQ ID NO: 37379 - RNA, 17 nt, Artificial Sequence
  Synthetic oligonucleotide: CBLB-7097
aacacaucccgagggca

SEQ ID NO: 37380 - RNA, 17 nt, Artificial Sequence
  Synthetic oligonucleotide: CBLB-7098
ucuuuaaaugcagguga

SEQ ID NO: 37381 - RNA, 17 nt, Artificial Sequence
  Synthetic oligonucleotide: CBLB-7099
ggauguguuugggacua

SEQ ID NO: 37382 - RNA, 17 nt, Artificial Sequence
  Synthetic oligonucleotide: CBLB-7100
guuauaauccugauuua

SEQ ID NO: 37383 - RNA, 17 nt, Artificial Sequence
  Synthetic oligonucleotide: CBLB-7101
auggcucuaaaaucaac

SEQ ID NO: 37384 - RNA, 17 nt, Artificial Sequence
  Synthetic oligonucleotide: CBLB-7102
uagagugggcucugacc

SEQ ID NO: 37385 - RNA, 17 nt, Artificial Sequence
  Synthetic oligonucleotide: CBLB-7103
ucacucaacaggacgcc

SEQ ID NO: 37386 - RNA, 17 nt, Artificial Sequence
  Synthetic oligonucleotide: CBLB-7104
ccuuucggacguuugcc

SEQ ID NO: 37387 - RNA, 17 nt, Artificial Sequence
  Synthetic oligonucleotide: CBLB-7105
gugccuucaugaggucc

SEQ ID NO: 37388 - RNA, 17 nt, Artificial Sequence
  Synthetic oligonucleotide: CBLB-7106
cuccagaauucagcagc

SEQ ID NO: 37389 - RNA, 17 nt, Artificial Sequence
  Synthetic oligonucleotide: CBLB-7107
auuguugauuuuagagc

SEQ ID NO: 37390 - RNA, 17 nt, Artificial Sequence
  Synthetic oligonucleotide: CBLB-7108
ucuggagugggucaggc

SEQ ID NO: 37391 - RNA, 17 nt, Artificial Sequence
  Synthetic oligonucleotide: CBLB-7109
ugagugaagaaccaugc

SEQ ID NO: 37392 - RNA, 17 nt, Artificial Sequence
  Synthetic oligonucleotide: CBLB-7110
ucuacaguucuggcugc

SEQ ID NO: 37393 - RNA, 17 nt, Artificial Sequence
  Synthetic oligonucleotide: CBLB-7111
uuuuccgguuaaguugc

SEQ ID NO: 37394 - RNA, 17 nt, Artificial Sequence
  Synthetic oligonucleotide: CBLB-7112
aaagacauccauguugc

SEQ ID NO: 37395 - RNA, 17 nt, Artificial Sequence
  Synthetic oligonucleotide: CBLB-7113
agaauaugauguuccuc

SEQ ID NO: 37396 - RNA, 17 nt, Artificial Sequence
  Synthetic oligonucleotide: CBLB-7114
caagcccuuauuucaag

SEQ ID NO: 37397 - RNA, 17 nt, Artificial Sequence
  Synthetic oligonucleotide: CBLB-7115
uggcgggucucuggaag

SEQ ID NO: 37398 - RNA, 17 nt, Artificial Sequence
  Synthetic oligonucleotide: CBLB-7116
gugcuauauuucuguag

SEQ ID NO: 37399 - RNA, 17 nt, Artificial Sequence
  Synthetic oligonucleotide: CBLB-7117
augcggaaacacagacg

SEQ ID NO: 37400 - RNA, 17 nt, Artificial Sequence
  Synthetic oligonucleotide: CBLB-7118
auugacauuugaacucg

SEQ ID NO: 37401 - RNA, 17 nt, Artificial Sequence
  Synthetic oligonucleotide: CBLB-7119
ugauugauggcagcagg

SEQ ID NO: 37402 - RNA, 17 nt, Artificial Sequence
  Synthetic oligonucleotide: CBLB-7120
cuggaauugaccauugg

SEQ ID NO: 37403 - RNA, 17 nt, Artificial Sequence
  Synthetic oligonucleotide: CBLB-7121
uaaacaaauagaaaaug

SEQ ID NO: 37404 - RNA, 17 nt, Artificial Sequence
  Synthetic oligonucleotide: CBLB-7122
agagaaugacaaagaug

SEQ ID NO: 37405 - RNA, 17 nt, Artificial Sequence
  Synthetic oligonucleotide: CBLB-7123
aacaucacaggacuaug

SEQ ID NO: 37406 - RNA, 17 nt, Artificial Sequence
  Synthetic oligonucleotide: CBLB-7124
uguucgguaagaguaug

SEQ ID NO: 37407 - RNA, 17 nt, Artificial Sequence
  Synthetic oligonucleotide: CBLB-7125
ugccugugaaccaucug

SEQ ID NO: 37408 - RNA, 17 nt, Artificial Sequence
  Synthetic oligonucleotide: CBLB-7126
acucagucuauugucug

SEQ ID NO: 37409 - RNA, 17 nt, Artificial Sequence
  Synthetic oligonucleotide: CBLB-7127
gcgaggaggcacgggug

SEQ ID NO: 37410 - RNA, 17 nt, Artificial Sequence
  Synthetic oligonucleotide: CBLB-7128
accauugggaaagauug

SEQ ID NO: 37411 - RNA, 17 nt, Artificial Sequence
  Synthetic oligonucleotide: CBLB-7129
acaauugauuuaacuug

SEQ ID NO: 37412 - RNA, 17 nt, Artificial Sequence
  Synthetic oligonucleotide: CBLB-7130
caaucagggcuugaaau

SEQ ID NO: 37413 - RNA, 17 nt, Artificial Sequence
  Synthetic oligonucleotide: CBLB-7131
auacguacccuuuaaau

SEQ ID NO: 37414 - RNA, 17 nt, Artificial Sequence
  Synthetic oligonucleotide: CBLB-7132
uugcaaguuaaaucaau

SEQ ID NO: 37415 - RNA, 17 nt, Artificial Sequence
  Synthetic oligonucleotide: CBLB-7133
ucccugcugccaucaau

SEQ ID NO: 37416 - RNA, 17 nt, Artificial Sequence
  Synthetic oligonucleotide: CBLB-7134
ggaagaugaugaugaau

SEQ ID NO: 37417 - RNA, 17 nt, Artificial Sequence
  Synthetic oligonucleotide: CBLB-7135
augcuuaagucagggau

SEQ ID NO: 37418 - RNA, 17 nt, Artificial Sequence
  Synthetic oligonucleotide: CBLB-7136
guuucagguaaguuuau

SEQ ID NO: 37419 - RNA, 17 nt, Artificial Sequence
  Synthetic oligonucleotide: CBLB-7137
cuccacuuuucagcucu

SEQ ID NO: 37420 - RNA, 17 nt, Artificial Sequence
  Synthetic oligonucleotide: CBLB-7138
ucuuggaucaaaggggu

SEQ ID NO: 37421 - RNA, 17 nt, Artificial Sequence
  Synthetic oligonucleotide: CBLB-7139
uauccucuaggagaugu

SEQ ID NO: 37422 - RNA, 17 nt, Artificial Sequence
  Synthetic oligonucleotide: CBLB-7140
agauaagggacaguuuu

SEQ ID NO: 37423 - RNA, 20 nt, Artificial Sequence
  Synthetic oligonucleotide: CBLB-7141
uggaauugaccauugggaaa

SEQ ID NO: 37424 - RNA, 20 nt, Artificial Sequence
  Synthetic oligonucleotide: CBLB-7142
guucacauaauccaguuaaa

SEQ ID NO: 37425 - RNA, 20 nt, Artificial Sequence
  Synthetic oligonucleotide: CBLB-7143
gcguccuguugagugaagaa

SEQ ID NO: 37426 - RNA, 20 nt, Artificial Sequence
  Synthetic oligonucleotide: CBLB-7144
ccugaugggaggaguuauaa

SEQ ID NO: 37427 - RNA, 20 nt, Artificial Sequence
  Synthetic oligonucleotide: CBLB-4582
cuaaaaaauaaaaaaauuaa

SEQ ID NO: 37428 - RNA, 20 nt, Artificial Sequence
  Synthetic oligonucleotide: CBLB-7145
cuaggagucgacaucccaca

SEQ ID NO: 37429 - RNA, 20 nt, Artificial Sequence
  Synthetic oligonucleotide: CBLB-7146
ccaaacacaucccgagggca

SEQ ID NO: 37430 - RNA, 20 nt, Artificial Sequence
  Synthetic oligonucleotide: CBLB-7147
cuuucuuuaaaugcagguga

SEQ ID NO: 37431 - RNA, 20 nt, Artificial Sequence
  Synthetic oligonucleotide: CBLB-7148
ucgggauguguuugggacua

SEQ ID NO: 37432 - RNA, 20 nt, Artificial Sequence
  Synthetic oligonucleotide: CBLB-7149
ggaguuauaauccugauuua

SEQ ID NO: 37433 - RNA, 20 nt, Artificial Sequence
  Synthetic oligonucleotide: CBLB-7150
gcaauggcucuaaaaucaac

SEQ ID NO: 37434 - RNA, 20 nt, Artificial Sequence
  Synthetic oligonucleotide: CBLB-7151
caguagagugggcucugacc

SEQ ID NO: 37435 - RNA, 20 nt, Artificial Sequence
  Synthetic oligonucleotide: CBLB-7152
ucuucacucaacaggacgcc

SEQ ID NO: 37436 - RNA, 20 nt, Artificial Sequence
  Synthetic oligonucleotide: CBLB-7153
uuaccuuucggacguuugcc

SEQ ID NO: 37437 - RNA, 20 nt, Artificial Sequence
  Synthetic oligonucleotide: CBLB-7154
acagugccuucaugaggucc

SEQ ID NO: 37438 - RNA, 20 nt, Artificial Sequence
  Synthetic oligonucleotide: CBLB-7155
uuucuccagaauucagcagc

SEQ ID NO: 37439 - RNA, 20 nt, Artificial Sequence
  Synthetic oligonucleotide: CBLB-7156
ucaauuguugauuuuagagc

SEQ ID NO: 37440 - RNA, 20 nt, Artificial Sequence
  Synthetic oligonucleotide: CBLB-7157
ggaucuggagugggucaggc

SEQ ID NO: 37441 - RNA, 20 nt, Artificial Sequence
  Synthetic oligonucleotide: CBLB-7158
uguugagugaagaaccaugc

SEQ ID NO: 37442 - RNA, 20 nt, Artificial Sequence
  Synthetic oligonucleotide: CBLB-7159
gugucuacaguucuggcugc

SEQ ID NO: 37443 - RNA, 20 nt, Artificial Sequence
  Synthetic oligonucleotide: CBLB-7160
auauuuuccgguuaaguugc

SEQ ID NO: 37444 - RNA, 20 nt, Artificial Sequence
  Synthetic oligonucleotide: CBLB-7161
ugaagaauaugauguuccuc

SEQ ID NO: 37445 - RNA, 20 nt, Artificial Sequence
  Synthetic oligonucleotide: CBLB-7162
uaacaagcccuuauuucaag

SEQ ID NO: 37446 - RNA, 20 nt, Artificial Sequence
  Synthetic oligonucleotide: CBLB-7163
cauuggcgggucucuggaag

SEQ ID NO: 37447 - RNA, 20 nt, Artificial Sequence
  Synthetic oligonucleotide: CBLB-7164
uuggugcuauauuucuguag

SEQ ID NO: 37448 - RNA, 20 nt, Artificial Sequence
  Synthetic oligonucleotide: CBLB-7165
cuuaugcggaaacacagacg

SEQ ID NO: 37449 - RNA, 20 nt, Artificial Sequence
  Synthetic oligonucleotide: CBLB-7166
uccauugacauuugaacucg

SEQ ID NO: 37450 - RNA, 20 nt, Artificial Sequence
  Synthetic oligonucleotide: CBLB-7167
cccugauugauggcagcagg

SEQ ID NO: 37451 - RNA, 20 nt, Artificial Sequence
  Synthetic oligonucleotide: CBLB-7168
ucccuggaauugaccauugg

SEQ ID NO: 37452 - RNA, 20 nt, Artificial Sequence
  Synthetic oligonucleotide: CBLB-7169
uccuaaacaaauagaaaaug

SEQ ID NO: 37453 - RNA, 20 nt, Artificial Sequence
  Synthetic oligonucleotide: CBLB-7170
ugcagagaaugacaaagaug

SEQ ID NO: 37454 - RNA, 20 nt, Artificial Sequence
  Synthetic oligonucleotide: CBLB-7171
cagaacaucacaggacuaug

SEQ ID NO: 37455 - RNA, 20 nt, Artificial Sequence
  Synthetic oligonucleotide: CBLB-7172
uccuguucgguaagaguaug

SEQ ID NO: 37456 - RNA, 20 nt, Artificial Sequence
  Synthetic oligonucleotide: CBLB-7173
uggugccugugaaccaucug

SEQ ID NO: 37457 - RNA, 20 nt, Artificial Sequence
  Synthetic oligonucleotide: CBLB-5611
ucuacucagucuauugucug

SEQ ID NO: 37458 - RNA, 20 nt, Artificial Sequence
  Synthetic oligonucleotide: CBLB-7174
caggcgaggaggcacgggug

SEQ ID NO: 37459 - RNA, 20 nt, Artificial Sequence
  Synthetic oligonucleotide: CBLB-7175
uugaccauugggaaagauug

SEQ ID NO: 37460 - RNA, 20 nt, Artificial Sequence
  Synthetic oligonucleotide: CBLB-7176
ucaacaauugauuuaacuug

SEQ ID NO: 37461 - RNA, 20 nt, Artificial Sequence
  Synthetic oligonucleotide: CBLB-5679
caucaaucagggcuugaaau

SEQ ID NO: 37462 - RNA, 20 nt, Artificial Sequence
  Synthetic oligonucleotide: CBLB-7177
ucuauacguacccuuuaaau

SEQ ID NO: 37463 - RNA, 20 nt, Artificial Sequence
  Synthetic oligonucleotide: CBLB-7178
ucauugcaaguuaaaucaau

SEQ ID NO: 37464 - RNA, 20 nt, Artificial Sequence
  Synthetic oligonucleotide: CBLB-5686
ccuucccugcugccaucaau

SEQ ID NO: 37465 - RNA, 20 nt, Artificial Sequence
  Synthetic oligonucleotide: CBLB-7179
agaggaagaugaugaugaau

SEQ ID NO: 37466 - RNA, 20 nt, Artificial Sequence
  Synthetic oligonucleotide: CBLB-7180
uauaugcuuaagucagggau

SEQ ID NO: 37467 - RNA, 20 nt, Artificial Sequence
  Synthetic oligonucleotide: CBLB-7181
gcuguuucagguaaguuuau

SEQ ID NO: 37468 - RNA, 20 nt, Artificial Sequence
  Synthetic oligonucleotide: CBLB-7182
gggcuccacuuuucagcucu

SEQ ID NO: 37469 - RNA, 20 nt, Artificial Sequence
  Synthetic oligonucleotide: CBLB-7183
aucucuuggaucaaaggggu

SEQ ID NO: 37470 - RNA, 20 nt, Artificial Sequence
  Synthetic oligonucleotide: CBLB-7184
uguuauccucuaggagaugu

SEQ ID NO: 37471 - RNA, 20 nt, Artificial Sequence
  Synthetic oligonucleotide: CBLB-5975
ugaagauaagggacaguuuu

SEQ ID NO: 37472 - RNA, 17 nt, Artificial Sequence
  Synthetic oligonucleotide: CBLB-7185
cucgcagcacgucagaa

SEQ ID NO: 37473 - RNA, 17 nt, Artificial Sequence
  Synthetic oligonucleotide: CBLB-7186
auuggcucagcggcgcc

SEQ ID NO: 37474 - RNA, 17 nt, Artificial Sequence
  Synthetic oligonucleotide: CBLB-7187
cguucccgggagagucc

SEQ ID NO: 37475 - RNA, 17 nt, Artificial Sequence
  Synthetic oligonucleotide: CBLB-7188
gcgcacugcccgacagc

SEQ ID NO: 37476 - RNA, 17 nt, Artificial Sequence
  Synthetic oligonucleotide: CBLB-7189
ucugacgugcugcgagc

SEQ ID NO: 37477 - RNA, 17 nt, Artificial Sequence
  Synthetic oligonucleotide: CBLB-7190
caaauaguugacaacgc

SEQ ID NO: 37478 - RNA, 17 nt, Artificial Sequence
  Synthetic oligonucleotide: CBLB-7191
cugggcggguccaacgc

SEQ ID NO: 37479 - RNA, 17 nt, Artificial Sequence
  Synthetic oligonucleotide: CBLB-7192
guguugcuucuccgcuc

SEQ ID NO: 37480 - RNA, 17 nt, Artificial Sequence
  Synthetic oligonucleotide: CBLB-7193
ucucccgggaacgaaag

SEQ ID NO: 37481 - RNA, 17 nt, Artificial Sequence
  Synthetic oligonucleotide: CBLB-7194
cgcgcacugcccgacag

SEQ ID NO: 37482 - RNA, 17 nt, Artificial Sequence
  Synthetic oligonucleotide: CBLB-7195
gcgcggcauuggcucag

SEQ ID NO: 37483 - RNA, 17 nt, Artificial Sequence
  Synthetic oligonucleotide: CBLB-7196
uucugacgugcugcgag

SEQ ID NO: 37484 - RNA, 17 nt, Artificial Sequence
  Synthetic oligonucleotide: CBLB-7197
cgcugucgggcagugcg

SEQ ID NO: 37485 - RNA, 17 nt, Artificial Sequence
  Synthetic oligonucleotide: CBLB-7198
ggcagugcgcgguugcg

SEQ ID NO: 37486 - RNA, 17 nt, Artificial Sequence
  Synthetic oligonucleotide: CBLB-7199
gggcgccucccguccau

SEQ ID NO: 37487 - RNA, 17 nt, Artificial Sequence
  Synthetic oligonucleotide: CBLB-7200
gcgcgguugcgcggcau

SEQ ID NO: 37488 - RNA, 17 nt, Artificial Sequence
  Synthetic oligonucleotide: CBLB-7201
cgagcgggccuuccucu

SEQ ID NO: 37489 - RNA, 17 nt, Artificial Sequence
  Synthetic oligonucleotide: CBLB-7202
aacgucauagaccuguu

SEQ ID NO: 37490 - RNA, 20 nt, Artificial Sequence
  Synthetic oligonucleotide: CBLB-7203
cccgggaacgaaaguggaaa

SEQ ID NO: 37491 - RNA, 20 nt, Artificial Sequence
  Synthetic oligonucleotide: CBLB-7204
acguccuccacaguacacaa

SEQ ID NO: 37492 - RNA, 20 nt, Artificial Sequence
  Synthetic oligonucleotide: CBLB-7205
ccgcucgcagcacgucagaa

SEQ ID NO: 37493 - RNA, 20 nt, Artificial Sequence
  Synthetic oligonucleotide: CBLB-7206
acgaaggagcuaaccaauaa

SEQ ID NO: 37494 - RNA, 20 nt, Artificial Sequence
  Synthetic oligonucleotide: CBLB-7207
cgaagggaugcaaggcacga

SEQ ID NO: 37495 - RNA, 20 nt, Artificial Sequence
  Synthetic oligonucleotide: CBLB-7208
cacgaaggagcuaaccaaua

SEQ ID NO: 37496 - RNA, 20 nt, Artificial Sequence
  Synthetic oligonucleotide: CBLB-7209
ccgggaacgaaaguggaaac

SEQ ID NO: 37497 - RNA, 20 nt, Artificial Sequence
  Synthetic oligonucleotide: CBLB-7210
gugggcgugagcgucgggac

SEQ ID NO: 37498 - RNA, 20 nt, Artificial Sequence
  Synthetic oligonucleotide: CBLB-7211
ugggcgugagcgucgggacc

SEQ ID NO: 37499 - RNA, 20 nt, Artificial Sequence
  Synthetic oligonucleotide: CBLB-7212
ccguuuccacuuucguuccc

SEQ ID NO: 37500 - RNA, 20 nt, Artificial Sequence
  Synthetic oligonucleotide: CBLB-7213
augaggggccuggacucucc

SEQ ID NO: 37501 - RNA, 20 nt, Artificial Sequence
  Synthetic oligonucleotide: CBLB-7214
uuucguucccgggagagucc

SEQ ID NO: 37502 - RNA, 20 nt, Artificial Sequence
  Synthetic oligonucleotide: CBLB-7215
acuaggaagguaagcgaagc

SEQ ID NO: 37503 - RNA, 20 nt, Artificial Sequence
  Synthetic oligonucleotide: CBLB-7216
accgcgcacugcccgacagc

SEQ ID NO: 37504 - RNA, 20 nt, Artificial Sequence
  Synthetic oligonucleotide: CBLB-7217
cuuucugacgugcugcgagc

SEQ ID NO: 37505 - RNA, 20 nt, Artificial Sequence
  Synthetic oligonucleotide: CBLB-7218
aagcaaauaguugacaacgc

SEQ ID NO: 37506 - RNA, 20 nt, Artificial Sequence
  Synthetic oligonucleotide: CBLB-7219
gcucugggcggguccaacgc

SEQ ID NO: 37507 - RNA, 20 nt, Artificial Sequence
  Synthetic oligonucleotide: CBLB-7220
gggauugcagaccaaacauc

SEQ ID NO: 37508 - RNA, 20 nt, Artificial Sequence
  Synthetic oligonucleotide: CBLB-7221
cucuuaaaaaggccgacauc

SEQ ID NO: 37509 - RNA, 20 nt, Artificial Sequence
  Synthetic oligonucleotide: CBLB-7222
uaucagcaauucccauuauc

SEQ ID NO: 37510 - RNA, 20 nt, Artificial Sequence
  Synthetic oligonucleotide: CBLB-7223
gacucucccgggaacgaaag

SEQ ID NO: 37511 - RNA, 20 nt, Artificial Sequence
  Synthetic oligonucleotide: CBLB-7224
aaccgcgcacugcccgacag

SEQ ID NO: 37512 - RNA, 20 nt, Artificial Sequence
  Synthetic oligonucleotide: CBLB-7225
ccuuucugacgugcugcgag

SEQ ID NO: 37513 - RNA, 20 nt, Artificial Sequence
  Synthetic oligonucleotide: CBLB-7226
auuguguacuguggaggacg

SEQ ID NO: 37514 - RNA, 20 nt, Artificial Sequence
  Synthetic oligonucleotide: CBLB-7227
acccgcugucgggcagugcg

SEQ ID NO: 37515 - RNA, 20 nt, Artificial Sequence
  Synthetic oligonucleotide: CBLB-7228
ucgggcagugcgcgguugcg

SEQ ID NO: 37516 - RNA, 20 nt, Artificial Sequence
  Synthetic oligonucleotide: CBLB-7229
gacggggcggcagcgcgagg

SEQ ID NO: 37517 - RNA, 20 nt, Artificial Sequence
  Synthetic oligonucleotide: CBLB-7230
aggagcuaaccaauaagggg

SEQ ID NO: 37518 - RNA, 20 nt, Artificial Sequence
  Synthetic oligonucleotide: CBLB-7231
uguugcuucuccgcucuggg

SEQ ID NO: 37519 - RNA, 20 nt, Artificial Sequence
  Synthetic oligonucleotide: CBLB-7232
ggggccauuguguacugugg

SEQ ID NO: 37520 - RNA, 20 nt, Artificial Sequence
  Synthetic oligonucleotide: CBLB-7233
auuggacucggagagaaaug

SEQ ID NO: 37521 - RNA, 20 nt, Artificial Sequence
  Synthetic oligonucleotide: CBLB-7234
ucuggggccauuguguacug

SEQ ID NO: 37522 - RNA, 20 nt, Artificial Sequence
  Synthetic oligonucleotide: CBLB-7235
ugcgagcgggccuuccucug

SEQ ID NO: 37523 - RNA, 20 nt, Artificial Sequence
  Synthetic oligonucleotide: CBLB-7236
gcagcacgucagaaaggaau

SEQ ID NO: 37524 - RNA, 20 nt, Artificial Sequence
  Synthetic oligonucleotide: CBLB-7237
gacgggcgccucccguccau

SEQ ID NO: 37525 - RNA, 20 nt, Artificial Sequence
  Synthetic oligonucleotide: CBLB-7238
agugcgcgguugcgcggcau

SEQ ID NO: 37526 - RNA, 20 nt, Artificial Sequence
  Synthetic oligonucleotide: CBLB-7239
uagaaggguuuggcagcccu

SEQ ID NO: 37527 - RNA, 20 nt, Artificial Sequence
  Synthetic oligonucleotide: CBLB-7240
accgggagccaaagccaucu

SEQ ID NO: 37528 - RNA, 20 nt, Artificial Sequence
  Synthetic oligonucleotide: CBLB-7241
cugcgagcgggccuuccucu

SEQ ID NO: 37529 - RNA, 20 nt, Artificial Sequence
  Synthetic oligonucleotide: CBLB-7242
accaauaagggguggcaggu

SEQ ID NO: 37530 - RNA, 20 nt, Artificial Sequence
  Synthetic oligonucleotide: CBLB-7243
agcaacgucauagaccuguu

SEQ ID NO: 37531 - RNA, 17 nt, Artificial Sequence
  Synthetic oligonucleotide: CBLB-7244
acuugcacuaaguaaaa

SEQ ID NO: 37532 - RNA, 17 nt, Artificial Sequence
  Synthetic oligonucleotide: CBLB-7245
ucuuugugcucuuaaaa

SEQ ID NO: 37533 - RNA, 17 nt, Artificial Sequence
  Synthetic oligonucleotide: CBLB-7246
ggaaacgggaaaggaaa

SEQ ID NO: 37534 - RNA, 17 nt, Artificial Sequence
  Synthetic oligonucleotide: CBLB-7247
gggaacgaaaguggaaa

SEQ ID NO: 37535 - RNA, 17 nt, Artificial Sequence
  Synthetic oligonucleotide: CBLB-7248
guaagguuguuuuuaaa

SEQ ID NO: 37536 - RNA, 17 nt, Artificial Sequence
  Synthetic oligonucleotide: CBLB-7249
uccuccacaguacacaa

SEQ ID NO: 37537 - RNA, 17 nt, Artificial Sequence
  Synthetic oligonucleotide: CBLB-7250
acagcgggugcagccaa

SEQ ID NO: 37538 - RNA, 17 nt, Artificial Sequence
  Synthetic oligonucleotide: CBLB-7251
uuuaagagcacaaagaa

SEQ ID NO: 37539 - RNA, 17 nt, Artificial Sequence
  Synthetic oligonucleotide: CBLB-7252
acaaugcugguagagaa

SEQ ID NO: 37540 - RNA, 17 nt, Artificial Sequence
  Synthetic oligonucleotide: CBLB-7253
ugcuguccuggguagaa

SEQ ID NO: 37541 - RNA, 17 nt, Artificial Sequence
  Synthetic oligonucleotide: CBLB-7254
gaaaggaaauggacgaa

SEQ ID NO: 37542 - RNA, 17 nt, Artificial Sequence
  Synthetic oligonucleotide: CBLB-7255
gaaaguggaaacgggaa

SEQ ID NO: 37543 - RNA, 17 nt, Artificial Sequence
  Synthetic oligonucleotide: CBLB-7256
cagaguaguggcuggaa

SEQ ID NO: 37544 - RNA, 17 nt, Artificial Sequence
  Synthetic oligonucleotide: CBLB-7257
agccaucuggggcugaa

SEQ ID NO: 37545 - RNA, 17 nt, Artificial Sequence
  Synthetic oligonucleotide: CBLB-7258
aaggagcuaaccaauaa

SEQ ID NO: 37546 - RNA, 17 nt, Artificial Sequence
  Synthetic oligonucleotide: CBLB-7259
auaaaaguaccagauaa

SEQ ID NO: 37547 - RNA, 17 nt, Artificial Sequence
  Synthetic oligonucleotide: CBLB-7260
gauagaaaucuauguaa

SEQ ID NO: 37548 - RNA, 17 nt, Artificial Sequence
  Synthetic oligonucleotide: CBLB-7261
auggacgaagggaugca

SEQ ID NO: 37549 - RNA, 17 nt, Artificial Sequence
  Synthetic oligonucleotide: CBLB-7262
cuaaguaaaaaggugca

SEQ ID NO: 37550 - RNA, 17 nt, Artificial Sequence
  Synthetic oligonucleotide: CBLB-7263
uuuuaagagcacaaaga

SEQ ID NO: 37551 - RNA, 17 nt, Artificial Sequence
  Synthetic oligonucleotide: CBLB-7264
cgccuuucagccccaga

SEQ ID NO: 37552 - RNA, 17 nt, Artificial Sequence
  Synthetic oligonucleotide: CBLB-7265
cugcuguccuggguaga

SEQ ID NO: 37553 - RNA, 17 nt, Artificial Sequence
  Synthetic oligonucleotide: CBLB-7266
uugcuguuaguuuuaga

SEQ ID NO: 37554 - RNA, 17 nt, Artificial Sequence
  Synthetic oligonucleotide: CBLB-7267
agggaugcaaggcacga

SEQ ID NO: 37555 - RNA, 17 nt, Artificial Sequence
  Synthetic oligonucleotide: CBLB-7268
ggaaaggaaauggacga

SEQ ID NO: 37556 - RNA, 17 nt, Artificial Sequence
  Synthetic oligonucleotide: CBLB-7269
acaauggccccagagga

SEQ ID NO: 37557 - RNA, 17 nt, Artificial Sequence
  Synthetic oligonucleotide: CBLB-7270
cggcagcgcgaggagga

SEQ ID NO: 37558 - RNA, 17 nt, Artificial Sequence
  Synthetic oligonucleotide: CBLB-7271
gaaacaaaagacuagga

SEQ ID NO: 37559 - RNA, 17 nt, Artificial Sequence
  Synthetic oligonucleotide: CBLB-7272
cgggugcagccaaugga

SEQ ID NO: 37560 - RNA, 17 nt, Artificial Sequence
  Synthetic oligonucleotide: CBLB-7273
acagaguaguggcugga

SEQ ID NO: 37561 - RNA, 17 nt, Artificial Sequence
  Synthetic oligonucleotide: CBLB-7274
acuguggaggacgugga

SEQ ID NO: 37562 - RNA, 17 nt, Artificial Sequence
  Synthetic oligonucleotide: CBLB-7275
gacucggagagaaauga

SEQ ID NO: 37563 - RNA, 17 nt, Artificial Sequence
  Synthetic oligonucleotide: CBLB-7276
gaaggagcuaaccaaua

SEQ ID NO: 37564 - RNA, 17 nt, Artificial Sequence
  Synthetic oligonucleotide: CBLB-7277
aggguuuggcagcccua

SEQ ID NO: 37565 - RNA, 17 nt, Artificial Sequence
  Synthetic oligonucleotide: CBLB-7278
agaaauucaucucccua

SEQ ID NO: 37566 - RNA, 17 nt, Artificial Sequence
  Synthetic oligonucleotide: CBLB-7279
gaauggcagcuacagua

SEQ ID NO: 37567 - RNA, 17 nt, Artificial Sequence
  Synthetic oligonucleotide: CBLB-7280
caggacagcagccaaac

SEQ ID NO: 37568 - RNA, 17 nt, Artificial Sequence
  Synthetic oligonucleotide: CBLB-7281
ggaacgaaaguggaaac

SEQ ID NO: 37569 - RNA, 17 nt, Artificial Sequence
  Synthetic oligonucleotide: CBLB-7282
ggcagcgcgaggaggac

SEQ ID NO: 37570 - RNA, 17 nt, Artificial Sequence
  Synthetic oligonucleotide: CBLB-7283
ggcgugagcgucgggac

SEQ ID NO: 37571 - RNA, 17 nt, Artificial Sequence
  Synthetic oligonucleotide: CBLB-7284
gggugcagccaauggac

SEQ ID NO: 37572 - RNA, 17 nt, Artificial Sequence
  Synthetic oligonucleotide: CBLB-7285
cuguggaggacguggac

SEQ ID NO: 37573 - RNA, 17 nt, Artificial Sequence
  Synthetic oligonucleotide: CBLB-7286
gcgugagcgucgggacc

SEQ ID NO: 37574 - RNA, 17 nt, Artificial Sequence
  Synthetic oligonucleotide: CBLB-7287
gccaaacccuucuaccc

SEQ ID NO: 37575 - RNA, 17 nt, Artificial Sequence
  Synthetic oligonucleotide: CBLB-7288
ggggccuggacucuccc

SEQ ID NO: 37576 - RNA, 17 nt, Artificial Sequence
  Synthetic oligonucleotide: CBLB-7289
uuuccacuuucguuccc

SEQ ID NO: 37577 - RNA, 17 nt, Artificial Sequence
  Synthetic oligonucleotide: CBLB-7290
gagagaaaugaggggcc

SEQ ID NO: 37578 - RNA, 17 nt, Artificial Sequence
  Synthetic oligonucleotide: CBLB-7291
ggggcgggggcggggcc

SEQ ID NO: 37579 - RNA, 17 nt, Artificial Sequence
  Synthetic oligonucleotide: CBLB-7292
cagauggcuuuggcucc

SEQ ID NO: 37580 - RNA, 17 nt, Artificial Sequence
  Synthetic oligonucleotide: CBLB-7293
aggggccuggacucucc

SEQ ID NO: 37581 - RNA, 17 nt, Artificial Sequence
  Synthetic oligonucleotide: CBLB-7294
cuguuuggcugcugucc

SEQ ID NO: 37582 - RNA, 17 nt, Artificial Sequence
  Synthetic oligonucleotide: CBLB-7295
guuuccacuuucguucc

SEQ ID NO: 37583 - RNA, 17 nt, Artificial Sequence
  Synthetic oligonucleotide: CBLB-7296
aggaagguaagcgaagc

SEQ ID NO: 37584 - RNA, 17 nt, Artificial Sequence
  Synthetic oligonucleotide: CBLB-7297
aucuggggcugaaaggc

SEQ ID NO: 37585 - RNA, 17 nt, Artificial Sequence
  Synthetic oligonucleotide: CBLB-7298
ucucacagagaguaggc

SEQ ID NO: 37586 - RNA, 17 nt, Artificial Sequence
  Synthetic oligonucleotide: CBLB-7299
cggggcgggggcggggc

SEQ ID NO: 37587 - RNA, 17 nt, Artificial Sequence
  Synthetic oligonucleotide: CBLB-7300
gcuucuccgcucugggc

SEQ ID NO: 37588 - RNA, 17 nt, Artificial Sequence
  Synthetic oligonucleotide: CBLB-7301
agcaacagaguaguggc

SEQ ID NO: 37589 - RNA, 17 nt, Artificial Sequence
  Synthetic oligonucleotide: CBLB-7302
aaccaauaagggguggc

SEQ ID NO: 37590 - RNA, 17 nt, Artificial Sequence
  Synthetic oligonucleotide: CBLB-7303
gaaagagguaacaaugc

SEQ ID NO: 37591 - RNA, 17 nt, Artificial Sequence
  Synthetic oligonucleotide: CBLB-7304
auugcagaccaaacauc

SEQ ID NO: 37592 - RNA, 17 nt, Artificial Sequence
  Synthetic oligonucleotide: CBLB-7305
uuaaaaaggccgacauc

SEQ ID NO: 37593 - RNA, 17 nt, Artificial Sequence
  Synthetic oligonucleotide: CBLB-7306
cgggagccaaagccauc

SEQ ID NO: 37594 - RNA, 17 nt, Artificial Sequence
  Synthetic oligonucleotide: CBLB-7307
cagcaauucccauuauc

SEQ ID NO: 37595 - RNA, 17 nt, Artificial Sequence
  Synthetic oligonucleotide: CBLB-7308
gcgagcgggccuuccuc

SEQ ID NO: 37596 - RNA, 17 nt, Artificial Sequence
  Synthetic oligonucleotide: CBLB-7309
aggugggcgugagcguc

SEQ ID NO: 37597 - RNA, 17 nt, Artificial Sequence
  Synthetic oligonucleotide: CBLB-7310
uggcugcacccgcuguc

SEQ ID NO: 37598 - RNA, 17 nt, Artificial Sequence
  Synthetic oligonucleotide: CBLB-7311
aagggagccacagaaag

SEQ ID NO: 37599 - RNA, 17 nt, Artificial Sequence
  Synthetic oligonucleotide: CBLB-7312
aggagcuaaccaauaag

SEQ ID NO: 37600 - RNA, 17 nt, Artificial Sequence
  Synthetic oligonucleotide: CBLB-7313
guacacaauggccccag

SEQ ID NO: 37601 - RNA, 17 nt, Artificial Sequence
  Synthetic oligonucleotide: CBLB-7314
gcauuuuagaagcucag

SEQ ID NO: 37602 - RNA, 17 nt, Artificial Sequence
  Synthetic oligonucleotide: CBLB-7315
guuggacccgcccagag

SEQ ID NO: 37603 - RNA, 17 nt, Artificial Sequence
  Synthetic oligonucleotide: CBLB-7316
acucggagagaaaugag

SEQ ID NO: 37604 - RNA, 17 nt, Artificial Sequence
  Synthetic oligonucleotide: CBLB-7317
ucauagcaacagaguag

SEQ ID NO: 37605 - RNA, 17 nt, Artificial Sequence
  Synthetic oligonucleotide: CBLB-7318
uuugcuguuaguuuuag

SEQ ID NO: 37606 - RNA, 17 nt, Artificial Sequence
  Synthetic oligonucleotide: CBLB-7319
guguacuguggaggacg

SEQ ID NO: 37607 - RNA, 17 nt, Artificial Sequence
  Synthetic oligonucleotide: CBLB-7320
uguggaggacguggacg

SEQ ID NO: 37608 - RNA, 17 nt, Artificial Sequence
  Synthetic oligonucleotide: CBLB-7321
gacggggcggcagcgcg

SEQ ID NO: 37609 - RNA, 17 nt, Artificial Sequence
  Synthetic oligonucleotide: CBLB-7322
ggggcggggcgggggcg

SEQ ID NO: 37610 - RNA, 17 nt, Artificial Sequence
  Synthetic oligonucleotide: CBLB-7323
caucuggggcugaaagg

SEQ ID NO: 37611 - RNA, 17 nt, Artificial Sequence
  Synthetic oligonucleotide: CBLB-7324
caauaagggguggcagg

SEQ ID NO: 37612 - RNA, 17 nt, Artificial Sequence
  Synthetic oligonucleotide: CBLB-7325
ggggcggcagcgcgagg

SEQ ID NO: 37613 - RNA, 17 nt, Artificial Sequence
  Synthetic oligonucleotide: CBLB-7326
ugccuaaaugacugagg

SEQ ID NO: 37614 - RNA, 17 nt, Artificial Sequence
  Synthetic oligonucleotide: CBLB-7327
ugcagccaauggacggg

SEQ ID NO: 37615 - RNA, 17 nt, Artificial Sequence
  Synthetic oligonucleotide: CBLB-7328
agcuaaccaauaagggg

SEQ ID NO: 37616 - RNA, 17 nt, Artificial Sequence
  Synthetic oligonucleotide: CBLB-7329
ggaggacguggacgggg

SEQ ID NO: 37617 - RNA, 17 nt, Artificial Sequence
  Synthetic oligonucleotide: CBLB-7330
ugcuucuccgcucuggg

SEQ ID NO: 37618 - RNA, 17 nt, Artificial Sequence
  Synthetic oligonucleotide: CBLB-7331
gccauuguguacugugg

SEQ ID NO: 37619 - RNA, 17 nt, Artificial Sequence
  Synthetic oligonucleotide: CBLB-7332
ggacucggagagaaaug

SEQ ID NO: 37620 - RNA, 17 nt, Artificial Sequence
  Synthetic oligonucleotide: CBLB-7333
uucugccuaaaugacug

SEQ ID NO: 37621 - RNA, 17 nt, Artificial Sequence
  Synthetic oligonucleotide: CBLB-7334
ggggccauuguguacug

SEQ ID NO: 37622 - RNA, 17 nt, Artificial Sequence
  Synthetic oligonucleotide: CBLB-7335
ucacagagaguaggcug

SEQ ID NO: 37623 - RNA, 17 nt, Artificial Sequence
  Synthetic oligonucleotide: CBLB-7336
ggagccaaagccaucug

SEQ ID NO: 37624 - RNA, 17 nt, Artificial Sequence
  Synthetic oligonucleotide: CBLB-7337
gagcgggccuuccucug

SEQ ID NO: 37625 - RNA, 17 nt, Artificial Sequence
  Synthetic oligonucleotide: CBLB-7338
auuguuaccucuuucug

SEQ ID NO: 37626 - RNA, 17 nt, Artificial Sequence
  Synthetic oligonucleotide: CBLB-7339
gcacgucagaaaggaau

SEQ ID NO: 37627 - RNA, 17 nt, Artificial Sequence
  Synthetic oligonucleotide: CBLB-7340
uaaaaguaccagauaau

SEQ ID NO: 37628 - RNA, 17 nt, Artificial Sequence
  Synthetic oligonucleotide: CBLB-7341
caccugccaccccuuau

SEQ ID NO: 37629 - RNA, 17 nt, Artificial Sequence
  Synthetic oligonucleotide: CBLB-7342
acagcaaaagagaaacu

SEQ ID NO: 37630 - RNA, 17 nt, Artificial Sequence
  Synthetic oligonucleotide: CBLB-7343
agagaaacucggaaacu

SEQ ID NO: 37631 - RNA, 17 nt, Artificial Sequence
  Synthetic oligonucleotide: CBLB-7344
cuaugaaacaaaagacu

SEQ ID NO: 37632 - RNA, 17 nt, Artificial Sequence
  Synthetic oligonucleotide: CBLB-7345
cagaaaggaauuggacu

SEQ ID NO: 37633 - RNA, 17 nt, Artificial Sequence
  Synthetic oligonucleotide: CBLB-7346
aaggguuuggcagcccu

SEQ ID NO: 37634 - RNA, 17 nt, Artificial Sequence
  Synthetic oligonucleotide: CBLB-7347
gagaaauucaucucccu

SEQ ID NO: 37635 - RNA, 17 nt, Artificial Sequence
  Synthetic oligonucleotide: CBLB-7348
uguuuggcugcuguccu

SEQ ID NO: 37636 - RNA, 17 nt, Artificial Sequence
  Synthetic oligonucleotide: CBLB-7349
cucacagagaguaggcu

SEQ ID NO: 37637 - RNA, 17 nt, Artificial Sequence
  Synthetic oligonucleotide: CBLB-7350
gggagccaaagccaucu

SEQ ID NO: 37638 - RNA, 17 nt, Artificial Sequence
  Synthetic oligonucleotide: CBLB-7351
uguugcuucuccgcucu

SEQ ID NO: 37639 - RNA, 17 nt, Artificial Sequence
  Synthetic oligonucleotide: CBLB-7352
acuugggaaguuucagu

SEQ ID NO: 37640 - RNA, 17 nt, Artificial Sequence
  Synthetic oligonucleotide: CBLB-7353
uaaaucucacagagagu

SEQ ID NO: 37641 - RNA, 17 nt, Artificial Sequence
  Synthetic oligonucleotide: CBLB-7354
augaauuucuccagcgu

SEQ ID NO: 37642 - RNA, 17 nt, Artificial Sequence
  Synthetic oligonucleotide: CBLB-7355
caggugggcgugagcgu

SEQ ID NO: 37643 - RNA, 17 nt, Artificial Sequence
  Synthetic oligonucleotide: CBLB-7356
aauaagggguggcaggu

SEQ ID NO: 37644 - RNA, 17 nt, Artificial Sequence
  Synthetic oligonucleotide: CBLB-7357
aaagacuagccagaugu

SEQ ID NO: 37645 - RNA, 17 nt, Artificial Sequence
  Synthetic oligonucleotide: CBLB-7358
uuggcugcacccgcugu

SEQ ID NO: 37646 - RNA, 17 nt, Artificial Sequence
  Synthetic oligonucleotide: CBLB-7359
augacguugcuucuugu

SEQ ID NO: 37647 - RNA, 17 nt, Artificial Sequence
  Synthetic oligonucleotide: CBLB-7360
cagcuacuguguuuugu

SEQ ID NO: 37648 - RNA, 17 nt, Artificial Sequence
  Synthetic oligonucleotide: CBLB-7361
gagaaacucggaaacuu

SEQ ID NO: 37649 - RNA, 17 nt, Artificial Sequence
  Synthetic oligonucleotide: CBLB-7362
ucagccccagauggcuu

SEQ ID NO: 37650 - RNA, 17 nt, Artificial Sequence
  Synthetic oligonucleotide: CBLB-7363
ugguacuuuuauugcuu

SEQ ID NO: 37651 - RNA, 17 nt, Artificial Sequence
  Synthetic oligonucleotide: CBLB-7364
uccuggguagaaggguu

SEQ ID NO: 37652 - RNA, 17 nt, Artificial Sequence
  Synthetic oligonucleotide: CBLB-7365
uucaucagccugauguu

SEQ ID NO: 37653 - RNA, 17 nt, Artificial Sequence
  Synthetic oligonucleotide: CBLB-7366
gauuagcagagacuguu

SEQ ID NO: 37654 - RNA, 17 nt, Artificial Sequence
  Synthetic oligonucleotide: CBLB-7367
cuccuccucagucauuu

SEQ ID NO: 37655 - RNA, 20 nt, Artificial Sequence
  Synthetic oligonucleotide: CBLB-7368
gaaacuugcacuaaguaaaa

SEQ ID NO: 37656 - RNA, 20 nt, Artificial Sequence
  Synthetic oligonucleotide: CBLB-7369
ccuucuuugugcucuuaaaa

SEQ ID NO: 37657 - RNA, 20 nt, Artificial Sequence
  Synthetic oligonucleotide: CBLB-7370
aguggaaacgggaaaggaaa

SEQ ID NO: 37658 - RNA, 20 nt, Artificial Sequence
  Synthetic oligonucleotide: CBLB-7371
acaguaagguuguuuuuaaa

SEQ ID NO: 37659 - RNA, 20 nt, Artificial Sequence
  Synthetic oligonucleotide: CBLB-7372
ccgacagcgggugcagccaa

SEQ ID NO: 37660 - RNA, 20 nt, Artificial Sequence
  Synthetic oligonucleotide: CBLB-7373
cuuuuuaagagcacaaagaa

SEQ ID NO: 37661 - RNA, 20 nt, Artificial Sequence
  Synthetic oligonucleotide: CBLB-7374
guaacaaugcugguagagaa

SEQ ID NO: 37662 - RNA, 20 nt, Artificial Sequence
  Synthetic oligonucleotide: CBLB-7375
ggcugcuguccuggguagaa

SEQ ID NO: 37663 - RNA, 20 nt, Artificial Sequence
  Synthetic oligonucleotide: CBLB-7376
cgggaaaggaaauggacgaa

SEQ ID NO: 37664 - RNA, 20 nt, Artificial Sequence
  Synthetic oligonucleotide: CBLB-7377
aacgaaaguggaaacgggaa

SEQ ID NO: 37665 - RNA, 20 nt, Artificial Sequence
  Synthetic oligonucleotide: CBLB-7378
caacagaguaguggcuggaa

SEQ ID NO: 37666 - RNA, 20 nt, Artificial Sequence
  Synthetic oligonucleotide: CBLB-7379
caaagccaucuggggcugaa

SEQ ID NO: 37667 - RNA, 20 nt, Artificial Sequence
  Synthetic oligonucleotide: CBLB-7380
gcaauaaaaguaccagauaa

SEQ ID NO: 37668 - RNA, 20 nt, Artificial Sequence
  Synthetic oligonucleotide: CBLB-7381
auggauagaaaucuauguaa

SEQ ID NO: 37669 - RNA, 20 nt, Artificial Sequence
  Synthetic oligonucleotide: CBLB-7382
gaaauggacgaagggaugca

SEQ ID NO: 37670 - RNA, 20 nt, Artificial Sequence
  Synthetic oligonucleotide: CBLB-7383
gcacuaaguaaaaaggugca

SEQ ID NO: 37671 - RNA, 20 nt, Artificial Sequence
  Synthetic oligonucleotide: CBLB-7384
ccuuuuuaagagcacaaaga

SEQ ID NO: 37672 - RNA, 20 nt, Artificial Sequence
  Synthetic oligonucleotide: CBLB-7385
ucccgccuuucagccccaga

SEQ ID NO: 37673 - RNA, 20 nt, Artificial Sequence
  Synthetic oligonucleotide: CBLB-7386
uggcugcuguccuggguaga

SEQ ID NO: 37674 - RNA, 20 nt, Artificial Sequence
  Synthetic oligonucleotide: CBLB-7387
cuuuugcuguuaguuuuaga

SEQ ID NO: 37675 - RNA, 20 nt, Artificial Sequence
  Synthetic oligonucleotide: CBLB-7388
acgggaaaggaaauggacga

SEQ ID NO: 37676 - RNA, 20 nt, Artificial Sequence
  Synthetic oligonucleotide: CBLB-7389
uacacaauggccccagagga

SEQ ID NO: 37677 - RNA, 20 nt, Artificial Sequence
  Synthetic oligonucleotide: CBLB-7390
gggcggcagcgcgaggagga

SEQ ID NO: 37678 - RNA, 20 nt, Artificial Sequence
  Synthetic oligonucleotide: CBLB-7391
uaugaaacaaaagacuagga

SEQ ID NO: 37679 - RNA, 20 nt, Artificial Sequence
  Synthetic oligonucleotide: CBLB-7392
cagcgggugcagccaaugga

SEQ ID NO: 37680 - RNA, 20 nt, Artificial Sequence
  Synthetic oligonucleotide: CBLB-7393
gcaacagaguaguggcugga

SEQ ID NO: 37681 - RNA, 20 nt, Artificial Sequence
  Synthetic oligonucleotide: CBLB-7394
uguacuguggaggacgugga

SEQ ID NO: 37682 - RNA, 20 nt, Artificial Sequence
  Synthetic oligonucleotide: CBLB-7395
uuggacucggagagaaauga

SEQ ID NO: 37683 - RNA, 20 nt, Artificial Sequence
  Synthetic oligonucleotide: CBLB-7396
agaaggguuuggcagcccua

SEQ ID NO: 37684 - RNA, 20 nt, Artificial Sequence
  Synthetic oligonucleotide: CBLB-7397
uggagaaauucaucucccua

SEQ ID NO: 37685 - RNA, 20 nt, Artificial Sequence
  Synthetic oligonucleotide: CBLB-7398
agagaauggcagcuacagua

SEQ ID NO: 37686 - RNA, 20 nt, Artificial Sequence
  Synthetic oligonucleotide: CBLB-7399
acccaggacagcagccaaac

SEQ ID NO: 37687 - RNA, 20 nt, Artificial Sequence
  Synthetic oligonucleotide: CBLB-7400
ggcggcagcgcgaggaggac

SEQ ID NO: 37688 - RNA, 20 nt, Artificial Sequence
  Synthetic oligonucleotide: CBLB-7401
agcgggugcagccaauggac

SEQ ID NO: 37689 - RNA, 20 nt, Artificial Sequence
  Synthetic oligonucleotide: CBLB-7402
guacuguggaggacguggac

SEQ ID NO: 37690 - RNA, 20 nt, Artificial Sequence
  Synthetic oligonucleotide: CBLB-7403
gcugccaaacccuucuaccc

SEQ ID NO: 37691 - RNA, 20 nt, Artificial Sequence
  Synthetic oligonucleotide: CBLB-7404
ugaggggccuggacucuccc

SEQ ID NO: 37692 - RNA, 20 nt, Artificial Sequence
  Synthetic oligonucleotide: CBLB-7405
ggcauuggcucagcggcgcc

SEQ ID NO: 37693 - RNA, 20 nt, Artificial Sequence
  Synthetic oligonucleotide: CBLB-7406
ucggagagaaaugaggggcc

SEQ ID NO: 37694 - RNA, 20 nt, Artificial Sequence
  Synthetic oligonucleotide: CBLB-7407
ggcggggcgggggcggggcc

SEQ ID NO: 37695 - RNA, 20 nt, Artificial Sequence
  Synthetic oligonucleotide: CBLB-7408
ccccagauggcuuuggcucc

SEQ ID NO: 37696 - RNA, 20 nt, Artificial Sequence
  Synthetic oligonucleotide: CBLB-7409
gaccuguuuggcugcugucc

SEQ ID NO: 37697 - RNA, 20 nt, Artificial Sequence
  Synthetic oligonucleotide: CBLB-7410
cccguuuccacuuucguucc

SEQ ID NO: 37698 - RNA, 20 nt, Artificial Sequence
  Synthetic oligonucleotide: CBLB-7411
gccaucuggggcugaaaggc

SEQ ID NO: 37699 - RNA, 20 nt, Artificial Sequence
  Synthetic oligonucleotide: CBLB-7412
aaaucucacagagaguaggc

SEQ ID NO: 37700 - RNA, 20 nt, Artificial Sequence
  Synthetic oligonucleotide: CBLB-7413
gggcggggcgggggcggggc

SEQ ID NO: 37701 - RNA, 20 nt, Artificial Sequence
  Synthetic oligonucleotide: CBLB-7414
guugcuucuccgcucugggc

SEQ ID NO: 37702 - RNA, 20 nt, Artificial Sequence
  Synthetic oligonucleotide: CBLB-7415
cauagcaacagaguaguggc

SEQ ID NO: 37703 - RNA, 20 nt, Artificial Sequence
  Synthetic oligonucleotide: CBLB-7416
gcuaaccaauaagggguggc

SEQ ID NO: 37704 - RNA, 20 nt, Artificial Sequence
  Synthetic oligonucleotide: CBLB-7417
acagaaagagguaacaaugc

SEQ ID NO: 37705 - RNA, 20 nt, Artificial Sequence
  Synthetic oligonucleotide: CBLB-7418
gaccgggagccaaagccauc

SEQ ID NO: 37706 - RNA, 20 nt, Artificial Sequence
  Synthetic oligonucleotide: CBLB-7419
gcugcgagcgggccuuccuc

SEQ ID NO: 37707 - RNA, 20 nt, Artificial Sequence
  Synthetic oligonucleotide: CBLB-7420
aggguguugcuucuccgcuc

SEQ ID NO: 37708 - RNA, 20 nt, Artificial Sequence
  Synthetic oligonucleotide: CBLB-7421
ggcaggugggcgugagcguc

SEQ ID NO: 37709 - RNA, 20 nt, Artificial Sequence
  Synthetic oligonucleotide: CBLB-7422
cauuggcugcacccgcuguc

SEQ ID NO: 37710 - RNA, 20 nt, Artificial Sequence
  Synthetic oligonucleotide: CBLB-7423
aagaagggagccacagaaag

SEQ ID NO: 37711 - RNA, 20 nt, Artificial Sequence
  Synthetic oligonucleotide: CBLB-7424
cgaaggagcuaaccaauaag

SEQ ID NO: 37712 - RNA, 20 nt, Artificial Sequence
  Synthetic oligonucleotide: CBLB-7425
acaguacacaauggccccag

SEQ ID NO: 37713 - RNA, 20 nt, Artificial Sequence
  Synthetic oligonucleotide: CBLB-7426
ucugcauuuuagaagcucag

SEQ ID NO: 37714 - RNA, 20 nt, Artificial Sequence
  Synthetic oligonucleotide: CBLB-7427
guugcgcggcauuggcucag

SEQ ID NO: 37715 - RNA, 20 nt, Artificial Sequence
  Synthetic oligonucleotide: CBLB-7428
agcguuggacccgcccagag

SEQ ID NO: 37716 - RNA, 20 nt, Artificial Sequence
  Synthetic oligonucleotide: CBLB-7429
uggacucggagagaaaugag

SEQ ID NO: 37717 - RNA, 20 nt, Artificial Sequence
  Synthetic oligonucleotide: CBLB-7430
guuucauagcaacagaguag

SEQ ID NO: 37718 - RNA, 20 nt, Artificial Sequence
  Synthetic oligonucleotide: CBLB-7431
ucuuuugcuguuaguuuuag

SEQ ID NO: 37719 - RNA, 20 nt, Artificial Sequence
  Synthetic oligonucleotide: CBLB-7432
uacuguggaggacguggacg

SEQ ID NO: 37720 - RNA, 20 nt, Artificial Sequence
  Synthetic oligonucleotide: CBLB-7433
guggacggggcggcagcgcg

SEQ ID NO: 37721 - RNA, 20 nt, Artificial Sequence
  Synthetic oligonucleotide: CBLB-7434
agccaucuggggcugaaagg

SEQ ID NO: 37722 - RNA, 20 nt, Artificial Sequence
  Synthetic oligonucleotide: CBLB-7435
aaccaauaagggguggcagg

SEQ ID NO: 37723 - RNA, 20 nt, Artificial Sequence
  Synthetic oligonucleotide: CBLB-7436
uucugccuaaaugacugagg

SEQ ID NO: 37724 - RNA, 20 nt, Artificial Sequence
  Synthetic oligonucleotide: CBLB-7437
gggugcagccaauggacggg

SEQ ID NO: 37725 - RNA, 20 nt, Artificial Sequence
  Synthetic oligonucleotide: CBLB-7438
uguggaggacguggacgggg

SEQ ID NO: 37726 - RNA, 20 nt, Artificial Sequence
  Synthetic oligonucleotide: CBLB-7439
aguuucugccuaaaugacug

SEQ ID NO: 37727 - RNA, 20 nt, Artificial Sequence
  Synthetic oligonucleotide: CBLB-7440
aucucacagagaguaggcug

SEQ ID NO: 37728 - RNA, 20 nt, Artificial Sequence
  Synthetic oligonucleotide: CBLB-7441
ccgggagccaaagccaucug

SEQ ID NO: 37729 - RNA, 20 nt, Artificial Sequence
  Synthetic oligonucleotide: CBLB-7442
agcauuguuaccucuuucug

SEQ ID NO: 37730 - RNA, 20 nt, Artificial Sequence
  Synthetic oligonucleotide: CBLB-7443
caauaaaaguaccagauaau

SEQ ID NO: 37731 - RNA, 20 nt, Artificial Sequence
  Synthetic oligonucleotide: CBLB-7444
gcccaccugccaccccuuau

SEQ ID NO: 37732 - RNA, 20 nt, Artificial Sequence
  Synthetic oligonucleotide: CBLB-7445
cuaacagcaaaagagaaacu

SEQ ID NO: 37733 - RNA, 20 nt, Artificial Sequence
  Synthetic oligonucleotide: CBLB-7446
aaaagagaaacucggaaacu

SEQ ID NO: 37734 - RNA, 20 nt, Artificial Sequence
  Synthetic oligonucleotide: CBLB-7447
uugcuaugaaacaaaagacu

SEQ ID NO: 37735 - RNA, 20 nt, Artificial Sequence
  Synthetic oligonucleotide: CBLB-7448
cgucagaaaggaauuggacu

SEQ ID NO: 37736 - RNA, 20 nt, Artificial Sequence
  Synthetic oligonucleotide: CBLB-7449
cuggagaaauucaucucccu

SEQ ID NO: 37737 - RNA, 20 nt, Artificial Sequence
  Synthetic oligonucleotide: CBLB-7450
accuguuuggcugcuguccu

SEQ ID NO: 37738 - RNA, 20 nt, Artificial Sequence
  Synthetic oligonucleotide: CBLB-7451
aaucucacagagaguaggcu

SEQ ID NO: 37739 - RNA, 20 nt, Artificial Sequence
  Synthetic oligonucleotide: CBLB-7452
ggguguugcuucuccgcucu

SEQ ID NO: 37740 - RNA, 20 nt, Artificial Sequence
  Synthetic oligonucleotide: CBLB-7453
gaaacuugggaaguuucagu

SEQ ID NO: 37741 - RNA, 20 nt, Artificial Sequence
  Synthetic oligonucleotide: CBLB-7454
gaauaaaucucacagagagu

SEQ ID NO: 37742 - RNA, 20 nt, Artificial Sequence
  Synthetic oligonucleotide: CBLB-7455
gagaugaauuucuccagcgu

SEQ ID NO: 37743 - RNA, 20 nt, Artificial Sequence
  Synthetic oligonucleotide: CBLB-7456
uggcaggugggcgugagcgu

SEQ ID NO: 37744 - RNA, 20 nt, Artificial Sequence
  Synthetic oligonucleotide: CBLB-7457
uuuaaagacuagccagaugu

SEQ ID NO: 37745 - RNA, 20 nt, Artificial Sequence
  Synthetic oligonucleotide: CBLB-7458
ccauuggcugcacccgcugu

SEQ ID NO: 37746 - RNA, 20 nt, Artificial Sequence
  Synthetic oligonucleotide: CBLB-7459
ucuaugacguugcuucuugu

SEQ ID NO: 37747 - RNA, 20 nt, Artificial Sequence
  Synthetic oligonucleotide: CBLB-7460
agacagcuacuguguuuugu

SEQ ID NO: 37748 - RNA, 20 nt, Artificial Sequence
  Synthetic oligonucleotide: CBLB-7461
aaagagaaacucggaaacuu

SEQ ID NO: 37749 - RNA, 20 nt, Artificial Sequence
  Synthetic oligonucleotide: CBLB-7462
cuuucagccccagauggcuu

SEQ ID NO: 37750 - RNA, 20 nt, Artificial Sequence
  Synthetic oligonucleotide: CBLB-7463
aucugguacuuuuauugcuu

SEQ ID NO: 37751 - RNA, 20 nt, Artificial Sequence
  Synthetic oligonucleotide: CBLB-7464
cuguccuggguagaaggguu

SEQ ID NO: 37752 - RNA, 20 nt, Artificial Sequence
  Synthetic oligonucleotide: CBLB-7465
uuuuucaucagccugauguu

SEQ ID NO: 37753 - RNA, 20 nt, Artificial Sequence
  Synthetic oligonucleotide: CBLB-7466
caugauuagcagagacuguu

SEQ ID NO: 37754 - RNA, 20 nt, Artificial Sequence
  Synthetic oligonucleotide: CBLB-7467
ugucuccuccucagucauuu

SEQ ID NO: 37755 - RNA, 17 nt, Artificial Sequence
  Synthetic oligonucleotide: CBLB-7468
aaguaaacugaaauaaa

SEQ ID NO: 37756 - RNA, 17 nt, Artificial Sequence
  Synthetic oligonucleotide: CBLB-7469
cuggacggcggcggcaa

SEQ ID NO: 37757 - RNA, 17 nt, Artificial Sequence
  Synthetic oligonucleotide: CBLB-7470
caccugacugguugcaa

SEQ ID NO: 37758 - RNA, 17 nt, Artificial Sequence
  Synthetic oligonucleotide: CBLB-7471
gauaaaauguuucucaa

SEQ ID NO: 37759 - RNA, 17 nt, Artificial Sequence
  Synthetic oligonucleotide: CBLB-7472
gcgccgaaaggcaagaa

SEQ ID NO: 37760 - RNA, 17 nt, Artificial Sequence
  Synthetic oligonucleotide: CBLB-7473
acagcuacggcgccgaa

SEQ ID NO: 37761 - RNA, 17 nt, Artificial Sequence
  Synthetic oligonucleotide: CBLB-7474
gaaaggcaagaagggaa

SEQ ID NO: 37762 - RNA, 17 nt, Artificial Sequence
  Synthetic oligonucleotide: CBLB-7475
uaaauucaaggcuguaa

SEQ ID NO: 37763 - RNA, 17 nt, Artificial Sequence
  Synthetic oligonucleotide: CBLB-7476
guccugugugugccaca

SEQ ID NO: 37764 - RNA, 17 nt, Artificial Sequence
  Synthetic oligonucleotide: CBLB-7477
gcacagaaauaaugaca

SEQ ID NO: 37765 - RNA, 17 nt, Artificial Sequence
  Synthetic oligonucleotide: CBLB-7478
acagccuugaauuuaca

SEQ ID NO: 37766 - RNA, 17 nt, Artificial Sequence
  Synthetic oligonucleotide: CBLB-7479
aaggcagcugagagcca

SEQ ID NO: 37767 - RNA, 17 nt, Artificial Sequence
  Synthetic oligonucleotide: CBLB-7480
uagccaggcgcgggcca

SEQ ID NO: 37768 - RNA, 17 nt, Artificial Sequence
  Synthetic oligonucleotide: CBLB-7481
uuaaccauguaaauuca

SEQ ID NO: 37769 - RNA, 17 nt, Artificial Sequence
  Synthetic oligonucleotide: CBLB-7482
ggcgccgaaaggcaaga

SEQ ID NO: 37770 - RNA, 17 nt, Artificial Sequence
  Synthetic oligonucleotide: CBLB-7483
cagcucgcucccgaaga

SEQ ID NO: 37771 - RNA, 17 nt, Artificial Sequence
  Synthetic oligonucleotide: CBLB-7484
cgggccaaggaggaaga

SEQ ID NO: 37772 - RNA, 17 nt, Artificial Sequence
  Synthetic oligonucleotide: CBLB-2104
ccgcaggccggggagga

SEQ ID NO: 37773 - RNA, 17 nt, Artificial Sequence
  Synthetic oligonucleotide: CBLB-7485
cgaaaggcaagaaggga

SEQ ID NO: 37774 - RNA, 17 nt, Artificial Sequence
  Synthetic oligonucleotide: CBLB-7486
ccccgagucgggcggga

SEQ ID NO: 37775 - RNA, 17 nt, Artificial Sequence
  Synthetic oligonucleotide: CBLB-7487
aaacugaaauaaaugga

SEQ ID NO: 37776 - RNA, 17 nt, Artificial Sequence
  Synthetic oligonucleotide: CBLB-7488
ccccacuucaaacugga

SEQ ID NO: 37777 - RNA, 17 nt, Artificial Sequence
  Synthetic oligonucleotide: CBLB-7489
uguaauuauuacuauga

SEQ ID NO: 37778 - RNA, 17 nt, Artificial Sequence
  Synthetic oligonucleotide: CBLB-7490
guguggauuugucuuga

SEQ ID NO: 37779 - RNA, 17 nt, Artificial Sequence
  Synthetic oligonucleotide: CBLB-7491
gugucucuggacagcua

SEQ ID NO: 37780 - RNA, 17 nt, Artificial Sequence
  Synthetic oligonucleotide: CBLB-7492
aaugccccacuucaaac

SEQ ID NO: 37781 - RNA, 17 nt, Artificial Sequence
  Synthetic oligonucleotide: CBLB-7493
gggcuccccacacacac

SEQ ID NO: 37782 - RNA, 17 nt, Artificial Sequence
  Synthetic oligonucleotide: CBLB-7494
accccuguggcacacac

SEQ ID NO: 37783 - RNA, 17 nt, Artificial Sequence
  Synthetic oligonucleotide: CBLB-7495
gguccugugugugccac

SEQ ID NO: 37784 - RNA, 17 nt, Artificial Sequence
  Synthetic oligonucleotide: CBLB-7496
acacuuuaucaccugac

SEQ ID NO: 37785 - RNA, 17 nt, Artificial Sequence
  Synthetic oligonucleotide: CBLB-7497
uggcacacacaggaccc

SEQ ID NO: 37786 - RNA, 17 nt, Artificial Sequence
  Synthetic oligonucleotide: CBLB-7498
cccgcgccuggcuaccc

SEQ ID NO: 37787 - RNA, 17 nt, Artificial Sequence
  Synthetic oligonucleotide: CBLB-7499
ccgcgccuggcuacccc

SEQ ID NO: 37788 - RNA, 17 nt, Artificial Sequence
  Synthetic oligonucleotide: CBLB-7500
ggcuaccccgggccccc

SEQ ID NO: 37789 - RNA, 17 nt, Artificial Sequence
  Synthetic oligonucleotide: CBLB-7501
uggcuaccccgggcccc

SEQ ID NO: 37790 - RNA, 17 nt, Artificial Sequence
  Synthetic oligonucleotide: CBLB-7502
ggaagaggggacagccc

SEQ ID NO: 37791 - RNA, 17 nt, Artificial Sequence
  Synthetic oligonucleotide: CBLB-7503
guguguguggggagccc

SEQ ID NO: 37792 - RNA, 17 nt, Artificial Sequence
  Synthetic oligonucleotide: CBLB-7504
acacuucuugccggccc

SEQ ID NO: 37793 - RNA, 17 nt, Artificial Sequence
  Synthetic oligonucleotide: CBLB-7505
ugccggcccgggggccc

SEQ ID NO: 37794 - RNA, 17 nt, Artificial Sequence
  Synthetic oligonucleotide: CBLB-7506
gaaguguggagccuccc

SEQ ID NO: 37795 - RNA, 17 nt, Artificial Sequence
  Synthetic oligonucleotide: CBLB-7507
cgaucccacucccagcc

SEQ ID NO: 37796 - RNA, 17 nt, Artificial Sequence
  Synthetic oligonucleotide: CBLB-7508
aaaggcagcugagagcc

SEQ ID NO: 37797 - RNA, 17 nt, Artificial Sequence
  Synthetic oligonucleotide: CBLB-7509
gggggcccgggguagcc

SEQ ID NO: 37798 - RNA, 17 nt, Artificial Sequence
  Synthetic oligonucleotide: CBLB-7510
ccuccuuggcccgcgcc

SEQ ID NO: 37799 - RNA, 17 nt, Artificial Sequence
  Synthetic oligonucleotide: CBLB-7511
gaagggaaggggucgcc

SEQ ID NO: 37800 - RNA, 17 nt, Artificial Sequence
  Synthetic oligonucleotide: CBLB-7512
accagaacccgcaggcc

SEQ ID NO: 37801 - RNA, 17 nt, Artificial Sequence
  Synthetic oligonucleotide: CBLB-7513
cacacuucuugccggcc

SEQ ID NO: 37802 - RNA, 17 nt, Artificial Sequence
  Synthetic oligonucleotide: CBLB-7514
uugccggcccgggggcc

SEQ ID NO: 37803 - RNA, 17 nt, Artificial Sequence
  Synthetic oligonucleotide: CBLB-7515
gcgaucccacucccagc

SEQ ID NO: 37804 - RNA, 17 nt, Artificial Sequence
  Synthetic oligonucleotide: CBLB-7516
gggcgggaggggagagc

SEQ ID NO: 37805 - RNA, 17 nt, Artificial Sequence
  Synthetic oligonucleotide: CBLB-7517
gccgcagcagcacuagc

SEQ ID NO: 37806 - RNA, 17 nt, Artificial Sequence
  Synthetic oligonucleotide: CBLB-7518
uaaagaccagaacccgc

SEQ ID NO: 37807 - RNA, 17 nt, Artificial Sequence
  Synthetic oligonucleotide: CBLB-7519
cgacucggggaggccgc

SEQ ID NO: 37808 - RNA, 17 nt, Artificial Sequence
  Synthetic oligonucleotide: CBLB-7520
ggagcaacccagcgcgc

SEQ ID NO: 37809 - RNA, 17 nt, Artificial Sequence
  Synthetic oligonucleotide: CBLB-7521
cucggaggccugcgcgc

SEQ ID NO: 37810 - RNA, 17 nt, Artificial Sequence
  Synthetic oligonucleotide: CBLB-7522
ccgggguagccaggcgc

SEQ ID NO: 37811 - RNA, 17 nt, Artificial Sequence
  Synthetic oligonucleotide: CBLB-7523
gagacacgcgugugcgc

SEQ ID NO: 37812 - RNA, 17 nt, Artificial Sequence
  Synthetic oligonucleotide: CBLB-7524
aggaggagaccgcucgc

SEQ ID NO: 37813 - RNA, 17 nt, Artificial Sequence
  Synthetic oligonucleotide: CBLB-7525
agaagggaaggggucgc

SEQ ID NO: 37814 - RNA, 17 nt, Artificial Sequence
  Synthetic oligonucleotide: CBLB-7526
gaccagaacccgcaggc

SEQ ID NO: 37815 - RNA, 17 nt, Artificial Sequence
  Synthetic oligonucleotide: CBLB-7527
guguggggagccccggc

SEQ ID NO: 37816 - RNA, 17 nt, Artificial Sequence
  Synthetic oligonucleotide: CBLB-7528
accccgggcccccgggc

SEQ ID NO: 37817 - RNA, 17 nt, Artificial Sequence
  Synthetic oligonucleotide: CBLB-7529
gccuccccgagucgggc

SEQ ID NO: 37818 - RNA, 17 nt, Artificial Sequence
  Synthetic oligonucleotide: CBLB-7530
ccuccuccccggccugc

SEQ ID NO: 37819 - RNA, 17 nt, Artificial Sequence
  Synthetic oligonucleotide: CBLB-7531
ggcuccacacuucuugc

SEQ ID NO: 37820 - RNA, 17 nt, Artificial Sequence
  Synthetic oligonucleotide: CBLB-7532
uugagaaacauuuuauc

SEQ ID NO: 37821 - RNA, 17 nt, Artificial Sequence
  Synthetic oligonucleotide: CBLB-7533
gcuguaaaggaaaacuc

SEQ ID NO: 37822 - RNA, 17 nt, Artificial Sequence
  Synthetic oligonucleotide: CBLB-7534
ccccucccgcccgacuc

SEQ ID NO: 37823 - RNA, 17 nt, Artificial Sequence
  Synthetic oligonucleotide: CBLB-7535
acacaggacccaggcuc

SEQ ID NO: 37824 - RNA, 17 nt, Artificial Sequence
  Synthetic oligonucleotide: CBLB-7536
gcuaccaacaauugcuc

SEQ ID NO: 37825 - RNA, 17 nt, Artificial Sequence
  Synthetic oligonucleotide: CBLB-7537
gcgcacacgcgugucuc

SEQ ID NO: 37826 - RNA, 17 nt, Artificial Sequence
  Synthetic oligonucleotide: CBLB-7538
ugccuuugcaaccaguc

SEQ ID NO: 37827 - RNA, 17 nt, Artificial Sequence
  Synthetic oligonucleotide: CBLB-7539
cgcggccuccccgaguc

SEQ ID NO: 37828 - RNA, 17 nt, Artificial Sequence
  Synthetic oligonucleotide: CBLB-7540
gugauaaagugugauuc

SEQ ID NO: 37829 - RNA, 17 nt, Artificial Sequence
  Synthetic oligonucleotide: CBLB-7541
uggguugcuccuucuuc

SEQ ID NO: 37830 - RNA, 17 nt, Artificial Sequence
  Synthetic oligonucleotide: CBLB-7542
ccccggccugcggguuc

SEQ ID NO: 37831 - RNA, 17 nt, Artificial Sequence
  Synthetic oligonucleotide: CBLB-7543
ucuuaguugcuagaaag

SEQ ID NO: 37832 - RNA, 17 nt, Artificial Sequence
  Synthetic oligonucleotide: CBLB-7544
gcgggccaaggaggaag

SEQ ID NO: 37833 - RNA, 17 nt, Artificial Sequence
  Synthetic oligonucleotide: CBLB-7545
aaaggcaagaagggaag

SEQ ID NO: 37834 - RNA, 17 nt, Artificial Sequence
  Synthetic oligonucleotide: CBLB-7546
cgccguccaguuugaag

SEQ ID NO: 37835 - RNA, 17 nt, Artificial Sequence
  Synthetic oligonucleotide: CBLB-7547
uccugugugugccacag

SEQ ID NO: 37836 - RNA, 17 nt, Artificial Sequence
  Synthetic oligonucleotide: CBLB-7548
gggccaaggaggaagag

SEQ ID NO: 37837 - RNA, 17 nt, Artificial Sequence
  Synthetic oligonucleotide: CBLB-7549
cgggcgggaggggagag

SEQ ID NO: 37838 - RNA, 17 nt, Artificial Sequence
  Synthetic oligonucleotide: CBLB-7550
gugggguguccagcgag

SEQ ID NO: 37839 - RNA, 17 nt, Artificial Sequence
  Synthetic oligonucleotide: CBLB-7551
cccgagucgggcgggag

SEQ ID NO: 37840 - RNA, 17 nt, Artificial Sequence
  Synthetic oligonucleotide: CBLB-7552
ggagccccggcugggag

SEQ ID NO: 37841 - RNA, 17 nt, Artificial Sequence
  Synthetic oligonucleotide: CBLB-7553
gcugcgugcguguggag

SEQ ID NO: 37842 - RNA, 17 nt, Artificial Sequence
  Synthetic oligonucleotide: CBLB-7554
auuguugguagcaugag

SEQ ID NO: 37843 - RNA, 17 nt, Artificial Sequence
  Synthetic oligonucleotide: CBLB-7555
aacgcuaucaacuguag

SEQ ID NO: 37844 - RNA, 17 nt, Artificial Sequence
  Synthetic oligonucleotide: CBLB-7556
cgcaggccuccgagacg

SEQ ID NO: 37845 - RNA, 17 nt, Artificial Sequence
  Synthetic oligonucleotide: CBLB-7557
cauuuuaucagguuacg

SEQ ID NO: 37846 - RNA, 17 nt, Artificial Sequence
  Synthetic oligonucleotide: CBLB-7558
cacuucuugccggcccg

SEQ ID NO: 37847 - RNA, 17 nt, Artificial Sequence
  Synthetic oligonucleotide: CBLB-7559
gccggcccgggggcccg

SEQ ID NO: 37848 - RNA, 17 nt, Artificial Sequence
  Synthetic oligonucleotide: CBLB-7560
gcugcugcggcgucccg

SEQ ID NO: 37849 - RNA, 17 nt, Artificial Sequence
  Synthetic oligonucleotide: CBLB-7561
gaucccacucccagccg

SEQ ID NO: 37850 - RNA, 17 nt, Artificial Sequence
  Synthetic oligonucleotide: CBLB-7562
aagggaaggggucgccg

SEQ ID NO: 37851 - RNA, 17 nt, Artificial Sequence
  Synthetic oligonucleotide: CBLB-7563
ccagaacccgcaggccg

SEQ ID NO: 37852 - RNA, 17 nt, Artificial Sequence
  Synthetic oligonucleotide: CBLB-7564
ccgacucggggaggccg

SEQ ID NO: 37853 - RNA, 17 nt, Artificial Sequence
  Synthetic oligonucleotide: CBLB-7565
cccgggguagccaggcg

SEQ ID NO: 37854 - RNA, 17 nt, Artificial Sequence
  Synthetic oligonucleotide: CBLB-7566
agagacacgcgugugcg

SEQ ID NO: 37855 - RNA, 17 nt, Artificial Sequence
  Synthetic oligonucleotide: CBLB-7567
cccucccgcccgacucg

SEQ ID NO: 37856 - RNA, 17 nt, Artificial Sequence
  Synthetic oligonucleotide: CBLB-7568
cacaggacccaggcucg

SEQ ID NO: 37857 - RNA, 17 nt, Artificial Sequence
  Synthetic oligonucleotide: CBLB-7569
ccaggcgcgggccaagg

SEQ ID NO: 37858 - RNA, 17 nt, Artificial Sequence
  Synthetic oligonucleotide: CBLB-7570
gcagcagcacuagcagg

SEQ ID NO: 37859 - RNA, 17 nt, Artificial Sequence
  Synthetic oligonucleotide: CBLB-7571
gcagcacuagcaggagg

SEQ ID NO: 37860 - RNA, 17 nt, Artificial Sequence
  Synthetic oligonucleotide: CBLB-7572
cccgcaggccggggagg

SEQ ID NO: 37861 - RNA, 17 nt, Artificial Sequence
  Synthetic oligonucleotide: CBLB-7573
cacuucaaacuggacgg

SEQ ID NO: 37862 - RNA, 17 nt, Artificial Sequence
  Synthetic oligonucleotide: CBLB-7574
acuucuugccggcccgg

SEQ ID NO: 37863 - RNA, 17 nt, Artificial Sequence
  Synthetic oligonucleotide: CBLB-7575
uucaaacuggacggcgg

SEQ ID NO: 37864 - RNA, 17 nt, Artificial Sequence
  Synthetic oligonucleotide: CBLB-7576
gcguuuccacgucucgg

SEQ ID NO: 37865 - RNA, 17 nt, Artificial Sequence
  Synthetic oligonucleotide: CBLB-7577
uccccgagucgggcggg

SEQ ID NO: 37866 - RNA, 17 nt, Artificial Sequence
  Synthetic oligonucleotide: CBLB-7578
ggccuccccgagucggg

SEQ ID NO: 37867 - RNA, 17 nt, Artificial Sequence
  Synthetic oligonucleotide: CBLB-7579
ugugugugccacagggg

SEQ ID NO: 37868 - RNA, 17 nt, Artificial Sequence
  Synthetic oligonucleotide: CBLB-7580
ggaaggggucgccgggg

SEQ ID NO: 37869 - RNA, 17 nt, Artificial Sequence
  Synthetic oligonucleotide: CBLB-7581
gaacccgcaggccgggg

SEQ ID NO: 37870 - RNA, 17 nt, Artificial Sequence
  Synthetic oligonucleotide: CBLB-7582
ucccgcccgacucgggg

SEQ ID NO: 37871 - RNA, 17 nt, Artificial Sequence
  Synthetic oligonucleotide: CBLB-7583
guugguagcaugagugg

SEQ ID NO: 37872 - RNA, 17 nt, Artificial Sequence
  Synthetic oligonucleotide: CBLB-7584
uggacaccccaccccug

SEQ ID NO: 37873 - RNA, 17 nt, Artificial Sequence
  Synthetic oligonucleotide: CBLB-7585
cccuccuccccggccug

SEQ ID NO: 37874 - RNA, 17 nt, Artificial Sequence
  Synthetic oligonucleotide: CBLB-7586
uccugcuagugcugcug

SEQ ID NO: 37875 - RNA, 17 nt, Artificial Sequence
  Synthetic oligonucleotide: CBLB-7587
cgggccggcaagaagug

SEQ ID NO: 37876 - RNA, 17 nt, Artificial Sequence
  Synthetic oligonucleotide: CBLB-7588
ccguccaguuugaagug

SEQ ID NO: 37877 - RNA, 17 nt, Artificial Sequence
  Synthetic oligonucleotide: CBLB-7589
acugggcugcgugcgug

SEQ ID NO: 37878 - RNA, 17 nt, Artificial Sequence
  Synthetic oligonucleotide: CBLB-7590
ggaggggagagcgggug

SEQ ID NO: 37879 - RNA, 17 nt, Artificial Sequence
  Synthetic oligonucleotide: CBLB-7591
ugugugccacaggggug

SEQ ID NO: 37880 - RNA, 17 nt, Artificial Sequence
  Synthetic oligonucleotide: CBLB-7592
acgcagcccagugugug

SEQ ID NO: 37881 - RNA, 17 nt, Artificial Sequence
  Synthetic oligonucleotide: CBLB-7593
gcagcccagugugugug

SEQ ID NO: 37882 - RNA, 17 nt, Artificial Sequence
  Synthetic oligonucleotide: CBLB-7594
guucugauauuuuacau

SEQ ID NO: 37883 - RNA, 17 nt, Artificial Sequence
  Synthetic oligonucleotide: CBLB-7595
ucuuucagcaauaucau

SEQ ID NO: 37884 - RNA, 17 nt, Artificial Sequence
  Synthetic oligonucleotide: CBLB-7596
ggcuccccacacacacu

SEQ ID NO: 37885 - RNA, 17 nt, Artificial Sequence
  Synthetic oligonucleotide: CBLB-7597
uccccucccgcccgacu

SEQ ID NO: 37886 - RNA, 17 nt, Artificial Sequence
  Synthetic oligonucleotide: CBLB-7598
uguccccucuuccuccu

SEQ ID NO: 37887 - RNA, 17 nt, Artificial Sequence
  Synthetic oligonucleotide: CBLB-7599
uauuacacuuuucagcu

SEQ ID NO: 37888 - RNA, 17 nt, Artificial Sequence
  Synthetic oligonucleotide: CBLB-7600
ucggaggccugcgcgcu

SEQ ID NO: 37889 - RNA, 17 nt, Artificial Sequence
  Synthetic oligonucleotide: CBLB-7601
cacacaggacccaggcu

SEQ ID NO: 37890 - RNA, 17 nt, Artificial Sequence
  Synthetic oligonucleotide: CBLB-7602
uguggggagccccggcu

SEQ ID NO: 37891 - RNA, 17 nt, Artificial Sequence
  Synthetic oligonucleotide: CBLB-7603
gagaaagcuacugugcu

SEQ ID NO: 37892 - RNA, 17 nt, Artificial Sequence
  Synthetic oligonucleotide: CBLB-7604
guugcguuuccacgucu

SEQ ID NO: 37893 - RNA, 17 nt, Artificial Sequence
  Synthetic oligonucleotide: CBLB-7605
gccguccaguuugaagu

SEQ ID NO: 37894 - RNA, 17 nt, Artificial Sequence
  Synthetic oligonucleotide: CBLB-7606
ccgcggccuccccgagu

SEQ ID NO: 37895 - RNA, 17 nt, Artificial Sequence
  Synthetic oligonucleotide: CBLB-7607
gagccccggcugggagu

SEQ ID NO: 37896 - RNA, 17 nt, Artificial Sequence
  Synthetic oligonucleotide: CBLB-7608
cugcgugcguguggagu

SEQ ID NO: 37897 - RNA, 17 nt, Artificial Sequence
  Synthetic oligonucleotide: CBLB-7609
gugugugccacaggggu

SEQ ID NO: 37898 - RNA, 17 nt, Artificial Sequence
  Synthetic oligonucleotide: CBLB-7610
uugguagcaugaguggu

SEQ ID NO: 37899 - RNA, 17 nt, Artificial Sequence
  Synthetic oligonucleotide: CBLB-7611
cgcagcccagugugugu

SEQ ID NO: 37900 - RNA, 17 nt, Artificial Sequence
  Synthetic oligonucleotide: CBLB-7612
aaguccagagcaauugu

SEQ ID NO: 37901 - RNA, 17 nt, Artificial Sequence
  Synthetic oligonucleotide: CBLB-7613
uucugauauuuuacauu

SEQ ID NO: 37902 - RNA, 17 nt, Artificial Sequence
  Synthetic oligonucleotide: CBLB-7614
cucuggacuucauacuu

SEQ ID NO: 37903 - RNA, 17 nt, Artificial Sequence
  Synthetic oligonucleotide: CBLB-7615
cuggguugcuccuucuu

SEQ ID NO: 37904 - RNA, 17 nt, Artificial Sequence
  Synthetic oligonucleotide: CBLB-7616
cuucccuucuugccuuu

SEQ ID NO: 37905 - RNA, 20 nt, Artificial Sequence
  Synthetic oligonucleotide: CBLB-7617
uugaaguaaacugaaauaaa

SEQ ID NO: 37906 - RNA, 20 nt, Artificial Sequence
  Synthetic oligonucleotide: CBLB-7618
aaacuggacggcggcggcaa

SEQ ID NO: 37907 - RNA, 20 nt, Artificial Sequence
  Synthetic oligonucleotide: CBLB-7619
uaucaccugacugguugcaa

SEQ ID NO: 37908 - RNA, 20 nt, Artificial Sequence
  Synthetic oligonucleotide: CBLB-7620
ccugauaaaauguuucucaa

SEQ ID NO: 37909 - RNA, 20 nt, Artificial Sequence
  Synthetic oligonucleotide: CBLB-7621
acggcgccgaaaggcaagaa

SEQ ID NO: 37910 - RNA, 20 nt, Artificial Sequence
  Synthetic oligonucleotide: CBLB-7622
uggacagcuacggcgccgaa

SEQ ID NO: 37911 - RNA, 20 nt, Artificial Sequence
  Synthetic oligonucleotide: CBLB-7623
gccgaaaggcaagaagggaa

SEQ ID NO: 37912 - RNA, 20 nt, Artificial Sequence
  Synthetic oligonucleotide: CBLB-7624
auguaaauucaaggcuguaa

SEQ ID NO: 37913 - RNA, 20 nt, Artificial Sequence
  Synthetic oligonucleotide: CBLB-7625
uggguccugugugugccaca

SEQ ID NO: 37914 - RNA, 20 nt, Artificial Sequence
  Synthetic oligonucleotide: CBLB-7626
cuggcacagaaauaaugaca

SEQ ID NO: 37915 - RNA, 20 nt, Artificial Sequence
  Synthetic oligonucleotide: CBLB-7627
uuuacagccuugaauuuaca

SEQ ID NO: 37916 - RNA, 20 nt, Artificial Sequence
  Synthetic oligonucleotide: CBLB-7628
gcaaaggcagcugagagcca

SEQ ID NO: 37917 - RNA, 20 nt, Artificial Sequence
  Synthetic oligonucleotide: CBLB-7629
ggguagccaggcgcgggcca

SEQ ID NO: 37918 - RNA, 20 nt, Artificial Sequence
  Synthetic oligonucleotide: CBLB-7630
aucuuaaccauguaaauuca

SEQ ID NO: 37919 - RNA, 20 nt, Artificial Sequence
  Synthetic oligonucleotide: CBLB-7631
uacggcgccgaaaggcaaga

SEQ ID NO: 37920 - RNA, 20 nt, Artificial Sequence
  Synthetic oligonucleotide: CBLB-7632
gaacagcucgcucccgaaga

SEQ ID NO: 37921 - RNA, 20 nt, Artificial Sequence
  Synthetic oligonucleotide: CBLB-7633
gcgcgggccaaggaggaaga

SEQ ID NO: 37922 - RNA, 20 nt, Artificial Sequence
  Synthetic oligonucleotide: CBLB-2030
aacccgcaggccggggagga

SEQ ID NO: 37923 - RNA, 20 nt, Artificial Sequence
  Synthetic oligonucleotide: CBLB-7634
cgccgaaaggcaagaaggga

SEQ ID NO: 37924 - RNA, 20 nt, Artificial Sequence
  Synthetic oligonucleotide: CBLB-7635
ccuccccgagucgggcggga

SEQ ID NO: 37925 - RNA, 20 nt, Artificial Sequence
  Synthetic oligonucleotide: CBLB-7636
aguaaacugaaauaaaugga

SEQ ID NO: 37926 - RNA, 20 nt, Artificial Sequence
  Synthetic oligonucleotide: CBLB-7637
augccccacuucaaacugga

SEQ ID NO: 37927 - RNA, 20 nt, Artificial Sequence
  Synthetic oligonucleotide: CBLB-7638
uacuguaauuauuacuauga

SEQ ID NO: 37928 - RNA, 20 nt, Artificial Sequence
  Synthetic oligonucleotide: CBLB-7639
cggguguggauuugucuuga

SEQ ID NO: 37929 - RNA, 20 nt, Artificial Sequence
  Synthetic oligonucleotide: CBLB-7640
cgcgugucucuggacagcua

SEQ ID NO: 37930 - RNA, 20 nt, Artificial Sequence
  Synthetic oligonucleotide: CBLB-7641
uuaaaugccccacuucaaac

SEQ ID NO: 37931 - RNA, 20 nt, Artificial Sequence
  Synthetic oligonucleotide: CBLB-7642
ccggggcuccccacacacac

SEQ ID NO: 37932 - RNA, 20 nt, Artificial Sequence
  Synthetic oligonucleotide: CBLB-7643
cccaccccuguggcacacac

SEQ ID NO: 37933 - RNA, 20 nt, Artificial Sequence
  Synthetic oligonucleotide: CBLB-7644
cuggguccugugugugccac

SEQ ID NO: 37934 - RNA, 20 nt, Artificial Sequence
  Synthetic oligonucleotide: CBLB-7645
aucacacuuuaucaccugac

SEQ ID NO: 37935 - RNA, 20 nt, Artificial Sequence
  Synthetic oligonucleotide: CBLB-7646
cuguggcacacacaggaccc

SEQ ID NO: 37936 - RNA, 20 nt, Artificial Sequence
  Synthetic oligonucleotide: CBLB-7647
uggcccgcgccuggcuaccc

SEQ ID NO: 37937 - RNA, 20 nt, Artificial Sequence
  Synthetic oligonucleotide: CBLB-7648
ggcccgcgccuggcuacccc

SEQ ID NO: 37938 - RNA, 20 nt, Artificial Sequence
  Synthetic oligonucleotide: CBLB-7649
ccuggcuaccccgggccccc

SEQ ID NO: 37939 - RNA, 20 nt, Artificial Sequence
  Synthetic oligonucleotide: CBLB-7650
gccuggcuaccccgggcccc

SEQ ID NO: 37940 - RNA, 20 nt, Artificial Sequence
  Synthetic oligonucleotide: CBLB-7651
ggaggaagaggggacagccc

SEQ ID NO: 37941 - RNA, 20 nt, Artificial Sequence
  Synthetic oligonucleotide: CBLB-7652
ccaguguguguggggagccc

SEQ ID NO: 37942 - RNA, 20 nt, Artificial Sequence
  Synthetic oligonucleotide: CBLB-7653
uccacacuucuugccggccc

SEQ ID NO: 37943 - RNA, 20 nt, Artificial Sequence
  Synthetic oligonucleotide: CBLB-7654
ucuugccggcccgggggccc

SEQ ID NO: 37944 - RNA, 20 nt, Artificial Sequence
  Synthetic oligonucleotide: CBLB-7655
caagaaguguggagccuccc

SEQ ID NO: 37945 - RNA, 20 nt, Artificial Sequence
  Synthetic oligonucleotide: CBLB-7656
cagcgaucccacucccagcc

SEQ ID NO: 37946 - RNA, 20 nt, Artificial Sequence
  Synthetic oligonucleotide: CBLB-7657
ggcaaaggcagcugagagcc

SEQ ID NO: 37947 - RNA, 20 nt, Artificial Sequence
  Synthetic oligonucleotide: CBLB-7658
cccgggggcccgggguagcc

SEQ ID NO: 37948 - RNA, 20 nt, Artificial Sequence
  Synthetic oligonucleotide: CBLB-7659
cuuccuccuuggcccgcgcc

SEQ ID NO: 37949 - RNA, 20 nt, Artificial Sequence
  Synthetic oligonucleotide: CBLB-7660
caagaagggaaggggucgcc

SEQ ID NO: 37950 - RNA, 20 nt, Artificial Sequence
  Synthetic oligonucleotide: CBLB-7661
aagaccagaacccgcaggcc

SEQ ID NO: 37951 - RNA, 20 nt, Artificial Sequence
  Synthetic oligonucleotide: CBLB-7662
cuccacacuucuugccggcc

SEQ ID NO: 37952 - RNA, 20 nt, Artificial Sequence
  Synthetic oligonucleotide: CBLB-7663
uucuugccggcccgggggcc

SEQ ID NO: 37953 - RNA, 20 nt, Artificial Sequence
  Synthetic oligonucleotide: CBLB-7664
ucagcgaucccacucccagc

SEQ ID NO: 37954 - RNA, 20 nt, Artificial Sequence
  Synthetic oligonucleotide: CBLB-7665
gucgggcgggaggggagagc

SEQ ID NO: 37955 - RNA, 20 nt, Artificial Sequence
  Synthetic oligonucleotide: CBLB-7666
gacgccgcagcagcacuagc

SEQ ID NO: 37956 - RNA, 20 nt, Artificial Sequence
  Synthetic oligonucleotide: CBLB-7667
auuuaaagaccagaacccgc

SEQ ID NO: 37957 - RNA, 20 nt, Artificial Sequence
  Synthetic oligonucleotide: CBLB-7668
gcccgacucggggaggccgc

SEQ ID NO: 37958 - RNA, 20 nt, Artificial Sequence
  Synthetic oligonucleotide: CBLB-7669
gaaggagcaacccagcgcgc

SEQ ID NO: 37959 - RNA, 20 nt, Artificial Sequence
  Synthetic oligonucleotide: CBLB-7670
cgucucggaggccugcgcgc

SEQ ID NO: 37960 - RNA, 20 nt, Artificial Sequence
  Synthetic oligonucleotide: CBLB-7671
ggcccgggguagccaggcgc

SEQ ID NO: 37961 - RNA, 20 nt, Artificial Sequence
  Synthetic oligonucleotide: CBLB-7672
ccagagacacgcgugugcgc

SEQ ID NO: 37962 - RNA, 20 nt, Artificial Sequence
  Synthetic oligonucleotide: CBLB-7673
aggaggaggagaccgcucgc

SEQ ID NO: 37963 - RNA, 20 nt, Artificial Sequence
  Synthetic oligonucleotide: CBLB-7674
gcaagaagggaaggggucgc

SEQ ID NO: 37964 - RNA, 20 nt, Artificial Sequence
  Synthetic oligonucleotide: CBLB-7675
aaagaccagaacccgcaggc

SEQ ID NO: 37965 - RNA, 20 nt, Artificial Sequence
  Synthetic oligonucleotide: CBLB-7676
uguguguggggagccccggc

SEQ ID NO: 37966 - RNA, 20 nt, Artificial Sequence
  Synthetic oligonucleotide: CBLB-7677
gcuaccccgggcccccgggc

SEQ ID NO: 37967 - RNA, 20 nt, Artificial Sequence
  Synthetic oligonucleotide: CBLB-7678
gcggccuccccgagucgggc

SEQ ID NO: 37968 - RNA, 20 nt, Artificial Sequence
  Synthetic oligonucleotide: CBLB-7679
cucccuccuccccggccugc

SEQ ID NO: 37969 - RNA, 20 nt, Artificial Sequence
  Synthetic oligonucleotide: CBLB-7680
ggaggcuccacacuucuugc

SEQ ID NO: 37970 - RNA, 20 nt, Artificial Sequence
  Synthetic oligonucleotide: CBLB-7681
ccauugagaaacauuuuauc

SEQ ID NO: 37971 - RNA, 20 nt, Artificial Sequence
  Synthetic oligonucleotide: CBLB-7682
aaggcuguaaaggaaaacuc

SEQ ID NO: 37972 - RNA, 20 nt, Artificial Sequence
  Synthetic oligonucleotide: CBLB-7683
ucuccccucccgcccgacuc

SEQ ID NO: 37973 - RNA, 20 nt, Artificial Sequence
  Synthetic oligonucleotide: CBLB-7684
cacacacaggacccaggcuc

SEQ ID NO: 37974 - RNA, 20 nt, Artificial Sequence
  Synthetic oligonucleotide: CBLB-7685
caugcuaccaacaauugcuc

SEQ ID NO: 37975 - RNA, 20 nt, Artificial Sequence
  Synthetic oligonucleotide: CBLB-7686
cccgcgcacacgcgugucuc

SEQ ID NO: 37976 - RNA, 20 nt, Artificial Sequence
  Synthetic oligonucleotide: CBLB-7687
augugccuuugcaaccaguc

SEQ ID NO: 37977 - RNA, 20 nt, Artificial Sequence
  Synthetic oligonucleotide: CBLB-7688
ucccgcggccuccccgaguc

SEQ ID NO: 37978 - RNA, 20 nt, Artificial Sequence
  Synthetic oligonucleotide: CBLB-7689
caggugauaaagugugauuc

SEQ ID NO: 37979 - RNA, 20 nt, Artificial Sequence
  Synthetic oligonucleotide: CBLB-7690
cgcuggguugcuccuucuuc

SEQ ID NO: 37980 - RNA, 20 nt, Artificial Sequence
  Synthetic oligonucleotide: CBLB-7691
ccuccccggccugcggguuc

SEQ ID NO: 37981 - RNA, 20 nt, Artificial Sequence
  Synthetic oligonucleotide: CBLB-7692
aauucuuaguugcuagaaag

SEQ ID NO: 37982 - RNA, 20 nt, Artificial Sequence
  Synthetic oligonucleotide: CBLB-7693
ggcgcgggccaaggaggaag

SEQ ID NO: 37983 - RNA, 20 nt, Artificial Sequence
  Synthetic oligonucleotide: CBLB-7694
ccgaaaggcaagaagggaag

SEQ ID NO: 37984 - RNA, 20 nt, Artificial Sequence
  Synthetic oligonucleotide: CBLB-7695
cgccgccguccaguuugaag

SEQ ID NO: 37985 - RNA, 20 nt, Artificial Sequence
  Synthetic oligonucleotide: CBLB-7696
ggguccugugugugccacag

SEQ ID NO: 37986 - RNA, 20 nt, Artificial Sequence
  Synthetic oligonucleotide: CBLB-7697
cgcgggccaaggaggaagag

SEQ ID NO: 37987 - RNA, 20 nt, Artificial Sequence
  Synthetic oligonucleotide: CBLB-7698
agucgggcgggaggggagag

SEQ ID NO: 37988 - RNA, 20 nt, Artificial Sequence
  Synthetic oligonucleotide: CBLB-7699
ggggugggguguccagcgag

SEQ ID NO: 37989 - RNA, 20 nt, Artificial Sequence
  Synthetic oligonucleotide: CBLB-7700
cuccccgagucgggcgggag

SEQ ID NO: 37990 - RNA, 20 nt, Artificial Sequence
  Synthetic oligonucleotide: CBLB-7701
uggggagccccggcugggag

SEQ ID NO: 37991 - RNA, 20 nt, Artificial Sequence
  Synthetic oligonucleotide: CBLB-7702
ugggcugcgugcguguggag

SEQ ID NO: 37992 - RNA, 20 nt, Artificial Sequence
  Synthetic oligonucleotide: CBLB-7703
gcaauuguugguagcaugag

SEQ ID NO: 37993 - RNA, 20 nt, Artificial Sequence
  Synthetic oligonucleotide: CBLB-7704
auaaacgcuaucaacuguag

SEQ ID NO: 37994 - RNA, 20 nt, Artificial Sequence
  Synthetic oligonucleotide: CBLB-7705
gcgcgcaggccuccgagacg

SEQ ID NO: 37995 - RNA, 20 nt, Artificial Sequence
  Synthetic oligonucleotide: CBLB-7706
aaacauuuuaucagguuacg

SEQ ID NO: 37996 - RNA, 20 nt, Artificial Sequence
  Synthetic oligonucleotide: CBLB-7707
ccacacuucuugccggcccg

SEQ ID NO: 37997 - RNA, 20 nt, Artificial Sequence
  Synthetic oligonucleotide: CBLB-7708
cuugccggcccgggggcccg

SEQ ID NO: 37998 - RNA, 20 nt, Artificial Sequence
  Synthetic oligonucleotide: CBLB-7709
agugcugcugcggcgucccg

SEQ ID NO: 37999 - RNA, 20 nt, Artificial Sequence
  Synthetic oligonucleotide: CBLB-7710
agcgaucccacucccagccg

SEQ ID NO: 38000 - RNA, 20 nt, Artificial Sequence
  Synthetic oligonucleotide: CBLB-7711
aagaagggaaggggucgccg

SEQ ID NO: 38001 - RNA, 20 nt, Artificial Sequence
  Synthetic oligonucleotide: CBLB-7712
agaccagaacccgcaggccg

SEQ ID NO: 38002 - RNA, 20 nt, Artificial Sequence
  Synthetic oligonucleotide: CBLB-7713
cgcccgacucggggaggccg

SEQ ID NO: 38003 - RNA, 20 nt, Artificial Sequence
  Synthetic oligonucleotide: CBLB-7714
gggcccgggguagccaggcg

SEQ ID NO: 38004 - RNA, 20 nt, Artificial Sequence
  Synthetic oligonucleotide: CBLB-7715
uccagagacacgcgugugcg

SEQ ID NO: 38005 - RNA, 20 nt, Artificial Sequence
  Synthetic oligonucleotide: CBLB-7716
cuccccucccgcccgacucg

SEQ ID NO: 38006 - RNA, 20 nt, Artificial Sequence
  Synthetic oligonucleotide: CBLB-7717
acacacaggacccaggcucg

SEQ ID NO: 38007 - RNA, 20 nt, Artificial Sequence
  Synthetic oligonucleotide: CBLB-7718
uagccaggcgcgggccaagg

SEQ ID NO: 38008 - RNA, 20 nt, Artificial Sequence
  Synthetic oligonucleotide: CBLB-7719
gccgcagcagcacuagcagg

SEQ ID NO: 38009 - RNA, 20 nt, Artificial Sequence
  Synthetic oligonucleotide: CBLB-7720
gcagcagcacuagcaggagg

SEQ ID NO: 38010 - RNA, 20 nt, Artificial Sequence
  Synthetic oligonucleotide: CBLB-7721
gaacccgcaggccggggagg

SEQ ID NO: 38011 - RNA, 20 nt, Artificial Sequence
  Synthetic oligonucleotide: CBLB-7722
ccccacuucaaacuggacgg

SEQ ID NO: 38012 - RNA, 20 nt, Artificial Sequence
  Synthetic oligonucleotide: CBLB-7723
cacacuucuugccggcccgg

SEQ ID NO: 38013 - RNA, 20 nt, Artificial Sequence
  Synthetic oligonucleotide: CBLB-7724
cacuucaaacuggacggcgg

SEQ ID NO: 38014 - RNA, 20 nt, Artificial Sequence
  Synthetic oligonucleotide: CBLB-7725
guugcguuuccacgucucgg

SEQ ID NO: 38015 - RNA, 20 nt, Artificial Sequence
  Synthetic oligonucleotide: CBLB-7726
gccuccccgagucgggcggg

SEQ ID NO: 38016 - RNA, 20 nt, Artificial Sequence
  Synthetic oligonucleotide: CBLB-7727
cgcggccuccccgagucggg

SEQ ID NO: 38017 - RNA, 20 nt, Artificial Sequence
  Synthetic oligonucleotide: CBLB-7728
uccugugugugccacagggg

SEQ ID NO: 38018 - RNA, 20 nt, Artificial Sequence
  Synthetic oligonucleotide: CBLB-7729
aagggaaggggucgccgggg

SEQ ID NO: 38019 - RNA, 20 nt, Artificial Sequence
  Synthetic oligonucleotide: CBLB-7730
ccagaacccgcaggccgggg

SEQ ID NO: 38020 - RNA, 20 nt, Artificial Sequence
  Synthetic oligonucleotide: CBLB-7731
cccucccgcccgacucgggg

SEQ ID NO: 38021 - RNA, 20 nt, Artificial Sequence
  Synthetic oligonucleotide: CBLB-7732
auuguugguagcaugagugg

SEQ ID NO: 38022 - RNA, 20 nt, Artificial Sequence
  Synthetic oligonucleotide: CBLB-7733
cgcuggacaccccaccccug

SEQ ID NO: 38023 - RNA, 20 nt, Artificial Sequence
  Synthetic oligonucleotide: CBLB-7734
uccuccugcuagugcugcug

SEQ ID NO: 38024 - RNA, 20 nt, Artificial Sequence
  Synthetic oligonucleotide: CBLB-7735
ccccgggccggcaagaagug

SEQ ID NO: 38025 - RNA, 20 nt, Artificial Sequence
  Synthetic oligonucleotide: CBLB-7736
ccgccguccaguuugaagug

SEQ ID NO: 38026 - RNA, 20 nt, Artificial Sequence
  Synthetic oligonucleotide: CBLB-7737
cacacugggcugcgugcgug

SEQ ID NO: 38027 - RNA, 20 nt, Artificial Sequence
  Synthetic oligonucleotide: CBLB-7738
gcgggaggggagagcgggug

SEQ ID NO: 38028 - RNA, 20 nt, Artificial Sequence
  Synthetic oligonucleotide: CBLB-7739
cugugugugccacaggggug

SEQ ID NO: 38029 - RNA, 20 nt, Artificial Sequence
  Synthetic oligonucleotide: CBLB-7740
cgcacgcagcccagugugug

SEQ ID NO: 38030 - RNA, 20 nt, Artificial Sequence
  Synthetic oligonucleotide: CBLB-7741
cacgcagcccagugugugug

SEQ ID NO: 38031 - RNA, 20 nt, Artificial Sequence
  Synthetic oligonucleotide: CBLB-7742
gauguucugauauuuuacau

SEQ ID NO: 38032 - RNA, 20 nt, Artificial Sequence
  Synthetic oligonucleotide: CBLB-7743
uugucuuucagcaauaucau

SEQ ID NO: 38033 - RNA, 20 nt, Artificial Sequence
  Synthetic oligonucleotide: CBLB-7744
cggggcuccccacacacacu

SEQ ID NO: 38034 - RNA, 20 nt, Artificial Sequence
  Synthetic oligonucleotide: CBLB-7745
cucuccccucccgcccgacu

SEQ ID NO: 38035 - RNA, 20 nt, Artificial Sequence
  Synthetic oligonucleotide: CBLB-7746
ggcuguccccucuuccuccu

SEQ ID NO: 38036 - RNA, 20 nt, Artificial Sequence
  Synthetic oligonucleotide: CBLB-7747
guuuauuacacuuuucagcu

SEQ ID NO: 38037 - RNA, 20 nt, Artificial Sequence
  Synthetic oligonucleotide: CBLB-7748
gucucggaggccugcgcgcu

SEQ ID NO: 38038 - RNA, 20 nt, Artificial Sequence
  Synthetic oligonucleotide: CBLB-7749
gcacacacaggacccaggcu

SEQ ID NO: 38039 - RNA, 20 nt, Artificial Sequence
  Synthetic oligonucleotide: CBLB-7750
guguguggggagccccggcu

SEQ ID NO: 38040 - RNA, 20 nt, Artificial Sequence
  Synthetic oligonucleotide: CBLB-7751
auuguugcguuuccacgucu

SEQ ID NO: 38041 - RNA, 20 nt, Artificial Sequence
  Synthetic oligonucleotide: CBLB-7752
gccgccguccaguuugaagu

SEQ ID NO: 38042 - RNA, 20 nt, Artificial Sequence
  Synthetic oligonucleotide: CBLB-7753
gucccgcggccuccccgagu

SEQ ID NO: 38043 - RNA, 20 nt, Artificial Sequence
  Synthetic oligonucleotide: CBLB-7754
ggggagccccggcugggagu

SEQ ID NO: 38044 - RNA, 20 nt, Artificial Sequence
  Synthetic oligonucleotide: CBLB-7755
gggcugcgugcguguggagu

SEQ ID NO: 38045 - RNA, 20 nt, Artificial Sequence
  Synthetic oligonucleotide: CBLB-7756
ccugugugugccacaggggu

SEQ ID NO: 38046 - RNA, 20 nt, Artificial Sequence
  Synthetic oligonucleotide: CBLB-7757
uuguugguagcaugaguggu

SEQ ID NO: 38047 - RNA, 20 nt, Artificial Sequence
  Synthetic oligonucleotide: CBLB-7758
gcacgcagcccagugugugu

SEQ ID NO: 38048 - RNA, 20 nt, Artificial Sequence
  Synthetic oligonucleotide: CBLB-7759
augaaguccagagcaauugu

SEQ ID NO: 38049 - RNA, 20 nt, Artificial Sequence
  Synthetic oligonucleotide: CBLB-7760
auguucugauauuuuacauu

SEQ ID NO: 38050 - RNA, 20 nt, Artificial Sequence
  Synthetic oligonucleotide: CBLB-7761
uugcucuggacuucauacuu

SEQ ID NO: 38051 - RNA, 20 nt, Artificial Sequence
  Synthetic oligonucleotide: CBLB-7762
gcgcuggguugcuccuucuu

SEQ ID NO: 38052 - RNA, 20 nt, Artificial Sequence
  Synthetic oligonucleotide: CBLB-7763
ccccuucccuucuugccuuu

SEQ ID NO: 38053 - RNA, 21 nt, Artificial Sequence
  Synthetic oligonucleotide: CBLB-7764
uagucuuuuguuucauagcaa

SEQ ID NO: 38054 - RNA, 22 nt, Artificial Sequence
  Synthetic oligonucleotide: CBLB-7765
cuagucuuuuguuucauagcaa

SEQ ID NO: 38055 - RNA, 23 nt, Artificial Sequence
  Synthetic oligonucleotide: CBLB-7766
ccuagucuuuuguuucauagcaa

SEQ ID NO: 38056 - RNA, 24 nt, Artificial Sequence
  Synthetic oligonucleotide: CBLB-7767
uccuagucuuuuguuucauagcaa

SEQ ID NO: 38057 - RNA, 18 nt, Artificial Sequence
  Synthetic oligonucleotide: CBLB-7768
gcucgcagcacgucagaa

SEQ ID NO: 38058 - RNA, 19 nt, Artificial Sequence
  Synthetic oligonucleotide: CBLB-7769
cgcucgcagcacgucagaa

SEQ ID NO: 38059 - RNA, 20 nt, Artificial Sequence
  Synthetic oligonucleotide: CBLB-7205
ccgcucgcagcacgucagaa

SEQ ID NO: 38060 - RNA, 21 nt, Artificial Sequence
  Synthetic oligonucleotide: CBLB-7770
cccgcucgcagcacgucagaa

SEQ ID NO: 38061 - RNA, 22 nt, Artificial Sequence
  Synthetic oligonucleotide: CBLB-7771
gcccgcucgcagcacgucagaa

SEQ ID NO: 38062 - RNA, 23 nt, Artificial Sequence
  Synthetic oligonucleotide: CBLB-7772
ggcccgcucgcagcacgucagaa

SEQ ID NO: 38063 - RNA, 24 nt, Artificial Sequence
  Synthetic oligonucleotide: CBLB-7773
aggcccgcucgcagcacgucagaa

SEQ ID NO: 38064 - RNA, 21 nt, Artificial Sequence
  Synthetic oligonucleotide: CBLB-7774
aaaugcagaauaaaucucaca

SEQ ID NO: 38065 - RNA, 22 nt, Artificial Sequence
  Synthetic oligonucleotide: CBLB-7775
aaaaugcagaauaaaucucaca

SEQ ID NO: 38066 - RNA, 23 nt, Artificial Sequence
  Synthetic oligonucleotide: CBLB-7776
uaaaaugcagaauaaaucucaca

SEQ ID NO: 38067 - RNA, 24 nt, Artificial Sequence
  Synthetic oligonucleotide: CBLB-7777
cuaaaaugcagaauaaaucucaca

SEQ ID NO: 38068 - RNA, 18 nt, Artificial Sequence
  Synthetic oligonucleotide: CBLB-7778
accgcgcacugcccgaca

SEQ ID NO: 38069 - RNA, 19 nt, Artificial Sequence
  Synthetic oligonucleotide: CBLB-7779
aaccgcgcacugcccgaca

SEQ ID NO: 38070 - RNA, 20 nt, Artificial Sequence
  Synthetic oligonucleotide: CBLB-7780
caaccgcgcacugcccgaca

SEQ ID NO: 38071 - RNA, 21 nt, Artificial Sequence
  Synthetic oligonucleotide: CBLB-7781
gcaaccgcgcacugcccgaca

SEQ ID NO: 38072 - RNA, 22 nt, Artificial Sequence
  Synthetic oligonucleotide: CBLB-7782
cgcaaccgcgcacugcccgaca

SEQ ID NO: 38073 - RNA, 23 nt, Artificial Sequence
  Synthetic oligonucleotide: CBLB-7783
gcgcaaccgcgcacugcccgaca

SEQ ID NO: 38074 - RNA, 24 nt, Artificial Sequence
  Synthetic oligonucleotide: CBLB-7784
cgcgcaaccgcgcacugcccgaca

SEQ ID NO: 38075 - RNA, 18 nt, Artificial Sequence
  Synthetic oligonucleotide: CBLB-7785
cgaaggagcuaaccaaua

SEQ ID NO: 38076 - RNA, 19 nt, Artificial Sequence
  Synthetic oligonucleotide: CBLB-7786
acgaaggagcuaaccaaua

SEQ ID NO: 38077 - RNA, 20 nt, Artificial Sequence
  Synthetic oligonucleotide: CBLB-7208
cacgaaggagcuaaccaaua

SEQ ID NO: 38078 - RNA, 21 nt, Artificial Sequence
  Synthetic oligonucleotide: CBLB-7787
gcacgaaggagcuaaccaaua

SEQ ID NO: 38079 - RNA, 22 nt, Artificial Sequence
  Synthetic oligonucleotide: CBLB-7788
ggcacgaaggagcuaaccaaua

SEQ ID NO: 38080 - RNA, 23 nt, Artificial Sequence
  Synthetic oligonucleotide: CBLB-7789
aggcacgaaggagcuaaccaaua

SEQ ID NO: 38081 - RNA, 24 nt, Artificial Sequence
  Synthetic oligonucleotide: CBLB-7790
aaggcacgaaggagcuaaccaaua

SEQ ID NO: 38082 - RNA, 21 nt, Artificial Sequence
  Synthetic oligonucleotide: CBLB-7791
uaaaucucacagagaguaggc

SEQ ID NO: 38083 - RNA, 22 nt, Artificial Sequence
  Synthetic oligonucleotide: CBLB-7792
auaaaucucacagagaguaggc

SEQ ID NO: 38084 - RNA, 23 nt, Artificial Sequence
  Synthetic oligonucleotide: CBLB-7793
aauaaaucucacagagaguaggc

SEQ ID NO: 38085 - RNA, 24 nt, Artificial Sequence
  Synthetic oligonucleotide: CBLB-7794
gaauaaaucucacagagaguaggc

SEQ ID NO: 38086 - RNA, 21 nt, Artificial Sequence
  Synthetic oligonucleotide: CBLB-7795
uagcaacagaguaguggcugg

SEQ ID NO: 38087 - RNA, 22 nt, Artificial Sequence
  Synthetic oligonucleotide: CBLB-7796
auagcaacagaguaguggcugg

SEQ ID NO: 38088 - RNA, 23 nt, Artificial Sequence
  Synthetic oligonucleotide: CBLB-7797
cauagcaacagaguaguggcugg

SEQ ID NO: 38089 - RNA, 24 nt, Artificial Sequence
  Synthetic oligonucleotide: CBLB-7798
ucauagcaacagaguaguggcugg

SEQ ID NO: 38090 - RNA, 18 nt, Artificial Sequence
  Synthetic oligonucleotide: CBLB-7799
guugcuucuccgcucugg

SEQ ID NO: 38091 - RNA, 19 nt, Artificial Sequence
  Synthetic oligonucleotide: CBLB-7800
uguugcuucuccgcucugg

SEQ ID NO: 38092 - RNA, 20 nt, Artificial Sequence
  Synthetic oligonucleotide: CBLB-7801
guguugcuucuccgcucugg

SEQ ID NO: 38093 - RNA, 21 nt, Artificial Sequence
  Synthetic oligonucleotide: CBLB-7802
agccacugagcuucuaaaaug

SEQ ID NO: 38094 - RNA, 22 nt, Artificial Sequence
  Synthetic oligonucleotide: CBLB-7803
cagccacugagcuucuaaaaug

SEQ ID NO: 38095 - RNA, 23 nt, Artificial Sequence
  Synthetic oligonucleotide: CBLB-7804
acagccacugagcuucuaaaaug

SEQ ID NO: 38096 - RNA, 24 nt, Artificial Sequence
  Synthetic oligonucleotide: CBLB-7805
aacagccacugagcuucuaaaaug

SEQ ID NO: 38097 - RNA, 21 nt, Artificial Sequence
  Synthetic oligonucleotide: CBLB-7806
gcaauaaaaguaccagauaau

SEQ ID NO: 38098 - RNA, 22 nt, Artificial Sequence
  Synthetic oligonucleotide: CBLB-7807
agcaauaaaaguaccagauaau

SEQ ID NO: 38099 - RNA, 23 nt, Artificial Sequence
  Synthetic oligonucleotide: CBLB-7808
aagcaauaaaaguaccagauaau

SEQ ID NO: 38100 - RNA, 24 nt, Artificial Sequence
  Synthetic oligonucleotide: CBLB-7809
aaagcaauaaaaguaccagauaau

SEQ ID NO: 38101 - RNA, 21 nt, Artificial Sequence
  Synthetic oligonucleotide: CBLB-7810
gagaguaggcuggggugacau

SEQ ID NO: 38102 - RNA, 22 nt, Artificial Sequence
  Synthetic oligonucleotide: CBLB-7811
agagaguaggcuggggugacau

SEQ ID NO: 38103 - RNA, 23 nt, Artificial Sequence
  Synthetic oligonucleotide: CBLB-7812
cagagaguaggcuggggugacau

SEQ ID NO: 38104 - RNA, 24 nt, Artificial Sequence
  Synthetic oligonucleotide: CBLB-7813
acagagaguaggcuggggugacau

SEQ ID NO: 38105 - RNA, 18 nt, Artificial Sequence
  Synthetic oligonucleotide: CBLB-7814
acagcuacuguguuuugu

SEQ ID NO: 38106 - RNA, 19 nt, Artificial Sequence
  Synthetic oligonucleotide: CBLB-7815
gacagcuacuguguuuugu

SEQ ID NO: 38107 - RNA, 20 nt, Artificial Sequence
  Synthetic oligonucleotide: CBLB-7460
agacagcuacuguguuuugu

SEQ ID NO: 38108 - RNA, 21 nt, Artificial Sequence
  Synthetic oligonucleotide: CBLB-7816
gagacagcuacuguguuuugu

SEQ ID NO: 38109 - RNA, 22 nt, Artificial Sequence
  Synthetic oligonucleotide: CBLB-7817
ggagacagcuacuguguuuugu

SEQ ID NO: 38110 - RNA, 23 nt, Artificial Sequence
  Synthetic oligonucleotide: CBLB-7818
aggagacagcuacuguguuuugu

SEQ ID NO: 38111 - RNA, 24 nt, Artificial Sequence
  Synthetic oligonucleotide: CBLB-7819
gaggagacagcuacuguguuuugu

SEQ ID NO: 38112 - RNA, 21 nt, Artificial Sequence
  Synthetic oligonucleotide: CBLB-7820
caacugaaacuucccaaguuu

SEQ ID NO: 38113 - RNA, 22 nt, Artificial Sequence
  Synthetic oligonucleotide: CBLB-7821
ccaacugaaacuucccaaguuu

SEQ ID NO: 38114 - RNA, 23 nt, Artificial Sequence
  Synthetic oligonucleotide: CBLB-7822
gccaacugaaacuucccaaguuu

SEQ ID NO: 38115 - RNA, 24 nt, Artificial Sequence
  Synthetic oligonucleotide: CBLB-7823
ugccaacugaaacuucccaaguuu

SEQ ID NO: 38116 - RNA, 21 nt, Artificial Sequence
  Synthetic oligonucleotide: CBLB-7824
cuacaguaagguuguuuuuaa

SEQ ID NO: 38117 - RNA, 22 nt, Artificial Sequence
  Synthetic oligonucleotide: CBLB-7825
gcuacaguaagguuguuuuuaa

SEQ ID NO: 38118 - RNA, 23 nt, Artificial Sequence
  Synthetic oligonucleotide: CBLB-7826
agcuacaguaagguuguuuuuaa

SEQ ID NO: 38119 - RNA, 24 nt, Artificial Sequence
  Synthetic oligonucleotide: CBLB-7827
cagcuacaguaagguuguuuuuaa

SEQ ID NO: 38120 - RNA, 18 nt, Artificial Sequence
  Synthetic oligonucleotide: CBLB-7828
gagguaacaaugcuggua

SEQ ID NO: 38121 - RNA, 19 nt, Artificial Sequence
  Synthetic oligonucleotide: CBLB-7829
agagguaacaaugcuggua

SEQ ID NO: 38122 - RNA, 20 nt, Artificial Sequence
  Synthetic oligonucleotide: CBLB-7830
aagagguaacaaugcuggua

SEQ ID NO: 38123 - RNA, 21 nt, Artificial Sequence
  Synthetic oligonucleotide: CBLB-7831
uagaccuguuuggcugcuguc

SEQ ID NO: 38124 - RNA, 22 nt, Artificial Sequence
  Synthetic oligonucleotide: CBLB-7832
auagaccuguuuggcugcuguc

SEQ ID NO: 38125 - RNA, 23 nt, Artificial Sequence
  Synthetic oligonucleotide: CBLB-7833
cauagaccuguuuggcugcuguc

SEQ ID NO: 38126 - RNA, 24 nt, Artificial Sequence
  Synthetic oligonucleotide: CBLB-7834
ucauagaccuguuuggcugcuguc

SEQ ID NO: 38127 - RNA, 21 nt, Artificial Sequence
  Synthetic oligonucleotide: CBLB-7835
uuuggcugcuguccuggguag

SEQ ID NO: 38128 - RNA, 22 nt, Artificial Sequence
  Synthetic oligonucleotide: CBLB-7836
guuuggcugcuguccuggguag

SEQ ID NO: 38129 - RNA, 23 nt, Artificial Sequence
  Synthetic oligonucleotide: CBLB-7837
uguuuggcugcuguccuggguag

SEQ ID NO: 38130 - RNA, 24 nt, Artificial Sequence
  Synthetic oligonucleotide: CBLB-7838
cuguuuggcugcuguccuggguag

SEQ ID NO: 38131 - RNA, 18 nt, Artificial Sequence
  Synthetic oligonucleotide: CBLB-7839
uuccacuuucguucccgg

SEQ ID NO: 38132 - RNA, 19 nt, Artificial Sequence
  Synthetic oligonucleotide: CBLB-7840
uuuccacuuucguucccgg

SEQ ID NO: 38133 - RNA, 20 nt, Artificial Sequence
  Synthetic oligonucleotide: CBLB-7841
guuuccacuuucguucccgg

SEQ ID NO: 38134 - RNA, 21 nt, Artificial Sequence
  Synthetic oligonucleotide: CBLB-7842
cguuuccacuuucguucccgg

SEQ ID NO: 38135 - RNA, 22 nt, Artificial Sequence
  Synthetic oligonucleotide: CBLB-7843
ccguuuccacuuucguucccgg

SEQ ID NO: 38136 - RNA, 23 nt, Artificial Sequence
  Synthetic oligonucleotide: CBLB-7844
cccguuuccacuuucguucccgg

SEQ ID NO: 38137 - RNA, 24 nt, Artificial Sequence
  Synthetic oligonucleotide: CBLB-7845
ucccguuuccacuuucguucccgg

SEQ ID NO: 38138 - RNA, 21 nt, Artificial Sequence
  Synthetic oligonucleotide: CBLB-7846
guccaggccccucauuucucu

SEQ ID NO: 38139 - RNA, 22 nt, Artificial Sequence
  Synthetic oligonucleotide: CBLB-7847
aguccaggccccucauuucucu

SEQ ID NO: 38140 - RNA, 23 nt, Artificial Sequence
  Synthetic oligonucleotide: CBLB-7848
gaguccaggccccucauuucucu

SEQ ID NO: 38141 - RNA, 24 nt, Artificial Sequence
  Synthetic oligonucleotide: CBLB-7849
agaguccaggccccucauuucucu

SEQ ID NO: 38142 - RNA, 18 nt, Artificial Sequence
  Synthetic oligonucleotide: CBLB-7850
ucuuuuguuucauagcaa

SEQ ID NO: 38143 - RNA, 19 nt, Artificial Sequence
  Synthetic oligonucleotide: CBLB-7851
gucuuuuguuucauagcaa

SEQ ID NO: 38144 - RNA, 20 nt, Artificial Sequence
  Synthetic oligonucleotide: CBLB-7852
agucuuuuguuucauagcaa

SEQ ID NO: 38145 - RNA, 18 nt, Artificial Sequence
  Synthetic oligonucleotide: CBLB-7853
ugcagaauaaaucucaca

SEQ ID NO: 38146 - RNA, 19 nt, Artificial Sequence
  Synthetic oligonucleotide: CBLB-7854
augcagaauaaaucucaca

SEQ ID NO: 38147 - RNA, 20 nt, Artificial Sequence
  Synthetic oligonucleotide: CBLB-7855
aaugcagaauaaaucucaca

SEQ ID NO: 38148 - RNA, 18 nt, Artificial Sequence
  Synthetic oligonucleotide: CBLB-7856
gggaaaggaaauggacga

SEQ ID NO: 38149 - RNA, 19 nt, Artificial Sequence
  Synthetic oligonucleotide: CBLB-7857
cgggaaaggaaauggacga

SEQ ID NO: 38150 - RNA, 20 nt, Artificial Sequence
  Synthetic oligonucleotide: CBLB-7388
acgggaaaggaaauggacga

SEQ ID NO: 38151 - RNA, 21 nt, Artificial Sequence
  Synthetic oligonucleotide: CBLB-7858
aacgggaaaggaaauggacga

SEQ ID NO: 38152 - RNA, 22 nt, Artificial Sequence
  Synthetic oligonucleotide: CBLB-7859
aaacgggaaaggaaauggacga

SEQ ID NO: 38153 - RNA, 23 nt, Artificial Sequence
  Synthetic oligonucleotide: CBLB-7860
gaaacgggaaaggaaauggacga

SEQ ID NO: 38154 - RNA, 24 nt, Artificial Sequence
  Synthetic oligonucleotide: CBLB-7861
ggaaacgggaaaggaaauggacga

SEQ ID NO: 38155 - RNA, 18 nt, Artificial Sequence
  Synthetic oligonucleotide: CBLB-7862
aucucacagagaguaggc

SEQ ID NO: 38156 - RNA, 19 nt, Artificial Sequence
  Synthetic oligonucleotide: CBLB-7863
aaucucacagagaguaggc

SEQ ID NO: 38157 - RNA, 20 nt, Artificial Sequence
  Synthetic oligonucleotide: CBLB-7412
aaaucucacagagaguaggc

SEQ ID NO: 38158 - RNA, 18 nt, Artificial Sequence
  Synthetic oligonucleotide: CBLB-7864
uuuugcuguuaguuuuag

SEQ ID NO: 38159 - RNA, 19 nt, Artificial Sequence
  Synthetic oligonucleotide: CBLB-7865
cuuuugcuguuaguuuuag

SEQ ID NO: 38160 - RNA, 20 nt, Artificial Sequence
  Synthetic oligonucleotide: CBLB-7431
ucuuuugcuguuaguuuuag

SEQ ID NO: 38161 - RNA, 21 nt, Artificial Sequence
  Synthetic oligonucleotide: CBLB-7866
cucuuuugcuguuaguuuuag

SEQ ID NO: 38162 - RNA, 22 nt, Artificial Sequence
  Synthetic oligonucleotide: CBLB-7867
ucucuuuugcuguuaguuuuag

SEQ ID NO: 38163 - RNA, 23 nt, Artificial Sequence
  Synthetic oligonucleotide: CBLB-7868
uucucuuuugcuguuaguuuuag

SEQ ID NO: 38164 - RNA, 24 nt, Artificial Sequence
  Synthetic oligonucleotide: CBLB-7869
uuucucuuuugcuguuaguuuuag

SEQ ID NO: 38165 - RNA, 18 nt, Artificial Sequence
  Synthetic oligonucleotide: CBLB-7870
caacagaguaguggcugg

SEQ ID NO: 38166 - RNA, 19 nt, Artificial Sequence
  Synthetic oligonucleotide: CBLB-7871
gcaacagaguaguggcugg

SEQ ID NO: 38167 - RNA, 20 nt, Artificial Sequence
  Synthetic oligonucleotide: CBLB-7872
agcaacagaguaguggcugg

SEQ ID NO: 38168 - RNA, 21 nt, Artificial Sequence
  Synthetic oligonucleotide: CBLB-7873
gguguugcuucuccgcucugg

SEQ ID NO: 38169 - RNA, 22 nt, Artificial Sequence
  Synthetic oligonucleotide: CBLB-7874
ggguguugcuucuccgcucugg

SEQ ID NO: 38170 - RNA, 23 nt, Artificial Sequence
  Synthetic oligonucleotide: CBLB-7875
aggguguugcuucuccgcucugg

SEQ ID NO: 38171 - RNA, 24 nt, Artificial Sequence
  Synthetic oligonucleotide: CBLB-7876
aaggguguugcuucuccgcucugg

SEQ ID NO: 38172 - RNA, 18 nt, Artificial Sequence
  Synthetic oligonucleotide: CBLB-7877
cacugagcuucuaaaaug

SEQ ID NO: 38173 - RNA, 19 nt, Artificial Sequence
  Synthetic oligonucleotide: CBLB-7878
ccacugagcuucuaaaaug

SEQ ID NO: 38174 - RNA, 20 nt, Artificial Sequence
  Synthetic oligonucleotide: CBLB-7879
gccacugagcuucuaaaaug

SEQ ID NO: 38175 - RNA, 18 nt, Artificial Sequence
  Synthetic oligonucleotide: CBLB-7880
auaaaaguaccagauaau

SEQ ID NO: 38176 - RNA, 19 nt, Artificial Sequence
  Synthetic oligonucleotide: CBLB-7881
aauaaaaguaccagauaau

SEQ ID NO: 38177 - RNA, 20 nt, Artificial Sequence
  Synthetic oligonucleotide: CBLB-7443
caauaaaaguaccagauaau

SEQ ID NO: 38178 - RNA, 18 nt, Artificial Sequence
  Synthetic oligonucleotide: CBLB-7882
aguaggcuggggugacau

SEQ ID NO: 38179 - RNA, 19 nt, Artificial Sequence
  Synthetic oligonucleotide: CBLB-7883
gaguaggcuggggugacau

SEQ ID NO: 38180 - RNA, 20 nt, Artificial Sequence
  Synthetic oligonucleotide: CBLB-7884
agaguaggcuggggugacau

SEQ ID NO: 38181 - RNA, 18 nt, Artificial Sequence
  Synthetic oligonucleotide: CBLB-7885
cugaaacuucccaaguuu

SEQ ID NO: 38182 - RNA, 19 nt, Artificial Sequence
  Synthetic oligonucleotide: CBLB-7886
acugaaacuucccaaguuu

SEQ ID NO: 38183 - RNA, 20 nt, Artificial Sequence
  Synthetic oligonucleotide: CBLB-7887
aacugaaacuucccaaguuu

SEQ ID NO: 38184 - RNA, 18 nt, Artificial Sequence
  Synthetic oligonucleotide: CBLB-7888
caguaagguuguuuuuaa

SEQ ID NO: 38185 - RNA, 19 nt, Artificial Sequence
  Synthetic oligonucleotide: CBLB-7889
acaguaagguuguuuuuaa

SEQ ID NO: 38186 - RNA, 20 nt, Artificial Sequence
  Synthetic oligonucleotide: CBLB-7890
uacaguaagguuguuuuuaa

SEQ ID NO: 38187 - RNA, 21 nt, Artificial Sequence
  Synthetic oligonucleotide: CBLB-7891
aaagagguaacaaugcuggua

SEQ ID NO: 38188 - RNA, 22 nt, Artificial Sequence
  Synthetic oligonucleotide: CBLB-7892
gaaagagguaacaaugcuggua

SEQ ID NO: 38189 - RNA, 23 nt, Artificial Sequence
  Synthetic oligonucleotide: CBLB-7893
agaaagagguaacaaugcuggua

SEQ ID NO: 38190 - RNA, 24 nt, Artificial Sequence
  Synthetic oligonucleotide: CBLB-7894
cagaaagagguaacaaugcuggua

SEQ ID NO: 38191 - RNA, 18 nt, Artificial Sequence
  Synthetic oligonucleotide: CBLB-7895
accuguuuggcugcuguc

SEQ ID NO: 38192 - RNA, 19 nt, Artificial Sequence
  Synthetic oligonucleotide: CBLB-7896
gaccuguuuggcugcuguc

SEQ ID NO: 38193 - RNA, 20 nt, Artificial Sequence
  Synthetic oligonucleotide: CBLB-7897
agaccuguuuggcugcuguc

SEQ ID NO: 38194 - RNA, 18 nt, Artificial Sequence
  Synthetic oligonucleotide: CBLB-7898
uuuggcagcccuagggag

SEQ ID NO: 38195 - RNA, 19 nt, Artificial Sequence
  Synthetic oligonucleotide: CBLB-7899
guuuggcagcccuagggag

SEQ ID NO: 38196 - RNA, 20 nt, Artificial Sequence
  Synthetic oligonucleotide: CBLB-7900
gguuuggcagcccuagggag

SEQ ID NO: 38197 - RNA, 21 nt, Artificial Sequence
  Synthetic oligonucleotide: CBLB-7901
ggguuuggcagcccuagggag

SEQ ID NO: 38198 - RNA, 22 nt, Artificial Sequence
  Synthetic oligonucleotide: CBLB-7902
aggguuuggcagcccuagggag

SEQ ID NO: 38199 - RNA, 23 nt, Artificial Sequence
  Synthetic oligonucleotide: CBLB-7903
aaggguuuggcagcccuagggag

SEQ ID NO: 38200 - RNA, 24 nt, Artificial Sequence
  Synthetic oligonucleotide: CBLB-7904
gaaggguuuggcagcccuagggag

SEQ ID NO: 38201 - RNA, 18 nt, Artificial Sequence
  Synthetic oligonucleotide: CBLB-7905
ggcugcuguccuggguag

SEQ ID NO: 38202 - RNA, 19 nt, Artificial Sequence
  Synthetic oligonucleotide: CBLB-7906
uggcugcuguccuggguag

SEQ ID NO: 38203 - RNA, 20 nt, Artificial Sequence
  Synthetic oligonucleotide: CBLB-7907
uuggcugcuguccuggguag

SEQ ID NO: 38204 - RNA, 18 nt, Artificial Sequence
  Synthetic oligonucleotide: CBLB-7908
caggccccucauuucucu

SEQ ID NO: 38205 - RNA, 19 nt, Artificial Sequence
  Synthetic oligonucleotide: CBLB-7909
ccaggccccucauuucucu

SEQ ID NO: 38206 - RNA, 20 nt, Artificial Sequence
  Synthetic oligonucleotide: CBLB-7910
uccaggccccucauuucucu

SEQ ID NO: 38207 - RNA, 18 nt, Artificial Sequence
  Synthetic oligonucleotide: CBLB-7911
uucuuguuggcuaucaaa

SEQ ID NO: 38208 - RNA, 19 nt, Artificial Sequence
  Synthetic oligonucleotide: CBLB-7912
cuucuuguuggcuaucaaa

SEQ ID NO: 38209 - RNA, 20 nt, Artificial Sequence
  Synthetic oligonucleotide: CBLB-7913
gcuucuuguuggcuaucaaa

SEQ ID NO: 38210 - RNA, 21 nt, Artificial Sequence
  Synthetic oligonucleotide: CBLB-7914
ugcuucuuguuggcuaucaaa

SEQ ID NO: 38211 - RNA, 22 nt, Artificial Sequence
  Synthetic oligonucleotide: CBLB-7915
uugcuucuuguuggcuaucaaa

SEQ ID NO: 38212 - RNA, 23 nt, Artificial Sequence
  Synthetic oligonucleotide: CBLB-7916
guugcuucuuguuggcuaucaaa

SEQ ID NO: 38213 - RNA, 24 nt, Artificial Sequence
  Synthetic oligonucleotide: CBLB-7917
cguugcuucuuguuggcuaucaaa

SEQ ID NO: 38214 - RNA, 18 nt, Artificial Sequence
  Synthetic oligonucleotide: CBLB-7918
acucucccgggaacgaaa

SEQ ID NO: 38215 - RNA, 19 nt, Artificial Sequence
  Synthetic oligonucleotide: CBLB-7919
gacucucccgggaacgaaa

SEQ ID NO: 38216 - RNA, 20 nt, Artificial Sequence
  Synthetic oligonucleotide: CBLB-7920
ggacucucccgggaacgaaa

SEQ ID NO: 38217 - RNA, 21 nt, Artificial Sequence
  Synthetic oligonucleotide: CBLB-7921
uggacucucccgggaacgaaa

SEQ ID NO: 38218 - RNA, 22 nt, Artificial Sequence
  Synthetic oligonucleotide: CBLB-7922
cuggacucucccgggaacgaaa

SEQ ID NO: 38219 - RNA, 23 nt, Artificial Sequence
  Synthetic oligonucleotide: CBLB-7923
ccuggacucucccgggaacgaaa

SEQ ID NO: 38220 - RNA, 24 nt, Artificial Sequence
  Synthetic oligonucleotide: CBLB-7924
gccuggacucucccgggaacgaaa

SEQ ID NO: 38221 - RNA, 18 nt, Artificial Sequence
  Synthetic oligonucleotide: CBLB-7925
cgggaacgaaaguggaaa

SEQ ID NO: 38222 - RNA, 19 nt, Artificial Sequence
  Synthetic oligonucleotide: CBLB-7926
ccgggaacgaaaguggaaa

SEQ ID NO: 38223 - RNA, 20 nt, Artificial Sequence
  Synthetic oligonucleotide: CBLB-7203
cccgggaacgaaaguggaaa

SEQ ID NO: 38224 - RNA, 21 nt, Artificial Sequence
  Synthetic oligonucleotide: CBLB-7927
ucccgggaacgaaaguggaaa

SEQ ID NO: 38225 - RNA, 22 nt, Artificial Sequence
  Synthetic oligonucleotide: CBLB-7928
cucccgggaacgaaaguggaaa

SEQ ID NO: 38226 - RNA, 23 nt, Artificial Sequence
  Synthetic oligonucleotide: CBLB-7929
ucucccgggaacgaaaguggaaa

SEQ ID NO: 38227 - RNA, 24 nt, Artificial Sequence
  Synthetic oligonucleotide: CBLB-7930
cucucccgggaacgaaaguggaaa

SEQ ID NO: 38228 - RNA, 18 nt, Artificial Sequence
  Synthetic oligonucleotide: CBLB-7931
gugacaucugaaugccaa

SEQ ID NO: 38229 - RNA, 19 nt, Artificial Sequence
  Synthetic oligonucleotide: CBLB-7932
ggugacaucugaaugccaa

SEQ ID NO: 38230 - RNA, 20 nt, Artificial Sequence
  Synthetic oligonucleotide: CBLB-7933
gggugacaucugaaugccaa

SEQ ID NO: 38231 - RNA, 21 nt, Artificial Sequence
  Synthetic oligonucleotide: CBLB-7934
ggggugacaucugaaugccaa

SEQ ID NO: 38232 - RNA, 22 nt, Artificial Sequence
  Synthetic oligonucleotide: CBLB-7935
uggggugacaucugaaugccaa

SEQ ID NO: 38233 - RNA, 23 nt, Artificial Sequence
  Synthetic oligonucleotide: CBLB-7936
cuggggugacaucugaaugccaa

SEQ ID NO: 38234 - RNA, 24 nt, Artificial Sequence
  Synthetic oligonucleotide: CBLB-7937
gcuggggugacaucugaaugccaa

SEQ ID NO: 38235 - RNA, 18 nt, Artificial Sequence
  Synthetic oligonucleotide: CBLB-7938
aauuggacucggagagaa

SEQ ID NO: 38236 - RNA, 19 nt, Artificial Sequence
  Synthetic oligonucleotide: CBLB-7939
gaauuggacucggagagaa

SEQ ID NO: 38237 - RNA, 20 nt, Artificial Sequence
  Synthetic oligonucleotide: CBLB-7940
ggaauuggacucggagagaa

SEQ ID NO: 38238 - RNA, 21 nt, Artificial Sequence
  Synthetic oligonucleotide: CBLB-7941
aggaauuggacucggagagaa

SEQ ID NO: 38239 - RNA, 22 nt, Artificial Sequence
  Synthetic oligonucleotide: CBLB-7942
aaggaauuggacucggagagaa

SEQ ID NO: 38240 - RNA, 23 nt, Artificial Sequence
  Synthetic oligonucleotide: CBLB-7943
aaaggaauuggacucggagagaa

SEQ ID NO: 38241 - RNA, 24 nt, Artificial Sequence
  Synthetic oligonucleotide: CBLB-7944
gaaaggaauuggacucggagagaa

SEQ ID NO: 38242 - RNA, 18 nt, Artificial Sequence
  Synthetic oligonucleotide: CBLB-7945
cagcacgucagaaaggaa

SEQ ID NO: 38243 - RNA, 19 nt, Artificial Sequence
  Synthetic oligonucleotide: CBLB-7946
gcagcacgucagaaaggaa

SEQ ID NO: 38244 - RNA, 20 nt, Artificial Sequence
  Synthetic oligonucleotide: CBLB-7947
cgcagcacgucagaaaggaa

SEQ ID NO: 38245 - RNA, 21 nt, Artificial Sequence
  Synthetic oligonucleotide: CBLB-7948
ucgcagcacgucagaaaggaa

SEQ ID NO: 38246 - RNA, 22 nt, Artificial Sequence
  Synthetic oligonucleotide: CBLB-7949
cucgcagcacgucagaaaggaa

SEQ ID NO: 38247 - RNA, 23 nt, Artificial Sequence
  Synthetic oligonucleotide: CBLB-7950
gcucgcagcacgucagaaaggaa

SEQ ID NO: 38248 - RNA, 24 nt, Artificial Sequence
  Synthetic oligonucleotide: CBLB-7951
cgcucgcagcacgucagaaaggaa

SEQ ID NO: 38249 - RNA, 18 nt, Artificial Sequence
  Synthetic oligonucleotide: CBLB-7952
guggaaacgggaaaggaa

SEQ ID NO: 38250 - RNA, 19 nt, Artificial Sequence
  Synthetic oligonucleotide: CBLB-7953
aguggaaacgggaaaggaa

SEQ ID NO: 38251 - RNA, 20 nt, Artificial Sequence
  Synthetic oligonucleotide: CBLB-7954
aaguggaaacgggaaaggaa

SEQ ID NO: 38252 - RNA, 21 nt, Artificial Sequence
  Synthetic oligonucleotide: CBLB-7955
aaaguggaaacgggaaaggaa

SEQ ID NO: 38253 - RNA, 22 nt, Artificial Sequence
  Synthetic oligonucleotide: CBLB-7956
gaaaguggaaacgggaaaggaa

SEQ ID NO: 38254 - RNA, 23 nt, Artificial Sequence
  Synthetic oligonucleotide: CBLB-7957
cgaaaguggaaacgggaaaggaa

SEQ ID NO: 38255 - RNA, 24 nt, Artificial Sequence
  Synthetic oligonucleotide: CBLB-7958
acgaaaguggaaacgggaaaggaa

SEQ ID NO: 38256 - RNA, 18 nt, Artificial Sequence
  Synthetic oligonucleotide: CBLB-7959
cgaaaguggaaacgggaa

SEQ ID NO: 38257 - RNA, 19 nt, Artificial Sequence
  Synthetic oligonucleotide: CBLB-7960
acgaaaguggaaacgggaa

SEQ ID NO: 38258 - RNA, 20 nt, Artificial Sequence
  Synthetic oligonucleotide: CBLB-7377
aacgaaaguggaaacgggaa

SEQ ID NO: 38259 - RNA, 21 nt, Artificial Sequence
  Synthetic oligonucleotide: CBLB-7961
gaacgaaaguggaaacgggaa

SEQ ID NO: 38260 - RNA, 22 nt, Artificial Sequence
  Synthetic oligonucleotide: CBLB-7962
ggaacgaaaguggaaacgggaa

SEQ ID NO: 38261 - RNA, 23 nt, Artificial Sequence
  Synthetic oligonucleotide: CBLB-7963
gggaacgaaaguggaaacgggaa

SEQ ID NO: 38262 - RNA, 24 nt, Artificial Sequence
  Synthetic oligonucleotide: CBLB-7964
cgggaacgaaaguggaaacgggaa

SEQ ID NO: 38263 - RNA, 18 nt, Artificial Sequence
  Synthetic oligonucleotide: CBLB-7965
ccgggaacgaaaguggaa

SEQ ID NO: 38264 - RNA, 19 nt, Artificial Sequence
  Synthetic oligonucleotide: CBLB-7966
cccgggaacgaaaguggaa

SEQ ID NO: 38265 - RNA, 20 nt, Artificial Sequence
  Synthetic oligonucleotide: CBLB-7967
ucccgggaacgaaaguggaa

SEQ ID NO: 38266 - RNA, 21 nt, Artificial Sequence
  Synthetic oligonucleotide: CBLB-7968
cucccgggaacgaaaguggaa

SEQ ID NO: 38267 - RNA, 22 nt, Artificial Sequence
  Synthetic oligonucleotide: CBLB-7969
ucucccgggaacgaaaguggaa

SEQ ID NO: 38268 - RNA, 23 nt, Artificial Sequence
  Synthetic oligonucleotide: CBLB-7970
cucucccgggaacgaaaguggaa

SEQ ID NO: 38269 - RNA, 24 nt, Artificial Sequence
  Synthetic oligonucleotide: CBLB-7971
acucucccgggaacgaaaguggaa

SEQ ID NO: 38270 - RNA, 18 nt, Artificial Sequence
  Synthetic oligonucleotide: CBLB-7972
aauaaaaguaccagauaa

SEQ ID NO: 38271 - RNA, 19 nt, Artificial Sequence
  Synthetic oligonucleotide: CBLB-7973
caauaaaaguaccagauaa

SEQ ID NO: 38272 - RNA, 20 nt, Artificial Sequence
  Synthetic oligonucleotide: CBLB-7380
gcaauaaaaguaccagauaa

SEQ ID NO: 38273 - RNA, 21 nt, Artificial Sequence
  Synthetic oligonucleotide: CBLB-7974
agcaauaaaaguaccagauaa

SEQ ID NO: 38274 - RNA, 22 nt, Artificial Sequence
  Synthetic oligonucleotide: CBLB-7975
aagcaauaaaaguaccagauaa

SEQ ID NO: 38275 - RNA, 23 nt, Artificial Sequence
  Synthetic oligonucleotide: CBLB-7976
aaagcaauaaaaguaccagauaa

SEQ ID NO: 38276 - RNA, 24 nt, Artificial Sequence
  Synthetic oligonucleotide: CBLB-7977
caaagcaauaaaaguaccagauaa

SEQ ID NO: 38277 - RNA, 18 nt, Artificial Sequence
  Synthetic oligonucleotide: CBLB-7978
caguacacaauggcccca

SEQ ID NO: 38278 - RNA, 19 nt, Artificial Sequence
  Synthetic oligonucleotide: CBLB-7979
acaguacacaauggcccca

SEQ ID NO: 38279 - RNA, 20 nt, Artificial Sequence
  Synthetic oligonucleotide: CBLB-7980
cacaguacacaauggcccca

SEQ ID NO: 38280 - RNA, 21 nt, Artificial Sequence
  Synthetic oligonucleotide: CBLB-7981
ccacaguacacaauggcccca

SEQ ID NO: 38281 - RNA, 22 nt, Artificial Sequence
  Synthetic oligonucleotide: CBLB-7982
uccacaguacacaauggcccca

SEQ ID NO: 38282 - RNA, 23 nt, Artificial Sequence
  Synthetic oligonucleotide: CBLB-7983
cuccacaguacacaauggcccca

SEQ ID NO: 38283 - RNA, 24 nt, Artificial Sequence
  Synthetic oligonucleotide: CBLB-7984
ccuccacaguacacaauggcccca

SEQ ID NO: 38284 - RNA, 18 nt, Artificial Sequence
  Synthetic oligonucleotide: CBLB-7985
caaaaagagcaacagcca

SEQ ID NO: 38285 - RNA, 19 nt, Artificial Sequence
  Synthetic oligonucleotide: CBLB-7986
ucaaaaagagcaacagcca

SEQ ID NO: 38286 - RNA, 20 nt, Artificial Sequence
  Synthetic oligonucleotide: CBLB-7987
aucaaaaagagcaacagcca

SEQ ID NO: 38287 - RNA, 21 nt, Artificial Sequence
  Synthetic oligonucleotide: CBLB-7988
uaucaaaaagagcaacagcca

SEQ ID NO: 38288 - RNA, 22 nt, Artificial Sequence
  Synthetic oligonucleotide: CBLB-7989
cuaucaaaaagagcaacagcca

SEQ ID NO: 38289 - RNA, 23 nt, Artificial Sequence
  Synthetic oligonucleotide: CBLB-7990
gcuaucaaaaagagcaacagcca

SEQ ID NO: 38290 - RNA, 24 nt, Artificial Sequence
  Synthetic oligonucleotide: CBLB-7991
ggcuaucaaaaagagcaacagcca

SEQ ID NO: 38291 - RNA, 18 nt, Artificial Sequence
  Synthetic oligonucleotide: CBLB-7992
cgacagcgggugcagcca

SEQ ID NO: 38292 - RNA, 19 nt, Artificial Sequence
  Synthetic oligonucleotide: CBLB-7993
ccgacagcgggugcagcca

SEQ ID NO: 38293 - RNA, 20 nt, Artificial Sequence
  Synthetic oligonucleotide: CBLB-7994
cccgacagcgggugcagcca

SEQ ID NO: 38294 - RNA, 21 nt, Artificial Sequence
  Synthetic oligonucleotide: CBLB-7995
gcccgacagcgggugcagcca

SEQ ID NO: 38295 - RNA, 22 nt, Artificial Sequence
  Synthetic oligonucleotide: CBLB-7996
ugcccgacagcgggugcagcca

SEQ ID NO: 38296 - RNA, 23 nt, Artificial Sequence
  Synthetic oligonucleotide: CBLB-7997
cugcccgacagcgggugcagcca

SEQ ID NO: 38297 - RNA, 24 nt, Artificial Sequence
  Synthetic oligonucleotide: CBLB-7998
acugcccgacagcgggugcagcca

SEQ ID NO: 38298 - RNA, 18 nt, Artificial Sequence
  Synthetic oligonucleotide: CBLB-7999
aaugcagaauaaaucuca

SEQ ID NO: 38299 - RNA, 19 nt, Artificial Sequence
  Synthetic oligonucleotide: CBLB-8000
aaaugcagaauaaaucuca

SEQ ID NO: 38300 - RNA, 20 nt, Artificial Sequence
  Synthetic oligonucleotide: CBLB-8001
aaaaugcagaauaaaucuca

SEQ ID NO: 38301 - RNA, 21 nt, Artificial Sequence
  Synthetic oligonucleotide: CBLB-8002
uaaaaugcagaauaaaucuca

SEQ ID NO: 38302 - RNA, 22 nt, Artificial Sequence
  Synthetic oligonucleotide: CBLB-8003
cuaaaaugcagaauaaaucuca

SEQ ID NO: 38303 - RNA, 23 nt, Artificial Sequence
  Synthetic oligonucleotide: CBLB-8004
ucuaaaaugcagaauaaaucuca

SEQ ID NO: 38304 - RNA, 24 nt, Artificial Sequence
  Synthetic oligonucleotide: CBLB-8005
uucuaaaaugcagaauaaaucuca

SEQ ID NO: 38305 - RNA, 18 nt, Artificial Sequence
  Synthetic oligonucleotide: CBLB-8006
cgcucgcagcacgucaga

SEQ ID NO: 38306 - RNA, 19 nt, Artificial Sequence
  Synthetic oligonucleotide: CBLB-8007
ccgcucgcagcacgucaga

SEQ ID NO: 38307 - RNA, 20 nt, Artificial Sequence
  Synthetic oligonucleotide: CBLB-8008
cccgcucgcagcacgucaga

SEQ ID NO: 38308 - RNA, 21 nt, Artificial Sequence
  Synthetic oligonucleotide: CBLB-8009
gcccgcucgcagcacgucaga

SEQ ID NO: 38309 - RNA, 22 nt, Artificial Sequence
  Synthetic oligonucleotide: CBLB-8010
ggcccgcucgcagcacgucaga

SEQ ID NO: 38310 - RNA, 23 nt, Artificial Sequence
  Synthetic oligonucleotide: CBLB-8011
aggcccgcucgcagcacgucaga

SEQ ID NO: 38311 - RNA, 24 nt, Artificial Sequence
  Synthetic oligonucleotide: CBLB-8012
aaggcccgcucgcagcacgucaga

SEQ ID NO: 38312 - RNA, 18 nt, Artificial Sequence
  Synthetic oligonucleotide: CBLB-8013
aagggaugcaaggcacga

SEQ ID NO: 38313 - RNA, 19 nt, Artificial Sequence
  Synthetic oligonucleotide: CBLB-8014
gaagggaugcaaggcacga

SEQ ID NO: 38314 - RNA, 20 nt, Artificial Sequence
  Synthetic oligonucleotide: CBLB-7207
cgaagggaugcaaggcacga

SEQ ID NO: 38315 - RNA, 21 nt, Artificial Sequence
  Synthetic oligonucleotide: CBLB-8015
acgaagggaugcaaggcacga

SEQ ID NO: 38316 - RNA, 22 nt, Artificial Sequence
  Synthetic oligonucleotide: CBLB-8016
gacgaagggaugcaaggcacga

SEQ ID NO: 38317 - RNA, 23 nt, Artificial Sequence
  Synthetic oligonucleotide: CBLB-8017
ggacgaagggaugcaaggcacga

SEQ ID NO: 38318 - RNA, 24 nt, Artificial Sequence
  Synthetic oligonucleotide: CBLB-8018
uggacgaagggaugcaaggcacga

SEQ ID NO: 38319 - RNA, 18 nt, Artificial Sequence
  Synthetic oligonucleotide: CBLB-8019
aaaggaauuggacucgga

SEQ ID NO: 38320 - RNA, 19 nt, Artificial Sequence
  Synthetic oligonucleotide: CBLB-8020
gaaaggaauuggacucgga

SEQ ID NO: 38321 - RNA, 20 nt, Artificial Sequence
  Synthetic oligonucleotide: CBLB-8021
agaaaggaauuggacucgga

SEQ ID NO: 38322 - RNA, 21 nt, Artificial Sequence
  Synthetic oligonucleotide: CBLB-8022
cagaaaggaauuggacucgga

SEQ ID NO: 38323 - RNA, 22 nt, Artificial Sequence
  Synthetic oligonucleotide: CBLB-8023
ucagaaaggaauuggacucgga

SEQ ID NO: 38324 - RNA, 23 nt, Artificial Sequence
  Synthetic oligonucleotide: CBLB-8024
gucagaaaggaauuggacucgga

SEQ ID NO: 38325 - RNA, 24 nt, Artificial Sequence
  Synthetic oligonucleotide: CBLB-8025
cgucagaaaggaauuggacucgga

SEQ ID NO: 38326 - RNA, 18 nt, Artificial Sequence
  Synthetic oligonucleotide: CBLB-8026
acgaaaguggaaacggga

SEQ ID NO: 38327 - RNA, 19 nt, Artificial Sequence
  Synthetic oligonucleotide: CBLB-8027
aacgaaaguggaaacggga

SEQ ID NO: 38328 - RNA, 20 nt, Artificial Sequence
  Synthetic oligonucleotide: CBLB-8028
gaacgaaaguggaaacggga

SEQ ID NO: 38329 - RNA, 21 nt, Artificial Sequence
  Synthetic oligonucleotide: CBLB-8029
ggaacgaaaguggaaacggga

SEQ ID NO: 38330 - RNA, 22 nt, Artificial Sequence
  Synthetic oligonucleotide: CBLB-8030
gggaacgaaaguggaaacggga

SEQ ID NO: 38331 - RNA, 23 nt, Artificial Sequence
  Synthetic oligonucleotide: CBLB-8031
cgggaacgaaaguggaaacggga

SEQ ID NO: 38332 - RNA, 24 nt, Artificial Sequence
  Synthetic oligonucleotide: CBLB-8032
ccgggaacgaaaguggaaacggga

SEQ ID NO: 38333 - RNA, 18 nt, Artificial Sequence
  Synthetic oligonucleotide: CBLB-8033
gccuggacucucccggga

SEQ ID NO: 38334 - RNA, 19 nt, Artificial Sequence
  Synthetic oligonucleotide: CBLB-8034
ggccuggacucucccggga

SEQ ID NO: 38335 - RNA, 20 nt, Artificial Sequence
  Synthetic oligonucleotide: CBLB-8035
gggccuggacucucccggga

SEQ ID NO: 38336 - RNA, 21 nt, Artificial Sequence
  Synthetic oligonucleotide: CBLB-8036
ggggccuggacucucccggga

SEQ ID NO: 38337 - RNA, 22 nt, Artificial Sequence
  Synthetic oligonucleotide: CBLB-8037
aggggccuggacucucccggga

SEQ ID NO: 38338 - RNA, 23 nt, Artificial Sequence
  Synthetic oligonucleotide: CBLB-8038
gaggggccuggacucucccggga

SEQ ID NO: 38339 - RNA, 24 nt, Artificial Sequence
  Synthetic oligonucleotide: CBLB-8039
ugaggggccuggacucucccggga

SEQ ID NO: 38340 - RNA, 18 nt, Artificial Sequence
  Synthetic oligonucleotide: CBLB-8040
ugggcgugagcgucggga

SEQ ID NO: 38341 - RNA, 19 nt, Artificial Sequence
  Synthetic oligonucleotide: CBLB-8041
gugggcgugagcgucggga

SEQ ID NO: 38342 - RNA, 20 nt, Artificial Sequence
  Synthetic oligonucleotide: CBLB-8042
ggugggcgugagcgucggga

SEQ ID NO: 38343 - RNA, 21 nt, Artificial Sequence
  Synthetic oligonucleotide: CBLB-8043
aggugggcgugagcgucggga

SEQ ID NO: 38344 - RNA, 22 nt, Artificial Sequence
  Synthetic oligonucleotide: CBLB-8044
caggugggcgugagcgucggga

SEQ ID NO: 38345 - RNA, 23 nt, Artificial Sequence
  Synthetic oligonucleotide: CBLB-8045
gcaggugggcgugagcgucggga

SEQ ID NO: 38346 - RNA, 24 nt, Artificial Sequence
  Synthetic oligonucleotide: CBLB-8046
ggcaggugggcgugagcgucggga

SEQ ID NO: 38347 - RNA, 18 nt, Artificial Sequence
  Synthetic oligonucleotide: CBLB-8047
gcgggugcagccaaugga

SEQ ID NO: 38348 - RNA, 19 nt, Artificial Sequence
  Synthetic oligonucleotide: CBLB-8048
agcgggugcagccaaugga

SEQ ID NO: 38349 - RNA, 20 nt, Artificial Sequence
  Synthetic oligonucleotide: CBLB-7392
cagcgggugcagccaaugga

SEQ ID NO: 38350 - RNA, 21 nt, Artificial Sequence
  Synthetic oligonucleotide: CBLB-8049
acagcgggugcagccaaugga

SEQ ID NO: 38351 - RNA, 22 nt, Artificial Sequence
  Synthetic oligonucleotide: CBLB-8050
gacagcgggugcagccaaugga

SEQ ID NO: 38352 - RNA, 23 nt, Artificial Sequence
  Synthetic oligonucleotide: CBLB-8051
cgacagcgggugcagccaaugga

SEQ ID NO: 38353 - RNA, 24 nt, Artificial Sequence
  Synthetic oligonucleotide: CBLB-8052
ccgacagcgggugcagccaaugga

SEQ ID NO: 38354 - RNA, 18 nt, Artificial Sequence
  Synthetic oligonucleotide: CBLB-8053
aaguuucugccuaaauga

SEQ ID NO: 38355 - RNA, 19 nt, Artificial Sequence
  Synthetic oligonucleotide: CBLB-8054
caaguuucugccuaaauga

SEQ ID NO: 38356 - RNA, 20 nt, Artificial Sequence
  Synthetic oligonucleotide: CBLB-8055
gcaaguuucugccuaaauga

SEQ ID NO: 38357 - RNA, 21 nt, Artificial Sequence
  Synthetic oligonucleotide: CBLB-8056
ugcaaguuucugccuaaauga

SEQ ID NO: 38358 - RNA, 22 nt, Artificial Sequence
  Synthetic oligonucleotide: CBLB-8057
gugcaaguuucugccuaaauga

SEQ ID NO: 38359 - RNA, 23 nt, Artificial Sequence
  Synthetic oligonucleotide: CBLB-8058
agugcaaguuucugccuaaauga

SEQ ID NO: 38360 - RNA, 24 nt, Artificial Sequence
  Synthetic oligonucleotide: CBLB-8059
uagugcaaguuucugccuaaauga

SEQ ID NO: 38361 - RNA, 18 nt, Artificial Sequence
  Synthetic oligonucleotide: CBLB-8060
caauaaaaguaccagaua

SEQ ID NO: 38362 - RNA, 19 nt, Artificial Sequence
  Synthetic oligonucleotide: CBLB-8061
gcaauaaaaguaccagaua

SEQ ID NO: 38363 - RNA, 20 nt, Artificial Sequence
  Synthetic oligonucleotide: CBLB-8062
agcaauaaaaguaccagaua

SEQ ID NO: 38364 - RNA, 21 nt, Artificial Sequence
  Synthetic oligonucleotide: CBLB-8063
aagcaauaaaaguaccagaua

SEQ ID NO: 38365 - RNA, 22 nt, Artificial Sequence
  Synthetic oligonucleotide: CBLB-8064
aaagcaauaaaaguaccagaua

SEQ ID NO: 38366 - RNA, 23 nt, Artificial Sequence
  Synthetic oligonucleotide: CBLB-8065
caaagcaauaaaaguaccagaua

SEQ ID NO: 38367 - RNA, 24 nt, Artificial Sequence
  Synthetic oligonucleotide: CBLB-8066
ccaaagcaauaaaaguaccagaua

SEQ ID NO: 38368 - RNA, 18 nt, Artificial Sequence
  Synthetic oligonucleotide: CBLB-8067
cuuuugcuguuaguuuua

SEQ ID NO: 38369 - RNA, 19 nt, Artificial Sequence
  Synthetic oligonucleotide: CBLB-8068
ucuuuugcuguuaguuuua

SEQ ID NO: 38370 - RNA, 20 nt, Artificial Sequence
  Synthetic oligonucleotide: CBLB-8069
cucuuuugcuguuaguuuua

SEQ ID NO: 38371 - RNA, 21 nt, Artificial Sequence
  Synthetic oligonucleotide: CBLB-8070
ucucuuuugcuguuaguuuua

SEQ ID NO: 38372 - RNA, 22 nt, Artificial Sequence
  Synthetic oligonucleotide: CBLB-8071
uucucuuuugcuguuaguuuua

SEQ ID NO: 38373 - RNA, 23 nt, Artificial Sequence
  Synthetic oligonucleotide: CBLB-8072
uuucucuuuugcuguuaguuuua

SEQ ID NO: 38374 - RNA, 24 nt, Artificial Sequence
  Synthetic oligonucleotide: CBLB-8073
guuucucuuuugcuguuaguuuua

SEQ ID NO: 38375 - RNA, 18 nt, Artificial Sequence
  Synthetic oligonucleotide: CBLB-8074
gggaacgaaaguggaaac

SEQ ID NO: 38376 - RNA, 19 nt, Artificial Sequence
  Synthetic oligonucleotide: CBLB-8075
cgggaacgaaaguggaaac

SEQ ID NO: 38377 - RNA, 20 nt, Artificial Sequence
  Synthetic oligonucleotide: CBLB-7209
ccgggaacgaaaguggaaac

SEQ ID NO: 38378 - RNA, 21 nt, Artificial Sequence
  Synthetic oligonucleotide: CBLB-8076
cccgggaacgaaaguggaaac

SEQ ID NO: 38379 - RNA, 22 nt, Artificial Sequence
  Synthetic oligonucleotide: CBLB-8077
ucccgggaacgaaaguggaaac

SEQ ID NO: 38380 - RNA, 23 nt, Artificial Sequence
  Synthetic oligonucleotide: CBLB-8078
cucccgggaacgaaaguggaaac

SEQ ID NO: 38381 - RNA, 24 nt, Artificial Sequence
  Synthetic oligonucleotide: CBLB-8079
ucucccgggaacgaaaguggaaac

SEQ ID NO: 38382 - RNA, 18 nt, Artificial Sequence
  Synthetic oligonucleotide: CBLB-8080
gggcgugagcgucgggac

SEQ ID NO: 38383 - RNA, 19 nt, Artificial Sequence
  Synthetic oligonucleotide: CBLB-8081
ugggcgugagcgucgggac

SEQ ID NO: 38384 - RNA, 20 nt, Artificial Sequence
  Synthetic oligonucleotide: CBLB-7210
gugggcgugagcgucgggac

SEQ ID NO: 38385 - RNA, 21 nt, Artificial Sequence
  Synthetic oligonucleotide: CBLB-8082
ggugggcgugagcgucgggac

SEQ ID NO: 38386 - RNA, 22 nt, Artificial Sequence
  Synthetic oligonucleotide: CBLB-8083
aggugggcgugagcgucgggac

SEQ ID NO: 38387 - RNA, 23 nt, Artificial Sequence
  Synthetic oligonucleotide: CBLB-8084
caggugggcgugagcgucgggac

SEQ ID NO: 38388 - RNA, 24 nt, Artificial Sequence
  Synthetic oligonucleotide: CBLB-8085
gcaggugggcgugagcgucgggac

SEQ ID NO: 38389 - RNA, 18 nt, Artificial Sequence
  Synthetic oligonucleotide: CBLB-8086
cgggugcagccaauggac

SEQ ID NO: 38390 - RNA, 19 nt, Artificial Sequence
  Synthetic oligonucleotide: CBLB-8087
gcgggugcagccaauggac

SEQ ID NO: 38391 - RNA, 20 nt, Artificial Sequence
  Synthetic oligonucleotide: CBLB-7401
agcgggugcagccaauggac

SEQ ID NO: 38392 - RNA, 21 nt, Artificial Sequence
  Synthetic oligonucleotide: CBLB-8088
cagcgggugcagccaauggac

SEQ ID NO: 38393 - RNA, 22 nt, Artificial Sequence
  Synthetic oligonucleotide: CBLB-8089
acagcgggugcagccaauggac

SEQ ID NO: 38394 - RNA, 23 nt, Artificial Sequence
  Synthetic oligonucleotide: CBLB-8090
gacagcgggugcagccaauggac

SEQ ID NO: 38395 - RNA, 24 nt, Artificial Sequence
  Synthetic oligonucleotide: CBLB-8091
cgacagcgggugcagccaauggac

SEQ ID NO: 38396 - RNA, 18 nt, Artificial Sequence
  Synthetic oligonucleotide: CBLB-8092
gucagaaaggaauuggac

SEQ ID NO: 38397 - RNA, 19 nt, Artificial Sequence
  Synthetic oligonucleotide: CBLB-8093
cgucagaaaggaauuggac

SEQ ID NO: 38398 - RNA, 20 nt, Artificial Sequence
  Synthetic oligonucleotide: CBLB-8094
acgucagaaaggaauuggac

SEQ ID NO: 38399 - RNA, 21 nt, Artificial Sequence
  Synthetic oligonucleotide: CBLB-8095
cacgucagaaaggaauuggac

SEQ ID NO: 38400 - RNA, 22 nt, Artificial Sequence
  Synthetic oligonucleotide: CBLB-8096
gcacgucagaaaggaauuggac

SEQ ID NO: 38401 - RNA, 23 nt, Artificial Sequence
  Synthetic oligonucleotide: CBLB-8097
agcacgucagaaaggaauuggac

SEQ ID NO: 38402 - RNA, 24 nt, Artificial Sequence
  Synthetic oligonucleotide: CBLB-8098
cagcacgucagaaaggaauuggac

SEQ ID NO: 38403 - RNA, 18 nt, Artificial Sequence
  Synthetic oligonucleotide: CBLB-8099
ggcgugagcgucgggacc

SEQ ID NO: 38404 - RNA, 19 nt, Artificial Sequence
  Synthetic oligonucleotide: CBLB-8100
gggcgugagcgucgggacc

SEQ ID NO: 38405 - RNA, 20 nt, Artificial Sequence
  Synthetic oligonucleotide: CBLB-7211
ugggcgugagcgucgggacc

SEQ ID NO: 38406 - RNA, 21 nt, Artificial Sequence
  Synthetic oligonucleotide: CBLB-8101
gugggcgugagcgucgggacc

SEQ ID NO: 38407 - RNA, 22 nt, Artificial Sequence
  Synthetic oligonucleotide: CBLB-8102
ggugggcgugagcgucgggacc

SEQ ID NO: 38408 - RNA, 23 nt, Artificial Sequence
  Synthetic oligonucleotide: CBLB-8103
aggugggcgugagcgucgggacc

SEQ ID NO: 38409 - RNA, 24 nt, Artificial Sequence
  Synthetic oligonucleotide: CBLB-8104
caggugggcgugagcgucgggacc

SEQ ID NO: 38410 - RNA, 18 nt, Artificial Sequence
  Synthetic oligonucleotide: CBLB-8105
cugccaaacccuucuacc

SEQ ID NO: 38411 - RNA, 19 nt, Artificial Sequence
  Synthetic oligonucleotide: CBLB-8106
gcugccaaacccuucuacc

SEQ ID NO: 38412 - RNA, 20 nt, Artificial Sequence
  Synthetic oligonucleotide: CBLB-8107
ggcugccaaacccuucuacc

SEQ ID NO: 38413 - RNA, 21 nt, Artificial Sequence
  Synthetic oligonucleotide: CBLB-8108
gggcugccaaacccuucuacc

SEQ ID NO: 38414 - RNA, 22 nt, Artificial Sequence
  Synthetic oligonucleotide: CBLB-8109
agggcugccaaacccuucuacc

SEQ ID NO: 38415 - RNA, 23 nt, Artificial Sequence
  Synthetic oligonucleotide: CBLB-8110
uagggcugccaaacccuucuacc

SEQ ID NO: 38416 - RNA, 24 nt, Artificial Sequence
  Synthetic oligonucleotide: CBLB-8111
cuagggcugccaaacccuucuacc

SEQ ID NO: 38417 - RNA, 18 nt, Artificial Sequence
  Synthetic oligonucleotide: CBLB-8112
cacaguacacaauggccc

SEQ ID NO: 38418 - RNA, 19 nt, Artificial Sequence
  Synthetic oligonucleotide: CBLB-8113
ccacaguacacaauggccc

SEQ ID NO: 38419 - RNA, 20 nt, Artificial Sequence
  Synthetic oligonucleotide: CBLB-8114
uccacaguacacaauggccc

SEQ ID NO: 38420 - RNA, 21 nt, Artificial Sequence
  Synthetic oligonucleotide: CBLB-8115
cuccacaguacacaauggccc

SEQ ID NO: 38421 - RNA, 22 nt, Artificial Sequence
  Synthetic oligonucleotide: CBLB-8116
ccuccacaguacacaauggccc

SEQ ID NO: 38422 - RNA, 23 nt, Artificial Sequence
  Synthetic oligonucleotide: CBLB-8117
uccuccacaguacacaauggccc

SEQ ID NO: 38423 - RNA, 24 nt, Artificial Sequence
  Synthetic oligonucleotide: CBLB-8118
guccuccacaguacacaauggccc

SEQ ID NO: 38424 - RNA, 18 nt, Artificial Sequence
  Synthetic oligonucleotide: CBLB-8119
uggagaaauucaucuccc

SEQ ID NO: 38425 - RNA, 19 nt, Artificial Sequence
  Synthetic oligonucleotide: CBLB-8120
cuggagaaauucaucuccc

SEQ ID NO: 38426 - RNA, 20 nt, Artificial Sequence
  Synthetic oligonucleotide: CBLB-8121
gcuggagaaauucaucuccc

SEQ ID NO: 38427 - RNA, 21 nt, Artificial Sequence
  Synthetic oligonucleotide: CBLB-8122
cgcuggagaaauucaucuccc

SEQ ID NO: 38428 - RNA, 22 nt, Artificial Sequence
  Synthetic oligonucleotide: CBLB-8123
acgcuggagaaauucaucuccc

SEQ ID NO: 38429 - RNA, 23 nt, Artificial Sequence
  Synthetic oligonucleotide: CBLB-8124
aacgcuggagaaauucaucuccc

SEQ ID NO: 38430 - RNA, 24 nt, Artificial Sequence
  Synthetic oligonucleotide: CBLB-8125
caacgcuggagaaauucaucuccc

SEQ ID NO: 38431 - RNA, 18 nt, Artificial Sequence
  Synthetic oligonucleotide: CBLB-8126
aggggccuggacucuccc

SEQ ID NO: 38432 - RNA, 19 nt, Artificial Sequence
  Synthetic oligonucleotide: CBLB-8127
gaggggccuggacucuccc

SEQ ID NO: 38433 - RNA, 20 nt, Artificial Sequence
  Synthetic oligonucleotide: CBLB-7404
ugaggggccuggacucuccc

SEQ ID NO: 38434 - RNA, 21 nt, Artificial Sequence
  Synthetic oligonucleotide: CBLB-8128
augaggggccuggacucuccc

SEQ ID NO: 38435 - RNA, 22 nt, Artificial Sequence
  Synthetic oligonucleotide: CBLB-8129
aaugaggggccuggacucuccc

SEQ ID NO: 38436 - RNA, 23 nt, Artificial Sequence
  Synthetic oligonucleotide: CBLB-8130
aaaugaggggccuggacucuccc

SEQ ID NO: 38437 - RNA, 24 nt, Artificial Sequence
  Synthetic oligonucleotide: CBLB-8131
gaaaugaggggccuggacucuccc

SEQ ID NO: 38438 - RNA, 18 nt, Artificial Sequence
  Synthetic oligonucleotide: CBLB-8132
gaggggccuggacucucc

SEQ ID NO: 38439 - RNA, 19 nt, Artificial Sequence
  Synthetic oligonucleotide: CBLB-8133
ugaggggccuggacucucc

SEQ ID NO: 38440 - RNA, 20 nt, Artificial Sequence
  Synthetic oligonucleotide: CBLB-7213
augaggggccuggacucucc

SEQ ID NO: 38441 - RNA, 21 nt, Artificial Sequence
  Synthetic oligonucleotide: CBLB-8134
aaugaggggccuggacucucc

SEQ ID NO: 38442 - RNA, 22 nt, Artificial Sequence
  Synthetic oligonucleotide: CBLB-8135
aaaugaggggccuggacucucc

SEQ ID NO: 38443 - RNA, 23 nt, Artificial Sequence
  Synthetic oligonucleotide: CBLB-8136
gaaaugaggggccuggacucucc

SEQ ID NO: 38444 - RNA, 24 nt, Artificial Sequence
  Synthetic oligonucleotide: CBLB-8137
agaaaugaggggccuggacucucc

SEQ ID NO: 38445 - RNA, 18 nt, Artificial Sequence
  Synthetic oligonucleotide: CBLB-8138
ucugggcggguccaacgc

SEQ ID NO: 38446 - RNA, 19 nt, Artificial Sequence
  Synthetic oligonucleotide: CBLB-8139
cucugggcggguccaacgc

SEQ ID NO: 38447 - RNA, 20 nt, Artificial Sequence
  Synthetic oligonucleotide: CBLB-7219
gcucugggcggguccaacgc

SEQ ID NO: 38448 - RNA, 21 nt, Artificial Sequence
  Synthetic oligonucleotide: CBLB-8140
cgcucugggcggguccaacgc

SEQ ID NO: 38449 - RNA, 22 nt, Artificial Sequence
  Synthetic oligonucleotide: CBLB-8141
ccgcucugggcggguccaacgc

SEQ ID NO: 38450 - RNA, 23 nt, Artificial Sequence
  Synthetic oligonucleotide: CBLB-8142
uccgcucugggcggguccaacgc

SEQ ID NO: 38451 - RNA, 24 nt, Artificial Sequence
  Synthetic oligonucleotide: CBLB-8143
cuccgcucugggcggguccaacgc

SEQ ID NO: 38452 - RNA, 18 nt, Artificial Sequence
  Synthetic oligonucleotide: CBLB-8144
gacgaagggaugcaaggc

SEQ ID NO: 38453 - RNA, 19 nt, Artificial Sequence
  Synthetic oligonucleotide: CBLB-8145
ggacgaagggaugcaaggc

SEQ ID NO: 38454 - RNA, 20 nt, Artificial Sequence
  Synthetic oligonucleotide: CBLB-8146
uggacgaagggaugcaaggc

SEQ ID NO: 38455 - RNA, 21 nt, Artificial Sequence
  Synthetic oligonucleotide: CBLB-8147
auggacgaagggaugcaaggc

SEQ ID NO: 38456 - RNA, 22 nt, Artificial Sequence
  Synthetic oligonucleotide: CBLB-8148
aauggacgaagggaugcaaggc

SEQ ID NO: 38457 - RNA, 23 nt, Artificial Sequence
  Synthetic oligonucleotide: CBLB-8149
aaauggacgaagggaugcaaggc

SEQ ID NO: 38458 - RNA, 24 nt, Artificial Sequence
  Synthetic oligonucleotide: CBLB-8150
gaaauggacgaagggaugcaaggc

SEQ ID NO: 38459 - RNA, 18 nt, Artificial Sequence
  Synthetic oligonucleotide: CBLB-8151
cggagagaaaugaggggc

SEQ ID NO: 38460 - RNA, 19 nt, Artificial Sequence
  Synthetic oligonucleotide: CBLB-8152
ucggagagaaaugaggggc

SEQ ID NO: 38461 - RNA, 20 nt, Artificial Sequence
  Synthetic oligonucleotide: CBLB-8153
cucggagagaaaugaggggc

SEQ ID NO: 38462 - RNA, 21 nt, Artificial Sequence
  Synthetic oligonucleotide: CBLB-8154
acucggagagaaaugaggggc

SEQ ID NO: 38463 - RNA, 22 nt, Artificial Sequence
  Synthetic oligonucleotide: CBLB-8155
gacucggagagaaaugaggggc

SEQ ID NO: 38464 - RNA, 23 nt, Artificial Sequence
  Synthetic oligonucleotide: CBLB-8156
ggacucggagagaaaugaggggc

SEQ ID NO: 38465 - RNA, 24 nt, Artificial Sequence
  Synthetic oligonucleotide: CBLB-8157
uggacucggagagaaaugaggggc

SEQ ID NO: 38466 - RNA, 18 nt, Artificial Sequence
  Synthetic oligonucleotide: CBLB-8158
aagggguggcaggugggc

SEQ ID NO: 38467 - RNA, 19 nt, Artificial Sequence
  Synthetic oligonucleotide: CBLB-8159
uaagggguggcaggugggc

SEQ ID NO: 38468 - RNA, 20 nt, Artificial Sequence
  Synthetic oligonucleotide: CBLB-8160
auaagggguggcaggugggc

SEQ ID NO: 38469 - RNA, 21 nt, Artificial Sequence
  Synthetic oligonucleotide: CBLB-8161
aauaagggguggcaggugggc

SEQ ID NO: 38470 - RNA, 22 nt, Artificial Sequence
  Synthetic oligonucleotide: CBLB-8162
caauaagggguggcaggugggc

SEQ ID NO: 38471 - RNA, 23 nt, Artificial Sequence
  Synthetic oligonucleotide: CBLB-8163
ccaauaagggguggcaggugggc

SEQ ID NO: 38472 - RNA, 24 nt, Artificial Sequence
  Synthetic oligonucleotide: CBLB-8164
accaauaagggguggcaggugggc

SEQ ID NO: 38473 - RNA, 18 nt, Artificial Sequence
  Synthetic oligonucleotide: CBLB-8165
uagcaacagaguaguggc

SEQ ID NO: 38474 - RNA, 19 nt, Artificial Sequence
  Synthetic oligonucleotide: CBLB-8166
auagcaacagaguaguggc

SEQ ID NO: 38475 - RNA, 20 nt, Artificial Sequence
  Synthetic oligonucleotide: CBLB-7415
cauagcaacagaguaguggc

SEQ ID NO: 38476 - RNA, 21 nt, Artificial Sequence
  Synthetic oligonucleotide: CBLB-8167
ucauagcaacagaguaguggc

SEQ ID NO: 38477 - RNA, 22 nt, Artificial Sequence
  Synthetic oligonucleotide: CBLB-8168
uucauagcaacagaguaguggc

SEQ ID NO: 38478 - RNA, 23 nt, Artificial Sequence
  Synthetic oligonucleotide: CBLB-8169
uuucauagcaacagaguaguggc

SEQ ID NO: 38479 - RNA, 24 nt, Artificial Sequence
  Synthetic oligonucleotide: CBLB-8170
guuucauagcaacagaguaguggc

SEQ ID NO: 38480 - RNA, 18 nt, Artificial Sequence
  Synthetic oligonucleotide: CBLB-8171
ccgggagccaaagccauc

SEQ ID NO: 38481 - RNA, 19 nt, Artificial Sequence
  Synthetic oligonucleotide: CBLB-8172
accgggagccaaagccauc

SEQ ID NO: 38482 - RNA, 20 nt, Artificial Sequence
  Synthetic oligonucleotide: CBLB-7418
gaccgggagccaaagccauc

SEQ ID NO: 38483 - RNA, 21 nt, Artificial Sequence
  Synthetic oligonucleotide: CBLB-8173
ggaccgggagccaaagccauc

SEQ ID NO: 38484 - RNA, 22 nt, Artificial Sequence
  Synthetic oligonucleotide: CBLB-8174
gggaccgggagccaaagccauc

SEQ ID NO: 38485 - RNA, 23 nt, Artificial Sequence
  Synthetic oligonucleotide: CBLB-8175
cgggaccgggagccaaagccauc

SEQ ID NO: 38486 - RNA, 24 nt, Artificial Sequence
  Synthetic oligonucleotide: CBLB-8176
ucgggaccgggagccaaagccauc

SEQ ID NO: 38487 - RNA, 18 nt, Artificial Sequence
  Synthetic oligonucleotide: CBLB-8177
ugaggggccuggacucuc

SEQ ID NO: 38488 - RNA, 19 nt, Artificial Sequence
  Synthetic oligonucleotide: CBLB-8178
augaggggccuggacucuc

SEQ ID NO: 38489 - RNA, 20 nt, Artificial Sequence
  Synthetic oligonucleotide: CBLB-8179
aaugaggggccuggacucuc

SEQ ID NO: 38490 - RNA, 21 nt, Artificial Sequence
  Synthetic oligonucleotide: CBLB-8180
aaaugaggggccuggacucuc

SEQ ID NO: 38491 - RNA, 22 nt, Artificial Sequence
  Synthetic oligonucleotide: CBLB-8181
gaaaugaggggccuggacucuc

SEQ ID NO: 38492 - RNA, 23 nt, Artificial Sequence
  Synthetic oligonucleotide: CBLB-8182
agaaaugaggggccuggacucuc

SEQ ID NO: 38493 - RNA, 24 nt, Artificial Sequence
  Synthetic oligonucleotide: CBLB-8183
gagaaaugaggggccuggacucuc

SEQ ID NO: 38494 - RNA, 18 nt, Artificial Sequence
  Synthetic oligonucleotide: CBLB-8184
cucucccgggaacgaaag

SEQ ID NO: 38495 - RNA, 19 nt, Artificial Sequence
  Synthetic oligonucleotide: CBLB-8185
acucucccgggaacgaaag

SEQ ID NO: 38496 - RNA, 20 nt, Artificial Sequence
  Synthetic oligonucleotide: CBLB-7223
gacucucccgggaacgaaag

SEQ ID NO: 38497 - RNA, 21 nt, Artificial Sequence
  Synthetic oligonucleotide: CBLB-8186
ggacucucccgggaacgaaag

SEQ ID NO: 38498 - RNA, 22 nt, Artificial Sequence
  Synthetic oligonucleotide: CBLB-8187
uggacucucccgggaacgaaag

SEQ ID NO: 38499 - RNA, 23 nt, Artificial Sequence
  Synthetic oligonucleotide: CBLB-8188
cuggacucucccgggaacgaaag

SEQ ID NO: 38500 - RNA, 24 nt, Artificial Sequence
  Synthetic oligonucleotide: CBLB-8189
ccuggacucucccgggaacgaaag

SEQ ID NO: 38501 - RNA, 18 nt, Artificial Sequence
  Synthetic oligonucleotide: CBLB-8190
gccaucuggggcugaaag

SEQ ID NO: 38502 - RNA, 19 nt, Artificial Sequence
  Synthetic oligonucleotide: CBLB-8191
agccaucuggggcugaaag

SEQ ID NO: 38503 - RNA, 20 nt, Artificial Sequence
  Synthetic oligonucleotide: CBLB-8192
aagccaucuggggcugaaag

SEQ ID NO: 38504 - RNA, 21 nt, Artificial Sequence
  Synthetic oligonucleotide: CBLB-8193
aaagccaucuggggcugaaag

SEQ ID NO: 38505 - RNA, 22 nt, Artificial Sequence
  Synthetic oligonucleotide: CBLB-8194
caaagccaucuggggcugaaag

SEQ ID NO: 38506 - RNA, 23 nt, Artificial Sequence
  Synthetic oligonucleotide: CBLB-8195
ccaaagccaucuggggcugaaag

SEQ ID NO: 38507 - RNA, 24 nt, Artificial Sequence
  Synthetic oligonucleotide: CBLB-8196
gccaaagccaucuggggcugaaag

SEQ ID NO: 38508 - RNA, 18 nt, Artificial Sequence
  Synthetic oligonucleotide: CBLB-8197
aguacacaauggccccag

SEQ ID NO: 38509 - RNA, 19 nt, Artificial Sequence
  Synthetic oligonucleotide: CBLB-8198
caguacacaauggccccag

SEQ ID NO: 38510 - RNA, 20 nt, Artificial Sequence
  Synthetic oligonucleotide: CBLB-7425
acaguacacaauggccccag

SEQ ID NO: 38511 - RNA, 21 nt, Artificial Sequence
  Synthetic oligonucleotide: CBLB-8199
cacaguacacaauggccccag

SEQ ID NO: 38512 - RNA, 22 nt, Artificial Sequence
  Synthetic oligonucleotide: CBLB-8200
ccacaguacacaauggccccag

SEQ ID NO: 38513 - RNA, 23 nt, Artificial Sequence
  Synthetic oligonucleotide: CBLB-8201
uccacaguacacaauggccccag

SEQ ID NO: 38514 - RNA, 24 nt, Artificial Sequence
  Synthetic oligonucleotide: CBLB-8202
cuccacaguacacaauggccccag

SEQ ID NO: 38515 - RNA, 18 nt, Artificial Sequence
  Synthetic oligonucleotide: CBLB-8203
accaauaagggguggcag

SEQ ID NO: 38516 - RNA, 19 nt, Artificial Sequence
  Synthetic oligonucleotide: CBLB-8204
aaccaauaagggguggcag

SEQ ID NO: 38517 - RNA, 20 nt, Artificial Sequence
  Synthetic oligonucleotide: CBLB-8205
uaaccaauaagggguggcag

SEQ ID NO: 38518 - RNA, 21 nt, Artificial Sequence
  Synthetic oligonucleotide: CBLB-8206
cuaaccaauaagggguggcag

SEQ ID NO: 38519 - RNA, 22 nt, Artificial Sequence
  Synthetic oligonucleotide: CBLB-8207
gcuaaccaauaagggguggcag

SEQ ID NO: 38520 - RNA, 23 nt, Artificial Sequence
  Synthetic oligonucleotide: CBLB-8208
agcuaaccaauaagggguggcag

SEQ ID NO: 38521 - RNA, 24 nt, Artificial Sequence
  Synthetic oligonucleotide: CBLB-8209
gagcuaaccaauaagggguggcag

SEQ ID NO: 38522 - RNA, 18 nt, Artificial Sequence
  Synthetic oligonucleotide: CBLB-8210
ucugccuaaaugacugag

SEQ ID NO: 38523 - RNA, 19 nt, Artificial Sequence
  Synthetic oligonucleotide: CBLB-8211
uucugccuaaaugacugag

SEQ ID NO: 38524 - RNA, 20 nt, Artificial Sequence
  Synthetic oligonucleotide: CBLB-8212
uuucugccuaaaugacugag

SEQ ID NO: 38525 - RNA, 21 nt, Artificial Sequence
  Synthetic oligonucleotide: CBLB-8213
guuucugccuaaaugacugag

SEQ ID NO: 38526 - RNA, 22 nt, Artificial Sequence
  Synthetic oligonucleotide: CBLB-8214
aguuucugccuaaaugacugag

SEQ ID NO: 38527 - RNA, 23 nt, Artificial Sequence
  Synthetic oligonucleotide: CBLB-8215
aaguuucugccuaaaugacugag

SEQ ID NO: 38528 - RNA, 24 nt, Artificial Sequence
  Synthetic oligonucleotide: CBLB-8216
caaguuucugccuaaaugacugag

SEQ ID NO: 38529 - RNA, 18 nt, Artificial Sequence
  Synthetic oligonucleotide: CBLB-8217
cucugggcggguccaacg

SEQ ID NO: 38530 - RNA, 19 nt, Artificial Sequence
  Synthetic oligonucleotide: CBLB-8218
gcucugggcggguccaacg

SEQ ID NO: 38531 - RNA, 20 nt, Artificial Sequence
  Synthetic oligonucleotide: CBLB-8219
cgcucugggcggguccaacg

SEQ ID NO: 38532 - RNA, 21 nt, Artificial Sequence
  Synthetic oligonucleotide: CBLB-8220
ccgcucugggcggguccaacg

SEQ ID NO: 38533 - RNA, 22 nt, Artificial Sequence
  Synthetic oligonucleotide: CBLB-8221
uccgcucugggcggguccaacg

SEQ ID NO: 38534 - RNA, 23 nt, Artificial Sequence
  Synthetic oligonucleotide: CBLB-8222
cuccgcucugggcggguccaacg

SEQ ID NO: 38535 - RNA, 24 nt, Artificial Sequence
  Synthetic oligonucleotide: CBLB-8223
ucuccgcucugggcggguccaacg

SEQ ID NO: 38536 - RNA, 18 nt, Artificial Sequence
  Synthetic oligonucleotide: CBLB-8224
gaagggaugcaaggcacg

SEQ ID NO: 38537 - RNA, 19 nt, Artificial Sequence
  Synthetic oligonucleotide: CBLB-8225
cgaagggaugcaaggcacg

SEQ ID NO: 38538 - RNA, 20 nt, Artificial Sequence
  Synthetic oligonucleotide: CBLB-8226
acgaagggaugcaaggcacg

SEQ ID NO: 38539 - RNA, 21 nt, Artificial Sequence
  Synthetic oligonucleotide: CBLB-8227
gacgaagggaugcaaggcacg

SEQ ID NO: 38540 - RNA, 22 nt, Artificial Sequence
  Synthetic oligonucleotide: CBLB-8228
ggacgaagggaugcaaggcacg

SEQ ID NO: 38541 - RNA, 23 nt, Artificial Sequence
  Synthetic oligonucleotide: CBLB-8229
uggacgaagggaugcaaggcacg

SEQ ID NO: 38542 - RNA, 24 nt, Artificial Sequence
  Synthetic oligonucleotide: CBLB-8230
auggacgaagggaugcaaggcacg

SEQ ID NO: 38543 - RNA, 18 nt, Artificial Sequence
  Synthetic oligonucleotide: CBLB-8231
cgggaaaggaaauggacg

SEQ ID NO: 38544 - RNA, 19 nt, Artificial Sequence
  Synthetic oligonucleotide: CBLB-8232
acgggaaaggaaauggacg

SEQ ID NO: 38545 - RNA, 20 nt, Artificial Sequence
  Synthetic oligonucleotide: CBLB-8233
aacgggaaaggaaauggacg

SEQ ID NO: 38546 - RNA, 21 nt, Artificial Sequence
  Synthetic oligonucleotide: CBLB-8234
aaacgggaaaggaaauggacg

SEQ ID NO: 38547 - RNA, 22 nt, Artificial Sequence
  Synthetic oligonucleotide: CBLB-8235
gaaacgggaaaggaaauggacg

SEQ ID NO: 38548 - RNA, 23 nt, Artificial Sequence
  Synthetic oligonucleotide: CBLB-8236
ggaaacgggaaaggaaauggacg

SEQ ID NO: 38549 - RNA, 24 nt, Artificial Sequence
  Synthetic oligonucleotide: CBLB-8237
uggaaacgggaaaggaaauggacg

SEQ ID NO: 38550 - RNA, 18 nt, Artificial Sequence
  Synthetic oligonucleotide: CBLB-8238
gggcggggccgggcgccg

SEQ ID NO: 38551 - RNA, 19 nt, Artificial Sequence
  Synthetic oligonucleotide: CBLB-8239
ggggcggggccgggcgccg

SEQ ID NO: 38552 - RNA, 20 nt, Artificial Sequence
  Synthetic oligonucleotide: CBLB-8240
gggggcggggccgggcgccg

SEQ ID NO: 38553 - RNA, 21 nt, Artificial Sequence
  Synthetic oligonucleotide: CBLB-8241
cgggggcggggccgggcgccg

SEQ ID NO: 38554 - RNA, 22 nt, Artificial Sequence
  Synthetic oligonucleotide: CBLB-8242
gcgggggcggggccgggcgccg

SEQ ID NO: 38555 - RNA, 23 nt, Artificial Sequence
  Synthetic oligonucleotide: CBLB-8243
ggcgggggcggggccgggcgccg

SEQ ID NO: 38556 - RNA, 24 nt, Artificial Sequence
  Synthetic oligonucleotide: CBLB-8244
gggcgggggcggggccgggcgccg

SEQ ID NO: 38557 - RNA, 18 nt, Artificial Sequence
  Synthetic oligonucleotide: CBLB-8245
ggcaggugggcgugagcg

SEQ ID NO: 38558 - RNA, 19 nt, Artificial Sequence
  Synthetic oligonucleotide: CBLB-8246
uggcaggugggcgugagcg

SEQ ID NO: 38559 - RNA, 20 nt, Artificial Sequence
  Synthetic oligonucleotide: CBLB-8247
guggcaggugggcgugagcg

SEQ ID NO: 38560 - RNA, 21 nt, Artificial Sequence
  Synthetic oligonucleotide: CBLB-8248
gguggcaggugggcgugagcg

SEQ ID NO: 38561 - RNA, 22 nt, Artificial Sequence
  Synthetic oligonucleotide: CBLB-8249
ggguggcaggugggcgugagcg

SEQ ID NO: 38562 - RNA, 23 nt, Artificial Sequence
  Synthetic oligonucleotide: CBLB-8250
gggguggcaggugggcgugagcg

SEQ ID NO: 38563 - RNA, 24 nt, Artificial Sequence
  Synthetic oligonucleotide: CBLB-8251
agggguggcaggugggcgugagcg

SEQ ID NO: 38564 - RNA, 18 nt, Artificial Sequence
  Synthetic oligonucleotide: CBLB-8252
agaaaggaauuggacucg

SEQ ID NO: 38565 - RNA, 19 nt, Artificial Sequence
  Synthetic oligonucleotide: CBLB-8253
cagaaaggaauuggacucg

SEQ ID NO: 38566 - RNA, 20 nt, Artificial Sequence
  Synthetic oligonucleotide: CBLB-8254
ucagaaaggaauuggacucg

SEQ ID NO: 38567 - RNA, 21 nt, Artificial Sequence
  Synthetic oligonucleotide: CBLB-8255
gucagaaaggaauuggacucg

SEQ ID NO: 38568 - RNA, 22 nt, Artificial Sequence
  Synthetic oligonucleotide: CBLB-8256
cgucagaaaggaauuggacucg

SEQ ID NO: 38569 - RNA, 23 nt, Artificial Sequence
  Synthetic oligonucleotide: CBLB-8257
acgucagaaaggaauuggacucg

SEQ ID NO: 38570 - RNA, 24 nt, Artificial Sequence
  Synthetic oligonucleotide: CBLB-8258
cacgucagaaaggaauuggacucg

SEQ ID NO: 38571 - RNA, 18 nt, Artificial Sequence
  Synthetic oligonucleotide: CBLB-8259
ccaucuggggcugaaagg

SEQ ID NO: 38572 - RNA, 19 nt, Artificial Sequence
  Synthetic oligonucleotide: CBLB-8260
gccaucuggggcugaaagg

SEQ ID NO: 38573 - RNA, 20 nt, Artificial Sequence
  Synthetic oligonucleotide: CBLB-7434
agccaucuggggcugaaagg

SEQ ID NO: 38574 - RNA, 21 nt, Artificial Sequence
  Synthetic oligonucleotide: CBLB-8261
aagccaucuggggcugaaagg

SEQ ID NO: 38575 - RNA, 22 nt, Artificial Sequence
  Synthetic oligonucleotide: CBLB-8262
aaagccaucuggggcugaaagg

SEQ ID NO: 38576 - RNA, 23 nt, Artificial Sequence
  Synthetic oligonucleotide: CBLB-8263
caaagccaucuggggcugaaagg

SEQ ID NO: 38577 - RNA, 24 nt, Artificial Sequence
  Synthetic oligonucleotide: CBLB-8264
ccaaagccaucuggggcugaaagg

SEQ ID NO: 38578 - RNA, 18 nt, Artificial Sequence
  Synthetic oligonucleotide: CBLB-8265
cugccuaaaugacugagg

SEQ ID NO: 38579 - RNA, 19 nt, Artificial Sequence
  Synthetic oligonucleotide: CBLB-8266
ucugccuaaaugacugagg

SEQ ID NO: 38580 - RNA, 20 nt, Artificial Sequence
  Synthetic oligonucleotide: CBLB-7436
uucugccuaaaugacugagg

SEQ ID NO: 38581 - RNA, 21 nt, Artificial Sequence
  Synthetic oligonucleotide: CBLB-8267
uuucugccuaaaugacugagg

SEQ ID NO: 38582 - RNA, 22 nt, Artificial Sequence
  Synthetic oligonucleotide: CBLB-8268
guuucugccuaaaugacugagg

SEQ ID NO: 38583 - RNA, 23 nt, Artificial Sequence
  Synthetic oligonucleotide: CBLB-8269
aguuucugccuaaaugacugagg

SEQ ID NO: 38584 - RNA, 24 nt, Artificial Sequence
  Synthetic oligonucleotide: CBLB-8270
aaguuucugccuaaaugacugagg

SEQ ID NO: 38585 - RNA, 18 nt, Artificial Sequence
  Synthetic oligonucleotide: CBLB-8271
aaucucacagagaguagg

SEQ ID NO: 38586 - RNA, 19 nt, Artificial Sequence
  Synthetic oligonucleotide: CBLB-8272
aaaucucacagagaguagg

SEQ ID NO: 38587 - RNA, 20 nt, Artificial Sequence
  Synthetic oligonucleotide: CBLB-8273
uaaaucucacagagaguagg

SEQ ID NO: 38588 - RNA, 21 nt, Artificial Sequence
  Synthetic oligonucleotide: CBLB-8274
auaaaucucacagagaguagg

SEQ ID NO: 38589 - RNA, 22 nt, Artificial Sequence
  Synthetic oligonucleotide: CBLB-8275
aauaaaucucacagagaguagg

SEQ ID NO: 38590 - RNA, 23 nt, Artificial Sequence
  Synthetic oligonucleotide: CBLB-8276
gaauaaaucucacagagaguagg

SEQ ID NO: 38591 - RNA, 24 nt, Artificial Sequence
  Synthetic oligonucleotide: CBLB-8277
agaauaaaucucacagagaguagg

SEQ ID NO: 38592 - RNA, 18 nt, Artificial Sequence
  Synthetic oligonucleotide: CBLB-8278
ggcggggcgggggcgggg

SEQ ID NO: 38593 - RNA, 19 nt, Artificial Sequence
  Synthetic oligonucleotide: CBLB-8279
gggcggggcgggggcgggg

SEQ ID NO: 38594 - RNA, 20 nt, Artificial Sequence
  Synthetic oligonucleotide: CBLB-8280
ggggcggggcgggggcgggg

SEQ ID NO: 38595 - RNA, 18 nt, Artificial Sequence
  Synthetic oligonucleotide: CBLB-8281
agccaaagccaucugggg

SEQ ID NO: 38596 - RNA, 19 nt, Artificial Sequence
  Synthetic oligonucleotide: CBLB-8282
gagccaaagccaucugggg

SEQ ID NO: 38597 - RNA, 20 nt, Artificial Sequence
  Synthetic oligonucleotide: CBLB-8283
ggagccaaagccaucugggg

SEQ ID NO: 38598 - RNA, 21 nt, Artificial Sequence
  Synthetic oligonucleotide: CBLB-8284
gggagccaaagccaucugggg

SEQ ID NO: 38599 - RNA, 22 nt, Artificial Sequence
  Synthetic oligonucleotide: CBLB-8285
cgggagccaaagccaucugggg

SEQ ID NO: 38600 - RNA, 23 nt, Artificial Sequence
  Synthetic oligonucleotide: CBLB-8286
ccgggagccaaagccaucugggg

SEQ ID NO: 38601 - RNA, 24 nt, Artificial Sequence
  Synthetic oligonucleotide: CBLB-8287
accgggagccaaagccaucugggg

SEQ ID NO: 38602 - RNA, 18 nt, Artificial Sequence
  Synthetic oligonucleotide: CBLB-8288
aaacgggaaaggaaaugg

SEQ ID NO: 38603 - RNA, 19 nt, Artificial Sequence
  Synthetic oligonucleotide: CBLB-8289
gaaacgggaaaggaaaugg

SEQ ID NO: 38604 - RNA, 20 nt, Artificial Sequence
  Synthetic oligonucleotide: CBLB-8290
ggaaacgggaaaggaaaugg

SEQ ID NO: 38605 - RNA, 21 nt, Artificial Sequence
  Synthetic oligonucleotide: CBLB-8291
uggaaacgggaaaggaaaugg

SEQ ID NO: 38606 - RNA, 22 nt, Artificial Sequence
  Synthetic oligonucleotide: CBLB-8292
guggaaacgggaaaggaaaugg

SEQ ID NO: 38607 - RNA, 23 nt, Artificial Sequence
  Synthetic oligonucleotide: CBLB-8293
aguggaaacgggaaaggaaaugg

SEQ ID NO: 38608 - RNA, 24 nt, Artificial Sequence
  Synthetic oligonucleotide: CBLB-8294
aaguggaaacgggaaaggaaaugg

SEQ ID NO: 38609 - RNA, 18 nt, Artificial Sequence
  Synthetic oligonucleotide: CBLB-8295
agcgggugcagccaaugg

SEQ ID NO: 38610 - RNA, 19 nt, Artificial Sequence
  Synthetic oligonucleotide: CBLB-8296
cagcgggugcagccaaugg

SEQ ID NO: 38611 - RNA, 20 nt, Artificial Sequence
  Synthetic oligonucleotide: CBLB-8297
acagcgggugcagccaaugg

SEQ ID NO: 38612 - RNA, 21 nt, Artificial Sequence
  Synthetic oligonucleotide: CBLB-8298
gacagcgggugcagccaaugg

SEQ ID NO: 38613 - RNA, 22 nt, Artificial Sequence
  Synthetic oligonucleotide: CBLB-8299
cgacagcgggugcagccaaugg

SEQ ID NO: 38614 - RNA, 23 nt, Artificial Sequence
  Synthetic oligonucleotide: CBLB-8300
ccgacagcgggugcagccaaugg

SEQ ID NO: 38615 - RNA, 24 nt, Artificial Sequence
  Synthetic oligonucleotide: CBLB-8301
cccgacagcgggugcagccaaugg

SEQ ID NO: 38616 - RNA, 18 nt, Artificial Sequence
  Synthetic oligonucleotide: CBLB-8302
auagcaacagaguagugg

SEQ ID NO: 38617 - RNA, 19 nt, Artificial Sequence
  Synthetic oligonucleotide: CBLB-8303
cauagcaacagaguagugg

SEQ ID NO: 38618 - RNA, 20 nt, Artificial Sequence
  Synthetic oligonucleotide: CBLB-8304
ucauagcaacagaguagugg

SEQ ID NO: 38619 - RNA, 21 nt, Artificial Sequence
  Synthetic oligonucleotide: CBLB-8305
uucauagcaacagaguagugg

SEQ ID NO: 38620 - RNA, 22 nt, Artificial Sequence
  Synthetic oligonucleotide: CBLB-8306
uuucauagcaacagaguagugg

SEQ ID NO: 38621 - RNA, 23 nt, Artificial Sequence
  Synthetic oligonucleotide: CBLB-8307
guuucauagcaacagaguagugg

SEQ ID NO: 38622 - RNA, 24 nt, Artificial Sequence
  Synthetic oligonucleotide: CBLB-8308
uguuucauagcaacagaguagugg

SEQ ID NO: 38623 - RNA, 18 nt, Artificial Sequence
  Synthetic oligonucleotide: CBLB-8309
uggacucggagagaaaug

SEQ ID NO: 38624 - RNA, 19 nt, Artificial Sequence
  Synthetic oligonucleotide: CBLB-8310
uuggacucggagagaaaug

SEQ ID NO: 38625 - RNA, 20 nt, Artificial Sequence
  Synthetic oligonucleotide: CBLB-7233
auuggacucggagagaaaug

SEQ ID NO: 38626 - RNA, 21 nt, Artificial Sequence
  Synthetic oligonucleotide: CBLB-8311
aauuggacucggagagaaaug

SEQ ID NO: 38627 - RNA, 22 nt, Artificial Sequence
  Synthetic oligonucleotide: CBLB-8312
gaauuggacucggagagaaaug

SEQ ID NO: 38628 - RNA, 23 nt, Artificial Sequence
  Synthetic oligonucleotide: CBLB-8313
ggaauuggacucggagagaaaug

SEQ ID NO: 38629 - RNA, 24 nt, Artificial Sequence
  Synthetic oligonucleotide: CBLB-8314
aggaauuggacucggagagaaaug

SEQ ID NO: 38630 - RNA, 18 nt, Artificial Sequence
  Synthetic oligonucleotide: CBLB-8315
uuucugccuaaaugacug

SEQ ID NO: 38631 - RNA, 19 nt, Artificial Sequence
  Synthetic oligonucleotide: CBLB-8316
guuucugccuaaaugacug

SEQ ID NO: 38632 - RNA, 20 nt, Artificial Sequence
  Synthetic oligonucleotide: CBLB-7439
aguuucugccuaaaugacug

SEQ ID NO: 38633 - RNA, 21 nt, Artificial Sequence
  Synthetic oligonucleotide: CBLB-8317
aaguuucugccuaaaugacug

SEQ ID NO: 38634 - RNA, 22 nt, Artificial Sequence
  Synthetic oligonucleotide: CBLB-8318
caaguuucugccuaaaugacug

SEQ ID NO: 38635 - RNA, 23 nt, Artificial Sequence
  Synthetic oligonucleotide: CBLB-8319
gcaaguuucugccuaaaugacug

SEQ ID NO: 38636 - RNA, 24 nt, Artificial Sequence
  Synthetic oligonucleotide: CBLB-8320
ugcaaguuucugccuaaaugacug

SEQ ID NO: 38637 - RNA, 18 nt, Artificial Sequence
  Synthetic oligonucleotide: CBLB-8321
ugggcggguccaacgcug

SEQ ID NO: 38638 - RNA, 19 nt, Artificial Sequence
  Synthetic oligonucleotide: CBLB-8322
cugggcggguccaacgcug

SEQ ID NO: 38639 - RNA, 20 nt, Artificial Sequence
  Synthetic oligonucleotide: CBLB-8323
ucugggcggguccaacgcug

SEQ ID NO: 38640 - RNA, 21 nt, Artificial Sequence
  Synthetic oligonucleotide: CBLB-8324
cucugggcggguccaacgcug

SEQ ID NO: 38641 - RNA, 22 nt, Artificial Sequence
  Synthetic oligonucleotide: CBLB-8325
gcucugggcggguccaacgcug

SEQ ID NO: 38642 - RNA, 23 nt, Artificial Sequence
  Synthetic oligonucleotide: CBLB-8326
cgcucugggcggguccaacgcug

SEQ ID NO: 38643 - RNA, 24 nt, Artificial Sequence
  Synthetic oligonucleotide: CBLB-8327
ccgcucugggcggguccaacgcug

SEQ ID NO: 38644 - RNA, 18 nt, Artificial Sequence
  Synthetic oligonucleotide: CBLB-8328
agaccaaacaucaggcug

SEQ ID NO: 38645 - RNA, 19 nt, Artificial Sequence
  Synthetic oligonucleotide: CBLB-8329
cagaccaaacaucaggcug

SEQ ID NO: 38646 - RNA, 20 nt, Artificial Sequence
  Synthetic oligonucleotide: CBLB-8330
gcagaccaaacaucaggcug

SEQ ID NO: 38647 - RNA, 21 nt, Artificial Sequence
  Synthetic oligonucleotide: CBLB-8331
ugcagaccaaacaucaggcug

SEQ ID NO: 38648 - RNA, 22 nt, Artificial Sequence
  Synthetic oligonucleotide: CBLB-8332
uugcagaccaaacaucaggcug

SEQ ID NO: 38649 - RNA, 23 nt, Artificial Sequence
  Synthetic oligonucleotide: CBLB-8333
auugcagaccaaacaucaggcug

SEQ ID NO: 38650 - RNA, 24 nt, Artificial Sequence
  Synthetic oligonucleotide: CBLB-8334
gauugcagaccaaacaucaggcug

SEQ ID NO: 38651 - RNA, 18 nt, Artificial Sequence
  Synthetic oligonucleotide: CBLB-8335
gacagcuacuguguuuug

SEQ ID NO: 38652 - RNA, 19 nt, Artificial Sequence
  Synthetic oligonucleotide: CBLB-8336
agacagcuacuguguuuug

SEQ ID NO: 38653 - RNA, 20 nt, Artificial Sequence
  Synthetic oligonucleotide: CBLB-8337
gagacagcuacuguguuuug

SEQ ID NO: 38654 - RNA, 21 nt, Artificial Sequence
  Synthetic oligonucleotide: CBLB-8338
ggagacagcuacuguguuuug

SEQ ID NO: 38655 - RNA, 22 nt, Artificial Sequence
  Synthetic oligonucleotide: CBLB-8339
aggagacagcuacuguguuuug

SEQ ID NO: 38656 - RNA, 23 nt, Artificial Sequence
  Synthetic oligonucleotide: CBLB-8340
gaggagacagcuacuguguuuug

SEQ ID NO: 38657 - RNA, 24 nt, Artificial Sequence
  Synthetic oligonucleotide: CBLB-8341
ggaggagacagcuacuguguuuug

SEQ ID NO: 38658 - RNA, 18 nt, Artificial Sequence
  Synthetic oligonucleotide: CBLB-8342
uuggacucggagagaaau

SEQ ID NO: 38659 - RNA, 19 nt, Artificial Sequence
  Synthetic oligonucleotide: CBLB-8343
auuggacucggagagaaau

SEQ ID NO: 38660 - RNA, 20 nt, Artificial Sequence
  Synthetic oligonucleotide: CBLB-8344
aauuggacucggagagaaau

SEQ ID NO: 38661 - RNA, 21 nt, Artificial Sequence
  Synthetic oligonucleotide: CBLB-8345
gaauuggacucggagagaaau

SEQ ID NO: 38662 - RNA, 22 nt, Artificial Sequence
  Synthetic oligonucleotide: CBLB-8346
ggaauuggacucggagagaaau

SEQ ID NO: 38663 - RNA, 23 nt, Artificial Sequence
  Synthetic oligonucleotide: CBLB-8347
aggaauuggacucggagagaaau

SEQ ID NO: 38664 - RNA, 24 nt, Artificial Sequence
  Synthetic oligonucleotide: CBLB-8348
aaggaauuggacucggagagaaau

SEQ ID NO: 38665 - RNA, 18 nt, Artificial Sequence
  Synthetic oligonucleotide: CBLB-8349
acgaaggagcuaaccaau

SEQ ID NO: 38666 - RNA, 19 nt, Artificial Sequence
  Synthetic oligonucleotide: CBLB-8350
cacgaaggagcuaaccaau

SEQ ID NO: 38667 - RNA, 20 nt, Artificial Sequence
  Synthetic oligonucleotide: CBLB-8351
gcacgaaggagcuaaccaau

SEQ ID NO: 38668 - RNA, 21 nt, Artificial Sequence
  Synthetic oligonucleotide: CBLB-8352
ggcacgaaggagcuaaccaau

SEQ ID NO: 38669 - RNA, 22 nt, Artificial Sequence
  Synthetic oligonucleotide: CBLB-8353
aggcacgaaggagcuaaccaau

SEQ ID NO: 38670 - RNA, 23 nt, Artificial Sequence
  Synthetic oligonucleotide: CBLB-8354
aaggcacgaaggagcuaaccaau

SEQ ID NO: 38671 - RNA, 24 nt, Artificial Sequence
  Synthetic oligonucleotide: CBLB-8355
caaggcacgaaggagcuaaccaau

SEQ ID NO: 38672 - RNA, 18 nt, Artificial Sequence
  Synthetic oligonucleotide: CBLB-8356
accgggagccaaagccau

SEQ ID NO: 38673 - RNA, 19 nt, Artificial Sequence
  Synthetic oligonucleotide: CBLB-8357
gaccgggagccaaagccau

SEQ ID NO: 38674 - RNA, 20 nt, Artificial Sequence
  Synthetic oligonucleotide: CBLB-8358
ggaccgggagccaaagccau

SEQ ID NO: 38675 - RNA, 21 nt, Artificial Sequence
  Synthetic oligonucleotide: CBLB-8359
gggaccgggagccaaagccau

SEQ ID NO: 38676 - RNA, 22 nt, Artificial Sequence
  Synthetic oligonucleotide: CBLB-8360
cgggaccgggagccaaagccau

SEQ ID NO: 38677 - RNA, 23 nt, Artificial Sequence
  Synthetic oligonucleotide: CBLB-8361
ucgggaccgggagccaaagccau

SEQ ID NO: 38678 - RNA, 24 nt, Artificial Sequence
  Synthetic oligonucleotide: CBLB-8362
gucgggaccgggagccaaagccau

SEQ ID NO: 38679 - RNA, 18 nt, Artificial Sequence
  Synthetic oligonucleotide: CBLB-8363
ucagaaaggaauuggacu

SEQ ID NO: 38680 - RNA, 19 nt, Artificial Sequence
  Synthetic oligonucleotide: CBLB-8364
gucagaaaggaauuggacu

SEQ ID NO: 38681 - RNA, 20 nt, Artificial Sequence
  Synthetic oligonucleotide: CBLB-7448
cgucagaaaggaauuggacu

SEQ ID NO: 38682 - RNA, 21 nt, Artificial Sequence
  Synthetic oligonucleotide: CBLB-8365
acgucagaaaggaauuggacu

SEQ ID NO: 38683 - RNA, 22 nt, Artificial Sequence
  Synthetic oligonucleotide: CBLB-8366
cacgucagaaaggaauuggacu

SEQ ID NO: 38684 - RNA, 23 nt, Artificial Sequence
  Synthetic oligonucleotide: CBLB-8367
gcacgucagaaaggaauuggacu

SEQ ID NO: 38685 - RNA, 24 nt, Artificial Sequence
  Synthetic oligonucleotide: CBLB-8368
agcacgucagaaaggaauuggacu

SEQ ID NO: 38686 - RNA, 18 nt, Artificial Sequence
  Synthetic oligonucleotide: CBLB-8369
guuucugccuaaaugacu

SEQ ID NO: 38687 - RNA, 19 nt, Artificial Sequence
  Synthetic oligonucleotide: CBLB-8370
aguuucugccuaaaugacu

SEQ ID NO: 38688 - RNA, 20 nt, Artificial Sequence
  Synthetic oligonucleotide: CBLB-8371
aaguuucugccuaaaugacu

SEQ ID NO: 38689 - RNA, 21 nt, Artificial Sequence
  Synthetic oligonucleotide: CBLB-8372
caaguuucugccuaaaugacu

SEQ ID NO: 38690 - RNA, 22 nt, Artificial Sequence
  Synthetic oligonucleotide: CBLB-8373
gcaaguuucugccuaaaugacu

SEQ ID NO: 38691 - RNA, 23 nt, Artificial Sequence
  Synthetic oligonucleotide: CBLB-8374
ugcaaguuucugccuaaaugacu

SEQ ID NO: 38692 - RNA, 24 nt, Artificial Sequence
  Synthetic oligonucleotide: CBLB-8375
gugcaaguuucugccuaaaugacu

SEQ ID NO: 38693 - RNA, 18 nt, Artificial Sequence
  Synthetic oligonucleotide: CBLB-8376
ggguguugcuucuccgcu

SEQ ID NO: 38694 - RNA, 19 nt, Artificial Sequence
  Synthetic oligonucleotide: CBLB-8377
aggguguugcuucuccgcu

SEQ ID NO: 38695 - RNA, 20 nt, Artificial Sequence
  Synthetic oligonucleotide: CBLB-8378
aaggguguugcuucuccgcu

SEQ ID NO: 38696 - RNA, 21 nt, Artificial Sequence
  Synthetic oligonucleotide: CBLB-8379
gaaggguguugcuucuccgcu

SEQ ID NO: 38697 - RNA, 22 nt, Artificial Sequence
  Synthetic oligonucleotide: CBLB-8380
ggaaggguguugcuucuccgcu

SEQ ID NO: 38698 - RNA, 23 nt, Artificial Sequence
  Synthetic oligonucleotide: CBLB-8381
uggaaggguguugcuucuccgcu

SEQ ID NO: 38699 - RNA, 24 nt, Artificial Sequence
  Synthetic oligonucleotide: CBLB-8382
cuggaaggguguugcuucuccgcu

SEQ ID NO: 38700 - RNA, 18 nt, Artificial Sequence
  Synthetic oligonucleotide: CBLB-8383
ggcccgcucgcagcacgu

SEQ ID NO: 38701 - RNA, 19 nt, Artificial Sequence
  Synthetic oligonucleotide: CBLB-8384
aggcccgcucgcagcacgu

SEQ ID NO: 38702 - RNA, 20 nt, Artificial Sequence
  Synthetic oligonucleotide: CBLB-8385
aaggcccgcucgcagcacgu

SEQ ID NO: 38703 - RNA, 21 nt, Artificial Sequence
  Synthetic oligonucleotide: CBLB-8386
gaaggcccgcucgcagcacgu

SEQ ID NO: 38704 - RNA, 22 nt, Artificial Sequence
  Synthetic oligonucleotide: CBLB-8387
ggaaggcccgcucgcagcacgu

SEQ ID NO: 38705 - RNA, 23 nt, Artificial Sequence
  Synthetic oligonucleotide: CBLB-8388
aggaaggcccgcucgcagcacgu

SEQ ID NO: 38706 - RNA, 24 nt, Artificial Sequence
  Synthetic oligonucleotide: CBLB-8389
gaggaaggcccgcucgcagcacgu

SEQ ID NO: 38707 - RNA, 18 nt, Artificial Sequence
  Synthetic oligonucleotide: CBLB-8390
gcaggugggcgugagcgu

SEQ ID NO: 38708 - RNA, 19 nt, Artificial Sequence
  Synthetic oligonucleotide: CBLB-8391
ggcaggugggcgugagcgu

SEQ ID NO: 38709 - RNA, 20 nt, Artificial Sequence
  Synthetic oligonucleotide: CBLB-7456
uggcaggugggcgugagcgu

SEQ ID NO: 38710 - RNA, 21 nt, Artificial Sequence
  Synthetic oligonucleotide: CBLB-8392
guggcaggugggcgugagcgu

SEQ ID NO: 38711 - RNA, 22 nt, Artificial Sequence
  Synthetic oligonucleotide: CBLB-8393
gguggcaggugggcgugagcgu

SEQ ID NO: 38712 - RNA, 23 nt, Artificial Sequence
  Synthetic oligonucleotide: CBLB-8394
ggguggcaggugggcgugagcgu

SEQ ID NO: 38713 - RNA, 24 nt, Artificial Sequence
  Synthetic oligonucleotide: CBLB-8395
gggguggcaggugggcgugagcgu

SEQ ID NO: 38714 - RNA, 18 nt, Artificial Sequence
  Synthetic oligonucleotide: CBLB-8396
cucuuuugcuguuaguuu

SEQ ID NO: 38715 - RNA, 19 nt, Artificial Sequence
  Synthetic oligonucleotide: CBLB-8397
ucucuuuugcuguuaguuu

SEQ ID NO: 38716 - RNA, 20 nt, Artificial Sequence
  Synthetic oligonucleotide: CBLB-8398
uucucuuuugcuguuaguuu

SEQ ID NO: 38717 - RNA, 21 nt, Artificial Sequence
  Synthetic oligonucleotide: CBLB-8399
uuucucuuuugcuguuaguuu

SEQ ID NO: 38718 - RNA, 22 nt, Artificial Sequence
  Synthetic oligonucleotide: CBLB-8400
guuucucuuuugcuguuaguuu

SEQ ID NO: 38719 - RNA, 23 nt, Artificial Sequence
  Synthetic oligonucleotide: CBLB-8401
aguuucucuuuugcuguuaguuu

SEQ ID NO: 38720 - RNA, 24 nt, Artificial Sequence
  Synthetic oligonucleotide: CBLB-8402
gaguuucucuuuugcuguuaguuu

SEQ ID NO: 38721 - RNA, 18 nt, Artificial Sequence
  Synthetic oligonucleotide: CBLB-8403
cuaaaacuaacagcaaaa

SEQ ID NO: 38722 - RNA, 19 nt, Artificial Sequence
  Synthetic oligonucleotide: CBLB-8404
ucuaaaacuaacagcaaaa

SEQ ID NO: 38723 - RNA, 20 nt, Artificial Sequence
  Synthetic oligonucleotide: CBLB-8405
cucuaaaacuaacagcaaaa

SEQ ID NO: 38724 - RNA, 21 nt, Artificial Sequence
  Synthetic oligonucleotide: CBLB-8406
ccucuaaaacuaacagcaaaa

SEQ ID NO: 38725 - RNA, 22 nt, Artificial Sequence
  Synthetic oligonucleotide: CBLB-8407
cccucuaaaacuaacagcaaaa

SEQ ID NO: 38726 - RNA, 23 nt, Artificial Sequence
  Synthetic oligonucleotide: CBLB-8408
ucccucuaaaacuaacagcaaaa

SEQ ID NO: 38727 - RNA, 24 nt, Artificial Sequence
  Synthetic oligonucleotide: CBLB-8409
aucccucuaaaacuaacagcaaaa

SEQ ID NO: 38728 - RNA, 18 nt, Artificial Sequence
  Synthetic oligonucleotide: CBLB-8410
cucuaaaacuaacagcaa

SEQ ID NO: 38729 - RNA, 19 nt, Artificial Sequence
  Synthetic oligonucleotide: CBLB-8411
ccucuaaaacuaacagcaa

SEQ ID NO: 38730 - RNA, 20 nt, Artificial Sequence
  Synthetic oligonucleotide: CBLB-8412
cccucuaaaacuaacagcaa

SEQ ID NO: 38731 - RNA, 21 nt, Artificial Sequence
  Synthetic oligonucleotide: CBLB-8413
ucccucuaaaacuaacagcaa

SEQ ID NO: 38732 - RNA, 22 nt, Artificial Sequence
  Synthetic oligonucleotide: CBLB-8414
aucccucuaaaacuaacagcaa

SEQ ID NO: 38733 - RNA, 23 nt, Artificial Sequence
  Synthetic oligonucleotide: CBLB-8415
aaucccucuaaaacuaacagcaa

SEQ ID NO: 38734 - RNA, 24 nt, Artificial Sequence
  Synthetic oligonucleotide: CBLB-8416
caaucccucuaaaacuaacagcaa

SEQ ID NO: 38735 - RNA, 18 nt, Artificial Sequence
  Synthetic oligonucleotide: CBLB-8417
uuuuaagagcacaaagaa

SEQ ID NO: 38736 - RNA, 19 nt, Artificial Sequence
  Synthetic oligonucleotide: CBLB-8418
uuuuuaagagcacaaagaa

SEQ ID NO: 38737 - RNA, 20 nt, Artificial Sequence
  Synthetic oligonucleotide: CBLB-7373
cuuuuuaagagcacaaagaa

SEQ ID NO: 38738 - RNA, 21 nt, Artificial Sequence
  Synthetic oligonucleotide: CBLB-8419
ccuuuuuaagagcacaaagaa

SEQ ID NO: 38739 - RNA, 22 nt, Artificial Sequence
  Synthetic oligonucleotide: CBLB-8420
gccuuuuuaagagcacaaagaa

SEQ ID NO: 38740 - RNA, 23 nt, Artificial Sequence
  Synthetic oligonucleotide: CBLB-8421
ggccuuuuuaagagcacaaagaa

SEQ ID NO: 38741 - RNA, 24 nt, Artificial Sequence
  Synthetic oligonucleotide: CBLB-8422
cggccuuuuuaagagcacaaagaa

SEQ ID NO: 38742 - RNA, 18 nt, Artificial Sequence
  Synthetic oligonucleotide: CBLB-8423
aaaagacuaggaagguaa

SEQ ID NO: 38743 - RNA, 19 nt, Artificial Sequence
  Synthetic oligonucleotide: CBLB-8424
caaaagacuaggaagguaa

SEQ ID NO: 38744 - RNA, 20 nt, Artificial Sequence
  Synthetic oligonucleotide: CBLB-8425
acaaaagacuaggaagguaa

SEQ ID NO: 38745 - RNA, 21 nt, Artificial Sequence
  Synthetic oligonucleotide: CBLB-8426
aacaaaagacuaggaagguaa

SEQ ID NO: 38746 - RNA, 22 nt, Artificial Sequence
  Synthetic oligonucleotide: CBLB-8427
aaacaaaagacuaggaagguaa

SEQ ID NO: 38747 - RNA, 23 nt, Artificial Sequence
  Synthetic oligonucleotide: CBLB-8428
gaaacaaaagacuaggaagguaa

SEQ ID NO: 38748 - RNA, 24 nt, Artificial Sequence
  Synthetic oligonucleotide: CBLB-8429
ugaaacaaaagacuaggaagguaa

SEQ ID NO: 38749 - RNA, 18 nt, Artificial Sequence
  Synthetic oligonucleotide: CBLB-8430
ggccuuuuuaagagcaca

SEQ ID NO: 38750 - RNA, 19 nt, Artificial Sequence
  Synthetic oligonucleotide: CBLB-8431
cggccuuuuuaagagcaca

SEQ ID NO: 38751 - RNA, 20 nt, Artificial Sequence
  Synthetic oligonucleotide: CBLB-8432
ucggccuuuuuaagagcaca

SEQ ID NO: 38752 - RNA, 21 nt, Artificial Sequence
  Synthetic oligonucleotide: CBLB-8433
gucggccuuuuuaagagcaca

SEQ ID NO: 38753 - RNA, 22 nt, Artificial Sequence
  Synthetic oligonucleotide: CBLB-8434
ugucggccuuuuuaagagcaca

SEQ ID NO: 38754 - RNA, 23 nt, Artificial Sequence
  Synthetic oligonucleotide: CBLB-8435
augucggccuuuuuaagagcaca

SEQ ID NO: 38755 - RNA, 24 nt, Artificial Sequence
  Synthetic oligonucleotide: CBLB-8436
gaugucggccuuuuuaagagcaca

SEQ ID NO: 38756 - RNA, 18 nt, Artificial Sequence
  Synthetic oligonucleotide: CBLB-8437
gcacaaagaagggagcca

SEQ ID NO: 38757 - RNA, 19 nt, Artificial Sequence
  Synthetic oligonucleotide: CBLB-8438
agcacaaagaagggagcca

SEQ ID NO: 38758 - RNA, 20 nt, Artificial Sequence
  Synthetic oligonucleotide: CBLB-8439
gagcacaaagaagggagcca

SEQ ID NO: 38759 - RNA, 21 nt, Artificial Sequence
  Synthetic oligonucleotide: CBLB-8440
agagcacaaagaagggagcca

SEQ ID NO: 38760 - RNA, 22 nt, Artificial Sequence
  Synthetic oligonucleotide: CBLB-8441
aagagcacaaagaagggagcca

SEQ ID NO: 38761 - RNA, 23 nt, Artificial Sequence
  Synthetic oligonucleotide: CBLB-8442
uaagagcacaaagaagggagcca

SEQ ID NO: 38762 - RNA, 24 nt, Artificial Sequence
  Synthetic oligonucleotide: CBLB-8443
uuaagagcacaaagaagggagcca

SEQ ID NO: 38763 - RNA, 18 nt, Artificial Sequence
  Synthetic oligonucleotide: CBLB-8444
uuuuuaagagcacaaaga

SEQ ID NO: 38764 - RNA, 19 nt, Artificial Sequence
  Synthetic oligonucleotide: CBLB-8445
cuuuuuaagagcacaaaga

SEQ ID NO: 38765 - RNA, 20 nt, Artificial Sequence
  Synthetic oligonucleotide: CBLB-7384
ccuuuuuaagagcacaaaga

SEQ ID NO: 38766 - RNA, 21 nt, Artificial Sequence
  Synthetic oligonucleotide: CBLB-8446
gccuuuuuaagagcacaaaga

SEQ ID NO: 38767 - RNA, 22 nt, Artificial Sequence
  Synthetic oligonucleotide: CBLB-8447
ggccuuuuuaagagcacaaaga

SEQ ID NO: 38768 - RNA, 23 nt, Artificial Sequence
  Synthetic oligonucleotide: CBLB-8448
cggccuuuuuaagagcacaaaga

SEQ ID NO: 38769 - RNA, 24 nt, Artificial Sequence
  Synthetic oligonucleotide: CBLB-8449
ucggccuuuuuaagagcacaaaga

SEQ ID NO: 38770 - RNA, 18 nt, Artificial Sequence
  Synthetic oligonucleotide: CBLB-8450
aaagaagggagccacaga

SEQ ID NO: 38771 - RNA, 19 nt, Artificial Sequence
  Synthetic oligonucleotide: CBLB-8451
caaagaagggagccacaga

SEQ ID NO: 38772 - RNA, 20 nt, Artificial Sequence
  Synthetic oligonucleotide: CBLB-8452
acaaagaagggagccacaga

SEQ ID NO: 38773 - RNA, 21 nt, Artificial Sequence
  Synthetic oligonucleotide: CBLB-8453
cacaaagaagggagccacaga

SEQ ID NO: 38774 - RNA, 22 nt, Artificial Sequence
  Synthetic oligonucleotide: CBLB-8454
gcacaaagaagggagccacaga

SEQ ID NO: 38775 - RNA, 23 nt, Artificial Sequence
  Synthetic oligonucleotide: CBLB-8455
agcacaaagaagggagccacaga

SEQ ID NO: 38776 - RNA, 24 nt, Artificial Sequence
  Synthetic oligonucleotide: CBLB-8456
gagcacaaagaagggagccacaga

SEQ ID NO: 38777 - RNA, 18 nt, Artificial Sequence
  Synthetic oligonucleotide: CBLB-8457
gcguuggacccgcccaga

SEQ ID NO: 38778 - RNA, 19 nt, Artificial Sequence
  Synthetic oligonucleotide: CBLB-8458
agcguuggacccgcccaga

SEQ ID NO: 38779 - RNA, 20 nt, Artificial Sequence
  Synthetic oligonucleotide: CBLB-8459
cagcguuggacccgcccaga

SEQ ID NO: 38780 - RNA, 21 nt, Artificial Sequence
  Synthetic oligonucleotide: CBLB-8460
ccagcguuggacccgcccaga

SEQ ID NO: 38781 - RNA, 22 nt, Artificial Sequence
  Synthetic oligonucleotide: CBLB-8461
uccagcguuggacccgcccaga

SEQ ID NO: 38782 - RNA, 23 nt, Artificial Sequence
  Synthetic oligonucleotide: CBLB-8462
cuccagcguuggacccgcccaga

SEQ ID NO: 38783 - RNA, 24 nt, Artificial Sequence
  Synthetic oligonucleotide: CBLB-8463
ucuccagcguuggacccgcccaga

SEQ ID NO: 38784 - RNA, 18 nt, Artificial Sequence
  Synthetic oligonucleotide: CBLB-8464
cuuucugacgugcugcga

SEQ ID NO: 38785 - RNA, 19 nt, Artificial Sequence
  Synthetic oligonucleotide: CBLB-8465
ccuuucugacgugcugcga

SEQ ID NO: 38786 - RNA, 20 nt, Artificial Sequence
  Synthetic oligonucleotide: CBLB-8466
uccuuucugacgugcugcga

SEQ ID NO: 38787 - RNA, 21 nt, Artificial Sequence
  Synthetic oligonucleotide: CBLB-8467
uuccuuucugacgugcugcga

SEQ ID NO: 38788 - RNA, 22 nt, Artificial Sequence
  Synthetic oligonucleotide: CBLB-8468
auuccuuucugacgugcugcga

SEQ ID NO: 38789 - RNA, 23 nt, Artificial Sequence
  Synthetic oligonucleotide: CBLB-8469
aauuccuuucugacgugcugcga

SEQ ID NO: 38790 - RNA, 24 nt, Artificial Sequence
  Synthetic oligonucleotide: CBLB-8470
caauuccuuucugacgugcugcga

SEQ ID NO: 38791 - RNA, 18 nt, Artificial Sequence
  Synthetic oligonucleotide: CBLB-8471
agguuguuuuuaaaugga

SEQ ID NO: 38792 - RNA, 19 nt, Artificial Sequence
  Synthetic oligonucleotide: CBLB-8472
aagguuguuuuuaaaugga

SEQ ID NO: 38793 - RNA, 20 nt, Artificial Sequence
  Synthetic oligonucleotide: CBLB-8473
uaagguuguuuuuaaaugga

SEQ ID NO: 38794 - RNA, 21 nt, Artificial Sequence
  Synthetic oligonucleotide: CBLB-8474
guaagguuguuuuuaaaugga

SEQ ID NO: 38795 - RNA, 22 nt, Artificial Sequence
  Synthetic oligonucleotide: CBLB-8475
aguaagguuguuuuuaaaugga

SEQ ID NO: 38796 - RNA, 23 nt, Artificial Sequence
  Synthetic oligonucleotide: CBLB-8476
caguaagguuguuuuuaaaugga

SEQ ID NO: 38797 - RNA, 24 nt, Artificial Sequence
  Synthetic oligonucleotide: CBLB-8477
acaguaagguuguuuuuaaaugga

SEQ ID NO: 38798 - RNA, 18 nt, Artificial Sequence
  Synthetic oligonucleotide: CBLB-8478
uacuguggaggacgugga

SEQ ID NO: 38799 - RNA, 19 nt, Artificial Sequence
  Synthetic oligonucleotide: CBLB-8479
guacuguggaggacgugga

SEQ ID NO: 38800 - RNA, 20 nt, Artificial Sequence
  Synthetic oligonucleotide: CBLB-7394
uguacuguggaggacgugga

SEQ ID NO: 38801 - RNA, 21 nt, Artificial Sequence
  Synthetic oligonucleotide: CBLB-8480
guguacuguggaggacgugga

SEQ ID NO: 38802 - RNA, 22 nt, Artificial Sequence
  Synthetic oligonucleotide: CBLB-8481
uguguacuguggaggacgugga

SEQ ID NO: 38803 - RNA, 23 nt, Artificial Sequence
  Synthetic oligonucleotide: CBLB-8482
uuguguacuguggaggacgugga

SEQ ID NO: 38804 - RNA, 24 nt, Artificial Sequence
  Synthetic oligonucleotide: CBLB-8483
auuguguacuguggaggacgugga

SEQ ID NO: 38805 - RNA, 18 nt, Artificial Sequence
  Synthetic oligonucleotide: CBLB-8484
aaggguuuggcagcccua

SEQ ID NO: 38806 - RNA, 19 nt, Artificial Sequence
  Synthetic oligonucleotide: CBLB-8485
gaaggguuuggcagcccua

SEQ ID NO: 38807 - RNA, 20 nt, Artificial Sequence
  Synthetic oligonucleotide: CBLB-7396
agaaggguuuggcagcccua

SEQ ID NO: 38808 - RNA, 21 nt, Artificial Sequence
  Synthetic oligonucleotide: CBLB-8486
uagaaggguuuggcagcccua

SEQ ID NO: 38809 - RNA, 22 nt, Artificial Sequence
  Synthetic oligonucleotide: CBLB-8487
guagaaggguuuggcagcccua

SEQ ID NO: 38810 - RNA, 23 nt, Artificial Sequence
  Synthetic oligonucleotide: CBLB-8488
gguagaaggguuuggcagcccua

SEQ ID NO: 38811 - RNA, 24 nt, Artificial Sequence
  Synthetic oligonucleotide: CBLB-8489
ggguagaaggguuuggcagcccua

SEQ ID NO: 38812 - RNA, 18 nt, Artificial Sequence
  Synthetic oligonucleotide: CBLB-8490
uaacagcaaaagagaaac

SEQ ID NO: 38813 - RNA, 19 nt, Artificial Sequence
  Synthetic oligonucleotide: CBLB-8491
cuaacagcaaaagagaaac

SEQ ID NO: 38814 - RNA, 20 nt, Artificial Sequence
  Synthetic oligonucleotide: CBLB-8492
acuaacagcaaaagagaaac

SEQ ID NO: 38815 - RNA, 21 nt, Artificial Sequence
  Synthetic oligonucleotide: CBLB-8493
aacuaacagcaaaagagaaac

SEQ ID NO: 38816 - RNA, 22 nt, Artificial Sequence
  Synthetic oligonucleotide: CBLB-8494
aaacuaacagcaaaagagaaac

SEQ ID NO: 38817 - RNA, 23 nt, Artificial Sequence
  Synthetic oligonucleotide: CBLB-8495
aaaacuaacagcaaaagagaaac

SEQ ID NO: 38818 - RNA, 24 nt, Artificial Sequence
  Synthetic oligonucleotide: CBLB-8496
uaaaacuaacagcaaaagagaaac

SEQ ID NO: 38819 - RNA, 18 nt, Artificial Sequence
  Synthetic oligonucleotide: CBLB-8497
aaagagaaacucggaaac

SEQ ID NO: 38820 - RNA, 19 nt, Artificial Sequence
  Synthetic oligonucleotide: CBLB-8498
aaaagagaaacucggaaac

SEQ ID NO: 38821 - RNA, 20 nt, Artificial Sequence
  Synthetic oligonucleotide: CBLB-8499
caaaagagaaacucggaaac

SEQ ID NO: 38822 - RNA, 21 nt, Artificial Sequence
  Synthetic oligonucleotide: CBLB-8500
gcaaaagagaaacucggaaac

SEQ ID NO: 38823 - RNA, 22 nt, Artificial Sequence
  Synthetic oligonucleotide: CBLB-8501
agcaaaagagaaacucggaaac

SEQ ID NO: 38824 - RNA, 23 nt, Artificial Sequence
  Synthetic oligonucleotide: CBLB-8502
cagcaaaagagaaacucggaaac

SEQ ID NO: 38825 - RNA, 24 nt, Artificial Sequence
  Synthetic oligonucleotide: CBLB-8503
acagcaaaagagaaacucggaaac

SEQ ID NO: 38826 - RNA, 18 nt, Artificial Sequence
  Synthetic oligonucleotide: CBLB-8504
cucuuuuugauagccaac

SEQ ID NO: 38827 - RNA, 19 nt, Artificial Sequence
  Synthetic oligonucleotide: CBLB-8505
gcucuuuuugauagccaac

SEQ ID NO: 38828 - RNA, 20 nt, Artificial Sequence
  Synthetic oligonucleotide: CBLB-8506
ugcucuuuuugauagccaac

SEQ ID NO: 38829 - RNA, 21 nt, Artificial Sequence
  Synthetic oligonucleotide: CBLB-8507
uugcucuuuuugauagccaac

SEQ ID NO: 38830 - RNA, 22 nt, Artificial Sequence
  Synthetic oligonucleotide: CBLB-8508
guugcucuuuuugauagccaac

SEQ ID NO: 38831 - RNA, 23 nt, Artificial Sequence
  Synthetic oligonucleotide: CBLB-8509
uguugcucuuuuugauagccaac

SEQ ID NO: 38832 - RNA, 24 nt, Artificial Sequence
  Synthetic oligonucleotide: CBLB-8510
cuguugcucuuuuugauagccaac

SEQ ID NO: 38833 - RNA, 18 nt, Artificial Sequence
  Synthetic oligonucleotide: CBLB-8511
ugcuaugaaacaaaagac

SEQ ID NO: 38834 - RNA, 19 nt, Artificial Sequence
  Synthetic oligonucleotide: CBLB-8512
uugcuaugaaacaaaagac

SEQ ID NO: 38835 - RNA, 20 nt, Artificial Sequence
  Synthetic oligonucleotide: CBLB-8513
guugcuaugaaacaaaagac

SEQ ID NO: 38836 - RNA, 21 nt, Artificial Sequence
  Synthetic oligonucleotide: CBLB-8514
uguugcuaugaaacaaaagac

SEQ ID NO: 38837 - RNA, 22 nt, Artificial Sequence
  Synthetic oligonucleotide: CBLB-8515
cuguugcuaugaaacaaaagac

SEQ ID NO: 38838 - RNA, 23 nt, Artificial Sequence
  Synthetic oligonucleotide: CBLB-8516
ucuguugcuaugaaacaaaagac

SEQ ID NO: 38839 - RNA, 24 nt, Artificial Sequence
  Synthetic oligonucleotide: CBLB-8517
cucuguugcuaugaaacaaaagac

SEQ ID NO: 38840 - RNA, 18 nt, Artificial Sequence
  Synthetic oligonucleotide: CBLB-8518
uuguguacuguggaggac

SEQ ID NO: 38841 - RNA, 19 nt, Artificial Sequence
  Synthetic oligonucleotide: CBLB-8519
auuguguacuguggaggac

SEQ ID NO: 38842 - RNA, 20 nt, Artificial Sequence
  Synthetic oligonucleotide: CBLB-8520
cauuguguacuguggaggac

SEQ ID NO: 38843 - RNA, 21 nt, Artificial Sequence
  Synthetic oligonucleotide: CBLB-8521
ccauuguguacuguggaggac

SEQ ID NO: 38844 - RNA, 22 nt, Artificial Sequence
  Synthetic oligonucleotide: CBLB-8522
gccauuguguacuguggaggac

SEQ ID NO: 38845 - RNA, 23 nt, Artificial Sequence
  Synthetic oligonucleotide: CBLB-8523
ggccauuguguacuguggaggac

SEQ ID NO: 38846 - RNA, 24 nt, Artificial Sequence
  Synthetic oligonucleotide: CBLB-8524
gggccauuguguacuguggaggac

SEQ ID NO: 38847 - RNA, 18 nt, Artificial Sequence
  Synthetic oligonucleotide: CBLB-8525
agaaggguuuggcagccc

SEQ ID NO: 38848 - RNA, 19 nt, Artificial Sequence
  Synthetic oligonucleotide: CBLB-8526
uagaaggguuuggcagccc

SEQ ID NO: 38849 - RNA, 20 nt, Artificial Sequence
  Synthetic oligonucleotide: CBLB-8527
guagaaggguuuggcagccc

SEQ ID NO: 38850 - RNA, 21 nt, Artificial Sequence
  Synthetic oligonucleotide: CBLB-8528
gguagaaggguuuggcagccc

SEQ ID NO: 38851 - RNA, 22 nt, Artificial Sequence
  Synthetic oligonucleotide: CBLB-8529
ggguagaaggguuuggcagccc

SEQ ID NO: 38852 - RNA, 23 nt, Artificial Sequence
  Synthetic oligonucleotide: CBLB-8530
uggguagaaggguuuggcagccc

SEQ ID NO: 38853 - RNA, 24 nt, Artificial Sequence
  Synthetic oligonucleotide: CBLB-8531
cuggguagaaggguuuggcagccc

SEQ ID NO: 38854 - RNA, 18 nt, Artificial Sequence
  Synthetic oligonucleotide: CBLB-8532
guuuccacuuucguuccc

SEQ ID NO: 38855 - RNA, 19 nt, Artificial Sequence
  Synthetic oligonucleotide: CBLB-8533
cguuuccacuuucguuccc

SEQ ID NO: 38856 - RNA, 20 nt, Artificial Sequence
  Synthetic oligonucleotide: CBLB-7212
ccguuuccacuuucguuccc

SEQ ID NO: 38857 - RNA, 21 nt, Artificial Sequence
  Synthetic oligonucleotide: CBLB-8534
cccguuuccacuuucguuccc

SEQ ID NO: 38858 - RNA, 22 nt, Artificial Sequence
  Synthetic oligonucleotide: CBLB-8535
ucccguuuccacuuucguuccc

SEQ ID NO: 38859 - RNA, 23 nt, Artificial Sequence
  Synthetic oligonucleotide: CBLB-8536
uucccguuuccacuuucguuccc

SEQ ID NO: 38860 - RNA, 24 nt, Artificial Sequence
  Synthetic oligonucleotide: CBLB-8537
uuucccguuuccacuuucguuccc

SEQ ID NO: 38861 - RNA, 18 nt, Artificial Sequence
  Synthetic oligonucleotide: CBLB-8538
uccagcguuggacccgcc

SEQ ID NO: 38862 - RNA, 19 nt, Artificial Sequence
  Synthetic oligonucleotide: CBLB-8539
cuccagcguuggacccgcc

SEQ ID NO: 38863 - RNA, 20 nt, Artificial Sequence
  Synthetic oligonucleotide: CBLB-8540
ucuccagcguuggacccgcc

SEQ ID NO: 38864 - RNA, 21 nt, Artificial Sequence
  Synthetic oligonucleotide: CBLB-8541
uucuccagcguuggacccgcc

SEQ ID NO: 38865 - RNA, 22 nt, Artificial Sequence
  Synthetic oligonucleotide: CBLB-8542
uuucuccagcguuggacccgcc

SEQ ID NO: 38866 - RNA, 23 nt, Artificial Sequence
  Synthetic oligonucleotide: CBLB-8543
auuucuccagcguuggacccgcc

SEQ ID NO: 38867 - RNA, 24 nt, Artificial Sequence
  Synthetic oligonucleotide: CBLB-8544
aauuucuccagcguuggacccgcc

SEQ ID NO: 38868 - RNA, 18 nt, Artificial Sequence
  Synthetic oligonucleotide: CBLB-8545
cguuuccacuuucguucc

SEQ ID NO: 38869 - RNA, 19 nt, Artificial Sequence
  Synthetic oligonucleotide: CBLB-8546
ccguuuccacuuucguucc

SEQ ID NO: 38870 - RNA, 20 nt, Artificial Sequence
  Synthetic oligonucleotide: CBLB-7410
cccguuuccacuuucguucc

SEQ ID NO: 38871 - RNA, 21 nt, Artificial Sequence
  Synthetic oligonucleotide: CBLB-8547
ucccguuuccacuuucguucc

SEQ ID NO: 38872 - RNA, 22 nt, Artificial Sequence
  Synthetic oligonucleotide: CBLB-8548
uucccguuuccacuuucguucc

SEQ ID NO: 38873 - RNA, 23 nt, Artificial Sequence
  Synthetic oligonucleotide: CBLB-8549
uuucccguuuccacuuucguucc

SEQ ID NO: 38874 - RNA, 24 nt, Artificial Sequence
  Synthetic oligonucleotide: CBLB-8550
cuuucccguuuccacuuucguucc

SEQ ID NO: 38875 - RNA, 18 nt, Artificial Sequence
  Synthetic oligonucleotide: CBLB-8551
uaggaagguaagcgaagc

SEQ ID NO: 38876 - RNA, 19 nt, Artificial Sequence
  Synthetic oligonucleotide: CBLB-8552
cuaggaagguaagcgaagc

SEQ ID NO: 38877 - RNA, 20 nt, Artificial Sequence
  Synthetic oligonucleotide: CBLB-7215
acuaggaagguaagcgaagc

SEQ ID NO: 38878 - RNA, 21 nt, Artificial Sequence
  Synthetic oligonucleotide: CBLB-8553
gacuaggaagguaagcgaagc

SEQ ID NO: 38879 - RNA, 22 nt, Artificial Sequence
  Synthetic oligonucleotide: CBLB-8554
agacuaggaagguaagcgaagc

SEQ ID NO: 38880 - RNA, 23 nt, Artificial Sequence
  Synthetic oligonucleotide: CBLB-8555
aagacuaggaagguaagcgaagc

SEQ ID NO: 38881 - RNA, 24 nt, Artificial Sequence
  Synthetic oligonucleotide: CBLB-8556
aaagacuaggaagguaagcgaagc

SEQ ID NO: 38882 - RNA, 18 nt, Artificial Sequence
  Synthetic oligonucleotide: CBLB-8557
cguggacggggcggcagc

SEQ ID NO: 38883 - RNA, 19 nt, Artificial Sequence
  Synthetic oligonucleotide: CBLB-8558
acguggacggggcggcagc

SEQ ID NO: 38884 - RNA, 20 nt, Artificial Sequence
  Synthetic oligonucleotide: CBLB-8559
gacguggacggggcggcagc

SEQ ID NO: 38885 - RNA, 21 nt, Artificial Sequence
  Synthetic oligonucleotide: CBLB-8560
ggacguggacggggcggcagc

SEQ ID NO: 38886 - RNA, 22 nt, Artificial Sequence
  Synthetic oligonucleotide: CBLB-8561
aggacguggacggggcggcagc

SEQ ID NO: 38887 - RNA, 23 nt, Artificial Sequence
  Synthetic oligonucleotide: CBLB-8562
gaggacguggacggggcggcagc

SEQ ID NO: 38888 - RNA, 24 nt, Artificial Sequence
  Synthetic oligonucleotide: CBLB-8563
ggaggacguggacggggcggcagc

SEQ ID NO: 38889 - RNA, 18 nt, Artificial Sequence
  Synthetic oligonucleotide: CBLB-8564
uggacggggcggcagcgc

SEQ ID NO: 38890 - RNA, 19 nt, Artificial Sequence
  Synthetic oligonucleotide: CBLB-8565
guggacggggcggcagcgc

SEQ ID NO: 38891 - RNA, 20 nt, Artificial Sequence
  Synthetic oligonucleotide: CBLB-8566
cguggacggggcggcagcgc

SEQ ID NO: 38892 - RNA, 21 nt, Artificial Sequence
  Synthetic oligonucleotide: CBLB-8567
acguggacggggcggcagcgc

SEQ ID NO: 38893 - RNA, 22 nt, Artificial Sequence
  Synthetic oligonucleotide: CBLB-8568
gacguggacggggcggcagcgc

SEQ ID NO: 38894 - RNA, 23 nt, Artificial Sequence
  Synthetic oligonucleotide: CBLB-8569
ggacguggacggggcggcagcgc

SEQ ID NO: 38895 - RNA, 24 nt, Artificial Sequence
  Synthetic oligonucleotide: CBLB-8570
aggacguggacggggcggcagcgc

SEQ ID NO: 38896 - RNA, 18 nt, Artificial Sequence
  Synthetic oligonucleotide: CBLB-8571
ugcgagcgggccuuccuc

SEQ ID NO: 38897 - RNA, 19 nt, Artificial Sequence
  Synthetic oligonucleotide: CBLB-8572
cugcgagcgggccuuccuc

SEQ ID NO: 38898 - RNA, 20 nt, Artificial Sequence
  Synthetic oligonucleotide: CBLB-7419
gcugcgagcgggccuuccuc

SEQ ID NO: 38899 - RNA, 21 nt, Artificial Sequence
  Synthetic oligonucleotide: CBLB-8573
ugcugcgagcgggccuuccuc

SEQ ID NO: 38900 - RNA, 22 nt, Artificial Sequence
  Synthetic oligonucleotide: CBLB-8574
gugcugcgagcgggccuuccuc

SEQ ID NO: 38901 - RNA, 23 nt, Artificial Sequence
  Synthetic oligonucleotide: CBLB-8575
cgugcugcgagcgggccuuccuc

SEQ ID NO: 38902 - RNA, 24 nt, Artificial Sequence
  Synthetic oligonucleotide: CBLB-8576
acgugcugcgagcgggccuuccuc

SEQ ID NO: 38903 - RNA, 18 nt, Artificial Sequence
  Synthetic oligonucleotide: CBLB-8577
ccguuuccacuuucguuc

SEQ ID NO: 38904 - RNA, 19 nt, Artificial Sequence
  Synthetic oligonucleotide: CBLB-8578
cccguuuccacuuucguuc

SEQ ID NO: 38905 - RNA, 20 nt, Artificial Sequence
  Synthetic oligonucleotide: CBLB-8579
ucccguuuccacuuucguuc

SEQ ID NO: 38906 - RNA, 21 nt, Artificial Sequence
  Synthetic oligonucleotide: CBLB-8580
uucccguuuccacuuucguuc

SEQ ID NO: 38907 - RNA, 22 nt, Artificial Sequence
  Synthetic oligonucleotide: CBLB-8581
uuucccguuuccacuuucguuc

SEQ ID NO: 38908 - RNA, 23 nt, Artificial Sequence
  Synthetic oligonucleotide: CBLB-8582
cuuucccguuuccacuuucguuc

SEQ ID NO: 38909 - RNA, 24 nt, Artificial Sequence
  Synthetic oligonucleotide: CBLB-8583
ccuuucccguuuccacuuucguuc

SEQ ID NO: 38910 - RNA, 18 nt, Artificial Sequence
  Synthetic oligonucleotide: CBLB-8584
cuuuuuaagagcacaaag

SEQ ID NO: 38911 - RNA, 19 nt, Artificial Sequence
  Synthetic oligonucleotide: CBLB-8585
ccuuuuuaagagcacaaag

SEQ ID NO: 38912 - RNA, 20 nt, Artificial Sequence
  Synthetic oligonucleotide: CBLB-8586
gccuuuuuaagagcacaaag

SEQ ID NO: 38913 - RNA, 21 nt, Artificial Sequence
  Synthetic oligonucleotide: CBLB-8587
ggccuuuuuaagagcacaaag

SEQ ID NO: 38914 - RNA, 22 nt, Artificial Sequence
  Synthetic oligonucleotide: CBLB-8588
cggccuuuuuaagagcacaaag

SEQ ID NO: 38915 - RNA, 23 nt, Artificial Sequence
  Synthetic oligonucleotide: CBLB-8589
ucggccuuuuuaagagcacaaag

SEQ ID NO: 38916 - RNA, 24 nt, Artificial Sequence
  Synthetic oligonucleotide: CBLB-8590
gucggccuuuuuaagagcacaaag

SEQ ID NO: 38917 - RNA, 18 nt, Artificial Sequence
  Synthetic oligonucleotide: CBLB-8591
cuaggaagguaagcgaag

SEQ ID NO: 38918 - RNA, 19 nt, Artificial Sequence
  Synthetic oligonucleotide: CBLB-8592
acuaggaagguaagcgaag

SEQ ID NO: 38919 - RNA, 20 nt, Artificial Sequence
  Synthetic oligonucleotide: CBLB-8593
gacuaggaagguaagcgaag

SEQ ID NO: 38920 - RNA, 21 nt, Artificial Sequence
  Synthetic oligonucleotide: CBLB-8594
agacuaggaagguaagcgaag

SEQ ID NO: 38921 - RNA, 22 nt, Artificial Sequence
  Synthetic oligonucleotide: CBLB-8595
aagacuaggaagguaagcgaag

SEQ ID NO: 38922 - RNA, 23 nt, Artificial Sequence
  Synthetic oligonucleotide: CBLB-8596
aaagacuaggaagguaagcgaag

SEQ ID NO: 38923 - RNA, 24 nt, Artificial Sequence
  Synthetic oligonucleotide: CBLB-8597
aaaagacuaggaagguaagcgaag

SEQ ID NO: 38924 - RNA, 18 nt, Artificial Sequence
  Synthetic oligonucleotide: CBLB-8598
cguuggacccgcccagag

SEQ ID NO: 38925 - RNA, 19 nt, Artificial Sequence
  Synthetic oligonucleotide: CBLB-8599
gcguuggacccgcccagag

SEQ ID NO: 38926 - RNA, 20 nt, Artificial Sequence
  Synthetic oligonucleotide: CBLB-7428
agcguuggacccgcccagag

SEQ ID NO: 38927 - RNA, 21 nt, Artificial Sequence
  Synthetic oligonucleotide: CBLB-8600
cagcguuggacccgcccagag

SEQ ID NO: 38928 - RNA, 22 nt, Artificial Sequence
  Synthetic oligonucleotide: CBLB-8601
ccagcguuggacccgcccagag

SEQ ID NO: 38929 - RNA, 23 nt, Artificial Sequence
  Synthetic oligonucleotide: CBLB-8602
uccagcguuggacccgcccagag

SEQ ID NO: 38930 - RNA, 24 nt, Artificial Sequence
  Synthetic oligonucleotide: CBLB-8603
cuccagcguuggacccgcccagag

SEQ ID NO: 38931 - RNA, 18 nt, Artificial Sequence
  Synthetic oligonucleotide: CBLB-8604
acggggcggcagcgcgag

SEQ ID NO: 38932 - RNA, 19 nt, Artificial Sequence
  Synthetic oligonucleotide: CBLB-8605
gacggggcggcagcgcgag

SEQ ID NO: 38933 - RNA, 20 nt, Artificial Sequence
  Synthetic oligonucleotide: CBLB-8606
ggacggggcggcagcgcgag

SEQ ID NO: 38934 - RNA, 21 nt, Artificial Sequence
  Synthetic oligonucleotide: CBLB-8607
uggacggggcggcagcgcgag

SEQ ID NO: 38935 - RNA, 22 nt, Artificial Sequence
  Synthetic oligonucleotide: CBLB-8608
guggacggggcggcagcgcgag

SEQ ID NO: 38936 - RNA, 23 nt, Artificial Sequence
  Synthetic oligonucleotide: CBLB-8609
cguggacggggcggcagcgcgag

SEQ ID NO: 38937 - RNA, 24 nt, Artificial Sequence
  Synthetic oligonucleotide: CBLB-8610
acguggacggggcggcagcgcgag

SEQ ID NO: 38938 - RNA, 18 nt, Artificial Sequence
  Synthetic oligonucleotide: CBLB-8611
uugcuuuggcaugauuag

SEQ ID NO: 38939 - RNA, 19 nt, Artificial Sequence
  Synthetic oligonucleotide: CBLB-8612
auugcuuuggcaugauuag

SEQ ID NO: 38940 - RNA, 20 nt, Artificial Sequence
  Synthetic oligonucleotide: CBLB-8613
uauugcuuuggcaugauuag

SEQ ID NO: 38941 - RNA, 21 nt, Artificial Sequence
  Synthetic oligonucleotide: CBLB-8614
uuauugcuuuggcaugauuag

SEQ ID NO: 38942 - RNA, 22 nt, Artificial Sequence
  Synthetic oligonucleotide: CBLB-8615
uuuauugcuuuggcaugauuag

SEQ ID NO: 38943 - RNA, 23 nt, Artificial Sequence
  Synthetic oligonucleotide: CBLB-8616
uuuuauugcuuuggcaugauuag

SEQ ID NO: 38944 - RNA, 24 nt, Artificial Sequence
  Synthetic oligonucleotide: CBLB-8617
cuuuuauugcuuuggcaugauuag

SEQ ID NO: 38945 - RNA, 18 nt, Artificial Sequence
  Synthetic oligonucleotide: CBLB-8618
agaugaauuucuccagcg

SEQ ID NO: 38946 - RNA, 19 nt, Artificial Sequence
  Synthetic oligonucleotide: CBLB-8619
gagaugaauuucuccagcg

SEQ ID NO: 38947 - RNA, 20 nt, Artificial Sequence
  Synthetic oligonucleotide: CBLB-8620
ggagaugaauuucuccagcg

SEQ ID NO: 38948 - RNA, 21 nt, Artificial Sequence
  Synthetic oligonucleotide: CBLB-8621
gggagaugaauuucuccagcg

SEQ ID NO: 38949 - RNA, 22 nt, Artificial Sequence
  Synthetic oligonucleotide: CBLB-8622
agggagaugaauuucuccagcg

SEQ ID NO: 38950 - RNA, 23 nt, Artificial Sequence
  Synthetic oligonucleotide: CBLB-8623
uagggagaugaauuucuccagcg

SEQ ID NO: 38951 - RNA, 24 nt, Artificial Sequence
  Synthetic oligonucleotide: CBLB-8624
cuagggagaugaauuucuccagcg

SEQ ID NO: 38952 - RNA, 18 nt, Artificial Sequence
  Synthetic oligonucleotide: CBLB-8625
uuggacccgcccagagcg

SEQ ID NO: 38953 - RNA, 19 nt, Artificial Sequence
  Synthetic oligonucleotide: CBLB-8626
guuggacccgcccagagcg

SEQ ID NO: 38954 - RNA, 20 nt, Artificial Sequence
  Synthetic oligonucleotide: CBLB-8627
cguuggacccgcccagagcg

SEQ ID NO: 38955 - RNA, 21 nt, Artificial Sequence
  Synthetic oligonucleotide: CBLB-8628
gcguuggacccgcccagagcg

SEQ ID NO: 38956 - RNA, 22 nt, Artificial Sequence
  Synthetic oligonucleotide: CBLB-8629
agcguuggacccgcccagagcg

SEQ ID NO: 38957 - RNA, 23 nt, Artificial Sequence
  Synthetic oligonucleotide: CBLB-8630
cagcguuggacccgcccagagcg

SEQ ID NO: 38958 - RNA, 24 nt, Artificial Sequence
  Synthetic oligonucleotide: CBLB-8631
ccagcguuggacccgcccagagcg

SEQ ID NO: 38959 - RNA, 18 nt, Artificial Sequence
  Synthetic oligonucleotide: CBLB-8632
ggacggggcggcagcgcg

SEQ ID NO: 38960 - RNA, 19 nt, Artificial Sequence
  Synthetic oligonucleotide: CBLB-8633
uggacggggcggcagcgcg

SEQ ID NO: 38961 - RNA, 20 nt, Artificial Sequence
  Synthetic oligonucleotide: CBLB-7433
guggacggggcggcagcgcg

SEQ ID NO: 38962 - RNA, 21 nt, Artificial Sequence
  Synthetic oligonucleotide: CBLB-8634
cguggacggggcggcagcgcg

SEQ ID NO: 38963 - RNA, 22 nt, Artificial Sequence
  Synthetic oligonucleotide: CBLB-8635
acguggacggggcggcagcgcg

SEQ ID NO: 38964 - RNA, 23 nt, Artificial Sequence
  Synthetic oligonucleotide: CBLB-8636
gacguggacggggcggcagcgcg

SEQ ID NO: 38965 - RNA, 24 nt, Artificial Sequence
  Synthetic oligonucleotide: CBLB-8637
ggacguggacggggcggcagcgcg

SEQ ID NO: 38966 - RNA, 18 nt, Artificial Sequence
  Synthetic oligonucleotide: CBLB-8638
ggcggcagcgcgaggagg

SEQ ID NO: 38967 - RNA, 19 nt, Artificial Sequence
  Synthetic oligonucleotide: CBLB-8639
gggcggcagcgcgaggagg

SEQ ID NO: 38968 - RNA, 20 nt, Artificial Sequence
  Synthetic oligonucleotide: CBLB-8640
ggggcggcagcgcgaggagg

SEQ ID NO: 38969 - RNA, 21 nt, Artificial Sequence
  Synthetic oligonucleotide: CBLB-8641
cggggcggcagcgcgaggagg

SEQ ID NO: 38970 - RNA, 22 nt, Artificial Sequence
  Synthetic oligonucleotide: CBLB-8642
acggggcggcagcgcgaggagg

SEQ ID NO: 38971 - RNA, 23 nt, Artificial Sequence
  Synthetic oligonucleotide: CBLB-8643
gacggggcggcagcgcgaggagg

SEQ ID NO: 38972 - RNA, 24 nt, Artificial Sequence
  Synthetic oligonucleotide: CBLB-8644
ggacggggcggcagcgcgaggagg

SEQ ID NO: 38973 - RNA, 18 nt, Artificial Sequence
  Synthetic oligonucleotide: CBLB-8645
ccuccucagucauuuagg

SEQ ID NO: 38974 - RNA, 19 nt, Artificial Sequence
  Synthetic oligonucleotide: CBLB-8646
uccuccucagucauuuagg

SEQ ID NO: 38975 - RNA, 20 nt, Artificial Sequence
  Synthetic oligonucleotide: CBLB-8647
cuccuccucagucauuuagg

SEQ ID NO: 38976 - RNA, 21 nt, Artificial Sequence
  Synthetic oligonucleotide: CBLB-8648
ucuccuccucagucauuuagg

SEQ ID NO: 38977 - RNA, 22 nt, Artificial Sequence
  Synthetic oligonucleotide: CBLB-8649
gucuccuccucagucauuuagg

SEQ ID NO: 38978 - RNA, 23 nt, Artificial Sequence
  Synthetic oligonucleotide: CBLB-8650
ugucuccuccucagucauuuagg

SEQ ID NO: 38979 - RNA, 24 nt, Artificial Sequence
  Synthetic oligonucleotide: CBLB-8651
cugucuccuccucagucauuuagg

SEQ ID NO: 38980 - RNA, 18 nt, Artificial Sequence
  Synthetic oligonucleotide: CBLB-8652
uuuggcugcuguccuggg

SEQ ID NO: 38981 - RNA, 19 nt, Artificial Sequence
  Synthetic oligonucleotide: CBLB-8653
guuuggcugcuguccuggg

SEQ ID NO: 38982 - RNA, 20 nt, Artificial Sequence
  Synthetic oligonucleotide: CBLB-8654
uguuuggcugcuguccuggg

SEQ ID NO: 38983 - RNA, 21 nt, Artificial Sequence
  Synthetic oligonucleotide: CBLB-8655
cuguuuggcugcuguccuggg

SEQ ID NO: 38984 - RNA, 22 nt, Artificial Sequence
  Synthetic oligonucleotide: CBLB-8656
ccuguuuggcugcuguccuggg

SEQ ID NO: 38985 - RNA, 23 nt, Artificial Sequence
  Synthetic oligonucleotide: CBLB-8657
accuguuuggcugcuguccuggg

SEQ ID NO: 38986 - RNA, 24 nt, Artificial Sequence
  Synthetic oligonucleotide: CBLB-8658
gaccuguuuggcugcuguccuggg

SEQ ID NO: 38987 - RNA, 18 nt, Artificial Sequence
  Synthetic oligonucleotide: CBLB-8659
aagagguaacaaugcugg

SEQ ID NO: 38988 - RNA, 19 nt, Artificial Sequence
  Synthetic oligonucleotide: CBLB-8660
aaagagguaacaaugcugg

SEQ ID NO: 38989 - RNA, 20 nt, Artificial Sequence
  Synthetic oligonucleotide: CBLB-8661
gaaagagguaacaaugcugg

SEQ ID NO: 38990 - RNA, 21 nt, Artificial Sequence
  Synthetic oligonucleotide: CBLB-8662
agaaagagguaacaaugcugg

SEQ ID NO: 38991 - RNA, 22 nt, Artificial Sequence
  Synthetic oligonucleotide: CBLB-8663
cagaaagagguaacaaugcugg

SEQ ID NO: 38992 - RNA, 23 nt, Artificial Sequence
  Synthetic oligonucleotide: CBLB-8664
acagaaagagguaacaaugcugg

SEQ ID NO: 38993 - RNA, 24 nt, Artificial Sequence
  Synthetic oligonucleotide: CBLB-8665
cacagaaagagguaacaaugcugg

SEQ ID NO: 38994 - RNA, 18 nt, Artificial Sequence
  Synthetic oligonucleotide: CBLB-8666
guacuguggaggacgugg

SEQ ID NO: 38995 - RNA, 19 nt, Artificial Sequence
  Synthetic oligonucleotide: CBLB-8667
uguacuguggaggacgugg

SEQ ID NO: 38996 - RNA, 20 nt, Artificial Sequence
  Synthetic oligonucleotide: CBLB-8668
guguacuguggaggacgugg

SEQ ID NO: 38997 - RNA, 21 nt, Artificial Sequence
  Synthetic oligonucleotide: CBLB-8669
uguguacuguggaggacgugg

SEQ ID NO: 38998 - RNA, 22 nt, Artificial Sequence
  Synthetic oligonucleotide: CBLB-8670
uuguguacuguggaggacgugg

SEQ ID NO: 38999 - RNA, 23 nt, Artificial Sequence
  Synthetic oligonucleotide: CBLB-8671
auuguguacuguggaggacgugg

SEQ ID NO: 39000 - RNA, 24 nt, Artificial Sequence
  Synthetic oligonucleotide: CBLB-8672
cauuguguacuguggaggacgugg

SEQ ID NO: 39001 - RNA, 18 nt, Artificial Sequence
  Synthetic oligonucleotide: CBLB-8673
uggggccauuguguacug

SEQ ID NO: 39002 - RNA, 19 nt, Artificial Sequence
  Synthetic oligonucleotide: CBLB-8674
cuggggccauuguguacug

SEQ ID NO: 39003 - RNA, 20 nt, Artificial Sequence
  Synthetic oligonucleotide: CBLB-7234
ucuggggccauuguguacug

SEQ ID NO: 39004 - RNA, 21 nt, Artificial Sequence
  Synthetic oligonucleotide: CBLB-8675
cucuggggccauuguguacug

SEQ ID NO: 39005 - RNA, 22 nt, Artificial Sequence
  Synthetic oligonucleotide: CBLB-8676
ccucuggggccauuguguacug

SEQ ID NO: 39006 - RNA, 23 nt, Artificial Sequence
  Synthetic oligonucleotide: CBLB-8677
uccucuggggccauuguguacug

SEQ ID NO: 39007 - RNA, 24 nt, Artificial Sequence
  Synthetic oligonucleotide: CBLB-8678
uuccucuggggccauuguguacug

SEQ ID NO: 39008 - RNA, 18 nt, Artificial Sequence
  Synthetic oligonucleotide: CBLB-8679
cauuggcugcacccgcug

SEQ ID NO: 39009 - RNA, 19 nt, Artificial Sequence
  Synthetic oligonucleotide: CBLB-8680
ccauuggcugcacccgcug

SEQ ID NO: 39010 - RNA, 20 nt, Artificial Sequence
  Synthetic oligonucleotide: CBLB-8681
uccauuggcugcacccgcug

SEQ ID NO: 39011 - RNA, 21 nt, Artificial Sequence
  Synthetic oligonucleotide: CBLB-8682
guccauuggcugcacccgcug

SEQ ID NO: 39012 - RNA, 22 nt, Artificial Sequence
  Synthetic oligonucleotide: CBLB-8683
cguccauuggcugcacccgcug

SEQ ID NO: 39013 - RNA, 23 nt, Artificial Sequence
  Synthetic oligonucleotide: CBLB-8684
ccguccauuggcugcacccgcug

SEQ ID NO: 39014 - RNA, 24 nt, Artificial Sequence
  Synthetic oligonucleotide: CBLB-8685
cccguccauuggcugcacccgcug

SEQ ID NO: 39015 - RNA, 18 nt, Artificial Sequence
  Synthetic oligonucleotide: CBLB-8686
gggccauuguguacugug

SEQ ID NO: 39016 - RNA, 19 nt, Artificial Sequence
  Synthetic oligonucleotide: CBLB-8687
ggggccauuguguacugug

SEQ ID NO: 39017 - RNA, 20 nt, Artificial Sequence
  Synthetic oligonucleotide: CBLB-8688
uggggccauuguguacugug

SEQ ID NO: 39018 - RNA, 21 nt, Artificial Sequence
  Synthetic oligonucleotide: CBLB-8689
cuggggccauuguguacugug

SEQ ID NO: 39019 - RNA, 22 nt, Artificial Sequence
  Synthetic oligonucleotide: CBLB-8690
ucuggggccauuguguacugug

SEQ ID NO: 39020 - RNA, 23 nt, Artificial Sequence
  Synthetic oligonucleotide: CBLB-8691
cucuggggccauuguguacugug

SEQ ID NO: 39021 - RNA, 24 nt, Artificial Sequence
  Synthetic oligonucleotide: CBLB-8692
ccucuggggccauuguguacugug

SEQ ID NO: 39022 - RNA, 18 nt, Artificial Sequence
  Synthetic oligonucleotide: CBLB-8693
aacagcaaaagagaaacu

SEQ ID NO: 39023 - RNA, 19 nt, Artificial Sequence
  Synthetic oligonucleotide: CBLB-8694
uaacagcaaaagagaaacu

SEQ ID NO: 39024 - RNA, 20 nt, Artificial Sequence
  Synthetic oligonucleotide: CBLB-7445
cuaacagcaaaagagaaacu

SEQ ID NO: 39025 - RNA, 21 nt, Artificial Sequence
  Synthetic oligonucleotide: CBLB-8695
acuaacagcaaaagagaaacu

SEQ ID NO: 39026 - RNA, 22 nt, Artificial Sequence
  Synthetic oligonucleotide: CBLB-8696
aacuaacagcaaaagagaaacu

SEQ ID NO: 39027 - RNA, 23 nt, Artificial Sequence
  Synthetic oligonucleotide: CBLB-8697
aaacuaacagcaaaagagaaacu

SEQ ID NO: 39028 - RNA, 24 nt, Artificial Sequence
  Synthetic oligonucleotide: CBLB-8698
aaaacuaacagcaaaagagaaacu

SEQ ID NO: 39029 - RNA, 18 nt, Artificial Sequence
  Synthetic oligonucleotide: CBLB-8699
aagagaaacucggaaacu

SEQ ID NO: 39030 - RNA, 19 nt, Artificial Sequence
  Synthetic oligonucleotide: CBLB-8700
aaagagaaacucggaaacu

SEQ ID NO: 39031 - RNA, 20 nt, Artificial Sequence
  Synthetic oligonucleotide: CBLB-7446
aaaagagaaacucggaaacu

SEQ ID NO: 39032 - RNA, 21 nt, Artificial Sequence
  Synthetic oligonucleotide: CBLB-8701
caaaagagaaacucggaaacu

SEQ ID NO: 39033 - RNA, 22 nt, Artificial Sequence
  Synthetic oligonucleotide: CBLB-8702
gcaaaagagaaacucggaaacu

SEQ ID NO: 39034 - RNA, 23 nt, Artificial Sequence
  Synthetic oligonucleotide: CBLB-8703
agcaaaagagaaacucggaaacu

SEQ ID NO: 39035 - RNA, 24 nt, Artificial Sequence
  Synthetic oligonucleotide: CBLB-8704
cagcaaaagagaaacucggaaacu

SEQ ID NO: 39036 - RNA, 18 nt, Artificial Sequence
  Synthetic oligonucleotide: CBLB-8705
gcuaugaaacaaaagacu

SEQ ID NO: 39037 - RNA, 19 nt, Artificial Sequence
  Synthetic oligonucleotide: CBLB-8706
ugcuaugaaacaaaagacu

SEQ ID NO: 39038 - RNA, 20 nt, Artificial Sequence
  Synthetic oligonucleotide: CBLB-7447
uugcuaugaaacaaaagacu

SEQ ID NO: 39039 - RNA, 21 nt, Artificial Sequence
  Synthetic oligonucleotide: CBLB-8707
guugcuaugaaacaaaagacu

SEQ ID NO: 39040 - RNA, 22 nt, Artificial Sequence
  Synthetic oligonucleotide: CBLB-8708
uguugcuaugaaacaaaagacu

SEQ ID NO: 39041 - RNA, 23 nt, Artificial Sequence
  Synthetic oligonucleotide: CBLB-8709
cuguugcuaugaaacaaaagacu

SEQ ID NO: 39042 - RNA, 24 nt, Artificial Sequence
  Synthetic oligonucleotide: CBLB-8710
ucuguugcuaugaaacaaaagacu

SEQ ID NO: 39043 - RNA, 18 nt, Artificial Sequence
  Synthetic oligonucleotide: CBLB-8711
cuggggccauuguguacu

SEQ ID NO: 39044 - RNA, 19 nt, Artificial Sequence
  Synthetic oligonucleotide: CBLB-8712
ucuggggccauuguguacu

SEQ ID NO: 39045 - RNA, 20 nt, Artificial Sequence
  Synthetic oligonucleotide: CBLB-8713
cucuggggccauuguguacu

SEQ ID NO: 39046 - RNA, 21 nt, Artificial Sequence
  Synthetic oligonucleotide: CBLB-8714
ccucuggggccauuguguacu

SEQ ID NO: 39047 - RNA, 22 nt, Artificial Sequence
  Synthetic oligonucleotide: CBLB-8715
uccucuggggccauuguguacu

SEQ ID NO: 39048 - RNA, 23 nt, Artificial Sequence
  Synthetic oligonucleotide: CBLB-8716
uuccucuggggccauuguguacu

SEQ ID NO: 39049 - RNA, 24 nt, Artificial Sequence
  Synthetic oligonucleotide: CBLB-8717
cuuccucuggggccauuguguacu

SEQ ID NO: 39050 - RNA, 18 nt, Artificial Sequence
  Synthetic oligonucleotide: CBLB-8718
gaaggguuuggcagcccu

SEQ ID NO: 39051 - RNA, 19 nt, Artificial Sequence
  Synthetic oligonucleotide: CBLB-8719
agaaggguuuggcagcccu

SEQ ID NO: 39052 - RNA, 20 nt, Artificial Sequence
  Synthetic oligonucleotide: CBLB-7239
uagaaggguuuggcagcccu

SEQ ID NO: 39053 - RNA, 21 nt, Artificial Sequence
  Synthetic oligonucleotide: CBLB-8720
guagaaggguuuggcagcccu

SEQ ID NO: 39054 - RNA, 22 nt, Artificial Sequence
  Synthetic oligonucleotide: CBLB-8721
gguagaaggguuuggcagcccu

SEQ ID NO: 39055 - RNA, 23 nt, Artificial Sequence
  Synthetic oligonucleotide: CBLB-8722
ggguagaaggguuuggcagcccu

SEQ ID NO: 39056 - RNA, 24 nt, Artificial Sequence
  Synthetic oligonucleotide: CBLB-8723
uggguagaaggguuuggcagcccu

SEQ ID NO: 39057 - RNA, 18 nt, Artificial Sequence
  Synthetic oligonucleotide: CBLB-8724
cugcgagcgggccuuccu

SEQ ID NO: 39058 - RNA, 19 nt, Artificial Sequence
  Synthetic oligonucleotide: CBLB-8725
gcugcgagcgggccuuccu

SEQ ID NO: 39059 - RNA, 20 nt, Artificial Sequence
  Synthetic oligonucleotide: CBLB-8726
ugcugcgagcgggccuuccu

SEQ ID NO: 39060 - RNA, 21 nt, Artificial Sequence
  Synthetic oligonucleotide: CBLB-8727
gugcugcgagcgggccuuccu

SEQ ID NO: 39061 - RNA, 22 nt, Artificial Sequence
  Synthetic oligonucleotide: CBLB-8728
cgugcugcgagcgggccuuccu

SEQ ID NO: 39062 - RNA, 23 nt, Artificial Sequence
  Synthetic oligonucleotide: CBLB-8729
acgugcugcgagcgggccuuccu

SEQ ID NO: 39063 - RNA, 24 nt, Artificial Sequence
  Synthetic oligonucleotide: CBLB-8730
gacgugcugcgagcgggccuuccu

SEQ ID NO: 39064 - RNA, 18 nt, Artificial Sequence
  Synthetic oligonucleotide: CBLB-8731
auuccuuucugacgugcu

SEQ ID NO: 39065 - RNA, 19 nt, Artificial Sequence
  Synthetic oligonucleotide: CBLB-8732
aauuccuuucugacgugcu

SEQ ID NO: 39066 - RNA, 20 nt, Artificial Sequence
  Synthetic oligonucleotide: CBLB-8733
caauuccuuucugacgugcu

SEQ ID NO: 39067 - RNA, 21 nt, Artificial Sequence
  Synthetic oligonucleotide: CBLB-8734
ccaauuccuuucugacgugcu

SEQ ID NO: 39068 - RNA, 22 nt, Artificial Sequence
  Synthetic oligonucleotide: CBLB-8735
uccaauuccuuucugacgugcu

SEQ ID NO: 39069 - RNA, 23 nt, Artificial Sequence
  Synthetic oligonucleotide: CBLB-8736
guccaauuccuuucugacgugcu

SEQ ID NO: 39070 - RNA, 24 nt, Artificial Sequence
  Synthetic oligonucleotide: CBLB-8737
aguccaauuccuuucugacgugcu

SEQ ID NO: 39071 - RNA, 18 nt, Artificial Sequence
  Synthetic oligonucleotide: CBLB-8738
agccacuacucuguugcu

SEQ ID NO: 39072 - RNA, 19 nt, Artificial Sequence
  Synthetic oligonucleotide: CBLB-8739
cagccacuacucuguugcu

SEQ ID NO: 39073 - RNA, 20 nt, Artificial Sequence
  Synthetic oligonucleotide: CBLB-8740
ccagccacuacucuguugcu

SEQ ID NO: 39074 - RNA, 21 nt, Artificial Sequence
  Synthetic oligonucleotide: CBLB-8741
uccagccacuacucuguugcu

SEQ ID NO: 39075 - RNA, 22 nt, Artificial Sequence
  Synthetic oligonucleotide: CBLB-8742
uuccagccacuacucuguugcu

SEQ ID NO: 39076 - RNA, 23 nt, Artificial Sequence
  Synthetic oligonucleotide: CBLB-8743
cuuccagccacuacucuguugcu

SEQ ID NO: 39077 - RNA, 24 nt, Artificial Sequence
  Synthetic oligonucleotide: CBLB-8744
ccuuccagccacuacucuguugcu

SEQ ID NO: 39078 - RNA, 18 nt, Artificial Sequence
  Synthetic oligonucleotide: CBLB-8745
caccccagccuacucucu

SEQ ID NO: 39079 - RNA, 19 nt, Artificial Sequence
  Synthetic oligonucleotide: CBLB-8746
ucaccccagccuacucucu

SEQ ID NO: 39080 - RNA, 20 nt, Artificial Sequence
  Synthetic oligonucleotide: CBLB-8747
gucaccccagccuacucucu

SEQ ID NO: 39081 - RNA, 21 nt, Artificial Sequence
  Synthetic oligonucleotide: CBLB-8748
ugucaccccagccuacucucu

SEQ ID NO: 39082 - RNA, 22 nt, Artificial Sequence
  Synthetic oligonucleotide: CBLB-8749
augucaccccagccuacucucu

SEQ ID NO: 39083 - RNA, 23 nt, Artificial Sequence
  Synthetic oligonucleotide: CBLB-8750
gaugucaccccagccuacucucu

SEQ ID NO: 39084 - RNA, 24 nt, Artificial Sequence
  Synthetic oligonucleotide: CBLB-8751
agaugucaccccagccuacucucu

SEQ ID NO: 39085 - RNA, 18 nt, Artificial Sequence
  Synthetic oligonucleotide: CBLB-8752
agagaaacucggaaacuu

SEQ ID NO: 39086 - RNA, 19 nt, Artificial Sequence
  Synthetic oligonucleotide: CBLB-8753
aagagaaacucggaaacuu

SEQ ID NO: 39087 - RNA, 20 nt, Artificial Sequence
  Synthetic oligonucleotide: CBLB-7461
aaagagaaacucggaaacuu

SEQ ID NO: 39088 - RNA, 21 nt, Artificial Sequence
  Synthetic oligonucleotide: CBLB-8754
aaaagagaaacucggaaacuu

SEQ ID NO: 39089 - RNA, 22 nt, Artificial Sequence
  Synthetic oligonucleotide: CBLB-8755
caaaagagaaacucggaaacuu

SEQ ID NO: 39090 - RNA, 23 nt, Artificial Sequence
  Synthetic oligonucleotide: CBLB-8756
gcaaaagagaaacucggaaacuu

SEQ ID NO: 39091 - RNA, 24 nt, Artificial Sequence
  Synthetic oligonucleotide: CBLB-8757
agcaaaagagaaacucggaaacuu

SEQ ID NO: 39092 - RNA, 18 nt, Artificial Sequence
  Synthetic oligonucleotide: CBLB-8758
gagauuuauucugcauuu

SEQ ID NO: 39093 - RNA, 19 nt, Artificial Sequence
  Synthetic oligonucleotide: CBLB-8759
ugagauuuauucugcauuu

SEQ ID NO: 39094 - RNA, 20 nt, Artificial Sequence
  Synthetic oligonucleotide: CBLB-8760
gugagauuuauucugcauuu

SEQ ID NO: 39095 - RNA, 21 nt, Artificial Sequence
  Synthetic oligonucleotide: CBLB-8761
ugugagauuuauucugcauuu

SEQ ID NO: 39096 - RNA, 22 nt, Artificial Sequence
  Synthetic oligonucleotide: CBLB-8762
cugugagauuuauucugcauuu

SEQ ID NO: 39097 - RNA, 23 nt, Artificial Sequence
  Synthetic oligonucleotide: CBLB-8763
ucugugagauuuauucugcauuu

SEQ ID NO: 39098 - RNA, 24 nt, Artificial Sequence
  Synthetic oligonucleotide: CBLB-8764
cucugugagauuuauucugcauuu

SEQ ID NO: 39099 - RNA, 18 nt, Artificial Sequence
  Synthetic oligonucleotide: CBLB-8765
ccagaugucggccuuuuu

SEQ ID NO: 39100 - RNA, 19 nt, Artificial Sequence
  Synthetic oligonucleotide: CBLB-8766
gccagaugucggccuuuuu

SEQ ID NO: 39101 - RNA, 20 nt, Artificial Sequence
  Synthetic oligonucleotide: CBLB-8767
agccagaugucggccuuuuu

SEQ ID NO: 39102 - RNA, 21 nt, Artificial Sequence
  Synthetic oligonucleotide: CBLB-8768
uagccagaugucggccuuuuu

SEQ ID NO: 39103 - RNA, 22 nt, Artificial Sequence
  Synthetic oligonucleotide: CBLB-8769
cuagccagaugucggccuuuuu

SEQ ID NO: 39104 - RNA, 23 nt, Artificial Sequence
  Synthetic oligonucleotide: CBLB-8770
acuagccagaugucggccuuuuu

SEQ ID NO: 39105 - RNA, 24 nt, Artificial Sequence
  Synthetic oligonucleotide: CBLB-8771
gacuagccagaugucggccuuuuu

SEQ ID NO: 39106 - RNA, 18 nt, Artificial Sequence
  Synthetic oligonucleotide: CBLB-8772
agagcaauuguugguagc

SEQ ID NO: 39107 - RNA, 19 nt, Artificial Sequence
  Synthetic oligonucleotide: CBLB-8773
cagagcaauuguugguagc

SEQ ID NO: 39108 - RNA, 20 nt, Artificial Sequence
  Synthetic oligonucleotide: CBLB-8774
ccagagcaauuguugguagc

SEQ ID NO: 39109 - RNA, 21 nt, Artificial Sequence
  Synthetic oligonucleotide: CBLB-8775
uccagagcaauuguugguagc

SEQ ID NO: 39110 - RNA, 22 nt, Artificial Sequence
  Synthetic oligonucleotide: CBLB-8776
guccagagcaauuguugguagc

SEQ ID NO: 39111 - RNA, 23 nt, Artificial Sequence
  Synthetic oligonucleotide: CBLB-8777
aguccagagcaauuguugguagc

SEQ ID NO: 39112 - RNA, 24 nt, Artificial Sequence
  Synthetic oligonucleotide: CBLB-8778
aaguccagagcaauuguugguagc

SEQ ID NO: 39113 - RNA, 18 nt, Artificial Sequence
  Synthetic oligonucleotide: CBLB-8779
ccagagacacgcgugugc

SEQ ID NO: 39114 - RNA, 19 nt, Artificial Sequence
  Synthetic oligonucleotide: CBLB-8780
uccagagacacgcgugugc

SEQ ID NO: 39115 - RNA, 20 nt, Artificial Sequence
  Synthetic oligonucleotide: CBLB-8781
guccagagacacgcgugugc

SEQ ID NO: 39116 - RNA, 21 nt, Artificial Sequence
  Synthetic oligonucleotide: CBLB-8782
uguccagagacacgcgugugc

SEQ ID NO: 39117 - RNA, 22 nt, Artificial Sequence
  Synthetic oligonucleotide: CBLB-8783
cuguccagagacacgcgugugc

SEQ ID NO: 39118 - RNA, 23 nt, Artificial Sequence
  Synthetic oligonucleotide: CBLB-8784
gcuguccagagacacgcgugugc

SEQ ID NO: 39119 - RNA, 24 nt, Artificial Sequence
  Synthetic oligonucleotide: CBLB-8785
agcuguccagagacacgcgugugc

SEQ ID NO: 39120 - RNA, 18 nt, Artificial Sequence
  Synthetic oligonucleotide: CBLB-8786
aggaaacaaaauuacuuc

SEQ ID NO: 39121 - RNA, 19 nt, Artificial Sequence
  Synthetic oligonucleotide: CBLB-8787
aaggaaacaaaauuacuuc

SEQ ID NO: 39122 - RNA, 20 nt, Artificial Sequence
  Synthetic oligonucleotide: CBLB-8788
caaggaaacaaaauuacuuc

SEQ ID NO: 39123 - RNA, 21 nt, Artificial Sequence
  Synthetic oligonucleotide: CBLB-8789
acaaggaaacaaaauuacuuc

SEQ ID NO: 39124 - RNA, 22 nt, Artificial Sequence
  Synthetic oligonucleotide: CBLB-8790
gacaaggaaacaaaauuacuuc

SEQ ID NO: 39125 - RNA, 23 nt, Artificial Sequence
  Synthetic oligonucleotide: CBLB-8791
ugacaaggaaacaaaauuacuuc

SEQ ID NO: 39126 - RNA, 24 nt, Artificial Sequence
  Synthetic oligonucleotide: CBLB-8792
augacaaggaaacaaaauuacuuc

SEQ ID NO: 39127 - RNA, 18 nt, Artificial Sequence
  Synthetic oligonucleotide: CBLB-8793
gggagccccggcugggag

SEQ ID NO: 39128 - RNA, 19 nt, Artificial Sequence
  Synthetic oligonucleotide: CBLB-8794
ggggagccccggcugggag

SEQ ID NO: 39129 - RNA, 20 nt, Artificial Sequence
  Synthetic oligonucleotide: CBLB-7701
uggggagccccggcugggag

SEQ ID NO: 39130 - RNA, 21 nt, Artificial Sequence
  Synthetic oligonucleotide: CBLB-8795
guggggagccccggcugggag

SEQ ID NO: 39131 - RNA, 22 nt, Artificial Sequence
  Synthetic oligonucleotide: CBLB-8796
uguggggagccccggcugggag

SEQ ID NO: 39132 - RNA, 23 nt, Artificial Sequence
  Synthetic oligonucleotide: CBLB-8797
guguggggagccccggcugggag

SEQ ID NO: 39133 - RNA, 24 nt, Artificial Sequence
  Synthetic oligonucleotide: CBLB-8798
uguguggggagccccggcugggag

SEQ ID NO: 39134 - RNA, 18 nt, Artificial Sequence
  Synthetic oligonucleotide: CBLB-8799
uguugguagcaugagugg

SEQ ID NO: 39135 - RNA, 19 nt, Artificial Sequence
  Synthetic oligonucleotide: CBLB-8800
uuguugguagcaugagugg

SEQ ID NO: 39136 - RNA, 20 nt, Artificial Sequence
  Synthetic oligonucleotide: CBLB-7732
auuguugguagcaugagugg

SEQ ID NO: 39137 - RNA, 21 nt, Artificial Sequence
  Synthetic oligonucleotide: CBLB-8801
aauuguugguagcaugagugg

SEQ ID NO: 39138 - RNA, 22 nt, Artificial Sequence
  Synthetic oligonucleotide: CBLB-8802
caauuguugguagcaugagugg

SEQ ID NO: 39139 - RNA, 23 nt, Artificial Sequence
  Synthetic oligonucleotide: CBLB-8803
gcaauuguugguagcaugagugg

SEQ ID NO: 39140 - RNA, 24 nt, Artificial Sequence
  Synthetic oligonucleotide: CBLB-8804
agcaauuguugguagcaugagugg

SEQ ID NO: 39141 - RNA, 18 nt, Artificial Sequence
  Synthetic oligonucleotide: CBLB-8805
aggcuguaaaggaaaacu

SEQ ID NO: 39142 - RNA, 19 nt, Artificial Sequence
  Synthetic oligonucleotide: CBLB-8806
aaggcuguaaaggaaaacu

SEQ ID NO: 39143 - RNA, 20 nt, Artificial Sequence
  Synthetic oligonucleotide: CBLB-8807
caaggcuguaaaggaaaacu

SEQ ID NO: 39144 - RNA, 21 nt, Artificial Sequence
  Synthetic oligonucleotide: CBLB-8808
ucaaggcuguaaaggaaaacu

SEQ ID NO: 39145 - RNA, 22 nt, Artificial Sequence
  Synthetic oligonucleotide: CBLB-8809
uucaaggcuguaaaggaaaacu

SEQ ID NO: 39146 - RNA, 23 nt, Artificial Sequence
  Synthetic oligonucleotide: CBLB-8810
auucaaggcuguaaaggaaaacu

SEQ ID NO: 39147 - RNA, 24 nt, Artificial Sequence
  Synthetic oligonucleotide: CBLB-8811
aauucaaggcuguaaaggaaaacu

SEQ ID NO: 39148 - RNA, 18 nt, Artificial Sequence
  Synthetic oligonucleotide: CBLB-8812
guguggggagccccggcu

SEQ ID NO: 39149 - RNA, 19 nt, Artificial Sequence
  Synthetic oligonucleotide: CBLB-8813
uguguggggagccccggcu

SEQ ID NO: 39150 - RNA, 20 nt, Artificial Sequence
  Synthetic oligonucleotide: CBLB-7750
guguguggggagccccggcu

SEQ ID NO: 39151 - RNA, 21 nt, Artificial Sequence
  Synthetic oligonucleotide: CBLB-8814
uguguguggggagccccggcu

SEQ ID NO: 39152 - RNA, 22 nt, Artificial Sequence
  Synthetic oligonucleotide: CBLB-8815
guguguguggggagccccggcu

SEQ ID NO: 39153 - RNA, 23 nt, Artificial Sequence
  Synthetic oligonucleotide: CBLB-8816
aguguguguggggagccccggcu

SEQ ID NO: 39154 - RNA, 24 nt, Artificial Sequence
  Synthetic oligonucleotide: CBLB-8817
caguguguguggggagccccggcu

SEQ ID NO: 39155 - RNA, 18 nt, Artificial Sequence
  Synthetic oligonucleotide: CBLB-8818
auguucugauauuuuaca

SEQ ID NO: 39156 - RNA, 19 nt, Artificial Sequence
  Synthetic oligonucleotide: CBLB-8819
gauguucugauauuuuaca

SEQ ID NO: 39157 - RNA, 20 nt, Artificial Sequence
  Synthetic oligonucleotide: CBLB-8820
agauguucugauauuuuaca

SEQ ID NO: 39158 - RNA, 21 nt, Artificial Sequence
  Synthetic oligonucleotide: CBLB-8821
cagauguucugauauuuuaca

SEQ ID NO: 39159 - RNA, 22 nt, Artificial Sequence
  Synthetic oligonucleotide: CBLB-8822
ucagauguucugauauuuuaca

SEQ ID NO: 39160 - RNA, 23 nt, Artificial Sequence
  Synthetic oligonucleotide: CBLB-8823
cucagauguucugauauuuuaca

SEQ ID NO: 39161 - RNA, 24 nt, Artificial Sequence
  Synthetic oligonucleotide: CBLB-8824
ucucagauguucugauauuuuaca

SEQ ID NO: 39162 - RNA, 18 nt, Artificial Sequence
  Synthetic oligonucleotide: CBLB-8825
gucgggcgggaggggaga

SEQ ID NO: 39163 - RNA, 19 nt, Artificial Sequence
  Synthetic oligonucleotide: CBLB-8826
agucgggcgggaggggaga

SEQ ID NO: 39164 - RNA, 20 nt, Artificial Sequence
  Synthetic oligonucleotide: CBLB-8827
gagucgggcgggaggggaga

SEQ ID NO: 39165 - RNA, 21 nt, Artificial Sequence
  Synthetic oligonucleotide: CBLB-8828
cgagucgggcgggaggggaga

SEQ ID NO: 39166 - RNA, 22 nt, Artificial Sequence
  Synthetic oligonucleotide: CBLB-8829
ccgagucgggcgggaggggaga

SEQ ID NO: 39167 - RNA, 23 nt, Artificial Sequence
  Synthetic oligonucleotide: CBLB-8830
cccgagucgggcgggaggggaga

SEQ ID NO: 39168 - RNA, 24 nt, Artificial Sequence
  Synthetic oligonucleotide: CBLB-8831
ccccgagucgggcgggaggggaga

SEQ ID NO: 39169 - RNA, 18 nt, Artificial Sequence
  Synthetic oligonucleotide: CBLB-8832
ccgaaaggcaagaaggga

SEQ ID NO: 39170 - RNA, 19 nt, Artificial Sequence
  Synthetic oligonucleotide: CBLB-8833
gccgaaaggcaagaaggga

SEQ ID NO: 39171 - RNA, 20 nt, Artificial Sequence
  Synthetic oligonucleotide: CBLB-7634
cgccgaaaggcaagaaggga

SEQ ID NO: 39172 - RNA, 21 nt, Artificial Sequence
  Synthetic oligonucleotide: CBLB-8834
gcgccgaaaggcaagaaggga

SEQ ID NO: 39173 - RNA, 22 nt, Artificial Sequence
  Synthetic oligonucleotide: CBLB-8835
ggcgccgaaaggcaagaaggga

SEQ ID NO: 39174 - RNA, 23 nt, Artificial Sequence
  Synthetic oligonucleotide: CBLB-8836
cggcgccgaaaggcaagaaggga

SEQ ID NO: 39175 - RNA, 24 nt, Artificial Sequence
  Synthetic oligonucleotide: CBLB-8837
acggcgccgaaaggcaagaaggga

SEQ ID NO: 39176 - RNA, 18 nt, Artificial Sequence
  Synthetic oligonucleotide: CBLB-8838
uuucugugccaguaauua

SEQ ID NO: 39177 - RNA, 19 nt, Artificial Sequence
  Synthetic oligonucleotide: CBLB-8839
auuucugugccaguaauua

SEQ ID NO: 39178 - RNA, 20 nt, Artificial Sequence
  Synthetic oligonucleotide: CBLB-8840
uauuucugugccaguaauua

SEQ ID NO: 39179 - RNA, 21 nt, Artificial Sequence
  Synthetic oligonucleotide: CBLB-8841
uuauuucugugccaguaauua

SEQ ID NO: 39180 - RNA, 22 nt, Artificial Sequence
  Synthetic oligonucleotide: CBLB-8842
auuauuucugugccaguaauua

SEQ ID NO: 39181 - RNA, 23 nt, Artificial Sequence
  Synthetic oligonucleotide: CBLB-8843
cauuauuucugugccaguaauua

SEQ ID NO: 39182 - RNA, 24 nt, Artificial Sequence
  Synthetic oligonucleotide: CBLB-8844
ucauuauuucugugccaguaauua

SEQ ID NO: 39183 - RNA, 18 nt, Artificial Sequence
  Synthetic oligonucleotide: CBLB-8845
ggguccugugugugccac

SEQ ID NO: 39184 - RNA, 19 nt, Artificial Sequence
  Synthetic oligonucleotide: CBLB-8846
uggguccugugugugccac

SEQ ID NO: 39185 - RNA, 20 nt, Artificial Sequence
  Synthetic oligonucleotide: CBLB-7644
cuggguccugugugugccac

SEQ ID NO: 39186 - RNA, 21 nt, Artificial Sequence
  Synthetic oligonucleotide: CBLB-8847
ccuggguccugugugugccac

SEQ ID NO: 39187 - RNA, 22 nt, Artificial Sequence
  Synthetic oligonucleotide: CBLB-8848
gccuggguccugugugugccac

SEQ ID NO: 39188 - RNA, 23 nt, Artificial Sequence
  Synthetic oligonucleotide: CBLB-8849
agccuggguccugugugugccac

SEQ ID NO: 39189 - RNA, 24 nt, Artificial Sequence
  Synthetic oligonucleotide: CBLB-8850
gagccuggguccugugugugccac

SEQ ID NO: 39190 - RNA, 18 nt, Artificial Sequence
  Synthetic oligonucleotide: CBLB-8851
gaguuuuccuuuacagcc

SEQ ID NO: 39191 - RNA, 19 nt, Artificial Sequence
  Synthetic oligonucleotide: CBLB-8852
ugaguuuuccuuuacagcc

SEQ ID NO: 39192 - RNA, 20 nt, Artificial Sequence
  Synthetic oligonucleotide: CBLB-8853
cugaguuuuccuuuacagcc

SEQ ID NO: 39193 - RNA, 21 nt, Artificial Sequence
  Synthetic oligonucleotide: CBLB-8854
ccugaguuuuccuuuacagcc

SEQ ID NO: 39194 - RNA, 22 nt, Artificial Sequence
  Synthetic oligonucleotide: CBLB-8855
uccugaguuuuccuuuacagcc

SEQ ID NO: 39195 - RNA, 23 nt, Artificial Sequence
  Synthetic oligonucleotide: CBLB-8856
auccugaguuuuccuuuacagcc

SEQ ID NO: 39196 - RNA, 24 nt, Artificial Sequence
  Synthetic oligonucleotide: CBLB-8857
gauccugaguuuuccuuuacagcc

SEQ ID NO: 39197 - RNA, 18 nt, Artificial Sequence
  Synthetic oligonucleotide: CBLB-8858
cuugccggcccgggggcc

SEQ ID NO: 39198 - RNA, 19 nt, Artificial Sequence
  Synthetic oligonucleotide: CBLB-8859
ucuugccggcccgggggcc

SEQ ID NO: 39199 - RNA, 20 nt, Artificial Sequence
  Synthetic oligonucleotide: CBLB-7663
uucuugccggcccgggggcc

SEQ ID NO: 39200 - RNA, 21 nt, Artificial Sequence
  Synthetic oligonucleotide: CBLB-8860
cuucuugccggcccgggggcc

SEQ ID NO: 39201 - RNA, 22 nt, Artificial Sequence
  Synthetic oligonucleotide: CBLB-8861
acuucuugccggcccgggggcc

SEQ ID NO: 39202 - RNA, 23 nt, Artificial Sequence
  Synthetic oligonucleotide: CBLB-8862
cacuucuugccggcccgggggcc

SEQ ID NO: 39203 - RNA, 24 nt, Artificial Sequence
  Synthetic oligonucleotide: CBLB-8863
acacuucuugccggcccgggggcc

SEQ ID NO: 39204 - RNA, 18 nt, Artificial Sequence
  Synthetic oligonucleotide: CBLB-8864
cggcgucccgcggccucc

SEQ ID NO: 39205 - RNA, 19 nt, Artificial Sequence
  Synthetic oligonucleotide: CBLB-8865
gcggcgucccgcggccucc

SEQ ID NO: 39206 - RNA, 20 nt, Artificial Sequence
  Synthetic oligonucleotide: CBLB-8866
ugcggcgucccgcggccucc

SEQ ID NO: 39207 - RNA, 21 nt, Artificial Sequence
  Synthetic oligonucleotide: CBLB-8867
cugcggcgucccgcggccucc

SEQ ID NO: 39208 - RNA, 22 nt, Artificial Sequence
  Synthetic oligonucleotide: CBLB-8868
gcugcggcgucccgcggccucc

SEQ ID NO: 39209 - RNA, 23 nt, Artificial Sequence
  Synthetic oligonucleotide: CBLB-8869
ugcugcggcgucccgcggccucc

SEQ ID NO: 39210 - RNA, 24 nt, Artificial Sequence
  Synthetic oligonucleotide: CBLB-8870
cugcugcggcgucccgcggccucc

SEQ ID NO: 39211 - RNA, 18 nt, Artificial Sequence
  Synthetic oligonucleotide: CBLB-8871
uuauuacuaugaaggauc

SEQ ID NO: 39212 - RNA, 19 nt, Artificial Sequence
  Synthetic oligonucleotide: CBLB-8872
auuauuacuaugaaggauc

SEQ ID NO: 39213 - RNA, 20 nt, Artificial Sequence
  Synthetic oligonucleotide: CBLB-8873
aauuauuacuaugaaggauc

SEQ ID NO: 39214 - RNA, 21 nt, Artificial Sequence
  Synthetic oligonucleotide: CBLB-8874
uaauuauuacuaugaaggauc

SEQ ID NO: 39215 - RNA, 22 nt, Artificial Sequence
  Synthetic oligonucleotide: CBLB-8875
guaauuauuacuaugaaggauc

SEQ ID NO: 39216 - RNA, 23 nt, Artificial Sequence
  Synthetic oligonucleotide: CBLB-8876
uguaauuauuacuaugaaggauc

SEQ ID NO: 39217 - RNA, 24 nt, Artificial Sequence
  Synthetic oligonucleotide: CBLB-8877
cuguaauuauuacuaugaaggauc

SEQ ID NO: 39218 - RNA, 18 nt, Artificial Sequence
  Synthetic oligonucleotide: CBLB-8878
gucucggaggccugcgcg

SEQ ID NO: 39219 - RNA, 19 nt, Artificial Sequence
  Synthetic oligonucleotide: CBLB-8879
cgucucggaggccugcgcg

SEQ ID NO: 39220 - RNA, 20 nt, Artificial Sequence
  Synthetic oligonucleotide: CBLB-8880
acgucucggaggccugcgcg

SEQ ID NO: 39221 - RNA, 21 nt, Artificial Sequence
  Synthetic oligonucleotide: CBLB-8881
cacgucucggaggccugcgcg

SEQ ID NO: 39222 - RNA, 22 nt, Artificial Sequence
  Synthetic oligonucleotide: CBLB-8882
ccacgucucggaggccugcgcg

SEQ ID NO: 39223 - RNA, 23 nt, Artificial Sequence
  Synthetic oligonucleotide: CBLB-8883
uccacgucucggaggccugcgcg

SEQ ID NO: 39224 - RNA, 24 nt, Artificial Sequence
  Synthetic oligonucleotide: CBLB-8884
uuccacgucucggaggccugcgcg

SEQ ID NO: 39225 - RNA, 18 nt, Artificial Sequence
  Synthetic oligonucleotide: CBLB-8885
cugugugugccacagggg

SEQ ID NO: 39226 - RNA, 19 nt, Artificial Sequence
  Synthetic oligonucleotide: CBLB-8886
ccugugugugccacagggg

SEQ ID NO: 39227 - RNA, 20 nt, Artificial Sequence
  Synthetic oligonucleotide: CBLB-7728
uccugugugugccacagggg

SEQ ID NO: 39228 - RNA, 21 nt, Artificial Sequence
  Synthetic oligonucleotide: CBLB-8887
guccugugugugccacagggg

SEQ ID NO: 39229 - RNA, 22 nt, Artificial Sequence
  Synthetic oligonucleotide: CBLB-8888
gguccugugugugccacagggg

SEQ ID NO: 39230 - RNA, 23 nt, Artificial Sequence
  Synthetic oligonucleotide: CBLB-8889
ggguccugugugugccacagggg

SEQ ID NO: 39231 - RNA, 24 nt, Artificial Sequence
  Synthetic oligonucleotide: CBLB-8890
uggguccugugugugccacagggg

SEQ ID NO: 39232 - RNA, 18 nt, Artificial Sequence
  Synthetic oligonucleotide: CBLB-8891
acuguaauuauuacuaug

SEQ ID NO: 39233 - RNA, 19 nt, Artificial Sequence
  Synthetic oligonucleotide: CBLB-8892
uacuguaauuauuacuaug

SEQ ID NO: 39234 - RNA, 20 nt, Artificial Sequence
  Synthetic oligonucleotide: CBLB-8893
auacuguaauuauuacuaug

SEQ ID NO: 39235 - RNA, 21 nt, Artificial Sequence
  Synthetic oligonucleotide: CBLB-8894
aauacuguaauuauuacuaug

SEQ ID NO: 39236 - RNA, 22 nt, Artificial Sequence
  Synthetic oligonucleotide: CBLB-8895
uaauacuguaauuauuacuaug

SEQ ID NO: 39237 - RNA, 23 nt, Artificial Sequence
  Synthetic oligonucleotide: CBLB-8896
uuaauacuguaauuauuacuaug

SEQ ID NO: 39238 - RNA, 24 nt, Artificial Sequence
  Synthetic oligonucleotide: CBLB-8897
uuuaauacuguaauuauuacuaug

SEQ ID NO: 39239 - RNA, 18 nt, Artificial Sequence
  Synthetic oligonucleotide: CBLB-8898
cacugggcugcgugcgug

SEQ ID NO: 39240 - RNA, 19 nt, Artificial Sequence
  Synthetic oligonucleotide: CBLB-8899
acacugggcugcgugcgug

SEQ ID NO: 39241 - RNA, 20 nt, Artificial Sequence
  Synthetic oligonucleotide: CBLB-7737
cacacugggcugcgugcgug

SEQ ID NO: 39242 - RNA, 21 nt, Artificial Sequence
  Synthetic oligonucleotide: CBLB-8900
acacacugggcugcgugcgug

SEQ ID NO: 39243 - RNA, 22 nt, Artificial Sequence
  Synthetic oligonucleotide: CBLB-8901
cacacacugggcugcgugcgug

SEQ ID NO: 39244 - RNA, 23 nt, Artificial Sequence
  Synthetic oligonucleotide: CBLB-8902
acacacacugggcugcgugcgug

SEQ ID NO: 39245 - RNA, 24 nt, Artificial Sequence
  Synthetic oligonucleotide: CBLB-8903
cacacacacugggcugcgugcgug

SEQ ID NO: 39246 - RNA, 18 nt, Artificial Sequence
  Synthetic oligonucleotide: CBLB-8904
aaccacuuucuagcaacu

SEQ ID NO: 39247 - RNA, 19 nt, Artificial Sequence
  Synthetic oligonucleotide: CBLB-8905
uaaccacuuucuagcaacu

SEQ ID NO: 39248 - RNA, 20 nt, Artificial Sequence
  Synthetic oligonucleotide: CBLB-8906
cuaaccacuuucuagcaacu

SEQ ID NO: 39249 - RNA, 21 nt, Artificial Sequence
  Synthetic oligonucleotide: CBLB-8907
ucuaaccacuuucuagcaacu

SEQ ID NO: 39250 - RNA, 22 nt, Artificial Sequence
  Synthetic oligonucleotide: CBLB-8908
uucuaaccacuuucuagcaacu

SEQ ID NO: 39251 - RNA, 23 nt, Artificial Sequence
  Synthetic oligonucleotide: CBLB-8909
guucuaaccacuuucuagcaacu

SEQ ID NO: 39252 - RNA, 24 nt, Artificial Sequence
  Synthetic oligonucleotide: CBLB-8910
gguucuaaccacuuucuagcaacu

SEQ ID NO: 39253 - RNA, 18 nt, Artificial Sequence
  Synthetic oligonucleotide: CBLB-8911
cgggaggggagagcgggu

SEQ ID NO: 39254 - RNA, 19 nt, Artificial Sequence
  Synthetic oligonucleotide: CBLB-8912
gcgggaggggagagcgggu

SEQ ID NO: 39255 - RNA, 20 nt, Artificial Sequence
  Synthetic oligonucleotide: CBLB-8913
ggcgggaggggagagcgggu

SEQ ID NO: 39256 - RNA, 21 nt, Artificial Sequence
  Synthetic oligonucleotide: CBLB-8914
gggcgggaggggagagcgggu

SEQ ID NO: 39257 - RNA, 22 nt, Artificial Sequence
  Synthetic oligonucleotide: CBLB-8915
cgggcgggaggggagagcgggu

SEQ ID NO: 39258 - RNA, 23 nt, Artificial Sequence
  Synthetic oligonucleotide: CBLB-8916
ucgggcgggaggggagagcgggu

SEQ ID NO: 39259 - RNA, 24 nt, Artificial Sequence
  Synthetic oligonucleotide: CBLB-8917
gucgggcgggaggggagagcgggu

SEQ ID NO: 39260 - RNA, 18 nt, Artificial Sequence
  Synthetic oligonucleotide: CBLB-8918
uaaaugccccacuucaaa

SEQ ID NO: 39261 - RNA, 19 nt, Artificial Sequence
  Synthetic oligonucleotide: CBLB-8919
uuaaaugccccacuucaaa

SEQ ID NO: 39262 - RNA, 20 nt, Artificial Sequence
  Synthetic oligonucleotide: CBLB-8920
uuuaaaugccccacuucaaa

SEQ ID NO: 39263 - RNA, 21 nt, Artificial Sequence
  Synthetic oligonucleotide: CBLB-8921
cuuuaaaugccccacuucaaa

SEQ ID NO: 39264 - RNA, 22 nt, Artificial Sequence
  Synthetic oligonucleotide: CBLB-8922
ucuuuaaaugccccacuucaaa

SEQ ID NO: 39265 - RNA, 23 nt, Artificial Sequence
  Synthetic oligonucleotide: CBLB-8923
gucuuuaaaugccccacuucaaa

SEQ ID NO: 39266 - RNA, 24 nt, Artificial Sequence
  Synthetic oligonucleotide: CBLB-8924
ggucuuuaaaugccccacuucaaa

SEQ ID NO: 39267 - RNA, 18 nt, Artificial Sequence
  Synthetic oligonucleotide: CBLB-8925
gaaguaaacugaaauaaa

SEQ ID NO: 39268 - RNA, 19 nt, Artificial Sequence
  Synthetic oligonucleotide: CBLB-8926
ugaaguaaacugaaauaaa

SEQ ID NO: 39269 - RNA, 20 nt, Artificial Sequence
  Synthetic oligonucleotide: CBLB-7617
uugaaguaaacugaaauaaa

SEQ ID NO: 39270 - RNA, 21 nt, Artificial Sequence
  Synthetic oligonucleotide: CBLB-8927
auugaaguaaacugaaauaaa

SEQ ID NO: 39271 - RNA, 22 nt, Artificial Sequence
  Synthetic oligonucleotide: CBLB-8928
gauugaaguaaacugaaauaaa

SEQ ID NO: 39272 - RNA, 23 nt, Artificial Sequence
  Synthetic oligonucleotide: CBLB-8929
ggauugaaguaaacugaaauaaa

SEQ ID NO: 39273 - RNA, 24 nt, Artificial Sequence
  Synthetic oligonucleotide: CBLB-8930
gggauugaaguaaacugaaauaaa

SEQ ID NO: 39274 - RNA, 18 nt, Artificial Sequence
  Synthetic oligonucleotide: CBLB-8931
uggugggauugaaguaaa

SEQ ID NO: 39275 - RNA, 19 nt, Artificial Sequence
  Synthetic oligonucleotide: CBLB-8932
guggugggauugaaguaaa

SEQ ID NO: 39276 - RNA, 20 nt, Artificial Sequence
  Synthetic oligonucleotide: CBLB-8933
aguggugggauugaaguaaa

SEQ ID NO: 39277 - RNA, 21 nt, Artificial Sequence
  Synthetic oligonucleotide: CBLB-8934
gaguggugggauugaaguaaa

SEQ ID NO: 39278 - RNA, 22 nt, Artificial Sequence
  Synthetic oligonucleotide: CBLB-8935
ugaguggugggauugaaguaaa

SEQ ID NO: 39279 - RNA, 23 nt, Artificial Sequence
  Synthetic oligonucleotide: CBLB-8936
augaguggugggauugaaguaaa

SEQ ID NO: 39280 - RNA, 24 nt, Artificial Sequence
  Synthetic oligonucleotide: CBLB-8937
caugaguggugggauugaaguaaa

SEQ ID NO: 39281 - RNA, 18 nt, Artificial Sequence
  Synthetic oligonucleotide: CBLB-8938
ugaaguaaacugaaauaa

SEQ ID NO: 39282 - RNA, 19 nt, Artificial Sequence
  Synthetic oligonucleotide: CBLB-8939
uugaaguaaacugaaauaa

SEQ ID NO: 39283 - RNA, 20 nt, Artificial Sequence
  Synthetic oligonucleotide: CBLB-8940
auugaaguaaacugaaauaa

SEQ ID NO: 39284 - RNA, 21 nt, Artificial Sequence
  Synthetic oligonucleotide: CBLB-8941
gauugaaguaaacugaaauaa

SEQ ID NO: 39285 - RNA, 22 nt, Artificial Sequence
  Synthetic oligonucleotide: CBLB-8942
ggauugaaguaaacugaaauaa

SEQ ID NO: 39286 - RNA, 23 nt, Artificial Sequence
  Synthetic oligonucleotide: CBLB-8943
gggauugaaguaaacugaaauaa

SEQ ID NO: 39287 - RNA, 24 nt, Artificial Sequence
  Synthetic oligonucleotide: CBLB-8944
ugggauugaaguaaacugaaauaa

SEQ ID NO: 39288 - RNA, 18 nt, Artificial Sequence
  Synthetic oligonucleotide: CBLB-8945
guaaauucaaggcuguaa

SEQ ID NO: 39289 - RNA, 19 nt, Artificial Sequence
  Synthetic oligonucleotide: CBLB-8946
uguaaauucaaggcuguaa

SEQ ID NO: 39290 - RNA, 20 nt, Artificial Sequence
  Synthetic oligonucleotide: CBLB-7624
auguaaauucaaggcuguaa

SEQ ID NO: 39291 - RNA, 21 nt, Artificial Sequence
  Synthetic oligonucleotide: CBLB-8947
cauguaaauucaaggcuguaa

SEQ ID NO: 39292 - RNA, 22 nt, Artificial Sequence
  Synthetic oligonucleotide: CBLB-8948
ccauguaaauucaaggcuguaa

SEQ ID NO: 39293 - RNA, 23 nt, Artificial Sequence
  Synthetic oligonucleotide: CBLB-8949
accauguaaauucaaggcuguaa

SEQ ID NO: 39294 - RNA, 24 nt, Artificial Sequence
  Synthetic oligonucleotide: CBLB-8950
aaccauguaaauucaaggcuguaa

SEQ ID NO: 39295 - RNA, 18 nt, Artificial Sequence
  Synthetic oligonucleotide: CBLB-8951
ccaccccuguggcacaca

SEQ ID NO: 39296 - RNA, 19 nt, Artificial Sequence
  Synthetic oligonucleotide: CBLB-8952
cccaccccuguggcacaca

SEQ ID NO: 39297 - RNA, 20 nt, Artificial Sequence
  Synthetic oligonucleotide: CBLB-8953
ccccaccccuguggcacaca

SEQ ID NO: 39298 - RNA, 21 nt, Artificial Sequence
  Synthetic oligonucleotide: CBLB-8954
accccaccccuguggcacaca

SEQ ID NO: 39299 - RNA, 22 nt, Artificial Sequence
  Synthetic oligonucleotide: CBLB-8955
caccccaccccuguggcacaca

SEQ ID NO: 39300 - RNA, 23 nt, Artificial Sequence
  Synthetic oligonucleotide: CBLB-8956
acaccccaccccuguggcacaca

SEQ ID NO: 39301 - RNA, 24 nt, Artificial Sequence
  Synthetic oligonucleotide: CBLB-8957
gacaccccaccccuguggcacaca

SEQ ID NO: 39302 - RNA, 18 nt, Artificial Sequence
  Synthetic oligonucleotide: CBLB-8958
ggcacagaaauaaugaca

SEQ ID NO: 39303 - RNA, 19 nt, Artificial Sequence
  Synthetic oligonucleotide: CBLB-8959
uggcacagaaauaaugaca

SEQ ID NO: 39304 - RNA, 20 nt, Artificial Sequence
  Synthetic oligonucleotide: CBLB-7626
cuggcacagaaauaaugaca

SEQ ID NO: 39305 - RNA, 21 nt, Artificial Sequence
  Synthetic oligonucleotide: CBLB-8960
acuggcacagaaauaaugaca

SEQ ID NO: 39306 - RNA, 22 nt, Artificial Sequence
  Synthetic oligonucleotide: CBLB-8961
uacuggcacagaaauaaugaca

SEQ ID NO: 39307 - RNA, 23 nt, Artificial Sequence
  Synthetic oligonucleotide: CBLB-8962
uuacuggcacagaaauaaugaca

SEQ ID NO: 39308 - RNA, 24 nt, Artificial Sequence
  Synthetic oligonucleotide: CBLB-8963
auuacuggcacagaaauaaugaca

SEQ ID NO: 39309 - RNA, 18 nt, Artificial Sequence
  Synthetic oligonucleotide: CBLB-8964
agaaagugguuagaacca

SEQ ID NO: 39310 - RNA, 19 nt, Artificial Sequence
  Synthetic oligonucleotide: CBLB-8965
uagaaagugguuagaacca

SEQ ID NO: 39311 - RNA, 20 nt, Artificial Sequence
  Synthetic oligonucleotide: CBLB-8966
cuagaaagugguuagaacca

SEQ ID NO: 39312 - RNA, 21 nt, Artificial Sequence
  Synthetic oligonucleotide: CBLB-8967
gcuagaaagugguuagaacca

SEQ ID NO: 39313 - RNA, 22 nt, Artificial Sequence
  Synthetic oligonucleotide: CBLB-8968
ugcuagaaagugguuagaacca

SEQ ID NO: 39314 - RNA, 23 nt, Artificial Sequence
  Synthetic oligonucleotide: CBLB-8969
uugcuagaaagugguuagaacca

SEQ ID NO: 39315 - RNA, 24 nt, Artificial Sequence
  Synthetic oligonucleotide: CBLB-8970
guugcuagaaagugguuagaacca

SEQ ID NO: 39316 - RNA, 18 nt, Artificial Sequence
  Synthetic oligonucleotide: CBLB-8971
acagcucgcucccgaaga

SEQ ID NO: 39317 - RNA, 19 nt, Artificial Sequence
  Synthetic oligonucleotide: CBLB-8972
aacagcucgcucccgaaga

SEQ ID NO: 39318 - RNA, 20 nt, Artificial Sequence
  Synthetic oligonucleotide: CBLB-7632
gaacagcucgcucccgaaga

SEQ ID NO: 39319 - RNA, 21 nt, Artificial Sequence
  Synthetic oligonucleotide: CBLB-8973
agaacagcucgcucccgaaga

SEQ ID NO: 39320 - RNA, 22 nt, Artificial Sequence
  Synthetic oligonucleotide: CBLB-8974
gagaacagcucgcucccgaaga

SEQ ID NO: 39321 - RNA, 23 nt, Artificial Sequence
  Synthetic oligonucleotide: CBLB-8975
ugagaacagcucgcucccgaaga

SEQ ID NO: 39322 - RNA, 24 nt, Artificial Sequence
  Synthetic oligonucleotide: CBLB-8976
cugagaacagcucgcucccgaaga

SEQ ID NO: 39323 - RNA, 18 nt, Artificial Sequence
  Synthetic oligonucleotide: CBLB-8977
ggggagccccggcuggga

SEQ ID NO: 39324 - RNA, 19 nt, Artificial Sequence
  Synthetic oligonucleotide: CBLB-8978
uggggagccccggcuggga

SEQ ID NO: 39325 - RNA, 20 nt, Artificial Sequence
  Synthetic oligonucleotide: CBLB-8979
guggggagccccggcuggga

SEQ ID NO: 39326 - RNA, 21 nt, Artificial Sequence
  Synthetic oligonucleotide: CBLB-8980
uguggggagccccggcuggga

SEQ ID NO: 39327 - RNA, 22 nt, Artificial Sequence
  Synthetic oligonucleotide: CBLB-8981
guguggggagccccggcuggga

SEQ ID NO: 39328 - RNA, 23 nt, Artificial Sequence
  Synthetic oligonucleotide: CBLB-8982
uguguggggagccccggcuggga

SEQ ID NO: 39329 - RNA, 24 nt, Artificial Sequence
  Synthetic oligonucleotide: CBLB-8983
guguguggggagccccggcuggga

SEQ ID NO: 39330 - RNA, 18 nt, Artificial Sequence
  Synthetic oligonucleotide: CBLB-8984
guagcaugagugguggga

SEQ ID NO: 39331 - RNA, 19 nt, Artificial Sequence
  Synthetic oligonucleotide: CBLB-8985
gguagcaugagugguggga

SEQ ID NO: 39332 - RNA, 20 nt, Artificial Sequence
  Synthetic oligonucleotide: CBLB-8986
ugguagcaugagugguggga

SEQ ID NO: 39333 - RNA, 21 nt, Artificial Sequence
  Synthetic oligonucleotide: CBLB-8987
uugguagcaugagugguggga

SEQ ID NO: 39334 - RNA, 22 nt, Artificial Sequence
  Synthetic oligonucleotide: CBLB-8988
guugguagcaugagugguggga

SEQ ID NO: 39335 - RNA, 23 nt, Artificial Sequence
  Synthetic oligonucleotide: CBLB-8989
uguugguagcaugagugguggga

SEQ ID NO: 39336 - RNA, 24 nt, Artificial Sequence
  Synthetic oligonucleotide: CBLB-8990
uuguugguagcaugagugguggga

SEQ ID NO: 39337 - RNA, 18 nt, Artificial Sequence
  Synthetic oligonucleotide: CBLB-8991
gcuaucaacuguagugga

SEQ ID NO: 39338 - RNA, 19 nt, Artificial Sequence
  Synthetic oligonucleotide: CBLB-8992
cgcuaucaacuguagugga

SEQ ID NO: 39339 - RNA, 20 nt, Artificial Sequence
  Synthetic oligonucleotide: CBLB-8993
acgcuaucaacuguagugga

SEQ ID NO: 39340 - RNA, 21 nt, Artificial Sequence
  Synthetic oligonucleotide: CBLB-8994
aacgcuaucaacuguagugga

SEQ ID NO: 39341 - RNA, 22 nt, Artificial Sequence
  Synthetic oligonucleotide: CBLB-8995
aaacgcuaucaacuguagugga

SEQ ID NO: 39342 - RNA, 23 nt, Artificial Sequence
  Synthetic oligonucleotide: CBLB-8996
uaaacgcuaucaacuguagugga

SEQ ID NO: 39343 - RNA, 24 nt, Artificial Sequence
  Synthetic oligonucleotide: CBLB-8997
auaaacgcuaucaacuguagugga

SEQ ID NO: 39344 - RNA, 18 nt, Artificial Sequence
  Synthetic oligonucleotide: CBLB-8998
uaaacgcuaucaacugua

SEQ ID NO: 39345 - RNA, 19 nt, Artificial Sequence
  Synthetic oligonucleotide: CBLB-8999
auaaacgcuaucaacugua

SEQ ID NO: 39346 - RNA, 20 nt, Artificial Sequence
  Synthetic oligonucleotide: CBLB-9000
aauaaacgcuaucaacugua

SEQ ID NO: 39347 - RNA, 21 nt, Artificial Sequence
  Synthetic oligonucleotide: CBLB-9001
uaauaaacgcuaucaacugua

SEQ ID NO: 39348 - RNA, 22 nt, Artificial Sequence
  Synthetic oligonucleotide: CBLB-9002
guaauaaacgcuaucaacugua

SEQ ID NO: 39349 - RNA, 23 nt, Artificial Sequence
  Synthetic oligonucleotide: CBLB-9003
uguaauaaacgcuaucaacugua

SEQ ID NO: 39350 - RNA, 24 nt, Artificial Sequence
  Synthetic oligonucleotide: CBLB-9004
guguaauaaacgcuaucaacugua

SEQ ID NO: 39351 - RNA, 18 nt, Artificial Sequence
  Synthetic oligonucleotide: CBLB-9005
uguaaauucaaggcugua

SEQ ID NO: 39352 - RNA, 19 nt, Artificial Sequence
  Synthetic oligonucleotide: CBLB-9006
auguaaauucaaggcugua

SEQ ID NO: 39353 - RNA, 20 nt, Artificial Sequence
  Synthetic oligonucleotide: CBLB-9007
cauguaaauucaaggcugua

SEQ ID NO: 39354 - RNA, 21 nt, Artificial Sequence
  Synthetic oligonucleotide: CBLB-9008
ccauguaaauucaaggcugua

SEQ ID NO: 39355 - RNA, 22 nt, Artificial Sequence
  Synthetic oligonucleotide: CBLB-9009
accauguaaauucaaggcugua

SEQ ID NO: 39356 - RNA, 23 nt, Artificial Sequence
  Synthetic oligonucleotide: CBLB-9010
aaccauguaaauucaaggcugua

SEQ ID NO: 39357 - RNA, 24 nt, Artificial Sequence
  Synthetic oligonucleotide: CBLB-9011
uaaccauguaaauucaaggcugua

SEQ ID NO: 39358 - RNA, 18 nt, Artificial Sequence
  Synthetic oligonucleotide: CBLB-9012
cgcgcaggccuccgagac

SEQ ID NO: 39359 - RNA, 19 nt, Artificial Sequence
  Synthetic oligonucleotide: CBLB-9013
gcgcgcaggccuccgagac

SEQ ID NO: 39360 - RNA, 20 nt, Artificial Sequence
  Synthetic oligonucleotide: CBLB-9014
agcgcgcaggccuccgagac

SEQ ID NO: 39361 - RNA, 21 nt, Artificial Sequence
  Synthetic oligonucleotide: CBLB-9015
cagcgcgcaggccuccgagac

SEQ ID NO: 39362 - RNA, 22 nt, Artificial Sequence
  Synthetic oligonucleotide: CBLB-9016
ccagcgcgcaggccuccgagac

SEQ ID NO: 39363 - RNA, 23 nt, Artificial Sequence
  Synthetic oligonucleotide: CBLB-9017
cccagcgcgcaggccuccgagac

SEQ ID NO: 39364 - RNA, 24 nt, Artificial Sequence
  Synthetic oligonucleotide: CBLB-9018
acccagcgcgcaggccuccgagac

SEQ ID NO: 39365 - RNA, 18 nt, Artificial Sequence
  Synthetic oligonucleotide: CBLB-9019
ucuccccucccgcccgac

SEQ ID NO: 39366 - RNA, 19 nt, Artificial Sequence
  Synthetic oligonucleotide: CBLB-9020
cucuccccucccgcccgac

SEQ ID NO: 39367 - RNA, 20 nt, Artificial Sequence
  Synthetic oligonucleotide: CBLB-9021
gcucuccccucccgcccgac

SEQ ID NO: 39368 - RNA, 21 nt, Artificial Sequence
  Synthetic oligonucleotide: CBLB-9022
cgcucuccccucccgcccgac

SEQ ID NO: 39369 - RNA, 22 nt, Artificial Sequence
  Synthetic oligonucleotide: CBLB-9023
ccgcucuccccucccgcccgac

SEQ ID NO: 39370 - RNA, 23 nt, Artificial Sequence
  Synthetic oligonucleotide: CBLB-9024
cccgcucuccccucccgcccgac

SEQ ID NO: 39371 - RNA, 24 nt, Artificial Sequence
  Synthetic oligonucleotide: CBLB-9025
acccgcucuccccucccgcccgac

SEQ ID NO: 39372 - RNA, 18 nt, Artificial Sequence
  Synthetic oligonucleotide: CBLB-9026
uggcacagaaauaaugac

SEQ ID NO: 39373 - RNA, 19 nt, Artificial Sequence
  Synthetic oligonucleotide: CBLB-9027
cuggcacagaaauaaugac

SEQ ID NO: 39374 - RNA, 20 nt, Artificial Sequence
  Synthetic oligonucleotide: CBLB-9028
acuggcacagaaauaaugac

SEQ ID NO: 39375 - RNA, 21 nt, Artificial Sequence
  Synthetic oligonucleotide: CBLB-9029
uacuggcacagaaauaaugac

SEQ ID NO: 39376 - RNA, 22 nt, Artificial Sequence
  Synthetic oligonucleotide: CBLB-9030
uuacuggcacagaaauaaugac

SEQ ID NO: 39377 - RNA, 23 nt, Artificial Sequence
  Synthetic oligonucleotide: CBLB-9031
auuacuggcacagaaauaaugac

SEQ ID NO: 39378 - RNA, 24 nt, Artificial Sequence
  Synthetic oligonucleotide: CBLB-9032
aauuacuggcacagaaauaaugac

SEQ ID NO: 39379 - RNA, 18 nt, Artificial Sequence
  Synthetic oligonucleotide: CBLB-9033
ggcccgcgccuggcuacc

SEQ ID NO: 39380 - RNA, 19 nt, Artificial Sequence
  Synthetic oligonucleotide: CBLB-9034
uggcccgcgccuggcuacc

SEQ ID NO: 39381 - RNA, 20 nt, Artificial Sequence
  Synthetic oligonucleotide: CBLB-9035
uuggcccgcgccuggcuacc

SEQ ID NO: 39382 - RNA, 21 nt, Artificial Sequence
  Synthetic oligonucleotide: CBLB-9036
cuuggcccgcgccuggcuacc

SEQ ID NO: 39383 - RNA, 22 nt, Artificial Sequence
  Synthetic oligonucleotide: CBLB-9037
ccuuggcccgcgccuggcuacc

SEQ ID NO: 39384 - RNA, 23 nt, Artificial Sequence
  Synthetic oligonucleotide: CBLB-9038
uccuuggcccgcgccuggcuacc

SEQ ID NO: 39385 - RNA, 24 nt, Artificial Sequence
  Synthetic oligonucleotide: CBLB-9039
cuccuuggcccgcgccuggcuacc

SEQ ID NO: 39386 - RNA, 18 nt, Artificial Sequence
  Synthetic oligonucleotide: CBLB-9040
ccuggcuaccccgggccc

SEQ ID NO: 39387 - RNA, 19 nt, Artificial Sequence
  Synthetic oligonucleotide: CBLB-9041
gccuggcuaccccgggccc

SEQ ID NO: 39388 - RNA, 20 nt, Artificial Sequence
  Synthetic oligonucleotide: CBLB-9042
cgccuggcuaccccgggccc

SEQ ID NO: 39389 - RNA, 21 nt, Artificial Sequence
  Synthetic oligonucleotide: CBLB-9043
gcgccuggcuaccccgggccc

SEQ ID NO: 39390 - RNA, 22 nt, Artificial Sequence
  Synthetic oligonucleotide: CBLB-9044
cgcgccuggcuaccccgggccc

SEQ ID NO: 39391 - RNA, 23 nt, Artificial Sequence
  Synthetic oligonucleotide: CBLB-9045
ccgcgccuggcuaccccgggccc

SEQ ID NO: 39392 - RNA, 24 nt, Artificial Sequence
  Synthetic oligonucleotide: CBLB-9046
cccgcgccuggcuaccccgggccc

SEQ ID NO: 39393 - RNA, 18 nt, Artificial Sequence
  Synthetic oligonucleotide: CBLB-9047
gcccgacucggggaggcc

SEQ ID NO: 39394 - RNA, 19 nt, Artificial Sequence
  Synthetic oligonucleotide: CBLB-9048
cgcccgacucggggaggcc

SEQ ID NO: 39395 - RNA, 20 nt, Artificial Sequence
  Synthetic oligonucleotide: CBLB-9049
ccgcccgacucggggaggcc

SEQ ID NO: 39396 - RNA, 21 nt, Artificial Sequence
  Synthetic oligonucleotide: CBLB-9050
cccgcccgacucggggaggcc

SEQ ID NO: 39397 - RNA, 22 nt, Artificial Sequence
  Synthetic oligonucleotide: CBLB-9051
ucccgcccgacucggggaggcc

SEQ ID NO: 39398 - RNA, 23 nt, Artificial Sequence
  Synthetic oligonucleotide: CBLB-9052
cucccgcccgacucggggaggcc

SEQ ID NO: 39399 - RNA, 24 nt, Artificial Sequence
  Synthetic oligonucleotide: CBLB-9053
ccucccgcccgacucggggaggcc

SEQ ID NO: 39400 - RNA, 18 nt, Artificial Sequence
  Synthetic oligonucleotide: CBLB-9054
gcaaaggcagcugagagc

SEQ ID NO: 39401 - RNA, 19 nt, Artificial Sequence
  Synthetic oligonucleotide: CBLB-9055
ggcaaaggcagcugagagc

SEQ ID NO: 39402 - RNA, 20 nt, Artificial Sequence
  Synthetic oligonucleotide: CBLB-9056
cggcaaaggcagcugagagc

SEQ ID NO: 39403 - RNA, 21 nt, Artificial Sequence
  Synthetic oligonucleotide: CBLB-9057
gcggcaaaggcagcugagagc

SEQ ID NO: 39404 - RNA, 22 nt, Artificial Sequence
  Synthetic oligonucleotide: CBLB-9058
ggcggcaaaggcagcugagagc

SEQ ID NO: 39405 - RNA, 23 nt, Artificial Sequence
  Synthetic oligonucleotide: CBLB-9059
cggcggcaaaggcagcugagagc

SEQ ID NO: 39406 - RNA, 24 nt, Artificial Sequence
  Synthetic oligonucleotide: CBLB-9060
gcggcggcaaaggcagcugagagc

SEQ ID NO: 39407 - RNA, 18 nt, Artificial Sequence
  Synthetic oligonucleotide: CBLB-9061
cgccgcagcagcacuagc

SEQ ID NO: 39408 - RNA, 19 nt, Artificial Sequence
  Synthetic oligonucleotide: CBLB-9062
acgccgcagcagcacuagc

SEQ ID NO: 39409 - RNA, 20 nt, Artificial Sequence
  Synthetic oligonucleotide: CBLB-7666
gacgccgcagcagcacuagc

SEQ ID NO: 39410 - RNA, 21 nt, Artificial Sequence
  Synthetic oligonucleotide: CBLB-9063
ggacgccgcagcagcacuagc

SEQ ID NO: 39411 - RNA, 22 nt, Artificial Sequence
  Synthetic oligonucleotide: CBLB-9064
gggacgccgcagcagcacuagc

SEQ ID NO: 39412 - RNA, 23 nt, Artificial Sequence
  Synthetic oligonucleotide: CBLB-9065
cgggacgccgcagcagcacuagc

SEQ ID NO: 39413 - RNA, 24 nt, Artificial Sequence
  Synthetic oligonucleotide: CBLB-9066
gcgggacgccgcagcagcacuagc

SEQ ID NO: 39414 - RNA, 18 nt, Artificial Sequence
  Synthetic oligonucleotide: CBLB-9067
cacacacaggacccaggc

SEQ ID NO: 39415 - RNA, 19 nt, Artificial Sequence
  Synthetic oligonucleotide: CBLB-9068
gcacacacaggacccaggc

SEQ ID NO: 39416 - RNA, 20 nt, Artificial Sequence
  Synthetic oligonucleotide: CBLB-9069
ggcacacacaggacccaggc

SEQ ID NO: 39417 - RNA, 21 nt, Artificial Sequence
  Synthetic oligonucleotide: CBLB-9070
uggcacacacaggacccaggc

SEQ ID NO: 39418 - RNA, 22 nt, Artificial Sequence
  Synthetic oligonucleotide: CBLB-9071
guggcacacacaggacccaggc

SEQ ID NO: 39419 - RNA, 23 nt, Artificial Sequence
  Synthetic oligonucleotide: CBLB-9072
uguggcacacacaggacccaggc

SEQ ID NO: 39420 - RNA, 24 nt, Artificial Sequence
  Synthetic oligonucleotide: CBLB-9073
cuguggcacacacaggacccaggc

SEQ ID NO: 39421 - RNA, 18 nt, Artificial Sequence
  Synthetic oligonucleotide: CBLB-9074
uguguggggagccccggc

SEQ ID NO: 39422 - RNA, 19 nt, Artificial Sequence
  Synthetic oligonucleotide: CBLB-9075
guguguggggagccccggc

SEQ ID NO: 39423 - RNA, 20 nt, Artificial Sequence
  Synthetic oligonucleotide: CBLB-7676
uguguguggggagccccggc

SEQ ID NO: 39424 - RNA, 21 nt, Artificial Sequence
  Synthetic oligonucleotide: CBLB-9076
guguguguggggagccccggc

SEQ ID NO: 39425 - RNA, 22 nt, Artificial Sequence
  Synthetic oligonucleotide: CBLB-9077
aguguguguggggagccccggc

SEQ ID NO: 39426 - RNA, 23 nt, Artificial Sequence
  Synthetic oligonucleotide: CBLB-9078
caguguguguggggagccccggc

SEQ ID NO: 39427 - RNA, 24 nt, Artificial Sequence
  Synthetic oligonucleotide: CBLB-9079
ccaguguguguggggagccccggc

SEQ ID NO: 39428 - RNA, 18 nt, Artificial Sequence
  Synthetic oligonucleotide: CBLB-9080
ccgggcccccgggccggc

SEQ ID NO: 39429 - RNA, 19 nt, Artificial Sequence
  Synthetic oligonucleotide: CBLB-9081
cccgggcccccgggccggc

SEQ ID NO: 39430 - RNA, 20 nt, Artificial Sequence
  Synthetic oligonucleotide: CBLB-9082
ccccgggcccccgggccggc

SEQ ID NO: 39431 - RNA, 21 nt, Artificial Sequence
  Synthetic oligonucleotide: CBLB-9083
accccgggcccccgggccggc

SEQ ID NO: 39432 - RNA, 22 nt, Artificial Sequence
  Synthetic oligonucleotide: CBLB-9084
uaccccgggcccccgggccggc

SEQ ID NO: 39433 - RNA, 23 nt, Artificial Sequence
  Synthetic oligonucleotide: CBLB-9085
cuaccccgggcccccgggccggc

SEQ ID NO: 39434 - RNA, 24 nt, Artificial Sequence
  Synthetic oligonucleotide: CBLB-9086
gcuaccccgggcccccgggccggc

SEQ ID NO: 39435 - RNA, 18 nt, Artificial Sequence
  Synthetic oligonucleotide: CBLB-9087
auuaaaauucuuaguugc

SEQ ID NO: 39436 - RNA, 19 nt, Artificial Sequence
  Synthetic oligonucleotide: CBLB-9088
uauuaaaauucuuaguugc

SEQ ID NO: 39437 - RNA, 20 nt, Artificial Sequence
  Synthetic oligonucleotide: CBLB-9089
guauuaaaauucuuaguugc

SEQ ID NO: 39438 - RNA, 21 nt, Artificial Sequence
  Synthetic oligonucleotide: CBLB-9090
aguauuaaaauucuuaguugc

SEQ ID NO: 39439 - RNA, 22 nt, Artificial Sequence
  Synthetic oligonucleotide: CBLB-9091
caguauuaaaauucuuaguugc

SEQ ID NO: 39440 - RNA, 23 nt, Artificial Sequence
  Synthetic oligonucleotide: CBLB-9092
acaguauuaaaauucuuaguugc

SEQ ID NO: 39441 - RNA, 24 nt, Artificial Sequence
  Synthetic oligonucleotide: CBLB-9093
uacaguauuaaaauucuuaguugc

SEQ ID NO: 39442 - RNA, 18 nt, Artificial Sequence
  Synthetic oligonucleotide: CBLB-9094
uccccucccgcccgacuc

SEQ ID NO: 39443 - RNA, 19 nt, Artificial Sequence
  Synthetic oligonucleotide: CBLB-9095
cuccccucccgcccgacuc

SEQ ID NO: 39444 - RNA, 20 nt, Artificial Sequence
  Synthetic oligonucleotide: CBLB-7683
ucuccccucccgcccgacuc

SEQ ID NO: 39445 - RNA, 21 nt, Artificial Sequence
  Synthetic oligonucleotide: CBLB-9096
cucuccccucccgcccgacuc

SEQ ID NO: 39446 - RNA, 22 nt, Artificial Sequence
  Synthetic oligonucleotide: CBLB-9097
gcucuccccucccgcccgacuc

SEQ ID NO: 39447 - RNA, 23 nt, Artificial Sequence
  Synthetic oligonucleotide: CBLB-9098
cgcucuccccucccgcccgacuc

SEQ ID NO: 39448 - RNA, 24 nt, Artificial Sequence
  Synthetic oligonucleotide: CBLB-9099
ccgcucuccccucccgcccgacuc

SEQ ID NO: 39449 - RNA, 18 nt, Artificial Sequence
  Synthetic oligonucleotide: CBLB-9100
gcugagaacagcucgcuc

SEQ ID NO: 39450 - RNA, 19 nt, Artificial Sequence
  Synthetic oligonucleotide: CBLB-9101
cgcugagaacagcucgcuc

SEQ ID NO: 39451 - RNA, 20 nt, Artificial Sequence
  Synthetic oligonucleotide: CBLB-9102
ucgcugagaacagcucgcuc

SEQ ID NO: 39452 - RNA, 21 nt, Artificial Sequence
  Synthetic oligonucleotide: CBLB-9103
aucgcugagaacagcucgcuc

SEQ ID NO: 39453 - RNA, 22 nt, Artificial Sequence
  Synthetic oligonucleotide: CBLB-9104
gaucgcugagaacagcucgcuc

SEQ ID NO: 39454 - RNA, 23 nt, Artificial Sequence
  Synthetic oligonucleotide: CBLB-9105
ggaucgcugagaacagcucgcuc

SEQ ID NO: 39455 - RNA, 24 nt, Artificial Sequence
  Synthetic oligonucleotide: CBLB-9106
gggaucgcugagaacagcucgcuc

SEQ ID NO: 39456 - RNA, 18 nt, Artificial Sequence
  Synthetic oligonucleotide: CBLB-9107
guuccaaaguaugaaguc

SEQ ID NO: 39457 - RNA, 19 nt, Artificial Sequence
  Synthetic oligonucleotide: CBLB-9108
aguuccaaaguaugaaguc

SEQ ID NO: 39458 - RNA, 20 nt, Artificial Sequence
  Synthetic oligonucleotide: CBLB-9109
aaguuccaaaguaugaaguc

SEQ ID NO: 39459 - RNA, 21 nt, Artificial Sequence
  Synthetic oligonucleotide: CBLB-9110
aaaguuccaaaguaugaaguc

SEQ ID NO: 39460 - RNA, 22 nt, Artificial Sequence
  Synthetic oligonucleotide: CBLB-9111
gaaaguuccaaaguaugaaguc

SEQ ID NO: 39461 - RNA, 23 nt, Artificial Sequence
  Synthetic oligonucleotide: CBLB-9112
agaaaguuccaaaguaugaaguc

SEQ ID NO: 39462 - RNA, 24 nt, Artificial Sequence
  Synthetic oligonucleotide: CBLB-9113
aagaaaguuccaaaguaugaaguc

SEQ ID NO: 39463 - RNA, 18 nt, Artificial Sequence
  Synthetic oligonucleotide: CBLB-9114
uucggcgccguagcuguc

SEQ ID NO: 39464 - RNA, 19 nt, Artificial Sequence
  Synthetic oligonucleotide: CBLB-9115
uuucggcgccguagcuguc

SEQ ID NO: 39465 - RNA, 20 nt, Artificial Sequence
  Synthetic oligonucleotide: CBLB-9116
cuuucggcgccguagcuguc

SEQ ID NO: 39466 - RNA, 21 nt, Artificial Sequence
  Synthetic oligonucleotide: CBLB-9117
ccuuucggcgccguagcuguc

SEQ ID NO: 39467 - RNA, 22 nt, Artificial Sequence
  Synthetic oligonucleotide: CBLB-9118
gccuuucggcgccguagcuguc

SEQ ID NO: 39468 - RNA, 23 nt, Artificial Sequence
  Synthetic oligonucleotide: CBLB-9119
ugccuuucggcgccguagcuguc

SEQ ID NO: 39469 - RNA, 24 nt, Artificial Sequence
  Synthetic oligonucleotide: CBLB-9120
uugccuuucggcgccguagcuguc

SEQ ID NO: 39470 - RNA, 18 nt, Artificial Sequence
  Synthetic oligonucleotide: CBLB-9121
acaucugagauguccaag

SEQ ID NO: 39471 - RNA, 19 nt, Artificial Sequence
  Synthetic oligonucleotide: CBLB-9122
aacaucugagauguccaag

SEQ ID NO: 39472 - RNA, 20 nt, Artificial Sequence
  Synthetic oligonucleotide: CBLB-9123
gaacaucugagauguccaag

SEQ ID NO: 39473 - RNA, 21 nt, Artificial Sequence
  Synthetic oligonucleotide: CBLB-9124
agaacaucugagauguccaag

SEQ ID NO: 39474 - RNA, 22 nt, Artificial Sequence
  Synthetic oligonucleotide: CBLB-9125
cagaacaucugagauguccaag

SEQ ID NO: 39475 - RNA, 23 nt, Artificial Sequence
  Synthetic oligonucleotide: CBLB-9126
ucagaacaucugagauguccaag

SEQ ID NO: 39476 - RNA, 24 nt, Artificial Sequence
  Synthetic oligonucleotide: CBLB-9127
aucagaacaucugagauguccaag

SEQ ID NO: 39477 - RNA, 18 nt, Artificial Sequence
  Synthetic oligonucleotide: CBLB-9128
aacagcucgcucccgaag

SEQ ID NO: 39478 - RNA, 19 nt, Artificial Sequence
  Synthetic oligonucleotide: CBLB-9129
gaacagcucgcucccgaag

SEQ ID NO: 39479 - RNA, 20 nt, Artificial Sequence
  Synthetic oligonucleotide: CBLB-9130
agaacagcucgcucccgaag

SEQ ID NO: 39480 - RNA, 21 nt, Artificial Sequence
  Synthetic oligonucleotide: CBLB-9131
gagaacagcucgcucccgaag

SEQ ID NO: 39481 - RNA, 22 nt, Artificial Sequence
  Synthetic oligonucleotide: CBLB-9132
ugagaacagcucgcucccgaag

SEQ ID NO: 39482 - RNA, 23 nt, Artificial Sequence
  Synthetic oligonucleotide: CBLB-9133
cugagaacagcucgcucccgaag

SEQ ID NO: 39483 - RNA, 24 nt, Artificial Sequence
  Synthetic oligonucleotide: CBLB-9134
gcugagaacagcucgcucccgaag

SEQ ID NO: 39484 - RNA, 18 nt, Artificial Sequence
  Synthetic oligonucleotide: CBLB-9135
ccgcagcagcacuagcag

SEQ ID NO: 39485 - RNA, 19 nt, Artificial Sequence
  Synthetic oligonucleotide: CBLB-9136
gccgcagcagcacuagcag

SEQ ID NO: 39486 - RNA, 20 nt, Artificial Sequence
  Synthetic oligonucleotide: CBLB-9137
cgccgcagcagcacuagcag

SEQ ID NO: 39487 - RNA, 21 nt, Artificial Sequence
  Synthetic oligonucleotide: CBLB-9138
acgccgcagcagcacuagcag

SEQ ID NO: 39488 - RNA, 22 nt, Artificial Sequence
  Synthetic oligonucleotide: CBLB-9139
gacgccgcagcagcacuagcag

SEQ ID NO: 39489 - RNA, 23 nt, Artificial Sequence
  Synthetic oligonucleotide: CBLB-9140
ggacgccgcagcagcacuagcag

SEQ ID NO: 39490 - RNA, 24 nt, Artificial Sequence
  Synthetic oligonucleotide: CBLB-9141
gggacgccgcagcagcacuagcag

SEQ ID NO: 39491 - RNA, 18 nt, Artificial Sequence
  Synthetic oligonucleotide: CBLB-9142
cggcggcggcaaaggcag

SEQ ID NO: 39492 - RNA, 19 nt, Artificial Sequence
  Synthetic oligonucleotide: CBLB-9143
acggcggcggcaaaggcag

SEQ ID NO: 39493 - RNA, 20 nt, Artificial Sequence
  Synthetic oligonucleotide: CBLB-9144
gacggcggcggcaaaggcag

SEQ ID NO: 39494 - RNA, 21 nt, Artificial Sequence
  Synthetic oligonucleotide: CBLB-9145
ggacggcggcggcaaaggcag

SEQ ID NO: 39495 - RNA, 22 nt, Artificial Sequence
  Synthetic oligonucleotide: CBLB-9146
uggacggcggcggcaaaggcag

SEQ ID NO: 39496 - RNA, 23 nt, Artificial Sequence
  Synthetic oligonucleotide: CBLB-9147
cuggacggcggcggcaaaggcag

SEQ ID NO: 39497 - RNA, 24 nt, Artificial Sequence
  Synthetic oligonucleotide: CBLB-9148
acuggacggcggcggcaaaggcag

SEQ ID NO: 39498 - RNA, 18 nt, Artificial Sequence
  Synthetic oligonucleotide: CBLB-9149
cagcagcacuagcaggag

SEQ ID NO: 39499 - RNA, 19 nt, Artificial Sequence
  Synthetic oligonucleotide: CBLB-9150
gcagcagcacuagcaggag

SEQ ID NO: 39500 - RNA, 20 nt, Artificial Sequence
  Synthetic oligonucleotide: CBLB-9151
cgcagcagcacuagcaggag

SEQ ID NO: 39501 - RNA, 21 nt, Artificial Sequence
  Synthetic oligonucleotide: CBLB-9152
ccgcagcagcacuagcaggag

SEQ ID NO: 39502 - RNA, 22 nt, Artificial Sequence
  Synthetic oligonucleotide: CBLB-9153
gccgcagcagcacuagcaggag

SEQ ID NO: 39503 - RNA, 23 nt, Artificial Sequence
  Synthetic oligonucleotide: CBLB-9154
cgccgcagcagcacuagcaggag

SEQ ID NO: 39504 - RNA, 24 nt, Artificial Sequence
  Synthetic oligonucleotide: CBLB-9155
acgccgcagcagcacuagcaggag

SEQ ID NO: 39505 - RNA, 18 nt, Artificial Sequence
  Synthetic oligonucleotide: CBLB-9156
acgccgcagcagcacuag

SEQ ID NO: 39506 - RNA, 19 nt, Artificial Sequence
  Synthetic oligonucleotide: CBLB-9157
gacgccgcagcagcacuag

SEQ ID NO: 39507 - RNA, 20 nt, Artificial Sequence
  Synthetic oligonucleotide: CBLB-9158
ggacgccgcagcagcacuag

SEQ ID NO: 39508 - RNA, 21 nt, Artificial Sequence
  Synthetic oligonucleotide: CBLB-9159
gggacgccgcagcagcacuag

SEQ ID NO: 39509 - RNA, 22 nt, Artificial Sequence
  Synthetic oligonucleotide: CBLB-9160
cgggacgccgcagcagcacuag

SEQ ID NO: 39510 - RNA, 23 nt, Artificial Sequence
  Synthetic oligonucleotide: CBLB-9161
gcgggacgccgcagcagcacuag

SEQ ID NO: 39511 - RNA, 24 nt, Artificial Sequence
  Synthetic oligonucleotide: CBLB-9162
cgcgggacgccgcagcagcacuag

SEQ ID NO: 39512 - RNA, 18 nt, Artificial Sequence
  Synthetic oligonucleotide: CBLB-9163
aaacgcuaucaacuguag

SEQ ID NO: 39513 - RNA, 19 nt, Artificial Sequence
  Synthetic oligonucleotide: CBLB-9164
uaaacgcuaucaacuguag

SEQ ID NO: 39514 - RNA, 20 nt, Artificial Sequence
  Synthetic oligonucleotide: CBLB-7704
auaaacgcuaucaacuguag

SEQ ID NO: 39515 - RNA, 21 nt, Artificial Sequence
  Synthetic oligonucleotide: CBLB-9165
aauaaacgcuaucaacuguag

SEQ ID NO: 39516 - RNA, 22 nt, Artificial Sequence
  Synthetic oligonucleotide: CBLB-9166
uaauaaacgcuaucaacuguag

SEQ ID NO: 39517 - RNA, 23 nt, Artificial Sequence
  Synthetic oligonucleotide: CBLB-9167
guaauaaacgcuaucaacuguag

SEQ ID NO: 39518 - RNA, 24 nt, Artificial Sequence
  Synthetic oligonucleotide: CBLB-9168
uguaauaaacgcuaucaacuguag

SEQ ID NO: 39519 - RNA, 18 nt, Artificial Sequence
  Synthetic oligonucleotide: CBLB-9169
gcgcaggccuccgagacg

SEQ ID NO: 39520 - RNA, 19 nt, Artificial Sequence
  Synthetic oligonucleotide: CBLB-9170
cgcgcaggccuccgagacg

SEQ ID NO: 39521 - RNA, 20 nt, Artificial Sequence
  Synthetic oligonucleotide: CBLB-7705
gcgcgcaggccuccgagacg

SEQ ID NO: 39522 - RNA, 21 nt, Artificial Sequence
  Synthetic oligonucleotide: CBLB-9171
agcgcgcaggccuccgagacg

SEQ ID NO: 39523 - RNA, 22 nt, Artificial Sequence
  Synthetic oligonucleotide: CBLB-9172
cagcgcgcaggccuccgagacg

SEQ ID NO: 39524 - RNA, 23 nt, Artificial Sequence
  Synthetic oligonucleotide: CBLB-9173
ccagcgcgcaggccuccgagacg

SEQ ID NO: 39525 - RNA, 24 nt, Artificial Sequence
  Synthetic oligonucleotide: CBLB-9174
cccagcgcgcaggccuccgagacg

SEQ ID NO: 39526 - RNA, 18 nt, Artificial Sequence
  Synthetic oligonucleotide: CBLB-9175
gagaacagcucgcucccg

SEQ ID NO: 39527 - RNA, 19 nt, Artificial Sequence
  Synthetic oligonucleotide: CBLB-9176
ugagaacagcucgcucccg

SEQ ID NO: 39528 - RNA, 20 nt, Artificial Sequence
  Synthetic oligonucleotide: CBLB-9177
cugagaacagcucgcucccg

SEQ ID NO: 39529 - RNA, 21 nt, Artificial Sequence
  Synthetic oligonucleotide: CBLB-9178
gcugagaacagcucgcucccg

SEQ ID NO: 39530 - RNA, 22 nt, Artificial Sequence
  Synthetic oligonucleotide: CBLB-9179
cgcugagaacagcucgcucccg

SEQ ID NO: 39531 - RNA, 23 nt, Artificial Sequence
  Synthetic oligonucleotide: CBLB-9180
ucgcugagaacagcucgcucccg

SEQ ID NO: 39532 - RNA, 24 nt, Artificial Sequence
  Synthetic oligonucleotide: CBLB-9181
aucgcugagaacagcucgcucccg

SEQ ID NO: 39533 - RNA, 18 nt, Artificial Sequence
  Synthetic oligonucleotide: CBLB-9182
cccgacucggggaggccg

SEQ ID NO: 39534 - RNA, 19 nt, Artificial Sequence
  Synthetic oligonucleotide: CBLB-9183
gcccgacucggggaggccg

SEQ ID NO: 39535 - RNA, 20 nt, Artificial Sequence
  Synthetic oligonucleotide: CBLB-7713
cgcccgacucggggaggccg

SEQ ID NO: 39536 - RNA, 21 nt, Artificial Sequence
  Synthetic oligonucleotide: CBLB-9184
ccgcccgacucggggaggccg

SEQ ID NO: 39537 - RNA, 22 nt, Artificial Sequence
  Synthetic oligonucleotide: CBLB-9185
cccgcccgacucggggaggccg

SEQ ID NO: 39538 - RNA, 23 nt, Artificial Sequence
  Synthetic oligonucleotide: CBLB-9186
ucccgcccgacucggggaggccg

SEQ ID NO: 39539 - RNA, 24 nt, Artificial Sequence
  Synthetic oligonucleotide: CBLB-9187
cucccgcccgacucggggaggccg

SEQ ID NO: 39540 - RNA, 18 nt, Artificial Sequence
  Synthetic oligonucleotide: CBLB-9188
cggcugggagugggaucg

SEQ ID NO: 39541 - RNA, 19 nt, Artificial Sequence
  Synthetic oligonucleotide: CBLB-9189
ccggcugggagugggaucg

SEQ ID NO: 39542 - RNA, 20 nt, Artificial Sequence
  Synthetic oligonucleotide: CBLB-9190
cccggcugggagugggaucg

SEQ ID NO: 39543 - RNA, 21 nt, Artificial Sequence
  Synthetic oligonucleotide: CBLB-9191
ccccggcugggagugggaucg

SEQ ID NO: 39544 - RNA, 22 nt, Artificial Sequence
  Synthetic oligonucleotide: CBLB-9192
gccccggcugggagugggaucg

SEQ ID NO: 39545 - RNA, 23 nt, Artificial Sequence
  Synthetic oligonucleotide: CBLB-9193
agccccggcugggagugggaucg

SEQ ID NO: 39546 - RNA, 24 nt, Artificial Sequence
  Synthetic oligonucleotide: CBLB-9194
gagccccggcugggagugggaucg

SEQ ID NO: 39547 - RNA, 18 nt, Artificial Sequence
  Synthetic oligonucleotide: CBLB-9195
ccccucccgcccgacucg

SEQ ID NO: 39548 - RNA, 19 nt, Artificial Sequence
  Synthetic oligonucleotide: CBLB-9196
uccccucccgcccgacucg

SEQ ID NO: 39549 - RNA, 20 nt, Artificial Sequence
  Synthetic oligonucleotide: CBLB-7716
cuccccucccgcccgacucg

SEQ ID NO: 39550 - RNA, 21 nt, Artificial Sequence
  Synthetic oligonucleotide: CBLB-9197
ucuccccucccgcccgacucg

SEQ ID NO: 39551 - RNA, 22 nt, Artificial Sequence
  Synthetic oligonucleotide: CBLB-9198
cucuccccucccgcccgacucg

SEQ ID NO: 39552 - RNA, 23 nt, Artificial Sequence
  Synthetic oligonucleotide: CBLB-9199
gcucuccccucccgcccgacucg

SEQ ID NO: 39553 - RNA, 24 nt, Artificial Sequence
  Synthetic oligonucleotide: CBLB-9200
cgcucuccccucccgcccgacucg

SEQ ID NO: 39554 - RNA, 18 nt, Artificial Sequence
  Synthetic oligonucleotide: CBLB-9201
ggaggaggagaccgcucg

SEQ ID NO: 39555 - RNA, 19 nt, Artificial Sequence
  Synthetic oligonucleotide: CBLB-9202
aggaggaggagaccgcucg

SEQ ID NO: 39556 - RNA, 20 nt, Artificial Sequence
  Synthetic oligonucleotide: CBLB-9203
caggaggaggagaccgcucg

SEQ ID NO: 39557 - RNA, 21 nt, Artificial Sequence
  Synthetic oligonucleotide: CBLB-9204
gcaggaggaggagaccgcucg

SEQ ID NO: 39558 - RNA, 22 nt, Artificial Sequence
  Synthetic oligonucleotide: CBLB-9205
agcaggaggaggagaccgcucg

SEQ ID NO: 39559 - RNA, 23 nt, Artificial Sequence
  Synthetic oligonucleotide: CBLB-9206
uagcaggaggaggagaccgcucg

SEQ ID NO: 39560 - RNA, 24 nt, Artificial Sequence
  Synthetic oligonucleotide: CBLB-9207
cuagcaggaggaggagaccgcucg

SEQ ID NO: 39561 - RNA, 18 nt, Artificial Sequence
  Synthetic oligonucleotide: CBLB-9208
cgcagcagcacuagcagg

SEQ ID NO: 39562 - RNA, 19 nt, Artificial Sequence
  Synthetic oligonucleotide: CBLB-9209
ccgcagcagcacuagcagg

SEQ ID NO: 39563 - RNA, 20 nt, Artificial Sequence
  Synthetic oligonucleotide: CBLB-7719
gccgcagcagcacuagcagg

SEQ ID NO: 39564 - RNA, 21 nt, Artificial Sequence
  Synthetic oligonucleotide: CBLB-9210
cgccgcagcagcacuagcagg

SEQ ID NO: 39565 - RNA, 22 nt, Artificial Sequence
  Synthetic oligonucleotide: CBLB-9211
acgccgcagcagcacuagcagg

SEQ ID NO: 39566 - RNA, 23 nt, Artificial Sequence
  Synthetic oligonucleotide: CBLB-9212
gacgccgcagcagcacuagcagg

SEQ ID NO: 39567 - RNA, 24 nt, Artificial Sequence
  Synthetic oligonucleotide: CBLB-9213
ggacgccgcagcagcacuagcagg

SEQ ID NO: 39568 - RNA, 18 nt, Artificial Sequence
  Synthetic oligonucleotide: CBLB-9214
agcagcacuagcaggagg

SEQ ID NO: 39569 - RNA, 19 nt, Artificial Sequence
  Synthetic oligonucleotide: CBLB-9215
cagcagcacuagcaggagg

SEQ ID NO: 39570 - RNA, 20 nt, Artificial Sequence
  Synthetic oligonucleotide: CBLB-7720
gcagcagcacuagcaggagg

SEQ ID NO: 39571 - RNA, 21 nt, Artificial Sequence
  Synthetic oligonucleotide: CBLB-9216
cgcagcagcacuagcaggagg

SEQ ID NO: 39572 - RNA, 22 nt, Artificial Sequence
  Synthetic oligonucleotide: CBLB-9217
ccgcagcagcacuagcaggagg

SEQ ID NO: 39573 - RNA, 23 nt, Artificial Sequence
  Synthetic oligonucleotide: CBLB-9218
gccgcagcagcacuagcaggagg

SEQ ID NO: 39574 - RNA, 24 nt, Artificial Sequence
  Synthetic oligonucleotide: CBLB-9219
cgccgcagcagcacuagcaggagg

SEQ ID NO: 39575 - RNA, 18 nt, Artificial Sequence
  Synthetic oligonucleotide: CBLB-9220
guguguggggagccccgg

SEQ ID NO: 39576 - RNA, 19 nt, Artificial Sequence
  Synthetic oligonucleotide: CBLB-9221
uguguguggggagccccgg

SEQ ID NO: 39577 - RNA, 20 nt, Artificial Sequence
  Synthetic oligonucleotide: CBLB-9222
guguguguggggagccccgg

SEQ ID NO: 39578 - RNA, 21 nt, Artificial Sequence
  Synthetic oligonucleotide: CBLB-9223
aguguguguggggagccccgg

SEQ ID NO: 39579 - RNA, 22 nt, Artificial Sequence
  Synthetic oligonucleotide: CBLB-9224
caguguguguggggagccccgg

SEQ ID NO: 39580 - RNA, 23 nt, Artificial Sequence
  Synthetic oligonucleotide: CBLB-9225
ccaguguguguggggagccccgg

SEQ ID NO: 39581 - RNA, 24 nt, Artificial Sequence
  Synthetic oligonucleotide: CBLB-9226
cccaguguguguggggagccccgg

SEQ ID NO: 39582 - RNA, 18 nt, Artificial Sequence
  Synthetic oligonucleotide: CBLB-9227
ccgggccggcaagaagug

SEQ ID NO: 39583 - RNA, 19 nt, Artificial Sequence
  Synthetic oligonucleotide: CBLB-9228
cccgggccggcaagaagug

SEQ ID NO: 39584 - RNA, 20 nt, Artificial Sequence
  Synthetic oligonucleotide: CBLB-7735
ccccgggccggcaagaagug

SEQ ID NO: 39585 - RNA, 21 nt, Artificial Sequence
  Synthetic oligonucleotide: CBLB-9229
cccccgggccggcaagaagug

SEQ ID NO: 39586 - RNA, 22 nt, Artificial Sequence
  Synthetic oligonucleotide: CBLB-9230
gcccccgggccggcaagaagug

SEQ ID NO: 39587 - RNA, 23 nt, Artificial Sequence
  Synthetic oligonucleotide: CBLB-9231
ggcccccgggccggcaagaagug

SEQ ID NO: 39588 - RNA, 24 nt, Artificial Sequence
  Synthetic oligonucleotide: CBLB-9232
gggcccccgggccggcaagaagug

SEQ ID NO: 39589 - RNA, 18 nt, Artificial Sequence
  Synthetic oligonucleotide: CBLB-9233
uuguugguagcaugagug

SEQ ID NO: 39590 - RNA, 19 nt, Artificial Sequence
  Synthetic oligonucleotide: CBLB-9234
auuguugguagcaugagug

SEQ ID NO: 39591 - RNA, 20 nt, Artificial Sequence
  Synthetic oligonucleotide: CBLB-9235
aauuguugguagcaugagug

SEQ ID NO: 39592 - RNA, 21 nt, Artificial Sequence
  Synthetic oligonucleotide: CBLB-9236
caauuguugguagcaugagug

SEQ ID NO: 39593 - RNA, 22 nt, Artificial Sequence
  Synthetic oligonucleotide: CBLB-9237
gcaauuguugguagcaugagug

SEQ ID NO: 39594 - RNA, 23 nt, Artificial Sequence
  Synthetic oligonucleotide: CBLB-9238
agcaauuguugguagcaugagug

SEQ ID NO: 39595 - RNA, 24 nt, Artificial Sequence
  Synthetic oligonucleotide: CBLB-9239
gagcaauuguugguagcaugagug

SEQ ID NO: 39596 - RNA, 18 nt, Artificial Sequence
  Synthetic oligonucleotide: CBLB-9240
cacgcagcccagugugug

SEQ ID NO: 39597 - RNA, 19 nt, Artificial Sequence
  Synthetic oligonucleotide: CBLB-9241
gcacgcagcccagugugug

SEQ ID NO: 39598 - RNA, 20 nt, Artificial Sequence
  Synthetic oligonucleotide: CBLB-7740
cgcacgcagcccagugugug

SEQ ID NO: 39599 - RNA, 21 nt, Artificial Sequence
  Synthetic oligonucleotide: CBLB-9242
acgcacgcagcccagugugug

SEQ ID NO: 39600 - RNA, 22 nt, Artificial Sequence
  Synthetic oligonucleotide: CBLB-9243
cacgcacgcagcccagugugug

SEQ ID NO: 39601 - RNA, 23 nt, Artificial Sequence
  Synthetic oligonucleotide: CBLB-9244
acacgcacgcagcccagugugug

SEQ ID NO: 39602 - RNA, 24 nt, Artificial Sequence
  Synthetic oligonucleotide: CBLB-9245
cacacgcacgcagcccagugugug

SEQ ID NO: 39603 - RNA, 18 nt, Artificial Sequence
  Synthetic oligonucleotide: CBLB-9246
cgcagcccagugugugug

SEQ ID NO: 39604 - RNA, 19 nt, Artificial Sequence
  Synthetic oligonucleotide: CBLB-9247
acgcagcccagugugugug

SEQ ID NO: 39605 - RNA, 20 nt, Artificial Sequence
  Synthetic oligonucleotide: CBLB-7741
cacgcagcccagugugugug

SEQ ID NO: 39606 - RNA, 21 nt, Artificial Sequence
  Synthetic oligonucleotide: CBLB-9248
gcacgcagcccagugugugug

SEQ ID NO: 39607 - RNA, 22 nt, Artificial Sequence
  Synthetic oligonucleotide: CBLB-9249
cgcacgcagcccagugugugug

SEQ ID NO: 39608 - RNA, 23 nt, Artificial Sequence
  Synthetic oligonucleotide: CBLB-9250
acgcacgcagcccagugugugug

SEQ ID NO: 39609 - RNA, 24 nt, Artificial Sequence
  Synthetic oligonucleotide: CBLB-9251
cacgcacgcagcccagugugugug

SEQ ID NO: 39610 - RNA, 18 nt, Artificial Sequence
  Synthetic oligonucleotide: CBLB-9252
guuuaaccuaugauauug

SEQ ID NO: 39611 - RNA, 19 nt, Artificial Sequence
  Synthetic oligonucleotide: CBLB-9253
uguuuaaccuaugauauug

SEQ ID NO: 39612 - RNA, 20 nt, Artificial Sequence
  Synthetic oligonucleotide: CBLB-9254
uuguuuaaccuaugauauug

SEQ ID NO: 39613 - RNA, 21 nt, Artificial Sequence
  Synthetic oligonucleotide: CBLB-9255
uuuguuuaaccuaugauauug

SEQ ID NO: 39614 - RNA, 22 nt, Artificial Sequence
  Synthetic oligonucleotide: CBLB-9256
auuuguuuaaccuaugauauug

SEQ ID NO: 39615 - RNA, 23 nt, Artificial Sequence
  Synthetic oligonucleotide: CBLB-9257
cauuuguuuaaccuaugauauug

SEQ ID NO: 39616 - RNA, 24 nt, Artificial Sequence
  Synthetic oligonucleotide: CBLB-9258
gcauuuguuuaaccuaugauauug

SEQ ID NO: 39617 - RNA, 18 nt, Artificial Sequence
  Synthetic oligonucleotide: CBLB-9259
uguaaaauaucagaacau

SEQ ID NO: 39618 - RNA, 19 nt, Artificial Sequence
  Synthetic oligonucleotide: CBLB-9260
auguaaaauaucagaacau

SEQ ID NO: 39619 - RNA, 20 nt, Artificial Sequence
  Synthetic oligonucleotide: CBLB-9261
aauguaaaauaucagaacau

SEQ ID NO: 39620 - RNA, 21 nt, Artificial Sequence
  Synthetic oligonucleotide: CBLB-9262
caauguaaaauaucagaacau

SEQ ID NO: 39621 - RNA, 22 nt, Artificial Sequence
  Synthetic oligonucleotide: CBLB-9263
ccaauguaaaauaucagaacau

SEQ ID NO: 39622 - RNA, 23 nt, Artificial Sequence
  Synthetic oligonucleotide: CBLB-9264
cccaauguaaaauaucagaacau

SEQ ID NO: 39623 - RNA, 24 nt, Artificial Sequence
  Synthetic oligonucleotide: CBLB-9265
acccaauguaaaauaucagaacau

SEQ ID NO: 39624 - RNA, 18 nt, Artificial Sequence
  Synthetic oligonucleotide: CBLB-9266
acgugguuagagcaagau

SEQ ID NO: 39625 - RNA, 19 nt, Artificial Sequence
  Synthetic oligonucleotide: CBLB-9267
uacgugguuagagcaagau

SEQ ID NO: 39626 - RNA, 20 nt, Artificial Sequence
  Synthetic oligonucleotide: CBLB-9268
uuacgugguuagagcaagau

SEQ ID NO: 39627 - RNA, 21 nt, Artificial Sequence
  Synthetic oligonucleotide: CBLB-9269
guuacgugguuagagcaagau

SEQ ID NO: 39628 - RNA, 22 nt, Artificial Sequence
  Synthetic oligonucleotide: CBLB-9270
gguuacgugguuagagcaagau

SEQ ID NO: 39629 - RNA, 23 nt, Artificial Sequence
  Synthetic oligonucleotide: CBLB-9271
agguuacgugguuagagcaagau

SEQ ID NO: 39630 - RNA, 24 nt, Artificial Sequence
  Synthetic oligonucleotide: CBLB-9272
cagguuacgugguuagagcaagau

SEQ ID NO: 39631 - RNA, 18 nt, Artificial Sequence
  Synthetic oligonucleotide: CBLB-9273
aaacccaauguaaaauau

SEQ ID NO: 39632 - RNA, 19 nt, Artificial Sequence
  Synthetic oligonucleotide: CBLB-9274
aaaacccaauguaaaauau

SEQ ID NO: 39633 - RNA, 20 nt, Artificial Sequence
  Synthetic oligonucleotide: CBLB-9275
aaaaacccaauguaaaauau

SEQ ID NO: 39634 - RNA, 21 nt, Artificial Sequence
  Synthetic oligonucleotide: CBLB-9276
aaaaaacccaauguaaaauau

SEQ ID NO: 39635 - RNA, 22 nt, Artificial Sequence
  Synthetic oligonucleotide: CBLB-9277
caaaaaacccaauguaaaauau

SEQ ID NO: 39636 - RNA, 23 nt, Artificial Sequence
  Synthetic oligonucleotide: CBLB-9278
acaaaaaacccaauguaaaauau

SEQ ID NO: 39637 - RNA, 24 nt, Artificial Sequence
  Synthetic oligonucleotide: CBLB-9279
aacaaaaaacccaauguaaaauau

SEQ ID NO: 39638 - RNA, 18 nt, Artificial Sequence
  Synthetic oligonucleotide: CBLB-9280
cuccccucccgcccgacu

SEQ ID NO: 39639 - RNA, 19 nt, Artificial Sequence
  Synthetic oligonucleotide: CBLB-9281
ucuccccucccgcccgacu

SEQ ID NO: 39640 - RNA, 20 nt, Artificial Sequence
  Synthetic oligonucleotide: CBLB-7745
cucuccccucccgcccgacu

SEQ ID NO: 39641 - RNA, 21 nt, Artificial Sequence
  Synthetic oligonucleotide: CBLB-9282
gcucuccccucccgcccgacu

SEQ ID NO: 39642 - RNA, 22 nt, Artificial Sequence
  Synthetic oligonucleotide: CBLB-9283
cgcucuccccucccgcccgacu

SEQ ID NO: 39643 - RNA, 23 nt, Artificial Sequence
  Synthetic oligonucleotide: CBLB-9284
ccgcucuccccucccgcccgacu

SEQ ID NO: 39644 - RNA, 24 nt, Artificial Sequence
  Synthetic oligonucleotide: CBLB-9285
cccgcucuccccucccgcccgacu

SEQ ID NO: 39645 - RNA, 18 nt, Artificial Sequence
  Synthetic oligonucleotide: CBLB-9286
aacccagcgcgcaggccu

SEQ ID NO: 39646 - RNA, 19 nt, Artificial Sequence
  Synthetic oligonucleotide: CBLB-9287
caacccagcgcgcaggccu

SEQ ID NO: 39647 - RNA, 20 nt, Artificial Sequence
  Synthetic oligonucleotide: CBLB-9288
gcaacccagcgcgcaggccu

SEQ ID NO: 39648 - RNA, 21 nt, Artificial Sequence
  Synthetic oligonucleotide: CBLB-9289
agcaacccagcgcgcaggccu

SEQ ID NO: 39649 - RNA, 22 nt, Artificial Sequence
  Synthetic oligonucleotide: CBLB-9290
gagcaacccagcgcgcaggccu

SEQ ID NO: 39650 - RNA, 23 nt, Artificial Sequence
  Synthetic oligonucleotide: CBLB-9291
ggagcaacccagcgcgcaggccu

SEQ ID NO: 39651 - RNA, 24 nt, Artificial Sequence
  Synthetic oligonucleotide: CBLB-9292
aggagcaacccagcgcgcaggccu

SEQ ID NO: 39652 - RNA, 18 nt, Artificial Sequence
  Synthetic oligonucleotide: CBLB-9293
gcggcggcaaaggcagcu

SEQ ID NO: 39653 - RNA, 19 nt, Artificial Sequence
  Synthetic oligonucleotide: CBLB-9294
ggcggcggcaaaggcagcu

SEQ ID NO: 39654 - RNA, 20 nt, Artificial Sequence
  Synthetic oligonucleotide: CBLB-9295
cggcggcggcaaaggcagcu

SEQ ID NO: 39655 - RNA, 21 nt, Artificial Sequence
  Synthetic oligonucleotide: CBLB-9296
acggcggcggcaaaggcagcu

SEQ ID NO: 39656 - RNA, 22 nt, Artificial Sequence
  Synthetic oligonucleotide: CBLB-9297
gacggcggcggcaaaggcagcu

SEQ ID NO: 39657 - RNA, 23 nt, Artificial Sequence
  Synthetic oligonucleotide: CBLB-9298
ggacggcggcggcaaaggcagcu

SEQ ID NO: 39658 - RNA, 24 nt, Artificial Sequence
  Synthetic oligonucleotide: CBLB-9299
uggacggcggcggcaaaggcagcu

SEQ ID NO: 39659 - RNA, 18 nt, Artificial Sequence
  Synthetic oligonucleotide: CBLB-9300
gcugggagugggaucgcu

SEQ ID NO: 39660 - RNA, 19 nt, Artificial Sequence
  Synthetic oligonucleotide: CBLB-9301
ggcugggagugggaucgcu

SEQ ID NO: 39661 - RNA, 20 nt, Artificial Sequence
  Synthetic oligonucleotide: CBLB-9302
cggcugggagugggaucgcu

SEQ ID NO: 39662 - RNA, 21 nt, Artificial Sequence
  Synthetic oligonucleotide: CBLB-9303
ccggcugggagugggaucgcu

SEQ ID NO: 39663 - RNA, 22 nt, Artificial Sequence
  Synthetic oligonucleotide: CBLB-9304
cccggcugggagugggaucgcu

SEQ ID NO: 39664 - RNA, 23 nt, Artificial Sequence
  Synthetic oligonucleotide: CBLB-9305
ccccggcugggagugggaucgcu

SEQ ID NO: 39665 - RNA, 24 nt, Artificial Sequence
  Synthetic oligonucleotide: CBLB-9306
gccccggcugggagugggaucgcu

SEQ ID NO: 39666 - RNA, 18 nt, Artificial Sequence
  Synthetic oligonucleotide: CBLB-9307
acacacaggacccaggcu

SEQ ID NO: 39667 - RNA, 19 nt, Artificial Sequence
  Synthetic oligonucleotide: CBLB-9308
cacacacaggacccaggcu

SEQ ID NO: 39668 - RNA, 20 nt, Artificial Sequence
  Synthetic oligonucleotide: CBLB-7749
gcacacacaggacccaggcu

SEQ ID NO: 39669 - RNA, 21 nt, Artificial Sequence
  Synthetic oligonucleotide: CBLB-9309
ggcacacacaggacccaggcu

SEQ ID NO: 39670 - RNA, 22 nt, Artificial Sequence
  Synthetic oligonucleotide: CBLB-9310
uggcacacacaggacccaggcu

SEQ ID NO: 39671 - RNA, 23 nt, Artificial Sequence
  Synthetic oligonucleotide: CBLB-9311
guggcacacacaggacccaggcu

SEQ ID NO: 39672 - RNA, 24 nt, Artificial Sequence
  Synthetic oligonucleotide: CBLB-9312
uguggcacacacaggacccaggcu

SEQ ID NO: 39673 - RNA, 18 nt, Artificial Sequence
  Synthetic oligonucleotide: CBLB-9313
gaaagaaaguuccaaagu

SEQ ID NO: 39674 - RNA, 19 nt, Artificial Sequence
  Synthetic oligonucleotide: CBLB-9314
ggaaagaaaguuccaaagu

SEQ ID NO: 39675 - RNA, 20 nt, Artificial Sequence
  Synthetic oligonucleotide: CBLB-9315
uggaaagaaaguuccaaagu

SEQ ID NO: 39676 - RNA, 21 nt, Artificial Sequence
  Synthetic oligonucleotide: CBLB-9316
guggaaagaaaguuccaaagu

SEQ ID NO: 39677 - RNA, 22 nt, Artificial Sequence
  Synthetic oligonucleotide: CBLB-9317
aguggaaagaaaguuccaaagu

SEQ ID NO: 39678 - RNA, 23 nt, Artificial Sequence
  Synthetic oligonucleotide: CBLB-9318
uaguggaaagaaaguuccaaagu

SEQ ID NO: 39679 - RNA, 24 nt, Artificial Sequence
  Synthetic oligonucleotide: CBLB-9319
guaguggaaagaaaguuccaaagu

SEQ ID NO: 39680 - RNA, 18 nt, Artificial Sequence
  Synthetic oligonucleotide: CBLB-9320
cccgggccggcaagaagu

SEQ ID NO: 39681 - RNA, 19 nt, Artificial Sequence
  Synthetic oligonucleotide: CBLB-9321
ccccgggccggcaagaagu

SEQ ID NO: 39682 - RNA, 20 nt, Artificial Sequence
  Synthetic oligonucleotide: CBLB-9322
cccccgggccggcaagaagu

SEQ ID NO: 39683 - RNA, 21 nt, Artificial Sequence
  Synthetic oligonucleotide: CBLB-9323
gcccccgggccggcaagaagu

SEQ ID NO: 39684 - RNA, 22 nt, Artificial Sequence
  Synthetic oligonucleotide: CBLB-9324
ggcccccgggccggcaagaagu

SEQ ID NO: 39685 - RNA, 23 nt, Artificial Sequence
  Synthetic oligonucleotide: CBLB-9325
gggcccccgggccggcaagaagu

SEQ ID NO: 39686 - RNA, 24 nt, Artificial Sequence
  Synthetic oligonucleotide: CBLB-9326
cgggcccccgggccggcaagaagu

SEQ ID NO: 39687 - RNA, 18 nt, Artificial Sequence
  Synthetic oligonucleotide: CBLB-9327
uaguugcuagaaaguggu

SEQ ID NO: 39688 - RNA, 19 nt, Artificial Sequence
  Synthetic oligonucleotide: CBLB-9328
uuaguugcuagaaaguggu

SEQ ID NO: 39689 - RNA, 20 nt, Artificial Sequence
  Synthetic oligonucleotide: CBLB-9329
cuuaguugcuagaaaguggu

SEQ ID NO: 39690 - RNA, 21 nt, Artificial Sequence
  Synthetic oligonucleotide: CBLB-9330
ucuuaguugcuagaaaguggu

SEQ ID NO: 39691 - RNA, 22 nt, Artificial Sequence
  Synthetic oligonucleotide: CBLB-9331
uucuuaguugcuagaaaguggu

SEQ ID NO: 39692 - RNA, 23 nt, Artificial Sequence
  Synthetic oligonucleotide: CBLB-9332
auucuuaguugcuagaaaguggu

SEQ ID NO: 39693 - RNA, 24 nt, Artificial Sequence
  Synthetic oligonucleotide: CBLB-9333
aauucuuaguugcuagaaaguggu

SEQ ID NO: 39694 - RNA, 18 nt, Artificial Sequence
  Synthetic oligonucleotide: CBLB-9334
uuuaucagguuacguggu

SEQ ID NO: 39695 - RNA, 19 nt, Artificial Sequence
  Synthetic oligonucleotide: CBLB-9335
uuuuaucagguuacguggu

SEQ ID NO: 39696 - RNA, 20 nt, Artificial Sequence
  Synthetic oligonucleotide: CBLB-9336
auuuuaucagguuacguggu

SEQ ID NO: 39697 - RNA, 21 nt, Artificial Sequence
  Synthetic oligonucleotide: CBLB-9337
cauuuuaucagguuacguggu

SEQ ID NO: 39698 - RNA, 22 nt, Artificial Sequence
  Synthetic oligonucleotide: CBLB-9338
acauuuuaucagguuacguggu

SEQ ID NO: 39699 - RNA, 23 nt, Artificial Sequence
  Synthetic oligonucleotide: CBLB-9339
aacauuuuaucagguuacguggu

SEQ ID NO: 39700 - RNA, 24 nt, Artificial Sequence
  Synthetic oligonucleotide: CBLB-9340
aaacauuuuaucagguuacguggu

SEQ ID NO: 39701 - RNA, 18 nt, Artificial Sequence
  Synthetic oligonucleotide: CBLB-9341
gcacgcagcccagugugu

SEQ ID NO: 39702 - RNA, 19 nt, Artificial Sequence
  Synthetic oligonucleotide: CBLB-9342
cgcacgcagcccagugugu

SEQ ID NO: 39703 - RNA, 20 nt, Artificial Sequence
  Synthetic oligonucleotide: CBLB-9343
acgcacgcagcccagugugu

SEQ ID NO: 39704 - RNA, 21 nt, Artificial Sequence
  Synthetic oligonucleotide: CBLB-9344
cacgcacgcagcccagugugu

SEQ ID NO: 39705 - RNA, 22 nt, Artificial Sequence
  Synthetic oligonucleotide: CBLB-9345
acacgcacgcagcccagugugu

SEQ ID NO: 39706 - RNA, 23 nt, Artificial Sequence
  Synthetic oligonucleotide: CBLB-9346
cacacgcacgcagcccagugugu

SEQ ID NO: 39707 - RNA, 24 nt, Artificial Sequence
  Synthetic oligonucleotide: CBLB-9347
ccacacgcacgcagcccagugugu

SEQ ID NO: 39708 - RNA, 18 nt, Artificial Sequence
  Synthetic oligonucleotide: CBLB-9348
acgcagcccagugugugu

SEQ ID NO: 39709 - RNA, 19 nt, Artificial Sequence
  Synthetic oligonucleotide: CBLB-9349
cacgcagcccagugugugu

SEQ ID NO: 39710 - RNA, 20 nt, Artificial Sequence
  Synthetic oligonucleotide: CBLB-7758
gcacgcagcccagugugugu

SEQ ID NO: 39711 - RNA, 21 nt, Artificial Sequence
  Synthetic oligonucleotide: CBLB-9350
cgcacgcagcccagugugugu

SEQ ID NO: 39712 - RNA, 22 nt, Artificial Sequence
  Synthetic oligonucleotide: CBLB-9351
acgcacgcagcccagugugugu

SEQ ID NO: 39713 - RNA, 23 nt, Artificial Sequence
  Synthetic oligonucleotide: CBLB-9352
cacgcacgcagcccagugugugu

SEQ ID NO: 39714 - RNA, 24 nt, Artificial Sequence
  Synthetic oligonucleotide: CBLB-9353
acacgcacgcagcccagugugugu

SEQ ID NO: 39715 - RNA, 18 nt, Artificial Sequence
  Synthetic oligonucleotide: CBLB-9354
aaagugguuagaaccauu

SEQ ID NO: 39716 - RNA, 19 nt, Artificial Sequence
  Synthetic oligonucleotide: CBLB-9355
gaaagugguuagaaccauu

SEQ ID NO: 39717 - RNA, 20 nt, Artificial Sequence
  Synthetic oligonucleotide: CBLB-9356
agaaagugguuagaaccauu

SEQ ID NO: 39718 - RNA, 21 nt, Artificial Sequence
  Synthetic oligonucleotide: CBLB-9357
uagaaagugguuagaaccauu

SEQ ID NO: 39719 - RNA, 22 nt, Artificial Sequence
  Synthetic oligonucleotide: CBLB-9358
cuagaaagugguuagaaccauu

SEQ ID NO: 39720 - RNA, 23 nt, Artificial Sequence
  Synthetic oligonucleotide: CBLB-9359
gcuagaaagugguuagaaccauu

SEQ ID NO: 39721 - RNA, 24 nt, Artificial Sequence
  Synthetic oligonucleotide: CBLB-9360
ugcuagaaagugguuagaaccauu

SEQ ID NO: 39722 - RNA, 18 nt, Artificial Sequence
  Synthetic oligonucleotide: CBLB-9361
auuuuaauuugacgaaaa

SEQ ID NO: 39723 - RNA, 19 nt, Artificial Sequence
  Synthetic oligonucleotide: CBLB-9362
gauuuuaauuugacgaaaa

SEQ ID NO: 39724 - RNA, 20 nt, Artificial Sequence
  Synthetic oligonucleotide: CBLB-9363
agauuuuaauuugacgaaaa

SEQ ID NO: 39725 - RNA, 21 nt, Artificial Sequence
  Synthetic oligonucleotide: CBLB-9364
aagauuuuaauuugacgaaaa

SEQ ID NO: 39726 - RNA, 22 nt, Artificial Sequence
  Synthetic oligonucleotide: CBLB-9365
uaagauuuuaauuugacgaaaa

SEQ ID NO: 39727 - RNA, 23 nt, Artificial Sequence
  Synthetic oligonucleotide: CBLB-9366
uuaagauuuuaauuugacgaaaa

SEQ ID NO: 39728 - RNA, 24 nt, Artificial Sequence
  Synthetic oligonucleotide: CBLB-9367
guuaagauuuuaauuugacgaaaa

SEQ ID NO: 39729 - RNA, 18 nt, Artificial Sequence
  Synthetic oligonucleotide: CBLB-9368
ggcgccgaaaggcaagaa

SEQ ID NO: 39730 - RNA, 19 nt, Artificial Sequence
  Synthetic oligonucleotide: CBLB-9369
cggcgccgaaaggcaagaa

SEQ ID NO: 39731 - RNA, 20 nt, Artificial Sequence
  Synthetic oligonucleotide: CBLB-7621
acggcgccgaaaggcaagaa

SEQ ID NO: 39732 - RNA, 21 nt, Artificial Sequence
  Synthetic oligonucleotide: CBLB-9370
uacggcgccgaaaggcaagaa

SEQ ID NO: 39733 - RNA, 22 nt, Artificial Sequence
  Synthetic oligonucleotide: CBLB-9371
cuacggcgccgaaaggcaagaa

SEQ ID NO: 39734 - RNA, 23 nt, Artificial Sequence
  Synthetic oligonucleotide: CBLB-9372
gcuacggcgccgaaaggcaagaa

SEQ ID NO: 39735 - RNA, 24 nt, Artificial Sequence
  Synthetic oligonucleotide: CBLB-9373
agcuacggcgccgaaaggcaagaa

SEQ ID NO: 39736 - RNA, 18 nt, Artificial Sequence
  Synthetic oligonucleotide: CBLB-9374
gcgcgggccaaggaggaa

SEQ ID NO: 39737 - RNA, 19 nt, Artificial Sequence
  Synthetic oligonucleotide: CBLB-9375
ggcgcgggccaaggaggaa

SEQ ID NO: 39738 - RNA, 20 nt, Artificial Sequence
  Synthetic oligonucleotide: CBLB-9376
aggcgcgggccaaggaggaa

SEQ ID NO: 39739 - RNA, 21 nt, Artificial Sequence
  Synthetic oligonucleotide: CBLB-9377
caggcgcgggccaaggaggaa

SEQ ID NO: 39740 - RNA, 22 nt, Artificial Sequence
  Synthetic oligonucleotide: CBLB-9378
ccaggcgcgggccaaggaggaa

SEQ ID NO: 39741 - RNA, 23 nt, Artificial Sequence
  Synthetic oligonucleotide: CBLB-9379
gccaggcgcgggccaaggaggaa

SEQ ID NO: 39742 - RNA, 24 nt, Artificial Sequence
  Synthetic oligonucleotide: CBLB-9380
agccaggcgcgggccaaggaggaa

SEQ ID NO: 39743 - RNA, 18 nt, Artificial Sequence
  Synthetic oligonucleotide: CBLB-9381
gccgccguccaguuugaa

SEQ ID NO: 39744 - RNA, 19 nt, Artificial Sequence
  Synthetic oligonucleotide: CBLB-9382
cgccgccguccaguuugaa

SEQ ID NO: 39745 - RNA, 20 nt, Artificial Sequence
  Synthetic oligonucleotide: CBLB-9383
ccgccgccguccaguuugaa

SEQ ID NO: 39746 - RNA, 21 nt, Artificial Sequence
  Synthetic oligonucleotide: CBLB-9384
gccgccgccguccaguuugaa

SEQ ID NO: 39747 - RNA, 22 nt, Artificial Sequence
  Synthetic oligonucleotide: CBLB-9385
ugccgccgccguccaguuugaa

SEQ ID NO: 39748 - RNA, 23 nt, Artificial Sequence
  Synthetic oligonucleotide: CBLB-9386
uugccgccgccguccaguuugaa

SEQ ID NO: 39749 - RNA, 24 nt, Artificial Sequence
  Synthetic oligonucleotide: CBLB-9387
uuugccgccgccguccaguuugaa

SEQ ID NO: 39750 - RNA, 18 nt, Artificial Sequence
  Synthetic oligonucleotide: CBLB-9388
cggggcuccccacacaca

SEQ ID NO: 39751 - RNA, 19 nt, Artificial Sequence
  Synthetic oligonucleotide: CBLB-9389
ccggggcuccccacacaca

SEQ ID NO: 39752 - RNA, 20 nt, Artificial Sequence
  Synthetic oligonucleotide: CBLB-9390
gccggggcuccccacacaca

SEQ ID NO: 39753 - RNA, 21 nt, Artificial Sequence
  Synthetic oligonucleotide: CBLB-9391
agccggggcuccccacacaca

SEQ ID NO: 39754 - RNA, 22 nt, Artificial Sequence
  Synthetic oligonucleotide: CBLB-9392
cagccggggcuccccacacaca

SEQ ID NO: 39755 - RNA, 23 nt, Artificial Sequence
  Synthetic oligonucleotide: CBLB-9393
ccagccggggcuccccacacaca

SEQ ID NO: 39756 - RNA, 24 nt, Artificial Sequence
  Synthetic oligonucleotide: CBLB-9394
cccagccggggcuccccacacaca

SEQ ID NO: 39757 - RNA, 18 nt, Artificial Sequence
  Synthetic oligonucleotide: CBLB-9395
guagccaggcgcgggcca

SEQ ID NO: 39758 - RNA, 19 nt, Artificial Sequence
  Synthetic oligonucleotide: CBLB-9396
gguagccaggcgcgggcca

SEQ ID NO: 39759 - RNA, 20 nt, Artificial Sequence
  Synthetic oligonucleotide: CBLB-7629
ggguagccaggcgcgggcca

SEQ ID NO: 39760 - RNA, 21 nt, Artificial Sequence
  Synthetic oligonucleotide: CBLB-9397
gggguagccaggcgcgggcca

SEQ ID NO: 39761 - RNA, 22 nt, Artificial Sequence
  Synthetic oligonucleotide: CBLB-9398
cgggguagccaggcgcgggcca

SEQ ID NO: 39762 - RNA, 23 nt, Artificial Sequence
  Synthetic oligonucleotide: CBLB-9399
ccgggguagccaggcgcgggcca

SEQ ID NO: 39763 - RNA, 24 nt, Artificial Sequence
  Synthetic oligonucleotide: CBLB-9400
cccgggguagccaggcgcgggcca

SEQ ID NO: 39764 - RNA, 18 nt, Artificial Sequence
  Synthetic oligonucleotide: CBLB-9401
uggguccugugugugcca

SEQ ID NO: 39765 - RNA, 19 nt, Artificial Sequence
  Synthetic oligonucleotide: CBLB-9402
cuggguccugugugugcca

SEQ ID NO: 39766 - RNA, 20 nt, Artificial Sequence
  Synthetic oligonucleotide: CBLB-9403
ccuggguccugugugugcca

SEQ ID NO: 39767 - RNA, 21 nt, Artificial Sequence
  Synthetic oligonucleotide: CBLB-9404
gccuggguccugugugugcca

SEQ ID NO: 39768 - RNA, 22 nt, Artificial Sequence
  Synthetic oligonucleotide: CBLB-9405
agccuggguccugugugugcca

SEQ ID NO: 39769 - RNA, 23 nt, Artificial Sequence
  Synthetic oligonucleotide: CBLB-9406
gagccuggguccugugugugcca

SEQ ID NO: 39770 - RNA, 24 nt, Artificial Sequence
  Synthetic oligonucleotide: CBLB-9407
cgagccuggguccugugugugcca

SEQ ID NO: 39771 - RNA, 18 nt, Artificial Sequence
  Synthetic oligonucleotide: CBLB-9408
acagggguggggugucca

SEQ ID NO: 39772 - RNA, 19 nt, Artificial Sequence
  Synthetic oligonucleotide: CBLB-9409
cacagggguggggugucca

SEQ ID NO: 39773 - RNA, 20 nt, Artificial Sequence
  Synthetic oligonucleotide: CBLB-9410
ccacagggguggggugucca

SEQ ID NO: 39774 - RNA, 21 nt, Artificial Sequence
  Synthetic oligonucleotide: CBLB-9411
gccacagggguggggugucca

SEQ ID NO: 39775 - RNA, 22 nt, Artificial Sequence
  Synthetic oligonucleotide: CBLB-9412
ugccacagggguggggugucca

SEQ ID NO: 39776 - RNA, 23 nt, Artificial Sequence
  Synthetic oligonucleotide: CBLB-9413
gugccacagggguggggugucca

SEQ ID NO: 39777 - RNA, 24 nt, Artificial Sequence
  Synthetic oligonucleotide: CBLB-9414
ugugccacagggguggggugucca

SEQ ID NO: 39778 - RNA, 18 nt, Artificial Sequence
  Synthetic oligonucleotide: CBLB-9415
cggcgccgaaaggcaaga

SEQ ID NO: 39779 - RNA, 19 nt, Artificial Sequence
  Synthetic oligonucleotide: CBLB-9416
acggcgccgaaaggcaaga

SEQ ID NO: 39780 - RNA, 20 nt, Artificial Sequence
  Synthetic oligonucleotide: CBLB-7631
uacggcgccgaaaggcaaga

SEQ ID NO: 39781 - RNA, 21 nt, Artificial Sequence
  Synthetic oligonucleotide: CBLB-9417
cuacggcgccgaaaggcaaga

SEQ ID NO: 39782 - RNA, 22 nt, Artificial Sequence
  Synthetic oligonucleotide: CBLB-9418
gcuacggcgccgaaaggcaaga

SEQ ID NO: 39783 - RNA, 23 nt, Artificial Sequence
  Synthetic oligonucleotide: CBLB-9419
agcuacggcgccgaaaggcaaga

SEQ ID NO: 39784 - RNA, 24 nt, Artificial Sequence
  Synthetic oligonucleotide: CBLB-9420
cagcuacggcgccgaaaggcaaga

SEQ ID NO: 39785 - RNA, 18 nt, Artificial Sequence
  Synthetic oligonucleotide: CBLB-9421
gcgggccaaggaggaaga

SEQ ID NO: 39786 - RNA, 19 nt, Artificial Sequence
  Synthetic oligonucleotide: CBLB-9422
cgcgggccaaggaggaaga

SEQ ID NO: 39787 - RNA, 20 nt, Artificial Sequence
  Synthetic oligonucleotide: CBLB-7633
gcgcgggccaaggaggaaga

SEQ ID NO: 39788 - RNA, 21 nt, Artificial Sequence
  Synthetic oligonucleotide: CBLB-9423
ggcgcgggccaaggaggaaga

SEQ ID NO: 39789 - RNA, 22 nt, Artificial Sequence
  Synthetic oligonucleotide: CBLB-9424
aggcgcgggccaaggaggaaga

SEQ ID NO: 39790 - RNA, 23 nt, Artificial Sequence
  Synthetic oligonucleotide: CBLB-9425
caggcgcgggccaaggaggaaga

SEQ ID NO: 39791 - RNA, 24 nt, Artificial Sequence
  Synthetic oligonucleotide: CBLB-9426
ccaggcgcgggccaaggaggaaga

SEQ ID NO: 39792 - RNA, 18 nt, Artificial Sequence
  Synthetic oligonucleotide: CBLB-9427
cccgcaggccggggagga

SEQ ID NO: 39793 - RNA, 19 nt, Artificial Sequence
  Synthetic oligonucleotide: CBLB-9428
acccgcaggccggggagga

SEQ ID NO: 39794 - RNA, 20 nt, Artificial Sequence
  Synthetic oligonucleotide: CBLB-2030
aacccgcaggccggggagga

SEQ ID NO: 39795 - RNA, 21 nt, Artificial Sequence
  Synthetic oligonucleotide: CBLB-9429
gaacccgcaggccggggagga

SEQ ID NO: 39796 - RNA, 22 nt, Artificial Sequence
  Synthetic oligonucleotide: CBLB-9430
agaacccgcaggccggggagga

SEQ ID NO: 39797 - RNA, 23 nt, Artificial Sequence
  Synthetic oligonucleotide: CBLB-9431
cagaacccgcaggccggggagga

SEQ ID NO: 39798 - RNA, 24 nt, Artificial Sequence
  Synthetic oligonucleotide: CBLB-9432
ccagaacccgcaggccggggagga

SEQ ID NO: 39799 - RNA, 18 nt, Artificial Sequence
  Synthetic oligonucleotide: CBLB-9433
uccccgagucgggcggga

SEQ ID NO: 39800 - RNA, 19 nt, Artificial Sequence
  Synthetic oligonucleotide: CBLB-9434
cuccccgagucgggcggga

SEQ ID NO: 39801 - RNA, 20 nt, Artificial Sequence
  Synthetic oligonucleotide: CBLB-7635
ccuccccgagucgggcggga

SEQ ID NO: 39802 - RNA, 21 nt, Artificial Sequence
  Synthetic oligonucleotide: CBLB-9435
gccuccccgagucgggcggga

SEQ ID NO: 39803 - RNA, 22 nt, Artificial Sequence
  Synthetic oligonucleotide: CBLB-9436
ggccuccccgagucgggcggga

SEQ ID NO: 39804 - RNA, 23 nt, Artificial Sequence
  Synthetic oligonucleotide: CBLB-9437
cggccuccccgagucgggcggga

SEQ ID NO: 39805 - RNA, 24 nt, Artificial Sequence
  Synthetic oligonucleotide: CBLB-9438
gcggccuccccgagucgggcggga

SEQ ID NO: 39806 - RNA, 18 nt, Artificial Sequence
  Synthetic oligonucleotide: CBLB-9439
guugcuccuucuucggga

SEQ ID NO: 39807 - RNA, 19 nt, Artificial Sequence
  Synthetic oligonucleotide: CBLB-9440
gguugcuccuucuucggga

SEQ ID NO: 39808 - RNA, 20 nt, Artificial Sequence
  Synthetic oligonucleotide: CBLB-9441
ggguugcuccuucuucggga

SEQ ID NO: 39809 - RNA, 21 nt, Artificial Sequence
  Synthetic oligonucleotide: CBLB-9442
uggguugcuccuucuucggga

SEQ ID NO: 39810 - RNA, 22 nt, Artificial Sequence
  Synthetic oligonucleotide: CBLB-9443
cuggguugcuccuucuucggga

SEQ ID NO: 39811 - RNA, 23 nt, Artificial Sequence
  Synthetic oligonucleotide: CBLB-9444
gcuggguugcuccuucuucggga

SEQ ID NO: 39812 - RNA, 24 nt, Artificial Sequence
  Synthetic oligonucleotide: CBLB-9445
cgcuggguugcuccuucuucggga

SEQ ID NO: 39813 - RNA, 18 nt, Artificial Sequence
  Synthetic oligonucleotide: CBLB-9446
gggcugcgugcgugugga

SEQ ID NO: 39814 - RNA, 19 nt, Artificial Sequence
  Synthetic oligonucleotide: CBLB-9447
ugggcugcgugcgugugga

SEQ ID NO: 39815 - RNA, 20 nt, Artificial Sequence
  Synthetic oligonucleotide: CBLB-9448
cugggcugcgugcgugugga

SEQ ID NO: 39816 - RNA, 21 nt, Artificial Sequence
  Synthetic oligonucleotide: CBLB-9449
acugggcugcgugcgugugga

SEQ ID NO: 39817 - RNA, 22 nt, Artificial Sequence
  Synthetic oligonucleotide: CBLB-9450
cacugggcugcgugcgugugga

SEQ ID NO: 39818 - RNA, 23 nt, Artificial Sequence
  Synthetic oligonucleotide: CBLB-9451
acacugggcugcgugcgugugga

SEQ ID NO: 39819 - RNA, 24 nt, Artificial Sequence
  Synthetic oligonucleotide: CBLB-9452
cacacugggcugcgugcgugugga

SEQ ID NO: 39820 - RNA, 18 nt, Artificial Sequence
  Synthetic oligonucleotide: CBLB-9453
aguggggcauuuaaagac

SEQ ID NO: 39821 - RNA, 19 nt, Artificial Sequence
  Synthetic oligonucleotide: CBLB-9454
aaguggggcauuuaaagac

SEQ ID NO: 39822 - RNA, 20 nt, Artificial Sequence
  Synthetic oligonucleotide: CBLB-9455
gaaguggggcauuuaaagac

SEQ ID NO: 39823 - RNA, 21 nt, Artificial Sequence
  Synthetic oligonucleotide: CBLB-9456
ugaaguggggcauuuaaagac

SEQ ID NO: 39824 - RNA, 22 nt, Artificial Sequence
  Synthetic oligonucleotide: CBLB-9457
uugaaguggggcauuuaaagac

SEQ ID NO: 39825 - RNA, 23 nt, Artificial Sequence
  Synthetic oligonucleotide: CBLB-9458
uuugaaguggggcauuuaaagac

SEQ ID NO: 39826 - RNA, 24 nt, Artificial Sequence
  Synthetic oligonucleotide: CBLB-9459
guuugaaguggggcauuuaaagac

SEQ ID NO: 39827 - RNA, 18 nt, Artificial Sequence
  Synthetic oligonucleotide: CBLB-9460
cacacuucuugccggccc

SEQ ID NO: 39828 - RNA, 19 nt, Artificial Sequence
  Synthetic oligonucleotide: CBLB-9461
ccacacuucuugccggccc

SEQ ID NO: 39829 - RNA, 20 nt, Artificial Sequence
  Synthetic oligonucleotide: CBLB-7653
uccacacuucuugccggccc

SEQ ID NO: 39830 - RNA, 21 nt, Artificial Sequence
  Synthetic oligonucleotide: CBLB-9462
cuccacacuucuugccggccc

SEQ ID NO: 39831 - RNA, 22 nt, Artificial Sequence
  Synthetic oligonucleotide: CBLB-9463
gcuccacacuucuugccggccc

SEQ ID NO: 39832 - RNA, 23 nt, Artificial Sequence
  Synthetic oligonucleotide: CBLB-9464
ggcuccacacuucuugccggccc

SEQ ID NO: 39833 - RNA, 24 nt, Artificial Sequence
  Synthetic oligonucleotide: CBLB-9465
aggcuccacacuucuugccggccc

SEQ ID NO: 39834 - RNA, 18 nt, Artificial Sequence
  Synthetic oligonucleotide: CBLB-9466
agaagggaaggggucgcc

SEQ ID NO: 39835 - RNA, 19 nt, Artificial Sequence
  Synthetic oligonucleotide: CBLB-9467
aagaagggaaggggucgcc

SEQ ID NO: 39836 - RNA, 20 nt, Artificial Sequence
  Synthetic oligonucleotide: CBLB-7660
caagaagggaaggggucgcc

SEQ ID NO: 39837 - RNA, 21 nt, Artificial Sequence
  Synthetic oligonucleotide: CBLB-9468
gcaagaagggaaggggucgcc

SEQ ID NO: 39838 - RNA, 22 nt, Artificial Sequence
  Synthetic oligonucleotide: CBLB-9469
ggcaagaagggaaggggucgcc

SEQ ID NO: 39839 - RNA, 23 nt, Artificial Sequence
  Synthetic oligonucleotide: CBLB-9470
aggcaagaagggaaggggucgcc

SEQ ID NO: 39840 - RNA, 24 nt, Artificial Sequence
  Synthetic oligonucleotide: CBLB-9471
aaggcaagaagggaaggggucgcc

SEQ ID NO: 39841 - RNA, 18 nt, Artificial Sequence
  Synthetic oligonucleotide: CBLB-9472
gaccagaacccgcaggcc

SEQ ID NO: 39842 - RNA, 19 nt, Artificial Sequence
  Synthetic oligonucleotide: CBLB-9473
agaccagaacccgcaggcc

SEQ ID NO: 39843 - RNA, 20 nt, Artificial Sequence
  Synthetic oligonucleotide: CBLB-7661
aagaccagaacccgcaggcc

SEQ ID NO: 39844 - RNA, 21 nt, Artificial Sequence
  Synthetic oligonucleotide: CBLB-9474
aaagaccagaacccgcaggcc

SEQ ID NO: 39845 - RNA, 22 nt, Artificial Sequence
  Synthetic oligonucleotide: CBLB-9475
uaaagaccagaacccgcaggcc

SEQ ID NO: 39846 - RNA, 23 nt, Artificial Sequence
  Synthetic oligonucleotide: CBLB-9476
uuaaagaccagaacccgcaggcc

SEQ ID NO: 39847 - RNA, 24 nt, Artificial Sequence
  Synthetic oligonucleotide: CBLB-9477
uuuaaagaccagaacccgcaggcc

SEQ ID NO: 39848 - RNA, 18 nt, Artificial Sequence
  Synthetic oligonucleotide: CBLB-9478
ccacacuucuugccggcc

SEQ ID NO: 39849 - RNA, 19 nt, Artificial Sequence
  Synthetic oligonucleotide: CBLB-9479
uccacacuucuugccggcc

SEQ ID NO: 39850 - RNA, 20 nt, Artificial Sequence
  Synthetic oligonucleotide: CBLB-7662
cuccacacuucuugccggcc

SEQ ID NO: 39851 - RNA, 21 nt, Artificial Sequence
  Synthetic oligonucleotide: CBLB-9480
gcuccacacuucuugccggcc

SEQ ID NO: 39852 - RNA, 22 nt, Artificial Sequence
  Synthetic oligonucleotide: CBLB-9481
ggcuccacacuucuugccggcc

SEQ ID NO: 39853 - RNA, 23 nt, Artificial Sequence
  Synthetic oligonucleotide: CBLB-9482
aggcuccacacuucuugccggcc

SEQ ID NO: 39854 - RNA, 24 nt, Artificial Sequence
  Synthetic oligonucleotide: CBLB-9483
gaggcuccacacuucuugccggcc

SEQ ID NO: 39855 - RNA, 18 nt, Artificial Sequence
  Synthetic oligonucleotide: CBLB-9484
gguagccaggcgcgggcc

SEQ ID NO: 39856 - RNA, 19 nt, Artificial Sequence
  Synthetic oligonucleotide: CBLB-9485
ggguagccaggcgcgggcc

SEQ ID NO: 39857 - RNA, 20 nt, Artificial Sequence
  Synthetic oligonucleotide: CBLB-9486
gggguagccaggcgcgggcc

SEQ ID NO: 39858 - RNA, 21 nt, Artificial Sequence
  Synthetic oligonucleotide: CBLB-9487
cgggguagccaggcgcgggcc

SEQ ID NO: 39859 - RNA, 22 nt, Artificial Sequence
  Synthetic oligonucleotide: CBLB-9488
ccgggguagccaggcgcgggcc

SEQ ID NO: 39860 - RNA, 23 nt, Artificial Sequence
  Synthetic oligonucleotide: CBLB-9489
cccgggguagccaggcgcgggcc

SEQ ID NO: 39861 - RNA, 24 nt, Artificial Sequence
  Synthetic oligonucleotide: CBLB-9490
gcccgggguagccaggcgcgggcc

SEQ ID NO: 39862 - RNA, 18 nt, Artificial Sequence
  Synthetic oligonucleotide: CBLB-9491
agcgaucccacucccagc

SEQ ID NO: 39863 - RNA, 19 nt, Artificial Sequence
  Synthetic oligonucleotide: CBLB-9492
cagcgaucccacucccagc

SEQ ID NO: 39864 - RNA, 20 nt, Artificial Sequence
  Synthetic oligonucleotide: CBLB-7664
ucagcgaucccacucccagc

SEQ ID NO: 39865 - RNA, 21 nt, Artificial Sequence
  Synthetic oligonucleotide: CBLB-9493
cucagcgaucccacucccagc

SEQ ID NO: 39866 - RNA, 22 nt, Artificial Sequence
  Synthetic oligonucleotide: CBLB-9494
ucucagcgaucccacucccagc

SEQ ID NO: 39867 - RNA, 23 nt, Artificial Sequence
  Synthetic oligonucleotide: CBLB-9495
uucucagcgaucccacucccagc

SEQ ID NO: 39868 - RNA, 24 nt, Artificial Sequence
  Synthetic oligonucleotide: CBLB-9496
guucucagcgaucccacucccagc

SEQ ID NO: 39869 - RNA, 18 nt, Artificial Sequence
  Synthetic oligonucleotide: CBLB-9497
uuuauuacacuuuucagc

SEQ ID NO: 39870 - RNA, 19 nt, Artificial Sequence
  Synthetic oligonucleotide: CBLB-9498
guuuauuacacuuuucagc

SEQ ID NO: 39871 - RNA, 20 nt, Artificial Sequence
  Synthetic oligonucleotide: CBLB-9499
cguuuauuacacuuuucagc

SEQ ID NO: 39872 - RNA, 21 nt, Artificial Sequence
  Synthetic oligonucleotide: CBLB-9500
gcguuuauuacacuuuucagc

SEQ ID NO: 39873 - RNA, 22 nt, Artificial Sequence
  Synthetic oligonucleotide: CBLB-9501
agcguuuauuacacuuuucagc

SEQ ID NO: 39874 - RNA, 23 nt, Artificial Sequence
  Synthetic oligonucleotide: CBLB-9502
uagcguuuauuacacuuuucagc

SEQ ID NO: 39875 - RNA, 24 nt, Artificial Sequence
  Synthetic oligonucleotide: CBLB-9503
auagcguuuauuacacuuuucagc

SEQ ID NO: 39876 - RNA, 18 nt, Artificial Sequence
  Synthetic oligonucleotide: CBLB-9504
aagaagggaaggggucgc

SEQ ID NO: 39877 - RNA, 19 nt, Artificial Sequence
  Synthetic oligonucleotide: CBLB-9505
caagaagggaaggggucgc

SEQ ID NO: 39878 - RNA, 20 nt, Artificial Sequence
  Synthetic oligonucleotide: CBLB-7674
gcaagaagggaaggggucgc

SEQ ID NO: 39879 - RNA, 21 nt, Artificial Sequence
  Synthetic oligonucleotide: CBLB-9506
ggcaagaagggaaggggucgc

SEQ ID NO: 39880 - RNA, 22 nt, Artificial Sequence
  Synthetic oligonucleotide: CBLB-9507
aggcaagaagggaaggggucgc

SEQ ID NO: 39881 - RNA, 23 nt, Artificial Sequence
  Synthetic oligonucleotide: CBLB-9508
aaggcaagaagggaaggggucgc

SEQ ID NO: 39882 - RNA, 24 nt, Artificial Sequence
  Synthetic oligonucleotide: CBLB-9509
aaaggcaagaagggaaggggucgc

SEQ ID NO: 39883 - RNA, 18 nt, Artificial Sequence
  Synthetic oligonucleotide: CBLB-9510
gcuacggcgccgaaaggc

SEQ ID NO: 39884 - RNA, 19 nt, Artificial Sequence
  Synthetic oligonucleotide: CBLB-9511
agcuacggcgccgaaaggc

SEQ ID NO: 39885 - RNA, 20 nt, Artificial Sequence
  Synthetic oligonucleotide: CBLB-9512
cagcuacggcgccgaaaggc

SEQ ID NO: 39886 - RNA, 21 nt, Artificial Sequence
  Synthetic oligonucleotide: CBLB-9513
acagcuacggcgccgaaaggc

SEQ ID NO: 39887 - RNA, 22 nt, Artificial Sequence
  Synthetic oligonucleotide: CBLB-9514
gacagcuacggcgccgaaaggc

SEQ ID NO: 39888 - RNA, 23 nt, Artificial Sequence
  Synthetic oligonucleotide: CBLB-9515
ggacagcuacggcgccgaaaggc

SEQ ID NO: 39889 - RNA, 24 nt, Artificial Sequence
  Synthetic oligonucleotide: CBLB-9516
uggacagcuacggcgccgaaaggc

SEQ ID NO: 39890 - RNA, 18 nt, Artificial Sequence
  Synthetic oligonucleotide: CBLB-9517
ggcccgggguagccaggc

SEQ ID NO: 39891 - RNA, 19 nt, Artificial Sequence
  Synthetic oligonucleotide: CBLB-9518
gggcccgggguagccaggc

SEQ ID NO: 39892 - RNA, 20 nt, Artificial Sequence
  Synthetic oligonucleotide: CBLB-9519
ggggcccgggguagccaggc

SEQ ID NO: 39893 - RNA, 21 nt, Artificial Sequence
  Synthetic oligonucleotide: CBLB-9520
gggggcccgggguagccaggc

SEQ ID NO: 39894 - RNA, 22 nt, Artificial Sequence
  Synthetic oligonucleotide: CBLB-9521
cgggggcccgggguagccaggc

SEQ ID NO: 39895 - RNA, 23 nt, Artificial Sequence
  Synthetic oligonucleotide: CBLB-9522
ccgggggcccgggguagccaggc

SEQ ID NO: 39896 - RNA, 24 nt, Artificial Sequence
  Synthetic oligonucleotide: CBLB-9523
cccgggggcccgggguagccaggc

SEQ ID NO: 39897 - RNA, 18 nt, Artificial Sequence
  Synthetic oligonucleotide: CBLB-9524
agaccagaacccgcaggc

SEQ ID NO: 39898 - RNA, 19 nt, Artificial Sequence
  Synthetic oligonucleotide: CBLB-9525
aagaccagaacccgcaggc

SEQ ID NO: 39899 - RNA, 20 nt, Artificial Sequence
  Synthetic oligonucleotide: CBLB-7675
aaagaccagaacccgcaggc

SEQ ID NO: 39900 - RNA, 21 nt, Artificial Sequence
  Synthetic oligonucleotide: CBLB-9526
uaaagaccagaacccgcaggc

SEQ ID NO: 39901 - RNA, 22 nt, Artificial Sequence
  Synthetic oligonucleotide: CBLB-9527
uuaaagaccagaacccgcaggc

SEQ ID NO: 39902 - RNA, 23 nt, Artificial Sequence
  Synthetic oligonucleotide: CBLB-9528
uuuaaagaccagaacccgcaggc

SEQ ID NO: 39903 - RNA, 24 nt, Artificial Sequence
  Synthetic oligonucleotide: CBLB-9529
auuuaaagaccagaacccgcaggc

SEQ ID NO: 39904 - RNA, 18 nt, Artificial Sequence
  Synthetic oligonucleotide: CBLB-9530
uccacacuucuugccggc

SEQ ID NO: 39905 - RNA, 19 nt, Artificial Sequence
  Synthetic oligonucleotide: CBLB-9531
cuccacacuucuugccggc

SEQ ID NO: 39906 - RNA, 20 nt, Artificial Sequence
  Synthetic oligonucleotide: CBLB-9532
gcuccacacuucuugccggc

SEQ ID NO: 39907 - RNA, 21 nt, Artificial Sequence
  Synthetic oligonucleotide: CBLB-9533
ggcuccacacuucuugccggc

SEQ ID NO: 39908 - RNA, 22 nt, Artificial Sequence
  Synthetic oligonucleotide: CBLB-9534
aggcuccacacuucuugccggc

SEQ ID NO: 39909 - RNA, 23 nt, Artificial Sequence
  Synthetic oligonucleotide: CBLB-9535
gaggcuccacacuucuugccggc

SEQ ID NO: 39910 - RNA, 24 nt, Artificial Sequence
  Synthetic oligonucleotide: CBLB-9536
ggaggcuccacacuucuugccggc

SEQ ID NO: 39911 - RNA, 18 nt, Artificial Sequence
  Synthetic oligonucleotide: CBLB-9537
ggccuccccgagucgggc

SEQ ID NO: 39912 - RNA, 19 nt, Artificial Sequence
  Synthetic oligonucleotide: CBLB-9538
cggccuccccgagucgggc

SEQ ID NO: 39913 - RNA, 20 nt, Artificial Sequence
  Synthetic oligonucleotide: CBLB-7678
gcggccuccccgagucgggc

SEQ ID NO: 39914 - RNA, 21 nt, Artificial Sequence
  Synthetic oligonucleotide: CBLB-9539
cgcggccuccccgagucgggc

SEQ ID NO: 39915 - RNA, 22 nt, Artificial Sequence
  Synthetic oligonucleotide: CBLB-9540
ccgcggccuccccgagucgggc

SEQ ID NO: 39916 - RNA, 23 nt, Artificial Sequence
  Synthetic oligonucleotide: CBLB-9541
cccgcggccuccccgagucgggc

SEQ ID NO: 39917 - RNA, 24 nt, Artificial Sequence
  Synthetic oligonucleotide: CBLB-9542
ucccgcggccuccccgagucgggc

SEQ ID NO: 39918 - RNA, 18 nt, Artificial Sequence
  Synthetic oligonucleotide: CBLB-9543
ucuugccggcccgggggc

SEQ ID NO: 39919 - RNA, 19 nt, Artificial Sequence
  Synthetic oligonucleotide: CBLB-9544
uucuugccggcccgggggc

SEQ ID NO: 39920 - RNA, 20 nt, Artificial Sequence
  Synthetic oligonucleotide: CBLB-9545
cuucuugccggcccgggggc

SEQ ID NO: 39921 - RNA, 21 nt, Artificial Sequence
  Synthetic oligonucleotide: CBLB-9546
acuucuugccggcccgggggc

SEQ ID NO: 39922 - RNA, 22 nt, Artificial Sequence
  Synthetic oligonucleotide: CBLB-9547
cacuucuugccggcccgggggc

SEQ ID NO: 39923 - RNA, 23 nt, Artificial Sequence
  Synthetic oligonucleotide: CBLB-9548
acacuucuugccggcccgggggc

SEQ ID NO: 39924 - RNA, 24 nt, Artificial Sequence
  Synthetic oligonucleotide: CBLB-9549
cacacuucuugccggcccgggggc

SEQ ID NO: 39925 - RNA, 18 nt, Artificial Sequence
  Synthetic oligonucleotide: CBLB-9550
uuguugcguuuccacguc

SEQ ID NO: 39926 - RNA, 19 nt, Artificial Sequence
  Synthetic oligonucleotide: CBLB-9551
auuguugcguuuccacguc

SEQ ID NO: 39927 - RNA, 20 nt, Artificial Sequence
  Synthetic oligonucleotide: CBLB-9552
aauuguugcguuuccacguc

SEQ ID NO: 39928 - RNA, 21 nt, Artificial Sequence
  Synthetic oligonucleotide: CBLB-9553
uaauuguugcguuuccacguc

SEQ ID NO: 39929 - RNA, 22 nt, Artificial Sequence
  Synthetic oligonucleotide: CBLB-9554
guaauuguugcguuuccacguc

SEQ ID NO: 39930 - RNA, 23 nt, Artificial Sequence
  Synthetic oligonucleotide: CBLB-9555
gguaauuguugcguuuccacguc

SEQ ID NO: 39931 - RNA, 24 nt, Artificial Sequence
  Synthetic oligonucleotide: CBLB-9556
cgguaauuguugcguuuccacguc

SEQ ID NO: 39932 - RNA, 18 nt, Artificial Sequence
  Synthetic oligonucleotide: CBLB-9557
ggugauaaagugugauuc

SEQ ID NO: 39933 - RNA, 19 nt, Artificial Sequence
  Synthetic oligonucleotide: CBLB-9558
aggugauaaagugugauuc

SEQ ID NO: 39934 - RNA, 20 nt, Artificial Sequence
  Synthetic oligonucleotide: CBLB-7689
caggugauaaagugugauuc

SEQ ID NO: 39935 - RNA, 21 nt, Artificial Sequence
  Synthetic oligonucleotide: CBLB-9559
ucaggugauaaagugugauuc

SEQ ID NO: 39936 - RNA, 22 nt, Artificial Sequence
  Synthetic oligonucleotide: CBLB-9560
gucaggugauaaagugugauuc

SEQ ID NO: 39937 - RNA, 23 nt, Artificial Sequence
  Synthetic oligonucleotide: CBLB-9561
agucaggugauaaagugugauuc

SEQ ID NO: 39938 - RNA, 24 nt, Artificial Sequence
  Synthetic oligonucleotide: CBLB-9562
cagucaggugauaaagugugauuc

SEQ ID NO: 39939 - RNA, 18 nt, Artificial Sequence
  Synthetic oligonucleotide: CBLB-9563
cuggguugcuccuucuuc

SEQ ID NO: 39940 - RNA, 19 nt, Artificial Sequence
  Synthetic oligonucleotide: CBLB-9564
gcuggguugcuccuucuuc

SEQ ID NO: 39941 - RNA, 20 nt, Artificial Sequence
  Synthetic oligonucleotide: CBLB-7690
cgcuggguugcuccuucuuc

SEQ ID NO: 39942 - RNA, 21 nt, Artificial Sequence
  Synthetic oligonucleotide: CBLB-9565
gcgcuggguugcuccuucuuc

SEQ ID NO: 39943 - RNA, 22 nt, Artificial Sequence
  Synthetic oligonucleotide: CBLB-9566
cgcgcuggguugcuccuucuuc

SEQ ID NO: 39944 - RNA, 23 nt, Artificial Sequence
  Synthetic oligonucleotide: CBLB-9567
gcgcgcuggguugcuccuucuuc

SEQ ID NO: 39945 - RNA, 24 nt, Artificial Sequence
  Synthetic oligonucleotide: CBLB-9568
ugcgcgcuggguugcuccuucuuc

SEQ ID NO: 39946 - RNA, 18 nt, Artificial Sequence
  Synthetic oligonucleotide: CBLB-9569
agccaggcgcgggccaag

SEQ ID NO: 39947 - RNA, 19 nt, Artificial Sequence
  Synthetic oligonucleotide: CBLB-9570
uagccaggcgcgggccaag

SEQ ID NO: 39948 - RNA, 20 nt, Artificial Sequence
  Synthetic oligonucleotide: CBLB-9571
guagccaggcgcgggccaag

SEQ ID NO: 39949 - RNA, 21 nt, Artificial Sequence
  Synthetic oligonucleotide: CBLB-9572
gguagccaggcgcgggccaag

SEQ ID NO: 39950 - RNA, 22 nt, Artificial Sequence
  Synthetic oligonucleotide: CBLB-9573
ggguagccaggcgcgggccaag

SEQ ID NO: 39951 - RNA, 23 nt, Artificial Sequence
  Synthetic oligonucleotide: CBLB-9574
gggguagccaggcgcgggccaag

SEQ ID NO: 39952 - RNA, 24 nt, Artificial Sequence
  Synthetic oligonucleotide: CBLB-9575
cgggguagccaggcgcgggccaag

SEQ ID NO: 39953 - RNA, 18 nt, Artificial Sequence
  Synthetic oligonucleotide: CBLB-9576
acggcgccgaaaggcaag

SEQ ID NO: 39954 - RNA, 19 nt, Artificial Sequence
  Synthetic oligonucleotide: CBLB-9577
uacggcgccgaaaggcaag

SEQ ID NO: 39955 - RNA, 20 nt, Artificial Sequence
  Synthetic oligonucleotide: CBLB-9578
cuacggcgccgaaaggcaag

SEQ ID NO: 39956 - RNA, 21 nt, Artificial Sequence
  Synthetic oligonucleotide: CBLB-9579
gcuacggcgccgaaaggcaag

SEQ ID NO: 39957 - RNA, 22 nt, Artificial Sequence
  Synthetic oligonucleotide: CBLB-9580
agcuacggcgccgaaaggcaag

SEQ ID NO: 39958 - RNA, 23 nt, Artificial Sequence
  Synthetic oligonucleotide: CBLB-9581
cagcuacggcgccgaaaggcaag

SEQ ID NO: 39959 - RNA, 24 nt, Artificial Sequence
  Synthetic oligonucleotide: CBLB-9582
acagcuacggcgccgaaaggcaag

SEQ ID NO: 39960 - RNA, 18 nt, Artificial Sequence
  Synthetic oligonucleotide: CBLB-9583
cgcgggccaaggaggaag

SEQ ID NO: 39961 - RNA, 19 nt, Artificial Sequence
  Synthetic oligonucleotide: CBLB-9584
gcgcgggccaaggaggaag

SEQ ID NO: 39962 - RNA, 20 nt, Artificial Sequence
  Synthetic oligonucleotide: CBLB-7693
ggcgcgggccaaggaggaag

SEQ ID NO: 39963 - RNA, 21 nt, Artificial Sequence
  Synthetic oligonucleotide: CBLB-9585
aggcgcgggccaaggaggaag

SEQ ID NO: 39964 - RNA, 22 nt, Artificial Sequence
  Synthetic oligonucleotide: CBLB-9586
caggcgcgggccaaggaggaag

SEQ ID NO: 39965 - RNA, 23 nt, Artificial Sequence
  Synthetic oligonucleotide: CBLB-9587
ccaggcgcgggccaaggaggaag

SEQ ID NO: 39966 - RNA, 24 nt, Artificial Sequence
  Synthetic oligonucleotide: CBLB-9588
gccaggcgcgggccaaggaggaag

SEQ ID NO: 39967 - RNA, 18 nt, Artificial Sequence
  Synthetic oligonucleotide: CBLB-9589
ccgccguccaguuugaag

SEQ ID NO: 39968 - RNA, 19 nt, Artificial Sequence
  Synthetic oligonucleotide: CBLB-9590
gccgccguccaguuugaag

SEQ ID NO: 39969 - RNA, 20 nt, Artificial Sequence
  Synthetic oligonucleotide: CBLB-7695
cgccgccguccaguuugaag

SEQ ID NO: 39970 - RNA, 21 nt, Artificial Sequence
  Synthetic oligonucleotide: CBLB-9591
ccgccgccguccaguuugaag

SEQ ID NO: 39971 - RNA, 22 nt, Artificial Sequence
  Synthetic oligonucleotide: CBLB-9592
gccgccgccguccaguuugaag

SEQ ID NO: 39972 - RNA, 23 nt, Artificial Sequence
  Synthetic oligonucleotide: CBLB-9593
ugccgccgccguccaguuugaag

SEQ ID NO: 39973 - RNA, 24 nt, Artificial Sequence
  Synthetic oligonucleotide: CBLB-9594
uugccgccgccguccaguuugaag

SEQ ID NO: 39974 - RNA, 18 nt, Artificial Sequence
  Synthetic oligonucleotide: CBLB-9595
cagcgaucccacucccag

SEQ ID NO: 39975 - RNA, 19 nt, Artificial Sequence
  Synthetic oligonucleotide: CBLB-9596
ucagcgaucccacucccag

SEQ ID NO: 39976 - RNA, 20 nt, Artificial Sequence
  Synthetic oligonucleotide: CBLB-9597
cucagcgaucccacucccag

SEQ ID NO: 39977 - RNA, 21 nt, Artificial Sequence
  Synthetic oligonucleotide: CBLB-9598
ucucagcgaucccacucccag

SEQ ID NO: 39978 - RNA, 22 nt, Artificial Sequence
  Synthetic oligonucleotide: CBLB-9599
uucucagcgaucccacucccag

SEQ ID NO: 39979 - RNA, 23 nt, Artificial Sequence
  Synthetic oligonucleotide: CBLB-9600
guucucagcgaucccacucccag

SEQ ID NO: 39980 - RNA, 24 nt, Artificial Sequence
  Synthetic oligonucleotide: CBLB-9601
uguucucagcgaucccacucccag

SEQ ID NO: 39981 - RNA, 18 nt, Artificial Sequence
  Synthetic oligonucleotide: CBLB-9602
ucccgcggccuccccgag

SEQ ID NO: 39982 - RNA, 19 nt, Artificial Sequence
  Synthetic oligonucleotide: CBLB-9603
gucccgcggccuccccgag

SEQ ID NO: 39983 - RNA, 20 nt, Artificial Sequence
  Synthetic oligonucleotide: CBLB-9604
cgucccgcggccuccccgag

SEQ ID NO: 39984 - RNA, 21 nt, Artificial Sequence
  Synthetic oligonucleotide: CBLB-9605
gcgucccgcggccuccccgag

SEQ ID NO: 39985 - RNA, 22 nt, Artificial Sequence
  Synthetic oligonucleotide: CBLB-9606
ggcgucccgcggccuccccgag

SEQ ID NO: 39986 - RNA, 23 nt, Artificial Sequence
  Synthetic oligonucleotide: CBLB-9607
cggcgucccgcggccuccccgag

SEQ ID NO: 39987 - RNA, 24 nt, Artificial Sequence
  Synthetic oligonucleotide: CBLB-9608
gcggcgucccgcggccuccccgag

SEQ ID NO: 39988 - RNA, 18 nt, Artificial Sequence
  Synthetic oligonucleotide: CBLB-9609
ccccgagucgggcgggag

SEQ ID NO: 39989 - RNA, 19 nt, Artificial Sequence
  Synthetic oligonucleotide: CBLB-9610
uccccgagucgggcgggag

SEQ ID NO: 39990 - RNA, 20 nt, Artificial Sequence
  Synthetic oligonucleotide: CBLB-7700
cuccccgagucgggcgggag

SEQ ID NO: 39991 - RNA, 21 nt, Artificial Sequence
  Synthetic oligonucleotide: CBLB-9611
ccuccccgagucgggcgggag

SEQ ID NO: 39992 - RNA, 22 nt, Artificial Sequence
  Synthetic oligonucleotide: CBLB-9612
gccuccccgagucgggcgggag

SEQ ID NO: 39993 - RNA, 23 nt, Artificial Sequence
  Synthetic oligonucleotide: CBLB-9613
ggccuccccgagucgggcgggag

SEQ ID NO: 39994 - RNA, 24 nt, Artificial Sequence
  Synthetic oligonucleotide: CBLB-9614
cggccuccccgagucgggcgggag

SEQ ID NO: 39995 - RNA, 18 nt, Artificial Sequence
  Synthetic oligonucleotide: CBLB-9615
aacccgcaggccggggag

SEQ ID NO: 39996 - RNA, 19 nt, Artificial Sequence
  Synthetic oligonucleotide: CBLB-9616
gaacccgcaggccggggag

SEQ ID NO: 39997 - RNA, 20 nt, Artificial Sequence
  Synthetic oligonucleotide: CBLB-9617
agaacccgcaggccggggag

SEQ ID NO: 39998 - RNA, 21 nt, Artificial Sequence
  Synthetic oligonucleotide: CBLB-9618
cagaacccgcaggccggggag

SEQ ID NO: 39999 - RNA, 22 nt, Artificial Sequence
  Synthetic oligonucleotide: CBLB-9619
ccagaacccgcaggccggggag

SEQ ID NO: 40000 - RNA, 23 nt, Artificial Sequence
  Synthetic oligonucleotide: CBLB-9620
accagaacccgcaggccggggag

SEQ ID NO: 40001 - RNA, 24 nt, Artificial Sequence
  Synthetic oligonucleotide: CBLB-9621
gaccagaacccgcaggccggggag

SEQ ID NO: 40002 - RNA, 18 nt, Artificial Sequence
  Synthetic oligonucleotide: CBLB-9622
ggcugcgugcguguggag

SEQ ID NO: 40003 - RNA, 19 nt, Artificial Sequence
  Synthetic oligonucleotide: CBLB-9623
gggcugcgugcguguggag

SEQ ID NO: 40004 - RNA, 20 nt, Artificial Sequence
  Synthetic oligonucleotide: CBLB-7702
ugggcugcgugcguguggag

SEQ ID NO: 40005 - RNA, 21 nt, Artificial Sequence
  Synthetic oligonucleotide: CBLB-9624
cugggcugcgugcguguggag

SEQ ID NO: 40006 - RNA, 22 nt, Artificial Sequence
  Synthetic oligonucleotide: CBLB-9625
acugggcugcgugcguguggag

SEQ ID NO: 40007 - RNA, 23 nt, Artificial Sequence
  Synthetic oligonucleotide: CBLB-9626
cacugggcugcgugcguguggag

SEQ ID NO: 40008 - RNA, 24 nt, Artificial Sequence
  Synthetic oligonucleotide: CBLB-9627
acacugggcugcgugcguguggag

SEQ ID NO: 40009 - RNA, 18 nt, Artificial Sequence
  Synthetic oligonucleotide: CBLB-9628
gaagggaaggggucgccg

SEQ ID NO: 40010 - RNA, 19 nt, Artificial Sequence
  Synthetic oligonucleotide: CBLB-9629
agaagggaaggggucgccg

SEQ ID NO: 40011 - RNA, 20 nt, Artificial Sequence
  Synthetic oligonucleotide: CBLB-7711
aagaagggaaggggucgccg

SEQ ID NO: 40012 - RNA, 21 nt, Artificial Sequence
  Synthetic oligonucleotide: CBLB-9630
caagaagggaaggggucgccg

SEQ ID NO: 40013 - RNA, 22 nt, Artificial Sequence
  Synthetic oligonucleotide: CBLB-9631
gcaagaagggaaggggucgccg

SEQ ID NO: 40014 - RNA, 23 nt, Artificial Sequence
  Synthetic oligonucleotide: CBLB-9632
ggcaagaagggaaggggucgccg

SEQ ID NO: 40015 - RNA, 24 nt, Artificial Sequence
  Synthetic oligonucleotide: CBLB-9633
aggcaagaagggaaggggucgccg

SEQ ID NO: 40016 - RNA, 18 nt, Artificial Sequence
  Synthetic oligonucleotide: CBLB-9634
accagaacccgcaggccg

SEQ ID NO: 40017 - RNA, 19 nt, Artificial Sequence
  Synthetic oligonucleotide: CBLB-9635
gaccagaacccgcaggccg

SEQ ID NO: 40018 - RNA, 20 nt, Artificial Sequence
  Synthetic oligonucleotide: CBLB-7712
agaccagaacccgcaggccg

SEQ ID NO: 40019 - RNA, 21 nt, Artificial Sequence
  Synthetic oligonucleotide: CBLB-9636
aagaccagaacccgcaggccg

SEQ ID NO: 40020 - RNA, 22 nt, Artificial Sequence
  Synthetic oligonucleotide: CBLB-9637
aaagaccagaacccgcaggccg

SEQ ID NO: 40021 - RNA, 23 nt, Artificial Sequence
  Synthetic oligonucleotide: CBLB-9638
uaaagaccagaacccgcaggccg

SEQ ID NO: 40022 - RNA, 24 nt, Artificial Sequence
  Synthetic oligonucleotide: CBLB-9639
uuaaagaccagaacccgcaggccg

SEQ ID NO: 40023 - RNA, 18 nt, Artificial Sequence
  Synthetic oligonucleotide: CBLB-9640
cucuggacagcuacggcg

SEQ ID NO: 40024 - RNA, 19 nt, Artificial Sequence
  Synthetic oligonucleotide: CBLB-9641
ucucuggacagcuacggcg

SEQ ID NO: 40025 - RNA, 20 nt, Artificial Sequence
  Synthetic oligonucleotide: CBLB-9642
gucucuggacagcuacggcg

SEQ ID NO: 40026 - RNA, 21 nt, Artificial Sequence
  Synthetic oligonucleotide: CBLB-9643
ugucucuggacagcuacggcg

SEQ ID NO: 40027 - RNA, 22 nt, Artificial Sequence
  Synthetic oligonucleotide: CBLB-9644
gugucucuggacagcuacggcg

SEQ ID NO: 40028 - RNA, 23 nt, Artificial Sequence
  Synthetic oligonucleotide: CBLB-9645
cgugucucuggacagcuacggcg

SEQ ID NO: 40029 - RNA, 24 nt, Artificial Sequence
  Synthetic oligonucleotide: CBLB-9646
gcgugucucuggacagcuacggcg

SEQ ID NO: 40030 - RNA, 18 nt, Artificial Sequence
  Synthetic oligonucleotide: CBLB-9647
caagaagggaaggggucg

SEQ ID NO: 40031 - RNA, 19 nt, Artificial Sequence
  Synthetic oligonucleotide: CBLB-9648
gcaagaagggaaggggucg

SEQ ID NO: 40032 - RNA, 20 nt, Artificial Sequence
  Synthetic oligonucleotide: CBLB-9649
ggcaagaagggaaggggucg

SEQ ID NO: 40033 - RNA, 21 nt, Artificial Sequence
  Synthetic oligonucleotide: CBLB-9650
aggcaagaagggaaggggucg

SEQ ID NO: 40034 - RNA, 22 nt, Artificial Sequence
  Synthetic oligonucleotide: CBLB-9651
aaggcaagaagggaaggggucg

SEQ ID NO: 40035 - RNA, 23 nt, Artificial Sequence
  Synthetic oligonucleotide: CBLB-9652
aaaggcaagaagggaaggggucg

SEQ ID NO: 40036 - RNA, 24 nt, Artificial Sequence
  Synthetic oligonucleotide: CBLB-9653
gaaaggcaagaagggaaggggucg

SEQ ID NO: 40037 - RNA, 18 nt, Artificial Sequence
  Synthetic oligonucleotide: CBLB-9654
gccaggcgcgggccaagg

SEQ ID NO: 40038 - RNA, 19 nt, Artificial Sequence
  Synthetic oligonucleotide: CBLB-9655
agccaggcgcgggccaagg

SEQ ID NO: 40039 - RNA, 20 nt, Artificial Sequence
  Synthetic oligonucleotide: CBLB-7718
uagccaggcgcgggccaagg

SEQ ID NO: 40040 - RNA, 21 nt, Artificial Sequence
  Synthetic oligonucleotide: CBLB-9656
guagccaggcgcgggccaagg

SEQ ID NO: 40041 - RNA, 22 nt, Artificial Sequence
  Synthetic oligonucleotide: CBLB-9657
gguagccaggcgcgggccaagg

SEQ ID NO: 40042 - RNA, 23 nt, Artificial Sequence
  Synthetic oligonucleotide: CBLB-9658
ggguagccaggcgcgggccaagg

SEQ ID NO: 40043 - RNA, 24 nt, Artificial Sequence
  Synthetic oligonucleotide: CBLB-9659
gggguagccaggcgcgggccaagg

SEQ ID NO: 40044 - RNA, 18 nt, Artificial Sequence
  Synthetic oligonucleotide: CBLB-9660
aagaccagaacccgcagg

SEQ ID NO: 40045 - RNA, 19 nt, Artificial Sequence
  Synthetic oligonucleotide: CBLB-9661
aaagaccagaacccgcagg

SEQ ID NO: 40046 - RNA, 20 nt, Artificial Sequence
  Synthetic oligonucleotide: CBLB-9662
uaaagaccagaacccgcagg

SEQ ID NO: 40047 - RNA, 21 nt, Artificial Sequence
  Synthetic oligonucleotide: CBLB-9663
uuaaagaccagaacccgcagg

SEQ ID NO: 40048 - RNA, 22 nt, Artificial Sequence
  Synthetic oligonucleotide: CBLB-9664
uuuaaagaccagaacccgcagg

SEQ ID NO: 40049 - RNA, 23 nt, Artificial Sequence
  Synthetic oligonucleotide: CBLB-9665
auuuaaagaccagaacccgcagg

SEQ ID NO: 40050 - RNA, 24 nt, Artificial Sequence
  Synthetic oligonucleotide: CBLB-9666
cauuuaaagaccagaacccgcagg

SEQ ID NO: 40051 - RNA, 18 nt, Artificial Sequence
  Synthetic oligonucleotide: CBLB-9667
aggcgcgggccaaggagg

SEQ ID NO: 40052 - RNA, 19 nt, Artificial Sequence
  Synthetic oligonucleotide: CBLB-9668
caggcgcgggccaaggagg

SEQ ID NO: 40053 - RNA, 20 nt, Artificial Sequence
  Synthetic oligonucleotide: CBLB-9669
ccaggcgcgggccaaggagg

SEQ ID NO: 40054 - RNA, 21 nt, Artificial Sequence
  Synthetic oligonucleotide: CBLB-9670
gccaggcgcgggccaaggagg

SEQ ID NO: 40055 - RNA, 22 nt, Artificial Sequence
  Synthetic oligonucleotide: CBLB-9671
agccaggcgcgggccaaggagg

SEQ ID NO: 40056 - RNA, 23 nt, Artificial Sequence
  Synthetic oligonucleotide: CBLB-9672
uagccaggcgcgggccaaggagg

SEQ ID NO: 40057 - RNA, 24 nt, Artificial Sequence
  Synthetic oligonucleotide: CBLB-9673
guagccaggcgcgggccaaggagg

SEQ ID NO: 40058 - RNA, 18 nt, Artificial Sequence
  Synthetic oligonucleotide: CBLB-9674
acccgcaggccggggagg

SEQ ID NO: 40059 - RNA, 19 nt, Artificial Sequence
  Synthetic oligonucleotide: CBLB-9675
aacccgcaggccggggagg

SEQ ID NO: 40060 - RNA, 20 nt, Artificial Sequence
  Synthetic oligonucleotide: CBLB-7721
gaacccgcaggccggggagg

SEQ ID NO: 40061 - RNA, 21 nt, Artificial Sequence
  Synthetic oligonucleotide: CBLB-9676
agaacccgcaggccggggagg

SEQ ID NO: 40062 - RNA, 22 nt, Artificial Sequence
  Synthetic oligonucleotide: CBLB-9677
cagaacccgcaggccggggagg

SEQ ID NO: 40063 - RNA, 23 nt, Artificial Sequence
  Synthetic oligonucleotide: CBLB-9678
ccagaacccgcaggccggggagg

SEQ ID NO: 40064 - RNA, 24 nt, Artificial Sequence
  Synthetic oligonucleotide: CBLB-9679
accagaacccgcaggccggggagg

SEQ ID NO: 40065 - RNA, 18 nt, Artificial Sequence
  Synthetic oligonucleotide: CBLB-9680
ccuccccgagucgggcgg

SEQ ID NO: 40066 - RNA, 19 nt, Artificial Sequence
  Synthetic oligonucleotide: CBLB-9681
gccuccccgagucgggcgg

SEQ ID NO: 40067 - RNA, 20 nt, Artificial Sequence
  Synthetic oligonucleotide: CBLB-9682
ggccuccccgagucgggcgg

SEQ ID NO: 40068 - RNA, 21 nt, Artificial Sequence
  Synthetic oligonucleotide: CBLB-9683
cggccuccccgagucgggcgg

SEQ ID NO: 40069 - RNA, 22 nt, Artificial Sequence
  Synthetic oligonucleotide: CBLB-9684
gcggccuccccgagucgggcgg

SEQ ID NO: 40070 - RNA, 23 nt, Artificial Sequence
  Synthetic oligonucleotide: CBLB-9685
cgcggccuccccgagucgggcgg

SEQ ID NO: 40071 - RNA, 24 nt, Artificial Sequence
  Synthetic oligonucleotide: CBLB-9686
ccgcggccuccccgagucgggcgg

SEQ ID NO: 40072 - RNA, 18 nt, Artificial Sequence
  Synthetic oligonucleotide: CBLB-9687
gcggccuccccgagucgg

SEQ ID NO: 40073 - RNA, 19 nt, Artificial Sequence
  Synthetic oligonucleotide: CBLB-9688
cgcggccuccccgagucgg

SEQ ID NO: 40074 - RNA, 20 nt, Artificial Sequence
  Synthetic oligonucleotide: CBLB-9689
ccgcggccuccccgagucgg

SEQ ID NO: 40075 - RNA, 21 nt, Artificial Sequence
  Synthetic oligonucleotide: CBLB-9690
cccgcggccuccccgagucgg

SEQ ID NO: 40076 - RNA, 22 nt, Artificial Sequence
  Synthetic oligonucleotide: CBLB-9691
ucccgcggccuccccgagucgg

SEQ ID NO: 40077 - RNA, 23 nt, Artificial Sequence
  Synthetic oligonucleotide: CBLB-9692
gucccgcggccuccccgagucgg

SEQ ID NO: 40078 - RNA, 24 nt, Artificial Sequence
  Synthetic oligonucleotide: CBLB-9693
cgucccgcggccuccccgagucgg

SEQ ID NO: 40079 - RNA, 18 nt, Artificial Sequence
  Synthetic oligonucleotide: CBLB-9694
gccgaaaggcaagaaggg

SEQ ID NO: 40080 - RNA, 19 nt, Artificial Sequence
  Synthetic oligonucleotide: CBLB-9695
cgccgaaaggcaagaaggg

SEQ ID NO: 40081 - RNA, 20 nt, Artificial Sequence
  Synthetic oligonucleotide: CBLB-9696
gcgccgaaaggcaagaaggg

SEQ ID NO: 40082 - RNA, 21 nt, Artificial Sequence
  Synthetic oligonucleotide: CBLB-9697
ggcgccgaaaggcaagaaggg

SEQ ID NO: 40083 - RNA, 22 nt, Artificial Sequence
  Synthetic oligonucleotide: CBLB-9698
cggcgccgaaaggcaagaaggg

SEQ ID NO: 40084 - RNA, 23 nt, Artificial Sequence
  Synthetic oligonucleotide: CBLB-9699
acggcgccgaaaggcaagaaggg

SEQ ID NO: 40085 - RNA, 24 nt, Artificial Sequence
  Synthetic oligonucleotide: CBLB-9700
uacggcgccgaaaggcaagaaggg

SEQ ID NO: 40086 - RNA, 18 nt, Artificial Sequence
  Synthetic oligonucleotide: CBLB-9701
ccugugugugccacaggg

SEQ ID NO: 40087 - RNA, 19 nt, Artificial Sequence
  Synthetic oligonucleotide: CBLB-9702
uccugugugugccacaggg

SEQ ID NO: 40088 - RNA, 20 nt, Artificial Sequence
  Synthetic oligonucleotide: CBLB-9703
guccugugugugccacaggg

SEQ ID NO: 40089 - RNA, 21 nt, Artificial Sequence
  Synthetic oligonucleotide: CBLB-9704
gguccugugugugccacaggg

SEQ ID NO: 40090 - RNA, 22 nt, Artificial Sequence
  Synthetic oligonucleotide: CBLB-9705
ggguccugugugugccacaggg

SEQ ID NO: 40091 - RNA, 23 nt, Artificial Sequence
  Synthetic oligonucleotide: CBLB-9706
uggguccugugugugccacaggg

SEQ ID NO: 40092 - RNA, 24 nt, Artificial Sequence
  Synthetic oligonucleotide: CBLB-9707
cuggguccugugugugccacaggg

SEQ ID NO: 40093 - RNA, 18 nt, Artificial Sequence
  Synthetic oligonucleotide: CBLB-9708
ccgagucgggcgggaggg

SEQ ID NO: 40094 - RNA, 19 nt, Artificial Sequence
  Synthetic oligonucleotide: CBLB-9709
cccgagucgggcgggaggg

SEQ ID NO: 40095 - RNA, 20 nt, Artificial Sequence
  Synthetic oligonucleotide: CBLB-9710
ccccgagucgggcgggaggg

SEQ ID NO: 40096 - RNA, 21 nt, Artificial Sequence
  Synthetic oligonucleotide: CBLB-9711
uccccgagucgggcgggaggg

SEQ ID NO: 40097 - RNA, 22 nt, Artificial Sequence
  Synthetic oligonucleotide: CBLB-9712
cuccccgagucgggcgggaggg

SEQ ID NO: 40098 - RNA, 23 nt, Artificial Sequence
  Synthetic oligonucleotide: CBLB-9713
ccuccccgagucgggcgggaggg

SEQ ID NO: 40099 - RNA, 24 nt, Artificial Sequence
  Synthetic oligonucleotide: CBLB-9714
gccuccccgagucgggcgggaggg

SEQ ID NO: 40100 - RNA, 18 nt, Artificial Sequence
  Synthetic oligonucleotide: CBLB-9715
cagaacccgcaggccggg

SEQ ID NO: 40101 - RNA, 19 nt, Artificial Sequence
  Synthetic oligonucleotide: CBLB-9716
ccagaacccgcaggccggg

SEQ ID NO: 40102 - RNA, 20 nt, Artificial Sequence
  Synthetic oligonucleotide: CBLB-9717
accagaacccgcaggccggg

SEQ ID NO: 40103 - RNA, 21 nt, Artificial Sequence
  Synthetic oligonucleotide: CBLB-9718
gaccagaacccgcaggccggg

SEQ ID NO: 40104 - RNA, 22 nt, Artificial Sequence
  Synthetic oligonucleotide: CBLB-9719
agaccagaacccgcaggccggg

SEQ ID NO: 40105 - RNA, 23 nt, Artificial Sequence
  Synthetic oligonucleotide: CBLB-9720
aagaccagaacccgcaggccggg

SEQ ID NO: 40106 - RNA, 24 nt, Artificial Sequence
  Synthetic oligonucleotide: CBLB-9721
aaagaccagaacccgcaggccggg

SEQ ID NO: 40107 - RNA, 18 nt, Artificial Sequence
  Synthetic oligonucleotide: CBLB-9722
cuccccgagucgggcggg

SEQ ID NO: 40108 - RNA, 19 nt, Artificial Sequence
  Synthetic oligonucleotide: CBLB-9723
ccuccccgagucgggcggg

SEQ ID NO: 40109 - RNA, 20 nt, Artificial Sequence
  Synthetic oligonucleotide: CBLB-7726
gccuccccgagucgggcggg

SEQ ID NO: 40110 - RNA, 21 nt, Artificial Sequence
  Synthetic oligonucleotide: CBLB-9724
ggccuccccgagucgggcggg

SEQ ID NO: 40111 - RNA, 22 nt, Artificial Sequence
  Synthetic oligonucleotide: CBLB-9725
cggccuccccgagucgggcggg

SEQ ID NO: 40112 - RNA, 23 nt, Artificial Sequence
  Synthetic oligonucleotide: CBLB-9726
gcggccuccccgagucgggcggg

SEQ ID NO: 40113 - RNA, 24 nt, Artificial Sequence
  Synthetic oligonucleotide: CBLB-9727
cgcggccuccccgagucgggcggg

SEQ ID NO: 40114 - RNA, 18 nt, Artificial Sequence
  Synthetic oligonucleotide: CBLB-9728
cggccuccccgagucggg

SEQ ID NO: 40115 - RNA, 19 nt, Artificial Sequence
  Synthetic oligonucleotide: CBLB-9729
gcggccuccccgagucggg

SEQ ID NO: 40116 - RNA, 20 nt, Artificial Sequence
  Synthetic oligonucleotide: CBLB-7727
cgcggccuccccgagucggg

SEQ ID NO: 40117 - RNA, 21 nt, Artificial Sequence
  Synthetic oligonucleotide: CBLB-9730
ccgcggccuccccgagucggg

SEQ ID NO: 40118 - RNA, 22 nt, Artificial Sequence
  Synthetic oligonucleotide: CBLB-9731
cccgcggccuccccgagucggg

SEQ ID NO: 40119 - RNA, 23 nt, Artificial Sequence
  Synthetic oligonucleotide: CBLB-9732
ucccgcggccuccccgagucggg

SEQ ID NO: 40120 - RNA, 24 nt, Artificial Sequence
  Synthetic oligonucleotide: CBLB-9733
gucccgcggccuccccgagucggg

SEQ ID NO: 40121 - RNA, 18 nt, Artificial Sequence
  Synthetic oligonucleotide: CBLB-9734
agaacccgcaggccgggg

SEQ ID NO: 40122 - RNA, 19 nt, Artificial Sequence
  Synthetic oligonucleotide: CBLB-9735
cagaacccgcaggccgggg

SEQ ID NO: 40123 - RNA, 20 nt, Artificial Sequence
  Synthetic oligonucleotide: CBLB-7730
ccagaacccgcaggccgggg

SEQ ID NO: 40124 - RNA, 21 nt, Artificial Sequence
  Synthetic oligonucleotide: CBLB-9736
accagaacccgcaggccgggg

SEQ ID NO: 40125 - RNA, 22 nt, Artificial Sequence
  Synthetic oligonucleotide: CBLB-9737
gaccagaacccgcaggccgggg

SEQ ID NO: 40126 - RNA, 23 nt, Artificial Sequence
  Synthetic oligonucleotide: CBLB-9738
agaccagaacccgcaggccgggg

SEQ ID NO: 40127 - RNA, 24 nt, Artificial Sequence
  Synthetic oligonucleotide: CBLB-9739
aagaccagaacccgcaggccgggg

SEQ ID NO: 40128 - RNA, 18 nt, Artificial Sequence
  Synthetic oligonucleotide: CBLB-9740
gguuaagauuuuaauuug

SEQ ID NO: 40129 - RNA, 19 nt, Artificial Sequence
  Synthetic oligonucleotide: CBLB-9741
ugguuaagauuuuaauuug

SEQ ID NO: 40130 - RNA, 20 nt, Artificial Sequence
  Synthetic oligonucleotide: CBLB-9742
augguuaagauuuuaauuug

SEQ ID NO: 40131 - RNA, 21 nt, Artificial Sequence
  Synthetic oligonucleotide: CBLB-9743
caugguuaagauuuuaauuug

SEQ ID NO: 40132 - RNA, 22 nt, Artificial Sequence
  Synthetic oligonucleotide: CBLB-9744
acaugguuaagauuuuaauuug

SEQ ID NO: 40133 - RNA, 23 nt, Artificial Sequence
  Synthetic oligonucleotide: CBLB-9745
uacaugguuaagauuuuaauuug

SEQ ID NO: 40134 - RNA, 24 nt, Artificial Sequence
  Synthetic oligonucleotide: CBLB-9746
uuacaugguuaagauuuuaauuug

SEQ ID NO: 40135 - RNA, 18 nt, Artificial Sequence
  Synthetic oligonucleotide: CBLB-9747
ugcucuggacuucauacu

SEQ ID NO: 40136 - RNA, 19 nt, Artificial Sequence
  Synthetic oligonucleotide: CBLB-9748
uugcucuggacuucauacu

SEQ ID NO: 40137 - RNA, 20 nt, Artificial Sequence
  Synthetic oligonucleotide: CBLB-9749
auugcucuggacuucauacu

SEQ ID NO: 40138 - RNA, 21 nt, Artificial Sequence
  Synthetic oligonucleotide: CBLB-9750
aauugcucuggacuucauacu

SEQ ID NO: 40139 - RNA, 22 nt, Artificial Sequence
  Synthetic oligonucleotide: CBLB-9751
caauugcucuggacuucauacu

SEQ ID NO: 40140 - RNA, 23 nt, Artificial Sequence
  Synthetic oligonucleotide: CBLB-9752
acaauugcucuggacuucauacu

SEQ ID NO: 40141 - RNA, 24 nt, Artificial Sequence
  Synthetic oligonucleotide: CBLB-9753
aacaauugcucuggacuucauacu

SEQ ID NO: 40142 - RNA, 18 nt, Artificial Sequence
  Synthetic oligonucleotide: CBLB-9754
aauacuguaauuauuacu

SEQ ID NO: 40143 - RNA, 19 nt, Artificial Sequence
  Synthetic oligonucleotide: CBLB-9755
uaauacuguaauuauuacu

SEQ ID NO: 40144 - RNA, 20 nt, Artificial Sequence
  Synthetic oligonucleotide: CBLB-9756
uuaauacuguaauuauuacu

SEQ ID NO: 40145 - RNA, 21 nt, Artificial Sequence
  Synthetic oligonucleotide: CBLB-9757
uuuaauacuguaauuauuacu

SEQ ID NO: 40146 - RNA, 22 nt, Artificial Sequence
  Synthetic oligonucleotide: CBLB-9758
uuuuaauacuguaauuauuacu

SEQ ID NO: 40147 - RNA, 23 nt, Artificial Sequence
  Synthetic oligonucleotide: CBLB-9759
auuuuaauacuguaauuauuacu

SEQ ID NO: 40148 - RNA, 24 nt, Artificial Sequence
  Synthetic oligonucleotide: CBLB-9760
aauuuuaauacuguaauuauuacu

SEQ ID NO: 40149 - RNA, 18 nt, Artificial Sequence
  Synthetic oligonucleotide: CBLB-9761
augcuaccaacaauugcu

SEQ ID NO: 40150 - RNA, 19 nt, Artificial Sequence
  Synthetic oligonucleotide: CBLB-9762
caugcuaccaacaauugcu

SEQ ID NO: 40151 - RNA, 20 nt, Artificial Sequence
  Synthetic oligonucleotide: CBLB-9763
ucaugcuaccaacaauugcu

SEQ ID NO: 40152 - RNA, 21 nt, Artificial Sequence
  Synthetic oligonucleotide: CBLB-9764
cucaugcuaccaacaauugcu

SEQ ID NO: 40153 - RNA, 22 nt, Artificial Sequence
  Synthetic oligonucleotide: CBLB-9765
acucaugcuaccaacaauugcu

SEQ ID NO: 40154 - RNA, 23 nt, Artificial Sequence
  Synthetic oligonucleotide: CBLB-9766
cacucaugcuaccaacaauugcu

SEQ ID NO: 40155 - RNA, 24 nt, Artificial Sequence
  Synthetic oligonucleotide: CBLB-9767
ccacucaugcuaccaacaauugcu

SEQ ID NO: 40156 - RNA, 18 nt, Artificial Sequence
  Synthetic oligonucleotide: CBLB-9768
uguugcguuuccacgucu

SEQ ID NO: 40157 - RNA, 19 nt, Artificial Sequence
  Synthetic oligonucleotide: CBLB-9769
uuguugcguuuccacgucu

SEQ ID NO: 40158 - RNA, 20 nt, Artificial Sequence
  Synthetic oligonucleotide: CBLB-7751
auuguugcguuuccacgucu

SEQ ID NO: 40159 - RNA, 21 nt, Artificial Sequence
  Synthetic oligonucleotide: CBLB-9770
aauuguugcguuuccacgucu

SEQ ID NO: 40160 - RNA, 22 nt, Artificial Sequence
  Synthetic oligonucleotide: CBLB-9771
uaauuguugcguuuccacgucu

SEQ ID NO: 40161 - RNA, 23 nt, Artificial Sequence
  Synthetic oligonucleotide: CBLB-9772
guaauuguugcguuuccacgucu

SEQ ID NO: 40162 - RNA, 24 nt, Artificial Sequence
  Synthetic oligonucleotide: CBLB-9773
gguaauuguugcguuuccacgucu

SEQ ID NO: 40163 - RNA, 18 nt, Artificial Sequence
  Synthetic oligonucleotide: CBLB-9774
ccgcgcacacgcgugucu

SEQ ID NO: 40164 - RNA, 19 nt, Artificial Sequence
  Synthetic oligonucleotide: CBLB-9775
cccgcgcacacgcgugucu

SEQ ID NO: 40165 - RNA, 20 nt, Artificial Sequence
  Synthetic oligonucleotide: CBLB-9776
acccgcgcacacgcgugucu

SEQ ID NO: 40166 - RNA, 21 nt, Artificial Sequence
  Synthetic oligonucleotide: CBLB-9777
gacccgcgcacacgcgugucu

SEQ ID NO: 40167 - RNA, 22 nt, Artificial Sequence
  Synthetic oligonucleotide: CBLB-9778
ggacccgcgcacacgcgugucu

SEQ ID NO: 40168 - RNA, 23 nt, Artificial Sequence
  Synthetic oligonucleotide: CBLB-9779
gggacccgcgcacacgcgugucu

SEQ ID NO: 40169 - RNA, 24 nt, Artificial Sequence
  Synthetic oligonucleotide: CBLB-9780
ugggacccgcgcacacgcgugucu

SEQ ID NO: 40170 - RNA, 18 nt, Artificial Sequence
  Synthetic oligonucleotide: CBLB-9781
cgcuggguugcuccuucu

SEQ ID NO: 40171 - RNA, 19 nt, Artificial Sequence
  Synthetic oligonucleotide: CBLB-9782
gcgcuggguugcuccuucu

SEQ ID NO: 40172 - RNA, 20 nt, Artificial Sequence
  Synthetic oligonucleotide: CBLB-9783
cgcgcuggguugcuccuucu

SEQ ID NO: 40173 - RNA, 21 nt, Artificial Sequence
  Synthetic oligonucleotide: CBLB-9784
gcgcgcuggguugcuccuucu

SEQ ID NO: 40174 - RNA, 22 nt, Artificial Sequence
  Synthetic oligonucleotide: CBLB-9785
ugcgcgcuggguugcuccuucu

SEQ ID NO: 40175 - RNA, 23 nt, Artificial Sequence
  Synthetic oligonucleotide: CBLB-9786
cugcgcgcuggguugcuccuucu

SEQ ID NO: 40176 - RNA, 24 nt, Artificial Sequence
  Synthetic oligonucleotide: CBLB-9787
ccugcgcgcuggguugcuccuucu

SEQ ID NO: 40177 - RNA, 18 nt, Artificial Sequence
  Synthetic oligonucleotide: CBLB-9788
uugccgccgccguccagu

SEQ ID NO: 40178 - RNA, 19 nt, Artificial Sequence
  Synthetic oligonucleotide: CBLB-9789
uuugccgccgccguccagu

SEQ ID NO: 40179 - RNA, 20 nt, Artificial Sequence
  Synthetic oligonucleotide: CBLB-9790
cuuugccgccgccguccagu

SEQ ID NO: 40180 - RNA, 21 nt, Artificial Sequence
  Synthetic oligonucleotide: CBLB-9791
ccuuugccgccgccguccagu

SEQ ID NO: 40181 - RNA, 22 nt, Artificial Sequence
  Synthetic oligonucleotide: CBLB-9792
gccuuugccgccgccguccagu

SEQ ID NO: 40182 - RNA, 23 nt, Artificial Sequence
  Synthetic oligonucleotide: CBLB-9793
ugccuuugccgccgccguccagu

SEQ ID NO: 40183 - RNA, 24 nt, Artificial Sequence
  Synthetic oligonucleotide: CBLB-9794
cugccuuugccgccgccguccagu

SEQ ID NO: 40184 - RNA, 18 nt, Artificial Sequence
  Synthetic oligonucleotide: CBLB-9795
acacugggcugcgugcgu

SEQ ID NO: 40185 - RNA, 19 nt, Artificial Sequence
  Synthetic oligonucleotide: CBLB-9796
cacacugggcugcgugcgu

SEQ ID NO: 40186 - RNA, 20 nt, Artificial Sequence
  Synthetic oligonucleotide: CBLB-9797
acacacugggcugcgugcgu

SEQ ID NO: 40187 - RNA, 21 nt, Artificial Sequence
  Synthetic oligonucleotide: CBLB-9798
cacacacugggcugcgugcgu

SEQ ID NO: 40188 - RNA, 22 nt, Artificial Sequence
  Synthetic oligonucleotide: CBLB-9799
acacacacugggcugcgugcgu

SEQ ID NO: 40189 - RNA, 23 nt, Artificial Sequence
  Synthetic oligonucleotide: CBLB-9800
cacacacacugggcugcgugcgu

SEQ ID NO: 40190 - RNA, 24 nt, Artificial Sequence
  Synthetic oligonucleotide: CBLB-9801
ccacacacacugggcugcgugcgu

SEQ ID NO: 40191 - RNA, 18 nt, Artificial Sequence
  Synthetic oligonucleotide: CBLB-9802
aggugauaaagugugauu

SEQ ID NO: 40192 - RNA, 19 nt, Artificial Sequence
  Synthetic oligonucleotide: CBLB-9803
caggugauaaagugugauu

SEQ ID NO: 40193 - RNA, 20 nt, Artificial Sequence
  Synthetic oligonucleotide: CBLB-9804
ucaggugauaaagugugauu

SEQ ID NO: 40194 - RNA, 21 nt, Artificial Sequence
  Synthetic oligonucleotide: CBLB-9805
gucaggugauaaagugugauu

SEQ ID NO: 40195 - RNA, 22 nt, Artificial Sequence
  Synthetic oligonucleotide: CBLB-9806
agucaggugauaaagugugauu

SEQ ID NO: 40196 - RNA, 23 nt, Artificial Sequence
  Synthetic oligonucleotide: CBLB-9807
cagucaggugauaaagugugauu

SEQ ID NO: 40197 - RNA, 24 nt, Artificial Sequence
  Synthetic oligonucleotide: CBLB-9808
ccagucaggugauaaagugugauu

SEQ ID NO: 40198 - RNA, 18 nt, Artificial Sequence
  Synthetic oligonucleotide: CBLB-9809
gcucuggacuucauacuu

SEQ ID NO: 40199 - RNA, 19 nt, Artificial Sequence
  Synthetic oligonucleotide: CBLB-9810
ugcucuggacuucauacuu

SEQ ID NO: 40200 - RNA, 20 nt, Artificial Sequence
  Synthetic oligonucleotide: CBLB-7761
uugcucuggacuucauacuu

SEQ ID NO: 40201 - RNA, 21 nt, Artificial Sequence
  Synthetic oligonucleotide: CBLB-9811
auugcucuggacuucauacuu

SEQ ID NO: 40202 - RNA, 22 nt, Artificial Sequence
  Synthetic oligonucleotide: CBLB-9812
aauugcucuggacuucauacuu

SEQ ID NO: 40203 - RNA, 23 nt, Artificial Sequence
  Synthetic oligonucleotide: CBLB-9813
caauugcucuggacuucauacuu

SEQ ID NO: 40204 - RNA, 24 nt, Artificial Sequence
  Synthetic oligonucleotide: CBLB-9814
acaauugcucuggacuucauacuu

SEQ ID NO: 40205 - RNA, 18 nt, Artificial Sequence
  Synthetic oligonucleotide: CBLB-9815
gcuggguugcuccuucuu

SEQ ID NO: 40206 - RNA, 19 nt, Artificial Sequence
  Synthetic oligonucleotide: CBLB-9816
cgcuggguugcuccuucuu

SEQ ID NO: 40207 - RNA, 20 nt, Artificial Sequence
  Synthetic oligonucleotide: CBLB-7762
gcgcuggguugcuccuucuu

SEQ ID NO: 40208 - RNA, 21 nt, Artificial Sequence
  Synthetic oligonucleotide: CBLB-9817
cgcgcuggguugcuccuucuu

SEQ ID NO: 40209 - RNA, 22 nt, Artificial Sequence
  Synthetic oligonucleotide: CBLB-9818
gcgcgcuggguugcuccuucuu

SEQ ID NO: 40210 - RNA, 23 nt, Artificial Sequence
  Synthetic oligonucleotide: CBLB-9819
ugcgcgcuggguugcuccuucuu

SEQ ID NO: 40211 - RNA, 24 nt, Artificial Sequence
  Synthetic oligonucleotide: CBLB-9820
cugcgcgcuggguugcuccuucuu

SEQ ID NO: 40212 - RNA, 17 nt, Artificial Sequence
  Synthetic oligonucleotide: CBLB-9821
cccgccuuucagcccca

SEQ ID NO: 40213 - RNA, 17 nt, Artificial Sequence
  Synthetic oligonucleotide: CBLB-9822
gccaaacaggucuauga

SEQ ID NO: 40214 - RNA, 17 nt, Artificial Sequence
  Synthetic oligonucleotide: CBLB-9823
ugucggagucaccuuua

SEQ ID NO: 40215 - RNA, 17 nt, Artificial Sequence
  Synthetic oligonucleotide: CBLB-9824
aguaguggcuggaaggg

SEQ ID NO: 40216 - RNA, 17 nt, Artificial Sequence
  Synthetic oligonucleotide: CBLB-9825
aaaggcgggacuuccug

SEQ ID NO: 40217 - RNA, 17 nt, Artificial Sequence
  Synthetic oligonucleotide: CBLB-9826
ggccagcguugucaacu

SEQ ID NO: 40218 - RNA, 17 nt, Artificial Sequence
  Synthetic oligonucleotide: CBLB-9827
ggcugaaaggcgggacu

SEQ ID NO: 40219 - RNA, 17 nt, Artificial Sequence
  Synthetic oligonucleotide: CBLB-9828
ccauuaucugguacuuu

SEQ ID NO: 40220 - RNA, 20 nt, Artificial Sequence
  Synthetic oligonucleotide: CBLB-9829
agucccgccuuucagcccca

SEQ ID NO: 40221 - RNA, 20 nt, Artificial Sequence
  Synthetic oligonucleotide: CBLB-7987
aucaaaaagagcaacagcca

SEQ ID NO: 40222 - RNA, 20 nt, Artificial Sequence
  Synthetic oligonucleotide: CBLB-9830
gcagccaaacaggucuauga

SEQ ID NO: 40223 - RNA, 20 nt, Artificial Sequence
  Synthetic oligonucleotide: CBLB-9831
uuuugucggagucaccuuua

SEQ ID NO: 40224 - RNA, 20 nt, Artificial Sequence
  Synthetic oligonucleotide: CBLB-9832
cagaguaguggcuggaaggg

SEQ ID NO: 40225 - RNA, 20 nt, Artificial Sequence
  Synthetic oligonucleotide: CBLB-9833
cugaaaggcgggacuuccug

SEQ ID NO: 40226 - RNA, 20 nt, Artificial Sequence
  Synthetic oligonucleotide: CBLB-9834
cugguacuuuuauugcuuug

SEQ ID NO: 40227 - RNA, 20 nt, Artificial Sequence
  Synthetic oligonucleotide: CBLB-9835
uuuggccagcguugucaacu

SEQ ID NO: 40228 - RNA, 20 nt, Artificial Sequence
  Synthetic oligonucleotide: CBLB-9836
uggggcugaaaggcgggacu

SEQ ID NO: 40229 - RNA, 20 nt, Artificial Sequence
  Synthetic oligonucleotide: CBLB-8747
gucaccccagccuacucucu

SEQ ID NO: 40230 - RNA, 20 nt, Artificial Sequence
  Synthetic oligonucleotide: CBLB-9837
uucccauuaucugguacuuu

SEQ ID NO: 40231 - RNA, 17 nt, Artificial Sequence
  Synthetic oligonucleotide: CBLB-9838
aaaaagagcaacagcca

SEQ ID NO: 40232 - RNA, 17 nt, Artificial Sequence
  Synthetic oligonucleotide: CBLB-9839
uuuugcuguuaguuuua

SEQ ID NO: 40233 - RNA, 17 nt, Artificial Sequence
  Synthetic oligonucleotide: CBLB-9840
guacuuuuauugcuuug

SEQ ID NO: 40234 - RNA, 17 nt, Artificial Sequence
  Synthetic oligonucleotide: CBLB-9841
accccagccuacucucu

SEQ ID NO: 40235 - RNA, 20 nt, Artificial Sequence
  Synthetic oligonucleotide: CBLB-8069
cucuuuugcuguuaguuuua

SEQ ID NO: 40236 - RNA, 17 nt, Artificial Sequence
  Synthetic oligonucleotide: CBLB-9842
accagucaggugauaaa

SEQ ID NO: 40237 - RNA, 17 nt, Artificial Sequence
  Synthetic oligonucleotide: CBLB-9843
cagguuacgugguuaga

SEQ ID NO: 40238 - RNA, 17 nt, Artificial Sequence
  Synthetic oligonucleotide: CBLB-9844
aagacaagucccagcac

SEQ ID NO: 40239 - RNA, 17 nt, Artificial Sequence
  Synthetic oligonucleotide: CBLB-9845
cgggaggggagagcggg

SEQ ID NO: 40240 - RNA, 17 nt, Artificial Sequence
  Synthetic oligonucleotide: CBLB-9846
gccuugaauuuacaugg

SEQ ID NO: 40241 - RNA, 17 nt, Artificial Sequence
  Synthetic oligonucleotide: CBLB-9847
uguugguagcaugagug

SEQ ID NO: 40242 - RNA, 17 nt, Artificial Sequence
  Synthetic oligonucleotide: CBLB-9848
uacauuggguuuuuugu

SEQ ID NO: 40243 - RNA, 17 nt, Artificial Sequence
  Synthetic oligonucleotide: CBLB-9849
uagcguuuauuacacuu

SEQ ID NO: 40244 - RNA, 20 nt, Artificial Sequence
  Synthetic oligonucleotide: CBLB-9850
gcaaccagucaggugauaaa

SEQ ID NO: 40245 - RNA, 20 nt, Artificial Sequence
  Synthetic oligonucleotide: CBLB-9851
uaucagguuacgugguuaga

SEQ ID NO: 40246 - RNA, 20 nt, Artificial Sequence
  Synthetic oligonucleotide: CBLB-9852
ugaaagacaagucccagcac

SEQ ID NO: 40247 - RNA, 20 nt, Artificial Sequence
  Synthetic oligonucleotide: CBLB-9853
gggcgggaggggagagcggg

SEQ ID NO: 40248 - RNA, 20 nt, Artificial Sequence
  Synthetic oligonucleotide: CBLB-9854
acagccuugaauuuacaugg

SEQ ID NO: 40249 - RNA, 20 nt, Artificial Sequence
  Synthetic oligonucleotide: CBLB-9235
aauuguugguagcaugagug

SEQ ID NO: 40250 - RNA, 20 nt, Artificial Sequence
  Synthetic oligonucleotide: CBLB-9855
uuuuacauuggguuuuuugu

SEQ ID NO: 40251 - RNA, 20 nt, Artificial Sequence
  Synthetic oligonucleotide: CBLB-9856
ugauagcguuuauuacacuu

SEQ ID NO: 40252 - RNA, 17 nt, Artificial Sequence
  Synthetic oligonucleotide: BID-170
guugaccugaggggaaa

SEQ ID NO: 40253 - RNA, 17 nt, Artificial Sequence
  Synthetic oligonucleotide: BID-82
caguggcgaccuggaaa

SEQ ID NO: 40254 - RNA, 17 nt, Artificial Sequence
  Synthetic oligonucleotide: BID-159
uccccucaggucaacaa

SEQ ID NO: 40255 - RNA, 17 nt, Artificial Sequence
  Synthetic oligonucleotide: BID-335
gaaggagcugaccucaa

SEQ ID NO: 40256 - RNA, 17 nt, Artificial Sequence
  Synthetic oligonucleotide: BID-2528
auccccuagagcaagaa

SEQ ID NO: 40257 - RNA, 17 nt, Artificial Sequence
  Synthetic oligonucleotide: BID-175
uguugaccugaggggaa

SEQ ID NO: 40258 - RNA, 17 nt, Artificial Sequence
  Synthetic oligonucleotide: BID-91
ccaguggcgaccuggaa

SEQ ID NO: 40259 - RNA, 17 nt, Artificial Sequence
  Synthetic oligonucleotide: BID-2529
cuaggggauggacugaa

SEQ ID NO: 40260 - RNA, 17 nt, Artificial Sequence
  Synthetic oligonucleotide: BID-252
ccuccgggccuggugaa

SEQ ID NO: 40261 - RNA, 17 nt, Artificial Sequence
  Synthetic oligonucleotide: BID-297
ugugcaggaccggaaca

SEQ ID NO: 40262 - RNA, 17 nt, Artificial Sequence
  Synthetic oligonucleotide: BID-301
ggccuacccuagagaca

SEQ ID NO: 40263 - RNA, 17 nt, Artificial Sequence
  Synthetic oligonucleotide: BID-90
ccgcgcugcccaggcca

SEQ ID NO: 40264 - RNA, 17 nt, Artificial Sequence
  Synthetic oligonucleotide: BID-352
cugcagcagcugcucca

SEQ ID NO: 40265 - RNA, 17 nt, Artificial Sequence
  Synthetic oligonucleotide: BID-92
ucugaccucacagucca

SEQ ID NO: 40266 - RNA, 17 nt, Artificial Sequence
  Synthetic oligonucleotide: BID-261
ccaggucggggacagca

SEQ ID NO: 40267 - RNA, 17 nt, Artificial Sequence
  Synthetic oligonucleotide: BID-347
cagggccagcaccagca

SEQ ID NO: 40268 - RNA, 17 nt, Artificial Sequence
  Synthetic oligonucleotide: BID-346
cuucuuggccagcagca

SEQ ID NO: 40269 - RNA, 17 nt, Artificial Sequence
  Synthetic oligonucleotide: BID-341
aaagacaucacggagca

SEQ ID NO: 40270 - RNA, 17 nt, Artificial Sequence
  Synthetic oligonucleotide: BID-257
gaaucuguguucaggca

SEQ ID NO: 40271 - RNA, 17 nt, Artificial Sequence
  Synthetic oligonucleotide: BID-262
gguguuccugagcugca

SEQ ID NO: 40272 - RNA, 17 nt, Artificial Sequence
  Synthetic oligonucleotide: BID-340
uugugugaaagacauca

SEQ ID NO: 40273 - RNA, 17 nt, Artificial Sequence
  Synthetic oligonucleotide: BID-2530
ggaaggagcugaccuca

SEQ ID NO: 40274 - RNA, 17 nt, Artificial Sequence
  Synthetic oligonucleotide: BID-154
caacgguuccagccuca

SEQ ID NO: 40275 - RNA, 17 nt, Artificial Sequence
  Synthetic oligonucleotide: BID-306
ccugcugcuggccaaga

SEQ ID NO: 40276 - RNA, 17 nt, Artificial Sequence
  Synthetic oligonucleotide: BID-357
uuccgguccugcacaga

SEQ ID NO: 40277 - RNA, 17 nt, Artificial Sequence
  Synthetic oligonucleotide: BID-302
cccuagagacauggaga

SEQ ID NO: 40278 - RNA, 17 nt, Artificial Sequence
  Synthetic oligonucleotide: BID-37
ggcucggugggcagcga

SEQ ID NO: 40279 - RNA, 17 nt, Artificial Sequence
  Synthetic oligonucleotide: BID-342
acaucacggagcaagga

SEQ ID NO: 40280 - RNA, 17 nt, Artificial Sequence
  Synthetic oligonucleotide: BID-241
cguucaccaggcccgga

SEQ ID NO: 40281 - RNA, 17 nt, Artificial Sequence
  Synthetic oligonucleotide: BID-2531
uuucuugcucuagggga

SEQ ID NO: 40282 - RNA, 17 nt, Artificial Sequence
  Synthetic oligonucleotide: BID-183
cuggcuccccaguggga

SEQ ID NO: 40283 - RNA, 17 nt, Artificial Sequence
  Synthetic oligonucleotide: BID-43
cggugcuggggucauga

SEQ ID NO: 40284 - RNA, 17 nt, Artificial Sequence
  Synthetic oligonucleotide: BID-166
gaugagcugcagacuga

SEQ ID NO: 40285 - RNA, 17 nt, Artificial Sequence
  Synthetic oligonucleotide: BID-143
aaccguuguugaccuga

SEQ ID NO: 40286 - RNA, 17 nt, Artificial Sequence
  Synthetic oligonucleotide: BID-267
ucggaggaggugaguga

SEQ ID NO: 40287 - RNA, 17 nt, Artificial Sequence
  Synthetic oligonucleotide: BID-245
ggcccggagggaugcua

SEQ ID NO: 40288 - RNA, 17 nt, Artificial Sequence
  Synthetic oligonucleotide: BID-2532
ucuccuuucuugcucua

SEQ ID NO: 40289 - RNA, 17 nt, Artificial Sequence
  Synthetic oligonucleotide: BID-349
ccuucuccaugucucua

SEQ ID NO: 40290 - RNA, 17 nt, Artificial Sequence
  Synthetic oligonucleotide: BID-296
cugugcaggaccggaac

SEQ ID NO: 40291 - RNA, 17 nt, Artificial Sequence
  Synthetic oligonucleotide: BID-151
caucguagcccucccac

SEQ ID NO: 40292 - RNA, 17 nt, Artificial Sequence
  Synthetic oligonucleotide: BID-80
ccuuuccaggucgccac

SEQ ID NO: 40293 - RNA, 17 nt, Artificial Sequence
  Synthetic oligonucleotide: BID-184
cacuggggagccagcac

SEQ ID NO: 40294 - RNA, 17 nt, Artificial Sequence
  Synthetic oligonucleotide: BID-169
cagagagcuggacgcac

SEQ ID NO: 40295 - RNA, 17 nt, Artificial Sequence
  Synthetic oligonucleotide: BID-251
cacucaccuccuccgac

SEQ ID NO: 40296 - RNA, 17 nt, Artificial Sequence
  Synthetic oligonucleotide: BID-295
gccccucugugcaggac

SEQ ID NO: 40297 - RNA, 17 nt, Artificial Sequence
  Synthetic oligonucleotide: BID-2533
aguuccagaagugugac

SEQ ID NO: 40298 - RNA, 17 nt, Artificial Sequence
  Synthetic oligonucleotide: BID-343
caaggacggcgugugac

SEQ ID NO: 40299 - RNA, 17 nt, Artificial Sequence
  Synthetic oligonucleotide: BID-156
gugcaucacaaaccuac

SEQ ID NO: 40300 - RNA, 17 nt, Artificial Sequence
  Synthetic oligonucleotide: BID-359
gaggggcacacagaacc

SEQ ID NO: 40301 - RNA, 17 nt, Artificial Sequence
  Synthetic oligonucleotide: BID-87
cugggacacugugaacc

SEQ ID NO: 40302 - RNA, 17 nt, Artificial Sequence
  Synthetic oligonucleotide: BID-260
gggccaggccguucacc

SEQ ID NO: 40303 - RNA, 17 nt, Artificial Sequence
  Synthetic oligonucleotide: BID-249
ccaugcuguccccgacc

SEQ ID NO: 40304 - RNA, 17 nt, Artificial Sequence
  Synthetic oligonucleotide: BID-81
gugucccaguggcgacc

SEQ ID NO: 40305 - RNA, 17 nt, Artificial Sequence
  Synthetic oligonucleotide: BID-298
ggaccggaacagggacc

SEQ ID NO: 40306 - RNA, 17 nt, Artificial Sequence
  Synthetic oligonucleotide: BID-266
ugccaggcaccucgccc

SEQ ID NO: 40307 - RNA, 17 nt, Artificial Sequence
  Synthetic oligonucleotide: BID-299
ggaccuggccacugccc

SEQ ID NO: 40308 - RNA, 17 nt, Artificial Sequence
  Synthetic oligonucleotide: BID-89
gagcugccgcgcugccc

SEQ ID NO: 40309 - RNA, 17 nt, Artificial Sequence
  Synthetic oligonucleotide: BID-2534
aggggagucaggaagcc

SEQ ID NO: 40310 - RNA, 17 nt, Artificial Sequence
  Synthetic oligonucleotide: BID-256
aggccguucaccaggcc

SEQ ID NO: 40311 - RNA, 17 nt, Artificial Sequence
  Synthetic oligonucleotide: BID-253
gggccuggugaacggcc

SEQ ID NO: 40312 - RNA, 17 nt, Artificial Sequence
  Synthetic oligonucleotide: BID-45
ugcuccuccagccggcc

SEQ ID NO: 40313 - RNA, 17 nt, Artificial Sequence
  Synthetic oligonucleotide: BID-276
uccugagcugcagggcc

SEQ ID NO: 40314 - RNA, 17 nt, Artificial Sequence
  Synthetic oligonucleotide: BID-237
uagcaucccuccgggcc

SEQ ID NO: 40315 - RNA, 17 nt, Artificial Sequence
  Synthetic oligonucleotide: BID-52
gugggcagcgaggggcc

SEQ ID NO: 40316 - RNA, 17 nt, Artificial Sequence
  Synthetic oligonucleotide: BID-97
ccucacaguccauggcc

SEQ ID NO: 40317 - RNA, 17 nt, Artificial Sequence
  Synthetic oligonucleotide: BID-354
gcuccagggcaguggcc

SEQ ID NO: 40318 - RNA, 17 nt, Artificial Sequence
  Synthetic oligonucleotide: BID-270
gaccugggcgaggugcc

SEQ ID NO: 40319 - RNA, 17 nt, Artificial Sequence
  Synthetic oligonucleotide: BID-240
ucauccggaauauugcc

SEQ ID NO: 40320 - RNA, 17 nt, Artificial Sequence
  Synthetic oligonucleotide: BID-84
cagcuccgacucacucc

SEQ ID NO: 40321 - RNA, 17 nt, Artificial Sequence
  Synthetic oligonucleotide: BID-236
gaccguagcaucccucc

SEQ ID NO: 40322 - RNA, 17 nt, Artificial Sequence
  Synthetic oligonucleotide: BID-351
ccugcagcagcugcucc

SEQ ID NO: 40323 - RNA, 17 nt, Artificial Sequence
  Synthetic oligonucleotide: BID-100
ucugugugucccuuucc

SEQ ID NO: 40324 - RNA, 17 nt, Artificial Sequence
  Synthetic oligonucleotide: BID-178
cucuauucuucccaagc

SEQ ID NO: 40325 - RNA, 17 nt, Artificial Sequence
  Synthetic oligonucleotide: BID-2535
aaggggagucaggaagc

SEQ ID NO: 40326 - RNA, 17 nt, Artificial Sequence
  Synthetic oligonucleotide: BID-265
agcucaggaacaccagc

SEQ ID NO: 40327 - RNA, 17 nt, Artificial Sequence
  Synthetic oligonucleotide: BID-46
cacugugcuccuccagc

SEQ ID NO: 40328 - RNA, 17 nt, Artificial Sequence
  Synthetic oligonucleotide: BID-345
ccuucuuggccagcagc

SEQ ID NO: 40329 - RNA, 17 nt, Artificial Sequence
  Synthetic oligonucleotide: BID-174
cagcuuccgcagagagc

SEQ ID NO: 40330 - RNA, 17 nt, Artificial Sequence
  Synthetic oligonucleotide: BID-268
agaaucuguguucaggc

SEQ ID NO: 40331 - RNA, 17 nt, Artificial Sequence
  Synthetic oligonucleotide: BID-179
uugggaagaauagaggc

SEQ ID NO: 40332 - RNA, 17 nt, Artificial Sequence
  Synthetic oligonucleotide: BID-168
gcacucaucccugaggc

SEQ ID NO: 40333 - RNA, 17 nt, Artificial Sequence
  Synthetic oligonucleotide: BID-246
caccuccuccgaccggc

SEQ ID NO: 40334 - RNA, 17 nt, Artificial Sequence
  Synthetic oligonucleotide: BID-48
cgaggggccgggccggc

SEQ ID NO: 40335 - RNA, 17 nt, Artificial Sequence
  Synthetic oligonucleotide: BID-185
agaggcagguaggcggc

SEQ ID NO: 40336 - RNA, 17 nt, Artificial Sequence
  Synthetic oligonucleotide: BID-50
gcagcgaggggccgggc

SEQ ID NO: 40337 - RNA, 17 nt, Artificial Sequence
  Synthetic oligonucleotide: BID-54
ggugggcagcgaggggc

SEQ ID NO: 40338 - RNA, 17 nt, Artificial Sequence
  Synthetic oligonucleotide: BID-51
guaagugggcugggggc

SEQ ID NO: 40339 - RNA, 17 nt, Artificial Sequence
  Synthetic oligonucleotide: BID-38
ggauucuguaagugggc

SEQ ID NO: 40340 - RNA, 17 nt, Artificial Sequence
  Synthetic oligonucleotide: BID-303
gaaggagaagaccaugc

SEQ ID NO: 40341 - RNA, 17 nt, Artificial Sequence
  Synthetic oligonucleotide: BID-93
gaggccagauccccugc

SEQ ID NO: 40342 - RNA, 17 nt, Artificial Sequence
  Synthetic oligonucleotide: BID-271
ugguguuccugagcugc

SEQ ID NO: 40343 - RNA, 17 nt, Artificial Sequence
  Synthetic oligonucleotide: BID-305
ggugcuggcccugcugc

SEQ ID NO: 40344 - RNA, 17 nt, Artificial Sequence
  Synthetic oligonucleotide: BID-300
ccuggagcagcugcugc

SEQ ID NO: 40345 - RNA, 17 nt, Artificial Sequence
  Synthetic oligonucleotide: BID-163
ccacgagcugccagugc

SEQ ID NO: 40346 - RNA, 17 nt, Artificial Sequence
  Synthetic oligonucleotide: BID-26
cgaaugugcagcggugc

SEQ ID NO: 40347 - RNA, 17 nt, Artificial Sequence
  Synthetic oligonucleotide: BID-304
gaagaccaugcuggugc

SEQ ID NO: 40348 - RNA, 17 nt, Artificial Sequence
  Synthetic oligonucleotide: BID-294
ugugugccccucugugc

SEQ ID NO: 40349 - RNA, 17 nt, Artificial Sequence
  Synthetic oligonucleotide: BID-258
gucaagaagacaucauc

SEQ ID NO: 40350 - RNA, 17 nt, Artificial Sequence
  Synthetic oligonucleotide: BID-83
ggcacccgcaggggauc

SEQ ID NO: 40351 - RNA, 17 nt, Artificial Sequence
  Synthetic oligonucleotide: BID-186
gacuccccuuuccccuc

SEQ ID NO: 40352 - RNA, 17 nt, Artificial Sequence
  Synthetic oligonucleotide: BID-239
ggaccguagcaucccuc

SEQ ID NO: 40353 - RNA, 17 nt, Artificial Sequence
  Synthetic oligonucleotide: BID-153
acaacgguuccagccuc

SEQ ID NO: 40354 - RNA, 17 nt, Artificial Sequence
  Synthetic oligonucleotide: BID-277
gccuggcccugcagcuc

SEQ ID NO: 40355 - RNA, 17 nt, Artificial Sequence
  Synthetic oligonucleotide: BID-191
gaggggaaaggggaguc

SEQ ID NO: 40356 - RNA, 17 nt, Artificial Sequence
  Synthetic oligonucleotide: BID-263
ggcaccucgcccagguc

SEQ ID NO: 40357 - RNA, 17 nt, Artificial Sequence
  Synthetic oligonucleotide: BID-259
ggugccuggcaauauuc

SEQ ID NO: 40358 - RNA, 17 nt, Artificial Sequence
  Synthetic oligonucleotide: BID-2536
uuagccagucacacuuc

SEQ ID NO: 40359 - RNA, 17 nt, Artificial Sequence
  Synthetic oligonucleotide: BID-339
cguaggugcguagguuc

SEQ ID NO: 40360 - RNA, 17 nt, Artificial Sequence
  Synthetic oligonucleotide: BID-355
uggccaggucccuguuc

SEQ ID NO: 40361 - RNA, 17 nt, Artificial Sequence
  Synthetic oligonucleotide: BID-272
uuucagaaucuguguuc

SEQ ID NO: 40362 - RNA, 17 nt, Artificial Sequence
  Synthetic oligonucleotide: BID-336
aaggguucuuacauuuc

SEQ ID NO: 40363 - RNA, 17 nt, Artificial Sequence
  Synthetic oligonucleotide: BID-172
uugaccugaggggaaag

SEQ ID NO: 40364 - RNA, 17 nt, Artificial Sequence
  Synthetic oligonucleotide: BID-165
ccucuauucuucccaag

SEQ ID NO: 40365 - RNA, 17 nt, Artificial Sequence
  Synthetic oligonucleotide: BID-34
agugcggauucuguaag

SEQ ID NO: 40366 - RNA, 17 nt, Artificial Sequence
  Synthetic oligonucleotide: BID-356
guuccgguccugcacag

SEQ ID NO: 40367 - RNA, 17 nt, Artificial Sequence
  Synthetic oligonucleotide: BID-182
cagugcuggcuccccag

SEQ ID NO: 40368 - RNA, 17 nt, Artificial Sequence
  Synthetic oligonucleotide: BID-86
gguucacagugucccag

SEQ ID NO: 40369 - RNA, 17 nt, Artificial Sequence
  Synthetic oligonucleotide: BID-269
aaucuguguucaggcag

SEQ ID NO: 40370 - RNA, 17 nt, Artificial Sequence
  Synthetic oligonucleotide: BID-353
cagcugcuccagggcag

SEQ ID NO: 40371 - RNA, 17 nt, Artificial Sequence
  Synthetic oligonucleotide: BID-33
caaauacgaaugugcag

SEQ ID NO: 40372 - RNA, 17 nt, Artificial Sequence
  Synthetic oligonucleotide: BID-96
auggacugugaggucag

SEQ ID NO: 40373 - RNA, 17 nt, Artificial Sequence
  Synthetic oligonucleotide: BID-102
gaaagggacacacagag

SEQ ID NO: 40374 - RNA, 17 nt, Artificial Sequence
  Synthetic oligonucleotide: BID-358
uccgguccugcacagag

SEQ ID NO: 40375 - RNA, 17 nt, Artificial Sequence
  Synthetic oligonucleotide: BID-36
gcucggugggcagcgag

SEQ ID NO: 40376 - RNA, 17 nt, Artificial Sequence
  Synthetic oligonucleotide: BID-164
uucuucccaagcgggag

SEQ ID NO: 40377 - RNA, 17 nt, Artificial Sequence
  Synthetic oligonucleotide: BID-150
accguuguugaccugag

SEQ ID NO: 40378 - RNA, 17 nt, Artificial Sequence
  Synthetic oligonucleotide: BID-155
ccgcuugggaagaauag

SEQ ID NO: 40379 - RNA, 17 nt, Artificial Sequence
  Synthetic oligonucleotide: BID-2537
cuccuuucuugcucuag

SEQ ID NO: 40380 - RNA, 17 nt, Artificial Sequence
  Synthetic oligonucleotide: BID-94
ccauggccugggcagcg

SEQ ID NO: 40381 - RNA, 17 nt, Artificial Sequence
  Synthetic oligonucleotide: BID-39
uggcucggugggcagcg

SEQ ID NO: 40382 - RNA, 17 nt, Artificial Sequence
  Synthetic oligonucleotide: BID-254
agggccugaggaccgcg

SEQ ID NO: 40383 - RNA, 17 nt, Artificial Sequence
  Synthetic oligonucleotide: BID-255
uguccccgaccugggcg

SEQ ID NO: 40384 - RNA, 17 nt, Artificial Sequence
  Synthetic oligonucleotide: BID-176
ccagcacuggcagcucg

SEQ ID NO: 40385 - RNA, 17 nt, Artificial Sequence
  Synthetic oligonucleotide: BID-244
gcaccucgcccaggucg

SEQ ID NO: 40386 - RNA, 17 nt, Artificial Sequence
  Synthetic oligonucleotide: BID-307
gcugcuggccaagaagg

SEQ ID NO: 40387 - RNA, 17 nt, Artificial Sequence
  Synthetic oligonucleotide: BID-243
caccagccggucggagg

SEQ ID NO: 40388 - RNA, 17 nt, Artificial Sequence
  Synthetic oligonucleotide: BID-190
gaauagaggcagguagg

SEQ ID NO: 40389 - RNA, 17 nt, Artificial Sequence
  Synthetic oligonucleotide: BID-242
ccguucaccaggcccgg

SEQ ID NO: 40390 - RNA, 17 nt, Artificial Sequence
  Synthetic oligonucleotide: BID-32
gggucaugauggcucgg

SEQ ID NO: 40391 - RNA, 17 nt, Artificial Sequence
  Synthetic oligonucleotide: BID-231
gaacaccagccggucgg

SEQ ID NO: 40392 - RNA, 17 nt, Artificial Sequence
  Synthetic oligonucleotide: BID-274
cuguguucaggcagggg

SEQ ID NO: 40393 - RNA, 17 nt, Artificial Sequence
  Synthetic oligonucleotide: BID-181
gcuggcuccccaguggg

SEQ ID NO: 40394 - RNA, 17 nt, Artificial Sequence
  Synthetic oligonucleotide: BID-99
gggacacacagaguggg

SEQ ID NO: 40395 - RNA, 17 nt, Artificial Sequence
  Synthetic oligonucleotide: BID-53
ggggccgggccggcugg

SEQ ID NO: 40396 - RNA, 17 nt, Artificial Sequence
  Synthetic oligonucleotide: BID-40
uucuguaagugggcugg

SEQ ID NO: 40397 - RNA, 17 nt, Artificial Sequence
  Synthetic oligonucleotide: BID-177
ugucagaacagcuuugg

SEQ ID NO: 40398 - RNA, 17 nt, Artificial Sequence
  Synthetic oligonucleotide: BID-148
ucguagcccucccacug

SEQ ID NO: 40399 - RNA, 17 nt, Artificial Sequence
  Synthetic oligonucleotide: BID-157
gaaccguuguugaccug

SEQ ID NO: 40400 - RNA, 17 nt, Artificial Sequence
  Synthetic oligonucleotide: BID-101
agaggccagauccccug

SEQ ID NO: 40401 - RNA, 17 nt, Artificial Sequence
  Synthetic oligonucleotide: BID-171
ugaugcacucaucccug

SEQ ID NO: 40402 - RNA, 17 nt, Artificial Sequence
  Synthetic oligonucleotide: BID-275
aggugagugagggccug

SEQ ID NO: 40403 - RNA, 17 nt, Artificial Sequence
  Synthetic oligonucleotide: BID-41
auucuguaagugggcug

SEQ ID NO: 40404 - RNA, 17 nt, Artificial Sequence
  Synthetic oligonucleotide: BID-180
agcgggaguggcugcug

SEQ ID NO: 40405 - RNA, 17 nt, Artificial Sequence
  Synthetic oligonucleotide: BID-35
aaugugcagcggugcug

SEQ ID NO: 40406 - RNA, 17 nt, Artificial Sequence
  Synthetic oligonucleotide: BID-167
gugcguccagcucucug

SEQ ID NO: 40407 - RNA, 17 nt, Artificial Sequence
  Synthetic oligonucleotide: BID-47
gcuggaggagcacagug

SEQ ID NO: 40408 - RNA, 17 nt, Artificial Sequence
  Synthetic oligonucleotide: BID-273
gucggaggaggugagug

SEQ ID NO: 40409 - RNA, 17 nt, Artificial Sequence
  Synthetic oligonucleotide: BID-308
accuacgcaccuacgug

SEQ ID NO: 40410 - RNA, 17 nt, Artificial Sequence
  Synthetic oligonucleotide: BID-95
ccaggccauggacugug

SEQ ID NO: 40411 - RNA, 17 nt, Artificial Sequence
  Synthetic oligonucleotide: BID-309
aaauguaagaacccuug

SEQ ID NO: 40412 - RNA, 17 nt, Artificial Sequence
  Synthetic oligonucleotide: BID-152
aucguagcccucccacu

SEQ ID NO: 40413 - RNA, 17 nt, Artificial Sequence
  Synthetic oligonucleotide: BID-79
cuuuccaggucgccacu

SEQ ID NO: 40414 - RNA, 17 nt, Artificial Sequence
  Synthetic oligonucleotide: BID-162
agagagcuggacgcacu

SEQ ID NO: 40415 - RNA, 17 nt, Artificial Sequence
  Synthetic oligonucleotide: BID-248
caugcuguccccgaccu

SEQ ID NO: 40416 - RNA, 17 nt, Artificial Sequence
  Synthetic oligonucleotide: BID-88
cucacaguccauggccu

SEQ ID NO: 40417 - RNA, 17 nt, Artificial Sequence
  Synthetic oligonucleotide: BID-189
cagcagccacucccgcu

SEQ ID NO: 40418 - RNA, 17 nt, Artificial Sequence
  Synthetic oligonucleotide: BID-49
uaagugggcugggggcu

SEQ ID NO: 40419 - RNA, 17 nt, Artificial Sequence
  Synthetic oligonucleotide: BID-42
gauucuguaagugggcu

SEQ ID NO: 40420 - RNA, 17 nt, Artificial Sequence
  Synthetic oligonucleotide: BID-44
cuggggucaugauggcu

SEQ ID NO: 40421 - RNA, 17 nt, Artificial Sequence
  Synthetic oligonucleotide: BID-31
gaaugugcagcggugcu

SEQ ID NO: 40422 - RNA, 17 nt, Artificial Sequence
  Synthetic oligonucleotide: BID-2538
uucuccuuucuugcucu

SEQ ID NO: 40423 - RNA, 17 nt, Artificial Sequence
  Synthetic oligonucleotide: BID-348
uccuucuccaugucucu

SEQ ID NO: 40424 - RNA, 17 nt, Artificial Sequence
  Synthetic oligonucleotide: BID-344
gugacuggccaccuucu

SEQ ID NO: 40425 - RNA, 17 nt, Artificial Sequence
  Synthetic oligonucleotide: BID-27
gugcggauucuguaagu

SEQ ID NO: 40426 - RNA, 17 nt, Artificial Sequence
  Synthetic oligonucleotide: BID-161
ggaagccaaacaccagu

SEQ ID NO: 40427 - RNA, 17 nt, Artificial Sequence
  Synthetic oligonucleotide: BID-188
agugcuggcuccccagu

SEQ ID NO: 40428 - RNA, 17 nt, Artificial Sequence
  Synthetic oligonucleotide: BID-98
aaagggacacacagagu

SEQ ID NO: 40429 - RNA, 17 nt, Artificial Sequence
  Synthetic oligonucleotide: BID-85
gugaaccaggagugagu

SEQ ID NO: 40430 - RNA, 17 nt, Artificial Sequence
  Synthetic oligonucleotide: BID-337
ggcuaagcuccucacgu

SEQ ID NO: 40431 - RNA, 17 nt, Artificial Sequence
  Synthetic oligonucleotide: BID-247
gggccugaggaccgcgu

SEQ ID NO: 40432 - RNA, 17 nt, Artificial Sequence
  Synthetic oligonucleotide: BID-338
uccucacguaggugcgu

SEQ ID NO: 40433 - RNA, 17 nt, Artificial Sequence
  Synthetic oligonucleotide: BID-264
aggcaccucgcccaggu

SEQ ID NO: 40434 - RNA, 17 nt, Artificial Sequence
  Synthetic oligonucleotide: BID-187
gaagaauagaggcaggu

SEQ ID NO: 40435 - RNA, 17 nt, Artificial Sequence
  Synthetic oligonucleotide: BID-250
caggaacaccagccggu

SEQ ID NO: 40436 - RNA, 17 nt, Artificial Sequence
  Synthetic oligonucleotide: BID-28
ggucaugauggcucggu

SEQ ID NO: 40437 - RNA, 17 nt, Artificial Sequence
  Synthetic oligonucleotide: BID-350
cuccaugucucuagggu

SEQ ID NO: 40438 - RNA, 17 nt, Artificial Sequence
  Synthetic oligonucleotide: BID-173
uguugucagaacagcuu

SEQ ID NO: 40439 - RNA, 17 nt, Artificial Sequence
  Synthetic oligonucleotide: BID-158
agcagccacucccgcuu

SEQ ID NO: 40440 - RNA, 17 nt, Artificial Sequence
  Synthetic oligonucleotide: BID-160
acaaaccuacugguguu

SEQ ID NO: 40441 - RNA, 20 nt, Artificial Sequence
  Synthetic oligonucleotide: BID-64
ucccaguggcgaccuggaaa

SEQ ID NO: 40442 - RNA, 20 nt, Artificial Sequence
  Synthetic oligonucleotide: BID-114
cguuguugaccugaggggaa

SEQ ID NO: 40443 - RNA, 20 nt, Artificial Sequence
  Synthetic oligonucleotide: BID-58
gucccaguggcgaccuggaa

SEQ ID NO: 40444 - RNA, 20 nt, Artificial Sequence
  Synthetic oligonucleotide: BID-2539
gcucuaggggauggacugaa

SEQ ID NO: 40445 - RNA, 20 nt, Artificial Sequence
  Synthetic oligonucleotide: BID-201
aucccuccgggccuggugaa

SEQ ID NO: 40446 - RNA, 20 nt, Artificial Sequence
  Synthetic oligonucleotide: BID-281
cucugugcaggaccggaaca

SEQ ID NO: 40447 - RNA, 20 nt, Artificial Sequence
  Synthetic oligonucleotide: BID-216
cgcccaggucggggacagca

SEQ ID NO: 40448 - RNA, 20 nt, Artificial Sequence
  Synthetic oligonucleotide: BID-115
caacaacgguuccagccuca

SEQ ID NO: 40449 - RNA, 20 nt, Artificial Sequence
  Synthetic oligonucleotide: BID-332
cuguuccgguccugcacaga

SEQ ID NO: 40450 - RNA, 20 nt, Artificial Sequence
  Synthetic oligonucleotide: BID-7
gauggcucggugggcagcga

SEQ ID NO: 40451 - RNA, 20 nt, Artificial Sequence
  Synthetic oligonucleotide: BID-211
ggccguucaccaggcccgga

SEQ ID NO: 40452 - RNA, 20 nt, Artificial Sequence
  Synthetic oligonucleotide: BID-111
uacgaugagcugcagacuga

SEQ ID NO: 40453 - RNA, 20 nt, Artificial Sequence
  Synthetic oligonucleotide: BID-105
uggaaccguuguugaccuga

SEQ ID NO: 40454 - RNA, 20 nt, Artificial Sequence
  Synthetic oligonucleotide: BID-212
ccaggcccggagggaugcua

SEQ ID NO: 40455 - RNA, 20 nt, Artificial Sequence
  Synthetic oligonucleotide: BID-280
ccucugugcaggaccggaac

SEQ ID NO: 40456 - RNA, 20 nt, Artificial Sequence
  Synthetic oligonucleotide: BID-104
gcucaucguagcccucccac

SEQ ID NO: 40457 - RNA, 20 nt, Artificial Sequence
  Synthetic oligonucleotide: BID-59
gucccuuuccaggucgccac

SEQ ID NO: 40458 - RNA, 20 nt, Artificial Sequence
  Synthetic oligonucleotide: BID-117
ccgcagagagcuggacgcac

SEQ ID NO: 40459 - RNA, 20 nt, Artificial Sequence
  Synthetic oligonucleotide: BID-318
gagcaaggacggcgugugac

SEQ ID NO: 40460 - RNA, 20 nt, Artificial Sequence
  Synthetic oligonucleotide: BID-108
ugagugcaucacaaaccuac

SEQ ID NO: 40461 - RNA, 20 nt, Artificial Sequence
  Synthetic oligonucleotide: BID-205
gguccaugcuguccccgacc

SEQ ID NO: 40462 - RNA, 20 nt, Artificial Sequence
  Synthetic oligonucleotide: BID-60
acagugucccaguggcgacc

SEQ ID NO: 40463 - RNA, 20 nt, Artificial Sequence
  Synthetic oligonucleotide: BID-210
uauugccaggcaccucgccc

SEQ ID NO: 40464 - RNA, 20 nt, Artificial Sequence
  Synthetic oligonucleotide: BID-56
ucggagcugccgcgcugccc

SEQ ID NO: 40465 - RNA, 20 nt, Artificial Sequence
  Synthetic oligonucleotide: BID-203
uccgggccuggugaacggcc

SEQ ID NO: 40466 - RNA, 20 nt, Artificial Sequence
  Synthetic oligonucleotide: BID-196
ccguagcaucccuccgggcc

SEQ ID NO: 40467 - RNA, 20 nt, Artificial Sequence
  Synthetic oligonucleotide: BID-217
cccgaccugggcgaggugcc

SEQ ID NO: 40468 - RNA, 20 nt, Artificial Sequence
  Synthetic oligonucleotide: BID-194
acaucauccggaauauugcc

SEQ ID NO: 40469 - RNA, 20 nt, Artificial Sequence
  Synthetic oligonucleotide: BID-63
cggcagcuccgacucacucc

SEQ ID NO: 40470 - RNA, 20 nt, Artificial Sequence
  Synthetic oligonucleotide: BID-198
auggaccguagcaucccucc

SEQ ID NO: 40471 - RNA, 20 nt, Artificial Sequence
  Synthetic oligonucleotide: BID-119
cgcuugggaagaauagaggc

SEQ ID NO: 40472 - RNA, 20 nt, Artificial Sequence
  Synthetic oligonucleotide: BID-207
acucaccuccuccgaccggc

SEQ ID NO: 40473 - RNA, 20 nt, Artificial Sequence
  Synthetic oligonucleotide: BID-6
ugcggauucuguaagugggc

SEQ ID NO: 40474 - RNA, 20 nt, Artificial Sequence
  Synthetic oligonucleotide: BID-129
gggccacgagcugccagugc

SEQ ID NO: 40475 - RNA, 20 nt, Artificial Sequence
  Synthetic oligonucleotide: BID-1
auacgaaugugcagcggugc

SEQ ID NO: 40476 - RNA, 20 nt, Artificial Sequence
  Synthetic oligonucleotide: BID-197
cauggaccguagcaucccuc

SEQ ID NO: 40477 - RNA, 20 nt, Artificial Sequence
  Synthetic oligonucleotide: BID-106
ucaacaacgguuccagccuc

SEQ ID NO: 40478 - RNA, 20 nt, Artificial Sequence
  Synthetic oligonucleotide: BID-314
ucacguaggugcguagguuc

SEQ ID NO: 40479 - RNA, 20 nt, Artificial Sequence
  Synthetic oligonucleotide: BID-331
ccuguuccgguccugcacag

SEQ ID NO: 40480 - RNA, 20 nt, Artificial Sequence
  Synthetic oligonucleotide: BID-2
caacaaauacgaaugugcag

SEQ ID NO: 40481 - RNA, 20 nt, Artificial Sequence
  Synthetic oligonucleotide: BID-333
uguuccgguccugcacagag

SEQ ID NO: 40482 - RNA, 20 nt, Artificial Sequence
  Synthetic oligonucleotide: BID-18
auggcucggugggcagcgag

SEQ ID NO: 40483 - RNA, 20 nt, Artificial Sequence
  Synthetic oligonucleotide: BID-112
cuauucuucccaagcgggag

SEQ ID NO: 40484 - RNA, 20 nt, Artificial Sequence
  Synthetic oligonucleotide: BID-107
ggaaccguuguugaccugag

SEQ ID NO: 40485 - RNA, 20 nt, Artificial Sequence
  Synthetic oligonucleotide: BID-110
cucccgcuugggaagaauag

SEQ ID NO: 40486 - RNA, 20 nt, Artificial Sequence
  Synthetic oligonucleotide: BID-9
ugauggcucggugggcagcg

SEQ ID NO: 40487 - RNA, 20 nt, Artificial Sequence
  Synthetic oligonucleotide: BID-213
gugagggccugaggaccgcg

SEQ ID NO: 40488 - RNA, 20 nt, Artificial Sequence
  Synthetic oligonucleotide: BID-215
ugcuguccccgaccugggcg

SEQ ID NO: 40489 - RNA, 20 nt, Artificial Sequence
  Synthetic oligonucleotide: BID-218
caggcaccucgcccaggucg

SEQ ID NO: 40490 - RNA, 20 nt, Artificial Sequence
  Synthetic oligonucleotide: BID-199
gaacaccagccggucggagg

SEQ ID NO: 40491 - RNA, 20 nt, Artificial Sequence
  Synthetic oligonucleotide: BID-195
aggccguucaccaggcccgg

SEQ ID NO: 40492 - RNA, 20 nt, Artificial Sequence
  Synthetic oligonucleotide: BID-8
cuggggucaugauggcucgg

SEQ ID NO: 40493 - RNA, 20 nt, Artificial Sequence
  Synthetic oligonucleotide: BID-200
caggaacaccagccggucgg

SEQ ID NO: 40494 - RNA, 20 nt, Artificial Sequence
  Synthetic oligonucleotide: BID-134
ucaucguagcccucccacug

SEQ ID NO: 40495 - RNA, 20 nt, Artificial Sequence
  Synthetic oligonucleotide: BID-118
cuggaaccguuguugaccug

SEQ ID NO: 40496 - RNA, 20 nt, Artificial Sequence
  Synthetic oligonucleotide: BID-17
cggauucuguaagugggcug

SEQ ID NO: 40497 - RNA, 20 nt, Artificial Sequence
  Synthetic oligonucleotide: BID-4
acgaaugugcagcggugcug

SEQ ID NO: 40498 - RNA, 20 nt, Artificial Sequence
  Synthetic oligonucleotide: BID-292
agaaccuacgcaccuacgug

SEQ ID NO: 40499 - RNA, 20 nt, Artificial Sequence
  Synthetic oligonucleotide: BID-109
cucaucguagcccucccacu

SEQ ID NO: 40500 - RNA, 20 nt, Artificial Sequence
  Synthetic oligonucleotide: BID-61
ucccuuuccaggucgccacu

SEQ ID NO: 40501 - RNA, 20 nt, Artificial Sequence
  Synthetic oligonucleotide: BID-116
cgcagagagcuggacgcacu

SEQ ID NO: 40502 - RNA, 20 nt, Artificial Sequence
  Synthetic oligonucleotide: BID-202
guccaugcuguccccgaccu

SEQ ID NO: 40503 - RNA, 20 nt, Artificial Sequence
  Synthetic oligonucleotide: BID-5
gcggauucuguaagugggcu

SEQ ID NO: 40504 - RNA, 20 nt, Artificial Sequence
  Synthetic oligonucleotide: BID-14
uacgaaugugcagcggugcu

SEQ ID NO: 40505 - RNA, 20 nt, Artificial Sequence
  Synthetic oligonucleotide: BID-319
cgugugacuggccaccuucu

SEQ ID NO: 40506 - RNA, 20 nt, Artificial Sequence
  Synthetic oligonucleotide: BID-15
acagugcggauucuguaagu

SEQ ID NO: 40507 - RNA, 20 nt, Artificial Sequence
  Synthetic oligonucleotide: BID-312
ucuggcuaagcuccucacgu

SEQ ID NO: 40508 - RNA, 20 nt, Artificial Sequence
  Synthetic oligonucleotide: BID-204
ugagggccugaggaccgcgu

SEQ ID NO: 40509 - RNA, 20 nt, Artificial Sequence
  Synthetic oligonucleotide: BID-313
agcuccucacguaggugcgu

SEQ ID NO: 40510 - RNA, 20 nt, Artificial Sequence
  Synthetic oligonucleotide: BID-214
gcucaggaacaccagccggu

SEQ ID NO: 40511 - RNA, 20 nt, Artificial Sequence
  Synthetic oligonucleotide: BID-3
uggggucaugauggcucggu

SEQ ID NO: 40512 - RNA, 20 nt, Artificial Sequence
  Synthetic oligonucleotide: BID-113
cgcagcagccacucccgcuu

SEQ ID NO: 40513 - RNA, 20 nt, Artificial Sequence
  Synthetic oligonucleotide: BID-120
aucacaaaccuacugguguu

SEQ ID NO: 40514 - RNA, 17 nt, Artificial Sequence
  Synthetic oligonucleotide: BID-192
ggggaaggagguggggc

SEQ ID NO: 40515 - RNA, 20 nt, Artificial Sequence
  Synthetic oligonucleotide: BID-135
guuguugaccugaggggaaa

SEQ ID NO: 40516 - RNA, 20 nt, Artificial Sequence
  Synthetic oligonucleotide: BID-127
cuuuccccucaggucaacaa

SEQ ID NO: 40517 - RNA, 20 nt, Artificial Sequence
  Synthetic oligonucleotide: BID-310
agggaaggagcugaccucaa

SEQ ID NO: 40518 - RNA, 20 nt, Artificial Sequence
  Synthetic oligonucleotide: BID-2540
uccauccccuagagcaagaa

SEQ ID NO: 40519 - RNA, 20 nt, Artificial Sequence
  Synthetic oligonucleotide: BID-285
gcaggccuacccuagagaca

SEQ ID NO: 40520 - RNA, 20 nt, Artificial Sequence
  Synthetic oligonucleotide: BID-66
cugccgcgcugcccaggcca

SEQ ID NO: 40521 - RNA, 20 nt, Artificial Sequence
  Synthetic oligonucleotide: BID-327
ggccugcagcagcugcucca

SEQ ID NO: 40522 - RNA, 20 nt, Artificial Sequence
  Synthetic oligonucleotide: BID-73
gccucugaccucacagucca

SEQ ID NO: 40523 - RNA, 20 nt, Artificial Sequence
  Synthetic oligonucleotide: BID-322
cagcagggccagcaccagca

SEQ ID NO: 40524 - RNA, 20 nt, Artificial Sequence
  Synthetic oligonucleotide: BID-321
caccuucuuggccagcagca

SEQ ID NO: 40525 - RNA, 20 nt, Artificial Sequence
  Synthetic oligonucleotide: BID-316
gugaaagacaucacggagca

SEQ ID NO: 40526 - RNA, 20 nt, Artificial Sequence
  Synthetic oligonucleotide: BID-227
ucagaaucuguguucaggca

SEQ ID NO: 40527 - RNA, 20 nt, Artificial Sequence
  Synthetic oligonucleotide: BID-225
gcugguguuccugagcugca

SEQ ID NO: 40528 - RNA, 20 nt, Artificial Sequence
  Synthetic oligonucleotide: BID-315
cuguugugugaaagacauca

SEQ ID NO: 40529 - RNA, 20 nt, Artificial Sequence
  Synthetic oligonucleotide: BID-290
ggcccugcugcuggccaaga

SEQ ID NO: 40530 - RNA, 20 nt, Artificial Sequence
  Synthetic oligonucleotide: BID-286
cuacccuagagacauggaga

SEQ ID NO: 40531 - RNA, 20 nt, Artificial Sequence
  Synthetic oligonucleotide: BID-317
aagacaucacggagcaagga

SEQ ID NO: 40532 - RNA, 20 nt, Artificial Sequence
  Synthetic oligonucleotide: BID-2541
uccuuucuugcucuagggga

SEQ ID NO: 40533 - RNA, 20 nt, Artificial Sequence
  Synthetic oligonucleotide: BID-147
gugcuggcuccccaguggga

SEQ ID NO: 40534 - RNA, 20 nt, Artificial Sequence
  Synthetic oligonucleotide: BID-20
cagcggugcuggggucauga

SEQ ID NO: 40535 - RNA, 20 nt, Artificial Sequence
  Synthetic oligonucleotide: BID-208
cggucggaggaggugaguga

SEQ ID NO: 40536 - RNA, 20 nt, Artificial Sequence
  Synthetic oligonucleotide: BID-2542
uuuucuccuuucuugcucua

SEQ ID NO: 40537 - RNA, 20 nt, Artificial Sequence
  Synthetic oligonucleotide: BID-324
ucuccuucuccaugucucua

SEQ ID NO: 40538 - RNA, 20 nt, Artificial Sequence
  Synthetic oligonucleotide: BID-121
ucccacuggggagccagcac

SEQ ID NO: 40539 - RNA, 20 nt, Artificial Sequence
  Synthetic oligonucleotide: BID-222
ccucacucaccuccuccgac

SEQ ID NO: 40540 - RNA, 20 nt, Artificial Sequence
  Synthetic oligonucleotide: BID-279
ugugccccucugugcaggac

SEQ ID NO: 40541 - RNA, 20 nt, Artificial Sequence
  Synthetic oligonucleotide: BID-2543
gacaguuccagaagugugac

SEQ ID NO: 40542 - RNA, 20 nt, Artificial Sequence
  Synthetic oligonucleotide: BID-334
acagaggggcacacagaacc

SEQ ID NO: 40543 - RNA, 20 nt, Artificial Sequence
  Synthetic oligonucleotide: BID-57
ccacugggacacugugaacc

SEQ ID NO: 40544 - RNA, 20 nt, Artificial Sequence
  Synthetic oligonucleotide: BID-228
gcagggccaggccguucacc

SEQ ID NO: 40545 - RNA, 20 nt, Artificial Sequence
  Synthetic oligonucleotide: BID-282
gcaggaccggaacagggacc

SEQ ID NO: 40546 - RNA, 20 nt, Artificial Sequence
  Synthetic oligonucleotide: BID-283
cagggaccuggccacugccc

SEQ ID NO: 40547 - RNA, 20 nt, Artificial Sequence
  Synthetic oligonucleotide: BID-2544
gaaaggggagucaggaagcc

SEQ ID NO: 40548 - RNA, 20 nt, Artificial Sequence
  Synthetic oligonucleotide: BID-229
gccaggccguucaccaggcc

SEQ ID NO: 40549 - RNA, 20 nt, Artificial Sequence
  Synthetic oligonucleotide: BID-21
cugugcuccuccagccggcc

SEQ ID NO: 40550 - RNA, 20 nt, Artificial Sequence
  Synthetic oligonucleotide: BID-233
uguuccugagcugcagggcc

SEQ ID NO: 40551 - RNA, 20 nt, Artificial Sequence
  Synthetic oligonucleotide: BID-19
ucggugggcagcgaggggcc

SEQ ID NO: 40552 - RNA, 20 nt, Artificial Sequence
  Synthetic oligonucleotide: BID-70
ugaccucacaguccauggcc

SEQ ID NO: 40553 - RNA, 20 nt, Artificial Sequence
  Synthetic oligonucleotide: BID-329
gcugcuccagggcaguggcc

SEQ ID NO: 40554 - RNA, 20 nt, Artificial Sequence
  Synthetic oligonucleotide: BID-326
aggccugcagcagcugcucc

SEQ ID NO: 40555 - RNA, 20 nt, Artificial Sequence
  Synthetic oligonucleotide: BID-77
cacucugugugucccuuucc

SEQ ID NO: 40556 - RNA, 20 nt, Artificial Sequence
  Synthetic oligonucleotide: BID-123
ugccucuauucuucccaagc

SEQ ID NO: 40557 - RNA, 20 nt, Artificial Sequence
  Synthetic oligonucleotide: BID-2545
ggaaaggggagucaggaagc

SEQ ID NO: 40558 - RNA, 20 nt, Artificial Sequence
  Synthetic oligonucleotide: BID-221
ugcagcucaggaacaccagc

SEQ ID NO: 40559 - RNA, 20 nt, Artificial Sequence
  Synthetic oligonucleotide: BID-13
ccgcacugugcuccuccagc

SEQ ID NO: 40560 - RNA, 20 nt, Artificial Sequence
  Synthetic oligonucleotide: BID-320
ccaccuucuuggccagcagc

SEQ ID NO: 40561 - RNA, 20 nt, Artificial Sequence
  Synthetic oligonucleotide: BID-124
caacagcuuccgcagagagc

SEQ ID NO: 40562 - RNA, 20 nt, Artificial Sequence
  Synthetic oligonucleotide: BID-226
uucagaaucuguguucaggc

SEQ ID NO: 40563 - RNA, 20 nt, Artificial Sequence
  Synthetic oligonucleotide: BID-126
gaugcacucaucccugaggc

SEQ ID NO: 40564 - RNA, 20 nt, Artificial Sequence
  Synthetic oligonucleotide: BID-23
cagcgaggggccgggccggc

SEQ ID NO: 40565 - RNA, 20 nt, Artificial Sequence
  Synthetic oligonucleotide: BID-132
aauagaggcagguaggcggc

SEQ ID NO: 40566 - RNA, 20 nt, Artificial Sequence
  Synthetic oligonucleotide: BID-29
ugggcagcgaggggccgggc

SEQ ID NO: 40567 - RNA, 20 nt, Artificial Sequence
  Synthetic oligonucleotide: BID-24
cucggugggcagcgaggggc

SEQ ID NO: 40568 - RNA, 20 nt, Artificial Sequence
  Synthetic oligonucleotide: BID-22
ucuguaagugggcugggggc

SEQ ID NO: 40569 - RNA, 20 nt, Artificial Sequence
  Synthetic oligonucleotide: BID-287
ggagaaggagaagaccaugc

SEQ ID NO: 40570 - RNA, 20 nt, Artificial Sequence
  Synthetic oligonucleotide: BID-69
ucagaggccagauccccugc

SEQ ID NO: 40571 - RNA, 20 nt, Artificial Sequence
  Synthetic oligonucleotide: BID-235
ggcugguguuccugagcugc

SEQ ID NO: 40572 - RNA, 20 nt, Artificial Sequence
  Synthetic oligonucleotide: BID-289
gcuggugcuggcccugcugc

SEQ ID NO: 40573 - RNA, 20 nt, Artificial Sequence
  Synthetic oligonucleotide: BID-284
ugcccuggagcagcugcugc

SEQ ID NO: 40574 - RNA, 20 nt, Artificial Sequence
  Synthetic oligonucleotide: BID-288
ggagaagaccaugcuggugc

SEQ ID NO: 40575 - RNA, 20 nt, Artificial Sequence
  Synthetic oligonucleotide: BID-278
uucugugugccccucugugc

SEQ ID NO: 40576 - RNA, 20 nt, Artificial Sequence
  Synthetic oligonucleotide: BID-224
aaagucaagaagacaucauc

SEQ ID NO: 40577 - RNA, 20 nt, Artificial Sequence
  Synthetic oligonucleotide: BID-146
ccugacuccccuuuccccuc

SEQ ID NO: 40578 - RNA, 20 nt, Artificial Sequence
  Synthetic oligonucleotide: BID-232
acggccuggcccugcagcuc

SEQ ID NO: 40579 - RNA, 20 nt, Artificial Sequence
  Synthetic oligonucleotide: BID-144
ccugaggggaaaggggaguc

SEQ ID NO: 40580 - RNA, 20 nt, Artificial Sequence
  Synthetic oligonucleotide: BID-234
ccaggcaccucgcccagguc

SEQ ID NO: 40581 - RNA, 20 nt, Artificial Sequence
  Synthetic oligonucleotide: BID-206
cgaggugccuggcaauauuc

SEQ ID NO: 40582 - RNA, 20 nt, Artificial Sequence
  Synthetic oligonucleotide: BID-330
caguggccaggucccuguuc

SEQ ID NO: 40583 - RNA, 20 nt, Artificial Sequence
  Synthetic oligonucleotide: BID-220
gacuuucagaaucuguguuc

SEQ ID NO: 40584 - RNA, 20 nt, Artificial Sequence
  Synthetic oligonucleotide: BID-311
cucaaggguucuuacauuuc

SEQ ID NO: 40585 - RNA, 20 nt, Artificial Sequence
  Synthetic oligonucleotide: BID-130
uuguugaccugaggggaaag

SEQ ID NO: 40586 - RNA, 20 nt, Artificial Sequence
  Synthetic oligonucleotide: BID-141
cugccucuauucuucccaag

SEQ ID NO: 40587 - RNA, 20 nt, Artificial Sequence
  Synthetic oligonucleotide: BID-10
cacagugcggauucuguaag

SEQ ID NO: 40588 - RNA, 20 nt, Artificial Sequence
  Synthetic oligonucleotide: BID-139
ugccagugcuggcuccccag

SEQ ID NO: 40589 - RNA, 20 nt, Artificial Sequence
  Synthetic oligonucleotide: BID-62
ccugguucacagugucccag

SEQ ID NO: 40590 - RNA, 20 nt, Artificial Sequence
  Synthetic oligonucleotide: BID-230
cagaaucuguguucaggcag

SEQ ID NO: 40591 - RNA, 20 nt, Artificial Sequence
  Synthetic oligonucleotide: BID-328
cagcagcugcuccagggcag

SEQ ID NO: 40592 - RNA, 20 nt, Artificial Sequence
  Synthetic oligonucleotide: BID-72
gccauggacugugaggucag

SEQ ID NO: 40593 - RNA, 20 nt, Artificial Sequence
  Synthetic oligonucleotide: BID-78
cuggaaagggacacacagag

SEQ ID NO: 40594 - RNA, 20 nt, Artificial Sequence
  Synthetic oligonucleotide: BID-2546
uuucuccuuucuugcucuag

SEQ ID NO: 40595 - RNA, 20 nt, Artificial Sequence
  Synthetic oligonucleotide: BID-71
aguccauggccugggcagcg

SEQ ID NO: 40596 - RNA, 20 nt, Artificial Sequence
  Synthetic oligonucleotide: BID-138
gagccagcacuggcagcucg

SEQ ID NO: 40597 - RNA, 20 nt, Artificial Sequence
  Synthetic oligonucleotide: BID-291
ccugcugcuggccaagaagg

SEQ ID NO: 40598 - RNA, 20 nt, Artificial Sequence
  Synthetic oligonucleotide: BID-149
gaagaauagaggcagguagg

SEQ ID NO: 40599 - RNA, 20 nt, Artificial Sequence
  Synthetic oligonucleotide: BID-223
aaucuguguucaggcagggg

SEQ ID NO: 40600 - RNA, 20 nt, Artificial Sequence
  Synthetic oligonucleotide: BID-142
agugcuggcuccccaguggg

SEQ ID NO: 40601 - RNA, 20 nt, Artificial Sequence
  Synthetic oligonucleotide: BID-74
aaagggacacacagaguggg

SEQ ID NO: 40602 - RNA, 20 nt, Artificial Sequence
  Synthetic oligonucleotide: BID-25
cgaggggccgggccggcugg

SEQ ID NO: 40603 - RNA, 20 nt, Artificial Sequence
  Synthetic oligonucleotide: BID-16
ggauucuguaagugggcugg

SEQ ID NO: 40604 - RNA, 20 nt, Artificial Sequence
  Synthetic oligonucleotide: BID-122
uguugucagaacagcuuugg

SEQ ID NO: 40605 - RNA, 20 nt, Artificial Sequence
  Synthetic oligonucleotide: BID-75
gucagaggccagauccccug

SEQ ID NO: 40606 - RNA, 20 nt, Artificial Sequence
  Synthetic oligonucleotide: BID-125
uugugaugcacucaucccug

SEQ ID NO: 40607 - RNA, 20 nt, Artificial Sequence
  Synthetic oligonucleotide: BID-238
aggaggugagugagggccug

SEQ ID NO: 40608 - RNA, 20 nt, Artificial Sequence
  Synthetic oligonucleotide: BID-133
ccaagcgggaguggcugcug

SEQ ID NO: 40609 - RNA, 20 nt, Artificial Sequence
  Synthetic oligonucleotide: BID-131
ccagugcguccagcucucug

SEQ ID NO: 40610 - RNA, 20 nt, Artificial Sequence
  Synthetic oligonucleotide: BID-12
ccggcuggaggagcacagug

SEQ ID NO: 40611 - RNA, 20 nt, Artificial Sequence
  Synthetic oligonucleotide: BID-209
ccggucggaggaggugagug

SEQ ID NO: 40612 - RNA, 20 nt, Artificial Sequence
  Synthetic oligonucleotide: BID-67
ugcccaggccauggacugug

SEQ ID NO: 40613 - RNA, 20 nt, Artificial Sequence
  Synthetic oligonucleotide: BID-293
cagaaauguaagaacccuug

SEQ ID NO: 40614 - RNA, 20 nt, Artificial Sequence
  Synthetic oligonucleotide: BID-65
gaccucacaguccauggccu

SEQ ID NO: 40615 - RNA, 20 nt, Artificial Sequence
  Synthetic oligonucleotide: BID-137
ccgcagcagccacucccgcu

SEQ ID NO: 40616 - RNA, 20 nt, Artificial Sequence
  Synthetic oligonucleotide: BID-30
cuguaagugggcugggggcu

SEQ ID NO: 40617 - RNA, 20 nt, Artificial Sequence
  Synthetic oligonucleotide: BID-11
gugcuggggucaugauggcu

SEQ ID NO: 40618 - RNA, 20 nt, Artificial Sequence
  Synthetic oligonucleotide: BID-2547
uuuuucuccuuucuugcucu

SEQ ID NO: 40619 - RNA, 20 nt, Artificial Sequence
  Synthetic oligonucleotide: BID-323
uucuccuucuccaugucucu

SEQ ID NO: 40620 - RNA, 20 nt, Artificial Sequence
  Synthetic oligonucleotide: BID-140
ggaggaagccaaacaccagu

SEQ ID NO: 40621 - RNA, 20 nt, Artificial Sequence
  Synthetic oligonucleotide: BID-128
gccagugcuggcuccccagu

SEQ ID NO: 40622 - RNA, 20 nt, Artificial Sequence
  Synthetic oligonucleotide: BID-76
uggaaagggacacacagagu

SEQ ID NO: 40623 - RNA, 20 nt, Artificial Sequence
  Synthetic oligonucleotide: BID-68
acugugaaccaggagugagu

SEQ ID NO: 40624 - RNA, 20 nt, Artificial Sequence
  Synthetic oligonucleotide: BID-219
gccaggcaccucgcccaggu

SEQ ID NO: 40625 - RNA, 20 nt, Artificial Sequence
  Synthetic oligonucleotide: BID-145
ugggaagaauagaggcaggu

SEQ ID NO: 40626 - RNA, 20 nt, Artificial Sequence
  Synthetic oligonucleotide: BID-325
cuucuccaugucucuagggu

SEQ ID NO: 40627 - RNA, 20 nt, Artificial Sequence
  Synthetic oligonucleotide: BID-136
agcuguugucagaacagcuu

SEQ ID NO: 40628 - RNA, 18 nt, Artificial Sequence
  Synthetic oligonucleotide: BID-2548
gaccuggaaagggacaca

SEQ ID NO: 40629 - RNA, 19 nt, Artificial Sequence
  Synthetic oligonucleotide: BID-2549
cgaccuggaaagggacaca

SEQ ID NO: 40630 - RNA, 20 nt, Artificial Sequence
  Synthetic oligonucleotide: BID-549
gcgaccuggaaagggacaca

SEQ ID NO: 40631 - RNA, 18 nt, Artificial Sequence
  Synthetic oligonucleotide: BID-2550
cacauucguauuuguuga

SEQ ID NO: 40632 - RNA, 19 nt, Artificial Sequence
  Synthetic oligonucleotide: BID-2551
gcacauucguauuuguuga

SEQ ID NO: 40633 - RNA, 20 nt, Artificial Sequence
  Synthetic oligonucleotide: BID-554
ugcacauucguauuuguuga

SEQ ID NO: 40634 - RNA, 18 nt, Artificial Sequence
  Synthetic oligonucleotide: BID-2552
ccucuauucuucccaagc

SEQ ID NO: 40635 - RNA, 19 nt, Artificial Sequence
  Synthetic oligonucleotide: BID-2553
gccucuauucuucccaagc

SEQ ID NO: 40636 - RNA, 20 nt, Artificial Sequence
  Synthetic oligonucleotide: BID-123
ugccucuauucuucccaagc

SEQ ID NO: 40637 - RNA, 18 nt, Artificial Sequence
  Synthetic oligonucleotide: BID-2554
gccguucaccaggcccgg

SEQ ID NO: 40638 - RNA, 19 nt, Artificial Sequence
  Synthetic oligonucleotide: BID-2555
ggccguucaccaggcccgg

SEQ ID NO: 40639 - RNA, 20 nt, Artificial Sequence
  Synthetic oligonucleotide: BID-195
aggccguucaccaggcccgg

SEQ ID NO: 40640 - RNA, 18 nt, Artificial Sequence
  Synthetic oligonucleotide: BID-2556
gcugcacauucguauuug

SEQ ID NO: 40641 - RNA, 19 nt, Artificial Sequence
  Synthetic oligonucleotide: BID-2557
cgcugcacauucguauuug

SEQ ID NO: 40642 - RNA, 20 nt, Artificial Sequence
  Synthetic oligonucleotide: BID-553
ccgcugcacauucguauuug

SEQ ID NO: 40643 - RNA, 18 nt, Artificial Sequence
  Synthetic oligonucleotide: BID-2558
gaggugccuggcaauauu

SEQ ID NO: 40644 - RNA, 19 nt, Artificial Sequence
  Synthetic oligonucleotide: BID-2559
cgaggugccuggcaauauu

SEQ ID NO: 40645 - RNA, 20 nt, Artificial Sequence
  Synthetic oligonucleotide: BID-510
gcgaggugccuggcaauauu

SEQ ID NO: 40646 - RNA, 18 nt, Artificial Sequence
  Synthetic oligonucleotide: BID-2560
ugaugucuucuugacuuu

SEQ ID NO: 40647 - RNA, 19 nt, Artificial Sequence
  Synthetic oligonucleotide: BID-2561
augaugucuucuugacuuu

SEQ ID NO: 40648 - RNA, 20 nt, Artificial Sequence
  Synthetic oligonucleotide: BID-511
gaugaugucuucuugacuuu

SEQ ID NO: 40649 - RNA, 18 nt, Artificial Sequence
  Synthetic oligonucleotide: BID-2562
gaugucuuucacacaaca

SEQ ID NO: 40650 - RNA, 19 nt, Artificial Sequence
  Synthetic oligonucleotide: BID-2563
ugaugucuuucacacaaca

SEQ ID NO: 40651 - RNA, 20 nt, Artificial Sequence
  Synthetic oligonucleotide: BID-627
gugaugucuuucacacaaca

SEQ ID NO: 40652 - RNA, 18 nt, Artificial Sequence
  Synthetic oligonucleotide: BID-2564
acugggacacugugaacc

SEQ ID NO: 40653 - RNA, 19 nt, Artificial Sequence
  Synthetic oligonucleotide: BID-2565
cacugggacacugugaacc

SEQ ID NO: 40654 - RNA, 20 nt, Artificial Sequence
  Synthetic oligonucleotide: BID-57
ccacugggacacugugaacc

SEQ ID NO: 40655 - RNA, 18 nt, Artificial Sequence
  Synthetic oligonucleotide: BID-2566
acgaaugugcagcggugc

SEQ ID NO: 40656 - RNA, 19 nt, Artificial Sequence
  Synthetic oligonucleotide: BID-2567
uacgaaugugcagcggugc

SEQ ID NO: 40657 - RNA, 20 nt, Artificial Sequence
  Synthetic oligonucleotide: BID-1
auacgaaugugcagcggugc

SEQ ID NO: 40658 - RNA, 18 nt, Artificial Sequence
  Synthetic oligonucleotide: BID-2568
aacaacgguuccagccuc

SEQ ID NO: 40659 - RNA, 19 nt, Artificial Sequence
  Synthetic oligonucleotide: BID-2569
caacaacgguuccagccuc

SEQ ID NO: 40660 - RNA, 20 nt, Artificial Sequence
  Synthetic oligonucleotide: BID-106
ucaacaacgguuccagccuc

SEQ ID NO: 40661 - RNA, 18 nt, Artificial Sequence
  Synthetic oligonucleotide: BID-2570
accagccggucggaggag

SEQ ID NO: 40662 - RNA, 19 nt, Artificial Sequence
  Synthetic oligonucleotide: BID-2571
caccagccggucggaggag

SEQ ID NO: 40663 - RNA, 20 nt, Artificial Sequence
  Synthetic oligonucleotide: BID-425
acaccagccggucggaggag

SEQ ID NO: 40664 - RNA, 18 nt, Artificial Sequence
  Synthetic oligonucleotide: BID-2572
acgguuccagccucaggg

SEQ ID NO: 40665 - RNA, 19 nt, Artificial Sequence
  Synthetic oligonucleotide: BID-2573
aacgguuccagccucaggg

SEQ ID NO: 40666 - RNA, 20 nt, Artificial Sequence
  Synthetic oligonucleotide: BID-392
caacgguuccagccucaggg

SEQ ID NO: 40667 - RNA, 18 nt, Artificial Sequence
  Synthetic oligonucleotide: BID-2574
cagccacucccgcuuggg

SEQ ID NO: 40668 - RNA, 19 nt, Artificial Sequence
  Synthetic oligonucleotide: BID-2575
gcagccacucccgcuuggg

SEQ ID NO: 40669 - RNA, 20 nt, Artificial Sequence
  Synthetic oligonucleotide: BID-406
agcagccacucccgcuuggg

SEQ ID NO: 40670 - RNA, 18 nt, Artificial Sequence
  Synthetic oligonucleotide: BID-2576
ucagaggccagauccccu

SEQ ID NO: 40671 - RNA, 19 nt, Artificial Sequence
  Synthetic oligonucleotide: BID-2577
gucagaggccagauccccu

SEQ ID NO: 40672 - RNA, 20 nt, Artificial Sequence
  Synthetic oligonucleotide: BID-389
ggucagaggccagauccccu

SEQ ID NO: 40673 - RNA, 18 nt, Artificial Sequence
  Synthetic oligonucleotide: BID-2578
cggcuggaggagcacagu

SEQ ID NO: 40674 - RNA, 19 nt, Artificial Sequence
  Synthetic oligonucleotide: BID-2579
ccggcuggaggagcacagu

SEQ ID NO: 40675 - RNA, 20 nt, Artificial Sequence
  Synthetic oligonucleotide: BID-372
gccggcuggaggagcacagu

SEQ ID NO: 40676 - RNA, 21 nt, Artificial Sequence
  Synthetic oligonucleotide: BID-2580
ggcgaccuggaaagggacaca

SEQ ID NO: 40677 - RNA, 22 nt, Artificial Sequence
  Synthetic oligonucleotide: BID-2581
uggcgaccuggaaagggacaca

SEQ ID NO: 40678 - RNA, 23 nt, Artificial Sequence
  Synthetic oligonucleotide: BID-2582
guggcgaccuggaaagggacaca

SEQ ID NO: 40679 - RNA, 24 nt, Artificial Sequence
  Synthetic oligonucleotide: BID-2583
aguggcgaccuggaaagggacaca

SEQ ID NO: 40680 - RNA, 18 nt, Artificial Sequence
  Synthetic oligonucleotide: BID-2584
uucguauuuguugaauga

SEQ ID NO: 40681 - RNA, 19 nt, Artificial Sequence
  Synthetic oligonucleotide: BID-2585
auucguauuuguugaauga

SEQ ID NO: 40682 - RNA, 20 nt, Artificial Sequence
  Synthetic oligonucleotide: BID-555
cauucguauuuguugaauga

SEQ ID NO: 40683 - RNA, 21 nt, Artificial Sequence
  Synthetic oligonucleotide: BID-2586
acauucguauuuguugaauga

SEQ ID NO: 40684 - RNA, 22 nt, Artificial Sequence
  Synthetic oligonucleotide: BID-2587
cacauucguauuuguugaauga

SEQ ID NO: 40685 - RNA, 23 nt, Artificial Sequence
  Synthetic oligonucleotide: BID-2588
gcacauucguauuuguugaauga

SEQ ID NO: 40686 - RNA, 24 nt, Artificial Sequence
  Synthetic oligonucleotide: BID-2589
ugcacauucguauuuguugaauga

SEQ ID NO: 40687 - RNA, 21 nt, Artificial Sequence
  Synthetic oligonucleotide: BID-2590
cugcacauucguauuuguuga

SEQ ID NO: 40688 - RNA, 22 nt, Artificial Sequence
  Synthetic oligonucleotide: BID-2591
gcugcacauucguauuuguuga

SEQ ID NO: 40689 - RNA, 23 nt, Artificial Sequence
  Synthetic oligonucleotide: BID-2592
cgcugcacauucguauuuguuga

SEQ ID NO: 40690 - RNA, 24 nt, Artificial Sequence
  Synthetic oligonucleotide: BID-2593
ccgcugcacauucguauuuguuga

SEQ ID NO: 40691 - RNA, 18 nt, Artificial Sequence
  Synthetic oligonucleotide: BID-2594
cagcccccagcccacuua

SEQ ID NO: 40692 - RNA, 19 nt, Artificial Sequence
  Synthetic oligonucleotide: BID-2595
ccagcccccagcccacuua

SEQ ID NO: 40693 - RNA, 20 nt, Artificial Sequence
  Synthetic oligonucleotide: BID-551
cccagcccccagcccacuua

SEQ ID NO: 40694 - RNA, 21 nt, Artificial Sequence
  Synthetic oligonucleotide: BID-2596
gcccagcccccagcccacuua

SEQ ID NO: 40695 - RNA, 22 nt, Artificial Sequence
  Synthetic oligonucleotide: BID-2597
ggcccagcccccagcccacuua

SEQ ID NO: 40696 - RNA, 23 nt, Artificial Sequence
  Synthetic oligonucleotide: BID-2598
aggcccagcccccagcccacuua

SEQ ID NO: 40697 - RNA, 24 nt, Artificial Sequence
  Synthetic oligonucleotide: BID-2599
aaggcccagcccccagcccacuua

SEQ ID NO: 40698 - RNA, 18 nt, Artificial Sequence
  Synthetic oligonucleotide: BID-2600
caagaaaggagaaaaagc

SEQ ID NO: 40699 - RNA, 19 nt, Artificial Sequence
  Synthetic oligonucleotide: BID-2601
gcaagaaaggagaaaaagc

SEQ ID NO: 40700 - RNA, 20 nt, Artificial Sequence
  Synthetic oligonucleotide: BID-2602
agcaagaaaggagaaaaagc

SEQ ID NO: 40701 - RNA, 21 nt, Artificial Sequence
  Synthetic oligonucleotide: BID-2603
gagcaagaaaggagaaaaagc

SEQ ID NO: 40702 - RNA, 22 nt, Artificial Sequence
  Synthetic oligonucleotide: BID-2604
agagcaagaaaggagaaaaagc

SEQ ID NO: 40703 - RNA, 23 nt, Artificial Sequence
  Synthetic oligonucleotide: BID-2605
uagagcaagaaaggagaaaaagc

SEQ ID NO: 40704 - RNA, 24 nt, Artificial Sequence
  Synthetic oligonucleotide: BID-2606
cuagagcaagaaaggagaaaaagc

SEQ ID NO: 40705 - RNA, 21 nt, Artificial Sequence
  Synthetic oligonucleotide: BID-2607
cugccucuauucuucccaagc

SEQ ID NO: 40706 - RNA, 22 nt, Artificial Sequence
  Synthetic oligonucleotide: BID-2608
ccugccucuauucuucccaagc

SEQ ID NO: 40707 - RNA, 23 nt, Artificial Sequence
  Synthetic oligonucleotide: BID-2609
accugccucuauucuucccaagc

SEQ ID NO: 40708 - RNA, 24 nt, Artificial Sequence
  Synthetic oligonucleotide: BID-2610
uaccugccucuauucuucccaagc

SEQ ID NO: 40709 - RNA, 18 nt, Artificial Sequence
  Synthetic oligonucleotide: BID-2611
ucuccuucuccaugucuc

SEQ ID NO: 40710 - RNA, 19 nt, Artificial Sequence
  Synthetic oligonucleotide: BID-2612
uucuccuucuccaugucuc

SEQ ID NO: 40711 - RNA, 20 nt, Artificial Sequence
  Synthetic oligonucleotide: BID-663
cuucuccuucuccaugucuc

SEQ ID NO: 40712 - RNA, 21 nt, Artificial Sequence
  Synthetic oligonucleotide: BID-2613
ucuucuccuucuccaugucuc

SEQ ID NO: 40713 - RNA, 22 nt, Artificial Sequence
  Synthetic oligonucleotide: BID-2614
gucuucuccuucuccaugucuc

SEQ ID NO: 40714 - RNA, 23 nt, Artificial Sequence
  Synthetic oligonucleotide: BID-2615
ggucuucuccuucuccaugucuc

SEQ ID NO: 40715 - RNA, 24 nt, Artificial Sequence
  Synthetic oligonucleotide: BID-2616
uggucuucuccuucuccaugucuc

SEQ ID NO: 40716 - RNA, 18 nt, Artificial Sequence
  Synthetic oligonucleotide: BID-2617
guugaccugaggggaaag

SEQ ID NO: 40717 - RNA, 19 nt, Artificial Sequence
  Synthetic oligonucleotide: BID-2618
uguugaccugaggggaaag

SEQ ID NO: 40718 - RNA, 20 nt, Artificial Sequence
  Synthetic oligonucleotide: BID-130
uuguugaccugaggggaaag

SEQ ID NO: 40719 - RNA, 21 nt, Artificial Sequence
  Synthetic oligonucleotide: BID-2619
guuguugaccugaggggaaag

SEQ ID NO: 40720 - RNA, 22 nt, Artificial Sequence
  Synthetic oligonucleotide: BID-2620
cguuguugaccugaggggaaag

SEQ ID NO: 40721 - RNA, 23 nt, Artificial Sequence
  Synthetic oligonucleotide: BID-2621
ccguuguugaccugaggggaaag

SEQ ID NO: 40722 - RNA, 24 nt, Artificial Sequence
  Synthetic oligonucleotide: BID-2622
accguuguugaccugaggggaaag

SEQ ID NO: 40723 - RNA, 21 nt, Artificial Sequence
  Synthetic oligonucleotide: BID-2623
caggccguucaccaggcccgg

SEQ ID NO: 40724 - RNA, 22 nt, Artificial Sequence
  Synthetic oligonucleotide: BID-2624
ccaggccguucaccaggcccgg

SEQ ID NO: 40725 - RNA, 23 nt, Artificial Sequence
  Synthetic oligonucleotide: BID-2625
gccaggccguucaccaggcccgg

SEQ ID NO: 40726 - RNA, 24 nt, Artificial Sequence
  Synthetic oligonucleotide: BID-2626
ggccaggccguucaccaggcccgg

SEQ ID NO: 40727 - RNA, 21 nt, Artificial Sequence
  Synthetic oligonucleotide: BID-2627
accgcugcacauucguauuug

SEQ ID NO: 40728 - RNA, 22 nt, Artificial Sequence
  Synthetic oligonucleotide: BID-2628
caccgcugcacauucguauuug

SEQ ID NO: 40729 - RNA, 23 nt, Artificial Sequence
  Synthetic oligonucleotide: BID-2629
gcaccgcugcacauucguauuug

SEQ ID NO: 40730 - RNA, 24 nt, Artificial Sequence
  Synthetic oligonucleotide: BID-2630
agcaccgcugcacauucguauuug

SEQ ID NO: 40731 - RNA, 21 nt, Artificial Sequence
  Synthetic oligonucleotide: BID-2631
ggcgaggugccuggcaauauu

SEQ ID NO: 40732 - RNA, 22 nt, Artificial Sequence
  Synthetic oligonucleotide: BID-2632
gggcgaggugccuggcaauauu

SEQ ID NO: 40733 - RNA, 23 nt, Artificial Sequence
  Synthetic oligonucleotide: BID-2633
ugggcgaggugccuggcaauauu

SEQ ID NO: 40734 - RNA, 24 nt, Artificial Sequence
  Synthetic oligonucleotide: BID-2634
cugggcgaggugccuggcaauauu

SEQ ID NO: 40735 - RNA, 21 nt, Artificial Sequence
  Synthetic oligonucleotide: BID-2635
ggaugaugucuucuugacuuu

SEQ ID NO: 40736 - RNA, 22 nt, Artificial Sequence
  Synthetic oligonucleotide: BID-2636
cggaugaugucuucuugacuuu

SEQ ID NO: 40737 - RNA, 23 nt, Artificial Sequence
  Synthetic oligonucleotide: BID-2637
ccggaugaugucuucuugacuuu

SEQ ID NO: 40738 - RNA, 24 nt, Artificial Sequence
  Synthetic oligonucleotide: BID-2638
uccggaugaugucuucuugacuuu

SEQ ID NO: 40739 - RNA, 21 nt, Artificial Sequence
  Synthetic oligonucleotide: BID-2639
cgugaugucuuucacacaaca

SEQ ID NO: 40740 - RNA, 22 nt, Artificial Sequence
  Synthetic oligonucleotide: BID-2640
ccgugaugucuuucacacaaca

SEQ ID NO: 40741 - RNA, 23 nt, Artificial Sequence
  Synthetic oligonucleotide: BID-2641
uccgugaugucuuucacacaaca

SEQ ID NO: 40742 - RNA, 24 nt, Artificial Sequence
  Synthetic oligonucleotide: BID-2642
cuccgugaugucuuucacacaaca

SEQ ID NO: 40743 - RNA, 18 nt, Artificial Sequence
  Synthetic oligonucleotide: BID-2643
ggacacugugaaccagga

SEQ ID NO: 40744 - RNA, 19 nt, Artificial Sequence
  Synthetic oligonucleotide: BID-2644
gggacacugugaaccagga

SEQ ID NO: 40745 - RNA, 20 nt, Artificial Sequence
  Synthetic oligonucleotide: BID-383
ugggacacugugaaccagga

SEQ ID NO: 40746 - RNA, 21 nt, Artificial Sequence
  Synthetic oligonucleotide: BID-2645
cugggacacugugaaccagga

SEQ ID NO: 40747 - RNA, 22 nt, Artificial Sequence
  Synthetic oligonucleotide: BID-2646
acugggacacugugaaccagga

SEQ ID NO: 40748 - RNA, 23 nt, Artificial Sequence
  Synthetic oligonucleotide: BID-2647
cacugggacacugugaaccagga

SEQ ID NO: 40749 - RNA, 24 nt, Artificial Sequence
  Synthetic oligonucleotide: BID-2648
ccacugggacacugugaaccagga

SEQ ID NO: 40750 - RNA, 18 nt, Artificial Sequence
  Synthetic oligonucleotide: BID-2649
uucuccuuucuugcucua

SEQ ID NO: 40751 - RNA, 19 nt, Artificial Sequence
  Synthetic oligonucleotide: BID-2650
uuucuccuuucuugcucua

SEQ ID NO: 40752 - RNA, 20 nt, Artificial Sequence
  Synthetic oligonucleotide: BID-2542
uuuucuccuuucuugcucua

SEQ ID NO: 40753 - RNA, 21 nt, Artificial Sequence
  Synthetic oligonucleotide: BID-2651
uuuuucuccuuucuugcucua

SEQ ID NO: 40754 - RNA, 22 nt, Artificial Sequence
  Synthetic oligonucleotide: BID-2652
cuuuuucuccuuucuugcucua

SEQ ID NO: 40755 - RNA, 23 nt, Artificial Sequence
  Synthetic oligonucleotide: BID-2653
gcuuuuucuccuuucuugcucua

SEQ ID NO: 40756 - RNA, 24 nt, Artificial Sequence
  Synthetic oligonucleotide: BID-2654
ggcuuuuucuccuuucuugcucua

SEQ ID NO: 40757 - RNA, 21 nt, Artificial Sequence
  Synthetic oligonucleotide: BID-2655
gccacugggacacugugaacc

SEQ ID NO: 40758 - RNA, 22 nt, Artificial Sequence
  Synthetic oligonucleotide: BID-2656
cgccacugggacacugugaacc

SEQ ID NO: 40759 - RNA, 23 nt, Artificial Sequence
  Synthetic oligonucleotide: BID-2657
ucgccacugggacacugugaacc

SEQ ID NO: 40760 - RNA, 24 nt, Artificial Sequence
  Synthetic oligonucleotide: BID-2658
gucgccacugggacacugugaacc

SEQ ID NO: 40761 - RNA, 21 nt, Artificial Sequence
  Synthetic oligonucleotide: BID-2659
aauacgaaugugcagcggugc

SEQ ID NO: 40762 - RNA, 22 nt, Artificial Sequence
  Synthetic oligonucleotide: BID-2660
aaauacgaaugugcagcggugc

SEQ ID NO: 40763 - RNA, 23 nt, Artificial Sequence
  Synthetic oligonucleotide: BID-2661
caaauacgaaugugcagcggugc

SEQ ID NO: 40764 - RNA, 24 nt, Artificial Sequence
  Synthetic oligonucleotide: BID-2662
acaaauacgaaugugcagcggugc

SEQ ID NO: 40765 - RNA, 18 nt, Artificial Sequence
  Synthetic oligonucleotide: BID-2663
agucaagaagacaucauc

SEQ ID NO: 40766 - RNA, 19 nt, Artificial Sequence
  Synthetic oligonucleotide: BID-2664
aagucaagaagacaucauc

SEQ ID NO: 40767 - RNA, 20 nt, Artificial Sequence
  Synthetic oligonucleotide: BID-224
aaagucaagaagacaucauc

SEQ ID NO: 40768 - RNA, 21 nt, Artificial Sequence
  Synthetic oligonucleotide: BID-2665
gaaagucaagaagacaucauc

SEQ ID NO: 40769 - RNA, 22 nt, Artificial Sequence
  Synthetic oligonucleotide: BID-2666
ugaaagucaagaagacaucauc

SEQ ID NO: 40770 - RNA, 23 nt, Artificial Sequence
  Synthetic oligonucleotide: BID-2667
cugaaagucaagaagacaucauc

SEQ ID NO: 40771 - RNA, 24 nt, Artificial Sequence
  Synthetic oligonucleotide: BID-2668
ucugaaagucaagaagacaucauc

SEQ ID NO: 40772 - RNA, 21 nt, Artificial Sequence
  Synthetic oligonucleotide: BID-2669
gucaacaacgguuccagccuc

SEQ ID NO: 40773 - RNA, 22 nt, Artificial Sequence
  Synthetic oligonucleotide: BID-2670
ggucaacaacgguuccagccuc

SEQ ID NO: 40774 - RNA, 23 nt, Artificial Sequence
  Synthetic oligonucleotide: BID-2671
aggucaacaacgguuccagccuc

SEQ ID NO: 40775 - RNA, 24 nt, Artificial Sequence
  Synthetic oligonucleotide: BID-2672
caggucaacaacgguuccagccuc

SEQ ID NO: 40776 - RNA, 21 nt, Artificial Sequence
  Synthetic oligonucleotide: BID-2673
aacaccagccggucggaggag

SEQ ID NO: 40777 - RNA, 22 nt, Artificial Sequence
  Synthetic oligonucleotide: BID-2674
gaacaccagccggucggaggag

SEQ ID NO: 40778 - RNA, 23 nt, Artificial Sequence
  Synthetic oligonucleotide: BID-2675
ggaacaccagccggucggaggag

SEQ ID NO: 40779 - RNA, 24 nt, Artificial Sequence
  Synthetic oligonucleotide: BID-2676
aggaacaccagccggucggaggag

SEQ ID NO: 40780 - RNA, 21 nt, Artificial Sequence
  Synthetic oligonucleotide: BID-2677
acaacgguuccagccucaggg

SEQ ID NO: 40781 - RNA, 22 nt, Artificial Sequence
  Synthetic oligonucleotide: BID-2678
aacaacgguuccagccucaggg

SEQ ID NO: 40782 - RNA, 23 nt, Artificial Sequence
  Synthetic oligonucleotide: BID-2679
caacaacgguuccagccucaggg

SEQ ID NO: 40783 - RNA, 24 nt, Artificial Sequence
  Synthetic oligonucleotide: BID-2680
ucaacaacgguuccagccucaggg

SEQ ID NO: 40784 - RNA, 21 nt, Artificial Sequence
  Synthetic oligonucleotide: BID-2681
cagcagccacucccgcuuggg

SEQ ID NO: 40785 - RNA, 22 nt, Artificial Sequence
  Synthetic oligonucleotide: BID-2682
gcagcagccacucccgcuuggg

SEQ ID NO: 40786 - RNA, 23 nt, Artificial Sequence
  Synthetic oligonucleotide: BID-2683
cgcagcagccacucccgcuuggg

SEQ ID NO: 40787 - RNA, 24 nt, Artificial Sequence
  Synthetic oligonucleotide: BID-2684
ccgcagcagccacucccgcuuggg

SEQ ID NO: 40788 - RNA, 18 nt, Artificial Sequence
  Synthetic oligonucleotide: BID-2685
uucauucauucaacaaau

SEQ ID NO: 40789 - RNA, 19 nt, Artificial Sequence
  Synthetic oligonucleotide: BID-2686
auucauucauucaacaaau

SEQ ID NO: 40790 - RNA, 20 nt, Artificial Sequence
  Synthetic oligonucleotide: BID-360
cauucauucauucaacaaau

SEQ ID NO: 40791 - RNA, 21 nt, Artificial Sequence
  Synthetic oligonucleotide: BID-2687
ucauucauucauucaacaaau

SEQ ID NO: 40792 - RNA, 22 nt, Artificial Sequence
  Synthetic oligonucleotide: BID-2688
uucauucauucauucaacaaau

SEQ ID NO: 40793 - RNA, 23 nt, Artificial Sequence
  Synthetic oligonucleotide: BID-2689
guucauucauucauucaacaaau

SEQ ID NO: 40794 - RNA, 24 nt, Artificial Sequence
  Synthetic oligonucleotide: BID-2690
gguucauucauucauucaacaaau

SEQ ID NO: 40795 - RNA, 21 nt, Artificial Sequence
  Synthetic oligonucleotide: BID-2691
aggucagaggccagauccccu

SEQ ID NO: 40796 - RNA, 22 nt, Artificial Sequence
  Synthetic oligonucleotide: BID-2692
gaggucagaggccagauccccu

SEQ ID NO: 40797 - RNA, 23 nt, Artificial Sequence
  Synthetic oligonucleotide: BID-2693
ugaggucagaggccagauccccu

SEQ ID NO: 40798 - RNA, 24 nt, Artificial Sequence
  Synthetic oligonucleotide: BID-2694
gugaggucagaggccagauccccu

SEQ ID NO: 40799 - RNA, 21 nt, Artificial Sequence
  Synthetic oligonucleotide: BID-2695
ggccggcuggaggagcacagu

SEQ ID NO: 40800 - RNA, 22 nt, Artificial Sequence
  Synthetic oligonucleotide: BID-2696
gggccggcuggaggagcacagu

SEQ ID NO: 40801 - RNA, 23 nt, Artificial Sequence
  Synthetic oligonucleotide: BID-2697
cgggccggcuggaggagcacagu

SEQ ID NO: 40802 - RNA, 24 nt, Artificial Sequence
  Synthetic oligonucleotide: BID-2698
ccgggccggcuggaggagcacagu

SEQ ID NO: 40803 - RNA, 18 nt, Artificial Sequence
  Synthetic oligonucleotide: BID-2699
uguugaccugaggggaaa

SEQ ID NO: 40804 - RNA, 19 nt, Artificial Sequence
  Synthetic oligonucleotide: BID-2700
uuguugaccugaggggaaa

SEQ ID NO: 40805 - RNA, 20 nt, Artificial Sequence
  Synthetic oligonucleotide: BID-135
guuguugaccugaggggaaa

SEQ ID NO: 40806 - RNA, 21 nt, Artificial Sequence
  Synthetic oligonucleotide: BID-2701
cguuguugaccugaggggaaa

SEQ ID NO: 40807 - RNA, 22 nt, Artificial Sequence
  Synthetic oligonucleotide: BID-2702
ccguuguugaccugaggggaaa

SEQ ID NO: 40808 - RNA, 23 nt, Artificial Sequence
  Synthetic oligonucleotide: BID-2703
accguuguugaccugaggggaaa

SEQ ID NO: 40809 - RNA, 24 nt, Artificial Sequence
  Synthetic oligonucleotide: BID-2704
aaccguuguugaccugaggggaaa

SEQ ID NO: 40810 - RNA, 18 nt, Artificial Sequence
  Synthetic oligonucleotide: BID-2705
ugccucuauucuucccaa

SEQ ID NO: 40811 - RNA, 19 nt, Artificial Sequence
  Synthetic oligonucleotide: BID-2706
cugccucuauucuucccaa

SEQ ID NO: 40812 - RNA, 20 nt, Artificial Sequence
  Synthetic oligonucleotide: BID-515
ccugccucuauucuucccaa

SEQ ID NO: 40813 - RNA, 21 nt, Artificial Sequence
  Synthetic oligonucleotide: BID-2707
accugccucuauucuucccaa

SEQ ID NO: 40814 - RNA, 22 nt, Artificial Sequence
  Synthetic oligonucleotide: BID-2708
uaccugccucuauucuucccaa

SEQ ID NO: 40815 - RNA, 23 nt, Artificial Sequence
  Synthetic oligonucleotide: BID-2709
cuaccugccucuauucuucccaa

SEQ ID NO: 40816 - RNA, 24 nt, Artificial Sequence
  Synthetic oligonucleotide: BID-2710
ccuaccugccucuauucuucccaa

SEQ ID NO: 40817 - RNA, 18 nt, Artificial Sequence
  Synthetic oligonucleotide: BID-2711
cauccccuagagcaagaa

SEQ ID NO: 40818 - RNA, 19 nt, Artificial Sequence
  Synthetic oligonucleotide: BID-2712
ccauccccuagagcaagaa

SEQ ID NO: 40819 - RNA, 20 nt, Artificial Sequence
  Synthetic oligonucleotide: BID-2540
uccauccccuagagcaagaa

SEQ ID NO: 40820 - RNA, 21 nt, Artificial Sequence
  Synthetic oligonucleotide: BID-2713
guccauccccuagagcaagaa

SEQ ID NO: 40821 - RNA, 22 nt, Artificial Sequence
  Synthetic oligonucleotide: BID-2714
aguccauccccuagagcaagaa

SEQ ID NO: 40822 - RNA, 23 nt, Artificial Sequence
  Synthetic oligonucleotide: BID-2715
caguccauccccuagagcaagaa

SEQ ID NO: 40823 - RNA, 24 nt, Artificial Sequence
  Synthetic oligonucleotide: BID-2716
ucaguccauccccuagagcaagaa

SEQ ID NO: 40824 - RNA, 18 nt, Artificial Sequence
  Synthetic oligonucleotide: BID-2717
uuguugaccugaggggaa

SEQ ID NO: 40825 - RNA, 19 nt, Artificial Sequence
  Synthetic oligonucleotide: BID-2718
guuguugaccugaggggaa

SEQ ID NO: 40826 - RNA, 20 nt, Artificial Sequence
  Synthetic oligonucleotide: BID-114
cguuguugaccugaggggaa

SEQ ID NO: 40827 - RNA, 21 nt, Artificial Sequence
  Synthetic oligonucleotide: BID-2719
ccguuguugaccugaggggaa

SEQ ID NO: 40828 - RNA, 22 nt, Artificial Sequence
  Synthetic oligonucleotide: BID-2720
accguuguugaccugaggggaa

SEQ ID NO: 40829 - RNA, 23 nt, Artificial Sequence
  Synthetic oligonucleotide: BID-2721
aaccguuguugaccugaggggaa

SEQ ID NO: 40830 - RNA, 24 nt, Artificial Sequence
  Synthetic oligonucleotide: BID-2722
gaaccguuguugaccugaggggaa

SEQ ID NO: 40831 - RNA, 18 nt, Artificial Sequence
  Synthetic oligonucleotide: BID-2723
cccaguggcgaccuggaa

SEQ ID NO: 40832 - RNA, 19 nt, Artificial Sequence
  Synthetic oligonucleotide: BID-2724
ucccaguggcgaccuggaa

SEQ ID NO: 40833 - RNA, 20 nt, Artificial Sequence
  Synthetic oligonucleotide: BID-58
gucccaguggcgaccuggaa

SEQ ID NO: 40834 - RNA, 21 nt, Artificial Sequence
  Synthetic oligonucleotide: BID-2725
ugucccaguggcgaccuggaa

SEQ ID NO: 40835 - RNA, 22 nt, Artificial Sequence
  Synthetic oligonucleotide: BID-2726
gugucccaguggcgaccuggaa

SEQ ID NO: 40836 - RNA, 23 nt, Artificial Sequence
  Synthetic oligonucleotide: BID-2727
agugucccaguggcgaccuggaa

SEQ ID NO: 40837 - RNA, 24 nt, Artificial Sequence
  Synthetic oligonucleotide: BID-2728
cagugucccaguggcgaccuggaa

SEQ ID NO: 40838 - RNA, 18 nt, Artificial Sequence
  Synthetic oligonucleotide: BID-2729
ccugcacagaggggcaca

SEQ ID NO: 40839 - RNA, 19 nt, Artificial Sequence
  Synthetic oligonucleotide: BID-2730
uccugcacagaggggcaca

SEQ ID NO: 40840 - RNA, 20 nt, Artificial Sequence
  Synthetic oligonucleotide: BID-668
guccugcacagaggggcaca

SEQ ID NO: 40841 - RNA, 21 nt, Artificial Sequence
  Synthetic oligonucleotide: BID-2731
gguccugcacagaggggcaca

SEQ ID NO: 40842 - RNA, 22 nt, Artificial Sequence
  Synthetic oligonucleotide: BID-2732
cgguccugcacagaggggcaca

SEQ ID NO: 40843 - RNA, 23 nt, Artificial Sequence
  Synthetic oligonucleotide: BID-2733
ccgguccugcacagaggggcaca

SEQ ID NO: 40844 - RNA, 24 nt, Artificial Sequence
  Synthetic oligonucleotide: BID-2734
uccgguccugcacagaggggcaca

SEQ ID NO: 40845 - RNA, 18 nt, Artificial Sequence
  Synthetic oligonucleotide: BID-2735
cuguuccgguccugcaca

SEQ ID NO: 40846 - RNA, 19 nt, Artificial Sequence
  Synthetic oligonucleotide: BID-2736
ccuguuccgguccugcaca

SEQ ID NO: 40847 - RNA, 20 nt, Artificial Sequence
  Synthetic oligonucleotide: BID-666
cccuguuccgguccugcaca

SEQ ID NO: 40848 - RNA, 21 nt, Artificial Sequence
  Synthetic oligonucleotide: BID-2737
ucccuguuccgguccugcaca

SEQ ID NO: 40849 - RNA, 22 nt, Artificial Sequence
  Synthetic oligonucleotide: BID-2738
gucccuguuccgguccugcaca

SEQ ID NO: 40850 - RNA, 23 nt, Artificial Sequence
  Synthetic oligonucleotide: BID-2739
ggucccuguuccgguccugcaca

SEQ ID NO: 40851 - RNA, 24 nt, Artificial Sequence
  Synthetic oligonucleotide: BID-2740
aggucccuguuccgguccugcaca

SEQ ID NO: 40852 - RNA, 18 nt, Artificial Sequence
  Synthetic oligonucleotide: BID-2741
ccggccccucgcugccca

SEQ ID NO: 40853 - RNA, 19 nt, Artificial Sequence
  Synthetic oligonucleotide: BID-2742
cccggccccucgcugccca

SEQ ID NO: 40854 - RNA, 20 nt, Artificial Sequence
  Synthetic oligonucleotide: BID-552
gcccggccccucgcugccca

SEQ ID NO: 40855 - RNA, 21 nt, Artificial Sequence
  Synthetic oligonucleotide: BID-2743
ggcccggccccucgcugccca

SEQ ID NO: 40856 - RNA, 22 nt, Artificial Sequence
  Synthetic oligonucleotide: BID-2744
cggcccggccccucgcugccca

SEQ ID NO: 40857 - RNA, 23 nt, Artificial Sequence
  Synthetic oligonucleotide: BID-2745
ccggcccggccccucgcugccca

SEQ ID NO: 40858 - RNA, 24 nt, Artificial Sequence
  Synthetic oligonucleotide: BID-2746
gccggcccggccccucgcugccca

SEQ ID NO: 40859 - RNA, 18 nt, Artificial Sequence
  Synthetic oligonucleotide: BID-2747
cucaucguagcccuccca

SEQ ID NO: 40860 - RNA, 19 nt, Artificial Sequence
  Synthetic oligonucleotide: BID-2748
gcucaucguagcccuccca

SEQ ID NO: 40861 - RNA, 20 nt, Artificial Sequence
  Synthetic oligonucleotide: BID-518
agcucaucguagcccuccca

SEQ ID NO: 40862 - RNA, 21 nt, Artificial Sequence
  Synthetic oligonucleotide: BID-2749
cagcucaucguagcccuccca

SEQ ID NO: 40863 - RNA, 22 nt, Artificial Sequence
  Synthetic oligonucleotide: BID-2750
gcagcucaucguagcccuccca

SEQ ID NO: 40864 - RNA, 23 nt, Artificial Sequence
  Synthetic oligonucleotide: BID-2751
ugcagcucaucguagcccuccca

SEQ ID NO: 40865 - RNA, 24 nt, Artificial Sequence
  Synthetic oligonucleotide: BID-2752
cugcagcucaucguagcccuccca

SEQ ID NO: 40866 - RNA, 18 nt, Artificial Sequence
  Synthetic oligonucleotide: BID-2753
cccuguuccgguccugca

SEQ ID NO: 40867 - RNA, 19 nt, Artificial Sequence
  Synthetic oligonucleotide: BID-2754
ucccuguuccgguccugca

SEQ ID NO: 40868 - RNA, 20 nt, Artificial Sequence
  Synthetic oligonucleotide: BID-665
gucccuguuccgguccugca

SEQ ID NO: 40869 - RNA, 21 nt, Artificial Sequence
  Synthetic oligonucleotide: BID-2755
ggucccuguuccgguccugca

SEQ ID NO: 40870 - RNA, 22 nt, Artificial Sequence
  Synthetic oligonucleotide: BID-2756
aggucccuguuccgguccugca

SEQ ID NO: 40871 - RNA, 23 nt, Artificial Sequence
  Synthetic oligonucleotide: BID-2757
caggucccuguuccgguccugca

SEQ ID NO: 40872 - RNA, 24 nt, Artificial Sequence
  Synthetic oligonucleotide: BID-2758
ccaggucccuguuccgguccugca

SEQ ID NO: 40873 - RNA, 18 nt, Artificial Sequence
  Synthetic oligonucleotide: BID-2759
guugugugaaagacauca

SEQ ID NO: 40874 - RNA, 19 nt, Artificial Sequence
  Synthetic oligonucleotide: BID-2760
uguugugugaaagacauca

SEQ ID NO: 40875 - RNA, 20 nt, Artificial Sequence
  Synthetic oligonucleotide: BID-315
cuguugugugaaagacauca

SEQ ID NO: 40876 - RNA, 21 nt, Artificial Sequence
  Synthetic oligonucleotide: BID-2761
acuguugugugaaagacauca

SEQ ID NO: 40877 - RNA, 22 nt, Artificial Sequence
  Synthetic oligonucleotide: BID-2762
cacuguugugugaaagacauca

SEQ ID NO: 40878 - RNA, 23 nt, Artificial Sequence
  Synthetic oligonucleotide: BID-2763
ucacuguugugugaaagacauca

SEQ ID NO: 40879 - RNA, 24 nt, Artificial Sequence
  Synthetic oligonucleotide: BID-2764
uucacuguugugugaaagacauca

SEQ ID NO: 40880 - RNA, 18 nt, Artificial Sequence
  Synthetic oligonucleotide: BID-2765
ccauccccuagagcaaga

SEQ ID NO: 40881 - RNA, 19 nt, Artificial Sequence
  Synthetic oligonucleotide: BID-2766
uccauccccuagagcaaga

SEQ ID NO: 40882 - RNA, 20 nt, Artificial Sequence
  Synthetic oligonucleotide: BID-2767
guccauccccuagagcaaga

SEQ ID NO: 40883 - RNA, 21 nt, Artificial Sequence
  Synthetic oligonucleotide: BID-2768
aguccauccccuagagcaaga

SEQ ID NO: 40884 - RNA, 22 nt, Artificial Sequence
  Synthetic oligonucleotide: BID-2769
caguccauccccuagagcaaga

SEQ ID NO: 40885 - RNA, 23 nt, Artificial Sequence
  Synthetic oligonucleotide: BID-2770
ucaguccauccccuagagcaaga

SEQ ID NO: 40886 - RNA, 24 nt, Artificial Sequence
  Synthetic oligonucleotide: BID-2771
uucaguccauccccuagagcaaga

SEQ ID NO: 40887 - RNA, 18 nt, Artificial Sequence
  Synthetic oligonucleotide: BID-2772
uggaaagggacacacaga

SEQ ID NO: 40888 - RNA, 19 nt, Artificial Sequence
  Synthetic oligonucleotide: BID-2773
cuggaaagggacacacaga

SEQ ID NO: 40889 - RNA, 20 nt, Artificial Sequence
  Synthetic oligonucleotide: BID-550
ccuggaaagggacacacaga

SEQ ID NO: 40890 - RNA, 21 nt, Artificial Sequence
  Synthetic oligonucleotide: BID-2774
accuggaaagggacacacaga

SEQ ID NO: 40891 - RNA, 22 nt, Artificial Sequence
  Synthetic oligonucleotide: BID-2775
gaccuggaaagggacacacaga

SEQ ID NO: 40892 - RNA, 23 nt, Artificial Sequence
  Synthetic oligonucleotide: BID-2776
cgaccuggaaagggacacacaga

SEQ ID NO: 40893 - RNA, 24 nt, Artificial Sequence
  Synthetic oligonucleotide: BID-2777
gcgaccuggaaagggacacacaga

SEQ ID NO: 40894 - RNA, 18 nt, Artificial Sequence
  Synthetic oligonucleotide: BID-2778
guuguugaccugagggga

SEQ ID NO: 40895 - RNA, 19 nt, Artificial Sequence
  Synthetic oligonucleotide: BID-2779
cguuguugaccugagggga

SEQ ID NO: 40896 - RNA, 20 nt, Artificial Sequence
  Synthetic oligonucleotide: BID-537
ccguuguugaccugagggga

SEQ ID NO: 40897 - RNA, 21 nt, Artificial Sequence
  Synthetic oligonucleotide: BID-2780
accguuguugaccugagggga

SEQ ID NO: 40898 - RNA, 22 nt, Artificial Sequence
  Synthetic oligonucleotide: BID-2781
aaccguuguugaccugagggga

SEQ ID NO: 40899 - RNA, 23 nt, Artificial Sequence
  Synthetic oligonucleotide: BID-2782
gaaccguuguugaccugagggga

SEQ ID NO: 40900 - RNA, 24 nt, Artificial Sequence
  Synthetic oligonucleotide: BID-2783
ggaaccguuguugaccugagggga

SEQ ID NO: 40901 - RNA, 18 nt, Artificial Sequence
  Synthetic oligonucleotide: BID-2784
ucccaguggcgaccugga

SEQ ID NO: 40902 - RNA, 19 nt, Artificial Sequence
  Synthetic oligonucleotide: BID-2785
gucccaguggcgaccugga

SEQ ID NO: 40903 - RNA, 20 nt, Artificial Sequence
  Synthetic oligonucleotide: BID-547
ugucccaguggcgaccugga

SEQ ID NO: 40904 - RNA, 21 nt, Artificial Sequence
  Synthetic oligonucleotide: BID-2786
gugucccaguggcgaccugga

SEQ ID NO: 40905 - RNA, 22 nt, Artificial Sequence
  Synthetic oligonucleotide: BID-2787
agugucccaguggcgaccugga

SEQ ID NO: 40906 - RNA, 23 nt, Artificial Sequence
  Synthetic oligonucleotide: BID-2788
cagugucccaguggcgaccugga

SEQ ID NO: 40907 - RNA, 24 nt, Artificial Sequence
  Synthetic oligonucleotide: BID-2789
acagugucccaguggcgaccugga

SEQ ID NO: 40908 - RNA, 18 nt, Artificial Sequence
  Synthetic oligonucleotide: BID-2790
uauuuguugaaugaauga

SEQ ID NO: 40909 - RNA, 19 nt, Artificial Sequence
  Synthetic oligonucleotide: BID-2791
guauuuguugaaugaauga

SEQ ID NO: 40910 - RNA, 20 nt, Artificial Sequence
  Synthetic oligonucleotide: BID-556
cguauuuguugaaugaauga

SEQ ID NO: 40911 - RNA, 21 nt, Artificial Sequence
  Synthetic oligonucleotide: BID-2792
ucguauuuguugaaugaauga

SEQ ID NO: 40912 - RNA, 22 nt, Artificial Sequence
  Synthetic oligonucleotide: BID-2793
uucguauuuguugaaugaauga

SEQ ID NO: 40913 - RNA, 23 nt, Artificial Sequence
  Synthetic oligonucleotide: BID-2794
auucguauuuguugaaugaauga

SEQ ID NO: 40914 - RNA, 24 nt, Artificial Sequence
  Synthetic oligonucleotide: BID-2795
cauucguauuuguugaaugaauga

SEQ ID NO: 40915 - RNA, 18 nt, Artificial Sequence
  Synthetic oligonucleotide: BID-2796
gaaccguuguugaccuga

SEQ ID NO: 40916 - RNA, 19 nt, Artificial Sequence
  Synthetic oligonucleotide: BID-2797
ggaaccguuguugaccuga

SEQ ID NO: 40917 - RNA, 20 nt, Artificial Sequence
  Synthetic oligonucleotide: BID-105
uggaaccguuguugaccuga

SEQ ID NO: 40918 - RNA, 21 nt, Artificial Sequence
  Synthetic oligonucleotide: BID-2798
cuggaaccguuguugaccuga

SEQ ID NO: 40919 - RNA, 22 nt, Artificial Sequence
  Synthetic oligonucleotide: BID-2799
gcuggaaccguuguugaccuga

SEQ ID NO: 40920 - RNA, 23 nt, Artificial Sequence
  Synthetic oligonucleotide: BID-2800
ggcuggaaccguuguugaccuga

SEQ ID NO: 40921 - RNA, 24 nt, Artificial Sequence
  Synthetic oligonucleotide: BID-2801
aggcuggaaccguuguugaccuga

SEQ ID NO: 40922 - RNA, 18 nt, Artificial Sequence
  Synthetic oligonucleotide: BID-2802
ucaucguagcccucccac

SEQ ID NO: 40923 - RNA, 19 nt, Artificial Sequence
  Synthetic oligonucleotide: BID-2803
cucaucguagcccucccac

SEQ ID NO: 40924 - RNA, 20 nt, Artificial Sequence
  Synthetic oligonucleotide: BID-104
gcucaucguagcccucccac

SEQ ID NO: 40925 - RNA, 21 nt, Artificial Sequence
  Synthetic oligonucleotide: BID-2804
agcucaucguagcccucccac

SEQ ID NO: 40926 - RNA, 22 nt, Artificial Sequence
  Synthetic oligonucleotide: BID-2805
cagcucaucguagcccucccac

SEQ ID NO: 40927 - RNA, 23 nt, Artificial Sequence
  Synthetic oligonucleotide: BID-2806
gcagcucaucguagcccucccac

SEQ ID NO: 40928 - RNA, 24 nt, Artificial Sequence
  Synthetic oligonucleotide: BID-2807
ugcagcucaucguagcccucccac

SEQ ID NO: 40929 - RNA, 18 nt, Artificial Sequence
  Synthetic oligonucleotide: BID-2808
guccaugcuguccccgac

SEQ ID NO: 40930 - RNA, 19 nt, Artificial Sequence
  Synthetic oligonucleotide: BID-2809
gguccaugcuguccccgac

SEQ ID NO: 40931 - RNA, 20 nt, Artificial Sequence
  Synthetic oligonucleotide: BID-508
cgguccaugcuguccccgac

SEQ ID NO: 40932 - RNA, 21 nt, Artificial Sequence
  Synthetic oligonucleotide: BID-2810
acgguccaugcuguccccgac

SEQ ID NO: 40933 - RNA, 22 nt, Artificial Sequence
  Synthetic oligonucleotide: BID-2811
uacgguccaugcuguccccgac

SEQ ID NO: 40934 - RNA, 23 nt, Artificial Sequence
  Synthetic oligonucleotide: BID-2812
cuacgguccaugcuguccccgac

SEQ ID NO: 40935 - RNA, 24 nt, Artificial Sequence
  Synthetic oligonucleotide: BID-2813
gcuacgguccaugcuguccccgac

SEQ ID NO: 40936 - RNA, 18 nt, Artificial Sequence
  Synthetic oligonucleotide: BID-2814
cagugucccaguggcgac

SEQ ID NO: 40937 - RNA, 19 nt, Artificial Sequence
  Synthetic oligonucleotide: BID-2815
acagugucccaguggcgac

SEQ ID NO: 40938 - RNA, 20 nt, Artificial Sequence
  Synthetic oligonucleotide: BID-545
cacagugucccaguggcgac

SEQ ID NO: 40939 - RNA, 21 nt, Artificial Sequence
  Synthetic oligonucleotide: BID-2816
ucacagugucccaguggcgac

SEQ ID NO: 40940 - RNA, 22 nt, Artificial Sequence
  Synthetic oligonucleotide: BID-2817
uucacagugucccaguggcgac

SEQ ID NO: 40941 - RNA, 23 nt, Artificial Sequence
  Synthetic oligonucleotide: BID-2818
guucacagugucccaguggcgac

SEQ ID NO: 40942 - RNA, 24 nt, Artificial Sequence
  Synthetic oligonucleotide: BID-2819
gguucacagugucccaguggcgac

SEQ ID NO: 40943 - RNA, 18 nt, Artificial Sequence
  Synthetic oligonucleotide: BID-2820
gcuggaaccguuguugac

SEQ ID NO: 40944 - RNA, 19 nt, Artificial Sequence
  Synthetic oligonucleotide: BID-2821
ggcuggaaccguuguugac

SEQ ID NO: 40945 - RNA, 20 nt, Artificial Sequence
  Synthetic oligonucleotide: BID-532
aggcuggaaccguuguugac

SEQ ID NO: 40946 - RNA, 21 nt, Artificial Sequence
  Synthetic oligonucleotide: BID-2822
gaggcuggaaccguuguugac

SEQ ID NO: 40947 - RNA, 22 nt, Artificial Sequence
  Synthetic oligonucleotide: BID-2823
ugaggcuggaaccguuguugac

SEQ ID NO: 40948 - RNA, 23 nt, Artificial Sequence
  Synthetic oligonucleotide: BID-2824
cugaggcuggaaccguuguugac

SEQ ID NO: 40949 - RNA, 24 nt, Artificial Sequence
  Synthetic oligonucleotide: BID-2825
ccugaggcuggaaccguuguugac

SEQ ID NO: 40950 - RNA, 18 nt, Artificial Sequence
  Synthetic oligonucleotide: BID-2826
agugucccaguggcgacc

SEQ ID NO: 40951 - RNA, 19 nt, Artificial Sequence
  Synthetic oligonucleotide: BID-2827
cagugucccaguggcgacc

SEQ ID NO: 40952 - RNA, 20 nt, Artificial Sequence
  Synthetic oligonucleotide: BID-60
acagugucccaguggcgacc

SEQ ID NO: 40953 - RNA, 21 nt, Artificial Sequence
  Synthetic oligonucleotide: BID-2828
cacagugucccaguggcgacc

SEQ ID NO: 40954 - RNA, 22 nt, Artificial Sequence
  Synthetic oligonucleotide: BID-2829
ucacagugucccaguggcgacc

SEQ ID NO: 40955 - RNA, 23 nt, Artificial Sequence
  Synthetic oligonucleotide: BID-2830
uucacagugucccaguggcgacc

SEQ ID NO: 40956 - RNA, 24 nt, Artificial Sequence
  Synthetic oligonucleotide: BID-2831
guucacagugucccaguggcgacc

SEQ ID NO: 40957 - RNA, 18 nt, Artificial Sequence
  Synthetic oligonucleotide: BID-2832
uccguucaguccaucccc

SEQ ID NO: 40958 - RNA, 19 nt, Artificial Sequence
  Synthetic oligonucleotide: BID-2833
guccguucaguccaucccc

SEQ ID NO: 40959 - RNA, 20 nt, Artificial Sequence
  Synthetic oligonucleotide: BID-2834
uguccguucaguccaucccc

SEQ ID NO: 40960 - RNA, 21 nt, Artificial Sequence
  Synthetic oligonucleotide: BID-2835
cuguccguucaguccaucccc

SEQ ID NO: 40961 - RNA, 22 nt, Artificial Sequence
  Synthetic oligonucleotide: BID-2836
acuguccguucaguccaucccc

SEQ ID NO: 40962 - RNA, 23 nt, Artificial Sequence
  Synthetic oligonucleotide: BID-2837
aacuguccguucaguccaucccc

SEQ ID NO: 40963 - RNA, 24 nt, Artificial Sequence
  Synthetic oligonucleotide: BID-2838
gaacuguccguucaguccaucccc

SEQ ID NO: 40964 - RNA, 18 nt, Artificial Sequence
  Synthetic oligonucleotide: BID-2839
caggccguucaccaggcc

SEQ ID NO: 40965 - RNA, 19 nt, Artificial Sequence
  Synthetic oligonucleotide: BID-2840
ccaggccguucaccaggcc

SEQ ID NO: 40966 - RNA, 20 nt, Artificial Sequence
  Synthetic oligonucleotide: BID-229
gccaggccguucaccaggcc

SEQ ID NO: 40967 - RNA, 21 nt, Artificial Sequence
  Synthetic oligonucleotide: BID-2841
ggccaggccguucaccaggcc

SEQ ID NO: 40968 - RNA, 22 nt, Artificial Sequence
  Synthetic oligonucleotide: BID-2842
gggccaggccguucaccaggcc

SEQ ID NO: 40969 - RNA, 23 nt, Artificial Sequence
  Synthetic oligonucleotide: BID-2843
agggccaggccguucaccaggcc

SEQ ID NO: 40970 - RNA, 24 nt, Artificial Sequence
  Synthetic oligonucleotide: BID-2844
cagggccaggccguucaccaggcc

SEQ ID NO: 40971 - RNA, 18 nt, Artificial Sequence
  Synthetic oligonucleotide: BID-2845
uuugugaugcacucaucc

SEQ ID NO: 40972 - RNA, 19 nt, Artificial Sequence
  Synthetic oligonucleotide: BID-2846
guuugugaugcacucaucc

SEQ ID NO: 40973 - RNA, 20 nt, Artificial Sequence
  Synthetic oligonucleotide: BID-529
gguuugugaugcacucaucc

SEQ ID NO: 40974 - RNA, 21 nt, Artificial Sequence
  Synthetic oligonucleotide: BID-2847
agguuugugaugcacucaucc

SEQ ID NO: 40975 - RNA, 22 nt, Artificial Sequence
  Synthetic oligonucleotide: BID-2848
uagguuugugaugcacucaucc

SEQ ID NO: 40976 - RNA, 23 nt, Artificial Sequence
  Synthetic oligonucleotide: BID-2849
guagguuugugaugcacucaucc

SEQ ID NO: 40977 - RNA, 24 nt, Artificial Sequence
  Synthetic oligonucleotide: BID-2850
aguagguuugugaugcacucaucc

SEQ ID NO: 40978 - RNA, 18 nt, Artificial Sequence
  Synthetic oligonucleotide: BID-2851
caguccauccccuagagc

SEQ ID NO: 40979 - RNA, 19 nt, Artificial Sequence
  Synthetic oligonucleotide: BID-2852
ucaguccauccccuagagc

SEQ ID NO: 40980 - RNA, 20 nt, Artificial Sequence
  Synthetic oligonucleotide: BID-2853
uucaguccauccccuagagc

SEQ ID NO: 40981 - RNA, 21 nt, Artificial Sequence
  Synthetic oligonucleotide: BID-2854
guucaguccauccccuagagc

SEQ ID NO: 40982 - RNA, 22 nt, Artificial Sequence
  Synthetic oligonucleotide: BID-2855
cguucaguccauccccuagagc

SEQ ID NO: 40983 - RNA, 23 nt, Artificial Sequence
  Synthetic oligonucleotide: BID-2856
ccguucaguccauccccuagagc

SEQ ID NO: 40984 - RNA, 24 nt, Artificial Sequence
  Synthetic oligonucleotide: BID-2857
uccguucaguccauccccuagagc

SEQ ID NO: 40985 - RNA, 18 nt, Artificial Sequence
  Synthetic oligonucleotide: BID-2858
ugaaagacaucacggagc

SEQ ID NO: 40986 - RNA, 19 nt, Artificial Sequence
  Synthetic oligonucleotide: BID-2859
gugaaagacaucacggagc

SEQ ID NO: 40987 - RNA, 20 nt, Artificial Sequence
  Synthetic oligonucleotide: BID-661
ugugaaagacaucacggagc

SEQ ID NO: 40988 - RNA, 21 nt, Artificial Sequence
  Synthetic oligonucleotide: BID-2860
gugugaaagacaucacggagc

SEQ ID NO: 40989 - RNA, 22 nt, Artificial Sequence
  Synthetic oligonucleotide: BID-2861
ugugugaaagacaucacggagc

SEQ ID NO: 40990 - RNA, 23 nt, Artificial Sequence
  Synthetic oligonucleotide: BID-2862
uugugugaaagacaucacggagc

SEQ ID NO: 40991 - RNA, 24 nt, Artificial Sequence
  Synthetic oligonucleotide: BID-2863
guugugugaaagacaucacggagc

SEQ ID NO: 40992 - RNA, 18 nt, Artificial Sequence
  Synthetic oligonucleotide: BID-2864
ccaggccguucaccaggc

SEQ ID NO: 40993 - RNA, 19 nt, Artificial Sequence
  Synthetic oligonucleotide: BID-2865
gccaggccguucaccaggc

SEQ ID NO: 40994 - RNA, 20 nt, Artificial Sequence
  Synthetic oligonucleotide: BID-504
ggccaggccguucaccaggc

SEQ ID NO: 40995 - RNA, 21 nt, Artificial Sequence
  Synthetic oligonucleotide: BID-2866
gggccaggccguucaccaggc

SEQ ID NO: 40996 - RNA, 22 nt, Artificial Sequence
  Synthetic oligonucleotide: BID-2867
agggccaggccguucaccaggc

SEQ ID NO: 40997 - RNA, 23 nt, Artificial Sequence
  Synthetic oligonucleotide: BID-2868
cagggccaggccguucaccaggc

SEQ ID NO: 40998 - RNA, 24 nt, Artificial Sequence
  Synthetic oligonucleotide: BID-2869
gcagggccaggccguucaccaggc

SEQ ID NO: 40999 - RNA, 18 nt, Artificial Sequence
  Synthetic oligonucleotide: BID-2870
cagaaucuguguucaggc

SEQ ID NO: 41000 - RNA, 19 nt, Artificial Sequence
  Synthetic oligonucleotide: BID-2871
ucagaaucuguguucaggc

SEQ ID NO: 41001 - RNA, 20 nt, Artificial Sequence
  Synthetic oligonucleotide: BID-226
uucagaaucuguguucaggc

SEQ ID NO: 41002 - RNA, 21 nt, Artificial Sequence
  Synthetic oligonucleotide: BID-2872
uuucagaaucuguguucaggc

SEQ ID NO: 41003 - RNA, 22 nt, Artificial Sequence
  Synthetic oligonucleotide: BID-2873
cuuucagaaucuguguucaggc

SEQ ID NO: 41004 - RNA, 23 nt, Artificial Sequence
  Synthetic oligonucleotide: BID-2874
acuuucagaaucuguguucaggc

SEQ ID NO: 41005 - RNA, 24 nt, Artificial Sequence
  Synthetic oligonucleotide: BID-2875
gacuuucagaaucuguguucaggc

SEQ ID NO: 41006 - RNA, 18 nt, Artificial Sequence
  Synthetic oligonucleotide: BID-2876
ugcacucaucccugaggc

SEQ ID NO: 41007 - RNA, 19 nt, Artificial Sequence
  Synthetic oligonucleotide: BID-2877
augcacucaucccugaggc

SEQ ID NO: 41008 - RNA, 20 nt, Artificial Sequence
  Synthetic oligonucleotide: BID-126
gaugcacucaucccugaggc

SEQ ID NO: 41009 - RNA, 21 nt, Artificial Sequence
  Synthetic oligonucleotide: BID-2878
ugaugcacucaucccugaggc

SEQ ID NO: 41010 - RNA, 22 nt, Artificial Sequence
  Synthetic oligonucleotide: BID-2879
gugaugcacucaucccugaggc

SEQ ID NO: 41011 - RNA, 23 nt, Artificial Sequence
  Synthetic oligonucleotide: BID-2880
ugugaugcacucaucccugaggc

SEQ ID NO: 41012 - RNA, 24 nt, Artificial Sequence
  Synthetic oligonucleotide: BID-2881
uugugaugcacucaucccugaggc

SEQ ID NO: 41013 - RNA, 18 nt, Artificial Sequence
  Synthetic oligonucleotide: BID-2882
gaccucacaguccauggc

SEQ ID NO: 41014 - RNA, 19 nt, Artificial Sequence
  Synthetic oligonucleotide: BID-2883
ugaccucacaguccauggc

SEQ ID NO: 41015 - RNA, 20 nt, Artificial Sequence
  Synthetic oligonucleotide: BID-544
cugaccucacaguccauggc

SEQ ID NO: 41016 - RNA, 21 nt, Artificial Sequence
  Synthetic oligonucleotide: BID-2884
ucugaccucacaguccauggc

SEQ ID NO: 41017 - RNA, 22 nt, Artificial Sequence
  Synthetic oligonucleotide: BID-2885
cucugaccucacaguccauggc

SEQ ID NO: 41018 - RNA, 23 nt, Artificial Sequence
  Synthetic oligonucleotide: BID-2886
ccucugaccucacaguccauggc

SEQ ID NO: 41019 - RNA, 24 nt, Artificial Sequence
  Synthetic oligonucleotide: BID-2887
gccucugaccucacaguccauggc

SEQ ID NO: 41020 - RNA, 18 nt, Artificial Sequence
  Synthetic oligonucleotide: BID-2888
uguugugugaaagacauc

SEQ ID NO: 41021 - RNA, 19 nt, Artificial Sequence
  Synthetic oligonucleotide: BID-2889
cuguugugugaaagacauc

SEQ ID NO: 41022 - RNA, 20 nt, Artificial Sequence
  Synthetic oligonucleotide: BID-659
acuguugugugaaagacauc

SEQ ID NO: 41023 - RNA, 21 nt, Artificial Sequence
  Synthetic oligonucleotide: BID-2890
cacuguugugugaaagacauc

SEQ ID NO: 41024 - RNA, 22 nt, Artificial Sequence
  Synthetic oligonucleotide: BID-2891
ucacuguugugugaaagacauc

SEQ ID NO: 41025 - RNA, 23 nt, Artificial Sequence
  Synthetic oligonucleotide: BID-2892
uucacuguugugugaaagacauc

SEQ ID NO: 41026 - RNA, 24 nt, Artificial Sequence
  Synthetic oligonucleotide: BID-2893
auucacuguugugugaaagacauc

SEQ ID NO: 41027 - RNA, 18 nt, Artificial Sequence
  Synthetic oligonucleotide: BID-2894
ggccugcagcagcugcuc

SEQ ID NO: 41028 - RNA, 19 nt, Artificial Sequence
  Synthetic oligonucleotide: BID-2895
aggccugcagcagcugcuc

SEQ ID NO: 41029 - RNA, 20 nt, Artificial Sequence
  Synthetic oligonucleotide: BID-664
uaggccugcagcagcugcuc

SEQ ID NO: 41030 - RNA, 21 nt, Artificial Sequence
  Synthetic oligonucleotide: BID-2896
guaggccugcagcagcugcuc

SEQ ID NO: 41031 - RNA, 22 nt, Artificial Sequence
  Synthetic oligonucleotide: BID-2897
gguaggccugcagcagcugcuc

SEQ ID NO: 41032 - RNA, 23 nt, Artificial Sequence
  Synthetic oligonucleotide: BID-2898
ggguaggccugcagcagcugcuc

SEQ ID NO: 41033 - RNA, 24 nt, Artificial Sequence
  Synthetic oligonucleotide: BID-2899
aggguaggccugcagcagcugcuc

SEQ ID NO: 41034 - RNA, 18 nt, Artificial Sequence
  Synthetic oligonucleotide: BID-2900
ugaggggaaaggggaguc

SEQ ID NO: 41035 - RNA, 19 nt, Artificial Sequence
  Synthetic oligonucleotide: BID-2901
cugaggggaaaggggaguc

SEQ ID NO: 41036 - RNA, 20 nt, Artificial Sequence
  Synthetic oligonucleotide: BID-144
ccugaggggaaaggggaguc

SEQ ID NO: 41037 - RNA, 21 nt, Artificial Sequence
  Synthetic oligonucleotide: BID-2902
accugaggggaaaggggaguc

SEQ ID NO: 41038 - RNA, 22 nt, Artificial Sequence
  Synthetic oligonucleotide: BID-2903
gaccugaggggaaaggggaguc

SEQ ID NO: 41039 - RNA, 23 nt, Artificial Sequence
  Synthetic oligonucleotide: BID-2904
ugaccugaggggaaaggggaguc

SEQ ID NO: 41040 - RNA, 24 nt, Artificial Sequence
  Synthetic oligonucleotide: BID-2905
uugaccugaggggaaaggggaguc

SEQ ID NO: 41041 - RNA, 18 nt, Artificial Sequence
  Synthetic oligonucleotide: BID-2906
uccgaccggcugguguuc

SEQ ID NO: 41042 - RNA, 19 nt, Artificial Sequence
  Synthetic oligonucleotide: BID-2907
cuccgaccggcugguguuc

SEQ ID NO: 41043 - RNA, 20 nt, Artificial Sequence
  Synthetic oligonucleotide: BID-502
ccuccgaccggcugguguuc

SEQ ID NO: 41044 - RNA, 21 nt, Artificial Sequence
  Synthetic oligonucleotide: BID-2908
uccuccgaccggcugguguuc

SEQ ID NO: 41045 - RNA, 22 nt, Artificial Sequence
  Synthetic oligonucleotide: BID-2909
cuccuccgaccggcugguguuc

SEQ ID NO: 41046 - RNA, 23 nt, Artificial Sequence
  Synthetic oligonucleotide: BID-2910
ccuccuccgaccggcugguguuc

SEQ ID NO: 41047 - RNA, 24 nt, Artificial Sequence
  Synthetic oligonucleotide: BID-2911
accuccuccgaccggcugguguuc

SEQ ID NO: 41048 - RNA, 18 nt, Artificial Sequence
  Synthetic oligonucleotide: BID-2912
uccccuagagcaagaaag

SEQ ID NO: 41049 - RNA, 19 nt, Artificial Sequence
  Synthetic oligonucleotide: BID-2913
auccccuagagcaagaaag

SEQ ID NO: 41050 - RNA, 20 nt, Artificial Sequence
  Synthetic oligonucleotide: BID-2914
cauccccuagagcaagaaag

SEQ ID NO: 41051 - RNA, 21 nt, Artificial Sequence
  Synthetic oligonucleotide: BID-2915
ccauccccuagagcaagaaag

SEQ ID NO: 41052 - RNA, 22 nt, Artificial Sequence
  Synthetic oligonucleotide: BID-2916
uccauccccuagagcaagaaag

SEQ ID NO: 41053 - RNA, 23 nt, Artificial Sequence
  Synthetic oligonucleotide: BID-2917
guccauccccuagagcaagaaag

SEQ ID NO: 41054 - RNA, 24 nt, Artificial Sequence
  Synthetic oligonucleotide: BID-2918
aguccauccccuagagcaagaaag

SEQ ID NO: 41055 - RNA, 18 nt, Artificial Sequence
  Synthetic oligonucleotide: BID-2919
gccucuauucuucccaag

SEQ ID NO: 41056 - RNA, 19 nt, Artificial Sequence
  Synthetic oligonucleotide: BID-2920
ugccucuauucuucccaag

SEQ ID NO: 41057 - RNA, 20 nt, Artificial Sequence
  Synthetic oligonucleotide: BID-141
cugccucuauucuucccaag

SEQ ID NO: 41058 - RNA, 21 nt, Artificial Sequence
  Synthetic oligonucleotide: BID-2921
ccugccucuauucuucccaag

SEQ ID NO: 41059 - RNA, 22 nt, Artificial Sequence
  Synthetic oligonucleotide: BID-2922
accugccucuauucuucccaag

SEQ ID NO: 41060 - RNA, 23 nt, Artificial Sequence
  Synthetic oligonucleotide: BID-2923
uaccugccucuauucuucccaag

SEQ ID NO: 41061 - RNA, 24 nt, Artificial Sequence
  Synthetic oligonucleotide: BID-2924
cuaccugccucuauucuucccaag

SEQ ID NO: 41062 - RNA, 18 nt, Artificial Sequence
  Synthetic oligonucleotide: BID-2925
gaaaggggagucaggaag

SEQ ID NO: 41063 - RNA, 19 nt, Artificial Sequence
  Synthetic oligonucleotide: BID-2926
ggaaaggggagucaggaag

SEQ ID NO: 41064 - RNA, 20 nt, Artificial Sequence
  Synthetic oligonucleotide: BID-543
gggaaaggggagucaggaag

SEQ ID NO: 41065 - RNA, 21 nt, Artificial Sequence
  Synthetic oligonucleotide: BID-2927
ggggaaaggggagucaggaag

SEQ ID NO: 41066 - RNA, 22 nt, Artificial Sequence
  Synthetic oligonucleotide: BID-2928
aggggaaaggggagucaggaag

SEQ ID NO: 41067 - RNA, 23 nt, Artificial Sequence
  Synthetic oligonucleotide: BID-2929
gaggggaaaggggagucaggaag

SEQ ID NO: 41068 - RNA, 24 nt, Artificial Sequence
  Synthetic oligonucleotide: BID-2930
ugaggggaaaggggagucaggaag

SEQ ID NO: 41069 - RNA, 18 nt, Artificial Sequence
  Synthetic oligonucleotide: BID-2931
uguuccgguccugcacag

SEQ ID NO: 41070 - RNA, 19 nt, Artificial Sequence
  Synthetic oligonucleotide: BID-2932
cuguuccgguccugcacag

SEQ ID NO: 41071 - RNA, 20 nt, Artificial Sequence
  Synthetic oligonucleotide: BID-331
ccuguuccgguccugcacag

SEQ ID NO: 41072 - RNA, 21 nt, Artificial Sequence
  Synthetic oligonucleotide: BID-2933
cccuguuccgguccugcacag

SEQ ID NO: 41073 - RNA, 22 nt, Artificial Sequence
  Synthetic oligonucleotide: BID-2934
ucccuguuccgguccugcacag

SEQ ID NO: 41074 - RNA, 23 nt, Artificial Sequence
  Synthetic oligonucleotide: BID-2935
gucccuguuccgguccugcacag

SEQ ID NO: 41075 - RNA, 24 nt, Artificial Sequence
  Synthetic oligonucleotide: BID-2936
ggucccuguuccgguccugcacag

SEQ ID NO: 41076 - RNA, 18 nt, Artificial Sequence
  Synthetic oligonucleotide: BID-2937
caccuucuuggccagcag

SEQ ID NO: 41077 - RNA, 19 nt, Artificial Sequence
  Synthetic oligonucleotide: BID-2938
ccaccuucuuggccagcag

SEQ ID NO: 41078 - RNA, 20 nt, Artificial Sequence
  Synthetic oligonucleotide: BID-662
gccaccuucuuggccagcag

SEQ ID NO: 41079 - RNA, 21 nt, Artificial Sequence
  Synthetic oligonucleotide: BID-2939
ggccaccuucuuggccagcag

SEQ ID NO: 41080 - RNA, 22 nt, Artificial Sequence
  Synthetic oligonucleotide: BID-2940
uggccaccuucuuggccagcag

SEQ ID NO: 41081 - RNA, 23 nt, Artificial Sequence
  Synthetic oligonucleotide: BID-2941
cuggccaccuucuuggccagcag

SEQ ID NO: 41082 - RNA, 24 nt, Artificial Sequence
  Synthetic oligonucleotide: BID-2942
acuggccaccuucuuggccagcag

SEQ ID NO: 41083 - RNA, 18 nt, Artificial Sequence
  Synthetic oligonucleotide: BID-2943
aaccguuguugaccugag

SEQ ID NO: 41084 - RNA, 19 nt, Artificial Sequence
  Synthetic oligonucleotide: BID-2944
gaaccguuguugaccugag

SEQ ID NO: 41085 - RNA, 20 nt, Artificial Sequence
  Synthetic oligonucleotide: BID-107
ggaaccguuguugaccugag

SEQ ID NO: 41086 - RNA, 21 nt, Artificial Sequence
  Synthetic oligonucleotide: BID-2945
uggaaccguuguugaccugag

SEQ ID NO: 41087 - RNA, 22 nt, Artificial Sequence
  Synthetic oligonucleotide: BID-2946
cuggaaccguuguugaccugag

SEQ ID NO: 41088 - RNA, 23 nt, Artificial Sequence
  Synthetic oligonucleotide: BID-2947
gcuggaaccguuguugaccugag

SEQ ID NO: 41089 - RNA, 24 nt, Artificial Sequence
  Synthetic oligonucleotide: BID-2948
ggcuggaaccguuguugaccugag

SEQ ID NO: 41090 - RNA, 18 nt, Artificial Sequence
  Synthetic oligonucleotide: BID-2949
ggccguucaccaggcccg

SEQ ID NO: 41091 - RNA, 19 nt, Artificial Sequence
  Synthetic oligonucleotide: BID-2950
aggccguucaccaggcccg

SEQ ID NO: 41092 - RNA, 20 nt, Artificial Sequence
  Synthetic oligonucleotide: BID-506
caggccguucaccaggcccg

SEQ ID NO: 41093 - RNA, 21 nt, Artificial Sequence
  Synthetic oligonucleotide: BID-2951
ccaggccguucaccaggcccg

SEQ ID NO: 41094 - RNA, 22 nt, Artificial Sequence
  Synthetic oligonucleotide: BID-2952
gccaggccguucaccaggcccg

SEQ ID NO: 41095 - RNA, 23 nt, Artificial Sequence
  Synthetic oligonucleotide: BID-2953
ggccaggccguucaccaggcccg

SEQ ID NO: 41096 - RNA, 24 nt, Artificial Sequence
  Synthetic oligonucleotide: BID-2954
gggccaggccguucaccaggcccg

SEQ ID NO: 41097 - RNA, 18 nt, Artificial Sequence
  Synthetic oligonucleotide: BID-2955
ucagaaucuguguucagg

SEQ ID NO: 41098 - RNA, 19 nt, Artificial Sequence
  Synthetic oligonucleotide: BID-2956
uucagaaucuguguucagg

SEQ ID NO: 41099 - RNA, 20 nt, Artificial Sequence
  Synthetic oligonucleotide: BID-512
uuucagaaucuguguucagg

SEQ ID NO: 41100 - RNA, 21 nt, Artificial Sequence
  Synthetic oligonucleotide: BID-2957
cuuucagaaucuguguucagg

SEQ ID NO: 41101 - RNA, 22 nt, Artificial Sequence
  Synthetic oligonucleotide: BID-2958
acuuucagaaucuguguucagg

SEQ ID NO: 41102 - RNA, 23 nt, Artificial Sequence
  Synthetic oligonucleotide: BID-2959
gacuuucagaaucuguguucagg

SEQ ID NO: 41103 - RNA, 24 nt, Artificial Sequence
  Synthetic oligonucleotide: BID-2960
ugacuuucagaaucuguguucagg

SEQ ID NO: 41104 - RNA, 18 nt, Artificial Sequence
  Synthetic oligonucleotide: BID-2961
augcacucaucccugagg

SEQ ID NO: 41105 - RNA, 19 nt, Artificial Sequence
  Synthetic oligonucleotide: BID-2962
gaugcacucaucccugagg

SEQ ID NO: 41106 - RNA, 20 nt, Artificial Sequence
  Synthetic oligonucleotide: BID-530
ugaugcacucaucccugagg

SEQ ID NO: 41107 - RNA, 21 nt, Artificial Sequence
  Synthetic oligonucleotide: BID-2963
gugaugcacucaucccugagg

SEQ ID NO: 41108 - RNA, 22 nt, Artificial Sequence
  Synthetic oligonucleotide: BID-2964
ugugaugcacucaucccugagg

SEQ ID NO: 41109 - RNA, 23 nt, Artificial Sequence
  Synthetic oligonucleotide: BID-2965
uugugaugcacucaucccugagg

SEQ ID NO: 41110 - RNA, 24 nt, Artificial Sequence
  Synthetic oligonucleotide: BID-2966
uuugugaugcacucaucccugagg

SEQ ID NO: 41111 - RNA, 18 nt, Artificial Sequence
  Synthetic oligonucleotide: BID-2967
guguucaggcaggggcgg

SEQ ID NO: 41112 - RNA, 19 nt, Artificial Sequence
  Synthetic oligonucleotide: BID-2968
uguguucaggcaggggcgg

SEQ ID NO: 41113 - RNA, 20 nt, Artificial Sequence
  Synthetic oligonucleotide: BID-514
cuguguucaggcaggggcgg

SEQ ID NO: 41114 - RNA, 21 nt, Artificial Sequence
  Synthetic oligonucleotide: BID-2969
ucuguguucaggcaggggcgg

SEQ ID NO: 41115 - RNA, 22 nt, Artificial Sequence
  Synthetic oligonucleotide: BID-2970
aucuguguucaggcaggggcgg

SEQ ID NO: 41116 - RNA, 23 nt, Artificial Sequence
  Synthetic oligonucleotide: BID-2971
aaucuguguucaggcaggggcgg

SEQ ID NO: 41117 - RNA, 24 nt, Artificial Sequence
  Synthetic oligonucleotide: BID-2972
gaaucuguguucaggcaggggcgg

SEQ ID NO: 41118 - RNA, 18 nt, Artificial Sequence
  Synthetic oligonucleotide: BID-2973
augcuguccccgaccugg

SEQ ID NO: 41119 - RNA, 19 nt, Artificial Sequence
  Synthetic oligonucleotide: BID-2974
caugcuguccccgaccugg

SEQ ID NO: 41120 - RNA, 20 nt, Artificial Sequence
  Synthetic oligonucleotide: BID-509
ccaugcuguccccgaccugg

SEQ ID NO: 41121 - RNA, 21 nt, Artificial Sequence
  Synthetic oligonucleotide: BID-2975
uccaugcuguccccgaccugg

SEQ ID NO: 41122 - RNA, 22 nt, Artificial Sequence
  Synthetic oligonucleotide: BID-2976
guccaugcuguccccgaccugg

SEQ ID NO: 41123 - RNA, 23 nt, Artificial Sequence
  Synthetic oligonucleotide: BID-2977
gguccaugcuguccccgaccugg

SEQ ID NO: 41124 - RNA, 24 nt, Artificial Sequence
  Synthetic oligonucleotide: BID-2978
cgguccaugcuguccccgaccugg

SEQ ID NO: 41125 - RNA, 18 nt, Artificial Sequence
  Synthetic oligonucleotide: BID-2979
uugucagaacagcuuugg

SEQ ID NO: 41126 - RNA, 19 nt, Artificial Sequence
  Synthetic oligonucleotide: BID-2980
guugucagaacagcuuugg

SEQ ID NO: 41127 - RNA, 20 nt, Artificial Sequence
  Synthetic oligonucleotide: BID-122
uguugucagaacagcuuugg

SEQ ID NO: 41128 - RNA, 21 nt, Artificial Sequence
  Synthetic oligonucleotide: BID-2981
cuguugucagaacagcuuugg

SEQ ID NO: 41129 - RNA, 22 nt, Artificial Sequence
  Synthetic oligonucleotide: BID-2982
gcuguugucagaacagcuuugg

SEQ ID NO: 41130 - RNA, 23 nt, Artificial Sequence
  Synthetic oligonucleotide: BID-2983
agcuguugucagaacagcuuugg

SEQ ID NO: 41131 - RNA, 24 nt, Artificial Sequence
  Synthetic oligonucleotide: BID-2984
aagcuguugucagaacagcuuugg

SEQ ID NO: 41132 - RNA, 18 nt, Artificial Sequence
  Synthetic oligonucleotide: BID-2985
aucguagcccucccacug

SEQ ID NO: 41133 - RNA, 19 nt, Artificial Sequence
  Synthetic oligonucleotide: BID-2986
caucguagcccucccacug

SEQ ID NO: 41134 - RNA, 20 nt, Artificial Sequence
  Synthetic oligonucleotide: BID-134
ucaucguagcccucccacug

SEQ ID NO: 41135 - RNA, 21 nt, Artificial Sequence
  Synthetic oligonucleotide: BID-2987
cucaucguagcccucccacug

SEQ ID NO: 41136 - RNA, 22 nt, Artificial Sequence
  Synthetic oligonucleotide: BID-2988
gcucaucguagcccucccacug

SEQ ID NO: 41137 - RNA, 23 nt, Artificial Sequence
  Synthetic oligonucleotide: BID-2989
agcucaucguagcccucccacug

SEQ ID NO: 41138 - RNA, 24 nt, Artificial Sequence
  Synthetic oligonucleotide: BID-2990
cagcucaucguagcccucccacug

SEQ ID NO: 41139 - RNA, 18 nt, Artificial Sequence
  Synthetic oligonucleotide: BID-2991
ggaaccguuguugaccug

SEQ ID NO: 41140 - RNA, 19 nt, Artificial Sequence
  Synthetic oligonucleotide: BID-2992
uggaaccguuguugaccug

SEQ ID NO: 41141 - RNA, 20 nt, Artificial Sequence
  Synthetic oligonucleotide: BID-118
cuggaaccguuguugaccug

SEQ ID NO: 41142 - RNA, 21 nt, Artificial Sequence
  Synthetic oligonucleotide: BID-2993
gcuggaaccguuguugaccug

SEQ ID NO: 41143 - RNA, 22 nt, Artificial Sequence
  Synthetic oligonucleotide: BID-2994
ggcuggaaccguuguugaccug

SEQ ID NO: 41144 - RNA, 23 nt, Artificial Sequence
  Synthetic oligonucleotide: BID-2995
aggcuggaaccguuguugaccug

SEQ ID NO: 41145 - RNA, 24 nt, Artificial Sequence
  Synthetic oligonucleotide: BID-2996
gaggcuggaaccguuguugaccug

SEQ ID NO: 41146 - RNA, 18 nt, Artificial Sequence
  Synthetic oligonucleotide: BID-2997
gcugguguuccugagcug

SEQ ID NO: 41147 - RNA, 19 nt, Artificial Sequence
  Synthetic oligonucleotide: BID-2998
ggcugguguuccugagcug

SEQ ID NO: 41148 - RNA, 20 nt, Artificial Sequence
  Synthetic oligonucleotide: BID-503
cggcugguguuccugagcug

SEQ ID NO: 41149 - RNA, 21 nt, Artificial Sequence
  Synthetic oligonucleotide: BID-2999
ccggcugguguuccugagcug

SEQ ID NO: 41150 - RNA, 22 nt, Artificial Sequence
  Synthetic oligonucleotide: BID-3000
accggcugguguuccugagcug

SEQ ID NO: 41151 - RNA, 23 nt, Artificial Sequence
  Synthetic oligonucleotide: BID-3001
gaccggcugguguuccugagcug

SEQ ID NO: 41152 - RNA, 24 nt, Artificial Sequence
  Synthetic oligonucleotide: BID-3002
cgaccggcugguguuccugagcug

SEQ ID NO: 41153 - RNA, 18 nt, Artificial Sequence
  Synthetic oligonucleotide: BID-3003
agugcguccagcucucug

SEQ ID NO: 41154 - RNA, 19 nt, Artificial Sequence
  Synthetic oligonucleotide: BID-3004
cagugcguccagcucucug

SEQ ID NO: 41155 - RNA, 20 nt, Artificial Sequence
  Synthetic oligonucleotide: BID-131
ccagugcguccagcucucug

SEQ ID NO: 41156 - RNA, 21 nt, Artificial Sequence
  Synthetic oligonucleotide: BID-3005
cccagugcguccagcucucug

SEQ ID NO: 41157 - RNA, 22 nt, Artificial Sequence
  Synthetic oligonucleotide: BID-3006
gcccagugcguccagcucucug

SEQ ID NO: 41158 - RNA, 23 nt, Artificial Sequence
  Synthetic oligonucleotide: BID-3007
ggcccagugcguccagcucucug

SEQ ID NO: 41159 - RNA, 24 nt, Artificial Sequence
  Synthetic oligonucleotide: BID-3008
uggcccagugcguccagcucucug

SEQ ID NO: 41160 - RNA, 18 nt, Artificial Sequence
  Synthetic oligonucleotide: BID-3009
guugucagaacagcuuug

SEQ ID NO: 41161 - RNA, 19 nt, Artificial Sequence
  Synthetic oligonucleotide: BID-3010
uguugucagaacagcuuug

SEQ ID NO: 41162 - RNA, 20 nt, Artificial Sequence
  Synthetic oligonucleotide: BID-527
cuguugucagaacagcuuug

SEQ ID NO: 41163 - RNA, 21 nt, Artificial Sequence
  Synthetic oligonucleotide: BID-3011
gcuguugucagaacagcuuug

SEQ ID NO: 41164 - RNA, 22 nt, Artificial Sequence
  Synthetic oligonucleotide: BID-3012
agcuguugucagaacagcuuug

SEQ ID NO: 41165 - RNA, 23 nt, Artificial Sequence
  Synthetic oligonucleotide: BID-3013
aagcuguugucagaacagcuuug

SEQ ID NO: 41166 - RNA, 24 nt, Artificial Sequence
  Synthetic oligonucleotide: BID-3014
gaagcuguugucagaacagcuuug

SEQ ID NO: 41167 - RNA, 18 nt, Artificial Sequence
  Synthetic oligonucleotide: BID-3015
caucguagcccucccacu

SEQ ID NO: 41168 - RNA, 19 nt, Artificial Sequence
  Synthetic oligonucleotide: BID-3016
ucaucguagcccucccacu

SEQ ID NO: 41169 - RNA, 20 nt, Artificial Sequence
  Synthetic oligonucleotide: BID-109
cucaucguagcccucccacu

SEQ ID NO: 41170 - RNA, 21 nt, Artificial Sequence
  Synthetic oligonucleotide: BID-3017
gcucaucguagcccucccacu

SEQ ID NO: 41171 - RNA, 22 nt, Artificial Sequence
  Synthetic oligonucleotide: BID-3018
agcucaucguagcccucccacu

SEQ ID NO: 41172 - RNA, 23 nt, Artificial Sequence
  Synthetic oligonucleotide: BID-3019
cagcucaucguagcccucccacu

SEQ ID NO: 41173 - RNA, 24 nt, Artificial Sequence
  Synthetic oligonucleotide: BID-3020
gcagcucaucguagcccucccacu

SEQ ID NO: 41174 - RNA, 18 nt, Artificial Sequence
  Synthetic oligonucleotide: BID-3021
uggaaccguuguugaccu

SEQ ID NO: 41175 - RNA, 19 nt, Artificial Sequence
  Synthetic oligonucleotide: BID-3022
cuggaaccguuguugaccu

SEQ ID NO: 41176 - RNA, 20 nt, Artificial Sequence
  Synthetic oligonucleotide: BID-533
gcuggaaccguuguugaccu

SEQ ID NO: 41177 - RNA, 21 nt, Artificial Sequence
  Synthetic oligonucleotide: BID-3023
ggcuggaaccguuguugaccu

SEQ ID NO: 41178 - RNA, 22 nt, Artificial Sequence
  Synthetic oligonucleotide: BID-3024
aggcuggaaccguuguugaccu

SEQ ID NO: 41179 - RNA, 23 nt, Artificial Sequence
  Synthetic oligonucleotide: BID-3025
gaggcuggaaccguuguugaccu

SEQ ID NO: 41180 - RNA, 24 nt, Artificial Sequence
  Synthetic oligonucleotide: BID-3026
ugaggcuggaaccguuguugaccu

SEQ ID NO: 41181 - RNA, 18 nt, Artificial Sequence
  Synthetic oligonucleotide: BID-3027
gcuguugucagaacagcu

SEQ ID NO: 41182 - RNA, 19 nt, Artificial Sequence
  Synthetic oligonucleotide: BID-3028
agcuguugucagaacagcu

SEQ ID NO: 41183 - RNA, 20 nt, Artificial Sequence
  Synthetic oligonucleotide: BID-525
aagcuguugucagaacagcu

SEQ ID NO: 41184 - RNA, 21 nt, Artificial Sequence
  Synthetic oligonucleotide: BID-3029
gaagcuguugucagaacagcu

SEQ ID NO: 41185 - RNA, 22 nt, Artificial Sequence
  Synthetic oligonucleotide: BID-3030
ggaagcuguugucagaacagcu

SEQ ID NO: 41186 - RNA, 23 nt, Artificial Sequence
  Synthetic oligonucleotide: BID-3031
cggaagcuguugucagaacagcu

SEQ ID NO: 41187 - RNA, 24 nt, Artificial Sequence
  Synthetic oligonucleotide: BID-3032
gcggaagcuguugucagaacagcu

SEQ ID NO: 41188 - RNA, 18 nt, Artificial Sequence
  Synthetic oligonucleotide: BID-3033
cagugcguccagcucucu

SEQ ID NO: 41189 - RNA, 19 nt, Artificial Sequence
  Synthetic oligonucleotide: BID-3034
ccagugcguccagcucucu

SEQ ID NO: 41190 - RNA, 20 nt, Artificial Sequence
  Synthetic oligonucleotide: BID-522
cccagugcguccagcucucu

SEQ ID NO: 41191 - RNA, 21 nt, Artificial Sequence
  Synthetic oligonucleotide: BID-3035
gcccagugcguccagcucucu

SEQ ID NO: 41192 - RNA, 22 nt, Artificial Sequence
  Synthetic oligonucleotide: BID-3036
ggcccagugcguccagcucucu

SEQ ID NO: 41193 - RNA, 23 nt, Artificial Sequence
  Synthetic oligonucleotide: BID-3037
uggcccagugcguccagcucucu

SEQ ID NO: 41194 - RNA, 24 nt, Artificial Sequence
  Synthetic oligonucleotide: BID-3038
guggcccagugcguccagcucucu

SEQ ID NO: 41195 - RNA, 18 nt, Artificial Sequence
  Synthetic oligonucleotide: BID-3039
cugaggggaaaggggagu

SEQ ID NO: 41196 - RNA, 19 nt, Artificial Sequence
  Synthetic oligonucleotide: BID-3040
ccugaggggaaaggggagu

SEQ ID NO: 41197 - RNA, 20 nt, Artificial Sequence
  Synthetic oligonucleotide: BID-541
accugaggggaaaggggagu

SEQ ID NO: 41198 - RNA, 21 nt, Artificial Sequence
  Synthetic oligonucleotide: BID-3041
gaccugaggggaaaggggagu

SEQ ID NO: 41199 - RNA, 22 nt, Artificial Sequence
  Synthetic oligonucleotide: BID-3042
ugaccugaggggaaaggggagu

SEQ ID NO: 41200 - RNA, 23 nt, Artificial Sequence
  Synthetic oligonucleotide: BID-3043
uugaccugaggggaaaggggagu

SEQ ID NO: 41201 - RNA, 24 nt, Artificial Sequence
  Synthetic oligonucleotide: BID-3044
guugaccugaggggaaaggggagu

SEQ ID NO: 41202 - RNA, 18 nt, Artificial Sequence
  Synthetic oligonucleotide: BID-3045
aauaaaauucacuguugu

SEQ ID NO: 41203 - RNA, 19 nt, Artificial Sequence
  Synthetic oligonucleotide: BID-3046
uaauaaaauucacuguugu

SEQ ID NO: 41204 - RNA, 20 nt, Artificial Sequence
  Synthetic oligonucleotide: BID-658
uuaauaaaauucacuguugu

SEQ ID NO: 41205 - RNA, 21 nt, Artificial Sequence
  Synthetic oligonucleotide: BID-3047
guuaauaaaauucacuguugu

SEQ ID NO: 41206 - RNA, 22 nt, Artificial Sequence
  Synthetic oligonucleotide: BID-3048
gguuaauaaaauucacuguugu

SEQ ID NO: 41207 - RNA, 23 nt, Artificial Sequence
  Synthetic oligonucleotide: BID-3049
ugguuaauaaaauucacuguugu

SEQ ID NO: 41208 - RNA, 24 nt, Artificial Sequence
  Synthetic oligonucleotide: BID-3050
cugguuaauaaaauucacuguugu

SEQ ID NO: 41209 - RNA, 18 nt, Artificial Sequence
  Synthetic oligonucleotide: BID-3051
cucugcggaagcuguugu

SEQ ID NO: 41210 - RNA, 19 nt, Artificial Sequence
  Synthetic oligonucleotide: BID-3052
ucucugcggaagcuguugu

SEQ ID NO: 41211 - RNA, 20 nt, Artificial Sequence
  Synthetic oligonucleotide: BID-524
cucucugcggaagcuguugu

SEQ ID NO: 41212 - RNA, 21 nt, Artificial Sequence
  Synthetic oligonucleotide: BID-3053
gcucucugcggaagcuguugu

SEQ ID NO: 41213 - RNA, 22 nt, Artificial Sequence
  Synthetic oligonucleotide: BID-3054
agcucucugcggaagcuguugu

SEQ ID NO: 41214 - RNA, 23 nt, Artificial Sequence
  Synthetic oligonucleotide: BID-3055
cagcucucugcggaagcuguugu

SEQ ID NO: 41215 - RNA, 24 nt, Artificial Sequence
  Synthetic oligonucleotide: BID-3056
ccagcucucugcggaagcuguugu

SEQ ID NO: 41216 - RNA, 18 nt, Artificial Sequence
  Synthetic oligonucleotide: BID-3057
cuguugucagaacagcuu

SEQ ID NO: 41217 - RNA, 19 nt, Artificial Sequence
  Synthetic oligonucleotide: BID-3058
gcuguugucagaacagcuu

SEQ ID NO: 41218 - RNA, 20 nt, Artificial Sequence
  Synthetic oligonucleotide: BID-136
agcuguugucagaacagcuu

SEQ ID NO: 41219 - RNA, 21 nt, Artificial Sequence
  Synthetic oligonucleotide: BID-3059
aagcuguugucagaacagcuu

SEQ ID NO: 41220 - RNA, 22 nt, Artificial Sequence
  Synthetic oligonucleotide: BID-3060
gaagcuguugucagaacagcuu

SEQ ID NO: 41221 - RNA, 23 nt, Artificial Sequence
  Synthetic oligonucleotide: BID-3061
ggaagcuguugucagaacagcuu

SEQ ID NO: 41222 - RNA, 24 nt, Artificial Sequence
  Synthetic oligonucleotide: BID-3062
cggaagcuguugucagaacagcuu

SEQ ID NO: 41223 - RNA, 18 nt, Artificial Sequence
  Synthetic oligonucleotide: BID-3063
acucccgcuugggaagaa

SEQ ID NO: 41224 - RNA, 19 nt, Artificial Sequence
  Synthetic oligonucleotide: BID-3064
cacucccgcuugggaagaa

SEQ ID NO: 41225 - RNA, 20 nt, Artificial Sequence
  Synthetic oligonucleotide: BID-407
ccacucccgcuugggaagaa

SEQ ID NO: 41226 - RNA, 21 nt, Artificial Sequence
  Synthetic oligonucleotide: BID-3065
gccacucccgcuugggaagaa

SEQ ID NO: 41227 - RNA, 22 nt, Artificial Sequence
  Synthetic oligonucleotide: BID-3066
agccacucccgcuugggaagaa

SEQ ID NO: 41228 - RNA, 23 nt, Artificial Sequence
  Synthetic oligonucleotide: BID-3067
cagccacucccgcuugggaagaa

SEQ ID NO: 41229 - RNA, 24 nt, Artificial Sequence
  Synthetic oligonucleotide: BID-3068
gcagccacucccgcuugggaagaa

SEQ ID NO: 41230 - RNA, 18 nt, Artificial Sequence
  Synthetic oligonucleotide: BID-3069
cucugugcaggaccggaa

SEQ ID NO: 41231 - RNA, 19 nt, Artificial Sequence
  Synthetic oligonucleotide: BID-3070
ccucugugcaggaccggaa

SEQ ID NO: 41232 - RNA, 20 nt, Artificial Sequence
  Synthetic oligonucleotide: BID-615
cccucugugcaggaccggaa

SEQ ID NO: 41233 - RNA, 21 nt, Artificial Sequence
  Synthetic oligonucleotide: BID-3071
ccccucugugcaggaccggaa

SEQ ID NO: 41234 - RNA, 22 nt, Artificial Sequence
  Synthetic oligonucleotide: BID-3072
gccccucugugcaggaccggaa

SEQ ID NO: 41235 - RNA, 23 nt, Artificial Sequence
  Synthetic oligonucleotide: BID-3073
ugccccucugugcaggaccggaa

SEQ ID NO: 41236 - RNA, 24 nt, Artificial Sequence
  Synthetic oligonucleotide: BID-3074
gugccccucugugcaggaccggaa

SEQ ID NO: 41237 - RNA, 18 nt, Artificial Sequence
  Synthetic oligonucleotide: BID-3075
acagugcggauucuguaa

SEQ ID NO: 41238 - RNA, 19 nt, Artificial Sequence
  Synthetic oligonucleotide: BID-3076
cacagugcggauucuguaa

SEQ ID NO: 41239 - RNA, 20 nt, Artificial Sequence
  Synthetic oligonucleotide: BID-373
gcacagugcggauucuguaa

SEQ ID NO: 41240 - RNA, 21 nt, Artificial Sequence
  Synthetic oligonucleotide: BID-3077
agcacagugcggauucuguaa

SEQ ID NO: 41241 - RNA, 22 nt, Artificial Sequence
  Synthetic oligonucleotide: BID-3078
gagcacagugcggauucuguaa

SEQ ID NO: 41242 - RNA, 23 nt, Artificial Sequence
  Synthetic oligonucleotide: BID-3079
ggagcacagugcggauucuguaa

SEQ ID NO: 41243 - RNA, 24 nt, Artificial Sequence
  Synthetic oligonucleotide: BID-3080
aggagcacagugcggauucuguaa

SEQ ID NO: 41244 - RNA, 18 nt, Artificial Sequence
  Synthetic oligonucleotide: BID-3081
aggccuacccuagagaca

SEQ ID NO: 41245 - RNA, 19 nt, Artificial Sequence
  Synthetic oligonucleotide: BID-3082
caggccuacccuagagaca

SEQ ID NO: 41246 - RNA, 20 nt, Artificial Sequence
  Synthetic oligonucleotide: BID-285
gcaggccuacccuagagaca

SEQ ID NO: 41247 - RNA, 21 nt, Artificial Sequence
  Synthetic oligonucleotide: BID-3083
ugcaggccuacccuagagaca

SEQ ID NO: 41248 - RNA, 22 nt, Artificial Sequence
  Synthetic oligonucleotide: BID-3084
cugcaggccuacccuagagaca

SEQ ID NO: 41249 - RNA, 23 nt, Artificial Sequence
  Synthetic oligonucleotide: BID-3085
gcugcaggccuacccuagagaca

SEQ ID NO: 41250 - RNA, 24 nt, Artificial Sequence
  Synthetic oligonucleotide: BID-3086
ugcugcaggccuacccuagagaca

SEQ ID NO: 41251 - RNA, 18 nt, Artificial Sequence
  Synthetic oligonucleotide: BID-3087
gccagugcuggcucccca

SEQ ID NO: 41252 - RNA, 19 nt, Artificial Sequence
  Synthetic oligonucleotide: BID-3088
ugccagugcuggcucccca

SEQ ID NO: 41253 - RNA, 20 nt, Artificial Sequence
  Synthetic oligonucleotide: BID-398
cugccagugcuggcucccca

SEQ ID NO: 41254 - RNA, 21 nt, Artificial Sequence
  Synthetic oligonucleotide: BID-3089
gcugccagugcuggcucccca

SEQ ID NO: 41255 - RNA, 22 nt, Artificial Sequence
  Synthetic oligonucleotide: BID-3090
agcugccagugcuggcucccca

SEQ ID NO: 41256 - RNA, 23 nt, Artificial Sequence
  Synthetic oligonucleotide: BID-3091
gagcugccagugcuggcucccca

SEQ ID NO: 41257 - RNA, 24 nt, Artificial Sequence
  Synthetic oligonucleotide: BID-3092
cgagcugccagugcuggcucccca

SEQ ID NO: 41258 - RNA, 18 nt, Artificial Sequence
  Synthetic oligonucleotide: BID-3093
ucccuuuccaggucgcca

SEQ ID NO: 41259 - RNA, 19 nt, Artificial Sequence
  Synthetic oligonucleotide: BID-3094
gucccuuuccaggucgcca

SEQ ID NO: 41260 - RNA, 20 nt, Artificial Sequence
  Synthetic oligonucleotide: BID-378
ugucccuuuccaggucgcca

SEQ ID NO: 41261 - RNA, 21 nt, Artificial Sequence
  Synthetic oligonucleotide: BID-3095
gugucccuuuccaggucgcca

SEQ ID NO: 41262 - RNA, 22 nt, Artificial Sequence
  Synthetic oligonucleotide: BID-3096
ugugucccuuuccaggucgcca

SEQ ID NO: 41263 - RNA, 23 nt, Artificial Sequence
  Synthetic oligonucleotide: BID-3097
gugugucccuuuccaggucgcca

SEQ ID NO: 41264 - RNA, 24 nt, Artificial Sequence
  Synthetic oligonucleotide: BID-3098
ugugugucccuuuccaggucgcca

SEQ ID NO: 41265 - RNA, 18 nt, Artificial Sequence
  Synthetic oligonucleotide: BID-3099
cgcagagagcuggacgca

SEQ ID NO: 41266 - RNA, 19 nt, Artificial Sequence
  Synthetic oligonucleotide: BID-3100
ccgcagagagcuggacgca

SEQ ID NO: 41267 - RNA, 20 nt, Artificial Sequence
  Synthetic oligonucleotide: BID-396
uccgcagagagcuggacgca

SEQ ID NO: 41268 - RNA, 21 nt, Artificial Sequence
  Synthetic oligonucleotide: BID-3101
uuccgcagagagcuggacgca

SEQ ID NO: 41269 - RNA, 22 nt, Artificial Sequence
  Synthetic oligonucleotide: BID-3102
cuuccgcagagagcuggacgca

SEQ ID NO: 41270 - RNA, 23 nt, Artificial Sequence
  Synthetic oligonucleotide: BID-3103
gcuuccgcagagagcuggacgca

SEQ ID NO: 41271 - RNA, 24 nt, Artificial Sequence
  Synthetic oligonucleotide: BID-3104
agcuuccgcagagagcuggacgca

SEQ ID NO: 41272 - RNA, 18 nt, Artificial Sequence
  Synthetic oligonucleotide: BID-3105
cugacaacagcuuccgca

SEQ ID NO: 41273 - RNA, 19 nt, Artificial Sequence
  Synthetic oligonucleotide: BID-3106
ucugacaacagcuuccgca

SEQ ID NO: 41274 - RNA, 20 nt, Artificial Sequence
  Synthetic oligonucleotide: BID-394
uucugacaacagcuuccgca

SEQ ID NO: 41275 - RNA, 21 nt, Artificial Sequence
  Synthetic oligonucleotide: BID-3107
guucugacaacagcuuccgca

SEQ ID NO: 41276 - RNA, 22 nt, Artificial Sequence
  Synthetic oligonucleotide: BID-3108
uguucugacaacagcuuccgca

SEQ ID NO: 41277 - RNA, 23 nt, Artificial Sequence
  Synthetic oligonucleotide: BID-3109
cuguucugacaacagcuuccgca

SEQ ID NO: 41278 - RNA, 24 nt, Artificial Sequence
  Synthetic oligonucleotide: BID-3110
gcuguucugacaacagcuuccgca

SEQ ID NO: 41279 - RNA, 18 nt, Artificial Sequence
  Synthetic oligonucleotide: BID-3111
augauggcucggugggca

SEQ ID NO: 41280 - RNA, 19 nt, Artificial Sequence
  Synthetic oligonucleotide: BID-3112
caugauggcucggugggca

SEQ ID NO: 41281 - RNA, 20 nt, Artificial Sequence
  Synthetic oligonucleotide: BID-364
ucaugauggcucggugggca

SEQ ID NO: 41282 - RNA, 21 nt, Artificial Sequence
  Synthetic oligonucleotide: BID-3113
gucaugauggcucggugggca

SEQ ID NO: 41283 - RNA, 22 nt, Artificial Sequence
  Synthetic oligonucleotide: BID-3114
ggucaugauggcucggugggca

SEQ ID NO: 41284 - RNA, 23 nt, Artificial Sequence
  Synthetic oligonucleotide: BID-3115
gggucaugauggcucggugggca

SEQ ID NO: 41285 - RNA, 24 nt, Artificial Sequence
  Synthetic oligonucleotide: BID-3116
ggggucaugauggcucggugggca

SEQ ID NO: 41286 - RNA, 18 nt, Artificial Sequence
  Synthetic oligonucleotide: BID-3117
acccuagagacauggaga

SEQ ID NO: 41287 - RNA, 19 nt, Artificial Sequence
  Synthetic oligonucleotide: BID-3118
uacccuagagacauggaga

SEQ ID NO: 41288 - RNA, 20 nt, Artificial Sequence
  Synthetic oligonucleotide: BID-286
cuacccuagagacauggaga

SEQ ID NO: 41289 - RNA, 21 nt, Artificial Sequence
  Synthetic oligonucleotide: BID-3119
ccuacccuagagacauggaga

SEQ ID NO: 41290 - RNA, 22 nt, Artificial Sequence
  Synthetic oligonucleotide: BID-3120
gccuacccuagagacauggaga

SEQ ID NO: 41291 - RNA, 23 nt, Artificial Sequence
  Synthetic oligonucleotide: BID-3121
ggccuacccuagagacauggaga

SEQ ID NO: 41292 - RNA, 24 nt, Artificial Sequence
  Synthetic oligonucleotide: BID-3122
aggccuacccuagagacauggaga

SEQ ID NO: 41293 - RNA, 18 nt, Artificial Sequence
  Synthetic oligonucleotide: BID-3123
gugccccucugugcagga

SEQ ID NO: 41294 - RNA, 19 nt, Artificial Sequence
  Synthetic oligonucleotide: BID-3124
ugugccccucugugcagga

SEQ ID NO: 41295 - RNA, 20 nt, Artificial Sequence
  Synthetic oligonucleotide: BID-613
gugugccccucugugcagga

SEQ ID NO: 41296 - RNA, 21 nt, Artificial Sequence
  Synthetic oligonucleotide: BID-3125
ugugugccccucugugcagga

SEQ ID NO: 41297 - RNA, 22 nt, Artificial Sequence
  Synthetic oligonucleotide: BID-3126
cugugugccccucugugcagga

SEQ ID NO: 41298 - RNA, 23 nt, Artificial Sequence
  Synthetic oligonucleotide: BID-3127
ucugugugccccucugugcagga

SEQ ID NO: 41299 - RNA, 24 nt, Artificial Sequence
  Synthetic oligonucleotide: BID-3128
uucugugugccccucugugcagga

SEQ ID NO: 41300 - RNA, 18 nt, Artificial Sequence
  Synthetic oligonucleotide: BID-3129
cuugcucuaggggaugga

SEQ ID NO: 41301 - RNA, 19 nt, Artificial Sequence
  Synthetic oligonucleotide: BID-3130
ucuugcucuaggggaugga

SEQ ID NO: 41302 - RNA, 20 nt, Artificial Sequence
  Synthetic oligonucleotide: BID-3131
uucuugcucuaggggaugga

SEQ ID NO: 41303 - RNA, 21 nt, Artificial Sequence
  Synthetic oligonucleotide: BID-3132
uuucuugcucuaggggaugga

SEQ ID NO: 41304 - RNA, 22 nt, Artificial Sequence
  Synthetic oligonucleotide: BID-3133
cuuucuugcucuaggggaugga

SEQ ID NO: 41305 - RNA, 23 nt, Artificial Sequence
  Synthetic oligonucleotide: BID-3134
ccuuucuugcucuaggggaugga

SEQ ID NO: 41306 - RNA, 24 nt, Artificial Sequence
  Synthetic oligonucleotide: BID-3135
uccuuucuugcucuaggggaugga

SEQ ID NO: 41307 - RNA, 18 nt, Artificial Sequence
  Synthetic oligonucleotide: BID-3136
cucuaggggauggacuga

SEQ ID NO: 41308 - RNA, 19 nt, Artificial Sequence
  Synthetic oligonucleotide: BID-3137
gcucuaggggauggacuga

SEQ ID NO: 41309 - RNA, 20 nt, Artificial Sequence
  Synthetic oligonucleotide: BID-3138
ugcucuaggggauggacuga

SEQ ID NO: 41310 - RNA, 21 nt, Artificial Sequence
  Synthetic oligonucleotide: BID-3139
uugcucuaggggauggacuga

SEQ ID NO: 41311 - RNA, 22 nt, Artificial Sequence
  Synthetic oligonucleotide: BID-3140
cuugcucuaggggauggacuga

SEQ ID NO: 41312 - RNA, 23 nt, Artificial Sequence
  Synthetic oligonucleotide: BID-3141
ucuugcucuaggggauggacuga

SEQ ID NO: 41313 - RNA, 24 nt, Artificial Sequence
  Synthetic oligonucleotide: BID-3142
uucuugcucuaggggauggacuga

SEQ ID NO: 41314 - RNA, 18 nt, Artificial Sequence
  Synthetic oligonucleotide: BID-3143
gccggucggaggagguga

SEQ ID NO: 41315 - RNA, 19 nt, Artificial Sequence
  Synthetic oligonucleotide: BID-3144
agccggucggaggagguga

SEQ ID NO: 41316 - RNA, 20 nt, Artificial Sequence
  Synthetic oligonucleotide: BID-426
cagccggucggaggagguga

SEQ ID NO: 41317 - RNA, 21 nt, Artificial Sequence
  Synthetic oligonucleotide: BID-3145
ccagccggucggaggagguga

SEQ ID NO: 41318 - RNA, 22 nt, Artificial Sequence
  Synthetic oligonucleotide: BID-3146
accagccggucggaggagguga

SEQ ID NO: 41319 - RNA, 23 nt, Artificial Sequence
  Synthetic oligonucleotide: BID-3147
caccagccggucggaggagguga

SEQ ID NO: 41320 - RNA, 24 nt, Artificial Sequence
  Synthetic oligonucleotide: BID-3148
acaccagccggucggaggagguga

SEQ ID NO: 41321 - RNA, 18 nt, Artificial Sequence
  Synthetic oligonucleotide: BID-3149
ucugugcaggaccggaac

SEQ ID NO: 41322 - RNA, 19 nt, Artificial Sequence
  Synthetic oligonucleotide: BID-3150
cucugugcaggaccggaac

SEQ ID NO: 41323 - RNA, 20 nt, Artificial Sequence
  Synthetic oligonucleotide: BID-280
ccucugugcaggaccggaac

SEQ ID NO: 41324 - RNA, 21 nt, Artificial Sequence
  Synthetic oligonucleotide: BID-3151
cccucugugcaggaccggaac

SEQ ID NO: 41325 - RNA, 22 nt, Artificial Sequence
  Synthetic oligonucleotide: BID-3152
ccccucugugcaggaccggaac

SEQ ID NO: 41326 - RNA, 23 nt, Artificial Sequence
  Synthetic oligonucleotide: BID-3153
gccccucugugcaggaccggaac

SEQ ID NO: 41327 - RNA, 24 nt, Artificial Sequence
  Synthetic oligonucleotide: BID-3154
ugccccucugugcaggaccggaac

SEQ ID NO: 41328 - RNA, 18 nt, Artificial Sequence
  Synthetic oligonucleotide: BID-3155
cacugggacacugugaac

SEQ ID NO: 41329 - RNA, 19 nt, Artificial Sequence
  Synthetic oligonucleotide: BID-3156
ccacugggacacugugaac

SEQ ID NO: 41330 - RNA, 20 nt, Artificial Sequence
  Synthetic oligonucleotide: BID-381
gccacugggacacugugaac

SEQ ID NO: 41331 - RNA, 21 nt, Artificial Sequence
  Synthetic oligonucleotide: BID-3157
cgccacugggacacugugaac

SEQ ID NO: 41332 - RNA, 22 nt, Artificial Sequence
  Synthetic oligonucleotide: BID-3158
ucgccacugggacacugugaac

SEQ ID NO: 41333 - RNA, 23 nt, Artificial Sequence
  Synthetic oligonucleotide: BID-3159
gucgccacugggacacugugaac

SEQ ID NO: 41334 - RNA, 24 nt, Artificial Sequence
  Synthetic oligonucleotide: BID-3160
ggucgccacugggacacugugaac

SEQ ID NO: 41335 - RNA, 18 nt, Artificial Sequence
  Synthetic oligonucleotide: BID-3161
acagugaauuuuauuaac

SEQ ID NO: 41336 - RNA, 19 nt, Artificial Sequence
  Synthetic oligonucleotide: BID-3162
aacagugaauuuuauuaac

SEQ ID NO: 41337 - RNA, 20 nt, Artificial Sequence
  Synthetic oligonucleotide: BID-628
caacagugaauuuuauuaac

SEQ ID NO: 41338 - RNA, 21 nt, Artificial Sequence
  Synthetic oligonucleotide: BID-3163
acaacagugaauuuuauuaac

SEQ ID NO: 41339 - RNA, 22 nt, Artificial Sequence
  Synthetic oligonucleotide: BID-3164
cacaacagugaauuuuauuaac

SEQ ID NO: 41340 - RNA, 23 nt, Artificial Sequence
  Synthetic oligonucleotide: BID-3165
acacaacagugaauuuuauuaac

SEQ ID NO: 41341 - RNA, 24 nt, Artificial Sequence
  Synthetic oligonucleotide: BID-3166
cacacaacagugaauuuuauuaac

SEQ ID NO: 41342 - RNA, 18 nt, Artificial Sequence
  Synthetic oligonucleotide: BID-3167
cccuuuccaggucgccac

SEQ ID NO: 41343 - RNA, 19 nt, Artificial Sequence
  Synthetic oligonucleotide: BID-3168
ucccuuuccaggucgccac

SEQ ID NO: 41344 - RNA, 20 nt, Artificial Sequence
  Synthetic oligonucleotide: BID-59
gucccuuuccaggucgccac

SEQ ID NO: 41345 - RNA, 21 nt, Artificial Sequence
  Synthetic oligonucleotide: BID-3169
ugucccuuuccaggucgccac

SEQ ID NO: 41346 - RNA, 22 nt, Artificial Sequence
  Synthetic oligonucleotide: BID-3170
gugucccuuuccaggucgccac

SEQ ID NO: 41347 - RNA, 23 nt, Artificial Sequence
  Synthetic oligonucleotide: BID-3171
ugugucccuuuccaggucgccac

SEQ ID NO: 41348 - RNA, 24 nt, Artificial Sequence
  Synthetic oligonucleotide: BID-3172
gugugucccuuuccaggucgccac

SEQ ID NO: 41349 - RNA, 18 nt, Artificial Sequence
  Synthetic oligonucleotide: BID-3173
caggccuacccuagagac

SEQ ID NO: 41350 - RNA, 19 nt, Artificial Sequence
  Synthetic oligonucleotide: BID-3174
gcaggccuacccuagagac

SEQ ID NO: 41351 - RNA, 20 nt, Artificial Sequence
  Synthetic oligonucleotide: BID-620
ugcaggccuacccuagagac

SEQ ID NO: 41352 - RNA, 21 nt, Artificial Sequence
  Synthetic oligonucleotide: BID-3175
cugcaggccuacccuagagac

SEQ ID NO: 41353 - RNA, 22 nt, Artificial Sequence
  Synthetic oligonucleotide: BID-3176
gcugcaggccuacccuagagac

SEQ ID NO: 41354 - RNA, 23 nt, Artificial Sequence
  Synthetic oligonucleotide: BID-3177
ugcugcaggccuacccuagagac

SEQ ID NO: 41355 - RNA, 24 nt, Artificial Sequence
  Synthetic oligonucleotide: BID-3178
cugcugcaggccuacccuagagac

SEQ ID NO: 41356 - RNA, 18 nt, Artificial Sequence
  Synthetic oligonucleotide: BID-3179
ugccccucugugcaggac

SEQ ID NO: 41357 - RNA, 19 nt, Artificial Sequence
  Synthetic oligonucleotide: BID-3180
gugccccucugugcaggac

SEQ ID NO: 41358 - RNA, 20 nt, Artificial Sequence
  Synthetic oligonucleotide: BID-279
ugugccccucugugcaggac

SEQ ID NO: 41359 - RNA, 21 nt, Artificial Sequence
  Synthetic oligonucleotide: BID-3181
gugugccccucugugcaggac

SEQ ID NO: 41360 - RNA, 22 nt, Artificial Sequence
  Synthetic oligonucleotide: BID-3182
ugugugccccucugugcaggac

SEQ ID NO: 41361 - RNA, 23 nt, Artificial Sequence
  Synthetic oligonucleotide: BID-3183
cugugugccccucugugcaggac

SEQ ID NO: 41362 - RNA, 24 nt, Artificial Sequence
  Synthetic oligonucleotide: BID-3184
ucugugugccccucugugcaggac

SEQ ID NO: 41363 - RNA, 18 nt, Artificial Sequence
  Synthetic oligonucleotide: BID-3185
cagaaccuacgcaccuac

SEQ ID NO: 41364 - RNA, 19 nt, Artificial Sequence
  Synthetic oligonucleotide: BID-3186
ccagaaccuacgcaccuac

SEQ ID NO: 41365 - RNA, 20 nt, Artificial Sequence
  Synthetic oligonucleotide: BID-629
accagaaccuacgcaccuac

SEQ ID NO: 41366 - RNA, 21 nt, Artificial Sequence
  Synthetic oligonucleotide: BID-3187
aaccagaaccuacgcaccuac

SEQ ID NO: 41367 - RNA, 22 nt, Artificial Sequence
  Synthetic oligonucleotide: BID-3188
uaaccagaaccuacgcaccuac

SEQ ID NO: 41368 - RNA, 23 nt, Artificial Sequence
  Synthetic oligonucleotide: BID-3189
uuaaccagaaccuacgcaccuac

SEQ ID NO: 41369 - RNA, 24 nt, Artificial Sequence
  Synthetic oligonucleotide: BID-3190
auuaaccagaaccuacgcaccuac

SEQ ID NO: 41370 - RNA, 18 nt, Artificial Sequence
  Synthetic oligonucleotide: BID-3191
ccagaaauguaagaaccc

SEQ ID NO: 41371 - RNA, 19 nt, Artificial Sequence
  Synthetic oligonucleotide: BID-3192
gccagaaauguaagaaccc

SEQ ID NO: 41372 - RNA, 20 nt, Artificial Sequence
  Synthetic oligonucleotide: BID-634
agccagaaauguaagaaccc

SEQ ID NO: 41373 - RNA, 21 nt, Artificial Sequence
  Synthetic oligonucleotide: BID-3193
uagccagaaauguaagaaccc

SEQ ID NO: 41374 - RNA, 22 nt, Artificial Sequence
  Synthetic oligonucleotide: BID-3194
uuagccagaaauguaagaaccc

SEQ ID NO: 41375 - RNA, 23 nt, Artificial Sequence
  Synthetic oligonucleotide: BID-3195
cuuagccagaaauguaagaaccc

SEQ ID NO: 41376 - RNA, 24 nt, Artificial Sequence
  Synthetic oligonucleotide: BID-3196
gcuuagccagaaauguaagaaccc

SEQ ID NO: 41377 - RNA, 18 nt, Artificial Sequence
  Synthetic oligonucleotide: BID-3197
gcugcugcaggccuaccc

SEQ ID NO: 41378 - RNA, 19 nt, Artificial Sequence
  Synthetic oligonucleotide: BID-3198
agcugcugcaggccuaccc

SEQ ID NO: 41379 - RNA, 20 nt, Artificial Sequence
  Synthetic oligonucleotide: BID-619
cagcugcugcaggccuaccc

SEQ ID NO: 41380 - RNA, 21 nt, Artificial Sequence
  Synthetic oligonucleotide: BID-3199
gcagcugcugcaggccuaccc

SEQ ID NO: 41381 - RNA, 22 nt, Artificial Sequence
  Synthetic oligonucleotide: BID-3200
agcagcugcugcaggccuaccc

SEQ ID NO: 41382 - RNA, 23 nt, Artificial Sequence
  Synthetic oligonucleotide: BID-3201
gagcagcugcugcaggccuaccc

SEQ ID NO: 41383 - RNA, 24 nt, Artificial Sequence
  Synthetic oligonucleotide: BID-3202
ggagcagcugcugcaggccuaccc

SEQ ID NO: 41384 - RNA, 18 nt, Artificial Sequence
  Synthetic oligonucleotide: BID-3203
gggaccuggccacugccc

SEQ ID NO: 41385 - RNA, 19 nt, Artificial Sequence
  Synthetic oligonucleotide: BID-3204
agggaccuggccacugccc

SEQ ID NO: 41386 - RNA, 20 nt, Artificial Sequence
  Synthetic oligonucleotide: BID-283
cagggaccuggccacugccc

SEQ ID NO: 41387 - RNA, 21 nt, Artificial Sequence
  Synthetic oligonucleotide: BID-3205
acagggaccuggccacugccc

SEQ ID NO: 41388 - RNA, 22 nt, Artificial Sequence
  Synthetic oligonucleotide: BID-3206
aacagggaccuggccacugccc

SEQ ID NO: 41389 - RNA, 23 nt, Artificial Sequence
  Synthetic oligonucleotide: BID-3207
gaacagggaccuggccacugccc

SEQ ID NO: 41390 - RNA, 24 nt, Artificial Sequence
  Synthetic oligonucleotide: BID-3208
ggaacagggaccuggccacugccc

SEQ ID NO: 41391 - RNA, 18 nt, Artificial Sequence
  Synthetic oligonucleotide: BID-3209
ugccgcgcugcccaggcc

SEQ ID NO: 41392 - RNA, 19 nt, Artificial Sequence
  Synthetic oligonucleotide: BID-3210
cugccgcgcugcccaggcc

SEQ ID NO: 41393 - RNA, 20 nt, Artificial Sequence
  Synthetic oligonucleotide: BID-386
gcugccgcgcugcccaggcc

SEQ ID NO: 41394 - RNA, 21 nt, Artificial Sequence
  Synthetic oligonucleotide: BID-3211
agcugccgcgcugcccaggcc

SEQ ID NO: 41395 - RNA, 22 nt, Artificial Sequence
  Synthetic oligonucleotide: BID-3212
gagcugccgcgcugcccaggcc

SEQ ID NO: 41396 - RNA, 23 nt, Artificial Sequence
  Synthetic oligonucleotide: BID-3213
ggagcugccgcgcugcccaggcc

SEQ ID NO: 41397 - RNA, 24 nt, Artificial Sequence
  Synthetic oligonucleotide: BID-3214
cggagcugccgcgcugcccaggcc

SEQ ID NO: 41398 - RNA, 18 nt, Artificial Sequence
  Synthetic oligonucleotide: BID-3215
agcuggacgcacugggcc

SEQ ID NO: 41399 - RNA, 19 nt, Artificial Sequence
  Synthetic oligonucleotide: BID-3216
gagcuggacgcacugggcc

SEQ ID NO: 41400 - RNA, 20 nt, Artificial Sequence
  Synthetic oligonucleotide: BID-397
agagcuggacgcacugggcc

SEQ ID NO: 41401 - RNA, 21 nt, Artificial Sequence
  Synthetic oligonucleotide: BID-3217
gagagcuggacgcacugggcc

SEQ ID NO: 41402 - RNA, 22 nt, Artificial Sequence
  Synthetic oligonucleotide: BID-3218
agagagcuggacgcacugggcc

SEQ ID NO: 41403 - RNA, 23 nt, Artificial Sequence
  Synthetic oligonucleotide: BID-3219
cagagagcuggacgcacugggcc

SEQ ID NO: 41404 - RNA, 24 nt, Artificial Sequence
  Synthetic oligonucleotide: BID-3220
gcagagagcuggacgcacugggcc

SEQ ID NO: 41405 - RNA, 18 nt, Artificial Sequence
  Synthetic oligonucleotide: BID-3221
cuggcccugcugcuggcc

SEQ ID NO: 41406 - RNA, 19 nt, Artificial Sequence
  Synthetic oligonucleotide: BID-3222
gcuggcccugcugcuggcc

SEQ ID NO: 41407 - RNA, 20 nt, Artificial Sequence
  Synthetic oligonucleotide: BID-626
ugcuggcccugcugcuggcc

SEQ ID NO: 41408 - RNA, 21 nt, Artificial Sequence
  Synthetic oligonucleotide: BID-3223
gugcuggcccugcugcuggcc

SEQ ID NO: 41409 - RNA, 22 nt, Artificial Sequence
  Synthetic oligonucleotide: BID-3224
ggugcuggcccugcugcuggcc

SEQ ID NO: 41410 - RNA, 23 nt, Artificial Sequence
  Synthetic oligonucleotide: BID-3225
uggugcuggcccugcugcuggcc

SEQ ID NO: 41411 - RNA, 24 nt, Artificial Sequence
  Synthetic oligonucleotide: BID-3226
cuggugcuggcccugcugcuggcc

SEQ ID NO: 41412 - RNA, 18 nt, Artificial Sequence
  Synthetic oligonucleotide: BID-3227
agggaccuggccacugcc

SEQ ID NO: 41413 - RNA, 19 nt, Artificial Sequence
  Synthetic oligonucleotide: BID-3228
cagggaccuggccacugcc

SEQ ID NO: 41414 - RNA, 20 nt, Artificial Sequence
  Synthetic oligonucleotide: BID-617
acagggaccuggccacugcc

SEQ ID NO: 41415 - RNA, 21 nt, Artificial Sequence
  Synthetic oligonucleotide: BID-3229
aacagggaccuggccacugcc

SEQ ID NO: 41416 - RNA, 22 nt, Artificial Sequence
  Synthetic oligonucleotide: BID-3230
gaacagggaccuggccacugcc

SEQ ID NO: 41417 - RNA, 23 nt, Artificial Sequence
  Synthetic oligonucleotide: BID-3231
ggaacagggaccuggccacugcc

SEQ ID NO: 41418 - RNA, 24 nt, Artificial Sequence
  Synthetic oligonucleotide: BID-3232
cggaacagggaccuggccacugcc

SEQ ID NO: 41419 - RNA, 18 nt, Artificial Sequence
  Synthetic oligonucleotide: BID-3233
gcccaggucggggacagc

SEQ ID NO: 41420 - RNA, 19 nt, Artificial Sequence
  Synthetic oligonucleotide: BID-3234
cgcccaggucggggacagc

SEQ ID NO: 41421 - RNA, 20 nt, Artificial Sequence
  Synthetic oligonucleotide: BID-416
ucgcccaggucggggacagc

SEQ ID NO: 41422 - RNA, 21 nt, Artificial Sequence
  Synthetic oligonucleotide: BID-3235
cucgcccaggucggggacagc

SEQ ID NO: 41423 - RNA, 22 nt, Artificial Sequence
  Synthetic oligonucleotide: BID-3236
ccucgcccaggucggggacagc

SEQ ID NO: 41424 - RNA, 23 nt, Artificial Sequence
  Synthetic oligonucleotide: BID-3237
accucgcccaggucggggacagc

SEQ ID NO: 41425 - RNA, 24 nt, Artificial Sequence
  Synthetic oligonucleotide: BID-3238
caccucgcccaggucggggacagc

SEQ ID NO: 41426 - RNA, 18 nt, Artificial Sequence
  Synthetic oligonucleotide: BID-3239
gauggcucggugggcagc

SEQ ID NO: 41427 - RNA, 19 nt, Artificial Sequence
  Synthetic oligonucleotide: BID-3240
ugauggcucggugggcagc

SEQ ID NO: 41428 - RNA, 20 nt, Artificial Sequence
  Synthetic oligonucleotide: BID-365
augauggcucggugggcagc

SEQ ID NO: 41429 - RNA, 21 nt, Artificial Sequence
  Synthetic oligonucleotide: BID-3241
caugauggcucggugggcagc

SEQ ID NO: 41430 - RNA, 22 nt, Artificial Sequence
  Synthetic oligonucleotide: BID-3242
ucaugauggcucggugggcagc

SEQ ID NO: 41431 - RNA, 23 nt, Artificial Sequence
  Synthetic oligonucleotide: BID-3243
gucaugauggcucggugggcagc

SEQ ID NO: 41432 - RNA, 24 nt, Artificial Sequence
  Synthetic oligonucleotide: BID-3244
ggucaugauggcucggugggcagc

SEQ ID NO: 41433 - RNA, 18 nt, Artificial Sequence
  Synthetic oligonucleotide: BID-3245
cuacgugaggagcuuagc

SEQ ID NO: 41434 - RNA, 19 nt, Artificial Sequence
  Synthetic oligonucleotide: BID-3246
ccuacgugaggagcuuagc

SEQ ID NO: 41435 - RNA, 20 nt, Artificial Sequence
  Synthetic oligonucleotide: BID-632
accuacgugaggagcuuagc

SEQ ID NO: 41436 - RNA, 21 nt, Artificial Sequence
  Synthetic oligonucleotide: BID-3247
caccuacgugaggagcuuagc

SEQ ID NO: 41437 - RNA, 22 nt, Artificial Sequence
  Synthetic oligonucleotide: BID-3248
gcaccuacgugaggagcuuagc

SEQ ID NO: 41438 - RNA, 23 nt, Artificial Sequence
  Synthetic oligonucleotide: BID-3249
cgcaccuacgugaggagcuuagc

SEQ ID NO: 41439 - RNA, 24 nt, Artificial Sequence
  Synthetic oligonucleotide: BID-3250
acgcaccuacgugaggagcuuagc

SEQ ID NO: 41440 - RNA, 18 nt, Artificial Sequence
  Synthetic oligonucleotide: BID-3251
ugagggccugaggaccgc

SEQ ID NO: 41441 - RNA, 19 nt, Artificial Sequence
  Synthetic oligonucleotide: BID-3252
gugagggccugaggaccgc

SEQ ID NO: 41442 - RNA, 20 nt, Artificial Sequence
  Synthetic oligonucleotide: BID-430
agugagggccugaggaccgc

SEQ ID NO: 41443 - RNA, 21 nt, Artificial Sequence
  Synthetic oligonucleotide: BID-3253
gagugagggccugaggaccgc

SEQ ID NO: 41444 - RNA, 22 nt, Artificial Sequence
  Synthetic oligonucleotide: BID-3254
ugagugagggccugaggaccgc

SEQ ID NO: 41445 - RNA, 23 nt, Artificial Sequence
  Synthetic oligonucleotide: BID-3255
gugagugagggccugaggaccgc

SEQ ID NO: 41446 - RNA, 24 nt, Artificial Sequence
  Synthetic oligonucleotide: BID-3256
ggugagugagggccugaggaccgc

SEQ ID NO: 41447 - RNA, 18 nt, Artificial Sequence
  Synthetic oligonucleotide: BID-3257
cgcagcagccacucccgc

SEQ ID NO: 41448 - RNA, 19 nt, Artificial Sequence
  Synthetic oligonucleotide: BID-3258
ccgcagcagccacucccgc

SEQ ID NO: 41449 - RNA, 20 nt, Artificial Sequence
  Synthetic oligonucleotide: BID-403
accgcagcagccacucccgc

SEQ ID NO: 41450 - RNA, 21 nt, Artificial Sequence
  Synthetic oligonucleotide: BID-3259
aaccgcagcagccacucccgc

SEQ ID NO: 41451 - RNA, 22 nt, Artificial Sequence
  Synthetic oligonucleotide: BID-3260
caaccgcagcagccacucccgc

SEQ ID NO: 41452 - RNA, 23 nt, Artificial Sequence
  Synthetic oligonucleotide: BID-3261
gcaaccgcagcagccacucccgc

SEQ ID NO: 41453 - RNA, 24 nt, Artificial Sequence
  Synthetic oligonucleotide: BID-3262
ggcaaccgcagcagccacucccgc

SEQ ID NO: 41454 - RNA, 18 nt, Artificial Sequence
  Synthetic oligonucleotide: BID-3263
gcgaggggccgggccggc

SEQ ID NO: 41455 - RNA, 19 nt, Artificial Sequence
  Synthetic oligonucleotide: BID-3264
agcgaggggccgggccggc

SEQ ID NO: 41456 - RNA, 20 nt, Artificial Sequence
  Synthetic oligonucleotide: BID-23
cagcgaggggccgggccggc

SEQ ID NO: 41457 - RNA, 21 nt, Artificial Sequence
  Synthetic oligonucleotide: BID-3265
gcagcgaggggccgggccggc

SEQ ID NO: 41458 - RNA, 22 nt, Artificial Sequence
  Synthetic oligonucleotide: BID-3266
ggcagcgaggggccgggccggc

SEQ ID NO: 41459 - RNA, 23 nt, Artificial Sequence
  Synthetic oligonucleotide: BID-3267
gggcagcgaggggccgggccggc

SEQ ID NO: 41460 - RNA, 24 nt, Artificial Sequence
  Synthetic oligonucleotide: BID-3268
ugggcagcgaggggccgggccggc

SEQ ID NO: 41461 - RNA, 18 nt, Artificial Sequence
  Synthetic oligonucleotide: BID-3269
gaggaggugagugagggc

SEQ ID NO: 41462 - RNA, 19 nt, Artificial Sequence
  Synthetic oligonucleotide: BID-3270
ggaggaggugagugagggc

SEQ ID NO: 41463 - RNA, 20 nt, Artificial Sequence
  Synthetic oligonucleotide: BID-428
cggaggaggugagugagggc

SEQ ID NO: 41464 - RNA, 21 nt, Artificial Sequence
  Synthetic oligonucleotide: BID-3271
ucggaggaggugagugagggc

SEQ ID NO: 41465 - RNA, 22 nt, Artificial Sequence
  Synthetic oligonucleotide: BID-3272
gucggaggaggugagugagggc

SEQ ID NO: 41466 - RNA, 23 nt, Artificial Sequence
  Synthetic oligonucleotide: BID-3273
ggucggaggaggugagugagggc

SEQ ID NO: 41467 - RNA, 24 nt, Artificial Sequence
  Synthetic oligonucleotide: BID-3274
cggucggaggaggugagugagggc

SEQ ID NO: 41468 - RNA, 18 nt, Artificial Sequence
  Synthetic oligonucleotide: BID-3275
cggauucuguaagugggc

SEQ ID NO: 41469 - RNA, 19 nt, Artificial Sequence
  Synthetic oligonucleotide: BID-3276
gcggauucuguaagugggc

SEQ ID NO: 41470 - RNA, 20 nt, Artificial Sequence
  Synthetic oligonucleotide: BID-6
ugcggauucuguaagugggc

SEQ ID NO: 41471 - RNA, 21 nt, Artificial Sequence
  Synthetic oligonucleotide: BID-3277
gugcggauucuguaagugggc

SEQ ID NO: 41472 - RNA, 22 nt, Artificial Sequence
  Synthetic oligonucleotide: BID-3278
agugcggauucuguaagugggc

SEQ ID NO: 41473 - RNA, 23 nt, Artificial Sequence
  Synthetic oligonucleotide: BID-3279
cagugcggauucuguaagugggc

SEQ ID NO: 41474 - RNA, 24 nt, Artificial Sequence
  Synthetic oligonucleotide: BID-3280
acagugcggauucuguaagugggc

SEQ ID NO: 41475 - RNA, 18 nt, Artificial Sequence
  Synthetic oligonucleotide: BID-3281
ugucucugccgccccugc

SEQ ID NO: 41476 - RNA, 19 nt, Artificial Sequence
  Synthetic oligonucleotide: BID-3282
cugucucugccgccccugc

SEQ ID NO: 41477 - RNA, 20 nt, Artificial Sequence
  Synthetic oligonucleotide: BID-408
ucugucucugccgccccugc

SEQ ID NO: 41478 - RNA, 18 nt, Artificial Sequence
  Synthetic oligonucleotide: BID-3283
ggccuggcccugcagcuc

SEQ ID NO: 41479 - RNA, 19 nt, Artificial Sequence
  Synthetic oligonucleotide: BID-3284
cggccuggcccugcagcuc

SEQ ID NO: 41480 - RNA, 20 nt, Artificial Sequence
  Synthetic oligonucleotide: BID-232
acggccuggcccugcagcuc

SEQ ID NO: 41481 - RNA, 21 nt, Artificial Sequence
  Synthetic oligonucleotide: BID-3285
aacggccuggcccugcagcuc

SEQ ID NO: 41482 - RNA, 22 nt, Artificial Sequence
  Synthetic oligonucleotide: BID-3286
gaacggccuggcccugcagcuc

SEQ ID NO: 41483 - RNA, 23 nt, Artificial Sequence
  Synthetic oligonucleotide: BID-3287
ugaacggccuggcccugcagcuc

SEQ ID NO: 41484 - RNA, 24 nt, Artificial Sequence
  Synthetic oligonucleotide: BID-3288
gugaacggccuggcccugcagcuc

SEQ ID NO: 41485 - RNA, 18 nt, Artificial Sequence
  Synthetic oligonucleotide: BID-3289
uuuucuccuuucuugcuc

SEQ ID NO: 41486 - RNA, 19 nt, Artificial Sequence
  Synthetic oligonucleotide: BID-3290
uuuuucuccuuucuugcuc

SEQ ID NO: 41487 - RNA, 20 nt, Artificial Sequence
  Synthetic oligonucleotide: BID-3291
cuuuuucuccuuucuugcuc

SEQ ID NO: 41488 - RNA, 21 nt, Artificial Sequence
  Synthetic oligonucleotide: BID-3292
gcuuuuucuccuuucuugcuc

SEQ ID NO: 41489 - RNA, 22 nt, Artificial Sequence
  Synthetic oligonucleotide: BID-3293
ggcuuuuucuccuuucuugcuc

SEQ ID NO: 41490 - RNA, 23 nt, Artificial Sequence
  Synthetic oligonucleotide: BID-3294
uggcuuuuucuccuuucuugcuc

SEQ ID NO: 41491 - RNA, 24 nt, Artificial Sequence
  Synthetic oligonucleotide: BID-3295
cuggcuuuuucuccuuucuugcuc

SEQ ID NO: 41492 - RNA, 18 nt, Artificial Sequence
  Synthetic oligonucleotide: BID-3296
acacagauucugaaaguc

SEQ ID NO: 41493 - RNA, 19 nt, Artificial Sequence
  Synthetic oligonucleotide: BID-3297
aacacagauucugaaaguc

SEQ ID NO: 41494 - RNA, 20 nt, Artificial Sequence
  Synthetic oligonucleotide: BID-410
gaacacagauucugaaaguc

SEQ ID NO: 41495 - RNA, 21 nt, Artificial Sequence
  Synthetic oligonucleotide: BID-3298
ugaacacagauucugaaaguc

SEQ ID NO: 41496 - RNA, 22 nt, Artificial Sequence
  Synthetic oligonucleotide: BID-3299
cugaacacagauucugaaaguc

SEQ ID NO: 41497 - RNA, 23 nt, Artificial Sequence
  Synthetic oligonucleotide: BID-3300
ccugaacacagauucugaaaguc

SEQ ID NO: 41498 - RNA, 24 nt, Artificial Sequence
  Synthetic oligonucleotide: BID-3301
gccugaacacagauucugaaaguc

SEQ ID NO: 41499 - RNA, 18 nt, Artificial Sequence
  Synthetic oligonucleotide: BID-3302
aggcaccucgcccagguc

SEQ ID NO: 41500 - RNA, 19 nt, Artificial Sequence
  Synthetic oligonucleotide: BID-3303
caggcaccucgcccagguc

SEQ ID NO: 41501 - RNA, 20 nt, Artificial Sequence
  Synthetic oligonucleotide: BID-234
ccaggcaccucgcccagguc

SEQ ID NO: 41502 - RNA, 21 nt, Artificial Sequence
  Synthetic oligonucleotide: BID-3304
gccaggcaccucgcccagguc

SEQ ID NO: 41503 - RNA, 22 nt, Artificial Sequence
  Synthetic oligonucleotide: BID-3305
ugccaggcaccucgcccagguc

SEQ ID NO: 41504 - RNA, 23 nt, Artificial Sequence
  Synthetic oligonucleotide: BID-3306
uugccaggcaccucgcccagguc

SEQ ID NO: 41505 - RNA, 24 nt, Artificial Sequence
  Synthetic oligonucleotide: BID-3307
auugccaggcaccucgcccagguc

SEQ ID NO: 41506 - RNA, 18 nt, Artificial Sequence
  Synthetic oligonucleotide: BID-3308
ggacugaacggacaguuc

SEQ ID NO: 41507 - RNA, 19 nt, Artificial Sequence
  Synthetic oligonucleotide: BID-3309
uggacugaacggacaguuc

SEQ ID NO: 41508 - RNA, 20 nt, Artificial Sequence
  Synthetic oligonucleotide: BID-3310
auggacugaacggacaguuc

SEQ ID NO: 41509 - RNA, 21 nt, Artificial Sequence
  Synthetic oligonucleotide: BID-3311
gauggacugaacggacaguuc

SEQ ID NO: 41510 - RNA, 22 nt, Artificial Sequence
  Synthetic oligonucleotide: BID-3312
ggauggacugaacggacaguuc

SEQ ID NO: 41511 - RNA, 23 nt, Artificial Sequence
  Synthetic oligonucleotide: BID-3313
gggauggacugaacggacaguuc

SEQ ID NO: 41512 - RNA, 24 nt, Artificial Sequence
  Synthetic oligonucleotide: BID-3314
ggggauggacugaacggacaguuc

SEQ ID NO: 41513 - RNA, 18 nt, Artificial Sequence
  Synthetic oligonucleotide: BID-3315
ccuagagacauggagaag

SEQ ID NO: 41514 - RNA, 19 nt, Artificial Sequence
  Synthetic oligonucleotide: BID-3316
cccuagagacauggagaag

SEQ ID NO: 41515 - RNA, 20 nt, Artificial Sequence
  Synthetic oligonucleotide: BID-625
acccuagagacauggagaag

SEQ ID NO: 41516 - RNA, 21 nt, Artificial Sequence
  Synthetic oligonucleotide: BID-3317
uacccuagagacauggagaag

SEQ ID NO: 41517 - RNA, 22 nt, Artificial Sequence
  Synthetic oligonucleotide: BID-3318
cuacccuagagacauggagaag

SEQ ID NO: 41518 - RNA, 23 nt, Artificial Sequence
  Synthetic oligonucleotide: BID-3319
ccuacccuagagacauggagaag

SEQ ID NO: 41519 - RNA, 24 nt, Artificial Sequence
  Synthetic oligonucleotide: BID-3320
gccuacccuagagacauggagaag

SEQ ID NO: 41520 - RNA, 18 nt, Artificial Sequence
  Synthetic oligonucleotide: BID-3321
ccagugcuggcuccccag

SEQ ID NO: 41521 - RNA, 19 nt, Artificial Sequence
  Synthetic oligonucleotide: BID-3322
gccagugcuggcuccccag

SEQ ID NO: 41522 - RNA, 20 nt, Artificial Sequence
  Synthetic oligonucleotide: BID-139
ugccagugcuggcuccccag

SEQ ID NO: 41523 - RNA, 21 nt, Artificial Sequence
  Synthetic oligonucleotide: BID-3323
cugccagugcuggcuccccag

SEQ ID NO: 41524 - RNA, 22 nt, Artificial Sequence
  Synthetic oligonucleotide: BID-3324
gcugccagugcuggcuccccag

SEQ ID NO: 41525 - RNA, 23 nt, Artificial Sequence
  Synthetic oligonucleotide: BID-3325
agcugccagugcuggcuccccag

SEQ ID NO: 41526 - RNA, 24 nt, Artificial Sequence
  Synthetic oligonucleotide: BID-3326
gagcugccagugcuggcuccccag

SEQ ID NO: 41527 - RNA, 18 nt, Artificial Sequence
  Synthetic oligonucleotide: BID-3327
aacagcuuccgcagagag

SEQ ID NO: 41528 - RNA, 19 nt, Artificial Sequence
  Synthetic oligonucleotide: BID-3328
caacagcuuccgcagagag

SEQ ID NO: 41529 - RNA, 20 nt, Artificial Sequence
  Synthetic oligonucleotide: BID-395
acaacagcuuccgcagagag

SEQ ID NO: 41530 - RNA, 21 nt, Artificial Sequence
  Synthetic oligonucleotide: BID-3329
gacaacagcuuccgcagagag

SEQ ID NO: 41531 - RNA, 22 nt, Artificial Sequence
  Synthetic oligonucleotide: BID-3330
ugacaacagcuuccgcagagag

SEQ ID NO: 41532 - RNA, 23 nt, Artificial Sequence
  Synthetic oligonucleotide: BID-3331
cugacaacagcuuccgcagagag

SEQ ID NO: 41533 - RNA, 24 nt, Artificial Sequence
  Synthetic oligonucleotide: BID-3332
ucugacaacagcuuccgcagagag

SEQ ID NO: 41534 - RNA, 18 nt, Artificial Sequence
  Synthetic oligonucleotide: BID-3333
uacccuagagacauggag

SEQ ID NO: 41535 - RNA, 19 nt, Artificial Sequence
  Synthetic oligonucleotide: BID-3334
cuacccuagagacauggag

SEQ ID NO: 41536 - RNA, 20 nt, Artificial Sequence
  Synthetic oligonucleotide: BID-623
ccuacccuagagacauggag

SEQ ID NO: 41537 - RNA, 21 nt, Artificial Sequence
  Synthetic oligonucleotide: BID-3335
gccuacccuagagacauggag

SEQ ID NO: 41538 - RNA, 22 nt, Artificial Sequence
  Synthetic oligonucleotide: BID-3336
ggccuacccuagagacauggag

SEQ ID NO: 41539 - RNA, 23 nt, Artificial Sequence
  Synthetic oligonucleotide: BID-3337
aggccuacccuagagacauggag

SEQ ID NO: 41540 - RNA, 24 nt, Artificial Sequence
  Synthetic oligonucleotide: BID-3338
caggccuacccuagagacauggag

SEQ ID NO: 41541 - RNA, 18 nt, Artificial Sequence
  Synthetic oligonucleotide: BID-3339
cugugaaccaggagugag

SEQ ID NO: 41542 - RNA, 19 nt, Artificial Sequence
  Synthetic oligonucleotide: BID-3340
acugugaaccaggagugag

SEQ ID NO: 41543 - RNA, 20 nt, Artificial Sequence
  Synthetic oligonucleotide: BID-384
cacugugaaccaggagugag

SEQ ID NO: 41544 - RNA, 21 nt, Artificial Sequence
  Synthetic oligonucleotide: BID-3341
acacugugaaccaggagugag

SEQ ID NO: 41545 - RNA, 22 nt, Artificial Sequence
  Synthetic oligonucleotide: BID-3342
gacacugugaaccaggagugag

SEQ ID NO: 41546 - RNA, 23 nt, Artificial Sequence
  Synthetic oligonucleotide: BID-3343
ggacacugugaaccaggagugag

SEQ ID NO: 41547 - RNA, 24 nt, Artificial Sequence
  Synthetic oligonucleotide: BID-3344
gggacacugugaaccaggagugag

SEQ ID NO: 41548 - RNA, 18 nt, Artificial Sequence
  Synthetic oligonucleotide: BID-3345
cccagugggagggcuacg

SEQ ID NO: 41549 - RNA, 19 nt, Artificial Sequence
  Synthetic oligonucleotide: BID-3346
ccccagugggagggcuacg

SEQ ID NO: 41550 - RNA, 20 nt, Artificial Sequence
  Synthetic oligonucleotide: BID-402
uccccagugggagggcuacg

SEQ ID NO: 41551 - RNA, 21 nt, Artificial Sequence
  Synthetic oligonucleotide: BID-3347
cuccccagugggagggcuacg

SEQ ID NO: 41552 - RNA, 22 nt, Artificial Sequence
  Synthetic oligonucleotide: BID-3348
gcuccccagugggagggcuacg

SEQ ID NO: 41553 - RNA, 23 nt, Artificial Sequence
  Synthetic oligonucleotide: BID-3349
ggcuccccagugggagggcuacg

SEQ ID NO: 41554 - RNA, 24 nt, Artificial Sequence
  Synthetic oligonucleotide: BID-3350
uggcuccccagugggagggcuacg

SEQ ID NO: 41555 - RNA, 18 nt, Artificial Sequence
  Synthetic oligonucleotide: BID-3351
uucugacaacagcuuccg

SEQ ID NO: 41556 - RNA, 19 nt, Artificial Sequence
  Synthetic oligonucleotide: BID-3352
guucugacaacagcuuccg

SEQ ID NO: 41557 - RNA, 20 nt, Artificial Sequence
  Synthetic oligonucleotide: BID-393
uguucugacaacagcuuccg

SEQ ID NO: 41558 - RNA, 21 nt, Artificial Sequence
  Synthetic oligonucleotide: BID-3353
cuguucugacaacagcuuccg

SEQ ID NO: 41559 - RNA, 22 nt, Artificial Sequence
  Synthetic oligonucleotide: BID-3354
gcuguucugacaacagcuuccg

SEQ ID NO: 41560 - RNA, 23 nt, Artificial Sequence
  Synthetic oligonucleotide: BID-3355
agcuguucugacaacagcuuccg

SEQ ID NO: 41561 - RNA, 24 nt, Artificial Sequence
  Synthetic oligonucleotide: BID-3356
aagcuguucugacaacagcuuccg

SEQ ID NO: 41562 - RNA, 18 nt, Artificial Sequence
  Synthetic oligonucleotide: BID-3357
auggcucggugggcagcg

SEQ ID NO: 41563 - RNA, 19 nt, Artificial Sequence
  Synthetic oligonucleotide: BID-3358
gauggcucggugggcagcg

SEQ ID NO: 41564 - RNA, 20 nt, Artificial Sequence
  Synthetic oligonucleotide: BID-9
ugauggcucggugggcagcg

SEQ ID NO: 41565 - RNA, 21 nt, Artificial Sequence
  Synthetic oligonucleotide: BID-3359
augauggcucggugggcagcg

SEQ ID NO: 41566 - RNA, 22 nt, Artificial Sequence
  Synthetic oligonucleotide: BID-3360
caugauggcucggugggcagcg

SEQ ID NO: 41567 - RNA, 23 nt, Artificial Sequence
  Synthetic oligonucleotide: BID-3361
ucaugauggcucggugggcagcg

SEQ ID NO: 41568 - RNA, 24 nt, Artificial Sequence
  Synthetic oligonucleotide: BID-3362
gucaugauggcucggugggcagcg

SEQ ID NO: 41569 - RNA, 18 nt, Artificial Sequence
  Synthetic oligonucleotide: BID-3363
uggggucaugauggcucg

SEQ ID NO: 41570 - RNA, 19 nt, Artificial Sequence
  Synthetic oligonucleotide: BID-3364
cuggggucaugauggcucg

SEQ ID NO: 41571 - RNA, 20 nt, Artificial Sequence
  Synthetic oligonucleotide: BID-363
gcuggggucaugauggcucg

SEQ ID NO: 41572 - RNA, 21 nt, Artificial Sequence
  Synthetic oligonucleotide: BID-3365
ugcuggggucaugauggcucg

SEQ ID NO: 41573 - RNA, 22 nt, Artificial Sequence
  Synthetic oligonucleotide: BID-3366
gugcuggggucaugauggcucg

SEQ ID NO: 41574 - RNA, 23 nt, Artificial Sequence
  Synthetic oligonucleotide: BID-3367
ggugcuggggucaugauggcucg

SEQ ID NO: 41575 - RNA, 24 nt, Artificial Sequence
  Synthetic oligonucleotide: BID-3368
cggugcuggggucaugauggcucg

SEQ ID NO: 41576 - RNA, 18 nt, Artificial Sequence
  Synthetic oligonucleotide: BID-3369
aggaacaccagccggucg

SEQ ID NO: 41577 - RNA, 19 nt, Artificial Sequence
  Synthetic oligonucleotide: BID-3370
caggaacaccagccggucg

SEQ ID NO: 41578 - RNA, 20 nt, Artificial Sequence
  Synthetic oligonucleotide: BID-423
ucaggaacaccagccggucg

SEQ ID NO: 41579 - RNA, 21 nt, Artificial Sequence
  Synthetic oligonucleotide: BID-3371
cucaggaacaccagccggucg

SEQ ID NO: 41580 - RNA, 22 nt, Artificial Sequence
  Synthetic oligonucleotide: BID-3372
gcucaggaacaccagccggucg

SEQ ID NO: 41581 - RNA, 23 nt, Artificial Sequence
  Synthetic oligonucleotide: BID-3373
agcucaggaacaccagccggucg

SEQ ID NO: 41582 - RNA, 24 nt, Artificial Sequence
  Synthetic oligonucleotide: BID-3374
cagcucaggaacaccagccggucg

SEQ ID NO: 41583 - RNA, 18 nt, Artificial Sequence
  Synthetic oligonucleotide: BID-3375
ccaggcaccucgcccagg

SEQ ID NO: 41584 - RNA, 19 nt, Artificial Sequence
  Synthetic oligonucleotide: BID-3376
gccaggcaccucgcccagg

SEQ ID NO: 41585 - RNA, 20 nt, Artificial Sequence
  Synthetic oligonucleotide: BID-413
ugccaggcaccucgcccagg

SEQ ID NO: 41586 - RNA, 21 nt, Artificial Sequence
  Synthetic oligonucleotide: BID-3377
uugccaggcaccucgcccagg

SEQ ID NO: 41587 - RNA, 22 nt, Artificial Sequence
  Synthetic oligonucleotide: BID-3378
auugccaggcaccucgcccagg

SEQ ID NO: 41588 - RNA, 23 nt, Artificial Sequence
  Synthetic oligonucleotide: BID-3379
uauugccaggcaccucgcccagg

SEQ ID NO: 41589 - RNA, 24 nt, Artificial Sequence
  Synthetic oligonucleotide: BID-3380
auauugccaggcaccucgcccagg

SEQ ID NO: 41590 - RNA, 18 nt, Artificial Sequence
  Synthetic oligonucleotide: BID-3381
cucaggaacaccagccgg

SEQ ID NO: 41591 - RNA, 19 nt, Artificial Sequence
  Synthetic oligonucleotide: BID-3382
gcucaggaacaccagccgg

SEQ ID NO: 41592 - RNA, 20 nt, Artificial Sequence
  Synthetic oligonucleotide: BID-421
agcucaggaacaccagccgg

SEQ ID NO: 41593 - RNA, 21 nt, Artificial Sequence
  Synthetic oligonucleotide: BID-3383
cagcucaggaacaccagccgg

SEQ ID NO: 41594 - RNA, 22 nt, Artificial Sequence
  Synthetic oligonucleotide: BID-3384
gcagcucaggaacaccagccgg

SEQ ID NO: 41595 - RNA, 23 nt, Artificial Sequence
  Synthetic oligonucleotide: BID-3385
ugcagcucaggaacaccagccgg

SEQ ID NO: 41596 - RNA, 24 nt, Artificial Sequence
  Synthetic oligonucleotide: BID-3386
cugcagcucaggaacaccagccgg

SEQ ID NO: 41597 - RNA, 18 nt, Artificial Sequence
  Synthetic oligonucleotide: BID-3387
agcgaggggccgggccgg

SEQ ID NO: 41598 - RNA, 19 nt, Artificial Sequence
  Synthetic oligonucleotide: BID-3388
cagcgaggggccgggccgg

SEQ ID NO: 41599 - RNA, 20 nt, Artificial Sequence
  Synthetic oligonucleotide: BID-368
gcagcgaggggccgggccgg

SEQ ID NO: 41600 - RNA, 21 nt, Artificial Sequence
  Synthetic oligonucleotide: BID-3389
ggcagcgaggggccgggccgg

SEQ ID NO: 41601 - RNA, 22 nt, Artificial Sequence
  Synthetic oligonucleotide: BID-3390
gggcagcgaggggccgggccgg

SEQ ID NO: 41602 - RNA, 23 nt, Artificial Sequence
  Synthetic oligonucleotide: BID-3391
ugggcagcgaggggccgggccgg

SEQ ID NO: 41603 - RNA, 24 nt, Artificial Sequence
  Synthetic oligonucleotide: BID-3392
gugggcagcgaggggccgggccgg

SEQ ID NO: 41604 - RNA, 18 nt, Artificial Sequence
  Synthetic oligonucleotide: BID-3393
ggaacaccagccggucgg

SEQ ID NO: 41605 - RNA, 19 nt, Artificial Sequence
  Synthetic oligonucleotide: BID-3394
aggaacaccagccggucgg

SEQ ID NO: 41606 - RNA, 20 nt, Artificial Sequence
  Synthetic oligonucleotide: BID-200
caggaacaccagccggucgg

SEQ ID NO: 41607 - RNA, 21 nt, Artificial Sequence
  Synthetic oligonucleotide: BID-3395
ucaggaacaccagccggucgg

SEQ ID NO: 41608 - RNA, 22 nt, Artificial Sequence
  Synthetic oligonucleotide: BID-3396
cucaggaacaccagccggucgg

SEQ ID NO: 41609 - RNA, 23 nt, Artificial Sequence
  Synthetic oligonucleotide: BID-3397
gcucaggaacaccagccggucgg

SEQ ID NO: 41610 - RNA, 24 nt, Artificial Sequence
  Synthetic oligonucleotide: BID-3398
agcucaggaacaccagccggucgg

SEQ ID NO: 41611 - RNA, 18 nt, Artificial Sequence
  Synthetic oligonucleotide: BID-3399
ucggugggcagcgagggg

SEQ ID NO: 41612 - RNA, 19 nt, Artificial Sequence
  Synthetic oligonucleotide: BID-3400
cucggugggcagcgagggg

SEQ ID NO: 41613 - RNA, 20 nt, Artificial Sequence
  Synthetic oligonucleotide: BID-367
gcucggugggcagcgagggg

SEQ ID NO: 41614 - RNA, 21 nt, Artificial Sequence
  Synthetic oligonucleotide: BID-3401
ggcucggugggcagcgagggg

SEQ ID NO: 41615 - RNA, 22 nt, Artificial Sequence
  Synthetic oligonucleotide: BID-3402
uggcucggugggcagcgagggg

SEQ ID NO: 41616 - RNA, 23 nt, Artificial Sequence
  Synthetic oligonucleotide: BID-3403
auggcucggugggcagcgagggg

SEQ ID NO: 41617 - RNA, 24 nt, Artificial Sequence
  Synthetic oligonucleotide: BID-3404
gauggcucggugggcagcgagggg

SEQ ID NO: 41618 - RNA, 18 nt, Artificial Sequence
  Synthetic oligonucleotide: BID-3405
ccuuucuugcucuagggg

SEQ ID NO: 41619 - RNA, 19 nt, Artificial Sequence
  Synthetic oligonucleotide: BID-3406
uccuuucuugcucuagggg

SEQ ID NO: 41620 - RNA, 20 nt, Artificial Sequence
  Synthetic oligonucleotide: BID-3407
cuccuuucuugcucuagggg

SEQ ID NO: 41621 - RNA, 21 nt, Artificial Sequence
  Synthetic oligonucleotide: BID-3408
ucuccuuucuugcucuagggg

SEQ ID NO: 41622 - RNA, 22 nt, Artificial Sequence
  Synthetic oligonucleotide: BID-3409
uucuccuuucuugcucuagggg

SEQ ID NO: 41623 - RNA, 23 nt, Artificial Sequence
  Synthetic oligonucleotide: BID-3410
uuucuccuuucuugcucuagggg

SEQ ID NO: 41624 - RNA, 24 nt, Artificial Sequence
  Synthetic oligonucleotide: BID-3411
uuuucuccuuucuugcucuagggg

SEQ ID NO: 41625 - RNA, 18 nt, Artificial Sequence
  Synthetic oligonucleotide: BID-3412
cuguaagugggcuggggg

SEQ ID NO: 41626 - RNA, 19 nt, Artificial Sequence
  Synthetic oligonucleotide: BID-3413
ucuguaagugggcuggggg

SEQ ID NO: 41627 - RNA, 20 nt, Artificial Sequence
  Synthetic oligonucleotide: BID-377
uucuguaagugggcuggggg

SEQ ID NO: 41628 - RNA, 21 nt, Artificial Sequence
  Synthetic oligonucleotide: BID-3414
auucuguaagugggcuggggg

SEQ ID NO: 41629 - RNA, 22 nt, Artificial Sequence
  Synthetic oligonucleotide: BID-3415
gauucuguaagugggcuggggg

SEQ ID NO: 41630 - RNA, 23 nt, Artificial Sequence
  Synthetic oligonucleotide: BID-3416
ggauucuguaagugggcuggggg

SEQ ID NO: 41631 - RNA, 24 nt, Artificial Sequence
  Synthetic oligonucleotide: BID-3417
cggauucuguaagugggcuggggg

SEQ ID NO: 41632 - RNA, 18 nt, Artificial Sequence
  Synthetic oligonucleotide: BID-3418
gcggauucuguaaguggg

SEQ ID NO: 41633 - RNA, 19 nt, Artificial Sequence
  Synthetic oligonucleotide: BID-3419
ugcggauucuguaaguggg

SEQ ID NO: 41634 - RNA, 20 nt, Artificial Sequence
  Synthetic oligonucleotide: BID-374
gugcggauucuguaaguggg

SEQ ID NO: 41635 - RNA, 21 nt, Artificial Sequence
  Synthetic oligonucleotide: BID-3420
agugcggauucuguaaguggg

SEQ ID NO: 41636 - RNA, 22 nt, Artificial Sequence
  Synthetic oligonucleotide: BID-3421
cagugcggauucuguaaguggg

SEQ ID NO: 41637 - RNA, 23 nt, Artificial Sequence
  Synthetic oligonucleotide: BID-3422
acagugcggauucuguaaguggg

SEQ ID NO: 41638 - RNA, 24 nt, Artificial Sequence
  Synthetic oligonucleotide: BID-3423
cacagugcggauucuguaaguggg

SEQ ID NO: 41639 - RNA, 18 nt, Artificial Sequence
  Synthetic oligonucleotide: BID-3424
aggggccgggccggcugg

SEQ ID NO: 41640 - RNA, 19 nt, Artificial Sequence
  Synthetic oligonucleotide: BID-3425
gaggggccgggccggcugg

SEQ ID NO: 41641 - RNA, 20 nt, Artificial Sequence
  Synthetic oligonucleotide: BID-25
cgaggggccgggccggcugg

SEQ ID NO: 41642 - RNA, 21 nt, Artificial Sequence
  Synthetic oligonucleotide: BID-3426
gcgaggggccgggccggcugg

SEQ ID NO: 41643 - RNA, 22 nt, Artificial Sequence
  Synthetic oligonucleotide: BID-3427
agcgaggggccgggccggcugg

SEQ ID NO: 41644 - RNA, 23 nt, Artificial Sequence
  Synthetic oligonucleotide: BID-3428
cagcgaggggccgggccggcugg

SEQ ID NO: 41645 - RNA, 24 nt, Artificial Sequence
  Synthetic oligonucleotide: BID-3429
gcagcgaggggccgggccggcugg

SEQ ID NO: 41646 - RNA, 18 nt, Artificial Sequence
  Synthetic oligonucleotide: BID-3430
gugcuggcuccccagugg

SEQ ID NO: 41647 - RNA, 19 nt, Artificial Sequence
  Synthetic oligonucleotide: BID-3431
agugcuggcuccccagugg

SEQ ID NO: 41648 - RNA, 20 nt, Artificial Sequence
  Synthetic oligonucleotide: BID-401
cagugcuggcuccccagugg

SEQ ID NO: 41649 - RNA, 21 nt, Artificial Sequence
  Synthetic oligonucleotide: BID-3432
ccagugcuggcuccccagugg

SEQ ID NO: 41650 - RNA, 22 nt, Artificial Sequence
  Synthetic oligonucleotide: BID-3433
gccagugcuggcuccccagugg

SEQ ID NO: 41651 - RNA, 23 nt, Artificial Sequence
  Synthetic oligonucleotide: BID-3434
ugccagugcuggcuccccagugg

SEQ ID NO: 41652 - RNA, 24 nt, Artificial Sequence
  Synthetic oligonucleotide: BID-3435
cugccagugcuggcuccccagugg

SEQ ID NO: 41653 - RNA, 18 nt, Artificial Sequence
  Synthetic oligonucleotide: BID-3436
gccuacccuagagacaug

SEQ ID NO: 41654 - RNA, 19 nt, Artificial Sequence
  Synthetic oligonucleotide: BID-3437
ggccuacccuagagacaug

SEQ ID NO: 41655 - RNA, 20 nt, Artificial Sequence
  Synthetic oligonucleotide: BID-622
aggccuacccuagagacaug

SEQ ID NO: 41656 - RNA, 21 nt, Artificial Sequence
  Synthetic oligonucleotide: BID-3438
caggccuacccuagagacaug

SEQ ID NO: 41657 - RNA, 22 nt, Artificial Sequence
  Synthetic oligonucleotide: BID-3439
gcaggccuacccuagagacaug

SEQ ID NO: 41658 - RNA, 23 nt, Artificial Sequence
  Synthetic oligonucleotide: BID-3440
ugcaggccuacccuagagacaug

SEQ ID NO: 41659 - RNA, 24 nt, Artificial Sequence
  Synthetic oligonucleotide: BID-3441
cugcaggccuacccuagagacaug

SEQ ID NO: 41660 - RNA, 18 nt, Artificial Sequence
  Synthetic oligonucleotide: BID-3442
agcaucccuccgggccug

SEQ ID NO: 41661 - RNA, 19 nt, Artificial Sequence
  Synthetic oligonucleotide: BID-3443
uagcaucccuccgggccug

SEQ ID NO: 41662 - RNA, 20 nt, Artificial Sequence
  Synthetic oligonucleotide: BID-418
guagcaucccuccgggccug

SEQ ID NO: 41663 - RNA, 21 nt, Artificial Sequence
  Synthetic oligonucleotide: BID-3444
cguagcaucccuccgggccug

SEQ ID NO: 41664 - RNA, 22 nt, Artificial Sequence
  Synthetic oligonucleotide: BID-3445
ccguagcaucccuccgggccug

SEQ ID NO: 41665 - RNA, 23 nt, Artificial Sequence
  Synthetic oligonucleotide: BID-3446
accguagcaucccuccgggccug

SEQ ID NO: 41666 - RNA, 24 nt, Artificial Sequence
  Synthetic oligonucleotide: BID-3447
gaccguagcaucccuccgggccug

SEQ ID NO: 41667 - RNA, 18 nt, Artificial Sequence
  Synthetic oligonucleotide: BID-3448
gaggggccgggccggcug

SEQ ID NO: 41668 - RNA, 19 nt, Artificial Sequence
  Synthetic oligonucleotide: BID-3449
cgaggggccgggccggcug

SEQ ID NO: 41669 - RNA, 20 nt, Artificial Sequence
  Synthetic oligonucleotide: BID-370
gcgaggggccgggccggcug

SEQ ID NO: 41670 - RNA, 21 nt, Artificial Sequence
  Synthetic oligonucleotide: BID-3450
agcgaggggccgggccggcug

SEQ ID NO: 41671 - RNA, 22 nt, Artificial Sequence
  Synthetic oligonucleotide: BID-3451
cagcgaggggccgggccggcug

SEQ ID NO: 41672 - RNA, 23 nt, Artificial Sequence
  Synthetic oligonucleotide: BID-3452
gcagcgaggggccgggccggcug

SEQ ID NO: 41673 - RNA, 24 nt, Artificial Sequence
  Synthetic oligonucleotide: BID-3453
ggcagcgaggggccgggccggcug

SEQ ID NO: 41674 - RNA, 18 nt, Artificial Sequence
  Synthetic oligonucleotide: BID-3454
aaccuacgcaccuacgug

SEQ ID NO: 41675 - RNA, 19 nt, Artificial Sequence
  Synthetic oligonucleotide: BID-3455
gaaccuacgcaccuacgug

SEQ ID NO: 41676 - RNA, 20 nt, Artificial Sequence
  Synthetic oligonucleotide: BID-292
agaaccuacgcaccuacgug

SEQ ID NO: 41677 - RNA, 21 nt, Artificial Sequence
  Synthetic oligonucleotide: BID-3456
cagaaccuacgcaccuacgug

SEQ ID NO: 41678 - RNA, 22 nt, Artificial Sequence
  Synthetic oligonucleotide: BID-3457
ccagaaccuacgcaccuacgug

SEQ ID NO: 41679 - RNA, 23 nt, Artificial Sequence
  Synthetic oligonucleotide: BID-3458
accagaaccuacgcaccuacgug

SEQ ID NO: 41680 - RNA, 24 nt, Artificial Sequence
  Synthetic oligonucleotide: BID-3459
aaccagaaccuacgcaccuacgug

SEQ ID NO: 41681 - RNA, 18 nt, Artificial Sequence
  Synthetic oligonucleotide: BID-3460
uacgaaugugcagcggug

SEQ ID NO: 41682 - RNA, 19 nt, Artificial Sequence
  Synthetic oligonucleotide: BID-3461
auacgaaugugcagcggug

SEQ ID NO: 41683 - RNA, 20 nt, Artificial Sequence
  Synthetic oligonucleotide: BID-361
aauacgaaugugcagcggug

SEQ ID NO: 41684 - RNA, 21 nt, Artificial Sequence
  Synthetic oligonucleotide: BID-3462
aaauacgaaugugcagcggug

SEQ ID NO: 41685 - RNA, 22 nt, Artificial Sequence
  Synthetic oligonucleotide: BID-3463
caaauacgaaugugcagcggug

SEQ ID NO: 41686 - RNA, 23 nt, Artificial Sequence
  Synthetic oligonucleotide: BID-3464
acaaauacgaaugugcagcggug

SEQ ID NO: 41687 - RNA, 24 nt, Artificial Sequence
  Synthetic oligonucleotide: BID-3465
aacaaauacgaaugugcagcggug

SEQ ID NO: 41688 - RNA, 18 nt, Artificial Sequence
  Synthetic oligonucleotide: BID-3466
ucugugugccccucugug

SEQ ID NO: 41689 - RNA, 19 nt, Artificial Sequence
  Synthetic oligonucleotide: BID-3467
uucugugugccccucugug

SEQ ID NO: 41690 - RNA, 20 nt, Artificial Sequence
  Synthetic oligonucleotide: BID-612
guucugugugccccucugug

SEQ ID NO: 41691 - RNA, 21 nt, Artificial Sequence
  Synthetic oligonucleotide: BID-3468
gguucugugugccccucugug

SEQ ID NO: 41692 - RNA, 22 nt, Artificial Sequence
  Synthetic oligonucleotide: BID-3469
agguucugugugccccucugug

SEQ ID NO: 41693 - RNA, 23 nt, Artificial Sequence
  Synthetic oligonucleotide: BID-3470
cagguucugugugccccucugug

SEQ ID NO: 41694 - RNA, 24 nt, Artificial Sequence
  Synthetic oligonucleotide: BID-3471
ccagguucugugugccccucugug

SEQ ID NO: 41695 - RNA, 18 nt, Artificial Sequence
  Synthetic oligonucleotide: BID-3472
aagucaagaagacaucau

SEQ ID NO: 41696 - RNA, 19 nt, Artificial Sequence
  Synthetic oligonucleotide: BID-3473
aaagucaagaagacaucau

SEQ ID NO: 41697 - RNA, 20 nt, Artificial Sequence
  Synthetic oligonucleotide: BID-411
gaaagucaagaagacaucau

SEQ ID NO: 41698 - RNA, 21 nt, Artificial Sequence
  Synthetic oligonucleotide: BID-3474
ugaaagucaagaagacaucau

SEQ ID NO: 41699 - RNA, 22 nt, Artificial Sequence
  Synthetic oligonucleotide: BID-3475
cugaaagucaagaagacaucau

SEQ ID NO: 41700 - RNA, 23 nt, Artificial Sequence
  Synthetic oligonucleotide: BID-3476
ucugaaagucaagaagacaucau

SEQ ID NO: 41701 - RNA, 24 nt, Artificial Sequence
  Synthetic oligonucleotide: BID-3477
uucugaaagucaagaagacaucau

SEQ ID NO: 41702 - RNA, 18 nt, Artificial Sequence
  Synthetic oligonucleotide: BID-3478
ggucgccacugggacacu

SEQ ID NO: 41703 - RNA, 19 nt, Artificial Sequence
  Synthetic oligonucleotide: BID-3479
aggucgccacugggacacu

SEQ ID NO: 41704 - RNA, 20 nt, Artificial Sequence
  Synthetic oligonucleotide: BID-380
caggucgccacugggacacu

SEQ ID NO: 41705 - RNA, 21 nt, Artificial Sequence
  Synthetic oligonucleotide: BID-3480
ccaggucgccacugggacacu

SEQ ID NO: 41706 - RNA, 22 nt, Artificial Sequence
  Synthetic oligonucleotide: BID-3481
uccaggucgccacugggacacu

SEQ ID NO: 41707 - RNA, 23 nt, Artificial Sequence
  Synthetic oligonucleotide: BID-3482
uuccaggucgccacugggacacu

SEQ ID NO: 41708 - RNA, 24 nt, Artificial Sequence
  Synthetic oligonucleotide: BID-3483
uuuccaggucgccacugggacacu

SEQ ID NO: 41709 - RNA, 18 nt, Artificial Sequence
  Synthetic oligonucleotide: BID-3484
cugcccaggccauggacu

SEQ ID NO: 41710 - RNA, 19 nt, Artificial Sequence
  Synthetic oligonucleotide: BID-3485
gcugcccaggccauggacu

SEQ ID NO: 41711 - RNA, 20 nt, Artificial Sequence
  Synthetic oligonucleotide: BID-387
cgcugcccaggccauggacu

SEQ ID NO: 41712 - RNA, 21 nt, Artificial Sequence
  Synthetic oligonucleotide: BID-3486
gcgcugcccaggccauggacu

SEQ ID NO: 41713 - RNA, 22 nt, Artificial Sequence
  Synthetic oligonucleotide: BID-3487
cgcgcugcccaggccauggacu

SEQ ID NO: 41714 - RNA, 23 nt, Artificial Sequence
  Synthetic oligonucleotide: BID-3488
ccgcgcugcccaggccauggacu

SEQ ID NO: 41715 - RNA, 24 nt, Artificial Sequence
  Synthetic oligonucleotide: BID-3489
gccgcgcugcccaggccauggacu

SEQ ID NO: 41716 - RNA, 18 nt, Artificial Sequence
  Synthetic oligonucleotide: BID-3490
auggaccguagcaucccu

SEQ ID NO: 41717 - RNA, 19 nt, Artificial Sequence
  Synthetic oligonucleotide: BID-3491
cauggaccguagcaucccu

SEQ ID NO: 41718 - RNA, 20 nt, Artificial Sequence
  Synthetic oligonucleotide: BID-417
gcauggaccguagcaucccu

SEQ ID NO: 41719 - RNA, 21 nt, Artificial Sequence
  Synthetic oligonucleotide: BID-3492
agcauggaccguagcaucccu

SEQ ID NO: 41720 - RNA, 22 nt, Artificial Sequence
  Synthetic oligonucleotide: BID-3493
cagcauggaccguagcaucccu

SEQ ID NO: 41721 - RNA, 23 nt, Artificial Sequence
  Synthetic oligonucleotide: BID-3494
acagcauggaccguagcaucccu

SEQ ID NO: 41722 - RNA, 24 nt, Artificial Sequence
  Synthetic oligonucleotide: BID-3495
gacagcauggaccguagcaucccu

SEQ ID NO: 41723 - RNA, 18 nt, Artificial Sequence
  Synthetic oligonucleotide: BID-3496
caacaacgguuccagccu

SEQ ID NO: 41724 - RNA, 19 nt, Artificial Sequence
  Synthetic oligonucleotide: BID-3497
ucaacaacgguuccagccu

SEQ ID NO: 41725 - RNA, 20 nt, Artificial Sequence
  Synthetic oligonucleotide: BID-390
gucaacaacgguuccagccu

SEQ ID NO: 41726 - RNA, 21 nt, Artificial Sequence
  Synthetic oligonucleotide: BID-3498
ggucaacaacgguuccagccu

SEQ ID NO: 41727 - RNA, 22 nt, Artificial Sequence
  Synthetic oligonucleotide: BID-3499
aggucaacaacgguuccagccu

SEQ ID NO: 41728 - RNA, 23 nt, Artificial Sequence
  Synthetic oligonucleotide: BID-3500
caggucaacaacgguuccagccu

SEQ ID NO: 41729 - RNA, 24 nt, Artificial Sequence
  Synthetic oligonucleotide: BID-3501
ucaggucaacaacgguuccagccu

SEQ ID NO: 41730 - RNA, 18 nt, Artificial Sequence
  Synthetic oligonucleotide: BID-3502
ggaggugagugagggccu

SEQ ID NO: 41731 - RNA, 19 nt, Artificial Sequence
  Synthetic oligonucleotide: BID-3503
aggaggugagugagggccu

SEQ ID NO: 41732 - RNA, 20 nt, Artificial Sequence
  Synthetic oligonucleotide: BID-429
gaggaggugagugagggccu

SEQ ID NO: 41733 - RNA, 21 nt, Artificial Sequence
  Synthetic oligonucleotide: BID-3504
ggaggaggugagugagggccu

SEQ ID NO: 41734 - RNA, 22 nt, Artificial Sequence
  Synthetic oligonucleotide: BID-3505
cggaggaggugagugagggccu

SEQ ID NO: 41735 - RNA, 23 nt, Artificial Sequence
  Synthetic oligonucleotide: BID-3506
ucggaggaggugagugagggccu

SEQ ID NO: 41736 - RNA, 24 nt, Artificial Sequence
  Synthetic oligonucleotide: BID-3507
gucggaggaggugagugagggccu

SEQ ID NO: 41737 - RNA, 18 nt, Artificial Sequence
  Synthetic oligonucleotide: BID-3508
cggccuggcccugcagcu

SEQ ID NO: 41738 - RNA, 19 nt, Artificial Sequence
  Synthetic oligonucleotide: BID-3509
acggccuggcccugcagcu

SEQ ID NO: 41739 - RNA, 20 nt, Artificial Sequence
  Synthetic oligonucleotide: BID-419
aacggccuggcccugcagcu

SEQ ID NO: 41740 - RNA, 21 nt, Artificial Sequence
  Synthetic oligonucleotide: BID-3510
gaacggccuggcccugcagcu

SEQ ID NO: 41741 - RNA, 22 nt, Artificial Sequence
  Synthetic oligonucleotide: BID-3511
ugaacggccuggcccugcagcu

SEQ ID NO: 41742 - RNA, 23 nt, Artificial Sequence
  Synthetic oligonucleotide: BID-3512
gugaacggccuggcccugcagcu

SEQ ID NO: 41743 - RNA, 24 nt, Artificial Sequence
  Synthetic oligonucleotide: BID-3513
ggugaacggccuggcccugcagcu

SEQ ID NO: 41744 - RNA, 18 nt, Artificial Sequence
  Synthetic oligonucleotide: BID-3514
gcagcagccacucccgcu

SEQ ID NO: 41745 - RNA, 19 nt, Artificial Sequence
  Synthetic oligonucleotide: BID-3515
cgcagcagccacucccgcu

SEQ ID NO: 41746 - RNA, 20 nt, Artificial Sequence
  Synthetic oligonucleotide: BID-137
ccgcagcagccacucccgcu

SEQ ID NO: 41747 - RNA, 21 nt, Artificial Sequence
  Synthetic oligonucleotide: BID-3516
accgcagcagccacucccgcu

SEQ ID NO: 41748 - RNA, 22 nt, Artificial Sequence
  Synthetic oligonucleotide: BID-3517
aaccgcagcagccacucccgcu

SEQ ID NO: 41749 - RNA, 23 nt, Artificial Sequence
  Synthetic oligonucleotide: BID-3518
caaccgcagcagccacucccgcu

SEQ ID NO: 41750 - RNA, 24 nt, Artificial Sequence
  Synthetic oligonucleotide: BID-3519
gcaaccgcagcagccacucccgcu

SEQ ID NO: 41751 - RNA, 18 nt, Artificial Sequence
  Synthetic oligonucleotide: BID-3520
ggauucuguaagugggcu

SEQ ID NO: 41752 - RNA, 19 nt, Artificial Sequence
  Synthetic oligonucleotide: BID-3521
cggauucuguaagugggcu

SEQ ID NO: 41753 - RNA, 20 nt, Artificial Sequence
  Synthetic oligonucleotide: BID-5
gcggauucuguaagugggcu

SEQ ID NO: 41754 - RNA, 21 nt, Artificial Sequence
  Synthetic oligonucleotide: BID-3522
ugcggauucuguaagugggcu

SEQ ID NO: 41755 - RNA, 22 nt, Artificial Sequence
  Synthetic oligonucleotide: BID-3523
gugcggauucuguaagugggcu

SEQ ID NO: 41756 - RNA, 23 nt, Artificial Sequence
  Synthetic oligonucleotide: BID-3524
agugcggauucuguaagugggcu

SEQ ID NO: 41757 - RNA, 24 nt, Artificial Sequence
  Synthetic oligonucleotide: BID-3525
cagugcggauucuguaagugggcu

SEQ ID NO: 41758 - RNA, 18 nt, Artificial Sequence
  Synthetic oligonucleotide: BID-3526
uuucuccuuucuugcucu

SEQ ID NO: 41759 - RNA, 19 nt, Artificial Sequence
  Synthetic oligonucleotide: BID-3527
uuuucuccuuucuugcucu

SEQ ID NO: 41760 - RNA, 20 nt, Artificial Sequence
  Synthetic oligonucleotide: BID-2547
uuuuucuccuuucuugcucu

SEQ ID NO: 41761 - RNA, 21 nt, Artificial Sequence
  Synthetic oligonucleotide: BID-3528
cuuuuucuccuuucuugcucu

SEQ ID NO: 41762 - RNA, 22 nt, Artificial Sequence
  Synthetic oligonucleotide: BID-3529
gcuuuuucuccuuucuugcucu

SEQ ID NO: 41763 - RNA, 23 nt, Artificial Sequence
  Synthetic oligonucleotide: BID-3530
ggcuuuuucuccuuucuugcucu

SEQ ID NO: 41764 - RNA, 24 nt, Artificial Sequence
  Synthetic oligonucleotide: BID-3531
uggcuuuuucuccuuucuugcucu

SEQ ID NO: 41765 - RNA, 18 nt, Artificial Sequence
  Synthetic oligonucleotide: BID-3532
cagugcuggcuccccagu

SEQ ID NO: 41766 - RNA, 19 nt, Artificial Sequence
  Synthetic oligonucleotide: BID-3533
ccagugcuggcuccccagu

SEQ ID NO: 41767 - RNA, 20 nt, Artificial Sequence
  Synthetic oligonucleotide: BID-128
gccagugcuggcuccccagu

SEQ ID NO: 41768 - RNA, 21 nt, Artificial Sequence
  Synthetic oligonucleotide: BID-3534
ugccagugcuggcuccccagu

SEQ ID NO: 41769 - RNA, 22 nt, Artificial Sequence
  Synthetic oligonucleotide: BID-3535
cugccagugcuggcuccccagu

SEQ ID NO: 41770 - RNA, 23 nt, Artificial Sequence
  Synthetic oligonucleotide: BID-3536
gcugccagugcuggcuccccagu

SEQ ID NO: 41771 - RNA, 24 nt, Artificial Sequence
  Synthetic oligonucleotide: BID-3537
agcugccagugcuggcuccccagu

SEQ ID NO: 41772 - RNA, 18 nt, Artificial Sequence
  Synthetic oligonucleotide: BID-3538
ugugaaccaggagugagu

SEQ ID NO: 41773 - RNA, 19 nt, Artificial Sequence
  Synthetic oligonucleotide: BID-3539
cugugaaccaggagugagu

SEQ ID NO: 41774 - RNA, 20 nt, Artificial Sequence
  Synthetic oligonucleotide: BID-68
acugugaaccaggagugagu

SEQ ID NO: 41775 - RNA, 21 nt, Artificial Sequence
  Synthetic oligonucleotide: BID-3540
cacugugaaccaggagugagu

SEQ ID NO: 41776 - RNA, 22 nt, Artificial Sequence
  Synthetic oligonucleotide: BID-3541
acacugugaaccaggagugagu

SEQ ID NO: 41777 - RNA, 23 nt, Artificial Sequence
  Synthetic oligonucleotide: BID-3542
gacacugugaaccaggagugagu

SEQ ID NO: 41778 - RNA, 24 nt, Artificial Sequence
  Synthetic oligonucleotide: BID-3543
ggacacugugaaccaggagugagu

SEQ ID NO: 41779 - RNA, 18 nt, Artificial Sequence
  Synthetic oligonucleotide: BID-3544
cggucggaggaggugagu

SEQ ID NO: 41780 - RNA, 19 nt, Artificial Sequence
  Synthetic oligonucleotide: BID-3545
ccggucggaggaggugagu

SEQ ID NO: 41781 - RNA, 20 nt, Artificial Sequence
  Synthetic oligonucleotide: BID-427
gccggucggaggaggugagu

SEQ ID NO: 41782 - RNA, 21 nt, Artificial Sequence
  Synthetic oligonucleotide: BID-3546
agccggucggaggaggugagu

SEQ ID NO: 41783 - RNA, 22 nt, Artificial Sequence
  Synthetic oligonucleotide: BID-3547
cagccggucggaggaggugagu

SEQ ID NO: 41784 - RNA, 23 nt, Artificial Sequence
  Synthetic oligonucleotide: BID-3548
ccagccggucggaggaggugagu

SEQ ID NO: 41785 - RNA, 24 nt, Artificial Sequence
  Synthetic oligonucleotide: BID-3549
accagccggucggaggaggugagu

SEQ ID NO: 41786 - RNA, 18 nt, Artificial Sequence
  Synthetic oligonucleotide: BID-3550
gaaccuacgcaccuacgu

SEQ ID NO: 41787 - RNA, 19 nt, Artificial Sequence
  Synthetic oligonucleotide: BID-3551
agaaccuacgcaccuacgu

SEQ ID NO: 41788 - RNA, 20 nt, Artificial Sequence
  Synthetic oligonucleotide: BID-630
cagaaccuacgcaccuacgu

SEQ ID NO: 41789 - RNA, 21 nt, Artificial Sequence
  Synthetic oligonucleotide: BID-3552
ccagaaccuacgcaccuacgu

SEQ ID NO: 41790 - RNA, 22 nt, Artificial Sequence
  Synthetic oligonucleotide: BID-3553
accagaaccuacgcaccuacgu

SEQ ID NO: 41791 - RNA, 23 nt, Artificial Sequence
  Synthetic oligonucleotide: BID-3554
aaccagaaccuacgcaccuacgu

SEQ ID NO: 41792 - RNA, 24 nt, Artificial Sequence
  Synthetic oligonucleotide: BID-3555
uaaccagaaccuacgcaccuacgu

SEQ ID NO: 41793 - RNA, 18 nt, Artificial Sequence
  Synthetic oligonucleotide: BID-3556
caggcaccucgcccaggu

SEQ ID NO: 41794 - RNA, 19 nt, Artificial Sequence
  Synthetic oligonucleotide: BID-3557
ccaggcaccucgcccaggu

SEQ ID NO: 41795 - RNA, 20 nt, Artificial Sequence
  Synthetic oligonucleotide: BID-219
gccaggcaccucgcccaggu

SEQ ID NO: 41796 - RNA, 21 nt, Artificial Sequence
  Synthetic oligonucleotide: BID-3558
ugccaggcaccucgcccaggu

SEQ ID NO: 41797 - RNA, 22 nt, Artificial Sequence
  Synthetic oligonucleotide: BID-3559
uugccaggcaccucgcccaggu

SEQ ID NO: 41798 - RNA, 23 nt, Artificial Sequence
  Synthetic oligonucleotide: BID-3560
auugccaggcaccucgcccaggu

SEQ ID NO: 41799 - RNA, 24 nt, Artificial Sequence
  Synthetic oligonucleotide: BID-3561
uauugccaggcaccucgcccaggu

SEQ ID NO: 41800 - RNA, 18 nt, Artificial Sequence
  Synthetic oligonucleotide: BID-3562
ggccauggacugugaggu

SEQ ID NO: 41801 - RNA, 19 nt, Artificial Sequence
  Synthetic oligonucleotide: BID-3563
aggccauggacugugaggu

SEQ ID NO: 41802 - RNA, 20 nt, Artificial Sequence
  Synthetic oligonucleotide: BID-388
caggccauggacugugaggu

SEQ ID NO: 41803 - RNA, 21 nt, Artificial Sequence
  Synthetic oligonucleotide: BID-3564
ccaggccauggacugugaggu

SEQ ID NO: 41804 - RNA, 22 nt, Artificial Sequence
  Synthetic oligonucleotide: BID-3565
cccaggccauggacugugaggu

SEQ ID NO: 41805 - RNA, 23 nt, Artificial Sequence
  Synthetic oligonucleotide: BID-3566
gcccaggccauggacugugaggu

SEQ ID NO: 41806 - RNA, 24 nt, Artificial Sequence
  Synthetic oligonucleotide: BID-3567
ugcccaggccauggacugugaggu

SEQ ID NO: 41807 - RNA, 18 nt, Artificial Sequence
  Synthetic oligonucleotide: BID-3568
ucaggaacaccagccggu

SEQ ID NO: 41808 - RNA, 19 nt, Artificial Sequence
  Synthetic oligonucleotide: BID-3569
cucaggaacaccagccggu

SEQ ID NO: 41809 - RNA, 20 nt, Artificial Sequence
  Synthetic oligonucleotide: BID-214
gcucaggaacaccagccggu

SEQ ID NO: 41810 - RNA, 21 nt, Artificial Sequence
  Synthetic oligonucleotide: BID-3570
agcucaggaacaccagccggu

SEQ ID NO: 41811 - RNA, 22 nt, Artificial Sequence
  Synthetic oligonucleotide: BID-3571
cagcucaggaacaccagccggu

SEQ ID NO: 41812 - RNA, 23 nt, Artificial Sequence
  Synthetic oligonucleotide: BID-3572
gcagcucaggaacaccagccggu

SEQ ID NO: 41813 - RNA, 24 nt, Artificial Sequence
  Synthetic oligonucleotide: BID-3573
ugcagcucaggaacaccagccggu

SEQ ID NO: 41814 - RNA, 18 nt, Artificial Sequence
  Synthetic oligonucleotide: BID-3574
gagcuuagccagaaaugu

SEQ ID NO: 41815 - RNA, 19 nt, Artificial Sequence
  Synthetic oligonucleotide: BID-3575
ggagcuuagccagaaaugu

SEQ ID NO: 41816 - RNA, 20 nt, Artificial Sequence
  Synthetic oligonucleotide: BID-633
aggagcuuagccagaaaugu

SEQ ID NO: 41817 - RNA, 21 nt, Artificial Sequence
  Synthetic oligonucleotide: BID-3576
gaggagcuuagccagaaaugu

SEQ ID NO: 41818 - RNA, 22 nt, Artificial Sequence
  Synthetic oligonucleotide: BID-3577
ugaggagcuuagccagaaaugu

SEQ ID NO: 41819 - RNA, 23 nt, Artificial Sequence
  Synthetic oligonucleotide: BID-3578
gugaggagcuuagccagaaaugu

SEQ ID NO: 41820 - RNA, 24 nt, Artificial Sequence
  Synthetic oligonucleotide: BID-3579
cgugaggagcuuagccagaaaugu

SEQ ID NO: 41821 - RNA, 18 nt, Artificial Sequence
  Synthetic oligonucleotide: BID-3580
ccugccugaacacagauu

SEQ ID NO: 41822 - RNA, 19 nt, Artificial Sequence
  Synthetic oligonucleotide: BID-3581
cccugccugaacacagauu

SEQ ID NO: 41823 - RNA, 20 nt, Artificial Sequence
  Synthetic oligonucleotide: BID-409
ccccugccugaacacagauu

SEQ ID NO: 41824 - RNA, 21 nt, Artificial Sequence
  Synthetic oligonucleotide: BID-3582
gccccugccugaacacagauu

SEQ ID NO: 41825 - RNA, 22 nt, Artificial Sequence
  Synthetic oligonucleotide: BID-3583
cgccccugccugaacacagauu

SEQ ID NO: 41826 - RNA, 23 nt, Artificial Sequence
  Synthetic oligonucleotide: BID-3584
ccgccccugccugaacacagauu

SEQ ID NO: 41827 - RNA, 24 nt, Artificial Sequence
  Synthetic oligonucleotide: BID-3585
gccgccccugccugaacacagauu

SEQ ID NO: 41828 - RNA, 18 nt, Artificial Sequence
  Synthetic oligonucleotide: BID-3586
cagcagccacucccgcuu

SEQ ID NO: 41829 - RNA, 19 nt, Artificial Sequence
  Synthetic oligonucleotide: BID-3587
gcagcagccacucccgcuu

SEQ ID NO: 41830 - RNA, 20 nt, Artificial Sequence
  Synthetic oligonucleotide: BID-113
cgcagcagccacucccgcuu

SEQ ID NO: 41831 - RNA, 21 nt, Artificial Sequence
  Synthetic oligonucleotide: BID-3588
ccgcagcagccacucccgcuu

SEQ ID NO: 41832 - RNA, 22 nt, Artificial Sequence
  Synthetic oligonucleotide: BID-3589
accgcagcagccacucccgcuu

SEQ ID NO: 41833 - RNA, 23 nt, Artificial Sequence
  Synthetic oligonucleotide: BID-3590
aaccgcagcagccacucccgcuu

SEQ ID NO: 41834 - RNA, 24 nt, Artificial Sequence
  Synthetic oligonucleotide: BID-3591
caaccgcagcagccacucccgcuu

SEQ ID NO: 41835 - RNA, 17 nt, Artificial Sequence
  Synthetic oligonucleotide: BID-683
ugccgccccugccugaa

SEQ ID NO: 41836 - RNA, 17 nt, Artificial Sequence
  Synthetic oligonucleotide: BID-3592
gcaaccgcagcagccac

SEQ ID NO: 41837 - RNA, 17 nt, Artificial Sequence
  Synthetic oligonucleotide: BID-3593
uccaaagcuguucugac

SEQ ID NO: 41838 - RNA, 17 nt, Artificial Sequence
  Synthetic oligonucleotide: BID-682
cggcuggaggagcacag

SEQ ID NO: 41839 - RNA, 17 nt, Artificial Sequence
  Synthetic oligonucleotide: BID-3594
gcggaagcuguugucag

SEQ ID NO: 41840 - RNA, 17 nt, Artificial Sequence
  Synthetic oligonucleotide: BID-308
accuacgcaccuacgug

SEQ ID NO: 41841 - RNA, 17 nt, Artificial Sequence
  Synthetic oligonucleotide: BID-3595
ucacaaaccuacuggug

SEQ ID NO: 41842 - RNA, 20 nt, Artificial Sequence
  Synthetic oligonucleotide: BID-681
cucugccgccccugccugaa

SEQ ID NO: 41843 - RNA, 20 nt, Artificial Sequence
  Synthetic oligonucleotide: BID-3596
auggcaaccgcagcagccac

SEQ ID NO: 41844 - RNA, 20 nt, Artificial Sequence
  Synthetic oligonucleotide: BID-3597
uccuccaaagcuguucugac

SEQ ID NO: 41845 - RNA, 20 nt, Artificial Sequence
  Synthetic oligonucleotide: BID-680
ggccggcuggaggagcacag

SEQ ID NO: 41846 - RNA, 20 nt, Artificial Sequence
  Synthetic oligonucleotide: BID-3598
ucugcggaagcuguugucag

SEQ ID NO: 41847 - RNA, 20 nt, Artificial Sequence
  Synthetic oligonucleotide: BID-292
agaaccuacgcaccuacgug

SEQ ID NO: 41848 - RNA, 20 nt, Artificial Sequence
  Synthetic oligonucleotide: BID-3599
gcaucacaaaccuacuggug

SEQ ID NO: 41849 - RNA, 17 nt, Artificial Sequence
  Synthetic oligonucleotide: BID-2446
uuccgauccgccggcaa

SEQ ID NO: 41850 - RNA, 17 nt, Artificial Sequence
  Synthetic oligonucleotide: BID-2525
ucccaggcgcgcggaca

SEQ ID NO: 41851 - RNA, 17 nt, Artificial Sequence
  Synthetic oligonucleotide: BID-2445
auuccgauccgccggca

SEQ ID NO: 41852 - RNA, 17 nt, Artificial Sequence
  Synthetic oligonucleotide: BID-2355
cucccgagcggagcuca

SEQ ID NO: 41853 - RNA, 17 nt, Artificial Sequence
  Synthetic oligonucleotide: BID-2465
gccggccgcgccgagga

SEQ ID NO: 41854 - RNA, 17 nt, Artificial Sequence
  Synthetic oligonucleotide: BID-2510
cggcgcguaccccggga

SEQ ID NO: 41855 - RNA, 17 nt, Artificial Sequence
  Synthetic oligonucleotide: BID-2270
gcgcccccgcggcugga

SEQ ID NO: 41856 - RNA, 17 nt, Artificial Sequence
  Synthetic oligonucleotide: BID-2526
uacccgcuuccuccuua

SEQ ID NO: 41857 - RNA, 17 nt, Artificial Sequence
  Synthetic oligonucleotide: BID-2358
ucagagcggccgcuuac

SEQ ID NO: 41858 - RNA, 17 nt, Artificial Sequence
  Synthetic oligonucleotide: BID-2507
gggcucggcgcguaccc

SEQ ID NO: 41859 - RNA, 17 nt, Artificial Sequence
  Synthetic oligonucleotide: BID-2508
ggcucggcgcguacccc

SEQ ID NO: 41860 - RNA, 17 nt, Artificial Sequence
  Synthetic oligonucleotide: BID-2485
ccaccgcggucgggccc

SEQ ID NO: 41861 - RNA, 17 nt, Artificial Sequence
  Synthetic oligonucleotide: BID-3600
cuucggccccccacgcc

SEQ ID NO: 41862 - RNA, 17 nt, Artificial Sequence
  Synthetic oligonucleotide: BID-2263
gaccguguccgcgcgcc

SEQ ID NO: 41863 - RNA, 17 nt, Artificial Sequence
  Synthetic oligonucleotide: BID-2266
gagacgcugccucggcc

SEQ ID NO: 41864 - RNA, 17 nt, Artificial Sequence
  Synthetic oligonucleotide: BID-2444
cggggauuccgauccgc

SEQ ID NO: 41865 - RNA, 17 nt, Artificial Sequence
  Synthetic oligonucleotide: BID-2303
gcccuccucggcgcggc

SEQ ID NO: 41866 - RNA, 17 nt, Artificial Sequence
  Synthetic oligonucleotide: BID-26
cgaaugugcagcggugc

SEQ ID NO: 41867 - RNA, 17 nt, Artificial Sequence
  Synthetic oligonucleotide: BID-2354
ccucccgagcggagcuc

SEQ ID NO: 41868 - RNA, 17 nt, Artificial Sequence
  Synthetic oligonucleotide: BID-2430
gggcgagccccaguaag

SEQ ID NO: 41869 - RNA, 17 nt, Artificial Sequence
  Synthetic oligonucleotide: BID-2284
accgcggugggagccag

SEQ ID NO: 41870 - RNA, 17 nt, Artificial Sequence
  Synthetic oligonucleotide: BID-2351
aauccccgcccacaccg

SEQ ID NO: 41871 - RNA, 17 nt, Artificial Sequence
  Synthetic oligonucleotide: BID-2314
gguccgccucggaggcg

SEQ ID NO: 41872 - RNA, 17 nt, Artificial Sequence
  Synthetic oligonucleotide: BID-2260
cgcggggcgccauaagg

SEQ ID NO: 41873 - RNA, 17 nt, Artificial Sequence
  Synthetic oligonucleotide: BID-2282
ccugggcccgaccgcgg

SEQ ID NO: 41874 - RNA, 17 nt, Artificial Sequence
  Synthetic oligonucleotide: BID-2311
ggucggguccgccucgg

SEQ ID NO: 41875 - RNA, 17 nt, Artificial Sequence
  Synthetic oligonucleotide: BID-32
gggucaugauggcucgg

SEQ ID NO: 41876 - RNA, 17 nt, Artificial Sequence
  Synthetic oligonucleotide: BID-2447
cgauccgccggcaaggg

SEQ ID NO: 41877 - RNA, 17 nt, Artificial Sequence
  Synthetic oligonucleotide: BID-2487
cgcggucgggcccaggg

SEQ ID NO: 41878 - RNA, 17 nt, Artificial Sequence
  Synthetic oligonucleotide: BID-2509
ucggcgcguaccccggg

SEQ ID NO: 41879 - RNA, 17 nt, Artificial Sequence
  Synthetic oligonucleotide: BID-2433
ccugagcuccgcucggg

SEQ ID NO: 41880 - RNA, 17 nt, Artificial Sequence
  Synthetic oligonucleotide: BID-2360
agagcggccgcuuacug

SEQ ID NO: 41881 - RNA, 17 nt, Artificial Sequence
  Synthetic oligonucleotide: BID-2350
cacccuugccggcggau

SEQ ID NO: 41882 - RNA, 17 nt, Artificial Sequence
  Synthetic oligonucleotide: BID-2359
cagagcggccgcuuacu

SEQ ID NO: 41883 - RNA, 17 nt, Artificial Sequence
  Synthetic oligonucleotide: BID-2310
gagggucggguccgccu

SEQ ID NO: 41884 - RNA, 17 nt, Artificial Sequence
  Synthetic oligonucleotide: BID-2264
accguguccgcgcgccu

SEQ ID NO: 41885 - RNA, 17 nt, Artificial Sequence
  Synthetic oligonucleotide: BID-2301
cgcccgggcgcccuccu

SEQ ID NO: 41886 - RNA, 17 nt, Artificial Sequence
  Synthetic oligonucleotide: BID-31
gaaugugcagcggugcu

SEQ ID NO: 41887 - RNA, 17 nt, Artificial Sequence
  Synthetic oligonucleotide: BID-2283
cugggcccgaccgcggu

SEQ ID NO: 41888 - RNA, 17 nt, Artificial Sequence
  Synthetic oligonucleotide: BID-28
ggucaugauggcucggu

SEQ ID NO: 41889 - RNA, 20 nt, Artificial Sequence
  Synthetic oligonucleotide: BID-2174
ggauuccgauccgccggcaa

SEQ ID NO: 41890 - RNA, 20 nt, Artificial Sequence
  Synthetic oligonucleotide: BID-2253
gucucccaggcgcgcggaca

SEQ ID NO: 41891 - RNA, 20 nt, Artificial Sequence
  Synthetic oligonucleotide: BID-2214
ucccaccgcggucgggccca

SEQ ID NO: 41892 - RNA, 20 nt, Artificial Sequence
  Synthetic oligonucleotide: BID-2173
gggauuccgauccgccggca

SEQ ID NO: 41893 - RNA, 20 nt, Artificial Sequence
  Synthetic oligonucleotide: BID-2084
cuccucccgagcggagcuca

SEQ ID NO: 41894 - RNA, 20 nt, Artificial Sequence
  Synthetic oligonucleotide: BID-2142
aaggccgguccagccgcaga

SEQ ID NO: 41895 - RNA, 20 nt, Artificial Sequence
  Synthetic oligonucleotide: BID-7
gauggcucggugggcagcga

SEQ ID NO: 41896 - RNA, 20 nt, Artificial Sequence
  Synthetic oligonucleotide: BID-2193
ccugccggccgcgccgagga

SEQ ID NO: 41897 - RNA, 20 nt, Artificial Sequence
  Synthetic oligonucleotide: BID-2238
gcucggcgcguaccccggga

SEQ ID NO: 41898 - RNA, 20 nt, Artificial Sequence
  Synthetic oligonucleotide: BID-1999
cccgcgcccccgcggcugga

SEQ ID NO: 41899 - RNA, 20 nt, Artificial Sequence
  Synthetic oligonucleotide: BID-1988
gaagcgcgcggggcgccaua

SEQ ID NO: 41900 - RNA, 20 nt, Artificial Sequence
  Synthetic oligonucleotide: BID-2254
gacuacccgcuuccuccuua

SEQ ID NO: 41901 - RNA, 20 nt, Artificial Sequence
  Synthetic oligonucleotide: BID-2090
ucgcccgcuccuuagagcac

SEQ ID NO: 41902 - RNA, 20 nt, Artificial Sequence
  Synthetic oligonucleotide: BID-2235
cuggggcucggcgcguaccc

SEQ ID NO: 41903 - RNA, 20 nt, Artificial Sequence
  Synthetic oligonucleotide: BID-2236
uggggcucggcgcguacccc

SEQ ID NO: 41904 - RNA, 20 nt, Artificial Sequence
  Synthetic oligonucleotide: BID-2213
cucccaccgcggucgggccc

SEQ ID NO: 41905 - RNA, 20 nt, Artificial Sequence
  Synthetic oligonucleotide: BID-1992
gucgaccguguccgcgcgcc

SEQ ID NO: 41906 - RNA, 20 nt, Artificial Sequence
  Synthetic oligonucleotide: BID-2194
gccgcgccgaggagggcgcc

SEQ ID NO: 41907 - RNA, 20 nt, Artificial Sequence
  Synthetic oligonucleotide: BID-2073
gaggagaaaacccgcgggcc

SEQ ID NO: 41908 - RNA, 20 nt, Artificial Sequence
  Synthetic oligonucleotide: BID-2075
gaaaacccgcgggccuggcc

SEQ ID NO: 41909 - RNA, 20 nt, Artificial Sequence
  Synthetic oligonucleotide: BID-2181
ccgcggguuuucuccucucc

SEQ ID NO: 41910 - RNA, 20 nt, Artificial Sequence
  Synthetic oligonucleotide: BID-13
ccgcacugugcuccuccagc

SEQ ID NO: 41911 - RNA, 20 nt, Artificial Sequence
  Synthetic oligonucleotide: BID-2162
gagcuccgcucgggaggagc

SEQ ID NO: 41912 - RNA, 20 nt, Artificial Sequence
  Synthetic oligonucleotide: BID-2172
gggcggggauuccgauccgc

SEQ ID NO: 41913 - RNA, 20 nt, Artificial Sequence
  Synthetic oligonucleotide: BID-2042
gucggguccgccucggaggc

SEQ ID NO: 41914 - RNA, 20 nt, Artificial Sequence
  Synthetic oligonucleotide: BID-2163
uccgcucgggaggagccggc

SEQ ID NO: 41915 - RNA, 20 nt, Artificial Sequence
  Synthetic oligonucleotide: BID-2225
uccacgccggggcaggcggc

SEQ ID NO: 41916 - RNA, 20 nt, Artificial Sequence
  Synthetic oligonucleotide: BID-6
ugcggauucuguaagugggc

SEQ ID NO: 41917 - RNA, 20 nt, Artificial Sequence
  Synthetic oligonucleotide: BID-1
auacgaaugugcagcggugc

SEQ ID NO: 41918 - RNA, 20 nt, Artificial Sequence
  Synthetic oligonucleotide: BID-2204
gcgggagagacccggcccuc

SEQ ID NO: 41919 - RNA, 20 nt, Artificial Sequence
  Synthetic oligonucleotide: BID-2212
cucuggcucccaccgcgguc

SEQ ID NO: 41920 - RNA, 20 nt, Artificial Sequence
  Synthetic oligonucleotide: BID-2158
agcgggcgagccccaguaag

SEQ ID NO: 41921 - RNA, 20 nt, Artificial Sequence
  Synthetic oligonucleotide: BID-10
cacagugcggauucuguaag

SEQ ID NO: 41922 - RNA, 20 nt, Artificial Sequence
  Synthetic oligonucleotide: BID-2013
ccgaccgcggugggagccag

SEQ ID NO: 41923 - RNA, 20 nt, Artificial Sequence
  Synthetic oligonucleotide: BID-2080
cggaauccccgcccacaccg

SEQ ID NO: 41924 - RNA, 20 nt, Artificial Sequence
  Synthetic oligonucleotide: BID-2191
ccgaccugccggccgcgccg

SEQ ID NO: 41925 - RNA, 20 nt, Artificial Sequence
  Synthetic oligonucleotide: BID-2182
cgcggguuuucuccucuccg

SEQ ID NO: 41926 - RNA, 20 nt, Artificial Sequence
  Synthetic oligonucleotide: BID-2085
agcucagggcugacaaagcg

SEQ ID NO: 41927 - RNA, 20 nt, Artificial Sequence
  Synthetic oligonucleotide: BID-2252
ggcagcgucucccaggcgcg

SEQ ID NO: 41928 - RNA, 20 nt, Artificial Sequence
  Synthetic oligonucleotide: BID-2043
ucggguccgccucggaggcg

SEQ ID NO: 41929 - RNA, 20 nt, Artificial Sequence
  Synthetic oligonucleotide: BID-2240
cgcguaccccgggaggggcg

SEQ ID NO: 41930 - RNA, 20 nt, Artificial Sequence
  Synthetic oligonucleotide: BID-2246
acccuccagccgcgggggcg

SEQ ID NO: 41931 - RNA, 20 nt, Artificial Sequence
  Synthetic oligonucleotide: BID-1989
gcgcgcggggcgccauaagg

SEQ ID NO: 41932 - RNA, 20 nt, Artificial Sequence
  Synthetic oligonucleotide: BID-2041
ggucggguccgccucggagg

SEQ ID NO: 41933 - RNA, 20 nt, Artificial Sequence
  Synthetic oligonucleotide: BID-2078
gugcaggccacccuugccgg

SEQ ID NO: 41934 - RNA, 20 nt, Artificial Sequence
  Synthetic oligonucleotide: BID-2245
ucaccacccuccagccgcgg

SEQ ID NO: 41935 - RNA, 20 nt, Artificial Sequence
  Synthetic oligonucleotide: BID-2040
gagggucggguccgccucgg

SEQ ID NO: 41936 - RNA, 20 nt, Artificial Sequence
  Synthetic oligonucleotide: BID-2175
uuccgauccgccggcaaggg

SEQ ID NO: 41937 - RNA, 20 nt, Artificial Sequence
  Synthetic oligonucleotide: BID-2237
ggcucggcgcguaccccggg

SEQ ID NO: 41938 - RNA, 20 nt, Artificial Sequence
  Synthetic oligonucleotide: BID-2161
agcccugagcuccgcucggg

SEQ ID NO: 41939 - RNA, 20 nt, Artificial Sequence
  Synthetic oligonucleotide: BID-2089
gucagagcggccgcuuacug

SEQ ID NO: 41940 - RNA, 20 nt, Artificial Sequence
  Synthetic oligonucleotide: BID-2208
caggucgcugcugaggccug

SEQ ID NO: 41941 - RNA, 20 nt, Artificial Sequence
  Synthetic oligonucleotide: BID-2205
cggcccucaggucgcugcug

SEQ ID NO: 41942 - RNA, 20 nt, Artificial Sequence
  Synthetic oligonucleotide: BID-4
acgaaugugcagcggugcug

SEQ ID NO: 41943 - RNA, 20 nt, Artificial Sequence
  Synthetic oligonucleotide: BID-2035
cggccggcaggucggugcug

SEQ ID NO: 41944 - RNA, 20 nt, Artificial Sequence
  Synthetic oligonucleotide: BID-2079
ggccacccuugccggcggau

SEQ ID NO: 41945 - RNA, 20 nt, Artificial Sequence
  Synthetic oligonucleotide: BID-2088
ggucagagcggccgcuuacu

SEQ ID NO: 41946 - RNA, 20 nt, Artificial Sequence
  Synthetic oligonucleotide: BID-2039
gcugagggucggguccgccu

SEQ ID NO: 41947 - RNA, 20 nt, Artificial Sequence
  Synthetic oligonucleotide: BID-1993
ucgaccguguccgcgcgccu

SEQ ID NO: 41948 - RNA, 20 nt, Artificial Sequence
  Synthetic oligonucleotide: BID-2207
ucaggucgcugcugaggccu

SEQ ID NO: 41949 - RNA, 20 nt, Artificial Sequence
  Synthetic oligonucleotide: BID-5
gcggauucuguaagugggcu

SEQ ID NO: 41950 - RNA, 20 nt, Artificial Sequence
  Synthetic oligonucleotide: BID-11
gugcuggggucaugauggcu

SEQ ID NO: 41951 - RNA, 20 nt, Artificial Sequence
  Synthetic oligonucleotide: BID-2093
ggauccucgcugcugcugcu

SEQ ID NO: 41952 - RNA, 20 nt, Artificial Sequence
  Synthetic oligonucleotide: BID-14
uacgaaugugcagcggugcu

SEQ ID NO: 41953 - RNA, 20 nt, Artificial Sequence
  Synthetic oligonucleotide: BID-15
acagugcggauucuguaagu

SEQ ID NO: 41954 - RNA, 20 nt, Artificial Sequence
  Synthetic oligonucleotide: BID-2211
ccucuggcucccaccgcggu

SEQ ID NO: 41955 - RNA, 20 nt, Artificial Sequence
  Synthetic oligonucleotide: BID-2012
gcccugggcccgaccgcggu

SEQ ID NO: 41956 - RNA, 20 nt, Artificial Sequence
  Synthetic oligonucleotide: BID-3
uggggucaugauggcucggu

SEQ ID NO: 41957 - RNA, 17 nt, Artificial Sequence
  Synthetic oligonucleotide: BID-2376
aguggcugggcuggcaa

SEQ ID NO: 41958 - RNA, 17 nt, Artificial Sequence
  Synthetic oligonucleotide: BID-2438
cggugcuggaaagacca

SEQ ID NO: 41959 - RNA, 17 nt, Artificial Sequence
  Synthetic oligonucleotide: BID-2367
guggcugaaugacccca

SEQ ID NO: 41960 - RNA, 17 nt, Artificial Sequence
  Synthetic oligonucleotide: BID-2486
caccgcggucgggccca

SEQ ID NO: 41961 - RNA, 17 nt, Artificial Sequence
  Synthetic oligonucleotide: BID-2422
gcuucagagcucuccca

SEQ ID NO: 41962 - RNA, 17 nt, Artificial Sequence
  Synthetic oligonucleotide: BID-2499
ggggcaggcggcaggca

SEQ ID NO: 41963 - RNA, 17 nt, Artificial Sequence
  Synthetic oligonucleotide: BID-2407
gccuucaccugcaggca

SEQ ID NO: 41964 - RNA, 17 nt, Artificial Sequence
  Synthetic oligonucleotide: BID-2375
aaguggcugggcuggca

SEQ ID NO: 41965 - RNA, 17 nt, Artificial Sequence
  Synthetic oligonucleotide: BID-2278
ccccggcguggagcuca

SEQ ID NO: 41966 - RNA, 17 nt, Artificial Sequence
  Synthetic oligonucleotide: BID-2501
gcggcaggcagggguca

SEQ ID NO: 41967 - RNA, 17 nt, Artificial Sequence
  Synthetic oligonucleotide: BID-2321
cguggccuggggauuca

SEQ ID NO: 41968 - RNA, 17 nt, Artificial Sequence
  Synthetic oligonucleotide: BID-2414
gccgguccagccgcaga

SEQ ID NO: 41969 - RNA, 17 nt, Artificial Sequence
  Synthetic oligonucleotide: BID-3601
cgggcguggggggccga

SEQ ID NO: 41970 - RNA, 17 nt, Artificial Sequence
  Synthetic oligonucleotide: BID-37
ggcucggugggcagcga

SEQ ID NO: 41971 - RNA, 17 nt, Artificial Sequence
  Synthetic oligonucleotide: BID-2286
cggugggagccagagga

SEQ ID NO: 41972 - RNA, 17 nt, Artificial Sequence
  Synthetic oligonucleotide: BID-2470
gagggcgcccgggcgga

SEQ ID NO: 41973 - RNA, 17 nt, Artificial Sequence
  Synthetic oligonucleotide: BID-2324
ccuggggauucagggga

SEQ ID NO: 41974 - RNA, 17 nt, Artificial Sequence
  Synthetic oligonucleotide: BID-2333
ggugcggggcgcgggga

SEQ ID NO: 41975 - RNA, 17 nt, Artificial Sequence
  Synthetic oligonucleotide: BID-2315
cgccucggaggcgggga

SEQ ID NO: 41976 - RNA, 17 nt, Artificial Sequence
  Synthetic oligonucleotide: BID-2337
gggcgcggggaggggga

SEQ ID NO: 41977 - RNA, 17 nt, Artificial Sequence
  Synthetic oligonucleotide: BID-43
cggugcuggggucauga

SEQ ID NO: 41978 - RNA, 17 nt, Artificial Sequence
  Synthetic oligonucleotide: BID-2296
ccucagcagcgaccuga

SEQ ID NO: 41979 - RNA, 17 nt, Artificial Sequence
  Synthetic oligonucleotide: BID-2420
agccacuugguggcuga

SEQ ID NO: 41980 - RNA, 17 nt, Artificial Sequence
  Synthetic oligonucleotide: BID-2307
cggcaggucggugcuga

SEQ ID NO: 41981 - RNA, 17 nt, Artificial Sequence
  Synthetic oligonucleotide: BID-2412
acccugccugcagguga

SEQ ID NO: 41982 - RNA, 17 nt, Artificial Sequence
  Synthetic oligonucleotide: BID-2259
gcgcgcggggcgccaua

SEQ ID NO: 41983 - RNA, 17 nt, Artificial Sequence
  Synthetic oligonucleotide: BID-2427
ucauugccagugcucua

SEQ ID NO: 41984 - RNA, 17 nt, Artificial Sequence
  Synthetic oligonucleotide: BID-2361
cccgcuccuuagagcac

SEQ ID NO: 41985 - RNA, 17 nt, Artificial Sequence
  Synthetic oligonucleotide: BID-2502
cggcaggcaggggucac

SEQ ID NO: 41986 - RNA, 17 nt, Artificial Sequence
  Synthetic oligonucleotide: BID-2404
gccuucugcggcuggac

SEQ ID NO: 41987 - RNA, 17 nt, Artificial Sequence
  Synthetic oligonucleotide: BID-2448
caaggguggccugcacc

SEQ ID NO: 41988 - RNA, 17 nt, Artificial Sequence
  Synthetic oligonucleotide: BID-2475
gggaggcgggagagacc

SEQ ID NO: 41989 - RNA, 17 nt, Artificial Sequence
  Synthetic oligonucleotide: BID-2369
augaccccaggggaccc

SEQ ID NO: 41990 - RNA, 17 nt, Artificial Sequence
  Synthetic oligonucleotide: BID-2366
aguggcugaaugacccc

SEQ ID NO: 41991 - RNA, 17 nt, Artificial Sequence
  Synthetic oligonucleotide: BID-2294
cggggggucagagcccc

SEQ ID NO: 41992 - RNA, 17 nt, Artificial Sequence
  Synthetic oligonucleotide: BID-2457
cccuccccugaaucccc

SEQ ID NO: 41993 - RNA, 17 nt, Artificial Sequence
  Synthetic oligonucleotide: BID-2423
gcucucccagggucccc

SEQ ID NO: 41994 - RNA, 17 nt, Artificial Sequence
  Synthetic oligonucleotide: BID-2340
ggggccgaggccagccc

SEQ ID NO: 41995 - RNA, 17 nt, Artificial Sequence
  Synthetic oligonucleotide: BID-3602
uucggccccccacgccc

SEQ ID NO: 41996 - RNA, 17 nt, Artificial Sequence
  Synthetic oligonucleotide: BID-2279
gggcccgccgcccgccc

SEQ ID NO: 41997 - RNA, 17 nt, Artificial Sequence
  Synthetic oligonucleotide: BID-3603
cccgccccggcccgccc

SEQ ID NO: 41998 - RNA, 17 nt, Artificial Sequence
  Synthetic oligonucleotide: BID-3604
cacgcccgggcccgccc

SEQ ID NO: 41999 - RNA, 17 nt, Artificial Sequence
  Synthetic oligonucleotide: BID-2300
ccgccuccccuccgccc

SEQ ID NO: 42000 - RNA, 17 nt, Artificial Sequence
  Synthetic oligonucleotide: BID-2467
cgccgaggagggcgccc

SEQ ID NO: 42001 - RNA, 17 nt, Artificial Sequence
  Synthetic oligonucleotide: BID-3605
cgggccggggcgggccc

SEQ ID NO: 42002 - RNA, 17 nt, Artificial Sequence
  Synthetic oligonucleotide: BID-2275
cugccugccgccugccc

SEQ ID NO: 42003 - RNA, 17 nt, Artificial Sequence
  Synthetic oligonucleotide: BID-2273
gcacccgcgccccuccc

SEQ ID NO: 42004 - RNA, 17 nt, Artificial Sequence
  Synthetic oligonucleotide: BID-2421
ggcuucagagcucuccc

SEQ ID NO: 42005 - RNA, 17 nt, Artificial Sequence
  Synthetic oligonucleotide: BID-2523
ccgaggcagcgucuccc

SEQ ID NO: 42006 - RNA, 17 nt, Artificial Sequence
  Synthetic oligonucleotide: BID-2493
gcccugagcuccacgcc

SEQ ID NO: 42007 - RNA, 17 nt, Artificial Sequence
  Synthetic oligonucleotide: BID-2299
cccgccuccccuccgcc

SEQ ID NO: 42008 - RNA, 17 nt, Artificial Sequence
  Synthetic oligonucleotide: BID-2466
gcgccgaggagggcgcc

SEQ ID NO: 42009 - RNA, 17 nt, Artificial Sequence
  Synthetic oligonucleotide: BID-2478
aggucgcugcugaggcc

SEQ ID NO: 42010 - RNA, 17 nt, Artificial Sequence
  Synthetic oligonucleotide: BID-2449
guggccugcacccggcc

SEQ ID NO: 42011 - RNA, 17 nt, Artificial Sequence
  Synthetic oligonucleotide: BID-45
ugcuccuccagccggcc

SEQ ID NO: 42012 - RNA, 17 nt, Artificial Sequence
  Synthetic oligonucleotide: BID-2298
gcagcgaccugagggcc

SEQ ID NO: 42013 - RNA, 17 nt, Artificial Sequence
  Synthetic oligonucleotide: BID-2344
gagaaaacccgcgggcc

SEQ ID NO: 42014 - RNA, 17 nt, Artificial Sequence
  Synthetic oligonucleotide: BID-52
gugggcagcgaggggcc

SEQ ID NO: 42015 - RNA, 17 nt, Artificial Sequence
  Synthetic oligonucleotide: BID-2346
aacccgcgggccuggcc

SEQ ID NO: 42016 - RNA, 17 nt, Artificial Sequence
  Synthetic oligonucleotide: BID-2317
guccucuccacguggcc

SEQ ID NO: 42017 - RNA, 17 nt, Artificial Sequence
  Synthetic oligonucleotide: BID-2272
ugcacccgcgccccucc

SEQ ID NO: 42018 - RNA, 17 nt, Artificial Sequence
  Synthetic oligonucleotide: BID-2453
cggguuuucuccucucc

SEQ ID NO: 42019 - RNA, 17 nt, Artificial Sequence
  Synthetic oligonucleotide: BID-2521
ggggcgcgggcgcgucc

SEQ ID NO: 42020 - RNA, 17 nt, Artificial Sequence
  Synthetic oligonucleotide: BID-2262
cgccauaaggaggaagc

SEQ ID NO: 42021 - RNA, 17 nt, Artificial Sequence
  Synthetic oligonucleotide: BID-46
cacugugcuccuccagc

SEQ ID NO: 42022 - RNA, 17 nt, Artificial Sequence
  Synthetic oligonucleotide: BID-2429
ccagugcucuaaggagc

SEQ ID NO: 42023 - RNA, 17 nt, Artificial Sequence
  Synthetic oligonucleotide: BID-2434
cuccgcucgggaggagc

SEQ ID NO: 42024 - RNA, 17 nt, Artificial Sequence
  Synthetic oligonucleotide: BID-2492
ggcccugagcuccacgc

SEQ ID NO: 42025 - RNA, 17 nt, Artificial Sequence
  Synthetic oligonucleotide: BID-2343
gagaggagaaaacccgc

SEQ ID NO: 42026 - RNA, 17 nt, Artificial Sequence
  Synthetic oligonucleotide: BID-2451
cacccggccaggcccgc

SEQ ID NO: 42027 - RNA, 17 nt, Artificial Sequence
  Synthetic oligonucleotide: BID-2515
caccacccuccagccgc

SEQ ID NO: 42028 - RNA, 17 nt, Artificial Sequence
  Synthetic oligonucleotide: BID-2257
cgaaggaggaagcgcgc

SEQ ID NO: 42029 - RNA, 17 nt, Artificial Sequence
  Synthetic oligonucleotide: BID-2513
uaccccgggaggggcgc

SEQ ID NO: 42030 - RNA, 17 nt, Artificial Sequence
  Synthetic oligonucleotide: BID-2330
ggaggggugcggggcgc

SEQ ID NO: 42031 - RNA, 17 nt, Artificial Sequence
  Synthetic oligonucleotide: BID-2519
uccagccgcgggggcgc

SEQ ID NO: 42032 - RNA, 17 nt, Artificial Sequence
  Synthetic oligonucleotide: BID-2413
ugccugcaggugaaggc

SEQ ID NO: 42033 - RNA, 17 nt, Artificial Sequence
  Synthetic oligonucleotide: BID-2498
cggggcaggcggcaggc

SEQ ID NO: 42034 - RNA, 17 nt, Artificial Sequence
  Synthetic oligonucleotide: BID-2406
ggccuucaccugcaggc

SEQ ID NO: 42035 - RNA, 17 nt, Artificial Sequence
  Synthetic oligonucleotide: BID-2313
ggguccgccucggaggc

SEQ ID NO: 42036 - RNA, 17 nt, Artificial Sequence
  Synthetic oligonucleotide: BID-2290
gccagaggaggggaggc

SEQ ID NO: 42037 - RNA, 17 nt, Artificial Sequence
  Synthetic oligonucleotide: BID-2474
ccgggcggaggggaggc

SEQ ID NO: 42038 - RNA, 17 nt, Artificial Sequence
  Synthetic oligonucleotide: BID-2435
gcucgggaggagccggc

SEQ ID NO: 42039 - RNA, 17 nt, Artificial Sequence
  Synthetic oligonucleotide: BID-2304
uccucggcgcggccggc

SEQ ID NO: 42040 - RNA, 17 nt, Artificial Sequence
  Synthetic oligonucleotide: BID-48
cgaggggccgggccggc

SEQ ID NO: 42041 - RNA, 17 nt, Artificial Sequence
  Synthetic oligonucleotide: BID-2268
gcccgcgcccccgcggc

SEQ ID NO: 42042 - RNA, 17 nt, Artificial Sequence
  Synthetic oligonucleotide: BID-2497
acgccggggcaggcggc

SEQ ID NO: 42043 - RNA, 17 nt, Artificial Sequence
  Synthetic oligonucleotide: BID-2491
ggcccagggcgggcggc

SEQ ID NO: 42044 - RNA, 17 nt, Artificial Sequence
  Synthetic oligonucleotide: BID-2403
gcugggccuucugcggc

SEQ ID NO: 42045 - RNA, 17 nt, Artificial Sequence
  Synthetic oligonucleotide: BID-2488
gcggucgggcccagggc

SEQ ID NO: 42046 - RNA, 17 nt, Artificial Sequence
  Synthetic oligonucleotide: BID-2297
agcagcgaccugagggc

SEQ ID NO: 42047 - RNA, 17 nt, Artificial Sequence
  Synthetic oligonucleotide: BID-2503
aggcaggggucacgggc

SEQ ID NO: 42048 - RNA, 17 nt, Artificial Sequence
  Synthetic oligonucleotide: BID-50
gcagcgaggggccgggc

SEQ ID NO: 42049 - RNA, 17 nt, Artificial Sequence
  Synthetic oligonucleotide: BID-3606
ggcgggccggggcgggc

SEQ ID NO: 42050 - RNA, 17 nt, Artificial Sequence
  Synthetic oligonucleotide: BID-54
ggugggcagcgaggggc

SEQ ID NO: 42051 - RNA, 17 nt, Artificial Sequence
  Synthetic oligonucleotide: BID-2495
gagcuccacgccggggc

SEQ ID NO: 42052 - RNA, 17 nt, Artificial Sequence
  Synthetic oligonucleotide: BID-3607
ccggggcgggccggggc

SEQ ID NO: 42053 - RNA, 17 nt, Artificial Sequence
  Synthetic oligonucleotide: BID-3608
cgggggcgggccggggc

SEQ ID NO: 42054 - RNA, 17 nt, Artificial Sequence
  Synthetic oligonucleotide: BID-2455
uuucuccucuccggggc

SEQ ID NO: 42055 - RNA, 17 nt, Artificial Sequence
  Synthetic oligonucleotide: BID-51
guaagugggcugggggc

SEQ ID NO: 42056 - RNA, 17 nt, Artificial Sequence
  Synthetic oligonucleotide: BID-2374
ccaccaaguggcugggc

SEQ ID NO: 42057 - RNA, 17 nt, Artificial Sequence
  Synthetic oligonucleotide: BID-38
ggauucuguaagugggc

SEQ ID NO: 42058 - RNA, 17 nt, Artificial Sequence
  Synthetic oligonucleotide: BID-2442
aagaccacggugugggc

SEQ ID NO: 42059 - RNA, 17 nt, Artificial Sequence
  Synthetic oligonucleotide: BID-2345
aaacccgcgggccuggc

SEQ ID NO: 42060 - RNA, 17 nt, Artificial Sequence
  Synthetic oligonucleotide: BID-2372
cucagccaccaaguggc

SEQ ID NO: 42061 - RNA, 17 nt, Artificial Sequence
  Synthetic oligonucleotide: BID-2352
gcaccgcagacaccugc

SEQ ID NO: 42062 - RNA, 17 nt, Artificial Sequence
  Synthetic oligonucleotide: BID-2405
gaccggccuucaccugc

SEQ ID NO: 42063 - RNA, 17 nt, Artificial Sequence
  Synthetic oligonucleotide: BID-2462
ccucagcaccgaccugc

SEQ ID NO: 42064 - RNA, 17 nt, Artificial Sequence
  Synthetic oligonucleotide: BID-2411
gccccaacccugccugc

SEQ ID NO: 42065 - RNA, 17 nt, Artificial Sequence
  Synthetic oligonucleotide: BID-2363
auccucgcugcugcugc

SEQ ID NO: 42066 - RNA, 17 nt, Artificial Sequence
  Synthetic oligonucleotide: BID-2437
gcaggugucugcggugc

SEQ ID NO: 42067 - RNA, 17 nt, Artificial Sequence
  Synthetic oligonucleotide: BID-2347
cgggccuggccgggugc

SEQ ID NO: 42068 - RNA, 17 nt, Artificial Sequence
  Synthetic oligonucleotide: BID-2327
auucaggggaggggugc

SEQ ID NO: 42069 - RNA, 17 nt, Artificial Sequence
  Synthetic oligonucleotide: BID-2348
gugcaggccacccuugc

SEQ ID NO: 42070 - RNA, 17 nt, Artificial Sequence
  Synthetic oligonucleotide: BID-2476
ggagagacccggcccuc

SEQ ID NO: 42071 - RNA, 17 nt, Artificial Sequence
  Synthetic oligonucleotide: BID-2481
ccccgccuccccuccuc

SEQ ID NO: 42072 - RNA, 17 nt, Artificial Sequence
  Synthetic oligonucleotide: BID-2277
gccccggcguggagcuc

SEQ ID NO: 42073 - RNA, 17 nt, Artificial Sequence
  Synthetic oligonucleotide: BID-2432
agcccugagcuccgcuc

SEQ ID NO: 42074 - RNA, 17 nt, Artificial Sequence
  Synthetic oligonucleotide: BID-2452
gcggguuuucuccucuc

SEQ ID NO: 42075 - RNA, 17 nt, Artificial Sequence
  Synthetic oligonucleotide: BID-2520
gggggcgcgggcgcguc

SEQ ID NO: 42076 - RNA, 17 nt, Artificial Sequence
  Synthetic oligonucleotide: BID-2484
uggcucccaccgcgguc

SEQ ID NO: 42077 - RNA, 17 nt, Artificial Sequence
  Synthetic oligonucleotide: BID-2309
ggucggugcugaggguc

SEQ ID NO: 42078 - RNA, 17 nt, Artificial Sequence
  Synthetic oligonucleotide: BID-2320
acguggccuggggauuc

SEQ ID NO: 42079 - RNA, 17 nt, Artificial Sequence
  Synthetic oligonucleotide: BID-2371
agcccucagccaccaag

SEQ ID NO: 42080 - RNA, 17 nt, Artificial Sequence
  Synthetic oligonucleotide: BID-2261
gcgccauaaggaggaag

SEQ ID NO: 42081 - RNA, 17 nt, Artificial Sequence
  Synthetic oligonucleotide: BID-34
agugcggauucuguaag

SEQ ID NO: 42082 - RNA, 17 nt, Artificial Sequence
  Synthetic oligonucleotide: BID-2368
uggcugaaugaccccag

SEQ ID NO: 42083 - RNA, 17 nt, Artificial Sequence
  Synthetic oligonucleotide: BID-2500
gggcaggcggcaggcag

SEQ ID NO: 42084 - RNA, 17 nt, Artificial Sequence
  Synthetic oligonucleotide: BID-33
caaauacgaaugugcag

SEQ ID NO: 42085 - RNA, 17 nt, Artificial Sequence
  Synthetic oligonucleotide: BID-2322
guggccuggggauucag

SEQ ID NO: 42086 - RNA, 17 nt, Artificial Sequence
  Synthetic oligonucleotide: BID-2357
acaaagcgcggucagag

SEQ ID NO: 42087 - RNA, 17 nt, Artificial Sequence
  Synthetic oligonucleotide: BID-2353
ugccggcuccucccgag

SEQ ID NO: 42088 - RNA, 17 nt, Artificial Sequence
  Synthetic oligonucleotide: BID-36
gcucggugggcagcgag

SEQ ID NO: 42089 - RNA, 17 nt, Artificial Sequence
  Synthetic oligonucleotide: BID-2428
gccagugcucuaaggag

SEQ ID NO: 42090 - RNA, 17 nt, Artificial Sequence
  Synthetic oligonucleotide: BID-2287
ggugggagccagaggag

SEQ ID NO: 42091 - RNA, 17 nt, Artificial Sequence
  Synthetic oligonucleotide: BID-2341
cgaggccagccccggag

SEQ ID NO: 42092 - RNA, 17 nt, Artificial Sequence
  Synthetic oligonucleotide: BID-2471
agggcgcccgggcggag

SEQ ID NO: 42093 - RNA, 17 nt, Artificial Sequence
  Synthetic oligonucleotide: BID-2511
ggcgcguaccccgggag

SEQ ID NO: 42094 - RNA, 17 nt, Artificial Sequence
  Synthetic oligonucleotide: BID-2325
cuggggauucaggggag

SEQ ID NO: 42095 - RNA, 17 nt, Artificial Sequence
  Synthetic oligonucleotide: BID-2334
gugcggggcgcggggag

SEQ ID NO: 42096 - RNA, 17 nt, Artificial Sequence
  Synthetic oligonucleotide: BID-2338
ggcgcggggagggggag

SEQ ID NO: 42097 - RNA, 17 nt, Artificial Sequence
  Synthetic oligonucleotide: BID-2459
ccccaggccacguggag

SEQ ID NO: 42098 - RNA, 17 nt, Artificial Sequence
  Synthetic oligonucleotide: BID-2365
gcugggaaacuguugag

SEQ ID NO: 42099 - RNA, 17 nt, Artificial Sequence
  Synthetic oligonucleotide: BID-2458
ugaauccccaggccacg

SEQ ID NO: 42100 - RNA, 17 nt, Artificial Sequence
  Synthetic oligonucleotide: BID-2316
guuguguccucuccacg

SEQ ID NO: 42101 - RNA, 17 nt, Artificial Sequence
  Synthetic oligonucleotide: BID-2482
uccucuggcucccaccg

SEQ ID NO: 42102 - RNA, 17 nt, Artificial Sequence
  Synthetic oligonucleotide: BID-2281
cgcccugggcccgaccg

SEQ ID NO: 42103 - RNA, 17 nt, Artificial Sequence
  Synthetic oligonucleotide: BID-2342
ggagaggagaaaacccg

SEQ ID NO: 42104 - RNA, 17 nt, Artificial Sequence
  Synthetic oligonucleotide: BID-2267
acgcgcccgcgcccccg

SEQ ID NO: 42105 - RNA, 17 nt, Artificial Sequence
  Synthetic oligonucleotide: BID-2450
gcacccggccaggcccg

SEQ ID NO: 42106 - RNA, 17 nt, Artificial Sequence
  Synthetic oligonucleotide: BID-2274
cacccgcgccccucccg

SEQ ID NO: 42107 - RNA, 17 nt, Artificial Sequence
  Synthetic oligonucleotide: BID-2514
ucaccacccuccagccg

SEQ ID NO: 42108 - RNA, 17 nt, Artificial Sequence
  Synthetic oligonucleotide: BID-2494
cccugagcuccacgccg

SEQ ID NO: 42109 - RNA, 17 nt, Artificial Sequence
  Synthetic oligonucleotide: BID-2463
accugccggccgcgccg

SEQ ID NO: 42110 - RNA, 17 nt, Artificial Sequence
  Synthetic oligonucleotide: BID-2522
cgggcgcguccgggccg

SEQ ID NO: 42111 - RNA, 17 nt, Artificial Sequence
  Synthetic oligonucleotide: BID-3609
cgggccggggcgggccg

SEQ ID NO: 42112 - RNA, 17 nt, Artificial Sequence
  Synthetic oligonucleotide: BID-2339
gggagggggaggggccg

SEQ ID NO: 42113 - RNA, 17 nt, Artificial Sequence
  Synthetic oligonucleotide: BID-2460
agccuuccccgccuccg

SEQ ID NO: 42114 - RNA, 17 nt, Artificial Sequence
  Synthetic oligonucleotide: BID-2454
ggguuuucuccucuccg

SEQ ID NO: 42115 - RNA, 17 nt, Artificial Sequence
  Synthetic oligonucleotide: BID-2356
ucagggcugacaaagcg

SEQ ID NO: 42116 - RNA, 17 nt, Artificial Sequence
  Synthetic oligonucleotide: BID-2426
ucccagcagcagcagcg

SEQ ID NO: 42117 - RNA, 17 nt, Artificial Sequence
  Synthetic oligonucleotide: BID-39
uggcucggugggcagcg

SEQ ID NO: 42118 - RNA, 17 nt, Artificial Sequence
  Synthetic oligonucleotide: BID-2516
accacccuccagccgcg

SEQ ID NO: 42119 - RNA, 17 nt, Artificial Sequence
  Synthetic oligonucleotide: BID-2256
ccgaaggaggaagcgcg

SEQ ID NO: 42120 - RNA, 17 nt, Artificial Sequence
  Synthetic oligonucleotide: BID-2258
gaaggaggaagcgcgcg

SEQ ID NO: 42121 - RNA, 17 nt, Artificial Sequence
  Synthetic oligonucleotide: BID-2524
agcgucucccaggcgcg

SEQ ID NO: 42122 - RNA, 17 nt, Artificial Sequence
  Synthetic oligonucleotide: BID-2331
gaggggugcggggcgcg

SEQ ID NO: 42123 - RNA, 17 nt, Artificial Sequence
  Synthetic oligonucleotide: BID-2291
ccagaggaggggaggcg

SEQ ID NO: 42124 - RNA, 17 nt, Artificial Sequence
  Synthetic oligonucleotide: BID-2276
ugccgccugccccggcg

SEQ ID NO: 42125 - RNA, 17 nt, Artificial Sequence
  Synthetic oligonucleotide: BID-2302
gggcgcccuccucggcg

SEQ ID NO: 42126 - RNA, 17 nt, Artificial Sequence
  Synthetic oligonucleotide: BID-3610
cggggcgggcccgggcg

SEQ ID NO: 42127 - RNA, 17 nt, Artificial Sequence
  Synthetic oligonucleotide: BID-2512
guaccccgggaggggcg

SEQ ID NO: 42128 - RNA, 17 nt, Artificial Sequence
  Synthetic oligonucleotide: BID-2329
gggaggggugcggggcg

SEQ ID NO: 42129 - RNA, 17 nt, Artificial Sequence
  Synthetic oligonucleotide: BID-2518
cuccagccgcgggggcg

SEQ ID NO: 42130 - RNA, 17 nt, Artificial Sequence
  Synthetic oligonucleotide: BID-2443
agaccacggugugggcg

SEQ ID NO: 42131 - RNA, 17 nt, Artificial Sequence
  Synthetic oligonucleotide: BID-2328
uucaggggaggggugcg

SEQ ID NO: 42132 - RNA, 17 nt, Artificial Sequence
  Synthetic oligonucleotide: BID-3611
gcguggggggccgaagg

SEQ ID NO: 42133 - RNA, 17 nt, Artificial Sequence
  Synthetic oligonucleotide: BID-2496
cuccacgccggggcagg

SEQ ID NO: 42134 - RNA, 17 nt, Artificial Sequence
  Synthetic oligonucleotide: BID-2285
gcggugggagccagagg

SEQ ID NO: 42135 - RNA, 17 nt, Artificial Sequence
  Synthetic oligonucleotide: BID-2464
ugccggccgcgccgagg

SEQ ID NO: 42136 - RNA, 17 nt, Artificial Sequence
  Synthetic oligonucleotide: BID-2461
cuuccccgccuccgagg

SEQ ID NO: 42137 - RNA, 17 nt, Artificial Sequence
  Synthetic oligonucleotide: BID-2312
cggguccgccucggagg

SEQ ID NO: 42138 - RNA, 17 nt, Artificial Sequence
  Synthetic oligonucleotide: BID-2289
agccagaggaggggagg

SEQ ID NO: 42139 - RNA, 17 nt, Artificial Sequence
  Synthetic oligonucleotide: BID-2473
cccgggcggaggggagg

SEQ ID NO: 42140 - RNA, 17 nt, Artificial Sequence
  Synthetic oligonucleotide: BID-2335
ugcggggcgcggggagg

SEQ ID NO: 42141 - RNA, 17 nt, Artificial Sequence
  Synthetic oligonucleotide: BID-2349
caggccacccuugccgg

SEQ ID NO: 42142 - RNA, 17 nt, Artificial Sequence
  Synthetic oligonucleotide: BID-2517
ccacccuccagccgcgg

SEQ ID NO: 42143 - RNA, 17 nt, Artificial Sequence
  Synthetic oligonucleotide: BID-2292
cagaggaggggaggcgg

SEQ ID NO: 42144 - RNA, 17 nt, Artificial Sequence
  Synthetic oligonucleotide: BID-2469
ggagggcgcccgggcgg

SEQ ID NO: 42145 - RNA, 17 nt, Artificial Sequence
  Synthetic oligonucleotide: BID-2490
gggcccagggcgggcgg

SEQ ID NO: 42146 - RNA, 17 nt, Artificial Sequence
  Synthetic oligonucleotide: BID-2271
cccccgcggcuggaggg

SEQ ID NO: 42147 - RNA, 17 nt, Artificial Sequence
  Synthetic oligonucleotide: BID-2468
cgaggagggcgcccggg

SEQ ID NO: 42148 - RNA, 17 nt, Artificial Sequence
  Synthetic oligonucleotide: BID-2293
agaggaggggaggcggg

SEQ ID NO: 42149 - RNA, 17 nt, Artificial Sequence
  Synthetic oligonucleotide: BID-2489
gucgggcccagggcggg

SEQ ID NO: 42150 - RNA, 17 nt, Artificial Sequence
  Synthetic oligonucleotide: BID-2323
gccuggggauucagggg

SEQ ID NO: 42151 - RNA, 17 nt, Artificial Sequence
  Synthetic oligonucleotide: BID-2288
gggagccagaggagggg

SEQ ID NO: 42152 - RNA, 17 nt, Artificial Sequence
  Synthetic oligonucleotide: BID-2472
gcgcccgggcggagggg

SEQ ID NO: 42153 - RNA, 17 nt, Artificial Sequence
  Synthetic oligonucleotide: BID-3612
gccggggcgggccgggg

SEQ ID NO: 42154 - RNA, 17 nt, Artificial Sequence
  Synthetic oligonucleotide: BID-2332
gggugcggggcgcgggg

SEQ ID NO: 42155 - RNA, 17 nt, Artificial Sequence
  Synthetic oligonucleotide: BID-2336
ggggcgcggggaggggg

SEQ ID NO: 42156 - RNA, 17 nt, Artificial Sequence
  Synthetic oligonucleotide: BID-3613
gcgggcccgggcguggg

SEQ ID NO: 42157 - RNA, 17 nt, Artificial Sequence
  Synthetic oligonucleotide: BID-2441
aaagaccacgguguggg

SEQ ID NO: 42158 - RNA, 17 nt, Artificial Sequence
  Synthetic oligonucleotide: BID-53
ggggccgggccggcugg

SEQ ID NO: 42159 - RNA, 17 nt, Artificial Sequence
  Synthetic oligonucleotide: BID-2269
cgcgcccccgcggcugg

SEQ ID NO: 42160 - RNA, 17 nt, Artificial Sequence
  Synthetic oligonucleotide: BID-40
uucuguaagugggcugg

SEQ ID NO: 42161 - RNA, 17 nt, Artificial Sequence
  Synthetic oligonucleotide: BID-3614
ggcgggcccgggcgugg

SEQ ID NO: 42162 - RNA, 17 nt, Artificial Sequence
  Synthetic oligonucleotide: BID-2418
ccagcccagccacuugg

SEQ ID NO: 42163 - RNA, 17 nt, Artificial Sequence
  Synthetic oligonucleotide: BID-2295
gccucagcagcgaccug

SEQ ID NO: 42164 - RNA, 17 nt, Artificial Sequence
  Synthetic oligonucleotide: BID-2425
ucucccaggguccccug

SEQ ID NO: 42165 - RNA, 17 nt, Artificial Sequence
  Synthetic oligonucleotide: BID-2480
gucgcugcugaggccug

SEQ ID NO: 42166 - RNA, 17 nt, Artificial Sequence
  Synthetic oligonucleotide: BID-2319
ccucuccacguggccug

SEQ ID NO: 42167 - RNA, 17 nt, Artificial Sequence
  Synthetic oligonucleotide: BID-2505
gcaggggucacgggcug

SEQ ID NO: 42168 - RNA, 17 nt, Artificial Sequence
  Synthetic oligonucleotide: BID-41
auucuguaagugggcug

SEQ ID NO: 42169 - RNA, 17 nt, Artificial Sequence
  Synthetic oligonucleotide: BID-2419
cagccacuugguggcug

SEQ ID NO: 42170 - RNA, 17 nt, Artificial Sequence
  Synthetic oligonucleotide: BID-2477
cccucaggucgcugcug

SEQ ID NO: 42171 - RNA, 17 nt, Artificial Sequence
  Synthetic oligonucleotide: BID-35
aaugugcagcggugcug

SEQ ID NO: 42172 - RNA, 17 nt, Artificial Sequence
  Synthetic oligonucleotide: BID-2306
ccggcaggucggugcug

SEQ ID NO: 42173 - RNA, 17 nt, Artificial Sequence
  Synthetic oligonucleotide: BID-2436
gagccggcaggugucug

SEQ ID NO: 42174 - RNA, 17 nt, Artificial Sequence
  Synthetic oligonucleotide: BID-2402
gggggcugggccuucug

SEQ ID NO: 42175 - RNA, 17 nt, Artificial Sequence
  Synthetic oligonucleotide: BID-47
gcuggaggagcacagug

SEQ ID NO: 42176 - RNA, 17 nt, Artificial Sequence
  Synthetic oligonucleotide: BID-3615
gggcgggcccgggcgug

SEQ ID NO: 42177 - RNA, 17 nt, Artificial Sequence
  Synthetic oligonucleotide: BID-2439
cuggaaagaccacggug

SEQ ID NO: 42178 - RNA, 17 nt, Artificial Sequence
  Synthetic oligonucleotide: BID-2326
gauucaggggaggggug

SEQ ID NO: 42179 - RNA, 17 nt, Artificial Sequence
  Synthetic oligonucleotide: BID-2362
gcacuggcaaugaugug

SEQ ID NO: 42180 - RNA, 17 nt, Artificial Sequence
  Synthetic oligonucleotide: BID-2410
accugcaggcaggguug

SEQ ID NO: 42181 - RNA, 17 nt, Artificial Sequence
  Synthetic oligonucleotide: BID-2417
uugccagcccagccacu

SEQ ID NO: 42182 - RNA, 17 nt, Artificial Sequence
  Synthetic oligonucleotide: BID-2370
ugaccccaggggacccu

SEQ ID NO: 42183 - RNA, 17 nt, Artificial Sequence
  Synthetic oligonucleotide: BID-2424
cucucccaggguccccu

SEQ ID NO: 42184 - RNA, 17 nt, Artificial Sequence
  Synthetic oligonucleotide: BID-2280
ggcccgccgcccgcccu

SEQ ID NO: 42185 - RNA, 17 nt, Artificial Sequence
  Synthetic oligonucleotide: BID-2479
ggucgcugcugaggccu

SEQ ID NO: 42186 - RNA, 17 nt, Artificial Sequence
  Synthetic oligonucleotide: BID-2456
cucuccggggcuggccu

SEQ ID NO: 42187 - RNA, 17 nt, Artificial Sequence
  Synthetic oligonucleotide: BID-2318
uccucuccacguggccu

SEQ ID NO: 42188 - RNA, 17 nt, Artificial Sequence
  Synthetic oligonucleotide: BID-2265
ccugggagacgcugccu

SEQ ID NO: 42189 - RNA, 17 nt, Artificial Sequence
  Synthetic oligonucleotide: BID-2431
cagcccugagcuccgcu

SEQ ID NO: 42190 - RNA, 17 nt, Artificial Sequence
  Synthetic oligonucleotide: BID-2504
ggcaggggucacgggcu

SEQ ID NO: 42191 - RNA, 17 nt, Artificial Sequence
  Synthetic oligonucleotide: BID-49
uaagugggcugggggcu

SEQ ID NO: 42192 - RNA, 17 nt, Artificial Sequence
  Synthetic oligonucleotide: BID-2506
ggucacgggcuggggcu

SEQ ID NO: 42193 - RNA, 17 nt, Artificial Sequence
  Synthetic oligonucleotide: BID-42
gauucuguaagugggcu

SEQ ID NO: 42194 - RNA, 17 nt, Artificial Sequence
  Synthetic oligonucleotide: BID-44
cuggggucaugauggcu

SEQ ID NO: 42195 - RNA, 17 nt, Artificial Sequence
  Synthetic oligonucleotide: BID-2373
ucagccaccaaguggcu

SEQ ID NO: 42196 - RNA, 17 nt, Artificial Sequence
  Synthetic oligonucleotide: BID-2364
uccucgcugcugcugcu

SEQ ID NO: 42197 - RNA, 17 nt, Artificial Sequence
  Synthetic oligonucleotide: BID-27
gugcggauucuguaagu

SEQ ID NO: 42198 - RNA, 17 nt, Artificial Sequence
  Synthetic oligonucleotide: BID-3616
ggggcgggcccgggcgu

SEQ ID NO: 42199 - RNA, 17 nt, Artificial Sequence
  Synthetic oligonucleotide: BID-2305
cggcgcggccggcaggu

SEQ ID NO: 42200 - RNA, 17 nt, Artificial Sequence
  Synthetic oligonucleotide: BID-2483
cuggcucccaccgcggu

SEQ ID NO: 42201 - RNA, 17 nt, Artificial Sequence
  Synthetic oligonucleotide: BID-2408
ucaccugcaggcagggu

SEQ ID NO: 42202 - RNA, 17 nt, Artificial Sequence
  Synthetic oligonucleotide: BID-2308
aggucggugcugagggu

SEQ ID NO: 42203 - RNA, 17 nt, Artificial Sequence
  Synthetic oligonucleotide: BID-2440
uggaaagaccacggugu

SEQ ID NO: 42204 - RNA, 17 nt, Artificial Sequence
  Synthetic oligonucleotide: BID-2527
ccgcgcgcuuccuccuu

SEQ ID NO: 42205 - RNA, 17 nt, Artificial Sequence
  Synthetic oligonucleotide: BID-2409
caccugcaggcaggguu

SEQ ID NO: 42206 - RNA, 20 nt, Artificial Sequence
  Synthetic oligonucleotide: BID-2105
ccaaguggcugggcuggcaa

SEQ ID NO: 42207 - RNA, 20 nt, Artificial Sequence
  Synthetic oligonucleotide: BID-2166
cugcggugcuggaaagacca

SEQ ID NO: 42208 - RNA, 20 nt, Artificial Sequence
  Synthetic oligonucleotide: BID-2096
ugaguggcugaaugacccca

SEQ ID NO: 42209 - RNA, 20 nt, Artificial Sequence
  Synthetic oligonucleotide: BID-2150
agggcuucagagcucuccca

SEQ ID NO: 42210 - RNA, 20 nt, Artificial Sequence
  Synthetic oligonucleotide: BID-2227
gccggggcaggcggcaggca

SEQ ID NO: 42211 - RNA, 20 nt, Artificial Sequence
  Synthetic oligonucleotide: BID-2136
ccggccuucaccugcaggca

SEQ ID NO: 42212 - RNA, 20 nt, Artificial Sequence
  Synthetic oligonucleotide: BID-2104
accaaguggcugggcuggca

SEQ ID NO: 42213 - RNA, 20 nt, Artificial Sequence
  Synthetic oligonucleotide: BID-2007
cugccccggcguggagcuca

SEQ ID NO: 42214 - RNA, 20 nt, Artificial Sequence
  Synthetic oligonucleotide: BID-2229
caggcggcaggcagggguca

SEQ ID NO: 42215 - RNA, 20 nt, Artificial Sequence
  Synthetic oligonucleotide: BID-2050
ccacguggccuggggauuca

SEQ ID NO: 42216 - RNA, 20 nt, Artificial Sequence
  Synthetic oligonucleotide: BID-3617
gcccgggcguggggggccga

SEQ ID NO: 42217 - RNA, 20 nt, Artificial Sequence
  Synthetic oligonucleotide: BID-2015
ccgcggugggagccagagga

SEQ ID NO: 42218 - RNA, 20 nt, Artificial Sequence
  Synthetic oligonucleotide: BID-2198
gaggagggcgcccgggcgga

SEQ ID NO: 42219 - RNA, 20 nt, Artificial Sequence
  Synthetic oligonucleotide: BID-2053
uggccuggggauucagggga

SEQ ID NO: 42220 - RNA, 20 nt, Artificial Sequence
  Synthetic oligonucleotide: BID-2062
aggggugcggggcgcgggga

SEQ ID NO: 42221 - RNA, 20 nt, Artificial Sequence
  Synthetic oligonucleotide: BID-2044
guccgccucggaggcgggga

SEQ ID NO: 42222 - RNA, 20 nt, Artificial Sequence
  Synthetic oligonucleotide: BID-2066
gcggggcgcggggaggggga

SEQ ID NO: 42223 - RNA, 20 nt, Artificial Sequence
  Synthetic oligonucleotide: BID-20
cagcggugcuggggucauga

SEQ ID NO: 42224 - RNA, 20 nt, Artificial Sequence
  Synthetic oligonucleotide: BID-2025
aggccucagcagcgaccuga

SEQ ID NO: 42225 - RNA, 20 nt, Artificial Sequence
  Synthetic oligonucleotide: BID-2148
cccagccacuugguggcuga

SEQ ID NO: 42226 - RNA, 20 nt, Artificial Sequence
  Synthetic oligonucleotide: BID-2036
ggccggcaggucggugcuga

SEQ ID NO: 42227 - RNA, 20 nt, Artificial Sequence
  Synthetic oligonucleotide: BID-2140
ccaacccugccugcagguga

SEQ ID NO: 42228 - RNA, 20 nt, Artificial Sequence
  Synthetic oligonucleotide: BID-2155
acaucauugccagugcucua

SEQ ID NO: 42229 - RNA, 20 nt, Artificial Sequence
  Synthetic oligonucleotide: BID-2230
aggcggcaggcaggggucac

SEQ ID NO: 42230 - RNA, 20 nt, Artificial Sequence
  Synthetic oligonucleotide: BID-2133
ugggccuucugcggcuggac

SEQ ID NO: 42231 - RNA, 20 nt, Artificial Sequence
  Synthetic oligonucleotide: BID-2087
cggucagagcggccgcuuac

SEQ ID NO: 42232 - RNA, 20 nt, Artificial Sequence
  Synthetic oligonucleotide: BID-2176
cggcaaggguggccugcacc

SEQ ID NO: 42233 - RNA, 20 nt, Artificial Sequence
  Synthetic oligonucleotide: BID-2203
gaggggaggcgggagagacc

SEQ ID NO: 42234 - RNA, 20 nt, Artificial Sequence
  Synthetic oligonucleotide: BID-2098
ugaaugaccccaggggaccc

SEQ ID NO: 42235 - RNA, 20 nt, Artificial Sequence
  Synthetic oligonucleotide: BID-2095
uugaguggcugaaugacccc

SEQ ID NO: 42236 - RNA, 20 nt, Artificial Sequence
  Synthetic oligonucleotide: BID-2023
aggcggggggucagagcccc

SEQ ID NO: 42237 - RNA, 20 nt, Artificial Sequence
  Synthetic oligonucleotide: BID-2185
caccccuccccugaaucccc

SEQ ID NO: 42238 - RNA, 20 nt, Artificial Sequence
  Synthetic oligonucleotide: BID-2151
agagcucucccagggucccc

SEQ ID NO: 42239 - RNA, 20 nt, Artificial Sequence
  Synthetic oligonucleotide: BID-2069
ggaggggccgaggccagccc

SEQ ID NO: 42240 - RNA, 20 nt, Artificial Sequence
  Synthetic oligonucleotide: BID-3618
uccuucggccccccacgccc

SEQ ID NO: 42241 - RNA, 20 nt, Artificial Sequence
  Synthetic oligonucleotide: BID-2008
ucagggcccgccgcccgccc

SEQ ID NO: 42242 - RNA, 20 nt, Artificial Sequence
  Synthetic oligonucleotide: BID-3619
gggcccgccccggcccgccc

SEQ ID NO: 42243 - RNA, 20 nt, Artificial Sequence
  Synthetic oligonucleotide: BID-3620
ccccacgcccgggcccgccc

SEQ ID NO: 42244 - RNA, 20 nt, Artificial Sequence
  Synthetic oligonucleotide: BID-2029
cucccgccuccccuccgccc

SEQ ID NO: 42245 - RNA, 20 nt, Artificial Sequence
  Synthetic oligonucleotide: BID-2195
ccgcgccgaggagggcgccc

SEQ ID NO: 42246 - RNA, 20 nt, Artificial Sequence
  Synthetic oligonucleotide: BID-3621
gggcgggccggggcgggccc

SEQ ID NO: 42247 - RNA, 20 nt, Artificial Sequence
  Synthetic oligonucleotide: BID-2004
ccccugccugccgccugccc

SEQ ID NO: 42248 - RNA, 20 nt, Artificial Sequence
  Synthetic oligonucleotide: BID-2002
agugcacccgcgccccuccc

SEQ ID NO: 42249 - RNA, 20 nt, Artificial Sequence
  Synthetic oligonucleotide: BID-2149
gagggcuucagagcucuccc

SEQ ID NO: 42250 - RNA, 20 nt, Artificial Sequence
  Synthetic oligonucleotide: BID-2251
gggccgaggcagcgucuccc

SEQ ID NO: 42251 - RNA, 20 nt, Artificial Sequence
  Synthetic oligonucleotide: BID-3622
cuccuucggccccccacgcc

SEQ ID NO: 42252 - RNA, 20 nt, Artificial Sequence
  Synthetic oligonucleotide: BID-2221
cgggcccugagcuccacgcc

SEQ ID NO: 42253 - RNA, 20 nt, Artificial Sequence
  Synthetic oligonucleotide: BID-2028
ucucccgccuccccuccgcc

SEQ ID NO: 42254 - RNA, 20 nt, Artificial Sequence
  Synthetic oligonucleotide: BID-2206
cucaggucgcugcugaggcc

SEQ ID NO: 42255 - RNA, 20 nt, Artificial Sequence
  Synthetic oligonucleotide: BID-2177
aggguggccugcacccggcc

SEQ ID NO: 42256 - RNA, 20 nt, Artificial Sequence
  Synthetic oligonucleotide: BID-21
cugugcuccuccagccggcc

SEQ ID NO: 42257 - RNA, 20 nt, Artificial Sequence
  Synthetic oligonucleotide: BID-1995
ugggagacgcugccucggcc

SEQ ID NO: 42258 - RNA, 20 nt, Artificial Sequence
  Synthetic oligonucleotide: BID-2027
ucagcagcgaccugagggcc

SEQ ID NO: 42259 - RNA, 20 nt, Artificial Sequence
  Synthetic oligonucleotide: BID-19
ucggugggcagcgaggggcc

SEQ ID NO: 42260 - RNA, 20 nt, Artificial Sequence
  Synthetic oligonucleotide: BID-2046
uguguccucuccacguggcc

SEQ ID NO: 42261 - RNA, 20 nt, Artificial Sequence
  Synthetic oligonucleotide: BID-2001
gagugcacccgcgccccucc

SEQ ID NO: 42262 - RNA, 20 nt, Artificial Sequence
  Synthetic oligonucleotide: BID-2249
gcgggggcgcgggcgcgucc

SEQ ID NO: 42263 - RNA, 20 nt, Artificial Sequence
  Synthetic oligonucleotide: BID-1991
gggcgccauaaggaggaagc

SEQ ID NO: 42264 - RNA, 20 nt, Artificial Sequence
  Synthetic oligonucleotide: BID-2157
uugccagugcucuaaggagc

SEQ ID NO: 42265 - RNA, 20 nt, Artificial Sequence
  Synthetic oligonucleotide: BID-2220
gcgggcccugagcuccacgc

SEQ ID NO: 42266 - RNA, 20 nt, Artificial Sequence
  Synthetic oligonucleotide: BID-2072
ccggagaggagaaaacccgc

SEQ ID NO: 42267 - RNA, 20 nt, Artificial Sequence
  Synthetic oligonucleotide: BID-2179
cugcacccggccaggcccgc

SEQ ID NO: 42268 - RNA, 20 nt, Artificial Sequence
  Synthetic oligonucleotide: BID-2243
acucaccacccuccagccgc

SEQ ID NO: 42269 - RNA, 20 nt, Artificial Sequence
  Synthetic oligonucleotide: BID-1986
ggccgaaggaggaagcgcgc

SEQ ID NO: 42270 - RNA, 20 nt, Artificial Sequence
  Synthetic oligonucleotide: BID-2241
gcguaccccgggaggggcgc

SEQ ID NO: 42271 - RNA, 20 nt, Artificial Sequence
  Synthetic oligonucleotide: BID-2059
aggggaggggugcggggcgc

SEQ ID NO: 42272 - RNA, 20 nt, Artificial Sequence
  Synthetic oligonucleotide: BID-2247
cccuccagccgcgggggcgc

SEQ ID NO: 42273 - RNA, 20 nt, Artificial Sequence
  Synthetic oligonucleotide: BID-2141
cccugccugcaggugaaggc

SEQ ID NO: 42274 - RNA, 20 nt, Artificial Sequence
  Synthetic oligonucleotide: BID-2226
cgccggggcaggcggcaggc

SEQ ID NO: 42275 - RNA, 20 nt, Artificial Sequence
  Synthetic oligonucleotide: BID-2135
accggccuucaccugcaggc

SEQ ID NO: 42276 - RNA, 20 nt, Artificial Sequence
  Synthetic oligonucleotide: BID-2019
ggagccagaggaggggaggc

SEQ ID NO: 42277 - RNA, 20 nt, Artificial Sequence
  Synthetic oligonucleotide: BID-2202
cgcccgggcggaggggaggc

SEQ ID NO: 42278 - RNA, 20 nt, Artificial Sequence
  Synthetic oligonucleotide: BID-2033
cccuccucggcgcggccggc

SEQ ID NO: 42279 - RNA, 20 nt, Artificial Sequence
  Synthetic oligonucleotide: BID-23
cagcgaggggccgggccggc

SEQ ID NO: 42280 - RNA, 20 nt, Artificial Sequence
  Synthetic oligonucleotide: BID-1997
cgcgcccgcgcccccgcggc

SEQ ID NO: 42281 - RNA, 20 nt, Artificial Sequence
  Synthetic oligonucleotide: BID-2032
ggcgcccuccucggcgcggc

SEQ ID NO: 42282 - RNA, 20 nt, Artificial Sequence
  Synthetic oligonucleotide: BID-2219
ucgggcccagggcgggcggc

SEQ ID NO: 42283 - RNA, 20 nt, Artificial Sequence
  Synthetic oligonucleotide: BID-2132
ggggcugggccuucugcggc

SEQ ID NO: 42284 - RNA, 20 nt, Artificial Sequence
  Synthetic oligonucleotide: BID-2216
accgcggucgggcccagggc

SEQ ID NO: 42285 - RNA, 20 nt, Artificial Sequence
  Synthetic oligonucleotide: BID-2026
cucagcagcgaccugagggc

SEQ ID NO: 42286 - RNA, 20 nt, Artificial Sequence
  Synthetic oligonucleotide: BID-2231
ggcaggcaggggucacgggc

SEQ ID NO: 42287 - RNA, 20 nt, Artificial Sequence
  Synthetic oligonucleotide: BID-29
ugggcagcgaggggccgggc

SEQ ID NO: 42288 - RNA, 20 nt, Artificial Sequence
  Synthetic oligonucleotide: BID-3623
gggggcgggccggggcgggc

SEQ ID NO: 42289 - RNA, 20 nt, Artificial Sequence
  Synthetic oligonucleotide: BID-24
cucggugggcagcgaggggc

SEQ ID NO: 42290 - RNA, 20 nt, Artificial Sequence
  Synthetic oligonucleotide: BID-2223
ccugagcuccacgccggggc

SEQ ID NO: 42291 - RNA, 20 nt, Artificial Sequence
  Synthetic oligonucleotide: BID-3624
gggccggggcgggccggggc

SEQ ID NO: 42292 - RNA, 20 nt, Artificial Sequence
  Synthetic oligonucleotide: BID-2183
gguuuucuccucuccggggc

SEQ ID NO: 42293 - RNA, 20 nt, Artificial Sequence
  Synthetic oligonucleotide: BID-22
ucuguaagugggcugggggc

SEQ ID NO: 42294 - RNA, 20 nt, Artificial Sequence
  Synthetic oligonucleotide: BID-2103
cagccaccaaguggcugggc

SEQ ID NO: 42295 - RNA, 20 nt, Artificial Sequence
  Synthetic oligonucleotide: BID-2170
ggaaagaccacggugugggc

SEQ ID NO: 42296 - RNA, 20 nt, Artificial Sequence
  Synthetic oligonucleotide: BID-2074
agaaaacccgcgggccuggc

SEQ ID NO: 42297 - RNA, 20 nt, Artificial Sequence
  Synthetic oligonucleotide: BID-2101
gcccucagccaccaaguggc

SEQ ID NO: 42298 - RNA, 20 nt, Artificial Sequence
  Synthetic oligonucleotide: BID-2081
ccagcaccgcagacaccugc

SEQ ID NO: 42299 - RNA, 20 nt, Artificial Sequence
  Synthetic oligonucleotide: BID-2134
cuggaccggccuucaccugc

SEQ ID NO: 42300 - RNA, 20 nt, Artificial Sequence
  Synthetic oligonucleotide: BID-2190
gacccucagcaccgaccugc

SEQ ID NO: 42301 - RNA, 20 nt, Artificial Sequence
  Synthetic oligonucleotide: BID-2092
cggauccucgcugcugcugc

SEQ ID NO: 42302 - RNA, 20 nt, Artificial Sequence
  Synthetic oligonucleotide: BID-2165
ccggcaggugucugcggugc

SEQ ID NO: 42303 - RNA, 20 nt, Artificial Sequence
  Synthetic oligonucleotide: BID-2076
ccgcgggccuggccgggugc

SEQ ID NO: 42304 - RNA, 20 nt, Artificial Sequence
  Synthetic oligonucleotide: BID-2056
gggauucaggggaggggugc

SEQ ID NO: 42305 - RNA, 20 nt, Artificial Sequence
  Synthetic oligonucleotide: BID-2077
cgggugcaggccacccuugc

SEQ ID NO: 42306 - RNA, 20 nt, Artificial Sequence
  Synthetic oligonucleotide: BID-2209
accccccgccuccccuccuc

SEQ ID NO: 42307 - RNA, 20 nt, Artificial Sequence
  Synthetic oligonucleotide: BID-2083
gcuccucccgagcggagcuc

SEQ ID NO: 42308 - RNA, 20 nt, Artificial Sequence
  Synthetic oligonucleotide: BID-2006
ccugccccggcguggagcuc

SEQ ID NO: 42309 - RNA, 20 nt, Artificial Sequence
  Synthetic oligonucleotide: BID-2160
gucagcccugagcuccgcuc

SEQ ID NO: 42310 - RNA, 20 nt, Artificial Sequence
  Synthetic oligonucleotide: BID-2180
cccgcggguuuucuccucuc

SEQ ID NO: 42311 - RNA, 20 nt, Artificial Sequence
  Synthetic oligonucleotide: BID-2248
cgcgggggcgcgggcgcguc

SEQ ID NO: 42312 - RNA, 20 nt, Artificial Sequence
  Synthetic oligonucleotide: BID-2038
gcaggucggugcugaggguc

SEQ ID NO: 42313 - RNA, 20 nt, Artificial Sequence
  Synthetic oligonucleotide: BID-2049
uccacguggccuggggauuc

SEQ ID NO: 42314 - RNA, 20 nt, Artificial Sequence
  Synthetic oligonucleotide: BID-2100
ugaagcccucagccaccaag

SEQ ID NO: 42315 - RNA, 20 nt, Artificial Sequence
  Synthetic oligonucleotide: BID-1990
ggggcgccauaaggaggaag

SEQ ID NO: 42316 - RNA, 20 nt, Artificial Sequence
  Synthetic oligonucleotide: BID-2097
gaguggcugaaugaccccag

SEQ ID NO: 42317 - RNA, 20 nt, Artificial Sequence
  Synthetic oligonucleotide: BID-2228
ccggggcaggcggcaggcag

SEQ ID NO: 42318 - RNA, 20 nt, Artificial Sequence
  Synthetic oligonucleotide: BID-2
caacaaauacgaaugugcag

SEQ ID NO: 42319 - RNA, 20 nt, Artificial Sequence
  Synthetic oligonucleotide: BID-2051
cacguggccuggggauucag

SEQ ID NO: 42320 - RNA, 20 nt, Artificial Sequence
  Synthetic oligonucleotide: BID-2086
cugacaaagcgcggucagag

SEQ ID NO: 42321 - RNA, 20 nt, Artificial Sequence
  Synthetic oligonucleotide: BID-2082
accugccggcuccucccgag

SEQ ID NO: 42322 - RNA, 20 nt, Artificial Sequence
  Synthetic oligonucleotide: BID-18
auggcucggugggcagcgag

SEQ ID NO: 42323 - RNA, 20 nt, Artificial Sequence
  Synthetic oligonucleotide: BID-2156
auugccagugcucuaaggag

SEQ ID NO: 42324 - RNA, 20 nt, Artificial Sequence
  Synthetic oligonucleotide: BID-2016
cgcggugggagccagaggag

SEQ ID NO: 42325 - RNA, 20 nt, Artificial Sequence
  Synthetic oligonucleotide: BID-2070
ggccgaggccagccccggag

SEQ ID NO: 42326 - RNA, 20 nt, Artificial Sequence
  Synthetic oligonucleotide: BID-2199
aggagggcgcccgggcggag

SEQ ID NO: 42327 - RNA, 20 nt, Artificial Sequence
  Synthetic oligonucleotide: BID-2239
cucggcgcguaccccgggag

SEQ ID NO: 42328 - RNA, 20 nt, Artificial Sequence
  Synthetic oligonucleotide: BID-2054
ggccuggggauucaggggag

SEQ ID NO: 42329 - RNA, 20 nt, Artificial Sequence
  Synthetic oligonucleotide: BID-2063
ggggugcggggcgcggggag

SEQ ID NO: 42330 - RNA, 20 nt, Artificial Sequence
  Synthetic oligonucleotide: BID-2067
cggggcgcggggagggggag

SEQ ID NO: 42331 - RNA, 20 nt, Artificial Sequence
  Synthetic oligonucleotide: BID-2187
aauccccaggccacguggag

SEQ ID NO: 42332 - RNA, 20 nt, Artificial Sequence
  Synthetic oligonucleotide: BID-2094
gcugcugggaaacuguugag

SEQ ID NO: 42333 - RNA, 20 nt, Artificial Sequence
  Synthetic oligonucleotide: BID-2186
cccugaauccccaggccacg

SEQ ID NO: 42334 - RNA, 20 nt, Artificial Sequence
  Synthetic oligonucleotide: BID-2045
uuuguuguguccucuccacg

SEQ ID NO: 42335 - RNA, 20 nt, Artificial Sequence
  Synthetic oligonucleotide: BID-2210
cccuccucuggcucccaccg

SEQ ID NO: 42336 - RNA, 20 nt, Artificial Sequence
  Synthetic oligonucleotide: BID-2010
gcccgcccugggcccgaccg

SEQ ID NO: 42337 - RNA, 20 nt, Artificial Sequence
  Synthetic oligonucleotide: BID-2071
cccggagaggagaaaacccg

SEQ ID NO: 42338 - RNA, 20 nt, Artificial Sequence
  Synthetic oligonucleotide: BID-1996
cggacgcgcccgcgcccccg

SEQ ID NO: 42339 - RNA, 20 nt, Artificial Sequence
  Synthetic oligonucleotide: BID-2178
ccugcacccggccaggcccg

SEQ ID NO: 42340 - RNA, 20 nt, Artificial Sequence
  Synthetic oligonucleotide: BID-2003
gugcacccgcgccccucccg

SEQ ID NO: 42341 - RNA, 20 nt, Artificial Sequence
  Synthetic oligonucleotide: BID-2242
cacucaccacccuccagccg

SEQ ID NO: 42342 - RNA, 20 nt, Artificial Sequence
  Synthetic oligonucleotide: BID-2222
gggcccugagcuccacgccg

SEQ ID NO: 42343 - RNA, 20 nt, Artificial Sequence
  Synthetic oligonucleotide: BID-2250
gcgcgggcgcguccgggccg

SEQ ID NO: 42344 - RNA, 20 nt, Artificial Sequence
  Synthetic oligonucleotide: BID-3625
gggcgggccggggcgggccg

SEQ ID NO: 42345 - RNA, 20 nt, Artificial Sequence
  Synthetic oligonucleotide: BID-2068
gcggggagggggaggggccg

SEQ ID NO: 42346 - RNA, 20 nt, Artificial Sequence
  Synthetic oligonucleotide: BID-2188
caaagccuuccccgccuccg

SEQ ID NO: 42347 - RNA, 20 nt, Artificial Sequence
  Synthetic oligonucleotide: BID-2154
guuucccagcagcagcagcg

SEQ ID NO: 42348 - RNA, 20 nt, Artificial Sequence
  Synthetic oligonucleotide: BID-9
ugauggcucggugggcagcg

SEQ ID NO: 42349 - RNA, 20 nt, Artificial Sequence
  Synthetic oligonucleotide: BID-2244
cucaccacccuccagccgcg

SEQ ID NO: 42350 - RNA, 20 nt, Artificial Sequence
  Synthetic oligonucleotide: BID-1112
gggccgaaggaggaagcgcg

SEQ ID NO: 42351 - RNA, 20 nt, Artificial Sequence
  Synthetic oligonucleotide: BID-1987
gccgaaggaggaagcgcgcg

SEQ ID NO: 42352 - RNA, 20 nt, Artificial Sequence
  Synthetic oligonucleotide: BID-2060
ggggaggggugcggggcgcg

SEQ ID NO: 42353 - RNA, 20 nt, Artificial Sequence
  Synthetic oligonucleotide: BID-2020
gagccagaggaggggaggcg

SEQ ID NO: 42354 - RNA, 20 nt, Artificial Sequence
  Synthetic oligonucleotide: BID-2005
gccugccgccugccccggcg

SEQ ID NO: 42355 - RNA, 20 nt, Artificial Sequence
  Synthetic oligonucleotide: BID-2031
cccgggcgcccuccucggcg

SEQ ID NO: 42356 - RNA, 20 nt, Artificial Sequence
  Synthetic oligonucleotide: BID-3626
ggccggggcgggcccgggcg

SEQ ID NO: 42357 - RNA, 20 nt, Artificial Sequence
  Synthetic oligonucleotide: BID-2058
caggggaggggugcggggcg

SEQ ID NO: 42358 - RNA, 20 nt, Artificial Sequence
  Synthetic oligonucleotide: BID-2171
gaaagaccacggugugggcg

SEQ ID NO: 42359 - RNA, 20 nt, Artificial Sequence
  Synthetic oligonucleotide: BID-2057
ggauucaggggaggggugcg

SEQ ID NO: 42360 - RNA, 20 nt, Artificial Sequence
  Synthetic oligonucleotide: BID-3627
cgggcguggggggccgaagg

SEQ ID NO: 42361 - RNA, 20 nt, Artificial Sequence
  Synthetic oligonucleotide: BID-2224
gagcuccacgccggggcagg

SEQ ID NO: 42362 - RNA, 20 nt, Artificial Sequence
  Synthetic oligonucleotide: BID-2014
accgcggugggagccagagg

SEQ ID NO: 42363 - RNA, 20 nt, Artificial Sequence
  Synthetic oligonucleotide: BID-2192
accugccggccgcgccgagg

SEQ ID NO: 42364 - RNA, 20 nt, Artificial Sequence
  Synthetic oligonucleotide: BID-2189
agccuuccccgccuccgagg

SEQ ID NO: 42365 - RNA, 20 nt, Artificial Sequence
  Synthetic oligonucleotide: BID-2018
gggagccagaggaggggagg

SEQ ID NO: 42366 - RNA, 20 nt, Artificial Sequence
  Synthetic oligonucleotide: BID-2201
gcgcccgggcggaggggagg

SEQ ID NO: 42367 - RNA, 20 nt, Artificial Sequence
  Synthetic oligonucleotide: BID-2064
gggugcggggcgcggggagg

SEQ ID NO: 42368 - RNA, 20 nt, Artificial Sequence
  Synthetic oligonucleotide: BID-2011
cgcccugggcccgaccgcgg

SEQ ID NO: 42369 - RNA, 20 nt, Artificial Sequence
  Synthetic oligonucleotide: BID-2021
agccagaggaggggaggcgg

SEQ ID NO: 42370 - RNA, 20 nt, Artificial Sequence
  Synthetic oligonucleotide: BID-2197
cgaggagggcgcccgggcgg

SEQ ID NO: 42371 - RNA, 20 nt, Artificial Sequence
  Synthetic oligonucleotide: BID-2218
gucgggcccagggcgggcgg

SEQ ID NO: 42372 - RNA, 20 nt, Artificial Sequence
  Synthetic oligonucleotide: BID-8
cuggggucaugauggcucgg

SEQ ID NO: 42373 - RNA, 20 nt, Artificial Sequence
  Synthetic oligonucleotide: BID-2215
caccgcggucgggcccaggg

SEQ ID NO: 42374 - RNA, 20 nt, Artificial Sequence
  Synthetic oligonucleotide: BID-2000
gcgcccccgcggcuggaggg

SEQ ID NO: 42375 - RNA, 20 nt, Artificial Sequence
  Synthetic oligonucleotide: BID-2196
cgccgaggagggcgcccggg

SEQ ID NO: 42376 - RNA, 20 nt, Artificial Sequence
  Synthetic oligonucleotide: BID-2022
gccagaggaggggaggcggg

SEQ ID NO: 42377 - RNA, 20 nt, Artificial Sequence
  Synthetic oligonucleotide: BID-2217
gcggucgggcccagggcggg

SEQ ID NO: 42378 - RNA, 20 nt, Artificial Sequence
  Synthetic oligonucleotide: BID-2052
guggccuggggauucagggg

SEQ ID NO: 42379 - RNA, 20 nt, Artificial Sequence
  Synthetic oligonucleotide: BID-2017
ggugggagccagaggagggg

SEQ ID NO: 42380 - RNA, 20 nt, Artificial Sequence
  Synthetic oligonucleotide: BID-2200
agggcgcccgggcggagggg

SEQ ID NO: 42381 - RNA, 20 nt, Artificial Sequence
  Synthetic oligonucleotide: BID-3628
cgggccggggcgggccgggg

SEQ ID NO: 42382 - RNA, 20 nt, Artificial Sequence
  Synthetic oligonucleotide: BID-2061
gaggggugcggggcgcgggg

SEQ ID NO: 42383 - RNA, 20 nt, Artificial Sequence
  Synthetic oligonucleotide: BID-2065
ugcggggcgcggggaggggg

SEQ ID NO: 42384 - RNA, 20 nt, Artificial Sequence
  Synthetic oligonucleotide: BID-3629
ggggcgggcccgggcguggg

SEQ ID NO: 42385 - RNA, 20 nt, Artificial Sequence
  Synthetic oligonucleotide: BID-2169
uggaaagaccacgguguggg

SEQ ID NO: 42386 - RNA, 20 nt, Artificial Sequence
  Synthetic oligonucleotide: BID-25
cgaggggccgggccggcugg

SEQ ID NO: 42387 - RNA, 20 nt, Artificial Sequence
  Synthetic oligonucleotide: BID-1998
gcccgcgcccccgcggcugg

SEQ ID NO: 42388 - RNA, 20 nt, Artificial Sequence
  Synthetic oligonucleotide: BID-16
ggauucuguaagugggcugg

SEQ ID NO: 42389 - RNA, 20 nt, Artificial Sequence
  Synthetic oligonucleotide: BID-3630
cggggcgggcccgggcgugg

SEQ ID NO: 42390 - RNA, 20 nt, Artificial Sequence
  Synthetic oligonucleotide: BID-2146
uugccagcccagccacuugg

SEQ ID NO: 42391 - RNA, 20 nt, Artificial Sequence
  Synthetic oligonucleotide: BID-2024
caggccucagcagcgaccug

SEQ ID NO: 42392 - RNA, 20 nt, Artificial Sequence
  Synthetic oligonucleotide: BID-2153
agcucucccaggguccccug

SEQ ID NO: 42393 - RNA, 20 nt, Artificial Sequence
  Synthetic oligonucleotide: BID-2048
uguccucuccacguggccug

SEQ ID NO: 42394 - RNA, 20 nt, Artificial Sequence
  Synthetic oligonucleotide: BID-2233
caggcaggggucacgggcug

SEQ ID NO: 42395 - RNA, 20 nt, Artificial Sequence
  Synthetic oligonucleotide: BID-17
cggauucuguaagugggcug

SEQ ID NO: 42396 - RNA, 20 nt, Artificial Sequence
  Synthetic oligonucleotide: BID-2147
gcccagccacuugguggcug

SEQ ID NO: 42397 - RNA, 20 nt, Artificial Sequence
  Synthetic oligonucleotide: BID-2164
gaggagccggcaggugucug

SEQ ID NO: 42398 - RNA, 20 nt, Artificial Sequence
  Synthetic oligonucleotide: BID-2131
gcugggggcugggccuucug

SEQ ID NO: 42399 - RNA, 20 nt, Artificial Sequence
  Synthetic oligonucleotide: BID-12
ccggcuggaggagcacagug

SEQ ID NO: 42400 - RNA, 20 nt, Artificial Sequence
  Synthetic oligonucleotide: BID-3631
ccggggcgggcccgggcgug

SEQ ID NO: 42401 - RNA, 20 nt, Artificial Sequence
  Synthetic oligonucleotide: BID-2167
gugcuggaaagaccacggug

SEQ ID NO: 42402 - RNA, 20 nt, Artificial Sequence
  Synthetic oligonucleotide: BID-2055
ggggauucaggggaggggug

SEQ ID NO: 42403 - RNA, 20 nt, Artificial Sequence
  Synthetic oligonucleotide: BID-2091
agagcacuggcaaugaugug

SEQ ID NO: 42404 - RNA, 20 nt, Artificial Sequence
  Synthetic oligonucleotide: BID-2139
uucaccugcaggcaggguug

SEQ ID NO: 42405 - RNA, 20 nt, Artificial Sequence
  Synthetic oligonucleotide: BID-2145
cccuugccagcccagccacu

SEQ ID NO: 42406 - RNA, 20 nt, Artificial Sequence
  Synthetic oligonucleotide: BID-2099
gaaugaccccaggggacccu

SEQ ID NO: 42407 - RNA, 20 nt, Artificial Sequence
  Synthetic oligonucleotide: BID-2152
gagcucucccaggguccccu

SEQ ID NO: 42408 - RNA, 20 nt, Artificial Sequence
  Synthetic oligonucleotide: BID-2009
cagggcccgccgcccgcccu

SEQ ID NO: 42409 - RNA, 20 nt, Artificial Sequence
  Synthetic oligonucleotide: BID-2184
cuccucuccggggcuggccu

SEQ ID NO: 42410 - RNA, 20 nt, Artificial Sequence
  Synthetic oligonucleotide: BID-2047
guguccucuccacguggccu

SEQ ID NO: 42411 - RNA, 20 nt, Artificial Sequence
  Synthetic oligonucleotide: BID-1994
gcgccugggagacgcugccu

SEQ ID NO: 42412 - RNA, 20 nt, Artificial Sequence
  Synthetic oligonucleotide: BID-2030
cuccgcccgggcgcccuccu

SEQ ID NO: 42413 - RNA, 20 nt, Artificial Sequence
  Synthetic oligonucleotide: BID-2159
ugucagcccugagcuccgcu

SEQ ID NO: 42414 - RNA, 20 nt, Artificial Sequence
  Synthetic oligonucleotide: BID-2232
gcaggcaggggucacgggcu

SEQ ID NO: 42415 - RNA, 20 nt, Artificial Sequence
  Synthetic oligonucleotide: BID-30
cuguaagugggcugggggcu

SEQ ID NO: 42416 - RNA, 20 nt, Artificial Sequence
  Synthetic oligonucleotide: BID-2234
aggggucacgggcuggggcu

SEQ ID NO: 42417 - RNA, 20 nt, Artificial Sequence
  Synthetic oligonucleotide: BID-2102
cccucagccaccaaguggcu

SEQ ID NO: 42418 - RNA, 20 nt, Artificial Sequence
  Synthetic oligonucleotide: BID-3632
gccggggcgggcccgggcgu

SEQ ID NO: 42419 - RNA, 20 nt, Artificial Sequence
  Synthetic oligonucleotide: BID-2034
ccucggcgcggccggcaggu

SEQ ID NO: 42420 - RNA, 20 nt, Artificial Sequence
  Synthetic oligonucleotide: BID-2137
ccuucaccugcaggcagggu

SEQ ID NO: 42421 - RNA, 20 nt, Artificial Sequence
  Synthetic oligonucleotide: BID-2037
ggcaggucggugcugagggu

SEQ ID NO: 42422 - RNA, 20 nt, Artificial Sequence
  Synthetic oligonucleotide: BID-2168
ugcuggaaagaccacggugu

SEQ ID NO: 42423 - RNA, 20 nt, Artificial Sequence
  Synthetic oligonucleotide: BID-2255
gccccgcgcgcuuccuccuu

SEQ ID NO: 42424 - RNA, 20 nt, Artificial Sequence
  Synthetic oligonucleotide: BID-2138
cuucaccugcaggcaggguu

SEQ ID NO: 42425 - RNA, 17 nt, Artificial Sequence
  Synthetic oligonucleotide: BID-1064
gggcaagaggggcagaa

SEQ ID NO: 42426 - RNA, 17 nt, Artificial Sequence
  Synthetic oligonucleotide: BID-1103
ggauaaggcuccaggaa

SEQ ID NO: 42427 - RNA, 17 nt, Artificial Sequence
  Synthetic oligonucleotide: BID-746
cugaaacagucgcguaa

SEQ ID NO: 42428 - RNA, 17 nt, Artificial Sequence
  Synthetic oligonucleotide: BID-749
agucgcguaagggguaa

SEQ ID NO: 42429 - RNA, 17 nt, Artificial Sequence
  Synthetic oligonucleotide: BID-960
cugagcuggggucuuaa

SEQ ID NO: 42430 - RNA, 17 nt, Artificial Sequence
  Synthetic oligonucleotide: BID-991
ucguggcugggguuuaa

SEQ ID NO: 42431 - RNA, 17 nt, Artificial Sequence
  Synthetic oligonucleotide: BID-734
auucucugcaacccaca

SEQ ID NO: 42432 - RNA, 17 nt, Artificial Sequence
  Synthetic oligonucleotide: BID-727
aauaaacaacaagcaca

SEQ ID NO: 42433 - RNA, 17 nt, Artificial Sequence
  Synthetic oligonucleotide: BID-998
cucccaggacgggcaca

SEQ ID NO: 42434 - RNA, 17 nt, Artificial Sequence
  Synthetic oligonucleotide: BID-840
agguccucacggaacca

SEQ ID NO: 42435 - RNA, 17 nt, Artificial Sequence
  Synthetic oligonucleotide: BID-978
ccucugccugcggccca

SEQ ID NO: 42436 - RNA, 17 nt, Artificial Sequence
  Synthetic oligonucleotide: BID-980
ucugccccucuugccca

SEQ ID NO: 42437 - RNA, 17 nt, Artificial Sequence
  Synthetic oligonucleotide: BID-1083
cucggucaucacuccca

SEQ ID NO: 42438 - RNA, 17 nt, Artificial Sequence
  Synthetic oligonucleotide: BID-1074
aggcagaggcuuggcca

SEQ ID NO: 42439 - RNA, 17 nt, Artificial Sequence
  Synthetic oligonucleotide: BID-970
agguagacagagcucca

SEQ ID NO: 42440 - RNA, 17 nt, Artificial Sequence
  Synthetic oligonucleotide: BID-993
gcugggguuuaaaggca

SEQ ID NO: 42441 - RNA, 17 nt, Artificial Sequence
  Synthetic oligonucleotide: BID-1067
gaggggcagaaggggca

SEQ ID NO: 42442 - RNA, 17 nt, Artificial Sequence
  Synthetic oligonucleotide: BID-1086
acucccaggggacugca

SEQ ID NO: 42443 - RNA, 17 nt, Artificial Sequence
  Synthetic oligonucleotide: BID-838
gucauucuagguccuca

SEQ ID NO: 42444 - RNA, 17 nt, Artificial Sequence
  Synthetic oligonucleotide: BID-1079
cuuaagaccccagcuca

SEQ ID NO: 42445 - RNA, 17 nt, Artificial Sequence
  Synthetic oligonucleotide: BID-1061
ucccucccugggcaaga

SEQ ID NO: 42446 - RNA, 17 nt, Artificial Sequence
  Synthetic oligonucleotide: BID-965
gguguggggagcgcaga

SEQ ID NO: 42447 - RNA, 17 nt, Artificial Sequence
  Synthetic oligonucleotide: BID-1063
ugggcaagaggggcaga

SEQ ID NO: 42448 - RNA, 17 nt, Artificial Sequence
  Synthetic oligonucleotide: BID-1094
ccuccuguggguggaga

SEQ ID NO: 42449 - RNA, 17 nt, Artificial Sequence
  Synthetic oligonucleotide: BID-1106
ggggugcaagccugaga

SEQ ID NO: 42450 - RNA, 17 nt, Artificial Sequence
  Synthetic oligonucleotide: BID-944
cacaggaggcuuugaga

SEQ ID NO: 42451 - RNA, 17 nt, Artificial Sequence
  Synthetic oligonucleotide: BID-1088
acugcagggccccagga

SEQ ID NO: 42452 - RNA, 17 nt, Artificial Sequence
  Synthetic oligonucleotide: BID-995
gcagggaucucccagga

SEQ ID NO: 42453 - RNA, 17 nt, Artificial Sequence
  Synthetic oligonucleotide: BID-1102
uggauaaggcuccagga

SEQ ID NO: 42454 - RNA, 17 nt, Artificial Sequence
  Synthetic oligonucleotide: BID-982
ccccucuugcccaggga

SEQ ID NO: 42455 - RNA, 17 nt, Artificial Sequence
  Synthetic oligonucleotide: BID-1098
gugagagcgaggacuga

SEQ ID NO: 42456 - RNA, 17 nt, Artificial Sequence
  Synthetic oligonucleotide: BID-730
agcacagggacugguga

SEQ ID NO: 42457 - RNA, 17 nt, Artificial Sequence
  Synthetic oligonucleotide: BID-1100
gacugaggguguggaua

SEQ ID NO: 42458 - RNA, 17 nt, Artificial Sequence
  Synthetic oligonucleotide: BID-745
ucugaaacagucgcgua

SEQ ID NO: 42459 - RNA, 17 nt, Artificial Sequence
  Synthetic oligonucleotide: BID-748
cagucgcguaaggggua

SEQ ID NO: 42460 - RNA, 17 nt, Artificial Sequence
  Synthetic oligonucleotide: BID-959
ccugagcuggggucuua

SEQ ID NO: 42461 - RNA, 17 nt, Artificial Sequence
  Synthetic oligonucleotide: BID-942
auuccaucuccacccac

SEQ ID NO: 42462 - RNA, 17 nt, Artificial Sequence
  Synthetic oligonucleotide: BID-726
gaauaaacaacaagcac

SEQ ID NO: 42463 - RNA, 17 nt, Artificial Sequence
  Synthetic oligonucleotide: BID-997
ucucccaggacgggcac

SEQ ID NO: 42464 - RNA, 17 nt, Artificial Sequence
  Synthetic oligonucleotide: BID-996
cagggaucucccaggac

SEQ ID NO: 42465 - RNA, 17 nt, Artificial Sequence
  Synthetic oligonucleotide: BID-728
acaacaagcacagggac

SEQ ID NO: 42466 - RNA, 17 nt, Artificial Sequence
  Synthetic oligonucleotide: BID-851
gauaaugcugggacuac

SEQ ID NO: 42467 - RNA, 17 nt, Artificial Sequence
  Synthetic oligonucleotide: BID-825
gcagcgcagugagaacc

SEQ ID NO: 42468 - RNA, 17 nt, Artificial Sequence
  Synthetic oligonucleotide: BID-839
uagguccucacggaacc

SEQ ID NO: 42469 - RNA, 17 nt, Artificial Sequence
  Synthetic oligonucleotide: BID-1068
ggcagggacgcacaccc

SEQ ID NO: 42470 - RNA, 17 nt, Artificial Sequence
  Synthetic oligonucleotide: BID-975
ugccgggaggacgaccc

SEQ ID NO: 42471 - RNA, 17 nt, Artificial Sequence
  Synthetic oligonucleotide: BID-3633
gcggcuugcggggaccc

SEQ ID NO: 42472 - RNA, 17 nt, Artificial Sequence
  Synthetic oligonucleotide: BID-735
cccacuuuccaaacccc

SEQ ID NO: 42473 - RNA, 17 nt, Artificial Sequence
  Synthetic oligonucleotide: BID-1087
ggggacugcagggcccc

SEQ ID NO: 42474 - RNA, 17 nt, Artificial Sequence
  Synthetic oligonucleotide: BID-831
aaacauucagaaucccc

SEQ ID NO: 42475 - RNA, 17 nt, Artificial Sequence
  Synthetic oligonucleotide: BID-757
gccggcgcgggcucccc

SEQ ID NO: 42476 - RNA, 17 nt, Artificial Sequence
  Synthetic oligonucleotide: BID-954
ggggcccugcagucccc

SEQ ID NO: 42477 - RNA, 17 nt, Artificial Sequence
  Synthetic oligonucleotide: BID-1090
ggcacacauucaggccc

SEQ ID NO: 42478 - RNA, 17 nt, Artificial Sequence
  Synthetic oligonucleotide: BID-977
gccucugccugcggccc

SEQ ID NO: 42479 - RNA, 17 nt, Artificial Sequence
  Synthetic oligonucleotide: BID-979
uucugccccucuugccc

SEQ ID NO: 42480 - RNA, 17 nt, Artificial Sequence
  Synthetic oligonucleotide: BID-1082
ucucggucaucacuccc

SEQ ID NO: 42481 - RNA, 17 nt, Artificial Sequence
  Synthetic oligonucleotide: BID-1058
auuuccucuucccuccc

SEQ ID NO: 42482 - RNA, 17 nt, Artificial Sequence
  Synthetic oligonucleotide: BID-1076
ucccggcagugccuccc

SEQ ID NO: 42483 - RNA, 17 nt, Artificial Sequence
  Synthetic oligonucleotide: BID-756
cgccggcgcgggcuccc

SEQ ID NO: 42484 - RNA, 17 nt, Artificial Sequence
  Synthetic oligonucleotide: BID-994
aaaggcagggaucuccc

SEQ ID NO: 42485 - RNA, 17 nt, Artificial Sequence
  Synthetic oligonucleotide: BID-751
gguaaggguggaaagcc

SEQ ID NO: 42486 - RNA, 17 nt, Artificial Sequence
  Synthetic oligonucleotide: BID-737
cuguuccagaaacagcc

SEQ ID NO: 42487 - RNA, 17 nt, Artificial Sequence
  Synthetic oligonucleotide: BID-1073
caggcagaggcuuggcc

SEQ ID NO: 42488 - RNA, 17 nt, Artificial Sequence
  Synthetic oligonucleotide: BID-973
uccagggaggcacugcc

SEQ ID NO: 42489 - RNA, 17 nt, Artificial Sequence
  Synthetic oligonucleotide: BID-1075
ggccagggucguccucc

SEQ ID NO: 42490 - RNA, 17 nt, Artificial Sequence
  Synthetic oligonucleotide: BID-969
gagguagacagagcucc

SEQ ID NO: 42491 - RNA, 17 nt, Artificial Sequence
  Synthetic oligonucleotide: BID-1101
gguguggauaaggcucc

SEQ ID NO: 42492 - RNA, 17 nt, Artificial Sequence
  Synthetic oligonucleotide: BID-949
gauggggggagcucucc

SEQ ID NO: 42493 - RNA, 17 nt, Artificial Sequence
  Synthetic oligonucleotide: BID-1056
gcucccugugcccgucc

SEQ ID NO: 42494 - RNA, 17 nt, Artificial Sequence
  Synthetic oligonucleotide: BID-951
cugaaugugugccgucc

SEQ ID NO: 42495 - RNA, 17 nt, Artificial Sequence
  Synthetic oligonucleotide: BID-935
ggcuugcacccccuucc

SEQ ID NO: 42496 - RNA, 17 nt, Artificial Sequence
  Synthetic oligonucleotide: BID-824
ggagcggggcggggagc

SEQ ID NO: 42497 - RNA, 17 nt, Artificial Sequence
  Synthetic oligonucleotide: BID-819
gcgcggggcuguggagc

SEQ ID NO: 42498 - RNA, 17 nt, Artificial Sequence
  Synthetic oligonucleotide: BID-956
gaccagauucccugagc

SEQ ID NO: 42499 - RNA, 17 nt, Artificial Sequence
  Synthetic oligonucleotide: BID-827
acuuacuccagcgccgc

SEQ ID NO: 42500 - RNA, 17 nt, Artificial Sequence
  Synthetic oligonucleotide: BID-1070
cgcacacccugggccgc

SEQ ID NO: 42501 - RNA, 17 nt, Artificial Sequence
  Synthetic oligonucleotide: BID-753
gcuccacagccccgcgc

SEQ ID NO: 42502 - RNA, 17 nt, Artificial Sequence
  Synthetic oligonucleotide: BID-813
acccggggagcccgcgc

SEQ ID NO: 42503 - RNA, 17 nt, Artificial Sequence
  Synthetic oligonucleotide: BID-755
cagccccgcgccggcgc

SEQ ID NO: 42504 - RNA, 17 nt, Artificial Sequence
  Synthetic oligonucleotide: BID-815
ggagcccgcgccggcgc

SEQ ID NO: 42505 - RNA, 17 nt, Artificial Sequence
  Synthetic oligonucleotide: BID-742
aauuaucccagcggcgc

SEQ ID NO: 42506 - RNA, 17 nt, Artificial Sequence
  Synthetic oligonucleotide: BID-992
ggcugggguuuaaaggc

SEQ ID NO: 42507 - RNA, 17 nt, Artificial Sequence
  Synthetic oligonucleotide: BID-867
cucuggaggucucaggc

SEQ ID NO: 42508 - RNA, 17 nt, Artificial Sequence
  Synthetic oligonucleotide: BID-1066
agaggggcagaaggggc

SEQ ID NO: 42509 - RNA, 17 nt, Artificial Sequence
  Synthetic oligonucleotide: BID-732
agggacuggugaggggc

SEQ ID NO: 42510 - RNA, 17 nt, Artificial Sequence
  Synthetic oligonucleotide: BID-822
gggcuguggagcggggc

SEQ ID NO: 42511 - RNA, 17 nt, Artificial Sequence
  Synthetic oligonucleotide: BID-988
ggucagcaguucguggc

SEQ ID NO: 42512 - RNA, 17 nt, Artificial Sequence
  Synthetic oligonucleotide: BID-985
gagggaagaggaaaugc

SEQ ID NO: 42513 - RNA, 17 nt, Artificial Sequence
  Synthetic oligonucleotide: BID-849
uaacauauagauaaugc

SEQ ID NO: 42514 - RNA, 17 nt, Artificial Sequence
  Synthetic oligonucleotide: BID-972
cuccagggaggcacugc

SEQ ID NO: 42515 - RNA, 17 nt, Artificial Sequence
  Synthetic oligonucleotide: BID-1085
cacucccaggggacugc

SEQ ID NO: 42516 - RNA, 17 nt, Artificial Sequence
  Synthetic oligonucleotide: BID-752
gguucucacugcgcugc

SEQ ID NO: 42517 - RNA, 17 nt, Artificial Sequence
  Synthetic oligonucleotide: BID-847
guggguugcagagaauc

SEQ ID NO: 42518 - RNA, 17 nt, Artificial Sequence
  Synthetic oligonucleotide: BID-1080
ccccagcucagggaauc

SEQ ID NO: 42519 - RNA, 17 nt, Artificial Sequence
  Synthetic oligonucleotide: BID-967
agggauccucuggcauc

SEQ ID NO: 42520 - RNA, 17 nt, Artificial Sequence
  Synthetic oligonucleotide: BID-864
gggggggucuccaccuc

SEQ ID NO: 42521 - RNA, 17 nt, Artificial Sequence
  Synthetic oligonucleotide: BID-966
agcgcagagggauccuc

SEQ ID NO: 42522 - RNA, 17 nt, Artificial Sequence
  Synthetic oligonucleotide: BID-1078
ccuuaagaccccagcuc

SEQ ID NO: 42523 - RNA, 17 nt, Artificial Sequence
  Synthetic oligonucleotide: BID-1108
agaagguggaagagcuc

SEQ ID NO: 42524 - RNA, 17 nt, Artificial Sequence
  Synthetic oligonucleotide: BID-866
ccaccucuggaggucuc

SEQ ID NO: 42525 - RNA, 17 nt, Artificial Sequence
  Synthetic oligonucleotide: BID-829
aauuccuaaugauucuc

SEQ ID NO: 42526 - RNA, 17 nt, Artificial Sequence
  Synthetic oligonucleotide: BID-934
agcucuuccaccuucuc

SEQ ID NO: 42527 - RNA, 17 nt, Artificial Sequence
  Synthetic oligonucleotide: BID-833
cuguuucuggaacaguc

SEQ ID NO: 42528 - RNA, 17 nt, Artificial Sequence
  Synthetic oligonucleotide: BID-1089
caggacggcacacauuc

SEQ ID NO: 42529 - RNA, 17 nt, Artificial Sequence
  Synthetic oligonucleotide: BID-832
aauccccaggcuguuuc

SEQ ID NO: 42530 - RNA, 17 nt, Artificial Sequence
  Synthetic oligonucleotide: BID-843
accagggguuuggaaag

SEQ ID NO: 42531 - RNA, 17 nt, Artificial Sequence
  Synthetic oligonucleotide: BID-1060
uucccucccugggcaag

SEQ ID NO: 42532 - RNA, 17 nt, Artificial Sequence
  Synthetic oligonucleotide: BID-1065
ggcaagaggggcagaag

SEQ ID NO: 42533 - RNA, 17 nt, Artificial Sequence
  Synthetic oligonucleotide: BID-1104
gauaaggcuccaggaag

SEQ ID NO: 42534 - RNA, 17 nt, Artificial Sequence
  Synthetic oligonucleotide: BID-983
uugcccagggagggaag

SEQ ID NO: 42535 - RNA, 17 nt, Artificial Sequence
  Synthetic oligonucleotide: BID-743
agcggcgcuggaguaag

SEQ ID NO: 42536 - RNA, 17 nt, Artificial Sequence
  Synthetic oligonucleotide: BID-747
ugaaacagucgcguaag

SEQ ID NO: 42537 - RNA, 17 nt, Artificial Sequence
  Synthetic oligonucleotide: BID-841
gguccucacggaaccag

SEQ ID NO: 42538 - RNA, 17 nt, Artificial Sequence
  Synthetic oligonucleotide: BID-741
auuaggaauuaucccag

SEQ ID NO: 42539 - RNA, 17 nt, Artificial Sequence
  Synthetic oligonucleotide: BID-1084
ucggucaucacucccag

SEQ ID NO: 42540 - RNA, 17 nt, Artificial Sequence
  Synthetic oligonucleotide: BID-1077
ucaacuccugaugccag

SEQ ID NO: 42541 - RNA, 17 nt, Artificial Sequence
  Synthetic oligonucleotide: BID-721
cagccugagaccuccag

SEQ ID NO: 42542 - RNA, 17 nt, Artificial Sequence
  Synthetic oligonucleotide: BID-964
ggguguggggagcgcag

SEQ ID NO: 42543 - RNA, 17 nt, Artificial Sequence
  Synthetic oligonucleotide: BID-1071
cccugggccgcaggcag

SEQ ID NO: 42544 - RNA, 17 nt, Artificial Sequence
  Synthetic oligonucleotide: BID-940
cugugggggagcugcag

SEQ ID NO: 42545 - RNA, 17 nt, Artificial Sequence
  Synthetic oligonucleotide: BID-1062
cccucccugggcaagag

SEQ ID NO: 42546 - RNA, 17 nt, Artificial Sequence
  Synthetic oligonucleotide: BID-818
ggcgcggggcuguggag

SEQ ID NO: 42547 - RNA, 17 nt, Artificial Sequence
  Synthetic oligonucleotide: BID-731
gcacagggacuggugag

SEQ ID NO: 42548 - RNA, 17 nt, Artificial Sequence
  Synthetic oligonucleotide: BID-852
ucuuuuucaguuuuuag

SEQ ID NO: 42549 - RNA, 17 nt, Artificial Sequence
  Synthetic oligonucleotide: BID-3634
cggcuugcggggacccg

SEQ ID NO: 42550 - RNA, 17 nt, Artificial Sequence
  Synthetic oligonucleotide: BID-1096
cccccacagugagagcg

SEQ ID NO: 42551 - RNA, 17 nt, Artificial Sequence
  Synthetic oligonucleotide: BID-820
cgcggggcuguggagcg

SEQ ID NO: 42552 - RNA, 17 nt, Artificial Sequence
  Synthetic oligonucleotide: BID-816
gagcccgcgccggcgcg

SEQ ID NO: 42553 - RNA, 17 nt, Artificial Sequence
  Synthetic oligonucleotide: BID-754
acagccccgcgccggcg

SEQ ID NO: 42554 - RNA, 17 nt, Artificial Sequence
  Synthetic oligonucleotide: BID-814
gggagcccgcgccggcg

SEQ ID NO: 42555 - RNA, 17 nt, Artificial Sequence
  Synthetic oligonucleotide: BID-823
ggcuguggagcggggcg

SEQ ID NO: 42556 - RNA, 17 nt, Artificial Sequence
  Synthetic oligonucleotide: BID-986
agggaagaggaaaugcg

SEQ ID NO: 42557 - RNA, 17 nt, Artificial Sequence
  Synthetic oligonucleotide: BID-987
gcggggucagcaguucg

SEQ ID NO: 42558 - RNA, 17 nt, Artificial Sequence
  Synthetic oligonucleotide: BID-1107
gugcaagccugagaagg

SEQ ID NO: 42559 - RNA, 17 nt, Artificial Sequence
  Synthetic oligonucleotide: BID-1105
auaaggcuccaggaagg

SEQ ID NO: 42560 - RNA, 17 nt, Artificial Sequence
  Synthetic oligonucleotide: BID-943
ccaucuccacccacagg

SEQ ID NO: 42561 - RNA, 17 nt, Artificial Sequence
  Synthetic oligonucleotide: BID-722
ccugagaccuccagagg

SEQ ID NO: 42562 - RNA, 17 nt, Artificial Sequence
  Synthetic oligonucleotide: BID-854
ucaguuuuuaguggagg

SEQ ID NO: 42563 - RNA, 17 nt, Artificial Sequence
  Synthetic oligonucleotide: BID-750
cgcguaagggguaaggg

SEQ ID NO: 42564 - RNA, 17 nt, Artificial Sequence
  Synthetic oligonucleotide: BID-981
gccccucuugcccaggg

SEQ ID NO: 42565 - RNA, 17 nt, Artificial Sequence
  Synthetic oligonucleotide: BID-971
uagacagagcuccaggg

SEQ ID NO: 42566 - RNA, 17 nt, Artificial Sequence
  Synthetic oligonucleotide: BID-974
agggaggcacugccggg

SEQ ID NO: 42567 - RNA, 17 nt, Artificial Sequence
  Synthetic oligonucleotide: BID-821
ggggcuguggagcgggg

SEQ ID NO: 42568 - RNA, 17 nt, Artificial Sequence
  Synthetic oligonucleotide: BID-863
uggaggugguggggggg

SEQ ID NO: 42569 - RNA, 17 nt, Artificial Sequence
  Synthetic oligonucleotide: BID-862
guggagguggugggggg

SEQ ID NO: 42570 - RNA, 17 nt, Artificial Sequence
  Synthetic oligonucleotide: BID-861
aguggaggugguggggg

SEQ ID NO: 42571 - RNA, 17 nt, Artificial Sequence
  Synthetic oligonucleotide: BID-836
ucuggaacagucugggg

SEQ ID NO: 42572 - RNA, 17 nt, Artificial Sequence
  Synthetic oligonucleotide: BID-860
uaguggagguggugggg

SEQ ID NO: 42573 - RNA, 17 nt, Artificial Sequence
  Synthetic oligonucleotide: BID-948
ggaggcuuugagauggg

SEQ ID NO: 42574 - RNA, 17 nt, Artificial Sequence
  Synthetic oligonucleotide: BID-1110
gguggaagagcucuggg

SEQ ID NO: 42575 - RNA, 17 nt, Artificial Sequence
  Synthetic oligonucleotide: BID-859
uuaguggaggugguggg

SEQ ID NO: 42576 - RNA, 17 nt, Artificial Sequence
  Synthetic oligonucleotide: BID-1093
ucaaagccuccuguggg

SEQ ID NO: 42577 - RNA, 17 nt, Artificial Sequence
  Synthetic oligonucleotide: BID-947
aggaggcuuugagaugg

SEQ ID NO: 42578 - RNA, 17 nt, Artificial Sequence
  Synthetic oligonucleotide: BID-865
ggggucuccaccucugg

SEQ ID NO: 42579 - RNA, 17 nt, Artificial Sequence
  Synthetic oligonucleotide: BID-853
uuuucaguuuuuagugg

SEQ ID NO: 42580 - RNA, 17 nt, Artificial Sequence
  Synthetic oligonucleotide: BID-855
guuuuuaguggaggugg

SEQ ID NO: 42581 - RNA, 17 nt, Artificial Sequence
  Synthetic oligonucleotide: BID-858
uuuaguggagguggugg

SEQ ID NO: 42582 - RNA, 17 nt, Artificial Sequence
  Synthetic oligonucleotide: BID-939
ccucgcucucacugugg

SEQ ID NO: 42583 - RNA, 17 nt, Artificial Sequence
  Synthetic oligonucleotide: BID-984
ggagggaagaggaaaug

SEQ ID NO: 42584 - RNA, 17 nt, Artificial Sequence
  Synthetic oligonucleotide: BID-1095
uggguggagauggaaug

SEQ ID NO: 42585 - RNA, 17 nt, Artificial Sequence
  Synthetic oligonucleotide: BID-845
aagugggugaagccaug

SEQ ID NO: 42586 - RNA, 17 nt, Artificial Sequence
  Synthetic oligonucleotide: BID-999
cgggcacagggagcaug

SEQ ID NO: 42587 - RNA, 17 nt, Artificial Sequence
  Synthetic oligonucleotide: BID-946
caggaggcuuugagaug

SEQ ID NO: 42588 - RNA, 17 nt, Artificial Sequence
  Synthetic oligonucleotide: BID-941
gggagcugcagaggaug

SEQ ID NO: 42589 - RNA, 17 nt, Artificial Sequence
  Synthetic oligonucleotide: BID-936
aguccucgcucucacug

SEQ ID NO: 42590 - RNA, 17 nt, Artificial Sequence
  Synthetic oligonucleotide: BID-1097
agugagagcgaggacug

SEQ ID NO: 42591 - RNA, 17 nt, Artificial Sequence
  Synthetic oligonucleotide: BID-739
guuccagaaacagccug

SEQ ID NO: 42592 - RNA, 17 nt, Artificial Sequence
  Synthetic oligonucleotide: BID-976
ggccaagccucugccug

SEQ ID NO: 42593 - RNA, 17 nt, Artificial Sequence
  Synthetic oligonucleotide: BID-1091
caucucaaagccuccug

SEQ ID NO: 42594 - RNA, 17 nt, Artificial Sequence
  Synthetic oligonucleotide: BID-953
gaaugugugccguccug

SEQ ID NO: 42595 - RNA, 17 nt, Artificial Sequence
  Synthetic oligonucleotide: BID-958
ccagauucccugagcug

SEQ ID NO: 42596 - RNA, 17 nt, Artificial Sequence
  Synthetic oligonucleotide: BID-817
gcgccggcgcggggcug

SEQ ID NO: 42597 - RNA, 17 nt, Artificial Sequence
  Synthetic oligonucleotide: BID-990
ucagcaguucguggcug

SEQ ID NO: 42598 - RNA, 17 nt, Artificial Sequence
  Synthetic oligonucleotide: BID-835
guuucuggaacagucug

SEQ ID NO: 42599 - RNA, 17 nt, Artificial Sequence
  Synthetic oligonucleotide: BID-736
aaaccccugguuccgug

SEQ ID NO: 42600 - RNA, 17 nt, Artificial Sequence
  Synthetic oligonucleotide: BID-961
cuggggucuuaagggug

SEQ ID NO: 42601 - RNA, 17 nt, Artificial Sequence
  Synthetic oligonucleotide: BID-1099
agcgaggacugagggug

SEQ ID NO: 42602 - RNA, 17 nt, Artificial Sequence
  Synthetic oligonucleotide: BID-725
aagaaauuaguugggug

SEQ ID NO: 42603 - RNA, 17 nt, Artificial Sequence
  Synthetic oligonucleotide: BID-729
aagcacagggacuggug

SEQ ID NO: 42604 - RNA, 17 nt, Artificial Sequence
  Synthetic oligonucleotide: BID-857
uuuuaguggagguggug

SEQ ID NO: 42605 - RNA, 17 nt, Artificial Sequence
  Synthetic oligonucleotide: BID-938
uccucgcucucacugug

SEQ ID NO: 42606 - RNA, 17 nt, Artificial Sequence
  Synthetic oligonucleotide: BID-963
ggggucuuaagggugug

SEQ ID NO: 42607 - RNA, 17 nt, Artificial Sequence
  Synthetic oligonucleotide: BID-968
ucuggcaucaggaguug

SEQ ID NO: 42608 - RNA, 17 nt, Artificial Sequence
  Synthetic oligonucleotide: BID-945
acaggaggcuuugagau

SEQ ID NO: 42609 - RNA, 17 nt, Artificial Sequence
  Synthetic oligonucleotide: BID-1069
gcagggacgcacacccu

SEQ ID NO: 42610 - RNA, 17 nt, Artificial Sequence
  Synthetic oligonucleotide: BID-955
gggcccugcaguccccu

SEQ ID NO: 42611 - RNA, 17 nt, Artificial Sequence
  Synthetic oligonucleotide: BID-1059
uuuccucuucccucccu

SEQ ID NO: 42612 - RNA, 17 nt, Artificial Sequence
  Synthetic oligonucleotide: BID-738
uguuccagaaacagccu

SEQ ID NO: 42613 - RNA, 17 nt, Artificial Sequence
  Synthetic oligonucleotide: BID-950
auggggggagcucuccu

SEQ ID NO: 42614 - RNA, 17 nt, Artificial Sequence
  Synthetic oligonucleotide: BID-1057
cucccugugcccguccu

SEQ ID NO: 42615 - RNA, 17 nt, Artificial Sequence
  Synthetic oligonucleotide: BID-952
ugaaugugugccguccu

SEQ ID NO: 42616 - RNA, 17 nt, Artificial Sequence
  Synthetic oligonucleotide: BID-957
accagauucccugagcu

SEQ ID NO: 42617 - RNA, 17 nt, Artificial Sequence
  Synthetic oligonucleotide: BID-828
cuuacuccagcgccgcu

SEQ ID NO: 42618 - RNA, 17 nt, Artificial Sequence
  Synthetic oligonucleotide: BID-1072
ggccgcaggcagaggcu

SEQ ID NO: 42619 - RNA, 17 nt, Artificial Sequence
  Synthetic oligonucleotide: BID-733
gggacuggugaggggcu

SEQ ID NO: 42620 - RNA, 17 nt, Artificial Sequence
  Synthetic oligonucleotide: BID-989
gucagcaguucguggcu

SEQ ID NO: 42621 - RNA, 17 nt, Artificial Sequence
  Synthetic oligonucleotide: BID-850
aacauauagauaaugcu

SEQ ID NO: 42622 - RNA, 17 nt, Artificial Sequence
  Synthetic oligonucleotide: BID-1109
gaagguggaagagcucu

SEQ ID NO: 42623 - RNA, 17 nt, Artificial Sequence
  Synthetic oligonucleotide: BID-830
auuccuaaugauucucu

SEQ ID NO: 42624 - RNA, 17 nt, Artificial Sequence
  Synthetic oligonucleotide: BID-834
uguuucuggaacagucu

SEQ ID NO: 42625 - RNA, 17 nt, Artificial Sequence
  Synthetic oligonucleotide: BID-1081
cucagggaaucuggucu

SEQ ID NO: 42626 - RNA, 17 nt, Artificial Sequence
  Synthetic oligonucleotide: BID-837
ucugggguggucauucu

SEQ ID NO: 42627 - RNA, 17 nt, Artificial Sequence
  Synthetic oligonucleotide: BID-844
ccagggguuuggaaagu

SEQ ID NO: 42628 - RNA, 17 nt, Artificial Sequence
  Synthetic oligonucleotide: BID-744
aguggccaacuuaaagu

SEQ ID NO: 42629 - RNA, 17 nt, Artificial Sequence
  Synthetic oligonucleotide: BID-826
gucguccaacuuuaagu

SEQ ID NO: 42630 - RNA, 17 nt, Artificial Sequence
  Synthetic oligonucleotide: BID-723
cugaaaaagaaauuagu

SEQ ID NO: 42631 - RNA, 17 nt, Artificial Sequence
  Synthetic oligonucleotide: BID-1111
guggaagagcucugggu

SEQ ID NO: 42632 - RNA, 17 nt, Artificial Sequence
  Synthetic oligonucleotide: BID-856
uuuuuaguggagguggu

SEQ ID NO: 42633 - RNA, 17 nt, Artificial Sequence
  Synthetic oligonucleotide: BID-846
agugggugaagccaugu

SEQ ID NO: 42634 - RNA, 17 nt, Artificial Sequence
  Synthetic oligonucleotide: BID-937
guccucgcucucacugu

SEQ ID NO: 42635 - RNA, 17 nt, Artificial Sequence
  Synthetic oligonucleotide: BID-1092
aucucaaagccuccugu

SEQ ID NO: 42636 - RNA, 17 nt, Artificial Sequence
  Synthetic oligonucleotide: BID-962
uggggucuuaagggugu

SEQ ID NO: 42637 - RNA, 17 nt, Artificial Sequence
  Synthetic oligonucleotide: BID-740
uuucccagagaaucauu

SEQ ID NO: 42638 - RNA, 17 nt, Artificial Sequence
  Synthetic oligonucleotide: BID-848
uuuauucuuuaauuauu

SEQ ID NO: 42639 - RNA, 17 nt, Artificial Sequence
  Synthetic oligonucleotide: BID-724
ugaaaaagaaauuaguu

SEQ ID NO: 42640 - RNA, 17 nt, Artificial Sequence
  Synthetic oligonucleotide: BID-842
ucacggaaccagggguu

SEQ ID NO: 42641 - RNA, 20 nt, Artificial Sequence
  Synthetic oligonucleotide: BID-1008
ccugggcaagaggggcagaa

SEQ ID NO: 42642 - RNA, 20 nt, Artificial Sequence
  Synthetic oligonucleotide: BID-1047
uguggauaaggcuccaggaa

SEQ ID NO: 42643 - RNA, 20 nt, Artificial Sequence
  Synthetic oligonucleotide: BID-709
ugucugaaacagucgcguaa

SEQ ID NO: 42644 - RNA, 20 nt, Artificial Sequence
  Synthetic oligonucleotide: BID-712
aacagucgcguaagggguaa

SEQ ID NO: 42645 - RNA, 20 nt, Artificial Sequence
  Synthetic oligonucleotide: BID-894
ucccugagcuggggucuuaa

SEQ ID NO: 42646 - RNA, 20 nt, Artificial Sequence
  Synthetic oligonucleotide: BID-925
aguucguggcugggguuuaa

SEQ ID NO: 42647 - RNA, 20 nt, Artificial Sequence
  Synthetic oligonucleotide: BID-697
cagauucucugcaacccaca

SEQ ID NO: 42648 - RNA, 20 nt, Artificial Sequence
  Synthetic oligonucleotide: BID-690
aagaauaaacaacaagcaca

SEQ ID NO: 42649 - RNA, 20 nt, Artificial Sequence
  Synthetic oligonucleotide: BID-932
gaucucccaggacgggcaca

SEQ ID NO: 42650 - RNA, 20 nt, Artificial Sequence
  Synthetic oligonucleotide: BID-785
ucuagguccucacggaacca

SEQ ID NO: 42651 - RNA, 20 nt, Artificial Sequence
  Synthetic oligonucleotide: BID-912
aagccucugccugcggccca

SEQ ID NO: 42652 - RNA, 20 nt, Artificial Sequence
  Synthetic oligonucleotide: BID-914
ccuucugccccucuugccca

SEQ ID NO: 42653 - RNA, 20 nt, Artificial Sequence
  Synthetic oligonucleotide: BID-1027
ggucucggucaucacuccca

SEQ ID NO: 42654 - RNA, 20 nt, Artificial Sequence
  Synthetic oligonucleotide: BID-1018
cgcaggcagaggcuuggcca

SEQ ID NO: 42655 - RNA, 20 nt, Artificial Sequence
  Synthetic oligonucleotide: BID-904
uugagguagacagagcucca

SEQ ID NO: 42656 - RNA, 20 nt, Artificial Sequence
  Synthetic oligonucleotide: BID-927
guggcugggguuuaaaggca

SEQ ID NO: 42657 - RNA, 20 nt, Artificial Sequence
  Synthetic oligonucleotide: BID-1011
caagaggggcagaaggggca

SEQ ID NO: 42658 - RNA, 20 nt, Artificial Sequence
  Synthetic oligonucleotide: BID-1030
aucacucccaggggacugca

SEQ ID NO: 42659 - RNA, 20 nt, Artificial Sequence
  Synthetic oligonucleotide: BID-783
guggucauucuagguccuca

SEQ ID NO: 42660 - RNA, 20 nt, Artificial Sequence
  Synthetic oligonucleotide: BID-1023
acccuuaagaccccagcuca

SEQ ID NO: 42661 - RNA, 20 nt, Artificial Sequence
  Synthetic oligonucleotide: BID-1005
ucuucccucccugggcaaga

SEQ ID NO: 42662 - RNA, 20 nt, Artificial Sequence
  Synthetic oligonucleotide: BID-899
aaggguguggggagcgcaga

SEQ ID NO: 42663 - RNA, 20 nt, Artificial Sequence
  Synthetic oligonucleotide: BID-1007
cccugggcaagaggggcaga

SEQ ID NO: 42664 - RNA, 20 nt, Artificial Sequence
  Synthetic oligonucleotide: BID-1038
aagccuccuguggguggaga

SEQ ID NO: 42665 - RNA, 20 nt, Artificial Sequence
  Synthetic oligonucleotide: BID-1050
aagggggugcaagccugaga

SEQ ID NO: 42666 - RNA, 20 nt, Artificial Sequence
  Synthetic oligonucleotide: BID-878
acccacaggaggcuuugaga

SEQ ID NO: 42667 - RNA, 20 nt, Artificial Sequence
  Synthetic oligonucleotide: BID-1032
gggacugcagggccccagga

SEQ ID NO: 42668 - RNA, 20 nt, Artificial Sequence
  Synthetic oligonucleotide: BID-929
aaggcagggaucucccagga

SEQ ID NO: 42669 - RNA, 20 nt, Artificial Sequence
  Synthetic oligonucleotide: BID-1046
guguggauaaggcuccagga

SEQ ID NO: 42670 - RNA, 20 nt, Artificial Sequence
  Synthetic oligonucleotide: BID-916
cugccccucuugcccaggga

SEQ ID NO: 42671 - RNA, 20 nt, Artificial Sequence
  Synthetic oligonucleotide: BID-1042
acagugagagcgaggacuga

SEQ ID NO: 42672 - RNA, 20 nt, Artificial Sequence
  Synthetic oligonucleotide: BID-693
acaagcacagggacugguga

SEQ ID NO: 42673 - RNA, 20 nt, Artificial Sequence
  Synthetic oligonucleotide: BID-1044
gaggacugaggguguggaua

SEQ ID NO: 42674 - RNA, 20 nt, Artificial Sequence
  Synthetic oligonucleotide: BID-708
cugucugaaacagucgcgua

SEQ ID NO: 42675 - RNA, 20 nt, Artificial Sequence
  Synthetic oligonucleotide: BID-711
aaacagucgcguaaggggua

SEQ ID NO: 42676 - RNA, 20 nt, Artificial Sequence
  Synthetic oligonucleotide: BID-893
uucccugagcuggggucuua

SEQ ID NO: 42677 - RNA, 20 nt, Artificial Sequence
  Synthetic oligonucleotide: BID-876
cacauuccaucuccacccac

SEQ ID NO: 42678 - RNA, 20 nt, Artificial Sequence
  Synthetic oligonucleotide: BID-689
aaagaauaaacaacaagcac

SEQ ID NO: 42679 - RNA, 20 nt, Artificial Sequence
  Synthetic oligonucleotide: BID-931
ggaucucccaggacgggcac

SEQ ID NO: 42680 - RNA, 20 nt, Artificial Sequence
  Synthetic oligonucleotide: BID-930
aggcagggaucucccaggac

SEQ ID NO: 42681 - RNA, 20 nt, Artificial Sequence
  Synthetic oligonucleotide: BID-691
uaaacaacaagcacagggac

SEQ ID NO: 42682 - RNA, 20 nt, Artificial Sequence
  Synthetic oligonucleotide: BID-796
auagauaaugcugggacuac

SEQ ID NO: 42683 - RNA, 20 nt, Artificial Sequence
  Synthetic oligonucleotide: BID-770
ccggcagcgcagugagaacc

SEQ ID NO: 42684 - RNA, 20 nt, Artificial Sequence
  Synthetic oligonucleotide: BID-784
uucuagguccucacggaacc

SEQ ID NO: 42685 - RNA, 20 nt, Artificial Sequence
  Synthetic oligonucleotide: BID-1012
aggggcagggacgcacaccc

SEQ ID NO: 42686 - RNA, 20 nt, Artificial Sequence
  Synthetic oligonucleotide: BID-909
cacugccgggaggacgaccc

SEQ ID NO: 42687 - RNA, 20 nt, Artificial Sequence
  Synthetic oligonucleotide: BID-698
ucacccacuuuccaaacccc

SEQ ID NO: 42688 - RNA, 20 nt, Artificial Sequence
  Synthetic oligonucleotide: BID-1031
ccaggggacugcagggcccc

SEQ ID NO: 42689 - RNA, 20 nt, Artificial Sequence
  Synthetic oligonucleotide: BID-776
gggaaacauucagaaucccc

SEQ ID NO: 42690 - RNA, 20 nt, Artificial Sequence
  Synthetic oligonucleotide: BID-720
cgcgccggcgcgggcucccc

SEQ ID NO: 42691 - RNA, 20 nt, Artificial Sequence
  Synthetic oligonucleotide: BID-888
ccuggggcccugcagucccc

SEQ ID NO: 42692 - RNA, 20 nt, Artificial Sequence
  Synthetic oligonucleotide: BID-1034
gacggcacacauucaggccc

SEQ ID NO: 42693 - RNA, 20 nt, Artificial Sequence
  Synthetic oligonucleotide: BID-911
caagccucugccugcggccc

SEQ ID NO: 42694 - RNA, 20 nt, Artificial Sequence
  Synthetic oligonucleotide: BID-913
cccuucugccccucuugccc

SEQ ID NO: 42695 - RNA, 20 nt, Artificial Sequence
  Synthetic oligonucleotide: BID-1026
uggucucggucaucacuccc

SEQ ID NO: 42696 - RNA, 20 nt, Artificial Sequence
  Synthetic oligonucleotide: BID-1002
cgcauuuccucuucccuccc

SEQ ID NO: 42697 - RNA, 20 nt, Artificial Sequence
  Synthetic oligonucleotide: BID-1020
uccucccggcagugccuccc

SEQ ID NO: 42698 - RNA, 20 nt, Artificial Sequence
  Synthetic oligonucleotide: BID-719
ccgcgccggcgcgggcuccc

SEQ ID NO: 42699 - RNA, 20 nt, Artificial Sequence
  Synthetic oligonucleotide: BID-928
uuuaaaggcagggaucuccc

SEQ ID NO: 42700 - RNA, 20 nt, Artificial Sequence
  Synthetic oligonucleotide: BID-714
agggguaaggguggaaagcc

SEQ ID NO: 42701 - RNA, 20 nt, Artificial Sequence
  Synthetic oligonucleotide: BID-700
agacuguuccagaaacagcc

SEQ ID NO: 42702 - RNA, 20 nt, Artificial Sequence
  Synthetic oligonucleotide: BID-1017
ccgcaggcagaggcuuggcc

SEQ ID NO: 42703 - RNA, 20 nt, Artificial Sequence
  Synthetic oligonucleotide: BID-907
agcuccagggaggcacugcc

SEQ ID NO: 42704 - RNA, 20 nt, Artificial Sequence
  Synthetic oligonucleotide: BID-1019
cuuggccagggucguccucc

SEQ ID NO: 42705 - RNA, 20 nt, Artificial Sequence
  Synthetic oligonucleotide: BID-903
guugagguagacagagcucc

SEQ ID NO: 42706 - RNA, 20 nt, Artificial Sequence
  Synthetic oligonucleotide: BID-1045
gaggguguggauaaggcucc

SEQ ID NO: 42707 - RNA, 20 nt, Artificial Sequence
  Synthetic oligonucleotide: BID-883
ugagauggggggagcucucc

SEQ ID NO: 42708 - RNA, 20 nt, Artificial Sequence
  Synthetic oligonucleotide: BID-1000
caugcucccugugcccgucc

SEQ ID NO: 42709 - RNA, 20 nt, Artificial Sequence
  Synthetic oligonucleotide: BID-885
ggccugaaugugugccgucc

SEQ ID NO: 42710 - RNA, 20 nt, Artificial Sequence
  Synthetic oligonucleotide: BID-869
ucaggcuugcacccccuucc

SEQ ID NO: 42711 - RNA, 20 nt, Artificial Sequence
  Synthetic oligonucleotide: BID-769
uguggagcggggcggggagc

SEQ ID NO: 42712 - RNA, 20 nt, Artificial Sequence
  Synthetic oligonucleotide: BID-764
ccggcgcggggcuguggagc

SEQ ID NO: 42713 - RNA, 20 nt, Artificial Sequence
  Synthetic oligonucleotide: BID-890
cgagaccagauucccugagc

SEQ ID NO: 42714 - RNA, 20 nt, Artificial Sequence
  Synthetic oligonucleotide: BID-772
gccacuuacuccagcgccgc

SEQ ID NO: 42715 - RNA, 20 nt, Artificial Sequence
  Synthetic oligonucleotide: BID-1014
ggacgcacacccugggccgc

SEQ ID NO: 42716 - RNA, 20 nt, Artificial Sequence
  Synthetic oligonucleotide: BID-716
cccgcuccacagccccgcgc

SEQ ID NO: 42717 - RNA, 20 nt, Artificial Sequence
  Synthetic oligonucleotide: BID-758
gggacccggggagcccgcgc

SEQ ID NO: 42718 - RNA, 20 nt, Artificial Sequence
  Synthetic oligonucleotide: BID-718
ccacagccccgcgccggcgc

SEQ ID NO: 42719 - RNA, 20 nt, Artificial Sequence
  Synthetic oligonucleotide: BID-760
cggggagcccgcgccggcgc

SEQ ID NO: 42720 - RNA, 20 nt, Artificial Sequence
  Synthetic oligonucleotide: BID-705
aggaauuaucccagcggcgc

SEQ ID NO: 42721 - RNA, 20 nt, Artificial Sequence
  Synthetic oligonucleotide: BID-926
cguggcugggguuuaaaggc

SEQ ID NO: 42722 - RNA, 20 nt, Artificial Sequence
  Synthetic oligonucleotide: BID-812
caccucuggaggucucaggc

SEQ ID NO: 42723 - RNA, 20 nt, Artificial Sequence
  Synthetic oligonucleotide: BID-1010
gcaagaggggcagaaggggc

SEQ ID NO: 42724 - RNA, 20 nt, Artificial Sequence
  Synthetic oligonucleotide: BID-695
cacagggacuggugaggggc

SEQ ID NO: 42725 - RNA, 20 nt, Artificial Sequence
  Synthetic oligonucleotide: BID-767
gcggggcuguggagcggggc

SEQ ID NO: 42726 - RNA, 20 nt, Artificial Sequence
  Synthetic oligonucleotide: BID-922
cggggucagcaguucguggc

SEQ ID NO: 42727 - RNA, 20 nt, Artificial Sequence
  Synthetic oligonucleotide: BID-919
agggagggaagaggaaaugc

SEQ ID NO: 42728 - RNA, 20 nt, Artificial Sequence
  Synthetic oligonucleotide: BID-794
guuuaacauauagauaaugc

SEQ ID NO: 42729 - RNA, 20 nt, Artificial Sequence
  Synthetic oligonucleotide: BID-906
gagcuccagggaggcacugc

SEQ ID NO: 42730 - RNA, 20 nt, Artificial Sequence
  Synthetic oligonucleotide: BID-1029
caucacucccaggggacugc

SEQ ID NO: 42731 - RNA, 20 nt, Artificial Sequence
  Synthetic oligonucleotide: BID-715
ccugguucucacugcgcugc

SEQ ID NO: 42732 - RNA, 20 nt, Artificial Sequence
  Synthetic oligonucleotide: BID-792
cauguggguugcagagaauc

SEQ ID NO: 42733 - RNA, 20 nt, Artificial Sequence
  Synthetic oligonucleotide: BID-1024
agaccccagcucagggaauc

SEQ ID NO: 42734 - RNA, 20 nt, Artificial Sequence
  Synthetic oligonucleotide: BID-901
cagagggauccucuggcauc

SEQ ID NO: 42735 - RNA, 20 nt, Artificial Sequence
  Synthetic oligonucleotide: BID-809
ggggggggggucuccaccuc

SEQ ID NO: 42736 - RNA, 20 nt, Artificial Sequence
  Synthetic oligonucleotide: BID-900
gggagcgcagagggauccuc

SEQ ID NO: 42737 - RNA, 20 nt, Artificial Sequence
  Synthetic oligonucleotide: BID-1022
cacccuuaagaccccagcuc

SEQ ID NO: 42738 - RNA, 20 nt, Artificial Sequence
  Synthetic oligonucleotide: BID-1052
cugagaagguggaagagcuc

SEQ ID NO: 42739 - RNA, 20 nt, Artificial Sequence
  Synthetic oligonucleotide: BID-811
ucuccaccucuggaggucuc

SEQ ID NO: 42740 - RNA, 20 nt, Artificial Sequence
  Synthetic oligonucleotide: BID-774
gauaauuccuaaugauucuc

SEQ ID NO: 42741 - RNA, 20 nt, Artificial Sequence
  Synthetic oligonucleotide: BID-868
cagagcucuuccaccuucuc

SEQ ID NO: 42742 - RNA, 20 nt, Artificial Sequence
  Synthetic oligonucleotide: BID-778
aggcuguuucuggaacaguc

SEQ ID NO: 42743 - RNA, 20 nt, Artificial Sequence
  Synthetic oligonucleotide: BID-1033
ccccaggacggcacacauuc

SEQ ID NO: 42744 - RNA, 20 nt, Artificial Sequence
  Synthetic oligonucleotide: BID-777
cagaauccccaggcuguuuc

SEQ ID NO: 42745 - RNA, 20 nt, Artificial Sequence
  Synthetic oligonucleotide: BID-788
ggaaccagggguuuggaaag

SEQ ID NO: 42746 - RNA, 20 nt, Artificial Sequence
  Synthetic oligonucleotide: BID-1004
cucuucccucccugggcaag

SEQ ID NO: 42747 - RNA, 20 nt, Artificial Sequence
  Synthetic oligonucleotide: BID-1009
cugggcaagaggggcagaag

SEQ ID NO: 42748 - RNA, 20 nt, Artificial Sequence
  Synthetic oligonucleotide: BID-1048
guggauaaggcuccaggaag

SEQ ID NO: 42749 - RNA, 20 nt, Artificial Sequence
  Synthetic oligonucleotide: BID-917
cucuugcccagggagggaag

SEQ ID NO: 42750 - RNA, 20 nt, Artificial Sequence
  Synthetic oligonucleotide: BID-706
cccagcggcgcuggaguaag

SEQ ID NO: 42751 - RNA, 20 nt, Artificial Sequence
  Synthetic oligonucleotide: BID-710
gucugaaacagucgcguaag

SEQ ID NO: 42752 - RNA, 20 nt, Artificial Sequence
  Synthetic oligonucleotide: BID-786
cuagguccucacggaaccag

SEQ ID NO: 42753 - RNA, 20 nt, Artificial Sequence
  Synthetic oligonucleotide: BID-704
aucauuaggaauuaucccag

SEQ ID NO: 42754 - RNA, 20 nt, Artificial Sequence
  Synthetic oligonucleotide: BID-1028
gucucggucaucacucccag

SEQ ID NO: 42755 - RNA, 20 nt, Artificial Sequence
  Synthetic oligonucleotide: BID-1021
accucaacuccugaugccag

SEQ ID NO: 42756 - RNA, 20 nt, Artificial Sequence
  Synthetic oligonucleotide: BID-684
gaccagccugagaccuccag

SEQ ID NO: 42757 - RNA, 20 nt, Artificial Sequence
  Synthetic oligonucleotide: BID-898
uaaggguguggggagcgcag

SEQ ID NO: 42758 - RNA, 20 nt, Artificial Sequence
  Synthetic oligonucleotide: BID-1015
acacccugggccgcaggcag

SEQ ID NO: 42759 - RNA, 20 nt, Artificial Sequence
  Synthetic oligonucleotide: BID-874
ucacugugggggagcugcag

SEQ ID NO: 42760 - RNA, 20 nt, Artificial Sequence
  Synthetic oligonucleotide: BID-1006
cuucccucccugggcaagag

SEQ ID NO: 42761 - RNA, 20 nt, Artificial Sequence
  Synthetic oligonucleotide: BID-763
gccggcgcggggcuguggag

SEQ ID NO: 42762 - RNA, 20 nt, Artificial Sequence
  Synthetic oligonucleotide: BID-694
caagcacagggacuggugag

SEQ ID NO: 42763 - RNA, 20 nt, Artificial Sequence
  Synthetic oligonucleotide: BID-797
auuucuuuuucaguuuuuag

SEQ ID NO: 42764 - RNA, 20 nt, Artificial Sequence
  Synthetic oligonucleotide: BID-1040
gcucccccacagugagagcg

SEQ ID NO: 42765 - RNA, 20 nt, Artificial Sequence
  Synthetic oligonucleotide: BID-765
cggcgcggggcuguggagcg

SEQ ID NO: 42766 - RNA, 20 nt, Artificial Sequence
  Synthetic oligonucleotide: BID-761
ggggagcccgcgccggcgcg

SEQ ID NO: 42767 - RNA, 20 nt, Artificial Sequence
  Synthetic oligonucleotide: BID-717
uccacagccccgcgccggcg

SEQ ID NO: 42768 - RNA, 20 nt, Artificial Sequence
  Synthetic oligonucleotide: BID-759
ccggggagcccgcgccggcg

SEQ ID NO: 42769 - RNA, 20 nt, Artificial Sequence
  Synthetic oligonucleotide: BID-768
cggggcuguggagcggggcg

SEQ ID NO: 42770 - RNA, 20 nt, Artificial Sequence
  Synthetic oligonucleotide: BID-920
gggagggaagaggaaaugcg

SEQ ID NO: 42771 - RNA, 20 nt, Artificial Sequence
  Synthetic oligonucleotide: BID-921
aaugcggggucagcaguucg

SEQ ID NO: 42772 - RNA, 20 nt, Artificial Sequence
  Synthetic oligonucleotide: BID-1051
ggggugcaagccugagaagg

SEQ ID NO: 42773 - RNA, 20 nt, Artificial Sequence
  Synthetic oligonucleotide: BID-1049
uggauaaggcuccaggaagg

SEQ ID NO: 42774 - RNA, 20 nt, Artificial Sequence
  Synthetic oligonucleotide: BID-877
auuccaucuccacccacagg

SEQ ID NO: 42775 - RNA, 20 nt, Artificial Sequence
  Synthetic oligonucleotide: BID-685
cagccugagaccuccagagg

SEQ ID NO: 42776 - RNA, 20 nt, Artificial Sequence
  Synthetic oligonucleotide: BID-799
uuuucaguuuuuaguggagg

SEQ ID NO: 42777 - RNA, 20 nt, Artificial Sequence
  Synthetic oligonucleotide: BID-713
agucgcguaagggguaaggg

SEQ ID NO: 42778 - RNA, 20 nt, Artificial Sequence
  Synthetic oligonucleotide: BID-915
ucugccccucuugcccaggg

SEQ ID NO: 42779 - RNA, 20 nt, Artificial Sequence
  Synthetic oligonucleotide: BID-905
agguagacagagcuccaggg

SEQ ID NO: 42780 - RNA, 20 nt, Artificial Sequence
  Synthetic oligonucleotide: BID-908
uccagggaggcacugccggg

SEQ ID NO: 42781 - RNA, 20 nt, Artificial Sequence
  Synthetic oligonucleotide: BID-766
cgcggggcuguggagcgggg

SEQ ID NO: 42782 - RNA, 20 nt, Artificial Sequence
  Synthetic oligonucleotide: BID-808
uaguggaggugguggggggg

SEQ ID NO: 42783 - RNA, 20 nt, Artificial Sequence
  Synthetic oligonucleotide: BID-807
uuaguggagguggugggggg

SEQ ID NO: 42784 - RNA, 20 nt, Artificial Sequence
  Synthetic oligonucleotide: BID-806
uuuaguggaggugguggggg

SEQ ID NO: 42785 - RNA, 20 nt, Artificial Sequence
  Synthetic oligonucleotide: BID-781
guuucuggaacagucugggg

SEQ ID NO: 42786 - RNA, 20 nt, Artificial Sequence
  Synthetic oligonucleotide: BID-805
uuuuaguggagguggugggg

SEQ ID NO: 42787 - RNA, 20 nt, Artificial Sequence
  Synthetic oligonucleotide: BID-882
acaggaggcuuugagauggg

SEQ ID NO: 42788 - RNA, 20 nt, Artificial Sequence
  Synthetic oligonucleotide: BID-1054
gaagguggaagagcucuggg

SEQ ID NO: 42789 - RNA, 20 nt, Artificial Sequence
  Synthetic oligonucleotide: BID-804
uuuuuaguggaggugguggg

SEQ ID NO: 42790 - RNA, 20 nt, Artificial Sequence
  Synthetic oligonucleotide: BID-1037
aucucaaagccuccuguggg

SEQ ID NO: 42791 - RNA, 20 nt, Artificial Sequence
  Synthetic oligonucleotide: BID-881
cacaggaggcuuugagaugg

SEQ ID NO: 42792 - RNA, 20 nt, Artificial Sequence
  Synthetic oligonucleotide: BID-810
gggggggucuccaccucugg

SEQ ID NO: 42793 - RNA, 20 nt, Artificial Sequence
  Synthetic oligonucleotide: BID-798
ucuuuuucaguuuuuagugg

SEQ ID NO: 42794 - RNA, 20 nt, Artificial Sequence
  Synthetic oligonucleotide: BID-800
ucaguuuuuaguggaggugg

SEQ ID NO: 42795 - RNA, 20 nt, Artificial Sequence
  Synthetic oligonucleotide: BID-803
guuuuuaguggagguggugg

SEQ ID NO: 42796 - RNA, 20 nt, Artificial Sequence
  Synthetic oligonucleotide: BID-873
aguccucgcucucacugugg

SEQ ID NO: 42797 - RNA, 20 nt, Artificial Sequence
  Synthetic oligonucleotide: BID-918
cagggagggaagaggaaaug

SEQ ID NO: 42798 - RNA, 20 nt, Artificial Sequence
  Synthetic oligonucleotide: BID-1039
cuguggguggagauggaaug

SEQ ID NO: 42799 - RNA, 20 nt, Artificial Sequence
  Synthetic oligonucleotide: BID-790
ggaaagugggugaagccaug

SEQ ID NO: 42800 - RNA, 20 nt, Artificial Sequence
  Synthetic oligonucleotide: BID-933
ggacgggcacagggagcaug

SEQ ID NO: 42801 - RNA, 20 nt, Artificial Sequence
  Synthetic oligonucleotide: BID-880
ccacaggaggcuuugagaug

SEQ ID NO: 42802 - RNA, 20 nt, Artificial Sequence
  Synthetic oligonucleotide: BID-875
ugggggagcugcagaggaug

SEQ ID NO: 42803 - RNA, 20 nt, Artificial Sequence
  Synthetic oligonucleotide: BID-870
cucaguccucgcucucacug

SEQ ID NO: 42804 - RNA, 20 nt, Artificial Sequence
  Synthetic oligonucleotide: BID-1041
cacagugagagcgaggacug

SEQ ID NO: 42805 - RNA, 20 nt, Artificial Sequence
  Synthetic oligonucleotide: BID-702
acuguuccagaaacagccug

SEQ ID NO: 42806 - RNA, 20 nt, Artificial Sequence
  Synthetic oligonucleotide: BID-910
ccuggccaagccucugccug

SEQ ID NO: 42807 - RNA, 20 nt, Artificial Sequence
  Synthetic oligonucleotide: BID-1035
ccccaucucaaagccuccug

SEQ ID NO: 42808 - RNA, 20 nt, Artificial Sequence
  Synthetic oligonucleotide: BID-887
ccugaaugugugccguccug

SEQ ID NO: 42809 - RNA, 20 nt, Artificial Sequence
  Synthetic oligonucleotide: BID-892
agaccagauucccugagcug

SEQ ID NO: 42810 - RNA, 20 nt, Artificial Sequence
  Synthetic oligonucleotide: BID-762
cccgcgccggcgcggggcug

SEQ ID NO: 42811 - RNA, 20 nt, Artificial Sequence
  Synthetic oligonucleotide: BID-924
gggucagcaguucguggcug

SEQ ID NO: 42812 - RNA, 20 nt, Artificial Sequence
  Synthetic oligonucleotide: BID-780
gcuguuucuggaacagucug

SEQ ID NO: 42813 - RNA, 20 nt, Artificial Sequence
  Synthetic oligonucleotide: BID-699
uccaaaccccugguuccgug

SEQ ID NO: 42814 - RNA, 20 nt, Artificial Sequence
  Synthetic oligonucleotide: BID-895
gagcuggggucuuaagggug

SEQ ID NO: 42815 - RNA, 20 nt, Artificial Sequence
  Synthetic oligonucleotide: BID-1043
gagagcgaggacugagggug

SEQ ID NO: 42816 - RNA, 20 nt, Artificial Sequence
  Synthetic oligonucleotide: BID-688
aaaaagaaauuaguugggug

SEQ ID NO: 42817 - RNA, 20 nt, Artificial Sequence
  Synthetic oligonucleotide: BID-692
aacaagcacagggacuggug

SEQ ID NO: 42818 - RNA, 20 nt, Artificial Sequence
  Synthetic oligonucleotide: BID-802
aguuuuuaguggagguggug

SEQ ID NO: 42819 - RNA, 20 nt, Artificial Sequence
  Synthetic oligonucleotide: BID-872
caguccucgcucucacugug

SEQ ID NO: 42820 - RNA, 20 nt, Artificial Sequence
  Synthetic oligonucleotide: BID-897
gcuggggucuuaagggugug

SEQ ID NO: 42821 - RNA, 20 nt, Artificial Sequence
  Synthetic oligonucleotide: BID-902
uccucuggcaucaggaguug

SEQ ID NO: 42822 - RNA, 20 nt, Artificial Sequence
  Synthetic oligonucleotide: BID-879
cccacaggaggcuuugagau

SEQ ID NO: 42823 - RNA, 20 nt, Artificial Sequence
  Synthetic oligonucleotide: BID-1013
ggggcagggacgcacacccu

SEQ ID NO: 42824 - RNA, 20 nt, Artificial Sequence
  Synthetic oligonucleotide: BID-889
cuggggcccugcaguccccu

SEQ ID NO: 42825 - RNA, 20 nt, Artificial Sequence
  Synthetic oligonucleotide: BID-1003
gcauuuccucuucccucccu

SEQ ID NO: 42826 - RNA, 20 nt, Artificial Sequence
  Synthetic oligonucleotide: BID-701
gacuguuccagaaacagccu

SEQ ID NO: 42827 - RNA, 20 nt, Artificial Sequence
  Synthetic oligonucleotide: BID-884
gagauggggggagcucuccu

SEQ ID NO: 42828 - RNA, 20 nt, Artificial Sequence
  Synthetic oligonucleotide: BID-1001
augcucccugugcccguccu

SEQ ID NO: 42829 - RNA, 20 nt, Artificial Sequence
  Synthetic oligonucleotide: BID-886
gccugaaugugugccguccu

SEQ ID NO: 42830 - RNA, 20 nt, Artificial Sequence
  Synthetic oligonucleotide: BID-891
gagaccagauucccugagcu

SEQ ID NO: 42831 - RNA, 20 nt, Artificial Sequence
  Synthetic oligonucleotide: BID-773
ccacuuacuccagcgccgcu

SEQ ID NO: 42832 - RNA, 20 nt, Artificial Sequence
  Synthetic oligonucleotide: BID-1016
cugggccgcaggcagaggcu

SEQ ID NO: 42833 - RNA, 20 nt, Artificial Sequence
  Synthetic oligonucleotide: BID-696
acagggacuggugaggggcu

SEQ ID NO: 42834 - RNA, 20 nt, Artificial Sequence
  Synthetic oligonucleotide: BID-923
ggggucagcaguucguggcu

SEQ ID NO: 42835 - RNA, 20 nt, Artificial Sequence
  Synthetic oligonucleotide: BID-795
uuuaacauauagauaaugcu

SEQ ID NO: 42836 - RNA, 20 nt, Artificial Sequence
  Synthetic oligonucleotide: BID-1053
ugagaagguggaagagcucu

SEQ ID NO: 42837 - RNA, 20 nt, Artificial Sequence
  Synthetic oligonucleotide: BID-775
auaauuccuaaugauucucu

SEQ ID NO: 42838 - RNA, 20 nt, Artificial Sequence
  Synthetic oligonucleotide: BID-779
ggcuguuucuggaacagucu

SEQ ID NO: 42839 - RNA, 20 nt, Artificial Sequence
  Synthetic oligonucleotide: BID-1025
cagcucagggaaucuggucu

SEQ ID NO: 42840 - RNA, 20 nt, Artificial Sequence
  Synthetic oligonucleotide: BID-782
cagucugggguggucauucu

SEQ ID NO: 42841 - RNA, 20 nt, Artificial Sequence
  Synthetic oligonucleotide: BID-789
gaaccagggguuuggaaagu

SEQ ID NO: 42842 - RNA, 20 nt, Artificial Sequence
  Synthetic oligonucleotide: BID-707
guaaguggccaacuuaaagu

SEQ ID NO: 42843 - RNA, 20 nt, Artificial Sequence
  Synthetic oligonucleotide: BID-771
agugucguccaacuuuaagu

SEQ ID NO: 42844 - RNA, 20 nt, Artificial Sequence
  Synthetic oligonucleotide: BID-686
aaacugaaaaagaaauuagu

SEQ ID NO: 42845 - RNA, 20 nt, Artificial Sequence
  Synthetic oligonucleotide: BID-1055
aagguggaagagcucugggu

SEQ ID NO: 42846 - RNA, 20 nt, Artificial Sequence
  Synthetic oligonucleotide: BID-801
caguuuuuaguggagguggu

SEQ ID NO: 42847 - RNA, 20 nt, Artificial Sequence
  Synthetic oligonucleotide: BID-791
gaaagugggugaagccaugu

SEQ ID NO: 42848 - RNA, 20 nt, Artificial Sequence
  Synthetic oligonucleotide: BID-871
ucaguccucgcucucacugu

SEQ ID NO: 42849 - RNA, 20 nt, Artificial Sequence
  Synthetic oligonucleotide: BID-1036
cccaucucaaagccuccugu

SEQ ID NO: 42850 - RNA, 20 nt, Artificial Sequence
  Synthetic oligonucleotide: BID-896
agcuggggucuuaagggugu

SEQ ID NO: 42851 - RNA, 20 nt, Artificial Sequence
  Synthetic oligonucleotide: BID-703
auguuucccagagaaucauu

SEQ ID NO: 42852 - RNA, 20 nt, Artificial Sequence
  Synthetic oligonucleotide: BID-793
uuguuuauucuuuaauuauu

SEQ ID NO: 42853 - RNA, 20 nt, Artificial Sequence
  Synthetic oligonucleotide: BID-687
aacugaaaaagaaauuaguu

SEQ ID NO: 42854 - RNA, 20 nt, Artificial Sequence
  Synthetic oligonucleotide: BID-787
uccucacggaaccagggguu

SEQ ID NO: 42855 - RNA, 21 nt, Artificial Sequence
  Synthetic oligonucleotide: BID-2590
cugcacauucguauuuguuga

SEQ ID NO: 42856 - RNA, 22 nt, Artificial Sequence
  Synthetic oligonucleotide: BID-2591
gcugcacauucguauuuguuga

SEQ ID NO: 42857 - RNA, 23 nt, Artificial Sequence
  Synthetic oligonucleotide: BID-2592
cgcugcacauucguauuuguuga

SEQ ID NO: 42858 - RNA, 24 nt, Artificial Sequence
  Synthetic oligonucleotide: BID-2593
ccgcugcacauucguauuuguuga

SEQ ID NO: 42859 - RNA, 21 nt, Artificial Sequence
  Synthetic oligonucleotide: BID-3635
cugagggcuucagagcucucc

SEQ ID NO: 42860 - RNA, 22 nt, Artificial Sequence
  Synthetic oligonucleotide: BID-3636
gcugagggcuucagagcucucc

SEQ ID NO: 42861 - RNA, 23 nt, Artificial Sequence
  Synthetic oligonucleotide: BID-3637
ggcugagggcuucagagcucucc

SEQ ID NO: 42862 - RNA, 24 nt, Artificial Sequence
  Synthetic oligonucleotide: BID-3638
uggcugagggcuucagagcucucc

SEQ ID NO: 42863 - RNA, 21 nt, Artificial Sequence
  Synthetic oligonucleotide: BID-3639
acgccggggcaggcggcaggc

SEQ ID NO: 42864 - RNA, 22 nt, Artificial Sequence
  Synthetic oligonucleotide: BID-3640
cacgccggggcaggcggcaggc

SEQ ID NO: 42865 - RNA, 23 nt, Artificial Sequence
  Synthetic oligonucleotide: BID-3641
ccacgccggggcaggcggcaggc

SEQ ID NO: 42866 - RNA, 24 nt, Artificial Sequence
  Synthetic oligonucleotide: BID-3642
uccacgccggggcaggcggcaggc

SEQ ID NO: 42867 - RNA, 18 nt, Artificial Sequence
  Synthetic oligonucleotide: BID-3643
ggauuccgauccgccggc

SEQ ID NO: 42868 - RNA, 19 nt, Artificial Sequence
  Synthetic oligonucleotide: BID-3644
gggauuccgauccgccggc

SEQ ID NO: 42869 - RNA, 20 nt, Artificial Sequence
  Synthetic oligonucleotide: BID-1402
ggggauuccgauccgccggc

SEQ ID NO: 42870 - RNA, 21 nt, Artificial Sequence
  Synthetic oligonucleotide: BID-3645
cggggauuccgauccgccggc

SEQ ID NO: 42871 - RNA, 22 nt, Artificial Sequence
  Synthetic oligonucleotide: BID-3646
gcggggauuccgauccgccggc

SEQ ID NO: 42872 - RNA, 23 nt, Artificial Sequence
  Synthetic oligonucleotide: BID-3647
ggcggggauuccgauccgccggc

SEQ ID NO: 42873 - RNA, 24 nt, Artificial Sequence
  Synthetic oligonucleotide: BID-3648
gggcggggauuccgauccgccggc

SEQ ID NO: 42874 - RNA, 18 nt, Artificial Sequence
  Synthetic oligonucleotide: BID-3649
gcguaccccgggaggggc

SEQ ID NO: 42875 - RNA, 19 nt, Artificial Sequence
  Synthetic oligonucleotide: BID-3650
cgcguaccccgggaggggc

SEQ ID NO: 42876 - RNA, 20 nt, Artificial Sequence
  Synthetic oligonucleotide: BID-1448
gcgcguaccccgggaggggc

SEQ ID NO: 42877 - RNA, 21 nt, Artificial Sequence
  Synthetic oligonucleotide: BID-3651
ggcgcguaccccgggaggggc

SEQ ID NO: 42878 - RNA, 22 nt, Artificial Sequence
  Synthetic oligonucleotide: BID-3652
cggcgcguaccccgggaggggc

SEQ ID NO: 42879 - RNA, 23 nt, Artificial Sequence
  Synthetic oligonucleotide: BID-3653
ucggcgcguaccccgggaggggc

SEQ ID NO: 42880 - RNA, 24 nt, Artificial Sequence
  Synthetic oligonucleotide: BID-3654
cucggcgcguaccccgggaggggc

SEQ ID NO: 42881 - RNA, 18 nt, Artificial Sequence
  Synthetic oligonucleotide: BID-2556
gcugcacauucguauuug

SEQ ID NO: 42882 - RNA, 19 nt, Artificial Sequence
  Synthetic oligonucleotide: BID-2557
cgcugcacauucguauuug

SEQ ID NO: 42883 - RNA, 20 nt, Artificial Sequence
  Synthetic oligonucleotide: BID-553
ccgcugcacauucguauuug

SEQ ID NO: 42884 - RNA, 21 nt, Artificial Sequence
  Synthetic oligonucleotide: BID-2627
accgcugcacauucguauuug

SEQ ID NO: 42885 - RNA, 22 nt, Artificial Sequence
  Synthetic oligonucleotide: BID-2628
caccgcugcacauucguauuug

SEQ ID NO: 42886 - RNA, 23 nt, Artificial Sequence
  Synthetic oligonucleotide: BID-2629
gcaccgcugcacauucguauuug

SEQ ID NO: 42887 - RNA, 24 nt, Artificial Sequence
  Synthetic oligonucleotide: BID-2630
agcaccgcugcacauucguauuug

SEQ ID NO: 42888 - RNA, 18 nt, Artificial Sequence
  Synthetic oligonucleotide: BID-3655
gggcgccauaaggaggaa

SEQ ID NO: 42889 - RNA, 19 nt, Artificial Sequence
  Synthetic oligonucleotide: BID-3656
ggggcgccauaaggaggaa

SEQ ID NO: 42890 - RNA, 20 nt, Artificial Sequence
  Synthetic oligonucleotide: BID-1117
cggggcgccauaaggaggaa

SEQ ID NO: 42891 - RNA, 21 nt, Artificial Sequence
  Synthetic oligonucleotide: BID-3657
gcggggcgccauaaggaggaa

SEQ ID NO: 42892 - RNA, 22 nt, Artificial Sequence
  Synthetic oligonucleotide: BID-3658
cgcggggcgccauaaggaggaa

SEQ ID NO: 42893 - RNA, 23 nt, Artificial Sequence
  Synthetic oligonucleotide: BID-3659
gcgcggggcgccauaaggaggaa

SEQ ID NO: 42894 - RNA, 24 nt, Artificial Sequence
  Synthetic oligonucleotide: BID-3660
cgcgcggggcgccauaaggaggaa

SEQ ID NO: 42895 - RNA, 18 nt, Artificial Sequence
  Synthetic oligonucleotide: BID-3661
gugcacccgcgccccucc

SEQ ID NO: 42896 - RNA, 19 nt, Artificial Sequence
  Synthetic oligonucleotide: BID-3662
agugcacccgcgccccucc

SEQ ID NO: 42897 - RNA, 20 nt, Artificial Sequence
  Synthetic oligonucleotide: BID-2001
gagugcacccgcgccccucc

SEQ ID NO: 42898 - RNA, 21 nt, Artificial Sequence
  Synthetic oligonucleotide: BID-3663
ugagugcacccgcgccccucc

SEQ ID NO: 42899 - RNA, 22 nt, Artificial Sequence
  Synthetic oligonucleotide: BID-3664
gugagugcacccgcgccccucc

SEQ ID NO: 42900 - RNA, 23 nt, Artificial Sequence
  Synthetic oligonucleotide: BID-3665
ggugagugcacccgcgccccucc

SEQ ID NO: 42901 - RNA, 24 nt, Artificial Sequence
  Synthetic oligonucleotide: BID-3666
uggugagugcacccgcgccccucc

SEQ ID NO: 42902 - RNA, 18 nt, Artificial Sequence
  Synthetic oligonucleotide: BID-2566
acgaaugugcagcggugc

SEQ ID NO: 42903 - RNA, 19 nt, Artificial Sequence
  Synthetic oligonucleotide: BID-2567
uacgaaugugcagcggugc

SEQ ID NO: 42904 - RNA, 20 nt, Artificial Sequence
  Synthetic oligonucleotide: BID-1
auacgaaugugcagcggugc

SEQ ID NO: 42905 - RNA, 21 nt, Artificial Sequence
  Synthetic oligonucleotide: BID-2659
aauacgaaugugcagcggugc

SEQ ID NO: 42906 - RNA, 22 nt, Artificial Sequence
  Synthetic oligonucleotide: BID-2660
aaauacgaaugugcagcggugc

SEQ ID NO: 42907 - RNA, 23 nt, Artificial Sequence
  Synthetic oligonucleotide: BID-2661
caaauacgaaugugcagcggugc

SEQ ID NO: 42908 - RNA, 24 nt, Artificial Sequence
  Synthetic oligonucleotide: BID-2662
acaaauacgaaugugcagcggugc

SEQ ID NO: 42909 - RNA, 18 nt, Artificial Sequence
  Synthetic oligonucleotide: BID-3667
ugcaggccacccuugccg

SEQ ID NO: 42910 - RNA, 19 nt, Artificial Sequence
  Synthetic oligonucleotide: BID-3668
gugcaggccacccuugccg

SEQ ID NO: 42911 - RNA, 20 nt, Artificial Sequence
  Synthetic oligonucleotide: BID-1192
ggugcaggccacccuugccg

SEQ ID NO: 42912 - RNA, 21 nt, Artificial Sequence
  Synthetic oligonucleotide: BID-3669
gggugcaggccacccuugccg

SEQ ID NO: 42913 - RNA, 22 nt, Artificial Sequence
  Synthetic oligonucleotide: BID-3670
cgggugcaggccacccuugccg

SEQ ID NO: 42914 - RNA, 23 nt, Artificial Sequence
  Synthetic oligonucleotide: BID-3671
ccgggugcaggccacccuugccg

SEQ ID NO: 42915 - RNA, 24 nt, Artificial Sequence
  Synthetic oligonucleotide: BID-3672
gccgggugcaggccacccuugccg

SEQ ID NO: 42916 - RNA, 21 nt, Artificial Sequence
  Synthetic oligonucleotide: BID-3673
ggaccggccuucaccugcagg

SEQ ID NO: 42917 - RNA, 22 nt, Artificial Sequence
  Synthetic oligonucleotide: BID-3674
uggaccggccuucaccugcagg

SEQ ID NO: 42918 - RNA, 23 nt, Artificial Sequence
  Synthetic oligonucleotide: BID-3675
cuggaccggccuucaccugcagg

SEQ ID NO: 42919 - RNA, 24 nt, Artificial Sequence
  Synthetic oligonucleotide: BID-3676
gcuggaccggccuucaccugcagg

SEQ ID NO: 42920 - RNA, 18 nt, Artificial Sequence
  Synthetic oligonucleotide: BID-3677
gcaggucggugcugaggg

SEQ ID NO: 42921 - RNA, 19 nt, Artificial Sequence
  Synthetic oligonucleotide: BID-3678
ggcaggucggugcugaggg

SEQ ID NO: 42922 - RNA, 20 nt, Artificial Sequence
  Synthetic oligonucleotide: BID-1154
cggcaggucggugcugaggg

SEQ ID NO: 42923 - RNA, 21 nt, Artificial Sequence
  Synthetic oligonucleotide: BID-3679
ccggcaggucggugcugaggg

SEQ ID NO: 42924 - RNA, 22 nt, Artificial Sequence
  Synthetic oligonucleotide: BID-3680
gccggcaggucggugcugaggg

SEQ ID NO: 42925 - RNA, 23 nt, Artificial Sequence
  Synthetic oligonucleotide: BID-3681
ggccggcaggucggugcugaggg

SEQ ID NO: 42926 - RNA, 24 nt, Artificial Sequence
  Synthetic oligonucleotide: BID-3682
cggccggcaggucggugcugaggg

SEQ ID NO: 42927 - RNA, 18 nt, Artificial Sequence
  Synthetic oligonucleotide: BID-3683
gaaaacccgcgggccugg

SEQ ID NO: 42928 - RNA, 19 nt, Artificial Sequence
  Synthetic oligonucleotide: BID-3684
agaaaacccgcgggccugg

SEQ ID NO: 42929 - RNA, 20 nt, Artificial Sequence
  Synthetic oligonucleotide: BID-1191
gagaaaacccgcgggccugg

SEQ ID NO: 42930 - RNA, 21 nt, Artificial Sequence
  Synthetic oligonucleotide: BID-3685
ggagaaaacccgcgggccugg

SEQ ID NO: 42931 - RNA, 22 nt, Artificial Sequence
  Synthetic oligonucleotide: BID-3686
aggagaaaacccgcgggccugg

SEQ ID NO: 42932 - RNA, 23 nt, Artificial Sequence
  Synthetic oligonucleotide: BID-3687
gaggagaaaacccgcgggccugg

SEQ ID NO: 42933 - RNA, 24 nt, Artificial Sequence
  Synthetic oligonucleotide: BID-3688
agaggagaaaacccgcgggccugg

SEQ ID NO: 42934 - RNA, 18 nt, Artificial Sequence
  Synthetic oligonucleotide: BID-3689
ugggaaacuguugagugg

SEQ ID NO: 42935 - RNA, 19 nt, Artificial Sequence
  Synthetic oligonucleotide: BID-3690
cugggaaacuguugagugg

SEQ ID NO: 42936 - RNA, 20 nt, Artificial Sequence
  Synthetic oligonucleotide: BID-1208
gcugggaaacuguugagugg

SEQ ID NO: 42937 - RNA, 21 nt, Artificial Sequence
  Synthetic oligonucleotide: BID-3691
ugcugggaaacuguugagugg

SEQ ID NO: 42938 - RNA, 22 nt, Artificial Sequence
  Synthetic oligonucleotide: BID-3692
cugcugggaaacuguugagugg

SEQ ID NO: 42939 - RNA, 23 nt, Artificial Sequence
  Synthetic oligonucleotide: BID-3693
gcugcugggaaacuguugagugg

SEQ ID NO: 42940 - RNA, 24 nt, Artificial Sequence
  Synthetic oligonucleotide: BID-3694
ugcugcugggaaacuguugagugg

SEQ ID NO: 42941 - RNA, 21 nt, Artificial Sequence
  Synthetic oligonucleotide: BID-3695
gcugcugcugcugggaaacug

SEQ ID NO: 42942 - RNA, 22 nt, Artificial Sequence
  Synthetic oligonucleotide: BID-3696
cgcugcugcugcugggaaacug

SEQ ID NO: 42943 - RNA, 23 nt, Artificial Sequence
  Synthetic oligonucleotide: BID-3697
ucgcugcugcugcugggaaacug

SEQ ID NO: 42944 - RNA, 24 nt, Artificial Sequence
  Synthetic oligonucleotide: BID-3698
cucgcugcugcugcugggaaacug

SEQ ID NO: 42945 - RNA, 21 nt, Artificial Sequence
  Synthetic oligonucleotide: BID-3699
aggccacccuugccggcggau

SEQ ID NO: 42946 - RNA, 22 nt, Artificial Sequence
  Synthetic oligonucleotide: BID-3700
caggccacccuugccggcggau

SEQ ID NO: 42947 - RNA, 23 nt, Artificial Sequence
  Synthetic oligonucleotide: BID-3701
gcaggccacccuugccggcggau

SEQ ID NO: 42948 - RNA, 24 nt, Artificial Sequence
  Synthetic oligonucleotide: BID-3702
ugcaggccacccuugccggcggau

SEQ ID NO: 42949 - RNA, 21 nt, Artificial Sequence
  Synthetic oligonucleotide: BID-3703
uguguccucuccacguggccu

SEQ ID NO: 42950 - RNA, 22 nt, Artificial Sequence
  Synthetic oligonucleotide: BID-3704
uuguguccucuccacguggccu

SEQ ID NO: 42951 - RNA, 23 nt, Artificial Sequence
  Synthetic oligonucleotide: BID-3705
guuguguccucuccacguggccu

SEQ ID NO: 42952 - RNA, 24 nt, Artificial Sequence
  Synthetic oligonucleotide: BID-3706
uguuguguccucuccacguggccu

SEQ ID NO: 42953 - RNA, 21 nt, Artificial Sequence
  Synthetic oligonucleotide: BID-3707
cgcggccggcaggucggugcu

SEQ ID NO: 42954 - RNA, 22 nt, Artificial Sequence
  Synthetic oligonucleotide: BID-3708
gcgcggccggcaggucggugcu

SEQ ID NO: 42955 - RNA, 23 nt, Artificial Sequence
  Synthetic oligonucleotide: BID-3709
ggcgcggccggcaggucggugcu

SEQ ID NO: 42956 - RNA, 24 nt, Artificial Sequence
  Synthetic oligonucleotide: BID-3710
cggcgcggccggcaggucggugcu

SEQ ID NO: 42957 - RNA, 18 nt, Artificial Sequence
  Synthetic oligonucleotide: BID-3711
gagcacuggcaaugaugu

SEQ ID NO: 42958 - RNA, 19 nt, Artificial Sequence
  Synthetic oligonucleotide: BID-3712
agagcacuggcaaugaugu

SEQ ID NO: 42959 - RNA, 20 nt, Artificial Sequence
  Synthetic oligonucleotide: BID-1203
uagagcacuggcaaugaugu

SEQ ID NO: 42960 - RNA, 21 nt, Artificial Sequence
  Synthetic oligonucleotide: BID-3713
uuagagcacuggcaaugaugu

SEQ ID NO: 42961 - RNA, 22 nt, Artificial Sequence
  Synthetic oligonucleotide: BID-3714
cuuagagcacuggcaaugaugu

SEQ ID NO: 42962 - RNA, 23 nt, Artificial Sequence
  Synthetic oligonucleotide: BID-3715
ccuuagagcacuggcaaugaugu

SEQ ID NO: 42963 - RNA, 24 nt, Artificial Sequence
  Synthetic oligonucleotide: BID-3716
uccuuagagcacuggcaaugaugu

SEQ ID NO: 42964 - RNA, 18 nt, Artificial Sequence
  Synthetic oligonucleotide: BID-2584
uucguauuuguugaauga

SEQ ID NO: 42965 - RNA, 19 nt, Artificial Sequence
  Synthetic oligonucleotide: BID-2585
auucguauuuguugaauga

SEQ ID NO: 42966 - RNA, 20 nt, Artificial Sequence
  Synthetic oligonucleotide: BID-555
cauucguauuuguugaauga

SEQ ID NO: 42967 - RNA, 21 nt, Artificial Sequence
  Synthetic oligonucleotide: BID-2586
acauucguauuuguugaauga

SEQ ID NO: 42968 - RNA, 22 nt, Artificial Sequence
  Synthetic oligonucleotide: BID-2587
cacauucguauuuguugaauga

SEQ ID NO: 42969 - RNA, 23 nt, Artificial Sequence
  Synthetic oligonucleotide: BID-2588
gcacauucguauuuguugaauga

SEQ ID NO: 42970 - RNA, 24 nt, Artificial Sequence
  Synthetic oligonucleotide: BID-2589
ugcacauucguauuuguugaauga

SEQ ID NO: 42971 - RNA, 18 nt, Artificial Sequence
  Synthetic oligonucleotide: BID-2550
cacauucguauuuguuga

SEQ ID NO: 42972 - RNA, 19 nt, Artificial Sequence
  Synthetic oligonucleotide: BID-2551
gcacauucguauuuguuga

SEQ ID NO: 42973 - RNA, 20 nt, Artificial Sequence
  Synthetic oligonucleotide: BID-554
ugcacauucguauuuguuga

SEQ ID NO: 42974 - RNA, 18 nt, Artificial Sequence
  Synthetic oligonucleotide: BID-2594
cagcccccagcccacuua

SEQ ID NO: 42975 - RNA, 19 nt, Artificial Sequence
  Synthetic oligonucleotide: BID-2595
ccagcccccagcccacuua

SEQ ID NO: 42976 - RNA, 20 nt, Artificial Sequence
  Synthetic oligonucleotide: BID-551
cccagcccccagcccacuua

SEQ ID NO: 42977 - RNA, 21 nt, Artificial Sequence
  Synthetic oligonucleotide: BID-2596
gcccagcccccagcccacuua

SEQ ID NO: 42978 - RNA, 22 nt, Artificial Sequence
  Synthetic oligonucleotide: BID-2597
ggcccagcccccagcccacuua

SEQ ID NO: 42979 - RNA, 23 nt, Artificial Sequence
  Synthetic oligonucleotide: BID-2598
aggcccagcccccagcccacuua

SEQ ID NO: 42980 - RNA, 24 nt, Artificial Sequence
  Synthetic oligonucleotide: BID-2599
aaggcccagcccccagcccacuua

SEQ ID NO: 42981 - RNA, 18 nt, Artificial Sequence
  Synthetic oligonucleotide: BID-3717
agcucucccagggucccc

SEQ ID NO: 42982 - RNA, 19 nt, Artificial Sequence
  Synthetic oligonucleotide: BID-3718
gagcucucccagggucccc

SEQ ID NO: 42983 - RNA, 20 nt, Artificial Sequence
  Synthetic oligonucleotide: BID-2151
agagcucucccagggucccc

SEQ ID NO: 42984 - RNA, 21 nt, Artificial Sequence
  Synthetic oligonucleotide: BID-3719
cagagcucucccagggucccc

SEQ ID NO: 42985 - RNA, 22 nt, Artificial Sequence
  Synthetic oligonucleotide: BID-3720
ucagagcucucccagggucccc

SEQ ID NO: 42986 - RNA, 23 nt, Artificial Sequence
  Synthetic oligonucleotide: BID-3721
uucagagcucucccagggucccc

SEQ ID NO: 42987 - RNA, 24 nt, Artificial Sequence
  Synthetic oligonucleotide: BID-3722
cuucagagcucucccagggucccc

SEQ ID NO: 42988 - RNA, 18 nt, Artificial Sequence
  Synthetic oligonucleotide: BID-3723
cugcacccggccaggccc

SEQ ID NO: 42989 - RNA, 19 nt, Artificial Sequence
  Synthetic oligonucleotide: BID-3724
ccugcacccggccaggccc

SEQ ID NO: 42990 - RNA, 20 nt, Artificial Sequence
  Synthetic oligonucleotide: BID-1403
gccugcacccggccaggccc

SEQ ID NO: 42991 - RNA, 21 nt, Artificial Sequence
  Synthetic oligonucleotide: BID-3725
ggccugcacccggccaggccc

SEQ ID NO: 42992 - RNA, 22 nt, Artificial Sequence
  Synthetic oligonucleotide: BID-3726
uggccugcacccggccaggccc

SEQ ID NO: 42993 - RNA, 23 nt, Artificial Sequence
  Synthetic oligonucleotide: BID-3727
guggccugcacccggccaggccc

SEQ ID NO: 42994 - RNA, 24 nt, Artificial Sequence
  Synthetic oligonucleotide: BID-3728
gguggccugcacccggccaggccc

SEQ ID NO: 42995 - RNA, 18 nt, Artificial Sequence
  Synthetic oligonucleotide: BID-3729
gcgccccgcaccccuccc

SEQ ID NO: 42996 - RNA, 19 nt, Artificial Sequence
  Synthetic oligonucleotide: BID-3730
cgcgccccgcaccccuccc

SEQ ID NO: 42997 - RNA, 20 nt, Artificial Sequence
  Synthetic oligonucleotide: BID-1406
ccgcgccccgcaccccuccc

SEQ ID NO: 42998 - RNA, 21 nt, Artificial Sequence
  Synthetic oligonucleotide: BID-3731
cccgcgccccgcaccccuccc

SEQ ID NO: 42999 - RNA, 22 nt, Artificial Sequence
  Synthetic oligonucleotide: BID-3732
ccccgcgccccgcaccccuccc

SEQ ID NO: 43000 - RNA, 23 nt, Artificial Sequence
  Synthetic oligonucleotide: BID-3733
uccccgcgccccgcaccccuccc

SEQ ID NO: 43001 - RNA, 24 nt, Artificial Sequence
  Synthetic oligonucleotide: BID-3734
cuccccgcgccccgcaccccuccc

SEQ ID NO: 43002 - RNA, 18 nt, Artificial Sequence
  Synthetic oligonucleotide: BID-3735
agggcuucagagcucucc

SEQ ID NO: 43003 - RNA, 19 nt, Artificial Sequence
  Synthetic oligonucleotide: BID-3736
gagggcuucagagcucucc

SEQ ID NO: 43004 - RNA, 20 nt, Artificial Sequence
  Synthetic oligonucleotide: BID-1381
ugagggcuucagagcucucc

SEQ ID NO: 43005 - RNA, 18 nt, Artificial Sequence
  Synthetic oligonucleotide: BID-3737
uuucccagcagcagcagc

SEQ ID NO: 43006 - RNA, 19 nt, Artificial Sequence
  Synthetic oligonucleotide: BID-3738
guuucccagcagcagcagc

SEQ ID NO: 43007 - RNA, 20 nt, Artificial Sequence
  Synthetic oligonucleotide: BID-1385
aguuucccagcagcagcagc

SEQ ID NO: 43008 - RNA, 21 nt, Artificial Sequence
  Synthetic oligonucleotide: BID-3739
caguuucccagcagcagcagc

SEQ ID NO: 43009 - RNA, 22 nt, Artificial Sequence
  Synthetic oligonucleotide: BID-3740
acaguuucccagcagcagcagc

SEQ ID NO: 43010 - RNA, 23 nt, Artificial Sequence
  Synthetic oligonucleotide: BID-3741
aacaguuucccagcagcagcagc

SEQ ID NO: 43011 - RNA, 24 nt, Artificial Sequence
  Synthetic oligonucleotide: BID-3742
caacaguuucccagcagcagcagc

SEQ ID NO: 43012 - RNA, 18 nt, Artificial Sequence
  Synthetic oligonucleotide: BID-3743
ccggggcaggcggcaggc

SEQ ID NO: 43013 - RNA, 19 nt, Artificial Sequence
  Synthetic oligonucleotide: BID-3744
gccggggcaggcggcaggc

SEQ ID NO: 43014 - RNA, 20 nt, Artificial Sequence
  Synthetic oligonucleotide: BID-2226
cgccggggcaggcggcaggc

SEQ ID NO: 43015 - RNA, 18 nt, Artificial Sequence
  Synthetic oligonucleotide: BID-3745
aaagaccacggugugggc

SEQ ID NO: 43016 - RNA, 19 nt, Artificial Sequence
  Synthetic oligonucleotide: BID-3746
gaaagaccacggugugggc

SEQ ID NO: 43017 - RNA, 20 nt, Artificial Sequence
  Synthetic oligonucleotide: BID-2170
ggaaagaccacggugugggc

SEQ ID NO: 43018 - RNA, 21 nt, Artificial Sequence
  Synthetic oligonucleotide: BID-3747
uggaaagaccacggugugggc

SEQ ID NO: 43019 - RNA, 22 nt, Artificial Sequence
  Synthetic oligonucleotide: BID-3748
cuggaaagaccacggugugggc

SEQ ID NO: 43020 - RNA, 23 nt, Artificial Sequence
  Synthetic oligonucleotide: BID-3749
gcuggaaagaccacggugugggc

SEQ ID NO: 43021 - RNA, 24 nt, Artificial Sequence
  Synthetic oligonucleotide: BID-3750
ugcuggaaagaccacggugugggc

SEQ ID NO: 43022 - RNA, 18 nt, Artificial Sequence
  Synthetic oligonucleotide: BID-3751
ccaaguggcugggcuggc

SEQ ID NO: 43023 - RNA, 19 nt, Artificial Sequence
  Synthetic oligonucleotide: BID-3752
accaaguggcugggcuggc

SEQ ID NO: 43024 - RNA, 20 nt, Artificial Sequence
  Synthetic oligonucleotide: BID-1218
caccaaguggcugggcuggc

SEQ ID NO: 43025 - RNA, 21 nt, Artificial Sequence
  Synthetic oligonucleotide: BID-3753
ccaccaaguggcugggcuggc

SEQ ID NO: 43026 - RNA, 22 nt, Artificial Sequence
  Synthetic oligonucleotide: BID-3754
gccaccaaguggcugggcuggc

SEQ ID NO: 43027 - RNA, 23 nt, Artificial Sequence
  Synthetic oligonucleotide: BID-3755
agccaccaaguggcugggcuggc

SEQ ID NO: 43028 - RNA, 24 nt, Artificial Sequence
  Synthetic oligonucleotide: BID-3756
cagccaccaaguggcugggcuggc

SEQ ID NO: 43029 - RNA, 18 nt, Artificial Sequence
  Synthetic oligonucleotide: BID-3757
gccagaggaggggaggcg

SEQ ID NO: 43030 - RNA, 19 nt, Artificial Sequence
  Synthetic oligonucleotide: BID-3758
agccagaggaggggaggcg

SEQ ID NO: 43031 - RNA, 20 nt, Artificial Sequence
  Synthetic oligonucleotide: BID-2020
gagccagaggaggggaggcg

SEQ ID NO: 43032 - RNA, 21 nt, Artificial Sequence
  Synthetic oligonucleotide: BID-3759
ggagccagaggaggggaggcg

SEQ ID NO: 43033 - RNA, 22 nt, Artificial Sequence
  Synthetic oligonucleotide: BID-3760
gggagccagaggaggggaggcg

SEQ ID NO: 43034 - RNA, 23 nt, Artificial Sequence
  Synthetic oligonucleotide: BID-3761
ugggagccagaggaggggaggcg

SEQ ID NO: 43035 - RNA, 24 nt, Artificial Sequence
  Synthetic oligonucleotide: BID-3762
gugggagccagaggaggggaggcg

SEQ ID NO: 43036 - RNA, 18 nt, Artificial Sequence
  Synthetic oligonucleotide: BID-3763
ccggccuucaccugcagg

SEQ ID NO: 43037 - RNA, 19 nt, Artificial Sequence
  Synthetic oligonucleotide: BID-3764
accggccuucaccugcagg

SEQ ID NO: 43038 - RNA, 20 nt, Artificial Sequence
  Synthetic oligonucleotide: BID-1238
gaccggccuucaccugcagg

SEQ ID NO: 43039 - RNA, 18 nt, Artificial Sequence
  Synthetic oligonucleotide: BID-3765
ucagcagcgaccugaggg

SEQ ID NO: 43040 - RNA, 19 nt, Artificial Sequence
  Synthetic oligonucleotide: BID-3766
cucagcagcgaccugaggg

SEQ ID NO: 43041 - RNA, 20 nt, Artificial Sequence
  Synthetic oligonucleotide: BID-1150
ccucagcagcgaccugaggg

SEQ ID NO: 43042 - RNA, 21 nt, Artificial Sequence
  Synthetic oligonucleotide: BID-3767
gccucagcagcgaccugaggg

SEQ ID NO: 43043 - RNA, 22 nt, Artificial Sequence
  Synthetic oligonucleotide: BID-3768
ggccucagcagcgaccugaggg

SEQ ID NO: 43044 - RNA, 23 nt, Artificial Sequence
  Synthetic oligonucleotide: BID-3769
aggccucagcagcgaccugaggg

SEQ ID NO: 43045 - RNA, 24 nt, Artificial Sequence
  Synthetic oligonucleotide: BID-3770
caggccucagcagcgaccugaggg

SEQ ID NO: 43046 - RNA, 18 nt, Artificial Sequence
  Synthetic oligonucleotide: BID-3771
ggccuggggauucagggg

SEQ ID NO: 43047 - RNA, 19 nt, Artificial Sequence
  Synthetic oligonucleotide: BID-3772
uggccuggggauucagggg

SEQ ID NO: 43048 - RNA, 20 nt, Artificial Sequence
  Synthetic oligonucleotide: BID-2052
guggccuggggauucagggg

SEQ ID NO: 43049 - RNA, 21 nt, Artificial Sequence
  Synthetic oligonucleotide: BID-3773
cguggccuggggauucagggg

SEQ ID NO: 43050 - RNA, 22 nt, Artificial Sequence
  Synthetic oligonucleotide: BID-3774
acguggccuggggauucagggg

SEQ ID NO: 43051 - RNA, 23 nt, Artificial Sequence
  Synthetic oligonucleotide: BID-3775
cacguggccuggggauucagggg

SEQ ID NO: 43052 - RNA, 24 nt, Artificial Sequence
  Synthetic oligonucleotide: BID-3776
ccacguggccuggggauucagggg

SEQ ID NO: 43053 - RNA, 18 nt, Artificial Sequence
  Synthetic oligonucleotide: BID-3777
gcugcugcugggaaacug

SEQ ID NO: 43054 - RNA, 19 nt, Artificial Sequence
  Synthetic oligonucleotide: BID-3778
ugcugcugcugggaaacug

SEQ ID NO: 43055 - RNA, 20 nt, Artificial Sequence
  Synthetic oligonucleotide: BID-1207
cugcugcugcugggaaacug

SEQ ID NO: 43056 - RNA, 18 nt, Artificial Sequence
  Synthetic oligonucleotide: BID-3779
cccgcgcccccgcggcug

SEQ ID NO: 43057 - RNA, 19 nt, Artificial Sequence
  Synthetic oligonucleotide: BID-3780
gcccgcgcccccgcggcug

SEQ ID NO: 43058 - RNA, 20 nt, Artificial Sequence
  Synthetic oligonucleotide: BID-1124
cgcccgcgcccccgcggcug

SEQ ID NO: 43059 - RNA, 21 nt, Artificial Sequence
  Synthetic oligonucleotide: BID-3781
gcgcccgcgcccccgcggcug

SEQ ID NO: 43060 - RNA, 22 nt, Artificial Sequence
  Synthetic oligonucleotide: BID-3782
cgcgcccgcgcccccgcggcug

SEQ ID NO: 43061 - RNA, 23 nt, Artificial Sequence
  Synthetic oligonucleotide: BID-3783
acgcgcccgcgcccccgcggcug

SEQ ID NO: 43062 - RNA, 24 nt, Artificial Sequence
  Synthetic oligonucleotide: BID-3784
gacgcgcccgcgcccccgcggcug

SEQ ID NO: 43063 - RNA, 18 nt, Artificial Sequence
  Synthetic oligonucleotide: BID-3785
ccccgcggcuggagggug

SEQ ID NO: 43064 - RNA, 19 nt, Artificial Sequence
  Synthetic oligonucleotide: BID-3786
cccccgcggcuggagggug

SEQ ID NO: 43065 - RNA, 20 nt, Artificial Sequence
  Synthetic oligonucleotide: BID-1125
gcccccgcggcuggagggug

SEQ ID NO: 43066 - RNA, 21 nt, Artificial Sequence
  Synthetic oligonucleotide: BID-3787
cgcccccgcggcuggagggug

SEQ ID NO: 43067 - RNA, 22 nt, Artificial Sequence
  Synthetic oligonucleotide: BID-3788
gcgcccccgcggcuggagggug

SEQ ID NO: 43068 - RNA, 23 nt, Artificial Sequence
  Synthetic oligonucleotide: BID-3789
cgcgcccccgcggcuggagggug

SEQ ID NO: 43069 - RNA, 24 nt, Artificial Sequence
  Synthetic oligonucleotide: BID-3790
ccgcgcccccgcggcuggagggug

SEQ ID NO: 43070 - RNA, 18 nt, Artificial Sequence
  Synthetic oligonucleotide: BID-2685
uucauucauucaacaaau

SEQ ID NO: 43071 - RNA, 19 nt, Artificial Sequence
  Synthetic oligonucleotide: BID-2686
auucauucauucaacaaau

SEQ ID NO: 43072 - RNA, 20 nt, Artificial Sequence
  Synthetic oligonucleotide: BID-360
cauucauucauucaacaaau

SEQ ID NO: 43073 - RNA, 21 nt, Artificial Sequence
  Synthetic oligonucleotide: BID-2687
ucauucauucauucaacaaau

SEQ ID NO: 43074 - RNA, 22 nt, Artificial Sequence
  Synthetic oligonucleotide: BID-2688
uucauucauucauucaacaaau

SEQ ID NO: 43075 - RNA, 23 nt, Artificial Sequence
  Synthetic oligonucleotide: BID-2689
guucauucauucauucaacaaau

SEQ ID NO: 43076 - RNA, 24 nt, Artificial Sequence
  Synthetic oligonucleotide: BID-2690
gguucauucauucauucaacaaau

SEQ ID NO: 43077 - RNA, 18 nt, Artificial Sequence
  Synthetic oligonucleotide: BID-3791
ccacccuugccggcggau

SEQ ID NO: 43078 - RNA, 19 nt, Artificial Sequence
  Synthetic oligonucleotide: BID-3792
gccacccuugccggcggau

SEQ ID NO: 43079 - RNA, 20 nt, Artificial Sequence
  Synthetic oligonucleotide: BID-2079
ggccacccuugccggcggau

SEQ ID NO: 43080 - RNA, 18 nt, Artificial Sequence
  Synthetic oligonucleotide: BID-3793
guccucuccacguggccu

SEQ ID NO: 43081 - RNA, 19 nt, Artificial Sequence
  Synthetic oligonucleotide: BID-3794
uguccucuccacguggccu

SEQ ID NO: 43082 - RNA, 20 nt, Artificial Sequence
  Synthetic oligonucleotide: BID-2047
guguccucuccacguggccu

SEQ ID NO: 43083 - RNA, 18 nt, Artificial Sequence
  Synthetic oligonucleotide: BID-3795
ggccggcaggucggugcu

SEQ ID NO: 43084 - RNA, 19 nt, Artificial Sequence
  Synthetic oligonucleotide: BID-3796
cggccggcaggucggugcu

SEQ ID NO: 43085 - RNA, 20 nt, Artificial Sequence
  Synthetic oligonucleotide: BID-1153
gcggccggcaggucggugcu

SEQ ID NO: 43086 - RNA, 18 nt, Artificial Sequence
  Synthetic oligonucleotide: BID-2578
cggcuggaggagcacagu

SEQ ID NO: 43087 - RNA, 19 nt, Artificial Sequence
  Synthetic oligonucleotide: BID-2579
ccggcuggaggagcacagu

SEQ ID NO: 43088 - RNA, 20 nt, Artificial Sequence
  Synthetic oligonucleotide: BID-372
gccggcuggaggagcacagu

SEQ ID NO: 43089 - RNA, 21 nt, Artificial Sequence
  Synthetic oligonucleotide: BID-2695
ggccggcuggaggagcacagu

SEQ ID NO: 43090 - RNA, 22 nt, Artificial Sequence
  Synthetic oligonucleotide: BID-2696
gggccggcuggaggagcacagu

SEQ ID NO: 43091 - RNA, 23 nt, Artificial Sequence
  Synthetic oligonucleotide: BID-2697
cgggccggcuggaggagcacagu

SEQ ID NO: 43092 - RNA, 24 nt, Artificial Sequence
  Synthetic oligonucleotide: BID-2698
ccgggccggcuggaggagcacagu

SEQ ID NO: 43093 - RNA, 18 nt, Artificial Sequence
  Synthetic oligonucleotide: BID-2741
ccggccccucgcugccca

SEQ ID NO: 43094 - RNA, 19 nt, Artificial Sequence
  Synthetic oligonucleotide: BID-2742
cccggccccucgcugccca

SEQ ID NO: 43095 - RNA, 20 nt, Artificial Sequence
  Synthetic oligonucleotide: BID-552
gcccggccccucgcugccca

SEQ ID NO: 43096 - RNA, 21 nt, Artificial Sequence
  Synthetic oligonucleotide: BID-2743
ggcccggccccucgcugccca

SEQ ID NO: 43097 - RNA, 22 nt, Artificial Sequence
  Synthetic oligonucleotide: BID-2744
cggcccggccccucgcugccca

SEQ ID NO: 43098 - RNA, 23 nt, Artificial Sequence
  Synthetic oligonucleotide: BID-2745
ccggcccggccccucgcugccca

SEQ ID NO: 43099 - RNA, 24 nt, Artificial Sequence
  Synthetic oligonucleotide: BID-2746
gccggcccggccccucgcugccca

SEQ ID NO: 43100 - RNA, 18 nt, Artificial Sequence
  Synthetic oligonucleotide: BID-3797
aguuucccagcagcagca

SEQ ID NO: 43101 - RNA, 19 nt, Artificial Sequence
  Synthetic oligonucleotide: BID-3798
caguuucccagcagcagca

SEQ ID NO: 43102 - RNA, 20 nt, Artificial Sequence
  Synthetic oligonucleotide: BID-1384
acaguuucccagcagcagca

SEQ ID NO: 43103 - RNA, 21 nt, Artificial Sequence
  Synthetic oligonucleotide: BID-3799
aacaguuucccagcagcagca

SEQ ID NO: 43104 - RNA, 22 nt, Artificial Sequence
  Synthetic oligonucleotide: BID-3800
caacaguuucccagcagcagca

SEQ ID NO: 43105 - RNA, 23 nt, Artificial Sequence
  Synthetic oligonucleotide: BID-3801
ucaacaguuucccagcagcagca

SEQ ID NO: 43106 - RNA, 24 nt, Artificial Sequence
  Synthetic oligonucleotide: BID-3802
cucaacaguuucccagcagcagca

SEQ ID NO: 43107 - RNA, 18 nt, Artificial Sequence
  Synthetic oligonucleotide: BID-3803
uugccagugcucuaagga

SEQ ID NO: 43108 - RNA, 19 nt, Artificial Sequence
  Synthetic oligonucleotide: BID-3804
auugccagugcucuaagga

SEQ ID NO: 43109 - RNA, 20 nt, Artificial Sequence
  Synthetic oligonucleotide: BID-1388
cauugccagugcucuaagga

SEQ ID NO: 43110 - RNA, 21 nt, Artificial Sequence
  Synthetic oligonucleotide: BID-3805
ucauugccagugcucuaagga

SEQ ID NO: 43111 - RNA, 22 nt, Artificial Sequence
  Synthetic oligonucleotide: BID-3806
aucauugccagugcucuaagga

SEQ ID NO: 43112 - RNA, 23 nt, Artificial Sequence
  Synthetic oligonucleotide: BID-3807
caucauugccagugcucuaagga

SEQ ID NO: 43113 - RNA, 24 nt, Artificial Sequence
  Synthetic oligonucleotide: BID-3808
acaucauugccagugcucuaagga

SEQ ID NO: 43114 - RNA, 18 nt, Artificial Sequence
  Synthetic oligonucleotide: BID-3809
ggagggcgcccgggcgga

SEQ ID NO: 43115 - RNA, 19 nt, Artificial Sequence
  Synthetic oligonucleotide: BID-3810
aggagggcgcccgggcgga

SEQ ID NO: 43116 - RNA, 20 nt, Artificial Sequence
  Synthetic oligonucleotide: BID-2198
gaggagggcgcccgggcgga

SEQ ID NO: 43117 - RNA, 21 nt, Artificial Sequence
  Synthetic oligonucleotide: BID-3811
cgaggagggcgcccgggcgga

SEQ ID NO: 43118 - RNA, 22 nt, Artificial Sequence
  Synthetic oligonucleotide: BID-3812
ccgaggagggcgcccgggcgga

SEQ ID NO: 43119 - RNA, 23 nt, Artificial Sequence
  Synthetic oligonucleotide: BID-3813
gccgaggagggcgcccgggcgga

SEQ ID NO: 43120 - RNA, 24 nt, Artificial Sequence
  Synthetic oligonucleotide: BID-3814
cgccgaggagggcgcccgggcgga

SEQ ID NO: 43121 - RNA, 18 nt, Artificial Sequence
  Synthetic oligonucleotide: BID-3815
auccccaggccacgugga

SEQ ID NO: 43122 - RNA, 19 nt, Artificial Sequence
  Synthetic oligonucleotide: BID-3816
aauccccaggccacgugga

SEQ ID NO: 43123 - RNA, 20 nt, Artificial Sequence
  Synthetic oligonucleotide: BID-1410
gaauccccaggccacgugga

SEQ ID NO: 43124 - RNA, 21 nt, Artificial Sequence
  Synthetic oligonucleotide: BID-3817
ugaauccccaggccacgugga

SEQ ID NO: 43125 - RNA, 22 nt, Artificial Sequence
  Synthetic oligonucleotide: BID-3818
cugaauccccaggccacgugga

SEQ ID NO: 43126 - RNA, 23 nt, Artificial Sequence
  Synthetic oligonucleotide: BID-3819
ccugaauccccaggccacgugga

SEQ ID NO: 43127 - RNA, 24 nt, Artificial Sequence
  Synthetic oligonucleotide: BID-3820
cccugaauccccaggccacgugga

SEQ ID NO: 43128 - RNA, 18 nt, Artificial Sequence
  Synthetic oligonucleotide: BID-2790
uauuuguugaaugaauga

SEQ ID NO: 43129 - RNA, 19 nt, Artificial Sequence
  Synthetic oligonucleotide: BID-2791
guauuuguugaaugaauga

SEQ ID NO: 43130 - RNA, 20 nt, Artificial Sequence
  Synthetic oligonucleotide: BID-556
cguauuuguugaaugaauga

SEQ ID NO: 43131 - RNA, 21 nt, Artificial Sequence
  Synthetic oligonucleotide: BID-2792
ucguauuuguugaaugaauga

SEQ ID NO: 43132 - RNA, 22 nt, Artificial Sequence
  Synthetic oligonucleotide: BID-2793
uucguauuuguugaaugaauga

SEQ ID NO: 43133 - RNA, 23 nt, Artificial Sequence
  Synthetic oligonucleotide: BID-2794
auucguauuuguugaaugaauga

SEQ ID NO: 43134 - RNA, 24 nt, Artificial Sequence
  Synthetic oligonucleotide: BID-2795
cauucguauuuguugaaugaauga

SEQ ID NO: 43135 - RNA, 18 nt, Artificial Sequence
  Synthetic oligonucleotide: BID-3821
aucauugccagugcucua

SEQ ID NO: 43136 - RNA, 19 nt, Artificial Sequence
  Synthetic oligonucleotide: BID-3822
caucauugccagugcucua

SEQ ID NO: 43137 - RNA, 20 nt, Artificial Sequence
  Synthetic oligonucleotide: BID-2155
acaucauugccagugcucua

SEQ ID NO: 43138 - RNA, 21 nt, Artificial Sequence
  Synthetic oligonucleotide: BID-3823
cacaucauugccagugcucua

SEQ ID NO: 43139 - RNA, 22 nt, Artificial Sequence
  Synthetic oligonucleotide: BID-3824
gcacaucauugccagugcucua

SEQ ID NO: 43140 - RNA, 23 nt, Artificial Sequence
  Synthetic oligonucleotide: BID-3825
cgcacaucauugccagugcucua

SEQ ID NO: 43141 - RNA, 24 nt, Artificial Sequence
  Synthetic oligonucleotide: BID-3826
ccgcacaucauugccagugcucua

SEQ ID NO: 43142 - RNA, 18 nt, Artificial Sequence
  Synthetic oligonucleotide: BID-3827
ccugaauccccaggccac

SEQ ID NO: 43143 - RNA, 19 nt, Artificial Sequence
  Synthetic oligonucleotide: BID-3828
cccugaauccccaggccac

SEQ ID NO: 43144 - RNA, 20 nt, Artificial Sequence
  Synthetic oligonucleotide: BID-1407
ccccugaauccccaggccac

SEQ ID NO: 43145 - RNA, 21 nt, Artificial Sequence
  Synthetic oligonucleotide: BID-3829
uccccugaauccccaggccac

SEQ ID NO: 43146 - RNA, 22 nt, Artificial Sequence
  Synthetic oligonucleotide: BID-3830
cuccccugaauccccaggccac

SEQ ID NO: 43147 - RNA, 23 nt, Artificial Sequence
  Synthetic oligonucleotide: BID-3831
ccuccccugaauccccaggccac

SEQ ID NO: 43148 - RNA, 24 nt, Artificial Sequence
  Synthetic oligonucleotide: BID-3832
cccuccccugaauccccaggccac

SEQ ID NO: 43149 - RNA, 18 nt, Artificial Sequence
  Synthetic oligonucleotide: BID-3833
uggggcucggcgcguacc

SEQ ID NO: 43150 - RNA, 19 nt, Artificial Sequence
  Synthetic oligonucleotide: BID-3834
cuggggcucggcgcguacc

SEQ ID NO: 43151 - RNA, 20 nt, Artificial Sequence
  Synthetic oligonucleotide: BID-1443
gcuggggcucggcgcguacc

SEQ ID NO: 43152 - RNA, 21 nt, Artificial Sequence
  Synthetic oligonucleotide: BID-3835
ggcuggggcucggcgcguacc

SEQ ID NO: 43153 - RNA, 22 nt, Artificial Sequence
  Synthetic oligonucleotide: BID-3836
gggcuggggcucggcgcguacc

SEQ ID NO: 43154 - RNA, 23 nt, Artificial Sequence
  Synthetic oligonucleotide: BID-3837
cgggcuggggcucggcgcguacc

SEQ ID NO: 43155 - RNA, 24 nt, Artificial Sequence
  Synthetic oligonucleotide: BID-3838
acgggcuggggcucggcgcguacc

SEQ ID NO: 43156 - RNA, 18 nt, Artificial Sequence
  Synthetic oligonucleotide: BID-3839
ggggcucggcgcguaccc

SEQ ID NO: 43157 - RNA, 19 nt, Artificial Sequence
  Synthetic oligonucleotide: BID-3840
uggggcucggcgcguaccc

SEQ ID NO: 43158 - RNA, 20 nt, Artificial Sequence
  Synthetic oligonucleotide: BID-2235
cuggggcucggcgcguaccc

SEQ ID NO: 43159 - RNA, 21 nt, Artificial Sequence
  Synthetic oligonucleotide: BID-3841
gcuggggcucggcgcguaccc

SEQ ID NO: 43160 - RNA, 22 nt, Artificial Sequence
  Synthetic oligonucleotide: BID-3842
ggcuggggcucggcgcguaccc

SEQ ID NO: 43161 - RNA, 23 nt, Artificial Sequence
  Synthetic oligonucleotide: BID-3843
gggcuggggcucggcgcguaccc

SEQ ID NO: 43162 - RNA, 24 nt, Artificial Sequence
  Synthetic oligonucleotide: BID-3844
cgggcuggggcucggcgcguaccc

SEQ ID NO: 43163 - RNA, 18 nt, Artificial Sequence
  Synthetic oligonucleotide: BID-3845
gggcucggcgcguacccc

SEQ ID NO: 43164 - RNA, 19 nt, Artificial Sequence
  Synthetic oligonucleotide: BID-3846
ggggcucggcgcguacccc

SEQ ID NO: 43165 - RNA, 20 nt, Artificial Sequence
  Synthetic oligonucleotide: BID-2236
uggggcucggcgcguacccc

SEQ ID NO: 43166 - RNA, 21 nt, Artificial Sequence
  Synthetic oligonucleotide: BID-3847
cuggggcucggcgcguacccc

SEQ ID NO: 43167 - RNA, 22 nt, Artificial Sequence
  Synthetic oligonucleotide: BID-3848
gcuggggcucggcgcguacccc

SEQ ID NO: 43168 - RNA, 23 nt, Artificial Sequence
  Synthetic oligonucleotide: BID-3849
ggcuggggcucggcgcguacccc

SEQ ID NO: 43169 - RNA, 24 nt, Artificial Sequence
  Synthetic oligonucleotide: BID-3850
gggcuggggcucggcgcguacccc

SEQ ID NO: 43170 - RNA, 18 nt, Artificial Sequence
  Synthetic oligonucleotide: BID-3851
gagcucucccaggguccc

SEQ ID NO: 43171 - RNA, 19 nt, Artificial Sequence
  Synthetic oligonucleotide: BID-3852
agagcucucccaggguccc

SEQ ID NO: 43172 - RNA, 20 nt, Artificial Sequence
  Synthetic oligonucleotide: BID-1382
cagagcucucccaggguccc

SEQ ID NO: 43173 - RNA, 21 nt, Artificial Sequence
  Synthetic oligonucleotide: BID-3853
ucagagcucucccaggguccc

SEQ ID NO: 43174 - RNA, 22 nt, Artificial Sequence
  Synthetic oligonucleotide: BID-3854
uucagagcucucccaggguccc

SEQ ID NO: 43175 - RNA, 23 nt, Artificial Sequence
  Synthetic oligonucleotide: BID-3855
cuucagagcucucccaggguccc

SEQ ID NO: 43176 - RNA, 24 nt, Artificial Sequence
  Synthetic oligonucleotide: BID-3856
gcuucagagcucucccaggguccc

SEQ ID NO: 43177 - RNA, 18 nt, Artificial Sequence
  Synthetic oligonucleotide: BID-3857
acucaccacccuccagcc

SEQ ID NO: 43178 - RNA, 19 nt, Artificial Sequence
  Synthetic oligonucleotide: BID-3858
cacucaccacccuccagcc

SEQ ID NO: 43179 - RNA, 20 nt, Artificial Sequence
  Synthetic oligonucleotide: BID-1449
gcacucaccacccuccagcc

SEQ ID NO: 43180 - RNA, 21 nt, Artificial Sequence
  Synthetic oligonucleotide: BID-3859
ugcacucaccacccuccagcc

SEQ ID NO: 43181 - RNA, 22 nt, Artificial Sequence
  Synthetic oligonucleotide: BID-3860
gugcacucaccacccuccagcc

SEQ ID NO: 43182 - RNA, 23 nt, Artificial Sequence
  Synthetic oligonucleotide: BID-3861
ggugcacucaccacccuccagcc

SEQ ID NO: 43183 - RNA, 24 nt, Artificial Sequence
  Synthetic oligonucleotide: BID-3862
gggugcacucaccacccuccagcc

SEQ ID NO: 43184 - RNA, 18 nt, Artificial Sequence
  Synthetic oligonucleotide: BID-3863
gaccgcgcuuugucagcc

SEQ ID NO: 43185 - RNA, 19 nt, Artificial Sequence
  Synthetic oligonucleotide: BID-3864
ugaccgcgcuuugucagcc

SEQ ID NO: 43186 - RNA, 20 nt, Artificial Sequence
  Synthetic oligonucleotide: BID-1390
cugaccgcgcuuugucagcc

SEQ ID NO: 43187 - RNA, 21 nt, Artificial Sequence
  Synthetic oligonucleotide: BID-3865
ucugaccgcgcuuugucagcc

SEQ ID NO: 43188 - RNA, 22 nt, Artificial Sequence
  Synthetic oligonucleotide: BID-3866
cucugaccgcgcuuugucagcc

SEQ ID NO: 43189 - RNA, 23 nt, Artificial Sequence
  Synthetic oligonucleotide: BID-3867
gcucugaccgcgcuuugucagcc

SEQ ID NO: 43190 - RNA, 24 nt, Artificial Sequence
  Synthetic oligonucleotide: BID-3868
cgcucugaccgcgcuuugucagcc

SEQ ID NO: 43191 - RNA, 18 nt, Artificial Sequence
  Synthetic oligonucleotide: BID-3869
cgaccugccggccgcgcc

SEQ ID NO: 43192 - RNA, 19 nt, Artificial Sequence
  Synthetic oligonucleotide: BID-3870
ccgaccugccggccgcgcc

SEQ ID NO: 43193 - RNA, 20 nt, Artificial Sequence
  Synthetic oligonucleotide: BID-1414
accgaccugccggccgcgcc

SEQ ID NO: 43194 - RNA, 21 nt, Artificial Sequence
  Synthetic oligonucleotide: BID-3871
caccgaccugccggccgcgcc

SEQ ID NO: 43195 - RNA, 22 nt, Artificial Sequence
  Synthetic oligonucleotide: BID-3872
gcaccgaccugccggccgcgcc

SEQ ID NO: 43196 - RNA, 23 nt, Artificial Sequence
  Synthetic oligonucleotide: BID-3873
agcaccgaccugccggccgcgcc

SEQ ID NO: 43197 - RNA, 24 nt, Artificial Sequence
  Synthetic oligonucleotide: BID-3874
cagcaccgaccugccggccgcgcc

SEQ ID NO: 43198 - RNA, 18 nt, Artificial Sequence
  Synthetic oligonucleotide: BID-3875
caggucgcugcugaggcc

SEQ ID NO: 43199 - RNA, 19 nt, Artificial Sequence
  Synthetic oligonucleotide: BID-3876
ucaggucgcugcugaggcc

SEQ ID NO: 43200 - RNA, 20 nt, Artificial Sequence
  Synthetic oligonucleotide: BID-2206
cucaggucgcugcugaggcc

SEQ ID NO: 43201 - RNA, 21 nt, Artificial Sequence
  Synthetic oligonucleotide: BID-3877
ccucaggucgcugcugaggcc

SEQ ID NO: 43202 - RNA, 22 nt, Artificial Sequence
  Synthetic oligonucleotide: BID-3878
cccucaggucgcugcugaggcc

SEQ ID NO: 43203 - RNA, 23 nt, Artificial Sequence
  Synthetic oligonucleotide: BID-3879
gcccucaggucgcugcugaggcc

SEQ ID NO: 43204 - RNA, 24 nt, Artificial Sequence
  Synthetic oligonucleotide: BID-3880
ggcccucaggucgcugcugaggcc

SEQ ID NO: 43205 - RNA, 18 nt, Artificial Sequence
  Synthetic oligonucleotide: BID-3881
cagggcgggcggcgggcc

SEQ ID NO: 43206 - RNA, 19 nt, Artificial Sequence
  Synthetic oligonucleotide: BID-3882
ccagggcgggcggcgggcc

SEQ ID NO: 43207 - RNA, 20 nt, Artificial Sequence
  Synthetic oligonucleotide: BID-1435
cccagggcgggcggcgggcc

SEQ ID NO: 43208 - RNA, 21 nt, Artificial Sequence
  Synthetic oligonucleotide: BID-3883
gcccagggcgggcggcgggcc

SEQ ID NO: 43209 - RNA, 22 nt, Artificial Sequence
  Synthetic oligonucleotide: BID-3884
ggcccagggcgggcggcgggcc

SEQ ID NO: 43210 - RNA, 23 nt, Artificial Sequence
  Synthetic oligonucleotide: BID-3885
gggcccagggcgggcggcgggcc

SEQ ID NO: 43211 - RNA, 24 nt, Artificial Sequence
  Synthetic oligonucleotide: BID-3886
cgggcccagggcgggcggcgggcc

SEQ ID NO: 43212 - RNA, 18 nt, Artificial Sequence
  Synthetic oligonucleotide: BID-3887
ucccaccgcggucgggcc

SEQ ID NO: 43213 - RNA, 19 nt, Artificial Sequence
  Synthetic oligonucleotide: BID-3888
cucccaccgcggucgggcc

SEQ ID NO: 43214 - RNA, 20 nt, Artificial Sequence
  Synthetic oligonucleotide: BID-1432
gcucccaccgcggucgggcc

SEQ ID NO: 43215 - RNA, 21 nt, Artificial Sequence
  Synthetic oligonucleotide: BID-3889
ggcucccaccgcggucgggcc

SEQ ID NO: 43216 - RNA, 22 nt, Artificial Sequence
  Synthetic oligonucleotide: BID-3890
uggcucccaccgcggucgggcc

SEQ ID NO: 43217 - RNA, 23 nt, Artificial Sequence
  Synthetic oligonucleotide: BID-3891
cuggcucccaccgcggucgggcc

SEQ ID NO: 43218 - RNA, 24 nt, Artificial Sequence
  Synthetic oligonucleotide: BID-3892
ucuggcucccaccgcggucgggcc

SEQ ID NO: 43219 - RNA, 18 nt, Artificial Sequence
  Synthetic oligonucleotide: BID-3893
uccuucggccccccacgc

SEQ ID NO: 43220 - RNA, 19 nt, Artificial Sequence
  Synthetic oligonucleotide: BID-3894
cuccuucggccccccacgc

SEQ ID NO: 43221 - RNA, 20 nt, Artificial Sequence
  Synthetic oligonucleotide: BID-3895
ccuccuucggccccccacgc

SEQ ID NO: 43222 - RNA, 21 nt, Artificial Sequence
  Synthetic oligonucleotide: BID-3896
uccuccuucggccccccacgc

SEQ ID NO: 43223 - RNA, 22 nt, Artificial Sequence
  Synthetic oligonucleotide: BID-3897
uuccuccuucggccccccacgc

SEQ ID NO: 43224 - RNA, 23 nt, Artificial Sequence
  Synthetic oligonucleotide: BID-3898
cuuccuccuucggccccccacgc

SEQ ID NO: 43225 - RNA, 24 nt, Artificial Sequence
  Synthetic oligonucleotide: BID-3899
gcuuccuccuucggccccccacgc

SEQ ID NO: 43226 - RNA, 18 nt, Artificial Sequence
  Synthetic oligonucleotide: BID-3900
gggcccugagcuccacgc

SEQ ID NO: 43227 - RNA, 19 nt, Artificial Sequence
  Synthetic oligonucleotide: BID-3901
cgggcccugagcuccacgc

SEQ ID NO: 43228 - RNA, 20 nt, Artificial Sequence
  Synthetic oligonucleotide: BID-2220
gcgggcccugagcuccacgc

SEQ ID NO: 43229 - RNA, 21 nt, Artificial Sequence
  Synthetic oligonucleotide: BID-3902
ggcgggcccugagcuccacgc

SEQ ID NO: 43230 - RNA, 22 nt, Artificial Sequence
  Synthetic oligonucleotide: BID-3903
cggcgggcccugagcuccacgc

SEQ ID NO: 43231 - RNA, 23 nt, Artificial Sequence
  Synthetic oligonucleotide: BID-3904
gcggcgggcccugagcuccacgc

SEQ ID NO: 43232 - RNA, 24 nt, Artificial Sequence
  Synthetic oligonucleotide: BID-3905
ggcggcgggcccugagcuccacgc

SEQ ID NO: 43233 - RNA, 18 nt, Artificial Sequence
  Synthetic oligonucleotide: BID-3906
ucaccacccuccagccgc

SEQ ID NO: 43234 - RNA, 19 nt, Artificial Sequence
  Synthetic oligonucleotide: BID-3907
cucaccacccuccagccgc

SEQ ID NO: 43235 - RNA, 20 nt, Artificial Sequence
  Synthetic oligonucleotide: BID-2243
acucaccacccuccagccgc

SEQ ID NO: 43236 - RNA, 21 nt, Artificial Sequence
  Synthetic oligonucleotide: BID-3908
cacucaccacccuccagccgc

SEQ ID NO: 43237 - RNA, 22 nt, Artificial Sequence
  Synthetic oligonucleotide: BID-3909
gcacucaccacccuccagccgc

SEQ ID NO: 43238 - RNA, 23 nt, Artificial Sequence
  Synthetic oligonucleotide: BID-3910
ugcacucaccacccuccagccgc

SEQ ID NO: 43239 - RNA, 24 nt, Artificial Sequence
  Synthetic oligonucleotide: BID-3911
gugcacucaccacccuccagccgc

SEQ ID NO: 43240 - RNA, 18 nt, Artificial Sequence
  Synthetic oligonucleotide: BID-3912
gucagcccugagcuccgc

SEQ ID NO: 43241 - RNA, 19 nt, Artificial Sequence
  Synthetic oligonucleotide: BID-3913
ugucagcccugagcuccgc

SEQ ID NO: 43242 - RNA, 20 nt, Artificial Sequence
  Synthetic oligonucleotide: BID-1391
uugucagcccugagcuccgc

SEQ ID NO: 43243 - RNA, 21 nt, Artificial Sequence
  Synthetic oligonucleotide: BID-3914
uuugucagcccugagcuccgc

SEQ ID NO: 43244 - RNA, 22 nt, Artificial Sequence
  Synthetic oligonucleotide: BID-3915
cuuugucagcccugagcuccgc

SEQ ID NO: 43245 - RNA, 23 nt, Artificial Sequence
  Synthetic oligonucleotide: BID-3916
gcuuugucagcccugagcuccgc

SEQ ID NO: 43246 - RNA, 24 nt, Artificial Sequence
  Synthetic oligonucleotide: BID-3917
cgcuuugucagcccugagcuccgc

SEQ ID NO: 43247 - RNA, 18 nt, Artificial Sequence
  Synthetic oligonucleotide: BID-3918
gcagcgucucccaggcgc

SEQ ID NO: 43248 - RNA, 19 nt, Artificial Sequence
  Synthetic oligonucleotide: BID-3919
ggcagcgucucccaggcgc

SEQ ID NO: 43249 - RNA, 20 nt, Artificial Sequence
  Synthetic oligonucleotide: BID-1455
aggcagcgucucccaggcgc

SEQ ID NO: 43250 - RNA, 21 nt, Artificial Sequence
  Synthetic oligonucleotide: BID-3920
gaggcagcgucucccaggcgc

SEQ ID NO: 43251 - RNA, 22 nt, Artificial Sequence
  Synthetic oligonucleotide: BID-3921
cgaggcagcgucucccaggcgc

SEQ ID NO: 43252 - RNA, 23 nt, Artificial Sequence
  Synthetic oligonucleotide: BID-3922
ccgaggcagcgucucccaggcgc

SEQ ID NO: 43253 - RNA, 24 nt, Artificial Sequence
  Synthetic oligonucleotide: BID-3923
gccgaggcagcgucucccaggcgc

SEQ ID NO: 43254 - RNA, 18 nt, Artificial Sequence
  Synthetic oligonucleotide: BID-3924
ccgcgccgaggagggcgc

SEQ ID NO: 43255 - RNA, 19 nt, Artificial Sequence
  Synthetic oligonucleotide: BID-3925
gccgcgccgaggagggcgc

SEQ ID NO: 43256 - RNA, 20 nt, Artificial Sequence
  Synthetic oligonucleotide: BID-1417
ggccgcgccgaggagggcgc

SEQ ID NO: 43257 - RNA, 21 nt, Artificial Sequence
  Synthetic oligonucleotide: BID-3926
cggccgcgccgaggagggcgc

SEQ ID NO: 43258 - RNA, 22 nt, Artificial Sequence
  Synthetic oligonucleotide: BID-3927
ccggccgcgccgaggagggcgc

SEQ ID NO: 43259 - RNA, 23 nt, Artificial Sequence
  Synthetic oligonucleotide: BID-3928
gccggccgcgccgaggagggcgc

SEQ ID NO: 43260 - RNA, 24 nt, Artificial Sequence
  Synthetic oligonucleotide: BID-3929
ugccggccgcgccgaggagggcgc

SEQ ID NO: 43261 - RNA, 18 nt, Artificial Sequence
  Synthetic oligonucleotide: BID-3930
cccgggcggaggggaggc

SEQ ID NO: 43262 - RNA, 19 nt, Artificial Sequence
  Synthetic oligonucleotide: BID-3931
gcccgggcggaggggaggc

SEQ ID NO: 43263 - RNA, 20 nt, Artificial Sequence
  Synthetic oligonucleotide: BID-2202
cgcccgggcggaggggaggc

SEQ ID NO: 43264 - RNA, 21 nt, Artificial Sequence
  Synthetic oligonucleotide: BID-3932
gcgcccgggcggaggggaggc

SEQ ID NO: 43265 - RNA, 22 nt, Artificial Sequence
  Synthetic oligonucleotide: BID-3933
ggcgcccgggcggaggggaggc

SEQ ID NO: 43266 - RNA, 23 nt, Artificial Sequence
  Synthetic oligonucleotide: BID-3934
gggcgcccgggcggaggggaggc

SEQ ID NO: 43267 - RNA, 24 nt, Artificial Sequence
  Synthetic oligonucleotide: BID-3935
agggcgcccgggcggaggggaggc

SEQ ID NO: 43268 - RNA, 18 nt, Artificial Sequence
  Synthetic oligonucleotide: BID-3936
ucaggucgcugcugaggc

SEQ ID NO: 43269 - RNA, 19 nt, Artificial Sequence
  Synthetic oligonucleotide: BID-3937
cucaggucgcugcugaggc

SEQ ID NO: 43270 - RNA, 20 nt, Artificial Sequence
  Synthetic oligonucleotide: BID-1429
ccucaggucgcugcugaggc

SEQ ID NO: 43271 - RNA, 21 nt, Artificial Sequence
  Synthetic oligonucleotide: BID-3938
cccucaggucgcugcugaggc

SEQ ID NO: 43272 - RNA, 22 nt, Artificial Sequence
  Synthetic oligonucleotide: BID-3939
gcccucaggucgcugcugaggc

SEQ ID NO: 43273 - RNA, 23 nt, Artificial Sequence
  Synthetic oligonucleotide: BID-3940
ggcccucaggucgcugcugaggc

SEQ ID NO: 43274 - RNA, 24 nt, Artificial Sequence
  Synthetic oligonucleotide: BID-3941
cggcccucaggucgcugcugaggc

SEQ ID NO: 43275 - RNA, 18 nt, Artificial Sequence
  Synthetic oligonucleotide: BID-3942
caggcaggggucacgggc

SEQ ID NO: 43276 - RNA, 19 nt, Artificial Sequence
  Synthetic oligonucleotide: BID-3943
gcaggcaggggucacgggc

SEQ ID NO: 43277 - RNA, 20 nt, Artificial Sequence
  Synthetic oligonucleotide: BID-2231
ggcaggcaggggucacgggc

SEQ ID NO: 43278 - RNA, 21 nt, Artificial Sequence
  Synthetic oligonucleotide: BID-3944
cggcaggcaggggucacgggc

SEQ ID NO: 43279 - RNA, 22 nt, Artificial Sequence
  Synthetic oligonucleotide: BID-3945
gcggcaggcaggggucacgggc

SEQ ID NO: 43280 - RNA, 23 nt, Artificial Sequence
  Synthetic oligonucleotide: BID-3946
ggcggcaggcaggggucacgggc

SEQ ID NO: 43281 - RNA, 24 nt, Artificial Sequence
  Synthetic oligonucleotide: BID-3947
aggcggcaggcaggggucacgggc

SEQ ID NO: 43282 - RNA, 18 nt, Artificial Sequence
  Synthetic oligonucleotide: BID-3948
cccuccagccgcgggggc

SEQ ID NO: 43283 - RNA, 19 nt, Artificial Sequence
  Synthetic oligonucleotide: BID-3949
acccuccagccgcgggggc

SEQ ID NO: 43284 - RNA, 20 nt, Artificial Sequence
  Synthetic oligonucleotide: BID-1452
cacccuccagccgcgggggc

SEQ ID NO: 43285 - RNA, 21 nt, Artificial Sequence
  Synthetic oligonucleotide: BID-3950
ccacccuccagccgcgggggc

SEQ ID NO: 43286 - RNA, 22 nt, Artificial Sequence
  Synthetic oligonucleotide: BID-3951
accacccuccagccgcgggggc

SEQ ID NO: 43287 - RNA, 23 nt, Artificial Sequence
  Synthetic oligonucleotide: BID-3952
caccacccuccagccgcgggggc

SEQ ID NO: 43288 - RNA, 24 nt, Artificial Sequence
  Synthetic oligonucleotide: BID-3953
ucaccacccuccagccgcgggggc

SEQ ID NO: 43289 - RNA, 18 nt, Artificial Sequence
  Synthetic oligonucleotide: BID-3954
ggcaggugucugcggugc

SEQ ID NO: 43290 - RNA, 19 nt, Artificial Sequence
  Synthetic oligonucleotide: BID-3955
cggcaggugucugcggugc

SEQ ID NO: 43291 - RNA, 20 nt, Artificial Sequence
  Synthetic oligonucleotide: BID-2165
ccggcaggugucugcggugc

SEQ ID NO: 43292 - RNA, 21 nt, Artificial Sequence
  Synthetic oligonucleotide: BID-3956
gccggcaggugucugcggugc

SEQ ID NO: 43293 - RNA, 22 nt, Artificial Sequence
  Synthetic oligonucleotide: BID-3957
agccggcaggugucugcggugc

SEQ ID NO: 43294 - RNA, 23 nt, Artificial Sequence
  Synthetic oligonucleotide: BID-3958
gagccggcaggugucugcggugc

SEQ ID NO: 43295 - RNA, 24 nt, Artificial Sequence
  Synthetic oligonucleotide: BID-3959
ggagccggcaggugucugcggugc

SEQ ID NO: 43296 - RNA, 18 nt, Artificial Sequence
  Synthetic oligonucleotide: BID-3960
cagcccugagcuccgcuc

SEQ ID NO: 43297 - RNA, 19 nt, Artificial Sequence
  Synthetic oligonucleotide: BID-3961
ucagcccugagcuccgcuc

SEQ ID NO: 43298 - RNA, 20 nt, Artificial Sequence
  Synthetic oligonucleotide: BID-2160
gucagcccugagcuccgcuc

SEQ ID NO: 43299 - RNA, 21 nt, Artificial Sequence
  Synthetic oligonucleotide: BID-3962
ugucagcccugagcuccgcuc

SEQ ID NO: 43300 - RNA, 22 nt, Artificial Sequence
  Synthetic oligonucleotide: BID-3963
uugucagcccugagcuccgcuc

SEQ ID NO: 43301 - RNA, 23 nt, Artificial Sequence
  Synthetic oligonucleotide: BID-3964
uuugucagcccugagcuccgcuc

SEQ ID NO: 43302 - RNA, 24 nt, Artificial Sequence
  Synthetic oligonucleotide: BID-3965
cuuugucagcccugagcuccgcuc

SEQ ID NO: 43303 - RNA, 18 nt, Artificial Sequence
  Synthetic oligonucleotide: BID-3966
cgcggguuuucuccucuc

SEQ ID NO: 43304 - RNA, 19 nt, Artificial Sequence
  Synthetic oligonucleotide: BID-3967
ccgcggguuuucuccucuc

SEQ ID NO: 43305 - RNA, 20 nt, Artificial Sequence
  Synthetic oligonucleotide: BID-2180
cccgcggguuuucuccucuc

SEQ ID NO: 43306 - RNA, 21 nt, Artificial Sequence
  Synthetic oligonucleotide: BID-3968
gcccgcggguuuucuccucuc

SEQ ID NO: 43307 - RNA, 22 nt, Artificial Sequence
  Synthetic oligonucleotide: BID-3969
ggcccgcggguuuucuccucuc

SEQ ID NO: 43308 - RNA, 23 nt, Artificial Sequence
  Synthetic oligonucleotide: BID-3970
aggcccgcggguuuucuccucuc

SEQ ID NO: 43309 - RNA, 24 nt, Artificial Sequence
  Synthetic oligonucleotide: BID-3971
caggcccgcggguuuucuccucuc

SEQ ID NO: 43310 - RNA, 18 nt, Artificial Sequence
  Synthetic oligonucleotide: BID-3972
aggcggcaggcagggguc

SEQ ID NO: 43311 - RNA, 19 nt, Artificial Sequence
  Synthetic oligonucleotide: BID-3973
caggcggcaggcagggguc

SEQ ID NO: 43312 - RNA, 20 nt, Artificial Sequence
  Synthetic oligonucleotide: BID-1440
gcaggcggcaggcagggguc

SEQ ID NO: 43313 - RNA, 21 nt, Artificial Sequence
  Synthetic oligonucleotide: BID-3974
ggcaggcggcaggcagggguc

SEQ ID NO: 43314 - RNA, 22 nt, Artificial Sequence
  Synthetic oligonucleotide: BID-3975
gggcaggcggcaggcagggguc

SEQ ID NO: 43315 - RNA, 23 nt, Artificial Sequence
  Synthetic oligonucleotide: BID-3976
ggggcaggcggcaggcagggguc

SEQ ID NO: 43316 - RNA, 24 nt, Artificial Sequence
  Synthetic oligonucleotide: BID-3977
cggggcaggcggcaggcagggguc

SEQ ID NO: 43317 - RNA, 18 nt, Artificial Sequence
  Synthetic oligonucleotide: BID-3978
ccccaacccugccugcag

SEQ ID NO: 43318 - RNA, 19 nt, Artificial Sequence
  Synthetic oligonucleotide: BID-3979
gccccaacccugccugcag

SEQ ID NO: 43319 - RNA, 20 nt, Artificial Sequence
  Synthetic oligonucleotide: BID-1370
ugccccaacccugccugcag

SEQ ID NO: 43320 - RNA, 18 nt, Artificial Sequence
  Synthetic oligonucleotide: BID-3980
ccugccggccgcgccgag

SEQ ID NO: 43321 - RNA, 19 nt, Artificial Sequence
  Synthetic oligonucleotide: BID-3981
accugccggccgcgccgag

SEQ ID NO: 43322 - RNA, 20 nt, Artificial Sequence
  Synthetic oligonucleotide: BID-1416
gaccugccggccgcgccgag

SEQ ID NO: 43323 - RNA, 21 nt, Artificial Sequence
  Synthetic oligonucleotide: BID-3982
cgaccugccggccgcgccgag

SEQ ID NO: 43324 - RNA, 22 nt, Artificial Sequence
  Synthetic oligonucleotide: BID-3983
ccgaccugccggccgcgccgag

SEQ ID NO: 43325 - RNA, 23 nt, Artificial Sequence
  Synthetic oligonucleotide: BID-3984
accgaccugccggccgcgccgag

SEQ ID NO: 43326 - RNA, 24 nt, Artificial Sequence
  Synthetic oligonucleotide: BID-3985
caccgaccugccggccgcgccgag

SEQ ID NO: 43327 - RNA, 18 nt, Artificial Sequence
  Synthetic oligonucleotide: BID-3986
gccuuccccgccuccgag

SEQ ID NO: 43328 - RNA, 19 nt, Artificial Sequence
  Synthetic oligonucleotide: BID-3987
agccuuccccgccuccgag

SEQ ID NO: 43329 - RNA, 20 nt, Artificial Sequence
  Synthetic oligonucleotide: BID-1412
aagccuuccccgccuccgag

SEQ ID NO: 43330 - RNA, 21 nt, Artificial Sequence
  Synthetic oligonucleotide: BID-3988
aaagccuuccccgccuccgag

SEQ ID NO: 43331 - RNA, 22 nt, Artificial Sequence
  Synthetic oligonucleotide: BID-3989
caaagccuuccccgccuccgag

SEQ ID NO: 43332 - RNA, 23 nt, Artificial Sequence
  Synthetic oligonucleotide: BID-3990
acaaagccuuccccgccuccgag

SEQ ID NO: 43333 - RNA, 24 nt, Artificial Sequence
  Synthetic oligonucleotide: BID-3991
aacaaagccuuccccgccuccgag

SEQ ID NO: 43334 - RNA, 18 nt, Artificial Sequence
  Synthetic oligonucleotide: BID-3992
gagggcgcccgggcggag

SEQ ID NO: 43335 - RNA, 19 nt, Artificial Sequence
  Synthetic oligonucleotide: BID-3993
ggagggcgcccgggcggag

SEQ ID NO: 43336 - RNA, 20 nt, Artificial Sequence
  Synthetic oligonucleotide: BID-2199
aggagggcgcccgggcggag

SEQ ID NO: 43337 - RNA, 21 nt, Artificial Sequence
  Synthetic oligonucleotide: BID-3994
gaggagggcgcccgggcggag

SEQ ID NO: 43338 - RNA, 22 nt, Artificial Sequence
  Synthetic oligonucleotide: BID-3995
cgaggagggcgcccgggcggag

SEQ ID NO: 43339 - RNA, 23 nt, Artificial Sequence
  Synthetic oligonucleotide: BID-3996
ccgaggagggcgcccgggcggag

SEQ ID NO: 43340 - RNA, 24 nt, Artificial Sequence
  Synthetic oligonucleotide: BID-3997
gccgaggagggcgcccgggcggag

SEQ ID NO: 43341 - RNA, 18 nt, Artificial Sequence
  Synthetic oligonucleotide: BID-3998
cgcccgggcggaggggag

SEQ ID NO: 43342 - RNA, 19 nt, Artificial Sequence
  Synthetic oligonucleotide: BID-3999
gcgcccgggcggaggggag

SEQ ID NO: 43343 - RNA, 20 nt, Artificial Sequence
  Synthetic oligonucleotide: BID-1424
ggcgcccgggcggaggggag

SEQ ID NO: 43344 - RNA, 21 nt, Artificial Sequence
  Synthetic oligonucleotide: BID-4000
gggcgcccgggcggaggggag

SEQ ID NO: 43345 - RNA, 22 nt, Artificial Sequence
  Synthetic oligonucleotide: BID-4001
agggcgcccgggcggaggggag

SEQ ID NO: 43346 - RNA, 23 nt, Artificial Sequence
  Synthetic oligonucleotide: BID-4002
gagggcgcccgggcggaggggag

SEQ ID NO: 43347 - RNA, 24 nt, Artificial Sequence
  Synthetic oligonucleotide: BID-4003
ggagggcgcccgggcggaggggag

SEQ ID NO: 43348 - RNA, 18 nt, Artificial Sequence
  Synthetic oligonucleotide: BID-4004
cugaauccccaggccacg

SEQ ID NO: 43349 - RNA, 19 nt, Artificial Sequence
  Synthetic oligonucleotide: BID-4005
ccugaauccccaggccacg

SEQ ID NO: 43350 - RNA, 20 nt, Artificial Sequence
  Synthetic oligonucleotide: BID-2186
cccugaauccccaggccacg

SEQ ID NO: 43351 - RNA, 21 nt, Artificial Sequence
  Synthetic oligonucleotide: BID-4006
ccccugaauccccaggccacg

SEQ ID NO: 43352 - RNA, 22 nt, Artificial Sequence
  Synthetic oligonucleotide: BID-4007
uccccugaauccccaggccacg

SEQ ID NO: 43353 - RNA, 23 nt, Artificial Sequence
  Synthetic oligonucleotide: BID-4008
cuccccugaauccccaggccacg

SEQ ID NO: 43354 - RNA, 24 nt, Artificial Sequence
  Synthetic oligonucleotide: BID-4009
ccuccccugaauccccaggccacg

SEQ ID NO: 43355 - RNA, 18 nt, Artificial Sequence
  Synthetic oligonucleotide: BID-4010
cgggcccugagcuccacg

SEQ ID NO: 43356 - RNA, 19 nt, Artificial Sequence
  Synthetic oligonucleotide: BID-4011
gcgggcccugagcuccacg

SEQ ID NO: 43357 - RNA, 20 nt, Artificial Sequence
  Synthetic oligonucleotide: BID-1436
ggcgggcccugagcuccacg

SEQ ID NO: 43358 - RNA, 21 nt, Artificial Sequence
  Synthetic oligonucleotide: BID-4012
cggcgggcccugagcuccacg

SEQ ID NO: 43359 - RNA, 22 nt, Artificial Sequence
  Synthetic oligonucleotide: BID-4013
gcggcgggcccugagcuccacg

SEQ ID NO: 43360 - RNA, 23 nt, Artificial Sequence
  Synthetic oligonucleotide: BID-4014
ggcggcgggcccugagcuccacg

SEQ ID NO: 43361 - RNA, 24 nt, Artificial Sequence
  Synthetic oligonucleotide: BID-4015
gggcggcgggcccugagcuccacg

SEQ ID NO: 43362 - RNA, 18 nt, Artificial Sequence
  Synthetic oligonucleotide: BID-4016
cucaccacccuccagccg

SEQ ID NO: 43363 - RNA, 19 nt, Artificial Sequence
  Synthetic oligonucleotide: BID-4017
acucaccacccuccagccg

SEQ ID NO: 43364 - RNA, 20 nt, Artificial Sequence
  Synthetic oligonucleotide: BID-2242
cacucaccacccuccagccg

SEQ ID NO: 43365 - RNA, 21 nt, Artificial Sequence
  Synthetic oligonucleotide: BID-4018
gcacucaccacccuccagccg

SEQ ID NO: 43366 - RNA, 22 nt, Artificial Sequence
  Synthetic oligonucleotide: BID-4019
ugcacucaccacccuccagccg

SEQ ID NO: 43367 - RNA, 23 nt, Artificial Sequence
  Synthetic oligonucleotide: BID-4020
gugcacucaccacccuccagccg

SEQ ID NO: 43368 - RNA, 24 nt, Artificial Sequence
  Synthetic oligonucleotide: BID-4021
ggugcacucaccacccuccagccg

SEQ ID NO: 43369 - RNA, 18 nt, Artificial Sequence
  Synthetic oligonucleotide: BID-4022
ugaaggccgguccagccg

SEQ ID NO: 43370 - RNA, 19 nt, Artificial Sequence
  Synthetic oligonucleotide: BID-4023
gugaaggccgguccagccg

SEQ ID NO: 43371 - RNA, 20 nt, Artificial Sequence
  Synthetic oligonucleotide: BID-1371
ggugaaggccgguccagccg

SEQ ID NO: 43372 - RNA, 21 nt, Artificial Sequence
  Synthetic oligonucleotide: BID-4024
aggugaaggccgguccagccg

SEQ ID NO: 43373 - RNA, 22 nt, Artificial Sequence
  Synthetic oligonucleotide: BID-4025
caggugaaggccgguccagccg

SEQ ID NO: 43374 - RNA, 23 nt, Artificial Sequence
  Synthetic oligonucleotide: BID-4026
gcaggugaaggccgguccagccg

SEQ ID NO: 43375 - RNA, 24 nt, Artificial Sequence
  Synthetic oligonucleotide: BID-4027
ugcaggugaaggccgguccagccg

SEQ ID NO: 43376 - RNA, 18 nt, Artificial Sequence
  Synthetic oligonucleotide: BID-4028
gaccugccggccgcgccg

SEQ ID NO: 43377 - RNA, 19 nt, Artificial Sequence
  Synthetic oligonucleotide: BID-4029
cgaccugccggccgcgccg

SEQ ID NO: 43378 - RNA, 20 nt, Artificial Sequence
  Synthetic oligonucleotide: BID-2191
ccgaccugccggccgcgccg

SEQ ID NO: 43379 - RNA, 21 nt, Artificial Sequence
  Synthetic oligonucleotide: BID-4030
accgaccugccggccgcgccg

SEQ ID NO: 43380 - RNA, 22 nt, Artificial Sequence
  Synthetic oligonucleotide: BID-4031
caccgaccugccggccgcgccg

SEQ ID NO: 43381 - RNA, 23 nt, Artificial Sequence
  Synthetic oligonucleotide: BID-4032
gcaccgaccugccggccgcgccg

SEQ ID NO: 43382 - RNA, 24 nt, Artificial Sequence
  Synthetic oligonucleotide: BID-4033
agcaccgaccugccggccgcgccg

SEQ ID NO: 43383 - RNA, 18 nt, Artificial Sequence
  Synthetic oligonucleotide: BID-4034
accgaccugccggccgcg

SEQ ID NO: 43384 - RNA, 19 nt, Artificial Sequence
  Synthetic oligonucleotide: BID-4035
caccgaccugccggccgcg

SEQ ID NO: 43385 - RNA, 20 nt, Artificial Sequence
  Synthetic oligonucleotide: BID-1413
gcaccgaccugccggccgcg

SEQ ID NO: 43386 - RNA, 21 nt, Artificial Sequence
  Synthetic oligonucleotide: BID-4036
agcaccgaccugccggccgcg

SEQ ID NO: 43387 - RNA, 22 nt, Artificial Sequence
  Synthetic oligonucleotide: BID-4037
cagcaccgaccugccggccgcg

SEQ ID NO: 43388 - RNA, 23 nt, Artificial Sequence
  Synthetic oligonucleotide: BID-4038
ucagcaccgaccugccggccgcg

SEQ ID NO: 43389 - RNA, 24 nt, Artificial Sequence
  Synthetic oligonucleotide: BID-4039
cucagcaccgaccugccggccgcg

SEQ ID NO: 43390 - RNA, 18 nt, Artificial Sequence
  Synthetic oligonucleotide: BID-4040
gaggagggcgcccgggcg

SEQ ID NO: 43391 - RNA, 19 nt, Artificial Sequence
  Synthetic oligonucleotide: BID-4041
cgaggagggcgcccgggcg

SEQ ID NO: 43392 - RNA, 20 nt, Artificial Sequence
  Synthetic oligonucleotide: BID-1420
ccgaggagggcgcccgggcg

SEQ ID NO: 43393 - RNA, 21 nt, Artificial Sequence
  Synthetic oligonucleotide: BID-4042
gccgaggagggcgcccgggcg

SEQ ID NO: 43394 - RNA, 22 nt, Artificial Sequence
  Synthetic oligonucleotide: BID-4043
cgccgaggagggcgcccgggcg

SEQ ID NO: 43395 - RNA, 23 nt, Artificial Sequence
  Synthetic oligonucleotide: BID-4044
gcgccgaggagggcgcccgggcg

SEQ ID NO: 43396 - RNA, 24 nt, Artificial Sequence
  Synthetic oligonucleotide: BID-4045
cgcgccgaggagggcgcccgggcg

SEQ ID NO: 43397 - RNA, 18 nt, Artificial Sequence
  Synthetic oligonucleotide: BID-4046
ucgggcccagggcgggcg

SEQ ID NO: 43398 - RNA, 19 nt, Artificial Sequence
  Synthetic oligonucleotide: BID-4047
gucgggcccagggcgggcg

SEQ ID NO: 43399 - RNA, 20 nt, Artificial Sequence
  Synthetic oligonucleotide: BID-1434
ggucgggcccagggcgggcg

SEQ ID NO: 43400 - RNA, 21 nt, Artificial Sequence
  Synthetic oligonucleotide: BID-4048
cggucgggcccagggcgggcg

SEQ ID NO: 43401 - RNA, 22 nt, Artificial Sequence
  Synthetic oligonucleotide: BID-4049
gcggucgggcccagggcgggcg

SEQ ID NO: 43402 - RNA, 23 nt, Artificial Sequence
  Synthetic oligonucleotide: BID-4050
cgcggucgggcccagggcgggcg

SEQ ID NO: 43403 - RNA, 24 nt, Artificial Sequence
  Synthetic oligonucleotide: BID-4051
ccgcggucgggcccagggcgggcg

SEQ ID NO: 43404 - RNA, 18 nt, Artificial Sequence
  Synthetic oligonucleotide: BID-4052
accgcggucgggcccagg

SEQ ID NO: 43405 - RNA, 19 nt, Artificial Sequence
  Synthetic oligonucleotide: BID-4053
caccgcggucgggcccagg

SEQ ID NO: 43406 - RNA, 20 nt, Artificial Sequence
  Synthetic oligonucleotide: BID-1433
ccaccgcggucgggcccagg

SEQ ID NO: 43407 - RNA, 21 nt, Artificial Sequence
  Synthetic oligonucleotide: BID-4054
cccaccgcggucgggcccagg

SEQ ID NO: 43408 - RNA, 22 nt, Artificial Sequence
  Synthetic oligonucleotide: BID-4055
ucccaccgcggucgggcccagg

SEQ ID NO: 43409 - RNA, 23 nt, Artificial Sequence
  Synthetic oligonucleotide: BID-4056
cucccaccgcggucgggcccagg

SEQ ID NO: 43410 - RNA, 24 nt, Artificial Sequence
  Synthetic oligonucleotide: BID-4057
gcucccaccgcggucgggcccagg

SEQ ID NO: 43411 - RNA, 18 nt, Artificial Sequence
  Synthetic oligonucleotide: BID-4058
gccggggcaggcggcagg

SEQ ID NO: 43412 - RNA, 19 nt, Artificial Sequence
  Synthetic oligonucleotide: BID-4059
cgccggggcaggcggcagg

SEQ ID NO: 43413 - RNA, 20 nt, Artificial Sequence
  Synthetic oligonucleotide: BID-1438
acgccggggcaggcggcagg

SEQ ID NO: 43414 - RNA, 21 nt, Artificial Sequence
  Synthetic oligonucleotide: BID-4060
cacgccggggcaggcggcagg

SEQ ID NO: 43415 - RNA, 22 nt, Artificial Sequence
  Synthetic oligonucleotide: BID-4061
ccacgccggggcaggcggcagg

SEQ ID NO: 43416 - RNA, 23 nt, Artificial Sequence
  Synthetic oligonucleotide: BID-4062
uccacgccggggcaggcggcagg

SEQ ID NO: 43417 - RNA, 24 nt, Artificial Sequence
  Synthetic oligonucleotide: BID-4063
cuccacgccggggcaggcggcagg

SEQ ID NO: 43418 - RNA, 18 nt, Artificial Sequence
  Synthetic oligonucleotide: BID-4064
gcccgggcggaggggagg

SEQ ID NO: 43419 - RNA, 19 nt, Artificial Sequence
  Synthetic oligonucleotide: BID-4065
cgcccgggcggaggggagg

SEQ ID NO: 43420 - RNA, 20 nt, Artificial Sequence
  Synthetic oligonucleotide: BID-2201
gcgcccgggcggaggggagg

SEQ ID NO: 43421 - RNA, 21 nt, Artificial Sequence
  Synthetic oligonucleotide: BID-4066
ggcgcccgggcggaggggagg

SEQ ID NO: 43422 - RNA, 22 nt, Artificial Sequence
  Synthetic oligonucleotide: BID-4067
gggcgcccgggcggaggggagg

SEQ ID NO: 43423 - RNA, 23 nt, Artificial Sequence
  Synthetic oligonucleotide: BID-4068
agggcgcccgggcggaggggagg

SEQ ID NO: 43424 - RNA, 24 nt, Artificial Sequence
  Synthetic oligonucleotide: BID-4069
gagggcgcccgggcggaggggagg

SEQ ID NO: 43425 - RNA, 18 nt, Artificial Sequence
  Synthetic oligonucleotide: BID-4070
gcucggcgcguaccccgg

SEQ ID NO: 43426 - RNA, 19 nt, Artificial Sequence
  Synthetic oligonucleotide: BID-4071
ggcucggcgcguaccccgg

SEQ ID NO: 43427 - RNA, 20 nt, Artificial Sequence
  Synthetic oligonucleotide: BID-1446
gggcucggcgcguaccccgg

SEQ ID NO: 43428 - RNA, 21 nt, Artificial Sequence
  Synthetic oligonucleotide: BID-4072
ggggcucggcgcguaccccgg

SEQ ID NO: 43429 - RNA, 22 nt, Artificial Sequence
  Synthetic oligonucleotide: BID-4073
uggggcucggcgcguaccccgg

SEQ ID NO: 43430 - RNA, 23 nt, Artificial Sequence
  Synthetic oligonucleotide: BID-4074
cuggggcucggcgcguaccccgg

SEQ ID NO: 43431 - RNA, 24 nt, Artificial Sequence
  Synthetic oligonucleotide: BID-4075
gcuggggcucggcgcguaccccgg

SEQ ID NO: 43432 - RNA, 18 nt, Artificial Sequence
  Synthetic oligonucleotide: BID-4076
gccgaggagggcgcccgg

SEQ ID NO: 43433 - RNA, 19 nt, Artificial Sequence
  Synthetic oligonucleotide: BID-4077
cgccgaggagggcgcccgg

SEQ ID NO: 43434 - RNA, 20 nt, Artificial Sequence
  Synthetic oligonucleotide: BID-1418
gcgccgaggagggcgcccgg

SEQ ID NO: 43435 - RNA, 21 nt, Artificial Sequence
  Synthetic oligonucleotide: BID-4078
cgcgccgaggagggcgcccgg

SEQ ID NO: 43436 - RNA, 22 nt, Artificial Sequence
  Synthetic oligonucleotide: BID-4079
ccgcgccgaggagggcgcccgg

SEQ ID NO: 43437 - RNA, 23 nt, Artificial Sequence
  Synthetic oligonucleotide: BID-4080
gccgcgccgaggagggcgcccgg

SEQ ID NO: 43438 - RNA, 24 nt, Artificial Sequence
  Synthetic oligonucleotide: BID-4081
ggccgcgccgaggagggcgcccgg

SEQ ID NO: 43439 - RNA, 18 nt, Artificial Sequence
  Synthetic oligonucleotide: BID-4082
cagugcucuaaggagcgg

SEQ ID NO: 43440 - RNA, 19 nt, Artificial Sequence
  Synthetic oligonucleotide: BID-4083
ccagugcucuaaggagcgg

SEQ ID NO: 43441 - RNA, 20 nt, Artificial Sequence
  Synthetic oligonucleotide: BID-1389
gccagugcucuaaggagcgg

SEQ ID NO: 43442 - RNA, 21 nt, Artificial Sequence
  Synthetic oligonucleotide: BID-4084
ugccagugcucuaaggagcgg

SEQ ID NO: 43443 - RNA, 22 nt, Artificial Sequence
  Synthetic oligonucleotide: BID-4085
uugccagugcucuaaggagcgg

SEQ ID NO: 43444 - RNA, 23 nt, Artificial Sequence
  Synthetic oligonucleotide: BID-4086
auugccagugcucuaaggagcgg

SEQ ID NO: 43445 - RNA, 24 nt, Artificial Sequence
  Synthetic oligonucleotide: BID-4087
cauugccagugcucuaaggagcgg

SEQ ID NO: 43446 - RNA, 18 nt, Artificial Sequence
  Synthetic oligonucleotide: BID-4088
cucuggcucccaccgcgg

SEQ ID NO: 43447 - RNA, 19 nt, Artificial Sequence
  Synthetic oligonucleotide: BID-4089
ccucuggcucccaccgcgg

SEQ ID NO: 43448 - RNA, 20 nt, Artificial Sequence
  Synthetic oligonucleotide: BID-1431
uccucuggcucccaccgcgg

SEQ ID NO: 43449 - RNA, 21 nt, Artificial Sequence
  Synthetic oligonucleotide: BID-4090
cuccucuggcucccaccgcgg

SEQ ID NO: 43450 - RNA, 22 nt, Artificial Sequence
  Synthetic oligonucleotide: BID-4091
ccuccucuggcucccaccgcgg

SEQ ID NO: 43451 - RNA, 23 nt, Artificial Sequence
  Synthetic oligonucleotide: BID-4092
cccuccucuggcucccaccgcgg

SEQ ID NO: 43452 - RNA, 24 nt, Artificial Sequence
  Synthetic oligonucleotide: BID-4093
ccccuccucuggcucccaccgcgg

SEQ ID NO: 43453 - RNA, 18 nt, Artificial Sequence
  Synthetic oligonucleotide: BID-4094
cgggcggaggggaggcgg

SEQ ID NO: 43454 - RNA, 19 nt, Artificial Sequence
  Synthetic oligonucleotide: BID-4095
ccgggcggaggggaggcgg

SEQ ID NO: 43455 - RNA, 20 nt, Artificial Sequence
  Synthetic oligonucleotide: BID-1427
cccgggcggaggggaggcgg

SEQ ID NO: 43456 - RNA, 21 nt, Artificial Sequence
  Synthetic oligonucleotide: BID-4096
gcccgggcggaggggaggcgg

SEQ ID NO: 43457 - RNA, 22 nt, Artificial Sequence
  Synthetic oligonucleotide: BID-4097
cgcccgggcggaggggaggcgg

SEQ ID NO: 43458 - RNA, 23 nt, Artificial Sequence
  Synthetic oligonucleotide: BID-4098
gcgcccgggcggaggggaggcgg

SEQ ID NO: 43459 - RNA, 24 nt, Artificial Sequence
  Synthetic oligonucleotide: BID-4099
ggcgcccgggcggaggggaggcgg

SEQ ID NO: 43460 - RNA, 18 nt, Artificial Sequence
  Synthetic oligonucleotide: BID-4100
aggagggcgcccgggcgg

SEQ ID NO: 43461 - RNA, 19 nt, Artificial Sequence
  Synthetic oligonucleotide: BID-4101
gaggagggcgcccgggcgg

SEQ ID NO: 43462 - RNA, 20 nt, Artificial Sequence
  Synthetic oligonucleotide: BID-2197
cgaggagggcgcccgggcgg

SEQ ID NO: 43463 - RNA, 21 nt, Artificial Sequence
  Synthetic oligonucleotide: BID-4102
ccgaggagggcgcccgggcgg

SEQ ID NO: 43464 - RNA, 22 nt, Artificial Sequence
  Synthetic oligonucleotide: BID-4103
gccgaggagggcgcccgggcgg

SEQ ID NO: 43465 - RNA, 23 nt, Artificial Sequence
  Synthetic oligonucleotide: BID-4104
cgccgaggagggcgcccgggcgg

SEQ ID NO: 43466 - RNA, 24 nt, Artificial Sequence
  Synthetic oligonucleotide: BID-4105
gcgccgaggagggcgcccgggcgg

SEQ ID NO: 43467 - RNA, 18 nt, Artificial Sequence
  Synthetic oligonucleotide: BID-4106
gcccugagcuccgcucgg

SEQ ID NO: 43468 - RNA, 19 nt, Artificial Sequence
  Synthetic oligonucleotide: BID-4107
agcccugagcuccgcucgg

SEQ ID NO: 43469 - RNA, 20 nt, Artificial Sequence
  Synthetic oligonucleotide: BID-1394
cagcccugagcuccgcucgg

SEQ ID NO: 43470 - RNA, 21 nt, Artificial Sequence
  Synthetic oligonucleotide: BID-4108
ucagcccugagcuccgcucgg

SEQ ID NO: 43471 - RNA, 22 nt, Artificial Sequence
  Synthetic oligonucleotide: BID-4109
gucagcccugagcuccgcucgg

SEQ ID NO: 43472 - RNA, 23 nt, Artificial Sequence
  Synthetic oligonucleotide: BID-4110
ugucagcccugagcuccgcucgg

SEQ ID NO: 43473 - RNA, 24 nt, Artificial Sequence
  Synthetic oligonucleotide: BID-4111
uugucagcccugagcuccgcucgg

SEQ ID NO: 43474 - RNA, 18 nt, Artificial Sequence
  Synthetic oligonucleotide: BID-4112
gcaggcaggggucacggg

SEQ ID NO: 43475 - RNA, 19 nt, Artificial Sequence
  Synthetic oligonucleotide: BID-4113
ggcaggcaggggucacggg

SEQ ID NO: 43476 - RNA, 20 nt, Artificial Sequence
  Synthetic oligonucleotide: BID-1441
cggcaggcaggggucacggg

SEQ ID NO: 43477 - RNA, 21 nt, Artificial Sequence
  Synthetic oligonucleotide: BID-4114
gcggcaggcaggggucacggg

SEQ ID NO: 43478 - RNA, 22 nt, Artificial Sequence
  Synthetic oligonucleotide: BID-4115
ggcggcaggcaggggucacggg

SEQ ID NO: 43479 - RNA, 23 nt, Artificial Sequence
  Synthetic oligonucleotide: BID-4116
aggcggcaggcaggggucacggg

SEQ ID NO: 43480 - RNA, 24 nt, Artificial Sequence
  Synthetic oligonucleotide: BID-4117
caggcggcaggcaggggucacggg

SEQ ID NO: 43481 - RNA, 18 nt, Artificial Sequence
  Synthetic oligonucleotide: BID-4118
cucggcgcguaccccggg

SEQ ID NO: 43482 - RNA, 19 nt, Artificial Sequence
  Synthetic oligonucleotide: BID-4119
gcucggcgcguaccccggg

SEQ ID NO: 43483 - RNA, 20 nt, Artificial Sequence
  Synthetic oligonucleotide: BID-2237
ggcucggcgcguaccccggg

SEQ ID NO: 43484 - RNA, 21 nt, Artificial Sequence
  Synthetic oligonucleotide: BID-4120
gggcucggcgcguaccccggg

SEQ ID NO: 43485 - RNA, 22 nt, Artificial Sequence
  Synthetic oligonucleotide: BID-4121
ggggcucggcgcguaccccggg

SEQ ID NO: 43486 - RNA, 23 nt, Artificial Sequence
  Synthetic oligonucleotide: BID-4122
uggggcucggcgcguaccccggg

SEQ ID NO: 43487 - RNA, 24 nt, Artificial Sequence
  Synthetic oligonucleotide: BID-4123
cuggggcucggcgcguaccccggg

SEQ ID NO: 43488 - RNA, 18 nt, Artificial Sequence
  Synthetic oligonucleotide: BID-4124
ccgaggagggcgcccggg

SEQ ID NO: 43489 - RNA, 19 nt, Artificial Sequence
  Synthetic oligonucleotide: BID-4125
gccgaggagggcgcccggg

SEQ ID NO: 43490 - RNA, 20 nt, Artificial Sequence
  Synthetic oligonucleotide: BID-2196
cgccgaggagggcgcccggg

SEQ ID NO: 43491 - RNA, 21 nt, Artificial Sequence
  Synthetic oligonucleotide: BID-4126
gcgccgaggagggcgcccggg

SEQ ID NO: 43492 - RNA, 22 nt, Artificial Sequence
  Synthetic oligonucleotide: BID-4127
cgcgccgaggagggcgcccggg

SEQ ID NO: 43493 - RNA, 23 nt, Artificial Sequence
  Synthetic oligonucleotide: BID-4128
ccgcgccgaggagggcgcccggg

SEQ ID NO: 43494 - RNA, 24 nt, Artificial Sequence
  Synthetic oligonucleotide: BID-4129
gccgcgccgaggagggcgcccggg

SEQ ID NO: 43495 - RNA, 18 nt, Artificial Sequence
  Synthetic oligonucleotide: BID-4130
ggcgcgggcgcguccggg

SEQ ID NO: 43496 - RNA, 19 nt, Artificial Sequence
  Synthetic oligonucleotide: BID-4131
gggcgcgggcgcguccggg

SEQ ID NO: 43497 - RNA, 20 nt, Artificial Sequence
  Synthetic oligonucleotide: BID-1454
ggggcgcgggcgcguccggg

SEQ ID NO: 43498 - RNA, 21 nt, Artificial Sequence
  Synthetic oligonucleotide: BID-4132
gggggcgcgggcgcguccggg

SEQ ID NO: 43499 - RNA, 22 nt, Artificial Sequence
  Synthetic oligonucleotide: BID-4133
cgggggcgcgggcgcguccggg

SEQ ID NO: 43500 - RNA, 23 nt, Artificial Sequence
  Synthetic oligonucleotide: BID-4134
gcgggggcgcgggcgcguccggg

SEQ ID NO: 43501 - RNA, 24 nt, Artificial Sequence
  Synthetic oligonucleotide: BID-4135
cgcgggggcgcgggcgcguccggg

SEQ ID NO: 43502 - RNA, 18 nt, Artificial Sequence
  Synthetic oligonucleotide: BID-4136
cccugagcuccgcucggg

SEQ ID NO: 43503 - RNA, 19 nt, Artificial Sequence
  Synthetic oligonucleotide: BID-4137
gcccugagcuccgcucggg

SEQ ID NO: 43504 - RNA, 20 nt, Artificial Sequence
  Synthetic oligonucleotide: BID-2161
agcccugagcuccgcucggg

SEQ ID NO: 43505 - RNA, 21 nt, Artificial Sequence
  Synthetic oligonucleotide: BID-4138
cagcccugagcuccgcucggg

SEQ ID NO: 43506 - RNA, 22 nt, Artificial Sequence
  Synthetic oligonucleotide: BID-4139
ucagcccugagcuccgcucggg

SEQ ID NO: 43507 - RNA, 23 nt, Artificial Sequence
  Synthetic oligonucleotide: BID-4140
gucagcccugagcuccgcucggg

SEQ ID NO: 43508 - RNA, 24 nt, Artificial Sequence
  Synthetic oligonucleotide: BID-4141
ugucagcccugagcuccgcucggg

SEQ ID NO: 43509 - RNA, 18 nt, Artificial Sequence
  Synthetic oligonucleotide: BID-4142
gaaagaccacgguguggg

SEQ ID NO: 43510 - RNA, 19 nt, Artificial Sequence
  Synthetic oligonucleotide: BID-4143
ggaaagaccacgguguggg

SEQ ID NO: 43511 - RNA, 20 nt, Artificial Sequence
  Synthetic oligonucleotide: BID-2169
uggaaagaccacgguguggg

SEQ ID NO: 43512 - RNA, 21 nt, Artificial Sequence
  Synthetic oligonucleotide: BID-4144
cuggaaagaccacgguguggg

SEQ ID NO: 43513 - RNA, 22 nt, Artificial Sequence
  Synthetic oligonucleotide: BID-4145
gcuggaaagaccacgguguggg

SEQ ID NO: 43514 - RNA, 23 nt, Artificial Sequence
  Synthetic oligonucleotide: BID-4146
ugcuggaaagaccacgguguggg

SEQ ID NO: 43515 - RNA, 24 nt, Artificial Sequence
  Synthetic oligonucleotide: BID-4147
gugcuggaaagaccacgguguggg

SEQ ID NO: 43516 - RNA, 18 nt, Artificial Sequence
  Synthetic oligonucleotide: BID-4148
agcccagccacuuggugg

SEQ ID NO: 43517 - RNA, 19 nt, Artificial Sequence
  Synthetic oligonucleotide: BID-4149
cagcccagccacuuggugg

SEQ ID NO: 43518 - RNA, 20 nt, Artificial Sequence
  Synthetic oligonucleotide: BID-1378
ccagcccagccacuuggugg

SEQ ID NO: 43519 - RNA, 21 nt, Artificial Sequence
  Synthetic oligonucleotide: BID-4150
gccagcccagccacuuggugg

SEQ ID NO: 43520 - RNA, 22 nt, Artificial Sequence
  Synthetic oligonucleotide: BID-4151
ugccagcccagccacuuggugg

SEQ ID NO: 43521 - RNA, 23 nt, Artificial Sequence
  Synthetic oligonucleotide: BID-4152
uugccagcccagccacuuggugg

SEQ ID NO: 43522 - RNA, 24 nt, Artificial Sequence
  Synthetic oligonucleotide: BID-4153
cuugccagcccagccacuuggugg

SEQ ID NO: 43523 - RNA, 18 nt, Artificial Sequence
  Synthetic oligonucleotide: BID-4154
ggaaagaccacggugugg

SEQ ID NO: 43524 - RNA, 19 nt, Artificial Sequence
  Synthetic oligonucleotide: BID-4155
uggaaagaccacggugugg

SEQ ID NO: 43525 - RNA, 20 nt, Artificial Sequence
  Synthetic oligonucleotide: BID-1399
cuggaaagaccacggugugg

SEQ ID NO: 43526 - RNA, 21 nt, Artificial Sequence
  Synthetic oligonucleotide: BID-4156
gcuggaaagaccacggugugg

SEQ ID NO: 43527 - RNA, 22 nt, Artificial Sequence
  Synthetic oligonucleotide: BID-4157
ugcuggaaagaccacggugugg

SEQ ID NO: 43528 - RNA, 23 nt, Artificial Sequence
  Synthetic oligonucleotide: BID-4158
gugcuggaaagaccacggugugg

SEQ ID NO: 43529 - RNA, 24 nt, Artificial Sequence
  Synthetic oligonucleotide: BID-4159
ggugcuggaaagaccacggugugg

SEQ ID NO: 43530 - RNA, 18 nt, Artificial Sequence
  Synthetic oligonucleotide: BID-4160
ccggcccucaggucgcug

SEQ ID NO: 43531 - RNA, 19 nt, Artificial Sequence
  Synthetic oligonucleotide: BID-4161
cccggcccucaggucgcug

SEQ ID NO: 43532 - RNA, 20 nt, Artificial Sequence
  Synthetic oligonucleotide: BID-1428
acccggcccucaggucgcug

SEQ ID NO: 43533 - RNA, 21 nt, Artificial Sequence
  Synthetic oligonucleotide: BID-4162
gacccggcccucaggucgcug

SEQ ID NO: 43534 - RNA, 22 nt, Artificial Sequence
  Synthetic oligonucleotide: BID-4163
agacccggcccucaggucgcug

SEQ ID NO: 43535 - RNA, 23 nt, Artificial Sequence
  Synthetic oligonucleotide: BID-4164
gagacccggcccucaggucgcug

SEQ ID NO: 43536 - RNA, 24 nt, Artificial Sequence
  Synthetic oligonucleotide: BID-4165
agagacccggcccucaggucgcug

SEQ ID NO: 43537 - RNA, 18 nt, Artificial Sequence
  Synthetic oligonucleotide: BID-4166
gaauccccaggccacgug

SEQ ID NO: 43538 - RNA, 19 nt, Artificial Sequence
  Synthetic oligonucleotide: BID-4167
ugaauccccaggccacgug

SEQ ID NO: 43539 - RNA, 20 nt, Artificial Sequence
  Synthetic oligonucleotide: BID-1409
cugaauccccaggccacgug

SEQ ID NO: 43540 - RNA, 21 nt, Artificial Sequence
  Synthetic oligonucleotide: BID-4168
ccugaauccccaggccacgug

SEQ ID NO: 43541 - RNA, 22 nt, Artificial Sequence
  Synthetic oligonucleotide: BID-4169
cccugaauccccaggccacgug

SEQ ID NO: 43542 - RNA, 23 nt, Artificial Sequence
  Synthetic oligonucleotide: BID-4170
ccccugaauccccaggccacgug

SEQ ID NO: 43543 - RNA, 24 nt, Artificial Sequence
  Synthetic oligonucleotide: BID-4171
uccccugaauccccaggccacgug

SEQ ID NO: 43544 - RNA, 18 nt, Artificial Sequence
  Synthetic oligonucleotide: BID-4172
cggcaggugucugcggug

SEQ ID NO: 43545 - RNA, 19 nt, Artificial Sequence
  Synthetic oligonucleotide: BID-4173
ccggcaggugucugcggug

SEQ ID NO: 43546 - RNA, 20 nt, Artificial Sequence
  Synthetic oligonucleotide: BID-1396
gccggcaggugucugcggug

SEQ ID NO: 43547 - RNA, 21 nt, Artificial Sequence
  Synthetic oligonucleotide: BID-4174
agccggcaggugucugcggug

SEQ ID NO: 43548 - RNA, 22 nt, Artificial Sequence
  Synthetic oligonucleotide: BID-4175
gagccggcaggugucugcggug

SEQ ID NO: 43549 - RNA, 23 nt, Artificial Sequence
  Synthetic oligonucleotide: BID-4176
ggagccggcaggugucugcggug

SEQ ID NO: 43550 - RNA, 24 nt, Artificial Sequence
  Synthetic oligonucleotide: BID-4177
aggagccggcaggugucugcggug

SEQ ID NO: 43551 - RNA, 18 nt, Artificial Sequence
  Synthetic oligonucleotide: BID-4178
acaaagccuuccccgccu

SEQ ID NO: 43552 - RNA, 19 nt, Artificial Sequence
  Synthetic oligonucleotide: BID-4179
aacaaagccuuccccgccu

SEQ ID NO: 43553 - RNA, 20 nt, Artificial Sequence
  Synthetic oligonucleotide: BID-1411
caacaaagccuuccccgccu

SEQ ID NO: 43554 - RNA, 21 nt, Artificial Sequence
  Synthetic oligonucleotide: BID-4180
acaacaaagccuuccccgccu

SEQ ID NO: 43555 - RNA, 22 nt, Artificial Sequence
  Synthetic oligonucleotide: BID-4181
cacaacaaagccuuccccgccu

SEQ ID NO: 43556 - RNA, 23 nt, Artificial Sequence
  Synthetic oligonucleotide: BID-4182
acacaacaaagccuuccccgccu

SEQ ID NO: 43557 - RNA, 24 nt, Artificial Sequence
  Synthetic oligonucleotide: BID-4183
gacacaacaaagccuuccccgccu

SEQ ID NO: 43558 - RNA, 18 nt, Artificial Sequence
  Synthetic oligonucleotide: BID-4184
ucagcccugagcuccgcu

SEQ ID NO: 43559 - RNA, 19 nt, Artificial Sequence
  Synthetic oligonucleotide: BID-4185
gucagcccugagcuccgcu

SEQ ID NO: 43560 - RNA, 20 nt, Artificial Sequence
  Synthetic oligonucleotide: BID-2159
ugucagcccugagcuccgcu

SEQ ID NO: 43561 - RNA, 21 nt, Artificial Sequence
  Synthetic oligonucleotide: BID-4186
uugucagcccugagcuccgcu

SEQ ID NO: 43562 - RNA, 22 nt, Artificial Sequence
  Synthetic oligonucleotide: BID-4187
uuugucagcccugagcuccgcu

SEQ ID NO: 43563 - RNA, 23 nt, Artificial Sequence
  Synthetic oligonucleotide: BID-4188
cuuugucagcccugagcuccgcu

SEQ ID NO: 43564 - RNA, 24 nt, Artificial Sequence
  Synthetic oligonucleotide: BID-4189
gcuuugucagcccugagcuccgcu

SEQ ID NO: 43565 - RNA, 18 nt, Artificial Sequence
  Synthetic oligonucleotide: BID-4190
cccagccacuugguggcu

SEQ ID NO: 43566 - RNA, 19 nt, Artificial Sequence
  Synthetic oligonucleotide: BID-4191
gcccagccacuugguggcu

SEQ ID NO: 43567 - RNA, 20 nt, Artificial Sequence
  Synthetic oligonucleotide: BID-1379
agcccagccacuugguggcu

SEQ ID NO: 43568 - RNA, 21 nt, Artificial Sequence
  Synthetic oligonucleotide: BID-4192
cagcccagccacuugguggcu

SEQ ID NO: 43569 - RNA, 22 nt, Artificial Sequence
  Synthetic oligonucleotide: BID-4193
ccagcccagccacuugguggcu

SEQ ID NO: 43570 - RNA, 23 nt, Artificial Sequence
  Synthetic oligonucleotide: BID-4194
gccagcccagccacuugguggcu

SEQ ID NO: 43571 - RNA, 24 nt, Artificial Sequence
  Synthetic oligonucleotide: BID-4195
ugccagcccagccacuugguggcu

SEQ ID NO: 43572 - RNA, 18 nt, Artificial Sequence
  Synthetic oligonucleotide: BID-4196
ccgcggguuuucuccucu

SEQ ID NO: 43573 - RNA, 19 nt, Artificial Sequence
  Synthetic oligonucleotide: BID-4197
cccgcggguuuucuccucu

SEQ ID NO: 43574 - RNA, 20 nt, Artificial Sequence
  Synthetic oligonucleotide: BID-1404
gcccgcggguuuucuccucu

SEQ ID NO: 43575 - RNA, 21 nt, Artificial Sequence
  Synthetic oligonucleotide: BID-4198
ggcccgcggguuuucuccucu

SEQ ID NO: 43576 - RNA, 22 nt, Artificial Sequence
  Synthetic oligonucleotide: BID-4199
aggcccgcggguuuucuccucu

SEQ ID NO: 43577 - RNA, 23 nt, Artificial Sequence
  Synthetic oligonucleotide: BID-4200
caggcccgcggguuuucuccucu

SEQ ID NO: 43578 - RNA, 24 nt, Artificial Sequence
  Synthetic oligonucleotide: BID-4201
ccaggcccgcggguuuucuccucu

SEQ ID NO: 43579 - RNA, 18 nt, Artificial Sequence
  Synthetic oligonucleotide: BID-4202
caucauugccagugcucu

SEQ ID NO: 43580 - RNA, 19 nt, Artificial Sequence
  Synthetic oligonucleotide: BID-4203
acaucauugccagugcucu

SEQ ID NO: 43581 - RNA, 20 nt, Artificial Sequence
  Synthetic oligonucleotide: BID-1386
cacaucauugccagugcucu

SEQ ID NO: 43582 - RNA, 21 nt, Artificial Sequence
  Synthetic oligonucleotide: BID-4204
gcacaucauugccagugcucu

SEQ ID NO: 43583 - RNA, 22 nt, Artificial Sequence
  Synthetic oligonucleotide: BID-4205
cgcacaucauugccagugcucu

SEQ ID NO: 43584 - RNA, 23 nt, Artificial Sequence
  Synthetic oligonucleotide: BID-4206
ccgcacaucauugccagugcucu

SEQ ID NO: 43585 - RNA, 24 nt, Artificial Sequence
  Synthetic oligonucleotide: BID-4207
uccgcacaucauugccagugcucu

SEQ ID NO: 43586 - RNA, 18 nt, Artificial Sequence
  Synthetic oligonucleotide: BID-4208
gcgggggcgcgggcgcgu

SEQ ID NO: 43587 - RNA, 19 nt, Artificial Sequence
  Synthetic oligonucleotide: BID-4209
cgcgggggcgcgggcgcgu

SEQ ID NO: 43588 - RNA, 20 nt, Artificial Sequence
  Synthetic oligonucleotide: BID-1453
ccgcgggggcgcgggcgcgu

SEQ ID NO: 43589 - RNA, 21 nt, Artificial Sequence
  Synthetic oligonucleotide: BID-4210
gccgcgggggcgcgggcgcgu

SEQ ID NO: 43590 - RNA, 22 nt, Artificial Sequence
  Synthetic oligonucleotide: BID-4211
agccgcgggggcgcgggcgcgu

SEQ ID NO: 43591 - RNA, 23 nt, Artificial Sequence
  Synthetic oligonucleotide: BID-4212
cagccgcgggggcgcgggcgcgu

SEQ ID NO: 43592 - RNA, 24 nt, Artificial Sequence
  Synthetic oligonucleotide: BID-4213
ccagccgcgggggcgcgggcgcgu

SEQ ID NO: 43593 - RNA, 18 nt, Artificial Sequence
  Synthetic oligonucleotide: BID-4214
ugcuggaaagaccacggu

SEQ ID NO: 43594 - RNA, 19 nt, Artificial Sequence
  Synthetic oligonucleotide: BID-4215
gugcuggaaagaccacggu

SEQ ID NO: 43595 - RNA, 20 nt, Artificial Sequence
  Synthetic oligonucleotide: BID-1398
ggugcuggaaagaccacggu

SEQ ID NO: 43596 - RNA, 21 nt, Artificial Sequence
  Synthetic oligonucleotide: BID-4216
cggugcuggaaagaccacggu

SEQ ID NO: 43597 - RNA, 22 nt, Artificial Sequence
  Synthetic oligonucleotide: BID-4217
gcggugcuggaaagaccacggu

SEQ ID NO: 43598 - RNA, 23 nt, Artificial Sequence
  Synthetic oligonucleotide: BID-4218
ugcggugcuggaaagaccacggu

SEQ ID NO: 43599 - RNA, 24 nt, Artificial Sequence
  Synthetic oligonucleotide: BID-4219
cugcggugcuggaaagaccacggu

SEQ ID NO: 43600 - RNA, 18 nt, Artificial Sequence
  Synthetic oligonucleotide: BID-4220
cuugguggcugagggcuu

SEQ ID NO: 43601 - RNA, 19 nt, Artificial Sequence
  Synthetic oligonucleotide: BID-4221
acuugguggcugagggcuu

SEQ ID NO: 43602 - RNA, 20 nt, Artificial Sequence
  Synthetic oligonucleotide: BID-1380
cacuugguggcugagggcuu

SEQ ID NO: 43603 - RNA, 21 nt, Artificial Sequence
  Synthetic oligonucleotide: BID-4222
ccacuugguggcugagggcuu

SEQ ID NO: 43604 - RNA, 22 nt, Artificial Sequence
  Synthetic oligonucleotide: BID-4223
gccacuugguggcugagggcuu

SEQ ID NO: 43605 - RNA, 23 nt, Artificial Sequence
  Synthetic oligonucleotide: BID-4224
agccacuugguggcugagggcuu

SEQ ID NO: 43606 - RNA, 24 nt, Artificial Sequence
  Synthetic oligonucleotide: BID-4225
cagccacuugguggcugagggcuu

SEQ ID NO: 43607 - RNA, 18 nt, Artificial Sequence
  Synthetic oligonucleotide: BID-3075
acagugcggauucuguaa

SEQ ID NO: 43608 - RNA, 19 nt, Artificial Sequence
  Synthetic oligonucleotide: BID-3076
cacagugcggauucuguaa

SEQ ID NO: 43609 - RNA, 20 nt, Artificial Sequence
  Synthetic oligonucleotide: BID-373
gcacagugcggauucuguaa

SEQ ID NO: 43610 - RNA, 21 nt, Artificial Sequence
  Synthetic oligonucleotide: BID-3077
agcacagugcggauucuguaa

SEQ ID NO: 43611 - RNA, 22 nt, Artificial Sequence
  Synthetic oligonucleotide: BID-3078
gagcacagugcggauucuguaa

SEQ ID NO: 43612 - RNA, 23 nt, Artificial Sequence
  Synthetic oligonucleotide: BID-3079
ggagcacagugcggauucuguaa

SEQ ID NO: 43613 - RNA, 24 nt, Artificial Sequence
  Synthetic oligonucleotide: BID-3080
aggagcacagugcggauucuguaa

SEQ ID NO: 43614 - RNA, 18 nt, Artificial Sequence
  Synthetic oligonucleotide: BID-4226
aguggcugaaugacccca

SEQ ID NO: 43615 - RNA, 19 nt, Artificial Sequence
  Synthetic oligonucleotide: BID-4227
gaguggcugaaugacccca

SEQ ID NO: 43616 - RNA, 20 nt, Artificial Sequence
  Synthetic oligonucleotide: BID-2096
ugaguggcugaaugacccca

SEQ ID NO: 43617 - RNA, 21 nt, Artificial Sequence
  Synthetic oligonucleotide: BID-4228
uugaguggcugaaugacccca

SEQ ID NO: 43618 - RNA, 22 nt, Artificial Sequence
  Synthetic oligonucleotide: BID-4229
guugaguggcugaaugacccca

SEQ ID NO: 43619 - RNA, 23 nt, Artificial Sequence
  Synthetic oligonucleotide: BID-4230
uguugaguggcugaaugacccca

SEQ ID NO: 43620 - RNA, 24 nt, Artificial Sequence
  Synthetic oligonucleotide: BID-4231
cuguugaguggcugaaugacccca

SEQ ID NO: 43621 - RNA, 18 nt, Artificial Sequence
  Synthetic oligonucleotide: BID-4232
cgaccgcggugggagcca

SEQ ID NO: 43622 - RNA, 19 nt, Artificial Sequence
  Synthetic oligonucleotide: BID-4233
ccgaccgcggugggagcca

SEQ ID NO: 43623 - RNA, 20 nt, Artificial Sequence
  Synthetic oligonucleotide: BID-1137
cccgaccgcggugggagcca

SEQ ID NO: 43624 - RNA, 21 nt, Artificial Sequence
  Synthetic oligonucleotide: BID-4234
gcccgaccgcggugggagcca

SEQ ID NO: 43625 - RNA, 22 nt, Artificial Sequence
  Synthetic oligonucleotide: BID-4235
ggcccgaccgcggugggagcca

SEQ ID NO: 43626 - RNA, 23 nt, Artificial Sequence
  Synthetic oligonucleotide: BID-4236
gggcccgaccgcggugggagcca

SEQ ID NO: 43627 - RNA, 24 nt, Artificial Sequence
  Synthetic oligonucleotide: BID-4237
ugggcccgaccgcggugggagcca

SEQ ID NO: 43628 - RNA, 18 nt, Artificial Sequence
  Synthetic oligonucleotide: BID-3111
augauggcucggugggca

SEQ ID NO: 43629 - RNA, 19 nt, Artificial Sequence
  Synthetic oligonucleotide: BID-3112
caugauggcucggugggca

SEQ ID NO: 43630 - RNA, 20 nt, Artificial Sequence
  Synthetic oligonucleotide: BID-364
ucaugauggcucggugggca

SEQ ID NO: 43631 - RNA, 21 nt, Artificial Sequence
  Synthetic oligonucleotide: BID-3113
gucaugauggcucggugggca

SEQ ID NO: 43632 - RNA, 22 nt, Artificial Sequence
  Synthetic oligonucleotide: BID-3114
ggucaugauggcucggugggca

SEQ ID NO: 43633 - RNA, 23 nt, Artificial Sequence
  Synthetic oligonucleotide: BID-3115
gggucaugauggcucggugggca

SEQ ID NO: 43634 - RNA, 24 nt, Artificial Sequence
  Synthetic oligonucleotide: BID-3116
ggggucaugauggcucggugggca

SEQ ID NO: 43635 - RNA, 18 nt, Artificial Sequence
  Synthetic oligonucleotide: BID-4238
acguggccuggggauuca

SEQ ID NO: 43636 - RNA, 19 nt, Artificial Sequence
  Synthetic oligonucleotide: BID-4239
cacguggccuggggauuca

SEQ ID NO: 43637 - RNA, 20 nt, Artificial Sequence
  Synthetic oligonucleotide: BID-2050
ccacguggccuggggauuca

SEQ ID NO: 43638 - RNA, 21 nt, Artificial Sequence
  Synthetic oligonucleotide: BID-4240
uccacguggccuggggauuca

SEQ ID NO: 43639 - RNA, 22 nt, Artificial Sequence
  Synthetic oligonucleotide: BID-4241
cuccacguggccuggggauuca

SEQ ID NO: 43640 - RNA, 23 nt, Artificial Sequence
  Synthetic oligonucleotide: BID-4242
ucuccacguggccuggggauuca

SEQ ID NO: 43641 - RNA, 24 nt, Artificial Sequence
  Synthetic oligonucleotide: BID-4243
cucuccacguggccuggggauuca

SEQ ID NO: 43642 - RNA, 18 nt, Artificial Sequence
  Synthetic oligonucleotide: BID-4244
ccugccggcuccucccga

SEQ ID NO: 43643 - RNA, 19 nt, Artificial Sequence
  Synthetic oligonucleotide: BID-4245
accugccggcuccucccga

SEQ ID NO: 43644 - RNA, 20 nt, Artificial Sequence
  Synthetic oligonucleotide: BID-1196
caccugccggcuccucccga

SEQ ID NO: 43645 - RNA, 21 nt, Artificial Sequence
  Synthetic oligonucleotide: BID-4246
acaccugccggcuccucccga

SEQ ID NO: 43646 - RNA, 22 nt, Artificial Sequence
  Synthetic oligonucleotide: BID-4247
gacaccugccggcuccucccga

SEQ ID NO: 43647 - RNA, 23 nt, Artificial Sequence
  Synthetic oligonucleotide: BID-4248
agacaccugccggcuccucccga

SEQ ID NO: 43648 - RNA, 24 nt, Artificial Sequence
  Synthetic oligonucleotide: BID-4249
cagacaccugccggcuccucccga

SEQ ID NO: 43649 - RNA, 18 nt, Artificial Sequence
  Synthetic oligonucleotide: BID-4250
ccgggcguggggggccga

SEQ ID NO: 43650 - RNA, 19 nt, Artificial Sequence
  Synthetic oligonucleotide: BID-4251
cccgggcguggggggccga

SEQ ID NO: 43651 - RNA, 20 nt, Artificial Sequence
  Synthetic oligonucleotide: BID-3617
gcccgggcguggggggccga

SEQ ID NO: 43652 - RNA, 21 nt, Artificial Sequence
  Synthetic oligonucleotide: BID-4252
ggcccgggcguggggggccga

SEQ ID NO: 43653 - RNA, 22 nt, Artificial Sequence
  Synthetic oligonucleotide: BID-4253
gggcccgggcguggggggccga

SEQ ID NO: 43654 - RNA, 23 nt, Artificial Sequence
  Synthetic oligonucleotide: BID-4254
cgggcccgggcguggggggccga

SEQ ID NO: 43655 - RNA, 24 nt, Artificial Sequence
  Synthetic oligonucleotide: BID-4255
gcgggcccgggcguggggggccga

SEQ ID NO: 43656 - RNA, 18 nt, Artificial Sequence
  Synthetic oligonucleotide: BID-4256
gcggugggagccagagga

SEQ ID NO: 43657 - RNA, 19 nt, Artificial Sequence
  Synthetic oligonucleotide: BID-4257
cgcggugggagccagagga

SEQ ID NO: 43658 - RNA, 20 nt, Artificial Sequence
  Synthetic oligonucleotide: BID-2015
ccgcggugggagccagagga

SEQ ID NO: 43659 - RNA, 21 nt, Artificial Sequence
  Synthetic oligonucleotide: BID-4258
accgcggugggagccagagga

SEQ ID NO: 43660 - RNA, 22 nt, Artificial Sequence
  Synthetic oligonucleotide: BID-4259
gaccgcggugggagccagagga

SEQ ID NO: 43661 - RNA, 23 nt, Artificial Sequence
  Synthetic oligonucleotide: BID-4260
cgaccgcggugggagccagagga

SEQ ID NO: 43662 - RNA, 24 nt, Artificial Sequence
  Synthetic oligonucleotide: BID-4261
ccgaccgcggugggagccagagga

SEQ ID NO: 43663 - RNA, 18 nt, Artificial Sequence
  Synthetic oligonucleotide: BID-4262
gccgaggccagccccgga

SEQ ID NO: 43664 - RNA, 19 nt, Artificial Sequence
  Synthetic oligonucleotide: BID-4263
ggccgaggccagccccgga

SEQ ID NO: 43665 - RNA, 20 nt, Artificial Sequence
  Synthetic oligonucleotide: BID-1187
gggccgaggccagccccgga

SEQ ID NO: 43666 - RNA, 21 nt, Artificial Sequence
  Synthetic oligonucleotide: BID-4264
ggggccgaggccagccccgga

SEQ ID NO: 43667 - RNA, 22 nt, Artificial Sequence
  Synthetic oligonucleotide: BID-4265
aggggccgaggccagccccgga

SEQ ID NO: 43668 - RNA, 23 nt, Artificial Sequence
  Synthetic oligonucleotide: BID-4266
gaggggccgaggccagccccgga

SEQ ID NO: 43669 - RNA, 24 nt, Artificial Sequence
  Synthetic oligonucleotide: BID-4267
ggaggggccgaggccagccccgga

SEQ ID NO: 43670 - RNA, 18 nt, Artificial Sequence
  Synthetic oligonucleotide: BID-4268
gccacccuugccggcgga

SEQ ID NO: 43671 - RNA, 19 nt, Artificial Sequence
  Synthetic oligonucleotide: BID-4269
ggccacccuugccggcgga

SEQ ID NO: 43672 - RNA, 20 nt, Artificial Sequence
  Synthetic oligonucleotide: BID-1193
aggccacccuugccggcgga

SEQ ID NO: 43673 - RNA, 21 nt, Artificial Sequence
  Synthetic oligonucleotide: BID-4270
caggccacccuugccggcgga

SEQ ID NO: 43674 - RNA, 22 nt, Artificial Sequence
  Synthetic oligonucleotide: BID-4271
gcaggccacccuugccggcgga

SEQ ID NO: 43675 - RNA, 23 nt, Artificial Sequence
  Synthetic oligonucleotide: BID-4272
ugcaggccacccuugccggcgga

SEQ ID NO: 43676 - RNA, 24 nt, Artificial Sequence
  Synthetic oligonucleotide: BID-4273
gugcaggccacccuugccggcgga

SEQ ID NO: 43677 - RNA, 18 nt, Artificial Sequence
  Synthetic oligonucleotide: BID-4274
gggugcggggcgcgggga

SEQ ID NO: 43678 - RNA, 19 nt, Artificial Sequence
  Synthetic oligonucleotide: BID-4275
ggggugcggggcgcgggga

SEQ ID NO: 43679 - RNA, 20 nt, Artificial Sequence
  Synthetic oligonucleotide: BID-2062
aggggugcggggcgcgggga

SEQ ID NO: 43680 - RNA, 21 nt, Artificial Sequence
  Synthetic oligonucleotide: BID-4276
gaggggugcggggcgcgggga

SEQ ID NO: 43681 - RNA, 22 nt, Artificial Sequence
  Synthetic oligonucleotide: BID-4277
ggaggggugcggggcgcgggga

SEQ ID NO: 43682 - RNA, 23 nt, Artificial Sequence
  Synthetic oligonucleotide: BID-4278
gggaggggugcggggcgcgggga

SEQ ID NO: 43683 - RNA, 24 nt, Artificial Sequence
  Synthetic oligonucleotide: BID-4279
ggggaggggugcggggcgcgggga

SEQ ID NO: 43684 - RNA, 18 nt, Artificial Sequence
  Synthetic oligonucleotide: BID-4280
agcgcgcggggcgccaua

SEQ ID NO: 43685 - RNA, 19 nt, Artificial Sequence
  Synthetic oligonucleotide: BID-4281
aagcgcgcggggcgccaua

SEQ ID NO: 43686 - RNA, 20 nt, Artificial Sequence
  Synthetic oligonucleotide: BID-1988
gaagcgcgcggggcgccaua

SEQ ID NO: 43687 - RNA, 21 nt, Artificial Sequence
  Synthetic oligonucleotide: BID-4282
ggaagcgcgcggggcgccaua

SEQ ID NO: 43688 - RNA, 22 nt, Artificial Sequence
  Synthetic oligonucleotide: BID-4283
aggaagcgcgcggggcgccaua

SEQ ID NO: 43689 - RNA, 23 nt, Artificial Sequence
  Synthetic oligonucleotide: BID-4284
gaggaagcgcgcggggcgccaua

SEQ ID NO: 43690 - RNA, 24 nt, Artificial Sequence
  Synthetic oligonucleotide: BID-4285
ggaggaagcgcgcggggcgccaua

SEQ ID NO: 43691 - RNA, 18 nt, Artificial Sequence
  Synthetic oligonucleotide: BID-4286
ggucagagcggccgcuua

SEQ ID NO: 43692 - RNA, 19 nt, Artificial Sequence
  Synthetic oligonucleotide: BID-4287
cggucagagcggccgcuua

SEQ ID NO: 43693 - RNA, 20 nt, Artificial Sequence
  Synthetic oligonucleotide: BID-1200
gcggucagagcggccgcuua

SEQ ID NO: 43694 - RNA, 21 nt, Artificial Sequence
  Synthetic oligonucleotide: BID-4288
cgcggucagagcggccgcuua

SEQ ID NO: 43695 - RNA, 22 nt, Artificial Sequence
  Synthetic oligonucleotide: BID-4289
gcgcggucagagcggccgcuua

SEQ ID NO: 43696 - RNA, 23 nt, Artificial Sequence
  Synthetic oligonucleotide: BID-4290
agcgcggucagagcggccgcuua

SEQ ID NO: 43697 - RNA, 24 nt, Artificial Sequence
  Synthetic oligonucleotide: BID-4291
aagcgcggucagagcggccgcuua

SEQ ID NO: 43698 - RNA, 18 nt, Artificial Sequence
  Synthetic oligonucleotide: BID-4292
ccaggccucagcagcgac

SEQ ID NO: 43699 - RNA, 19 nt, Artificial Sequence
  Synthetic oligonucleotide: BID-4293
cccaggccucagcagcgac

SEQ ID NO: 43700 - RNA, 20 nt, Artificial Sequence
  Synthetic oligonucleotide: BID-1148
ccccaggccucagcagcgac

SEQ ID NO: 43701 - RNA, 21 nt, Artificial Sequence
  Synthetic oligonucleotide: BID-4294
gccccaggccucagcagcgac

SEQ ID NO: 43702 - RNA, 22 nt, Artificial Sequence
  Synthetic oligonucleotide: BID-4295
agccccaggccucagcagcgac

SEQ ID NO: 43703 - RNA, 23 nt, Artificial Sequence
  Synthetic oligonucleotide: BID-4296
gagccccaggccucagcagcgac

SEQ ID NO: 43704 - RNA, 24 nt, Artificial Sequence
  Synthetic oligonucleotide: BID-4297
agagccccaggccucagcagcgac

SEQ ID NO: 43705 - RNA, 18 nt, Artificial Sequence
  Synthetic oligonucleotide: BID-4298
gucagagcggccgcuuac

SEQ ID NO: 43706 - RNA, 19 nt, Artificial Sequence
  Synthetic oligonucleotide: BID-4299
ggucagagcggccgcuuac

SEQ ID NO: 43707 - RNA, 20 nt, Artificial Sequence
  Synthetic oligonucleotide: BID-2087
cggucagagcggccgcuuac

SEQ ID NO: 43708 - RNA, 21 nt, Artificial Sequence
  Synthetic oligonucleotide: BID-4300
gcggucagagcggccgcuuac

SEQ ID NO: 43709 - RNA, 22 nt, Artificial Sequence
  Synthetic oligonucleotide: BID-4301
cgcggucagagcggccgcuuac

SEQ ID NO: 43710 - RNA, 23 nt, Artificial Sequence
  Synthetic oligonucleotide: BID-4302
gcgcggucagagcggccgcuuac

SEQ ID NO: 43711 - RNA, 24 nt, Artificial Sequence
  Synthetic oligonucleotide: BID-4303
agcgcggucagagcggccgcuuac

SEQ ID NO: 43712 - RNA, 18 nt, Artificial Sequence
  Synthetic oligonucleotide: BID-4304
gaaugaccccaggggacc

SEQ ID NO: 43713 - RNA, 19 nt, Artificial Sequence
  Synthetic oligonucleotide: BID-4305
ugaaugaccccaggggacc

SEQ ID NO: 43714 - RNA, 20 nt, Artificial Sequence
  Synthetic oligonucleotide: BID-1212
cugaaugaccccaggggacc

SEQ ID NO: 43715 - RNA, 21 nt, Artificial Sequence
  Synthetic oligonucleotide: BID-4306
gcugaaugaccccaggggacc

SEQ ID NO: 43716 - RNA, 22 nt, Artificial Sequence
  Synthetic oligonucleotide: BID-4307
ggcugaaugaccccaggggacc

SEQ ID NO: 43717 - RNA, 23 nt, Artificial Sequence
  Synthetic oligonucleotide: BID-4308
uggcugaaugaccccaggggacc

SEQ ID NO: 43718 - RNA, 24 nt, Artificial Sequence
  Synthetic oligonucleotide: BID-4309
guggcugaaugaccccaggggacc

SEQ ID NO: 43719 - RNA, 18 nt, Artificial Sequence
  Synthetic oligonucleotide: BID-4310
ccggagaggagaaaaccc

SEQ ID NO: 43720 - RNA, 19 nt, Artificial Sequence
  Synthetic oligonucleotide: BID-4311
cccggagaggagaaaaccc

SEQ ID NO: 43721 - RNA, 20 nt, Artificial Sequence
  Synthetic oligonucleotide: BID-1190
ccccggagaggagaaaaccc

SEQ ID NO: 43722 - RNA, 21 nt, Artificial Sequence
  Synthetic oligonucleotide: BID-4312
gccccggagaggagaaaaccc

SEQ ID NO: 43723 - RNA, 22 nt, Artificial Sequence
  Synthetic oligonucleotide: BID-4313
agccccggagaggagaaaaccc

SEQ ID NO: 43724 - RNA, 23 nt, Artificial Sequence
  Synthetic oligonucleotide: BID-4314
cagccccggagaggagaaaaccc

SEQ ID NO: 43725 - RNA, 24 nt, Artificial Sequence
  Synthetic oligonucleotide: BID-4315
ccagccccggagaggagaaaaccc

SEQ ID NO: 43726 - RNA, 18 nt, Artificial Sequence
  Synthetic oligonucleotide: BID-4316
aaugaccccaggggaccc

SEQ ID NO: 43727 - RNA, 19 nt, Artificial Sequence
  Synthetic oligonucleotide: BID-4317
gaaugaccccaggggaccc

SEQ ID NO: 43728 - RNA, 20 nt, Artificial Sequence
  Synthetic oligonucleotide: BID-2098
ugaaugaccccaggggaccc

SEQ ID NO: 43729 - RNA, 21 nt, Artificial Sequence
  Synthetic oligonucleotide: BID-4318
cugaaugaccccaggggaccc

SEQ ID NO: 43730 - RNA, 22 nt, Artificial Sequence
  Synthetic oligonucleotide: BID-4319
gcugaaugaccccaggggaccc

SEQ ID NO: 43731 - RNA, 23 nt, Artificial Sequence
  Synthetic oligonucleotide: BID-4320
ggcugaaugaccccaggggaccc

SEQ ID NO: 43732 - RNA, 24 nt, Artificial Sequence
  Synthetic oligonucleotide: BID-4321
uggcugaaugaccccaggggaccc

SEQ ID NO: 43733 - RNA, 18 nt, Artificial Sequence
  Synthetic oligonucleotide: BID-4322
ugaguggcugaaugaccc

SEQ ID NO: 43734 - RNA, 19 nt, Artificial Sequence
  Synthetic oligonucleotide: BID-4323
uugaguggcugaaugaccc

SEQ ID NO: 43735 - RNA, 20 nt, Artificial Sequence
  Synthetic oligonucleotide: BID-1209
guugaguggcugaaugaccc

SEQ ID NO: 43736 - RNA, 21 nt, Artificial Sequence
  Synthetic oligonucleotide: BID-4324
uguugaguggcugaaugaccc

SEQ ID NO: 43737 - RNA, 22 nt, Artificial Sequence
  Synthetic oligonucleotide: BID-4325
cuguugaguggcugaaugaccc

SEQ ID NO: 43738 - RNA, 23 nt, Artificial Sequence
  Synthetic oligonucleotide: BID-4326
acuguugaguggcugaaugaccc

SEQ ID NO: 43739 - RNA, 24 nt, Artificial Sequence
  Synthetic oligonucleotide: BID-4327
aacuguugaguggcugaaugaccc

SEQ ID NO: 43740 - RNA, 18 nt, Artificial Sequence
  Synthetic oligonucleotide: BID-4328
gaguggcugaaugacccc

SEQ ID NO: 43741 - RNA, 19 nt, Artificial Sequence
  Synthetic oligonucleotide: BID-4329
ugaguggcugaaugacccc

SEQ ID NO: 43742 - RNA, 20 nt, Artificial Sequence
  Synthetic oligonucleotide: BID-2095
uugaguggcugaaugacccc

SEQ ID NO: 43743 - RNA, 21 nt, Artificial Sequence
  Synthetic oligonucleotide: BID-4330
guugaguggcugaaugacccc

SEQ ID NO: 43744 - RNA, 22 nt, Artificial Sequence
  Synthetic oligonucleotide: BID-4331
uguugaguggcugaaugacccc

SEQ ID NO: 43745 - RNA, 23 nt, Artificial Sequence
  Synthetic oligonucleotide: BID-4332
cuguugaguggcugaaugacccc

SEQ ID NO: 43746 - RNA, 24 nt, Artificial Sequence
  Synthetic oligonucleotide: BID-4333
acuguugaguggcugaaugacccc

SEQ ID NO: 43747 - RNA, 18 nt, Artificial Sequence
  Synthetic oligonucleotide: BID-4334
aggggccgaggccagccc

SEQ ID NO: 43748 - RNA, 19 nt, Artificial Sequence
  Synthetic oligonucleotide: BID-4335
gaggggccgaggccagccc

SEQ ID NO: 43749 - RNA, 20 nt, Artificial Sequence
  Synthetic oligonucleotide: BID-2069
ggaggggccgaggccagccc

SEQ ID NO: 43750 - RNA, 21 nt, Artificial Sequence
  Synthetic oligonucleotide: BID-4336
gggaggggccgaggccagccc

SEQ ID NO: 43751 - RNA, 22 nt, Artificial Sequence
  Synthetic oligonucleotide: BID-4337
ggggaggggccgaggccagccc

SEQ ID NO: 43752 - RNA, 23 nt, Artificial Sequence
  Synthetic oligonucleotide: BID-4338
gggggaggggccgaggccagccc

SEQ ID NO: 43753 - RNA, 24 nt, Artificial Sequence
  Synthetic oligonucleotide: BID-4339
agggggaggggccgaggccagccc

SEQ ID NO: 43754 - RNA, 18 nt, Artificial Sequence
  Synthetic oligonucleotide: BID-4340
gaggggccgaggccagcc

SEQ ID NO: 43755 - RNA, 19 nt, Artificial Sequence
  Synthetic oligonucleotide: BID-4341
ggaggggccgaggccagcc

SEQ ID NO: 43756 - RNA, 20 nt, Artificial Sequence
  Synthetic oligonucleotide: BID-1184
gggaggggccgaggccagcc

SEQ ID NO: 43757 - RNA, 21 nt, Artificial Sequence
  Synthetic oligonucleotide: BID-4342
ggggaggggccgaggccagcc

SEQ ID NO: 43758 - RNA, 22 nt, Artificial Sequence
  Synthetic oligonucleotide: BID-4343
gggggaggggccgaggccagcc

SEQ ID NO: 43759 - RNA, 23 nt, Artificial Sequence
  Synthetic oligonucleotide: BID-4344
agggggaggggccgaggccagcc

SEQ ID NO: 43760 - RNA, 24 nt, Artificial Sequence
  Synthetic oligonucleotide: BID-4345
gagggggaggggccgaggccagcc

SEQ ID NO: 43761 - RNA, 18 nt, Artificial Sequence
  Synthetic oligonucleotide: BID-4346
cagggcccgccgcccgcc

SEQ ID NO: 43762 - RNA, 19 nt, Artificial Sequence
  Synthetic oligonucleotide: BID-4347
ucagggcccgccgcccgcc

SEQ ID NO: 43763 - RNA, 20 nt, Artificial Sequence
  Synthetic oligonucleotide: BID-1132
cucagggcccgccgcccgcc

SEQ ID NO: 43764 - RNA, 21 nt, Artificial Sequence
  Synthetic oligonucleotide: BID-4348
gcucagggcccgccgcccgcc

SEQ ID NO: 43765 - RNA, 22 nt, Artificial Sequence
  Synthetic oligonucleotide: BID-4349
agcucagggcccgccgcccgcc

SEQ ID NO: 43766 - RNA, 23 nt, Artificial Sequence
  Synthetic oligonucleotide: BID-4350
gagcucagggcccgccgcccgcc

SEQ ID NO: 43767 - RNA, 24 nt, Artificial Sequence
  Synthetic oligonucleotide: BID-4351
ggagcucagggcccgccgcccgcc

SEQ ID NO: 43768 - RNA, 18 nt, Artificial Sequence
  Synthetic oligonucleotide: BID-4352
cugagggucggguccgcc

SEQ ID NO: 43769 - RNA, 19 nt, Artificial Sequence
  Synthetic oligonucleotide: BID-4353
gcugagggucggguccgcc

SEQ ID NO: 43770 - RNA, 20 nt, Artificial Sequence
  Synthetic oligonucleotide: BID-1155
ugcugagggucggguccgcc

SEQ ID NO: 43771 - RNA, 21 nt, Artificial Sequence
  Synthetic oligonucleotide: BID-4354
gugcugagggucggguccgcc

SEQ ID NO: 43772 - RNA, 22 nt, Artificial Sequence
  Synthetic oligonucleotide: BID-4355
ggugcugagggucggguccgcc

SEQ ID NO: 43773 - RNA, 23 nt, Artificial Sequence
  Synthetic oligonucleotide: BID-4356
cggugcugagggucggguccgcc

SEQ ID NO: 43774 - RNA, 24 nt, Artificial Sequence
  Synthetic oligonucleotide: BID-4357
ucggugcugagggucggguccgcc

SEQ ID NO: 43775 - RNA, 18 nt, Artificial Sequence
  Synthetic oligonucleotide: BID-4358
cgaccguguccgcgcgcc

SEQ ID NO: 43776 - RNA, 19 nt, Artificial Sequence
  Synthetic oligonucleotide: BID-4359
ucgaccguguccgcgcgcc

SEQ ID NO: 43777 - RNA, 20 nt, Artificial Sequence
  Synthetic oligonucleotide: BID-1992
gucgaccguguccgcgcgcc

SEQ ID NO: 43778 - RNA, 21 nt, Artificial Sequence
  Synthetic oligonucleotide: BID-4360
agucgaccguguccgcgcgcc

SEQ ID NO: 43779 - RNA, 22 nt, Artificial Sequence
  Synthetic oligonucleotide: BID-4361
uagucgaccguguccgcgcgcc

SEQ ID NO: 43780 - RNA, 23 nt, Artificial Sequence
  Synthetic oligonucleotide: BID-4362
guagucgaccguguccgcgcgcc

SEQ ID NO: 43781 - RNA, 24 nt, Artificial Sequence
  Synthetic oligonucleotide: BID-4363
gguagucgaccguguccgcgcgcc

SEQ ID NO: 43782 - RNA, 18 nt, Artificial Sequence
  Synthetic oligonucleotide: BID-4364
uguccucuccacguggcc

SEQ ID NO: 43783 - RNA, 19 nt, Artificial Sequence
  Synthetic oligonucleotide: BID-4365
guguccucuccacguggcc

SEQ ID NO: 43784 - RNA, 20 nt, Artificial Sequence
  Synthetic oligonucleotide: BID-2046
uguguccucuccacguggcc

SEQ ID NO: 43785 - RNA, 21 nt, Artificial Sequence
  Synthetic oligonucleotide: BID-4366
uuguguccucuccacguggcc

SEQ ID NO: 43786 - RNA, 22 nt, Artificial Sequence
  Synthetic oligonucleotide: BID-4367
guuguguccucuccacguggcc

SEQ ID NO: 43787 - RNA, 23 nt, Artificial Sequence
  Synthetic oligonucleotide: BID-4368
uguuguguccucuccacguggcc

SEQ ID NO: 43788 - RNA, 24 nt, Artificial Sequence
  Synthetic oligonucleotide: BID-4369
uuguuguguccucuccacguggcc

SEQ ID NO: 43789 - RNA, 18 nt, Artificial Sequence
  Synthetic oligonucleotide: BID-3239
gauggcucggugggcagc

SEQ ID NO: 43790 - RNA, 19 nt, Artificial Sequence
  Synthetic oligonucleotide: BID-3240
ugauggcucggugggcagc

SEQ ID NO: 43791 - RNA, 20 nt, Artificial Sequence
  Synthetic oligonucleotide: BID-365
augauggcucggugggcagc

SEQ ID NO: 43792 - RNA, 21 nt, Artificial Sequence
  Synthetic oligonucleotide: BID-3241
caugauggcucggugggcagc

SEQ ID NO: 43793 - RNA, 22 nt, Artificial Sequence
  Synthetic oligonucleotide: BID-3242
ucaugauggcucggugggcagc

SEQ ID NO: 43794 - RNA, 23 nt, Artificial Sequence
  Synthetic oligonucleotide: BID-3243
gucaugauggcucggugggcagc

SEQ ID NO: 43795 - RNA, 24 nt, Artificial Sequence
  Synthetic oligonucleotide: BID-3244
ggucaugauggcucggugggcagc

SEQ ID NO: 43796 - RNA, 18 nt, Artificial Sequence
  Synthetic oligonucleotide: BID-4370
cccgaccgcggugggagc

SEQ ID NO: 43797 - RNA, 19 nt, Artificial Sequence
  Synthetic oligonucleotide: BID-4371
gcccgaccgcggugggagc

SEQ ID NO: 43798 - RNA, 20 nt, Artificial Sequence
  Synthetic oligonucleotide: BID-1136
ggcccgaccgcggugggagc

SEQ ID NO: 43799 - RNA, 21 nt, Artificial Sequence
  Synthetic oligonucleotide: BID-4372
gggcccgaccgcggugggagc

SEQ ID NO: 43800 - RNA, 22 nt, Artificial Sequence
  Synthetic oligonucleotide: BID-4373
ugggcccgaccgcggugggagc

SEQ ID NO: 43801 - RNA, 23 nt, Artificial Sequence
  Synthetic oligonucleotide: BID-4374
cugggcccgaccgcggugggagc

SEQ ID NO: 43802 - RNA, 24 nt, Artificial Sequence
  Synthetic oligonucleotide: BID-4375
ccugggcccgaccgcggugggagc

SEQ ID NO: 43803 - RNA, 18 nt, Artificial Sequence
  Synthetic oligonucleotide: BID-4376
cucccgccuccccuccgc

SEQ ID NO: 43804 - RNA, 19 nt, Artificial Sequence
  Synthetic oligonucleotide: BID-4377
ucucccgccuccccuccgc

SEQ ID NO: 43805 - RNA, 20 nt, Artificial Sequence
  Synthetic oligonucleotide: BID-1151
cucucccgccuccccuccgc

SEQ ID NO: 43806 - RNA, 21 nt, Artificial Sequence
  Synthetic oligonucleotide: BID-4378
ucucucccgccuccccuccgc

SEQ ID NO: 43807 - RNA, 22 nt, Artificial Sequence
  Synthetic oligonucleotide: BID-4379
gucucucccgccuccccuccgc

SEQ ID NO: 43808 - RNA, 23 nt, Artificial Sequence
  Synthetic oligonucleotide: BID-4380
ggucucucccgccuccccuccgc

SEQ ID NO: 43809 - RNA, 24 nt, Artificial Sequence
  Synthetic oligonucleotide: BID-4381
gggucucucccgccuccccuccgc

SEQ ID NO: 43810 - RNA, 18 nt, Artificial Sequence
  Synthetic oligonucleotide: BID-4382
ggccgaaggaggaagcgc

SEQ ID NO: 43811 - RNA, 19 nt, Artificial Sequence
  Synthetic oligonucleotide: BID-4383
gggccgaaggaggaagcgc

SEQ ID NO: 43812 - RNA, 20 nt, Artificial Sequence
  Synthetic oligonucleotide: BID-4384
ggggccgaaggaggaagcgc

SEQ ID NO: 43813 - RNA, 21 nt, Artificial Sequence
  Synthetic oligonucleotide: BID-4385
gggggccgaaggaggaagcgc

SEQ ID NO: 43814 - RNA, 22 nt, Artificial Sequence
  Synthetic oligonucleotide: BID-4386
ggggggccgaaggaggaagcgc

SEQ ID NO: 43815 - RNA, 23 nt, Artificial Sequence
  Synthetic oligonucleotide: BID-4387
uggggggccgaaggaggaagcgc

SEQ ID NO: 43816 - RNA, 24 nt, Artificial Sequence
  Synthetic oligonucleotide: BID-4388
guggggggccgaaggaggaagcgc

SEQ ID NO: 43817 - RNA, 18 nt, Artificial Sequence
  Synthetic oligonucleotide: BID-4389
ucgaccguguccgcgcgc

SEQ ID NO: 43818 - RNA, 19 nt, Artificial Sequence
  Synthetic oligonucleotide: BID-4390
gucgaccguguccgcgcgc

SEQ ID NO: 43819 - RNA, 20 nt, Artificial Sequence
  Synthetic oligonucleotide: BID-1118
agucgaccguguccgcgcgc

SEQ ID NO: 43820 - RNA, 21 nt, Artificial Sequence
  Synthetic oligonucleotide: BID-4391
uagucgaccguguccgcgcgc

SEQ ID NO: 43821 - RNA, 22 nt, Artificial Sequence
  Synthetic oligonucleotide: BID-4392
guagucgaccguguccgcgcgc

SEQ ID NO: 43822 - RNA, 23 nt, Artificial Sequence
  Synthetic oligonucleotide: BID-4393
gguagucgaccguguccgcgcgc

SEQ ID NO: 43823 - RNA, 24 nt, Artificial Sequence
  Synthetic oligonucleotide: BID-4394
ggguagucgaccguguccgcgcgc

SEQ ID NO: 43824 - RNA, 18 nt, Artificial Sequence
  Synthetic oligonucleotide: BID-4395
gggaggggugcggggcgc

SEQ ID NO: 43825 - RNA, 19 nt, Artificial Sequence
  Synthetic oligonucleotide: BID-4396
ggggaggggugcggggcgc

SEQ ID NO: 43826 - RNA, 20 nt, Artificial Sequence
  Synthetic oligonucleotide: BID-2059
aggggaggggugcggggcgc

SEQ ID NO: 43827 - RNA, 21 nt, Artificial Sequence
  Synthetic oligonucleotide: BID-4397
caggggaggggugcggggcgc

SEQ ID NO: 43828 - RNA, 22 nt, Artificial Sequence
  Synthetic oligonucleotide: BID-4398
ucaggggaggggugcggggcgc

SEQ ID NO: 43829 - RNA, 23 nt, Artificial Sequence
  Synthetic oligonucleotide: BID-4399
uucaggggaggggugcggggcgc

SEQ ID NO: 43830 - RNA, 24 nt, Artificial Sequence
  Synthetic oligonucleotide: BID-4400
auucaggggaggggugcggggcgc

SEQ ID NO: 43831 - RNA, 18 nt, Artificial Sequence
  Synthetic oligonucleotide: BID-4401
cggguccgccucggaggc

SEQ ID NO: 43832 - RNA, 19 nt, Artificial Sequence
  Synthetic oligonucleotide: BID-4402
ucggguccgccucggaggc

SEQ ID NO: 43833 - RNA, 20 nt, Artificial Sequence
  Synthetic oligonucleotide: BID-2042
gucggguccgccucggaggc

SEQ ID NO: 43834 - RNA, 21 nt, Artificial Sequence
  Synthetic oligonucleotide: BID-4403
ggucggguccgccucggaggc

SEQ ID NO: 43835 - RNA, 22 nt, Artificial Sequence
  Synthetic oligonucleotide: BID-4404
gggucggguccgccucggaggc

SEQ ID NO: 43836 - RNA, 23 nt, Artificial Sequence
  Synthetic oligonucleotide: BID-4405
agggucggguccgccucggaggc

SEQ ID NO: 43837 - RNA, 24 nt, Artificial Sequence
  Synthetic oligonucleotide: BID-4406
gagggucggguccgccucggaggc

SEQ ID NO: 43838 - RNA, 18 nt, Artificial Sequence
  Synthetic oligonucleotide: BID-4407
agccagaggaggggaggc

SEQ ID NO: 43839 - RNA, 19 nt, Artificial Sequence
  Synthetic oligonucleotide: BID-4408
gagccagaggaggggaggc

SEQ ID NO: 43840 - RNA, 20 nt, Artificial Sequence
  Synthetic oligonucleotide: BID-2019
ggagccagaggaggggaggc

SEQ ID NO: 43841 - RNA, 21 nt, Artificial Sequence
  Synthetic oligonucleotide: BID-4409
gggagccagaggaggggaggc

SEQ ID NO: 43842 - RNA, 22 nt, Artificial Sequence
  Synthetic oligonucleotide: BID-4410
ugggagccagaggaggggaggc

SEQ ID NO: 43843 - RNA, 23 nt, Artificial Sequence
  Synthetic oligonucleotide: BID-4411
gugggagccagaggaggggaggc

SEQ ID NO: 43844 - RNA, 24 nt, Artificial Sequence
  Synthetic oligonucleotide: BID-4412
ggugggagccagaggaggggaggc

SEQ ID NO: 43845 - RNA, 18 nt, Artificial Sequence
  Synthetic oligonucleotide: BID-4413
ccugccgccugccccggc

SEQ ID NO: 43846 - RNA, 19 nt, Artificial Sequence
  Synthetic oligonucleotide: BID-4414
gccugccgccugccccggc

SEQ ID NO: 43847 - RNA, 20 nt, Artificial Sequence
  Synthetic oligonucleotide: BID-1129
ugccugccgccugccccggc

SEQ ID NO: 43848 - RNA, 21 nt, Artificial Sequence
  Synthetic oligonucleotide: BID-4415
cugccugccgccugccccggc

SEQ ID NO: 43849 - RNA, 22 nt, Artificial Sequence
  Synthetic oligonucleotide: BID-4416
ccugccugccgccugccccggc

SEQ ID NO: 43850 - RNA, 23 nt, Artificial Sequence
  Synthetic oligonucleotide: BID-4417
cccugccugccgccugccccggc

SEQ ID NO: 43851 - RNA, 24 nt, Artificial Sequence
  Synthetic oligonucleotide: BID-4418
ccccugccugccgccugccccggc

SEQ ID NO: 43852 - RNA, 18 nt, Artificial Sequence
  Synthetic oligonucleotide: BID-3263
gcgaggggccgggccggc

SEQ ID NO: 43853 - RNA, 19 nt, Artificial Sequence
  Synthetic oligonucleotide: BID-3264
agcgaggggccgggccggc

SEQ ID NO: 43854 - RNA, 20 nt, Artificial Sequence
  Synthetic oligonucleotide: BID-23
cagcgaggggccgggccggc

SEQ ID NO: 43855 - RNA, 21 nt, Artificial Sequence
  Synthetic oligonucleotide: BID-3265
gcagcgaggggccgggccggc

SEQ ID NO: 43856 - RNA, 22 nt, Artificial Sequence
  Synthetic oligonucleotide: BID-3266
ggcagcgaggggccgggccggc

SEQ ID NO: 43857 - RNA, 23 nt, Artificial Sequence
  Synthetic oligonucleotide: BID-3267
gggcagcgaggggccgggccggc

SEQ ID NO: 43858 - RNA, 24 nt, Artificial Sequence
  Synthetic oligonucleotide: BID-3268
ugggcagcgaggggccgggccggc

SEQ ID NO: 43859 - RNA, 18 nt, Artificial Sequence
  Synthetic oligonucleotide: BID-4419
cgcccgcgcccccgcggc

SEQ ID NO: 43860 - RNA, 19 nt, Artificial Sequence
  Synthetic oligonucleotide: BID-4420
gcgcccgcgcccccgcggc

SEQ ID NO: 43861 - RNA, 20 nt, Artificial Sequence
  Synthetic oligonucleotide: BID-1997
cgcgcccgcgcccccgcggc

SEQ ID NO: 43862 - RNA, 21 nt, Artificial Sequence
  Synthetic oligonucleotide: BID-4421
acgcgcccgcgcccccgcggc

SEQ ID NO: 43863 - RNA, 22 nt, Artificial Sequence
  Synthetic oligonucleotide: BID-4422
gacgcgcccgcgcccccgcggc

SEQ ID NO: 43864 - RNA, 23 nt, Artificial Sequence
  Synthetic oligonucleotide: BID-4423
ggacgcgcccgcgcccccgcggc

SEQ ID NO: 43865 - RNA, 24 nt, Artificial Sequence
  Synthetic oligonucleotide: BID-4424
cggacgcgcccgcgcccccgcggc

SEQ ID NO: 43866 - RNA, 18 nt, Artificial Sequence
  Synthetic oligonucleotide: BID-4425
gggagacgcugccucggc

SEQ ID NO: 43867 - RNA, 19 nt, Artificial Sequence
  Synthetic oligonucleotide: BID-4426
ugggagacgcugccucggc

SEQ ID NO: 43868 - RNA, 20 nt, Artificial Sequence
  Synthetic oligonucleotide: BID-1121
cugggagacgcugccucggc

SEQ ID NO: 43869 - RNA, 21 nt, Artificial Sequence
  Synthetic oligonucleotide: BID-4427
ccugggagacgcugccucggc

SEQ ID NO: 43870 - RNA, 22 nt, Artificial Sequence
  Synthetic oligonucleotide: BID-4428
gccugggagacgcugccucggc

SEQ ID NO: 43871 - RNA, 23 nt, Artificial Sequence
  Synthetic oligonucleotide: BID-4429
cgccugggagacgcugccucggc

SEQ ID NO: 43872 - RNA, 24 nt, Artificial Sequence
  Synthetic oligonucleotide: BID-4430
gcgccugggagacgcugccucggc

SEQ ID NO: 43873 - RNA, 18 nt, Artificial Sequence
  Synthetic oligonucleotide: BID-4431
gccggggcgggcccgggc

SEQ ID NO: 43874 - RNA, 19 nt, Artificial Sequence
  Synthetic oligonucleotide: BID-4432
ggccggggcgggcccgggc

SEQ ID NO: 43875 - RNA, 20 nt, Artificial Sequence
  Synthetic oligonucleotide: BID-4433
gggccggggcgggcccgggc

SEQ ID NO: 43876 - RNA, 21 nt, Artificial Sequence
  Synthetic oligonucleotide: BID-4434
cgggccggggcgggcccgggc

SEQ ID NO: 43877 - RNA, 22 nt, Artificial Sequence
  Synthetic oligonucleotide: BID-4435
gcgggccggggcgggcccgggc

SEQ ID NO: 43878 - RNA, 23 nt, Artificial Sequence
  Synthetic oligonucleotide: BID-4436
ggcgggccggggcgggcccgggc

SEQ ID NO: 43879 - RNA, 24 nt, Artificial Sequence
  Synthetic oligonucleotide: BID-4437
gggcgggccggggcgggcccgggc

SEQ ID NO: 43880 - RNA, 18 nt, Artificial Sequence
  Synthetic oligonucleotide: BID-4438
gggcgggccggggcgggc

SEQ ID NO: 43881 - RNA, 19 nt, Artificial Sequence
  Synthetic oligonucleotide: BID-4439
ggggcgggccggggcgggc

SEQ ID NO: 43882 - RNA, 20 nt, Artificial Sequence
  Synthetic oligonucleotide: BID-4440
cggggcgggccggggcgggc

SEQ ID NO: 43883 - RNA, 21 nt, Artificial Sequence
  Synthetic oligonucleotide: BID-4441
ccggggcgggccggggcgggc

SEQ ID NO: 43884 - RNA, 22 nt, Artificial Sequence
  Synthetic oligonucleotide: BID-4442
gccggggcgggccggggcgggc

SEQ ID NO: 43885 - RNA, 23 nt, Artificial Sequence
  Synthetic oligonucleotide: BID-4443
ggccggggcgggccggggcgggc

SEQ ID NO: 43886 - RNA, 24 nt, Artificial Sequence
  Synthetic oligonucleotide: BID-4444
gggccggggcgggccggggcgggc

SEQ ID NO: 43887 - RNA, 20 nt, Artificial Sequence
  Synthetic oligonucleotide: BID-3623
gggggcgggccggggcgggc

SEQ ID NO: 43888 - RNA, 18 nt, Artificial Sequence
  Synthetic oligonucleotide: BID-4445
aggggaggggugcggggc

SEQ ID NO: 43889 - RNA, 19 nt, Artificial Sequence
  Synthetic oligonucleotide: BID-4446
caggggaggggugcggggc

SEQ ID NO: 43890 - RNA, 20 nt, Artificial Sequence
  Synthetic oligonucleotide: BID-1172
ucaggggaggggugcggggc

SEQ ID NO: 43891 - RNA, 21 nt, Artificial Sequence
  Synthetic oligonucleotide: BID-4447
uucaggggaggggugcggggc

SEQ ID NO: 43892 - RNA, 22 nt, Artificial Sequence
  Synthetic oligonucleotide: BID-4448
auucaggggaggggugcggggc

SEQ ID NO: 43893 - RNA, 23 nt, Artificial Sequence
  Synthetic oligonucleotide: BID-4449
gauucaggggaggggugcggggc

SEQ ID NO: 43894 - RNA, 24 nt, Artificial Sequence
  Synthetic oligonucleotide: BID-4450
ggauucaggggaggggugcggggc

SEQ ID NO: 43895 - RNA, 18 nt, Artificial Sequence
  Synthetic oligonucleotide: BID-3275
cggauucuguaagugggc

SEQ ID NO: 43896 - RNA, 19 nt, Artificial Sequence
  Synthetic oligonucleotide: BID-3276
gcggauucuguaagugggc

SEQ ID NO: 43897 - RNA, 20 nt, Artificial Sequence
  Synthetic oligonucleotide: BID-6
ugcggauucuguaagugggc

SEQ ID NO: 43898 - RNA, 21 nt, Artificial Sequence
  Synthetic oligonucleotide: BID-3277
gugcggauucuguaagugggc

SEQ ID NO: 43899 - RNA, 22 nt, Artificial Sequence
  Synthetic oligonucleotide: BID-3278
agugcggauucuguaagugggc

SEQ ID NO: 43900 - RNA, 23 nt, Artificial Sequence
  Synthetic oligonucleotide: BID-3279
cagugcggauucuguaagugggc

SEQ ID NO: 43901 - RNA, 24 nt, Artificial Sequence
  Synthetic oligonucleotide: BID-3280
acagugcggauucuguaagugggc

SEQ ID NO: 43902 - RNA, 18 nt, Artificial Sequence
  Synthetic oligonucleotide: BID-4451
guguccucuccacguggc

SEQ ID NO: 43903 - RNA, 19 nt, Artificial Sequence
  Synthetic oligonucleotide: BID-4452
uguguccucuccacguggc

SEQ ID NO: 43904 - RNA, 20 nt, Artificial Sequence
  Synthetic oligonucleotide: BID-1161
uuguguccucuccacguggc

SEQ ID NO: 43905 - RNA, 21 nt, Artificial Sequence
  Synthetic oligonucleotide: BID-4453
guuguguccucuccacguggc

SEQ ID NO: 43906 - RNA, 22 nt, Artificial Sequence
  Synthetic oligonucleotide: BID-4454
uguuguguccucuccacguggc

SEQ ID NO: 43907 - RNA, 23 nt, Artificial Sequence
  Synthetic oligonucleotide: BID-4455
uuguuguguccucuccacguggc

SEQ ID NO: 43908 - RNA, 24 nt, Artificial Sequence
  Synthetic oligonucleotide: BID-4456
uuuguuguguccucuccacguggc

SEQ ID NO: 43909 - RNA, 18 nt, Artificial Sequence
  Synthetic oligonucleotide: BID-4457
gauccucgcugcugcugc

SEQ ID NO: 43910 - RNA, 19 nt, Artificial Sequence
  Synthetic oligonucleotide: BID-4458
ggauccucgcugcugcugc

SEQ ID NO: 43911 - RNA, 20 nt, Artificial Sequence
  Synthetic oligonucleotide: BID-2092
cggauccucgcugcugcugc

SEQ ID NO: 43912 - RNA, 21 nt, Artificial Sequence
  Synthetic oligonucleotide: BID-4459
gcggauccucgcugcugcugc

SEQ ID NO: 43913 - RNA, 22 nt, Artificial Sequence
  Synthetic oligonucleotide: BID-4460
ugcggauccucgcugcugcugc

SEQ ID NO: 43914 - RNA, 23 nt, Artificial Sequence
  Synthetic oligonucleotide: BID-4461
gugcggauccucgcugcugcugc

SEQ ID NO: 43915 - RNA, 24 nt, Artificial Sequence
  Synthetic oligonucleotide: BID-4462
ugugcggauccucgcugcugcugc

SEQ ID NO: 43916 - RNA, 18 nt, Artificial Sequence
  Synthetic oligonucleotide: BID-4463
agugcacccgcgccccuc

SEQ ID NO: 43917 - RNA, 19 nt, Artificial Sequence
  Synthetic oligonucleotide: BID-4464
gagugcacccgcgccccuc

SEQ ID NO: 43918 - RNA, 20 nt, Artificial Sequence
  Synthetic oligonucleotide: BID-1126
ugagugcacccgcgccccuc

SEQ ID NO: 43919 - RNA, 21 nt, Artificial Sequence
  Synthetic oligonucleotide: BID-4465
gugagugcacccgcgccccuc

SEQ ID NO: 43920 - RNA, 22 nt, Artificial Sequence
  Synthetic oligonucleotide: BID-4466
ggugagugcacccgcgccccuc

SEQ ID NO: 43921 - RNA, 23 nt, Artificial Sequence
  Synthetic oligonucleotide: BID-4467
uggugagugcacccgcgccccuc

SEQ ID NO: 43922 - RNA, 24 nt, Artificial Sequence
  Synthetic oligonucleotide: BID-4468
guggugagugcacccgcgccccuc

SEQ ID NO: 43923 - RNA, 18 nt, Artificial Sequence
  Synthetic oligonucleotide: BID-4469
gacaccugccggcuccuc

SEQ ID NO: 43924 - RNA, 19 nt, Artificial Sequence
  Synthetic oligonucleotide: BID-4470
agacaccugccggcuccuc

SEQ ID NO: 43925 - RNA, 20 nt, Artificial Sequence
  Synthetic oligonucleotide: BID-1195
cagacaccugccggcuccuc

SEQ ID NO: 43926 - RNA, 21 nt, Artificial Sequence
  Synthetic oligonucleotide: BID-4471
gcagacaccugccggcuccuc

SEQ ID NO: 43927 - RNA, 22 nt, Artificial Sequence
  Synthetic oligonucleotide: BID-4472
cgcagacaccugccggcuccuc

SEQ ID NO: 43928 - RNA, 23 nt, Artificial Sequence
  Synthetic oligonucleotide: BID-4473
ccgcagacaccugccggcuccuc

SEQ ID NO: 43929 - RNA, 24 nt, Artificial Sequence
  Synthetic oligonucleotide: BID-4474
accgcagacaccugccggcuccuc

SEQ ID NO: 43930 - RNA, 18 nt, Artificial Sequence
  Synthetic oligonucleotide: BID-4475
cacguggccuggggauuc

SEQ ID NO: 43931 - RNA, 19 nt, Artificial Sequence
  Synthetic oligonucleotide: BID-4476
ccacguggccuggggauuc

SEQ ID NO: 43932 - RNA, 20 nt, Artificial Sequence
  Synthetic oligonucleotide: BID-2049
uccacguggccuggggauuc

SEQ ID NO: 43933 - RNA, 21 nt, Artificial Sequence
  Synthetic oligonucleotide: BID-4477
cuccacguggccuggggauuc

SEQ ID NO: 43934 - RNA, 22 nt, Artificial Sequence
  Synthetic oligonucleotide: BID-4478
ucuccacguggccuggggauuc

SEQ ID NO: 43935 - RNA, 23 nt, Artificial Sequence
  Synthetic oligonucleotide: BID-4479
cucuccacguggccuggggauuc

SEQ ID NO: 43936 - RNA, 24 nt, Artificial Sequence
  Synthetic oligonucleotide: BID-4480
ccucuccacguggccuggggauuc

SEQ ID NO: 43937 - RNA, 18 nt, Artificial Sequence
  Synthetic oligonucleotide: BID-4481
gggcguggggggccgaag

SEQ ID NO: 43938 - RNA, 19 nt, Artificial Sequence
  Synthetic oligonucleotide: BID-4482
cgggcguggggggccgaag

SEQ ID NO: 43939 - RNA, 20 nt, Artificial Sequence
  Synthetic oligonucleotide: BID-4483
ccgggcguggggggccgaag

SEQ ID NO: 43940 - RNA, 21 nt, Artificial Sequence
  Synthetic oligonucleotide: BID-4484
cccgggcguggggggccgaag

SEQ ID NO: 43941 - RNA, 22 nt, Artificial Sequence
  Synthetic oligonucleotide: BID-4485
gcccgggcguggggggccgaag

SEQ ID NO: 43942 - RNA, 23 nt, Artificial Sequence
  Synthetic oligonucleotide: BID-4486
ggcccgggcguggggggccgaag

SEQ ID NO: 43943 - RNA, 24 nt, Artificial Sequence
  Synthetic oligonucleotide: BID-4487
gggcccgggcguggggggccgaag

SEQ ID NO: 43944 - RNA, 18 nt, Artificial Sequence
  Synthetic oligonucleotide: BID-4488
cgcgcggggcgccauaag

SEQ ID NO: 43945 - RNA, 19 nt, Artificial Sequence
  Synthetic oligonucleotide: BID-4489
gcgcgcggggcgccauaag

SEQ ID NO: 43946 - RNA, 20 nt, Artificial Sequence
  Synthetic oligonucleotide: BID-1115
agcgcgcggggcgccauaag

SEQ ID NO: 43947 - RNA, 21 nt, Artificial Sequence
  Synthetic oligonucleotide: BID-4490
aagcgcgcggggcgccauaag

SEQ ID NO: 43948 - RNA, 22 nt, Artificial Sequence
  Synthetic oligonucleotide: BID-4491
gaagcgcgcggggcgccauaag

SEQ ID NO: 43949 - RNA, 23 nt, Artificial Sequence
  Synthetic oligonucleotide: BID-4492
ggaagcgcgcggggcgccauaag

SEQ ID NO: 43950 - RNA, 24 nt, Artificial Sequence
  Synthetic oligonucleotide: BID-4493
aggaagcgcgcggggcgccauaag

SEQ ID NO: 43951 - RNA, 18 nt, Artificial Sequence
  Synthetic oligonucleotide: BID-4494
gaccgcggugggagccag

SEQ ID NO: 43952 - RNA, 19 nt, Artificial Sequence
  Synthetic oligonucleotide: BID-4495
cgaccgcggugggagccag

SEQ ID NO: 43953 - RNA, 20 nt, Artificial Sequence
  Synthetic oligonucleotide: BID-2013
ccgaccgcggugggagccag

SEQ ID NO: 43954 - RNA, 21 nt, Artificial Sequence
  Synthetic oligonucleotide: BID-4496
cccgaccgcggugggagccag

SEQ ID NO: 43955 - RNA, 22 nt, Artificial Sequence
  Synthetic oligonucleotide: BID-4497
gcccgaccgcggugggagccag

SEQ ID NO: 43956 - RNA, 23 nt, Artificial Sequence
  Synthetic oligonucleotide: BID-4498
ggcccgaccgcggugggagccag

SEQ ID NO: 43957 - RNA, 24 nt, Artificial Sequence
  Synthetic oligonucleotide: BID-4499
gggcccgaccgcggugggagccag

SEQ ID NO: 43958 - RNA, 18 nt, Artificial Sequence
  Synthetic oligonucleotide: BID-4500
cguggccuggggauucag

SEQ ID NO: 43959 - RNA, 19 nt, Artificial Sequence
  Synthetic oligonucleotide: BID-4501
acguggccuggggauucag

SEQ ID NO: 43960 - RNA, 20 nt, Artificial Sequence
  Synthetic oligonucleotide: BID-2051
cacguggccuggggauucag

SEQ ID NO: 43961 - RNA, 21 nt, Artificial Sequence
  Synthetic oligonucleotide: BID-4502
ccacguggccuggggauucag

SEQ ID NO: 43962 - RNA, 22 nt, Artificial Sequence
  Synthetic oligonucleotide: BID-4503
uccacguggccuggggauucag

SEQ ID NO: 43963 - RNA, 23 nt, Artificial Sequence
  Synthetic oligonucleotide: BID-4504
cuccacguggccuggggauucag

SEQ ID NO: 43964 - RNA, 24 nt, Artificial Sequence
  Synthetic oligonucleotide: BID-4505
ucuccacguggccuggggauucag

SEQ ID NO: 43965 - RNA, 18 nt, Artificial Sequence
  Synthetic oligonucleotide: BID-4506
ccgcggugggagccagag

SEQ ID NO: 43966 - RNA, 19 nt, Artificial Sequence
  Synthetic oligonucleotide: BID-4507
accgcggugggagccagag

SEQ ID NO: 43967 - RNA, 20 nt, Artificial Sequence
  Synthetic oligonucleotide: BID-1139
gaccgcggugggagccagag

SEQ ID NO: 43968 - RNA, 21 nt, Artificial Sequence
  Synthetic oligonucleotide: BID-4508
cgaccgcggugggagccagag

SEQ ID NO: 43969 - RNA, 22 nt, Artificial Sequence
  Synthetic oligonucleotide: BID-4509
ccgaccgcggugggagccagag

SEQ ID NO: 43970 - RNA, 23 nt, Artificial Sequence
  Synthetic oligonucleotide: BID-4510
cccgaccgcggugggagccagag

SEQ ID NO: 43971 - RNA, 24 nt, Artificial Sequence
  Synthetic oligonucleotide: BID-4511
gcccgaccgcggugggagccagag

SEQ ID NO: 43972 - RNA, 18 nt, Artificial Sequence
  Synthetic oligonucleotide: BID-4512
gaggccagccccggagag

SEQ ID NO: 43973 - RNA, 19 nt, Artificial Sequence
  Synthetic oligonucleotide: BID-4513
cgaggccagccccggagag

SEQ ID NO: 43974 - RNA, 20 nt, Artificial Sequence
  Synthetic oligonucleotide: BID-1189
ccgaggccagccccggagag

SEQ ID NO: 43975 - RNA, 21 nt, Artificial Sequence
  Synthetic oligonucleotide: BID-4514
gccgaggccagccccggagag

SEQ ID NO: 43976 - RNA, 22 nt, Artificial Sequence
  Synthetic oligonucleotide: BID-4515
ggccgaggccagccccggagag

SEQ ID NO: 43977 - RNA, 23 nt, Artificial Sequence
  Synthetic oligonucleotide: BID-4516
gggccgaggccagccccggagag

SEQ ID NO: 43978 - RNA, 24 nt, Artificial Sequence
  Synthetic oligonucleotide: BID-4517
ggggccgaggccagccccggagag

SEQ ID NO: 43979 - RNA, 18 nt, Artificial Sequence
  Synthetic oligonucleotide: BID-4518
cugccggcuccucccgag

SEQ ID NO: 43980 - RNA, 19 nt, Artificial Sequence
  Synthetic oligonucleotide: BID-4519
ccugccggcuccucccgag

SEQ ID NO: 43981 - RNA, 20 nt, Artificial Sequence
  Synthetic oligonucleotide: BID-2082
accugccggcuccucccgag

SEQ ID NO: 43982 - RNA, 21 nt, Artificial Sequence
  Synthetic oligonucleotide: BID-4520
caccugccggcuccucccgag

SEQ ID NO: 43983 - RNA, 22 nt, Artificial Sequence
  Synthetic oligonucleotide: BID-4521
acaccugccggcuccucccgag

SEQ ID NO: 43984 - RNA, 23 nt, Artificial Sequence
  Synthetic oligonucleotide: BID-4522
gacaccugccggcuccucccgag

SEQ ID NO: 43985 - RNA, 24 nt, Artificial Sequence
  Synthetic oligonucleotide: BID-4523
agacaccugccggcuccucccgag

SEQ ID NO: 43986 - RNA, 18 nt, Artificial Sequence
  Synthetic oligonucleotide: BID-4524
cggugggagccagaggag

SEQ ID NO: 43987 - RNA, 19 nt, Artificial Sequence
  Synthetic oligonucleotide: BID-4525
gcggugggagccagaggag

SEQ ID NO: 43988 - RNA, 20 nt, Artificial Sequence
  Synthetic oligonucleotide: BID-2016
cgcggugggagccagaggag

SEQ ID NO: 43989 - RNA, 21 nt, Artificial Sequence
  Synthetic oligonucleotide: BID-4526
ccgcggugggagccagaggag

SEQ ID NO: 43990 - RNA, 22 nt, Artificial Sequence
  Synthetic oligonucleotide: BID-4527
accgcggugggagccagaggag

SEQ ID NO: 43991 - RNA, 23 nt, Artificial Sequence
  Synthetic oligonucleotide: BID-4528
gaccgcggugggagccagaggag

SEQ ID NO: 43992 - RNA, 24 nt, Artificial Sequence
  Synthetic oligonucleotide: BID-4529
cgaccgcggugggagccagaggag

SEQ ID NO: 43993 - RNA, 18 nt, Artificial Sequence
  Synthetic oligonucleotide: BID-4530
ccgaggccagccccggag

SEQ ID NO: 43994 - RNA, 19 nt, Artificial Sequence
  Synthetic oligonucleotide: BID-4531
gccgaggccagccccggag

SEQ ID NO: 43995 - RNA, 20 nt, Artificial Sequence
  Synthetic oligonucleotide: BID-2070
ggccgaggccagccccggag

SEQ ID NO: 43996 - RNA, 21 nt, Artificial Sequence
  Synthetic oligonucleotide: BID-4532
gggccgaggccagccccggag

SEQ ID NO: 43997 - RNA, 22 nt, Artificial Sequence
  Synthetic oligonucleotide: BID-4533
ggggccgaggccagccccggag

SEQ ID NO: 43998 - RNA, 23 nt, Artificial Sequence
  Synthetic oligonucleotide: BID-4534
aggggccgaggccagccccggag

SEQ ID NO: 43999 - RNA, 24 nt, Artificial Sequence
  Synthetic oligonucleotide: BID-4535
gaggggccgaggccagccccggag

SEQ ID NO: 44000 - RNA, 18 nt, Artificial Sequence
  Synthetic oligonucleotide: BID-4536
gucggguccgccucggag

SEQ ID NO: 44001 - RNA, 19 nt, Artificial Sequence
  Synthetic oligonucleotide: BID-4537
ggucggguccgccucggag

SEQ ID NO: 44002 - RNA, 20 nt, Artificial Sequence
  Synthetic oligonucleotide: BID-1157
gggucggguccgccucggag

SEQ ID NO: 44003 - RNA, 21 nt, Artificial Sequence
  Synthetic oligonucleotide: BID-4538
agggucggguccgccucggag

SEQ ID NO: 44004 - RNA, 22 nt, Artificial Sequence
  Synthetic oligonucleotide: BID-4539
gagggucggguccgccucggag

SEQ ID NO: 44005 - RNA, 23 nt, Artificial Sequence
  Synthetic oligonucleotide: BID-4540
ugagggucggguccgccucggag

SEQ ID NO: 44006 - RNA, 24 nt, Artificial Sequence
  Synthetic oligonucleotide: BID-4541
cugagggucggguccgccucggag

SEQ ID NO: 44007 - RNA, 18 nt, Artificial Sequence
  Synthetic oligonucleotide: BID-4542
ggagccagaggaggggag

SEQ ID NO: 44008 - RNA, 19 nt, Artificial Sequence
  Synthetic oligonucleotide: BID-4543
gggagccagaggaggggag

SEQ ID NO: 44009 - RNA, 20 nt, Artificial Sequence
  Synthetic oligonucleotide: BID-1143
ugggagccagaggaggggag

SEQ ID NO: 44010 - RNA, 21 nt, Artificial Sequence
  Synthetic oligonucleotide: BID-4544
gugggagccagaggaggggag

SEQ ID NO: 44011 - RNA, 22 nt, Artificial Sequence
  Synthetic oligonucleotide: BID-4545
ggugggagccagaggaggggag

SEQ ID NO: 44012 - RNA, 23 nt, Artificial Sequence
  Synthetic oligonucleotide: BID-4546
cggugggagccagaggaggggag

SEQ ID NO: 44013 - RNA, 24 nt, Artificial Sequence
  Synthetic oligonucleotide: BID-4547
gcggugggagccagaggaggggag

SEQ ID NO: 44014 - RNA, 18 nt, Artificial Sequence
  Synthetic oligonucleotide: BID-4548
ggugcggggcgcggggag

SEQ ID NO: 44015 - RNA, 19 nt, Artificial Sequence
  Synthetic oligonucleotide: BID-4549
gggugcggggcgcggggag

SEQ ID NO: 44016 - RNA, 20 nt, Artificial Sequence
  Synthetic oligonucleotide: BID-2063
ggggugcggggcgcggggag

SEQ ID NO: 44017 - RNA, 21 nt, Artificial Sequence
  Synthetic oligonucleotide: BID-4550
aggggugcggggcgcggggag

SEQ ID NO: 44018 - RNA, 22 nt, Artificial Sequence
  Synthetic oligonucleotide: BID-4551
gaggggugcggggcgcggggag

SEQ ID NO: 44019 - RNA, 23 nt, Artificial Sequence
  Synthetic oligonucleotide: BID-4552
ggaggggugcggggcgcggggag

SEQ ID NO: 44020 - RNA, 24 nt, Artificial Sequence
  Synthetic oligonucleotide: BID-4553
gggaggggugcggggcgcggggag

SEQ ID NO: 44021 - RNA, 18 nt, Artificial Sequence
  Synthetic oligonucleotide: BID-4554
gggccgaggccagccccg

SEQ ID NO: 44022 - RNA, 19 nt, Artificial Sequence
  Synthetic oligonucleotide: BID-4555
ggggccgaggccagccccg

SEQ ID NO: 44023 - RNA, 20 nt, Artificial Sequence
  Synthetic oligonucleotide: BID-1186
aggggccgaggccagccccg

SEQ ID NO: 44024 - RNA, 21 nt, Artificial Sequence
  Synthetic oligonucleotide: BID-4556
gaggggccgaggccagccccg

SEQ ID NO: 44025 - RNA, 22 nt, Artificial Sequence
  Synthetic oligonucleotide: BID-4557
ggaggggccgaggccagccccg

SEQ ID NO: 44026 - RNA, 23 nt, Artificial Sequence
  Synthetic oligonucleotide: BID-4558
gggaggggccgaggccagccccg

SEQ ID NO: 44027 - RNA, 24 nt, Artificial Sequence
  Synthetic oligonucleotide: BID-4559
ggggaggggccgaggccagccccg

SEQ ID NO: 44028 - RNA, 18 nt, Artificial Sequence
  Synthetic oligonucleotide: BID-4560
cccgggcguggggggccg

SEQ ID NO: 44029 - RNA, 19 nt, Artificial Sequence
  Synthetic oligonucleotide: BID-4561
gcccgggcguggggggccg

SEQ ID NO: 44030 - RNA, 20 nt, Artificial Sequence
  Synthetic oligonucleotide: BID-4562
ggcccgggcguggggggccg

SEQ ID NO: 44031 - RNA, 21 nt, Artificial Sequence
  Synthetic oligonucleotide: BID-4563
gggcccgggcguggggggccg

SEQ ID NO: 44032 - RNA, 22 nt, Artificial Sequence
  Synthetic oligonucleotide: BID-4564
cgggcccgggcguggggggccg

SEQ ID NO: 44033 - RNA, 23 nt, Artificial Sequence
  Synthetic oligonucleotide: BID-4565
gcgggcccgggcguggggggccg

SEQ ID NO: 44034 - RNA, 24 nt, Artificial Sequence
  Synthetic oligonucleotide: BID-4566
ggcgggcccgggcguggggggccg

SEQ ID NO: 44035 - RNA, 18 nt, Artificial Sequence
  Synthetic oligonucleotide: BID-3357
auggcucggugggcagcg

SEQ ID NO: 44036 - RNA, 19 nt, Artificial Sequence
  Synthetic oligonucleotide: BID-3358
gauggcucggugggcagcg

SEQ ID NO: 44037 - RNA, 20 nt, Artificial Sequence
  Synthetic oligonucleotide: BID-9
ugauggcucggugggcagcg

SEQ ID NO: 44038 - RNA, 21 nt, Artificial Sequence
  Synthetic oligonucleotide: BID-3359
augauggcucggugggcagcg

SEQ ID NO: 44039 - RNA, 22 nt, Artificial Sequence
  Synthetic oligonucleotide: BID-3360
caugauggcucggugggcagcg

SEQ ID NO: 44040 - RNA, 23 nt, Artificial Sequence
  Synthetic oligonucleotide: BID-3361
ucaugauggcucggugggcagcg

SEQ ID NO: 44041 - RNA, 24 nt, Artificial Sequence
  Synthetic oligonucleotide: BID-3362
gucaugauggcucggugggcagcg

SEQ ID NO: 44042 - RNA, 18 nt, Artificial Sequence
  Synthetic oligonucleotide: BID-4567
ccccucccgggguacgcg

SEQ ID NO: 44043 - RNA, 19 nt, Artificial Sequence
  Synthetic oligonucleotide: BID-4568
gccccucccgggguacgcg

SEQ ID NO: 44044 - RNA, 20 nt, Artificial Sequence
  Synthetic oligonucleotide: BID-1128
cgccccucccgggguacgcg

SEQ ID NO: 44045 - RNA, 21 nt, Artificial Sequence
  Synthetic oligonucleotide: BID-4569
gcgccccucccgggguacgcg

SEQ ID NO: 44046 - RNA, 22 nt, Artificial Sequence
  Synthetic oligonucleotide: BID-4570
cgcgccccucccgggguacgcg

SEQ ID NO: 44047 - RNA, 23 nt, Artificial Sequence
  Synthetic oligonucleotide: BID-4571
ccgcgccccucccgggguacgcg

SEQ ID NO: 44048 - RNA, 24 nt, Artificial Sequence
  Synthetic oligonucleotide: BID-4572
cccgcgccccucccgggguacgcg

SEQ ID NO: 44049 - RNA, 18 nt, Artificial Sequence
  Synthetic oligonucleotide: BID-4573
gcccugggcccgaccgcg

SEQ ID NO: 44050 - RNA, 19 nt, Artificial Sequence
  Synthetic oligonucleotide: BID-4574
cgcccugggcccgaccgcg

SEQ ID NO: 44051 - RNA, 20 nt, Artificial Sequence
  Synthetic oligonucleotide: BID-1133
ccgcccugggcccgaccgcg

SEQ ID NO: 44052 - RNA, 21 nt, Artificial Sequence
  Synthetic oligonucleotide: BID-4575
cccgcccugggcccgaccgcg

SEQ ID NO: 44053 - RNA, 22 nt, Artificial Sequence
  Synthetic oligonucleotide: BID-4576
gcccgcccugggcccgaccgcg

SEQ ID NO: 44054 - RNA, 23 nt, Artificial Sequence
  Synthetic oligonucleotide: BID-4577
cgcccgcccugggcccgaccgcg

SEQ ID NO: 44055 - RNA, 24 nt, Artificial Sequence
  Synthetic oligonucleotide: BID-4578
ccgcccgcccugggcccgaccgcg

SEQ ID NO: 44056 - RNA, 18 nt, Artificial Sequence
  Synthetic oligonucleotide: BID-4579
gccgaaggaggaagcgcg

SEQ ID NO: 44057 - RNA, 19 nt, Artificial Sequence
  Synthetic oligonucleotide: BID-4580
ggccgaaggaggaagcgcg

SEQ ID NO: 44058 - RNA, 20 nt, Artificial Sequence
  Synthetic oligonucleotide: BID-1112
gggccgaaggaggaagcgcg

SEQ ID NO: 44059 - RNA, 21 nt, Artificial Sequence
  Synthetic oligonucleotide: BID-4581
ggggccgaaggaggaagcgcg

SEQ ID NO: 44060 - RNA, 22 nt, Artificial Sequence
  Synthetic oligonucleotide: BID-4582
gggggccgaaggaggaagcgcg

SEQ ID NO: 44061 - RNA, 23 nt, Artificial Sequence
  Synthetic oligonucleotide: BID-4583
ggggggccgaaggaggaagcgcg

SEQ ID NO: 44062 - RNA, 24 nt, Artificial Sequence
  Synthetic oligonucleotide: BID-4584
uggggggccgaaggaggaagcgcg

SEQ ID NO: 44063 - RNA, 18 nt, Artificial Sequence
  Synthetic oligonucleotide: BID-4585
ggaggggugcggggcgcg

SEQ ID NO: 44064 - RNA, 19 nt, Artificial Sequence
  Synthetic oligonucleotide: BID-4586
gggaggggugcggggcgcg

SEQ ID NO: 44065 - RNA, 20 nt, Artificial Sequence
  Synthetic oligonucleotide: BID-2060
ggggaggggugcggggcgcg

SEQ ID NO: 44066 - RNA, 21 nt, Artificial Sequence
  Synthetic oligonucleotide: BID-4587
aggggaggggugcggggcgcg

SEQ ID NO: 44067 - RNA, 22 nt, Artificial Sequence
  Synthetic oligonucleotide: BID-4588
caggggaggggugcggggcgcg

SEQ ID NO: 44068 - RNA, 23 nt, Artificial Sequence
  Synthetic oligonucleotide: BID-4589
ucaggggaggggugcggggcgcg

SEQ ID NO: 44069 - RNA, 24 nt, Artificial Sequence
  Synthetic oligonucleotide: BID-4590
uucaggggaggggugcggggcgcg

SEQ ID NO: 44070 - RNA, 18 nt, Artificial Sequence
  Synthetic oligonucleotide: BID-4591
ggguccgccucggaggcg

SEQ ID NO: 44071 - RNA, 19 nt, Artificial Sequence
  Synthetic oligonucleotide: BID-4592
cggguccgccucggaggcg

SEQ ID NO: 44072 - RNA, 20 nt, Artificial Sequence
  Synthetic oligonucleotide: BID-2043
ucggguccgccucggaggcg

SEQ ID NO: 44073 - RNA, 21 nt, Artificial Sequence
  Synthetic oligonucleotide: BID-4593
gucggguccgccucggaggcg

SEQ ID NO: 44074 - RNA, 22 nt, Artificial Sequence
  Synthetic oligonucleotide: BID-4594
ggucggguccgccucggaggcg

SEQ ID NO: 44075 - RNA, 23 nt, Artificial Sequence
  Synthetic oligonucleotide: BID-4595
gggucggguccgccucggaggcg

SEQ ID NO: 44076 - RNA, 24 nt, Artificial Sequence
  Synthetic oligonucleotide: BID-4596
agggucggguccgccucggaggcg

SEQ ID NO: 44077 - RNA, 18 nt, Artificial Sequence
  Synthetic oligonucleotide: BID-4597
cugccgccugccccggcg

SEQ ID NO: 44078 - RNA, 19 nt, Artificial Sequence
  Synthetic oligonucleotide: BID-4598
ccugccgccugccccggcg

SEQ ID NO: 44079 - RNA, 20 nt, Artificial Sequence
  Synthetic oligonucleotide: BID-2005
gccugccgccugccccggcg

SEQ ID NO: 44080 - RNA, 21 nt, Artificial Sequence
  Synthetic oligonucleotide: BID-4599
ugccugccgccugccccggcg

SEQ ID NO: 44081 - RNA, 22 nt, Artificial Sequence
  Synthetic oligonucleotide: BID-4600
cugccugccgccugccccggcg

SEQ ID NO: 44082 - RNA, 23 nt, Artificial Sequence
  Synthetic oligonucleotide: BID-4601
ccugccugccgccugccccggcg

SEQ ID NO: 44083 - RNA, 24 nt, Artificial Sequence
  Synthetic oligonucleotide: BID-4602
cccugccugccgccugccccggcg

SEQ ID NO: 44084 - RNA, 18 nt, Artificial Sequence
  Synthetic oligonucleotide: BID-4603
ccggggcgggcccgggcg

SEQ ID NO: 44085 - RNA, 19 nt, Artificial Sequence
  Synthetic oligonucleotide: BID-4604
gccggggcgggcccgggcg

SEQ ID NO: 44086 - RNA, 20 nt, Artificial Sequence
  Synthetic oligonucleotide: BID-3626
ggccggggcgggcccgggcg

SEQ ID NO: 44087 - RNA, 21 nt, Artificial Sequence
  Synthetic oligonucleotide: BID-4605
gggccggggcgggcccgggcg

SEQ ID NO: 44088 - RNA, 22 nt, Artificial Sequence
  Synthetic oligonucleotide: BID-4606
cgggccggggcgggcccgggcg

SEQ ID NO: 44089 - RNA, 23 nt, Artificial Sequence
  Synthetic oligonucleotide: BID-4607
gcgggccggggcgggcccgggcg

SEQ ID NO: 44090 - RNA, 24 nt, Artificial Sequence
  Synthetic oligonucleotide: BID-4608
ggcgggccggggcgggcccgggcg

SEQ ID NO: 44091 - RNA, 18 nt, Artificial Sequence
  Synthetic oligonucleotide: BID-4609
ggggaggggugcggggcg

SEQ ID NO: 44092 - RNA, 19 nt, Artificial Sequence
  Synthetic oligonucleotide: BID-4610
aggggaggggugcggggcg

SEQ ID NO: 44093 - RNA, 20 nt, Artificial Sequence
  Synthetic oligonucleotide: BID-2058
caggggaggggugcggggcg

SEQ ID NO: 44094 - RNA, 21 nt, Artificial Sequence
  Synthetic oligonucleotide: BID-4611
ucaggggaggggugcggggcg

SEQ ID NO: 44095 - RNA, 22 nt, Artificial Sequence
  Synthetic oligonucleotide: BID-4612
uucaggggaggggugcggggcg

SEQ ID NO: 44096 - RNA, 23 nt, Artificial Sequence
  Synthetic oligonucleotide: BID-4613
auucaggggaggggugcggggcg

SEQ ID NO: 44097 - RNA, 24 nt, Artificial Sequence
  Synthetic oligonucleotide: BID-4614
gauucaggggaggggugcggggcg

SEQ ID NO: 44098 - RNA, 18 nt, Artificial Sequence
  Synthetic oligonucleotide: BID-3363
uggggucaugauggcucg

SEQ ID NO: 44099 - RNA, 19 nt, Artificial Sequence
  Synthetic oligonucleotide: BID-3364
cuggggucaugauggcucg

SEQ ID NO: 44100 - RNA, 20 nt, Artificial Sequence
  Synthetic oligonucleotide: BID-363
gcuggggucaugauggcucg

SEQ ID NO: 44101 - RNA, 21 nt, Artificial Sequence
  Synthetic oligonucleotide: BID-3365
ugcuggggucaugauggcucg

SEQ ID NO: 44102 - RNA, 22 nt, Artificial Sequence
  Synthetic oligonucleotide: BID-3366
gugcuggggucaugauggcucg

SEQ ID NO: 44103 - RNA, 23 nt, Artificial Sequence
  Synthetic oligonucleotide: BID-3367
ggugcuggggucaugauggcucg

SEQ ID NO: 44104 - RNA, 24 nt, Artificial Sequence
  Synthetic oligonucleotide: BID-3368
cggugcuggggucaugauggcucg

SEQ ID NO: 44105 - RNA, 18 nt, Artificial Sequence
  Synthetic oligonucleotide: BID-4615
ggcguggggggccgaagg

SEQ ID NO: 44106 - RNA, 19 nt, Artificial Sequence
  Synthetic oligonucleotide: BID-4616
gggcguggggggccgaagg

SEQ ID NO: 44107 - RNA, 20 nt, Artificial Sequence
  Synthetic oligonucleotide: BID-3627
cgggcguggggggccgaagg

SEQ ID NO: 44108 - RNA, 21 nt, Artificial Sequence
  Synthetic oligonucleotide: BID-4617
ccgggcguggggggccgaagg

SEQ ID NO: 44109 - RNA, 22 nt, Artificial Sequence
  Synthetic oligonucleotide: BID-4618
cccgggcguggggggccgaagg

SEQ ID NO: 44110 - RNA, 23 nt, Artificial Sequence
  Synthetic oligonucleotide: BID-4619
gcccgggcguggggggccgaagg

SEQ ID NO: 44111 - RNA, 24 nt, Artificial Sequence
  Synthetic oligonucleotide: BID-4620
ggcccgggcguggggggccgaagg

SEQ ID NO: 44112 - RNA, 18 nt, Artificial Sequence
  Synthetic oligonucleotide: BID-4621
gcgcggggcgccauaagg

SEQ ID NO: 44113 - RNA, 19 nt, Artificial Sequence
  Synthetic oligonucleotide: BID-4622
cgcgcggggcgccauaagg

SEQ ID NO: 44114 - RNA, 20 nt, Artificial Sequence
  Synthetic oligonucleotide: BID-1989
gcgcgcggggcgccauaagg

SEQ ID NO: 44115 - RNA, 21 nt, Artificial Sequence
  Synthetic oligonucleotide: BID-4623
agcgcgcggggcgccauaagg

SEQ ID NO: 44116 - RNA, 22 nt, Artificial Sequence
  Synthetic oligonucleotide: BID-4624
aagcgcgcggggcgccauaagg

SEQ ID NO: 44117 - RNA, 23 nt, Artificial Sequence
  Synthetic oligonucleotide: BID-4625
gaagcgcgcggggcgccauaagg

SEQ ID NO: 44118 - RNA, 24 nt, Artificial Sequence
  Synthetic oligonucleotide: BID-4626
ggaagcgcgcggggcgccauaagg

SEQ ID NO: 44119 - RNA, 18 nt, Artificial Sequence
  Synthetic oligonucleotide: BID-4627
cgcggugggagccagagg

SEQ ID NO: 44120 - RNA, 19 nt, Artificial Sequence
  Synthetic oligonucleotide: BID-4628
ccgcggugggagccagagg

SEQ ID NO: 44121 - RNA, 20 nt, Artificial Sequence
  Synthetic oligonucleotide: BID-2014
accgcggugggagccagagg

SEQ ID NO: 44122 - RNA, 21 nt, Artificial Sequence
  Synthetic oligonucleotide: BID-4629
gaccgcggugggagccagagg

SEQ ID NO: 44123 - RNA, 22 nt, Artificial Sequence
  Synthetic oligonucleotide: BID-4630
cgaccgcggugggagccagagg

SEQ ID NO: 44124 - RNA, 23 nt, Artificial Sequence
  Synthetic oligonucleotide: BID-4631
ccgaccgcggugggagccagagg

SEQ ID NO: 44125 - RNA, 24 nt, Artificial Sequence
  Synthetic oligonucleotide: BID-4632
cccgaccgcggugggagccagagg

SEQ ID NO: 44126 - RNA, 18 nt, Artificial Sequence
  Synthetic oligonucleotide: BID-4633
ucggguccgccucggagg

SEQ ID NO: 44127 - RNA, 19 nt, Artificial Sequence
  Synthetic oligonucleotide: BID-4634
gucggguccgccucggagg

SEQ ID NO: 44128 - RNA, 20 nt, Artificial Sequence
  Synthetic oligonucleotide: BID-2041
ggucggguccgccucggagg

SEQ ID NO: 44129 - RNA, 21 nt, Artificial Sequence
  Synthetic oligonucleotide: BID-4635
gggucggguccgccucggagg

SEQ ID NO: 44130 - RNA, 22 nt, Artificial Sequence
  Synthetic oligonucleotide: BID-4636
agggucggguccgccucggagg

SEQ ID NO: 44131 - RNA, 23 nt, Artificial Sequence
  Synthetic oligonucleotide: BID-4637
gagggucggguccgccucggagg

SEQ ID NO: 44132 - RNA, 24 nt, Artificial Sequence
  Synthetic oligonucleotide: BID-4638
ugagggucggguccgccucggagg

SEQ ID NO: 44133 - RNA, 18 nt, Artificial Sequence
  Synthetic oligonucleotide: BID-4639
gagccagaggaggggagg

SEQ ID NO: 44134 - RNA, 19 nt, Artificial Sequence
  Synthetic oligonucleotide: BID-4640
ggagccagaggaggggagg

SEQ ID NO: 44135 - RNA, 20 nt, Artificial Sequence
  Synthetic oligonucleotide: BID-2018
gggagccagaggaggggagg

SEQ ID NO: 44136 - RNA, 21 nt, Artificial Sequence
  Synthetic oligonucleotide: BID-4641
ugggagccagaggaggggagg

SEQ ID NO: 44137 - RNA, 22 nt, Artificial Sequence
  Synthetic oligonucleotide: BID-4642
gugggagccagaggaggggagg

SEQ ID NO: 44138 - RNA, 23 nt, Artificial Sequence
  Synthetic oligonucleotide: BID-4643
ggugggagccagaggaggggagg

SEQ ID NO: 44139 - RNA, 24 nt, Artificial Sequence
  Synthetic oligonucleotide: BID-4644
cggugggagccagaggaggggagg

SEQ ID NO: 44140 - RNA, 18 nt, Artificial Sequence
  Synthetic oligonucleotide: BID-4645
gugcggggcgcggggagg

SEQ ID NO: 44141 - RNA, 19 nt, Artificial Sequence
  Synthetic oligonucleotide: BID-4646
ggugcggggcgcggggagg

SEQ ID NO: 44142 - RNA, 20 nt, Artificial Sequence
  Synthetic oligonucleotide: BID-2064
gggugcggggcgcggggagg

SEQ ID NO: 44143 - RNA, 21 nt, Artificial Sequence
  Synthetic oligonucleotide: BID-4647
ggggugcggggcgcggggagg

SEQ ID NO: 44144 - RNA, 22 nt, Artificial Sequence
  Synthetic oligonucleotide: BID-4648
aggggugcggggcgcggggagg

SEQ ID NO: 44145 - RNA, 23 nt, Artificial Sequence
  Synthetic oligonucleotide: BID-4649
gaggggugcggggcgcggggagg

SEQ ID NO: 44146 - RNA, 24 nt, Artificial Sequence
  Synthetic oligonucleotide: BID-4650
ggaggggugcggggcgcggggagg

SEQ ID NO: 44147 - RNA, 18 nt, Artificial Sequence
  Synthetic oligonucleotide: BID-3387
agcgaggggccgggccgg

SEQ ID NO: 44148 - RNA, 19 nt, Artificial Sequence
  Synthetic oligonucleotide: BID-3388
cagcgaggggccgggccgg

SEQ ID NO: 44149 - RNA, 20 nt, Artificial Sequence
  Synthetic oligonucleotide: BID-368
gcagcgaggggccgggccgg

SEQ ID NO: 44150 - RNA, 21 nt, Artificial Sequence
  Synthetic oligonucleotide: BID-3389
ggcagcgaggggccgggccgg

SEQ ID NO: 44151 - RNA, 22 nt, Artificial Sequence
  Synthetic oligonucleotide: BID-3390
gggcagcgaggggccgggccgg

SEQ ID NO: 44152 - RNA, 23 nt, Artificial Sequence
  Synthetic oligonucleotide: BID-3391
ugggcagcgaggggccgggccgg

SEQ ID NO: 44153 - RNA, 24 nt, Artificial Sequence
  Synthetic oligonucleotide: BID-3392
gugggcagcgaggggccgggccgg

SEQ ID NO: 44154 - RNA, 18 nt, Artificial Sequence
  Synthetic oligonucleotide: BID-4651
cccugggcccgaccgcgg

SEQ ID NO: 44155 - RNA, 19 nt, Artificial Sequence
  Synthetic oligonucleotide: BID-4652
gcccugggcccgaccgcgg

SEQ ID NO: 44156 - RNA, 20 nt, Artificial Sequence
  Synthetic oligonucleotide: BID-2011
cgcccugggcccgaccgcgg

SEQ ID NO: 44157 - RNA, 21 nt, Artificial Sequence
  Synthetic oligonucleotide: BID-4653
ccgcccugggcccgaccgcgg

SEQ ID NO: 44158 - RNA, 22 nt, Artificial Sequence
  Synthetic oligonucleotide: BID-4654
cccgcccugggcccgaccgcgg

SEQ ID NO: 44159 - RNA, 23 nt, Artificial Sequence
  Synthetic oligonucleotide: BID-4655
gcccgcccugggcccgaccgcgg

SEQ ID NO: 44160 - RNA, 24 nt, Artificial Sequence
  Synthetic oligonucleotide: BID-4656
cgcccgcccugggcccgaccgcgg

SEQ ID NO: 44161 - RNA, 18 nt, Artificial Sequence
  Synthetic oligonucleotide: BID-4657
gcgcccgcgcccccgcgg

SEQ ID NO: 44162 - RNA, 19 nt, Artificial Sequence
  Synthetic oligonucleotide: BID-4658
cgcgcccgcgcccccgcgg

SEQ ID NO: 44163 - RNA, 20 nt, Artificial Sequence
  Synthetic oligonucleotide: BID-1122
acgcgcccgcgcccccgcgg

SEQ ID NO: 44164 - RNA, 21 nt, Artificial Sequence
  Synthetic oligonucleotide: BID-4659
gacgcgcccgcgcccccgcgg

SEQ ID NO: 44165 - RNA, 22 nt, Artificial Sequence
  Synthetic oligonucleotide: BID-4660
ggacgcgcccgcgcccccgcgg

SEQ ID NO: 44166 - RNA, 23 nt, Artificial Sequence
  Synthetic oligonucleotide: BID-4661
cggacgcgcccgcgcccccgcgg

SEQ ID NO: 44167 - RNA, 24 nt, Artificial Sequence
  Synthetic oligonucleotide: BID-4662
ccggacgcgcccgcgcccccgcgg

SEQ ID NO: 44168 - RNA, 18 nt, Artificial Sequence
  Synthetic oligonucleotide: BID-4663
gggcugggccuucugcgg

SEQ ID NO: 44169 - RNA, 19 nt, Artificial Sequence
  Synthetic oligonucleotide: BID-4664
ggggcugggccuucugcgg

SEQ ID NO: 44170 - RNA, 20 nt, Artificial Sequence
  Synthetic oligonucleotide: BID-1237
gggggcugggccuucugcgg

SEQ ID NO: 44171 - RNA, 21 nt, Artificial Sequence
  Synthetic oligonucleotide: BID-4665
ugggggcugggccuucugcgg

SEQ ID NO: 44172 - RNA, 22 nt, Artificial Sequence
  Synthetic oligonucleotide: BID-4666
cugggggcugggccuucugcgg

SEQ ID NO: 44173 - RNA, 23 nt, Artificial Sequence
  Synthetic oligonucleotide: BID-4667
gcugggggcugggccuucugcgg

SEQ ID NO: 44174 - RNA, 24 nt, Artificial Sequence
  Synthetic oligonucleotide: BID-4668
ggcugggggcugggccuucugcgg

SEQ ID NO: 44175 - RNA, 18 nt, Artificial Sequence
  Synthetic oligonucleotide: BID-4669
cuucaccugcaggcaggg

SEQ ID NO: 44176 - RNA, 19 nt, Artificial Sequence
  Synthetic oligonucleotide: BID-4670
ccuucaccugcaggcaggg

SEQ ID NO: 44177 - RNA, 20 nt, Artificial Sequence
  Synthetic oligonucleotide: BID-1239
gccuucaccugcaggcaggg

SEQ ID NO: 44178 - RNA, 21 nt, Artificial Sequence
  Synthetic oligonucleotide: BID-4671
ggccuucaccugcaggcaggg

SEQ ID NO: 44179 - RNA, 22 nt, Artificial Sequence
  Synthetic oligonucleotide: BID-4672
cggccuucaccugcaggcaggg

SEQ ID NO: 44180 - RNA, 23 nt, Artificial Sequence
  Synthetic oligonucleotide: BID-4673
ccggccuucaccugcaggcaggg

SEQ ID NO: 44181 - RNA, 24 nt, Artificial Sequence
  Synthetic oligonucleotide: BID-4674
accggccuucaccugcaggcaggg

SEQ ID NO: 44182 - RNA, 18 nt, Artificial Sequence
  Synthetic oligonucleotide: BID-4675
uggccuggggauucaggg

SEQ ID NO: 44183 - RNA, 19 nt, Artificial Sequence
  Synthetic oligonucleotide: BID-4676
guggccuggggauucaggg

SEQ ID NO: 44184 - RNA, 20 nt, Artificial Sequence
  Synthetic oligonucleotide: BID-1168
cguggccuggggauucaggg

SEQ ID NO: 44185 - RNA, 21 nt, Artificial Sequence
  Synthetic oligonucleotide: BID-4677
acguggccuggggauucaggg

SEQ ID NO: 44186 - RNA, 22 nt, Artificial Sequence
  Synthetic oligonucleotide: BID-4678
cacguggccuggggauucaggg

SEQ ID NO: 44187 - RNA, 23 nt, Artificial Sequence
  Synthetic oligonucleotide: BID-4679
ccacguggccuggggauucaggg

SEQ ID NO: 44188 - RNA, 24 nt, Artificial Sequence
  Synthetic oligonucleotide: BID-4680
uccacguggccuggggauucaggg

SEQ ID NO: 44189 - RNA, 18 nt, Artificial Sequence
  Synthetic oligonucleotide: BID-4681
gggccggggcgggccggg

SEQ ID NO: 44190 - RNA, 19 nt, Artificial Sequence
  Synthetic oligonucleotide: BID-4682
cgggccggggcgggccggg

SEQ ID NO: 44191 - RNA, 20 nt, Artificial Sequence
  Synthetic oligonucleotide: BID-4683
gcgggccggggcgggccggg

SEQ ID NO: 44192 - RNA, 21 nt, Artificial Sequence
  Synthetic oligonucleotide: BID-4684
ggcgggccggggcgggccggg

SEQ ID NO: 44193 - RNA, 22 nt, Artificial Sequence
  Synthetic oligonucleotide: BID-4685
gggcgggccggggcgggccggg

SEQ ID NO: 44194 - RNA, 23 nt, Artificial Sequence
  Synthetic oligonucleotide: BID-4686
ggggcgggccggggcgggccggg

SEQ ID NO: 44195 - RNA, 24 nt, Artificial Sequence
  Synthetic oligonucleotide: BID-4687
gggggcgggccggggcgggccggg

SEQ ID NO: 44196 - RNA, 18 nt, Artificial Sequence
  Synthetic oligonucleotide: BID-4688
aggggugcggggcgcggg

SEQ ID NO: 44197 - RNA, 19 nt, Artificial Sequence
  Synthetic oligonucleotide: BID-4689
gaggggugcggggcgcggg

SEQ ID NO: 44198 - RNA, 20 nt, Artificial Sequence
  Synthetic oligonucleotide: BID-1176
ggaggggugcggggcgcggg

SEQ ID NO: 44199 - RNA, 21 nt, Artificial Sequence
  Synthetic oligonucleotide: BID-4690
gggaggggugcggggcgcggg

SEQ ID NO: 44200 - RNA, 22 nt, Artificial Sequence
  Synthetic oligonucleotide: BID-4691
ggggaggggugcggggcgcggg

SEQ ID NO: 44201 - RNA, 23 nt, Artificial Sequence
  Synthetic oligonucleotide: BID-4692
aggggaggggugcggggcgcggg

SEQ ID NO: 44202 - RNA, 24 nt, Artificial Sequence
  Synthetic oligonucleotide: BID-4693
caggggaggggugcggggcgcggg

SEQ ID NO: 44203 - RNA, 18 nt, Artificial Sequence
  Synthetic oligonucleotide: BID-4694
ggggcgggccggggcggg

SEQ ID NO: 44204 - RNA, 19 nt, Artificial Sequence
  Synthetic oligonucleotide: BID-4695
gggggcgggccggggcggg

SEQ ID NO: 44205 - RNA, 20 nt, Artificial Sequence
  Synthetic oligonucleotide: BID-4696
cgggggcgggccggggcggg

SEQ ID NO: 44206 - RNA, 18 nt, Artificial Sequence
  Synthetic oligonucleotide: BID-3399
ucggugggcagcgagggg

SEQ ID NO: 44207 - RNA, 19 nt, Artificial Sequence
  Synthetic oligonucleotide: BID-3400
cucggugggcagcgagggg

SEQ ID NO: 44208 - RNA, 20 nt, Artificial Sequence
  Synthetic oligonucleotide: BID-367
gcucggugggcagcgagggg

SEQ ID NO: 44209 - RNA, 21 nt, Artificial Sequence
  Synthetic oligonucleotide: BID-3401
ggcucggugggcagcgagggg

SEQ ID NO: 44210 - RNA, 22 nt, Artificial Sequence
  Synthetic oligonucleotide: BID-3402
uggcucggugggcagcgagggg

SEQ ID NO: 44211 - RNA, 23 nt, Artificial Sequence
  Synthetic oligonucleotide: BID-3403
auggcucggugggcagcgagggg

SEQ ID NO: 44212 - RNA, 24 nt, Artificial Sequence
  Synthetic oligonucleotide: BID-3404
gauggcucggugggcagcgagggg

SEQ ID NO: 44213 - RNA, 18 nt, Artificial Sequence
  Synthetic oligonucleotide: BID-4697
gcggggcgcggggagggg

SEQ ID NO: 44214 - RNA, 19 nt, Artificial Sequence
  Synthetic oligonucleotide: BID-4698
ugcggggcgcggggagggg

SEQ ID NO: 44215 - RNA, 20 nt, Artificial Sequence
  Synthetic oligonucleotide: BID-1181
gugcggggcgcggggagggg

SEQ ID NO: 44216 - RNA, 21 nt, Artificial Sequence
  Synthetic oligonucleotide: BID-4699
ggugcggggcgcggggagggg

SEQ ID NO: 44217 - RNA, 22 nt, Artificial Sequence
  Synthetic oligonucleotide: BID-4700
gggugcggggcgcggggagggg

SEQ ID NO: 44218 - RNA, 23 nt, Artificial Sequence
  Synthetic oligonucleotide: BID-4701
ggggugcggggcgcggggagggg

SEQ ID NO: 44219 - RNA, 24 nt, Artificial Sequence
  Synthetic oligonucleotide: BID-4702
aggggugcggggcgcggggagggg

SEQ ID NO: 44220 - RNA, 18 nt, Artificial Sequence
  Synthetic oligonucleotide: BID-4703
cgcggggagggggagggg

SEQ ID NO: 44221 - RNA, 19 nt, Artificial Sequence
  Synthetic oligonucleotide: BID-4704
gcgcggggagggggagggg

SEQ ID NO: 44222 - RNA, 20 nt, Artificial Sequence
  Synthetic oligonucleotide: BID-1183
ggcgcggggagggggagggg

SEQ ID NO: 44223 - RNA, 21 nt, Artificial Sequence
  Synthetic oligonucleotide: BID-4705
gggcgcggggagggggagggg

SEQ ID NO: 44224 - RNA, 22 nt, Artificial Sequence
  Synthetic oligonucleotide: BID-4706
ggggcgcggggagggggagggg

SEQ ID NO: 44225 - RNA, 23 nt, Artificial Sequence
  Synthetic oligonucleotide: BID-4707
cggggcgcggggagggggagggg

SEQ ID NO: 44226 - RNA, 24 nt, Artificial Sequence
  Synthetic oligonucleotide: BID-4708
gcggggcgcggggagggggagggg

SEQ ID NO: 44227 - RNA, 18 nt, Artificial Sequence
  Synthetic oligonucleotide: BID-4709
ggggugcggggcgcgggg

SEQ ID NO: 44228 - RNA, 19 nt, Artificial Sequence
  Synthetic oligonucleotide: BID-4710
aggggugcggggcgcgggg

SEQ ID NO: 44229 - RNA, 20 nt, Artificial Sequence
  Synthetic oligonucleotide: BID-2061
gaggggugcggggcgcgggg

SEQ ID NO: 44230 - RNA, 21 nt, Artificial Sequence
  Synthetic oligonucleotide: BID-4711
ggaggggugcggggcgcgggg

SEQ ID NO: 44231 - RNA, 22 nt, Artificial Sequence
  Synthetic oligonucleotide: BID-4712
gggaggggugcggggcgcgggg

SEQ ID NO: 44232 - RNA, 23 nt, Artificial Sequence
  Synthetic oligonucleotide: BID-4713
ggggaggggugcggggcgcgggg

SEQ ID NO: 44233 - RNA, 24 nt, Artificial Sequence
  Synthetic oligonucleotide: BID-4714
aggggaggggugcggggcgcgggg

SEQ ID NO: 44234 - RNA, 18 nt, Artificial Sequence
  Synthetic oligonucleotide: BID-4715
cggggcgcggggaggggg

SEQ ID NO: 44235 - RNA, 19 nt, Artificial Sequence
  Synthetic oligonucleotide: BID-4716
gcggggcgcggggaggggg

SEQ ID NO: 44236 - RNA, 20 nt, Artificial Sequence
  Synthetic oligonucleotide: BID-2065
ugcggggcgcggggaggggg

SEQ ID NO: 44237 - RNA, 21 nt, Artificial Sequence
  Synthetic oligonucleotide: BID-4717
gugcggggcgcggggaggggg

SEQ ID NO: 44238 - RNA, 22 nt, Artificial Sequence
  Synthetic oligonucleotide: BID-4718
ggugcggggcgcggggaggggg

SEQ ID NO: 44239 - RNA, 23 nt, Artificial Sequence
  Synthetic oligonucleotide: BID-4719
gggugcggggcgcggggaggggg

SEQ ID NO: 44240 - RNA, 24 nt, Artificial Sequence
  Synthetic oligonucleotide: BID-4720
ggggugcggggcgcggggaggggg

SEQ ID NO: 44241 - RNA, 18 nt, Artificial Sequence
  Synthetic oligonucleotide: BID-4721
gggcccgggcgugggggg

SEQ ID NO: 44242 - RNA, 19 nt, Artificial Sequence
  Synthetic oligonucleotide: BID-4722
cgggcccgggcgugggggg

SEQ ID NO: 44243 - RNA, 20 nt, Artificial Sequence
  Synthetic oligonucleotide: BID-4723
gcgggcccgggcgugggggg

SEQ ID NO: 44244 - RNA, 21 nt, Artificial Sequence
  Synthetic oligonucleotide: BID-4724
ggcgggcccgggcgugggggg

SEQ ID NO: 44245 - RNA, 22 nt, Artificial Sequence
  Synthetic oligonucleotide: BID-4725
gggcgggcccgggcgugggggg

SEQ ID NO: 44246 - RNA, 23 nt, Artificial Sequence
  Synthetic oligonucleotide: BID-4726
ggggcgggcccgggcgugggggg

SEQ ID NO: 44247 - RNA, 24 nt, Artificial Sequence
  Synthetic oligonucleotide: BID-4727
cggggcgggcccgggcgugggggg

SEQ ID NO: 44248 - RNA, 18 nt, Artificial Sequence
  Synthetic oligonucleotide: BID-3412
cuguaagugggcuggggg

SEQ ID NO: 44249 - RNA, 19 nt, Artificial Sequence
  Synthetic oligonucleotide: BID-3413
ucuguaagugggcuggggg

SEQ ID NO: 44250 - RNA, 20 nt, Artificial Sequence
  Synthetic oligonucleotide: BID-377
uucuguaagugggcuggggg

SEQ ID NO: 44251 - RNA, 21 nt, Artificial Sequence
  Synthetic oligonucleotide: BID-3414
auucuguaagugggcuggggg

SEQ ID NO: 44252 - RNA, 22 nt, Artificial Sequence
  Synthetic oligonucleotide: BID-3415
gauucuguaagugggcuggggg

SEQ ID NO: 44253 - RNA, 23 nt, Artificial Sequence
  Synthetic oligonucleotide: BID-3416
ggauucuguaagugggcuggggg

SEQ ID NO: 44254 - RNA, 24 nt, Artificial Sequence
  Synthetic oligonucleotide: BID-3417
cggauucuguaagugggcuggggg

SEQ ID NO: 44255 - RNA, 18 nt, Artificial Sequence
  Synthetic oligonucleotide: BID-3418
gcggauucuguaaguggg

SEQ ID NO: 44256 - RNA, 19 nt, Artificial Sequence
  Synthetic oligonucleotide: BID-3419
ugcggauucuguaaguggg

SEQ ID NO: 44257 - RNA, 20 nt, Artificial Sequence
  Synthetic oligonucleotide: BID-374
gugcggauucuguaaguggg

SEQ ID NO: 44258 - RNA, 21 nt, Artificial Sequence
  Synthetic oligonucleotide: BID-3420
agugcggauucuguaaguggg

SEQ ID NO: 44259 - RNA, 22 nt, Artificial Sequence
  Synthetic oligonucleotide: BID-3421
cagugcggauucuguaaguggg

SEQ ID NO: 44260 - RNA, 23 nt, Artificial Sequence
  Synthetic oligonucleotide: BID-3422
acagugcggauucuguaaguggg

SEQ ID NO: 44261 - RNA, 24 nt, Artificial Sequence
  Synthetic oligonucleotide: BID-3423
cacagugcggauucuguaaguggg

SEQ ID NO: 44262 - RNA, 18 nt, Artificial Sequence
  Synthetic oligonucleotide: BID-4728
gaccccaggggacccugg

SEQ ID NO: 44263 - RNA, 19 nt, Artificial Sequence
  Synthetic oligonucleotide: BID-4729
ugaccccaggggacccugg

SEQ ID NO: 44264 - RNA, 20 nt, Artificial Sequence
  Synthetic oligonucleotide: BID-1215
augaccccaggggacccugg

SEQ ID NO: 44265 - RNA, 21 nt, Artificial Sequence
  Synthetic oligonucleotide: BID-4730
aaugaccccaggggacccugg

SEQ ID NO: 44266 - RNA, 22 nt, Artificial Sequence
  Synthetic oligonucleotide: BID-4731
gaaugaccccaggggacccugg

SEQ ID NO: 44267 - RNA, 23 nt, Artificial Sequence
  Synthetic oligonucleotide: BID-4732
ugaaugaccccaggggacccugg

SEQ ID NO: 44268 - RNA, 24 nt, Artificial Sequence
  Synthetic oligonucleotide: BID-4733
cugaaugaccccaggggacccugg

SEQ ID NO: 44269 - RNA, 18 nt, Artificial Sequence
  Synthetic oligonucleotide: BID-3424
aggggccgggccggcugg

SEQ ID NO: 44270 - RNA, 19 nt, Artificial Sequence
  Synthetic oligonucleotide: BID-3425
gaggggccgggccggcugg

SEQ ID NO: 44271 - RNA, 20 nt, Artificial Sequence
  Synthetic oligonucleotide: BID-25
cgaggggccgggccggcugg

SEQ ID NO: 44272 - RNA, 21 nt, Artificial Sequence
  Synthetic oligonucleotide: BID-3426
gcgaggggccgggccggcugg

SEQ ID NO: 44273 - RNA, 22 nt, Artificial Sequence
  Synthetic oligonucleotide: BID-3427
agcgaggggccgggccggcugg

SEQ ID NO: 44274 - RNA, 23 nt, Artificial Sequence
  Synthetic oligonucleotide: BID-3428
cagcgaggggccgggccggcugg

SEQ ID NO: 44275 - RNA, 24 nt, Artificial Sequence
  Synthetic oligonucleotide: BID-3429
gcagcgaggggccgggccggcugg

SEQ ID NO: 44276 - RNA, 18 nt, Artificial Sequence
  Synthetic oligonucleotide: BID-4734
cccucagccaccaagugg

SEQ ID NO: 44277 - RNA, 19 nt, Artificial Sequence
  Synthetic oligonucleotide: BID-4735
gcccucagccaccaagugg

SEQ ID NO: 44278 - RNA, 20 nt, Artificial Sequence
  Synthetic oligonucleotide: BID-1217
agcccucagccaccaagugg

SEQ ID NO: 44279 - RNA, 21 nt, Artificial Sequence
  Synthetic oligonucleotide: BID-4736
aagcccucagccaccaagugg

SEQ ID NO: 44280 - RNA, 22 nt, Artificial Sequence
  Synthetic oligonucleotide: BID-4737
gaagcccucagccaccaagugg

SEQ ID NO: 44281 - RNA, 23 nt, Artificial Sequence
  Synthetic oligonucleotide: BID-4738
ugaagcccucagccaccaagugg

SEQ ID NO: 44282 - RNA, 24 nt, Artificial Sequence
  Synthetic oligonucleotide: BID-4739
cugaagcccucagccaccaagugg

SEQ ID NO: 44283 - RNA, 18 nt, Artificial Sequence
  Synthetic oligonucleotide: BID-3448
gaggggccgggccggcug

SEQ ID NO: 44284 - RNA, 19 nt, Artificial Sequence
  Synthetic oligonucleotide: BID-3449
cgaggggccgggccggcug

SEQ ID NO: 44285 - RNA, 20 nt, Artificial Sequence
  Synthetic oligonucleotide: BID-370
gcgaggggccgggccggcug

SEQ ID NO: 44286 - RNA, 21 nt, Artificial Sequence
  Synthetic oligonucleotide: BID-3450
agcgaggggccgggccggcug

SEQ ID NO: 44287 - RNA, 22 nt, Artificial Sequence
  Synthetic oligonucleotide: BID-3451
cagcgaggggccgggccggcug

SEQ ID NO: 44288 - RNA, 23 nt, Artificial Sequence
  Synthetic oligonucleotide: BID-3452
gcagcgaggggccgggccggcug

SEQ ID NO: 44289 - RNA, 24 nt, Artificial Sequence
  Synthetic oligonucleotide: BID-3453
ggcagcgaggggccgggccggcug

SEQ ID NO: 44290 - RNA, 18 nt, Artificial Sequence
  Synthetic oligonucleotide: BID-4740
ggauccucgcugcugcug

SEQ ID NO: 44291 - RNA, 19 nt, Artificial Sequence
  Synthetic oligonucleotide: BID-4741
cggauccucgcugcugcug

SEQ ID NO: 44292 - RNA, 20 nt, Artificial Sequence
  Synthetic oligonucleotide: BID-1204
gcggauccucgcugcugcug

SEQ ID NO: 44293 - RNA, 21 nt, Artificial Sequence
  Synthetic oligonucleotide: BID-4742
ugcggauccucgcugcugcug

SEQ ID NO: 44294 - RNA, 22 nt, Artificial Sequence
  Synthetic oligonucleotide: BID-4743
gugcggauccucgcugcugcug

SEQ ID NO: 44295 - RNA, 23 nt, Artificial Sequence
  Synthetic oligonucleotide: BID-4744
ugugcggauccucgcugcugcug

SEQ ID NO: 44296 - RNA, 24 nt, Artificial Sequence
  Synthetic oligonucleotide: BID-4745
augugcggauccucgcugcugcug

SEQ ID NO: 44297 - RNA, 18 nt, Artificial Sequence
  Synthetic oligonucleotide: BID-4746
ggggcgggcccgggcgug

SEQ ID NO: 44298 - RNA, 19 nt, Artificial Sequence
  Synthetic oligonucleotide: BID-4747
cggggcgggcccgggcgug

SEQ ID NO: 44299 - RNA, 20 nt, Artificial Sequence
  Synthetic oligonucleotide: BID-3631
ccggggcgggcccgggcgug

SEQ ID NO: 44300 - RNA, 21 nt, Artificial Sequence
  Synthetic oligonucleotide: BID-4748
gccggggcgggcccgggcgug

SEQ ID NO: 44301 - RNA, 22 nt, Artificial Sequence
  Synthetic oligonucleotide: BID-4749
ggccggggcgggcccgggcgug

SEQ ID NO: 44302 - RNA, 23 nt, Artificial Sequence
  Synthetic oligonucleotide: BID-4750
gggccggggcgggcccgggcgug

SEQ ID NO: 44303 - RNA, 24 nt, Artificial Sequence
  Synthetic oligonucleotide: BID-4751
cgggccggggcgggcccgggcgug

SEQ ID NO: 44304 - RNA, 18 nt, Artificial Sequence
  Synthetic oligonucleotide: BID-3460
uacgaaugugcagcggug

SEQ ID NO: 44305 - RNA, 19 nt, Artificial Sequence
  Synthetic oligonucleotide: BID-3461
auacgaaugugcagcggug

SEQ ID NO: 44306 - RNA, 20 nt, Artificial Sequence
  Synthetic oligonucleotide: BID-361
aauacgaaugugcagcggug

SEQ ID NO: 44307 - RNA, 21 nt, Artificial Sequence
  Synthetic oligonucleotide: BID-3462
aaauacgaaugugcagcggug

SEQ ID NO: 44308 - RNA, 22 nt, Artificial Sequence
  Synthetic oligonucleotide: BID-3463
caaauacgaaugugcagcggug

SEQ ID NO: 44309 - RNA, 23 nt, Artificial Sequence
  Synthetic oligonucleotide: BID-3464
acaaauacgaaugugcagcggug

SEQ ID NO: 44310 - RNA, 24 nt, Artificial Sequence
  Synthetic oligonucleotide: BID-3465
aacaaauacgaaugugcagcggug

SEQ ID NO: 44311 - RNA, 18 nt, Artificial Sequence
  Synthetic oligonucleotide: BID-4752
gcggccggcaggucggug

SEQ ID NO: 44312 - RNA, 19 nt, Artificial Sequence
  Synthetic oligonucleotide: BID-4753
cgcggccggcaggucggug

SEQ ID NO: 44313 - RNA, 20 nt, Artificial Sequence
  Synthetic oligonucleotide: BID-1152
gcgcggccggcaggucggug

SEQ ID NO: 44314 - RNA, 21 nt, Artificial Sequence
  Synthetic oligonucleotide: BID-4754
ggcgcggccggcaggucggug

SEQ ID NO: 44315 - RNA, 22 nt, Artificial Sequence
  Synthetic oligonucleotide: BID-4755
cggcgcggccggcaggucggug

SEQ ID NO: 44316 - RNA, 23 nt, Artificial Sequence
  Synthetic oligonucleotide: BID-4756
ucggcgcggccggcaggucggug

SEQ ID NO: 44317 - RNA, 24 nt, Artificial Sequence
  Synthetic oligonucleotide: BID-4757
cucggcgcggccggcaggucggug

SEQ ID NO: 44318 - RNA, 18 nt, Artificial Sequence
  Synthetic oligonucleotide: BID-4758
ggauucaggggaggggug

SEQ ID NO: 44319 - RNA, 19 nt, Artificial Sequence
  Synthetic oligonucleotide: BID-4759
gggauucaggggaggggug

SEQ ID NO: 44320 - RNA, 20 nt, Artificial Sequence
  Synthetic oligonucleotide: BID-2055
ggggauucaggggaggggug

SEQ ID NO: 44321 - RNA, 21 nt, Artificial Sequence
  Synthetic oligonucleotide: BID-4760
uggggauucaggggaggggug

SEQ ID NO: 44322 - RNA, 22 nt, Artificial Sequence
  Synthetic oligonucleotide: BID-4761
cuggggauucaggggaggggug

SEQ ID NO: 44323 - RNA, 23 nt, Artificial Sequence
  Synthetic oligonucleotide: BID-4762
ccuggggauucaggggaggggug

SEQ ID NO: 44324 - RNA, 24 nt, Artificial Sequence
  Synthetic oligonucleotide: BID-4763
gccuggggauucaggggaggggug

SEQ ID NO: 44325 - RNA, 18 nt, Artificial Sequence
  Synthetic oligonucleotide: BID-4764
aagcgcgcggggcgccau

SEQ ID NO: 44326 - RNA, 19 nt, Artificial Sequence
  Synthetic oligonucleotide: BID-4765
gaagcgcgcggggcgccau

SEQ ID NO: 44327 - RNA, 20 nt, Artificial Sequence
  Synthetic oligonucleotide: BID-1113
ggaagcgcgcggggcgccau

SEQ ID NO: 44328 - RNA, 21 nt, Artificial Sequence
  Synthetic oligonucleotide: BID-4766
aggaagcgcgcggggcgccau

SEQ ID NO: 44329 - RNA, 22 nt, Artificial Sequence
  Synthetic oligonucleotide: BID-4767
gaggaagcgcgcggggcgccau

SEQ ID NO: 44330 - RNA, 23 nt, Artificial Sequence
  Synthetic oligonucleotide: BID-4768
ggaggaagcgcgcggggcgccau

SEQ ID NO: 44331 - RNA, 24 nt, Artificial Sequence
  Synthetic oligonucleotide: BID-4769
aggaggaagcgcgcggggcgccau

SEQ ID NO: 44332 - RNA, 18 nt, Artificial Sequence
  Synthetic oligonucleotide: BID-4770
aggccucagcagcgaccu

SEQ ID NO: 44333 - RNA, 19 nt, Artificial Sequence
  Synthetic oligonucleotide: BID-4771
caggccucagcagcgaccu

SEQ ID NO: 44334 - RNA, 20 nt, Artificial Sequence
  Synthetic oligonucleotide: BID-1149
ccaggccucagcagcgaccu

SEQ ID NO: 44335 - RNA, 21 nt, Artificial Sequence
  Synthetic oligonucleotide: BID-4772
cccaggccucagcagcgaccu

SEQ ID NO: 44336 - RNA, 22 nt, Artificial Sequence
  Synthetic oligonucleotide: BID-4773
ccccaggccucagcagcgaccu

SEQ ID NO: 44337 - RNA, 23 nt, Artificial Sequence
  Synthetic oligonucleotide: BID-4774
gccccaggccucagcagcgaccu

SEQ ID NO: 44338 - RNA, 24 nt, Artificial Sequence
  Synthetic oligonucleotide: BID-4775
agccccaggccucagcagcgaccu

SEQ ID NO: 44339 - RNA, 18 nt, Artificial Sequence
  Synthetic oligonucleotide: BID-4776
augaccccaggggacccu

SEQ ID NO: 44340 - RNA, 19 nt, Artificial Sequence
  Synthetic oligonucleotide: BID-4777
aaugaccccaggggacccu

SEQ ID NO: 44341 - RNA, 20 nt, Artificial Sequence
  Synthetic oligonucleotide: BID-2099
gaaugaccccaggggacccu

SEQ ID NO: 44342 - RNA, 21 nt, Artificial Sequence
  Synthetic oligonucleotide: BID-4778
ugaaugaccccaggggacccu

SEQ ID NO: 44343 - RNA, 22 nt, Artificial Sequence
  Synthetic oligonucleotide: BID-4779
cugaaugaccccaggggacccu

SEQ ID NO: 44344 - RNA, 23 nt, Artificial Sequence
  Synthetic oligonucleotide: BID-4780
gcugaaugaccccaggggacccu

SEQ ID NO: 44345 - RNA, 24 nt, Artificial Sequence
  Synthetic oligonucleotide: BID-4781
ggcugaaugaccccaggggacccu

SEQ ID NO: 44346 - RNA, 18 nt, Artificial Sequence
  Synthetic oligonucleotide: BID-4782
ugagggucggguccgccu

SEQ ID NO: 44347 - RNA, 19 nt, Artificial Sequence
  Synthetic oligonucleotide: BID-4783
cugagggucggguccgccu

SEQ ID NO: 44348 - RNA, 20 nt, Artificial Sequence
  Synthetic oligonucleotide: BID-2039
gcugagggucggguccgccu

SEQ ID NO: 44349 - RNA, 21 nt, Artificial Sequence
  Synthetic oligonucleotide: BID-4784
ugcugagggucggguccgccu

SEQ ID NO: 44350 - RNA, 22 nt, Artificial Sequence
  Synthetic oligonucleotide: BID-4785
gugcugagggucggguccgccu

SEQ ID NO: 44351 - RNA, 23 nt, Artificial Sequence
  Synthetic oligonucleotide: BID-4786
ggugcugagggucggguccgccu

SEQ ID NO: 44352 - RNA, 24 nt, Artificial Sequence
  Synthetic oligonucleotide: BID-4787
cggugcugagggucggguccgccu

SEQ ID NO: 44353 - RNA, 18 nt, Artificial Sequence
  Synthetic oligonucleotide: BID-4788
gaccguguccgcgcgccu

SEQ ID NO: 44354 - RNA, 19 nt, Artificial Sequence
  Synthetic oligonucleotide: BID-4789
cgaccguguccgcgcgccu

SEQ ID NO: 44355 - RNA, 20 nt, Artificial Sequence
  Synthetic oligonucleotide: BID-1993
ucgaccguguccgcgcgccu

SEQ ID NO: 44356 - RNA, 21 nt, Artificial Sequence
  Synthetic oligonucleotide: BID-4790
gucgaccguguccgcgcgccu

SEQ ID NO: 44357 - RNA, 22 nt, Artificial Sequence
  Synthetic oligonucleotide: BID-4791
agucgaccguguccgcgcgccu

SEQ ID NO: 44358 - RNA, 23 nt, Artificial Sequence
  Synthetic oligonucleotide: BID-4792
uagucgaccguguccgcgcgccu

SEQ ID NO: 44359 - RNA, 24 nt, Artificial Sequence
  Synthetic oligonucleotide: BID-4793
guagucgaccguguccgcgcgccu

SEQ ID NO: 44360 - RNA, 18 nt, Artificial Sequence
  Synthetic oligonucleotide: BID-4794
uggggcucgcccgcuccu

SEQ ID NO: 44361 - RNA, 19 nt, Artificial Sequence
  Synthetic oligonucleotide: BID-4795
cuggggcucgcccgcuccu

SEQ ID NO: 44362 - RNA, 20 nt, Artificial Sequence
  Synthetic oligonucleotide: BID-1202
acuggggcucgcccgcuccu

SEQ ID NO: 44363 - RNA, 21 nt, Artificial Sequence
  Synthetic oligonucleotide: BID-4796
uacuggggcucgcccgcuccu

SEQ ID NO: 44364 - RNA, 22 nt, Artificial Sequence
  Synthetic oligonucleotide: BID-4797
uuacuggggcucgcccgcuccu

SEQ ID NO: 44365 - RNA, 23 nt, Artificial Sequence
  Synthetic oligonucleotide: BID-4798
cuuacuggggcucgcccgcuccu

SEQ ID NO: 44366 - RNA, 24 nt, Artificial Sequence
  Synthetic oligonucleotide: BID-4799
gcuuacuggggcucgcccgcuccu

SEQ ID NO: 44367 - RNA, 18 nt, Artificial Sequence
  Synthetic oligonucleotide: BID-4800
ggggacccugggagagcu

SEQ ID NO: 44368 - RNA, 19 nt, Artificial Sequence
  Synthetic oligonucleotide: BID-4801
aggggacccugggagagcu

SEQ ID NO: 44369 - RNA, 20 nt, Artificial Sequence
  Synthetic oligonucleotide: BID-1216
caggggacccugggagagcu

SEQ ID NO: 44370 - RNA, 21 nt, Artificial Sequence
  Synthetic oligonucleotide: BID-4802
ccaggggacccugggagagcu

SEQ ID NO: 44371 - RNA, 22 nt, Artificial Sequence
  Synthetic oligonucleotide: BID-4803
cccaggggacccugggagagcu

SEQ ID NO: 44372 - RNA, 23 nt, Artificial Sequence
  Synthetic oligonucleotide: BID-4804
ccccaggggacccugggagagcu

SEQ ID NO: 44373 - RNA, 24 nt, Artificial Sequence
  Synthetic oligonucleotide: BID-4805
accccaggggacccugggagagcu

SEQ ID NO: 44374 - RNA, 18 nt, Artificial Sequence
  Synthetic oligonucleotide: BID-4806
cuccucccgagcggagcu

SEQ ID NO: 44375 - RNA, 19 nt, Artificial Sequence
  Synthetic oligonucleotide: BID-4807
gcuccucccgagcggagcu

SEQ ID NO: 44376 - RNA, 20 nt, Artificial Sequence
  Synthetic oligonucleotide: BID-1198
ggcuccucccgagcggagcu

SEQ ID NO: 44377 - RNA, 21 nt, Artificial Sequence
  Synthetic oligonucleotide: BID-4808
cggcuccucccgagcggagcu

SEQ ID NO: 44378 - RNA, 22 nt, Artificial Sequence
  Synthetic oligonucleotide: BID-4809
ccggcuccucccgagcggagcu

SEQ ID NO: 44379 - RNA, 23 nt, Artificial Sequence
  Synthetic oligonucleotide: BID-4810
gccggcuccucccgagcggagcu

SEQ ID NO: 44380 - RNA, 24 nt, Artificial Sequence
  Synthetic oligonucleotide: BID-4811
ugccggcuccucccgagcggagcu

SEQ ID NO: 44381 - RNA, 18 nt, Artificial Sequence
  Synthetic oligonucleotide: BID-4812
cugccccggcguggagcu

SEQ ID NO: 44382 - RNA, 19 nt, Artificial Sequence
  Synthetic oligonucleotide: BID-4813
ccugccccggcguggagcu

SEQ ID NO: 44383 - RNA, 20 nt, Artificial Sequence
  Synthetic oligonucleotide: BID-1131
gccugccccggcguggagcu

SEQ ID NO: 44384 - RNA, 21 nt, Artificial Sequence
  Synthetic oligonucleotide: BID-4814
cgccugccccggcguggagcu

SEQ ID NO: 44385 - RNA, 22 nt, Artificial Sequence
  Synthetic oligonucleotide: BID-4815
ccgccugccccggcguggagcu

SEQ ID NO: 44386 - RNA, 23 nt, Artificial Sequence
  Synthetic oligonucleotide: BID-4816
gccgccugccccggcguggagcu

SEQ ID NO: 44387 - RNA, 24 nt, Artificial Sequence
  Synthetic oligonucleotide: BID-4817
ugccgccugccccggcguggagcu

SEQ ID NO: 44388 - RNA, 18 nt, Artificial Sequence
  Synthetic oligonucleotide: BID-3520
ggauucuguaagugggcu

SEQ ID NO: 44389 - RNA, 19 nt, Artificial Sequence
  Synthetic oligonucleotide: BID-3521
cggauucuguaagugggcu

SEQ ID NO: 44390 - RNA, 20 nt, Artificial Sequence
  Synthetic oligonucleotide: BID-5
gcggauucuguaagugggcu

SEQ ID NO: 44391 - RNA, 21 nt, Artificial Sequence
  Synthetic oligonucleotide: BID-3522
ugcggauucuguaagugggcu

SEQ ID NO: 44392 - RNA, 22 nt, Artificial Sequence
  Synthetic oligonucleotide: BID-3523
gugcggauucuguaagugggcu

SEQ ID NO: 44393 - RNA, 23 nt, Artificial Sequence
  Synthetic oligonucleotide: BID-3524
agugcggauucuguaagugggcu

SEQ ID NO: 44394 - RNA, 24 nt, Artificial Sequence
  Synthetic oligonucleotide: BID-3525
cagugcggauucuguaagugggcu

SEQ ID NO: 44395 - RNA, 18 nt, Artificial Sequence
  Synthetic oligonucleotide: BID-4818
auccucgcugcugcugcu

SEQ ID NO: 44396 - RNA, 19 nt, Artificial Sequence
  Synthetic oligonucleotide: BID-4819
gauccucgcugcugcugcu

SEQ ID NO: 44397 - RNA, 20 nt, Artificial Sequence
  Synthetic oligonucleotide: BID-2093
ggauccucgcugcugcugcu

SEQ ID NO: 44398 - RNA, 21 nt, Artificial Sequence
  Synthetic oligonucleotide: BID-4820
cggauccucgcugcugcugcu

SEQ ID NO: 44399 - RNA, 22 nt, Artificial Sequence
  Synthetic oligonucleotide: BID-4821
gcggauccucgcugcugcugcu

SEQ ID NO: 44400 - RNA, 23 nt, Artificial Sequence
  Synthetic oligonucleotide: BID-4822
ugcggauccucgcugcugcugcu

SEQ ID NO: 44401 - RNA, 24 nt, Artificial Sequence
  Synthetic oligonucleotide: BID-4823
gugcggauccucgcugcugcugcu

SEQ ID NO: 44402 - RNA, 18 nt, Artificial Sequence
  Synthetic oligonucleotide: BID-4824
cggggcgggcccgggcgu

SEQ ID NO: 44403 - RNA, 19 nt, Artificial Sequence
  Synthetic oligonucleotide: BID-4825
ccggggcgggcccgggcgu

SEQ ID NO: 44404 - RNA, 20 nt, Artificial Sequence
  Synthetic oligonucleotide: BID-3632
gccggggcgggcccgggcgu

SEQ ID NO: 44405 - RNA, 21 nt, Artificial Sequence
  Synthetic oligonucleotide: BID-4826
ggccggggcgggcccgggcgu

SEQ ID NO: 44406 - RNA, 22 nt, Artificial Sequence
  Synthetic oligonucleotide: BID-4827
gggccggggcgggcccgggcgu

SEQ ID NO: 44407 - RNA, 23 nt, Artificial Sequence
  Synthetic oligonucleotide: BID-4828
cgggccggggcgggcccgggcgu

SEQ ID NO: 44408 - RNA, 24 nt, Artificial Sequence
  Synthetic oligonucleotide: BID-4829
gcgggccggggcgggcccgggcgu

SEQ ID NO: 44409 - RNA, 18 nt, Artificial Sequence
  Synthetic oligonucleotide: BID-4830
ccugggcccgaccgcggu

SEQ ID NO: 44410 - RNA, 19 nt, Artificial Sequence
  Synthetic oligonucleotide: BID-4831
cccugggcccgaccgcggu

SEQ ID NO: 44411 - RNA, 20 nt, Artificial Sequence
  Synthetic oligonucleotide: BID-2012
gcccugggcccgaccgcggu

SEQ ID NO: 44412 - RNA, 21 nt, Artificial Sequence
  Synthetic oligonucleotide: BID-4832
cgcccugggcccgaccgcggu

SEQ ID NO: 44413 - RNA, 22 nt, Artificial Sequence
  Synthetic oligonucleotide: BID-4833
ccgcccugggcccgaccgcggu

SEQ ID NO: 44414 - RNA, 23 nt, Artificial Sequence
  Synthetic oligonucleotide: BID-4834
cccgcccugggcccgaccgcggu

SEQ ID NO: 44415 - RNA, 24 nt, Artificial Sequence
  Synthetic oligonucleotide: BID-4835
gcccgcccugggcccgaccgcggu

SEQ ID NO: 44416 - RNA, 18 nt, Artificial Sequence
  Synthetic oligonucleotide: BID-4836
gggcugacaaagcgcggu

SEQ ID NO: 44417 - RNA, 19 nt, Artificial Sequence
  Synthetic oligonucleotide: BID-4837
agggcugacaaagcgcggu

SEQ ID NO: 44418 - RNA, 20 nt, Artificial Sequence
  Synthetic oligonucleotide: BID-1199
cagggcugacaaagcgcggu

SEQ ID NO: 44419 - RNA, 21 nt, Artificial Sequence
  Synthetic oligonucleotide: BID-4838
ucagggcugacaaagcgcggu

SEQ ID NO: 44420 - RNA, 22 nt, Artificial Sequence
  Synthetic oligonucleotide: BID-4839
cucagggcugacaaagcgcggu

SEQ ID NO: 44421 - RNA, 23 nt, Artificial Sequence
  Synthetic oligonucleotide: BID-4840
gcucagggcugacaaagcgcggu

SEQ ID NO: 44422 - RNA, 24 nt, Artificial Sequence
  Synthetic oligonucleotide: BID-4841
agcucagggcugacaaagcgcggu

SEQ ID NO: 44423 - RNA, 18 nt, Artificial Sequence
  Synthetic oligonucleotide: BID-4842
uucaccugcaggcagggu

SEQ ID NO: 44424 - RNA, 19 nt, Artificial Sequence
  Synthetic oligonucleotide: BID-4843
cuucaccugcaggcagggu

SEQ ID NO: 44425 - RNA, 20 nt, Artificial Sequence
  Synthetic oligonucleotide: BID-2137
ccuucaccugcaggcagggu

SEQ ID NO: 44426 - RNA, 21 nt, Artificial Sequence
  Synthetic oligonucleotide: BID-4844
gccuucaccugcaggcagggu

SEQ ID NO: 44427 - RNA, 22 nt, Artificial Sequence
  Synthetic oligonucleotide: BID-4845
ggccuucaccugcaggcagggu

SEQ ID NO: 44428 - RNA, 23 nt, Artificial Sequence
  Synthetic oligonucleotide: BID-4846
cggccuucaccugcaggcagggu

SEQ ID NO: 44429 - RNA, 24 nt, Artificial Sequence
  Synthetic oligonucleotide: BID-4847
ccggccuucaccugcaggcagggu

SEQ ID NO: 44430 - RNA, 18 nt, Artificial Sequence
  Synthetic oligonucleotide: BID-4848
gggauucaggggaggggu

SEQ ID NO: 44431 - RNA, 19 nt, Artificial Sequence
  Synthetic oligonucleotide: BID-4849
ggggauucaggggaggggu

SEQ ID NO: 44432 - RNA, 20 nt, Artificial Sequence
  Synthetic oligonucleotide: BID-1170
uggggauucaggggaggggu

SEQ ID NO: 44433 - RNA, 21 nt, Artificial Sequence
  Synthetic oligonucleotide: BID-4850
cuggggauucaggggaggggu

SEQ ID NO: 44434 - RNA, 22 nt, Artificial Sequence
  Synthetic oligonucleotide: BID-4851
ccuggggauucaggggaggggu

SEQ ID NO: 44435 - RNA, 23 nt, Artificial Sequence
  Synthetic oligonucleotide: BID-4852
gccuggggauucaggggaggggu

SEQ ID NO: 44436 - RNA, 24 nt, Artificial Sequence
  Synthetic oligonucleotide: BID-4853
ggccuggggauucaggggaggggu

SEQ ID NO: 44437 - RNA, 18 nt, Artificial Sequence
  Synthetic oligonucleotide: BID-4854
ggaggggaggcggggggu

SEQ ID NO: 44438 - RNA, 19 nt, Artificial Sequence
  Synthetic oligonucleotide: BID-4855
aggaggggaggcggggggu

SEQ ID NO: 44439 - RNA, 20 nt, Artificial Sequence
  Synthetic oligonucleotide: BID-1147
gaggaggggaggcggggggu

SEQ ID NO: 44440 - RNA, 21 nt, Artificial Sequence
  Synthetic oligonucleotide: BID-4856
agaggaggggaggcggggggu

SEQ ID NO: 44441 - RNA, 22 nt, Artificial Sequence
  Synthetic oligonucleotide: BID-4857
cagaggaggggaggcggggggu

SEQ ID NO: 44442 - RNA, 23 nt, Artificial Sequence
  Synthetic oligonucleotide: BID-4858
ccagaggaggggaggcggggggu

SEQ ID NO: 44443 - RNA, 24 nt, Artificial Sequence
  Synthetic oligonucleotide: BID-4859
gccagaggaggggaggcggggggu

SEQ ID NO: 44444 - RNA, 18 nt, Artificial Sequence
  Synthetic oligonucleotide: BID-4860
ccacguggccuggggauu

SEQ ID NO: 44445 - RNA, 19 nt, Artificial Sequence
  Synthetic oligonucleotide: BID-4861
uccacguggccuggggauu

SEQ ID NO: 44446 - RNA, 20 nt, Artificial Sequence
  Synthetic oligonucleotide: BID-1164
cuccacguggccuggggauu

SEQ ID NO: 44447 - RNA, 21 nt, Artificial Sequence
  Synthetic oligonucleotide: BID-4862
ucuccacguggccuggggauu

SEQ ID NO: 44448 - RNA, 22 nt, Artificial Sequence
  Synthetic oligonucleotide: BID-4863
cucuccacguggccuggggauu

SEQ ID NO: 44449 - RNA, 23 nt, Artificial Sequence
  Synthetic oligonucleotide: BID-4864
ccucuccacguggccuggggauu

SEQ ID NO: 44450 - RNA, 24 nt, Artificial Sequence
  Synthetic oligonucleotide: BID-4865
uccucuccacguggccuggggauu

SEQ ID NO: 44451 - RNA, 18 nt, Artificial Sequence
  Synthetic oligonucleotide: BID-4866
uggauaaggcuccaggaa

SEQ ID NO: 44452 - RNA, 19 nt, Artificial Sequence
  Synthetic oligonucleotide: BID-4867
guggauaaggcuccaggaa

SEQ ID NO: 44453 - RNA, 20 nt, Artificial Sequence
  Synthetic oligonucleotide: BID-1047
uguggauaaggcuccaggaa

SEQ ID NO: 44454 - RNA, 21 nt, Artificial Sequence
  Synthetic oligonucleotide: BID-4868
guguggauaaggcuccaggaa

SEQ ID NO: 44455 - RNA, 22 nt, Artificial Sequence
  Synthetic oligonucleotide: BID-4869
gguguggauaaggcuccaggaa

SEQ ID NO: 44456 - RNA, 23 nt, Artificial Sequence
  Synthetic oligonucleotide: BID-4870
ggguguggauaaggcuccaggaa

SEQ ID NO: 44457 - RNA, 24 nt, Artificial Sequence
  Synthetic oligonucleotide: BID-4871
aggguguggauaaggcuccaggaa

SEQ ID NO: 44458 - RNA, 18 nt, Artificial Sequence
  Synthetic oligonucleotide: BID-4872
gauucugaauguuuccca

SEQ ID NO: 44459 - RNA, 19 nt, Artificial Sequence
  Synthetic oligonucleotide: BID-4873
ggauucugaauguuuccca

SEQ ID NO: 44460 - RNA, 20 nt, Artificial Sequence
  Synthetic oligonucleotide: BID-1564
gggauucugaauguuuccca

SEQ ID NO: 44461 - RNA, 21 nt, Artificial Sequence
  Synthetic oligonucleotide: BID-4874
ggggauucugaauguuuccca

SEQ ID NO: 44462 - RNA, 22 nt, Artificial Sequence
  Synthetic oligonucleotide: BID-4875
uggggauucugaauguuuccca

SEQ ID NO: 44463 - RNA, 23 nt, Artificial Sequence
  Synthetic oligonucleotide: BID-4876
cuggggauucugaauguuuccca

SEQ ID NO: 44464 - RNA, 24 nt, Artificial Sequence
  Synthetic oligonucleotide: BID-4877
ccuggggauucugaauguuuccca

SEQ ID NO: 44465 - RNA, 18 nt, Artificial Sequence
  Synthetic oligonucleotide: BID-4878
ccucaacuccugaugcca

SEQ ID NO: 44466 - RNA, 19 nt, Artificial Sequence
  Synthetic oligonucleotide: BID-4879
accucaacuccugaugcca

SEQ ID NO: 44467 - RNA, 20 nt, Artificial Sequence
  Synthetic oligonucleotide: BID-1875
uaccucaacuccugaugcca

SEQ ID NO: 44468 - RNA, 21 nt, Artificial Sequence
  Synthetic oligonucleotide: BID-4880
cuaccucaacuccugaugcca

SEQ ID NO: 44469 - RNA, 22 nt, Artificial Sequence
  Synthetic oligonucleotide: BID-4881
ucuaccucaacuccugaugcca

SEQ ID NO: 44470 - RNA, 23 nt, Artificial Sequence
  Synthetic oligonucleotide: BID-4882
gucuaccucaacuccugaugcca

SEQ ID NO: 44471 - RNA, 24 nt, Artificial Sequence
  Synthetic oligonucleotide: BID-4883
ugucuaccucaacuccugaugcca

SEQ ID NO: 44472 - RNA, 18 nt, Artificial Sequence
  Synthetic oligonucleotide: BID-4884
ccuuaagaccccagcuca

SEQ ID NO: 44473 - RNA, 19 nt, Artificial Sequence
  Synthetic oligonucleotide: BID-4885
cccuuaagaccccagcuca

SEQ ID NO: 44474 - RNA, 20 nt, Artificial Sequence
  Synthetic oligonucleotide: BID-1023
acccuuaagaccccagcuca

SEQ ID NO: 44475 - RNA, 21 nt, Artificial Sequence
  Synthetic oligonucleotide: BID-4886
cacccuuaagaccccagcuca

SEQ ID NO: 44476 - RNA, 22 nt, Artificial Sequence
  Synthetic oligonucleotide: BID-4887
acacccuuaagaccccagcuca

SEQ ID NO: 44477 - RNA, 23 nt, Artificial Sequence
  Synthetic oligonucleotide: BID-4888
cacacccuuaagaccccagcuca

SEQ ID NO: 44478 - RNA, 24 nt, Artificial Sequence
  Synthetic oligonucleotide: BID-4889
ccacacccuuaagaccccagcuca

SEQ ID NO: 44479 - RNA, 18 nt, Artificial Sequence
  Synthetic oligonucleotide: BID-4890
gccuccuguggguggaga

SEQ ID NO: 44480 - RNA, 19 nt, Artificial Sequence
  Synthetic oligonucleotide: BID-4891
agccuccuguggguggaga

SEQ ID NO: 44481 - RNA, 20 nt, Artificial Sequence
  Synthetic oligonucleotide: BID-1038
aagccuccuguggguggaga

SEQ ID NO: 44482 - RNA, 21 nt, Artificial Sequence
  Synthetic oligonucleotide: BID-4892
aaagccuccuguggguggaga

SEQ ID NO: 44483 - RNA, 22 nt, Artificial Sequence
  Synthetic oligonucleotide: BID-4893
caaagccuccuguggguggaga

SEQ ID NO: 44484 - RNA, 23 nt, Artificial Sequence
  Synthetic oligonucleotide: BID-4894
ucaaagccuccuguggguggaga

SEQ ID NO: 44485 - RNA, 24 nt, Artificial Sequence
  Synthetic oligonucleotide: BID-4895
cucaaagccuccuguggguggaga

SEQ ID NO: 44486 - RNA, 18 nt, Artificial Sequence
  Synthetic oligonucleotide: BID-4896
gucugaaacagucgcgua

SEQ ID NO: 44487 - RNA, 19 nt, Artificial Sequence
  Synthetic oligonucleotide: BID-4897
ugucugaaacagucgcgua

SEQ ID NO: 44488 - RNA, 20 nt, Artificial Sequence
  Synthetic oligonucleotide: BID-708
cugucugaaacagucgcgua

SEQ ID NO: 44489 - RNA, 21 nt, Artificial Sequence
  Synthetic oligonucleotide: BID-4898
acugucugaaacagucgcgua

SEQ ID NO: 44490 - RNA, 22 nt, Artificial Sequence
  Synthetic oligonucleotide: BID-4899
cacugucugaaacagucgcgua

SEQ ID NO: 44491 - RNA, 23 nt, Artificial Sequence
  Synthetic oligonucleotide: BID-4900
acacugucugaaacagucgcgua

SEQ ID NO: 44492 - RNA, 24 nt, Artificial Sequence
  Synthetic oligonucleotide: BID-4901
gacacugucugaaacagucgcgua

SEQ ID NO: 44493 - RNA, 18 nt, Artificial Sequence
  Synthetic oligonucleotide: BID-4902
uugauauccaaauaauua

SEQ ID NO: 44494 - RNA, 19 nt, Artificial Sequence
  Synthetic oligonucleotide: BID-4903
guugauauccaaauaauua

SEQ ID NO: 44495 - RNA, 20 nt, Artificial Sequence
  Synthetic oligonucleotide: BID-1548
aguugauauccaaauaauua

SEQ ID NO: 44496 - RNA, 21 nt, Artificial Sequence
  Synthetic oligonucleotide: BID-4904
gaguugauauccaaauaauua

SEQ ID NO: 44497 - RNA, 22 nt, Artificial Sequence
  Synthetic oligonucleotide: BID-4905
agaguugauauccaaauaauua

SEQ ID NO: 44498 - RNA, 23 nt, Artificial Sequence
  Synthetic oligonucleotide: BID-4906
cagaguugauauccaaauaauua

SEQ ID NO: 44499 - RNA, 24 nt, Artificial Sequence
  Synthetic oligonucleotide: BID-4907
ucagaguugauauccaaauaauua

SEQ ID NO: 44500 - RNA, 18 nt, Artificial Sequence
  Synthetic oligonucleotide: BID-4908
ccugguuccgugaggacc

SEQ ID NO: 44501 - RNA, 19 nt, Artificial Sequence
  Synthetic oligonucleotide: BID-4909
cccugguuccgugaggacc

SEQ ID NO: 44502 - RNA, 20 nt, Artificial Sequence
  Synthetic oligonucleotide: BID-1557
ccccugguuccgugaggacc

SEQ ID NO: 44503 - RNA, 21 nt, Artificial Sequence
  Synthetic oligonucleotide: BID-4910
accccugguuccgugaggacc

SEQ ID NO: 44504 - RNA, 22 nt, Artificial Sequence
  Synthetic oligonucleotide: BID-4911
aaccccugguuccgugaggacc

SEQ ID NO: 44505 - RNA, 23 nt, Artificial Sequence
  Synthetic oligonucleotide: BID-4912
aaaccccugguuccgugaggacc

SEQ ID NO: 44506 - RNA, 24 nt, Artificial Sequence
  Synthetic oligonucleotide: BID-4913
caaaccccugguuccgugaggacc

SEQ ID NO: 44507 - RNA, 18 nt, Artificial Sequence
  Synthetic oligonucleotide: BID-4914
cgcgccggcgcgggcucc

SEQ ID NO: 44508 - RNA, 19 nt, Artificial Sequence
  Synthetic oligonucleotide: BID-4915
ccgcgccggcgcgggcucc

SEQ ID NO: 44509 - RNA, 20 nt, Artificial Sequence
  Synthetic oligonucleotide: BID-1577
cccgcgccggcgcgggcucc

SEQ ID NO: 44510 - RNA, 21 nt, Artificial Sequence
  Synthetic oligonucleotide: BID-4916
ccccgcgccggcgcgggcucc

SEQ ID NO: 44511 - RNA, 22 nt, Artificial Sequence
  Synthetic oligonucleotide: BID-4917
gccccgcgccggcgcgggcucc

SEQ ID NO: 44512 - RNA, 23 nt, Artificial Sequence
  Synthetic oligonucleotide: BID-4918
agccccgcgccggcgcgggcucc

SEQ ID NO: 44513 - RNA, 24 nt, Artificial Sequence
  Synthetic oligonucleotide: BID-4919
cagccccgcgccggcgcgggcucc

SEQ ID NO: 44514 - RNA, 18 nt, Artificial Sequence
  Synthetic oligonucleotide: BID-4920
gaauuaucccagcggcgc

SEQ ID NO: 44515 - RNA, 19 nt, Artificial Sequence
  Synthetic oligonucleotide: BID-4921
ggaauuaucccagcggcgc

SEQ ID NO: 44516 - RNA, 20 nt, Artificial Sequence
  Synthetic oligonucleotide: BID-705
aggaauuaucccagcggcgc

SEQ ID NO: 44517 - RNA, 21 nt, Artificial Sequence
  Synthetic oligonucleotide: BID-4922
uaggaauuaucccagcggcgc

SEQ ID NO: 44518 - RNA, 22 nt, Artificial Sequence
  Synthetic oligonucleotide: BID-4923
uuaggaauuaucccagcggcgc

SEQ ID NO: 44519 - RNA, 23 nt, Artificial Sequence
  Synthetic oligonucleotide: BID-4924
auuaggaauuaucccagcggcgc

SEQ ID NO: 44520 - RNA, 24 nt, Artificial Sequence
  Synthetic oligonucleotide: BID-4925
cauuaggaauuaucccagcggcgc

SEQ ID NO: 44521 - RNA, 18 nt, Artificial Sequence
  Synthetic oligonucleotide: BID-4926
cgcaggcagaggcuuggc

SEQ ID NO: 44522 - RNA, 19 nt, Artificial Sequence
  Synthetic oligonucleotide: BID-4927
ccgcaggcagaggcuuggc

SEQ ID NO: 44523 - RNA, 20 nt, Artificial Sequence
  Synthetic oligonucleotide: BID-1871
gccgcaggcagaggcuuggc

SEQ ID NO: 44524 - RNA, 21 nt, Artificial Sequence
  Synthetic oligonucleotide: BID-4928
ggccgcaggcagaggcuuggc

SEQ ID NO: 44525 - RNA, 22 nt, Artificial Sequence
  Synthetic oligonucleotide: BID-4929
gggccgcaggcagaggcuuggc

SEQ ID NO: 44526 - RNA, 23 nt, Artificial Sequence
  Synthetic oligonucleotide: BID-4930
ugggccgcaggcagaggcuuggc

SEQ ID NO: 44527 - RNA, 24 nt, Artificial Sequence
  Synthetic oligonucleotide: BID-4931
cugggccgcaggcagaggcuuggc

SEQ ID NO: 44528 - RNA, 18 nt, Artificial Sequence
  Synthetic oligonucleotide: BID-4932
aacugaaaaagaaauuag

SEQ ID NO: 44529 - RNA, 19 nt, Artificial Sequence
  Synthetic oligonucleotide: BID-4933
aaacugaaaaagaaauuag

SEQ ID NO: 44530 - RNA, 20 nt, Artificial Sequence
  Synthetic oligonucleotide: BID-1546
aaaacugaaaaagaaauuag

SEQ ID NO: 44531 - RNA, 21 nt, Artificial Sequence
  Synthetic oligonucleotide: BID-4934
aaaaacugaaaaagaaauuag

SEQ ID NO: 44532 - RNA, 22 nt, Artificial Sequence
  Synthetic oligonucleotide: BID-4935
uaaaaacugaaaaagaaauuag

SEQ ID NO: 44533 - RNA, 23 nt, Artificial Sequence
  Synthetic oligonucleotide: BID-4936
cuaaaaacugaaaaagaaauuag

SEQ ID NO: 44534 - RNA, 24 nt, Artificial Sequence
  Synthetic oligonucleotide: BID-4937
acuaaaaacugaaaaagaaauuag

SEQ ID NO: 44535 - RNA, 18 nt, Artificial Sequence
  Synthetic oligonucleotide: BID-4938
aagguggaagagcucugg

SEQ ID NO: 44536 - RNA, 19 nt, Artificial Sequence
  Synthetic oligonucleotide: BID-4939
gaagguggaagagcucugg

SEQ ID NO: 44537 - RNA, 20 nt, Artificial Sequence
  Synthetic oligonucleotide: BID-1912
agaagguggaagagcucugg

SEQ ID NO: 44538 - RNA, 21 nt, Artificial Sequence
  Synthetic oligonucleotide: BID-4940
gagaagguggaagagcucugg

SEQ ID NO: 44539 - RNA, 22 nt, Artificial Sequence
  Synthetic oligonucleotide: BID-4941
ugagaagguggaagagcucugg

SEQ ID NO: 44540 - RNA, 23 nt, Artificial Sequence
  Synthetic oligonucleotide: BID-4942
cugagaagguggaagagcucugg

SEQ ID NO: 44541 - RNA, 24 nt, Artificial Sequence
  Synthetic oligonucleotide: BID-4943
ccugagaagguggaagagcucugg

SEQ ID NO: 44542 - RNA, 18 nt, Artificial Sequence
  Synthetic oligonucleotide: BID-4944
uaaacugauguuuuaaau

SEQ ID NO: 44543 - RNA, 19 nt, Artificial Sequence
  Synthetic oligonucleotide: BID-4945
uuaaacugauguuuuaaau

SEQ ID NO: 44544 - RNA, 20 nt, Artificial Sequence
  Synthetic oligonucleotide: BID-1547
guuaaacugauguuuuaaau

SEQ ID NO: 44545 - RNA, 21 nt, Artificial Sequence
  Synthetic oligonucleotide: BID-4946
uguuaaacugauguuuuaaau

SEQ ID NO: 44546 - RNA, 22 nt, Artificial Sequence
  Synthetic oligonucleotide: BID-4947
auguuaaacugauguuuuaaau

SEQ ID NO: 44547 - RNA, 23 nt, Artificial Sequence
  Synthetic oligonucleotide: BID-4948
uauguuaaacugauguuuuaaau

SEQ ID NO: 44548 - RNA, 24 nt, Artificial Sequence
  Synthetic oligonucleotide: BID-4949
auauguuaaacugauguuuuaaau

SEQ ID NO: 44549 - RNA, 18 nt, Artificial Sequence
  Synthetic oligonucleotide: BID-4950
acagugagagcgaggacu

SEQ ID NO: 44550 - RNA, 19 nt, Artificial Sequence
  Synthetic oligonucleotide: BID-4951
cacagugagagcgaggacu

SEQ ID NO: 44551 - RNA, 20 nt, Artificial Sequence
  Synthetic oligonucleotide: BID-1899
ccacagugagagcgaggacu

SEQ ID NO: 44552 - RNA, 21 nt, Artificial Sequence
  Synthetic oligonucleotide: BID-4952
cccacagugagagcgaggacu

SEQ ID NO: 44553 - RNA, 22 nt, Artificial Sequence
  Synthetic oligonucleotide: BID-4953
ccccacagugagagcgaggacu

SEQ ID NO: 44554 - RNA, 23 nt, Artificial Sequence
  Synthetic oligonucleotide: BID-4954
cccccacagugagagcgaggacu

SEQ ID NO: 44555 - RNA, 24 nt, Artificial Sequence
  Synthetic oligonucleotide: BID-4955
ucccccacagugagagcgaggacu

SEQ ID NO: 44556 - RNA, 18 nt, Artificial Sequence
  Synthetic oligonucleotide: BID-4956
cuguuccagaaacagccu

SEQ ID NO: 44557 - RNA, 19 nt, Artificial Sequence
  Synthetic oligonucleotide: BID-4957
acuguuccagaaacagccu

SEQ ID NO: 44558 - RNA, 20 nt, Artificial Sequence
  Synthetic oligonucleotide: BID-701
gacuguuccagaaacagccu

SEQ ID NO: 44559 - RNA, 21 nt, Artificial Sequence
  Synthetic oligonucleotide: BID-4958
agacuguuccagaaacagccu

SEQ ID NO: 44560 - RNA, 22 nt, Artificial Sequence
  Synthetic oligonucleotide: BID-4959
cagacuguuccagaaacagccu

SEQ ID NO: 44561 - RNA, 23 nt, Artificial Sequence
  Synthetic oligonucleotide: BID-4960
ccagacuguuccagaaacagccu

SEQ ID NO: 44562 - RNA, 24 nt, Artificial Sequence
  Synthetic oligonucleotide: BID-4961
cccagacuguuccagaaacagccu

SEQ ID NO: 44563 - RNA, 18 nt, Artificial Sequence
  Synthetic oligonucleotide: BID-4962
cccaucucaaagccuccu

SEQ ID NO: 44564 - RNA, 19 nt, Artificial Sequence
  Synthetic oligonucleotide: BID-4963
ccccaucucaaagccuccu

SEQ ID NO: 44565 - RNA, 20 nt, Artificial Sequence
  Synthetic oligonucleotide: BID-1887
cccccaucucaaagccuccu

SEQ ID NO: 44566 - RNA, 21 nt, Artificial Sequence
  Synthetic oligonucleotide: BID-4964
ccccccaucucaaagccuccu

SEQ ID NO: 44567 - RNA, 22 nt, Artificial Sequence
  Synthetic oligonucleotide: BID-4965
uccccccaucucaaagccuccu

SEQ ID NO: 44568 - RNA, 23 nt, Artificial Sequence
  Synthetic oligonucleotide: BID-4966
cuccccccaucucaaagccuccu

SEQ ID NO: 44569 - RNA, 24 nt, Artificial Sequence
  Synthetic oligonucleotide: BID-4967
gcuccccccaucucaaagccuccu

SEQ ID NO: 44570 - RNA, 18 nt, Artificial Sequence
  Synthetic oligonucleotide: BID-4968
ugagaagguggaagagcu

SEQ ID NO: 44571 - RNA, 19 nt, Artificial Sequence
  Synthetic oligonucleotide: BID-4969
cugagaagguggaagagcu

SEQ ID NO: 44572 - RNA, 20 nt, Artificial Sequence
  Synthetic oligonucleotide: BID-1911
ccugagaagguggaagagcu

SEQ ID NO: 44573 - RNA, 21 nt, Artificial Sequence
  Synthetic oligonucleotide: BID-4970
gccugagaagguggaagagcu

SEQ ID NO: 44574 - RNA, 22 nt, Artificial Sequence
  Synthetic oligonucleotide: BID-4971
agccugagaagguggaagagcu

SEQ ID NO: 44575 - RNA, 23 nt, Artificial Sequence
  Synthetic oligonucleotide: BID-4972
aagccugagaagguggaagagcu

SEQ ID NO: 44576 - RNA, 24 nt, Artificial Sequence
  Synthetic oligonucleotide: BID-4973
caagccugagaagguggaagagcu

SEQ ID NO: 44577 - RNA, 18 nt, Artificial Sequence
  Synthetic oligonucleotide: BID-4974
agagcgaggacugagggu

SEQ ID NO: 44578 - RNA, 19 nt, Artificial Sequence
  Synthetic oligonucleotide: BID-4975
gagagcgaggacugagggu

SEQ ID NO: 44579 - RNA, 20 nt, Artificial Sequence
  Synthetic oligonucleotide: BID-1900
ugagagcgaggacugagggu

SEQ ID NO: 44580 - RNA, 21 nt, Artificial Sequence
  Synthetic oligonucleotide: BID-4976
gugagagcgaggacugagggu

SEQ ID NO: 44581 - RNA, 22 nt, Artificial Sequence
  Synthetic oligonucleotide: BID-4977
agugagagcgaggacugagggu

SEQ ID NO: 44582 - RNA, 23 nt, Artificial Sequence
  Synthetic oligonucleotide: BID-4978
cagugagagcgaggacugagggu

SEQ ID NO: 44583 - RNA, 24 nt, Artificial Sequence
  Synthetic oligonucleotide: BID-4979
acagugagagcgaggacugagggu

SEQ ID NO: 44584 - RNA, 18 nt, Artificial Sequence
  Synthetic oligonucleotide: BID-4980
aacagucgcguaaggggu

SEQ ID NO: 44585 - RNA, 19 nt, Artificial Sequence
  Synthetic oligonucleotide: BID-4981
aaacagucgcguaaggggu

SEQ ID NO: 44586 - RNA, 20 nt, Artificial Sequence
  Synthetic oligonucleotide: BID-1573
gaaacagucgcguaaggggu

SEQ ID NO: 44587 - RNA, 21 nt, Artificial Sequence
  Synthetic oligonucleotide: BID-4982
ugaaacagucgcguaaggggu

SEQ ID NO: 44588 - RNA, 22 nt, Artificial Sequence
  Synthetic oligonucleotide: BID-4983
cugaaacagucgcguaaggggu

SEQ ID NO: 44589 - RNA, 23 nt, Artificial Sequence
  Synthetic oligonucleotide: BID-4984
ucugaaacagucgcguaaggggu

SEQ ID NO: 44590 - RNA, 24 nt, Artificial Sequence
  Synthetic oligonucleotide: BID-4985
gucugaaacagucgcguaaggggu

SEQ ID NO: 44591 - RNA, 18 nt, Artificial Sequence
  Synthetic oligonucleotide: BID-4986
guuucccagagaaucauu

SEQ ID NO: 44592 - RNA, 19 nt, Artificial Sequence
  Synthetic oligonucleotide: BID-4987
uguuucccagagaaucauu

SEQ ID NO: 44593 - RNA, 20 nt, Artificial Sequence
  Synthetic oligonucleotide: BID-703
auguuucccagagaaucauu

SEQ ID NO: 44594 - RNA, 21 nt, Artificial Sequence
  Synthetic oligonucleotide: BID-4988
aauguuucccagagaaucauu

SEQ ID NO: 44595 - RNA, 22 nt, Artificial Sequence
  Synthetic oligonucleotide: BID-4989
gaauguuucccagagaaucauu

SEQ ID NO: 44596 - RNA, 23 nt, Artificial Sequence
  Synthetic oligonucleotide: BID-4990
ugaauguuucccagagaaucauu

SEQ ID NO: 44597 - RNA, 24 nt, Artificial Sequence
  Synthetic oligonucleotide: BID-4991
cugaauguuucccagagaaucauu

SEQ ID NO: 44598 - RNA, 18 nt, Artificial Sequence
  Synthetic oligonucleotide: BID-4992
agaaacagccuggggauu

SEQ ID NO: 44599 - RNA, 19 nt, Artificial Sequence
  Synthetic oligonucleotide: BID-4993
cagaaacagccuggggauu

SEQ ID NO: 44600 - RNA, 20 nt, Artificial Sequence
  Synthetic oligonucleotide: BID-1562
ccagaaacagccuggggauu

SEQ ID NO: 44601 - RNA, 21 nt, Artificial Sequence
  Synthetic oligonucleotide: BID-4994
uccagaaacagccuggggauu

SEQ ID NO: 44602 - RNA, 22 nt, Artificial Sequence
  Synthetic oligonucleotide: BID-4995
uuccagaaacagccuggggauu

SEQ ID NO: 44603 - RNA, 23 nt, Artificial Sequence
  Synthetic oligonucleotide: BID-4996
guuccagaaacagccuggggauu

SEQ ID NO: 44604 - RNA, 24 nt, Artificial Sequence
  Synthetic oligonucleotide: BID-4997
uguuccagaaacagccuggggauu

SEQ ID NO: 44605 - RNA, 18 nt, Artificial Sequence
  Synthetic oligonucleotide: BID-4998
gaaccagggguuuggaaa

SEQ ID NO: 44606 - RNA, 19 nt, Artificial Sequence
  Synthetic oligonucleotide: BID-4999
ggaaccagggguuuggaaa

SEQ ID NO: 44607 - RNA, 20 nt, Artificial Sequence
  Synthetic oligonucleotide: BID-1642
cggaaccagggguuuggaaa

SEQ ID NO: 44608 - RNA, 21 nt, Artificial Sequence
  Synthetic oligonucleotide: BID-5000
acggaaccagggguuuggaaa

SEQ ID NO: 44609 - RNA, 22 nt, Artificial Sequence
  Synthetic oligonucleotide: BID-5001
cacggaaccagggguuuggaaa

SEQ ID NO: 44610 - RNA, 23 nt, Artificial Sequence
  Synthetic oligonucleotide: BID-5002
ucacggaaccagggguuuggaaa

SEQ ID NO: 44611 - RNA, 24 nt, Artificial Sequence
  Synthetic oligonucleotide: BID-5003
cucacggaaccagggguuuggaaa

SEQ ID NO: 44612 - RNA, 18 nt, Artificial Sequence
  Synthetic oligonucleotide: BID-5004
cacugugggggagcugca

SEQ ID NO: 44613 - RNA, 19 nt, Artificial Sequence
  Synthetic oligonucleotide: BID-5005
ucacugugggggagcugca

SEQ ID NO: 44614 - RNA, 20 nt, Artificial Sequence
  Synthetic oligonucleotide: BID-1719
cucacugugggggagcugca

SEQ ID NO: 44615 - RNA, 21 nt, Artificial Sequence
  Synthetic oligonucleotide: BID-5006
ucucacugugggggagcugca

SEQ ID NO: 44616 - RNA, 22 nt, Artificial Sequence
  Synthetic oligonucleotide: BID-5007
cucucacugugggggagcugca

SEQ ID NO: 44617 - RNA, 23 nt, Artificial Sequence
  Synthetic oligonucleotide: BID-5008
gcucucacugugggggagcugca

SEQ ID NO: 44618 - RNA, 24 nt, Artificial Sequence
  Synthetic oligonucleotide: BID-5009
cgcucucacugugggggagcugca

SEQ ID NO: 44619 - RNA, 18 nt, Artificial Sequence
  Synthetic oligonucleotide: BID-5010
gaagccauguggguugca

SEQ ID NO: 44620 - RNA, 19 nt, Artificial Sequence
  Synthetic oligonucleotide: BID-5011
ugaagccauguggguugca

SEQ ID NO: 44621 - RNA, 20 nt, Artificial Sequence
  Synthetic oligonucleotide: BID-1646
gugaagccauguggguugca

SEQ ID NO: 44622 - RNA, 21 nt, Artificial Sequence
  Synthetic oligonucleotide: BID-5012
ggugaagccauguggguugca

SEQ ID NO: 44623 - RNA, 22 nt, Artificial Sequence
  Synthetic oligonucleotide: BID-5013
gggugaagccauguggguugca

SEQ ID NO: 44624 - RNA, 23 nt, Artificial Sequence
  Synthetic oligonucleotide: BID-5014
ugggugaagccauguggguugca

SEQ ID NO: 44625 - RNA, 24 nt, Artificial Sequence
  Synthetic oligonucleotide: BID-5015
gugggugaagccauguggguugca

SEQ ID NO: 44626 - RNA, 18 nt, Artificial Sequence
  Synthetic oligonucleotide: BID-5016
cuagguccucacggaacc

SEQ ID NO: 44627 - RNA, 19 nt, Artificial Sequence
  Synthetic oligonucleotide: BID-5017
ucuagguccucacggaacc

SEQ ID NO: 44628 - RNA, 20 nt, Artificial Sequence
  Synthetic oligonucleotide: BID-784
uucuagguccucacggaacc

SEQ ID NO: 44629 - RNA, 21 nt, Artificial Sequence
  Synthetic oligonucleotide: BID-5018
auucuagguccucacggaacc

SEQ ID NO: 44630 - RNA, 22 nt, Artificial Sequence
  Synthetic oligonucleotide: BID-5019
cauucuagguccucacggaacc

SEQ ID NO: 44631 - RNA, 23 nt, Artificial Sequence
  Synthetic oligonucleotide: BID-5020
ucauucuagguccucacggaacc

SEQ ID NO: 44632 - RNA, 24 nt, Artificial Sequence
  Synthetic oligonucleotide: BID-5021
gucauucuagguccucacggaacc

SEQ ID NO: 44633 - RNA, 18 nt, Artificial Sequence
  Synthetic oligonucleotide: BID-5022
aagccucugccugcggcc

SEQ ID NO: 44634 - RNA, 19 nt, Artificial Sequence
  Synthetic oligonucleotide: BID-5023
caagccucugccugcggcc

SEQ ID NO: 44635 - RNA, 20 nt, Artificial Sequence
  Synthetic oligonucleotide: BID-1759
ccaagccucugccugcggcc

SEQ ID NO: 44636 - RNA, 21 nt, Artificial Sequence
  Synthetic oligonucleotide: BID-5024
gccaagccucugccugcggcc

SEQ ID NO: 44637 - RNA, 22 nt, Artificial Sequence
  Synthetic oligonucleotide: BID-5025
ggccaagccucugccugcggcc

SEQ ID NO: 44638 - RNA, 23 nt, Artificial Sequence
  Synthetic oligonucleotide: BID-5026
uggccaagccucugccugcggcc

SEQ ID NO: 44639 - RNA, 24 nt, Artificial Sequence
  Synthetic oligonucleotide: BID-5027
cuggccaagccucugccugcggcc

SEQ ID NO: 44640 - RNA, 18 nt, Artificial Sequence
  Synthetic oligonucleotide: BID-5028
agaccagauucccugagc

SEQ ID NO: 44641 - RNA, 19 nt, Artificial Sequence
  Synthetic oligonucleotide: BID-5029
gagaccagauucccugagc

SEQ ID NO: 44642 - RNA, 20 nt, Artificial Sequence
  Synthetic oligonucleotide: BID-890
cgagaccagauucccugagc

SEQ ID NO: 44643 - RNA, 21 nt, Artificial Sequence
  Synthetic oligonucleotide: BID-5030
ccgagaccagauucccugagc

SEQ ID NO: 44644 - RNA, 22 nt, Artificial Sequence
  Synthetic oligonucleotide: BID-5031
accgagaccagauucccugagc

SEQ ID NO: 44645 - RNA, 23 nt, Artificial Sequence
  Synthetic oligonucleotide: BID-5032
gaccgagaccagauucccugagc

SEQ ID NO: 44646 - RNA, 24 nt, Artificial Sequence
  Synthetic oligonucleotide: BID-5033
ugaccgagaccagauucccugagc

SEQ ID NO: 44647 - RNA, 18 nt, Artificial Sequence
  Synthetic oligonucleotide: BID-5034
cacuuacuccagcgccgc

SEQ ID NO: 44648 - RNA, 19 nt, Artificial Sequence
  Synthetic oligonucleotide: BID-5035
ccacuuacuccagcgccgc

SEQ ID NO: 44649 - RNA, 20 nt, Artificial Sequence
  Synthetic oligonucleotide: BID-772
gccacuuacuccagcgccgc

SEQ ID NO: 44650 - RNA, 21 nt, Artificial Sequence
  Synthetic oligonucleotide: BID-5036
ggccacuuacuccagcgccgc

SEQ ID NO: 44651 - RNA, 22 nt, Artificial Sequence
  Synthetic oligonucleotide: BID-5037
uggccacuuacuccagcgccgc

SEQ ID NO: 44652 - RNA, 23 nt, Artificial Sequence
  Synthetic oligonucleotide: BID-5038
uuggccacuuacuccagcgccgc

SEQ ID NO: 44653 - RNA, 24 nt, Artificial Sequence
  Synthetic oligonucleotide: BID-5039
guuggccacuuacuccagcgccgc

SEQ ID NO: 44654 - RNA, 18 nt, Artificial Sequence
  Synthetic oligonucleotide: BID-5040
uggcugggguuuaaaggc

SEQ ID NO: 44655 - RNA, 19 nt, Artificial Sequence
  Synthetic oligonucleotide: BID-5041
guggcugggguuuaaaggc

SEQ ID NO: 44656 - RNA, 20 nt, Artificial Sequence
  Synthetic oligonucleotide: BID-926
cguggcugggguuuaaaggc

SEQ ID NO: 44657 - RNA, 21 nt, Artificial Sequence
  Synthetic oligonucleotide: BID-5042
ucguggcugggguuuaaaggc

SEQ ID NO: 44658 - RNA, 22 nt, Artificial Sequence
  Synthetic oligonucleotide: BID-5043
uucguggcugggguuuaaaggc

SEQ ID NO: 44659 - RNA, 23 nt, Artificial Sequence
  Synthetic oligonucleotide: BID-5044
guucguggcugggguuuaaaggc

SEQ ID NO: 44660 - RNA, 24 nt, Artificial Sequence
  Synthetic oligonucleotide: BID-5045
aguucguggcugggguuuaaaggc

SEQ ID NO: 44661 - RNA, 18 nt, Artificial Sequence
  Synthetic oligonucleotide: BID-5046
gggggagcucuccugggc

SEQ ID NO: 44662 - RNA, 19 nt, Artificial Sequence
  Synthetic oligonucleotide: BID-5047
ggggggagcucuccugggc

SEQ ID NO: 44663 - RNA, 20 nt, Artificial Sequence
  Synthetic oligonucleotide: BID-1730
uggggggagcucuccugggc

SEQ ID NO: 44664 - RNA, 21 nt, Artificial Sequence
  Synthetic oligonucleotide: BID-5048
auggggggagcucuccugggc

SEQ ID NO: 44665 - RNA, 22 nt, Artificial Sequence
  Synthetic oligonucleotide: BID-5049
gauggggggagcucuccugggc

SEQ ID NO: 44666 - RNA, 23 nt, Artificial Sequence
  Synthetic oligonucleotide: BID-5050
agauggggggagcucuccugggc

SEQ ID NO: 44667 - RNA, 24 nt, Artificial Sequence
  Synthetic oligonucleotide: BID-5051
gagauggggggagcucuccugggc

SEQ ID NO: 44668 - RNA, 18 nt, Artificial Sequence
  Synthetic oligonucleotide: BID-5052
gggucagcaguucguggc

SEQ ID NO: 44669 - RNA, 19 nt, Artificial Sequence
  Synthetic oligonucleotide: BID-5053
ggggucagcaguucguggc

SEQ ID NO: 44670 - RNA, 20 nt, Artificial Sequence
  Synthetic oligonucleotide: BID-922
cggggucagcaguucguggc

SEQ ID NO: 44671 - RNA, 21 nt, Artificial Sequence
  Synthetic oligonucleotide: BID-5054
gcggggucagcaguucguggc

SEQ ID NO: 44672 - RNA, 22 nt, Artificial Sequence
  Synthetic oligonucleotide: BID-5055
ugcggggucagcaguucguggc

SEQ ID NO: 44673 - RNA, 23 nt, Artificial Sequence
  Synthetic oligonucleotide: BID-5056
augcggggucagcaguucguggc

SEQ ID NO: 44674 - RNA, 24 nt, Artificial Sequence
  Synthetic oligonucleotide: BID-5057
aaugcggggucagcaguucguggc

SEQ ID NO: 44675 - RNA, 18 nt, Artificial Sequence
  Synthetic oligonucleotide: BID-5058
gagggauccucuggcauc

SEQ ID NO: 44676 - RNA, 19 nt, Artificial Sequence
  Synthetic oligonucleotide: BID-5059
agagggauccucuggcauc

SEQ ID NO: 44677 - RNA, 20 nt, Artificial Sequence
  Synthetic oligonucleotide: BID-901
cagagggauccucuggcauc

SEQ ID NO: 44678 - RNA, 21 nt, Artificial Sequence
  Synthetic oligonucleotide: BID-5060
gcagagggauccucuggcauc

SEQ ID NO: 44679 - RNA, 22 nt, Artificial Sequence
  Synthetic oligonucleotide: BID-5061
cgcagagggauccucuggcauc

SEQ ID NO: 44680 - RNA, 23 nt, Artificial Sequence
  Synthetic oligonucleotide: BID-5062
gcgcagagggauccucuggcauc

SEQ ID NO: 44681 - RNA, 24 nt, Artificial Sequence
  Synthetic oligonucleotide: BID-5063
agcgcagagggauccucuggcauc

SEQ ID NO: 44682 - RNA, 18 nt, Artificial Sequence
  Synthetic oligonucleotide: BID-5064
gcuguuucuggaacaguc

SEQ ID NO: 44683 - RNA, 19 nt, Artificial Sequence
  Synthetic oligonucleotide: BID-5065
ggcuguuucuggaacaguc

SEQ ID NO: 44684 - RNA, 20 nt, Artificial Sequence
  Synthetic oligonucleotide: BID-778
aggcuguuucuggaacaguc

SEQ ID NO: 44685 - RNA, 21 nt, Artificial Sequence
  Synthetic oligonucleotide: BID-5066
caggcuguuucuggaacaguc

SEQ ID NO: 44686 - RNA, 22 nt, Artificial Sequence
  Synthetic oligonucleotide: BID-5067
ccaggcuguuucuggaacaguc

SEQ ID NO: 44687 - RNA, 23 nt, Artificial Sequence
  Synthetic oligonucleotide: BID-5068
cccaggcuguuucuggaacaguc

SEQ ID NO: 44688 - RNA, 24 nt, Artificial Sequence
  Synthetic oligonucleotide: BID-5069
ccccaggcuguuucuggaacaguc

SEQ ID NO: 44689 - RNA, 18 nt, Artificial Sequence
  Synthetic oligonucleotide: BID-5070
aggguguggggagcgcag

SEQ ID NO: 44690 - RNA, 19 nt, Artificial Sequence
  Synthetic oligonucleotide: BID-5071
aaggguguggggagcgcag

SEQ ID NO: 44691 - RNA, 20 nt, Artificial Sequence
  Synthetic oligonucleotide: BID-898
uaaggguguggggagcgcag

SEQ ID NO: 44692 - RNA, 21 nt, Artificial Sequence
  Synthetic oligonucleotide: BID-5072
uuaaggguguggggagcgcag

SEQ ID NO: 44693 - RNA, 22 nt, Artificial Sequence
  Synthetic oligonucleotide: BID-5073
cuuaaggguguggggagcgcag

SEQ ID NO: 44694 - RNA, 23 nt, Artificial Sequence
  Synthetic oligonucleotide: BID-5074
ucuuaaggguguggggagcgcag

SEQ ID NO: 44695 - RNA, 24 nt, Artificial Sequence
  Synthetic oligonucleotide: BID-5075
gucuuaaggguguggggagcgcag

SEQ ID NO: 44696 - RNA, 18 nt, Artificial Sequence
  Synthetic oligonucleotide: BID-5076
uaguggaggugguggggg

SEQ ID NO: 44697 - RNA, 19 nt, Artificial Sequence
  Synthetic oligonucleotide: BID-5077
uuaguggaggugguggggg

SEQ ID NO: 44698 - RNA, 20 nt, Artificial Sequence
  Synthetic oligonucleotide: BID-806
uuuaguggaggugguggggg

SEQ ID NO: 44699 - RNA, 21 nt, Artificial Sequence
  Synthetic oligonucleotide: BID-5078
uuuuaguggaggugguggggg

SEQ ID NO: 44700 - RNA, 22 nt, Artificial Sequence
  Synthetic oligonucleotide: BID-5079
uuuuuaguggaggugguggggg

SEQ ID NO: 44701 - RNA, 23 nt, Artificial Sequence
  Synthetic oligonucleotide: BID-5080
guuuuuaguggaggugguggggg

SEQ ID NO: 44702 - RNA, 24 nt, Artificial Sequence
  Synthetic oligonucleotide: BID-5081
aguuuuuaguggaggugguggggg

SEQ ID NO: 44703 - RNA, 18 nt, Artificial Sequence
  Synthetic oligonucleotide: BID-5082
gggagggaagaggaaaug

SEQ ID NO: 44704 - RNA, 19 nt, Artificial Sequence
  Synthetic oligonucleotide: BID-5083
agggagggaagaggaaaug

SEQ ID NO: 44705 - RNA, 20 nt, Artificial Sequence
  Synthetic oligonucleotide: BID-918
cagggagggaagaggaaaug

SEQ ID NO: 44706 - RNA, 21 nt, Artificial Sequence
  Synthetic oligonucleotide: BID-5084
ccagggagggaagaggaaaug

SEQ ID NO: 44707 - RNA, 22 nt, Artificial Sequence
  Synthetic oligonucleotide: BID-5085
cccagggagggaagaggaaaug

SEQ ID NO: 44708 - RNA, 23 nt, Artificial Sequence
  Synthetic oligonucleotide: BID-5086
gcccagggagggaagaggaaaug

SEQ ID NO: 44709 - RNA, 24 nt, Artificial Sequence
  Synthetic oligonucleotide: BID-5087
ugcccagggagggaagaggaaaug

SEQ ID NO: 44710 - RNA, 18 nt, Artificial Sequence
  Synthetic oligonucleotide: BID-5088
gaaagugggugaagccau

SEQ ID NO: 44711 - RNA, 19 nt, Artificial Sequence
  Synthetic oligonucleotide: BID-5089
ggaaagugggugaagccau

SEQ ID NO: 44712 - RNA, 20 nt, Artificial Sequence
  Synthetic oligonucleotide: BID-1644
uggaaagugggugaagccau

SEQ ID NO: 44713 - RNA, 21 nt, Artificial Sequence
  Synthetic oligonucleotide: BID-5090
uuggaaagugggugaagccau

SEQ ID NO: 44714 - RNA, 22 nt, Artificial Sequence
  Synthetic oligonucleotide: BID-5091
uuuggaaagugggugaagccau

SEQ ID NO: 44715 - RNA, 23 nt, Artificial Sequence
  Synthetic oligonucleotide: BID-5092
guuuggaaagugggugaagccau

SEQ ID NO: 44716 - RNA, 24 nt, Artificial Sequence
  Synthetic oligonucleotide: BID-5093
gguuuggaaagugggugaagccau

SEQ ID NO: 44717 - RNA, 18 nt, Artificial Sequence
  Synthetic oligonucleotide: BID-5094
uguuuauucuuuaauuau

SEQ ID NO: 44718 - RNA, 19 nt, Artificial Sequence
  Synthetic oligonucleotide: BID-5095
uuguuuauucuuuaauuau

SEQ ID NO: 44719 - RNA, 20 nt, Artificial Sequence
  Synthetic oligonucleotide: BID-1647
guuguuuauucuuuaauuau

SEQ ID NO: 44720 - RNA, 21 nt, Artificial Sequence
  Synthetic oligonucleotide: BID-5096
uguuguuuauucuuuaauuau

SEQ ID NO: 44721 - RNA, 22 nt, Artificial Sequence
  Synthetic oligonucleotide: BID-5097
uuguuguuuauucuuuaauuau

SEQ ID NO: 44722 - RNA, 23 nt, Artificial Sequence
  Synthetic oligonucleotide: BID-5098
cuuguuguuuauucuuuaauuau

SEQ ID NO: 44723 - RNA, 24 nt, Artificial Sequence
  Synthetic oligonucleotide: BID-5099
gcuuguuguuuauucuuuaauuau

SEQ ID NO: 44724 - RNA, 18 nt, Artificial Sequence
  Synthetic oligonucleotide: BID-5100
ggggcccugcaguccccu

SEQ ID NO: 44725 - RNA, 19 nt, Artificial Sequence
  Synthetic oligonucleotide: BID-5101
uggggcccugcaguccccu

SEQ ID NO: 44726 - RNA, 20 nt, Artificial Sequence
  Synthetic oligonucleotide: BID-889
cuggggcccugcaguccccu

SEQ ID NO: 44727 - RNA, 21 nt, Artificial Sequence
  Synthetic oligonucleotide: BID-5102
ccuggggcccugcaguccccu

SEQ ID NO: 44728 - RNA, 22 nt, Artificial Sequence
  Synthetic oligonucleotide: BID-5103
uccuggggcccugcaguccccu

SEQ ID NO: 44729 - RNA, 23 nt, Artificial Sequence
  Synthetic oligonucleotide: BID-5104
guccuggggcccugcaguccccu

SEQ ID NO: 44730 - RNA, 24 nt, Artificial Sequence
  Synthetic oligonucleotide: BID-5105
cguccuggggcccugcaguccccu

SEQ ID NO: 44731 - RNA, 18 nt, Artificial Sequence
  Synthetic oligonucleotide: BID-5106
gauucucugggaaacauu

SEQ ID NO: 44732 - RNA, 19 nt, Artificial Sequence
  Synthetic oligonucleotide: BID-5107
ugauucucugggaaacauu

SEQ ID NO: 44733 - RNA, 20 nt, Artificial Sequence
  Synthetic oligonucleotide: BID-1631
augauucucugggaaacauu

SEQ ID NO: 44734 - RNA, 21 nt, Artificial Sequence
  Synthetic oligonucleotide: BID-5108
aaugauucucugggaaacauu

SEQ ID NO: 44735 - RNA, 22 nt, Artificial Sequence
  Synthetic oligonucleotide: BID-5109
uaaugauucucugggaaacauu

SEQ ID NO: 44736 - RNA, 23 nt, Artificial Sequence
  Synthetic oligonucleotide: BID-5110
cuaaugauucucugggaaacauu

SEQ ID NO: 44737 - RNA, 24 nt, Artificial Sequence
  Synthetic oligonucleotide: BID-5111
ccuaaugauucucugggaaacauu

SEQ ID NO: 44738 - RNA, 18 nt, Artificial Sequence
  Synthetic oligonucleotide: BID-5112
ucccugagcuggggucuu

SEQ ID NO: 44739 - RNA, 19 nt, Artificial Sequence
  Synthetic oligonucleotide: BID-5113
uucccugagcuggggucuu

SEQ ID NO: 44740 - RNA, 20 nt, Artificial Sequence
  Synthetic oligonucleotide: BID-1740
auucccugagcuggggucuu

SEQ ID NO: 44741 - RNA, 21 nt, Artificial Sequence
  Synthetic oligonucleotide: BID-5114
gauucccugagcuggggucuu

SEQ ID NO: 44742 - RNA, 22 nt, Artificial Sequence
  Synthetic oligonucleotide: BID-5115
agauucccugagcuggggucuu

SEQ ID NO: 44743 - RNA, 23 nt, Artificial Sequence
  Synthetic oligonucleotide: BID-5116
cagauucccugagcuggggucuu

SEQ ID NO: 44744 - RNA, 24 nt, Artificial Sequence
  Synthetic oligonucleotide: BID-5117
ccagauucccugagcuggggucuu

SEQ ID NO: 44745 - RNA, 18 nt, Artificial Sequence
  Synthetic oligonucleotide: BID-5118
caccaccuccacuaaaaa

SEQ ID NO: 44746 - RNA, 19 nt, Artificial Sequence
  Synthetic oligonucleotide: BID-5119
ccaccaccuccacuaaaaa

SEQ ID NO: 44747 - RNA, 20 nt, Artificial Sequence
  Synthetic oligonucleotide: BID-1544
cccaccaccuccacuaaaaa

SEQ ID NO: 44748 - RNA, 21 nt, Artificial Sequence
  Synthetic oligonucleotide: BID-5120
ccccaccaccuccacuaaaaa

SEQ ID NO: 44749 - RNA, 22 nt, Artificial Sequence
  Synthetic oligonucleotide: BID-5121
cccccaccaccuccacuaaaaa

SEQ ID NO: 44750 - RNA, 23 nt, Artificial Sequence
  Synthetic oligonucleotide: BID-5122
ccccccaccaccuccacuaaaaa

SEQ ID NO: 44751 - RNA, 24 nt, Artificial Sequence
  Synthetic oligonucleotide: BID-5123
cccccccaccaccuccacuaaaaa

SEQ ID NO: 44752 - RNA, 18 nt, Artificial Sequence
  Synthetic oligonucleotide: BID-5124
cuccacuaaaaacugaaa

SEQ ID NO: 44753 - RNA, 19 nt, Artificial Sequence
  Synthetic oligonucleotide: BID-5125
ccuccacuaaaaacugaaa

SEQ ID NO: 44754 - RNA, 20 nt, Artificial Sequence
  Synthetic oligonucleotide: BID-1545
accuccacuaaaaacugaaa

SEQ ID NO: 44755 - RNA, 21 nt, Artificial Sequence
  Synthetic oligonucleotide: BID-5126
caccuccacuaaaaacugaaa

SEQ ID NO: 44756 - RNA, 22 nt, Artificial Sequence
  Synthetic oligonucleotide: BID-5127
ccaccuccacuaaaaacugaaa

SEQ ID NO: 44757 - RNA, 23 nt, Artificial Sequence
  Synthetic oligonucleotide: BID-5128
accaccuccacuaaaaacugaaa

SEQ ID NO: 44758 - RNA, 24 nt, Artificial Sequence
  Synthetic oligonucleotide: BID-5129
caccaccuccacuaaaaacugaaa

SEQ ID NO: 44759 - RNA, 18 nt, Artificial Sequence
  Synthetic oligonucleotide: BID-5130
ucuucccucccugggcaa

SEQ ID NO: 44760 - RNA, 19 nt, Artificial Sequence
  Synthetic oligonucleotide: BID-5131
cucuucccucccugggcaa

SEQ ID NO: 44761 - RNA, 20 nt, Artificial Sequence
  Synthetic oligonucleotide: BID-1862
ccucuucccucccugggcaa

SEQ ID NO: 44762 - RNA, 21 nt, Artificial Sequence
  Synthetic oligonucleotide: BID-5132
uccucuucccucccugggcaa

SEQ ID NO: 44763 - RNA, 22 nt, Artificial Sequence
  Synthetic oligonucleotide: BID-5133
uuccucuucccucccugggcaa

SEQ ID NO: 44764 - RNA, 23 nt, Artificial Sequence
  Synthetic oligonucleotide: BID-5134
uuuccucuucccucccugggcaa

SEQ ID NO: 44765 - RNA, 24 nt, Artificial Sequence
  Synthetic oligonucleotide: BID-5135
auuuccucuucccucccugggcaa

SEQ ID NO: 44766 - RNA, 18 nt, Artificial Sequence
  Synthetic oligonucleotide: BID-5136
cucugcagcucccccaca

SEQ ID NO: 44767 - RNA, 19 nt, Artificial Sequence
  Synthetic oligonucleotide: BID-5137
ccucugcagcucccccaca

SEQ ID NO: 44768 - RNA, 20 nt, Artificial Sequence
  Synthetic oligonucleotide: BID-1894
uccucugcagcucccccaca

SEQ ID NO: 44769 - RNA, 21 nt, Artificial Sequence
  Synthetic oligonucleotide: BID-5138
auccucugcagcucccccaca

SEQ ID NO: 44770 - RNA, 22 nt, Artificial Sequence
  Synthetic oligonucleotide: BID-5139
cauccucugcagcucccccaca

SEQ ID NO: 44771 - RNA, 23 nt, Artificial Sequence
  Synthetic oligonucleotide: BID-5140
gcauccucugcagcucccccaca

SEQ ID NO: 44772 - RNA, 24 nt, Artificial Sequence
  Synthetic oligonucleotide: BID-5141
cgcauccucugcagcucccccaca

SEQ ID NO: 44773 - RNA, 18 nt, Artificial Sequence
  Synthetic oligonucleotide: BID-5142
ucucggucaucacuccca

SEQ ID NO: 44774 - RNA, 19 nt, Artificial Sequence
  Synthetic oligonucleotide: BID-5143
gucucggucaucacuccca

SEQ ID NO: 44775 - RNA, 20 nt, Artificial Sequence
  Synthetic oligonucleotide: BID-1027
ggucucggucaucacuccca

SEQ ID NO: 44776 - RNA, 21 nt, Artificial Sequence
  Synthetic oligonucleotide: BID-5144
uggucucggucaucacuccca

SEQ ID NO: 44777 - RNA, 22 nt, Artificial Sequence
  Synthetic oligonucleotide: BID-5145
cuggucucggucaucacuccca

SEQ ID NO: 44778 - RNA, 23 nt, Artificial Sequence
  Synthetic oligonucleotide: BID-5146
ucuggucucggucaucacuccca

SEQ ID NO: 44779 - RNA, 24 nt, Artificial Sequence
  Synthetic oligonucleotide: BID-5147
aucuggucucggucaucacuccca

SEQ ID NO: 44780 - RNA, 18 nt, Artificial Sequence
  Synthetic oligonucleotide: BID-5148
aagaauaaacaacaagca

SEQ ID NO: 44781 - RNA, 19 nt, Artificial Sequence
  Synthetic oligonucleotide: BID-5149
aaagaauaaacaacaagca

SEQ ID NO: 44782 - RNA, 20 nt, Artificial Sequence
  Synthetic oligonucleotide: BID-1549
uaaagaauaaacaacaagca

SEQ ID NO: 44783 - RNA, 21 nt, Artificial Sequence
  Synthetic oligonucleotide: BID-5150
uuaaagaauaaacaacaagca

SEQ ID NO: 44784 - RNA, 22 nt, Artificial Sequence
  Synthetic oligonucleotide: BID-5151
auuaaagaauaaacaacaagca

SEQ ID NO: 44785 - RNA, 23 nt, Artificial Sequence
  Synthetic oligonucleotide: BID-5152
aauuaaagaauaaacaacaagca

SEQ ID NO: 44786 - RNA, 24 nt, Artificial Sequence
  Synthetic oligonucleotide: BID-5153
uaauuaaagaauaaacaacaagca

SEQ ID NO: 44787 - RNA, 18 nt, Artificial Sequence
  Synthetic oligonucleotide: BID-5154
cugggcaagaggggcaga

SEQ ID NO: 44788 - RNA, 19 nt, Artificial Sequence
  Synthetic oligonucleotide: BID-5155
ccugggcaagaggggcaga

SEQ ID NO: 44789 - RNA, 20 nt, Artificial Sequence
  Synthetic oligonucleotide: BID-1007
cccugggcaagaggggcaga

SEQ ID NO: 44790 - RNA, 21 nt, Artificial Sequence
  Synthetic oligonucleotide: BID-5156
ucccugggcaagaggggcaga

SEQ ID NO: 44791 - RNA, 22 nt, Artificial Sequence
  Synthetic oligonucleotide: BID-5157
cucccugggcaagaggggcaga

SEQ ID NO: 44792 - RNA, 23 nt, Artificial Sequence
  Synthetic oligonucleotide: BID-5158
ccucccugggcaagaggggcaga

SEQ ID NO: 44793 - RNA, 24 nt, Artificial Sequence
  Synthetic oligonucleotide: BID-5159
cccucccugggcaagaggggcaga

SEQ ID NO: 44794 - RNA, 18 nt, Artificial Sequence
  Synthetic oligonucleotide: BID-5160
agcucccccacagugaga

SEQ ID NO: 44795 - RNA, 19 nt, Artificial Sequence
  Synthetic oligonucleotide: BID-5161
cagcucccccacagugaga

SEQ ID NO: 44796 - RNA, 20 nt, Artificial Sequence
  Synthetic oligonucleotide: BID-1896
gcagcucccccacagugaga

SEQ ID NO: 44797 - RNA, 21 nt, Artificial Sequence
  Synthetic oligonucleotide: BID-5162
ugcagcucccccacagugaga

SEQ ID NO: 44798 - RNA, 22 nt, Artificial Sequence
  Synthetic oligonucleotide: BID-5163
cugcagcucccccacagugaga

SEQ ID NO: 44799 - RNA, 23 nt, Artificial Sequence
  Synthetic oligonucleotide: BID-5164
ucugcagcucccccacagugaga

SEQ ID NO: 44800 - RNA, 24 nt, Artificial Sequence
  Synthetic oligonucleotide: BID-5165
cucugcagcucccccacagugaga

SEQ ID NO: 44801 - RNA, 18 nt, Artificial Sequence
  Synthetic oligonucleotide: BID-5166
guggauaaggcuccagga

SEQ ID NO: 44802 - RNA, 19 nt, Artificial Sequence
  Synthetic oligonucleotide: BID-5167
uguggauaaggcuccagga

SEQ ID NO: 44803 - RNA, 20 nt, Artificial Sequence
  Synthetic oligonucleotide: BID-1046
guguggauaaggcuccagga

SEQ ID NO: 44804 - RNA, 21 nt, Artificial Sequence
  Synthetic oligonucleotide: BID-5168
gguguggauaaggcuccagga

SEQ ID NO: 44805 - RNA, 22 nt, Artificial Sequence
  Synthetic oligonucleotide: BID-5169
ggguguggauaaggcuccagga

SEQ ID NO: 44806 - RNA, 23 nt, Artificial Sequence
  Synthetic oligonucleotide: BID-5170
aggguguggauaaggcuccagga

SEQ ID NO: 44807 - RNA, 24 nt, Artificial Sequence
  Synthetic oligonucleotide: BID-5171
gaggguguggauaaggcuccagga

SEQ ID NO: 44808 - RNA, 18 nt, Artificial Sequence
  Synthetic oligonucleotide: BID-5172
ccacagugagagcgagga

SEQ ID NO: 44809 - RNA, 19 nt, Artificial Sequence
  Synthetic oligonucleotide: BID-5173
cccacagugagagcgagga

SEQ ID NO: 44810 - RNA, 20 nt, Artificial Sequence
  Synthetic oligonucleotide: BID-1898
ccccacagugagagcgagga

SEQ ID NO: 44811 - RNA, 21 nt, Artificial Sequence
  Synthetic oligonucleotide: BID-5174
cccccacagugagagcgagga

SEQ ID NO: 44812 - RNA, 22 nt, Artificial Sequence
  Synthetic oligonucleotide: BID-5175
ucccccacagugagagcgagga

SEQ ID NO: 44813 - RNA, 23 nt, Artificial Sequence
  Synthetic oligonucleotide: BID-5176
cucccccacagugagagcgagga

SEQ ID NO: 44814 - RNA, 24 nt, Artificial Sequence
  Synthetic oligonucleotide: BID-5177
gcucccccacagugagagcgagga

SEQ ID NO: 44815 - RNA, 18 nt, Artificial Sequence
  Synthetic oligonucleotide: BID-5178
agaauaaacaacaagcac

SEQ ID NO: 44816 - RNA, 19 nt, Artificial Sequence
  Synthetic oligonucleotide: BID-5179
aagaauaaacaacaagcac

SEQ ID NO: 44817 - RNA, 20 nt, Artificial Sequence
  Synthetic oligonucleotide: BID-689
aaagaauaaacaacaagcac

SEQ ID NO: 44818 - RNA, 21 nt, Artificial Sequence
  Synthetic oligonucleotide: BID-5180
uaaagaauaaacaacaagcac

SEQ ID NO: 44819 - RNA, 22 nt, Artificial Sequence
  Synthetic oligonucleotide: BID-5181
uuaaagaauaaacaacaagcac

SEQ ID NO: 44820 - RNA, 23 nt, Artificial Sequence
  Synthetic oligonucleotide: BID-5182
auuaaagaauaaacaacaagcac

SEQ ID NO: 44821 - RNA, 24 nt, Artificial Sequence
  Synthetic oligonucleotide: BID-5183
aauuaaagaauaaacaacaagcac

SEQ ID NO: 44822 - RNA, 18 nt, Artificial Sequence
  Synthetic oligonucleotide: BID-5184
ggggcagggacgcacacc

SEQ ID NO: 44823 - RNA, 19 nt, Artificial Sequence
  Synthetic oligonucleotide: BID-5185
aggggcagggacgcacacc

SEQ ID NO: 44824 - RNA, 20 nt, Artificial Sequence
  Synthetic oligonucleotide: BID-1869
aaggggcagggacgcacacc

SEQ ID NO: 44825 - RNA, 21 nt, Artificial Sequence
  Synthetic oligonucleotide: BID-5186
gaaggggcagggacgcacacc

SEQ ID NO: 44826 - RNA, 22 nt, Artificial Sequence
  Synthetic oligonucleotide: BID-5187
agaaggggcagggacgcacacc

SEQ ID NO: 44827 - RNA, 23 nt, Artificial Sequence
  Synthetic oligonucleotide: BID-5188
cagaaggggcagggacgcacacc

SEQ ID NO: 44828 - RNA, 24 nt, Artificial Sequence
  Synthetic oligonucleotide: BID-5189
gcagaaggggcagggacgcacacc

SEQ ID NO: 44829 - RNA, 18 nt, Artificial Sequence
  Synthetic oligonucleotide: BID-5190
cggcacacauucaggccc

SEQ ID NO: 44830 - RNA, 19 nt, Artificial Sequence
  Synthetic oligonucleotide: BID-5191
acggcacacauucaggccc

SEQ ID NO: 44831 - RNA, 20 nt, Artificial Sequence
  Synthetic oligonucleotide: BID-1034
gacggcacacauucaggccc

SEQ ID NO: 44832 - RNA, 21 nt, Artificial Sequence
  Synthetic oligonucleotide: BID-5192
ggacggcacacauucaggccc

SEQ ID NO: 44833 - RNA, 22 nt, Artificial Sequence
  Synthetic oligonucleotide: BID-5193
aggacggcacacauucaggccc

SEQ ID NO: 44834 - RNA, 23 nt, Artificial Sequence
  Synthetic oligonucleotide: BID-5194
caggacggcacacauucaggccc

SEQ ID NO: 44835 - RNA, 24 nt, Artificial Sequence
  Synthetic oligonucleotide: BID-5195
ccaggacggcacacauucaggccc

SEQ ID NO: 44836 - RNA, 18 nt, Artificial Sequence
  Synthetic oligonucleotide: BID-5196
caggggacugcagggccc

SEQ ID NO: 44837 - RNA, 19 nt, Artificial Sequence
  Synthetic oligonucleotide: BID-5197
ccaggggacugcagggccc

SEQ ID NO: 44838 - RNA, 20 nt, Artificial Sequence
  Synthetic oligonucleotide: BID-1883
cccaggggacugcagggccc

SEQ ID NO: 44839 - RNA, 21 nt, Artificial Sequence
  Synthetic oligonucleotide: BID-5198
ucccaggggacugcagggccc

SEQ ID NO: 44840 - RNA, 22 nt, Artificial Sequence
  Synthetic oligonucleotide: BID-5199
cucccaggggacugcagggccc

SEQ ID NO: 44841 - RNA, 23 nt, Artificial Sequence
  Synthetic oligonucleotide: BID-5200
acucccaggggacugcagggccc

SEQ ID NO: 44842 - RNA, 24 nt, Artificial Sequence
  Synthetic oligonucleotide: BID-5201
cacucccaggggacugcagggccc

SEQ ID NO: 44843 - RNA, 18 nt, Artificial Sequence
  Synthetic oligonucleotide: BID-5202
gucucggucaucacuccc

SEQ ID NO: 44844 - RNA, 19 nt, Artificial Sequence
  Synthetic oligonucleotide: BID-5203
ggucucggucaucacuccc

SEQ ID NO: 44845 - RNA, 20 nt, Artificial Sequence
  Synthetic oligonucleotide: BID-1026
uggucucggucaucacuccc

SEQ ID NO: 44846 - RNA, 21 nt, Artificial Sequence
  Synthetic oligonucleotide: BID-5204
cuggucucggucaucacuccc

SEQ ID NO: 44847 - RNA, 22 nt, Artificial Sequence
  Synthetic oligonucleotide: BID-5205
ucuggucucggucaucacuccc

SEQ ID NO: 44848 - RNA, 23 nt, Artificial Sequence
  Synthetic oligonucleotide: BID-5206
aucuggucucggucaucacuccc

SEQ ID NO: 44849 - RNA, 24 nt, Artificial Sequence
  Synthetic oligonucleotide: BID-5207
aaucuggucucggucaucacuccc

SEQ ID NO: 44850 - RNA, 18 nt, Artificial Sequence
  Synthetic oligonucleotide: BID-5208
cucccggcagugccuccc

SEQ ID NO: 44851 - RNA, 19 nt, Artificial Sequence
  Synthetic oligonucleotide: BID-5209
ccucccggcagugccuccc

SEQ ID NO: 44852 - RNA, 20 nt, Artificial Sequence
  Synthetic oligonucleotide: BID-1020
uccucccggcagugccuccc

SEQ ID NO: 44853 - RNA, 21 nt, Artificial Sequence
  Synthetic oligonucleotide: BID-5210
guccucccggcagugccuccc

SEQ ID NO: 44854 - RNA, 22 nt, Artificial Sequence
  Synthetic oligonucleotide: BID-5211
cguccucccggcagugccuccc

SEQ ID NO: 44855 - RNA, 23 nt, Artificial Sequence
  Synthetic oligonucleotide: BID-5212
ucguccucccggcagugccuccc

SEQ ID NO: 44856 - RNA, 24 nt, Artificial Sequence
  Synthetic oligonucleotide: BID-5213
gucguccucccggcagugccuccc

SEQ ID NO: 44857 - RNA, 18 nt, Artificial Sequence
  Synthetic oligonucleotide: BID-5214
acuguuccagaaacagcc

SEQ ID NO: 44858 - RNA, 19 nt, Artificial Sequence
  Synthetic oligonucleotide: BID-5215
gacuguuccagaaacagcc

SEQ ID NO: 44859 - RNA, 20 nt, Artificial Sequence
  Synthetic oligonucleotide: BID-700
agacuguuccagaaacagcc

SEQ ID NO: 44860 - RNA, 21 nt, Artificial Sequence
  Synthetic oligonucleotide: BID-5216
cagacuguuccagaaacagcc

SEQ ID NO: 44861 - RNA, 22 nt, Artificial Sequence
  Synthetic oligonucleotide: BID-5217
ccagacuguuccagaaacagcc

SEQ ID NO: 44862 - RNA, 23 nt, Artificial Sequence
  Synthetic oligonucleotide: BID-5218
cccagacuguuccagaaacagcc

SEQ ID NO: 44863 - RNA, 24 nt, Artificial Sequence
  Synthetic oligonucleotide: BID-5219
ccccagacuguuccagaaacagcc

SEQ ID NO: 44864 - RNA, 18 nt, Artificial Sequence
  Synthetic oligonucleotide: BID-5220
ugccuuuaaaccccagcc

SEQ ID NO: 44865 - RNA, 19 nt, Artificial Sequence
  Synthetic oligonucleotide: BID-5221
cugccuuuaaaccccagcc

SEQ ID NO: 44866 - RNA, 20 nt, Artificial Sequence
  Synthetic oligonucleotide: BID-1859
ccugccuuuaaaccccagcc

SEQ ID NO: 44867 - RNA, 21 nt, Artificial Sequence
  Synthetic oligonucleotide: BID-5222
cccugccuuuaaaccccagcc

SEQ ID NO: 44868 - RNA, 22 nt, Artificial Sequence
  Synthetic oligonucleotide: BID-5223
ucccugccuuuaaaccccagcc

SEQ ID NO: 44869 - RNA, 23 nt, Artificial Sequence
  Synthetic oligonucleotide: BID-5224
aucccugccuuuaaaccccagcc

SEQ ID NO: 44870 - RNA, 24 nt, Artificial Sequence
  Synthetic oligonucleotide: BID-5225
gaucccugccuuuaaaccccagcc

SEQ ID NO: 44871 - RNA, 18 nt, Artificial Sequence
  Synthetic oligonucleotide: BID-5226
acggcacacauucaggcc

SEQ ID NO: 44872 - RNA, 19 nt, Artificial Sequence
  Synthetic oligonucleotide: BID-5227
gacggcacacauucaggcc

SEQ ID NO: 44873 - RNA, 20 nt, Artificial Sequence
  Synthetic oligonucleotide: BID-1884
ggacggcacacauucaggcc

SEQ ID NO: 44874 - RNA, 21 nt, Artificial Sequence
  Synthetic oligonucleotide: BID-5228
aggacggcacacauucaggcc

SEQ ID NO: 44875 - RNA, 22 nt, Artificial Sequence
  Synthetic oligonucleotide: BID-5229
caggacggcacacauucaggcc

SEQ ID NO: 44876 - RNA, 23 nt, Artificial Sequence
  Synthetic oligonucleotide: BID-5230
ccaggacggcacacauucaggcc

SEQ ID NO: 44877 - RNA, 24 nt, Artificial Sequence
  Synthetic oligonucleotide: BID-5231
cccaggacggcacacauucaggcc

SEQ ID NO: 44878 - RNA, 18 nt, Artificial Sequence
  Synthetic oligonucleotide: BID-5232
ggucucggucaucacucc

SEQ ID NO: 44879 - RNA, 19 nt, Artificial Sequence
  Synthetic oligonucleotide: BID-5233
uggucucggucaucacucc

SEQ ID NO: 44880 - RNA, 20 nt, Artificial Sequence
  Synthetic oligonucleotide: BID-1879
cuggucucggucaucacucc

SEQ ID NO: 44881 - RNA, 21 nt, Artificial Sequence
  Synthetic oligonucleotide: BID-5234
ucuggucucggucaucacucc

SEQ ID NO: 44882 - RNA, 22 nt, Artificial Sequence
  Synthetic oligonucleotide: BID-5235
aucuggucucggucaucacucc

SEQ ID NO: 44883 - RNA, 23 nt, Artificial Sequence
  Synthetic oligonucleotide: BID-5236
aaucuggucucggucaucacucc

SEQ ID NO: 44884 - RNA, 24 nt, Artificial Sequence
  Synthetic oligonucleotide: BID-5237
gaaucuggucucggucaucacucc

SEQ ID NO: 44885 - RNA, 18 nt, Artificial Sequence
  Synthetic oligonucleotide: BID-5238
gcauuuccucuucccucc

SEQ ID NO: 44886 - RNA, 19 nt, Artificial Sequence
  Synthetic oligonucleotide: BID-5239
cgcauuuccucuucccucc

SEQ ID NO: 44887 - RNA, 20 nt, Artificial Sequence
  Synthetic oligonucleotide: BID-1860
ccgcauuuccucuucccucc

SEQ ID NO: 44888 - RNA, 21 nt, Artificial Sequence
  Synthetic oligonucleotide: BID-5240
cccgcauuuccucuucccucc

SEQ ID NO: 44889 - RNA, 22 nt, Artificial Sequence
  Synthetic oligonucleotide: BID-5241
ccccgcauuuccucuucccucc

SEQ ID NO: 44890 - RNA, 23 nt, Artificial Sequence
  Synthetic oligonucleotide: BID-5242
accccgcauuuccucuucccucc

SEQ ID NO: 44891 - RNA, 24 nt, Artificial Sequence
  Synthetic oligonucleotide: BID-5243
gaccccgcauuuccucuucccucc

SEQ ID NO: 44892 - RNA, 18 nt, Artificial Sequence
  Synthetic oligonucleotide: BID-5244
ccucccggcagugccucc

SEQ ID NO: 44893 - RNA, 19 nt, Artificial Sequence
  Synthetic oligonucleotide: BID-5245
uccucccggcagugccucc

SEQ ID NO: 44894 - RNA, 20 nt, Artificial Sequence
  Synthetic oligonucleotide: BID-1872
guccucccggcagugccucc

SEQ ID NO: 44895 - RNA, 21 nt, Artificial Sequence
  Synthetic oligonucleotide: BID-5246
cguccucccggcagugccucc

SEQ ID NO: 44896 - RNA, 22 nt, Artificial Sequence
  Synthetic oligonucleotide: BID-5247
ucguccucccggcagugccucc

SEQ ID NO: 44897 - RNA, 23 nt, Artificial Sequence
  Synthetic oligonucleotide: BID-5248
gucguccucccggcagugccucc

SEQ ID NO: 44898 - RNA, 24 nt, Artificial Sequence
  Synthetic oligonucleotide: BID-5249
ggucguccucccggcagugccucc

SEQ ID NO: 44899 - RNA, 18 nt, Artificial Sequence
  Synthetic oligonucleotide: BID-5250
ggguguggauaaggcucc

SEQ ID NO: 44900 - RNA, 19 nt, Artificial Sequence
  Synthetic oligonucleotide: BID-5251
aggguguggauaaggcucc

SEQ ID NO: 44901 - RNA, 20 nt, Artificial Sequence
  Synthetic oligonucleotide: BID-1045
gaggguguggauaaggcucc

SEQ ID NO: 44902 - RNA, 21 nt, Artificial Sequence
  Synthetic oligonucleotide: BID-5252
ugaggguguggauaaggcucc

SEQ ID NO: 44903 - RNA, 22 nt, Artificial Sequence
  Synthetic oligonucleotide: BID-5253
cugaggguguggauaaggcucc

SEQ ID NO: 44904 - RNA, 23 nt, Artificial Sequence
  Synthetic oligonucleotide: BID-5254
acugaggguguggauaaggcucc

SEQ ID NO: 44905 - RNA, 24 nt, Artificial Sequence
  Synthetic oligonucleotide: BID-5255
gacugaggguguggauaaggcucc

SEQ ID NO: 44906 - RNA, 18 nt, Artificial Sequence
  Synthetic oligonucleotide: BID-5256
ugcucccugugcccgucc

SEQ ID NO: 44907 - RNA, 19 nt, Artificial Sequence
  Synthetic oligonucleotide: BID-5257
augcucccugugcccgucc

SEQ ID NO: 44908 - RNA, 20 nt, Artificial Sequence
  Synthetic oligonucleotide: BID-1000
caugcucccugugcccgucc

SEQ ID NO: 44909 - RNA, 21 nt, Artificial Sequence
  Synthetic oligonucleotide: BID-5258
ucaugcucccugugcccgucc

SEQ ID NO: 44910 - RNA, 22 nt, Artificial Sequence
  Synthetic oligonucleotide: BID-5259
cucaugcucccugugcccgucc

SEQ ID NO: 44911 - RNA, 23 nt, Artificial Sequence
  Synthetic oligonucleotide: BID-5260
ccucaugcucccugugcccgucc

SEQ ID NO: 44912 - RNA, 24 nt, Artificial Sequence
  Synthetic oligonucleotide: BID-5261
uccucaugcucccugugcccgucc

SEQ ID NO: 44913 - RNA, 18 nt, Artificial Sequence
  Synthetic oligonucleotide: BID-5262
uuccaaaccccugguucc

SEQ ID NO: 44914 - RNA, 19 nt, Artificial Sequence
  Synthetic oligonucleotide: BID-5263
uuuccaaaccccugguucc

SEQ ID NO: 44915 - RNA, 20 nt, Artificial Sequence
  Synthetic oligonucleotide: BID-1555
cuuuccaaaccccugguucc

SEQ ID NO: 44916 - RNA, 21 nt, Artificial Sequence
  Synthetic oligonucleotide: BID-5264
acuuuccaaaccccugguucc

SEQ ID NO: 44917 - RNA, 22 nt, Artificial Sequence
  Synthetic oligonucleotide: BID-5265
cacuuuccaaaccccugguucc

SEQ ID NO: 44918 - RNA, 23 nt, Artificial Sequence
  Synthetic oligonucleotide: BID-5266
ccacuuuccaaaccccugguucc

SEQ ID NO: 44919 - RNA, 24 nt, Artificial Sequence
  Synthetic oligonucleotide: BID-5267
cccacuuuccaaaccccugguucc

SEQ ID NO: 44920 - RNA, 18 nt, Artificial Sequence
  Synthetic oligonucleotide: BID-5268
gggauucugaauguuucc

SEQ ID NO: 44921 - RNA, 19 nt, Artificial Sequence
  Synthetic oligonucleotide: BID-5269
ggggauucugaauguuucc

SEQ ID NO: 44922 - RNA, 20 nt, Artificial Sequence
  Synthetic oligonucleotide: BID-1563
uggggauucugaauguuucc

SEQ ID NO: 44923 - RNA, 21 nt, Artificial Sequence
  Synthetic oligonucleotide: BID-5270
cuggggauucugaauguuucc

SEQ ID NO: 44924 - RNA, 22 nt, Artificial Sequence
  Synthetic oligonucleotide: BID-5271
ccuggggauucugaauguuucc

SEQ ID NO: 44925 - RNA, 23 nt, Artificial Sequence
  Synthetic oligonucleotide: BID-5272
gccuggggauucugaauguuucc

SEQ ID NO: 44926 - RNA, 24 nt, Artificial Sequence
  Synthetic oligonucleotide: BID-5273
agccuggggauucugaauguuucc

SEQ ID NO: 44927 - RNA, 18 nt, Artificial Sequence
  Synthetic oligonucleotide: BID-5274
caggaagggggugcaagc

SEQ ID NO: 44928 - RNA, 19 nt, Artificial Sequence
  Synthetic oligonucleotide: BID-5275
ccaggaagggggugcaagc

SEQ ID NO: 44929 - RNA, 20 nt, Artificial Sequence
  Synthetic oligonucleotide: BID-1906
uccaggaagggggugcaagc

SEQ ID NO: 44930 - RNA, 21 nt, Artificial Sequence
  Synthetic oligonucleotide: BID-5276
cuccaggaagggggugcaagc

SEQ ID NO: 44931 - RNA, 22 nt, Artificial Sequence
  Synthetic oligonucleotide: BID-5277
gcuccaggaagggggugcaagc

SEQ ID NO: 44932 - RNA, 23 nt, Artificial Sequence
  Synthetic oligonucleotide: BID-5278
ggcuccaggaagggggugcaagc

SEQ ID NO: 44933 - RNA, 24 nt, Artificial Sequence
  Synthetic oligonucleotide: BID-5279
aggcuccaggaagggggugcaagc

SEQ ID NO: 44934 - RNA, 18 nt, Artificial Sequence
  Synthetic oligonucleotide: BID-5280
gacuguuccagaaacagc

SEQ ID NO: 44935 - RNA, 19 nt, Artificial Sequence
  Synthetic oligonucleotide: BID-5281
agacuguuccagaaacagc

SEQ ID NO: 44936 - RNA, 20 nt, Artificial Sequence
  Synthetic oligonucleotide: BID-1559
cagacuguuccagaaacagc

SEQ ID NO: 44937 - RNA, 21 nt, Artificial Sequence
  Synthetic oligonucleotide: BID-5282
ccagacuguuccagaaacagc

SEQ ID NO: 44938 - RNA, 22 nt, Artificial Sequence
  Synthetic oligonucleotide: BID-5283
cccagacuguuccagaaacagc

SEQ ID NO: 44939 - RNA, 23 nt, Artificial Sequence
  Synthetic oligonucleotide: BID-5284
ccccagacuguuccagaaacagc

SEQ ID NO: 44940 - RNA, 24 nt, Artificial Sequence
  Synthetic oligonucleotide: BID-5285
accccagacuguuccagaaacagc

SEQ ID NO: 44941 - RNA, 18 nt, Artificial Sequence
  Synthetic oligonucleotide: BID-5286
cucccccacagugagagc

SEQ ID NO: 44942 - RNA, 19 nt, Artificial Sequence
  Synthetic oligonucleotide: BID-5287
gcucccccacagugagagc

SEQ ID NO: 44943 - RNA, 20 nt, Artificial Sequence
  Synthetic oligonucleotide: BID-1897
agcucccccacagugagagc

SEQ ID NO: 44944 - RNA, 21 nt, Artificial Sequence
  Synthetic oligonucleotide: BID-5288
cagcucccccacagugagagc

SEQ ID NO: 44945 - RNA, 22 nt, Artificial Sequence
  Synthetic oligonucleotide: BID-5289
gcagcucccccacagugagagc

SEQ ID NO: 44946 - RNA, 23 nt, Artificial Sequence
  Synthetic oligonucleotide: BID-5290
ugcagcucccccacagugagagc

SEQ ID NO: 44947 - RNA, 24 nt, Artificial Sequence
  Synthetic oligonucleotide: BID-5291
cugcagcucccccacagugagagc

SEQ ID NO: 44948 - RNA, 18 nt, Artificial Sequence
  Synthetic oligonucleotide: BID-5292
ccacagccccgcgccggc

SEQ ID NO: 44949 - RNA, 19 nt, Artificial Sequence
  Synthetic oligonucleotide: BID-5293
uccacagccccgcgccggc

SEQ ID NO: 44950 - RNA, 20 nt, Artificial Sequence
  Synthetic oligonucleotide: BID-1576
cuccacagccccgcgccggc

SEQ ID NO: 44951 - RNA, 21 nt, Artificial Sequence
  Synthetic oligonucleotide: BID-5294
gcuccacagccccgcgccggc

SEQ ID NO: 44952 - RNA, 22 nt, Artificial Sequence
  Synthetic oligonucleotide: BID-5295
cgcuccacagccccgcgccggc

SEQ ID NO: 44953 - RNA, 23 nt, Artificial Sequence
  Synthetic oligonucleotide: BID-5296
ccgcuccacagccccgcgccggc

SEQ ID NO: 44954 - RNA, 24 nt, Artificial Sequence
  Synthetic oligonucleotide: BID-5297
cccgcuccacagccccgcgccggc

SEQ ID NO: 44955 - RNA, 18 nt, Artificial Sequence
  Synthetic oligonucleotide: BID-5298
aagaggggcagaaggggc

SEQ ID NO: 44956 - RNA, 19 nt, Artificial Sequence
  Synthetic oligonucleotide: BID-5299
caagaggggcagaaggggc

SEQ ID NO: 44957 - RNA, 20 nt, Artificial Sequence
  Synthetic oligonucleotide: BID-1010
gcaagaggggcagaaggggc

SEQ ID NO: 44958 - RNA, 21 nt, Artificial Sequence
  Synthetic oligonucleotide: BID-5300
ggcaagaggggcagaaggggc

SEQ ID NO: 44959 - RNA, 22 nt, Artificial Sequence
  Synthetic oligonucleotide: BID-5301
gggcaagaggggcagaaggggc

SEQ ID NO: 44960 - RNA, 23 nt, Artificial Sequence
  Synthetic oligonucleotide: BID-5302
ugggcaagaggggcagaaggggc

SEQ ID NO: 44961 - RNA, 24 nt, Artificial Sequence
  Synthetic oligonucleotide: BID-5303
cugggcaagaggggcagaaggggc

SEQ ID NO: 44962 - RNA, 18 nt, Artificial Sequence
  Synthetic oligonucleotide: BID-5304
ccucuucccucccugggc

SEQ ID NO: 44963 - RNA, 19 nt, Artificial Sequence
  Synthetic oligonucleotide: BID-5305
uccucuucccucccugggc

SEQ ID NO: 44964 - RNA, 20 nt, Artificial Sequence
  Synthetic oligonucleotide: BID-1861
uuccucuucccucccugggc

SEQ ID NO: 44965 - RNA, 21 nt, Artificial Sequence
  Synthetic oligonucleotide: BID-5306
uuuccucuucccucccugggc

SEQ ID NO: 44966 - RNA, 22 nt, Artificial Sequence
  Synthetic oligonucleotide: BID-5307
auuuccucuucccucccugggc

SEQ ID NO: 44967 - RNA, 23 nt, Artificial Sequence
  Synthetic oligonucleotide: BID-5308
cauuuccucuucccucccugggc

SEQ ID NO: 44968 - RNA, 24 nt, Artificial Sequence
  Synthetic oligonucleotide: BID-5309
gcauuuccucuucccucccugggc

SEQ ID NO: 44969 - RNA, 18 nt, Artificial Sequence
  Synthetic oligonucleotide: BID-5310
uaccucaacuccugaugc

SEQ ID NO: 44970 - RNA, 19 nt, Artificial Sequence
  Synthetic oligonucleotide: BID-5311
cuaccucaacuccugaugc

SEQ ID NO: 44971 - RNA, 20 nt, Artificial Sequence
  Synthetic oligonucleotide: BID-1874
ucuaccucaacuccugaugc

SEQ ID NO: 44972 - RNA, 21 nt, Artificial Sequence
  Synthetic oligonucleotide: BID-5312
gucuaccucaacuccugaugc

SEQ ID NO: 44973 - RNA, 22 nt, Artificial Sequence
  Synthetic oligonucleotide: BID-5313
ugucuaccucaacuccugaugc

SEQ ID NO: 44974 - RNA, 23 nt, Artificial Sequence
  Synthetic oligonucleotide: BID-5314
cugucuaccucaacuccugaugc

SEQ ID NO: 44975 - RNA, 24 nt, Artificial Sequence
  Synthetic oligonucleotide: BID-5315
ucugucuaccucaacuccugaugc

SEQ ID NO: 44976 - RNA, 18 nt, Artificial Sequence
  Synthetic oligonucleotide: BID-5316
cccuuaagaccccagcuc

SEQ ID NO: 44977 - RNA, 19 nt, Artificial Sequence
  Synthetic oligonucleotide: BID-5317
acccuuaagaccccagcuc

SEQ ID NO: 44978 - RNA, 20 nt, Artificial Sequence
  Synthetic oligonucleotide: BID-1022
cacccuuaagaccccagcuc

SEQ ID NO: 44979 - RNA, 21 nt, Artificial Sequence
  Synthetic oligonucleotide: BID-5318
acacccuuaagaccccagcuc

SEQ ID NO: 44980 - RNA, 22 nt, Artificial Sequence
  Synthetic oligonucleotide: BID-5319
cacacccuuaagaccccagcuc

SEQ ID NO: 44981 - RNA, 23 nt, Artificial Sequence
  Synthetic oligonucleotide: BID-5320
ccacacccuuaagaccccagcuc

SEQ ID NO: 44982 - RNA, 24 nt, Artificial Sequence
  Synthetic oligonucleotide: BID-5321
cccacacccuuaagaccccagcuc

SEQ ID NO: 44983 - RNA, 18 nt, Artificial Sequence
  Synthetic oligonucleotide: BID-5322
aggguguggauaaggcuc

SEQ ID NO: 44984 - RNA, 19 nt, Artificial Sequence
  Synthetic oligonucleotide: BID-5323
gaggguguggauaaggcuc

SEQ ID NO: 44985 - RNA, 20 nt, Artificial Sequence
  Synthetic oligonucleotide: BID-1901
ugaggguguggauaaggcuc

SEQ ID NO: 44986 - RNA, 21 nt, Artificial Sequence
  Synthetic oligonucleotide: BID-5324
cugaggguguggauaaggcuc

SEQ ID NO: 44987 - RNA, 22 nt, Artificial Sequence
  Synthetic oligonucleotide: BID-5325
acugaggguguggauaaggcuc

SEQ ID NO: 44988 - RNA, 23 nt, Artificial Sequence
  Synthetic oligonucleotide: BID-5326
gacugaggguguggauaaggcuc

SEQ ID NO: 44989 - RNA, 24 nt, Artificial Sequence
  Synthetic oligonucleotide: BID-5327
ggacugaggguguggauaaggcuc

SEQ ID NO: 44990 - RNA, 18 nt, Artificial Sequence
  Synthetic oligonucleotide: BID-5328
augcucccugugcccguc

SEQ ID NO: 44991 - RNA, 19 nt, Artificial Sequence
  Synthetic oligonucleotide: BID-5329
caugcucccugugcccguc

SEQ ID NO: 44992 - RNA, 20 nt, Artificial Sequence
  Synthetic oligonucleotide: BID-1856
ucaugcucccugugcccguc

SEQ ID NO: 44993 - RNA, 21 nt, Artificial Sequence
  Synthetic oligonucleotide: BID-5330
cucaugcucccugugcccguc

SEQ ID NO: 44994 - RNA, 22 nt, Artificial Sequence
  Synthetic oligonucleotide: BID-5331
ccucaugcucccugugcccguc

SEQ ID NO: 44995 - RNA, 23 nt, Artificial Sequence
  Synthetic oligonucleotide: BID-5332
uccucaugcucccugugcccguc

SEQ ID NO: 44996 - RNA, 24 nt, Artificial Sequence
  Synthetic oligonucleotide: BID-5333
uuccucaugcucccugugcccguc

SEQ ID NO: 44997 - RNA, 18 nt, Artificial Sequence
  Synthetic oligonucleotide: BID-5334
gaccaccccagacuguuc

SEQ ID NO: 44998 - RNA, 19 nt, Artificial Sequence
  Synthetic oligonucleotide: BID-5335
ugaccaccccagacuguuc

SEQ ID NO: 44999 - RNA, 20 nt, Artificial Sequence
  Synthetic oligonucleotide: BID-1558
augaccaccccagacuguuc

SEQ ID NO: 45000 - RNA, 21 nt, Artificial Sequence
  Synthetic oligonucleotide: BID-5336
aaugaccaccccagacuguuc

SEQ ID NO: 45001 - RNA, 22 nt, Artificial Sequence
  Synthetic oligonucleotide: BID-5337
gaaugaccaccccagacuguuc

SEQ ID NO: 45002 - RNA, 23 nt, Artificial Sequence
  Synthetic oligonucleotide: BID-5338
agaaugaccaccccagacuguuc

SEQ ID NO: 45003 - RNA, 24 nt, Artificial Sequence
  Synthetic oligonucleotide: BID-5339
uagaaugaccaccccagacuguuc

SEQ ID NO: 45004 - RNA, 18 nt, Artificial Sequence
  Synthetic oligonucleotide: BID-5340
uaaguggccaacuuaaag

SEQ ID NO: 45005 - RNA, 19 nt, Artificial Sequence
  Synthetic oligonucleotide: BID-5341
guaaguggccaacuuaaag

SEQ ID NO: 45006 - RNA, 20 nt, Artificial Sequence
  Synthetic oligonucleotide: BID-1569
aguaaguggccaacuuaaag

SEQ ID NO: 45007 - RNA, 21 nt, Artificial Sequence
  Synthetic oligonucleotide: BID-5342
gaguaaguggccaacuuaaag

SEQ ID NO: 45008 - RNA, 22 nt, Artificial Sequence
  Synthetic oligonucleotide: BID-5343
ggaguaaguggccaacuuaaag

SEQ ID NO: 45009 - RNA, 23 nt, Artificial Sequence
  Synthetic oligonucleotide: BID-5344
uggaguaaguggccaacuuaaag

SEQ ID NO: 45010 - RNA, 24 nt, Artificial Sequence
  Synthetic oligonucleotide: BID-5345
cuggaguaaguggccaacuuaaag

SEQ ID NO: 45011 - RNA, 18 nt, Artificial Sequence
  Synthetic oligonucleotide: BID-5346
cuucccucccugggcaag

SEQ ID NO: 45012 - RNA, 19 nt, Artificial Sequence
  Synthetic oligonucleotide: BID-5347
ucuucccucccugggcaag

SEQ ID NO: 45013 - RNA, 20 nt, Artificial Sequence
  Synthetic oligonucleotide: BID-1004
cucuucccucccugggcaag

SEQ ID NO: 45014 - RNA, 21 nt, Artificial Sequence
  Synthetic oligonucleotide: BID-5348
ccucuucccucccugggcaag

SEQ ID NO: 45015 - RNA, 22 nt, Artificial Sequence
  Synthetic oligonucleotide: BID-5349
uccucuucccucccugggcaag

SEQ ID NO: 45016 - RNA, 23 nt, Artificial Sequence
  Synthetic oligonucleotide: BID-5350
uuccucuucccucccugggcaag

SEQ ID NO: 45017 - RNA, 24 nt, Artificial Sequence
  Synthetic oligonucleotide: BID-5351
uuuccucuucccucccugggcaag

SEQ ID NO: 45018 - RNA, 18 nt, Artificial Sequence
  Synthetic oligonucleotide: BID-5352
gggugcaagccugagaag

SEQ ID NO: 45019 - RNA, 19 nt, Artificial Sequence
  Synthetic oligonucleotide: BID-5353
ggggugcaagccugagaag

SEQ ID NO: 45020 - RNA, 20 nt, Artificial Sequence
  Synthetic oligonucleotide: BID-1908
gggggugcaagccugagaag

SEQ ID NO: 45021 - RNA, 21 nt, Artificial Sequence
  Synthetic oligonucleotide: BID-5354
agggggugcaagccugagaag

SEQ ID NO: 45022 - RNA, 22 nt, Artificial Sequence
  Synthetic oligonucleotide: BID-5355
aagggggugcaagccugagaag

SEQ ID NO: 45023 - RNA, 23 nt, Artificial Sequence
  Synthetic oligonucleotide: BID-5356
gaagggggugcaagccugagaag

SEQ ID NO: 45024 - RNA, 24 nt, Artificial Sequence
  Synthetic oligonucleotide: BID-5357
ggaagggggugcaagccugagaag

SEQ ID NO: 45025 - RNA, 18 nt, Artificial Sequence
  Synthetic oligonucleotide: BID-5358
gcacacauucaggcccag

SEQ ID NO: 45026 - RNA, 19 nt, Artificial Sequence
  Synthetic oligonucleotide: BID-5359
ggcacacauucaggcccag

SEQ ID NO: 45027 - RNA, 20 nt, Artificial Sequence
  Synthetic oligonucleotide: BID-1886
cggcacacauucaggcccag

SEQ ID NO: 45028 - RNA, 21 nt, Artificial Sequence
  Synthetic oligonucleotide: BID-5360
acggcacacauucaggcccag

SEQ ID NO: 45029 - RNA, 22 nt, Artificial Sequence
  Synthetic oligonucleotide: BID-5361
gacggcacacauucaggcccag

SEQ ID NO: 45030 - RNA, 23 nt, Artificial Sequence
  Synthetic oligonucleotide: BID-5362
ggacggcacacauucaggcccag

SEQ ID NO: 45031 - RNA, 24 nt, Artificial Sequence
  Synthetic oligonucleotide: BID-5363
aggacggcacacauucaggcccag

SEQ ID NO: 45032 - RNA, 18 nt, Artificial Sequence
  Synthetic oligonucleotide: BID-5364
ccugggcaagaggggcag

SEQ ID NO: 45033 - RNA, 19 nt, Artificial Sequence
  Synthetic oligonucleotide: BID-5365
cccugggcaagaggggcag

SEQ ID NO: 45034 - RNA, 20 nt, Artificial Sequence
  Synthetic oligonucleotide: BID-1865
ucccugggcaagaggggcag

SEQ ID NO: 45035 - RNA, 21 nt, Artificial Sequence
  Synthetic oligonucleotide: BID-5366
cucccugggcaagaggggcag

SEQ ID NO: 45036 - RNA, 22 nt, Artificial Sequence
  Synthetic oligonucleotide: BID-5367
ccucccugggcaagaggggcag

SEQ ID NO: 45037 - RNA, 23 nt, Artificial Sequence
  Synthetic oligonucleotide: BID-5368
cccucccugggcaagaggggcag

SEQ ID NO: 45038 - RNA, 24 nt, Artificial Sequence
  Synthetic oligonucleotide: BID-5369
ucccucccugggcaagaggggcag

SEQ ID NO: 45039 - RNA, 18 nt, Artificial Sequence
  Synthetic oligonucleotide: BID-5370
agccugagaccuccagag

SEQ ID NO: 45040 - RNA, 19 nt, Artificial Sequence
  Synthetic oligonucleotide: BID-5371
cagccugagaccuccagag

SEQ ID NO: 45041 - RNA, 20 nt, Artificial Sequence
  Synthetic oligonucleotide: BID-1542
ccagccugagaccuccagag

SEQ ID NO: 45042 - RNA, 18 nt, Artificial Sequence
  Synthetic oligonucleotide: BID-5372
agccuccuguggguggag

SEQ ID NO: 45043 - RNA, 19 nt, Artificial Sequence
  Synthetic oligonucleotide: BID-5373
aagccuccuguggguggag

SEQ ID NO: 45044 - RNA, 20 nt, Artificial Sequence
  Synthetic oligonucleotide: BID-1890
aaagccuccuguggguggag

SEQ ID NO: 45045 - RNA, 21 nt, Artificial Sequence
  Synthetic oligonucleotide: BID-5374
caaagccuccuguggguggag

SEQ ID NO: 45046 - RNA, 22 nt, Artificial Sequence
  Synthetic oligonucleotide: BID-5375
ucaaagccuccuguggguggag

SEQ ID NO: 45047 - RNA, 23 nt, Artificial Sequence
  Synthetic oligonucleotide: BID-5376
cucaaagccuccuguggguggag

SEQ ID NO: 45048 - RNA, 24 nt, Artificial Sequence
  Synthetic oligonucleotide: BID-5377
ucucaaagccuccuguggguggag

SEQ ID NO: 45049 - RNA, 18 nt, Artificial Sequence
  Synthetic oligonucleotide: BID-5378
ggaauuaucccagcggcg

SEQ ID NO: 45050 - RNA, 19 nt, Artificial Sequence
  Synthetic oligonucleotide: BID-5379
aggaauuaucccagcggcg

SEQ ID NO: 45051 - RNA, 20 nt, Artificial Sequence
  Synthetic oligonucleotide: BID-1567
uaggaauuaucccagcggcg

SEQ ID NO: 45052 - RNA, 21 nt, Artificial Sequence
  Synthetic oligonucleotide: BID-5380
uuaggaauuaucccagcggcg

SEQ ID NO: 45053 - RNA, 22 nt, Artificial Sequence
  Synthetic oligonucleotide: BID-5381
auuaggaauuaucccagcggcg

SEQ ID NO: 45054 - RNA, 23 nt, Artificial Sequence
  Synthetic oligonucleotide: BID-5382
cauuaggaauuaucccagcggcg

SEQ ID NO: 45055 - RNA, 24 nt, Artificial Sequence
  Synthetic oligonucleotide: BID-5383
ucauuaggaauuaucccagcggcg

SEQ ID NO: 45056 - RNA, 18 nt, Artificial Sequence
  Synthetic oligonucleotide: BID-5384
ggugcaagccugagaagg

SEQ ID NO: 45057 - RNA, 19 nt, Artificial Sequence
  Synthetic oligonucleotide: BID-5385
gggugcaagccugagaagg

SEQ ID NO: 45058 - RNA, 20 nt, Artificial Sequence
  Synthetic oligonucleotide: BID-1051
ggggugcaagccugagaagg

SEQ ID NO: 45059 - RNA, 21 nt, Artificial Sequence
  Synthetic oligonucleotide: BID-5386
gggggugcaagccugagaagg

SEQ ID NO: 45060 - RNA, 22 nt, Artificial Sequence
  Synthetic oligonucleotide: BID-5387
agggggugcaagccugagaagg

SEQ ID NO: 45061 - RNA, 23 nt, Artificial Sequence
  Synthetic oligonucleotide: BID-5388
aagggggugcaagccugagaagg

SEQ ID NO: 45062 - RNA, 24 nt, Artificial Sequence
  Synthetic oligonucleotide: BID-5389
gaagggggugcaagccugagaagg

SEQ ID NO: 45063 - RNA, 18 nt, Artificial Sequence
  Synthetic oligonucleotide: BID-5390
gucgcguaagggguaagg

SEQ ID NO: 45064 - RNA, 19 nt, Artificial Sequence
  Synthetic oligonucleotide: BID-5391
agucgcguaagggguaagg

SEQ ID NO: 45065 - RNA, 20 nt, Artificial Sequence
  Synthetic oligonucleotide: BID-1574
cagucgcguaagggguaagg

SEQ ID NO: 45066 - RNA, 21 nt, Artificial Sequence
  Synthetic oligonucleotide: BID-5392
acagucgcguaagggguaagg

SEQ ID NO: 45067 - RNA, 22 nt, Artificial Sequence
  Synthetic oligonucleotide: BID-5393
aacagucgcguaagggguaagg

SEQ ID NO: 45068 - RNA, 23 nt, Artificial Sequence
  Synthetic oligonucleotide: BID-5394
aaacagucgcguaagggguaagg

SEQ ID NO: 45069 - RNA, 24 nt, Artificial Sequence
  Synthetic oligonucleotide: BID-5395
gaaacagucgcguaagggguaagg

SEQ ID NO: 45070 - RNA, 18 nt, Artificial Sequence
  Synthetic oligonucleotide: BID-5396
uguggauaaggcuccagg

SEQ ID NO: 45071 - RNA, 19 nt, Artificial Sequence
  Synthetic oligonucleotide: BID-5397
guguggauaaggcuccagg

SEQ ID NO: 45072 - RNA, 20 nt, Artificial Sequence
  Synthetic oligonucleotide: BID-1903
gguguggauaaggcuccagg

SEQ ID NO: 45073 - RNA, 21 nt, Artificial Sequence
  Synthetic oligonucleotide: BID-5398
ggguguggauaaggcuccagg

SEQ ID NO: 45074 - RNA, 22 nt, Artificial Sequence
  Synthetic oligonucleotide: BID-5399
aggguguggauaaggcuccagg

SEQ ID NO: 45075 - RNA, 23 nt, Artificial Sequence
  Synthetic oligonucleotide: BID-5400
gaggguguggauaaggcuccagg

SEQ ID NO: 45076 - RNA, 24 nt, Artificial Sequence
  Synthetic oligonucleotide: BID-5401
ugaggguguggauaaggcuccagg

SEQ ID NO: 45077 - RNA, 18 nt, Artificial Sequence
  Synthetic oligonucleotide: BID-5402
cacacccugggccgcagg

SEQ ID NO: 45078 - RNA, 19 nt, Artificial Sequence
  Synthetic oligonucleotide: BID-5403
gcacacccugggccgcagg

SEQ ID NO: 45079 - RNA, 20 nt, Artificial Sequence
  Synthetic oligonucleotide: BID-1870
cgcacacccugggccgcagg

SEQ ID NO: 45080 - RNA, 21 nt, Artificial Sequence
  Synthetic oligonucleotide: BID-5404
acgcacacccugggccgcagg

SEQ ID NO: 45081 - RNA, 22 nt, Artificial Sequence
  Synthetic oligonucleotide: BID-5405
gacgcacacccugggccgcagg

SEQ ID NO: 45082 - RNA, 23 nt, Artificial Sequence
  Synthetic oligonucleotide: BID-5406
ggacgcacacccugggccgcagg

SEQ ID NO: 45083 - RNA, 24 nt, Artificial Sequence
  Synthetic oligonucleotide: BID-5407
gggacgcacacccugggccgcagg

SEQ ID NO: 45084 - RNA, 18 nt, Artificial Sequence
  Synthetic oligonucleotide: BID-5408
gccugagaccuccagagg

SEQ ID NO: 45085 - RNA, 19 nt, Artificial Sequence
  Synthetic oligonucleotide: BID-5409
agccugagaccuccagagg

SEQ ID NO: 45086 - RNA, 20 nt, Artificial Sequence
  Synthetic oligonucleotide: BID-685
cagccugagaccuccagagg

SEQ ID NO: 45087 - RNA, 21 nt, Artificial Sequence
  Synthetic oligonucleotide: BID-5410
ccagccugagaccuccagagg

SEQ ID NO: 45088 - RNA, 22 nt, Artificial Sequence
  Synthetic oligonucleotide: BID-5411
accagccugagaccuccagagg

SEQ ID NO: 45089 - RNA, 23 nt, Artificial Sequence
  Synthetic oligonucleotide: BID-5412
gaccagccugagaccuccagagg

SEQ ID NO: 45090 - RNA, 24 nt, Artificial Sequence
  Synthetic oligonucleotide: BID-5413
agaccagccugagaccuccagagg

SEQ ID NO: 45091 - RNA, 18 nt, Artificial Sequence
  Synthetic oligonucleotide: BID-5414
ucgcguaagggguaaggg

SEQ ID NO: 45092 - RNA, 19 nt, Artificial Sequence
  Synthetic oligonucleotide: BID-5415
gucgcguaagggguaaggg

SEQ ID NO: 45093 - RNA, 20 nt, Artificial Sequence
  Synthetic oligonucleotide: BID-713
agucgcguaagggguaaggg

SEQ ID NO: 45094 - RNA, 21 nt, Artificial Sequence
  Synthetic oligonucleotide: BID-5416
cagucgcguaagggguaaggg

SEQ ID NO: 45095 - RNA, 22 nt, Artificial Sequence
  Synthetic oligonucleotide: BID-5417
acagucgcguaagggguaaggg

SEQ ID NO: 45096 - RNA, 23 nt, Artificial Sequence
  Synthetic oligonucleotide: BID-5418
aacagucgcguaagggguaaggg

SEQ ID NO: 45097 - RNA, 24 nt, Artificial Sequence
  Synthetic oligonucleotide: BID-5419
aaacagucgcguaagggguaaggg

SEQ ID NO: 45098 - RNA, 18 nt, Artificial Sequence
  Synthetic oligonucleotide: BID-5420
caagaggggcagaagggg

SEQ ID NO: 45099 - RNA, 19 nt, Artificial Sequence
  Synthetic oligonucleotide: BID-5421
gcaagaggggcagaagggg

SEQ ID NO: 45100 - RNA, 20 nt, Artificial Sequence
  Synthetic oligonucleotide: BID-1867
ggcaagaggggcagaagggg

SEQ ID NO: 45101 - RNA, 21 nt, Artificial Sequence
  Synthetic oligonucleotide: BID-5422
gggcaagaggggcagaagggg

SEQ ID NO: 45102 - RNA, 22 nt, Artificial Sequence
  Synthetic oligonucleotide: BID-5423
ugggcaagaggggcagaagggg

SEQ ID NO: 45103 - RNA, 23 nt, Artificial Sequence
  Synthetic oligonucleotide: BID-5424
cugggcaagaggggcagaagggg

SEQ ID NO: 45104 - RNA, 24 nt, Artificial Sequence
  Synthetic oligonucleotide: BID-5425
ccugggcaagaggggcagaagggg

SEQ ID NO: 45105 - RNA, 18 nt, Artificial Sequence
  Synthetic oligonucleotide: BID-5426
cucccugggcaagagggg

SEQ ID NO: 45106 - RNA, 19 nt, Artificial Sequence
  Synthetic oligonucleotide: BID-5427
ccucccugggcaagagggg

SEQ ID NO: 45107 - RNA, 20 nt, Artificial Sequence
  Synthetic oligonucleotide: BID-1864
cccucccugggcaagagggg

SEQ ID NO: 45108 - RNA, 21 nt, Artificial Sequence
  Synthetic oligonucleotide: BID-5428
ucccucccugggcaagagggg

SEQ ID NO: 45109 - RNA, 22 nt, Artificial Sequence
  Synthetic oligonucleotide: BID-5429
uucccucccugggcaagagggg

SEQ ID NO: 45110 - RNA, 23 nt, Artificial Sequence
  Synthetic oligonucleotide: BID-5430
cuucccucccugggcaagagggg

SEQ ID NO: 45111 - RNA, 24 nt, Artificial Sequence
  Synthetic oligonucleotide: BID-5431
ucuucccucccugggcaagagggg

SEQ ID NO: 45112 - RNA, 18 nt, Artificial Sequence
  Synthetic oligonucleotide: BID-5432
acagggacuggugagggg

SEQ ID NO: 45113 - RNA, 19 nt, Artificial Sequence
  Synthetic oligonucleotide: BID-5433
cacagggacuggugagggg

SEQ ID NO: 45114 - RNA, 20 nt, Artificial Sequence
  Synthetic oligonucleotide: BID-1554
gcacagggacuggugagggg

SEQ ID NO: 45115 - RNA, 21 nt, Artificial Sequence
  Synthetic oligonucleotide: BID-5434
agcacagggacuggugagggg

SEQ ID NO: 45116 - RNA, 22 nt, Artificial Sequence
  Synthetic oligonucleotide: BID-5435
aagcacagggacuggugagggg

SEQ ID NO: 45117 - RNA, 23 nt, Artificial Sequence
  Synthetic oligonucleotide: BID-5436
caagcacagggacuggugagggg

SEQ ID NO: 45118 - RNA, 24 nt, Artificial Sequence
  Synthetic oligonucleotide: BID-5437
acaagcacagggacuggugagggg

SEQ ID NO: 45119 - RNA, 18 nt, Artificial Sequence
  Synthetic oligonucleotide: BID-5438
cucaaagccuccuguggg

SEQ ID NO: 45120 - RNA, 19 nt, Artificial Sequence
  Synthetic oligonucleotide: BID-5439
ucucaaagccuccuguggg

SEQ ID NO: 45121 - RNA, 20 nt, Artificial Sequence
  Synthetic oligonucleotide: BID-1037
aucucaaagccuccuguggg

SEQ ID NO: 45122 - RNA, 21 nt, Artificial Sequence
  Synthetic oligonucleotide: BID-5440
caucucaaagccuccuguggg

SEQ ID NO: 45123 - RNA, 22 nt, Artificial Sequence
  Synthetic oligonucleotide: BID-5441
ccaucucaaagccuccuguggg

SEQ ID NO: 45124 - RNA, 23 nt, Artificial Sequence
  Synthetic oligonucleotide: BID-5442
cccaucucaaagccuccuguggg

SEQ ID NO: 45125 - RNA, 24 nt, Artificial Sequence
  Synthetic oligonucleotide: BID-5443
ccccaucucaaagccuccuguggg

SEQ ID NO: 45126 - RNA, 18 nt, Artificial Sequence
  Synthetic oligonucleotide: BID-5444
gcaagccugagaaggugg

SEQ ID NO: 45127 - RNA, 19 nt, Artificial Sequence
  Synthetic oligonucleotide: BID-5445
ugcaagccugagaaggugg

SEQ ID NO: 45128 - RNA, 20 nt, Artificial Sequence
  Synthetic oligonucleotide: BID-1910
gugcaagccugagaaggugg

SEQ ID NO: 45129 - RNA, 21 nt, Artificial Sequence
  Synthetic oligonucleotide: BID-5446
ggugcaagccugagaaggugg

SEQ ID NO: 45130 - RNA, 22 nt, Artificial Sequence
  Synthetic oligonucleotide: BID-5447
gggugcaagccugagaaggugg

SEQ ID NO: 45131 - RNA, 23 nt, Artificial Sequence
  Synthetic oligonucleotide: BID-5448
ggggugcaagccugagaaggugg

SEQ ID NO: 45132 - RNA, 24 nt, Artificial Sequence
  Synthetic oligonucleotide: BID-5449
gggggugcaagccugagaaggugg

SEQ ID NO: 45133 - RNA, 18 nt, Artificial Sequence
  Synthetic oligonucleotide: BID-5450
ucucaaagccuccugugg

SEQ ID NO: 45134 - RNA, 19 nt, Artificial Sequence
  Synthetic oligonucleotide: BID-5451
aucucaaagccuccugugg

SEQ ID NO: 45135 - RNA, 20 nt, Artificial Sequence
  Synthetic oligonucleotide: BID-1888
caucucaaagccuccugugg

SEQ ID NO: 45136 - RNA, 21 nt, Artificial Sequence
  Synthetic oligonucleotide: BID-5452
ccaucucaaagccuccugugg

SEQ ID NO: 45137 - RNA, 22 nt, Artificial Sequence
  Synthetic oligonucleotide: BID-5453
cccaucucaaagccuccugugg

SEQ ID NO: 45138 - RNA, 23 nt, Artificial Sequence
  Synthetic oligonucleotide: BID-5454
ccccaucucaaagccuccugugg

SEQ ID NO: 45139 - RNA, 24 nt, Artificial Sequence
  Synthetic oligonucleotide: BID-5455
cccccaucucaaagccuccugugg

SEQ ID NO: 45140 - RNA, 18 nt, Artificial Sequence
  Synthetic oligonucleotide: BID-5456
guggguggagauggaaug

SEQ ID NO: 45141 - RNA, 19 nt, Artificial Sequence
  Synthetic oligonucleotide: BID-5457
uguggguggagauggaaug

SEQ ID NO: 45142 - RNA, 20 nt, Artificial Sequence
  Synthetic oligonucleotide: BID-1039
cuguggguggagauggaaug

SEQ ID NO: 45143 - RNA, 21 nt, Artificial Sequence
  Synthetic oligonucleotide: BID-5458
ccuguggguggagauggaaug

SEQ ID NO: 45144 - RNA, 22 nt, Artificial Sequence
  Synthetic oligonucleotide: BID-5459
uccuguggguggagauggaaug

SEQ ID NO: 45145 - RNA, 23 nt, Artificial Sequence
  Synthetic oligonucleotide: BID-5460
cuccuguggguggagauggaaug

SEQ ID NO: 45146 - RNA, 24 nt, Artificial Sequence
  Synthetic oligonucleotide: BID-5461
ccuccuguggguggagauggaaug

SEQ ID NO: 45147 - RNA, 18 nt, Artificial Sequence
  Synthetic oligonucleotide: BID-5462
caacaagcacagggacug

SEQ ID NO: 45148 - RNA, 19 nt, Artificial Sequence
  Synthetic oligonucleotide: BID-5463
acaacaagcacagggacug

SEQ ID NO: 45149 - RNA, 20 nt, Artificial Sequence
  Synthetic oligonucleotide: BID-1551
aacaacaagcacagggacug

SEQ ID NO: 45150 - RNA, 21 nt, Artificial Sequence
  Synthetic oligonucleotide: BID-5464
aaacaacaagcacagggacug

SEQ ID NO: 45151 - RNA, 22 nt, Artificial Sequence
  Synthetic oligonucleotide: BID-5465
uaaacaacaagcacagggacug

SEQ ID NO: 45152 - RNA, 23 nt, Artificial Sequence
  Synthetic oligonucleotide: BID-5466
auaaacaacaagcacagggacug

SEQ ID NO: 45153 - RNA, 24 nt, Artificial Sequence
  Synthetic oligonucleotide: BID-5467
aauaaacaacaagcacagggacug

SEQ ID NO: 45154 - RNA, 18 nt, Artificial Sequence
  Synthetic oligonucleotide: BID-5468
aucacucccaggggacug

SEQ ID NO: 45155 - RNA, 19 nt, Artificial Sequence
  Synthetic oligonucleotide: BID-5469
caucacucccaggggacug

SEQ ID NO: 45156 - RNA, 20 nt, Artificial Sequence
  Synthetic oligonucleotide: BID-1882
ucaucacucccaggggacug

SEQ ID NO: 45157 - RNA, 21 nt, Artificial Sequence
  Synthetic oligonucleotide: BID-5470
gucaucacucccaggggacug

SEQ ID NO: 45158 - RNA, 22 nt, Artificial Sequence
  Synthetic oligonucleotide: BID-5471
ggucaucacucccaggggacug

SEQ ID NO: 45159 - RNA, 23 nt, Artificial Sequence
  Synthetic oligonucleotide: BID-5472
cggucaucacucccaggggacug

SEQ ID NO: 45160 - RNA, 24 nt, Artificial Sequence
  Synthetic oligonucleotide: BID-5473
ucggucaucacucccaggggacug

SEQ ID NO: 45161 - RNA, 18 nt, Artificial Sequence
  Synthetic oligonucleotide: BID-5474
caagcacagggacuggug

SEQ ID NO: 45162 - RNA, 19 nt, Artificial Sequence
  Synthetic oligonucleotide: BID-5475
acaagcacagggacuggug

SEQ ID NO: 45163 - RNA, 20 nt, Artificial Sequence
  Synthetic oligonucleotide: BID-692
aacaagcacagggacuggug

SEQ ID NO: 45164 - RNA, 21 nt, Artificial Sequence
  Synthetic oligonucleotide: BID-5476
caacaagcacagggacuggug

SEQ ID NO: 45165 - RNA, 22 nt, Artificial Sequence
  Synthetic oligonucleotide: BID-5477
acaacaagcacagggacuggug

SEQ ID NO: 45166 - RNA, 23 nt, Artificial Sequence
  Synthetic oligonucleotide: BID-5478
aacaacaagcacagggacuggug

SEQ ID NO: 45167 - RNA, 24 nt, Artificial Sequence
  Synthetic oligonucleotide: BID-5479
aaacaacaagcacagggacuggug

SEQ ID NO: 45168 - RNA, 18 nt, Artificial Sequence
  Synthetic oligonucleotide: BID-5480
uguggguggagauggaau

SEQ ID NO: 45169 - RNA, 19 nt, Artificial Sequence
  Synthetic oligonucleotide: BID-5481
cuguggguggagauggaau

SEQ ID NO: 45170 - RNA, 20 nt, Artificial Sequence
  Synthetic oligonucleotide: BID-1892
ccuguggguggagauggaau

SEQ ID NO: 45171 - RNA, 21 nt, Artificial Sequence
  Synthetic oligonucleotide: BID-5482
uccuguggguggagauggaau

SEQ ID NO: 45172 - RNA, 22 nt, Artificial Sequence
  Synthetic oligonucleotide: BID-5483
cuccuguggguggagauggaau

SEQ ID NO: 45173 - RNA, 23 nt, Artificial Sequence
  Synthetic oligonucleotide: BID-5484
ccuccuguggguggagauggaau

SEQ ID NO: 45174 - RNA, 24 nt, Artificial Sequence
  Synthetic oligonucleotide: BID-5485
gccuccuguggguggagauggaau

SEQ ID NO: 45175 - RNA, 18 nt, Artificial Sequence
  Synthetic oligonucleotide: BID-5486
uguuucccagagaaucau

SEQ ID NO: 45176 - RNA, 19 nt, Artificial Sequence
  Synthetic oligonucleotide: BID-5487
auguuucccagagaaucau

SEQ ID NO: 45177 - RNA, 20 nt, Artificial Sequence
  Synthetic oligonucleotide: BID-1565
aauguuucccagagaaucau

SEQ ID NO: 45178 - RNA, 21 nt, Artificial Sequence
  Synthetic oligonucleotide: BID-5488
gaauguuucccagagaaucau

SEQ ID NO: 45179 - RNA, 22 nt, Artificial Sequence
  Synthetic oligonucleotide: BID-5489
ugaauguuucccagagaaucau

SEQ ID NO: 45180 - RNA, 23 nt, Artificial Sequence
  Synthetic oligonucleotide: BID-5490
cugaauguuucccagagaaucau

SEQ ID NO: 45181 - RNA, 24 nt, Artificial Sequence
  Synthetic oligonucleotide: BID-5491
ucugaauguuucccagagaaucau

SEQ ID NO: 45182 - RNA, 18 nt, Artificial Sequence
  Synthetic oligonucleotide: BID-5492
ggaagggggugcaagccu

SEQ ID NO: 45183 - RNA, 19 nt, Artificial Sequence
  Synthetic oligonucleotide: BID-5493
aggaagggggugcaagccu

SEQ ID NO: 45184 - RNA, 20 nt, Artificial Sequence
  Synthetic oligonucleotide: BID-1907
caggaagggggugcaagccu

SEQ ID NO: 45185 - RNA, 21 nt, Artificial Sequence
  Synthetic oligonucleotide: BID-5494
ccaggaagggggugcaagccu

SEQ ID NO: 45186 - RNA, 22 nt, Artificial Sequence
  Synthetic oligonucleotide: BID-5495
uccaggaagggggugcaagccu

SEQ ID NO: 45187 - RNA, 23 nt, Artificial Sequence
  Synthetic oligonucleotide: BID-5496
cuccaggaagggggugcaagccu

SEQ ID NO: 45188 - RNA, 24 nt, Artificial Sequence
  Synthetic oligonucleotide: BID-5497
gcuccaggaagggggugcaagccu

SEQ ID NO: 45189 - RNA, 18 nt, Artificial Sequence
  Synthetic oligonucleotide: BID-5498
gcucccugugcccguccu

SEQ ID NO: 45190 - RNA, 19 nt, Artificial Sequence
  Synthetic oligonucleotide: BID-5499
ugcucccugugcccguccu

SEQ ID NO: 45191 - RNA, 20 nt, Artificial Sequence
  Synthetic oligonucleotide: BID-1001
augcucccugugcccguccu

SEQ ID NO: 45192 - RNA, 21 nt, Artificial Sequence
  Synthetic oligonucleotide: BID-5500
caugcucccugugcccguccu

SEQ ID NO: 45193 - RNA, 22 nt, Artificial Sequence
  Synthetic oligonucleotide: BID-5501
ucaugcucccugugcccguccu

SEQ ID NO: 45194 - RNA, 23 nt, Artificial Sequence
  Synthetic oligonucleotide: BID-5502
cucaugcucccugugcccguccu

SEQ ID NO: 45195 - RNA, 24 nt, Artificial Sequence
  Synthetic oligonucleotide: BID-5503
ccucaugcucccugugcccguccu

SEQ ID NO: 45196 - RNA, 18 nt, Artificial Sequence
  Synthetic oligonucleotide: BID-5504
acccuuaagaccccagcu

SEQ ID NO: 45197 - RNA, 19 nt, Artificial Sequence
  Synthetic oligonucleotide: BID-5505
cacccuuaagaccccagcu

SEQ ID NO: 45198 - RNA, 20 nt, Artificial Sequence
  Synthetic oligonucleotide: BID-1876
acacccuuaagaccccagcu

SEQ ID NO: 45199 - RNA, 21 nt, Artificial Sequence
  Synthetic oligonucleotide: BID-5506
cacacccuuaagaccccagcu

SEQ ID NO: 45200 - RNA, 22 nt, Artificial Sequence
  Synthetic oligonucleotide: BID-5507
ccacacccuuaagaccccagcu

SEQ ID NO: 45201 - RNA, 23 nt, Artificial Sequence
  Synthetic oligonucleotide: BID-5508
cccacacccuuaagaccccagcu

SEQ ID NO: 45202 - RNA, 24 nt, Artificial Sequence
  Synthetic oligonucleotide: BID-5509
ccccacacccuuaagaccccagcu

SEQ ID NO: 45203 - RNA, 18 nt, Artificial Sequence
  Synthetic oligonucleotide: BID-5510
cugcagcucccccacagu

SEQ ID NO: 45204 - RNA, 19 nt, Artificial Sequence
  Synthetic oligonucleotide: BID-5511
ucugcagcucccccacagu

SEQ ID NO: 45205 - RNA, 20 nt, Artificial Sequence
  Synthetic oligonucleotide: BID-1895
cucugcagcucccccacagu

SEQ ID NO: 45206 - RNA, 21 nt, Artificial Sequence
  Synthetic oligonucleotide: BID-5512
ccucugcagcucccccacagu

SEQ ID NO: 45207 - RNA, 22 nt, Artificial Sequence
  Synthetic oligonucleotide: BID-5513
uccucugcagcucccccacagu

SEQ ID NO: 45208 - RNA, 23 nt, Artificial Sequence
  Synthetic oligonucleotide: BID-5514
auccucugcagcucccccacagu

SEQ ID NO: 45209 - RNA, 24 nt, Artificial Sequence
  Synthetic oligonucleotide: BID-5515
cauccucugcagcucccccacagu

SEQ ID NO: 45210 - RNA, 18 nt, Artificial Sequence
  Synthetic oligonucleotide: BID-5516
ccaaaccccugguuccgu

SEQ ID NO: 45211 - RNA, 19 nt, Artificial Sequence
  Synthetic oligonucleotide: BID-5517
uccaaaccccugguuccgu

SEQ ID NO: 45212 - RNA, 20 nt, Artificial Sequence
  Synthetic oligonucleotide: BID-1556
uuccaaaccccugguuccgu

SEQ ID NO: 45213 - RNA, 21 nt, Artificial Sequence
  Synthetic oligonucleotide: BID-5518
uuuccaaaccccugguuccgu

SEQ ID NO: 45214 - RNA, 22 nt, Artificial Sequence
  Synthetic oligonucleotide: BID-5519
cuuuccaaaccccugguuccgu

SEQ ID NO: 45215 - RNA, 23 nt, Artificial Sequence
  Synthetic oligonucleotide: BID-5520
acuuuccaaaccccugguuccgu

SEQ ID NO: 45216 - RNA, 24 nt, Artificial Sequence
  Synthetic oligonucleotide: BID-5521
cacuuuccaaaccccugguuccgu

SEQ ID NO: 45217 - RNA, 18 nt, Artificial Sequence
  Synthetic oligonucleotide: BID-5522
ugucugaaacagucgcgu

SEQ ID NO: 45218 - RNA, 19 nt, Artificial Sequence
  Synthetic oligonucleotide: BID-5523
cugucugaaacagucgcgu

SEQ ID NO: 45219 - RNA, 20 nt, Artificial Sequence
  Synthetic oligonucleotide: BID-1571
acugucugaaacagucgcgu

SEQ ID NO: 45220 - RNA, 21 nt, Artificial Sequence
  Synthetic oligonucleotide: BID-5524
cacugucugaaacagucgcgu

SEQ ID NO: 45221 - RNA, 22 nt, Artificial Sequence
  Synthetic oligonucleotide: BID-5525
acacugucugaaacagucgcgu

SEQ ID NO: 45222 - RNA, 23 nt, Artificial Sequence
  Synthetic oligonucleotide: BID-5526
gacacugucugaaacagucgcgu

SEQ ID NO: 45223 - RNA, 24 nt, Artificial Sequence
  Synthetic oligonucleotide: BID-5527
cgacacugucugaaacagucgcgu

SEQ ID NO: 45224 - RNA, 18 nt, Artificial Sequence
  Synthetic oligonucleotide: BID-5528
acaagcacagggacuggu

SEQ ID NO: 45225 - RNA, 19 nt, Artificial Sequence
  Synthetic oligonucleotide: BID-5529
aacaagcacagggacuggu

SEQ ID NO: 45226 - RNA, 20 nt, Artificial Sequence
  Synthetic oligonucleotide: BID-1552
caacaagcacagggacuggu

SEQ ID NO: 45227 - RNA, 21 nt, Artificial Sequence
  Synthetic oligonucleotide: BID-5530
acaacaagcacagggacuggu

SEQ ID NO: 45228 - RNA, 22 nt, Artificial Sequence
  Synthetic oligonucleotide: BID-5531
aacaacaagcacagggacuggu

SEQ ID NO: 45229 - RNA, 23 nt, Artificial Sequence
  Synthetic oligonucleotide: BID-5532
aaacaacaagcacagggacuggu

SEQ ID NO: 45230 - RNA, 24 nt, Artificial Sequence
  Synthetic oligonucleotide: BID-5533
uaaacaacaagcacagggacuggu

SEQ ID NO: 45231 - RNA, 18 nt, Artificial Sequence
  Synthetic oligonucleotide: BID-5534
aaaguuggacgacacugu

SEQ ID NO: 45232 - RNA, 19 nt, Artificial Sequence
  Synthetic oligonucleotide: BID-5535
uaaaguuggacgacacugu

SEQ ID NO: 45233 - RNA, 20 nt, Artificial Sequence
  Synthetic oligonucleotide: BID-1570
uuaaaguuggacgacacugu

SEQ ID NO: 45234 - RNA, 21 nt, Artificial Sequence
  Synthetic oligonucleotide: BID-5536
cuuaaaguuggacgacacugu

SEQ ID NO: 45235 - RNA, 22 nt, Artificial Sequence
  Synthetic oligonucleotide: BID-5537
acuuaaaguuggacgacacugu

SEQ ID NO: 45236 - RNA, 23 nt, Artificial Sequence
  Synthetic oligonucleotide: BID-5538
aacuuaaaguuggacgacacugu

SEQ ID NO: 45237 - RNA, 24 nt, Artificial Sequence
  Synthetic oligonucleotide: BID-5539
caacuuaaaguuggacgacacugu

SEQ ID NO: 45238 - RNA, 18 nt, Artificial Sequence
  Synthetic oligonucleotide: BID-5540
ucuugcccagggagggaa

SEQ ID NO: 45239 - RNA, 19 nt, Artificial Sequence
  Synthetic oligonucleotide: BID-5541
cucuugcccagggagggaa

SEQ ID NO: 45240 - RNA, 20 nt, Artificial Sequence
  Synthetic oligonucleotide: BID-1767
ccucuugcccagggagggaa

SEQ ID NO: 45241 - RNA, 21 nt, Artificial Sequence
  Synthetic oligonucleotide: BID-5542
cccucuugcccagggagggaa

SEQ ID NO: 45242 - RNA, 22 nt, Artificial Sequence
  Synthetic oligonucleotide: BID-5543
ccccucuugcccagggagggaa

SEQ ID NO: 45243 - RNA, 23 nt, Artificial Sequence
  Synthetic oligonucleotide: BID-5544
gccccucuugcccagggagggaa

SEQ ID NO: 45244 - RNA, 24 nt, Artificial Sequence
  Synthetic oligonucleotide: BID-5545
ugccccucuugcccagggagggaa

SEQ ID NO: 45245 - RNA, 18 nt, Artificial Sequence
  Synthetic oligonucleotide: BID-5546
ucucccaggacgggcaca

SEQ ID NO: 45246 - RNA, 19 nt, Artificial Sequence
  Synthetic oligonucleotide: BID-5547
aucucccaggacgggcaca

SEQ ID NO: 45247 - RNA, 20 nt, Artificial Sequence
  Synthetic oligonucleotide: BID-932
gaucucccaggacgggcaca

SEQ ID NO: 45248 - RNA, 21 nt, Artificial Sequence
  Synthetic oligonucleotide: BID-5548
ggaucucccaggacgggcaca

SEQ ID NO: 45249 - RNA, 22 nt, Artificial Sequence
  Synthetic oligonucleotide: BID-5549
gggaucucccaggacgggcaca

SEQ ID NO: 45250 - RNA, 23 nt, Artificial Sequence
  Synthetic oligonucleotide: BID-5550
agggaucucccaggacgggcaca

SEQ ID NO: 45251 - RNA, 24 nt, Artificial Sequence
  Synthetic oligonucleotide: BID-5551
cagggaucucccaggacgggcaca

SEQ ID NO: 45252 - RNA, 18 nt, Artificial Sequence
  Synthetic oligonucleotide: BID-5552
acauuccaucuccaccca

SEQ ID NO: 45253 - RNA, 19 nt, Artificial Sequence
  Synthetic oligonucleotide: BID-5553
cacauuccaucuccaccca

SEQ ID NO: 45254 - RNA, 20 nt, Artificial Sequence
  Synthetic oligonucleotide: BID-1720
ccacauuccaucuccaccca

SEQ ID NO: 45255 - RNA, 21 nt, Artificial Sequence
  Synthetic oligonucleotide: BID-5554
uccacauuccaucuccaccca

SEQ ID NO: 45256 - RNA, 22 nt, Artificial Sequence
  Synthetic oligonucleotide: BID-5555
uuccacauuccaucuccaccca

SEQ ID NO: 45257 - RNA, 23 nt, Artificial Sequence
  Synthetic oligonucleotide: BID-5556
uuuccacauuccaucuccaccca

SEQ ID NO: 45258 - RNA, 24 nt, Artificial Sequence
  Synthetic oligonucleotide: BID-5557
uuuuccacauuccaucuccaccca

SEQ ID NO: 45259 - RNA, 18 nt, Artificial Sequence
  Synthetic oligonucleotide: BID-5558
uucugccccucuugccca

SEQ ID NO: 45260 - RNA, 19 nt, Artificial Sequence
  Synthetic oligonucleotide: BID-5559
cuucugccccucuugccca

SEQ ID NO: 45261 - RNA, 20 nt, Artificial Sequence
  Synthetic oligonucleotide: BID-914
ccuucugccccucuugccca

SEQ ID NO: 45262 - RNA, 21 nt, Artificial Sequence
  Synthetic oligonucleotide: BID-5560
cccuucugccccucuugccca

SEQ ID NO: 45263 - RNA, 22 nt, Artificial Sequence
  Synthetic oligonucleotide: BID-5561
ccccuucugccccucuugccca

SEQ ID NO: 45264 - RNA, 23 nt, Artificial Sequence
  Synthetic oligonucleotide: BID-5562
gccccuucugccccucuugccca

SEQ ID NO: 45265 - RNA, 24 nt, Artificial Sequence
  Synthetic oligonucleotide: BID-5563
ugccccuucugccccucuugccca

SEQ ID NO: 45266 - RNA, 18 nt, Artificial Sequence
  Synthetic oligonucleotide: BID-5564
gagguagacagagcucca

SEQ ID NO: 45267 - RNA, 19 nt, Artificial Sequence
  Synthetic oligonucleotide: BID-5565
ugagguagacagagcucca

SEQ ID NO: 45268 - RNA, 20 nt, Artificial Sequence
  Synthetic oligonucleotide: BID-904
uugagguagacagagcucca

SEQ ID NO: 45269 - RNA, 21 nt, Artificial Sequence
  Synthetic oligonucleotide: BID-5566
guugagguagacagagcucca

SEQ ID NO: 45270 - RNA, 22 nt, Artificial Sequence
  Synthetic oligonucleotide: BID-5567
aguugagguagacagagcucca

SEQ ID NO: 45271 - RNA, 23 nt, Artificial Sequence
  Synthetic oligonucleotide: BID-5568
gaguugagguagacagagcucca

SEQ ID NO: 45272 - RNA, 24 nt, Artificial Sequence
  Synthetic oligonucleotide: BID-5569
ggaguugagguagacagagcucca

SEQ ID NO: 45273 - RNA, 18 nt, Artificial Sequence
  Synthetic oligonucleotide: BID-5570
cggggagccggcagcgca

SEQ ID NO: 45274 - RNA, 19 nt, Artificial Sequence
  Synthetic oligonucleotide: BID-5571
gcggggagccggcagcgca

SEQ ID NO: 45275 - RNA, 20 nt, Artificial Sequence
  Synthetic oligonucleotide: BID-1624
ggcggggagccggcagcgca

SEQ ID NO: 45276 - RNA, 21 nt, Artificial Sequence
  Synthetic oligonucleotide: BID-5572
gggcggggagccggcagcgca

SEQ ID NO: 45277 - RNA, 22 nt, Artificial Sequence
  Synthetic oligonucleotide: BID-5573
ggggcggggagccggcagcgca

SEQ ID NO: 45278 - RNA, 23 nt, Artificial Sequence
  Synthetic oligonucleotide: BID-5574
cggggcggggagccggcagcgca

SEQ ID NO: 45279 - RNA, 24 nt, Artificial Sequence
  Synthetic oligonucleotide: BID-5575
gcggggcggggagccggcagcgca

SEQ ID NO: 45280 - RNA, 18 nt, Artificial Sequence
  Synthetic oligonucleotide: BID-5576
aaggguguggggagcgca

SEQ ID NO: 45281 - RNA, 19 nt, Artificial Sequence
  Synthetic oligonucleotide: BID-5577
uaaggguguggggagcgca

SEQ ID NO: 45282 - RNA, 20 nt, Artificial Sequence
  Synthetic oligonucleotide: BID-1746
uuaaggguguggggagcgca

SEQ ID NO: 45283 - RNA, 21 nt, Artificial Sequence
  Synthetic oligonucleotide: BID-5578
cuuaaggguguggggagcgca

SEQ ID NO: 45284 - RNA, 22 nt, Artificial Sequence
  Synthetic oligonucleotide: BID-5579
ucuuaaggguguggggagcgca

SEQ ID NO: 45285 - RNA, 23 nt, Artificial Sequence
  Synthetic oligonucleotide: BID-5580
gucuuaaggguguggggagcgca

SEQ ID NO: 45286 - RNA, 24 nt, Artificial Sequence
  Synthetic oligonucleotide: BID-5581
ggucuuaaggguguggggagcgca

SEQ ID NO: 45287 - RNA, 18 nt, Artificial Sequence
  Synthetic oligonucleotide: BID-5582
gaucucccaggacgggca

SEQ ID NO: 45288 - RNA, 19 nt, Artificial Sequence
  Synthetic oligonucleotide: BID-5583
ggaucucccaggacgggca

SEQ ID NO: 45289 - RNA, 20 nt, Artificial Sequence
  Synthetic oligonucleotide: BID-1777
gggaucucccaggacgggca

SEQ ID NO: 45290 - RNA, 21 nt, Artificial Sequence
  Synthetic oligonucleotide: BID-5584
agggaucucccaggacgggca

SEQ ID NO: 45291 - RNA, 22 nt, Artificial Sequence
  Synthetic oligonucleotide: BID-5585
cagggaucucccaggacgggca

SEQ ID NO: 45292 - RNA, 23 nt, Artificial Sequence
  Synthetic oligonucleotide: BID-5586
gcagggaucucccaggacgggca

SEQ ID NO: 45293 - RNA, 24 nt, Artificial Sequence
  Synthetic oligonucleotide: BID-5587
ggcagggaucucccaggacgggca

SEQ ID NO: 45294 - RNA, 18 nt, Artificial Sequence
  Synthetic oligonucleotide: BID-5588
ggucauucuagguccuca

SEQ ID NO: 45295 - RNA, 19 nt, Artificial Sequence
  Synthetic oligonucleotide: BID-5589
uggucauucuagguccuca

SEQ ID NO: 45296 - RNA, 20 nt, Artificial Sequence
  Synthetic oligonucleotide: BID-783
guggucauucuagguccuca

SEQ ID NO: 45297 - RNA, 21 nt, Artificial Sequence
  Synthetic oligonucleotide: BID-5590
gguggucauucuagguccuca

SEQ ID NO: 45298 - RNA, 22 nt, Artificial Sequence
  Synthetic oligonucleotide: BID-5591
ggguggucauucuagguccuca

SEQ ID NO: 45299 - RNA, 23 nt, Artificial Sequence
  Synthetic oligonucleotide: BID-5592
gggguggucauucuagguccuca

SEQ ID NO: 45300 - RNA, 24 nt, Artificial Sequence
  Synthetic oligonucleotide: BID-5593
ugggguggucauucuagguccuca

SEQ ID NO: 45301 - RNA, 18 nt, Artificial Sequence
  Synthetic oligonucleotide: BID-5594
ccacaggaggcuuugaga

SEQ ID NO: 45302 - RNA, 19 nt, Artificial Sequence
  Synthetic oligonucleotide: BID-5595
cccacaggaggcuuugaga

SEQ ID NO: 45303 - RNA, 20 nt, Artificial Sequence
  Synthetic oligonucleotide: BID-878
acccacaggaggcuuugaga

SEQ ID NO: 45304 - RNA, 21 nt, Artificial Sequence
  Synthetic oligonucleotide: BID-5596
cacccacaggaggcuuugaga

SEQ ID NO: 45305 - RNA, 22 nt, Artificial Sequence
  Synthetic oligonucleotide: BID-5597
ccacccacaggaggcuuugaga

SEQ ID NO: 45306 - RNA, 23 nt, Artificial Sequence
  Synthetic oligonucleotide: BID-5598
uccacccacaggaggcuuugaga

SEQ ID NO: 45307 - RNA, 24 nt, Artificial Sequence
  Synthetic oligonucleotide: BID-5599
cuccacccacaggaggcuuugaga

SEQ ID NO: 45308 - RNA, 18 nt, Artificial Sequence
  Synthetic oligonucleotide: BID-5600
aucaggaguugagguaga

SEQ ID NO: 45309 - RNA, 19 nt, Artificial Sequence
  Synthetic oligonucleotide: BID-5601
caucaggaguugagguaga

SEQ ID NO: 45310 - RNA, 20 nt, Artificial Sequence
  Synthetic oligonucleotide: BID-1751
gcaucaggaguugagguaga

SEQ ID NO: 45311 - RNA, 21 nt, Artificial Sequence
  Synthetic oligonucleotide: BID-5602
ggcaucaggaguugagguaga

SEQ ID NO: 45312 - RNA, 22 nt, Artificial Sequence
  Synthetic oligonucleotide: BID-5603
uggcaucaggaguugagguaga

SEQ ID NO: 45313 - RNA, 23 nt, Artificial Sequence
  Synthetic oligonucleotide: BID-5604
cuggcaucaggaguugagguaga

SEQ ID NO: 45314 - RNA, 24 nt, Artificial Sequence
  Synthetic oligonucleotide: BID-5605
ucuggcaucaggaguugagguaga

SEQ ID NO: 45315 - RNA, 18 nt, Artificial Sequence
  Synthetic oligonucleotide: BID-5606
gccccucuugcccaggga

SEQ ID NO: 45316 - RNA, 19 nt, Artificial Sequence
  Synthetic oligonucleotide: BID-5607
ugccccucuugcccaggga

SEQ ID NO: 45317 - RNA, 20 nt, Artificial Sequence
  Synthetic oligonucleotide: BID-916
cugccccucuugcccaggga

SEQ ID NO: 45318 - RNA, 21 nt, Artificial Sequence
  Synthetic oligonucleotide: BID-5608
ucugccccucuugcccaggga

SEQ ID NO: 45319 - RNA, 22 nt, Artificial Sequence
  Synthetic oligonucleotide: BID-5609
uucugccccucuugcccaggga

SEQ ID NO: 45320 - RNA, 23 nt, Artificial Sequence
  Synthetic oligonucleotide: BID-5610
cuucugccccucuugcccaggga

SEQ ID NO: 45321 - RNA, 24 nt, Artificial Sequence
  Synthetic oligonucleotide: BID-5611
ccuucugccccucuugcccaggga

SEQ ID NO: 45322 - RNA, 18 nt, Artificial Sequence
  Synthetic oligonucleotide: BID-5612
ccggcgcggggcugugga

SEQ ID NO: 45323 - RNA, 19 nt, Artificial Sequence
  Synthetic oligonucleotide: BID-5613
gccggcgcggggcugugga

SEQ ID NO: 45324 - RNA, 20 nt, Artificial Sequence
  Synthetic oligonucleotide: BID-1618
cgccggcgcggggcugugga

SEQ ID NO: 45325 - RNA, 21 nt, Artificial Sequence
  Synthetic oligonucleotide: BID-5614
gcgccggcgcggggcugugga

SEQ ID NO: 45326 - RNA, 22 nt, Artificial Sequence
  Synthetic oligonucleotide: BID-5615
cgcgccggcgcggggcugugga

SEQ ID NO: 45327 - RNA, 23 nt, Artificial Sequence
  Synthetic oligonucleotide: BID-5616
ccgcgccggcgcggggcugugga

SEQ ID NO: 45328 - RNA, 24 nt, Artificial Sequence
  Synthetic oligonucleotide: BID-5617
cccgcgccggcgcggggcugugga

SEQ ID NO: 45329 - RNA, 18 nt, Artificial Sequence
  Synthetic oligonucleotide: BID-5618
guccccugggagugauga

SEQ ID NO: 45330 - RNA, 19 nt, Artificial Sequence
  Synthetic oligonucleotide: BID-5619
aguccccugggagugauga

SEQ ID NO: 45331 - RNA, 20 nt, Artificial Sequence
  Synthetic oligonucleotide: BID-1736
caguccccugggagugauga

SEQ ID NO: 45332 - RNA, 21 nt, Artificial Sequence
  Synthetic oligonucleotide: BID-5620
gcaguccccugggagugauga

SEQ ID NO: 45333 - RNA, 22 nt, Artificial Sequence
  Synthetic oligonucleotide: BID-5621
ugcaguccccugggagugauga

SEQ ID NO: 45334 - RNA, 23 nt, Artificial Sequence
  Synthetic oligonucleotide: BID-5622
cugcaguccccugggagugauga

SEQ ID NO: 45335 - RNA, 24 nt, Artificial Sequence
  Synthetic oligonucleotide: BID-5623
ccugcaguccccugggagugauga

SEQ ID NO: 45336 - RNA, 18 nt, Artificial Sequence
  Synthetic oligonucleotide: BID-5624
uuucuuuuucaguuuuua

SEQ ID NO: 45337 - RNA, 19 nt, Artificial Sequence
  Synthetic oligonucleotide: BID-5625
auuucuuuuucaguuuuua

SEQ ID NO: 45338 - RNA, 20 nt, Artificial Sequence
  Synthetic oligonucleotide: BID-1650
aauuucuuuuucaguuuuua

SEQ ID NO: 45339 - RNA, 21 nt, Artificial Sequence
  Synthetic oligonucleotide: BID-5626
uaauuucuuuuucaguuuuua

SEQ ID NO: 45340 - RNA, 22 nt, Artificial Sequence
  Synthetic oligonucleotide: BID-5627
cuaauuucuuuuucaguuuuua

SEQ ID NO: 45341 - RNA, 23 nt, Artificial Sequence
  Synthetic oligonucleotide: BID-5628
acuaauuucuuuuucaguuuuua

SEQ ID NO: 45342 - RNA, 24 nt, Artificial Sequence
  Synthetic oligonucleotide: BID-5629
aacuaauuucuuuuucaguuuuua

SEQ ID NO: 45343 - RNA, 18 nt, Artificial Sequence
  Synthetic oligonucleotide: BID-5630
ucuagguccucacggaac

SEQ ID NO: 45344 - RNA, 19 nt, Artificial Sequence
  Synthetic oligonucleotide: BID-5631
uucuagguccucacggaac

SEQ ID NO: 45345 - RNA, 20 nt, Artificial Sequence
  Synthetic oligonucleotide: BID-1638
auucuagguccucacggaac

SEQ ID NO: 45346 - RNA, 21 nt, Artificial Sequence
  Synthetic oligonucleotide: BID-5632
cauucuagguccucacggaac

SEQ ID NO: 45347 - RNA, 22 nt, Artificial Sequence
  Synthetic oligonucleotide: BID-5633
ucauucuagguccucacggaac

SEQ ID NO: 45348 - RNA, 23 nt, Artificial Sequence
  Synthetic oligonucleotide: BID-5634
gucauucuagguccucacggaac

SEQ ID NO: 45349 - RNA, 24 nt, Artificial Sequence
  Synthetic oligonucleotide: BID-5635
ggucauucuagguccucacggaac

SEQ ID NO: 45350 - RNA, 18 nt, Artificial Sequence
  Synthetic oligonucleotide: BID-5636
cauuccaucuccacccac

SEQ ID NO: 45351 - RNA, 19 nt, Artificial Sequence
  Synthetic oligonucleotide: BID-5637
acauuccaucuccacccac

SEQ ID NO: 45352 - RNA, 20 nt, Artificial Sequence
  Synthetic oligonucleotide: BID-876
cacauuccaucuccacccac

SEQ ID NO: 45353 - RNA, 21 nt, Artificial Sequence
  Synthetic oligonucleotide: BID-5638
ccacauuccaucuccacccac

SEQ ID NO: 45354 - RNA, 22 nt, Artificial Sequence
  Synthetic oligonucleotide: BID-5639
uccacauuccaucuccacccac

SEQ ID NO: 45355 - RNA, 23 nt, Artificial Sequence
  Synthetic oligonucleotide: BID-5640
uuccacauuccaucuccacccac

SEQ ID NO: 45356 - RNA, 24 nt, Artificial Sequence
  Synthetic oligonucleotide: BID-5641
uuuccacauuccaucuccacccac

SEQ ID NO: 45357 - RNA, 18 nt, Artificial Sequence
  Synthetic oligonucleotide: BID-5642
aucucccaggacgggcac

SEQ ID NO: 45358 - RNA, 19 nt, Artificial Sequence
  Synthetic oligonucleotide: BID-5643
gaucucccaggacgggcac

SEQ ID NO: 45359 - RNA, 20 nt, Artificial Sequence
  Synthetic oligonucleotide: BID-931
ggaucucccaggacgggcac

SEQ ID NO: 45360 - RNA, 21 nt, Artificial Sequence
  Synthetic oligonucleotide: BID-5644
gggaucucccaggacgggcac

SEQ ID NO: 45361 - RNA, 22 nt, Artificial Sequence
  Synthetic oligonucleotide: BID-5645
agggaucucccaggacgggcac

SEQ ID NO: 45362 - RNA, 23 nt, Artificial Sequence
  Synthetic oligonucleotide: BID-5646
cagggaucucccaggacgggcac

SEQ ID NO: 45363 - RNA, 24 nt, Artificial Sequence
  Synthetic oligonucleotide: BID-5647
gcagggaucucccaggacgggcac

SEQ ID NO: 45364 - RNA, 18 nt, Artificial Sequence
  Synthetic oligonucleotide: BID-5648
ggagcagauggacccacc

SEQ ID NO: 45365 - RNA, 19 nt, Artificial Sequence
  Synthetic oligonucleotide: BID-5649
aggagcagauggacccacc

SEQ ID NO: 45366 - RNA, 20 nt, Artificial Sequence
  Synthetic oligonucleotide: BID-1710
gaggagcagauggacccacc

SEQ ID NO: 45367 - RNA, 18 nt, Artificial Sequence
  Synthetic oligonucleotide: BID-5650
uggggcccugcagucccc

SEQ ID NO: 45368 - RNA, 19 nt, Artificial Sequence
  Synthetic oligonucleotide: BID-5651
cuggggcccugcagucccc

SEQ ID NO: 45369 - RNA, 20 nt, Artificial Sequence
  Synthetic oligonucleotide: BID-888
ccuggggcccugcagucccc

SEQ ID NO: 45370 - RNA, 21 nt, Artificial Sequence
  Synthetic oligonucleotide: BID-5652
uccuggggcccugcagucccc

SEQ ID NO: 45371 - RNA, 22 nt, Artificial Sequence
  Synthetic oligonucleotide: BID-5653
guccuggggcccugcagucccc

SEQ ID NO: 45372 - RNA, 23 nt, Artificial Sequence
  Synthetic oligonucleotide: BID-5654
cguccuggggcccugcagucccc

SEQ ID NO: 45373 - RNA, 24 nt, Artificial Sequence
  Synthetic oligonucleotide: BID-5655
ccguccuggggcccugcagucccc

SEQ ID NO: 45374 - RNA, 18 nt, Artificial Sequence
  Synthetic oligonucleotide: BID-5656
cuucugccccucuugccc

SEQ ID NO: 45375 - RNA, 19 nt, Artificial Sequence
  Synthetic oligonucleotide: BID-5657
ccuucugccccucuugccc

SEQ ID NO: 45376 - RNA, 20 nt, Artificial Sequence
  Synthetic oligonucleotide: BID-913
cccuucugccccucuugccc

SEQ ID NO: 45377 - RNA, 21 nt, Artificial Sequence
  Synthetic oligonucleotide: BID-5658
ccccuucugccccucuugccc

SEQ ID NO: 45378 - RNA, 22 nt, Artificial Sequence
  Synthetic oligonucleotide: BID-5659
gccccuucugccccucuugccc

SEQ ID NO: 45379 - RNA, 23 nt, Artificial Sequence
  Synthetic oligonucleotide: BID-5660
ugccccuucugccccucuugccc

SEQ ID NO: 45380 - RNA, 24 nt, Artificial Sequence
  Synthetic oligonucleotide: BID-5661
cugccccuucugccccucuugccc

SEQ ID NO: 45381 - RNA, 18 nt, Artificial Sequence
  Synthetic oligonucleotide: BID-5662
cuggggcccugcaguccc

SEQ ID NO: 45382 - RNA, 19 nt, Artificial Sequence
  Synthetic oligonucleotide: BID-5663
ccuggggcccugcaguccc

SEQ ID NO: 45383 - RNA, 20 nt, Artificial Sequence
  Synthetic oligonucleotide: BID-1733
uccuggggcccugcaguccc

SEQ ID NO: 45384 - RNA, 21 nt, Artificial Sequence
  Synthetic oligonucleotide: BID-5664
guccuggggcccugcaguccc

SEQ ID NO: 45385 - RNA, 22 nt, Artificial Sequence
  Synthetic oligonucleotide: BID-5665
cguccuggggcccugcaguccc

SEQ ID NO: 45386 - RNA, 23 nt, Artificial Sequence
  Synthetic oligonucleotide: BID-5666
ccguccuggggcccugcaguccc

SEQ ID NO: 45387 - RNA, 24 nt, Artificial Sequence
  Synthetic oligonucleotide: BID-5667
gccguccuggggcccugcaguccc

SEQ ID NO: 45388 - RNA, 18 nt, Artificial Sequence
  Synthetic oligonucleotide: BID-5668
cuccagggaggcacugcc

SEQ ID NO: 45389 - RNA, 19 nt, Artificial Sequence
  Synthetic oligonucleotide: BID-5669
gcuccagggaggcacugcc

SEQ ID NO: 45390 - RNA, 20 nt, Artificial Sequence
  Synthetic oligonucleotide: BID-907
agcuccagggaggcacugcc

SEQ ID NO: 45391 - RNA, 21 nt, Artificial Sequence
  Synthetic oligonucleotide: BID-5670
gagcuccagggaggcacugcc

SEQ ID NO: 45392 - RNA, 22 nt, Artificial Sequence
  Synthetic oligonucleotide: BID-5671
agagcuccagggaggcacugcc

SEQ ID NO: 45393 - RNA, 23 nt, Artificial Sequence
  Synthetic oligonucleotide: BID-5672
cagagcuccagggaggcacugcc

SEQ ID NO: 45394 - RNA, 24 nt, Artificial Sequence
  Synthetic oligonucleotide: BID-5673
acagagcuccagggaggcacugcc

SEQ ID NO: 45395 - RNA, 18 nt, Artificial Sequence
  Synthetic oligonucleotide: BID-5674
ccuucugccccucuugcc

SEQ ID NO: 45396 - RNA, 19 nt, Artificial Sequence
  Synthetic oligonucleotide: BID-5675
cccuucugccccucuugcc

SEQ ID NO: 45397 - RNA, 20 nt, Artificial Sequence
  Synthetic oligonucleotide: BID-1760
ccccuucugccccucuugcc

SEQ ID NO: 45398 - RNA, 21 nt, Artificial Sequence
  Synthetic oligonucleotide: BID-5676
gccccuucugccccucuugcc

SEQ ID NO: 45399 - RNA, 22 nt, Artificial Sequence
  Synthetic oligonucleotide: BID-5677
ugccccuucugccccucuugcc

SEQ ID NO: 45400 - RNA, 23 nt, Artificial Sequence
  Synthetic oligonucleotide: BID-5678
cugccccuucugccccucuugcc

SEQ ID NO: 45401 - RNA, 24 nt, Artificial Sequence
  Synthetic oligonucleotide: BID-5679
ccugccccuucugccccucuugcc

SEQ ID NO: 45402 - RNA, 18 nt, Artificial Sequence
  Synthetic oligonucleotide: BID-5680
ugagguagacagagcucc

SEQ ID NO: 45403 - RNA, 19 nt, Artificial Sequence
  Synthetic oligonucleotide: BID-5681
uugagguagacagagcucc

SEQ ID NO: 45404 - RNA, 20 nt, Artificial Sequence
  Synthetic oligonucleotide: BID-903
guugagguagacagagcucc

SEQ ID NO: 45405 - RNA, 21 nt, Artificial Sequence
  Synthetic oligonucleotide: BID-5682
aguugagguagacagagcucc

SEQ ID NO: 45406 - RNA, 22 nt, Artificial Sequence
  Synthetic oligonucleotide: BID-5683
gaguugagguagacagagcucc

SEQ ID NO: 45407 - RNA, 23 nt, Artificial Sequence
  Synthetic oligonucleotide: BID-5684
ggaguugagguagacagagcucc

SEQ ID NO: 45408 - RNA, 24 nt, Artificial Sequence
  Synthetic oligonucleotide: BID-5685
aggaguugagguagacagagcucc

SEQ ID NO: 45409 - RNA, 18 nt, Artificial Sequence
  Synthetic oligonucleotide: BID-5686
uuaaaggcagggaucucc

SEQ ID NO: 45410 - RNA, 19 nt, Artificial Sequence
  Synthetic oligonucleotide: BID-5687
uuuaaaggcagggaucucc

SEQ ID NO: 45411 - RNA, 20 nt, Artificial Sequence
  Synthetic oligonucleotide: BID-1775
guuuaaaggcagggaucucc

SEQ ID NO: 45412 - RNA, 21 nt, Artificial Sequence
  Synthetic oligonucleotide: BID-5688
gguuuaaaggcagggaucucc

SEQ ID NO: 45413 - RNA, 22 nt, Artificial Sequence
  Synthetic oligonucleotide: BID-5689
ggguuuaaaggcagggaucucc

SEQ ID NO: 45414 - RNA, 23 nt, Artificial Sequence
  Synthetic oligonucleotide: BID-5690
gggguuuaaaggcagggaucucc

SEQ ID NO: 45415 - RNA, 24 nt, Artificial Sequence
  Synthetic oligonucleotide: BID-5691
ugggguuuaaaggcagggaucucc

SEQ ID NO: 45416 - RNA, 18 nt, Artificial Sequence
  Synthetic oligonucleotide: BID-5692
ccugaaugugugccgucc

SEQ ID NO: 45417 - RNA, 19 nt, Artificial Sequence
  Synthetic oligonucleotide: BID-5693
gccugaaugugugccgucc

SEQ ID NO: 45418 - RNA, 20 nt, Artificial Sequence
  Synthetic oligonucleotide: BID-885
ggccugaaugugugccgucc

SEQ ID NO: 45419 - RNA, 21 nt, Artificial Sequence
  Synthetic oligonucleotide: BID-5694
gggccugaaugugugccgucc

SEQ ID NO: 45420 - RNA, 22 nt, Artificial Sequence
  Synthetic oligonucleotide: BID-5695
ugggccugaaugugugccgucc

SEQ ID NO: 45421 - RNA, 23 nt, Artificial Sequence
  Synthetic oligonucleotide: BID-5696
cugggccugaaugugugccgucc

SEQ ID NO: 45422 - RNA, 24 nt, Artificial Sequence
  Synthetic oligonucleotide: BID-5697
ccugggccugaaugugugccgucc

SEQ ID NO: 45423 - RNA, 18 nt, Artificial Sequence
  Synthetic oligonucleotide: BID-5698
ugaccgagaccagauucc

SEQ ID NO: 45424 - RNA, 19 nt, Artificial Sequence
  Synthetic oligonucleotide: BID-5699
augaccgagaccagauucc

SEQ ID NO: 45425 - RNA, 20 nt, Artificial Sequence
  Synthetic oligonucleotide: BID-1737
gaugaccgagaccagauucc

SEQ ID NO: 45426 - RNA, 21 nt, Artificial Sequence
  Synthetic oligonucleotide: BID-5700
ugaugaccgagaccagauucc

SEQ ID NO: 45427 - RNA, 22 nt, Artificial Sequence
  Synthetic oligonucleotide: BID-5701
gugaugaccgagaccagauucc

SEQ ID NO: 45428 - RNA, 23 nt, Artificial Sequence
  Synthetic oligonucleotide: BID-5702
agugaugaccgagaccagauucc

SEQ ID NO: 45429 - RNA, 24 nt, Artificial Sequence
  Synthetic oligonucleotide: BID-5703
gagugaugaccgagaccagauucc

SEQ ID NO: 45430 - RNA, 18 nt, Artificial Sequence
  Synthetic oligonucleotide: BID-5704
aggcuugcacccccuucc

SEQ ID NO: 45431 - RNA, 19 nt, Artificial Sequence
  Synthetic oligonucleotide: BID-5705
caggcuugcacccccuucc

SEQ ID NO: 45432 - RNA, 20 nt, Artificial Sequence
  Synthetic oligonucleotide: BID-869
ucaggcuugcacccccuucc

SEQ ID NO: 45433 - RNA, 21 nt, Artificial Sequence
  Synthetic oligonucleotide: BID-5706
cucaggcuugcacccccuucc

SEQ ID NO: 45434 - RNA, 22 nt, Artificial Sequence
  Synthetic oligonucleotide: BID-5707
ucucaggcuugcacccccuucc

SEQ ID NO: 45435 - RNA, 23 nt, Artificial Sequence
  Synthetic oligonucleotide: BID-5708
uucucaggcuugcacccccuucc

SEQ ID NO: 45436 - RNA, 24 nt, Artificial Sequence
  Synthetic oligonucleotide: BID-5709
cuucucaggcuugcacccccuucc

SEQ ID NO: 45437 - RNA, 18 nt, Artificial Sequence
  Synthetic oligonucleotide: BID-5710
aggacgggcacagggagc

SEQ ID NO: 45438 - RNA, 19 nt, Artificial Sequence
  Synthetic oligonucleotide: BID-5711
caggacgggcacagggagc

SEQ ID NO: 45439 - RNA, 20 nt, Artificial Sequence
  Synthetic oligonucleotide: BID-1780
ccaggacgggcacagggagc

SEQ ID NO: 45440 - RNA, 21 nt, Artificial Sequence
  Synthetic oligonucleotide: BID-5712
cccaggacgggcacagggagc

SEQ ID NO: 45441 - RNA, 22 nt, Artificial Sequence
  Synthetic oligonucleotide: BID-5713
ucccaggacgggcacagggagc

SEQ ID NO: 45442 - RNA, 23 nt, Artificial Sequence
  Synthetic oligonucleotide: BID-5714
cucccaggacgggcacagggagc

SEQ ID NO: 45443 - RNA, 24 nt, Artificial Sequence
  Synthetic oligonucleotide: BID-5715
ucucccaggacgggcacagggagc

SEQ ID NO: 45444 - RNA, 18 nt, Artificial Sequence
  Synthetic oligonucleotide: BID-5716
cggggagcccgcgccggc

SEQ ID NO: 45445 - RNA, 19 nt, Artificial Sequence
  Synthetic oligonucleotide: BID-5717
ccggggagcccgcgccggc

SEQ ID NO: 45446 - RNA, 20 nt, Artificial Sequence
  Synthetic oligonucleotide: BID-1614
cccggggagcccgcgccggc

SEQ ID NO: 45447 - RNA, 21 nt, Artificial Sequence
  Synthetic oligonucleotide: BID-5718
acccggggagcccgcgccggc

SEQ ID NO: 45448 - RNA, 22 nt, Artificial Sequence
  Synthetic oligonucleotide: BID-5719
gacccggggagcccgcgccggc

SEQ ID NO: 45449 - RNA, 23 nt, Artificial Sequence
  Synthetic oligonucleotide: BID-5720
ggacccggggagcccgcgccggc

SEQ ID NO: 45450 - RNA, 24 nt, Artificial Sequence
  Synthetic oligonucleotide: BID-5721
gggacccggggagcccgcgccggc

SEQ ID NO: 45451 - RNA, 18 nt, Artificial Sequence
  Synthetic oligonucleotide: BID-5722
ggggcuguggagcggggc

SEQ ID NO: 45452 - RNA, 19 nt, Artificial Sequence
  Synthetic oligonucleotide: BID-5723
cggggcuguggagcggggc

SEQ ID NO: 45453 - RNA, 20 nt, Artificial Sequence
  Synthetic oligonucleotide: BID-767
gcggggcuguggagcggggc

SEQ ID NO: 45454 - RNA, 21 nt, Artificial Sequence
  Synthetic oligonucleotide: BID-5724
cgcggggcuguggagcggggc

SEQ ID NO: 45455 - RNA, 22 nt, Artificial Sequence
  Synthetic oligonucleotide: BID-5725
gcgcggggcuguggagcggggc

SEQ ID NO: 45456 - RNA, 23 nt, Artificial Sequence
  Synthetic oligonucleotide: BID-5726
ggcgcggggcuguggagcggggc

SEQ ID NO: 45457 - RNA, 24 nt, Artificial Sequence
  Synthetic oligonucleotide: BID-5727
cggcgcggggcuguggagcggggc

SEQ ID NO: 45458 - RNA, 18 nt, Artificial Sequence
  Synthetic oligonucleotide: BID-5728
uuaacauauagauaaugc

SEQ ID NO: 45459 - RNA, 19 nt, Artificial Sequence
  Synthetic oligonucleotide: BID-5729
uuuaacauauagauaaugc

SEQ ID NO: 45460 - RNA, 20 nt, Artificial Sequence
  Synthetic oligonucleotide: BID-794
guuuaacauauagauaaugc

SEQ ID NO: 45461 - RNA, 21 nt, Artificial Sequence
  Synthetic oligonucleotide: BID-5730
aguuuaacauauagauaaugc

SEQ ID NO: 45462 - RNA, 22 nt, Artificial Sequence
  Synthetic oligonucleotide: BID-5731
caguuuaacauauagauaaugc

SEQ ID NO: 45463 - RNA, 23 nt, Artificial Sequence
  Synthetic oligonucleotide: BID-5732
ucaguuuaacauauagauaaugc

SEQ ID NO: 45464 - RNA, 24 nt, Artificial Sequence
  Synthetic oligonucleotide: BID-5733
aucaguuuaacauauagauaaugc

SEQ ID NO: 45465 - RNA, 18 nt, Artificial Sequence
  Synthetic oligonucleotide: BID-5734
gcuccagggaggcacugc

SEQ ID NO: 45466 - RNA, 19 nt, Artificial Sequence
  Synthetic oligonucleotide: BID-5735
agcuccagggaggcacugc

SEQ ID NO: 45467 - RNA, 20 nt, Artificial Sequence
  Synthetic oligonucleotide: BID-906
gagcuccagggaggcacugc

SEQ ID NO: 45468 - RNA, 21 nt, Artificial Sequence
  Synthetic oligonucleotide: BID-5736
agagcuccagggaggcacugc

SEQ ID NO: 45469 - RNA, 22 nt, Artificial Sequence
  Synthetic oligonucleotide: BID-5737
cagagcuccagggaggcacugc

SEQ ID NO: 45470 - RNA, 23 nt, Artificial Sequence
  Synthetic oligonucleotide: BID-5738
acagagcuccagggaggcacugc

SEQ ID NO: 45471 - RNA, 24 nt, Artificial Sequence
  Synthetic oligonucleotide: BID-5739
gacagagcuccagggaggcacugc

SEQ ID NO: 45472 - RNA, 18 nt, Artificial Sequence
  Synthetic oligonucleotide: BID-5740
ggggggggucuccaccuc

SEQ ID NO: 45473 - RNA, 19 nt, Artificial Sequence
  Synthetic oligonucleotide: BID-5741
gggggggggucuccaccuc

SEQ ID NO: 45474 - RNA, 20 nt, Artificial Sequence
  Synthetic oligonucleotide: BID-809
ggggggggggucuccaccuc

SEQ ID NO: 45475 - RNA, 21 nt, Artificial Sequence
  Synthetic oligonucleotide: BID-5742
uggggggggggucuccaccuc

SEQ ID NO: 45476 - RNA, 22 nt, Artificial Sequence
  Synthetic oligonucleotide: BID-5743
guggggggggggucuccaccuc

SEQ ID NO: 45477 - RNA, 23 nt, Artificial Sequence
  Synthetic oligonucleotide: BID-5744
gguggggggggggucuccaccuc

SEQ ID NO: 45478 - RNA, 24 nt, Artificial Sequence
  Synthetic oligonucleotide: BID-5745
ugguggggggggggucuccaccuc

SEQ ID NO: 45479 - RNA, 18 nt, Artificial Sequence
  Synthetic oligonucleotide: BID-5746
uggucauucuagguccuc

SEQ ID NO: 45480 - RNA, 19 nt, Artificial Sequence
  Synthetic oligonucleotide: BID-5747
guggucauucuagguccuc

SEQ ID NO: 45481 - RNA, 20 nt, Artificial Sequence
  Synthetic oligonucleotide: BID-1636
gguggucauucuagguccuc

SEQ ID NO: 45482 - RNA, 21 nt, Artificial Sequence
  Synthetic oligonucleotide: BID-5748
ggguggucauucuagguccuc

SEQ ID NO: 45483 - RNA, 22 nt, Artificial Sequence
  Synthetic oligonucleotide: BID-5749
gggguggucauucuagguccuc

SEQ ID NO: 45484 - RNA, 23 nt, Artificial Sequence
  Synthetic oligonucleotide: BID-5750
ugggguggucauucuagguccuc

SEQ ID NO: 45485 - RNA, 24 nt, Artificial Sequence
  Synthetic oligonucleotide: BID-5751
cugggguggucauucuagguccuc

SEQ ID NO: 45486 - RNA, 18 nt, Artificial Sequence
  Synthetic oligonucleotide: BID-5752
uugagguagacagagcuc

SEQ ID NO: 45487 - RNA, 19 nt, Artificial Sequence
  Synthetic oligonucleotide: BID-5753
guugagguagacagagcuc

SEQ ID NO: 45488 - RNA, 20 nt, Artificial Sequence
  Synthetic oligonucleotide: BID-1752
aguugagguagacagagcuc

SEQ ID NO: 45489 - RNA, 21 nt, Artificial Sequence
  Synthetic oligonucleotide: BID-5754
gaguugagguagacagagcuc

SEQ ID NO: 45490 - RNA, 22 nt, Artificial Sequence
  Synthetic oligonucleotide: BID-5755
ggaguugagguagacagagcuc

SEQ ID NO: 45491 - RNA, 23 nt, Artificial Sequence
  Synthetic oligonucleotide: BID-5756
aggaguugagguagacagagcuc

SEQ ID NO: 45492 - RNA, 24 nt, Artificial Sequence
  Synthetic oligonucleotide: BID-5757
caggaguugagguagacagagcuc

SEQ ID NO: 45493 - RNA, 18 nt, Artificial Sequence
  Synthetic oligonucleotide: BID-5758
gagauggggggagcucuc

SEQ ID NO: 45494 - RNA, 19 nt, Artificial Sequence
  Synthetic oligonucleotide: BID-5759
ugagauggggggagcucuc

SEQ ID NO: 45495 - RNA, 20 nt, Artificial Sequence
  Synthetic oligonucleotide: BID-1729
uugagauggggggagcucuc

SEQ ID NO: 45496 - RNA, 21 nt, Artificial Sequence
  Synthetic oligonucleotide: BID-5760
uuugagauggggggagcucuc

SEQ ID NO: 45497 - RNA, 22 nt, Artificial Sequence
  Synthetic oligonucleotide: BID-5761
cuuugagauggggggagcucuc

SEQ ID NO: 45498 - RNA, 23 nt, Artificial Sequence
  Synthetic oligonucleotide: BID-5762
gcuuugagauggggggagcucuc

SEQ ID NO: 45499 - RNA, 24 nt, Artificial Sequence
  Synthetic oligonucleotide: BID-5763
ggcuuugagauggggggagcucuc

SEQ ID NO: 45500 - RNA, 18 nt, Artificial Sequence
  Synthetic oligonucleotide: BID-5764
uaauuccuaaugauucuc

SEQ ID NO: 45501 - RNA, 19 nt, Artificial Sequence
  Synthetic oligonucleotide: BID-5765
auaauuccuaaugauucuc

SEQ ID NO: 45502 - RNA, 20 nt, Artificial Sequence
  Synthetic oligonucleotide: BID-774
gauaauuccuaaugauucuc

SEQ ID NO: 45503 - RNA, 21 nt, Artificial Sequence
  Synthetic oligonucleotide: BID-5766
ggauaauuccuaaugauucuc

SEQ ID NO: 45504 - RNA, 22 nt, Artificial Sequence
  Synthetic oligonucleotide: BID-5767
gggauaauuccuaaugauucuc

SEQ ID NO: 45505 - RNA, 23 nt, Artificial Sequence
  Synthetic oligonucleotide: BID-5768
ugggauaauuccuaaugauucuc

SEQ ID NO: 45506 - RNA, 24 nt, Artificial Sequence
  Synthetic oligonucleotide: BID-5769
cugggauaauuccuaaugauucuc

SEQ ID NO: 45507 - RNA, 18 nt, Artificial Sequence
  Synthetic oligonucleotide: BID-5770
gccugaaugugugccguc

SEQ ID NO: 45508 - RNA, 19 nt, Artificial Sequence
  Synthetic oligonucleotide: BID-5771
ggccugaaugugugccguc

SEQ ID NO: 45509 - RNA, 20 nt, Artificial Sequence
  Synthetic oligonucleotide: BID-1731
gggccugaaugugugccguc

SEQ ID NO: 45510 - RNA, 21 nt, Artificial Sequence
  Synthetic oligonucleotide: BID-5772
ugggccugaaugugugccguc

SEQ ID NO: 45511 - RNA, 22 nt, Artificial Sequence
  Synthetic oligonucleotide: BID-5773
cugggccugaaugugugccguc

SEQ ID NO: 45512 - RNA, 23 nt, Artificial Sequence
  Synthetic oligonucleotide: BID-5774
ccugggccugaaugugugccguc

SEQ ID NO: 45513 - RNA, 24 nt, Artificial Sequence
  Synthetic oligonucleotide: BID-5775
uccugggccugaaugugugccguc

SEQ ID NO: 45514 - RNA, 18 nt, Artificial Sequence
  Synthetic oligonucleotide: BID-5776
caggcuugcacccccuuc

SEQ ID NO: 45515 - RNA, 19 nt, Artificial Sequence
  Synthetic oligonucleotide: BID-5777
ucaggcuugcacccccuuc

SEQ ID NO: 45516 - RNA, 20 nt, Artificial Sequence
  Synthetic oligonucleotide: BID-1711
cucaggcuugcacccccuuc

SEQ ID NO: 45517 - RNA, 21 nt, Artificial Sequence
  Synthetic oligonucleotide: BID-5778
ucucaggcuugcacccccuuc

SEQ ID NO: 45518 - RNA, 22 nt, Artificial Sequence
  Synthetic oligonucleotide: BID-5779
uucucaggcuugcacccccuuc

SEQ ID NO: 45519 - RNA, 23 nt, Artificial Sequence
  Synthetic oligonucleotide: BID-5780
cuucucaggcuugcacccccuuc

SEQ ID NO: 45520 - RNA, 24 nt, Artificial Sequence
  Synthetic oligonucleotide: BID-5781
ccuucucaggcuugcacccccuuc

SEQ ID NO: 45521 - RNA, 18 nt, Artificial Sequence
  Synthetic oligonucleotide: BID-5782
gaauccccaggcuguuuc

SEQ ID NO: 45522 - RNA, 19 nt, Artificial Sequence
  Synthetic oligonucleotide: BID-5783
agaauccccaggcuguuuc

SEQ ID NO: 45523 - RNA, 20 nt, Artificial Sequence
  Synthetic oligonucleotide: BID-777
cagaauccccaggcuguuuc

SEQ ID NO: 45524 - RNA, 21 nt, Artificial Sequence
  Synthetic oligonucleotide: BID-5784
ucagaauccccaggcuguuuc

SEQ ID NO: 45525 - RNA, 22 nt, Artificial Sequence
  Synthetic oligonucleotide: BID-5785
uucagaauccccaggcuguuuc

SEQ ID NO: 45526 - RNA, 23 nt, Artificial Sequence
  Synthetic oligonucleotide: BID-5786
auucagaauccccaggcuguuuc

SEQ ID NO: 45527 - RNA, 24 nt, Artificial Sequence
  Synthetic oligonucleotide: BID-5787
cauucagaauccccaggcuguuuc

SEQ ID NO: 45528 - RNA, 18 nt, Artificial Sequence
  Synthetic oligonucleotide: BID-5788
cuugcccagggagggaag

SEQ ID NO: 45529 - RNA, 19 nt, Artificial Sequence
  Synthetic oligonucleotide: BID-5789
ucuugcccagggagggaag

SEQ ID NO: 45530 - RNA, 20 nt, Artificial Sequence
  Synthetic oligonucleotide: BID-917
cucuugcccagggagggaag

SEQ ID NO: 45531 - RNA, 21 nt, Artificial Sequence
  Synthetic oligonucleotide: BID-5790
ccucuugcccagggagggaag

SEQ ID NO: 45532 - RNA, 22 nt, Artificial Sequence
  Synthetic oligonucleotide: BID-5791
cccucuugcccagggagggaag

SEQ ID NO: 45533 - RNA, 23 nt, Artificial Sequence
  Synthetic oligonucleotide: BID-5792
ccccucuugcccagggagggaag

SEQ ID NO: 45534 - RNA, 24 nt, Artificial Sequence
  Synthetic oligonucleotide: BID-5793
gccccucuugcccagggagggaag

SEQ ID NO: 45535 - RNA, 18 nt, Artificial Sequence
  Synthetic oligonucleotide: BID-5794
auccucuggcaucaggag

SEQ ID NO: 45536 - RNA, 19 nt, Artificial Sequence
  Synthetic oligonucleotide: BID-5795
gauccucuggcaucaggag

SEQ ID NO: 45537 - RNA, 20 nt, Artificial Sequence
  Synthetic oligonucleotide: BID-1750
ggauccucuggcaucaggag

SEQ ID NO: 45538 - RNA, 21 nt, Artificial Sequence
  Synthetic oligonucleotide: BID-5796
gggauccucuggcaucaggag

SEQ ID NO: 45539 - RNA, 22 nt, Artificial Sequence
  Synthetic oligonucleotide: BID-5797
agggauccucuggcaucaggag

SEQ ID NO: 45540 - RNA, 23 nt, Artificial Sequence
  Synthetic oligonucleotide: BID-5798
gagggauccucuggcaucaggag

SEQ ID NO: 45541 - RNA, 24 nt, Artificial Sequence
  Synthetic oligonucleotide: BID-5799
agagggauccucuggcaucaggag

SEQ ID NO: 45542 - RNA, 18 nt, Artificial Sequence
  Synthetic oligonucleotide: BID-5800
cggcgcggggcuguggag

SEQ ID NO: 45543 - RNA, 19 nt, Artificial Sequence
  Synthetic oligonucleotide: BID-5801
ccggcgcggggcuguggag

SEQ ID NO: 45544 - RNA, 20 nt, Artificial Sequence
  Synthetic oligonucleotide: BID-763
gccggcgcggggcuguggag

SEQ ID NO: 45545 - RNA, 21 nt, Artificial Sequence
  Synthetic oligonucleotide: BID-5802
cgccggcgcggggcuguggag

SEQ ID NO: 45546 - RNA, 22 nt, Artificial Sequence
  Synthetic oligonucleotide: BID-5803
gcgccggcgcggggcuguggag

SEQ ID NO: 45547 - RNA, 23 nt, Artificial Sequence
  Synthetic oligonucleotide: BID-5804
cgcgccggcgcggggcuguggag

SEQ ID NO: 45548 - RNA, 24 nt, Artificial Sequence
  Synthetic oligonucleotide: BID-5805
ccgcgccggcgcggggcuguggag

SEQ ID NO: 45549 - RNA, 18 nt, Artificial Sequence
  Synthetic oligonucleotide: BID-5806
gagaccagauucccugag

SEQ ID NO: 45550 - RNA, 19 nt, Artificial Sequence
  Synthetic oligonucleotide: BID-5807
cgagaccagauucccugag

SEQ ID NO: 45551 - RNA, 20 nt, Artificial Sequence
  Synthetic oligonucleotide: BID-1738
ccgagaccagauucccugag

SEQ ID NO: 45552 - RNA, 21 nt, Artificial Sequence
  Synthetic oligonucleotide: BID-5808
accgagaccagauucccugag

SEQ ID NO: 45553 - RNA, 22 nt, Artificial Sequence
  Synthetic oligonucleotide: BID-5809
gaccgagaccagauucccugag

SEQ ID NO: 45554 - RNA, 23 nt, Artificial Sequence
  Synthetic oligonucleotide: BID-5810
ugaccgagaccagauucccugag

SEQ ID NO: 45555 - RNA, 24 nt, Artificial Sequence
  Synthetic oligonucleotide: BID-5811
augaccgagaccagauucccugag

SEQ ID NO: 45556 - RNA, 18 nt, Artificial Sequence
  Synthetic oligonucleotide: BID-5812
cccacaggaggcuuugag

SEQ ID NO: 45557 - RNA, 19 nt, Artificial Sequence
  Synthetic oligonucleotide: BID-5813
acccacaggaggcuuugag

SEQ ID NO: 45558 - RNA, 20 nt, Artificial Sequence
  Synthetic oligonucleotide: BID-1723
cacccacaggaggcuuugag

SEQ ID NO: 45559 - RNA, 21 nt, Artificial Sequence
  Synthetic oligonucleotide: BID-5814
ccacccacaggaggcuuugag

SEQ ID NO: 45560 - RNA, 22 nt, Artificial Sequence
  Synthetic oligonucleotide: BID-5815
uccacccacaggaggcuuugag

SEQ ID NO: 45561 - RNA, 23 nt, Artificial Sequence
  Synthetic oligonucleotide: BID-5816
cuccacccacaggaggcuuugag

SEQ ID NO: 45562 - RNA, 24 nt, Artificial Sequence
  Synthetic oligonucleotide: BID-5817
ucuccacccacaggaggcuuugag

SEQ ID NO: 45563 - RNA, 18 nt, Artificial Sequence
  Synthetic oligonucleotide: BID-5818
uucuuuuucaguuuuuag

SEQ ID NO: 45564 - RNA, 19 nt, Artificial Sequence
  Synthetic oligonucleotide: BID-5819
uuucuuuuucaguuuuuag

SEQ ID NO: 45565 - RNA, 20 nt, Artificial Sequence
  Synthetic oligonucleotide: BID-797
auuucuuuuucaguuuuuag

SEQ ID NO: 45566 - RNA, 21 nt, Artificial Sequence
  Synthetic oligonucleotide: BID-5820
aauuucuuuuucaguuuuuag

SEQ ID NO: 45567 - RNA, 22 nt, Artificial Sequence
  Synthetic oligonucleotide: BID-5821
uaauuucuuuuucaguuuuuag

SEQ ID NO: 45568 - RNA, 23 nt, Artificial Sequence
  Synthetic oligonucleotide: BID-5822
cuaauuucuuuuucaguuuuuag

SEQ ID NO: 45569 - RNA, 24 nt, Artificial Sequence
  Synthetic oligonucleotide: BID-5823
acuaauuucuuuuucaguuuuuag

SEQ ID NO: 45570 - RNA, 18 nt, Artificial Sequence
  Synthetic oligonucleotide: BID-5824
ccacuuacuccagcgccg

SEQ ID NO: 45571 - RNA, 19 nt, Artificial Sequence
  Synthetic oligonucleotide: BID-5825
gccacuuacuccagcgccg

SEQ ID NO: 45572 - RNA, 20 nt, Artificial Sequence
  Synthetic oligonucleotide: BID-1626
ggccacuuacuccagcgccg

SEQ ID NO: 45573 - RNA, 21 nt, Artificial Sequence
  Synthetic oligonucleotide: BID-5826
uggccacuuacuccagcgccg

SEQ ID NO: 45574 - RNA, 22 nt, Artificial Sequence
  Synthetic oligonucleotide: BID-5827
uuggccacuuacuccagcgccg

SEQ ID NO: 45575 - RNA, 23 nt, Artificial Sequence
  Synthetic oligonucleotide: BID-5828
guuggccacuuacuccagcgccg

SEQ ID NO: 45576 - RNA, 24 nt, Artificial Sequence
  Synthetic oligonucleotide: BID-5829
aguuggccacuuacuccagcgccg

SEQ ID NO: 45577 - RNA, 18 nt, Artificial Sequence
  Synthetic oligonucleotide: BID-5830
uuaaggguguggggagcg

SEQ ID NO: 45578 - RNA, 19 nt, Artificial Sequence
  Synthetic oligonucleotide: BID-5831
cuuaaggguguggggagcg

SEQ ID NO: 45579 - RNA, 20 nt, Artificial Sequence
  Synthetic oligonucleotide: BID-1745
ucuuaaggguguggggagcg

SEQ ID NO: 45580 - RNA, 21 nt, Artificial Sequence
  Synthetic oligonucleotide: BID-5832
gucuuaaggguguggggagcg

SEQ ID NO: 45581 - RNA, 22 nt, Artificial Sequence
  Synthetic oligonucleotide: BID-5833
ggucuuaaggguguggggagcg

SEQ ID NO: 45582 - RNA, 23 nt, Artificial Sequence
  Synthetic oligonucleotide: BID-5834
gggucuuaaggguguggggagcg

SEQ ID NO: 45583 - RNA, 24 nt, Artificial Sequence
  Synthetic oligonucleotide: BID-5835
ggggucuuaaggguguggggagcg

SEQ ID NO: 45584 - RNA, 18 nt, Artificial Sequence
  Synthetic oligonucleotide: BID-5836
ggggagcccgcgccggcg

SEQ ID NO: 45585 - RNA, 19 nt, Artificial Sequence
  Synthetic oligonucleotide: BID-5837
cggggagcccgcgccggcg

SEQ ID NO: 45586 - RNA, 20 nt, Artificial Sequence
  Synthetic oligonucleotide: BID-759
ccggggagcccgcgccggcg

SEQ ID NO: 45587 - RNA, 21 nt, Artificial Sequence
  Synthetic oligonucleotide: BID-5838
cccggggagcccgcgccggcg

SEQ ID NO: 45588 - RNA, 22 nt, Artificial Sequence
  Synthetic oligonucleotide: BID-5839
acccggggagcccgcgccggcg

SEQ ID NO: 45589 - RNA, 23 nt, Artificial Sequence
  Synthetic oligonucleotide: BID-5840
gacccggggagcccgcgccggcg

SEQ ID NO: 45590 - RNA, 24 nt, Artificial Sequence
  Synthetic oligonucleotide: BID-5841
ggacccggggagcccgcgccggcg

SEQ ID NO: 45591 - RNA, 18 nt, Artificial Sequence
  Synthetic oligonucleotide: BID-5842
gggcuguggagcggggcg

SEQ ID NO: 45592 - RNA, 19 nt, Artificial Sequence
  Synthetic oligonucleotide: BID-5843
ggggcuguggagcggggcg

SEQ ID NO: 45593 - RNA, 20 nt, Artificial Sequence
  Synthetic oligonucleotide: BID-768
cggggcuguggagcggggcg

SEQ ID NO: 45594 - RNA, 21 nt, Artificial Sequence
  Synthetic oligonucleotide: BID-5844
gcggggcuguggagcggggcg

SEQ ID NO: 45595 - RNA, 22 nt, Artificial Sequence
  Synthetic oligonucleotide: BID-5845
cgcggggcuguggagcggggcg

SEQ ID NO: 45596 - RNA, 23 nt, Artificial Sequence
  Synthetic oligonucleotide: BID-5846
gcgcggggcuguggagcggggcg

SEQ ID NO: 45597 - RNA, 24 nt, Artificial Sequence
  Synthetic oligonucleotide: BID-5847
ggcgcggggcuguggagcggggcg

SEQ ID NO: 45598 - RNA, 18 nt, Artificial Sequence
  Synthetic oligonucleotide: BID-5848
guggcugggguuuaaagg

SEQ ID NO: 45599 - RNA, 19 nt, Artificial Sequence
  Synthetic oligonucleotide: BID-5849
cguggcugggguuuaaagg

SEQ ID NO: 45600 - RNA, 20 nt, Artificial Sequence
  Synthetic oligonucleotide: BID-1773
ucguggcugggguuuaaagg

SEQ ID NO: 45601 - RNA, 21 nt, Artificial Sequence
  Synthetic oligonucleotide: BID-5850
uucguggcugggguuuaaagg

SEQ ID NO: 45602 - RNA, 22 nt, Artificial Sequence
  Synthetic oligonucleotide: BID-5851
guucguggcugggguuuaaagg

SEQ ID NO: 45603 - RNA, 23 nt, Artificial Sequence
  Synthetic oligonucleotide: BID-5852
aguucguggcugggguuuaaagg

SEQ ID NO: 45604 - RNA, 24 nt, Artificial Sequence
  Synthetic oligonucleotide: BID-5853
caguucguggcugggguuuaaagg

SEQ ID NO: 45605 - RNA, 18 nt, Artificial Sequence
  Synthetic oligonucleotide: BID-5854
cugccccucuugcccagg

SEQ ID NO: 45606 - RNA, 19 nt, Artificial Sequence
  Synthetic oligonucleotide: BID-5855
ucugccccucuugcccagg

SEQ ID NO: 45607 - RNA, 20 nt, Artificial Sequence
  Synthetic oligonucleotide: BID-1763
uucugccccucuugcccagg

SEQ ID NO: 45608 - RNA, 21 nt, Artificial Sequence
  Synthetic oligonucleotide: BID-5856
cuucugccccucuugcccagg

SEQ ID NO: 45609 - RNA, 22 nt, Artificial Sequence
  Synthetic oligonucleotide: BID-5857
ccuucugccccucuugcccagg

SEQ ID NO: 45610 - RNA, 23 nt, Artificial Sequence
  Synthetic oligonucleotide: BID-5858
cccuucugccccucuugcccagg

SEQ ID NO: 45611 - RNA, 24 nt, Artificial Sequence
  Synthetic oligonucleotide: BID-5859
ccccuucugccccucuugcccagg

SEQ ID NO: 45612 - RNA, 18 nt, Artificial Sequence
  Synthetic oligonucleotide: BID-5860
aggcagggaucucccagg

SEQ ID NO: 45613 - RNA, 19 nt, Artificial Sequence
  Synthetic oligonucleotide: BID-5861
aaggcagggaucucccagg

SEQ ID NO: 45614 - RNA, 20 nt, Artificial Sequence
  Synthetic oligonucleotide: BID-1776
aaaggcagggaucucccagg

SEQ ID NO: 45615 - RNA, 21 nt, Artificial Sequence
  Synthetic oligonucleotide: BID-5862
uaaaggcagggaucucccagg

SEQ ID NO: 45616 - RNA, 22 nt, Artificial Sequence
  Synthetic oligonucleotide: BID-5863
uuaaaggcagggaucucccagg

SEQ ID NO: 45617 - RNA, 23 nt, Artificial Sequence
  Synthetic oligonucleotide: BID-5864
uuuaaaggcagggaucucccagg

SEQ ID NO: 45618 - RNA, 24 nt, Artificial Sequence
  Synthetic oligonucleotide: BID-5865
guuuaaaggcagggaucucccagg

SEQ ID NO: 45619 - RNA, 18 nt, Artificial Sequence
  Synthetic oligonucleotide: BID-5866
ccagggaggcacugccgg

SEQ ID NO: 45620 - RNA, 19 nt, Artificial Sequence
  Synthetic oligonucleotide: BID-5867
uccagggaggcacugccgg

SEQ ID NO: 45621 - RNA, 20 nt, Artificial Sequence
  Synthetic oligonucleotide: BID-1758
cuccagggaggcacugccgg

SEQ ID NO: 45622 - RNA, 21 nt, Artificial Sequence
  Synthetic oligonucleotide: BID-5868
gcuccagggaggcacugccgg

SEQ ID NO: 45623 - RNA, 22 nt, Artificial Sequence
  Synthetic oligonucleotide: BID-5869
agcuccagggaggcacugccgg

SEQ ID NO: 45624 - RNA, 23 nt, Artificial Sequence
  Synthetic oligonucleotide: BID-5870
gagcuccagggaggcacugccgg

SEQ ID NO: 45625 - RNA, 24 nt, Artificial Sequence
  Synthetic oligonucleotide: BID-5871
agagcuccagggaggcacugccgg

SEQ ID NO: 45626 - RNA, 18 nt, Artificial Sequence
  Synthetic oligonucleotide: BID-5872
ugccccucuugcccaggg

SEQ ID NO: 45627 - RNA, 19 nt, Artificial Sequence
  Synthetic oligonucleotide: BID-5873
cugccccucuugcccaggg

SEQ ID NO: 45628 - RNA, 20 nt, Artificial Sequence
  Synthetic oligonucleotide: BID-915
ucugccccucuugcccaggg

SEQ ID NO: 45629 - RNA, 21 nt, Artificial Sequence
  Synthetic oligonucleotide: BID-5874
uucugccccucuugcccaggg

SEQ ID NO: 45630 - RNA, 22 nt, Artificial Sequence
  Synthetic oligonucleotide: BID-5875
cuucugccccucuugcccaggg

SEQ ID NO: 45631 - RNA, 23 nt, Artificial Sequence
  Synthetic oligonucleotide: BID-5876
ccuucugccccucuugcccaggg

SEQ ID NO: 45632 - RNA, 24 nt, Artificial Sequence
  Synthetic oligonucleotide: BID-5877
cccuucugccccucuugcccaggg

SEQ ID NO: 45633 - RNA, 18 nt, Artificial Sequence
  Synthetic oligonucleotide: BID-5878
ccucuugcccagggaggg

SEQ ID NO: 45634 - RNA, 19 nt, Artificial Sequence
  Synthetic oligonucleotide: BID-5879
cccucuugcccagggaggg

SEQ ID NO: 45635 - RNA, 20 nt, Artificial Sequence
  Synthetic oligonucleotide: BID-1766
ccccucuugcccagggaggg

SEQ ID NO: 45636 - RNA, 21 nt, Artificial Sequence
  Synthetic oligonucleotide: BID-5880
gccccucuugcccagggaggg

SEQ ID NO: 45637 - RNA, 22 nt, Artificial Sequence
  Synthetic oligonucleotide: BID-5881
ugccccucuugcccagggaggg

SEQ ID NO: 45638 - RNA, 23 nt, Artificial Sequence
  Synthetic oligonucleotide: BID-5882
cugccccucuugcccagggaggg

SEQ ID NO: 45639 - RNA, 24 nt, Artificial Sequence
  Synthetic oligonucleotide: BID-5883
ucugccccucuugcccagggaggg

SEQ ID NO: 45640 - RNA, 18 nt, Artificial Sequence
  Synthetic oligonucleotide: BID-5884
gcggggcuguggagcggg

SEQ ID NO: 45641 - RNA, 19 nt, Artificial Sequence
  Synthetic oligonucleotide: BID-5885
cgcggggcuguggagcggg

SEQ ID NO: 45642 - RNA, 20 nt, Artificial Sequence
  Synthetic oligonucleotide: BID-1620
gcgcggggcuguggagcggg

SEQ ID NO: 45643 - RNA, 21 nt, Artificial Sequence
  Synthetic oligonucleotide: BID-5886
ggcgcggggcuguggagcggg

SEQ ID NO: 45644 - RNA, 22 nt, Artificial Sequence
  Synthetic oligonucleotide: BID-5887
cggcgcggggcuguggagcggg

SEQ ID NO: 45645 - RNA, 23 nt, Artificial Sequence
  Synthetic oligonucleotide: BID-5888
ccggcgcggggcuguggagcggg

SEQ ID NO: 45646 - RNA, 24 nt, Artificial Sequence
  Synthetic oligonucleotide: BID-5889
gccggcgcggggcuguggagcggg

SEQ ID NO: 45647 - RNA, 18 nt, Artificial Sequence
  Synthetic oligonucleotide: BID-5890
cggggcuguggagcgggg

SEQ ID NO: 45648 - RNA, 19 nt, Artificial Sequence
  Synthetic oligonucleotide: BID-5891
gcggggcuguggagcgggg

SEQ ID NO: 45649 - RNA, 20 nt, Artificial Sequence
  Synthetic oligonucleotide: BID-766
cgcggggcuguggagcgggg

SEQ ID NO: 45650 - RNA, 21 nt, Artificial Sequence
  Synthetic oligonucleotide: BID-5892
gcgcggggcuguggagcgggg

SEQ ID NO: 45651 - RNA, 22 nt, Artificial Sequence
  Synthetic oligonucleotide: BID-5893
ggcgcggggcuguggagcgggg

SEQ ID NO: 45652 - RNA, 23 nt, Artificial Sequence
  Synthetic oligonucleotide: BID-5894
cggcgcggggcuguggagcgggg

SEQ ID NO: 45653 - RNA, 24 nt, Artificial Sequence
  Synthetic oligonucleotide: BID-5895
ccggcgcggggcuguggagcgggg

SEQ ID NO: 45654 - RNA, 18 nt, Artificial Sequence
  Synthetic oligonucleotide: BID-5896
uuaguggagguggugggg

SEQ ID NO: 45655 - RNA, 19 nt, Artificial Sequence
  Synthetic oligonucleotide: BID-5897
uuuaguggagguggugggg

SEQ ID NO: 45656 - RNA, 20 nt, Artificial Sequence
  Synthetic oligonucleotide: BID-805
uuuuaguggagguggugggg

SEQ ID NO: 45657 - RNA, 21 nt, Artificial Sequence
  Synthetic oligonucleotide: BID-5898
uuuuuaguggagguggugggg

SEQ ID NO: 45658 - RNA, 22 nt, Artificial Sequence
  Synthetic oligonucleotide: BID-5899
guuuuuaguggagguggugggg

SEQ ID NO: 45659 - RNA, 23 nt, Artificial Sequence
  Synthetic oligonucleotide: BID-5900
aguuuuuaguggagguggugggg

SEQ ID NO: 45660 - RNA, 24 nt, Artificial Sequence
  Synthetic oligonucleotide: BID-5901
caguuuuuaguggagguggugggg

SEQ ID NO: 45661 - RNA, 18 nt, Artificial Sequence
  Synthetic oligonucleotide: BID-5902
aggaggcuuugagauggg

SEQ ID NO: 45662 - RNA, 19 nt, Artificial Sequence
  Synthetic oligonucleotide: BID-5903
caggaggcuuugagauggg

SEQ ID NO: 45663 - RNA, 20 nt, Artificial Sequence
  Synthetic oligonucleotide: BID-882
acaggaggcuuugagauggg

SEQ ID NO: 45664 - RNA, 21 nt, Artificial Sequence
  Synthetic oligonucleotide: BID-5904
cacaggaggcuuugagauggg

SEQ ID NO: 45665 - RNA, 22 nt, Artificial Sequence
  Synthetic oligonucleotide: BID-5905
ccacaggaggcuuugagauggg

SEQ ID NO: 45666 - RNA, 23 nt, Artificial Sequence
  Synthetic oligonucleotide: BID-5906
cccacaggaggcuuugagauggg

SEQ ID NO: 45667 - RNA, 24 nt, Artificial Sequence
  Synthetic oligonucleotide: BID-5907
acccacaggaggcuuugagauggg

SEQ ID NO: 45668 - RNA, 18 nt, Artificial Sequence
  Synthetic oligonucleotide: BID-5908
uuuaguggaggugguggg

SEQ ID NO: 45669 - RNA, 19 nt, Artificial Sequence
  Synthetic oligonucleotide: BID-5909
uuuuaguggaggugguggg

SEQ ID NO: 45670 - RNA, 20 nt, Artificial Sequence
  Synthetic oligonucleotide: BID-804
uuuuuaguggaggugguggg

SEQ ID NO: 45671 - RNA, 21 nt, Artificial Sequence
  Synthetic oligonucleotide: BID-5910
guuuuuaguggaggugguggg

SEQ ID NO: 45672 - RNA, 22 nt, Artificial Sequence
  Synthetic oligonucleotide: BID-5911
aguuuuuaguggaggugguggg

SEQ ID NO: 45673 - RNA, 23 nt, Artificial Sequence
  Synthetic oligonucleotide: BID-5912
caguuuuuaguggaggugguggg

SEQ ID NO: 45674 - RNA, 24 nt, Artificial Sequence
  Synthetic oligonucleotide: BID-5913
ucaguuuuuaguggaggugguggg

SEQ ID NO: 45675 - RNA, 18 nt, Artificial Sequence
  Synthetic oligonucleotide: BID-5914
caggaggcuuugagaugg

SEQ ID NO: 45676 - RNA, 19 nt, Artificial Sequence
  Synthetic oligonucleotide: BID-5915
acaggaggcuuugagaugg

SEQ ID NO: 45677 - RNA, 20 nt, Artificial Sequence
  Synthetic oligonucleotide: BID-881
cacaggaggcuuugagaugg

SEQ ID NO: 45678 - RNA, 21 nt, Artificial Sequence
  Synthetic oligonucleotide: BID-5916
ccacaggaggcuuugagaugg

SEQ ID NO: 45679 - RNA, 22 nt, Artificial Sequence
  Synthetic oligonucleotide: BID-5917
cccacaggaggcuuugagaugg

SEQ ID NO: 45680 - RNA, 23 nt, Artificial Sequence
  Synthetic oligonucleotide: BID-5918
acccacaggaggcuuugagaugg

SEQ ID NO: 45681 - RNA, 24 nt, Artificial Sequence
  Synthetic oligonucleotide: BID-5919
cacccacaggaggcuuugagaugg

SEQ ID NO: 45682 - RNA, 18 nt, Artificial Sequence
  Synthetic oligonucleotide: BID-5920
cagggguuuggaaagugg

SEQ ID NO: 45683 - RNA, 19 nt, Artificial Sequence
  Synthetic oligonucleotide: BID-5921
ccagggguuuggaaagugg

SEQ ID NO: 45684 - RNA, 20 nt, Artificial Sequence
  Synthetic oligonucleotide: BID-1643
accagggguuuggaaagugg

SEQ ID NO: 45685 - RNA, 21 nt, Artificial Sequence
  Synthetic oligonucleotide: BID-5922
aaccagggguuuggaaagugg

SEQ ID NO: 45686 - RNA, 22 nt, Artificial Sequence
  Synthetic oligonucleotide: BID-5923
gaaccagggguuuggaaagugg

SEQ ID NO: 45687 - RNA, 23 nt, Artificial Sequence
  Synthetic oligonucleotide: BID-5924
ggaaccagggguuuggaaagugg

SEQ ID NO: 45688 - RNA, 24 nt, Artificial Sequence
  Synthetic oligonucleotide: BID-5925
cggaaccagggguuuggaaagugg

SEQ ID NO: 45689 - RNA, 18 nt, Artificial Sequence
  Synthetic oligonucleotide: BID-5926
ggggucagcaguucgugg

SEQ ID NO: 45690 - RNA, 19 nt, Artificial Sequence
  Synthetic oligonucleotide: BID-5927
cggggucagcaguucgugg

SEQ ID NO: 45691 - RNA, 20 nt, Artificial Sequence
  Synthetic oligonucleotide: BID-1771
gcggggucagcaguucgugg

SEQ ID NO: 45692 - RNA, 21 nt, Artificial Sequence
  Synthetic oligonucleotide: BID-5928
ugcggggucagcaguucgugg

SEQ ID NO: 45693 - RNA, 22 nt, Artificial Sequence
  Synthetic oligonucleotide: BID-5929
augcggggucagcaguucgugg

SEQ ID NO: 45694 - RNA, 23 nt, Artificial Sequence
  Synthetic oligonucleotide: BID-5930
aaugcggggucagcaguucgugg

SEQ ID NO: 45695 - RNA, 24 nt, Artificial Sequence
  Synthetic oligonucleotide: BID-5931
aaaugcggggucagcaguucgugg

SEQ ID NO: 45696 - RNA, 18 nt, Artificial Sequence
  Synthetic oligonucleotide: BID-5932
aguuuuuaguggaggugg

SEQ ID NO: 45697 - RNA, 19 nt, Artificial Sequence
  Synthetic oligonucleotide: BID-5933
caguuuuuaguggaggugg

SEQ ID NO: 45698 - RNA, 20 nt, Artificial Sequence
  Synthetic oligonucleotide: BID-800
ucaguuuuuaguggaggugg

SEQ ID NO: 45699 - RNA, 21 nt, Artificial Sequence
  Synthetic oligonucleotide: BID-5934
uucaguuuuuaguggaggugg

SEQ ID NO: 45700 - RNA, 22 nt, Artificial Sequence
  Synthetic oligonucleotide: BID-5935
uuucaguuuuuaguggaggugg

SEQ ID NO: 45701 - RNA, 23 nt, Artificial Sequence
  Synthetic oligonucleotide: BID-5936
uuuucaguuuuuaguggaggugg

SEQ ID NO: 45702 - RNA, 24 nt, Artificial Sequence
  Synthetic oligonucleotide: BID-5937
uuuuucaguuuuuaguggaggugg

SEQ ID NO: 45703 - RNA, 18 nt, Artificial Sequence
  Synthetic oligonucleotide: BID-5938
uuuuaguggagguggugg

SEQ ID NO: 45704 - RNA, 19 nt, Artificial Sequence
  Synthetic oligonucleotide: BID-5939
uuuuuaguggagguggugg

SEQ ID NO: 45705 - RNA, 20 nt, Artificial Sequence
  Synthetic oligonucleotide: BID-803
guuuuuaguggagguggugg

SEQ ID NO: 45706 - RNA, 21 nt, Artificial Sequence
  Synthetic oligonucleotide: BID-5940
aguuuuuaguggagguggugg

SEQ ID NO: 45707 - RNA, 22 nt, Artificial Sequence
  Synthetic oligonucleotide: BID-5941
caguuuuuaguggagguggugg

SEQ ID NO: 45708 - RNA, 23 nt, Artificial Sequence
  Synthetic oligonucleotide: BID-5942
ucaguuuuuaguggagguggugg

SEQ ID NO: 45709 - RNA, 24 nt, Artificial Sequence
  Synthetic oligonucleotide: BID-5943
uucaguuuuuaguggagguggugg

SEQ ID NO: 45710 - RNA, 18 nt, Artificial Sequence
  Synthetic oligonucleotide: BID-5944
uccucgcucucacugugg

SEQ ID NO: 45711 - RNA, 19 nt, Artificial Sequence
  Synthetic oligonucleotide: BID-5945
guccucgcucucacugugg

SEQ ID NO: 45712 - RNA, 20 nt, Artificial Sequence
  Synthetic oligonucleotide: BID-873
aguccucgcucucacugugg

SEQ ID NO: 45713 - RNA, 21 nt, Artificial Sequence
  Synthetic oligonucleotide: BID-5946
caguccucgcucucacugugg

SEQ ID NO: 45714 - RNA, 22 nt, Artificial Sequence
  Synthetic oligonucleotide: BID-5947
ucaguccucgcucucacugugg

SEQ ID NO: 45715 - RNA, 23 nt, Artificial Sequence
  Synthetic oligonucleotide: BID-5948
cucaguccucgcucucacugugg

SEQ ID NO: 45716 - RNA, 24 nt, Artificial Sequence
  Synthetic oligonucleotide: BID-5949
ccucaguccucgcucucacugugg

SEQ ID NO: 45717 - RNA, 18 nt, Artificial Sequence
  Synthetic oligonucleotide: BID-5950
uuuaacauauagauaaug

SEQ ID NO: 45718 - RNA, 19 nt, Artificial Sequence
  Synthetic oligonucleotide: BID-5951
guuuaacauauagauaaug

SEQ ID NO: 45719 - RNA, 20 nt, Artificial Sequence
  Synthetic oligonucleotide: BID-1648
aguuuaacauauagauaaug

SEQ ID NO: 45720 - RNA, 21 nt, Artificial Sequence
  Synthetic oligonucleotide: BID-5952
caguuuaacauauagauaaug

SEQ ID NO: 45721 - RNA, 22 nt, Artificial Sequence
  Synthetic oligonucleotide: BID-5953
ucaguuuaacauauagauaaug

SEQ ID NO: 45722 - RNA, 23 nt, Artificial Sequence
  Synthetic oligonucleotide: BID-5954
aucaguuuaacauauagauaaug

SEQ ID NO: 45723 - RNA, 24 nt, Artificial Sequence
  Synthetic oligonucleotide: BID-5955
caucaguuuaacauauagauaaug

SEQ ID NO: 45724 - RNA, 18 nt, Artificial Sequence
  Synthetic oligonucleotide: BID-5956
acgggcacagggagcaug

SEQ ID NO: 45725 - RNA, 19 nt, Artificial Sequence
  Synthetic oligonucleotide: BID-5957
gacgggcacagggagcaug

SEQ ID NO: 45726 - RNA, 20 nt, Artificial Sequence
  Synthetic oligonucleotide: BID-933
ggacgggcacagggagcaug

SEQ ID NO: 45727 - RNA, 21 nt, Artificial Sequence
  Synthetic oligonucleotide: BID-5958
aggacgggcacagggagcaug

SEQ ID NO: 45728 - RNA, 22 nt, Artificial Sequence
  Synthetic oligonucleotide: BID-5959
caggacgggcacagggagcaug

SEQ ID NO: 45729 - RNA, 23 nt, Artificial Sequence
  Synthetic oligonucleotide: BID-5960
ccaggacgggcacagggagcaug

SEQ ID NO: 45730 - RNA, 24 nt, Artificial Sequence
  Synthetic oligonucleotide: BID-5961
cccaggacgggcacagggagcaug

SEQ ID NO: 45731 - RNA, 18 nt, Artificial Sequence
  Synthetic oligonucleotide: BID-5962
acaggaggcuuugagaug

SEQ ID NO: 45732 - RNA, 19 nt, Artificial Sequence
  Synthetic oligonucleotide: BID-5963
cacaggaggcuuugagaug

SEQ ID NO: 45733 - RNA, 20 nt, Artificial Sequence
  Synthetic oligonucleotide: BID-880
ccacaggaggcuuugagaug

SEQ ID NO: 45734 - RNA, 21 nt, Artificial Sequence
  Synthetic oligonucleotide: BID-5964
cccacaggaggcuuugagaug

SEQ ID NO: 45735 - RNA, 22 nt, Artificial Sequence
  Synthetic oligonucleotide: BID-5965
acccacaggaggcuuugagaug

SEQ ID NO: 45736 - RNA, 23 nt, Artificial Sequence
  Synthetic oligonucleotide: BID-5966
cacccacaggaggcuuugagaug

SEQ ID NO: 45737 - RNA, 24 nt, Artificial Sequence
  Synthetic oligonucleotide: BID-5967
ccacccacaggaggcuuugagaug

SEQ ID NO: 45738 - RNA, 18 nt, Artificial Sequence
  Synthetic oligonucleotide: BID-5968
agcuccagggaggcacug

SEQ ID NO: 45739 - RNA, 19 nt, Artificial Sequence
  Synthetic oligonucleotide: BID-5969
gagcuccagggaggcacug

SEQ ID NO: 45740 - RNA, 20 nt, Artificial Sequence
  Synthetic oligonucleotide: BID-1755
agagcuccagggaggcacug

SEQ ID NO: 45741 - RNA, 21 nt, Artificial Sequence
  Synthetic oligonucleotide: BID-5970
cagagcuccagggaggcacug

SEQ ID NO: 45742 - RNA, 22 nt, Artificial Sequence
  Synthetic oligonucleotide: BID-5971
acagagcuccagggaggcacug

SEQ ID NO: 45743 - RNA, 23 nt, Artificial Sequence
  Synthetic oligonucleotide: BID-5972
gacagagcuccagggaggcacug

SEQ ID NO: 45744 - RNA, 24 nt, Artificial Sequence
  Synthetic oligonucleotide: BID-5973
agacagagcuccagggaggcacug

SEQ ID NO: 45745 - RNA, 18 nt, Artificial Sequence
  Synthetic oligonucleotide: BID-5974
caguccucgcucucacug

SEQ ID NO: 45746 - RNA, 19 nt, Artificial Sequence
  Synthetic oligonucleotide: BID-5975
ucaguccucgcucucacug

SEQ ID NO: 45747 - RNA, 20 nt, Artificial Sequence
  Synthetic oligonucleotide: BID-870
cucaguccucgcucucacug

SEQ ID NO: 45748 - RNA, 21 nt, Artificial Sequence
  Synthetic oligonucleotide: BID-5976
ccucaguccucgcucucacug

SEQ ID NO: 45749 - RNA, 22 nt, Artificial Sequence
  Synthetic oligonucleotide: BID-5977
cccucaguccucgcucucacug

SEQ ID NO: 45750 - RNA, 23 nt, Artificial Sequence
  Synthetic oligonucleotide: BID-5978
acccucaguccucgcucucacug

SEQ ID NO: 45751 - RNA, 24 nt, Artificial Sequence
  Synthetic oligonucleotide: BID-5979
cacccucaguccucgcucucacug

SEQ ID NO: 45752 - RNA, 18 nt, Artificial Sequence
  Synthetic oligonucleotide: BID-5980
cucacugugggggagcug

SEQ ID NO: 45753 - RNA, 19 nt, Artificial Sequence
  Synthetic oligonucleotide: BID-5981
ucucacugugggggagcug

SEQ ID NO: 45754 - RNA, 20 nt, Artificial Sequence
  Synthetic oligonucleotide: BID-1718
cucucacugugggggagcug

SEQ ID NO: 45755 - RNA, 21 nt, Artificial Sequence
  Synthetic oligonucleotide: BID-5982
gcucucacugugggggagcug

SEQ ID NO: 45756 - RNA, 22 nt, Artificial Sequence
  Synthetic oligonucleotide: BID-5983
cgcucucacugugggggagcug

SEQ ID NO: 45757 - RNA, 23 nt, Artificial Sequence
  Synthetic oligonucleotide: BID-5984
ucgcucucacugugggggagcug

SEQ ID NO: 45758 - RNA, 24 nt, Artificial Sequence
  Synthetic oligonucleotide: BID-5985
cucgcucucacugugggggagcug

SEQ ID NO: 45759 - RNA, 18 nt, Artificial Sequence
  Synthetic oligonucleotide: BID-5986
cgcgccggcgcggggcug

SEQ ID NO: 45760 - RNA, 19 nt, Artificial Sequence
  Synthetic oligonucleotide: BID-5987
ccgcgccggcgcggggcug

SEQ ID NO: 45761 - RNA, 20 nt, Artificial Sequence
  Synthetic oligonucleotide: BID-762
cccgcgccggcgcggggcug

SEQ ID NO: 45762 - RNA, 21 nt, Artificial Sequence
  Synthetic oligonucleotide: BID-5988
gcccgcgccggcgcggggcug

SEQ ID NO: 45763 - RNA, 22 nt, Artificial Sequence
  Synthetic oligonucleotide: BID-5989
agcccgcgccggcgcggggcug

SEQ ID NO: 45764 - RNA, 23 nt, Artificial Sequence
  Synthetic oligonucleotide: BID-5990
gagcccgcgccggcgcggggcug

SEQ ID NO: 45765 - RNA, 24 nt, Artificial Sequence
  Synthetic oligonucleotide: BID-5991
ggagcccgcgccggcgcggggcug

SEQ ID NO: 45766 - RNA, 18 nt, Artificial Sequence
  Synthetic oligonucleotide: BID-5992
caguuuuuaguggaggug

SEQ ID NO: 45767 - RNA, 19 nt, Artificial Sequence
  Synthetic oligonucleotide: BID-5993
ucaguuuuuaguggaggug

SEQ ID NO: 45768 - RNA, 20 nt, Artificial Sequence
  Synthetic oligonucleotide: BID-1652
uucaguuuuuaguggaggug

SEQ ID NO: 45769 - RNA, 21 nt, Artificial Sequence
  Synthetic oligonucleotide: BID-5994
uuucaguuuuuaguggaggug

SEQ ID NO: 45770 - RNA, 22 nt, Artificial Sequence
  Synthetic oligonucleotide: BID-5995
uuuucaguuuuuaguggaggug

SEQ ID NO: 45771 - RNA, 23 nt, Artificial Sequence
  Synthetic oligonucleotide: BID-5996
uuuuucaguuuuuaguggaggug

SEQ ID NO: 45772 - RNA, 24 nt, Artificial Sequence
  Synthetic oligonucleotide: BID-5997
cuuuuucaguuuuuaguggaggug

SEQ ID NO: 45773 - RNA, 18 nt, Artificial Sequence
  Synthetic oligonucleotide: BID-5998
gcuggggucuuaagggug

SEQ ID NO: 45774 - RNA, 19 nt, Artificial Sequence
  Synthetic oligonucleotide: BID-5999
agcuggggucuuaagggug

SEQ ID NO: 45775 - RNA, 20 nt, Artificial Sequence
  Synthetic oligonucleotide: BID-895
gagcuggggucuuaagggug

SEQ ID NO: 45776 - RNA, 21 nt, Artificial Sequence
  Synthetic oligonucleotide: BID-6000
ugagcuggggucuuaagggug

SEQ ID NO: 45777 - RNA, 22 nt, Artificial Sequence
  Synthetic oligonucleotide: BID-6001
cugagcuggggucuuaagggug

SEQ ID NO: 45778 - RNA, 23 nt, Artificial Sequence
  Synthetic oligonucleotide: BID-6002
ccugagcuggggucuuaagggug

SEQ ID NO: 45779 - RNA, 24 nt, Artificial Sequence
  Synthetic oligonucleotide: BID-6003
cccugagcuggggucuuaagggug

SEQ ID NO: 45780 - RNA, 18 nt, Artificial Sequence
  Synthetic oligonucleotide: BID-6004
uuuuuaguggagguggug

SEQ ID NO: 45781 - RNA, 19 nt, Artificial Sequence
  Synthetic oligonucleotide: BID-6005
guuuuuaguggagguggug

SEQ ID NO: 45782 - RNA, 20 nt, Artificial Sequence
  Synthetic oligonucleotide: BID-802
aguuuuuaguggagguggug

SEQ ID NO: 45783 - RNA, 21 nt, Artificial Sequence
  Synthetic oligonucleotide: BID-6006
caguuuuuaguggagguggug

SEQ ID NO: 45784 - RNA, 22 nt, Artificial Sequence
  Synthetic oligonucleotide: BID-6007
ucaguuuuuaguggagguggug

SEQ ID NO: 45785 - RNA, 23 nt, Artificial Sequence
  Synthetic oligonucleotide: BID-6008
uucaguuuuuaguggagguggug

SEQ ID NO: 45786 - RNA, 24 nt, Artificial Sequence
  Synthetic oligonucleotide: BID-6009
uuucaguuuuuaguggagguggug

SEQ ID NO: 45787 - RNA, 18 nt, Artificial Sequence
  Synthetic oligonucleotide: BID-6010
guccucgcucucacugug

SEQ ID NO: 45788 - RNA, 19 nt, Artificial Sequence
  Synthetic oligonucleotide: BID-6011
aguccucgcucucacugug

SEQ ID NO: 45789 - RNA, 20 nt, Artificial Sequence
  Synthetic oligonucleotide: BID-872
caguccucgcucucacugug

SEQ ID NO: 45790 - RNA, 21 nt, Artificial Sequence
  Synthetic oligonucleotide: BID-6012
ucaguccucgcucucacugug

SEQ ID NO: 45791 - RNA, 22 nt, Artificial Sequence
  Synthetic oligonucleotide: BID-6013
cucaguccucgcucucacugug

SEQ ID NO: 45792 - RNA, 23 nt, Artificial Sequence
  Synthetic oligonucleotide: BID-6014
ccucaguccucgcucucacugug

SEQ ID NO: 45793 - RNA, 24 nt, Artificial Sequence
  Synthetic oligonucleotide: BID-6015
cccucaguccucgcucucacugug

SEQ ID NO: 45794 - RNA, 18 nt, Artificial Sequence
  Synthetic oligonucleotide: BID-6016
uggggucuuaagggugug

SEQ ID NO: 45795 - RNA, 19 nt, Artificial Sequence
  Synthetic oligonucleotide: BID-6017
cuggggucuuaagggugug

SEQ ID NO: 45796 - RNA, 20 nt, Artificial Sequence
  Synthetic oligonucleotide: BID-897
gcuggggucuuaagggugug

SEQ ID NO: 45797 - RNA, 21 nt, Artificial Sequence
  Synthetic oligonucleotide: BID-6018
agcuggggucuuaagggugug

SEQ ID NO: 45798 - RNA, 22 nt, Artificial Sequence
  Synthetic oligonucleotide: BID-6019
gagcuggggucuuaagggugug

SEQ ID NO: 45799 - RNA, 23 nt, Artificial Sequence
  Synthetic oligonucleotide: BID-6020
ugagcuggggucuuaagggugug

SEQ ID NO: 45800 - RNA, 24 nt, Artificial Sequence
  Synthetic oligonucleotide: BID-6021
cugagcuggggucuuaagggugug

SEQ ID NO: 45801 - RNA, 18 nt, Artificial Sequence
  Synthetic oligonucleotide: BID-6022
gugaagccauguggguug

SEQ ID NO: 45802 - RNA, 19 nt, Artificial Sequence
  Synthetic oligonucleotide: BID-6023
ggugaagccauguggguug

SEQ ID NO: 45803 - RNA, 20 nt, Artificial Sequence
  Synthetic oligonucleotide: BID-1645
gggugaagccauguggguug

SEQ ID NO: 45804 - RNA, 21 nt, Artificial Sequence
  Synthetic oligonucleotide: BID-6024
ugggugaagccauguggguug

SEQ ID NO: 45805 - RNA, 22 nt, Artificial Sequence
  Synthetic oligonucleotide: BID-6025
gugggugaagccauguggguug

SEQ ID NO: 45806 - RNA, 23 nt, Artificial Sequence
  Synthetic oligonucleotide: BID-6026
agugggugaagccauguggguug

SEQ ID NO: 45807 - RNA, 24 nt, Artificial Sequence
  Synthetic oligonucleotide: BID-6027
aagugggugaagccauguggguug

SEQ ID NO: 45808 - RNA, 18 nt, Artificial Sequence
  Synthetic oligonucleotide: BID-6028
agggagggaagaggaaau

SEQ ID NO: 45809 - RNA, 19 nt, Artificial Sequence
  Synthetic oligonucleotide: BID-6029
cagggagggaagaggaaau

SEQ ID NO: 45810 - RNA, 20 nt, Artificial Sequence
  Synthetic oligonucleotide: BID-1769
ccagggagggaagaggaaau

SEQ ID NO: 45811 - RNA, 21 nt, Artificial Sequence
  Synthetic oligonucleotide: BID-6030
cccagggagggaagaggaaau

SEQ ID NO: 45812 - RNA, 22 nt, Artificial Sequence
  Synthetic oligonucleotide: BID-6031
gcccagggagggaagaggaaau

SEQ ID NO: 45813 - RNA, 23 nt, Artificial Sequence
  Synthetic oligonucleotide: BID-6032
ugcccagggagggaagaggaaau

SEQ ID NO: 45814 - RNA, 24 nt, Artificial Sequence
  Synthetic oligonucleotide: BID-6033
uugcccagggagggaagaggaaau

SEQ ID NO: 45815 - RNA, 18 nt, Artificial Sequence
  Synthetic oligonucleotide: BID-6034
gacgggcacagggagcau

SEQ ID NO: 45816 - RNA, 19 nt, Artificial Sequence
  Synthetic oligonucleotide: BID-6035
ggacgggcacagggagcau

SEQ ID NO: 45817 - RNA, 20 nt, Artificial Sequence
  Synthetic oligonucleotide: BID-1781
aggacgggcacagggagcau

SEQ ID NO: 45818 - RNA, 21 nt, Artificial Sequence
  Synthetic oligonucleotide: BID-6036
caggacgggcacagggagcau

SEQ ID NO: 45819 - RNA, 22 nt, Artificial Sequence
  Synthetic oligonucleotide: BID-6037
ccaggacgggcacagggagcau

SEQ ID NO: 45820 - RNA, 23 nt, Artificial Sequence
  Synthetic oligonucleotide: BID-6038
cccaggacgggcacagggagcau

SEQ ID NO: 45821 - RNA, 24 nt, Artificial Sequence
  Synthetic oligonucleotide: BID-6039
ucccaggacgggcacagggagcau

SEQ ID NO: 45822 - RNA, 18 nt, Artificial Sequence
  Synthetic oligonucleotide: BID-6040
agagggauccucuggcau

SEQ ID NO: 45823 - RNA, 19 nt, Artificial Sequence
  Synthetic oligonucleotide: BID-6041
cagagggauccucuggcau

SEQ ID NO: 45824 - RNA, 20 nt, Artificial Sequence
  Synthetic oligonucleotide: BID-1748
gcagagggauccucuggcau

SEQ ID NO: 45825 - RNA, 21 nt, Artificial Sequence
  Synthetic oligonucleotide: BID-6042
cgcagagggauccucuggcau

SEQ ID NO: 45826 - RNA, 22 nt, Artificial Sequence
  Synthetic oligonucleotide: BID-6043
gcgcagagggauccucuggcau

SEQ ID NO: 45827 - RNA, 23 nt, Artificial Sequence
  Synthetic oligonucleotide: BID-6044
agcgcagagggauccucuggcau

SEQ ID NO: 45828 - RNA, 24 nt, Artificial Sequence
  Synthetic oligonucleotide: BID-6045
gagcgcagagggauccucuggcau

SEQ ID NO: 45829 - RNA, 18 nt, Artificial Sequence
  Synthetic oligonucleotide: BID-6046
cacaggaggcuuugagau

SEQ ID NO: 45830 - RNA, 19 nt, Artificial Sequence
  Synthetic oligonucleotide: BID-6047
ccacaggaggcuuugagau

SEQ ID NO: 45831 - RNA, 20 nt, Artificial Sequence
  Synthetic oligonucleotide: BID-879
cccacaggaggcuuugagau

SEQ ID NO: 45832 - RNA, 21 nt, Artificial Sequence
  Synthetic oligonucleotide: BID-6048
acccacaggaggcuuugagau

SEQ ID NO: 45833 - RNA, 22 nt, Artificial Sequence
  Synthetic oligonucleotide: BID-6049
cacccacaggaggcuuugagau

SEQ ID NO: 45834 - RNA, 23 nt, Artificial Sequence
  Synthetic oligonucleotide: BID-6050
ccacccacaggaggcuuugagau

SEQ ID NO: 45835 - RNA, 24 nt, Artificial Sequence
  Synthetic oligonucleotide: BID-6051
uccacccacaggaggcuuugagau

SEQ ID NO: 45836 - RNA, 18 nt, Artificial Sequence
  Synthetic oligonucleotide: BID-6052
ucaguccucgcucucacu

SEQ ID NO: 45837 - RNA, 19 nt, Artificial Sequence
  Synthetic oligonucleotide: BID-6053
cucaguccucgcucucacu

SEQ ID NO: 45838 - RNA, 20 nt, Artificial Sequence
  Synthetic oligonucleotide: BID-1713
ccucaguccucgcucucacu

SEQ ID NO: 45839 - RNA, 21 nt, Artificial Sequence
  Synthetic oligonucleotide: BID-6054
cccucaguccucgcucucacu

SEQ ID NO: 45840 - RNA, 22 nt, Artificial Sequence
  Synthetic oligonucleotide: BID-6055
acccucaguccucgcucucacu

SEQ ID NO: 45841 - RNA, 23 nt, Artificial Sequence
  Synthetic oligonucleotide: BID-6056
cacccucaguccucgcucucacu

SEQ ID NO: 45842 - RNA, 24 nt, Artificial Sequence
  Synthetic oligonucleotide: BID-6057
acacccucaguccucgcucucacu

SEQ ID NO: 45843 - RNA, 18 nt, Artificial Sequence
  Synthetic oligonucleotide: BID-6058
gggggggggucuccaccu

SEQ ID NO: 45844 - RNA, 19 nt, Artificial Sequence
  Synthetic oligonucleotide: BID-6059
ggggggggggucuccaccu

SEQ ID NO: 45845 - RNA, 20 nt, Artificial Sequence
  Synthetic oligonucleotide: BID-1660
uggggggggggucuccaccu

SEQ ID NO: 45846 - RNA, 21 nt, Artificial Sequence
  Synthetic oligonucleotide: BID-6060
guggggggggggucuccaccu

SEQ ID NO: 45847 - RNA, 22 nt, Artificial Sequence
  Synthetic oligonucleotide: BID-6061
gguggggggggggucuccaccu

SEQ ID NO: 45848 - RNA, 23 nt, Artificial Sequence
  Synthetic oligonucleotide: BID-6062
ugguggggggggggucuccaccu

SEQ ID NO: 45849 - RNA, 24 nt, Artificial Sequence
  Synthetic oligonucleotide: BID-6063
gugguggggggggggucuccaccu

SEQ ID NO: 45850 - RNA, 18 nt, Artificial Sequence
  Synthetic oligonucleotide: BID-6064
cuccacccacaggaggcu

SEQ ID NO: 45851 - RNA, 19 nt, Artificial Sequence
  Synthetic oligonucleotide: BID-6065
ucuccacccacaggaggcu

SEQ ID NO: 45852 - RNA, 20 nt, Artificial Sequence
  Synthetic oligonucleotide: BID-1722
aucuccacccacaggaggcu

SEQ ID NO: 45853 - RNA, 21 nt, Artificial Sequence
  Synthetic oligonucleotide: BID-6066
caucuccacccacaggaggcu

SEQ ID NO: 45854 - RNA, 22 nt, Artificial Sequence
  Synthetic oligonucleotide: BID-6067
ccaucuccacccacaggaggcu

SEQ ID NO: 45855 - RNA, 23 nt, Artificial Sequence
  Synthetic oligonucleotide: BID-6068
uccaucuccacccacaggaggcu

SEQ ID NO: 45856 - RNA, 24 nt, Artificial Sequence
  Synthetic oligonucleotide: BID-6069
uuccaucuccacccacaggaggcu

SEQ ID NO: 45857 - RNA, 18 nt, Artificial Sequence
  Synthetic oligonucleotide: BID-6070
ccgcgccggcgcggggcu

SEQ ID NO: 45858 - RNA, 19 nt, Artificial Sequence
  Synthetic oligonucleotide: BID-6071
cccgcgccggcgcggggcu

SEQ ID NO: 45859 - RNA, 20 nt, Artificial Sequence
  Synthetic oligonucleotide: BID-1616
gcccgcgccggcgcggggcu

SEQ ID NO: 45860 - RNA, 21 nt, Artificial Sequence
  Synthetic oligonucleotide: BID-6072
agcccgcgccggcgcggggcu

SEQ ID NO: 45861 - RNA, 22 nt, Artificial Sequence
  Synthetic oligonucleotide: BID-6073
gagcccgcgccggcgcggggcu

SEQ ID NO: 45862 - RNA, 23 nt, Artificial Sequence
  Synthetic oligonucleotide: BID-6074
ggagcccgcgccggcgcggggcu

SEQ ID NO: 45863 - RNA, 24 nt, Artificial Sequence
  Synthetic oligonucleotide: BID-6075
gggagcccgcgccggcgcggggcu

SEQ ID NO: 45864 - RNA, 18 nt, Artificial Sequence
  Synthetic oligonucleotide: BID-6076
aauuccuaaugauucucu

SEQ ID NO: 45865 - RNA, 19 nt, Artificial Sequence
  Synthetic oligonucleotide: BID-6077
uaauuccuaaugauucucu

SEQ ID NO: 45866 - RNA, 20 nt, Artificial Sequence
  Synthetic oligonucleotide: BID-775
auaauuccuaaugauucucu

SEQ ID NO: 45867 - RNA, 21 nt, Artificial Sequence
  Synthetic oligonucleotide: BID-6078
gauaauuccuaaugauucucu

SEQ ID NO: 45868 - RNA, 22 nt, Artificial Sequence
  Synthetic oligonucleotide: BID-6079
ggauaauuccuaaugauucucu

SEQ ID NO: 45869 - RNA, 23 nt, Artificial Sequence
  Synthetic oligonucleotide: BID-6080
gggauaauuccuaaugauucucu

SEQ ID NO: 45870 - RNA, 24 nt, Artificial Sequence
  Synthetic oligonucleotide: BID-6081
ugggauaauuccuaaugauucucu

SEQ ID NO: 45871 - RNA, 18 nt, Artificial Sequence
  Synthetic oligonucleotide: BID-6082
auaauuccuaaugauucu

SEQ ID NO: 45872 - RNA, 19 nt, Artificial Sequence
  Synthetic oligonucleotide: BID-6083
gauaauuccuaaugauucu

SEQ ID NO: 45873 - RNA, 20 nt, Artificial Sequence
  Synthetic oligonucleotide: BID-1628
ggauaauuccuaaugauucu

SEQ ID NO: 45874 - RNA, 21 nt, Artificial Sequence
  Synthetic oligonucleotide: BID-6084
gggauaauuccuaaugauucu

SEQ ID NO: 45875 - RNA, 22 nt, Artificial Sequence
  Synthetic oligonucleotide: BID-6085
ugggauaauuccuaaugauucu

SEQ ID NO: 45876 - RNA, 23 nt, Artificial Sequence
  Synthetic oligonucleotide: BID-6086
cugggauaauuccuaaugauucu

SEQ ID NO: 45877 - RNA, 24 nt, Artificial Sequence
  Synthetic oligonucleotide: BID-6087
gcugggauaauuccuaaugauucu

SEQ ID NO: 45878 - RNA, 18 nt, Artificial Sequence
  Synthetic oligonucleotide: BID-6088
ggcuguuucuggaacagu

SEQ ID NO: 45879 - RNA, 19 nt, Artificial Sequence
  Synthetic oligonucleotide: BID-6089
aggcuguuucuggaacagu

SEQ ID NO: 45880 - RNA, 20 nt, Artificial Sequence
  Synthetic oligonucleotide: BID-1634
caggcuguuucuggaacagu

SEQ ID NO: 45881 - RNA, 21 nt, Artificial Sequence
  Synthetic oligonucleotide: BID-6090
ccaggcuguuucuggaacagu

SEQ ID NO: 45882 - RNA, 22 nt, Artificial Sequence
  Synthetic oligonucleotide: BID-6091
cccaggcuguuucuggaacagu

SEQ ID NO: 45883 - RNA, 23 nt, Artificial Sequence
  Synthetic oligonucleotide: BID-6092
ccccaggcuguuucuggaacagu

SEQ ID NO: 45884 - RNA, 24 nt, Artificial Sequence
  Synthetic oligonucleotide: BID-6093
uccccaggcuguuucuggaacagu

SEQ ID NO: 45885 - RNA, 18 nt, Artificial Sequence
  Synthetic oligonucleotide: BID-6094
gggagccggcagcgcagu

SEQ ID NO: 45886 - RNA, 19 nt, Artificial Sequence
  Synthetic oligonucleotide: BID-6095
ggggagccggcagcgcagu

SEQ ID NO: 45887 - RNA, 20 nt, Artificial Sequence
  Synthetic oligonucleotide: BID-1625
cggggagccggcagcgcagu

SEQ ID NO: 45888 - RNA, 21 nt, Artificial Sequence
  Synthetic oligonucleotide: BID-6096
gcggggagccggcagcgcagu

SEQ ID NO: 45889 - RNA, 22 nt, Artificial Sequence
  Synthetic oligonucleotide: BID-6097
ggcggggagccggcagcgcagu

SEQ ID NO: 45890 - RNA, 23 nt, Artificial Sequence
  Synthetic oligonucleotide: BID-6098
gggcggggagccggcagcgcagu

SEQ ID NO: 45891 - RNA, 24 nt, Artificial Sequence
  Synthetic oligonucleotide: BID-6099
ggggcggggagccggcagcgcagu

SEQ ID NO: 45892 - RNA, 18 nt, Artificial Sequence
  Synthetic oligonucleotide: BID-6100
agcuggggucuuaagggu

SEQ ID NO: 45893 - RNA, 19 nt, Artificial Sequence
  Synthetic oligonucleotide: BID-6101
gagcuggggucuuaagggu

SEQ ID NO: 45894 - RNA, 20 nt, Artificial Sequence
  Synthetic oligonucleotide: BID-1741
ugagcuggggucuuaagggu

SEQ ID NO: 45895 - RNA, 21 nt, Artificial Sequence
  Synthetic oligonucleotide: BID-6102
cugagcuggggucuuaagggu

SEQ ID NO: 45896 - RNA, 22 nt, Artificial Sequence
  Synthetic oligonucleotide: BID-6103
ccugagcuggggucuuaagggu

SEQ ID NO: 45897 - RNA, 23 nt, Artificial Sequence
  Synthetic oligonucleotide: BID-6104
cccugagcuggggucuuaagggu

SEQ ID NO: 45898 - RNA, 24 nt, Artificial Sequence
  Synthetic oligonucleotide: BID-6105
ucccugagcuggggucuuaagggu

SEQ ID NO: 45899 - RNA, 18 nt, Artificial Sequence
  Synthetic oligonucleotide: BID-6106
ccucacggaaccaggggu

SEQ ID NO: 45900 - RNA, 19 nt, Artificial Sequence
  Synthetic oligonucleotide: BID-6107
uccucacggaaccaggggu

SEQ ID NO: 45901 - RNA, 20 nt, Artificial Sequence
  Synthetic oligonucleotide: BID-1640
guccucacggaaccaggggu

SEQ ID NO: 45902 - RNA, 21 nt, Artificial Sequence
  Synthetic oligonucleotide: BID-6108
gguccucacggaaccaggggu

SEQ ID NO: 45903 - RNA, 22 nt, Artificial Sequence
  Synthetic oligonucleotide: BID-6109
agguccucacggaaccaggggu

SEQ ID NO: 45904 - RNA, 23 nt, Artificial Sequence
  Synthetic oligonucleotide: BID-6110
uagguccucacggaaccaggggu

SEQ ID NO: 45905 - RNA, 24 nt, Artificial Sequence
  Synthetic oligonucleotide: BID-6111
cuagguccucacggaaccaggggu

SEQ ID NO: 45906 - RNA, 18 nt, Artificial Sequence
  Synthetic oligonucleotide: BID-6112
guuuuuaguggagguggu

SEQ ID NO: 45907 - RNA, 19 nt, Artificial Sequence
  Synthetic oligonucleotide: BID-6113
aguuuuuaguggagguggu

SEQ ID NO: 45908 - RNA, 20 nt, Artificial Sequence
  Synthetic oligonucleotide: BID-801
caguuuuuaguggagguggu

SEQ ID NO: 45909 - RNA, 21 nt, Artificial Sequence
  Synthetic oligonucleotide: BID-6114
ucaguuuuuaguggagguggu

SEQ ID NO: 45910 - RNA, 22 nt, Artificial Sequence
  Synthetic oligonucleotide: BID-6115
uucaguuuuuaguggagguggu

SEQ ID NO: 45911 - RNA, 23 nt, Artificial Sequence
  Synthetic oligonucleotide: BID-6116
uuucaguuuuuaguggagguggu

SEQ ID NO: 45912 - RNA, 24 nt, Artificial Sequence
  Synthetic oligonucleotide: BID-6117
uuuucaguuuuuaguggagguggu

SEQ ID NO: 45913 - RNA, 18 nt, Artificial Sequence
  Synthetic oligonucleotide: BID-6118
aguccucgcucucacugu

SEQ ID NO: 45914 - RNA, 19 nt, Artificial Sequence
  Synthetic oligonucleotide: BID-6119
caguccucgcucucacugu

SEQ ID NO: 45915 - RNA, 20 nt, Artificial Sequence
  Synthetic oligonucleotide: BID-871
ucaguccucgcucucacugu

SEQ ID NO: 45916 - RNA, 21 nt, Artificial Sequence
  Synthetic oligonucleotide: BID-6120
cucaguccucgcucucacugu

SEQ ID NO: 45917 - RNA, 22 nt, Artificial Sequence
  Synthetic oligonucleotide: BID-6121
ccucaguccucgcucucacugu

SEQ ID NO: 45918 - RNA, 23 nt, Artificial Sequence
  Synthetic oligonucleotide: BID-6122
cccucaguccucgcucucacugu

SEQ ID NO: 45919 - RNA, 24 nt, Artificial Sequence
  Synthetic oligonucleotide: BID-6123
acccucaguccucgcucucacugu

SEQ ID NO: 45920 - RNA, 18 nt, Artificial Sequence
  Synthetic oligonucleotide: BID-6124
cuggggucuuaagggugu

SEQ ID NO: 45921 - RNA, 19 nt, Artificial Sequence
  Synthetic oligonucleotide: BID-6125
gcuggggucuuaagggugu

SEQ ID NO: 45922 - RNA, 20 nt, Artificial Sequence
  Synthetic oligonucleotide: BID-896
agcuggggucuuaagggugu

SEQ ID NO: 45923 - RNA, 21 nt, Artificial Sequence
  Synthetic oligonucleotide: BID-6126
gagcuggggucuuaagggugu

SEQ ID NO: 45924 - RNA, 22 nt, Artificial Sequence
  Synthetic oligonucleotide: BID-6127
ugagcuggggucuuaagggugu

SEQ ID NO: 45925 - RNA, 23 nt, Artificial Sequence
  Synthetic oligonucleotide: BID-6128
cugagcuggggucuuaagggugu

SEQ ID NO: 45926 - RNA, 24 nt, Artificial Sequence
  Synthetic oligonucleotide: BID-6129
ccugagcuggggucuuaagggugu

SEQ ID NO: 45927 - RNA, 18 nt, Artificial Sequence
  Synthetic oligonucleotide: BID-6130
cucacggaaccagggguu

SEQ ID NO: 45928 - RNA, 19 nt, Artificial Sequence
  Synthetic oligonucleotide: BID-6131
ccucacggaaccagggguu

SEQ ID NO: 45929 - RNA, 20 nt, Artificial Sequence
  Synthetic oligonucleotide: BID-787
uccucacggaaccagggguu

SEQ ID NO: 45930 - RNA, 21 nt, Artificial Sequence
  Synthetic oligonucleotide: BID-6132
guccucacggaaccagggguu

SEQ ID NO: 45931 - RNA, 22 nt, Artificial Sequence
  Synthetic oligonucleotide: BID-6133
gguccucacggaaccagggguu

SEQ ID NO: 45932 - RNA, 23 nt, Artificial Sequence
  Synthetic oligonucleotide: BID-6134
agguccucacggaaccagggguu

SEQ ID NO: 45933 - RNA, 24 nt, Artificial Sequence
  Synthetic oligonucleotide: BID-6135
uagguccucacggaaccagggguu

SEQ ID NO: 45934 - RNA, 18 nt, Artificial Sequence
  Synthetic oligonucleotide: BID-6136
agaauccccaggcuguuu

SEQ ID NO: 45935 - RNA, 19 nt, Artificial Sequence
  Synthetic oligonucleotide: BID-6137
cagaauccccaggcuguuu

SEQ ID NO: 45936 - RNA, 20 nt, Artificial Sequence
  Synthetic oligonucleotide: BID-1632
ucagaauccccaggcuguuu

SEQ ID NO: 45937 - RNA, 21 nt, Artificial Sequence
  Synthetic oligonucleotide: BID-6138
uucagaauccccaggcuguuu

SEQ ID NO: 45938 - RNA, 22 nt, Artificial Sequence
  Synthetic oligonucleotide: BID-6139
auucagaauccccaggcuguuu

SEQ ID NO: 45939 - RNA, 23 nt, Artificial Sequence
  Synthetic oligonucleotide: BID-6140
cauucagaauccccaggcuguuu

SEQ ID NO: 45940 - RNA, 24 nt, Artificial Sequence
  Synthetic oligonucleotide: BID-6141
acauucagaauccccaggcuguuu

SEQ ID NO: 45941 - RNA, 17 nt, Artificial Sequence
  Synthetic oligonucleotide: BID-6142
guaagcggccgcucuga

SEQ ID NO: 45942 - RNA, 17 nt, Artificial Sequence
  Synthetic oligonucleotide: BID-6143
ccuccuuauggcgcccc

SEQ ID NO: 45943 - RNA, 17 nt, Artificial Sequence
  Synthetic oligonucleotide: BID-6144
caaagcgcggucagagc

SEQ ID NO: 45944 - RNA, 17 nt, Artificial Sequence
  Synthetic oligonucleotide: BID-682
cggcuggaggagcacag

SEQ ID NO: 45945 - RNA, 17 nt, Artificial Sequence
  Synthetic oligonucleotide: BID-6145
uccgccucggaggcggg

SEQ ID NO: 45946 - RNA, 17 nt, Artificial Sequence
  Synthetic oligonucleotide: BID-2441
aaagaccacgguguggg

SEQ ID NO: 45947 - RNA, 17 nt, Artificial Sequence
  Synthetic oligonucleotide: BID-6146
cgcggacacggucgacu

SEQ ID NO: 45948 - RNA, 20 nt, Artificial Sequence
  Synthetic oligonucleotide: BID-6147
ccaguaagcggccgcucuga

SEQ ID NO: 45949 - RNA, 20 nt, Artificial Sequence
  Synthetic oligonucleotide: BID-6148
cuuccuccuuauggcgcccc

SEQ ID NO: 45950 - RNA, 20 nt, Artificial Sequence
  Synthetic oligonucleotide: BID-6149
ugacaaagcgcggucagagc

SEQ ID NO: 45951 - RNA, 20 nt, Artificial Sequence
  Synthetic oligonucleotide: BID-680
ggccggcuggaggagcacag

SEQ ID NO: 45952 - RNA, 20 nt, Artificial Sequence
  Synthetic oligonucleotide: BID-6150
ggguccgccucggaggcggg

SEQ ID NO: 45953 - RNA, 20 nt, Artificial Sequence
  Synthetic oligonucleotide: BID-2169
uggaaagaccacgguguggg

SEQ ID NO: 45954 - RNA, 20 nt, Artificial Sequence
  Synthetic oligonucleotide: BID-6151
gcgcgcggacacggucgacu

SEQ ID NO: 45955 - RNA, 20 nt, Artificial Sequence
  Synthetic oligonucleotide: BID-1379
agcccagccacuugguggcu

SEQ ID NO: 45956 - RNA, 17 nt, Artificial Sequence
  Synthetic oligonucleotide: BID-2317
guccucuccacguggcc

SEQ ID NO: 45957 - RNA, 17 nt, Artificial Sequence
  Synthetic oligonucleotide: BID-1465
ccagccacuugguggcu

SEQ ID NO: 45958 - RNA, 20 nt, Artificial Sequence
  Synthetic oligonucleotide: BID-2046
uguguccucuccacguggcc

SEQ ID NO: 45959 - RNA, 17 nt, Artificial Sequence
  Synthetic oligonucleotide: BID-1983
aauuauuuggauaucaa

SEQ ID NO: 45960 - RNA, 17 nt, Artificial Sequence
  Synthetic oligonucleotide: BID-6152
cggcagcgcagugagaa

SEQ ID NO: 45961 - RNA, 17 nt, Artificial Sequence
  Synthetic oligonucleotide: BID-6153
uuccaucuccacccaca

SEQ ID NO: 45962 - RNA, 17 nt, Artificial Sequence
  Synthetic oligonucleotide: BID-6154
agauucucugcaaccca

SEQ ID NO: 45963 - RNA, 17 nt, Artificial Sequence
  Synthetic oligonucleotide: BID-737
cuguuccagaaacagcc

SEQ ID NO: 45964 - RNA, 17 nt, Artificial Sequence
  Synthetic oligonucleotide: BID-6155
cagccccucaccagucc

SEQ ID NO: 45965 - RNA, 17 nt, Artificial Sequence
  Synthetic oligonucleotide: BID-1982
gccgcugggauaauucc

SEQ ID NO: 45966 - RNA, 17 nt, Artificial Sequence
  Synthetic oligonucleotide: BID-6156
cacccugggccgcaggc

SEQ ID NO: 45967 - RNA, 17 nt, Artificial Sequence
  Synthetic oligonucleotide: BID-6157
agagcucuuccaccuuc

SEQ ID NO: 45968 - RNA, 17 nt, Artificial Sequence
  Synthetic oligonucleotide: BID-1985
ugggagugaugaccgag

SEQ ID NO: 45969 - RNA, 17 nt, Artificial Sequence
  Synthetic oligonucleotide: BID-1978
gacuggugaggggcugg

SEQ ID NO: 45970 - RNA, 20 nt, Artificial Sequence
  Synthetic oligonucleotide: BID-1981
uuuaauuauuuggauaucaa

SEQ ID NO: 45971 - RNA, 20 nt, Artificial Sequence
  Synthetic oligonucleotide: BID-6158
agccggcagcgcagugagaa

SEQ ID NO: 45972 - RNA, 20 nt, Artificial Sequence
  Synthetic oligonucleotide: BID-6159
acauuccaucuccacccaca

SEQ ID NO: 45973 - RNA, 20 nt, Artificial Sequence
  Synthetic oligonucleotide: BID-6160
gccagauucucugcaaccca

SEQ ID NO: 45974 - RNA, 20 nt, Artificial Sequence
  Synthetic oligonucleotide: BID-700
agacuguuccagaaacagcc

SEQ ID NO: 45975 - RNA, 20 nt, Artificial Sequence
  Synthetic oligonucleotide: BID-6161
gcccagccccucaccagucc

SEQ ID NO: 45976 - RNA, 20 nt, Artificial Sequence
  Synthetic oligonucleotide: BID-1980
agcgccgcugggauaauucc

SEQ ID NO: 45977 - RNA, 20 nt, Artificial Sequence
  Synthetic oligonucleotide: BID-6162
gcacacccugggccgcaggc

SEQ ID NO: 45978 - RNA, 20 nt, Artificial Sequence
  Synthetic oligonucleotide: BID-6163
cccagagcucuuccaccuuc

SEQ ID NO: 45979 - RNA, 20 nt, Artificial Sequence
  Synthetic oligonucleotide: BID-1984
cccugggagugaugaccgag

SEQ ID NO: 45980 - RNA, 20 nt, Artificial Sequence
  Synthetic oligonucleotide: BID-1976
agggacuggugaggggcugg

SEQ ID NO: 45981 - RNA, 17 nt, Artificial Sequence
  Synthetic oligonucleotide: CTLA4-73
ccgcucccauaaagcca

SEQ ID NO: 45982 - RNA, 17 nt, Artificial Sequence
  Synthetic oligonucleotide: CTLA4-109
guagagucccgugucca

SEQ ID NO: 45983 - RNA, 17 nt, Artificial Sequence
  Synthetic oligonucleotide: CTLA4-95
ugcggcaaccuacauga

SEQ ID NO: 45984 - RNA, 17 nt, Artificial Sequence
  Synthetic oligonucleotide: CTLA4-192
ccuaugcccagguagua

SEQ ID NO: 45985 - RNA, 17 nt, Artificial Sequence
  Synthetic oligonucleotide: CTLA4-1371
cccaccgccauacuacc

SEQ ID NO: 45986 - RNA, 17 nt, Artificial Sequence
  Synthetic oligonucleotide: CTLA4-193
uuccguugccuaugccc

SEQ ID NO: 45987 - RNA, 17 nt, Artificial Sequence
  Synthetic oligonucleotide: CTLA4-92
ggugacagugcuucggc

SEQ ID NO: 45988 - RNA, 17 nt, Artificial Sequence
  Synthetic oligonucleotide: CTLA4-144
uuaugggagcgguguuc

SEQ ID NO: 45989 - RNA, 17 nt, Artificial Sequence
  Synthetic oligonucleotide: CTLA4-83
caugcuagcaaugcacg

SEQ ID NO: 45990 - RNA, 17 nt, Artificial Sequence
  Synthetic oligonucleotide: CTLA4-97
cggcaaccuacaugaug

SEQ ID NO: 45991 - RNA, 17 nt, Artificial Sequence
  Synthetic oligonucleotide: CTLA4-111
ucaguccuuggauagug

SEQ ID NO: 45992 - RNA, 17 nt, Artificial Sequence
  Synthetic oligonucleotide: CTLA4-1372
ccauacuaccugggcau

SEQ ID NO: 45993 - RNA, 17 nt, Artificial Sequence
  Synthetic oligonucleotide: CTLA4-96
gcggcaaccuacaugau

SEQ ID NO: 45994 - RNA, 17 nt, Artificial Sequence
  Synthetic oligonucleotide: CTLA4-142
gcaagccauggcuuuau

SEQ ID NO: 45995 - RNA, 17 nt, Artificial Sequence
  Synthetic oligonucleotide: CTLA4-1373
ccaccgccauacuaccu

SEQ ID NO: 45996 - RNA, 17 nt, Artificial Sequence
  Synthetic oligonucleotide: CTLA4-1374
ccagguaguauggcggu

SEQ ID NO: 45997 - RNA, 17 nt, Artificial Sequence
  Synthetic oligonucleotide: CTLA4-91
uccgggugacagugcuu

SEQ ID NO: 45998 - RNA, 20 nt, Artificial Sequence
  Synthetic oligonucleotide: CTLA4-145
uacuaccugggcauaggcaa

SEQ ID NO: 45999 - RNA, 20 nt, Artificial Sequence
  Synthetic oligonucleotide: CTLA4-4
ccuuggauuucagcggcaca

SEQ ID NO: 46000 - RNA, 20 nt, Artificial Sequence
  Synthetic oligonucleotide: CTLA4-1
acaccgcucccauaaagcca

SEQ ID NO: 46001 - RNA, 20 nt, Artificial Sequence
  Synthetic oligonucleotide: CTLA4-67
ccuugugccgcugaaaucca

SEQ ID NO: 46002 - RNA, 20 nt, Artificial Sequence
  Synthetic oligonucleotide: CTLA4-56
ggccacgugcauugcuagca

SEQ ID NO: 46003 - RNA, 20 nt, Artificial Sequence
  Synthetic oligonucleotide: CTLA4-23
cugugcggcaaccuacauga

SEQ ID NO: 46004 - RNA, 20 nt, Artificial Sequence
  Synthetic oligonucleotide: CTLA4-169
uugccuaugcccagguagua

SEQ ID NO: 46005 - RNA, 20 nt, Artificial Sequence
  Synthetic oligonucleotide: CTLA4-27
cuagaugauuccaucugcac

SEQ ID NO: 46006 - RNA, 20 nt, Artificial Sequence
  Synthetic oligonucleotide: CTLA4-59
cacucaccuuugcagaagac

SEQ ID NO: 46007 - RNA, 20 nt, Artificial Sequence
  Synthetic oligonucleotide: CTLA4-13
ggcccagccugcugugguac

SEQ ID NO: 46008 - RNA, 20 nt, Artificial Sequence
  Synthetic oligonucleotide: CTLA4-1375
guacccaccgccauacuacc

SEQ ID NO: 46009 - RNA, 20 nt, Artificial Sequence
  Synthetic oligonucleotide: CTLA4-170
ggguuccguugccuaugccc

SEQ ID NO: 46010 - RNA, 20 nt, Artificial Sequence
  Synthetic oligonucleotide: CTLA4-20
ccgggugacagugcuucggc

SEQ ID NO: 46011 - RNA, 20 nt, Artificial Sequence
  Synthetic oligonucleotide: CTLA4-72
gcuuuaugggagcgguguuc

SEQ ID NO: 46012 - RNA, 20 nt, Artificial Sequence
  Synthetic oligonucleotide: CTLA4-71
aagccauggcuuuaugggag

SEQ ID NO: 46013 - RNA, 20 nt, Artificial Sequence
  Synthetic oligonucleotide: CTLA4-11
uuccaugcuagcaaugcacg

SEQ ID NO: 46014 - RNA, 20 nt, Artificial Sequence
  Synthetic oligonucleotide: CTLA4-1376
ccuaugcccagguaguaugg

SEQ ID NO: 46015 - RNA, 20 nt, Artificial Sequence
  Synthetic oligonucleotide: CTLA4-25
gugcggcaaccuacaugaug

SEQ ID NO: 46016 - RNA, 20 nt, Artificial Sequence
  Synthetic oligonucleotide: CTLA4-39
cccucaguccuuggauagug

SEQ ID NO: 46017 - RNA, 20 nt, Artificial Sequence
  Synthetic oligonucleotide: CTLA4-1377
ccgccauacuaccugggcau

SEQ ID NO: 46018 - RNA, 20 nt, Artificial Sequence
  Synthetic oligonucleotide: CTLA4-24
ugugcggcaaccuacaugau

SEQ ID NO: 46019 - RNA, 20 nt, Artificial Sequence
  Synthetic oligonucleotide: CTLA4-1378
uacccaccgccauacuaccu

SEQ ID NO: 46020 - RNA, 20 nt, Artificial Sequence
  Synthetic oligonucleotide: CTLA4-2
cauaaagccauggcuugccu

SEQ ID NO: 46021 - RNA, 20 nt, Artificial Sequence
  Synthetic oligonucleotide: CTLA4-1379
ugcccagguaguauggcggu

SEQ ID NO: 46022 - RNA, 20 nt, Artificial Sequence
  Synthetic oligonucleotide: CTLA4-45
caacucauuccccaucaugu

SEQ ID NO: 46023 - RNA, 20 nt, Artificial Sequence
  Synthetic oligonucleotide: CTLA4-19
agguccgggugacagugcuu

SEQ ID NO: 46024 - RNA, 17 nt, Artificial Sequence
  Synthetic oligonucleotide: CTLA4-130
agcauggaaaagccaaa

SEQ ID NO: 46025 - RNA, 17 nt, Artificial Sequence
  Synthetic oligonucleotide: CTLA4-196
gugucaacucagugaaa

SEQ ID NO: 46026 - RNA, 17 nt, Artificial Sequence
  Synthetic oligonucleotide: CTLA4-129
uagcauggaaaagccaa

SEQ ID NO: 46027 - RNA, 17 nt, Artificial Sequence
  Synthetic oligonucleotide: CTLA4-157
uaccugggcauaggcaa

SEQ ID NO: 46028 - RNA, 17 nt, Artificial Sequence
  Synthetic oligonucleotide: CTLA4-80
aucccugucuucugcaa

SEQ ID NO: 46029 - RNA, 17 nt, Artificial Sequence
  Synthetic oligonucleotide: CTLA4-76
uggauuucagcggcaca

SEQ ID NO: 46030 - RNA, 17 nt, Artificial Sequence
  Synthetic oligonucleotide: CTLA4-132
caccuuugcagaagaca

SEQ ID NO: 46031 - RNA, 17 nt, Artificial Sequence
  Synthetic oligonucleotide: CTLA4-105
acugagggccauggaca

SEQ ID NO: 46032 - RNA, 17 nt, Artificial Sequence
  Synthetic oligonucleotide: CTLA4-140
aaauccaaggcaagcca

SEQ ID NO: 46033 - RNA, 17 nt, Artificial Sequence
  Synthetic oligonucleotide: CTLA4-104
ccaaggacugagggcca

SEQ ID NO: 46034 - RNA, 17 nt, Artificial Sequence
  Synthetic oligonucleotide: CTLA4-139
ugugccgcugaaaucca

SEQ ID NO: 46035 - RNA, 17 nt, Artificial Sequence
  Synthetic oligonucleotide: CTLA4-101
gugaaccucacuaucca

SEQ ID NO: 46036 - RNA, 17 nt, Artificial Sequence
  Synthetic oligonucleotide: CTLA4-128
cacgugcauugcuagca

SEQ ID NO: 46037 - RNA, 17 nt, Artificial Sequence
  Synthetic oligonucleotide: CTLA4-107
gggacucuacaucugca

SEQ ID NO: 46038 - RNA, 17 nt, Artificial Sequence
  Synthetic oligonucleotide: CTLA4-98
agaugauuccaucugca

SEQ ID NO: 46039 - RNA, 17 nt, Artificial Sequence
  Synthetic oligonucleotide: CTLA4-135
aaaaacaggagagugca

SEQ ID NO: 46040 - RNA, 17 nt, Artificial Sequence
  Synthetic oligonucleotide: CTLA4-82
cuuuuggagcaugaaga

SEQ ID NO: 46041 - RNA, 17 nt, Artificial Sequence
  Synthetic oligonucleotide: CTLA4-114
ggaggugcccgugcaga

SEQ ID NO: 46042 - RNA, 17 nt, Artificial Sequence
  Synthetic oligonucleotide: CTLA4-116
gauggaaucaucuagga

SEQ ID NO: 46043 - RNA, 17 nt, Artificial Sequence
  Synthetic oligonucleotide: CTLA4-103
cacuauccaaggacuga

SEQ ID NO: 46044 - RNA, 17 nt, Artificial Sequence
  Synthetic oligonucleotide: CTLA4-141
ggcaagccauggcuuua

SEQ ID NO: 46045 - RNA, 17 nt, Artificial Sequence
  Synthetic oligonucleotide: CTLA4-133
ugaagagaagaaaaaac

SEQ ID NO: 46046 - RNA, 17 nt, Artificial Sequence
  Synthetic oligonucleotide: CTLA4-106
cugagggccauggacac

SEQ ID NO: 46047 - RNA, 17 nt, Artificial Sequence
  Synthetic oligonucleotide: CTLA4-112
guucacuugauuuccac

SEQ ID NO: 46048 - RNA, 17 nt, Artificial Sequence
  Synthetic oligonucleotide: CTLA4-99
gaugauuccaucugcac

SEQ ID NO: 46049 - RNA, 17 nt, Artificial Sequence
  Synthetic oligonucleotide: CTLA4-131
ucaccuuugcagaagac

SEQ ID NO: 46050 - RNA, 17 nt, Artificial Sequence
  Synthetic oligonucleotide: CTLA4-85
ccagccugcugugguac

SEQ ID NO: 46051 - RNA, 17 nt, Artificial Sequence
  Synthetic oligonucleotide: CTLA4-77
caaggcucagcugaacc

SEQ ID NO: 46052 - RNA, 17 nt, Artificial Sequence
  Synthetic oligonucleotide: CTLA4-118
cacagacuucagucacc

SEQ ID NO: 46053 - RNA, 17 nt, Artificial Sequence
  Synthetic oligonucleotide: CTLA4-119
gccgaagcacugucacc

SEQ ID NO: 46054 - RNA, 17 nt, Artificial Sequence
  Synthetic oligonucleotide: CTLA4-79
accuggcuaccaggacc

SEQ ID NO: 46055 - RNA, 17 nt, Artificial Sequence
  Synthetic oligonucleotide: CTLA4-78
agcugaaccuggcuacc

SEQ ID NO: 46056 - RNA, 17 nt, Artificial Sequence
  Synthetic oligonucleotide: CTLA4-93
ucggcaggcugacagcc

SEQ ID NO: 46057 - RNA, 17 nt, Artificial Sequence
  Synthetic oligonucleotide: CTLA4-138
gccagguccugguagcc

SEQ ID NO: 46058 - RNA, 17 nt, Artificial Sequence
  Synthetic oligonucleotide: CTLA4-136
caggagagugcagggcc

SEQ ID NO: 46059 - RNA, 17 nt, Artificial Sequence
  Synthetic oligonucleotide: CTLA4-121
accucaguggcuuugcc

SEQ ID NO: 46060 - RNA, 17 nt, Artificial Sequence
  Synthetic oligonucleotide: CTLA4-87
ugugaguaugcaucucc

SEQ ID NO: 46061 - RNA, 17 nt, Artificial Sequence
  Synthetic oligonucleotide: CTLA4-137
agugcagggccaggucc

SEQ ID NO: 46062 - RNA, 17 nt, Artificial Sequence
  Synthetic oligonucleotide: CTLA4-90
caaagccacugaggucc

SEQ ID NO: 46063 - RNA, 17 nt, Artificial Sequence
  Synthetic oligonucleotide: CTLA4-122
auacucacacacaaagc

SEQ ID NO: 46064 - RNA, 17 nt, Artificial Sequence
  Synthetic oligonucleotide: CTLA4-125
cuggccaguaccacagc

SEQ ID NO: 46065 - RNA, 17 nt, Artificial Sequence
  Synthetic oligonucleotide: CTLA4-126
ccaguaccacagcaggc

SEQ ID NO: 46066 - RNA, 17 nt, Artificial Sequence
  Synthetic oligonucleotide: CTLA4-124
ggcgaugccucggcugc

SEQ ID NO: 46067 - RNA, 17 nt, Artificial Sequence
  Synthetic oligonucleotide: CTLA4-134
aaaaaacaggagagugc

SEQ ID NO: 46068 - RNA, 17 nt, Artificial Sequence
  Synthetic oligonucleotide: CTLA4-195
caccaauuacauaaauc

SEQ ID NO: 46069 - RNA, 17 nt, Artificial Sequence
  Synthetic oligonucleotide: CTLA4-89
gcaaagccacugagguc

SEQ ID NO: 46070 - RNA, 17 nt, Artificial Sequence
  Synthetic oligonucleotide: CTLA4-100
ugcacgggcaccuccag

SEQ ID NO: 46071 - RNA, 17 nt, Artificial Sequence
  Synthetic oligonucleotide: CTLA4-120
ugucacccggaccucag

SEQ ID NO: 46072 - RNA, 17 nt, Artificial Sequence
  Synthetic oligonucleotide: CTLA4-75
cuugccuuggauuucag

SEQ ID NO: 46073 - RNA, 17 nt, Artificial Sequence
  Synthetic oligonucleotide: CTLA4-143
ccauggcuuuaugggag

SEQ ID NO: 46074 - RNA, 17 nt, Artificial Sequence
  Synthetic oligonucleotide: CTLA4-86
guacuggccagcagccg

SEQ ID NO: 46075 - RNA, 17 nt, Artificial Sequence
  Synthetic oligonucleotide: CTLA4-108
acucuacaucugcaagg

SEQ ID NO: 46076 - RNA, 17 nt, Artificial Sequence
  Synthetic oligonucleotide: CTLA4-1380
cccagguaguauggcgg

SEQ ID NO: 46077 - RNA, 17 nt, Artificial Sequence
  Synthetic oligonucleotide: CTLA4-1381
augcccagguaguaugg

SEQ ID NO: 46078 - RNA, 17 nt, Artificial Sequence
  Synthetic oligonucleotide: CTLA4-113
cacuugauuuccacugg

SEQ ID NO: 46079 - RNA, 17 nt, Artificial Sequence
  Synthetic oligonucleotide: CTLA4-88
uccaggcaaagccacug

SEQ ID NO: 46080 - RNA, 17 nt, Artificial Sequence
  Synthetic oligonucleotide: CTLA4-102
ucacuauccaaggacug

SEQ ID NO: 46081 - RNA, 17 nt, Artificial Sequence
  Synthetic oligonucleotide: CTLA4-84
cguggcccagccugcug

SEQ ID NO: 46082 - RNA, 17 nt, Artificial Sequence
  Synthetic oligonucleotide: CTLA4-94
ggugacugaagucugug

SEQ ID NO: 46083 - RNA, 17 nt, Artificial Sequence
  Synthetic oligonucleotide: CTLA4-158
acccagauuuauguaau

SEQ ID NO: 46084 - RNA, 17 nt, Artificial Sequence
  Synthetic oligonucleotide: CTLA4-123
caaagcuggcgaugccu

SEQ ID NO: 46085 - RNA, 17 nt, Artificial Sequence
  Synthetic oligonucleotide: CTLA4-74
aaagccauggcuugccu

SEQ ID NO: 46086 - RNA, 17 nt, Artificial Sequence
  Synthetic oligonucleotide: CTLA4-110
ccauggcccucaguccu

SEQ ID NO: 46087 - RNA, 17 nt, Artificial Sequence
  Synthetic oligonucleotide: CTLA4-127
caguaccacagcaggcu

SEQ ID NO: 46088 - RNA, 17 nt, Artificial Sequence
  Synthetic oligonucleotide: CTLA4-194
accaauuacauaaaucu

SEQ ID NO: 46089 - RNA, 17 nt, Artificial Sequence
  Synthetic oligonucleotide: CTLA4-115
ugcagauggaaucaucu

SEQ ID NO: 46090 - RNA, 17 nt, Artificial Sequence
  Synthetic oligonucleotide: CTLA4-117
cucauuccccaucaugu

SEQ ID NO: 46091 - RNA, 17 nt, Artificial Sequence
  Synthetic oligonucleotide: CTLA4-81
aaggugagugagacuuu

SEQ ID NO: 46092 - RNA, 20 nt, Artificial Sequence
  Synthetic oligonucleotide: CTLA4-58
gcuagcauggaaaagccaaa

SEQ ID NO: 46093 - RNA, 20 nt, Artificial Sequence
  Synthetic oligonucleotide: CTLA4-57
ugcuagcauggaaaagccaa

SEQ ID NO: 46094 - RNA, 20 nt, Artificial Sequence
  Synthetic oligonucleotide: CTLA4-8
uucaucccugucuucugcaa

SEQ ID NO: 46095 - RNA, 20 nt, Artificial Sequence
  Synthetic oligonucleotide: CTLA4-60
acucaccuuugcagaagaca

SEQ ID NO: 46096 - RNA, 20 nt, Artificial Sequence
  Synthetic oligonucleotide: CTLA4-33
aggacugagggccauggaca

SEQ ID NO: 46097 - RNA, 20 nt, Artificial Sequence
  Synthetic oligonucleotide: CTLA4-68
cugaaauccaaggcaagcca

SEQ ID NO: 46098 - RNA, 20 nt, Artificial Sequence
  Synthetic oligonucleotide: CTLA4-32
uauccaaggacugagggcca

SEQ ID NO: 46099 - RNA, 20 nt, Artificial Sequence
  Synthetic oligonucleotide: CTLA4-29
caagugaaccucacuaucca

SEQ ID NO: 46100 - RNA, 20 nt, Artificial Sequence
  Synthetic oligonucleotide: CTLA4-37
gauguagagucccgugucca

SEQ ID NO: 46101 - RNA, 20 nt, Artificial Sequence
  Synthetic oligonucleotide: CTLA4-35
cacgggacucuacaucugca

SEQ ID NO: 46102 - RNA, 20 nt, Artificial Sequence
  Synthetic oligonucleotide: CTLA4-26
ccuagaugauuccaucugca

SEQ ID NO: 46103 - RNA, 20 nt, Artificial Sequence
  Synthetic oligonucleotide: CTLA4-63
agaaaaaacaggagagugca

SEQ ID NO: 46104 - RNA, 20 nt, Artificial Sequence
  Synthetic oligonucleotide: CTLA4-10
agacuuuuggagcaugaaga

SEQ ID NO: 46105 - RNA, 20 nt, Artificial Sequence
  Synthetic oligonucleotide: CTLA4-42
acuggaggugcccgugcaga

SEQ ID NO: 46106 - RNA, 20 nt, Artificial Sequence
  Synthetic oligonucleotide: CTLA4-44
gcagauggaaucaucuagga

SEQ ID NO: 46107 - RNA, 20 nt, Artificial Sequence
  Synthetic oligonucleotide: CTLA4-31
ccucacuauccaaggacuga

SEQ ID NO: 46108 - RNA, 20 nt, Artificial Sequence
  Synthetic oligonucleotide: CTLA4-69
caaggcaagccauggcuuua

SEQ ID NO: 46109 - RNA, 20 nt, Artificial Sequence
  Synthetic oligonucleotide: CTLA4-61
ggaugaagagaagaaaaaac

SEQ ID NO: 46110 - RNA, 20 nt, Artificial Sequence
  Synthetic oligonucleotide: CTLA4-34
ggacugagggccauggacac

SEQ ID NO: 46111 - RNA, 20 nt, Artificial Sequence
  Synthetic oligonucleotide: CTLA4-40
gagguucacuugauuuccac

SEQ ID NO: 46112 - RNA, 20 nt, Artificial Sequence
  Synthetic oligonucleotide: CTLA4-5
gcacaaggcucagcugaacc

SEQ ID NO: 46113 - RNA, 20 nt, Artificial Sequence
  Synthetic oligonucleotide: CTLA4-46
ccgcacagacuucagucacc

SEQ ID NO: 46114 - RNA, 20 nt, Artificial Sequence
  Synthetic oligonucleotide: CTLA4-47
ccugccgaagcacugucacc

SEQ ID NO: 46115 - RNA, 20 nt, Artificial Sequence
  Synthetic oligonucleotide: CTLA4-7
ugaaccuggcuaccaggacc

SEQ ID NO: 46116 - RNA, 20 nt, Artificial Sequence
  Synthetic oligonucleotide: CTLA4-6
cucagcugaaccuggcuacc

SEQ ID NO: 46117 - RNA, 20 nt, Artificial Sequence
  Synthetic oligonucleotide: CTLA4-21
gcuucggcaggcugacagcc

SEQ ID NO: 46118 - RNA, 20 nt, Artificial Sequence
  Synthetic oligonucleotide: CTLA4-66
agggccagguccugguagcc

SEQ ID NO: 46119 - RNA, 20 nt, Artificial Sequence
  Synthetic oligonucleotide: CTLA4-64
aaacaggagagugcagggcc

SEQ ID NO: 46120 - RNA, 20 nt, Artificial Sequence
  Synthetic oligonucleotide: CTLA4-49
cggaccucaguggcuuugcc

SEQ ID NO: 46121 - RNA, 20 nt, Artificial Sequence
  Synthetic oligonucleotide: CTLA4-15
gugugugaguaugcaucucc

SEQ ID NO: 46122 - RNA, 20 nt, Artificial Sequence
  Synthetic oligonucleotide: CTLA4-65
gagagugcagggccaggucc

SEQ ID NO: 46123 - RNA, 20 nt, Artificial Sequence
  Synthetic oligonucleotide: CTLA4-18
aggcaaagccacugaggucc

SEQ ID NO: 46124 - RNA, 20 nt, Artificial Sequence
  Synthetic oligonucleotide: CTLA4-50
ugcauacucacacacaaagc

SEQ ID NO: 46125 - RNA, 20 nt, Artificial Sequence
  Synthetic oligonucleotide: CTLA4-53
cugcuggccaguaccacagc

SEQ ID NO: 46126 - RNA, 20 nt, Artificial Sequence
  Synthetic oligonucleotide: CTLA4-54
uggccaguaccacagcaggc

SEQ ID NO: 46127 - RNA, 20 nt, Artificial Sequence
  Synthetic oligonucleotide: CTLA4-52
gcuggcgaugccucggcugc

SEQ ID NO: 46128 - RNA, 20 nt, Artificial Sequence
  Synthetic oligonucleotide: CTLA4-62
aagaaaaaacaggagagugc

SEQ ID NO: 46129 - RNA, 20 nt, Artificial Sequence
  Synthetic oligonucleotide: CTLA4-172
gcucaccaauuacauaaauc

SEQ ID NO: 46130 - RNA, 20 nt, Artificial Sequence
  Synthetic oligonucleotide: CTLA4-17
caggcaaagccacugagguc

SEQ ID NO: 46131 - RNA, 20 nt, Artificial Sequence
  Synthetic oligonucleotide: CTLA4-28
aucugcacgggcaccuccag

SEQ ID NO: 46132 - RNA, 20 nt, Artificial Sequence
  Synthetic oligonucleotide: CTLA4-48
cacugucacccggaccucag

SEQ ID NO: 46133 - RNA, 20 nt, Artificial Sequence
  Synthetic oligonucleotide: CTLA4-3
uggcuugccuuggauuucag

SEQ ID NO: 46134 - RNA, 20 nt, Artificial Sequence
  Synthetic oligonucleotide: CTLA4-14
gugguacuggccagcagccg

SEQ ID NO: 46135 - RNA, 20 nt, Artificial Sequence
  Synthetic oligonucleotide: CTLA4-36
gggacucuacaucugcaagg

SEQ ID NO: 46136 - RNA, 20 nt, Artificial Sequence
  Synthetic oligonucleotide: CTLA4-1382
augcccagguaguauggcgg

SEQ ID NO: 46137 - RNA, 20 nt, Artificial Sequence
  Synthetic oligonucleotide: CTLA4-41
guucacuugauuuccacugg

SEQ ID NO: 46138 - RNA, 20 nt, Artificial Sequence
  Synthetic oligonucleotide: CTLA4-16
aucuccaggcaaagccacug

SEQ ID NO: 46139 - RNA, 20 nt, Artificial Sequence
  Synthetic oligonucleotide: CTLA4-30
accucacuauccaaggacug

SEQ ID NO: 46140 - RNA, 20 nt, Artificial Sequence
  Synthetic oligonucleotide: CTLA4-12
gcacguggcccagccugcug

SEQ ID NO: 46141 - RNA, 20 nt, Artificial Sequence
  Synthetic oligonucleotide: CTLA4-22
ccaggugacugaagucugug

SEQ ID NO: 46142 - RNA, 20 nt, Artificial Sequence
  Synthetic oligonucleotide: CTLA4-146
ggaacccagauuuauguaau

SEQ ID NO: 46143 - RNA, 20 nt, Artificial Sequence
  Synthetic oligonucleotide: CTLA4-70
aaggcaagccauggcuuuau

SEQ ID NO: 46144 - RNA, 20 nt, Artificial Sequence
  Synthetic oligonucleotide: CTLA4-51
acacaaagcuggcgaugccu

SEQ ID NO: 46145 - RNA, 20 nt, Artificial Sequence
  Synthetic oligonucleotide: CTLA4-38
uguccauggcccucaguccu

SEQ ID NO: 46146 - RNA, 20 nt, Artificial Sequence
  Synthetic oligonucleotide: CTLA4-55
ggccaguaccacagcaggcu

SEQ ID NO: 46147 - RNA, 20 nt, Artificial Sequence
  Synthetic oligonucleotide: CTLA4-171
cucaccaauuacauaaaucu

SEQ ID NO: 46148 - RNA, 20 nt, Artificial Sequence
  Synthetic oligonucleotide: CTLA4-43
ccgugcagauggaaucaucu

SEQ ID NO: 46149 - RNA, 20 nt, Artificial Sequence
  Synthetic oligonucleotide: CTLA4-9
gcaaaggugagugagacuuu

SEQ ID NO: 46150 - RNA, 17 nt, Artificial Sequence
  Synthetic oligonucleotide: CTLA4-163
uguuucuuugagcaaaa

SEQ ID NO: 46151 - RNA, 17 nt, Artificial Sequence
  Synthetic oligonucleotide: CTLA4-215
gacucucuucuucauaa

SEQ ID NO: 46152 - RNA, 17 nt, Artificial Sequence
  Synthetic oligonucleotide: CTLA4-167
gaagcccucuuacaaca

SEQ ID NO: 46153 - RNA, 17 nt, Artificial Sequence
  Synthetic oligonucleotide: CTLA4-198
aagucagaaucugggca

SEQ ID NO: 46154 - RNA, 17 nt, Artificial Sequence
  Synthetic oligonucleotide: CTLA4-203
ccgaacuaacugcugca

SEQ ID NO: 46155 - RNA, 17 nt, Artificial Sequence
  Synthetic oligonucleotide: CTLA4-205
agaccccuguuguaaga

SEQ ID NO: 46156 - RNA, 17 nt, Artificial Sequence
  Synthetic oligonucleotide: CTLA4-165
ggugaguguggugcuga

SEQ ID NO: 46157 - RNA, 17 nt, Artificial Sequence
  Synthetic oligonucleotide: CTLA4-214
aaugguuucucaauuga

SEQ ID NO: 46158 - RNA, 17 nt, Artificial Sequence
  Synthetic oligonucleotide: CTLA4-212
uugaugggaauaaaaua

SEQ ID NO: 46159 - RNA, 17 nt, Artificial Sequence
  Synthetic oligonucleotide: CTLA4-166
agaagcccucuuacaac

SEQ ID NO: 46160 - RNA, 17 nt, Artificial Sequence
  Synthetic oligonucleotide: CTLA4-200
aggaggaagucagaauc

SEQ ID NO: 46161 - RNA, 17 nt, Artificial Sequence
  Synthetic oligonucleotide: CTLA4-159
auucugacuuccuccuc

SEQ ID NO: 46162 - RNA, 17 nt, Artificial Sequence
  Synthetic oligonucleotide: CTLA4-211
aauugcuuuucacauuc

SEQ ID NO: 46163 - RNA, 17 nt, Artificial Sequence
  Synthetic oligonucleotide: CTLA4-161
cuugcagcaguuaguuc

SEQ ID NO: 46164 - RNA, 17 nt, Artificial Sequence
  Synthetic oligonucleotide: CTLA4-197
gaaucugggcacgguuc

SEQ ID NO: 46165 - RNA, 17 nt, Artificial Sequence
  Synthetic oligonucleotide: CTLA4-206
uagaccccuguuguaag

SEQ ID NO: 46166 - RNA, 17 nt, Artificial Sequence
  Synthetic oligonucleotide: CTLA4-168
aagcccucuuacaacag

SEQ ID NO: 46167 - RNA, 17 nt, Artificial Sequence
  Synthetic oligonucleotide: CTLA4-202
cugcugcaaggauccag

SEQ ID NO: 46168 - RNA, 17 nt, Artificial Sequence
  Synthetic oligonucleotide: CTLA4-162
uugcagcaguuaguucg

SEQ ID NO: 46169 - RNA, 17 nt, Artificial Sequence
  Synthetic oligonucleotide: CTLA4-201
cugcaaggauccagagg

SEQ ID NO: 46170 - RNA, 17 nt, Artificial Sequence
  Synthetic oligonucleotide: CTLA4-207
cauucuggcucuguugg

SEQ ID NO: 46171 - RNA, 17 nt, Artificial Sequence
  Synthetic oligonucleotide: CTLA4-164
gagcaaaauggugagug

SEQ ID NO: 46172 - RNA, 17 nt, Artificial Sequence
  Synthetic oligonucleotide: CTLA4-204
ucaaagaaacagcugug

SEQ ID NO: 46173 - RNA, 17 nt, Artificial Sequence
  Synthetic oligonucleotide: CTLA4-208
acauucuggcucuguug

SEQ ID NO: 46174 - RNA, 17 nt, Artificial Sequence
  Synthetic oligonucleotide: CTLA4-213
augguuucucaauugau

SEQ ID NO: 46175 - RNA, 17 nt, Artificial Sequence
  Synthetic oligonucleotide: CTLA4-199
ggaggaagucagaaucu

SEQ ID NO: 46176 - RNA, 17 nt, Artificial Sequence
  Synthetic oligonucleotide: CTLA4-210
ucacauucuggcucugu

SEQ ID NO: 46177 - RNA, 17 nt, Artificial Sequence
  Synthetic oligonucleotide: CTLA4-160
ccuugcagcaguuaguu

SEQ ID NO: 46178 - RNA, 17 nt, Artificial Sequence
  Synthetic oligonucleotide: CTLA4-209
cacauucuggcucuguu

SEQ ID NO: 46179 - RNA, 20 nt, Artificial Sequence
  Synthetic oligonucleotide: CTLA4-151
agcuguuucuuugagcaaaa

SEQ ID NO: 46180 - RNA, 20 nt, Artificial Sequence
  Synthetic oligonucleotide: CTLA4-191
auggacucucuucuucauaa

SEQ ID NO: 46181 - RNA, 20 nt, Artificial Sequence
  Synthetic oligonucleotide: CTLA4-155
aaagaagcccucuuacaaca

SEQ ID NO: 46182 - RNA, 20 nt, Artificial Sequence
  Synthetic oligonucleotide: CTLA4-174
aggaagucagaaucugggca

SEQ ID NO: 46183 - RNA, 20 nt, Artificial Sequence
  Synthetic oligonucleotide: CTLA4-179
accccgaacuaacugcugca

SEQ ID NO: 46184 - RNA, 20 nt, Artificial Sequence
  Synthetic oligonucleotide: CTLA4-181
cauagaccccuguuguaaga

SEQ ID NO: 46185 - RNA, 20 nt, Artificial Sequence
  Synthetic oligonucleotide: CTLA4-153
aauggugaguguggugcuga

SEQ ID NO: 46186 - RNA, 20 nt, Artificial Sequence
  Synthetic oligonucleotide: CTLA4-190
cauaaugguuucucaauuga

SEQ ID NO: 46187 - RNA, 20 nt, Artificial Sequence
  Synthetic oligonucleotide: CTLA4-188
caauugaugggaauaaaaua

SEQ ID NO: 46188 - RNA, 20 nt, Artificial Sequence
  Synthetic oligonucleotide: CTLA4-154
aaaagaagcccucuuacaac

SEQ ID NO: 46189 - RNA, 20 nt, Artificial Sequence
  Synthetic oligonucleotide: CTLA4-176
cagaggaggaagucagaauc

SEQ ID NO: 46190 - RNA, 20 nt, Artificial Sequence
  Synthetic oligonucleotide: CTLA4-147
cagauucugacuuccuccuc

SEQ ID NO: 46191 - RNA, 20 nt, Artificial Sequence
  Synthetic oligonucleotide: CTLA4-187
ugaaauugcuuuucacauuc

SEQ ID NO: 46192 - RNA, 20 nt, Artificial Sequence
  Synthetic oligonucleotide: CTLA4-149
auccuugcagcaguuaguuc

SEQ ID NO: 46193 - RNA, 20 nt, Artificial Sequence
  Synthetic oligonucleotide: CTLA4-173
ucagaaucugggcacgguuc

SEQ ID NO: 46194 - RNA, 20 nt, Artificial Sequence
  Synthetic oligonucleotide: CTLA4-182
acauagaccccuguuguaag

SEQ ID NO: 46195 - RNA, 20 nt, Artificial Sequence
  Synthetic oligonucleotide: CTLA4-156
aagaagcccucuuacaacag

SEQ ID NO: 46196 - RNA, 20 nt, Artificial Sequence
  Synthetic oligonucleotide: CTLA4-178
uaacugcugcaaggauccag

SEQ ID NO: 46197 - RNA, 20 nt, Artificial Sequence
  Synthetic oligonucleotide: CTLA4-150
uccuugcagcaguuaguucg

SEQ ID NO: 46198 - RNA, 20 nt, Artificial Sequence
  Synthetic oligonucleotide: CTLA4-177
cugcugcaaggauccagagg

SEQ ID NO: 46199 - RNA, 20 nt, Artificial Sequence
  Synthetic oligonucleotide: CTLA4-183
ucacauucuggcucuguugg

SEQ ID NO: 46200 - RNA, 20 nt, Artificial Sequence
  Synthetic oligonucleotide: CTLA4-152
uuugagcaaaauggugagug

SEQ ID NO: 46201 - RNA, 20 nt, Artificial Sequence
  Synthetic oligonucleotide: CTLA4-180
ugcucaaagaaacagcugug

SEQ ID NO: 46202 - RNA, 20 nt, Artificial Sequence
  Synthetic oligonucleotide: CTLA4-184
uucacauucuggcucuguug

SEQ ID NO: 46203 - RNA, 20 nt, Artificial Sequence
  Synthetic oligonucleotide: CTLA4-189
auaaugguuucucaauugau

SEQ ID NO: 46204 - RNA, 20 nt, Artificial Sequence
  Synthetic oligonucleotide: CTLA4-175
agaggaggaagucagaaucu

SEQ ID NO: 46205 - RNA, 20 nt, Artificial Sequence
  Synthetic oligonucleotide: CTLA4-186
uuuucacauucuggcucugu

SEQ ID NO: 46206 - RNA, 20 nt, Artificial Sequence
  Synthetic oligonucleotide: CTLA4-148
gauccuugcagcaguuaguu

SEQ ID NO: 46207 - RNA, 20 nt, Artificial Sequence
  Synthetic oligonucleotide: CTLA4-185
uuucacauucuggcucuguu

SEQ ID NO: 46208 - RNA, 21 nt, Artificial Sequence
  Synthetic oligonucleotide: CTLA4-1383
cacuggaggugcccgugcaga

SEQ ID NO: 46209 - RNA, 22 nt, Artificial Sequence
  Synthetic oligonucleotide: CTLA4-1384
ccacuggaggugcccgugcaga

SEQ ID NO: 46210 - RNA, 23 nt, Artificial Sequence
  Synthetic oligonucleotide: CTLA4-1385
uccacuggaggugcccgugcaga

SEQ ID NO: 46211 - RNA, 24 nt, Artificial Sequence
  Synthetic oligonucleotide: CTLA4-1386
uuccacuggaggugcccgugcaga

SEQ ID NO: 46212 - RNA, 18 nt, Artificial Sequence
  Synthetic oligonucleotide: CTLA4-1387
cucaccuuugcagaagac

SEQ ID NO: 46213 - RNA, 19 nt, Artificial Sequence
  Synthetic oligonucleotide: CTLA4-1388
acucaccuuugcagaagac

SEQ ID NO: 46214 - RNA, 20 nt, Artificial Sequence
  Synthetic oligonucleotide: CTLA4-59
cacucaccuuugcagaagac

SEQ ID NO: 46215 - RNA, 21 nt, Artificial Sequence
  Synthetic oligonucleotide: CTLA4-1389
ucacucaccuuugcagaagac

SEQ ID NO: 46216 - RNA, 22 nt, Artificial Sequence
  Synthetic oligonucleotide: CTLA4-1390
cucacucaccuuugcagaagac

SEQ ID NO: 46217 - RNA, 23 nt, Artificial Sequence
  Synthetic oligonucleotide: CTLA4-1391
ucucacucaccuuugcagaagac

SEQ ID NO: 46218 - RNA, 24 nt, Artificial Sequence
  Synthetic oligonucleotide: CTLA4-1392
gucucacucaccuuugcagaagac

SEQ ID NO: 46219 - RNA, 21 nt, Artificial Sequence
  Synthetic oligonucleotide: CTLA4-1393
cguguccauggcccucagucc

SEQ ID NO: 46220 - RNA, 22 nt, Artificial Sequence
  Synthetic oligonucleotide: CTLA4-1394
ccguguccauggcccucagucc

SEQ ID NO: 46221 - RNA, 23 nt, Artificial Sequence
  Synthetic oligonucleotide: CTLA4-1395
cccguguccauggcccucagucc

SEQ ID NO: 46222 - RNA, 24 nt, Artificial Sequence
  Synthetic oligonucleotide: CTLA4-1396
ucccguguccauggcccucagucc

SEQ ID NO: 46223 - RNA, 18 nt, Artificial Sequence
  Synthetic oligonucleotide: CTLA4-1397
ugcccagguaguauggcg

SEQ ID NO: 46224 - RNA, 19 nt, Artificial Sequence
  Synthetic oligonucleotide: CTLA4-1398
augcccagguaguauggcg

SEQ ID NO: 46225 - RNA, 20 nt, Artificial Sequence
  Synthetic oligonucleotide: CTLA4-1399
uaugcccagguaguauggcg

SEQ ID NO: 46226 - RNA, 21 nt, Artificial Sequence
  Synthetic oligonucleotide: CTLA4-1400
cuaugcccagguaguauggcg

SEQ ID NO: 46227 - RNA, 22 nt, Artificial Sequence
  Synthetic oligonucleotide: CTLA4-1401
ccuaugcccagguaguauggcg

SEQ ID NO: 46228 - RNA, 23 nt, Artificial Sequence
  Synthetic oligonucleotide: CTLA4-1402
gccuaugcccagguaguauggcg

SEQ ID NO: 46229 - RNA, 24 nt, Artificial Sequence
  Synthetic oligonucleotide: CTLA4-1403
ugccuaugcccagguaguauggcg

SEQ ID NO: 46230 - RNA, 18 nt, Artificial Sequence
  Synthetic oligonucleotide: CTLA4-1404
cucaccaauuacauaaau

SEQ ID NO: 46231 - RNA, 19 nt, Artificial Sequence
  Synthetic oligonucleotide: CTLA4-1405
gcucaccaauuacauaaau

SEQ ID NO: 46232 - RNA, 20 nt, Artificial Sequence
  Synthetic oligonucleotide: CTLA4-394
ugcucaccaauuacauaaau

SEQ ID NO: 46233 - RNA, 21 nt, Artificial Sequence
  Synthetic oligonucleotide: CTLA4-1406
uugcucaccaauuacauaaau

SEQ ID NO: 46234 - RNA, 22 nt, Artificial Sequence
  Synthetic oligonucleotide: CTLA4-1407
uuugcucaccaauuacauaaau

SEQ ID NO: 46235 - RNA, 23 nt, Artificial Sequence
  Synthetic oligonucleotide: CTLA4-1408
cuuugcucaccaauuacauaaau

SEQ ID NO: 46236 - RNA, 24 nt, Artificial Sequence
  Synthetic oligonucleotide: CTLA4-1409
gcuuugcucaccaauuacauaaau

SEQ ID NO: 46237 - RNA, 21 nt, Artificial Sequence
  Synthetic oligonucleotide: CTLA4-1410
uuggugagcaaagccauuuca

SEQ ID NO: 46238 - RNA, 22 nt, Artificial Sequence
  Synthetic oligonucleotide: CTLA4-1411
auuggugagcaaagccauuuca

SEQ ID NO: 46239 - RNA, 23 nt, Artificial Sequence
  Synthetic oligonucleotide: CTLA4-1412
aauuggugagcaaagccauuuca

SEQ ID NO: 46240 - RNA, 24 nt, Artificial Sequence
  Synthetic oligonucleotide: CTLA4-1413
uaauuggugagcaaagccauuuca

SEQ ID NO: 46241 - RNA, 21 nt, Artificial Sequence
  Synthetic oligonucleotide: CTLA4-1414
cggcaaccuacaugaugggga

SEQ ID NO: 46242 - RNA, 22 nt, Artificial Sequence
  Synthetic oligonucleotide: CTLA4-1415
gcggcaaccuacaugaugggga

SEQ ID NO: 46243 - RNA, 23 nt, Artificial Sequence
  Synthetic oligonucleotide: CTLA4-1416
ugcggcaaccuacaugaugggga

SEQ ID NO: 46244 - RNA, 24 nt, Artificial Sequence
  Synthetic oligonucleotide: CTLA4-1417
gugcggcaaccuacaugaugggga

SEQ ID NO: 46245 - RNA, 18 nt, Artificial Sequence
  Synthetic oligonucleotide: CTLA4-1418
auaaagccauggcuugcc

SEQ ID NO: 46246 - RNA, 19 nt, Artificial Sequence
  Synthetic oligonucleotide: CTLA4-1419
cauaaagccauggcuugcc

SEQ ID NO: 46247 - RNA, 20 nt, Artificial Sequence
  Synthetic oligonucleotide: CTLA4-216
ccauaaagccauggcuugcc

SEQ ID NO: 46248 - RNA, 21 nt, Artificial Sequence
  Synthetic oligonucleotide: CTLA4-1420
cccauaaagccauggcuugcc

SEQ ID NO: 46249 - RNA, 22 nt, Artificial Sequence
  Synthetic oligonucleotide: CTLA4-1421
ucccauaaagccauggcuugcc

SEQ ID NO: 46250 - RNA, 23 nt, Artificial Sequence
  Synthetic oligonucleotide: CTLA4-1422
cucccauaaagccauggcuugcc

SEQ ID NO: 46251 - RNA, 24 nt, Artificial Sequence
  Synthetic oligonucleotide: CTLA4-1423
gcucccauaaagccauggcuugcc

SEQ ID NO: 46252 - RNA, 18 nt, Artificial Sequence
  Synthetic oligonucleotide: CTLA4-1424
gcggcaaccuacaugaug

SEQ ID NO: 46253 - RNA, 19 nt, Artificial Sequence
  Synthetic oligonucleotide: CTLA4-1425
ugcggcaaccuacaugaug

SEQ ID NO: 46254 - RNA, 20 nt, Artificial Sequence
  Synthetic oligonucleotide: CTLA4-25
gugcggcaaccuacaugaug

SEQ ID NO: 46255 - RNA, 21 nt, Artificial Sequence
  Synthetic oligonucleotide: CTLA4-1426
ugugcggcaaccuacaugaug

SEQ ID NO: 46256 - RNA, 22 nt, Artificial Sequence
  Synthetic oligonucleotide: CTLA4-1427
cugugcggcaaccuacaugaug

SEQ ID NO: 46257 - RNA, 23 nt, Artificial Sequence
  Synthetic oligonucleotide: CTLA4-1428
ucugugcggcaaccuacaugaug

SEQ ID NO: 46258 - RNA, 24 nt, Artificial Sequence
  Synthetic oligonucleotide: CTLA4-1429
gucugugcggcaaccuacaugaug

SEQ ID NO: 46259 - RNA, 21 nt, Artificial Sequence
  Synthetic oligonucleotide: CTLA4-1430
uccaggcaaagccacugaggu

SEQ ID NO: 46260 - RNA, 22 nt, Artificial Sequence
  Synthetic oligonucleotide: CTLA4-1431
cuccaggcaaagccacugaggu

SEQ ID NO: 46261 - RNA, 23 nt, Artificial Sequence
  Synthetic oligonucleotide: CTLA4-1432
ucuccaggcaaagccacugaggu

SEQ ID NO: 46262 - RNA, 24 nt, Artificial Sequence
  Synthetic oligonucleotide: CTLA4-1433
aucuccaggcaaagccacugaggu

SEQ ID NO: 46263 - RNA, 18 nt, Artificial Sequence
  Synthetic oligonucleotide: CTLA4-1434
gcaucgccagcuuugugu

SEQ ID NO: 46264 - RNA, 19 nt, Artificial Sequence
  Synthetic oligonucleotide: CTLA4-1435
ggcaucgccagcuuugugu

SEQ ID NO: 46265 - RNA, 20 nt, Artificial Sequence
  Synthetic oligonucleotide: CTLA4-225
aggcaucgccagcuuugugu

SEQ ID NO: 46266 - RNA, 21 nt, Artificial Sequence
  Synthetic oligonucleotide: CTLA4-1436
gaggcaucgccagcuuugugu

SEQ ID NO: 46267 - RNA, 22 nt, Artificial Sequence
  Synthetic oligonucleotide: CTLA4-1437
cgaggcaucgccagcuuugugu

SEQ ID NO: 46268 - RNA, 23 nt, Artificial Sequence
  Synthetic oligonucleotide: CTLA4-1438
ccgaggcaucgccagcuuugugu

SEQ ID NO: 46269 - RNA, 24 nt, Artificial Sequence
  Synthetic oligonucleotide: CTLA4-1439
gccgaggcaucgccagcuuugugu

SEQ ID NO: 46270 - RNA, 18 nt, Artificial Sequence
  Synthetic oligonucleotide: CTLA4-1440
uggaggugcccgugcaga

SEQ ID NO: 46271 - RNA, 19 nt, Artificial Sequence
  Synthetic oligonucleotide: CTLA4-1441
cuggaggugcccgugcaga

SEQ ID NO: 46272 - RNA, 20 nt, Artificial Sequence
  Synthetic oligonucleotide: CTLA4-42
acuggaggugcccgugcaga

SEQ ID NO: 46273 - RNA, 18 nt, Artificial Sequence
  Synthetic oligonucleotide: CTLA4-1442
guccauggcccucagucc

SEQ ID NO: 46274 - RNA, 19 nt, Artificial Sequence
  Synthetic oligonucleotide: CTLA4-1443
uguccauggcccucagucc

SEQ ID NO: 46275 - RNA, 20 nt, Artificial Sequence
  Synthetic oligonucleotide: CTLA4-309
guguccauggcccucagucc

SEQ ID NO: 46276 - RNA, 18 nt, Artificial Sequence
  Synthetic oligonucleotide: CTLA4-1444
gaagagaagaaaaaacag

SEQ ID NO: 46277 - RNA, 19 nt, Artificial Sequence
  Synthetic oligonucleotide: CTLA4-1445
ugaagagaagaaaaaacag

SEQ ID NO: 46278 - RNA, 20 nt, Artificial Sequence
  Synthetic oligonucleotide: CTLA4-282
augaagagaagaaaaaacag

SEQ ID NO: 46279 - RNA, 21 nt, Artificial Sequence
  Synthetic oligonucleotide: CTLA4-1446
gaugaagagaagaaaaaacag

SEQ ID NO: 46280 - RNA, 22 nt, Artificial Sequence
  Synthetic oligonucleotide: CTLA4-1447
ggaugaagagaagaaaaaacag

SEQ ID NO: 46281 - RNA, 23 nt, Artificial Sequence
  Synthetic oligonucleotide: CTLA4-1448
gggaugaagagaagaaaaaacag

SEQ ID NO: 46282 - RNA, 24 nt, Artificial Sequence
  Synthetic oligonucleotide: CTLA4-1449
agggaugaagagaagaaaaaacag

SEQ ID NO: 46283 - RNA, 18 nt, Artificial Sequence
  Synthetic oligonucleotide: CTLA4-1450
agcuccaccuugcagaug

SEQ ID NO: 46284 - RNA, 19 nt, Artificial Sequence
  Synthetic oligonucleotide: CTLA4-1451
gagcuccaccuugcagaug

SEQ ID NO: 46285 - RNA, 20 nt, Artificial Sequence
  Synthetic oligonucleotide: CTLA4-310
ugagcuccaccuugcagaug

SEQ ID NO: 46286 - RNA, 21 nt, Artificial Sequence
  Synthetic oligonucleotide: CTLA4-1452
augagcuccaccuugcagaug

SEQ ID NO: 46287 - RNA, 22 nt, Artificial Sequence
  Synthetic oligonucleotide: CTLA4-1453
caugagcuccaccuugcagaug

SEQ ID NO: 46288 - RNA, 23 nt, Artificial Sequence
  Synthetic oligonucleotide: CTLA4-1454
acaugagcuccaccuugcagaug

SEQ ID NO: 46289 - RNA, 24 nt, Artificial Sequence
  Synthetic oligonucleotide: CTLA4-1455
uacaugagcuccaccuugcagaug

SEQ ID NO: 46290 - RNA, 18 nt, Artificial Sequence
  Synthetic oligonucleotide: CTLA4-1456
gugagcaaagccauuuca

SEQ ID NO: 46291 - RNA, 19 nt, Artificial Sequence
  Synthetic oligonucleotide: CTLA4-1457
ggugagcaaagccauuuca

SEQ ID NO: 46292 - RNA, 20 nt, Artificial Sequence
  Synthetic oligonucleotide: CTLA4-349
uggugagcaaagccauuuca

SEQ ID NO: 46293 - RNA, 18 nt, Artificial Sequence
  Synthetic oligonucleotide: CTLA4-1458
caaccuacaugaugggga

SEQ ID NO: 46294 - RNA, 19 nt, Artificial Sequence
  Synthetic oligonucleotide: CTLA4-1459
gcaaccuacaugaugggga

SEQ ID NO: 46295 - RNA, 20 nt, Artificial Sequence
  Synthetic oligonucleotide: CTLA4-233
ggcaaccuacaugaugggga

SEQ ID NO: 46296 - RNA, 18 nt, Artificial Sequence
  Synthetic oligonucleotide: CTLA4-1460
ucccugucuucugcaaag

SEQ ID NO: 46297 - RNA, 19 nt, Artificial Sequence
  Synthetic oligonucleotide: CTLA4-1461
aucccugucuucugcaaag

SEQ ID NO: 46298 - RNA, 20 nt, Artificial Sequence
  Synthetic oligonucleotide: CTLA4-219
caucccugucuucugcaaag

SEQ ID NO: 46299 - RNA, 21 nt, Artificial Sequence
  Synthetic oligonucleotide: CTLA4-1462
ucaucccugucuucugcaaag

SEQ ID NO: 46300 - RNA, 22 nt, Artificial Sequence
  Synthetic oligonucleotide: CTLA4-1463
uucaucccugucuucugcaaag

SEQ ID NO: 46301 - RNA, 23 nt, Artificial Sequence
  Synthetic oligonucleotide: CTLA4-1464
cuucaucccugucuucugcaaag

SEQ ID NO: 46302 - RNA, 24 nt, Artificial Sequence
  Synthetic oligonucleotide: CTLA4-1465
ucuucaucccugucuucugcaaag

SEQ ID NO: 46303 - RNA, 18 nt, Artificial Sequence
  Synthetic oligonucleotide: CTLA4-1466
aggcaaagccacugaggu

SEQ ID NO: 46304 - RNA, 19 nt, Artificial Sequence
  Synthetic oligonucleotide: CTLA4-1467
caggcaaagccacugaggu

SEQ ID NO: 46305 - RNA, 20 nt, Artificial Sequence
  Synthetic oligonucleotide: CTLA4-227
ccaggcaaagccacugaggu

SEQ ID NO: 46306 - RNA, 18 nt, Artificial Sequence
  Synthetic oligonucleotide: CTLA4-1468
gaugaagagaagaaaaaa

SEQ ID NO: 46307 - RNA, 19 nt, Artificial Sequence
  Synthetic oligonucleotide: CTLA4-1469
ggaugaagagaagaaaaaa

SEQ ID NO: 46308 - RNA, 20 nt, Artificial Sequence
  Synthetic oligonucleotide: CTLA4-284
gggaugaagagaagaaaaaa

SEQ ID NO: 46309 - RNA, 21 nt, Artificial Sequence
  Synthetic oligonucleotide: CTLA4-1470
agggaugaagagaagaaaaaa

SEQ ID NO: 46310 - RNA, 22 nt, Artificial Sequence
  Synthetic oligonucleotide: CTLA4-1471
cagggaugaagagaagaaaaaa

SEQ ID NO: 46311 - RNA, 23 nt, Artificial Sequence
  Synthetic oligonucleotide: CTLA4-1472
acagggaugaagagaagaaaaaa

SEQ ID NO: 46312 - RNA, 24 nt, Artificial Sequence
  Synthetic oligonucleotide: CTLA4-1473
gacagggaugaagagaagaaaaaa

SEQ ID NO: 46313 - RNA, 18 nt, Artificial Sequence
  Synthetic oligonucleotide: CTLA4-1474
uagcauggaaaagccaaa

SEQ ID NO: 46314 - RNA, 19 nt, Artificial Sequence
  Synthetic oligonucleotide: CTLA4-1475
cuagcauggaaaagccaaa

SEQ ID NO: 46315 - RNA, 20 nt, Artificial Sequence
  Synthetic oligonucleotide: CTLA4-58
gcuagcauggaaaagccaaa

SEQ ID NO: 46316 - RNA, 21 nt, Artificial Sequence
  Synthetic oligonucleotide: CTLA4-1476
ugcuagcauggaaaagccaaa

SEQ ID NO: 46317 - RNA, 22 nt, Artificial Sequence
  Synthetic oligonucleotide: CTLA4-1477
uugcuagcauggaaaagccaaa

SEQ ID NO: 46318 - RNA, 23 nt, Artificial Sequence
  Synthetic oligonucleotide: CTLA4-1478
auugcuagcauggaaaagccaaa

SEQ ID NO: 46319 - RNA, 24 nt, Artificial Sequence
  Synthetic oligonucleotide: CTLA4-1479
cauugcuagcauggaaaagccaaa

SEQ ID NO: 46320 - RNA, 18 nt, Artificial Sequence
  Synthetic oligonucleotide: CTLA4-1480
cuagcauggaaaagccaa

SEQ ID NO: 46321 - RNA, 19 nt, Artificial Sequence
  Synthetic oligonucleotide: CTLA4-1481
gcuagcauggaaaagccaa

SEQ ID NO: 46322 - RNA, 20 nt, Artificial Sequence
  Synthetic oligonucleotide: CTLA4-57
ugcuagcauggaaaagccaa

SEQ ID NO: 46323 - RNA, 21 nt, Artificial Sequence
  Synthetic oligonucleotide: CTLA4-1482
uugcuagcauggaaaagccaa

SEQ ID NO: 46324 - RNA, 22 nt, Artificial Sequence
  Synthetic oligonucleotide: CTLA4-1483
auugcuagcauggaaaagccaa

SEQ ID NO: 46325 - RNA, 23 nt, Artificial Sequence
  Synthetic oligonucleotide: CTLA4-1484
cauugcuagcauggaaaagccaa

SEQ ID NO: 46326 - RNA, 24 nt, Artificial Sequence
  Synthetic oligonucleotide: CTLA4-1485
gcauugcuagcauggaaaagccaa

SEQ ID NO: 46327 - RNA, 18 nt, Artificial Sequence
  Synthetic oligonucleotide: CTLA4-1486
gcagaagacagggaugaa

SEQ ID NO: 46328 - RNA, 19 nt, Artificial Sequence
  Synthetic oligonucleotide: CTLA4-1487
ugcagaagacagggaugaa

SEQ ID NO: 46329 - RNA, 20 nt, Artificial Sequence
  Synthetic oligonucleotide: CTLA4-286
uugcagaagacagggaugaa

SEQ ID NO: 46330 - RNA, 21 nt, Artificial Sequence
  Synthetic oligonucleotide: CTLA4-1488
uuugcagaagacagggaugaa

SEQ ID NO: 46331 - RNA, 22 nt, Artificial Sequence
  Synthetic oligonucleotide: CTLA4-1489
cuuugcagaagacagggaugaa

SEQ ID NO: 46332 - RNA, 23 nt, Artificial Sequence
  Synthetic oligonucleotide: CTLA4-1490
ccuuugcagaagacagggaugaa

SEQ ID NO: 46333 - RNA, 24 nt, Artificial Sequence
  Synthetic oligonucleotide: CTLA4-1491
accuuugcagaagacagggaugaa

SEQ ID NO: 46334 - RNA, 18 nt, Artificial Sequence
  Synthetic oligonucleotide: CTLA4-1492
gcuagcauggaaaagcca

SEQ ID NO: 46335 - RNA, 19 nt, Artificial Sequence
  Synthetic oligonucleotide: CTLA4-1493
ugcuagcauggaaaagcca

SEQ ID NO: 46336 - RNA, 20 nt, Artificial Sequence
  Synthetic oligonucleotide: CTLA4-294
uugcuagcauggaaaagcca

SEQ ID NO: 46337 - RNA, 21 nt, Artificial Sequence
  Synthetic oligonucleotide: CTLA4-1494
auugcuagcauggaaaagcca

SEQ ID NO: 46338 - RNA, 22 nt, Artificial Sequence
  Synthetic oligonucleotide: CTLA4-1495
cauugcuagcauggaaaagcca

SEQ ID NO: 46339 - RNA, 23 nt, Artificial Sequence
  Synthetic oligonucleotide: CTLA4-1496
gcauugcuagcauggaaaagcca

SEQ ID NO: 46340 - RNA, 24 nt, Artificial Sequence
  Synthetic oligonucleotide: CTLA4-1497
ugcauugcuagcauggaaaagcca

SEQ ID NO: 46341 - RNA, 18 nt, Artificial Sequence
  Synthetic oligonucleotide: CTLA4-1498
agguucacuugauuucca

SEQ ID NO: 46342 - RNA, 19 nt, Artificial Sequence
  Synthetic oligonucleotide: CTLA4-1499
gagguucacuugauuucca

SEQ ID NO: 46343 - RNA, 20 nt, Artificial Sequence
  Synthetic oligonucleotide: CTLA4-307
ugagguucacuugauuucca

SEQ ID NO: 46344 - RNA, 21 nt, Artificial Sequence
  Synthetic oligonucleotide: CTLA4-1500
gugagguucacuugauuucca

SEQ ID NO: 46345 - RNA, 22 nt, Artificial Sequence
  Synthetic oligonucleotide: CTLA4-1501
agugagguucacuugauuucca

SEQ ID NO: 46346 - RNA, 23 nt, Artificial Sequence
  Synthetic oligonucleotide: CTLA4-1502
uagugagguucacuugauuucca

SEQ ID NO: 46347 - RNA, 24 nt, Artificial Sequence
  Synthetic oligonucleotide: CTLA4-1503
auagugagguucacuugauuucca

SEQ ID NO: 46348 - RNA, 18 nt, Artificial Sequence
  Synthetic oligonucleotide: CTLA4-1504
ccacgugcauugcuagca

SEQ ID NO: 46349 - RNA, 19 nt, Artificial Sequence
  Synthetic oligonucleotide: CTLA4-1505
gccacgugcauugcuagca

SEQ ID NO: 46350 - RNA, 20 nt, Artificial Sequence
  Synthetic oligonucleotide: CTLA4-56
ggccacgugcauugcuagca

SEQ ID NO: 46351 - RNA, 21 nt, Artificial Sequence
  Synthetic oligonucleotide: CTLA4-1506
gggccacgugcauugcuagca

SEQ ID NO: 46352 - RNA, 22 nt, Artificial Sequence
  Synthetic oligonucleotide: CTLA4-1507
ugggccacgugcauugcuagca

SEQ ID NO: 46353 - RNA, 23 nt, Artificial Sequence
  Synthetic oligonucleotide: CTLA4-1508
cugggccacgugcauugcuagca

SEQ ID NO: 46354 - RNA, 24 nt, Artificial Sequence
  Synthetic oligonucleotide: CTLA4-1509
gcugggccacgugcauugcuagca

SEQ ID NO: 46355 - RNA, 18 nt, Artificial Sequence
  Synthetic oligonucleotide: CTLA4-1510
acucaccuuugcagaaga

SEQ ID NO: 46356 - RNA, 19 nt, Artificial Sequence
  Synthetic oligonucleotide: CTLA4-1511
cacucaccuuugcagaaga

SEQ ID NO: 46357 - RNA, 20 nt, Artificial Sequence
  Synthetic oligonucleotide: CTLA4-290
ucacucaccuuugcagaaga

SEQ ID NO: 46358 - RNA, 21 nt, Artificial Sequence
  Synthetic oligonucleotide: CTLA4-1512
cucacucaccuuugcagaaga

SEQ ID NO: 46359 - RNA, 22 nt, Artificial Sequence
  Synthetic oligonucleotide: CTLA4-1513
ucucacucaccuuugcagaaga

SEQ ID NO: 46360 - RNA, 23 nt, Artificial Sequence
  Synthetic oligonucleotide: CTLA4-1514
gucucacucaccuuugcagaaga

SEQ ID NO: 46361 - RNA, 24 nt, Artificial Sequence
  Synthetic oligonucleotide: CTLA4-1515
agucucacucaccuuugcagaaga

SEQ ID NO: 46362 - RNA, 18 nt, Artificial Sequence
  Synthetic oligonucleotide: CTLA4-1516
gcccucaguccuuggaua

SEQ ID NO: 46363 - RNA, 19 nt, Artificial Sequence
  Synthetic oligonucleotide: CTLA4-1517
ggcccucaguccuuggaua

SEQ ID NO: 46364 - RNA, 20 nt, Artificial Sequence
  Synthetic oligonucleotide: CTLA4-308
uggcccucaguccuuggaua

SEQ ID NO: 46365 - RNA, 21 nt, Artificial Sequence
  Synthetic oligonucleotide: CTLA4-1518
auggcccucaguccuuggaua

SEQ ID NO: 46366 - RNA, 22 nt, Artificial Sequence
  Synthetic oligonucleotide: CTLA4-1519
cauggcccucaguccuuggaua

SEQ ID NO: 46367 - RNA, 23 nt, Artificial Sequence
  Synthetic oligonucleotide: CTLA4-1520
ccauggcccucaguccuuggaua

SEQ ID NO: 46368 - RNA, 24 nt, Artificial Sequence
  Synthetic oligonucleotide: CTLA4-1521
uccauggcccucaguccuuggaua

SEQ ID NO: 46369 - RNA, 18 nt, Artificial Sequence
  Synthetic oligonucleotide: CTLA4-1522
aggcaagccauggcuuua

SEQ ID NO: 46370 - RNA, 19 nt, Artificial Sequence
  Synthetic oligonucleotide: CTLA4-1523
aaggcaagccauggcuuua

SEQ ID NO: 46371 - RNA, 20 nt, Artificial Sequence
  Synthetic oligonucleotide: CTLA4-69
caaggcaagccauggcuuua

SEQ ID NO: 46372 - RNA, 21 nt, Artificial Sequence
  Synthetic oligonucleotide: CTLA4-1524
ccaaggcaagccauggcuuua

SEQ ID NO: 46373 - RNA, 22 nt, Artificial Sequence
  Synthetic oligonucleotide: CTLA4-1525
uccaaggcaagccauggcuuua

SEQ ID NO: 46374 - RNA, 23 nt, Artificial Sequence
  Synthetic oligonucleotide: CTLA4-1526
auccaaggcaagccauggcuuua

SEQ ID NO: 46375 - RNA, 24 nt, Artificial Sequence
  Synthetic oligonucleotide: CTLA4-1527
aauccaaggcaagccauggcuuua

SEQ ID NO: 46376 - RNA, 18 nt, Artificial Sequence
  Synthetic oligonucleotide: CTLA4-1528
augaagagaagaaaaaac

SEQ ID NO: 46377 - RNA, 19 nt, Artificial Sequence
  Synthetic oligonucleotide: CTLA4-1529
gaugaagagaagaaaaaac

SEQ ID NO: 46378 - RNA, 20 nt, Artificial Sequence
  Synthetic oligonucleotide: CTLA4-61
ggaugaagagaagaaaaaac

SEQ ID NO: 46379 - RNA, 21 nt, Artificial Sequence
  Synthetic oligonucleotide: CTLA4-1530
gggaugaagagaagaaaaaac

SEQ ID NO: 46380 - RNA, 22 nt, Artificial Sequence
  Synthetic oligonucleotide: CTLA4-1531
agggaugaagagaagaaaaaac

SEQ ID NO: 46381 - RNA, 23 nt, Artificial Sequence
  Synthetic oligonucleotide: CTLA4-1532
cagggaugaagagaagaaaaaac

SEQ ID NO: 46382 - RNA, 24 nt, Artificial Sequence
  Synthetic oligonucleotide: CTLA4-1533
acagggaugaagagaagaaaaaac

SEQ ID NO: 46383 - RNA, 18 nt, Artificial Sequence
  Synthetic oligonucleotide: CTLA4-1534
gguucacuugauuuccac

SEQ ID NO: 46384 - RNA, 19 nt, Artificial Sequence
  Synthetic oligonucleotide: CTLA4-1535
agguucacuugauuuccac

SEQ ID NO: 46385 - RNA, 20 nt, Artificial Sequence
  Synthetic oligonucleotide: CTLA4-40
gagguucacuugauuuccac

SEQ ID NO: 46386 - RNA, 21 nt, Artificial Sequence
  Synthetic oligonucleotide: CTLA4-1536
ugagguucacuugauuuccac

SEQ ID NO: 46387 - RNA, 22 nt, Artificial Sequence
  Synthetic oligonucleotide: CTLA4-1537
gugagguucacuugauuuccac

SEQ ID NO: 46388 - RNA, 23 nt, Artificial Sequence
  Synthetic oligonucleotide: CTLA4-1538
agugagguucacuugauuuccac

SEQ ID NO: 46389 - RNA, 24 nt, Artificial Sequence
  Synthetic oligonucleotide: CTLA4-1539
uagugagguucacuugauuuccac

SEQ ID NO: 46390 - RNA, 18 nt, Artificial Sequence
  Synthetic oligonucleotide: CTLA4-1540
cugccgaagcacugucac

SEQ ID NO: 46391 - RNA, 19 nt, Artificial Sequence
  Synthetic oligonucleotide: CTLA4-1541
ccugccgaagcacugucac

SEQ ID NO: 46392 - RNA, 20 nt, Artificial Sequence
  Synthetic oligonucleotide: CTLA4-300
gccugccgaagcacugucac

SEQ ID NO: 46393 - RNA, 21 nt, Artificial Sequence
  Synthetic oligonucleotide: CTLA4-1542
agccugccgaagcacugucac

SEQ ID NO: 46394 - RNA, 22 nt, Artificial Sequence
  Synthetic oligonucleotide: CTLA4-1543
cagccugccgaagcacugucac

SEQ ID NO: 46395 - RNA, 23 nt, Artificial Sequence
  Synthetic oligonucleotide: CTLA4-1544
ucagccugccgaagcacugucac

SEQ ID NO: 46396 - RNA, 24 nt, Artificial Sequence
  Synthetic oligonucleotide: CTLA4-1545
gucagccugccgaagcacugucac

SEQ ID NO: 46397 - RNA, 18 nt, Artificial Sequence
  Synthetic oligonucleotide: CTLA4-1546
uaguauggcgguggguac

SEQ ID NO: 46398 - RNA, 19 nt, Artificial Sequence
  Synthetic oligonucleotide: CTLA4-1547
guaguauggcgguggguac

SEQ ID NO: 46399 - RNA, 20 nt, Artificial Sequence
  Synthetic oligonucleotide: CTLA4-1548
gguaguauggcgguggguac

SEQ ID NO: 46400 - RNA, 21 nt, Artificial Sequence
  Synthetic oligonucleotide: CTLA4-1549
agguaguauggcgguggguac

SEQ ID NO: 46401 - RNA, 22 nt, Artificial Sequence
  Synthetic oligonucleotide: CTLA4-1550
cagguaguauggcgguggguac

SEQ ID NO: 46402 - RNA, 23 nt, Artificial Sequence
  Synthetic oligonucleotide: CTLA4-1551
ccagguaguauggcgguggguac

SEQ ID NO: 46403 - RNA, 24 nt, Artificial Sequence
  Synthetic oligonucleotide: CTLA4-1552
cccagguaguauggcgguggguac

SEQ ID NO: 46404 - RNA, 18 nt, Artificial Sequence
  Synthetic oligonucleotide: CTLA4-1553
gaccucaguggcuuugcc

SEQ ID NO: 46405 - RNA, 19 nt, Artificial Sequence
  Synthetic oligonucleotide: CTLA4-1554
ggaccucaguggcuuugcc

SEQ ID NO: 46406 - RNA, 20 nt, Artificial Sequence
  Synthetic oligonucleotide: CTLA4-49
cggaccucaguggcuuugcc

SEQ ID NO: 46407 - RNA, 21 nt, Artificial Sequence
  Synthetic oligonucleotide: CTLA4-1555
ccggaccucaguggcuuugcc

SEQ ID NO: 46408 - RNA, 22 nt, Artificial Sequence
  Synthetic oligonucleotide: CTLA4-1556
cccggaccucaguggcuuugcc

SEQ ID NO: 46409 - RNA, 23 nt, Artificial Sequence
  Synthetic oligonucleotide: CTLA4-1557
acccggaccucaguggcuuugcc

SEQ ID NO: 46410 - RNA, 24 nt, Artificial Sequence
  Synthetic oligonucleotide: CTLA4-1558
cacccggaccucaguggcuuugcc

SEQ ID NO: 46411 - RNA, 18 nt, Artificial Sequence
  Synthetic oligonucleotide: CTLA4-1559
gccacgugcauugcuagc

SEQ ID NO: 46412 - RNA, 19 nt, Artificial Sequence
  Synthetic oligonucleotide: CTLA4-1560
ggccacgugcauugcuagc

SEQ ID NO: 46413 - RNA, 20 nt, Artificial Sequence
  Synthetic oligonucleotide: CTLA4-296
gggccacgugcauugcuagc

SEQ ID NO: 46414 - RNA, 21 nt, Artificial Sequence
  Synthetic oligonucleotide: CTLA4-1561
ugggccacgugcauugcuagc

SEQ ID NO: 46415 - RNA, 22 nt, Artificial Sequence
  Synthetic oligonucleotide: CTLA4-1562
cugggccacgugcauugcuagc

SEQ ID NO: 46416 - RNA, 23 nt, Artificial Sequence
  Synthetic oligonucleotide: CTLA4-1563
gcugggccacgugcauugcuagc

SEQ ID NO: 46417 - RNA, 24 nt, Artificial Sequence
  Synthetic oligonucleotide: CTLA4-1564
ggcugggccacgugcauugcuagc

SEQ ID NO: 46418 - RNA, 18 nt, Artificial Sequence
  Synthetic oligonucleotide: CTLA4-1565
ggaccucaguggcuuugc

SEQ ID NO: 46419 - RNA, 19 nt, Artificial Sequence
  Synthetic oligonucleotide: CTLA4-1566
cggaccucaguggcuuugc

SEQ ID NO: 46420 - RNA, 20 nt, Artificial Sequence
  Synthetic oligonucleotide: CTLA4-299
ccggaccucaguggcuuugc

SEQ ID NO: 46421 - RNA, 21 nt, Artificial Sequence
  Synthetic oligonucleotide: CTLA4-1567
cccggaccucaguggcuuugc

SEQ ID NO: 46422 - RNA, 22 nt, Artificial Sequence
  Synthetic oligonucleotide: CTLA4-1568
acccggaccucaguggcuuugc

SEQ ID NO: 46423 - RNA, 23 nt, Artificial Sequence
  Synthetic oligonucleotide: CTLA4-1569
cacccggaccucaguggcuuugc

SEQ ID NO: 46424 - RNA, 24 nt, Artificial Sequence
  Synthetic oligonucleotide: CTLA4-1570
ucacccggaccucaguggcuuugc

SEQ ID NO: 46425 - RNA, 18 nt, Artificial Sequence
  Synthetic oligonucleotide: CTLA4-1571
cgugcagauggaaucauc

SEQ ID NO: 46426 - RNA, 19 nt, Artificial Sequence
  Synthetic oligonucleotide: CTLA4-1572
ccgugcagauggaaucauc

SEQ ID NO: 46427 - RNA, 20 nt, Artificial Sequence
  Synthetic oligonucleotide: CTLA4-303
cccgugcagauggaaucauc

SEQ ID NO: 46428 - RNA, 21 nt, Artificial Sequence
  Synthetic oligonucleotide: CTLA4-1573
gcccgugcagauggaaucauc

SEQ ID NO: 46429 - RNA, 22 nt, Artificial Sequence
  Synthetic oligonucleotide: CTLA4-1574
ugcccgugcagauggaaucauc

SEQ ID NO: 46430 - RNA, 23 nt, Artificial Sequence
  Synthetic oligonucleotide: CTLA4-1575
gugcccgugcagauggaaucauc

SEQ ID NO: 46431 - RNA, 24 nt, Artificial Sequence
  Synthetic oligonucleotide: CTLA4-1576
ggugcccgugcagauggaaucauc

SEQ ID NO: 46432 - RNA, 18 nt, Artificial Sequence
  Synthetic oligonucleotide: CTLA4-1577
cuggaggugcccgugcag

SEQ ID NO: 46433 - RNA, 19 nt, Artificial Sequence
  Synthetic oligonucleotide: CTLA4-1578
acuggaggugcccgugcag

SEQ ID NO: 46434 - RNA, 20 nt, Artificial Sequence
  Synthetic oligonucleotide: CTLA4-305
cacuggaggugcccgugcag

SEQ ID NO: 46435 - RNA, 21 nt, Artificial Sequence
  Synthetic oligonucleotide: CTLA4-1579
ccacuggaggugcccgugcag

SEQ ID NO: 46436 - RNA, 22 nt, Artificial Sequence
  Synthetic oligonucleotide: CTLA4-1580
uccacuggaggugcccgugcag

SEQ ID NO: 46437 - RNA, 23 nt, Artificial Sequence
  Synthetic oligonucleotide: CTLA4-1581
uuccacuggaggugcccgugcag

SEQ ID NO: 46438 - RNA, 24 nt, Artificial Sequence
  Synthetic oligonucleotide: CTLA4-1582
uuuccacuggaggugcccgugcag

SEQ ID NO: 46439 - RNA, 18 nt, Artificial Sequence
  Synthetic oligonucleotide: CTLA4-1583
ccugguagccagguucag

SEQ ID NO: 46440 - RNA, 19 nt, Artificial Sequence
  Synthetic oligonucleotide: CTLA4-1584
uccugguagccagguucag

SEQ ID NO: 46441 - RNA, 20 nt, Artificial Sequence
  Synthetic oligonucleotide: CTLA4-280
guccugguagccagguucag

SEQ ID NO: 46442 - RNA, 21 nt, Artificial Sequence
  Synthetic oligonucleotide: CTLA4-1585
gguccugguagccagguucag

SEQ ID NO: 46443 - RNA, 22 nt, Artificial Sequence
  Synthetic oligonucleotide: CTLA4-1586
agguccugguagccagguucag

SEQ ID NO: 46444 - RNA, 23 nt, Artificial Sequence
  Synthetic oligonucleotide: CTLA4-1587
cagguccugguagccagguucag

SEQ ID NO: 46445 - RNA, 24 nt, Artificial Sequence
  Synthetic oligonucleotide: CTLA4-1588
ccagguccugguagccagguucag

SEQ ID NO: 46446 - RNA, 18 nt, Artificial Sequence
  Synthetic oligonucleotide: CTLA4-1589
gaagacagggaugaagag

SEQ ID NO: 46447 - RNA, 19 nt, Artificial Sequence
  Synthetic oligonucleotide: CTLA4-1590
agaagacagggaugaagag

SEQ ID NO: 46448 - RNA, 20 nt, Artificial Sequence
  Synthetic oligonucleotide: CTLA4-285
cagaagacagggaugaagag

SEQ ID NO: 46449 - RNA, 21 nt, Artificial Sequence
  Synthetic oligonucleotide: CTLA4-1591
gcagaagacagggaugaagag

SEQ ID NO: 46450 - RNA, 22 nt, Artificial Sequence
  Synthetic oligonucleotide: CTLA4-1592
ugcagaagacagggaugaagag

SEQ ID NO: 46451 - RNA, 23 nt, Artificial Sequence
  Synthetic oligonucleotide: CTLA4-1593
uugcagaagacagggaugaagag

SEQ ID NO: 46452 - RNA, 24 nt, Artificial Sequence
  Synthetic oligonucleotide: CTLA4-1594
uuugcagaagacagggaugaagag

SEQ ID NO: 46453 - RNA, 18 nt, Artificial Sequence
  Synthetic oligonucleotide: CTLA4-1595
cagcugagccuugugccg

SEQ ID NO: 46454 - RNA, 19 nt, Artificial Sequence
  Synthetic oligonucleotide: CTLA4-1596
ucagcugagccuugugccg

SEQ ID NO: 46455 - RNA, 20 nt, Artificial Sequence
  Synthetic oligonucleotide: CTLA4-279
uucagcugagccuugugccg

SEQ ID NO: 46456 - RNA, 21 nt, Artificial Sequence
  Synthetic oligonucleotide: CTLA4-1597
guucagcugagccuugugccg

SEQ ID NO: 46457 - RNA, 22 nt, Artificial Sequence
  Synthetic oligonucleotide: CTLA4-1598
gguucagcugagccuugugccg

SEQ ID NO: 46458 - RNA, 23 nt, Artificial Sequence
  Synthetic oligonucleotide: CTLA4-1599
agguucagcugagccuugugccg

SEQ ID NO: 46459 - RNA, 24 nt, Artificial Sequence
  Synthetic oligonucleotide: CTLA4-1600
cagguucagcugagccuugugccg

SEQ ID NO: 46460 - RNA, 18 nt, Artificial Sequence
  Synthetic oligonucleotide: CTLA4-1601
ggccaguaccacagcagg

SEQ ID NO: 46461 - RNA, 19 nt, Artificial Sequence
  Synthetic oligonucleotide: CTLA4-1602
uggccaguaccacagcagg

SEQ ID NO: 46462 - RNA, 20 nt, Artificial Sequence
  Synthetic oligonucleotide: CTLA4-297
cuggccaguaccacagcagg

SEQ ID NO: 46463 - RNA, 21 nt, Artificial Sequence
  Synthetic oligonucleotide: CTLA4-1603
gcuggccaguaccacagcagg

SEQ ID NO: 46464 - RNA, 22 nt, Artificial Sequence
  Synthetic oligonucleotide: CTLA4-1604
ugcuggccaguaccacagcagg

SEQ ID NO: 46465 - RNA, 23 nt, Artificial Sequence
  Synthetic oligonucleotide: CTLA4-1605
cugcuggccaguaccacagcagg

SEQ ID NO: 46466 - RNA, 24 nt, Artificial Sequence
  Synthetic oligonucleotide: CTLA4-1606
gcugcuggccaguaccacagcagg

SEQ ID NO: 46467 - RNA, 18 nt, Artificial Sequence
  Synthetic oligonucleotide: CTLA4-1607
ccuuugcagaagacaggg

SEQ ID NO: 46468 - RNA, 19 nt, Artificial Sequence
  Synthetic oligonucleotide: CTLA4-1608
accuuugcagaagacaggg

SEQ ID NO: 46469 - RNA, 20 nt, Artificial Sequence
  Synthetic oligonucleotide: CTLA4-288
caccuuugcagaagacaggg

SEQ ID NO: 46470 - RNA, 21 nt, Artificial Sequence
  Synthetic oligonucleotide: CTLA4-1609
ucaccuuugcagaagacaggg

SEQ ID NO: 46471 - RNA, 22 nt, Artificial Sequence
  Synthetic oligonucleotide: CTLA4-1610
cucaccuuugcagaagacaggg

SEQ ID NO: 46472 - RNA, 23 nt, Artificial Sequence
  Synthetic oligonucleotide: CTLA4-1611
acucaccuuugcagaagacaggg

SEQ ID NO: 46473 - RNA, 24 nt, Artificial Sequence
  Synthetic oligonucleotide: CTLA4-1612
cacucaccuuugcagaagacaggg

SEQ ID NO: 46474 - RNA, 18 nt, Artificial Sequence
  Synthetic oligonucleotide: CTLA4-1613
uugcagaagacagggaug

SEQ ID NO: 46475 - RNA, 19 nt, Artificial Sequence
  Synthetic oligonucleotide: CTLA4-1614
uuugcagaagacagggaug

SEQ ID NO: 46476 - RNA, 20 nt, Artificial Sequence
  Synthetic oligonucleotide: CTLA4-287
cuuugcagaagacagggaug

SEQ ID NO: 46477 - RNA, 21 nt, Artificial Sequence
  Synthetic oligonucleotide: CTLA4-1615
ccuuugcagaagacagggaug

SEQ ID NO: 46478 - RNA, 22 nt, Artificial Sequence
  Synthetic oligonucleotide: CTLA4-1616
accuuugcagaagacagggaug

SEQ ID NO: 46479 - RNA, 23 nt, Artificial Sequence
  Synthetic oligonucleotide: CTLA4-1617
caccuuugcagaagacagggaug

SEQ ID NO: 46480 - RNA, 24 nt, Artificial Sequence
  Synthetic oligonucleotide: CTLA4-1618
ucaccuuugcagaagacagggaug

SEQ ID NO: 46481 - RNA, 18 nt, Artificial Sequence
  Synthetic oligonucleotide: CTLA4-1619
caccuggcugucagccug

SEQ ID NO: 46482 - RNA, 19 nt, Artificial Sequence
  Synthetic oligonucleotide: CTLA4-1620
ucaccuggcugucagccug

SEQ ID NO: 46483 - RNA, 20 nt, Artificial Sequence
  Synthetic oligonucleotide: CTLA4-301
gucaccuggcugucagccug

SEQ ID NO: 46484 - RNA, 21 nt, Artificial Sequence
  Synthetic oligonucleotide: CTLA4-1621
agucaccuggcugucagccug

SEQ ID NO: 46485 - RNA, 22 nt, Artificial Sequence
  Synthetic oligonucleotide: CTLA4-1622
cagucaccuggcugucagccug

SEQ ID NO: 46486 - RNA, 23 nt, Artificial Sequence
  Synthetic oligonucleotide: CTLA4-1623
ucagucaccuggcugucagccug

SEQ ID NO: 46487 - RNA, 24 nt, Artificial Sequence
  Synthetic oligonucleotide: CTLA4-1624
uucagucaccuggcugucagccug

SEQ ID NO: 46488 - RNA, 18 nt, Artificial Sequence
  Synthetic oligonucleotide: CTLA4-1625
agaaaaaacaggagagug

SEQ ID NO: 46489 - RNA, 19 nt, Artificial Sequence
  Synthetic oligonucleotide: CTLA4-1626
aagaaaaaacaggagagug

SEQ ID NO: 46490 - RNA, 20 nt, Artificial Sequence
  Synthetic oligonucleotide: CTLA4-281
gaagaaaaaacaggagagug

SEQ ID NO: 46491 - RNA, 21 nt, Artificial Sequence
  Synthetic oligonucleotide: CTLA4-1627
agaagaaaaaacaggagagug

SEQ ID NO: 46492 - RNA, 22 nt, Artificial Sequence
  Synthetic oligonucleotide: CTLA4-1628
gagaagaaaaaacaggagagug

SEQ ID NO: 46493 - RNA, 23 nt, Artificial Sequence
  Synthetic oligonucleotide: CTLA4-1629
agagaagaaaaaacaggagagug

SEQ ID NO: 46494 - RNA, 24 nt, Artificial Sequence
  Synthetic oligonucleotide: CTLA4-1630
aagagaagaaaaaacaggagagug

SEQ ID NO: 46495 - RNA, 18 nt, Artificial Sequence
  Synthetic oligonucleotide: CTLA4-1631
aagucucacucaccuuug

SEQ ID NO: 46496 - RNA, 19 nt, Artificial Sequence
  Synthetic oligonucleotide: CTLA4-1632
aaagucucacucaccuuug

SEQ ID NO: 46497 - RNA, 20 nt, Artificial Sequence
  Synthetic oligonucleotide: CTLA4-291
aaaagucucacucaccuuug

SEQ ID NO: 46498 - RNA, 21 nt, Artificial Sequence
  Synthetic oligonucleotide: CTLA4-1633
caaaagucucacucaccuuug

SEQ ID NO: 46499 - RNA, 22 nt, Artificial Sequence
  Synthetic oligonucleotide: CTLA4-1634
ccaaaagucucacucaccuuug

SEQ ID NO: 46500 - RNA, 23 nt, Artificial Sequence
  Synthetic oligonucleotide: CTLA4-1635
uccaaaagucucacucaccuuug

SEQ ID NO: 46501 - RNA, 24 nt, Artificial Sequence
  Synthetic oligonucleotide: CTLA4-1636
cuccaaaagucucacucaccuuug

SEQ ID NO: 46502 - RNA, 18 nt, Artificial Sequence
  Synthetic oligonucleotide: CTLA4-1637
ggcaagccauggcuuuau

SEQ ID NO: 46503 - RNA, 19 nt, Artificial Sequence
  Synthetic oligonucleotide: CTLA4-1638
aggcaagccauggcuuuau

SEQ ID NO: 46504 - RNA, 20 nt, Artificial Sequence
  Synthetic oligonucleotide: CTLA4-70
aaggcaagccauggcuuuau

SEQ ID NO: 46505 - RNA, 21 nt, Artificial Sequence
  Synthetic oligonucleotide: CTLA4-1639
caaggcaagccauggcuuuau

SEQ ID NO: 46506 - RNA, 22 nt, Artificial Sequence
  Synthetic oligonucleotide: CTLA4-1640
ccaaggcaagccauggcuuuau

SEQ ID NO: 46507 - RNA, 23 nt, Artificial Sequence
  Synthetic oligonucleotide: CTLA4-1641
uccaaggcaagccauggcuuuau

SEQ ID NO: 46508 - RNA, 24 nt, Artificial Sequence
  Synthetic oligonucleotide: CTLA4-1642
auccaaggcaagccauggcuuuau

SEQ ID NO: 46509 - RNA, 18 nt, Artificial Sequence
  Synthetic oligonucleotide: CTLA4-1643
gugcagauggaaucaucu

SEQ ID NO: 46510 - RNA, 19 nt, Artificial Sequence
  Synthetic oligonucleotide: CTLA4-1644
cgugcagauggaaucaucu

SEQ ID NO: 46511 - RNA, 20 nt, Artificial Sequence
  Synthetic oligonucleotide: CTLA4-43
ccgugcagauggaaucaucu

SEQ ID NO: 46512 - RNA, 21 nt, Artificial Sequence
  Synthetic oligonucleotide: CTLA4-1645
cccgugcagauggaaucaucu

SEQ ID NO: 46513 - RNA, 22 nt, Artificial Sequence
  Synthetic oligonucleotide: CTLA4-1646
gcccgugcagauggaaucaucu

SEQ ID NO: 46514 - RNA, 23 nt, Artificial Sequence
  Synthetic oligonucleotide: CTLA4-1647
ugcccgugcagauggaaucaucu

SEQ ID NO: 46515 - RNA, 24 nt, Artificial Sequence
  Synthetic oligonucleotide: CTLA4-1648
gugcccgugcagauggaaucaucu

SEQ ID NO: 46516 - RNA, 18 nt, Artificial Sequence
  Synthetic oligonucleotide: CTLA4-1649
aaggcaagccauggcuuu

SEQ ID NO: 46517 - RNA, 19 nt, Artificial Sequence
  Synthetic oligonucleotide: CTLA4-1650
caaggcaagccauggcuuu

SEQ ID NO: 46518 - RNA, 20 nt, Artificial Sequence
  Synthetic oligonucleotide: CTLA4-278
ccaaggcaagccauggcuuu

SEQ ID NO: 46519 - RNA, 21 nt, Artificial Sequence
  Synthetic oligonucleotide: CTLA4-1651
uccaaggcaagccauggcuuu

SEQ ID NO: 46520 - RNA, 22 nt, Artificial Sequence
  Synthetic oligonucleotide: CTLA4-1652
auccaaggcaagccauggcuuu

SEQ ID NO: 46521 - RNA, 23 nt, Artificial Sequence
  Synthetic oligonucleotide: CTLA4-1653
aauccaaggcaagccauggcuuu

SEQ ID NO: 46522 - RNA, 24 nt, Artificial Sequence
  Synthetic oligonucleotide: CTLA4-1654
aaauccaaggcaagccauggcuuu

SEQ ID NO: 46523 - RNA, 18 nt, Artificial Sequence
  Synthetic oligonucleotide: CTLA4-1655
cuaccugggcauaggcaa

SEQ ID NO: 46524 - RNA, 19 nt, Artificial Sequence
  Synthetic oligonucleotide: CTLA4-1656
acuaccugggcauaggcaa

SEQ ID NO: 46525 - RNA, 20 nt, Artificial Sequence
  Synthetic oligonucleotide: CTLA4-145
uacuaccugggcauaggcaa

SEQ ID NO: 46526 - RNA, 21 nt, Artificial Sequence
  Synthetic oligonucleotide: CTLA4-1657
auacuaccugggcauaggcaa

SEQ ID NO: 46527 - RNA, 22 nt, Artificial Sequence
  Synthetic oligonucleotide: CTLA4-1658
cauacuaccugggcauaggcaa

SEQ ID NO: 46528 - RNA, 23 nt, Artificial Sequence
  Synthetic oligonucleotide: CTLA4-1659
ccauacuaccugggcauaggcaa

SEQ ID NO: 46529 - RNA, 24 nt, Artificial Sequence
  Synthetic oligonucleotide: CTLA4-1660
gccauacuaccugggcauaggcaa

SEQ ID NO: 46530 - RNA, 18 nt, Artificial Sequence
  Synthetic oligonucleotide: CTLA4-1661
accuccaguggaaaucaa

SEQ ID NO: 46531 - RNA, 19 nt, Artificial Sequence
  Synthetic oligonucleotide: CTLA4-1662
caccuccaguggaaaucaa

SEQ ID NO: 46532 - RNA, 20 nt, Artificial Sequence
  Synthetic oligonucleotide: CTLA4-237
gcaccuccaguggaaaucaa

SEQ ID NO: 46533 - RNA, 21 nt, Artificial Sequence
  Synthetic oligonucleotide: CTLA4-1663
ggcaccuccaguggaaaucaa

SEQ ID NO: 46534 - RNA, 22 nt, Artificial Sequence
  Synthetic oligonucleotide: CTLA4-1664
gggcaccuccaguggaaaucaa

SEQ ID NO: 46535 - RNA, 23 nt, Artificial Sequence
  Synthetic oligonucleotide: CTLA4-1665
cgggcaccuccaguggaaaucaa

SEQ ID NO: 46536 - RNA, 24 nt, Artificial Sequence
  Synthetic oligonucleotide: CTLA4-1666
acgggcaccuccaguggaaaucaa

SEQ ID NO: 46537 - RNA, 18 nt, Artificial Sequence
  Synthetic oligonucleotide: CTLA4-1667
gacugagggccauggaca

SEQ ID NO: 46538 - RNA, 19 nt, Artificial Sequence
  Synthetic oligonucleotide: CTLA4-1668
ggacugagggccauggaca

SEQ ID NO: 46539 - RNA, 20 nt, Artificial Sequence
  Synthetic oligonucleotide: CTLA4-33
aggacugagggccauggaca

SEQ ID NO: 46540 - RNA, 21 nt, Artificial Sequence
  Synthetic oligonucleotide: CTLA4-1669
aaggacugagggccauggaca

SEQ ID NO: 46541 - RNA, 22 nt, Artificial Sequence
  Synthetic oligonucleotide: CTLA4-1670
caaggacugagggccauggaca

SEQ ID NO: 46542 - RNA, 23 nt, Artificial Sequence
  Synthetic oligonucleotide: CTLA4-1671
ccaaggacugagggccauggaca

SEQ ID NO: 46543 - RNA, 24 nt, Artificial Sequence
  Synthetic oligonucleotide: CTLA4-1672
uccaaggacugagggccauggaca

SEQ ID NO: 46544 - RNA, 18 nt, Artificial Sequence
  Synthetic oligonucleotide: CTLA4-1673
caucuccaggcaaagcca

SEQ ID NO: 46545 - RNA, 19 nt, Artificial Sequence
  Synthetic oligonucleotide: CTLA4-1674
gcaucuccaggcaaagcca

SEQ ID NO: 46546 - RNA, 20 nt, Artificial Sequence
  Synthetic oligonucleotide: CTLA4-226
ugcaucuccaggcaaagcca

SEQ ID NO: 46547 - RNA, 21 nt, Artificial Sequence
  Synthetic oligonucleotide: CTLA4-1675
augcaucuccaggcaaagcca

SEQ ID NO: 46548 - RNA, 22 nt, Artificial Sequence
  Synthetic oligonucleotide: CTLA4-1676
uaugcaucuccaggcaaagcca

SEQ ID NO: 46549 - RNA, 23 nt, Artificial Sequence
  Synthetic oligonucleotide: CTLA4-1677
guaugcaucuccaggcaaagcca

SEQ ID NO: 46550 - RNA, 24 nt, Artificial Sequence
  Synthetic oligonucleotide: CTLA4-1678
aguaugcaucuccaggcaaagcca

SEQ ID NO: 46551 - RNA, 18 nt, Artificial Sequence
  Synthetic oligonucleotide: CTLA4-1679
ucugcacgggcaccucca

SEQ ID NO: 46552 - RNA, 19 nt, Artificial Sequence
  Synthetic oligonucleotide: CTLA4-1680
aucugcacgggcaccucca

SEQ ID NO: 46553 - RNA, 20 nt, Artificial Sequence
  Synthetic oligonucleotide: CTLA4-235
caucugcacgggcaccucca

SEQ ID NO: 46554 - RNA, 21 nt, Artificial Sequence
  Synthetic oligonucleotide: CTLA4-1681
ccaucugcacgggcaccucca

SEQ ID NO: 46555 - RNA, 22 nt, Artificial Sequence
  Synthetic oligonucleotide: CTLA4-1682
uccaucugcacgggcaccucca

SEQ ID NO: 46556 - RNA, 23 nt, Artificial Sequence
  Synthetic oligonucleotide: CTLA4-1683
uuccaucugcacgggcaccucca

SEQ ID NO: 46557 - RNA, 24 nt, Artificial Sequence
  Synthetic oligonucleotide: CTLA4-1684
auuccaucugcacgggcaccucca

SEQ ID NO: 46558 - RNA, 18 nt, Artificial Sequence
  Synthetic oligonucleotide: CTLA4-1685
acuaccugggcauaggca

SEQ ID NO: 46559 - RNA, 19 nt, Artificial Sequence
  Synthetic oligonucleotide: CTLA4-1686
uacuaccugggcauaggca

SEQ ID NO: 46560 - RNA, 20 nt, Artificial Sequence
  Synthetic oligonucleotide: CTLA4-346
auacuaccugggcauaggca

SEQ ID NO: 46561 - RNA, 21 nt, Artificial Sequence
  Synthetic oligonucleotide: CTLA4-1687
cauacuaccugggcauaggca

SEQ ID NO: 46562 - RNA, 22 nt, Artificial Sequence
  Synthetic oligonucleotide: CTLA4-1688
ccauacuaccugggcauaggca

SEQ ID NO: 46563 - RNA, 23 nt, Artificial Sequence
  Synthetic oligonucleotide: CTLA4-1689
gccauacuaccugggcauaggca

SEQ ID NO: 46564 - RNA, 24 nt, Artificial Sequence
  Synthetic oligonucleotide: CTLA4-1690
cgccauacuaccugggcauaggca

SEQ ID NO: 46565 - RNA, 18 nt, Artificial Sequence
  Synthetic oligonucleotide: CTLA4-1691
aaccucacuauccaagga

SEQ ID NO: 46566 - RNA, 19 nt, Artificial Sequence
  Synthetic oligonucleotide: CTLA4-1692
gaaccucacuauccaagga

SEQ ID NO: 46567 - RNA, 20 nt, Artificial Sequence
  Synthetic oligonucleotide: CTLA4-239
ugaaccucacuauccaagga

SEQ ID NO: 46568 - RNA, 21 nt, Artificial Sequence
  Synthetic oligonucleotide: CTLA4-1693
gugaaccucacuauccaagga

SEQ ID NO: 46569 - RNA, 22 nt, Artificial Sequence
  Synthetic oligonucleotide: CTLA4-1694
agugaaccucacuauccaagga

SEQ ID NO: 46570 - RNA, 23 nt, Artificial Sequence
  Synthetic oligonucleotide: CTLA4-1695
aagugaaccucacuauccaagga

SEQ ID NO: 46571 - RNA, 24 nt, Artificial Sequence
  Synthetic oligonucleotide: CTLA4-1696
caagugaaccucacuauccaagga

SEQ ID NO: 46572 - RNA, 18 nt, Artificial Sequence
  Synthetic oligonucleotide: CTLA4-1697
gugcggcaaccuacauga

SEQ ID NO: 46573 - RNA, 19 nt, Artificial Sequence
  Synthetic oligonucleotide: CTLA4-1698
ugugcggcaaccuacauga

SEQ ID NO: 46574 - RNA, 20 nt, Artificial Sequence
  Synthetic oligonucleotide: CTLA4-23
cugugcggcaaccuacauga

SEQ ID NO: 46575 - RNA, 21 nt, Artificial Sequence
  Synthetic oligonucleotide: CTLA4-1699
ucugugcggcaaccuacauga

SEQ ID NO: 46576 - RNA, 22 nt, Artificial Sequence
  Synthetic oligonucleotide: CTLA4-1700
gucugugcggcaaccuacauga

SEQ ID NO: 46577 - RNA, 23 nt, Artificial Sequence
  Synthetic oligonucleotide: CTLA4-1701
agucugugcggcaaccuacauga

SEQ ID NO: 46578 - RNA, 24 nt, Artificial Sequence
  Synthetic oligonucleotide: CTLA4-1702
aagucugugcggcaaccuacauga

SEQ ID NO: 46579 - RNA, 18 nt, Artificial Sequence
  Synthetic oligonucleotide: CTLA4-1703
ugucuucugcaaagguga

SEQ ID NO: 46580 - RNA, 19 nt, Artificial Sequence
  Synthetic oligonucleotide: CTLA4-1704
cugucuucugcaaagguga

SEQ ID NO: 46581 - RNA, 20 nt, Artificial Sequence
  Synthetic oligonucleotide: CTLA4-220
ccugucuucugcaaagguga

SEQ ID NO: 46582 - RNA, 21 nt, Artificial Sequence
  Synthetic oligonucleotide: CTLA4-1705
cccugucuucugcaaagguga

SEQ ID NO: 46583 - RNA, 22 nt, Artificial Sequence
  Synthetic oligonucleotide: CTLA4-1706
ucccugucuucugcaaagguga

SEQ ID NO: 46584 - RNA, 23 nt, Artificial Sequence
  Synthetic oligonucleotide: CTLA4-1707
aucccugucuucugcaaagguga

SEQ ID NO: 46585 - RNA, 24 nt, Artificial Sequence
  Synthetic oligonucleotide: CTLA4-1708
caucccugucuucugcaaagguga

SEQ ID NO: 46586 - RNA, 18 nt, Artificial Sequence
  Synthetic oligonucleotide: CTLA4-1709
aggcugacagccagguga

SEQ ID NO: 46587 - RNA, 19 nt, Artificial Sequence
  Synthetic oligonucleotide: CTLA4-1710
caggcugacagccagguga

SEQ ID NO: 46588 - RNA, 20 nt, Artificial Sequence
  Synthetic oligonucleotide: CTLA4-228
gcaggcugacagccagguga

SEQ ID NO: 46589 - RNA, 21 nt, Artificial Sequence
  Synthetic oligonucleotide: CTLA4-1711
ggcaggcugacagccagguga

SEQ ID NO: 46590 - RNA, 22 nt, Artificial Sequence
  Synthetic oligonucleotide: CTLA4-1712
cggcaggcugacagccagguga

SEQ ID NO: 46591 - RNA, 23 nt, Artificial Sequence
  Synthetic oligonucleotide: CTLA4-1713
ucggcaggcugacagccagguga

SEQ ID NO: 46592 - RNA, 24 nt, Artificial Sequence
  Synthetic oligonucleotide: CTLA4-1714
uucggcaggcugacagccagguga

SEQ ID NO: 46593 - RNA, 18 nt, Artificial Sequence
  Synthetic oligonucleotide: CTLA4-1715
ggacugagggccauggac

SEQ ID NO: 46594 - RNA, 19 nt, Artificial Sequence
  Synthetic oligonucleotide: CTLA4-1716
aggacugagggccauggac

SEQ ID NO: 46595 - RNA, 20 nt, Artificial Sequence
  Synthetic oligonucleotide: CTLA4-242
aaggacugagggccauggac

SEQ ID NO: 46596 - RNA, 21 nt, Artificial Sequence
  Synthetic oligonucleotide: CTLA4-1717
caaggacugagggccauggac

SEQ ID NO: 46597 - RNA, 22 nt, Artificial Sequence
  Synthetic oligonucleotide: CTLA4-1718
ccaaggacugagggccauggac

SEQ ID NO: 46598 - RNA, 23 nt, Artificial Sequence
  Synthetic oligonucleotide: CTLA4-1719
uccaaggacugagggccauggac

SEQ ID NO: 46599 - RNA, 24 nt, Artificial Sequence
  Synthetic oligonucleotide: CTLA4-1720
auccaaggacugagggccauggac

SEQ ID NO: 46600 - RNA, 18 nt, Artificial Sequence
  Synthetic oligonucleotide: CTLA4-1721
uacccaccgccauacuac

SEQ ID NO: 46601 - RNA, 19 nt, Artificial Sequence
  Synthetic oligonucleotide: CTLA4-1722
guacccaccgccauacuac

SEQ ID NO: 46602 - RNA, 20 nt, Artificial Sequence
  Synthetic oligonucleotide: CTLA4-1723
uguacccaccgccauacuac

SEQ ID NO: 46603 - RNA, 21 nt, Artificial Sequence
  Synthetic oligonucleotide: CTLA4-1724
auguacccaccgccauacuac

SEQ ID NO: 46604 - RNA, 22 nt, Artificial Sequence
  Synthetic oligonucleotide: CTLA4-1725
cauguacccaccgccauacuac

SEQ ID NO: 46605 - RNA, 23 nt, Artificial Sequence
  Synthetic oligonucleotide: CTLA4-1726
ucauguacccaccgccauacuac

SEQ ID NO: 46606 - RNA, 24 nt, Artificial Sequence
  Synthetic oligonucleotide: CTLA4-1727
cucauguacccaccgccauacuac

SEQ ID NO: 46607 - RNA, 18 nt, Artificial Sequence
  Synthetic oligonucleotide: CTLA4-1728
ucagcugaaccuggcuac

SEQ ID NO: 46608 - RNA, 19 nt, Artificial Sequence
  Synthetic oligonucleotide: CTLA4-1729
cucagcugaaccuggcuac

SEQ ID NO: 46609 - RNA, 20 nt, Artificial Sequence
  Synthetic oligonucleotide: CTLA4-218
gcucagcugaaccuggcuac

SEQ ID NO: 46610 - RNA, 21 nt, Artificial Sequence
  Synthetic oligonucleotide: CTLA4-1730
ggcucagcugaaccuggcuac

SEQ ID NO: 46611 - RNA, 22 nt, Artificial Sequence
  Synthetic oligonucleotide: CTLA4-1731
aggcucagcugaaccuggcuac

SEQ ID NO: 46612 - RNA, 23 nt, Artificial Sequence
  Synthetic oligonucleotide: CTLA4-1732
aaggcucagcugaaccuggcuac

SEQ ID NO: 46613 - RNA, 24 nt, Artificial Sequence
  Synthetic oligonucleotide: CTLA4-1733
caaggcucagcugaaccuggcuac

SEQ ID NO: 46614 - RNA, 18 nt, Artificial Sequence
  Synthetic oligonucleotide: CTLA4-1734
auccaaggacugagggcc

SEQ ID NO: 46615 - RNA, 19 nt, Artificial Sequence
  Synthetic oligonucleotide: CTLA4-1735
uauccaaggacugagggcc

SEQ ID NO: 46616 - RNA, 20 nt, Artificial Sequence
  Synthetic oligonucleotide: CTLA4-241
cuauccaaggacugagggcc

SEQ ID NO: 46617 - RNA, 21 nt, Artificial Sequence
  Synthetic oligonucleotide: CTLA4-1736
acuauccaaggacugagggcc

SEQ ID NO: 46618 - RNA, 22 nt, Artificial Sequence
  Synthetic oligonucleotide: CTLA4-1737
cacuauccaaggacugagggcc

SEQ ID NO: 46619 - RNA, 23 nt, Artificial Sequence
  Synthetic oligonucleotide: CTLA4-1738
ucacuauccaaggacugagggcc

SEQ ID NO: 46620 - RNA, 24 nt, Artificial Sequence
  Synthetic oligonucleotide: CTLA4-1739
cucacuauccaaggacugagggcc

SEQ ID NO: 46621 - RNA, 18 nt, Artificial Sequence
  Synthetic oligonucleotide: CTLA4-1740
aagugaaccucacuaucc

SEQ ID NO: 46622 - RNA, 19 nt, Artificial Sequence
  Synthetic oligonucleotide: CTLA4-1741
caagugaaccucacuaucc

SEQ ID NO: 46623 - RNA, 20 nt, Artificial Sequence
  Synthetic oligonucleotide: CTLA4-238
ucaagugaaccucacuaucc

SEQ ID NO: 46624 - RNA, 21 nt, Artificial Sequence
  Synthetic oligonucleotide: CTLA4-1742
aucaagugaaccucacuaucc

SEQ ID NO: 46625 - RNA, 22 nt, Artificial Sequence
  Synthetic oligonucleotide: CTLA4-1743
aaucaagugaaccucacuaucc

SEQ ID NO: 46626 - RNA, 23 nt, Artificial Sequence
  Synthetic oligonucleotide: CTLA4-1744
aaaucaagugaaccucacuaucc

SEQ ID NO: 46627 - RNA, 24 nt, Artificial Sequence
  Synthetic oligonucleotide: CTLA4-1745
gaaaucaagugaaccucacuaucc

SEQ ID NO: 46628 - RNA, 18 nt, Artificial Sequence
  Synthetic oligonucleotide: CTLA4-1746
gagugagacuuuuggagc

SEQ ID NO: 46629 - RNA, 19 nt, Artificial Sequence
  Synthetic oligonucleotide: CTLA4-1747
ugagugagacuuuuggagc

SEQ ID NO: 46630 - RNA, 20 nt, Artificial Sequence
  Synthetic oligonucleotide: CTLA4-223
gugagugagacuuuuggagc

SEQ ID NO: 46631 - RNA, 21 nt, Artificial Sequence
  Synthetic oligonucleotide: CTLA4-1748
ggugagugagacuuuuggagc

SEQ ID NO: 46632 - RNA, 22 nt, Artificial Sequence
  Synthetic oligonucleotide: CTLA4-1749
aggugagugagacuuuuggagc

SEQ ID NO: 46633 - RNA, 23 nt, Artificial Sequence
  Synthetic oligonucleotide: CTLA4-1750
aaggugagugagacuuuuggagc

SEQ ID NO: 46634 - RNA, 24 nt, Artificial Sequence
  Synthetic oligonucleotide: CTLA4-1751
aaaggugagugagacuuuuggagc

SEQ ID NO: 46635 - RNA, 18 nt, Artificial Sequence
  Synthetic oligonucleotide: CTLA4-1752
cuagaugauuccaucugc

SEQ ID NO: 46636 - RNA, 19 nt, Artificial Sequence
  Synthetic oligonucleotide: CTLA4-1753
ccuagaugauuccaucugc

SEQ ID NO: 46637 - RNA, 20 nt, Artificial Sequence
  Synthetic oligonucleotide: CTLA4-234
uccuagaugauuccaucugc

SEQ ID NO: 46638 - RNA, 21 nt, Artificial Sequence
  Synthetic oligonucleotide: CTLA4-1754
uuccuagaugauuccaucugc

SEQ ID NO: 46639 - RNA, 22 nt, Artificial Sequence
  Synthetic oligonucleotide: CTLA4-1755
cuuccuagaugauuccaucugc

SEQ ID NO: 46640 - RNA, 23 nt, Artificial Sequence
  Synthetic oligonucleotide: CTLA4-1756
ccuuccuagaugauuccaucugc

SEQ ID NO: 46641 - RNA, 24 nt, Artificial Sequence
  Synthetic oligonucleotide: CTLA4-1757
accuuccuagaugauuccaucugc

SEQ ID NO: 46642 - RNA, 18 nt, Artificial Sequence
  Synthetic oligonucleotide: CTLA4-1758
ggacucuacaucugcaag

SEQ ID NO: 46643 - RNA, 19 nt, Artificial Sequence
  Synthetic oligonucleotide: CTLA4-1759
gggacucuacaucugcaag

SEQ ID NO: 46644 - RNA, 20 nt, Artificial Sequence
  Synthetic oligonucleotide: CTLA4-244
cgggacucuacaucugcaag

SEQ ID NO: 46645 - RNA, 21 nt, Artificial Sequence
  Synthetic oligonucleotide: CTLA4-1760
acgggacucuacaucugcaag

SEQ ID NO: 46646 - RNA, 22 nt, Artificial Sequence
  Synthetic oligonucleotide: CTLA4-1761
cacgggacucuacaucugcaag

SEQ ID NO: 46647 - RNA, 23 nt, Artificial Sequence
  Synthetic oligonucleotide: CTLA4-1762
acacgggacucuacaucugcaag

SEQ ID NO: 46648 - RNA, 24 nt, Artificial Sequence
  Synthetic oligonucleotide: CTLA4-1763
gacacgggacucuacaucugcaag

SEQ ID NO: 46649 - RNA, 18 nt, Artificial Sequence
  Synthetic oligonucleotide: CTLA4-1764
cugcacgggcaccuccag

SEQ ID NO: 46650 - RNA, 19 nt, Artificial Sequence
  Synthetic oligonucleotide: CTLA4-1765
ucugcacgggcaccuccag

SEQ ID NO: 46651 - RNA, 20 nt, Artificial Sequence
  Synthetic oligonucleotide: CTLA4-28
aucugcacgggcaccuccag

SEQ ID NO: 46652 - RNA, 21 nt, Artificial Sequence
  Synthetic oligonucleotide: CTLA4-1766
caucugcacgggcaccuccag

SEQ ID NO: 46653 - RNA, 22 nt, Artificial Sequence
  Synthetic oligonucleotide: CTLA4-1767
ccaucugcacgggcaccuccag

SEQ ID NO: 46654 - RNA, 23 nt, Artificial Sequence
  Synthetic oligonucleotide: CTLA4-1768
uccaucugcacgggcaccuccag

SEQ ID NO: 46655 - RNA, 24 nt, Artificial Sequence
  Synthetic oligonucleotide: CTLA4-1769
uuccaucugcacgggcaccuccag

SEQ ID NO: 46656 - RNA, 18 nt, Artificial Sequence
  Synthetic oligonucleotide: CTLA4-1770
ugugguacuggccagcag

SEQ ID NO: 46657 - RNA, 19 nt, Artificial Sequence
  Synthetic oligonucleotide: CTLA4-1771
cugugguacuggccagcag

SEQ ID NO: 46658 - RNA, 20 nt, Artificial Sequence
  Synthetic oligonucleotide: CTLA4-224
gcugugguacuggccagcag

SEQ ID NO: 46659 - RNA, 21 nt, Artificial Sequence
  Synthetic oligonucleotide: CTLA4-1772
ugcugugguacuggccagcag

SEQ ID NO: 46660 - RNA, 22 nt, Artificial Sequence
  Synthetic oligonucleotide: CTLA4-1773
cugcugugguacuggccagcag

SEQ ID NO: 46661 - RNA, 23 nt, Artificial Sequence
  Synthetic oligonucleotide: CTLA4-1774
ccugcugugguacuggccagcag

SEQ ID NO: 46662 - RNA, 24 nt, Artificial Sequence
  Synthetic oligonucleotide: CTLA4-1775
gccugcugugguacuggccagcag

SEQ ID NO: 46663 - RNA, 18 nt, Artificial Sequence
  Synthetic oligonucleotide: CTLA4-1776
cagcggcacaaggcucag

SEQ ID NO: 46664 - RNA, 19 nt, Artificial Sequence
  Synthetic oligonucleotide: CTLA4-1777
ucagcggcacaaggcucag

SEQ ID NO: 46665 - RNA, 20 nt, Artificial Sequence
  Synthetic oligonucleotide: CTLA4-217
uucagcggcacaaggcucag

SEQ ID NO: 46666 - RNA, 21 nt, Artificial Sequence
  Synthetic oligonucleotide: CTLA4-1778
uuucagcggcacaaggcucag

SEQ ID NO: 46667 - RNA, 22 nt, Artificial Sequence
  Synthetic oligonucleotide: CTLA4-1779
auuucagcggcacaaggcucag

SEQ ID NO: 46668 - RNA, 23 nt, Artificial Sequence
  Synthetic oligonucleotide: CTLA4-1780
gauuucagcggcacaaggcucag

SEQ ID NO: 46669 - RNA, 24 nt, Artificial Sequence
  Synthetic oligonucleotide: CTLA4-1781
ggauuucagcggcacaaggcucag

SEQ ID NO: 46670 - RNA, 18 nt, Artificial Sequence
  Synthetic oligonucleotide: CTLA4-1782
gacucuacaucugcaagg

SEQ ID NO: 46671 - RNA, 19 nt, Artificial Sequence
  Synthetic oligonucleotide: CTLA4-1783
ggacucuacaucugcaagg

SEQ ID NO: 46672 - RNA, 20 nt, Artificial Sequence
  Synthetic oligonucleotide: CTLA4-36
gggacucuacaucugcaagg

SEQ ID NO: 46673 - RNA, 21 nt, Artificial Sequence
  Synthetic oligonucleotide: CTLA4-1784
cgggacucuacaucugcaagg

SEQ ID NO: 46674 - RNA, 22 nt, Artificial Sequence
  Synthetic oligonucleotide: CTLA4-1785
acgggacucuacaucugcaagg

SEQ ID NO: 46675 - RNA, 23 nt, Artificial Sequence
  Synthetic oligonucleotide: CTLA4-1786
cacgggacucuacaucugcaagg

SEQ ID NO: 46676 - RNA, 24 nt, Artificial Sequence
  Synthetic oligonucleotide: CTLA4-1787
acacgggacucuacaucugcaagg

SEQ ID NO: 46677 - RNA, 18 nt, Artificial Sequence
  Synthetic oligonucleotide: CTLA4-1788
ugugcggcaaccuacaug

SEQ ID NO: 46678 - RNA, 19 nt, Artificial Sequence
  Synthetic oligonucleotide: CTLA4-1789
cugugcggcaaccuacaug

SEQ ID NO: 46679 - RNA, 20 nt, Artificial Sequence
  Synthetic oligonucleotide: CTLA4-229
ucugugcggcaaccuacaug

SEQ ID NO: 46680 - RNA, 21 nt, Artificial Sequence
  Synthetic oligonucleotide: CTLA4-1790
gucugugcggcaaccuacaug

SEQ ID NO: 46681 - RNA, 22 nt, Artificial Sequence
  Synthetic oligonucleotide: CTLA4-1791
agucugugcggcaaccuacaug

SEQ ID NO: 46682 - RNA, 23 nt, Artificial Sequence
  Synthetic oligonucleotide: CTLA4-1792
aagucugugcggcaaccuacaug

SEQ ID NO: 46683 - RNA, 24 nt, Artificial Sequence
  Synthetic oligonucleotide: CTLA4-1793
gaagucugugcggcaaccuacaug

SEQ ID NO: 46684 - RNA, 18 nt, Artificial Sequence
  Synthetic oligonucleotide: CTLA4-1794
cccagauuuauguaauug

SEQ ID NO: 46685 - RNA, 19 nt, Artificial Sequence
  Synthetic oligonucleotide: CTLA4-1795
acccagauuuauguaauug

SEQ ID NO: 46686 - RNA, 20 nt, Artificial Sequence
  Synthetic oligonucleotide: CTLA4-348
aacccagauuuauguaauug

SEQ ID NO: 46687 - RNA, 21 nt, Artificial Sequence
  Synthetic oligonucleotide: CTLA4-1796
gaacccagauuuauguaauug

SEQ ID NO: 46688 - RNA, 22 nt, Artificial Sequence
  Synthetic oligonucleotide: CTLA4-1797
ggaacccagauuuauguaauug

SEQ ID NO: 46689 - RNA, 23 nt, Artificial Sequence
  Synthetic oligonucleotide: CTLA4-1798
cggaacccagauuuauguaauug

SEQ ID NO: 46690 - RNA, 24 nt, Artificial Sequence
  Synthetic oligonucleotide: CTLA4-1799
acggaacccagauuuauguaauug

SEQ ID NO: 46691 - RNA, 18 nt, Artificial Sequence
  Synthetic oligonucleotide: CTLA4-1800
ugcggcaaccuacaugau

SEQ ID NO: 46692 - RNA, 19 nt, Artificial Sequence
  Synthetic oligonucleotide: CTLA4-1801
gugcggcaaccuacaugau

SEQ ID NO: 46693 - RNA, 20 nt, Artificial Sequence
  Synthetic oligonucleotide: CTLA4-24
ugugcggcaaccuacaugau

SEQ ID NO: 46694 - RNA, 21 nt, Artificial Sequence
  Synthetic oligonucleotide: CTLA4-1802
cugugcggcaaccuacaugau

SEQ ID NO: 46695 - RNA, 22 nt, Artificial Sequence
  Synthetic oligonucleotide: CTLA4-1803
ucugugcggcaaccuacaugau

SEQ ID NO: 46696 - RNA, 23 nt, Artificial Sequence
  Synthetic oligonucleotide: CTLA4-1804
gucugugcggcaaccuacaugau

SEQ ID NO: 46697 - RNA, 24 nt, Artificial Sequence
  Synthetic oligonucleotide: CTLA4-1805
agucugugcggcaaccuacaugau

SEQ ID NO: 46698 - RNA, 18 nt, Artificial Sequence
  Synthetic oligonucleotide: CTLA4-1806
ccucacuauccaaggacu

SEQ ID NO: 46699 - RNA, 19 nt, Artificial Sequence
  Synthetic oligonucleotide: CTLA4-1807
accucacuauccaaggacu

SEQ ID NO: 46700 - RNA, 20 nt, Artificial Sequence
  Synthetic oligonucleotide: CTLA4-240
aaccucacuauccaaggacu

SEQ ID NO: 46701 - RNA, 21 nt, Artificial Sequence
  Synthetic oligonucleotide: CTLA4-1808
gaaccucacuauccaaggacu

SEQ ID NO: 46702 - RNA, 22 nt, Artificial Sequence
  Synthetic oligonucleotide: CTLA4-1809
ugaaccucacuauccaaggacu

SEQ ID NO: 46703 - RNA, 23 nt, Artificial Sequence
  Synthetic oligonucleotide: CTLA4-1810
gugaaccucacuauccaaggacu

SEQ ID NO: 46704 - RNA, 24 nt, Artificial Sequence
  Synthetic oligonucleotide: CTLA4-1811
agugaaccucacuauccaaggacu

SEQ ID NO: 46705 - RNA, 18 nt, Artificial Sequence
  Synthetic oligonucleotide: CTLA4-1812
caaaggugagugagacuu

SEQ ID NO: 46706 - RNA, 19 nt, Artificial Sequence
  Synthetic oligonucleotide: CTLA4-1813
gcaaaggugagugagacuu

SEQ ID NO: 46707 - RNA, 20 nt, Artificial Sequence
  Synthetic oligonucleotide: CTLA4-221
ugcaaaggugagugagacuu

SEQ ID NO: 46708 - RNA, 21 nt, Artificial Sequence
  Synthetic oligonucleotide: CTLA4-1814
cugcaaaggugagugagacuu

SEQ ID NO: 46709 - RNA, 22 nt, Artificial Sequence
  Synthetic oligonucleotide: CTLA4-1815
ucugcaaaggugagugagacuu

SEQ ID NO: 46710 - RNA, 23 nt, Artificial Sequence
  Synthetic oligonucleotide: CTLA4-1816
uucugcaaaggugagugagacuu

SEQ ID NO: 46711 - RNA, 24 nt, Artificial Sequence
  Synthetic oligonucleotide: CTLA4-1817
cuucugcaaaggugagugagacuu

SEQ ID NO: 46712 - RNA, 18 nt, Artificial Sequence
  Synthetic oligonucleotide: CTLA4-1818
aaaggugagugagacuuu

SEQ ID NO: 46713 - RNA, 19 nt, Artificial Sequence
  Synthetic oligonucleotide: CTLA4-1819
caaaggugagugagacuuu

SEQ ID NO: 46714 - RNA, 20 nt, Artificial Sequence
  Synthetic oligonucleotide: CTLA4-9
gcaaaggugagugagacuuu

SEQ ID NO: 46715 - RNA, 21 nt, Artificial Sequence
  Synthetic oligonucleotide: CTLA4-1820
ugcaaaggugagugagacuuu

SEQ ID NO: 46716 - RNA, 22 nt, Artificial Sequence
  Synthetic oligonucleotide: CTLA4-1821
cugcaaaggugagugagacuuu

SEQ ID NO: 46717 - RNA, 23 nt, Artificial Sequence
  Synthetic oligonucleotide: CTLA4-1822
ucugcaaaggugagugagacuuu

SEQ ID NO: 46718 - RNA, 24 nt, Artificial Sequence
  Synthetic oligonucleotide: CTLA4-1823
uucugcaaaggugagugagacuuu

SEQ ID NO: 46719 - RNA, 18 nt, Artificial Sequence
  Synthetic oligonucleotide: CTLA4-1824
ccccgaacuaacugcugc

SEQ ID NO: 46720 - RNA, 19 nt, Artificial Sequence
  Synthetic oligonucleotide: CTLA4-1825
accccgaacuaacugcugc

SEQ ID NO: 46721 - RNA, 20 nt, Artificial Sequence
  Synthetic oligonucleotide: CTLA4-405
aaccccgaacuaacugcugc

SEQ ID NO: 46722 - RNA, 21 nt, Artificial Sequence
  Synthetic oligonucleotide: CTLA4-1826
caaccccgaacuaacugcugc

SEQ ID NO: 46723 - RNA, 22 nt, Artificial Sequence
  Synthetic oligonucleotide: CTLA4-1827
acaaccccgaacuaacugcugc

SEQ ID NO: 46724 - RNA, 23 nt, Artificial Sequence
  Synthetic oligonucleotide: CTLA4-1828
aacaaccccgaacuaacugcugc

SEQ ID NO: 46725 - RNA, 24 nt, Artificial Sequence
  Synthetic oligonucleotide: CTLA4-1829
aaacaaccccgaacuaacugcugc

SEQ ID NO: 46726 - RNA, 18 nt, Artificial Sequence
  Synthetic oligonucleotide: CTLA4-1830
aaugguuucucaauugau

SEQ ID NO: 46727 - RNA, 19 nt, Artificial Sequence
  Synthetic oligonucleotide: CTLA4-1831
uaaugguuucucaauugau

SEQ ID NO: 46728 - RNA, 20 nt, Artificial Sequence
  Synthetic oligonucleotide: CTLA4-189
auaaugguuucucaauugau

SEQ ID NO: 46729 - RNA, 21 nt, Artificial Sequence
  Synthetic oligonucleotide: CTLA4-1832
cauaaugguuucucaauugau

SEQ ID NO: 46730 - RNA, 22 nt, Artificial Sequence
  Synthetic oligonucleotide: CTLA4-1833
ucauaaugguuucucaauugau

SEQ ID NO: 46731 - RNA, 23 nt, Artificial Sequence
  Synthetic oligonucleotide: CTLA4-1834
uucauaaugguuucucaauugau

SEQ ID NO: 46732 - RNA, 24 nt, Artificial Sequence
  Synthetic oligonucleotide: CTLA4-1835
cuucauaaugguuucucaauugau

SEQ ID NO: 46733 - RNA, 18 nt, Artificial Sequence
  Synthetic oligonucleotide: CTLA4-1836
ggauccagaggaggaagu

SEQ ID NO: 46734 - RNA, 19 nt, Artificial Sequence
  Synthetic oligonucleotide: CTLA4-1837
aggauccagaggaggaagu

SEQ ID NO: 46735 - RNA, 20 nt, Artificial Sequence
  Synthetic oligonucleotide: CTLA4-399
aaggauccagaggaggaagu

SEQ ID NO: 46736 - RNA, 21 nt, Artificial Sequence
  Synthetic oligonucleotide: CTLA4-1838
caaggauccagaggaggaagu

SEQ ID NO: 46737 - RNA, 22 nt, Artificial Sequence
  Synthetic oligonucleotide: CTLA4-1839
gcaaggauccagaggaggaagu

SEQ ID NO: 46738 - RNA, 23 nt, Artificial Sequence
  Synthetic oligonucleotide: CTLA4-1840
ugcaaggauccagaggaggaagu

SEQ ID NO: 46739 - RNA, 24 nt, Artificial Sequence
  Synthetic oligonucleotide: CTLA4-1841
cugcaaggauccagaggaggaagu

SEQ ID NO: 46740 - RNA, 18 nt, Artificial Sequence
  Synthetic oligonucleotide: CTLA4-1842
cagaaucugggcacgguu

SEQ ID NO: 46741 - RNA, 19 nt, Artificial Sequence
  Synthetic oligonucleotide: CTLA4-1843
ucagaaucugggcacgguu

SEQ ID NO: 46742 - RNA, 20 nt, Artificial Sequence
  Synthetic oligonucleotide: CTLA4-397
gucagaaucugggcacgguu

SEQ ID NO: 46743 - RNA, 21 nt, Artificial Sequence
  Synthetic oligonucleotide: CTLA4-1844
agucagaaucugggcacgguu

SEQ ID NO: 46744 - RNA, 22 nt, Artificial Sequence
  Synthetic oligonucleotide: CTLA4-1845
aagucagaaucugggcacgguu

SEQ ID NO: 46745 - RNA, 23 nt, Artificial Sequence
  Synthetic oligonucleotide: CTLA4-1846
gaagucagaaucugggcacgguu

SEQ ID NO: 46746 - RNA, 24 nt, Artificial Sequence
  Synthetic oligonucleotide: CTLA4-1847
ggaagucagaaucugggcacgguu

SEQ ID NO: 46747 - RNA, 18 nt, Artificial Sequence
  Synthetic oligonucleotide: CTLA4-1848
agaaaccauuaugaagaa

SEQ ID NO: 46748 - RNA, 19 nt, Artificial Sequence
  Synthetic oligonucleotide: CTLA4-1849
gagaaaccauuaugaagaa

SEQ ID NO: 46749 - RNA, 20 nt, Artificial Sequence
  Synthetic oligonucleotide: CTLA4-369
ugagaaaccauuaugaagaa

SEQ ID NO: 46750 - RNA, 21 nt, Artificial Sequence
  Synthetic oligonucleotide: CTLA4-1850
uugagaaaccauuaugaagaa

SEQ ID NO: 46751 - RNA, 22 nt, Artificial Sequence
  Synthetic oligonucleotide: CTLA4-1851
auugagaaaccauuaugaagaa

SEQ ID NO: 46752 - RNA, 23 nt, Artificial Sequence
  Synthetic oligonucleotide: CTLA4-1852
aauugagaaaccauuaugaagaa

SEQ ID NO: 46753 - RNA, 24 nt, Artificial Sequence
  Synthetic oligonucleotide: CTLA4-1853
caauugagaaaccauuaugaagaa

SEQ ID NO: 46754 - RNA, 18 nt, Artificial Sequence
  Synthetic oligonucleotide: CTLA4-1854
aagaagcccucuuacaac

SEQ ID NO: 46755 - RNA, 19 nt, Artificial Sequence
  Synthetic oligonucleotide: CTLA4-1855
aaagaagcccucuuacaac

SEQ ID NO: 46756 - RNA, 20 nt, Artificial Sequence
  Synthetic oligonucleotide: CTLA4-154
aaaagaagcccucuuacaac

SEQ ID NO: 46757 - RNA, 21 nt, Artificial Sequence
  Synthetic oligonucleotide: CTLA4-1856
gaaaagaagcccucuuacaac

SEQ ID NO: 46758 - RNA, 22 nt, Artificial Sequence
  Synthetic oligonucleotide: CTLA4-1857
agaaaagaagcccucuuacaac

SEQ ID NO: 46759 - RNA, 23 nt, Artificial Sequence
  Synthetic oligonucleotide: CTLA4-1858
aagaaaagaagcccucuuacaac

SEQ ID NO: 46760 - RNA, 24 nt, Artificial Sequence
  Synthetic oligonucleotide: CTLA4-1859
aaagaaaagaagcccucuuacaac

SEQ ID NO: 46761 - RNA, 18 nt, Artificial Sequence
  Synthetic oligonucleotide: CTLA4-1860
aaaugcccccaacagagc

SEQ ID NO: 46762 - RNA, 19 nt, Artificial Sequence
  Synthetic oligonucleotide: CTLA4-1861
aaaaugcccccaacagagc

SEQ ID NO: 46763 - RNA, 20 nt, Artificial Sequence
  Synthetic oligonucleotide: CTLA4-362
gaaaaugcccccaacagagc

SEQ ID NO: 46764 - RNA, 21 nt, Artificial Sequence
  Synthetic oligonucleotide: CTLA4-1862
ugaaaaugcccccaacagagc

SEQ ID NO: 46765 - RNA, 22 nt, Artificial Sequence
  Synthetic oligonucleotide: CTLA4-1863
gugaaaaugcccccaacagagc

SEQ ID NO: 46766 - RNA, 23 nt, Artificial Sequence
  Synthetic oligonucleotide: CTLA4-1864
ugugaaaaugcccccaacagagc

SEQ ID NO: 46767 - RNA, 24 nt, Artificial Sequence
  Synthetic oligonucleotide: CTLA4-1865
augugaaaaugcccccaacagagc

SEQ ID NO: 46768 - RNA, 18 nt, Artificial Sequence
  Synthetic oligonucleotide: CTLA4-1866
guuucuuugagcaaaaug

SEQ ID NO: 46769 - RNA, 19 nt, Artificial Sequence
  Synthetic oligonucleotide: CTLA4-1867
uguuucuuugagcaaaaug

SEQ ID NO: 46770 - RNA, 20 nt, Artificial Sequence
  Synthetic oligonucleotide: CTLA4-355
cuguuucuuugagcaaaaug

SEQ ID NO: 46771 - RNA, 21 nt, Artificial Sequence
  Synthetic oligonucleotide: CTLA4-1868
gcuguuucuuugagcaaaaug

SEQ ID NO: 46772 - RNA, 22 nt, Artificial Sequence
  Synthetic oligonucleotide: CTLA4-1869
agcuguuucuuugagcaaaaug

SEQ ID NO: 46773 - RNA, 23 nt, Artificial Sequence
  Synthetic oligonucleotide: CTLA4-1870
cagcuguuucuuugagcaaaaug

SEQ ID NO: 46774 - RNA, 24 nt, Artificial Sequence
  Synthetic oligonucleotide: CTLA4-1871
acagcuguuucuuugagcaaaaug

SEQ ID NO: 46775 - RNA, 18 nt, Artificial Sequence
  Synthetic oligonucleotide: CTLA4-1872
agauucugacuuccuccu

SEQ ID NO: 46776 - RNA, 19 nt, Artificial Sequence
  Synthetic oligonucleotide: CTLA4-1873
cagauucugacuuccuccu

SEQ ID NO: 46777 - RNA, 20 nt, Artificial Sequence
  Synthetic oligonucleotide: CTLA4-351
ccagauucugacuuccuccu

SEQ ID NO: 46778 - RNA, 21 nt, Artificial Sequence
  Synthetic oligonucleotide: CTLA4-1874
cccagauucugacuuccuccu

SEQ ID NO: 46779 - RNA, 22 nt, Artificial Sequence
  Synthetic oligonucleotide: CTLA4-1875
gcccagauucugacuuccuccu

SEQ ID NO: 46780 - RNA, 23 nt, Artificial Sequence
  Synthetic oligonucleotide: CTLA4-1876
ugcccagauucugacuuccuccu

SEQ ID NO: 46781 - RNA, 24 nt, Artificial Sequence
  Synthetic oligonucleotide: CTLA4-1877
gugcccagauucugacuuccuccu

SEQ ID NO: 46782 - RNA, 18 nt, Artificial Sequence
  Synthetic oligonucleotide: CTLA4-1878
uccuugcagcaguuaguu

SEQ ID NO: 46783 - RNA, 19 nt, Artificial Sequence
  Synthetic oligonucleotide: CTLA4-1879
auccuugcagcaguuaguu

SEQ ID NO: 46784 - RNA, 20 nt, Artificial Sequence
  Synthetic oligonucleotide: CTLA4-148
gauccuugcagcaguuaguu

SEQ ID NO: 46785 - RNA, 21 nt, Artificial Sequence
  Synthetic oligonucleotide: CTLA4-1880
ggauccuugcagcaguuaguu

SEQ ID NO: 46786 - RNA, 22 nt, Artificial Sequence
  Synthetic oligonucleotide: CTLA4-1881
uggauccuugcagcaguuaguu

SEQ ID NO: 46787 - RNA, 23 nt, Artificial Sequence
  Synthetic oligonucleotide: CTLA4-1882
cuggauccuugcagcaguuaguu

SEQ ID NO: 46788 - RNA, 24 nt, Artificial Sequence
  Synthetic oligonucleotide: CTLA4-1883
ucuggauccuugcagcaguuaguu

SEQ ID NO: 46789 - RNA, 18 nt, Artificial Sequence
  Synthetic oligonucleotide: CTLA4-1884
uuagcugucaaacacaaa

SEQ ID NO: 46790 - RNA, 19 nt, Artificial Sequence
  Synthetic oligonucleotide: CTLA4-1885
uuuagcugucaaacacaaa

SEQ ID NO: 46791 - RNA, 20 nt, Artificial Sequence
  Synthetic oligonucleotide: CTLA4-412
cuuuagcugucaaacacaaa

SEQ ID NO: 46792 - RNA, 21 nt, Artificial Sequence
  Synthetic oligonucleotide: CTLA4-1886
ucuuuagcugucaaacacaaa

SEQ ID NO: 46793 - RNA, 22 nt, Artificial Sequence
  Synthetic oligonucleotide: CTLA4-1887
uucuuuagcugucaaacacaaa

SEQ ID NO: 46794 - RNA, 23 nt, Artificial Sequence
  Synthetic oligonucleotide: CTLA4-1888
uuucuuuagcugucaaacacaaa

SEQ ID NO: 46795 - RNA, 24 nt, Artificial Sequence
  Synthetic oligonucleotide: CTLA4-1889
uuuucuuuagcugucaaacacaaa

SEQ ID NO: 46796 - RNA, 18 nt, Artificial Sequence
  Synthetic oligonucleotide: CTLA4-1890
acgguucuggaucugcaa

SEQ ID NO: 46797 - RNA, 19 nt, Artificial Sequence
  Synthetic oligonucleotide: CTLA4-1891
cacgguucuggaucugcaa

SEQ ID NO: 46798 - RNA, 20 nt, Artificial Sequence
  Synthetic oligonucleotide: CTLA4-396
gcacgguucuggaucugcaa

SEQ ID NO: 46799 - RNA, 21 nt, Artificial Sequence
  Synthetic oligonucleotide: CTLA4-1892
ggcacgguucuggaucugcaa

SEQ ID NO: 46800 - RNA, 22 nt, Artificial Sequence
  Synthetic oligonucleotide: CTLA4-1893
gggcacgguucuggaucugcaa

SEQ ID NO: 46801 - RNA, 23 nt, Artificial Sequence
  Synthetic oligonucleotide: CTLA4-1894
ugggcacgguucuggaucugcaa

SEQ ID NO: 46802 - RNA, 24 nt, Artificial Sequence
  Synthetic oligonucleotide: CTLA4-1895
cugggcacgguucuggaucugcaa

SEQ ID NO: 46803 - RNA, 18 nt, Artificial Sequence
  Synthetic oligonucleotide: CTLA4-1896
cauagaccccuguuguaa

SEQ ID NO: 46804 - RNA, 19 nt, Artificial Sequence
  Synthetic oligonucleotide: CTLA4-1897
acauagaccccuguuguaa

SEQ ID NO: 46805 - RNA, 20 nt, Artificial Sequence
  Synthetic oligonucleotide: CTLA4-413
cacauagaccccuguuguaa

SEQ ID NO: 46806 - RNA, 21 nt, Artificial Sequence
  Synthetic oligonucleotide: CTLA4-1898
ucacauagaccccuguuguaa

SEQ ID NO: 46807 - RNA, 22 nt, Artificial Sequence
  Synthetic oligonucleotide: CTLA4-1899
uucacauagaccccuguuguaa

SEQ ID NO: 46808 - RNA, 23 nt, Artificial Sequence
  Synthetic oligonucleotide: CTLA4-1900
uuucacauagaccccuguuguaa

SEQ ID NO: 46809 - RNA, 24 nt, Artificial Sequence
  Synthetic oligonucleotide: CTLA4-1901
uuuucacauagaccccuguuguaa

SEQ ID NO: 46810 - RNA, 18 nt, Artificial Sequence
  Synthetic oligonucleotide: CTLA4-1902
aacugcugcaaggaucca

SEQ ID NO: 46811 - RNA, 19 nt, Artificial Sequence
  Synthetic oligonucleotide: CTLA4-1903
uaacugcugcaaggaucca

SEQ ID NO: 46812 - RNA, 20 nt, Artificial Sequence
  Synthetic oligonucleotide: CTLA4-403
cuaacugcugcaaggaucca

SEQ ID NO: 46813 - RNA, 21 nt, Artificial Sequence
  Synthetic oligonucleotide: CTLA4-1904
acuaacugcugcaaggaucca

SEQ ID NO: 46814 - RNA, 22 nt, Artificial Sequence
  Synthetic oligonucleotide: CTLA4-1905
aacuaacugcugcaaggaucca

SEQ ID NO: 46815 - RNA, 23 nt, Artificial Sequence
  Synthetic oligonucleotide: CTLA4-1906
gaacuaacugcugcaaggaucca

SEQ ID NO: 46816 - RNA, 24 nt, Artificial Sequence
  Synthetic oligonucleotide: CTLA4-1907
cgaacuaacugcugcaaggaucca

SEQ ID NO: 46817 - RNA, 18 nt, Artificial Sequence
  Synthetic oligonucleotide: CTLA4-1908
cacucaccauuuugcuca

SEQ ID NO: 46818 - RNA, 19 nt, Artificial Sequence
  Synthetic oligonucleotide: CTLA4-1909
acacucaccauuuugcuca

SEQ ID NO: 46819 - RNA, 20 nt, Artificial Sequence
  Synthetic oligonucleotide: CTLA4-411
cacacucaccauuuugcuca

SEQ ID NO: 46820 - RNA, 21 nt, Artificial Sequence
  Synthetic oligonucleotide: CTLA4-1910
ccacacucaccauuuugcuca

SEQ ID NO: 46821 - RNA, 22 nt, Artificial Sequence
  Synthetic oligonucleotide: CTLA4-1911
accacacucaccauuuugcuca

SEQ ID NO: 46822 - RNA, 23 nt, Artificial Sequence
  Synthetic oligonucleotide: CTLA4-1912
caccacacucaccauuuugcuca

SEQ ID NO: 46823 - RNA, 24 nt, Artificial Sequence
  Synthetic oligonucleotide: CTLA4-1913
gcaccacacucaccauuuugcuca

SEQ ID NO: 46824 - RNA, 18 nt, Artificial Sequence
  Synthetic oligonucleotide: CTLA4-1914
uaaugguuucucaauuga

SEQ ID NO: 46825 - RNA, 19 nt, Artificial Sequence
  Synthetic oligonucleotide: CTLA4-1915
auaaugguuucucaauuga

SEQ ID NO: 46826 - RNA, 20 nt, Artificial Sequence
  Synthetic oligonucleotide: CTLA4-190
cauaaugguuucucaauuga

SEQ ID NO: 46827 - RNA, 21 nt, Artificial Sequence
  Synthetic oligonucleotide: CTLA4-1916
ucauaaugguuucucaauuga

SEQ ID NO: 46828 - RNA, 22 nt, Artificial Sequence
  Synthetic oligonucleotide: CTLA4-1917
uucauaaugguuucucaauuga

SEQ ID NO: 46829 - RNA, 23 nt, Artificial Sequence
  Synthetic oligonucleotide: CTLA4-1918
cuucauaaugguuucucaauuga

SEQ ID NO: 46830 - RNA, 24 nt, Artificial Sequence
  Synthetic oligonucleotide: CTLA4-1919
ucuucauaaugguuucucaauuga

SEQ ID NO: 46831 - RNA, 18 nt, Artificial Sequence
  Synthetic oligonucleotide: CTLA4-1920
agcuauaaaaaaacaacc

SEQ ID NO: 46832 - RNA, 19 nt, Artificial Sequence
  Synthetic oligonucleotide: CTLA4-1921
aagcuauaaaaaaacaacc

SEQ ID NO: 46833 - RNA, 20 nt, Artificial Sequence
  Synthetic oligonucleotide: CTLA4-406
aaagcuauaaaaaaacaacc

SEQ ID NO: 46834 - RNA, 21 nt, Artificial Sequence
  Synthetic oligonucleotide: CTLA4-1922
gaaagcuauaaaaaaacaacc

SEQ ID NO: 46835 - RNA, 22 nt, Artificial Sequence
  Synthetic oligonucleotide: CTLA4-1923
agaaagcuauaaaaaaacaacc

SEQ ID NO: 46836 - RNA, 23 nt, Artificial Sequence
  Synthetic oligonucleotide: CTLA4-1924
gagaaagcuauaaaaaaacaacc

SEQ ID NO: 46837 - RNA, 24 nt, Artificial Sequence
  Synthetic oligonucleotide: CTLA4-1925
ggagaaagcuauaaaaaaacaacc

SEQ ID NO: 46838 - RNA, 18 nt, Artificial Sequence
  Synthetic oligonucleotide: CTLA4-1926
cuaacugcugcaaggauc

SEQ ID NO: 46839 - RNA, 19 nt, Artificial Sequence
  Synthetic oligonucleotide: CTLA4-1927
acuaacugcugcaaggauc

SEQ ID NO: 46840 - RNA, 20 nt, Artificial Sequence
  Synthetic oligonucleotide: CTLA4-404
aacuaacugcugcaaggauc

SEQ ID NO: 46841 - RNA, 21 nt, Artificial Sequence
  Synthetic oligonucleotide: CTLA4-1928
gaacuaacugcugcaaggauc

SEQ ID NO: 46842 - RNA, 22 nt, Artificial Sequence
  Synthetic oligonucleotide: CTLA4-1929
cgaacuaacugcugcaaggauc

SEQ ID NO: 46843 - RNA, 23 nt, Artificial Sequence
  Synthetic oligonucleotide: CTLA4-1930
ccgaacuaacugcugcaaggauc

SEQ ID NO: 46844 - RNA, 24 nt, Artificial Sequence
  Synthetic oligonucleotide: CTLA4-1931
cccgaacuaacugcugcaaggauc

SEQ ID NO: 46845 - RNA, 18 nt, Artificial Sequence
  Synthetic oligonucleotide: CTLA4-1932
cugcaacagaaaacaaag

SEQ ID NO: 46846 - RNA, 19 nt, Artificial Sequence
  Synthetic oligonucleotide: CTLA4-1933
ucugcaacagaaaacaaag

SEQ ID NO: 46847 - RNA, 20 nt, Artificial Sequence
  Synthetic oligonucleotide: CTLA4-395
aucugcaacagaaaacaaag

SEQ ID NO: 46848 - RNA, 21 nt, Artificial Sequence
  Synthetic oligonucleotide: CTLA4-1934
gaucugcaacagaaaacaaag

SEQ ID NO: 46849 - RNA, 22 nt, Artificial Sequence
  Synthetic oligonucleotide: CTLA4-1935
ggaucugcaacagaaaacaaag

SEQ ID NO: 46850 - RNA, 23 nt, Artificial Sequence
  Synthetic oligonucleotide: CTLA4-1936
uggaucugcaacagaaaacaaag

SEQ ID NO: 46851 - RNA, 24 nt, Artificial Sequence
  Synthetic oligonucleotide: CTLA4-1937
cuggaucugcaacagaaaacaaag

SEQ ID NO: 46852 - RNA, 18 nt, Artificial Sequence
  Synthetic oligonucleotide: CTLA4-1938
acugcugcaaggauccag

SEQ ID NO: 46853 - RNA, 19 nt, Artificial Sequence
  Synthetic oligonucleotide: CTLA4-1939
aacugcugcaaggauccag

SEQ ID NO: 46854 - RNA, 20 nt, Artificial Sequence
  Synthetic oligonucleotide: CTLA4-178
uaacugcugcaaggauccag

SEQ ID NO: 46855 - RNA, 21 nt, Artificial Sequence
  Synthetic oligonucleotide: CTLA4-1940
cuaacugcugcaaggauccag

SEQ ID NO: 46856 - RNA, 22 nt, Artificial Sequence
  Synthetic oligonucleotide: CTLA4-1941
acuaacugcugcaaggauccag

SEQ ID NO: 46857 - RNA, 23 nt, Artificial Sequence
  Synthetic oligonucleotide: CTLA4-1942
aacuaacugcugcaaggauccag

SEQ ID NO: 46858 - RNA, 24 nt, Artificial Sequence
  Synthetic oligonucleotide: CTLA4-1943
gaacuaacugcugcaaggauccag

SEQ ID NO: 46859 - RNA, 18 nt, Artificial Sequence
  Synthetic oligonucleotide: CTLA4-1944
ugcugcaaggauccagag

SEQ ID NO: 46860 - RNA, 19 nt, Artificial Sequence
  Synthetic oligonucleotide: CTLA4-1945
cugcugcaaggauccagag

SEQ ID NO: 46861 - RNA, 20 nt, Artificial Sequence
  Synthetic oligonucleotide: CTLA4-401
acugcugcaaggauccagag

SEQ ID NO: 46862 - RNA, 21 nt, Artificial Sequence
  Synthetic oligonucleotide: CTLA4-1946
aacugcugcaaggauccagag

SEQ ID NO: 46863 - RNA, 22 nt, Artificial Sequence
  Synthetic oligonucleotide: CTLA4-1947
uaacugcugcaaggauccagag

SEQ ID NO: 46864 - RNA, 23 nt, Artificial Sequence
  Synthetic oligonucleotide: CTLA4-1948
cuaacugcugcaaggauccagag

SEQ ID NO: 46865 - RNA, 24 nt, Artificial Sequence
  Synthetic oligonucleotide: CTLA4-1949
acuaacugcugcaaggauccagag

SEQ ID NO: 46866 - RNA, 18 nt, Artificial Sequence
  Synthetic oligonucleotide: CTLA4-1950
caaagaaacagcugugag

SEQ ID NO: 46867 - RNA, 19 nt, Artificial Sequence
  Synthetic oligonucleotide: CTLA4-1951
ucaaagaaacagcugugag

SEQ ID NO: 46868 - RNA, 20 nt, Artificial Sequence
  Synthetic oligonucleotide: CTLA4-407
cucaaagaaacagcugugag

SEQ ID NO: 46869 - RNA, 21 nt, Artificial Sequence
  Synthetic oligonucleotide: CTLA4-1952
gcucaaagaaacagcugugag

SEQ ID NO: 46870 - RNA, 22 nt, Artificial Sequence
  Synthetic oligonucleotide: CTLA4-1953
ugcucaaagaaacagcugugag

SEQ ID NO: 46871 - RNA, 23 nt, Artificial Sequence
  Synthetic oligonucleotide: CTLA4-1954
uugcucaaagaaacagcugugag

SEQ ID NO: 46872 - RNA, 24 nt, Artificial Sequence
  Synthetic oligonucleotide: CTLA4-1955
uuugcucaaagaaacagcugugag

SEQ ID NO: 46873 - RNA, 18 nt, Artificial Sequence
  Synthetic oligonucleotide: CTLA4-1956
gaugggaauaaaauaagg

SEQ ID NO: 46874 - RNA, 19 nt, Artificial Sequence
  Synthetic oligonucleotide: CTLA4-1957
ugaugggaauaaaauaagg

SEQ ID NO: 46875 - RNA, 20 nt, Artificial Sequence
  Synthetic oligonucleotide: CTLA4-418
uugaugggaauaaaauaagg

SEQ ID NO: 46876 - RNA, 21 nt, Artificial Sequence
  Synthetic oligonucleotide: CTLA4-1958
auugaugggaauaaaauaagg

SEQ ID NO: 46877 - RNA, 22 nt, Artificial Sequence
  Synthetic oligonucleotide: CTLA4-1959
aauugaugggaauaaaauaagg

SEQ ID NO: 46878 - RNA, 23 nt, Artificial Sequence
  Synthetic oligonucleotide: CTLA4-1960
caauugaugggaauaaaauaagg

SEQ ID NO: 46879 - RNA, 24 nt, Artificial Sequence
  Synthetic oligonucleotide: CTLA4-1961
ucaauugaugggaauaaaauaagg

SEQ ID NO: 46880 - RNA, 18 nt, Artificial Sequence
  Synthetic oligonucleotide: CTLA4-1962
gcugcaaggauccagagg

SEQ ID NO: 46881 - RNA, 19 nt, Artificial Sequence
  Synthetic oligonucleotide: CTLA4-1963
ugcugcaaggauccagagg

SEQ ID NO: 46882 - RNA, 20 nt, Artificial Sequence
  Synthetic oligonucleotide: CTLA4-177
cugcugcaaggauccagagg

SEQ ID NO: 46883 - RNA, 21 nt, Artificial Sequence
  Synthetic oligonucleotide: CTLA4-1964
acugcugcaaggauccagagg

SEQ ID NO: 46884 - RNA, 22 nt, Artificial Sequence
  Synthetic oligonucleotide: CTLA4-1965
aacugcugcaaggauccagagg

SEQ ID NO: 46885 - RNA, 23 nt, Artificial Sequence
  Synthetic oligonucleotide: CTLA4-1966
uaacugcugcaaggauccagagg

SEQ ID NO: 46886 - RNA, 24 nt, Artificial Sequence
  Synthetic oligonucleotide: CTLA4-1967
cuaacugcugcaaggauccagagg

SEQ ID NO: 46887 - RNA, 18 nt, Artificial Sequence
  Synthetic oligonucleotide: CTLA4-1968
uuucacauucuggcucug

SEQ ID NO: 46888 - RNA, 19 nt, Artificial Sequence
  Synthetic oligonucleotide: CTLA4-1969
uuuucacauucuggcucug

SEQ ID NO: 46889 - RNA, 20 nt, Artificial Sequence
  Synthetic oligonucleotide: CTLA4-417
cuuuucacauucuggcucug

SEQ ID NO: 46890 - RNA, 21 nt, Artificial Sequence
  Synthetic oligonucleotide: CTLA4-1970
gcuuuucacauucuggcucug

SEQ ID NO: 46891 - RNA, 22 nt, Artificial Sequence
  Synthetic oligonucleotide: CTLA4-1971
ugcuuuucacauucuggcucug

SEQ ID NO: 46892 - RNA, 23 nt, Artificial Sequence
  Synthetic oligonucleotide: CTLA4-1972
uugcuuuucacauucuggcucug

SEQ ID NO: 46893 - RNA, 24 nt, Artificial Sequence
  Synthetic oligonucleotide: CTLA4-1973
auugcuuuucacauucuggcucug

SEQ ID NO: 46894 - RNA, 18 nt, Artificial Sequence
  Synthetic oligonucleotide: CTLA4-1974
cucaaagaaacagcugug

SEQ ID NO: 46895 - RNA, 19 nt, Artificial Sequence
  Synthetic oligonucleotide: CTLA4-1975
gcucaaagaaacagcugug

SEQ ID NO: 46896 - RNA, 20 nt, Artificial Sequence
  Synthetic oligonucleotide: CTLA4-180
ugcucaaagaaacagcugug

SEQ ID NO: 46897 - RNA, 21 nt, Artificial Sequence
  Synthetic oligonucleotide: CTLA4-1976
uugcucaaagaaacagcugug

SEQ ID NO: 46898 - RNA, 22 nt, Artificial Sequence
  Synthetic oligonucleotide: CTLA4-1977
uuugcucaaagaaacagcugug

SEQ ID NO: 46899 - RNA, 23 nt, Artificial Sequence
  Synthetic oligonucleotide: CTLA4-1978
uuuugcucaaagaaacagcugug

SEQ ID NO: 46900 - RNA, 24 nt, Artificial Sequence
  Synthetic oligonucleotide: CTLA4-1979
auuuugcucaaagaaacagcugug

SEQ ID NO: 46901 - RNA, 18 nt, Artificial Sequence
  Synthetic oligonucleotide: CTLA4-1980
auaaugguuucucaauug

SEQ ID NO: 46902 - RNA, 19 nt, Artificial Sequence
  Synthetic oligonucleotide: CTLA4-1981
cauaaugguuucucaauug

SEQ ID NO: 46903 - RNA, 20 nt, Artificial Sequence
  Synthetic oligonucleotide: CTLA4-421
ucauaaugguuucucaauug

SEQ ID NO: 46904 - RNA, 21 nt, Artificial Sequence
  Synthetic oligonucleotide: CTLA4-1982
uucauaaugguuucucaauug

SEQ ID NO: 46905 - RNA, 22 nt, Artificial Sequence
  Synthetic oligonucleotide: CTLA4-1983
cuucauaaugguuucucaauug

SEQ ID NO: 46906 - RNA, 23 nt, Artificial Sequence
  Synthetic oligonucleotide: CTLA4-1984
ucuucauaaugguuucucaauug

SEQ ID NO: 46907 - RNA, 24 nt, Artificial Sequence
  Synthetic oligonucleotide: CTLA4-1985
uucuucauaaugguuucucaauug

SEQ ID NO: 46908 - RNA, 18 nt, Artificial Sequence
  Synthetic oligonucleotide: CTLA4-1986
agaggaggaagucagaau

SEQ ID NO: 46909 - RNA, 19 nt, Artificial Sequence
  Synthetic oligonucleotide: CTLA4-1987
cagaggaggaagucagaau

SEQ ID NO: 46910 - RNA, 20 nt, Artificial Sequence
  Synthetic oligonucleotide: CTLA4-398
ccagaggaggaagucagaau

SEQ ID NO: 46911 - RNA, 21 nt, Artificial Sequence
  Synthetic oligonucleotide: CTLA4-1988
uccagaggaggaagucagaau

SEQ ID NO: 46912 - RNA, 22 nt, Artificial Sequence
  Synthetic oligonucleotide: CTLA4-1989
auccagaggaggaagucagaau

SEQ ID NO: 46913 - RNA, 23 nt, Artificial Sequence
  Synthetic oligonucleotide: CTLA4-1990
gauccagaggaggaagucagaau

SEQ ID NO: 46914 - RNA, 24 nt, Artificial Sequence
  Synthetic oligonucleotide: CTLA4-1991
ggauccagaggaggaagucagaau

SEQ ID NO: 46915 - RNA, 18 nt, Artificial Sequence
  Synthetic oligonucleotide: CTLA4-1992
uugcucaaagaaacagcu

SEQ ID NO: 46916 - RNA, 19 nt, Artificial Sequence
  Synthetic oligonucleotide: CTLA4-1993
uuugcucaaagaaacagcu

SEQ ID NO: 46917 - RNA, 20 nt, Artificial Sequence
  Synthetic oligonucleotide: CTLA4-410
uuuugcucaaagaaacagcu

SEQ ID NO: 46918 - RNA, 21 nt, Artificial Sequence
  Synthetic oligonucleotide: CTLA4-1994
auuuugcucaaagaaacagcu

SEQ ID NO: 46919 - RNA, 22 nt, Artificial Sequence
  Synthetic oligonucleotide: CTLA4-1995
cauuuugcucaaagaaacagcu

SEQ ID NO: 46920 - RNA, 23 nt, Artificial Sequence
  Synthetic oligonucleotide: CTLA4-1996
ccauuuugcucaaagaaacagcu

SEQ ID NO: 46921 - RNA, 24 nt, Artificial Sequence
  Synthetic oligonucleotide: CTLA4-1997
accauuuugcucaaagaaacagcu

SEQ ID NO: 46922 - RNA, 18 nt, Artificial Sequence
  Synthetic oligonucleotide: CTLA4-1998
gcucaaagaaacagcugu

SEQ ID NO: 46923 - RNA, 19 nt, Artificial Sequence
  Synthetic oligonucleotide: CTLA4-1999
ugcucaaagaaacagcugu

SEQ ID NO: 46924 - RNA, 20 nt, Artificial Sequence
  Synthetic oligonucleotide: CTLA4-409
uugcucaaagaaacagcugu

SEQ ID NO: 46925 - RNA, 21 nt, Artificial Sequence
  Synthetic oligonucleotide: CTLA4-2000
uuugcucaaagaaacagcugu

SEQ ID NO: 46926 - RNA, 22 nt, Artificial Sequence
  Synthetic oligonucleotide: CTLA4-2001
uuuugcucaaagaaacagcugu

SEQ ID NO: 46927 - RNA, 23 nt, Artificial Sequence
  Synthetic oligonucleotide: CTLA4-2002
auuuugcucaaagaaacagcugu

SEQ ID NO: 46928 - RNA, 24 nt, Artificial Sequence
  Synthetic oligonucleotide: CTLA4-2003
cauuuugcucaaagaaacagcugu

SEQ ID NO: 46929 - RNA, 18 nt, Artificial Sequence
  Synthetic oligonucleotide: CTLA4-2004
uucacauucuggcucugu

SEQ ID NO: 46930 - RNA, 19 nt, Artificial Sequence
  Synthetic oligonucleotide: CTLA4-2005
uuucacauucuggcucugu

SEQ ID NO: 46931 - RNA, 20 nt, Artificial Sequence
  Synthetic oligonucleotide: CTLA4-186
uuuucacauucuggcucugu

SEQ ID NO: 46932 - RNA, 21 nt, Artificial Sequence
  Synthetic oligonucleotide: CTLA4-2006
cuuuucacauucuggcucugu

SEQ ID NO: 46933 - RNA, 22 nt, Artificial Sequence
  Synthetic oligonucleotide: CTLA4-2007
gcuuuucacauucuggcucugu

SEQ ID NO: 46934 - RNA, 23 nt, Artificial Sequence
  Synthetic oligonucleotide: CTLA4-2008
ugcuuuucacauucuggcucugu

SEQ ID NO: 46935 - RNA, 24 nt, Artificial Sequence
  Synthetic oligonucleotide: CTLA4-2009
uugcuuuucacauucuggcucugu

SEQ ID NO: 46936 - RNA, 18 nt, Artificial Sequence
  Synthetic oligonucleotide: CTLA4-2010
cacauagaccccuguugu

SEQ ID NO: 46937 - RNA, 19 nt, Artificial Sequence
  Synthetic oligonucleotide: CTLA4-2011
ucacauagaccccuguugu

SEQ ID NO: 46938 - RNA, 20 nt, Artificial Sequence
  Synthetic oligonucleotide: CTLA4-414
uucacauagaccccuguugu

SEQ ID NO: 46939 - RNA, 21 nt, Artificial Sequence
  Synthetic oligonucleotide: CTLA4-2012
uuucacauagaccccuguugu

SEQ ID NO: 46940 - RNA, 22 nt, Artificial Sequence
  Synthetic oligonucleotide: CTLA4-2013
uuuucacauagaccccuguugu

SEQ ID NO: 46941 - RNA, 23 nt, Artificial Sequence
  Synthetic oligonucleotide: CTLA4-2014
auuuucacauagaccccuguugu

SEQ ID NO: 46942 - RNA, 24 nt, Artificial Sequence
  Synthetic oligonucleotide: CTLA4-2015
cauuuucacauagaccccuguugu

SEQ ID NO: 46943 - RNA, 18 nt, Artificial Sequence
  Synthetic oligonucleotide: CTLA4-2016
ucacauucuggcucuguu

SEQ ID NO: 46944 - RNA, 19 nt, Artificial Sequence
  Synthetic oligonucleotide: CTLA4-2017
uucacauucuggcucuguu

SEQ ID NO: 46945 - RNA, 20 nt, Artificial Sequence
  Synthetic oligonucleotide: CTLA4-185
uuucacauucuggcucuguu

SEQ ID NO: 46946 - RNA, 21 nt, Artificial Sequence
  Synthetic oligonucleotide: CTLA4-2018
uuuucacauucuggcucuguu

SEQ ID NO: 46947 - RNA, 22 nt, Artificial Sequence
  Synthetic oligonucleotide: CTLA4-2019
cuuuucacauucuggcucuguu

SEQ ID NO: 46948 - RNA, 23 nt, Artificial Sequence
  Synthetic oligonucleotide: CTLA4-2020
gcuuuucacauucuggcucuguu

SEQ ID NO: 46949 - RNA, 24 nt, Artificial Sequence
  Synthetic oligonucleotide: CTLA4-2021
ugcuuuucacauucuggcucuguu

SEQ ID NO: 46950 - RNA, 18 nt, Artificial Sequence
  Synthetic oligonucleotide: CTLA4-2022
aaagaagcccucuuacaa

SEQ ID NO: 46951 - RNA, 19 nt, Artificial Sequence
  Synthetic oligonucleotide: CTLA4-2023
aaaagaagcccucuuacaa

SEQ ID NO: 46952 - RNA, 20 nt, Artificial Sequence
  Synthetic oligonucleotide: CTLA4-358
gaaaagaagcccucuuacaa

SEQ ID NO: 46953 - RNA, 21 nt, Artificial Sequence
  Synthetic oligonucleotide: CTLA4-2024
agaaaagaagcccucuuacaa

SEQ ID NO: 46954 - RNA, 22 nt, Artificial Sequence
  Synthetic oligonucleotide: CTLA4-2025
aagaaaagaagcccucuuacaa

SEQ ID NO: 46955 - RNA, 23 nt, Artificial Sequence
  Synthetic oligonucleotide: CTLA4-2026
aaagaaaagaagcccucuuacaa

SEQ ID NO: 46956 - RNA, 24 nt, Artificial Sequence
  Synthetic oligonucleotide: CTLA4-2027
uaaagaaaagaagcccucuuacaa

SEQ ID NO: 46957 - RNA, 18 nt, Artificial Sequence
  Synthetic oligonucleotide: CTLA4-2028
augugaaaaugcccccaa

SEQ ID NO: 46958 - RNA, 19 nt, Artificial Sequence
  Synthetic oligonucleotide: CTLA4-2029
uaugugaaaaugcccccaa

SEQ ID NO: 46959 - RNA, 20 nt, Artificial Sequence
  Synthetic oligonucleotide: CTLA4-361
cuaugugaaaaugcccccaa

SEQ ID NO: 46960 - RNA, 21 nt, Artificial Sequence
  Synthetic oligonucleotide: CTLA4-2030
ucuaugugaaaaugcccccaa

SEQ ID NO: 46961 - RNA, 22 nt, Artificial Sequence
  Synthetic oligonucleotide: CTLA4-2031
gucuaugugaaaaugcccccaa

SEQ ID NO: 46962 - RNA, 23 nt, Artificial Sequence
  Synthetic oligonucleotide: CTLA4-2032
ggucuaugugaaaaugcccccaa

SEQ ID NO: 46963 - RNA, 24 nt, Artificial Sequence
  Synthetic oligonucleotide: CTLA4-2033
gggucuaugugaaaaugcccccaa

SEQ ID NO: 46964 - RNA, 18 nt, Artificial Sequence
  Synthetic oligonucleotide: CTLA4-2034
uuauuuuauucccaucaa

SEQ ID NO: 46965 - RNA, 19 nt, Artificial Sequence
  Synthetic oligonucleotide: CTLA4-2035
cuuauuuuauucccaucaa

SEQ ID NO: 46966 - RNA, 20 nt, Artificial Sequence
  Synthetic oligonucleotide: CTLA4-364
ccuuauuuuauucccaucaa

SEQ ID NO: 46967 - RNA, 21 nt, Artificial Sequence
  Synthetic oligonucleotide: CTLA4-2036
gccuuauuuuauucccaucaa

SEQ ID NO: 46968 - RNA, 22 nt, Artificial Sequence
  Synthetic oligonucleotide: CTLA4-2037
agccuuauuuuauucccaucaa

SEQ ID NO: 46969 - RNA, 23 nt, Artificial Sequence
  Synthetic oligonucleotide: CTLA4-2038
cagccuuauuuuauucccaucaa

SEQ ID NO: 46970 - RNA, 24 nt, Artificial Sequence
  Synthetic oligonucleotide: CTLA4-2039
ucagccuuauuuuauucccaucaa

SEQ ID NO: 46971 - RNA, 18 nt, Artificial Sequence
  Synthetic oligonucleotide: CTLA4-2040
uguuugacagcuaaagaa

SEQ ID NO: 46972 - RNA, 19 nt, Artificial Sequence
  Synthetic oligonucleotide: CTLA4-2041
guguuugacagcuaaagaa

SEQ ID NO: 46973 - RNA, 20 nt, Artificial Sequence
  Synthetic oligonucleotide: CTLA4-357
uguguuugacagcuaaagaa

SEQ ID NO: 46974 - RNA, 21 nt, Artificial Sequence
  Synthetic oligonucleotide: CTLA4-2042
uuguguuugacagcuaaagaa

SEQ ID NO: 46975 - RNA, 22 nt, Artificial Sequence
  Synthetic oligonucleotide: CTLA4-2043
uuuguguuugacagcuaaagaa

SEQ ID NO: 46976 - RNA, 23 nt, Artificial Sequence
  Synthetic oligonucleotide: CTLA4-2044
uuuuguguuugacagcuaaagaa

SEQ ID NO: 46977 - RNA, 24 nt, Artificial Sequence
  Synthetic oligonucleotide: CTLA4-2045
uuuuuguguuugacagcuaaagaa

SEQ ID NO: 46978 - RNA, 18 nt, Artificial Sequence
  Synthetic oligonucleotide: CTLA4-2046
uuuuguguuugacagcua

SEQ ID NO: 46979 - RNA, 19 nt, Artificial Sequence
  Synthetic oligonucleotide: CTLA4-2047
uuuuuguguuugacagcua

SEQ ID NO: 46980 - RNA, 20 nt, Artificial Sequence
  Synthetic oligonucleotide: CTLA4-356
cuuuuuguguuugacagcua

SEQ ID NO: 46981 - RNA, 21 nt, Artificial Sequence
  Synthetic oligonucleotide: CTLA4-2048
ucuuuuuguguuugacagcua

SEQ ID NO: 46982 - RNA, 22 nt, Artificial Sequence
  Synthetic oligonucleotide: CTLA4-2049
uucuuuuuguguuugacagcua

SEQ ID NO: 46983 - RNA, 23 nt, Artificial Sequence
  Synthetic oligonucleotide: CTLA4-2050
uuucuuuuuguguuugacagcua

SEQ ID NO: 46984 - RNA, 24 nt, Artificial Sequence
  Synthetic oligonucleotide: CTLA4-2051
guuucuuuuuguguuugacagcua

SEQ ID NO: 46985 - RNA, 18 nt, Artificial Sequence
  Synthetic oligonucleotide: CTLA4-2052
uguuuucuguugcagauc

SEQ ID NO: 46986 - RNA, 19 nt, Artificial Sequence
  Synthetic oligonucleotide: CTLA4-2053
uuguuuucuguugcagauc

SEQ ID NO: 46987 - RNA, 20 nt, Artificial Sequence
  Synthetic oligonucleotide: CTLA4-350
uuuguuuucuguugcagauc

SEQ ID NO: 46988 - RNA, 21 nt, Artificial Sequence
  Synthetic oligonucleotide: CTLA4-2054
cuuuguuuucuguugcagauc

SEQ ID NO: 46989 - RNA, 22 nt, Artificial Sequence
  Synthetic oligonucleotide: CTLA4-2055
gcuuuguuuucuguugcagauc

SEQ ID NO: 46990 - RNA, 23 nt, Artificial Sequence
  Synthetic oligonucleotide: CTLA4-2056
ugcuuuguuuucuguugcagauc

SEQ ID NO: 46991 - RNA, 24 nt, Artificial Sequence
  Synthetic oligonucleotide: CTLA4-2057
cugcuuuguuuucuguugcagauc

SEQ ID NO: 46992 - RNA, 18 nt, Artificial Sequence
  Synthetic oligonucleotide: CTLA4-2058
ugagaaaccauuaugaag

SEQ ID NO: 46993 - RNA, 19 nt, Artificial Sequence
  Synthetic oligonucleotide: CTLA4-2059
uugagaaaccauuaugaag

SEQ ID NO: 46994 - RNA, 20 nt, Artificial Sequence
  Synthetic oligonucleotide: CTLA4-368
auugagaaaccauuaugaag

SEQ ID NO: 46995 - RNA, 21 nt, Artificial Sequence
  Synthetic oligonucleotide: CTLA4-2060
aauugagaaaccauuaugaag

SEQ ID NO: 46996 - RNA, 22 nt, Artificial Sequence
  Synthetic oligonucleotide: CTLA4-2061
caauugagaaaccauuaugaag

SEQ ID NO: 46997 - RNA, 23 nt, Artificial Sequence
  Synthetic oligonucleotide: CTLA4-2062
ucaauugagaaaccauuaugaag

SEQ ID NO: 46998 - RNA, 24 nt, Artificial Sequence
  Synthetic oligonucleotide: CTLA4-2063
aucaauugagaaaccauuaugaag

SEQ ID NO: 46999 - RNA, 18 nt, Artificial Sequence
  Synthetic oligonucleotide: CTLA4-2064
aauugagaaaccauuaug

SEQ ID NO: 47000 - RNA, 19 nt, Artificial Sequence
  Synthetic oligonucleotide: CTLA4-2065
caauugagaaaccauuaug

SEQ ID NO: 47001 - RNA, 20 nt, Artificial Sequence
  Synthetic oligonucleotide: CTLA4-367
ucaauugagaaaccauuaug

SEQ ID NO: 47002 - RNA, 21 nt, Artificial Sequence
  Synthetic oligonucleotide: CTLA4-2066
aucaauugagaaaccauuaug

SEQ ID NO: 47003 - RNA, 22 nt, Artificial Sequence
  Synthetic oligonucleotide: CTLA4-2067
caucaauugagaaaccauuaug

SEQ ID NO: 47004 - RNA, 23 nt, Artificial Sequence
  Synthetic oligonucleotide: CTLA4-2068
ccaucaauugagaaaccauuaug

SEQ ID NO: 47005 - RNA, 24 nt, Artificial Sequence
  Synthetic oligonucleotide: CTLA4-2069
cccaucaauugagaaaccauuaug

SEQ ID NO: 47006 - RNA, 18 nt, Artificial Sequence
  Synthetic oligonucleotide: CTLA4-2070
ccccaacagagccagaau

SEQ ID NO: 47007 - RNA, 19 nt, Artificial Sequence
  Synthetic oligonucleotide: CTLA4-2071
cccccaacagagccagaau

SEQ ID NO: 47008 - RNA, 20 nt, Artificial Sequence
  Synthetic oligonucleotide: CTLA4-363
gcccccaacagagccagaau

SEQ ID NO: 47009 - RNA, 21 nt, Artificial Sequence
  Synthetic oligonucleotide: CTLA4-2072
ugcccccaacagagccagaau

SEQ ID NO: 47010 - RNA, 22 nt, Artificial Sequence
  Synthetic oligonucleotide: CTLA4-2073
augcccccaacagagccagaau

SEQ ID NO: 47011 - RNA, 23 nt, Artificial Sequence
  Synthetic oligonucleotide: CTLA4-2074
aaugcccccaacagagccagaau

SEQ ID NO: 47012 - RNA, 24 nt, Artificial Sequence
  Synthetic oligonucleotide: CTLA4-2075
aaaugcccccaacagagccagaau

SEQ ID NO: 47013 - RNA, 18 nt, Artificial Sequence
  Synthetic oligonucleotide: CTLA4-2076
cuuacaacaggggucuau

SEQ ID NO: 47014 - RNA, 19 nt, Artificial Sequence
  Synthetic oligonucleotide: CTLA4-2077
ucuuacaacaggggucuau

SEQ ID NO: 47015 - RNA, 20 nt, Artificial Sequence
  Synthetic oligonucleotide: CTLA4-360
cucuuacaacaggggucuau

SEQ ID NO: 47016 - RNA, 21 nt, Artificial Sequence
  Synthetic oligonucleotide: CTLA4-2078
ccucuuacaacaggggucuau

SEQ ID NO: 47017 - RNA, 22 nt, Artificial Sequence
  Synthetic oligonucleotide: CTLA4-2079
cccucuuacaacaggggucuau

SEQ ID NO: 47018 - RNA, 23 nt, Artificial Sequence
  Synthetic oligonucleotide: CTLA4-2080
gcccucuuacaacaggggucuau

SEQ ID NO: 47019 - RNA, 24 nt, Artificial Sequence
  Synthetic oligonucleotide: CTLA4-2081
agcccucuuacaacaggggucuau

SEQ ID NO: 47020 - RNA, 18 nt, Artificial Sequence
  Synthetic oligonucleotide: CTLA4-2082
cuccucacagcuguuucu

SEQ ID NO: 47021 - RNA, 19 nt, Artificial Sequence
  Synthetic oligonucleotide: CTLA4-2083
ucuccucacagcuguuucu

SEQ ID NO: 47022 - RNA, 20 nt, Artificial Sequence
  Synthetic oligonucleotide: CTLA4-354
uucuccucacagcuguuucu

SEQ ID NO: 47023 - RNA, 21 nt, Artificial Sequence
  Synthetic oligonucleotide: CTLA4-2084
uuucuccucacagcuguuucu

SEQ ID NO: 47024 - RNA, 22 nt, Artificial Sequence
  Synthetic oligonucleotide: CTLA4-2085
cuuucuccucacagcuguuucu

SEQ ID NO: 47025 - RNA, 23 nt, Artificial Sequence
  Synthetic oligonucleotide: CTLA4-2086
gcuuucuccucacagcuguuucu

SEQ ID NO: 47026 - RNA, 24 nt, Artificial Sequence
  Synthetic oligonucleotide: CTLA4-2087
agcuuucuccucacagcuguuucu

SEQ ID NO: 47027 - RNA, 18 nt, Artificial Sequence
  Synthetic oligonucleotide: CTLA4-2088
auccuugcagcaguuagu

SEQ ID NO: 47028 - RNA, 19 nt, Artificial Sequence
  Synthetic oligonucleotide: CTLA4-2089
gauccuugcagcaguuagu

SEQ ID NO: 47029 - RNA, 20 nt, Artificial Sequence
  Synthetic oligonucleotide: CTLA4-352
ggauccuugcagcaguuagu

SEQ ID NO: 47030 - RNA, 21 nt, Artificial Sequence
  Synthetic oligonucleotide: CTLA4-2090
uggauccuugcagcaguuagu

SEQ ID NO: 47031 - RNA, 22 nt, Artificial Sequence
  Synthetic oligonucleotide: CTLA4-2091
cuggauccuugcagcaguuagu

SEQ ID NO: 47032 - RNA, 23 nt, Artificial Sequence
  Synthetic oligonucleotide: CTLA4-2092
ucuggauccuugcagcaguuagu

SEQ ID NO: 47033 - RNA, 24 nt, Artificial Sequence
  Synthetic oligonucleotide: CTLA4-2093
cucuggauccuugcagcaguuagu

SEQ ID NO: 47034 - RNA, 18 nt, Artificial Sequence
  Synthetic oligonucleotide: CTLA4-2094
auuuuauucccaucaauu

SEQ ID NO: 47035 - RNA, 19 nt, Artificial Sequence
  Synthetic oligonucleotide: CTLA4-2095
uauuuuauucccaucaauu

SEQ ID NO: 47036 - RNA, 20 nt, Artificial Sequence
  Synthetic oligonucleotide: CTLA4-365
uuauuuuauucccaucaauu

SEQ ID NO: 47037 - RNA, 21 nt, Artificial Sequence
  Synthetic oligonucleotide: CTLA4-2096
cuuauuuuauucccaucaauu

SEQ ID NO: 47038 - RNA, 22 nt, Artificial Sequence
  Synthetic oligonucleotide: CTLA4-2097
ccuuauuuuauucccaucaauu

SEQ ID NO: 47039 - RNA, 23 nt, Artificial Sequence
  Synthetic oligonucleotide: CTLA4-2098
gccuuauuuuauucccaucaauu

SEQ ID NO: 47040 - RNA, 24 nt, Artificial Sequence
  Synthetic oligonucleotide: CTLA4-2099
agccuuauuuuauucccaucaauu

SEQ ID NO: 47041 - RNA, 18 nt, Artificial Sequence
  Synthetic oligonucleotide: CTLA4-2100
aucaauugagaaaccauu

SEQ ID NO: 47042 - RNA, 19 nt, Artificial Sequence
  Synthetic oligonucleotide: CTLA4-2101
caucaauugagaaaccauu

SEQ ID NO: 47043 - RNA, 20 nt, Artificial Sequence
  Synthetic oligonucleotide: CTLA4-366
ccaucaauugagaaaccauu

SEQ ID NO: 47044 - RNA, 21 nt, Artificial Sequence
  Synthetic oligonucleotide: CTLA4-2102
cccaucaauugagaaaccauu

SEQ ID NO: 47045 - RNA, 22 nt, Artificial Sequence
  Synthetic oligonucleotide: CTLA4-2103
ucccaucaauugagaaaccauu

SEQ ID NO: 47046 - RNA, 23 nt, Artificial Sequence
  Synthetic oligonucleotide: CTLA4-2104
uucccaucaauugagaaaccauu

SEQ ID NO: 47047 - RNA, 24 nt, Artificial Sequence
  Synthetic oligonucleotide: CTLA4-2105
auucccaucaauugagaaaccauu

SEQ ID NO: 47048 - RNA, 17 nt, Artificial Sequence
  Synthetic oligonucleotide: CTLA4-458
gggcauaggcaacggaa

SEQ ID NO: 47049 - RNA, 17 nt, Artificial Sequence
  Synthetic oligonucleotide: CTLA4-2106
cacugagguccggguga

SEQ ID NO: 47050 - RNA, 17 nt, Artificial Sequence
  Synthetic oligonucleotide: CTLA4-2107
caccgcucccauaaagc

SEQ ID NO: 47051 - RNA, 17 nt, Artificial Sequence
  Synthetic oligonucleotide: CTLA4-2108
ugaaauccaaggcaagc

SEQ ID NO: 47052 - RNA, 17 nt, Artificial Sequence
  Synthetic oligonucleotide: CTLA4-452
auaaagccauggcuugc

SEQ ID NO: 47053 - RNA, 17 nt, Artificial Sequence
  Synthetic oligonucleotide: CTLA4-2109
ccagcagccgaggcauc

SEQ ID NO: 47054 - RNA, 17 nt, Artificial Sequence
  Synthetic oligonucleotide: CTLA4-2110
acugucacccggaccuc

SEQ ID NO: 47055 - RNA, 17 nt, Artificial Sequence
  Synthetic oligonucleotide: CTLA4-455
cuuggauagugagguuc

SEQ ID NO: 47056 - RNA, 17 nt, Artificial Sequence
  Synthetic oligonucleotide: CTLA4-453
aaugaguugaccuuccu

SEQ ID NO: 47057 - RNA, 20 nt, Artificial Sequence
  Synthetic oligonucleotide: CTLA4-456
ccugggcauaggcaacggaa

SEQ ID NO: 47058 - RNA, 20 nt, Artificial Sequence
  Synthetic oligonucleotide: CTLA4-2111
agccacugagguccggguga

SEQ ID NO: 47059 - RNA, 20 nt, Artificial Sequence
  Synthetic oligonucleotide: CTLA4-2112
gaacaccgcucccauaaagc

SEQ ID NO: 47060 - RNA, 20 nt, Artificial Sequence
  Synthetic oligonucleotide: CTLA4-2113
cgcugaaauccaaggcaagc

SEQ ID NO: 47061 - RNA, 20 nt, Artificial Sequence
  Synthetic oligonucleotide: CTLA4-1370
cccauaaagccauggcuugc

SEQ ID NO: 47062 - RNA, 20 nt, Artificial Sequence
  Synthetic oligonucleotide: CTLA4-2114
uggccagcagccgaggcauc

SEQ ID NO: 47063 - RNA, 20 nt, Artificial Sequence
  Synthetic oligonucleotide: CTLA4-2115
agcacugucacccggaccuc

SEQ ID NO: 47064 - RNA, 20 nt, Artificial Sequence
  Synthetic oligonucleotide: CTLA4-454
guccuuggauagugagguuc

SEQ ID NO: 47065 - RNA, 20 nt, Artificial Sequence
  Synthetic oligonucleotide: CTLA4-451
gggaaugaguugaccuuccu

SEQ ID NO: 47066 - RNA, 17 nt, Artificial Sequence
  Synthetic oligonucleotide: CTLA4-442
auagaccccuguuguaa

SEQ ID NO: 47067 - RNA, 17 nt, Artificial Sequence
  Synthetic oligonucleotide: CTLA4-2116
gaauaaaauaaggcuga

SEQ ID NO: 47068 - RNA, 17 nt, Artificial Sequence
  Synthetic oligonucleotide: CTLA4-459
gcagauccagaaccgug

SEQ ID NO: 47069 - RNA, 17 nt, Artificial Sequence
  Synthetic oligonucleotide: CTLA4-2117
guucgggguuguuuuuu

SEQ ID NO: 47070 - RNA, 20 nt, Artificial Sequence
  Synthetic oligonucleotide: CTLA4-413
cacauagaccccuguuguaa

SEQ ID NO: 47071 - RNA, 20 nt, Artificial Sequence
  Synthetic oligonucleotide: CTLA4-2118
ugggaauaaaauaaggcuga

SEQ ID NO: 47072 - RNA, 20 nt, Artificial Sequence
  Synthetic oligonucleotide: CTLA4-457
guugcagauccagaaccgug

SEQ ID NO: 47073 - RNA, 20 nt, Artificial Sequence
  Synthetic oligonucleotide: CTLA4-2119
uuaguucgggguuguuuuuu

SEQ ID NO: 47074 - RNA, 17 nt, Artificial Sequence
  Synthetic oligonucleotide: CTLA4-73
ccgcucccauaaagcca

SEQ ID NO: 47075 - RNA, 17 nt, Artificial Sequence
  Synthetic oligonucleotide: CTLA4-621
uugggcggcagcaaaua

SEQ ID NO: 47076 - RNA, 17 nt, Artificial Sequence
  Synthetic oligonucleotide: CTLA4-624
gcgccagguauuuagua

SEQ ID NO: 47077 - RNA, 17 nt, Artificial Sequence
  Synthetic oligonucleotide: CTLA4-660
gcgguguucaggucuuc

SEQ ID NO: 47078 - RNA, 17 nt, Artificial Sequence
  Synthetic oligonucleotide: CTLA4-144
uuaugggagcgguguuc

SEQ ID NO: 47079 - RNA, 17 nt, Artificial Sequence
  Synthetic oligonucleotide: CTLA4-672
ggaucuggauaacuaag

SEQ ID NO: 47080 - RNA, 17 nt, Artificial Sequence
  Synthetic oligonucleotide: CTLA4-625
cgccagguauuuaguag

SEQ ID NO: 47081 - RNA, 17 nt, Artificial Sequence
  Synthetic oligonucleotide: CTLA4-666
uacgagaaaggaagccg

SEQ ID NO: 47082 - RNA, 17 nt, Artificial Sequence
  Synthetic oligonucleotide: CTLA4-142
gcaagccauggcuuuau

SEQ ID NO: 47083 - RNA, 20 nt, Artificial Sequence
  Synthetic oligonucleotide: CTLA4-774
gugaagcaccauccuucuaa

SEQ ID NO: 47084 - RNA, 20 nt, Artificial Sequence
  Synthetic oligonucleotide: CTLA4-4
ccuuggauuucagcggcaca

SEQ ID NO: 47085 - RNA, 20 nt, Artificial Sequence
  Synthetic oligonucleotide: CTLA4-475
cgacguaacagcuaaaccca

SEQ ID NO: 47086 - RNA, 20 nt, Artificial Sequence
  Synthetic oligonucleotide: CTLA4-1
acaccgcucccauaaagcca

SEQ ID NO: 47087 - RNA, 20 nt, Artificial Sequence
  Synthetic oligonucleotide: CTLA4-67
ccuugugccgcugaaaucca

SEQ ID NO: 47088 - RNA, 20 nt, Artificial Sequence
  Synthetic oligonucleotide: CTLA4-701
gcugucaagggaccauuaga

SEQ ID NO: 47089 - RNA, 20 nt, Artificial Sequence
  Synthetic oligonucleotide: CTLA4-702
ucaagggaccauuagaagga

SEQ ID NO: 47090 - RNA, 20 nt, Artificial Sequence
  Synthetic oligonucleotide: CTLA4-512
agagcgccagguauuuagua

SEQ ID NO: 47091 - RNA, 20 nt, Artificial Sequence
  Synthetic oligonucleotide: CTLA4-466
ugaauuggacuggaugguua

SEQ ID NO: 47092 - RNA, 20 nt, Artificial Sequence
  Synthetic oligonucleotide: CTLA4-59
cacucaccuuugcagaagac

SEQ ID NO: 47093 - RNA, 20 nt, Artificial Sequence
  Synthetic oligonucleotide: CTLA4-571
ugagcccuugggcuaauggc

SEQ ID NO: 47094 - RNA, 20 nt, Artificial Sequence
  Synthetic oligonucleotide: CTLA4-559
ucauguucacuuugaggauc

SEQ ID NO: 47095 - RNA, 20 nt, Artificial Sequence
  Synthetic oligonucleotide: CTLA4-531
ggaguuuuaccuuuaacuuc

SEQ ID NO: 47096 - RNA, 20 nt, Artificial Sequence
  Synthetic oligonucleotide: CTLA4-548
ggagcgguguucaggucuuc

SEQ ID NO: 47097 - RNA, 20 nt, Artificial Sequence
  Synthetic oligonucleotide: CTLA4-72
gcuuuaugggagcgguguuc

SEQ ID NO: 47098 - RNA, 20 nt, Artificial Sequence
  Synthetic oligonucleotide: CTLA4-71
aagccauggcuuuaugggag

SEQ ID NO: 47099 - RNA, 20 nt, Artificial Sequence
  Synthetic oligonucleotide: CTLA4-513
gagcgccagguauuuaguag

SEQ ID NO: 47100 - RNA, 20 nt, Artificial Sequence
  Synthetic oligonucleotide: CTLA4-474
uuuguucaguugagugcuug

SEQ ID NO: 47101 - RNA, 20 nt, Artificial Sequence
  Synthetic oligonucleotide: CTLA4-558
gaagcuucauguucacuuug

SEQ ID NO: 47102 - RNA, 20 nt, Artificial Sequence
  Synthetic oligonucleotide: CTLA4-2
cauaaagccauggcuugccu

SEQ ID NO: 47103 - RNA, 20 nt, Artificial Sequence
  Synthetic oligonucleotide: CTLA4-511
cagagcgccagguauuuagu

SEQ ID NO: 47104 - RNA, 20 nt, Artificial Sequence
  Synthetic oligonucleotide: CTLA4-462
aguuagcagccuaguaguuu

SEQ ID NO: 47105 - RNA, 17 nt, Artificial Sequence
  Synthetic oligonucleotide: CTLA4-588
guaaaaccaaaacaaaa

SEQ ID NO: 47106 - RNA, 17 nt, Artificial Sequence
  Synthetic oligonucleotide: CTLA4-735
cuuaaccaaaugcuaaa

SEQ ID NO: 47107 - RNA, 17 nt, Artificial Sequence
  Synthetic oligonucleotide: CTLA4-676
aauuuccuggaguacaa

SEQ ID NO: 47108 - RNA, 17 nt, Artificial Sequence
  Synthetic oligonucleotide: CTLA4-573
uccugccauuagcccaa

SEQ ID NO: 47109 - RNA, 17 nt, Artificial Sequence
  Synthetic oligonucleotide: CTLA4-80
aucccugucuucugcaa

SEQ ID NO: 47110 - RNA, 17 nt, Artificial Sequence
  Synthetic oligonucleotide: CTLA4-609
uuuguuucagcagucaa

SEQ ID NO: 47111 - RNA, 17 nt, Artificial Sequence
  Synthetic oligonucleotide: CTLA4-738
auuuguaaagcugucaa

SEQ ID NO: 47112 - RNA, 17 nt, Artificial Sequence
  Synthetic oligonucleotide: CTLA4-665
uuuugguuuuacgagaa

SEQ ID NO: 47113 - RNA, 17 nt, Artificial Sequence
  Synthetic oligonucleotide: CTLA4-594
agcuucaggauccugaa

SEQ ID NO: 47114 - RNA, 17 nt, Artificial Sequence
  Synthetic oligonucleotide: CTLA4-682
cugagcccuugggcuaa

SEQ ID NO: 47115 - RNA, 17 nt, Artificial Sequence
  Synthetic oligonucleotide: CTLA4-805
aagcaccauccuucuaa

SEQ ID NO: 47116 - RNA, 17 nt, Artificial Sequence
  Synthetic oligonucleotide: CTLA4-610
gcaaagccagaaguuaa

SEQ ID NO: 47117 - RNA, 17 nt, Artificial Sequence
  Synthetic oligonucleotide: CTLA4-76
uggauuucagcggcaca

SEQ ID NO: 47118 - RNA, 17 nt, Artificial Sequence
  Synthetic oligonucleotide: CTLA4-132
caccuuugcagaagaca

SEQ ID NO: 47119 - RNA, 17 nt, Artificial Sequence
  Synthetic oligonucleotide: CTLA4-675
gaauuuccuggaguaca

SEQ ID NO: 47120 - RNA, 17 nt, Artificial Sequence
  Synthetic oligonucleotide: CTLA4-587
cguaacagcuaaaccca

SEQ ID NO: 47121 - RNA, 17 nt, Artificial Sequence
  Synthetic oligonucleotide: CTLA4-572
auccugccauuagccca

SEQ ID NO: 47122 - RNA, 17 nt, Artificial Sequence
  Synthetic oligonucleotide: CTLA4-140
aaauccaaggcaagcca

SEQ ID NO: 47123 - RNA, 17 nt, Artificial Sequence
  Synthetic oligonucleotide: CTLA4-139
ugugccgcugaaaucca

SEQ ID NO: 47124 - RNA, 17 nt, Artificial Sequence
  Synthetic oligonucleotide: CTLA4-668
caaaacaagccaaucca

SEQ ID NO: 47125 - RNA, 17 nt, Artificial Sequence
  Synthetic oligonucleotide: CTLA4-584
aauacauuuuccaucca

SEQ ID NO: 47126 - RNA, 17 nt, Artificial Sequence
  Synthetic oligonucleotide: CTLA4-615
gcuggcucuguauucca

SEQ ID NO: 47127 - RNA, 17 nt, Artificial Sequence
  Synthetic oligonucleotide: CTLA4-617
guauuccagggccagca

SEQ ID NO: 47128 - RNA, 17 nt, Artificial Sequence
  Synthetic oligonucleotide: CTLA4-135
aaaaacaggagagugca

SEQ ID NO: 47129 - RNA, 17 nt, Artificial Sequence
  Synthetic oligonucleotide: CTLA4-662
gaacccacacagaauca

SEQ ID NO: 47130 - RNA, 17 nt, Artificial Sequence
  Synthetic oligonucleotide: CTLA4-737
uauuuguaaagcuguca

SEQ ID NO: 47131 - RNA, 17 nt, Artificial Sequence
  Synthetic oligonucleotide: CTLA4-82
cuuuuggagcaugaaga

SEQ ID NO: 47132 - RNA, 17 nt, Artificial Sequence
  Synthetic oligonucleotide: CTLA4-663
acaugugcacacacaga

SEQ ID NO: 47133 - RNA, 17 nt, Artificial Sequence
  Synthetic oligonucleotide: CTLA4-739
gucaagggaccauuaga

SEQ ID NO: 47134 - RNA, 17 nt, Artificial Sequence
  Synthetic oligonucleotide: CTLA4-740
agggaccauuagaagga

SEQ ID NO: 47135 - RNA, 17 nt, Artificial Sequence
  Synthetic oligonucleotide: CTLA4-669
acaagccaauccaugga

SEQ ID NO: 47136 - RNA, 17 nt, Artificial Sequence
  Synthetic oligonucleotide: CTLA4-577
aaaugaauuggacugga

SEQ ID NO: 47137 - RNA, 17 nt, Artificial Sequence
  Synthetic oligonucleotide: CTLA4-578
auuggacuggaugguua

SEQ ID NO: 47138 - RNA, 17 nt, Artificial Sequence
  Synthetic oligonucleotide: CTLA4-141
ggcaagccauggcuuua

SEQ ID NO: 47139 - RNA, 17 nt, Artificial Sequence
  Synthetic oligonucleotide: CTLA4-133
ugaagagaagaaaaaac

SEQ ID NO: 47140 - RNA, 17 nt, Artificial Sequence
  Synthetic oligonucleotide: CTLA4-131
ucaccuuugcagaagac

SEQ ID NO: 47141 - RNA, 17 nt, Artificial Sequence
  Synthetic oligonucleotide: CTLA4-576
aaugaaaugaauuggac

SEQ ID NO: 47142 - RNA, 17 nt, Artificial Sequence
  Synthetic oligonucleotide: CTLA4-77
caaggcucagcugaacc

SEQ ID NO: 47143 - RNA, 17 nt, Artificial Sequence
  Synthetic oligonucleotide: CTLA4-79
accuggcuaccaggacc

SEQ ID NO: 47144 - RNA, 17 nt, Artificial Sequence
  Synthetic oligonucleotide: CTLA4-639
agccccuacuaaauacc

SEQ ID NO: 47145 - RNA, 17 nt, Artificial Sequence
  Synthetic oligonucleotide: CTLA4-607
gagguguuucuccuacc

SEQ ID NO: 47146 - RNA, 17 nt, Artificial Sequence
  Synthetic oligonucleotide: CTLA4-78
agcugaaccuggcuacc

SEQ ID NO: 47147 - RNA, 17 nt, Artificial Sequence
  Synthetic oligonucleotide: CTLA4-644
ugaaacaaaugaaaccc

SEQ ID NO: 47148 - RNA, 17 nt, Artificial Sequence
  Synthetic oligonucleotide: CTLA4-641
cugcucccugcuggccc

SEQ ID NO: 47149 - RNA, 17 nt, Artificial Sequence
  Synthetic oligonucleotide: CTLA4-138
gccagguccugguagcc

SEQ ID NO: 47150 - RNA, 17 nt, Artificial Sequence
  Synthetic oligonucleotide: CTLA4-622
gcucagaacagagcgcc

SEQ ID NO: 47151 - RNA, 17 nt, Artificial Sequence
  Synthetic oligonucleotide: CTLA4-136
caggagagugcagggcc

SEQ ID NO: 47152 - RNA, 17 nt, Artificial Sequence
  Synthetic oligonucleotide: CTLA4-583
gaggacccuuguacucc

SEQ ID NO: 47153 - RNA, 17 nt, Artificial Sequence
  Synthetic oligonucleotide: CTLA4-137
agugcagggccaggucc

SEQ ID NO: 47154 - RNA, 17 nt, Artificial Sequence
  Synthetic oligonucleotide: CTLA4-614
ggcuggcucuguauucc

SEQ ID NO: 47155 - RNA, 17 nt, Artificial Sequence
  Synthetic oligonucleotide: CTLA4-674
agacuuggagaauuucc

SEQ ID NO: 47156 - RNA, 17 nt, Artificial Sequence
  Synthetic oligonucleotide: CTLA4-616
uguauuccagggccagc

SEQ ID NO: 47157 - RNA, 17 nt, Artificial Sequence
  Synthetic oligonucleotide: CTLA4-683
gcccuugggcuaauggc

SEQ ID NO: 47158 - RNA, 17 nt, Artificial Sequence
  Synthetic oligonucleotide: CTLA4-613
cuccaaucuggcuuggc

SEQ ID NO: 47159 - RNA, 17 nt, Artificial Sequence
  Synthetic oligonucleotide: CTLA4-640
gcccaacugcucccugc

SEQ ID NO: 47160 - RNA, 17 nt, Artificial Sequence
  Synthetic oligonucleotide: CTLA4-134
aaaaaacaggagagugc

SEQ ID NO: 47161 - RNA, 17 nt, Artificial Sequence
  Synthetic oligonucleotide: CTLA4-611
aagguaaaacuccaauc

SEQ ID NO: 47162 - RNA, 17 nt, Artificial Sequence
  Synthetic oligonucleotide: CTLA4-671
uguucacuuugaggauc

SEQ ID NO: 47163 - RNA, 17 nt, Artificial Sequence
  Synthetic oligonucleotide: CTLA4-589
cauguguaauacauauc

SEQ ID NO: 47164 - RNA, 17 nt, Artificial Sequence
  Synthetic oligonucleotide: CTLA4-643
guuuuaccuuuaacuuc

SEQ ID NO: 47165 - RNA, 17 nt, Artificial Sequence
  Synthetic oligonucleotide: CTLA4-593
acacauuucaaagcuuc

SEQ ID NO: 47166 - RNA, 17 nt, Artificial Sequence
  Synthetic oligonucleotide: CTLA4-677
aauuuuauucaaucuuc

SEQ ID NO: 47167 - RNA, 17 nt, Artificial Sequence
  Synthetic oligonucleotide: CTLA4-661
guagagcaaaaccuuuc

SEQ ID NO: 47168 - RNA, 17 nt, Artificial Sequence
  Synthetic oligonucleotide: CTLA4-75
cuugccuuggauuucag

SEQ ID NO: 47169 - RNA, 17 nt, Artificial Sequence
  Synthetic oligonucleotide: CTLA4-143
ccauggcuuuaugggag

SEQ ID NO: 47170 - RNA, 17 nt, Artificial Sequence
  Synthetic oligonucleotide: CTLA4-606
gagcaugaagauggagg

SEQ ID NO: 47171 - RNA, 17 nt, Artificial Sequence
  Synthetic oligonucleotide: CTLA4-582
uaaaauugggauuuagg

SEQ ID NO: 47172 - RNA, 17 nt, Artificial Sequence
  Synthetic oligonucleotide: CTLA4-620
agcagggagcaguuggg

SEQ ID NO: 47173 - RNA, 17 nt, Artificial Sequence
  Synthetic oligonucleotide: CTLA4-605
uuggagcaugaagaugg

SEQ ID NO: 47174 - RNA, 17 nt, Artificial Sequence
  Synthetic oligonucleotide: CTLA4-591
aaguccuugauucugug

SEQ ID NO: 47175 - RNA, 17 nt, Artificial Sequence
  Synthetic oligonucleotide: CTLA4-586
guucaguugagugcuug

SEQ ID NO: 47176 - RNA, 17 nt, Artificial Sequence
  Synthetic oligonucleotide: CTLA4-670
gcuucauguucacuuug

SEQ ID NO: 47177 - RNA, 17 nt, Artificial Sequence
  Synthetic oligonucleotide: CTLA4-803
agaaauaaacugaaaau

SEQ ID NO: 47178 - RNA, 17 nt, Artificial Sequence
  Synthetic oligonucleotide: CTLA4-579
agaagauugaauaaaau

SEQ ID NO: 47179 - RNA, 17 nt, Artificial Sequence
  Synthetic oligonucleotide: CTLA4-575
uugucaaugaaaugaau

SEQ ID NO: 47180 - RNA, 17 nt, Artificial Sequence
  Synthetic oligonucleotide: CTLA4-642
agccagccaagccagau

SEQ ID NO: 47181 - RNA, 17 nt, Artificial Sequence
  Synthetic oligonucleotide: CTLA4-585
auuuuccauccauggau

SEQ ID NO: 47182 - RNA, 17 nt, Artificial Sequence
  Synthetic oligonucleotide: CTLA4-673
auaacuaaguggagacu

SEQ ID NO: 47183 - RNA, 17 nt, Artificial Sequence
  Synthetic oligonucleotide: CTLA4-679
acaacuccaaaacuacu

SEQ ID NO: 47184 - RNA, 17 nt, Artificial Sequence
  Synthetic oligonucleotide: CTLA4-608
agguguuucuccuaccu

SEQ ID NO: 47185 - RNA, 17 nt, Artificial Sequence
  Synthetic oligonucleotide: CTLA4-680
cuaacuuucugagcccu

SEQ ID NO: 47186 - RNA, 17 nt, Artificial Sequence
  Synthetic oligonucleotide: CTLA4-74
aaagccauggcuugccu

SEQ ID NO: 47187 - RNA, 17 nt, Artificial Sequence
  Synthetic oligonucleotide: CTLA4-612
aaaacuccaaucuggcu

SEQ ID NO: 47188 - RNA, 17 nt, Artificial Sequence
  Synthetic oligonucleotide: CTLA4-590
auguguaauacauaucu

SEQ ID NO: 47189 - RNA, 17 nt, Artificial Sequence
  Synthetic oligonucleotide: CTLA4-2120
aauggcaggauuugucu

SEQ ID NO: 47190 - RNA, 17 nt, Artificial Sequence
  Synthetic oligonucleotide: CTLA4-678
auuuuauucaaucuucu

SEQ ID NO: 47191 - RNA, 17 nt, Artificial Sequence
  Synthetic oligonucleotide: CTLA4-618
ggccagcagggagcagu

SEQ ID NO: 47192 - RNA, 17 nt, Artificial Sequence
  Synthetic oligonucleotide: CTLA4-623
agcgccagguauuuagu

SEQ ID NO: 47193 - RNA, 17 nt, Artificial Sequence
  Synthetic oligonucleotide: CTLA4-667
acgagaaaggaagccgu

SEQ ID NO: 47194 - RNA, 17 nt, Artificial Sequence
  Synthetic oligonucleotide: CTLA4-645
acaaaugaaacccaggu

SEQ ID NO: 47195 - RNA, 17 nt, Artificial Sequence
  Synthetic oligonucleotide: CTLA4-592
aguccuugauucugugu

SEQ ID NO: 47196 - RNA, 17 nt, Artificial Sequence
  Synthetic oligonucleotide: CTLA4-580
gaagauugaauaaaauu

SEQ ID NO: 47197 - RNA, 17 nt, Artificial Sequence
  Synthetic oligonucleotide: CTLA4-804
uaaauccauuuagcauu

SEQ ID NO: 47198 - RNA, 17 nt, Artificial Sequence
  Synthetic oligonucleotide: CTLA4-681
uaacuuucugagcccuu

SEQ ID NO: 47199 - RNA, 17 nt, Artificial Sequence
  Synthetic oligonucleotide: CTLA4-619
gccagcagggagcaguu

SEQ ID NO: 47200 - RNA, 17 nt, Artificial Sequence
  Synthetic oligonucleotide: CTLA4-581
gaauaaaauugggauuu

SEQ ID NO: 47201 - RNA, 17 nt, Artificial Sequence
  Synthetic oligonucleotide: CTLA4-736
aaaugcuaaauggauuu

SEQ ID NO: 47202 - RNA, 17 nt, Artificial Sequence
  Synthetic oligonucleotide: CTLA4-81
aaggugagugagacuuu

SEQ ID NO: 47203 - RNA, 17 nt, Artificial Sequence
  Synthetic oligonucleotide: CTLA4-574
uagcagccuaguaguuu

SEQ ID NO: 47204 - RNA, 17 nt, Artificial Sequence
  Synthetic oligonucleotide: CTLA4-664
agaaagccuuuuuguuu

SEQ ID NO: 47205 - RNA, 20 nt, Artificial Sequence
  Synthetic oligonucleotide: CTLA4-476
cucguaaaaccaaaacaaaa

SEQ ID NO: 47206 - RNA, 20 nt, Artificial Sequence
  Synthetic oligonucleotide: CTLA4-697
ucucuuaaccaaaugcuaaa

SEQ ID NO: 47207 - RNA, 20 nt, Artificial Sequence
  Synthetic oligonucleotide: CTLA4-564
gagaauuuccuggaguacaa

SEQ ID NO: 47208 - RNA, 20 nt, Artificial Sequence
  Synthetic oligonucleotide: CTLA4-461
aaauccugccauuagcccaa

SEQ ID NO: 47209 - RNA, 20 nt, Artificial Sequence
  Synthetic oligonucleotide: CTLA4-8
uucaucccugucuucugcaa

SEQ ID NO: 47210 - RNA, 20 nt, Artificial Sequence
  Synthetic oligonucleotide: CTLA4-497
ucauuuguuucagcagucaa

SEQ ID NO: 47211 - RNA, 20 nt, Artificial Sequence
  Synthetic oligonucleotide: CTLA4-700
cuuauuuguaaagcugucaa

SEQ ID NO: 47212 - RNA, 20 nt, Artificial Sequence
  Synthetic oligonucleotide: CTLA4-553
uuguuuugguuuuacgagaa

SEQ ID NO: 47213 - RNA, 20 nt, Artificial Sequence
  Synthetic oligonucleotide: CTLA4-482
caaagcuucaggauccugaa

SEQ ID NO: 47214 - RNA, 20 nt, Artificial Sequence
  Synthetic oligonucleotide: CTLA4-570
uuucugagcccuugggcuaa

SEQ ID NO: 47215 - RNA, 20 nt, Artificial Sequence
  Synthetic oligonucleotide: CTLA4-498
auagcaaagccagaaguuaa

SEQ ID NO: 47216 - RNA, 20 nt, Artificial Sequence
  Synthetic oligonucleotide: CTLA4-60
acucaccuuugcagaagaca

SEQ ID NO: 47217 - RNA, 20 nt, Artificial Sequence
  Synthetic oligonucleotide: CTLA4-563
ggagaauuuccuggaguaca

SEQ ID NO: 47218 - RNA, 20 nt, Artificial Sequence
  Synthetic oligonucleotide: CTLA4-460
caaauccugccauuagccca

SEQ ID NO: 47219 - RNA, 20 nt, Artificial Sequence
  Synthetic oligonucleotide: CTLA4-68
cugaaauccaaggcaagcca

SEQ ID NO: 47220 - RNA, 20 nt, Artificial Sequence
  Synthetic oligonucleotide: CTLA4-556
gaacaaaacaagccaaucca

SEQ ID NO: 47221 - RNA, 20 nt, Artificial Sequence
  Synthetic oligonucleotide: CTLA4-472
uugaauacauuuuccaucca

SEQ ID NO: 47222 - RNA, 20 nt, Artificial Sequence
  Synthetic oligonucleotide: CTLA4-503
uuggcuggcucuguauucca

SEQ ID NO: 47223 - RNA, 20 nt, Artificial Sequence
  Synthetic oligonucleotide: CTLA4-505
ucuguauuccagggccagca

SEQ ID NO: 47224 - RNA, 20 nt, Artificial Sequence
  Synthetic oligonucleotide: CTLA4-63
agaaaaaacaggagagugca

SEQ ID NO: 47225 - RNA, 20 nt, Artificial Sequence
  Synthetic oligonucleotide: CTLA4-550
uuugaacccacacagaauca

SEQ ID NO: 47226 - RNA, 20 nt, Artificial Sequence
  Synthetic oligonucleotide: CTLA4-699
acuuauuuguaaagcuguca

SEQ ID NO: 47227 - RNA, 20 nt, Artificial Sequence
  Synthetic oligonucleotide: CTLA4-10
agacuuuuggagcaugaaga

SEQ ID NO: 47228 - RNA, 20 nt, Artificial Sequence
  Synthetic oligonucleotide: CTLA4-551
uacacaugugcacacacaga

SEQ ID NO: 47229 - RNA, 20 nt, Artificial Sequence
  Synthetic oligonucleotide: CTLA4-557
aaaacaagccaauccaugga

SEQ ID NO: 47230 - RNA, 20 nt, Artificial Sequence
  Synthetic oligonucleotide: CTLA4-465
augaaaugaauuggacugga

SEQ ID NO: 47231 - RNA, 20 nt, Artificial Sequence
  Synthetic oligonucleotide: CTLA4-509
caguugggcggcagcaaaua

SEQ ID NO: 47232 - RNA, 20 nt, Artificial Sequence
  Synthetic oligonucleotide: CTLA4-69
caaggcaagccauggcuuua

SEQ ID NO: 47233 - RNA, 20 nt, Artificial Sequence
  Synthetic oligonucleotide: CTLA4-61
ggaugaagagaagaaaaaac

SEQ ID NO: 47234 - RNA, 20 nt, Artificial Sequence
  Synthetic oligonucleotide: CTLA4-464
gucaaugaaaugaauuggac

SEQ ID NO: 47235 - RNA, 20 nt, Artificial Sequence
  Synthetic oligonucleotide: CTLA4-5
gcacaaggcucagcugaacc

SEQ ID NO: 47236 - RNA, 20 nt, Artificial Sequence
  Synthetic oligonucleotide: CTLA4-7
ugaaccuggcuaccaggacc

SEQ ID NO: 47237 - RNA, 20 nt, Artificial Sequence
  Synthetic oligonucleotide: CTLA4-527
ugaagccccuacuaaauacc

SEQ ID NO: 47238 - RNA, 20 nt, Artificial Sequence
  Synthetic oligonucleotide: CTLA4-495
gaggagguguuucuccuacc

SEQ ID NO: 47239 - RNA, 20 nt, Artificial Sequence
  Synthetic oligonucleotide: CTLA4-6
cucagcugaaccuggcuacc

SEQ ID NO: 47240 - RNA, 20 nt, Artificial Sequence
  Synthetic oligonucleotide: CTLA4-532
ugcugaaacaaaugaaaccc

SEQ ID NO: 47241 - RNA, 20 nt, Artificial Sequence
  Synthetic oligonucleotide: CTLA4-529
caacugcucccugcuggccc

SEQ ID NO: 47242 - RNA, 20 nt, Artificial Sequence
  Synthetic oligonucleotide: CTLA4-66
agggccagguccugguagcc

SEQ ID NO: 47243 - RNA, 20 nt, Artificial Sequence
  Synthetic oligonucleotide: CTLA4-510
auagcucagaacagagcgcc

SEQ ID NO: 47244 - RNA, 20 nt, Artificial Sequence
  Synthetic oligonucleotide: CTLA4-64
aaacaggagagugcagggcc

SEQ ID NO: 47245 - RNA, 20 nt, Artificial Sequence
  Synthetic oligonucleotide: CTLA4-471
uaggaggacccuuguacucc

SEQ ID NO: 47246 - RNA, 20 nt, Artificial Sequence
  Synthetic oligonucleotide: CTLA4-65
gagagugcagggccaggucc

SEQ ID NO: 47247 - RNA, 20 nt, Artificial Sequence
  Synthetic oligonucleotide: CTLA4-502
cuuggcuggcucuguauucc

SEQ ID NO: 47248 - RNA, 20 nt, Artificial Sequence
  Synthetic oligonucleotide: CTLA4-562
uggagacuuggagaauuucc

SEQ ID NO: 47249 - RNA, 20 nt, Artificial Sequence
  Synthetic oligonucleotide: CTLA4-504
cucuguauuccagggccagc

SEQ ID NO: 47250 - RNA, 20 nt, Artificial Sequence
  Synthetic oligonucleotide: CTLA4-501
aaacuccaaucuggcuuggc

SEQ ID NO: 47251 - RNA, 20 nt, Artificial Sequence
  Synthetic oligonucleotide: CTLA4-528
gccgcccaacugcucccugc

SEQ ID NO: 47252 - RNA, 20 nt, Artificial Sequence
  Synthetic oligonucleotide: CTLA4-62
aagaaaaaacaggagagugc

SEQ ID NO: 47253 - RNA, 20 nt, Artificial Sequence
  Synthetic oligonucleotide: CTLA4-499
uuaaagguaaaacuccaauc

SEQ ID NO: 47254 - RNA, 20 nt, Artificial Sequence
  Synthetic oligonucleotide: CTLA4-477
gcacauguguaauacauauc

SEQ ID NO: 47255 - RNA, 20 nt, Artificial Sequence
  Synthetic oligonucleotide: CTLA4-481
caaacacauuucaaagcuuc

SEQ ID NO: 47256 - RNA, 20 nt, Artificial Sequence
  Synthetic oligonucleotide: CTLA4-565
cccaauuuuauucaaucuuc

SEQ ID NO: 47257 - RNA, 20 nt, Artificial Sequence
  Synthetic oligonucleotide: CTLA4-549
gaaguagagcaaaaccuuuc

SEQ ID NO: 47258 - RNA, 20 nt, Artificial Sequence
  Synthetic oligonucleotide: CTLA4-560
ugaggaucuggauaacuaag

SEQ ID NO: 47259 - RNA, 20 nt, Artificial Sequence
  Synthetic oligonucleotide: CTLA4-3
uggcuugccuuggauuucag

SEQ ID NO: 47260 - RNA, 20 nt, Artificial Sequence
  Synthetic oligonucleotide: CTLA4-554
uuuuacgagaaaggaagccg

SEQ ID NO: 47261 - RNA, 20 nt, Artificial Sequence
  Synthetic oligonucleotide: CTLA4-494
uuggagcaugaagauggagg

SEQ ID NO: 47262 - RNA, 20 nt, Artificial Sequence
  Synthetic oligonucleotide: CTLA4-470
gaauaaaauugggauuuagg

SEQ ID NO: 47263 - RNA, 20 nt, Artificial Sequence
  Synthetic oligonucleotide: CTLA4-508
gccagcagggagcaguuggg

SEQ ID NO: 47264 - RNA, 20 nt, Artificial Sequence
  Synthetic oligonucleotide: CTLA4-493
cuuuuggagcaugaagaugg

SEQ ID NO: 47265 - RNA, 20 nt, Artificial Sequence
  Synthetic oligonucleotide: CTLA4-479
auaaaguccuugauucugug

SEQ ID NO: 47266 - RNA, 20 nt, Artificial Sequence
  Synthetic oligonucleotide: CTLA4-772
acaagaaauaaacugaaaau

SEQ ID NO: 47267 - RNA, 20 nt, Artificial Sequence
  Synthetic oligonucleotide: CTLA4-467
cccagaagauugaauaaaau

SEQ ID NO: 47268 - RNA, 20 nt, Artificial Sequence
  Synthetic oligonucleotide: CTLA4-463
gaguugucaaugaaaugaau

SEQ ID NO: 47269 - RNA, 20 nt, Artificial Sequence
  Synthetic oligonucleotide: CTLA4-530
cagagccagccaagccagau

SEQ ID NO: 47270 - RNA, 20 nt, Artificial Sequence
  Synthetic oligonucleotide: CTLA4-473
uacauuuuccauccauggau

SEQ ID NO: 47271 - RNA, 20 nt, Artificial Sequence
  Synthetic oligonucleotide: CTLA4-70
aaggcaagccauggcuuuau

SEQ ID NO: 47272 - RNA, 20 nt, Artificial Sequence
  Synthetic oligonucleotide: CTLA4-561
uggauaacuaaguggagacu

SEQ ID NO: 47273 - RNA, 20 nt, Artificial Sequence
  Synthetic oligonucleotide: CTLA4-567
uugacaacuccaaaacuacu

SEQ ID NO: 47274 - RNA, 20 nt, Artificial Sequence
  Synthetic oligonucleotide: CTLA4-496
aggagguguuucuccuaccu

SEQ ID NO: 47275 - RNA, 20 nt, Artificial Sequence
  Synthetic oligonucleotide: CTLA4-568
cugcuaacuuucugagcccu

SEQ ID NO: 47276 - RNA, 20 nt, Artificial Sequence
  Synthetic oligonucleotide: CTLA4-500
gguaaaacuccaaucuggcu

SEQ ID NO: 47277 - RNA, 20 nt, Artificial Sequence
  Synthetic oligonucleotide: CTLA4-478
cacauguguaauacauaucu

SEQ ID NO: 47278 - RNA, 20 nt, Artificial Sequence
  Synthetic oligonucleotide: CTLA4-2121
gcuaauggcaggauuugucu

SEQ ID NO: 47279 - RNA, 20 nt, Artificial Sequence
  Synthetic oligonucleotide: CTLA4-566
ccaauuuuauucaaucuucu

SEQ ID NO: 47280 - RNA, 20 nt, Artificial Sequence
  Synthetic oligonucleotide: CTLA4-506
cagggccagcagggagcagu

SEQ ID NO: 47281 - RNA, 20 nt, Artificial Sequence
  Synthetic oligonucleotide: CTLA4-555
uuuacgagaaaggaagccgu

SEQ ID NO: 47282 - RNA, 20 nt, Artificial Sequence
  Synthetic oligonucleotide: CTLA4-533
gaaacaaaugaaacccaggu

SEQ ID NO: 47283 - RNA, 20 nt, Artificial Sequence
  Synthetic oligonucleotide: CTLA4-480
uaaaguccuugauucugugu

SEQ ID NO: 47284 - RNA, 20 nt, Artificial Sequence
  Synthetic oligonucleotide: CTLA4-468
ccagaagauugaauaaaauu

SEQ ID NO: 47285 - RNA, 20 nt, Artificial Sequence
  Synthetic oligonucleotide: CTLA4-773
uccuaaauccauuuagcauu

SEQ ID NO: 47286 - RNA, 20 nt, Artificial Sequence
  Synthetic oligonucleotide: CTLA4-569
ugcuaacuuucugagcccuu

SEQ ID NO: 47287 - RNA, 20 nt, Artificial Sequence
  Synthetic oligonucleotide: CTLA4-507
agggccagcagggagcaguu

SEQ ID NO: 47288 - RNA, 20 nt, Artificial Sequence
  Synthetic oligonucleotide: CTLA4-469
auugaauaaaauugggauuu

SEQ ID NO: 47289 - RNA, 20 nt, Artificial Sequence
  Synthetic oligonucleotide: CTLA4-698
accaaaugcuaaauggauuu

SEQ ID NO: 47290 - RNA, 20 nt, Artificial Sequence
  Synthetic oligonucleotide: CTLA4-9
gcaaaggugagugagacuuu

SEQ ID NO: 47291 - RNA, 20 nt, Artificial Sequence
  Synthetic oligonucleotide: CTLA4-552
aauagaaagccuuuuuguuu

SEQ ID NO: 47292 - RNA, 17 nt, Artificial Sequence
  Synthetic oligonucleotide: CTLA4-751
aaaaaaagacaaggaaa

SEQ ID NO: 47293 - RNA, 17 nt, Artificial Sequence
  Synthetic oligonucleotide: CTLA4-797
uuagagccguccauaaa

SEQ ID NO: 47294 - RNA, 17 nt, Artificial Sequence
  Synthetic oligonucleotide: CTLA4-638
cuuccagucucauagaa

SEQ ID NO: 47295 - RNA, 17 nt, Artificial Sequence
  Synthetic oligonucleotide: CTLA4-631
agugauuuaagagggaa

SEQ ID NO: 47296 - RNA, 17 nt, Artificial Sequence
  Synthetic oligonucleotide: CTLA4-2122
cauaguugauaccuuaa

SEQ ID NO: 47297 - RNA, 17 nt, Artificial Sequence
  Synthetic oligonucleotide: CTLA4-1114
aagucaauuuuuuuuaa

SEQ ID NO: 47298 - RNA, 17 nt, Artificial Sequence
  Synthetic oligonucleotide: CTLA4-2123
aacagacaguuguaaca

SEQ ID NO: 47299 - RNA, 17 nt, Artificial Sequence
  Synthetic oligonucleotide: CTLA4-750
gccaaaaaaaaaagaca

SEQ ID NO: 47300 - RNA, 17 nt, Artificial Sequence
  Synthetic oligonucleotide: CTLA4-2124
cuacuccaguccgucca

SEQ ID NO: 47301 - RNA, 17 nt, Artificial Sequence
  Synthetic oligonucleotide: CTLA4-741
uuuugcuauacaauuca

SEQ ID NO: 47302 - RNA, 17 nt, Artificial Sequence
  Synthetic oligonucleotide: CTLA4-748
cuucuuuacuuaauuca

SEQ ID NO: 47303 - RNA, 17 nt, Artificial Sequence
  Synthetic oligonucleotide: CTLA4-793
aaagaaagaaacauuca

SEQ ID NO: 47304 - RNA, 17 nt, Artificial Sequence
  Synthetic oligonucleotide: CTLA4-809
cuugaauuaaguaaaga

SEQ ID NO: 47305 - RNA, 17 nt, Artificial Sequence
  Synthetic oligonucleotide: CTLA4-798
caaaacagaguugaaga

SEQ ID NO: 47306 - RNA, 17 nt, Artificial Sequence
  Synthetic oligonucleotide: CTLA4-630
cuggaagugauuuaaga

SEQ ID NO: 47307 - RNA, 17 nt, Artificial Sequence
  Synthetic oligonucleotide: CTLA4-800
gccucugguuuugcaga

SEQ ID NO: 47308 - RNA, 17 nt, Artificial Sequence
  Synthetic oligonucleotide: CTLA4-637
acuuccagucucauaga

SEQ ID NO: 47309 - RNA, 17 nt, Artificial Sequence
  Synthetic oligonucleotide: CTLA4-2125
cuuaaggggcuucuaga

SEQ ID NO: 47310 - RNA, 17 nt, Artificial Sequence
  Synthetic oligonucleotide: CTLA4-723
cucuccagauuuaagga

SEQ ID NO: 47311 - RNA, 17 nt, Artificial Sequence
  Synthetic oligonucleotide: CTLA4-728
gucuauccuuuuaugga

SEQ ID NO: 47312 - RNA, 17 nt, Artificial Sequence
  Synthetic oligonucleotide: CTLA4-636
aaauguauucaggacua

SEQ ID NO: 47313 - RNA, 17 nt, Artificial Sequence
  Synthetic oligonucleotide: CTLA4-745
agcuuguuuaaaaugua

SEQ ID NO: 47314 - RNA, 17 nt, Artificial Sequence
  Synthetic oligonucleotide: CTLA4-2126
acauaguugauaccuua

SEQ ID NO: 47315 - RNA, 17 nt, Artificial Sequence
  Synthetic oligonucleotide: CTLA4-2127
cuucuagaagccccuua

SEQ ID NO: 47316 - RNA, 17 nt, Artificial Sequence
  Synthetic oligonucleotide: CTLA4-733
uugucucuguugaguua

SEQ ID NO: 47317 - RNA, 17 nt, Artificial Sequence
  Synthetic oligonucleotide: CTLA4-725
cagcugucacaaauuua

SEQ ID NO: 47318 - RNA, 17 nt, Artificial Sequence
  Synthetic oligonucleotide: CTLA4-722
aaaacucuccagauuua

SEQ ID NO: 47319 - RNA, 17 nt, Artificial Sequence
  Synthetic oligonucleotide: CTLA4-727
aaaagucuauccuuuua

SEQ ID NO: 47320 - RNA, 17 nt, Artificial Sequence
  Synthetic oligonucleotide: CTLA4-742
uacaauucaagguuuua

SEQ ID NO: 47321 - RNA, 17 nt, Artificial Sequence
  Synthetic oligonucleotide: CTLA4-749
cuuaauucaagguuuua

SEQ ID NO: 47322 - RNA, 17 nt, Artificial Sequence
  Synthetic oligonucleotide: CTLA4-2128
aaacagacaguuguaac

SEQ ID NO: 47323 - RNA, 17 nt, Artificial Sequence
  Synthetic oligonucleotide: CTLA4-627
guuuaguagagagacac

SEQ ID NO: 47324 - RNA, 17 nt, Artificial Sequence
  Synthetic oligonucleotide: CTLA4-813
uuguaugccaaacagac

SEQ ID NO: 47325 - RNA, 17 nt, Artificial Sequence
  Synthetic oligonucleotide: CTLA4-628
agacccuucuaugagac

SEQ ID NO: 47326 - RNA, 17 nt, Artificial Sequence
  Synthetic oligonucleotide: CTLA4-796
uugugacagcuguagac

SEQ ID NO: 47327 - RNA, 17 nt, Artificial Sequence
  Synthetic oligonucleotide: CTLA4-2129
aauuccgggcauauuac

SEQ ID NO: 47328 - RNA, 17 nt, Artificial Sequence
  Synthetic oligonucleotide: CTLA4-806
gcaaaaaaacucuuccc

SEQ ID NO: 47329 - RNA, 17 nt, Artificial Sequence
  Synthetic oligonucleotide: CTLA4-2130
ggaaccuguaauaugcc

SEQ ID NO: 47330 - RNA, 17 nt, Artificial Sequence
  Synthetic oligonucleotide: CTLA4-2131
uugacuuaagcaaaucc

SEQ ID NO: 47331 - RNA, 17 nt, Artificial Sequence
  Synthetic oligonucleotide: CTLA4-2132
uaagugcacagaauucc

SEQ ID NO: 47332 - RNA, 17 nt, Artificial Sequence
  Synthetic oligonucleotide: CTLA4-808
cuacauuuuaaacaagc

SEQ ID NO: 47333 - RNA, 17 nt, Artificial Sequence
  Synthetic oligonucleotide: CTLA4-632
ccugaauacauuugagc

SEQ ID NO: 47334 - RNA, 17 nt, Artificial Sequence
  Synthetic oligonucleotide: CTLA4-794
aggaccuuccuuaaauc

SEQ ID NO: 47335 - RNA, 17 nt, Artificial Sequence
  Synthetic oligonucleotide: CTLA4-726
cacaaauuuaaggacuc

SEQ ID NO: 47336 - RNA, 17 nt, Artificial Sequence
  Synthetic oligonucleotide: CTLA4-801
ggaaaagaagcugccuc

SEQ ID NO: 47337 - RNA, 17 nt, Artificial Sequence
  Synthetic oligonucleotide: CTLA4-814
aaacccacacguagguc

SEQ ID NO: 47338 - RNA, 17 nt, Artificial Sequence
  Synthetic oligonucleotide: CTLA4-799
gcagaaggaaagaauuc

SEQ ID NO: 47339 - RNA, 17 nt, Artificial Sequence
  Synthetic oligonucleotide: CTLA4-2133
cuaagugcacagaauuc

SEQ ID NO: 47340 - RNA, 17 nt, Artificial Sequence
  Synthetic oligonucleotide: CTLA4-635
ccagcucaaauguauuc

SEQ ID NO: 47341 - RNA, 17 nt, Artificial Sequence
  Synthetic oligonucleotide: CTLA4-634
cauuugagcuggguuuc

SEQ ID NO: 47342 - RNA, 17 nt, Artificial Sequence
  Synthetic oligonucleotide: CTLA4-2134
auaguugauaccuuaag

SEQ ID NO: 47343 - RNA, 17 nt, Artificial Sequence
  Synthetic oligonucleotide: CTLA4-629
acuggaagugauuuaag

SEQ ID NO: 47344 - RNA, 17 nt, Artificial Sequence
  Synthetic oligonucleotide: CTLA4-734
uccuucugcaaaaccag

SEQ ID NO: 47345 - RNA, 17 nt, Artificial Sequence
  Synthetic oligonucleotide: CTLA4-807
uaaaguauaugaauccg

SEQ ID NO: 47346 - RNA, 17 nt, Artificial Sequence
  Synthetic oligonucleotide: CTLA4-812
uaugccaaacagacugg

SEQ ID NO: 47347 - RNA, 17 nt, Artificial Sequence
  Synthetic oligonucleotide: CTLA4-791
agaaagaaacauucaug

SEQ ID NO: 47348 - RNA, 17 nt, Artificial Sequence
  Synthetic oligonucleotide: CTLA4-816
ugaagagcugaaaacug

SEQ ID NO: 47349 - RNA, 17 nt, Artificial Sequence
  Synthetic oligonucleotide: CTLA4-753
guugccugaccuacgug

SEQ ID NO: 47350 - RNA, 17 nt, Artificial Sequence
  Synthetic oligonucleotide: CTLA4-746
aaaauguagggaaauug

SEQ ID NO: 47351 - RNA, 17 nt, Artificial Sequence
  Synthetic oligonucleotide: CTLA4-795
aagaauuugaaacauug

SEQ ID NO: 47352 - RNA, 17 nt, Artificial Sequence
  Synthetic oligonucleotide: CTLA4-810
uuuuauuuuuaaauaau

SEQ ID NO: 47353 - RNA, 17 nt, Artificial Sequence
  Synthetic oligonucleotide: CTLA4-724
ucuuuuuguuagaucau

SEQ ID NO: 47354 - RNA, 17 nt, Artificial Sequence
  Synthetic oligonucleotide: CTLA4-792
aagaaagaaacauucau

SEQ ID NO: 47355 - RNA, 17 nt, Artificial Sequence
  Synthetic oligonucleotide: CTLA4-2135
ugacuuaagcaaauccu

SEQ ID NO: 47356 - RNA, 17 nt, Artificial Sequence
  Synthetic oligonucleotide: CTLA4-743
caagguuuuaagguccu

SEQ ID NO: 47357 - RNA, 17 nt, Artificial Sequence
  Synthetic oligonucleotide: CTLA4-633
cugaauacauuugagcu

SEQ ID NO: 47358 - RNA, 17 nt, Artificial Sequence
  Synthetic oligonucleotide: CTLA4-2136
cauggacggacuggagu

SEQ ID NO: 47359 - RNA, 17 nt, Artificial Sequence
  Synthetic oligonucleotide: CTLA4-815
aucugaaacccacacgu

SEQ ID NO: 47360 - RNA, 17 nt, Artificial Sequence
  Synthetic oligonucleotide: CTLA4-731
ucuugaaucauuugggu

SEQ ID NO: 47361 - RNA, 17 nt, Artificial Sequence
  Synthetic oligonucleotide: CTLA4-744
cagcuuguuuaaaaugu

SEQ ID NO: 47362 - RNA, 17 nt, Artificial Sequence
  Synthetic oligonucleotide: CTLA4-754
uugccugaccuacgugu

SEQ ID NO: 47363 - RNA, 17 nt, Artificial Sequence
  Synthetic oligonucleotide: CTLA4-747
aaauguagggaaauugu

SEQ ID NO: 47364 - RNA, 17 nt, Artificial Sequence
  Synthetic oligonucleotide: CTLA4-729
uaaucucuugaaucauu

SEQ ID NO: 47365 - RNA, 17 nt, Artificial Sequence
  Synthetic oligonucleotide: CTLA4-2137
cggaauucugugcacuu

SEQ ID NO: 47366 - RNA, 17 nt, Artificial Sequence
  Synthetic oligonucleotide: CTLA4-732
uuggguuggcuuuucuu

SEQ ID NO: 47367 - RNA, 17 nt, Artificial Sequence
  Synthetic oligonucleotide: CTLA4-752
aaagccaccagucuguu

SEQ ID NO: 47368 - RNA, 17 nt, Artificial Sequence
  Synthetic oligonucleotide: CTLA4-730
aaucucuugaaucauuu

SEQ ID NO: 47369 - RNA, 17 nt, Artificial Sequence
  Synthetic oligonucleotide: CTLA4-811
uccuugucuuuuuuuuu

SEQ ID NO: 47370 - RNA, 20 nt, Artificial Sequence
  Synthetic oligonucleotide: CTLA4-713
aaaaaaaaaagacaaggaaa

SEQ ID NO: 47371 - RNA, 20 nt, Artificial Sequence
  Synthetic oligonucleotide: CTLA4-766
agauuagagccguccauaaa

SEQ ID NO: 47372 - RNA, 20 nt, Artificial Sequence
  Synthetic oligonucleotide: CTLA4-526
ucacuuccagucucauagaa

SEQ ID NO: 47373 - RNA, 20 nt, Artificial Sequence
  Synthetic oligonucleotide: CTLA4-519
ggaagugauuuaagagggaa

SEQ ID NO: 47374 - RNA, 20 nt, Artificial Sequence
  Synthetic oligonucleotide: CTLA4-2138
aaacauaguugauaccuuaa

SEQ ID NO: 47375 - RNA, 20 nt, Artificial Sequence
  Synthetic oligonucleotide: CTLA4-2139
cuuaagucaauuuuuuuuaa

SEQ ID NO: 47376 - RNA, 20 nt, Artificial Sequence
  Synthetic oligonucleotide: CTLA4-2140
gcaaacagacaguuguaaca

SEQ ID NO: 47377 - RNA, 20 nt, Artificial Sequence
  Synthetic oligonucleotide: CTLA4-712
auugccaaaaaaaaaagaca

SEQ ID NO: 47378 - RNA, 20 nt, Artificial Sequence
  Synthetic oligonucleotide: CTLA4-2141
ugccuacuccaguccgucca

SEQ ID NO: 47379 - RNA, 20 nt, Artificial Sequence
  Synthetic oligonucleotide: CTLA4-703
uuuuuuugcuauacaauuca

SEQ ID NO: 47380 - RNA, 20 nt, Artificial Sequence
  Synthetic oligonucleotide: CTLA4-710
ugccuucuuuacuuaauuca

SEQ ID NO: 47381 - RNA, 20 nt, Artificial Sequence
  Synthetic oligonucleotide: CTLA4-762
aauaaagaaagaaacauuca

SEQ ID NO: 47382 - RNA, 20 nt, Artificial Sequence
  Synthetic oligonucleotide: CTLA4-778
aaccuugaauuaaguaaaga

SEQ ID NO: 47383 - RNA, 20 nt, Artificial Sequence
  Synthetic oligonucleotide: CTLA4-767
agacaaaacagaguugaaga

SEQ ID NO: 47384 - RNA, 20 nt, Artificial Sequence
  Synthetic oligonucleotide: CTLA4-518
agacuggaagugauuuaaga

SEQ ID NO: 47385 - RNA, 20 nt, Artificial Sequence
  Synthetic oligonucleotide: CTLA4-769
gcugccucugguuuugcaga

SEQ ID NO: 47386 - RNA, 20 nt, Artificial Sequence
  Synthetic oligonucleotide: CTLA4-525
aucacuuccagucucauaga

SEQ ID NO: 47387 - RNA, 20 nt, Artificial Sequence
  Synthetic oligonucleotide: CTLA4-2142
uaccuuaaggggcuucuaga

SEQ ID NO: 47388 - RNA, 20 nt, Artificial Sequence
  Synthetic oligonucleotide: CTLA4-685
aaacucuccagauuuaagga

SEQ ID NO: 47389 - RNA, 20 nt, Artificial Sequence
  Synthetic oligonucleotide: CTLA4-690
aaagucuauccuuuuaugga

SEQ ID NO: 47390 - RNA, 20 nt, Artificial Sequence
  Synthetic oligonucleotide: CTLA4-524
cucaaauguauucaggacua

SEQ ID NO: 47391 - RNA, 20 nt, Artificial Sequence
  Synthetic oligonucleotide: CTLA4-707
gccagcuuguuuaaaaugua

SEQ ID NO: 47392 - RNA, 20 nt, Artificial Sequence
  Synthetic oligonucleotide: CTLA4-2143
aaaacauaguugauaccuua

SEQ ID NO: 47393 - RNA, 20 nt, Artificial Sequence
  Synthetic oligonucleotide: CTLA4-2144
agccuucuagaagccccuua

SEQ ID NO: 47394 - RNA, 20 nt, Artificial Sequence
  Synthetic oligonucleotide: CTLA4-695
guuuugucucuguugaguua

SEQ ID NO: 47395 - RNA, 20 nt, Artificial Sequence
  Synthetic oligonucleotide: CTLA4-687
cuacagcugucacaaauuua

SEQ ID NO: 47396 - RNA, 20 nt, Artificial Sequence
  Synthetic oligonucleotide: CTLA4-684
augaaaacucuccagauuua

SEQ ID NO: 47397 - RNA, 20 nt, Artificial Sequence
  Synthetic oligonucleotide: CTLA4-689
aaaaaaagucuauccuuuua

SEQ ID NO: 47398 - RNA, 20 nt, Artificial Sequence
  Synthetic oligonucleotide: CTLA4-704
cuauacaauucaagguuuua

SEQ ID NO: 47399 - RNA, 20 nt, Artificial Sequence
  Synthetic oligonucleotide: CTLA4-711
uuacuuaauucaagguuuua

SEQ ID NO: 47400 - RNA, 20 nt, Artificial Sequence
  Synthetic oligonucleotide: CTLA4-2145
ugcaaacagacaguuguaac

SEQ ID NO: 47401 - RNA, 20 nt, Artificial Sequence
  Synthetic oligonucleotide: CTLA4-515
uugguuuaguagagagacac

SEQ ID NO: 47402 - RNA, 20 nt, Artificial Sequence
  Synthetic oligonucleotide: CTLA4-782
guauuguaugccaaacagac

SEQ ID NO: 47403 - RNA, 20 nt, Artificial Sequence
  Synthetic oligonucleotide: CTLA4-516
uucagacccuucuaugagac

SEQ ID NO: 47404 - RNA, 20 nt, Artificial Sequence
  Synthetic oligonucleotide: CTLA4-765
aauuugugacagcuguagac

SEQ ID NO: 47405 - RNA, 20 nt, Artificial Sequence
  Synthetic oligonucleotide: CTLA4-2146
cagaauuccgggcauauuac

SEQ ID NO: 47406 - RNA, 20 nt, Artificial Sequence
  Synthetic oligonucleotide: CTLA4-775
auagcaaaaaaacucuuccc

SEQ ID NO: 47407 - RNA, 20 nt, Artificial Sequence
  Synthetic oligonucleotide: CTLA4-2147
uggggaaccuguaauaugcc

SEQ ID NO: 47408 - RNA, 20 nt, Artificial Sequence
  Synthetic oligonucleotide: CTLA4-2148
aaauugacuuaagcaaaucc

SEQ ID NO: 47409 - RNA, 20 nt, Artificial Sequence
  Synthetic oligonucleotide: CTLA4-2149
uccuaagugcacagaauucc

SEQ ID NO: 47410 - RNA, 20 nt, Artificial Sequence
  Synthetic oligonucleotide: CTLA4-777
ucccuacauuuuaaacaagc

SEQ ID NO: 47411 - RNA, 20 nt, Artificial Sequence
  Synthetic oligonucleotide: CTLA4-520
aguccugaauacauuugagc

SEQ ID NO: 47412 - RNA, 20 nt, Artificial Sequence
  Synthetic oligonucleotide: CTLA4-763
uugaggaccuuccuuaaauc

SEQ ID NO: 47413 - RNA, 20 nt, Artificial Sequence
  Synthetic oligonucleotide: CTLA4-688
ugucacaaauuuaaggacuc

SEQ ID NO: 47414 - RNA, 20 nt, Artificial Sequence
  Synthetic oligonucleotide: CTLA4-783
cugaaacccacacguagguc

SEQ ID NO: 47415 - RNA, 20 nt, Artificial Sequence
  Synthetic oligonucleotide: CTLA4-768
uuugcagaaggaaagaauuc

SEQ ID NO: 47416 - RNA, 20 nt, Artificial Sequence
  Synthetic oligonucleotide: CTLA4-2150
auccuaagugcacagaauuc

SEQ ID NO: 47417 - RNA, 20 nt, Artificial Sequence
  Synthetic oligonucleotide: CTLA4-523
aacccagcucaaauguauuc

SEQ ID NO: 47418 - RNA, 20 nt, Artificial Sequence
  Synthetic oligonucleotide: CTLA4-522
auacauuugagcuggguuuc

SEQ ID NO: 47419 - RNA, 20 nt, Artificial Sequence
  Synthetic oligonucleotide: CTLA4-2151
aacauaguugauaccuuaag

SEQ ID NO: 47420 - RNA, 20 nt, Artificial Sequence
  Synthetic oligonucleotide: CTLA4-517
gagacuggaagugauuuaag

SEQ ID NO: 47421 - RNA, 20 nt, Artificial Sequence
  Synthetic oligonucleotide: CTLA4-696
cuuuccuucugcaaaaccag

SEQ ID NO: 47422 - RNA, 20 nt, Artificial Sequence
  Synthetic oligonucleotide: CTLA4-776
uuauaaaguauaugaauccg

SEQ ID NO: 47423 - RNA, 20 nt, Artificial Sequence
  Synthetic oligonucleotide: CTLA4-781
uuguaugccaaacagacugg

SEQ ID NO: 47424 - RNA, 20 nt, Artificial Sequence
  Synthetic oligonucleotide: CTLA4-760
uaaagaaagaaacauucaug

SEQ ID NO: 47425 - RNA, 20 nt, Artificial Sequence
  Synthetic oligonucleotide: CTLA4-785
cucugaagagcugaaaacug

SEQ ID NO: 47426 - RNA, 20 nt, Artificial Sequence
  Synthetic oligonucleotide: CTLA4-715
auuguugccugaccuacgug

SEQ ID NO: 47427 - RNA, 20 nt, Artificial Sequence
  Synthetic oligonucleotide: CTLA4-708
uuuaaaauguagggaaauug

SEQ ID NO: 47428 - RNA, 20 nt, Artificial Sequence
  Synthetic oligonucleotide: CTLA4-764
aaaaagaauuugaaacauug

SEQ ID NO: 47429 - RNA, 20 nt, Artificial Sequence
  Synthetic oligonucleotide: CTLA4-779
aacuuuuauuuuuaaauaau

SEQ ID NO: 47430 - RNA, 20 nt, Artificial Sequence
  Synthetic oligonucleotide: CTLA4-686
aauucuuuuuguuagaucau

SEQ ID NO: 47431 - RNA, 20 nt, Artificial Sequence
  Synthetic oligonucleotide: CTLA4-761
auaaagaaagaaacauucau

SEQ ID NO: 47432 - RNA, 20 nt, Artificial Sequence
  Synthetic oligonucleotide: CTLA4-2152
aauugacuuaagcaaauccu

SEQ ID NO: 47433 - RNA, 20 nt, Artificial Sequence
  Synthetic oligonucleotide: CTLA4-705
auucaagguuuuaagguccu

SEQ ID NO: 47434 - RNA, 20 nt, Artificial Sequence
  Synthetic oligonucleotide: CTLA4-521
guccugaauacauuugagcu

SEQ ID NO: 47435 - RNA, 20 nt, Artificial Sequence
  Synthetic oligonucleotide: CTLA4-2153
aaccauggacggacuggagu

SEQ ID NO: 47436 - RNA, 20 nt, Artificial Sequence
  Synthetic oligonucleotide: CTLA4-784
ugcaucugaaacccacacgu

SEQ ID NO: 47437 - RNA, 20 nt, Artificial Sequence
  Synthetic oligonucleotide: CTLA4-693
aucucuugaaucauuugggu

SEQ ID NO: 47438 - RNA, 20 nt, Artificial Sequence
  Synthetic oligonucleotide: CTLA4-706
agccagcuuguuuaaaaugu

SEQ ID NO: 47439 - RNA, 20 nt, Artificial Sequence
  Synthetic oligonucleotide: CTLA4-716
uuguugccugaccuacgugu

SEQ ID NO: 47440 - RNA, 20 nt, Artificial Sequence
  Synthetic oligonucleotide: CTLA4-709
uuaaaauguagggaaauugu

SEQ ID NO: 47441 - RNA, 20 nt, Artificial Sequence
  Synthetic oligonucleotide: CTLA4-691
cucuaaucucuugaaucauu

SEQ ID NO: 47442 - RNA, 20 nt, Artificial Sequence
  Synthetic oligonucleotide: CTLA4-2154
gcccggaauucugugcacuu

SEQ ID NO: 47443 - RNA, 20 nt, Artificial Sequence
  Synthetic oligonucleotide: CTLA4-694
cauuuggguuggcuuuucuu

SEQ ID NO: 47444 - RNA, 20 nt, Artificial Sequence
  Synthetic oligonucleotide: CTLA4-714
aagaaagccaccagucuguu

SEQ ID NO: 47445 - RNA, 20 nt, Artificial Sequence
  Synthetic oligonucleotide: CTLA4-692
ucuaaucucuugaaucauuu

SEQ ID NO: 47446 - RNA, 20 nt, Artificial Sequence
  Synthetic oligonucleotide: CTLA4-780
uuuuccuugucuuuuuuuuu

SEQ ID NO: 47447 - RNA, 21 nt, Artificial Sequence
  Synthetic oligonucleotide: CTLA4-2155
ugaaauguguuugaacccaca

SEQ ID NO: 47448 - RNA, 22 nt, Artificial Sequence
  Synthetic oligonucleotide: CTLA4-2156
uugaaauguguuugaacccaca

SEQ ID NO: 47449 - RNA, 23 nt, Artificial Sequence
  Synthetic oligonucleotide: CTLA4-2157
uuugaaauguguuugaacccaca

SEQ ID NO: 47450 - RNA, 24 nt, Artificial Sequence
  Synthetic oligonucleotide: CTLA4-2158
cuuugaaauguguuugaacccaca

SEQ ID NO: 47451 - RNA, 18 nt, Artificial Sequence
  Synthetic oligonucleotide: CTLA4-1387
cucaccuuugcagaagac

SEQ ID NO: 47452 - RNA, 19 nt, Artificial Sequence
  Synthetic oligonucleotide: CTLA4-1388
acucaccuuugcagaagac

SEQ ID NO: 47453 - RNA, 20 nt, Artificial Sequence
  Synthetic oligonucleotide: CTLA4-59
cacucaccuuugcagaagac

SEQ ID NO: 47454 - RNA, 21 nt, Artificial Sequence
  Synthetic oligonucleotide: CTLA4-1389
ucacucaccuuugcagaagac

SEQ ID NO: 47455 - RNA, 22 nt, Artificial Sequence
  Synthetic oligonucleotide: CTLA4-1390
cucacucaccuuugcagaagac

SEQ ID NO: 47456 - RNA, 23 nt, Artificial Sequence
  Synthetic oligonucleotide: CTLA4-1391
ucucacucaccuuugcagaagac

SEQ ID NO: 47457 - RNA, 24 nt, Artificial Sequence
  Synthetic oligonucleotide: CTLA4-1392
gucucacucaccuuugcagaagac

SEQ ID NO: 47458 - RNA, 21 nt, Artificial Sequence
  Synthetic oligonucleotide: CTLA4-2159
uuggagaauuuccuggaguac

SEQ ID NO: 47459 - RNA, 22 nt, Artificial Sequence
  Synthetic oligonucleotide: CTLA4-2160
cuuggagaauuuccuggaguac

SEQ ID NO: 47460 - RNA, 23 nt, Artificial Sequence
  Synthetic oligonucleotide: CTLA4-2161
acuuggagaauuuccuggaguac

SEQ ID NO: 47461 - RNA, 24 nt, Artificial Sequence
  Synthetic oligonucleotide: CTLA4-2162
gacuuggagaauuuccuggaguac

SEQ ID NO: 47462 - RNA, 21 nt, Artificial Sequence
  Synthetic oligonucleotide: CTLA4-2163
ccaacugcucccugcuggccc

SEQ ID NO: 47463 - RNA, 22 nt, Artificial Sequence
  Synthetic oligonucleotide: CTLA4-2164
cccaacugcucccugcuggccc

SEQ ID NO: 47464 - RNA, 23 nt, Artificial Sequence
  Synthetic oligonucleotide: CTLA4-2165
gcccaacugcucccugcuggccc

SEQ ID NO: 47465 - RNA, 24 nt, Artificial Sequence
  Synthetic oligonucleotide: CTLA4-2166
cgcccaacugcucccugcuggccc

SEQ ID NO: 47466 - RNA, 21 nt, Artificial Sequence
  Synthetic oligonucleotide: CTLA4-2167
gguuuuacgagaaaggaagcc

SEQ ID NO: 47467 - RNA, 22 nt, Artificial Sequence
  Synthetic oligonucleotide: CTLA4-2168
ugguuuuacgagaaaggaagcc

SEQ ID NO: 47468 - RNA, 23 nt, Artificial Sequence
  Synthetic oligonucleotide: CTLA4-2169
uugguuuuacgagaaaggaagcc

SEQ ID NO: 47469 - RNA, 24 nt, Artificial Sequence
  Synthetic oligonucleotide: CTLA4-2170
uuugguuuuacgagaaaggaagcc

SEQ ID NO: 47470 - RNA, 21 nt, Artificial Sequence
  Synthetic oligonucleotide: CTLA4-2171
guggagacuuggagaauuucc

SEQ ID NO: 47471 - RNA, 22 nt, Artificial Sequence
  Synthetic oligonucleotide: CTLA4-2172
aguggagacuuggagaauuucc

SEQ ID NO: 47472 - RNA, 23 nt, Artificial Sequence
  Synthetic oligonucleotide: CTLA4-2173
aaguggagacuuggagaauuucc

SEQ ID NO: 47473 - RNA, 24 nt, Artificial Sequence
  Synthetic oligonucleotide: CTLA4-2174
uaaguggagacuuggagaauuucc

SEQ ID NO: 47474 - RNA, 18 nt, Artificial Sequence
  Synthetic oligonucleotide: CTLA4-2175
gagcccuugggcuaaugg

SEQ ID NO: 47475 - RNA, 19 nt, Artificial Sequence
  Synthetic oligonucleotide: CTLA4-2176
ugagcccuugggcuaaugg

SEQ ID NO: 47476 - RNA, 20 nt, Artificial Sequence
  Synthetic oligonucleotide: CTLA4-966
cugagcccuugggcuaaugg

SEQ ID NO: 47477 - RNA, 21 nt, Artificial Sequence
  Synthetic oligonucleotide: CTLA4-2177
ucugagcccuugggcuaaugg

SEQ ID NO: 47478 - RNA, 22 nt, Artificial Sequence
  Synthetic oligonucleotide: CTLA4-2178
uucugagcccuugggcuaaugg

SEQ ID NO: 47479 - RNA, 23 nt, Artificial Sequence
  Synthetic oligonucleotide: CTLA4-2179
uuucugagcccuugggcuaaugg

SEQ ID NO: 47480 - RNA, 24 nt, Artificial Sequence
  Synthetic oligonucleotide: CTLA4-2180
cuuucugagcccuugggcuaaugg

SEQ ID NO: 47481 - RNA, 21 nt, Artificial Sequence
  Synthetic oligonucleotide: CTLA4-2181
ggauaacuaaguggagacuug

SEQ ID NO: 47482 - RNA, 22 nt, Artificial Sequence
  Synthetic oligonucleotide: CTLA4-2182
uggauaacuaaguggagacuug

SEQ ID NO: 47483 - RNA, 23 nt, Artificial Sequence
  Synthetic oligonucleotide: CTLA4-2183
cuggauaacuaaguggagacuug

SEQ ID NO: 47484 - RNA, 24 nt, Artificial Sequence
  Synthetic oligonucleotide: CTLA4-2184
ucuggauaacuaaguggagacuug

SEQ ID NO: 47485 - RNA, 21 nt, Artificial Sequence
  Synthetic oligonucleotide: CTLA4-2185
acagagccagccaagccagau

SEQ ID NO: 47486 - RNA, 22 nt, Artificial Sequence
  Synthetic oligonucleotide: CTLA4-2186
uacagagccagccaagccagau

SEQ ID NO: 47487 - RNA, 23 nt, Artificial Sequence
  Synthetic oligonucleotide: CTLA4-2187
auacagagccagccaagccagau

SEQ ID NO: 47488 - RNA, 24 nt, Artificial Sequence
  Synthetic oligonucleotide: CTLA4-2188
aauacagagccagccaagccagau

SEQ ID NO: 47489 - RNA, 21 nt, Artificial Sequence
  Synthetic oligonucleotide: CTLA4-2189
cuucauguucacuuugaggau

SEQ ID NO: 47490 - RNA, 22 nt, Artificial Sequence
  Synthetic oligonucleotide: CTLA4-2190
gcuucauguucacuuugaggau

SEQ ID NO: 47491 - RNA, 23 nt, Artificial Sequence
  Synthetic oligonucleotide: CTLA4-2191
agcuucauguucacuuugaggau

SEQ ID NO: 47492 - RNA, 24 nt, Artificial Sequence
  Synthetic oligonucleotide: CTLA4-2192
aagcuucauguucacuuugaggau

SEQ ID NO: 47493 - RNA, 18 nt, Artificial Sequence
  Synthetic oligonucleotide: CTLA4-2193
aagcuucauguucacuuu

SEQ ID NO: 47494 - RNA, 19 nt, Artificial Sequence
  Synthetic oligonucleotide: CTLA4-2194
gaagcuucauguucacuuu

SEQ ID NO: 47495 - RNA, 20 nt, Artificial Sequence
  Synthetic oligonucleotide: CTLA4-979
ugaagcuucauguucacuuu

SEQ ID NO: 47496 - RNA, 21 nt, Artificial Sequence
  Synthetic oligonucleotide: CTLA4-2195
cugaagcuucauguucacuuu

SEQ ID NO: 47497 - RNA, 22 nt, Artificial Sequence
  Synthetic oligonucleotide: CTLA4-2196
acugaagcuucauguucacuuu

SEQ ID NO: 47498 - RNA, 23 nt, Artificial Sequence
  Synthetic oligonucleotide: CTLA4-2197
aacugaagcuucauguucacuuu

SEQ ID NO: 47499 - RNA, 24 nt, Artificial Sequence
  Synthetic oligonucleotide: CTLA4-2198
aaacugaagcuucauguucacuuu

SEQ ID NO: 47500 - RNA, 21 nt, Artificial Sequence
  Synthetic oligonucleotide: CTLA4-2199
aggaaguagagcaaaaccuuu

SEQ ID NO: 47501 - RNA, 22 nt, Artificial Sequence
  Synthetic oligonucleotide: CTLA4-2200
caggaaguagagcaaaaccuuu

SEQ ID NO: 47502 - RNA, 23 nt, Artificial Sequence
  Synthetic oligonucleotide: CTLA4-2201
ucaggaaguagagcaaaaccuuu

SEQ ID NO: 47503 - RNA, 24 nt, Artificial Sequence
  Synthetic oligonucleotide: CTLA4-2202
uucaggaaguagagcaaaaccuuu

SEQ ID NO: 47504 - RNA, 21 nt, Artificial Sequence
  Synthetic oligonucleotide: CTLA4-2203
acaugaagcuucaguuucaaa

SEQ ID NO: 47505 - RNA, 22 nt, Artificial Sequence
  Synthetic oligonucleotide: CTLA4-2204
aacaugaagcuucaguuucaaa

SEQ ID NO: 47506 - RNA, 23 nt, Artificial Sequence
  Synthetic oligonucleotide: CTLA4-2205
gaacaugaagcuucaguuucaaa

SEQ ID NO: 47507 - RNA, 24 nt, Artificial Sequence
  Synthetic oligonucleotide: CTLA4-2206
ugaacaugaagcuucaguuucaaa

SEQ ID NO: 47508 - RNA, 21 nt, Artificial Sequence
  Synthetic oligonucleotide: CTLA4-2207
aguuuuggaguugucaaugaa

SEQ ID NO: 47509 - RNA, 22 nt, Artificial Sequence
  Synthetic oligonucleotide: CTLA4-2208
uaguuuuggaguugucaaugaa

SEQ ID NO: 47510 - RNA, 23 nt, Artificial Sequence
  Synthetic oligonucleotide: CTLA4-2209
guaguuuuggaguugucaaugaa

SEQ ID NO: 47511 - RNA, 24 nt, Artificial Sequence
  Synthetic oligonucleotide: CTLA4-2210
aguaguuuuggaguugucaaugaa

SEQ ID NO: 47512 - RNA, 18 nt, Artificial Sequence
  Synthetic oligonucleotide: CTLA4-2211
uuaaggaugcccagaaga

SEQ ID NO: 47513 - RNA, 19 nt, Artificial Sequence
  Synthetic oligonucleotide: CTLA4-2212
guuaaggaugcccagaaga

SEQ ID NO: 47514 - RNA, 20 nt, Artificial Sequence
  Synthetic oligonucleotide: CTLA4-832
gguuaaggaugcccagaaga

SEQ ID NO: 47515 - RNA, 21 nt, Artificial Sequence
  Synthetic oligonucleotide: CTLA4-2213
ugguuaaggaugcccagaaga

SEQ ID NO: 47516 - RNA, 22 nt, Artificial Sequence
  Synthetic oligonucleotide: CTLA4-2214
augguuaaggaugcccagaaga

SEQ ID NO: 47517 - RNA, 23 nt, Artificial Sequence
  Synthetic oligonucleotide: CTLA4-2215
gaugguuaaggaugcccagaaga

SEQ ID NO: 47518 - RNA, 24 nt, Artificial Sequence
  Synthetic oligonucleotide: CTLA4-2216
ggaugguuaaggaugcccagaaga

SEQ ID NO: 47519 - RNA, 21 nt, Artificial Sequence
  Synthetic oligonucleotide: CTLA4-2217
agaaggauggugcuucacaga

SEQ ID NO: 47520 - RNA, 22 nt, Artificial Sequence
  Synthetic oligonucleotide: CTLA4-2218
uagaaggauggugcuucacaga

SEQ ID NO: 47521 - RNA, 23 nt, Artificial Sequence
  Synthetic oligonucleotide: CTLA4-2219
uuagaaggauggugcuucacaga

SEQ ID NO: 47522 - RNA, 24 nt, Artificial Sequence
  Synthetic oligonucleotide: CTLA4-2220
auuagaaggauggugcuucacaga

SEQ ID NO: 47523 - RNA, 21 nt, Artificial Sequence
  Synthetic oligonucleotide: CTLA4-2221
uugucaaugaaaugaauugga

SEQ ID NO: 47524 - RNA, 22 nt, Artificial Sequence
  Synthetic oligonucleotide: CTLA4-2222
guugucaaugaaaugaauugga

SEQ ID NO: 47525 - RNA, 23 nt, Artificial Sequence
  Synthetic oligonucleotide: CTLA4-2223
aguugucaaugaaaugaauugga

SEQ ID NO: 47526 - RNA, 24 nt, Artificial Sequence
  Synthetic oligonucleotide: CTLA4-2224
gaguugucaaugaaaugaauugga

SEQ ID NO: 47527 - RNA, 21 nt, Artificial Sequence
  Synthetic oligonucleotide: CTLA4-2225
uggaggagguguuucuccuac

SEQ ID NO: 47528 - RNA, 22 nt, Artificial Sequence
  Synthetic oligonucleotide: CTLA4-2226
auggaggagguguuucuccuac

SEQ ID NO: 47529 - RNA, 23 nt, Artificial Sequence
  Synthetic oligonucleotide: CTLA4-2227
gauggaggagguguuucuccuac

SEQ ID NO: 47530 - RNA, 24 nt, Artificial Sequence
  Synthetic oligonucleotide: CTLA4-2228
agauggaggagguguuucuccuac

SEQ ID NO: 47531 - RNA, 18 nt, Artificial Sequence
  Synthetic oligonucleotide: CTLA4-1418
auaaagccauggcuugcc

SEQ ID NO: 47532 - RNA, 19 nt, Artificial Sequence
  Synthetic oligonucleotide: CTLA4-1419
cauaaagccauggcuugcc

SEQ ID NO: 47533 - RNA, 20 nt, Artificial Sequence
  Synthetic oligonucleotide: CTLA4-216
ccauaaagccauggcuugcc

SEQ ID NO: 47534 - RNA, 21 nt, Artificial Sequence
  Synthetic oligonucleotide: CTLA4-1420
cccauaaagccauggcuugcc

SEQ ID NO: 47535 - RNA, 22 nt, Artificial Sequence
  Synthetic oligonucleotide: CTLA4-1421
ucccauaaagccauggcuugcc

SEQ ID NO: 47536 - RNA, 23 nt, Artificial Sequence
  Synthetic oligonucleotide: CTLA4-1422
cucccauaaagccauggcuugcc

SEQ ID NO: 47537 - RNA, 24 nt, Artificial Sequence
  Synthetic oligonucleotide: CTLA4-1423
gcucccauaaagccauggcuugcc

SEQ ID NO: 47538 - RNA, 21 nt, Artificial Sequence
  Synthetic oligonucleotide: CTLA4-2229
aauugaauacauuuuccaucc

SEQ ID NO: 47539 - RNA, 22 nt, Artificial Sequence
  Synthetic oligonucleotide: CTLA4-2230
aaauugaauacauuuuccaucc

SEQ ID NO: 47540 - RNA, 23 nt, Artificial Sequence
  Synthetic oligonucleotide: CTLA4-2231
caaauugaauacauuuuccaucc

SEQ ID NO: 47541 - RNA, 24 nt, Artificial Sequence
  Synthetic oligonucleotide: CTLA4-2232
ucaaauugaauacauuuuccaucc

SEQ ID NO: 47542 - RNA, 21 nt, Artificial Sequence
  Synthetic oligonucleotide: CTLA4-2233
ggauuggcuuguuuuguucag

SEQ ID NO: 47543 - RNA, 22 nt, Artificial Sequence
  Synthetic oligonucleotide: CTLA4-2234
uggauuggcuuguuuuguucag

SEQ ID NO: 47544 - RNA, 23 nt, Artificial Sequence
  Synthetic oligonucleotide: CTLA4-2235
auggauuggcuuguuuuguucag

SEQ ID NO: 47545 - RNA, 24 nt, Artificial Sequence
  Synthetic oligonucleotide: CTLA4-2236
cauggauuggcuuguuuuguucag

SEQ ID NO: 47546 - RNA, 18 nt, Artificial Sequence
  Synthetic oligonucleotide: CTLA4-2237
cugucaagggaccauuag

SEQ ID NO: 47547 - RNA, 19 nt, Artificial Sequence
  Synthetic oligonucleotide: CTLA4-2238
gcugucaagggaccauuag

SEQ ID NO: 47548 - RNA, 20 nt, Artificial Sequence
  Synthetic oligonucleotide: CTLA4-1137
agcugucaagggaccauuag

SEQ ID NO: 47549 - RNA, 21 nt, Artificial Sequence
  Synthetic oligonucleotide: CTLA4-2239
aagcugucaagggaccauuag

SEQ ID NO: 47550 - RNA, 22 nt, Artificial Sequence
  Synthetic oligonucleotide: CTLA4-2240
aaagcugucaagggaccauuag

SEQ ID NO: 47551 - RNA, 23 nt, Artificial Sequence
  Synthetic oligonucleotide: CTLA4-2241
uaaagcugucaagggaccauuag

SEQ ID NO: 47552 - RNA, 24 nt, Artificial Sequence
  Synthetic oligonucleotide: CTLA4-2242
guaaagcugucaagggaccauuag

SEQ ID NO: 47553 - RNA, 21 nt, Artificial Sequence
  Synthetic oligonucleotide: CTLA4-2243
gcccagaagauugaauaaaau

SEQ ID NO: 47554 - RNA, 22 nt, Artificial Sequence
  Synthetic oligonucleotide: CTLA4-2244
ugcccagaagauugaauaaaau

SEQ ID NO: 47555 - RNA, 23 nt, Artificial Sequence
  Synthetic oligonucleotide: CTLA4-2245
augcccagaagauugaauaaaau

SEQ ID NO: 47556 - RNA, 24 nt, Artificial Sequence
  Synthetic oligonucleotide: CTLA4-2246
gaugcccagaagauugaauaaaau

SEQ ID NO: 47557 - RNA, 18 nt, Artificial Sequence
  Synthetic oligonucleotide: CTLA4-2247
uaaaguccuugauucugu

SEQ ID NO: 47558 - RNA, 19 nt, Artificial Sequence
  Synthetic oligonucleotide: CTLA4-2248
auaaaguccuugauucugu

SEQ ID NO: 47559 - RNA, 20 nt, Artificial Sequence
  Synthetic oligonucleotide: CTLA4-848
uauaaaguccuugauucugu

SEQ ID NO: 47560 - RNA, 21 nt, Artificial Sequence
  Synthetic oligonucleotide: CTLA4-2249
auauaaaguccuugauucugu

SEQ ID NO: 47561 - RNA, 22 nt, Artificial Sequence
  Synthetic oligonucleotide: CTLA4-2250
uauauaaaguccuugauucugu

SEQ ID NO: 47562 - RNA, 23 nt, Artificial Sequence
  Synthetic oligonucleotide: CTLA4-2251
cuauauaaaguccuugauucugu

SEQ ID NO: 47563 - RNA, 24 nt, Artificial Sequence
  Synthetic oligonucleotide: CTLA4-2252
ucuauauaaaguccuugauucugu

SEQ ID NO: 47564 - RNA, 21 nt, Artificial Sequence
  Synthetic oligonucleotide: CTLA4-2253
aaugaauuggacuggaugguu

SEQ ID NO: 47565 - RNA, 22 nt, Artificial Sequence
  Synthetic oligonucleotide: CTLA4-2254
aaaugaauuggacuggaugguu

SEQ ID NO: 47566 - RNA, 23 nt, Artificial Sequence
  Synthetic oligonucleotide: CTLA4-2255
gaaaugaauuggacuggaugguu

SEQ ID NO: 47567 - RNA, 24 nt, Artificial Sequence
  Synthetic oligonucleotide: CTLA4-2256
ugaaaugaauuggacuggaugguu

SEQ ID NO: 47568 - RNA, 18 nt, Artificial Sequence
  Synthetic oligonucleotide: CTLA4-2257
uuagcagccuaguaguuu

SEQ ID NO: 47569 - RNA, 19 nt, Artificial Sequence
  Synthetic oligonucleotide: CTLA4-2258
guuagcagccuaguaguuu

SEQ ID NO: 47570 - RNA, 20 nt, Artificial Sequence
  Synthetic oligonucleotide: CTLA4-462
aguuagcagccuaguaguuu

SEQ ID NO: 47571 - RNA, 21 nt, Artificial Sequence
  Synthetic oligonucleotide: CTLA4-2259
aaguuagcagccuaguaguuu

SEQ ID NO: 47572 - RNA, 22 nt, Artificial Sequence
  Synthetic oligonucleotide: CTLA4-2260
aaaguuagcagccuaguaguuu

SEQ ID NO: 47573 - RNA, 23 nt, Artificial Sequence
  Synthetic oligonucleotide: CTLA4-2261
gaaaguuagcagccuaguaguuu

SEQ ID NO: 47574 - RNA, 24 nt, Artificial Sequence
  Synthetic oligonucleotide: CTLA4-2262
agaaaguuagcagccuaguaguuu

SEQ ID NO: 47575 - RNA, 18 nt, Artificial Sequence
  Synthetic oligonucleotide: CTLA4-2263
aauguguuugaacccaca

SEQ ID NO: 47576 - RNA, 19 nt, Artificial Sequence
  Synthetic oligonucleotide: CTLA4-2264
aaauguguuugaacccaca

SEQ ID NO: 47577 - RNA, 20 nt, Artificial Sequence
  Synthetic oligonucleotide: CTLA4-997
gaaauguguuugaacccaca

SEQ ID NO: 47578 - RNA, 18 nt, Artificial Sequence
  Synthetic oligonucleotide: CTLA4-2265
ugcacacacagaaggcac

SEQ ID NO: 47579 - RNA, 19 nt, Artificial Sequence
  Synthetic oligonucleotide: CTLA4-2266
gugcacacacagaaggcac

SEQ ID NO: 47580 - RNA, 20 nt, Artificial Sequence
  Synthetic oligonucleotide: CTLA4-994
ugugcacacacagaaggcac

SEQ ID NO: 47581 - RNA, 21 nt, Artificial Sequence
  Synthetic oligonucleotide: CTLA4-2267
augugcacacacagaaggcac

SEQ ID NO: 47582 - RNA, 22 nt, Artificial Sequence
  Synthetic oligonucleotide: CTLA4-2268
caugugcacacacagaaggcac

SEQ ID NO: 47583 - RNA, 23 nt, Artificial Sequence
  Synthetic oligonucleotide: CTLA4-2269
acaugugcacacacagaaggcac

SEQ ID NO: 47584 - RNA, 24 nt, Artificial Sequence
  Synthetic oligonucleotide: CTLA4-2270
cacaugugcacacacagaaggcac

SEQ ID NO: 47585 - RNA, 18 nt, Artificial Sequence
  Synthetic oligonucleotide: CTLA4-2271
gagaauuuccuggaguac

SEQ ID NO: 47586 - RNA, 19 nt, Artificial Sequence
  Synthetic oligonucleotide: CTLA4-2272
ggagaauuuccuggaguac

SEQ ID NO: 47587 - RNA, 20 nt, Artificial Sequence
  Synthetic oligonucleotide: CTLA4-970
uggagaauuuccuggaguac

SEQ ID NO: 47588 - RNA, 18 nt, Artificial Sequence
  Synthetic oligonucleotide: CTLA4-2273
acugcucccugcuggccc

SEQ ID NO: 47589 - RNA, 19 nt, Artificial Sequence
  Synthetic oligonucleotide: CTLA4-2274
aacugcucccugcuggccc

SEQ ID NO: 47590 - RNA, 20 nt, Artificial Sequence
  Synthetic oligonucleotide: CTLA4-529
caacugcucccugcuggccc

SEQ ID NO: 47591 - RNA, 18 nt, Artificial Sequence
  Synthetic oligonucleotide: CTLA4-2275
uuuacgagaaaggaagcc

SEQ ID NO: 47592 - RNA, 19 nt, Artificial Sequence
  Synthetic oligonucleotide: CTLA4-2276
uuuuacgagaaaggaagcc

SEQ ID NO: 47593 - RNA, 20 nt, Artificial Sequence
  Synthetic oligonucleotide: CTLA4-988
guuuuacgagaaaggaagcc

SEQ ID NO: 47594 - RNA, 18 nt, Artificial Sequence
  Synthetic oligonucleotide: CTLA4-2277
aacaaaacaagccaaucc

SEQ ID NO: 47595 - RNA, 19 nt, Artificial Sequence
  Synthetic oligonucleotide: CTLA4-2278
gaacaaaacaagccaaucc

SEQ ID NO: 47596 - RNA, 20 nt, Artificial Sequence
  Synthetic oligonucleotide: CTLA4-985
ugaacaaaacaagccaaucc

SEQ ID NO: 47597 - RNA, 21 nt, Artificial Sequence
  Synthetic oligonucleotide: CTLA4-2279
cugaacaaaacaagccaaucc

SEQ ID NO: 47598 - RNA, 22 nt, Artificial Sequence
  Synthetic oligonucleotide: CTLA4-2280
acugaacaaaacaagccaaucc

SEQ ID NO: 47599 - RNA, 23 nt, Artificial Sequence
  Synthetic oligonucleotide: CTLA4-2281
aacugaacaaaacaagccaaucc

SEQ ID NO: 47600 - RNA, 24 nt, Artificial Sequence
  Synthetic oligonucleotide: CTLA4-2282
caacugaacaaaacaagccaaucc

SEQ ID NO: 47601 - RNA, 18 nt, Artificial Sequence
  Synthetic oligonucleotide: CTLA4-2283
gagacuuggagaauuucc

SEQ ID NO: 47602 - RNA, 19 nt, Artificial Sequence
  Synthetic oligonucleotide: CTLA4-2284
ggagacuuggagaauuucc

SEQ ID NO: 47603 - RNA, 20 nt, Artificial Sequence
  Synthetic oligonucleotide: CTLA4-562
uggagacuuggagaauuucc

SEQ ID NO: 47604 - RNA, 18 nt, Artificial Sequence
  Synthetic oligonucleotide: CTLA4-1444
gaagagaagaaaaaacag

SEQ ID NO: 47605 - RNA, 19 nt, Artificial Sequence
  Synthetic oligonucleotide: CTLA4-1445
ugaagagaagaaaaaacag

SEQ ID NO: 47606 - RNA, 20 nt, Artificial Sequence
  Synthetic oligonucleotide: CTLA4-282
augaagagaagaaaaaacag

SEQ ID NO: 47607 - RNA, 21 nt, Artificial Sequence
  Synthetic oligonucleotide: CTLA4-1446
gaugaagagaagaaaaaacag

SEQ ID NO: 47608 - RNA, 22 nt, Artificial Sequence
  Synthetic oligonucleotide: CTLA4-1447
ggaugaagagaagaaaaaacag

SEQ ID NO: 47609 - RNA, 23 nt, Artificial Sequence
  Synthetic oligonucleotide: CTLA4-1448
gggaugaagagaagaaaaaacag

SEQ ID NO: 47610 - RNA, 24 nt, Artificial Sequence
  Synthetic oligonucleotide: CTLA4-1449
agggaugaagagaagaaaaaacag

SEQ ID NO: 47611 - RNA, 18 nt, Artificial Sequence
  Synthetic oligonucleotide: CTLA4-2285
uaacuaaguggagacuug

SEQ ID NO: 47612 - RNA, 19 nt, Artificial Sequence
  Synthetic oligonucleotide: CTLA4-2286
auaacuaaguggagacuug

SEQ ID NO: 47613 - RNA, 20 nt, Artificial Sequence
  Synthetic oligonucleotide: CTLA4-973
gauaacuaaguggagacuug

SEQ ID NO: 47614 - RNA, 18 nt, Artificial Sequence
  Synthetic oligonucleotide: CTLA4-2287
gagccagccaagccagau

SEQ ID NO: 47615 - RNA, 19 nt, Artificial Sequence
  Synthetic oligonucleotide: CTLA4-2288
agagccagccaagccagau

SEQ ID NO: 47616 - RNA, 20 nt, Artificial Sequence
  Synthetic oligonucleotide: CTLA4-530
cagagccagccaagccagau

SEQ ID NO: 47617 - RNA, 18 nt, Artificial Sequence
  Synthetic oligonucleotide: CTLA4-2289
cauguucacuuugaggau

SEQ ID NO: 47618 - RNA, 19 nt, Artificial Sequence
  Synthetic oligonucleotide: CTLA4-2290
ucauguucacuuugaggau

SEQ ID NO: 47619 - RNA, 20 nt, Artificial Sequence
  Synthetic oligonucleotide: CTLA4-978
uucauguucacuuugaggau

SEQ ID NO: 47620 - RNA, 18 nt, Artificial Sequence
  Synthetic oligonucleotide: CTLA4-2291
aaguagagcaaaaccuuu

SEQ ID NO: 47621 - RNA, 19 nt, Artificial Sequence
  Synthetic oligonucleotide: CTLA4-2292
gaaguagagcaaaaccuuu

SEQ ID NO: 47622 - RNA, 20 nt, Artificial Sequence
  Synthetic oligonucleotide: CTLA4-1001
ggaaguagagcaaaaccuuu

SEQ ID NO: 47623 - RNA, 18 nt, Artificial Sequence
  Synthetic oligonucleotide: CTLA4-2293
ugaagcuucaguuucaaa

SEQ ID NO: 47624 - RNA, 19 nt, Artificial Sequence
  Synthetic oligonucleotide: CTLA4-2294
augaagcuucaguuucaaa

SEQ ID NO: 47625 - RNA, 20 nt, Artificial Sequence
  Synthetic oligonucleotide: CTLA4-842
caugaagcuucaguuucaaa

SEQ ID NO: 47626 - RNA, 18 nt, Artificial Sequence
  Synthetic oligonucleotide: CTLA4-2295
uuuggaguugucaaugaa

SEQ ID NO: 47627 - RNA, 19 nt, Artificial Sequence
  Synthetic oligonucleotide: CTLA4-2296
uuuuggaguugucaaugaa

SEQ ID NO: 47628 - RNA, 20 nt, Artificial Sequence
  Synthetic oligonucleotide: CTLA4-827
guuuuggaguugucaaugaa

SEQ ID NO: 47629 - RNA, 18 nt, Artificial Sequence
  Synthetic oligonucleotide: CTLA4-2297
cucuuaaccaaaugcuaa

SEQ ID NO: 47630 - RNA, 19 nt, Artificial Sequence
  Synthetic oligonucleotide: CTLA4-2298
ucucuuaaccaaaugcuaa

SEQ ID NO: 47631 - RNA, 20 nt, Artificial Sequence
  Synthetic oligonucleotide: CTLA4-1130
uucucuuaaccaaaugcuaa

SEQ ID NO: 47632 - RNA, 21 nt, Artificial Sequence
  Synthetic oligonucleotide: CTLA4-2299
uuucucuuaaccaaaugcuaa

SEQ ID NO: 47633 - RNA, 22 nt, Artificial Sequence
  Synthetic oligonucleotide: CTLA4-2300
uuuucucuuaaccaaaugcuaa

SEQ ID NO: 47634 - RNA, 23 nt, Artificial Sequence
  Synthetic oligonucleotide: CTLA4-2301
uuuuucucuuaaccaaaugcuaa

SEQ ID NO: 47635 - RNA, 24 nt, Artificial Sequence
  Synthetic oligonucleotide: CTLA4-2302
uuuuuucucuuaaccaaaugcuaa

SEQ ID NO: 47636 - RNA, 18 nt, Artificial Sequence
  Synthetic oligonucleotide: CTLA4-2303
aggauggugcuucacaga

SEQ ID NO: 47637 - RNA, 19 nt, Artificial Sequence
  Synthetic oligonucleotide: CTLA4-2304
aaggauggugcuucacaga

SEQ ID NO: 47638 - RNA, 20 nt, Artificial Sequence
  Synthetic oligonucleotide: CTLA4-1138
gaaggauggugcuucacaga

SEQ ID NO: 47639 - RNA, 18 nt, Artificial Sequence
  Synthetic oligonucleotide: CTLA4-2305
ucaaugaaaugaauugga

SEQ ID NO: 47640 - RNA, 19 nt, Artificial Sequence
  Synthetic oligonucleotide: CTLA4-2306
gucaaugaaaugaauugga

SEQ ID NO: 47641 - RNA, 20 nt, Artificial Sequence
  Synthetic oligonucleotide: CTLA4-829
ugucaaugaaaugaauugga

SEQ ID NO: 47642 - RNA, 18 nt, Artificial Sequence
  Synthetic oligonucleotide: CTLA4-2307
aggagguguuucuccuac

SEQ ID NO: 47643 - RNA, 19 nt, Artificial Sequence
  Synthetic oligonucleotide: CTLA4-2308
gaggagguguuucuccuac

SEQ ID NO: 47644 - RNA, 20 nt, Artificial Sequence
  Synthetic oligonucleotide: CTLA4-865
ggaggagguguuucuccuac

SEQ ID NO: 47645 - RNA, 18 nt, Artificial Sequence
  Synthetic oligonucleotide: CTLA4-2309
ugaauacauuuuccaucc

SEQ ID NO: 47646 - RNA, 19 nt, Artificial Sequence
  Synthetic oligonucleotide: CTLA4-2310
uugaauacauuuuccaucc

SEQ ID NO: 47647 - RNA, 20 nt, Artificial Sequence
  Synthetic oligonucleotide: CTLA4-843
auugaauacauuuuccaucc

SEQ ID NO: 47648 - RNA, 18 nt, Artificial Sequence
  Synthetic oligonucleotide: CTLA4-2311
acauguguaauacauauc

SEQ ID NO: 47649 - RNA, 19 nt, Artificial Sequence
  Synthetic oligonucleotide: CTLA4-2312
cacauguguaauacauauc

SEQ ID NO: 47650 - RNA, 20 nt, Artificial Sequence
  Synthetic oligonucleotide: CTLA4-477
gcacauguguaauacauauc

SEQ ID NO: 47651 - RNA, 21 nt, Artificial Sequence
  Synthetic oligonucleotide: CTLA4-2313
ugcacauguguaauacauauc

SEQ ID NO: 47652 - RNA, 22 nt, Artificial Sequence
  Synthetic oligonucleotide: CTLA4-2314
gugcacauguguaauacauauc

SEQ ID NO: 47653 - RNA, 23 nt, Artificial Sequence
  Synthetic oligonucleotide: CTLA4-2315
ugugcacauguguaauacauauc

SEQ ID NO: 47654 - RNA, 24 nt, Artificial Sequence
  Synthetic oligonucleotide: CTLA4-2316
gugugcacauguguaauacauauc

SEQ ID NO: 47655 - RNA, 18 nt, Artificial Sequence
  Synthetic oligonucleotide: CTLA4-1460
ucccugucuucugcaaag

SEQ ID NO: 47656 - RNA, 19 nt, Artificial Sequence
  Synthetic oligonucleotide: CTLA4-1461
aucccugucuucugcaaag

SEQ ID NO: 47657 - RNA, 20 nt, Artificial Sequence
  Synthetic oligonucleotide: CTLA4-219
caucccugucuucugcaaag

SEQ ID NO: 47658 - RNA, 21 nt, Artificial Sequence
  Synthetic oligonucleotide: CTLA4-1462
ucaucccugucuucugcaaag

SEQ ID NO: 47659 - RNA, 22 nt, Artificial Sequence
  Synthetic oligonucleotide: CTLA4-1463
uucaucccugucuucugcaaag

SEQ ID NO: 47660 - RNA, 23 nt, Artificial Sequence
  Synthetic oligonucleotide: CTLA4-1464
cuucaucccugucuucugcaaag

SEQ ID NO: 47661 - RNA, 24 nt, Artificial Sequence
  Synthetic oligonucleotide: CTLA4-1465
ucuucaucccugucuucugcaaag

SEQ ID NO: 47662 - RNA, 18 nt, Artificial Sequence
  Synthetic oligonucleotide: CTLA4-2317
uuggcuuguuuuguucag

SEQ ID NO: 47663 - RNA, 19 nt, Artificial Sequence
  Synthetic oligonucleotide: CTLA4-2318
auuggcuuguuuuguucag

SEQ ID NO: 47664 - RNA, 20 nt, Artificial Sequence
  Synthetic oligonucleotide: CTLA4-844
gauuggcuuguuuuguucag

SEQ ID NO: 47665 - RNA, 18 nt, Artificial Sequence
  Synthetic oligonucleotide: CTLA4-2319
cagaagauugaauaaaau

SEQ ID NO: 47666 - RNA, 19 nt, Artificial Sequence
  Synthetic oligonucleotide: CTLA4-2320
ccagaagauugaauaaaau

SEQ ID NO: 47667 - RNA, 20 nt, Artificial Sequence
  Synthetic oligonucleotide: CTLA4-467
cccagaagauugaauaaaau

SEQ ID NO: 47668 - RNA, 18 nt, Artificial Sequence
  Synthetic oligonucleotide: CTLA4-2321
aaacacauuucaaagcuu

SEQ ID NO: 47669 - RNA, 19 nt, Artificial Sequence
  Synthetic oligonucleotide: CTLA4-2322
caaacacauuucaaagcuu

SEQ ID NO: 47670 - RNA, 20 nt, Artificial Sequence
  Synthetic oligonucleotide: CTLA4-849
ucaaacacauuucaaagcuu

SEQ ID NO: 47671 - RNA, 21 nt, Artificial Sequence
  Synthetic oligonucleotide: CTLA4-2323
uucaaacacauuucaaagcuu

SEQ ID NO: 47672 - RNA, 22 nt, Artificial Sequence
  Synthetic oligonucleotide: CTLA4-2324
guucaaacacauuucaaagcuu

SEQ ID NO: 47673 - RNA, 23 nt, Artificial Sequence
  Synthetic oligonucleotide: CTLA4-2325
gguucaaacacauuucaaagcuu

SEQ ID NO: 47674 - RNA, 24 nt, Artificial Sequence
  Synthetic oligonucleotide: CTLA4-2326
ggguucaaacacauuucaaagcuu

SEQ ID NO: 47675 - RNA, 18 nt, Artificial Sequence
  Synthetic oligonucleotide: CTLA4-2327
gaauuggacuggaugguu

SEQ ID NO: 47676 - RNA, 19 nt, Artificial Sequence
  Synthetic oligonucleotide: CTLA4-2328
ugaauuggacuggaugguu

SEQ ID NO: 47677 - RNA, 20 nt, Artificial Sequence
  Synthetic oligonucleotide: CTLA4-830
augaauuggacuggaugguu

SEQ ID NO: 47678 - RNA, 18 nt, Artificial Sequence
  Synthetic oligonucleotide: CTLA4-1468
gaugaagagaagaaaaaa

SEQ ID NO: 47679 - RNA, 19 nt, Artificial Sequence
  Synthetic oligonucleotide: CTLA4-1469
ggaugaagagaagaaaaaa

SEQ ID NO: 47680 - RNA, 20 nt, Artificial Sequence
  Synthetic oligonucleotide: CTLA4-284
gggaugaagagaagaaaaaa

SEQ ID NO: 47681 - RNA, 21 nt, Artificial Sequence
  Synthetic oligonucleotide: CTLA4-1470
agggaugaagagaagaaaaaa

SEQ ID NO: 47682 - RNA, 22 nt, Artificial Sequence
  Synthetic oligonucleotide: CTLA4-1471
cagggaugaagagaagaaaaaa

SEQ ID NO: 47683 - RNA, 23 nt, Artificial Sequence
  Synthetic oligonucleotide: CTLA4-1472
acagggaugaagagaagaaaaaa

SEQ ID NO: 47684 - RNA, 24 nt, Artificial Sequence
  Synthetic oligonucleotide: CTLA4-1473
gacagggaugaagagaagaaaaaa

SEQ ID NO: 47685 - RNA, 18 nt, Artificial Sequence
  Synthetic oligonucleotide: CTLA4-2329
aauguauucaauuugaaa

SEQ ID NO: 47686 - RNA, 19 nt, Artificial Sequence
  Synthetic oligonucleotide: CTLA4-2330
aaauguauucaauuugaaa

SEQ ID NO: 47687 - RNA, 20 nt, Artificial Sequence
  Synthetic oligonucleotide: CTLA4-981
aaaauguauucaauuugaaa

SEQ ID NO: 47688 - RNA, 21 nt, Artificial Sequence
  Synthetic oligonucleotide: CTLA4-2331
gaaaauguauucaauuugaaa

SEQ ID NO: 47689 - RNA, 22 nt, Artificial Sequence
  Synthetic oligonucleotide: CTLA4-2332
ggaaaauguauucaauuugaaa

SEQ ID NO: 47690 - RNA, 23 nt, Artificial Sequence
  Synthetic oligonucleotide: CTLA4-2333
uggaaaauguauucaauuugaaa

SEQ ID NO: 47691 - RNA, 24 nt, Artificial Sequence
  Synthetic oligonucleotide: CTLA4-2334
auggaaaauguauucaauuugaaa

SEQ ID NO: 47692 - RNA, 18 nt, Artificial Sequence
  Synthetic oligonucleotide: CTLA4-2335
aaaaucacaagaaauaaa

SEQ ID NO: 47693 - RNA, 19 nt, Artificial Sequence
  Synthetic oligonucleotide: CTLA4-2336
uaaaaucacaagaaauaaa

SEQ ID NO: 47694 - RNA, 20 nt, Artificial Sequence
  Synthetic oligonucleotide: CTLA4-1245
cuaaaaucacaagaaauaaa

SEQ ID NO: 47695 - RNA, 21 nt, Artificial Sequence
  Synthetic oligonucleotide: CTLA4-2337
acuaaaaucacaagaaauaaa

SEQ ID NO: 47696 - RNA, 22 nt, Artificial Sequence
  Synthetic oligonucleotide: CTLA4-2338
aacuaaaaucacaagaaauaaa

SEQ ID NO: 47697 - RNA, 23 nt, Artificial Sequence
  Synthetic oligonucleotide: CTLA4-2339
aaacuaaaaucacaagaaauaaa

SEQ ID NO: 47698 - RNA, 24 nt, Artificial Sequence
  Synthetic oligonucleotide: CTLA4-2340
aaaacuaaaaucacaagaaauaaa

SEQ ID NO: 47699 - RNA, 18 nt, Artificial Sequence
  Synthetic oligonucleotide: CTLA4-2341
cuuugacugcugaaacaa

SEQ ID NO: 47700 - RNA, 19 nt, Artificial Sequence
  Synthetic oligonucleotide: CTLA4-2342
ccuuugacugcugaaacaa

SEQ ID NO: 47701 - RNA, 20 nt, Artificial Sequence
  Synthetic oligonucleotide: CTLA4-1024
gccuuugacugcugaaacaa

SEQ ID NO: 47702 - RNA, 21 nt, Artificial Sequence
  Synthetic oligonucleotide: CTLA4-2343
ugccuuugacugcugaaacaa

SEQ ID NO: 47703 - RNA, 22 nt, Artificial Sequence
  Synthetic oligonucleotide: CTLA4-2344
cugccuuugacugcugaaacaa

SEQ ID NO: 47704 - RNA, 23 nt, Artificial Sequence
  Synthetic oligonucleotide: CTLA4-2345
acugccuuugacugcugaaacaa

SEQ ID NO: 47705 - RNA, 24 nt, Artificial Sequence
  Synthetic oligonucleotide: CTLA4-2346
cacugccuuugacugcugaaacaa

SEQ ID NO: 47706 - RNA, 18 nt, Artificial Sequence
  Synthetic oligonucleotide: CTLA4-2347
acaaccucaagcacucaa

SEQ ID NO: 47707 - RNA, 19 nt, Artificial Sequence
  Synthetic oligonucleotide: CTLA4-2348
gacaaccucaagcacucaa

SEQ ID NO: 47708 - RNA, 20 nt, Artificial Sequence
  Synthetic oligonucleotide: CTLA4-986
agacaaccucaagcacucaa

SEQ ID NO: 47709 - RNA, 21 nt, Artificial Sequence
  Synthetic oligonucleotide: CTLA4-2349
aagacaaccucaagcacucaa

SEQ ID NO: 47710 - RNA, 22 nt, Artificial Sequence
  Synthetic oligonucleotide: CTLA4-2350
aaagacaaccucaagcacucaa

SEQ ID NO: 47711 - RNA, 23 nt, Artificial Sequence
  Synthetic oligonucleotide: CTLA4-2351
aaaagacaaccucaagcacucaa

SEQ ID NO: 47712 - RNA, 24 nt, Artificial Sequence
  Synthetic oligonucleotide: CTLA4-2352
gaaaagacaaccucaagcacucaa

SEQ ID NO: 47713 - RNA, 18 nt, Artificial Sequence
  Synthetic oligonucleotide: CTLA4-2353
guuuugguuuuacgagaa

SEQ ID NO: 47714 - RNA, 19 nt, Artificial Sequence
  Synthetic oligonucleotide: CTLA4-2354
uguuuugguuuuacgagaa

SEQ ID NO: 47715 - RNA, 20 nt, Artificial Sequence
  Synthetic oligonucleotide: CTLA4-553
uuguuuugguuuuacgagaa

SEQ ID NO: 47716 - RNA, 21 nt, Artificial Sequence
  Synthetic oligonucleotide: CTLA4-2355
uuuguuuugguuuuacgagaa

SEQ ID NO: 47717 - RNA, 22 nt, Artificial Sequence
  Synthetic oligonucleotide: CTLA4-2356
uuuuguuuugguuuuacgagaa

SEQ ID NO: 47718 - RNA, 23 nt, Artificial Sequence
  Synthetic oligonucleotide: CTLA4-2357
uuuuuguuuugguuuuacgagaa

SEQ ID NO: 47719 - RNA, 24 nt, Artificial Sequence
  Synthetic oligonucleotide: CTLA4-2358
cuuuuuguuuugguuuuacgagaa

SEQ ID NO: 47720 - RNA, 18 nt, Artificial Sequence
  Synthetic oligonucleotide: CTLA4-1486
gcagaagacagggaugaa

SEQ ID NO: 47721 - RNA, 19 nt, Artificial Sequence
  Synthetic oligonucleotide: CTLA4-1487
ugcagaagacagggaugaa

SEQ ID NO: 47722 - RNA, 20 nt, Artificial Sequence
  Synthetic oligonucleotide: CTLA4-286
uugcagaagacagggaugaa

SEQ ID NO: 47723 - RNA, 21 nt, Artificial Sequence
  Synthetic oligonucleotide: CTLA4-1488
uuugcagaagacagggaugaa

SEQ ID NO: 47724 - RNA, 22 nt, Artificial Sequence
  Synthetic oligonucleotide: CTLA4-1489
cuuugcagaagacagggaugaa

SEQ ID NO: 47725 - RNA, 23 nt, Artificial Sequence
  Synthetic oligonucleotide: CTLA4-1490
ccuuugcagaagacagggaugaa

SEQ ID NO: 47726 - RNA, 24 nt, Artificial Sequence
  Synthetic oligonucleotide: CTLA4-1491
accuuugcagaagacagggaugaa

SEQ ID NO: 47727 - RNA, 18 nt, Artificial Sequence
  Synthetic oligonucleotide: CTLA4-2359
acacagaaggcacuugaa

SEQ ID NO: 47728 - RNA, 19 nt, Artificial Sequence
  Synthetic oligonucleotide: CTLA4-2360
cacacagaaggcacuugaa

SEQ ID NO: 47729 - RNA, 20 nt, Artificial Sequence
  Synthetic oligonucleotide: CTLA4-993
acacacagaaggcacuugaa

SEQ ID NO: 47730 - RNA, 21 nt, Artificial Sequence
  Synthetic oligonucleotide: CTLA4-2361
cacacacagaaggcacuugaa

SEQ ID NO: 47731 - RNA, 22 nt, Artificial Sequence
  Synthetic oligonucleotide: CTLA4-2362
gcacacacagaaggcacuugaa

SEQ ID NO: 47732 - RNA, 23 nt, Artificial Sequence
  Synthetic oligonucleotide: CTLA4-2363
ugcacacacagaaggcacuugaa

SEQ ID NO: 47733 - RNA, 24 nt, Artificial Sequence
  Synthetic oligonucleotide: CTLA4-2364
gugcacacacagaaggcacuugaa

SEQ ID NO: 47734 - RNA, 18 nt, Artificial Sequence
  Synthetic oligonucleotide: CTLA4-2365
gaggaucuggauaacuaa

SEQ ID NO: 47735 - RNA, 19 nt, Artificial Sequence
  Synthetic oligonucleotide: CTLA4-2366
ugaggaucuggauaacuaa

SEQ ID NO: 47736 - RNA, 20 nt, Artificial Sequence
  Synthetic oligonucleotide: CTLA4-977
uugaggaucuggauaacuaa

SEQ ID NO: 47737 - RNA, 21 nt, Artificial Sequence
  Synthetic oligonucleotide: CTLA4-2367
uuugaggaucuggauaacuaa

SEQ ID NO: 47738 - RNA, 22 nt, Artificial Sequence
  Synthetic oligonucleotide: CTLA4-2368
cuuugaggaucuggauaacuaa

SEQ ID NO: 47739 - RNA, 23 nt, Artificial Sequence
  Synthetic oligonucleotide: CTLA4-2369
acuuugaggaucuggauaacuaa

SEQ ID NO: 47740 - RNA, 24 nt, Artificial Sequence
  Synthetic oligonucleotide: CTLA4-2370
cacuuugaggaucuggauaacuaa

SEQ ID NO: 47741 - RNA, 18 nt, Artificial Sequence
  Synthetic oligonucleotide: CTLA4-2371
cauuuagcauuugguuaa

SEQ ID NO: 47742 - RNA, 19 nt, Artificial Sequence
  Synthetic oligonucleotide: CTLA4-2372
ccauuuagcauuugguuaa

SEQ ID NO: 47743 - RNA, 20 nt, Artificial Sequence
  Synthetic oligonucleotide: CTLA4-1247
uccauuuagcauuugguuaa

SEQ ID NO: 47744 - RNA, 21 nt, Artificial Sequence
  Synthetic oligonucleotide: CTLA4-2373
auccauuuagcauuugguuaa

SEQ ID NO: 47745 - RNA, 22 nt, Artificial Sequence
  Synthetic oligonucleotide: CTLA4-2374
aauccauuuagcauuugguuaa

SEQ ID NO: 47746 - RNA, 23 nt, Artificial Sequence
  Synthetic oligonucleotide: CTLA4-2375
aaauccauuuagcauuugguuaa

SEQ ID NO: 47747 - RNA, 24 nt, Artificial Sequence
  Synthetic oligonucleotide: CTLA4-2376
uaaauccauuuagcauuugguuaa

SEQ ID NO: 47748 - RNA, 18 nt, Artificial Sequence
  Synthetic oligonucleotide: CTLA4-2377
auuacacaugugcacaca

SEQ ID NO: 47749 - RNA, 19 nt, Artificial Sequence
  Synthetic oligonucleotide: CTLA4-2378
uauuacacaugugcacaca

SEQ ID NO: 47750 - RNA, 20 nt, Artificial Sequence
  Synthetic oligonucleotide: CTLA4-995
guauuacacaugugcacaca

SEQ ID NO: 47751 - RNA, 21 nt, Artificial Sequence
  Synthetic oligonucleotide: CTLA4-2379
uguauuacacaugugcacaca

SEQ ID NO: 47752 - RNA, 22 nt, Artificial Sequence
  Synthetic oligonucleotide: CTLA4-2380
auguauuacacaugugcacaca

SEQ ID NO: 47753 - RNA, 23 nt, Artificial Sequence
  Synthetic oligonucleotide: CTLA4-2381
uauguauuacacaugugcacaca

SEQ ID NO: 47754 - RNA, 24 nt, Artificial Sequence
  Synthetic oligonucleotide: CTLA4-2382
auauguauuacacaugugcacaca

SEQ ID NO: 47755 - RNA, 18 nt, Artificial Sequence
  Synthetic oligonucleotide: CTLA4-1510
acucaccuuugcagaaga

SEQ ID NO: 47756 - RNA, 19 nt, Artificial Sequence
  Synthetic oligonucleotide: CTLA4-1511
cacucaccuuugcagaaga

SEQ ID NO: 47757 - RNA, 20 nt, Artificial Sequence
  Synthetic oligonucleotide: CTLA4-290
ucacucaccuuugcagaaga

SEQ ID NO: 47758 - RNA, 21 nt, Artificial Sequence
  Synthetic oligonucleotide: CTLA4-1512
cucacucaccuuugcagaaga

SEQ ID NO: 47759 - RNA, 22 nt, Artificial Sequence
  Synthetic oligonucleotide: CTLA4-1513
ucucacucaccuuugcagaaga

SEQ ID NO: 47760 - RNA, 23 nt, Artificial Sequence
  Synthetic oligonucleotide: CTLA4-1514
gucucacucaccuuugcagaaga

SEQ ID NO: 47761 - RNA, 24 nt, Artificial Sequence
  Synthetic oligonucleotide: CTLA4-1515
agucucacucaccuuugcagaaga

SEQ ID NO: 47762 - RNA, 18 nt, Artificial Sequence
  Synthetic oligonucleotide: CTLA4-2383
agagccagccaagccaga

SEQ ID NO: 47763 - RNA, 19 nt, Artificial Sequence
  Synthetic oligonucleotide: CTLA4-2384
cagagccagccaagccaga

SEQ ID NO: 47764 - RNA, 20 nt, Artificial Sequence
  Synthetic oligonucleotide: CTLA4-1027
acagagccagccaagccaga

SEQ ID NO: 47765 - RNA, 21 nt, Artificial Sequence
  Synthetic oligonucleotide: CTLA4-2385
uacagagccagccaagccaga

SEQ ID NO: 47766 - RNA, 22 nt, Artificial Sequence
  Synthetic oligonucleotide: CTLA4-2386
auacagagccagccaagccaga

SEQ ID NO: 47767 - RNA, 23 nt, Artificial Sequence
  Synthetic oligonucleotide: CTLA4-2387
aauacagagccagccaagccaga

SEQ ID NO: 47768 - RNA, 24 nt, Artificial Sequence
  Synthetic oligonucleotide: CTLA4-2388
gaauacagagccagccaagccaga

SEQ ID NO: 47769 - RNA, 18 nt, Artificial Sequence
  Synthetic oligonucleotide: CTLA4-2389
uguuuugguuuuacgaga

SEQ ID NO: 47770 - RNA, 19 nt, Artificial Sequence
  Synthetic oligonucleotide: CTLA4-2390
uuguuuugguuuuacgaga

SEQ ID NO: 47771 - RNA, 20 nt, Artificial Sequence
  Synthetic oligonucleotide: CTLA4-990
uuuguuuugguuuuacgaga

SEQ ID NO: 47772 - RNA, 21 nt, Artificial Sequence
  Synthetic oligonucleotide: CTLA4-2391
uuuuguuuugguuuuacgaga

SEQ ID NO: 47773 - RNA, 22 nt, Artificial Sequence
  Synthetic oligonucleotide: CTLA4-2392
uuuuuguuuugguuuuacgaga

SEQ ID NO: 47774 - RNA, 23 nt, Artificial Sequence
  Synthetic oligonucleotide: CTLA4-2393
cuuuuuguuuugguuuuacgaga

SEQ ID NO: 47775 - RNA, 24 nt, Artificial Sequence
  Synthetic oligonucleotide: CTLA4-2394
ccuuuuuguuuugguuuuacgaga

SEQ ID NO: 47776 - RNA, 18 nt, Artificial Sequence
  Synthetic oligonucleotide: CTLA4-2395
aacaagccaauccaugga

SEQ ID NO: 47777 - RNA, 19 nt, Artificial Sequence
  Synthetic oligonucleotide: CTLA4-2396
aaacaagccaauccaugga

SEQ ID NO: 47778 - RNA, 20 nt, Artificial Sequence
  Synthetic oligonucleotide: CTLA4-557
aaaacaagccaauccaugga

SEQ ID NO: 47779 - RNA, 21 nt, Artificial Sequence
  Synthetic oligonucleotide: CTLA4-2397
caaaacaagccaauccaugga

SEQ ID NO: 47780 - RNA, 22 nt, Artificial Sequence
  Synthetic oligonucleotide: CTLA4-2398
acaaaacaagccaauccaugga

SEQ ID NO: 47781 - RNA, 23 nt, Artificial Sequence
  Synthetic oligonucleotide: CTLA4-2399
aacaaaacaagccaauccaugga

SEQ ID NO: 47782 - RNA, 24 nt, Artificial Sequence
  Synthetic oligonucleotide: CTLA4-2400
gaacaaaacaagccaauccaugga

SEQ ID NO: 47783 - RNA, 18 nt, Artificial Sequence
  Synthetic oligonucleotide: CTLA4-2401
ccugcuggcccuggaaua

SEQ ID NO: 47784 - RNA, 19 nt, Artificial Sequence
  Synthetic oligonucleotide: CTLA4-2402
cccugcuggcccuggaaua

SEQ ID NO: 47785 - RNA, 20 nt, Artificial Sequence
  Synthetic oligonucleotide: CTLA4-1028
ucccugcuggcccuggaaua

SEQ ID NO: 47786 - RNA, 21 nt, Artificial Sequence
  Synthetic oligonucleotide: CTLA4-2403
cucccugcuggcccuggaaua

SEQ ID NO: 47787 - RNA, 22 nt, Artificial Sequence
  Synthetic oligonucleotide: CTLA4-2404
gcucccugcuggcccuggaaua

SEQ ID NO: 47788 - RNA, 23 nt, Artificial Sequence
  Synthetic oligonucleotide: CTLA4-2405
ugcucccugcuggcccuggaaua

SEQ ID NO: 47789 - RNA, 24 nt, Artificial Sequence
  Synthetic oligonucleotide: CTLA4-2406
cugcucccugcuggcccuggaaua

SEQ ID NO: 47790 - RNA, 18 nt, Artificial Sequence
  Synthetic oligonucleotide: CTLA4-1522
aggcaagccauggcuuua

SEQ ID NO: 47791 - RNA, 19 nt, Artificial Sequence
  Synthetic oligonucleotide: CTLA4-1523
aaggcaagccauggcuuua

SEQ ID NO: 47792 - RNA, 20 nt, Artificial Sequence
  Synthetic oligonucleotide: CTLA4-69
caaggcaagccauggcuuua

SEQ ID NO: 47793 - RNA, 21 nt, Artificial Sequence
  Synthetic oligonucleotide: CTLA4-1524
ccaaggcaagccauggcuuua

SEQ ID NO: 47794 - RNA, 22 nt, Artificial Sequence
  Synthetic oligonucleotide: CTLA4-1525
uccaaggcaagccauggcuuua

SEQ ID NO: 47795 - RNA, 23 nt, Artificial Sequence
  Synthetic oligonucleotide: CTLA4-1526
auccaaggcaagccauggcuuua

SEQ ID NO: 47796 - RNA, 24 nt, Artificial Sequence
  Synthetic oligonucleotide: CTLA4-1527
aauccaaggcaagccauggcuuua

SEQ ID NO: 47797 - RNA, 18 nt, Artificial Sequence
  Synthetic oligonucleotide: CTLA4-1528
augaagagaagaaaaaac

SEQ ID NO: 47798 - RNA, 19 nt, Artificial Sequence
  Synthetic oligonucleotide: CTLA4-1529
gaugaagagaagaaaaaac

SEQ ID NO: 47799 - RNA, 20 nt, Artificial Sequence
  Synthetic oligonucleotide: CTLA4-61
ggaugaagagaagaaaaaac

SEQ ID NO: 47800 - RNA, 21 nt, Artificial Sequence
  Synthetic oligonucleotide: CTLA4-1530
gggaugaagagaagaaaaaac

SEQ ID NO: 47801 - RNA, 22 nt, Artificial Sequence
  Synthetic oligonucleotide: CTLA4-1531
agggaugaagagaagaaaaaac

SEQ ID NO: 47802 - RNA, 23 nt, Artificial Sequence
  Synthetic oligonucleotide: CTLA4-1532
cagggaugaagagaagaaaaaac

SEQ ID NO: 47803 - RNA, 24 nt, Artificial Sequence
  Synthetic oligonucleotide: CTLA4-1533
acagggaugaagagaagaaaaaac

SEQ ID NO: 47804 - RNA, 18 nt, Artificial Sequence
  Synthetic oligonucleotide: CTLA4-2407
gaaaaaaacuaaaaucac

SEQ ID NO: 47805 - RNA, 19 nt, Artificial Sequence
  Synthetic oligonucleotide: CTLA4-2408
agaaaaaaacuaaaaucac

SEQ ID NO: 47806 - RNA, 20 nt, Artificial Sequence
  Synthetic oligonucleotide: CTLA4-1246
gagaaaaaaacuaaaaucac

SEQ ID NO: 47807 - RNA, 21 nt, Artificial Sequence
  Synthetic oligonucleotide: CTLA4-2409
agagaaaaaaacuaaaaucac

SEQ ID NO: 47808 - RNA, 22 nt, Artificial Sequence
  Synthetic oligonucleotide: CTLA4-2410
aagagaaaaaaacuaaaaucac

SEQ ID NO: 47809 - RNA, 23 nt, Artificial Sequence
  Synthetic oligonucleotide: CTLA4-2411
uaagagaaaaaaacuaaaaucac

SEQ ID NO: 47810 - RNA, 24 nt, Artificial Sequence
  Synthetic oligonucleotide: CTLA4-2412
uuaagagaaaaaaacuaaaaucac

SEQ ID NO: 47811 - RNA, 18 nt, Artificial Sequence
  Synthetic oligonucleotide: CTLA4-2413
ggauaacuaaguggagac

SEQ ID NO: 47812 - RNA, 19 nt, Artificial Sequence
  Synthetic oligonucleotide: CTLA4-2414
uggauaacuaaguggagac

SEQ ID NO: 47813 - RNA, 20 nt, Artificial Sequence
  Synthetic oligonucleotide: CTLA4-975
cuggauaacuaaguggagac

SEQ ID NO: 47814 - RNA, 21 nt, Artificial Sequence
  Synthetic oligonucleotide: CTLA4-2415
ucuggauaacuaaguggagac

SEQ ID NO: 47815 - RNA, 22 nt, Artificial Sequence
  Synthetic oligonucleotide: CTLA4-2416
aucuggauaacuaaguggagac

SEQ ID NO: 47816 - RNA, 23 nt, Artificial Sequence
  Synthetic oligonucleotide: CTLA4-2417
gaucuggauaacuaaguggagac

SEQ ID NO: 47817 - RNA, 24 nt, Artificial Sequence
  Synthetic oligonucleotide: CTLA4-2418
ggaucuggauaacuaaguggagac

SEQ ID NO: 47818 - RNA, 18 nt, Artificial Sequence
  Synthetic oligonucleotide: CTLA4-2419
uuuuuguuuugguuuuac

SEQ ID NO: 47819 - RNA, 19 nt, Artificial Sequence
  Synthetic oligonucleotide: CTLA4-2420
cuuuuuguuuugguuuuac

SEQ ID NO: 47820 - RNA, 20 nt, Artificial Sequence
  Synthetic oligonucleotide: CTLA4-991
ccuuuuuguuuugguuuuac

SEQ ID NO: 47821 - RNA, 21 nt, Artificial Sequence
  Synthetic oligonucleotide: CTLA4-2421
gccuuuuuguuuugguuuuac

SEQ ID NO: 47822 - RNA, 22 nt, Artificial Sequence
  Synthetic oligonucleotide: CTLA4-2422
agccuuuuuguuuugguuuuac

SEQ ID NO: 47823 - RNA, 23 nt, Artificial Sequence
  Synthetic oligonucleotide: CTLA4-2423
aagccuuuuuguuuugguuuuac

SEQ ID NO: 47824 - RNA, 24 nt, Artificial Sequence
  Synthetic oligonucleotide: CTLA4-2424
aaagccuuuuuguuuugguuuuac

SEQ ID NO: 47825 - RNA, 18 nt, Artificial Sequence
  Synthetic oligonucleotide: CTLA4-2425
ugcuaacuuucugagccc

SEQ ID NO: 47826 - RNA, 19 nt, Artificial Sequence
  Synthetic oligonucleotide: CTLA4-2426
cugcuaacuuucugagccc

SEQ ID NO: 47827 - RNA, 20 nt, Artificial Sequence
  Synthetic oligonucleotide: CTLA4-967
gcugcuaacuuucugagccc

SEQ ID NO: 47828 - RNA, 21 nt, Artificial Sequence
  Synthetic oligonucleotide: CTLA4-2427
ggcugcuaacuuucugagccc

SEQ ID NO: 47829 - RNA, 22 nt, Artificial Sequence
  Synthetic oligonucleotide: CTLA4-2428
aggcugcuaacuuucugagccc

SEQ ID NO: 47830 - RNA, 23 nt, Artificial Sequence
  Synthetic oligonucleotide: CTLA4-2429
uaggcugcuaacuuucugagccc

SEQ ID NO: 47831 - RNA, 24 nt, Artificial Sequence
  Synthetic oligonucleotide: CTLA4-2430
cuaggcugcuaacuuucugagccc

SEQ ID NO: 47832 - RNA, 18 nt, Artificial Sequence
  Synthetic oligonucleotide: CTLA4-2431
aacugcucccugcuggcc

SEQ ID NO: 47833 - RNA, 19 nt, Artificial Sequence
  Synthetic oligonucleotide: CTLA4-2432
caacugcucccugcuggcc

SEQ ID NO: 47834 - RNA, 20 nt, Artificial Sequence
  Synthetic oligonucleotide: CTLA4-1030
ccaacugcucccugcuggcc

SEQ ID NO: 47835 - RNA, 21 nt, Artificial Sequence
  Synthetic oligonucleotide: CTLA4-2433
cccaacugcucccugcuggcc

SEQ ID NO: 47836 - RNA, 22 nt, Artificial Sequence
  Synthetic oligonucleotide: CTLA4-2434
gcccaacugcucccugcuggcc

SEQ ID NO: 47837 - RNA, 23 nt, Artificial Sequence
  Synthetic oligonucleotide: CTLA4-2435
cgcccaacugcucccugcuggcc

SEQ ID NO: 47838 - RNA, 24 nt, Artificial Sequence
  Synthetic oligonucleotide: CTLA4-2436
ccgcccaacugcucccugcuggcc

SEQ ID NO: 47839 - RNA, 18 nt, Artificial Sequence
  Synthetic oligonucleotide: CTLA4-2437
uugaacccacacagaauc

SEQ ID NO: 47840 - RNA, 19 nt, Artificial Sequence
  Synthetic oligonucleotide: CTLA4-2438
uuugaacccacacagaauc

SEQ ID NO: 47841 - RNA, 20 nt, Artificial Sequence
  Synthetic oligonucleotide: CTLA4-996
guuugaacccacacagaauc

SEQ ID NO: 47842 - RNA, 21 nt, Artificial Sequence
  Synthetic oligonucleotide: CTLA4-2439
uguuugaacccacacagaauc

SEQ ID NO: 47843 - RNA, 22 nt, Artificial Sequence
  Synthetic oligonucleotide: CTLA4-2440
guguuugaacccacacagaauc

SEQ ID NO: 47844 - RNA, 23 nt, Artificial Sequence
  Synthetic oligonucleotide: CTLA4-2441
uguguuugaacccacacagaauc

SEQ ID NO: 47845 - RNA, 24 nt, Artificial Sequence
  Synthetic oligonucleotide: CTLA4-2442
auguguuugaacccacacagaauc

SEQ ID NO: 47846 - RNA, 18 nt, Artificial Sequence
  Synthetic oligonucleotide: CTLA4-2443
gcaaaaccuuucaggauc

SEQ ID NO: 47847 - RNA, 19 nt, Artificial Sequence
  Synthetic oligonucleotide: CTLA4-2444
agcaaaaccuuucaggauc

SEQ ID NO: 47848 - RNA, 20 nt, Artificial Sequence
  Synthetic oligonucleotide: CTLA4-1000
gagcaaaaccuuucaggauc

SEQ ID NO: 47849 - RNA, 21 nt, Artificial Sequence
  Synthetic oligonucleotide: CTLA4-2445
agagcaaaaccuuucaggauc

SEQ ID NO: 47850 - RNA, 22 nt, Artificial Sequence
  Synthetic oligonucleotide: CTLA4-2446
uagagcaaaaccuuucaggauc

SEQ ID NO: 47851 - RNA, 23 nt, Artificial Sequence
  Synthetic oligonucleotide: CTLA4-2447
guagagcaaaaccuuucaggauc

SEQ ID NO: 47852 - RNA, 24 nt, Artificial Sequence
  Synthetic oligonucleotide: CTLA4-2448
aguagagcaaaaccuuucaggauc

SEQ ID NO: 47853 - RNA, 18 nt, Artificial Sequence
  Synthetic oligonucleotide: CTLA4-2449
agcgguguucaggucuuc

SEQ ID NO: 47854 - RNA, 19 nt, Artificial Sequence
  Synthetic oligonucleotide: CTLA4-2450
gagcgguguucaggucuuc

SEQ ID NO: 47855 - RNA, 20 nt, Artificial Sequence
  Synthetic oligonucleotide: CTLA4-548
ggagcgguguucaggucuuc

SEQ ID NO: 47856 - RNA, 21 nt, Artificial Sequence
  Synthetic oligonucleotide: CTLA4-2451
gggagcgguguucaggucuuc

SEQ ID NO: 47857 - RNA, 22 nt, Artificial Sequence
  Synthetic oligonucleotide: CTLA4-2452
ugggagcgguguucaggucuuc

SEQ ID NO: 47858 - RNA, 23 nt, Artificial Sequence
  Synthetic oligonucleotide: CTLA4-2453
augggagcgguguucaggucuuc

SEQ ID NO: 47859 - RNA, 24 nt, Artificial Sequence
  Synthetic oligonucleotide: CTLA4-2454
uaugggagcgguguucaggucuuc

SEQ ID NO: 47860 - RNA, 18 nt, Artificial Sequence
  Synthetic oligonucleotide: CTLA4-2455
ggagacuuggagaauuuc

SEQ ID NO: 47861 - RNA, 19 nt, Artificial Sequence
  Synthetic oligonucleotide: CTLA4-2456
uggagacuuggagaauuuc

SEQ ID NO: 47862 - RNA, 20 nt, Artificial Sequence
  Synthetic oligonucleotide: CTLA4-972
guggagacuuggagaauuuc

SEQ ID NO: 47863 - RNA, 21 nt, Artificial Sequence
  Synthetic oligonucleotide: CTLA4-2457
aguggagacuuggagaauuuc

SEQ ID NO: 47864 - RNA, 22 nt, Artificial Sequence
  Synthetic oligonucleotide: CTLA4-2458
aaguggagacuuggagaauuuc

SEQ ID NO: 47865 - RNA, 23 nt, Artificial Sequence
  Synthetic oligonucleotide: CTLA4-2459
uaaguggagacuuggagaauuuc

SEQ ID NO: 47866 - RNA, 24 nt, Artificial Sequence
  Synthetic oligonucleotide: CTLA4-2460
cuaaguggagacuuggagaauuuc

SEQ ID NO: 47867 - RNA, 18 nt, Artificial Sequence
  Synthetic oligonucleotide: CTLA4-2461
guucaggucuucaggaag

SEQ ID NO: 47868 - RNA, 19 nt, Artificial Sequence
  Synthetic oligonucleotide: CTLA4-2462
uguucaggucuucaggaag

SEQ ID NO: 47869 - RNA, 20 nt, Artificial Sequence
  Synthetic oligonucleotide: CTLA4-1002
guguucaggucuucaggaag

SEQ ID NO: 47870 - RNA, 21 nt, Artificial Sequence
  Synthetic oligonucleotide: CTLA4-2463
gguguucaggucuucaggaag

SEQ ID NO: 47871 - RNA, 22 nt, Artificial Sequence
  Synthetic oligonucleotide: CTLA4-2464
cgguguucaggucuucaggaag

SEQ ID NO: 47872 - RNA, 23 nt, Artificial Sequence
  Synthetic oligonucleotide: CTLA4-2465
gcgguguucaggucuucaggaag

SEQ ID NO: 47873 - RNA, 24 nt, Artificial Sequence
  Synthetic oligonucleotide: CTLA4-2466
agcgguguucaggucuucaggaag

SEQ ID NO: 47874 - RNA, 18 nt, Artificial Sequence
  Synthetic oligonucleotide: CTLA4-2467
aggaucuggauaacuaag

SEQ ID NO: 47875 - RNA, 19 nt, Artificial Sequence
  Synthetic oligonucleotide: CTLA4-2468
gaggaucuggauaacuaag

SEQ ID NO: 47876 - RNA, 20 nt, Artificial Sequence
  Synthetic oligonucleotide: CTLA4-560
ugaggaucuggauaacuaag

SEQ ID NO: 47877 - RNA, 21 nt, Artificial Sequence
  Synthetic oligonucleotide: CTLA4-2469
uugaggaucuggauaacuaag

SEQ ID NO: 47878 - RNA, 22 nt, Artificial Sequence
  Synthetic oligonucleotide: CTLA4-2470
uuugaggaucuggauaacuaag

SEQ ID NO: 47879 - RNA, 23 nt, Artificial Sequence
  Synthetic oligonucleotide: CTLA4-2471
cuuugaggaucuggauaacuaag

SEQ ID NO: 47880 - RNA, 24 nt, Artificial Sequence
  Synthetic oligonucleotide: CTLA4-2472
acuuugaggaucuggauaacuaag

SEQ ID NO: 47881 - RNA, 18 nt, Artificial Sequence
  Synthetic oligonucleotide: CTLA4-1583
ccugguagccagguucag

SEQ ID NO: 47882 - RNA, 19 nt, Artificial Sequence
  Synthetic oligonucleotide: CTLA4-1584
uccugguagccagguucag

SEQ ID NO: 47883 - RNA, 20 nt, Artificial Sequence
  Synthetic oligonucleotide: CTLA4-280
guccugguagccagguucag

SEQ ID NO: 47884 - RNA, 21 nt, Artificial Sequence
  Synthetic oligonucleotide: CTLA4-1585
gguccugguagccagguucag

SEQ ID NO: 47885 - RNA, 22 nt, Artificial Sequence
  Synthetic oligonucleotide: CTLA4-1586
agguccugguagccagguucag

SEQ ID NO: 47886 - RNA, 23 nt, Artificial Sequence
  Synthetic oligonucleotide: CTLA4-1587
cagguccugguagccagguucag

SEQ ID NO: 47887 - RNA, 24 nt, Artificial Sequence
  Synthetic oligonucleotide: CTLA4-1588
ccagguccugguagccagguucag

SEQ ID NO: 47888 - RNA, 18 nt, Artificial Sequence
  Synthetic oligonucleotide: CTLA4-1589
gaagacagggaugaagag

SEQ ID NO: 47889 - RNA, 19 nt, Artificial Sequence
  Synthetic oligonucleotide: CTLA4-1590
agaagacagggaugaagag

SEQ ID NO: 47890 - RNA, 20 nt, Artificial Sequence
  Synthetic oligonucleotide: CTLA4-285
cagaagacagggaugaagag

SEQ ID NO: 47891 - RNA, 21 nt, Artificial Sequence
  Synthetic oligonucleotide: CTLA4-1591
gcagaagacagggaugaagag

SEQ ID NO: 47892 - RNA, 22 nt, Artificial Sequence
  Synthetic oligonucleotide: CTLA4-1592
ugcagaagacagggaugaagag

SEQ ID NO: 47893 - RNA, 23 nt, Artificial Sequence
  Synthetic oligonucleotide: CTLA4-1593
uugcagaagacagggaugaagag

SEQ ID NO: 47894 - RNA, 24 nt, Artificial Sequence
  Synthetic oligonucleotide: CTLA4-1594
uuugcagaagacagggaugaagag

SEQ ID NO: 47895 - RNA, 18 nt, Artificial Sequence
  Synthetic oligonucleotide: CTLA4-2473
caaaugaaacccagguag

SEQ ID NO: 47896 - RNA, 19 nt, Artificial Sequence
  Synthetic oligonucleotide: CTLA4-2474
acaaaugaaacccagguag

SEQ ID NO: 47897 - RNA, 20 nt, Artificial Sequence
  Synthetic oligonucleotide: CTLA4-1021
aacaaaugaaacccagguag

SEQ ID NO: 47898 - RNA, 21 nt, Artificial Sequence
  Synthetic oligonucleotide: CTLA4-2475
aaacaaaugaaacccagguag

SEQ ID NO: 47899 - RNA, 22 nt, Artificial Sequence
  Synthetic oligonucleotide: CTLA4-2476
gaaacaaaugaaacccagguag

SEQ ID NO: 47900 - RNA, 23 nt, Artificial Sequence
  Synthetic oligonucleotide: CTLA4-2477
ugaaacaaaugaaacccagguag

SEQ ID NO: 47901 - RNA, 24 nt, Artificial Sequence
  Synthetic oligonucleotide: CTLA4-2478
cugaaacaaaugaaacccagguag

SEQ ID NO: 47902 - RNA, 18 nt, Artificial Sequence
  Synthetic oligonucleotide: CTLA4-2479
guggguuuagcuguuacg

SEQ ID NO: 47903 - RNA, 19 nt, Artificial Sequence
  Synthetic oligonucleotide: CTLA4-2480
cguggguuuagcuguuacg

SEQ ID NO: 47904 - RNA, 20 nt, Artificial Sequence
  Synthetic oligonucleotide: CTLA4-987
ccguggguuuagcuguuacg

SEQ ID NO: 47905 - RNA, 21 nt, Artificial Sequence
  Synthetic oligonucleotide: CTLA4-2481
gccguggguuuagcuguuacg

SEQ ID NO: 47906 - RNA, 22 nt, Artificial Sequence
  Synthetic oligonucleotide: CTLA4-2482
agccguggguuuagcuguuacg

SEQ ID NO: 47907 - RNA, 23 nt, Artificial Sequence
  Synthetic oligonucleotide: CTLA4-2483
aagccguggguuuagcuguuacg

SEQ ID NO: 47908 - RNA, 24 nt, Artificial Sequence
  Synthetic oligonucleotide: CTLA4-2484
gaagccguggguuuagcuguuacg

SEQ ID NO: 47909 - RNA, 18 nt, Artificial Sequence
  Synthetic oligonucleotide: CTLA4-1595
cagcugagccuugugccg

SEQ ID NO: 47910 - RNA, 19 nt, Artificial Sequence
  Synthetic oligonucleotide: CTLA4-1596
ucagcugagccuugugccg

SEQ ID NO: 47911 - RNA, 20 nt, Artificial Sequence
  Synthetic oligonucleotide: CTLA4-279
uucagcugagccuugugccg

SEQ ID NO: 47912 - RNA, 21 nt, Artificial Sequence
  Synthetic oligonucleotide: CTLA4-1597
guucagcugagccuugugccg

SEQ ID NO: 47913 - RNA, 22 nt, Artificial Sequence
  Synthetic oligonucleotide: CTLA4-1598
gguucagcugagccuugugccg

SEQ ID NO: 47914 - RNA, 23 nt, Artificial Sequence
  Synthetic oligonucleotide: CTLA4-1599
agguucagcugagccuugugccg

SEQ ID NO: 47915 - RNA, 24 nt, Artificial Sequence
  Synthetic oligonucleotide: CTLA4-1600
cagguucagcugagccuugugccg

SEQ ID NO: 47916 - RNA, 18 nt, Artificial Sequence
  Synthetic oligonucleotide: CTLA4-2485
aaacaaaugaaacccagg

SEQ ID NO: 47917 - RNA, 19 nt, Artificial Sequence
  Synthetic oligonucleotide: CTLA4-2486
gaaacaaaugaaacccagg

SEQ ID NO: 47918 - RNA, 20 nt, Artificial Sequence
  Synthetic oligonucleotide: CTLA4-1023
ugaaacaaaugaaacccagg

SEQ ID NO: 47919 - RNA, 21 nt, Artificial Sequence
  Synthetic oligonucleotide: CTLA4-2487
cugaaacaaaugaaacccagg

SEQ ID NO: 47920 - RNA, 22 nt, Artificial Sequence
  Synthetic oligonucleotide: CTLA4-2488
gcugaaacaaaugaaacccagg

SEQ ID NO: 47921 - RNA, 23 nt, Artificial Sequence
  Synthetic oligonucleotide: CTLA4-2489
ugcugaaacaaaugaaacccagg

SEQ ID NO: 47922 - RNA, 24 nt, Artificial Sequence
  Synthetic oligonucleotide: CTLA4-2490
cugcugaaacaaaugaaacccagg

SEQ ID NO: 47923 - RNA, 18 nt, Artificial Sequence
  Synthetic oligonucleotide: CTLA4-1607
ccuuugcagaagacaggg

SEQ ID NO: 47924 - RNA, 19 nt, Artificial Sequence
  Synthetic oligonucleotide: CTLA4-1608
accuuugcagaagacaggg

SEQ ID NO: 47925 - RNA, 20 nt, Artificial Sequence
  Synthetic oligonucleotide: CTLA4-288
caccuuugcagaagacaggg

SEQ ID NO: 47926 - RNA, 21 nt, Artificial Sequence
  Synthetic oligonucleotide: CTLA4-1609
ucaccuuugcagaagacaggg

SEQ ID NO: 47927 - RNA, 22 nt, Artificial Sequence
  Synthetic oligonucleotide: CTLA4-1610
cucaccuuugcagaagacaggg

SEQ ID NO: 47928 - RNA, 23 nt, Artificial Sequence
  Synthetic oligonucleotide: CTLA4-1611
acucaccuuugcagaagacaggg

SEQ ID NO: 47929 - RNA, 24 nt, Artificial Sequence
  Synthetic oligonucleotide: CTLA4-1612
cacucaccuuugcagaagacaggg

SEQ ID NO: 47930 - RNA, 18 nt, Artificial Sequence
  Synthetic oligonucleotide: CTLA4-2491
aaacaagccaauccaugg

SEQ ID NO: 47931 - RNA, 19 nt, Artificial Sequence
  Synthetic oligonucleotide: CTLA4-2492
aaaacaagccaauccaugg

SEQ ID NO: 47932 - RNA, 20 nt, Artificial Sequence
  Synthetic oligonucleotide: CTLA4-984
caaaacaagccaauccaugg

SEQ ID NO: 47933 - RNA, 21 nt, Artificial Sequence
  Synthetic oligonucleotide: CTLA4-2493
acaaaacaagccaauccaugg

SEQ ID NO: 47934 - RNA, 22 nt, Artificial Sequence
  Synthetic oligonucleotide: CTLA4-2494
aacaaaacaagccaauccaugg

SEQ ID NO: 47935 - RNA, 23 nt, Artificial Sequence
  Synthetic oligonucleotide: CTLA4-2495
gaacaaaacaagccaauccaugg

SEQ ID NO: 47936 - RNA, 24 nt, Artificial Sequence
  Synthetic oligonucleotide: CTLA4-2496
ugaacaaaacaagccaauccaugg

SEQ ID NO: 47937 - RNA, 18 nt, Artificial Sequence
  Synthetic oligonucleotide: CTLA4-1613
uugcagaagacagggaug

SEQ ID NO: 47938 - RNA, 19 nt, Artificial Sequence
  Synthetic oligonucleotide: CTLA4-1614
uuugcagaagacagggaug

SEQ ID NO: 47939 - RNA, 20 nt, Artificial Sequence
  Synthetic oligonucleotide: CTLA4-287
cuuugcagaagacagggaug

SEQ ID NO: 47940 - RNA, 21 nt, Artificial Sequence
  Synthetic oligonucleotide: CTLA4-1615
ccuuugcagaagacagggaug

SEQ ID NO: 47941 - RNA, 22 nt, Artificial Sequence
  Synthetic oligonucleotide: CTLA4-1616
accuuugcagaagacagggaug

SEQ ID NO: 47942 - RNA, 23 nt, Artificial Sequence
  Synthetic oligonucleotide: CTLA4-1617
caccuuugcagaagacagggaug

SEQ ID NO: 47943 - RNA, 24 nt, Artificial Sequence
  Synthetic oligonucleotide: CTLA4-1618
ucaccuuugcagaagacagggaug

SEQ ID NO: 47944 - RNA, 18 nt, Artificial Sequence
  Synthetic oligonucleotide: CTLA4-2497
aaucacugccuuugacug

SEQ ID NO: 47945 - RNA, 19 nt, Artificial Sequence
  Synthetic oligonucleotide: CTLA4-2498
aaaucacugccuuugacug

SEQ ID NO: 47946 - RNA, 20 nt, Artificial Sequence
  Synthetic oligonucleotide: CTLA4-1025
uaaaucacugccuuugacug

SEQ ID NO: 47947 - RNA, 21 nt, Artificial Sequence
  Synthetic oligonucleotide: CTLA4-2499
auaaaucacugccuuugacug

SEQ ID NO: 47948 - RNA, 22 nt, Artificial Sequence
  Synthetic oligonucleotide: CTLA4-2500
uauaaaucacugccuuugacug

SEQ ID NO: 47949 - RNA, 23 nt, Artificial Sequence
  Synthetic oligonucleotide: CTLA4-2501
cuauaaaucacugccuuugacug

SEQ ID NO: 47950 - RNA, 24 nt, Artificial Sequence
  Synthetic oligonucleotide: CTLA4-2502
gcuauaaaucacugccuuugacug

SEQ ID NO: 47951 - RNA, 18 nt, Artificial Sequence
  Synthetic oligonucleotide: CTLA4-1625
agaaaaaacaggagagug

SEQ ID NO: 47952 - RNA, 19 nt, Artificial Sequence
  Synthetic oligonucleotide: CTLA4-1626
aagaaaaaacaggagagug

SEQ ID NO: 47953 - RNA, 20 nt, Artificial Sequence
  Synthetic oligonucleotide: CTLA4-281
gaagaaaaaacaggagagug

SEQ ID NO: 47954 - RNA, 21 nt, Artificial Sequence
  Synthetic oligonucleotide: CTLA4-1627
agaagaaaaaacaggagagug

SEQ ID NO: 47955 - RNA, 22 nt, Artificial Sequence
  Synthetic oligonucleotide: CTLA4-1628
gagaagaaaaaacaggagagug

SEQ ID NO: 47956 - RNA, 23 nt, Artificial Sequence
  Synthetic oligonucleotide: CTLA4-1629
agagaagaaaaaacaggagagug

SEQ ID NO: 47957 - RNA, 24 nt, Artificial Sequence
  Synthetic oligonucleotide: CTLA4-1630
aagagaagaaaaaacaggagagug

SEQ ID NO: 47958 - RNA, 18 nt, Artificial Sequence
  Synthetic oligonucleotide: CTLA4-1631
aagucucacucaccuuug

SEQ ID NO: 47959 - RNA, 19 nt, Artificial Sequence
  Synthetic oligonucleotide: CTLA4-1632
aaagucucacucaccuuug

SEQ ID NO: 47960 - RNA, 20 nt, Artificial Sequence
  Synthetic oligonucleotide: CTLA4-291
aaaagucucacucaccuuug

SEQ ID NO: 47961 - RNA, 21 nt, Artificial Sequence
  Synthetic oligonucleotide: CTLA4-1633
caaaagucucacucaccuuug

SEQ ID NO: 47962 - RNA, 22 nt, Artificial Sequence
  Synthetic oligonucleotide: CTLA4-1634
ccaaaagucucacucaccuuug

SEQ ID NO: 47963 - RNA, 23 nt, Artificial Sequence
  Synthetic oligonucleotide: CTLA4-1635
uccaaaagucucacucaccuuug

SEQ ID NO: 47964 - RNA, 24 nt, Artificial Sequence
  Synthetic oligonucleotide: CTLA4-1636
cuccaaaagucucacucaccuuug

SEQ ID NO: 47965 - RNA, 18 nt, Artificial Sequence
  Synthetic oligonucleotide: CTLA4-2503
auggaaaauguauucaau

SEQ ID NO: 47966 - RNA, 19 nt, Artificial Sequence
  Synthetic oligonucleotide: CTLA4-2504
gauggaaaauguauucaau

SEQ ID NO: 47967 - RNA, 20 nt, Artificial Sequence
  Synthetic oligonucleotide: CTLA4-982
ggauggaaaauguauucaau

SEQ ID NO: 47968 - RNA, 21 nt, Artificial Sequence
  Synthetic oligonucleotide: CTLA4-2505
uggauggaaaauguauucaau

SEQ ID NO: 47969 - RNA, 22 nt, Artificial Sequence
  Synthetic oligonucleotide: CTLA4-2506
auggauggaaaauguauucaau

SEQ ID NO: 47970 - RNA, 23 nt, Artificial Sequence
  Synthetic oligonucleotide: CTLA4-2507
cauggauggaaaauguauucaau

SEQ ID NO: 47971 - RNA, 24 nt, Artificial Sequence
  Synthetic oligonucleotide: CTLA4-2508
ccauggauggaaaauguauucaau

SEQ ID NO: 47972 - RNA, 18 nt, Artificial Sequence
  Synthetic oligonucleotide: CTLA4-1637
ggcaagccauggcuuuau

SEQ ID NO: 47973 - RNA, 19 nt, Artificial Sequence
  Synthetic oligonucleotide: CTLA4-1638
aggcaagccauggcuuuau

SEQ ID NO: 47974 - RNA, 20 nt, Artificial Sequence
  Synthetic oligonucleotide: CTLA4-70
aaggcaagccauggcuuuau

SEQ ID NO: 47975 - RNA, 21 nt, Artificial Sequence
  Synthetic oligonucleotide: CTLA4-1639
caaggcaagccauggcuuuau

SEQ ID NO: 47976 - RNA, 22 nt, Artificial Sequence
  Synthetic oligonucleotide: CTLA4-1640
ccaaggcaagccauggcuuuau

SEQ ID NO: 47977 - RNA, 23 nt, Artificial Sequence
  Synthetic oligonucleotide: CTLA4-1641
uccaaggcaagccauggcuuuau

SEQ ID NO: 47978 - RNA, 24 nt, Artificial Sequence
  Synthetic oligonucleotide: CTLA4-1642
auccaaggcaagccauggcuuuau

SEQ ID NO: 47979 - RNA, 18 nt, Artificial Sequence
  Synthetic oligonucleotide: CTLA4-2509
ugaagcuucauguucacu

SEQ ID NO: 47980 - RNA, 19 nt, Artificial Sequence
  Synthetic oligonucleotide: CTLA4-2510
cugaagcuucauguucacu

SEQ ID NO: 47981 - RNA, 20 nt, Artificial Sequence
  Synthetic oligonucleotide: CTLA4-980
acugaagcuucauguucacu

SEQ ID NO: 47982 - RNA, 21 nt, Artificial Sequence
  Synthetic oligonucleotide: CTLA4-2511
aacugaagcuucauguucacu

SEQ ID NO: 47983 - RNA, 22 nt, Artificial Sequence
  Synthetic oligonucleotide: CTLA4-2512
aaacugaagcuucauguucacu

SEQ ID NO: 47984 - RNA, 23 nt, Artificial Sequence
  Synthetic oligonucleotide: CTLA4-2513
gaaacugaagcuucauguucacu

SEQ ID NO: 47985 - RNA, 24 nt, Artificial Sequence
  Synthetic oligonucleotide: CTLA4-2514
ugaaacugaagcuucauguucacu

SEQ ID NO: 47986 - RNA, 18 nt, Artificial Sequence
  Synthetic oligonucleotide: CTLA4-2515
gauaacuaaguggagacu

SEQ ID NO: 47987 - RNA, 19 nt, Artificial Sequence
  Synthetic oligonucleotide: CTLA4-2516
ggauaacuaaguggagacu

SEQ ID NO: 47988 - RNA, 20 nt, Artificial Sequence
  Synthetic oligonucleotide: CTLA4-561
uggauaacuaaguggagacu

SEQ ID NO: 47989 - RNA, 21 nt, Artificial Sequence
  Synthetic oligonucleotide: CTLA4-2517
cuggauaacuaaguggagacu

SEQ ID NO: 47990 - RNA, 22 nt, Artificial Sequence
  Synthetic oligonucleotide: CTLA4-2518
ucuggauaacuaaguggagacu

SEQ ID NO: 47991 - RNA, 23 nt, Artificial Sequence
  Synthetic oligonucleotide: CTLA4-2519
aucuggauaacuaaguggagacu

SEQ ID NO: 47992 - RNA, 24 nt, Artificial Sequence
  Synthetic oligonucleotide: CTLA4-2520
gaucuggauaacuaaguggagacu

SEQ ID NO: 47993 - RNA, 18 nt, Artificial Sequence
  Synthetic oligonucleotide: CTLA4-2521
uuucaggauccugaagcu

SEQ ID NO: 47994 - RNA, 19 nt, Artificial Sequence
  Synthetic oligonucleotide: CTLA4-2522
cuuucaggauccugaagcu

SEQ ID NO: 47995 - RNA, 20 nt, Artificial Sequence
  Synthetic oligonucleotide: CTLA4-999
ccuuucaggauccugaagcu

SEQ ID NO: 47996 - RNA, 21 nt, Artificial Sequence
  Synthetic oligonucleotide: CTLA4-2523
accuuucaggauccugaagcu

SEQ ID NO: 47997 - RNA, 22 nt, Artificial Sequence
  Synthetic oligonucleotide: CTLA4-2524
aaccuuucaggauccugaagcu

SEQ ID NO: 47998 - RNA, 23 nt, Artificial Sequence
  Synthetic oligonucleotide: CTLA4-2525
aaaccuuucaggauccugaagcu

SEQ ID NO: 47999 - RNA, 24 nt, Artificial Sequence
  Synthetic oligonucleotide: CTLA4-2526
aaaaccuuucaggauccugaagcu

SEQ ID NO: 48000 - RNA, 18 nt, Artificial Sequence
  Synthetic oligonucleotide: CTLA4-2527
aaaaacuguauucuaucu

SEQ ID NO: 48001 - RNA, 19 nt, Artificial Sequence
  Synthetic oligonucleotide: CTLA4-2528
uaaaaacuguauucuaucu

SEQ ID NO: 48002 - RNA, 20 nt, Artificial Sequence
  Synthetic oligonucleotide: CTLA4-1249
auaaaaacuguauucuaucu

SEQ ID NO: 48003 - RNA, 21 nt, Artificial Sequence
  Synthetic oligonucleotide: CTLA4-2529
aauaaaaacuguauucuaucu

SEQ ID NO: 48004 - RNA, 22 nt, Artificial Sequence
  Synthetic oligonucleotide: CTLA4-2530
uaauaaaaacuguauucuaucu

SEQ ID NO: 48005 - RNA, 23 nt, Artificial Sequence
  Synthetic oligonucleotide: CTLA4-2531
uuaauaaaaacuguauucuaucu

SEQ ID NO: 48006 - RNA, 24 nt, Artificial Sequence
  Synthetic oligonucleotide: CTLA4-2532
auuaauaaaaacuguauucuaucu

SEQ ID NO: 48007 - RNA, 18 nt, Artificial Sequence
  Synthetic oligonucleotide: CTLA4-2533
aacaaaugaaacccaggu

SEQ ID NO: 48008 - RNA, 19 nt, Artificial Sequence
  Synthetic oligonucleotide: CTLA4-2534
aaacaaaugaaacccaggu

SEQ ID NO: 48009 - RNA, 20 nt, Artificial Sequence
  Synthetic oligonucleotide: CTLA4-533
gaaacaaaugaaacccaggu

SEQ ID NO: 48010 - RNA, 21 nt, Artificial Sequence
  Synthetic oligonucleotide: CTLA4-2535
ugaaacaaaugaaacccaggu

SEQ ID NO: 48011 - RNA, 22 nt, Artificial Sequence
  Synthetic oligonucleotide: CTLA4-2536
cugaaacaaaugaaacccaggu

SEQ ID NO: 48012 - RNA, 23 nt, Artificial Sequence
  Synthetic oligonucleotide: CTLA4-2537
gcugaaacaaaugaaacccaggu

SEQ ID NO: 48013 - RNA, 24 nt, Artificial Sequence
  Synthetic oligonucleotide: CTLA4-2538
ugcugaaacaaaugaaacccaggu

SEQ ID NO: 48014 - RNA, 18 nt, Artificial Sequence
  Synthetic oligonucleotide: CTLA4-2539
ugaagcuuugaaaugugu

SEQ ID NO: 48015 - RNA, 19 nt, Artificial Sequence
  Synthetic oligonucleotide: CTLA4-2540
cugaagcuuugaaaugugu

SEQ ID NO: 48016 - RNA, 20 nt, Artificial Sequence
  Synthetic oligonucleotide: CTLA4-998
ccugaagcuuugaaaugugu

SEQ ID NO: 48017 - RNA, 21 nt, Artificial Sequence
  Synthetic oligonucleotide: CTLA4-2541
uccugaagcuuugaaaugugu

SEQ ID NO: 48018 - RNA, 22 nt, Artificial Sequence
  Synthetic oligonucleotide: CTLA4-2542
auccugaagcuuugaaaugugu

SEQ ID NO: 48019 - RNA, 23 nt, Artificial Sequence
  Synthetic oligonucleotide: CTLA4-2543
gauccugaagcuuugaaaugugu

SEQ ID NO: 48020 - RNA, 24 nt, Artificial Sequence
  Synthetic oligonucleotide: CTLA4-2544
ggauccugaagcuuugaaaugugu

SEQ ID NO: 48021 - RNA, 18 nt, Artificial Sequence
  Synthetic oligonucleotide: CTLA4-2545
ccaauuuuauucaaucuu

SEQ ID NO: 48022 - RNA, 19 nt, Artificial Sequence
  Synthetic oligonucleotide: CTLA4-2546
cccaauuuuauucaaucuu

SEQ ID NO: 48023 - RNA, 20 nt, Artificial Sequence
  Synthetic oligonucleotide: CTLA4-969
ucccaauuuuauucaaucuu

SEQ ID NO: 48024 - RNA, 21 nt, Artificial Sequence
  Synthetic oligonucleotide: CTLA4-2547
aucccaauuuuauucaaucuu

SEQ ID NO: 48025 - RNA, 22 nt, Artificial Sequence
  Synthetic oligonucleotide: CTLA4-2548
aaucccaauuuuauucaaucuu

SEQ ID NO: 48026 - RNA, 23 nt, Artificial Sequence
  Synthetic oligonucleotide: CTLA4-2549
aaaucccaauuuuauucaaucuu

SEQ ID NO: 48027 - RNA, 24 nt, Artificial Sequence
  Synthetic oligonucleotide: CTLA4-2550
uaaaucccaauuuuauucaaucuu

SEQ ID NO: 48028 - RNA, 18 nt, Artificial Sequence
  Synthetic oligonucleotide: CTLA4-2551
gagcgguguucaggucuu

SEQ ID NO: 48029 - RNA, 19 nt, Artificial Sequence
  Synthetic oligonucleotide: CTLA4-2552
ggagcgguguucaggucuu

SEQ ID NO: 48030 - RNA, 20 nt, Artificial Sequence
  Synthetic oligonucleotide: CTLA4-1004
gggagcgguguucaggucuu

SEQ ID NO: 48031 - RNA, 21 nt, Artificial Sequence
  Synthetic oligonucleotide: CTLA4-2553
ugggagcgguguucaggucuu

SEQ ID NO: 48032 - RNA, 22 nt, Artificial Sequence
  Synthetic oligonucleotide: CTLA4-2554
augggagcgguguucaggucuu

SEQ ID NO: 48033 - RNA, 23 nt, Artificial Sequence
  Synthetic oligonucleotide: CTLA4-2555
uaugggagcgguguucaggucuu

SEQ ID NO: 48034 - RNA, 24 nt, Artificial Sequence
  Synthetic oligonucleotide: CTLA4-2556
uuaugggagcgguguucaggucuu

SEQ ID NO: 48035 - RNA, 18 nt, Artificial Sequence
  Synthetic oligonucleotide: CTLA4-2557
uccauuuagcauuugguu

SEQ ID NO: 48036 - RNA, 19 nt, Artificial Sequence
  Synthetic oligonucleotide: CTLA4-2558
auccauuuagcauuugguu

SEQ ID NO: 48037 - RNA, 20 nt, Artificial Sequence
  Synthetic oligonucleotide: CTLA4-1248
aauccauuuagcauuugguu

SEQ ID NO: 48038 - RNA, 21 nt, Artificial Sequence
  Synthetic oligonucleotide: CTLA4-2559
aaauccauuuagcauuugguu

SEQ ID NO: 48039 - RNA, 22 nt, Artificial Sequence
  Synthetic oligonucleotide: CTLA4-2560
uaaauccauuuagcauuugguu

SEQ ID NO: 48040 - RNA, 23 nt, Artificial Sequence
  Synthetic oligonucleotide: CTLA4-2561
cuaaauccauuuagcauuugguu

SEQ ID NO: 48041 - RNA, 24 nt, Artificial Sequence
  Synthetic oligonucleotide: CTLA4-2562
ccuaaauccauuuagcauuugguu

SEQ ID NO: 48042 - RNA, 18 nt, Artificial Sequence
  Synthetic oligonucleotide: CTLA4-2563
aauaccuggcgcucuguu

SEQ ID NO: 48043 - RNA, 19 nt, Artificial Sequence
  Synthetic oligonucleotide: CTLA4-2564
aaauaccuggcgcucuguu

SEQ ID NO: 48044 - RNA, 20 nt, Artificial Sequence
  Synthetic oligonucleotide: CTLA4-1031
uaaauaccuggcgcucuguu

SEQ ID NO: 48045 - RNA, 21 nt, Artificial Sequence
  Synthetic oligonucleotide: CTLA4-2565
cuaaauaccuggcgcucuguu

SEQ ID NO: 48046 - RNA, 22 nt, Artificial Sequence
  Synthetic oligonucleotide: CTLA4-2566
acuaaauaccuggcgcucuguu

SEQ ID NO: 48047 - RNA, 23 nt, Artificial Sequence
  Synthetic oligonucleotide: CTLA4-2567
uacuaaauaccuggcgcucuguu

SEQ ID NO: 48048 - RNA, 24 nt, Artificial Sequence
  Synthetic oligonucleotide: CTLA4-2568
cuacuaaauaccuggcgcucuguu

SEQ ID NO: 48049 - RNA, 18 nt, Artificial Sequence
  Synthetic oligonucleotide: CTLA4-2569
uacuaggcugcuaacuuu

SEQ ID NO: 48050 - RNA, 19 nt, Artificial Sequence
  Synthetic oligonucleotide: CTLA4-2570
cuacuaggcugcuaacuuu

SEQ ID NO: 48051 - RNA, 20 nt, Artificial Sequence
  Synthetic oligonucleotide: CTLA4-968
acuacuaggcugcuaacuuu

SEQ ID NO: 48052 - RNA, 21 nt, Artificial Sequence
  Synthetic oligonucleotide: CTLA4-2571
aacuacuaggcugcuaacuuu

SEQ ID NO: 48053 - RNA, 22 nt, Artificial Sequence
  Synthetic oligonucleotide: CTLA4-2572
aaacuacuaggcugcuaacuuu

SEQ ID NO: 48054 - RNA, 23 nt, Artificial Sequence
  Synthetic oligonucleotide: CTLA4-2573
aaaacuacuaggcugcuaacuuu

SEQ ID NO: 48055 - RNA, 24 nt, Artificial Sequence
  Synthetic oligonucleotide: CTLA4-2574
caaaacuacuaggcugcuaacuuu

SEQ ID NO: 48056 - RNA, 18 nt, Artificial Sequence
  Synthetic oligonucleotide: CTLA4-1649
aaggcaagccauggcuuu

SEQ ID NO: 48057 - RNA, 19 nt, Artificial Sequence
  Synthetic oligonucleotide: CTLA4-1650
caaggcaagccauggcuuu

SEQ ID NO: 48058 - RNA, 20 nt, Artificial Sequence
  Synthetic oligonucleotide: CTLA4-278
ccaaggcaagccauggcuuu

SEQ ID NO: 48059 - RNA, 21 nt, Artificial Sequence
  Synthetic oligonucleotide: CTLA4-1651
uccaaggcaagccauggcuuu

SEQ ID NO: 48060 - RNA, 22 nt, Artificial Sequence
  Synthetic oligonucleotide: CTLA4-1652
auccaaggcaagccauggcuuu

SEQ ID NO: 48061 - RNA, 23 nt, Artificial Sequence
  Synthetic oligonucleotide: CTLA4-1653
aauccaaggcaagccauggcuuu

SEQ ID NO: 48062 - RNA, 24 nt, Artificial Sequence
  Synthetic oligonucleotide: CTLA4-1654
aaauccaaggcaagccauggcuuu

SEQ ID NO: 48063 - RNA, 18 nt, Artificial Sequence
  Synthetic oligonucleotide: CTLA4-2575
ccuuuuuguuuugguuuu

SEQ ID NO: 48064 - RNA, 19 nt, Artificial Sequence
  Synthetic oligonucleotide: CTLA4-2576
gccuuuuuguuuugguuuu

SEQ ID NO: 48065 - RNA, 20 nt, Artificial Sequence
  Synthetic oligonucleotide: CTLA4-992
agccuuuuuguuuugguuuu

SEQ ID NO: 48066 - RNA, 21 nt, Artificial Sequence
  Synthetic oligonucleotide: CTLA4-2577
aagccuuuuuguuuugguuuu

SEQ ID NO: 48067 - RNA, 22 nt, Artificial Sequence
  Synthetic oligonucleotide: CTLA4-2578
aaagccuuuuuguuuugguuuu

SEQ ID NO: 48068 - RNA, 23 nt, Artificial Sequence
  Synthetic oligonucleotide: CTLA4-2579
gaaagccuuuuuguuuugguuuu

SEQ ID NO: 48069 - RNA, 24 nt, Artificial Sequence
  Synthetic oligonucleotide: CTLA4-2580
agaaagccuuuuuguuuugguuuu

SEQ ID NO: 48070 - RNA, 18 nt, Artificial Sequence
  Synthetic oligonucleotide: CTLA4-2581
ccagaagauugaauaaaa

SEQ ID NO: 48071 - RNA, 19 nt, Artificial Sequence
  Synthetic oligonucleotide: CTLA4-2582
cccagaagauugaauaaaa

SEQ ID NO: 48072 - RNA, 20 nt, Artificial Sequence
  Synthetic oligonucleotide: CTLA4-833
gcccagaagauugaauaaaa

SEQ ID NO: 48073 - RNA, 21 nt, Artificial Sequence
  Synthetic oligonucleotide: CTLA4-2583
ugcccagaagauugaauaaaa

SEQ ID NO: 48074 - RNA, 22 nt, Artificial Sequence
  Synthetic oligonucleotide: CTLA4-2584
augcccagaagauugaauaaaa

SEQ ID NO: 48075 - RNA, 23 nt, Artificial Sequence
  Synthetic oligonucleotide: CTLA4-2585
gaugcccagaagauugaauaaaa

SEQ ID NO: 48076 - RNA, 24 nt, Artificial Sequence
  Synthetic oligonucleotide: CTLA4-2586
ggaugcccagaagauugaauaaaa

SEQ ID NO: 48077 - RNA, 18 nt, Artificial Sequence
  Synthetic oligonucleotide: CTLA4-2587
guuauccagauccucaaa

SEQ ID NO: 48078 - RNA, 19 nt, Artificial Sequence
  Synthetic oligonucleotide: CTLA4-2588
aguuauccagauccucaaa

SEQ ID NO: 48079 - RNA, 20 nt, Artificial Sequence
  Synthetic oligonucleotide: CTLA4-840
uaguuauccagauccucaaa

SEQ ID NO: 48080 - RNA, 21 nt, Artificial Sequence
  Synthetic oligonucleotide: CTLA4-2589
uuaguuauccagauccucaaa

SEQ ID NO: 48081 - RNA, 22 nt, Artificial Sequence
  Synthetic oligonucleotide: CTLA4-2590
cuuaguuauccagauccucaaa

SEQ ID NO: 48082 - RNA, 23 nt, Artificial Sequence
  Synthetic oligonucleotide: CTLA4-2591
acuuaguuauccagauccucaaa

SEQ ID NO: 48083 - RNA, 24 nt, Artificial Sequence
  Synthetic oligonucleotide: CTLA4-2592
cacuuaguuauccagauccucaaa

SEQ ID NO: 48084 - RNA, 18 nt, Artificial Sequence
  Synthetic oligonucleotide: CTLA4-2593
caaagagauagcucagaa

SEQ ID NO: 48085 - RNA, 19 nt, Artificial Sequence
  Synthetic oligonucleotide: CTLA4-2594
gcaaagagauagcucagaa

SEQ ID NO: 48086 - RNA, 20 nt, Artificial Sequence
  Synthetic oligonucleotide: CTLA4-874
ggcaaagagauagcucagaa

SEQ ID NO: 48087 - RNA, 21 nt, Artificial Sequence
  Synthetic oligonucleotide: CTLA4-2595
aggcaaagagauagcucagaa

SEQ ID NO: 48088 - RNA, 22 nt, Artificial Sequence
  Synthetic oligonucleotide: CTLA4-2596
aaggcaaagagauagcucagaa

SEQ ID NO: 48089 - RNA, 23 nt, Artificial Sequence
  Synthetic oligonucleotide: CTLA4-2597
uaaggcaaagagauagcucagaa

SEQ ID NO: 48090 - RNA, 24 nt, Artificial Sequence
  Synthetic oligonucleotide: CTLA4-2598
auaaggcaaagagauagcucagaa

SEQ ID NO: 48091 - RNA, 18 nt, Artificial Sequence
  Synthetic oligonucleotide: CTLA4-2599
aguugucaaugaaaugaa

SEQ ID NO: 48092 - RNA, 19 nt, Artificial Sequence
  Synthetic oligonucleotide: CTLA4-2600
gaguugucaaugaaaugaa

SEQ ID NO: 48093 - RNA, 20 nt, Artificial Sequence
  Synthetic oligonucleotide: CTLA4-828
ggaguugucaaugaaaugaa

SEQ ID NO: 48094 - RNA, 21 nt, Artificial Sequence
  Synthetic oligonucleotide: CTLA4-2601
uggaguugucaaugaaaugaa

SEQ ID NO: 48095 - RNA, 22 nt, Artificial Sequence
  Synthetic oligonucleotide: CTLA4-2602
uuggaguugucaaugaaaugaa

SEQ ID NO: 48096 - RNA, 23 nt, Artificial Sequence
  Synthetic oligonucleotide: CTLA4-2603
uuuggaguugucaaugaaaugaa

SEQ ID NO: 48097 - RNA, 24 nt, Artificial Sequence
  Synthetic oligonucleotide: CTLA4-2604
uuuuggaguugucaaugaaaugaa

SEQ ID NO: 48098 - RNA, 18 nt, Artificial Sequence
  Synthetic oligonucleotide: CTLA4-2605
uguauuccagggccagca

SEQ ID NO: 48099 - RNA, 19 nt, Artificial Sequence
  Synthetic oligonucleotide: CTLA4-2606
cuguauuccagggccagca

SEQ ID NO: 48100 - RNA, 20 nt, Artificial Sequence
  Synthetic oligonucleotide: CTLA4-505
ucuguauuccagggccagca

SEQ ID NO: 48101 - RNA, 21 nt, Artificial Sequence
  Synthetic oligonucleotide: CTLA4-2607
cucuguauuccagggccagca

SEQ ID NO: 48102 - RNA, 22 nt, Artificial Sequence
  Synthetic oligonucleotide: CTLA4-2608
gcucuguauuccagggccagca

SEQ ID NO: 48103 - RNA, 23 nt, Artificial Sequence
  Synthetic oligonucleotide: CTLA4-2609
ggcucuguauuccagggccagca

SEQ ID NO: 48104 - RNA, 24 nt, Artificial Sequence
  Synthetic oligonucleotide: CTLA4-2610
uggcucuguauuccagggccagca

SEQ ID NO: 48105 - RNA, 18 nt, Artificial Sequence
  Synthetic oligonucleotide: CTLA4-2611
gcggcagcaaauaaggca

SEQ ID NO: 48106 - RNA, 19 nt, Artificial Sequence
  Synthetic oligonucleotide: CTLA4-2612
ggcggcagcaaauaaggca

SEQ ID NO: 48107 - RNA, 20 nt, Artificial Sequence
  Synthetic oligonucleotide: CTLA4-872
gggcggcagcaaauaaggca

SEQ ID NO: 48108 - RNA, 21 nt, Artificial Sequence
  Synthetic oligonucleotide: CTLA4-2613
ugggcggcagcaaauaaggca

SEQ ID NO: 48109 - RNA, 22 nt, Artificial Sequence
  Synthetic oligonucleotide: CTLA4-2614
uugggcggcagcaaauaaggca

SEQ ID NO: 48110 - RNA, 23 nt, Artificial Sequence
  Synthetic oligonucleotide: CTLA4-2615
guugggcggcagcaaauaaggca

SEQ ID NO: 48111 - RNA, 24 nt, Artificial Sequence
  Synthetic oligonucleotide: CTLA4-2616
aguugggcggcagcaaauaaggca

SEQ ID NO: 48112 - RNA, 18 nt, Artificial Sequence
  Synthetic oligonucleotide: CTLA4-2617
uuauuuguaaagcuguca

SEQ ID NO: 48113 - RNA, 19 nt, Artificial Sequence
  Synthetic oligonucleotide: CTLA4-2618
cuuauuuguaaagcuguca

SEQ ID NO: 48114 - RNA, 20 nt, Artificial Sequence
  Synthetic oligonucleotide: CTLA4-699
acuuauuuguaaagcuguca

SEQ ID NO: 48115 - RNA, 21 nt, Artificial Sequence
  Synthetic oligonucleotide: CTLA4-2619
aacuuauuuguaaagcuguca

SEQ ID NO: 48116 - RNA, 22 nt, Artificial Sequence
  Synthetic oligonucleotide: CTLA4-2620
aaacuuauuuguaaagcuguca

SEQ ID NO: 48117 - RNA, 23 nt, Artificial Sequence
  Synthetic oligonucleotide: CTLA4-2621
uaaacuuauuuguaaagcuguca

SEQ ID NO: 48118 - RNA, 24 nt, Artificial Sequence
  Synthetic oligonucleotide: CTLA4-2622
auaaacuuauuuguaaagcuguca

SEQ ID NO: 48119 - RNA, 18 nt, Artificial Sequence
  Synthetic oligonucleotide: CTLA4-2623
guaguuuuggaguuguca

SEQ ID NO: 48120 - RNA, 19 nt, Artificial Sequence
  Synthetic oligonucleotide: CTLA4-2624
aguaguuuuggaguuguca

SEQ ID NO: 48121 - RNA, 20 nt, Artificial Sequence
  Synthetic oligonucleotide: CTLA4-826
uaguaguuuuggaguuguca

SEQ ID NO: 48122 - RNA, 21 nt, Artificial Sequence
  Synthetic oligonucleotide: CTLA4-2625
cuaguaguuuuggaguuguca

SEQ ID NO: 48123 - RNA, 22 nt, Artificial Sequence
  Synthetic oligonucleotide: CTLA4-2626
ccuaguaguuuuggaguuguca

SEQ ID NO: 48124 - RNA, 23 nt, Artificial Sequence
  Synthetic oligonucleotide: CTLA4-2627
gccuaguaguuuuggaguuguca

SEQ ID NO: 48125 - RNA, 24 nt, Artificial Sequence
  Synthetic oligonucleotide: CTLA4-2628
agccuaguaguuuuggaguuguca

SEQ ID NO: 48126 - RNA, 18 nt, Artificial Sequence
  Synthetic oligonucleotide: CTLA4-2629
acuuuuggagcaugaaga

SEQ ID NO: 48127 - RNA, 19 nt, Artificial Sequence
  Synthetic oligonucleotide: CTLA4-2630
gacuuuuggagcaugaaga

SEQ ID NO: 48128 - RNA, 20 nt, Artificial Sequence
  Synthetic oligonucleotide: CTLA4-10
agacuuuuggagcaugaaga

SEQ ID NO: 48129 - RNA, 21 nt, Artificial Sequence
  Synthetic oligonucleotide: CTLA4-2631
gagacuuuuggagcaugaaga

SEQ ID NO: 48130 - RNA, 22 nt, Artificial Sequence
  Synthetic oligonucleotide: CTLA4-2632
ugagacuuuuggagcaugaaga

SEQ ID NO: 48131 - RNA, 23 nt, Artificial Sequence
  Synthetic oligonucleotide: CTLA4-2633
gugagacuuuuggagcaugaaga

SEQ ID NO: 48132 - RNA, 24 nt, Artificial Sequence
  Synthetic oligonucleotide: CTLA4-2634
agugagacuuuuggagcaugaaga

SEQ ID NO: 48133 - RNA, 18 nt, Artificial Sequence
  Synthetic oligonucleotide: CTLA4-1703
ugucuucugcaaagguga

SEQ ID NO: 48134 - RNA, 19 nt, Artificial Sequence
  Synthetic oligonucleotide: CTLA4-1704
cugucuucugcaaagguga

SEQ ID NO: 48135 - RNA, 20 nt, Artificial Sequence
  Synthetic oligonucleotide: CTLA4-220
ccugucuucugcaaagguga

SEQ ID NO: 48136 - RNA, 21 nt, Artificial Sequence
  Synthetic oligonucleotide: CTLA4-1705
cccugucuucugcaaagguga

SEQ ID NO: 48137 - RNA, 22 nt, Artificial Sequence
  Synthetic oligonucleotide: CTLA4-1706
ucccugucuucugcaaagguga

SEQ ID NO: 48138 - RNA, 23 nt, Artificial Sequence
  Synthetic oligonucleotide: CTLA4-1707
aucccugucuucugcaaagguga

SEQ ID NO: 48139 - RNA, 24 nt, Artificial Sequence
  Synthetic oligonucleotide: CTLA4-1708
caucccugucuucugcaaagguga

SEQ ID NO: 48140 - RNA, 18 nt, Artificial Sequence
  Synthetic oligonucleotide: CTLA4-2635
cagauccucaaagugaac

SEQ ID NO: 48141 - RNA, 19 nt, Artificial Sequence
  Synthetic oligonucleotide: CTLA4-2636
ccagauccucaaagugaac

SEQ ID NO: 48142 - RNA, 20 nt, Artificial Sequence
  Synthetic oligonucleotide: CTLA4-841
uccagauccucaaagugaac

SEQ ID NO: 48143 - RNA, 21 nt, Artificial Sequence
  Synthetic oligonucleotide: CTLA4-2637
auccagauccucaaagugaac

SEQ ID NO: 48144 - RNA, 22 nt, Artificial Sequence
  Synthetic oligonucleotide: CTLA4-2638
uauccagauccucaaagugaac

SEQ ID NO: 48145 - RNA, 23 nt, Artificial Sequence
  Synthetic oligonucleotide: CTLA4-2639
uuauccagauccucaaagugaac

SEQ ID NO: 48146 - RNA, 24 nt, Artificial Sequence
  Synthetic oligonucleotide: CTLA4-2640
guuauccagauccucaaagugaac

SEQ ID NO: 48147 - RNA, 18 nt, Artificial Sequence
  Synthetic oligonucleotide: CTLA4-2641
gcucuacuuccugaagac

SEQ ID NO: 48148 - RNA, 19 nt, Artificial Sequence
  Synthetic oligonucleotide: CTLA4-2642
ugcucuacuuccugaagac

SEQ ID NO: 48149 - RNA, 20 nt, Artificial Sequence
  Synthetic oligonucleotide: CTLA4-852
uugcucuacuuccugaagac

SEQ ID NO: 48150 - RNA, 21 nt, Artificial Sequence
  Synthetic oligonucleotide: CTLA4-2643
uuugcucuacuuccugaagac

SEQ ID NO: 48151 - RNA, 22 nt, Artificial Sequence
  Synthetic oligonucleotide: CTLA4-2644
uuuugcucuacuuccugaagac

SEQ ID NO: 48152 - RNA, 23 nt, Artificial Sequence
  Synthetic oligonucleotide: CTLA4-2645
guuuugcucuacuuccugaagac

SEQ ID NO: 48153 - RNA, 24 nt, Artificial Sequence
  Synthetic oligonucleotide: CTLA4-2646
gguuuugcucuacuuccugaagac

SEQ ID NO: 48154 - RNA, 18 nt, Artificial Sequence
  Synthetic oligonucleotide: CTLA4-1728
ucagcugaaccuggcuac

SEQ ID NO: 48155 - RNA, 19 nt, Artificial Sequence
  Synthetic oligonucleotide: CTLA4-1729
cucagcugaaccuggcuac

SEQ ID NO: 48156 - RNA, 20 nt, Artificial Sequence
  Synthetic oligonucleotide: CTLA4-218
gcucagcugaaccuggcuac

SEQ ID NO: 48157 - RNA, 21 nt, Artificial Sequence
  Synthetic oligonucleotide: CTLA4-1730
ggcucagcugaaccuggcuac

SEQ ID NO: 48158 - RNA, 22 nt, Artificial Sequence
  Synthetic oligonucleotide: CTLA4-1731
aggcucagcugaaccuggcuac

SEQ ID NO: 48159 - RNA, 23 nt, Artificial Sequence
  Synthetic oligonucleotide: CTLA4-1732
aaggcucagcugaaccuggcuac

SEQ ID NO: 48160 - RNA, 24 nt, Artificial Sequence
  Synthetic oligonucleotide: CTLA4-1733
caaggcucagcugaaccuggcuac

SEQ ID NO: 48161 - RNA, 18 nt, Artificial Sequence
  Synthetic oligonucleotide: CTLA4-2647
aaauccugccauuagccc

SEQ ID NO: 48162 - RNA, 19 nt, Artificial Sequence
  Synthetic oligonucleotide: CTLA4-2648
caaauccugccauuagccc

SEQ ID NO: 48163 - RNA, 20 nt, Artificial Sequence
  Synthetic oligonucleotide: CTLA4-822
acaaauccugccauuagccc

SEQ ID NO: 48164 - RNA, 21 nt, Artificial Sequence
  Synthetic oligonucleotide: CTLA4-2649
gacaaauccugccauuagccc

SEQ ID NO: 48165 - RNA, 22 nt, Artificial Sequence
  Synthetic oligonucleotide: CTLA4-2650
agacaaauccugccauuagccc

SEQ ID NO: 48166 - RNA, 23 nt, Artificial Sequence
  Synthetic oligonucleotide: CTLA4-2651
uagacaaauccugccauuagccc

SEQ ID NO: 48167 - RNA, 24 nt, Artificial Sequence
  Synthetic oligonucleotide: CTLA4-2652
cuagacaaauccugccauuagccc

SEQ ID NO: 48168 - RNA, 18 nt, Artificial Sequence
  Synthetic oligonucleotide: CTLA4-2653
uggaugguuaaggaugcc

SEQ ID NO: 48169 - RNA, 19 nt, Artificial Sequence
  Synthetic oligonucleotide: CTLA4-2654
cuggaugguuaaggaugcc

SEQ ID NO: 48170 - RNA, 20 nt, Artificial Sequence
  Synthetic oligonucleotide: CTLA4-831
acuggaugguuaaggaugcc

SEQ ID NO: 48171 - RNA, 21 nt, Artificial Sequence
  Synthetic oligonucleotide: CTLA4-2655
gacuggaugguuaaggaugcc

SEQ ID NO: 48172 - RNA, 22 nt, Artificial Sequence
  Synthetic oligonucleotide: CTLA4-2656
ggacuggaugguuaaggaugcc

SEQ ID NO: 48173 - RNA, 23 nt, Artificial Sequence
  Synthetic oligonucleotide: CTLA4-2657
uggacuggaugguuaaggaugcc

SEQ ID NO: 48174 - RNA, 24 nt, Artificial Sequence
  Synthetic oligonucleotide: CTLA4-2658
uuggacuggaugguuaaggaugcc

SEQ ID NO: 48175 - RNA, 18 nt, Artificial Sequence
  Synthetic oligonucleotide: CTLA4-2659
ggaggacccuuguacucc

SEQ ID NO: 48176 - RNA, 19 nt, Artificial Sequence
  Synthetic oligonucleotide: CTLA4-2660
aggaggacccuuguacucc

SEQ ID NO: 48177 - RNA, 20 nt, Artificial Sequence
  Synthetic oligonucleotide: CTLA4-471
uaggaggacccuuguacucc

SEQ ID NO: 48178 - RNA, 21 nt, Artificial Sequence
  Synthetic oligonucleotide: CTLA4-2661
uuaggaggacccuuguacucc

SEQ ID NO: 48179 - RNA, 22 nt, Artificial Sequence
  Synthetic oligonucleotide: CTLA4-2662
uuuaggaggacccuuguacucc

SEQ ID NO: 48180 - RNA, 23 nt, Artificial Sequence
  Synthetic oligonucleotide: CTLA4-2663
auuuaggaggacccuuguacucc

SEQ ID NO: 48181 - RNA, 24 nt, Artificial Sequence
  Synthetic oligonucleotide: CTLA4-2664
gauuuaggaggacccuuguacucc

SEQ ID NO: 48182 - RNA, 18 nt, Artificial Sequence
  Synthetic oligonucleotide: CTLA4-2665
agugauuuauagcaaagc

SEQ ID NO: 48183 - RNA, 19 nt, Artificial Sequence
  Synthetic oligonucleotide: CTLA4-2666
cagugauuuauagcaaagc

SEQ ID NO: 48184 - RNA, 20 nt, Artificial Sequence
  Synthetic oligonucleotide: CTLA4-866
gcagugauuuauagcaaagc

SEQ ID NO: 48185 - RNA, 21 nt, Artificial Sequence
  Synthetic oligonucleotide: CTLA4-2667
ggcagugauuuauagcaaagc

SEQ ID NO: 48186 - RNA, 22 nt, Artificial Sequence
  Synthetic oligonucleotide: CTLA4-2668
aggcagugauuuauagcaaagc

SEQ ID NO: 48187 - RNA, 23 nt, Artificial Sequence
  Synthetic oligonucleotide: CTLA4-2669
aaggcagugauuuauagcaaagc

SEQ ID NO: 48188 - RNA, 24 nt, Artificial Sequence
  Synthetic oligonucleotide: CTLA4-2670
aaaggcagugauuuauagcaaagc

SEQ ID NO: 48189 - RNA, 18 nt, Artificial Sequence
  Synthetic oligonucleotide: CTLA4-2671
cuguauuccagggccagc

SEQ ID NO: 48190 - RNA, 19 nt, Artificial Sequence
  Synthetic oligonucleotide: CTLA4-2672
ucuguauuccagggccagc

SEQ ID NO: 48191 - RNA, 20 nt, Artificial Sequence
  Synthetic oligonucleotide: CTLA4-504
cucuguauuccagggccagc

SEQ ID NO: 48192 - RNA, 21 nt, Artificial Sequence
  Synthetic oligonucleotide: CTLA4-2673
gcucuguauuccagggccagc

SEQ ID NO: 48193 - RNA, 22 nt, Artificial Sequence
  Synthetic oligonucleotide: CTLA4-2674
ggcucuguauuccagggccagc

SEQ ID NO: 48194 - RNA, 23 nt, Artificial Sequence
  Synthetic oligonucleotide: CTLA4-2675
uggcucuguauuccagggccagc

SEQ ID NO: 48195 - RNA, 24 nt, Artificial Sequence
  Synthetic oligonucleotide: CTLA4-2676
cuggcucuguauuccagggccagc

SEQ ID NO: 48196 - RNA, 18 nt, Artificial Sequence
  Synthetic oligonucleotide: CTLA4-1746
gagugagacuuuuggagc

SEQ ID NO: 48197 - RNA, 19 nt, Artificial Sequence
  Synthetic oligonucleotide: CTLA4-1747
ugagugagacuuuuggagc

SEQ ID NO: 48198 - RNA, 20 nt, Artificial Sequence
  Synthetic oligonucleotide: CTLA4-223
gugagugagacuuuuggagc

SEQ ID NO: 48199 - RNA, 21 nt, Artificial Sequence
  Synthetic oligonucleotide: CTLA4-1748
ggugagugagacuuuuggagc

SEQ ID NO: 48200 - RNA, 22 nt, Artificial Sequence
  Synthetic oligonucleotide: CTLA4-1749
aggugagugagacuuuuggagc

SEQ ID NO: 48201 - RNA, 23 nt, Artificial Sequence
  Synthetic oligonucleotide: CTLA4-1750
aaggugagugagacuuuuggagc

SEQ ID NO: 48202 - RNA, 24 nt, Artificial Sequence
  Synthetic oligonucleotide: CTLA4-1751
aaaggugagugagacuuuuggagc

SEQ ID NO: 48203 - RNA, 18 nt, Artificial Sequence
  Synthetic oligonucleotide: CTLA4-2677
uuuuguucaguugagugc

SEQ ID NO: 48204 - RNA, 19 nt, Artificial Sequence
  Synthetic oligonucleotide: CTLA4-2678
guuuuguucaguugagugc

SEQ ID NO: 48205 - RNA, 20 nt, Artificial Sequence
  Synthetic oligonucleotide: CTLA4-845
uguuuuguucaguugagugc

SEQ ID NO: 48206 - RNA, 21 nt, Artificial Sequence
  Synthetic oligonucleotide: CTLA4-2679
uuguuuuguucaguugagugc

SEQ ID NO: 48207 - RNA, 22 nt, Artificial Sequence
  Synthetic oligonucleotide: CTLA4-2680
cuuguuuuguucaguugagugc

SEQ ID NO: 48208 - RNA, 23 nt, Artificial Sequence
  Synthetic oligonucleotide: CTLA4-2681
gcuuguuuuguucaguugagugc

SEQ ID NO: 48209 - RNA, 24 nt, Artificial Sequence
  Synthetic oligonucleotide: CTLA4-2682
ggcuuguuuuguucaguugagugc

SEQ ID NO: 48210 - RNA, 18 nt, Artificial Sequence
  Synthetic oligonucleotide: CTLA4-2683
uuucaaagcuucaggauc

SEQ ID NO: 48211 - RNA, 19 nt, Artificial Sequence
  Synthetic oligonucleotide: CTLA4-2684
auuucaaagcuucaggauc

SEQ ID NO: 48212 - RNA, 20 nt, Artificial Sequence
  Synthetic oligonucleotide: CTLA4-850
cauuucaaagcuucaggauc

SEQ ID NO: 48213 - RNA, 21 nt, Artificial Sequence
  Synthetic oligonucleotide: CTLA4-2685
acauuucaaagcuucaggauc

SEQ ID NO: 48214 - RNA, 22 nt, Artificial Sequence
  Synthetic oligonucleotide: CTLA4-2686
cacauuucaaagcuucaggauc

SEQ ID NO: 48215 - RNA, 23 nt, Artificial Sequence
  Synthetic oligonucleotide: CTLA4-2687
acacauuucaaagcuucaggauc

SEQ ID NO: 48216 - RNA, 24 nt, Artificial Sequence
  Synthetic oligonucleotide: CTLA4-2688
aacacauuucaaagcuucaggauc

SEQ ID NO: 48217 - RNA, 18 nt, Artificial Sequence
  Synthetic oligonucleotide: CTLA4-2689
aggaggacccuuguacuc

SEQ ID NO: 48218 - RNA, 19 nt, Artificial Sequence
  Synthetic oligonucleotide: CTLA4-2690
uaggaggacccuuguacuc

SEQ ID NO: 48219 - RNA, 20 nt, Artificial Sequence
  Synthetic oligonucleotide: CTLA4-838
uuaggaggacccuuguacuc

SEQ ID NO: 48220 - RNA, 21 nt, Artificial Sequence
  Synthetic oligonucleotide: CTLA4-2691
uuuaggaggacccuuguacuc

SEQ ID NO: 48221 - RNA, 22 nt, Artificial Sequence
  Synthetic oligonucleotide: CTLA4-2692
auuuaggaggacccuuguacuc

SEQ ID NO: 48222 - RNA, 23 nt, Artificial Sequence
  Synthetic oligonucleotide: CTLA4-2693
gauuuaggaggacccuuguacuc

SEQ ID NO: 48223 - RNA, 24 nt, Artificial Sequence
  Synthetic oligonucleotide: CTLA4-2694
ggauuuaggaggacccuuguacuc

SEQ ID NO: 48224 - RNA, 18 nt, Artificial Sequence
  Synthetic oligonucleotide: CTLA4-2695
cuuauuuguaaagcuguc

SEQ ID NO: 48225 - RNA, 19 nt, Artificial Sequence
  Synthetic oligonucleotide: CTLA4-2696
acuuauuuguaaagcuguc

SEQ ID NO: 48226 - RNA, 20 nt, Artificial Sequence
  Synthetic oligonucleotide: CTLA4-1134
aacuuauuuguaaagcuguc

SEQ ID NO: 48227 - RNA, 21 nt, Artificial Sequence
  Synthetic oligonucleotide: CTLA4-2697
aaacuuauuuguaaagcuguc

SEQ ID NO: 48228 - RNA, 22 nt, Artificial Sequence
  Synthetic oligonucleotide: CTLA4-2698
uaaacuuauuuguaaagcuguc

SEQ ID NO: 48229 - RNA, 23 nt, Artificial Sequence
  Synthetic oligonucleotide: CTLA4-2699
auaaacuuauuuguaaagcuguc

SEQ ID NO: 48230 - RNA, 24 nt, Artificial Sequence
  Synthetic oligonucleotide: CTLA4-2700
aauaaacuuauuuguaaagcuguc

SEQ ID NO: 48231 - RNA, 18 nt, Artificial Sequence
  Synthetic oligonucleotide: CTLA4-2701
uuggcuggcucuguauuc

SEQ ID NO: 48232 - RNA, 19 nt, Artificial Sequence
  Synthetic oligonucleotide: CTLA4-2702
cuuggcuggcucuguauuc

SEQ ID NO: 48233 - RNA, 20 nt, Artificial Sequence
  Synthetic oligonucleotide: CTLA4-867
gcuuggcuggcucuguauuc

SEQ ID NO: 48234 - RNA, 21 nt, Artificial Sequence
  Synthetic oligonucleotide: CTLA4-2703
ggcuuggcuggcucuguauuc

SEQ ID NO: 48235 - RNA, 22 nt, Artificial Sequence
  Synthetic oligonucleotide: CTLA4-2704
uggcuuggcuggcucuguauuc

SEQ ID NO: 48236 - RNA, 23 nt, Artificial Sequence
  Synthetic oligonucleotide: CTLA4-2705
cuggcuuggcuggcucuguauuc

SEQ ID NO: 48237 - RNA, 24 nt, Artificial Sequence
  Synthetic oligonucleotide: CTLA4-2706
ucuggcuuggcuggcucuguauuc

SEQ ID NO: 48238 - RNA, 18 nt, Artificial Sequence
  Synthetic oligonucleotide: CTLA4-2707
aagguuuugcucuacuuc

SEQ ID NO: 48239 - RNA, 19 nt, Artificial Sequence
  Synthetic oligonucleotide: CTLA4-2708
aaagguuuugcucuacuuc

SEQ ID NO: 48240 - RNA, 20 nt, Artificial Sequence
  Synthetic oligonucleotide: CTLA4-851
gaaagguuuugcucuacuuc

SEQ ID NO: 48241 - RNA, 21 nt, Artificial Sequence
  Synthetic oligonucleotide: CTLA4-2709
ugaaagguuuugcucuacuuc

SEQ ID NO: 48242 - RNA, 22 nt, Artificial Sequence
  Synthetic oligonucleotide: CTLA4-2710
cugaaagguuuugcucuacuuc

SEQ ID NO: 48243 - RNA, 23 nt, Artificial Sequence
  Synthetic oligonucleotide: CTLA4-2711
ccugaaagguuuugcucuacuuc

SEQ ID NO: 48244 - RNA, 24 nt, Artificial Sequence
  Synthetic oligonucleotide: CTLA4-2712
uccugaaagguuuugcucuacuuc

SEQ ID NO: 48245 - RNA, 18 nt, Artificial Sequence
  Synthetic oligonucleotide: CTLA4-2713
gacuuuuggagcaugaag

SEQ ID NO: 48246 - RNA, 19 nt, Artificial Sequence
  Synthetic oligonucleotide: CTLA4-2714
agacuuuuggagcaugaag

SEQ ID NO: 48247 - RNA, 20 nt, Artificial Sequence
  Synthetic oligonucleotide: CTLA4-861
gagacuuuuggagcaugaag

SEQ ID NO: 48248 - RNA, 21 nt, Artificial Sequence
  Synthetic oligonucleotide: CTLA4-2715
ugagacuuuuggagcaugaag

SEQ ID NO: 48249 - RNA, 22 nt, Artificial Sequence
  Synthetic oligonucleotide: CTLA4-2716
gugagacuuuuggagcaugaag

SEQ ID NO: 48250 - RNA, 23 nt, Artificial Sequence
  Synthetic oligonucleotide: CTLA4-2717
agugagacuuuuggagcaugaag

SEQ ID NO: 48251 - RNA, 24 nt, Artificial Sequence
  Synthetic oligonucleotide: CTLA4-2718
gagugagacuuuuggagcaugaag

SEQ ID NO: 48252 - RNA, 18 nt, Artificial Sequence
  Synthetic oligonucleotide: CTLA4-2719
ucuguauuccagggccag

SEQ ID NO: 48253 - RNA, 19 nt, Artificial Sequence
  Synthetic oligonucleotide: CTLA4-2720
cucuguauuccagggccag

SEQ ID NO: 48254 - RNA, 20 nt, Artificial Sequence
  Synthetic oligonucleotide: CTLA4-868
gcucuguauuccagggccag

SEQ ID NO: 48255 - RNA, 21 nt, Artificial Sequence
  Synthetic oligonucleotide: CTLA4-2721
ggcucuguauuccagggccag

SEQ ID NO: 48256 - RNA, 22 nt, Artificial Sequence
  Synthetic oligonucleotide: CTLA4-2722
uggcucuguauuccagggccag

SEQ ID NO: 48257 - RNA, 23 nt, Artificial Sequence
  Synthetic oligonucleotide: CTLA4-2723
cuggcucuguauuccagggccag

SEQ ID NO: 48258 - RNA, 24 nt, Artificial Sequence
  Synthetic oligonucleotide: CTLA4-2724
gcuggcucuguauuccagggccag

SEQ ID NO: 48259 - RNA, 18 nt, Artificial Sequence
  Synthetic oligonucleotide: CTLA4-2725
agggccagcagggagcag

SEQ ID NO: 48260 - RNA, 19 nt, Artificial Sequence
  Synthetic oligonucleotide: CTLA4-2726
cagggccagcagggagcag

SEQ ID NO: 48261 - RNA, 20 nt, Artificial Sequence
  Synthetic oligonucleotide: CTLA4-871
ccagggccagcagggagcag

SEQ ID NO: 48262 - RNA, 21 nt, Artificial Sequence
  Synthetic oligonucleotide: CTLA4-2727
uccagggccagcagggagcag

SEQ ID NO: 48263 - RNA, 22 nt, Artificial Sequence
  Synthetic oligonucleotide: CTLA4-2728
uuccagggccagcagggagcag

SEQ ID NO: 48264 - RNA, 23 nt, Artificial Sequence
  Synthetic oligonucleotide: CTLA4-2729
auuccagggccagcagggagcag

SEQ ID NO: 48265 - RNA, 24 nt, Artificial Sequence
  Synthetic oligonucleotide: CTLA4-2730
uauuccagggccagcagggagcag

SEQ ID NO: 48266 - RNA, 18 nt, Artificial Sequence
  Synthetic oligonucleotide: CTLA4-1776
cagcggcacaaggcucag

SEQ ID NO: 48267 - RNA, 19 nt, Artificial Sequence
  Synthetic oligonucleotide: CTLA4-1777
ucagcggcacaaggcucag

SEQ ID NO: 48268 - RNA, 20 nt, Artificial Sequence
  Synthetic oligonucleotide: CTLA4-217
uucagcggcacaaggcucag

SEQ ID NO: 48269 - RNA, 21 nt, Artificial Sequence
  Synthetic oligonucleotide: CTLA4-1778
uuucagcggcacaaggcucag

SEQ ID NO: 48270 - RNA, 22 nt, Artificial Sequence
  Synthetic oligonucleotide: CTLA4-1779
auuucagcggcacaaggcucag

SEQ ID NO: 48271 - RNA, 23 nt, Artificial Sequence
  Synthetic oligonucleotide: CTLA4-1780
gauuucagcggcacaaggcucag

SEQ ID NO: 48272 - RNA, 24 nt, Artificial Sequence
  Synthetic oligonucleotide: CTLA4-1781
ggauuucagcggcacaaggcucag

SEQ ID NO: 48273 - RNA, 18 nt, Artificial Sequence
  Synthetic oligonucleotide: CTLA4-2731
aauaaaauugggauuuag

SEQ ID NO: 48274 - RNA, 19 nt, Artificial Sequence
  Synthetic oligonucleotide: CTLA4-2732
gaauaaaauugggauuuag

SEQ ID NO: 48275 - RNA, 20 nt, Artificial Sequence
  Synthetic oligonucleotide: CTLA4-837
ugaauaaaauugggauuuag

SEQ ID NO: 48276 - RNA, 21 nt, Artificial Sequence
  Synthetic oligonucleotide: CTLA4-2733
uugaauaaaauugggauuuag

SEQ ID NO: 48277 - RNA, 22 nt, Artificial Sequence
  Synthetic oligonucleotide: CTLA4-2734
auugaauaaaauugggauuuag

SEQ ID NO: 48278 - RNA, 23 nt, Artificial Sequence
  Synthetic oligonucleotide: CTLA4-2735
gauugaauaaaauugggauuuag

SEQ ID NO: 48279 - RNA, 24 nt, Artificial Sequence
  Synthetic oligonucleotide: CTLA4-2736
agauugaauaaaauugggauuuag

SEQ ID NO: 48280 - RNA, 18 nt, Artificial Sequence
  Synthetic oligonucleotide: CTLA4-2737
aaugcuaaauggauuuag

SEQ ID NO: 48281 - RNA, 19 nt, Artificial Sequence
  Synthetic oligonucleotide: CTLA4-2738
aaaugcuaaauggauuuag

SEQ ID NO: 48282 - RNA, 20 nt, Artificial Sequence
  Synthetic oligonucleotide: CTLA4-1133
caaaugcuaaauggauuuag

SEQ ID NO: 48283 - RNA, 21 nt, Artificial Sequence
  Synthetic oligonucleotide: CTLA4-2739
ccaaaugcuaaauggauuuag

SEQ ID NO: 48284 - RNA, 22 nt, Artificial Sequence
  Synthetic oligonucleotide: CTLA4-2740
accaaaugcuaaauggauuuag

SEQ ID NO: 48285 - RNA, 23 nt, Artificial Sequence
  Synthetic oligonucleotide: CTLA4-2741
aaccaaaugcuaaauggauuuag

SEQ ID NO: 48286 - RNA, 24 nt, Artificial Sequence
  Synthetic oligonucleotide: CTLA4-2742
uaaccaaaugcuaaauggauuuag

SEQ ID NO: 48287 - RNA, 18 nt, Artificial Sequence
  Synthetic oligonucleotide: CTLA4-2743
agagcgccagguauuuag

SEQ ID NO: 48288 - RNA, 19 nt, Artificial Sequence
  Synthetic oligonucleotide: CTLA4-2744
cagagcgccagguauuuag

SEQ ID NO: 48289 - RNA, 20 nt, Artificial Sequence
  Synthetic oligonucleotide: CTLA4-875
acagagcgccagguauuuag

SEQ ID NO: 48290 - RNA, 21 nt, Artificial Sequence
  Synthetic oligonucleotide: CTLA4-2745
aacagagcgccagguauuuag

SEQ ID NO: 48291 - RNA, 22 nt, Artificial Sequence
  Synthetic oligonucleotide: CTLA4-2746
gaacagagcgccagguauuuag

SEQ ID NO: 48292 - RNA, 23 nt, Artificial Sequence
  Synthetic oligonucleotide: CTLA4-2747
agaacagagcgccagguauuuag

SEQ ID NO: 48293 - RNA, 24 nt, Artificial Sequence
  Synthetic oligonucleotide: CTLA4-2748
cagaacagagcgccagguauuuag

SEQ ID NO: 48294 - RNA, 18 nt, Artificial Sequence
  Synthetic oligonucleotide: CTLA4-2749
uuuggagcaugaagaugg

SEQ ID NO: 48295 - RNA, 19 nt, Artificial Sequence
  Synthetic oligonucleotide: CTLA4-2750
uuuuggagcaugaagaugg

SEQ ID NO: 48296 - RNA, 20 nt, Artificial Sequence
  Synthetic oligonucleotide: CTLA4-493
cuuuuggagcaugaagaugg

SEQ ID NO: 48297 - RNA, 21 nt, Artificial Sequence
  Synthetic oligonucleotide: CTLA4-2751
acuuuuggagcaugaagaugg

SEQ ID NO: 48298 - RNA, 22 nt, Artificial Sequence
  Synthetic oligonucleotide: CTLA4-2752
gacuuuuggagcaugaagaugg

SEQ ID NO: 48299 - RNA, 23 nt, Artificial Sequence
  Synthetic oligonucleotide: CTLA4-2753
agacuuuuggagcaugaagaugg

SEQ ID NO: 48300 - RNA, 24 nt, Artificial Sequence
  Synthetic oligonucleotide: CTLA4-2754
gagacuuuuggagcaugaagaugg

SEQ ID NO: 48301 - RNA, 18 nt, Artificial Sequence
  Synthetic oligonucleotide: CTLA4-2755
uuuuggagcaugaagaug

SEQ ID NO: 48302 - RNA, 19 nt, Artificial Sequence
  Synthetic oligonucleotide: CTLA4-2756
cuuuuggagcaugaagaug

SEQ ID NO: 48303 - RNA, 20 nt, Artificial Sequence
  Synthetic oligonucleotide: CTLA4-863
acuuuuggagcaugaagaug

SEQ ID NO: 48304 - RNA, 21 nt, Artificial Sequence
  Synthetic oligonucleotide: CTLA4-2757
gacuuuuggagcaugaagaug

SEQ ID NO: 48305 - RNA, 22 nt, Artificial Sequence
  Synthetic oligonucleotide: CTLA4-2758
agacuuuuggagcaugaagaug

SEQ ID NO: 48306 - RNA, 23 nt, Artificial Sequence
  Synthetic oligonucleotide: CTLA4-2759
gagacuuuuggagcaugaagaug

SEQ ID NO: 48307 - RNA, 24 nt, Artificial Sequence
  Synthetic oligonucleotide: CTLA4-2760
ugagacuuuuggagcaugaagaug

SEQ ID NO: 48308 - RNA, 18 nt, Artificial Sequence
  Synthetic oligonucleotide: CTLA4-2761
aagcugucaagggaccau

SEQ ID NO: 48309 - RNA, 19 nt, Artificial Sequence
  Synthetic oligonucleotide: CTLA4-2762
aaagcugucaagggaccau

SEQ ID NO: 48310 - RNA, 20 nt, Artificial Sequence
  Synthetic oligonucleotide: CTLA4-1136
uaaagcugucaagggaccau

SEQ ID NO: 48311 - RNA, 21 nt, Artificial Sequence
  Synthetic oligonucleotide: CTLA4-2763
guaaagcugucaagggaccau

SEQ ID NO: 48312 - RNA, 22 nt, Artificial Sequence
  Synthetic oligonucleotide: CTLA4-2764
uguaaagcugucaagggaccau

SEQ ID NO: 48313 - RNA, 23 nt, Artificial Sequence
  Synthetic oligonucleotide: CTLA4-2765
uuguaaagcugucaagggaccau

SEQ ID NO: 48314 - RNA, 24 nt, Artificial Sequence
  Synthetic oligonucleotide: CTLA4-2766
uuuguaaagcugucaagggaccau

SEQ ID NO: 48315 - RNA, 18 nt, Artificial Sequence
  Synthetic oligonucleotide: CTLA4-2767
cacauguguaauacauau

SEQ ID NO: 48316 - RNA, 19 nt, Artificial Sequence
  Synthetic oligonucleotide: CTLA4-2768
gcacauguguaauacauau

SEQ ID NO: 48317 - RNA, 20 nt, Artificial Sequence
  Synthetic oligonucleotide: CTLA4-846
ugcacauguguaauacauau

SEQ ID NO: 48318 - RNA, 21 nt, Artificial Sequence
  Synthetic oligonucleotide: CTLA4-2769
gugcacauguguaauacauau

SEQ ID NO: 48319 - RNA, 22 nt, Artificial Sequence
  Synthetic oligonucleotide: CTLA4-2770
ugugcacauguguaauacauau

SEQ ID NO: 48320 - RNA, 23 nt, Artificial Sequence
  Synthetic oligonucleotide: CTLA4-2771
gugugcacauguguaauacauau

SEQ ID NO: 48321 - RNA, 24 nt, Artificial Sequence
  Synthetic oligonucleotide: CTLA4-2772
ugugugcacauguguaauacauau

SEQ ID NO: 48322 - RNA, 18 nt, Artificial Sequence
  Synthetic oligonucleotide: CTLA4-2773
uaaggcaaagagauagcu

SEQ ID NO: 48323 - RNA, 19 nt, Artificial Sequence
  Synthetic oligonucleotide: CTLA4-2774
auaaggcaaagagauagcu

SEQ ID NO: 48324 - RNA, 20 nt, Artificial Sequence
  Synthetic oligonucleotide: CTLA4-873
aauaaggcaaagagauagcu

SEQ ID NO: 48325 - RNA, 21 nt, Artificial Sequence
  Synthetic oligonucleotide: CTLA4-2775
aaauaaggcaaagagauagcu

SEQ ID NO: 48326 - RNA, 22 nt, Artificial Sequence
  Synthetic oligonucleotide: CTLA4-2776
caaauaaggcaaagagauagcu

SEQ ID NO: 48327 - RNA, 23 nt, Artificial Sequence
  Synthetic oligonucleotide: CTLA4-2777
gcaaauaaggcaaagagauagcu

SEQ ID NO: 48328 - RNA, 24 nt, Artificial Sequence
  Synthetic oligonucleotide: CTLA4-2778
agcaaauaaggcaaagagauagcu

SEQ ID NO: 48329 - RNA, 18 nt, Artificial Sequence
  Synthetic oligonucleotide: CTLA4-2779
gccauuagcccaagggcu

SEQ ID NO: 48330 - RNA, 19 nt, Artificial Sequence
  Synthetic oligonucleotide: CTLA4-2780
ugccauuagcccaagggcu

SEQ ID NO: 48331 - RNA, 20 nt, Artificial Sequence
  Synthetic oligonucleotide: CTLA4-823
cugccauuagcccaagggcu

SEQ ID NO: 48332 - RNA, 21 nt, Artificial Sequence
  Synthetic oligonucleotide: CTLA4-2781
ccugccauuagcccaagggcu

SEQ ID NO: 48333 - RNA, 22 nt, Artificial Sequence
  Synthetic oligonucleotide: CTLA4-2782
uccugccauuagcccaagggcu

SEQ ID NO: 48334 - RNA, 23 nt, Artificial Sequence
  Synthetic oligonucleotide: CTLA4-2783
auccugccauuagcccaagggcu

SEQ ID NO: 48335 - RNA, 24 nt, Artificial Sequence
  Synthetic oligonucleotide: CTLA4-2784
aauccugccauuagcccaagggcu

SEQ ID NO: 48336 - RNA, 18 nt, Artificial Sequence
  Synthetic oligonucleotide: CTLA4-2785
gagcgccagguauuuagu

SEQ ID NO: 48337 - RNA, 19 nt, Artificial Sequence
  Synthetic oligonucleotide: CTLA4-2786
agagcgccagguauuuagu

SEQ ID NO: 48338 - RNA, 20 nt, Artificial Sequence
  Synthetic oligonucleotide: CTLA4-511
cagagcgccagguauuuagu

SEQ ID NO: 48339 - RNA, 21 nt, Artificial Sequence
  Synthetic oligonucleotide: CTLA4-2787
acagagcgccagguauuuagu

SEQ ID NO: 48340 - RNA, 22 nt, Artificial Sequence
  Synthetic oligonucleotide: CTLA4-2788
aacagagcgccagguauuuagu

SEQ ID NO: 48341 - RNA, 23 nt, Artificial Sequence
  Synthetic oligonucleotide: CTLA4-2789
gaacagagcgccagguauuuagu

SEQ ID NO: 48342 - RNA, 24 nt, Artificial Sequence
  Synthetic oligonucleotide: CTLA4-2790
agaacagagcgccagguauuuagu

SEQ ID NO: 48343 - RNA, 18 nt, Artificial Sequence
  Synthetic oligonucleotide: CTLA4-2791
uugaauaaaauugggauu

SEQ ID NO: 48344 - RNA, 19 nt, Artificial Sequence
  Synthetic oligonucleotide: CTLA4-2792
auugaauaaaauugggauu

SEQ ID NO: 48345 - RNA, 20 nt, Artificial Sequence
  Synthetic oligonucleotide: CTLA4-835
gauugaauaaaauugggauu

SEQ ID NO: 48346 - RNA, 21 nt, Artificial Sequence
  Synthetic oligonucleotide: CTLA4-2793
agauugaauaaaauugggauu

SEQ ID NO: 48347 - RNA, 22 nt, Artificial Sequence
  Synthetic oligonucleotide: CTLA4-2794
aagauugaauaaaauugggauu

SEQ ID NO: 48348 - RNA, 23 nt, Artificial Sequence
  Synthetic oligonucleotide: CTLA4-2795
gaagauugaauaaaauugggauu

SEQ ID NO: 48349 - RNA, 24 nt, Artificial Sequence
  Synthetic oligonucleotide: CTLA4-2796
agaagauugaauaaaauugggauu

SEQ ID NO: 48350 - RNA, 18 nt, Artificial Sequence
  Synthetic oligonucleotide: CTLA4-2797
ccaaaugcuaaauggauu

SEQ ID NO: 48351 - RNA, 19 nt, Artificial Sequence
  Synthetic oligonucleotide: CTLA4-2798
accaaaugcuaaauggauu

SEQ ID NO: 48352 - RNA, 20 nt, Artificial Sequence
  Synthetic oligonucleotide: CTLA4-1131
aaccaaaugcuaaauggauu

SEQ ID NO: 48353 - RNA, 21 nt, Artificial Sequence
  Synthetic oligonucleotide: CTLA4-2799
uaaccaaaugcuaaauggauu

SEQ ID NO: 48354 - RNA, 22 nt, Artificial Sequence
  Synthetic oligonucleotide: CTLA4-2800
uuaaccaaaugcuaaauggauu

SEQ ID NO: 48355 - RNA, 23 nt, Artificial Sequence
  Synthetic oligonucleotide: CTLA4-2801
cuuaaccaaaugcuaaauggauu

SEQ ID NO: 48356 - RNA, 24 nt, Artificial Sequence
  Synthetic oligonucleotide: CTLA4-2802
ucuuaaccaaaugcuaaauggauu

SEQ ID NO: 48357 - RNA, 18 nt, Artificial Sequence
  Synthetic oligonucleotide: CTLA4-1812
caaaggugagugagacuu

SEQ ID NO: 48358 - RNA, 19 nt, Artificial Sequence
  Synthetic oligonucleotide: CTLA4-1813
gcaaaggugagugagacuu

SEQ ID NO: 48359 - RNA, 20 nt, Artificial Sequence
  Synthetic oligonucleotide: CTLA4-221
ugcaaaggugagugagacuu

SEQ ID NO: 48360 - RNA, 21 nt, Artificial Sequence
  Synthetic oligonucleotide: CTLA4-1814
cugcaaaggugagugagacuu

SEQ ID NO: 48361 - RNA, 22 nt, Artificial Sequence
  Synthetic oligonucleotide: CTLA4-1815
ucugcaaaggugagugagacuu

SEQ ID NO: 48362 - RNA, 23 nt, Artificial Sequence
  Synthetic oligonucleotide: CTLA4-1816
uucugcaaaggugagugagacuu

SEQ ID NO: 48363 - RNA, 24 nt, Artificial Sequence
  Synthetic oligonucleotide: CTLA4-1817
cuucugcaaaggugagugagacuu

SEQ ID NO: 48364 - RNA, 18 nt, Artificial Sequence
  Synthetic oligonucleotide: CTLA4-2803
guuagcagccuaguaguu

SEQ ID NO: 48365 - RNA, 19 nt, Artificial Sequence
  Synthetic oligonucleotide: CTLA4-2804
aguuagcagccuaguaguu

SEQ ID NO: 48366 - RNA, 20 nt, Artificial Sequence
  Synthetic oligonucleotide: CTLA4-824
aaguuagcagccuaguaguu

SEQ ID NO: 48367 - RNA, 21 nt, Artificial Sequence
  Synthetic oligonucleotide: CTLA4-2805
aaaguuagcagccuaguaguu

SEQ ID NO: 48368 - RNA, 22 nt, Artificial Sequence
  Synthetic oligonucleotide: CTLA4-2806
gaaaguuagcagccuaguaguu

SEQ ID NO: 48369 - RNA, 23 nt, Artificial Sequence
  Synthetic oligonucleotide: CTLA4-2807
agaaaguuagcagccuaguaguu

SEQ ID NO: 48370 - RNA, 24 nt, Artificial Sequence
  Synthetic oligonucleotide: CTLA4-2808
cagaaaguuagcagccuaguaguu

SEQ ID NO: 48371 - RNA, 18 nt, Artificial Sequence
  Synthetic oligonucleotide: CTLA4-2809
ugaauaaaauugggauuu

SEQ ID NO: 48372 - RNA, 19 nt, Artificial Sequence
  Synthetic oligonucleotide: CTLA4-2810
uugaauaaaauugggauuu

SEQ ID NO: 48373 - RNA, 20 nt, Artificial Sequence
  Synthetic oligonucleotide: CTLA4-469
auugaauaaaauugggauuu

SEQ ID NO: 48374 - RNA, 21 nt, Artificial Sequence
  Synthetic oligonucleotide: CTLA4-2811
gauugaauaaaauugggauuu

SEQ ID NO: 48375 - RNA, 22 nt, Artificial Sequence
  Synthetic oligonucleotide: CTLA4-2812
agauugaauaaaauugggauuu

SEQ ID NO: 48376 - RNA, 23 nt, Artificial Sequence
  Synthetic oligonucleotide: CTLA4-2813
aagauugaauaaaauugggauuu

SEQ ID NO: 48377 - RNA, 24 nt, Artificial Sequence
  Synthetic oligonucleotide: CTLA4-2814
gaagauugaauaaaauugggauuu

SEQ ID NO: 48378 - RNA, 18 nt, Artificial Sequence
  Synthetic oligonucleotide: CTLA4-2815
caaaugcuaaauggauuu

SEQ ID NO: 48379 - RNA, 19 nt, Artificial Sequence
  Synthetic oligonucleotide: CTLA4-2816
ccaaaugcuaaauggauuu

SEQ ID NO: 48380 - RNA, 20 nt, Artificial Sequence
  Synthetic oligonucleotide: CTLA4-698
accaaaugcuaaauggauuu

SEQ ID NO: 48381 - RNA, 21 nt, Artificial Sequence
  Synthetic oligonucleotide: CTLA4-2817
aaccaaaugcuaaauggauuu

SEQ ID NO: 48382 - RNA, 22 nt, Artificial Sequence
  Synthetic oligonucleotide: CTLA4-2818
uaaccaaaugcuaaauggauuu

SEQ ID NO: 48383 - RNA, 23 nt, Artificial Sequence
  Synthetic oligonucleotide: CTLA4-2819
uuaaccaaaugcuaaauggauuu

SEQ ID NO: 48384 - RNA, 24 nt, Artificial Sequence
  Synthetic oligonucleotide: CTLA4-2820
cuuaaccaaaugcuaaauggauuu

SEQ ID NO: 48385 - RNA, 18 nt, Artificial Sequence
  Synthetic oligonucleotide: CTLA4-1818
aaaggugagugagacuuu

SEQ ID NO: 48386 - RNA, 19 nt, Artificial Sequence
  Synthetic oligonucleotide: CTLA4-1819
caaaggugagugagacuuu

SEQ ID NO: 48387 - RNA, 20 nt, Artificial Sequence
  Synthetic oligonucleotide: CTLA4-9
gcaaaggugagugagacuuu

SEQ ID NO: 48388 - RNA, 21 nt, Artificial Sequence
  Synthetic oligonucleotide: CTLA4-1820
ugcaaaggugagugagacuuu

SEQ ID NO: 48389 - RNA, 22 nt, Artificial Sequence
  Synthetic oligonucleotide: CTLA4-1821
cugcaaaggugagugagacuuu

SEQ ID NO: 48390 - RNA, 23 nt, Artificial Sequence
  Synthetic oligonucleotide: CTLA4-1822
ucugcaaaggugagugagacuuu

SEQ ID NO: 48391 - RNA, 24 nt, Artificial Sequence
  Synthetic oligonucleotide: CTLA4-1823
uucugcaaaggugagugagacuuu

SEQ ID NO: 48392 - RNA, 18 nt, Artificial Sequence
  Synthetic oligonucleotide: CTLA4-2821
cauucaauccuaagugca

SEQ ID NO: 48393 - RNA, 19 nt, Artificial Sequence
  Synthetic oligonucleotide: CTLA4-2822
ucauucaauccuaagugca

SEQ ID NO: 48394 - RNA, 20 nt, Artificial Sequence
  Synthetic oligonucleotide: CTLA4-2823
aucauucaauccuaagugca

SEQ ID NO: 48395 - RNA, 21 nt, Artificial Sequence
  Synthetic oligonucleotide: CTLA4-2824
caucauucaauccuaagugca

SEQ ID NO: 48396 - RNA, 22 nt, Artificial Sequence
  Synthetic oligonucleotide: CTLA4-2825
ucaucauucaauccuaagugca

SEQ ID NO: 48397 - RNA, 23 nt, Artificial Sequence
  Synthetic oligonucleotide: CTLA4-2826
gucaucauucaauccuaagugca

SEQ ID NO: 48398 - RNA, 24 nt, Artificial Sequence
  Synthetic oligonucleotide: CTLA4-2827
ugucaucauucaauccuaagugca

SEQ ID NO: 48399 - RNA, 18 nt, Artificial Sequence
  Synthetic oligonucleotide: CTLA4-2828
uaaggcuuuuaagaacac

SEQ ID NO: 48400 - RNA, 19 nt, Artificial Sequence
  Synthetic oligonucleotide: CTLA4-2829
uuaaggcuuuuaagaacac

SEQ ID NO: 48401 - RNA, 20 nt, Artificial Sequence
  Synthetic oligonucleotide: CTLA4-1128
guuaaggcuuuuaagaacac

SEQ ID NO: 48402 - RNA, 21 nt, Artificial Sequence
  Synthetic oligonucleotide: CTLA4-2830
aguuaaggcuuuuaagaacac

SEQ ID NO: 48403 - RNA, 22 nt, Artificial Sequence
  Synthetic oligonucleotide: CTLA4-2831
gaguuaaggcuuuuaagaacac

SEQ ID NO: 48404 - RNA, 23 nt, Artificial Sequence
  Synthetic oligonucleotide: CTLA4-2832
ugaguuaaggcuuuuaagaacac

SEQ ID NO: 48405 - RNA, 24 nt, Artificial Sequence
  Synthetic oligonucleotide: CTLA4-2833
uugaguuaaggcuuuuaagaacac

SEQ ID NO: 48406 - RNA, 18 nt, Artificial Sequence
  Synthetic oligonucleotide: CTLA4-2834
uaagagaaccuuaaaacc

SEQ ID NO: 48407 - RNA, 19 nt, Artificial Sequence
  Synthetic oligonucleotide: CTLA4-2835
uuaagagaaccuuaaaacc

SEQ ID NO: 48408 - RNA, 20 nt, Artificial Sequence
  Synthetic oligonucleotide: CTLA4-1256
auuaagagaaccuuaaaacc

SEQ ID NO: 48409 - RNA, 21 nt, Artificial Sequence
  Synthetic oligonucleotide: CTLA4-2836
gauuaagagaaccuuaaaacc

SEQ ID NO: 48410 - RNA, 22 nt, Artificial Sequence
  Synthetic oligonucleotide: CTLA4-2837
ugauuaagagaaccuuaaaacc

SEQ ID NO: 48411 - RNA, 23 nt, Artificial Sequence
  Synthetic oligonucleotide: CTLA4-2838
uugauuaagagaaccuuaaaacc

SEQ ID NO: 48412 - RNA, 24 nt, Artificial Sequence
  Synthetic oligonucleotide: CTLA4-2839
auugauuaagagaaccuuaaaacc

SEQ ID NO: 48413 - RNA, 18 nt, Artificial Sequence
  Synthetic oligonucleotide: CTLA4-2840
uccgaggaccuuaaaacc

SEQ ID NO: 48414 - RNA, 19 nt, Artificial Sequence
  Synthetic oligonucleotide: CTLA4-2841
auccgaggaccuuaaaacc

SEQ ID NO: 48415 - RNA, 20 nt, Artificial Sequence
  Synthetic oligonucleotide: CTLA4-1251
aauccgaggaccuuaaaacc

SEQ ID NO: 48416 - RNA, 21 nt, Artificial Sequence
  Synthetic oligonucleotide: CTLA4-2842
gaauccgaggaccuuaaaacc

SEQ ID NO: 48417 - RNA, 22 nt, Artificial Sequence
  Synthetic oligonucleotide: CTLA4-2843
ugaauccgaggaccuuaaaacc

SEQ ID NO: 48418 - RNA, 23 nt, Artificial Sequence
  Synthetic oligonucleotide: CTLA4-2844
augaauccgaggaccuuaaaacc

SEQ ID NO: 48419 - RNA, 24 nt, Artificial Sequence
  Synthetic oligonucleotide: CTLA4-2845
uaugaauccgaggaccuuaaaacc

SEQ ID NO: 48420 - RNA, 18 nt, Artificial Sequence
  Synthetic oligonucleotide: CTLA4-2846
gcauauuacagguucccc

SEQ ID NO: 48421 - RNA, 19 nt, Artificial Sequence
  Synthetic oligonucleotide: CTLA4-2847
ggcauauuacagguucccc

SEQ ID NO: 48422 - RNA, 20 nt, Artificial Sequence
  Synthetic oligonucleotide: CTLA4-2848
gggcauauuacagguucccc

SEQ ID NO: 48423 - RNA, 21 nt, Artificial Sequence
  Synthetic oligonucleotide: CTLA4-2849
cgggcauauuacagguucccc

SEQ ID NO: 48424 - RNA, 22 nt, Artificial Sequence
  Synthetic oligonucleotide: CTLA4-2850
ccgggcauauuacagguucccc

SEQ ID NO: 48425 - RNA, 23 nt, Artificial Sequence
  Synthetic oligonucleotide: CTLA4-2851
uccgggcauauuacagguucccc

SEQ ID NO: 48426 - RNA, 24 nt, Artificial Sequence
  Synthetic oligonucleotide: CTLA4-2852
uuccgggcauauuacagguucccc

SEQ ID NO: 48427 - RNA, 18 nt, Artificial Sequence
  Synthetic oligonucleotide: CTLA4-2853
uagcaaaaaaacucuucc

SEQ ID NO: 48428 - RNA, 19 nt, Artificial Sequence
  Synthetic oligonucleotide: CTLA4-2854
auagcaaaaaaacucuucc

SEQ ID NO: 48429 - RNA, 20 nt, Artificial Sequence
  Synthetic oligonucleotide: CTLA4-1250
uauagcaaaaaaacucuucc

SEQ ID NO: 48430 - RNA, 21 nt, Artificial Sequence
  Synthetic oligonucleotide: CTLA4-2855
guauagcaaaaaaacucuucc

SEQ ID NO: 48431 - RNA, 22 nt, Artificial Sequence
  Synthetic oligonucleotide: CTLA4-2856
uguauagcaaaaaaacucuucc

SEQ ID NO: 48432 - RNA, 23 nt, Artificial Sequence
  Synthetic oligonucleotide: CTLA4-2857
uuguauagcaaaaaaacucuucc

SEQ ID NO: 48433 - RNA, 24 nt, Artificial Sequence
  Synthetic oligonucleotide: CTLA4-2858
auuguauagcaaaaaaacucuucc

SEQ ID NO: 48434 - RNA, 18 nt, Artificial Sequence
  Synthetic oligonucleotide: CTLA4-2859
auggacggcucuaaucuc

SEQ ID NO: 48435 - RNA, 19 nt, Artificial Sequence
  Synthetic oligonucleotide: CTLA4-2860
uauggacggcucuaaucuc

SEQ ID NO: 48436 - RNA, 20 nt, Artificial Sequence
  Synthetic oligonucleotide: CTLA4-1123
uuauggacggcucuaaucuc

SEQ ID NO: 48437 - RNA, 21 nt, Artificial Sequence
  Synthetic oligonucleotide: CTLA4-2861
uuuauggacggcucuaaucuc

SEQ ID NO: 48438 - RNA, 22 nt, Artificial Sequence
  Synthetic oligonucleotide: CTLA4-2862
uuuuauggacggcucuaaucuc

SEQ ID NO: 48439 - RNA, 23 nt, Artificial Sequence
  Synthetic oligonucleotide: CTLA4-2863
cuuuuauggacggcucuaaucuc

SEQ ID NO: 48440 - RNA, 24 nt, Artificial Sequence
  Synthetic oligonucleotide: CTLA4-2864
ccuuuuauggacggcucuaaucuc

SEQ ID NO: 48441 - RNA, 18 nt, Artificial Sequence
  Synthetic oligonucleotide: CTLA4-2865
ucacuuccagucucauag

SEQ ID NO: 48442 - RNA, 19 nt, Artificial Sequence
  Synthetic oligonucleotide: CTLA4-2866
aucacuuccagucucauag

SEQ ID NO: 48443 - RNA, 20 nt, Artificial Sequence
  Synthetic oligonucleotide: CTLA4-1034
aaucacuuccagucucauag

SEQ ID NO: 48444 - RNA, 21 nt, Artificial Sequence
  Synthetic oligonucleotide: CTLA4-2867
aaaucacuuccagucucauag

SEQ ID NO: 48445 - RNA, 22 nt, Artificial Sequence
  Synthetic oligonucleotide: CTLA4-2868
uaaaucacuuccagucucauag

SEQ ID NO: 48446 - RNA, 23 nt, Artificial Sequence
  Synthetic oligonucleotide: CTLA4-2869
uuaaaucacuuccagucucauag

SEQ ID NO: 48447 - RNA, 24 nt, Artificial Sequence
  Synthetic oligonucleotide: CTLA4-2870
cuuaaaucacuuccagucucauag

SEQ ID NO: 48448 - RNA, 18 nt, Artificial Sequence
  Synthetic oligonucleotide: CTLA4-2871
aauuggcuaauuagcuag

SEQ ID NO: 48449 - RNA, 19 nt, Artificial Sequence
  Synthetic oligonucleotide: CTLA4-2872
uaauuggcuaauuagcuag

SEQ ID NO: 48450 - RNA, 20 nt, Artificial Sequence
  Synthetic oligonucleotide: CTLA4-1259
auaauuggcuaauuagcuag

SEQ ID NO: 48451 - RNA, 21 nt, Artificial Sequence
  Synthetic oligonucleotide: CTLA4-2873
aauaauuggcuaauuagcuag

SEQ ID NO: 48452 - RNA, 22 nt, Artificial Sequence
  Synthetic oligonucleotide: CTLA4-2874
aaauaauuggcuaauuagcuag

SEQ ID NO: 48453 - RNA, 23 nt, Artificial Sequence
  Synthetic oligonucleotide: CTLA4-2875
uaaauaauuggcuaauuagcuag

SEQ ID NO: 48454 - RNA, 24 nt, Artificial Sequence
  Synthetic oligonucleotide: CTLA4-2876
uuaaauaauuggcuaauuagcuag

SEQ ID NO: 48455 - RNA, 18 nt, Artificial Sequence
  Synthetic oligonucleotide: CTLA4-2877
aacucuguuuugucucug

SEQ ID NO: 48456 - RNA, 19 nt, Artificial Sequence
  Synthetic oligonucleotide: CTLA4-2878
caacucuguuuugucucug

SEQ ID NO: 48457 - RNA, 20 nt, Artificial Sequence
  Synthetic oligonucleotide: CTLA4-1126
ucaacucuguuuugucucug

SEQ ID NO: 48458 - RNA, 21 nt, Artificial Sequence
  Synthetic oligonucleotide: CTLA4-2879
uucaacucuguuuugucucug

SEQ ID NO: 48459 - RNA, 22 nt, Artificial Sequence
  Synthetic oligonucleotide: CTLA4-2880
cuucaacucuguuuugucucug

SEQ ID NO: 48460 - RNA, 23 nt, Artificial Sequence
  Synthetic oligonucleotide: CTLA4-2881
ucuucaacucuguuuugucucug

SEQ ID NO: 48461 - RNA, 24 nt, Artificial Sequence
  Synthetic oligonucleotide: CTLA4-2882
uucuucaacucuguuuugucucug

SEQ ID NO: 48462 - RNA, 18 nt, Artificial Sequence
  Synthetic oligonucleotide: CTLA4-2883
ucuaaucucuugaaucau

SEQ ID NO: 48463 - RNA, 19 nt, Artificial Sequence
  Synthetic oligonucleotide: CTLA4-2884
cucuaaucucuugaaucau

SEQ ID NO: 48464 - RNA, 20 nt, Artificial Sequence
  Synthetic oligonucleotide: CTLA4-1124
gcucuaaucucuugaaucau

SEQ ID NO: 48465 - RNA, 21 nt, Artificial Sequence
  Synthetic oligonucleotide: CTLA4-2885
ggcucuaaucucuugaaucau

SEQ ID NO: 48466 - RNA, 22 nt, Artificial Sequence
  Synthetic oligonucleotide: CTLA4-2886
cggcucuaaucucuugaaucau

SEQ ID NO: 48467 - RNA, 23 nt, Artificial Sequence
  Synthetic oligonucleotide: CTLA4-2887
acggcucuaaucucuugaaucau

SEQ ID NO: 48468 - RNA, 24 nt, Artificial Sequence
  Synthetic oligonucleotide: CTLA4-2888
gacggcucuaaucucuugaaucau

SEQ ID NO: 48469 - RNA, 18 nt, Artificial Sequence
  Synthetic oligonucleotide: CTLA4-2889
aauucauuuauaaaguau

SEQ ID NO: 48470 - RNA, 19 nt, Artificial Sequence
  Synthetic oligonucleotide: CTLA4-2890
uaauucauuuauaaaguau

SEQ ID NO: 48471 - RNA, 20 nt, Artificial Sequence
  Synthetic oligonucleotide: CTLA4-1254
cuaauucauuuauaaaguau

SEQ ID NO: 48472 - RNA, 21 nt, Artificial Sequence
  Synthetic oligonucleotide: CTLA4-2891
gcuaauucauuuauaaaguau

SEQ ID NO: 48473 - RNA, 22 nt, Artificial Sequence
  Synthetic oligonucleotide: CTLA4-2892
ggcuaauucauuuauaaaguau

SEQ ID NO: 48474 - RNA, 23 nt, Artificial Sequence
  Synthetic oligonucleotide: CTLA4-2893
uggcuaauucauuuauaaaguau

SEQ ID NO: 48475 - RNA, 24 nt, Artificial Sequence
  Synthetic oligonucleotide: CTLA4-2894
cuggcuaauucauuuauaaaguau

SEQ ID NO: 48476 - RNA, 18 nt, Artificial Sequence
  Synthetic oligonucleotide: CTLA4-2895
ucugaagagcugaaaacu

SEQ ID NO: 48477 - RNA, 19 nt, Artificial Sequence
  Synthetic oligonucleotide: CTLA4-2896
cucugaagagcugaaaacu

SEQ ID NO: 48478 - RNA, 20 nt, Artificial Sequence
  Synthetic oligonucleotide: CTLA4-1261
ucucugaagagcugaaaacu

SEQ ID NO: 48479 - RNA, 18 nt, Artificial Sequence
  Synthetic oligonucleotide: CTLA4-2897
uauauuuaaucuucacuu

SEQ ID NO: 48480 - RNA, 19 nt, Artificial Sequence
  Synthetic oligonucleotide: CTLA4-2898
uuauauuuaaucuucacuu

SEQ ID NO: 48481 - RNA, 20 nt, Artificial Sequence
  Synthetic oligonucleotide: CTLA4-1119
guuauauuuaaucuucacuu

SEQ ID NO: 48482 - RNA, 21 nt, Artificial Sequence
  Synthetic oligonucleotide: CTLA4-2899
gguuauauuuaaucuucacuu

SEQ ID NO: 48483 - RNA, 22 nt, Artificial Sequence
  Synthetic oligonucleotide: CTLA4-2900
ugguuauauuuaaucuucacuu

SEQ ID NO: 48484 - RNA, 23 nt, Artificial Sequence
  Synthetic oligonucleotide: CTLA4-2901
cugguuauauuuaaucuucacuu

SEQ ID NO: 48485 - RNA, 24 nt, Artificial Sequence
  Synthetic oligonucleotide: CTLA4-2902
ucugguuauauuuaaucuucacuu

SEQ ID NO: 48486 - RNA, 18 nt, Artificial Sequence
  Synthetic oligonucleotide: CTLA4-2903
aacucaacagagacaaaa

SEQ ID NO: 48487 - RNA, 19 nt, Artificial Sequence
  Synthetic oligonucleotide: CTLA4-2904
uaacucaacagagacaaaa

SEQ ID NO: 48488 - RNA, 20 nt, Artificial Sequence
  Synthetic oligonucleotide: CTLA4-1236
uuaacucaacagagacaaaa

SEQ ID NO: 48489 - RNA, 21 nt, Artificial Sequence
  Synthetic oligonucleotide: CTLA4-2905
cuuaacucaacagagacaaaa

SEQ ID NO: 48490 - RNA, 22 nt, Artificial Sequence
  Synthetic oligonucleotide: CTLA4-2906
ccuuaacucaacagagacaaaa

SEQ ID NO: 48491 - RNA, 23 nt, Artificial Sequence
  Synthetic oligonucleotide: CTLA4-2907
gccuuaacucaacagagacaaaa

SEQ ID NO: 48492 - RNA, 24 nt, Artificial Sequence
  Synthetic oligonucleotide: CTLA4-2908
agccuuaacucaacagagacaaaa

SEQ ID NO: 48493 - RNA, 18 nt, Artificial Sequence
  Synthetic oligonucleotide: CTLA4-2909
gaccaaugaucuaacaaa

SEQ ID NO: 48494 - RNA, 19 nt, Artificial Sequence
  Synthetic oligonucleotide: CTLA4-2910
ggaccaaugaucuaacaaa

SEQ ID NO: 48495 - RNA, 20 nt, Artificial Sequence
  Synthetic oligonucleotide: CTLA4-1225
aggaccaaugaucuaacaaa

SEQ ID NO: 48496 - RNA, 21 nt, Artificial Sequence
  Synthetic oligonucleotide: CTLA4-2911
caggaccaaugaucuaacaaa

SEQ ID NO: 48497 - RNA, 22 nt, Artificial Sequence
  Synthetic oligonucleotide: CTLA4-2912
acaggaccaaugaucuaacaaa

SEQ ID NO: 48498 - RNA, 23 nt, Artificial Sequence
  Synthetic oligonucleotide: CTLA4-2913
gacaggaccaaugaucuaacaaa

SEQ ID NO: 48499 - RNA, 24 nt, Artificial Sequence
  Synthetic oligonucleotide: CTLA4-2914
agacaggaccaaugaucuaacaaa

SEQ ID NO: 48500 - RNA, 18 nt, Artificial Sequence
  Synthetic oligonucleotide: CTLA4-2915
gauuagagccguccauaa

SEQ ID NO: 48501 - RNA, 19 nt, Artificial Sequence
  Synthetic oligonucleotide: CTLA4-2916
agauuagagccguccauaa

SEQ ID NO: 48502 - RNA, 20 nt, Artificial Sequence
  Synthetic oligonucleotide: CTLA4-1230
gagauuagagccguccauaa

SEQ ID NO: 48503 - RNA, 21 nt, Artificial Sequence
  Synthetic oligonucleotide: CTLA4-2917
agagauuagagccguccauaa

SEQ ID NO: 48504 - RNA, 22 nt, Artificial Sequence
  Synthetic oligonucleotide: CTLA4-2918
aagagauuagagccguccauaa

SEQ ID NO: 48505 - RNA, 23 nt, Artificial Sequence
  Synthetic oligonucleotide: CTLA4-2919
caagagauuagagccguccauaa

SEQ ID NO: 48506 - RNA, 24 nt, Artificial Sequence
  Synthetic oligonucleotide: CTLA4-2920
ucaagagauuagagccguccauaa

SEQ ID NO: 48507 - RNA, 18 nt, Artificial Sequence
  Synthetic oligonucleotide: CTLA4-2921
gauucauauacuuuauaa

SEQ ID NO: 48508 - RNA, 19 nt, Artificial Sequence
  Synthetic oligonucleotide: CTLA4-2922
ggauucauauacuuuauaa

SEQ ID NO: 48509 - RNA, 20 nt, Artificial Sequence
  Synthetic oligonucleotide: CTLA4-1140
cggauucauauacuuuauaa

SEQ ID NO: 48510 - RNA, 21 nt, Artificial Sequence
  Synthetic oligonucleotide: CTLA4-2923
ucggauucauauacuuuauaa

SEQ ID NO: 48511 - RNA, 22 nt, Artificial Sequence
  Synthetic oligonucleotide: CTLA4-2924
cucggauucauauacuuuauaa

SEQ ID NO: 48512 - RNA, 23 nt, Artificial Sequence
  Synthetic oligonucleotide: CTLA4-2925
ccucggauucauauacuuuauaa

SEQ ID NO: 48513 - RNA, 24 nt, Artificial Sequence
  Synthetic oligonucleotide: CTLA4-2926
uccucggauucauauacuuuauaa

SEQ ID NO: 48514 - RNA, 18 nt, Artificial Sequence
  Synthetic oligonucleotide: CTLA4-2927
aaacagacaguuguaaca

SEQ ID NO: 48515 - RNA, 19 nt, Artificial Sequence
  Synthetic oligonucleotide: CTLA4-2928
caaacagacaguuguaaca

SEQ ID NO: 48516 - RNA, 20 nt, Artificial Sequence
  Synthetic oligonucleotide: CTLA4-2140
gcaaacagacaguuguaaca

SEQ ID NO: 48517 - RNA, 21 nt, Artificial Sequence
  Synthetic oligonucleotide: CTLA4-2929
ugcaaacagacaguuguaaca

SEQ ID NO: 48518 - RNA, 22 nt, Artificial Sequence
  Synthetic oligonucleotide: CTLA4-2930
augcaaacagacaguuguaaca

SEQ ID NO: 48519 - RNA, 23 nt, Artificial Sequence
  Synthetic oligonucleotide: CTLA4-2931
caugcaaacagacaguuguaaca

SEQ ID NO: 48520 - RNA, 24 nt, Artificial Sequence
  Synthetic oligonucleotide: CTLA4-2932
acaugcaaacagacaguuguaaca

SEQ ID NO: 48521 - RNA, 18 nt, Artificial Sequence
  Synthetic oligonucleotide: CTLA4-2933
ucugguuuugcagaagga

SEQ ID NO: 48522 - RNA, 19 nt, Artificial Sequence
  Synthetic oligonucleotide: CTLA4-2934
cucugguuuugcagaagga

SEQ ID NO: 48523 - RNA, 20 nt, Artificial Sequence
  Synthetic oligonucleotide: CTLA4-1238
ccucugguuuugcagaagga

SEQ ID NO: 48524 - RNA, 21 nt, Artificial Sequence
  Synthetic oligonucleotide: CTLA4-2935
gccucugguuuugcagaagga

SEQ ID NO: 48525 - RNA, 22 nt, Artificial Sequence
  Synthetic oligonucleotide: CTLA4-2936
ugccucugguuuugcagaagga

SEQ ID NO: 48526 - RNA, 23 nt, Artificial Sequence
  Synthetic oligonucleotide: CTLA4-2937
cugccucugguuuugcagaagga

SEQ ID NO: 48527 - RNA, 24 nt, Artificial Sequence
  Synthetic oligonucleotide: CTLA4-2938
gcugccucugguuuugcagaagga

SEQ ID NO: 48528 - RNA, 18 nt, Artificial Sequence
  Synthetic oligonucleotide: CTLA4-2939
aauucugugcacuuagga

SEQ ID NO: 48529 - RNA, 19 nt, Artificial Sequence
  Synthetic oligonucleotide: CTLA4-2940
gaauucugugcacuuagga

SEQ ID NO: 48530 - RNA, 20 nt, Artificial Sequence
  Synthetic oligonucleotide: CTLA4-2941
ggaauucugugcacuuagga

SEQ ID NO: 48531 - RNA, 21 nt, Artificial Sequence
  Synthetic oligonucleotide: CTLA4-2942
cggaauucugugcacuuagga

SEQ ID NO: 48532 - RNA, 22 nt, Artificial Sequence
  Synthetic oligonucleotide: CTLA4-2943
ccggaauucugugcacuuagga

SEQ ID NO: 48533 - RNA, 23 nt, Artificial Sequence
  Synthetic oligonucleotide: CTLA4-2944
cccggaauucugugcacuuagga

SEQ ID NO: 48534 - RNA, 24 nt, Artificial Sequence
  Synthetic oligonucleotide: CTLA4-2945
gcccggaauucugugcacuuagga

SEQ ID NO: 48535 - RNA, 18 nt, Artificial Sequence
  Synthetic oligonucleotide: CTLA4-2946
gaagugauuuaagaggga

SEQ ID NO: 48536 - RNA, 19 nt, Artificial Sequence
  Synthetic oligonucleotide: CTLA4-2947
ggaagugauuuaagaggga

SEQ ID NO: 48537 - RNA, 20 nt, Artificial Sequence
  Synthetic oligonucleotide: CTLA4-888
uggaagugauuuaagaggga

SEQ ID NO: 48538 - RNA, 21 nt, Artificial Sequence
  Synthetic oligonucleotide: CTLA4-2948
cuggaagugauuuaagaggga

SEQ ID NO: 48539 - RNA, 22 nt, Artificial Sequence
  Synthetic oligonucleotide: CTLA4-2949
acuggaagugauuuaagaggga

SEQ ID NO: 48540 - RNA, 23 nt, Artificial Sequence
  Synthetic oligonucleotide: CTLA4-2950
gacuggaagugauuuaagaggga

SEQ ID NO: 48541 - RNA, 24 nt, Artificial Sequence
  Synthetic oligonucleotide: CTLA4-2951
agacuggaagugauuuaagaggga

SEQ ID NO: 48542 - RNA, 18 nt, Artificial Sequence
  Synthetic oligonucleotide: CTLA4-2952
gugaagauuaaauauaac

SEQ ID NO: 48543 - RNA, 19 nt, Artificial Sequence
  Synthetic oligonucleotide: CTLA4-2953
agugaagauuaaauauaac

SEQ ID NO: 48544 - RNA, 20 nt, Artificial Sequence
  Synthetic oligonucleotide: CTLA4-1227
aagugaagauuaaauauaac

SEQ ID NO: 48545 - RNA, 21 nt, Artificial Sequence
  Synthetic oligonucleotide: CTLA4-2954
aaagugaagauuaaauauaac

SEQ ID NO: 48546 - RNA, 22 nt, Artificial Sequence
  Synthetic oligonucleotide: CTLA4-2955
aaaagugaagauuaaauauaac

SEQ ID NO: 48547 - RNA, 23 nt, Artificial Sequence
  Synthetic oligonucleotide: CTLA4-2956
caaaagugaagauuaaauauaac

SEQ ID NO: 48548 - RNA, 24 nt, Artificial Sequence
  Synthetic oligonucleotide: CTLA4-2957
ucaaaagugaagauuaaauauaac

SEQ ID NO: 48549 - RNA, 18 nt, Artificial Sequence
  Synthetic oligonucleotide: CTLA4-2958
gggaaccuguaauaugcc

SEQ ID NO: 48550 - RNA, 19 nt, Artificial Sequence
  Synthetic oligonucleotide: CTLA4-2959
ggggaaccuguaauaugcc

SEQ ID NO: 48551 - RNA, 20 nt, Artificial Sequence
  Synthetic oligonucleotide: CTLA4-2147
uggggaaccuguaauaugcc

SEQ ID NO: 48552 - RNA, 21 nt, Artificial Sequence
  Synthetic oligonucleotide: CTLA4-2960
auggggaaccuguaauaugcc

SEQ ID NO: 48553 - RNA, 22 nt, Artificial Sequence
  Synthetic oligonucleotide: CTLA4-2961
cauggggaaccuguaauaugcc

SEQ ID NO: 48554 - RNA, 23 nt, Artificial Sequence
  Synthetic oligonucleotide: CTLA4-2962
ucauggggaaccuguaauaugcc

SEQ ID NO: 48555 - RNA, 24 nt, Artificial Sequence
  Synthetic oligonucleotide: CTLA4-2963
uucauggggaaccuguaauaugcc

SEQ ID NO: 48556 - RNA, 18 nt, Artificial Sequence
  Synthetic oligonucleotide: CTLA4-2964
uucaagguuuuaaggucc

SEQ ID NO: 48557 - RNA, 19 nt, Artificial Sequence
  Synthetic oligonucleotide: CTLA4-2965
auucaagguuuuaaggucc

SEQ ID NO: 48558 - RNA, 20 nt, Artificial Sequence
  Synthetic oligonucleotide: CTLA4-1139
aauucaagguuuuaaggucc

SEQ ID NO: 48559 - RNA, 21 nt, Artificial Sequence
  Synthetic oligonucleotide: CTLA4-2966
caauucaagguuuuaaggucc

SEQ ID NO: 48560 - RNA, 22 nt, Artificial Sequence
  Synthetic oligonucleotide: CTLA4-2967
acaauucaagguuuuaaggucc

SEQ ID NO: 48561 - RNA, 23 nt, Artificial Sequence
  Synthetic oligonucleotide: CTLA4-2968
uacaauucaagguuuuaaggucc

SEQ ID NO: 48562 - RNA, 24 nt, Artificial Sequence
  Synthetic oligonucleotide: CTLA4-2969
auacaauucaagguuuuaaggucc

SEQ ID NO: 48563 - RNA, 18 nt, Artificial Sequence
  Synthetic oligonucleotide: CTLA4-2970
gaaaggauagccauaguc

SEQ ID NO: 48564 - RNA, 19 nt, Artificial Sequence
  Synthetic oligonucleotide: CTLA4-2971
ggaaaggauagccauaguc

SEQ ID NO: 48565 - RNA, 20 nt, Artificial Sequence
  Synthetic oligonucleotide: CTLA4-889
gggaaaggauagccauaguc

SEQ ID NO: 48566 - RNA, 21 nt, Artificial Sequence
  Synthetic oligonucleotide: CTLA4-2972
agggaaaggauagccauaguc

SEQ ID NO: 48567 - RNA, 22 nt, Artificial Sequence
  Synthetic oligonucleotide: CTLA4-2973
gagggaaaggauagccauaguc

SEQ ID NO: 48568 - RNA, 23 nt, Artificial Sequence
  Synthetic oligonucleotide: CTLA4-2974
agagggaaaggauagccauaguc

SEQ ID NO: 48569 - RNA, 24 nt, Artificial Sequence
  Synthetic oligonucleotide: CTLA4-2975
aagagggaaaggauagccauaguc

SEQ ID NO: 48570 - RNA, 18 nt, Artificial Sequence
  Synthetic oligonucleotide: CTLA4-2976
guccugaauacauuugag

SEQ ID NO: 48571 - RNA, 19 nt, Artificial Sequence
  Synthetic oligonucleotide: CTLA4-2977
aguccugaauacauuugag

SEQ ID NO: 48572 - RNA, 20 nt, Artificial Sequence
  Synthetic oligonucleotide: CTLA4-891
uaguccugaauacauuugag

SEQ ID NO: 48573 - RNA, 21 nt, Artificial Sequence
  Synthetic oligonucleotide: CTLA4-2978
auaguccugaauacauuugag

SEQ ID NO: 48574 - RNA, 22 nt, Artificial Sequence
  Synthetic oligonucleotide: CTLA4-2979
cauaguccugaauacauuugag

SEQ ID NO: 48575 - RNA, 23 nt, Artificial Sequence
  Synthetic oligonucleotide: CTLA4-2980
ccauaguccugaauacauuugag

SEQ ID NO: 48576 - RNA, 24 nt, Artificial Sequence
  Synthetic oligonucleotide: CTLA4-2981
gccauaguccugaauacauuugag

SEQ ID NO: 48577 - RNA, 18 nt, Artificial Sequence
  Synthetic oligonucleotide: CTLA4-2982
acuuaagcaaauccuggg

SEQ ID NO: 48578 - RNA, 19 nt, Artificial Sequence
  Synthetic oligonucleotide: CTLA4-2983
gacuuaagcaaauccuggg

SEQ ID NO: 48579 - RNA, 20 nt, Artificial Sequence
  Synthetic oligonucleotide: CTLA4-2984
ugacuuaagcaaauccuggg

SEQ ID NO: 48580 - RNA, 21 nt, Artificial Sequence
  Synthetic oligonucleotide: CTLA4-2985
uugacuuaagcaaauccuggg

SEQ ID NO: 48581 - RNA, 22 nt, Artificial Sequence
  Synthetic oligonucleotide: CTLA4-2986
auugacuuaagcaaauccuggg

SEQ ID NO: 48582 - RNA, 23 nt, Artificial Sequence
  Synthetic oligonucleotide: CTLA4-2987
aauugacuuaagcaaauccuggg

SEQ ID NO: 48583 - RNA, 24 nt, Artificial Sequence
  Synthetic oligonucleotide: CTLA4-2988
aaauugacuuaagcaaauccuggg

SEQ ID NO: 48584 - RNA, 18 nt, Artificial Sequence
  Synthetic oligonucleotide: CTLA4-2989
auguagggaaauuguggg

SEQ ID NO: 48585 - RNA, 19 nt, Artificial Sequence
  Synthetic oligonucleotide: CTLA4-2990
aauguagggaaauuguggg

SEQ ID NO: 48586 - RNA, 20 nt, Artificial Sequence
  Synthetic oligonucleotide: CTLA4-1147
aaauguagggaaauuguggg

SEQ ID NO: 48587 - RNA, 21 nt, Artificial Sequence
  Synthetic oligonucleotide: CTLA4-2991
aaaauguagggaaauuguggg

SEQ ID NO: 48588 - RNA, 22 nt, Artificial Sequence
  Synthetic oligonucleotide: CTLA4-2992
uaaaauguagggaaauuguggg

SEQ ID NO: 48589 - RNA, 23 nt, Artificial Sequence
  Synthetic oligonucleotide: CTLA4-2993
uuaaaauguagggaaauuguggg

SEQ ID NO: 48590 - RNA, 24 nt, Artificial Sequence
  Synthetic oligonucleotide: CTLA4-2994
uuuaaaauguagggaaauuguggg

SEQ ID NO: 48591 - RNA, 18 nt, Artificial Sequence
  Synthetic oligonucleotide: CTLA4-2995
ggaccuuccuuaaaucug

SEQ ID NO: 48592 - RNA, 19 nt, Artificial Sequence
  Synthetic oligonucleotide: CTLA4-2996
aggaccuuccuuaaaucug

SEQ ID NO: 48593 - RNA, 20 nt, Artificial Sequence
  Synthetic oligonucleotide: CTLA4-1219
gaggaccuuccuuaaaucug

SEQ ID NO: 48594 - RNA, 21 nt, Artificial Sequence
  Synthetic oligonucleotide: CTLA4-2997
ugaggaccuuccuuaaaucug

SEQ ID NO: 48595 - RNA, 22 nt, Artificial Sequence
  Synthetic oligonucleotide: CTLA4-2998
uugaggaccuuccuuaaaucug

SEQ ID NO: 48596 - RNA, 23 nt, Artificial Sequence
  Synthetic oligonucleotide: CTLA4-2999
auugaggaccuuccuuaaaucug

SEQ ID NO: 48597 - RNA, 24 nt, Artificial Sequence
  Synthetic oligonucleotide: CTLA4-3000
cauugaggaccuuccuuaaaucug

SEQ ID NO: 48598 - RNA, 18 nt, Artificial Sequence
  Synthetic oligonucleotide: CTLA4-3001
cccggaauucugugcacu

SEQ ID NO: 48599 - RNA, 19 nt, Artificial Sequence
  Synthetic oligonucleotide: CTLA4-3002
gcccggaauucugugcacu

SEQ ID NO: 48600 - RNA, 20 nt, Artificial Sequence
  Synthetic oligonucleotide: CTLA4-3003
ugcccggaauucugugcacu

SEQ ID NO: 48601 - RNA, 21 nt, Artificial Sequence
  Synthetic oligonucleotide: CTLA4-3004
augcccggaauucugugcacu

SEQ ID NO: 48602 - RNA, 22 nt, Artificial Sequence
  Synthetic oligonucleotide: CTLA4-3005
uaugcccggaauucugugcacu

SEQ ID NO: 48603 - RNA, 23 nt, Artificial Sequence
  Synthetic oligonucleotide: CTLA4-3006
auaugcccggaauucugugcacu

SEQ ID NO: 48604 - RNA, 24 nt, Artificial Sequence
  Synthetic oligonucleotide: CTLA4-3007
aauaugcccggaauucugugcacu

SEQ ID NO: 48605 - RNA, 18 nt, Artificial Sequence
  Synthetic oligonucleotide: CTLA4-3008
uuguugccugaccuacgu

SEQ ID NO: 48606 - RNA, 19 nt, Artificial Sequence
  Synthetic oligonucleotide: CTLA4-3009
auuguugccugaccuacgu

SEQ ID NO: 48607 - RNA, 20 nt, Artificial Sequence
  Synthetic oligonucleotide: CTLA4-1155
aauuguugccugaccuacgu

SEQ ID NO: 48608 - RNA, 21 nt, Artificial Sequence
  Synthetic oligonucleotide: CTLA4-3010
uaauuguugccugaccuacgu

SEQ ID NO: 48609 - RNA, 22 nt, Artificial Sequence
  Synthetic oligonucleotide: CTLA4-3011
uuaauuguugccugaccuacgu

SEQ ID NO: 48610 - RNA, 23 nt, Artificial Sequence
  Synthetic oligonucleotide: CTLA4-3012
cuuaauuguugccugaccuacgu

SEQ ID NO: 48611 - RNA, 24 nt, Artificial Sequence
  Synthetic oligonucleotide: CTLA4-3013
acuuaauuguugccugaccuacgu

SEQ ID NO: 48612 - RNA, 18 nt, Artificial Sequence
  Synthetic oligonucleotide: CTLA4-3014
uacauuugagcuggguuu

SEQ ID NO: 48613 - RNA, 19 nt, Artificial Sequence
  Synthetic oligonucleotide: CTLA4-3015
auacauuugagcuggguuu

SEQ ID NO: 48614 - RNA, 20 nt, Artificial Sequence
  Synthetic oligonucleotide: CTLA4-892
aauacauuugagcuggguuu

SEQ ID NO: 48615 - RNA, 21 nt, Artificial Sequence
  Synthetic oligonucleotide: CTLA4-3016
gaauacauuugagcuggguuu

SEQ ID NO: 48616 - RNA, 22 nt, Artificial Sequence
  Synthetic oligonucleotide: CTLA4-3017
ugaauacauuugagcuggguuu

SEQ ID NO: 48617 - RNA, 23 nt, Artificial Sequence
  Synthetic oligonucleotide: CTLA4-3018
cugaauacauuugagcuggguuu

SEQ ID NO: 48618 - RNA, 24 nt, Artificial Sequence
  Synthetic oligonucleotide: CTLA4-3019
ccugaauacauuugagcuggguuu

SEQ ID NO: 48619 - RNA, 18 nt, Artificial Sequence
  Synthetic oligonucleotide: CTLA4-3020
ucucugaagagcugaaaa

SEQ ID NO: 48620 - RNA, 19 nt, Artificial Sequence
  Synthetic oligonucleotide: CTLA4-3021
gucucugaagagcugaaaa

SEQ ID NO: 48621 - RNA, 20 nt, Artificial Sequence
  Synthetic oligonucleotide: CTLA4-1262
agucucugaagagcugaaaa

SEQ ID NO: 48622 - RNA, 18 nt, Artificial Sequence
  Synthetic oligonucleotide: CTLA4-3022
gcuaguagaauugauuaa

SEQ ID NO: 48623 - RNA, 19 nt, Artificial Sequence
  Synthetic oligonucleotide: CTLA4-3023
agcuaguagaauugauuaa

SEQ ID NO: 48624 - RNA, 20 nt, Artificial Sequence
  Synthetic oligonucleotide: CTLA4-1257
uagcuaguagaauugauuaa

SEQ ID NO: 48625 - RNA, 21 nt, Artificial Sequence
  Synthetic oligonucleotide: CTLA4-3024
uuagcuaguagaauugauuaa

SEQ ID NO: 48626 - RNA, 22 nt, Artificial Sequence
  Synthetic oligonucleotide: CTLA4-3025
auuagcuaguagaauugauuaa

SEQ ID NO: 48627 - RNA, 23 nt, Artificial Sequence
  Synthetic oligonucleotide: CTLA4-3026
aauuagcuaguagaauugauuaa

SEQ ID NO: 48628 - RNA, 24 nt, Artificial Sequence
  Synthetic oligonucleotide: CTLA4-3027
uaauuagcuaguagaauugauuaa

SEQ ID NO: 48629 - RNA, 18 nt, Artificial Sequence
  Synthetic oligonucleotide: CTLA4-3028
uaagucaauuuuuuuuaa

SEQ ID NO: 48630 - RNA, 19 nt, Artificial Sequence
  Synthetic oligonucleotide: CTLA4-3029
uuaagucaauuuuuuuuaa

SEQ ID NO: 48631 - RNA, 20 nt, Artificial Sequence
  Synthetic oligonucleotide: CTLA4-2139
cuuaagucaauuuuuuuuaa

SEQ ID NO: 48632 - RNA, 21 nt, Artificial Sequence
  Synthetic oligonucleotide: CTLA4-3030
gcuuaagucaauuuuuuuuaa

SEQ ID NO: 48633 - RNA, 22 nt, Artificial Sequence
  Synthetic oligonucleotide: CTLA4-3031
ugcuuaagucaauuuuuuuuaa

SEQ ID NO: 48634 - RNA, 23 nt, Artificial Sequence
  Synthetic oligonucleotide: CTLA4-3032
uugcuuaagucaauuuuuuuuaa

SEQ ID NO: 48635 - RNA, 24 nt, Artificial Sequence
  Synthetic oligonucleotide: CTLA4-3033
uuugcuuaagucaauuuuuuuuaa

SEQ ID NO: 48636 - RNA, 18 nt, Artificial Sequence
  Synthetic oligonucleotide: CTLA4-3034
aaaucacuuccagucuca

SEQ ID NO: 48637 - RNA, 19 nt, Artificial Sequence
  Synthetic oligonucleotide: CTLA4-3035
uaaaucacuuccagucuca

SEQ ID NO: 48638 - RNA, 20 nt, Artificial Sequence
  Synthetic oligonucleotide: CTLA4-1035
uuaaaucacuuccagucuca

SEQ ID NO: 48639 - RNA, 21 nt, Artificial Sequence
  Synthetic oligonucleotide: CTLA4-3036
cuuaaaucacuuccagucuca

SEQ ID NO: 48640 - RNA, 22 nt, Artificial Sequence
  Synthetic oligonucleotide: CTLA4-3037
ucuuaaaucacuuccagucuca

SEQ ID NO: 48641 - RNA, 23 nt, Artificial Sequence
  Synthetic oligonucleotide: CTLA4-3038
cucuuaaaucacuuccagucuca

SEQ ID NO: 48642 - RNA, 24 nt, Artificial Sequence
  Synthetic oligonucleotide: CTLA4-3039
ccucuuaaaucacuuccagucuca

SEQ ID NO: 48643 - RNA, 18 nt, Artificial Sequence
  Synthetic oligonucleotide: CTLA4-3040
aaaaccuugaauuaagua

SEQ ID NO: 48644 - RNA, 19 nt, Artificial Sequence
  Synthetic oligonucleotide: CTLA4-3041
uaaaaccuugaauuaagua

SEQ ID NO: 48645 - RNA, 20 nt, Artificial Sequence
  Synthetic oligonucleotide: CTLA4-1255
uuaaaaccuugaauuaagua

SEQ ID NO: 48646 - RNA, 21 nt, Artificial Sequence
  Synthetic oligonucleotide: CTLA4-3042
cuuaaaaccuugaauuaagua

SEQ ID NO: 48647 - RNA, 22 nt, Artificial Sequence
  Synthetic oligonucleotide: CTLA4-3043
ccuuaaaaccuugaauuaagua

SEQ ID NO: 48648 - RNA, 23 nt, Artificial Sequence
  Synthetic oligonucleotide: CTLA4-3044
accuuaaaaccuugaauuaagua

SEQ ID NO: 48649 - RNA, 24 nt, Artificial Sequence
  Synthetic oligonucleotide: CTLA4-3045
aaccuuaaaaccuugaauuaagua

SEQ ID NO: 48650 - RNA, 18 nt, Artificial Sequence
  Synthetic oligonucleotide: CTLA4-3046
gaaaacucuccagauuua

SEQ ID NO: 48651 - RNA, 19 nt, Artificial Sequence
  Synthetic oligonucleotide: CTLA4-3047
ugaaaacucuccagauuua

SEQ ID NO: 48652 - RNA, 20 nt, Artificial Sequence
  Synthetic oligonucleotide: CTLA4-684
augaaaacucuccagauuua

SEQ ID NO: 48653 - RNA, 21 nt, Artificial Sequence
  Synthetic oligonucleotide: CTLA4-3048
uaugaaaacucuccagauuua

SEQ ID NO: 48654 - RNA, 22 nt, Artificial Sequence
  Synthetic oligonucleotide: CTLA4-3049
guaugaaaacucuccagauuua

SEQ ID NO: 48655 - RNA, 23 nt, Artificial Sequence
  Synthetic oligonucleotide: CTLA4-3050
uguaugaaaacucuccagauuua

SEQ ID NO: 48656 - RNA, 24 nt, Artificial Sequence
  Synthetic oligonucleotide: CTLA4-3051
auguaugaaaacucuccagauuua

SEQ ID NO: 48657 - RNA, 18 nt, Artificial Sequence
  Synthetic oligonucleotide: CTLA4-3052
uuaagucaauuuuuuuua

SEQ ID NO: 48658 - RNA, 19 nt, Artificial Sequence
  Synthetic oligonucleotide: CTLA4-3053
cuuaagucaauuuuuuuua

SEQ ID NO: 48659 - RNA, 20 nt, Artificial Sequence
  Synthetic oligonucleotide: CTLA4-3054
gcuuaagucaauuuuuuuua

SEQ ID NO: 48660 - RNA, 21 nt, Artificial Sequence
  Synthetic oligonucleotide: CTLA4-3055
ugcuuaagucaauuuuuuuua

SEQ ID NO: 48661 - RNA, 22 nt, Artificial Sequence
  Synthetic oligonucleotide: CTLA4-3056
uugcuuaagucaauuuuuuuua

SEQ ID NO: 48662 - RNA, 23 nt, Artificial Sequence
  Synthetic oligonucleotide: CTLA4-3057
uuugcuuaagucaauuuuuuuua

SEQ ID NO: 48663 - RNA, 24 nt, Artificial Sequence
  Synthetic oligonucleotide: CTLA4-3058
auuugcuuaagucaauuuuuuuua

SEQ ID NO: 48664 - RNA, 18 nt, Artificial Sequence
  Synthetic oligonucleotide: CTLA4-3059
ucuuuccuucugcaaaac

SEQ ID NO: 48665 - RNA, 19 nt, Artificial Sequence
  Synthetic oligonucleotide: CTLA4-3060
uucuuuccuucugcaaaac

SEQ ID NO: 48666 - RNA, 20 nt, Artificial Sequence
  Synthetic oligonucleotide: CTLA4-1129
auucuuuccuucugcaaaac

SEQ ID NO: 48667 - RNA, 21 nt, Artificial Sequence
  Synthetic oligonucleotide: CTLA4-3061
aauucuuuccuucugcaaaac

SEQ ID NO: 48668 - RNA, 22 nt, Artificial Sequence
  Synthetic oligonucleotide: CTLA4-3062
gaauucuuuccuucugcaaaac

SEQ ID NO: 48669 - RNA, 23 nt, Artificial Sequence
  Synthetic oligonucleotide: CTLA4-3063
ugaauucuuuccuucugcaaaac

SEQ ID NO: 48670 - RNA, 24 nt, Artificial Sequence
  Synthetic oligonucleotide: CTLA4-3064
cugaauucuuuccuucugcaaaac

SEQ ID NO: 48671 - RNA, 18 nt, Artificial Sequence
  Synthetic oligonucleotide: CTLA4-3065
uauaaaguauaugaaucc

SEQ ID NO: 48672 - RNA, 19 nt, Artificial Sequence
  Synthetic oligonucleotide: CTLA4-3066
uuauaaaguauaugaaucc

SEQ ID NO: 48673 - RNA, 20 nt, Artificial Sequence
  Synthetic oligonucleotide: CTLA4-1252
uuuauaaaguauaugaaucc

SEQ ID NO: 48674 - RNA, 21 nt, Artificial Sequence
  Synthetic oligonucleotide: CTLA4-3067
auuuauaaaguauaugaaucc

SEQ ID NO: 48675 - RNA, 22 nt, Artificial Sequence
  Synthetic oligonucleotide: CTLA4-3068
cauuuauaaaguauaugaaucc

SEQ ID NO: 48676 - RNA, 23 nt, Artificial Sequence
  Synthetic oligonucleotide: CTLA4-3069
ucauuuauaaaguauaugaaucc

SEQ ID NO: 48677 - RNA, 24 nt, Artificial Sequence
  Synthetic oligonucleotide: CTLA4-3070
uucauuuauaaaguauaugaaucc

SEQ ID NO: 48678 - RNA, 18 nt, Artificial Sequence
  Synthetic oligonucleotide: CTLA4-3071
cacuuuugaauuuucugc

SEQ ID NO: 48679 - RNA, 19 nt, Artificial Sequence
  Synthetic oligonucleotide: CTLA4-3072
ucacuuuugaauuuucugc

SEQ ID NO: 48680 - RNA, 20 nt, Artificial Sequence
  Synthetic oligonucleotide: CTLA4-1120
uucacuuuugaauuuucugc

SEQ ID NO: 48681 - RNA, 21 nt, Artificial Sequence
  Synthetic oligonucleotide: CTLA4-3073
cuucacuuuugaauuuucugc

SEQ ID NO: 48682 - RNA, 22 nt, Artificial Sequence
  Synthetic oligonucleotide: CTLA4-3074
ucuucacuuuugaauuuucugc

SEQ ID NO: 48683 - RNA, 23 nt, Artificial Sequence
  Synthetic oligonucleotide: CTLA4-3075
aucuucacuuuugaauuuucugc

SEQ ID NO: 48684 - RNA, 24 nt, Artificial Sequence
  Synthetic oligonucleotide: CTLA4-3076
aaucuucacuuuugaauuuucugc

SEQ ID NO: 48685 - RNA, 18 nt, Artificial Sequence
  Synthetic oligonucleotide: CTLA4-3077
ggaacuugugagcucauc

SEQ ID NO: 48686 - RNA, 19 nt, Artificial Sequence
  Synthetic oligonucleotide: CTLA4-3078
aggaacuugugagcucauc

SEQ ID NO: 48687 - RNA, 20 nt, Artificial Sequence
  Synthetic oligonucleotide: CTLA4-1037
aaggaacuugugagcucauc

SEQ ID NO: 48688 - RNA, 21 nt, Artificial Sequence
  Synthetic oligonucleotide: CTLA4-3079
aaaggaacuugugagcucauc

SEQ ID NO: 48689 - RNA, 22 nt, Artificial Sequence
  Synthetic oligonucleotide: CTLA4-3080
uaaaggaacuugugagcucauc

SEQ ID NO: 48690 - RNA, 23 nt, Artificial Sequence
  Synthetic oligonucleotide: CTLA4-3081
uuaaaggaacuugugagcucauc

SEQ ID NO: 48691 - RNA, 24 nt, Artificial Sequence
  Synthetic oligonucleotide: CTLA4-3082
uuuaaaggaacuugugagcucauc

SEQ ID NO: 48692 - RNA, 18 nt, Artificial Sequence
  Synthetic oligonucleotide: CTLA4-3083
guuugcaugucagccuuc

SEQ ID NO: 48693 - RNA, 19 nt, Artificial Sequence
  Synthetic oligonucleotide: CTLA4-3084
uguuugcaugucagccuuc

SEQ ID NO: 48694 - RNA, 20 nt, Artificial Sequence
  Synthetic oligonucleotide: CTLA4-3085
cuguuugcaugucagccuuc

SEQ ID NO: 48695 - RNA, 21 nt, Artificial Sequence
  Synthetic oligonucleotide: CTLA4-3086
ucuguuugcaugucagccuuc

SEQ ID NO: 48696 - RNA, 22 nt, Artificial Sequence
  Synthetic oligonucleotide: CTLA4-3087
gucuguuugcaugucagccuuc

SEQ ID NO: 48697 - RNA, 23 nt, Artificial Sequence
  Synthetic oligonucleotide: CTLA4-3088
ugucuguuugcaugucagccuuc

SEQ ID NO: 48698 - RNA, 24 nt, Artificial Sequence
  Synthetic oligonucleotide: CTLA4-3089
cugucuguuugcaugucagccuuc

SEQ ID NO: 48699 - RNA, 18 nt, Artificial Sequence
  Synthetic oligonucleotide: CTLA4-3090
uuuauaaaguauaugaau

SEQ ID NO: 48700 - RNA, 19 nt, Artificial Sequence
  Synthetic oligonucleotide: CTLA4-3091
auuuauaaaguauaugaau

SEQ ID NO: 48701 - RNA, 20 nt, Artificial Sequence
  Synthetic oligonucleotide: CTLA4-1253
cauuuauaaaguauaugaau

SEQ ID NO: 48702 - RNA, 21 nt, Artificial Sequence
  Synthetic oligonucleotide: CTLA4-3092
ucauuuauaaaguauaugaau

SEQ ID NO: 48703 - RNA, 22 nt, Artificial Sequence
  Synthetic oligonucleotide: CTLA4-3093
uucauuuauaaaguauaugaau

SEQ ID NO: 48704 - RNA, 23 nt, Artificial Sequence
  Synthetic oligonucleotide: CTLA4-3094
auucauuuauaaaguauaugaau

SEQ ID NO: 48705 - RNA, 24 nt, Artificial Sequence
  Synthetic oligonucleotide: CTLA4-3095
aauucauuuauaaaguauaugaau

SEQ ID NO: 48706 - RNA, 18 nt, Artificial Sequence
  Synthetic oligonucleotide: CTLA4-3096
aaaacugaggaucugcau

SEQ ID NO: 48707 - RNA, 19 nt, Artificial Sequence
  Synthetic oligonucleotide: CTLA4-3097
gaaaacugaggaucugcau

SEQ ID NO: 48708 - RNA, 20 nt, Artificial Sequence
  Synthetic oligonucleotide: CTLA4-1260
ugaaaacugaggaucugcau

SEQ ID NO: 48709 - RNA, 21 nt, Artificial Sequence
  Synthetic oligonucleotide: CTLA4-3098
cugaaaacugaggaucugcau

SEQ ID NO: 48710 - RNA, 22 nt, Artificial Sequence
  Synthetic oligonucleotide: CTLA4-3099
gcugaaaacugaggaucugcau

SEQ ID NO: 48711 - RNA, 23 nt, Artificial Sequence
  Synthetic oligonucleotide: CTLA4-3100
agcugaaaacugaggaucugcau

SEQ ID NO: 48712 - RNA, 24 nt, Artificial Sequence
  Synthetic oligonucleotide: CTLA4-3101
gagcugaaaacugaggaucugcau

SEQ ID NO: 48713 - RNA, 18 nt, Artificial Sequence
  Synthetic oligonucleotide: CTLA4-3102
ugcuugaaaaauuuguau

SEQ ID NO: 48714 - RNA, 19 nt, Artificial Sequence
  Synthetic oligonucleotide: CTLA4-3103
cugcuugaaaaauuuguau

SEQ ID NO: 48715 - RNA, 20 nt, Artificial Sequence
  Synthetic oligonucleotide: CTLA4-1121
ucugcuugaaaaauuuguau

SEQ ID NO: 48716 - RNA, 21 nt, Artificial Sequence
  Synthetic oligonucleotide: CTLA4-3104
uucugcuugaaaaauuuguau

SEQ ID NO: 48717 - RNA, 22 nt, Artificial Sequence
  Synthetic oligonucleotide: CTLA4-3105
uuucugcuugaaaaauuuguau

SEQ ID NO: 48718 - RNA, 23 nt, Artificial Sequence
  Synthetic oligonucleotide: CTLA4-3106
uuuucugcuugaaaaauuuguau

SEQ ID NO: 48719 - RNA, 24 nt, Artificial Sequence
  Synthetic oligonucleotide: CTLA4-3107
auuuucugcuugaaaaauuuguau

SEQ ID NO: 48720 - RNA, 18 nt, Artificial Sequence
  Synthetic oligonucleotide: CTLA4-3108
auuuggguuggcuuuucu

SEQ ID NO: 48721 - RNA, 19 nt, Artificial Sequence
  Synthetic oligonucleotide: CTLA4-3109
cauuuggguuggcuuuucu

SEQ ID NO: 48722 - RNA, 20 nt, Artificial Sequence
  Synthetic oligonucleotide: CTLA4-1125
ucauuuggguuggcuuuucu

SEQ ID NO: 48723 - RNA, 21 nt, Artificial Sequence
  Synthetic oligonucleotide: CTLA4-3110
aucauuuggguuggcuuuucu

SEQ ID NO: 48724 - RNA, 22 nt, Artificial Sequence
  Synthetic oligonucleotide: CTLA4-3111
aaucauuuggguuggcuuuucu

SEQ ID NO: 48725 - RNA, 23 nt, Artificial Sequence
  Synthetic oligonucleotide: CTLA4-3112
gaaucauuuggguuggcuuuucu

SEQ ID NO: 48726 - RNA, 24 nt, Artificial Sequence
  Synthetic oligonucleotide: CTLA4-3113
ugaaucauuuggguuggcuuuucu

SEQ ID NO: 48727 - RNA, 18 nt, Artificial Sequence
  Synthetic oligonucleotide: CTLA4-3114
ccagucucauagaagggu

SEQ ID NO: 48728 - RNA, 19 nt, Artificial Sequence
  Synthetic oligonucleotide: CTLA4-3115
uccagucucauagaagggu

SEQ ID NO: 48729 - RNA, 20 nt, Artificial Sequence
  Synthetic oligonucleotide: CTLA4-1033
uuccagucucauagaagggu

SEQ ID NO: 48730 - RNA, 21 nt, Artificial Sequence
  Synthetic oligonucleotide: CTLA4-3116
cuuccagucucauagaagggu

SEQ ID NO: 48731 - RNA, 22 nt, Artificial Sequence
  Synthetic oligonucleotide: CTLA4-3117
acuuccagucucauagaagggu

SEQ ID NO: 48732 - RNA, 23 nt, Artificial Sequence
  Synthetic oligonucleotide: CTLA4-3118
cacuuccagucucauagaagggu

SEQ ID NO: 48733 - RNA, 24 nt, Artificial Sequence
  Synthetic oligonucleotide: CTLA4-3119
ucacuuccagucucauagaagggu

SEQ ID NO: 48734 - RNA, 18 nt, Artificial Sequence
  Synthetic oligonucleotide: CTLA4-3120
cuuucuuuauuaaaaugu

SEQ ID NO: 48735 - RNA, 19 nt, Artificial Sequence
  Synthetic oligonucleotide: CTLA4-3121
ucuuucuuuauuaaaaugu

SEQ ID NO: 48736 - RNA, 20 nt, Artificial Sequence
  Synthetic oligonucleotide: CTLA4-1115
uucuuucuuuauuaaaaugu

SEQ ID NO: 48737 - RNA, 21 nt, Artificial Sequence
  Synthetic oligonucleotide: CTLA4-3122
uuucuuucuuuauuaaaaugu

SEQ ID NO: 48738 - RNA, 22 nt, Artificial Sequence
  Synthetic oligonucleotide: CTLA4-3123
guuucuuucuuuauuaaaaugu

SEQ ID NO: 48739 - RNA, 23 nt, Artificial Sequence
  Synthetic oligonucleotide: CTLA4-3124
uguuucuuucuuuauuaaaaugu

SEQ ID NO: 48740 - RNA, 24 nt, Artificial Sequence
  Synthetic oligonucleotide: CTLA4-3125
auguuucuuucuuuauuaaaaugu

SEQ ID NO: 48741 - RNA, 18 nt, Artificial Sequence
  Synthetic oligonucleotide: CTLA4-3126
uccuaagugcacagaauu

SEQ ID NO: 48742 - RNA, 19 nt, Artificial Sequence
  Synthetic oligonucleotide: CTLA4-3127
auccuaagugcacagaauu

SEQ ID NO: 48743 - RNA, 20 nt, Artificial Sequence
  Synthetic oligonucleotide: CTLA4-3128
aauccuaagugcacagaauu

SEQ ID NO: 48744 - RNA, 21 nt, Artificial Sequence
  Synthetic oligonucleotide: CTLA4-3129
caauccuaagugcacagaauu

SEQ ID NO: 48745 - RNA, 22 nt, Artificial Sequence
  Synthetic oligonucleotide: CTLA4-3130
ucaauccuaagugcacagaauu

SEQ ID NO: 48746 - RNA, 23 nt, Artificial Sequence
  Synthetic oligonucleotide: CTLA4-3131
uucaauccuaagugcacagaauu

SEQ ID NO: 48747 - RNA, 24 nt, Artificial Sequence
  Synthetic oligonucleotide: CTLA4-3132
auucaauccuaagugcacagaauu

SEQ ID NO: 48748 - RNA, 18 nt, Artificial Sequence
  Synthetic oligonucleotide: CTLA4-3133
uagcuaguagaauugauu

SEQ ID NO: 48749 - RNA, 19 nt, Artificial Sequence
  Synthetic oligonucleotide: CTLA4-3134
uuagcuaguagaauugauu

SEQ ID NO: 48750 - RNA, 20 nt, Artificial Sequence
  Synthetic oligonucleotide: CTLA4-1258
auuagcuaguagaauugauu

SEQ ID NO: 48751 - RNA, 21 nt, Artificial Sequence
  Synthetic oligonucleotide: CTLA4-3135
aauuagcuaguagaauugauu

SEQ ID NO: 48752 - RNA, 22 nt, Artificial Sequence
  Synthetic oligonucleotide: CTLA4-3136
uaauuagcuaguagaauugauu

SEQ ID NO: 48753 - RNA, 23 nt, Artificial Sequence
  Synthetic oligonucleotide: CTLA4-3137
cuaauuagcuaguagaauugauu

SEQ ID NO: 48754 - RNA, 24 nt, Artificial Sequence
  Synthetic oligonucleotide: CTLA4-3138
gcuaauuagcuaguagaauugauu

SEQ ID NO: 48755 - RNA, 18 nt, Artificial Sequence
  Synthetic oligonucleotide: CTLA4-3139
acccagcucaaauguauu

SEQ ID NO: 48756 - RNA, 19 nt, Artificial Sequence
  Synthetic oligonucleotide: CTLA4-3140
aacccagcucaaauguauu

SEQ ID NO: 48757 - RNA, 20 nt, Artificial Sequence
  Synthetic oligonucleotide: CTLA4-1036
aaacccagcucaaauguauu

SEQ ID NO: 48758 - RNA, 21 nt, Artificial Sequence
  Synthetic oligonucleotide: CTLA4-3141
gaaacccagcucaaauguauu

SEQ ID NO: 48759 - RNA, 22 nt, Artificial Sequence
  Synthetic oligonucleotide: CTLA4-3142
ugaaacccagcucaaauguauu

SEQ ID NO: 48760 - RNA, 23 nt, Artificial Sequence
  Synthetic oligonucleotide: CTLA4-3143
cugaaacccagcucaaauguauu

SEQ ID NO: 48761 - RNA, 24 nt, Artificial Sequence
  Synthetic oligonucleotide: CTLA4-3144
ccugaaacccagcucaaauguauu

SEQ ID NO: 48762 - RNA, 18 nt, Artificial Sequence
  Synthetic oligonucleotide: CTLA4-3145
uuuuuuuuaaaggaacuu

SEQ ID NO: 48763 - RNA, 19 nt, Artificial Sequence
  Synthetic oligonucleotide: CTLA4-3146
auuuuuuuuaaaggaacuu

SEQ ID NO: 48764 - RNA, 20 nt, Artificial Sequence
  Synthetic oligonucleotide: CTLA4-1038
aauuuuuuuuaaaggaacuu

SEQ ID NO: 48765 - RNA, 21 nt, Artificial Sequence
  Synthetic oligonucleotide: CTLA4-3147
caauuuuuuuuaaaggaacuu

SEQ ID NO: 48766 - RNA, 22 nt, Artificial Sequence
  Synthetic oligonucleotide: CTLA4-3148
ucaauuuuuuuuaaaggaacuu

SEQ ID NO: 48767 - RNA, 23 nt, Artificial Sequence
  Synthetic oligonucleotide: CTLA4-3149
gucaauuuuuuuuaaaggaacuu

SEQ ID NO: 48768 - RNA, 24 nt, Artificial Sequence
  Synthetic oligonucleotide: CTLA4-3150
agucaauuuuuuuuaaaggaacuu

SEQ ID NO: 48769 - RNA, 18 nt, Artificial Sequence
  Synthetic oligonucleotide: CTLA4-3151
uacagcugucacaaauuu

SEQ ID NO: 48770 - RNA, 19 nt, Artificial Sequence
  Synthetic oligonucleotide: CTLA4-3152
cuacagcugucacaaauuu

SEQ ID NO: 48771 - RNA, 20 nt, Artificial Sequence
  Synthetic oligonucleotide: CTLA4-1118
ucuacagcugucacaaauuu

SEQ ID NO: 48772 - RNA, 21 nt, Artificial Sequence
  Synthetic oligonucleotide: CTLA4-3153
gucuacagcugucacaaauuu

SEQ ID NO: 48773 - RNA, 22 nt, Artificial Sequence
  Synthetic oligonucleotide: CTLA4-3154
ugucuacagcugucacaaauuu

SEQ ID NO: 48774 - RNA, 23 nt, Artificial Sequence
  Synthetic oligonucleotide: CTLA4-3155
cugucuacagcugucacaaauuu

SEQ ID NO: 48775 - RNA, 24 nt, Artificial Sequence
  Synthetic oligonucleotide: CTLA4-3156
ccugucuacagcugucacaaauuu

SEQ ID NO: 48776 - RNA, 18 nt, Artificial Sequence
  Synthetic oligonucleotide: CTLA4-3157
ugaaaacucuccagauuu

SEQ ID NO: 48777 - RNA, 19 nt, Artificial Sequence
  Synthetic oligonucleotide: CTLA4-3158
augaaaacucuccagauuu

SEQ ID NO: 48778 - RNA, 20 nt, Artificial Sequence
  Synthetic oligonucleotide: CTLA4-1116
uaugaaaacucuccagauuu

SEQ ID NO: 48779 - RNA, 21 nt, Artificial Sequence
  Synthetic oligonucleotide: CTLA4-3159
guaugaaaacucuccagauuu

SEQ ID NO: 48780 - RNA, 22 nt, Artificial Sequence
  Synthetic oligonucleotide: CTLA4-3160
uguaugaaaacucuccagauuu

SEQ ID NO: 48781 - RNA, 23 nt, Artificial Sequence
  Synthetic oligonucleotide: CTLA4-3161
auguaugaaaacucuccagauuu

SEQ ID NO: 48782 - RNA, 24 nt, Artificial Sequence
  Synthetic oligonucleotide: CTLA4-3162
aauguaugaaaacucuccagauuu

SEQ ID NO: 48783 - RNA, 18 nt, Artificial Sequence
  Synthetic oligonucleotide: CTLA4-3163
aaaaaagucuauccuuuu

SEQ ID NO: 48784 - RNA, 19 nt, Artificial Sequence
  Synthetic oligonucleotide: CTLA4-3164
aaaaaaagucuauccuuuu

SEQ ID NO: 48785 - RNA, 20 nt, Artificial Sequence
  Synthetic oligonucleotide: CTLA4-1122
aaaaaaaagucuauccuuuu

SEQ ID NO: 48786 - RNA, 21 nt, Artificial Sequence
  Synthetic oligonucleotide: CTLA4-3165
gaaaaaaaagucuauccuuuu

SEQ ID NO: 48787 - RNA, 22 nt, Artificial Sequence
  Synthetic oligonucleotide: CTLA4-3166
agaaaaaaaagucuauccuuuu

SEQ ID NO: 48788 - RNA, 23 nt, Artificial Sequence
  Synthetic oligonucleotide: CTLA4-3167
uagaaaaaaaagucuauccuuuu

SEQ ID NO: 48789 - RNA, 24 nt, Artificial Sequence
  Synthetic oligonucleotide: CTLA4-3168
uuagaaaaaaaagucuauccuuuu

SEQ ID NO: 48790 - RNA, 18 nt, Artificial Sequence
  Synthetic oligonucleotide: CTLA4-3169
uguugaguuaaggcuuuu

SEQ ID NO: 48791 - RNA, 19 nt, Artificial Sequence
  Synthetic oligonucleotide: CTLA4-3170
cuguugaguuaaggcuuuu

SEQ ID NO: 48792 - RNA, 20 nt, Artificial Sequence
  Synthetic oligonucleotide: CTLA4-1127
ucuguugaguuaaggcuuuu

SEQ ID NO: 48793 - RNA, 21 nt, Artificial Sequence
  Synthetic oligonucleotide: CTLA4-3171
cucuguugaguuaaggcuuuu

SEQ ID NO: 48794 - RNA, 22 nt, Artificial Sequence
  Synthetic oligonucleotide: CTLA4-3172
ucucuguugaguuaaggcuuuu

SEQ ID NO: 48795 - RNA, 23 nt, Artificial Sequence
  Synthetic oligonucleotide: CTLA4-3173
gucucuguugaguuaaggcuuuu

SEQ ID NO: 48796 - RNA, 24 nt, Artificial Sequence
  Synthetic oligonucleotide: CTLA4-3174
ugucucuguugaguuaaggcuuuu

SEQ ID NO: 48797 - RNA, 18 nt, Artificial Sequence
  Synthetic oligonucleotide: CTLA4-3175
caagcagaaaauucaaaa

SEQ ID NO: 48798 - RNA, 19 nt, Artificial Sequence
  Synthetic oligonucleotide: CTLA4-3176
ucaagcagaaaauucaaaa

SEQ ID NO: 48799 - RNA, 20 nt, Artificial Sequence
  Synthetic oligonucleotide: CTLA4-1228
uucaagcagaaaauucaaaa

SEQ ID NO: 48800 - RNA, 21 nt, Artificial Sequence
  Synthetic oligonucleotide: CTLA4-3177
uuucaagcagaaaauucaaaa

SEQ ID NO: 48801 - RNA, 22 nt, Artificial Sequence
  Synthetic oligonucleotide: CTLA4-3178
uuuucaagcagaaaauucaaaa

SEQ ID NO: 48802 - RNA, 23 nt, Artificial Sequence
  Synthetic oligonucleotide: CTLA4-3179
uuuuucaagcagaaaauucaaaa

SEQ ID NO: 48803 - RNA, 24 nt, Artificial Sequence
  Synthetic oligonucleotide: CTLA4-3180
auuuuucaagcagaaaauucaaaa

SEQ ID NO: 48804 - RNA, 18 nt, Artificial Sequence
  Synthetic oligonucleotide: CTLA4-3181
aaaaaaaagacaaggaaa

SEQ ID NO: 48805 - RNA, 19 nt, Artificial Sequence
  Synthetic oligonucleotide: CTLA4-3182
aaaaaaaaagacaaggaaa

SEQ ID NO: 48806 - RNA, 20 nt, Artificial Sequence
  Synthetic oligonucleotide: CTLA4-713
aaaaaaaaaagacaaggaaa

SEQ ID NO: 48807 - RNA, 21 nt, Artificial Sequence
  Synthetic oligonucleotide: CTLA4-3183
caaaaaaaaaagacaaggaaa

SEQ ID NO: 48808 - RNA, 22 nt, Artificial Sequence
  Synthetic oligonucleotide: CTLA4-3184
ccaaaaaaaaaagacaaggaaa

SEQ ID NO: 48809 - RNA, 23 nt, Artificial Sequence
  Synthetic oligonucleotide: CTLA4-3185
gccaaaaaaaaaagacaaggaaa

SEQ ID NO: 48810 - RNA, 24 nt, Artificial Sequence
  Synthetic oligonucleotide: CTLA4-3186
ugccaaaaaaaaaagacaaggaaa

SEQ ID NO: 48811 - RNA, 18 nt, Artificial Sequence
  Synthetic oligonucleotide: CTLA4-3187
uuaaaagccuuaacucaa

SEQ ID NO: 48812 - RNA, 19 nt, Artificial Sequence
  Synthetic oligonucleotide: CTLA4-3188
cuuaaaagccuuaacucaa

SEQ ID NO: 48813 - RNA, 20 nt, Artificial Sequence
  Synthetic oligonucleotide: CTLA4-1237
ucuuaaaagccuuaacucaa

SEQ ID NO: 48814 - RNA, 21 nt, Artificial Sequence
  Synthetic oligonucleotide: CTLA4-3189
uucuuaaaagccuuaacucaa

SEQ ID NO: 48815 - RNA, 22 nt, Artificial Sequence
  Synthetic oligonucleotide: CTLA4-3190
guucuuaaaagccuuaacucaa

SEQ ID NO: 48816 - RNA, 23 nt, Artificial Sequence
  Synthetic oligonucleotide: CTLA4-3191
uguucuuaaaagccuuaacucaa

SEQ ID NO: 48817 - RNA, 24 nt, Artificial Sequence
  Synthetic oligonucleotide: CTLA4-3192
guguucuuaaaagccuuaacucaa

SEQ ID NO: 48818 - RNA, 18 nt, Artificial Sequence
  Synthetic oligonucleotide: CTLA4-3193
aaaaaaaaagacaaggaa

SEQ ID NO: 48819 - RNA, 19 nt, Artificial Sequence
  Synthetic oligonucleotide: CTLA4-3194
aaaaaaaaaagacaaggaa

SEQ ID NO: 48820 - RNA, 20 nt, Artificial Sequence
  Synthetic oligonucleotide: CTLA4-1151
caaaaaaaaaagacaaggaa

SEQ ID NO: 48821 - RNA, 21 nt, Artificial Sequence
  Synthetic oligonucleotide: CTLA4-3195
ccaaaaaaaaaagacaaggaa

SEQ ID NO: 48822 - RNA, 22 nt, Artificial Sequence
  Synthetic oligonucleotide: CTLA4-3196
gccaaaaaaaaaagacaaggaa

SEQ ID NO: 48823 - RNA, 23 nt, Artificial Sequence
  Synthetic oligonucleotide: CTLA4-3197
ugccaaaaaaaaaagacaaggaa

SEQ ID NO: 48824 - RNA, 24 nt, Artificial Sequence
  Synthetic oligonucleotide: CTLA4-3198
uugccaaaaaaaaaagacaaggaa

SEQ ID NO: 48825 - RNA, 18 nt, Artificial Sequence
  Synthetic oligonucleotide: CTLA4-3199
gcaaacagacaguuguaa

SEQ ID NO: 48826 - RNA, 19 nt, Artificial Sequence
  Synthetic oligonucleotide: CTLA4-3200
ugcaaacagacaguuguaa

SEQ ID NO: 48827 - RNA, 20 nt, Artificial Sequence
  Synthetic oligonucleotide: CTLA4-3201
augcaaacagacaguuguaa

SEQ ID NO: 48828 - RNA, 21 nt, Artificial Sequence
  Synthetic oligonucleotide: CTLA4-3202
caugcaaacagacaguuguaa

SEQ ID NO: 48829 - RNA, 22 nt, Artificial Sequence
  Synthetic oligonucleotide: CTLA4-3203
acaugcaaacagacaguuguaa

SEQ ID NO: 48830 - RNA, 23 nt, Artificial Sequence
  Synthetic oligonucleotide: CTLA4-3204
gacaugcaaacagacaguuguaa

SEQ ID NO: 48831 - RNA, 24 nt, Artificial Sequence
  Synthetic oligonucleotide: CTLA4-3205
ugacaugcaaacagacaguuguaa

SEQ ID NO: 48832 - RNA, 18 nt, Artificial Sequence
  Synthetic oligonucleotide: CTLA4-3206
agacuggaagugauuuaa

SEQ ID NO: 48833 - RNA, 19 nt, Artificial Sequence
  Synthetic oligonucleotide: CTLA4-3207
gagacuggaagugauuuaa

SEQ ID NO: 48834 - RNA, 20 nt, Artificial Sequence
  Synthetic oligonucleotide: CTLA4-885
ugagacuggaagugauuuaa

SEQ ID NO: 48835 - RNA, 21 nt, Artificial Sequence
  Synthetic oligonucleotide: CTLA4-3208
augagacuggaagugauuuaa

SEQ ID NO: 48836 - RNA, 22 nt, Artificial Sequence
  Synthetic oligonucleotide: CTLA4-3209
uaugagacuggaagugauuuaa

SEQ ID NO: 48837 - RNA, 23 nt, Artificial Sequence
  Synthetic oligonucleotide: CTLA4-3210
cuaugagacuggaagugauuuaa

SEQ ID NO: 48838 - RNA, 24 nt, Artificial Sequence
  Synthetic oligonucleotide: CTLA4-3211
ucuaugagacuggaagugauuuaa

SEQ ID NO: 48839 - RNA, 18 nt, Artificial Sequence
  Synthetic oligonucleotide: CTLA4-3212
caaaaagaauuugaaaca

SEQ ID NO: 48840 - RNA, 19 nt, Artificial Sequence
  Synthetic oligonucleotide: CTLA4-3213
acaaaaagaauuugaaaca

SEQ ID NO: 48841 - RNA, 20 nt, Artificial Sequence
  Synthetic oligonucleotide: CTLA4-1223
aacaaaaagaauuugaaaca

SEQ ID NO: 48842 - RNA, 21 nt, Artificial Sequence
  Synthetic oligonucleotide: CTLA4-3214
uaacaaaaagaauuugaaaca

SEQ ID NO: 48843 - RNA, 22 nt, Artificial Sequence
  Synthetic oligonucleotide: CTLA4-3215
cuaacaaaaagaauuugaaaca

SEQ ID NO: 48844 - RNA, 23 nt, Artificial Sequence
  Synthetic oligonucleotide: CTLA4-3216
ucuaacaaaaagaauuugaaaca

SEQ ID NO: 48845 - RNA, 24 nt, Artificial Sequence
  Synthetic oligonucleotide: CTLA4-3217
aucuaacaaaaagaauuugaaaca

SEQ ID NO: 48846 - RNA, 18 nt, Artificial Sequence
  Synthetic oligonucleotide: CTLA4-3218
ugccaaaaaaaaaagaca

SEQ ID NO: 48847 - RNA, 19 nt, Artificial Sequence
  Synthetic oligonucleotide: CTLA4-3219
uugccaaaaaaaaaagaca

SEQ ID NO: 48848 - RNA, 20 nt, Artificial Sequence
  Synthetic oligonucleotide: CTLA4-712
auugccaaaaaaaaaagaca

SEQ ID NO: 48849 - RNA, 21 nt, Artificial Sequence
  Synthetic oligonucleotide: CTLA4-3220
aauugccaaaaaaaaaagaca

SEQ ID NO: 48850 - RNA, 22 nt, Artificial Sequence
  Synthetic oligonucleotide: CTLA4-3221
aaauugccaaaaaaaaaagaca

SEQ ID NO: 48851 - RNA, 23 nt, Artificial Sequence
  Synthetic oligonucleotide: CTLA4-3222
gaaauugccaaaaaaaaaagaca

SEQ ID NO: 48852 - RNA, 24 nt, Artificial Sequence
  Synthetic oligonucleotide: CTLA4-3223
ugaaauugccaaaaaaaaaagaca

SEQ ID NO: 48853 - RNA, 18 nt, Artificial Sequence
  Synthetic oligonucleotide: CTLA4-3224
agaguugaagaaggucca

SEQ ID NO: 48854 - RNA, 19 nt, Artificial Sequence
  Synthetic oligonucleotide: CTLA4-3225
cagaguugaagaaggucca

SEQ ID NO: 48855 - RNA, 20 nt, Artificial Sequence
  Synthetic oligonucleotide: CTLA4-1233
acagaguugaagaaggucca

SEQ ID NO: 48856 - RNA, 21 nt, Artificial Sequence
  Synthetic oligonucleotide: CTLA4-3226
aacagaguugaagaaggucca

SEQ ID NO: 48857 - RNA, 22 nt, Artificial Sequence
  Synthetic oligonucleotide: CTLA4-3227
aaacagaguugaagaaggucca

SEQ ID NO: 48858 - RNA, 23 nt, Artificial Sequence
  Synthetic oligonucleotide: CTLA4-3228
aaaacagaguugaagaaggucca

SEQ ID NO: 48859 - RNA, 24 nt, Artificial Sequence
  Synthetic oligonucleotide: CTLA4-3229
caaaacagaguugaagaaggucca

SEQ ID NO: 48860 - RNA, 18 nt, Artificial Sequence
  Synthetic oligonucleotide: CTLA4-3230
uaaagaaagaaacauuca

SEQ ID NO: 48861 - RNA, 19 nt, Artificial Sequence
  Synthetic oligonucleotide: CTLA4-3231
auaaagaaagaaacauuca

SEQ ID NO: 48862 - RNA, 20 nt, Artificial Sequence
  Synthetic oligonucleotide: CTLA4-762
aauaaagaaagaaacauuca

SEQ ID NO: 48863 - RNA, 21 nt, Artificial Sequence
  Synthetic oligonucleotide: CTLA4-3232
uaauaaagaaagaaacauuca

SEQ ID NO: 48864 - RNA, 22 nt, Artificial Sequence
  Synthetic oligonucleotide: CTLA4-3233
uuaauaaagaaagaaacauuca

SEQ ID NO: 48865 - RNA, 23 nt, Artificial Sequence
  Synthetic oligonucleotide: CTLA4-3234
uuuaauaaagaaagaaacauuca

SEQ ID NO: 48866 - RNA, 24 nt, Artificial Sequence
  Synthetic oligonucleotide: CTLA4-3235
uuuuaauaaagaaagaaacauuca

SEQ ID NO: 48867 - RNA, 18 nt, Artificial Sequence
  Synthetic oligonucleotide: CTLA4-3236
gacaaggaaaaggaaaga

SEQ ID NO: 48868 - RNA, 19 nt, Artificial Sequence
  Synthetic oligonucleotide: CTLA4-3237
agacaaggaaaaggaaaga

SEQ ID NO: 48869 - RNA, 20 nt, Artificial Sequence
  Synthetic oligonucleotide: CTLA4-1154
aagacaaggaaaaggaaaga

SEQ ID NO: 48870 - RNA, 21 nt, Artificial Sequence
  Synthetic oligonucleotide: CTLA4-3238
aaagacaaggaaaaggaaaga

SEQ ID NO: 48871 - RNA, 22 nt, Artificial Sequence
  Synthetic oligonucleotide: CTLA4-3239
aaaagacaaggaaaaggaaaga

SEQ ID NO: 48872 - RNA, 23 nt, Artificial Sequence
  Synthetic oligonucleotide: CTLA4-3240
aaaaagacaaggaaaaggaaaga

SEQ ID NO: 48873 - RNA, 24 nt, Artificial Sequence
  Synthetic oligonucleotide: CTLA4-3241
aaaaaagacaaggaaaaggaaaga

SEQ ID NO: 48874 - RNA, 18 nt, Artificial Sequence
  Synthetic oligonucleotide: CTLA4-3242
cauacauuuuaauaaaga

SEQ ID NO: 48875 - RNA, 19 nt, Artificial Sequence
  Synthetic oligonucleotide: CTLA4-3243
ucauacauuuuaauaaaga

SEQ ID NO: 48876 - RNA, 20 nt, Artificial Sequence
  Synthetic oligonucleotide: CTLA4-1217
uucauacauuuuaauaaaga

SEQ ID NO: 48877 - RNA, 21 nt, Artificial Sequence
  Synthetic oligonucleotide: CTLA4-3244
uuucauacauuuuaauaaaga

SEQ ID NO: 48878 - RNA, 22 nt, Artificial Sequence
  Synthetic oligonucleotide: CTLA4-3245
uuuucauacauuuuaauaaaga

SEQ ID NO: 48879 - RNA, 23 nt, Artificial Sequence
  Synthetic oligonucleotide: CTLA4-3246
guuuucauacauuuuaauaaaga

SEQ ID NO: 48880 - RNA, 24 nt, Artificial Sequence
  Synthetic oligonucleotide: CTLA4-3247
aguuuucauacauuuuaauaaaga

SEQ ID NO: 48881 - RNA, 18 nt, Artificial Sequence
  Synthetic oligonucleotide: CTLA4-3248
acuggaagugauuuaaga

SEQ ID NO: 48882 - RNA, 19 nt, Artificial Sequence
  Synthetic oligonucleotide: CTLA4-3249
gacuggaagugauuuaaga

SEQ ID NO: 48883 - RNA, 20 nt, Artificial Sequence
  Synthetic oligonucleotide: CTLA4-518
agacuggaagugauuuaaga

SEQ ID NO: 48884 - RNA, 21 nt, Artificial Sequence
  Synthetic oligonucleotide: CTLA4-3250
gagacuggaagugauuuaaga

SEQ ID NO: 48885 - RNA, 22 nt, Artificial Sequence
  Synthetic oligonucleotide: CTLA4-3251
ugagacuggaagugauuuaaga

SEQ ID NO: 48886 - RNA, 23 nt, Artificial Sequence
  Synthetic oligonucleotide: CTLA4-3252
augagacuggaagugauuuaaga

SEQ ID NO: 48887 - RNA, 24 nt, Artificial Sequence
  Synthetic oligonucleotide: CTLA4-3253
uaugagacuggaagugauuuaaga

SEQ ID NO: 48888 - RNA, 18 nt, Artificial Sequence
  Synthetic oligonucleotide: CTLA4-3254
ugccucugguuuugcaga

SEQ ID NO: 48889 - RNA, 19 nt, Artificial Sequence
  Synthetic oligonucleotide: CTLA4-3255
cugccucugguuuugcaga

SEQ ID NO: 48890 - RNA, 20 nt, Artificial Sequence
  Synthetic oligonucleotide: CTLA4-769
gcugccucugguuuugcaga

SEQ ID NO: 48891 - RNA, 21 nt, Artificial Sequence
  Synthetic oligonucleotide: CTLA4-3256
agcugccucugguuuugcaga

SEQ ID NO: 48892 - RNA, 22 nt, Artificial Sequence
  Synthetic oligonucleotide: CTLA4-3257
aagcugccucugguuuugcaga

SEQ ID NO: 48893 - RNA, 23 nt, Artificial Sequence
  Synthetic oligonucleotide: CTLA4-3258
gaagcugccucugguuuugcaga

SEQ ID NO: 48894 - RNA, 24 nt, Artificial Sequence
  Synthetic oligonucleotide: CTLA4-3259
agaagcugccucugguuuugcaga

SEQ ID NO: 48895 - RNA, 18 nt, Artificial Sequence
  Synthetic oligonucleotide: CTLA4-3260
ucagacccuucuaugaga

SEQ ID NO: 48896 - RNA, 19 nt, Artificial Sequence
  Synthetic oligonucleotide: CTLA4-3261
uucagacccuucuaugaga

SEQ ID NO: 48897 - RNA, 20 nt, Artificial Sequence
  Synthetic oligonucleotide: CTLA4-882
uuucagacccuucuaugaga

SEQ ID NO: 48898 - RNA, 21 nt, Artificial Sequence
  Synthetic oligonucleotide: CTLA4-3262
auuucagacccuucuaugaga

SEQ ID NO: 48899 - RNA, 22 nt, Artificial Sequence
  Synthetic oligonucleotide: CTLA4-3263
aauuucagacccuucuaugaga

SEQ ID NO: 48900 - RNA, 23 nt, Artificial Sequence
  Synthetic oligonucleotide: CTLA4-3264
caauuucagacccuucuaugaga

SEQ ID NO: 48901 - RNA, 24 nt, Artificial Sequence
  Synthetic oligonucleotide: CTLA4-3265
gcaauuucagacccuucuaugaga

SEQ ID NO: 48902 - RNA, 18 nt, Artificial Sequence
  Synthetic oligonucleotide: CTLA4-3266
auuugugacagcuguaga

SEQ ID NO: 48903 - RNA, 19 nt, Artificial Sequence
  Synthetic oligonucleotide: CTLA4-3267
aauuugugacagcuguaga

SEQ ID NO: 48904 - RNA, 20 nt, Artificial Sequence
  Synthetic oligonucleotide: CTLA4-1226
aaauuugugacagcuguaga

SEQ ID NO: 48905 - RNA, 21 nt, Artificial Sequence
  Synthetic oligonucleotide: CTLA4-3268
uaaauuugugacagcuguaga

SEQ ID NO: 48906 - RNA, 22 nt, Artificial Sequence
  Synthetic oligonucleotide: CTLA4-3269
uuaaauuugugacagcuguaga

SEQ ID NO: 48907 - RNA, 23 nt, Artificial Sequence
  Synthetic oligonucleotide: CTLA4-3270
cuuaaauuugugacagcuguaga

SEQ ID NO: 48908 - RNA, 24 nt, Artificial Sequence
  Synthetic oligonucleotide: CTLA4-3271
ccuuaaauuugugacagcuguaga

SEQ ID NO: 48909 - RNA, 18 nt, Artificial Sequence
  Synthetic oligonucleotide: CTLA4-3272
aaaagacaaggaaaagga

SEQ ID NO: 48910 - RNA, 19 nt, Artificial Sequence
  Synthetic oligonucleotide: CTLA4-3273
aaaaagacaaggaaaagga

SEQ ID NO: 48911 - RNA, 20 nt, Artificial Sequence
  Synthetic oligonucleotide: CTLA4-1153
aaaaaagacaaggaaaagga

SEQ ID NO: 48912 - RNA, 21 nt, Artificial Sequence
  Synthetic oligonucleotide: CTLA4-3274
aaaaaaagacaaggaaaagga

SEQ ID NO: 48913 - RNA, 22 nt, Artificial Sequence
  Synthetic oligonucleotide: CTLA4-3275
aaaaaaaagacaaggaaaagga

SEQ ID NO: 48914 - RNA, 23 nt, Artificial Sequence
  Synthetic oligonucleotide: CTLA4-3276
aaaaaaaaagacaaggaaaagga

SEQ ID NO: 48915 - RNA, 24 nt, Artificial Sequence
  Synthetic oligonucleotide: CTLA4-3277
aaaaaaaaaagacaaggaaaagga

SEQ ID NO: 48916 - RNA, 18 nt, Artificial Sequence
  Synthetic oligonucleotide: CTLA4-3278
uuuucauacauuuuaaua

SEQ ID NO: 48917 - RNA, 19 nt, Artificial Sequence
  Synthetic oligonucleotide: CTLA4-3279
guuuucauacauuuuaaua

SEQ ID NO: 48918 - RNA, 20 nt, Artificial Sequence
  Synthetic oligonucleotide: CTLA4-1218
aguuuucauacauuuuaaua

SEQ ID NO: 48919 - RNA, 21 nt, Artificial Sequence
  Synthetic oligonucleotide: CTLA4-3280
gaguuuucauacauuuuaaua

SEQ ID NO: 48920 - RNA, 22 nt, Artificial Sequence
  Synthetic oligonucleotide: CTLA4-3281
agaguuuucauacauuuuaaua

SEQ ID NO: 48921 - RNA, 23 nt, Artificial Sequence
  Synthetic oligonucleotide: CTLA4-3282
gagaguuuucauacauuuuaaua

SEQ ID NO: 48922 - RNA, 24 nt, Artificial Sequence
  Synthetic oligonucleotide: CTLA4-3283
ggagaguuuucauacauuuuaaua

SEQ ID NO: 48923 - RNA, 18 nt, Artificial Sequence
  Synthetic oligonucleotide: CTLA4-3284
augugaguugguuuagua

SEQ ID NO: 48924 - RNA, 19 nt, Artificial Sequence
  Synthetic oligonucleotide: CTLA4-3285
caugugaguugguuuagua

SEQ ID NO: 48925 - RNA, 20 nt, Artificial Sequence
  Synthetic oligonucleotide: CTLA4-880
gcaugugaguugguuuagua

SEQ ID NO: 48926 - RNA, 18 nt, Artificial Sequence
  Synthetic oligonucleotide: CTLA4-3286
cagcuuguuuaaaaugua

SEQ ID NO: 48927 - RNA, 19 nt, Artificial Sequence
  Synthetic oligonucleotide: CTLA4-3287
ccagcuuguuuaaaaugua

SEQ ID NO: 48928 - RNA, 20 nt, Artificial Sequence
  Synthetic oligonucleotide: CTLA4-707
gccagcuuguuuaaaaugua

SEQ ID NO: 48929 - RNA, 21 nt, Artificial Sequence
  Synthetic oligonucleotide: CTLA4-3288
agccagcuuguuuaaaaugua

SEQ ID NO: 48930 - RNA, 22 nt, Artificial Sequence
  Synthetic oligonucleotide: CTLA4-3289
uagccagcuuguuuaaaaugua

SEQ ID NO: 48931 - RNA, 23 nt, Artificial Sequence
  Synthetic oligonucleotide: CTLA4-3290
uuagccagcuuguuuaaaaugua

SEQ ID NO: 48932 - RNA, 24 nt, Artificial Sequence
  Synthetic oligonucleotide: CTLA4-3291
auuagccagcuuguuuaaaaugua

SEQ ID NO: 48933 - RNA, 18 nt, Artificial Sequence
  Synthetic oligonucleotide: CTLA4-3292
aacauaguugauaccuua

SEQ ID NO: 48934 - RNA, 19 nt, Artificial Sequence
  Synthetic oligonucleotide: CTLA4-3293
aaacauaguugauaccuua

SEQ ID NO: 48935 - RNA, 20 nt, Artificial Sequence
  Synthetic oligonucleotide: CTLA4-2143
aaaacauaguugauaccuua

SEQ ID NO: 48936 - RNA, 21 nt, Artificial Sequence
  Synthetic oligonucleotide: CTLA4-3294
aaaaacauaguugauaccuua

SEQ ID NO: 48937 - RNA, 22 nt, Artificial Sequence
  Synthetic oligonucleotide: CTLA4-3295
caaaaacauaguugauaccuua

SEQ ID NO: 48938 - RNA, 23 nt, Artificial Sequence
  Synthetic oligonucleotide: CTLA4-3296
acaaaaacauaguugauaccuua

SEQ ID NO: 48939 - RNA, 24 nt, Artificial Sequence
  Synthetic oligonucleotide: CTLA4-3297
aacaaaaacauaguugauaccuua

SEQ ID NO: 48940 - RNA, 18 nt, Artificial Sequence
  Synthetic oligonucleotide: CTLA4-3298
caaacagacaguuguaac

SEQ ID NO: 48941 - RNA, 19 nt, Artificial Sequence
  Synthetic oligonucleotide: CTLA4-3299
gcaaacagacaguuguaac

SEQ ID NO: 48942 - RNA, 20 nt, Artificial Sequence
  Synthetic oligonucleotide: CTLA4-2145
ugcaaacagacaguuguaac

SEQ ID NO: 48943 - RNA, 21 nt, Artificial Sequence
  Synthetic oligonucleotide: CTLA4-3300
augcaaacagacaguuguaac

SEQ ID NO: 48944 - RNA, 22 nt, Artificial Sequence
  Synthetic oligonucleotide: CTLA4-3301
caugcaaacagacaguuguaac

SEQ ID NO: 48945 - RNA, 23 nt, Artificial Sequence
  Synthetic oligonucleotide: CTLA4-3302
acaugcaaacagacaguuguaac

SEQ ID NO: 48946 - RNA, 24 nt, Artificial Sequence
  Synthetic oligonucleotide: CTLA4-3303
gacaugcaaacagacaguuguaac

SEQ ID NO: 48947 - RNA, 18 nt, Artificial Sequence
  Synthetic oligonucleotide: CTLA4-3304
uugccaaaaaaaaaagac

SEQ ID NO: 48948 - RNA, 19 nt, Artificial Sequence
  Synthetic oligonucleotide: CTLA4-3305
auugccaaaaaaaaaagac

SEQ ID NO: 48949 - RNA, 20 nt, Artificial Sequence
  Synthetic oligonucleotide: CTLA4-1149
aauugccaaaaaaaaaagac

SEQ ID NO: 48950 - RNA, 21 nt, Artificial Sequence
  Synthetic oligonucleotide: CTLA4-3306
aaauugccaaaaaaaaaagac

SEQ ID NO: 48951 - RNA, 22 nt, Artificial Sequence
  Synthetic oligonucleotide: CTLA4-3307
gaaauugccaaaaaaaaaagac

SEQ ID NO: 48952 - RNA, 23 nt, Artificial Sequence
  Synthetic oligonucleotide: CTLA4-3308
ugaaauugccaaaaaaaaaagac

SEQ ID NO: 48953 - RNA, 24 nt, Artificial Sequence
  Synthetic oligonucleotide: CTLA4-3309
uugaaauugccaaaaaaaaaagac

SEQ ID NO: 48954 - RNA, 18 nt, Artificial Sequence
  Synthetic oligonucleotide: CTLA4-3310
cagacccuucuaugagac

SEQ ID NO: 48955 - RNA, 19 nt, Artificial Sequence
  Synthetic oligonucleotide: CTLA4-3311
ucagacccuucuaugagac

SEQ ID NO: 48956 - RNA, 20 nt, Artificial Sequence
  Synthetic oligonucleotide: CTLA4-516
uucagacccuucuaugagac

SEQ ID NO: 48957 - RNA, 21 nt, Artificial Sequence
  Synthetic oligonucleotide: CTLA4-3312
uuucagacccuucuaugagac

SEQ ID NO: 48958 - RNA, 22 nt, Artificial Sequence
  Synthetic oligonucleotide: CTLA4-3313
auuucagacccuucuaugagac

SEQ ID NO: 48959 - RNA, 23 nt, Artificial Sequence
  Synthetic oligonucleotide: CTLA4-3314
aauuucagacccuucuaugagac

SEQ ID NO: 48960 - RNA, 24 nt, Artificial Sequence
  Synthetic oligonucleotide: CTLA4-3315
caauuucagacccuucuaugagac

SEQ ID NO: 48961 - RNA, 18 nt, Artificial Sequence
  Synthetic oligonucleotide: CTLA4-3316
auugacuuaagcaaaucc

SEQ ID NO: 48962 - RNA, 19 nt, Artificial Sequence
  Synthetic oligonucleotide: CTLA4-3317
aauugacuuaagcaaaucc

SEQ ID NO: 48963 - RNA, 20 nt, Artificial Sequence
  Synthetic oligonucleotide: CTLA4-2148
aaauugacuuaagcaaaucc

SEQ ID NO: 48964 - RNA, 21 nt, Artificial Sequence
  Synthetic oligonucleotide: CTLA4-3318
aaaauugacuuaagcaaaucc

SEQ ID NO: 48965 - RNA, 22 nt, Artificial Sequence
  Synthetic oligonucleotide: CTLA4-3319
aaaaauugacuuaagcaaaucc

SEQ ID NO: 48966 - RNA, 23 nt, Artificial Sequence
  Synthetic oligonucleotide: CTLA4-3320
aaaaaauugacuuaagcaaaucc

SEQ ID NO: 48967 - RNA, 24 nt, Artificial Sequence
  Synthetic oligonucleotide: CTLA4-3321
aaaaaaauugacuuaagcaaaucc

SEQ ID NO: 48968 - RNA, 18 nt, Artificial Sequence
  Synthetic oligonucleotide: CTLA4-3322
ggggaaccuguaauaugc

SEQ ID NO: 48969 - RNA, 19 nt, Artificial Sequence
  Synthetic oligonucleotide: CTLA4-3323
uggggaaccuguaauaugc

SEQ ID NO: 48970 - RNA, 20 nt, Artificial Sequence
  Synthetic oligonucleotide: CTLA4-3324
auggggaaccuguaauaugc

SEQ ID NO: 48971 - RNA, 21 nt, Artificial Sequence
  Synthetic oligonucleotide: CTLA4-3325
cauggggaaccuguaauaugc

SEQ ID NO: 48972 - RNA, 22 nt, Artificial Sequence
  Synthetic oligonucleotide: CTLA4-3326
ucauggggaaccuguaauaugc

SEQ ID NO: 48973 - RNA, 23 nt, Artificial Sequence
  Synthetic oligonucleotide: CTLA4-3327
uucauggggaaccuguaauaugc

SEQ ID NO: 48974 - RNA, 24 nt, Artificial Sequence
  Synthetic oligonucleotide: CTLA4-3328
auucauggggaaccuguaauaugc

SEQ ID NO: 48975 - RNA, 18 nt, Artificial Sequence
  Synthetic oligonucleotide: CTLA4-3329
aauugacuuaagcaaauc

SEQ ID NO: 48976 - RNA, 19 nt, Artificial Sequence
  Synthetic oligonucleotide: CTLA4-3330
aaauugacuuaagcaaauc

SEQ ID NO: 48977 - RNA, 20 nt, Artificial Sequence
  Synthetic oligonucleotide: CTLA4-3331
aaaauugacuuaagcaaauc

SEQ ID NO: 48978 - RNA, 21 nt, Artificial Sequence
  Synthetic oligonucleotide: CTLA4-3332
aaaaauugacuuaagcaaauc

SEQ ID NO: 48979 - RNA, 22 nt, Artificial Sequence
  Synthetic oligonucleotide: CTLA4-3333
aaaaaauugacuuaagcaaauc

SEQ ID NO: 48980 - RNA, 23 nt, Artificial Sequence
  Synthetic oligonucleotide: CTLA4-3334
aaaaaaauugacuuaagcaaauc

SEQ ID NO: 48981 - RNA, 24 nt, Artificial Sequence
  Synthetic oligonucleotide: CTLA4-3335
aaaaaaaauugacuuaagcaaauc

SEQ ID NO: 48982 - RNA, 18 nt, Artificial Sequence
  Synthetic oligonucleotide: CTLA4-3336
gaggaccuuccuuaaauc

SEQ ID NO: 48983 - RNA, 19 nt, Artificial Sequence
  Synthetic oligonucleotide: CTLA4-3337
ugaggaccuuccuuaaauc

SEQ ID NO: 48984 - RNA, 20 nt, Artificial Sequence
  Synthetic oligonucleotide: CTLA4-763
uugaggaccuuccuuaaauc

SEQ ID NO: 48985 - RNA, 21 nt, Artificial Sequence
  Synthetic oligonucleotide: CTLA4-3338
auugaggaccuuccuuaaauc

SEQ ID NO: 48986 - RNA, 22 nt, Artificial Sequence
  Synthetic oligonucleotide: CTLA4-3339
cauugaggaccuuccuuaaauc

SEQ ID NO: 48987 - RNA, 23 nt, Artificial Sequence
  Synthetic oligonucleotide: CTLA4-3340
acauugaggaccuuccuuaaauc

SEQ ID NO: 48988 - RNA, 24 nt, Artificial Sequence
  Synthetic oligonucleotide: CTLA4-3341
aacauugaggaccuuccuuaaauc

SEQ ID NO: 48989 - RNA, 18 nt, Artificial Sequence
  Synthetic oligonucleotide: CTLA4-3342
auaaagaaagaaacauuc

SEQ ID NO: 48990 - RNA, 19 nt, Artificial Sequence
  Synthetic oligonucleotide: CTLA4-3343
aauaaagaaagaaacauuc

SEQ ID NO: 48991 - RNA, 20 nt, Artificial Sequence
  Synthetic oligonucleotide: CTLA4-1216
uaauaaagaaagaaacauuc

SEQ ID NO: 48992 - RNA, 21 nt, Artificial Sequence
  Synthetic oligonucleotide: CTLA4-3344
uuaauaaagaaagaaacauuc

SEQ ID NO: 48993 - RNA, 22 nt, Artificial Sequence
  Synthetic oligonucleotide: CTLA4-3345
uuuaauaaagaaagaaacauuc

SEQ ID NO: 48994 - RNA, 23 nt, Artificial Sequence
  Synthetic oligonucleotide: CTLA4-3346
uuuuaauaaagaaagaaacauuc

SEQ ID NO: 48995 - RNA, 24 nt, Artificial Sequence
  Synthetic oligonucleotide: CTLA4-3347
auuuuaauaaagaaagaaacauuc

SEQ ID NO: 48996 - RNA, 18 nt, Artificial Sequence
  Synthetic oligonucleotide: CTLA4-3348
agccaacccaaaugauuc

SEQ ID NO: 48997 - RNA, 19 nt, Artificial Sequence
  Synthetic oligonucleotide: CTLA4-3349
aagccaacccaaaugauuc

SEQ ID NO: 48998 - RNA, 20 nt, Artificial Sequence
  Synthetic oligonucleotide: CTLA4-1232
aaagccaacccaaaugauuc

SEQ ID NO: 48999 - RNA, 21 nt, Artificial Sequence
  Synthetic oligonucleotide: CTLA4-3350
aaaagccaacccaaaugauuc

SEQ ID NO: 49000 - RNA, 22 nt, Artificial Sequence
  Synthetic oligonucleotide: CTLA4-3351
gaaaagccaacccaaaugauuc

SEQ ID NO: 49001 - RNA, 23 nt, Artificial Sequence
  Synthetic oligonucleotide: CTLA4-3352
agaaaagccaacccaaaugauuc

SEQ ID NO: 49002 - RNA, 24 nt, Artificial Sequence
  Synthetic oligonucleotide: CTLA4-3353
aagaaaagccaacccaaaugauuc

SEQ ID NO: 49003 - RNA, 18 nt, Artificial Sequence
  Synthetic oligonucleotide: CTLA4-3354
gauaccuuaaggggcuuc

SEQ ID NO: 49004 - RNA, 19 nt, Artificial Sequence
  Synthetic oligonucleotide: CTLA4-3355
ugauaccuuaaggggcuuc

SEQ ID NO: 49005 - RNA, 20 nt, Artificial Sequence
  Synthetic oligonucleotide: CTLA4-3356
uugauaccuuaaggggcuuc

SEQ ID NO: 49006 - RNA, 21 nt, Artificial Sequence
  Synthetic oligonucleotide: CTLA4-3357
guugauaccuuaaggggcuuc

SEQ ID NO: 49007 - RNA, 22 nt, Artificial Sequence
  Synthetic oligonucleotide: CTLA4-3358
aguugauaccuuaaggggcuuc

SEQ ID NO: 49008 - RNA, 23 nt, Artificial Sequence
  Synthetic oligonucleotide: CTLA4-3359
uaguugauaccuuaaggggcuuc

SEQ ID NO: 49009 - RNA, 24 nt, Artificial Sequence
  Synthetic oligonucleotide: CTLA4-3360
auaguugauaccuuaaggggcuuc

SEQ ID NO: 49010 - RNA, 18 nt, Artificial Sequence
  Synthetic oligonucleotide: CTLA4-3361
uaauacaaauuuuucaag

SEQ ID NO: 49011 - RNA, 19 nt, Artificial Sequence
  Synthetic oligonucleotide: CTLA4-3362
cuaauacaaauuuuucaag

SEQ ID NO: 49012 - RNA, 20 nt, Artificial Sequence
  Synthetic oligonucleotide: CTLA4-1229
ucuaauacaaauuuuucaag

SEQ ID NO: 49013 - RNA, 21 nt, Artificial Sequence
  Synthetic oligonucleotide: CTLA4-3363
uucuaauacaaauuuuucaag

SEQ ID NO: 49014 - RNA, 22 nt, Artificial Sequence
  Synthetic oligonucleotide: CTLA4-3364
uuucuaauacaaauuuuucaag

SEQ ID NO: 49015 - RNA, 23 nt, Artificial Sequence
  Synthetic oligonucleotide: CTLA4-3365
uuuucuaauacaaauuuuucaag

SEQ ID NO: 49016 - RNA, 24 nt, Artificial Sequence
  Synthetic oligonucleotide: CTLA4-3366
uuuuucuaauacaaauuuuucaag

SEQ ID NO: 49017 - RNA, 18 nt, Artificial Sequence
  Synthetic oligonucleotide: CTLA4-3367
gacuggaagugauuuaag

SEQ ID NO: 49018 - RNA, 19 nt, Artificial Sequence
  Synthetic oligonucleotide: CTLA4-3368
agacuggaagugauuuaag

SEQ ID NO: 49019 - RNA, 20 nt, Artificial Sequence
  Synthetic oligonucleotide: CTLA4-517
gagacuggaagugauuuaag

SEQ ID NO: 49020 - RNA, 21 nt, Artificial Sequence
  Synthetic oligonucleotide: CTLA4-3369
ugagacuggaagugauuuaag

SEQ ID NO: 49021 - RNA, 22 nt, Artificial Sequence
  Synthetic oligonucleotide: CTLA4-3370
augagacuggaagugauuuaag

SEQ ID NO: 49022 - RNA, 23 nt, Artificial Sequence
  Synthetic oligonucleotide: CTLA4-3371
uaugagacuggaagugauuuaag

SEQ ID NO: 49023 - RNA, 24 nt, Artificial Sequence
  Synthetic oligonucleotide: CTLA4-3372
cuaugagacuggaagugauuuaag

SEQ ID NO: 49024 - RNA, 18 nt, Artificial Sequence
  Synthetic oligonucleotide: CTLA4-3373
cugccucugguuuugcag

SEQ ID NO: 49025 - RNA, 19 nt, Artificial Sequence
  Synthetic oligonucleotide: CTLA4-3374
gcugccucugguuuugcag

SEQ ID NO: 49026 - RNA, 20 nt, Artificial Sequence
  Synthetic oligonucleotide: CTLA4-1240
agcugccucugguuuugcag

SEQ ID NO: 49027 - RNA, 21 nt, Artificial Sequence
  Synthetic oligonucleotide: CTLA4-3375
aagcugccucugguuuugcag

SEQ ID NO: 49028 - RNA, 22 nt, Artificial Sequence
  Synthetic oligonucleotide: CTLA4-3376
gaagcugccucugguuuugcag

SEQ ID NO: 49029 - RNA, 23 nt, Artificial Sequence
  Synthetic oligonucleotide: CTLA4-3377
agaagcugccucugguuuugcag

SEQ ID NO: 49030 - RNA, 24 nt, Artificial Sequence
  Synthetic oligonucleotide: CTLA4-3378
aagaagcugccucugguuuugcag

SEQ ID NO: 49031 - RNA, 18 nt, Artificial Sequence
  Synthetic oligonucleotide: CTLA4-3379
aacagagacaaaacagag

SEQ ID NO: 49032 - RNA, 19 nt, Artificial Sequence
  Synthetic oligonucleotide: CTLA4-3380
caacagagacaaaacagag

SEQ ID NO: 49033 - RNA, 20 nt, Artificial Sequence
  Synthetic oligonucleotide: CTLA4-1235
ucaacagagacaaaacagag

SEQ ID NO: 49034 - RNA, 21 nt, Artificial Sequence
  Synthetic oligonucleotide: CTLA4-3381
cucaacagagacaaaacagag

SEQ ID NO: 49035 - RNA, 22 nt, Artificial Sequence
  Synthetic oligonucleotide: CTLA4-3382
acucaacagagacaaaacagag

SEQ ID NO: 49036 - RNA, 23 nt, Artificial Sequence
  Synthetic oligonucleotide: CTLA4-3383
aacucaacagagacaaaacagag

SEQ ID NO: 49037 - RNA, 24 nt, Artificial Sequence
  Synthetic oligonucleotide: CTLA4-3384
uaacucaacagagacaaaacagag

SEQ ID NO: 49038 - RNA, 18 nt, Artificial Sequence
  Synthetic oligonucleotide: CTLA4-3385
gcaugugaguugguuuag

SEQ ID NO: 49039 - RNA, 19 nt, Artificial Sequence
  Synthetic oligonucleotide: CTLA4-3386
ugcaugugaguugguuuag

SEQ ID NO: 49040 - RNA, 20 nt, Artificial Sequence
  Synthetic oligonucleotide: CTLA4-879
augcaugugaguugguuuag

SEQ ID NO: 49041 - RNA, 18 nt, Artificial Sequence
  Synthetic oligonucleotide: CTLA4-3387
uuugagcuggguuucagg

SEQ ID NO: 49042 - RNA, 19 nt, Artificial Sequence
  Synthetic oligonucleotide: CTLA4-3388
auuugagcuggguuucagg

SEQ ID NO: 49043 - RNA, 20 nt, Artificial Sequence
  Synthetic oligonucleotide: CTLA4-893
cauuugagcuggguuucagg

SEQ ID NO: 49044 - RNA, 21 nt, Artificial Sequence
  Synthetic oligonucleotide: CTLA4-3389
acauuugagcuggguuucagg

SEQ ID NO: 49045 - RNA, 22 nt, Artificial Sequence
  Synthetic oligonucleotide: CTLA4-3390
uacauuugagcuggguuucagg

SEQ ID NO: 49046 - RNA, 23 nt, Artificial Sequence
  Synthetic oligonucleotide: CTLA4-3391
auacauuugagcuggguuucagg

SEQ ID NO: 49047 - RNA, 24 nt, Artificial Sequence
  Synthetic oligonucleotide: CTLA4-3392
aauacauuugagcuggguuucagg

SEQ ID NO: 49048 - RNA, 18 nt, Artificial Sequence
  Synthetic oligonucleotide: CTLA4-3393
gccagcuuguuuaaaaug

SEQ ID NO: 49049 - RNA, 19 nt, Artificial Sequence
  Synthetic oligonucleotide: CTLA4-3394
agccagcuuguuuaaaaug

SEQ ID NO: 49050 - RNA, 20 nt, Artificial Sequence
  Synthetic oligonucleotide: CTLA4-1141
uagccagcuuguuuaaaaug

SEQ ID NO: 49051 - RNA, 21 nt, Artificial Sequence
  Synthetic oligonucleotide: CTLA4-3395
uuagccagcuuguuuaaaaug

SEQ ID NO: 49052 - RNA, 22 nt, Artificial Sequence
  Synthetic oligonucleotide: CTLA4-3396
auuagccagcuuguuuaaaaug

SEQ ID NO: 49053 - RNA, 23 nt, Artificial Sequence
  Synthetic oligonucleotide: CTLA4-3397
aauuagccagcuuguuuaaaaug

SEQ ID NO: 49054 - RNA, 24 nt, Artificial Sequence
  Synthetic oligonucleotide: CTLA4-3398
gaauuagccagcuuguuuaaaaug

SEQ ID NO: 49055 - RNA, 18 nt, Artificial Sequence
  Synthetic oligonucleotide: CTLA4-3399
aagaaagaaacauucaug

SEQ ID NO: 49056 - RNA, 19 nt, Artificial Sequence
  Synthetic oligonucleotide: CTLA4-3400
aaagaaagaaacauucaug

SEQ ID NO: 49057 - RNA, 20 nt, Artificial Sequence
  Synthetic oligonucleotide: CTLA4-760
uaaagaaagaaacauucaug

SEQ ID NO: 49058 - RNA, 21 nt, Artificial Sequence
  Synthetic oligonucleotide: CTLA4-3401
auaaagaaagaaacauucaug

SEQ ID NO: 49059 - RNA, 22 nt, Artificial Sequence
  Synthetic oligonucleotide: CTLA4-3402
aauaaagaaagaaacauucaug

SEQ ID NO: 49060 - RNA, 23 nt, Artificial Sequence
  Synthetic oligonucleotide: CTLA4-3403
uaauaaagaaagaaacauucaug

SEQ ID NO: 49061 - RNA, 24 nt, Artificial Sequence
  Synthetic oligonucleotide: CTLA4-3404
uuaauaaagaaagaaacauucaug

SEQ ID NO: 49062 - RNA, 18 nt, Artificial Sequence
  Synthetic oligonucleotide: CTLA4-3405
uaaaauguagggaaauug

SEQ ID NO: 49063 - RNA, 19 nt, Artificial Sequence
  Synthetic oligonucleotide: CTLA4-3406
uuaaaauguagggaaauug

SEQ ID NO: 49064 - RNA, 20 nt, Artificial Sequence
  Synthetic oligonucleotide: CTLA4-708
uuuaaaauguagggaaauug

SEQ ID NO: 49065 - RNA, 21 nt, Artificial Sequence
  Synthetic oligonucleotide: CTLA4-3407
guuuaaaauguagggaaauug

SEQ ID NO: 49066 - RNA, 22 nt, Artificial Sequence
  Synthetic oligonucleotide: CTLA4-3408
uguuuaaaauguagggaaauug

SEQ ID NO: 49067 - RNA, 23 nt, Artificial Sequence
  Synthetic oligonucleotide: CTLA4-3409
uuguuuaaaauguagggaaauug

SEQ ID NO: 49068 - RNA, 24 nt, Artificial Sequence
  Synthetic oligonucleotide: CTLA4-3410
cuuguuuaaaauguagggaaauug

SEQ ID NO: 49069 - RNA, 18 nt, Artificial Sequence
  Synthetic oligonucleotide: CTLA4-3411
agagacaaaacagaguug

SEQ ID NO: 49070 - RNA, 19 nt, Artificial Sequence
  Synthetic oligonucleotide: CTLA4-3412
cagagacaaaacagaguug

SEQ ID NO: 49071 - RNA, 20 nt, Artificial Sequence
  Synthetic oligonucleotide: CTLA4-1234
acagagacaaaacagaguug

SEQ ID NO: 49072 - RNA, 21 nt, Artificial Sequence
  Synthetic oligonucleotide: CTLA4-3413
aacagagacaaaacagaguug

SEQ ID NO: 49073 - RNA, 22 nt, Artificial Sequence
  Synthetic oligonucleotide: CTLA4-3414
caacagagacaaaacagaguug

SEQ ID NO: 49074 - RNA, 23 nt, Artificial Sequence
  Synthetic oligonucleotide: CTLA4-3415
ucaacagagacaaaacagaguug

SEQ ID NO: 49075 - RNA, 24 nt, Artificial Sequence
  Synthetic oligonucleotide: CTLA4-3416
cucaacagagacaaaacagaguug

SEQ ID NO: 49076 - RNA, 18 nt, Artificial Sequence
  Synthetic oligonucleotide: CTLA4-3417
aagcugccucugguuuug

SEQ ID NO: 49077 - RNA, 19 nt, Artificial Sequence
  Synthetic oligonucleotide: CTLA4-3418
gaagcugccucugguuuug

SEQ ID NO: 49078 - RNA, 20 nt, Artificial Sequence
  Synthetic oligonucleotide: CTLA4-1241
agaagcugccucugguuuug

SEQ ID NO: 49079 - RNA, 21 nt, Artificial Sequence
  Synthetic oligonucleotide: CTLA4-3419
aagaagcugccucugguuuug

SEQ ID NO: 49080 - RNA, 22 nt, Artificial Sequence
  Synthetic oligonucleotide: CTLA4-3420
aaagaagcugccucugguuuug

SEQ ID NO: 49081 - RNA, 23 nt, Artificial Sequence
  Synthetic oligonucleotide: CTLA4-3421
aaaagaagcugccucugguuuug

SEQ ID NO: 49082 - RNA, 24 nt, Artificial Sequence
  Synthetic oligonucleotide: CTLA4-3422
gaaaagaagcugccucugguuuug

SEQ ID NO: 49083 - RNA, 18 nt, Artificial Sequence
  Synthetic oligonucleotide: CTLA4-3423
ugaggaccuuccuuaaau

SEQ ID NO: 49084 - RNA, 19 nt, Artificial Sequence
  Synthetic oligonucleotide: CTLA4-3424
uugaggaccuuccuuaaau

SEQ ID NO: 49085 - RNA, 20 nt, Artificial Sequence
  Synthetic oligonucleotide: CTLA4-1221
auugaggaccuuccuuaaau

SEQ ID NO: 49086 - RNA, 21 nt, Artificial Sequence
  Synthetic oligonucleotide: CTLA4-3425
cauugaggaccuuccuuaaau

SEQ ID NO: 49087 - RNA, 22 nt, Artificial Sequence
  Synthetic oligonucleotide: CTLA4-3426
acauugaggaccuuccuuaaau

SEQ ID NO: 49088 - RNA, 23 nt, Artificial Sequence
  Synthetic oligonucleotide: CTLA4-3427
aacauugaggaccuuccuuaaau

SEQ ID NO: 49089 - RNA, 24 nt, Artificial Sequence
  Synthetic oligonucleotide: CTLA4-3428
aaacauugaggaccuuccuuaaau

SEQ ID NO: 49090 - RNA, 18 nt, Artificial Sequence
  Synthetic oligonucleotide: CTLA4-3429
ugaucuaacaaaaagaau

SEQ ID NO: 49091 - RNA, 19 nt, Artificial Sequence
  Synthetic oligonucleotide: CTLA4-3430
augaucuaacaaaaagaau

SEQ ID NO: 49092 - RNA, 20 nt, Artificial Sequence
  Synthetic oligonucleotide: CTLA4-1224
aaugaucuaacaaaaagaau

SEQ ID NO: 49093 - RNA, 21 nt, Artificial Sequence
  Synthetic oligonucleotide: CTLA4-3431
caaugaucuaacaaaaagaau

SEQ ID NO: 49094 - RNA, 22 nt, Artificial Sequence
  Synthetic oligonucleotide: CTLA4-3432
ccaaugaucuaacaaaaagaau

SEQ ID NO: 49095 - RNA, 23 nt, Artificial Sequence
  Synthetic oligonucleotide: CTLA4-3433
accaaugaucuaacaaaaagaau

SEQ ID NO: 49096 - RNA, 24 nt, Artificial Sequence
  Synthetic oligonucleotide: CTLA4-3434
gaccaaugaucuaacaaaaagaau

SEQ ID NO: 49097 - RNA, 18 nt, Artificial Sequence
  Synthetic oligonucleotide: CTLA4-3435
ccauaguccugaauacau

SEQ ID NO: 49098 - RNA, 19 nt, Artificial Sequence
  Synthetic oligonucleotide: CTLA4-3436
gccauaguccugaauacau

SEQ ID NO: 49099 - RNA, 20 nt, Artificial Sequence
  Synthetic oligonucleotide: CTLA4-890
agccauaguccugaauacau

SEQ ID NO: 49100 - RNA, 21 nt, Artificial Sequence
  Synthetic oligonucleotide: CTLA4-3437
uagccauaguccugaauacau

SEQ ID NO: 49101 - RNA, 22 nt, Artificial Sequence
  Synthetic oligonucleotide: CTLA4-3438
auagccauaguccugaauacau

SEQ ID NO: 49102 - RNA, 23 nt, Artificial Sequence
  Synthetic oligonucleotide: CTLA4-3439
gauagccauaguccugaauacau

SEQ ID NO: 49103 - RNA, 24 nt, Artificial Sequence
  Synthetic oligonucleotide: CTLA4-3440
ggauagccauaguccugaauacau

SEQ ID NO: 49104 - RNA, 18 nt, Artificial Sequence
  Synthetic oligonucleotide: CTLA4-3441
aaagaaagaaacauucau

SEQ ID NO: 49105 - RNA, 19 nt, Artificial Sequence
  Synthetic oligonucleotide: CTLA4-3442
uaaagaaagaaacauucau

SEQ ID NO: 49106 - RNA, 20 nt, Artificial Sequence
  Synthetic oligonucleotide: CTLA4-761
auaaagaaagaaacauucau

SEQ ID NO: 49107 - RNA, 21 nt, Artificial Sequence
  Synthetic oligonucleotide: CTLA4-3443
aauaaagaaagaaacauucau

SEQ ID NO: 49108 - RNA, 22 nt, Artificial Sequence
  Synthetic oligonucleotide: CTLA4-3444
uaauaaagaaagaaacauucau

SEQ ID NO: 49109 - RNA, 23 nt, Artificial Sequence
  Synthetic oligonucleotide: CTLA4-3445
uuaauaaagaaagaaacauucau

SEQ ID NO: 49110 - RNA, 24 nt, Artificial Sequence
  Synthetic oligonucleotide: CTLA4-3446
uuuaauaaagaaagaaacauucau

SEQ ID NO: 49111 - RNA, 18 nt, Artificial Sequence
  Synthetic oligonucleotide: CTLA4-3447
ccaaaugauucaagagau

SEQ ID NO: 49112 - RNA, 19 nt, Artificial Sequence
  Synthetic oligonucleotide: CTLA4-3448
cccaaaugauucaagagau

SEQ ID NO: 49113 - RNA, 20 nt, Artificial Sequence
  Synthetic oligonucleotide: CTLA4-1231
acccaaaugauucaagagau

SEQ ID NO: 49114 - RNA, 21 nt, Artificial Sequence
  Synthetic oligonucleotide: CTLA4-3449
aacccaaaugauucaagagau

SEQ ID NO: 49115 - RNA, 22 nt, Artificial Sequence
  Synthetic oligonucleotide: CTLA4-3450
caacccaaaugauucaagagau

SEQ ID NO: 49116 - RNA, 23 nt, Artificial Sequence
  Synthetic oligonucleotide: CTLA4-3451
ccaacccaaaugauucaagagau

SEQ ID NO: 49117 - RNA, 24 nt, Artificial Sequence
  Synthetic oligonucleotide: CTLA4-3452
gccaacccaaaugauucaagagau

SEQ ID NO: 49118 - RNA, 18 nt, Artificial Sequence
  Synthetic oligonucleotide: CTLA4-3453
uugacuuaagcaaauccu

SEQ ID NO: 49119 - RNA, 19 nt, Artificial Sequence
  Synthetic oligonucleotide: CTLA4-3454
auugacuuaagcaaauccu

SEQ ID NO: 49120 - RNA, 20 nt, Artificial Sequence
  Synthetic oligonucleotide: CTLA4-2152
aauugacuuaagcaaauccu

SEQ ID NO: 49121 - RNA, 21 nt, Artificial Sequence
  Synthetic oligonucleotide: CTLA4-3455
aaauugacuuaagcaaauccu

SEQ ID NO: 49122 - RNA, 22 nt, Artificial Sequence
  Synthetic oligonucleotide: CTLA4-3456
aaaauugacuuaagcaaauccu

SEQ ID NO: 49123 - RNA, 23 nt, Artificial Sequence
  Synthetic oligonucleotide: CTLA4-3457
aaaaauugacuuaagcaaauccu

SEQ ID NO: 49124 - RNA, 24 nt, Artificial Sequence
  Synthetic oligonucleotide: CTLA4-3458
aaaaaauugacuuaagcaaauccu

SEQ ID NO: 49125 - RNA, 18 nt, Artificial Sequence
  Synthetic oligonucleotide: CTLA4-3459
gcaauuucagacccuucu

SEQ ID NO: 49126 - RNA, 19 nt, Artificial Sequence
  Synthetic oligonucleotide: CTLA4-3460
ggcaauuucagacccuucu

SEQ ID NO: 49127 - RNA, 20 nt, Artificial Sequence
  Synthetic oligonucleotide: CTLA4-881
aggcaauuucagacccuucu

SEQ ID NO: 49128 - RNA, 21 nt, Artificial Sequence
  Synthetic oligonucleotide: CTLA4-3461
caggcaauuucagacccuucu

SEQ ID NO: 49129 - RNA, 22 nt, Artificial Sequence
  Synthetic oligonucleotide: CTLA4-3462
acaggcaauuucagacccuucu

SEQ ID NO: 49130 - RNA, 23 nt, Artificial Sequence
  Synthetic oligonucleotide: CTLA4-3463
cacaggcaauuucagacccuucu

SEQ ID NO: 49131 - RNA, 24 nt, Artificial Sequence
  Synthetic oligonucleotide: CTLA4-3464
acacaggcaauuucagacccuucu

SEQ ID NO: 49132 - RNA, 18 nt, Artificial Sequence
  Synthetic oligonucleotide: CTLA4-3465
uuauuuaaaaauaaaagu

SEQ ID NO: 49133 - RNA, 19 nt, Artificial Sequence
  Synthetic oligonucleotide: CTLA4-3466
auuauuuaaaaauaaaagu

SEQ ID NO: 49134 - RNA, 20 nt, Artificial Sequence
  Synthetic oligonucleotide: CTLA4-1148
aauuauuuaaaaauaaaagu

SEQ ID NO: 49135 - RNA, 21 nt, Artificial Sequence
  Synthetic oligonucleotide: CTLA4-3467
caauuauuuaaaaauaaaagu

SEQ ID NO: 49136 - RNA, 22 nt, Artificial Sequence
  Synthetic oligonucleotide: CTLA4-3468
ccaauuauuuaaaaauaaaagu

SEQ ID NO: 49137 - RNA, 23 nt, Artificial Sequence
  Synthetic oligonucleotide: CTLA4-3469
gccaauuauuuaaaaauaaaagu

SEQ ID NO: 49138 - RNA, 24 nt, Artificial Sequence
  Synthetic oligonucleotide: CTLA4-3470
agccaauuauuuaaaaauaaaagu

SEQ ID NO: 49139 - RNA, 18 nt, Artificial Sequence
  Synthetic oligonucleotide: CTLA4-3471
ccagcuuguuuaaaaugu

SEQ ID NO: 49140 - RNA, 19 nt, Artificial Sequence
  Synthetic oligonucleotide: CTLA4-3472
gccagcuuguuuaaaaugu

SEQ ID NO: 49141 - RNA, 20 nt, Artificial Sequence
  Synthetic oligonucleotide: CTLA4-706
agccagcuuguuuaaaaugu

SEQ ID NO: 49142 - RNA, 21 nt, Artificial Sequence
  Synthetic oligonucleotide: CTLA4-3473
uagccagcuuguuuaaaaugu

SEQ ID NO: 49143 - RNA, 22 nt, Artificial Sequence
  Synthetic oligonucleotide: CTLA4-3474
uuagccagcuuguuuaaaaugu

SEQ ID NO: 49144 - RNA, 23 nt, Artificial Sequence
  Synthetic oligonucleotide: CTLA4-3475
auuagccagcuuguuuaaaaugu

SEQ ID NO: 49145 - RNA, 24 nt, Artificial Sequence
  Synthetic oligonucleotide: CTLA4-3476
aauuagccagcuuguuuaaaaugu

SEQ ID NO: 49146 - RNA, 18 nt, Artificial Sequence
  Synthetic oligonucleotide: CTLA4-3477
aaaauguagggaaauugu

SEQ ID NO: 49147 - RNA, 19 nt, Artificial Sequence
  Synthetic oligonucleotide: CTLA4-3478
uaaaauguagggaaauugu

SEQ ID NO: 49148 - RNA, 20 nt, Artificial Sequence
  Synthetic oligonucleotide: CTLA4-709
uuaaaauguagggaaauugu

SEQ ID NO: 49149 - RNA, 21 nt, Artificial Sequence
  Synthetic oligonucleotide: CTLA4-3479
uuuaaaauguagggaaauugu

SEQ ID NO: 49150 - RNA, 22 nt, Artificial Sequence
  Synthetic oligonucleotide: CTLA4-3480
guuuaaaauguagggaaauugu

SEQ ID NO: 49151 - RNA, 23 nt, Artificial Sequence
  Synthetic oligonucleotide: CTLA4-3481
uguuuaaaauguagggaaauugu

SEQ ID NO: 49152 - RNA, 24 nt, Artificial Sequence
  Synthetic oligonucleotide: CTLA4-3482
uuguuuaaaauguagggaaauugu

SEQ ID NO: 49153 - RNA, 18 nt, Artificial Sequence
  Synthetic oligonucleotide: CTLA4-3483
uuaaaauguagggaaauu

SEQ ID NO: 49154 - RNA, 19 nt, Artificial Sequence
  Synthetic oligonucleotide: CTLA4-3484
uuuaaaauguagggaaauu

SEQ ID NO: 49155 - RNA, 20 nt, Artificial Sequence
  Synthetic oligonucleotide: CTLA4-1144
guuuaaaauguagggaaauu

SEQ ID NO: 49156 - RNA, 21 nt, Artificial Sequence
  Synthetic oligonucleotide: CTLA4-3485
uguuuaaaauguagggaaauu

SEQ ID NO: 49157 - RNA, 22 nt, Artificial Sequence
  Synthetic oligonucleotide: CTLA4-3486
uuguuuaaaauguagggaaauu

SEQ ID NO: 49158 - RNA, 23 nt, Artificial Sequence
  Synthetic oligonucleotide: CTLA4-3487
cuuguuuaaaauguagggaaauu

SEQ ID NO: 49159 - RNA, 24 nt, Artificial Sequence
  Synthetic oligonucleotide: CTLA4-3488
gcuuguuuaaaauguagggaaauu

SEQ ID NO: 49160 - RNA, 18 nt, Artificial Sequence
  Synthetic oligonucleotide: CTLA4-3489
aaaagaauuugaaacauu

SEQ ID NO: 49161 - RNA, 19 nt, Artificial Sequence
  Synthetic oligonucleotide: CTLA4-3490
aaaaagaauuugaaacauu

SEQ ID NO: 49162 - RNA, 20 nt, Artificial Sequence
  Synthetic oligonucleotide: CTLA4-1222
caaaaagaauuugaaacauu

SEQ ID NO: 49163 - RNA, 21 nt, Artificial Sequence
  Synthetic oligonucleotide: CTLA4-3491
acaaaaagaauuugaaacauu

SEQ ID NO: 49164 - RNA, 22 nt, Artificial Sequence
  Synthetic oligonucleotide: CTLA4-3492
aacaaaaagaauuugaaacauu

SEQ ID NO: 49165 - RNA, 23 nt, Artificial Sequence
  Synthetic oligonucleotide: CTLA4-3493
uaacaaaaagaauuugaaacauu

SEQ ID NO: 49166 - RNA, 24 nt, Artificial Sequence
  Synthetic oligonucleotide: CTLA4-3494
cuaacaaaaagaauuugaaacauu

SEQ ID NO: 49167 - RNA, 18 nt, Artificial Sequence
  Synthetic oligonucleotide: CTLA4-3495
aaacauaguugauaccuu

SEQ ID NO: 49168 - RNA, 19 nt, Artificial Sequence
  Synthetic oligonucleotide: CTLA4-3496
aaaacauaguugauaccuu

SEQ ID NO: 49169 - RNA, 20 nt, Artificial Sequence
  Synthetic oligonucleotide: CTLA4-3497
aaaaacauaguugauaccuu

SEQ ID NO: 49170 - RNA, 21 nt, Artificial Sequence
  Synthetic oligonucleotide: CTLA4-3498
caaaaacauaguugauaccuu

SEQ ID NO: 49171 - RNA, 22 nt, Artificial Sequence
  Synthetic oligonucleotide: CTLA4-3499
acaaaaacauaguugauaccuu

SEQ ID NO: 49172 - RNA, 23 nt, Artificial Sequence
  Synthetic oligonucleotide: CTLA4-3500
aacaaaaacauaguugauaccuu

SEQ ID NO: 49173 - RNA, 24 nt, Artificial Sequence
  Synthetic oligonucleotide: CTLA4-3501
aaacaaaaacauaguugauaccuu

SEQ ID NO: 49174 - RNA, 18 nt, Artificial Sequence
  Synthetic oligonucleotide: CTLA4-3502
ccucaguuuucagcucuu

SEQ ID NO: 49175 - RNA, 19 nt, Artificial Sequence
  Synthetic oligonucleotide: CTLA4-3503
uccucaguuuucagcucuu

SEQ ID NO: 49176 - RNA, 20 nt, Artificial Sequence
  Synthetic oligonucleotide: CTLA4-1156
auccucaguuuucagcucuu

SEQ ID NO: 49177 - RNA, 21 nt, Artificial Sequence
  Synthetic oligonucleotide: CTLA4-3504
gauccucaguuuucagcucuu

SEQ ID NO: 49178 - RNA, 22 nt, Artificial Sequence
  Synthetic oligonucleotide: CTLA4-3505
agauccucaguuuucagcucuu

SEQ ID NO: 49179 - RNA, 23 nt, Artificial Sequence
  Synthetic oligonucleotide: CTLA4-3506
cagauccucaguuuucagcucuu

SEQ ID NO: 49180 - RNA, 24 nt, Artificial Sequence
  Synthetic oligonucleotide: CTLA4-3507
gcagauccucaguuuucagcucuu

SEQ ID NO: 49181 - RNA, 18 nt, Artificial Sequence
  Synthetic oligonucleotide: CTLA4-3508
ugagacuggaagugauuu

SEQ ID NO: 49182 - RNA, 19 nt, Artificial Sequence
  Synthetic oligonucleotide: CTLA4-3509
augagacuggaagugauuu

SEQ ID NO: 49183 - RNA, 20 nt, Artificial Sequence
  Synthetic oligonucleotide: CTLA4-884
uaugagacuggaagugauuu

SEQ ID NO: 49184 - RNA, 21 nt, Artificial Sequence
  Synthetic oligonucleotide: CTLA4-3510
cuaugagacuggaagugauuu

SEQ ID NO: 49185 - RNA, 22 nt, Artificial Sequence
  Synthetic oligonucleotide: CTLA4-3511
ucuaugagacuggaagugauuu

SEQ ID NO: 49186 - RNA, 23 nt, Artificial Sequence
  Synthetic oligonucleotide: CTLA4-3512
uucuaugagacuggaagugauuu

SEQ ID NO: 49187 - RNA, 24 nt, Artificial Sequence
  Synthetic oligonucleotide: CTLA4-3513
cuucuaugagacuggaagugauuu

SEQ ID NO: 49188 - RNA, 17 nt, Artificial Sequence
  Synthetic oligonucleotide: CTLA4-3514
ucguaaaaccaaaacaa

SEQ ID NO: 49189 - RNA, 17 nt, Artificial Sequence
  Synthetic oligonucleotide: CTLA4-1348
aauacagagccagccaa

SEQ ID NO: 49190 - RNA, 17 nt, Artificial Sequence
  Synthetic oligonucleotide: CTLA4-3515
uaaagguaaaacuccaa

SEQ ID NO: 49191 - RNA, 17 nt, Artificial Sequence
  Synthetic oligonucleotide: CTLA4-3516
gauccucaaagugaaca

SEQ ID NO: 49192 - RNA, 17 nt, Artificial Sequence
  Synthetic oligonucleotide: CTLA4-740
agggaccauuagaagga

SEQ ID NO: 49193 - RNA, 17 nt, Artificial Sequence
  Synthetic oligonucleotide: CTLA4-3517
aucaaggacuuuauaua

SEQ ID NO: 49194 - RNA, 17 nt, Artificial Sequence
  Synthetic oligonucleotide: CTLA4-1354
cucuuaaccaaaugcua

SEQ ID NO: 49195 - RNA, 17 nt, Artificial Sequence
  Synthetic oligonucleotide: CTLA4-3518
gacguaacagcuaaacc

SEQ ID NO: 49196 - RNA, 17 nt, Artificial Sequence
  Synthetic oligonucleotide: CTLA4-1338
gaugguuaaggaugccc

SEQ ID NO: 49197 - RNA, 17 nt, Artificial Sequence
  Synthetic oligonucleotide: CTLA4-3519
aaaaccuuucaggaucc

SEQ ID NO: 49198 - RNA, 17 nt, Artificial Sequence
  Synthetic oligonucleotide: CTLA4-2107
caccgcucccauaaagc

SEQ ID NO: 49199 - RNA, 17 nt, Artificial Sequence
  Synthetic oligonucleotide: CTLA4-2108
ugaaauccaaggcaagc

SEQ ID NO: 49200 - RNA, 17 nt, Artificial Sequence
  Synthetic oligonucleotide: CTLA4-452
auaaagccauggcuugc

SEQ ID NO: 49201 - RNA, 17 nt, Artificial Sequence
  Synthetic oligonucleotide: CTLA4-1340
ugaauacauuuuccauc

SEQ ID NO: 49202 - RNA, 17 nt, Artificial Sequence
  Synthetic oligonucleotide: CTLA4-1343
guuucagcagucaaagg

SEQ ID NO: 49203 - RNA, 17 nt, Artificial Sequence
  Synthetic oligonucleotide: CTLA4-3520
acauuuuccauccaugg

SEQ ID NO: 49204 - RNA, 17 nt, Artificial Sequence
  Synthetic oligonucleotide: CTLA4-1347
gagcccuugggcuaaug

SEQ ID NO: 49205 - RNA, 17 nt, Artificial Sequence
  Synthetic oligonucleotide: CTLA4-3521
gaguuuuaccuuuaacu

SEQ ID NO: 49206 - RNA, 17 nt, Artificial Sequence
  Synthetic oligonucleotide: CTLA4-1341
agcuaucuauauaaagu

SEQ ID NO: 49207 - RNA, 17 nt, Artificial Sequence
  Synthetic oligonucleotide: CTLA4-623
agcgccagguauuuagu

SEQ ID NO: 49208 - RNA, 17 nt, Artificial Sequence
  Synthetic oligonucleotide: CTLA4-3522
ccuucuaauggucccuu

SEQ ID NO: 49209 - RNA, 17 nt, Artificial Sequence
  Synthetic oligonucleotide: CTLA4-3523
uggguucaaacacauuu

SEQ ID NO: 49210 - RNA, 20 nt, Artificial Sequence
  Synthetic oligonucleotide: CTLA4-833
gcccagaagauugaauaaaa

SEQ ID NO: 49211 - RNA, 20 nt, Artificial Sequence
  Synthetic oligonucleotide: CTLA4-3524
uucucguaaaaccaaaacaa

SEQ ID NO: 49212 - RNA, 20 nt, Artificial Sequence
  Synthetic oligonucleotide: CTLA4-1346
uggaauacagagccagccaa

SEQ ID NO: 49213 - RNA, 20 nt, Artificial Sequence
  Synthetic oligonucleotide: CTLA4-3525
aguuaaagguaaaacuccaa

SEQ ID NO: 49214 - RNA, 20 nt, Artificial Sequence
  Synthetic oligonucleotide: CTLA4-3526
ccagauccucaaagugaaca

SEQ ID NO: 49215 - RNA, 20 nt, Artificial Sequence
  Synthetic oligonucleotide: CTLA4-702
ucaagggaccauuagaagga

SEQ ID NO: 49216 - RNA, 20 nt, Artificial Sequence
  Synthetic oligonucleotide: CTLA4-3527
agaaucaaggacuuuauaua

SEQ ID NO: 49217 - RNA, 20 nt, Artificial Sequence
  Synthetic oligonucleotide: CTLA4-1351
uuucucuuaaccaaaugcua

SEQ ID NO: 49218 - RNA, 20 nt, Artificial Sequence
  Synthetic oligonucleotide: CTLA4-3528
aaauguauucaauuugaaac

SEQ ID NO: 49219 - RNA, 20 nt, Artificial Sequence
  Synthetic oligonucleotide: CTLA4-3529
uucgacguaacagcuaaacc

SEQ ID NO: 49220 - RNA, 20 nt, Artificial Sequence
  Synthetic oligonucleotide: CTLA4-1331
cuggaugguuaaggaugccc

SEQ ID NO: 49221 - RNA, 20 nt, Artificial Sequence
  Synthetic oligonucleotide: CTLA4-3530
agcaaaaccuuucaggaucc

SEQ ID NO: 49222 - RNA, 20 nt, Artificial Sequence
  Synthetic oligonucleotide: CTLA4-2112
gaacaccgcucccauaaagc

SEQ ID NO: 49223 - RNA, 20 nt, Artificial Sequence
  Synthetic oligonucleotide: CTLA4-2113
cgcugaaauccaaggcaagc

SEQ ID NO: 49224 - RNA, 20 nt, Artificial Sequence
  Synthetic oligonucleotide: CTLA4-1370
cccauaaagccauggcuugc

SEQ ID NO: 49225 - RNA, 20 nt, Artificial Sequence
  Synthetic oligonucleotide: CTLA4-1333
aauugaauacauuuuccauc

SEQ ID NO: 49226 - RNA, 20 nt, Artificial Sequence
  Synthetic oligonucleotide: CTLA4-3531
aauacauuuuccauccaugg

SEQ ID NO: 49227 - RNA, 20 nt, Artificial Sequence
  Synthetic oligonucleotide: CTLA4-1345
ucugagcccuugggcuaaug

SEQ ID NO: 49228 - RNA, 20 nt, Artificial Sequence
  Synthetic oligonucleotide: CTLA4-3532
uuggaguuuuaccuuuaacu

SEQ ID NO: 49229 - RNA, 20 nt, Artificial Sequence
  Synthetic oligonucleotide: CTLA4-1334
caaagcuaucuauauaaagu

SEQ ID NO: 49230 - RNA, 20 nt, Artificial Sequence
  Synthetic oligonucleotide: CTLA4-511
cagagcgccagguauuuagu

SEQ ID NO: 49231 - RNA, 20 nt, Artificial Sequence
  Synthetic oligonucleotide: CTLA4-3533
cauccuucuaauggucccuu

SEQ ID NO: 49232 - RNA, 20 nt, Artificial Sequence
  Synthetic oligonucleotide: CTLA4-3534
guguggguucaaacacauuu

SEQ ID NO: 49233 - RNA, 17 nt, Artificial Sequence
  Synthetic oligonucleotide: CTLA4-905
cagaagauugaauaaaa

SEQ ID NO: 49234 - RNA, 17 nt, Artificial Sequence
  Synthetic oligonucleotide: CTLA4-3535
uguauucaauuugaaac

SEQ ID NO: 49235 - RNA, 17 nt, Artificial Sequence
  Synthetic oligonucleotide: CTLA4-1353
uauuuucaguuuauuuc

SEQ ID NO: 49236 - RNA, 17 nt, Artificial Sequence
  Synthetic oligonucleotide: CTLA4-3536
gcuuguuuuguucaguu

SEQ ID NO: 49237 - RNA, 20 nt, Artificial Sequence
  Synthetic oligonucleotide: CTLA4-1350
gccuauuuucaguuuauuuc

SEQ ID NO: 49238 - RNA, 20 nt, Artificial Sequence
  Synthetic oligonucleotide: CTLA4-1336
uuuguuucagcagucaaagg

SEQ ID NO: 49239 - RNA, 20 nt, Artificial Sequence
  Synthetic oligonucleotide: CTLA4-3537
uuggcuuguuuuguucaguu

SEQ ID NO: 49240 - RNA, 17 nt, Artificial Sequence
  Synthetic oligonucleotide: CTLA4-3538
ccuucugcaaaaccaga

SEQ ID NO: 49241 - RNA, 17 nt, Artificial Sequence
  Synthetic oligonucleotide: CTLA4-3539
acuuuauaaaugaauua

SEQ ID NO: 49242 - RNA, 17 nt, Artificial Sequence
  Synthetic oligonucleotide: CTLA4-2126
acauaguugauaccuua

SEQ ID NO: 49243 - RNA, 17 nt, Artificial Sequence
  Synthetic oligonucleotide: CTLA4-3540
cccggaauucugugcac

SEQ ID NO: 49244 - RNA, 17 nt, Artificial Sequence
  Synthetic oligonucleotide: CTLA4-1364
caaagaaaagccaaccc

SEQ ID NO: 49245 - RNA, 17 nt, Artificial Sequence
  Synthetic oligonucleotide: CTLA4-1352
aaaauguaugaaaacuc

SEQ ID NO: 49246 - RNA, 17 nt, Artificial Sequence
  Synthetic oligonucleotide: CTLA4-1357
uucaagguuuuaagguc

SEQ ID NO: 49247 - RNA, 17 nt, Artificial Sequence
  Synthetic oligonucleotide: CTLA4-1290
gccaacccaaaugauuc

SEQ ID NO: 49248 - RNA, 17 nt, Artificial Sequence
  Synthetic oligonucleotide: CTLA4-1368
uagcaaaaaaacucuuc

SEQ ID NO: 49249 - RNA, 17 nt, Artificial Sequence
  Synthetic oligonucleotide: CTLA4-1362
agcagaaaauucaaaag

SEQ ID NO: 49250 - RNA, 17 nt, Artificial Sequence
  Synthetic oligonucleotide: CTLA4-1369
ggcuaauuagcuaguag

SEQ ID NO: 49251 - RNA, 17 nt, Artificial Sequence
  Synthetic oligonucleotide: CTLA4-3541
aaaaaacucuucccagg

SEQ ID NO: 49252 - RNA, 17 nt, Artificial Sequence
  Synthetic oligonucleotide: CTLA4-1344
cccuucuaugagacugg

SEQ ID NO: 49253 - RNA, 17 nt, Artificial Sequence
  Synthetic oligonucleotide: CTLA4-3542
ucucuugaaucauuugg

SEQ ID NO: 49254 - RNA, 17 nt, Artificial Sequence
  Synthetic oligonucleotide: CTLA4-3543
uguaugccaaacagacu

SEQ ID NO: 49255 - RNA, 17 nt, Artificial Sequence
  Synthetic oligonucleotide: CTLA4-3544
uuuugucucuguugagu

SEQ ID NO: 49256 - RNA, 17 nt, Artificial Sequence
  Synthetic oligonucleotide: CTLA4-3545
aucuucacuuuugaauu

SEQ ID NO: 49257 - RNA, 20 nt, Artificial Sequence
  Synthetic oligonucleotide: CTLA4-3546
uuuccuucugcaaaaccaga

SEQ ID NO: 49258 - RNA, 20 nt, Artificial Sequence
  Synthetic oligonucleotide: CTLA4-3547
uauacuuuauaaaugaauua

SEQ ID NO: 49259 - RNA, 20 nt, Artificial Sequence
  Synthetic oligonucleotide: CTLA4-2143
aaaacauaguugauaccuua

SEQ ID NO: 49260 - RNA, 20 nt, Artificial Sequence
  Synthetic oligonucleotide: CTLA4-3548
augcccggaauucugugcac

SEQ ID NO: 49261 - RNA, 20 nt, Artificial Sequence
  Synthetic oligonucleotide: CTLA4-1361
guccaaagaaaagccaaccc

SEQ ID NO: 49262 - RNA, 20 nt, Artificial Sequence
  Synthetic oligonucleotide: CTLA4-1349
auuaaaauguaugaaaacuc

SEQ ID NO: 49263 - RNA, 20 nt, Artificial Sequence
  Synthetic oligonucleotide: CTLA4-1355
caauucaagguuuuaagguc

SEQ ID NO: 49264 - RNA, 20 nt, Artificial Sequence
  Synthetic oligonucleotide: CTLA4-1232
aaagccaacccaaaugauuc

SEQ ID NO: 49265 - RNA, 20 nt, Artificial Sequence
  Synthetic oligonucleotide: CTLA4-1365
guauagcaaaaaaacucuuc

SEQ ID NO: 49266 - RNA, 20 nt, Artificial Sequence
  Synthetic oligonucleotide: CTLA4-1359
ucaagcagaaaauucaaaag

SEQ ID NO: 49267 - RNA, 20 nt, Artificial Sequence
  Synthetic oligonucleotide: CTLA4-1366
auuggcuaauuagcuaguag

SEQ ID NO: 49268 - RNA, 20 nt, Artificial Sequence
  Synthetic oligonucleotide: CTLA4-3549
gcaaaaaaacucuucccagg

SEQ ID NO: 49269 - RNA, 20 nt, Artificial Sequence
  Synthetic oligonucleotide: CTLA4-1337
agacccuucuaugagacugg

SEQ ID NO: 49270 - RNA, 20 nt, Artificial Sequence
  Synthetic oligonucleotide: CTLA4-3550
uaaucucuugaaucauuugg

SEQ ID NO: 49271 - RNA, 20 nt, Artificial Sequence
  Synthetic oligonucleotide: CTLA4-3551
uauuguaugccaaacagacu

SEQ ID NO: 49272 - RNA, 20 nt, Artificial Sequence
  Synthetic oligonucleotide: CTLA4-3552
cuguuuugucucuguugagu

SEQ ID NO: 49273 - RNA, 20 nt, Artificial Sequence
  Synthetic oligonucleotide: CTLA4-3553
uuaaucuucacuuuugaauu

SEQ ID NO: 49274 - RNA, 17 nt, Artificial Sequence
  Synthetic oligonucleotide: TRAC-1
gaccagcuugacaucac

SEQ ID NO: 49275 - RNA, 17 nt, Artificial Sequence
  Synthetic oligonucleotide: TRAC-2
ugguacacggcaggguc

SEQ ID NO: 49276 - RNA, 17 nt, Artificial Sequence
  Synthetic oligonucleotide: TRAC-3
uaaacccggccacuuuc

SEQ ID NO: 49277 - RNA, 20 nt, Artificial Sequence
  Synthetic oligonucleotide: TRAC-4
gcugguacacggcaggguca

SEQ ID NO: 49278 - RNA, 20 nt, Artificial Sequence
  Synthetic oligonucleotide: TRAC-5
gucgagaaaagcuuugaaac

SEQ ID NO: 49279 - RNA, 20 nt, Artificial Sequence
  Synthetic oligonucleotide: TRAC-6
cucgaccagcuugacaucac

SEQ ID NO: 49280 - RNA, 20 nt, Artificial Sequence
  Synthetic oligonucleotide: TRAC-7
uucggaacccaaucacugac

SEQ ID NO: 49281 - RNA, 20 nt, Artificial Sequence
  Synthetic oligonucleotide: TRAC-8
cgucaugagcagauuaaacc

SEQ ID NO: 49282 - RNA, 20 nt, Artificial Sequence
  Synthetic oligonucleotide: TRAC-9
gcaccaaagcugcccuuacc

SEQ ID NO: 49283 - RNA, 20 nt, Artificial Sequence
  Synthetic oligonucleotide: TRAC-10
ucucucagcugguacacggc

SEQ ID NO: 49284 - RNA, 20 nt, Artificial Sequence
  Synthetic oligonucleotide: TRAC-11
aucugugggacaagaggauc

SEQ ID NO: 49285 - RNA, 20 nt, Artificial Sequence
  Synthetic oligonucleotide: TRAC-12
gauuaaacccggccacuuuc

SEQ ID NO: 49286 - RNA, 20 nt, Artificial Sequence
  Synthetic oligonucleotide: TRAC-13
guaaaaccaagaggccacag

SEQ ID NO: 49287 - RNA, 20 nt, Artificial Sequence
  Synthetic oligonucleotide: TRAC-14
uaaacccggccacuuucagg

SEQ ID NO: 49288 - RNA, 20 nt, Artificial Sequence
  Synthetic oligonucleotide: TRAC-15
acccggccacuuucaggagg

SEQ ID NO: 49289 - RNA, 20 nt, Artificial Sequence
  Synthetic oligonucleotide: TRAC-16
gagaaucaaaaucggugaau

SEQ ID NO: 49290 - RNA, 20 nt, Artificial Sequence
  Synthetic oligonucleotide: TRAC-17
guaagacaggggucuagccu

SEQ ID NO: 49291 - RNA, 20 nt, Artificial Sequence
  Synthetic oligonucleotide: TRAC-18
ucaggguucuggauaucugu

SEQ ID NO: 49292 - RNA, 17 nt, Artificial Sequence
  Synthetic oligonucleotide: TRAC-19
cacaggaacuuucuaaa

SEQ ID NO: 49293 - RNA, 17 nt, Artificial Sequence
  Synthetic oligonucleotide: TRAC-20
uuccccagcccagguaa

SEQ ID NO: 49294 - RNA, 17 nt, Artificial Sequence
  Synthetic oligonucleotide: TRAC-21
uugaaacagguaagaca

SEQ ID NO: 49295 - RNA, 17 nt, Artificial Sequence
  Synthetic oligonucleotide: TRAC-22
gucucucagcugguaca

SEQ ID NO: 49296 - RNA, 17 nt, Artificial Sequence
  Synthetic oligonucleotide: TRAC-23
ucagcugguacacggca

SEQ ID NO: 49297 - RNA, 17 nt, Artificial Sequence
  Synthetic oligonucleotide: TRAC-24
gugggacaagaggauca

SEQ ID NO: 49298 - RNA, 17 nt, Artificial Sequence
  Synthetic oligonucleotide: TRAC-25
gguacacggcaggguca

SEQ ID NO: 49299 - RNA, 17 nt, Artificial Sequence
  Synthetic oligonucleotide: TRAC-26
ccccacucccagcuuca

SEQ ID NO: 49300 - RNA, 17 nt, Artificial Sequence
  Synthetic oligonucleotide: TRAC-27
accugggcuggggaaga

SEQ ID NO: 49301 - RNA, 17 nt, Artificial Sequence
  Synthetic oligonucleotide: TRAC-28
ugguccagcugagguga

SEQ ID NO: 49302 - RNA, 17 nt, Artificial Sequence
  Synthetic oligonucleotide: TRAC-29
aauaaugcuguuguuga

SEQ ID NO: 49303 - RNA, 17 nt, Artificial Sequence
  Synthetic oligonucleotide: TRAC-30
gcuagacaugaggucua

SEQ ID NO: 49304 - RNA, 17 nt, Artificial Sequence
  Synthetic oligonucleotide: TRAC-31
aaaugugucacaaagua

SEQ ID NO: 49305 - RNA, 17 nt, Artificial Sequence
  Synthetic oligonucleotide: TRAC-32
cuuccccagcccaggua

SEQ ID NO: 49306 - RNA, 17 nt, Artificial Sequence
  Synthetic oligonucleotide: TRAC-33
gagaaaagcuuugaaac

SEQ ID NO: 49307 - RNA, 17 nt, Artificial Sequence
  Synthetic oligonucleotide: TRAC-34
gcagacagacuugucac

SEQ ID NO: 49308 - RNA, 17 nt, Artificial Sequence
  Synthetic oligonucleotide: TRAC-35
uuugaaacagguaagac

SEQ ID NO: 49309 - RNA, 17 nt, Artificial Sequence
  Synthetic oligonucleotide: TRAC-36
ggaacccaaucacugac

SEQ ID NO: 49310 - RNA, 17 nt, Artificial Sequence
  Synthetic oligonucleotide: TRAC-37
caugagcagauuaaacc

SEQ ID NO: 49311 - RNA, 17 nt, Artificial Sequence
  Synthetic oligonucleotide: TRAC-38
ccaaagcugcccuuacc

SEQ ID NO: 49312 - RNA, 17 nt, Artificial Sequence
  Synthetic oligonucleotide: TRAC-39
accuucuuccccagccc

SEQ ID NO: 49313 - RNA, 17 nt, Artificial Sequence
  Synthetic oligonucleotide: TRAC-40
aagacaggggucuagcc

SEQ ID NO: 49314 - RNA, 17 nt, Artificial Sequence
  Synthetic oligonucleotide: TRAC-41
uccuccugaaaguggcc

SEQ ID NO: 49315 - RNA, 17 nt, Artificial Sequence
  Synthetic oligonucleotide: TRAC-42
gcaacagugcuguggcc

SEQ ID NO: 49316 - RNA, 17 nt, Artificial Sequence
  Synthetic oligonucleotide: TRAC-43
gucagauuuguugcucc

SEQ ID NO: 49317 - RNA, 17 nt, Artificial Sequence
  Synthetic oligonucleotide: TRAC-44
uuccugugaugucaagc

SEQ ID NO: 49318 - RNA, 17 nt, Artificial Sequence
  Synthetic oligonucleotide: TRAC-45
gugaggggccuugaagc

SEQ ID NO: 49319 - RNA, 17 nt, Artificial Sequence
  Synthetic oligonucleotide: TRAC-46
aggccccucaccucagc

SEQ ID NO: 49320 - RNA, 17 nt, Artificial Sequence
  Synthetic oligonucleotide: TRAC-47
auuuagagucucucagc

SEQ ID NO: 49321 - RNA, 17 nt, Artificial Sequence
  Synthetic oligonucleotide: TRAC-48
agcuuuggugccuucgc

SEQ ID NO: 49322 - RNA, 17 nt, Artificial Sequence
  Synthetic oligonucleotide: TRAC-49
cucagcugguacacggc

SEQ ID NO: 49323 - RNA, 17 nt, Artificial Sequence
  Synthetic oligonucleotide: TRAC-50
gcugcccuuaccugggc

SEQ ID NO: 49324 - RNA, 17 nt, Artificial Sequence
  Synthetic oligonucleotide: TRAC-51
cuccuccugaaaguggc

SEQ ID NO: 49325 - RNA, 17 nt, Artificial Sequence
  Synthetic oligonucleotide: TRAC-52
ugugggacaagaggauc

SEQ ID NO: 49326 - RNA, 17 nt, Artificial Sequence
  Synthetic oligonucleotide: TRAC-53
gggaagaaggugucuuc

SEQ ID NO: 49327 - RNA, 17 nt, Artificial Sequence
  Synthetic oligonucleotide: TRAC-54
cggcagggucaggguuc

SEQ ID NO: 49328 - RNA, 17 nt, Artificial Sequence
  Synthetic oligonucleotide: TRAC-55
aauccuccuccugaaag

SEQ ID NO: 49329 - RNA, 17 nt, Artificial Sequence
  Synthetic oligonucleotide: TRAC-56
gauaucugugggacaag

SEQ ID NO: 49330 - RNA, 17 nt, Artificial Sequence
  Synthetic oligonucleotide: TRAC-57
guaucuguaaaaccaag

SEQ ID NO: 49331 - RNA, 17 nt, Artificial Sequence
  Synthetic oligonucleotide: TRAC-58
aaaccaagaggccacag

SEQ ID NO: 49332 - RNA, 17 nt, Artificial Sequence
  Synthetic oligonucleotide: TRAC-59
ugaaacagguaagacag

SEQ ID NO: 49333 - RNA, 17 nt, Artificial Sequence
  Synthetic oligonucleotide: TRAC-60
ggccuugaagcugggag

SEQ ID NO: 49334 - RNA, 17 nt, Artificial Sequence
  Synthetic oligonucleotide: TRAC-61
gguccagcugaggugag

SEQ ID NO: 49335 - RNA, 17 nt, Artificial Sequence
  Synthetic oligonucleotide: TRAC-62
acccggccacuuucagg

SEQ ID NO: 49336 - RNA, 17 nt, Artificial Sequence
  Synthetic oligonucleotide: TRAC-63
cggccacuuucaggagg

SEQ ID NO: 49337 - RNA, 17 nt, Artificial Sequence
  Synthetic oligonucleotide: TRAC-64
aaacugugcuagacaug

SEQ ID NO: 49338 - RNA, 17 nt, Artificial Sequence
  Synthetic oligonucleotide: TRAC-65
cggcugugguccagcug

SEQ ID NO: 49339 - RNA, 17 nt, Artificial Sequence
  Synthetic oligonucleotide: TRAC-66
aucugcucaugacgcug

SEQ ID NO: 49340 - RNA, 17 nt, Artificial Sequence
  Synthetic oligonucleotide: TRAC-67
ucaugacgcugcggcug

SEQ ID NO: 49341 - RNA, 17 nt, Artificial Sequence
  Synthetic oligonucleotide: TRAC-68
ugcccuuaccugggcug

SEQ ID NO: 49342 - RNA, 17 nt, Artificial Sequence
  Synthetic oligonucleotide: TRAC-69
caagagcaacagugcug

SEQ ID NO: 49343 - RNA, 17 nt, Artificial Sequence
  Synthetic oligonucleotide: TRAC-70
aggguucuggauaucug

SEQ ID NO: 49344 - RNA, 17 nt, Artificial Sequence
  Synthetic oligonucleotide: TRAC-71
ccuugaagcugggagug

SEQ ID NO: 49345 - RNA, 17 nt, Artificial Sequence
  Synthetic oligonucleotide: TRAC-72
gugguccagcugaggug

SEQ ID NO: 49346 - RNA, 17 nt, Artificial Sequence
  Synthetic oligonucleotide: TRAC-73
uguuugagaaucaaaau

SEQ ID NO: 49347 - RNA, 17 nt, Artificial Sequence
  Synthetic oligonucleotide: TRAC-74
aaucaaaaucggugaau

SEQ ID NO: 49348 - RNA, 17 nt, Artificial Sequence
  Synthetic oligonucleotide: TRAC-75
caaaaccugucagugau

SEQ ID NO: 49349 - RNA, 17 nt, Artificial Sequence
  Synthetic oligonucleotide: TRAC-76
caaagcugcccuuaccu

SEQ ID NO: 49350 - RNA, 17 nt, Artificial Sequence
  Synthetic oligonucleotide: TRAC-77
agacaggggucuagccu

SEQ ID NO: 49351 - RNA, 17 nt, Artificial Sequence
  Synthetic oligonucleotide: TRAC-78
ugaggggccuugaagcu

SEQ ID NO: 49352 - RNA, 17 nt, Artificial Sequence
  Synthetic oligonucleotide: TRAC-79
cugcccuuaccugggcu

SEQ ID NO: 49353 - RNA, 17 nt, Artificial Sequence
  Synthetic oligonucleotide: TRAC-80
uaaccgcuguggccucu

SEQ ID NO: 49354 - RNA, 17 nt, Artificial Sequence
  Synthetic oligonucleotide: TRAC-81
gccuugaagcugggagu

SEQ ID NO: 49355 - RNA, 17 nt, Artificial Sequence
  Synthetic oligonucleotide: TRAC-82
ggguucuggauaucugu

SEQ ID NO: 49356 - RNA, 17 nt, Artificial Sequence
  Synthetic oligonucleotide: TRAC-83
cuuucaggaggaggauu

SEQ ID NO: 49357 - RNA, 17 nt, Artificial Sequence
  Synthetic oligonucleotide: TRAC-84
aaaaccugucagugauu

SEQ ID NO: 49358 - RNA, 17 nt, Artificial Sequence
  Synthetic oligonucleotide: TRAC-85
ccagguaagggcagcuu

SEQ ID NO: 49359 - RNA, 17 nt, Artificial Sequence
  Synthetic oligonucleotide: TRAC-86
acaagaggaucaggguu

SEQ ID NO: 49360 - RNA, 17 nt, Artificial Sequence
  Synthetic oligonucleotide: TRAC-87
acagguuuugaaaguuu

SEQ ID NO: 49361 - RNA, 20 nt, Artificial Sequence
  Synthetic oligonucleotide: TRAC-88
caucacaggaacuuucuaaa

SEQ ID NO: 49362 - RNA, 20 nt, Artificial Sequence
  Synthetic oligonucleotide: TRAC-89
uucuuccccagcccagguaa

SEQ ID NO: 49363 - RNA, 20 nt, Artificial Sequence
  Synthetic oligonucleotide: TRAC-90
gcuuugaaacagguaagaca

SEQ ID NO: 49364 - RNA, 20 nt, Artificial Sequence
  Synthetic oligonucleotide: TRAC-91
agagucucucagcugguaca

SEQ ID NO: 49365 - RNA, 20 nt, Artificial Sequence
  Synthetic oligonucleotide: TRAC-92
cucucagcugguacacggca

SEQ ID NO: 49366 - RNA, 20 nt, Artificial Sequence
  Synthetic oligonucleotide: TRAC-93
ucugugggacaagaggauca

SEQ ID NO: 49367 - RNA, 20 nt, Artificial Sequence
  Synthetic oligonucleotide: TRAC-94
cuuaccugggcuggggaaga

SEQ ID NO: 49368 - RNA, 20 nt, Artificial Sequence
  Synthetic oligonucleotide: TRAC-95
cugugguccagcugagguga

SEQ ID NO: 49369 - RNA, 20 nt, Artificial Sequence
  Synthetic oligonucleotide: TRAC-96
uggaauaaugcuguuguuga

SEQ ID NO: 49370 - RNA, 20 nt, Artificial Sequence
  Synthetic oligonucleotide: TRAC-97
ugugcuagacaugaggucua

SEQ ID NO: 49371 - RNA, 20 nt, Artificial Sequence
  Synthetic oligonucleotide: TRAC-98
aacaaaugugucacaaagua

SEQ ID NO: 49372 - RNA, 20 nt, Artificial Sequence
  Synthetic oligonucleotide: TRAC-99
cuucuuccccagcccaggua

SEQ ID NO: 49373 - RNA, 20 nt, Artificial Sequence
  Synthetic oligonucleotide: TRAC-100
uaggcagacagacuugucac

SEQ ID NO: 49374 - RNA, 20 nt, Artificial Sequence
  Synthetic oligonucleotide: TRAC-101
agcuuugaaacagguaagac

SEQ ID NO: 49375 - RNA, 20 nt, Artificial Sequence
  Synthetic oligonucleotide: TRAC-102
gacaccuucuuccccagccc

SEQ ID NO: 49376 - RNA, 20 nt, Artificial Sequence
  Synthetic oligonucleotide: TRAC-103
gguaagacaggggucuagcc

SEQ ID NO: 49377 - RNA, 20 nt, Artificial Sequence
  Synthetic oligonucleotide: TRAC-104
uccuccuccugaaaguggcc

SEQ ID NO: 49378 - RNA, 20 nt, Artificial Sequence
  Synthetic oligonucleotide: TRAC-105
agagcaacagugcuguggcc

SEQ ID NO: 49379 - RNA, 20 nt, Artificial Sequence
  Synthetic oligonucleotide: TRAC-106
aaagucagauuuguugcucc

SEQ ID NO: 49380 - RNA, 20 nt, Artificial Sequence
  Synthetic oligonucleotide: TRAC-107
aaguuccugugaugucaagc

SEQ ID NO: 49381 - RNA, 20 nt, Artificial Sequence
  Synthetic oligonucleotide: TRAC-108
gaggugaggggccuugaagc

SEQ ID NO: 49382 - RNA, 20 nt, Artificial Sequence
  Synthetic oligonucleotide: TRAC-109
ucaaggccccucaccucagc

SEQ ID NO: 49383 - RNA, 20 nt, Artificial Sequence
  Synthetic oligonucleotide: TRAC-110
uggauuuagagucucucagc

SEQ ID NO: 49384 - RNA, 20 nt, Artificial Sequence
  Synthetic oligonucleotide: TRAC-111
ggcagcuuuggugccuucgc

SEQ ID NO: 49385 - RNA, 20 nt, Artificial Sequence
  Synthetic oligonucleotide: TRAC-112
aaagcugcccuuaccugggc

SEQ ID NO: 49386 - RNA, 20 nt, Artificial Sequence
  Synthetic oligonucleotide: TRAC-113
auccuccuccugaaaguggc

SEQ ID NO: 49387 - RNA, 20 nt, Artificial Sequence
  Synthetic oligonucleotide: TRAC-114
agcugguacacggcaggguc

SEQ ID NO: 49388 - RNA, 20 nt, Artificial Sequence
  Synthetic oligonucleotide: TRAC-115
cuggggaagaaggugucuuc

SEQ ID NO: 49389 - RNA, 20 nt, Artificial Sequence
  Synthetic oligonucleotide: TRAC-116
acacggcagggucaggguuc

SEQ ID NO: 49390 - RNA, 20 nt, Artificial Sequence
  Synthetic oligonucleotide: TRAC-117
ccgaauccuccuccugaaag

SEQ ID NO: 49391 - RNA, 20 nt, Artificial Sequence
  Synthetic oligonucleotide: TRAC-118
cuggauaucugugggacaag

SEQ ID NO: 49392 - RNA, 20 nt, Artificial Sequence
  Synthetic oligonucleotide: TRAC-119
uucguaucuguaaaaccaag

SEQ ID NO: 49393 - RNA, 20 nt, Artificial Sequence
  Synthetic oligonucleotide: TRAC-120
cuuugaaacagguaagacag

SEQ ID NO: 49394 - RNA, 20 nt, Artificial Sequence
  Synthetic oligonucleotide: TRAC-121
aggggccuugaagcugggag

SEQ ID NO: 49395 - RNA, 20 nt, Artificial Sequence
  Synthetic oligonucleotide: TRAC-122
ugugguccagcugaggugag

SEQ ID NO: 49396 - RNA, 20 nt, Artificial Sequence
  Synthetic oligonucleotide: TRAC-123
acaaaacugugcuagacaug

SEQ ID NO: 49397 - RNA, 20 nt, Artificial Sequence
  Synthetic oligonucleotide: TRAC-124
cugcggcugugguccagcug

SEQ ID NO: 49398 - RNA, 20 nt, Artificial Sequence
  Synthetic oligonucleotide: TRAC-125
uuaaucugcucaugacgcug

SEQ ID NO: 49399 - RNA, 20 nt, Artificial Sequence
  Synthetic oligonucleotide: TRAC-126
ugcucaugacgcugcggcug

SEQ ID NO: 49400 - RNA, 20 nt, Artificial Sequence
  Synthetic oligonucleotide: TRAC-127
agcugcccuuaccugggcug

SEQ ID NO: 49401 - RNA, 20 nt, Artificial Sequence
  Synthetic oligonucleotide: TRAC-128
cuucaagagcaacagugcug

SEQ ID NO: 49402 - RNA, 20 nt, Artificial Sequence
  Synthetic oligonucleotide: TRAC-129
gucaggguucuggauaucug

SEQ ID NO: 49403 - RNA, 20 nt, Artificial Sequence
  Synthetic oligonucleotide: TRAC-130
gggccuugaagcugggagug

SEQ ID NO: 49404 - RNA, 20 nt, Artificial Sequence
  Synthetic oligonucleotide: TRAC-131
gcugugguccagcugaggug

SEQ ID NO: 49405 - RNA, 20 nt, Artificial Sequence
  Synthetic oligonucleotide: TRAC-132
auuuguuugagaaucaaaau

SEQ ID NO: 49406 - RNA, 20 nt, Artificial Sequence
  Synthetic oligonucleotide: TRAC-133
uuucaaaaccugucagugau

SEQ ID NO: 49407 - RNA, 20 nt, Artificial Sequence
  Synthetic oligonucleotide: TRAC-134
caccaaagcugcccuuaccu

SEQ ID NO: 49408 - RNA, 20 nt, Artificial Sequence
  Synthetic oligonucleotide: TRAC-135
aggugaggggccuugaagcu

SEQ ID NO: 49409 - RNA, 20 nt, Artificial Sequence
  Synthetic oligonucleotide: TRAC-136
aagcugcccuuaccugggcu

SEQ ID NO: 49410 - RNA, 20 nt, Artificial Sequence
  Synthetic oligonucleotide: TRAC-137
ggggccuugaagcugggagu

SEQ ID NO: 49411 - RNA, 20 nt, Artificial Sequence
  Synthetic oligonucleotide: TRAC-138
ccacuuucaggaggaggauu

SEQ ID NO: 49412 - RNA, 20 nt, Artificial Sequence
  Synthetic oligonucleotide: TRAC-139
uucaaaaccugucagugauu

SEQ ID NO: 49413 - RNA, 20 nt, Artificial Sequence
  Synthetic oligonucleotide: TRAC-140
agcccagguaagggcagcuu

SEQ ID NO: 49414 - RNA, 20 nt, Artificial Sequence
  Synthetic oligonucleotide: TRAC-141
gggacaagaggaucaggguu

SEQ ID NO: 49415 - RNA, 20 nt, Artificial Sequence
  Synthetic oligonucleotide: TRAC-142
cugacagguuuugaaaguuu

SEQ ID NO: 49416 - RNA, 21 nt, Artificial Sequence
  Synthetic oligonucleotide: TRAC-143
uucuggauaucugugggacaa

SEQ ID NO: 49417 - RNA, 22 nt, Artificial Sequence
  Synthetic oligonucleotide: TRAC-144
guucuggauaucugugggacaa

SEQ ID NO: 49418 - RNA, 23 nt, Artificial Sequence
  Synthetic oligonucleotide: TRAC-145
gguucuggauaucugugggacaa

SEQ ID NO: 49419 - RNA, 24 nt, Artificial Sequence
  Synthetic oligonucleotide: TRAC-146
ggguucuggauaucugugggacaa

SEQ ID NO: 49420 - RNA, 21 nt, Artificial Sequence
  Synthetic oligonucleotide: TRAC-147
gcuggggaagaaggugucuuc

SEQ ID NO: 49421 - RNA, 22 nt, Artificial Sequence
  Synthetic oligonucleotide: TRAC-148
ggcuggggaagaaggugucuuc

SEQ ID NO: 49422 - RNA, 23 nt, Artificial Sequence
  Synthetic oligonucleotide: TRAC-149
gggcuggggaagaaggugucuuc

SEQ ID NO: 49423 - RNA, 24 nt, Artificial Sequence
  Synthetic oligonucleotide: TRAC-150
ugggcuggggaagaaggugucuuc

SEQ ID NO: 49424 - RNA, 21 nt, Artificial Sequence
  Synthetic oligonucleotide: TRAC-151
aaacccggccacuuucaggag

SEQ ID NO: 49425 - RNA, 22 nt, Artificial Sequence
  Synthetic oligonucleotide: TRAC-152
uaaacccggccacuuucaggag

SEQ ID NO: 49426 - RNA, 23 nt, Artificial Sequence
  Synthetic oligonucleotide: TRAC-153
uuaaacccggccacuuucaggag

SEQ ID NO: 49427 - RNA, 24 nt, Artificial Sequence
  Synthetic oligonucleotide: TRAC-154
auuaaacccggccacuuucaggag

SEQ ID NO: 49428 - RNA, 18 nt, Artificial Sequence
  Synthetic oligonucleotide: TRAC-155
guuugagaaucaaaaucg

SEQ ID NO: 49429 - RNA, 19 nt, Artificial Sequence
  Synthetic oligonucleotide: TRAC-156
uguuugagaaucaaaaucg

SEQ ID NO: 49430 - RNA, 20 nt, Artificial Sequence
  Synthetic oligonucleotide: TRAC-157
uuguuugagaaucaaaaucg

SEQ ID NO: 49431 - RNA, 21 nt, Artificial Sequence
  Synthetic oligonucleotide: TRAC-158
uuuguuugagaaucaaaaucg

SEQ ID NO: 49432 - RNA, 22 nt, Artificial Sequence
  Synthetic oligonucleotide: TRAC-159
auuuguuugagaaucaaaaucg

SEQ ID NO: 49433 - RNA, 23 nt, Artificial Sequence
  Synthetic oligonucleotide: TRAC-160
cauuuguuugagaaucaaaaucg

SEQ ID NO: 49434 - RNA, 24 nt, Artificial Sequence
  Synthetic oligonucleotide: TRAC-161
acauuuguuugagaaucaaaaucg

SEQ ID NO: 49435 - RNA, 21 nt, Artificial Sequence
  Synthetic oligonucleotide: TRAC-162
agucucucagcugguacacgg

SEQ ID NO: 49436 - RNA, 22 nt, Artificial Sequence
  Synthetic oligonucleotide: TRAC-163
gagucucucagcugguacacgg

SEQ ID NO: 49437 - RNA, 23 nt, Artificial Sequence
  Synthetic oligonucleotide: TRAC-164
agagucucucagcugguacacgg

SEQ ID NO: 49438 - RNA, 24 nt, Artificial Sequence
  Synthetic oligonucleotide: TRAC-165
uagagucucucagcugguacacgg

SEQ ID NO: 49439 - RNA, 21 nt, Artificial Sequence
  Synthetic oligonucleotide: TRAC-166
uuuugucugugauauacacau

SEQ ID NO: 49440 - RNA, 22 nt, Artificial Sequence
  Synthetic oligonucleotide: TRAC-167
guuuugucugugauauacacau

SEQ ID NO: 49441 - RNA, 23 nt, Artificial Sequence
  Synthetic oligonucleotide: TRAC-168
aguuuugucugugauauacacau

SEQ ID NO: 49442 - RNA, 24 nt, Artificial Sequence
  Synthetic oligonucleotide: TRAC-169
caguuuugucugugauauacacau

SEQ ID NO: 49443 - RNA, 21 nt, Artificial Sequence
  Synthetic oligonucleotide: TRAC-170
auaucugugggacaagaggau

SEQ ID NO: 49444 - RNA, 22 nt, Artificial Sequence
  Synthetic oligonucleotide: TRAC-171
gauaucugugggacaagaggau

SEQ ID NO: 49445 - RNA, 23 nt, Artificial Sequence
  Synthetic oligonucleotide: TRAC-172
ggauaucugugggacaagaggau

SEQ ID NO: 49446 - RNA, 24 nt, Artificial Sequence
  Synthetic oligonucleotide: TRAC-173
uggauaucugugggacaagaggau

SEQ ID NO: 49447 - RNA, 21 nt, Artificial Sequence
  Synthetic oligonucleotide: TRAC-174
agacagacuugucacuggauu

SEQ ID NO: 49448 - RNA, 22 nt, Artificial Sequence
  Synthetic oligonucleotide: TRAC-175
cagacagacuugucacuggauu

SEQ ID NO: 49449 - RNA, 23 nt, Artificial Sequence
  Synthetic oligonucleotide: TRAC-176
gcagacagacuugucacuggauu

SEQ ID NO: 49450 - RNA, 24 nt, Artificial Sequence
  Synthetic oligonucleotide: TRAC-177
ggcagacagacuugucacuggauu

SEQ ID NO: 49451 - RNA, 21 nt, Artificial Sequence
  Synthetic oligonucleotide: TRAC-178
guacacggcagggucaggguu

SEQ ID NO: 49452 - RNA, 22 nt, Artificial Sequence
  Synthetic oligonucleotide: TRAC-179
gguacacggcagggucaggguu

SEQ ID NO: 49453 - RNA, 23 nt, Artificial Sequence
  Synthetic oligonucleotide: TRAC-180
ugguacacggcagggucaggguu

SEQ ID NO: 49454 - RNA, 24 nt, Artificial Sequence
  Synthetic oligonucleotide: TRAC-181
cugguacacggcagggucaggguu

SEQ ID NO: 49455 - RNA, 18 nt, Artificial Sequence
  Synthetic oligonucleotide: TRAC-182
uuugugacacauuuguuu

SEQ ID NO: 49456 - RNA, 19 nt, Artificial Sequence
  Synthetic oligonucleotide: TRAC-183
cuuugugacacauuuguuu

SEQ ID NO: 49457 - RNA, 20 nt, Artificial Sequence
  Synthetic oligonucleotide: TRAC-184
acuuugugacacauuuguuu

SEQ ID NO: 49458 - RNA, 21 nt, Artificial Sequence
  Synthetic oligonucleotide: TRAC-185
uacuuugugacacauuuguuu

SEQ ID NO: 49459 - RNA, 22 nt, Artificial Sequence
  Synthetic oligonucleotide: TRAC-186
uuacuuugugacacauuuguuu

SEQ ID NO: 49460 - RNA, 23 nt, Artificial Sequence
  Synthetic oligonucleotide: TRAC-187
cuuacuuugugacacauuuguuu

SEQ ID NO: 49461 - RNA, 24 nt, Artificial Sequence
  Synthetic oligonucleotide: TRAC-188
ccuuacuuugugacacauuuguuu

SEQ ID NO: 49462 - RNA, 21 nt, Artificial Sequence
  Synthetic oligonucleotide: TRAC-189
acuuucaaaaccugucaguga

SEQ ID NO: 49463 - RNA, 22 nt, Artificial Sequence
  Synthetic oligonucleotide: TRAC-190
aacuuucaaaaccugucaguga

SEQ ID NO: 49464 - RNA, 23 nt, Artificial Sequence
  Synthetic oligonucleotide: TRAC-191
aaacuuucaaaaccugucaguga

SEQ ID NO: 49465 - RNA, 24 nt, Artificial Sequence
  Synthetic oligonucleotide: TRAC-192
uaaacuuucaaaaccugucaguga

SEQ ID NO: 49466 - RNA, 21 nt, Artificial Sequence
  Synthetic oligonucleotide: TRAC-193
aagcuuugaaacagguaagac

SEQ ID NO: 49467 - RNA, 22 nt, Artificial Sequence
  Synthetic oligonucleotide: TRAC-194
aaagcuuugaaacagguaagac

SEQ ID NO: 49468 - RNA, 23 nt, Artificial Sequence
  Synthetic oligonucleotide: TRAC-195
aaaagcuuugaaacagguaagac

SEQ ID NO: 49469 - RNA, 24 nt, Artificial Sequence
  Synthetic oligonucleotide: TRAC-196
gaaaagcuuugaaacagguaagac

SEQ ID NO: 49470 - RNA, 21 nt, Artificial Sequence
  Synthetic oligonucleotide: TRAC-197
cagguaagacaggggucuagc

SEQ ID NO: 49471 - RNA, 22 nt, Artificial Sequence
  Synthetic oligonucleotide: TRAC-198
acagguaagacaggggucuagc

SEQ ID NO: 49472 - RNA, 23 nt, Artificial Sequence
  Synthetic oligonucleotide: TRAC-199
aacagguaagacaggggucuagc

SEQ ID NO: 49473 - RNA, 24 nt, Artificial Sequence
  Synthetic oligonucleotide: TRAC-200
aaacagguaagacaggggucuagc

SEQ ID NO: 49474 - RNA, 21 nt, Artificial Sequence
  Synthetic oligonucleotide: TRAC-201
gaggggccuugaagcugggag

SEQ ID NO: 49475 - RNA, 22 nt, Artificial Sequence
  Synthetic oligonucleotide: TRAC-202
ugaggggccuugaagcugggag

SEQ ID NO: 49476 - RNA, 23 nt, Artificial Sequence
  Synthetic oligonucleotide: TRAC-203
gugaggggccuugaagcugggag

SEQ ID NO: 49477 - RNA, 24 nt, Artificial Sequence
  Synthetic oligonucleotide: TRAC-204
ggugaggggccuugaagcugggag

SEQ ID NO: 49478 - RNA, 21 nt, Artificial Sequence
  Synthetic oligonucleotide: TRAC-205
gaauccuccuccugaaagugg

SEQ ID NO: 49479 - RNA, 22 nt, Artificial Sequence
  Synthetic oligonucleotide: TRAC-206
cgaauccuccuccugaaagugg

SEQ ID NO: 49480 - RNA, 23 nt, Artificial Sequence
  Synthetic oligonucleotide: TRAC-207
ccgaauccuccuccugaaagugg

SEQ ID NO: 49481 - RNA, 24 nt, Artificial Sequence
  Synthetic oligonucleotide: TRAC-208
uccgaauccuccuccugaaagugg

SEQ ID NO: 49482 - RNA, 21 nt, Artificial Sequence
  Synthetic oligonucleotide: TRAC-209
gaggugaggggccuugaagcu

SEQ ID NO: 49483 - RNA, 22 nt, Artificial Sequence
  Synthetic oligonucleotide: TRAC-210
ugaggugaggggccuugaagcu

SEQ ID NO: 49484 - RNA, 23 nt, Artificial Sequence
  Synthetic oligonucleotide: TRAC-211
cugaggugaggggccuugaagcu

SEQ ID NO: 49485 - RNA, 24 nt, Artificial Sequence
  Synthetic oligonucleotide: TRAC-212
gcugaggugaggggccuugaagcu

SEQ ID NO: 49486 - RNA, 21 nt, Artificial Sequence
  Synthetic oligonucleotide: TRAC-213
caaacaaaugugucacaaagu

SEQ ID NO: 49487 - RNA, 22 nt, Artificial Sequence
  Synthetic oligonucleotide: TRAC-214
ucaaacaaaugugucacaaagu

SEQ ID NO: 49488 - RNA, 23 nt, Artificial Sequence
  Synthetic oligonucleotide: TRAC-215
cucaaacaaaugugucacaaagu

SEQ ID NO: 49489 - RNA, 24 nt, Artificial Sequence
  Synthetic oligonucleotide: TRAC-216
ucucaaacaaaugugucacaaagu

SEQ ID NO: 49490 - RNA, 18 nt, Artificial Sequence
  Synthetic oligonucleotide: TRAC-217
ccugucagugauuggguu

SEQ ID NO: 49491 - RNA, 19 nt, Artificial Sequence
  Synthetic oligonucleotide: TRAC-218
accugucagugauuggguu

SEQ ID NO: 49492 - RNA, 20 nt, Artificial Sequence
  Synthetic oligonucleotide: TRAC-219
aaccugucagugauuggguu

SEQ ID NO: 49493 - RNA, 21 nt, Artificial Sequence
  Synthetic oligonucleotide: TRAC-220
aaaccugucagugauuggguu

SEQ ID NO: 49494 - RNA, 22 nt, Artificial Sequence
  Synthetic oligonucleotide: TRAC-221
aaaaccugucagugauuggguu

SEQ ID NO: 49495 - RNA, 23 nt, Artificial Sequence
  Synthetic oligonucleotide: TRAC-222
caaaaccugucagugauuggguu

SEQ ID NO: 49496 - RNA, 24 nt, Artificial Sequence
  Synthetic oligonucleotide: TRAC-223
ucaaaaccugucagugauuggguu

SEQ ID NO: 49497 - RNA, 18 nt, Artificial Sequence
  Synthetic oligonucleotide: TRAC-224
uggauaucugugggacaa

SEQ ID NO: 49498 - RNA, 19 nt, Artificial Sequence
  Synthetic oligonucleotide: TRAC-225
cuggauaucugugggacaa

SEQ ID NO: 49499 - RNA, 20 nt, Artificial Sequence
  Synthetic oligonucleotide: TRAC-226
ucuggauaucugugggacaa

SEQ ID NO: 49500 - RNA, 18 nt, Artificial Sequence
  Synthetic oligonucleotide: TRAC-227
aggcagacagacuuguca

SEQ ID NO: 49501 - RNA, 19 nt, Artificial Sequence
  Synthetic oligonucleotide: TRAC-228
uaggcagacagacuuguca

SEQ ID NO: 49502 - RNA, 20 nt, Artificial Sequence
  Synthetic oligonucleotide: TRAC-229
auaggcagacagacuuguca

SEQ ID NO: 49503 - RNA, 21 nt, Artificial Sequence
  Synthetic oligonucleotide: TRAC-230
aauaggcagacagacuuguca

SEQ ID NO: 49504 - RNA, 22 nt, Artificial Sequence
  Synthetic oligonucleotide: TRAC-231
gaauaggcagacagacuuguca

SEQ ID NO: 49505 - RNA, 23 nt, Artificial Sequence
  Synthetic oligonucleotide: TRAC-232
ugaauaggcagacagacuuguca

SEQ ID NO: 49506 - RNA, 24 nt, Artificial Sequence
  Synthetic oligonucleotide: TRAC-233
gugaauaggcagacagacuuguca

SEQ ID NO: 49507 - RNA, 18 nt, Artificial Sequence
  Synthetic oligonucleotide: TRAC-234
ggggaagaaggugucuuc

SEQ ID NO: 49508 - RNA, 19 nt, Artificial Sequence
  Synthetic oligonucleotide: TRAC-235
uggggaagaaggugucuuc

SEQ ID NO: 49509 - RNA, 20 nt, Artificial Sequence
  Synthetic oligonucleotide: TRAC-115
cuggggaagaaggugucuuc

SEQ ID NO: 49510 - RNA, 18 nt, Artificial Sequence
  Synthetic oligonucleotide: TRAC-236
cccggccacuuucaggag

SEQ ID NO: 49511 - RNA, 19 nt, Artificial Sequence
  Synthetic oligonucleotide: TRAC-237
acccggccacuuucaggag

SEQ ID NO: 49512 - RNA, 20 nt, Artificial Sequence
  Synthetic oligonucleotide: TRAC-238
aacccggccacuuucaggag

SEQ ID NO: 49513 - RNA, 18 nt, Artificial Sequence
  Synthetic oligonucleotide: TRAC-239
cucucagcugguacacgg

SEQ ID NO: 49514 - RNA, 19 nt, Artificial Sequence
  Synthetic oligonucleotide: TRAC-240
ucucucagcugguacacgg

SEQ ID NO: 49515 - RNA, 20 nt, Artificial Sequence
  Synthetic oligonucleotide: TRAC-241
gucucucagcugguacacgg

SEQ ID NO: 49516 - RNA, 18 nt, Artificial Sequence
  Synthetic oligonucleotide: TRAC-242
ugucugugauauacacau

SEQ ID NO: 49517 - RNA, 19 nt, Artificial Sequence
  Synthetic oligonucleotide: TRAC-243
uugucugugauauacacau

SEQ ID NO: 49518 - RNA, 20 nt, Artificial Sequence
  Synthetic oligonucleotide: TRAC-244
uuugucugugauauacacau

SEQ ID NO: 49519 - RNA, 18 nt, Artificial Sequence
  Synthetic oligonucleotide: TRAC-245
ucugugggacaagaggau

SEQ ID NO: 49520 - RNA, 19 nt, Artificial Sequence
  Synthetic oligonucleotide: TRAC-246
aucugugggacaagaggau

SEQ ID NO: 49521 - RNA, 20 nt, Artificial Sequence
  Synthetic oligonucleotide: TRAC-247
uaucugugggacaagaggau

SEQ ID NO: 49522 - RNA, 18 nt, Artificial Sequence
  Synthetic oligonucleotide: TRAC-248
gcugguacacggcagggu

SEQ ID NO: 49523 - RNA, 19 nt, Artificial Sequence
  Synthetic oligonucleotide: TRAC-249
agcugguacacggcagggu

SEQ ID NO: 49524 - RNA, 20 nt, Artificial Sequence
  Synthetic oligonucleotide: TRAC-250
cagcugguacacggcagggu

SEQ ID NO: 49525 - RNA, 21 nt, Artificial Sequence
  Synthetic oligonucleotide: TRAC-251
ucagcugguacacggcagggu

SEQ ID NO: 49526 - RNA, 22 nt, Artificial Sequence
  Synthetic oligonucleotide: TRAC-252
cucagcugguacacggcagggu

SEQ ID NO: 49527 - RNA, 23 nt, Artificial Sequence
  Synthetic oligonucleotide: TRAC-253
ucucagcugguacacggcagggu

SEQ ID NO: 49528 - RNA, 24 nt, Artificial Sequence
  Synthetic oligonucleotide: TRAC-254
cucucagcugguacacggcagggu

SEQ ID NO: 49529 - RNA, 18 nt, Artificial Sequence
  Synthetic oligonucleotide: TRAC-255
cagacuugucacuggauu

SEQ ID NO: 49530 - RNA, 19 nt, Artificial Sequence
  Synthetic oligonucleotide: TRAC-256
acagacuugucacuggauu

SEQ ID NO: 49531 - RNA, 20 nt, Artificial Sequence
  Synthetic oligonucleotide: TRAC-257
gacagacuugucacuggauu

SEQ ID NO: 49532 - RNA, 18 nt, Artificial Sequence
  Synthetic oligonucleotide: TRAC-258
cacggcagggucaggguu

SEQ ID NO: 49533 - RNA, 19 nt, Artificial Sequence
  Synthetic oligonucleotide: TRAC-259
acacggcagggucaggguu

SEQ ID NO: 49534 - RNA, 20 nt, Artificial Sequence
  Synthetic oligonucleotide: TRAC-260
uacacggcagggucaggguu

SEQ ID NO: 49535 - RNA, 18 nt, Artificial Sequence
  Synthetic oligonucleotide: TRAC-261
uucaaaaccugucaguga

SEQ ID NO: 49536 - RNA, 19 nt, Artificial Sequence
  Synthetic oligonucleotide: TRAC-262
uuucaaaaccugucaguga

SEQ ID NO: 49537 - RNA, 20 nt, Artificial Sequence
  Synthetic oligonucleotide: TRAC-263
cuuucaaaaccugucaguga

SEQ ID NO: 49538 - RNA, 18 nt, Artificial Sequence
  Synthetic oligonucleotide: TRAC-264
cuuugaaacagguaagac

SEQ ID NO: 49539 - RNA, 19 nt, Artificial Sequence
  Synthetic oligonucleotide: TRAC-265
gcuuugaaacagguaagac

SEQ ID NO: 49540 - RNA, 20 nt, Artificial Sequence
  Synthetic oligonucleotide: TRAC-101
agcuuugaaacagguaagac

SEQ ID NO: 49541 - RNA, 18 nt, Artificial Sequence
  Synthetic oligonucleotide: TRAC-266
guaagacaggggucuagc

SEQ ID NO: 49542 - RNA, 19 nt, Artificial Sequence
  Synthetic oligonucleotide: TRAC-267
gguaagacaggggucuagc

SEQ ID NO: 49543 - RNA, 20 nt, Artificial Sequence
  Synthetic oligonucleotide: TRAC-268
agguaagacaggggucuagc

SEQ ID NO: 49544 - RNA, 18 nt, Artificial Sequence
  Synthetic oligonucleotide: TRAC-269
gggccuugaagcugggag

SEQ ID NO: 49545 - RNA, 19 nt, Artificial Sequence
  Synthetic oligonucleotide: TRAC-270
ggggccuugaagcugggag

SEQ ID NO: 49546 - RNA, 20 nt, Artificial Sequence
  Synthetic oligonucleotide: TRAC-121
aggggccuugaagcugggag

SEQ ID NO: 49547 - RNA, 18 nt, Artificial Sequence
  Synthetic oligonucleotide: TRAC-271
uccuccuccugaaagugg

SEQ ID NO: 49548 - RNA, 19 nt, Artificial Sequence
  Synthetic oligonucleotide: TRAC-272
auccuccuccugaaagugg

SEQ ID NO: 49549 - RNA, 20 nt, Artificial Sequence
  Synthetic oligonucleotide: TRAC-273
aauccuccuccugaaagugg

SEQ ID NO: 49550 - RNA, 18 nt, Artificial Sequence
  Synthetic oligonucleotide: TRAC-274
gugaggggccuugaagcu

SEQ ID NO: 49551 - RNA, 19 nt, Artificial Sequence
  Synthetic oligonucleotide: TRAC-275
ggugaggggccuugaagcu

SEQ ID NO: 49552 - RNA, 20 nt, Artificial Sequence
  Synthetic oligonucleotide: TRAC-135
aggugaggggccuugaagcu

SEQ ID NO: 49553 - RNA, 18 nt, Artificial Sequence
  Synthetic oligonucleotide: TRAC-276
acaaaugugucacaaagu

SEQ ID NO: 49554 - RNA, 19 nt, Artificial Sequence
  Synthetic oligonucleotide: TRAC-277
aacaaaugugucacaaagu

SEQ ID NO: 49555 - RNA, 20 nt, Artificial Sequence
  Synthetic oligonucleotide: TRAC-278
aaacaaaugugucacaaagu

SEQ ID NO: 49556 - RNA, 18 nt, Artificial Sequence
  Synthetic oligonucleotide: TRAC-279
ucacaggaacuuucuaaa

SEQ ID NO: 49557 - RNA, 19 nt, Artificial Sequence
  Synthetic oligonucleotide: TRAC-280
aucacaggaacuuucuaaa

SEQ ID NO: 49558 - RNA, 20 nt, Artificial Sequence
  Synthetic oligonucleotide: TRAC-88
caucacaggaacuuucuaaa

SEQ ID NO: 49559 - RNA, 21 nt, Artificial Sequence
  Synthetic oligonucleotide: TRAC-281
acaucacaggaacuuucuaaa
